United States Patent Application Publication US 2019/0048337 A1 - sequence listing, part 3

SEQ ID NO: 64642 - RNA, 20 nt, Artificial Sequence
  Synthetic
uagccucuccuuugacaccu

SEQ ID NO: 64643 - RNA, 21 nt, Artificial Sequence
  Synthetic
auagccucuccuuugacaccu

SEQ ID NO: 64644 - RNA, 22 nt, Artificial Sequence
  Synthetic
cauagccucuccuuugacaccu

SEQ ID NO: 64645 - RNA, 23 nt, Artificial Sequence
  Synthetic
acauagccucuccuuugacaccu

SEQ ID NO: 64646 - RNA, 24 nt, Artificial Sequence
  Synthetic
cacauagccucuccuuugacaccu

SEQ ID NO: 64647 - RNA, 19 nt, Artificial Sequence
  Synthetic
uguacaucugaguacaccu

SEQ ID NO: 64648 - RNA, 20 nt, Artificial Sequence
  Synthetic
uuguacaucugaguacaccu

SEQ ID NO: 64649 - RNA, 21 nt, Artificial Sequence
  Synthetic
auuguacaucugaguacaccu

SEQ ID NO: 64650 - RNA, 22 nt, Artificial Sequence
  Synthetic
aauuguacaucugaguacaccu

SEQ ID NO: 64651 - RNA, 24 nt, Artificial Sequence
  Synthetic
ugaauuguacaucugaguacaccu

SEQ ID NO: 64652 - RNA, 18 nt, Artificial Sequence
  Synthetic
agagaaaagauaccaccu

SEQ ID NO: 64653 - RNA, 19 nt, Artificial Sequence
  Synthetic
cagagaaaagauaccaccu

SEQ ID NO: 64654 - RNA, 21 nt, Artificial Sequence
  Synthetic
agcagagaaaagauaccaccu

SEQ ID NO: 64655 - RNA, 22 nt, Artificial Sequence
  Synthetic
uagcagagaaaagauaccaccu

SEQ ID NO: 64656 - RNA, 23 nt, Artificial Sequence
  Synthetic
auagcagagaaaagauaccaccu

SEQ ID NO: 64657 - RNA, 24 nt, Artificial Sequence
  Synthetic
aauagcagagaaaagauaccaccu

SEQ ID NO: 64658 - RNA, 18 nt, Artificial Sequence
  Synthetic
acuuucuaauguccaccu

SEQ ID NO: 64659 - RNA, 20 nt, Artificial Sequence
  Synthetic
agacuuucuaauguccaccu

SEQ ID NO: 64660 - RNA, 22 nt, Artificial Sequence
  Synthetic
agagacuuucuaauguccaccu

SEQ ID NO: 64661 - RNA, 23 nt, Artificial Sequence
  Synthetic
aagagacuuucuaauguccaccu

SEQ ID NO: 64662 - RNA, 24 nt, Artificial Sequence
  Synthetic
caagagacuuucuaauguccaccu

SEQ ID NO: 64663 - RNA, 21 nt, Artificial Sequence
  Synthetic
uccagagcacagacaucaccu

SEQ ID NO: 64664 - RNA, 24 nt, Artificial Sequence
  Synthetic
ugguccagagcacagacaucaccu

SEQ ID NO: 64665 - RNA, 18 nt, Artificial Sequence
  Synthetic
cuggaauagguaucaccu

SEQ ID NO: 64666 - RNA, 20 nt, Artificial Sequence
  Synthetic
ugcuggaauagguaucaccu

SEQ ID NO: 64667 - RNA, 23 nt, Artificial Sequence
  Synthetic
cggugcuggaauagguaucaccu

SEQ ID NO: 64668 - RNA, 24 nt, Artificial Sequence
  Synthetic
acggugcuggaauagguaucaccu

SEQ ID NO: 64669 - RNA, 18 nt, Artificial Sequence
  Synthetic
cuuggauguuuaucaccu

SEQ ID NO: 64670 - RNA, 21 nt, Artificial Sequence
  Synthetic
uggcuuggauguuuaucaccu

SEQ ID NO: 64671 - RNA, 22 nt, Artificial Sequence
  Synthetic
auggcuuggauguuuaucaccu

SEQ ID NO: 64672 - RNA, 24 nt, Artificial Sequence
  Synthetic
agauggcuuggauguuuaucaccu

SEQ ID NO: 64673 - RNA, 22 nt, Artificial Sequence
  Synthetic
uguauacagaugcuccucaccu

SEQ ID NO: 64674 - RNA, 23 nt, Artificial Sequence
  Synthetic
uuguauacagaugcuccucaccu

SEQ ID NO: 64675 - RNA, 24 nt, Artificial Sequence
  Synthetic
auuguauacagaugcuccucaccu

SEQ ID NO: 64676 - RNA, 18 nt, Artificial Sequence
  Synthetic
aaaaugggauagucaccu

SEQ ID NO: 64677 - RNA, 21 nt, Artificial Sequence
  Synthetic
uggaaaaugggauagucaccu

SEQ ID NO: 64678 - RNA, 22 nt, Artificial Sequence
  Synthetic
uuggaaaaugggauagucaccu

SEQ ID NO: 64679 - RNA, 23 nt, Artificial Sequence
  Synthetic
uuuggaaaaugggauagucaccu

SEQ ID NO: 64680 - RNA, 24 nt, Artificial Sequence
  Synthetic
auuuggaaaaugggauagucaccu

SEQ ID NO: 64681 - RNA, 21 nt, Artificial Sequence
  Synthetic
uaagcaaauucuaaaagaccu

SEQ ID NO: 64682 - RNA, 22 nt, Artificial Sequence
  Synthetic
uuaagcaaauucuaaaagaccu

SEQ ID NO: 64683 - RNA, 23 nt, Artificial Sequence
  Synthetic
uuuaagcaaauucuaaaagaccu

SEQ ID NO: 64684 - RNA, 24 nt, Artificial Sequence
  Synthetic
auuuaagcaaauucuaaaagaccu

SEQ ID NO: 64685 - RNA, 18 nt, Artificial Sequence
  Synthetic
aggaaggcagcaagaccu

SEQ ID NO: 64686 - RNA, 19 nt, Artificial Sequence
  Synthetic
uaggaaggcagcaagaccu

SEQ ID NO: 64687 - RNA, 20 nt, Artificial Sequence
  Synthetic
uuaggaaggcagcaagaccu

SEQ ID NO: 64688 - RNA, 21 nt, Artificial Sequence
  Synthetic
cuuaggaaggcagcaagaccu

SEQ ID NO: 64689 - RNA, 22 nt, Artificial Sequence
  Synthetic
acuuaggaaggcagcaagaccu

SEQ ID NO: 64690 - RNA, 18 nt, Artificial Sequence
  Synthetic
uuuucuggugcgagaccu

SEQ ID NO: 64691 - RNA, 19 nt, Artificial Sequence
  Synthetic
uuuuucuggugcgagaccu

SEQ ID NO: 64692 - RNA, 20 nt, Artificial Sequence
  Synthetic
auuuuucuggugcgagaccu

SEQ ID NO: 64693 - RNA, 22 nt, Artificial Sequence
  Synthetic
ugauuuuucuggugcgagaccu

SEQ ID NO: 64694 - RNA, 23 nt, Artificial Sequence
  Synthetic
uugauuuuucuggugcgagaccu

SEQ ID NO: 64695 - RNA, 24 nt, Artificial Sequence
  Synthetic
uuugauuuuucuggugcgagaccu

SEQ ID NO: 64696 - RNA, 18 nt, Artificial Sequence
  Synthetic
aucaaccaaaggagaccu

SEQ ID NO: 64697 - RNA, 19 nt, Artificial Sequence
  Synthetic
uaucaaccaaaggagaccu

SEQ ID NO: 64698 - RNA, 20 nt, Artificial Sequence
  Synthetic
uuaucaaccaaaggagaccu

SEQ ID NO: 64699 - RNA, 21 nt, Artificial Sequence
  Synthetic
cuuaucaaccaaaggagaccu

SEQ ID NO: 64700 - RNA, 22 nt, Artificial Sequence
  Synthetic
ucuuaucaaccaaaggagaccu

SEQ ID NO: 64701 - RNA, 23 nt, Artificial Sequence
  Synthetic
uucuuaucaaccaaaggagaccu

SEQ ID NO: 64702 - RNA, 24 nt, Artificial Sequence
  Synthetic
uuucuuaucaaccaaaggagaccu

SEQ ID NO: 64703 - RNA, 21 nt, Artificial Sequence
  Synthetic
acagacacaagagggagaccu

SEQ ID NO: 64704 - RNA, 23 nt, Artificial Sequence
  Synthetic
ugacagacacaagagggagaccu

SEQ ID NO: 64705 - RNA, 24 nt, Artificial Sequence
  Synthetic
cugacagacacaagagggagaccu

SEQ ID NO: 64706 - RNA, 18 nt, Artificial Sequence
  Synthetic
agcuguggggugagaccu

SEQ ID NO: 64707 - RNA, 19 nt, Artificial Sequence
  Synthetic
uagcuguggggugagaccu

SEQ ID NO: 64708 - RNA, 22 nt, Artificial Sequence
  Synthetic
agguagcuguggggugagaccu

SEQ ID NO: 64709 - RNA, 23 nt, Artificial Sequence
  Synthetic
aagguagcuguggggugagaccu

SEQ ID NO: 64710 - RNA, 24 nt, Artificial Sequence
  Synthetic
uaagguagcuguggggugagaccu

SEQ ID NO: 64711 - RNA, 19 nt, Artificial Sequence
  Synthetic
uggaucuguugggcgaccu

SEQ ID NO: 64712 - RNA, 21 nt, Artificial Sequence
  Synthetic
uguggaucuguugggcgaccu

SEQ ID NO: 64713 - RNA, 24 nt, Artificial Sequence
  Synthetic
agguguggaucuguugggcgaccu

SEQ ID NO: 64714 - RNA, 18 nt, Artificial Sequence
  Synthetic
agauuugccguaggaccu

SEQ ID NO: 64715 - RNA, 19 nt, Artificial Sequence
  Synthetic
aagauuugccguaggaccu

SEQ ID NO: 64716 - RNA, 20 nt, Artificial Sequence
  Synthetic
aaagauuugccguaggaccu

SEQ ID NO: 64717 - RNA, 21 nt, Artificial Sequence
  Synthetic
uaaagauuugccguaggaccu

SEQ ID NO: 64718 - RNA, 23 nt, Artificial Sequence
  Synthetic
uguaaagauuugccguaggaccu

SEQ ID NO: 64719 - RNA, 24 nt, Artificial Sequence
  Synthetic
uuguaaagauuugccguaggaccu

SEQ ID NO: 64720 - RNA, 18 nt, Artificial Sequence
  Synthetic
acagauaggguaggaccu

SEQ ID NO: 64721 - RNA, 19 nt, Artificial Sequence
  Synthetic
uacagauaggguaggaccu

SEQ ID NO: 64722 - RNA, 20 nt, Artificial Sequence
  Synthetic
uuacagauaggguaggaccu

SEQ ID NO: 64723 - RNA, 22 nt, Artificial Sequence
  Synthetic
aguuacagauaggguaggaccu

SEQ ID NO: 64724 - RNA, 23 nt, Artificial Sequence
  Synthetic
caguuacagauaggguaggaccu

SEQ ID NO: 64725 - RNA, 24 nt, Artificial Sequence
  Synthetic
ucaguuacagauaggguaggaccu

SEQ ID NO: 64726 - RNA, 18 nt, Artificial Sequence
  Synthetic
ucaagcuagaagggaccu

SEQ ID NO: 64727 - RNA, 20 nt, Artificial Sequence
  Synthetic
agucaagcuagaagggaccu

SEQ ID NO: 64728 - RNA, 21 nt, Artificial Sequence
  Synthetic
cagucaagcuagaagggaccu

SEQ ID NO: 64729 - RNA, 22 nt, Artificial Sequence
  Synthetic
acagucaagcuagaagggaccu

SEQ ID NO: 64730 - RNA, 23 nt, Artificial Sequence
  Synthetic
aacagucaagcuagaagggaccu

SEQ ID NO: 64731 - RNA, 18 nt, Artificial Sequence
  Synthetic
aaugaaaaauugggaccu

SEQ ID NO: 64732 - RNA, 19 nt, Artificial Sequence
  Synthetic
uaaugaaaaauugggaccu

SEQ ID NO: 64733 - RNA, 20 nt, Artificial Sequence
  Synthetic
auaaugaaaaauugggaccu

SEQ ID NO: 64734 - RNA, 22 nt, Artificial Sequence
  Synthetic
agauaaugaaaaauugggaccu

SEQ ID NO: 64735 - RNA, 23 nt, Artificial Sequence
  Synthetic
aagauaaugaaaaauugggaccu

SEQ ID NO: 64736 - RNA, 24 nt, Artificial Sequence
  Synthetic
caagauaaugaaaaauugggaccu

SEQ ID NO: 64737 - RNA, 18 nt, Artificial Sequence
  Synthetic
acacaaugagaaugaccu

SEQ ID NO: 64738 - RNA, 20 nt, Artificial Sequence
  Synthetic
agacacaaugagaaugaccu

SEQ ID NO: 64739 - RNA, 22 nt, Artificial Sequence
  Synthetic
agagacacaaugagaaugaccu

SEQ ID NO: 64740 - RNA, 23 nt, Artificial Sequence
  Synthetic
aagagacacaaugagaaugaccu

SEQ ID NO: 64741 - RNA, 18 nt, Artificial Sequence
  Synthetic
uagcuuauugucugaccu

SEQ ID NO: 64742 - RNA, 19 nt, Artificial Sequence
  Synthetic
cuagcuuauugucugaccu

SEQ ID NO: 64743 - RNA, 20 nt, Artificial Sequence
  Synthetic
acuagcuuauugucugaccu

SEQ ID NO: 64744 - RNA, 21 nt, Artificial Sequence
  Synthetic
uacuagcuuauugucugaccu

SEQ ID NO: 64745 - RNA, 22 nt, Artificial Sequence
  Synthetic
uuacuagcuuauugucugaccu

SEQ ID NO: 64746 - RNA, 23 nt, Artificial Sequence
  Synthetic
cuuacuagcuuauugucugaccu

SEQ ID NO: 64747 - RNA, 24 nt, Artificial Sequence
  Synthetic
acuuacuagcuuauugucugaccu

SEQ ID NO: 64748 - RNA, 18 nt, Artificial Sequence
  Synthetic
auauauguauucugaccu

SEQ ID NO: 64749 - RNA, 19 nt, Artificial Sequence
  Synthetic
aauauauguauucugaccu

SEQ ID NO: 64750 - RNA, 20 nt, Artificial Sequence
  Synthetic
uaauauauguauucugaccu

SEQ ID NO: 64751 - RNA, 21 nt, Artificial Sequence
  Synthetic
cuaauauauguauucugaccu

SEQ ID NO: 64752 - RNA, 22 nt, Artificial Sequence
  Synthetic
ucuaauauauguauucugaccu

SEQ ID NO: 64753 - RNA, 23 nt, Artificial Sequence
  Synthetic
aucuaauauauguauucugaccu

SEQ ID NO: 64754 - RNA, 24 nt, Artificial Sequence
  Synthetic
aaucuaauauauguauucugaccu

SEQ ID NO: 64755 - RNA, 18 nt, Artificial Sequence
  Synthetic
agagauagaaauugaccu

SEQ ID NO: 64756 - RNA, 19 nt, Artificial Sequence
  Synthetic
aagagauagaaauugaccu

SEQ ID NO: 64757 - RNA, 20 nt, Artificial Sequence
  Synthetic
aaagagauagaaauugaccu

SEQ ID NO: 64758 - RNA, 21 nt, Artificial Sequence
  Synthetic
aaaagagauagaaauugaccu

SEQ ID NO: 64759 - RNA, 22 nt, Artificial Sequence
  Synthetic
uaaaagagauagaaauugaccu

SEQ ID NO: 64760 - RNA, 23 nt, Artificial Sequence
  Synthetic
auaaaagagauagaaauugaccu

SEQ ID NO: 64761 - RNA, 24 nt, Artificial Sequence
  Synthetic
aauaaaagagauagaaauugaccu

SEQ ID NO: 64762 - RNA, 18 nt, Artificial Sequence
  Synthetic
auuaaugauuggcuaccu

SEQ ID NO: 64763 - RNA, 19 nt, Artificial Sequence
  Synthetic
aauuaaugauuggcuaccu

SEQ ID NO: 64764 - RNA, 20 nt, Artificial Sequence
  Synthetic
aaauuaaugauuggcuaccu

SEQ ID NO: 64765 - RNA, 21 nt, Artificial Sequence
  Synthetic
aaaauuaaugauuggcuaccu

SEQ ID NO: 64766 - RNA, 22 nt, Artificial Sequence
  Synthetic
aaaaauuaaugauuggcuaccu

SEQ ID NO: 64767 - RNA, 23 nt, Artificial Sequence
  Synthetic
uaaaaauuaaugauuggcuaccu

SEQ ID NO: 64768 - RNA, 24 nt, Artificial Sequence
  Synthetic
auaaaaauuaaugauuggcuaccu

SEQ ID NO: 64769 - RNA, 19 nt, Artificial Sequence
  Synthetic
cgucuaacuacaaguaccu

SEQ ID NO: 64770 - RNA, 21 nt, Artificial Sequence
  Synthetic
agcgucuaacuacaaguaccu

SEQ ID NO: 64771 - RNA, 22 nt, Artificial Sequence
  Synthetic
aagcgucuaacuacaaguaccu

SEQ ID NO: 64772 - RNA, 24 nt, Artificial Sequence
  Synthetic
ugaagcgucuaacuacaaguaccu

SEQ ID NO: 64773 - RNA, 18 nt, Artificial Sequence
  Synthetic
auugaauccccauuaccu

SEQ ID NO: 64774 - RNA, 19 nt, Artificial Sequence
  Synthetic
cauugaauccccauuaccu

SEQ ID NO: 64775 - RNA, 20 nt, Artificial Sequence
  Synthetic
ucauugaauccccauuaccu

SEQ ID NO: 64776 - RNA, 21 nt, Artificial Sequence
  Synthetic
uucauugaauccccauuaccu

SEQ ID NO: 64777 - RNA, 22 nt, Artificial Sequence
  Synthetic
uuucauugaauccccauuaccu

SEQ ID NO: 64778 - RNA, 23 nt, Artificial Sequence
  Synthetic
uuuucauugaauccccauuaccu

SEQ ID NO: 64779 - RNA, 24 nt, Artificial Sequence
  Synthetic
auuuucauugaauccccauuaccu

SEQ ID NO: 64780 - RNA, 18 nt, Artificial Sequence
  Synthetic
caauaguguaccuuaccu

SEQ ID NO: 64781 - RNA, 19 nt, Artificial Sequence
  Synthetic
ucaauaguguaccuuaccu

SEQ ID NO: 64782 - RNA, 20 nt, Artificial Sequence
  Synthetic
aucaauaguguaccuuaccu

SEQ ID NO: 64783 - RNA, 21 nt, Artificial Sequence
  Synthetic
aaucaauaguguaccuuaccu

SEQ ID NO: 64784 - RNA, 22 nt, Artificial Sequence
  Synthetic
aaaucaauaguguaccuuaccu

SEQ ID NO: 64785 - RNA, 24 nt, Artificial Sequence
  Synthetic
ugaaaucaauaguguaccuuaccu

SEQ ID NO: 64786 - RNA, 18 nt, Artificial Sequence
  Synthetic
uccgggcaaggguuaccu

SEQ ID NO: 64787 - RNA, 19 nt, Artificial Sequence
  Synthetic
auccgggcaaggguuaccu

SEQ ID NO: 64788 - RNA, 20 nt, Artificial Sequence
  Synthetic
aauccgggcaaggguuaccu

SEQ ID NO: 64789 - RNA, 22 nt, Artificial Sequence
  Synthetic
ugaauccgggcaaggguuaccu

SEQ ID NO: 64790 - RNA, 18 nt, Artificial Sequence
  Synthetic
uuaagaaagugguuaccu

SEQ ID NO: 64791 - RNA, 19 nt, Artificial Sequence
  Synthetic
auuaagaaagugguuaccu

SEQ ID NO: 64792 - RNA, 20 nt, Artificial Sequence
  Synthetic
aauuaagaaagugguuaccu

SEQ ID NO: 64793 - RNA, 22 nt, Artificial Sequence
  Synthetic
agaauuaagaaagugguuaccu

SEQ ID NO: 64794 - RNA, 23 nt, Artificial Sequence
  Synthetic
uagaauuaagaaagugguuaccu

SEQ ID NO: 64795 - RNA, 24 nt, Artificial Sequence
  Synthetic
auagaauuaagaaagugguuaccu

SEQ ID NO: 64796 - RNA, 18 nt, Artificial Sequence
  Synthetic
ugauggcucauguuaccu

SEQ ID NO: 64797 - RNA, 19 nt, Artificial Sequence
  Synthetic
augauggcucauguuaccu

SEQ ID NO: 64798 - RNA, 20 nt, Artificial Sequence
  Synthetic
caugauggcucauguuaccu

SEQ ID NO: 64799 - RNA, 21 nt, Artificial Sequence
  Synthetic
acaugauggcucauguuaccu

SEQ ID NO: 64800 - RNA, 22 nt, Artificial Sequence
  Synthetic
cacaugauggcucauguuaccu

SEQ ID NO: 64801 - RNA, 18 nt, Artificial Sequence
  Synthetic
uuguaauuaacuuuaccu

SEQ ID NO: 64802 - RNA, 19 nt, Artificial Sequence
  Synthetic
uuuguaauuaacuuuaccu

SEQ ID NO: 64803 - RNA, 20 nt, Artificial Sequence
  Synthetic
cuuuguaauuaacuuuaccu

SEQ ID NO: 64804 - RNA, 21 nt, Artificial Sequence
  Synthetic
acuuuguaauuaacuuuaccu

SEQ ID NO: 64805 - RNA, 24 nt, Artificial Sequence
  Synthetic
uggacuuuguaauuaacuuuaccu

SEQ ID NO: 64806 - RNA, 21 nt, Artificial Sequence
  Synthetic
acaucgccuuuucugaacccu

SEQ ID NO: 64807 - RNA, 22 nt, Artificial Sequence
  Synthetic
cacaucgccuuuucugaacccu

SEQ ID NO: 64808 - RNA, 23 nt, Artificial Sequence
  Synthetic
ccacaucgccuuuucugaacccu

SEQ ID NO: 64809 - RNA, 24 nt, Artificial Sequence
  Synthetic
cccacaucgccuuuucugaacccu

SEQ ID NO: 64810 - RNA, 18 nt, Artificial Sequence
  Synthetic
cuucuuuggcaucacccu

SEQ ID NO: 64811 - RNA, 19 nt, Artificial Sequence
  Synthetic
ccuucuuuggcaucacccu

SEQ ID NO: 64812 - RNA, 20 nt, Artificial Sequence
  Synthetic
uccuucuuuggcaucacccu

SEQ ID NO: 64813 - RNA, 21 nt, Artificial Sequence
  Synthetic
cuccuucuuuggcaucacccu

SEQ ID NO: 64814 - RNA, 22 nt, Artificial Sequence
  Synthetic
ccuccuucuuuggcaucacccu

SEQ ID NO: 64815 - RNA, 23 nt, Artificial Sequence
  Synthetic
uccuccuucuuuggcaucacccu

SEQ ID NO: 64816 - RNA, 24 nt, Artificial Sequence
  Synthetic
uuccuccuucuuuggcaucacccu

SEQ ID NO: 64817 - RNA, 18 nt, Artificial Sequence
  Synthetic
cuugggaaauaauacccu

SEQ ID NO: 64818 - RNA, 19 nt, Artificial Sequence
  Synthetic
ucuugggaaauaauacccu

SEQ ID NO: 64819 - RNA, 20 nt, Artificial Sequence
  Synthetic
uucuugggaaauaauacccu

SEQ ID NO: 64820 - RNA, 22 nt, Artificial Sequence
  Synthetic
aguucuugggaaauaauacccu

SEQ ID NO: 64821 - RNA, 23 nt, Artificial Sequence
  Synthetic
caguucuugggaaauaauacccu

SEQ ID NO: 64822 - RNA, 24 nt, Artificial Sequence
  Synthetic
ucaguucuugggaaauaauacccu

SEQ ID NO: 64823 - RNA, 18 nt, Artificial Sequence
  Synthetic
aauccuugaagauacccu

SEQ ID NO: 64824 - RNA, 19 nt, Artificial Sequence
  Synthetic
aaauccuugaagauacccu

SEQ ID NO: 64825 - RNA, 21 nt, Artificial Sequence
  Synthetic
agaaauccuugaagauacccu

SEQ ID NO: 64826 - RNA, 22 nt, Artificial Sequence
  Synthetic
aagaaauccuugaagauacccu

SEQ ID NO: 64827 - RNA, 23 nt, Artificial Sequence
  Synthetic
aaagaaauccuugaagauacccu

SEQ ID NO: 64828 - RNA, 24 nt, Artificial Sequence
  Synthetic
aaaagaaauccuugaagauacccu

SEQ ID NO: 64829 - RNA, 19 nt, Artificial Sequence
  Synthetic
aggguaguagaguuacccu

SEQ ID NO: 64830 - RNA, 20 nt, Artificial Sequence
  Synthetic
aaggguaguagaguuacccu

SEQ ID NO: 64831 - RNA, 21 nt, Artificial Sequence
  Synthetic
uaaggguaguagaguuacccu

SEQ ID NO: 64832 - RNA, 22 nt, Artificial Sequence
  Synthetic
cuaaggguaguagaguuacccu

SEQ ID NO: 64833 - RNA, 23 nt, Artificial Sequence
  Synthetic
ccuaaggguaguagaguuacccu

SEQ ID NO: 64834 - RNA, 24 nt, Artificial Sequence
  Synthetic
uccuaaggguaguagaguuacccu

SEQ ID NO: 64835 - RNA, 18 nt, Artificial Sequence
  Synthetic
auuccucgucuuuacccu

SEQ ID NO: 64836 - RNA, 19 nt, Artificial Sequence
  Synthetic
aauuccucgucuuuacccu

SEQ ID NO: 64837 - RNA, 20 nt, Artificial Sequence
  Synthetic
caauuccucgucuuuacccu

SEQ ID NO: 64838 - RNA, 21 nt, Artificial Sequence
  Synthetic
ccaauuccucgucuuuacccu

SEQ ID NO: 64839 - RNA, 22 nt, Artificial Sequence
  Synthetic
cccaauuccucgucuuuacccu

SEQ ID NO: 64840 - RNA, 23 nt, Artificial Sequence
  Synthetic
ccccaauuccucgucuuuacccu

SEQ ID NO: 64841 - RNA, 24 nt, Artificial Sequence
  Synthetic
cccccaauuccucgucuuuacccu

SEQ ID NO: 64842 - RNA, 18 nt, Artificial Sequence
  Synthetic
uuucuuccaugaaccccu

SEQ ID NO: 64843 - RNA, 19 nt, Artificial Sequence
  Synthetic
uuuucuuccaugaaccccu

SEQ ID NO: 64844 - RNA, 20 nt, Artificial Sequence
  Synthetic
uuuuucuuccaugaaccccu

SEQ ID NO: 64845 - RNA, 21 nt, Artificial Sequence
  Synthetic
uuuuuucuuccaugaaccccu

SEQ ID NO: 64846 - RNA, 22 nt, Artificial Sequence
  Synthetic
uuuuuuucuuccaugaaccccu

SEQ ID NO: 64847 - RNA, 23 nt, Artificial Sequence
  Synthetic
auuuuuuucuuccaugaaccccu

SEQ ID NO: 64848 - RNA, 24 nt, Artificial Sequence
  Synthetic
aauuuuuuucuuccaugaaccccu

SEQ ID NO: 64849 - RNA, 18 nt, Artificial Sequence
  Synthetic
uagucauuuaucaccccu

SEQ ID NO: 64850 - RNA, 20 nt, Artificial Sequence
  Synthetic
uguagucauuuaucaccccu

SEQ ID NO: 64851 - RNA, 21 nt, Artificial Sequence
  Synthetic
cuguagucauuuaucaccccu

SEQ ID NO: 64852 - RNA, 22 nt, Artificial Sequence
  Synthetic
acuguagucauuuaucaccccu

SEQ ID NO: 64853 - RNA, 23 nt, Artificial Sequence
  Synthetic
aacuguagucauuuaucaccccu

SEQ ID NO: 64854 - RNA, 24 nt, Artificial Sequence
  Synthetic
aaacuguagucauuuaucaccccu

SEQ ID NO: 64855 - RNA, 19 nt, Artificial Sequence
  Synthetic
agaaauauccaugaccccu

SEQ ID NO: 64856 - RNA, 20 nt, Artificial Sequence
  Synthetic
aagaaauauccaugaccccu

SEQ ID NO: 64857 - RNA, 22 nt, Artificial Sequence
  Synthetic
ugaagaaauauccaugaccccu

SEQ ID NO: 64858 - RNA, 23 nt, Artificial Sequence
  Synthetic
uugaagaaauauccaugaccccu

SEQ ID NO: 64859 - RNA, 24 nt, Artificial Sequence
  Synthetic
uuugaagaaauauccaugaccccu

SEQ ID NO: 64860 - RNA, 21 nt, Artificial Sequence
  Synthetic
acacaaugacugugggccccu

SEQ ID NO: 64861 - RNA, 22 nt, Artificial Sequence
  Synthetic
aacacaaugacugugggccccu

SEQ ID NO: 64862 - RNA, 24 nt, Artificial Sequence
  Synthetic
agaacacaaugacugugggccccu

SEQ ID NO: 64863 - RNA, 18 nt, Artificial Sequence
  Synthetic
aaaugagucucugccccu

SEQ ID NO: 64864 - RNA, 19 nt, Artificial Sequence
  Synthetic
aaaaugagucucugccccu

SEQ ID NO: 64865 - RNA, 20 nt, Artificial Sequence
  Synthetic
caaaaugagucucugccccu

SEQ ID NO: 64866 - RNA, 21 nt, Artificial Sequence
  Synthetic
acaaaaugagucucugccccu

SEQ ID NO: 64867 - RNA, 22 nt, Artificial Sequence
  Synthetic
aacaaaaugagucucugccccu

SEQ ID NO: 64868 - RNA, 18 nt, Artificial Sequence
  Synthetic
uucaaauucaaguccccu

SEQ ID NO: 64869 - RNA, 19 nt, Artificial Sequence
  Synthetic
auucaaauucaaguccccu

SEQ ID NO: 64870 - RNA, 20 nt, Artificial Sequence
  Synthetic
uauucaaauucaaguccccu

SEQ ID NO: 64871 - RNA, 21 nt, Artificial Sequence
  Synthetic
uuauucaaauucaaguccccu

SEQ ID NO: 64872 - RNA, 22 nt, Artificial Sequence
  Synthetic
auuauucaaauucaaguccccu

SEQ ID NO: 64873 - RNA, 23 nt, Artificial Sequence
  Synthetic
uauuauucaaauucaaguccccu

SEQ ID NO: 64874 - RNA, 18 nt, Artificial Sequence
  Synthetic
cauauacuuacuuccccu

SEQ ID NO: 64875 - RNA, 20 nt, Artificial Sequence
  Synthetic
ugcauauacuuacuuccccu

SEQ ID NO: 64876 - RNA, 21 nt, Artificial Sequence
  Synthetic
aaaccugagaauauuuccccu

SEQ ID NO: 64877 - RNA, 23 nt, Artificial Sequence
  Synthetic
cgaaaccugagaauauuuccccu

SEQ ID NO: 64878 - RNA, 24 nt, Artificial Sequence
  Synthetic
ccgaaaccugagaauauuuccccu

SEQ ID NO: 64879 - RNA, 18 nt, Artificial Sequence
  Synthetic
aauagcuguagcagcccu

SEQ ID NO: 64880 - RNA, 19 nt, Artificial Sequence
  Synthetic
aaauagcuguagcagcccu

SEQ ID NO: 64881 - RNA, 20 nt, Artificial Sequence
  Synthetic
aaaauagcuguagcagcccu

SEQ ID NO: 64882 - RNA, 21 nt, Artificial Sequence
  Synthetic
aaaaauagcuguagcagcccu

SEQ ID NO: 64883 - RNA, 22 nt, Artificial Sequence
  Synthetic
aaaaaauagcuguagcagcccu

SEQ ID NO: 64884 - RNA, 23 nt, Artificial Sequence
  Synthetic
aaaaaaauagcuguagcagcccu

SEQ ID NO: 64885 - RNA, 24 nt, Artificial Sequence
  Synthetic
aaaaaaaauagcuguagcagcccu

SEQ ID NO: 64886 - RNA, 18 nt, Artificial Sequence
  Synthetic
agaaaagauguaugcccu

SEQ ID NO: 64887 - RNA, 19 nt, Artificial Sequence
  Synthetic
cagaaaagauguaugcccu

SEQ ID NO: 64888 - RNA, 21 nt, Artificial Sequence
  Synthetic
agcagaaaagauguaugcccu

SEQ ID NO: 64889 - RNA, 22 nt, Artificial Sequence
  Synthetic
aagcagaaaagauguaugcccu

SEQ ID NO: 64890 - RNA, 23 nt, Artificial Sequence
  Synthetic
aaagcagaaaagauguaugcccu

SEQ ID NO: 64891 - RNA, 24 nt, Artificial Sequence
  Synthetic
caaagcagaaaagauguaugcccu

SEQ ID NO: 64892 - RNA, 21 nt, Artificial Sequence
  Synthetic
aaguuucuugcaaacugcccu

SEQ ID NO: 64893 - RNA, 22 nt, Artificial Sequence
  Synthetic
uaaguuucuugcaaacugcccu

SEQ ID NO: 64894 - RNA, 23 nt, Artificial Sequence
  Synthetic
uuaaguuucuugcaaacugcccu

SEQ ID NO: 64895 - RNA, 24 nt, Artificial Sequence
  Synthetic
auuaaguuucuugcaaacugcccu

SEQ ID NO: 64896 - RNA, 18 nt, Artificial Sequence
  Synthetic
acaucuauuuucugcccu

SEQ ID NO: 64897 - RNA, 20 nt, Artificial Sequence
  Synthetic
ugacaucuauuuucugcccu

SEQ ID NO: 64898 - RNA, 21 nt, Artificial Sequence
  Synthetic
augacaucuauuuucugcccu

SEQ ID NO: 64899 - RNA, 23 nt, Artificial Sequence
  Synthetic
agaugacaucuauuuucugcccu

SEQ ID NO: 64900 - RNA, 24 nt, Artificial Sequence
  Synthetic
aagaugacaucuauuuucugcccu

SEQ ID NO: 64901 - RNA, 18 nt, Artificial Sequence
  Synthetic
ucuaaauuucauaucccu

SEQ ID NO: 64902 - RNA, 19 nt, Artificial Sequence
  Synthetic
aucuaaauuucauaucccu

SEQ ID NO: 64903 - RNA, 20 nt, Artificial Sequence
  Synthetic
aaucuaaauuucauaucccu

SEQ ID NO: 64904 - RNA, 22 nt, Artificial Sequence
  Synthetic
agaaucuaaauuucauaucccu

SEQ ID NO: 64905 - RNA, 23 nt, Artificial Sequence
  Synthetic
aagaaucuaaauuucauaucccu

SEQ ID NO: 64906 - RNA, 24 nt, Artificial Sequence
  Synthetic
caagaaucuaaauuucauaucccu

SEQ ID NO: 64907 - RNA, 18 nt, Artificial Sequence
  Synthetic
uagcuccacacagucccu

SEQ ID NO: 64908 - RNA, 19 nt, Artificial Sequence
  Synthetic
uuagcuccacacagucccu

SEQ ID NO: 64909 - RNA, 20 nt, Artificial Sequence
  Synthetic
cuuagcuccacacagucccu

SEQ ID NO: 64910 - RNA, 21 nt, Artificial Sequence
  Synthetic
ucuuagcuccacacagucccu

SEQ ID NO: 64911 - RNA, 23 nt, Artificial Sequence
  Synthetic
ugucuuagcuccacacagucccu

SEQ ID NO: 64912 - RNA, 24 nt, Artificial Sequence
  Synthetic
uugucuuagcuccacacagucccu

SEQ ID NO: 64913 - RNA, 18 nt, Artificial Sequence
  Synthetic
uuggauguguaugucccu

SEQ ID NO: 64914 - RNA, 20 nt, Artificial Sequence
  Synthetic
aguuggauguguaugucccu

SEQ ID NO: 64915 - RNA, 21 nt, Artificial Sequence
  Synthetic
uaguuggauguguaugucccu

SEQ ID NO: 64916 - RNA, 22 nt, Artificial Sequence
  Synthetic
uuaguuggauguguaugucccu

SEQ ID NO: 64917 - RNA, 23 nt, Artificial Sequence
  Synthetic
cuuaguuggauguguaugucccu

SEQ ID NO: 64918 - RNA, 24 nt, Artificial Sequence
  Synthetic
ucuuaguuggauguguaugucccu

SEQ ID NO: 64919 - RNA, 18 nt, Artificial Sequence
  Synthetic
uuugaugucuuguucccu

SEQ ID NO: 64920 - RNA, 19 nt, Artificial Sequence
  Synthetic
uuuugaugucuuguucccu

SEQ ID NO: 64921 - RNA, 20 nt, Artificial Sequence
  Synthetic
uuuuugaugucuuguucccu

SEQ ID NO: 64922 - RNA, 22 nt, Artificial Sequence
  Synthetic
uguuuuugaugucuuguucccu

SEQ ID NO: 64923 - RNA, 23 nt, Artificial Sequence
  Synthetic
uuguuuuugaugucuuguucccu

SEQ ID NO: 64924 - RNA, 24 nt, Artificial Sequence
  Synthetic
uuuguuuuugaugucuuguucccu

SEQ ID NO: 64925 - RNA, 21 nt, Artificial Sequence
  Synthetic
aaucaucauuuaaauuucccu

SEQ ID NO: 64926 - RNA, 22 nt, Artificial Sequence
  Synthetic
caaucaucauuuaaauuucccu

SEQ ID NO: 64927 - RNA, 23 nt, Artificial Sequence
  Synthetic
ucaaucaucauuuaaauuucccu

SEQ ID NO: 64928 - RNA, 24 nt, Artificial Sequence
  Synthetic
uucaaucaucauuuaaauuucccu

SEQ ID NO: 64929 - RNA, 18 nt, Artificial Sequence
  Synthetic
ccauaauaucaaaagccu

SEQ ID NO: 64930 - RNA, 22 nt, Artificial Sequence
  Synthetic
ugggccauaauaucaaaagccu

SEQ ID NO: 64931 - RNA, 23 nt, Artificial Sequence
  Synthetic
cugggccauaauaucaaaagccu

SEQ ID NO: 64932 - RNA, 24 nt, Artificial Sequence
  Synthetic
acugggccauaauaucaaaagccu

SEQ ID NO: 64933 - RNA, 19 nt, Artificial Sequence
  Synthetic
uguuucaaacuccaagccu

SEQ ID NO: 64934 - RNA, 20 nt, Artificial Sequence
  Synthetic
uuguuucaaacuccaagccu

SEQ ID NO: 64935 - RNA, 21 nt, Artificial Sequence
  Synthetic
cuuguuucaaacuccaagccu

SEQ ID NO: 64936 - RNA, 22 nt, Artificial Sequence
  Synthetic
acuuguuucaaacuccaagccu

SEQ ID NO: 64937 - RNA, 23 nt, Artificial Sequence
  Synthetic
cacuuguuucaaacuccaagccu

SEQ ID NO: 64938 - RNA, 24 nt, Artificial Sequence
  Synthetic
ccacuuguuucaaacuccaagccu

SEQ ID NO: 64939 - RNA, 19 nt, Artificial Sequence
  Synthetic
aguuuaagguaucaagccu

SEQ ID NO: 64940 - RNA, 20 nt, Artificial Sequence
  Synthetic
aaguuuaagguaucaagccu

SEQ ID NO: 64941 - RNA, 22 nt, Artificial Sequence
  Synthetic
ugaaguuuaagguaucaagccu

SEQ ID NO: 64942 - RNA, 23 nt, Artificial Sequence
  Synthetic
cugaaguuuaagguaucaagccu

SEQ ID NO: 64943 - RNA, 24 nt, Artificial Sequence
  Synthetic
ccugaaguuuaagguaucaagccu

SEQ ID NO: 64944 - RNA, 18 nt, Artificial Sequence
  Synthetic
uccuccaaagagaagccu

SEQ ID NO: 64945 - RNA, 19 nt, Artificial Sequence
  Synthetic
auccuccaaagagaagccu

SEQ ID NO: 64946 - RNA, 20 nt, Artificial Sequence
  Synthetic
aauccuccaaagagaagccu

SEQ ID NO: 64947 - RNA, 23 nt, Artificial Sequence
  Synthetic
uggaauccuccaaagagaagccu

SEQ ID NO: 64948 - RNA, 18 nt, Artificial Sequence
  Synthetic
auuuaaagagcuaagccu

SEQ ID NO: 64949 - RNA, 19 nt, Artificial Sequence
  Synthetic
cauuuaaagagcuaagccu

SEQ ID NO: 64950 - RNA, 20 nt, Artificial Sequence
  Synthetic
acauuuaaagagcuaagccu

SEQ ID NO: 64951 - RNA, 21 nt, Artificial Sequence
  Synthetic
cacauuuaaagagcuaagccu

SEQ ID NO: 64952 - RNA, 22 nt, Artificial Sequence
  Synthetic
ccacauuuaaagagcuaagccu

SEQ ID NO: 64953 - RNA, 23 nt, Artificial Sequence
  Synthetic
accacauuuaaagagcuaagccu

SEQ ID NO: 64954 - RNA, 24 nt, Artificial Sequence
  Synthetic
uaccacauuuaaagagcuaagccu

SEQ ID NO: 64955 - RNA, 18 nt, Artificial Sequence
  Synthetic
uuccuugaauuuaagccu

SEQ ID NO: 64956 - RNA, 19 nt, Artificial Sequence
  Synthetic
uuuccuugaauuuaagccu

SEQ ID NO: 64957 - RNA, 20 nt, Artificial Sequence
  Synthetic
auuuccuugaauuuaagccu

SEQ ID NO: 64958 - RNA, 21 nt, Artificial Sequence
  Synthetic
aauuuccuugaauuuaagccu

SEQ ID NO: 64959 - RNA, 22 nt, Artificial Sequence
  Synthetic
uaauuuccuugaauuuaagccu

SEQ ID NO: 64960 - RNA, 23 nt, Artificial Sequence
  Synthetic
auaauuuccuugaauuuaagccu

SEQ ID NO: 64961 - RNA, 24 nt, Artificial Sequence
  Synthetic
uauaauuuccuugaauuuaagccu

SEQ ID NO: 64962 - RNA, 18 nt, Artificial Sequence
  Synthetic
uuggaagcagcccagccu

SEQ ID NO: 64963 - RNA, 20 nt, Artificial Sequence
  Synthetic
uguuggaagcagcccagccu

SEQ ID NO: 64964 - RNA, 21 nt, Artificial Sequence
  Synthetic
uuguuggaagcagcccagccu

SEQ ID NO: 64965 - RNA, 22 nt, Artificial Sequence
  Synthetic
auuguuggaagcagcccagccu

SEQ ID NO: 64966 - RNA, 24 nt, Artificial Sequence
  Synthetic
ugauuguuggaagcagcccagccu

SEQ ID NO: 64967 - RNA, 18 nt, Artificial Sequence
  Synthetic
agacuuucuuuucagccu

SEQ ID NO: 64968 - RNA, 19 nt, Artificial Sequence
  Synthetic
aagacuuucuuuucagccu

SEQ ID NO: 64969 - RNA, 20 nt, Artificial Sequence
  Synthetic
uaagacuuucuuuucagccu

SEQ ID NO: 64970 - RNA, 21 nt, Artificial Sequence
  Synthetic
auaagacuuucuuuucagccu

SEQ ID NO: 64971 - RNA, 22 nt, Artificial Sequence
  Synthetic
cauaagacuuucuuuucagccu

SEQ ID NO: 64972 - RNA, 23 nt, Artificial Sequence
  Synthetic
acauaagacuuucuuuucagccu

SEQ ID NO: 64973 - RNA, 24 nt, Artificial Sequence
  Synthetic
uacauaagacuuucuuuucagccu

SEQ ID NO: 64974 - RNA, 18 nt, Artificial Sequence
  Synthetic
ucuuucuagaaagagccu

SEQ ID NO: 64975 - RNA, 19 nt, Artificial Sequence
  Synthetic
uucuuucuagaaagagccu

SEQ ID NO: 64976 - RNA, 20 nt, Artificial Sequence
  Synthetic
auucuuucuagaaagagccu

SEQ ID NO: 64977 - RNA, 21 nt, Artificial Sequence
  Synthetic
aauucuuucuagaaagagccu

SEQ ID NO: 64978 - RNA, 22 nt, Artificial Sequence
  Synthetic
uaauucuuucuagaaagagccu

SEQ ID NO: 64979 - RNA, 23 nt, Artificial Sequence
  Synthetic
uuaauucuuucuagaaagagccu

SEQ ID NO: 64980 - RNA, 24 nt, Artificial Sequence
  Synthetic
uuuaauucuuucuagaaagagccu

SEQ ID NO: 64981 - RNA, 18 nt, Artificial Sequence
  Synthetic
auucuagcuugggagccu

SEQ ID NO: 64982 - RNA, 19 nt, Artificial Sequence
  Synthetic
cauucuagcuugggagccu

SEQ ID NO: 64983 - RNA, 20 nt, Artificial Sequence
  Synthetic
ucauucuagcuugggagccu

SEQ ID NO: 64984 - RNA, 21 nt, Artificial Sequence
  Synthetic
uucauucuagcuugggagccu

SEQ ID NO: 64985 - RNA, 22 nt, Artificial Sequence
  Synthetic
cuucauucuagcuugggagccu

SEQ ID NO: 64986 - RNA, 23 nt, Artificial Sequence
  Synthetic
ucuucauucuagcuugggagccu

SEQ ID NO: 64987 - RNA, 24 nt, Artificial Sequence
  Synthetic
aucuucauucuagcuugggagccu

SEQ ID NO: 64988 - RNA, 18 nt, Artificial Sequence
  Synthetic
aagguuaaaucauagccu

SEQ ID NO: 64989 - RNA, 19 nt, Artificial Sequence
  Synthetic
caagguuaaaucauagccu

SEQ ID NO: 64990 - RNA, 20 nt, Artificial Sequence
  Synthetic
acaagguuaaaucauagccu

SEQ ID NO: 64991 - RNA, 22 nt, Artificial Sequence
  Synthetic
cgacaagguuaaaucauagccu

SEQ ID NO: 64992 - RNA, 24 nt, Artificial Sequence
  Synthetic
ugcgacaagguuaaaucauagccu

SEQ ID NO: 64993 - RNA, 18 nt, Artificial Sequence
  Synthetic
uuugaaaauucuuagccu

SEQ ID NO: 64994 - RNA, 19 nt, Artificial Sequence
  Synthetic
auuugaaaauucuuagccu

SEQ ID NO: 64995 - RNA, 20 nt, Artificial Sequence
  Synthetic
cauuugaaaauucuuagccu

SEQ ID NO: 64996 - RNA, 21 nt, Artificial Sequence
  Synthetic
acauuugaaaauucuuagccu

SEQ ID NO: 64997 - RNA, 22 nt, Artificial Sequence
  Synthetic
cacauuugaaaauucuuagccu

SEQ ID NO: 64998 - RNA, 24 nt, Artificial Sequence
  Synthetic
ugcacauuugaaaauucuuagccu

SEQ ID NO: 64999 - RNA, 18 nt, Artificial Sequence
  Synthetic
cggugguucccaaggccu

SEQ ID NO: 65000 - RNA, 20 nt, Artificial Sequence
  Synthetic
agcggugguucccaaggccu

SEQ ID NO: 65001 - RNA, 21 nt, Artificial Sequence
  Synthetic
aagcggugguucccaaggccu

SEQ ID NO: 65002 - RNA, 22 nt, Artificial Sequence
  Synthetic
aaagcggugguucccaaggccu

SEQ ID NO: 65003 - RNA, 23 nt, Artificial Sequence
  Synthetic
caaagcggugguucccaaggccu

SEQ ID NO: 65004 - RNA, 24 nt, Artificial Sequence
  Synthetic
ucaaagcggugguucccaaggccu

SEQ ID NO: 65005 - RNA, 19 nt, Artificial Sequence
  Synthetic
ugauguacccuucaggccu

SEQ ID NO: 65006 - RNA, 20 nt, Artificial Sequence
  Synthetic
uugauguacccuucaggccu

SEQ ID NO: 65007 - RNA, 21 nt, Artificial Sequence
  Synthetic
uuugauguacccuucaggccu

SEQ ID NO: 65008 - RNA, 22 nt, Artificial Sequence
  Synthetic
uuuugauguacccuucaggccu

SEQ ID NO: 65009 - RNA, 23 nt, Artificial Sequence
  Synthetic
auuuugauguacccuucaggccu

SEQ ID NO: 65010 - RNA, 24 nt, Artificial Sequence
  Synthetic
uauuuugauguacccuucaggccu

SEQ ID NO: 65011 - RNA, 18 nt, Artificial Sequence
  Synthetic
agagcuaggcugaggccu

SEQ ID NO: 65012 - RNA, 19 nt, Artificial Sequence
  Synthetic
uagagcuaggcugaggccu

SEQ ID NO: 65013 - RNA, 21 nt, Artificial Sequence
  Synthetic
aguagagcuaggcugaggccu

SEQ ID NO: 65014 - RNA, 22 nt, Artificial Sequence
  Synthetic
caguagagcuaggcugaggccu

SEQ ID NO: 65015 - RNA, 23 nt, Artificial Sequence
  Synthetic
ucaguagagcuaggcugaggccu

SEQ ID NO: 65016 - RNA, 24 nt, Artificial Sequence
  Synthetic
uucaguagagcuaggcugaggccu

SEQ ID NO: 65017 - RNA, 18 nt, Artificial Sequence
  Synthetic
uagaugagaagagggccu

SEQ ID NO: 65018 - RNA, 20 nt, Artificial Sequence
  Synthetic
cguagaugagaagagggccu

SEQ ID NO: 65019 - RNA, 21 nt, Artificial Sequence
  Synthetic
ucguagaugagaagagggccu

SEQ ID NO: 65020 - RNA, 22 nt, Artificial Sequence
  Synthetic
uucguagaugagaagagggccu

SEQ ID NO: 65021 - RNA, 24 nt, Artificial Sequence
  Synthetic
aguucguagaugagaagagggccu

SEQ ID NO: 65022 - RNA, 18 nt, Artificial Sequence
  Synthetic
uaugauguguauuggccu

SEQ ID NO: 65023 - RNA, 19 nt, Artificial Sequence
  Synthetic
auaugauguguauuggccu

SEQ ID NO: 65024 - RNA, 20 nt, Artificial Sequence
  Synthetic
aauaugauguguauuggccu

SEQ ID NO: 65025 - RNA, 21 nt, Artificial Sequence
  Synthetic
uaauaugauguguauuggccu

SEQ ID NO: 65026 - RNA, 23 nt, Artificial Sequence
  Synthetic
aguaauaugauguguauuggccu

SEQ ID NO: 65027 - RNA, 21 nt, Artificial Sequence
  Synthetic
aaaagucauugcuuaaugccu

SEQ ID NO: 65028 - RNA, 23 nt, Artificial Sequence
  Synthetic
ugaaaagucauugcuuaaugccu

SEQ ID NO: 65029 - RNA, 24 nt, Artificial Sequence
  Synthetic
uugaaaagucauugcuuaaugccu

SEQ ID NO: 65030 - RNA, 18 nt, Artificial Sequence
  Synthetic
cuuguaaaauacaugccu

SEQ ID NO: 65031 - RNA, 19 nt, Artificial Sequence
  Synthetic
ccuuguaaaauacaugccu

SEQ ID NO: 65032 - RNA, 20 nt, Artificial Sequence
  Synthetic
cccuuguaaaauacaugccu

SEQ ID NO: 65033 - RNA, 21 nt, Artificial Sequence
  Synthetic
acccuuguaaaauacaugccu

SEQ ID NO: 65034 - RNA, 22 nt, Artificial Sequence
  Synthetic
aacccuuguaaaauacaugccu

SEQ ID NO: 65035 - RNA, 18 nt, Artificial Sequence
  Synthetic
ccacuagaaggcaugccu

SEQ ID NO: 65036 - RNA, 19 nt, Artificial Sequence
  Synthetic
cccacuagaaggcaugccu

SEQ ID NO: 65037 - RNA, 21 nt, Artificial Sequence
  Synthetic
agcccacuagaaggcaugccu

SEQ ID NO: 65038 - RNA, 22 nt, Artificial Sequence
  Synthetic
cagcccacuagaaggcaugccu

SEQ ID NO: 65039 - RNA, 23 nt, Artificial Sequence
  Synthetic
ucagcccacuagaaggcaugccu

SEQ ID NO: 65040 - RNA, 18 nt, Artificial Sequence
  Synthetic
uauagcauaaucaugccu

SEQ ID NO: 65041 - RNA, 20 nt, Artificial Sequence
  Synthetic
aguauagcauaaucaugccu

SEQ ID NO: 65042 - RNA, 21 nt, Artificial Sequence
  Synthetic
aaguauagcauaaucaugccu

SEQ ID NO: 65043 - RNA, 22 nt, Artificial Sequence
  Synthetic
uaaguauagcauaaucaugccu

SEQ ID NO: 65044 - RNA, 23 nt, Artificial Sequence
  Synthetic
uuaaguauagcauaaucaugccu

SEQ ID NO: 65045 - RNA, 24 nt, Artificial Sequence
  Synthetic
auuaaguauagcauaaucaugccu

SEQ ID NO: 65046 - RNA, 18 nt, Artificial Sequence
  Synthetic
cauguaaagaauaugccu

SEQ ID NO: 65047 - RNA, 19 nt, Artificial Sequence
  Synthetic
acauguaaagaauaugccu

SEQ ID NO: 65048 - RNA, 20 nt, Artificial Sequence
  Synthetic
aacauguaaagaauaugccu

SEQ ID NO: 65049 - RNA, 21 nt, Artificial Sequence
  Synthetic
uaacauguaaagaauaugccu

SEQ ID NO: 65050 - RNA, 23 nt, Artificial Sequence
  Synthetic
aguaacauguaaagaauaugccu

SEQ ID NO: 65051 - RNA, 24 nt, Artificial Sequence
  Synthetic
caguaacauguaaagaauaugccu

SEQ ID NO: 65052 - RNA, 23 nt, Artificial Sequence
  Synthetic
uggccaggggcuggcugcugccu

SEQ ID NO: 65053 - RNA, 24 nt, Artificial Sequence
  Synthetic
uuggccaggggcuggcugcugccu

SEQ ID NO: 65054 - RNA, 18 nt, Artificial Sequence
  Synthetic
augucuaucuuucugccu

SEQ ID NO: 65055 - RNA, 19 nt, Artificial Sequence
  Synthetic
caugucuaucuuucugccu

SEQ ID NO: 65056 - RNA, 20 nt, Artificial Sequence
  Synthetic
ucaugucuaucuuucugccu

SEQ ID NO: 65057 - RNA, 21 nt, Artificial Sequence
  Synthetic
uucaugucuaucuuucugccu

SEQ ID NO: 65058 - RNA, 22 nt, Artificial Sequence
  Synthetic
auucaugucuaucuuucugccu

SEQ ID NO: 65059 - RNA, 23 nt, Artificial Sequence
  Synthetic
uauucaugucuaucuuucugccu

SEQ ID NO: 65060 - RNA, 24 nt, Artificial Sequence
  Synthetic
uuauucaugucuaucuuucugccu

SEQ ID NO: 65061 - RNA, 18 nt, Artificial Sequence
  Synthetic
ugcuuuaugucauugccu

SEQ ID NO: 65062 - RNA, 19 nt, Artificial Sequence
  Synthetic
augcuuuaugucauugccu

SEQ ID NO: 65063 - RNA, 20 nt, Artificial Sequence
  Synthetic
caugcuuuaugucauugccu

SEQ ID NO: 65064 - RNA, 21 nt, Artificial Sequence
  Synthetic
acaugcuuuaugucauugccu

SEQ ID NO: 65065 - RNA, 22 nt, Artificial Sequence
  Synthetic
aacaugcuuuaugucauugccu

SEQ ID NO: 65066 - RNA, 23 nt, Artificial Sequence
  Synthetic
aaacaugcuuuaugucauugccu

SEQ ID NO: 65067 - RNA, 24 nt, Artificial Sequence
  Synthetic
aaaacaugcuuuaugucauugccu

SEQ ID NO: 65068 - RNA, 18 nt, Artificial Sequence
  Synthetic
uauuaaaugcuauugccu

SEQ ID NO: 65069 - RNA, 20 nt, Artificial Sequence
  Synthetic
aguauuaaaugcuauugccu

SEQ ID NO: 65070 - RNA, 22 nt, Artificial Sequence
  Synthetic
ugaguauuaaaugcuauugccu

SEQ ID NO: 65071 - RNA, 23 nt, Artificial Sequence
  Synthetic
augaguauuaaaugcuauugccu

SEQ ID NO: 65072 - RNA, 24 nt, Artificial Sequence
  Synthetic
caugaguauuaaaugcuauugccu

SEQ ID NO: 65073 - RNA, 19 nt, Artificial Sequence
  Synthetic
uggaaagauguuauugccu

SEQ ID NO: 65074 - RNA, 20 nt, Artificial Sequence
  Synthetic
cuggaaagauguuauugccu

SEQ ID NO: 65075 - RNA, 21 nt, Artificial Sequence
  Synthetic
acuggaaagauguuauugccu

SEQ ID NO: 65076 - RNA, 22 nt, Artificial Sequence
  Synthetic
cacuggaaagauguuauugccu

SEQ ID NO: 65077 - RNA, 23 nt, Artificial Sequence
  Synthetic
acacuggaaagauguuauugccu

SEQ ID NO: 65078 - RNA, 24 nt, Artificial Sequence
  Synthetic
aacacuggaaagauguuauugccu

SEQ ID NO: 65079 - RNA, 18 nt, Artificial Sequence
  Synthetic
aggaguuucuuguugccu

SEQ ID NO: 65080 - RNA, 19 nt, Artificial Sequence
  Synthetic
aaggaguuucuuguugccu

SEQ ID NO: 65081 - RNA, 20 nt, Artificial Sequence
  Synthetic
caaggaguuucuuguugccu

SEQ ID NO: 65082 - RNA, 21 nt, Artificial Sequence
  Synthetic
ucaaggaguuucuuguugccu

SEQ ID NO: 65083 - RNA, 22 nt, Artificial Sequence
  Synthetic
cucaaggaguuucuuguugccu

SEQ ID NO: 65084 - RNA, 24 nt, Artificial Sequence
  Synthetic
ugcucaaggaguuucuuguugccu

SEQ ID NO: 65085 - RNA, 18 nt, Artificial Sequence
  Synthetic
uacuuuaugcaaaauccu

SEQ ID NO: 65086 - RNA, 19 nt, Artificial Sequence
  Synthetic
auacuuuaugcaaaauccu

SEQ ID NO: 65087 - RNA, 21 nt, Artificial Sequence
  Synthetic
agauacuuuaugcaaaauccu

SEQ ID NO: 65088 - RNA, 22 nt, Artificial Sequence
  Synthetic
aagauacuuuaugcaaaauccu

SEQ ID NO: 65089 - RNA, 23 nt, Artificial Sequence
  Synthetic
aaagauacuuuaugcaaaauccu

SEQ ID NO: 65090 - RNA, 24 nt, Artificial Sequence
  Synthetic
caaagauacuuuaugcaaaauccu

SEQ ID NO: 65091 - RNA, 18 nt, Artificial Sequence
  Synthetic
aauuggccaccaaauccu

SEQ ID NO: 65092 - RNA, 19 nt, Artificial Sequence
  Synthetic
uaauuggccaccaaauccu

SEQ ID NO: 65093 - RNA, 21 nt, Artificial Sequence
  Synthetic
uguaauuggccaccaaauccu

SEQ ID NO: 65094 - RNA, 22 nt, Artificial Sequence
  Synthetic
auguaauuggccaccaaauccu

SEQ ID NO: 65095 - RNA, 23 nt, Artificial Sequence
  Synthetic
cauguaauuggccaccaaauccu

SEQ ID NO: 65096 - RNA, 24 nt, Artificial Sequence
  Synthetic
acauguaauuggccaccaaauccu

SEQ ID NO: 65097 - RNA, 18 nt, Artificial Sequence
  Synthetic
aauguguaucuaaauccu

SEQ ID NO: 65098 - RNA, 19 nt, Artificial Sequence
  Synthetic
caauguguaucuaaauccu

SEQ ID NO: 65099 - RNA, 20 nt, Artificial Sequence
  Synthetic
acaauguguaucuaaauccu

SEQ ID NO: 65100 - RNA, 21 nt, Artificial Sequence
  Synthetic
aacaauguguaucuaaauccu

SEQ ID NO: 65101 - RNA, 22 nt, Artificial Sequence
  Synthetic
caacaauguguaucuaaauccu

SEQ ID NO: 65102 - RNA, 23 nt, Artificial Sequence
  Synthetic
ucaacaauguguaucuaaauccu

SEQ ID NO: 65103 - RNA, 24 nt, Artificial Sequence
  Synthetic
uucaacaauguguaucuaaauccu

SEQ ID NO: 65104 - RNA, 21 nt, Artificial Sequence
  Synthetic
agaaagggaaaagacaauccu

SEQ ID NO: 65105 - RNA, 22 nt, Artificial Sequence
  Synthetic
aagaaagggaaaagacaauccu

SEQ ID NO: 65106 - RNA, 23 nt, Artificial Sequence
  Synthetic
aaagaaagggaaaagacaauccu

SEQ ID NO: 65107 - RNA, 24 nt, Artificial Sequence
  Synthetic
uaaagaaagggaaaagacaauccu

SEQ ID NO: 65108 - RNA, 18 nt, Artificial Sequence
  Synthetic
uuucuuguauuuaauccu

SEQ ID NO: 65109 - RNA, 19 nt, Artificial Sequence
  Synthetic
uuuucuuguauuuaauccu

SEQ ID NO: 65110 - RNA, 20 nt, Artificial Sequence
  Synthetic
auuuucuuguauuuaauccu

SEQ ID NO: 65111 - RNA, 21 nt, Artificial Sequence
  Synthetic
uauuuucuuguauuuaauccu

SEQ ID NO: 65112 - RNA, 22 nt, Artificial Sequence
  Synthetic
auauuuucuuguauuuaauccu

SEQ ID NO: 65113 - RNA, 23 nt, Artificial Sequence
  Synthetic
aauauuuucuuguauuuaauccu

SEQ ID NO: 65114 - RNA, 24 nt, Artificial Sequence
  Synthetic
aaauauuuucuuguauuuaauccu

SEQ ID NO: 65115 - RNA, 18 nt, Artificial Sequence
  Synthetic
agaccucuccaucauccu

SEQ ID NO: 65116 - RNA, 19 nt, Artificial Sequence
  Synthetic
uagaccucuccaucauccu

SEQ ID NO: 65117 - RNA, 20 nt, Artificial Sequence
  Synthetic
cuagaccucuccaucauccu

SEQ ID NO: 65118 - RNA, 22 nt, Artificial Sequence
  Synthetic
ugcuagaccucuccaucauccu

SEQ ID NO: 65119 - RNA, 23 nt, Artificial Sequence
  Synthetic
uugcuagaccucuccaucauccu

SEQ ID NO: 65120 - RNA, 24 nt, Artificial Sequence
  Synthetic
auugcuagaccucuccaucauccu

SEQ ID NO: 65121 - RNA, 18 nt, Artificial Sequence
  Synthetic
uauaaauauuuucauccu

SEQ ID NO: 65122 - RNA, 20 nt, Artificial Sequence
  Synthetic
uguauaaauauuuucauccu

SEQ ID NO: 65123 - RNA, 22 nt, Artificial Sequence
  Synthetic
uguguauaaauauuuucauccu

SEQ ID NO: 65124 - RNA, 23 nt, Artificial Sequence
  Synthetic
uuguguauaaauauuuucauccu

SEQ ID NO: 65125 - RNA, 24 nt, Artificial Sequence
  Synthetic
cuuguguauaaauauuuucauccu

SEQ ID NO: 65126 - RNA, 18 nt, Artificial Sequence
  Synthetic
auaguauucccagauccu

SEQ ID NO: 65127 - RNA, 19 nt, Artificial Sequence
  Synthetic
aauaguauucccagauccu

SEQ ID NO: 65128 - RNA, 20 nt, Artificial Sequence
  Synthetic
uaauaguauucccagauccu

SEQ ID NO: 65129 - RNA, 21 nt, Artificial Sequence
  Synthetic
auaauaguauucccagauccu

SEQ ID NO: 65130 - RNA, 22 nt, Artificial Sequence
  Synthetic
uauaauaguauucccagauccu

SEQ ID NO: 65131 - RNA, 24 nt, Artificial Sequence
  Synthetic
aguauaauaguauucccagauccu

SEQ ID NO: 65132 - RNA, 18 nt, Artificial Sequence
  Synthetic
agacuuauugcauauccu

SEQ ID NO: 65133 - RNA, 19 nt, Artificial Sequence
  Synthetic
aagacuuauugcauauccu

SEQ ID NO: 65134 - RNA, 21 nt, Artificial Sequence
  Synthetic
agaagacuuauugcauauccu

SEQ ID NO: 65135 - RNA, 22 nt, Artificial Sequence
  Synthetic
uagaagacuuauugcauauccu

SEQ ID NO: 65136 - RNA, 23 nt, Artificial Sequence
  Synthetic
auagaagacuuauugcauauccu

SEQ ID NO: 65137 - RNA, 24 nt, Artificial Sequence
  Synthetic
aauagaagacuuauugcauauccu

SEQ ID NO: 65138 - RNA, 18 nt, Artificial Sequence
  Synthetic
ucucaaguuugauauccu

SEQ ID NO: 65139 - RNA, 19 nt, Artificial Sequence
  Synthetic
uucucaaguuugauauccu

SEQ ID NO: 65140 - RNA, 20 nt, Artificial Sequence
  Synthetic
cuucucaaguuugauauccu

SEQ ID NO: 65141 - RNA, 21 nt, Artificial Sequence
  Synthetic
acuucucaaguuugauauccu

SEQ ID NO: 65142 - RNA, 22 nt, Artificial Sequence
  Synthetic
aacuucucaaguuugauauccu

SEQ ID NO: 65143 - RNA, 23 nt, Artificial Sequence
  Synthetic
caacuucucaaguuugauauccu

SEQ ID NO: 65144 - RNA, 24 nt, Artificial Sequence
  Synthetic
ucaacuucucaaguuugauauccu

SEQ ID NO: 65145 - RNA, 18 nt, Artificial Sequence
  Synthetic
cuuucugucuuguauccu

SEQ ID NO: 65146 - RNA, 19 nt, Artificial Sequence
  Synthetic
ucuuucugucuuguauccu

SEQ ID NO: 65147 - RNA, 21 nt, Artificial Sequence
  Synthetic
ugucuuucugucuuguauccu

SEQ ID NO: 65148 - RNA, 24 nt, Artificial Sequence
  Synthetic
aggugucuuucugucuuguauccu

SEQ ID NO: 65149 - RNA, 19 nt, Artificial Sequence
  Synthetic
ugauaugcauaaagcuccu

SEQ ID NO: 65150 - RNA, 20 nt, Artificial Sequence
  Synthetic
cugauaugcauaaagcuccu

SEQ ID NO: 65151 - RNA, 21 nt, Artificial Sequence
  Synthetic
ccugauaugcauaaagcuccu

SEQ ID NO: 65152 - RNA, 23 nt, Artificial Sequence
  Synthetic
ugccugauaugcauaaagcuccu

SEQ ID NO: 65153 - RNA, 18 nt, Artificial Sequence
  Synthetic
ccuacauuuaaugcuccu

SEQ ID NO: 65154 - RNA, 19 nt, Artificial Sequence
  Synthetic
cccuacauuuaaugcuccu

SEQ ID NO: 65155 - RNA, 20 nt, Artificial Sequence
  Synthetic
acccuacauuuaaugcuccu

SEQ ID NO: 65156 - RNA, 21 nt, Artificial Sequence
  Synthetic
cacccuacauuuaaugcuccu

SEQ ID NO: 65157 - RNA, 24 nt, Artificial Sequence
  Synthetic
aggcacccuacauuuaaugcuccu

SEQ ID NO: 65158 - RNA, 19 nt, Artificial Sequence
  Synthetic
ugaugaaugaaagucuccu

SEQ ID NO: 65159 - RNA, 20 nt, Artificial Sequence
  Synthetic
augaugaaugaaagucuccu

SEQ ID NO: 65160 - RNA, 21 nt, Artificial Sequence
  Synthetic
aaugaugaaugaaagucuccu

SEQ ID NO: 65161 - RNA, 22 nt, Artificial Sequence
  Synthetic
caaugaugaaugaaagucuccu

SEQ ID NO: 65162 - RNA, 23 nt, Artificial Sequence
  Synthetic
ucaaugaugaaugaaagucuccu

SEQ ID NO: 65163 - RNA, 18 nt, Artificial Sequence
  Synthetic
aauauuuucuagucuccu

SEQ ID NO: 65164 - RNA, 19 nt, Artificial Sequence
  Synthetic
aaauauuuucuagucuccu

SEQ ID NO: 65165 - RNA, 21 nt, Artificial Sequence
  Synthetic
ugaaauauuuucuagucuccu

SEQ ID NO: 65166 - RNA, 22 nt, Artificial Sequence
  Synthetic
uugaaauauuuucuagucuccu

SEQ ID NO: 65167 - RNA, 24 nt, Artificial Sequence
  Synthetic
uguugaaauauuuucuagucuccu

SEQ ID NO: 65168 - RNA, 21 nt, Artificial Sequence
  Synthetic
ccuugguuuccugggucuccu

SEQ ID NO: 65169 - RNA, 22 nt, Artificial Sequence
  Synthetic
cccuugguuuccugggucuccu

SEQ ID NO: 65170 - RNA, 23 nt, Artificial Sequence
  Synthetic
acccuugguuuccugggucuccu

SEQ ID NO: 65171 - RNA, 24 nt, Artificial Sequence
  Synthetic
uacccuugguuuccugggucuccu

SEQ ID NO: 65172 - RNA, 18 nt, Artificial Sequence
  Synthetic
auuagacuguaaaguccu

SEQ ID NO: 65173 - RNA, 19 nt, Artificial Sequence
  Synthetic
aauuagacuguaaaguccu

SEQ ID NO: 65174 - RNA, 20 nt, Artificial Sequence
  Synthetic
uaauuagacuguaaaguccu

SEQ ID NO: 65175 - RNA, 22 nt, Artificial Sequence
  Synthetic
uguaauuagacuguaaaguccu

SEQ ID NO: 65176 - RNA, 23 nt, Artificial Sequence
  Synthetic
uuguaauuagacuguaaaguccu

SEQ ID NO: 65177 - RNA, 18 nt, Artificial Sequence
  Synthetic
aguuuucaguggaguccu

SEQ ID NO: 65178 - RNA, 19 nt, Artificial Sequence
  Synthetic
caguuuucaguggaguccu

SEQ ID NO: 65179 - RNA, 20 nt, Artificial Sequence
  Synthetic
acaguuuucaguggaguccu

SEQ ID NO: 65180 - RNA, 18 nt, Artificial Sequence
  Synthetic
uagaaccuggaggguccu

SEQ ID NO: 65181 - RNA, 19 nt, Artificial Sequence
  Synthetic
cuagaaccuggaggguccu

SEQ ID NO: 65182 - RNA, 24 nt, Artificial Sequence
  Synthetic
uggggcuagaaccuggaggguccu

SEQ ID NO: 65183 - RNA, 18 nt, Artificial Sequence
  Synthetic
ccuguagguggcuguccu

SEQ ID NO: 65184 - RNA, 19 nt, Artificial Sequence
  Synthetic
cccuguagguggcuguccu

SEQ ID NO: 65185 - RNA, 22 nt, Artificial Sequence
  Synthetic
uggcccuguagguggcuguccu

SEQ ID NO: 65186 - RNA, 18 nt, Artificial Sequence
  Synthetic
uucaacuugugguguccu

SEQ ID NO: 65187 - RNA, 19 nt, Artificial Sequence
  Synthetic
uuucaacuugugguguccu

SEQ ID NO: 65188 - RNA, 20 nt, Artificial Sequence
  Synthetic
auuucaacuugugguguccu

SEQ ID NO: 65189 - RNA, 21 nt, Artificial Sequence
  Synthetic
aauuucaacuugugguguccu

SEQ ID NO: 65190 - RNA, 22 nt, Artificial Sequence
  Synthetic
uaauuucaacuugugguguccu

SEQ ID NO: 65191 - RNA, 23 nt, Artificial Sequence
  Synthetic
uuaauuucaacuugugguguccu

SEQ ID NO: 65192 - RNA, 24 nt, Artificial Sequence
  Synthetic
uuuaauuucaacuugugguguccu

SEQ ID NO: 65193 - RNA, 18 nt, Artificial Sequence
  Synthetic
uuuaaauuuuauuguccu

SEQ ID NO: 65194 - RNA, 19 nt, Artificial Sequence
  Synthetic
cuuuaaauuuuauuguccu

SEQ ID NO: 65195 - RNA, 20 nt, Artificial Sequence
  Synthetic
ucuuuaaauuuuauuguccu

SEQ ID NO: 65196 - RNA, 21 nt, Artificial Sequence
  Synthetic
uucuuuaaauuuuauuguccu

SEQ ID NO: 65197 - RNA, 22 nt, Artificial Sequence
  Synthetic
cuucuuuaaauuuuauuguccu

SEQ ID NO: 65198 - RNA, 23 nt, Artificial Sequence
  Synthetic
acuucuuuaaauuuuauuguccu

SEQ ID NO: 65199 - RNA, 24 nt, Artificial Sequence
  Synthetic
aacuucuuuaaauuuuauuguccu

SEQ ID NO: 65200 - RNA, 18 nt, Artificial Sequence
  Synthetic
cuuauugaauguuguccu

SEQ ID NO: 65201 - RNA, 19 nt, Artificial Sequence
  Synthetic
ccuuauugaauguuguccu

SEQ ID NO: 65202 - RNA, 22 nt, Artificial Sequence
  Synthetic
uggccuuauugaauguuguccu

SEQ ID NO: 65203 - RNA, 21 nt, Artificial Sequence
  Synthetic
aaaucuacaaaauaaauuccu

SEQ ID NO: 65204 - RNA, 22 nt, Artificial Sequence
  Synthetic
caaaucuacaaaauaaauuccu

SEQ ID NO: 65205 - RNA, 23 nt, Artificial Sequence
  Synthetic
acaaaucuacaaaauaaauuccu

SEQ ID NO: 65206 - RNA, 24 nt, Artificial Sequence
  Synthetic
aacaaaucuacaaaauaaauuccu

SEQ ID NO: 65207 - RNA, 22 nt, Artificial Sequence
  Synthetic
ugauacaauaaaauaaauuccu

SEQ ID NO: 65208 - RNA, 23 nt, Artificial Sequence
  Synthetic
uugauacaauaaaauaaauuccu

SEQ ID NO: 65209 - RNA, 24 nt, Artificial Sequence
  Synthetic
cuugauacaauaaaauaaauuccu

SEQ ID NO: 65210 - RNA, 19 nt, Artificial Sequence
  Synthetic
aggaaagcucugaauuccu

SEQ ID NO: 65211 - RNA, 21 nt, Artificial Sequence
  Synthetic
ugaggaaagcucugaauuccu

SEQ ID NO: 65212 - RNA, 23 nt, Artificial Sequence
  Synthetic
ugugaggaaagcucugaauuccu

SEQ ID NO: 65213 - RNA, 24 nt, Artificial Sequence
  Synthetic
uugugaggaaagcucugaauuccu

SEQ ID NO: 65214 - RNA, 18 nt, Artificial Sequence
  Synthetic
uaguagucuauaauuccu

SEQ ID NO: 65215 - RNA, 19 nt, Artificial Sequence
  Synthetic
uuaguagucuauaauuccu

SEQ ID NO: 65216 - RNA, 20 nt, Artificial Sequence
  Synthetic
cuuaguagucuauaauuccu

SEQ ID NO: 65217 - RNA, 22 nt, Artificial Sequence
  Synthetic
ugcuuaguagucuauaauuccu

SEQ ID NO: 65218 - RNA, 23 nt, Artificial Sequence
  Synthetic
cugcuuaguagucuauaauuccu

SEQ ID NO: 65219 - RNA, 24 nt, Artificial Sequence
  Synthetic
ucugcuuaguagucuauaauuccu

SEQ ID NO: 65220 - RNA, 18 nt, Artificial Sequence
  Synthetic
ucugacuccugcauuccu

SEQ ID NO: 65221 - RNA, 19 nt, Artificial Sequence
  Synthetic
uucugacuccugcauuccu

SEQ ID NO: 65222 - RNA, 20 nt, Artificial Sequence
  Synthetic
uuucugacuccugcauuccu

SEQ ID NO: 65223 - RNA, 21 nt, Artificial Sequence
  Synthetic
uuuucugacuccugcauuccu

SEQ ID NO: 65224 - RNA, 22 nt, Artificial Sequence
  Synthetic
cuuuucugacuccugcauuccu

SEQ ID NO: 65225 - RNA, 23 nt, Artificial Sequence
  Synthetic
acuuuucugacuccugcauuccu

SEQ ID NO: 65226 - RNA, 24 nt, Artificial Sequence
  Synthetic
uacuuuucugacuccugcauuccu

SEQ ID NO: 65227 - RNA, 18 nt, Artificial Sequence
  Synthetic
uuugcuguauagauuccu

SEQ ID NO: 65228 - RNA, 19 nt, Artificial Sequence
  Synthetic
auuugcuguauagauuccu

SEQ ID NO: 65229 - RNA, 20 nt, Artificial Sequence
  Synthetic
aauuugcuguauagauuccu

SEQ ID NO: 65230 - RNA, 21 nt, Artificial Sequence
  Synthetic
caauuugcuguauagauuccu

SEQ ID NO: 65231 - RNA, 22 nt, Artificial Sequence
  Synthetic
ucaauuugcuguauagauuccu

SEQ ID NO: 65232 - RNA, 23 nt, Artificial Sequence
  Synthetic
uucaauuugcuguauagauuccu

SEQ ID NO: 65233 - RNA, 24 nt, Artificial Sequence
  Synthetic
auucaauuugcuguauagauuccu

SEQ ID NO: 65234 - RNA, 18 nt, Artificial Sequence
  Synthetic
uaaaguuuccauauuccu

SEQ ID NO: 65235 - RNA, 19 nt, Artificial Sequence
  Synthetic
auaaaguuuccauauuccu

SEQ ID NO: 65236 - RNA, 20 nt, Artificial Sequence
  Synthetic
cauaaaguuuccauauuccu

SEQ ID NO: 65237 - RNA, 21 nt, Artificial Sequence
  Synthetic
acauaaaguuuccauauuccu

SEQ ID NO: 65238 - RNA, 22 nt, Artificial Sequence
  Synthetic
uacauaaaguuuccauauuccu

SEQ ID NO: 65239 - RNA, 24 nt, Artificial Sequence
  Synthetic
aguacauaaaguuuccauauuccu

SEQ ID NO: 65240 - RNA, 21 nt, Artificial Sequence
  Synthetic
uaacauuuuuaaaaacuuccu

SEQ ID NO: 65241 - RNA, 22 nt, Artificial Sequence
  Synthetic
uuaacauuuuuaaaaacuuccu

SEQ ID NO: 65242 - RNA, 23 nt, Artificial Sequence
  Synthetic
cuuaacauuuuuaaaaacuuccu

SEQ ID NO: 65243 - RNA, 24 nt, Artificial Sequence
  Synthetic
ucuuaacauuuuuaaaaacuuccu

SEQ ID NO: 65244 - RNA, 18 nt, Artificial Sequence
  Synthetic
uuuuguggcauacuuccu

SEQ ID NO: 65245 - RNA, 19 nt, Artificial Sequence
  Synthetic
cuuuuguggcauacuuccu

SEQ ID NO: 65246 - RNA, 20 nt, Artificial Sequence
  Synthetic
acuuuuguggcauacuuccu

SEQ ID NO: 65247 - RNA, 21 nt, Artificial Sequence
  Synthetic
cacuuuuguggcauacuuccu

SEQ ID NO: 65248 - RNA, 22 nt, Artificial Sequence
  Synthetic
ccacuuuuguggcauacuuccu

SEQ ID NO: 65249 - RNA, 23 nt, Artificial Sequence
  Synthetic
accacuuuuguggcauacuuccu

SEQ ID NO: 65250 - RNA, 18 nt, Artificial Sequence
  Synthetic
cucuuuucucuacuuccu

SEQ ID NO: 65251 - RNA, 20 nt, Artificial Sequence
  Synthetic
ugcucuuuucucuacuuccu

SEQ ID NO: 65252 - RNA, 21 nt, Artificial Sequence
  Synthetic
augcucuuuucucuacuuccu

SEQ ID NO: 65253 - RNA, 22 nt, Artificial Sequence
  Synthetic
uaugcucuuuucucuacuuccu

SEQ ID NO: 65254 - RNA, 23 nt, Artificial Sequence
  Synthetic
auaugcucuuuucucuacuuccu

SEQ ID NO: 65255 - RNA, 18 nt, Artificial Sequence
  Synthetic
ccugucguaguacuuccu

SEQ ID NO: 65256 - RNA, 19 nt, Artificial Sequence
  Synthetic
accugucguaguacuuccu

SEQ ID NO: 65257 - RNA, 20 nt, Artificial Sequence
  Synthetic
uaccugucguaguacuuccu

SEQ ID NO: 65258 - RNA, 22 nt, Artificial Sequence
  Synthetic
aguaccugucguaguacuuccu

SEQ ID NO: 65259 - RNA, 24 nt, Artificial Sequence
  Synthetic
agaguaccugucguaguacuuccu

SEQ ID NO: 65260 - RNA, 18 nt, Artificial Sequence
  Synthetic
auacauagcugccuuccu

SEQ ID NO: 65261 - RNA, 19 nt, Artificial Sequence
  Synthetic
uauacauagcugccuuccu

SEQ ID NO: 65262 - RNA, 20 nt, Artificial Sequence
  Synthetic
auauacauagcugccuuccu

SEQ ID NO: 65263 - RNA, 21 nt, Artificial Sequence
  Synthetic
uauauacauagcugccuuccu

SEQ ID NO: 65264 - RNA, 22 nt, Artificial Sequence
  Synthetic
auauauacauagcugccuuccu

SEQ ID NO: 65265 - RNA, 23 nt, Artificial Sequence
  Synthetic
uauauauacauagcugccuuccu

SEQ ID NO: 65266 - RNA, 24 nt, Artificial Sequence
  Synthetic
uuauauauacauagcugccuuccu

SEQ ID NO: 65267 - RNA, 18 nt, Artificial Sequence
  Synthetic
uuuucauucuugcuuccu

SEQ ID NO: 65268 - RNA, 19 nt, Artificial Sequence
  Synthetic
uuuuucauucuugcuuccu

SEQ ID NO: 65269 - RNA, 22 nt, Artificial Sequence
  Synthetic
ugguuuuucauucuugcuuccu

SEQ ID NO: 65270 - RNA, 23 nt, Artificial Sequence
  Synthetic
uugguuuuucauucuugcuuccu

SEQ ID NO: 65271 - RNA, 24 nt, Artificial Sequence
  Synthetic
uuugguuuuucauucuugcuuccu

SEQ ID NO: 65272 - RNA, 21 nt, Artificial Sequence
  Synthetic
cuguggguccaauuucuuccu

SEQ ID NO: 65273 - RNA, 22 nt, Artificial Sequence
  Synthetic
acuguggguccaauuucuuccu

SEQ ID NO: 65274 - RNA, 24 nt, Artificial Sequence
  Synthetic
agacuguggguccaauuucuuccu

SEQ ID NO: 65275 - RNA, 21 nt, Artificial Sequence
  Synthetic
agagaggcuaaauaauuuccu

SEQ ID NO: 65276 - RNA, 22 nt, Artificial Sequence
  Synthetic
cagagaggcuaaauaauuuccu

SEQ ID NO: 65277 - RNA, 23 nt, Artificial Sequence
  Synthetic
acagagaggcuaaauaauuuccu

SEQ ID NO: 65278 - RNA, 24 nt, Artificial Sequence
  Synthetic
cacagagaggcuaaauaauuuccu

SEQ ID NO: 65279 - RNA, 20 nt, Artificial Sequence
  Synthetic
ugguuuucacaagauuuccu

SEQ ID NO: 65280 - RNA, 21 nt, Artificial Sequence
  Synthetic
uugguuuucacaagauuuccu

SEQ ID NO: 65281 - RNA, 22 nt, Artificial Sequence
  Synthetic
uuugguuuucacaagauuuccu

SEQ ID NO: 65282 - RNA, 23 nt, Artificial Sequence
  Synthetic
cuuugguuuucacaagauuuccu

SEQ ID NO: 65283 - RNA, 24 nt, Artificial Sequence
  Synthetic
acuuugguuuucacaagauuuccu

SEQ ID NO: 65284 - RNA, 18 nt, Artificial Sequence
  Synthetic
ucaguccuaauauuuccu

SEQ ID NO: 65285 - RNA, 19 nt, Artificial Sequence
  Synthetic
uucaguccuaauauuuccu

SEQ ID NO: 65286 - RNA, 20 nt, Artificial Sequence
  Synthetic
uuucaguccuaauauuuccu

SEQ ID NO: 65287 - RNA, 21 nt, Artificial Sequence
  Synthetic
uuuucaguccuaauauuuccu

SEQ ID NO: 65288 - RNA, 22 nt, Artificial Sequence
  Synthetic
auuuucaguccuaauauuuccu

SEQ ID NO: 65289 - RNA, 23 nt, Artificial Sequence
  Synthetic
uauuuucaguccuaauauuuccu

SEQ ID NO: 65290 - RNA, 24 nt, Artificial Sequence
  Synthetic
auauuuucaguccuaauauuuccu

SEQ ID NO: 65291 - RNA, 18 nt, Artificial Sequence
  Synthetic
aagccaagcauauuuccu

SEQ ID NO: 65292 - RNA, 21 nt, Artificial Sequence
  Synthetic
aggaagccaagcauauuuccu

SEQ ID NO: 65293 - RNA, 23 nt, Artificial Sequence
  Synthetic
ugaggaagccaagcauauuuccu

SEQ ID NO: 65294 - RNA, 24 nt, Artificial Sequence
  Synthetic
uugaggaagccaagcauauuuccu

SEQ ID NO: 65295 - RNA, 18 nt, Artificial Sequence
  Synthetic
auuucaugaagcuuuccu

SEQ ID NO: 65296 - RNA, 19 nt, Artificial Sequence
  Synthetic
aauuucaugaagcuuuccu

SEQ ID NO: 65297 - RNA, 20 nt, Artificial Sequence
  Synthetic
uaauuucaugaagcuuuccu

SEQ ID NO: 65298 - RNA, 23 nt, Artificial Sequence
  Synthetic
agguaauuucaugaagcuuuccu

SEQ ID NO: 65299 - RNA, 24 nt, Artificial Sequence
  Synthetic
aagguaauuucaugaagcuuuccu

SEQ ID NO: 65300 - RNA, 18 nt, Artificial Sequence
  Synthetic
uacaaguauacuuuuccu

SEQ ID NO: 65301 - RNA, 19 nt, Artificial Sequence
  Synthetic
auacaaguauacuuuuccu

SEQ ID NO: 65302 - RNA, 20 nt, Artificial Sequence
  Synthetic
uauacaaguauacuuuuccu

SEQ ID NO: 65303 - RNA, 21 nt, Artificial Sequence
  Synthetic
uuauacaaguauacuuuuccu

SEQ ID NO: 65304 - RNA, 22 nt, Artificial Sequence
  Synthetic
auuauacaaguauacuuuuccu

SEQ ID NO: 65305 - RNA, 23 nt, Artificial Sequence
  Synthetic
cauuauacaaguauacuuuuccu

SEQ ID NO: 65306 - RNA, 24 nt, Artificial Sequence
  Synthetic
ccauuauacaaguauacuuuuccu

SEQ ID NO: 65307 - RNA, 18 nt, Artificial Sequence
  Synthetic
uggcaucuuaguuuuccu

SEQ ID NO: 65308 - RNA, 19 nt, Artificial Sequence
  Synthetic
auggcaucuuaguuuuccu

SEQ ID NO: 65309 - RNA, 21 nt, Artificial Sequence
  Synthetic
agauggcaucuuaguuuuccu

SEQ ID NO: 65310 - RNA, 22 nt, Artificial Sequence
  Synthetic
uagauggcaucuuaguuuuccu

SEQ ID NO: 65311 - RNA, 23 nt, Artificial Sequence
  Synthetic
auagauggcaucuuaguuuuccu

SEQ ID NO: 65312 - RNA, 24 nt, Artificial Sequence
  Synthetic
uauagauggcaucuuaguuuuccu

SEQ ID NO: 65313 - RNA, 22 nt, Artificial Sequence
  Synthetic
aguuucauuuacauuuuuuccu

SEQ ID NO: 65314 - RNA, 24 nt, Artificial Sequence
  Synthetic
ugaguuucauuuacauuuuuuccu

SEQ ID NO: 65315 - RNA, 19 nt, Artificial Sequence
  Synthetic
agaggcagaauaaaaagcu

SEQ ID NO: 65316 - RNA, 20 nt, Artificial Sequence
  Synthetic
uagaggcagaauaaaaagcu

SEQ ID NO: 65317 - RNA, 21 nt, Artificial Sequence
  Synthetic
uuagaggcagaauaaaaagcu

SEQ ID NO: 65318 - RNA, 23 nt, Artificial Sequence
  Synthetic
aguuagaggcagaauaaaaagcu

SEQ ID NO: 65319 - RNA, 24 nt, Artificial Sequence
  Synthetic
uaguuagaggcagaauaaaaagcu

SEQ ID NO: 65320 - RNA, 18 nt, Artificial Sequence
  Synthetic
aguuucuccaacaaagcu

SEQ ID NO: 65321 - RNA, 19 nt, Artificial Sequence
  Synthetic
uaguuucuccaacaaagcu

SEQ ID NO: 65322 - RNA, 20 nt, Artificial Sequence
  Synthetic
uuaguuucuccaacaaagcu

SEQ ID NO: 65323 - RNA, 21 nt, Artificial Sequence
  Synthetic
uuuaguuucuccaacaaagcu

SEQ ID NO: 65324 - RNA, 23 nt, Artificial Sequence
  Synthetic
cguuuaguuucuccaacaaagcu

SEQ ID NO: 65325 - RNA, 24 nt, Artificial Sequence
  Synthetic
ucguuuaguuucuccaacaaagcu

SEQ ID NO: 65326 - RNA, 19 nt, Artificial Sequence
  Synthetic
uggucuugugaggaaagcu

SEQ ID NO: 65327 - RNA, 20 nt, Artificial Sequence
  Synthetic
uuggucuugugaggaaagcu

SEQ ID NO: 65328 - RNA, 21 nt, Artificial Sequence
  Synthetic
uuuggucuugugaggaaagcu

SEQ ID NO: 65329 - RNA, 22 nt, Artificial Sequence
  Synthetic
cuuuggucuugugaggaaagcu

SEQ ID NO: 65330 - RNA, 24 nt, Artificial Sequence
  Synthetic
ugcuuuggucuugugaggaaagcu

SEQ ID NO: 65331 - RNA, 18 nt, Artificial Sequence
  Synthetic
ucucaaagggaccaagcu

SEQ ID NO: 65332 - RNA, 19 nt, Artificial Sequence
  Synthetic
cucucaaagggaccaagcu

SEQ ID NO: 65333 - RNA, 20 nt, Artificial Sequence
  Synthetic
acucucaaagggaccaagcu

SEQ ID NO: 65334 - RNA, 21 nt, Artificial Sequence
  Synthetic
cacucucaaagggaccaagcu

SEQ ID NO: 65335 - RNA, 22 nt, Artificial Sequence
  Synthetic
ucacucucaaagggaccaagcu

SEQ ID NO: 65336 - RNA, 23 nt, Artificial Sequence
  Synthetic
uucacucucaaagggaccaagcu

SEQ ID NO: 65337 - RNA, 24 nt, Artificial Sequence
  Synthetic
uuucacucucaaagggaccaagcu

SEQ ID NO: 65338 - RNA, 18 nt, Artificial Sequence
  Synthetic
auaauauagccagaagcu

SEQ ID NO: 65339 - RNA, 19 nt, Artificial Sequence
  Synthetic
uauaauauagccagaagcu

SEQ ID NO: 65340 - RNA, 20 nt, Artificial Sequence
  Synthetic
auauaauauagccagaagcu

SEQ ID NO: 65341 - RNA, 21 nt, Artificial Sequence
  Synthetic
aauauaauauagccagaagcu

SEQ ID NO: 65342 - RNA, 22 nt, Artificial Sequence
  Synthetic
uaauauaauauagccagaagcu

SEQ ID NO: 65343 - RNA, 23 nt, Artificial Sequence
  Synthetic
auaauauaauauagccagaagcu

SEQ ID NO: 65344 - RNA, 24 nt, Artificial Sequence
  Synthetic
cauaauauaauauagccagaagcu

SEQ ID NO: 65345 - RNA, 18 nt, Artificial Sequence
  Synthetic
cuguuuaugucugaagcu

SEQ ID NO: 65346 - RNA, 19 nt, Artificial Sequence
  Synthetic
ucuguuuaugucugaagcu

SEQ ID NO: 65347 - RNA, 20 nt, Artificial Sequence
  Synthetic
uucuguuuaugucugaagcu

SEQ ID NO: 65348 - RNA, 21 nt, Artificial Sequence
  Synthetic
uuucuguuuaugucugaagcu

SEQ ID NO: 65349 - RNA, 22 nt, Artificial Sequence
  Synthetic
auuucuguuuaugucugaagcu

SEQ ID NO: 65350 - RNA, 23 nt, Artificial Sequence
  Synthetic
uauuucuguuuaugucugaagcu

SEQ ID NO: 65351 - RNA, 24 nt, Artificial Sequence
  Synthetic
cuauuucuguuuaugucugaagcu

SEQ ID NO: 65352 - RNA, 19 nt, Artificial Sequence
  Synthetic
ugcuaaacaguuugaagcu

SEQ ID NO: 65353 - RNA, 20 nt, Artificial Sequence
  Synthetic
uugcuaaacaguuugaagcu

SEQ ID NO: 65354 - RNA, 22 nt, Artificial Sequence
  Synthetic
aguugcuaaacaguuugaagcu

SEQ ID NO: 65355 - RNA, 23 nt, Artificial Sequence
  Synthetic
uaguugcuaaacaguuugaagcu

SEQ ID NO: 65356 - RNA, 24 nt, Artificial Sequence
  Synthetic
auaguugcuaaacaguuugaagcu

SEQ ID NO: 65357 - RNA, 18 nt, Artificial Sequence
  Synthetic
uaucuucucuacuaagcu

SEQ ID NO: 65358 - RNA, 19 nt, Artificial Sequence
  Synthetic
cuaucuucucuacuaagcu

SEQ ID NO: 65359 - RNA, 20 nt, Artificial Sequence
  Synthetic
ucuaucuucucuacuaagcu

SEQ ID NO: 65360 - RNA, 21 nt, Artificial Sequence
  Synthetic
uucuaucuucucuacuaagcu

SEQ ID NO: 65361 - RNA, 22 nt, Artificial Sequence
  Synthetic
uuucuaucuucucuacuaagcu

SEQ ID NO: 65362 - RNA, 23 nt, Artificial Sequence
  Synthetic
auuucuaucuucucuacuaagcu

SEQ ID NO: 65363 - RNA, 24 nt, Artificial Sequence
  Synthetic
cauuucuaucuucucuacuaagcu

SEQ ID NO: 65364 - RNA, 18 nt, Artificial Sequence
  Synthetic
auuaagcuuccuuaagcu

SEQ ID NO: 65365 - RNA, 20 nt, Artificial Sequence
  Synthetic
agauuaagcuuccuuaagcu

SEQ ID NO: 65366 - RNA, 21 nt, Artificial Sequence
  Synthetic
aagauuaagcuuccuuaagcu

SEQ ID NO: 65367 - RNA, 22 nt, Artificial Sequence
  Synthetic
aaagauuaagcuuccuuaagcu

SEQ ID NO: 65368 - RNA, 23 nt, Artificial Sequence
  Synthetic
uaaagauuaagcuuccuuaagcu

SEQ ID NO: 65369 - RNA, 24 nt, Artificial Sequence
  Synthetic
uuaaagauuaagcuuccuuaagcu

SEQ ID NO: 65370 - RNA, 19 nt, Artificial Sequence
  Synthetic
ugugccuauuuacacagcu

SEQ ID NO: 65371 - RNA, 20 nt, Artificial Sequence
  Synthetic
cugugccuauuuacacagcu

SEQ ID NO: 65372 - RNA, 21 nt, Artificial Sequence
  Synthetic
ccugugccuauuuacacagcu

SEQ ID NO: 65373 - RNA, 22 nt, Artificial Sequence
  Synthetic
accugugccuauuuacacagcu

SEQ ID NO: 65374 - RNA, 23 nt, Artificial Sequence
  Synthetic
uaccugugccuauuuacacagcu

SEQ ID NO: 65375 - RNA, 24 nt, Artificial Sequence
  Synthetic
auaccugugccuauuuacacagcu

SEQ ID NO: 65376 - RNA, 18 nt, Artificial Sequence
  Synthetic
uuuaaguuaauuacagcu

SEQ ID NO: 65377 - RNA, 19 nt, Artificial Sequence
  Synthetic
uuuuaaguuaauuacagcu

SEQ ID NO: 65378 - RNA, 20 nt, Artificial Sequence
  Synthetic
auuuuaaguuaauuacagcu

SEQ ID NO: 65379 - RNA, 21 nt, Artificial Sequence
  Synthetic
aauuuuaaguuaauuacagcu

SEQ ID NO: 65380 - RNA, 22 nt, Artificial Sequence
  Synthetic
aaauuuuaaguuaauuacagcu

SEQ ID NO: 65381 - RNA, 23 nt, Artificial Sequence
  Synthetic
caaauuuuaaguuaauuacagcu

SEQ ID NO: 65382 - RNA, 24 nt, Artificial Sequence
  Synthetic
acaaauuuuaaguuaauuacagcu

SEQ ID NO: 65383 - RNA, 18 nt, Artificial Sequence
  Synthetic
cauuucauguccccagcu

SEQ ID NO: 65384 - RNA, 19 nt, Artificial Sequence
  Synthetic
acauuucauguccccagcu

SEQ ID NO: 65385 - RNA, 20 nt, Artificial Sequence
  Synthetic
uacauuucauguccccagcu

SEQ ID NO: 65386 - RNA, 21 nt, Artificial Sequence
  Synthetic
uuacauuucauguccccagcu

SEQ ID NO: 65387 - RNA, 22 nt, Artificial Sequence
  Synthetic
auuacauuucauguccccagcu

SEQ ID NO: 65388 - RNA, 23 nt, Artificial Sequence
  Synthetic
aauuacauuucauguccccagcu

SEQ ID NO: 65389 - RNA, 24 nt, Artificial Sequence
  Synthetic
caauuacauuucauguccccagcu

SEQ ID NO: 65390 - RNA, 18 nt, Artificial Sequence
  Synthetic
ccaucuauaauuccagcu

SEQ ID NO: 65391 - RNA, 19 nt, Artificial Sequence
  Synthetic
cccaucuauaauuccagcu

SEQ ID NO: 65392 - RNA, 20 nt, Artificial Sequence
  Synthetic
acccaucuauaauuccagcu

SEQ ID NO: 65393 - RNA, 21 nt, Artificial Sequence
  Synthetic
uacccaucuauaauuccagcu

SEQ ID NO: 65394 - RNA, 22 nt, Artificial Sequence
  Synthetic
cuacccaucuauaauuccagcu

SEQ ID NO: 65395 - RNA, 23 nt, Artificial Sequence
  Synthetic
acuacccaucuauaauuccagcu

SEQ ID NO: 65396 - RNA, 19 nt, Artificial Sequence
  Synthetic
aggugaaugagaugcagcu

SEQ ID NO: 65397 - RNA, 21 nt, Artificial Sequence
  Synthetic
agaggugaaugagaugcagcu

SEQ ID NO: 65398 - RNA, 22 nt, Artificial Sequence
  Synthetic
aagaggugaaugagaugcagcu

SEQ ID NO: 65399 - RNA, 23 nt, Artificial Sequence
  Synthetic
uaagaggugaaugagaugcagcu

SEQ ID NO: 65400 - RNA, 24 nt, Artificial Sequence
  Synthetic
cuaagaggugaaugagaugcagcu

SEQ ID NO: 65401 - RNA, 18 nt, Artificial Sequence
  Synthetic
cagcagugacacucagcu

SEQ ID NO: 65402 - RNA, 19 nt, Artificial Sequence
  Synthetic
ucagcagugacacucagcu

SEQ ID NO: 65403 - RNA, 20 nt, Artificial Sequence
  Synthetic
cucagcagugacacucagcu

SEQ ID NO: 65404 - RNA, 21 nt, Artificial Sequence
  Synthetic
acucagcagugacacucagcu

SEQ ID NO: 65405 - RNA, 22 nt, Artificial Sequence
  Synthetic
aacucagcagugacacucagcu

SEQ ID NO: 65406 - RNA, 23 nt, Artificial Sequence
  Synthetic
uaacucagcagugacacucagcu

SEQ ID NO: 65407 - RNA, 18 nt, Artificial Sequence
  Synthetic
uaauacuuuaguucagcu

SEQ ID NO: 65408 - RNA, 19 nt, Artificial Sequence
  Synthetic
cuaauacuuuaguucagcu

SEQ ID NO: 65409 - RNA, 20 nt, Artificial Sequence
  Synthetic
ccuaauacuuuaguucagcu

SEQ ID NO: 65410 - RNA, 21 nt, Artificial Sequence
  Synthetic
uccuaauacuuuaguucagcu

SEQ ID NO: 65411 - RNA, 22 nt, Artificial Sequence
  Synthetic
uuccuaauacuuuaguucagcu

SEQ ID NO: 65412 - RNA, 23 nt, Artificial Sequence
  Synthetic
cuuccuaauacuuuaguucagcu

SEQ ID NO: 65413 - RNA, 24 nt, Artificial Sequence
  Synthetic
ccuuccuaauacuuuaguucagcu

SEQ ID NO: 65414 - RNA, 18 nt, Artificial Sequence
  Synthetic
uuacuggucuuuucagcu

SEQ ID NO: 65415 - RNA, 19 nt, Artificial Sequence
  Synthetic
uuuacuggucuuuucagcu

SEQ ID NO: 65416 - RNA, 20 nt, Artificial Sequence
  Synthetic
uuuuacuggucuuuucagcu

SEQ ID NO: 65417 - RNA, 22 nt, Artificial Sequence
  Synthetic
aguuuuacuggucuuuucagcu

SEQ ID NO: 65418 - RNA, 23 nt, Artificial Sequence
  Synthetic
uaguuuuacuggucuuuucagcu

SEQ ID NO: 65419 - RNA, 24 nt, Artificial Sequence
  Synthetic
cuaguuuuacuggucuuuucagcu

SEQ ID NO: 65420 - RNA, 19 nt, Artificial Sequence
  Synthetic
uggaauuauuuuuucagcu

SEQ ID NO: 65421 - RNA, 20 nt, Artificial Sequence
  Synthetic
uuggaauuauuuuuucagcu

SEQ ID NO: 65422 - RNA, 21 nt, Artificial Sequence
  Synthetic
uuuggaauuauuuuuucagcu

SEQ ID NO: 65423 - RNA, 22 nt, Artificial Sequence
  Synthetic
uuuuggaauuauuuuuucagcu

SEQ ID NO: 65424 - RNA, 23 nt, Artificial Sequence
  Synthetic
auuuuggaauuauuuuuucagcu

SEQ ID NO: 65425 - RNA, 24 nt, Artificial Sequence
  Synthetic
uauuuuggaauuauuuuuucagcu

SEQ ID NO: 65426 - RNA, 21 nt, Artificial Sequence
  Synthetic
aaauucuuucagaaaagagcu

SEQ ID NO: 65427 - RNA, 22 nt, Artificial Sequence
  Synthetic
aaaauucuuucagaaaagagcu

SEQ ID NO: 65428 - RNA, 23 nt, Artificial Sequence
  Synthetic
aaaaauucuuucagaaaagagcu

SEQ ID NO: 65429 - RNA, 21 nt, Artificial Sequence
  Synthetic
aaacaagcaaagaacagagcu

SEQ ID NO: 65430 - RNA, 22 nt, Artificial Sequence
  Synthetic
caaacaagcaaagaacagagcu

SEQ ID NO: 65431 - RNA, 23 nt, Artificial Sequence
  Synthetic
acaaacaagcaaagaacagagcu

SEQ ID NO: 65432 - RNA, 24 nt, Artificial Sequence
  Synthetic
uacaaacaagcaaagaacagagcu

SEQ ID NO: 65433 - RNA, 19 nt, Artificial Sequence
  Synthetic
agcucugucuuacagagcu

SEQ ID NO: 65434 - RNA, 20 nt, Artificial Sequence
  Synthetic
cagcucugucuuacagagcu

SEQ ID NO: 65435 - RNA, 21 nt, Artificial Sequence
  Synthetic
ccagcucugucuuacagagcu

SEQ ID NO: 65436 - RNA, 22 nt, Artificial Sequence
  Synthetic
uccagcucugucuuacagagcu

SEQ ID NO: 65437 - RNA, 23 nt, Artificial Sequence
  Synthetic
cuccagcucugucuuacagagcu

SEQ ID NO: 65438 - RNA, 24 nt, Artificial Sequence
  Synthetic
ccuccagcucugucuuacagagcu

SEQ ID NO: 65439 - RNA, 18 nt, Artificial Sequence
  Synthetic
augggaagcuucagagcu

SEQ ID NO: 65440 - RNA, 19 nt, Artificial Sequence
  Synthetic
uaugggaagcuucagagcu

SEQ ID NO: 65441 - RNA, 20 nt, Artificial Sequence
  Synthetic
auaugggaagcuucagagcu

SEQ ID NO: 65442 - RNA, 21 nt, Artificial Sequence
  Synthetic
cauaugggaagcuucagagcu

SEQ ID NO: 65443 - RNA, 22 nt, Artificial Sequence
  Synthetic
acauaugggaagcuucagagcu

SEQ ID NO: 65444 - RNA, 23 nt, Artificial Sequence
  Synthetic
aacauaugggaagcuucagagcu

SEQ ID NO: 65445 - RNA, 24 nt, Artificial Sequence
  Synthetic
aaacauaugggaagcuucagagcu

SEQ ID NO: 65446 - RNA, 19 nt, Artificial Sequence
  Synthetic
aguacuggauaaaggagcu

SEQ ID NO: 65447 - RNA, 22 nt, Artificial Sequence
  Synthetic
aggaguacuggauaaaggagcu

SEQ ID NO: 65448 - RNA, 23 nt, Artificial Sequence
  Synthetic
caggaguacuggauaaaggagcu

SEQ ID NO: 65449 - RNA, 24 nt, Artificial Sequence
  Synthetic
ucaggaguacuggauaaaggagcu

SEQ ID NO: 65450 - RNA, 18 nt, Artificial Sequence
  Synthetic
agccaaucuaaaugagcu

SEQ ID NO: 65451 - RNA, 21 nt, Artificial Sequence
  Synthetic
uggagccaaucuaaaugagcu

SEQ ID NO: 65452 - RNA, 22 nt, Artificial Sequence
  Synthetic
uuggagccaaucuaaaugagcu

SEQ ID NO: 65453 - RNA, 23 nt, Artificial Sequence
  Synthetic
auuggagccaaucuaaaugagcu

SEQ ID NO: 65454 - RNA, 24 nt, Artificial Sequence
  Synthetic
uauuggagccaaucuaaaugagcu

SEQ ID NO: 65455 - RNA, 18 nt, Artificial Sequence
  Synthetic
acugggaagagaugagcu

SEQ ID NO: 65456 - RNA, 20 nt, Artificial Sequence
  Synthetic
agacugggaagagaugagcu

SEQ ID NO: 65457 - RNA, 22 nt, Artificial Sequence
  Synthetic
agagacugggaagagaugagcu

SEQ ID NO: 65458 - RNA, 23 nt, Artificial Sequence
  Synthetic
aagagacugggaagagaugagcu

SEQ ID NO: 65459 - RNA, 19 nt, Artificial Sequence
  Synthetic
ugaugauaaccacugagcu

SEQ ID NO: 65460 - RNA, 20 nt, Artificial Sequence
  Synthetic
uugaugauaaccacugagcu

SEQ ID NO: 65461 - RNA, 21 nt, Artificial Sequence
  Synthetic
cuugaugauaaccacugagcu

SEQ ID NO: 65462 - RNA, 22 nt, Artificial Sequence
  Synthetic
acuugaugauaaccacugagcu

SEQ ID NO: 65463 - RNA, 23 nt, Artificial Sequence
  Synthetic
aacuugaugauaaccacugagcu

SEQ ID NO: 65464 - RNA, 24 nt, Artificial Sequence
  Synthetic
aaacuugaugauaaccacugagcu

SEQ ID NO: 65465 - RNA, 18 nt, Artificial Sequence
  Synthetic
uuugugcuuggcugagcu

SEQ ID NO: 65466 - RNA, 19 nt, Artificial Sequence
  Synthetic
uuuugugcuuggcugagcu

SEQ ID NO: 65467 - RNA, 21 nt, Artificial Sequence
  Synthetic
uguuuugugcuuggcugagcu

SEQ ID NO: 65468 - RNA, 22 nt, Artificial Sequence
  Synthetic
cuguuuugugcuuggcugagcu

SEQ ID NO: 65469 - RNA, 24 nt, Artificial Sequence
  Synthetic
agcuguuuugugcuuggcugagcu

SEQ ID NO: 65470 - RNA, 18 nt, Artificial Sequence
  Synthetic
aguuagaagaucugagcu

SEQ ID NO: 65471 - RNA, 19 nt, Artificial Sequence
  Synthetic
aaguuagaagaucugagcu

SEQ ID NO: 65472 - RNA, 22 nt, Artificial Sequence
  Synthetic
aggaaguuagaagaucugagcu

SEQ ID NO: 65473 - RNA, 24 nt, Artificial Sequence
  Synthetic
agaggaaguuagaagaucugagcu

SEQ ID NO: 65474 - RNA, 18 nt, Artificial Sequence
  Synthetic
agaaggaacccuugagcu

SEQ ID NO: 65475 - RNA, 20 nt, Artificial Sequence
  Synthetic
agagaaggaacccuugagcu

SEQ ID NO: 65476 - RNA, 21 nt, Artificial Sequence
  Synthetic
cagagaaggaacccuugagcu

SEQ ID NO: 65477 - RNA, 22 nt, Artificial Sequence
  Synthetic
acagagaaggaacccuugagcu

SEQ ID NO: 65478 - RNA, 23 nt, Artificial Sequence
  Synthetic
uacagagaaggaacccuugagcu

SEQ ID NO: 65479 - RNA, 18 nt, Artificial Sequence
  Synthetic
cccuuugacaguugagcu

SEQ ID NO: 65480 - RNA, 19 nt, Artificial Sequence
  Synthetic
ucccuuugacaguugagcu

SEQ ID NO: 65481 - RNA, 21 nt, Artificial Sequence
  Synthetic
ugucccuuugacaguugagcu

SEQ ID NO: 65482 - RNA, 22 nt, Artificial Sequence
  Synthetic
augucccuuugacaguugagcu

SEQ ID NO: 65483 - RNA, 23 nt, Artificial Sequence
  Synthetic
uaugucccuuugacaguugagcu

SEQ ID NO: 65484 - RNA, 24 nt, Artificial Sequence
  Synthetic
auaugucccuuugacaguugagcu

SEQ ID NO: 65485 - RNA, 18 nt, Artificial Sequence
  Synthetic
caauuuaauuguugagcu

SEQ ID NO: 65486 - RNA, 19 nt, Artificial Sequence
  Synthetic
ucaauuuaauuguugagcu

SEQ ID NO: 65487 - RNA, 20 nt, Artificial Sequence
  Synthetic
aucaauuuaauuguugagcu

SEQ ID NO: 65488 - RNA, 21 nt, Artificial Sequence
  Synthetic
uaucaauuuaauuguugagcu

SEQ ID NO: 65489 - RNA, 22 nt, Artificial Sequence
  Synthetic
cuaucaauuuaauuguugagcu

SEQ ID NO: 65490 - RNA, 23 nt, Artificial Sequence
  Synthetic
acuaucaauuuaauuguugagcu

SEQ ID NO: 65491 - RNA, 24 nt, Artificial Sequence
  Synthetic
aacuaucaauuuaauuguugagcu

SEQ ID NO: 65492 - RNA, 18 nt, Artificial Sequence
  Synthetic
uuaguuuuaaaaauagcu

SEQ ID NO: 65493 - RNA, 19 nt, Artificial Sequence
  Synthetic
cuuaguuuuaaaaauagcu

SEQ ID NO: 65494 - RNA, 21 nt, Artificial Sequence
  Synthetic
ugcuuaguuuuaaaaauagcu

SEQ ID NO: 65495 - RNA, 22 nt, Artificial Sequence
  Synthetic
uugcuuaguuuuaaaaauagcu

SEQ ID NO: 65496 - RNA, 23 nt, Artificial Sequence
  Synthetic
uuugcuuaguuuuaaaaauagcu

SEQ ID NO: 65497 - RNA, 24 nt, Artificial Sequence
  Synthetic
cuuugcuuaguuuuaaaaauagcu

SEQ ID NO: 65498 - RNA, 21 nt, Artificial Sequence
  Synthetic
cauugugacucagaaauagcu

SEQ ID NO: 65499 - RNA, 22 nt, Artificial Sequence
  Synthetic
ccauugugacucagaaauagcu

SEQ ID NO: 65500 - RNA, 23 nt, Artificial Sequence
  Synthetic
accauugugacucagaaauagcu

SEQ ID NO: 65501 - RNA, 24 nt, Artificial Sequence
  Synthetic
aaccauugugacucagaaauagcu

SEQ ID NO: 65502 - RNA, 18 nt, Artificial Sequence
  Synthetic
auugaauuguaaauagcu

SEQ ID NO: 65503 - RNA, 19 nt, Artificial Sequence
  Synthetic
uauugaauuguaaauagcu

SEQ ID NO: 65504 - RNA, 20 nt, Artificial Sequence
  Synthetic
cuauugaauuguaaauagcu

SEQ ID NO: 65505 - RNA, 21 nt, Artificial Sequence
  Synthetic
ucuauugaauuguaaauagcu

SEQ ID NO: 65506 - RNA, 22 nt, Artificial Sequence
  Synthetic
cucuauugaauuguaaauagcu

SEQ ID NO: 65507 - RNA, 23 nt, Artificial Sequence
  Synthetic
ucucuauugaauuguaaauagcu

SEQ ID NO: 65508 - RNA, 24 nt, Artificial Sequence
  Synthetic
uucucuauugaauuguaaauagcu

SEQ ID NO: 65509 - RNA, 18 nt, Artificial Sequence
  Synthetic
ucuguagugauaauagcu

SEQ ID NO: 65510 - RNA, 19 nt, Artificial Sequence
  Synthetic
aucuguagugauaauagcu

SEQ ID NO: 65511 - RNA, 20 nt, Artificial Sequence
  Synthetic
uaucuguagugauaauagcu

SEQ ID NO: 65512 - RNA, 21 nt, Artificial Sequence
  Synthetic
uuaucuguagugauaauagcu

SEQ ID NO: 65513 - RNA, 22 nt, Artificial Sequence
  Synthetic
auuaucuguagugauaauagcu

SEQ ID NO: 65514 - RNA, 23 nt, Artificial Sequence
  Synthetic
cauuaucuguagugauaauagcu

SEQ ID NO: 65515 - RNA, 18 nt, Artificial Sequence
  Synthetic
uugucagaguucauagcu

SEQ ID NO: 65516 - RNA, 19 nt, Artificial Sequence
  Synthetic
cuugucagaguucauagcu

SEQ ID NO: 65517 - RNA, 20 nt, Artificial Sequence
  Synthetic
acuugucagaguucauagcu

SEQ ID NO: 65518 - RNA, 21 nt, Artificial Sequence
  Synthetic
uacuugucagaguucauagcu

SEQ ID NO: 65519 - RNA, 23 nt, Artificial Sequence
  Synthetic
uguacuugucagaguucauagcu

SEQ ID NO: 65520 - RNA, 24 nt, Artificial Sequence
  Synthetic
cuguacuugucagaguucauagcu

SEQ ID NO: 65521 - RNA, 18 nt, Artificial Sequence
  Synthetic
caagucuaccagcuagcu

SEQ ID NO: 65522 - RNA, 19 nt, Artificial Sequence
  Synthetic
acaagucuaccagcuagcu

SEQ ID NO: 65523 - RNA, 20 nt, Artificial Sequence
  Synthetic
aacaagucuaccagcuagcu

SEQ ID NO: 65524 - RNA, 21 nt, Artificial Sequence
  Synthetic
aaacaagucuaccagcuagcu

SEQ ID NO: 65525 - RNA, 22 nt, Artificial Sequence
  Synthetic
aaaacaagucuaccagcuagcu

SEQ ID NO: 65526 - RNA, 23 nt, Artificial Sequence
  Synthetic
aaaaacaagucuaccagcuagcu

SEQ ID NO: 65527 - RNA, 24 nt, Artificial Sequence
  Synthetic
uaaaaacaagucuaccagcuagcu

SEQ ID NO: 65528 - RNA, 19 nt, Artificial Sequence
  Synthetic
uggauuaugauugcuagcu

SEQ ID NO: 65529 - RNA, 20 nt, Artificial Sequence
  Synthetic
uuggauuaugauugcuagcu

SEQ ID NO: 65530 - RNA, 21 nt, Artificial Sequence
  Synthetic
uuuggauuaugauugcuagcu

SEQ ID NO: 65531 - RNA, 23 nt, Artificial Sequence
  Synthetic
uguuuggauuaugauugcuagcu

SEQ ID NO: 65532 - RNA, 24 nt, Artificial Sequence
  Synthetic
auguuuggauuaugauugcuagcu

SEQ ID NO: 65533 - RNA, 21 nt, Artificial Sequence
  Synthetic
cucuucauucuuagucuagcu

SEQ ID NO: 65534 - RNA, 22 nt, Artificial Sequence
  Synthetic
ucucuucauucuuagucuagcu

SEQ ID NO: 65535 - RNA, 23 nt, Artificial Sequence
  Synthetic
cucucuucauucuuagucuagcu

SEQ ID NO: 65536 - RNA, 18 nt, Artificial Sequence
  Synthetic
ccuaucuuuagaguagcu

SEQ ID NO: 65537 - RNA, 20 nt, Artificial Sequence
  Synthetic
agccuaucuuuagaguagcu

SEQ ID NO: 65538 - RNA, 21 nt, Artificial Sequence
  Synthetic
cagccuaucuuuagaguagcu

SEQ ID NO: 65539 - RNA, 22 nt, Artificial Sequence
  Synthetic
ucagccuaucuuuagaguagcu

SEQ ID NO: 65540 - RNA, 24 nt, Artificial Sequence
  Synthetic
ugucagccuaucuuuagaguagcu

SEQ ID NO: 65541 - RNA, 19 nt, Artificial Sequence
  Synthetic
ugaauuuccacccuuagcu

SEQ ID NO: 65542 - RNA, 22 nt, Artificial Sequence
  Synthetic
aggugaauuuccacccuuagcu

SEQ ID NO: 65543 - RNA, 24 nt, Artificial Sequence
  Synthetic
ugaggugaauuuccacccuuagcu

SEQ ID NO: 65544 - RNA, 18 nt, Artificial Sequence
  Synthetic
aauggaugcuccuuagcu

SEQ ID NO: 65545 - RNA, 19 nt, Artificial Sequence
  Synthetic
caauggaugcuccuuagcu

SEQ ID NO: 65546 - RNA, 20 nt, Artificial Sequence
  Synthetic
acaauggaugcuccuuagcu

SEQ ID NO: 65547 - RNA, 21 nt, Artificial Sequence
  Synthetic
cacaauggaugcuccuuagcu

SEQ ID NO: 65548 - RNA, 22 nt, Artificial Sequence
  Synthetic
ucacaauggaugcuccuuagcu

SEQ ID NO: 65549 - RNA, 23 nt, Artificial Sequence
  Synthetic
cucacaauggaugcuccuuagcu

SEQ ID NO: 65550 - RNA, 24 nt, Artificial Sequence
  Synthetic
ucucacaauggaugcuccuuagcu

SEQ ID NO: 65551 - RNA, 19 nt, Artificial Sequence
  Synthetic
ugaaguucuuuccuuagcu

SEQ ID NO: 65552 - RNA, 21 nt, Artificial Sequence
  Synthetic
ugugaaguucuuuccuuagcu

SEQ ID NO: 65553 - RNA, 22 nt, Artificial Sequence
  Synthetic
uugugaaguucuuuccuuagcu

SEQ ID NO: 65554 - RNA, 23 nt, Artificial Sequence
  Synthetic
uuugugaaguucuuuccuuagcu

SEQ ID NO: 65555 - RNA, 24 nt, Artificial Sequence
  Synthetic
uuuugugaaguucuuuccuuagcu

SEQ ID NO: 65556 - RNA, 18 nt, Artificial Sequence
  Synthetic
uauagaaacucuuuagcu

SEQ ID NO: 65557 - RNA, 20 nt, Artificial Sequence
  Synthetic
aguauagaaacucuuuagcu

SEQ ID NO: 65558 - RNA, 21 nt, Artificial Sequence
  Synthetic
aaguauagaaacucuuuagcu

SEQ ID NO: 65559 - RNA, 22 nt, Artificial Sequence
  Synthetic
aaaguauagaaacucuuuagcu

SEQ ID NO: 65560 - RNA, 23 nt, Artificial Sequence
  Synthetic
uaaaguauagaaacucuuuagcu

SEQ ID NO: 65561 - RNA, 24 nt, Artificial Sequence
  Synthetic
auaaaguauagaaacucuuuagcu

SEQ ID NO: 65562 - RNA, 20 nt, Artificial Sequence
  Synthetic
uggcauuguucucuuuagcu

SEQ ID NO: 65563 - RNA, 21 nt, Artificial Sequence
  Synthetic
auggcauuguucucuuuagcu

SEQ ID NO: 65564 - RNA, 22 nt, Artificial Sequence
  Synthetic
aauggcauuguucucuuuagcu

SEQ ID NO: 65565 - RNA, 23 nt, Artificial Sequence
  Synthetic
aaauggcauuguucucuuuagcu

SEQ ID NO: 65566 - RNA, 24 nt, Artificial Sequence
  Synthetic
aaaauggcauuguucucuuuagcu

SEQ ID NO: 65567 - RNA, 19 nt, Artificial Sequence
  Synthetic
ugugcuaaguuaacacgcu

SEQ ID NO: 65568 - RNA, 20 nt, Artificial Sequence
  Synthetic
augugcuaaguuaacacgcu

SEQ ID NO: 65569 - RNA, 21 nt, Artificial Sequence
  Synthetic
uaugugcuaaguuaacacgcu

SEQ ID NO: 65570 - RNA, 22 nt, Artificial Sequence
  Synthetic
auaugugcuaaguuaacacgcu

SEQ ID NO: 65571 - RNA, 24 nt, Artificial Sequence
  Synthetic
agauaugugcuaaguuaacacgcu

SEQ ID NO: 65572 - RNA, 18 nt, Artificial Sequence
  Synthetic
cacuuuuaaagggccgcu

SEQ ID NO: 65573 - RNA, 19 nt, Artificial Sequence
  Synthetic
ucacuuuuaaagggccgcu

SEQ ID NO: 65574 - RNA, 21 nt, Artificial Sequence
  Synthetic
agucacuuuuaaagggccgcu

SEQ ID NO: 65575 - RNA, 22 nt, Artificial Sequence
  Synthetic
uagucacuuuuaaagggccgcu

SEQ ID NO: 65576 - RNA, 23 nt, Artificial Sequence
  Synthetic
uuagucacuuuuaaagggccgcu

SEQ ID NO: 65577 - RNA, 18 nt, Artificial Sequence
  Synthetic
cacuuaaaggucuucgcu

SEQ ID NO: 65578 - RNA, 19 nt, Artificial Sequence
  Synthetic
acacuuaaaggucuucgcu

SEQ ID NO: 65579 - RNA, 20 nt, Artificial Sequence
  Synthetic
aacacuuaaaggucuucgcu

SEQ ID NO: 65580 - RNA, 21 nt, Artificial Sequence
  Synthetic
uaacacuuaaaggucuucgcu

SEQ ID NO: 65581 - RNA, 22 nt, Artificial Sequence
  Synthetic
auaacacuuaaaggucuucgcu

SEQ ID NO: 65582 - RNA, 23 nt, Artificial Sequence
  Synthetic
aauaacacuuaaaggucuucgcu

SEQ ID NO: 65583 - RNA, 24 nt, Artificial Sequence
  Synthetic
aaauaacacuuaaaggucuucgcu

SEQ ID NO: 65584 - RNA, 18 nt, Artificial Sequence
  Synthetic
acaguccuaacuuucgcu

SEQ ID NO: 65585 - RNA, 19 nt, Artificial Sequence
  Synthetic
aacaguccuaacuuucgcu

SEQ ID NO: 65586 - RNA, 20 nt, Artificial Sequence
  Synthetic
uaacaguccuaacuuucgcu

SEQ ID NO: 65587 - RNA, 21 nt, Artificial Sequence
  Synthetic
auaacaguccuaacuuucgcu

SEQ ID NO: 65588 - RNA, 22 nt, Artificial Sequence
  Synthetic
uauaacaguccuaacuuucgcu

SEQ ID NO: 65589 - RNA, 19 nt, Artificial Sequence
  Synthetic
ugcaacgcuacguaaggcu

SEQ ID NO: 65590 - RNA, 20 nt, Artificial Sequence
  Synthetic
cugcaacgcuacguaaggcu

SEQ ID NO: 65591 - RNA, 21 nt, Artificial Sequence
  Synthetic
ccugcaacgcuacguaaggcu

SEQ ID NO: 65592 - RNA, 23 nt, Artificial Sequence
  Synthetic
ugccugcaacgcuacguaaggcu

SEQ ID NO: 65593 - RNA, 24 nt, Artificial Sequence
  Synthetic
augccugcaacgcuacguaaggcu

SEQ ID NO: 65594 - RNA, 19 nt, Artificial Sequence
  Synthetic
agagagauuuucccaggcu

SEQ ID NO: 65595 - RNA, 20 nt, Artificial Sequence
  Synthetic
aagagagauuuucccaggcu

SEQ ID NO: 65596 - RNA, 21 nt, Artificial Sequence
  Synthetic
caagagagauuuucccaggcu

SEQ ID NO: 65597 - RNA, 22 nt, Artificial Sequence
  Synthetic
ucaagagagauuuucccaggcu

SEQ ID NO: 65598 - RNA, 24 nt, Artificial Sequence
  Synthetic
ugucaagagagauuuucccaggcu

SEQ ID NO: 65599 - RNA, 18 nt, Artificial Sequence
  Synthetic
uggugaagagaggaggcu

SEQ ID NO: 65600 - RNA, 20 nt, Artificial Sequence
  Synthetic
aguggugaagagaggaggcu

SEQ ID NO: 65601 - RNA, 22 nt, Artificial Sequence
  Synthetic
agaguggugaagagaggaggcu

SEQ ID NO: 65602 - RNA, 23 nt, Artificial Sequence
  Synthetic
aagaguggugaagagaggaggcu

SEQ ID NO: 65603 - RNA, 24 nt, Artificial Sequence
  Synthetic
caagaguggugaagagaggaggcu

SEQ ID NO: 65604 - RNA, 20 nt, Artificial Sequence
  Synthetic
aggaguauuucccugaggcu

SEQ ID NO: 65605 - RNA, 22 nt, Artificial Sequence
  Synthetic
ugaggaguauuucccugaggcu

SEQ ID NO: 65606 - RNA, 23 nt, Artificial Sequence
  Synthetic
uugaggaguauuucccugaggcu

SEQ ID NO: 65607 - RNA, 24 nt, Artificial Sequence
  Synthetic
uuugaggaguauuucccugaggcu

SEQ ID NO: 65608 - RNA, 18 nt, Artificial Sequence
  Synthetic
augaugaugaaauaggcu

SEQ ID NO: 65609 - RNA, 19 nt, Artificial Sequence
  Synthetic
aaugaugaugaaauaggcu

SEQ ID NO: 65610 - RNA, 20 nt, Artificial Sequence
  Synthetic
uaaugaugaugaaauaggcu

SEQ ID NO: 65611 - RNA, 21 nt, Artificial Sequence
  Synthetic
auaaugaugaugaaauaggcu

SEQ ID NO: 65612 - RNA, 22 nt, Artificial Sequence
  Synthetic
aauaaugaugaugaaauaggcu

SEQ ID NO: 65613 - RNA, 23 nt, Artificial Sequence
  Synthetic
aaauaaugaugaugaaauaggcu

SEQ ID NO: 65614 - RNA, 24 nt, Artificial Sequence
  Synthetic
caaauaaugaugaugaaauaggcu

SEQ ID NO: 65615 - RNA, 18 nt, Artificial Sequence
  Synthetic
auuuacaaugguucggcu

SEQ ID NO: 65616 - RNA, 20 nt, Artificial Sequence
  Synthetic
ugauuuacaaugguucggcu

SEQ ID NO: 65617 - RNA, 21 nt, Artificial Sequence
  Synthetic
uugauuuacaaugguucggcu

SEQ ID NO: 65618 - RNA, 22 nt, Artificial Sequence
  Synthetic
uuugauuuacaaugguucggcu

SEQ ID NO: 65619 - RNA, 23 nt, Artificial Sequence
  Synthetic
uuuugauuuacaaugguucggcu

SEQ ID NO: 65620 - RNA, 21 nt, Artificial Sequence
  Synthetic
ugggguuucuauggaagggcu

SEQ ID NO: 65621 - RNA, 22 nt, Artificial Sequence
  Synthetic
cugggguuucuauggaagggcu

SEQ ID NO: 65622 - RNA, 23 nt, Artificial Sequence
  Synthetic
ucugggguuucuauggaagggcu

SEQ ID NO: 65623 - RNA, 24 nt, Artificial Sequence
  Synthetic
aucugggguuucuauggaagggcu

SEQ ID NO: 65624 - RNA, 18 nt, Artificial Sequence
  Synthetic
cuauauagccucagggcu

SEQ ID NO: 65625 - RNA, 19 nt, Artificial Sequence
  Synthetic
ucuauauagccucagggcu

SEQ ID NO: 65626 - RNA, 20 nt, Artificial Sequence
  Synthetic
uucuauauagccucagggcu

SEQ ID NO: 65627 - RNA, 21 nt, Artificial Sequence
  Synthetic
cuucuauauagccucagggcu

SEQ ID NO: 65628 - RNA, 22 nt, Artificial Sequence
  Synthetic
ucuucuauauagccucagggcu

SEQ ID NO: 65629 - RNA, 24 nt, Artificial Sequence
  Synthetic
ugucuucuauauagccucagggcu

SEQ ID NO: 65630 - RNA, 18 nt, Artificial Sequence
  Synthetic
cuuucuuugaagggggcu

SEQ ID NO: 65631 - RNA, 19 nt, Artificial Sequence
  Synthetic
ucuuucuuugaagggggcu

SEQ ID NO: 65632 - RNA, 21 nt, Artificial Sequence
  Synthetic
agucuuucuuugaagggggcu

SEQ ID NO: 65633 - RNA, 23 nt, Artificial Sequence
  Synthetic
agagucuuucuuugaagggggcu

SEQ ID NO: 65634 - RNA, 24 nt, Artificial Sequence
  Synthetic
aagagucuuucuuugaagggggcu

SEQ ID NO: 65635 - RNA, 19 nt, Artificial Sequence
  Synthetic
ugugcaagguauuggggcu

SEQ ID NO: 65636 - RNA, 21 nt, Artificial Sequence
  Synthetic
agugugcaagguauuggggcu

SEQ ID NO: 65637 - RNA, 22 nt, Artificial Sequence
  Synthetic
cagugugcaagguauuggggcu

SEQ ID NO: 65638 - RNA, 23 nt, Artificial Sequence
  Synthetic
acagugugcaagguauuggggcu

SEQ ID NO: 65639 - RNA, 24 nt, Artificial Sequence
  Synthetic
uacagugugcaagguauuggggcu

SEQ ID NO: 65640 - RNA, 19 nt, Artificial Sequence
  Synthetic
uguugggcacugaauggcu

SEQ ID NO: 65641 - RNA, 20 nt, Artificial Sequence
  Synthetic
auguugggcacugaauggcu

SEQ ID NO: 65642 - RNA, 22 nt, Artificial Sequence
  Synthetic
agauguugggcacugaauggcu

SEQ ID NO: 65643 - RNA, 23 nt, Artificial Sequence
  Synthetic
cagauguugggcacugaauggcu

SEQ ID NO: 65644 - RNA, 24 nt, Artificial Sequence
  Synthetic
ucagauguugggcacugaauggcu

SEQ ID NO: 65645 - RNA, 18 nt, Artificial Sequence
  Synthetic
caacucuuuauuauggcu

SEQ ID NO: 65646 - RNA, 19 nt, Artificial Sequence
  Synthetic
ccaacucuuuauuauggcu

SEQ ID NO: 65647 - RNA, 20 nt, Artificial Sequence
  Synthetic
cccaacucuuuauuauggcu

SEQ ID NO: 65648 - RNA, 21 nt, Artificial Sequence
  Synthetic
acccaacucuuuauuauggcu

SEQ ID NO: 65649 - RNA, 22 nt, Artificial Sequence
  Synthetic
cacccaacucuuuauuauggcu

SEQ ID NO: 65650 - RNA, 23 nt, Artificial Sequence
  Synthetic
acacccaacucuuuauuauggcu

SEQ ID NO: 65651 - RNA, 24 nt, Artificial Sequence
  Synthetic
aacacccaacucuuuauuauggcu

SEQ ID NO: 65652 - RNA, 18 nt, Artificial Sequence
  Synthetic
agauuaucuugacuggcu

SEQ ID NO: 65653 - RNA, 20 nt, Artificial Sequence
  Synthetic
ugagauuaucuugacuggcu

SEQ ID NO: 65654 - RNA, 21 nt, Artificial Sequence
  Synthetic
augagauuaucuugacuggcu

SEQ ID NO: 65655 - RNA, 24 nt, Artificial Sequence
  Synthetic
aggaugagauuaucuugacuggcu

SEQ ID NO: 65656 - RNA, 18 nt, Artificial Sequence
  Synthetic
uguucacgaucaguggcu

SEQ ID NO: 65657 - RNA, 19 nt, Artificial Sequence
  Synthetic
cuguucacgaucaguggcu

SEQ ID NO: 65658 - RNA, 21 nt, Artificial Sequence
  Synthetic
agcuguucacgaucaguggcu

SEQ ID NO: 65659 - RNA, 22 nt, Artificial Sequence
  Synthetic
uagcuguucacgaucaguggcu

SEQ ID NO: 65660 - RNA, 23 nt, Artificial Sequence
  Synthetic
auagcuguucacgaucaguggcu

SEQ ID NO: 65661 - RNA, 24 nt, Artificial Sequence
  Synthetic
aauagcuguucacgaucaguggcu

SEQ ID NO: 65662 - RNA, 18 nt, Artificial Sequence
  Synthetic
uccucagucccuguggcu

SEQ ID NO: 65663 - RNA, 19 nt, Artificial Sequence
  Synthetic
auccucagucccuguggcu

SEQ ID NO: 65664 - RNA, 20 nt, Artificial Sequence
  Synthetic
cauccucagucccuguggcu

SEQ ID NO: 65665 - RNA, 21 nt, Artificial Sequence
  Synthetic
ccauccucagucccuguggcu

SEQ ID NO: 65666 - RNA, 22 nt, Artificial Sequence
  Synthetic
accauccucagucccuguggcu

SEQ ID NO: 65667 - RNA, 23 nt, Artificial Sequence
  Synthetic
uaccauccucagucccuguggcu

SEQ ID NO: 65668 - RNA, 24 nt, Artificial Sequence
  Synthetic
uuaccauccucagucccuguggcu

SEQ ID NO: 65669 - RNA, 19 nt, Artificial Sequence
  Synthetic
agacuaugcauacuuggcu

SEQ ID NO: 65670 - RNA, 20 nt, Artificial Sequence
  Synthetic
aagacuaugcauacuuggcu

SEQ ID NO: 65671 - RNA, 21 nt, Artificial Sequence
  Synthetic
uaagacuaugcauacuuggcu

SEQ ID NO: 65672 - RNA, 22 nt, Artificial Sequence
  Synthetic
uuaagacuaugcauacuuggcu

SEQ ID NO: 65673 - RNA, 24 nt, Artificial Sequence
  Synthetic
aguuaagacuaugcauacuuggcu

SEQ ID NO: 65674 - RNA, 18 nt, Artificial Sequence
  Synthetic
acuggggacgaguuggcu

SEQ ID NO: 65675 - RNA, 19 nt, Artificial Sequence
  Synthetic
aacuggggacgaguuggcu

SEQ ID NO: 65676 - RNA, 20 nt, Artificial Sequence
  Synthetic
caacuggggacgaguuggcu

SEQ ID NO: 65677 - RNA, 21 nt, Artificial Sequence
  Synthetic
ccaacuggggacgaguuggcu

SEQ ID NO: 65678 - RNA, 22 nt, Artificial Sequence
  Synthetic
uccaacuggggacgaguuggcu

SEQ ID NO: 65679 - RNA, 23 nt, Artificial Sequence
  Synthetic
cuccaacuggggacgaguuggcu

SEQ ID NO: 65680 - RNA, 24 nt, Artificial Sequence
  Synthetic
ucuccaacuggggacgaguuggcu

SEQ ID NO: 65681 - RNA, 18 nt, Artificial Sequence
  Synthetic
ccaugauauauuuuggcu

SEQ ID NO: 65682 - RNA, 20 nt, Artificial Sequence
  Synthetic
agccaugauauauuuuggcu

SEQ ID NO: 65683 - RNA, 21 nt, Artificial Sequence
  Synthetic
uagccaugauauauuuuggcu

SEQ ID NO: 65684 - RNA, 22 nt, Artificial Sequence
  Synthetic
auagccaugauauauuuuggcu

SEQ ID NO: 65685 - RNA, 23 nt, Artificial Sequence
  Synthetic
uauagccaugauauauuuuggcu

SEQ ID NO: 65686 - RNA, 24 nt, Artificial Sequence
  Synthetic
uuauagccaugauauauuuuggcu

SEQ ID NO: 65687 - RNA, 18 nt, Artificial Sequence
  Synthetic
auucuguagcaaaaugcu

SEQ ID NO: 65688 - RNA, 19 nt, Artificial Sequence
  Synthetic
cauucuguagcaaaaugcu

SEQ ID NO: 65689 - RNA, 21 nt, Artificial Sequence
  Synthetic
agcauucuguagcaaaaugcu

SEQ ID NO: 65690 - RNA, 23 nt, Artificial Sequence
  Synthetic
cgagcauucuguagcaaaaugcu

SEQ ID NO: 65691 - RNA, 24 nt, Artificial Sequence
  Synthetic
ucgagcauucuguagcaaaaugcu

SEQ ID NO: 65692 - RNA, 18 nt, Artificial Sequence
  Synthetic
agucaagacagaaaugcu

SEQ ID NO: 65693 - RNA, 20 nt, Artificial Sequence
  Synthetic
agagucaagacagaaaugcu

SEQ ID NO: 65694 - RNA, 21 nt, Artificial Sequence
  Synthetic
cagagucaagacagaaaugcu

SEQ ID NO: 65695 - RNA, 22 nt, Artificial Sequence
  Synthetic
ucagagucaagacagaaaugcu

SEQ ID NO: 65696 - RNA, 23 nt, Artificial Sequence
  Synthetic
cucagagucaagacagaaaugcu

SEQ ID NO: 65697 - RNA, 24 nt, Artificial Sequence
  Synthetic
ucucagagucaagacagaaaugcu

SEQ ID NO: 65698 - RNA, 18 nt, Artificial Sequence
  Synthetic
cuauguucucacaaugcu

SEQ ID NO: 65699 - RNA, 19 nt, Artificial Sequence
  Synthetic
ucuauguucucacaaugcu

SEQ ID NO: 65700 - RNA, 20 nt, Artificial Sequence
  Synthetic
uucuauguucucacaaugcu

SEQ ID NO: 65701 - RNA, 21 nt, Artificial Sequence
  Synthetic
cuucuauguucucacaaugcu

SEQ ID NO: 65702 - RNA, 22 nt, Artificial Sequence
  Synthetic
ucuucuauguucucacaaugcu

SEQ ID NO: 65703 - RNA, 23 nt, Artificial Sequence
  Synthetic
aucuucuauguucucacaaugcu

SEQ ID NO: 65704 - RNA, 24 nt, Artificial Sequence
  Synthetic
uaucuucuauguucucacaaugcu

SEQ ID NO: 65705 - RNA, 19 nt, Artificial Sequence
  Synthetic
ugagaagaugaagaaugcu

SEQ ID NO: 65706 - RNA, 20 nt, Artificial Sequence
  Synthetic
uugagaagaugaagaaugcu

SEQ ID NO: 65707 - RNA, 22 nt, Artificial Sequence
  Synthetic
uguugagaagaugaagaaugcu

SEQ ID NO: 65708 - RNA, 24 nt, Artificial Sequence
  Synthetic
aguguugagaagaugaagaaugcu

SEQ ID NO: 65709 - RNA, 18 nt, Artificial Sequence
  Synthetic
cucuguaauauacaugcu

SEQ ID NO: 65710 - RNA, 19 nt, Artificial Sequence
  Synthetic
ucucuguaauauacaugcu

SEQ ID NO: 65711 - RNA, 20 nt, Artificial Sequence
  Synthetic
uucucuguaauauacaugcu

SEQ ID NO: 65712 - RNA, 23 nt, Artificial Sequence
  Synthetic
agguucucuguaauauacaugcu

SEQ ID NO: 65713 - RNA, 24 nt, Artificial Sequence
  Synthetic
cagguucucuguaauauacaugcu

SEQ ID NO: 65714 - RNA, 20 nt, Artificial Sequence
  Synthetic
aggagcucugcuugcaugcu

SEQ ID NO: 65715 - RNA, 21 nt, Artificial Sequence
  Synthetic
caggagcucugcuugcaugcu

SEQ ID NO: 65716 - RNA, 22 nt, Artificial Sequence
  Synthetic
ccaggagcucugcuugcaugcu

SEQ ID NO: 65717 - RNA, 23 nt, Artificial Sequence
  Synthetic
accaggagcucugcuugcaugcu

SEQ ID NO: 65718 - RNA, 24 nt, Artificial Sequence
  Synthetic
aaccaggagcucugcuugcaugcu

SEQ ID NO: 65719 - RNA, 18 nt, Artificial Sequence
  Synthetic
uucauucuuugucaugcu

SEQ ID NO: 65720 - RNA, 20 nt, Artificial Sequence
  Synthetic
uguucauucuuugucaugcu

SEQ ID NO: 65721 - RNA, 21 nt, Artificial Sequence
  Synthetic
auguucauucuuugucaugcu

SEQ ID NO: 65722 - RNA, 22 nt, Artificial Sequence
  Synthetic
uauguucauucuuugucaugcu

SEQ ID NO: 65723 - RNA, 23 nt, Artificial Sequence
  Synthetic
auauguucauucuuugucaugcu

SEQ ID NO: 65724 - RNA, 24 nt, Artificial Sequence
  Synthetic
uauauguucauucuuugucaugcu

SEQ ID NO: 65725 - RNA, 18 nt, Artificial Sequence
  Synthetic
ucugccauucuucaugcu

SEQ ID NO: 65726 - RNA, 19 nt, Artificial Sequence
  Synthetic
aucugccauucuucaugcu

SEQ ID NO: 65727 - RNA, 21 nt, Artificial Sequence
  Synthetic
agaucugccauucuucaugcu

SEQ ID NO: 65728 - RNA, 22 nt, Artificial Sequence
  Synthetic
uagaucugccauucuucaugcu

SEQ ID NO: 65729 - RNA, 23 nt, Artificial Sequence
  Synthetic
uuagaucugccauucuucaugcu

SEQ ID NO: 65730 - RNA, 24 nt, Artificial Sequence
  Synthetic
auuagaucugccauucuucaugcu

SEQ ID NO: 65731 - RNA, 18 nt, Artificial Sequence
  Synthetic
accuaugugggcgaugcu

SEQ ID NO: 65732 - RNA, 19 nt, Artificial Sequence
  Synthetic
uaccuaugugggcgaugcu

SEQ ID NO: 65733 - RNA, 21 nt, Artificial Sequence
  Synthetic
uguaccuaugugggcgaugcu

SEQ ID NO: 65734 - RNA, 22 nt, Artificial Sequence
  Synthetic
cuguaccuaugugggcgaugcu

SEQ ID NO: 65735 - RNA, 23 nt, Artificial Sequence
  Synthetic
ucuguaccuaugugggcgaugcu

SEQ ID NO: 65736 - RNA, 18 nt, Artificial Sequence
  Synthetic
acaggucauuaggaugcu

SEQ ID NO: 65737 - RNA, 19 nt, Artificial Sequence
  Synthetic
cacaggucauuaggaugcu

SEQ ID NO: 65738 - RNA, 20 nt, Artificial Sequence
  Synthetic
ccacaggucauuaggaugcu

SEQ ID NO: 65739 - RNA, 21 nt, Artificial Sequence
  Synthetic
uccacaggucauuaggaugcu

SEQ ID NO: 65740 - RNA, 22 nt, Artificial Sequence
  Synthetic
uuccacaggucauuaggaugcu

SEQ ID NO: 65741 - RNA, 24 nt, Artificial Sequence
  Synthetic
aguuccacaggucauuaggaugcu

SEQ ID NO: 65742 - RNA, 18 nt, Artificial Sequence
  Synthetic
auacuaaacccugaugcu

SEQ ID NO: 65743 - RNA, 19 nt, Artificial Sequence
  Synthetic
cauacuaaacccugaugcu

SEQ ID NO: 65744 - RNA, 20 nt, Artificial Sequence
  Synthetic
ucauacuaaacccugaugcu

SEQ ID NO: 65745 - RNA, 22 nt, Artificial Sequence
  Synthetic
agucauacuaaacccugaugcu

SEQ ID NO: 65746 - RNA, 23 nt, Artificial Sequence
  Synthetic
uagucauacuaaacccugaugcu

SEQ ID NO: 65747 - RNA, 24 nt, Artificial Sequence
  Synthetic
uuagucauacuaaacccugaugcu

SEQ ID NO: 65748 - RNA, 18 nt, Artificial Sequence
  Synthetic
acuccguuggcuuaugcu

SEQ ID NO: 65749 - RNA, 19 nt, Artificial Sequence
  Synthetic
uacuccguuggcuuaugcu

SEQ ID NO: 65750 - RNA, 20 nt, Artificial Sequence
  Synthetic
uuacuccguuggcuuaugcu

SEQ ID NO: 65751 - RNA, 21 nt, Artificial Sequence
  Synthetic
auuacuccguuggcuuaugcu

SEQ ID NO: 65752 - RNA, 22 nt, Artificial Sequence
  Synthetic
aauuacuccguuggcuuaugcu

SEQ ID NO: 65753 - RNA, 23 nt, Artificial Sequence
  Synthetic
aaauuacuccguuggcuuaugcu

SEQ ID NO: 65754 - RNA, 24 nt, Artificial Sequence
  Synthetic
uaaauuacuccguuggcuuaugcu

SEQ ID NO: 65755 - RNA, 18 nt, Artificial Sequence
  Synthetic
aagaaauuuuauacugcu

SEQ ID NO: 65756 - RNA, 19 nt, Artificial Sequence
  Synthetic
aaagaaauuuuauacugcu

SEQ ID NO: 65757 - RNA, 20 nt, Artificial Sequence
  Synthetic
uaaagaaauuuuauacugcu

SEQ ID NO: 65758 - RNA, 22 nt, Artificial Sequence
  Synthetic
uguaaagaaauuuuauacugcu

SEQ ID NO: 65759 - RNA, 23 nt, Artificial Sequence
  Synthetic
auguaaagaaauuuuauacugcu

SEQ ID NO: 65760 - RNA, 24 nt, Artificial Sequence
  Synthetic
uauguaaagaaauuuuauacugcu

SEQ ID NO: 65761 - RNA, 18 nt, Artificial Sequence
  Synthetic
cagauacugcuugcugcu

SEQ ID NO: 65762 - RNA, 20 nt, Artificial Sequence
  Synthetic
agcagauacugcuugcugcu

SEQ ID NO: 65763 - RNA, 21 nt, Artificial Sequence
  Synthetic
aagcagauacugcuugcugcu

SEQ ID NO: 65764 - RNA, 22 nt, Artificial Sequence
  Synthetic
aaagcagauacugcuugcugcu

SEQ ID NO: 65765 - RNA, 23 nt, Artificial Sequence
  Synthetic
caaagcagauacugcuugcugcu

SEQ ID NO: 65766 - RNA, 18 nt, Artificial Sequence
  Synthetic
auuaagcuuacaucugcu

SEQ ID NO: 65767 - RNA, 19 nt, Artificial Sequence
  Synthetic
aauuaagcuuacaucugcu

SEQ ID NO: 65768 - RNA, 20 nt, Artificial Sequence
  Synthetic
aaauuaagcuuacaucugcu

SEQ ID NO: 65769 - RNA, 21 nt, Artificial Sequence
  Synthetic
aaaauuaagcuuacaucugcu

SEQ ID NO: 65770 - RNA, 23 nt, Artificial Sequence
  Synthetic
agaaaauuaagcuuacaucugcu

SEQ ID NO: 65771 - RNA, 24 nt, Artificial Sequence
  Synthetic
aagaaaauuaagcuuacaucugcu

SEQ ID NO: 65772 - RNA, 18 nt, Artificial Sequence
  Synthetic
cgaugaaugccuucugcu

SEQ ID NO: 65773 - RNA, 21 nt, Artificial Sequence
  Synthetic
uggcgaugaaugccuucugcu

SEQ ID NO: 65774 - RNA, 22 nt, Artificial Sequence
  Synthetic
cuggcgaugaaugccuucugcu

SEQ ID NO: 65775 - RNA, 23 nt, Artificial Sequence
  Synthetic
ccuggcgaugaaugccuucugcu

SEQ ID NO: 65776 - RNA, 22 nt, Artificial Sequence
  Synthetic
ugaguuuaauauuagaagugcu

SEQ ID NO: 65777 - RNA, 23 nt, Artificial Sequence
  Synthetic
cugaguuuaauauuagaagugcu

SEQ ID NO: 65778 - RNA, 24 nt, Artificial Sequence
  Synthetic
ucugaguuuaauauuagaagugcu

SEQ ID NO: 65779 - RNA, 18 nt, Artificial Sequence
  Synthetic
acagaguuguuaagugcu

SEQ ID NO: 65780 - RNA, 18 nt, Artificial Sequence
  Synthetic
ccaaugagauccagugcu

SEQ ID NO: 65781 - RNA, 19 nt, Artificial Sequence
  Synthetic
uccaaugagauccagugcu

SEQ ID NO: 65782 - RNA, 20 nt, Artificial Sequence
  Synthetic
uuccaaugagauccagugcu

SEQ ID NO: 65783 - RNA, 21 nt, Artificial Sequence
  Synthetic
auuccaaugagauccagugcu

SEQ ID NO: 65784 - RNA, 19 nt, Artificial Sequence
  Synthetic
aggaggcugaagcagugcu

SEQ ID NO: 65785 - RNA, 18 nt, Artificial Sequence
  Synthetic
uauuacuaugauagugcu

SEQ ID NO: 65786 - RNA, 22 nt, Artificial Sequence
  Synthetic
aggguauuacuaugauagugcu

SEQ ID NO: 65787 - RNA, 23 nt, Artificial Sequence
  Synthetic
aaggguauuacuaugauagugcu

SEQ ID NO: 65788 - RNA, 24 nt, Artificial Sequence
  Synthetic
uaaggguauuacuaugauagugcu

SEQ ID NO: 65789 - RNA, 18 nt, Artificial Sequence
  Synthetic
uaagauucucuuagugcu

SEQ ID NO: 65790 - RNA, 19 nt, Artificial Sequence
  Synthetic
uuaagauucucuuagugcu

SEQ ID NO: 65791 - RNA, 20 nt, Artificial Sequence
  Synthetic
uuuaagauucucuuagugcu

SEQ ID NO: 65792 - RNA, 21 nt, Artificial Sequence
  Synthetic
uuuuaagauucucuuagugcu

SEQ ID NO: 65793 - RNA, 22 nt, Artificial Sequence
  Synthetic
auuuuaagauucucuuagugcu

SEQ ID NO: 65794 - RNA, 23 nt, Artificial Sequence
  Synthetic
aauuuuaagauucucuuagugcu

SEQ ID NO: 65795 - RNA, 24 nt, Artificial Sequence
  Synthetic
caauuuuaagauucucuuagugcu

SEQ ID NO: 65796 - RNA, 18 nt, Artificial Sequence
  Synthetic
aauaaaaguaaaggugcu

SEQ ID NO: 65797 - RNA, 19 nt, Artificial Sequence
  Synthetic
aaauaaaaguaaaggugcu

SEQ ID NO: 65798 - RNA, 20 nt, Artificial Sequence
  Synthetic
uaaauaaaaguaaaggugcu

SEQ ID NO: 65799 - RNA, 21 nt, Artificial Sequence
  Synthetic
auaaauaaaaguaaaggugcu

SEQ ID NO: 65800 - RNA, 23 nt, Artificial Sequence
  Synthetic
agauaaauaaaaguaaaggugcu

SEQ ID NO: 65801 - RNA, 19 nt, Artificial Sequence
  Synthetic
aggaguuuuuuaaggugcu

SEQ ID NO: 65802 - RNA, 20 nt, Artificial Sequence
  Synthetic
caggaguuuuuuaaggugcu

SEQ ID NO: 65803 - RNA, 21 nt, Artificial Sequence
  Synthetic
ucaggaguuuuuuaaggugcu

SEQ ID NO: 65804 - RNA, 22 nt, Artificial Sequence
  Synthetic
uucaggaguuuuuuaaggugcu

SEQ ID NO: 65805 - RNA, 23 nt, Artificial Sequence
  Synthetic
auucaggaguuuuuuaaggugcu

SEQ ID NO: 65806 - RNA, 24 nt, Artificial Sequence
  Synthetic
aauucaggaguuuuuuaaggugcu

SEQ ID NO: 65807 - RNA, 18 nt, Artificial Sequence
  Synthetic
caagccgcaguaggugcu

SEQ ID NO: 65808 - RNA, 19 nt, Artificial Sequence
  Synthetic
acaagccgcaguaggugcu

SEQ ID NO: 65809 - RNA, 20 nt, Artificial Sequence
  Synthetic
uacaagccgcaguaggugcu

SEQ ID NO: 65810 - RNA, 21 nt, Artificial Sequence
  Synthetic
uuacaagccgcaguaggugcu

SEQ ID NO: 65811 - RNA, 22 nt, Artificial Sequence
  Synthetic
uuuacaagccgcaguaggugcu

SEQ ID NO: 65812 - RNA, 23 nt, Artificial Sequence
  Synthetic
auuuacaagccgcaguaggugcu

SEQ ID NO: 65813 - RNA, 24 nt, Artificial Sequence
  Synthetic
uauuuacaagccgcaguaggugcu

SEQ ID NO: 65814 - RNA, 22 nt, Artificial Sequence
  Synthetic
uguugagcaucauacuggugcu

SEQ ID NO: 65815 - RNA, 24 nt, Artificial Sequence
  Synthetic
uguguugagcaucauacuggugcu

SEQ ID NO: 65816 - RNA, 18 nt, Artificial Sequence
  Synthetic
uggcuccugucuggugcu

SEQ ID NO: 65817 - RNA, 19 nt, Artificial Sequence
  Synthetic
uuggcuccugucuggugcu

SEQ ID NO: 65818 - RNA, 21 nt, Artificial Sequence
  Synthetic
uguuggcuccugucuggugcu

SEQ ID NO: 65819 - RNA, 23 nt, Artificial Sequence
  Synthetic
aguguuggcuccugucuggugcu

SEQ ID NO: 65820 - RNA, 24 nt, Artificial Sequence
  Synthetic
caguguuggcuccugucuggugcu

SEQ ID NO: 65821 - RNA, 19 nt, Artificial Sequence
  Synthetic
agcauguagcuaaugugcu

SEQ ID NO: 65822 - RNA, 20 nt, Artificial Sequence
  Synthetic
uagcauguagcuaaugugcu

SEQ ID NO: 65823 - RNA, 21 nt, Artificial Sequence
  Synthetic
auagcauguagcuaaugugcu

SEQ ID NO: 65824 - RNA, 22 nt, Artificial Sequence
  Synthetic
aauagcauguagcuaaugugcu

SEQ ID NO: 65825 - RNA, 23 nt, Artificial Sequence
  Synthetic
caauagcauguagcuaaugugcu

SEQ ID NO: 65826 - RNA, 24 nt, Artificial Sequence
  Synthetic
acaauagcauguagcuaaugugcu

SEQ ID NO: 65827 - RNA, 18 nt, Artificial Sequence
  Synthetic
cguuugaguguaugugcu

SEQ ID NO: 65828 - RNA, 19 nt, Artificial Sequence
  Synthetic
acguuugaguguaugugcu

SEQ ID NO: 65829 - RNA, 20 nt, Artificial Sequence
  Synthetic
cacguuugaguguaugugcu

SEQ ID NO: 65830 - RNA, 21 nt, Artificial Sequence
  Synthetic
ucacguuugaguguaugugcu

SEQ ID NO: 65831 - RNA, 22 nt, Artificial Sequence
  Synthetic
aucacguuugaguguaugugcu

SEQ ID NO: 65832 - RNA, 24 nt, Artificial Sequence
  Synthetic
ugaucacguuugaguguaugugcu

SEQ ID NO: 65833 - RNA, 18 nt, Artificial Sequence
  Synthetic
aagaauuuguaaauugcu

SEQ ID NO: 65834 - RNA, 19 nt, Artificial Sequence
  Synthetic
caagaauuuguaaauugcu

SEQ ID NO: 65835 - RNA, 20 nt, Artificial Sequence
  Synthetic
acaagaauuuguaaauugcu

SEQ ID NO: 65836 - RNA, 21 nt, Artificial Sequence
  Synthetic
uacaagaauuuguaaauugcu

SEQ ID NO: 65837 - RNA, 22 nt, Artificial Sequence
  Synthetic
uuacaagaauuuguaaauugcu

SEQ ID NO: 65838 - RNA, 23 nt, Artificial Sequence
  Synthetic
auuacaagaauuuguaaauugcu

SEQ ID NO: 65839 - RNA, 19 nt, Artificial Sequence
  Synthetic
uguguguguucacauugcu

SEQ ID NO: 65840 - RNA, 20 nt, Artificial Sequence
  Synthetic
cuguguguguucacauugcu

SEQ ID NO: 65841 - RNA, 21 nt, Artificial Sequence
  Synthetic
acuguguguguucacauugcu

SEQ ID NO: 65842 - RNA, 22 nt, Artificial Sequence
  Synthetic
cacuguguguguucacauugcu

SEQ ID NO: 65843 - RNA, 23 nt, Artificial Sequence
  Synthetic
acacuguguguguucacauugcu

SEQ ID NO: 65844 - RNA, 24 nt, Artificial Sequence
  Synthetic
aacacuguguguguucacauugcu

SEQ ID NO: 65845 - RNA, 18 nt, Artificial Sequence
  Synthetic
uaugagaaguagauugcu

SEQ ID NO: 65846 - RNA, 19 nt, Artificial Sequence
  Synthetic
uuaugagaaguagauugcu

SEQ ID NO: 65847 - RNA, 20 nt, Artificial Sequence
  Synthetic
uuuaugagaaguagauugcu

SEQ ID NO: 65848 - RNA, 21 nt, Artificial Sequence
  Synthetic
uuuuaugagaaguagauugcu

SEQ ID NO: 65849 - RNA, 22 nt, Artificial Sequence
  Synthetic
uuuuuaugagaaguagauugcu

SEQ ID NO: 65850 - RNA, 24 nt, Artificial Sequence
  Synthetic
uguuuuuaugagaaguagauugcu

SEQ ID NO: 65851 - RNA, 21 nt, Artificial Sequence
  Synthetic
uuuauuuucuuuuguauugcu

SEQ ID NO: 65852 - RNA, 22 nt, Artificial Sequence
  Synthetic
auuuauuuucuuuuguauugcu

SEQ ID NO: 65853 - RNA, 23 nt, Artificial Sequence
  Synthetic
aauuuauuuucuuuuguauugcu

SEQ ID NO: 65854 - RNA, 18 nt, Artificial Sequence
  Synthetic
aacagaaugacccuugcu

SEQ ID NO: 65855 - RNA, 21 nt, Artificial Sequence
  Synthetic
aggaacagaaugacccuugcu

SEQ ID NO: 65856 - RNA, 22 nt, Artificial Sequence
  Synthetic
uaggaacagaaugacccuugcu

SEQ ID NO: 65857 - RNA, 23 nt, Artificial Sequence
  Synthetic
auaggaacagaaugacccuugcu

SEQ ID NO: 65858 - RNA, 24 nt, Artificial Sequence
  Synthetic
cauaggaacagaaugacccuugcu

SEQ ID NO: 65859 - RNA, 18 nt, Artificial Sequence
  Synthetic
acagaauugggccuugcu

SEQ ID NO: 65860 - RNA, 19 nt, Artificial Sequence
  Synthetic
aacagaauugggccuugcu

SEQ ID NO: 65861 - RNA, 18 nt, Artificial Sequence
  Synthetic
auuagccgcagaguugcu

SEQ ID NO: 65862 - RNA, 19 nt, Artificial Sequence
  Synthetic
uauuagccgcagaguugcu

SEQ ID NO: 65863 - RNA, 21 nt, Artificial Sequence
  Synthetic
uguauuagccgcagaguugcu

SEQ ID NO: 65864 - RNA, 22 nt, Artificial Sequence
  Synthetic
auguauuagccgcagaguugcu

SEQ ID NO: 65865 - RNA, 23 nt, Artificial Sequence
  Synthetic
cauguauuagccgcagaguugcu

SEQ ID NO: 65866 - RNA, 24 nt, Artificial Sequence
  Synthetic
acauguauuagccgcagaguugcu

SEQ ID NO: 65867 - RNA, 18 nt, Artificial Sequence
  Synthetic
acaugaucccauguugcu

SEQ ID NO: 65868 - RNA, 19 nt, Artificial Sequence
  Synthetic
aacaugaucccauguugcu

SEQ ID NO: 65869 - RNA, 20 nt, Artificial Sequence
  Synthetic
aaacaugaucccauguugcu

SEQ ID NO: 65870 - RNA, 22 nt, Artificial Sequence
  Synthetic
ugaaacaugaucccauguugcu

SEQ ID NO: 65871 - RNA, 23 nt, Artificial Sequence
  Synthetic
cugaaacaugaucccauguugcu

SEQ ID NO: 65872 - RNA, 24 nt, Artificial Sequence
  Synthetic
ucugaaacaugaucccauguugcu

SEQ ID NO: 65873 - RNA, 18 nt, Artificial Sequence
  Synthetic
aagggggaguccuuugcu

SEQ ID NO: 65874 - RNA, 19 nt, Artificial Sequence
  Synthetic
caagggggaguccuuugcu

SEQ ID NO: 65875 - RNA, 20 nt, Artificial Sequence
  Synthetic
ucaagggggaguccuuugcu

SEQ ID NO: 65876 - RNA, 21 nt, Artificial Sequence
  Synthetic
uucaagggggaguccuuugcu

SEQ ID NO: 65877 - RNA, 22 nt, Artificial Sequence
  Synthetic
auucaagggggaguccuuugcu

SEQ ID NO: 65878 - RNA, 23 nt, Artificial Sequence
  Synthetic
cauucaagggggaguccuuugcu

SEQ ID NO: 65879 - RNA, 24 nt, Artificial Sequence
  Synthetic
ucauucaagggggaguccuuugcu

SEQ ID NO: 65880 - RNA, 18 nt, Artificial Sequence
  Synthetic
uuugacuacugcuuugcu

SEQ ID NO: 65881 - RNA, 19 nt, Artificial Sequence
  Synthetic
cuuugacuacugcuuugcu

SEQ ID NO: 65882 - RNA, 20 nt, Artificial Sequence
  Synthetic
ucuuugacuacugcuuugcu

SEQ ID NO: 65883 - RNA, 21 nt, Artificial Sequence
  Synthetic
uucuuugacuacugcuuugcu

SEQ ID NO: 65884 - RNA, 24 nt, Artificial Sequence
  Synthetic
ugguucuuugacuacugcuuugcu

SEQ ID NO: 65885 - RNA, 18 nt, Artificial Sequence
  Synthetic
agagaaguuaucuuugcu

SEQ ID NO: 65886 - RNA, 19 nt, Artificial Sequence
  Synthetic
aagagaaguuaucuuugcu

SEQ ID NO: 65887 - RNA, 20 nt, Artificial Sequence
  Synthetic
caagagaaguuaucuuugcu

SEQ ID NO: 65888 - RNA, 21 nt, Artificial Sequence
  Synthetic
ucaagagaaguuaucuuugcu

SEQ ID NO: 65889 - RNA, 23 nt, Artificial Sequence
  Synthetic
agucaagagaaguuaucuuugcu

SEQ ID NO: 65890 - RNA, 24 nt, Artificial Sequence
  Synthetic
cagucaagagaaguuaucuuugcu

SEQ ID NO: 65891 - RNA, 18 nt, Artificial Sequence
  Synthetic
ugauaugaagucuuugcu

SEQ ID NO: 65892 - RNA, 19 nt, Artificial Sequence
  Synthetic
uugauaugaagucuuugcu

SEQ ID NO: 65893 - RNA, 20 nt, Artificial Sequence
  Synthetic
cuugauaugaagucuuugcu

SEQ ID NO: 65894 - RNA, 21 nt, Artificial Sequence
  Synthetic
acuugauaugaagucuuugcu

SEQ ID NO: 65895 - RNA, 22 nt, Artificial Sequence
  Synthetic
uacuugauaugaagucuuugcu

SEQ ID NO: 65896 - RNA, 23 nt, Artificial Sequence
  Synthetic
auacuugauaugaagucuuugcu

SEQ ID NO: 65897 - RNA, 24 nt, Artificial Sequence
  Synthetic
cauacuugauaugaagucuuugcu

SEQ ID NO: 65898 - RNA, 18 nt, Artificial Sequence
  Synthetic
uaacuccugaauuuugcu

SEQ ID NO: 65899 - RNA, 19 nt, Artificial Sequence
  Synthetic
uuaacuccugaauuuugcu

SEQ ID NO: 65900 - RNA, 20 nt, Artificial Sequence
  Synthetic
cuuaacuccugaauuuugcu

SEQ ID NO: 65901 - RNA, 21 nt, Artificial Sequence
  Synthetic
acuuaacuccugaauuuugcu

SEQ ID NO: 65902 - RNA, 23 nt, Artificial Sequence
  Synthetic
ugacuuaacuccugaauuuugcu

SEQ ID NO: 65903 - RNA, 24 nt, Artificial Sequence
  Synthetic
uugacuuaacuccugaauuuugcu

SEQ ID NO: 65904 - RNA, 18 nt, Artificial Sequence
  Synthetic
cacagaguugguuuugcu

SEQ ID NO: 65905 - RNA, 19 nt, Artificial Sequence
  Synthetic
ccacagaguugguuuugcu

SEQ ID NO: 65906 - RNA, 20 nt, Artificial Sequence
  Synthetic
accacagaguugguuuugcu

SEQ ID NO: 65907 - RNA, 21 nt, Artificial Sequence
  Synthetic
aaccacagaguugguuuugcu

SEQ ID NO: 65908 - RNA, 22 nt, Artificial Sequence
  Synthetic
aaaccacagaguugguuuugcu

SEQ ID NO: 65909 - RNA, 23 nt, Artificial Sequence
  Synthetic
aaaaccacagaguugguuuugcu

SEQ ID NO: 65910 - RNA, 24 nt, Artificial Sequence
  Synthetic
uaaaaccacagaguugguuuugcu

SEQ ID NO: 65911 - RNA, 22 nt, Artificial Sequence
  Synthetic
ugcaaaauaacuggaaaaaucu

SEQ ID NO: 65912 - RNA, 23 nt, Artificial Sequence
  Synthetic
cugcaaaauaacuggaaaaaucu

SEQ ID NO: 65913 - RNA, 18 nt, Artificial Sequence
  Synthetic
uucuuggauuacaaaucu

SEQ ID NO: 65914 - RNA, 19 nt, Artificial Sequence
  Synthetic
auucuuggauuacaaaucu

SEQ ID NO: 65915 - RNA, 20 nt, Artificial Sequence
  Synthetic
uauucuuggauuacaaaucu

SEQ ID NO: 65916 - RNA, 21 nt, Artificial Sequence
  Synthetic
auauucuuggauuacaaaucu

SEQ ID NO: 65917 - RNA, 22 nt, Artificial Sequence
  Synthetic
cauauucuuggauuacaaaucu

SEQ ID NO: 65918 - RNA, 23 nt, Artificial Sequence
  Synthetic
ucauauucuuggauuacaaaucu

SEQ ID NO: 65919 - RNA, 24 nt, Artificial Sequence
  Synthetic
uucauauucuuggauuacaaaucu

SEQ ID NO: 65920 - RNA, 18 nt, Artificial Sequence
  Synthetic
accacaaacgugaaaucu

SEQ ID NO: 65921 - RNA, 21 nt, Artificial Sequence
  Synthetic
uggaccacaaacgugaaaucu

SEQ ID NO: 65922 - RNA, 23 nt, Artificial Sequence
  Synthetic
cguggaccacaaacgugaaaucu

SEQ ID NO: 65923 - RNA, 24 nt, Artificial Sequence
  Synthetic
ucguggaccacaaacgugaaaucu

SEQ ID NO: 65924 - RNA, 22 nt, Artificial Sequence
  Synthetic
uggacaaaaaucaaauaaaucu

SEQ ID NO: 65925 - RNA, 23 nt, Artificial Sequence
  Synthetic
uuggacaaaaaucaaauaaaucu

SEQ ID NO: 65926 - RNA, 18 nt, Artificial Sequence
  Synthetic
ccuucuuuguauaaaucu

SEQ ID NO: 65927 - RNA, 20 nt, Artificial Sequence
  Synthetic
agccuucuuuguauaaaucu

SEQ ID NO: 65928 - RNA, 21 nt, Artificial Sequence
  Synthetic
uagccuucuuuguauaaaucu

SEQ ID NO: 65929 - RNA, 22 nt, Artificial Sequence
  Synthetic
auagccuucuuuguauaaaucu

SEQ ID NO: 65930 - RNA, 23 nt, Artificial Sequence
  Synthetic
cauagccuucuuuguauaaaucu

SEQ ID NO: 65931 - RNA, 24 nt, Artificial Sequence
  Synthetic
ucauagccuucuuuguauaaaucu

SEQ ID NO: 65932 - RNA, 18 nt, Artificial Sequence
  Synthetic
ugaguaguaauuaaaucu

SEQ ID NO: 65933 - RNA, 20 nt, Artificial Sequence
  Synthetic
agugaguaguaauuaaaucu

SEQ ID NO: 65934 - RNA, 21 nt, Artificial Sequence
  Synthetic
aagugaguaguaauuaaaucu

SEQ ID NO: 65935 - RNA, 22 nt, Artificial Sequence
  Synthetic
caagugaguaguaauuaaaucu

SEQ ID NO: 65936 - RNA, 23 nt, Artificial Sequence
  Synthetic
ucaagugaguaguaauuaaaucu

SEQ ID NO: 65937 - RNA, 24 nt, Artificial Sequence
  Synthetic
uucaagugaguaguaauuaaaucu

SEQ ID NO: 65938 - RNA, 18 nt, Artificial Sequence
  Synthetic
aaagggauucuuaaaucu

SEQ ID NO: 65939 - RNA, 19 nt, Artificial Sequence
  Synthetic
uaaagggauucuuaaaucu

SEQ ID NO: 65940 - RNA, 20 nt, Artificial Sequence
  Synthetic
cuaaagggauucuuaaaucu

SEQ ID NO: 65941 - RNA, 21 nt, Artificial Sequence
  Synthetic
acuaaagggauucuuaaaucu

SEQ ID NO: 65942 - RNA, 22 nt, Artificial Sequence
  Synthetic
uacuaaagggauucuuaaaucu

SEQ ID NO: 65943 - RNA, 23 nt, Artificial Sequence
  Synthetic
uuacuaaagggauucuuaaaucu

SEQ ID NO: 65944 - RNA, 18 nt, Artificial Sequence
  Synthetic
aagauuuuauuuaaaucu

SEQ ID NO: 65945 - RNA, 19 nt, Artificial Sequence
  Synthetic
caagauuuuauuuaaaucu

SEQ ID NO: 65946 - RNA, 20 nt, Artificial Sequence
  Synthetic
ucaagauuuuauuuaaaucu

SEQ ID NO: 65947 - RNA, 21 nt, Artificial Sequence
  Synthetic
aucaagauuuuauuuaaaucu

SEQ ID NO: 65948 - RNA, 22 nt, Artificial Sequence
  Synthetic
uaucaagauuuuauuuaaaucu

SEQ ID NO: 65949 - RNA, 23 nt, Artificial Sequence
  Synthetic
uuaucaagauuuuauuuaaaucu

SEQ ID NO: 65950 - RNA, 24 nt, Artificial Sequence
  Synthetic
cuuaucaagauuuuauuuaaaucu

SEQ ID NO: 65951 - RNA, 18 nt, Artificial Sequence
  Synthetic
aagauaacaagagaaucu

SEQ ID NO: 65952 - RNA, 19 nt, Artificial Sequence
  Synthetic
aaagauaacaagagaaucu

SEQ ID NO: 65953 - RNA, 20 nt, Artificial Sequence
  Synthetic
uaaagauaacaagagaaucu

SEQ ID NO: 65954 - RNA, 21 nt, Artificial Sequence
  Synthetic
auaaagauaacaagagaaucu

SEQ ID NO: 65955 - RNA, 22 nt, Artificial Sequence
  Synthetic
cauaaagauaacaagagaaucu

SEQ ID NO: 65956 - RNA, 23 nt, Artificial Sequence
  Synthetic
ccauaaagauaacaagagaaucu

SEQ ID NO: 65957 - RNA, 24 nt, Artificial Sequence
  Synthetic
cccauaaagauaacaagagaaucu

SEQ ID NO: 65958 - RNA, 18 nt, Artificial Sequence
  Synthetic
agauuccagauagaaucu

SEQ ID NO: 65959 - RNA, 19 nt, Artificial Sequence
  Synthetic
cagauuccagauagaaucu

SEQ ID NO: 65960 - RNA, 20 nt, Artificial Sequence
  Synthetic
ucagauuccagauagaaucu

SEQ ID NO: 65961 - RNA, 21 nt, Artificial Sequence
  Synthetic
uucagauuccagauagaaucu

SEQ ID NO: 65962 - RNA, 22 nt, Artificial Sequence
  Synthetic
cuucagauuccagauagaaucu

SEQ ID NO: 65963 - RNA, 23 nt, Artificial Sequence
  Synthetic
ccuucagauuccagauagaaucu

SEQ ID NO: 65964 - RNA, 18 nt, Artificial Sequence
  Synthetic
aucagacaacuagaaucu

SEQ ID NO: 65965 - RNA, 19 nt, Artificial Sequence
  Synthetic
caucagacaacuagaaucu

SEQ ID NO: 65966 - RNA, 22 nt, Artificial Sequence
  Synthetic
aggcaucagacaacuagaaucu

SEQ ID NO: 65967 - RNA, 23 nt, Artificial Sequence
  Synthetic
aaggcaucagacaacuagaaucu

SEQ ID NO: 65968 - RNA, 18 nt, Artificial Sequence
  Synthetic
cccaugguuuaugaaucu

SEQ ID NO: 65969 - RNA, 19 nt, Artificial Sequence
  Synthetic
ucccaugguuuaugaaucu

SEQ ID NO: 65970 - RNA, 20 nt, Artificial Sequence
  Synthetic
cucccaugguuuaugaaucu

SEQ ID NO: 65971 - RNA, 21 nt, Artificial Sequence
  Synthetic
ccucccaugguuuaugaaucu

SEQ ID NO: 65972 - RNA, 22 nt, Artificial Sequence
  Synthetic
cccucccaugguuuaugaaucu

SEQ ID NO: 65973 - RNA, 23 nt, Artificial Sequence
  Synthetic
ccccucccaugguuuaugaaucu

SEQ ID NO: 65974 - RNA, 18 nt, Artificial Sequence
  Synthetic
auguauaacgcugaaucu

SEQ ID NO: 65975 - RNA, 19 nt, Artificial Sequence
  Synthetic
aauguauaacgcugaaucu

SEQ ID NO: 65976 - RNA, 20 nt, Artificial Sequence
  Synthetic
aaauguauaacgcugaaucu

SEQ ID NO: 65977 - RNA, 21 nt, Artificial Sequence
  Synthetic
aaaauguauaacgcugaaucu

SEQ ID NO: 65978 - RNA, 23 nt, Artificial Sequence
  Synthetic
ugaaaauguauaacgcugaaucu

SEQ ID NO: 65979 - RNA, 24 nt, Artificial Sequence
  Synthetic
uugaaaauguauaacgcugaaucu

SEQ ID NO: 65980 - RNA, 18 nt, Artificial Sequence
  Synthetic
auaaaauucacauaaucu

SEQ ID NO: 65981 - RNA, 19 nt, Artificial Sequence
  Synthetic
uauaaaauucacauaaucu

SEQ ID NO: 65982 - RNA, 20 nt, Artificial Sequence
  Synthetic
auauaaaauucacauaaucu

SEQ ID NO: 65983 - RNA, 22 nt, Artificial Sequence
  Synthetic
agauauaaaauucacauaaucu

SEQ ID NO: 65984 - RNA, 23 nt, Artificial Sequence
  Synthetic
uagauauaaaauucacauaaucu

SEQ ID NO: 65985 - RNA, 24 nt, Artificial Sequence
  Synthetic
cuagauauaaaauucacauaaucu

SEQ ID NO: 65986 - RNA, 18 nt, Artificial Sequence
  Synthetic
aaacauguaaucuaaucu

SEQ ID NO: 65987 - RNA, 19 nt, Artificial Sequence
  Synthetic
aaaacauguaaucuaaucu

SEQ ID NO: 65988 - RNA, 20 nt, Artificial Sequence
  Synthetic
aaaaacauguaaucuaaucu

SEQ ID NO: 65989 - RNA, 21 nt, Artificial Sequence
  Synthetic
caaaaacauguaaucuaaucu

SEQ ID NO: 65990 - RNA, 22 nt, Artificial Sequence
  Synthetic
acaaaaacauguaaucuaaucu

SEQ ID NO: 65991 - RNA, 23 nt, Artificial Sequence
  Synthetic
uacaaaaacauguaaucuaaucu

SEQ ID NO: 65992 - RNA, 24 nt, Artificial Sequence
  Synthetic
uuacaaaaacauguaaucuaaucu

SEQ ID NO: 65993 - RNA, 18 nt, Artificial Sequence
  Synthetic
uuaggcuacaucuaaucu

SEQ ID NO: 65994 - RNA, 19 nt, Artificial Sequence
  Synthetic
auuaggcuacaucuaaucu

SEQ ID NO: 65995 - RNA, 20 nt, Artificial Sequence
  Synthetic
uauuaggcuacaucuaaucu

SEQ ID NO: 65996 - RNA, 21 nt, Artificial Sequence
  Synthetic
uuauuaggcuacaucuaaucu

SEQ ID NO: 65997 - RNA, 22 nt, Artificial Sequence
  Synthetic
auuauuaggcuacaucuaaucu

SEQ ID NO: 65998 - RNA, 23 nt, Artificial Sequence
  Synthetic
cauuauuaggcuacaucuaaucu

SEQ ID NO: 65999 - RNA, 24 nt, Artificial Sequence
  Synthetic
ucauuauuaggcuacaucuaaucu

SEQ ID NO: 66000 - RNA, 18 nt, Artificial Sequence
  Synthetic
acuaguuucaauuaaucu

SEQ ID NO: 66001 - RNA, 19 nt, Artificial Sequence
  Synthetic
aacuaguuucaauuaaucu

SEQ ID NO: 66002 - RNA, 21 nt, Artificial Sequence
  Synthetic
ugaacuaguuucaauuaaucu

SEQ ID NO: 66003 - RNA, 22 nt, Artificial Sequence
  Synthetic
uugaacuaguuucaauuaaucu

SEQ ID NO: 66004 - RNA, 23 nt, Artificial Sequence
  Synthetic
cuugaacuaguuucaauuaaucu

SEQ ID NO: 66005 - RNA, 24 nt, Artificial Sequence
  Synthetic
acuugaacuaguuucaauuaaucu

SEQ ID NO: 66006 - RNA, 18 nt, Artificial Sequence
  Synthetic
uguaggaaauguuaaucu

SEQ ID NO: 66007 - RNA, 19 nt, Artificial Sequence
  Synthetic
uuguaggaaauguuaaucu

SEQ ID NO: 66008 - RNA, 20 nt, Artificial Sequence
  Synthetic
cuuguaggaaauguuaaucu

SEQ ID NO: 66009 - RNA, 21 nt, Artificial Sequence
  Synthetic
ucuuguaggaaauguuaaucu

SEQ ID NO: 66010 - RNA, 23 nt, Artificial Sequence
  Synthetic
ugucuuguaggaaauguuaaucu

SEQ ID NO: 66011 - RNA, 18 nt, Artificial Sequence
  Synthetic
uuuucguauauuuaaucu

SEQ ID NO: 66012 - RNA, 20 nt, Artificial Sequence
  Synthetic
uguuuucguauauuuaaucu

SEQ ID NO: 66013 - RNA, 18 nt, Artificial Sequence
  Synthetic
aaauagauaaaaacaucu

SEQ ID NO: 66014 - RNA, 19 nt, Artificial Sequence
  Synthetic
aaaauagauaaaaacaucu

SEQ ID NO: 66015 - RNA, 21 nt, Artificial Sequence
  Synthetic
agaaaauagauaaaaacaucu

SEQ ID NO: 66016 - RNA, 22 nt, Artificial Sequence
  Synthetic
cagaaaauagauaaaaacaucu

SEQ ID NO: 66017 - RNA, 23 nt, Artificial Sequence
  Synthetic
ucagaaaauagauaaaaacaucu

SEQ ID NO: 66018 - RNA, 24 nt, Artificial Sequence
  Synthetic
aucagaaaauagauaaaaacaucu

SEQ ID NO: 66019 - RNA, 20 nt, Artificial Sequence
  Synthetic
aggcagaacuaaaaacaucu

SEQ ID NO: 66020 - RNA, 21 nt, Artificial Sequence
  Synthetic
uaggcagaacuaaaaacaucu

SEQ ID NO: 66021 - RNA, 22 nt, Artificial Sequence
  Synthetic
uuaggcagaacuaaaaacaucu

SEQ ID NO: 66022 - RNA, 23 nt, Artificial Sequence
  Synthetic
auuaggcagaacuaaaaacaucu

SEQ ID NO: 66023 - RNA, 24 nt, Artificial Sequence
  Synthetic
aauuaggcagaacuaaaaacaucu

SEQ ID NO: 66024 - RNA, 18 nt, Artificial Sequence
  Synthetic
acaugacuuuugacaucu

SEQ ID NO: 66025 - RNA, 19 nt, Artificial Sequence
  Synthetic
cacaugacuuuugacaucu

SEQ ID NO: 66026 - RNA, 20 nt, Artificial Sequence
  Synthetic
ucacaugacuuuugacaucu

SEQ ID NO: 66027 - RNA, 21 nt, Artificial Sequence
  Synthetic
cucacaugacuuuugacaucu

SEQ ID NO: 66028 - RNA, 22 nt, Artificial Sequence
  Synthetic
acucacaugacuuuugacaucu

SEQ ID NO: 66029 - RNA, 23 nt, Artificial Sequence
  Synthetic
aacucacaugacuuuugacaucu

SEQ ID NO: 66030 - RNA, 24 nt, Artificial Sequence
  Synthetic
aaacucacaugacuuuugacaucu

SEQ ID NO: 66031 - RNA, 18 nt, Artificial Sequence
  Synthetic
aaaucacuugcaccaucu

SEQ ID NO: 66032 - RNA, 19 nt, Artificial Sequence
  Synthetic
uaaaucacuugcaccaucu

SEQ ID NO: 66033 - RNA, 20 nt, Artificial Sequence
  Synthetic
uuaaaucacuugcaccaucu

SEQ ID NO: 66034 - RNA, 21 nt, Artificial Sequence
  Synthetic
auuaaaucacuugcaccaucu

SEQ ID NO: 66035 - RNA, 22 nt, Artificial Sequence
  Synthetic
aauuaaaucacuugcaccaucu

SEQ ID NO: 66036 - RNA, 23 nt, Artificial Sequence
  Synthetic
uaauuaaaucacuugcaccaucu

SEQ ID NO: 66037 - RNA, 24 nt, Artificial Sequence
  Synthetic
auaauuaaaucacuugcaccaucu

SEQ ID NO: 66038 - RNA, 20 nt, Artificial Sequence
  Synthetic
aggaagagaccaacccaucu

SEQ ID NO: 66039 - RNA, 21 nt, Artificial Sequence
  Synthetic
caggaagagaccaacccaucu

SEQ ID NO: 66040 - RNA, 23 nt, Artificial Sequence
  Synthetic
agcaggaagagaccaacccaucu

SEQ ID NO: 66041 - RNA, 24 nt, Artificial Sequence
  Synthetic
cagcaggaagagaccaacccaucu

SEQ ID NO: 66042 - RNA, 18 nt, Artificial Sequence
  Synthetic
auuguggucaagccaucu

SEQ ID NO: 66043 - RNA, 20 nt, Artificial Sequence
  Synthetic
ugauuguggucaagccaucu

SEQ ID NO: 66044 - RNA, 21 nt, Artificial Sequence
  Synthetic
augauuguggucaagccaucu

SEQ ID NO: 66045 - RNA, 23 nt, Artificial Sequence
  Synthetic
ugaugauuguggucaagccaucu

SEQ ID NO: 66046 - RNA, 24 nt, Artificial Sequence
  Synthetic
augaugauuguggucaagccaucu

SEQ ID NO: 66047 - RNA, 18 nt, Artificial Sequence
  Synthetic
ucucccaggcugccaucu

SEQ ID NO: 66048 - RNA, 19 nt, Artificial Sequence
  Synthetic
cucucccaggcugccaucu

SEQ ID NO: 66049 - RNA, 20 nt, Artificial Sequence
  Synthetic
acucucccaggcugccaucu

SEQ ID NO: 66050 - RNA, 21 nt, Artificial Sequence
  Synthetic
aacucucccaggcugccaucu

SEQ ID NO: 66051 - RNA, 22 nt, Artificial Sequence
  Synthetic
uaacucucccaggcugccaucu

SEQ ID NO: 66052 - RNA, 23 nt, Artificial Sequence
  Synthetic
auaacucucccaggcugccaucu

SEQ ID NO: 66053 - RNA, 24 nt, Artificial Sequence
  Synthetic
aauaacucucccaggcugccaucu

SEQ ID NO: 66054 - RNA, 19 nt, Artificial Sequence
  Synthetic
uggaaccauaaguccaucu

SEQ ID NO: 66055 - RNA, 20 nt, Artificial Sequence
  Synthetic
uuggaaccauaaguccaucu

SEQ ID NO: 66056 - RNA, 21 nt, Artificial Sequence
  Synthetic
cuuggaaccauaaguccaucu

SEQ ID NO: 66057 - RNA, 22 nt, Artificial Sequence
  Synthetic
acuuggaaccauaaguccaucu

SEQ ID NO: 66058 - RNA, 23 nt, Artificial Sequence
  Synthetic
uacuuggaaccauaaguccaucu

SEQ ID NO: 66059 - RNA, 24 nt, Artificial Sequence
  Synthetic
uuacuuggaaccauaaguccaucu

SEQ ID NO: 66060 - RNA, 18 nt, Artificial Sequence
  Synthetic
auugcuagcugaucaucu

SEQ ID NO: 66061 - RNA, 19 nt, Artificial Sequence
  Synthetic
uauugcuagcugaucaucu

SEQ ID NO: 66062 - RNA, 20 nt, Artificial Sequence
  Synthetic
uuauugcuagcugaucaucu

SEQ ID NO: 66063 - RNA, 21 nt, Artificial Sequence
  Synthetic
auuauugcuagcugaucaucu

SEQ ID NO: 66064 - RNA, 22 nt, Artificial Sequence
  Synthetic
cauuauugcuagcugaucaucu

SEQ ID NO: 66065 - RNA, 19 nt, Artificial Sequence
  Synthetic
agugaauuaguuaucaucu

SEQ ID NO: 66066 - RNA, 20 nt, Artificial Sequence
  Synthetic
aagugaauuaguuaucaucu

SEQ ID NO: 66067 - RNA, 21 nt, Artificial Sequence
  Synthetic
caagugaauuaguuaucaucu

SEQ ID NO: 66068 - RNA, 22 nt, Artificial Sequence
  Synthetic
ucaagugaauuaguuaucaucu

SEQ ID NO: 66069 - RNA, 23 nt, Artificial Sequence
  Synthetic
uucaagugaauuaguuaucaucu

SEQ ID NO: 66070 - RNA, 24 nt, Artificial Sequence
  Synthetic
cuucaagugaauuaguuaucaucu

SEQ ID NO: 66071 - RNA, 18 nt, Artificial Sequence
  Synthetic
uaagguguuuucucaucu

SEQ ID NO: 66072 - RNA, 19 nt, Artificial Sequence
  Synthetic
cuaagguguuuucucaucu

SEQ ID NO: 66073 - RNA, 20 nt, Artificial Sequence
  Synthetic
ucuaagguguuuucucaucu

SEQ ID NO: 66074 - RNA, 21 nt, Artificial Sequence
  Synthetic
aucuaagguguuuucucaucu

SEQ ID NO: 66075 - RNA, 23 nt, Artificial Sequence
  Synthetic
agaucuaagguguuuucucaucu

SEQ ID NO: 66076 - RNA, 24 nt, Artificial Sequence
  Synthetic
uagaucuaagguguuuucucaucu

SEQ ID NO: 66077 - RNA, 20 nt, Artificial Sequence
  Synthetic
agguugggugacagucaucu

SEQ ID NO: 66078 - RNA, 22 nt, Artificial Sequence
  Synthetic
cgagguugggugacagucaucu

SEQ ID NO: 66079 - RNA, 23 nt, Artificial Sequence
  Synthetic
acgagguugggugacagucaucu

SEQ ID NO: 66080 - RNA, 24 nt, Artificial Sequence
  Synthetic
cacgagguugggugacagucaucu

SEQ ID NO: 66081 - RNA, 21 nt, Artificial Sequence
  Synthetic
aacugaagaacugagucaucu

SEQ ID NO: 66082 - RNA, 22 nt, Artificial Sequence
  Synthetic
aaacugaagaacugagucaucu

SEQ ID NO: 66083 - RNA, 23 nt, Artificial Sequence
  Synthetic
aaaacugaagaacugagucaucu

SEQ ID NO: 66084 - RNA, 24 nt, Artificial Sequence
  Synthetic
caaaacugaagaacugagucaucu

SEQ ID NO: 66085 - RNA, 21 nt, Artificial Sequence
  Synthetic
cuuuuaggcuaauuuucaucu

SEQ ID NO: 66086 - RNA, 22 nt, Artificial Sequence
  Synthetic
acuuuuaggcuaauuuucaucu

SEQ ID NO: 66087 - RNA, 23 nt, Artificial Sequence
  Synthetic
cacuuuuaggcuaauuuucaucu

SEQ ID NO: 66088 - RNA, 24 nt, Artificial Sequence
  Synthetic
ucacuuuuaggcuaauuuucaucu

SEQ ID NO: 66089 - RNA, 18 nt, Artificial Sequence
  Synthetic
ucaggaaacauaagaucu

SEQ ID NO: 66090 - RNA, 20 nt, Artificial Sequence
  Synthetic
agucaggaaacauaagaucu

SEQ ID NO: 66091 - RNA, 21 nt, Artificial Sequence
  Synthetic
uagucaggaaacauaagaucu

SEQ ID NO: 66092 - RNA, 22 nt, Artificial Sequence
  Synthetic
cuagucaggaaacauaagaucu

SEQ ID NO: 66093 - RNA, 23 nt, Artificial Sequence
  Synthetic
ucuagucaggaaacauaagaucu

SEQ ID NO: 66094 - RNA, 24 nt, Artificial Sequence
  Synthetic
aucuagucaggaaacauaagaucu

SEQ ID NO: 66095 - RNA, 18 nt, Artificial Sequence
  Synthetic
ucacugccuuuaagaucu

SEQ ID NO: 66096 - RNA, 19 nt, Artificial Sequence
  Synthetic
aucacugccuuuaagaucu

SEQ ID NO: 66097 - RNA, 20 nt, Artificial Sequence
  Synthetic
uaucacugccuuuaagaucu

SEQ ID NO: 66098 - RNA, 21 nt, Artificial Sequence
  Synthetic
cuaucacugccuuuaagaucu

SEQ ID NO: 66099 - RNA, 22 nt, Artificial Sequence
  Synthetic
ccuaucacugccuuuaagaucu

SEQ ID NO: 66100 - RNA, 23 nt, Artificial Sequence
  Synthetic
cccuaucacugccuuuaagaucu

SEQ ID NO: 66101 - RNA, 24 nt, Artificial Sequence
  Synthetic
acccuaucacugccuuuaagaucu

SEQ ID NO: 66102 - RNA, 18 nt, Artificial Sequence
  Synthetic
agauguugguagagaucu

SEQ ID NO: 66103 - RNA, 20 nt, Artificial Sequence
  Synthetic
ugagauguugguagagaucu

SEQ ID NO: 66104 - RNA, 21 nt, Artificial Sequence
  Synthetic
uugagauguugguagagaucu

SEQ ID NO: 66105 - RNA, 22 nt, Artificial Sequence
  Synthetic
cuugagauguugguagagaucu

SEQ ID NO: 66106 - RNA, 23 nt, Artificial Sequence
  Synthetic
ucuugagauguugguagagaucu

SEQ ID NO: 66107 - RNA, 18 nt, Artificial Sequence
  Synthetic
uugggggcacaaggaucu

SEQ ID NO: 66108 - RNA, 19 nt, Artificial Sequence
  Synthetic
uuugggggcacaaggaucu

SEQ ID NO: 66109 - RNA, 20 nt, Artificial Sequence
  Synthetic
auuugggggcacaaggaucu

SEQ ID NO: 66110 - RNA, 22 nt, Artificial Sequence
  Synthetic
agauuugggggcacaaggaucu

SEQ ID NO: 66111 - RNA, 24 nt, Artificial Sequence
  Synthetic
ugagauuugggggcacaaggaucu

SEQ ID NO: 66112 - RNA, 18 nt, Artificial Sequence
  Synthetic
uccuauugaaaaugaucu

SEQ ID NO: 66113 - RNA, 19 nt, Artificial Sequence
  Synthetic
auccuauugaaaaugaucu

SEQ ID NO: 66114 - RNA, 20 nt, Artificial Sequence
  Synthetic
aauccuauugaaaaugaucu

SEQ ID NO: 66115 - RNA, 21 nt, Artificial Sequence
  Synthetic
aaauccuauugaaaaugaucu

SEQ ID NO: 66116 - RNA, 23 nt, Artificial Sequence
  Synthetic
ugaaauccuauugaaaaugaucu

SEQ ID NO: 66117 - RNA, 24 nt, Artificial Sequence
  Synthetic
augaaauccuauugaaaaugaucu

SEQ ID NO: 66118 - RNA, 18 nt, Artificial Sequence
  Synthetic
ccuucauccaccugaucu

SEQ ID NO: 66119 - RNA, 19 nt, Artificial Sequence
  Synthetic
uccuucauccaccugaucu

SEQ ID NO: 66120 - RNA, 21 nt, Artificial Sequence
  Synthetic
uguccuucauccaccugaucu

SEQ ID NO: 66121 - RNA, 22 nt, Artificial Sequence
  Synthetic
cuguccuucauccaccugaucu

SEQ ID NO: 66122 - RNA, 23 nt, Artificial Sequence
  Synthetic
ucuguccuucauccaccugaucu

SEQ ID NO: 66123 - RNA, 19 nt, Artificial Sequence
  Synthetic
cgcaucucucuucugaucu

SEQ ID NO: 66124 - RNA, 20 nt, Artificial Sequence
  Synthetic
ccgcaucucucuucugaucu

SEQ ID NO: 66125 - RNA, 21 nt, Artificial Sequence
  Synthetic
uccgcaucucucuucugaucu

SEQ ID NO: 66126 - RNA, 23 nt, Artificial Sequence
  Synthetic
aguccgcaucucucuucugaucu

SEQ ID NO: 66127 - RNA, 24 nt, Artificial Sequence
  Synthetic
uaguccgcaucucucuucugaucu

SEQ ID NO: 66128 - RNA, 21 nt, Artificial Sequence
  Synthetic
cuguuguacaauuugugaucu

SEQ ID NO: 66129 - RNA, 23 nt, Artificial Sequence
  Synthetic
ugcuguuguacaauuugugaucu

SEQ ID NO: 66130 - RNA, 24 nt, Artificial Sequence
  Synthetic
cugcuguuguacaauuugugaucu

SEQ ID NO: 66131 - RNA, 21 nt, Artificial Sequence
  Synthetic
uuacagaaagagaaaauaucu

SEQ ID NO: 66132 - RNA, 22 nt, Artificial Sequence
  Synthetic
uuuacagaaagagaaaauaucu

SEQ ID NO: 66133 - RNA, 23 nt, Artificial Sequence
  Synthetic
uuuuacagaaagagaaaauaucu

SEQ ID NO: 66134 - RNA, 24 nt, Artificial Sequence
  Synthetic
uuuuuacagaaagagaaaauaucu

SEQ ID NO: 66135 - RNA, 21 nt, Artificial Sequence
  Synthetic
agacuauaaaauaaaauaucu

SEQ ID NO: 66136 - RNA, 22 nt, Artificial Sequence
  Synthetic
uagacuauaaaauaaaauaucu

SEQ ID NO: 66137 - RNA, 24 nt, Artificial Sequence
  Synthetic
uguagacuauaaaauaaaauaucu

SEQ ID NO: 66138 - RNA, 18 nt, Artificial Sequence
  Synthetic
aauaaaaaccacauaucu

SEQ ID NO: 66139 - RNA, 19 nt, Artificial Sequence
  Synthetic
caauaaaaaccacauaucu

SEQ ID NO: 66140 - RNA, 20 nt, Artificial Sequence
  Synthetic
ucaauaaaaaccacauaucu

SEQ ID NO: 66141 - RNA, 21 nt, Artificial Sequence
  Synthetic
aucaauaaaaaccacauaucu

SEQ ID NO: 66142 - RNA, 23 nt, Artificial Sequence
  Synthetic
agaucaauaaaaaccacauaucu

SEQ ID NO: 66143 - RNA, 24 nt, Artificial Sequence
  Synthetic
aagaucaauaaaaaccacauaucu

SEQ ID NO: 66144 - RNA, 18 nt, Artificial Sequence
  Synthetic
uagguguaauagauaucu

SEQ ID NO: 66145 - RNA, 19 nt, Artificial Sequence
  Synthetic
uuagguguaauagauaucu

SEQ ID NO: 66146 - RNA, 20 nt, Artificial Sequence
  Synthetic
auuagguguaauagauaucu

SEQ ID NO: 66147 - RNA, 22 nt, Artificial Sequence
  Synthetic
ugauuagguguaauagauaucu

SEQ ID NO: 66148 - RNA, 23 nt, Artificial Sequence
  Synthetic
cugauuagguguaauagauaucu

SEQ ID NO: 66149 - RNA, 24 nt, Artificial Sequence
  Synthetic
acugauuagguguaauagauaucu

SEQ ID NO: 66150 - RNA, 19 nt, Artificial Sequence
  Synthetic
aguggguguagggauaucu

SEQ ID NO: 66151 - RNA, 21 nt, Artificial Sequence
  Synthetic
agaguggguguagggauaucu

SEQ ID NO: 66152 - RNA, 22 nt, Artificial Sequence
  Synthetic
cagaguggguguagggauaucu

SEQ ID NO: 66153 - RNA, 23 nt, Artificial Sequence
  Synthetic
ucagaguggguguagggauaucu

SEQ ID NO: 66154 - RNA, 24 nt, Artificial Sequence
  Synthetic
uucagaguggguguagggauaucu

SEQ ID NO: 66155 - RNA, 19 nt, Artificial Sequence
  Synthetic
ugaaauauuuuugauaucu

SEQ ID NO: 66156 - RNA, 20 nt, Artificial Sequence
  Synthetic
uugaaauauuuuugauaucu

SEQ ID NO: 66157 - RNA, 21 nt, Artificial Sequence
  Synthetic
uuugaaauauuuuugauaucu

SEQ ID NO: 66158 - RNA, 22 nt, Artificial Sequence
  Synthetic
auuugaaauauuuuugauaucu

SEQ ID NO: 66159 - RNA, 23 nt, Artificial Sequence
  Synthetic
cauuugaaauauuuuugauaucu

SEQ ID NO: 66160 - RNA, 24 nt, Artificial Sequence
  Synthetic
ucauuugaaauauuuuugauaucu

SEQ ID NO: 66161 - RNA, 18 nt, Artificial Sequence
  Synthetic
cacaccacauauauaucu

SEQ ID NO: 66162 - RNA, 19 nt, Artificial Sequence
  Synthetic
acacaccacauauauaucu

SEQ ID NO: 66163 - RNA, 20 nt, Artificial Sequence
  Synthetic
cacacaccacauauauaucu

SEQ ID NO: 66164 - RNA, 21 nt, Artificial Sequence
  Synthetic
acacacaccacauauauaucu

SEQ ID NO: 66165 - RNA, 22 nt, Artificial Sequence
  Synthetic
aacacacaccacauauauaucu

SEQ ID NO: 66166 - RNA, 23 nt, Artificial Sequence
  Synthetic
aaacacacaccacauauauaucu

SEQ ID NO: 66167 - RNA, 18 nt, Artificial Sequence
  Synthetic
uacagaguugaacuaucu

SEQ ID NO: 66168 - RNA, 19 nt, Artificial Sequence
  Synthetic
auacagaguugaacuaucu

SEQ ID NO: 66169 - RNA, 20 nt, Artificial Sequence
  Synthetic
uauacagaguugaacuaucu

SEQ ID NO: 66170 - RNA, 21 nt, Artificial Sequence
  Synthetic
uuauacagaguugaacuaucu

SEQ ID NO: 66171 - RNA, 23 nt, Artificial Sequence
  Synthetic
aguuauacagaguugaacuaucu

SEQ ID NO: 66172 - RNA, 24 nt, Artificial Sequence
  Synthetic
uaguuauacagaguugaacuaucu

SEQ ID NO: 66173 - RNA, 19 nt, Artificial Sequence
  Synthetic
cguauuucuuggacuaucu

SEQ ID NO: 66174 - RNA, 20 nt, Artificial Sequence
  Synthetic
ucguauuucuuggacuaucu

SEQ ID NO: 66175 - RNA, 21 nt, Artificial Sequence
  Synthetic
aucguauuucuuggacuaucu

SEQ ID NO: 66176 - RNA, 22 nt, Artificial Sequence
  Synthetic
uaucguauuucuuggacuaucu

SEQ ID NO: 66177 - RNA, 24 nt, Artificial Sequence
  Synthetic
aguaucguauuucuuggacuaucu

SEQ ID NO: 66178 - RNA, 18 nt, Artificial Sequence
  Synthetic
aauacauuucuacuaucu

SEQ ID NO: 66179 - RNA, 19 nt, Artificial Sequence
  Synthetic
caauacauuucuacuaucu

SEQ ID NO: 66180 - RNA, 20 nt, Artificial Sequence
  Synthetic
ccaauacauuucuacuaucu

SEQ ID NO: 66181 - RNA, 21 nt, Artificial Sequence
  Synthetic
accaauacauuucuacuaucu

SEQ ID NO: 66182 - RNA, 22 nt, Artificial Sequence
  Synthetic
caccaauacauuucuacuaucu

SEQ ID NO: 66183 - RNA, 24 nt, Artificial Sequence
  Synthetic
ugcaccaauacauuucuacuaucu

SEQ ID NO: 66184 - RNA, 18 nt, Artificial Sequence
  Synthetic
ugaaaggaggugcuaucu

SEQ ID NO: 66185 - RNA, 19 nt, Artificial Sequence
  Synthetic
augaaaggaggugcuaucu

SEQ ID NO: 66186 - RNA, 20 nt, Artificial Sequence
  Synthetic
uaugaaaggaggugcuaucu

SEQ ID NO: 66187 - RNA, 21 nt, Artificial Sequence
  Synthetic
auaugaaaggaggugcuaucu

SEQ ID NO: 66188 - RNA, 22 nt, Artificial Sequence
  Synthetic
aauaugaaaggaggugcuaucu

SEQ ID NO: 66189 - RNA, 23 nt, Artificial Sequence
  Synthetic
aaauaugaaaggaggugcuaucu

SEQ ID NO: 66190 - RNA, 24 nt, Artificial Sequence
  Synthetic
aaaauaugaaaggaggugcuaucu

SEQ ID NO: 66191 - RNA, 18 nt, Artificial Sequence
  Synthetic
acauguucuuucguaucu

SEQ ID NO: 66192 - RNA, 19 nt, Artificial Sequence
  Synthetic
uacauguucuuucguaucu

SEQ ID NO: 66193 - RNA, 20 nt, Artificial Sequence
  Synthetic
uuacauguucuuucguaucu

SEQ ID NO: 66194 - RNA, 21 nt, Artificial Sequence
  Synthetic
auuacauguucuuucguaucu

SEQ ID NO: 66195 - RNA, 22 nt, Artificial Sequence
  Synthetic
aauuacauguucuuucguaucu

SEQ ID NO: 66196 - RNA, 23 nt, Artificial Sequence
  Synthetic
caauuacauguucuuucguaucu

SEQ ID NO: 66197 - RNA, 24 nt, Artificial Sequence
  Synthetic
ccaauuacauguucuuucguaucu

SEQ ID NO: 66198 - RNA, 18 nt, Artificial Sequence
  Synthetic
uauauuucacuauuaucu

SEQ ID NO: 66199 - RNA, 19 nt, Artificial Sequence
  Synthetic
uuauauuucacuauuaucu

SEQ ID NO: 66200 - RNA, 20 nt, Artificial Sequence
  Synthetic
auuauauuucacuauuaucu

SEQ ID NO: 66201 - RNA, 18 nt, Artificial Sequence
  Synthetic
uaugacuagaaguuaucu

SEQ ID NO: 66202 - RNA, 19 nt, Artificial Sequence
  Synthetic
cuaugacuagaaguuaucu

SEQ ID NO: 66203 - RNA, 22 nt, Artificial Sequence
  Synthetic
aggcuaugacuagaaguuaucu

SEQ ID NO: 66204 - RNA, 23 nt, Artificial Sequence
  Synthetic
caggcuaugacuagaaguuaucu

SEQ ID NO: 66205 - RNA, 24 nt, Artificial Sequence
  Synthetic
ccaggcuaugacuagaaguuaucu

SEQ ID NO: 66206 - RNA, 19 nt, Artificial Sequence
  Synthetic
agaucuuaaaucuuuaucu

SEQ ID NO: 66207 - RNA, 21 nt, Artificial Sequence
  Synthetic
agagaucuuaaaucuuuaucu

SEQ ID NO: 66208 - RNA, 22 nt, Artificial Sequence
  Synthetic
aagagaucuuaaaucuuuaucu

SEQ ID NO: 66209 - RNA, 23 nt, Artificial Sequence
  Synthetic
uaagagaucuuaaaucuuuaucu

SEQ ID NO: 66210 - RNA, 24 nt, Artificial Sequence
  Synthetic
cuaagagaucuuaaaucuuuaucu

SEQ ID NO: 66211 - RNA, 18 nt, Artificial Sequence
  Synthetic
agggcaagauguuuaucu

SEQ ID NO: 66212 - RNA, 19 nt, Artificial Sequence
  Synthetic
cagggcaagauguuuaucu

SEQ ID NO: 66213 - RNA, 20 nt, Artificial Sequence
  Synthetic
ucagggcaagauguuuaucu

SEQ ID NO: 66214 - RNA, 21 nt, Artificial Sequence
  Synthetic
cucagggcaagauguuuaucu

SEQ ID NO: 66215 - RNA, 22 nt, Artificial Sequence
  Synthetic
ucucagggcaagauguuuaucu

SEQ ID NO: 66216 - RNA, 23 nt, Artificial Sequence
  Synthetic
aucucagggcaagauguuuaucu

SEQ ID NO: 66217 - RNA, 24 nt, Artificial Sequence
  Synthetic
caucucagggcaagauguuuaucu

SEQ ID NO: 66218 - RNA, 19 nt, Artificial Sequence
  Synthetic
ugaaacugaaaucaacucu

SEQ ID NO: 66219 - RNA, 20 nt, Artificial Sequence
  Synthetic
augaaacugaaaucaacucu

SEQ ID NO: 66220 - RNA, 21 nt, Artificial Sequence
  Synthetic
aaugaaacugaaaucaacucu

SEQ ID NO: 66221 - RNA, 22 nt, Artificial Sequence
  Synthetic
caaugaaacugaaaucaacucu

SEQ ID NO: 66222 - RNA, 23 nt, Artificial Sequence
  Synthetic
acaaugaaacugaaaucaacucu

SEQ ID NO: 66223 - RNA, 24 nt, Artificial Sequence
  Synthetic
aacaaugaaacugaaaucaacucu

SEQ ID NO: 66224 - RNA, 18 nt, Artificial Sequence
  Synthetic
uaacauguuaauaacucu

SEQ ID NO: 66225 - RNA, 19 nt, Artificial Sequence
  Synthetic
auaacauguuaauaacucu

SEQ ID NO: 66226 - RNA, 20 nt, Artificial Sequence
  Synthetic
uauaacauguuaauaacucu

SEQ ID NO: 66227 - RNA, 21 nt, Artificial Sequence
  Synthetic
auauaacauguuaauaacucu

SEQ ID NO: 66228 - RNA, 23 nt, Artificial Sequence
  Synthetic
agauauaacauguuaauaacucu

SEQ ID NO: 66229 - RNA, 24 nt, Artificial Sequence
  Synthetic
uagauauaacauguuaauaacucu

SEQ ID NO: 66230 - RNA, 18 nt, Artificial Sequence
  Synthetic
uggaggaugaaacacucu

SEQ ID NO: 66231 - RNA, 19 nt, Artificial Sequence
  Synthetic
uuggaggaugaaacacucu

SEQ ID NO: 66232 - RNA, 20 nt, Artificial Sequence
  Synthetic
auuggaggaugaaacacucu

SEQ ID NO: 66233 - RNA, 21 nt, Artificial Sequence
  Synthetic
uauuggaggaugaaacacucu

SEQ ID NO: 66234 - RNA, 22 nt, Artificial Sequence
  Synthetic
uuauuggaggaugaaacacucu

SEQ ID NO: 66235 - RNA, 23 nt, Artificial Sequence
  Synthetic
uuuauuggaggaugaaacacucu

SEQ ID NO: 66236 - RNA, 24 nt, Artificial Sequence
  Synthetic
uuuuauuggaggaugaaacacucu

SEQ ID NO: 66237 - RNA, 18 nt, Artificial Sequence
  Synthetic
uaauagaaaagacacucu

SEQ ID NO: 66238 - RNA, 19 nt, Artificial Sequence
  Synthetic
uuaauagaaaagacacucu

SEQ ID NO: 66239 - RNA, 20 nt, Artificial Sequence
  Synthetic
auuaauagaaaagacacucu

SEQ ID NO: 66240 - RNA, 21 nt, Artificial Sequence
  Synthetic
aauuaauagaaaagacacucu

SEQ ID NO: 66241 - RNA, 22 nt, Artificial Sequence
  Synthetic
aaauuaauagaaaagacacucu

SEQ ID NO: 66242 - RNA, 23 nt, Artificial Sequence
  Synthetic
aaaauuaauagaaaagacacucu

SEQ ID NO: 66243 - RNA, 18 nt, Artificial Sequence
  Synthetic
cauaauuuuagacacucu

SEQ ID NO: 66244 - RNA, 19 nt, Artificial Sequence
  Synthetic
ucauaauuuuagacacucu

SEQ ID NO: 66245 - RNA, 20 nt, Artificial Sequence
  Synthetic
aucauaauuuuagacacucu

SEQ ID NO: 66246 - RNA, 21 nt, Artificial Sequence
  Synthetic
aaucauaauuuuagacacucu

SEQ ID NO: 66247 - RNA, 22 nt, Artificial Sequence
  Synthetic
caaucauaauuuuagacacucu

SEQ ID NO: 66248 - RNA, 23 nt, Artificial Sequence
  Synthetic
acaaucauaauuuuagacacucu

SEQ ID NO: 66249 - RNA, 24 nt, Artificial Sequence
  Synthetic
aacaaucauaauuuuagacacucu

SEQ ID NO: 66250 - RNA, 18 nt, Artificial Sequence
  Synthetic
agaugaaacggacacucu

SEQ ID NO: 66251 - RNA, 19 nt, Artificial Sequence
  Synthetic
uagaugaaacggacacucu

SEQ ID NO: 66252 - RNA, 20 nt, Artificial Sequence
  Synthetic
uuagaugaaacggacacucu

SEQ ID NO: 66253 - RNA, 21 nt, Artificial Sequence
  Synthetic
uuuagaugaaacggacacucu

SEQ ID NO: 66254 - RNA, 22 nt, Artificial Sequence
  Synthetic
cuuuagaugaaacggacacucu

SEQ ID NO: 66255 - RNA, 23 nt, Artificial Sequence
  Synthetic
ccuuuagaugaaacggacacucu

SEQ ID NO: 66256 - RNA, 24 nt, Artificial Sequence
  Synthetic
uccuuuagaugaaacggacacucu

SEQ ID NO: 66257 - RNA, 18 nt, Artificial Sequence
  Synthetic
ugccaaaauccucacucu

SEQ ID NO: 66258 - RNA, 19 nt, Artificial Sequence
  Synthetic
uugccaaaauccucacucu

SEQ ID NO: 66259 - RNA, 20 nt, Artificial Sequence
  Synthetic
uuugccaaaauccucacucu

SEQ ID NO: 66260 - RNA, 22 nt, Artificial Sequence
  Synthetic
aguuugccaaaauccucacucu

SEQ ID NO: 66261 - RNA, 23 nt, Artificial Sequence
  Synthetic
uaguuugccaaaauccucacucu

SEQ ID NO: 66262 - RNA, 24 nt, Artificial Sequence
  Synthetic
auaguuugccaaaauccucacucu

SEQ ID NO: 66263 - RNA, 18 nt, Artificial Sequence
  Synthetic
cugccccuuccaaccucu

SEQ ID NO: 66264 - RNA, 19 nt, Artificial Sequence
  Synthetic
acugccccuuccaaccucu

SEQ ID NO: 66265 - RNA, 20 nt, Artificial Sequence
  Synthetic
cacugccccuuccaaccucu

SEQ ID NO: 66266 - RNA, 21 nt, Artificial Sequence
  Synthetic
acacugccccuuccaaccucu

SEQ ID NO: 66267 - RNA, 23 nt, Artificial Sequence
  Synthetic
ugacacugccccuuccaaccucu

SEQ ID NO: 66268 - RNA, 24 nt, Artificial Sequence
  Synthetic
cugacacugccccuuccaaccucu

SEQ ID NO: 66269 - RNA, 19 nt, Artificial Sequence
  Synthetic
agcuaaaucaagaaccucu

SEQ ID NO: 66270 - RNA, 21 nt, Artificial Sequence
  Synthetic
agagcuaaaucaagaaccucu

SEQ ID NO: 66271 - RNA, 22 nt, Artificial Sequence
  Synthetic
cagagcuaaaucaagaaccucu

SEQ ID NO: 66272 - RNA, 24 nt, Artificial Sequence
  Synthetic
agcagagcuaaaucaagaaccucu

SEQ ID NO: 66273 - RNA, 18 nt, Artificial Sequence
  Synthetic
agugcaaauaccaccucu

SEQ ID NO: 66274 - RNA, 19 nt, Artificial Sequence
  Synthetic
cagugcaaauaccaccucu

SEQ ID NO: 66275 - RNA, 20 nt, Artificial Sequence
  Synthetic
ucagugcaaauaccaccucu

SEQ ID NO: 66276 - RNA, 21 nt, Artificial Sequence
  Synthetic
uucagugcaaauaccaccucu

SEQ ID NO: 66277 - RNA, 22 nt, Artificial Sequence
  Synthetic
auucagugcaaauaccaccucu

SEQ ID NO: 66278 - RNA, 23 nt, Artificial Sequence
  Synthetic
cauucagugcaaauaccaccucu

SEQ ID NO: 66279 - RNA, 18 nt, Artificial Sequence
  Synthetic
cuucuaguguuccccucu

SEQ ID NO: 66280 - RNA, 19 nt, Artificial Sequence
  Synthetic
ucuucuaguguuccccucu

SEQ ID NO: 66281 - RNA, 20 nt, Artificial Sequence
  Synthetic
cucuucuaguguuccccucu

SEQ ID NO: 66282 - RNA, 21 nt, Artificial Sequence
  Synthetic
ccucuucuaguguuccccucu

SEQ ID NO: 66283 - RNA, 23 nt, Artificial Sequence
  Synthetic
ugccucuucuaguguuccccucu

SEQ ID NO: 66284 - RNA, 24 nt, Artificial Sequence
  Synthetic
augccucuucuaguguuccccucu

SEQ ID NO: 66285 - RNA, 18 nt, Artificial Sequence
  Synthetic
ucccaaucuacucccucu

SEQ ID NO: 66286 - RNA, 20 nt, Artificial Sequence
  Synthetic
ugucccaaucuacucccucu

SEQ ID NO: 66287 - RNA, 21 nt, Artificial Sequence
  Synthetic
augucccaaucuacucccucu

SEQ ID NO: 66288 - RNA, 22 nt, Artificial Sequence
  Synthetic
caugucccaaucuacucccucu

SEQ ID NO: 66289 - RNA, 23 nt, Artificial Sequence
  Synthetic
ccaugucccaaucuacucccucu

SEQ ID NO: 66290 - RNA, 24 nt, Artificial Sequence
  Synthetic
accaugucccaaucuacucccucu

SEQ ID NO: 66291 - RNA, 18 nt, Artificial Sequence
  Synthetic
auguuccauguucccucu

SEQ ID NO: 66292 - RNA, 19 nt, Artificial Sequence
  Synthetic
cauguuccauguucccucu

SEQ ID NO: 66293 - RNA, 21 nt, Artificial Sequence
  Synthetic
ugcauguuccauguucccucu

SEQ ID NO: 66294 - RNA, 22 nt, Artificial Sequence
  Synthetic
uugcauguuccauguucccucu

SEQ ID NO: 66295 - RNA, 23 nt, Artificial Sequence
  Synthetic
uuugcauguuccauguucccucu

SEQ ID NO: 66296 - RNA, 24 nt, Artificial Sequence
  Synthetic
cuuugcauguuccauguucccucu

SEQ ID NO: 66297 - RNA, 18 nt, Artificial Sequence
  Synthetic
uuauugugagaagccucu

SEQ ID NO: 66298 - RNA, 19 nt, Artificial Sequence
  Synthetic
auuauugugagaagccucu

SEQ ID NO: 66299 - RNA, 20 nt, Artificial Sequence
  Synthetic
aauuauugugagaagccucu

SEQ ID NO: 66300 - RNA, 21 nt, Artificial Sequence
  Synthetic
aaauuauugugagaagccucu

SEQ ID NO: 66301 - RNA, 22 nt, Artificial Sequence
  Synthetic
caaauuauugugagaagccucu

SEQ ID NO: 66302 - RNA, 23 nt, Artificial Sequence
  Synthetic
acaaauuauugugagaagccucu

SEQ ID NO: 66303 - RNA, 24 nt, Artificial Sequence
  Synthetic
uacaaauuauugugagaagccucu

SEQ ID NO: 66304 - RNA, 18 nt, Artificial Sequence
  Synthetic
uucaaugaccuggccucu

SEQ ID NO: 66305 - RNA, 19 nt, Artificial Sequence
  Synthetic
auucaaugaccuggccucu

SEQ ID NO: 66306 - RNA, 20 nt, Artificial Sequence
  Synthetic
cauucaaugaccuggccucu

SEQ ID NO: 66307 - RNA, 21 nt, Artificial Sequence
  Synthetic
acauucaaugaccuggccucu

SEQ ID NO: 66308 - RNA, 22 nt, Artificial Sequence
  Synthetic
aacauucaaugaccuggccucu

SEQ ID NO: 66309 - RNA, 23 nt, Artificial Sequence
  Synthetic
uaacauucaaugaccuggccucu

SEQ ID NO: 66310 - RNA, 24 nt, Artificial Sequence
  Synthetic
cuaacauucaaugaccuggccucu

SEQ ID NO: 66311 - RNA, 18 nt, Artificial Sequence
  Synthetic
aagagaaggccugccucu

SEQ ID NO: 66312 - RNA, 19 nt, Artificial Sequence
  Synthetic
uaagagaaggccugccucu

SEQ ID NO: 66313 - RNA, 20 nt, Artificial Sequence
  Synthetic
cuaagagaaggccugccucu

SEQ ID NO: 66314 - RNA, 21 nt, Artificial Sequence
  Synthetic
ucuaagagaaggccugccucu

SEQ ID NO: 66315 - RNA, 22 nt, Artificial Sequence
  Synthetic
aucuaagagaaggccugccucu

SEQ ID NO: 66316 - RNA, 23 nt, Artificial Sequence
  Synthetic
aaucuaagagaaggccugccucu

SEQ ID NO: 66317 - RNA, 24 nt, Artificial Sequence
  Synthetic
caaucuaagagaaggccugccucu

SEQ ID NO: 66318 - RNA, 18 nt, Artificial Sequence
  Synthetic
cucacacaugcauccucu

SEQ ID NO: 66319 - RNA, 19 nt, Artificial Sequence
  Synthetic
ccucacacaugcauccucu

SEQ ID NO: 66320 - RNA, 20 nt, Artificial Sequence
  Synthetic
uccucacacaugcauccucu

SEQ ID NO: 66321 - RNA, 21 nt, Artificial Sequence
  Synthetic
auccucacacaugcauccucu

SEQ ID NO: 66322 - RNA, 22 nt, Artificial Sequence
  Synthetic
cauccucacacaugcauccucu

SEQ ID NO: 66323 - RNA, 23 nt, Artificial Sequence
  Synthetic
ucauccucacacaugcauccucu

SEQ ID NO: 66324 - RNA, 24 nt, Artificial Sequence
  Synthetic
uucauccucacacaugcauccucu

SEQ ID NO: 66325 - RNA, 21 nt, Artificial Sequence
  Synthetic
aguguuugcuuuuuuuccucu

SEQ ID NO: 66326 - RNA, 22 nt, Artificial Sequence
  Synthetic
aaguguuugcuuuuuuuccucu

SEQ ID NO: 66327 - RNA, 18 nt, Artificial Sequence
  Synthetic
ccuaucaauuagagcucu

SEQ ID NO: 66328 - RNA, 20 nt, Artificial Sequence
  Synthetic
ugccuaucaauuagagcucu

SEQ ID NO: 66329 - RNA, 21 nt, Artificial Sequence
  Synthetic
uugccuaucaauuagagcucu

SEQ ID NO: 66330 - RNA, 23 nt, Artificial Sequence
  Synthetic
aguugccuaucaauuagagcucu

SEQ ID NO: 66331 - RNA, 24 nt, Artificial Sequence
  Synthetic
uaguugccuaucaauuagagcucu

SEQ ID NO: 66332 - RNA, 18 nt, Artificial Sequence
  Synthetic
cauucucuauggagcucu

SEQ ID NO: 66333 - RNA, 19 nt, Artificial Sequence
  Synthetic
ucauucucuauggagcucu

SEQ ID NO: 66334 - RNA, 20 nt, Artificial Sequence
  Synthetic
uucauucucuauggagcucu

SEQ ID NO: 66335 - RNA, 21 nt, Artificial Sequence
  Synthetic
uuucauucucuauggagcucu

SEQ ID NO: 66336 - RNA, 22 nt, Artificial Sequence
  Synthetic
auuucauucucuauggagcucu

SEQ ID NO: 66337 - RNA, 23 nt, Artificial Sequence
  Synthetic
uauuucauucucuauggagcucu

SEQ ID NO: 66338 - RNA, 24 nt, Artificial Sequence
  Synthetic
cuauuucauucucuauggagcucu

SEQ ID NO: 66339 - RNA, 18 nt, Artificial Sequence
  Synthetic
cuuccguaacugagcucu

SEQ ID NO: 66340 - RNA, 19 nt, Artificial Sequence
  Synthetic
acuuccguaacugagcucu

SEQ ID NO: 66341 - RNA, 20 nt, Artificial Sequence
  Synthetic
cacuuccguaacugagcucu

SEQ ID NO: 66342 - RNA, 21 nt, Artificial Sequence
  Synthetic
ccacuuccguaacugagcucu

SEQ ID NO: 66343 - RNA, 22 nt, Artificial Sequence
  Synthetic
uccacuuccguaacugagcucu

SEQ ID NO: 66344 - RNA, 23 nt, Artificial Sequence
  Synthetic
uuccacuuccguaacugagcucu

SEQ ID NO: 66345 - RNA, 24 nt, Artificial Sequence
  Synthetic
cuuccacuuccguaacugagcucu

SEQ ID NO: 66346 - RNA, 18 nt, Artificial Sequence
  Synthetic
ucuaucuuuuauagcucu

SEQ ID NO: 66347 - RNA, 19 nt, Artificial Sequence
  Synthetic
uucuaucuuuuauagcucu

SEQ ID NO: 66348 - RNA, 20 nt, Artificial Sequence
  Synthetic
auucuaucuuuuauagcucu

SEQ ID NO: 66349 - RNA, 21 nt, Artificial Sequence
  Synthetic
aauucuaucuuuuauagcucu

SEQ ID NO: 66350 - RNA, 22 nt, Artificial Sequence
  Synthetic
aaauucuaucuuuuauagcucu

SEQ ID NO: 66351 - RNA, 23 nt, Artificial Sequence
  Synthetic
caaauucuaucuuuuauagcucu

SEQ ID NO: 66352 - RNA, 24 nt, Artificial Sequence
  Synthetic
ccaaauucuaucuuuuauagcucu

SEQ ID NO: 66353 - RNA, 18 nt, Artificial Sequence
  Synthetic
ucaccuuugguuagcucu

SEQ ID NO: 66354 - RNA, 19 nt, Artificial Sequence
  Synthetic
cucaccuuugguuagcucu

SEQ ID NO: 66355 - RNA, 20 nt, Artificial Sequence
  Synthetic
acucaccuuugguuagcucu

SEQ ID NO: 66356 - RNA, 21 nt, Artificial Sequence
  Synthetic
uacucaccuuugguuagcucu

SEQ ID NO: 66357 - RNA, 23 nt, Artificial Sequence
  Synthetic
uguacucaccuuugguuagcucu

SEQ ID NO: 66358 - RNA, 24 nt, Artificial Sequence
  Synthetic
auguacucaccuuugguuagcucu

SEQ ID NO: 66359 - RNA, 18 nt, Artificial Sequence
  Synthetic
ugcuuauugauacgcucu

SEQ ID NO: 66360 - RNA, 19 nt, Artificial Sequence
  Synthetic
augcuuauugauacgcucu

SEQ ID NO: 66361 - RNA, 20 nt, Artificial Sequence
  Synthetic
caugcuuauugauacgcucu

SEQ ID NO: 66362 - RNA, 21 nt, Artificial Sequence
  Synthetic
acaugcuuauugauacgcucu

SEQ ID NO: 66363 - RNA, 24 nt, Artificial Sequence
  Synthetic
aggacaugcuuauugauacgcucu

SEQ ID NO: 66364 - RNA, 18 nt, Artificial Sequence
  Synthetic
uaguaggcguuuggcucu

SEQ ID NO: 66365 - RNA, 19 nt, Artificial Sequence
  Synthetic
uuaguaggcguuuggcucu

SEQ ID NO: 66366 - RNA, 20 nt, Artificial Sequence
  Synthetic
uuuaguaggcguuuggcucu

SEQ ID NO: 66367 - RNA, 21 nt, Artificial Sequence
  Synthetic
auuuaguaggcguuuggcucu

SEQ ID NO: 66368 - RNA, 23 nt, Artificial Sequence
  Synthetic
agauuuaguaggcguuuggcucu

SEQ ID NO: 66369 - RNA, 19 nt, Artificial Sequence
  Synthetic
agaggaucucaauugcucu

SEQ ID NO: 66370 - RNA, 20 nt, Artificial Sequence
  Synthetic
cagaggaucucaauugcucu

SEQ ID NO: 66371 - RNA, 21 nt, Artificial Sequence
  Synthetic
ucagaggaucucaauugcucu

SEQ ID NO: 66372 - RNA, 22 nt, Artificial Sequence
  Synthetic
uucagaggaucucaauugcucu

SEQ ID NO: 66373 - RNA, 23 nt, Artificial Sequence
  Synthetic
uuucagaggaucucaauugcucu

SEQ ID NO: 66374 - RNA, 24 nt, Artificial Sequence
  Synthetic
auuucagaggaucucaauugcucu

SEQ ID NO: 66375 - RNA, 18 nt, Artificial Sequence
  Synthetic
cgcaaaugguauugcucu

SEQ ID NO: 66376 - RNA, 20 nt, Artificial Sequence
  Synthetic
agcgcaaaugguauugcucu

SEQ ID NO: 66377 - RNA, 23 nt, Artificial Sequence
  Synthetic
uggagcgcaaaugguauugcucu

SEQ ID NO: 66378 - RNA, 24 nt, Artificial Sequence
  Synthetic
cuggagcgcaaaugguauugcucu

SEQ ID NO: 66379 - RNA, 21 nt, Artificial Sequence
  Synthetic
cuugaacagacuucuugcucu

SEQ ID NO: 66380 - RNA, 22 nt, Artificial Sequence
  Synthetic
acuugaacagacuucuugcucu

SEQ ID NO: 66381 - RNA, 18 nt, Artificial Sequence
  Synthetic
augucucugaaaaucucu

SEQ ID NO: 66382 - RNA, 19 nt, Artificial Sequence
  Synthetic
caugucucugaaaaucucu

SEQ ID NO: 66383 - RNA, 22 nt, Artificial Sequence
  Synthetic
aggcaugucucugaaaaucucu

SEQ ID NO: 66384 - RNA, 23 nt, Artificial Sequence
  Synthetic
aaggcaugucucugaaaaucucu

SEQ ID NO: 66385 - RNA, 24 nt, Artificial Sequence
  Synthetic
aaaggcaugucucugaaaaucucu

SEQ ID NO: 66386 - RNA, 21 nt, Artificial Sequence
  Synthetic
auuucuuugucuucaaucucu

SEQ ID NO: 66387 - RNA, 22 nt, Artificial Sequence
  Synthetic
cauuucuuugucuucaaucucu

SEQ ID NO: 66388 - RNA, 23 nt, Artificial Sequence
  Synthetic
ucauuucuuugucuucaaucucu

SEQ ID NO: 66389 - RNA, 24 nt, Artificial Sequence
  Synthetic
uucauuucuuugucuucaaucucu

SEQ ID NO: 66390 - RNA, 18 nt, Artificial Sequence
  Synthetic
auauaaaaucccaucucu

SEQ ID NO: 66391 - RNA, 19 nt, Artificial Sequence
  Synthetic
cauauaaaaucccaucucu

SEQ ID NO: 66392 - RNA, 20 nt, Artificial Sequence
  Synthetic
ccauauaaaaucccaucucu

SEQ ID NO: 66393 - RNA, 21 nt, Artificial Sequence
  Synthetic
cccauauaaaaucccaucucu

SEQ ID NO: 66394 - RNA, 22 nt, Artificial Sequence
  Synthetic
ucccauauaaaaucccaucucu

SEQ ID NO: 66395 - RNA, 21 nt, Artificial Sequence
  Synthetic
uuggcaaauccuuucaucucu

SEQ ID NO: 66396 - RNA, 22 nt, Artificial Sequence
  Synthetic
uuuggcaaauccuuucaucucu

SEQ ID NO: 66397 - RNA, 23 nt, Artificial Sequence
  Synthetic
uuuuggcaaauccuuucaucucu

SEQ ID NO: 66398 - RNA, 24 nt, Artificial Sequence
  Synthetic
uuuuuggcaaauccuuucaucucu

SEQ ID NO: 66399 - RNA, 18 nt, Artificial Sequence
  Synthetic
uccuucucuuucaucucu

SEQ ID NO: 66400 - RNA, 19 nt, Artificial Sequence
  Synthetic
uuccuucucuuucaucucu

SEQ ID NO: 66401 - RNA, 21 nt, Artificial Sequence
  Synthetic
aguuccuucucuuucaucucu

SEQ ID NO: 66402 - RNA, 22 nt, Artificial Sequence
  Synthetic
caguuccuucucuuucaucucu

SEQ ID NO: 66403 - RNA, 23 nt, Artificial Sequence
  Synthetic
acaguuccuucucuuucaucucu

SEQ ID NO: 66404 - RNA, 18 nt, Artificial Sequence
  Synthetic
uacagaaucaugaucucu

SEQ ID NO: 66405 - RNA, 19 nt, Artificial Sequence
  Synthetic
auacagaaucaugaucucu

SEQ ID NO: 66406 - RNA, 20 nt, Artificial Sequence
  Synthetic
cauacagaaucaugaucucu

SEQ ID NO: 66407 - RNA, 19 nt, Artificial Sequence
  Synthetic
agggagcgauccacucucu

SEQ ID NO: 66408 - RNA, 20 nt, Artificial Sequence
  Synthetic
uagggagcgauccacucucu

SEQ ID NO: 66409 - RNA, 22 nt, Artificial Sequence
  Synthetic
uguagggagcgauccacucucu

SEQ ID NO: 66410 - RNA, 23 nt, Artificial Sequence
  Synthetic
auguagggagcgauccacucucu

SEQ ID NO: 66411 - RNA, 18 nt, Artificial Sequence
  Synthetic
agugugaucugccucucu

SEQ ID NO: 66412 - RNA, 20 nt, Artificial Sequence
  Synthetic
ugagugugaucugccucucu

SEQ ID NO: 66413 - RNA, 22 nt, Artificial Sequence
  Synthetic
ugugagugugaucugccucucu

SEQ ID NO: 66414 - RNA, 24 nt, Artificial Sequence
  Synthetic
ugugugagugugaucugccucucu

SEQ ID NO: 66415 - RNA, 18 nt, Artificial Sequence
  Synthetic
uugugucagaagcucucu

SEQ ID NO: 66416 - RNA, 19 nt, Artificial Sequence
  Synthetic
auugugucagaagcucucu

SEQ ID NO: 66417 - RNA, 20 nt, Artificial Sequence
  Synthetic
cauugugucagaagcucucu

SEQ ID NO: 66418 - RNA, 22 nt, Artificial Sequence
  Synthetic
ugcauugugucagaagcucucu

SEQ ID NO: 66419 - RNA, 23 nt, Artificial Sequence
  Synthetic
augcauugugucagaagcucucu

SEQ ID NO: 66420 - RNA, 24 nt, Artificial Sequence
  Synthetic
aaugcauugugucagaagcucucu

SEQ ID NO: 66421 - RNA, 18 nt, Artificial Sequence
  Synthetic
uauuacucacuagucucu

SEQ ID NO: 66422 - RNA, 19 nt, Artificial Sequence
  Synthetic
auauuacucacuagucucu

SEQ ID NO: 66423 - RNA, 20 nt, Artificial Sequence
  Synthetic
uauauuacucacuagucucu

SEQ ID NO: 66424 - RNA, 21 nt, Artificial Sequence
  Synthetic
auauauuacucacuagucucu

SEQ ID NO: 66425 - RNA, 22 nt, Artificial Sequence
  Synthetic
aauauauuacucacuagucucu

SEQ ID NO: 66426 - RNA, 23 nt, Artificial Sequence
  Synthetic
aaauauauuacucacuagucucu

SEQ ID NO: 66427 - RNA, 24 nt, Artificial Sequence
  Synthetic
caaauauauuacucacuagucucu

SEQ ID NO: 66428 - RNA, 18 nt, Artificial Sequence
  Synthetic
ugcuggaauauggucucu

SEQ ID NO: 66429 - RNA, 19 nt, Artificial Sequence
  Synthetic
cugcuggaauauggucucu

SEQ ID NO: 66430 - RNA, 20 nt, Artificial Sequence
  Synthetic
ucugcuggaauauggucucu

SEQ ID NO: 66431 - RNA, 21 nt, Artificial Sequence
  Synthetic
uucugcuggaauauggucucu

SEQ ID NO: 66432 - RNA, 22 nt, Artificial Sequence
  Synthetic
uuucugcuggaauauggucucu

SEQ ID NO: 66433 - RNA, 24 nt, Artificial Sequence
  Synthetic
uguuucugcuggaauauggucucu

SEQ ID NO: 66434 - RNA, 20 nt, Artificial Sequence
  Synthetic
ugggguuuucuuuugucucu

SEQ ID NO: 66435 - RNA, 22 nt, Artificial Sequence
  Synthetic
ugugggguuuucuuuugucucu

SEQ ID NO: 66436 - RNA, 23 nt, Artificial Sequence
  Synthetic
augugggguuuucuuuugucucu

SEQ ID NO: 66437 - RNA, 24 nt, Artificial Sequence
  Synthetic
uaugugggguuuucuuuugucucu

SEQ ID NO: 66438 - RNA, 18 nt, Artificial Sequence
  Synthetic
acaucauuacaauucucu

SEQ ID NO: 66439 - RNA, 19 nt, Artificial Sequence
  Synthetic
aacaucauuacaauucucu

SEQ ID NO: 66440 - RNA, 23 nt, Artificial Sequence
  Synthetic
ugggaacaucauuacaauucucu

SEQ ID NO: 66441 - RNA, 24 nt, Artificial Sequence
  Synthetic
uugggaacaucauuacaauucucu

SEQ ID NO: 66442 - RNA, 21 nt, Artificial Sequence
  Synthetic
ccaauuuugacagcauucucu

SEQ ID NO: 66443 - RNA, 23 nt, Artificial Sequence
  Synthetic
agccaauuuugacagcauucucu

SEQ ID NO: 66444 - RNA, 24 nt, Artificial Sequence
  Synthetic
cagccaauuuugacagcauucucu

SEQ ID NO: 66445 - RNA, 19 nt, Artificial Sequence
  Synthetic
ugcaaauauauuauucucu

SEQ ID NO: 66446 - RNA, 20 nt, Artificial Sequence
  Synthetic
uugcaaauauauuauucucu

SEQ ID NO: 66447 - RNA, 21 nt, Artificial Sequence
  Synthetic
uuugcaaauauauuauucucu

SEQ ID NO: 66448 - RNA, 22 nt, Artificial Sequence
  Synthetic
cuuugcaaauauauuauucucu

SEQ ID NO: 66449 - RNA, 23 nt, Artificial Sequence
  Synthetic
ccuuugcaaauauauuauucucu

SEQ ID NO: 66450 - RNA, 24 nt, Artificial Sequence
  Synthetic
accuuugcaaauauauuauucucu

SEQ ID NO: 66451 - RNA, 18 nt, Artificial Sequence
  Synthetic
ccaucucuaaucuucucu

SEQ ID NO: 66452 - RNA, 19 nt, Artificial Sequence
  Synthetic
cccaucucuaaucuucucu

SEQ ID NO: 66453 - RNA, 20 nt, Artificial Sequence
  Synthetic
ccccaucucuaaucuucucu

SEQ ID NO: 66454 - RNA, 21 nt, Artificial Sequence
  Synthetic
accccaucucuaaucuucucu

SEQ ID NO: 66455 - RNA, 22 nt, Artificial Sequence
  Synthetic
caccccaucucuaaucuucucu

SEQ ID NO: 66456 - RNA, 23 nt, Artificial Sequence
  Synthetic
ccaccccaucucuaaucuucucu

SEQ ID NO: 66457 - RNA, 24 nt, Artificial Sequence
  Synthetic
accaccccaucucuaaucuucucu

SEQ ID NO: 66458 - RNA, 18 nt, Artificial Sequence
  Synthetic
caacugaaaaaaaagucu

SEQ ID NO: 66459 - RNA, 19 nt, Artificial Sequence
  Synthetic
acaacugaaaaaaaagucu

SEQ ID NO: 66460 - RNA, 20 nt, Artificial Sequence
  Synthetic
uacaacugaaaaaaaagucu

SEQ ID NO: 66461 - RNA, 21 nt, Artificial Sequence
  Synthetic
uuacaacugaaaaaaaagucu

SEQ ID NO: 66462 - RNA, 22 nt, Artificial Sequence
  Synthetic
uuuacaacugaaaaaaaagucu

SEQ ID NO: 66463 - RNA, 23 nt, Artificial Sequence
  Synthetic
cuuuacaacugaaaaaaaagucu

SEQ ID NO: 66464 - RNA, 18 nt, Artificial Sequence
  Synthetic
ugacugugcaaaaagucu

SEQ ID NO: 66465 - RNA, 19 nt, Artificial Sequence
  Synthetic
uugacugugcaaaaagucu

SEQ ID NO: 66466 - RNA, 20 nt, Artificial Sequence
  Synthetic
auugacugugcaaaaagucu

SEQ ID NO: 66467 - RNA, 21 nt, Artificial Sequence
  Synthetic
uauugacugugcaaaaagucu

SEQ ID NO: 66468 - RNA, 22 nt, Artificial Sequence
  Synthetic
uuauugacugugcaaaaagucu

SEQ ID NO: 66469 - RNA, 24 nt, Artificial Sequence
  Synthetic
uguuauugacugugcaaaaagucu

SEQ ID NO: 66470 - RNA, 21 nt, Artificial Sequence
  Synthetic
aaacuacacauuucaaagucu

SEQ ID NO: 66471 - RNA, 22 nt, Artificial Sequence
  Synthetic
uaaacuacacauuucaaagucu

SEQ ID NO: 66472 - RNA, 23 nt, Artificial Sequence
  Synthetic
cuaaacuacacauuucaaagucu

SEQ ID NO: 66473 - RNA, 24 nt, Artificial Sequence
  Synthetic
acuaaacuacacauuucaaagucu

SEQ ID NO: 66474 - RNA, 18 nt, Artificial Sequence
  Synthetic
aaaagcucuuuaaagucu

SEQ ID NO: 66475 - RNA, 21 nt, Artificial Sequence
  Synthetic
uggaaaagcucuuuaaagucu

SEQ ID NO: 66476 - RNA, 22 nt, Artificial Sequence
  Synthetic
uuggaaaagcucuuuaaagucu

SEQ ID NO: 66477 - RNA, 23 nt, Artificial Sequence
  Synthetic
uuuggaaaagcucuuuaaagucu

SEQ ID NO: 66478 - RNA, 24 nt, Artificial Sequence
  Synthetic
uuuuggaaaagcucuuuaaagucu

SEQ ID NO: 66479 - RNA, 18 nt, Artificial Sequence
  Synthetic
cuaaauuaauacaagucu

SEQ ID NO: 66480 - RNA, 19 nt, Artificial Sequence
  Synthetic
ccuaaauuaauacaagucu

SEQ ID NO: 66481 - RNA, 20 nt, Artificial Sequence
  Synthetic
accuaaauuaauacaagucu

SEQ ID NO: 66482 - RNA, 21 nt, Artificial Sequence
  Synthetic
aaccuaaauuaauacaagucu

SEQ ID NO: 66483 - RNA, 22 nt, Artificial Sequence
  Synthetic
aaaccuaaauuaauacaagucu

SEQ ID NO: 66484 - RNA, 23 nt, Artificial Sequence
  Synthetic
caaaccuaaauuaauacaagucu

SEQ ID NO: 66485 - RNA, 19 nt, Artificial Sequence
  Synthetic
uggauugaaagggaagucu

SEQ ID NO: 66486 - RNA, 20 nt, Artificial Sequence
  Synthetic
uuggauugaaagggaagucu

SEQ ID NO: 66487 - RNA, 22 nt, Artificial Sequence
  Synthetic
aguuggauugaaagggaagucu

SEQ ID NO: 66488 - RNA, 23 nt, Artificial Sequence
  Synthetic
caguuggauugaaagggaagucu

SEQ ID NO: 66489 - RNA, 24 nt, Artificial Sequence
  Synthetic
ucaguuggauugaaagggaagucu

SEQ ID NO: 66490 - RNA, 18 nt, Artificial Sequence
  Synthetic
cuggaauuucuacagucu

SEQ ID NO: 66491 - RNA, 19 nt, Artificial Sequence
  Synthetic
ucuggaauuucuacagucu

SEQ ID NO: 66492 - RNA, 20 nt, Artificial Sequence
  Synthetic
aucuggaauuucuacagucu

SEQ ID NO: 66493 - RNA, 21 nt, Artificial Sequence
  Synthetic
uaucuggaauuucuacagucu

SEQ ID NO: 66494 - RNA, 23 nt, Artificial Sequence
  Synthetic
uguaucuggaauuucuacagucu

SEQ ID NO: 66495 - RNA, 24 nt, Artificial Sequence
  Synthetic
uuguaucuggaauuucuacagucu

SEQ ID NO: 66496 - RNA, 19 nt, Artificial Sequence
  Synthetic
cgcaaaaggacaccagucu

SEQ ID NO: 66497 - RNA, 20 nt, Artificial Sequence
  Synthetic
ccgcaaaaggacaccagucu

SEQ ID NO: 66498 - RNA, 22 nt, Artificial Sequence
  Synthetic
ugccgcaaaaggacaccagucu

SEQ ID NO: 66499 - RNA, 24 nt, Artificial Sequence
  Synthetic
agugccgcaaaaggacaccagucu

SEQ ID NO: 66500 - RNA, 18 nt, Artificial Sequence
  Synthetic
aucuuggucaugcagucu

SEQ ID NO: 66501 - RNA, 19 nt, Artificial Sequence
  Synthetic
aaucuuggucaugcagucu

SEQ ID NO: 66502 - RNA, 21 nt, Artificial Sequence
  Synthetic
ugaaucuuggucaugcagucu

SEQ ID NO: 66503 - RNA, 22 nt, Artificial Sequence
  Synthetic
cugaaucuuggucaugcagucu

SEQ ID NO: 66504 - RNA, 23 nt, Artificial Sequence
  Synthetic
acugaaucuuggucaugcagucu

SEQ ID NO: 66505 - RNA, 24 nt, Artificial Sequence
  Synthetic
uacugaaucuuggucaugcagucu

SEQ ID NO: 66506 - RNA, 19 nt, Artificial Sequence
  Synthetic
aggauuaucauugcagucu

SEQ ID NO: 66507 - RNA, 20 nt, Artificial Sequence
  Synthetic
aaggauuaucauugcagucu

SEQ ID NO: 66508 - RNA, 22 nt, Artificial Sequence
  Synthetic
cgaaggauuaucauugcagucu

SEQ ID NO: 66509 - RNA, 23 nt, Artificial Sequence
  Synthetic
acgaaggauuaucauugcagucu

SEQ ID NO: 66510 - RNA, 24 nt, Artificial Sequence
  Synthetic
cacgaaggauuaucauugcagucu

SEQ ID NO: 66511 - RNA, 19 nt, Artificial Sequence
  Synthetic
agauauucuauaucagucu

SEQ ID NO: 66512 - RNA, 20 nt, Artificial Sequence
  Synthetic
uagauauucuauaucagucu

SEQ ID NO: 66513 - RNA, 23 nt, Artificial Sequence
  Synthetic
ugguagauauucuauaucagucu

SEQ ID NO: 66514 - RNA, 24 nt, Artificial Sequence
  Synthetic
uugguagauauucuauaucagucu

SEQ ID NO: 66515 - RNA, 18 nt, Artificial Sequence
  Synthetic
ugccaguauggagagucu

SEQ ID NO: 66516 - RNA, 19 nt, Artificial Sequence
  Synthetic
cugccaguauggagagucu

SEQ ID NO: 66517 - RNA, 21 nt, Artificial Sequence
  Synthetic
ugcugccaguauggagagucu

SEQ ID NO: 66518 - RNA, 22 nt, Artificial Sequence
  Synthetic
uugcugccaguauggagagucu

SEQ ID NO: 66519 - RNA, 23 nt, Artificial Sequence
  Synthetic
auugcugccaguauggagagucu

SEQ ID NO: 66520 - RNA, 24 nt, Artificial Sequence
  Synthetic
cauugcugccaguauggagagucu

SEQ ID NO: 66521 - RNA, 18 nt, Artificial Sequence
  Synthetic
aaucaaauauaauagucu

SEQ ID NO: 66522 - RNA, 20 nt, Artificial Sequence
  Synthetic
agaaucaaauauaauagucu

SEQ ID NO: 66523 - RNA, 21 nt, Artificial Sequence
  Synthetic
cagaaucaaauauaauagucu

SEQ ID NO: 66524 - RNA, 23 nt, Artificial Sequence
  Synthetic
ugcagaaucaaauauaauagucu

SEQ ID NO: 66525 - RNA, 24 nt, Artificial Sequence
  Synthetic
uugcagaaucaaauauaauagucu

SEQ ID NO: 66526 - RNA, 18 nt, Artificial Sequence
  Synthetic
uuugcuauuaucuagucu

SEQ ID NO: 66527 - RNA, 19 nt, Artificial Sequence
  Synthetic
uuuugcuauuaucuagucu

SEQ ID NO: 66528 - RNA, 20 nt, Artificial Sequence
  Synthetic
cuuuugcuauuaucuagucu

SEQ ID NO: 66529 - RNA, 21 nt, Artificial Sequence
  Synthetic
acuuuugcuauuaucuagucu

SEQ ID NO: 66530 - RNA, 24 nt, Artificial Sequence
  Synthetic
aggacuuuugcuauuaucuagucu

SEQ ID NO: 66531 - RNA, 18 nt, Artificial Sequence
  Synthetic
uaacuuguucuguagucu

SEQ ID NO: 66532 - RNA, 19 nt, Artificial Sequence
  Synthetic
uuaacuuguucuguagucu

SEQ ID NO: 66533 - RNA, 20 nt, Artificial Sequence
  Synthetic
uuuaacuuguucuguagucu

SEQ ID NO: 66534 - RNA, 21 nt, Artificial Sequence
  Synthetic
auuuaacuuguucuguagucu

SEQ ID NO: 66535 - RNA, 23 nt, Artificial Sequence
  Synthetic
ugauuuaacuuguucuguagucu

SEQ ID NO: 66536 - RNA, 24 nt, Artificial Sequence
  Synthetic
augauuuaacuuguucuguagucu

SEQ ID NO: 66537 - RNA, 18 nt, Artificial Sequence
  Synthetic
aagugagauaggacgucu

SEQ ID NO: 66538 - RNA, 19 nt, Artificial Sequence
  Synthetic
uaagugagauaggacgucu

SEQ ID NO: 66539 - RNA, 21 nt, Artificial Sequence
  Synthetic
aguaagugagauaggacgucu

SEQ ID NO: 66540 - RNA, 22 nt, Artificial Sequence
  Synthetic
uaguaagugagauaggacgucu

SEQ ID NO: 66541 - RNA, 23 nt, Artificial Sequence
  Synthetic
cuaguaagugagauaggacgucu

SEQ ID NO: 66542 - RNA, 24 nt, Artificial Sequence
  Synthetic
ccuaguaagugagauaggacgucu

SEQ ID NO: 66543 - RNA, 18 nt, Artificial Sequence
  Synthetic
auuguuuuaucaaggucu

SEQ ID NO: 66544 - RNA, 19 nt, Artificial Sequence
  Synthetic
aauuguuuuaucaaggucu

SEQ ID NO: 66545 - RNA, 20 nt, Artificial Sequence
  Synthetic
aaauuguuuuaucaaggucu

SEQ ID NO: 66546 - RNA, 21 nt, Artificial Sequence
  Synthetic
aaaauuguuuuaucaaggucu

SEQ ID NO: 66547 - RNA, 22 nt, Artificial Sequence
  Synthetic
aaaaauuguuuuaucaaggucu

SEQ ID NO: 66548 - RNA, 23 nt, Artificial Sequence
  Synthetic
aaaaaauuguuuuaucaaggucu

SEQ ID NO: 66549 - RNA, 24 nt, Artificial Sequence
  Synthetic
uaaaaaauuguuuuaucaaggucu

SEQ ID NO: 66550 - RNA, 18 nt, Artificial Sequence
  Synthetic
uguaauaaugguaggucu

SEQ ID NO: 66551 - RNA, 20 nt, Artificial Sequence
  Synthetic
aguguaauaaugguaggucu

SEQ ID NO: 66552 - RNA, 23 nt, Artificial Sequence
  Synthetic
cggaguguaauaaugguaggucu

SEQ ID NO: 66553 - RNA, 24 nt, Artificial Sequence
  Synthetic
acggaguguaauaaugguaggucu

SEQ ID NO: 66554 - RNA, 19 nt, Artificial Sequence
  Synthetic
ugcuucagugagauggucu

SEQ ID NO: 66555 - RNA, 20 nt, Artificial Sequence
  Synthetic
cugcuucagugagauggucu

SEQ ID NO: 66556 - RNA, 21 nt, Artificial Sequence
  Synthetic
ccugcuucagugagauggucu

SEQ ID NO: 66557 - RNA, 22 nt, Artificial Sequence
  Synthetic
accugcuucagugagauggucu

SEQ ID NO: 66558 - RNA, 18 nt, Artificial Sequence
  Synthetic
ccacaauucaccuggucu

SEQ ID NO: 66559 - RNA, 19 nt, Artificial Sequence
  Synthetic
uccacaauucaccuggucu

SEQ ID NO: 66560 - RNA, 21 nt, Artificial Sequence
  Synthetic
aguccacaauucaccuggucu

SEQ ID NO: 66561 - RNA, 22 nt, Artificial Sequence
  Synthetic
aaguccacaauucaccuggucu

SEQ ID NO: 66562 - RNA, 23 nt, Artificial Sequence
  Synthetic
aaaguccacaauucaccuggucu

SEQ ID NO: 66563 - RNA, 24 nt, Artificial Sequence
  Synthetic
aaaaguccacaauucaccuggucu

SEQ ID NO: 66564 - RNA, 18 nt, Artificial Sequence
  Synthetic
cucauaccauccuggucu

SEQ ID NO: 66565 - RNA, 19 nt, Artificial Sequence
  Synthetic
ccucauaccauccuggucu

SEQ ID NO: 66566 - RNA, 20 nt, Artificial Sequence
  Synthetic
uccucauaccauccuggucu

SEQ ID NO: 66567 - RNA, 21 nt, Artificial Sequence
  Synthetic
cuccucauaccauccuggucu

SEQ ID NO: 66568 - RNA, 22 nt, Artificial Sequence
  Synthetic
acuccucauaccauccuggucu

SEQ ID NO: 66569 - RNA, 23 nt, Artificial Sequence
  Synthetic
cacuccucauaccauccuggucu

SEQ ID NO: 66570 - RNA, 24 nt, Artificial Sequence
  Synthetic
ucacuccucauaccauccuggucu

SEQ ID NO: 66571 - RNA, 18 nt, Artificial Sequence
  Synthetic
cacaauguuacuuggucu

SEQ ID NO: 66572 - RNA, 19 nt, Artificial Sequence
  Synthetic
acacaauguuacuuggucu

SEQ ID NO: 66573 - RNA, 20 nt, Artificial Sequence
  Synthetic
cacacaauguuacuuggucu

SEQ ID NO: 66574 - RNA, 21 nt, Artificial Sequence
  Synthetic
ucacacaauguuacuuggucu

SEQ ID NO: 66575 - RNA, 22 nt, Artificial Sequence
  Synthetic
uucacacaauguuacuuggucu

SEQ ID NO: 66576 - RNA, 23 nt, Artificial Sequence
  Synthetic
uuucacacaauguuacuuggucu

SEQ ID NO: 66577 - RNA, 24 nt, Artificial Sequence
  Synthetic
auuucacacaauguuacuuggucu

SEQ ID NO: 66578 - RNA, 18 nt, Artificial Sequence
  Synthetic
uaguauccacaaaugucu

SEQ ID NO: 66579 - RNA, 19 nt, Artificial Sequence
  Synthetic
auaguauccacaaaugucu

SEQ ID NO: 66580 - RNA, 20 nt, Artificial Sequence
  Synthetic
cauaguauccacaaaugucu

SEQ ID NO: 66581 - RNA, 21 nt, Artificial Sequence
  Synthetic
ccauaguauccacaaaugucu

SEQ ID NO: 66582 - RNA, 22 nt, Artificial Sequence
  Synthetic
accauaguauccacaaaugucu

SEQ ID NO: 66583 - RNA, 23 nt, Artificial Sequence
  Synthetic
aaccauaguauccacaaaugucu

SEQ ID NO: 66584 - RNA, 24 nt, Artificial Sequence
  Synthetic
caaccauaguauccacaaaugucu

SEQ ID NO: 66585 - RNA, 18 nt, Artificial Sequence
  Synthetic
aaagaugacuuaaugucu

SEQ ID NO: 66586 - RNA, 19 nt, Artificial Sequence
  Synthetic
aaaagaugacuuaaugucu

SEQ ID NO: 66587 - RNA, 20 nt, Artificial Sequence
  Synthetic
uaaaagaugacuuaaugucu

SEQ ID NO: 66588 - RNA, 21 nt, Artificial Sequence
  Synthetic
uuaaaagaugacuuaaugucu

SEQ ID NO: 66589 - RNA, 22 nt, Artificial Sequence
  Synthetic
auuaaaagaugacuuaaugucu

SEQ ID NO: 66590 - RNA, 23 nt, Artificial Sequence
  Synthetic
cauuaaaagaugacuuaaugucu

SEQ ID NO: 66591 - RNA, 24 nt, Artificial Sequence
  Synthetic
acauuaaaagaugacuuaaugucu

SEQ ID NO: 66592 - RNA, 18 nt, Artificial Sequence
  Synthetic
uaauuuacuuacaugucu

SEQ ID NO: 66593 - RNA, 19 nt, Artificial Sequence
  Synthetic
cuaauuuacuuacaugucu

SEQ ID NO: 66594 - RNA, 20 nt, Artificial Sequence
  Synthetic
ucuaauuuacuuacaugucu

SEQ ID NO: 66595 - RNA, 21 nt, Artificial Sequence
  Synthetic
uucuaauuuacuuacaugucu

SEQ ID NO: 66596 - RNA, 23 nt, Artificial Sequence
  Synthetic
uguucuaauuuacuuacaugucu

SEQ ID NO: 66597 - RNA, 24 nt, Artificial Sequence
  Synthetic
cuguucuaauuuacuuacaugucu

SEQ ID NO: 66598 - RNA, 19 nt, Artificial Sequence
  Synthetic
ugcaaaaacaaauaugucu

SEQ ID NO: 66599 - RNA, 20 nt, Artificial Sequence
  Synthetic
cugcaaaaacaaauaugucu

SEQ ID NO: 66600 - RNA, 21 nt, Artificial Sequence
  Synthetic
ucugcaaaaacaaauaugucu

SEQ ID NO: 66601 - RNA, 22 nt, Artificial Sequence
  Synthetic
cucugcaaaaacaaauaugucu

SEQ ID NO: 66602 - RNA, 21 nt, Artificial Sequence
  Synthetic
aauuuaaaauuacauaugucu

SEQ ID NO: 66603 - RNA, 22 nt, Artificial Sequence
  Synthetic
uaauuuaaaauuacauaugucu

SEQ ID NO: 66604 - RNA, 24 nt, Artificial Sequence
  Synthetic
uguaauuuaaaauuacauaugucu

SEQ ID NO: 66605 - RNA, 18 nt, Artificial Sequence
  Synthetic
aaguauucuuuuaugucu

SEQ ID NO: 66606 - RNA, 19 nt, Artificial Sequence
  Synthetic
uaaguauucuuuuaugucu

SEQ ID NO: 66607 - RNA, 20 nt, Artificial Sequence
  Synthetic
auaaguauucuuuuaugucu

SEQ ID NO: 66608 - RNA, 21 nt, Artificial Sequence
  Synthetic
uauaaguauucuuuuaugucu

SEQ ID NO: 66609 - RNA, 22 nt, Artificial Sequence
  Synthetic
uuauaaguauucuuuuaugucu

SEQ ID NO: 66610 - RNA, 23 nt, Artificial Sequence
  Synthetic
uuuauaaguauucuuuuaugucu

SEQ ID NO: 66611 - RNA, 24 nt, Artificial Sequence
  Synthetic
auuuauaaguauucuuuuaugucu

SEQ ID NO: 66612 - RNA, 18 nt, Artificial Sequence
  Synthetic
uauaauugagagcugucu

SEQ ID NO: 66613 - RNA, 19 nt, Artificial Sequence
  Synthetic
cuauaauugagagcugucu

SEQ ID NO: 66614 - RNA, 20 nt, Artificial Sequence
  Synthetic
ccuauaauugagagcugucu

SEQ ID NO: 66615 - RNA, 21 nt, Artificial Sequence
  Synthetic
cccuauaauugagagcugucu

SEQ ID NO: 66616 - RNA, 22 nt, Artificial Sequence
  Synthetic
ccccuauaauugagagcugucu

SEQ ID NO: 66617 - RNA, 24 nt, Artificial Sequence
  Synthetic
cgccccuauaauugagagcugucu

SEQ ID NO: 66618 - RNA, 19 nt, Artificial Sequence
  Synthetic
aguuugaccaaaugugucu

SEQ ID NO: 66619 - RNA, 20 nt, Artificial Sequence
  Synthetic
aaguuugaccaaaugugucu

SEQ ID NO: 66620 - RNA, 21 nt, Artificial Sequence
  Synthetic
aaaguuugaccaaaugugucu

SEQ ID NO: 66621 - RNA, 22 nt, Artificial Sequence
  Synthetic
caaaguuugaccaaaugugucu

SEQ ID NO: 66622 - RNA, 23 nt, Artificial Sequence
  Synthetic
acaaaguuugaccaaaugugucu

SEQ ID NO: 66623 - RNA, 18 nt, Artificial Sequence
  Synthetic
augugcugaugugugucu

SEQ ID NO: 66624 - RNA, 19 nt, Artificial Sequence
  Synthetic
uaugugcugaugugugucu

SEQ ID NO: 66625 - RNA, 21 nt, Artificial Sequence
  Synthetic
uguaugugcugaugugugucu

SEQ ID NO: 66626 - RNA, 22 nt, Artificial Sequence
  Synthetic
cuguaugugcugaugugugucu

SEQ ID NO: 66627 - RNA, 23 nt, Artificial Sequence
  Synthetic
ucuguaugugcugaugugugucu

SEQ ID NO: 66628 - RNA, 19 nt, Artificial Sequence
  Synthetic
agcuaaaaguccauugucu

SEQ ID NO: 66629 - RNA, 20 nt, Artificial Sequence
  Synthetic
cagcuaaaaguccauugucu

SEQ ID NO: 66630 - RNA, 19 nt, Artificial Sequence
  Synthetic
aggcauaaaacacuugucu

SEQ ID NO: 66631 - RNA, 20 nt, Artificial Sequence
  Synthetic
aaggcauaaaacacuugucu

SEQ ID NO: 66632 - RNA, 24 nt, Artificial Sequence
  Synthetic
ugggaaggcauaaaacacuugucu

SEQ ID NO: 66633 - RNA, 18 nt, Artificial Sequence
  Synthetic
caaagacaucccuugucu

SEQ ID NO: 66634 - RNA, 19 nt, Artificial Sequence
  Synthetic
ccaaagacaucccuugucu

SEQ ID NO: 66635 - RNA, 20 nt, Artificial Sequence
  Synthetic
cccaaagacaucccuugucu

SEQ ID NO: 66636 - RNA, 21 nt, Artificial Sequence
  Synthetic
ucccaaagacaucccuugucu

SEQ ID NO: 66637 - RNA, 22 nt, Artificial Sequence
  Synthetic
uucccaaagacaucccuugucu

SEQ ID NO: 66638 - RNA, 23 nt, Artificial Sequence
  Synthetic
auucccaaagacaucccuugucu

SEQ ID NO: 66639 - RNA, 24 nt, Artificial Sequence
  Synthetic
cauucccaaagacaucccuugucu

SEQ ID NO: 66640 - RNA, 18 nt, Artificial Sequence
  Synthetic
agucaacaaaaguugucu

SEQ ID NO: 66641 - RNA, 19 nt, Artificial Sequence
  Synthetic
cagucaacaaaaguugucu

SEQ ID NO: 66642 - RNA, 21 nt, Artificial Sequence
  Synthetic
agcagucaacaaaaguugucu

SEQ ID NO: 66643 - RNA, 22 nt, Artificial Sequence
  Synthetic
aagcagucaacaaaaguugucu

SEQ ID NO: 66644 - RNA, 23 nt, Artificial Sequence
  Synthetic
aaagcagucaacaaaaguugucu

SEQ ID NO: 66645 - RNA, 24 nt, Artificial Sequence
  Synthetic
aaaagcagucaacaaaaguugucu

SEQ ID NO: 66646 - RNA, 18 nt, Artificial Sequence
  Synthetic
cuucaugugcaguugucu

SEQ ID NO: 66647 - RNA, 19 nt, Artificial Sequence
  Synthetic
ccuucaugugcaguugucu

SEQ ID NO: 66648 - RNA, 20 nt, Artificial Sequence
  Synthetic
accuucaugugcaguugucu

SEQ ID NO: 66649 - RNA, 21 nt, Artificial Sequence
  Synthetic
uaccuucaugugcaguugucu

SEQ ID NO: 66650 - RNA, 22 nt, Artificial Sequence
  Synthetic
uuaccuucaugugcaguugucu

SEQ ID NO: 66651 - RNA, 23 nt, Artificial Sequence
  Synthetic
uuuaccuucaugugcaguugucu

SEQ ID NO: 66652 - RNA, 24 nt, Artificial Sequence
  Synthetic
cuuuaccuucaugugcaguugucu

SEQ ID NO: 66653 - RNA, 18 nt, Artificial Sequence
  Synthetic
ccaccucaaguguugucu

SEQ ID NO: 66654 - RNA, 19 nt, Artificial Sequence
  Synthetic
accaccucaaguguugucu

SEQ ID NO: 66655 - RNA, 20 nt, Artificial Sequence
  Synthetic
aaccaccucaaguguugucu

SEQ ID NO: 66656 - RNA, 21 nt, Artificial Sequence
  Synthetic
caaccaccucaaguguugucu

SEQ ID NO: 66657 - RNA, 22 nt, Artificial Sequence
  Synthetic
acaaccaccucaaguguugucu

SEQ ID NO: 66658 - RNA, 23 nt, Artificial Sequence
  Synthetic
cacaaccaccucaaguguugucu

SEQ ID NO: 66659 - RNA, 24 nt, Artificial Sequence
  Synthetic
ccacaaccaccucaaguguugucu

SEQ ID NO: 66660 - RNA, 19 nt, Artificial Sequence
  Synthetic
uguuuuagcugauuugucu

SEQ ID NO: 66661 - RNA, 20 nt, Artificial Sequence
  Synthetic
uuguuuuagcugauuugucu

SEQ ID NO: 66662 - RNA, 21 nt, Artificial Sequence
  Synthetic
uuuguuuuagcugauuugucu

SEQ ID NO: 66663 - RNA, 22 nt, Artificial Sequence
  Synthetic
uuuuguuuuagcugauuugucu

SEQ ID NO: 66664 - RNA, 24 nt, Artificial Sequence
  Synthetic
uguuuuguuuuagcugauuugucu

SEQ ID NO: 66665 - RNA, 21 nt, Artificial Sequence
  Synthetic
aaauguaaaaacaaaaauucu

SEQ ID NO: 66666 - RNA, 22 nt, Artificial Sequence
  Synthetic
uaaauguaaaaacaaaaauucu

SEQ ID NO: 66667 - RNA, 23 nt, Artificial Sequence
  Synthetic
uuaaauguaaaaacaaaaauucu

SEQ ID NO: 66668 - RNA, 24 nt, Artificial Sequence
  Synthetic
uuuaaauguaaaaacaaaaauucu

SEQ ID NO: 66669 - RNA, 18 nt, Artificial Sequence
  Synthetic
aacuggcuuccaaauucu

SEQ ID NO: 66670 - RNA, 19 nt, Artificial Sequence
  Synthetic
aaacuggcuuccaaauucu

SEQ ID NO: 66671 - RNA, 20 nt, Artificial Sequence
  Synthetic
uaaacuggcuuccaaauucu

SEQ ID NO: 66672 - RNA, 21 nt, Artificial Sequence
  Synthetic
uuaaacuggcuuccaaauucu

SEQ ID NO: 66673 - RNA, 22 nt, Artificial Sequence
  Synthetic
auuaaacuggcuuccaaauucu

SEQ ID NO: 66674 - RNA, 23 nt, Artificial Sequence
  Synthetic
uauuaaacuggcuuccaaauucu

SEQ ID NO: 66675 - RNA, 18 nt, Artificial Sequence
  Synthetic
uuccucccccuaaauucu

SEQ ID NO: 66676 - RNA, 19 nt, Artificial Sequence
  Synthetic
uuuccucccccuaaauucu

SEQ ID NO: 66677 - RNA, 20 nt, Artificial Sequence
  Synthetic
uuuuccucccccuaaauucu

SEQ ID NO: 66678 - RNA, 22 nt, Artificial Sequence
  Synthetic
uguuuuccucccccuaaauucu

SEQ ID NO: 66679 - RNA, 23 nt, Artificial Sequence
  Synthetic
cuguuuuccucccccuaaauucu

SEQ ID NO: 66680 - RNA, 24 nt, Artificial Sequence
  Synthetic
acuguuuuccucccccuaaauucu

SEQ ID NO: 66681 - RNA, 18 nt, Artificial Sequence
  Synthetic
cuaauucucugcaauucu

SEQ ID NO: 66682 - RNA, 19 nt, Artificial Sequence
  Synthetic
acuaauucucugcaauucu

SEQ ID NO: 66683 - RNA, 19 nt, Artificial Sequence
  Synthetic
agcuaauuugugcaauucu

SEQ ID NO: 66684 - RNA, 20 nt, Artificial Sequence
  Synthetic
uagcuaauuugugcaauucu

SEQ ID NO: 66685 - RNA, 21 nt, Artificial Sequence
  Synthetic
auagcuaauuugugcaauucu

SEQ ID NO: 66686 - RNA, 22 nt, Artificial Sequence
  Synthetic
aauagcuaauuugugcaauucu

SEQ ID NO: 66687 - RNA, 23 nt, Artificial Sequence
  Synthetic
uaauagcuaauuugugcaauucu

SEQ ID NO: 66688 - RNA, 24 nt, Artificial Sequence
  Synthetic
uuaauagcuaauuugugcaauucu

SEQ ID NO: 66689 - RNA, 21 nt, Artificial Sequence
  Synthetic
ugguauuaucaucuccauucu

SEQ ID NO: 66690 - RNA, 24 nt, Artificial Sequence
  Synthetic
aggugguauuaucaucuccauucu

SEQ ID NO: 66691 - RNA, 18 nt, Artificial Sequence
  Synthetic
augcucacucugcauucu

SEQ ID NO: 66692 - RNA, 19 nt, Artificial Sequence
  Synthetic
caugcucacucugcauucu

SEQ ID NO: 66693 - RNA, 20 nt, Artificial Sequence
  Synthetic
ccaugcucacucugcauucu

SEQ ID NO: 66694 - RNA, 21 nt, Artificial Sequence
  Synthetic
uccaugcucacucugcauucu

SEQ ID NO: 66695 - RNA, 22 nt, Artificial Sequence
  Synthetic
cuccaugcucacucugcauucu

SEQ ID NO: 66696 - RNA, 23 nt, Artificial Sequence
  Synthetic
ucuccaugcucacucugcauucu

SEQ ID NO: 66697 - RNA, 24 nt, Artificial Sequence
  Synthetic
uucuccaugcucacucugcauucu

SEQ ID NO: 66698 - RNA, 18 nt, Artificial Sequence
  Synthetic
uuagcccuuuuucauucu

SEQ ID NO: 66699 - RNA, 19 nt, Artificial Sequence
  Synthetic
cuuagcccuuuuucauucu

SEQ ID NO: 66700 - RNA, 20 nt, Artificial Sequence
  Synthetic
acuuagcccuuuuucauucu

SEQ ID NO: 66701 - RNA, 22 nt, Artificial Sequence
  Synthetic
agacuuagcccuuuuucauucu

SEQ ID NO: 66702 - RNA, 23 nt, Artificial Sequence
  Synthetic
aagacuuagcccuuuuucauucu

SEQ ID NO: 66703 - RNA, 19 nt, Artificial Sequence
  Synthetic
agcacauaagaaagauucu

SEQ ID NO: 66704 - RNA, 20 nt, Artificial Sequence
  Synthetic
aagcacauaagaaagauucu

SEQ ID NO: 66705 - RNA, 21 nt, Artificial Sequence
  Synthetic
aaagcacauaagaaagauucu

SEQ ID NO: 66706 - RNA, 24 nt, Artificial Sequence
  Synthetic
uggaaagcacauaagaaagauucu

SEQ ID NO: 66707 - RNA, 20 nt, Artificial Sequence
  Synthetic
agguuuuccaucaagauucu

SEQ ID NO: 66708 - RNA, 21 nt, Artificial Sequence
  Synthetic
uagguuuuccaucaagauucu

SEQ ID NO: 66709 - RNA, 22 nt, Artificial Sequence
  Synthetic
auagguuuuccaucaagauucu

SEQ ID NO: 66710 - RNA, 23 nt, Artificial Sequence
  Synthetic
aauagguuuuccaucaagauucu

SEQ ID NO: 66711 - RNA, 24 nt, Artificial Sequence
  Synthetic
aaauagguuuuccaucaagauucu

SEQ ID NO: 66712 - RNA, 18 nt, Artificial Sequence
  Synthetic
uccuguguguuagauucu

SEQ ID NO: 66713 - RNA, 19 nt, Artificial Sequence
  Synthetic
cuccuguguguuagauucu

SEQ ID NO: 66714 - RNA, 20 nt, Artificial Sequence
  Synthetic
ccuccuguguguuagauucu

SEQ ID NO: 66715 - RNA, 21 nt, Artificial Sequence
  Synthetic
cccuccuguguguuagauucu

SEQ ID NO: 66716 - RNA, 23 nt, Artificial Sequence
  Synthetic
ugcccuccuguguguuagauucu

SEQ ID NO: 66717 - RNA, 18 nt, Artificial Sequence
  Synthetic
agucagggcagggauucu

SEQ ID NO: 66718 - RNA, 19 nt, Artificial Sequence
  Synthetic
aagucagggcagggauucu

SEQ ID NO: 66719 - RNA, 20 nt, Artificial Sequence
  Synthetic
aaagucagggcagggauucu

SEQ ID NO: 66720 - RNA, 21 nt, Artificial Sequence
  Synthetic
aaaagucagggcagggauucu

SEQ ID NO: 66721 - RNA, 23 nt, Artificial Sequence
  Synthetic
ugaaaagucagggcagggauucu

SEQ ID NO: 66722 - RNA, 19 nt, Artificial Sequence
  Synthetic
cgcaaaucucuaugauucu

SEQ ID NO: 66723 - RNA, 20 nt, Artificial Sequence
  Synthetic
acgcaaaucucuaugauucu

SEQ ID NO: 66724 - RNA, 22 nt, Artificial Sequence
  Synthetic
agacgcaaaucucuaugauucu

SEQ ID NO: 66725 - RNA, 23 nt, Artificial Sequence
  Synthetic
cagacgcaaaucucuaugauucu

SEQ ID NO: 66726 - RNA, 24 nt, Artificial Sequence
  Synthetic
acagacgcaaaucucuaugauucu

SEQ ID NO: 66727 - RNA, 18 nt, Artificial Sequence
  Synthetic
auauucuauagugauucu

SEQ ID NO: 66728 - RNA, 19 nt, Artificial Sequence
  Synthetic
uauauucuauagugauucu

SEQ ID NO: 66729 - RNA, 20 nt, Artificial Sequence
  Synthetic
cuauauucuauagugauucu

SEQ ID NO: 66730 - RNA, 22 nt, Artificial Sequence
  Synthetic
ugcuauauucuauagugauucu

SEQ ID NO: 66731 - RNA, 23 nt, Artificial Sequence
  Synthetic
augcuauauucuauagugauucu

SEQ ID NO: 66732 - RNA, 24 nt, Artificial Sequence
  Synthetic
aaugcuauauucuauagugauucu

SEQ ID NO: 66733 - RNA, 21 nt, Artificial Sequence
  Synthetic
cgggagucaaauauugauucu

SEQ ID NO: 66734 - RNA, 22 nt, Artificial Sequence
  Synthetic
ccgggagucaaauauugauucu

SEQ ID NO: 66735 - RNA, 23 nt, Artificial Sequence
  Synthetic
uccgggagucaaauauugauucu

SEQ ID NO: 66736 - RNA, 21 nt, Artificial Sequence
  Synthetic
cucauuuuuuuuuaauauucu

SEQ ID NO: 66737 - RNA, 22 nt, Artificial Sequence
  Synthetic
ucucauuuuuuuuuaauauucu

SEQ ID NO: 66738 - RNA, 24 nt, Artificial Sequence
  Synthetic
ugucucauuuuuuuuuaauauucu

SEQ ID NO: 66739 - RNA, 18 nt, Artificial Sequence
  Synthetic
uaagugaugauuuauucu

SEQ ID NO: 66740 - RNA, 19 nt, Artificial Sequence
  Synthetic
uuaagugaugauuuauucu

SEQ ID NO: 66741 - RNA, 20 nt, Artificial Sequence
  Synthetic
uuuaagugaugauuuauucu

SEQ ID NO: 66742 - RNA, 22 nt, Artificial Sequence
  Synthetic
uguuuaagugaugauuuauucu

SEQ ID NO: 66743 - RNA, 23 nt, Artificial Sequence
  Synthetic
cuguuuaagugaugauuuauucu

SEQ ID NO: 66744 - RNA, 24 nt, Artificial Sequence
  Synthetic
acuguuuaagugaugauuuauucu

SEQ ID NO: 66745 - RNA, 19 nt, Artificial Sequence
  Synthetic
uggagguggauuuuauucu

SEQ ID NO: 66746 - RNA, 20 nt, Artificial Sequence
  Synthetic
uuggagguggauuuuauucu

SEQ ID NO: 66747 - RNA, 21 nt, Artificial Sequence
  Synthetic
uuuggagguggauuuuauucu

SEQ ID NO: 66748 - RNA, 23 nt, Artificial Sequence
  Synthetic
aguuuggagguggauuuuauucu

SEQ ID NO: 66749 - RNA, 24 nt, Artificial Sequence
  Synthetic
uaguuuggagguggauuuuauucu

SEQ ID NO: 66750 - RNA, 18 nt, Artificial Sequence
  Synthetic
agaugccccaaaacuucu

SEQ ID NO: 66751 - RNA, 19 nt, Artificial Sequence
  Synthetic
aagaugccccaaaacuucu

SEQ ID NO: 66752 - RNA, 20 nt, Artificial Sequence
  Synthetic
aaagaugccccaaaacuucu

SEQ ID NO: 66753 - RNA, 21 nt, Artificial Sequence
  Synthetic
uaaagaugccccaaaacuucu

SEQ ID NO: 66754 - RNA, 22 nt, Artificial Sequence
  Synthetic
auaaagaugccccaaaacuucu

SEQ ID NO: 66755 - RNA, 23 nt, Artificial Sequence
  Synthetic
uauaaagaugccccaaaacuucu

SEQ ID NO: 66756 - RNA, 24 nt, Artificial Sequence
  Synthetic
uuauaaagaugccccaaaacuucu

SEQ ID NO: 66757 - RNA, 18 nt, Artificial Sequence
  Synthetic
cacuuccuuuaaacuucu

SEQ ID NO: 66758 - RNA, 19 nt, Artificial Sequence
  Synthetic
acacuuccuuuaaacuucu

SEQ ID NO: 66759 - RNA, 20 nt, Artificial Sequence
  Synthetic
aacacuuccuuuaaacuucu

SEQ ID NO: 66760 - RNA, 23 nt, Artificial Sequence
  Synthetic
aggaacacuuccuuuaaacuucu

SEQ ID NO: 66761 - RNA, 24 nt, Artificial Sequence
  Synthetic
aaggaacacuuccuuuaaacuucu

SEQ ID NO: 66762 - RNA, 18 nt, Artificial Sequence
  Synthetic
uggaaacgcacaacuucu

SEQ ID NO: 66763 - RNA, 19 nt, Artificial Sequence
  Synthetic
uuggaaacgcacaacuucu

SEQ ID NO: 66764 - RNA, 20 nt, Artificial Sequence
  Synthetic
uuuggaaacgcacaacuucu

SEQ ID NO: 66765 - RNA, 21 nt, Artificial Sequence
  Synthetic
cuuuggaaacgcacaacuucu

SEQ ID NO: 66766 - RNA, 23 nt, Artificial Sequence
  Synthetic
ugcuuuggaaacgcacaacuucu

SEQ ID NO: 66767 - RNA, 24 nt, Artificial Sequence
  Synthetic
cugcuuuggaaacgcacaacuucu

SEQ ID NO: 66768 - RNA, 18 nt, Artificial Sequence
  Synthetic
auagccuguauaacuucu

SEQ ID NO: 66769 - RNA, 19 nt, Artificial Sequence
  Synthetic
aauagccuguauaacuucu

SEQ ID NO: 66770 - RNA, 20 nt, Artificial Sequence
  Synthetic
aaauagccuguauaacuucu

SEQ ID NO: 66771 - RNA, 21 nt, Artificial Sequence
  Synthetic
aaaauagccuguauaacuucu

SEQ ID NO: 66772 - RNA, 22 nt, Artificial Sequence
  Synthetic
caaaauagccuguauaacuucu

SEQ ID NO: 66773 - RNA, 23 nt, Artificial Sequence
  Synthetic
acaaaauagccuguauaacuucu

SEQ ID NO: 66774 - RNA, 24 nt, Artificial Sequence
  Synthetic
aacaaaauagccuguauaacuucu

SEQ ID NO: 66775 - RNA, 18 nt, Artificial Sequence
  Synthetic
ugaccauuccuaacuucu

SEQ ID NO: 66776 - RNA, 20 nt, Artificial Sequence
  Synthetic
cgugaccauuccuaacuucu

SEQ ID NO: 66777 - RNA, 21 nt, Artificial Sequence
  Synthetic
acgugaccauuccuaacuucu

SEQ ID NO: 66778 - RNA, 22 nt, Artificial Sequence
  Synthetic
cacgugaccauuccuaacuucu

SEQ ID NO: 66779 - RNA, 23 nt, Artificial Sequence
  Synthetic
ucacgugaccauuccuaacuucu

SEQ ID NO: 66780 - RNA, 18 nt, Artificial Sequence
  Synthetic
uuaugaauuuacacuucu

SEQ ID NO: 66781 - RNA, 20 nt, Artificial Sequence
  Synthetic
uguuaugaauuuacacuucu

SEQ ID NO: 66782 - RNA, 21 nt, Artificial Sequence
  Synthetic
cuguuaugaauuuacacuucu

SEQ ID NO: 66783 - RNA, 22 nt, Artificial Sequence
  Synthetic
ccuguuaugaauuuacacuucu

SEQ ID NO: 66784 - RNA, 23 nt, Artificial Sequence
  Synthetic
uccuguuaugaauuuacacuucu

SEQ ID NO: 66785 - RNA, 24 nt, Artificial Sequence
  Synthetic
cuccuguuaugaauuuacacuucu

SEQ ID NO: 66786 - RNA, 18 nt, Artificial Sequence
  Synthetic
ucuggguacaugacuucu

SEQ ID NO: 66787 - RNA, 20 nt, Artificial Sequence
  Synthetic
ugucuggguacaugacuucu

SEQ ID NO: 66788 - RNA, 22 nt, Artificial Sequence
  Synthetic
agugucuggguacaugacuucu

SEQ ID NO: 66789 - RNA, 23 nt, Artificial Sequence
  Synthetic
uagugucuggguacaugacuucu

SEQ ID NO: 66790 - RNA, 24 nt, Artificial Sequence
  Synthetic
uuagugucuggguacaugacuucu

SEQ ID NO: 66791 - RNA, 19 nt, Artificial Sequence
  Synthetic
uguuaauuuucucccuucu

SEQ ID NO: 66792 - RNA, 21 nt, Artificial Sequence
  Synthetic
aguguuaauuuucucccuucu

SEQ ID NO: 66793 - RNA, 22 nt, Artificial Sequence
  Synthetic
uaguguuaauuuucucccuucu

SEQ ID NO: 66794 - RNA, 23 nt, Artificial Sequence
  Synthetic
cuaguguuaauuuucucccuucu

SEQ ID NO: 66795 - RNA, 24 nt, Artificial Sequence
  Synthetic
ucuaguguuaauuuucucccuucu

SEQ ID NO: 66796 - RNA, 18 nt, Artificial Sequence
  Synthetic
ugaaauuguaagccuucu

SEQ ID NO: 66797 - RNA, 19 nt, Artificial Sequence
  Synthetic
augaaauuguaagccuucu

SEQ ID NO: 66798 - RNA, 20 nt, Artificial Sequence
  Synthetic
aaugaaauuguaagccuucu

SEQ ID NO: 66799 - RNA, 21 nt, Artificial Sequence
  Synthetic
uaaugaaauuguaagccuucu

SEQ ID NO: 66800 - RNA, 22 nt, Artificial Sequence
  Synthetic
uuaaugaaauuguaagccuucu

SEQ ID NO: 66801 - RNA, 23 nt, Artificial Sequence
  Synthetic
uuuaaugaaauuguaagccuucu

SEQ ID NO: 66802 - RNA, 24 nt, Artificial Sequence
  Synthetic
uuuuaaugaaauuguaagccuucu

SEQ ID NO: 66803 - RNA, 18 nt, Artificial Sequence
  Synthetic
aauaauaauacuccuucu

SEQ ID NO: 66804 - RNA, 19 nt, Artificial Sequence
  Synthetic
uaauaauaauacuccuucu

SEQ ID NO: 66805 - RNA, 20 nt, Artificial Sequence
  Synthetic
cuaauaauaauacuccuucu

SEQ ID NO: 66806 - RNA, 21 nt, Artificial Sequence
  Synthetic
ccuaauaauaauacuccuucu

SEQ ID NO: 66807 - RNA, 22 nt, Artificial Sequence
  Synthetic
accuaauaauaauacuccuucu

SEQ ID NO: 66808 - RNA, 23 nt, Artificial Sequence
  Synthetic
caccuaauaauaauacuccuucu

SEQ ID NO: 66809 - RNA, 21 nt, Artificial Sequence
  Synthetic
uuaaaaucaguauuuccuucu

SEQ ID NO: 66810 - RNA, 22 nt, Artificial Sequence
  Synthetic
uuuaaaaucaguauuuccuucu

SEQ ID NO: 66811 - RNA, 23 nt, Artificial Sequence
  Synthetic
uuuuaaaaucaguauuuccuucu

SEQ ID NO: 66812 - RNA, 19 nt, Artificial Sequence
  Synthetic
uggacagauuuuuccuucu

SEQ ID NO: 66813 - RNA, 20 nt, Artificial Sequence
  Synthetic
uuggacagauuuuuccuucu

SEQ ID NO: 66814 - RNA, 22 nt, Artificial Sequence
  Synthetic
uguuggacagauuuuuccuucu

SEQ ID NO: 66815 - RNA, 23 nt, Artificial Sequence
  Synthetic
uuguuggacagauuuuuccuucu

SEQ ID NO: 66816 - RNA, 24 nt, Artificial Sequence
  Synthetic
uuuguuggacagauuuuuccuucu

SEQ ID NO: 66817 - RNA, 18 nt, Artificial Sequence
  Synthetic
uauucuuaaauggcuucu

SEQ ID NO: 66818 - RNA, 20 nt, Artificial Sequence
  Synthetic
uguauucuuaaauggcuucu

SEQ ID NO: 66819 - RNA, 22 nt, Artificial Sequence
  Synthetic
uguguauucuuaaauggcuucu

SEQ ID NO: 66820 - RNA, 23 nt, Artificial Sequence
  Synthetic
uuguguauucuuaaauggcuucu

SEQ ID NO: 66821 - RNA, 24 nt, Artificial Sequence
  Synthetic
uuuguguauucuuaaauggcuucu

SEQ ID NO: 66822 - RNA, 18 nt, Artificial Sequence
  Synthetic
uguuguuuaacugcuucu

SEQ ID NO: 66823 - RNA, 20 nt, Artificial Sequence
  Synthetic
uguguuguuuaacugcuucu

SEQ ID NO: 66824 - RNA, 22 nt, Artificial Sequence
  Synthetic
aguguguuguuuaacugcuucu

SEQ ID NO: 66825 - RNA, 23 nt, Artificial Sequence
  Synthetic
aaguguguuguuuaacugcuucu

SEQ ID NO: 66826 - RNA, 24 nt, Artificial Sequence
  Synthetic
uaaguguguuguuuaacugcuucu

SEQ ID NO: 66827 - RNA, 18 nt, Artificial Sequence
  Synthetic
aauuacacuacugcuucu

SEQ ID NO: 66828 - RNA, 19 nt, Artificial Sequence
  Synthetic
aaauuacacuacugcuucu

SEQ ID NO: 66829 - RNA, 20 nt, Artificial Sequence
  Synthetic
aaaauuacacuacugcuucu

SEQ ID NO: 66830 - RNA, 21 nt, Artificial Sequence
  Synthetic
uaaaauuacacuacugcuucu

SEQ ID NO: 66831 - RNA, 23 nt, Artificial Sequence
  Synthetic
uguaaaauuacacuacugcuucu

SEQ ID NO: 66832 - RNA, 18 nt, Artificial Sequence
  Synthetic
uacuauuuacaaucuucu

SEQ ID NO: 66833 - RNA, 19 nt, Artificial Sequence
  Synthetic
auacuauuuacaaucuucu

SEQ ID NO: 66834 - RNA, 21 nt, Artificial Sequence
  Synthetic
agauacuauuuacaaucuucu

SEQ ID NO: 66835 - RNA, 22 nt, Artificial Sequence
  Synthetic
cagauacuauuuacaaucuucu

SEQ ID NO: 66836 - RNA, 23 nt, Artificial Sequence
  Synthetic
ucagauacuauuuacaaucuucu

SEQ ID NO: 66837 - RNA, 24 nt, Artificial Sequence
  Synthetic
uucagauacuauuuacaaucuucu

SEQ ID NO: 66838 - RNA, 18 nt, Artificial Sequence
  Synthetic
aaaaguaccugcucuucu

SEQ ID NO: 66839 - RNA, 19 nt, Artificial Sequence
  Synthetic
aaaaaguaccugcucuucu

SEQ ID NO: 66840 - RNA, 20 nt, Artificial Sequence
  Synthetic
aaaaaaguaccugcucuucu

SEQ ID NO: 66841 - RNA, 21 nt, Artificial Sequence
  Synthetic
caaaaaaguaccugcucuucu

SEQ ID NO: 66842 - RNA, 22 nt, Artificial Sequence
  Synthetic
acaaaaaaguaccugcucuucu

SEQ ID NO: 66843 - RNA, 23 nt, Artificial Sequence
  Synthetic
cacaaaaaaguaccugcucuucu

SEQ ID NO: 66844 - RNA, 18 nt, Artificial Sequence
  Synthetic
agaggaaagugcucuucu

SEQ ID NO: 66845 - RNA, 20 nt, Artificial Sequence
  Synthetic
ugagaggaaagugcucuucu

SEQ ID NO: 66846 - RNA, 21 nt, Artificial Sequence
  Synthetic
uugagaggaaagugcucuucu

SEQ ID NO: 66847 - RNA, 23 nt, Artificial Sequence
  Synthetic
uguugagaggaaagugcucuucu

SEQ ID NO: 66848 - RNA, 24 nt, Artificial Sequence
  Synthetic
cuguugagaggaaagugcucuucu

SEQ ID NO: 66849 - RNA, 18 nt, Artificial Sequence
  Synthetic
aaagguuauugcucuucu

SEQ ID NO: 66850 - RNA, 19 nt, Artificial Sequence
  Synthetic
aaaagguuauugcucuucu

SEQ ID NO: 66851 - RNA, 20 nt, Artificial Sequence
  Synthetic
caaaagguuauugcucuucu

SEQ ID NO: 66852 - RNA, 21 nt, Artificial Sequence
  Synthetic
acaaaagguuauugcucuucu

SEQ ID NO: 66853 - RNA, 23 nt, Artificial Sequence
  Synthetic
ugacaaaagguuauugcucuucu

SEQ ID NO: 66854 - RNA, 24 nt, Artificial Sequence
  Synthetic
uugacaaaagguuauugcucuucu

SEQ ID NO: 66855 - RNA, 21 nt, Artificial Sequence
  Synthetic
uuuuuuguaauccucucuucu

SEQ ID NO: 66856 - RNA, 23 nt, Artificial Sequence
  Synthetic
aguuuuuuguaauccucucuucu

SEQ ID NO: 66857 - RNA, 24 nt, Artificial Sequence
  Synthetic
caguuuuuuguaauccucucuucu

SEQ ID NO: 66858 - RNA, 18 nt, Artificial Sequence
  Synthetic
uuuauaagugguucuucu

SEQ ID NO: 66859 - RNA, 20 nt, Artificial Sequence
  Synthetic
uguuuauaagugguucuucu

SEQ ID NO: 66860 - RNA, 21 nt, Artificial Sequence
  Synthetic
auguuuauaagugguucuucu

SEQ ID NO: 66861 - RNA, 22 nt, Artificial Sequence
  Synthetic
aauguuuauaagugguucuucu

SEQ ID NO: 66862 - RNA, 23 nt, Artificial Sequence
  Synthetic
uaauguuuauaagugguucuucu

SEQ ID NO: 66863 - RNA, 24 nt, Artificial Sequence
  Synthetic
cuaauguuuauaagugguucuucu

SEQ ID NO: 66864 - RNA, 18 nt, Artificial Sequence
  Synthetic
ucuccaggucuuucuucu

SEQ ID NO: 66865 - RNA, 19 nt, Artificial Sequence
  Synthetic
cucuccaggucuuucuucu

SEQ ID NO: 66866 - RNA, 20 nt, Artificial Sequence
  Synthetic
ucucuccaggucuuucuucu

SEQ ID NO: 66867 - RNA, 21 nt, Artificial Sequence
  Synthetic
cucucuccaggucuuucuucu

SEQ ID NO: 66868 - RNA, 22 nt, Artificial Sequence
  Synthetic
ucucucuccaggucuuucuucu

SEQ ID NO: 66869 - RNA, 24 nt, Artificial Sequence
  Synthetic
ugucucucuccaggucuuucuucu

SEQ ID NO: 66870 - RNA, 18 nt, Artificial Sequence
  Synthetic
uuaauagcaguuucuucu

SEQ ID NO: 66871 - RNA, 19 nt, Artificial Sequence
  Synthetic
uuuaauagcaguuucuucu

SEQ ID NO: 66872 - RNA, 20 nt, Artificial Sequence
  Synthetic
cuuuaauagcaguuucuucu

SEQ ID NO: 66873 - RNA, 21 nt, Artificial Sequence
  Synthetic
ucuuuaauagcaguuucuucu

SEQ ID NO: 66874 - RNA, 22 nt, Artificial Sequence
  Synthetic
aucuuuaauagcaguuucuucu

SEQ ID NO: 66875 - RNA, 23 nt, Artificial Sequence
  Synthetic
uaucuuuaauagcaguuucuucu

SEQ ID NO: 66876 - RNA, 24 nt, Artificial Sequence
  Synthetic
uuaucuuuaauagcaguuucuucu

SEQ ID NO: 66877 - RNA, 19 nt, Artificial Sequence
  Synthetic
agagcacuaacaaaguucu

SEQ ID NO: 66878 - RNA, 20 nt, Artificial Sequence
  Synthetic
uagagcacuaacaaaguucu

SEQ ID NO: 66879 - RNA, 21 nt, Artificial Sequence
  Synthetic
cuagagcacuaacaaaguucu

SEQ ID NO: 66880 - RNA, 22 nt, Artificial Sequence
  Synthetic
ccuagagcacuaacaaaguucu

SEQ ID NO: 66881 - RNA, 23 nt, Artificial Sequence
  Synthetic
accuagagcacuaacaaaguucu

SEQ ID NO: 66882 - RNA, 24 nt, Artificial Sequence
  Synthetic
caccuagagcacuaacaaaguucu

SEQ ID NO: 66883 - RNA, 18 nt, Artificial Sequence
  Synthetic
cuucuccacuacaguucu

SEQ ID NO: 66884 - RNA, 20 nt, Artificial Sequence
  Synthetic
agcuucuccacuacaguucu

SEQ ID NO: 66885 - RNA, 21 nt, Artificial Sequence
  Synthetic
uagcuucuccacuacaguucu

SEQ ID NO: 66886 - RNA, 23 nt, Artificial Sequence
  Synthetic
uguagcuucuccacuacaguucu

SEQ ID NO: 66887 - RNA, 24 nt, Artificial Sequence
  Synthetic
uuguagcuucuccacuacaguucu

SEQ ID NO: 66888 - RNA, 18 nt, Artificial Sequence
  Synthetic
agcagaagacugaguucu

SEQ ID NO: 66889 - RNA, 19 nt, Artificial Sequence
  Synthetic
uagcagaagacugaguucu

SEQ ID NO: 66890 - RNA, 20 nt, Artificial Sequence
  Synthetic
uuagcagaagacugaguucu

SEQ ID NO: 66891 - RNA, 21 nt, Artificial Sequence
  Synthetic
uaaagaugaaaaccagguucu

SEQ ID NO: 66892 - RNA, 22 nt, Artificial Sequence
  Synthetic
uuaaagaugaaaaccagguucu

SEQ ID NO: 66893 - RNA, 23 nt, Artificial Sequence
  Synthetic
auuaaagaugaaaaccagguucu

SEQ ID NO: 66894 - RNA, 24 nt, Artificial Sequence
  Synthetic
aauuaaagaugaaaaccagguucu

SEQ ID NO: 66895 - RNA, 18 nt, Artificial Sequence
  Synthetic
uuauuguucauagguucu

SEQ ID NO: 66896 - RNA, 19 nt, Artificial Sequence
  Synthetic
auuauuguucauagguucu

SEQ ID NO: 66897 - RNA, 20 nt, Artificial Sequence
  Synthetic
cauuauuguucauagguucu

SEQ ID NO: 66898 - RNA, 21 nt, Artificial Sequence
  Synthetic
ccauuauuguucauagguucu

SEQ ID NO: 66899 - RNA, 22 nt, Artificial Sequence
  Synthetic
accauuauuguucauagguucu

SEQ ID NO: 66900 - RNA, 23 nt, Artificial Sequence
  Synthetic
caccauuauuguucauagguucu

SEQ ID NO: 66901 - RNA, 24 nt, Artificial Sequence
  Synthetic
ccaccauuauuguucauagguucu

SEQ ID NO: 66902 - RNA, 18 nt, Artificial Sequence
  Synthetic
aacucaagaaaggguucu

SEQ ID NO: 66903 - RNA, 19 nt, Artificial Sequence
  Synthetic
uaacucaagaaaggguucu

SEQ ID NO: 66904 - RNA, 20 nt, Artificial Sequence
  Synthetic
auaacucaagaaaggguucu

SEQ ID NO: 66905 - RNA, 21 nt, Artificial Sequence
  Synthetic
aauaacucaagaaaggguucu

SEQ ID NO: 66906 - RNA, 22 nt, Artificial Sequence
  Synthetic
uaauaacucaagaaaggguucu

SEQ ID NO: 66907 - RNA, 24 nt, Artificial Sequence
  Synthetic
aguaauaacucaagaaaggguucu

SEQ ID NO: 66908 - RNA, 18 nt, Artificial Sequence
  Synthetic
agcucaugaauggguucu

SEQ ID NO: 66909 - RNA, 19 nt, Artificial Sequence
  Synthetic
aagcucaugaauggguucu

SEQ ID NO: 66910 - RNA, 20 nt, Artificial Sequence
  Synthetic
aaagcucaugaauggguucu

SEQ ID NO: 66911 - RNA, 23 nt, Artificial Sequence
  Synthetic
uggaaagcucaugaauggguucu

SEQ ID NO: 66912 - RNA, 24 nt, Artificial Sequence
  Synthetic
auggaaagcucaugaauggguucu

SEQ ID NO: 66913 - RNA, 18 nt, Artificial Sequence
  Synthetic
cagauuaacucugguucu

SEQ ID NO: 66914 - RNA, 19 nt, Artificial Sequence
  Synthetic
ucagauuaacucugguucu

SEQ ID NO: 66915 - RNA, 20 nt, Artificial Sequence
  Synthetic
uucagauuaacucugguucu

SEQ ID NO: 66916 - RNA, 21 nt, Artificial Sequence
  Synthetic
uuucagauuaacucugguucu

SEQ ID NO: 66917 - RNA, 22 nt, Artificial Sequence
  Synthetic
auuucagauuaacucugguucu

SEQ ID NO: 66918 - RNA, 23 nt, Artificial Sequence
  Synthetic
aauuucagauuaacucugguucu

SEQ ID NO: 66919 - RNA, 18 nt, Artificial Sequence
  Synthetic
ugauucauauuugguucu

SEQ ID NO: 66920 - RNA, 19 nt, Artificial Sequence
  Synthetic
augauucauauuugguucu

SEQ ID NO: 66921 - RNA, 21 nt, Artificial Sequence
  Synthetic
agaugauucauauuugguucu

SEQ ID NO: 66922 - RNA, 22 nt, Artificial Sequence
  Synthetic
cagaugauucauauuugguucu

SEQ ID NO: 66923 - RNA, 23 nt, Artificial Sequence
  Synthetic
acagaugauucauauuugguucu

SEQ ID NO: 66924 - RNA, 24 nt, Artificial Sequence
  Synthetic
aacagaugauucauauuugguucu

SEQ ID NO: 66925 - RNA, 18 nt, Artificial Sequence
  Synthetic
uuggcuacuuuugguucu

SEQ ID NO: 66926 - RNA, 19 nt, Artificial Sequence
  Synthetic
cuuggcuacuuuugguucu

SEQ ID NO: 66927 - RNA, 20 nt, Artificial Sequence
  Synthetic
ccuuggcuacuuuugguucu

SEQ ID NO: 66928 - RNA, 22 nt, Artificial Sequence
  Synthetic
ugccuuggcuacuuuugguucu

SEQ ID NO: 66929 - RNA, 23 nt, Artificial Sequence
  Synthetic
uugccuuggcuacuuuugguucu

SEQ ID NO: 66930 - RNA, 24 nt, Artificial Sequence
  Synthetic
auugccuuggcuacuuuugguucu

SEQ ID NO: 66931 - RNA, 18 nt, Artificial Sequence
  Synthetic
aauuuauggucauguucu

SEQ ID NO: 66932 - RNA, 19 nt, Artificial Sequence
  Synthetic
uaauuuauggucauguucu

SEQ ID NO: 66933 - RNA, 20 nt, Artificial Sequence
  Synthetic
uuaauuuauggucauguucu

SEQ ID NO: 66934 - RNA, 21 nt, Artificial Sequence
  Synthetic
uuuaauuuauggucauguucu

SEQ ID NO: 66935 - RNA, 22 nt, Artificial Sequence
  Synthetic
uuuuaauuuauggucauguucu

SEQ ID NO: 66936 - RNA, 23 nt, Artificial Sequence
  Synthetic
uuuuuaauuuauggucauguucu

SEQ ID NO: 66937 - RNA, 24 nt, Artificial Sequence
  Synthetic
auuuuuaauuuauggucauguucu

SEQ ID NO: 66938 - RNA, 18 nt, Artificial Sequence
  Synthetic
acacaucugcacuguucu

SEQ ID NO: 66939 - RNA, 19 nt, Artificial Sequence
  Synthetic
uacacaucugcacuguucu

SEQ ID NO: 66940 - RNA, 20 nt, Artificial Sequence
  Synthetic
uuacacaucugcacuguucu

SEQ ID NO: 66941 - RNA, 21 nt, Artificial Sequence
  Synthetic
auuacacaucugcacuguucu

SEQ ID NO: 66942 - RNA, 22 nt, Artificial Sequence
  Synthetic
cauuacacaucugcacuguucu

SEQ ID NO: 66943 - RNA, 23 nt, Artificial Sequence
  Synthetic
ucauuacacaucugcacuguucu

SEQ ID NO: 66944 - RNA, 24 nt, Artificial Sequence
  Synthetic
uucauuacacaucugcacuguucu

SEQ ID NO: 66945 - RNA, 18 nt, Artificial Sequence
  Synthetic
ugcauacuauucuguucu

SEQ ID NO: 66946 - RNA, 19 nt, Artificial Sequence
  Synthetic
uugcauacuauucuguucu

SEQ ID NO: 66947 - RNA, 21 nt, Artificial Sequence
  Synthetic
aguugcauacuauucuguucu

SEQ ID NO: 66948 - RNA, 22 nt, Artificial Sequence
  Synthetic
caguugcauacuauucuguucu

SEQ ID NO: 66949 - RNA, 23 nt, Artificial Sequence
  Synthetic
acaguugcauacuauucuguucu

SEQ ID NO: 66950 - RNA, 24 nt, Artificial Sequence
  Synthetic
uacaguugcauacuauucuguucu

SEQ ID NO: 66951 - RNA, 21 nt, Artificial Sequence
  Synthetic
augucuauuuaggaguguucu

SEQ ID NO: 66952 - RNA, 22 nt, Artificial Sequence
  Synthetic
uaugucuauuuaggaguguucu

SEQ ID NO: 66953 - RNA, 24 nt, Artificial Sequence
  Synthetic
aguaugucuauuuaggaguguucu

SEQ ID NO: 66954 - RNA, 18 nt, Artificial Sequence
  Synthetic
aaaguccuguuguguucu

SEQ ID NO: 66955 - RNA, 19 nt, Artificial Sequence
  Synthetic
uaaaguccuguuguguucu

SEQ ID NO: 66956 - RNA, 20 nt, Artificial Sequence
  Synthetic
uuaaaguccuguuguguucu

SEQ ID NO: 66957 - RNA, 21 nt, Artificial Sequence
  Synthetic
cuuaaaguccuguuguguucu

SEQ ID NO: 66958 - RNA, 22 nt, Artificial Sequence
  Synthetic
ccuuaaaguccuguuguguucu

SEQ ID NO: 66959 - RNA, 18 nt, Artificial Sequence
  Synthetic
uuuagaaaagauuguucu

SEQ ID NO: 66960 - RNA, 19 nt, Artificial Sequence
  Synthetic
cuuuagaaaagauuguucu

SEQ ID NO: 66961 - RNA, 22 nt, Artificial Sequence
  Synthetic
uggcuuuagaaaagauuguucu

SEQ ID NO: 66962 - RNA, 24 nt, Artificial Sequence
  Synthetic
uguggcuuuagaaaagauuguucu

SEQ ID NO: 66963 - RNA, 18 nt, Artificial Sequence
  Synthetic
cacucauucacuuguucu

SEQ ID NO: 66964 - RNA, 20 nt, Artificial Sequence
  Synthetic
ugcacucauucacuuguucu

SEQ ID NO: 66965 - RNA, 21 nt, Artificial Sequence
  Synthetic
cugcacucauucacuuguucu

SEQ ID NO: 66966 - RNA, 22 nt, Artificial Sequence
  Synthetic
acugcacucauucacuuguucu

SEQ ID NO: 66967 - RNA, 24 nt, Artificial Sequence
  Synthetic
agacugcacucauucacuuguucu

SEQ ID NO: 66968 - RNA, 19 nt, Artificial Sequence
  Synthetic
agugacuaugccaauuucu

SEQ ID NO: 66969 - RNA, 22 nt, Artificial Sequence
  Synthetic
uggagugacuaugccaauuucu

SEQ ID NO: 66970 - RNA, 23 nt, Artificial Sequence
  Synthetic
uuggagugacuaugccaauuucu

SEQ ID NO: 66971 - RNA, 21 nt, Artificial Sequence
  Synthetic
agauauaauucuggaauuucu

SEQ ID NO: 66972 - RNA, 23 nt, Artificial Sequence
  Synthetic
agagauauaauucuggaauuucu

SEQ ID NO: 66973 - RNA, 24 nt, Artificial Sequence
  Synthetic
cagagauauaauucuggaauuucu

SEQ ID NO: 66974 - RNA, 18 nt, Artificial Sequence
  Synthetic
aucagucacuccauuucu

SEQ ID NO: 66975 - RNA, 20 nt, Artificial Sequence
  Synthetic
ugaucagucacuccauuucu

SEQ ID NO: 66976 - RNA, 21 nt, Artificial Sequence
  Synthetic
uugaucagucacuccauuucu

SEQ ID NO: 66977 - RNA, 22 nt, Artificial Sequence
  Synthetic
uuugaucagucacuccauuucu

SEQ ID NO: 66978 - RNA, 23 nt, Artificial Sequence
  Synthetic
uuuugaucagucacuccauuucu

SEQ ID NO: 66979 - RNA, 24 nt, Artificial Sequence
  Synthetic
cuuuugaucagucacuccauuucu

SEQ ID NO: 66980 - RNA, 18 nt, Artificial Sequence
  Synthetic
uugucuuuucagauuucu

SEQ ID NO: 66981 - RNA, 19 nt, Artificial Sequence
  Synthetic
auugucuuuucagauuucu

SEQ ID NO: 66982 - RNA, 20 nt, Artificial Sequence
  Synthetic
cauugucuuuucagauuucu

SEQ ID NO: 66983 - RNA, 21 nt, Artificial Sequence
  Synthetic
ucauugucuuuucagauuucu

SEQ ID NO: 66984 - RNA, 22 nt, Artificial Sequence
  Synthetic
cucauugucuuuucagauuucu

SEQ ID NO: 66985 - RNA, 23 nt, Artificial Sequence
  Synthetic
ucucauugucuuuucagauuucu

SEQ ID NO: 66986 - RNA, 24 nt, Artificial Sequence
  Synthetic
uucucauugucuuuucagauuucu

SEQ ID NO: 66987 - RNA, 19 nt, Artificial Sequence
  Synthetic
agggcaagugcugauuucu

SEQ ID NO: 66988 - RNA, 20 nt, Artificial Sequence
  Synthetic
aagggcaagugcugauuucu

SEQ ID NO: 66989 - RNA, 21 nt, Artificial Sequence
  Synthetic
caagggcaagugcugauuucu

SEQ ID NO: 66990 - RNA, 22 nt, Artificial Sequence
  Synthetic
acaagggcaagugcugauuucu

SEQ ID NO: 66991 - RNA, 23 nt, Artificial Sequence
  Synthetic
uacaagggcaagugcugauuucu

SEQ ID NO: 66992 - RNA, 24 nt, Artificial Sequence
  Synthetic
auacaagggcaagugcugauuucu

SEQ ID NO: 66993 - RNA, 19 nt, Artificial Sequence
  Synthetic
aggugugaacacuauuucu

SEQ ID NO: 66994 - RNA, 20 nt, Artificial Sequence
  Synthetic
uaggugugaacacuauuucu

SEQ ID NO: 66995 - RNA, 21 nt, Artificial Sequence
  Synthetic
cuaggugugaacacuauuucu

SEQ ID NO: 66996 - RNA, 23 nt, Artificial Sequence
  Synthetic
agcuaggugugaacacuauuucu

SEQ ID NO: 66997 - RNA, 24 nt, Artificial Sequence
  Synthetic
aagcuaggugugaacacuauuucu

SEQ ID NO: 66998 - RNA, 18 nt, Artificial Sequence
  Synthetic
ucuguuaacuguauuucu

SEQ ID NO: 66999 - RNA, 19 nt, Artificial Sequence
  Synthetic
aucuguuaacuguauuucu

SEQ ID NO: 67000 - RNA, 20 nt, Artificial Sequence
  Synthetic
uaucuguuaacuguauuucu

SEQ ID NO: 67001 - RNA, 24 nt, Artificial Sequence
  Synthetic
uggguaucuguuaacuguauuucu

SEQ ID NO: 67002 - RNA, 18 nt, Artificial Sequence
  Synthetic
ucugccuaguuuauuucu

SEQ ID NO: 67003 - RNA, 20 nt, Artificial Sequence
  Synthetic
ugucugccuaguuuauuucu

SEQ ID NO: 67004 - RNA, 22 nt, Artificial Sequence
  Synthetic
ugugucugccuaguuuauuucu

SEQ ID NO: 67005 - RNA, 23 nt, Artificial Sequence
  Synthetic
uugugucugccuaguuuauuucu

SEQ ID NO: 67006 - RNA, 24 nt, Artificial Sequence
  Synthetic
cuugugucugccuaguuuauuucu

SEQ ID NO: 67007 - RNA, 21 nt, Artificial Sequence
  Synthetic
auaaauuguuuaacucuuucu

SEQ ID NO: 67008 - RNA, 22 nt, Artificial Sequence
  Synthetic
uauaaauuguuuaacucuuucu

SEQ ID NO: 67009 - RNA, 23 nt, Artificial Sequence
  Synthetic
uuauaaauuguuuaacucuuucu

SEQ ID NO: 67010 - RNA, 24 nt, Artificial Sequence
  Synthetic
auuauaaauuguuuaacucuuucu

SEQ ID NO: 67011 - RNA, 18 nt, Artificial Sequence
  Synthetic
ugauauuuaccucuuucu

SEQ ID NO: 67012 - RNA, 19 nt, Artificial Sequence
  Synthetic
uugauauuuaccucuuucu

SEQ ID NO: 67013 - RNA, 21 nt, Artificial Sequence
  Synthetic
uguugauauuuaccucuuucu

SEQ ID NO: 67014 - RNA, 22 nt, Artificial Sequence
  Synthetic
auguugauauuuaccucuuucu

SEQ ID NO: 67015 - RNA, 23 nt, Artificial Sequence
  Synthetic
aauguugauauuuaccucuuucu

SEQ ID NO: 67016 - RNA, 24 nt, Artificial Sequence
  Synthetic
uaauguugauauuuaccucuuucu

SEQ ID NO: 67017 - RNA, 20 nt, Artificial Sequence
  Synthetic
agguguaaguaggucuuucu

SEQ ID NO: 67018 - RNA, 21 nt, Artificial Sequence
  Synthetic
cagguguaaguaggucuuucu

SEQ ID NO: 67019 - RNA, 23 nt, Artificial Sequence
  Synthetic
ugcagguguaaguaggucuuucu

SEQ ID NO: 67020 - RNA, 24 nt, Artificial Sequence
  Synthetic
cugcagguguaaguaggucuuucu

SEQ ID NO: 67021 - RNA, 18 nt, Artificial Sequence
  Synthetic
acaauagauugucuuucu

SEQ ID NO: 67022 - RNA, 19 nt, Artificial Sequence
  Synthetic
cacaauagauugucuuucu

SEQ ID NO: 67023 - RNA, 20 nt, Artificial Sequence
  Synthetic
acacaauagauugucuuucu

SEQ ID NO: 67024 - RNA, 21 nt, Artificial Sequence
  Synthetic
uacacaauagauugucuuucu

SEQ ID NO: 67025 - RNA, 22 nt, Artificial Sequence
  Synthetic
cuacacaauagauugucuuucu

SEQ ID NO: 67026 - RNA, 23 nt, Artificial Sequence
  Synthetic
ccuacacaauagauugucuuucu

SEQ ID NO: 67027 - RNA, 24 nt, Artificial Sequence
  Synthetic
accuacacaauagauugucuuucu

SEQ ID NO: 67028 - RNA, 18 nt, Artificial Sequence
  Synthetic
cugcuguguguaguuucu

SEQ ID NO: 67029 - RNA, 19 nt, Artificial Sequence
  Synthetic
acugcuguguguaguuucu

SEQ ID NO: 67030 - RNA, 20 nt, Artificial Sequence
  Synthetic
cacugcuguguguaguuucu

SEQ ID NO: 67031 - RNA, 21 nt, Artificial Sequence
  Synthetic
ucacugcuguguguaguuucu

SEQ ID NO: 67032 - RNA, 22 nt, Artificial Sequence
  Synthetic
cucacugcuguguguaguuucu

SEQ ID NO: 67033 - RNA, 23 nt, Artificial Sequence
  Synthetic
acucacugcuguguguaguuucu

SEQ ID NO: 67034 - RNA, 24 nt, Artificial Sequence
  Synthetic
cacucacugcuguguguaguuucu

SEQ ID NO: 67035 - RNA, 18 nt, Artificial Sequence
  Synthetic
aagagaauugugguuucu

SEQ ID NO: 67036 - RNA, 19 nt, Artificial Sequence
  Synthetic
uaagagaauugugguuucu

SEQ ID NO: 67037 - RNA, 20 nt, Artificial Sequence
  Synthetic
auaagagaauugugguuucu

SEQ ID NO: 67038 - RNA, 22 nt, Artificial Sequence
  Synthetic
agauaagagaauugugguuucu

SEQ ID NO: 67039 - RNA, 23 nt, Artificial Sequence
  Synthetic
aagauaagagaauugugguuucu

SEQ ID NO: 67040 - RNA, 24 nt, Artificial Sequence
  Synthetic
aaagauaagagaauugugguuucu

SEQ ID NO: 67041 - RNA, 18 nt, Artificial Sequence
  Synthetic
agagauaaggauguuucu

SEQ ID NO: 67042 - RNA, 19 nt, Artificial Sequence
  Synthetic
uagagauaaggauguuucu

SEQ ID NO: 67043 - RNA, 20 nt, Artificial Sequence
  Synthetic
auagagauaaggauguuucu

SEQ ID NO: 67044 - RNA, 21 nt, Artificial Sequence
  Synthetic
aauagagauaaggauguuucu

SEQ ID NO: 67045 - RNA, 22 nt, Artificial Sequence
  Synthetic
caauagagauaaggauguuucu

SEQ ID NO: 67046 - RNA, 23 nt, Artificial Sequence
  Synthetic
acaauagagauaaggauguuucu

SEQ ID NO: 67047 - RNA, 24 nt, Artificial Sequence
  Synthetic
uacaauagagauaaggauguuucu

SEQ ID NO: 67048 - RNA, 21 nt, Artificial Sequence
  Synthetic
ucuggacuacuuucuguuucu

SEQ ID NO: 67049 - RNA, 22 nt, Artificial Sequence
  Synthetic
cucuggacuacuuucuguuucu

SEQ ID NO: 67050 - RNA, 23 nt, Artificial Sequence
  Synthetic
ccucuggacuacuuucuguuucu

SEQ ID NO: 67051 - RNA, 18 nt, Artificial Sequence
  Synthetic
auaaaguuuucuguuucu

SEQ ID NO: 67052 - RNA, 19 nt, Artificial Sequence
  Synthetic
cauaaaguuuucuguuucu

SEQ ID NO: 67053 - RNA, 20 nt, Artificial Sequence
  Synthetic
ucauaaaguuuucuguuucu

SEQ ID NO: 67054 - RNA, 21 nt, Artificial Sequence
  Synthetic
cucauaaaguuuucuguuucu

SEQ ID NO: 67055 - RNA, 22 nt, Artificial Sequence
  Synthetic
ccucauaaaguuuucuguuucu

SEQ ID NO: 67056 - RNA, 23 nt, Artificial Sequence
  Synthetic
uccucauaaaguuuucuguuucu

SEQ ID NO: 67057 - RNA, 24 nt, Artificial Sequence
  Synthetic
uuccucauaaaguuuucuguuucu

SEQ ID NO: 67058 - RNA, 18 nt, Artificial Sequence
  Synthetic
acuuaccauuaauuuucu

SEQ ID NO: 67059 - RNA, 19 nt, Artificial Sequence
  Synthetic
aacuuaccauuaauuuucu

SEQ ID NO: 67060 - RNA, 20 nt, Artificial Sequence
  Synthetic
caacuuaccauuaauuuucu

SEQ ID NO: 67061 - RNA, 21 nt, Artificial Sequence
  Synthetic
ccaacuuaccauuaauuuucu

SEQ ID NO: 67062 - RNA, 22 nt, Artificial Sequence
  Synthetic
accaacuuaccauuaauuuucu

SEQ ID NO: 67063 - RNA, 23 nt, Artificial Sequence
  Synthetic
aaccaacuuaccauuaauuuucu

SEQ ID NO: 67064 - RNA, 24 nt, Artificial Sequence
  Synthetic
caaccaacuuaccauuaauuuucu

SEQ ID NO: 67065 - RNA, 18 nt, Artificial Sequence
  Synthetic
ugcagcacaguauuuucu

SEQ ID NO: 67066 - RNA, 19 nt, Artificial Sequence
  Synthetic
uugcagcacaguauuuucu

SEQ ID NO: 67067 - RNA, 20 nt, Artificial Sequence
  Synthetic
auugcagcacaguauuuucu

SEQ ID NO: 67068 - RNA, 21 nt, Artificial Sequence
  Synthetic
uauugcagcacaguauuuucu

SEQ ID NO: 67069 - RNA, 22 nt, Artificial Sequence
  Synthetic
auauugcagcacaguauuuucu

SEQ ID NO: 67070 - RNA, 23 nt, Artificial Sequence
  Synthetic
aauauugcagcacaguauuuucu

SEQ ID NO: 67071 - RNA, 24 nt, Artificial Sequence
  Synthetic
uaauauugcagcacaguauuuucu

SEQ ID NO: 67072 - RNA, 19 nt, Artificial Sequence
  Synthetic
ugcacuuacucacuuuucu

SEQ ID NO: 67073 - RNA, 20 nt, Artificial Sequence
  Synthetic
uugcacuuacucacuuuucu

SEQ ID NO: 67074 - RNA, 22 nt, Artificial Sequence
  Synthetic
uguugcacuuacucacuuuucu

SEQ ID NO: 67075 - RNA, 23 nt, Artificial Sequence
  Synthetic
auguugcacuuacucacuuuucu

SEQ ID NO: 67076 - RNA, 18 nt, Artificial Sequence
  Synthetic
ucaguuucuggguuuucu

SEQ ID NO: 67077 - RNA, 19 nt, Artificial Sequence
  Synthetic
uucaguuucuggguuuucu

SEQ ID NO: 67078 - RNA, 20 nt, Artificial Sequence
  Synthetic
uuucaguuucuggguuuucu

SEQ ID NO: 67079 - RNA, 21 nt, Artificial Sequence
  Synthetic
cuuucaguuucuggguuuucu

SEQ ID NO: 67080 - RNA, 22 nt, Artificial Sequence
  Synthetic
ucuuucaguuucuggguuuucu

SEQ ID NO: 67081 - RNA, 23 nt, Artificial Sequence
  Synthetic
cucuuucaguuucuggguuuucu

SEQ ID NO: 67082 - RNA, 18 nt, Artificial Sequence
  Synthetic
ucagaauuugauuuuucu

SEQ ID NO: 67083 - RNA, 19 nt, Artificial Sequence
  Synthetic
uucagaauuugauuuuucu

SEQ ID NO: 67084 - RNA, 20 nt, Artificial Sequence
  Synthetic
auucagaauuugauuuuucu

SEQ ID NO: 67085 - RNA, 18 nt, Artificial Sequence
  Synthetic
caaaaaucgucuuuuucu

SEQ ID NO: 67086 - RNA, 20 nt, Artificial Sequence
  Synthetic
ugcaaaaaucgucuuuuucu

SEQ ID NO: 67087 - RNA, 21 nt, Artificial Sequence
  Synthetic
uugcaaaaaucgucuuuuucu

SEQ ID NO: 67088 - RNA, 24 nt, Artificial Sequence
  Synthetic
cgguugcaaaaaucgucuuuuucu

SEQ ID NO: 67089 - RNA, 18 nt, Artificial Sequence
  Synthetic
acagaugacauuuuuucu

SEQ ID NO: 67090 - RNA, 19 nt, Artificial Sequence
  Synthetic
aacagaugacauuuuuucu

SEQ ID NO: 67091 - RNA, 20 nt, Artificial Sequence
  Synthetic
aaacagaugacauuuuuucu

SEQ ID NO: 67092 - RNA, 21 nt, Artificial Sequence
  Synthetic
aaaacagaugacauuuuuucu

SEQ ID NO: 67093 - RNA, 23 nt, Artificial Sequence
  Synthetic
agaaaacagaugacauuuuuucu

SEQ ID NO: 67094 - RNA, 18 nt, Artificial Sequence
  Synthetic
agagaguagauuuuuucu

SEQ ID NO: 67095 - RNA, 19 nt, Artificial Sequence
  Synthetic
uagagaguagauuuuuucu

SEQ ID NO: 67096 - RNA, 20 nt, Artificial Sequence
  Synthetic
auagagaguagauuuuuucu

SEQ ID NO: 67097 - RNA, 21 nt, Artificial Sequence
  Synthetic
aauagagaguagauuuuuucu

SEQ ID NO: 67098 - RNA, 22 nt, Artificial Sequence
  Synthetic
aaauagagaguagauuuuuucu

SEQ ID NO: 67099 - RNA, 24 nt, Artificial Sequence
  Synthetic
ugaaauagagaguagauuuuuucu

SEQ ID NO: 67100 - RNA, 19 nt, Artificial Sequence
  Synthetic
aguuuaaggacuuuuuucu

SEQ ID NO: 67101 - RNA, 20 nt, Artificial Sequence
  Synthetic
aaguuuaaggacuuuuuucu

SEQ ID NO: 67102 - RNA, 22 nt, Artificial Sequence
  Synthetic
agaaguuuaaggacuuuuuucu

SEQ ID NO: 67103 - RNA, 23 nt, Artificial Sequence
  Synthetic
uagaaguuuaaggacuuuuuucu

SEQ ID NO: 67104 - RNA, 18 nt, Artificial Sequence
  Synthetic
cuuuguacaguuuuuucu

SEQ ID NO: 67105 - RNA, 19 nt, Artificial Sequence
  Synthetic
ccuuuguacaguuuuuucu

SEQ ID NO: 67106 - RNA, 20 nt, Artificial Sequence
  Synthetic
cccuuuguacaguuuuuucu

SEQ ID NO: 67107 - RNA, 21 nt, Artificial Sequence
  Synthetic
acccuuuguacaguuuuuucu

SEQ ID NO: 67108 - RNA, 22 nt, Artificial Sequence
  Synthetic
aacccuuuguacaguuuuuucu

SEQ ID NO: 67109 - RNA, 23 nt, Artificial Sequence
  Synthetic
aaacccuuuguacaguuuuuucu

SEQ ID NO: 67110 - RNA, 18 nt, Artificial Sequence
  Synthetic
aauuacauaagaaaaagu

SEQ ID NO: 67111 - RNA, 19 nt, Artificial Sequence
  Synthetic
uaauuacauaagaaaaagu

SEQ ID NO: 67112 - RNA, 20 nt, Artificial Sequence
  Synthetic
cuaauuacauaagaaaaagu

SEQ ID NO: 67113 - RNA, 21 nt, Artificial Sequence
  Synthetic
ucuaauuacauaagaaaaagu

SEQ ID NO: 67114 - RNA, 22 nt, Artificial Sequence
  Synthetic
cucuaauuacauaagaaaaagu

SEQ ID NO: 67115 - RNA, 23 nt, Artificial Sequence
  Synthetic
acucuaauuacauaagaaaaagu

SEQ ID NO: 67116 - RNA, 24 nt, Artificial Sequence
  Synthetic
aacucuaauuacauaagaaaaagu

SEQ ID NO: 67117 - RNA, 21 nt, Artificial Sequence
  Synthetic
aaaaguggaggaggaaaaagu

SEQ ID NO: 67118 - RNA, 18 nt, Artificial Sequence
  Synthetic
agggugaggggaaaaagu

SEQ ID NO: 67119 - RNA, 19 nt, Artificial Sequence
  Synthetic
uagggugaggggaaaaagu

SEQ ID NO: 67120 - RNA, 20 nt, Artificial Sequence
  Synthetic
cuagggugaggggaaaaagu

SEQ ID NO: 67121 - RNA, 21 nt, Artificial Sequence
  Synthetic
ccuagggugaggggaaaaagu

SEQ ID NO: 67122 - RNA, 22 nt, Artificial Sequence
  Synthetic
cccuagggugaggggaaaaagu

SEQ ID NO: 67123 - RNA, 24 nt, Artificial Sequence
  Synthetic
agcccuagggugaggggaaaaagu

SEQ ID NO: 67124 - RNA, 21 nt, Artificial Sequence
  Synthetic
uugaaauguuauuuaaaaagu

SEQ ID NO: 67125 - RNA, 22 nt, Artificial Sequence
  Synthetic
cuugaaauguuauuuaaaaagu

SEQ ID NO: 67126 - RNA, 23 nt, Artificial Sequence
  Synthetic
ucuugaaauguuauuuaaaaagu

SEQ ID NO: 67127 - RNA, 24 nt, Artificial Sequence
  Synthetic
uucuugaaauguuauuuaaaaagu

SEQ ID NO: 67128 - RNA, 19 nt, Artificial Sequence
  Synthetic
aguuaagcaagccaaaagu

SEQ ID NO: 67129 - RNA, 20 nt, Artificial Sequence
  Synthetic
caguuaagcaagccaaaagu

SEQ ID NO: 67130 - RNA, 21 nt, Artificial Sequence
  Synthetic
ccaguuaagcaagccaaaagu

SEQ ID NO: 67131 - RNA, 22 nt, Artificial Sequence
  Synthetic
uccaguuaagcaagccaaaagu

SEQ ID NO: 67132 - RNA, 23 nt, Artificial Sequence
  Synthetic
auccaguuaagcaagccaaaagu

SEQ ID NO: 67133 - RNA, 24 nt, Artificial Sequence
  Synthetic
uauccaguuaagcaagccaaaagu

SEQ ID NO: 67134 - RNA, 18 nt, Artificial Sequence
  Synthetic
ccuugaggaugcaaaagu

SEQ ID NO: 67135 - RNA, 19 nt, Artificial Sequence
  Synthetic
uccuugaggaugcaaaagu

SEQ ID NO: 67136 - RNA, 22 nt, Artificial Sequence
  Synthetic
agguccuugaggaugcaaaagu

SEQ ID NO: 67137 - RNA, 23 nt, Artificial Sequence
  Synthetic
uagguccuugaggaugcaaaagu

SEQ ID NO: 67138 - RNA, 24 nt, Artificial Sequence
  Synthetic
uuagguccuugaggaugcaaaagu

SEQ ID NO: 67139 - RNA, 18 nt, Artificial Sequence
  Synthetic
cuuuagaacugcaaaagu

SEQ ID NO: 67140 - RNA, 19 nt, Artificial Sequence
  Synthetic
ucuuuagaacugcaaaagu

SEQ ID NO: 67141 - RNA, 20 nt, Artificial Sequence
  Synthetic
cucuuuagaacugcaaaagu

SEQ ID NO: 67142 - RNA, 21 nt, Artificial Sequence
  Synthetic
ucucuuuagaacugcaaaagu

SEQ ID NO: 67143 - RNA, 22 nt, Artificial Sequence
  Synthetic
cucucuuuagaacugcaaaagu

SEQ ID NO: 67144 - RNA, 23 nt, Artificial Sequence
  Synthetic
acucucuuuagaacugcaaaagu

SEQ ID NO: 67145 - RNA, 24 nt, Artificial Sequence
  Synthetic
uacucucuuuagaacugcaaaagu

SEQ ID NO: 67146 - RNA, 19 nt, Artificial Sequence
  Synthetic
agccuacuugaggaaaagu

SEQ ID NO: 67147 - RNA, 20 nt, Artificial Sequence
  Synthetic
uagccuacuugaggaaaagu

SEQ ID NO: 67148 - RNA, 21 nt, Artificial Sequence
  Synthetic
uuagccuacuugaggaaaagu

SEQ ID NO: 67149 - RNA, 22 nt, Artificial Sequence
  Synthetic
cuuagccuacuugaggaaaagu

SEQ ID NO: 67150 - RNA, 23 nt, Artificial Sequence
  Synthetic
acuuagccuacuugaggaaaagu

SEQ ID NO: 67151 - RNA, 24 nt, Artificial Sequence
  Synthetic
aacuuagccuacuugaggaaaagu

SEQ ID NO: 67152 - RNA, 18 nt, Artificial Sequence
  Synthetic
aauagaauauggaaaagu

SEQ ID NO: 67153 - RNA, 19 nt, Artificial Sequence
  Synthetic
uaauagaauauggaaaagu

SEQ ID NO: 67154 - RNA, 20 nt, Artificial Sequence
  Synthetic
auaauagaauauggaaaagu

SEQ ID NO: 67155 - RNA, 22 nt, Artificial Sequence
  Synthetic
agauaauagaauauggaaaagu

SEQ ID NO: 67156 - RNA, 23 nt, Artificial Sequence
  Synthetic
cagauaauagaauauggaaaagu

SEQ ID NO: 67157 - RNA, 24 nt, Artificial Sequence
  Synthetic
ccagauaauagaauauggaaaagu

SEQ ID NO: 67158 - RNA, 21 nt, Artificial Sequence
  Synthetic
caguuaccucaccugaaaagu

SEQ ID NO: 67159 - RNA, 22 nt, Artificial Sequence
  Synthetic
ccaguuaccucaccugaaaagu

SEQ ID NO: 67160 - RNA, 23 nt, Artificial Sequence
  Synthetic
cccaguuaccucaccugaaaagu

SEQ ID NO: 67161 - RNA, 24 nt, Artificial Sequence
  Synthetic
ucccaguuaccucaccugaaaagu

SEQ ID NO: 67162 - RNA, 21 nt, Artificial Sequence
  Synthetic
auguaauauagaaauaaaagu

SEQ ID NO: 67163 - RNA, 22 nt, Artificial Sequence
  Synthetic
aauguaauauagaaauaaaagu

SEQ ID NO: 67164 - RNA, 23 nt, Artificial Sequence
  Synthetic
aaauguaauauagaaauaaaagu

SEQ ID NO: 67165 - RNA, 24 nt, Artificial Sequence
  Synthetic
caaauguaauauagaaauaaaagu

SEQ ID NO: 67166 - RNA, 18 nt, Artificial Sequence
  Synthetic
augucaguugauaaaagu

SEQ ID NO: 67167 - RNA, 19 nt, Artificial Sequence
  Synthetic
aaugucaguugauaaaagu

SEQ ID NO: 67168 - RNA, 20 nt, Artificial Sequence
  Synthetic
uaaugucaguugauaaaagu

SEQ ID NO: 67169 - RNA, 21 nt, Artificial Sequence
  Synthetic
auaaugucaguugauaaaagu

SEQ ID NO: 67170 - RNA, 22 nt, Artificial Sequence
  Synthetic
aauaaugucaguugauaaaagu

SEQ ID NO: 67171 - RNA, 24 nt, Artificial Sequence
  Synthetic
agaauaaugucaguugauaaaagu

SEQ ID NO: 67172 - RNA, 18 nt, Artificial Sequence
  Synthetic
ccguaagagccacaaagu

SEQ ID NO: 67173 - RNA, 19 nt, Artificial Sequence
  Synthetic
cccguaagagccacaaagu

SEQ ID NO: 67174 - RNA, 20 nt, Artificial Sequence
  Synthetic
acccguaagagccacaaagu

SEQ ID NO: 67175 - RNA, 21 nt, Artificial Sequence
  Synthetic
uacccguaagagccacaaagu

SEQ ID NO: 67176 - RNA, 22 nt, Artificial Sequence
  Synthetic
auacccguaagagccacaaagu

SEQ ID NO: 67177 - RNA, 24 nt, Artificial Sequence
  Synthetic
ugauacccguaagagccacaaagu

SEQ ID NO: 67178 - RNA, 19 nt, Artificial Sequence
  Synthetic
agcuggaguccuacaaagu

SEQ ID NO: 67179 - RNA, 20 nt, Artificial Sequence
  Synthetic
cagcuggaguccuacaaagu

SEQ ID NO: 67180 - RNA, 21 nt, Artificial Sequence
  Synthetic
ccagcuggaguccuacaaagu

SEQ ID NO: 67181 - RNA, 22 nt, Artificial Sequence
  Synthetic
cccagcuggaguccuacaaagu

SEQ ID NO: 67182 - RNA, 24 nt, Artificial Sequence
  Synthetic
ugcccagcuggaguccuacaaagu

SEQ ID NO: 67183 - RNA, 18 nt, Artificial Sequence
  Synthetic
aaaaauagauuucaaagu

SEQ ID NO: 67184 - RNA, 19 nt, Artificial Sequence
  Synthetic
aaaaaauagauuucaaagu

SEQ ID NO: 67185 - RNA, 20 nt, Artificial Sequence
  Synthetic
caaaaaauagauuucaaagu

SEQ ID NO: 67186 - RNA, 21 nt, Artificial Sequence
  Synthetic
ucaaaaaauagauuucaaagu

SEQ ID NO: 67187 - RNA, 22 nt, Artificial Sequence
  Synthetic
uucaaaaaauagauuucaaagu

SEQ ID NO: 67188 - RNA, 23 nt, Artificial Sequence
  Synthetic
uuucaaaaaauagauuucaaagu

SEQ ID NO: 67189 - RNA, 24 nt, Artificial Sequence
  Synthetic
cuuucaaaaaauagauuucaaagu

SEQ ID NO: 67190 - RNA, 21 nt, Artificial Sequence
  Synthetic
uagagcaguuguuuucaaagu

SEQ ID NO: 67191 - RNA, 23 nt, Artificial Sequence
  Synthetic
aguagagcaguuguuuucaaagu

SEQ ID NO: 67192 - RNA, 18 nt, Artificial Sequence
  Synthetic
ucauuauaaagagaaagu

SEQ ID NO: 67193 - RNA, 19 nt, Artificial Sequence
  Synthetic
aucauuauaaagagaaagu

SEQ ID NO: 67194 - RNA, 20 nt, Artificial Sequence
  Synthetic
uaucauuauaaagagaaagu

SEQ ID NO: 67195 - RNA, 21 nt, Artificial Sequence
  Synthetic
auaucauuauaaagagaaagu

SEQ ID NO: 67196 - RNA, 22 nt, Artificial Sequence
  Synthetic
uauaucauuauaaagagaaagu

SEQ ID NO: 67197 - RNA, 23 nt, Artificial Sequence
  Synthetic
uuauaucauuauaaagagaaagu

SEQ ID NO: 67198 - RNA, 24 nt, Artificial Sequence
  Synthetic
uuuauaucauuauaaagagaaagu

SEQ ID NO: 67199 - RNA, 18 nt, Artificial Sequence
  Synthetic
augacaaguagagaaagu

SEQ ID NO: 67200 - RNA, 19 nt, Artificial Sequence
  Synthetic
aaugacaaguagagaaagu

SEQ ID NO: 67201 - RNA, 21 nt, Artificial Sequence
  Synthetic
ugaaugacaaguagagaaagu

SEQ ID NO: 67202 - RNA, 23 nt, Artificial Sequence
  Synthetic
ugugaaugacaaguagagaaagu

SEQ ID NO: 67203 - RNA, 24 nt, Artificial Sequence
  Synthetic
uugugaaugacaaguagagaaagu

SEQ ID NO: 67204 - RNA, 18 nt, Artificial Sequence
  Synthetic
uuucaugguguagaaagu

SEQ ID NO: 67205 - RNA, 19 nt, Artificial Sequence
  Synthetic
auuucaugguguagaaagu

SEQ ID NO: 67206 - RNA, 20 nt, Artificial Sequence
  Synthetic
aauuucaugguguagaaagu

SEQ ID NO: 67207 - RNA, 21 nt, Artificial Sequence
  Synthetic
aaauuucaugguguagaaagu

SEQ ID NO: 67208 - RNA, 22 nt, Artificial Sequence
  Synthetic
uaaauuucaugguguagaaagu

SEQ ID NO: 67209 - RNA, 18 nt, Artificial Sequence
  Synthetic
uacuuuaaaugggaaagu

SEQ ID NO: 67210 - RNA, 19 nt, Artificial Sequence
  Synthetic
uuacuuuaaaugggaaagu

SEQ ID NO: 67211 - RNA, 21 nt, Artificial Sequence
  Synthetic
aguuacuuuaaaugggaaagu

SEQ ID NO: 67212 - RNA, 22 nt, Artificial Sequence
  Synthetic
caguuacuuuaaaugggaaagu

SEQ ID NO: 67213 - RNA, 23 nt, Artificial Sequence
  Synthetic
acaguuacuuuaaaugggaaagu

SEQ ID NO: 67214 - RNA, 24 nt, Artificial Sequence
  Synthetic
aacaguuacuuuaaaugggaaagu

SEQ ID NO: 67215 - RNA, 18 nt, Artificial Sequence
  Synthetic
uuaugugccugggaaagu

SEQ ID NO: 67216 - RNA, 19 nt, Artificial Sequence
  Synthetic
uuuaugugccugggaaagu

SEQ ID NO: 67217 - RNA, 20 nt, Artificial Sequence
  Synthetic
cuuuaugugccugggaaagu

SEQ ID NO: 67218 - RNA, 21 nt, Artificial Sequence
  Synthetic
acuuuaugugccugggaaagu

SEQ ID NO: 67219 - RNA, 22 nt, Artificial Sequence
  Synthetic
aacuuuaugugccugggaaagu

SEQ ID NO: 67220 - RNA, 24 nt, Artificial Sequence
  Synthetic
ugaacuuuaugugccugggaaagu

SEQ ID NO: 67221 - RNA, 18 nt, Artificial Sequence
  Synthetic
agcuucugccuugaaagu

SEQ ID NO: 67222 - RNA, 20 nt, Artificial Sequence
  Synthetic
agagcuucugccuugaaagu

SEQ ID NO: 67223 - RNA, 21 nt, Artificial Sequence
  Synthetic
cagagcuucugccuugaaagu

SEQ ID NO: 67224 - RNA, 22 nt, Artificial Sequence
  Synthetic
ccagagcuucugccuugaaagu

SEQ ID NO: 67225 - RNA, 23 nt, Artificial Sequence
  Synthetic
uccagagcuucugccuugaaagu

SEQ ID NO: 67226 - RNA, 24 nt, Artificial Sequence
  Synthetic
cuccagagcuucugccuugaaagu

SEQ ID NO: 67227 - RNA, 18 nt, Artificial Sequence
  Synthetic
agacaaguuucauaaagu

SEQ ID NO: 67228 - RNA, 20 nt, Artificial Sequence
  Synthetic
agagacaaguuucauaaagu

SEQ ID NO: 67229 - RNA, 22 nt, Artificial Sequence
  Synthetic
agagagacaaguuucauaaagu

SEQ ID NO: 67230 - RNA, 23 nt, Artificial Sequence
  Synthetic
cagagagacaaguuucauaaagu

SEQ ID NO: 67231 - RNA, 24 nt, Artificial Sequence
  Synthetic
ccagagagacaaguuucauaaagu

SEQ ID NO: 67232 - RNA, 18 nt, Artificial Sequence
  Synthetic
uguuuuuagauguaaagu

SEQ ID NO: 67233 - RNA, 20 nt, Artificial Sequence
  Synthetic
aguguuuuuagauguaaagu

SEQ ID NO: 67234 - RNA, 21 nt, Artificial Sequence
  Synthetic
aaguguuuuuagauguaaagu

SEQ ID NO: 67235 - RNA, 24 nt, Artificial Sequence
  Synthetic
aggaaguguuuuuagauguaaagu

SEQ ID NO: 67236 - RNA, 18 nt, Artificial Sequence
  Synthetic
aaaaccccuccuuaaagu

SEQ ID NO: 67237 - RNA, 19 nt, Artificial Sequence
  Synthetic
uaaaaccccuccuuaaagu

SEQ ID NO: 67238 - RNA, 20 nt, Artificial Sequence
  Synthetic
auaaaaccccuccuuaaagu

SEQ ID NO: 67239 - RNA, 21 nt, Artificial Sequence
  Synthetic
aauaaaaccccuccuuaaagu

SEQ ID NO: 67240 - RNA, 22 nt, Artificial Sequence
  Synthetic
aaauaaaaccccuccuuaaagu

SEQ ID NO: 67241 - RNA, 23 nt, Artificial Sequence
  Synthetic
aaaauaaaaccccuccuuaaagu

SEQ ID NO: 67242 - RNA, 18 nt, Artificial Sequence
  Synthetic
augucuaacauuuaaagu

SEQ ID NO: 67243 - RNA, 19 nt, Artificial Sequence
  Synthetic
caugucuaacauuuaaagu

SEQ ID NO: 67244 - RNA, 20 nt, Artificial Sequence
  Synthetic
ccaugucuaacauuuaaagu

SEQ ID NO: 67245 - RNA, 21 nt, Artificial Sequence
  Synthetic
cccaugucuaacauuuaaagu

SEQ ID NO: 67246 - RNA, 22 nt, Artificial Sequence
  Synthetic
ccccaugucuaacauuuaaagu

SEQ ID NO: 67247 - RNA, 23 nt, Artificial Sequence
  Synthetic
accccaugucuaacauuuaaagu

SEQ ID NO: 67248 - RNA, 18 nt, Artificial Sequence
  Synthetic
cauauguauauuuaaagu

SEQ ID NO: 67249 - RNA, 19 nt, Artificial Sequence
  Synthetic
ccauauguauauuuaaagu

SEQ ID NO: 67250 - RNA, 20 nt, Artificial Sequence
  Synthetic
cccauauguauauuuaaagu

SEQ ID NO: 67251 - RNA, 22 nt, Artificial Sequence
  Synthetic
ugcccauauguauauuuaaagu

SEQ ID NO: 67252 - RNA, 23 nt, Artificial Sequence
  Synthetic
augcccauauguauauuuaaagu

SEQ ID NO: 67253 - RNA, 18 nt, Artificial Sequence
  Synthetic
ucacagacuagaacaagu

SEQ ID NO: 67254 - RNA, 19 nt, Artificial Sequence
  Synthetic
aucacagacuagaacaagu

SEQ ID NO: 67255 - RNA, 20 nt, Artificial Sequence
  Synthetic
caucacagacuagaacaagu

SEQ ID NO: 67256 - RNA, 21 nt, Artificial Sequence
  Synthetic
ccaucacagacuagaacaagu

SEQ ID NO: 67257 - RNA, 22 nt, Artificial Sequence
  Synthetic
cccaucacagacuagaacaagu

SEQ ID NO: 67258 - RNA, 23 nt, Artificial Sequence
  Synthetic
ccccaucacagacuagaacaagu

SEQ ID NO: 67259 - RNA, 24 nt, Artificial Sequence
  Synthetic
accccaucacagacuagaacaagu

SEQ ID NO: 67260 - RNA, 21 nt, Artificial Sequence
  Synthetic
uuuucaaucuuagcuacaagu

SEQ ID NO: 67261 - RNA, 23 nt, Artificial Sequence
  Synthetic
aguuuucaaucuuagcuacaagu

SEQ ID NO: 67262 - RNA, 24 nt, Artificial Sequence
  Synthetic
uaguuuucaaucuuagcuacaagu

SEQ ID NO: 67263 - RNA, 18 nt, Artificial Sequence
  Synthetic
aacuuugaaaguacaagu

SEQ ID NO: 67264 - RNA, 19 nt, Artificial Sequence
  Synthetic
uaacuuugaaaguacaagu

SEQ ID NO: 67265 - RNA, 20 nt, Artificial Sequence
  Synthetic
cuaacuuugaaaguacaagu

SEQ ID NO: 67266 - RNA, 21 nt, Artificial Sequence
  Synthetic
ucuaacuuugaaaguacaagu

SEQ ID NO: 67267 - RNA, 22 nt, Artificial Sequence
  Synthetic
uucuaacuuugaaaguacaagu

SEQ ID NO: 67268 - RNA, 23 nt, Artificial Sequence
  Synthetic
auucuaacuuugaaaguacaagu

SEQ ID NO: 67269 - RNA, 24 nt, Artificial Sequence
  Synthetic
uauucuaacuuugaaaguacaagu

SEQ ID NO: 67270 - RNA, 20 nt, Artificial Sequence
  Synthetic
uggguuagugguuuacaagu

SEQ ID NO: 67271 - RNA, 21 nt, Artificial Sequence
  Synthetic
auggguuagugguuuacaagu

SEQ ID NO: 67272 - RNA, 22 nt, Artificial Sequence
  Synthetic
aauggguuagugguuuacaagu

SEQ ID NO: 67273 - RNA, 23 nt, Artificial Sequence
  Synthetic
aaauggguuagugguuuacaagu

SEQ ID NO: 67274 - RNA, 18 nt, Artificial Sequence
  Synthetic
ugcaaugaggaugcaagu

SEQ ID NO: 67275 - RNA, 19 nt, Artificial Sequence
  Synthetic
uugcaaugaggaugcaagu

SEQ ID NO: 67276 - RNA, 20 nt, Artificial Sequence
  Synthetic
auugcaaugaggaugcaagu

SEQ ID NO: 67277 - RNA, 21 nt, Artificial Sequence
  Synthetic
uauugcaaugaggaugcaagu

SEQ ID NO: 67278 - RNA, 22 nt, Artificial Sequence
  Synthetic
auauugcaaugaggaugcaagu

SEQ ID NO: 67279 - RNA, 23 nt, Artificial Sequence
  Synthetic
aauauugcaaugaggaugcaagu

SEQ ID NO: 67280 - RNA, 24 nt, Artificial Sequence
  Synthetic
aaauauugcaaugaggaugcaagu

SEQ ID NO: 67281 - RNA, 19 nt, Artificial Sequence
  Synthetic
uggugaugacuuuucaagu

SEQ ID NO: 67282 - RNA, 21 nt, Artificial Sequence
  Synthetic
aguggugaugacuuuucaagu

SEQ ID NO: 67283 - RNA, 22 nt, Artificial Sequence
  Synthetic
caguggugaugacuuuucaagu

SEQ ID NO: 67284 - RNA, 23 nt, Artificial Sequence
  Synthetic
acaguggugaugacuuuucaagu

SEQ ID NO: 67285 - RNA, 21 nt, Artificial Sequence
  Synthetic
ucuuauuuuaagucaagaagu

SEQ ID NO: 67286 - RNA, 22 nt, Artificial Sequence
  Synthetic
aucuuauuuuaagucaagaagu

SEQ ID NO: 67287 - RNA, 23 nt, Artificial Sequence
  Synthetic
uaucuuauuuuaagucaagaagu

SEQ ID NO: 67288 - RNA, 24 nt, Artificial Sequence
  Synthetic
auaucuuauuuuaagucaagaagu

SEQ ID NO: 67289 - RNA, 18 nt, Artificial Sequence
  Synthetic
acugagaaauucagaagu

SEQ ID NO: 67290 - RNA, 19 nt, Artificial Sequence
  Synthetic
aacugagaaauucagaagu

SEQ ID NO: 67291 - RNA, 20 nt, Artificial Sequence
  Synthetic
caacugagaaauucagaagu

SEQ ID NO: 67292 - RNA, 21 nt, Artificial Sequence
  Synthetic
ccaacugagaaauucagaagu

SEQ ID NO: 67293 - RNA, 22 nt, Artificial Sequence
  Synthetic
cccaacugagaaauucagaagu

SEQ ID NO: 67294 - RNA, 23 nt, Artificial Sequence
  Synthetic
ucccaacugagaaauucagaagu

SEQ ID NO: 67295 - RNA, 24 nt, Artificial Sequence
  Synthetic
uucccaacugagaaauucagaagu

SEQ ID NO: 67296 - RNA, 18 nt, Artificial Sequence
  Synthetic
agagaacuaaauggaagu

SEQ ID NO: 67297 - RNA, 19 nt, Artificial Sequence
  Synthetic
aagagaacuaaauggaagu

SEQ ID NO: 67298 - RNA, 20 nt, Artificial Sequence
  Synthetic
caagagaacuaaauggaagu

SEQ ID NO: 67299 - RNA, 21 nt, Artificial Sequence
  Synthetic
ccaagagaacuaaauggaagu

SEQ ID NO: 67300 - RNA, 23 nt, Artificial Sequence
  Synthetic
agccaagagaacuaaauggaagu

SEQ ID NO: 67301 - RNA, 24 nt, Artificial Sequence
  Synthetic
cagccaagagaacuaaauggaagu

SEQ ID NO: 67302 - RNA, 18 nt, Artificial Sequence
  Synthetic
acauaccuaaguggaagu

SEQ ID NO: 67303 - RNA, 20 nt, Artificial Sequence
  Synthetic
agacauaccuaaguggaagu

SEQ ID NO: 67304 - RNA, 21 nt, Artificial Sequence
  Synthetic
aagacauaccuaaguggaagu

SEQ ID NO: 67305 - RNA, 23 nt, Artificial Sequence
  Synthetic
agaagacauaccuaaguggaagu

SEQ ID NO: 67306 - RNA, 24 nt, Artificial Sequence
  Synthetic
aagaagacauaccuaaguggaagu

SEQ ID NO: 67307 - RNA, 18 nt, Artificial Sequence
  Synthetic
auacagcacaguggaagu

SEQ ID NO: 67308 - RNA, 19 nt, Artificial Sequence
  Synthetic
aauacagcacaguggaagu

SEQ ID NO: 67309 - RNA, 20 nt, Artificial Sequence
  Synthetic
aaauacagcacaguggaagu

SEQ ID NO: 67310 - RNA, 21 nt, Artificial Sequence
  Synthetic
uaaauacagcacaguggaagu

SEQ ID NO: 67311 - RNA, 22 nt, Artificial Sequence
  Synthetic
cuaaauacagcacaguggaagu

SEQ ID NO: 67312 - RNA, 23 nt, Artificial Sequence
  Synthetic
ucuaaauacagcacaguggaagu

SEQ ID NO: 67313 - RNA, 24 nt, Artificial Sequence
  Synthetic
cucuaaauacagcacaguggaagu

SEQ ID NO: 67314 - RNA, 18 nt, Artificial Sequence
  Synthetic
cauagguagaaaugaagu

SEQ ID NO: 67315 - RNA, 19 nt, Artificial Sequence
  Synthetic
acauagguagaaaugaagu

SEQ ID NO: 67316 - RNA, 20 nt, Artificial Sequence
  Synthetic
cacauagguagaaaugaagu

SEQ ID NO: 67317 - RNA, 21 nt, Artificial Sequence
  Synthetic
ccacauagguagaaaugaagu

SEQ ID NO: 67318 - RNA, 22 nt, Artificial Sequence
  Synthetic
uccacauagguagaaaugaagu

SEQ ID NO: 67319 - RNA, 23 nt, Artificial Sequence
  Synthetic
uuccacauagguagaaaugaagu

SEQ ID NO: 67320 - RNA, 24 nt, Artificial Sequence
  Synthetic
auuccacauagguagaaaugaagu

SEQ ID NO: 67321 - RNA, 18 nt, Artificial Sequence
  Synthetic
aacauagcucaaugaagu

SEQ ID NO: 67322 - RNA, 19 nt, Artificial Sequence
  Synthetic
aaacauagcucaaugaagu

SEQ ID NO: 67323 - RNA, 20 nt, Artificial Sequence
  Synthetic
aaaacauagcucaaugaagu

SEQ ID NO: 67324 - RNA, 22 nt, Artificial Sequence
  Synthetic
agaaaacauagcucaaugaagu

SEQ ID NO: 67325 - RNA, 23 nt, Artificial Sequence
  Synthetic
cagaaaacauagcucaaugaagu

SEQ ID NO: 67326 - RNA, 24 nt, Artificial Sequence
  Synthetic
acagaaaacauagcucaaugaagu

SEQ ID NO: 67327 - RNA, 19 nt, Artificial Sequence
  Synthetic
ugcaugucagucaugaagu

SEQ ID NO: 67328 - RNA, 21 nt, Artificial Sequence
  Synthetic
agugcaugucagucaugaagu

SEQ ID NO: 67329 - RNA, 22 nt, Artificial Sequence
  Synthetic
aagugcaugucagucaugaagu

SEQ ID NO: 67330 - RNA, 23 nt, Artificial Sequence
  Synthetic
aaagugcaugucagucaugaagu

SEQ ID NO: 67331 - RNA, 24 nt, Artificial Sequence
  Synthetic
uaaagugcaugucagucaugaagu

SEQ ID NO: 67332 - RNA, 21 nt, Artificial Sequence
  Synthetic
agugaaaaagaaaagugaagu

SEQ ID NO: 67333 - RNA, 23 nt, Artificial Sequence
  Synthetic
ugagugaaaaagaaaagugaagu

SEQ ID NO: 67334 - RNA, 24 nt, Artificial Sequence
  Synthetic
augagugaaaaagaaaagugaagu

SEQ ID NO: 67335 - RNA, 19 nt, Artificial Sequence
  Synthetic
ugacaguacugagugaagu

SEQ ID NO: 67336 - RNA, 21 nt, Artificial Sequence
  Synthetic
agugacaguacugagugaagu

SEQ ID NO: 67337 - RNA, 22 nt, Artificial Sequence
  Synthetic
cagugacaguacugagugaagu

SEQ ID NO: 67338 - RNA, 23 nt, Artificial Sequence
  Synthetic
acagugacaguacugagugaagu

SEQ ID NO: 67339 - RNA, 24 nt, Artificial Sequence
  Synthetic
aacagugacaguacugagugaagu

SEQ ID NO: 67340 - RNA, 18 nt, Artificial Sequence
  Synthetic
uaaauguccuagugaagu

SEQ ID NO: 67341 - RNA, 19 nt, Artificial Sequence
  Synthetic
uuaaauguccuagugaagu

SEQ ID NO: 67342 - RNA, 20 nt, Artificial Sequence
  Synthetic
uuuaaauguccuagugaagu

SEQ ID NO: 67343 - RNA, 21 nt, Artificial Sequence
  Synthetic
uuuuaaauguccuagugaagu

SEQ ID NO: 67344 - RNA, 22 nt, Artificial Sequence
  Synthetic
auuuuaaauguccuagugaagu

SEQ ID NO: 67345 - RNA, 23 nt, Artificial Sequence
  Synthetic
uauuuuaaauguccuagugaagu

SEQ ID NO: 67346 - RNA, 19 nt, Artificial Sequence
  Synthetic
agcuggaaguuauugaagu

SEQ ID NO: 67347 - RNA, 20 nt, Artificial Sequence
  Synthetic
uagcuggaaguuauugaagu

SEQ ID NO: 67348 - RNA, 21 nt, Artificial Sequence
  Synthetic
uuagcuggaaguuauugaagu

SEQ ID NO: 67349 - RNA, 23 nt, Artificial Sequence
  Synthetic
uguuagcuggaaguuauugaagu

SEQ ID NO: 67350 - RNA, 18 nt, Artificial Sequence
  Synthetic
uacgcuauuuaaauaagu

SEQ ID NO: 67351 - RNA, 19 nt, Artificial Sequence
  Synthetic
auacgcuauuuaaauaagu

SEQ ID NO: 67352 - RNA, 21 nt, Artificial Sequence
  Synthetic
ugauacgcuauuuaaauaagu

SEQ ID NO: 67353 - RNA, 22 nt, Artificial Sequence
  Synthetic
cugauacgcuauuuaaauaagu

SEQ ID NO: 67354 - RNA, 23 nt, Artificial Sequence
  Synthetic
acugauacgcuauuuaaauaagu

SEQ ID NO: 67355 - RNA, 24 nt, Artificial Sequence
  Synthetic
cacugauacgcuauuuaaauaagu

SEQ ID NO: 67356 - RNA, 21 nt, Artificial Sequence
  Synthetic
uguguaugauagugaauaagu

SEQ ID NO: 67357 - RNA, 22 nt, Artificial Sequence
  Synthetic
uuguguaugauagugaauaagu

SEQ ID NO: 67358 - RNA, 23 nt, Artificial Sequence
  Synthetic
cuuguguaugauagugaauaagu

SEQ ID NO: 67359 - RNA, 24 nt, Artificial Sequence
  Synthetic
ccuuguguaugauagugaauaagu

SEQ ID NO: 67360 - RNA, 18 nt, Artificial Sequence
  Synthetic
cagagacuccacauaagu

SEQ ID NO: 67361 - RNA, 19 nt, Artificial Sequence
  Synthetic
acagagacuccacauaagu

SEQ ID NO: 67362 - RNA, 21 nt, Artificial Sequence
  Synthetic
agacagagacuccacauaagu

SEQ ID NO: 67363 - RNA, 22 nt, Artificial Sequence
  Synthetic
aagacagagacuccacauaagu

SEQ ID NO: 67364 - RNA, 23 nt, Artificial Sequence
  Synthetic
aaagacagagacuccacauaagu

SEQ ID NO: 67365 - RNA, 24 nt, Artificial Sequence
  Synthetic
aaaagacagagacuccacauaagu

SEQ ID NO: 67366 - RNA, 18 nt, Artificial Sequence
  Synthetic
augauacauuacauaagu

SEQ ID NO: 67367 - RNA, 19 nt, Artificial Sequence
  Synthetic
aaugauacauuacauaagu

SEQ ID NO: 67368 - RNA, 21 nt, Artificial Sequence
  Synthetic
ugaaugauacauuacauaagu

SEQ ID NO: 67369 - RNA, 22 nt, Artificial Sequence
  Synthetic
cugaaugauacauuacauaagu

SEQ ID NO: 67370 - RNA, 23 nt, Artificial Sequence
  Synthetic
acugaaugauacauuacauaagu

SEQ ID NO: 67371 - RNA, 18 nt, Artificial Sequence
  Synthetic
uguucuaaagauguaagu

SEQ ID NO: 67372 - RNA, 19 nt, Artificial Sequence
  Synthetic
cuguucuaaagauguaagu

SEQ ID NO: 67373 - RNA, 20 nt, Artificial Sequence
  Synthetic
acuguucuaaagauguaagu

SEQ ID NO: 67374 - RNA, 22 nt, Artificial Sequence
  Synthetic
agacuguucuaaagauguaagu

SEQ ID NO: 67375 - RNA, 24 nt, Artificial Sequence
  Synthetic
ugagacuguucuaaagauguaagu

SEQ ID NO: 67376 - RNA, 18 nt, Artificial Sequence
  Synthetic
aacuuaauaccuguaagu

SEQ ID NO: 67377 - RNA, 19 nt, Artificial Sequence
  Synthetic
aaacuuaauaccuguaagu

SEQ ID NO: 67378 - RNA, 20 nt, Artificial Sequence
  Synthetic
aaaacuuaauaccuguaagu

SEQ ID NO: 67379 - RNA, 21 nt, Artificial Sequence
  Synthetic
aaaaacuuaauaccuguaagu

SEQ ID NO: 67380 - RNA, 22 nt, Artificial Sequence
  Synthetic
aaaaaacuuaauaccuguaagu

SEQ ID NO: 67381 - RNA, 23 nt, Artificial Sequence
  Synthetic
uaaaaaacuuaauaccuguaagu

SEQ ID NO: 67382 - RNA, 24 nt, Artificial Sequence
  Synthetic
auaaaaaacuuaauaccuguaagu

SEQ ID NO: 67383 - RNA, 18 nt, Artificial Sequence
  Synthetic
ucauuagauagcuuaagu

SEQ ID NO: 67384 - RNA, 19 nt, Artificial Sequence
  Synthetic
cucauuagauagcuuaagu

SEQ ID NO: 67385 - RNA, 20 nt, Artificial Sequence
  Synthetic
ccucauuagauagcuuaagu

SEQ ID NO: 67386 - RNA, 21 nt, Artificial Sequence
  Synthetic
uccucauuagauagcuuaagu

SEQ ID NO: 67387 - RNA, 23 nt, Artificial Sequence
  Synthetic
uguccucauuagauagcuuaagu

SEQ ID NO: 67388 - RNA, 24 nt, Artificial Sequence
  Synthetic
uuguccucauuagauagcuuaagu

SEQ ID NO: 67389 - RNA, 18 nt, Artificial Sequence
  Synthetic
ucuuauuguuuuuuaagu

SEQ ID NO: 67390 - RNA, 20 nt, Artificial Sequence
  Synthetic
ugucuuauuguuuuuuaagu

SEQ ID NO: 67391 - RNA, 21 nt, Artificial Sequence
  Synthetic
cugucuuauuguuuuuuaagu

SEQ ID NO: 67392 - RNA, 22 nt, Artificial Sequence
  Synthetic
acugucuuauuguuuuuuaagu

SEQ ID NO: 67393 - RNA, 24 nt, Artificial Sequence
  Synthetic
ugacugucuuauuguuuuuuaagu

SEQ ID NO: 67394 - RNA, 18 nt, Artificial Sequence
  Synthetic
uguuagauuaaaaacagu

SEQ ID NO: 67395 - RNA, 19 nt, Artificial Sequence
  Synthetic
auguuagauuaaaaacagu

SEQ ID NO: 67396 - RNA, 20 nt, Artificial Sequence
  Synthetic
aauguuagauuaaaaacagu

SEQ ID NO: 67397 - RNA, 18 nt, Artificial Sequence
  Synthetic
uacaagugaagaaacagu

SEQ ID NO: 67398 - RNA, 19 nt, Artificial Sequence
  Synthetic
uuacaagugaagaaacagu

SEQ ID NO: 67399 - RNA, 20 nt, Artificial Sequence
  Synthetic
auuacaagugaagaaacagu

SEQ ID NO: 67400 - RNA, 21 nt, Artificial Sequence
  Synthetic
aauuacaagugaagaaacagu

SEQ ID NO: 67401 - RNA, 22 nt, Artificial Sequence
  Synthetic
uaauuacaagugaagaaacagu

SEQ ID NO: 67402 - RNA, 23 nt, Artificial Sequence
  Synthetic
uuaauuacaagugaagaaacagu

SEQ ID NO: 67403 - RNA, 24 nt, Artificial Sequence
  Synthetic
cuuaauuacaagugaagaaacagu

SEQ ID NO: 67404 - RNA, 19 nt, Artificial Sequence
  Synthetic
ugauuccaaaauaaacagu

SEQ ID NO: 67405 - RNA, 21 nt, Artificial Sequence
  Synthetic
agugauuccaaaauaaacagu

SEQ ID NO: 67406 - RNA, 22 nt, Artificial Sequence
  Synthetic
aagugauuccaaaauaaacagu

SEQ ID NO: 67407 - RNA, 23 nt, Artificial Sequence
  Synthetic
aaagugauuccaaaauaaacagu

SEQ ID NO: 67408 - RNA, 24 nt, Artificial Sequence
  Synthetic
aaaagugauuccaaaauaaacagu

SEQ ID NO: 67409 - RNA, 18 nt, Artificial Sequence
  Synthetic
agagauguccuaaacagu

SEQ ID NO: 67410 - RNA, 19 nt, Artificial Sequence
  Synthetic
aagagauguccuaaacagu

SEQ ID NO: 67411 - RNA, 22 nt, Artificial Sequence
  Synthetic
aggaagagauguccuaaacagu

SEQ ID NO: 67412 - RNA, 23 nt, Artificial Sequence
  Synthetic
caggaagagauguccuaaacagu

SEQ ID NO: 67413 - RNA, 24 nt, Artificial Sequence
  Synthetic
acaggaagagauguccuaaacagu

SEQ ID NO: 67414 - RNA, 18 nt, Artificial Sequence
  Synthetic
auaugcgugcuaaacagu

SEQ ID NO: 67415 - RNA, 19 nt, Artificial Sequence
  Synthetic
aauaugcgugcuaaacagu

SEQ ID NO: 67416 - RNA, 20 nt, Artificial Sequence
  Synthetic
uaauaugcgugcuaaacagu

SEQ ID NO: 67417 - RNA, 21 nt, Artificial Sequence
  Synthetic
auaauaugcgugcuaaacagu

SEQ ID NO: 67418 - RNA, 22 nt, Artificial Sequence
  Synthetic
aauaauaugcgugcuaaacagu

SEQ ID NO: 67419 - RNA, 23 nt, Artificial Sequence
  Synthetic
caauaauaugcgugcuaaacagu

SEQ ID NO: 67420 - RNA, 24 nt, Artificial Sequence
  Synthetic
ccaauaauaugcgugcuaaacagu

SEQ ID NO: 67421 - RNA, 18 nt, Artificial Sequence
  Synthetic
aaauuaauaguaaacagu

SEQ ID NO: 67422 - RNA, 19 nt, Artificial Sequence
  Synthetic
caaauuaauaguaaacagu

SEQ ID NO: 67423 - RNA, 20 nt, Artificial Sequence
  Synthetic
ccaaauuaauaguaaacagu

SEQ ID NO: 67424 - RNA, 21 nt, Artificial Sequence
  Synthetic
cccaaauuaauaguaaacagu

SEQ ID NO: 67425 - RNA, 19 nt, Artificial Sequence
  Synthetic
ugagcagaagaaacacagu

SEQ ID NO: 67426 - RNA, 20 nt, Artificial Sequence
  Synthetic
cugagcagaagaaacacagu

SEQ ID NO: 67427 - RNA, 21 nt, Artificial Sequence
  Synthetic
acugagcagaagaaacacagu

SEQ ID NO: 67428 - RNA, 22 nt, Artificial Sequence
  Synthetic
aacugagcagaagaaacacagu

SEQ ID NO: 67429 - RNA, 23 nt, Artificial Sequence
  Synthetic
aaacugagcagaagaaacacagu

SEQ ID NO: 67430 - RNA, 24 nt, Artificial Sequence
  Synthetic
aaaacugagcagaagaaacacagu

SEQ ID NO: 67431 - RNA, 18 nt, Artificial Sequence
  Synthetic
uagauagagaggcacagu

SEQ ID NO: 67432 - RNA, 21 nt, Artificial Sequence
  Synthetic
agguagauagagaggcacagu

SEQ ID NO: 67433 - RNA, 23 nt, Artificial Sequence
  Synthetic
ugagguagauagagaggcacagu

SEQ ID NO: 67434 - RNA, 18 nt, Artificial Sequence
  Synthetic
uucugcuuugaucacagu

SEQ ID NO: 67435 - RNA, 19 nt, Artificial Sequence
  Synthetic
auucugcuuugaucacagu

SEQ ID NO: 67436 - RNA, 20 nt, Artificial Sequence
  Synthetic
uauucugcuuugaucacagu

SEQ ID NO: 67437 - RNA, 21 nt, Artificial Sequence
  Synthetic
cuauucugcuuugaucacagu

SEQ ID NO: 67438 - RNA, 22 nt, Artificial Sequence
  Synthetic
ccuauucugcuuugaucacagu

SEQ ID NO: 67439 - RNA, 23 nt, Artificial Sequence
  Synthetic
uccuauucugcuuugaucacagu

SEQ ID NO: 67440 - RNA, 24 nt, Artificial Sequence
  Synthetic
auccuauucugcuuugaucacagu

SEQ ID NO: 67441 - RNA, 18 nt, Artificial Sequence
  Synthetic
acagcaagcugagacagu

SEQ ID NO: 67442 - RNA, 19 nt, Artificial Sequence
  Synthetic
cacagcaagcugagacagu

SEQ ID NO: 67443 - RNA, 24 nt, Artificial Sequence
  Synthetic
aggggcacagcaagcugagacagu

SEQ ID NO: 67444 - RNA, 18 nt, Artificial Sequence
  Synthetic
uuaauuuucaaaaccagu

SEQ ID NO: 67445 - RNA, 19 nt, Artificial Sequence
  Synthetic
auuaauuuucaaaaccagu

SEQ ID NO: 67446 - RNA, 21 nt, Artificial Sequence
  Synthetic
ugauuaauuuucaaaaccagu

SEQ ID NO: 67447 - RNA, 22 nt, Artificial Sequence
  Synthetic
augauuaauuuucaaaaccagu

SEQ ID NO: 67448 - RNA, 24 nt, Artificial Sequence
  Synthetic
agaugauuaauuuucaaaaccagu

SEQ ID NO: 67449 - RNA, 18 nt, Artificial Sequence
  Synthetic
uguaaggaacaccccagu

SEQ ID NO: 67450 - RNA, 20 nt, Artificial Sequence
  Synthetic
aguguaaggaacaccccagu

SEQ ID NO: 67451 - RNA, 21 nt, Artificial Sequence
  Synthetic
caguguaaggaacaccccagu

SEQ ID NO: 67452 - RNA, 22 nt, Artificial Sequence
  Synthetic
acaguguaaggaacaccccagu

SEQ ID NO: 67453 - RNA, 23 nt, Artificial Sequence
  Synthetic
uacaguguaaggaacaccccagu

SEQ ID NO: 67454 - RNA, 24 nt, Artificial Sequence
  Synthetic
auacaguguaaggaacaccccagu

SEQ ID NO: 67455 - RNA, 18 nt, Artificial Sequence
  Synthetic
cauguuguuuuagccagu

SEQ ID NO: 67456 - RNA, 19 nt, Artificial Sequence
  Synthetic
ucauguuguuuuagccagu

SEQ ID NO: 67457 - RNA, 20 nt, Artificial Sequence
  Synthetic
aucauguuguuuuagccagu

SEQ ID NO: 67458 - RNA, 21 nt, Artificial Sequence
  Synthetic
caucauguuguuuuagccagu

SEQ ID NO: 67459 - RNA, 22 nt, Artificial Sequence
  Synthetic
ccaucauguuguuuuagccagu

SEQ ID NO: 67460 - RNA, 23 nt, Artificial Sequence
  Synthetic
uccaucauguuguuuuagccagu

SEQ ID NO: 67461 - RNA, 24 nt, Artificial Sequence
  Synthetic
uuccaucauguuguuuuagccagu

SEQ ID NO: 67462 - RNA, 18 nt, Artificial Sequence
  Synthetic
aagaugauguaauccagu

SEQ ID NO: 67463 - RNA, 20 nt, Artificial Sequence
  Synthetic
ugaagaugauguaauccagu

SEQ ID NO: 67464 - RNA, 21 nt, Artificial Sequence
  Synthetic
augaagaugauguaauccagu

SEQ ID NO: 67465 - RNA, 22 nt, Artificial Sequence
  Synthetic
aaugaagaugauguaauccagu

SEQ ID NO: 67466 - RNA, 24 nt, Artificial Sequence
  Synthetic
agaaugaagaugauguaauccagu

SEQ ID NO: 67467 - RNA, 18 nt, Artificial Sequence
  Synthetic
uauacucucuucuccagu

SEQ ID NO: 67468 - RNA, 19 nt, Artificial Sequence
  Synthetic
auauacucucuucuccagu

SEQ ID NO: 67469 - RNA, 20 nt, Artificial Sequence
  Synthetic
aauauacucucuucuccagu

SEQ ID NO: 67470 - RNA, 21 nt, Artificial Sequence
  Synthetic
aaauauacucucuucuccagu

SEQ ID NO: 67471 - RNA, 22 nt, Artificial Sequence
  Synthetic
aaaauauacucucuucuccagu

SEQ ID NO: 67472 - RNA, 24 nt, Artificial Sequence
  Synthetic
agaaaauauacucucuucuccagu

SEQ ID NO: 67473 - RNA, 19 nt, Artificial Sequence
  Synthetic
cguucacugguuguccagu

SEQ ID NO: 67474 - RNA, 20 nt, Artificial Sequence
  Synthetic
ucguucacugguuguccagu

SEQ ID NO: 67475 - RNA, 21 nt, Artificial Sequence
  Synthetic
aucguucacugguuguccagu

SEQ ID NO: 67476 - RNA, 22 nt, Artificial Sequence
  Synthetic
aaucguucacugguuguccagu

SEQ ID NO: 67477 - RNA, 24 nt, Artificial Sequence
  Synthetic
agaaucguucacugguuguccagu

SEQ ID NO: 67478 - RNA, 18 nt, Artificial Sequence
  Synthetic
augguuaccauuuccagu

SEQ ID NO: 67479 - RNA, 19 nt, Artificial Sequence
  Synthetic
caugguuaccauuuccagu

SEQ ID NO: 67480 - RNA, 21 nt, Artificial Sequence
  Synthetic
ugcaugguuaccauuuccagu

SEQ ID NO: 67481 - RNA, 22 nt, Artificial Sequence
  Synthetic
uugcaugguuaccauuuccagu

SEQ ID NO: 67482 - RNA, 23 nt, Artificial Sequence
  Synthetic
auugcaugguuaccauuuccagu

SEQ ID NO: 67483 - RNA, 24 nt, Artificial Sequence
  Synthetic
uauugcaugguuaccauuuccagu

SEQ ID NO: 67484 - RNA, 18 nt, Artificial Sequence
  Synthetic
aauggauuuuuuuccagu

SEQ ID NO: 67485 - RNA, 19 nt, Artificial Sequence
  Synthetic
aaauggauuuuuuuccagu

SEQ ID NO: 67486 - RNA, 20 nt, Artificial Sequence
  Synthetic
uaaauggauuuuuuuccagu

SEQ ID NO: 67487 - RNA, 23 nt, Artificial Sequence
  Synthetic
uggcucagcuaacaugcugcagu

SEQ ID NO: 67488 - RNA, 24 nt, Artificial Sequence
  Synthetic
auggcucagcuaacaugcugcagu

SEQ ID NO: 67489 - RNA, 18 nt, Artificial Sequence
  Synthetic
cgcaucugaaagugcagu

SEQ ID NO: 67490 - RNA, 19 nt, Artificial Sequence
  Synthetic
acgcaucugaaagugcagu

SEQ ID NO: 67491 - RNA, 20 nt, Artificial Sequence
  Synthetic
aacgcaucugaaagugcagu

SEQ ID NO: 67492 - RNA, 21 nt, Artificial Sequence
  Synthetic
aaacgcaucugaaagugcagu

SEQ ID NO: 67493 - RNA, 22 nt, Artificial Sequence
  Synthetic
uaaacgcaucugaaagugcagu

SEQ ID NO: 67494 - RNA, 18 nt, Artificial Sequence
  Synthetic
auaacuggcaguugcagu

SEQ ID NO: 67495 - RNA, 20 nt, Artificial Sequence
  Synthetic
agauaacuggcaguugcagu

SEQ ID NO: 67496 - RNA, 18 nt, Artificial Sequence
  Synthetic
ccuucugugcuuugcagu

SEQ ID NO: 67497 - RNA, 19 nt, Artificial Sequence
  Synthetic
accuucugugcuuugcagu

SEQ ID NO: 67498 - RNA, 21 nt, Artificial Sequence
  Synthetic
ugaccuucugugcuuugcagu

SEQ ID NO: 67499 - RNA, 22 nt, Artificial Sequence
  Synthetic
cugaccuucugugcuuugcagu

SEQ ID NO: 67500 - RNA, 23 nt, Artificial Sequence
  Synthetic
acugaccuucugugcuuugcagu

SEQ ID NO: 67501 - RNA, 24 nt, Artificial Sequence
  Synthetic
aacugaccuucugugcuuugcagu

SEQ ID NO: 67502 - RNA, 18 nt, Artificial Sequence
  Synthetic
agaaggacauuuugcagu

SEQ ID NO: 67503 - RNA, 19 nt, Artificial Sequence
  Synthetic
aagaaggacauuuugcagu

SEQ ID NO: 67504 - RNA, 20 nt, Artificial Sequence
  Synthetic
caagaaggacauuuugcagu

SEQ ID NO: 67505 - RNA, 21 nt, Artificial Sequence
  Synthetic
ucaagaaggacauuuugcagu

SEQ ID NO: 67506 - RNA, 23 nt, Artificial Sequence
  Synthetic
ugucaagaaggacauuuugcagu

SEQ ID NO: 67507 - RNA, 19 nt, Artificial Sequence
  Synthetic
uguuucaguugauaucagu

SEQ ID NO: 67508 - RNA, 20 nt, Artificial Sequence
  Synthetic
cuguuucaguugauaucagu

SEQ ID NO: 67509 - RNA, 21 nt, Artificial Sequence
  Synthetic
ccuguuucaguugauaucagu

SEQ ID NO: 67510 - RNA, 22 nt, Artificial Sequence
  Synthetic
cccuguuucaguugauaucagu

SEQ ID NO: 67511 - RNA, 23 nt, Artificial Sequence
  Synthetic
ucccuguuucaguugauaucagu

SEQ ID NO: 67512 - RNA, 24 nt, Artificial Sequence
  Synthetic
aucccuguuucaguugauaucagu

SEQ ID NO: 67513 - RNA, 18 nt, Artificial Sequence
  Synthetic
cauuaugagugucucagu

SEQ ID NO: 67514 - RNA, 20 nt, Artificial Sequence
  Synthetic
ugcauuaugagugucucagu

SEQ ID NO: 67515 - RNA, 21 nt, Artificial Sequence
  Synthetic
uugcauuaugagugucucagu

SEQ ID NO: 67516 - RNA, 22 nt, Artificial Sequence
  Synthetic
cuugcauuaugagugucucagu

SEQ ID NO: 67517 - RNA, 23 nt, Artificial Sequence
  Synthetic
ucuugcauuaugagugucucagu

SEQ ID NO: 67518 - RNA, 24 nt, Artificial Sequence
  Synthetic
uucuugcauuaugagugucucagu

SEQ ID NO: 67519 - RNA, 18 nt, Artificial Sequence
  Synthetic
uaaagauacaaagucagu

SEQ ID NO: 67520 - RNA, 19 nt, Artificial Sequence
  Synthetic
uuaaagauacaaagucagu

SEQ ID NO: 67521 - RNA, 21 nt, Artificial Sequence
  Synthetic
aguuaaagauacaaagucagu

SEQ ID NO: 67522 - RNA, 22 nt, Artificial Sequence
  Synthetic
aaguuaaagauacaaagucagu

SEQ ID NO: 67523 - RNA, 23 nt, Artificial Sequence
  Synthetic
aaaguuaaagauacaaagucagu

SEQ ID NO: 67524 - RNA, 24 nt, Artificial Sequence
  Synthetic
caaaguuaaagauacaaagucagu

SEQ ID NO: 67525 - RNA, 19 nt, Artificial Sequence
  Synthetic
uguugauaucucagucagu

SEQ ID NO: 67526 - RNA, 21 nt, Artificial Sequence
  Synthetic
uguguugauaucucagucagu

SEQ ID NO: 67527 - RNA, 22 nt, Artificial Sequence
  Synthetic
uuguguugauaucucagucagu

SEQ ID NO: 67528 - RNA, 23 nt, Artificial Sequence
  Synthetic
uuuguguugauaucucagucagu

SEQ ID NO: 67529 - RNA, 24 nt, Artificial Sequence
  Synthetic
auuuguguugauaucucagucagu

SEQ ID NO: 67530 - RNA, 18 nt, Artificial Sequence
  Synthetic
augucagucaaggucagu

SEQ ID NO: 67531 - RNA, 19 nt, Artificial Sequence
  Synthetic
aaugucagucaaggucagu

SEQ ID NO: 67532 - RNA, 20 nt, Artificial Sequence
  Synthetic
caaugucagucaaggucagu

SEQ ID NO: 67533 - RNA, 21 nt, Artificial Sequence
  Synthetic
ucaaugucagucaaggucagu

SEQ ID NO: 67534 - RNA, 22 nt, Artificial Sequence
  Synthetic
cucaaugucagucaaggucagu

SEQ ID NO: 67535 - RNA, 23 nt, Artificial Sequence
  Synthetic
ccucaaugucagucaaggucagu

SEQ ID NO: 67536 - RNA, 24 nt, Artificial Sequence
  Synthetic
cccucaaugucagucaaggucagu

SEQ ID NO: 67537 - RNA, 18 nt, Artificial Sequence
  Synthetic
caucuccaucuugucagu

SEQ ID NO: 67538 - RNA, 19 nt, Artificial Sequence
  Synthetic
ucaucuccaucuugucagu

SEQ ID NO: 67539 - RNA, 21 nt, Artificial Sequence
  Synthetic
ugucaucuccaucuugucagu

SEQ ID NO: 67540 - RNA, 23 nt, Artificial Sequence
  Synthetic
agugucaucuccaucuugucagu

SEQ ID NO: 67541 - RNA, 24 nt, Artificial Sequence
  Synthetic
uagugucaucuccaucuugucagu

SEQ ID NO: 67542 - RNA, 18 nt, Artificial Sequence
  Synthetic
cagucauuaaaauucagu

SEQ ID NO: 67543 - RNA, 20 nt, Artificial Sequence
  Synthetic
agcagucauuaaaauucagu

SEQ ID NO: 67544 - RNA, 21 nt, Artificial Sequence
  Synthetic
aagcagucauuaaaauucagu

SEQ ID NO: 67545 - RNA, 22 nt, Artificial Sequence
  Synthetic
aaagcagucauuaaaauucagu

SEQ ID NO: 67546 - RNA, 23 nt, Artificial Sequence
  Synthetic
uaaagcagucauuaaaauucagu

SEQ ID NO: 67547 - RNA, 24 nt, Artificial Sequence
  Synthetic
cuaaagcagucauuaaaauucagu

SEQ ID NO: 67548 - RNA, 18 nt, Artificial Sequence
  Synthetic
accugggcaguauucagu

SEQ ID NO: 67549 - RNA, 19 nt, Artificial Sequence
  Synthetic
aaccugggcaguauucagu

SEQ ID NO: 67550 - RNA, 20 nt, Artificial Sequence
  Synthetic
aaaccugggcaguauucagu

SEQ ID NO: 67551 - RNA, 21 nt, Artificial Sequence
  Synthetic
aaaaccugggcaguauucagu

SEQ ID NO: 67552 - RNA, 22 nt, Artificial Sequence
  Synthetic
caaaaccugggcaguauucagu

SEQ ID NO: 67553 - RNA, 23 nt, Artificial Sequence
  Synthetic
acaaaaccugggcaguauucagu

SEQ ID NO: 67554 - RNA, 24 nt, Artificial Sequence
  Synthetic
cacaaaaccugggcaguauucagu

SEQ ID NO: 67555 - RNA, 18 nt, Artificial Sequence
  Synthetic
acucacucauucuucagu

SEQ ID NO: 67556 - RNA, 19 nt, Artificial Sequence
  Synthetic
uacucacucauucuucagu

SEQ ID NO: 67557 - RNA, 20 nt, Artificial Sequence
  Synthetic
cuacucacucauucuucagu

SEQ ID NO: 67558 - RNA, 21 nt, Artificial Sequence
  Synthetic
acuacucacucauucuucagu

SEQ ID NO: 67559 - RNA, 22 nt, Artificial Sequence
  Synthetic
cacuacucacucauucuucagu

SEQ ID NO: 67560 - RNA, 23 nt, Artificial Sequence
  Synthetic
ccacuacucacucauucuucagu

SEQ ID NO: 67561 - RNA, 24 nt, Artificial Sequence
  Synthetic
accacuacucacucauucuucagu

SEQ ID NO: 67562 - RNA, 19 nt, Artificial Sequence
  Synthetic
uggaggauaguuguucagu

SEQ ID NO: 67563 - RNA, 20 nt, Artificial Sequence
  Synthetic
uuggaggauaguuguucagu

SEQ ID NO: 67564 - RNA, 21 nt, Artificial Sequence
  Synthetic
uuuggaggauaguuguucagu

SEQ ID NO: 67565 - RNA, 22 nt, Artificial Sequence
  Synthetic
cuuuggaggauaguuguucagu

SEQ ID NO: 67566 - RNA, 23 nt, Artificial Sequence
  Synthetic
ucuuuggaggauaguuguucagu

SEQ ID NO: 67567 - RNA, 24 nt, Artificial Sequence
  Synthetic
cucuuuggaggauaguuguucagu

SEQ ID NO: 67568 - RNA, 18 nt, Artificial Sequence
  Synthetic
auugcuaucaauuucagu

SEQ ID NO: 67569 - RNA, 19 nt, Artificial Sequence
  Synthetic
cauugcuaucaauuucagu

SEQ ID NO: 67570 - RNA, 22 nt, Artificial Sequence
  Synthetic
uggcauugcuaucaauuucagu

SEQ ID NO: 67571 - RNA, 23 nt, Artificial Sequence
  Synthetic
auggcauugcuaucaauuucagu

SEQ ID NO: 67572 - RNA, 24 nt, Artificial Sequence
  Synthetic
uauggcauugcuaucaauuucagu

SEQ ID NO: 67573 - RNA, 18 nt, Artificial Sequence
  Synthetic
caaucucuacauuucagu

SEQ ID NO: 67574 - RNA, 20 nt, Artificial Sequence
  Synthetic
ugcaaucucuacauuucagu

SEQ ID NO: 67575 - RNA, 21 nt, Artificial Sequence
  Synthetic
augcaaucucuacauuucagu

SEQ ID NO: 67576 - RNA, 22 nt, Artificial Sequence
  Synthetic
aaugcaaucucuacauuucagu

SEQ ID NO: 67577 - RNA, 23 nt, Artificial Sequence
  Synthetic
caaugcaaucucuacauuucagu

SEQ ID NO: 67578 - RNA, 24 nt, Artificial Sequence
  Synthetic
acaaugcaaucucuacauuucagu

SEQ ID NO: 67579 - RNA, 18 nt, Artificial Sequence
  Synthetic
ugagguuuuccuuucagu

SEQ ID NO: 67580 - RNA, 20 nt, Artificial Sequence
  Synthetic
agugagguuuuccuuucagu

SEQ ID NO: 67581 - RNA, 21 nt, Artificial Sequence
  Synthetic
aagugagguuuuccuuucagu

SEQ ID NO: 67582 - RNA, 22 nt, Artificial Sequence
  Synthetic
uaagugagguuuuccuuucagu

SEQ ID NO: 67583 - RNA, 23 nt, Artificial Sequence
  Synthetic
uuaagugagguuuuccuuucagu

SEQ ID NO: 67584 - RNA, 24 nt, Artificial Sequence
  Synthetic
auuaagugagguuuuccuuucagu

SEQ ID NO: 67585 - RNA, 18 nt, Artificial Sequence
  Synthetic
ucaaaaauagaaaagagu

SEQ ID NO: 67586 - RNA, 19 nt, Artificial Sequence
  Synthetic
uucaaaaauagaaaagagu

SEQ ID NO: 67587 - RNA, 20 nt, Artificial Sequence
  Synthetic
auucaaaaauagaaaagagu

SEQ ID NO: 67588 - RNA, 24 nt, Artificial Sequence
  Synthetic
ugggauucaaaaauagaaaagagu

SEQ ID NO: 67589 - RNA, 19 nt, Artificial Sequence
  Synthetic
aggucauguggcaaagagu

SEQ ID NO: 67590 - RNA, 20 nt, Artificial Sequence
  Synthetic
caggucauguggcaaagagu

SEQ ID NO: 67591 - RNA, 21 nt, Artificial Sequence
  Synthetic
acaggucauguggcaaagagu

SEQ ID NO: 67592 - RNA, 22 nt, Artificial Sequence
  Synthetic
cacaggucauguggcaaagagu

SEQ ID NO: 67593 - RNA, 23 nt, Artificial Sequence
  Synthetic
ccacaggucauguggcaaagagu

SEQ ID NO: 67594 - RNA, 24 nt, Artificial Sequence
  Synthetic
cccacaggucauguggcaaagagu

SEQ ID NO: 67595 - RNA, 18 nt, Artificial Sequence
  Synthetic
cuuuugucaggaaagagu

SEQ ID NO: 67596 - RNA, 19 nt, Artificial Sequence
  Synthetic
acuuuugucaggaaagagu

SEQ ID NO: 67597 - RNA, 20 nt, Artificial Sequence
  Synthetic
uacuuuugucaggaaagagu

SEQ ID NO: 67598 - RNA, 21 nt, Artificial Sequence
  Synthetic
cuacuuuugucaggaaagagu

SEQ ID NO: 67599 - RNA, 22 nt, Artificial Sequence
  Synthetic
ucuacuuuugucaggaaagagu

SEQ ID NO: 67600 - RNA, 23 nt, Artificial Sequence
  Synthetic
uucuacuuuugucaggaaagagu

SEQ ID NO: 67601 - RNA, 21 nt, Artificial Sequence
  Synthetic
auuucccacuuaugcaagagu

SEQ ID NO: 67602 - RNA, 22 nt, Artificial Sequence
  Synthetic
aauuucccacuuaugcaagagu

SEQ ID NO: 67603 - RNA, 24 nt, Artificial Sequence
  Synthetic
agaauuucccacuuaugcaagagu

SEQ ID NO: 67604 - RNA, 18 nt, Artificial Sequence
  Synthetic
ugaacccauuucaagagu

SEQ ID NO: 67605 - RNA, 20 nt, Artificial Sequence
  Synthetic
agugaacccauuucaagagu

SEQ ID NO: 67606 - RNA, 21 nt, Artificial Sequence
  Synthetic
uagugaacccauuucaagagu

SEQ ID NO: 67607 - RNA, 22 nt, Artificial Sequence
  Synthetic
uuagugaacccauuucaagagu

SEQ ID NO: 67608 - RNA, 24 nt, Artificial Sequence
  Synthetic
aguuagugaacccauuucaagagu

SEQ ID NO: 67609 - RNA, 18 nt, Artificial Sequence
  Synthetic
auuaaaauuuggaagagu

SEQ ID NO: 67610 - RNA, 19 nt, Artificial Sequence
  Synthetic
cauuaaaauuuggaagagu

SEQ ID NO: 67611 - RNA, 20 nt, Artificial Sequence
  Synthetic
ccauuaaaauuuggaagagu

SEQ ID NO: 67612 - RNA, 22 nt, Artificial Sequence
  Synthetic
agccauuaaaauuuggaagagu

SEQ ID NO: 67613 - RNA, 18 nt, Artificial Sequence
  Synthetic
uaauaauuauauaagagu

SEQ ID NO: 67614 - RNA, 19 nt, Artificial Sequence
  Synthetic
uuaauaauuauauaagagu

SEQ ID NO: 67615 - RNA, 20 nt, Artificial Sequence
  Synthetic
uuuaauaauuauauaagagu

SEQ ID NO: 67616 - RNA, 21 nt, Artificial Sequence
  Synthetic
uuuuaauaauuauauaagagu

SEQ ID NO: 67617 - RNA, 22 nt, Artificial Sequence
  Synthetic
cuuuuaauaauuauauaagagu

SEQ ID NO: 67618 - RNA, 23 nt, Artificial Sequence
  Synthetic
ccuuuuaauaauuauauaagagu

SEQ ID NO: 67619 - RNA, 24 nt, Artificial Sequence
  Synthetic
uccuuuuaauaauuauauaagagu

SEQ ID NO: 67620 - RNA, 20 nt, Artificial Sequence
  Synthetic
cggaguggagaacagagagu

SEQ ID NO: 67621 - RNA, 21 nt, Artificial Sequence
  Synthetic
acggaguggagaacagagagu

SEQ ID NO: 67622 - RNA, 22 nt, Artificial Sequence
  Synthetic
cacggaguggagaacagagagu

SEQ ID NO: 67623 - RNA, 23 nt, Artificial Sequence
  Synthetic
ccacggaguggagaacagagagu

SEQ ID NO: 67624 - RNA, 18 nt, Artificial Sequence
  Synthetic
caauuaacucuggagagu

SEQ ID NO: 67625 - RNA, 19 nt, Artificial Sequence
  Synthetic
ccaauuaacucuggagagu

SEQ ID NO: 67626 - RNA, 20 nt, Artificial Sequence
  Synthetic
uccaauuaacucuggagagu

SEQ ID NO: 67627 - RNA, 21 nt, Artificial Sequence
  Synthetic
uuccaauuaacucuggagagu

SEQ ID NO: 67628 - RNA, 22 nt, Artificial Sequence
  Synthetic
uuuccaauuaacucuggagagu

SEQ ID NO: 67629 - RNA, 18 nt, Artificial Sequence
  Synthetic
auacucugaauauagagu

SEQ ID NO: 67630 - RNA, 19 nt, Artificial Sequence
  Synthetic
cauacucugaauauagagu

SEQ ID NO: 67631 - RNA, 20 nt, Artificial Sequence
  Synthetic
ucauacucugaauauagagu

SEQ ID NO: 67632 - RNA, 22 nt, Artificial Sequence
  Synthetic
ugucauacucugaauauagagu

SEQ ID NO: 67633 - RNA, 23 nt, Artificial Sequence
  Synthetic
uugucauacucugaauauagagu

SEQ ID NO: 67634 - RNA, 24 nt, Artificial Sequence
  Synthetic
auugucauacucugaauauagagu

SEQ ID NO: 67635 - RNA, 18 nt, Artificial Sequence
  Synthetic
aauguacacuuauagagu

SEQ ID NO: 67636 - RNA, 19 nt, Artificial Sequence
  Synthetic
aaauguacacuuauagagu

SEQ ID NO: 67637 - RNA, 20 nt, Artificial Sequence
  Synthetic
aaaauguacacuuauagagu

SEQ ID NO: 67638 - RNA, 21 nt, Artificial Sequence
  Synthetic
uaaaauguacacuuauagagu

SEQ ID NO: 67639 - RNA, 22 nt, Artificial Sequence
  Synthetic
uuaaaauguacacuuauagagu

SEQ ID NO: 67640 - RNA, 23 nt, Artificial Sequence
  Synthetic
uuuaaaauguacacuuauagagu

SEQ ID NO: 67641 - RNA, 19 nt, Artificial Sequence
  Synthetic
ugcuugguaaaccuagagu

SEQ ID NO: 67642 - RNA, 20 nt, Artificial Sequence
  Synthetic
cugcuugguaaaccuagagu

SEQ ID NO: 67643 - RNA, 22 nt, Artificial Sequence
  Synthetic
ugcugcuugguaaaccuagagu

SEQ ID NO: 67644 - RNA, 23 nt, Artificial Sequence
  Synthetic
uugcugcuugguaaaccuagagu

SEQ ID NO: 67645 - RNA, 24 nt, Artificial Sequence
  Synthetic
auugcugcuugguaaaccuagagu

SEQ ID NO: 67646 - RNA, 18 nt, Artificial Sequence
  Synthetic
auacucaucaucuagagu

SEQ ID NO: 67647 - RNA, 19 nt, Artificial Sequence
  Synthetic
cauacucaucaucuagagu

SEQ ID NO: 67648 - RNA, 20 nt, Artificial Sequence
  Synthetic
acauacucaucaucuagagu

SEQ ID NO: 67649 - RNA, 21 nt, Artificial Sequence
  Synthetic
cacauacucaucaucuagagu

SEQ ID NO: 67650 - RNA, 22 nt, Artificial Sequence
  Synthetic
ucacauacucaucaucuagagu

SEQ ID NO: 67651 - RNA, 23 nt, Artificial Sequence
  Synthetic
uucacauacucaucaucuagagu

SEQ ID NO: 67652 - RNA, 24 nt, Artificial Sequence
  Synthetic
cuucacauacucaucaucuagagu

SEQ ID NO: 67653 - RNA, 18 nt, Artificial Sequence
  Synthetic
ccguaccccaaguagagu

SEQ ID NO: 67654 - RNA, 19 nt, Artificial Sequence
  Synthetic
uccguaccccaaguagagu

SEQ ID NO: 67655 - RNA, 20 nt, Artificial Sequence
  Synthetic
uuccguaccccaaguagagu

SEQ ID NO: 67656 - RNA, 21 nt, Artificial Sequence
  Synthetic
cuuccguaccccaaguagagu

SEQ ID NO: 67657 - RNA, 22 nt, Artificial Sequence
  Synthetic
ucuuccguaccccaaguagagu

SEQ ID NO: 67658 - RNA, 23 nt, Artificial Sequence
  Synthetic
uucuuccguaccccaaguagagu

SEQ ID NO: 67659 - RNA, 24 nt, Artificial Sequence
  Synthetic
uuucuuccguaccccaaguagagu

SEQ ID NO: 67660 - RNA, 18 nt, Artificial Sequence
  Synthetic
auucucagaugguagagu

SEQ ID NO: 67661 - RNA, 19 nt, Artificial Sequence
  Synthetic
cauucucagaugguagagu

SEQ ID NO: 67662 - RNA, 22 nt, Artificial Sequence
  Synthetic
aggcauucucagaugguagagu

SEQ ID NO: 67663 - RNA, 23 nt, Artificial Sequence
  Synthetic
uaggcauucucagaugguagagu

SEQ ID NO: 67664 - RNA, 18 nt, Artificial Sequence
  Synthetic
cuguuuauccuuuagagu

SEQ ID NO: 67665 - RNA, 19 nt, Artificial Sequence
  Synthetic
ucuguuuauccuuuagagu

SEQ ID NO: 67666 - RNA, 20 nt, Artificial Sequence
  Synthetic
cucuguuuauccuuuagagu

SEQ ID NO: 67667 - RNA, 21 nt, Artificial Sequence
  Synthetic
ucucuguuuauccuuuagagu

SEQ ID NO: 67668 - RNA, 23 nt, Artificial Sequence
  Synthetic
agucucuguuuauccuuuagagu

SEQ ID NO: 67669 - RNA, 24 nt, Artificial Sequence
  Synthetic
aagucucuguuuauccuuuagagu

SEQ ID NO: 67670 - RNA, 18 nt, Artificial Sequence
  Synthetic
uagggaguggguaggagu

SEQ ID NO: 67671 - RNA, 19 nt, Artificial Sequence
  Synthetic
cuagggaguggguaggagu

SEQ ID NO: 67672 - RNA, 22 nt, Artificial Sequence
  Synthetic
aggcuagggaguggguaggagu

SEQ ID NO: 67673 - RNA, 23 nt, Artificial Sequence
  Synthetic
caggcuagggaguggguaggagu

SEQ ID NO: 67674 - RNA, 24 nt, Artificial Sequence
  Synthetic
acaggcuagggaguggguaggagu

SEQ ID NO: 67675 - RNA, 18 nt, Artificial Sequence
  Synthetic
uugcuacgcuguaggagu

SEQ ID NO: 67676 - RNA, 19 nt, Artificial Sequence
  Synthetic
auugcuacgcuguaggagu

SEQ ID NO: 67677 - RNA, 20 nt, Artificial Sequence
  Synthetic
aauugcuacgcuguaggagu

SEQ ID NO: 67678 - RNA, 21 nt, Artificial Sequence
  Synthetic
uaauugcuacgcuguaggagu

SEQ ID NO: 67679 - RNA, 23 nt, Artificial Sequence
  Synthetic
aguaauugcuacgcuguaggagu

SEQ ID NO: 67680 - RNA, 24 nt, Artificial Sequence
  Synthetic
uaguaauugcuacgcuguaggagu

SEQ ID NO: 67681 - RNA, 21 nt, Artificial Sequence
  Synthetic
uacaagaugaaaacagggagu

SEQ ID NO: 67682 - RNA, 22 nt, Artificial Sequence
  Synthetic
auacaagaugaaaacagggagu

SEQ ID NO: 67683 - RNA, 24 nt, Artificial Sequence
  Synthetic
agauacaagaugaaaacagggagu

SEQ ID NO: 67684 - RNA, 18 nt, Artificial Sequence
  Synthetic
uaauaggugggugggagu

SEQ ID NO: 67685 - RNA, 19 nt, Artificial Sequence
  Synthetic
cuaauaggugggugggagu

SEQ ID NO: 67686 - RNA, 20 nt, Artificial Sequence
  Synthetic
acuaauaggugggugggagu

SEQ ID NO: 67687 - RNA, 21 nt, Artificial Sequence
  Synthetic
aacuaauaggugggugggagu

SEQ ID NO: 67688 - RNA, 22 nt, Artificial Sequence
  Synthetic
uaacuaauaggugggugggagu

SEQ ID NO: 67689 - RNA, 23 nt, Artificial Sequence
  Synthetic
uuaacuaauaggugggugggagu

SEQ ID NO: 67690 - RNA, 24 nt, Artificial Sequence
  Synthetic
uuuaacuaauaggugggugggagu

SEQ ID NO: 67691 - RNA, 18 nt, Artificial Sequence
  Synthetic
ugugguugguuugggagu

SEQ ID NO: 67692 - RNA, 19 nt, Artificial Sequence
  Synthetic
uugugguugguuugggagu

SEQ ID NO: 67693 - RNA, 20 nt, Artificial Sequence
  Synthetic
uuugugguugguuugggagu

SEQ ID NO: 67694 - RNA, 21 nt, Artificial Sequence
  Synthetic
cuuugugguugguuugggagu

SEQ ID NO: 67695 - RNA, 23 nt, Artificial Sequence
  Synthetic
agcuuugugguugguuugggagu

SEQ ID NO: 67696 - RNA, 24 nt, Artificial Sequence
  Synthetic
uagcuuugugguugguuugggagu

SEQ ID NO: 67697 - RNA, 18 nt, Artificial Sequence
  Synthetic
acccagcuuuuugggagu

SEQ ID NO: 67698 - RNA, 19 nt, Artificial Sequence
  Synthetic
uacccagcuuuuugggagu

SEQ ID NO: 67699 - RNA, 20 nt, Artificial Sequence
  Synthetic
uuacccagcuuuuugggagu

SEQ ID NO: 67700 - RNA, 21 nt, Artificial Sequence
  Synthetic
auuacccagcuuuuugggagu

SEQ ID NO: 67701 - RNA, 23 nt, Artificial Sequence
  Synthetic
agauuacccagcuuuuugggagu

SEQ ID NO: 67702 - RNA, 24 nt, Artificial Sequence
  Synthetic
uagauuacccagcuuuuugggagu

SEQ ID NO: 67703 - RNA, 18 nt, Artificial Sequence
  Synthetic
cagagagcacaauggagu

SEQ ID NO: 67704 - RNA, 19 nt, Artificial Sequence
  Synthetic
ucagagagcacaauggagu

SEQ ID NO: 67705 - RNA, 20 nt, Artificial Sequence
  Synthetic
uucagagagcacaauggagu

SEQ ID NO: 67706 - RNA, 21 nt, Artificial Sequence
  Synthetic
auucagagagcacaauggagu

SEQ ID NO: 67707 - RNA, 23 nt, Artificial Sequence
  Synthetic
agauucagagagcacaauggagu

SEQ ID NO: 67708 - RNA, 24 nt, Artificial Sequence
  Synthetic
uagauucagagagcacaauggagu

SEQ ID NO: 67709 - RNA, 19 nt, Artificial Sequence
  Synthetic
agugaaaaugaacuggagu

SEQ ID NO: 67710 - RNA, 21 nt, Artificial Sequence
  Synthetic
agagugaaaaugaacuggagu

SEQ ID NO: 67711 - RNA, 23 nt, Artificial Sequence
  Synthetic
agagagugaaaaugaacuggagu

SEQ ID NO: 67712 - RNA, 24 nt, Artificial Sequence
  Synthetic
cagagagugaaaaugaacuggagu

SEQ ID NO: 67713 - RNA, 18 nt, Artificial Sequence
  Synthetic
cuaucuaaagaaaugagu

SEQ ID NO: 67714 - RNA, 19 nt, Artificial Sequence
  Synthetic
acuaucuaaagaaaugagu

SEQ ID NO: 67715 - RNA, 20 nt, Artificial Sequence
  Synthetic
uacuaucuaaagaaaugagu

SEQ ID NO: 67716 - RNA, 21 nt, Artificial Sequence
  Synthetic
cuacuaucuaaagaaaugagu

SEQ ID NO: 67717 - RNA, 23 nt, Artificial Sequence
  Synthetic
ugcuacuaucuaaagaaaugagu

SEQ ID NO: 67718 - RNA, 24 nt, Artificial Sequence
  Synthetic
augcuacuaucuaaagaaaugagu

SEQ ID NO: 67719 - RNA, 18 nt, Artificial Sequence
  Synthetic
auagaagaggaaaugagu

SEQ ID NO: 67720 - RNA, 19 nt, Artificial Sequence
  Synthetic
aauagaagaggaaaugagu

SEQ ID NO: 67721 - RNA, 20 nt, Artificial Sequence
  Synthetic
uaauagaagaggaaaugagu

SEQ ID NO: 67722 - RNA, 21 nt, Artificial Sequence
  Synthetic
uuaauagaagaggaaaugagu

SEQ ID NO: 67723 - RNA, 22 nt, Artificial Sequence
  Synthetic
cuuaauagaagaggaaaugagu

SEQ ID NO: 67724 - RNA, 23 nt, Artificial Sequence
  Synthetic
ucuuaauagaagaggaaaugagu

SEQ ID NO: 67725 - RNA, 24 nt, Artificial Sequence
  Synthetic
cucuuaauagaagaggaaaugagu

SEQ ID NO: 67726 - RNA, 18 nt, Artificial Sequence
  Synthetic
aggcauuaaagaaugagu

SEQ ID NO: 67727 - RNA, 19 nt, Artificial Sequence
  Synthetic
caggcauuaaagaaugagu

SEQ ID NO: 67728 - RNA, 20 nt, Artificial Sequence
  Synthetic
ccaggcauuaaagaaugagu

SEQ ID NO: 67729 - RNA, 22 nt, Artificial Sequence
  Synthetic
agccaggcauuaaagaaugagu

SEQ ID NO: 67730 - RNA, 23 nt, Artificial Sequence
  Synthetic
aagccaggcauuaaagaaugagu

SEQ ID NO: 67731 - RNA, 24 nt, Artificial Sequence
  Synthetic
uaagccaggcauuaaagaaugagu

SEQ ID NO: 67732 - RNA, 18 nt, Artificial Sequence
  Synthetic
aaauagggagagaugagu

SEQ ID NO: 67733 - RNA, 19 nt, Artificial Sequence
  Synthetic
aaaauagggagagaugagu

SEQ ID NO: 67734 - RNA, 21 nt, Artificial Sequence
  Synthetic
cgaaaauagggagagaugagu

SEQ ID NO: 67735 - RNA, 22 nt, Artificial Sequence
  Synthetic
ccgaaaauagggagagaugagu

SEQ ID NO: 67736 - RNA, 23 nt, Artificial Sequence
  Synthetic
accgaaaauagggagagaugagu

SEQ ID NO: 67737 - RNA, 24 nt, Artificial Sequence
  Synthetic
aaccgaaaauagggagagaugagu

SEQ ID NO: 67738 - RNA, 18 nt, Artificial Sequence
  Synthetic
uagaugugauagaugagu

SEQ ID NO: 67739 - RNA, 19 nt, Artificial Sequence
  Synthetic
auagaugugauagaugagu

SEQ ID NO: 67740 - RNA, 20 nt, Artificial Sequence
  Synthetic
aauagaugugauagaugagu

SEQ ID NO: 67741 - RNA, 21 nt, Artificial Sequence
  Synthetic
aaauagaugugauagaugagu

SEQ ID NO: 67742 - RNA, 22 nt, Artificial Sequence
  Synthetic
aaaauagaugugauagaugagu

SEQ ID NO: 67743 - RNA, 23 nt, Artificial Sequence
  Synthetic
uaaaauagaugugauagaugagu

SEQ ID NO: 67744 - RNA, 24 nt, Artificial Sequence
  Synthetic
cuaaaauagaugugauagaugagu

SEQ ID NO: 67745 - RNA, 20 nt, Artificial Sequence
  Synthetic
aggaucagacccugaugagu

SEQ ID NO: 67746 - RNA, 21 nt, Artificial Sequence
  Synthetic
aaggaucagacccugaugagu

SEQ ID NO: 67747 - RNA, 22 nt, Artificial Sequence
  Synthetic
caaggaucagacccugaugagu

SEQ ID NO: 67748 - RNA, 24 nt, Artificial Sequence
  Synthetic
agcaaggaucagacccugaugagu

SEQ ID NO: 67749 - RNA, 18 nt, Artificial Sequence
  Synthetic
uuaaugaauacuaugagu

SEQ ID NO: 67750 - RNA, 19 nt, Artificial Sequence
  Synthetic
uuuaaugaauacuaugagu

SEQ ID NO: 67751 - RNA, 20 nt, Artificial Sequence
  Synthetic
auuuaaugaauacuaugagu

SEQ ID NO: 67752 - RNA, 21 nt, Artificial Sequence
  Synthetic
cauuuaaugaauacuaugagu

SEQ ID NO: 67753 - RNA, 22 nt, Artificial Sequence
  Synthetic
ucauuuaaugaauacuaugagu

SEQ ID NO: 67754 - RNA, 23 nt, Artificial Sequence
  Synthetic
aucauuuaaugaauacuaugagu

SEQ ID NO: 67755 - RNA, 24 nt, Artificial Sequence
  Synthetic
uaucauuuaaugaauacuaugagu

SEQ ID NO: 67756 - RNA, 18 nt, Artificial Sequence
  Synthetic
auggcugaagcacugagu

SEQ ID NO: 67757 - RNA, 19 nt, Artificial Sequence
  Synthetic
uauggcugaagcacugagu

SEQ ID NO: 67758 - RNA, 21 nt, Artificial Sequence
  Synthetic
aguauggcugaagcacugagu

SEQ ID NO: 67759 - RNA, 22 nt, Artificial Sequence
  Synthetic
caguauggcugaagcacugagu

SEQ ID NO: 67760 - RNA, 23 nt, Artificial Sequence
  Synthetic
ucaguauggcugaagcacugagu

SEQ ID NO: 67761 - RNA, 24 nt, Artificial Sequence
  Synthetic
aucaguauggcugaagcacugagu

SEQ ID NO: 67762 - RNA, 18 nt, Artificial Sequence
  Synthetic
auuuguaagauacugagu

SEQ ID NO: 67763 - RNA, 19 nt, Artificial Sequence
  Synthetic
cauuuguaagauacugagu

SEQ ID NO: 67764 - RNA, 21 nt, Artificial Sequence
  Synthetic
ugcauuuguaagauacugagu

SEQ ID NO: 67765 - RNA, 24 nt, Artificial Sequence
  Synthetic
aggugcauuuguaagauacugagu

SEQ ID NO: 67766 - RNA, 18 nt, Artificial Sequence
  Synthetic
cauaauaaccuacugagu

SEQ ID NO: 67767 - RNA, 19 nt, Artificial Sequence
  Synthetic
acauaauaaccuacugagu

SEQ ID NO: 67768 - RNA, 20 nt, Artificial Sequence
  Synthetic
aacauaauaaccuacugagu

SEQ ID NO: 67769 - RNA, 22 nt, Artificial Sequence
  Synthetic
agaacauaauaaccuacugagu

SEQ ID NO: 67770 - RNA, 23 nt, Artificial Sequence
  Synthetic
aagaacauaauaaccuacugagu

SEQ ID NO: 67771 - RNA, 24 nt, Artificial Sequence
  Synthetic
aaagaacauaauaaccuacugagu

SEQ ID NO: 67772 - RNA, 18 nt, Artificial Sequence
  Synthetic
aauuagauugaccugagu

SEQ ID NO: 67773 - RNA, 19 nt, Artificial Sequence
  Synthetic
ugaccaauugaaugugagu

SEQ ID NO: 67774 - RNA, 21 nt, Artificial Sequence
  Synthetic
ugugaccaauugaaugugagu

SEQ ID NO: 67775 - RNA, 22 nt, Artificial Sequence
  Synthetic
uugugaccaauugaaugugagu

SEQ ID NO: 67776 - RNA, 24 nt, Artificial Sequence
  Synthetic
aguugugaccaauugaaugugagu

SEQ ID NO: 67777 - RNA, 18 nt, Artificial Sequence
  Synthetic
uaggauauuaaaaauagu

SEQ ID NO: 67778 - RNA, 19 nt, Artificial Sequence
  Synthetic
cuaggauauuaaaaauagu

SEQ ID NO: 67779 - RNA, 20 nt, Artificial Sequence
  Synthetic
ucuaggauauuaaaaauagu

SEQ ID NO: 67780 - RNA, 19 nt, Artificial Sequence
  Synthetic
agaucuuuucugcaauagu

SEQ ID NO: 67781 - RNA, 20 nt, Artificial Sequence
  Synthetic
cagaucuuuucugcaauagu

SEQ ID NO: 67782 - RNA, 21 nt, Artificial Sequence
  Synthetic
ccagaucuuuucugcaauagu

SEQ ID NO: 67783 - RNA, 23 nt, Artificial Sequence
  Synthetic
agccagaucuuuucugcaauagu

SEQ ID NO: 67784 - RNA, 24 nt, Artificial Sequence
  Synthetic
cagccagaucuuuucugcaauagu

SEQ ID NO: 67785 - RNA, 22 nt, Artificial Sequence
  Synthetic
agaggaggagaaacagaauagu

SEQ ID NO: 67786 - RNA, 23 nt, Artificial Sequence
  Synthetic
cagaggaggagaaacagaauagu

SEQ ID NO: 67787 - RNA, 24 nt, Artificial Sequence
  Synthetic
ucagaggaggagaaacagaauagu

SEQ ID NO: 67788 - RNA, 18 nt, Artificial Sequence
  Synthetic
uuauauuuauaccauagu

SEQ ID NO: 67789 - RNA, 19 nt, Artificial Sequence
  Synthetic
auuauauuuauaccauagu

SEQ ID NO: 67790 - RNA, 20 nt, Artificial Sequence
  Synthetic
uauuauauuuauaccauagu

SEQ ID NO: 67791 - RNA, 21 nt, Artificial Sequence
  Synthetic
auauuauauuuauaccauagu

SEQ ID NO: 67792 - RNA, 22 nt, Artificial Sequence
  Synthetic
cauauuauauuuauaccauagu

SEQ ID NO: 67793 - RNA, 18 nt, Artificial Sequence
  Synthetic
uaaagauaauaucauagu

SEQ ID NO: 67794 - RNA, 19 nt, Artificial Sequence
  Synthetic
uuaaagauaauaucauagu

SEQ ID NO: 67795 - RNA, 20 nt, Artificial Sequence
  Synthetic
cuuaaagauaauaucauagu

SEQ ID NO: 67796 - RNA, 21 nt, Artificial Sequence
  Synthetic
acuuaaagauaauaucauagu

SEQ ID NO: 67797 - RNA, 22 nt, Artificial Sequence
  Synthetic
uacuuaaagauaauaucauagu

SEQ ID NO: 67798 - RNA, 23 nt, Artificial Sequence
  Synthetic
uuacuuaaagauaauaucauagu

SEQ ID NO: 67799 - RNA, 24 nt, Artificial Sequence
  Synthetic
cuuacuuaaagauaauaucauagu

SEQ ID NO: 67800 - RNA, 18 nt, Artificial Sequence
  Synthetic
uggaugcugcgggauagu

SEQ ID NO: 67801 - RNA, 19 nt, Artificial Sequence
  Synthetic
uuggaugcugcgggauagu

SEQ ID NO: 67802 - RNA, 20 nt, Artificial Sequence
  Synthetic
uuuggaugcugcgggauagu

SEQ ID NO: 67803 - RNA, 21 nt, Artificial Sequence
  Synthetic
auuuggaugcugcgggauagu

SEQ ID NO: 67804 - RNA, 22 nt, Artificial Sequence
  Synthetic
aauuuggaugcugcgggauagu

SEQ ID NO: 67805 - RNA, 18 nt, Artificial Sequence
  Synthetic
aguaaaauuugcuauagu

SEQ ID NO: 67806 - RNA, 19 nt, Artificial Sequence
  Synthetic
uaguaaaauuugcuauagu

SEQ ID NO: 67807 - RNA, 20 nt, Artificial Sequence
  Synthetic
auaguaaaauuugcuauagu

SEQ ID NO: 67808 - RNA, 21 nt, Artificial Sequence
  Synthetic
aauaguaaaauuugcuauagu

SEQ ID NO: 67809 - RNA, 22 nt, Artificial Sequence
  Synthetic
uaauaguaaaauuugcuauagu

SEQ ID NO: 67810 - RNA, 23 nt, Artificial Sequence
  Synthetic
uuaauaguaaaauuugcuauagu

SEQ ID NO: 67811 - RNA, 24 nt, Artificial Sequence
  Synthetic
auuaauaguaaaauuugcuauagu

SEQ ID NO: 67812 - RNA, 21 nt, Artificial Sequence
  Synthetic
cuaaccucagguaauuauagu

SEQ ID NO: 67813 - RNA, 22 nt, Artificial Sequence
  Synthetic
acuaaccucagguaauuauagu

SEQ ID NO: 67814 - RNA, 18 nt, Artificial Sequence
  Synthetic
acaacauuguuuuauagu

SEQ ID NO: 67815 - RNA, 20 nt, Artificial Sequence
  Synthetic
agacaacauuguuuuauagu

SEQ ID NO: 67816 - RNA, 21 nt, Artificial Sequence
  Synthetic
aagacaacauuguuuuauagu

SEQ ID NO: 67817 - RNA, 22 nt, Artificial Sequence
  Synthetic
aaagacaacauuguuuuauagu

SEQ ID NO: 67818 - RNA, 23 nt, Artificial Sequence
  Synthetic
caaagacaacauuguuuuauagu

SEQ ID NO: 67819 - RNA, 24 nt, Artificial Sequence
  Synthetic
ccaaagacaacauuguuuuauagu

SEQ ID NO: 67820 - RNA, 18 nt, Artificial Sequence
  Synthetic
ucauccaaaaagacuagu

SEQ ID NO: 67821 - RNA, 19 nt, Artificial Sequence
  Synthetic
uucauccaaaaagacuagu

SEQ ID NO: 67822 - RNA, 20 nt, Artificial Sequence
  Synthetic
auucauccaaaaagacuagu

SEQ ID NO: 67823 - RNA, 21 nt, Artificial Sequence
  Synthetic
cauucauccaaaaagacuagu

SEQ ID NO: 67824 - RNA, 22 nt, Artificial Sequence
  Synthetic
acauucauccaaaaagacuagu

SEQ ID NO: 67825 - RNA, 23 nt, Artificial Sequence
  Synthetic
aacauucauccaaaaagacuagu

SEQ ID NO: 67826 - RNA, 24 nt, Artificial Sequence
  Synthetic
aaacauucauccaaaaagacuagu

SEQ ID NO: 67827 - RNA, 18 nt, Artificial Sequence
  Synthetic
aaaacugaugcuacuagu

SEQ ID NO: 67828 - RNA, 20 nt, Artificial Sequence
  Synthetic
agaaaacugaugcuacuagu

SEQ ID NO: 67829 - RNA, 21 nt, Artificial Sequence
  Synthetic
uagaaaacugaugcuacuagu

SEQ ID NO: 67830 - RNA, 22 nt, Artificial Sequence
  Synthetic
auagaaaacugaugcuacuagu

SEQ ID NO: 67831 - RNA, 23 nt, Artificial Sequence
  Synthetic
cauagaaaacugaugcuacuagu

SEQ ID NO: 67832 - RNA, 24 nt, Artificial Sequence
  Synthetic
acauagaaaacugaugcuacuagu

SEQ ID NO: 67833 - RNA, 18 nt, Artificial Sequence
  Synthetic
aaggucaugguuccuagu

SEQ ID NO: 67834 - RNA, 19 nt, Artificial Sequence
  Synthetic
caaggucaugguuccuagu

SEQ ID NO: 67835 - RNA, 20 nt, Artificial Sequence
  Synthetic
ucaaggucaugguuccuagu

SEQ ID NO: 67836 - RNA, 23 nt, Artificial Sequence
  Synthetic
uggucaaggucaugguuccuagu

SEQ ID NO: 67837 - RNA, 24 nt, Artificial Sequence
  Synthetic
cuggucaaggucaugguuccuagu

SEQ ID NO: 67838 - RNA, 18 nt, Artificial Sequence
  Synthetic
ucuguucauugugcuagu

SEQ ID NO: 67839 - RNA, 19 nt, Artificial Sequence
  Synthetic
aucuguucauugugcuagu

SEQ ID NO: 67840 - RNA, 20 nt, Artificial Sequence
  Synthetic
aaucuguucauugugcuagu

SEQ ID NO: 67841 - RNA, 21 nt, Artificial Sequence
  Synthetic
aaaucuguucauugugcuagu

SEQ ID NO: 67842 - RNA, 22 nt, Artificial Sequence
  Synthetic
caaaucuguucauugugcuagu

SEQ ID NO: 67843 - RNA, 23 nt, Artificial Sequence
  Synthetic
ucaaaucuguucauugugcuagu

SEQ ID NO: 67844 - RNA, 24 nt, Artificial Sequence
  Synthetic
cucaaaucuguucauugugcuagu

SEQ ID NO: 67845 - RNA, 18 nt, Artificial Sequence
  Synthetic
uugaguuuaaaaucuagu

SEQ ID NO: 67846 - RNA, 19 nt, Artificial Sequence
  Synthetic
uuugaguuuaaaaucuagu

SEQ ID NO: 67847 - RNA, 20 nt, Artificial Sequence
  Synthetic
uuuugaguuuaaaaucuagu

SEQ ID NO: 67848 - RNA, 21 nt, Artificial Sequence
  Synthetic
cuuuugaguuuaaaaucuagu

SEQ ID NO: 67849 - RNA, 22 nt, Artificial Sequence
  Synthetic
ucuuuugaguuuaaaaucuagu

SEQ ID NO: 67850 - RNA, 23 nt, Artificial Sequence
  Synthetic
cucuuuugaguuuaaaaucuagu

SEQ ID NO: 67851 - RNA, 24 nt, Artificial Sequence
  Synthetic
ucucuuuugaguuuaaaaucuagu

SEQ ID NO: 67852 - RNA, 18 nt, Artificial Sequence
  Synthetic
ugaaaaguauauucuagu

SEQ ID NO: 67853 - RNA, 19 nt, Artificial Sequence
  Synthetic
augaaaaguauauucuagu

SEQ ID NO: 67854 - RNA, 20 nt, Artificial Sequence
  Synthetic
uaugaaaaguauauucuagu

SEQ ID NO: 67855 - RNA, 21 nt, Artificial Sequence
  Synthetic
uuaugaaaaguauauucuagu

SEQ ID NO: 67856 - RNA, 22 nt, Artificial Sequence
  Synthetic
auuaugaaaaguauauucuagu

SEQ ID NO: 67857 - RNA, 23 nt, Artificial Sequence
  Synthetic
uauuaugaaaaguauauucuagu

SEQ ID NO: 67858 - RNA, 24 nt, Artificial Sequence
  Synthetic
cuauuaugaaaaguauauucuagu

SEQ ID NO: 67859 - RNA, 19 nt, Artificial Sequence
  Synthetic
ugacuaaaauaguucuagu

SEQ ID NO: 67860 - RNA, 20 nt, Artificial Sequence
  Synthetic
uugacuaaaauaguucuagu

SEQ ID NO: 67861 - RNA, 21 nt, Artificial Sequence
  Synthetic
cuugacuaaaauaguucuagu

SEQ ID NO: 67862 - RNA, 22 nt, Artificial Sequence
  Synthetic
ucuugacuaaaauaguucuagu

SEQ ID NO: 67863 - RNA, 18 nt, Artificial Sequence
  Synthetic
uuaagaucucaaaguagu

SEQ ID NO: 67864 - RNA, 20 nt, Artificial Sequence
  Synthetic
uguuaagaucucaaaguagu

SEQ ID NO: 67865 - RNA, 21 nt, Artificial Sequence
  Synthetic
uuguuaagaucucaaaguagu

SEQ ID NO: 67866 - RNA, 22 nt, Artificial Sequence
  Synthetic
cuuguuaagaucucaaaguagu

SEQ ID NO: 67867 - RNA, 23 nt, Artificial Sequence
  Synthetic
ucuuguuaagaucucaaaguagu

SEQ ID NO: 67868 - RNA, 24 nt, Artificial Sequence
  Synthetic
aucuuguuaagaucucaaaguagu

SEQ ID NO: 67869 - RNA, 18 nt, Artificial Sequence
  Synthetic
auuuuggaggcaaguagu

SEQ ID NO: 67870 - RNA, 19 nt, Artificial Sequence
  Synthetic
uauuuuggaggcaaguagu

SEQ ID NO: 67871 - RNA, 20 nt, Artificial Sequence
  Synthetic
auauuuuggaggcaaguagu

SEQ ID NO: 67872 - RNA, 23 nt, Artificial Sequence
  Synthetic
uggauauuuuggaggcaaguagu

SEQ ID NO: 67873 - RNA, 24 nt, Artificial Sequence
  Synthetic
auggauauuuuggaggcaaguagu

SEQ ID NO: 67874 - RNA, 18 nt, Artificial Sequence
  Synthetic
aagcaaagacaagguagu

SEQ ID NO: 67875 - RNA, 20 nt, Artificial Sequence
  Synthetic
agaagcaaagacaagguagu

SEQ ID NO: 67876 - RNA, 21 nt, Artificial Sequence
  Synthetic
uagaagcaaagacaagguagu

SEQ ID NO: 67877 - RNA, 22 nt, Artificial Sequence
  Synthetic
auagaagcaaagacaagguagu

SEQ ID NO: 67878 - RNA, 23 nt, Artificial Sequence
  Synthetic
aauagaagcaaagacaagguagu

SEQ ID NO: 67879 - RNA, 24 nt, Artificial Sequence
  Synthetic
caauagaagcaaagacaagguagu

SEQ ID NO: 67880 - RNA, 18 nt, Artificial Sequence
  Synthetic
aggaauaauauugguagu

SEQ ID NO: 67881 - RNA, 19 nt, Artificial Sequence
  Synthetic
uaggaauaauauugguagu

SEQ ID NO: 67882 - RNA, 20 nt, Artificial Sequence
  Synthetic
cuaggaauaauauugguagu

SEQ ID NO: 67883 - RNA, 21 nt, Artificial Sequence
  Synthetic
acuaggaauaauauugguagu

SEQ ID NO: 67884 - RNA, 22 nt, Artificial Sequence
  Synthetic
uacuaggaauaauauugguagu

SEQ ID NO: 67885 - RNA, 23 nt, Artificial Sequence
  Synthetic
auacuaggaauaauauugguagu

SEQ ID NO: 67886 - RNA, 24 nt, Artificial Sequence
  Synthetic
aauacuaggaauaauauugguagu

SEQ ID NO: 67887 - RNA, 18 nt, Artificial Sequence
  Synthetic
aauccaggauuugguagu

SEQ ID NO: 67888 - RNA, 19 nt, Artificial Sequence
  Synthetic
uaauccaggauuugguagu

SEQ ID NO: 67889 - RNA, 20 nt, Artificial Sequence
  Synthetic
cuaauccaggauuugguagu

SEQ ID NO: 67890 - RNA, 21 nt, Artificial Sequence
  Synthetic
acuaauccaggauuugguagu

SEQ ID NO: 67891 - RNA, 22 nt, Artificial Sequence
  Synthetic
aacuaauccaggauuugguagu

SEQ ID NO: 67892 - RNA, 24 nt, Artificial Sequence
  Synthetic
ugaacuaauccaggauuugguagu

SEQ ID NO: 67893 - RNA, 18 nt, Artificial Sequence
  Synthetic
agcaauuugauauguagu

SEQ ID NO: 67894 - RNA, 19 nt, Artificial Sequence
  Synthetic
aagcaauuugauauguagu

SEQ ID NO: 67895 - RNA, 21 nt, Artificial Sequence
  Synthetic
ugaagcaauuugauauguagu

SEQ ID NO: 67896 - RNA, 22 nt, Artificial Sequence
  Synthetic
augaagcaauuugauauguagu

SEQ ID NO: 67897 - RNA, 23 nt, Artificial Sequence
  Synthetic
aaugaagcaauuugauauguagu

SEQ ID NO: 67898 - RNA, 24 nt, Artificial Sequence
  Synthetic
aaaugaagcaauuugauauguagu

SEQ ID NO: 67899 - RNA, 18 nt, Artificial Sequence
  Synthetic
aacuuuuaaaccuguagu

SEQ ID NO: 67900 - RNA, 19 nt, Artificial Sequence
  Synthetic
uaacuuuuaaaccuguagu

SEQ ID NO: 67901 - RNA, 20 nt, Artificial Sequence
  Synthetic
auaacuuuuaaaccuguagu

SEQ ID NO: 67902 - RNA, 21 nt, Artificial Sequence
  Synthetic
aauaacuuuuaaaccuguagu

SEQ ID NO: 67903 - RNA, 23 nt, Artificial Sequence
  Synthetic
agaauaacuuuuaaaccuguagu

SEQ ID NO: 67904 - RNA, 24 nt, Artificial Sequence
  Synthetic
uagaauaacuuuuaaaccuguagu

SEQ ID NO: 67905 - RNA, 18 nt, Artificial Sequence
  Synthetic
agcaauaagcaguguagu

SEQ ID NO: 67906 - RNA, 21 nt, Artificial Sequence
  Synthetic
uggagcaauaagcaguguagu

SEQ ID NO: 67907 - RNA, 22 nt, Artificial Sequence
  Synthetic
cuggagcaauaagcaguguagu

SEQ ID NO: 67908 - RNA, 23 nt, Artificial Sequence
  Synthetic
ccuggagcaauaagcaguguagu

SEQ ID NO: 67909 - RNA, 24 nt, Artificial Sequence
  Synthetic
accuggagcaauaagcaguguagu

SEQ ID NO: 67910 - RNA, 20 nt, Artificial Sequence
  Synthetic
aggcuaccuaguuuuguagu

SEQ ID NO: 67911 - RNA, 21 nt, Artificial Sequence
  Synthetic
uaggcuaccuaguuuuguagu

SEQ ID NO: 67912 - RNA, 22 nt, Artificial Sequence
  Synthetic
cuaggcuaccuaguuuuguagu

SEQ ID NO: 67913 - RNA, 23 nt, Artificial Sequence
  Synthetic
ucuaggcuaccuaguuuuguagu

SEQ ID NO: 67914 - RNA, 24 nt, Artificial Sequence
  Synthetic
cucuaggcuaccuaguuuuguagu

SEQ ID NO: 67915 - RNA, 18 nt, Artificial Sequence
  Synthetic
uaacuccauacacuuagu

SEQ ID NO: 67916 - RNA, 21 nt, Artificial Sequence
  Synthetic
ugguaacuccauacacuuagu

SEQ ID NO: 67917 - RNA, 22 nt, Artificial Sequence
  Synthetic
augguaacuccauacacuuagu

SEQ ID NO: 67918 - RNA, 23 nt, Artificial Sequence
  Synthetic
aaugguaacuccauacacuuagu

SEQ ID NO: 67919 - RNA, 24 nt, Artificial Sequence
  Synthetic
aaaugguaacuccauacacuuagu

SEQ ID NO: 67920 - RNA, 19 nt, Artificial Sequence
  Synthetic
cgggugguacuaucuuagu

SEQ ID NO: 67921 - RNA, 20 nt, Artificial Sequence
  Synthetic
ucgggugguacuaucuuagu

SEQ ID NO: 67922 - RNA, 21 nt, Artificial Sequence
  Synthetic
cucgggugguacuaucuuagu

SEQ ID NO: 67923 - RNA, 22 nt, Artificial Sequence
  Synthetic
acucgggugguacuaucuuagu

SEQ ID NO: 67924 - RNA, 23 nt, Artificial Sequence
  Synthetic
cacucgggugguacuaucuuagu

SEQ ID NO: 67925 - RNA, 24 nt, Artificial Sequence
  Synthetic
ucacucgggugguacuaucuuagu

SEQ ID NO: 67926 - RNA, 18 nt, Artificial Sequence
  Synthetic
ugaagcuagaaaguuagu

SEQ ID NO: 67927 - RNA, 19 nt, Artificial Sequence
  Synthetic
augaagcuagaaaguuagu

SEQ ID NO: 67928 - RNA, 19 nt, Artificial Sequence
  Synthetic
ugcauggaaggcuguuagu

SEQ ID NO: 67929 - RNA, 20 nt, Artificial Sequence
  Synthetic
cugcauggaaggcuguuagu

SEQ ID NO: 67930 - RNA, 23 nt, Artificial Sequence
  Synthetic
uggcugcauggaaggcuguuagu

SEQ ID NO: 67931 - RNA, 24 nt, Artificial Sequence
  Synthetic
cuggcugcauggaaggcuguuagu

SEQ ID NO: 67932 - RNA, 18 nt, Artificial Sequence
  Synthetic
cauauguuuucauuuagu

SEQ ID NO: 67933 - RNA, 20 nt, Artificial Sequence
  Synthetic
agcauauguuuucauuuagu

SEQ ID NO: 67934 - RNA, 22 nt, Artificial Sequence
  Synthetic
ugagcauauguuuucauuuagu

SEQ ID NO: 67935 - RNA, 24 nt, Artificial Sequence
  Synthetic
ugugagcauauguuuucauuuagu

SEQ ID NO: 67936 - RNA, 18 nt, Artificial Sequence
  Synthetic
agucugcaaauauuuagu

SEQ ID NO: 67937 - RNA, 19 nt, Artificial Sequence
  Synthetic
aagucugcaaauauuuagu

SEQ ID NO: 67938 - RNA, 20 nt, Artificial Sequence
  Synthetic
uaagucugcaaauauuuagu

SEQ ID NO: 67939 - RNA, 22 nt, Artificial Sequence
  Synthetic
uguaagucugcaaauauuuagu

SEQ ID NO: 67940 - RNA, 24 nt, Artificial Sequence
  Synthetic
uguguaagucugcaaauauuuagu

SEQ ID NO: 67941 - RNA, 21 nt, Artificial Sequence
  Synthetic
auuccuuccuguugcuuuagu

SEQ ID NO: 67942 - RNA, 22 nt, Artificial Sequence
  Synthetic
uauuccuuccuguugcuuuagu

SEQ ID NO: 67943 - RNA, 24 nt, Artificial Sequence
  Synthetic
uguauuccuuccuguugcuuuagu

SEQ ID NO: 67944 - RNA, 18 nt, Artificial Sequence
  Synthetic
accuugugacauuuuagu

SEQ ID NO: 67945 - RNA, 19 nt, Artificial Sequence
  Synthetic
caccuugugacauuuuagu

SEQ ID NO: 67946 - RNA, 20 nt, Artificial Sequence
  Synthetic
ucaccuugugacauuuuagu

SEQ ID NO: 67947 - RNA, 21 nt, Artificial Sequence
  Synthetic
uucaccuugugacauuuuagu

SEQ ID NO: 67948 - RNA, 22 nt, Artificial Sequence
  Synthetic
uuucaccuugugacauuuuagu

SEQ ID NO: 67949 - RNA, 23 nt, Artificial Sequence
  Synthetic
uuuucaccuugugacauuuuagu

SEQ ID NO: 67950 - RNA, 19 nt, Artificial Sequence
  Synthetic
aguucaguucagcgaacgu

SEQ ID NO: 67951 - RNA, 20 nt, Artificial Sequence
  Synthetic
caguucaguucagcgaacgu

SEQ ID NO: 67952 - RNA, 21 nt, Artificial Sequence
  Synthetic
ucaguucaguucagcgaacgu

SEQ ID NO: 67953 - RNA, 22 nt, Artificial Sequence
  Synthetic
uucaguucaguucagcgaacgu

SEQ ID NO: 67954 - RNA, 24 nt, Artificial Sequence
  Synthetic
aguucaguucaguucagcgaacgu

SEQ ID NO: 67955 - RNA, 18 nt, Artificial Sequence
  Synthetic
aguuccucaaaggaacgu

SEQ ID NO: 67956 - RNA, 19 nt, Artificial Sequence
  Synthetic
aaguuccucaaaggaacgu

SEQ ID NO: 67957 - RNA, 20 nt, Artificial Sequence
  Synthetic
aaaguuccucaaaggaacgu

SEQ ID NO: 67958 - RNA, 21 nt, Artificial Sequence
  Synthetic
caaaguuccucaaaggaacgu

SEQ ID NO: 67959 - RNA, 23 nt, Artificial Sequence
  Synthetic
ugcaaaguuccucaaaggaacgu

SEQ ID NO: 67960 - RNA, 18 nt, Artificial Sequence
  Synthetic
cacaagcaccaugaacgu

SEQ ID NO: 67961 - RNA, 19 nt, Artificial Sequence
  Synthetic
ccacaagcaccaugaacgu

SEQ ID NO: 67962 - RNA, 20 nt, Artificial Sequence
  Synthetic
uccacaagcaccaugaacgu

SEQ ID NO: 67963 - RNA, 21 nt, Artificial Sequence
  Synthetic
auccacaagcaccaugaacgu

SEQ ID NO: 67964 - RNA, 22 nt, Artificial Sequence
  Synthetic
aauccacaagcaccaugaacgu

SEQ ID NO: 67965 - RNA, 23 nt, Artificial Sequence
  Synthetic
aaauccacaagcaccaugaacgu

SEQ ID NO: 67966 - RNA, 24 nt, Artificial Sequence
  Synthetic
uaaauccacaagcaccaugaacgu

SEQ ID NO: 67967 - RNA, 18 nt, Artificial Sequence
  Synthetic
ugacuggaauaauaacgu

SEQ ID NO: 67968 - RNA, 20 nt, Artificial Sequence
  Synthetic
ugugacuggaauaauaacgu

SEQ ID NO: 67969 - RNA, 21 nt, Artificial Sequence
  Synthetic
cugugacuggaauaauaacgu

SEQ ID NO: 67970 - RNA, 22 nt, Artificial Sequence
  Synthetic
acugugacuggaauaauaacgu

SEQ ID NO: 67971 - RNA, 23 nt, Artificial Sequence
  Synthetic
uacugugacuggaauaauaacgu

SEQ ID NO: 67972 - RNA, 24 nt, Artificial Sequence
  Synthetic
auacugugacuggaauaauaacgu

SEQ ID NO: 67973 - RNA, 18 nt, Artificial Sequence
  Synthetic
ugguagaaaauaacacgu

SEQ ID NO: 67974 - RNA, 19 nt, Artificial Sequence
  Synthetic
uugguagaaaauaacacgu

SEQ ID NO: 67975 - RNA, 21 nt, Artificial Sequence
  Synthetic
uguugguagaaaauaacacgu

SEQ ID NO: 67976 - RNA, 22 nt, Artificial Sequence
  Synthetic
cuguugguagaaaauaacacgu

SEQ ID NO: 67977 - RNA, 23 nt, Artificial Sequence
  Synthetic
acuguugguagaaaauaacacgu

SEQ ID NO: 67978 - RNA, 18 nt, Artificial Sequence
  Synthetic
acacacgcagaagcacgu

SEQ ID NO: 67979 - RNA, 19 nt, Artificial Sequence
  Synthetic
aacacacgcagaagcacgu

SEQ ID NO: 67980 - RNA, 20 nt, Artificial Sequence
  Synthetic
aaacacacgcagaagcacgu

SEQ ID NO: 67981 - RNA, 21 nt, Artificial Sequence
  Synthetic
caaacacacgcagaagcacgu

SEQ ID NO: 67982 - RNA, 22 nt, Artificial Sequence
  Synthetic
acaaacacacgcagaagcacgu

SEQ ID NO: 67983 - RNA, 23 nt, Artificial Sequence
  Synthetic
aacaaacacacgcagaagcacgu

SEQ ID NO: 67984 - RNA, 24 nt, Artificial Sequence
  Synthetic
aaacaaacacacgcagaagcacgu

SEQ ID NO: 67985 - RNA, 18 nt, Artificial Sequence
  Synthetic
ucacgcucacaggcacgu

SEQ ID NO: 67986 - RNA, 19 nt, Artificial Sequence
  Synthetic
uucacgcucacaggcacgu

SEQ ID NO: 67987 - RNA, 21 nt, Artificial Sequence
  Synthetic
aguucacgcucacaggcacgu

SEQ ID NO: 67988 - RNA, 22 nt, Artificial Sequence
  Synthetic
aaguucacgcucacaggcacgu

SEQ ID NO: 67989 - RNA, 23 nt, Artificial Sequence
  Synthetic
caaguucacgcucacaggcacgu

SEQ ID NO: 67990 - RNA, 18 nt, Artificial Sequence
  Synthetic
acuugggaaugaucacgu

SEQ ID NO: 67991 - RNA, 20 nt, Artificial Sequence
  Synthetic
agacuugggaaugaucacgu

SEQ ID NO: 67992 - RNA, 21 nt, Artificial Sequence
  Synthetic
aagacuugggaaugaucacgu

SEQ ID NO: 67993 - RNA, 22 nt, Artificial Sequence
  Synthetic
aaagacuugggaaugaucacgu

SEQ ID NO: 67994 - RNA, 24 nt, Artificial Sequence
  Synthetic
agaaagacuugggaaugaucacgu

SEQ ID NO: 67995 - RNA, 19 nt, Artificial Sequence
  Synthetic
aggccaguaguacucacgu

SEQ ID NO: 67996 - RNA, 20 nt, Artificial Sequence
  Synthetic
uaggccaguaguacucacgu

SEQ ID NO: 67997 - RNA, 18 nt, Artificial Sequence
  Synthetic
aucauguauuacagacgu

SEQ ID NO: 67998 - RNA, 20 nt, Artificial Sequence
  Synthetic
agaucauguauuacagacgu

SEQ ID NO: 67999 - RNA, 21 nt, Artificial Sequence
  Synthetic
uagaucauguauuacagacgu

SEQ ID NO: 68000 - RNA, 22 nt, Artificial Sequence
  Synthetic
uuagaucauguauuacagacgu

SEQ ID NO: 68001 - RNA, 23 nt, Artificial Sequence
  Synthetic
auuagaucauguauuacagacgu

SEQ ID NO: 68002 - RNA, 24 nt, Artificial Sequence
  Synthetic
cauuagaucauguauuacagacgu

SEQ ID NO: 68003 - RNA, 18 nt, Artificial Sequence
  Synthetic
uuagaaagaaauagacgu

SEQ ID NO: 68004 - RNA, 19 nt, Artificial Sequence
  Synthetic
cuuagaaagaaauagacgu

SEQ ID NO: 68005 - RNA, 20 nt, Artificial Sequence
  Synthetic
acuuagaaagaaauagacgu

SEQ ID NO: 68006 - RNA, 21 nt, Artificial Sequence
  Synthetic
uacuuagaaagaaauagacgu

SEQ ID NO: 68007 - RNA, 22 nt, Artificial Sequence
  Synthetic
cuacuuagaaagaaauagacgu

SEQ ID NO: 68008 - RNA, 23 nt, Artificial Sequence
  Synthetic
acuacuuagaaagaaauagacgu

SEQ ID NO: 68009 - RNA, 24 nt, Artificial Sequence
  Synthetic
aacuacuuagaaagaaauagacgu

SEQ ID NO: 68010 - RNA, 19 nt, Artificial Sequence
  Synthetic
agcaauuauuaucauacgu

SEQ ID NO: 68011 - RNA, 20 nt, Artificial Sequence
  Synthetic
aagcaauuauuaucauacgu

SEQ ID NO: 68012 - RNA, 21 nt, Artificial Sequence
  Synthetic
caagcaauuauuaucauacgu

SEQ ID NO: 68013 - RNA, 22 nt, Artificial Sequence
  Synthetic
acaagcaauuauuaucauacgu

SEQ ID NO: 68014 - RNA, 23 nt, Artificial Sequence
  Synthetic
aacaagcaauuauuaucauacgu

SEQ ID NO: 68015 - RNA, 24 nt, Artificial Sequence
  Synthetic
aaacaagcaauuauuaucauacgu

SEQ ID NO: 68016 - RNA, 21 nt, Artificial Sequence
  Synthetic
uguuucuguguguguauacgu

SEQ ID NO: 68017 - RNA, 22 nt, Artificial Sequence
  Synthetic
cuguuucuguguguguauacgu

SEQ ID NO: 68018 - RNA, 23 nt, Artificial Sequence
  Synthetic
ucuguuucuguguguguauacgu

SEQ ID NO: 68019 - RNA, 24 nt, Artificial Sequence
  Synthetic
aucuguuucuguguguguauacgu

SEQ ID NO: 68020 - RNA, 18 nt, Artificial Sequence
  Synthetic
aaucaacacuuuuuacgu

SEQ ID NO: 68021 - RNA, 19 nt, Artificial Sequence
  Synthetic
caaucaacacuuuuuacgu

SEQ ID NO: 68022 - RNA, 20 nt, Artificial Sequence
  Synthetic
ucaaucaacacuuuuuacgu

SEQ ID NO: 68023 - RNA, 23 nt, Artificial Sequence
  Synthetic
uggucaaucaacacuuuuuacgu

SEQ ID NO: 68024 - RNA, 24 nt, Artificial Sequence
  Synthetic
uuggucaaucaacacuuuuuacgu

SEQ ID NO: 68025 - RNA, 18 nt, Artificial Sequence
  Synthetic
uguggauuugcuauccgu

SEQ ID NO: 68026 - RNA, 19 nt, Artificial Sequence
  Synthetic
uuguggauuugcuauccgu

SEQ ID NO: 68027 - RNA, 20 nt, Artificial Sequence
  Synthetic
uuuguggauuugcuauccgu

SEQ ID NO: 68028 - RNA, 21 nt, Artificial Sequence
  Synthetic
auuuguggauuugcuauccgu

SEQ ID NO: 68029 - RNA, 22 nt, Artificial Sequence
  Synthetic
cauuuguggauuugcuauccgu

SEQ ID NO: 68030 - RNA, 23 nt, Artificial Sequence
  Synthetic
acauuuguggauuugcuauccgu

SEQ ID NO: 68031 - RNA, 24 nt, Artificial Sequence
  Synthetic
aacauuuguggauuugcuauccgu

SEQ ID NO: 68032 - RNA, 19 nt, Artificial Sequence
  Synthetic
agucuauuccucuuagcgu

SEQ ID NO: 68033 - RNA, 20 nt, Artificial Sequence
  Synthetic
cagucuauuccucuuagcgu

SEQ ID NO: 68034 - RNA, 23 nt, Artificial Sequence
  Synthetic
uggcagucuauuccucuuagcgu

SEQ ID NO: 68035 - RNA, 24 nt, Artificial Sequence
  Synthetic
uuggcagucuauuccucuuagcgu

SEQ ID NO: 68036 - RNA, 18 nt, Artificial Sequence
  Synthetic
uuucuuccuuggaggcgu

SEQ ID NO: 68037 - RNA, 19 nt, Artificial Sequence
  Synthetic
uuuucuuccuuggaggcgu

SEQ ID NO: 68038 - RNA, 20 nt, Artificial Sequence
  Synthetic
auuuucuuccuuggaggcgu

SEQ ID NO: 68039 - RNA, 21 nt, Artificial Sequence
  Synthetic
aauuuucuuccuuggaggcgu

SEQ ID NO: 68040 - RNA, 22 nt, Artificial Sequence
  Synthetic
aaauuuucuuccuuggaggcgu

SEQ ID NO: 68041 - RNA, 23 nt, Artificial Sequence
  Synthetic
uaaauuuucuuccuuggaggcgu

SEQ ID NO: 68042 - RNA, 24 nt, Artificial Sequence
  Synthetic
uuaaauuuucuuccuuggaggcgu

SEQ ID NO: 68043 - RNA, 21 nt, Artificial Sequence
  Synthetic
aggguuguuuugugguugcgu

SEQ ID NO: 68044 - RNA, 22 nt, Artificial Sequence
  Synthetic
uaggguuguuuugugguugcgu

SEQ ID NO: 68045 - RNA, 24 nt, Artificial Sequence
  Synthetic
uguaggguuguuuugugguugcgu

SEQ ID NO: 68046 - RNA, 18 nt, Artificial Sequence
  Synthetic
uuucuuaauuuaaaucgu

SEQ ID NO: 68047 - RNA, 19 nt, Artificial Sequence
  Synthetic
cuuucuuaauuuaaaucgu

SEQ ID NO: 68048 - RNA, 20 nt, Artificial Sequence
  Synthetic
acuuucuuaauuuaaaucgu

SEQ ID NO: 68049 - RNA, 21 nt, Artificial Sequence
  Synthetic
uacuuucuuaauuuaaaucgu

SEQ ID NO: 68050 - RNA, 23 nt, Artificial Sequence
  Synthetic
aguacuuucuuaauuuaaaucgu

SEQ ID NO: 68051 - RNA, 24 nt, Artificial Sequence
  Synthetic
aaguacuuucuuaauuuaaaucgu

SEQ ID NO: 68052 - RNA, 20 nt, Artificial Sequence
  Synthetic
agggaaccaaacccacucgu

SEQ ID NO: 68053 - RNA, 21 nt, Artificial Sequence
  Synthetic
aagggaaccaaacccacucgu

SEQ ID NO: 68054 - RNA, 22 nt, Artificial Sequence
  Synthetic
uaagggaaccaaacccacucgu

SEQ ID NO: 68055 - RNA, 23 nt, Artificial Sequence
  Synthetic
auaagggaaccaaacccacucgu

SEQ ID NO: 68056 - RNA, 24 nt, Artificial Sequence
  Synthetic
uauaagggaaccaaacccacucgu

SEQ ID NO: 68057 - RNA, 18 nt, Artificial Sequence
  Synthetic
uugcugugccccacucgu

SEQ ID NO: 68058 - RNA, 19 nt, Artificial Sequence
  Synthetic
auugcugugccccacucgu

SEQ ID NO: 68059 - RNA, 21 nt, Artificial Sequence
  Synthetic
ugauugcugugccccacucgu

SEQ ID NO: 68060 - RNA, 22 nt, Artificial Sequence
  Synthetic
cugauugcugugccccacucgu

SEQ ID NO: 68061 - RNA, 23 nt, Artificial Sequence
  Synthetic
acugauugcugugccccacucgu

SEQ ID NO: 68062 - RNA, 24 nt, Artificial Sequence
  Synthetic
uacugauugcugugccccacucgu

SEQ ID NO: 68063 - RNA, 18 nt, Artificial Sequence
  Synthetic
aaaccucuuccaccucgu

SEQ ID NO: 68064 - RNA, 19 nt, Artificial Sequence
  Synthetic
aaaaccucuuccaccucgu

SEQ ID NO: 68065 - RNA, 21 nt, Artificial Sequence
  Synthetic
agaaaaccucuuccaccucgu

SEQ ID NO: 68066 - RNA, 23 nt, Artificial Sequence
  Synthetic
agagaaaaccucuuccaccucgu

SEQ ID NO: 68067 - RNA, 18 nt, Artificial Sequence
  Synthetic
aagaauguugacuuucgu

SEQ ID NO: 68068 - RNA, 19 nt, Artificial Sequence
  Synthetic
aaagaauguugacuuucgu

SEQ ID NO: 68069 - RNA, 20 nt, Artificial Sequence
  Synthetic
uaaagaauguugacuuucgu

SEQ ID NO: 68070 - RNA, 21 nt, Artificial Sequence
  Synthetic
uuaaagaauguugacuuucgu

SEQ ID NO: 68071 - RNA, 22 nt, Artificial Sequence
  Synthetic
auuaaagaauguugacuuucgu

SEQ ID NO: 68072 - RNA, 23 nt, Artificial Sequence
  Synthetic
uauuaaagaauguugacuuucgu

SEQ ID NO: 68073 - RNA, 24 nt, Artificial Sequence
  Synthetic
auauuaaagaauguugacuuucgu

SEQ ID NO: 68074 - RNA, 18 nt, Artificial Sequence
  Synthetic
acuuugugugucuuucgu

SEQ ID NO: 68075 - RNA, 19 nt, Artificial Sequence
  Synthetic
cacuuugugugucuuucgu

SEQ ID NO: 68076 - RNA, 20 nt, Artificial Sequence
  Synthetic
acacuuugugugucuuucgu

SEQ ID NO: 68077 - RNA, 21 nt, Artificial Sequence
  Synthetic
uacacuuugugugucuuucgu

SEQ ID NO: 68078 - RNA, 22 nt, Artificial Sequence
  Synthetic
uuacacuuugugugucuuucgu

SEQ ID NO: 68079 - RNA, 18 nt, Artificial Sequence
  Synthetic
uguaaaaugacaaaaggu

SEQ ID NO: 68080 - RNA, 19 nt, Artificial Sequence
  Synthetic
uuguaaaaugacaaaaggu

SEQ ID NO: 68081 - RNA, 22 nt, Artificial Sequence
  Synthetic
agguuguaaaaugacaaaaggu

SEQ ID NO: 68082 - RNA, 23 nt, Artificial Sequence
  Synthetic
aagguuguaaaaugacaaaaggu

SEQ ID NO: 68083 - RNA, 24 nt, Artificial Sequence
  Synthetic
aaagguuguaaaaugacaaaaggu

SEQ ID NO: 68084 - RNA, 18 nt, Artificial Sequence
  Synthetic
caaggcaaaugaaaaggu

SEQ ID NO: 68085 - RNA, 19 nt, Artificial Sequence
  Synthetic
acaaggcaaaugaaaaggu

SEQ ID NO: 68086 - RNA, 22 nt, Artificial Sequence
  Synthetic
uggacaaggcaaaugaaaaggu

SEQ ID NO: 68087 - RNA, 23 nt, Artificial Sequence
  Synthetic
auggacaaggcaaaugaaaaggu

SEQ ID NO: 68088 - RNA, 24 nt, Artificial Sequence
  Synthetic
cauggacaaggcaaaugaaaaggu

SEQ ID NO: 68089 - RNA, 19 nt, Artificial Sequence
  Synthetic
agaagcauucauaaaaggu

SEQ ID NO: 68090 - RNA, 22 nt, Artificial Sequence
  Synthetic
uggagaagcauucauaaaaggu

SEQ ID NO: 68091 - RNA, 23 nt, Artificial Sequence
  Synthetic
uuggagaagcauucauaaaaggu

SEQ ID NO: 68092 - RNA, 24 nt, Artificial Sequence
  Synthetic
cuuggagaagcauucauaaaaggu

SEQ ID NO: 68093 - RNA, 18 nt, Artificial Sequence
  Synthetic
uacccuucauccaaaggu

SEQ ID NO: 68094 - RNA, 19 nt, Artificial Sequence
  Synthetic
cuacccuucauccaaaggu

SEQ ID NO: 68095 - RNA, 20 nt, Artificial Sequence
  Synthetic
ccuacccuucauccaaaggu

SEQ ID NO: 68096 - RNA, 21 nt, Artificial Sequence
  Synthetic
cccuacccuucauccaaaggu

SEQ ID NO: 68097 - RNA, 23 nt, Artificial Sequence
  Synthetic
agcccuacccuucauccaaaggu

SEQ ID NO: 68098 - RNA, 24 nt, Artificial Sequence
  Synthetic
cagcccuacccuucauccaaaggu

SEQ ID NO: 68099 - RNA, 18 nt, Artificial Sequence
  Synthetic
uaguaacuguugaaaggu

SEQ ID NO: 68100 - RNA, 20 nt, Artificial Sequence
  Synthetic
aguaguaacuguugaaaggu

SEQ ID NO: 68101 - RNA, 22 nt, Artificial Sequence
  Synthetic
agaguaguaacuguugaaaggu

SEQ ID NO: 68102 - RNA, 23 nt, Artificial Sequence
  Synthetic
cagaguaguaacuguugaaaggu

SEQ ID NO: 68103 - RNA, 24 nt, Artificial Sequence
  Synthetic
ucagaguaguaacuguugaaaggu

SEQ ID NO: 68104 - RNA, 18 nt, Artificial Sequence
  Synthetic
auaugaauaacuaaaggu

SEQ ID NO: 68105 - RNA, 19 nt, Artificial Sequence
  Synthetic
aauaugaauaacuaaaggu

SEQ ID NO: 68106 - RNA, 20 nt, Artificial Sequence
  Synthetic
aaauaugaauaacuaaaggu

SEQ ID NO: 68107 - RNA, 21 nt, Artificial Sequence
  Synthetic
aaaauaugaauaacuaaaggu

SEQ ID NO: 68108 - RNA, 22 nt, Artificial Sequence
  Synthetic
uaaaauaugaauaacuaaaggu

SEQ ID NO: 68109 - RNA, 23 nt, Artificial Sequence
  Synthetic
cuaaaauaugaauaacuaaaggu

SEQ ID NO: 68110 - RNA, 24 nt, Artificial Sequence
  Synthetic
acuaaaauaugaauaacuaaaggu

SEQ ID NO: 68111 - RNA, 21 nt, Artificial Sequence
  Synthetic
auauaaaucuuuuuuaaaggu

SEQ ID NO: 68112 - RNA, 22 nt, Artificial Sequence
  Synthetic
aauauaaaucuuuuuuaaaggu

SEQ ID NO: 68113 - RNA, 23 nt, Artificial Sequence
  Synthetic
aaauauaaaucuuuuuuaaaggu

SEQ ID NO: 68114 - RNA, 18 nt, Artificial Sequence
  Synthetic
caugcaaacauucaaggu

SEQ ID NO: 68115 - RNA, 19 nt, Artificial Sequence
  Synthetic
ccaugcaaacauucaaggu

SEQ ID NO: 68116 - RNA, 20 nt, Artificial Sequence
  Synthetic
accaugcaaacauucaaggu

SEQ ID NO: 68117 - RNA, 23 nt, Artificial Sequence
  Synthetic
aggaccaugcaaacauucaaggu

SEQ ID NO: 68118 - RNA, 18 nt, Artificial Sequence
  Synthetic
cucugggagguagaaggu

SEQ ID NO: 68119 - RNA, 20 nt, Artificial Sequence
  Synthetic
agcucugggagguagaaggu

SEQ ID NO: 68120 - RNA, 21 nt, Artificial Sequence
  Synthetic
cagcucugggagguagaaggu

SEQ ID NO: 68121 - RNA, 22 nt, Artificial Sequence
  Synthetic
ucagcucugggagguagaaggu

SEQ ID NO: 68122 - RNA, 23 nt, Artificial Sequence
  Synthetic
aucagcucugggagguagaaggu

SEQ ID NO: 68123 - RNA, 24 nt, Artificial Sequence
  Synthetic
caucagcucugggagguagaaggu

SEQ ID NO: 68124 - RNA, 18 nt, Artificial Sequence
  Synthetic
cacaauugauucuaaggu

SEQ ID NO: 68125 - RNA, 19 nt, Artificial Sequence
  Synthetic
ccacaauugauucuaaggu

SEQ ID NO: 68126 - RNA, 20 nt, Artificial Sequence
  Synthetic
uccacaauugauucuaaggu

SEQ ID NO: 68127 - RNA, 21 nt, Artificial Sequence
  Synthetic
uuccacaauugauucuaaggu

SEQ ID NO: 68128 - RNA, 22 nt, Artificial Sequence
  Synthetic
cuuccacaauugauucuaaggu

SEQ ID NO: 68129 - RNA, 23 nt, Artificial Sequence
  Synthetic
ucuuccacaauugauucuaaggu

SEQ ID NO: 68130 - RNA, 24 nt, Artificial Sequence
  Synthetic
uucuuccacaauugauucuaaggu

SEQ ID NO: 68131 - RNA, 18 nt, Artificial Sequence
  Synthetic
augacugaaugcacaggu

SEQ ID NO: 68132 - RNA, 19 nt, Artificial Sequence
  Synthetic
uaugacugaaugcacaggu

SEQ ID NO: 68133 - RNA, 21 nt, Artificial Sequence
  Synthetic
aguaugacugaaugcacaggu

SEQ ID NO: 68134 - RNA, 23 nt, Artificial Sequence
  Synthetic
agaguaugacugaaugcacaggu

SEQ ID NO: 68135 - RNA, 24 nt, Artificial Sequence
  Synthetic
uagaguaugacugaaugcacaggu

SEQ ID NO: 68136 - RNA, 18 nt, Artificial Sequence
  Synthetic
ccucugcccccaccaggu

SEQ ID NO: 68137 - RNA, 19 nt, Artificial Sequence
  Synthetic
accucugcccccaccaggu

SEQ ID NO: 68138 - RNA, 20 nt, Artificial Sequence
  Synthetic
aaccucugcccccaccaggu

SEQ ID NO: 68139 - RNA, 21 nt, Artificial Sequence
  Synthetic
uaaccucugcccccaccaggu

SEQ ID NO: 68140 - RNA, 23 nt, Artificial Sequence
  Synthetic
uguaaccucugcccccaccaggu

SEQ ID NO: 68141 - RNA, 24 nt, Artificial Sequence
  Synthetic
cuguaaccucugcccccaccaggu

SEQ ID NO: 68142 - RNA, 18 nt, Artificial Sequence
  Synthetic
cggagauugcuuccaggu

SEQ ID NO: 68143 - RNA, 21 nt, Artificial Sequence
  Synthetic
uggcggagauugcuuccaggu

SEQ ID NO: 68144 - RNA, 22 nt, Artificial Sequence
  Synthetic
uuggcggagauugcuuccaggu

SEQ ID NO: 68145 - RNA, 23 nt, Artificial Sequence
  Synthetic
cuuggcggagauugcuuccaggu

SEQ ID NO: 68146 - RNA, 18 nt, Artificial Sequence
  Synthetic
aaucagcucaaagcaggu

SEQ ID NO: 68147 - RNA, 19 nt, Artificial Sequence
  Synthetic
caaucagcucaaagcaggu

SEQ ID NO: 68148 - RNA, 20 nt, Artificial Sequence
  Synthetic
ccaaucagcucaaagcaggu

SEQ ID NO: 68149 - RNA, 21 nt, Artificial Sequence
  Synthetic
accaaucagcucaaagcaggu

SEQ ID NO: 68150 - RNA, 22 nt, Artificial Sequence
  Synthetic
aaccaaucagcucaaagcaggu

SEQ ID NO: 68151 - RNA, 23 nt, Artificial Sequence
  Synthetic
caaccaaucagcucaaagcaggu

SEQ ID NO: 68152 - RNA, 24 nt, Artificial Sequence
  Synthetic
ucaaccaaucagcucaaagcaggu

SEQ ID NO: 68153 - RNA, 18 nt, Artificial Sequence
  Synthetic
caaagagauggagcaggu

SEQ ID NO: 68154 - RNA, 19 nt, Artificial Sequence
  Synthetic
acaaagagauggagcaggu

SEQ ID NO: 68155 - RNA, 22 nt, Artificial Sequence
  Synthetic
uggacaaagagauggagcaggu

SEQ ID NO: 68156 - RNA, 23 nt, Artificial Sequence
  Synthetic
auggacaaagagauggagcaggu

SEQ ID NO: 68157 - RNA, 18 nt, Artificial Sequence
  Synthetic
aaaacguaugaugcaggu

SEQ ID NO: 68158 - RNA, 20 nt, Artificial Sequence
  Synthetic
cgaaaacguaugaugcaggu

SEQ ID NO: 68159 - RNA, 21 nt, Artificial Sequence
  Synthetic
ucgaaaacguaugaugcaggu

SEQ ID NO: 68160 - RNA, 22 nt, Artificial Sequence
  Synthetic
cucgaaaacguaugaugcaggu

SEQ ID NO: 68161 - RNA, 23 nt, Artificial Sequence
  Synthetic
ucucgaaaacguaugaugcaggu

SEQ ID NO: 68162 - RNA, 24 nt, Artificial Sequence
  Synthetic
cucucgaaaacguaugaugcaggu

SEQ ID NO: 68163 - RNA, 18 nt, Artificial Sequence
  Synthetic
aaggaaagcagaagaggu

SEQ ID NO: 68164 - RNA, 19 nt, Artificial Sequence
  Synthetic
aaaggaaagcagaagaggu

SEQ ID NO: 68165 - RNA, 20 nt, Artificial Sequence
  Synthetic
caaaggaaagcagaagaggu

SEQ ID NO: 68166 - RNA, 22 nt, Artificial Sequence
  Synthetic
agcaaaggaaagcagaagaggu

SEQ ID NO: 68167 - RNA, 23 nt, Artificial Sequence
  Synthetic
cagcaaaggaaagcagaagaggu

SEQ ID NO: 68168 - RNA, 24 nt, Artificial Sequence
  Synthetic
ccagcaaaggaaagcagaagaggu

SEQ ID NO: 68169 - RNA, 18 nt, Artificial Sequence
  Synthetic
uccauuaagagaagaggu

SEQ ID NO: 68170 - RNA, 19 nt, Artificial Sequence
  Synthetic
auccauuaagagaagaggu

SEQ ID NO: 68171 - RNA, 20 nt, Artificial Sequence
  Synthetic
uauccauuaagagaagaggu

SEQ ID NO: 68172 - RNA, 21 nt, Artificial Sequence
  Synthetic
uuauccauuaagagaagaggu

SEQ ID NO: 68173 - RNA, 22 nt, Artificial Sequence
  Synthetic
auuauccauuaagagaagaggu

SEQ ID NO: 68174 - RNA, 23 nt, Artificial Sequence
  Synthetic
aauuauccauuaagagaagaggu

SEQ ID NO: 68175 - RNA, 24 nt, Artificial Sequence
  Synthetic
uaauuauccauuaagagaagaggu

SEQ ID NO: 68176 - RNA, 19 nt, Artificial Sequence
  Synthetic
agcauggcacggaagaggu

SEQ ID NO: 68177 - RNA, 22 nt, Artificial Sequence
  Synthetic
uggagcauggcacggaagaggu

SEQ ID NO: 68178 - RNA, 23 nt, Artificial Sequence
  Synthetic
uuggagcauggcacggaagaggu

SEQ ID NO: 68179 - RNA, 24 nt, Artificial Sequence
  Synthetic
cuuggagcauggcacggaagaggu

SEQ ID NO: 68180 - RNA, 18 nt, Artificial Sequence
  Synthetic
aauuugugucugagaggu

SEQ ID NO: 68181 - RNA, 19 nt, Artificial Sequence
  Synthetic
uaauuugugucugagaggu

SEQ ID NO: 68182 - RNA, 20 nt, Artificial Sequence
  Synthetic
auaauuugugucugagaggu

SEQ ID NO: 68183 - RNA, 21 nt, Artificial Sequence
  Synthetic
uauaauuugugucugagaggu

SEQ ID NO: 68184 - RNA, 22 nt, Artificial Sequence
  Synthetic
auauaauuugugucugagaggu

SEQ ID NO: 68185 - RNA, 23 nt, Artificial Sequence
  Synthetic
aauauaauuugugucugagaggu

SEQ ID NO: 68186 - RNA, 24 nt, Artificial Sequence
  Synthetic
uaauauaauuugugucugagaggu

SEQ ID NO: 68187 - RNA, 19 nt, Artificial Sequence
  Synthetic
agugcuugcuauuagaggu

SEQ ID NO: 68188 - RNA, 24 nt, Artificial Sequence
  Synthetic
uggggagugcuugcuauuagaggu

SEQ ID NO: 68189 - RNA, 18 nt, Artificial Sequence
  Synthetic
uaaaauguaguaggaggu

SEQ ID NO: 68190 - RNA, 19 nt, Artificial Sequence
  Synthetic
uuaaaauguaguaggaggu

SEQ ID NO: 68191 - RNA, 22 nt, Artificial Sequence
  Synthetic
agguuaaaauguaguaggaggu

SEQ ID NO: 68192 - RNA, 23 nt, Artificial Sequence
  Synthetic
uagguuaaaauguaguaggaggu

SEQ ID NO: 68193 - RNA, 18 nt, Artificial Sequence
  Synthetic
uagcugcaacaaugaggu

SEQ ID NO: 68194 - RNA, 19 nt, Artificial Sequence
  Synthetic
uuagcugcaacaaugaggu

SEQ ID NO: 68195 - RNA, 20 nt, Artificial Sequence
  Synthetic
uuuagcugcaacaaugaggu

SEQ ID NO: 68196 - RNA, 21 nt, Artificial Sequence
  Synthetic
auuuagcugcaacaaugaggu

SEQ ID NO: 68197 - RNA, 23 nt, Artificial Sequence
  Synthetic
agauuuagcugcaacaaugaggu

SEQ ID NO: 68198 - RNA, 24 nt, Artificial Sequence
  Synthetic
uagauuuagcugcaacaaugaggu

SEQ ID NO: 68199 - RNA, 21 nt, Artificial Sequence
  Synthetic
ugguacuuggaaugcugaggu

SEQ ID NO: 68200 - RNA, 22 nt, Artificial Sequence
  Synthetic
uugguacuuggaaugcugaggu

SEQ ID NO: 68201 - RNA, 23 nt, Artificial Sequence
  Synthetic
uuugguacuuggaaugcugaggu

SEQ ID NO: 68202 - RNA, 24 nt, Artificial Sequence
  Synthetic
cuuugguacuuggaaugcugaggu

SEQ ID NO: 68203 - RNA, 18 nt, Artificial Sequence
  Synthetic
uguauguaucagugaggu

SEQ ID NO: 68204 - RNA, 19 nt, Artificial Sequence
  Synthetic
uuguauguaucagugaggu

SEQ ID NO: 68205 - RNA, 20 nt, Artificial Sequence
  Synthetic
uuuguauguaucagugaggu

SEQ ID NO: 68206 - RNA, 21 nt, Artificial Sequence
  Synthetic
auuuguauguaucagugaggu

SEQ ID NO: 68207 - RNA, 22 nt, Artificial Sequence
  Synthetic
uauuuguauguaucagugaggu

SEQ ID NO: 68208 - RNA, 23 nt, Artificial Sequence
  Synthetic
auauuuguauguaucagugaggu

SEQ ID NO: 68209 - RNA, 24 nt, Artificial Sequence
  Synthetic
cauauuuguauguaucagugaggu

SEQ ID NO: 68210 - RNA, 18 nt, Artificial Sequence
  Synthetic
agagaauguuagugaggu

SEQ ID NO: 68211 - RNA, 21 nt, Artificial Sequence
  Synthetic
aggagagaauguuagugaggu

SEQ ID NO: 68212 - RNA, 22 nt, Artificial Sequence
  Synthetic
uaggagagaauguuagugaggu

SEQ ID NO: 68213 - RNA, 23 nt, Artificial Sequence
  Synthetic
uuaggagagaauguuagugaggu

SEQ ID NO: 68214 - RNA, 24 nt, Artificial Sequence
  Synthetic
uuuaggagagaauguuagugaggu

SEQ ID NO: 68215 - RNA, 18 nt, Artificial Sequence
  Synthetic
uagaaggguaugugaggu

SEQ ID NO: 68216 - RNA, 19 nt, Artificial Sequence
  Synthetic
uuagaaggguaugugaggu

SEQ ID NO: 68217 - RNA, 20 nt, Artificial Sequence
  Synthetic
uuuagaaggguaugugaggu

SEQ ID NO: 68218 - RNA, 23 nt, Artificial Sequence
  Synthetic
ugguuuagaaggguaugugaggu

SEQ ID NO: 68219 - RNA, 24 nt, Artificial Sequence
  Synthetic
augguuuagaaggguaugugaggu

SEQ ID NO: 68220 - RNA, 20 nt, Artificial Sequence
  Synthetic
aggaauccuuagcuugaggu

SEQ ID NO: 68221 - RNA, 23 nt, Artificial Sequence
  Synthetic
aggaggaauccuuagcuugaggu

SEQ ID NO: 68222 - RNA, 18 nt, Artificial Sequence
  Synthetic
acacuaguaguuugaggu

SEQ ID NO: 68223 - RNA, 19 nt, Artificial Sequence
  Synthetic
cacacuaguaguuugaggu

SEQ ID NO: 68224 - RNA, 20 nt, Artificial Sequence
  Synthetic
ccacacuaguaguuugaggu

SEQ ID NO: 68225 - RNA, 21 nt, Artificial Sequence
  Synthetic
cccacacuaguaguuugaggu

SEQ ID NO: 68226 - RNA, 22 nt, Artificial Sequence
  Synthetic
acccacacuaguaguuugaggu

SEQ ID NO: 68227 - RNA, 24 nt, Artificial Sequence
  Synthetic
ugacccacacuaguaguuugaggu

SEQ ID NO: 68228 - RNA, 18 nt, Artificial Sequence
  Synthetic
acgugacauucuauaggu

SEQ ID NO: 68229 - RNA, 19 nt, Artificial Sequence
  Synthetic
aacgugacauucuauaggu

SEQ ID NO: 68230 - RNA, 21 nt, Artificial Sequence
  Synthetic
ugaacgugacauucuauaggu

SEQ ID NO: 68231 - RNA, 22 nt, Artificial Sequence
  Synthetic
augaacgugacauucuauaggu

SEQ ID NO: 68232 - RNA, 23 nt, Artificial Sequence
  Synthetic
aaugaacgugacauucuauaggu

SEQ ID NO: 68233 - RNA, 24 nt, Artificial Sequence
  Synthetic
aaaugaacgugacauucuauaggu

SEQ ID NO: 68234 - RNA, 18 nt, Artificial Sequence
  Synthetic
ugaaaacaaucaguaggu

SEQ ID NO: 68235 - RNA, 19 nt, Artificial Sequence
  Synthetic
uugaaaacaaucaguaggu

SEQ ID NO: 68236 - RNA, 20 nt, Artificial Sequence
  Synthetic
uuugaaaacaaucaguaggu

SEQ ID NO: 68237 - RNA, 21 nt, Artificial Sequence
  Synthetic
auuugaaaacaaucaguaggu

SEQ ID NO: 68238 - RNA, 22 nt, Artificial Sequence
  Synthetic
cauuugaaaacaaucaguaggu

SEQ ID NO: 68239 - RNA, 23 nt, Artificial Sequence
  Synthetic
acauuugaaaacaaucaguaggu

SEQ ID NO: 68240 - RNA, 24 nt, Artificial Sequence
  Synthetic
uacauuugaaaacaaucaguaggu

SEQ ID NO: 68241 - RNA, 22 nt, Artificial Sequence
  Synthetic
agaugaaagugaauauguaggu

SEQ ID NO: 68242 - RNA, 23 nt, Artificial Sequence
  Synthetic
aagaugaaagugaauauguaggu

SEQ ID NO: 68243 - RNA, 24 nt, Artificial Sequence
  Synthetic
aaagaugaaagugaauauguaggu

SEQ ID NO: 68244 - RNA, 21 nt, Artificial Sequence
  Synthetic
ucacucauagguucuguaggu

SEQ ID NO: 68245 - RNA, 22 nt, Artificial Sequence
  Synthetic
aucacucauagguucuguaggu

SEQ ID NO: 68246 - RNA, 23 nt, Artificial Sequence
  Synthetic
uaucacucauagguucuguaggu

SEQ ID NO: 68247 - RNA, 24 nt, Artificial Sequence
  Synthetic
uuaucacucauagguucuguaggu

SEQ ID NO: 68248 - RNA, 18 nt, Artificial Sequence
  Synthetic
auaggguauauuuuaggu

SEQ ID NO: 68249 - RNA, 20 nt, Artificial Sequence
  Synthetic
ugauaggguauauuuuaggu

SEQ ID NO: 68250 - RNA, 21 nt, Artificial Sequence
  Synthetic
uugauaggguauauuuuaggu

SEQ ID NO: 68251 - RNA, 22 nt, Artificial Sequence
  Synthetic
cuugauaggguauauuuuaggu

SEQ ID NO: 68252 - RNA, 24 nt, Artificial Sequence
  Synthetic
ugcuugauaggguauauuuuaggu

SEQ ID NO: 68253 - RNA, 18 nt, Artificial Sequence
  Synthetic
aaaucaugacuuuuaggu

SEQ ID NO: 68254 - RNA, 19 nt, Artificial Sequence
  Synthetic
caaaucaugacuuuuaggu

SEQ ID NO: 68255 - RNA, 20 nt, Artificial Sequence
  Synthetic
ucaaaucaugacuuuuaggu

SEQ ID NO: 68256 - RNA, 23 nt, Artificial Sequence
  Synthetic
aggucaaaucaugacuuuuaggu

SEQ ID NO: 68257 - RNA, 24 nt, Artificial Sequence
  Synthetic
aaggucaaaucaugacuuuuaggu

SEQ ID NO: 68258 - RNA, 20 nt, Artificial Sequence
  Synthetic
ugguuauaaguugagacggu

SEQ ID NO: 68259 - RNA, 21 nt, Artificial Sequence
  Synthetic
uugguuauaaguugagacggu

SEQ ID NO: 68260 - RNA, 22 nt, Artificial Sequence
  Synthetic
uuugguuauaaguugagacggu

SEQ ID NO: 68261 - RNA, 23 nt, Artificial Sequence
  Synthetic
uuuugguuauaaguugagacggu

SEQ ID NO: 68262 - RNA, 24 nt, Artificial Sequence
  Synthetic
uuuuugguuauaaguugagacggu

SEQ ID NO: 68263 - RNA, 18 nt, Artificial Sequence
  Synthetic
uuguaugaugaugacggu

SEQ ID NO: 68264 - RNA, 19 nt, Artificial Sequence
  Synthetic
uuuguaugaugaugacggu

SEQ ID NO: 68265 - RNA, 20 nt, Artificial Sequence
  Synthetic
cuuuguaugaugaugacggu

SEQ ID NO: 68266 - RNA, 21 nt, Artificial Sequence
  Synthetic
ccuuuguaugaugaugacggu

SEQ ID NO: 68267 - RNA, 22 nt, Artificial Sequence
  Synthetic
accuuuguaugaugaugacggu

SEQ ID NO: 68268 - RNA, 24 nt, Artificial Sequence
  Synthetic
agaccuuuguaugaugaugacggu

SEQ ID NO: 68269 - RNA, 18 nt, Artificial Sequence
  Synthetic
aaaccagcggauuacggu

SEQ ID NO: 68270 - RNA, 19 nt, Artificial Sequence
  Synthetic
uaaaccagcggauuacggu

SEQ ID NO: 68271 - RNA, 20 nt, Artificial Sequence
  Synthetic
auaaaccagcggauuacggu

SEQ ID NO: 68272 - RNA, 21 nt, Artificial Sequence
  Synthetic
aauaaaccagcggauuacggu

SEQ ID NO: 68273 - RNA, 24 nt, Artificial Sequence
  Synthetic
uggaauaaaccagcggauuacggu

SEQ ID NO: 68274 - RNA, 18 nt, Artificial Sequence
  Synthetic
aaaauaagaauacucggu

SEQ ID NO: 68275 - RNA, 20 nt, Artificial Sequence
  Synthetic
ugaaaauaagaauacucggu

SEQ ID NO: 68276 - RNA, 19 nt, Artificial Sequence
  Synthetic
agaagcuuaacuuuucggu

SEQ ID NO: 68277 - RNA, 20 nt, Artificial Sequence
  Synthetic
uagaagcuuaacuuuucggu

SEQ ID NO: 68278 - RNA, 24 nt, Artificial Sequence
  Synthetic
aggguagaagcuuaacuuuucggu

SEQ ID NO: 68279 - RNA, 20 nt, Artificial Sequence
  Synthetic
cgggaaagauguucaagggu

SEQ ID NO: 68280 - RNA, 21 nt, Artificial Sequence
  Synthetic
acgggaaagauguucaagggu

SEQ ID NO: 68281 - RNA, 23 nt, Artificial Sequence
  Synthetic
agacgggaaagauguucaagggu

SEQ ID NO: 68282 - RNA, 24 nt, Artificial Sequence
  Synthetic
aagacgggaaagauguucaagggu

SEQ ID NO: 68283 - RNA, 18 nt, Artificial Sequence
  Synthetic
uaacacacaugccagggu

SEQ ID NO: 68284 - RNA, 19 nt, Artificial Sequence
  Synthetic
auaacacacaugccagggu

SEQ ID NO: 68285 - RNA, 20 nt, Artificial Sequence
  Synthetic
uauaacacacaugccagggu

SEQ ID NO: 68286 - RNA, 22 nt, Artificial Sequence
  Synthetic
aguauaacacacaugccagggu

SEQ ID NO: 68287 - RNA, 24 nt, Artificial Sequence
  Synthetic
ugaguauaacacacaugccagggu

SEQ ID NO: 68288 - RNA, 18 nt, Artificial Sequence
  Synthetic
cauucuugcugccagggu

SEQ ID NO: 68289 - RNA, 19 nt, Artificial Sequence
  Synthetic
ccauucuugcugccagggu

SEQ ID NO: 68290 - RNA, 20 nt, Artificial Sequence
  Synthetic
uccauucuugcugccagggu

SEQ ID NO: 68291 - RNA, 21 nt, Artificial Sequence
  Synthetic
auccauucuugcugccagggu

SEQ ID NO: 68292 - RNA, 22 nt, Artificial Sequence
  Synthetic
cauccauucuugcugccagggu

SEQ ID NO: 68293 - RNA, 23 nt, Artificial Sequence
  Synthetic
ccauccauucuugcugccagggu

SEQ ID NO: 68294 - RNA, 24 nt, Artificial Sequence
  Synthetic
cccauccauucuugcugccagggu

SEQ ID NO: 68295 - RNA, 18 nt, Artificial Sequence
  Synthetic
ugguagcaggaggagggu

SEQ ID NO: 68296 - RNA, 20 nt, Artificial Sequence
  Synthetic
ugugguagcaggaggagggu

SEQ ID NO: 68297 - RNA, 21 nt, Artificial Sequence
  Synthetic
cugugguagcaggaggagggu

SEQ ID NO: 68298 - RNA, 22 nt, Artificial Sequence
  Synthetic
acugugguagcaggaggagggu

SEQ ID NO: 68299 - RNA, 24 nt, Artificial Sequence
  Synthetic
agacugugguagcaggaggagggu

SEQ ID NO: 68300 - RNA, 19 nt, Artificial Sequence
  Synthetic
aggcaagcuauuuucgggu

SEQ ID NO: 68301 - RNA, 20 nt, Artificial Sequence
  Synthetic
uaggcaagcuauuuucgggu

SEQ ID NO: 68302 - RNA, 24 nt, Artificial Sequence
  Synthetic
uggguaggcaagcuauuuucgggu

SEQ ID NO: 68303 - RNA, 18 nt, Artificial Sequence
  Synthetic
uaaagacaaugugggggu

SEQ ID NO: 68304 - RNA, 20 nt, Artificial Sequence
  Synthetic
uguaaagacaaugugggggu

SEQ ID NO: 68305 - RNA, 21 nt, Artificial Sequence
  Synthetic
uuguaaagacaaugugggggu

SEQ ID NO: 68306 - RNA, 22 nt, Artificial Sequence
  Synthetic
cuuguaaagacaaugugggggu

SEQ ID NO: 68307 - RNA, 24 nt, Artificial Sequence
  Synthetic
agcuuguaaagacaaugugggggu

SEQ ID NO: 68308 - RNA, 18 nt, Artificial Sequence
  Synthetic
caggcaaggcccuggggu

SEQ ID NO: 68309 - RNA, 19 nt, Artificial Sequence
  Synthetic
ucaggcaaggcccuggggu

SEQ ID NO: 68310 - RNA, 20 nt, Artificial Sequence
  Synthetic
cucaggcaaggcccuggggu

SEQ ID NO: 68311 - RNA, 22 nt, Artificial Sequence
  Synthetic
agcucaggcaaggcccuggggu

SEQ ID NO: 68312 - RNA, 23 nt, Artificial Sequence
  Synthetic
cagcucaggcaaggcccuggggu

SEQ ID NO: 68313 - RNA, 24 nt, Artificial Sequence
  Synthetic
ucagcucaggcaaggcccuggggu

SEQ ID NO: 68314 - RNA, 19 nt, Artificial Sequence
  Synthetic
aggugguugcuucuggggu

SEQ ID NO: 68315 - RNA, 20 nt, Artificial Sequence
  Synthetic
caggugguugcuucuggggu

SEQ ID NO: 68316 - RNA, 21 nt, Artificial Sequence
  Synthetic
ucaggugguugcuucuggggu

SEQ ID NO: 68317 - RNA, 22 nt, Artificial Sequence
  Synthetic
cucaggugguugcuucuggggu

SEQ ID NO: 68318 - RNA, 23 nt, Artificial Sequence
  Synthetic
ccucaggugguugcuucuggggu

SEQ ID NO: 68319 - RNA, 24 nt, Artificial Sequence
  Synthetic
accucaggugguugcuucuggggu

SEQ ID NO: 68320 - RNA, 18 nt, Artificial Sequence
  Synthetic
uuagagaaucaguggggu

SEQ ID NO: 68321 - RNA, 19 nt, Artificial Sequence
  Synthetic
auuagagaaucaguggggu

SEQ ID NO: 68322 - RNA, 21 nt, Artificial Sequence
  Synthetic
ugauuagagaaucaguggggu

SEQ ID NO: 68323 - RNA, 23 nt, Artificial Sequence
  Synthetic
agugauuagagaaucaguggggu

SEQ ID NO: 68324 - RNA, 24 nt, Artificial Sequence
  Synthetic
aagugauuagagaaucaguggggu

SEQ ID NO: 68325 - RNA, 18 nt, Artificial Sequence
  Synthetic
ucuggucccauguggggu

SEQ ID NO: 68326 - RNA, 19 nt, Artificial Sequence
  Synthetic
aucuggucccauguggggu

SEQ ID NO: 68327 - RNA, 20 nt, Artificial Sequence
  Synthetic
uaucuggucccauguggggu

SEQ ID NO: 68328 - RNA, 21 nt, Artificial Sequence
  Synthetic
uuaucuggucccauguggggu

SEQ ID NO: 68329 - RNA, 22 nt, Artificial Sequence
  Synthetic
cuuaucuggucccauguggggu

SEQ ID NO: 68330 - RNA, 23 nt, Artificial Sequence
  Synthetic
ucuuaucuggucccauguggggu

SEQ ID NO: 68331 - RNA, 24 nt, Artificial Sequence
  Synthetic
aucuuaucuggucccauguggggu

SEQ ID NO: 68332 - RNA, 21 nt, Artificial Sequence
  Synthetic
aaaucaagaaccucuuggggu

SEQ ID NO: 68333 - RNA, 22 nt, Artificial Sequence
  Synthetic
uaaaucaagaaccucuuggggu

SEQ ID NO: 68334 - RNA, 23 nt, Artificial Sequence
  Synthetic
cuaaaucaagaaccucuuggggu

SEQ ID NO: 68335 - RNA, 18 nt, Artificial Sequence
  Synthetic
aguagcagcauaaugggu

SEQ ID NO: 68336 - RNA, 19 nt, Artificial Sequence
  Synthetic
caguagcagcauaaugggu

SEQ ID NO: 68337 - RNA, 21 nt, Artificial Sequence
  Synthetic
ugcaguagcagcauaaugggu

SEQ ID NO: 68338 - RNA, 23 nt, Artificial Sequence
  Synthetic
agugcaguagcagcauaaugggu

SEQ ID NO: 68339 - RNA, 24 nt, Artificial Sequence
  Synthetic
uagugcaguagcagcauaaugggu

SEQ ID NO: 68340 - RNA, 19 nt, Artificial Sequence
  Synthetic
agccuaggccuacaugggu

SEQ ID NO: 68341 - RNA, 21 nt, Artificial Sequence
  Synthetic
ugagccuaggccuacaugggu

SEQ ID NO: 68342 - RNA, 22 nt, Artificial Sequence
  Synthetic
augagccuaggccuacaugggu

SEQ ID NO: 68343 - RNA, 23 nt, Artificial Sequence
  Synthetic
caugagccuaggccuacaugggu

SEQ ID NO: 68344 - RNA, 24 nt, Artificial Sequence
  Synthetic
acaugagccuaggccuacaugggu

SEQ ID NO: 68345 - RNA, 21 nt, Artificial Sequence
  Synthetic
agaaagugguuaccucugggu

SEQ ID NO: 68346 - RNA, 22 nt, Artificial Sequence
  Synthetic
aagaaagugguuaccucugggu

SEQ ID NO: 68347 - RNA, 23 nt, Artificial Sequence
  Synthetic
uaagaaagugguuaccucugggu

SEQ ID NO: 68348 - RNA, 24 nt, Artificial Sequence
  Synthetic
uuaagaaagugguuaccucugggu

SEQ ID NO: 68349 - RNA, 18 nt, Artificial Sequence
  Synthetic
acaggcuagggagugggu

SEQ ID NO: 68350 - RNA, 19 nt, Artificial Sequence
  Synthetic
uacaggcuagggagugggu

SEQ ID NO: 68351 - RNA, 20 nt, Artificial Sequence
  Synthetic
auacaggcuagggagugggu

SEQ ID NO: 68352 - RNA, 21 nt, Artificial Sequence
  Synthetic
cauacaggcuagggagugggu

SEQ ID NO: 68353 - RNA, 22 nt, Artificial Sequence
  Synthetic
acauacaggcuagggagugggu

SEQ ID NO: 68354 - RNA, 23 nt, Artificial Sequence
  Synthetic
uacauacaggcuagggagugggu

SEQ ID NO: 68355 - RNA, 24 nt, Artificial Sequence
  Synthetic
uuacauacaggcuagggagugggu

SEQ ID NO: 68356 - RNA, 18 nt, Artificial Sequence
  Synthetic
auuuuccguugagugggu

SEQ ID NO: 68357 - RNA, 19 nt, Artificial Sequence
  Synthetic
uauuuuccguugagugggu

SEQ ID NO: 68358 - RNA, 20 nt, Artificial Sequence
  Synthetic
uuauuuuccguugagugggu

SEQ ID NO: 68359 - RNA, 21 nt, Artificial Sequence
  Synthetic
uuuauuuuccguugagugggu

SEQ ID NO: 68360 - RNA, 22 nt, Artificial Sequence
  Synthetic
uuuuauuuuccguugagugggu

SEQ ID NO: 68361 - RNA, 23 nt, Artificial Sequence
  Synthetic
cuuuuauuuuccguugagugggu

SEQ ID NO: 68362 - RNA, 24 nt, Artificial Sequence
  Synthetic
ucuuuuauuuuccguugagugggu

SEQ ID NO: 68363 - RNA, 18 nt, Artificial Sequence
  Synthetic
uuuaacuaauaggugggu

SEQ ID NO: 68364 - RNA, 19 nt, Artificial Sequence
  Synthetic
uuuuaacuaauaggugggu

SEQ ID NO: 68365 - RNA, 20 nt, Artificial Sequence
  Synthetic
uuuuuaacuaauaggugggu

SEQ ID NO: 68366 - RNA, 21 nt, Artificial Sequence
  Synthetic
uuuuuuaacuaauaggugggu

SEQ ID NO: 68367 - RNA, 22 nt, Artificial Sequence
  Synthetic
uuuuuuuaacuaauaggugggu

SEQ ID NO: 68368 - RNA, 23 nt, Artificial Sequence
  Synthetic
uuuuuuuuaacuaauaggugggu

SEQ ID NO: 68369 - RNA, 24 nt, Artificial Sequence
  Synthetic
auuuuuuuuaacuaauaggugggu

SEQ ID NO: 68370 - RNA, 18 nt, Artificial Sequence
  Synthetic
uucuuccucuuugugggu

SEQ ID NO: 68371 - RNA, 19 nt, Artificial Sequence
  Synthetic
uuucuuccucuuugugggu

SEQ ID NO: 68372 - RNA, 21 nt, Artificial Sequence
  Synthetic
uguuucuuccucuuugugggu

SEQ ID NO: 68373 - RNA, 22 nt, Artificial Sequence
  Synthetic
auguuucuuccucuuugugggu

SEQ ID NO: 68374 - RNA, 23 nt, Artificial Sequence
  Synthetic
uauguuucuuccucuuugugggu

SEQ ID NO: 68375 - RNA, 24 nt, Artificial Sequence
  Synthetic
auauguuucuuccucuuugugggu

SEQ ID NO: 68376 - RNA, 23 nt, Artificial Sequence
  Synthetic
ugggggcacaauuaggauugggu

SEQ ID NO: 68377 - RNA, 18 nt, Artificial Sequence
  Synthetic
uuauuuucccccaauggu

SEQ ID NO: 68378 - RNA, 19 nt, Artificial Sequence
  Synthetic
uuuauuuucccccaauggu

SEQ ID NO: 68379 - RNA, 20 nt, Artificial Sequence
  Synthetic
auuuauuuucccccaauggu

SEQ ID NO: 68380 - RNA, 23 nt, Artificial Sequence
  Synthetic
aggauuuauuuucccccaauggu

SEQ ID NO: 68381 - RNA, 24 nt, Artificial Sequence
  Synthetic
aaggauuuauuuucccccaauggu

SEQ ID NO: 68382 - RNA, 18 nt, Artificial Sequence
  Synthetic
aguuacaauagcaauggu

SEQ ID NO: 68383 - RNA, 19 nt, Artificial Sequence
  Synthetic
uaguuacaauagcaauggu

SEQ ID NO: 68384 - RNA, 20 nt, Artificial Sequence
  Synthetic
auaguuacaauagcaauggu

SEQ ID NO: 68385 - RNA, 21 nt, Artificial Sequence
  Synthetic
aauaguuacaauagcaauggu

SEQ ID NO: 68386 - RNA, 22 nt, Artificial Sequence
  Synthetic
aaauaguuacaauagcaauggu

SEQ ID NO: 68387 - RNA, 23 nt, Artificial Sequence
  Synthetic
aaaauaguuacaauagcaauggu

SEQ ID NO: 68388 - RNA, 18 nt, Artificial Sequence
  Synthetic
agugaugguaagaauggu

SEQ ID NO: 68389 - RNA, 19 nt, Artificial Sequence
  Synthetic
aagugaugguaagaauggu

SEQ ID NO: 68390 - RNA, 20 nt, Artificial Sequence
  Synthetic
aaagugaugguaagaauggu

SEQ ID NO: 68391 - RNA, 21 nt, Artificial Sequence
  Synthetic
uaaagugaugguaagaauggu

SEQ ID NO: 68392 - RNA, 22 nt, Artificial Sequence
  Synthetic
cuaaagugaugguaagaauggu

SEQ ID NO: 68393 - RNA, 23 nt, Artificial Sequence
  Synthetic
ccuaaagugaugguaagaauggu

SEQ ID NO: 68394 - RNA, 24 nt, Artificial Sequence
  Synthetic
uccuaaagugaugguaagaauggu

SEQ ID NO: 68395 - RNA, 21 nt, Artificial Sequence
  Synthetic
ugggaaccucccaauaauggu

SEQ ID NO: 68396 - RNA, 22 nt, Artificial Sequence
  Synthetic
augggaaccucccaauaauggu

SEQ ID NO: 68397 - RNA, 23 nt, Artificial Sequence
  Synthetic
aaugggaaccucccaauaauggu

SEQ ID NO: 68398 - RNA, 24 nt, Artificial Sequence
  Synthetic
uaaugggaaccucccaauaauggu

SEQ ID NO: 68399 - RNA, 18 nt, Artificial Sequence
  Synthetic
uaaagggagcauaauggu

SEQ ID NO: 68400 - RNA, 19 nt, Artificial Sequence
  Synthetic
cuaaagggagcauaauggu

SEQ ID NO: 68401 - RNA, 21 nt, Artificial Sequence
  Synthetic
agcuaaagggagcauaauggu

SEQ ID NO: 68402 - RNA, 22 nt, Artificial Sequence
  Synthetic
cagcuaaagggagcauaauggu

SEQ ID NO: 68403 - RNA, 23 nt, Artificial Sequence
  Synthetic
acagcuaaagggagcauaauggu

SEQ ID NO: 68404 - RNA, 18 nt, Artificial Sequence
  Synthetic
uaaaaauccuuuaauggu

SEQ ID NO: 68405 - RNA, 20 nt, Artificial Sequence
  Synthetic
aguaaaaauccuuuaauggu

SEQ ID NO: 68406 - RNA, 21 nt, Artificial Sequence
  Synthetic
uaguaaaaauccuuuaauggu

SEQ ID NO: 68407 - RNA, 22 nt, Artificial Sequence
  Synthetic
uuaguaaaaauccuuuaauggu

SEQ ID NO: 68408 - RNA, 23 nt, Artificial Sequence
  Synthetic
cuuaguaaaaauccuuuaauggu

SEQ ID NO: 68409 - RNA, 24 nt, Artificial Sequence
  Synthetic
ucuuaguaaaaauccuuuaauggu

SEQ ID NO: 68410 - RNA, 18 nt, Artificial Sequence
  Synthetic
ugcuuuccaaaacauggu

SEQ ID NO: 68411 - RNA, 19 nt, Artificial Sequence
  Synthetic
cugcuuuccaaaacauggu

SEQ ID NO: 68412 - RNA, 20 nt, Artificial Sequence
  Synthetic
acugcuuuccaaaacauggu

SEQ ID NO: 68413 - RNA, 21 nt, Artificial Sequence
  Synthetic
cacugcuuuccaaaacauggu

SEQ ID NO: 68414 - RNA, 22 nt, Artificial Sequence
  Synthetic
ucacugcuuuccaaaacauggu

SEQ ID NO: 68415 - RNA, 23 nt, Artificial Sequence
  Synthetic
cucacugcuuuccaaaacauggu

SEQ ID NO: 68416 - RNA, 24 nt, Artificial Sequence
  Synthetic
acucacugcuuuccaaaacauggu

SEQ ID NO: 68417 - RNA, 18 nt, Artificial Sequence
  Synthetic
auucaaccuauagauggu

SEQ ID NO: 68418 - RNA, 19 nt, Artificial Sequence
  Synthetic
uauucaaccuauagauggu

SEQ ID NO: 68419 - RNA, 20 nt, Artificial Sequence
  Synthetic
auauucaaccuauagauggu

SEQ ID NO: 68420 - RNA, 22 nt, Artificial Sequence
  Synthetic
agauauucaaccuauagauggu

SEQ ID NO: 68421 - RNA, 24 nt, Artificial Sequence
  Synthetic
ugagauauucaaccuauagauggu

SEQ ID NO: 68422 - RNA, 18 nt, Artificial Sequence
  Synthetic
acuguaucuguagauggu

SEQ ID NO: 68423 - RNA, 19 nt, Artificial Sequence
  Synthetic
cacuguaucuguagauggu

SEQ ID NO: 68424 - RNA, 20 nt, Artificial Sequence
  Synthetic
acacuguaucuguagauggu

SEQ ID NO: 68425 - RNA, 21 nt, Artificial Sequence
  Synthetic
uacacuguaucuguagauggu

SEQ ID NO: 68426 - RNA, 22 nt, Artificial Sequence
  Synthetic
uuacacuguaucuguagauggu

SEQ ID NO: 68427 - RNA, 23 nt, Artificial Sequence
  Synthetic
auuacacuguaucuguagauggu

SEQ ID NO: 68428 - RNA, 24 nt, Artificial Sequence
  Synthetic
aauuacacuguaucuguagauggu

SEQ ID NO: 68429 - RNA, 19 nt, Artificial Sequence
  Synthetic
ugaaacaugccaugauggu

SEQ ID NO: 68430 - RNA, 20 nt, Artificial Sequence
  Synthetic
cugaaacaugccaugauggu

SEQ ID NO: 68431 - RNA, 21 nt, Artificial Sequence
  Synthetic
acugaaacaugccaugauggu

SEQ ID NO: 68432 - RNA, 22 nt, Artificial Sequence
  Synthetic
aacugaaacaugccaugauggu

SEQ ID NO: 68433 - RNA, 23 nt, Artificial Sequence
  Synthetic
aaacugaaacaugccaugauggu

SEQ ID NO: 68434 - RNA, 18 nt, Artificial Sequence
  Synthetic
aaauccuaaagugauggu

SEQ ID NO: 68435 - RNA, 19 nt, Artificial Sequence
  Synthetic
aaaauccuaaagugauggu

SEQ ID NO: 68436 - RNA, 21 nt, Artificial Sequence
  Synthetic
agaaaauccuaaagugauggu

SEQ ID NO: 68437 - RNA, 22 nt, Artificial Sequence
  Synthetic
aagaaaauccuaaagugauggu

SEQ ID NO: 68438 - RNA, 23 nt, Artificial Sequence
  Synthetic
uaagaaaauccuaaagugauggu

SEQ ID NO: 68439 - RNA, 24 nt, Artificial Sequence
  Synthetic
cuaagaaaauccuaaagugauggu

SEQ ID NO: 68440 - RNA, 21 nt, Artificial Sequence
  Synthetic
ccauaagggggcugcuauggu

SEQ ID NO: 68441 - RNA, 22 nt, Artificial Sequence
  Synthetic
uccauaagggggcugcuauggu

SEQ ID NO: 68442 - RNA, 23 nt, Artificial Sequence
  Synthetic
uuccauaagggggcugcuauggu

SEQ ID NO: 68443 - RNA, 24 nt, Artificial Sequence
  Synthetic
uuuccauaagggggcugcuauggu

SEQ ID NO: 68444 - RNA, 18 nt, Artificial Sequence
  Synthetic
ucuccacgcuuuuauggu

SEQ ID NO: 68445 - RNA, 19 nt, Artificial Sequence
  Synthetic
cucuccacgcuuuuauggu

SEQ ID NO: 68446 - RNA, 20 nt, Artificial Sequence
  Synthetic
ucucuccacgcuuuuauggu

SEQ ID NO: 68447 - RNA, 22 nt, Artificial Sequence
  Synthetic
agucucuccacgcuuuuauggu

SEQ ID NO: 68448 - RNA, 23 nt, Artificial Sequence
  Synthetic
uagucucuccacgcuuuuauggu

SEQ ID NO: 68449 - RNA, 24 nt, Artificial Sequence
  Synthetic
uuagucucuccacgcuuuuauggu

SEQ ID NO: 68450 - RNA, 18 nt, Artificial Sequence
  Synthetic
cugaauugccuggcuggu

SEQ ID NO: 68451 - RNA, 20 nt, Artificial Sequence
  Synthetic
ugcugaauugccuggcuggu

SEQ ID NO: 68452 - RNA, 21 nt, Artificial Sequence
  Synthetic
cugcugaauugccuggcuggu

SEQ ID NO: 68453 - RNA, 22 nt, Artificial Sequence
  Synthetic
ucugcugaauugccuggcuggu

SEQ ID NO: 68454 - RNA, 23 nt, Artificial Sequence
  Synthetic
uucugcugaauugccuggcuggu

SEQ ID NO: 68455 - RNA, 24 nt, Artificial Sequence
  Synthetic
cuucugcugaauugccuggcuggu

SEQ ID NO: 68456 - RNA, 19 nt, Artificial Sequence
  Synthetic
ugggagaguaacaucuggu

SEQ ID NO: 68457 - RNA, 20 nt, Artificial Sequence
  Synthetic
uugggagaguaacaucuggu

SEQ ID NO: 68458 - RNA, 21 nt, Artificial Sequence
  Synthetic
uuugggagaguaacaucuggu

SEQ ID NO: 68459 - RNA, 23 nt, Artificial Sequence
  Synthetic
uguuugggagaguaacaucuggu

SEQ ID NO: 68460 - RNA, 24 nt, Artificial Sequence
  Synthetic
auguuugggagaguaacaucuggu

SEQ ID NO: 68461 - RNA, 18 nt, Artificial Sequence
  Synthetic
agucugcacuaaaguggu

SEQ ID NO: 68462 - RNA, 19 nt, Artificial Sequence
  Synthetic
cagucugcacuaaaguggu

SEQ ID NO: 68463 - RNA, 20 nt, Artificial Sequence
  Synthetic
ccagucugcacuaaaguggu

SEQ ID NO: 68464 - RNA, 23 nt, Artificial Sequence
  Synthetic
aggccagucugcacuaaaguggu

SEQ ID NO: 68465 - RNA, 24 nt, Artificial Sequence
  Synthetic
caggccagucugcacuaaaguggu

SEQ ID NO: 68466 - RNA, 18 nt, Artificial Sequence
  Synthetic
uuuaaauuuaaccguggu

SEQ ID NO: 68467 - RNA, 19 nt, Artificial Sequence
  Synthetic
auuuaaauuuaaccguggu

SEQ ID NO: 68468 - RNA, 20 nt, Artificial Sequence
  Synthetic
aauuuaaauuuaaccguggu

SEQ ID NO: 68469 - RNA, 21 nt, Artificial Sequence
  Synthetic
uaauuuaaauuuaaccguggu

SEQ ID NO: 68470 - RNA, 24 nt, Artificial Sequence
  Synthetic
ugguaauuuaaauuuaaccguggu

SEQ ID NO: 68471 - RNA, 18 nt, Artificial Sequence
  Synthetic
uuaucuugaaagcguggu

SEQ ID NO: 68472 - RNA, 19 nt, Artificial Sequence
  Synthetic
cuuaucuugaaagcguggu

SEQ ID NO: 68473 - RNA, 21 nt, Artificial Sequence
  Synthetic
agcuuaucuugaaagcguggu

SEQ ID NO: 68474 - RNA, 22 nt, Artificial Sequence
  Synthetic
aagcuuaucuugaaagcguggu

SEQ ID NO: 68475 - RNA, 23 nt, Artificial Sequence
  Synthetic
aaagcuuaucuugaaagcguggu

SEQ ID NO: 68476 - RNA, 24 nt, Artificial Sequence
  Synthetic
aaaagcuuaucuugaaagcguggu

SEQ ID NO: 68477 - RNA, 18 nt, Artificial Sequence
  Synthetic
acaauuccaugugguggu

SEQ ID NO: 68478 - RNA, 20 nt, Artificial Sequence
  Synthetic
ugacaauuccaugugguggu

SEQ ID NO: 68479 - RNA, 21 nt, Artificial Sequence
  Synthetic
cugacaauuccaugugguggu

SEQ ID NO: 68480 - RNA, 22 nt, Artificial Sequence
  Synthetic
ucugacaauuccaugugguggu

SEQ ID NO: 68481 - RNA, 24 nt, Artificial Sequence
  Synthetic
agucugacaauuccaugugguggu

SEQ ID NO: 68482 - RNA, 21 nt, Artificial Sequence
  Synthetic
cagagagagagaguugguggu

SEQ ID NO: 68483 - RNA, 23 nt, Artificial Sequence
  Synthetic
agcagagagagagaguugguggu

SEQ ID NO: 68484 - RNA, 24 nt, Artificial Sequence
  Synthetic
aagcagagagagagaguugguggu

SEQ ID NO: 68485 - RNA, 18 nt, Artificial Sequence
  Synthetic
agguuaucugaauguggu

SEQ ID NO: 68486 - RNA, 19 nt, Artificial Sequence
  Synthetic
cagguuaucugaauguggu

SEQ ID NO: 68487 - RNA, 20 nt, Artificial Sequence
  Synthetic
ucagguuaucugaauguggu

SEQ ID NO: 68488 - RNA, 23 nt, Artificial Sequence
  Synthetic
aggucagguuaucugaauguggu

SEQ ID NO: 68489 - RNA, 24 nt, Artificial Sequence
  Synthetic
aaggucagguuaucugaauguggu

SEQ ID NO: 68490 - RNA, 20 nt, Artificial Sequence
  Synthetic
ugguuuuauauguauguggu

SEQ ID NO: 68491 - RNA, 21 nt, Artificial Sequence
  Synthetic
augguuuuauauguauguggu

SEQ ID NO: 68492 - RNA, 22 nt, Artificial Sequence
  Synthetic
caugguuuuauauguauguggu

SEQ ID NO: 68493 - RNA, 23 nt, Artificial Sequence
  Synthetic
acaugguuuuauauguauguggu

SEQ ID NO: 68494 - RNA, 18 nt, Artificial Sequence
  Synthetic
auugccaggaacuguggu

SEQ ID NO: 68495 - RNA, 19 nt, Artificial Sequence
  Synthetic
aauugccaggaacuguggu

SEQ ID NO: 68496 - RNA, 20 nt, Artificial Sequence
  Synthetic
aaauugccaggaacuguggu

SEQ ID NO: 68497 - RNA, 21 nt, Artificial Sequence
  Synthetic
uaaauugccaggaacuguggu

SEQ ID NO: 68498 - RNA, 22 nt, Artificial Sequence
  Synthetic
uuaaauugccaggaacuguggu

SEQ ID NO: 68499 - RNA, 23 nt, Artificial Sequence
  Synthetic
auuaaauugccaggaacuguggu

SEQ ID NO: 68500 - RNA, 24 nt, Artificial Sequence
  Synthetic
uauuaaauugccaggaacuguggu

SEQ ID NO: 68501 - RNA, 18 nt, Artificial Sequence
  Synthetic
uuauaaccuguuuguggu

SEQ ID NO: 68502 - RNA, 19 nt, Artificial Sequence
  Synthetic
uuuauaaccuguuuguggu

SEQ ID NO: 68503 - RNA, 20 nt, Artificial Sequence
  Synthetic
uuuuauaaccuguuuguggu

SEQ ID NO: 68504 - RNA, 21 nt, Artificial Sequence
  Synthetic
uuuuuauaaccuguuuguggu

SEQ ID NO: 68505 - RNA, 22 nt, Artificial Sequence
  Synthetic
cuuuuuauaaccuguuuguggu

SEQ ID NO: 68506 - RNA, 23 nt, Artificial Sequence
  Synthetic
acuuuuuauaaccuguuuguggu

SEQ ID NO: 68507 - RNA, 24 nt, Artificial Sequence
  Synthetic
uacuuuuuauaaccuguuuguggu

SEQ ID NO: 68508 - RNA, 18 nt, Artificial Sequence
  Synthetic
auuuaagaaauaauuggu

SEQ ID NO: 68509 - RNA, 19 nt, Artificial Sequence
  Synthetic
uauuuaagaaauaauuggu

SEQ ID NO: 68510 - RNA, 20 nt, Artificial Sequence
  Synthetic
uuauuuaagaaauaauuggu

SEQ ID NO: 68511 - RNA, 21 nt, Artificial Sequence
  Synthetic
auuauuuaagaaauaauuggu

SEQ ID NO: 68512 - RNA, 22 nt, Artificial Sequence
  Synthetic
uauuauuuaagaaauaauuggu

SEQ ID NO: 68513 - RNA, 23 nt, Artificial Sequence
  Synthetic
uuauuauuuaagaaauaauuggu

SEQ ID NO: 68514 - RNA, 24 nt, Artificial Sequence
  Synthetic
auuauuauuuaagaaauaauuggu

SEQ ID NO: 68515 - RNA, 18 nt, Artificial Sequence
  Synthetic
aagggacuguuaauuggu

SEQ ID NO: 68516 - RNA, 19 nt, Artificial Sequence
  Synthetic
aaagggacuguuaauuggu

SEQ ID NO: 68517 - RNA, 21 nt, Artificial Sequence
  Synthetic
agaaagggacuguuaauuggu

SEQ ID NO: 68518 - RNA, 22 nt, Artificial Sequence
  Synthetic
uagaaagggacuguuaauuggu

SEQ ID NO: 68519 - RNA, 23 nt, Artificial Sequence
  Synthetic
auagaaagggacuguuaauuggu

SEQ ID NO: 68520 - RNA, 24 nt, Artificial Sequence
  Synthetic
aauagaaagggacuguuaauuggu

SEQ ID NO: 68521 - RNA, 20 nt, Artificial Sequence
  Synthetic
aggaugcaaugauuauuggu

SEQ ID NO: 68522 - RNA, 21 nt, Artificial Sequence
  Synthetic
uaggaugcaaugauuauuggu

SEQ ID NO: 68523 - RNA, 22 nt, Artificial Sequence
  Synthetic
uuaggaugcaaugauuauuggu

SEQ ID NO: 68524 - RNA, 23 nt, Artificial Sequence
  Synthetic
uuuaggaugcaaugauuauuggu

SEQ ID NO: 68525 - RNA, 24 nt, Artificial Sequence
  Synthetic
uuuuaggaugcaaugauuauuggu

SEQ ID NO: 68526 - RNA, 18 nt, Artificial Sequence
  Synthetic
uuuaaaugaagucuuggu

SEQ ID NO: 68527 - RNA, 20 nt, Artificial Sequence
  Synthetic
uguuuaaaugaagucuuggu

SEQ ID NO: 68528 - RNA, 21 nt, Artificial Sequence
  Synthetic
uuguuuaaaugaagucuuggu

SEQ ID NO: 68529 - RNA, 22 nt, Artificial Sequence
  Synthetic
uuuguuuaaaugaagucuuggu

SEQ ID NO: 68530 - RNA, 23 nt, Artificial Sequence
  Synthetic
uuuuguuuaaaugaagucuuggu

SEQ ID NO: 68531 - RNA, 18 nt, Artificial Sequence
  Synthetic
ugucuuaaaugucuuggu

SEQ ID NO: 68532 - RNA, 19 nt, Artificial Sequence
  Synthetic
uugucuuaaaugucuuggu

SEQ ID NO: 68533 - RNA, 21 nt, Artificial Sequence
  Synthetic
uguugucuuaaaugucuuggu

SEQ ID NO: 68534 - RNA, 22 nt, Artificial Sequence
  Synthetic
auguugucuuaaaugucuuggu

SEQ ID NO: 68535 - RNA, 23 nt, Artificial Sequence
  Synthetic
aauguugucuuaaaugucuuggu

SEQ ID NO: 68536 - RNA, 20 nt, Artificial Sequence
  Synthetic
uggaaguuuuauuucuuggu

SEQ ID NO: 68537 - RNA, 21 nt, Artificial Sequence
  Synthetic
cuggaaguuuuauuucuuggu

SEQ ID NO: 68538 - RNA, 23 nt, Artificial Sequence
  Synthetic
ugcuggaaguuuuauuucuuggu

SEQ ID NO: 68539 - RNA, 24 nt, Artificial Sequence
  Synthetic
cugcuggaaguuuuauuucuuggu

SEQ ID NO: 68540 - RNA, 19 nt, Artificial Sequence
  Synthetic
agcuucggacaacguuggu

SEQ ID NO: 68541 - RNA, 20 nt, Artificial Sequence
  Synthetic
uagcuucggacaacguuggu

SEQ ID NO: 68542 - RNA, 21 nt, Artificial Sequence
  Synthetic
cuagcuucggacaacguuggu

SEQ ID NO: 68543 - RNA, 22 nt, Artificial Sequence
  Synthetic
ucuagcuucggacaacguuggu

SEQ ID NO: 68544 - RNA, 23 nt, Artificial Sequence
  Synthetic
cucuagcuucggacaacguuggu

SEQ ID NO: 68545 - RNA, 24 nt, Artificial Sequence
  Synthetic
acucuagcuucggacaacguuggu

SEQ ID NO: 68546 - RNA, 18 nt, Artificial Sequence
  Synthetic
uauuuuguaacuguuggu

SEQ ID NO: 68547 - RNA, 20 nt, Artificial Sequence
  Synthetic
aguauuuuguaacuguuggu

SEQ ID NO: 68548 - RNA, 21 nt, Artificial Sequence
  Synthetic
aaguauuuuguaacuguuggu

SEQ ID NO: 68549 - RNA, 22 nt, Artificial Sequence
  Synthetic
caaguauuuuguaacuguuggu

SEQ ID NO: 68550 - RNA, 23 nt, Artificial Sequence
  Synthetic
acaaguauuuuguaacuguuggu

SEQ ID NO: 68551 - RNA, 18 nt, Artificial Sequence
  Synthetic
uuaccaaggaaauuuggu

SEQ ID NO: 68552 - RNA, 20 nt, Artificial Sequence
  Synthetic
aguuaccaaggaaauuuggu

SEQ ID NO: 68553 - RNA, 21 nt, Artificial Sequence
  Synthetic
caguuaccaaggaaauuuggu

SEQ ID NO: 68554 - RNA, 23 nt, Artificial Sequence
  Synthetic
ugcaguuaccaaggaaauuuggu

SEQ ID NO: 68555 - RNA, 24 nt, Artificial Sequence
  Synthetic
uugcaguuaccaaggaaauuuggu

SEQ ID NO: 68556 - RNA, 21 nt, Artificial Sequence
  Synthetic
aaaacucuucuaagaaaaugu

SEQ ID NO: 68557 - RNA, 22 nt, Artificial Sequence
  Synthetic
uaaaacucuucuaagaaaaugu

SEQ ID NO: 68558 - RNA, 23 nt, Artificial Sequence
  Synthetic
uuaaaacucuucuaagaaaaugu

SEQ ID NO: 68559 - RNA, 24 nt, Artificial Sequence
  Synthetic
uuuaaaacucuucuaagaaaaugu

SEQ ID NO: 68560 - RNA, 18 nt, Artificial Sequence
  Synthetic
cggacguauuacaaaugu

SEQ ID NO: 68561 - RNA, 19 nt, Artificial Sequence
  Synthetic
acggacguauuacaaaugu

SEQ ID NO: 68562 - RNA, 20 nt, Artificial Sequence
  Synthetic
aacggacguauuacaaaugu

SEQ ID NO: 68563 - RNA, 21 nt, Artificial Sequence
  Synthetic
uaacggacguauuacaaaugu

SEQ ID NO: 68564 - RNA, 22 nt, Artificial Sequence
  Synthetic
uuaacggacguauuacaaaugu

SEQ ID NO: 68565 - RNA, 23 nt, Artificial Sequence
  Synthetic
uuuaacggacguauuacaaaugu

SEQ ID NO: 68566 - RNA, 24 nt, Artificial Sequence
  Synthetic
uuuuaacggacguauuacaaaugu

SEQ ID NO: 68567 - RNA, 21 nt, Artificial Sequence
  Synthetic
uaaaauauguuuaucaaaugu

SEQ ID NO: 68568 - RNA, 22 nt, Artificial Sequence
  Synthetic
uuaaaauauguuuaucaaaugu

SEQ ID NO: 68569 - RNA, 23 nt, Artificial Sequence
  Synthetic
cuuaaaauauguuuaucaaaugu

SEQ ID NO: 68570 - RNA, 24 nt, Artificial Sequence
  Synthetic
acuuaaaauauguuuaucaaaugu

SEQ ID NO: 68571 - RNA, 18 nt, Artificial Sequence
  Synthetic
aaguucauccucaaaugu

SEQ ID NO: 68572 - RNA, 20 nt, Artificial Sequence
  Synthetic
agaaguucauccucaaaugu

SEQ ID NO: 68573 - RNA, 22 nt, Artificial Sequence
  Synthetic
agagaaguucauccucaaaugu

SEQ ID NO: 68574 - RNA, 23 nt, Artificial Sequence
  Synthetic
cagagaaguucauccucaaaugu

SEQ ID NO: 68575 - RNA, 18 nt, Artificial Sequence
  Synthetic
uguauagagaggaaaugu

SEQ ID NO: 68576 - RNA, 19 nt, Artificial Sequence
  Synthetic
uuguauagagaggaaaugu

SEQ ID NO: 68577 - RNA, 20 nt, Artificial Sequence
  Synthetic
uuuguauagagaggaaaugu

SEQ ID NO: 68578 - RNA, 21 nt, Artificial Sequence
  Synthetic
auuuguauagagaggaaaugu

SEQ ID NO: 68579 - RNA, 22 nt, Artificial Sequence
  Synthetic
cauuuguauagagaggaaaugu

SEQ ID NO: 68580 - RNA, 18 nt, Artificial Sequence
  Synthetic
agucauuaauguaaaugu

SEQ ID NO: 68581 - RNA, 19 nt, Artificial Sequence
  Synthetic
uagucauuaauguaaaugu

SEQ ID NO: 68582 - RNA, 20 nt, Artificial Sequence
  Synthetic
auagucauuaauguaaaugu

SEQ ID NO: 68583 - RNA, 22 nt, Artificial Sequence
  Synthetic
agauagucauuaauguaaaugu

SEQ ID NO: 68584 - RNA, 23 nt, Artificial Sequence
  Synthetic
uagauagucauuaauguaaaugu

SEQ ID NO: 68585 - RNA, 24 nt, Artificial Sequence
  Synthetic
uuagauagucauuaauguaaaugu

SEQ ID NO: 68586 - RNA, 18 nt, Artificial Sequence
  Synthetic
acagugcuacaacaaugu

SEQ ID NO: 68587 - RNA, 19 nt, Artificial Sequence
  Synthetic
aacagugcuacaacaaugu

SEQ ID NO: 68588 - RNA, 18 nt, Artificial Sequence
  Synthetic
agcuuguaaagacaaugu

SEQ ID NO: 68589 - RNA, 19 nt, Artificial Sequence
  Synthetic
uagcuuguaaagacaaugu

SEQ ID NO: 68590 - RNA, 20 nt, Artificial Sequence
  Synthetic
uuagcuuguaaagacaaugu

SEQ ID NO: 68591 - RNA, 21 nt, Artificial Sequence
  Synthetic
auuagcuuguaaagacaaugu

SEQ ID NO: 68592 - RNA, 22 nt, Artificial Sequence
  Synthetic
uauuagcuuguaaagacaaugu

SEQ ID NO: 68593 - RNA, 23 nt, Artificial Sequence
  Synthetic
auauuagcuuguaaagacaaugu

SEQ ID NO: 68594 - RNA, 24 nt, Artificial Sequence
  Synthetic
aauauuagcuuguaaagacaaugu

SEQ ID NO: 68595 - RNA, 19 nt, Artificial Sequence
  Synthetic
agaauugaugggacaaugu

SEQ ID NO: 68596 - RNA, 20 nt, Artificial Sequence
  Synthetic
aagaauugaugggacaaugu

SEQ ID NO: 68597 - RNA, 23 nt, Artificial Sequence
  Synthetic
uggaagaauugaugggacaaugu

SEQ ID NO: 68598 - RNA, 24 nt, Artificial Sequence
  Synthetic
cuggaagaauugaugggacaaugu

SEQ ID NO: 68599 - RNA, 18 nt, Artificial Sequence
  Synthetic
uccuagcuuaugcaaugu

SEQ ID NO: 68600 - RNA, 19 nt, Artificial Sequence
  Synthetic
cuccuagcuuaugcaaugu

SEQ ID NO: 68601 - RNA, 20 nt, Artificial Sequence
  Synthetic
ccuccuagcuuaugcaaugu

SEQ ID NO: 68602 - RNA, 22 nt, Artificial Sequence
  Synthetic
ugccuccuagcuuaugcaaugu

SEQ ID NO: 68603 - RNA, 23 nt, Artificial Sequence
  Synthetic
uugccuccuagcuuaugcaaugu

SEQ ID NO: 68604 - RNA, 24 nt, Artificial Sequence
  Synthetic
auugccuccuagcuuaugcaaugu

SEQ ID NO: 68605 - RNA, 18 nt, Artificial Sequence
  Synthetic
cuaccagaaugucaaugu

SEQ ID NO: 68606 - RNA, 19 nt, Artificial Sequence
  Synthetic
acuaccagaaugucaaugu

SEQ ID NO: 68607 - RNA, 20 nt, Artificial Sequence
  Synthetic
aacuaccagaaugucaaugu

SEQ ID NO: 68608 - RNA, 22 nt, Artificial Sequence
  Synthetic
ugaacuaccagaaugucaaugu

SEQ ID NO: 68609 - RNA, 23 nt, Artificial Sequence
  Synthetic
augaacuaccagaaugucaaugu

SEQ ID NO: 68610 - RNA, 18 nt, Artificial Sequence
  Synthetic
ccaaugcgacaagaaugu

SEQ ID NO: 68611 - RNA, 19 nt, Artificial Sequence
  Synthetic
uccaaugcgacaagaaugu

SEQ ID NO: 68612 - RNA, 20 nt, Artificial Sequence
  Synthetic
uuccaaugcgacaagaaugu

SEQ ID NO: 68613 - RNA, 21 nt, Artificial Sequence
  Synthetic
uuuccaaugcgacaagaaugu

SEQ ID NO: 68614 - RNA, 22 nt, Artificial Sequence
  Synthetic
uuuuccaaugcgacaagaaugu

SEQ ID NO: 68615 - RNA, 24 nt, Artificial Sequence
  Synthetic
cguuuuccaaugcgacaagaaugu

SEQ ID NO: 68616 - RNA, 18 nt, Artificial Sequence
  Synthetic
ccuuuagaguaggaaugu

SEQ ID NO: 68617 - RNA, 19 nt, Artificial Sequence
  Synthetic
uccuuuagaguaggaaugu

SEQ ID NO: 68618 - RNA, 20 nt, Artificial Sequence
  Synthetic
auccuuuagaguaggaaugu

SEQ ID NO: 68619 - RNA, 21 nt, Artificial Sequence
  Synthetic
uauccuuuagaguaggaaugu

SEQ ID NO: 68620 - RNA, 22 nt, Artificial Sequence
  Synthetic
uuauccuuuagaguaggaaugu

SEQ ID NO: 68621 - RNA, 23 nt, Artificial Sequence
  Synthetic
uuuauccuuuagaguaggaaugu

SEQ ID NO: 68622 - RNA, 18 nt, Artificial Sequence
  Synthetic
caacaaagacuggaaugu

SEQ ID NO: 68623 - RNA, 19 nt, Artificial Sequence
  Synthetic
ucaacaaagacuggaaugu

SEQ ID NO: 68624 - RNA, 20 nt, Artificial Sequence
  Synthetic
uucaacaaagacuggaaugu

SEQ ID NO: 68625 - RNA, 21 nt, Artificial Sequence
  Synthetic
auucaacaaagacuggaaugu

SEQ ID NO: 68626 - RNA, 22 nt, Artificial Sequence
  Synthetic
uauucaacaaagacuggaaugu

SEQ ID NO: 68627 - RNA, 23 nt, Artificial Sequence
  Synthetic
auauucaacaaagacuggaaugu

SEQ ID NO: 68628 - RNA, 24 nt, Artificial Sequence
  Synthetic
cauauucaacaaagacuggaaugu

SEQ ID NO: 68629 - RNA, 21 nt, Artificial Sequence
  Synthetic
aaugauuaagaaaaauaaugu

SEQ ID NO: 68630 - RNA, 23 nt, Artificial Sequence
  Synthetic
ugaaugauuaagaaaaauaaugu

SEQ ID NO: 68631 - RNA, 18 nt, Artificial Sequence
  Synthetic
ccuaucucucaguaaugu

SEQ ID NO: 68632 - RNA, 19 nt, Artificial Sequence
  Synthetic
cccuaucucucaguaaugu

SEQ ID NO: 68633 - RNA, 20 nt, Artificial Sequence
  Synthetic
ccccuaucucucaguaaugu

SEQ ID NO: 68634 - RNA, 21 nt, Artificial Sequence
  Synthetic
uccccuaucucucaguaaugu

SEQ ID NO: 68635 - RNA, 22 nt, Artificial Sequence
  Synthetic
uuccccuaucucucaguaaugu

SEQ ID NO: 68636 - RNA, 23 nt, Artificial Sequence
  Synthetic
uuuccccuaucucucaguaaugu

SEQ ID NO: 68637 - RNA, 24 nt, Artificial Sequence
  Synthetic
cuuuccccuaucucucaguaaugu

SEQ ID NO: 68638 - RNA, 18 nt, Artificial Sequence
  Synthetic
aucagugguauguaaugu

SEQ ID NO: 68639 - RNA, 19 nt, Artificial Sequence
  Synthetic
aaucagugguauguaaugu

SEQ ID NO: 68640 - RNA, 20 nt, Artificial Sequence
  Synthetic
aaaucagugguauguaaugu

SEQ ID NO: 68641 - RNA, 21 nt, Artificial Sequence
  Synthetic
aaaaucagugguauguaaugu

SEQ ID NO: 68642 - RNA, 22 nt, Artificial Sequence
  Synthetic
uaaaaucagugguauguaaugu

SEQ ID NO: 68643 - RNA, 23 nt, Artificial Sequence
  Synthetic
uuaaaaucagugguauguaaugu

SEQ ID NO: 68644 - RNA, 24 nt, Artificial Sequence
  Synthetic
auuaaaaucagugguauguaaugu

SEQ ID NO: 68645 - RNA, 18 nt, Artificial Sequence
  Synthetic
uauuauuaccuuuaaugu

SEQ ID NO: 68646 - RNA, 19 nt, Artificial Sequence
  Synthetic
uuauuauuaccuuuaaugu

SEQ ID NO: 68647 - RNA, 20 nt, Artificial Sequence
  Synthetic
cuuauuauuaccuuuaaugu

SEQ ID NO: 68648 - RNA, 21 nt, Artificial Sequence
  Synthetic
ucuuauuauuaccuuuaaugu

SEQ ID NO: 68649 - RNA, 22 nt, Artificial Sequence
  Synthetic
uucuuauuauuaccuuuaaugu

SEQ ID NO: 68650 - RNA, 23 nt, Artificial Sequence
  Synthetic
uuucuuauuauuaccuuuaaugu

SEQ ID NO: 68651 - RNA, 24 nt, Artificial Sequence
  Synthetic
uuuucuuauuauuaccuuuaaugu

SEQ ID NO: 68652 - RNA, 18 nt, Artificial Sequence
  Synthetic
ccuguuguacuaacaugu

SEQ ID NO: 68653 - RNA, 19 nt, Artificial Sequence
  Synthetic
cccuguuguacuaacaugu

SEQ ID NO: 68654 - RNA, 20 nt, Artificial Sequence
  Synthetic
ucccuguuguacuaacaugu

SEQ ID NO: 68655 - RNA, 21 nt, Artificial Sequence
  Synthetic
cucccuguuguacuaacaugu

SEQ ID NO: 68656 - RNA, 23 nt, Artificial Sequence
  Synthetic
ugcucccuguuguacuaacaugu

SEQ ID NO: 68657 - RNA, 24 nt, Artificial Sequence
  Synthetic
augcucccuguuguacuaacaugu

SEQ ID NO: 68658 - RNA, 18 nt, Artificial Sequence
  Synthetic
uucuuccuacugacaugu

SEQ ID NO: 68659 - RNA, 19 nt, Artificial Sequence
  Synthetic
cuucuuccuacugacaugu

SEQ ID NO: 68660 - RNA, 21 nt, Artificial Sequence
  Synthetic
agcuucuuccuacugacaugu

SEQ ID NO: 68661 - RNA, 22 nt, Artificial Sequence
  Synthetic
uagcuucuuccuacugacaugu

SEQ ID NO: 68662 - RNA, 18 nt, Artificial Sequence
  Synthetic
uuuauuagaauuacaugu

SEQ ID NO: 68663 - RNA, 19 nt, Artificial Sequence
  Synthetic
uuuuauuagaauuacaugu

SEQ ID NO: 68664 - RNA, 20 nt, Artificial Sequence
  Synthetic
auuuuauuagaauuacaugu

SEQ ID NO: 68665 - RNA, 23 nt, Artificial Sequence
  Synthetic
uggauuuuauuagaauuacaugu

SEQ ID NO: 68666 - RNA, 24 nt, Artificial Sequence
  Synthetic
cuggauuuuauuagaauuacaugu

SEQ ID NO: 68667 - RNA, 21 nt, Artificial Sequence
  Synthetic
ugaauuacaggaaaaccaugu

SEQ ID NO: 68668 - RNA, 23 nt, Artificial Sequence
  Synthetic
ugugaauuacaggaaaaccaugu

SEQ ID NO: 68669 - RNA, 24 nt, Artificial Sequence
  Synthetic
cugugaauuacaggaaaaccaugu

SEQ ID NO: 68670 - RNA, 20 nt, Artificial Sequence
  Synthetic
aggcuaucgaccuaccaugu

SEQ ID NO: 68671 - RNA, 21 nt, Artificial Sequence
  Synthetic
caggcuaucgaccuaccaugu

SEQ ID NO: 68672 - RNA, 22 nt, Artificial Sequence
  Synthetic
ucaggcuaucgaccuaccaugu

SEQ ID NO: 68673 - RNA, 23 nt, Artificial Sequence
  Synthetic
cucaggcuaucgaccuaccaugu

SEQ ID NO: 68674 - RNA, 24 nt, Artificial Sequence
  Synthetic
acucaggcuaucgaccuaccaugu

SEQ ID NO: 68675 - RNA, 18 nt, Artificial Sequence
  Synthetic
uucuacuaaaacccaugu

SEQ ID NO: 68676 - RNA, 19 nt, Artificial Sequence
  Synthetic
uuucuacuaaaacccaugu

SEQ ID NO: 68677 - RNA, 20 nt, Artificial Sequence
  Synthetic
uuuucuacuaaaacccaugu

SEQ ID NO: 68678 - RNA, 21 nt, Artificial Sequence
  Synthetic
uuuuucuacuaaaacccaugu

SEQ ID NO: 68679 - RNA, 22 nt, Artificial Sequence
  Synthetic
auuuuucuacuaaaacccaugu

SEQ ID NO: 68680 - RNA, 23 nt, Artificial Sequence
  Synthetic
aauuuuucuacuaaaacccaugu

SEQ ID NO: 68681 - RNA, 24 nt, Artificial Sequence
  Synthetic
aaauuuuucuacuaaaacccaugu

SEQ ID NO: 68682 - RNA, 18 nt, Artificial Sequence
  Synthetic
ccucugcuuaugccaugu

SEQ ID NO: 68683 - RNA, 19 nt, Artificial Sequence
  Synthetic
uccucugcuuaugccaugu

SEQ ID NO: 68684 - RNA, 21 nt, Artificial Sequence
  Synthetic
uguccucugcuuaugccaugu

SEQ ID NO: 68685 - RNA, 22 nt, Artificial Sequence
  Synthetic
cuguccucugcuuaugccaugu

SEQ ID NO: 68686 - RNA, 23 nt, Artificial Sequence
  Synthetic
ucuguccucugcuuaugccaugu

SEQ ID NO: 68687 - RNA, 24 nt, Artificial Sequence
  Synthetic
cucuguccucugcuuaugccaugu

SEQ ID NO: 68688 - RNA, 21 nt, Artificial Sequence
  Synthetic
ucaugccauggcugagcaugu

SEQ ID NO: 68689 - RNA, 22 nt, Artificial Sequence
  Synthetic
uucaugccauggcugagcaugu

SEQ ID NO: 68690 - RNA, 24 nt, Artificial Sequence
  Synthetic
uguucaugccauggcugagcaugu

SEQ ID NO: 68691 - RNA, 18 nt, Artificial Sequence
  Synthetic
uaaggugaaaaugcaugu

SEQ ID NO: 68692 - RNA, 19 nt, Artificial Sequence
  Synthetic
uuaaggugaaaaugcaugu

SEQ ID NO: 68693 - RNA, 20 nt, Artificial Sequence
  Synthetic
uuuaaggugaaaaugcaugu

SEQ ID NO: 68694 - RNA, 21 nt, Artificial Sequence
  Synthetic
auuuaaggugaaaaugcaugu

SEQ ID NO: 68695 - RNA, 22 nt, Artificial Sequence
  Synthetic
uauuuaaggugaaaaugcaugu

SEQ ID NO: 68696 - RNA, 23 nt, Artificial Sequence
  Synthetic
auauuuaaggugaaaaugcaugu

SEQ ID NO: 68697 - RNA, 19 nt, Artificial Sequence
  Synthetic
aggcacaauuacugcaugu

SEQ ID NO: 68698 - RNA, 20 nt, Artificial Sequence
  Synthetic
caggcacaauuacugcaugu

SEQ ID NO: 68699 - RNA, 21 nt, Artificial Sequence
  Synthetic
ucaggcacaauuacugcaugu

SEQ ID NO: 68700 - RNA, 22 nt, Artificial Sequence
  Synthetic
uucaggcacaauuacugcaugu

SEQ ID NO: 68701 - RNA, 23 nt, Artificial Sequence
  Synthetic
auucaggcacaauuacugcaugu

SEQ ID NO: 68702 - RNA, 24 nt, Artificial Sequence
  Synthetic
aauucaggcacaauuacugcaugu

SEQ ID NO: 68703 - RNA, 21 nt, Artificial Sequence
  Synthetic
auuugucuaaauaaaucaugu

SEQ ID NO: 68704 - RNA, 22 nt, Artificial Sequence
  Synthetic
uauuugucuaaauaaaucaugu

SEQ ID NO: 68705 - RNA, 23 nt, Artificial Sequence
  Synthetic
auauuugucuaaauaaaucaugu

SEQ ID NO: 68706 - RNA, 18 nt, Artificial Sequence
  Synthetic
uucuaaaaauaaucaugu

SEQ ID NO: 68707 - RNA, 19 nt, Artificial Sequence
  Synthetic
uuucuaaaaauaaucaugu

SEQ ID NO: 68708 - RNA, 18 nt, Artificial Sequence
  Synthetic
ucauuuuuuauaucaugu

SEQ ID NO: 68709 - RNA, 19 nt, Artificial Sequence
  Synthetic
uucauuuuuuauaucaugu

SEQ ID NO: 68710 - RNA, 20 nt, Artificial Sequence
  Synthetic
cuucauuuuuuauaucaugu

SEQ ID NO: 68711 - RNA, 21 nt, Artificial Sequence
  Synthetic
acuucauuuuuuauaucaugu

SEQ ID NO: 68712 - RNA, 22 nt, Artificial Sequence
  Synthetic
uacuucauuuuuuauaucaugu

SEQ ID NO: 68713 - RNA, 23 nt, Artificial Sequence
  Synthetic
uuacuucauuuuuuauaucaugu

SEQ ID NO: 68714 - RNA, 24 nt, Artificial Sequence
  Synthetic
auuacuucauuuuuuauaucaugu

SEQ ID NO: 68715 - RNA, 18 nt, Artificial Sequence
  Synthetic
uuaaagauacuaucaugu

SEQ ID NO: 68716 - RNA, 19 nt, Artificial Sequence
  Synthetic
uuuaaagauacuaucaugu

SEQ ID NO: 68717 - RNA, 20 nt, Artificial Sequence
  Synthetic
auuuaaagauacuaucaugu

SEQ ID NO: 68718 - RNA, 21 nt, Artificial Sequence
  Synthetic
uauuuaaagauacuaucaugu

SEQ ID NO: 68719 - RNA, 23 nt, Artificial Sequence
  Synthetic
uguauuuaaagauacuaucaugu

SEQ ID NO: 68720 - RNA, 24 nt, Artificial Sequence
  Synthetic
auguauuuaaagauacuaucaugu

SEQ ID NO: 68721 - RNA, 20 nt, Artificial Sequence
  Synthetic
uggccuuagugaucucaugu

SEQ ID NO: 68722 - RNA, 21 nt, Artificial Sequence
  Synthetic
cuggccuuagugaucucaugu

SEQ ID NO: 68723 - RNA, 22 nt, Artificial Sequence
  Synthetic
ucuggccuuagugaucucaugu

SEQ ID NO: 68724 - RNA, 23 nt, Artificial Sequence
  Synthetic
uucuggccuuagugaucucaugu

SEQ ID NO: 68725 - RNA, 24 nt, Artificial Sequence
  Synthetic
uuucuggccuuagugaucucaugu

SEQ ID NO: 68726 - RNA, 18 nt, Artificial Sequence
  Synthetic
uugauucuuaugucaugu

SEQ ID NO: 68727 - RNA, 19 nt, Artificial Sequence
  Synthetic
cuugauucuuaugucaugu

SEQ ID NO: 68728 - RNA, 20 nt, Artificial Sequence
  Synthetic
acuugauucuuaugucaugu

SEQ ID NO: 68729 - RNA, 21 nt, Artificial Sequence
  Synthetic
aacuugauucuuaugucaugu

SEQ ID NO: 68730 - RNA, 22 nt, Artificial Sequence
  Synthetic
aaacuugauucuuaugucaugu

SEQ ID NO: 68731 - RNA, 23 nt, Artificial Sequence
  Synthetic
aaaacuugauucuuaugucaugu

SEQ ID NO: 68732 - RNA, 24 nt, Artificial Sequence
  Synthetic
uaaaacuugauucuuaugucaugu

SEQ ID NO: 68733 - RNA, 20 nt, Artificial Sequence
  Synthetic
aggaagcugugguaggaugu

SEQ ID NO: 68734 - RNA, 21 nt, Artificial Sequence
  Synthetic
uaggaagcugugguaggaugu

SEQ ID NO: 68735 - RNA, 22 nt, Artificial Sequence
  Synthetic
cuaggaagcugugguaggaugu

SEQ ID NO: 68736 - RNA, 23 nt, Artificial Sequence
  Synthetic
ucuaggaagcugugguaggaugu

SEQ ID NO: 68737 - RNA, 24 nt, Artificial Sequence
  Synthetic
uucuaggaagcugugguaggaugu

SEQ ID NO: 68738 - RNA, 18 nt, Artificial Sequence
  Synthetic
uuaauuauguuuggaugu

SEQ ID NO: 68739 - RNA, 20 nt, Artificial Sequence
  Synthetic
uguuaauuauguuuggaugu

SEQ ID NO: 68740 - RNA, 21 nt, Artificial Sequence
  Synthetic
auguuaauuauguuuggaugu

SEQ ID NO: 68741 - RNA, 22 nt, Artificial Sequence
  Synthetic
aauguuaauuauguuuggaugu

SEQ ID NO: 68742 - RNA, 24 nt, Artificial Sequence
  Synthetic
agaauguuaauuauguuuggaugu

SEQ ID NO: 68743 - RNA, 18 nt, Artificial Sequence
  Synthetic
uguuauuagagaugaugu

SEQ ID NO: 68744 - RNA, 19 nt, Artificial Sequence
  Synthetic
uuguuauuagagaugaugu

SEQ ID NO: 68745 - RNA, 21 nt, Artificial Sequence
  Synthetic
aguuguuauuagagaugaugu

SEQ ID NO: 68746 - RNA, 24 nt, Artificial Sequence
  Synthetic
aggaguuguuauuagagaugaugu

SEQ ID NO: 68747 - RNA, 19 nt, Artificial Sequence
  Synthetic
uguauuuuaucagugaugu

SEQ ID NO: 68748 - RNA, 21 nt, Artificial Sequence
  Synthetic
uguguauuuuaucagugaugu

SEQ ID NO: 68749 - RNA, 22 nt, Artificial Sequence
  Synthetic
auguguauuuuaucagugaugu

SEQ ID NO: 68750 - RNA, 24 nt, Artificial Sequence
  Synthetic
ugauguguauuuuaucagugaugu

SEQ ID NO: 68751 - RNA, 19 nt, Artificial Sequence
  Synthetic
agggauucccaaaauaugu

SEQ ID NO: 68752 - RNA, 20 nt, Artificial Sequence
  Synthetic
cagggauucccaaaauaugu

SEQ ID NO: 68753 - RNA, 21 nt, Artificial Sequence
  Synthetic
ucagggauucccaaaauaugu

SEQ ID NO: 68754 - RNA, 22 nt, Artificial Sequence
  Synthetic
cucagggauucccaaaauaugu

SEQ ID NO: 68755 - RNA, 23 nt, Artificial Sequence
  Synthetic
acucagggauucccaaaauaugu

SEQ ID NO: 68756 - RNA, 24 nt, Artificial Sequence
  Synthetic
uacucagggauucccaaaauaugu

SEQ ID NO: 68757 - RNA, 18 nt, Artificial Sequence
  Synthetic
ucuuacaaucgaauaugu

SEQ ID NO: 68758 - RNA, 20 nt, Artificial Sequence
  Synthetic
ugucuuacaaucgaauaugu

SEQ ID NO: 68759 - RNA, 21 nt, Artificial Sequence
  Synthetic
cugucuuacaaucgaauaugu

SEQ ID NO: 68760 - RNA, 23 nt, Artificial Sequence
  Synthetic
agcugucuuacaaucgaauaugu

SEQ ID NO: 68761 - RNA, 24 nt, Artificial Sequence
  Synthetic
cagcugucuuacaaucgaauaugu

SEQ ID NO: 68762 - RNA, 18 nt, Artificial Sequence
  Synthetic
uauguucucuuaauaugu

SEQ ID NO: 68763 - RNA, 19 nt, Artificial Sequence
  Synthetic
uuauguucucuuaauaugu

SEQ ID NO: 68764 - RNA, 20 nt, Artificial Sequence
  Synthetic
auuauguucucuuaauaugu

SEQ ID NO: 68765 - RNA, 21 nt, Artificial Sequence
  Synthetic
aauuauguucucuuaauaugu

SEQ ID NO: 68766 - RNA, 22 nt, Artificial Sequence
  Synthetic
aaauuauguucucuuaauaugu

SEQ ID NO: 68767 - RNA, 23 nt, Artificial Sequence
  Synthetic
aaaauuauguucucuuaauaugu

SEQ ID NO: 68768 - RNA, 24 nt, Artificial Sequence
  Synthetic
aaaaauuauguucucuuaauaugu

SEQ ID NO: 68769 - RNA, 18 nt, Artificial Sequence
  Synthetic
auccuucaggagauaugu

SEQ ID NO: 68770 - RNA, 19 nt, Artificial Sequence
  Synthetic
uauccuucaggagauaugu

SEQ ID NO: 68771 - RNA, 20 nt, Artificial Sequence
  Synthetic
auauccuucaggagauaugu

SEQ ID NO: 68772 - RNA, 21 nt, Artificial Sequence
  Synthetic
uauauccuucaggagauaugu

SEQ ID NO: 68773 - RNA, 23 nt, Artificial Sequence
  Synthetic
uguauauccuucaggagauaugu

SEQ ID NO: 68774 - RNA, 24 nt, Artificial Sequence
  Synthetic
uuguauauccuucaggagauaugu

SEQ ID NO: 68775 - RNA, 18 nt, Artificial Sequence
  Synthetic
uuugaguaauuuauaugu

SEQ ID NO: 68776 - RNA, 19 nt, Artificial Sequence
  Synthetic
cuuugaguaauuuauaugu

SEQ ID NO: 68777 - RNA, 20 nt, Artificial Sequence
  Synthetic
ccuuugaguaauuuauaugu

SEQ ID NO: 68778 - RNA, 22 nt, Artificial Sequence
  Synthetic
agccuuugaguaauuuauaugu

SEQ ID NO: 68779 - RNA, 23 nt, Artificial Sequence
  Synthetic
uagccuuugaguaauuuauaugu

SEQ ID NO: 68780 - RNA, 24 nt, Artificial Sequence
  Synthetic
uuagccuuugaguaauuuauaugu

SEQ ID NO: 68781 - RNA, 19 nt, Artificial Sequence
  Synthetic
cgaguacuugccacuaugu

SEQ ID NO: 68782 - RNA, 20 nt, Artificial Sequence
  Synthetic
acgaguacuugccacuaugu

SEQ ID NO: 68783 - RNA, 21 nt, Artificial Sequence
  Synthetic
cacgaguacuugccacuaugu

SEQ ID NO: 68784 - RNA, 23 nt, Artificial Sequence
  Synthetic
ugcacgaguacuugccacuaugu

SEQ ID NO: 68785 - RNA, 24 nt, Artificial Sequence
  Synthetic
augcacgaguacuugccacuaugu

SEQ ID NO: 68786 - RNA, 18 nt, Artificial Sequence
  Synthetic
agcacagagugccuaugu

SEQ ID NO: 68787 - RNA, 19 nt, Artificial Sequence
  Synthetic
aagcacagagugccuaugu

SEQ ID NO: 68788 - RNA, 20 nt, Artificial Sequence
  Synthetic
caagcacagagugccuaugu

SEQ ID NO: 68789 - RNA, 21 nt, Artificial Sequence
  Synthetic
ucaagcacagagugccuaugu

SEQ ID NO: 68790 - RNA, 23 nt, Artificial Sequence
  Synthetic
ugucaagcacagagugccuaugu

SEQ ID NO: 68791 - RNA, 24 nt, Artificial Sequence
  Synthetic
augucaagcacagagugccuaugu

SEQ ID NO: 68792 - RNA, 19 nt, Artificial Sequence
  Synthetic
agagcuaguccagcuaugu

SEQ ID NO: 68793 - RNA, 20 nt, Artificial Sequence
  Synthetic
uagagcuaguccagcuaugu

SEQ ID NO: 68794 - RNA, 22 nt, Artificial Sequence
  Synthetic
aguagagcuaguccagcuaugu

SEQ ID NO: 68795 - RNA, 23 nt, Artificial Sequence
  Synthetic
aaguagagcuaguccagcuaugu

SEQ ID NO: 68796 - RNA, 24 nt, Artificial Sequence
  Synthetic
uaaguagagcuaguccagcuaugu

SEQ ID NO: 68797 - RNA, 21 nt, Artificial Sequence
  Synthetic
uuugucaaagaaacgcuaugu

SEQ ID NO: 68798 - RNA, 22 nt, Artificial Sequence
  Synthetic
auuugucaaagaaacgcuaugu

SEQ ID NO: 68799 - RNA, 23 nt, Artificial Sequence
  Synthetic
aauuugucaaagaaacgcuaugu

SEQ ID NO: 68800 - RNA, 24 nt, Artificial Sequence
  Synthetic
aaauuugucaaagaaacgcuaugu

SEQ ID NO: 68801 - RNA, 18 nt, Artificial Sequence
  Synthetic
ucuuacaugccucuaugu

SEQ ID NO: 68802 - RNA, 19 nt, Artificial Sequence
  Synthetic
cucuuacaugccucuaugu

SEQ ID NO: 68803 - RNA, 20 nt, Artificial Sequence
  Synthetic
acucuuacaugccucuaugu

SEQ ID NO: 68804 - RNA, 22 nt, Artificial Sequence
  Synthetic
ugacucuuacaugccucuaugu

SEQ ID NO: 68805 - RNA, 23 nt, Artificial Sequence
  Synthetic
cugacucuuacaugccucuaugu

SEQ ID NO: 68806 - RNA, 24 nt, Artificial Sequence
  Synthetic
acugacucuuacaugccucuaugu

SEQ ID NO: 68807 - RNA, 18 nt, Artificial Sequence
  Synthetic
aauauauaagagguaugu

SEQ ID NO: 68808 - RNA, 19 nt, Artificial Sequence
  Synthetic
caauauauaagagguaugu

SEQ ID NO: 68809 - RNA, 20 nt, Artificial Sequence
  Synthetic
acaauauauaagagguaugu

SEQ ID NO: 68810 - RNA, 21 nt, Artificial Sequence
  Synthetic
cacaauauauaagagguaugu

SEQ ID NO: 68811 - RNA, 23 nt, Artificial Sequence
  Synthetic
ugcacaauauauaagagguaugu

SEQ ID NO: 68812 - RNA, 24 nt, Artificial Sequence
  Synthetic
augcacaauauauaagagguaugu

SEQ ID NO: 68813 - RNA, 19 nt, Artificial Sequence
  Synthetic
agauagaguagugguaugu

SEQ ID NO: 68814 - RNA, 20 nt, Artificial Sequence
  Synthetic
uagauagaguagugguaugu

SEQ ID NO: 68815 - RNA, 21 nt, Artificial Sequence
  Synthetic
auagauagaguagugguaugu

SEQ ID NO: 68816 - RNA, 22 nt, Artificial Sequence
  Synthetic
uauagauagaguagugguaugu

SEQ ID NO: 68817 - RNA, 23 nt, Artificial Sequence
  Synthetic
uuauagauagaguagugguaugu

SEQ ID NO: 68818 - RNA, 24 nt, Artificial Sequence
  Synthetic
uuuauagauagaguagugguaugu

SEQ ID NO: 68819 - RNA, 21 nt, Artificial Sequence
  Synthetic
cuaaaaugaaaauguguaugu

SEQ ID NO: 68820 - RNA, 22 nt, Artificial Sequence
  Synthetic
ucuaaaaugaaaauguguaugu

SEQ ID NO: 68821 - RNA, 23 nt, Artificial Sequence
  Synthetic
uucuaaaaugaaaauguguaugu

SEQ ID NO: 68822 - RNA, 24 nt, Artificial Sequence
  Synthetic
uuucuaaaaugaaaauguguaugu

SEQ ID NO: 68823 - RNA, 18 nt, Artificial Sequence
  Synthetic
uuguggcuguguguaugu

SEQ ID NO: 68824 - RNA, 19 nt, Artificial Sequence
  Synthetic
auuguggcuguguguaugu

SEQ ID NO: 68825 - RNA, 20 nt, Artificial Sequence
  Synthetic
aauuguggcuguguguaugu

SEQ ID NO: 68826 - RNA, 21 nt, Artificial Sequence
  Synthetic
caauuguggcuguguguaugu

SEQ ID NO: 68827 - RNA, 22 nt, Artificial Sequence
  Synthetic
ucaauuguggcuguguguaugu

SEQ ID NO: 68828 - RNA, 23 nt, Artificial Sequence
  Synthetic
uucaauuguggcuguguguaugu

SEQ ID NO: 68829 - RNA, 24 nt, Artificial Sequence
  Synthetic
auucaauuguggcuguguguaugu

SEQ ID NO: 68830 - RNA, 18 nt, Artificial Sequence
  Synthetic
ucaagagaacuuguaugu

SEQ ID NO: 68831 - RNA, 19 nt, Artificial Sequence
  Synthetic
aucaagagaacuuguaugu

SEQ ID NO: 68832 - RNA, 20 nt, Artificial Sequence
  Synthetic
aaucaagagaacuuguaugu

SEQ ID NO: 68833 - RNA, 21 nt, Artificial Sequence
  Synthetic
aaaucaagagaacuuguaugu

SEQ ID NO: 68834 - RNA, 22 nt, Artificial Sequence
  Synthetic
uaaaucaagagaacuuguaugu

SEQ ID NO: 68835 - RNA, 23 nt, Artificial Sequence
  Synthetic
auaaaucaagagaacuuguaugu

SEQ ID NO: 68836 - RNA, 24 nt, Artificial Sequence
  Synthetic
cauaaaucaagagaacuuguaugu

SEQ ID NO: 68837 - RNA, 18 nt, Artificial Sequence
  Synthetic
uuagaauguuaauuaugu

SEQ ID NO: 68838 - RNA, 19 nt, Artificial Sequence
  Synthetic
uuuagaauguuaauuaugu

SEQ ID NO: 68839 - RNA, 20 nt, Artificial Sequence
  Synthetic
uuuuagaauguuaauuaugu

SEQ ID NO: 68840 - RNA, 21 nt, Artificial Sequence
  Synthetic
cuuuuagaauguuaauuaugu

SEQ ID NO: 68841 - RNA, 22 nt, Artificial Sequence
  Synthetic
ucuuuuagaauguuaauuaugu

SEQ ID NO: 68842 - RNA, 23 nt, Artificial Sequence
  Synthetic
cucuuuuagaauguuaauuaugu

SEQ ID NO: 68843 - RNA, 24 nt, Artificial Sequence
  Synthetic
ucucuuuuagaauguuaauuaugu

SEQ ID NO: 68844 - RNA, 18 nt, Artificial Sequence
  Synthetic
aauuugcagugauuaugu

SEQ ID NO: 68845 - RNA, 19 nt, Artificial Sequence
  Synthetic
aaauuugcagugauuaugu

SEQ ID NO: 68846 - RNA, 20 nt, Artificial Sequence
  Synthetic
aaaauuugcagugauuaugu

SEQ ID NO: 68847 - RNA, 22 nt, Artificial Sequence
  Synthetic
agaaaauuugcagugauuaugu

SEQ ID NO: 68848 - RNA, 23 nt, Artificial Sequence
  Synthetic
uagaaaauuugcagugauuaugu

SEQ ID NO: 68849 - RNA, 18 nt, Artificial Sequence
  Synthetic
uuuaacugcuucuuaugu

SEQ ID NO: 68850 - RNA, 19 nt, Artificial Sequence
  Synthetic
auuuaacugcuucuuaugu

SEQ ID NO: 68851 - RNA, 20 nt, Artificial Sequence
  Synthetic
uauuuaacugcuucuuaugu

SEQ ID NO: 68852 - RNA, 21 nt, Artificial Sequence
  Synthetic
cuauuuaacugcuucuuaugu

SEQ ID NO: 68853 - RNA, 22 nt, Artificial Sequence
  Synthetic
acuauuuaacugcuucuuaugu

SEQ ID NO: 68854 - RNA, 23 nt, Artificial Sequence
  Synthetic
uacuauuuaacugcuucuuaugu

SEQ ID NO: 68855 - RNA, 24 nt, Artificial Sequence
  Synthetic
uuacuauuuaacugcuucuuaugu

SEQ ID NO: 68856 - RNA, 22 nt, Artificial Sequence
  Synthetic
agcaaaaaaaaucugguuaugu

SEQ ID NO: 68857 - RNA, 23 nt, Artificial Sequence
  Synthetic
aagcaaaaaaaaucugguuaugu

SEQ ID NO: 68858 - RNA, 18 nt, Artificial Sequence
  Synthetic
uccugauagcuguuaugu

SEQ ID NO: 68859 - RNA, 19 nt, Artificial Sequence
  Synthetic
auccugauagcuguuaugu

SEQ ID NO: 68860 - RNA, 20 nt, Artificial Sequence
  Synthetic
cauccugauagcuguuaugu

SEQ ID NO: 68861 - RNA, 21 nt, Artificial Sequence
  Synthetic
ucauccugauagcuguuaugu

SEQ ID NO: 68862 - RNA, 22 nt, Artificial Sequence
  Synthetic
uucauccugauagcuguuaugu

SEQ ID NO: 68863 - RNA, 23 nt, Artificial Sequence
  Synthetic
cuucauccugauagcuguuaugu

SEQ ID NO: 68864 - RNA, 24 nt, Artificial Sequence
  Synthetic
ucuucauccugauagcuguuaugu

SEQ ID NO: 68865 - RNA, 18 nt, Artificial Sequence
  Synthetic
uaugugugaaauuuaugu

SEQ ID NO: 68866 - RNA, 19 nt, Artificial Sequence
  Synthetic
auaugugugaaauuuaugu

SEQ ID NO: 68867 - RNA, 20 nt, Artificial Sequence
  Synthetic
aauaugugugaaauuuaugu

SEQ ID NO: 68868 - RNA, 21 nt, Artificial Sequence
  Synthetic
aaauaugugugaaauuuaugu

SEQ ID NO: 68869 - RNA, 22 nt, Artificial Sequence
  Synthetic
aaaauaugugugaaauuuaugu

SEQ ID NO: 68870 - RNA, 23 nt, Artificial Sequence
  Synthetic
caaaauaugugugaaauuuaugu

SEQ ID NO: 68871 - RNA, 18 nt, Artificial Sequence
  Synthetic
aauaaaaucaguuuaugu

SEQ ID NO: 68872 - RNA, 19 nt, Artificial Sequence
  Synthetic
aaauaaaaucaguuuaugu

SEQ ID NO: 68873 - RNA, 21 nt, Artificial Sequence
  Synthetic
agaaauaaaaucaguuuaugu

SEQ ID NO: 68874 - RNA, 22 nt, Artificial Sequence
  Synthetic
uagaaauaaaaucaguuuaugu

SEQ ID NO: 68875 - RNA, 22 nt, Artificial Sequence
  Synthetic
agaaaaaguuauccuuuuaugu

SEQ ID NO: 68876 - RNA, 23 nt, Artificial Sequence
  Synthetic
aagaaaaaguuauccuuuuaugu

SEQ ID NO: 68877 - RNA, 24 nt, Artificial Sequence
  Synthetic
aaagaaaaaguuauccuuuuaugu

SEQ ID NO: 68878 - RNA, 18 nt, Artificial Sequence
  Synthetic
acaaaguucuuuuuaugu

SEQ ID NO: 68879 - RNA, 19 nt, Artificial Sequence
  Synthetic
uacaaaguucuuuuuaugu

SEQ ID NO: 68880 - RNA, 20 nt, Artificial Sequence
  Synthetic
uuacaaaguucuuuuuaugu

SEQ ID NO: 68881 - RNA, 18 nt, Artificial Sequence
  Synthetic
cguuuauuaaaaaacugu

SEQ ID NO: 68882 - RNA, 19 nt, Artificial Sequence
  Synthetic
acguuuauuaaaaaacugu

SEQ ID NO: 68883 - RNA, 20 nt, Artificial Sequence
  Synthetic
uacguuuauuaaaaaacugu

SEQ ID NO: 68884 - RNA, 21 nt, Artificial Sequence
  Synthetic
auacguuuauuaaaaaacugu

SEQ ID NO: 68885 - RNA, 22 nt, Artificial Sequence
  Synthetic
aauacguuuauuaaaaaacugu

SEQ ID NO: 68886 - RNA, 23 nt, Artificial Sequence
  Synthetic
aaauacguuuauuaaaaaacugu

SEQ ID NO: 68887 - RNA, 24 nt, Artificial Sequence
  Synthetic
aaaauacguuuauuaaaaaacugu

SEQ ID NO: 68888 - RNA, 18 nt, Artificial Sequence
  Synthetic
uacagauauaauaacugu

SEQ ID NO: 68889 - RNA, 19 nt, Artificial Sequence
  Synthetic
auacagauauaauaacugu

SEQ ID NO: 68890 - RNA, 20 nt, Artificial Sequence
  Synthetic
aauacagauauaauaacugu

SEQ ID NO: 68891 - RNA, 23 nt, Artificial Sequence
  Synthetic
uggaauacagauauaauaacugu

SEQ ID NO: 68892 - RNA, 24 nt, Artificial Sequence
  Synthetic
auggaauacagauauaauaacugu

SEQ ID NO: 68893 - RNA, 21 nt, Artificial Sequence
  Synthetic
auuucauugauuacuaacugu

SEQ ID NO: 68894 - RNA, 22 nt, Artificial Sequence
  Synthetic
cauuucauugauuacuaacugu

SEQ ID NO: 68895 - RNA, 24 nt, Artificial Sequence
  Synthetic
ugcauuucauugauuacuaacugu

SEQ ID NO: 68896 - RNA, 21 nt, Artificial Sequence
  Synthetic
aguuuuuguguuuuuaacugu

SEQ ID NO: 68897 - RNA, 22 nt, Artificial Sequence
  Synthetic
uaguuuuuguguuuuuaacugu

SEQ ID NO: 68898 - RNA, 23 nt, Artificial Sequence
  Synthetic
auaguuuuuguguuuuuaacugu

SEQ ID NO: 68899 - RNA, 18 nt, Artificial Sequence
  Synthetic
ucggggcaagaccacugu

SEQ ID NO: 68900 - RNA, 19 nt, Artificial Sequence
  Synthetic
uucggggcaagaccacugu

SEQ ID NO: 68901 - RNA, 22 nt, Artificial Sequence
  Synthetic
ugguucggggcaagaccacugu

SEQ ID NO: 68902 - RNA, 23 nt, Artificial Sequence
  Synthetic
augguucggggcaagaccacugu

SEQ ID NO: 68903 - RNA, 24 nt, Artificial Sequence
  Synthetic
uaugguucggggcaagaccacugu

SEQ ID NO: 68904 - RNA, 18 nt, Artificial Sequence
  Synthetic
auuaauguuguucacugu

SEQ ID NO: 68905 - RNA, 19 nt, Artificial Sequence
  Synthetic
aauuaauguuguucacugu

SEQ ID NO: 68906 - RNA, 20 nt, Artificial Sequence
  Synthetic
uaauuaauguuguucacugu

SEQ ID NO: 68907 - RNA, 21 nt, Artificial Sequence
  Synthetic
uuaauuaauguuguucacugu

SEQ ID NO: 68908 - RNA, 22 nt, Artificial Sequence
  Synthetic
auuaauuaauguuguucacugu

SEQ ID NO: 68909 - RNA, 23 nt, Artificial Sequence
  Synthetic
aauuaauuaauguuguucacugu

SEQ ID NO: 68910 - RNA, 24 nt, Artificial Sequence
  Synthetic
aaauuaauuaauguuguucacugu

SEQ ID NO: 68911 - RNA, 22 nt, Artificial Sequence
  Synthetic
aggaguuuggaaagaagacugu

SEQ ID NO: 68912 - RNA, 23 nt, Artificial Sequence
  Synthetic
uaggaguuuggaaagaagacugu

SEQ ID NO: 68913 - RNA, 24 nt, Artificial Sequence
  Synthetic
auaggaguuuggaaagaagacugu

SEQ ID NO: 68914 - RNA, 18 nt, Artificial Sequence
  Synthetic
aggaaguauagauacugu

SEQ ID NO: 68915 - RNA, 19 nt, Artificial Sequence
  Synthetic
uaggaaguauagauacugu

SEQ ID NO: 68916 - RNA, 20 nt, Artificial Sequence
  Synthetic
cuaggaaguauagauacugu

SEQ ID NO: 68917 - RNA, 21 nt, Artificial Sequence
  Synthetic
acuaggaaguauagauacugu

SEQ ID NO: 68918 - RNA, 22 nt, Artificial Sequence
  Synthetic
aacuaggaaguauagauacugu

SEQ ID NO: 68919 - RNA, 19 nt, Artificial Sequence
  Synthetic
agacaaaacgaaguacugu

SEQ ID NO: 68920 - RNA, 20 nt, Artificial Sequence
  Synthetic
cagacaaaacgaaguacugu

SEQ ID NO: 68921 - RNA, 21 nt, Artificial Sequence
  Synthetic
acagacaaaacgaaguacugu

SEQ ID NO: 68922 - RNA, 22 nt, Artificial Sequence
  Synthetic
aacagacaaaacgaaguacugu

SEQ ID NO: 68923 - RNA, 23 nt, Artificial Sequence
  Synthetic
aaacagacaaaacgaaguacugu

SEQ ID NO: 68924 - RNA, 24 nt, Artificial Sequence
  Synthetic
aaaacagacaaaacgaaguacugu

SEQ ID NO: 68925 - RNA, 18 nt, Artificial Sequence
  Synthetic
uaagagaacacuuacugu

SEQ ID NO: 68926 - RNA, 19 nt, Artificial Sequence
  Synthetic
auaagagaacacuuacugu

SEQ ID NO: 68927 - RNA, 20 nt, Artificial Sequence
  Synthetic
aauaagagaacacuuacugu

SEQ ID NO: 68928 - RNA, 21 nt, Artificial Sequence
  Synthetic
aaauaagagaacacuuacugu

SEQ ID NO: 68929 - RNA, 23 nt, Artificial Sequence
  Synthetic
agaaauaagagaacacuuacugu

SEQ ID NO: 68930 - RNA, 24 nt, Artificial Sequence
  Synthetic
cagaaauaagagaacacuuacugu

SEQ ID NO: 68931 - RNA, 18 nt, Artificial Sequence
  Synthetic
ugcaaaggauuuuacugu

SEQ ID NO: 68932 - RNA, 19 nt, Artificial Sequence
  Synthetic
uugcaaaggauuuuacugu

SEQ ID NO: 68933 - RNA, 20 nt, Artificial Sequence
  Synthetic
cuugcaaaggauuuuacugu

SEQ ID NO: 68934 - RNA, 21 nt, Artificial Sequence
  Synthetic
ccuugcaaaggauuuuacugu

SEQ ID NO: 68935 - RNA, 22 nt, Artificial Sequence
  Synthetic
accuugcaaaggauuuuacugu

SEQ ID NO: 68936 - RNA, 23 nt, Artificial Sequence
  Synthetic
aaccuugcaaaggauuuuacugu

SEQ ID NO: 68937 - RNA, 18 nt, Artificial Sequence
  Synthetic
cccuuuacuccaaccugu

SEQ ID NO: 68938 - RNA, 19 nt, Artificial Sequence
  Synthetic
ucccuuuacuccaaccugu

SEQ ID NO: 68939 - RNA, 20 nt, Artificial Sequence
  Synthetic
uucccuuuacuccaaccugu

SEQ ID NO: 68940 - RNA, 21 nt, Artificial Sequence
  Synthetic
auucccuuuacuccaaccugu

SEQ ID NO: 68941 - RNA, 22 nt, Artificial Sequence
  Synthetic
uauucccuuuacuccaaccugu

SEQ ID NO: 68942 - RNA, 24 nt, Artificial Sequence
  Synthetic
aguauucccuuuacuccaaccugu

SEQ ID NO: 68943 - RNA, 18 nt, Artificial Sequence
  Synthetic
uaggaaauggugaccugu

SEQ ID NO: 68944 - RNA, 19 nt, Artificial Sequence
  Synthetic
uuaggaaauggugaccugu

SEQ ID NO: 68945 - RNA, 20 nt, Artificial Sequence
  Synthetic
auuaggaaauggugaccugu

SEQ ID NO: 68946 - RNA, 21 nt, Artificial Sequence
  Synthetic
aauuaggaaauggugaccugu

SEQ ID NO: 68947 - RNA, 22 nt, Artificial Sequence
  Synthetic
uaauuaggaaauggugaccugu

SEQ ID NO: 68948 - RNA, 23 nt, Artificial Sequence
  Synthetic
auaauuaggaaauggugaccugu

SEQ ID NO: 68949 - RNA, 24 nt, Artificial Sequence
  Synthetic
uauaauuaggaaauggugaccugu

SEQ ID NO: 68950 - RNA, 18 nt, Artificial Sequence
  Synthetic
uuaaaaugauguaccugu

SEQ ID NO: 68951 - RNA, 19 nt, Artificial Sequence
  Synthetic
auuaaaaugauguaccugu

SEQ ID NO: 68952 - RNA, 20 nt, Artificial Sequence
  Synthetic
cauuaaaaugauguaccugu

SEQ ID NO: 68953 - RNA, 21 nt, Artificial Sequence
  Synthetic
ucauuaaaaugauguaccugu

SEQ ID NO: 68954 - RNA, 23 nt, Artificial Sequence
  Synthetic
agucauuaaaaugauguaccugu

SEQ ID NO: 68955 - RNA, 24 nt, Artificial Sequence
  Synthetic
aagucauuaaaaugauguaccugu

SEQ ID NO: 68956 - RNA, 21 nt, Artificial Sequence
  Synthetic
acacuaucaucucaccccugu

SEQ ID NO: 68957 - RNA, 22 nt, Artificial Sequence
  Synthetic
aacacuaucaucucaccccugu

SEQ ID NO: 68958 - RNA, 24 nt, Artificial Sequence
  Synthetic
ugaacacuaucaucucaccccugu

SEQ ID NO: 68959 - RNA, 18 nt, Artificial Sequence
  Synthetic
ugcaguggacagcccugu

SEQ ID NO: 68960 - RNA, 19 nt, Artificial Sequence
  Synthetic
cugcaguggacagcccugu

SEQ ID NO: 68961 - RNA, 21 nt, Artificial Sequence
  Synthetic
agcugcaguggacagcccugu

SEQ ID NO: 68962 - RNA, 22 nt, Artificial Sequence
  Synthetic
cagcugcaguggacagcccugu

SEQ ID NO: 68963 - RNA, 24 nt, Artificial Sequence
  Synthetic
ugcagcugcaguggacagcccugu

SEQ ID NO: 68964 - RNA, 18 nt, Artificial Sequence
  Synthetic
uagaguuagaaucccugu

SEQ ID NO: 68965 - RNA, 20 nt, Artificial Sequence
  Synthetic
aguagaguuagaaucccugu

SEQ ID NO: 68966 - RNA, 21 nt, Artificial Sequence
  Synthetic
aaguagaguuagaaucccugu

SEQ ID NO: 68967 - RNA, 22 nt, Artificial Sequence
  Synthetic
caaguagaguuagaaucccugu

SEQ ID NO: 68968 - RNA, 23 nt, Artificial Sequence
  Synthetic
ccaaguagaguuagaaucccugu

SEQ ID NO: 68969 - RNA, 24 nt, Artificial Sequence
  Synthetic
cccaaguagaguuagaaucccugu

SEQ ID NO: 68970 - RNA, 18 nt, Artificial Sequence
  Synthetic
aauauuacaccucccugu

SEQ ID NO: 68971 - RNA, 19 nt, Artificial Sequence
  Synthetic
caauauuacaccucccugu

SEQ ID NO: 68972 - RNA, 21 nt, Artificial Sequence
  Synthetic
ugcaauauuacaccucccugu

SEQ ID NO: 68973 - RNA, 24 nt, Artificial Sequence
  Synthetic
aggugcaauauuacaccucccugu

SEQ ID NO: 68974 - RNA, 18 nt, Artificial Sequence
  Synthetic
aguccuuucucugccugu

SEQ ID NO: 68975 - RNA, 20 nt, Artificial Sequence
  Synthetic
ugaguccuuucucugccugu

SEQ ID NO: 68976 - RNA, 21 nt, Artificial Sequence
  Synthetic
cugaguccuuucucugccugu

SEQ ID NO: 68977 - RNA, 22 nt, Artificial Sequence
  Synthetic
ccugaguccuuucucugccugu

SEQ ID NO: 68978 - RNA, 23 nt, Artificial Sequence
  Synthetic
uccugaguccuuucucugccugu

SEQ ID NO: 68979 - RNA, 24 nt, Artificial Sequence
  Synthetic
uuccugaguccuuucucugccugu

SEQ ID NO: 68980 - RNA, 21 nt, Artificial Sequence
  Synthetic
cuauaucacacauuugccugu

SEQ ID NO: 68981 - RNA, 22 nt, Artificial Sequence
  Synthetic
ucuauaucacacauuugccugu

SEQ ID NO: 68982 - RNA, 23 nt, Artificial Sequence
  Synthetic
uucuauaucacacauuugccugu

SEQ ID NO: 68983 - RNA, 24 nt, Artificial Sequence
  Synthetic
auucuauaucacacauuugccugu

SEQ ID NO: 68984 - RNA, 18 nt, Artificial Sequence
  Synthetic
ugaagaaaauauuccugu

SEQ ID NO: 68985 - RNA, 19 nt, Artificial Sequence
  Synthetic
augaagaaaauauuccugu

SEQ ID NO: 68986 - RNA, 20 nt, Artificial Sequence
  Synthetic
aaugaagaaaauauuccugu

SEQ ID NO: 68987 - RNA, 21 nt, Artificial Sequence
  Synthetic
aaaugaagaaaauauuccugu

SEQ ID NO: 68988 - RNA, 22 nt, Artificial Sequence
  Synthetic
aaaaugaagaaaauauuccugu

SEQ ID NO: 68989 - RNA, 23 nt, Artificial Sequence
  Synthetic
uaaaaugaagaaaauauuccugu

SEQ ID NO: 68990 - RNA, 24 nt, Artificial Sequence
  Synthetic
auaaaaugaagaaaauauuccugu

SEQ ID NO: 68991 - RNA, 18 nt, Artificial Sequence
  Synthetic
uaaaauaaagccagcugu

SEQ ID NO: 68992 - RNA, 19 nt, Artificial Sequence
  Synthetic
uuaaaauaaagccagcugu

SEQ ID NO: 68993 - RNA, 20 nt, Artificial Sequence
  Synthetic
cuuaaaauaaagccagcugu

SEQ ID NO: 68994 - RNA, 21 nt, Artificial Sequence
  Synthetic
ucuuaaaauaaagccagcugu

SEQ ID NO: 68995 - RNA, 22 nt, Artificial Sequence
  Synthetic
cucuuaaaauaaagccagcugu

SEQ ID NO: 68996 - RNA, 23 nt, Artificial Sequence
  Synthetic
ccucuuaaaauaaagccagcugu

SEQ ID NO: 68997 - RNA, 24 nt, Artificial Sequence
  Synthetic
uccucuuaaaauaaagccagcugu

SEQ ID NO: 68998 - RNA, 18 nt, Artificial Sequence
  Synthetic
uaguaauugcuacgcugu

SEQ ID NO: 68999 - RNA, 20 nt, Artificial Sequence
  Synthetic
uguaguaauugcuacgcugu

SEQ ID NO: 69000 - RNA, 21 nt, Artificial Sequence
  Synthetic
uuguaguaauugcuacgcugu

SEQ ID NO: 69001 - RNA, 23 nt, Artificial Sequence
  Synthetic
uguuguaguaauugcuacgcugu

SEQ ID NO: 69002 - RNA, 24 nt, Artificial Sequence
  Synthetic
uuguuguaguaauugcuacgcugu

SEQ ID NO: 69003 - RNA, 18 nt, Artificial Sequence
  Synthetic
augggccagccaggcugu

SEQ ID NO: 69004 - RNA, 20 nt, Artificial Sequence
  Synthetic
ugaugggccagccaggcugu

SEQ ID NO: 69005 - RNA, 21 nt, Artificial Sequence
  Synthetic
uugaugggccagccaggcugu

SEQ ID NO: 69006 - RNA, 22 nt, Artificial Sequence
  Synthetic
auugaugggccagccaggcugu

SEQ ID NO: 69007 - RNA, 23 nt, Artificial Sequence
  Synthetic
aauugaugggccagccaggcugu

SEQ ID NO: 69008 - RNA, 24 nt, Artificial Sequence
  Synthetic
aaauugaugggccagccaggcugu

SEQ ID NO: 69009 - RNA, 18 nt, Artificial Sequence
  Synthetic
ucuugggcaguuggcugu

SEQ ID NO: 69010 - RNA, 19 nt, Artificial Sequence
  Synthetic
uucuugggcaguuggcugu

SEQ ID NO: 69011 - RNA, 20 nt, Artificial Sequence
  Synthetic
auucuugggcaguuggcugu

SEQ ID NO: 69012 - RNA, 21 nt, Artificial Sequence
  Synthetic
uauucuugggcaguuggcugu

SEQ ID NO: 69013 - RNA, 22 nt, Artificial Sequence
  Synthetic
auauucuugggcaguuggcugu

SEQ ID NO: 69014 - RNA, 23 nt, Artificial Sequence
  Synthetic
aauauucuugggcaguuggcugu

SEQ ID NO: 69015 - RNA, 18 nt, Artificial Sequence
  Synthetic
augcucuucccuugcugu

SEQ ID NO: 69016 - RNA, 20 nt, Artificial Sequence
  Synthetic
agaugcucuucccuugcugu

SEQ ID NO: 69017 - RNA, 21 nt, Artificial Sequence
  Synthetic
uagaugcucuucccuugcugu

SEQ ID NO: 69018 - RNA, 22 nt, Artificial Sequence
  Synthetic
cuagaugcucuucccuugcugu

SEQ ID NO: 69019 - RNA, 23 nt, Artificial Sequence
  Synthetic
ccuagaugcucuucccuugcugu

SEQ ID NO: 69020 - RNA, 24 nt, Artificial Sequence
  Synthetic
uccuagaugcucuucccuugcugu

SEQ ID NO: 69021 - RNA, 18 nt, Artificial Sequence
  Synthetic
uguaaaguggcaaucugu

SEQ ID NO: 69022 - RNA, 19 nt, Artificial Sequence
  Synthetic
cuguaaaguggcaaucugu

SEQ ID NO: 69023 - RNA, 20 nt, Artificial Sequence
  Synthetic
ucuguaaaguggcaaucugu

SEQ ID NO: 69024 - RNA, 21 nt, Artificial Sequence
  Synthetic
aucuguaaaguggcaaucugu

SEQ ID NO: 69025 - RNA, 22 nt, Artificial Sequence
  Synthetic
uaucuguaaaguggcaaucugu

SEQ ID NO: 69026 - RNA, 23 nt, Artificial Sequence
  Synthetic
uuaucuguaaaguggcaaucugu

SEQ ID NO: 69027 - RNA, 24 nt, Artificial Sequence
  Synthetic
cuuaucuguaaaguggcaaucugu

SEQ ID NO: 69028 - RNA, 18 nt, Artificial Sequence
  Synthetic
uacagggaaagcaucugu

SEQ ID NO: 69029 - RNA, 19 nt, Artificial Sequence
  Synthetic
uuacagggaaagcaucugu

SEQ ID NO: 69030 - RNA, 20 nt, Artificial Sequence
  Synthetic
uuuacagggaaagcaucugu

SEQ ID NO: 69031 - RNA, 21 nt, Artificial Sequence
  Synthetic
uuuuacagggaaagcaucugu

SEQ ID NO: 69032 - RNA, 22 nt, Artificial Sequence
  Synthetic
auuuuacagggaaagcaucugu

SEQ ID NO: 69033 - RNA, 23 nt, Artificial Sequence
  Synthetic
uauuuuacagggaaagcaucugu

SEQ ID NO: 69034 - RNA, 24 nt, Artificial Sequence
  Synthetic
auauuuuacagggaaagcaucugu

SEQ ID NO: 69035 - RNA, 18 nt, Artificial Sequence
  Synthetic
aaaugguuauuacucugu

SEQ ID NO: 69036 - RNA, 19 nt, Artificial Sequence
  Synthetic
caaaugguuauuacucugu

SEQ ID NO: 69037 - RNA, 20 nt, Artificial Sequence
  Synthetic
ucaaaugguuauuacucugu

SEQ ID NO: 69038 - RNA, 18 nt, Artificial Sequence
  Synthetic
ucuuaucauuagcucugu

SEQ ID NO: 69039 - RNA, 20 nt, Artificial Sequence
  Synthetic
agucuuaucauuagcucugu

SEQ ID NO: 69040 - RNA, 21 nt, Artificial Sequence
  Synthetic
cagucuuaucauuagcucugu

SEQ ID NO: 69041 - RNA, 22 nt, Artificial Sequence
  Synthetic
acagucuuaucauuagcucugu

SEQ ID NO: 69042 - RNA, 23 nt, Artificial Sequence
  Synthetic
uacagucuuaucauuagcucugu

SEQ ID NO: 69043 - RNA, 24 nt, Artificial Sequence
  Synthetic
uuacagucuuaucauuagcucugu

SEQ ID NO: 69044 - RNA, 18 nt, Artificial Sequence
  Synthetic
uaguuaacaauucucugu

SEQ ID NO: 69045 - RNA, 19 nt, Artificial Sequence
  Synthetic
uuaguuaacaauucucugu

SEQ ID NO: 69046 - RNA, 20 nt, Artificial Sequence
  Synthetic
cuuaguuaacaauucucugu

SEQ ID NO: 69047 - RNA, 21 nt, Artificial Sequence
  Synthetic
acuuaguuaacaauucucugu

SEQ ID NO: 69048 - RNA, 23 nt, Artificial Sequence
  Synthetic
ugacuuaguuaacaauucucugu

SEQ ID NO: 69049 - RNA, 24 nt, Artificial Sequence
  Synthetic
augacuuaguuaacaauucucugu

SEQ ID NO: 69050 - RNA, 18 nt, Artificial Sequence
  Synthetic
acuaccacugaagucugu

SEQ ID NO: 69051 - RNA, 19 nt, Artificial Sequence
  Synthetic
aacuaccacugaagucugu

SEQ ID NO: 69052 - RNA, 20 nt, Artificial Sequence
  Synthetic
aaacuaccacugaagucugu

SEQ ID NO: 69053 - RNA, 21 nt, Artificial Sequence
  Synthetic
aaaacuaccacugaagucugu

SEQ ID NO: 69054 - RNA, 22 nt, Artificial Sequence
  Synthetic
aaaaacuaccacugaagucugu

SEQ ID NO: 69055 - RNA, 23 nt, Artificial Sequence
  Synthetic
uaaaaacuaccacugaagucugu

SEQ ID NO: 69056 - RNA, 24 nt, Artificial Sequence
  Synthetic
uuaaaaacuaccacugaagucugu

SEQ ID NO: 69057 - RNA, 21 nt, Artificial Sequence
  Synthetic
aguauauuaaaauaagucugu

SEQ ID NO: 69058 - RNA, 23 nt, Artificial Sequence
  Synthetic
agaguauauuaaaauaagucugu

SEQ ID NO: 69059 - RNA, 24 nt, Artificial Sequence
  Synthetic
uagaguauauuaaaauaagucugu

SEQ ID NO: 69060 - RNA, 19 nt, Artificial Sequence
  Synthetic
agaucacggcacugucugu

SEQ ID NO: 69061 - RNA, 20 nt, Artificial Sequence
  Synthetic
cagaucacggcacugucugu

SEQ ID NO: 69062 - RNA, 21 nt, Artificial Sequence
  Synthetic
acagaucacggcacugucugu

SEQ ID NO: 69063 - RNA, 22 nt, Artificial Sequence
  Synthetic
uacagaucacggcacugucugu

SEQ ID NO: 69064 - RNA, 23 nt, Artificial Sequence
  Synthetic
uuacagaucacggcacugucugu

SEQ ID NO: 69065 - RNA, 24 nt, Artificial Sequence
  Synthetic
cuuacagaucacggcacugucugu

SEQ ID NO: 69066 - RNA, 18 nt, Artificial Sequence
  Synthetic
ugaucuuacauugucugu

SEQ ID NO: 69067 - RNA, 20 nt, Artificial Sequence
  Synthetic
cgugaucuuacauugucugu

SEQ ID NO: 69068 - RNA, 21 nt, Artificial Sequence
  Synthetic
ccgugaucuuacauugucugu

SEQ ID NO: 69069 - RNA, 22 nt, Artificial Sequence
  Synthetic
accgugaucuuacauugucugu

SEQ ID NO: 69070 - RNA, 23 nt, Artificial Sequence
  Synthetic
uaccgugaucuuacauugucugu

SEQ ID NO: 69071 - RNA, 24 nt, Artificial Sequence
  Synthetic
auaccgugaucuuacauugucugu

SEQ ID NO: 69072 - RNA, 18 nt, Artificial Sequence
  Synthetic
cauucggauguugucugu

SEQ ID NO: 69073 - RNA, 19 nt, Artificial Sequence
  Synthetic
ccauucggauguugucugu

SEQ ID NO: 69074 - RNA, 20 nt, Artificial Sequence
  Synthetic
uccauucggauguugucugu

SEQ ID NO: 69075 - RNA, 21 nt, Artificial Sequence
  Synthetic
cuccauucggauguugucugu

SEQ ID NO: 69076 - RNA, 22 nt, Artificial Sequence
  Synthetic
ucuccauucggauguugucugu

SEQ ID NO: 69077 - RNA, 23 nt, Artificial Sequence
  Synthetic
uucuccauucggauguugucugu

SEQ ID NO: 69078 - RNA, 24 nt, Artificial Sequence
  Synthetic
cuucuccauucggauguugucugu

SEQ ID NO: 69079 - RNA, 18 nt, Artificial Sequence
  Synthetic
uaauuaagcaaauucugu

SEQ ID NO: 69080 - RNA, 19 nt, Artificial Sequence
  Synthetic
uuaauuaagcaaauucugu

SEQ ID NO: 69081 - RNA, 20 nt, Artificial Sequence
  Synthetic
uuuaauuaagcaaauucugu

SEQ ID NO: 69082 - RNA, 21 nt, Artificial Sequence
  Synthetic
uuuuaauuaagcaaauucugu

SEQ ID NO: 69083 - RNA, 22 nt, Artificial Sequence
  Synthetic
uuuuuaauuaagcaaauucugu

SEQ ID NO: 69084 - RNA, 23 nt, Artificial Sequence
  Synthetic
cuuuuuaauuaagcaaauucugu

SEQ ID NO: 69085 - RNA, 24 nt, Artificial Sequence
  Synthetic
ccuuuuuaauuaagcaaauucugu

SEQ ID NO: 69086 - RNA, 18 nt, Artificial Sequence
  Synthetic
ugccauagugacuucugu

SEQ ID NO: 69087 - RNA, 19 nt, Artificial Sequence
  Synthetic
uugccauagugacuucugu

SEQ ID NO: 69088 - RNA, 20 nt, Artificial Sequence
  Synthetic
uuugccauagugacuucugu

SEQ ID NO: 69089 - RNA, 21 nt, Artificial Sequence
  Synthetic
auuugccauagugacuucugu

SEQ ID NO: 69090 - RNA, 22 nt, Artificial Sequence
  Synthetic
aauuugccauagugacuucugu

SEQ ID NO: 69091 - RNA, 23 nt, Artificial Sequence
  Synthetic
caauuugccauagugacuucugu

SEQ ID NO: 69092 - RNA, 24 nt, Artificial Sequence
  Synthetic
ucaauuugccauagugacuucugu

SEQ ID NO: 69093 - RNA, 18 nt, Artificial Sequence
  Synthetic
uggauauuuuaguucugu

SEQ ID NO: 69094 - RNA, 19 nt, Artificial Sequence
  Synthetic
uuggauauuuuaguucugu

SEQ ID NO: 69095 - RNA, 20 nt, Artificial Sequence
  Synthetic
auuggauauuuuaguucugu

SEQ ID NO: 69096 - RNA, 22 nt, Artificial Sequence
  Synthetic
agauuggauauuuuaguucugu

SEQ ID NO: 69097 - RNA, 23 nt, Artificial Sequence
  Synthetic
aagauuggauauuuuaguucugu

SEQ ID NO: 69098 - RNA, 24 nt, Artificial Sequence
  Synthetic
uaagauuggauauuuuaguucugu

SEQ ID NO: 69099 - RNA, 18 nt, Artificial Sequence
  Synthetic
cuaggccgucgguucugu

SEQ ID NO: 69100 - RNA, 19 nt, Artificial Sequence
  Synthetic
ucuaggccgucgguucugu

SEQ ID NO: 69101 - RNA, 20 nt, Artificial Sequence
  Synthetic
cucuaggccgucgguucugu

SEQ ID NO: 69102 - RNA, 21 nt, Artificial Sequence
  Synthetic
ucucuaggccgucgguucugu

SEQ ID NO: 69103 - RNA, 22 nt, Artificial Sequence
  Synthetic
aucucuaggccgucgguucugu

SEQ ID NO: 69104 - RNA, 23 nt, Artificial Sequence
  Synthetic
uaucucuaggccgucgguucugu

SEQ ID NO: 69105 - RNA, 24 nt, Artificial Sequence
  Synthetic
uuaucucuaggccgucgguucugu

SEQ ID NO: 69106 - RNA, 18 nt, Artificial Sequence
  Synthetic
uccaugaauauguucugu

SEQ ID NO: 69107 - RNA, 19 nt, Artificial Sequence
  Synthetic
uuccaugaauauguucugu

SEQ ID NO: 69108 - RNA, 20 nt, Artificial Sequence
  Synthetic
cuuccaugaauauguucugu

SEQ ID NO: 69109 - RNA, 21 nt, Artificial Sequence
  Synthetic
acuuccaugaauauguucugu

SEQ ID NO: 69110 - RNA, 22 nt, Artificial Sequence
  Synthetic
cacuuccaugaauauguucugu

SEQ ID NO: 69111 - RNA, 23 nt, Artificial Sequence
  Synthetic
acacuuccaugaauauguucugu

SEQ ID NO: 69112 - RNA, 24 nt, Artificial Sequence
  Synthetic
aacacuuccaugaauauguucugu

SEQ ID NO: 69113 - RNA, 18 nt, Artificial Sequence
  Synthetic
auguguacacauuucugu

SEQ ID NO: 69114 - RNA, 20 nt, Artificial Sequence
  Synthetic
ugauguguacacauuucugu

SEQ ID NO: 69115 - RNA, 22 nt, Artificial Sequence
  Synthetic
ugugauguguacacauuucugu

SEQ ID NO: 69116 - RNA, 23 nt, Artificial Sequence
  Synthetic
uugugauguguacacauuucugu

SEQ ID NO: 69117 - RNA, 24 nt, Artificial Sequence
  Synthetic
cuugugauguguacacauuucugu

SEQ ID NO: 69118 - RNA, 19 nt, Artificial Sequence
  Synthetic
agaauucauccauuucugu

SEQ ID NO: 69119 - RNA, 20 nt, Artificial Sequence
  Synthetic
aagaauucauccauuucugu

SEQ ID NO: 69120 - RNA, 21 nt, Artificial Sequence
  Synthetic
uaagaauucauccauuucugu

SEQ ID NO: 69121 - RNA, 22 nt, Artificial Sequence
  Synthetic
cuaagaauucauccauuucugu

SEQ ID NO: 69122 - RNA, 23 nt, Artificial Sequence
  Synthetic
ucuaagaauucauccauuucugu

SEQ ID NO: 69123 - RNA, 24 nt, Artificial Sequence
  Synthetic
uucuaagaauucauccauuucugu

SEQ ID NO: 69124 - RNA, 18 nt, Artificial Sequence
  Synthetic
uacuguauccuuuucugu

SEQ ID NO: 69125 - RNA, 19 nt, Artificial Sequence
  Synthetic
uuacuguauccuuuucugu

SEQ ID NO: 69126 - RNA, 20 nt, Artificial Sequence
  Synthetic
auuacuguauccuuuucugu

SEQ ID NO: 69127 - RNA, 21 nt, Artificial Sequence
  Synthetic
uauuacuguauccuuuucugu

SEQ ID NO: 69128 - RNA, 22 nt, Artificial Sequence
  Synthetic
auauuacuguauccuuuucugu

SEQ ID NO: 69129 - RNA, 23 nt, Artificial Sequence
  Synthetic
cauauuacuguauccuuuucugu

SEQ ID NO: 69130 - RNA, 24 nt, Artificial Sequence
  Synthetic
ucauauuacuguauccuuuucugu

SEQ ID NO: 69131 - RNA, 18 nt, Artificial Sequence
  Synthetic
caguauaauuuuuucugu

SEQ ID NO: 69132 - RNA, 20 nt, Artificial Sequence
  Synthetic
ugcaguauaauuuuuucugu

SEQ ID NO: 69133 - RNA, 21 nt, Artificial Sequence
  Synthetic
cugcaguauaauuuuuucugu

SEQ ID NO: 69134 - RNA, 22 nt, Artificial Sequence
  Synthetic
ccugcaguauaauuuuuucugu

SEQ ID NO: 69135 - RNA, 23 nt, Artificial Sequence
  Synthetic
accugcaguauaauuuuuucugu

SEQ ID NO: 69136 - RNA, 24 nt, Artificial Sequence
  Synthetic
aaccugcaguauaauuuuuucugu

SEQ ID NO: 69137 - RNA, 18 nt, Artificial Sequence
  Synthetic
cauuggagacugaagugu

SEQ ID NO: 69138 - RNA, 20 nt, Artificial Sequence
  Synthetic
agcauuggagacugaagugu

SEQ ID NO: 69139 - RNA, 21 nt, Artificial Sequence
  Synthetic
aagcauuggagacugaagugu

SEQ ID NO: 69140 - RNA, 22 nt, Artificial Sequence
  Synthetic
uaagcauuggagacugaagugu

SEQ ID NO: 69141 - RNA, 23 nt, Artificial Sequence
  Synthetic
auaagcauuggagacugaagugu

SEQ ID NO: 69142 - RNA, 18 nt, Artificial Sequence
  Synthetic
aaaguaaggaauaagugu

SEQ ID NO: 69143 - RNA, 21 nt, Artificial Sequence
  Synthetic
aggaaaguaaggaauaagugu

SEQ ID NO: 69144 - RNA, 22 nt, Artificial Sequence
  Synthetic
caggaaaguaaggaauaagugu

SEQ ID NO: 69145 - RNA, 18 nt, Artificial Sequence
  Synthetic
acagcaauguguaagugu

SEQ ID NO: 69146 - RNA, 19 nt, Artificial Sequence
  Synthetic
uacagcaauguguaagugu

SEQ ID NO: 69147 - RNA, 20 nt, Artificial Sequence
  Synthetic
uuacagcaauguguaagugu

SEQ ID NO: 69148 - RNA, 23 nt, Artificial Sequence
  Synthetic
agguuacagcaauguguaagugu

SEQ ID NO: 69149 - RNA, 24 nt, Artificial Sequence
  Synthetic
aagguuacagcaauguguaagugu

SEQ ID NO: 69150 - RNA, 19 nt, Artificial Sequence
  Synthetic
uguugcagugcuuaagugu

SEQ ID NO: 69151 - RNA, 20 nt, Artificial Sequence
  Synthetic
cuguugcagugcuuaagugu

SEQ ID NO: 69152 - RNA, 22 nt, Artificial Sequence
  Synthetic
ugcuguugcagugcuuaagugu

SEQ ID NO: 69153 - RNA, 23 nt, Artificial Sequence
  Synthetic
cugcuguugcagugcuuaagugu

SEQ ID NO: 69154 - RNA, 24 nt, Artificial Sequence
  Synthetic
ucugcuguugcagugcuuaagugu

SEQ ID NO: 69155 - RNA, 18 nt, Artificial Sequence
  Synthetic
ugggcuuuuucacagugu

SEQ ID NO: 69156 - RNA, 19 nt, Artificial Sequence
  Synthetic
uugggcuuuuucacagugu

SEQ ID NO: 69157 - RNA, 20 nt, Artificial Sequence
  Synthetic
uuugggcuuuuucacagugu

SEQ ID NO: 69158 - RNA, 22 nt, Artificial Sequence
  Synthetic
aguuugggcuuuuucacagugu

SEQ ID NO: 69159 - RNA, 23 nt, Artificial Sequence
  Synthetic
caguuugggcuuuuucacagugu

SEQ ID NO: 69160 - RNA, 18 nt, Artificial Sequence
  Synthetic
ugaucaugucuccagugu

SEQ ID NO: 69161 - RNA, 19 nt, Artificial Sequence
  Synthetic
uugaucaugucuccagugu

SEQ ID NO: 69162 - RNA, 20 nt, Artificial Sequence
  Synthetic
auugaucaugucuccagugu

SEQ ID NO: 69163 - RNA, 21 nt, Artificial Sequence
  Synthetic
aauugaucaugucuccagugu

SEQ ID NO: 69164 - RNA, 23 nt, Artificial Sequence
  Synthetic
ugaauugaucaugucuccagugu

SEQ ID NO: 69165 - RNA, 24 nt, Artificial Sequence
  Synthetic
augaauugaucaugucuccagugu

SEQ ID NO: 69166 - RNA, 18 nt, Artificial Sequence
  Synthetic
uuuugaaaagaagagugu

SEQ ID NO: 69167 - RNA, 22 nt, Artificial Sequence
  Synthetic
aggguuuugaaaagaagagugu

SEQ ID NO: 69168 - RNA, 23 nt, Artificial Sequence
  Synthetic
aaggguuuugaaaagaagagugu

SEQ ID NO: 69169 - RNA, 24 nt, Artificial Sequence
  Synthetic
caaggguuuugaaaagaagagugu

SEQ ID NO: 69170 - RNA, 18 nt, Artificial Sequence
  Synthetic
augggaugugaagagugu

SEQ ID NO: 69171 - RNA, 21 nt, Artificial Sequence
  Synthetic
uggaugggaugugaagagugu

SEQ ID NO: 69172 - RNA, 22 nt, Artificial Sequence
  Synthetic
cuggaugggaugugaagagugu

SEQ ID NO: 69173 - RNA, 24 nt, Artificial Sequence
  Synthetic
agcuggaugggaugugaagagugu

SEQ ID NO: 69174 - RNA, 18 nt, Artificial Sequence
  Synthetic
uuucugauuggagagugu

SEQ ID NO: 69175 - RNA, 19 nt, Artificial Sequence
  Synthetic
auuucugauuggagagugu

SEQ ID NO: 69176 - RNA, 21 nt, Artificial Sequence
  Synthetic
agauuucugauuggagagugu

SEQ ID NO: 69177 - RNA, 22 nt, Artificial Sequence
  Synthetic
aagauuucugauuggagagugu

SEQ ID NO: 69178 - RNA, 23 nt, Artificial Sequence
  Synthetic
aaagauuucugauuggagagugu

SEQ ID NO: 69179 - RNA, 24 nt, Artificial Sequence
  Synthetic
caaagauuucugauuggagagugu

SEQ ID NO: 69180 - RNA, 19 nt, Artificial Sequence
  Synthetic
agcacaagaacgugagugu

SEQ ID NO: 69181 - RNA, 21 nt, Artificial Sequence
  Synthetic
agagcacaagaacgugagugu

SEQ ID NO: 69182 - RNA, 23 nt, Artificial Sequence
  Synthetic
ugagagcacaagaacgugagugu

SEQ ID NO: 69183 - RNA, 24 nt, Artificial Sequence
  Synthetic
augagagcacaagaacgugagugu

SEQ ID NO: 69184 - RNA, 18 nt, Artificial Sequence
  Synthetic
uugccuuucgaauagugu

SEQ ID NO: 69185 - RNA, 19 nt, Artificial Sequence
  Synthetic
uuugccuuucgaauagugu

SEQ ID NO: 69186 - RNA, 21 nt, Artificial Sequence
  Synthetic
aguuugccuuucgaauagugu

SEQ ID NO: 69187 - RNA, 22 nt, Artificial Sequence
  Synthetic
uaguuugccuuucgaauagugu

SEQ ID NO: 69188 - RNA, 23 nt, Artificial Sequence
  Synthetic
auaguuugccuuucgaauagugu

SEQ ID NO: 69189 - RNA, 24 nt, Artificial Sequence
  Synthetic
aauaguuugccuuucgaauagugu

SEQ ID NO: 69190 - RNA, 18 nt, Artificial Sequence
  Synthetic
cucuuucauuuauagugu

SEQ ID NO: 69191 - RNA, 19 nt, Artificial Sequence
  Synthetic
acucuuucauuuauagugu

SEQ ID NO: 69192 - RNA, 20 nt, Artificial Sequence
  Synthetic
uacucuuucauuuauagugu

SEQ ID NO: 69193 - RNA, 21 nt, Artificial Sequence
  Synthetic
cuacucuuucauuuauagugu

SEQ ID NO: 69194 - RNA, 23 nt, Artificial Sequence
  Synthetic
ugcuacucuuucauuuauagugu

SEQ ID NO: 69195 - RNA, 24 nt, Artificial Sequence
  Synthetic
uugcuacucuuucauuuauagugu

SEQ ID NO: 69196 - RNA, 18 nt, Artificial Sequence
  Synthetic
uagucagugugguagugu

SEQ ID NO: 69197 - RNA, 19 nt, Artificial Sequence
  Synthetic
uuagucagugugguagugu

SEQ ID NO: 69198 - RNA, 20 nt, Artificial Sequence
  Synthetic
cuuagucagugugguagugu

SEQ ID NO: 69199 - RNA, 23 nt, Artificial Sequence
  Synthetic
aggcuuagucagugugguagugu

SEQ ID NO: 69200 - RNA, 24 nt, Artificial Sequence
  Synthetic
aaggcuuagucagugugguagugu

SEQ ID NO: 69201 - RNA, 20 nt, Artificial Sequence
  Synthetic
aggugcuuagaaguuagugu

SEQ ID NO: 69202 - RNA, 21 nt, Artificial Sequence
  Synthetic
uaggugcuuagaaguuagugu

SEQ ID NO: 69203 - RNA, 23 nt, Artificial Sequence
  Synthetic
aguaggugcuuagaaguuagugu

SEQ ID NO: 69204 - RNA, 22 nt, Artificial Sequence
  Synthetic
ugcccagugaugaggaaggugu

SEQ ID NO: 69205 - RNA, 23 nt, Artificial Sequence
  Synthetic
augcccagugaugaggaaggugu

SEQ ID NO: 69206 - RNA, 24 nt, Artificial Sequence
  Synthetic
aaugcccagugaugaggaaggugu

SEQ ID NO: 69207 - RNA, 18 nt, Artificial Sequence
  Synthetic
augggccuauguaggugu

SEQ ID NO: 69208 - RNA, 19 nt, Artificial Sequence
  Synthetic
uaugggccuauguaggugu

SEQ ID NO: 69209 - RNA, 20 nt, Artificial Sequence
  Synthetic
uuaugggccuauguaggugu

SEQ ID NO: 69210 - RNA, 21 nt, Artificial Sequence
  Synthetic
cuuaugggccuauguaggugu

SEQ ID NO: 69211 - RNA, 22 nt, Artificial Sequence
  Synthetic
acuuaugggccuauguaggugu

SEQ ID NO: 69212 - RNA, 23 nt, Artificial Sequence
  Synthetic
aacuuaugggccuauguaggugu

SEQ ID NO: 69213 - RNA, 24 nt, Artificial Sequence
  Synthetic
aaacuuaugggccuauguaggugu

SEQ ID NO: 69214 - RNA, 18 nt, Artificial Sequence
  Synthetic
aagggccgcucagggugu

SEQ ID NO: 69215 - RNA, 19 nt, Artificial Sequence
  Synthetic
aaagggccgcucagggugu

SEQ ID NO: 69216 - RNA, 20 nt, Artificial Sequence
  Synthetic
uaaagggccgcucagggugu

SEQ ID NO: 69217 - RNA, 21 nt, Artificial Sequence
  Synthetic
uuaaagggccgcucagggugu

SEQ ID NO: 69218 - RNA, 22 nt, Artificial Sequence
  Synthetic
uuuaaagggccgcucagggugu

SEQ ID NO: 69219 - RNA, 23 nt, Artificial Sequence
  Synthetic
uuuuaaagggccgcucagggugu

SEQ ID NO: 69220 - RNA, 24 nt, Artificial Sequence
  Synthetic
cuuuuaaagggccgcucagggugu

SEQ ID NO: 69221 - RNA, 20 nt, Artificial Sequence
  Synthetic
uggccauaucuguagggugu

SEQ ID NO: 69222 - RNA, 21 nt, Artificial Sequence
  Synthetic
cuggccauaucuguagggugu

SEQ ID NO: 69223 - RNA, 22 nt, Artificial Sequence
  Synthetic
ccuggccauaucuguagggugu

SEQ ID NO: 69224 - RNA, 23 nt, Artificial Sequence
  Synthetic
uccuggccauaucuguagggugu

SEQ ID NO: 69225 - RNA, 21 nt, Artificial Sequence
  Synthetic
uguuggggggggggggggugu

SEQ ID NO: 69226 - RNA, 22 nt, Artificial Sequence
  Synthetic
uuguuggggggggggggggugu

SEQ ID NO: 69227 - RNA, 23 nt, Artificial Sequence
  Synthetic
cuuguuggggggggggggggugu

SEQ ID NO: 69228 - RNA, 24 nt, Artificial Sequence
  Synthetic
ccuuguuggggggggggggggugu

SEQ ID NO: 69229 - RNA, 19 nt, Artificial Sequence
  Synthetic
agaauuucagagugggugu

SEQ ID NO: 69230 - RNA, 20 nt, Artificial Sequence
  Synthetic
cagaauuucagagugggugu

SEQ ID NO: 69231 - RNA, 18 nt, Artificial Sequence
  Synthetic
aacucucuucaauggugu

SEQ ID NO: 69232 - RNA, 19 nt, Artificial Sequence
  Synthetic
uaacucucuucaauggugu

SEQ ID NO: 69233 - RNA, 20 nt, Artificial Sequence
  Synthetic
auaacucucuucaauggugu

SEQ ID NO: 69234 - RNA, 21 nt, Artificial Sequence
  Synthetic
aauaacucucuucaauggugu

SEQ ID NO: 69235 - RNA, 22 nt, Artificial Sequence
  Synthetic
caauaacucucuucaauggugu

SEQ ID NO: 69236 - RNA, 23 nt, Artificial Sequence
  Synthetic
ucaauaacucucuucaauggugu

SEQ ID NO: 69237 - RNA, 20 nt, Artificial Sequence
  Synthetic
aggcaggaagaugauggugu

SEQ ID NO: 69238 - RNA, 21 nt, Artificial Sequence
  Synthetic
uaggcaggaagaugauggugu

SEQ ID NO: 69239 - RNA, 22 nt, Artificial Sequence
  Synthetic
uuaggcaggaagaugauggugu

SEQ ID NO: 69240 - RNA, 23 nt, Artificial Sequence
  Synthetic
uuuaggcaggaagaugauggugu

SEQ ID NO: 69241 - RNA, 18 nt, Artificial Sequence
  Synthetic
aaggggaaccacuggugu

SEQ ID NO: 69242 - RNA, 19 nt, Artificial Sequence
  Synthetic
aaaggggaaccacuggugu

SEQ ID NO: 69243 - RNA, 21 nt, Artificial Sequence
  Synthetic
agaaaggggaaccacuggugu

SEQ ID NO: 69244 - RNA, 23 nt, Artificial Sequence
  Synthetic
agagaaaggggaaccacuggugu

SEQ ID NO: 69245 - RNA, 18 nt, Artificial Sequence
  Synthetic
uaaaucuagcaguggugu

SEQ ID NO: 69246 - RNA, 19 nt, Artificial Sequence
  Synthetic
auaaaucuagcaguggugu

SEQ ID NO: 69247 - RNA, 21 nt, Artificial Sequence
  Synthetic
agauaaaucuagcaguggugu

SEQ ID NO: 69248 - RNA, 22 nt, Artificial Sequence
  Synthetic
aagauaaaucuagcaguggugu

SEQ ID NO: 69249 - RNA, 18 nt, Artificial Sequence
  Synthetic
aaauggcugcuuuggugu

SEQ ID NO: 69250 - RNA, 19 nt, Artificial Sequence
  Synthetic
aaaauggcugcuuuggugu

SEQ ID NO: 69251 - RNA, 20 nt, Artificial Sequence
  Synthetic
caaaauggcugcuuuggugu

SEQ ID NO: 69252 - RNA, 21 nt, Artificial Sequence
  Synthetic
acaaaauggcugcuuuggugu

SEQ ID NO: 69253 - RNA, 22 nt, Artificial Sequence
  Synthetic
aacaaaauggcugcuuuggugu

SEQ ID NO: 69254 - RNA, 23 nt, Artificial Sequence
  Synthetic
uaacaaaauggcugcuuuggugu

SEQ ID NO: 69255 - RNA, 24 nt, Artificial Sequence
  Synthetic
auaacaaaauggcugcuuuggugu

SEQ ID NO: 69256 - RNA, 18 nt, Artificial Sequence
  Synthetic
ucuuuaacucuuuggugu

SEQ ID NO: 69257 - RNA, 19 nt, Artificial Sequence
  Synthetic
uucuuuaacucuuuggugu

SEQ ID NO: 69258 - RNA, 20 nt, Artificial Sequence
  Synthetic
uuucuuuaacucuuuggugu

SEQ ID NO: 69259 - RNA, 21 nt, Artificial Sequence
  Synthetic
uuuucuuuaacucuuuggugu

SEQ ID NO: 69260 - RNA, 22 nt, Artificial Sequence
  Synthetic
uuuuucuuuaacucuuuggugu

SEQ ID NO: 69261 - RNA, 23 nt, Artificial Sequence
  Synthetic
auuuuucuuuaacucuuuggugu

SEQ ID NO: 69262 - RNA, 24 nt, Artificial Sequence
  Synthetic
cauuuuucuuuaacucuuuggugu

SEQ ID NO: 69263 - RNA, 18 nt, Artificial Sequence
  Synthetic
uccauacuaguuuggugu

SEQ ID NO: 69264 - RNA, 19 nt, Artificial Sequence
  Synthetic
uuccauacuaguuuggugu

SEQ ID NO: 69265 - RNA, 20 nt, Artificial Sequence
  Synthetic
cuuccauacuaguuuggugu

SEQ ID NO: 69266 - RNA, 21 nt, Artificial Sequence
  Synthetic
acuuccauacuaguuuggugu

SEQ ID NO: 69267 - RNA, 22 nt, Artificial Sequence
  Synthetic
aacuuccauacuaguuuggugu

SEQ ID NO: 69268 - RNA, 23 nt, Artificial Sequence
  Synthetic
uaacuuccauacuaguuuggugu

SEQ ID NO: 69269 - RNA, 24 nt, Artificial Sequence
  Synthetic
auaacuuccauacuaguuuggugu

SEQ ID NO: 69270 - RNA, 18 nt, Artificial Sequence
  Synthetic
cuuucuaauucaaugugu

SEQ ID NO: 69271 - RNA, 19 nt, Artificial Sequence
  Synthetic
ucuuucuaauucaaugugu

SEQ ID NO: 69272 - RNA, 20 nt, Artificial Sequence
  Synthetic
uucuuucuaauucaaugugu

SEQ ID NO: 69273 - RNA, 21 nt, Artificial Sequence
  Synthetic
uuucuuucuaauucaaugugu

SEQ ID NO: 69274 - RNA, 22 nt, Artificial Sequence
  Synthetic
uuuucuuucuaauucaaugugu

SEQ ID NO: 69275 - RNA, 24 nt, Artificial Sequence
  Synthetic
aguuuucuuucuaauucaaugugu

SEQ ID NO: 69276 - RNA, 18 nt, Artificial Sequence
  Synthetic
cuacauggauggaugugu

SEQ ID NO: 69277 - RNA, 21 nt, Artificial Sequence
  Synthetic
uggcuacauggauggaugugu

SEQ ID NO: 69278 - RNA, 22 nt, Artificial Sequence
  Synthetic
cuggcuacauggauggaugugu

SEQ ID NO: 69279 - RNA, 24 nt, Artificial Sequence
  Synthetic
agcuggcuacauggauggaugugu

SEQ ID NO: 69280 - RNA, 18 nt, Artificial Sequence
  Synthetic
uauugugucaauaugugu

SEQ ID NO: 69281 - RNA, 19 nt, Artificial Sequence
  Synthetic
auauugugucaauaugugu

SEQ ID NO: 69282 - RNA, 20 nt, Artificial Sequence
  Synthetic
cauauugugucaauaugugu

SEQ ID NO: 69283 - RNA, 21 nt, Artificial Sequence
  Synthetic
acauauugugucaauaugugu

SEQ ID NO: 69284 - RNA, 22 nt, Artificial Sequence
  Synthetic
aacauauugugucaauaugugu

SEQ ID NO: 69285 - RNA, 23 nt, Artificial Sequence
  Synthetic
uaacauauugugucaauaugugu

SEQ ID NO: 69286 - RNA, 24 nt, Artificial Sequence
  Synthetic
auaacauauugugucaauaugugu

SEQ ID NO: 69287 - RNA, 18 nt, Artificial Sequence
  Synthetic
auucagaccuagcugugu

SEQ ID NO: 69288 - RNA, 21 nt, Artificial Sequence
  Synthetic
uggauucagaccuagcugugu

SEQ ID NO: 69289 - RNA, 22 nt, Artificial Sequence
  Synthetic
uuggauucagaccuagcugugu

SEQ ID NO: 69290 - RNA, 23 nt, Artificial Sequence
  Synthetic
uuuggauucagaccuagcugugu

SEQ ID NO: 69291 - RNA, 24 nt, Artificial Sequence
  Synthetic
cuuuggauucagaccuagcugugu

SEQ ID NO: 69292 - RNA, 20 nt, Artificial Sequence
  Synthetic
uggcuaucaagagucugugu

SEQ ID NO: 69293 - RNA, 22 nt, Artificial Sequence
  Synthetic
aguggcuaucaagagucugugu

SEQ ID NO: 69294 - RNA, 24 nt, Artificial Sequence
  Synthetic
agaguggcuaucaagagucugugu

SEQ ID NO: 69295 - RNA, 21 nt, Artificial Sequence
  Synthetic
aguauaaaaaugugucugugu

SEQ ID NO: 69296 - RNA, 23 nt, Artificial Sequence
  Synthetic
ugaguauaaaaaugugucugugu

SEQ ID NO: 69297 - RNA, 24 nt, Artificial Sequence
  Synthetic
uugaguauaaaaaugugucugugu

SEQ ID NO: 69298 - RNA, 21 nt, Artificial Sequence
  Synthetic
uuaucuaccauuuuucugugu

SEQ ID NO: 69299 - RNA, 22 nt, Artificial Sequence
  Synthetic
uuuaucuaccauuuuucugugu

SEQ ID NO: 69300 - RNA, 23 nt, Artificial Sequence
  Synthetic
uuuuaucuaccauuuuucugugu

SEQ ID NO: 69301 - RNA, 24 nt, Artificial Sequence
  Synthetic
auuuuaucuaccauuuuucugugu

SEQ ID NO: 69302 - RNA, 18 nt, Artificial Sequence
  Synthetic
uaagguaggcaagugugu

SEQ ID NO: 69303 - RNA, 19 nt, Artificial Sequence
  Synthetic
uuaagguaggcaagugugu

SEQ ID NO: 69304 - RNA, 20 nt, Artificial Sequence
  Synthetic
auuaagguaggcaagugugu

SEQ ID NO: 69305 - RNA, 21 nt, Artificial Sequence
  Synthetic
uauuaagguaggcaagugugu

SEQ ID NO: 69306 - RNA, 22 nt, Artificial Sequence
  Synthetic
uuauuaagguaggcaagugugu

SEQ ID NO: 69307 - RNA, 23 nt, Artificial Sequence
  Synthetic
cuuauuaagguaggcaagugugu

SEQ ID NO: 69308 - RNA, 24 nt, Artificial Sequence
  Synthetic
ccuuauuaagguaggcaagugugu

SEQ ID NO: 69309 - RNA, 18 nt, Artificial Sequence
  Synthetic
cuggauaccugagugugu

SEQ ID NO: 69310 - RNA, 19 nt, Artificial Sequence
  Synthetic
acuggauaccugagugugu

SEQ ID NO: 69311 - RNA, 20 nt, Artificial Sequence
  Synthetic
aacuggauaccugagugugu

SEQ ID NO: 69312 - RNA, 21 nt, Artificial Sequence
  Synthetic
aaacuggauaccugagugugu

SEQ ID NO: 69313 - RNA, 23 nt, Artificial Sequence
  Synthetic
agaaacuggauaccugagugugu

SEQ ID NO: 69314 - RNA, 24 nt, Artificial Sequence
  Synthetic
cagaaacuggauaccugagugugu

SEQ ID NO: 69315 - RNA, 18 nt, Artificial Sequence
  Synthetic
uaccuaaggugagugugu

SEQ ID NO: 69316 - RNA, 19 nt, Artificial Sequence
  Synthetic
uuaccuaaggugagugugu

SEQ ID NO: 69317 - RNA, 20 nt, Artificial Sequence
  Synthetic
cuuaccuaaggugagugugu

SEQ ID NO: 69318 - RNA, 21 nt, Artificial Sequence
  Synthetic
acuuaccuaaggugagugugu

SEQ ID NO: 69319 - RNA, 22 nt, Artificial Sequence
  Synthetic
uacuuaccuaaggugagugugu

SEQ ID NO: 69320 - RNA, 23 nt, Artificial Sequence
  Synthetic
uuacuuaccuaaggugagugugu

SEQ ID NO: 69321 - RNA, 24 nt, Artificial Sequence
  Synthetic
uuuacuuaccuaaggugagugugu

SEQ ID NO: 69322 - RNA, 18 nt, Artificial Sequence
  Synthetic
ugccgagcguacgugugu

SEQ ID NO: 69323 - RNA, 19 nt, Artificial Sequence
  Synthetic
cugccgagcguacgugugu

SEQ ID NO: 69324 - RNA, 20 nt, Artificial Sequence
  Synthetic
acugccgagcguacgugugu

SEQ ID NO: 69325 - RNA, 21 nt, Artificial Sequence
  Synthetic
cacugccgagcguacgugugu

SEQ ID NO: 69326 - RNA, 22 nt, Artificial Sequence
  Synthetic
acacugccgagcguacgugugu

SEQ ID NO: 69327 - RNA, 23 nt, Artificial Sequence
  Synthetic
uacacugccgagcguacgugugu

SEQ ID NO: 69328 - RNA, 24 nt, Artificial Sequence
  Synthetic
uuacacugccgagcguacgugugu

SEQ ID NO: 69329 - RNA, 19 nt, Artificial Sequence
  Synthetic
agccaagcacuuggugugu

SEQ ID NO: 69330 - RNA, 20 nt, Artificial Sequence
  Synthetic
cagccaagcacuuggugugu

SEQ ID NO: 69331 - RNA, 21 nt, Artificial Sequence
  Synthetic
ccagccaagcacuuggugugu

SEQ ID NO: 69332 - RNA, 22 nt, Artificial Sequence
  Synthetic
cccagccaagcacuuggugugu

SEQ ID NO: 69333 - RNA, 24 nt, Artificial Sequence
  Synthetic
agcccagccaagcacuuggugugu

SEQ ID NO: 69334 - RNA, 18 nt, Artificial Sequence
  Synthetic
aauugcgacugugugugu

SEQ ID NO: 69335 - RNA, 19 nt, Artificial Sequence
  Synthetic
uaauugcgacugugugugu

SEQ ID NO: 69336 - RNA, 20 nt, Artificial Sequence
  Synthetic
uuaauugcgacugugugugu

SEQ ID NO: 69337 - RNA, 21 nt, Artificial Sequence
  Synthetic
uuuaauugcgacugugugugu

SEQ ID NO: 69338 - RNA, 22 nt, Artificial Sequence
  Synthetic
uuuuaauugcgacugugugugu

SEQ ID NO: 69339 - RNA, 24 nt, Artificial Sequence
  Synthetic
uguuuuaauugcgacugugugugu

SEQ ID NO: 69340 - RNA, 18 nt, Artificial Sequence
  Synthetic
aaauugaucauugugugu

SEQ ID NO: 69341 - RNA, 19 nt, Artificial Sequence
  Synthetic
uaaauugaucauugugugu

SEQ ID NO: 69342 - RNA, 20 nt, Artificial Sequence
  Synthetic
cuaaauugaucauugugugu

SEQ ID NO: 69343 - RNA, 21 nt, Artificial Sequence
  Synthetic
ucuaaauugaucauugugugu

SEQ ID NO: 69344 - RNA, 23 nt, Artificial Sequence
  Synthetic
ugucuaaauugaucauugugugu

SEQ ID NO: 69345 - RNA, 24 nt, Artificial Sequence
  Synthetic
uugucuaaauugaucauugugugu

SEQ ID NO: 69346 - RNA, 18 nt, Artificial Sequence
  Synthetic
agaugcacacuauugugu

SEQ ID NO: 69347 - RNA, 20 nt, Artificial Sequence
  Synthetic
ugagaugcacacuauugugu

SEQ ID NO: 69348 - RNA, 21 nt, Artificial Sequence
  Synthetic
augagaugcacacuauugugu

SEQ ID NO: 69349 - RNA, 22 nt, Artificial Sequence
  Synthetic
aaugagaugcacacuauugugu

SEQ ID NO: 69350 - RNA, 23 nt, Artificial Sequence
  Synthetic
caaugagaugcacacuauugugu

SEQ ID NO: 69351 - RNA, 24 nt, Artificial Sequence
  Synthetic
acaaugagaugcacacuauugugu

SEQ ID NO: 69352 - RNA, 20 nt, Artificial Sequence
  Synthetic
aggugguauucuuauugugu

SEQ ID NO: 69353 - RNA, 22 nt, Artificial Sequence
  Synthetic
agaggugguauucuuauugugu

SEQ ID NO: 69354 - RNA, 24 nt, Artificial Sequence
  Synthetic
ugagaggugguauucuuauugugu

SEQ ID NO: 69355 - RNA, 18 nt, Artificial Sequence
  Synthetic
acuuuacuaaacuugugu

SEQ ID NO: 69356 - RNA, 19 nt, Artificial Sequence
  Synthetic
aacuuuacuaaacuugugu

SEQ ID NO: 69357 - RNA, 20 nt, Artificial Sequence
  Synthetic
caacuuuacuaaacuugugu

SEQ ID NO: 69358 - RNA, 22 nt, Artificial Sequence
  Synthetic
ugcaacuuuacuaaacuugugu

SEQ ID NO: 69359 - RNA, 23 nt, Artificial Sequence
  Synthetic
cugcaacuuuacuaaacuugugu

SEQ ID NO: 69360 - RNA, 24 nt, Artificial Sequence
  Synthetic
ccugcaacuuuacuaaacuugugu

SEQ ID NO: 69361 - RNA, 18 nt, Artificial Sequence
  Synthetic
auuacauguuauuugugu

SEQ ID NO: 69362 - RNA, 19 nt, Artificial Sequence
  Synthetic
aauuacauguuauuugugu

SEQ ID NO: 69363 - RNA, 20 nt, Artificial Sequence
  Synthetic
uaauuacauguuauuugugu

SEQ ID NO: 69364 - RNA, 22 nt, Artificial Sequence
  Synthetic
uguaauuacauguuauuugugu

SEQ ID NO: 69365 - RNA, 23 nt, Artificial Sequence
  Synthetic
uuguaauuacauguuauuugugu

SEQ ID NO: 69366 - RNA, 24 nt, Artificial Sequence
  Synthetic
uuuguaauuacauguuauuugugu

SEQ ID NO: 69367 - RNA, 18 nt, Artificial Sequence
  Synthetic
cauucacuaucuuugugu

SEQ ID NO: 69368 - RNA, 19 nt, Artificial Sequence
  Synthetic
ucauucacuaucuuugugu

SEQ ID NO: 69369 - RNA, 21 nt, Artificial Sequence
  Synthetic
agucauucacuaucuuugugu

SEQ ID NO: 69370 - RNA, 22 nt, Artificial Sequence
  Synthetic
cagucauucacuaucuuugugu

SEQ ID NO: 69371 - RNA, 23 nt, Artificial Sequence
  Synthetic
ucagucauucacuaucuuugugu

SEQ ID NO: 69372 - RNA, 24 nt, Artificial Sequence
  Synthetic
aucagucauucacuaucuuugugu

SEQ ID NO: 69373 - RNA, 18 nt, Artificial Sequence
  Synthetic
auuauauauguuuugugu

SEQ ID NO: 69374 - RNA, 19 nt, Artificial Sequence
  Synthetic
uauuauauauguuuugugu

SEQ ID NO: 69375 - RNA, 20 nt, Artificial Sequence
  Synthetic
cuauuauauauguuuugugu

SEQ ID NO: 69376 - RNA, 21 nt, Artificial Sequence
  Synthetic
ccuauuauauauguuuugugu

SEQ ID NO: 69377 - RNA, 22 nt, Artificial Sequence
  Synthetic
accuauuauauauguuuugugu

SEQ ID NO: 69378 - RNA, 23 nt, Artificial Sequence
  Synthetic
caccuauuauauauguuuugugu

SEQ ID NO: 69379 - RNA, 24 nt, Artificial Sequence
  Synthetic
acaccuauuauauauguuuugugu

SEQ ID NO: 69380 - RNA, 19 nt, Artificial Sequence
  Synthetic
ugcuauggacuuuuugugu

SEQ ID NO: 69381 - RNA, 22 nt, Artificial Sequence
  Synthetic
cggugcuauggacuuuuugugu

SEQ ID NO: 69382 - RNA, 23 nt, Artificial Sequence
  Synthetic
acggugcuauggacuuuuugugu

SEQ ID NO: 69383 - RNA, 24 nt, Artificial Sequence
  Synthetic
cacggugcuauggacuuuuugugu

SEQ ID NO: 69384 - RNA, 18 nt, Artificial Sequence
  Synthetic
caaguuauagaaaauugu

SEQ ID NO: 69385 - RNA, 19 nt, Artificial Sequence
  Synthetic
ucaaguuauagaaaauugu

SEQ ID NO: 69386 - RNA, 20 nt, Artificial Sequence
  Synthetic
cucaaguuauagaaaauugu

SEQ ID NO: 69387 - RNA, 21 nt, Artificial Sequence
  Synthetic
ucucaaguuauagaaaauugu

SEQ ID NO: 69388 - RNA, 22 nt, Artificial Sequence
  Synthetic
cucucaaguuauagaaaauugu

SEQ ID NO: 69389 - RNA, 24 nt, Artificial Sequence
  Synthetic
agcucucaaguuauagaaaauugu

SEQ ID NO: 69390 - RNA, 20 nt, Artificial Sequence
  Synthetic
agguuggagggggaaauugu

SEQ ID NO: 69391 - RNA, 22 nt, Artificial Sequence
  Synthetic
ugagguuggagggggaaauugu

SEQ ID NO: 69392 - RNA, 18 nt, Artificial Sequence
  Synthetic
cuuuuucaauggaauugu

SEQ ID NO: 69393 - RNA, 19 nt, Artificial Sequence
  Synthetic
acuuuuucaauggaauugu

SEQ ID NO: 69394 - RNA, 20 nt, Artificial Sequence
  Synthetic
uacuuuuucaauggaauugu

SEQ ID NO: 69395 - RNA, 22 nt, Artificial Sequence
  Synthetic
uguacuuuuucaauggaauugu

SEQ ID NO: 69396 - RNA, 23 nt, Artificial Sequence
  Synthetic
uuguacuuuuucaauggaauugu

SEQ ID NO: 69397 - RNA, 24 nt, Artificial Sequence
  Synthetic
auuguacuuuuucaauggaauugu

SEQ ID NO: 69398 - RNA, 18 nt, Artificial Sequence
  Synthetic
aaauauugcacacauugu

SEQ ID NO: 69399 - RNA, 19 nt, Artificial Sequence
  Synthetic
aaaauauugcacacauugu

SEQ ID NO: 69400 - RNA, 20 nt, Artificial Sequence
  Synthetic
uaaaauauugcacacauugu

SEQ ID NO: 69401 - RNA, 21 nt, Artificial Sequence
  Synthetic
cuaaaauauugcacacauugu

SEQ ID NO: 69402 - RNA, 22 nt, Artificial Sequence
  Synthetic
ccuaaaauauugcacacauugu

SEQ ID NO: 69403 - RNA, 23 nt, Artificial Sequence
  Synthetic
uccuaaaauauugcacacauugu

SEQ ID NO: 69404 - RNA, 24 nt, Artificial Sequence
  Synthetic
cuccuaaaauauugcacacauugu

SEQ ID NO: 69405 - RNA, 21 nt, Artificial Sequence
  Synthetic
cagguuuugaaguuacauugu

SEQ ID NO: 69406 - RNA, 22 nt, Artificial Sequence
  Synthetic
ccagguuuugaaguuacauugu

SEQ ID NO: 69407 - RNA, 23 nt, Artificial Sequence
  Synthetic
cccagguuuugaaguuacauugu

SEQ ID NO: 69408 - RNA, 19 nt, Artificial Sequence
  Synthetic
ugaucaauuauuccauugu

SEQ ID NO: 69409 - RNA, 20 nt, Artificial Sequence
  Synthetic
uugaucaauuauuccauugu

SEQ ID NO: 69410 - RNA, 21 nt, Artificial Sequence
  Synthetic
cuugaucaauuauuccauugu

SEQ ID NO: 69411 - RNA, 22 nt, Artificial Sequence
  Synthetic
ucuugaucaauuauuccauugu

SEQ ID NO: 69412 - RNA, 23 nt, Artificial Sequence
  Synthetic
uucuugaucaauuauuccauugu

SEQ ID NO: 69413 - RNA, 18 nt, Artificial Sequence
  Synthetic
uuuguaauauggcauugu

SEQ ID NO: 69414 - RNA, 19 nt, Artificial Sequence
  Synthetic
auuuguaauauggcauugu

SEQ ID NO: 69415 - RNA, 20 nt, Artificial Sequence
  Synthetic
uauuuguaauauggcauugu

SEQ ID NO: 69416 - RNA, 21 nt, Artificial Sequence
  Synthetic
uuauuuguaauauggcauugu

SEQ ID NO: 69417 - RNA, 23 nt, Artificial Sequence
  Synthetic
aguuauuuguaauauggcauugu

SEQ ID NO: 69418 - RNA, 24 nt, Artificial Sequence
  Synthetic
aaguuauuuguaauauggcauugu

SEQ ID NO: 69419 - RNA, 21 nt, Artificial Sequence
  Synthetic
aaugcauguuugggucauugu

SEQ ID NO: 69420 - RNA, 22 nt, Artificial Sequence
  Synthetic
aaaugcauguuugggucauugu

SEQ ID NO: 69421 - RNA, 23 nt, Artificial Sequence
  Synthetic
aaaaugcauguuugggucauugu

SEQ ID NO: 69422 - RNA, 18 nt, Artificial Sequence
  Synthetic
caaacaugcacagauugu

SEQ ID NO: 69423 - RNA, 19 nt, Artificial Sequence
  Synthetic
acaaacaugcacagauugu

SEQ ID NO: 69424 - RNA, 20 nt, Artificial Sequence
  Synthetic
uacaaacaugcacagauugu

SEQ ID NO: 69425 - RNA, 21 nt, Artificial Sequence
  Synthetic
uuacaaacaugcacagauugu

SEQ ID NO: 69426 - RNA, 22 nt, Artificial Sequence
  Synthetic
auuacaaacaugcacagauugu

SEQ ID NO: 69427 - RNA, 23 nt, Artificial Sequence
  Synthetic
aauuacaaacaugcacagauugu

SEQ ID NO: 69428 - RNA, 24 nt, Artificial Sequence
  Synthetic
caauuacaaacaugcacagauugu

SEQ ID NO: 69429 - RNA, 18 nt, Artificial Sequence
  Synthetic
aaucggaagaacgauugu

SEQ ID NO: 69430 - RNA, 19 nt, Artificial Sequence
  Synthetic
aaaucggaagaacgauugu

SEQ ID NO: 69431 - RNA, 20 nt, Artificial Sequence
  Synthetic
aaaaucggaagaacgauugu

SEQ ID NO: 69432 - RNA, 21 nt, Artificial Sequence
  Synthetic
caaaaucggaagaacgauugu

SEQ ID NO: 69433 - RNA, 22 nt, Artificial Sequence
  Synthetic
ucaaaaucggaagaacgauugu

SEQ ID NO: 69434 - RNA, 23 nt, Artificial Sequence
  Synthetic
aucaaaaucggaagaacgauugu

SEQ ID NO: 69435 - RNA, 18 nt, Artificial Sequence
  Synthetic
ccaucaaucucugauugu

SEQ ID NO: 69436 - RNA, 19 nt, Artificial Sequence
  Synthetic
uccaucaaucucugauugu

SEQ ID NO: 69437 - RNA, 20 nt, Artificial Sequence
  Synthetic
cuccaucaaucucugauugu

SEQ ID NO: 69438 - RNA, 23 nt, Artificial Sequence
  Synthetic
uggcuccaucaaucucugauugu

SEQ ID NO: 69439 - RNA, 18 nt, Artificial Sequence
  Synthetic
ccauacaauccauauugu

SEQ ID NO: 69440 - RNA, 21 nt, Artificial Sequence
  Synthetic
aggccauacaauccauauugu

SEQ ID NO: 69441 - RNA, 22 nt, Artificial Sequence
  Synthetic
caggccauacaauccauauugu

SEQ ID NO: 69442 - RNA, 23 nt, Artificial Sequence
  Synthetic
acaggccauacaauccauauugu

SEQ ID NO: 69443 - RNA, 21 nt, Artificial Sequence
  Synthetic
uuucaacuucucugauauugu

SEQ ID NO: 69444 - RNA, 22 nt, Artificial Sequence
  Synthetic
uuuucaacuucucugauauugu

SEQ ID NO: 69445 - RNA, 24 nt, Artificial Sequence
  Synthetic
aguuuucaacuucucugauauugu

SEQ ID NO: 69446 - RNA, 18 nt, Artificial Sequence
  Synthetic
cugagaugauuauauugu

SEQ ID NO: 69447 - RNA, 19 nt, Artificial Sequence
  Synthetic
acugagaugauuauauugu

SEQ ID NO: 69448 - RNA, 20 nt, Artificial Sequence
  Synthetic
uacugagaugauuauauugu

SEQ ID NO: 69449 - RNA, 21 nt, Artificial Sequence
  Synthetic
uuacugagaugauuauauugu

SEQ ID NO: 69450 - RNA, 22 nt, Artificial Sequence
  Synthetic
uuuacugagaugauuauauugu

SEQ ID NO: 69451 - RNA, 23 nt, Artificial Sequence
  Synthetic
auuuacugagaugauuauauugu

SEQ ID NO: 69452 - RNA, 24 nt, Artificial Sequence
  Synthetic
aauuuacugagaugauuauauugu

SEQ ID NO: 69453 - RNA, 20 nt, Artificial Sequence
  Synthetic
aggagcugcuguacuauugu

SEQ ID NO: 69454 - RNA, 21 nt, Artificial Sequence
  Synthetic
aaggagcugcuguacuauugu

SEQ ID NO: 69455 - RNA, 22 nt, Artificial Sequence
  Synthetic
uaaggagcugcuguacuauugu

SEQ ID NO: 69456 - RNA, 23 nt, Artificial Sequence
  Synthetic
uuaaggagcugcuguacuauugu

SEQ ID NO: 69457 - RNA, 24 nt, Artificial Sequence
  Synthetic
uuuaaggagcugcuguacuauugu

SEQ ID NO: 69458 - RNA, 21 nt, Artificial Sequence
  Synthetic
cuauguaugguauucuauugu

SEQ ID NO: 69459 - RNA, 22 nt, Artificial Sequence
  Synthetic
ucuauguaugguauucuauugu

SEQ ID NO: 69460 - RNA, 23 nt, Artificial Sequence
  Synthetic
uucuauguaugguauucuauugu

SEQ ID NO: 69461 - RNA, 24 nt, Artificial Sequence
  Synthetic
uuucuauguaugguauucuauugu

SEQ ID NO: 69462 - RNA, 18 nt, Artificial Sequence
  Synthetic
augcuuaccauuuauugu

SEQ ID NO: 69463 - RNA, 19 nt, Artificial Sequence
  Synthetic
aaugcuuaccauuuauugu

SEQ ID NO: 69464 - RNA, 20 nt, Artificial Sequence
  Synthetic
caaugcuuaccauuuauugu

SEQ ID NO: 69465 - RNA, 21 nt, Artificial Sequence
  Synthetic
acaaugcuuaccauuuauugu

SEQ ID NO: 69466 - RNA, 23 nt, Artificial Sequence
  Synthetic
ugacaaugcuuaccauuuauugu

SEQ ID NO: 69467 - RNA, 24 nt, Artificial Sequence
  Synthetic
cugacaaugcuuaccauuuauugu

SEQ ID NO: 69468 - RNA, 18 nt, Artificial Sequence
  Synthetic
auuauuacuaccacuugu

SEQ ID NO: 69469 - RNA, 19 nt, Artificial Sequence
  Synthetic
uauuauuacuaccacuugu

SEQ ID NO: 69470 - RNA, 20 nt, Artificial Sequence
  Synthetic
uuauuauuacuaccacuugu

SEQ ID NO: 69471 - RNA, 21 nt, Artificial Sequence
  Synthetic
auuauuauuacuaccacuugu

SEQ ID NO: 69472 - RNA, 22 nt, Artificial Sequence
  Synthetic
cauuauuauuacuaccacuugu

SEQ ID NO: 69473 - RNA, 23 nt, Artificial Sequence
  Synthetic
ucauuauuauuacuaccacuugu

SEQ ID NO: 69474 - RNA, 24 nt, Artificial Sequence
  Synthetic
cucauuauuauuacuaccacuugu

SEQ ID NO: 69475 - RNA, 18 nt, Artificial Sequence
  Synthetic
agcauuacgacuacuugu

SEQ ID NO: 69476 - RNA, 19 nt, Artificial Sequence
  Synthetic
cagcauuacgacuacuugu

SEQ ID NO: 69477 - RNA, 21 nt, Artificial Sequence
  Synthetic
agcagcauuacgacuacuugu

SEQ ID NO: 69478 - RNA, 22 nt, Artificial Sequence
  Synthetic
cagcagcauuacgacuacuugu

SEQ ID NO: 69479 - RNA, 23 nt, Artificial Sequence
  Synthetic
ccagcagcauuacgacuacuugu

SEQ ID NO: 69480 - RNA, 18 nt, Artificial Sequence
  Synthetic
cuauuuauugguacuugu

SEQ ID NO: 69481 - RNA, 20 nt, Artificial Sequence
  Synthetic
ugcuauuuauugguacuugu

SEQ ID NO: 69482 - RNA, 21 nt, Artificial Sequence
  Synthetic
uugcuauuuauugguacuugu

SEQ ID NO: 69483 - RNA, 23 nt, Artificial Sequence
  Synthetic
aguugcuauuuauugguacuugu

SEQ ID NO: 69484 - RNA, 24 nt, Artificial Sequence
  Synthetic
aaguugcuauuuauugguacuugu

SEQ ID NO: 69485 - RNA, 18 nt, Artificial Sequence
  Synthetic
ucauuccacuguacuugu

SEQ ID NO: 69486 - RNA, 19 nt, Artificial Sequence
  Synthetic
uucauuccacuguacuugu

SEQ ID NO: 69487 - RNA, 20 nt, Artificial Sequence
  Synthetic
auucauuccacuguacuugu

SEQ ID NO: 69488 - RNA, 21 nt, Artificial Sequence
  Synthetic
cauucauuccacuguacuugu

SEQ ID NO: 69489 - RNA, 23 nt, Artificial Sequence
  Synthetic
ugcauucauuccacuguacuugu

SEQ ID NO: 69490 - RNA, 24 nt, Artificial Sequence
  Synthetic
augcauucauuccacuguacuugu

SEQ ID NO: 69491 - RNA, 18 nt, Artificial Sequence
  Synthetic
uuuaggauuuuuacuugu

SEQ ID NO: 69492 - RNA, 19 nt, Artificial Sequence
  Synthetic
cuuuaggauuuuuacuugu

SEQ ID NO: 69493 - RNA, 20 nt, Artificial Sequence
  Synthetic
ccuuuaggauuuuuacuugu

SEQ ID NO: 69494 - RNA, 22 nt, Artificial Sequence
  Synthetic
ugccuuuaggauuuuuacuugu

SEQ ID NO: 69495 - RNA, 23 nt, Artificial Sequence
  Synthetic
uugccuuuaggauuuuuacuugu

SEQ ID NO: 69496 - RNA, 24 nt, Artificial Sequence
  Synthetic
uuugccuuuaggauuuuuacuugu

SEQ ID NO: 69497 - RNA, 19 nt, Artificial Sequence
  Synthetic
agaguccaguucaccuugu

SEQ ID NO: 69498 - RNA, 21 nt, Artificial Sequence
  Synthetic
agagaguccaguucaccuugu

SEQ ID NO: 69499 - RNA, 22 nt, Artificial Sequence
  Synthetic
aagagaguccaguucaccuugu

SEQ ID NO: 69500 - RNA, 23 nt, Artificial Sequence
  Synthetic
aaagagaguccaguucaccuugu

SEQ ID NO: 69501 - RNA, 24 nt, Artificial Sequence
  Synthetic
aaaagagaguccaguucaccuugu

SEQ ID NO: 69502 - RNA, 18 nt, Artificial Sequence
  Synthetic
acucccauuaacccuugu

SEQ ID NO: 69503 - RNA, 19 nt, Artificial Sequence
  Synthetic
cacucccauuaacccuugu

SEQ ID NO: 69504 - RNA, 20 nt, Artificial Sequence
  Synthetic
ccacucccauuaacccuugu

SEQ ID NO: 69505 - RNA, 21 nt, Artificial Sequence
  Synthetic
uccacucccauuaacccuugu

SEQ ID NO: 69506 - RNA, 22 nt, Artificial Sequence
  Synthetic
uuccacucccauuaacccuugu

SEQ ID NO: 69507 - RNA, 23 nt, Artificial Sequence
  Synthetic
cuuccacucccauuaacccuugu

SEQ ID NO: 69508 - RNA, 24 nt, Artificial Sequence
  Synthetic
ucuuccacucccauuaacccuugu

SEQ ID NO: 69509 - RNA, 18 nt, Artificial Sequence
  Synthetic
ccgauuguucucccuugu

SEQ ID NO: 69510 - RNA, 20 nt, Artificial Sequence
  Synthetic
agccgauuguucucccuugu

SEQ ID NO: 69511 - RNA, 21 nt, Artificial Sequence
  Synthetic
aagccgauuguucucccuugu

SEQ ID NO: 69512 - RNA, 22 nt, Artificial Sequence
  Synthetic
aaagccgauuguucucccuugu

SEQ ID NO: 69513 - RNA, 23 nt, Artificial Sequence
  Synthetic
caaagccgauuguucucccuugu

SEQ ID NO: 69514 - RNA, 18 nt, Artificial Sequence
  Synthetic
ucucaaaaauauccuugu

SEQ ID NO: 69515 - RNA, 19 nt, Artificial Sequence
  Synthetic
cucucaaaaauauccuugu

SEQ ID NO: 69516 - RNA, 21 nt, Artificial Sequence
  Synthetic
ugcucucaaaaauauccuugu

SEQ ID NO: 69517 - RNA, 22 nt, Artificial Sequence
  Synthetic
uugcucucaaaaauauccuugu

SEQ ID NO: 69518 - RNA, 23 nt, Artificial Sequence
  Synthetic
uuugcucucaaaaauauccuugu

SEQ ID NO: 69519 - RNA, 24 nt, Artificial Sequence
  Synthetic
uuuugcucucaaaaauauccuugu

SEQ ID NO: 69520 - RNA, 18 nt, Artificial Sequence
  Synthetic
aacaaaagaauaucuugu

SEQ ID NO: 69521 - RNA, 20 nt, Artificial Sequence
  Synthetic
agaacaaaagaauaucuugu

SEQ ID NO: 69522 - RNA, 21 nt, Artificial Sequence
  Synthetic
aagaacaaaagaauaucuugu

SEQ ID NO: 69523 - RNA, 23 nt, Artificial Sequence
  Synthetic
agaagaacaaaagaauaucuugu

SEQ ID NO: 69524 - RNA, 24 nt, Artificial Sequence
  Synthetic
uagaagaacaaaagaauaucuugu

SEQ ID NO: 69525 - RNA, 18 nt, Artificial Sequence
  Synthetic
auacugcagaacucuugu

SEQ ID NO: 69526 - RNA, 19 nt, Artificial Sequence
  Synthetic
cauacugcagaacucuugu

SEQ ID NO: 69527 - RNA, 20 nt, Artificial Sequence
  Synthetic
ucauacugcagaacucuugu

SEQ ID NO: 69528 - RNA, 21 nt, Artificial Sequence
  Synthetic
cucauacugcagaacucuugu

SEQ ID NO: 69529 - RNA, 22 nt, Artificial Sequence
  Synthetic
acucauacugcagaacucuugu

SEQ ID NO: 69530 - RNA, 23 nt, Artificial Sequence
  Synthetic
uacucauacugcagaacucuugu

SEQ ID NO: 69531 - RNA, 24 nt, Artificial Sequence
  Synthetic
cuacucauacugcagaacucuugu

SEQ ID NO: 69532 - RNA, 18 nt, Artificial Sequence
  Synthetic
aaaguucguuccucuugu

SEQ ID NO: 69533 - RNA, 19 nt, Artificial Sequence
  Synthetic
aaaaguucguuccucuugu

SEQ ID NO: 69534 - RNA, 20 nt, Artificial Sequence
  Synthetic
aaaaaguucguuccucuugu

SEQ ID NO: 69535 - RNA, 21 nt, Artificial Sequence
  Synthetic
aaaaaaguucguuccucuugu

SEQ ID NO: 69536 - RNA, 22 nt, Artificial Sequence
  Synthetic
aaaaaaaguucguuccucuugu

SEQ ID NO: 69537 - RNA, 23 nt, Artificial Sequence
  Synthetic
aaaaaaaaguucguuccucuugu

SEQ ID NO: 69538 - RNA, 24 nt, Artificial Sequence
  Synthetic
aaaaaaaaaguucguuccucuugu

SEQ ID NO: 69539 - RNA, 18 nt, Artificial Sequence
  Synthetic
aaauauugaagcucuugu

SEQ ID NO: 69540 - RNA, 19 nt, Artificial Sequence
  Synthetic
aaaauauugaagcucuugu

SEQ ID NO: 69541 - RNA, 21 nt, Artificial Sequence
  Synthetic
ugaaaauauugaagcucuugu

SEQ ID NO: 69542 - RNA, 22 nt, Artificial Sequence
  Synthetic
cugaaaauauugaagcucuugu

SEQ ID NO: 69543 - RNA, 23 nt, Artificial Sequence
  Synthetic
ucugaaaauauugaagcucuugu

SEQ ID NO: 69544 - RNA, 24 nt, Artificial Sequence
  Synthetic
cucugaaaauauugaagcucuugu

SEQ ID NO: 69545 - RNA, 18 nt, Artificial Sequence
  Synthetic
ccaugacgacuuucuugu

SEQ ID NO: 69546 - RNA, 19 nt, Artificial Sequence
  Synthetic
cccaugacgacuuucuugu

SEQ ID NO: 69547 - RNA, 20 nt, Artificial Sequence
  Synthetic
ucccaugacgacuuucuugu

SEQ ID NO: 69548 - RNA, 21 nt, Artificial Sequence
  Synthetic
aucccaugacgacuuucuugu

SEQ ID NO: 69549 - RNA, 22 nt, Artificial Sequence
  Synthetic
aaucccaugacgacuuucuugu

SEQ ID NO: 69550 - RNA, 23 nt, Artificial Sequence
  Synthetic
aaaucccaugacgacuuucuugu

SEQ ID NO: 69551 - RNA, 18 nt, Artificial Sequence
  Synthetic
cuaacuuuuuuaaguugu

SEQ ID NO: 69552 - RNA, 19 nt, Artificial Sequence
  Synthetic
acuaacuuuuuuaaguugu

SEQ ID NO: 69553 - RNA, 20 nt, Artificial Sequence
  Synthetic
cacuaacuuuuuuaaguugu

SEQ ID NO: 69554 - RNA, 21 nt, Artificial Sequence
  Synthetic
ccacuaacuuuuuuaaguugu

SEQ ID NO: 69555 - RNA, 22 nt, Artificial Sequence
  Synthetic
uccacuaacuuuuuuaaguugu

SEQ ID NO: 69556 - RNA, 23 nt, Artificial Sequence
  Synthetic
uuccacuaacuuuuuuaaguugu

SEQ ID NO: 69557 - RNA, 24 nt, Artificial Sequence
  Synthetic
uuuccacuaacuuuuuuaaguugu

SEQ ID NO: 69558 - RNA, 18 nt, Artificial Sequence
  Synthetic
uuaugaaaaugcaguugu

SEQ ID NO: 69559 - RNA, 19 nt, Artificial Sequence
  Synthetic
cuuaugaaaaugcaguugu

SEQ ID NO: 69560 - RNA, 21 nt, Artificial Sequence
  Synthetic
agcuuaugaaaaugcaguugu

SEQ ID NO: 69561 - RNA, 22 nt, Artificial Sequence
  Synthetic
aagcuuaugaaaaugcaguugu

SEQ ID NO: 69562 - RNA, 23 nt, Artificial Sequence
  Synthetic
caagcuuaugaaaaugcaguugu

SEQ ID NO: 69563 - RNA, 18 nt, Artificial Sequence
  Synthetic
uacuaaugguagaguugu

SEQ ID NO: 69564 - RNA, 19 nt, Artificial Sequence
  Synthetic
auacuaaugguagaguugu

SEQ ID NO: 69565 - RNA, 20 nt, Artificial Sequence
  Synthetic
cauacuaaugguagaguugu

SEQ ID NO: 69566 - RNA, 21 nt, Artificial Sequence
  Synthetic
acauacuaaugguagaguugu

SEQ ID NO: 69567 - RNA, 22 nt, Artificial Sequence
  Synthetic
cacauacuaaugguagaguugu

SEQ ID NO: 69568 - RNA, 23 nt, Artificial Sequence
  Synthetic
ucacauacuaaugguagaguugu

SEQ ID NO: 69569 - RNA, 24 nt, Artificial Sequence
  Synthetic
cucacauacuaaugguagaguugu

SEQ ID NO: 69570 - RNA, 18 nt, Artificial Sequence
  Synthetic
cuuuaaaaauuggguugu

SEQ ID NO: 69571 - RNA, 19 nt, Artificial Sequence
  Synthetic
acuuuaaaaauuggguugu

SEQ ID NO: 69572 - RNA, 20 nt, Artificial Sequence
  Synthetic
cacuuuaaaaauuggguugu

SEQ ID NO: 69573 - RNA, 21 nt, Artificial Sequence
  Synthetic
ucacuuuaaaaauuggguugu

SEQ ID NO: 69574 - RNA, 22 nt, Artificial Sequence
  Synthetic
uucacuuuaaaaauuggguugu

SEQ ID NO: 69575 - RNA, 24 nt, Artificial Sequence
  Synthetic
uguucacuuuaaaaauuggguugu

SEQ ID NO: 69576 - RNA, 18 nt, Artificial Sequence
  Synthetic
auaaugacauaauguugu

SEQ ID NO: 69577 - RNA, 19 nt, Artificial Sequence
  Synthetic
uauaaugacauaauguugu

SEQ ID NO: 69578 - RNA, 20 nt, Artificial Sequence
  Synthetic
auauaaugacauaauguugu

SEQ ID NO: 69579 - RNA, 22 nt, Artificial Sequence
  Synthetic
agauauaaugacauaauguugu

SEQ ID NO: 69580 - RNA, 23 nt, Artificial Sequence
  Synthetic
cagauauaaugacauaauguugu

SEQ ID NO: 69581 - RNA, 24 nt, Artificial Sequence
  Synthetic
ucagauauaaugacauaauguugu

SEQ ID NO: 69582 - RNA, 18 nt, Artificial Sequence
  Synthetic
cccuaagagagauguugu

SEQ ID NO: 69583 - RNA, 19 nt, Artificial Sequence
  Synthetic
ucccuaagagagauguugu

SEQ ID NO: 69584 - RNA, 20 nt, Artificial Sequence
  Synthetic
cucccuaagagagauguugu

SEQ ID NO: 69585 - RNA, 21 nt, Artificial Sequence
  Synthetic
ccucccuaagagagauguugu

SEQ ID NO: 69586 - RNA, 22 nt, Artificial Sequence
  Synthetic
uccucccuaagagagauguugu

SEQ ID NO: 69587 - RNA, 23 nt, Artificial Sequence
  Synthetic
uuccucccuaagagagauguugu

SEQ ID NO: 69588 - RNA, 24 nt, Artificial Sequence
  Synthetic
auuccucccuaagagagauguugu

SEQ ID NO: 69589 - RNA, 18 nt, Artificial Sequence
  Synthetic
uauuuauagagauguugu

SEQ ID NO: 69590 - RNA, 19 nt, Artificial Sequence
  Synthetic
auauuuauagagauguugu

SEQ ID NO: 69591 - RNA, 20 nt, Artificial Sequence
  Synthetic
cauauuuauagagauguugu

SEQ ID NO: 69592 - RNA, 21 nt, Artificial Sequence
  Synthetic
acauauuuauagagauguugu

SEQ ID NO: 69593 - RNA, 22 nt, Artificial Sequence
  Synthetic
uacauauuuauagagauguugu

SEQ ID NO: 69594 - RNA, 24 nt, Artificial Sequence
  Synthetic
aguacauauuuauagagauguugu

SEQ ID NO: 69595 - RNA, 18 nt, Artificial Sequence
  Synthetic
ugaguauucauauguugu

SEQ ID NO: 69596 - RNA, 19 nt, Artificial Sequence
  Synthetic
augaguauucauauguugu

SEQ ID NO: 69597 - RNA, 21 nt, Artificial Sequence
  Synthetic
agaugaguauucauauguugu

SEQ ID NO: 69598 - RNA, 22 nt, Artificial Sequence
  Synthetic
uagaugaguauucauauguugu

SEQ ID NO: 69599 - RNA, 23 nt, Artificial Sequence
  Synthetic
auagaugaguauucauauguugu

SEQ ID NO: 69600 - RNA, 24 nt, Artificial Sequence
  Synthetic
aauagaugaguauucauauguugu

SEQ ID NO: 69601 - RNA, 18 nt, Artificial Sequence
  Synthetic
uuccguugcaacuguugu

SEQ ID NO: 69602 - RNA, 19 nt, Artificial Sequence
  Synthetic
cuuccguugcaacuguugu

SEQ ID NO: 69603 - RNA, 20 nt, Artificial Sequence
  Synthetic
acuuccguugcaacuguugu

SEQ ID NO: 69604 - RNA, 21 nt, Artificial Sequence
  Synthetic
uacuuccguugcaacuguugu

SEQ ID NO: 69605 - RNA, 22 nt, Artificial Sequence
  Synthetic
cuacuuccguugcaacuguugu

SEQ ID NO: 69606 - RNA, 23 nt, Artificial Sequence
  Synthetic
ucuacuuccguugcaacuguugu

SEQ ID NO: 69607 - RNA, 18 nt, Artificial Sequence
  Synthetic
cauuguaaaaguuguugu

SEQ ID NO: 69608 - RNA, 19 nt, Artificial Sequence
  Synthetic
acauuguaaaaguuguugu

SEQ ID NO: 69609 - RNA, 20 nt, Artificial Sequence
  Synthetic
aacauuguaaaaguuguugu

SEQ ID NO: 69610 - RNA, 19 nt, Artificial Sequence
  Synthetic
agcuagguagaguuguugu

SEQ ID NO: 69611 - RNA, 20 nt, Artificial Sequence
  Synthetic
cagcuagguagaguuguugu

SEQ ID NO: 69612 - RNA, 21 nt, Artificial Sequence
  Synthetic
ccagcuagguagaguuguugu

SEQ ID NO: 69613 - RNA, 22 nt, Artificial Sequence
  Synthetic
cccagcuagguagaguuguugu

SEQ ID NO: 69614 - RNA, 23 nt, Artificial Sequence
  Synthetic
acccagcuagguagaguuguugu

SEQ ID NO: 69615 - RNA, 24 nt, Artificial Sequence
  Synthetic
uacccagcuagguagaguuguugu

SEQ ID NO: 69616 - RNA, 18 nt, Artificial Sequence
  Synthetic
uagccauaagguuguugu

SEQ ID NO: 69617 - RNA, 19 nt, Artificial Sequence
  Synthetic
uuagccauaagguuguugu

SEQ ID NO: 69618 - RNA, 20 nt, Artificial Sequence
  Synthetic
auuagccauaagguuguugu

SEQ ID NO: 69619 - RNA, 21 nt, Artificial Sequence
  Synthetic
cauuagccauaagguuguugu

SEQ ID NO: 69620 - RNA, 22 nt, Artificial Sequence
  Synthetic
ucauuagccauaagguuguugu

SEQ ID NO: 69621 - RNA, 23 nt, Artificial Sequence
  Synthetic
cucauuagccauaagguuguugu

SEQ ID NO: 69622 - RNA, 24 nt, Artificial Sequence
  Synthetic
ccucauuagccauaagguuguugu

SEQ ID NO: 69623 - RNA, 22 nt, Artificial Sequence
  Synthetic
agcuaccucuucagguuguugu

SEQ ID NO: 69624 - RNA, 23 nt, Artificial Sequence
  Synthetic
cagcuaccucuucagguuguugu

SEQ ID NO: 69625 - RNA, 24 nt, Artificial Sequence
  Synthetic
acagcuaccucuucagguuguugu

SEQ ID NO: 69626 - RNA, 18 nt, Artificial Sequence
  Synthetic
aaucccaacugaauuugu

SEQ ID NO: 69627 - RNA, 19 nt, Artificial Sequence
  Synthetic
uaaucccaacugaauuugu

SEQ ID NO: 69628 - RNA, 20 nt, Artificial Sequence
  Synthetic
auaaucccaacugaauuugu

SEQ ID NO: 69629 - RNA, 21 nt, Artificial Sequence
  Synthetic
aauaaucccaacugaauuugu

SEQ ID NO: 69630 - RNA, 22 nt, Artificial Sequence
  Synthetic
aaauaaucccaacugaauuugu

SEQ ID NO: 69631 - RNA, 23 nt, Artificial Sequence
  Synthetic
uaaauaaucccaacugaauuugu

SEQ ID NO: 69632 - RNA, 18 nt, Artificial Sequence
  Synthetic
auacuaagggucauuugu

SEQ ID NO: 69633 - RNA, 20 nt, Artificial Sequence
  Synthetic
ugauacuaagggucauuugu

SEQ ID NO: 69634 - RNA, 21 nt, Artificial Sequence
  Synthetic
uugauacuaagggucauuugu

SEQ ID NO: 69635 - RNA, 23 nt, Artificial Sequence
  Synthetic
uguugauacuaagggucauuugu

SEQ ID NO: 69636 - RNA, 24 nt, Artificial Sequence
  Synthetic
cuguugauacuaagggucauuugu

SEQ ID NO: 69637 - RNA, 18 nt, Artificial Sequence
  Synthetic
ccaucagccuucauuugu

SEQ ID NO: 69638 - RNA, 19 nt, Artificial Sequence
  Synthetic
uccaucagccuucauuugu

SEQ ID NO: 69639 - RNA, 20 nt, Artificial Sequence
  Synthetic
auccaucagccuucauuugu

SEQ ID NO: 69640 - RNA, 21 nt, Artificial Sequence
  Synthetic
cauccaucagccuucauuugu

SEQ ID NO: 69641 - RNA, 22 nt, Artificial Sequence
  Synthetic
ccauccaucagccuucauuugu

SEQ ID NO: 69642 - RNA, 23 nt, Artificial Sequence
  Synthetic
uccauccaucagccuucauuugu

SEQ ID NO: 69643 - RNA, 24 nt, Artificial Sequence
  Synthetic
uuccauccaucagccuucauuugu

SEQ ID NO: 69644 - RNA, 18 nt, Artificial Sequence
  Synthetic
ccacuauaggugauuugu

SEQ ID NO: 69645 - RNA, 19 nt, Artificial Sequence
  Synthetic
uccacuauaggugauuugu

SEQ ID NO: 69646 - RNA, 20 nt, Artificial Sequence
  Synthetic
uuccacuauaggugauuugu

SEQ ID NO: 69647 - RNA, 21 nt, Artificial Sequence
  Synthetic
uuuccacuauaggugauuugu

SEQ ID NO: 69648 - RNA, 22 nt, Artificial Sequence
  Synthetic
auuuccacuauaggugauuugu

SEQ ID NO: 69649 - RNA, 23 nt, Artificial Sequence
  Synthetic
cauuuccacuauaggugauuugu

SEQ ID NO: 69650 - RNA, 24 nt, Artificial Sequence
  Synthetic
ccauuuccacuauaggugauuugu

SEQ ID NO: 69651 - RNA, 18 nt, Artificial Sequence
  Synthetic
ccuaaauuaaauauuugu

SEQ ID NO: 69652 - RNA, 19 nt, Artificial Sequence
  Synthetic
cccuaaauuaaauauuugu

SEQ ID NO: 69653 - RNA, 20 nt, Artificial Sequence
  Synthetic
acccuaaauuaaauauuugu

SEQ ID NO: 69654 - RNA, 21 nt, Artificial Sequence
  Synthetic
uacccuaaauuaaauauuugu

SEQ ID NO: 69655 - RNA, 22 nt, Artificial Sequence
  Synthetic
uuacccuaaauuaaauauuugu

SEQ ID NO: 69656 - RNA, 24 nt, Artificial Sequence
  Synthetic
aguuacccuaaauuaaauauuugu

SEQ ID NO: 69657 - RNA, 18 nt, Artificial Sequence
  Synthetic
ccacuguauccuauuugu

SEQ ID NO: 69658 - RNA, 19 nt, Artificial Sequence
  Synthetic
accacuguauccuauuugu

SEQ ID NO: 69659 - RNA, 20 nt, Artificial Sequence
  Synthetic
aaccacuguauccuauuugu

SEQ ID NO: 69660 - RNA, 21 nt, Artificial Sequence
  Synthetic
aaaccacuguauccuauuugu

SEQ ID NO: 69661 - RNA, 22 nt, Artificial Sequence
  Synthetic
uaaaccacuguauccuauuugu

SEQ ID NO: 69662 - RNA, 18 nt, Artificial Sequence
  Synthetic
uuuugugcugcccuuugu

SEQ ID NO: 69663 - RNA, 19 nt, Artificial Sequence
  Synthetic
auuuugugcugcccuuugu

SEQ ID NO: 69664 - RNA, 20 nt, Artificial Sequence
  Synthetic
cauuuugugcugcccuuugu

SEQ ID NO: 69665 - RNA, 21 nt, Artificial Sequence
  Synthetic
ccauuuugugcugcccuuugu

SEQ ID NO: 69666 - RNA, 22 nt, Artificial Sequence
  Synthetic
cccauuuugugcugcccuuugu

SEQ ID NO: 69667 - RNA, 23 nt, Artificial Sequence
  Synthetic
ucccauuuugugcugcccuuugu

SEQ ID NO: 69668 - RNA, 24 nt, Artificial Sequence
  Synthetic
cucccauuuugugcugcccuuugu

SEQ ID NO: 69669 - RNA, 18 nt, Artificial Sequence
  Synthetic
cauuaucucaagcuuugu

SEQ ID NO: 69670 - RNA, 19 nt, Artificial Sequence
  Synthetic
acauuaucucaagcuuugu

SEQ ID NO: 69671 - RNA, 20 nt, Artificial Sequence
  Synthetic
aacauuaucucaagcuuugu

SEQ ID NO: 69672 - RNA, 21 nt, Artificial Sequence
  Synthetic
aaacauuaucucaagcuuugu

SEQ ID NO: 69673 - RNA, 22 nt, Artificial Sequence
  Synthetic
aaaacauuaucucaagcuuugu

SEQ ID NO: 69674 - RNA, 23 nt, Artificial Sequence
  Synthetic
uaaaacauuaucucaagcuuugu

SEQ ID NO: 69675 - RNA, 24 nt, Artificial Sequence
  Synthetic
uuaaaacauuaucucaagcuuugu

SEQ ID NO: 69676 - RNA, 18 nt, Artificial Sequence
  Synthetic
cucuuuaaagaucuuugu

SEQ ID NO: 69677 - RNA, 19 nt, Artificial Sequence
  Synthetic
ucucuuuaaagaucuuugu

SEQ ID NO: 69678 - RNA, 20 nt, Artificial Sequence
  Synthetic
aucucuuuaaagaucuuugu

SEQ ID NO: 69679 - RNA, 21 nt, Artificial Sequence
  Synthetic
uaucucuuuaaagaucuuugu

SEQ ID NO: 69680 - RNA, 23 nt, Artificial Sequence
  Synthetic
aguaucucuuuaaagaucuuugu

SEQ ID NO: 69681 - RNA, 24 nt, Artificial Sequence
  Synthetic
caguaucucuuuaaagaucuuugu

SEQ ID NO: 69682 - RNA, 19 nt, Artificial Sequence
  Synthetic
uguagacuucagucuuugu

SEQ ID NO: 69683 - RNA, 20 nt, Artificial Sequence
  Synthetic
uuguagacuucagucuuugu

SEQ ID NO: 69684 - RNA, 21 nt, Artificial Sequence
  Synthetic
auuguagacuucagucuuugu

SEQ ID NO: 69685 - RNA, 22 nt, Artificial Sequence
  Synthetic
aauuguagacuucagucuuugu

SEQ ID NO: 69686 - RNA, 23 nt, Artificial Sequence
  Synthetic
aaauuguagacuucagucuuugu

SEQ ID NO: 69687 - RNA, 18 nt, Artificial Sequence
  Synthetic
agauaaaacuuucuuugu

SEQ ID NO: 69688 - RNA, 19 nt, Artificial Sequence
  Synthetic
uagauaaaacuuucuuugu

SEQ ID NO: 69689 - RNA, 20 nt, Artificial Sequence
  Synthetic
uuagauaaaacuuucuuugu

SEQ ID NO: 69690 - RNA, 21 nt, Artificial Sequence
  Synthetic
auuagauaaaacuuucuuugu

SEQ ID NO: 69691 - RNA, 22 nt, Artificial Sequence
  Synthetic
aauuagauaaaacuuucuuugu

SEQ ID NO: 69692 - RNA, 23 nt, Artificial Sequence
  Synthetic
aaauuagauaaaacuuucuuugu

SEQ ID NO: 69693 - RNA, 18 nt, Artificial Sequence
  Synthetic
auuccuauuucauuuugu

SEQ ID NO: 69694 - RNA, 19 nt, Artificial Sequence
  Synthetic
aauuccuauuucauuuugu

SEQ ID NO: 69695 - RNA, 20 nt, Artificial Sequence
  Synthetic
uaauuccuauuucauuuugu

SEQ ID NO: 69696 - RNA, 21 nt, Artificial Sequence
  Synthetic
uuaauuccuauuucauuuugu

SEQ ID NO: 69697 - RNA, 22 nt, Artificial Sequence
  Synthetic
auuaauuccuauuucauuuugu

SEQ ID NO: 69698 - RNA, 21 nt, Artificial Sequence
  Synthetic
uuuuauucuuuaauauuuugu

SEQ ID NO: 69699 - RNA, 22 nt, Artificial Sequence
  Synthetic
auuuuauucuuuaauauuuugu

SEQ ID NO: 69700 - RNA, 24 nt, Artificial Sequence
  Synthetic
ugauuuuauucuuuaauauuuugu

SEQ ID NO: 69701 - RNA, 18 nt, Artificial Sequence
  Synthetic
acaugcacauacuuuugu

SEQ ID NO: 69702 - RNA, 19 nt, Artificial Sequence
  Synthetic
aacaugcacauacuuuugu

SEQ ID NO: 69703 - RNA, 20 nt, Artificial Sequence
  Synthetic
aaacaugcacauacuuuugu

SEQ ID NO: 69704 - RNA, 21 nt, Artificial Sequence
  Synthetic
aaaacaugcacauacuuuugu

SEQ ID NO: 69705 - RNA, 23 nt, Artificial Sequence
  Synthetic
ugaaaacaugcacauacuuuugu

SEQ ID NO: 69706 - RNA, 24 nt, Artificial Sequence
  Synthetic
uugaaaacaugcacauacuuuugu

SEQ ID NO: 69707 - RNA, 18 nt, Artificial Sequence
  Synthetic
uccucgcagagcuuuugu

SEQ ID NO: 69708 - RNA, 19 nt, Artificial Sequence
  Synthetic
uuccucgcagagcuuuugu

SEQ ID NO: 69709 - RNA, 20 nt, Artificial Sequence
  Synthetic
auuccucgcagagcuuuugu

SEQ ID NO: 69710 - RNA, 21 nt, Artificial Sequence
  Synthetic
uauuccucgcagagcuuuugu

SEQ ID NO: 69711 - RNA, 22 nt, Artificial Sequence
  Synthetic
uuauuccucgcagagcuuuugu

SEQ ID NO: 69712 - RNA, 23 nt, Artificial Sequence
  Synthetic
uuuauuccucgcagagcuuuugu

SEQ ID NO: 69713 - RNA, 24 nt, Artificial Sequence
  Synthetic
uuuuauuccucgcagagcuuuugu

SEQ ID NO: 69714 - RNA, 18 nt, Artificial Sequence
  Synthetic
acacaaagcguguuuugu

SEQ ID NO: 69715 - RNA, 19 nt, Artificial Sequence
  Synthetic
aacacaaagcguguuuugu

SEQ ID NO: 69716 - RNA, 20 nt, Artificial Sequence
  Synthetic
aaacacaaagcguguuuugu

SEQ ID NO: 69717 - RNA, 21 nt, Artificial Sequence
  Synthetic
uaaacacaaagcguguuuugu

SEQ ID NO: 69718 - RNA, 22 nt, Artificial Sequence
  Synthetic
auaaacacaaagcguguuuugu

SEQ ID NO: 69719 - RNA, 23 nt, Artificial Sequence
  Synthetic
uauaaacacaaagcguguuuugu

SEQ ID NO: 69720 - RNA, 24 nt, Artificial Sequence
  Synthetic
auauaaacacaaagcguguuuugu

SEQ ID NO: 69721 - RNA, 18 nt, Artificial Sequence
  Synthetic
augaggauuuauuuuugu

SEQ ID NO: 69722 - RNA, 19 nt, Artificial Sequence
  Synthetic
uaugaggauuuauuuuugu

SEQ ID NO: 69723 - RNA, 20 nt, Artificial Sequence
  Synthetic
auaugaggauuuauuuuugu

SEQ ID NO: 69724 - RNA, 21 nt, Artificial Sequence
  Synthetic
uauaugaggauuuauuuuugu

SEQ ID NO: 69725 - RNA, 22 nt, Artificial Sequence
  Synthetic
uuauaugaggauuuauuuuugu

SEQ ID NO: 69726 - RNA, 23 nt, Artificial Sequence
  Synthetic
auuauaugaggauuuauuuuugu

SEQ ID NO: 69727 - RNA, 24 nt, Artificial Sequence
  Synthetic
uauuauaugaggauuuauuuuugu

SEQ ID NO: 69728 - RNA, 21 nt, Artificial Sequence
  Synthetic
caacuauuucucucuuuuugu

SEQ ID NO: 69729 - RNA, 22 nt, Artificial Sequence
  Synthetic
ccaacuauuucucucuuuuugu

SEQ ID NO: 69730 - RNA, 23 nt, Artificial Sequence
  Synthetic
accaacuauuucucucuuuuugu

SEQ ID NO: 69731 - RNA, 24 nt, Artificial Sequence
  Synthetic
aaccaacuauuucucucuuuuugu

SEQ ID NO: 69732 - RNA, 19 nt, Artificial Sequence
  Synthetic
cguaugugugucuuuuugu

SEQ ID NO: 69733 - RNA, 20 nt, Artificial Sequence
  Synthetic
acguaugugugucuuuuugu

SEQ ID NO: 69734 - RNA, 21 nt, Artificial Sequence
  Synthetic
aacguaugugugucuuuuugu

SEQ ID NO: 69735 - RNA, 22 nt, Artificial Sequence
  Synthetic
caacguaugugugucuuuuugu

SEQ ID NO: 69736 - RNA, 18 nt, Artificial Sequence
  Synthetic
ugagaguaauguuuuugu

SEQ ID NO: 69737 - RNA, 21 nt, Artificial Sequence
  Synthetic
aggugagaguaauguuuuugu

SEQ ID NO: 69738 - RNA, 22 nt, Artificial Sequence
  Synthetic
caggugagaguaauguuuuugu

SEQ ID NO: 69739 - RNA, 24 nt, Artificial Sequence
  Synthetic
ugcaggugagaguaauguuuuugu

SEQ ID NO: 69740 - RNA, 24 nt, Artificial Sequence
  Synthetic
agggcccuugguuaaaaaaaaauu

SEQ ID NO: 69741 - RNA, 21 nt, Artificial Sequence
  Synthetic
cauaucuguaaucaaaaaauu

SEQ ID NO: 69742 - RNA, 22 nt, Artificial Sequence
  Synthetic
acauaucuguaaucaaaaaauu

SEQ ID NO: 69743 - RNA, 23 nt, Artificial Sequence
  Synthetic
aacauaucuguaaucaaaaaauu

SEQ ID NO: 69744 - RNA, 24 nt, Artificial Sequence
  Synthetic
caacauaucuguaaucaaaaaauu

SEQ ID NO: 69745 - RNA, 18 nt, Artificial Sequence
  Synthetic
cuggagacugaaaaaauu

SEQ ID NO: 69746 - RNA, 19 nt, Artificial Sequence
  Synthetic
acuggagacugaaaaaauu

SEQ ID NO: 69747 - RNA, 20 nt, Artificial Sequence
  Synthetic
uacuggagacugaaaaaauu

SEQ ID NO: 69748 - RNA, 21 nt, Artificial Sequence
  Synthetic
auacuggagacugaaaaaauu

SEQ ID NO: 69749 - RNA, 22 nt, Artificial Sequence
  Synthetic
aauacuggagacugaaaaaauu

SEQ ID NO: 69750 - RNA, 24 nt, Artificial Sequence
  Synthetic
ugaauacuggagacugaaaaaauu

SEQ ID NO: 69751 - RNA, 18 nt, Artificial Sequence
  Synthetic
ucuauacagacaaaaauu

SEQ ID NO: 69752 - RNA, 19 nt, Artificial Sequence
  Synthetic
aucuauacagacaaaaauu

SEQ ID NO: 69753 - RNA, 20 nt, Artificial Sequence
  Synthetic
caucuauacagacaaaaauu

SEQ ID NO: 69754 - RNA, 21 nt, Artificial Sequence
  Synthetic
acaucuauacagacaaaaauu

SEQ ID NO: 69755 - RNA, 22 nt, Artificial Sequence
  Synthetic
uacaucuauacagacaaaaauu

SEQ ID NO: 69756 - RNA, 23 nt, Artificial Sequence
  Synthetic
uuacaucuauacagacaaaaauu

SEQ ID NO: 69757 - RNA, 24 nt, Artificial Sequence
  Synthetic
uuuacaucuauacagacaaaaauu

SEQ ID NO: 69758 - RNA, 22 nt, Artificial Sequence
  Synthetic
cgaguggcaauugucaaaaauu

SEQ ID NO: 69759 - RNA, 23 nt, Artificial Sequence
  Synthetic
ccgaguggcaauugucaaaaauu

SEQ ID NO: 69760 - RNA, 24 nt, Artificial Sequence
  Synthetic
uccgaguggcaauugucaaaaauu

SEQ ID NO: 69761 - RNA, 21 nt, Artificial Sequence
  Synthetic
aacaucaucauuuuaaaaauu

SEQ ID NO: 69762 - RNA, 22 nt, Artificial Sequence
  Synthetic
caacaucaucauuuuaaaaauu

SEQ ID NO: 69763 - RNA, 21 nt, Artificial Sequence
  Synthetic
cauuucuaaagagacaaaauu

SEQ ID NO: 69764 - RNA, 22 nt, Artificial Sequence
  Synthetic
acauuucuaaagagacaaaauu

SEQ ID NO: 69765 - RNA, 23 nt, Artificial Sequence
  Synthetic
uacauuucuaaagagacaaaauu

SEQ ID NO: 69766 - RNA, 24 nt, Artificial Sequence
  Synthetic
cuacauuucuaaagagacaaaauu

SEQ ID NO: 69767 - RNA, 21 nt, Artificial Sequence
  Synthetic
agaaaaaaaaaacccaaaauu

SEQ ID NO: 69768 - RNA, 22 nt, Artificial Sequence
  Synthetic
cagaaaaaaaaaacccaaaauu

SEQ ID NO: 69769 - RNA, 24 nt, Artificial Sequence
  Synthetic
agcagaaaaaaaaaacccaaaauu

SEQ ID NO: 69770 - RNA, 18 nt, Artificial Sequence
  Synthetic
uauuaaagauccaaaauu

SEQ ID NO: 69771 - RNA, 19 nt, Artificial Sequence
  Synthetic
auauuaaagauccaaaauu

SEQ ID NO: 69772 - RNA, 20 nt, Artificial Sequence
  Synthetic
uauauuaaagauccaaaauu

SEQ ID NO: 69773 - RNA, 21 nt, Artificial Sequence
  Synthetic
auauauuaaagauccaaaauu

SEQ ID NO: 69774 - RNA, 22 nt, Artificial Sequence
  Synthetic
uauauauuaaagauccaaaauu

SEQ ID NO: 69775 - RNA, 23 nt, Artificial Sequence
  Synthetic
uuauauauuaaagauccaaaauu

SEQ ID NO: 69776 - RNA, 24 nt, Artificial Sequence
  Synthetic
uuuauauauuaaagauccaaaauu

SEQ ID NO: 69777 - RNA, 22 nt, Artificial Sequence
  Synthetic
aguagaucacugaagcaaaauu

SEQ ID NO: 69778 - RNA, 23 nt, Artificial Sequence
  Synthetic
aaguagaucacugaagcaaaauu

SEQ ID NO: 69779 - RNA, 24 nt, Artificial Sequence
  Synthetic
caaguagaucacugaagcaaaauu

SEQ ID NO: 69780 - RNA, 19 nt, Artificial Sequence
  Synthetic
uguccuuucuuucaaaauu

SEQ ID NO: 69781 - RNA, 20 nt, Artificial Sequence
  Synthetic
uuguccuuucuuucaaaauu

SEQ ID NO: 69782 - RNA, 21 nt, Artificial Sequence
  Synthetic
auuguccuuucuuucaaaauu

SEQ ID NO: 69783 - RNA, 22 nt, Artificial Sequence
  Synthetic
aauuguccuuucuuucaaaauu

SEQ ID NO: 69784 - RNA, 24 nt, Artificial Sequence
  Synthetic
agaauuguccuuucuuucaaaauu

SEQ ID NO: 69785 - RNA, 21 nt, Artificial Sequence
  Synthetic
cugaacauuauuuagaaaauu

SEQ ID NO: 69786 - RNA, 22 nt, Artificial Sequence
  Synthetic
acugaacauuauuuagaaaauu

SEQ ID NO: 69787 - RNA, 23 nt, Artificial Sequence
  Synthetic
cacugaacauuauuuagaaaauu

SEQ ID NO: 69788 - RNA, 24 nt, Artificial Sequence
  Synthetic
acacugaacauuauuuagaaaauu

SEQ ID NO: 69789 - RNA, 18 nt, Artificial Sequence
  Synthetic
uuuucaugcucgaaaauu

SEQ ID NO: 69790 - RNA, 19 nt, Artificial Sequence
  Synthetic
uuuuucaugcucgaaaauu

SEQ ID NO: 69791 - RNA, 20 nt, Artificial Sequence
  Synthetic
uuuuuucaugcucgaaaauu

SEQ ID NO: 69792 - RNA, 21 nt, Artificial Sequence
  Synthetic
auuuuuucaugcucgaaaauu

SEQ ID NO: 69793 - RNA, 22 nt, Artificial Sequence
  Synthetic
aauuuuuucaugcucgaaaauu

SEQ ID NO: 69794 - RNA, 23 nt, Artificial Sequence
  Synthetic
uaauuuuuucaugcucgaaaauu

SEQ ID NO: 69795 - RNA, 24 nt, Artificial Sequence
  Synthetic
auaauuuuuucaugcucgaaaauu

SEQ ID NO: 69796 - RNA, 18 nt, Artificial Sequence
  Synthetic
ucaagggauaggaaaauu

SEQ ID NO: 69797 - RNA, 19 nt, Artificial Sequence
  Synthetic
cucaagggauaggaaaauu

SEQ ID NO: 69798 - RNA, 20 nt, Artificial Sequence
  Synthetic
ccucaagggauaggaaaauu

SEQ ID NO: 69799 - RNA, 23 nt, Artificial Sequence
  Synthetic
aggccucaagggauaggaaaauu

SEQ ID NO: 69800 - RNA, 24 nt, Artificial Sequence
  Synthetic
caggccucaagggauaggaaaauu

SEQ ID NO: 69801 - RNA, 18 nt, Artificial Sequence
  Synthetic
cagagcaggaugaaaauu

SEQ ID NO: 69802 - RNA, 19 nt, Artificial Sequence
  Synthetic
ucagagcaggaugaaaauu

SEQ ID NO: 69803 - RNA, 20 nt, Artificial Sequence
  Synthetic
aucagagcaggaugaaaauu

SEQ ID NO: 69804 - RNA, 21 nt, Artificial Sequence
  Synthetic
aaucagagcaggaugaaaauu

SEQ ID NO: 69805 - RNA, 22 nt, Artificial Sequence
  Synthetic
caaucagagcaggaugaaaauu

SEQ ID NO: 69806 - RNA, 23 nt, Artificial Sequence
  Synthetic
ccaaucagagcaggaugaaaauu

SEQ ID NO: 69807 - RNA, 24 nt, Artificial Sequence
  Synthetic
accaaucagagcaggaugaaaauu

SEQ ID NO: 69808 - RNA, 18 nt, Artificial Sequence
  Synthetic
aaaguucuugugaaaauu

SEQ ID NO: 69809 - RNA, 19 nt, Artificial Sequence
  Synthetic
aaaaguucuugugaaaauu

SEQ ID NO: 69810 - RNA, 20 nt, Artificial Sequence
  Synthetic
caaaaguucuugugaaaauu

SEQ ID NO: 69811 - RNA, 21 nt, Artificial Sequence
  Synthetic
ucaaaaguucuugugaaaauu

SEQ ID NO: 69812 - RNA, 23 nt, Artificial Sequence
  Synthetic
agucaaaaguucuugugaaaauu

SEQ ID NO: 69813 - RNA, 24 nt, Artificial Sequence
  Synthetic
aagucaaaaguucuugugaaaauu

SEQ ID NO: 69814 - RNA, 18 nt, Artificial Sequence
  Synthetic
cucaacuuugcacaaauu

SEQ ID NO: 69815 - RNA, 19 nt, Artificial Sequence
  Synthetic
acucaacuuugcacaaauu

SEQ ID NO: 69816 - RNA, 21 nt, Artificial Sequence
  Synthetic
agacucaacuuugcacaaauu

SEQ ID NO: 69817 - RNA, 22 nt, Artificial Sequence
  Synthetic
aagacucaacuuugcacaaauu

SEQ ID NO: 69818 - RNA, 24 nt, Artificial Sequence
  Synthetic
cgaagacucaacuuugcacaaauu

SEQ ID NO: 69819 - RNA, 18 nt, Artificial Sequence
  Synthetic
ccaaaaaauugacaaauu

SEQ ID NO: 69820 - RNA, 19 nt, Artificial Sequence
  Synthetic
uccaaaaaauugacaaauu

SEQ ID NO: 69821 - RNA, 20 nt, Artificial Sequence
  Synthetic
uuccaaaaaauugacaaauu

SEQ ID NO: 69822 - RNA, 21 nt, Artificial Sequence
  Synthetic
uuuccaaaaaauugacaaauu

SEQ ID NO: 69823 - RNA, 22 nt, Artificial Sequence
  Synthetic
uuuuccaaaaaauugacaaauu

SEQ ID NO: 69824 - RNA, 19 nt, Artificial Sequence
  Synthetic
ugaaaacugguagcaaauu

SEQ ID NO: 69825 - RNA, 20 nt, Artificial Sequence
  Synthetic
augaaaacugguagcaaauu

SEQ ID NO: 69826 - RNA, 21 nt, Artificial Sequence
  Synthetic
aaugaaaacugguagcaaauu

SEQ ID NO: 69827 - RNA, 22 nt, Artificial Sequence
  Synthetic
uaaugaaaacugguagcaaauu

SEQ ID NO: 69828 - RNA, 23 nt, Artificial Sequence
  Synthetic
auaaugaaaacugguagcaaauu

SEQ ID NO: 69829 - RNA, 24 nt, Artificial Sequence
  Synthetic
aauaaugaaaacugguagcaaauu

SEQ ID NO: 69830 - RNA, 18 nt, Artificial Sequence
  Synthetic
accauuuugaugcaaauu

SEQ ID NO: 69831 - RNA, 19 nt, Artificial Sequence
  Synthetic
caccauuuugaugcaaauu

SEQ ID NO: 69832 - RNA, 20 nt, Artificial Sequence
  Synthetic
acaccauuuugaugcaaauu

SEQ ID NO: 69833 - RNA, 21 nt, Artificial Sequence
  Synthetic
uacaccauuuugaugcaaauu

SEQ ID NO: 69834 - RNA, 22 nt, Artificial Sequence
  Synthetic
uuacaccauuuugaugcaaauu

SEQ ID NO: 69835 - RNA, 23 nt, Artificial Sequence
  Synthetic
auuacaccauuuugaugcaaauu

SEQ ID NO: 69836 - RNA, 24 nt, Artificial Sequence
  Synthetic
cauuacaccauuuugaugcaaauu

SEQ ID NO: 69837 - RNA, 18 nt, Artificial Sequence
  Synthetic
uacuuauguaugcaaauu

SEQ ID NO: 69838 - RNA, 19 nt, Artificial Sequence
  Synthetic
auacuuauguaugcaaauu

SEQ ID NO: 69839 - RNA, 20 nt, Artificial Sequence
  Synthetic
uauacuuauguaugcaaauu

SEQ ID NO: 69840 - RNA, 21 nt, Artificial Sequence
  Synthetic
cuauacuuauguaugcaaauu

SEQ ID NO: 69841 - RNA, 22 nt, Artificial Sequence
  Synthetic
ccuauacuuauguaugcaaauu

SEQ ID NO: 69842 - RNA, 23 nt, Artificial Sequence
  Synthetic
cccuauacuuauguaugcaaauu

SEQ ID NO: 69843 - RNA, 24 nt, Artificial Sequence
  Synthetic
ucccuauacuuauguaugcaaauu

SEQ ID NO: 69844 - RNA, 18 nt, Artificial Sequence
  Synthetic
cacauucaacaagaaauu

SEQ ID NO: 69845 - RNA, 19 nt, Artificial Sequence
  Synthetic
ccacauucaacaagaaauu

SEQ ID NO: 69846 - RNA, 20 nt, Artificial Sequence
  Synthetic
uccacauucaacaagaaauu

SEQ ID NO: 69847 - RNA, 21 nt, Artificial Sequence
  Synthetic
uuccacauucaacaagaaauu

SEQ ID NO: 69848 - RNA, 22 nt, Artificial Sequence
  Synthetic
auuccacauucaacaagaaauu

SEQ ID NO: 69849 - RNA, 23 nt, Artificial Sequence
  Synthetic
aauuccacauucaacaagaaauu

SEQ ID NO: 69850 - RNA, 24 nt, Artificial Sequence
  Synthetic
uaauuccacauucaacaagaaauu

SEQ ID NO: 69851 - RNA, 18 nt, Artificial Sequence
  Synthetic
uccugacucuaagaaauu

SEQ ID NO: 69852 - RNA, 19 nt, Artificial Sequence
  Synthetic
auccugacucuaagaaauu

SEQ ID NO: 69853 - RNA, 20 nt, Artificial Sequence
  Synthetic
uauccugacucuaagaaauu

SEQ ID NO: 69854 - RNA, 22 nt, Artificial Sequence
  Synthetic
cguauccugacucuaagaaauu

SEQ ID NO: 69855 - RNA, 24 nt, Artificial Sequence
  Synthetic
agcguauccugacucuaagaaauu

SEQ ID NO: 69856 - RNA, 18 nt, Artificial Sequence
  Synthetic
aacaaauagacagaaauu

SEQ ID NO: 69857 - RNA, 19 nt, Artificial Sequence
  Synthetic
uaacaaauagacagaaauu

SEQ ID NO: 69858 - RNA, 20 nt, Artificial Sequence
  Synthetic
cuaacaaauagacagaaauu

SEQ ID NO: 69859 - RNA, 21 nt, Artificial Sequence
  Synthetic
ucuaacaaauagacagaaauu

SEQ ID NO: 69860 - RNA, 22 nt, Artificial Sequence
  Synthetic
aucuaacaaauagacagaaauu

SEQ ID NO: 69861 - RNA, 23 nt, Artificial Sequence
  Synthetic
uaucuaacaaauagacagaaauu

SEQ ID NO: 69862 - RNA, 24 nt, Artificial Sequence
  Synthetic
cuaucuaacaaauagacagaaauu

SEQ ID NO: 69863 - RNA, 19 nt, Artificial Sequence
  Synthetic
ugggcucaagggggaaauu

SEQ ID NO: 69864 - RNA, 21 nt, Artificial Sequence
  Synthetic
agugggcucaagggggaaauu

SEQ ID NO: 69865 - RNA, 22 nt, Artificial Sequence
  Synthetic
cagugggcucaagggggaaauu

SEQ ID NO: 69866 - RNA, 23 nt, Artificial Sequence
  Synthetic
ucagugggcucaagggggaaauu

SEQ ID NO: 69867 - RNA, 24 nt, Artificial Sequence
  Synthetic
cucagugggcucaagggggaaauu

SEQ ID NO: 69868 - RNA, 18 nt, Artificial Sequence
  Synthetic
uucaaaugcguggaaauu

SEQ ID NO: 69869 - RNA, 19 nt, Artificial Sequence
  Synthetic
cuucaaaugcguggaaauu

SEQ ID NO: 69870 - RNA, 20 nt, Artificial Sequence
  Synthetic
acuucaaaugcguggaaauu

SEQ ID NO: 69871 - RNA, 21 nt, Artificial Sequence
  Synthetic
cacuucaaaugcguggaaauu

SEQ ID NO: 69872 - RNA, 22 nt, Artificial Sequence
  Synthetic
ucacuucaaaugcguggaaauu

SEQ ID NO: 69873 - RNA, 23 nt, Artificial Sequence
  Synthetic
cucacuucaaaugcguggaaauu

SEQ ID NO: 69874 - RNA, 24 nt, Artificial Sequence
  Synthetic
ccucacuucaaaugcguggaaauu

SEQ ID NO: 69875 - RNA, 18 nt, Artificial Sequence
  Synthetic
ugaugaaauagugaaauu

SEQ ID NO: 69876 - RNA, 19 nt, Artificial Sequence
  Synthetic
augaugaaauagugaaauu

SEQ ID NO: 69877 - RNA, 20 nt, Artificial Sequence
  Synthetic
uaugaugaaauagugaaauu

SEQ ID NO: 69878 - RNA, 21 nt, Artificial Sequence
  Synthetic
uuaugaugaaauagugaaauu

SEQ ID NO: 69879 - RNA, 22 nt, Artificial Sequence
  Synthetic
cuuaugaugaaauagugaaauu

SEQ ID NO: 69880 - RNA, 24 nt, Artificial Sequence
  Synthetic
ugcuuaugaugaaauagugaaauu

SEQ ID NO: 69881 - RNA, 21 nt, Artificial Sequence
  Synthetic
accagggaaggaauugaaauu

SEQ ID NO: 69882 - RNA, 22 nt, Artificial Sequence
  Synthetic
aaccagggaaggaauugaaauu

SEQ ID NO: 69883 - RNA, 23 nt, Artificial Sequence
  Synthetic
caaccagggaaggaauugaaauu

SEQ ID NO: 69884 - RNA, 18 nt, Artificial Sequence
  Synthetic
ucaucaucgcuugaaauu

SEQ ID NO: 69885 - RNA, 19 nt, Artificial Sequence
  Synthetic
uucaucaucgcuugaaauu

SEQ ID NO: 69886 - RNA, 20 nt, Artificial Sequence
  Synthetic
auucaucaucgcuugaaauu

SEQ ID NO: 69887 - RNA, 21 nt, Artificial Sequence
  Synthetic
uauucaucaucgcuugaaauu

SEQ ID NO: 69888 - RNA, 22 nt, Artificial Sequence
  Synthetic
uuauucaucaucgcuugaaauu

SEQ ID NO: 69889 - RNA, 23 nt, Artificial Sequence
  Synthetic
uuuauucaucaucgcuugaaauu

SEQ ID NO: 69890 - RNA, 24 nt, Artificial Sequence
  Synthetic
cuuuauucaucaucgcuugaaauu

SEQ ID NO: 69891 - RNA, 21 nt, Artificial Sequence
  Synthetic
uuuucuguuagaauauaaauu

SEQ ID NO: 69892 - RNA, 22 nt, Artificial Sequence
  Synthetic
cuuuucuguuagaauauaaauu

SEQ ID NO: 69893 - RNA, 23 nt, Artificial Sequence
  Synthetic
ccuuuucuguuagaauauaaauu

SEQ ID NO: 69894 - RNA, 24 nt, Artificial Sequence
  Synthetic
uccuuuucuguuagaauauaaauu

SEQ ID NO: 69895 - RNA, 22 nt, Artificial Sequence
  Synthetic
aguuaccuuuauaugcuaaauu

SEQ ID NO: 69896 - RNA, 23 nt, Artificial Sequence
  Synthetic
aaguuaccuuuauaugcuaaauu

SEQ ID NO: 69897 - RNA, 24 nt, Artificial Sequence
  Synthetic
aaaguuaccuuuauaugcuaaauu

SEQ ID NO: 69898 - RNA, 18 nt, Artificial Sequence
  Synthetic
ccuguaccauauuaaauu

SEQ ID NO: 69899 - RNA, 19 nt, Artificial Sequence
  Synthetic
accuguaccauauuaaauu

SEQ ID NO: 69900 - RNA, 20 nt, Artificial Sequence
  Synthetic
aaccuguaccauauuaaauu

SEQ ID NO: 69901 - RNA, 21 nt, Artificial Sequence
  Synthetic
caaccuguaccauauuaaauu

SEQ ID NO: 69902 - RNA, 22 nt, Artificial Sequence
  Synthetic
ccaaccuguaccauauuaaauu

SEQ ID NO: 69903 - RNA, 23 nt, Artificial Sequence
  Synthetic
cccaaccuguaccauauuaaauu

SEQ ID NO: 69904 - RNA, 24 nt, Artificial Sequence
  Synthetic
ccccaaccuguaccauauuaaauu

SEQ ID NO: 69905 - RNA, 18 nt, Artificial Sequence
  Synthetic
uagauacauuauuaaauu

SEQ ID NO: 69906 - RNA, 20 nt, Artificial Sequence
  Synthetic
uguagauacauuauuaaauu

SEQ ID NO: 69907 - RNA, 21 nt, Artificial Sequence
  Synthetic
auguagauacauuauuaaauu

SEQ ID NO: 69908 - RNA, 22 nt, Artificial Sequence
  Synthetic
cauguagauacauuauuaaauu

SEQ ID NO: 69909 - RNA, 23 nt, Artificial Sequence
  Synthetic
acauguagauacauuauuaaauu

SEQ ID NO: 69910 - RNA, 24 nt, Artificial Sequence
  Synthetic
uacauguagauacauuauuaaauu

SEQ ID NO: 69911 - RNA, 18 nt, Artificial Sequence
  Synthetic
uaagaaaucuguuaaauu

SEQ ID NO: 69912 - RNA, 19 nt, Artificial Sequence
  Synthetic
uuaagaaaucuguuaaauu

SEQ ID NO: 69913 - RNA, 20 nt, Artificial Sequence
  Synthetic
cuuaagaaaucuguuaaauu

SEQ ID NO: 69914 - RNA, 21 nt, Artificial Sequence
  Synthetic
ucuuaagaaaucuguuaaauu

SEQ ID NO: 69915 - RNA, 22 nt, Artificial Sequence
  Synthetic
uucuuaagaaaucuguuaaauu

SEQ ID NO: 69916 - RNA, 23 nt, Artificial Sequence
  Synthetic
uuucuuaagaaaucuguuaaauu

SEQ ID NO: 69917 - RNA, 24 nt, Artificial Sequence
  Synthetic
auuucuuaagaaaucuguuaaauu

SEQ ID NO: 69918 - RNA, 21 nt, Artificial Sequence
  Synthetic
ccuugaaagcuauguacaauu

SEQ ID NO: 69919 - RNA, 23 nt, Artificial Sequence
  Synthetic
agccuugaaagcuauguacaauu

SEQ ID NO: 69920 - RNA, 24 nt, Artificial Sequence
  Synthetic
uagccuugaaagcuauguacaauu

SEQ ID NO: 69921 - RNA, 19 nt, Artificial Sequence
  Synthetic
agauacagugcuuacaauu

SEQ ID NO: 69922 - RNA, 20 nt, Artificial Sequence
  Synthetic
aagauacagugcuuacaauu

SEQ ID NO: 69923 - RNA, 21 nt, Artificial Sequence
  Synthetic
aaagauacagugcuuacaauu

SEQ ID NO: 69924 - RNA, 22 nt, Artificial Sequence
  Synthetic
uaaagauacagugcuuacaauu

SEQ ID NO: 69925 - RNA, 24 nt, Artificial Sequence
  Synthetic
uguaaagauacagugcuuacaauu

SEQ ID NO: 69926 - RNA, 19 nt, Artificial Sequence
  Synthetic
aggucaauauguuccaauu

SEQ ID NO: 69927 - RNA, 20 nt, Artificial Sequence
  Synthetic
caggucaauauguuccaauu

SEQ ID NO: 69928 - RNA, 21 nt, Artificial Sequence
  Synthetic
ucaggucaauauguuccaauu

SEQ ID NO: 69929 - RNA, 23 nt, Artificial Sequence
  Synthetic
ugucaggucaauauguuccaauu

SEQ ID NO: 69930 - RNA, 24 nt, Artificial Sequence
  Synthetic
uugucaggucaauauguuccaauu

SEQ ID NO: 69931 - RNA, 18 nt, Artificial Sequence
  Synthetic
uagagagcacaaucaauu

SEQ ID NO: 69932 - RNA, 19 nt, Artificial Sequence
  Synthetic
auagagagcacaaucaauu

SEQ ID NO: 69933 - RNA, 20 nt, Artificial Sequence
  Synthetic
aauagagagcacaaucaauu

SEQ ID NO: 69934 - RNA, 22 nt, Artificial Sequence
  Synthetic
agaauagagagcacaaucaauu

SEQ ID NO: 69935 - RNA, 23 nt, Artificial Sequence
  Synthetic
uagaauagagagcacaaucaauu

SEQ ID NO: 69936 - RNA, 24 nt, Artificial Sequence
  Synthetic
cuagaauagagagcacaaucaauu

SEQ ID NO: 69937 - RNA, 18 nt, Artificial Sequence
  Synthetic
aguucaacccucucaauu

SEQ ID NO: 69938 - RNA, 19 nt, Artificial Sequence
  Synthetic
caguucaacccucucaauu

SEQ ID NO: 69939 - RNA, 20 nt, Artificial Sequence
  Synthetic
ccaguucaacccucucaauu

SEQ ID NO: 69940 - RNA, 21 nt, Artificial Sequence
  Synthetic
accaguucaacccucucaauu

SEQ ID NO: 69941 - RNA, 22 nt, Artificial Sequence
  Synthetic
caccaguucaacccucucaauu

SEQ ID NO: 69942 - RNA, 23 nt, Artificial Sequence
  Synthetic
ccaccaguucaacccucucaauu

SEQ ID NO: 69943 - RNA, 18 nt, Artificial Sequence
  Synthetic
auguccuccuugucaauu

SEQ ID NO: 69944 - RNA, 19 nt, Artificial Sequence
  Synthetic
aauguccuccuugucaauu

SEQ ID NO: 69945 - RNA, 20 nt, Artificial Sequence
  Synthetic
uaauguccuccuugucaauu

SEQ ID NO: 69946 - RNA, 21 nt, Artificial Sequence
  Synthetic
auaauguccuccuugucaauu

SEQ ID NO: 69947 - RNA, 22 nt, Artificial Sequence
  Synthetic
uauaauguccuccuugucaauu

SEQ ID NO: 69948 - RNA, 18 nt, Artificial Sequence
  Synthetic
cucaucaaaaguucaauu

SEQ ID NO: 69949 - RNA, 21 nt, Artificial Sequence
  Synthetic
uggcucaucaaaaguucaauu

SEQ ID NO: 69950 - RNA, 24 nt, Artificial Sequence
  Synthetic
agguggcucaucaaaaguucaauu

SEQ ID NO: 69951 - RNA, 20 nt, Artificial Sequence
  Synthetic
agguguguuaauuuucaauu

SEQ ID NO: 69952 - RNA, 21 nt, Artificial Sequence
  Synthetic
uagguguguuaauuuucaauu

SEQ ID NO: 69953 - RNA, 23 nt, Artificial Sequence
  Synthetic
uguagguguguuaauuuucaauu

SEQ ID NO: 69954 - RNA, 24 nt, Artificial Sequence
  Synthetic
auguagguguguuaauuuucaauu

SEQ ID NO: 69955 - RNA, 21 nt, Artificial Sequence
  Synthetic
cuuguaaaaaggaaaagaauu

SEQ ID NO: 69956 - RNA, 22 nt, Artificial Sequence
  Synthetic
acuuguaaaaaggaaaagaauu

SEQ ID NO: 69957 - RNA, 23 nt, Artificial Sequence
  Synthetic
aacuuguaaaaaggaaaagaauu

SEQ ID NO: 69958 - RNA, 24 nt, Artificial Sequence
  Synthetic
uaacuuguaaaaaggaaaagaauu

SEQ ID NO: 69959 - RNA, 18 nt, Artificial Sequence
  Synthetic
cagugacuuaaaagaauu

SEQ ID NO: 69960 - RNA, 19 nt, Artificial Sequence
  Synthetic
acagugacuuaaaagaauu

SEQ ID NO: 69961 - RNA, 21 nt, Artificial Sequence
  Synthetic
agacagugacuuaaaagaauu

SEQ ID NO: 69962 - RNA, 24 nt, Artificial Sequence
  Synthetic
uggagacagugacuuaaaagaauu

SEQ ID NO: 69963 - RNA, 18 nt, Artificial Sequence
  Synthetic
ccauauauugaaagaauu

SEQ ID NO: 69964 - RNA, 19 nt, Artificial Sequence
  Synthetic
accauauauugaaagaauu

SEQ ID NO: 69965 - RNA, 20 nt, Artificial Sequence
  Synthetic
caccauauauugaaagaauu

SEQ ID NO: 69966 - RNA, 21 nt, Artificial Sequence
  Synthetic
ccaccauauauugaaagaauu

SEQ ID NO: 69967 - RNA, 22 nt, Artificial Sequence
  Synthetic
uccaccauauauugaaagaauu

SEQ ID NO: 69968 - RNA, 23 nt, Artificial Sequence
  Synthetic
uuccaccauauauugaaagaauu

SEQ ID NO: 69969 - RNA, 24 nt, Artificial Sequence
  Synthetic
cuuccaccauauauugaaagaauu

SEQ ID NO: 69970 - RNA, 21 nt, Artificial Sequence
  Synthetic
uuuauucuaguugaaagaauu

SEQ ID NO: 69971 - RNA, 22 nt, Artificial Sequence
  Synthetic
uuuuauucuaguugaaagaauu

SEQ ID NO: 69972 - RNA, 23 nt, Artificial Sequence
  Synthetic
cuuuuauucuaguugaaagaauu

SEQ ID NO: 69973 - RNA, 24 nt, Artificial Sequence
  Synthetic
ccuuuuauucuaguugaaagaauu

SEQ ID NO: 69974 - RNA, 18 nt, Artificial Sequence
  Synthetic
aauuauggguacagaauu

SEQ ID NO: 69975 - RNA, 19 nt, Artificial Sequence
  Synthetic
aaauuauggguacagaauu

SEQ ID NO: 69976 - RNA, 20 nt, Artificial Sequence
  Synthetic
aaaauuauggguacagaauu

SEQ ID NO: 69977 - RNA, 23 nt, Artificial Sequence
  Synthetic
aggaaaauuauggguacagaauu

SEQ ID NO: 69978 - RNA, 24 nt, Artificial Sequence
  Synthetic
uaggaaaauuauggguacagaauu

SEQ ID NO: 69979 - RNA, 20 nt, Artificial Sequence
  Synthetic
aggagagaaaucccagaauu

SEQ ID NO: 69980 - RNA, 21 nt, Artificial Sequence
  Synthetic
caggagagaaaucccagaauu

SEQ ID NO: 69981 - RNA, 22 nt, Artificial Sequence
  Synthetic
acaggagagaaaucccagaauu

SEQ ID NO: 69982 - RNA, 23 nt, Artificial Sequence
  Synthetic
uacaggagagaaaucccagaauu

SEQ ID NO: 69983 - RNA, 18 nt, Artificial Sequence
  Synthetic
aguuuaauuucuagaauu

SEQ ID NO: 69984 - RNA, 19 nt, Artificial Sequence
  Synthetic
aaguuuaauuucuagaauu

SEQ ID NO: 69985 - RNA, 20 nt, Artificial Sequence
  Synthetic
aaaguuuaauuucuagaauu

SEQ ID NO: 69986 - RNA, 21 nt, Artificial Sequence
  Synthetic
caaaguuuaauuucuagaauu

SEQ ID NO: 69987 - RNA, 22 nt, Artificial Sequence
  Synthetic
ucaaaguuuaauuucuagaauu

SEQ ID NO: 69988 - RNA, 23 nt, Artificial Sequence
  Synthetic
uucaaaguuuaauuucuagaauu

SEQ ID NO: 69989 - RNA, 18 nt, Artificial Sequence
  Synthetic
ugugacaugaguagaauu

SEQ ID NO: 69990 - RNA, 19 nt, Artificial Sequence
  Synthetic
uugugacaugaguagaauu

SEQ ID NO: 69991 - RNA, 22 nt, Artificial Sequence
  Synthetic
ugguugugacaugaguagaauu

SEQ ID NO: 69992 - RNA, 23 nt, Artificial Sequence
  Synthetic
cugguugugacaugaguagaauu

SEQ ID NO: 69993 - RNA, 24 nt, Artificial Sequence
  Synthetic
ucugguugugacaugaguagaauu

SEQ ID NO: 69994 - RNA, 18 nt, Artificial Sequence
  Synthetic
cagcccagccuuagaauu

SEQ ID NO: 69995 - RNA, 20 nt, Artificial Sequence
  Synthetic
agcagcccagccuuagaauu

SEQ ID NO: 69996 - RNA, 21 nt, Artificial Sequence
  Synthetic
aagcagcccagccuuagaauu

SEQ ID NO: 69997 - RNA, 24 nt, Artificial Sequence
  Synthetic
uggaagcagcccagccuuagaauu

SEQ ID NO: 69998 - RNA, 18 nt, Artificial Sequence
  Synthetic
uuuuugggaguuagaauu

SEQ ID NO: 69999 - RNA, 19 nt, Artificial Sequence
  Synthetic
cuuuuugggaguuagaauu

SEQ ID NO: 70000 - RNA, 21 nt, Artificial Sequence
  Synthetic
agcuuuuugggaguuagaauu

SEQ ID NO: 70001 - RNA, 22 nt, Artificial Sequence
  Synthetic
cagcuuuuugggaguuagaauu

SEQ ID NO: 70002 - RNA, 23 nt, Artificial Sequence
  Synthetic
ccagcuuuuugggaguuagaauu

SEQ ID NO: 70003 - RNA, 24 nt, Artificial Sequence
  Synthetic
cccagcuuuuugggaguuagaauu

SEQ ID NO: 70004 - RNA, 20 nt, Artificial Sequence
  Synthetic
uggaugagcauagaugaauu

SEQ ID NO: 70005 - RNA, 21 nt, Artificial Sequence
  Synthetic
auggaugagcauagaugaauu

SEQ ID NO: 70006 - RNA, 22 nt, Artificial Sequence
  Synthetic
aauggaugagcauagaugaauu

SEQ ID NO: 70007 - RNA, 23 nt, Artificial Sequence
  Synthetic
caauggaugagcauagaugaauu

SEQ ID NO: 70008 - RNA, 24 nt, Artificial Sequence
  Synthetic
ucaauggaugagcauagaugaauu

SEQ ID NO: 70009 - RNA, 18 nt, Artificial Sequence
  Synthetic
augaugagauuaugaauu

SEQ ID NO: 70010 - RNA, 19 nt, Artificial Sequence
  Synthetic
aaugaugagauuaugaauu

SEQ ID NO: 70011 - RNA, 20 nt, Artificial Sequence
  Synthetic
uaaugaugagauuaugaauu

SEQ ID NO: 70012 - RNA, 21 nt, Artificial Sequence
  Synthetic
uuaaugaugagauuaugaauu

SEQ ID NO: 70013 - RNA, 22 nt, Artificial Sequence
  Synthetic
auuaaugaugagauuaugaauu

SEQ ID NO: 70014 - RNA, 23 nt, Artificial Sequence
  Synthetic
cauuaaugaugagauuaugaauu

SEQ ID NO: 70015 - RNA, 18 nt, Artificial Sequence
  Synthetic
uuacaauauuacugaauu

SEQ ID NO: 70016 - RNA, 19 nt, Artificial Sequence
  Synthetic
auuacaauauuacugaauu

SEQ ID NO: 70017 - RNA, 20 nt, Artificial Sequence
  Synthetic
uauuacaauauuacugaauu

SEQ ID NO: 70018 - RNA, 21 nt, Artificial Sequence
  Synthetic
auauuacaauauuacugaauu

SEQ ID NO: 70019 - RNA, 22 nt, Artificial Sequence
  Synthetic
uauauuacaauauuacugaauu

SEQ ID NO: 70020 - RNA, 23 nt, Artificial Sequence
  Synthetic
uuauauuacaauauuacugaauu

SEQ ID NO: 70021 - RNA, 24 nt, Artificial Sequence
  Synthetic
auuauauuacaauauuacugaauu

SEQ ID NO: 70022 - RNA, 18 nt, Artificial Sequence
  Synthetic
ugaaaugaaaccugaauu

SEQ ID NO: 70023 - RNA, 19 nt, Artificial Sequence
  Synthetic
uugaaaugaaaccugaauu

SEQ ID NO: 70024 - RNA, 20 nt, Artificial Sequence
  Synthetic
auugaaaugaaaccugaauu

SEQ ID NO: 70025 - RNA, 21 nt, Artificial Sequence
  Synthetic
aauugaaaugaaaccugaauu

SEQ ID NO: 70026 - RNA, 23 nt, Artificial Sequence
  Synthetic
ugaauugaaaugaaaccugaauu

SEQ ID NO: 70027 - RNA, 24 nt, Artificial Sequence
  Synthetic
cugaauugaaaugaaaccugaauu

SEQ ID NO: 70028 - RNA, 21 nt, Artificial Sequence
  Synthetic
uaaagaauaugccugugaauu

SEQ ID NO: 70029 - RNA, 23 nt, Artificial Sequence
  Synthetic
uguaaagaauaugccugugaauu

SEQ ID NO: 70030 - RNA, 24 nt, Artificial Sequence
  Synthetic
auguaaagaauaugccugugaauu

SEQ ID NO: 70031 - RNA, 18 nt, Artificial Sequence
  Synthetic
uaagauuacuugugaauu

SEQ ID NO: 70032 - RNA, 19 nt, Artificial Sequence
  Synthetic
uuaagauuacuugugaauu

SEQ ID NO: 70033 - RNA, 20 nt, Artificial Sequence
  Synthetic
cuuaagauuacuugugaauu

SEQ ID NO: 70034 - RNA, 21 nt, Artificial Sequence
  Synthetic
ccuuaagauuacuugugaauu

SEQ ID NO: 70035 - RNA, 22 nt, Artificial Sequence
  Synthetic
accuuaagauuacuugugaauu

SEQ ID NO: 70036 - RNA, 24 nt, Artificial Sequence
  Synthetic
ugaccuuaagauuacuugugaauu

SEQ ID NO: 70037 - RNA, 20 nt, Artificial Sequence
  Synthetic
aggcuugcagcaauugaauu

SEQ ID NO: 70038 - RNA, 21 nt, Artificial Sequence
  Synthetic
aaggcuugcagcaauugaauu

SEQ ID NO: 70039 - RNA, 23 nt, Artificial Sequence
  Synthetic
ugaaggcuugcagcaauugaauu

SEQ ID NO: 70040 - RNA, 24 nt, Artificial Sequence
  Synthetic
cugaaggcuugcagcaauugaauu

SEQ ID NO: 70041 - RNA, 18 nt, Artificial Sequence
  Synthetic
ucuauauuauauugaauu

SEQ ID NO: 70042 - RNA, 19 nt, Artificial Sequence
  Synthetic
cucuauauuauauugaauu

SEQ ID NO: 70043 - RNA, 20 nt, Artificial Sequence
  Synthetic
acucuauauuauauugaauu

SEQ ID NO: 70044 - RNA, 21 nt, Artificial Sequence
  Synthetic
cacucuauauuauauugaauu

SEQ ID NO: 70045 - RNA, 23 nt, Artificial Sequence
  Synthetic
ugcacucuauauuauauugaauu

SEQ ID NO: 70046 - RNA, 24 nt, Artificial Sequence
  Synthetic
uugcacucuauauuauauugaauu

SEQ ID NO: 70047 - RNA, 18 nt, Artificial Sequence
  Synthetic
aauauuccuguuugaauu

SEQ ID NO: 70048 - RNA, 19 nt, Artificial Sequence
  Synthetic
aaauauuccuguuugaauu

SEQ ID NO: 70049 - RNA, 20 nt, Artificial Sequence
  Synthetic
aaaauauuccuguuugaauu

SEQ ID NO: 70050 - RNA, 22 nt, Artificial Sequence
  Synthetic
agaaaauauuccuguuugaauu

SEQ ID NO: 70051 - RNA, 23 nt, Artificial Sequence
  Synthetic
aagaaaauauuccuguuugaauu

SEQ ID NO: 70052 - RNA, 18 nt, Artificial Sequence
  Synthetic
accuuaaugaaaauaauu

SEQ ID NO: 70053 - RNA, 19 nt, Artificial Sequence
  Synthetic
uaccuuaaugaaaauaauu

SEQ ID NO: 70054 - RNA, 20 nt, Artificial Sequence
  Synthetic
uuaccuuaaugaaaauaauu

SEQ ID NO: 70055 - RNA, 22 nt, Artificial Sequence
  Synthetic
uguuaccuuaaugaaaauaauu

SEQ ID NO: 70056 - RNA, 24 nt, Artificial Sequence
  Synthetic
aguguuaccuuaaugaaaauaauu

SEQ ID NO: 70057 - RNA, 21 nt, Artificial Sequence
  Synthetic
uauuaaauaguagaaauaauu

SEQ ID NO: 70058 - RNA, 22 nt, Artificial Sequence
  Synthetic
auauuaaauaguagaaauaauu

SEQ ID NO: 70059 - RNA, 23 nt, Artificial Sequence
  Synthetic
aauauuaaauaguagaaauaauu

SEQ ID NO: 70060 - RNA, 24 nt, Artificial Sequence
  Synthetic
aaauauuaaauaguagaaauaauu

SEQ ID NO: 70061 - RNA, 21 nt, Artificial Sequence
  Synthetic
aacuuuaaaaagucaauaauu

SEQ ID NO: 70062 - RNA, 22 nt, Artificial Sequence
  Synthetic
uaacuuuaaaaagucaauaauu

SEQ ID NO: 70063 - RNA, 23 nt, Artificial Sequence
  Synthetic
uuaacuuuaaaaagucaauaauu

SEQ ID NO: 70064 - RNA, 24 nt, Artificial Sequence
  Synthetic
auuaacuuuaaaaagucaauaauu

SEQ ID NO: 70065 - RNA, 21 nt, Artificial Sequence
  Synthetic
auguaaaguaugagaauaauu

SEQ ID NO: 70066 - RNA, 23 nt, Artificial Sequence
  Synthetic
agauguaaaguaugagaauaauu

SEQ ID NO: 70067 - RNA, 24 nt, Artificial Sequence
  Synthetic
uagauguaaaguaugagaauaauu

SEQ ID NO: 70068 - RNA, 18 nt, Artificial Sequence
  Synthetic
uuuuagagacgaauaauu

SEQ ID NO: 70069 - RNA, 19 nt, Artificial Sequence
  Synthetic
auuuuagagacgaauaauu

SEQ ID NO: 70070 - RNA, 20 nt, Artificial Sequence
  Synthetic
aauuuuagagacgaauaauu

SEQ ID NO: 70071 - RNA, 21 nt, Artificial Sequence
  Synthetic
uaauuuuagagacgaauaauu

SEQ ID NO: 70072 - RNA, 22 nt, Artificial Sequence
  Synthetic
uuaauuuuagagacgaauaauu

SEQ ID NO: 70073 - RNA, 23 nt, Artificial Sequence
  Synthetic
cuuaauuuuagagacgaauaauu

SEQ ID NO: 70074 - RNA, 24 nt, Artificial Sequence
  Synthetic
ccuuaauuuuagagacgaauaauu

SEQ ID NO: 70075 - RNA, 19 nt, Artificial Sequence
  Synthetic
agcagguuaaugaauaauu

SEQ ID NO: 70076 - RNA, 20 nt, Artificial Sequence
  Synthetic
uagcagguuaaugaauaauu

SEQ ID NO: 70077 - RNA, 22 nt, Artificial Sequence
  Synthetic
uguagcagguuaaugaauaauu

SEQ ID NO: 70078 - RNA, 23 nt, Artificial Sequence
  Synthetic
uuguagcagguuaaugaauaauu

SEQ ID NO: 70079 - RNA, 24 nt, Artificial Sequence
  Synthetic
uuuguagcagguuaaugaauaauu

SEQ ID NO: 70080 - RNA, 18 nt, Artificial Sequence
  Synthetic
auuaucguaaacauaauu

SEQ ID NO: 70081 - RNA, 21 nt, Artificial Sequence
  Synthetic
uggauuaucguaaacauaauu

SEQ ID NO: 70082 - RNA, 22 nt, Artificial Sequence
  Synthetic
auggauuaucguaaacauaauu

SEQ ID NO: 70083 - RNA, 23 nt, Artificial Sequence
  Synthetic
cauggauuaucguaaacauaauu

SEQ ID NO: 70084 - RNA, 24 nt, Artificial Sequence
  Synthetic
acauggauuaucguaaacauaauu

SEQ ID NO: 70085 - RNA, 18 nt, Artificial Sequence
  Synthetic
uauuucgauaucauaauu

SEQ ID NO: 70086 - RNA, 19 nt, Artificial Sequence
  Synthetic
auauuucgauaucauaauu

SEQ ID NO: 70087 - RNA, 20 nt, Artificial Sequence
  Synthetic
aauauuucgauaucauaauu

SEQ ID NO: 70088 - RNA, 21 nt, Artificial Sequence
  Synthetic
aaauauuucgauaucauaauu

SEQ ID NO: 70089 - RNA, 22 nt, Artificial Sequence
  Synthetic
caaauauuucgauaucauaauu

SEQ ID NO: 70090 - RNA, 23 nt, Artificial Sequence
  Synthetic
acaaauauuucgauaucauaauu

SEQ ID NO: 70091 - RNA, 24 nt, Artificial Sequence
  Synthetic
cacaaauauuucgauaucauaauu

SEQ ID NO: 70092 - RNA, 21 nt, Artificial Sequence
  Synthetic
aauaggaagccaaagauaauu

SEQ ID NO: 70093 - RNA, 22 nt, Artificial Sequence
  Synthetic
aaauaggaagccaaagauaauu

SEQ ID NO: 70094 - RNA, 23 nt, Artificial Sequence
  Synthetic
aaaauaggaagccaaagauaauu

SEQ ID NO: 70095 - RNA, 24 nt, Artificial Sequence
  Synthetic
uaaaauaggaagccaaagauaauu

SEQ ID NO: 70096 - RNA, 19 nt, Artificial Sequence
  Synthetic
agauuaucauuauauaauu

SEQ ID NO: 70097 - RNA, 21 nt, Artificial Sequence
  Synthetic
ugagauuaucauuauauaauu

SEQ ID NO: 70098 - RNA, 22 nt, Artificial Sequence
  Synthetic
cugagauuaucauuauauaauu

SEQ ID NO: 70099 - RNA, 23 nt, Artificial Sequence
  Synthetic
acugagauuaucauuauauaauu

SEQ ID NO: 70100 - RNA, 24 nt, Artificial Sequence
  Synthetic
cacugagauuaucauuauauaauu

SEQ ID NO: 70101 - RNA, 19 nt, Artificial Sequence
  Synthetic
aggaagaguuauuauaauu

SEQ ID NO: 70102 - RNA, 20 nt, Artificial Sequence
  Synthetic
uaggaagaguuauuauaauu

SEQ ID NO: 70103 - RNA, 21 nt, Artificial Sequence
  Synthetic
uuaggaagaguuauuauaauu

SEQ ID NO: 70104 - RNA, 22 nt, Artificial Sequence
  Synthetic
auuaggaagaguuauuauaauu

SEQ ID NO: 70105 - RNA, 23 nt, Artificial Sequence
  Synthetic
cauuaggaagaguuauuauaauu

SEQ ID NO: 70106 - RNA, 24 nt, Artificial Sequence
  Synthetic
ccauuaggaagaguuauuauaauu

SEQ ID NO: 70107 - RNA, 18 nt, Artificial Sequence
  Synthetic
auuacuugcuuuauaauu

SEQ ID NO: 70108 - RNA, 21 nt, Artificial Sequence
  Synthetic
uggauuacuugcuuuauaauu

SEQ ID NO: 70109 - RNA, 22 nt, Artificial Sequence
  Synthetic
uuggauuacuugcuuuauaauu

SEQ ID NO: 70110 - RNA, 23 nt, Artificial Sequence
  Synthetic
uuuggauuacuugcuuuauaauu

SEQ ID NO: 70111 - RNA, 24 nt, Artificial Sequence
  Synthetic
uuuuggauuacuugcuuuauaauu

SEQ ID NO: 70112 - RNA, 21 nt, Artificial Sequence
  Synthetic
uuggaaaauuauuuuauaauu

SEQ ID NO: 70113 - RNA, 22 nt, Artificial Sequence
  Synthetic
uuuggaaaauuauuuuauaauu

SEQ ID NO: 70114 - RNA, 23 nt, Artificial Sequence
  Synthetic
cuuuggaaaauuauuuuauaauu

SEQ ID NO: 70115 - RNA, 24 nt, Artificial Sequence
  Synthetic
ucuuuggaaaauuauuuuauaauu

SEQ ID NO: 70116 - RNA, 18 nt, Artificial Sequence
  Synthetic
ccuucuuuugaacuaauu

SEQ ID NO: 70117 - RNA, 20 nt, Artificial Sequence
  Synthetic
ugccuucuuuugaacuaauu

SEQ ID NO: 70118 - RNA, 21 nt, Artificial Sequence
  Synthetic
augccuucuuuugaacuaauu

SEQ ID NO: 70119 - RNA, 22 nt, Artificial Sequence
  Synthetic
aaugccuucuuuugaacuaauu

SEQ ID NO: 70120 - RNA, 23 nt, Artificial Sequence
  Synthetic
caaugccuucuuuugaacuaauu

SEQ ID NO: 70121 - RNA, 24 nt, Artificial Sequence
  Synthetic
acaaugccuucuuuugaacuaauu

SEQ ID NO: 70122 - RNA, 18 nt, Artificial Sequence
  Synthetic
acuucauauauccuaauu

SEQ ID NO: 70123 - RNA, 19 nt, Artificial Sequence
  Synthetic
uacuucauauauccuaauu

SEQ ID NO: 70124 - RNA, 20 nt, Artificial Sequence
  Synthetic
auacuucauauauccuaauu

SEQ ID NO: 70125 - RNA, 21 nt, Artificial Sequence
  Synthetic
aauacuucauauauccuaauu

SEQ ID NO: 70126 - RNA, 22 nt, Artificial Sequence
  Synthetic
uaauacuucauauauccuaauu

SEQ ID NO: 70127 - RNA, 24 nt, Artificial Sequence
  Synthetic
aguaauacuucauauauccuaauu

SEQ ID NO: 70128 - RNA, 20 nt, Artificial Sequence
  Synthetic
ugguugauaaugggcuaauu

SEQ ID NO: 70129 - RNA, 21 nt, Artificial Sequence
  Synthetic
uugguugauaaugggcuaauu

SEQ ID NO: 70130 - RNA, 23 nt, Artificial Sequence
  Synthetic
uguugguugauaaugggcuaauu

SEQ ID NO: 70131 - RNA, 24 nt, Artificial Sequence
  Synthetic
uuguugguugauaaugggcuaauu

SEQ ID NO: 70132 - RNA, 19 nt, Artificial Sequence
  Synthetic
agauacagaaacucuaauu

SEQ ID NO: 70133 - RNA, 20 nt, Artificial Sequence
  Synthetic
aagauacagaaacucuaauu

SEQ ID NO: 70134 - RNA, 21 nt, Artificial Sequence
  Synthetic
caagauacagaaacucuaauu

SEQ ID NO: 70135 - RNA, 23 nt, Artificial Sequence
  Synthetic
agcaagauacagaaacucuaauu

SEQ ID NO: 70136 - RNA, 24 nt, Artificial Sequence
  Synthetic
aagcaagauacagaaacucuaauu

SEQ ID NO: 70137 - RNA, 18 nt, Artificial Sequence
  Synthetic
aaacccauuguucuaauu

SEQ ID NO: 70138 - RNA, 19 nt, Artificial Sequence
  Synthetic
aaaacccauuguucuaauu

SEQ ID NO: 70139 - RNA, 20 nt, Artificial Sequence
  Synthetic
uaaaacccauuguucuaauu

SEQ ID NO: 70140 - RNA, 21 nt, Artificial Sequence
  Synthetic
uuaaaacccauuguucuaauu

SEQ ID NO: 70141 - RNA, 22 nt, Artificial Sequence
  Synthetic
cuuaaaacccauuguucuaauu

SEQ ID NO: 70142 - RNA, 23 nt, Artificial Sequence
  Synthetic
acuuaaaacccauuguucuaauu

SEQ ID NO: 70143 - RNA, 24 nt, Artificial Sequence
  Synthetic
aacuuaaaacccauuguucuaauu

SEQ ID NO: 70144 - RNA, 18 nt, Artificial Sequence
  Synthetic
acaguauaggcaguaauu

SEQ ID NO: 70145 - RNA, 19 nt, Artificial Sequence
  Synthetic
uacaguauaggcaguaauu

SEQ ID NO: 70146 - RNA, 21 nt, Artificial Sequence
  Synthetic
aguacaguauaggcaguaauu

SEQ ID NO: 70147 - RNA, 22 nt, Artificial Sequence
  Synthetic
aaguacaguauaggcaguaauu

SEQ ID NO: 70148 - RNA, 24 nt, Artificial Sequence
  Synthetic
agaaguacaguauaggcaguaauu

SEQ ID NO: 70149 - RNA, 21 nt, Artificial Sequence
  Synthetic
uuugaaaaaaaaucaguaauu

SEQ ID NO: 70150 - RNA, 22 nt, Artificial Sequence
  Synthetic
auuugaaaaaaaaucaguaauu

SEQ ID NO: 70151 - RNA, 23 nt, Artificial Sequence
  Synthetic
cauuugaaaaaaaaucaguaauu

SEQ ID NO: 70152 - RNA, 24 nt, Artificial Sequence
  Synthetic
ccauuugaaaaaaaaucaguaauu

SEQ ID NO: 70153 - RNA, 18 nt, Artificial Sequence
  Synthetic
uaugagauuauaguaauu

SEQ ID NO: 70154 - RNA, 20 nt, Artificial Sequence
  Synthetic
aguaugagauuauaguaauu

SEQ ID NO: 70155 - RNA, 21 nt, Artificial Sequence
  Synthetic
caguaugagauuauaguaauu

SEQ ID NO: 70156 - RNA, 18 nt, Artificial Sequence
  Synthetic
uuuuggaaccuaguaauu

SEQ ID NO: 70157 - RNA, 19 nt, Artificial Sequence
  Synthetic
uuuuuggaaccuaguaauu

SEQ ID NO: 70158 - RNA, 20 nt, Artificial Sequence
  Synthetic
auuuuuggaaccuaguaauu

SEQ ID NO: 70159 - RNA, 21 nt, Artificial Sequence
  Synthetic
cauuuuuggaaccuaguaauu

SEQ ID NO: 70160 - RNA, 22 nt, Artificial Sequence
  Synthetic
ucauuuuuggaaccuaguaauu

SEQ ID NO: 70161 - RNA, 23 nt, Artificial Sequence
  Synthetic
uucauuuuuggaaccuaguaauu

SEQ ID NO: 70162 - RNA, 24 nt, Artificial Sequence
  Synthetic
cuucauuuuuggaaccuaguaauu

SEQ ID NO: 70163 - RNA, 18 nt, Artificial Sequence
  Synthetic
aaauacauugucguaauu

SEQ ID NO: 70164 - RNA, 19 nt, Artificial Sequence
  Synthetic
uaaauacauugucguaauu

SEQ ID NO: 70165 - RNA, 20 nt, Artificial Sequence
  Synthetic
uuaaauacauugucguaauu

SEQ ID NO: 70166 - RNA, 21 nt, Artificial Sequence
  Synthetic
uuuaaauacauugucguaauu

SEQ ID NO: 70167 - RNA, 22 nt, Artificial Sequence
  Synthetic
uuuuaaauacauugucguaauu

SEQ ID NO: 70168 - RNA, 23 nt, Artificial Sequence
  Synthetic
cuuuuaaauacauugucguaauu

SEQ ID NO: 70169 - RNA, 24 nt, Artificial Sequence
  Synthetic
ucuuuuaaauacauugucguaauu

SEQ ID NO: 70170 - RNA, 18 nt, Artificial Sequence
  Synthetic
aaaugggcagguguaauu

SEQ ID NO: 70171 - RNA, 20 nt, Artificial Sequence
  Synthetic
agaaaugggcagguguaauu

SEQ ID NO: 70172 - RNA, 23 nt, Artificial Sequence
  Synthetic
uggagaaaugggcagguguaauu

SEQ ID NO: 70173 - RNA, 24 nt, Artificial Sequence
  Synthetic
cuggagaaaugggcagguguaauu

SEQ ID NO: 70174 - RNA, 18 nt, Artificial Sequence
  Synthetic
agagcauugcaauuaauu

SEQ ID NO: 70175 - RNA, 22 nt, Artificial Sequence
  Synthetic
agggagagcauugcaauuaauu

SEQ ID NO: 70176 - RNA, 23 nt, Artificial Sequence
  Synthetic
aagggagagcauugcaauuaauu

SEQ ID NO: 70177 - RNA, 24 nt, Artificial Sequence
  Synthetic
aaagggagagcauugcaauuaauu

SEQ ID NO: 70178 - RNA, 18 nt, Artificial Sequence
  Synthetic
caguaggacugauuaauu

SEQ ID NO: 70179 - RNA, 20 nt, Artificial Sequence
  Synthetic
agcaguaggacugauuaauu

SEQ ID NO: 70180 - RNA, 21 nt, Artificial Sequence
  Synthetic
uagcaguaggacugauuaauu

SEQ ID NO: 70181 - RNA, 23 nt, Artificial Sequence
  Synthetic
aguagcaguaggacugauuaauu

SEQ ID NO: 70182 - RNA, 24 nt, Artificial Sequence
  Synthetic
aaguagcaguaggacugauuaauu

SEQ ID NO: 70183 - RNA, 18 nt, Artificial Sequence
  Synthetic
agaacuccugccuuaauu

SEQ ID NO: 70184 - RNA, 20 nt, Artificial Sequence
  Synthetic
agagaacuccugccuuaauu

SEQ ID NO: 70185 - RNA, 22 nt, Artificial Sequence
  Synthetic
ugagagaacuccugccuuaauu

SEQ ID NO: 70186 - RNA, 23 nt, Artificial Sequence
  Synthetic
augagagaacuccugccuuaauu

SEQ ID NO: 70187 - RNA, 24 nt, Artificial Sequence
  Synthetic
aaugagagaacuccugccuuaauu

SEQ ID NO: 70188 - RNA, 18 nt, Artificial Sequence
  Synthetic
cagguaucaacguuaauu

SEQ ID NO: 70189 - RNA, 20 nt, Artificial Sequence
  Synthetic
agcagguaucaacguuaauu

SEQ ID NO: 70190 - RNA, 22 nt, Artificial Sequence
  Synthetic
agagcagguaucaacguuaauu

SEQ ID NO: 70191 - RNA, 23 nt, Artificial Sequence
  Synthetic
aagagcagguaucaacguuaauu

SEQ ID NO: 70192 - RNA, 24 nt, Artificial Sequence
  Synthetic
uaagagcagguaucaacguuaauu

SEQ ID NO: 70193 - RNA, 19 nt, Artificial Sequence
  Synthetic
agaauauaaacaaaacauu

SEQ ID NO: 70194 - RNA, 20 nt, Artificial Sequence
  Synthetic
uagaauauaaacaaaacauu

SEQ ID NO: 70195 - RNA, 21 nt, Artificial Sequence
  Synthetic
auagaauauaaacaaaacauu

SEQ ID NO: 70196 - RNA, 22 nt, Artificial Sequence
  Synthetic
aauagaauauaaacaaaacauu

SEQ ID NO: 70197 - RNA, 23 nt, Artificial Sequence
  Synthetic
aaauagaauauaaacaaaacauu

SEQ ID NO: 70198 - RNA, 24 nt, Artificial Sequence
  Synthetic
uaaauagaauauaaacaaaacauu

SEQ ID NO: 70199 - RNA, 18 nt, Artificial Sequence
  Synthetic
agaauuuaacaaaacauu

SEQ ID NO: 70200 - RNA, 19 nt, Artificial Sequence
  Synthetic
aagaauuuaacaaaacauu

SEQ ID NO: 70201 - RNA, 20 nt, Artificial Sequence
  Synthetic
uaagaauuuaacaaaacauu

SEQ ID NO: 70202 - RNA, 22 nt, Artificial Sequence
  Synthetic
uguaagaauuuaacaaaacauu

SEQ ID NO: 70203 - RNA, 23 nt, Artificial Sequence
  Synthetic
auguaagaauuuaacaaaacauu

SEQ ID NO: 70204 - RNA, 24 nt, Artificial Sequence
  Synthetic
aauguaagaauuuaacaaaacauu

SEQ ID NO: 70205 - RNA, 21 nt, Artificial Sequence
  Synthetic
caaucauuuuauuuaaacauu

SEQ ID NO: 70206 - RNA, 23 nt, Artificial Sequence
  Synthetic
cgcaaucauuuuauuuaaacauu

SEQ ID NO: 70207 - RNA, 24 nt, Artificial Sequence
  Synthetic
acgcaaucauuuuauuuaaacauu

SEQ ID NO: 70208 - RNA, 18 nt, Artificial Sequence
  Synthetic
caucuguguuccaacauu

SEQ ID NO: 70209 - RNA, 19 nt, Artificial Sequence
  Synthetic
acaucuguguuccaacauu

SEQ ID NO: 70210 - RNA, 20 nt, Artificial Sequence
  Synthetic
aacaucuguguuccaacauu

SEQ ID NO: 70211 - RNA, 22 nt, Artificial Sequence
  Synthetic
ugaacaucuguguuccaacauu

SEQ ID NO: 70212 - RNA, 23 nt, Artificial Sequence
  Synthetic
augaacaucuguguuccaacauu

SEQ ID NO: 70213 - RNA, 24 nt, Artificial Sequence
  Synthetic
uaugaacaucuguguuccaacauu

SEQ ID NO: 70214 - RNA, 18 nt, Artificial Sequence
  Synthetic
aagugcuuugucaacauu

SEQ ID NO: 70215 - RNA, 19 nt, Artificial Sequence
  Synthetic
caagugcuuugucaacauu

SEQ ID NO: 70216 - RNA, 20 nt, Artificial Sequence
  Synthetic
ucaagugcuuugucaacauu

SEQ ID NO: 70217 - RNA, 22 nt, Artificial Sequence
  Synthetic
ugucaagugcuuugucaacauu

SEQ ID NO: 70218 - RNA, 23 nt, Artificial Sequence
  Synthetic
cugucaagugcuuugucaacauu

SEQ ID NO: 70219 - RNA, 24 nt, Artificial Sequence
  Synthetic
acugucaagugcuuugucaacauu

SEQ ID NO: 70220 - RNA, 18 nt, Artificial Sequence
  Synthetic
ccuuacuuguucaacauu

SEQ ID NO: 70221 - RNA, 19 nt, Artificial Sequence
  Synthetic
accuuacuuguucaacauu

SEQ ID NO: 70222 - RNA, 20 nt, Artificial Sequence
  Synthetic
uaccuuacuuguucaacauu

SEQ ID NO: 70223 - RNA, 21 nt, Artificial Sequence
  Synthetic
cuaccuuacuuguucaacauu

SEQ ID NO: 70224 - RNA, 22 nt, Artificial Sequence
  Synthetic
ucuaccuuacuuguucaacauu

SEQ ID NO: 70225 - RNA, 24 nt, Artificial Sequence
  Synthetic
ugucuaccuuacuuguucaacauu

SEQ ID NO: 70226 - RNA, 18 nt, Artificial Sequence
  Synthetic
aucuaauuugugaacauu

SEQ ID NO: 70227 - RNA, 19 nt, Artificial Sequence
  Synthetic
caucuaauuugugaacauu

SEQ ID NO: 70228 - RNA, 20 nt, Artificial Sequence
  Synthetic
ucaucuaauuugugaacauu

SEQ ID NO: 70229 - RNA, 22 nt, Artificial Sequence
  Synthetic
agucaucuaauuugugaacauu

SEQ ID NO: 70230 - RNA, 24 nt, Artificial Sequence
  Synthetic
ugagucaucuaauuugugaacauu

SEQ ID NO: 70231 - RNA, 19 nt, Artificial Sequence
  Synthetic
ugucaaaggguuuaacauu

SEQ ID NO: 70232 - RNA, 20 nt, Artificial Sequence
  Synthetic
uugucaaaggguuuaacauu

SEQ ID NO: 70233 - RNA, 21 nt, Artificial Sequence
  Synthetic
cuugucaaaggguuuaacauu

SEQ ID NO: 70234 - RNA, 22 nt, Artificial Sequence
  Synthetic
acuugucaaaggguuuaacauu

SEQ ID NO: 70235 - RNA, 23 nt, Artificial Sequence
  Synthetic
cacuugucaaaggguuuaacauu

SEQ ID NO: 70236 - RNA, 24 nt, Artificial Sequence
  Synthetic
ucacuugucaaaggguuuaacauu

SEQ ID NO: 70237 - RNA, 20 nt, Artificial Sequence
  Synthetic
ugguaacaaaagaccacauu

SEQ ID NO: 70238 - RNA, 21 nt, Artificial Sequence
  Synthetic
augguaacaaaagaccacauu

SEQ ID NO: 70239 - RNA, 22 nt, Artificial Sequence
  Synthetic
uaugguaacaaaagaccacauu

SEQ ID NO: 70240 - RNA, 23 nt, Artificial Sequence
  Synthetic
uuaugguaacaaaagaccacauu

SEQ ID NO: 70241 - RNA, 24 nt, Artificial Sequence
  Synthetic
cuuaugguaacaaaagaccacauu

SEQ ID NO: 70242 - RNA, 18 nt, Artificial Sequence
  Synthetic
caguccucugagcacauu

SEQ ID NO: 70243 - RNA, 19 nt, Artificial Sequence
  Synthetic
ucaguccucugagcacauu

SEQ ID NO: 70244 - RNA, 20 nt, Artificial Sequence
  Synthetic
uucaguccucugagcacauu

SEQ ID NO: 70245 - RNA, 21 nt, Artificial Sequence
  Synthetic
cuucaguccucugagcacauu

SEQ ID NO: 70246 - RNA, 24 nt, Artificial Sequence
  Synthetic
uggcuucaguccucugagcacauu

SEQ ID NO: 70247 - RNA, 20 nt, Artificial Sequence
  Synthetic
agggcuggcagaugcacauu

SEQ ID NO: 70248 - RNA, 21 nt, Artificial Sequence
  Synthetic
uagggcuggcagaugcacauu

SEQ ID NO: 70249 - RNA, 22 nt, Artificial Sequence
  Synthetic
uuagggcuggcagaugcacauu

SEQ ID NO: 70250 - RNA, 23 nt, Artificial Sequence
  Synthetic
cuuagggcuggcagaugcacauu

SEQ ID NO: 70251 - RNA, 18 nt, Artificial Sequence
  Synthetic
cuggaauauaugcacauu

SEQ ID NO: 70252 - RNA, 19 nt, Artificial Sequence
  Synthetic
ccuggaauauaugcacauu

SEQ ID NO: 70253 - RNA, 20 nt, Artificial Sequence
  Synthetic
accuggaauauaugcacauu

SEQ ID NO: 70254 - RNA, 21 nt, Artificial Sequence
  Synthetic
aaccuggaauauaugcacauu

SEQ ID NO: 70255 - RNA, 22 nt, Artificial Sequence
  Synthetic
aaaccuggaauauaugcacauu

SEQ ID NO: 70256 - RNA, 24 nt, Artificial Sequence
  Synthetic
agaaaccuggaauauaugcacauu

SEQ ID NO: 70257 - RNA, 18 nt, Artificial Sequence
  Synthetic
ucuuucucucugcacauu

SEQ ID NO: 70258 - RNA, 19 nt, Artificial Sequence
  Synthetic
uucuuucucucugcacauu

SEQ ID NO: 70259 - RNA, 20 nt, Artificial Sequence
  Synthetic
cuucuuucucucugcacauu

SEQ ID NO: 70260 - RNA, 21 nt, Artificial Sequence
  Synthetic
ucuucuuucucucugcacauu

SEQ ID NO: 70261 - RNA, 22 nt, Artificial Sequence
  Synthetic
cucuucuuucucucugcacauu

SEQ ID NO: 70262 - RNA, 23 nt, Artificial Sequence
  Synthetic
ucucuucuuucucucugcacauu

SEQ ID NO: 70263 - RNA, 24 nt, Artificial Sequence
  Synthetic
cucucuucuuucucucugcacauu

SEQ ID NO: 70264 - RNA, 18 nt, Artificial Sequence
  Synthetic
auaaacacccuucacauu

SEQ ID NO: 70265 - RNA, 19 nt, Artificial Sequence
  Synthetic
uauaaacacccuucacauu

SEQ ID NO: 70266 - RNA, 20 nt, Artificial Sequence
  Synthetic
auauaaacacccuucacauu

SEQ ID NO: 70267 - RNA, 23 nt, Artificial Sequence
  Synthetic
uggauauaaacacccuucacauu

SEQ ID NO: 70268 - RNA, 18 nt, Artificial Sequence
  Synthetic
agaaaaaagguucacauu

SEQ ID NO: 70269 - RNA, 20 nt, Artificial Sequence
  Synthetic
agagaaaaaagguucacauu

SEQ ID NO: 70270 - RNA, 21 nt, Artificial Sequence
  Synthetic
aagagaaaaaagguucacauu

SEQ ID NO: 70271 - RNA, 22 nt, Artificial Sequence
  Synthetic
uaagagaaaaaagguucacauu

SEQ ID NO: 70272 - RNA, 23 nt, Artificial Sequence
  Synthetic
auaagagaaaaaagguucacauu

SEQ ID NO: 70273 - RNA, 18 nt, Artificial Sequence
  Synthetic
caauauggcuaagacauu

SEQ ID NO: 70274 - RNA, 19 nt, Artificial Sequence
  Synthetic
ccaauauggcuaagacauu

SEQ ID NO: 70275 - RNA, 21 nt, Artificial Sequence
  Synthetic
agccaauauggcuaagacauu

SEQ ID NO: 70276 - RNA, 22 nt, Artificial Sequence
  Synthetic
aagccaauauggcuaagacauu

SEQ ID NO: 70277 - RNA, 23 nt, Artificial Sequence
  Synthetic
uaagccaauauggcuaagacauu

SEQ ID NO: 70278 - RNA, 24 nt, Artificial Sequence
  Synthetic
auaagccaauauggcuaagacauu

SEQ ID NO: 70279 - RNA, 18 nt, Artificial Sequence
  Synthetic
cagguuucaucagacauu

SEQ ID NO: 70280 - RNA, 19 nt, Artificial Sequence
  Synthetic
ucagguuucaucagacauu

SEQ ID NO: 70281 - RNA, 22 nt, Artificial Sequence
  Synthetic
cggucagguuucaucagacauu

SEQ ID NO: 70282 - RNA, 23 nt, Artificial Sequence
  Synthetic
ucggucagguuucaucagacauu

SEQ ID NO: 70283 - RNA, 22 nt, Artificial Sequence
  Synthetic
ugagagaaggaaaggagacauu

SEQ ID NO: 70284 - RNA, 23 nt, Artificial Sequence
  Synthetic
uugagagaaggaaaggagacauu

SEQ ID NO: 70285 - RNA, 24 nt, Artificial Sequence
  Synthetic
uuugagagaaggaaaggagacauu

SEQ ID NO: 70286 - RNA, 18 nt, Artificial Sequence
  Synthetic
ugcauuggaggggacauu

SEQ ID NO: 70287 - RNA, 19 nt, Artificial Sequence
  Synthetic
uugcauuggaggggacauu

SEQ ID NO: 70288 - RNA, 20 nt, Artificial Sequence
  Synthetic
cuugcauuggaggggacauu

SEQ ID NO: 70289 - RNA, 21 nt, Artificial Sequence
  Synthetic
ucuugcauuggaggggacauu

SEQ ID NO: 70290 - RNA, 22 nt, Artificial Sequence
  Synthetic
aucuugcauuggaggggacauu

SEQ ID NO: 70291 - RNA, 23 nt, Artificial Sequence
  Synthetic
aaucuugcauuggaggggacauu

SEQ ID NO: 70292 - RNA, 24 nt, Artificial Sequence
  Synthetic
caaucuugcauuggaggggacauu

SEQ ID NO: 70293 - RNA, 19 nt, Artificial Sequence
  Synthetic
agaguauacuggggacauu

SEQ ID NO: 70294 - RNA, 20 nt, Artificial Sequence
  Synthetic
cagaguauacuggggacauu

SEQ ID NO: 70295 - RNA, 21 nt, Artificial Sequence
  Synthetic
ucagaguauacuggggacauu

SEQ ID NO: 70296 - RNA, 22 nt, Artificial Sequence
  Synthetic
uucagaguauacuggggacauu

SEQ ID NO: 70297 - RNA, 24 nt, Artificial Sequence
  Synthetic
uguucagaguauacuggggacauu

SEQ ID NO: 70298 - RNA, 18 nt, Artificial Sequence
  Synthetic
aaauguguuuuugacauu

SEQ ID NO: 70299 - RNA, 19 nt, Artificial Sequence
  Synthetic
caaauguguuuuugacauu

SEQ ID NO: 70300 - RNA, 20 nt, Artificial Sequence
  Synthetic
ccaaauguguuuuugacauu

SEQ ID NO: 70301 - RNA, 23 nt, Artificial Sequence
  Synthetic
uggccaaauguguuuuugacauu

SEQ ID NO: 70302 - RNA, 24 nt, Artificial Sequence
  Synthetic
uuggccaaauguguuuuugacauu

SEQ ID NO: 70303 - RNA, 18 nt, Artificial Sequence
  Synthetic
auauaaagcauauacauu

SEQ ID NO: 70304 - RNA, 19 nt, Artificial Sequence
  Synthetic
aauauaaagcauauacauu

SEQ ID NO: 70305 - RNA, 20 nt, Artificial Sequence
  Synthetic
uaauauaaagcauauacauu

SEQ ID NO: 70306 - RNA, 22 nt, Artificial Sequence
  Synthetic
uguaauauaaagcauauacauu

SEQ ID NO: 70307 - RNA, 23 nt, Artificial Sequence
  Synthetic
auguaauauaaagcauauacauu

SEQ ID NO: 70308 - RNA, 24 nt, Artificial Sequence
  Synthetic
cauguaauauaaagcauauacauu

SEQ ID NO: 70309 - RNA, 18 nt, Artificial Sequence
  Synthetic
auugugaagcuauacauu

SEQ ID NO: 70310 - RNA, 20 nt, Artificial Sequence
  Synthetic
ugauugugaagcuauacauu

SEQ ID NO: 70311 - RNA, 22 nt, Artificial Sequence
  Synthetic
agugauugugaagcuauacauu

SEQ ID NO: 70312 - RNA, 24 nt, Artificial Sequence
  Synthetic
cgagugauugugaagcuauacauu

SEQ ID NO: 70313 - RNA, 21 nt, Artificial Sequence
  Synthetic
ucuauuuucaaaaccuacauu

SEQ ID NO: 70314 - RNA, 22 nt, Artificial Sequence
  Synthetic
uucuauuuucaaaaccuacauu

SEQ ID NO: 70315 - RNA, 24 nt, Artificial Sequence
  Synthetic
cguucuauuuucaaaaccuacauu

SEQ ID NO: 70316 - RNA, 18 nt, Artificial Sequence
  Synthetic
cugaaaggaggcuacauu

SEQ ID NO: 70317 - RNA, 20 nt, Artificial Sequence
  Synthetic
ugcugaaaggaggcuacauu

SEQ ID NO: 70318 - RNA, 21 nt, Artificial Sequence
  Synthetic
augcugaaaggaggcuacauu

SEQ ID NO: 70319 - RNA, 22 nt, Artificial Sequence
  Synthetic
uaugcugaaaggaggcuacauu

SEQ ID NO: 70320 - RNA, 23 nt, Artificial Sequence
  Synthetic
cuaugcugaaaggaggcuacauu

SEQ ID NO: 70321 - RNA, 24 nt, Artificial Sequence
  Synthetic
ccuaugcugaaaggaggcuacauu

SEQ ID NO: 70322 - RNA, 18 nt, Artificial Sequence
  Synthetic
aagaaugaaaaguacauu

SEQ ID NO: 70323 - RNA, 19 nt, Artificial Sequence
  Synthetic
uaagaaugaaaaguacauu

SEQ ID NO: 70324 - RNA, 20 nt, Artificial Sequence
  Synthetic
uuaagaaugaaaaguacauu

SEQ ID NO: 70325 - RNA, 21 nt, Artificial Sequence
  Synthetic
uuuaagaaugaaaaguacauu

SEQ ID NO: 70326 - RNA, 22 nt, Artificial Sequence
  Synthetic
auuuaagaaugaaaaguacauu

SEQ ID NO: 70327 - RNA, 23 nt, Artificial Sequence
  Synthetic
cauuuaagaaugaaaaguacauu

SEQ ID NO: 70328 - RNA, 24 nt, Artificial Sequence
  Synthetic
ucauuuaagaaugaaaaguacauu

SEQ ID NO: 70329 - RNA, 19 nt, Artificial Sequence
  Synthetic
aggcuauaagaaaaccauu

SEQ ID NO: 70330 - RNA, 21 nt, Artificial Sequence
  Synthetic
ugaggcuauaagaaaaccauu

SEQ ID NO: 70331 - RNA, 22 nt, Artificial Sequence
  Synthetic
augaggcuauaagaaaaccauu

SEQ ID NO: 70332 - RNA, 23 nt, Artificial Sequence
  Synthetic
uaugaggcuauaagaaaaccauu

SEQ ID NO: 70333 - RNA, 24 nt, Artificial Sequence
  Synthetic
cuaugaggcuauaagaaaaccauu

SEQ ID NO: 70334 - RNA, 19 nt, Artificial Sequence
  Synthetic
ugggguugggaugaccauu

SEQ ID NO: 70335 - RNA, 21 nt, Artificial Sequence
  Synthetic
ugugggguugggaugaccauu

SEQ ID NO: 70336 - RNA, 22 nt, Artificial Sequence
  Synthetic
augugggguugggaugaccauu

SEQ ID NO: 70337 - RNA, 23 nt, Artificial Sequence
  Synthetic
caugugggguugggaugaccauu

SEQ ID NO: 70338 - RNA, 24 nt, Artificial Sequence
  Synthetic
ccaugugggguugggaugaccauu

SEQ ID NO: 70339 - RNA, 18 nt, Artificial Sequence
  Synthetic
caagccucgcugaccauu

SEQ ID NO: 70340 - RNA, 19 nt, Artificial Sequence
  Synthetic
ccaagccucgcugaccauu

SEQ ID NO: 70341 - RNA, 20 nt, Artificial Sequence
  Synthetic
cccaagccucgcugaccauu

SEQ ID NO: 70342 - RNA, 21 nt, Artificial Sequence
  Synthetic
ucccaagccucgcugaccauu

SEQ ID NO: 70343 - RNA, 22 nt, Artificial Sequence
  Synthetic
aucccaagccucgcugaccauu

SEQ ID NO: 70344 - RNA, 23 nt, Artificial Sequence
  Synthetic
aaucccaagccucgcugaccauu

SEQ ID NO: 70345 - RNA, 24 nt, Artificial Sequence
  Synthetic
uaaucccaagccucgcugaccauu

SEQ ID NO: 70346 - RNA, 18 nt, Artificial Sequence
  Synthetic
cauaggaguaaagccauu

SEQ ID NO: 70347 - RNA, 19 nt, Artificial Sequence
  Synthetic
ucauaggaguaaagccauu

SEQ ID NO: 70348 - RNA, 23 nt, Artificial Sequence
  Synthetic
ugggucauaggaguaaagccauu

SEQ ID NO: 70349 - RNA, 24 nt, Artificial Sequence
  Synthetic
cugggucauaggaguaaagccauu

SEQ ID NO: 70350 - RNA, 18 nt, Artificial Sequence
  Synthetic
uuggcuuaaugagccauu

SEQ ID NO: 70351 - RNA, 20 nt, Artificial Sequence
  Synthetic
uguuggcuuaaugagccauu

SEQ ID NO: 70352 - RNA, 22 nt, Artificial Sequence
  Synthetic
uguguuggcuuaaugagccauu

SEQ ID NO: 70353 - RNA, 23 nt, Artificial Sequence
  Synthetic
auguguuggcuuaaugagccauu

SEQ ID NO: 70354 - RNA, 24 nt, Artificial Sequence
  Synthetic
aauguguuggcuuaaugagccauu

SEQ ID NO: 70355 - RNA, 18 nt, Artificial Sequence
  Synthetic
uggcaaguccuagccauu

SEQ ID NO: 70356 - RNA, 19 nt, Artificial Sequence
  Synthetic
uuggcaaguccuagccauu

SEQ ID NO: 70357 - RNA, 20 nt, Artificial Sequence
  Synthetic
auuggcaaguccuagccauu

SEQ ID NO: 70358 - RNA, 21 nt, Artificial Sequence
  Synthetic
cauuggcaaguccuagccauu

SEQ ID NO: 70359 - RNA, 22 nt, Artificial Sequence
  Synthetic
ccauuggcaaguccuagccauu

SEQ ID NO: 70360 - RNA, 23 nt, Artificial Sequence
  Synthetic
cccauuggcaaguccuagccauu

SEQ ID NO: 70361 - RNA, 24 nt, Artificial Sequence
  Synthetic
acccauuggcaaguccuagccauu

SEQ ID NO: 70362 - RNA, 18 nt, Artificial Sequence
  Synthetic
ccuucucaugaggccauu

SEQ ID NO: 70363 - RNA, 19 nt, Artificial Sequence
  Synthetic
uccuucucaugaggccauu

SEQ ID NO: 70364 - RNA, 20 nt, Artificial Sequence
  Synthetic
auccuucucaugaggccauu

SEQ ID NO: 70365 - RNA, 21 nt, Artificial Sequence
  Synthetic
cauccuucucaugaggccauu

SEQ ID NO: 70366 - RNA, 22 nt, Artificial Sequence
  Synthetic
ucauccuucucaugaggccauu

SEQ ID NO: 70367 - RNA, 23 nt, Artificial Sequence
  Synthetic
cucauccuucucaugaggccauu

SEQ ID NO: 70368 - RNA, 24 nt, Artificial Sequence
  Synthetic
ucucauccuucucaugaggccauu

SEQ ID NO: 70369 - RNA, 18 nt, Artificial Sequence
  Synthetic
caccuccaaauauccauu

SEQ ID NO: 70370 - RNA, 19 nt, Artificial Sequence
  Synthetic
ccaccuccaaauauccauu

SEQ ID NO: 70371 - RNA, 20 nt, Artificial Sequence
  Synthetic
cccaccuccaaauauccauu

SEQ ID NO: 70372 - RNA, 21 nt, Artificial Sequence
  Synthetic
ccccaccuccaaauauccauu

SEQ ID NO: 70373 - RNA, 24 nt, Artificial Sequence
  Synthetic
aggccccaccuccaaauauccauu

SEQ ID NO: 70374 - RNA, 18 nt, Artificial Sequence
  Synthetic
cauacccaccacuccauu

SEQ ID NO: 70375 - RNA, 19 nt, Artificial Sequence
  Synthetic
ccauacccaccacuccauu

SEQ ID NO: 70376 - RNA, 20 nt, Artificial Sequence
  Synthetic
cccauacccaccacuccauu

SEQ ID NO: 70377 - RNA, 21 nt, Artificial Sequence
  Synthetic
ccccauacccaccacuccauu

SEQ ID NO: 70378 - RNA, 22 nt, Artificial Sequence
  Synthetic
cccccauacccaccacuccauu

SEQ ID NO: 70379 - RNA, 23 nt, Artificial Sequence
  Synthetic
acccccauacccaccacuccauu

SEQ ID NO: 70380 - RNA, 24 nt, Artificial Sequence
  Synthetic
cacccccauacccaccacuccauu

SEQ ID NO: 70381 - RNA, 18 nt, Artificial Sequence
  Synthetic
aucuucaaugaguccauu

SEQ ID NO: 70382 - RNA, 19 nt, Artificial Sequence
  Synthetic
uaucuucaaugaguccauu

SEQ ID NO: 70383 - RNA, 21 nt, Artificial Sequence
  Synthetic
aguaucuucaaugaguccauu

SEQ ID NO: 70384 - RNA, 22 nt, Artificial Sequence
  Synthetic
uaguaucuucaaugaguccauu

SEQ ID NO: 70385 - RNA, 23 nt, Artificial Sequence
  Synthetic
uuaguaucuucaaugaguccauu

SEQ ID NO: 70386 - RNA, 24 nt, Artificial Sequence
  Synthetic
uuuaguaucuucaaugaguccauu

SEQ ID NO: 70387 - RNA, 18 nt, Artificial Sequence
  Synthetic
aauuagcagcauuccauu

SEQ ID NO: 70388 - RNA, 20 nt, Artificial Sequence
  Synthetic
agaauuagcagcauuccauu

SEQ ID NO: 70389 - RNA, 21 nt, Artificial Sequence
  Synthetic
cagaauuagcagcauuccauu

SEQ ID NO: 70390 - RNA, 22 nt, Artificial Sequence
  Synthetic
ccagaauuagcagcauuccauu

SEQ ID NO: 70391 - RNA, 23 nt, Artificial Sequence
  Synthetic
uccagaauuagcagcauuccauu

SEQ ID NO: 70392 - RNA, 24 nt, Artificial Sequence
  Synthetic
uuccagaauuagcagcauuccauu

SEQ ID NO: 70393 - RNA, 19 nt, Artificial Sequence
  Synthetic
aguguggcacauuuccauu

SEQ ID NO: 70394 - RNA, 20 nt, Artificial Sequence
  Synthetic
aaguguggcacauuuccauu

SEQ ID NO: 70395 - RNA, 21 nt, Artificial Sequence
  Synthetic
uaaguguggcacauuuccauu

SEQ ID NO: 70396 - RNA, 22 nt, Artificial Sequence
  Synthetic
cuaaguguggcacauuuccauu

SEQ ID NO: 70397 - RNA, 23 nt, Artificial Sequence
  Synthetic
ccuaaguguggcacauuuccauu

SEQ ID NO: 70398 - RNA, 18 nt, Artificial Sequence
  Synthetic
ccaauuuccauuuccauu

SEQ ID NO: 70399 - RNA, 19 nt, Artificial Sequence
  Synthetic
accaauuuccauuuccauu

SEQ ID NO: 70400 - RNA, 20 nt, Artificial Sequence
  Synthetic
caccaauuuccauuuccauu

SEQ ID NO: 70401 - RNA, 21 nt, Artificial Sequence
  Synthetic
ucaccaauuuccauuuccauu

SEQ ID NO: 70402 - RNA, 22 nt, Artificial Sequence
  Synthetic
cucaccaauuuccauuuccauu

SEQ ID NO: 70403 - RNA, 23 nt, Artificial Sequence
  Synthetic
acucaccaauuuccauuuccauu

SEQ ID NO: 70404 - RNA, 24 nt, Artificial Sequence
  Synthetic
uacucaccaauuuccauuuccauu

SEQ ID NO: 70405 - RNA, 18 nt, Artificial Sequence
  Synthetic
uuagguuaucuuuccauu

SEQ ID NO: 70406 - RNA, 19 nt, Artificial Sequence
  Synthetic
cuuagguuaucuuuccauu

SEQ ID NO: 70407 - RNA, 20 nt, Artificial Sequence
  Synthetic
ccuuagguuaucuuuccauu

SEQ ID NO: 70408 - RNA, 21 nt, Artificial Sequence
  Synthetic
accuuagguuaucuuuccauu

SEQ ID NO: 70409 - RNA, 22 nt, Artificial Sequence
  Synthetic
uaccuuagguuaucuuuccauu

SEQ ID NO: 70410 - RNA, 24 nt, Artificial Sequence
  Synthetic
uguaccuuagguuaucuuuccauu

SEQ ID NO: 70411 - RNA, 18 nt, Artificial Sequence
  Synthetic
ucuucauugguuuccauu

SEQ ID NO: 70412 - RNA, 19 nt, Artificial Sequence
  Synthetic
uucuucauugguuuccauu

SEQ ID NO: 70413 - RNA, 20 nt, Artificial Sequence
  Synthetic
uuucuucauugguuuccauu

SEQ ID NO: 70414 - RNA, 21 nt, Artificial Sequence
  Synthetic
uuuucuucauugguuuccauu

SEQ ID NO: 70415 - RNA, 24 nt, Artificial Sequence
  Synthetic
agguuuucuucauugguuuccauu

SEQ ID NO: 70416 - RNA, 18 nt, Artificial Sequence
  Synthetic
ucaccucucaauagcauu

SEQ ID NO: 70417 - RNA, 19 nt, Artificial Sequence
  Synthetic
cucaccucucaauagcauu

SEQ ID NO: 70418 - RNA, 20 nt, Artificial Sequence
  Synthetic
ccucaccucucaauagcauu

SEQ ID NO: 70419 - RNA, 18 nt, Artificial Sequence
  Synthetic
ccuuagucggcucgcauu

SEQ ID NO: 70420 - RNA, 20 nt, Artificial Sequence
  Synthetic
ugccuuagucggcucgcauu

SEQ ID NO: 70421 - RNA, 21 nt, Artificial Sequence
  Synthetic
uugccuuagucggcucgcauu

SEQ ID NO: 70422 - RNA, 23 nt, Artificial Sequence
  Synthetic
aguugccuuagucggcucgcauu

SEQ ID NO: 70423 - RNA, 24 nt, Artificial Sequence
  Synthetic
aaguugccuuagucggcucgcauu

SEQ ID NO: 70424 - RNA, 20 nt, Artificial Sequence
  Synthetic
aggcuaaauggccaggcauu

SEQ ID NO: 70425 - RNA, 21 nt, Artificial Sequence
  Synthetic
aaggcuaaauggccaggcauu

SEQ ID NO: 70426 - RNA, 22 nt, Artificial Sequence
  Synthetic
aaaggcuaaauggccaggcauu

SEQ ID NO: 70427 - RNA, 23 nt, Artificial Sequence
  Synthetic
uaaaggcuaaauggccaggcauu

SEQ ID NO: 70428 - RNA, 24 nt, Artificial Sequence
  Synthetic
uuaaaggcuaaauggccaggcauu

SEQ ID NO: 70429 - RNA, 18 nt, Artificial Sequence
  Synthetic
aucuacagaggaggcauu

SEQ ID NO: 70430 - RNA, 19 nt, Artificial Sequence
  Synthetic
aaucuacagaggaggcauu

SEQ ID NO: 70431 - RNA, 20 nt, Artificial Sequence
  Synthetic
caaucuacagaggaggcauu

SEQ ID NO: 70432 - RNA, 21 nt, Artificial Sequence
  Synthetic
ccaaucuacagaggaggcauu

SEQ ID NO: 70433 - RNA, 22 nt, Artificial Sequence
  Synthetic
cccaaucuacagaggaggcauu

SEQ ID NO: 70434 - RNA, 23 nt, Artificial Sequence
  Synthetic
ccccaaucuacagaggaggcauu

SEQ ID NO: 70435 - RNA, 24 nt, Artificial Sequence
  Synthetic
uccccaaucuacagaggaggcauu

SEQ ID NO: 70436 - RNA, 18 nt, Artificial Sequence
  Synthetic
uggcaaaucuggggcauu

SEQ ID NO: 70437 - RNA, 20 nt, Artificial Sequence
  Synthetic
aguggcaaaucuggggcauu

SEQ ID NO: 70438 - RNA, 21 nt, Artificial Sequence
  Synthetic
caguggcaaaucuggggcauu

SEQ ID NO: 70439 - RNA, 22 nt, Artificial Sequence
  Synthetic
acaguggcaaaucuggggcauu

SEQ ID NO: 70440 - RNA, 23 nt, Artificial Sequence
  Synthetic
aacaguggcaaaucuggggcauu

SEQ ID NO: 70441 - RNA, 24 nt, Artificial Sequence
  Synthetic
caacaguggcaaaucuggggcauu

SEQ ID NO: 70442 - RNA, 18 nt, Artificial Sequence
  Synthetic
auuugccuaaaaugcauu

SEQ ID NO: 70443 - RNA, 19 nt, Artificial Sequence
  Synthetic
uauuugccuaaaaugcauu

SEQ ID NO: 70444 - RNA, 20 nt, Artificial Sequence
  Synthetic
auauuugccuaaaaugcauu

SEQ ID NO: 70445 - RNA, 21 nt, Artificial Sequence
  Synthetic
aauauuugccuaaaaugcauu

SEQ ID NO: 70446 - RNA, 23 nt, Artificial Sequence
  Synthetic
agaauauuugccuaaaaugcauu

SEQ ID NO: 70447 - RNA, 24 nt, Artificial Sequence
  Synthetic
cagaauauuugccuaaaaugcauu

SEQ ID NO: 70448 - RNA, 18 nt, Artificial Sequence
  Synthetic
auauuuacaucaugcauu

SEQ ID NO: 70449 - RNA, 19 nt, Artificial Sequence
  Synthetic
aauauuuacaucaugcauu

SEQ ID NO: 70450 - RNA, 20 nt, Artificial Sequence
  Synthetic
aaauauuuacaucaugcauu

SEQ ID NO: 70451 - RNA, 21 nt, Artificial Sequence
  Synthetic
uaaauauuuacaucaugcauu

SEQ ID NO: 70452 - RNA, 23 nt, Artificial Sequence
  Synthetic
aguaaauauuuacaucaugcauu

SEQ ID NO: 70453 - RNA, 24 nt, Artificial Sequence
  Synthetic
uaguaaauauuuacaucaugcauu

SEQ ID NO: 70454 - RNA, 19 nt, Artificial Sequence
  Synthetic
agggaucaugcuaugcauu

SEQ ID NO: 70455 - RNA, 20 nt, Artificial Sequence
  Synthetic
cagggaucaugcuaugcauu

SEQ ID NO: 70456 - RNA, 21 nt, Artificial Sequence
  Synthetic
ucagggaucaugcuaugcauu

SEQ ID NO: 70457 - RNA, 23 nt, Artificial Sequence
  Synthetic
ugucagggaucaugcuaugcauu

SEQ ID NO: 70458 - RNA, 24 nt, Artificial Sequence
  Synthetic
augucagggaucaugcuaugcauu

SEQ ID NO: 70459 - RNA, 18 nt, Artificial Sequence
  Synthetic
cacugauaaaccugcauu

SEQ ID NO: 70460 - RNA, 21 nt, Artificial Sequence
  Synthetic
uggcacugauaaaccugcauu

SEQ ID NO: 70461 - RNA, 23 nt, Artificial Sequence
  Synthetic
aguggcacugauaaaccugcauu

SEQ ID NO: 70462 - RNA, 24 nt, Artificial Sequence
  Synthetic
uaguggcacugauaaaccugcauu

SEQ ID NO: 70463 - RNA, 18 nt, Artificial Sequence
  Synthetic
cagauacacuucugcauu

SEQ ID NO: 70464 - RNA, 20 nt, Artificial Sequence
  Synthetic
cgcagauacacuucugcauu

SEQ ID NO: 70465 - RNA, 21 nt, Artificial Sequence
  Synthetic
ccgcagauacacuucugcauu

SEQ ID NO: 70466 - RNA, 22 nt, Artificial Sequence
  Synthetic
uccgcagauacacuucugcauu

SEQ ID NO: 70467 - RNA, 23 nt, Artificial Sequence
  Synthetic
cuccgcagauacacuucugcauu

SEQ ID NO: 70468 - RNA, 24 nt, Artificial Sequence
  Synthetic
ucuccgcagauacacuucugcauu

SEQ ID NO: 70469 - RNA, 19 nt, Artificial Sequence
  Synthetic
uguggaagcacauugcauu

SEQ ID NO: 70470 - RNA, 20 nt, Artificial Sequence
  Synthetic
uuguggaagcacauugcauu

SEQ ID NO: 70471 - RNA, 21 nt, Artificial Sequence
  Synthetic
auuguggaagcacauugcauu

SEQ ID NO: 70472 - RNA, 23 nt, Artificial Sequence
  Synthetic
agauuguggaagcacauugcauu

SEQ ID NO: 70473 - RNA, 18 nt, Artificial Sequence
  Synthetic
auggaagcaccuugcauu

SEQ ID NO: 70474 - RNA, 20 nt, Artificial Sequence
  Synthetic
ugauggaagcaccuugcauu

SEQ ID NO: 70475 - RNA, 21 nt, Artificial Sequence
  Synthetic
augauggaagcaccuugcauu

SEQ ID NO: 70476 - RNA, 23 nt, Artificial Sequence
  Synthetic
agaugauggaagcaccuugcauu

SEQ ID NO: 70477 - RNA, 18 nt, Artificial Sequence
  Synthetic
aauauaaauucuugcauu

SEQ ID NO: 70478 - RNA, 19 nt, Artificial Sequence
  Synthetic
uaauauaaauucuugcauu

SEQ ID NO: 70479 - RNA, 20 nt, Artificial Sequence
  Synthetic
auaauauaaauucuugcauu

SEQ ID NO: 70480 - RNA, 21 nt, Artificial Sequence
  Synthetic
aauaauauaaauucuugcauu

SEQ ID NO: 70481 - RNA, 22 nt, Artificial Sequence
  Synthetic
uaauaauauaaauucuugcauu

SEQ ID NO: 70482 - RNA, 23 nt, Artificial Sequence
  Synthetic
uuaauaauauaaauucuugcauu

SEQ ID NO: 70483 - RNA, 24 nt, Artificial Sequence
  Synthetic
auuaauaauauaaauucuugcauu

SEQ ID NO: 70484 - RNA, 18 nt, Artificial Sequence
  Synthetic
uucaaagggcuuugcauu

SEQ ID NO: 70485 - RNA, 19 nt, Artificial Sequence
  Synthetic
uuucaaagggcuuugcauu

SEQ ID NO: 70486 - RNA, 20 nt, Artificial Sequence
  Synthetic
cuuucaaagggcuuugcauu

SEQ ID NO: 70487 - RNA, 21 nt, Artificial Sequence
  Synthetic
acuuucaaagggcuuugcauu

SEQ ID NO: 70488 - RNA, 22 nt, Artificial Sequence
  Synthetic
aacuuucaaagggcuuugcauu

SEQ ID NO: 70489 - RNA, 23 nt, Artificial Sequence
  Synthetic
caacuuucaaagggcuuugcauu

SEQ ID NO: 70490 - RNA, 24 nt, Artificial Sequence
  Synthetic
ccaacuuucaaagggcuuugcauu

SEQ ID NO: 70491 - RNA, 18 nt, Artificial Sequence
  Synthetic
cgcauuauacaaaucauu

SEQ ID NO: 70492 - RNA, 19 nt, Artificial Sequence
  Synthetic
ucgcauuauacaaaucauu

SEQ ID NO: 70493 - RNA, 20 nt, Artificial Sequence
  Synthetic
uucgcauuauacaaaucauu

SEQ ID NO: 70494 - RNA, 21 nt, Artificial Sequence
  Synthetic
auucgcauuauacaaaucauu

SEQ ID NO: 70495 - RNA, 22 nt, Artificial Sequence
  Synthetic
aauucgcauuauacaaaucauu

SEQ ID NO: 70496 - RNA, 23 nt, Artificial Sequence
  Synthetic
aaauucgcauuauacaaaucauu

SEQ ID NO: 70497 - RNA, 24 nt, Artificial Sequence
  Synthetic
aaaauucgcauuauacaaaucauu

SEQ ID NO: 70498 - RNA, 21 nt, Artificial Sequence
  Synthetic
aaaacaaaauaucaaaucauu

SEQ ID NO: 70499 - RNA, 22 nt, Artificial Sequence
  Synthetic
aaaaacaaaauaucaaaucauu

SEQ ID NO: 70500 - RNA, 23 nt, Artificial Sequence
  Synthetic
caaaaacaaaauaucaaaucauu

SEQ ID NO: 70501 - RNA, 24 nt, Artificial Sequence
  Synthetic
ccaaaaacaaaauaucaaaucauu

SEQ ID NO: 70502 - RNA, 21 nt, Artificial Sequence
  Synthetic
uuuacauauuuauaaaucauu

SEQ ID NO: 70503 - RNA, 22 nt, Artificial Sequence
  Synthetic
uuuuacauauuuauaaaucauu

SEQ ID NO: 70504 - RNA, 23 nt, Artificial Sequence
  Synthetic
cuuuuacauauuuauaaaucauu

SEQ ID NO: 70505 - RNA, 19 nt, Artificial Sequence
  Synthetic
agaggcuagaacaaucauu

SEQ ID NO: 70506 - RNA, 20 nt, Artificial Sequence
  Synthetic
aagaggcuagaacaaucauu

SEQ ID NO: 70507 - RNA, 21 nt, Artificial Sequence
  Synthetic
caagaggcuagaacaaucauu

SEQ ID NO: 70508 - RNA, 22 nt, Artificial Sequence
  Synthetic
ucaagaggcuagaacaaucauu

SEQ ID NO: 70509 - RNA, 23 nt, Artificial Sequence
  Synthetic
aucaagaggcuagaacaaucauu

SEQ ID NO: 70510 - RNA, 24 nt, Artificial Sequence
  Synthetic
aaucaagaggcuagaacaaucauu

SEQ ID NO: 70511 - RNA, 18 nt, Artificial Sequence
  Synthetic
aucaguugacuaaucauu

SEQ ID NO: 70512 - RNA, 19 nt, Artificial Sequence
  Synthetic
aaucaguugacuaaucauu

SEQ ID NO: 70513 - RNA, 20 nt, Artificial Sequence
  Synthetic
aaaucaguugacuaaucauu

SEQ ID NO: 70514 - RNA, 21 nt, Artificial Sequence
  Synthetic
caaaucaguugacuaaucauu

SEQ ID NO: 70515 - RNA, 23 nt, Artificial Sequence
  Synthetic
agcaaaucaguugacuaaucauu

SEQ ID NO: 70516 - RNA, 24 nt, Artificial Sequence
  Synthetic
aagcaaaucaguugacuaaucauu

SEQ ID NO: 70517 - RNA, 18 nt, Artificial Sequence
  Synthetic
acauguccagacaucauu

SEQ ID NO: 70518 - RNA, 20 nt, Artificial Sequence
  Synthetic
agacauguccagacaucauu

SEQ ID NO: 70519 - RNA, 21 nt, Artificial Sequence
  Synthetic
cagacauguccagacaucauu

SEQ ID NO: 70520 - RNA, 22 nt, Artificial Sequence
  Synthetic
ucagacauguccagacaucauu

SEQ ID NO: 70521 - RNA, 23 nt, Artificial Sequence
  Synthetic
uucagacauguccagacaucauu

SEQ ID NO: 70522 - RNA, 24 nt, Artificial Sequence
  Synthetic
auucagacauguccagacaucauu

SEQ ID NO: 70523 - RNA, 18 nt, Artificial Sequence
  Synthetic
aacaugauuuucaucauu

SEQ ID NO: 70524 - RNA, 19 nt, Artificial Sequence
  Synthetic
caacaugauuuucaucauu

SEQ ID NO: 70525 - RNA, 20 nt, Artificial Sequence
  Synthetic
ucaacaugauuuucaucauu

SEQ ID NO: 70526 - RNA, 22 nt, Artificial Sequence
  Synthetic
ugucaacaugauuuucaucauu

SEQ ID NO: 70527 - RNA, 23 nt, Artificial Sequence
  Synthetic
augucaacaugauuuucaucauu

SEQ ID NO: 70528 - RNA, 24 nt, Artificial Sequence
  Synthetic
aaugucaacaugauuuucaucauu

SEQ ID NO: 70529 - RNA, 19 nt, Artificial Sequence
  Synthetic
cgugagguaguauaucauu

SEQ ID NO: 70530 - RNA, 20 nt, Artificial Sequence
  Synthetic
ccgugagguaguauaucauu

SEQ ID NO: 70531 - RNA, 21 nt, Artificial Sequence
  Synthetic
uccgugagguaguauaucauu

SEQ ID NO: 70532 - RNA, 22 nt, Artificial Sequence
  Synthetic
auccgugagguaguauaucauu

SEQ ID NO: 70533 - RNA, 23 nt, Artificial Sequence
  Synthetic
aauccgugagguaguauaucauu

SEQ ID NO: 70534 - RNA, 24 nt, Artificial Sequence
  Synthetic
uaauccgugagguaguauaucauu

SEQ ID NO: 70535 - RNA, 18 nt, Artificial Sequence
  Synthetic
aaucaaaaagguaucauu

SEQ ID NO: 70536 - RNA, 19 nt, Artificial Sequence
  Synthetic
uaaucaaaaagguaucauu

SEQ ID NO: 70537 - RNA, 21 nt, Artificial Sequence
  Synthetic
aguaaucaaaaagguaucauu

SEQ ID NO: 70538 - RNA, 22 nt, Artificial Sequence
  Synthetic
caguaaucaaaaagguaucauu

SEQ ID NO: 70539 - RNA, 23 nt, Artificial Sequence
  Synthetic
ucaguaaucaaaaagguaucauu

SEQ ID NO: 70540 - RNA, 24 nt, Artificial Sequence
  Synthetic
aucaguaaucaaaaagguaucauu

SEQ ID NO: 70541 - RNA, 18 nt, Artificial Sequence
  Synthetic
aucagcaguaaacucauu

SEQ ID NO: 70542 - RNA, 19 nt, Artificial Sequence
  Synthetic
uaucagcaguaaacucauu

SEQ ID NO: 70543 - RNA, 20 nt, Artificial Sequence
  Synthetic
auaucagcaguaaacucauu

SEQ ID NO: 70544 - RNA, 22 nt, Artificial Sequence
  Synthetic
agauaucagcaguaaacucauu

SEQ ID NO: 70545 - RNA, 23 nt, Artificial Sequence
  Synthetic
uagauaucagcaguaaacucauu

SEQ ID NO: 70546 - RNA, 19 nt, Artificial Sequence
  Synthetic
ugaauaaaaaucacucauu

SEQ ID NO: 70547 - RNA, 20 nt, Artificial Sequence
  Synthetic
uugaauaaaaaucacucauu

SEQ ID NO: 70548 - RNA, 21 nt, Artificial Sequence
  Synthetic
auugaauaaaaaucacucauu

SEQ ID NO: 70549 - RNA, 22 nt, Artificial Sequence
  Synthetic
cauugaauaaaaaucacucauu

SEQ ID NO: 70550 - RNA, 24 nt, Artificial Sequence
  Synthetic
cgcauugaauaaaaaucacucauu

SEQ ID NO: 70551 - RNA, 18 nt, Artificial Sequence
  Synthetic
aaggguacuauucucauu

SEQ ID NO: 70552 - RNA, 19 nt, Artificial Sequence
  Synthetic
uaaggguacuauucucauu

SEQ ID NO: 70553 - RNA, 21 nt, Artificial Sequence
  Synthetic
uguaaggguacuauucucauu

SEQ ID NO: 70554 - RNA, 22 nt, Artificial Sequence
  Synthetic
uuguaaggguacuauucucauu

SEQ ID NO: 70555 - RNA, 23 nt, Artificial Sequence
  Synthetic
uuuguaaggguacuauucucauu

SEQ ID NO: 70556 - RNA, 24 nt, Artificial Sequence
  Synthetic
uuuuguaaggguacuauucucauu

SEQ ID NO: 70557 - RNA, 18 nt, Artificial Sequence
  Synthetic
caaagacauacagucauu

SEQ ID NO: 70558 - RNA, 20 nt, Artificial Sequence
  Synthetic
agcaaagacauacagucauu

SEQ ID NO: 70559 - RNA, 21 nt, Artificial Sequence
  Synthetic
uagcaaagacauacagucauu

SEQ ID NO: 70560 - RNA, 22 nt, Artificial Sequence
  Synthetic
cuagcaaagacauacagucauu

SEQ ID NO: 70561 - RNA, 23 nt, Artificial Sequence
  Synthetic
ucuagcaaagacauacagucauu

SEQ ID NO: 70562 - RNA, 24 nt, Artificial Sequence
  Synthetic
cucuagcaaagacauacagucauu

SEQ ID NO: 70563 - RNA, 19 nt, Artificial Sequence
  Synthetic
uguuuauuuugcugucauu

SEQ ID NO: 70564 - RNA, 20 nt, Artificial Sequence
  Synthetic
cuguuuauuuugcugucauu

SEQ ID NO: 70565 - RNA, 21 nt, Artificial Sequence
  Synthetic
ucuguuuauuuugcugucauu

SEQ ID NO: 70566 - RNA, 22 nt, Artificial Sequence
  Synthetic
aucuguuuauuuugcugucauu

SEQ ID NO: 70567 - RNA, 23 nt, Artificial Sequence
  Synthetic
caucuguuuauuuugcugucauu

SEQ ID NO: 70568 - RNA, 21 nt, Artificial Sequence
  Synthetic
auccauguguuaagauucauu

SEQ ID NO: 70569 - RNA, 22 nt, Artificial Sequence
  Synthetic
cauccauguguuaagauucauu

SEQ ID NO: 70570 - RNA, 23 nt, Artificial Sequence
  Synthetic
ucauccauguguuaagauucauu

SEQ ID NO: 70571 - RNA, 24 nt, Artificial Sequence
  Synthetic
uucauccauguguuaagauucauu

SEQ ID NO: 70572 - RNA, 18 nt, Artificial Sequence
  Synthetic
cgacagaaaauguucauu

SEQ ID NO: 70573 - RNA, 19 nt, Artificial Sequence
  Synthetic
ccgacagaaaauguucauu

SEQ ID NO: 70574 - RNA, 20 nt, Artificial Sequence
  Synthetic
cccgacagaaaauguucauu

SEQ ID NO: 70575 - RNA, 22 nt, Artificial Sequence
  Synthetic
agcccgacagaaaauguucauu

SEQ ID NO: 70576 - RNA, 23 nt, Artificial Sequence
  Synthetic
uagcccgacagaaaauguucauu

SEQ ID NO: 70577 - RNA, 18 nt, Artificial Sequence
  Synthetic
uguucuauaauguucauu

SEQ ID NO: 70578 - RNA, 19 nt, Artificial Sequence
  Synthetic
auguucuauaauguucauu

SEQ ID NO: 70579 - RNA, 20 nt, Artificial Sequence
  Synthetic
aauguucuauaauguucauu

SEQ ID NO: 70580 - RNA, 18 nt, Artificial Sequence
  Synthetic
ucuuuacuccauuucauu

SEQ ID NO: 70581 - RNA, 20 nt, Artificial Sequence
  Synthetic
agucuuuacuccauuucauu

SEQ ID NO: 70582 - RNA, 21 nt, Artificial Sequence
  Synthetic
aagucuuuacuccauuucauu

SEQ ID NO: 70583 - RNA, 22 nt, Artificial Sequence
  Synthetic
uaagucuuuacuccauuucauu

SEQ ID NO: 70584 - RNA, 23 nt, Artificial Sequence
  Synthetic
uuaagucuuuacuccauuucauu

SEQ ID NO: 70585 - RNA, 24 nt, Artificial Sequence
  Synthetic
uuuaagucuuuacuccauuucauu

SEQ ID NO: 70586 - RNA, 20 nt, Artificial Sequence
  Synthetic
aggugagguuggauuucauu

SEQ ID NO: 70587 - RNA, 21 nt, Artificial Sequence
  Synthetic
aaggugagguuggauuucauu

SEQ ID NO: 70588 - RNA, 22 nt, Artificial Sequence
  Synthetic
aaaggugagguuggauuucauu

SEQ ID NO: 70589 - RNA, 24 nt, Artificial Sequence
  Synthetic
agaaaggugagguuggauuucauu

SEQ ID NO: 70590 - RNA, 18 nt, Artificial Sequence
  Synthetic
aacuaggaaggaaagauu

SEQ ID NO: 70591 - RNA, 19 nt, Artificial Sequence
  Synthetic
aaacuaggaaggaaagauu

SEQ ID NO: 70592 - RNA, 20 nt, Artificial Sequence
  Synthetic
uaaacuaggaaggaaagauu

SEQ ID NO: 70593 - RNA, 21 nt, Artificial Sequence
  Synthetic
auaaacuaggaaggaaagauu

SEQ ID NO: 70594 - RNA, 22 nt, Artificial Sequence
  Synthetic
aauaaacuaggaaggaaagauu

SEQ ID NO: 70595 - RNA, 23 nt, Artificial Sequence
  Synthetic
aaauaaacuaggaaggaaagauu

SEQ ID NO: 70596 - RNA, 24 nt, Artificial Sequence
  Synthetic
caaauaaacuaggaaggaaagauu

SEQ ID NO: 70597 - RNA, 18 nt, Artificial Sequence
  Synthetic
uaucaaaaccugaagauu

SEQ ID NO: 70598 - RNA, 19 nt, Artificial Sequence
  Synthetic
cuaucaaaaccugaagauu

SEQ ID NO: 70599 - RNA, 20 nt, Artificial Sequence
  Synthetic
acuaucaaaaccugaagauu

SEQ ID NO: 70600 - RNA, 21 nt, Artificial Sequence
  Synthetic
aacuaucaaaaccugaagauu

SEQ ID NO: 70601 - RNA, 22 nt, Artificial Sequence
  Synthetic
aaacuaucaaaaccugaagauu

SEQ ID NO: 70602 - RNA, 23 nt, Artificial Sequence
  Synthetic
aaaacuaucaaaaccugaagauu

SEQ ID NO: 70603 - RNA, 24 nt, Artificial Sequence
  Synthetic
caaaacuaucaaaaccugaagauu

SEQ ID NO: 70604 - RNA, 18 nt, Artificial Sequence
  Synthetic
uuaugcuauuguaagauu

SEQ ID NO: 70605 - RNA, 19 nt, Artificial Sequence
  Synthetic
uuuaugcuauuguaagauu

SEQ ID NO: 70606 - RNA, 20 nt, Artificial Sequence
  Synthetic
uuuuaugcuauuguaagauu

SEQ ID NO: 70607 - RNA, 21 nt, Artificial Sequence
  Synthetic
auuuuaugcuauuguaagauu

SEQ ID NO: 70608 - RNA, 24 nt, Artificial Sequence
  Synthetic
aggauuuuaugcuauuguaagauu

SEQ ID NO: 70609 - RNA, 18 nt, Artificial Sequence
  Synthetic
uuacucaguuguaagauu

SEQ ID NO: 70610 - RNA, 19 nt, Artificial Sequence
  Synthetic
cuuacucaguuguaagauu

SEQ ID NO: 70611 - RNA, 20 nt, Artificial Sequence
  Synthetic
ccuuacucaguuguaagauu

SEQ ID NO: 70612 - RNA, 18 nt, Artificial Sequence
  Synthetic
cuuugccuaucccagauu

SEQ ID NO: 70613 - RNA, 19 nt, Artificial Sequence
  Synthetic
acuuugccuaucccagauu

SEQ ID NO: 70614 - RNA, 22 nt, Artificial Sequence
  Synthetic
uggacuuugccuaucccagauu

SEQ ID NO: 70615 - RNA, 23 nt, Artificial Sequence
  Synthetic
uuggacuuugccuaucccagauu

SEQ ID NO: 70616 - RNA, 24 nt, Artificial Sequence
  Synthetic
cuuggacuuugccuaucccagauu

SEQ ID NO: 70617 - RNA, 18 nt, Artificial Sequence
  Synthetic
cugagguaaaugcagauu

SEQ ID NO: 70618 - RNA, 19 nt, Artificial Sequence
  Synthetic
ucugagguaaaugcagauu

SEQ ID NO: 70619 - RNA, 20 nt, Artificial Sequence
  Synthetic
aucugagguaaaugcagauu

SEQ ID NO: 70620 - RNA, 21 nt, Artificial Sequence
  Synthetic
aaucugagguaaaugcagauu

SEQ ID NO: 70621 - RNA, 22 nt, Artificial Sequence
  Synthetic
aaaucugagguaaaugcagauu

SEQ ID NO: 70622 - RNA, 23 nt, Artificial Sequence
  Synthetic
uaaaucugagguaaaugcagauu

SEQ ID NO: 70623 - RNA, 21 nt, Artificial Sequence
  Synthetic
aucaaaauucauuuucagauu

SEQ ID NO: 70624 - RNA, 23 nt, Artificial Sequence
  Synthetic
ugaucaaaauucauuuucagauu

SEQ ID NO: 70625 - RNA, 24 nt, Artificial Sequence
  Synthetic
cugaucaaaauucauuuucagauu

SEQ ID NO: 70626 - RNA, 18 nt, Artificial Sequence
  Synthetic
caaaugcaguaggagauu

SEQ ID NO: 70627 - RNA, 19 nt, Artificial Sequence
  Synthetic
ccaaaugcaguaggagauu

SEQ ID NO: 70628 - RNA, 20 nt, Artificial Sequence
  Synthetic
accaaaugcaguaggagauu

SEQ ID NO: 70629 - RNA, 23 nt, Artificial Sequence
  Synthetic
aggaccaaaugcaguaggagauu

SEQ ID NO: 70630 - RNA, 24 nt, Artificial Sequence
  Synthetic
aaggaccaaaugcaguaggagauu

SEQ ID NO: 70631 - RNA, 18 nt, Artificial Sequence
  Synthetic
cccuaauuacaugagauu

SEQ ID NO: 70632 - RNA, 19 nt, Artificial Sequence
  Synthetic
acccuaauuacaugagauu

SEQ ID NO: 70633 - RNA, 20 nt, Artificial Sequence
  Synthetic
cacccuaauuacaugagauu

SEQ ID NO: 70634 - RNA, 21 nt, Artificial Sequence
  Synthetic
ucacccuaauuacaugagauu

SEQ ID NO: 70635 - RNA, 22 nt, Artificial Sequence
  Synthetic
aucacccuaauuacaugagauu

SEQ ID NO: 70636 - RNA, 19 nt, Artificial Sequence
  Synthetic
aggcauuaaugaugagauu

SEQ ID NO: 70637 - RNA, 20 nt, Artificial Sequence
  Synthetic
caggcauuaaugaugagauu

SEQ ID NO: 70638 - RNA, 22 nt, Artificial Sequence
  Synthetic
ugcaggcauuaaugaugagauu

SEQ ID NO: 70639 - RNA, 23 nt, Artificial Sequence
  Synthetic
cugcaggcauuaaugaugagauu

SEQ ID NO: 70640 - RNA, 24 nt, Artificial Sequence
  Synthetic
acugcaggcauuaaugaugagauu

SEQ ID NO: 70641 - RNA, 20 nt, Artificial Sequence
  Synthetic
aggagcuguagcuugagauu

SEQ ID NO: 70642 - RNA, 21 nt, Artificial Sequence
  Synthetic
caggagcuguagcuugagauu

SEQ ID NO: 70643 - RNA, 22 nt, Artificial Sequence
  Synthetic
acaggagcuguagcuugagauu

SEQ ID NO: 70644 - RNA, 24 nt, Artificial Sequence
  Synthetic
ugacaggagcuguagcuugagauu

SEQ ID NO: 70645 - RNA, 18 nt, Artificial Sequence
  Synthetic
uuacaaaugccauagauu

SEQ ID NO: 70646 - RNA, 20 nt, Artificial Sequence
  Synthetic
aguuacaaaugccauagauu

SEQ ID NO: 70647 - RNA, 21 nt, Artificial Sequence
  Synthetic
aaguuacaaaugccauagauu

SEQ ID NO: 70648 - RNA, 22 nt, Artificial Sequence
  Synthetic
uaaguuacaaaugccauagauu

SEQ ID NO: 70649 - RNA, 24 nt, Artificial Sequence
  Synthetic
uguaaguuacaaaugccauagauu

SEQ ID NO: 70650 - RNA, 18 nt, Artificial Sequence
  Synthetic
ucauaaucagccuagauu

SEQ ID NO: 70651 - RNA, 20 nt, Artificial Sequence
  Synthetic
ugucauaaucagccuagauu

SEQ ID NO: 70652 - RNA, 21 nt, Artificial Sequence
  Synthetic
augucauaaucagccuagauu

SEQ ID NO: 70653 - RNA, 22 nt, Artificial Sequence
  Synthetic
uaugucauaaucagccuagauu

SEQ ID NO: 70654 - RNA, 23 nt, Artificial Sequence
  Synthetic
cuaugucauaaucagccuagauu

SEQ ID NO: 70655 - RNA, 18 nt, Artificial Sequence
  Synthetic
acccguucguucuagauu

SEQ ID NO: 70656 - RNA, 19 nt, Artificial Sequence
  Synthetic
uacccguucguucuagauu

SEQ ID NO: 70657 - RNA, 20 nt, Artificial Sequence
  Synthetic
uuacccguucguucuagauu

SEQ ID NO: 70658 - RNA, 21 nt, Artificial Sequence
  Synthetic
uuuacccguucguucuagauu

SEQ ID NO: 70659 - RNA, 22 nt, Artificial Sequence
  Synthetic
cuuuacccguucguucuagauu

SEQ ID NO: 70660 - RNA, 23 nt, Artificial Sequence
  Synthetic
ucuuuacccguucguucuagauu

SEQ ID NO: 70661 - RNA, 24 nt, Artificial Sequence
  Synthetic
cucuuuacccguucguucuagauu

SEQ ID NO: 70662 - RNA, 18 nt, Artificial Sequence
  Synthetic
uaagggucucuguagauu

SEQ ID NO: 70663 - RNA, 19 nt, Artificial Sequence
  Synthetic
auaagggucucuguagauu

SEQ ID NO: 70664 - RNA, 20 nt, Artificial Sequence
  Synthetic
aauaagggucucuguagauu

SEQ ID NO: 70665 - RNA, 21 nt, Artificial Sequence
  Synthetic
caauaagggucucuguagauu

SEQ ID NO: 70666 - RNA, 22 nt, Artificial Sequence
  Synthetic
ucaauaagggucucuguagauu

SEQ ID NO: 70667 - RNA, 24 nt, Artificial Sequence
  Synthetic
ugucaauaagggucucuguagauu

SEQ ID NO: 70668 - RNA, 18 nt, Artificial Sequence
  Synthetic
cucuuuaaaaaggcgauu

SEQ ID NO: 70669 - RNA, 19 nt, Artificial Sequence
  Synthetic
ucucuuuaaaaaggcgauu

SEQ ID NO: 70670 - RNA, 20 nt, Artificial Sequence
  Synthetic
cucucuuuaaaaaggcgauu

SEQ ID NO: 70671 - RNA, 21 nt, Artificial Sequence
  Synthetic
ucucucuuuaaaaaggcgauu

SEQ ID NO: 70672 - RNA, 22 nt, Artificial Sequence
  Synthetic
uucucucuuuaaaaaggcgauu

SEQ ID NO: 70673 - RNA, 19 nt, Artificial Sequence
  Synthetic
uggacaucuagauucgauu

SEQ ID NO: 70674 - RNA, 20 nt, Artificial Sequence
  Synthetic
auggacaucuagauucgauu

SEQ ID NO: 70675 - RNA, 21 nt, Artificial Sequence
  Synthetic
uauggacaucuagauucgauu

SEQ ID NO: 70676 - RNA, 22 nt, Artificial Sequence
  Synthetic
auauggacaucuagauucgauu

SEQ ID NO: 70677 - RNA, 24 nt, Artificial Sequence
  Synthetic
ugauauggacaucuagauucgauu

SEQ ID NO: 70678 - RNA, 18 nt, Artificial Sequence
  Synthetic
auuaaaugccacaggauu

SEQ ID NO: 70679 - RNA, 19 nt, Artificial Sequence
  Synthetic
cauuaaaugccacaggauu

SEQ ID NO: 70680 - RNA, 20 nt, Artificial Sequence
  Synthetic
ccauuaaaugccacaggauu

SEQ ID NO: 70681 - RNA, 22 nt, Artificial Sequence
  Synthetic
ugccauuaaaugccacaggauu

SEQ ID NO: 70682 - RNA, 23 nt, Artificial Sequence
  Synthetic
uugccauuaaaugccacaggauu

SEQ ID NO: 70683 - RNA, 24 nt, Artificial Sequence
  Synthetic
uuugccauuaaaugccacaggauu

SEQ ID NO: 70684 - RNA, 18 nt, Artificial Sequence
  Synthetic
cacaaccuagggaggauu

SEQ ID NO: 70685 - RNA, 19 nt, Artificial Sequence
  Synthetic
ucacaaccuagggaggauu

SEQ ID NO: 70686 - RNA, 20 nt, Artificial Sequence
  Synthetic
cucacaaccuagggaggauu

SEQ ID NO: 70687 - RNA, 23 nt, Artificial Sequence
  Synthetic
aggcucacaaccuagggaggauu

SEQ ID NO: 70688 - RNA, 24 nt, Artificial Sequence
  Synthetic
aaggcucacaaccuagggaggauu

SEQ ID NO: 70689 - RNA, 18 nt, Artificial Sequence
  Synthetic
aacugcuagccuaggauu

SEQ ID NO: 70690 - RNA, 19 nt, Artificial Sequence
  Synthetic
aaacugcuagccuaggauu

SEQ ID NO: 70691 - RNA, 20 nt, Artificial Sequence
  Synthetic
aaaacugcuagccuaggauu

SEQ ID NO: 70692 - RNA, 22 nt, Artificial Sequence
  Synthetic
agaaaacugcuagccuaggauu

SEQ ID NO: 70693 - RNA, 23 nt, Artificial Sequence
  Synthetic
cagaaaacugcuagccuaggauu

SEQ ID NO: 70694 - RNA, 18 nt, Artificial Sequence
  Synthetic
uuucagucuuaagggauu

SEQ ID NO: 70695 - RNA, 19 nt, Artificial Sequence
  Synthetic
uuuucagucuuaagggauu

SEQ ID NO: 70696 - RNA, 20 nt, Artificial Sequence
  Synthetic
auuuucagucuuaagggauu

SEQ ID NO: 70697 - RNA, 21 nt, Artificial Sequence
  Synthetic
aauuuucagucuuaagggauu

SEQ ID NO: 70698 - RNA, 23 nt, Artificial Sequence
  Synthetic
ugaauuuucagucuuaagggauu

SEQ ID NO: 70699 - RNA, 18 nt, Artificial Sequence
  Synthetic
ccagggaguugagggauu

SEQ ID NO: 70700 - RNA, 19 nt, Artificial Sequence
  Synthetic
cccagggaguugagggauu

SEQ ID NO: 70701 - RNA, 21 nt, Artificial Sequence
  Synthetic
ugcccagggaguugagggauu

SEQ ID NO: 70702 - RNA, 22 nt, Artificial Sequence
  Synthetic
uugcccagggaguugagggauu

SEQ ID NO: 70703 - RNA, 23 nt, Artificial Sequence
  Synthetic
uuugcccagggaguugagggauu

SEQ ID NO: 70704 - RNA, 24 nt, Artificial Sequence
  Synthetic
auuugcccagggaguugagggauu

SEQ ID NO: 70705 - RNA, 18 nt, Artificial Sequence
  Synthetic
augagagguacauggauu

SEQ ID NO: 70706 - RNA, 19 nt, Artificial Sequence
  Synthetic
aaugagagguacauggauu

SEQ ID NO: 70707 - RNA, 20 nt, Artificial Sequence
  Synthetic
caaugagagguacauggauu

SEQ ID NO: 70708 - RNA, 21 nt, Artificial Sequence
  Synthetic
acaaugagagguacauggauu

SEQ ID NO: 70709 - RNA, 22 nt, Artificial Sequence
  Synthetic
aacaaugagagguacauggauu

SEQ ID NO: 70710 - RNA, 23 nt, Artificial Sequence
  Synthetic
aaacaaugagagguacauggauu

SEQ ID NO: 70711 - RNA, 24 nt, Artificial Sequence
  Synthetic
aaaacaaugagagguacauggauu

SEQ ID NO: 70712 - RNA, 18 nt, Artificial Sequence
  Synthetic
cuauguaucucauggauu

SEQ ID NO: 70713 - RNA, 20 nt, Artificial Sequence
  Synthetic
ugcuauguaucucauggauu

SEQ ID NO: 70714 - RNA, 22 nt, Artificial Sequence
  Synthetic
agugcuauguaucucauggauu

SEQ ID NO: 70715 - RNA, 23 nt, Artificial Sequence
  Synthetic
aagugcuauguaucucauggauu

SEQ ID NO: 70716 - RNA, 24 nt, Artificial Sequence
  Synthetic
aaagugcuauguaucucauggauu

SEQ ID NO: 70717 - RNA, 18 nt, Artificial Sequence
  Synthetic
uuaaaagaucacuggauu

SEQ ID NO: 70718 - RNA, 20 nt, Artificial Sequence
  Synthetic
uguuaaaagaucacuggauu

SEQ ID NO: 70719 - RNA, 21 nt, Artificial Sequence
  Synthetic
cuguuaaaagaucacuggauu

SEQ ID NO: 70720 - RNA, 22 nt, Artificial Sequence
  Synthetic
acuguuaaaagaucacuggauu

SEQ ID NO: 70721 - RNA, 23 nt, Artificial Sequence
  Synthetic
cacuguuaaaagaucacuggauu

SEQ ID NO: 70722 - RNA, 18 nt, Artificial Sequence
  Synthetic
auucuccauuucuggauu

SEQ ID NO: 70723 - RNA, 19 nt, Artificial Sequence
  Synthetic
aauucuccauuucuggauu

SEQ ID NO: 70724 - RNA, 20 nt, Artificial Sequence
  Synthetic
aaauucuccauuucuggauu

SEQ ID NO: 70725 - RNA, 21 nt, Artificial Sequence
  Synthetic
caaauucuccauuucuggauu

SEQ ID NO: 70726 - RNA, 22 nt, Artificial Sequence
  Synthetic
acaaauucuccauuucuggauu

SEQ ID NO: 70727 - RNA, 23 nt, Artificial Sequence
  Synthetic
aacaaauucuccauuucuggauu

SEQ ID NO: 70728 - RNA, 18 nt, Artificial Sequence
  Synthetic
uguaccaggaaguggauu

SEQ ID NO: 70729 - RNA, 19 nt, Artificial Sequence
  Synthetic
uuguaccaggaaguggauu

SEQ ID NO: 70730 - RNA, 20 nt, Artificial Sequence
  Synthetic
auuguaccaggaaguggauu

SEQ ID NO: 70731 - RNA, 18 nt, Artificial Sequence
  Synthetic
cauaagggcucuuggauu

SEQ ID NO: 70732 - RNA, 20 nt, Artificial Sequence
  Synthetic
agcauaagggcucuuggauu

SEQ ID NO: 70733 - RNA, 21 nt, Artificial Sequence
  Synthetic
aagcauaagggcucuuggauu

SEQ ID NO: 70734 - RNA, 22 nt, Artificial Sequence
  Synthetic
aaagcauaagggcucuuggauu

SEQ ID NO: 70735 - RNA, 23 nt, Artificial Sequence
  Synthetic
caaagcauaagggcucuuggauu

SEQ ID NO: 70736 - RNA, 24 nt, Artificial Sequence
  Synthetic
ucaaagcauaagggcucuuggauu

SEQ ID NO: 70737 - RNA, 19 nt, Artificial Sequence
  Synthetic
uguaccucugcuaaugauu

SEQ ID NO: 70738 - RNA, 21 nt, Artificial Sequence
  Synthetic
uguguaccucugcuaaugauu

SEQ ID NO: 70739 - RNA, 22 nt, Artificial Sequence
  Synthetic
uuguguaccucugcuaaugauu

SEQ ID NO: 70740 - RNA, 23 nt, Artificial Sequence
  Synthetic
auuguguaccucugcuaaugauu

SEQ ID NO: 70741 - RNA, 24 nt, Artificial Sequence
  Synthetic
aauuguguaccucugcuaaugauu

SEQ ID NO: 70742 - RNA, 19 nt, Artificial Sequence
  Synthetic
ugauaauuuaaacaugauu

SEQ ID NO: 70743 - RNA, 20 nt, Artificial Sequence
  Synthetic
augauaauuuaaacaugauu

SEQ ID NO: 70744 - RNA, 21 nt, Artificial Sequence
  Synthetic
caugauaauuuaaacaugauu

SEQ ID NO: 70745 - RNA, 22 nt, Artificial Sequence
  Synthetic
ucaugauaauuuaaacaugauu

SEQ ID NO: 70746 - RNA, 23 nt, Artificial Sequence
  Synthetic
aucaugauaauuuaaacaugauu

SEQ ID NO: 70747 - RNA, 24 nt, Artificial Sequence
  Synthetic
uaucaugauaauuuaaacaugauu

SEQ ID NO: 70748 - RNA, 19 nt, Artificial Sequence
  Synthetic
aguacguucaggcaugauu

SEQ ID NO: 70749 - RNA, 20 nt, Artificial Sequence
  Synthetic
caguacguucaggcaugauu

SEQ ID NO: 70750 - RNA, 22 nt, Artificial Sequence
  Synthetic
ugcaguacguucaggcaugauu

SEQ ID NO: 70751 - RNA, 23 nt, Artificial Sequence
  Synthetic
uugcaguacguucaggcaugauu

SEQ ID NO: 70752 - RNA, 24 nt, Artificial Sequence
  Synthetic
auugcaguacguucaggcaugauu

SEQ ID NO: 70753 - RNA, 18 nt, Artificial Sequence
  Synthetic
uuugugauaaagaugauu

SEQ ID NO: 70754 - RNA, 19 nt, Artificial Sequence
  Synthetic
uuuugugauaaagaugauu

SEQ ID NO: 70755 - RNA, 20 nt, Artificial Sequence
  Synthetic
uuuuugugauaaagaugauu

SEQ ID NO: 70756 - RNA, 21 nt, Artificial Sequence
  Synthetic
uuuuuugugauaaagaugauu

SEQ ID NO: 70757 - RNA, 22 nt, Artificial Sequence
  Synthetic
cuuuuuugugauaaagaugauu

SEQ ID NO: 70758 - RNA, 23 nt, Artificial Sequence
  Synthetic
ccuuuuuugugauaaagaugauu

SEQ ID NO: 70759 - RNA, 24 nt, Artificial Sequence
  Synthetic
uccuuuuuugugauaaagaugauu

SEQ ID NO: 70760 - RNA, 18 nt, Artificial Sequence
  Synthetic
auuguacuaaagaugauu

SEQ ID NO: 70761 - RNA, 19 nt, Artificial Sequence
  Synthetic
uauuguacuaaagaugauu

SEQ ID NO: 70762 - RNA, 20 nt, Artificial Sequence
  Synthetic
cuauuguacuaaagaugauu

SEQ ID NO: 70763 - RNA, 21 nt, Artificial Sequence
  Synthetic
acuauuguacuaaagaugauu

SEQ ID NO: 70764 - RNA, 22 nt, Artificial Sequence
  Synthetic
uacuauuguacuaaagaugauu

SEQ ID NO: 70765 - RNA, 23 nt, Artificial Sequence
  Synthetic
cuacuauuguacuaaagaugauu

SEQ ID NO: 70766 - RNA, 24 nt, Artificial Sequence
  Synthetic
ucuacuauuguacuaaagaugauu

SEQ ID NO: 70767 - RNA, 18 nt, Artificial Sequence
  Synthetic
cacauauacaauaugauu

SEQ ID NO: 70768 - RNA, 19 nt, Artificial Sequence
  Synthetic
ccacauauacaauaugauu

SEQ ID NO: 70769 - RNA, 20 nt, Artificial Sequence
  Synthetic
cccacauauacaauaugauu

SEQ ID NO: 70770 - RNA, 21 nt, Artificial Sequence
  Synthetic
ccccacauauacaauaugauu

SEQ ID NO: 70771 - RNA, 22 nt, Artificial Sequence
  Synthetic
accccacauauacaauaugauu

SEQ ID NO: 70772 - RNA, 23 nt, Artificial Sequence
  Synthetic
uaccccacauauacaauaugauu

SEQ ID NO: 70773 - RNA, 24 nt, Artificial Sequence
  Synthetic
auaccccacauauacaauaugauu

SEQ ID NO: 70774 - RNA, 18 nt, Artificial Sequence
  Synthetic
caagaaccaugacugauu

SEQ ID NO: 70775 - RNA, 20 nt, Artificial Sequence
  Synthetic
ugcaagaaccaugacugauu

SEQ ID NO: 70776 - RNA, 21 nt, Artificial Sequence
  Synthetic
uugcaagaaccaugacugauu

SEQ ID NO: 70777 - RNA, 22 nt, Artificial Sequence
  Synthetic
auugcaagaaccaugacugauu

SEQ ID NO: 70778 - RNA, 23 nt, Artificial Sequence
  Synthetic
uauugcaagaaccaugacugauu

SEQ ID NO: 70779 - RNA, 24 nt, Artificial Sequence
  Synthetic
uuauugcaagaaccaugacugauu

SEQ ID NO: 70780 - RNA, 18 nt, Artificial Sequence
  Synthetic
uguaccugagaccugauu

SEQ ID NO: 70781 - RNA, 19 nt, Artificial Sequence
  Synthetic
uuguaccugagaccugauu

SEQ ID NO: 70782 - RNA, 20 nt, Artificial Sequence
  Synthetic
uuuguaccugagaccugauu

SEQ ID NO: 70783 - RNA, 22 nt, Artificial Sequence
  Synthetic
uguuuguaccugagaccugauu

SEQ ID NO: 70784 - RNA, 23 nt, Artificial Sequence
  Synthetic
cuguuuguaccugagaccugauu

SEQ ID NO: 70785 - RNA, 18 nt, Artificial Sequence
  Synthetic
uuugaguaaucucugauu

SEQ ID NO: 70786 - RNA, 19 nt, Artificial Sequence
  Synthetic
cuuugaguaaucucugauu

SEQ ID NO: 70787 - RNA, 20 nt, Artificial Sequence
  Synthetic
acuuugaguaaucucugauu

SEQ ID NO: 70788 - RNA, 21 nt, Artificial Sequence
  Synthetic
uacuuugaguaaucucugauu

SEQ ID NO: 70789 - RNA, 22 nt, Artificial Sequence
  Synthetic
cuacuuugaguaaucucugauu

SEQ ID NO: 70790 - RNA, 23 nt, Artificial Sequence
  Synthetic
ccuacuuugaguaaucucugauu

SEQ ID NO: 70791 - RNA, 18 nt, Artificial Sequence
  Synthetic
cuuugaaguucucugauu

SEQ ID NO: 70792 - RNA, 19 nt, Artificial Sequence
  Synthetic
ucuuugaaguucucugauu

SEQ ID NO: 70793 - RNA, 20 nt, Artificial Sequence
  Synthetic
cucuuugaaguucucugauu

SEQ ID NO: 70794 - RNA, 21 nt, Artificial Sequence
  Synthetic
ucucuuugaaguucucugauu

SEQ ID NO: 70795 - RNA, 22 nt, Artificial Sequence
  Synthetic
aucucuuugaaguucucugauu

SEQ ID NO: 70796 - RNA, 23 nt, Artificial Sequence
  Synthetic
uaucucuuugaaguucucugauu

SEQ ID NO: 70797 - RNA, 24 nt, Artificial Sequence
  Synthetic
auaucucuuugaaguucucugauu

SEQ ID NO: 70798 - RNA, 18 nt, Artificial Sequence
  Synthetic
uucuaagagucugugauu

SEQ ID NO: 70799 - RNA, 20 nt, Artificial Sequence
  Synthetic
uguucuaagagucugugauu

SEQ ID NO: 70800 - RNA, 22 nt, Artificial Sequence
  Synthetic
uguguucuaagagucugugauu

SEQ ID NO: 70801 - RNA, 23 nt, Artificial Sequence
  Synthetic
uuguguucuaagagucugugauu

SEQ ID NO: 70802 - RNA, 23 nt, Artificial Sequence
  Synthetic
aggggguaaauuguucauugauu

SEQ ID NO: 70803 - RNA, 24 nt, Artificial Sequence
  Synthetic
aaggggguaaauuguucauugauu

SEQ ID NO: 70804 - RNA, 18 nt, Artificial Sequence
  Synthetic
ccugcuggaaucuugauu

SEQ ID NO: 70805 - RNA, 22 nt, Artificial Sequence
  Synthetic
ugggccugcuggaaucuugauu

SEQ ID NO: 70806 - RNA, 23 nt, Artificial Sequence
  Synthetic
augggccugcuggaaucuugauu

SEQ ID NO: 70807 - RNA, 24 nt, Artificial Sequence
  Synthetic
uaugggccugcuggaaucuugauu

SEQ ID NO: 70808 - RNA, 20 nt, Artificial Sequence
  Synthetic
uggcugaccauauguugauu

SEQ ID NO: 70809 - RNA, 22 nt, Artificial Sequence
  Synthetic
aguggcugaccauauguugauu

SEQ ID NO: 70810 - RNA, 23 nt, Artificial Sequence
  Synthetic
aaguggcugaccauauguugauu

SEQ ID NO: 70811 - RNA, 21 nt, Artificial Sequence
  Synthetic
agguuuuguuuugauuugauu

SEQ ID NO: 70812 - RNA, 22 nt, Artificial Sequence
  Synthetic
aagguuuuguuuugauuugauu

SEQ ID NO: 70813 - RNA, 23 nt, Artificial Sequence
  Synthetic
aaagguuuuguuuugauuugauu

SEQ ID NO: 70814 - RNA, 24 nt, Artificial Sequence
  Synthetic
aaaagguuuuguuuugauuugauu

SEQ ID NO: 70815 - RNA, 21 nt, Artificial Sequence
  Synthetic
aaaagaggggaguguuugauu

SEQ ID NO: 70816 - RNA, 23 nt, Artificial Sequence
  Synthetic
ugaaaagaggggaguguuugauu

SEQ ID NO: 70817 - RNA, 24 nt, Artificial Sequence
  Synthetic
uugaaaagaggggaguguuugauu

SEQ ID NO: 70818 - RNA, 21 nt, Artificial Sequence
  Synthetic
aggguugacaaacaaaauauu

SEQ ID NO: 70819 - RNA, 22 nt, Artificial Sequence
  Synthetic
aaggguugacaaacaaaauauu

SEQ ID NO: 70820 - RNA, 24 nt, Artificial Sequence
  Synthetic
agaaggguugacaaacaaaauauu

SEQ ID NO: 70821 - RNA, 18 nt, Artificial Sequence
  Synthetic
uggaugaauuaaaauauu

SEQ ID NO: 70822 - RNA, 19 nt, Artificial Sequence
  Synthetic
auggaugaauuaaaauauu

SEQ ID NO: 70823 - RNA, 20 nt, Artificial Sequence
  Synthetic
cauggaugaauuaaaauauu

SEQ ID NO: 70824 - RNA, 22 nt, Artificial Sequence
  Synthetic
ugcauggaugaauuaaaauauu

SEQ ID NO: 70825 - RNA, 23 nt, Artificial Sequence
  Synthetic
augcauggaugaauuaaaauauu

SEQ ID NO: 70826 - RNA, 18 nt, Artificial Sequence
  Synthetic
aagcaguugucaaauauu

SEQ ID NO: 70827 - RNA, 19 nt, Artificial Sequence
  Synthetic
aaagcaguugucaaauauu

SEQ ID NO: 70828 - RNA, 20 nt, Artificial Sequence
  Synthetic
uaaagcaguugucaaauauu

SEQ ID NO: 70829 - RNA, 21 nt, Artificial Sequence
  Synthetic
cuaaagcaguugucaaauauu

SEQ ID NO: 70830 - RNA, 23 nt, Artificial Sequence
  Synthetic
ugcuaaagcaguugucaaauauu

SEQ ID NO: 70831 - RNA, 24 nt, Artificial Sequence
  Synthetic
uugcuaaagcaguugucaaauauu

SEQ ID NO: 70832 - RNA, 21 nt, Artificial Sequence
  Synthetic
auuuuuucuaccagaaauauu

SEQ ID NO: 70833 - RNA, 22 nt, Artificial Sequence
  Synthetic
aauuuuuucuaccagaaauauu

SEQ ID NO: 70834 - RNA, 23 nt, Artificial Sequence
  Synthetic
caauuuuuucuaccagaaauauu

SEQ ID NO: 70835 - RNA, 24 nt, Artificial Sequence
  Synthetic
ccaauuuuuucuaccagaaauauu

SEQ ID NO: 70836 - RNA, 21 nt, Artificial Sequence
  Synthetic
aaaaagaaaauucagaauauu

SEQ ID NO: 70837 - RNA, 22 nt, Artificial Sequence
  Synthetic
caaaaagaaaauucagaauauu

SEQ ID NO: 70838 - RNA, 23 nt, Artificial Sequence
  Synthetic
acaaaaagaaaauucagaauauu

SEQ ID NO: 70839 - RNA, 18 nt, Artificial Sequence
  Synthetic
uaggcuacugauaauauu

SEQ ID NO: 70840 - RNA, 19 nt, Artificial Sequence
  Synthetic
cuaggcuacugauaauauu

SEQ ID NO: 70841 - RNA, 20 nt, Artificial Sequence
  Synthetic
ucuaggcuacugauaauauu

SEQ ID NO: 70842 - RNA, 22 nt, Artificial Sequence
  Synthetic
ugucuaggcuacugauaauauu

SEQ ID NO: 70843 - RNA, 23 nt, Artificial Sequence
  Synthetic
augucuaggcuacugauaauauu

SEQ ID NO: 70844 - RNA, 24 nt, Artificial Sequence
  Synthetic
aaugucuaggcuacugauaauauu

SEQ ID NO: 70845 - RNA, 18 nt, Artificial Sequence
  Synthetic
ugcugguuuuauaauauu

SEQ ID NO: 70846 - RNA, 19 nt, Artificial Sequence
  Synthetic
uugcugguuuuauaauauu

SEQ ID NO: 70847 - RNA, 20 nt, Artificial Sequence
  Synthetic
auugcugguuuuauaauauu

SEQ ID NO: 70848 - RNA, 21 nt, Artificial Sequence
  Synthetic
cauugcugguuuuauaauauu

SEQ ID NO: 70849 - RNA, 22 nt, Artificial Sequence
  Synthetic
acauugcugguuuuauaauauu

SEQ ID NO: 70850 - RNA, 23 nt, Artificial Sequence
  Synthetic
aacauugcugguuuuauaauauu

SEQ ID NO: 70851 - RNA, 24 nt, Artificial Sequence
  Synthetic
uaacauugcugguuuuauaauauu

SEQ ID NO: 70852 - RNA, 18 nt, Artificial Sequence
  Synthetic
auuucagucgcuaauauu

SEQ ID NO: 70853 - RNA, 21 nt, Artificial Sequence
  Synthetic
aggauuucagucgcuaauauu

SEQ ID NO: 70854 - RNA, 22 nt, Artificial Sequence
  Synthetic
aaggauuucagucgcuaauauu

SEQ ID NO: 70855 - RNA, 24 nt, Artificial Sequence
  Synthetic
agaaggauuucagucgcuaauauu

SEQ ID NO: 70856 - RNA, 18 nt, Artificial Sequence
  Synthetic
cuuuaacccgguaauauu

SEQ ID NO: 70857 - RNA, 19 nt, Artificial Sequence
  Synthetic
ccuuuaacccgguaauauu

SEQ ID NO: 70858 - RNA, 20 nt, Artificial Sequence
  Synthetic
accuuuaacccgguaauauu

SEQ ID NO: 70859 - RNA, 22 nt, Artificial Sequence
  Synthetic
ugaccuuuaacccgguaauauu

SEQ ID NO: 70860 - RNA, 23 nt, Artificial Sequence
  Synthetic
augaccuuuaacccgguaauauu

SEQ ID NO: 70861 - RNA, 24 nt, Artificial Sequence
  Synthetic
aaugaccuuuaacccgguaauauu

SEQ ID NO: 70862 - RNA, 18 nt, Artificial Sequence
  Synthetic
uguguaccaauuaauauu

SEQ ID NO: 70863 - RNA, 20 nt, Artificial Sequence
  Synthetic
aguguguaccaauuaauauu

SEQ ID NO: 70864 - RNA, 21 nt, Artificial Sequence
  Synthetic
caguguguaccaauuaauauu

SEQ ID NO: 70865 - RNA, 22 nt, Artificial Sequence
  Synthetic
ccaguguguaccaauuaauauu

SEQ ID NO: 70866 - RNA, 23 nt, Artificial Sequence
  Synthetic
accaguguguaccaauuaauauu

SEQ ID NO: 70867 - RNA, 24 nt, Artificial Sequence
  Synthetic
uaccaguguguaccaauuaauauu

SEQ ID NO: 70868 - RNA, 18 nt, Artificial Sequence
  Synthetic
aucagcuucaaacauauu

SEQ ID NO: 70869 - RNA, 19 nt, Artificial Sequence
  Synthetic
aaucagcuucaaacauauu

SEQ ID NO: 70870 - RNA, 20 nt, Artificial Sequence
  Synthetic
aaaucagcuucaaacauauu

SEQ ID NO: 70871 - RNA, 21 nt, Artificial Sequence
  Synthetic
uaaaucagcuucaaacauauu

SEQ ID NO: 70872 - RNA, 22 nt, Artificial Sequence
  Synthetic
uuaaaucagcuucaaacauauu

SEQ ID NO: 70873 - RNA, 23 nt, Artificial Sequence
  Synthetic
uuuaaaucagcuucaaacauauu

SEQ ID NO: 70874 - RNA, 24 nt, Artificial Sequence
  Synthetic
cuuuaaaucagcuucaaacauauu

SEQ ID NO: 70875 - RNA, 18 nt, Artificial Sequence
  Synthetic
cauuagaaugaacauauu

SEQ ID NO: 70876 - RNA, 19 nt, Artificial Sequence
  Synthetic
ccauuagaaugaacauauu

SEQ ID NO: 70877 - RNA, 20 nt, Artificial Sequence
  Synthetic
uccauuagaaugaacauauu

SEQ ID NO: 70878 - RNA, 21 nt, Artificial Sequence
  Synthetic
uuccauuagaaugaacauauu

SEQ ID NO: 70879 - RNA, 22 nt, Artificial Sequence
  Synthetic
uuuccauuagaaugaacauauu

SEQ ID NO: 70880 - RNA, 23 nt, Artificial Sequence
  Synthetic
uuuuccauuagaaugaacauauu

SEQ ID NO: 70881 - RNA, 24 nt, Artificial Sequence
  Synthetic
cuuuuccauuagaaugaacauauu

SEQ ID NO: 70882 - RNA, 19 nt, Artificial Sequence
  Synthetic
uguuuugugggcacauauu

SEQ ID NO: 70883 - RNA, 20 nt, Artificial Sequence
  Synthetic
cuguuuugugggcacauauu

SEQ ID NO: 70884 - RNA, 21 nt, Artificial Sequence
  Synthetic
acuguuuugugggcacauauu

SEQ ID NO: 70885 - RNA, 22 nt, Artificial Sequence
  Synthetic
uacuguuuugugggcacauauu

SEQ ID NO: 70886 - RNA, 23 nt, Artificial Sequence
  Synthetic
auacuguuuugugggcacauauu

SEQ ID NO: 70887 - RNA, 24 nt, Artificial Sequence
  Synthetic
uauacuguuuugugggcacauauu

SEQ ID NO: 70888 - RNA, 20 nt, Artificial Sequence
  Synthetic
agguauugaaaugacauauu

SEQ ID NO: 70889 - RNA, 22 nt, Artificial Sequence
  Synthetic
agagguauugaaaugacauauu

SEQ ID NO: 70890 - RNA, 23 nt, Artificial Sequence
  Synthetic
cagagguauugaaaugacauauu

SEQ ID NO: 70891 - RNA, 24 nt, Artificial Sequence
  Synthetic
ccagagguauugaaaugacauauu

SEQ ID NO: 70892 - RNA, 18 nt, Artificial Sequence
  Synthetic
auguguauuuagcauauu

SEQ ID NO: 70893 - RNA, 19 nt, Artificial Sequence
  Synthetic
cauguguauuuagcauauu

SEQ ID NO: 70894 - RNA, 20 nt, Artificial Sequence
  Synthetic
ucauguguauuuagcauauu

SEQ ID NO: 70895 - RNA, 21 nt, Artificial Sequence
  Synthetic
cucauguguauuuagcauauu

SEQ ID NO: 70896 - RNA, 22 nt, Artificial Sequence
  Synthetic
ucucauguguauuuagcauauu

SEQ ID NO: 70897 - RNA, 18 nt, Artificial Sequence
  Synthetic
auucauacuccgcauauu

SEQ ID NO: 70898 - RNA, 19 nt, Artificial Sequence
  Synthetic
uauucauacuccgcauauu

SEQ ID NO: 70899 - RNA, 20 nt, Artificial Sequence
  Synthetic
uuauucauacuccgcauauu

SEQ ID NO: 70900 - RNA, 21 nt, Artificial Sequence
  Synthetic
uuuauucauacuccgcauauu

SEQ ID NO: 70901 - RNA, 22 nt, Artificial Sequence
  Synthetic
uuuuauucauacuccgcauauu

SEQ ID NO: 70902 - RNA, 23 nt, Artificial Sequence
  Synthetic
uuuuuauucauacuccgcauauu

SEQ ID NO: 70903 - RNA, 24 nt, Artificial Sequence
  Synthetic
uuuuuuauucauacuccgcauauu

SEQ ID NO: 70904 - RNA, 18 nt, Artificial Sequence
  Synthetic
caaagggguaugcauauu

SEQ ID NO: 70905 - RNA, 19 nt, Artificial Sequence
  Synthetic
ucaaagggguaugcauauu

SEQ ID NO: 70906 - RNA, 20 nt, Artificial Sequence
  Synthetic
aucaaagggguaugcauauu

SEQ ID NO: 70907 - RNA, 21 nt, Artificial Sequence
  Synthetic
uaucaaagggguaugcauauu

SEQ ID NO: 70908 - RNA, 22 nt, Artificial Sequence
  Synthetic
auaucaaagggguaugcauauu

SEQ ID NO: 70909 - RNA, 23 nt, Artificial Sequence
  Synthetic
cauaucaaagggguaugcauauu

SEQ ID NO: 70910 - RNA, 18 nt, Artificial Sequence
  Synthetic
uauucugacuuucauauu

SEQ ID NO: 70911 - RNA, 19 nt, Artificial Sequence
  Synthetic
auauucugacuuucauauu

SEQ ID NO: 70912 - RNA, 20 nt, Artificial Sequence
  Synthetic
cauauucugacuuucauauu

SEQ ID NO: 70913 - RNA, 22 nt, Artificial Sequence
  Synthetic
ugcauauucugacuuucauauu

SEQ ID NO: 70914 - RNA, 23 nt, Artificial Sequence
  Synthetic
cugcauauucugacuuucauauu

SEQ ID NO: 70915 - RNA, 24 nt, Artificial Sequence
  Synthetic
ucugcauauucugacuuucauauu

SEQ ID NO: 70916 - RNA, 19 nt, Artificial Sequence
  Synthetic
agccucaucaaaagauauu

SEQ ID NO: 70917 - RNA, 20 nt, Artificial Sequence
  Synthetic
uagccucaucaaaagauauu

SEQ ID NO: 70918 - RNA, 21 nt, Artificial Sequence
  Synthetic
auagccucaucaaaagauauu

SEQ ID NO: 70919 - RNA, 22 nt, Artificial Sequence
  Synthetic
uauagccucaucaaaagauauu

SEQ ID NO: 70920 - RNA, 23 nt, Artificial Sequence
  Synthetic
uuauagccucaucaaaagauauu

SEQ ID NO: 70921 - RNA, 24 nt, Artificial Sequence
  Synthetic
auuauagccucaucaaaagauauu

SEQ ID NO: 70922 - RNA, 18 nt, Artificial Sequence
  Synthetic
aaugcccaaaaggauauu

SEQ ID NO: 70923 - RNA, 19 nt, Artificial Sequence
  Synthetic
aaaugcccaaaaggauauu

SEQ ID NO: 70924 - RNA, 20 nt, Artificial Sequence
  Synthetic
uaaaugcccaaaaggauauu

SEQ ID NO: 70925 - RNA, 21 nt, Artificial Sequence
  Synthetic
auaaaugcccaaaaggauauu

SEQ ID NO: 70926 - RNA, 22 nt, Artificial Sequence
  Synthetic
uauaaaugcccaaaaggauauu

SEQ ID NO: 70927 - RNA, 24 nt, Artificial Sequence
  Synthetic
uguauaaaugcccaaaaggauauu

SEQ ID NO: 70928 - RNA, 18 nt, Artificial Sequence
  Synthetic
ucauuuccugaugauauu

SEQ ID NO: 70929 - RNA, 19 nt, Artificial Sequence
  Synthetic
aucauuuccugaugauauu

SEQ ID NO: 70930 - RNA, 20 nt, Artificial Sequence
  Synthetic
uaucauuuccugaugauauu

SEQ ID NO: 70931 - RNA, 22 nt, Artificial Sequence
  Synthetic
aguaucauuuccugaugauauu

SEQ ID NO: 70932 - RNA, 23 nt, Artificial Sequence
  Synthetic
uaguaucauuuccugaugauauu

SEQ ID NO: 70933 - RNA, 24 nt, Artificial Sequence
  Synthetic
auaguaucauuuccugaugauauu

SEQ ID NO: 70934 - RNA, 21 nt, Artificial Sequence
  Synthetic
uggggaaaauuaauauauauu

SEQ ID NO: 70935 - RNA, 23 nt, Artificial Sequence
  Synthetic
aguggggaaaauuaauauauauu

SEQ ID NO: 70936 - RNA, 21 nt, Artificial Sequence
  Synthetic
uaaaauaaacaccuauauauu

SEQ ID NO: 70937 - RNA, 23 nt, Artificial Sequence
  Synthetic
uguaaaauaaacaccuauauauu

SEQ ID NO: 70938 - RNA, 24 nt, Artificial Sequence
  Synthetic
uuguaaaauaaacaccuauauauu

SEQ ID NO: 70939 - RNA, 20 nt, Artificial Sequence
  Synthetic
ugguuggauucuacuauauu

SEQ ID NO: 70940 - RNA, 22 nt, Artificial Sequence
  Synthetic
agugguuggauucuacuauauu

SEQ ID NO: 70941 - RNA, 18 nt, Artificial Sequence
  Synthetic
aaaagugaaaucuauauu

SEQ ID NO: 70942 - RNA, 20 nt, Artificial Sequence
  Synthetic
ugaaaagugaaaucuauauu

SEQ ID NO: 70943 - RNA, 21 nt, Artificial Sequence
  Synthetic
augaaaagugaaaucuauauu

SEQ ID NO: 70944 - RNA, 22 nt, Artificial Sequence
  Synthetic
caugaaaagugaaaucuauauu

SEQ ID NO: 70945 - RNA, 23 nt, Artificial Sequence
  Synthetic
acaugaaaagugaaaucuauauu

SEQ ID NO: 70946 - RNA, 24 nt, Artificial Sequence
  Synthetic
aacaugaaaagugaaaucuauauu

SEQ ID NO: 70947 - RNA, 19 nt, Artificial Sequence
  Synthetic
agacaaaagugaguauauu

SEQ ID NO: 70948 - RNA, 20 nt, Artificial Sequence
  Synthetic
cagacaaaagugaguauauu

SEQ ID NO: 70949 - RNA, 22 nt, Artificial Sequence
  Synthetic
agcagacaaaagugaguauauu

SEQ ID NO: 70950 - RNA, 23 nt, Artificial Sequence
  Synthetic
uagcagacaaaagugaguauauu

SEQ ID NO: 70951 - RNA, 24 nt, Artificial Sequence
  Synthetic
uuagcagacaaaagugaguauauu

SEQ ID NO: 70952 - RNA, 18 nt, Artificial Sequence
  Synthetic
uccauuuguauguauauu

SEQ ID NO: 70953 - RNA, 19 nt, Artificial Sequence
  Synthetic
uuccauuuguauguauauu

SEQ ID NO: 70954 - RNA, 20 nt, Artificial Sequence
  Synthetic
auuccauuuguauguauauu

SEQ ID NO: 70955 - RNA, 21 nt, Artificial Sequence
  Synthetic
aauuccauuuguauguauauu

SEQ ID NO: 70956 - RNA, 22 nt, Artificial Sequence
  Synthetic
aaauuccauuuguauguauauu

SEQ ID NO: 70957 - RNA, 23 nt, Artificial Sequence
  Synthetic
aaaauuccauuuguauguauauu

SEQ ID NO: 70958 - RNA, 24 nt, Artificial Sequence
  Synthetic
uaaaauuccauuuguauguauauu

SEQ ID NO: 70959 - RNA, 18 nt, Artificial Sequence
  Synthetic
ccuggcacuguguauauu

SEQ ID NO: 70960 - RNA, 20 nt, Artificial Sequence
  Synthetic
ugccuggcacuguguauauu

SEQ ID NO: 70961 - RNA, 22 nt, Artificial Sequence
  Synthetic
agugccuggcacuguguauauu

SEQ ID NO: 70962 - RNA, 23 nt, Artificial Sequence
  Synthetic
cagugccuggcacuguguauauu

SEQ ID NO: 70963 - RNA, 24 nt, Artificial Sequence
  Synthetic
acagugccuggcacuguguauauu

SEQ ID NO: 70964 - RNA, 21 nt, Artificial Sequence
  Synthetic
uucaaaaacaaaaauuauauu

SEQ ID NO: 70965 - RNA, 22 nt, Artificial Sequence
  Synthetic
uuucaaaaacaaaaauuauauu

SEQ ID NO: 70966 - RNA, 23 nt, Artificial Sequence
  Synthetic
auuucaaaaacaaaaauuauauu

SEQ ID NO: 70967 - RNA, 24 nt, Artificial Sequence
  Synthetic
uauuucaaaaacaaaaauuauauu

SEQ ID NO: 70968 - RNA, 18 nt, Artificial Sequence
  Synthetic
uagaucagauguuauauu

SEQ ID NO: 70969 - RNA, 19 nt, Artificial Sequence
  Synthetic
cuagaucagauguuauauu

SEQ ID NO: 70970 - RNA, 20 nt, Artificial Sequence
  Synthetic
ucuagaucagauguuauauu

SEQ ID NO: 70971 - RNA, 21 nt, Artificial Sequence
  Synthetic
uucuagaucagauguuauauu

SEQ ID NO: 70972 - RNA, 22 nt, Artificial Sequence
  Synthetic
cuucuagaucagauguuauauu

SEQ ID NO: 70973 - RNA, 23 nt, Artificial Sequence
  Synthetic
acuucuagaucagauguuauauu

SEQ ID NO: 70974 - RNA, 24 nt, Artificial Sequence
  Synthetic
uacuucuagaucagauguuauauu

SEQ ID NO: 70975 - RNA, 21 nt, Artificial Sequence
  Synthetic
uuacauauaguaauuuauauu

SEQ ID NO: 70976 - RNA, 22 nt, Artificial Sequence
  Synthetic
uuuacauauaguaauuuauauu

SEQ ID NO: 70977 - RNA, 23 nt, Artificial Sequence
  Synthetic
cuuuacauauaguaauuuauauu

SEQ ID NO: 70978 - RNA, 21 nt, Artificial Sequence
  Synthetic
aauaccuauuaucuuuauauu

SEQ ID NO: 70979 - RNA, 22 nt, Artificial Sequence
  Synthetic
uaauaccuauuaucuuuauauu

SEQ ID NO: 70980 - RNA, 23 nt, Artificial Sequence
  Synthetic
auaauaccuauuaucuuuauauu

SEQ ID NO: 70981 - RNA, 21 nt, Artificial Sequence
  Synthetic
uaggucaucaguuuuuauauu

SEQ ID NO: 70982 - RNA, 22 nt, Artificial Sequence
  Synthetic
uuaggucaucaguuuuuauauu

SEQ ID NO: 70983 - RNA, 23 nt, Artificial Sequence
  Synthetic
auuaggucaucaguuuuuauauu

SEQ ID NO: 70984 - RNA, 24 nt, Artificial Sequence
  Synthetic
uauuaggucaucaguuuuuauauu

SEQ ID NO: 70985 - RNA, 18 nt, Artificial Sequence
  Synthetic
uucuggauauccacuauu

SEQ ID NO: 70986 - RNA, 20 nt, Artificial Sequence
  Synthetic
uguucuggauauccacuauu

SEQ ID NO: 70987 - RNA, 21 nt, Artificial Sequence
  Synthetic
auguucuggauauccacuauu

SEQ ID NO: 70988 - RNA, 22 nt, Artificial Sequence
  Synthetic
uauguucuggauauccacuauu

SEQ ID NO: 70989 - RNA, 23 nt, Artificial Sequence
  Synthetic
uuauguucuggauauccacuauu

SEQ ID NO: 70990 - RNA, 24 nt, Artificial Sequence
  Synthetic
auuauguucuggauauccacuauu

SEQ ID NO: 70991 - RNA, 19 nt, Artificial Sequence
  Synthetic
aguaaauggacagacuauu

SEQ ID NO: 70992 - RNA, 21 nt, Artificial Sequence
  Synthetic
agaguaaauggacagacuauu

SEQ ID NO: 70993 - RNA, 22 nt, Artificial Sequence
  Synthetic
uagaguaaauggacagacuauu

SEQ ID NO: 70994 - RNA, 23 nt, Artificial Sequence
  Synthetic
uuagaguaaauggacagacuauu

SEQ ID NO: 70995 - RNA, 24 nt, Artificial Sequence
  Synthetic
auuagaguaaauggacagacuauu

SEQ ID NO: 70996 - RNA, 19 nt, Artificial Sequence
  Synthetic
ugaacuaugugcuacuauu

SEQ ID NO: 70997 - RNA, 20 nt, Artificial Sequence
  Synthetic
cugaacuaugugcuacuauu

SEQ ID NO: 70998 - RNA, 22 nt, Artificial Sequence
  Synthetic
agcugaacuaugugcuacuauu

SEQ ID NO: 70999 - RNA, 23 nt, Artificial Sequence
  Synthetic
aagcugaacuaugugcuacuauu

SEQ ID NO: 71000 - RNA, 24 nt, Artificial Sequence
  Synthetic
aaagcugaacuaugugcuacuauu

SEQ ID NO: 71001 - RNA, 18 nt, Artificial Sequence
  Synthetic
aauguccuguguacuauu

SEQ ID NO: 71002 - RNA, 19 nt, Artificial Sequence
  Synthetic
aaauguccuguguacuauu

SEQ ID NO: 71003 - RNA, 20 nt, Artificial Sequence
  Synthetic
caaauguccuguguacuauu

SEQ ID NO: 71004 - RNA, 21 nt, Artificial Sequence
  Synthetic
ucaaauguccuguguacuauu

SEQ ID NO: 71005 - RNA, 22 nt, Artificial Sequence
  Synthetic
aucaaauguccuguguacuauu

SEQ ID NO: 71006 - RNA, 24 nt, Artificial Sequence
  Synthetic
ugaucaaauguccuguguacuauu

SEQ ID NO: 71007 - RNA, 20 nt, Artificial Sequence
  Synthetic
aggauaauuucuuuacuauu

SEQ ID NO: 71008 - RNA, 21 nt, Artificial Sequence
  Synthetic
uaggauaauuucuuuacuauu

SEQ ID NO: 71009 - RNA, 22 nt, Artificial Sequence
  Synthetic
uuaggauaauuucuuuacuauu

SEQ ID NO: 71010 - RNA, 23 nt, Artificial Sequence
  Synthetic
cuuaggauaauuucuuuacuauu

SEQ ID NO: 71011 - RNA, 24 nt, Artificial Sequence
  Synthetic
acuuaggauaauuucuuuacuauu

SEQ ID NO: 71012 - RNA, 18 nt, Artificial Sequence
  Synthetic
aguggcuggggaccuauu

SEQ ID NO: 71013 - RNA, 19 nt, Artificial Sequence
  Synthetic
uaguggcuggggaccuauu

SEQ ID NO: 71014 - RNA, 20 nt, Artificial Sequence
  Synthetic
auaguggcuggggaccuauu

SEQ ID NO: 71015 - RNA, 21 nt, Artificial Sequence
  Synthetic
uauaguggcuggggaccuauu

SEQ ID NO: 71016 - RNA, 22 nt, Artificial Sequence
  Synthetic
uuauaguggcuggggaccuauu

SEQ ID NO: 71017 - RNA, 23 nt, Artificial Sequence
  Synthetic
uuuauaguggcuggggaccuauu

SEQ ID NO: 71018 - RNA, 24 nt, Artificial Sequence
  Synthetic
auuuauaguggcuggggaccuauu

SEQ ID NO: 71019 - RNA, 18 nt, Artificial Sequence
  Synthetic
ucaguagucuuaccuauu

SEQ ID NO: 71020 - RNA, 19 nt, Artificial Sequence
  Synthetic
uucaguagucuuaccuauu

SEQ ID NO: 71021 - RNA, 20 nt, Artificial Sequence
  Synthetic
cuucaguagucuuaccuauu

SEQ ID NO: 71022 - RNA, 21 nt, Artificial Sequence
  Synthetic
ccuucaguagucuuaccuauu

SEQ ID NO: 71023 - RNA, 22 nt, Artificial Sequence
  Synthetic
accuucaguagucuuaccuauu

SEQ ID NO: 71024 - RNA, 23 nt, Artificial Sequence
  Synthetic
uaccuucaguagucuuaccuauu

SEQ ID NO: 71025 - RNA, 24 nt, Artificial Sequence
  Synthetic
uuaccuucaguagucuuaccuauu

SEQ ID NO: 71026 - RNA, 18 nt, Artificial Sequence
  Synthetic
aaagccugcaguccuauu

SEQ ID NO: 71027 - RNA, 19 nt, Artificial Sequence
  Synthetic
uaaagccugcaguccuauu

SEQ ID NO: 71028 - RNA, 20 nt, Artificial Sequence
  Synthetic
uuaaagccugcaguccuauu

SEQ ID NO: 71029 - RNA, 21 nt, Artificial Sequence
  Synthetic
cuuaaagccugcaguccuauu

SEQ ID NO: 71030 - RNA, 22 nt, Artificial Sequence
  Synthetic
acuuaaagccugcaguccuauu

SEQ ID NO: 71031 - RNA, 23 nt, Artificial Sequence
  Synthetic
uacuuaaagccugcaguccuauu

SEQ ID NO: 71032 - RNA, 24 nt, Artificial Sequence
  Synthetic
cuacuuaaagccugcaguccuauu

SEQ ID NO: 71033 - RNA, 19 nt, Artificial Sequence
  Synthetic
uggaucuucguuuccuauu

SEQ ID NO: 71034 - RNA, 20 nt, Artificial Sequence
  Synthetic
cuggaucuucguuuccuauu

SEQ ID NO: 71035 - RNA, 21 nt, Artificial Sequence
  Synthetic
ucuggaucuucguuuccuauu

SEQ ID NO: 71036 - RNA, 22 nt, Artificial Sequence
  Synthetic
cucuggaucuucguuuccuauu

SEQ ID NO: 71037 - RNA, 23 nt, Artificial Sequence
  Synthetic
ucucuggaucuucguuuccuauu

SEQ ID NO: 71038 - RNA, 24 nt, Artificial Sequence
  Synthetic
aucucuggaucuucguuuccuauu

SEQ ID NO: 71039 - RNA, 21 nt, Artificial Sequence
  Synthetic
aagaucuguacuuuagcuauu

SEQ ID NO: 71040 - RNA, 22 nt, Artificial Sequence
  Synthetic
aaagaucuguacuuuagcuauu

SEQ ID NO: 71041 - RNA, 23 nt, Artificial Sequence
  Synthetic
caaagaucuguacuuuagcuauu

SEQ ID NO: 71042 - RNA, 18 nt, Artificial Sequence
  Synthetic
cuacuuaacaccgcuauu

SEQ ID NO: 71043 - RNA, 19 nt, Artificial Sequence
  Synthetic
acuacuuaacaccgcuauu

SEQ ID NO: 71044 - RNA, 21 nt, Artificial Sequence
  Synthetic
cgacuacuuaacaccgcuauu

SEQ ID NO: 71045 - RNA, 22 nt, Artificial Sequence
  Synthetic
acgacuacuuaacaccgcuauu

SEQ ID NO: 71046 - RNA, 23 nt, Artificial Sequence
  Synthetic
cacgacuacuuaacaccgcuauu

SEQ ID NO: 71047 - RNA, 24 nt, Artificial Sequence
  Synthetic
ccacgacuacuuaacaccgcuauu

SEQ ID NO: 71048 - RNA, 21 nt, Artificial Sequence
  Synthetic
uuacuucaauuuuuggcuauu

SEQ ID NO: 71049 - RNA, 23 nt, Artificial Sequence
  Synthetic
aguuacuucaauuuuuggcuauu

SEQ ID NO: 71050 - RNA, 24 nt, Artificial Sequence
  Synthetic
uaguuacuucaauuuuuggcuauu

SEQ ID NO: 71051 - RNA, 18 nt, Artificial Sequence
  Synthetic
aucgauuggcuugcuauu

SEQ ID NO: 71052 - RNA, 19 nt, Artificial Sequence
  Synthetic
aaucgauuggcuugcuauu

SEQ ID NO: 71053 - RNA, 20 nt, Artificial Sequence
  Synthetic
caaucgauuggcuugcuauu

SEQ ID NO: 71054 - RNA, 21 nt, Artificial Sequence
  Synthetic
ucaaucgauuggcuugcuauu

SEQ ID NO: 71055 - RNA, 23 nt, Artificial Sequence
  Synthetic
ugucaaucgauuggcuugcuauu

SEQ ID NO: 71056 - RNA, 24 nt, Artificial Sequence
  Synthetic
augucaaucgauuggcuugcuauu

SEQ ID NO: 71057 - RNA, 18 nt, Artificial Sequence
  Synthetic
ucucuccucacuucuauu

SEQ ID NO: 71058 - RNA, 19 nt, Artificial Sequence
  Synthetic
uucucuccucacuucuauu

SEQ ID NO: 71059 - RNA, 20 nt, Artificial Sequence
  Synthetic
auucucuccucacuucuauu

SEQ ID NO: 71060 - RNA, 21 nt, Artificial Sequence
  Synthetic
aauucucuccucacuucuauu

SEQ ID NO: 71061 - RNA, 22 nt, Artificial Sequence
  Synthetic
uaauucucuccucacuucuauu

SEQ ID NO: 71062 - RNA, 23 nt, Artificial Sequence
  Synthetic
auaauucucuccucacuucuauu

SEQ ID NO: 71063 - RNA, 24 nt, Artificial Sequence
  Synthetic
uauaauucucuccucacuucuauu

SEQ ID NO: 71064 - RNA, 18 nt, Artificial Sequence
  Synthetic
acuuauuccgcaaguauu

SEQ ID NO: 71065 - RNA, 19 nt, Artificial Sequence
  Synthetic
aacuuauuccgcaaguauu

SEQ ID NO: 71066 - RNA, 20 nt, Artificial Sequence
  Synthetic
aaacuuauuccgcaaguauu

SEQ ID NO: 71067 - RNA, 21 nt, Artificial Sequence
  Synthetic
uaaacuuauuccgcaaguauu

SEQ ID NO: 71068 - RNA, 23 nt, Artificial Sequence
  Synthetic
uguaaacuuauuccgcaaguauu

SEQ ID NO: 71069 - RNA, 24 nt, Artificial Sequence
  Synthetic
uuguaaacuuauuccgcaaguauu

SEQ ID NO: 71070 - RNA, 18 nt, Artificial Sequence
  Synthetic
cuuucagucgcaaguauu

SEQ ID NO: 71071 - RNA, 19 nt, Artificial Sequence
  Synthetic
acuuucagucgcaaguauu

SEQ ID NO: 71072 - RNA, 20 nt, Artificial Sequence
  Synthetic
uacuuucagucgcaaguauu

SEQ ID NO: 71073 - RNA, 21 nt, Artificial Sequence
  Synthetic
auacuuucagucgcaaguauu

SEQ ID NO: 71074 - RNA, 22 nt, Artificial Sequence
  Synthetic
aauacuuucagucgcaaguauu

SEQ ID NO: 71075 - RNA, 23 nt, Artificial Sequence
  Synthetic
aaauacuuucagucgcaaguauu

SEQ ID NO: 71076 - RNA, 18 nt, Artificial Sequence
  Synthetic
auuuuuccgugaaguauu

SEQ ID NO: 71077 - RNA, 19 nt, Artificial Sequence
  Synthetic
uauuuuuccgugaaguauu

SEQ ID NO: 71078 - RNA, 20 nt, Artificial Sequence
  Synthetic
auauuuuuccgugaaguauu

SEQ ID NO: 71079 - RNA, 21 nt, Artificial Sequence
  Synthetic
uauauuuuuccgugaaguauu

SEQ ID NO: 71080 - RNA, 22 nt, Artificial Sequence
  Synthetic
uuauauuuuuccgugaaguauu

SEQ ID NO: 71081 - RNA, 24 nt, Artificial Sequence
  Synthetic
uguuauauuuuuccgugaaguauu

SEQ ID NO: 71082 - RNA, 18 nt, Artificial Sequence
  Synthetic
uuaaugauacuaaguauu

SEQ ID NO: 71083 - RNA, 19 nt, Artificial Sequence
  Synthetic
uuuaaugauacuaaguauu

SEQ ID NO: 71084 - RNA, 20 nt, Artificial Sequence
  Synthetic
cuuuaaugauacuaaguauu

SEQ ID NO: 71085 - RNA, 22 nt, Artificial Sequence
  Synthetic
ugcuuuaaugauacuaaguauu

SEQ ID NO: 71086 - RNA, 23 nt, Artificial Sequence
  Synthetic
uugcuuuaaugauacuaaguauu

SEQ ID NO: 71087 - RNA, 24 nt, Artificial Sequence
  Synthetic
auugcuuuaaugauacuaaguauu

SEQ ID NO: 71088 - RNA, 21 nt, Artificial Sequence
  Synthetic
agaugucauaaaagcaguauu

SEQ ID NO: 71089 - RNA, 23 nt, Artificial Sequence
  Synthetic
ugagaugucauaaaagcaguauu

SEQ ID NO: 71090 - RNA, 18 nt, Artificial Sequence
  Synthetic
agggagggcaggaguauu

SEQ ID NO: 71091 - RNA, 19 nt, Artificial Sequence
  Synthetic
cagggagggcaggaguauu

SEQ ID NO: 71092 - RNA, 21 nt, Artificial Sequence
  Synthetic
agcagggagggcaggaguauu

SEQ ID NO: 71093 - RNA, 22 nt, Artificial Sequence
  Synthetic
aagcagggagggcaggaguauu

SEQ ID NO: 71094 - RNA, 23 nt, Artificial Sequence
  Synthetic
aaagcagggagggcaggaguauu

SEQ ID NO: 71095 - RNA, 24 nt, Artificial Sequence
  Synthetic
aaaagcagggagggcaggaguauu

SEQ ID NO: 71096 - RNA, 18 nt, Artificial Sequence
  Synthetic
cuaguuuuacuuaguauu

SEQ ID NO: 71097 - RNA, 19 nt, Artificial Sequence
  Synthetic
acuaguuuuacuuaguauu

SEQ ID NO: 71098 - RNA, 20 nt, Artificial Sequence
  Synthetic
uacuaguuuuacuuaguauu

SEQ ID NO: 71099 - RNA, 21 nt, Artificial Sequence
  Synthetic
uuacuaguuuuacuuaguauu

SEQ ID NO: 71100 - RNA, 22 nt, Artificial Sequence
  Synthetic
auuacuaguuuuacuuaguauu

SEQ ID NO: 71101 - RNA, 24 nt, Artificial Sequence
  Synthetic
agauuacuaguuuuacuuaguauu

SEQ ID NO: 71102 - RNA, 18 nt, Artificial Sequence
  Synthetic
aaagagaguaaacguauu

SEQ ID NO: 71103 - RNA, 20 nt, Artificial Sequence
  Synthetic
agaaagagaguaaacguauu

SEQ ID NO: 71104 - RNA, 22 nt, Artificial Sequence
  Synthetic
agagaaagagaguaaacguauu

SEQ ID NO: 71105 - RNA, 23 nt, Artificial Sequence
  Synthetic
cagagaaagagaguaaacguauu

SEQ ID NO: 71106 - RNA, 18 nt, Artificial Sequence
  Synthetic
uucauucauucacguauu

SEQ ID NO: 71107 - RNA, 19 nt, Artificial Sequence
  Synthetic
cuucauucauucacguauu

SEQ ID NO: 71108 - RNA, 20 nt, Artificial Sequence
  Synthetic
ccuucauucauucacguauu

SEQ ID NO: 71109 - RNA, 21 nt, Artificial Sequence
  Synthetic
uccuucauucauucacguauu

SEQ ID NO: 71110 - RNA, 22 nt, Artificial Sequence
  Synthetic
uuccuucauucauucacguauu

SEQ ID NO: 71111 - RNA, 23 nt, Artificial Sequence
  Synthetic
auuccuucauucauucacguauu

SEQ ID NO: 71112 - RNA, 24 nt, Artificial Sequence
  Synthetic
cauuccuucauucauucacguauu

SEQ ID NO: 71113 - RNA, 18 nt, Artificial Sequence
  Synthetic
cccacuuggaaagguauu

SEQ ID NO: 71114 - RNA, 19 nt, Artificial Sequence
  Synthetic
ucccacuuggaaagguauu

SEQ ID NO: 71115 - RNA, 20 nt, Artificial Sequence
  Synthetic
aucccacuuggaaagguauu

SEQ ID NO: 71116 - RNA, 22 nt, Artificial Sequence
  Synthetic
ugaucccacuuggaaagguauu

SEQ ID NO: 71117 - RNA, 23 nt, Artificial Sequence
  Synthetic
uugaucccacuuggaaagguauu

SEQ ID NO: 71118 - RNA, 19 nt, Artificial Sequence
  Synthetic
cgauguuuuacuagguauu

SEQ ID NO: 71119 - RNA, 20 nt, Artificial Sequence
  Synthetic
ccgauguuuuacuagguauu

SEQ ID NO: 71120 - RNA, 21 nt, Artificial Sequence
  Synthetic
uccgauguuuuacuagguauu

SEQ ID NO: 71121 - RNA, 22 nt, Artificial Sequence
  Synthetic
auccgauguuuuacuagguauu

SEQ ID NO: 71122 - RNA, 23 nt, Artificial Sequence
  Synthetic
cauccgauguuuuacuagguauu

SEQ ID NO: 71123 - RNA, 24 nt, Artificial Sequence
  Synthetic
acauccgauguuuuacuagguauu

SEQ ID NO: 71124 - RNA, 18 nt, Artificial Sequence
  Synthetic
aaaagggguuuagguauu

SEQ ID NO: 71125 - RNA, 19 nt, Artificial Sequence
  Synthetic
aaaaagggguuuagguauu

SEQ ID NO: 71126 - RNA, 20 nt, Artificial Sequence
  Synthetic
aaaaaagggguuuagguauu

SEQ ID NO: 71127 - RNA, 22 nt, Artificial Sequence
  Synthetic
agaaaaaagggguuuagguauu

SEQ ID NO: 71128 - RNA, 23 nt, Artificial Sequence
  Synthetic
aagaaaaaagggguuuagguauu

SEQ ID NO: 71129 - RNA, 24 nt, Artificial Sequence
  Synthetic
aaagaaaaaagggguuuagguauu

SEQ ID NO: 71130 - RNA, 18 nt, Artificial Sequence
  Synthetic
aguuagagagcugguauu

SEQ ID NO: 71131 - RNA, 19 nt, Artificial Sequence
  Synthetic
caguuagagagcugguauu

SEQ ID NO: 71132 - RNA, 20 nt, Artificial Sequence
  Synthetic
ucaguuagagagcugguauu

SEQ ID NO: 71133 - RNA, 19 nt, Artificial Sequence
  Synthetic
agaaaugucauuugguauu

SEQ ID NO: 71134 - RNA, 20 nt, Artificial Sequence
  Synthetic
cagaaaugucauuugguauu

SEQ ID NO: 71135 - RNA, 22 nt, Artificial Sequence
  Synthetic
agcagaaaugucauuugguauu

SEQ ID NO: 71136 - RNA, 23 nt, Artificial Sequence
  Synthetic
uagcagaaaugucauuugguauu

SEQ ID NO: 71137 - RNA, 24 nt, Artificial Sequence
  Synthetic
cuagcagaaaugucauuugguauu

SEQ ID NO: 71138 - RNA, 18 nt, Artificial Sequence
  Synthetic
agaaugauucacuguauu

SEQ ID NO: 71139 - RNA, 19 nt, Artificial Sequence
  Synthetic
cagaaugauucacuguauu

SEQ ID NO: 71140 - RNA, 20 nt, Artificial Sequence
  Synthetic
ucagaaugauucacuguauu

SEQ ID NO: 71141 - RNA, 21 nt, Artificial Sequence
  Synthetic
uucagaaugauucacuguauu

SEQ ID NO: 71142 - RNA, 22 nt, Artificial Sequence
  Synthetic
uuucagaaugauucacuguauu

SEQ ID NO: 71143 - RNA, 23 nt, Artificial Sequence
  Synthetic
auuucagaaugauucacuguauu

SEQ ID NO: 71144 - RNA, 24 nt, Artificial Sequence
  Synthetic
aauuucagaaugauucacuguauu

SEQ ID NO: 71145 - RNA, 21 nt, Artificial Sequence
  Synthetic
uuucuaaaccaguacuguauu

SEQ ID NO: 71146 - RNA, 18 nt, Artificial Sequence
  Synthetic
uguuuuaauuaguguauu

SEQ ID NO: 71147 - RNA, 19 nt, Artificial Sequence
  Synthetic
uuguuuuaauuaguguauu

SEQ ID NO: 71148 - RNA, 20 nt, Artificial Sequence
  Synthetic
auuguuuuaauuaguguauu

SEQ ID NO: 71149 - RNA, 21 nt, Artificial Sequence
  Synthetic
uauuguuuuaauuaguguauu

SEQ ID NO: 71150 - RNA, 22 nt, Artificial Sequence
  Synthetic
auauuguuuuaauuaguguauu

SEQ ID NO: 71151 - RNA, 23 nt, Artificial Sequence
  Synthetic
aauauuguuuuaauuaguguauu

SEQ ID NO: 71152 - RNA, 24 nt, Artificial Sequence
  Synthetic
aaauauuguuuuaauuaguguauu

SEQ ID NO: 71153 - RNA, 21 nt, Artificial Sequence
  Synthetic
uuuccauauacauguuguauu

SEQ ID NO: 71154 - RNA, 22 nt, Artificial Sequence
  Synthetic
auuuccauauacauguuguauu

SEQ ID NO: 71155 - RNA, 23 nt, Artificial Sequence
  Synthetic
uauuuccauauacauguuguauu

SEQ ID NO: 71156 - RNA, 18 nt, Artificial Sequence
  Synthetic
agaguaggauaaauuauu

SEQ ID NO: 71157 - RNA, 19 nt, Artificial Sequence
  Synthetic
cagaguaggauaaauuauu

SEQ ID NO: 71158 - RNA, 20 nt, Artificial Sequence
  Synthetic
acagaguaggauaaauuauu

SEQ ID NO: 71159 - RNA, 21 nt, Artificial Sequence
  Synthetic
cacagaguaggauaaauuauu

SEQ ID NO: 71160 - RNA, 22 nt, Artificial Sequence
  Synthetic
ccacagaguaggauaaauuauu

SEQ ID NO: 71161 - RNA, 23 nt, Artificial Sequence
  Synthetic
cccacagaguaggauaaauuauu

SEQ ID NO: 71162 - RNA, 24 nt, Artificial Sequence
  Synthetic
acccacagaguaggauaaauuauu

SEQ ID NO: 71163 - RNA, 18 nt, Artificial Sequence
  Synthetic
ucaacuauccucauuauu

SEQ ID NO: 71164 - RNA, 19 nt, Artificial Sequence
  Synthetic
aucaacuauccucauuauu

SEQ ID NO: 71165 - RNA, 20 nt, Artificial Sequence
  Synthetic
aaucaacuauccucauuauu

SEQ ID NO: 71166 - RNA, 21 nt, Artificial Sequence
  Synthetic
caaucaacuauccucauuauu

SEQ ID NO: 71167 - RNA, 22 nt, Artificial Sequence
  Synthetic
acaaucaacuauccucauuauu

SEQ ID NO: 71168 - RNA, 23 nt, Artificial Sequence
  Synthetic
aacaaucaacuauccucauuauu

SEQ ID NO: 71169 - RNA, 24 nt, Artificial Sequence
  Synthetic
uaacaaucaacuauccucauuauu

SEQ ID NO: 71170 - RNA, 18 nt, Artificial Sequence
  Synthetic
uugaauaauuggauuauu

SEQ ID NO: 71171 - RNA, 19 nt, Artificial Sequence
  Synthetic
uuugaauaauuggauuauu

SEQ ID NO: 71172 - RNA, 20 nt, Artificial Sequence
  Synthetic
uuuugaauaauuggauuauu

SEQ ID NO: 71173 - RNA, 21 nt, Artificial Sequence
  Synthetic
cuuuugaauaauuggauuauu

SEQ ID NO: 71174 - RNA, 22 nt, Artificial Sequence
  Synthetic
ccuuuugaauaauuggauuauu

SEQ ID NO: 71175 - RNA, 24 nt, Artificial Sequence
  Synthetic
ugccuuuugaauaauuggauuauu

SEQ ID NO: 71176 - RNA, 21 nt, Artificial Sequence
  Synthetic
cguagccuccagcauauuauu

SEQ ID NO: 71177 - RNA, 22 nt, Artificial Sequence
  Synthetic
ccguagccuccagcauauuauu

SEQ ID NO: 71178 - RNA, 23 nt, Artificial Sequence
  Synthetic
cccguagccuccagcauauuauu

SEQ ID NO: 71179 - RNA, 24 nt, Artificial Sequence
  Synthetic
ucccguagccuccagcauauuauu

SEQ ID NO: 71180 - RNA, 21 nt, Artificial Sequence
  Synthetic
uuauuuauucaauauauuauu

SEQ ID NO: 71181 - RNA, 22 nt, Artificial Sequence
  Synthetic
uuuauuuauucaauauauuauu

SEQ ID NO: 71182 - RNA, 23 nt, Artificial Sequence
  Synthetic
uuuuauuuauucaauauauuauu

SEQ ID NO: 71183 - RNA, 24 nt, Artificial Sequence
  Synthetic
uuuuuauuuauucaauauauuauu

SEQ ID NO: 71184 - RNA, 19 nt, Artificial Sequence
  Synthetic
ugagguaggcaguauuauu

SEQ ID NO: 71185 - RNA, 20 nt, Artificial Sequence
  Synthetic
augagguaggcaguauuauu

SEQ ID NO: 71186 - RNA, 21 nt, Artificial Sequence
  Synthetic
aaugagguaggcaguauuauu

SEQ ID NO: 71187 - RNA, 23 nt, Artificial Sequence
  Synthetic
ugaaugagguaggcaguauuauu

SEQ ID NO: 71188 - RNA, 24 nt, Artificial Sequence
  Synthetic
cugaaugagguaggcaguauuauu

SEQ ID NO: 71189 - RNA, 18 nt, Artificial Sequence
  Synthetic
ugugucauagcgcuuauu

SEQ ID NO: 71190 - RNA, 19 nt, Artificial Sequence
  Synthetic
augugucauagcgcuuauu

SEQ ID NO: 71191 - RNA, 21 nt, Artificial Sequence
  Synthetic
agaugugucauagcgcuuauu

SEQ ID NO: 71192 - RNA, 23 nt, Artificial Sequence
  Synthetic
cgagaugugucauagcgcuuauu

SEQ ID NO: 71193 - RNA, 24 nt, Artificial Sequence
  Synthetic
ucgagaugugucauagcgcuuauu

SEQ ID NO: 71194 - RNA, 18 nt, Artificial Sequence
  Synthetic
agauaugcacuucuuauu

SEQ ID NO: 71195 - RNA, 19 nt, Artificial Sequence
  Synthetic
uagauaugcacuucuuauu

SEQ ID NO: 71196 - RNA, 20 nt, Artificial Sequence
  Synthetic
uuagauaugcacuucuuauu

SEQ ID NO: 71197 - RNA, 22 nt, Artificial Sequence
  Synthetic
aguuagauaugcacuucuuauu

SEQ ID NO: 71198 - RNA, 20 nt, Artificial Sequence
  Synthetic
aggauaaugucguucuuauu

SEQ ID NO: 71199 - RNA, 22 nt, Artificial Sequence
  Synthetic
agaggauaaugucguucuuauu

SEQ ID NO: 71200 - RNA, 24 nt, Artificial Sequence
  Synthetic
ugagaggauaaugucguucuuauu

SEQ ID NO: 71201 - RNA, 18 nt, Artificial Sequence
  Synthetic
ugcugaggaaaaguuauu

SEQ ID NO: 71202 - RNA, 19 nt, Artificial Sequence
  Synthetic
augcugaggaaaaguuauu

SEQ ID NO: 71203 - RNA, 20 nt, Artificial Sequence
  Synthetic
uaugcugaggaaaaguuauu

SEQ ID NO: 71204 - RNA, 21 nt, Artificial Sequence
  Synthetic
auaugcugaggaaaaguuauu

SEQ ID NO: 71205 - RNA, 22 nt, Artificial Sequence
  Synthetic
aauaugcugaggaaaaguuauu

SEQ ID NO: 71206 - RNA, 19 nt, Artificial Sequence
  Synthetic
uguuuuucucuaaguuauu

SEQ ID NO: 71207 - RNA, 20 nt, Artificial Sequence
  Synthetic
cuguuuuucucuaaguuauu

SEQ ID NO: 71208 - RNA, 21 nt, Artificial Sequence
  Synthetic
ucuguuuuucucuaaguuauu

SEQ ID NO: 71209 - RNA, 22 nt, Artificial Sequence
  Synthetic
uucuguuuuucucuaaguuauu

SEQ ID NO: 71210 - RNA, 24 nt, Artificial Sequence
  Synthetic
uguucuguuuuucucuaaguuauu

SEQ ID NO: 71211 - RNA, 19 nt, Artificial Sequence
  Synthetic
uguuauagguagcguuauu

SEQ ID NO: 71212 - RNA, 20 nt, Artificial Sequence
  Synthetic
auguuauagguagcguuauu

SEQ ID NO: 71213 - RNA, 21 nt, Artificial Sequence
  Synthetic
uauguuauagguagcguuauu

SEQ ID NO: 71214 - RNA, 22 nt, Artificial Sequence
  Synthetic
uuauguuauagguagcguuauu

SEQ ID NO: 71215 - RNA, 23 nt, Artificial Sequence
  Synthetic
uuuauguuauagguagcguuauu

SEQ ID NO: 71216 - RNA, 24 nt, Artificial Sequence
  Synthetic
auuuauguuauagguagcguuauu

SEQ ID NO: 71217 - RNA, 18 nt, Artificial Sequence
  Synthetic
aacccuaagccuguuauu

SEQ ID NO: 71218 - RNA, 19 nt, Artificial Sequence
  Synthetic
uaacccuaagccuguuauu

SEQ ID NO: 71219 - RNA, 20 nt, Artificial Sequence
  Synthetic
cuaacccuaagccuguuauu

SEQ ID NO: 71220 - RNA, 22 nt, Artificial Sequence
  Synthetic
agcuaacccuaagccuguuauu

SEQ ID NO: 71221 - RNA, 24 nt, Artificial Sequence
  Synthetic
agagcuaacccuaagccuguuauu

SEQ ID NO: 71222 - RNA, 18 nt, Artificial Sequence
  Synthetic
aagcuaauuccuguuauu

SEQ ID NO: 71223 - RNA, 20 nt, Artificial Sequence
  Synthetic
ugaagcuaauuccuguuauu

SEQ ID NO: 71224 - RNA, 21 nt, Artificial Sequence
  Synthetic
augaagcuaauuccuguuauu

SEQ ID NO: 71225 - RNA, 22 nt, Artificial Sequence
  Synthetic
uaugaagcuaauuccuguuauu

SEQ ID NO: 71226 - RNA, 23 nt, Artificial Sequence
  Synthetic
auaugaagcuaauuccuguuauu

SEQ ID NO: 71227 - RNA, 24 nt, Artificial Sequence
  Synthetic
aauaugaagcuaauuccuguuauu

SEQ ID NO: 71228 - RNA, 18 nt, Artificial Sequence
  Synthetic
acucucaaacuuguuauu

SEQ ID NO: 71229 - RNA, 19 nt, Artificial Sequence
  Synthetic
aacucucaaacuuguuauu

SEQ ID NO: 71230 - RNA, 20 nt, Artificial Sequence
  Synthetic
uaacucucaaacuuguuauu

SEQ ID NO: 71231 - RNA, 24 nt, Artificial Sequence
  Synthetic
aggguaacucucaaacuuguuauu

SEQ ID NO: 71232 - RNA, 21 nt, Artificial Sequence
  Synthetic
uucugucuccaaaaauuuauu

SEQ ID NO: 71233 - RNA, 22 nt, Artificial Sequence
  Synthetic
cuucugucuccaaaaauuuauu

SEQ ID NO: 71234 - RNA, 23 nt, Artificial Sequence
  Synthetic
acuucugucuccaaaaauuuauu

SEQ ID NO: 71235 - RNA, 24 nt, Artificial Sequence
  Synthetic
aacuucugucuccaaaaauuuauu

SEQ ID NO: 71236 - RNA, 22 nt, Artificial Sequence
  Synthetic
uguaguuuuuagcaaauuuauu

SEQ ID NO: 71237 - RNA, 23 nt, Artificial Sequence
  Synthetic
auguaguuuuuagcaaauuuauu

SEQ ID NO: 71238 - RNA, 24 nt, Artificial Sequence
  Synthetic
aauguaguuuuuagcaaauuuauu

SEQ ID NO: 71239 - RNA, 18 nt, Artificial Sequence
  Synthetic
auagcaucugaauuuauu

SEQ ID NO: 71240 - RNA, 19 nt, Artificial Sequence
  Synthetic
cauagcaucugaauuuauu

SEQ ID NO: 71241 - RNA, 21 nt, Artificial Sequence
  Synthetic
agcauagcaucugaauuuauu

SEQ ID NO: 71242 - RNA, 23 nt, Artificial Sequence
  Synthetic
agagcauagcaucugaauuuauu

SEQ ID NO: 71243 - RNA, 24 nt, Artificial Sequence
  Synthetic
aagagcauagcaucugaauuuauu

SEQ ID NO: 71244 - RNA, 18 nt, Artificial Sequence
  Synthetic
ucugacaaauaauuuauu

SEQ ID NO: 71245 - RNA, 19 nt, Artificial Sequence
  Synthetic
aucugacaaauaauuuauu

SEQ ID NO: 71246 - RNA, 20 nt, Artificial Sequence
  Synthetic
aaucugacaaauaauuuauu

SEQ ID NO: 71247 - RNA, 21 nt, Artificial Sequence
  Synthetic
uaaucugacaaauaauuuauu

SEQ ID NO: 71248 - RNA, 22 nt, Artificial Sequence
  Synthetic
cuaaucugacaaauaauuuauu

SEQ ID NO: 71249 - RNA, 23 nt, Artificial Sequence
  Synthetic
acuaaucugacaaauaauuuauu

SEQ ID NO: 71250 - RNA, 24 nt, Artificial Sequence
  Synthetic
uacuaaucugacaaauaauuuauu

SEQ ID NO: 71251 - RNA, 18 nt, Artificial Sequence
  Synthetic
acuugggaucgauuuauu

SEQ ID NO: 71252 - RNA, 19 nt, Artificial Sequence
  Synthetic
cacuugggaucgauuuauu

SEQ ID NO: 71253 - RNA, 22 nt, Artificial Sequence
  Synthetic
uggcacuugggaucgauuuauu

SEQ ID NO: 71254 - RNA, 23 nt, Artificial Sequence
  Synthetic
cuggcacuugggaucgauuuauu

SEQ ID NO: 71255 - RNA, 24 nt, Artificial Sequence
  Synthetic
ucuggcacuugggaucgauuuauu

SEQ ID NO: 71256 - RNA, 21 nt, Artificial Sequence
  Synthetic
cuaguuuuaaaaguauuuauu

SEQ ID NO: 71257 - RNA, 22 nt, Artificial Sequence
  Synthetic
acuaguuuuaaaaguauuuauu

SEQ ID NO: 71258 - RNA, 23 nt, Artificial Sequence
  Synthetic
aacuaguuuuaaaaguauuuauu

SEQ ID NO: 71259 - RNA, 24 nt, Artificial Sequence
  Synthetic
uaacuaguuuuaaaaguauuuauu

SEQ ID NO: 71260 - RNA, 18 nt, Artificial Sequence
  Synthetic
ucagacacuaacuuuauu

SEQ ID NO: 71261 - RNA, 19 nt, Artificial Sequence
  Synthetic
uucagacacuaacuuuauu

SEQ ID NO: 71262 - RNA, 20 nt, Artificial Sequence
  Synthetic
uuucagacacuaacuuuauu

SEQ ID NO: 71263 - RNA, 21 nt, Artificial Sequence
  Synthetic
uuuucagacacuaacuuuauu

SEQ ID NO: 71264 - RNA, 24 nt, Artificial Sequence
  Synthetic
agguuuucagacacuaacuuuauu

SEQ ID NO: 71265 - RNA, 18 nt, Artificial Sequence
  Synthetic
auuaaaauaggcuuuauu

SEQ ID NO: 71266 - RNA, 19 nt, Artificial Sequence
  Synthetic
cauuaaaauaggcuuuauu

SEQ ID NO: 71267 - RNA, 20 nt, Artificial Sequence
  Synthetic
acauuaaaauaggcuuuauu

SEQ ID NO: 71268 - RNA, 21 nt, Artificial Sequence
  Synthetic
uacauuaaaauaggcuuuauu

SEQ ID NO: 71269 - RNA, 22 nt, Artificial Sequence
  Synthetic
auacauuaaaauaggcuuuauu

SEQ ID NO: 71270 - RNA, 24 nt, Artificial Sequence
  Synthetic
ugauacauuaaaauaggcuuuauu

SEQ ID NO: 71271 - RNA, 21 nt, Artificial Sequence
  Synthetic
aauuuaucuuugcuguuuauu

SEQ ID NO: 71272 - RNA, 22 nt, Artificial Sequence
  Synthetic
aaauuuaucuuugcuguuuauu

SEQ ID NO: 71273 - RNA, 23 nt, Artificial Sequence
  Synthetic
aaaauuuaucuuugcuguuuauu

SEQ ID NO: 71274 - RNA, 18 nt, Artificial Sequence
  Synthetic
auacuggcuccuuuuauu

SEQ ID NO: 71275 - RNA, 19 nt, Artificial Sequence
  Synthetic
cauacuggcuccuuuuauu

SEQ ID NO: 71276 - RNA, 20 nt, Artificial Sequence
  Synthetic
ucauacuggcuccuuuuauu

SEQ ID NO: 71277 - RNA, 21 nt, Artificial Sequence
  Synthetic
uucauacuggcuccuuuuauu

SEQ ID NO: 71278 - RNA, 23 nt, Artificial Sequence
  Synthetic
uguucauacuggcuccuuuuauu

SEQ ID NO: 71279 - RNA, 24 nt, Artificial Sequence
  Synthetic
auguucauacuggcuccuuuuauu

SEQ ID NO: 71280 - RNA, 18 nt, Artificial Sequence
  Synthetic
ucagaguaaaguuuuauu

SEQ ID NO: 71281 - RNA, 19 nt, Artificial Sequence
  Synthetic
uucagaguaaaguuuuauu

SEQ ID NO: 71282 - RNA, 20 nt, Artificial Sequence
  Synthetic
uuucagaguaaaguuuuauu

SEQ ID NO: 71283 - RNA, 21 nt, Artificial Sequence
  Synthetic
cuuucagaguaaaguuuuauu

SEQ ID NO: 71284 - RNA, 22 nt, Artificial Sequence
  Synthetic
ccuuucagaguaaaguuuuauu

SEQ ID NO: 71285 - RNA, 24 nt, Artificial Sequence
  Synthetic
ugccuuucagaguaaaguuuuauu

SEQ ID NO: 71286 - RNA, 22 nt, Artificial Sequence
  Synthetic
agaaauaaauucaaguuuuauu

SEQ ID NO: 71287 - RNA, 23 nt, Artificial Sequence
  Synthetic
uagaaauaaauucaaguuuuauu

SEQ ID NO: 71288 - RNA, 24 nt, Artificial Sequence
  Synthetic
cuagaaauaaauucaaguuuuauu

SEQ ID NO: 71289 - RNA, 18 nt, Artificial Sequence
  Synthetic
aacaguuucuguuuuauu

SEQ ID NO: 71290 - RNA, 19 nt, Artificial Sequence
  Synthetic
caacaguuucuguuuuauu

SEQ ID NO: 71291 - RNA, 20 nt, Artificial Sequence
  Synthetic
ccaacaguuucuguuuuauu

SEQ ID NO: 71292 - RNA, 21 nt, Artificial Sequence
  Synthetic
uccaacaguuucuguuuuauu

SEQ ID NO: 71293 - RNA, 22 nt, Artificial Sequence
  Synthetic
auccaacaguuucuguuuuauu

SEQ ID NO: 71294 - RNA, 23 nt, Artificial Sequence
  Synthetic
uauccaacaguuucuguuuuauu

SEQ ID NO: 71295 - RNA, 18 nt, Artificial Sequence
  Synthetic
aggaucccagaaaaacuu

SEQ ID NO: 71296 - RNA, 19 nt, Artificial Sequence
  Synthetic
caggaucccagaaaaacuu

SEQ ID NO: 71297 - RNA, 20 nt, Artificial Sequence
  Synthetic
ucaggaucccagaaaaacuu

SEQ ID NO: 71298 - RNA, 21 nt, Artificial Sequence
  Synthetic
uucaggaucccagaaaaacuu

SEQ ID NO: 71299 - RNA, 22 nt, Artificial Sequence
  Synthetic
uuucaggaucccagaaaaacuu

SEQ ID NO: 71300 - RNA, 23 nt, Artificial Sequence
  Synthetic
uuuucaggaucccagaaaaacuu

SEQ ID NO: 71301 - RNA, 24 nt, Artificial Sequence
  Synthetic
uuuuucaggaucccagaaaaacuu

SEQ ID NO: 71302 - RNA, 21 nt, Artificial Sequence
  Synthetic
aucaaaaaauguuaaaaacuu

SEQ ID NO: 71303 - RNA, 22 nt, Artificial Sequence
  Synthetic
caucaaaaaauguuaaaaacuu

SEQ ID NO: 71304 - RNA, 18 nt, Artificial Sequence
  Synthetic
cuuuaacauucaaaacuu

SEQ ID NO: 71305 - RNA, 19 nt, Artificial Sequence
  Synthetic
ucuuuaacauucaaaacuu

SEQ ID NO: 71306 - RNA, 20 nt, Artificial Sequence
  Synthetic
uucuuuaacauucaaaacuu

SEQ ID NO: 71307 - RNA, 21 nt, Artificial Sequence
  Synthetic
cuucuuuaacauucaaaacuu

SEQ ID NO: 71308 - RNA, 22 nt, Artificial Sequence
  Synthetic
ccuucuuuaacauucaaaacuu

SEQ ID NO: 71309 - RNA, 23 nt, Artificial Sequence
  Synthetic
accuucuuuaacauucaaaacuu

SEQ ID NO: 71310 - RNA, 24 nt, Artificial Sequence
  Synthetic
aaccuucuuuaacauucaaaacuu

SEQ ID NO: 71311 - RNA, 21 nt, Artificial Sequence
  Synthetic
uaaauuauucuuugaaaacuu

SEQ ID NO: 71312 - RNA, 22 nt, Artificial Sequence
  Synthetic
uuaaauuauucuuugaaaacuu

SEQ ID NO: 71313 - RNA, 23 nt, Artificial Sequence
  Synthetic
uuuaaauuauucuuugaaaacuu

SEQ ID NO: 71314 - RNA, 21 nt, Artificial Sequence
  Synthetic
aucaaauaugccuuaaaacuu

SEQ ID NO: 71315 - RNA, 22 nt, Artificial Sequence
  Synthetic
aaucaaauaugccuuaaaacuu

SEQ ID NO: 71316 - RNA, 23 nt, Artificial Sequence
  Synthetic
aaaucaaauaugccuuaaaacuu

SEQ ID NO: 71317 - RNA, 24 nt, Artificial Sequence
  Synthetic
uaaaucaaauaugccuuaaaacuu

SEQ ID NO: 71318 - RNA, 18 nt, Artificial Sequence
  Synthetic
aggaggcccaucaaacuu

SEQ ID NO: 71319 - RNA, 20 nt, Artificial Sequence
  Synthetic
agaggaggcccaucaaacuu

SEQ ID NO: 71320 - RNA, 22 nt, Artificial Sequence
  Synthetic
agagaggaggcccaucaaacuu

SEQ ID NO: 71321 - RNA, 23 nt, Artificial Sequence
  Synthetic
cagagaggaggcccaucaaacuu

SEQ ID NO: 71322 - RNA, 24 nt, Artificial Sequence
  Synthetic
acagagaggaggcccaucaaacuu

SEQ ID NO: 71323 - RNA, 19 nt, Artificial Sequence
  Synthetic
uguuucuuaaaugaaacuu

SEQ ID NO: 71324 - RNA, 20 nt, Artificial Sequence
  Synthetic
uuguuucuuaaaugaaacuu

SEQ ID NO: 71325 - RNA, 18 nt, Artificial Sequence
  Synthetic
uuagaauuuucuaaacuu

SEQ ID NO: 71326 - RNA, 19 nt, Artificial Sequence
  Synthetic
uuuagaauuuucuaaacuu

SEQ ID NO: 71327 - RNA, 20 nt, Artificial Sequence
  Synthetic
auuuagaauuuucuaaacuu

SEQ ID NO: 71328 - RNA, 22 nt, Artificial Sequence
  Synthetic
ugauuuagaauuuucuaaacuu

SEQ ID NO: 71329 - RNA, 23 nt, Artificial Sequence
  Synthetic
uugauuuagaauuuucuaaacuu

SEQ ID NO: 71330 - RNA, 24 nt, Artificial Sequence
  Synthetic
uuugauuuagaauuuucuaaacuu

SEQ ID NO: 71331 - RNA, 19 nt, Artificial Sequence
  Synthetic
aggcaagccaucacaacuu

SEQ ID NO: 71332 - RNA, 20 nt, Artificial Sequence
  Synthetic
aaggcaagccaucacaacuu

SEQ ID NO: 71333 - RNA, 21 nt, Artificial Sequence
  Synthetic
uaaggcaagccaucacaacuu

SEQ ID NO: 71334 - RNA, 22 nt, Artificial Sequence
  Synthetic
auaaggcaagccaucacaacuu

SEQ ID NO: 71335 - RNA, 23 nt, Artificial Sequence
  Synthetic
cauaaggcaagccaucacaacuu

SEQ ID NO: 71336 - RNA, 24 nt, Artificial Sequence
  Synthetic
ucauaaggcaagccaucacaacuu

SEQ ID NO: 71337 - RNA, 19 nt, Artificial Sequence
  Synthetic
uggaucauuuugccaacuu

SEQ ID NO: 71338 - RNA, 20 nt, Artificial Sequence
  Synthetic
uuggaucauuuugccaacuu

SEQ ID NO: 71339 - RNA, 21 nt, Artificial Sequence
  Synthetic
uuuggaucauuuugccaacuu

SEQ ID NO: 71340 - RNA, 22 nt, Artificial Sequence
  Synthetic
auuuggaucauuuugccaacuu

SEQ ID NO: 71341 - RNA, 23 nt, Artificial Sequence
  Synthetic
aauuuggaucauuuugccaacuu

SEQ ID NO: 71342 - RNA, 18 nt, Artificial Sequence
  Synthetic
auaaguugugagcaacuu

SEQ ID NO: 71343 - RNA, 19 nt, Artificial Sequence
  Synthetic
uauaaguugugagcaacuu

SEQ ID NO: 71344 - RNA, 20 nt, Artificial Sequence
  Synthetic
auauaaguugugagcaacuu

SEQ ID NO: 71345 - RNA, 21 nt, Artificial Sequence
  Synthetic
cauauaaguugugagcaacuu

SEQ ID NO: 71346 - RNA, 22 nt, Artificial Sequence
  Synthetic
ucauauaaguugugagcaacuu

SEQ ID NO: 71347 - RNA, 23 nt, Artificial Sequence
  Synthetic
cucauauaaguugugagcaacuu

SEQ ID NO: 71348 - RNA, 24 nt, Artificial Sequence
  Synthetic
ucucauauaaguugugagcaacuu

SEQ ID NO: 71349 - RNA, 18 nt, Artificial Sequence
  Synthetic
uguauuguugggcaacuu

SEQ ID NO: 71350 - RNA, 19 nt, Artificial Sequence
  Synthetic
auguauuguugggcaacuu

SEQ ID NO: 71351 - RNA, 20 nt, Artificial Sequence
  Synthetic
aauguauuguugggcaacuu

SEQ ID NO: 71352 - RNA, 22 nt, Artificial Sequence
  Synthetic
ugaauguauuguugggcaacuu

SEQ ID NO: 71353 - RNA, 23 nt, Artificial Sequence
  Synthetic
augaauguauuguugggcaacuu

SEQ ID NO: 71354 - RNA, 24 nt, Artificial Sequence
  Synthetic
aaugaauguauuguugggcaacuu

SEQ ID NO: 71355 - RNA, 19 nt, Artificial Sequence
  Synthetic
aguucaaaccauggaacuu

SEQ ID NO: 71356 - RNA, 20 nt, Artificial Sequence
  Synthetic
caguucaaaccauggaacuu

SEQ ID NO: 71357 - RNA, 22 nt, Artificial Sequence
  Synthetic
agcaguucaaaccauggaacuu

SEQ ID NO: 71358 - RNA, 23 nt, Artificial Sequence
  Synthetic
cagcaguucaaaccauggaacuu

SEQ ID NO: 71359 - RNA, 18 nt, Artificial Sequence
  Synthetic
ugcucagagaaauaacuu

SEQ ID NO: 71360 - RNA, 19 nt, Artificial Sequence
  Synthetic
uugcucagagaaauaacuu

SEQ ID NO: 71361 - RNA, 20 nt, Artificial Sequence
  Synthetic
uuugcucagagaaauaacuu

SEQ ID NO: 71362 - RNA, 21 nt, Artificial Sequence
  Synthetic
cuuugcucagagaaauaacuu

SEQ ID NO: 71363 - RNA, 22 nt, Artificial Sequence
  Synthetic
acuuugcucagagaaauaacuu

SEQ ID NO: 71364 - RNA, 23 nt, Artificial Sequence
  Synthetic
aacuuugcucagagaaauaacuu

SEQ ID NO: 71365 - RNA, 24 nt, Artificial Sequence
  Synthetic
aaacuuugcucagagaaauaacuu

SEQ ID NO: 71366 - RNA, 18 nt, Artificial Sequence
  Synthetic
auuuuuauucaauaacuu

SEQ ID NO: 71367 - RNA, 20 nt, Artificial Sequence
  Synthetic
ugauuuuuauucaauaacuu

SEQ ID NO: 71368 - RNA, 21 nt, Artificial Sequence
  Synthetic
uugauuuuuauucaauaacuu

SEQ ID NO: 71369 - RNA, 23 nt, Artificial Sequence
  Synthetic
uguugauuuuuauucaauaacuu

SEQ ID NO: 71370 - RNA, 24 nt, Artificial Sequence
  Synthetic
uuguugauuuuuauucaauaacuu

SEQ ID NO: 71371 - RNA, 19 nt, Artificial Sequence
  Synthetic
ugaagccuugacauaacuu

SEQ ID NO: 71372 - RNA, 20 nt, Artificial Sequence
  Synthetic
uugaagccuugacauaacuu

SEQ ID NO: 71373 - RNA, 21 nt, Artificial Sequence
  Synthetic
auugaagccuugacauaacuu

SEQ ID NO: 71374 - RNA, 23 nt, Artificial Sequence
  Synthetic
ugauugaagccuugacauaacuu

SEQ ID NO: 71375 - RNA, 19 nt, Artificial Sequence
  Synthetic
agggcuuguuaccuaacuu

SEQ ID NO: 71376 - RNA, 20 nt, Artificial Sequence
  Synthetic
aagggcuuguuaccuaacuu

SEQ ID NO: 71377 - RNA, 21 nt, Artificial Sequence
  Synthetic
aaagggcuuguuaccuaacuu

SEQ ID NO: 71378 - RNA, 22 nt, Artificial Sequence
  Synthetic
uaaagggcuuguuaccuaacuu

SEQ ID NO: 71379 - RNA, 23 nt, Artificial Sequence
  Synthetic
uuaaagggcuuguuaccuaacuu

SEQ ID NO: 71380 - RNA, 24 nt, Artificial Sequence
  Synthetic
auuaaagggcuuguuaccuaacuu

SEQ ID NO: 71381 - RNA, 18 nt, Artificial Sequence
  Synthetic
aucugucugaaguaacuu

SEQ ID NO: 71382 - RNA, 19 nt, Artificial Sequence
  Synthetic
caucugucugaaguaacuu

SEQ ID NO: 71383 - RNA, 20 nt, Artificial Sequence
  Synthetic
ucaucugucugaaguaacuu

SEQ ID NO: 71384 - RNA, 21 nt, Artificial Sequence
  Synthetic
uucaucugucugaaguaacuu

SEQ ID NO: 71385 - RNA, 22 nt, Artificial Sequence
  Synthetic
cuucaucugucugaaguaacuu

SEQ ID NO: 71386 - RNA, 23 nt, Artificial Sequence
  Synthetic
acuucaucugucugaaguaacuu

SEQ ID NO: 71387 - RNA, 24 nt, Artificial Sequence
  Synthetic
aacuucaucugucugaaguaacuu

SEQ ID NO: 71388 - RNA, 18 nt, Artificial Sequence
  Synthetic
acucaaggaugguaacuu

SEQ ID NO: 71389 - RNA, 20 nt, Artificial Sequence
  Synthetic
agacucaaggaugguaacuu

SEQ ID NO: 71390 - RNA, 21 nt, Artificial Sequence
  Synthetic
uagacucaaggaugguaacuu

SEQ ID NO: 71391 - RNA, 22 nt, Artificial Sequence
  Synthetic
auagacucaaggaugguaacuu

SEQ ID NO: 71392 - RNA, 23 nt, Artificial Sequence
  Synthetic
aauagacucaaggaugguaacuu

SEQ ID NO: 71393 - RNA, 24 nt, Artificial Sequence
  Synthetic
uaauagacucaaggaugguaacuu

SEQ ID NO: 71394 - RNA, 18 nt, Artificial Sequence
  Synthetic
cuacugauuuauuaacuu

SEQ ID NO: 71395 - RNA, 19 nt, Artificial Sequence
  Synthetic
ccuacugauuuauuaacuu

SEQ ID NO: 71396 - RNA, 20 nt, Artificial Sequence
  Synthetic
accuacugauuuauuaacuu

SEQ ID NO: 71397 - RNA, 21 nt, Artificial Sequence
  Synthetic
uaccuacugauuuauuaacuu

SEQ ID NO: 71398 - RNA, 22 nt, Artificial Sequence
  Synthetic
uuaccuacugauuuauuaacuu

SEQ ID NO: 71399 - RNA, 23 nt, Artificial Sequence
  Synthetic
cuuaccuacugauuuauuaacuu

SEQ ID NO: 71400 - RNA, 24 nt, Artificial Sequence
  Synthetic
acuuaccuacugauuuauuaacuu

SEQ ID NO: 71401 - RNA, 18 nt, Artificial Sequence
  Synthetic
auuaaaguuauuuaacuu

SEQ ID NO: 71402 - RNA, 19 nt, Artificial Sequence
  Synthetic
aauuaaaguuauuuaacuu

SEQ ID NO: 71403 - RNA, 20 nt, Artificial Sequence
  Synthetic
uaauuaaaguuauuuaacuu

SEQ ID NO: 71404 - RNA, 21 nt, Artificial Sequence
  Synthetic
uuaauuaaaguuauuuaacuu

SEQ ID NO: 71405 - RNA, 23 nt, Artificial Sequence
  Synthetic
uguuaauuaaaguuauuuaacuu

SEQ ID NO: 71406 - RNA, 24 nt, Artificial Sequence
  Synthetic
cuguuaauuaaaguuauuuaacuu

SEQ ID NO: 71407 - RNA, 18 nt, Artificial Sequence
  Synthetic
caagagcguaaaacacuu

SEQ ID NO: 71408 - RNA, 20 nt, Artificial Sequence
  Synthetic
agcaagagcguaaaacacuu

SEQ ID NO: 71409 - RNA, 21 nt, Artificial Sequence
  Synthetic
cagcaagagcguaaaacacuu

SEQ ID NO: 71410 - RNA, 23 nt, Artificial Sequence
  Synthetic
ugcagcaagagcguaaaacacuu

SEQ ID NO: 71411 - RNA, 24 nt, Artificial Sequence
  Synthetic
uugcagcaagagcguaaaacacuu

SEQ ID NO: 71412 - RNA, 18 nt, Artificial Sequence
  Synthetic
aacucuugcugaacacuu

SEQ ID NO: 71413 - RNA, 20 nt, Artificial Sequence
  Synthetic
ugaacucuugcugaacacuu

SEQ ID NO: 71414 - RNA, 21 nt, Artificial Sequence
  Synthetic
augaacucuugcugaacacuu

SEQ ID NO: 71415 - RNA, 22 nt, Artificial Sequence
  Synthetic
aaugaacucuugcugaacacuu

SEQ ID NO: 71416 - RNA, 23 nt, Artificial Sequence
  Synthetic
uaaugaacucuugcugaacacuu

SEQ ID NO: 71417 - RNA, 24 nt, Artificial Sequence
  Synthetic
uuaaugaacucuugcugaacacuu

SEQ ID NO: 71418 - RNA, 18 nt, Artificial Sequence
  Synthetic
uguaugucaaauacacuu

SEQ ID NO: 71419 - RNA, 19 nt, Artificial Sequence
  Synthetic
cuguaugucaaauacacuu

SEQ ID NO: 71420 - RNA, 20 nt, Artificial Sequence
  Synthetic
ucuguaugucaaauacacuu

SEQ ID NO: 71421 - RNA, 21 nt, Artificial Sequence
  Synthetic
aucuguaugucaaauacacuu

SEQ ID NO: 71422 - RNA, 22 nt, Artificial Sequence
  Synthetic
caucuguaugucaaauacacuu

SEQ ID NO: 71423 - RNA, 23 nt, Artificial Sequence
  Synthetic
acaucuguaugucaaauacacuu

SEQ ID NO: 71424 - RNA, 24 nt, Artificial Sequence
  Synthetic
aacaucuguaugucaaauacacuu

SEQ ID NO: 71425 - RNA, 18 nt, Artificial Sequence
  Synthetic
acauuacagaaaccacuu

SEQ ID NO: 71426 - RNA, 19 nt, Artificial Sequence
  Synthetic
aacauuacagaaaccacuu

SEQ ID NO: 71427 - RNA, 20 nt, Artificial Sequence
  Synthetic
caacauuacagaaaccacuu

SEQ ID NO: 71428 - RNA, 21 nt, Artificial Sequence
  Synthetic
acaacauuacagaaaccacuu

SEQ ID NO: 71429 - RNA, 22 nt, Artificial Sequence
  Synthetic
cacaacauuacagaaaccacuu

SEQ ID NO: 71430 - RNA, 23 nt, Artificial Sequence
  Synthetic
acacaacauuacagaaaccacuu

SEQ ID NO: 71431 - RNA, 24 nt, Artificial Sequence
  Synthetic
aacacaacauuacagaaaccacuu

SEQ ID NO: 71432 - RNA, 18 nt, Artificial Sequence
  Synthetic
auuugaggauauccacuu

SEQ ID NO: 71433 - RNA, 19 nt, Artificial Sequence
  Synthetic
cauuugaggauauccacuu

SEQ ID NO: 71434 - RNA, 21 nt, Artificial Sequence
  Synthetic
ugcauuugaggauauccacuu

SEQ ID NO: 71435 - RNA, 22 nt, Artificial Sequence
  Synthetic
uugcauuugaggauauccacuu

SEQ ID NO: 71436 - RNA, 23 nt, Artificial Sequence
  Synthetic
uuugcauuugaggauauccacuu

SEQ ID NO: 71437 - RNA, 24 nt, Artificial Sequence
  Synthetic
auuugcauuugaggauauccacuu

SEQ ID NO: 71438 - RNA, 22 nt, Artificial Sequence
  Synthetic
ugagguauuauuaauuccacuu

SEQ ID NO: 71439 - RNA, 23 nt, Artificial Sequence
  Synthetic
augagguauuauuaauuccacuu

SEQ ID NO: 71440 - RNA, 18 nt, Artificial Sequence
  Synthetic
cuuucauauauuccacuu

SEQ ID NO: 71441 - RNA, 19 nt, Artificial Sequence
  Synthetic
ucuuucauauauuccacuu

SEQ ID NO: 71442 - RNA, 20 nt, Artificial Sequence
  Synthetic
cucuuucauauauuccacuu

SEQ ID NO: 71443 - RNA, 21 nt, Artificial Sequence
  Synthetic
ucucuuucauauauuccacuu

SEQ ID NO: 71444 - RNA, 22 nt, Artificial Sequence
  Synthetic
aucucuuucauauauuccacuu

SEQ ID NO: 71445 - RNA, 23 nt, Artificial Sequence
  Synthetic
uaucucuuucauauauuccacuu

SEQ ID NO: 71446 - RNA, 24 nt, Artificial Sequence
  Synthetic
uuaucucuuucauauauuccacuu

SEQ ID NO: 71447 - RNA, 18 nt, Artificial Sequence
  Synthetic
ucacucagaaaagcacuu

SEQ ID NO: 71448 - RNA, 19 nt, Artificial Sequence
  Synthetic
cucacucagaaaagcacuu

SEQ ID NO: 71449 - RNA, 20 nt, Artificial Sequence
  Synthetic
ucucacucagaaaagcacuu

SEQ ID NO: 71450 - RNA, 21 nt, Artificial Sequence
  Synthetic
cucucacucagaaaagcacuu

SEQ ID NO: 71451 - RNA, 22 nt, Artificial Sequence
  Synthetic
ucucucacucagaaaagcacuu

SEQ ID NO: 71452 - RNA, 23 nt, Artificial Sequence
  Synthetic
cucucucacucagaaaagcacuu

SEQ ID NO: 71453 - RNA, 24 nt, Artificial Sequence
  Synthetic
ccucucucacucagaaaagcacuu

SEQ ID NO: 71454 - RNA, 18 nt, Artificial Sequence
  Synthetic
uuauaguucaaagcacuu

SEQ ID NO: 71455 - RNA, 19 nt, Artificial Sequence
  Synthetic
uuuauaguucaaagcacuu

SEQ ID NO: 71456 - RNA, 20 nt, Artificial Sequence
  Synthetic
auuuauaguucaaagcacuu

SEQ ID NO: 71457 - RNA, 21 nt, Artificial Sequence
  Synthetic
uauuuauaguucaaagcacuu

SEQ ID NO: 71458 - RNA, 22 nt, Artificial Sequence
  Synthetic
cuauuuauaguucaaagcacuu

SEQ ID NO: 71459 - RNA, 23 nt, Artificial Sequence
  Synthetic
ccuauuuauaguucaaagcacuu

SEQ ID NO: 71460 - RNA, 24 nt, Artificial Sequence
  Synthetic
uccuauuuauaguucaaagcacuu

SEQ ID NO: 71461 - RNA, 18 nt, Artificial Sequence
  Synthetic
ugccaacgagaggcacuu

SEQ ID NO: 71462 - RNA, 19 nt, Artificial Sequence
  Synthetic
cugccaacgagaggcacuu

SEQ ID NO: 71463 - RNA, 20 nt, Artificial Sequence
  Synthetic
acugccaacgagaggcacuu

SEQ ID NO: 71464 - RNA, 21 nt, Artificial Sequence
  Synthetic
cacugccaacgagaggcacuu

SEQ ID NO: 71465 - RNA, 22 nt, Artificial Sequence
  Synthetic
ucacugccaacgagaggcacuu

SEQ ID NO: 71466 - RNA, 23 nt, Artificial Sequence
  Synthetic
uucacugccaacgagaggcacuu

SEQ ID NO: 71467 - RNA, 24 nt, Artificial Sequence
  Synthetic
auucacugccaacgagaggcacuu

SEQ ID NO: 71468 - RNA, 18 nt, Artificial Sequence
  Synthetic
cuaaaaaauuaggcacuu

SEQ ID NO: 71469 - RNA, 19 nt, Artificial Sequence
  Synthetic
acuaaaaaauuaggcacuu

SEQ ID NO: 71470 - RNA, 20 nt, Artificial Sequence
  Synthetic
aacuaaaaaauuaggcacuu

SEQ ID NO: 71471 - RNA, 21 nt, Artificial Sequence
  Synthetic
aaacuaaaaaauuaggcacuu

SEQ ID NO: 71472 - RNA, 23 nt, Artificial Sequence
  Synthetic
ugaaacuaaaaaauuaggcacuu

SEQ ID NO: 71473 - RNA, 24 nt, Artificial Sequence
  Synthetic
augaaacuaaaaaauuaggcacuu

SEQ ID NO: 71474 - RNA, 18 nt, Artificial Sequence
  Synthetic
aucuacgauagggcacuu

SEQ ID NO: 71475 - RNA, 19 nt, Artificial Sequence
  Synthetic
aaucuacgauagggcacuu

SEQ ID NO: 71476 - RNA, 20 nt, Artificial Sequence
  Synthetic
aaaucuacgauagggcacuu

SEQ ID NO: 71477 - RNA, 21 nt, Artificial Sequence
  Synthetic
aaaaucuacgauagggcacuu

SEQ ID NO: 71478 - RNA, 22 nt, Artificial Sequence
  Synthetic
caaaaucuacgauagggcacuu

SEQ ID NO: 71479 - RNA, 23 nt, Artificial Sequence
  Synthetic
ccaaaaucuacgauagggcacuu

SEQ ID NO: 71480 - RNA, 24 nt, Artificial Sequence
  Synthetic
accaaaaucuacgauagggcacuu

SEQ ID NO: 71481 - RNA, 18 nt, Artificial Sequence
  Synthetic
aaaugaagcuuugcacuu

SEQ ID NO: 71482 - RNA, 20 nt, Artificial Sequence
  Synthetic
ugaaaugaagcuuugcacuu

SEQ ID NO: 71483 - RNA, 21 nt, Artificial Sequence
  Synthetic
uugaaaugaagcuuugcacuu

SEQ ID NO: 71484 - RNA, 22 nt, Artificial Sequence
  Synthetic
uuugaaaugaagcuuugcacuu

SEQ ID NO: 71485 - RNA, 23 nt, Artificial Sequence
  Synthetic
uuuugaaaugaagcuuugcacuu

SEQ ID NO: 71486 - RNA, 24 nt, Artificial Sequence
  Synthetic
auuuugaaaugaagcuuugcacuu

SEQ ID NO: 71487 - RNA, 18 nt, Artificial Sequence
  Synthetic
cugaacaucccaucacuu

SEQ ID NO: 71488 - RNA, 19 nt, Artificial Sequence
  Synthetic
ccugaacaucccaucacuu

SEQ ID NO: 71489 - RNA, 20 nt, Artificial Sequence
  Synthetic
uccugaacaucccaucacuu

SEQ ID NO: 71490 - RNA, 21 nt, Artificial Sequence
  Synthetic
uuccugaacaucccaucacuu

SEQ ID NO: 71491 - RNA, 22 nt, Artificial Sequence
  Synthetic
uuuccugaacaucccaucacuu

SEQ ID NO: 71492 - RNA, 23 nt, Artificial Sequence
  Synthetic
auuuccugaacaucccaucacuu

SEQ ID NO: 71493 - RNA, 19 nt, Artificial Sequence
  Synthetic
ugaaaggaguauaucacuu

SEQ ID NO: 71494 - RNA, 20 nt, Artificial Sequence
  Synthetic
uugaaaggaguauaucacuu

SEQ ID NO: 71495 - RNA, 21 nt, Artificial Sequence
  Synthetic
cuugaaaggaguauaucacuu

SEQ ID NO: 71496 - RNA, 23 nt, Artificial Sequence
  Synthetic
cgcuugaaaggaguauaucacuu

SEQ ID NO: 71497 - RNA, 18 nt, Artificial Sequence
  Synthetic
cugauaaauaagucacuu

SEQ ID NO: 71498 - RNA, 19 nt, Artificial Sequence
  Synthetic
ucugauaaauaagucacuu

SEQ ID NO: 71499 - RNA, 20 nt, Artificial Sequence
  Synthetic
aucugauaaauaagucacuu

SEQ ID NO: 71500 - RNA, 21 nt, Artificial Sequence
  Synthetic
uaucugauaaauaagucacuu

SEQ ID NO: 71501 - RNA, 22 nt, Artificial Sequence
  Synthetic
uuaucugauaaauaagucacuu

SEQ ID NO: 71502 - RNA, 24 nt, Artificial Sequence
  Synthetic
uguuaucugauaaauaagucacuu

SEQ ID NO: 71503 - RNA, 18 nt, Artificial Sequence
  Synthetic
augucauuaaauucacuu

SEQ ID NO: 71504 - RNA, 19 nt, Artificial Sequence
  Synthetic
aaugucauuaaauucacuu

SEQ ID NO: 71505 - RNA, 20 nt, Artificial Sequence
  Synthetic
uaaugucauuaaauucacuu

SEQ ID NO: 71506 - RNA, 21 nt, Artificial Sequence
  Synthetic
uuaaugucauuaaauucacuu

SEQ ID NO: 71507 - RNA, 24 nt, Artificial Sequence
  Synthetic
agguuaaugucauuaaauucacuu

SEQ ID NO: 71508 - RNA, 18 nt, Artificial Sequence
  Synthetic
ccuguuuugccuucacuu

SEQ ID NO: 71509 - RNA, 19 nt, Artificial Sequence
  Synthetic
uccuguuuugccuucacuu

SEQ ID NO: 71510 - RNA, 20 nt, Artificial Sequence
  Synthetic
uuccuguuuugccuucacuu

SEQ ID NO: 71511 - RNA, 21 nt, Artificial Sequence
  Synthetic
uuuccuguuuugccuucacuu

SEQ ID NO: 71512 - RNA, 22 nt, Artificial Sequence
  Synthetic
uuuuccuguuuugccuucacuu

SEQ ID NO: 71513 - RNA, 23 nt, Artificial Sequence
  Synthetic
cuuuuccuguuuugccuucacuu

SEQ ID NO: 71514 - RNA, 24 nt, Artificial Sequence
  Synthetic
acuuuuccuguuuugccuucacuu

SEQ ID NO: 71515 - RNA, 18 nt, Artificial Sequence
  Synthetic
ucacuuucagcuucacuu

SEQ ID NO: 71516 - RNA, 19 nt, Artificial Sequence
  Synthetic
cucacuuucagcuucacuu

SEQ ID NO: 71517 - RNA, 20 nt, Artificial Sequence
  Synthetic
acucacuuucagcuucacuu

SEQ ID NO: 71518 - RNA, 21 nt, Artificial Sequence
  Synthetic
cacucacuuucagcuucacuu

SEQ ID NO: 71519 - RNA, 22 nt, Artificial Sequence
  Synthetic
ucacucacuuucagcuucacuu

SEQ ID NO: 71520 - RNA, 23 nt, Artificial Sequence
  Synthetic
aucacucacuuucagcuucacuu

SEQ ID NO: 71521 - RNA, 24 nt, Artificial Sequence
  Synthetic
uaucacucacuuucagcuucacuu

SEQ ID NO: 71522 - RNA, 19 nt, Artificial Sequence
  Synthetic
ugccaucugagaaagacuu

SEQ ID NO: 71523 - RNA, 20 nt, Artificial Sequence
  Synthetic
uugccaucugagaaagacuu

SEQ ID NO: 71524 - RNA, 22 nt, Artificial Sequence
  Synthetic
uguugccaucugagaaagacuu

SEQ ID NO: 71525 - RNA, 23 nt, Artificial Sequence
  Synthetic
auguugccaucugagaaagacuu

SEQ ID NO: 71526 - RNA, 18 nt, Artificial Sequence
  Synthetic
caagcauuuuacagacuu

SEQ ID NO: 71527 - RNA, 19 nt, Artificial Sequence
  Synthetic
ucaagcauuuuacagacuu

SEQ ID NO: 71528 - RNA, 20 nt, Artificial Sequence
  Synthetic
uucaagcauuuuacagacuu

SEQ ID NO: 71529 - RNA, 21 nt, Artificial Sequence
  Synthetic
auucaagcauuuuacagacuu

SEQ ID NO: 71530 - RNA, 22 nt, Artificial Sequence
  Synthetic
uauucaagcauuuuacagacuu

SEQ ID NO: 71531 - RNA, 18 nt, Artificial Sequence
  Synthetic
aaaauggucuugagacuu

SEQ ID NO: 71532 - RNA, 19 nt, Artificial Sequence
  Synthetic
aaaaauggucuugagacuu

SEQ ID NO: 71533 - RNA, 20 nt, Artificial Sequence
  Synthetic
aaaaaauggucuugagacuu

SEQ ID NO: 71534 - RNA, 18 nt, Artificial Sequence
  Synthetic
uuccuuguugauagacuu

SEQ ID NO: 71535 - RNA, 19 nt, Artificial Sequence
  Synthetic
uuuccuuguugauagacuu

SEQ ID NO: 71536 - RNA, 21 nt, Artificial Sequence
  Synthetic
aguuuccuuguugauagacuu

SEQ ID NO: 71537 - RNA, 22 nt, Artificial Sequence
  Synthetic
uaguuuccuuguugauagacuu

SEQ ID NO: 71538 - RNA, 23 nt, Artificial Sequence
  Synthetic
cuaguuuccuuguugauagacuu

SEQ ID NO: 71539 - RNA, 24 nt, Artificial Sequence
  Synthetic
acuaguuuccuuguugauagacuu

SEQ ID NO: 71540 - RNA, 19 nt, Artificial Sequence
  Synthetic
uguggacagggcuagacuu

SEQ ID NO: 71541 - RNA, 20 nt, Artificial Sequence
  Synthetic
auguggacagggcuagacuu

SEQ ID NO: 71542 - RNA, 21 nt, Artificial Sequence
  Synthetic
cauguggacagggcuagacuu

SEQ ID NO: 71543 - RNA, 22 nt, Artificial Sequence
  Synthetic
acauguggacagggcuagacuu

SEQ ID NO: 71544 - RNA, 24 nt, Artificial Sequence
  Synthetic
ugacauguggacagggcuagacuu

SEQ ID NO: 71545 - RNA, 18 nt, Artificial Sequence
  Synthetic
ugccuagccaguagacuu

SEQ ID NO: 71546 - RNA, 19 nt, Artificial Sequence
  Synthetic
augccuagccaguagacuu

SEQ ID NO: 71547 - RNA, 20 nt, Artificial Sequence
  Synthetic
caugccuagccaguagacuu

SEQ ID NO: 71548 - RNA, 22 nt, Artificial Sequence
  Synthetic
agcaugccuagccaguagacuu

SEQ ID NO: 71549 - RNA, 23 nt, Artificial Sequence
  Synthetic
uagcaugccuagccaguagacuu

SEQ ID NO: 71550 - RNA, 24 nt, Artificial Sequence
  Synthetic
uuagcaugccuagccaguagacuu

SEQ ID NO: 71551 - RNA, 18 nt, Artificial Sequence
  Synthetic
ucaauuuacauaggacuu

SEQ ID NO: 71552 - RNA, 19 nt, Artificial Sequence
  Synthetic
uucaauuuacauaggacuu

SEQ ID NO: 71553 - RNA, 20 nt, Artificial Sequence
  Synthetic
cuucaauuuacauaggacuu

SEQ ID NO: 71554 - RNA, 21 nt, Artificial Sequence
  Synthetic
ucuucaauuuacauaggacuu

SEQ ID NO: 71555 - RNA, 24 nt, Artificial Sequence
  Synthetic
aggucuucaauuuacauaggacuu

SEQ ID NO: 71556 - RNA, 18 nt, Artificial Sequence
  Synthetic
ucauagauuugaugacuu

SEQ ID NO: 71557 - RNA, 19 nt, Artificial Sequence
  Synthetic
aucauagauuugaugacuu

SEQ ID NO: 71558 - RNA, 20 nt, Artificial Sequence
  Synthetic
aaucauagauuugaugacuu

SEQ ID NO: 71559 - RNA, 21 nt, Artificial Sequence
  Synthetic
aaaucauagauuugaugacuu

SEQ ID NO: 71560 - RNA, 22 nt, Artificial Sequence
  Synthetic
aaaaucauagauuugaugacuu

SEQ ID NO: 71561 - RNA, 23 nt, Artificial Sequence
  Synthetic
uaaaaucauagauuugaugacuu

SEQ ID NO: 71562 - RNA, 24 nt, Artificial Sequence
  Synthetic
auaaaaucauagauuugaugacuu

SEQ ID NO: 71563 - RNA, 18 nt, Artificial Sequence
  Synthetic
uuuauuauuuacugacuu

SEQ ID NO: 71564 - RNA, 19 nt, Artificial Sequence
  Synthetic
uuuuauuauuuacugacuu

SEQ ID NO: 71565 - RNA, 20 nt, Artificial Sequence
  Synthetic
auuuuauuauuuacugacuu

SEQ ID NO: 71566 - RNA, 21 nt, Artificial Sequence
  Synthetic
aauuuuauuauuuacugacuu

SEQ ID NO: 71567 - RNA, 22 nt, Artificial Sequence
  Synthetic
caauuuuauuauuuacugacuu

SEQ ID NO: 71568 - RNA, 23 nt, Artificial Sequence
  Synthetic
acaauuuuauuauuuacugacuu

SEQ ID NO: 71569 - RNA, 24 nt, Artificial Sequence
  Synthetic
cacaauuuuauuauuuacugacuu

SEQ ID NO: 71570 - RNA, 21 nt, Artificial Sequence
  Synthetic
agaaaucagggagucugacuu

SEQ ID NO: 71571 - RNA, 22 nt, Artificial Sequence
  Synthetic
aagaaaucagggagucugacuu

SEQ ID NO: 71572 - RNA, 23 nt, Artificial Sequence
  Synthetic
aaagaaaucagggagucugacuu

SEQ ID NO: 71573 - RNA, 24 nt, Artificial Sequence
  Synthetic
aaaagaaaucagggagucugacuu

SEQ ID NO: 71574 - RNA, 18 nt, Artificial Sequence
  Synthetic
acccaaaguuucugacuu

SEQ ID NO: 71575 - RNA, 20 nt, Artificial Sequence
  Synthetic
agacccaaaguuucugacuu

SEQ ID NO: 71576 - RNA, 22 nt, Artificial Sequence
  Synthetic
ugagacccaaaguuucugacuu

SEQ ID NO: 71577 - RNA, 23 nt, Artificial Sequence
  Synthetic
uugagacccaaaguuucugacuu

SEQ ID NO: 71578 - RNA, 24 nt, Artificial Sequence
  Synthetic
cuugagacccaaaguuucugacuu

SEQ ID NO: 71579 - RNA, 22 nt, Artificial Sequence
  Synthetic
ugcacauaaaauauauugacuu

SEQ ID NO: 71580 - RNA, 23 nt, Artificial Sequence
  Synthetic
uugcacauaaaauauauugacuu

SEQ ID NO: 71581 - RNA, 24 nt, Artificial Sequence
  Synthetic
uuugcacauaaaauauauugacuu

SEQ ID NO: 71582 - RNA, 18 nt, Artificial Sequence
  Synthetic
uaucaauuuuaaauacuu

SEQ ID NO: 71583 - RNA, 20 nt, Artificial Sequence
  Synthetic
aguaucaauuuuaaauacuu

SEQ ID NO: 71584 - RNA, 22 nt, Artificial Sequence
  Synthetic
agaguaucaauuuuaaauacuu

SEQ ID NO: 71585 - RNA, 23 nt, Artificial Sequence
  Synthetic
uagaguaucaauuuuaaauacuu

SEQ ID NO: 71586 - RNA, 24 nt, Artificial Sequence
  Synthetic
auagaguaucaauuuuaaauacuu

SEQ ID NO: 71587 - RNA, 18 nt, Artificial Sequence
  Synthetic
aaaugaaggacaauacuu

SEQ ID NO: 71588 - RNA, 19 nt, Artificial Sequence
  Synthetic
uaaaugaaggacaauacuu

SEQ ID NO: 71589 - RNA, 20 nt, Artificial Sequence
  Synthetic
cuaaaugaaggacaauacuu

SEQ ID NO: 71590 - RNA, 21 nt, Artificial Sequence
  Synthetic
ucuaaaugaaggacaauacuu

SEQ ID NO: 71591 - RNA, 22 nt, Artificial Sequence
  Synthetic
uucuaaaugaaggacaauacuu

SEQ ID NO: 71592 - RNA, 23 nt, Artificial Sequence
  Synthetic
auucuaaaugaaggacaauacuu

SEQ ID NO: 71593 - RNA, 19 nt, Artificial Sequence
  Synthetic
ugguauggagaugauacuu

SEQ ID NO: 71594 - RNA, 20 nt, Artificial Sequence
  Synthetic
uugguauggagaugauacuu

SEQ ID NO: 71595 - RNA, 21 nt, Artificial Sequence
  Synthetic
cuugguauggagaugauacuu

SEQ ID NO: 71596 - RNA, 23 nt, Artificial Sequence
  Synthetic
ugcuugguauggagaugauacuu

SEQ ID NO: 71597 - RNA, 24 nt, Artificial Sequence
  Synthetic
uugcuugguauggagaugauacuu

SEQ ID NO: 71598 - RNA, 21 nt, Artificial Sequence
  Synthetic
uguuuauuucauuuuauacuu

SEQ ID NO: 71599 - RNA, 23 nt, Artificial Sequence
  Synthetic
aguguuuauuucauuuuauacuu

SEQ ID NO: 71600 - RNA, 24 nt, Artificial Sequence
  Synthetic
uaguguuuauuucauuuuauacuu

SEQ ID NO: 71601 - RNA, 18 nt, Artificial Sequence
  Synthetic
aaccuuuaaaaccuacuu

SEQ ID NO: 71602 - RNA, 19 nt, Artificial Sequence
  Synthetic
aaaccuuuaaaaccuacuu

SEQ ID NO: 71603 - RNA, 20 nt, Artificial Sequence
  Synthetic
aaaaccuuuaaaaccuacuu

SEQ ID NO: 71604 - RNA, 21 nt, Artificial Sequence
  Synthetic
uaaaaccuuuaaaaccuacuu

SEQ ID NO: 71605 - RNA, 22 nt, Artificial Sequence
  Synthetic
uuaaaaccuuuaaaaccuacuu

SEQ ID NO: 71606 - RNA, 23 nt, Artificial Sequence
  Synthetic
auuaaaaccuuuaaaaccuacuu

SEQ ID NO: 71607 - RNA, 24 nt, Artificial Sequence
  Synthetic
uauuaaaaccuuuaaaaccuacuu

SEQ ID NO: 71608 - RNA, 18 nt, Artificial Sequence
  Synthetic
aucuuuauuauccuacuu

SEQ ID NO: 71609 - RNA, 20 nt, Artificial Sequence
  Synthetic
agaucuuuauuauccuacuu

SEQ ID NO: 71610 - RNA, 22 nt, Artificial Sequence
  Synthetic
agagaucuuuauuauccuacuu

SEQ ID NO: 71611 - RNA, 23 nt, Artificial Sequence
  Synthetic
aagagaucuuuauuauccuacuu

SEQ ID NO: 71612 - RNA, 24 nt, Artificial Sequence
  Synthetic
caagagaucuuuauuauccuacuu

SEQ ID NO: 71613 - RNA, 18 nt, Artificial Sequence
  Synthetic
cgcuuuuuacaucuacuu

SEQ ID NO: 71614 - RNA, 19 nt, Artificial Sequence
  Synthetic
acgcuuuuuacaucuacuu

SEQ ID NO: 71615 - RNA, 20 nt, Artificial Sequence
  Synthetic
aacgcuuuuuacaucuacuu

SEQ ID NO: 71616 - RNA, 21 nt, Artificial Sequence
  Synthetic
aaacgcuuuuuacaucuacuu

SEQ ID NO: 71617 - RNA, 22 nt, Artificial Sequence
  Synthetic
aaaacgcuuuuuacaucuacuu

SEQ ID NO: 71618 - RNA, 23 nt, Artificial Sequence
  Synthetic
uaaaacgcuuuuuacaucuacuu

SEQ ID NO: 71619 - RNA, 18 nt, Artificial Sequence
  Synthetic
cuuuaaaccucucuacuu

SEQ ID NO: 71620 - RNA, 19 nt, Artificial Sequence
  Synthetic
ccuuuaaaccucucuacuu

SEQ ID NO: 71621 - RNA, 20 nt, Artificial Sequence
  Synthetic
uccuuuaaaccucucuacuu

SEQ ID NO: 71622 - RNA, 21 nt, Artificial Sequence
  Synthetic
cuccuuuaaaccucucuacuu

SEQ ID NO: 71623 - RNA, 22 nt, Artificial Sequence
  Synthetic
acuccuuuaaaccucucuacuu

SEQ ID NO: 71624 - RNA, 23 nt, Artificial Sequence
  Synthetic
uacuccuuuaaaccucucuacuu

SEQ ID NO: 71625 - RNA, 24 nt, Artificial Sequence
  Synthetic
cuacuccuuuaaaccucucuacuu

SEQ ID NO: 71626 - RNA, 18 nt, Artificial Sequence
  Synthetic
uaucuuuaaaauguacuu

SEQ ID NO: 71627 - RNA, 19 nt, Artificial Sequence
  Synthetic
cuaucuuuaaaauguacuu

SEQ ID NO: 71628 - RNA, 20 nt, Artificial Sequence
  Synthetic
ucuaucuuuaaaauguacuu

SEQ ID NO: 71629 - RNA, 18 nt, Artificial Sequence
  Synthetic
accgucguccuuguacuu

SEQ ID NO: 71630 - RNA, 19 nt, Artificial Sequence
  Synthetic
uaccgucguccuuguacuu

SEQ ID NO: 71631 - RNA, 20 nt, Artificial Sequence
  Synthetic
uuaccgucguccuuguacuu

SEQ ID NO: 71632 - RNA, 21 nt, Artificial Sequence
  Synthetic
uuuaccgucguccuuguacuu

SEQ ID NO: 71633 - RNA, 22 nt, Artificial Sequence
  Synthetic
cuuuaccgucguccuuguacuu

SEQ ID NO: 71634 - RNA, 23 nt, Artificial Sequence
  Synthetic
acuuuaccgucguccuuguacuu

SEQ ID NO: 71635 - RNA, 24 nt, Artificial Sequence
  Synthetic
aacuuuaccgucguccuuguacuu

SEQ ID NO: 71636 - RNA, 18 nt, Artificial Sequence
  Synthetic
cugaccuuaagauuacuu

SEQ ID NO: 71637 - RNA, 19 nt, Artificial Sequence
  Synthetic
ccugaccuuaagauuacuu

SEQ ID NO: 71638 - RNA, 20 nt, Artificial Sequence
  Synthetic
accugaccuuaagauuacuu

SEQ ID NO: 71639 - RNA, 21 nt, Artificial Sequence
  Synthetic
aaccugaccuuaagauuacuu

SEQ ID NO: 71640 - RNA, 22 nt, Artificial Sequence
  Synthetic
aaaccugaccuuaagauuacuu

SEQ ID NO: 71641 - RNA, 24 nt, Artificial Sequence
  Synthetic
agaaaccugaccuuaagauuacuu

SEQ ID NO: 71642 - RNA, 18 nt, Artificial Sequence
  Synthetic
aguaaaugaugcuuacuu

SEQ ID NO: 71643 - RNA, 19 nt, Artificial Sequence
  Synthetic
caguaaaugaugcuuacuu

SEQ ID NO: 71644 - RNA, 20 nt, Artificial Sequence
  Synthetic
ccaguaaaugaugcuuacuu

SEQ ID NO: 71645 - RNA, 21 nt, Artificial Sequence
  Synthetic
uccaguaaaugaugcuuacuu

SEQ ID NO: 71646 - RNA, 22 nt, Artificial Sequence
  Synthetic
auccaguaaaugaugcuuacuu

SEQ ID NO: 71647 - RNA, 18 nt, Artificial Sequence
  Synthetic
ugucuauuuuauuuacuu

SEQ ID NO: 71648 - RNA, 19 nt, Artificial Sequence
  Synthetic
augucuauuuuauuuacuu

SEQ ID NO: 71649 - RNA, 20 nt, Artificial Sequence
  Synthetic
aaugucuauuuuauuuacuu

SEQ ID NO: 71650 - RNA, 22 nt, Artificial Sequence
  Synthetic
agaaugucuauuuuauuuacuu

SEQ ID NO: 71651 - RNA, 23 nt, Artificial Sequence
  Synthetic
uagaaugucuauuuuauuuacuu

SEQ ID NO: 71652 - RNA, 18 nt, Artificial Sequence
  Synthetic
uaaguuugugguuuacuu

SEQ ID NO: 71653 - RNA, 19 nt, Artificial Sequence
  Synthetic
auaaguuugugguuuacuu

SEQ ID NO: 71654 - RNA, 20 nt, Artificial Sequence
  Synthetic
cauaaguuugugguuuacuu

SEQ ID NO: 71655 - RNA, 21 nt, Artificial Sequence
  Synthetic
ccauaaguuugugguuuacuu

SEQ ID NO: 71656 - RNA, 23 nt, Artificial Sequence
  Synthetic
agccauaaguuugugguuuacuu

SEQ ID NO: 71657 - RNA, 24 nt, Artificial Sequence
  Synthetic
cagccauaaguuugugguuuacuu

SEQ ID NO: 71658 - RNA, 18 nt, Artificial Sequence
  Synthetic
uaauaauaaagaaaccuu

SEQ ID NO: 71659 - RNA, 19 nt, Artificial Sequence
  Synthetic
auaauaauaaagaaaccuu

SEQ ID NO: 71660 - RNA, 20 nt, Artificial Sequence
  Synthetic
cauaauaauaaagaaaccuu

SEQ ID NO: 71661 - RNA, 21 nt, Artificial Sequence
  Synthetic
acauaauaauaaagaaaccuu

SEQ ID NO: 71662 - RNA, 22 nt, Artificial Sequence
  Synthetic
aacauaauaauaaagaaaccuu

SEQ ID NO: 71663 - RNA, 23 nt, Artificial Sequence
  Synthetic
uaacauaauaauaaagaaaccuu

SEQ ID NO: 71664 - RNA, 24 nt, Artificial Sequence
  Synthetic
auaacauaauaauaaagaaaccuu

SEQ ID NO: 71665 - RNA, 18 nt, Artificial Sequence
  Synthetic
ccaccauacuggaaccuu

SEQ ID NO: 71666 - RNA, 19 nt, Artificial Sequence
  Synthetic
uccaccauacuggaaccuu

SEQ ID NO: 71667 - RNA, 20 nt, Artificial Sequence
  Synthetic
cuccaccauacuggaaccuu

SEQ ID NO: 71668 - RNA, 21 nt, Artificial Sequence
  Synthetic
ccuccaccauacuggaaccuu

SEQ ID NO: 71669 - RNA, 22 nt, Artificial Sequence
  Synthetic
uccuccaccauacuggaaccuu

SEQ ID NO: 71670 - RNA, 23 nt, Artificial Sequence
  Synthetic
uuccuccaccauacuggaaccuu

SEQ ID NO: 71671 - RNA, 24 nt, Artificial Sequence
  Synthetic
auuccuccaccauacuggaaccuu

SEQ ID NO: 71672 - RNA, 18 nt, Artificial Sequence
  Synthetic
cugcuucaggugaaccuu

SEQ ID NO: 71673 - RNA, 19 nt, Artificial Sequence
  Synthetic
ucugcuucaggugaaccuu

SEQ ID NO: 71674 - RNA, 20 nt, Artificial Sequence
  Synthetic
uucugcuucaggugaaccuu

SEQ ID NO: 71675 - RNA, 21 nt, Artificial Sequence
  Synthetic
auucugcuucaggugaaccuu

SEQ ID NO: 71676 - RNA, 23 nt, Artificial Sequence
  Synthetic
ugauucugcuucaggugaaccuu

SEQ ID NO: 71677 - RNA, 24 nt, Artificial Sequence
  Synthetic
uugauucugcuucaggugaaccuu

SEQ ID NO: 71678 - RNA, 19 nt, Artificial Sequence
  Synthetic
ugcuauuccauugaaccuu

SEQ ID NO: 71679 - RNA, 20 nt, Artificial Sequence
  Synthetic
augcuauuccauugaaccuu

SEQ ID NO: 71680 - RNA, 21 nt, Artificial Sequence
  Synthetic
aaugcuauuccauugaaccuu

SEQ ID NO: 71681 - RNA, 22 nt, Artificial Sequence
  Synthetic
uaaugcuauuccauugaaccuu

SEQ ID NO: 71682 - RNA, 23 nt, Artificial Sequence
  Synthetic
auaaugcuauuccauugaaccuu

SEQ ID NO: 71683 - RNA, 24 nt, Artificial Sequence
  Synthetic
uauaaugcuauuccauugaaccuu

SEQ ID NO: 71684 - RNA, 18 nt, Artificial Sequence
  Synthetic
cacaaugaauauaaccuu

SEQ ID NO: 71685 - RNA, 19 nt, Artificial Sequence
  Synthetic
ccacaaugaauauaaccuu

SEQ ID NO: 71686 - RNA, 20 nt, Artificial Sequence
  Synthetic
accacaaugaauauaaccuu

SEQ ID NO: 71687 - RNA, 21 nt, Artificial Sequence
  Synthetic
caccacaaugaauauaaccuu

SEQ ID NO: 71688 - RNA, 24 nt, Artificial Sequence
  Synthetic
uggcaccacaaugaauauaaccuu

SEQ ID NO: 71689 - RNA, 18 nt, Artificial Sequence
  Synthetic
uuacuuacuaguaaccuu

SEQ ID NO: 71690 - RNA, 20 nt, Artificial Sequence
  Synthetic
uguuacuuacuaguaaccuu

SEQ ID NO: 71691 - RNA, 21 nt, Artificial Sequence
  Synthetic
uuguuacuuacuaguaaccuu

SEQ ID NO: 71692 - RNA, 22 nt, Artificial Sequence
  Synthetic
uuuguuacuuacuaguaaccuu

SEQ ID NO: 71693 - RNA, 23 nt, Artificial Sequence
  Synthetic
cuuuguuacuuacuaguaaccuu

SEQ ID NO: 71694 - RNA, 24 nt, Artificial Sequence
  Synthetic
ucuuuguuacuuacuaguaaccuu

SEQ ID NO: 71695 - RNA, 18 nt, Artificial Sequence
  Synthetic
uuuucagcuuuacaccuu

SEQ ID NO: 71696 - RNA, 19 nt, Artificial Sequence
  Synthetic
uuuuucagcuuuacaccuu

SEQ ID NO: 71697 - RNA, 20 nt, Artificial Sequence
  Synthetic
cuuuuucagcuuuacaccuu

SEQ ID NO: 71698 - RNA, 21 nt, Artificial Sequence
  Synthetic
ucuuuuucagcuuuacaccuu

SEQ ID NO: 71699 - RNA, 22 nt, Artificial Sequence
  Synthetic
aucuuuuucagcuuuacaccuu

SEQ ID NO: 71700 - RNA, 23 nt, Artificial Sequence
  Synthetic
uaucuuuuucagcuuuacaccuu

SEQ ID NO: 71701 - RNA, 21 nt, Artificial Sequence
  Synthetic
cuuguacuuccuuaugaccuu

SEQ ID NO: 71702 - RNA, 22 nt, Artificial Sequence
  Synthetic
ucuuguacuuccuuaugaccuu

SEQ ID NO: 71703 - RNA, 23 nt, Artificial Sequence
  Synthetic
uucuuguacuuccuuaugaccuu

SEQ ID NO: 71704 - RNA, 24 nt, Artificial Sequence
  Synthetic
uuucuuguacuuccuuaugaccuu

SEQ ID NO: 71705 - RNA, 21 nt, Artificial Sequence
  Synthetic
aggcaauugaauaaauaccuu

SEQ ID NO: 71706 - RNA, 22 nt, Artificial Sequence
  Synthetic
uaggcaauugaauaaauaccuu

SEQ ID NO: 71707 - RNA, 23 nt, Artificial Sequence
  Synthetic
auaggcaauugaauaaauaccuu

SEQ ID NO: 71708 - RNA, 24 nt, Artificial Sequence
  Synthetic
aauaggcaauugaauaaauaccuu

SEQ ID NO: 71709 - RNA, 19 nt, Artificial Sequence
  Synthetic
uguucacccuguauaccuu

SEQ ID NO: 71710 - RNA, 20 nt, Artificial Sequence
  Synthetic
uuguucacccuguauaccuu

SEQ ID NO: 71711 - RNA, 21 nt, Artificial Sequence
  Synthetic
cuuguucacccuguauaccuu

SEQ ID NO: 71712 - RNA, 23 nt, Artificial Sequence
  Synthetic
ugcuuguucacccuguauaccuu

SEQ ID NO: 71713 - RNA, 24 nt, Artificial Sequence
  Synthetic
uugcuuguucacccuguauaccuu

SEQ ID NO: 71714 - RNA, 19 nt, Artificial Sequence
  Synthetic
agugccacaguuauaccuu

SEQ ID NO: 71715 - RNA, 20 nt, Artificial Sequence
  Synthetic
uagugccacaguuauaccuu

SEQ ID NO: 71716 - RNA, 21 nt, Artificial Sequence
  Synthetic
uuagugccacaguuauaccuu

SEQ ID NO: 71717 - RNA, 22 nt, Artificial Sequence
  Synthetic
auuagugccacaguuauaccuu

SEQ ID NO: 71718 - RNA, 23 nt, Artificial Sequence
  Synthetic
aauuagugccacaguuauaccuu

SEQ ID NO: 71719 - RNA, 18 nt, Artificial Sequence
  Synthetic
aacaccauuugcuaccuu

SEQ ID NO: 71720 - RNA, 19 nt, Artificial Sequence
  Synthetic
caacaccauuugcuaccuu

SEQ ID NO: 71721 - RNA, 21 nt, Artificial Sequence
  Synthetic
ugcaacaccauuugcuaccuu

SEQ ID NO: 71722 - RNA, 22 nt, Artificial Sequence
  Synthetic
uugcaacaccauuugcuaccuu

SEQ ID NO: 71723 - RNA, 23 nt, Artificial Sequence
  Synthetic
auugcaacaccauuugcuaccuu

SEQ ID NO: 71724 - RNA, 24 nt, Artificial Sequence
  Synthetic
aauugcaacaccauuugcuaccuu

SEQ ID NO: 71725 - RNA, 18 nt, Artificial Sequence
  Synthetic
cguaaacucuuuuaccuu

SEQ ID NO: 71726 - RNA, 19 nt, Artificial Sequence
  Synthetic
ccguaaacucuuuuaccuu

SEQ ID NO: 71727 - RNA, 20 nt, Artificial Sequence
  Synthetic
uccguaaacucuuuuaccuu

SEQ ID NO: 71728 - RNA, 21 nt, Artificial Sequence
  Synthetic
uuccguaaacucuuuuaccuu

SEQ ID NO: 71729 - RNA, 24 nt, Artificial Sequence
  Synthetic
ugguuccguaaacucuuuuaccuu

SEQ ID NO: 71730 - RNA, 19 nt, Artificial Sequence
  Synthetic
agagcuucgaaugacccuu

SEQ ID NO: 71731 - RNA, 20 nt, Artificial Sequence
  Synthetic
cagagcuucgaaugacccuu

SEQ ID NO: 71732 - RNA, 21 nt, Artificial Sequence
  Synthetic
ucagagcuucgaaugacccuu

SEQ ID NO: 71733 - RNA, 22 nt, Artificial Sequence
  Synthetic
uucagagcuucgaaugacccuu

SEQ ID NO: 71734 - RNA, 23 nt, Artificial Sequence
  Synthetic
cuucagagcuucgaaugacccuu

SEQ ID NO: 71735 - RNA, 18 nt, Artificial Sequence
  Synthetic
ugcagauuguacccccuu

SEQ ID NO: 71736 - RNA, 19 nt, Artificial Sequence
  Synthetic
augcagauuguacccccuu

SEQ ID NO: 71737 - RNA, 20 nt, Artificial Sequence
  Synthetic
aaugcagauuguacccccuu

SEQ ID NO: 71738 - RNA, 21 nt, Artificial Sequence
  Synthetic
caaugcagauuguacccccuu

SEQ ID NO: 71739 - RNA, 22 nt, Artificial Sequence
  Synthetic
acaaugcagauuguacccccuu

SEQ ID NO: 71740 - RNA, 23 nt, Artificial Sequence
  Synthetic
aacaaugcagauuguacccccuu

SEQ ID NO: 71741 - RNA, 24 nt, Artificial Sequence
  Synthetic
aaacaaugcagauuguacccccuu

SEQ ID NO: 71742 - RNA, 18 nt, Artificial Sequence
  Synthetic
caaaaaagagcuccccuu

SEQ ID NO: 71743 - RNA, 19 nt, Artificial Sequence
  Synthetic
ccaaaaaagagcuccccuu

SEQ ID NO: 71744 - RNA, 20 nt, Artificial Sequence
  Synthetic
uccaaaaaagagcuccccuu

SEQ ID NO: 71745 - RNA, 21 nt, Artificial Sequence
  Synthetic
auccaaaaaagagcuccccuu

SEQ ID NO: 71746 - RNA, 22 nt, Artificial Sequence
  Synthetic
uauccaaaaaagagcuccccuu

SEQ ID NO: 71747 - RNA, 24 nt, Artificial Sequence
  Synthetic
uguauccaaaaaagagcuccccuu

SEQ ID NO: 71748 - RNA, 18 nt, Artificial Sequence
  Synthetic
uuugacuucaaagcccuu

SEQ ID NO: 71749 - RNA, 19 nt, Artificial Sequence
  Synthetic
uuuugacuucaaagcccuu

SEQ ID NO: 71750 - RNA, 20 nt, Artificial Sequence
  Synthetic
uuuuugacuucaaagcccuu

SEQ ID NO: 71751 - RNA, 21 nt, Artificial Sequence
  Synthetic
uuuuuugacuucaaagcccuu

SEQ ID NO: 71752 - RNA, 22 nt, Artificial Sequence
  Synthetic
cuuuuuugacuucaaagcccuu

SEQ ID NO: 71753 - RNA, 23 nt, Artificial Sequence
  Synthetic
ccuuuuuugacuucaaagcccuu

SEQ ID NO: 71754 - RNA, 24 nt, Artificial Sequence
  Synthetic
accuuuuuugacuucaaagcccuu

SEQ ID NO: 71755 - RNA, 18 nt, Artificial Sequence
  Synthetic
ucacaauuguaagcccuu

SEQ ID NO: 71756 - RNA, 19 nt, Artificial Sequence
  Synthetic
uucacaauuguaagcccuu

SEQ ID NO: 71757 - RNA, 21 nt, Artificial Sequence
  Synthetic
uguucacaauuguaagcccuu

SEQ ID NO: 71758 - RNA, 22 nt, Artificial Sequence
  Synthetic
auguucacaauuguaagcccuu

SEQ ID NO: 71759 - RNA, 23 nt, Artificial Sequence
  Synthetic
cauguucacaauuguaagcccuu

SEQ ID NO: 71760 - RNA, 24 nt, Artificial Sequence
  Synthetic
acauguucacaauuguaagcccuu

SEQ ID NO: 71761 - RNA, 19 nt, Artificial Sequence
  Synthetic
ugaagguagaauagcccuu

SEQ ID NO: 71762 - RNA, 20 nt, Artificial Sequence
  Synthetic
cugaagguagaauagcccuu

SEQ ID NO: 71763 - RNA, 21 nt, Artificial Sequence
  Synthetic
ucugaagguagaauagcccuu

SEQ ID NO: 71764 - RNA, 23 nt, Artificial Sequence
  Synthetic
agucugaagguagaauagcccuu

SEQ ID NO: 71765 - RNA, 24 nt, Artificial Sequence
  Synthetic
aagucugaagguagaauagcccuu

SEQ ID NO: 71766 - RNA, 22 nt, Artificial Sequence
  Synthetic
aggggcaccuucugcaucccuu

SEQ ID NO: 71767 - RNA, 23 nt, Artificial Sequence
  Synthetic
aaggggcaccuucugcaucccuu

SEQ ID NO: 71768 - RNA, 18 nt, Artificial Sequence
  Synthetic
cucugacugggcucccuu

SEQ ID NO: 71769 - RNA, 20 nt, Artificial Sequence
  Synthetic
ugcucugacugggcucccuu

SEQ ID NO: 71770 - RNA, 21 nt, Artificial Sequence
  Synthetic
cugcucugacugggcucccuu

SEQ ID NO: 71771 - RNA, 22 nt, Artificial Sequence
  Synthetic
ucugcucugacugggcucccuu

SEQ ID NO: 71772 - RNA, 23 nt, Artificial Sequence
  Synthetic
aucugcucugacugggcucccuu

SEQ ID NO: 71773 - RNA, 24 nt, Artificial Sequence
  Synthetic
uaucugcucugacugggcucccuu

SEQ ID NO: 71774 - RNA, 21 nt, Artificial Sequence
  Synthetic
aaaaugcuuucauucucccuu

SEQ ID NO: 71775 - RNA, 22 nt, Artificial Sequence
  Synthetic
caaaaugcuuucauucucccuu

SEQ ID NO: 71776 - RNA, 23 nt, Artificial Sequence
  Synthetic
ucaaaaugcuuucauucucccuu

SEQ ID NO: 71777 - RNA, 24 nt, Artificial Sequence
  Synthetic
uucaaaaugcuuucauucucccuu

SEQ ID NO: 71778 - RNA, 18 nt, Artificial Sequence
  Synthetic
uccgucuuaaugucccuu

SEQ ID NO: 71779 - RNA, 19 nt, Artificial Sequence
  Synthetic
auccgucuuaaugucccuu

SEQ ID NO: 71780 - RNA, 21 nt, Artificial Sequence
  Synthetic
agauccgucuuaaugucccuu

SEQ ID NO: 71781 - RNA, 22 nt, Artificial Sequence
  Synthetic
uagauccgucuuaaugucccuu

SEQ ID NO: 71782 - RNA, 23 nt, Artificial Sequence
  Synthetic
auagauccgucuuaaugucccuu

SEQ ID NO: 71783 - RNA, 18 nt, Artificial Sequence
  Synthetic
cuauaaucucauucccuu

SEQ ID NO: 71784 - RNA, 19 nt, Artificial Sequence
  Synthetic
acuauaaucucauucccuu

SEQ ID NO: 71785 - RNA, 20 nt, Artificial Sequence
  Synthetic
uacuauaaucucauucccuu

SEQ ID NO: 71786 - RNA, 23 nt, Artificial Sequence
  Synthetic
ugguacuauaaucucauucccuu

SEQ ID NO: 71787 - RNA, 24 nt, Artificial Sequence
  Synthetic
uugguacuauaaucucauucccuu

SEQ ID NO: 71788 - RNA, 18 nt, Artificial Sequence
  Synthetic
uugauacccuacagccuu

SEQ ID NO: 71789 - RNA, 20 nt, Artificial Sequence
  Synthetic
cguugauacccuacagccuu

SEQ ID NO: 71790 - RNA, 21 nt, Artificial Sequence
  Synthetic
ucguugauacccuacagccuu

SEQ ID NO: 71791 - RNA, 22 nt, Artificial Sequence
  Synthetic
cucguugauacccuacagccuu

SEQ ID NO: 71792 - RNA, 23 nt, Artificial Sequence
  Synthetic
acucguugauacccuacagccuu

SEQ ID NO: 71793 - RNA, 24 nt, Artificial Sequence
  Synthetic
aacucguugauacccuacagccuu

SEQ ID NO: 71794 - RNA, 20 nt, Artificial Sequence
  Synthetic
aggaagaaauauccagccuu

SEQ ID NO: 71795 - RNA, 21 nt, Artificial Sequence
  Synthetic
aaggaagaaauauccagccuu

SEQ ID NO: 71796 - RNA, 22 nt, Artificial Sequence
  Synthetic
aaaggaagaaauauccagccuu

SEQ ID NO: 71797 - RNA, 23 nt, Artificial Sequence
  Synthetic
uaaaggaagaaauauccagccuu

SEQ ID NO: 71798 - RNA, 24 nt, Artificial Sequence
  Synthetic
uuaaaggaagaaauauccagccuu

SEQ ID NO: 71799 - RNA, 19 nt, Artificial Sequence
  Synthetic
agauugcuagguuagccuu

SEQ ID NO: 71800 - RNA, 20 nt, Artificial Sequence
  Synthetic
cagauugcuagguuagccuu

SEQ ID NO: 71801 - RNA, 21 nt, Artificial Sequence
  Synthetic
acagauugcuagguuagccuu

SEQ ID NO: 71802 - RNA, 22 nt, Artificial Sequence
  Synthetic
cacagauugcuagguuagccuu

SEQ ID NO: 71803 - RNA, 23 nt, Artificial Sequence
  Synthetic
ccacagauugcuagguuagccuu

SEQ ID NO: 71804 - RNA, 24 nt, Artificial Sequence
  Synthetic
accacagauugcuagguuagccuu

SEQ ID NO: 71805 - RNA, 19 nt, Artificial Sequence
  Synthetic
agggauauaagaaggccuu

SEQ ID NO: 71806 - RNA, 20 nt, Artificial Sequence
  Synthetic
uagggauauaagaaggccuu

SEQ ID NO: 71807 - RNA, 21 nt, Artificial Sequence
  Synthetic
auagggauauaagaaggccuu

SEQ ID NO: 71808 - RNA, 22 nt, Artificial Sequence
  Synthetic
aauagggauauaagaaggccuu

SEQ ID NO: 71809 - RNA, 23 nt, Artificial Sequence
  Synthetic
uaauagggauauaagaaggccuu

SEQ ID NO: 71810 - RNA, 24 nt, Artificial Sequence
  Synthetic
auaauagggauauaagaaggccuu

SEQ ID NO: 71811 - RNA, 18 nt, Artificial Sequence
  Synthetic
acucauggaaaaugccuu

SEQ ID NO: 71812 - RNA, 19 nt, Artificial Sequence
  Synthetic
cacucauggaaaaugccuu

SEQ ID NO: 71813 - RNA, 20 nt, Artificial Sequence
  Synthetic
acacucauggaaaaugccuu

SEQ ID NO: 71814 - RNA, 21 nt, Artificial Sequence
  Synthetic
uacacucauggaaaaugccuu

SEQ ID NO: 71815 - RNA, 22 nt, Artificial Sequence
  Synthetic
uuacacucauggaaaaugccuu

SEQ ID NO: 71816 - RNA, 23 nt, Artificial Sequence
  Synthetic
uuuacacucauggaaaaugccuu

SEQ ID NO: 71817 - RNA, 18 nt, Artificial Sequence
  Synthetic
auaguuuuugcaugccuu

SEQ ID NO: 71818 - RNA, 19 nt, Artificial Sequence
  Synthetic
aauaguuuuugcaugccuu

SEQ ID NO: 71819 - RNA, 20 nt, Artificial Sequence
  Synthetic
uaauaguuuuugcaugccuu

SEQ ID NO: 71820 - RNA, 21 nt, Artificial Sequence
  Synthetic
auaauaguuuuugcaugccuu

SEQ ID NO: 71821 - RNA, 22 nt, Artificial Sequence
  Synthetic
aauaauaguuuuugcaugccuu

SEQ ID NO: 71822 - RNA, 23 nt, Artificial Sequence
  Synthetic
aaauaauaguuuuugcaugccuu

SEQ ID NO: 71823 - RNA, 24 nt, Artificial Sequence
  Synthetic
uaaauaauaguuuuugcaugccuu

SEQ ID NO: 71824 - RNA, 18 nt, Artificial Sequence
  Synthetic
agaaauaguucaugccuu

SEQ ID NO: 71825 - RNA, 19 nt, Artificial Sequence
  Synthetic
uagaaauaguucaugccuu

SEQ ID NO: 71826 - RNA, 20 nt, Artificial Sequence
  Synthetic
uuagaaauaguucaugccuu

SEQ ID NO: 71827 - RNA, 21 nt, Artificial Sequence
  Synthetic
cuuagaaauaguucaugccuu

SEQ ID NO: 71828 - RNA, 22 nt, Artificial Sequence
  Synthetic
ucuuagaaauaguucaugccuu

SEQ ID NO: 71829 - RNA, 23 nt, Artificial Sequence
  Synthetic
uucuuagaaauaguucaugccuu

SEQ ID NO: 71830 - RNA, 24 nt, Artificial Sequence
  Synthetic
auucuuagaaauaguucaugccuu

SEQ ID NO: 71831 - RNA, 21 nt, Artificial Sequence
  Synthetic
agcuacagagcaauaugccuu

SEQ ID NO: 71832 - RNA, 22 nt, Artificial Sequence
  Synthetic
aagcuacagagcaauaugccuu

SEQ ID NO: 71833 - RNA, 23 nt, Artificial Sequence
  Synthetic
caagcuacagagcaauaugccuu

SEQ ID NO: 71834 - RNA, 24 nt, Artificial Sequence
  Synthetic
acaagcuacagagcaauaugccuu

SEQ ID NO: 71835 - RNA, 21 nt, Artificial Sequence
  Synthetic
uuuuuuucaguacuaugccuu

SEQ ID NO: 71836 - RNA, 22 nt, Artificial Sequence
  Synthetic
uuuuuuuucaguacuaugccuu

SEQ ID NO: 71837 - RNA, 23 nt, Artificial Sequence
  Synthetic
uuuuuuuuucaguacuaugccuu

SEQ ID NO: 71838 - RNA, 24 nt, Artificial Sequence
  Synthetic
uuuuuuuuuucaguacuaugccuu

SEQ ID NO: 71839 - RNA, 18 nt, Artificial Sequence
  Synthetic
cauuuuggcuuaugccuu

SEQ ID NO: 71840 - RNA, 19 nt, Artificial Sequence
  Synthetic
acauuuuggcuuaugccuu

SEQ ID NO: 71841 - RNA, 20 nt, Artificial Sequence
  Synthetic
aacauuuuggcuuaugccuu

SEQ ID NO: 71842 - RNA, 21 nt, Artificial Sequence
  Synthetic
aaacauuuuggcuuaugccuu

SEQ ID NO: 71843 - RNA, 22 nt, Artificial Sequence
  Synthetic
uaaacauuuuggcuuaugccuu

SEQ ID NO: 71844 - RNA, 23 nt, Artificial Sequence
  Synthetic
uuaaacauuuuggcuuaugccuu

SEQ ID NO: 71845 - RNA, 24 nt, Artificial Sequence
  Synthetic
uuuaaacauuuuggcuuaugccuu

SEQ ID NO: 71846 - RNA, 18 nt, Artificial Sequence
  Synthetic
acccguucccucugccuu

SEQ ID NO: 71847 - RNA, 21 nt, Artificial Sequence
  Synthetic
uggacccguucccucugccuu

SEQ ID NO: 71848 - RNA, 22 nt, Artificial Sequence
  Synthetic
uuggacccguucccucugccuu

SEQ ID NO: 71849 - RNA, 23 nt, Artificial Sequence
  Synthetic
uuuggacccguucccucugccuu

SEQ ID NO: 71850 - RNA, 24 nt, Artificial Sequence
  Synthetic
uuuuggacccguucccucugccuu

SEQ ID NO: 71851 - RNA, 18 nt, Artificial Sequence
  Synthetic
ucuaucugccagugccuu

SEQ ID NO: 71852 - RNA, 19 nt, Artificial Sequence
  Synthetic
aucuaucugccagugccuu

SEQ ID NO: 71853 - RNA, 20 nt, Artificial Sequence
  Synthetic
uaucuaucugccagugccuu

SEQ ID NO: 71854 - RNA, 21 nt, Artificial Sequence
  Synthetic
cuaucuaucugccagugccuu

SEQ ID NO: 71855 - RNA, 22 nt, Artificial Sequence
  Synthetic
ccuaucuaucugccagugccuu

SEQ ID NO: 71856 - RNA, 23 nt, Artificial Sequence
  Synthetic
uccuaucuaucugccagugccuu

SEQ ID NO: 71857 - RNA, 24 nt, Artificial Sequence
  Synthetic
auccuaucuaucugccagugccuu

SEQ ID NO: 71858 - RNA, 18 nt, Artificial Sequence
  Synthetic
caaguagccuugugccuu

SEQ ID NO: 71859 - RNA, 21 nt, Artificial Sequence
  Synthetic
aggcaaguagccuugugccuu

SEQ ID NO: 71860 - RNA, 22 nt, Artificial Sequence
  Synthetic
caggcaaguagccuugugccuu

SEQ ID NO: 71861 - RNA, 23 nt, Artificial Sequence
  Synthetic
ucaggcaaguagccuugugccuu

SEQ ID NO: 71862 - RNA, 24 nt, Artificial Sequence
  Synthetic
cucaggcaaguagccuugugccuu

SEQ ID NO: 71863 - RNA, 18 nt, Artificial Sequence
  Synthetic
acuagcuauuugugccuu

SEQ ID NO: 71864 - RNA, 20 nt, Artificial Sequence
  Synthetic
cgacuagcuauuugugccuu

SEQ ID NO: 71865 - RNA, 21 nt, Artificial Sequence
  Synthetic
acgacuagcuauuugugccuu

SEQ ID NO: 71866 - RNA, 22 nt, Artificial Sequence
  Synthetic
aacgacuagcuauuugugccuu

SEQ ID NO: 71867 - RNA, 23 nt, Artificial Sequence
  Synthetic
uaacgacuagcuauuugugccuu

SEQ ID NO: 71868 - RNA, 18 nt, Artificial Sequence
  Synthetic
ucuguaauaguuugccuu

SEQ ID NO: 71869 - RNA, 19 nt, Artificial Sequence
  Synthetic
cucuguaauaguuugccuu

SEQ ID NO: 71870 - RNA, 20 nt, Artificial Sequence
  Synthetic
ucucuguaauaguuugccuu

SEQ ID NO: 71871 - RNA, 21 nt, Artificial Sequence
  Synthetic
uucucuguaauaguuugccuu

SEQ ID NO: 71872 - RNA, 22 nt, Artificial Sequence
  Synthetic
auucucuguaauaguuugccuu

SEQ ID NO: 71873 - RNA, 23 nt, Artificial Sequence
  Synthetic
cauucucuguaauaguuugccuu

SEQ ID NO: 71874 - RNA, 24 nt, Artificial Sequence
  Synthetic
acauucucuguaauaguuugccuu

SEQ ID NO: 71875 - RNA, 18 nt, Artificial Sequence
  Synthetic
aaacauacauuuugccuu

SEQ ID NO: 71876 - RNA, 19 nt, Artificial Sequence
  Synthetic
aaaacauacauuuugccuu

SEQ ID NO: 71877 - RNA, 21 nt, Artificial Sequence
  Synthetic
ugaaaacauacauuuugccuu

SEQ ID NO: 71878 - RNA, 22 nt, Artificial Sequence
  Synthetic
uugaaaacauacauuuugccuu

SEQ ID NO: 71879 - RNA, 23 nt, Artificial Sequence
  Synthetic
cuugaaaacauacauuuugccuu

SEQ ID NO: 71880 - RNA, 24 nt, Artificial Sequence
  Synthetic
acuugaaaacauacauuuugccuu

SEQ ID NO: 71881 - RNA, 18 nt, Artificial Sequence
  Synthetic
ucaccuagauuuugccuu

SEQ ID NO: 71882 - RNA, 20 nt, Artificial Sequence
  Synthetic
ugucaccuagauuuugccuu

SEQ ID NO: 71883 - RNA, 22 nt, Artificial Sequence
  Synthetic
ugugucaccuagauuuugccuu

SEQ ID NO: 71884 - RNA, 23 nt, Artificial Sequence
  Synthetic
uugugucaccuagauuuugccuu

SEQ ID NO: 71885 - RNA, 24 nt, Artificial Sequence
  Synthetic
auugugucaccuagauuuugccuu

SEQ ID NO: 71886 - RNA, 19 nt, Artificial Sequence
  Synthetic
ugauugagacacuauccuu

SEQ ID NO: 71887 - RNA, 20 nt, Artificial Sequence
  Synthetic
cugauugagacacuauccuu

SEQ ID NO: 71888 - RNA, 21 nt, Artificial Sequence
  Synthetic
ucugauugagacacuauccuu

SEQ ID NO: 71889 - RNA, 22 nt, Artificial Sequence
  Synthetic
cucugauugagacacuauccuu

SEQ ID NO: 71890 - RNA, 23 nt, Artificial Sequence
  Synthetic
ucucugauugagacacuauccuu

SEQ ID NO: 71891 - RNA, 24 nt, Artificial Sequence
  Synthetic
cucucugauugagacacuauccuu

SEQ ID NO: 71892 - RNA, 18 nt, Artificial Sequence
  Synthetic
aagucucuguuuauccuu

SEQ ID NO: 71893 - RNA, 19 nt, Artificial Sequence
  Synthetic
aaagucucuguuuauccuu

SEQ ID NO: 71894 - RNA, 21 nt, Artificial Sequence
  Synthetic
ugaaagucucuguuuauccuu

SEQ ID NO: 71895 - RNA, 22 nt, Artificial Sequence
  Synthetic
cugaaagucucuguuuauccuu

SEQ ID NO: 71896 - RNA, 23 nt, Artificial Sequence
  Synthetic
ucugaaagucucuguuuauccuu

SEQ ID NO: 71897 - RNA, 24 nt, Artificial Sequence
  Synthetic
cucugaaagucucuguuuauccuu

SEQ ID NO: 71898 - RNA, 18 nt, Artificial Sequence
  Synthetic
acuacuccuuuuauccuu

SEQ ID NO: 71899 - RNA, 19 nt, Artificial Sequence
  Synthetic
aacuacuccuuuuauccuu

SEQ ID NO: 71900 - RNA, 20 nt, Artificial Sequence
  Synthetic
aaacuacuccuuuuauccuu

SEQ ID NO: 71901 - RNA, 21 nt, Artificial Sequence
  Synthetic
aaaacuacuccuuuuauccuu

SEQ ID NO: 71902 - RNA, 24 nt, Artificial Sequence
  Synthetic
aggaaaacuacuccuuuuauccuu

SEQ ID NO: 71903 - RNA, 18 nt, Artificial Sequence
  Synthetic
ccuuaacaaugccuccuu

SEQ ID NO: 71904 - RNA, 19 nt, Artificial Sequence
  Synthetic
accuuaacaaugccuccuu

SEQ ID NO: 71905 - RNA, 20 nt, Artificial Sequence
  Synthetic
aaccuuaacaaugccuccuu

SEQ ID NO: 71906 - RNA, 21 nt, Artificial Sequence
  Synthetic
caaccuuaacaaugccuccuu

SEQ ID NO: 71907 - RNA, 22 nt, Artificial Sequence
  Synthetic
acaaccuuaacaaugccuccuu

SEQ ID NO: 71908 - RNA, 23 nt, Artificial Sequence
  Synthetic
cacaaccuuaacaaugccuccuu

SEQ ID NO: 71909 - RNA, 24 nt, Artificial Sequence
  Synthetic
ucacaaccuuaacaaugccuccuu

SEQ ID NO: 71910 - RNA, 18 nt, Artificial Sequence
  Synthetic
ccauuucccaugcuccuu

SEQ ID NO: 71911 - RNA, 20 nt, Artificial Sequence
  Synthetic
agccauuucccaugcuccuu

SEQ ID NO: 71912 - RNA, 21 nt, Artificial Sequence
  Synthetic
aagccauuucccaugcuccuu

SEQ ID NO: 71913 - RNA, 19 nt, Artificial Sequence
  Synthetic
ugugagaagaaaaguccuu

SEQ ID NO: 71914 - RNA, 20 nt, Artificial Sequence
  Synthetic
augugagaagaaaaguccuu

SEQ ID NO: 71915 - RNA, 21 nt, Artificial Sequence
  Synthetic
aaugugagaagaaaaguccuu

SEQ ID NO: 71916 - RNA, 22 nt, Artificial Sequence
  Synthetic
caaugugagaagaaaaguccuu

SEQ ID NO: 71917 - RNA, 23 nt, Artificial Sequence
  Synthetic
ucaaugugagaagaaaaguccuu

SEQ ID NO: 71918 - RNA, 24 nt, Artificial Sequence
  Synthetic
uucaaugugagaagaaaaguccuu

SEQ ID NO: 71919 - RNA, 18 nt, Artificial Sequence
  Synthetic
cauuuuuauuagguccuu

SEQ ID NO: 71920 - RNA, 19 nt, Artificial Sequence
  Synthetic
ucauuuuuauuagguccuu

SEQ ID NO: 71921 - RNA, 21 nt, Artificial Sequence
  Synthetic
agucauuuuuauuagguccuu

SEQ ID NO: 71922 - RNA, 22 nt, Artificial Sequence
  Synthetic
aagucauuuuuauuagguccuu

SEQ ID NO: 71923 - RNA, 23 nt, Artificial Sequence
  Synthetic
uaagucauuuuuauuagguccuu

SEQ ID NO: 71924 - RNA, 24 nt, Artificial Sequence
  Synthetic
auaagucauuuuuauuagguccuu

SEQ ID NO: 71925 - RNA, 18 nt, Artificial Sequence
  Synthetic
ugcaacccuuuuguccuu

SEQ ID NO: 71926 - RNA, 20 nt, Artificial Sequence
  Synthetic
ugugcaacccuuuuguccuu

SEQ ID NO: 71927 - RNA, 21 nt, Artificial Sequence
  Synthetic
cugugcaacccuuuuguccuu

SEQ ID NO: 71928 - RNA, 22 nt, Artificial Sequence
  Synthetic
acugugcaacccuuuuguccuu

SEQ ID NO: 71929 - RNA, 23 nt, Artificial Sequence
  Synthetic
aacugugcaacccuuuuguccuu

SEQ ID NO: 71930 - RNA, 18 nt, Artificial Sequence
  Synthetic
aaugaccuaugcuuccuu

SEQ ID NO: 71931 - RNA, 19 nt, Artificial Sequence
  Synthetic
aaaugaccuaugcuuccuu

SEQ ID NO: 71932 - RNA, 20 nt, Artificial Sequence
  Synthetic
aaaaugaccuaugcuuccuu

SEQ ID NO: 71933 - RNA, 21 nt, Artificial Sequence
  Synthetic
uaaaaugaccuaugcuuccuu

SEQ ID NO: 71934 - RNA, 22 nt, Artificial Sequence
  Synthetic
uuaaaaugaccuaugcuuccuu

SEQ ID NO: 71935 - RNA, 23 nt, Artificial Sequence
  Synthetic
uuuaaaaugaccuaugcuuccuu

SEQ ID NO: 71936 - RNA, 24 nt, Artificial Sequence
  Synthetic
uuuuaaaaugaccuaugcuuccuu

SEQ ID NO: 71937 - RNA, 18 nt, Artificial Sequence
  Synthetic
uugggaucauuuuuccuu

SEQ ID NO: 71938 - RNA, 19 nt, Artificial Sequence
  Synthetic
auugggaucauuuuuccuu

SEQ ID NO: 71939 - RNA, 20 nt, Artificial Sequence
  Synthetic
aauugggaucauuuuuccuu

SEQ ID NO: 71940 - RNA, 21 nt, Artificial Sequence
  Synthetic
caauugggaucauuuuuccuu

SEQ ID NO: 71941 - RNA, 23 nt, Artificial Sequence
  Synthetic
ugcaauugggaucauuuuuccuu

SEQ ID NO: 71942 - RNA, 24 nt, Artificial Sequence
  Synthetic
cugcaauugggaucauuuuuccuu

SEQ ID NO: 71943 - RNA, 18 nt, Artificial Sequence
  Synthetic
auuaaguggcaaaagcuu

SEQ ID NO: 71944 - RNA, 19 nt, Artificial Sequence
  Synthetic
uauuaaguggcaaaagcuu

SEQ ID NO: 71945 - RNA, 20 nt, Artificial Sequence
  Synthetic
auauuaaguggcaaaagcuu

SEQ ID NO: 71946 - RNA, 21 nt, Artificial Sequence
  Synthetic
aauauuaaguggcaaaagcuu

SEQ ID NO: 71947 - RNA, 22 nt, Artificial Sequence
  Synthetic
caauauuaaguggcaaaagcuu

SEQ ID NO: 71948 - RNA, 23 nt, Artificial Sequence
  Synthetic
ccaauauuaaguggcaaaagcuu

SEQ ID NO: 71949 - RNA, 24 nt, Artificial Sequence
  Synthetic
accaauauuaaguggcaaaagcuu

SEQ ID NO: 71950 - RNA, 18 nt, Artificial Sequence
  Synthetic
agccaacuagcaaagcuu

SEQ ID NO: 71951 - RNA, 19 nt, Artificial Sequence
  Synthetic
uagccaacuagcaaagcuu

SEQ ID NO: 71952 - RNA, 20 nt, Artificial Sequence
  Synthetic
auagccaacuagcaaagcuu

SEQ ID NO: 71953 - RNA, 21 nt, Artificial Sequence
  Synthetic
cauagccaacuagcaaagcuu

SEQ ID NO: 71954 - RNA, 22 nt, Artificial Sequence
  Synthetic
ucauagccaacuagcaaagcuu

SEQ ID NO: 71955 - RNA, 23 nt, Artificial Sequence
  Synthetic
uucauagccaacuagcaaagcuu

SEQ ID NO: 71956 - RNA, 24 nt, Artificial Sequence
  Synthetic
uuucauagccaacuagcaaagcuu

SEQ ID NO: 71957 - RNA, 21 nt, Artificial Sequence
  Synthetic
uggguauuguaaagaaagcuu

SEQ ID NO: 71958 - RNA, 22 nt, Artificial Sequence
  Synthetic
auggguauuguaaagaaagcuu

SEQ ID NO: 71959 - RNA, 23 nt, Artificial Sequence
  Synthetic
uauggguauuguaaagaaagcuu

SEQ ID NO: 71960 - RNA, 24 nt, Artificial Sequence
  Synthetic
auauggguauuguaaagaaagcuu

SEQ ID NO: 71961 - RNA, 18 nt, Artificial Sequence
  Synthetic
ucaagaaacugcaagcuu

SEQ ID NO: 71962 - RNA, 19 nt, Artificial Sequence
  Synthetic
cucaagaaacugcaagcuu

SEQ ID NO: 71963 - RNA, 20 nt, Artificial Sequence
  Synthetic
ucucaagaaacugcaagcuu

SEQ ID NO: 71964 - RNA, 21 nt, Artificial Sequence
  Synthetic
aucucaagaaacugcaagcuu

SEQ ID NO: 71965 - RNA, 22 nt, Artificial Sequence
  Synthetic
aaucucaagaaacugcaagcuu

SEQ ID NO: 71966 - RNA, 23 nt, Artificial Sequence
  Synthetic
uaaucucaagaaacugcaagcuu

SEQ ID NO: 71967 - RNA, 24 nt, Artificial Sequence
  Synthetic
cuaaucucaagaaacugcaagcuu

SEQ ID NO: 71968 - RNA, 18 nt, Artificial Sequence
  Synthetic
uaaacaaugguuaagcuu

SEQ ID NO: 71969 - RNA, 19 nt, Artificial Sequence
  Synthetic
uuaaacaaugguuaagcuu

SEQ ID NO: 71970 - RNA, 21 nt, Artificial Sequence
  Synthetic
uguuaaacaaugguuaagcuu

SEQ ID NO: 71971 - RNA, 22 nt, Artificial Sequence
  Synthetic
auguuaaacaaugguuaagcuu

SEQ ID NO: 71972 - RNA, 23 nt, Artificial Sequence
  Synthetic
aauguuaaacaaugguuaagcuu

SEQ ID NO: 71973 - RNA, 24 nt, Artificial Sequence
  Synthetic
aaauguuaaacaaugguuaagcuu

SEQ ID NO: 71974 - RNA, 19 nt, Artificial Sequence
  Synthetic
aguauggccaggacagcuu

SEQ ID NO: 71975 - RNA, 21 nt, Artificial Sequence
  Synthetic
agaguauggccaggacagcuu

SEQ ID NO: 71976 - RNA, 23 nt, Artificial Sequence
  Synthetic
agagaguauggccaggacagcuu

SEQ ID NO: 71977 - RNA, 24 nt, Artificial Sequence
  Synthetic
aagagaguauggccaggacagcuu

SEQ ID NO: 71978 - RNA, 18 nt, Artificial Sequence
  Synthetic
uauuacauuauucagcuu

SEQ ID NO: 71979 - RNA, 19 nt, Artificial Sequence
  Synthetic
auauuacauuauucagcuu

SEQ ID NO: 71980 - RNA, 20 nt, Artificial Sequence
  Synthetic
uauauuacauuauucagcuu

SEQ ID NO: 71981 - RNA, 21 nt, Artificial Sequence
  Synthetic
auauauuacauuauucagcuu

SEQ ID NO: 71982 - RNA, 23 nt, Artificial Sequence
  Synthetic
ugauauauuacauuauucagcuu

SEQ ID NO: 71983 - RNA, 24 nt, Artificial Sequence
  Synthetic
uugauauauuacauuauucagcuu

SEQ ID NO: 71984 - RNA, 21 nt, Artificial Sequence
  Synthetic
agguagaaaaagagagagcuu

SEQ ID NO: 71985 - RNA, 23 nt, Artificial Sequence
  Synthetic
cgagguagaaaaagagagagcuu

SEQ ID NO: 71986 - RNA, 24 nt, Artificial Sequence
  Synthetic
ccgagguagaaaaagagagagcuu

SEQ ID NO: 71987 - RNA, 18 nt, Artificial Sequence
  Synthetic
uccaauuguuuggagcuu

SEQ ID NO: 71988 - RNA, 19 nt, Artificial Sequence
  Synthetic
auccaauuguuuggagcuu

SEQ ID NO: 71989 - RNA, 20 nt, Artificial Sequence
  Synthetic
aauccaauuguuuggagcuu

SEQ ID NO: 71990 - RNA, 21 nt, Artificial Sequence
  Synthetic
caauccaauuguuuggagcuu

SEQ ID NO: 71991 - RNA, 22 nt, Artificial Sequence
  Synthetic
ucaauccaauuguuuggagcuu

SEQ ID NO: 71992 - RNA, 23 nt, Artificial Sequence
  Synthetic
aucaauccaauuguuuggagcuu

SEQ ID NO: 71993 - RNA, 18 nt, Artificial Sequence
  Synthetic
uucacuacuuuugagcuu

SEQ ID NO: 71994 - RNA, 19 nt, Artificial Sequence
  Synthetic
uuucacuacuuuugagcuu

SEQ ID NO: 71995 - RNA, 20 nt, Artificial Sequence
  Synthetic
uuuucacuacuuuugagcuu

SEQ ID NO: 71996 - RNA, 21 nt, Artificial Sequence
  Synthetic
auuuucacuacuuuugagcuu

SEQ ID NO: 71997 - RNA, 22 nt, Artificial Sequence
  Synthetic
cauuuucacuacuuuugagcuu

SEQ ID NO: 71998 - RNA, 23 nt, Artificial Sequence
  Synthetic
acauuuucacuacuuuugagcuu

SEQ ID NO: 71999 - RNA, 24 nt, Artificial Sequence
  Synthetic
aacauuuucacuacuuuugagcuu

SEQ ID NO: 72000 - RNA, 18 nt, Artificial Sequence
  Synthetic
cagcauaugccauagcuu

SEQ ID NO: 72001 - RNA, 20 nt, Artificial Sequence
  Synthetic
ugcagcauaugccauagcuu

SEQ ID NO: 72002 - RNA, 21 nt, Artificial Sequence
  Synthetic
augcagcauaugccauagcuu

SEQ ID NO: 72003 - RNA, 23 nt, Artificial Sequence
  Synthetic
ugaugcagcauaugccauagcuu

SEQ ID NO: 72004 - RNA, 24 nt, Artificial Sequence
  Synthetic
cugaugcagcauaugccauagcuu

SEQ ID NO: 72005 - RNA, 19 nt, Artificial Sequence
  Synthetic
ugaguuacuuguauagcuu

SEQ ID NO: 72006 - RNA, 21 nt, Artificial Sequence
  Synthetic
agugaguuacuuguauagcuu

SEQ ID NO: 72007 - RNA, 22 nt, Artificial Sequence
  Synthetic
cagugaguuacuuguauagcuu

SEQ ID NO: 72008 - RNA, 23 nt, Artificial Sequence
  Synthetic
acagugaguuacuuguauagcuu

SEQ ID NO: 72009 - RNA, 24 nt, Artificial Sequence
  Synthetic
cacagugaguuacuuguauagcuu

SEQ ID NO: 72010 - RNA, 18 nt, Artificial Sequence
  Synthetic
cuauuaucucaguagcuu

SEQ ID NO: 72011 - RNA, 21 nt, Artificial Sequence
  Synthetic
uggcuauuaucucaguagcuu

SEQ ID NO: 72012 - RNA, 22 nt, Artificial Sequence
  Synthetic
auggcuauuaucucaguagcuu

SEQ ID NO: 72013 - RNA, 24 nt, Artificial Sequence
  Synthetic
ugauggcuauuaucucaguagcuu

SEQ ID NO: 72014 - RNA, 18 nt, Artificial Sequence
  Synthetic
uucaaucuuugguagcuu

SEQ ID NO: 72015 - RNA, 19 nt, Artificial Sequence
  Synthetic
uuucaaucuuugguagcuu

SEQ ID NO: 72016 - RNA, 20 nt, Artificial Sequence
  Synthetic
auuucaaucuuugguagcuu

SEQ ID NO: 72017 - RNA, 21 nt, Artificial Sequence
  Synthetic
uauuucaaucuuugguagcuu

SEQ ID NO: 72018 - RNA, 23 nt, Artificial Sequence
  Synthetic
aguauuucaaucuuugguagcuu

SEQ ID NO: 72019 - RNA, 18 nt, Artificial Sequence
  Synthetic
aauuuauuacuguagcuu

SEQ ID NO: 72020 - RNA, 19 nt, Artificial Sequence
  Synthetic
aaauuuauuacuguagcuu

SEQ ID NO: 72021 - RNA, 20 nt, Artificial Sequence
  Synthetic
aaaauuuauuacuguagcuu

SEQ ID NO: 72022 - RNA, 21 nt, Artificial Sequence
  Synthetic
uaaaauuuauuacuguagcuu

SEQ ID NO: 72023 - RNA, 22 nt, Artificial Sequence
  Synthetic
uuaaaauuuauuacuguagcuu

SEQ ID NO: 72024 - RNA, 23 nt, Artificial Sequence
  Synthetic
uuuaaaauuuauuacuguagcuu

SEQ ID NO: 72025 - RNA, 24 nt, Artificial Sequence
  Synthetic
uuuuaaaauuuauuacuguagcuu

SEQ ID NO: 72026 - RNA, 21 nt, Artificial Sequence
  Synthetic
cuuuccauguccucuuagcuu

SEQ ID NO: 72027 - RNA, 22 nt, Artificial Sequence
  Synthetic
ccuuuccauguccucuuagcuu

SEQ ID NO: 72028 - RNA, 23 nt, Artificial Sequence
  Synthetic
uccuuuccauguccucuuagcuu

SEQ ID NO: 72029 - RNA, 24 nt, Artificial Sequence
  Synthetic
auccuuuccauguccucuuagcuu

SEQ ID NO: 72030 - RNA, 19 nt, Artificial Sequence
  Synthetic
agagcuuccauagaggcuu

SEQ ID NO: 72031 - RNA, 22 nt, Artificial Sequence
  Synthetic
uggagagcuuccauagaggcuu

SEQ ID NO: 72032 - RNA, 18 nt, Artificial Sequence
  Synthetic
acaugcagugcuaggcuu

SEQ ID NO: 72033 - RNA, 19 nt, Artificial Sequence
  Synthetic
aacaugcagugcuaggcuu

SEQ ID NO: 72034 - RNA, 21 nt, Artificial Sequence
  Synthetic
agaacaugcagugcuaggcuu

SEQ ID NO: 72035 - RNA, 23 nt, Artificial Sequence
  Synthetic
ugagaacaugcagugcuaggcuu

SEQ ID NO: 72036 - RNA, 18 nt, Artificial Sequence
  Synthetic
uuuuucuguugugggcuu

SEQ ID NO: 72037 - RNA, 19 nt, Artificial Sequence
  Synthetic
auuuuucuguugugggcuu

SEQ ID NO: 72038 - RNA, 20 nt, Artificial Sequence
  Synthetic
uauuuuucuguugugggcuu

SEQ ID NO: 72039 - RNA, 21 nt, Artificial Sequence
  Synthetic
cuauuuuucuguugugggcuu

SEQ ID NO: 72040 - RNA, 22 nt, Artificial Sequence
  Synthetic
acuauuuuucuguugugggcuu

SEQ ID NO: 72041 - RNA, 23 nt, Artificial Sequence
  Synthetic
uacuauuuuucuguugugggcuu

SEQ ID NO: 72042 - RNA, 24 nt, Artificial Sequence
  Synthetic
auacuauuuuucuguugugggcuu

SEQ ID NO: 72043 - RNA, 19 nt, Artificial Sequence
  Synthetic
aguagaugugauugggcuu

SEQ ID NO: 72044 - RNA, 20 nt, Artificial Sequence
  Synthetic
uaguagaugugauugggcuu

SEQ ID NO: 72045 - RNA, 21 nt, Artificial Sequence
  Synthetic
auaguagaugugauugggcuu

SEQ ID NO: 72046 - RNA, 22 nt, Artificial Sequence
  Synthetic
aauaguagaugugauugggcuu

SEQ ID NO: 72047 - RNA, 23 nt, Artificial Sequence
  Synthetic
uaauaguagaugugauugggcuu

SEQ ID NO: 72048 - RNA, 18 nt, Artificial Sequence
  Synthetic
uaaucaacuuaauggcuu

SEQ ID NO: 72049 - RNA, 19 nt, Artificial Sequence
  Synthetic
auaaucaacuuaauggcuu

SEQ ID NO: 72050 - RNA, 22 nt, Artificial Sequence
  Synthetic
aggauaaucaacuuaauggcuu

SEQ ID NO: 72051 - RNA, 23 nt, Artificial Sequence
  Synthetic
uaggauaaucaacuuaauggcuu

SEQ ID NO: 72052 - RNA, 18 nt, Artificial Sequence
  Synthetic
aaagauuuuuaauggcuu

SEQ ID NO: 72053 - RNA, 19 nt, Artificial Sequence
  Synthetic
caaagauuuuuaauggcuu

SEQ ID NO: 72054 - RNA, 20 nt, Artificial Sequence
  Synthetic
acaaagauuuuuaauggcuu

SEQ ID NO: 72055 - RNA, 21 nt, Artificial Sequence
  Synthetic
aacaaagauuuuuaauggcuu

SEQ ID NO: 72056 - RNA, 23 nt, Artificial Sequence
  Synthetic
cgaacaaagauuuuuaauggcuu

SEQ ID NO: 72057 - RNA, 24 nt, Artificial Sequence
  Synthetic
acgaacaaagauuuuuaauggcuu

SEQ ID NO: 72058 - RNA, 18 nt, Artificial Sequence
  Synthetic
aaaggaucacacuggcuu

SEQ ID NO: 72059 - RNA, 19 nt, Artificial Sequence
  Synthetic
aaaaggaucacacuggcuu

SEQ ID NO: 72060 - RNA, 20 nt, Artificial Sequence
  Synthetic
uaaaaggaucacacuggcuu

SEQ ID NO: 72061 - RNA, 21 nt, Artificial Sequence
  Synthetic
uuaaaaggaucacacuggcuu

SEQ ID NO: 72062 - RNA, 22 nt, Artificial Sequence
  Synthetic
uuuaaaaggaucacacuggcuu

SEQ ID NO: 72063 - RNA, 23 nt, Artificial Sequence
  Synthetic
uuuuaaaaggaucacacuggcuu

SEQ ID NO: 72064 - RNA, 21 nt, Artificial Sequence
  Synthetic
uguagugucuuugccuggcuu

SEQ ID NO: 72065 - RNA, 22 nt, Artificial Sequence
  Synthetic
uuguagugucuuugccuggcuu

SEQ ID NO: 72066 - RNA, 23 nt, Artificial Sequence
  Synthetic
cuuguagugucuuugccuggcuu

SEQ ID NO: 72067 - RNA, 24 nt, Artificial Sequence
  Synthetic
ccuuguagugucuuugccuggcuu

SEQ ID NO: 72068 - RNA, 18 nt, Artificial Sequence
  Synthetic
caguauacagaguggcuu

SEQ ID NO: 72069 - RNA, 20 nt, Artificial Sequence
  Synthetic
ugcaguauacagaguggcuu

SEQ ID NO: 72070 - RNA, 21 nt, Artificial Sequence
  Synthetic
augcaguauacagaguggcuu

SEQ ID NO: 72071 - RNA, 23 nt, Artificial Sequence
  Synthetic
agaugcaguauacagaguggcuu

SEQ ID NO: 72072 - RNA, 24 nt, Artificial Sequence
  Synthetic
aagaugcaguauacagaguggcuu

SEQ ID NO: 72073 - RNA, 18 nt, Artificial Sequence
  Synthetic
uauuagcaaauguggcuu

SEQ ID NO: 72074 - RNA, 20 nt, Artificial Sequence
  Synthetic
uguauuagcaaauguggcuu

SEQ ID NO: 72075 - RNA, 21 nt, Artificial Sequence
  Synthetic
uuguauuagcaaauguggcuu

SEQ ID NO: 72076 - RNA, 22 nt, Artificial Sequence
  Synthetic
auuguauuagcaaauguggcuu

SEQ ID NO: 72077 - RNA, 23 nt, Artificial Sequence
  Synthetic
aauuguauuagcaaauguggcuu

SEQ ID NO: 72078 - RNA, 24 nt, Artificial Sequence
  Synthetic
uaauuguauuagcaaauguggcuu

SEQ ID NO: 72079 - RNA, 19 nt, Artificial Sequence
  Synthetic
agagugguauguguggcuu

SEQ ID NO: 72080 - RNA, 22 nt, Artificial Sequence
  Synthetic
uggagagugguauguguggcuu

SEQ ID NO: 72081 - RNA, 23 nt, Artificial Sequence
  Synthetic
cuggagagugguauguguggcuu

SEQ ID NO: 72082 - RNA, 24 nt, Artificial Sequence
  Synthetic
acuggagagugguauguguggcuu

SEQ ID NO: 72083 - RNA, 18 nt, Artificial Sequence
  Synthetic
caguuaagagcuuggcuu

SEQ ID NO: 72084 - RNA, 19 nt, Artificial Sequence
  Synthetic
acaguuaagagcuuggcuu

SEQ ID NO: 72085 - RNA, 20 nt, Artificial Sequence
  Synthetic
cacaguuaagagcuuggcuu

SEQ ID NO: 72086 - RNA, 21 nt, Artificial Sequence
  Synthetic
acacaguuaagagcuuggcuu

SEQ ID NO: 72087 - RNA, 23 nt, Artificial Sequence
  Synthetic
agacacaguuaagagcuuggcuu

SEQ ID NO: 72088 - RNA, 24 nt, Artificial Sequence
  Synthetic
cagacacaguuaagagcuuggcuu

SEQ ID NO: 72089 - RNA, 19 nt, Artificial Sequence
  Synthetic
agauguguacauuuggcuu

SEQ ID NO: 72090 - RNA, 20 nt, Artificial Sequence
  Synthetic
aagauguguacauuuggcuu

SEQ ID NO: 72091 - RNA, 21 nt, Artificial Sequence
  Synthetic
uaagauguguacauuuggcuu

SEQ ID NO: 72092 - RNA, 22 nt, Artificial Sequence
  Synthetic
auaagauguguacauuuggcuu

SEQ ID NO: 72093 - RNA, 23 nt, Artificial Sequence
  Synthetic
cauaagauguguacauuuggcuu

SEQ ID NO: 72094 - RNA, 24 nt, Artificial Sequence
  Synthetic
ucauaagauguguacauuuggcuu

SEQ ID NO: 72095 - RNA, 18 nt, Artificial Sequence
  Synthetic
uaugccagggaaaugcuu

SEQ ID NO: 72096 - RNA, 20 nt, Artificial Sequence
  Synthetic
uguaugccagggaaaugcuu

SEQ ID NO: 72097 - RNA, 21 nt, Artificial Sequence
  Synthetic
auguaugccagggaaaugcuu

SEQ ID NO: 72098 - RNA, 22 nt, Artificial Sequence
  Synthetic
aauguaugccagggaaaugcuu

SEQ ID NO: 72099 - RNA, 23 nt, Artificial Sequence
  Synthetic
aaauguaugccagggaaaugcuu

SEQ ID NO: 72100 - RNA, 19 nt, Artificial Sequence
  Synthetic
aguccucuuuuaaaugcuu

SEQ ID NO: 72101 - RNA, 20 nt, Artificial Sequence
  Synthetic
aaguccucuuuuaaaugcuu

SEQ ID NO: 72102 - RNA, 21 nt, Artificial Sequence
  Synthetic
caaguccucuuuuaaaugcuu

SEQ ID NO: 72103 - RNA, 22 nt, Artificial Sequence
  Synthetic
ccaaguccucuuuuaaaugcuu

SEQ ID NO: 72104 - RNA, 23 nt, Artificial Sequence
  Synthetic
uccaaguccucuuuuaaaugcuu

SEQ ID NO: 72105 - RNA, 24 nt, Artificial Sequence
  Synthetic
uuccaaguccucuuuuaaaugcuu

SEQ ID NO: 72106 - RNA, 19 nt, Artificial Sequence
  Synthetic
ugucaaacuagccaugcuu

SEQ ID NO: 72107 - RNA, 21 nt, Artificial Sequence
  Synthetic
agugucaaacuagccaugcuu

SEQ ID NO: 72108 - RNA, 23 nt, Artificial Sequence
  Synthetic
agagugucaaacuagccaugcuu

SEQ ID NO: 72109 - RNA, 24 nt, Artificial Sequence
  Synthetic
uagagugucaaacuagccaugcuu

SEQ ID NO: 72110 - RNA, 18 nt, Artificial Sequence
  Synthetic
uaagucauguucaugcuu

SEQ ID NO: 72111 - RNA, 19 nt, Artificial Sequence
  Synthetic
auaagucauguucaugcuu

SEQ ID NO: 72112 - RNA, 20 nt, Artificial Sequence
  Synthetic
aauaagucauguucaugcuu

SEQ ID NO: 72113 - RNA, 22 nt, Artificial Sequence
  Synthetic
ugaauaagucauguucaugcuu

SEQ ID NO: 72114 - RNA, 23 nt, Artificial Sequence
  Synthetic
uugaauaagucauguucaugcuu

SEQ ID NO: 72115 - RNA, 24 nt, Artificial Sequence
  Synthetic
cuugaauaagucauguucaugcuu

SEQ ID NO: 72116 - RNA, 18 nt, Artificial Sequence
  Synthetic
ucaagggugaggaugcuu

SEQ ID NO: 72117 - RNA, 19 nt, Artificial Sequence
  Synthetic
uucaagggugaggaugcuu

SEQ ID NO: 72118 - RNA, 21 nt, Artificial Sequence
  Synthetic
uguucaagggugaggaugcuu

SEQ ID NO: 72119 - RNA, 22 nt, Artificial Sequence
  Synthetic
auguucaagggugaggaugcuu

SEQ ID NO: 72120 - RNA, 24 nt, Artificial Sequence
  Synthetic
agauguucaagggugaggaugcuu

SEQ ID NO: 72121 - RNA, 18 nt, Artificial Sequence
  Synthetic
uaaauguaauuuaugcuu

SEQ ID NO: 72122 - RNA, 19 nt, Artificial Sequence
  Synthetic
cuaaauguaauuuaugcuu

SEQ ID NO: 72123 - RNA, 20 nt, Artificial Sequence
  Synthetic
ccuaaauguaauuuaugcuu

SEQ ID NO: 72124 - RNA, 21 nt, Artificial Sequence
  Synthetic
cccuaaauguaauuuaugcuu

SEQ ID NO: 72125 - RNA, 22 nt, Artificial Sequence
  Synthetic
ucccuaaauguaauuuaugcuu

SEQ ID NO: 72126 - RNA, 23 nt, Artificial Sequence
  Synthetic
cucccuaaauguaauuuaugcuu

SEQ ID NO: 72127 - RNA, 24 nt, Artificial Sequence
  Synthetic
acucccuaaauguaauuuaugcuu

SEQ ID NO: 72128 - RNA, 18 nt, Artificial Sequence
  Synthetic
acagaguggaaacugcuu

SEQ ID NO: 72129 - RNA, 19 nt, Artificial Sequence
  Synthetic
cacagaguggaaacugcuu

SEQ ID NO: 72130 - RNA, 20 nt, Artificial Sequence
  Synthetic
ccacagaguggaaacugcuu

SEQ ID NO: 72131 - RNA, 21 nt, Artificial Sequence
  Synthetic
uccacagaguggaaacugcuu

SEQ ID NO: 72132 - RNA, 22 nt, Artificial Sequence
  Synthetic
uuccacagaguggaaacugcuu

SEQ ID NO: 72133 - RNA, 23 nt, Artificial Sequence
  Synthetic
cuuccacagaguggaaacugcuu

SEQ ID NO: 72134 - RNA, 24 nt, Artificial Sequence
  Synthetic
ucuuccacagaguggaaacugcuu

SEQ ID NO: 72135 - RNA, 20 nt, Artificial Sequence
  Synthetic
cggauccagaguugcugcuu

SEQ ID NO: 72136 - RNA, 22 nt, Artificial Sequence
  Synthetic
agcggauccagaguugcugcuu

SEQ ID NO: 72137 - RNA, 23 nt, Artificial Sequence
  Synthetic
cagcggauccagaguugcugcuu

SEQ ID NO: 72138 - RNA, 24 nt, Artificial Sequence
  Synthetic
ucagcggauccagaguugcugcuu

SEQ ID NO: 72139 - RNA, 21 nt, Artificial Sequence
  Synthetic
cuuguauguaugaaucugcuu

SEQ ID NO: 72140 - RNA, 22 nt, Artificial Sequence
  Synthetic
acuuguauguaugaaucugcuu

SEQ ID NO: 72141 - RNA, 23 nt, Artificial Sequence
  Synthetic
aacuuguauguaugaaucugcuu

SEQ ID NO: 72142 - RNA, 18 nt, Artificial Sequence
  Synthetic
aagagcacacuggugcuu

SEQ ID NO: 72143 - RNA, 19 nt, Artificial Sequence
  Synthetic
aaagagcacacuggugcuu

SEQ ID NO: 72144 - RNA, 21 nt, Artificial Sequence
  Synthetic
agaaagagcacacuggugcuu

SEQ ID NO: 72145 - RNA, 22 nt, Artificial Sequence
  Synthetic
aagaaagagcacacuggugcuu

SEQ ID NO: 72146 - RNA, 23 nt, Artificial Sequence
  Synthetic
aaagaaagagcacacuggugcuu

SEQ ID NO: 72147 - RNA, 18 nt, Artificial Sequence
  Synthetic
ccaguuaggguugugcuu

SEQ ID NO: 72148 - RNA, 19 nt, Artificial Sequence
  Synthetic
uccaguuaggguugugcuu

SEQ ID NO: 72149 - RNA, 20 nt, Artificial Sequence
  Synthetic
uuccaguuaggguugugcuu

SEQ ID NO: 72150 - RNA, 21 nt, Artificial Sequence
  Synthetic
uuuccaguuaggguugugcuu

SEQ ID NO: 72151 - RNA, 22 nt, Artificial Sequence
  Synthetic
auuuccaguuaggguugugcuu

SEQ ID NO: 72152 - RNA, 23 nt, Artificial Sequence
  Synthetic
cauuuccaguuaggguugugcuu

SEQ ID NO: 72153 - RNA, 24 nt, Artificial Sequence
  Synthetic
ccauuuccaguuaggguugugcuu

SEQ ID NO: 72154 - RNA, 18 nt, Artificial Sequence
  Synthetic
aaccacaucucauugcuu

SEQ ID NO: 72155 - RNA, 19 nt, Artificial Sequence
  Synthetic
uaaccacaucucauugcuu

SEQ ID NO: 72156 - RNA, 20 nt, Artificial Sequence
  Synthetic
uuaaccacaucucauugcuu

SEQ ID NO: 72157 - RNA, 21 nt, Artificial Sequence
  Synthetic
auuaaccacaucucauugcuu

SEQ ID NO: 72158 - RNA, 22 nt, Artificial Sequence
  Synthetic
aauuaaccacaucucauugcuu

SEQ ID NO: 72159 - RNA, 23 nt, Artificial Sequence
  Synthetic
aaauuaaccacaucucauugcuu

SEQ ID NO: 72160 - RNA, 21 nt, Artificial Sequence
  Synthetic
ucuuggauuguuguauugcuu

SEQ ID NO: 72161 - RNA, 22 nt, Artificial Sequence
  Synthetic
uucuuggauuguuguauugcuu

SEQ ID NO: 72162 - RNA, 23 nt, Artificial Sequence
  Synthetic
uuucuuggauuguuguauugcuu

SEQ ID NO: 72163 - RNA, 24 nt, Artificial Sequence
  Synthetic
uuuucuuggauuguuguauugcuu

SEQ ID NO: 72164 - RNA, 18 nt, Artificial Sequence
  Synthetic
uauccauauucuuugcuu

SEQ ID NO: 72165 - RNA, 19 nt, Artificial Sequence
  Synthetic
uuauccauauucuuugcuu

SEQ ID NO: 72166 - RNA, 20 nt, Artificial Sequence
  Synthetic
auuauccauauucuuugcuu

SEQ ID NO: 72167 - RNA, 22 nt, Artificial Sequence
  Synthetic
agauuauccauauucuuugcuu

SEQ ID NO: 72168 - RNA, 23 nt, Artificial Sequence
  Synthetic
uagauuauccauauucuuugcuu

SEQ ID NO: 72169 - RNA, 24 nt, Artificial Sequence
  Synthetic
auagauuauccauauucuuugcuu

SEQ ID NO: 72170 - RNA, 22 nt, Artificial Sequence
  Synthetic
aggcauuauuuuuuguuugcuu

SEQ ID NO: 72171 - RNA, 24 nt, Artificial Sequence
  Synthetic
agaggcauuauuuuuuguuugcuu

SEQ ID NO: 72172 - RNA, 22 nt, Artificial Sequence
  Synthetic
uguuuuuuucucuuuuuugcuu

SEQ ID NO: 72173 - RNA, 24 nt, Artificial Sequence
  Synthetic
aguguuuuuuucucuuuuuugcuu

SEQ ID NO: 72174 - RNA, 18 nt, Artificial Sequence
  Synthetic
auccaguaacaaaaucuu

SEQ ID NO: 72175 - RNA, 19 nt, Artificial Sequence
  Synthetic
uauccaguaacaaaaucuu

SEQ ID NO: 72176 - RNA, 20 nt, Artificial Sequence
  Synthetic
cuauccaguaacaaaaucuu

SEQ ID NO: 72177 - RNA, 22 nt, Artificial Sequence
  Synthetic
agcuauccaguaacaaaaucuu

SEQ ID NO: 72178 - RNA, 23 nt, Artificial Sequence
  Synthetic
uagcuauccaguaacaaaaucuu

SEQ ID NO: 72179 - RNA, 24 nt, Artificial Sequence
  Synthetic
uuagcuauccaguaacaaaaucuu

SEQ ID NO: 72180 - RNA, 18 nt, Artificial Sequence
  Synthetic
cuagucaugugcaaucuu

SEQ ID NO: 72181 - RNA, 19 nt, Artificial Sequence
  Synthetic
ucuagucaugugcaaucuu

SEQ ID NO: 72182 - RNA, 20 nt, Artificial Sequence
  Synthetic
uucuagucaugugcaaucuu

SEQ ID NO: 72183 - RNA, 21 nt, Artificial Sequence
  Synthetic
uuucuagucaugugcaaucuu

SEQ ID NO: 72184 - RNA, 22 nt, Artificial Sequence
  Synthetic
cuuucuagucaugugcaaucuu

SEQ ID NO: 72185 - RNA, 23 nt, Artificial Sequence
  Synthetic
ccuuucuagucaugugcaaucuu

SEQ ID NO: 72186 - RNA, 19 nt, Artificial Sequence
  Synthetic
cgcuccauuguucaaucuu

SEQ ID NO: 72187 - RNA, 20 nt, Artificial Sequence
  Synthetic
acgcuccauuguucaaucuu

SEQ ID NO: 72188 - RNA, 21 nt, Artificial Sequence
  Synthetic
uacgcuccauuguucaaucuu

SEQ ID NO: 72189 - RNA, 22 nt, Artificial Sequence
  Synthetic
auacgcuccauuguucaaucuu

SEQ ID NO: 72190 - RNA, 23 nt, Artificial Sequence
  Synthetic
uauacgcuccauuguucaaucuu

SEQ ID NO: 72191 - RNA, 24 nt, Artificial Sequence
  Synthetic
auauacgcuccauuguucaaucuu

SEQ ID NO: 72192 - RNA, 19 nt, Artificial Sequence
  Synthetic
ugaccuguaauggaaucuu

SEQ ID NO: 72193 - RNA, 20 nt, Artificial Sequence
  Synthetic
uugaccuguaauggaaucuu

SEQ ID NO: 72194 - RNA, 22 nt, Artificial Sequence
  Synthetic
aguugaccuguaauggaaucuu

SEQ ID NO: 72195 - RNA, 23 nt, Artificial Sequence
  Synthetic
aaguugaccuguaauggaaucuu

SEQ ID NO: 72196 - RNA, 24 nt, Artificial Sequence
  Synthetic
aaaguugaccuguaauggaaucuu

SEQ ID NO: 72197 - RNA, 21 nt, Artificial Sequence
  Synthetic
ucaguuuuaaaagguaaucuu

SEQ ID NO: 72198 - RNA, 22 nt, Artificial Sequence
  Synthetic
aucaguuuuaaaagguaaucuu

SEQ ID NO: 72199 - RNA, 23 nt, Artificial Sequence
  Synthetic
caucaguuuuaaaagguaaucuu

SEQ ID NO: 72200 - RNA, 24 nt, Artificial Sequence
  Synthetic
ucaucaguuuuaaaagguaaucuu

SEQ ID NO: 72201 - RNA, 18 nt, Artificial Sequence
  Synthetic
uacccuuuauuuaaucuu

SEQ ID NO: 72202 - RNA, 19 nt, Artificial Sequence
  Synthetic
uuacccuuuauuuaaucuu

SEQ ID NO: 72203 - RNA, 20 nt, Artificial Sequence
  Synthetic
uuuacccuuuauuuaaucuu

SEQ ID NO: 72204 - RNA, 21 nt, Artificial Sequence
  Synthetic
uuuuacccuuuauuuaaucuu

SEQ ID NO: 72205 - RNA, 22 nt, Artificial Sequence
  Synthetic
uuuuuacccuuuauuuaaucuu

SEQ ID NO: 72206 - RNA, 23 nt, Artificial Sequence
  Synthetic
auuuuuacccuuuauuuaaucuu

SEQ ID NO: 72207 - RNA, 24 nt, Artificial Sequence
  Synthetic
cauuuuuacccuuuauuuaaucuu

SEQ ID NO: 72208 - RNA, 19 nt, Artificial Sequence
  Synthetic
agugcaaauuucucaucuu

SEQ ID NO: 72209 - RNA, 20 nt, Artificial Sequence
  Synthetic
uagugcaaauuucucaucuu

SEQ ID NO: 72210 - RNA, 21 nt, Artificial Sequence
  Synthetic
cuagugcaaauuucucaucuu

SEQ ID NO: 72211 - RNA, 22 nt, Artificial Sequence
  Synthetic
ucuagugcaaauuucucaucuu

SEQ ID NO: 72212 - RNA, 23 nt, Artificial Sequence
  Synthetic
aucuagugcaaauuucucaucuu

SEQ ID NO: 72213 - RNA, 24 nt, Artificial Sequence
  Synthetic
aaucuagugcaaauuucucaucuu

SEQ ID NO: 72214 - RNA, 18 nt, Artificial Sequence
  Synthetic
ccagcugagaaugaucuu

SEQ ID NO: 72215 - RNA, 19 nt, Artificial Sequence
  Synthetic
uccagcugagaaugaucuu

SEQ ID NO: 72216 - RNA, 20 nt, Artificial Sequence
  Synthetic
uuccagcugagaaugaucuu

SEQ ID NO: 72217 - RNA, 21 nt, Artificial Sequence
  Synthetic
auuccagcugagaaugaucuu

SEQ ID NO: 72218 - RNA, 22 nt, Artificial Sequence
  Synthetic
aauuccagcugagaaugaucuu

SEQ ID NO: 72219 - RNA, 23 nt, Artificial Sequence
  Synthetic
uaauuccagcugagaaugaucuu

SEQ ID NO: 72220 - RNA, 24 nt, Artificial Sequence
  Synthetic
auaauuccagcugagaaugaucuu

SEQ ID NO: 72221 - RNA, 18 nt, Artificial Sequence
  Synthetic
accuugucagccuaucuu

SEQ ID NO: 72222 - RNA, 19 nt, Artificial Sequence
  Synthetic
aaccuugucagccuaucuu

SEQ ID NO: 72223 - RNA, 20 nt, Artificial Sequence
  Synthetic
caaccuugucagccuaucuu

SEQ ID NO: 72224 - RNA, 21 nt, Artificial Sequence
  Synthetic
acaaccuugucagccuaucuu

SEQ ID NO: 72225 - RNA, 23 nt, Artificial Sequence
  Synthetic
ugacaaccuugucagccuaucuu

SEQ ID NO: 72226 - RNA, 19 nt, Artificial Sequence
  Synthetic
agucuuuggauaguaucuu

SEQ ID NO: 72227 - RNA, 20 nt, Artificial Sequence
  Synthetic
cagucuuuggauaguaucuu

SEQ ID NO: 72228 - RNA, 21 nt, Artificial Sequence
  Synthetic
acagucuuuggauaguaucuu

SEQ ID NO: 72229 - RNA, 22 nt, Artificial Sequence
  Synthetic
uacagucuuuggauaguaucuu

SEQ ID NO: 72230 - RNA, 23 nt, Artificial Sequence
  Synthetic
cuacagucuuuggauaguaucuu

SEQ ID NO: 72231 - RNA, 24 nt, Artificial Sequence
  Synthetic
ucuacagucuuuggauaguaucuu

SEQ ID NO: 72232 - RNA, 18 nt, Artificial Sequence
  Synthetic
ugaugcagcagguaucuu

SEQ ID NO: 72233 - RNA, 19 nt, Artificial Sequence
  Synthetic
augaugcagcagguaucuu

SEQ ID NO: 72234 - RNA, 21 nt, Artificial Sequence
  Synthetic
agaugaugcagcagguaucuu

SEQ ID NO: 72235 - RNA, 22 nt, Artificial Sequence
  Synthetic
uagaugaugcagcagguaucuu

SEQ ID NO: 72236 - RNA, 23 nt, Artificial Sequence
  Synthetic
auagaugaugcagcagguaucuu

SEQ ID NO: 72237 - RNA, 24 nt, Artificial Sequence
  Synthetic
aauagaugaugcagcagguaucuu

SEQ ID NO: 72238 - RNA, 21 nt, Artificial Sequence
  Synthetic
aggggcuuaaaacuguaucuu

SEQ ID NO: 72239 - RNA, 22 nt, Artificial Sequence
  Synthetic
uaggggcuuaaaacuguaucuu

SEQ ID NO: 72240 - RNA, 23 nt, Artificial Sequence
  Synthetic
auaggggcuuaaaacuguaucuu

SEQ ID NO: 72241 - RNA, 22 nt, Artificial Sequence
  Synthetic
agguuuuuaaauuaauuaucuu

SEQ ID NO: 72242 - RNA, 23 nt, Artificial Sequence
  Synthetic
uagguuuuuaaauuaauuaucuu

SEQ ID NO: 72243 - RNA, 24 nt, Artificial Sequence
  Synthetic
auagguuuuuaaauuaauuaucuu

SEQ ID NO: 72244 - RNA, 21 nt, Artificial Sequence
  Synthetic
aauuuuauauuugcuuaucuu

SEQ ID NO: 72245 - RNA, 22 nt, Artificial Sequence
  Synthetic
caauuuuauauuugcuuaucuu

SEQ ID NO: 72246 - RNA, 23 nt, Artificial Sequence
  Synthetic
acaauuuuauauuugcuuaucuu

SEQ ID NO: 72247 - RNA, 24 nt, Artificial Sequence
  Synthetic
uacaauuuuauauuugcuuaucuu

SEQ ID NO: 72248 - RNA, 18 nt, Artificial Sequence
  Synthetic
uguauacauuguuaucuu

SEQ ID NO: 72249 - RNA, 19 nt, Artificial Sequence
  Synthetic
cuguauacauuguuaucuu

SEQ ID NO: 72250 - RNA, 20 nt, Artificial Sequence
  Synthetic
ucuguauacauuguuaucuu

SEQ ID NO: 72251 - RNA, 22 nt, Artificial Sequence
  Synthetic
ugucuguauacauuguuaucuu

SEQ ID NO: 72252 - RNA, 24 nt, Artificial Sequence
  Synthetic
ugugucuguauacauuguuaucuu

SEQ ID NO: 72253 - RNA, 18 nt, Artificial Sequence
  Synthetic
ugagaauguuuuuaucuu

SEQ ID NO: 72254 - RNA, 20 nt, Artificial Sequence
  Synthetic
ugugagaauguuuuuaucuu

SEQ ID NO: 72255 - RNA, 21 nt, Artificial Sequence
  Synthetic
uugugagaauguuuuuaucuu

SEQ ID NO: 72256 - RNA, 22 nt, Artificial Sequence
  Synthetic
uuugugagaauguuuuuaucuu

SEQ ID NO: 72257 - RNA, 23 nt, Artificial Sequence
  Synthetic
auuugugagaauguuuuuaucuu

SEQ ID NO: 72258 - RNA, 18 nt, Artificial Sequence
  Synthetic
auaccugguacaacucuu

SEQ ID NO: 72259 - RNA, 19 nt, Artificial Sequence
  Synthetic
aauaccugguacaacucuu

SEQ ID NO: 72260 - RNA, 20 nt, Artificial Sequence
  Synthetic
aaauaccugguacaacucuu

SEQ ID NO: 72261 - RNA, 22 nt, Artificial Sequence
  Synthetic
ugaaauaccugguacaacucuu

SEQ ID NO: 72262 - RNA, 24 nt, Artificial Sequence
  Synthetic
ugugaaauaccugguacaacucuu

SEQ ID NO: 72263 - RNA, 18 nt, Artificial Sequence
  Synthetic
uuccgcuuuagcacucuu

SEQ ID NO: 72264 - RNA, 19 nt, Artificial Sequence
  Synthetic
uuuccgcuuuagcacucuu

SEQ ID NO: 72265 - RNA, 20 nt, Artificial Sequence
  Synthetic
auuuccgcuuuagcacucuu

SEQ ID NO: 72266 - RNA, 21 nt, Artificial Sequence
  Synthetic
cauuuccgcuuuagcacucuu

SEQ ID NO: 72267 - RNA, 24 nt, Artificial Sequence
  Synthetic
aggcauuuccgcuuuagcacucuu

SEQ ID NO: 72268 - RNA, 19 nt, Artificial Sequence
  Synthetic
cgaauguguugagacucuu

SEQ ID NO: 72269 - RNA, 20 nt, Artificial Sequence
  Synthetic
acgaauguguugagacucuu

SEQ ID NO: 72270 - RNA, 21 nt, Artificial Sequence
  Synthetic
cacgaauguguugagacucuu

SEQ ID NO: 72271 - RNA, 22 nt, Artificial Sequence
  Synthetic
ucacgaauguguugagacucuu

SEQ ID NO: 72272 - RNA, 23 nt, Artificial Sequence
  Synthetic
cucacgaauguguugagacucuu

SEQ ID NO: 72273 - RNA, 19 nt, Artificial Sequence
  Synthetic
agucuuucguuauacucuu

SEQ ID NO: 72274 - RNA, 20 nt, Artificial Sequence
  Synthetic
aagucuuucguuauacucuu

SEQ ID NO: 72275 - RNA, 21 nt, Artificial Sequence
  Synthetic
aaagucuuucguuauacucuu

SEQ ID NO: 72276 - RNA, 22 nt, Artificial Sequence
  Synthetic
caaagucuuucguuauacucuu

SEQ ID NO: 72277 - RNA, 23 nt, Artificial Sequence
  Synthetic
acaaagucuuucguuauacucuu

SEQ ID NO: 72278 - RNA, 21 nt, Artificial Sequence
  Synthetic
ucauauauuuuauuuacucuu

SEQ ID NO: 72279 - RNA, 23 nt, Artificial Sequence
  Synthetic
ugucauauauuuuauuuacucuu

SEQ ID NO: 72280 - RNA, 18 nt, Artificial Sequence
  Synthetic
cagacccccagaccucuu

SEQ ID NO: 72281 - RNA, 19 nt, Artificial Sequence
  Synthetic
ccagacccccagaccucuu

SEQ ID NO: 72282 - RNA, 20 nt, Artificial Sequence
  Synthetic
cccagacccccagaccucuu

SEQ ID NO: 72283 - RNA, 21 nt, Artificial Sequence
  Synthetic
acccagacccccagaccucuu

SEQ ID NO: 72284 - RNA, 22 nt, Artificial Sequence
  Synthetic
aacccagacccccagaccucuu

SEQ ID NO: 72285 - RNA, 23 nt, Artificial Sequence
  Synthetic
aaacccagacccccagaccucuu

SEQ ID NO: 72286 - RNA, 24 nt, Artificial Sequence
  Synthetic
uaaacccagacccccagaccucuu

SEQ ID NO: 72287 - RNA, 18 nt, Artificial Sequence
  Synthetic
cucuuaggcauaccucuu

SEQ ID NO: 72288 - RNA, 19 nt, Artificial Sequence
  Synthetic
acucuuaggcauaccucuu

SEQ ID NO: 72289 - RNA, 21 nt, Artificial Sequence
  Synthetic
agacucuuaggcauaccucuu

SEQ ID NO: 72290 - RNA, 22 nt, Artificial Sequence
  Synthetic
aagacucuuaggcauaccucuu

SEQ ID NO: 72291 - RNA, 23 nt, Artificial Sequence
  Synthetic
aaagacucuuaggcauaccucuu

SEQ ID NO: 72292 - RNA, 24 nt, Artificial Sequence
  Synthetic
caaagacucuuaggcauaccucuu

SEQ ID NO: 72293 - RNA, 19 nt, Artificial Sequence
  Synthetic
aguuggaauguuaccucuu

SEQ ID NO: 72294 - RNA, 20 nt, Artificial Sequence
  Synthetic
uaguuggaauguuaccucuu

SEQ ID NO: 72295 - RNA, 22 nt, Artificial Sequence
  Synthetic
uguaguuggaauguuaccucuu

SEQ ID NO: 72296 - RNA, 24 nt, Artificial Sequence
  Synthetic
aguguaguuggaauguuaccucuu

SEQ ID NO: 72297 - RNA, 18 nt, Artificial Sequence
  Synthetic
aaacagucacacccucuu

SEQ ID NO: 72298 - RNA, 19 nt, Artificial Sequence
  Synthetic
aaaacagucacacccucuu

SEQ ID NO: 72299 - RNA, 20 nt, Artificial Sequence
  Synthetic
aaaaacagucacacccucuu

SEQ ID NO: 72300 - RNA, 21 nt, Artificial Sequence
  Synthetic
aaaaaacagucacacccucuu

SEQ ID NO: 72301 - RNA, 20 nt, Artificial Sequence
  Synthetic
aggaugauauagagccucuu

SEQ ID NO: 72302 - RNA, 24 nt, Artificial Sequence
  Synthetic
ugggaggaugauauagagccucuu

SEQ ID NO: 72303 - RNA, 18 nt, Artificial Sequence
  Synthetic
uuuaggaaagcagcucuu

SEQ ID NO: 72304 - RNA, 19 nt, Artificial Sequence
  Synthetic
uuuuaggaaagcagcucuu

SEQ ID NO: 72305 - RNA, 21 nt, Artificial Sequence
  Synthetic
aguuuuaggaaagcagcucuu

SEQ ID NO: 72306 - RNA, 22 nt, Artificial Sequence
  Synthetic
uaguuuuaggaaagcagcucuu

SEQ ID NO: 72307 - RNA, 23 nt, Artificial Sequence
  Synthetic
uuaguuuuaggaaagcagcucuu

SEQ ID NO: 72308 - RNA, 24 nt, Artificial Sequence
  Synthetic
uuuaguuuuaggaaagcagcucuu

SEQ ID NO: 72309 - RNA, 18 nt, Artificial Sequence
  Synthetic
augguacacagugcucuu

SEQ ID NO: 72310 - RNA, 19 nt, Artificial Sequence
  Synthetic
aaugguacacagugcucuu

SEQ ID NO: 72311 - RNA, 21 nt, Artificial Sequence
  Synthetic
agaaugguacacagugcucuu

SEQ ID NO: 72312 - RNA, 23 nt, Artificial Sequence
  Synthetic
ugagaaugguacacagugcucuu

SEQ ID NO: 72313 - RNA, 24 nt, Artificial Sequence
  Synthetic
cugagaaugguacacagugcucuu

SEQ ID NO: 72314 - RNA, 19 nt, Artificial Sequence
  Synthetic
ugaagccucaacaucucuu

SEQ ID NO: 72315 - RNA, 20 nt, Artificial Sequence
  Synthetic
uugaagccucaacaucucuu

SEQ ID NO: 72316 - RNA, 21 nt, Artificial Sequence
  Synthetic
auugaagccucaacaucucuu

SEQ ID NO: 72317 - RNA, 23 nt, Artificial Sequence
  Synthetic
ugauugaagccucaacaucucuu

SEQ ID NO: 72318 - RNA, 18 nt, Artificial Sequence
  Synthetic
augggacacaacucucuu

SEQ ID NO: 72319 - RNA, 19 nt, Artificial Sequence
  Synthetic
aaugggacacaacucucuu

SEQ ID NO: 72320 - RNA, 21 nt, Artificial Sequence
  Synthetic
agaaugggacacaacucucuu

SEQ ID NO: 72321 - RNA, 23 nt, Artificial Sequence
  Synthetic
agagaaugggacacaacucucuu

SEQ ID NO: 72322 - RNA, 24 nt, Artificial Sequence
  Synthetic
aagagaaugggacacaacucucuu

SEQ ID NO: 72323 - RNA, 18 nt, Artificial Sequence
  Synthetic
aguuuuauuuugucucuu

SEQ ID NO: 72324 - RNA, 19 nt, Artificial Sequence
  Synthetic
uaguuuuauuuugucucuu

SEQ ID NO: 72325 - RNA, 21 nt, Artificial Sequence
  Synthetic
cguaguuuuauuuugucucuu

SEQ ID NO: 72326 - RNA, 22 nt, Artificial Sequence
  Synthetic
ucguaguuuuauuuugucucuu

SEQ ID NO: 72327 - RNA, 23 nt, Artificial Sequence
  Synthetic
aucguaguuuuauuuugucucuu

SEQ ID NO: 72328 - RNA, 24 nt, Artificial Sequence
  Synthetic
aaucguaguuuuauuuugucucuu

SEQ ID NO: 72329 - RNA, 18 nt, Artificial Sequence
  Synthetic
aaaauguugacuucucuu

SEQ ID NO: 72330 - RNA, 19 nt, Artificial Sequence
  Synthetic
aaaaauguugacuucucuu

SEQ ID NO: 72331 - RNA, 20 nt, Artificial Sequence
  Synthetic
aaaaaauguugacuucucuu

SEQ ID NO: 72332 - RNA, 21 nt, Artificial Sequence
  Synthetic
aaaaaaauguugacuucucuu

SEQ ID NO: 72333 - RNA, 22 nt, Artificial Sequence
  Synthetic
aaaaaaaauguugacuucucuu

SEQ ID NO: 72334 - RNA, 23 nt, Artificial Sequence
  Synthetic
aaaaaaaaauguugacuucucuu

SEQ ID NO: 72335 - RNA, 24 nt, Artificial Sequence
  Synthetic
aaaaaaaaaauguugacuucucuu

SEQ ID NO: 72336 - RNA, 19 nt, Artificial Sequence
  Synthetic
aggcauuguugguucucuu

SEQ ID NO: 72337 - RNA, 20 nt, Artificial Sequence
  Synthetic
aaggcauuguugguucucuu

SEQ ID NO: 72338 - RNA, 22 nt, Artificial Sequence
  Synthetic
ugaaggcauuguugguucucuu

SEQ ID NO: 72339 - RNA, 23 nt, Artificial Sequence
  Synthetic
augaaggcauuguugguucucuu

SEQ ID NO: 72340 - RNA, 24 nt, Artificial Sequence
  Synthetic
uaugaaggcauuguugguucucuu

SEQ ID NO: 72341 - RNA, 18 nt, Artificial Sequence
  Synthetic
uuuugccaauguucucuu

SEQ ID NO: 72342 - RNA, 19 nt, Artificial Sequence
  Synthetic
uuuuugccaauguucucuu

SEQ ID NO: 72343 - RNA, 20 nt, Artificial Sequence
  Synthetic
uuuuuugccaauguucucuu

SEQ ID NO: 72344 - RNA, 22 nt, Artificial Sequence
  Synthetic
uguuuuuugccaauguucucuu

SEQ ID NO: 72345 - RNA, 23 nt, Artificial Sequence
  Synthetic
uuguuuuuugccaauguucucuu

SEQ ID NO: 72346 - RNA, 24 nt, Artificial Sequence
  Synthetic
uuuguuuuuugccaauguucucuu

SEQ ID NO: 72347 - RNA, 18 nt, Artificial Sequence
  Synthetic
ucuaaugcccuuucucuu

SEQ ID NO: 72348 - RNA, 19 nt, Artificial Sequence
  Synthetic
uucuaaugcccuuucucuu

SEQ ID NO: 72349 - RNA, 20 nt, Artificial Sequence
  Synthetic
cuucuaaugcccuuucucuu

SEQ ID NO: 72350 - RNA, 21 nt, Artificial Sequence
  Synthetic
acuucuaaugcccuuucucuu

SEQ ID NO: 72351 - RNA, 22 nt, Artificial Sequence
  Synthetic
cacuucuaaugcccuuucucuu

SEQ ID NO: 72352 - RNA, 23 nt, Artificial Sequence
  Synthetic
acacuucuaaugcccuuucucuu

SEQ ID NO: 72353 - RNA, 24 nt, Artificial Sequence
  Synthetic
aacacuucuaaugcccuuucucuu

SEQ ID NO: 72354 - RNA, 18 nt, Artificial Sequence
  Synthetic
aacugcuucguuucucuu

SEQ ID NO: 72355 - RNA, 19 nt, Artificial Sequence
  Synthetic
caacugcuucguuucucuu

SEQ ID NO: 72356 - RNA, 20 nt, Artificial Sequence
  Synthetic
acaacugcuucguuucucuu

SEQ ID NO: 72357 - RNA, 21 nt, Artificial Sequence
  Synthetic
uacaacugcuucguuucucuu

SEQ ID NO: 72358 - RNA, 19 nt, Artificial Sequence
  Synthetic
ugggagaugggcaagucuu

SEQ ID NO: 72359 - RNA, 21 nt, Artificial Sequence
  Synthetic
ugugggagaugggcaagucuu

SEQ ID NO: 72360 - RNA, 22 nt, Artificial Sequence
  Synthetic
uugugggagaugggcaagucuu

SEQ ID NO: 72361 - RNA, 23 nt, Artificial Sequence
  Synthetic
uuugugggagaugggcaagucuu

SEQ ID NO: 72362 - RNA, 18 nt, Artificial Sequence
  Synthetic
acuuaggaaaucagucuu

SEQ ID NO: 72363 - RNA, 20 nt, Artificial Sequence
  Synthetic
agacuuaggaaaucagucuu

SEQ ID NO: 72364 - RNA, 21 nt, Artificial Sequence
  Synthetic
aagacuuaggaaaucagucuu

SEQ ID NO: 72365 - RNA, 24 nt, Artificial Sequence
  Synthetic
uggaagacuuaggaaaucagucuu

SEQ ID NO: 72366 - RNA, 18 nt, Artificial Sequence
  Synthetic
ucacuuuuuuucagucuu

SEQ ID NO: 72367 - RNA, 19 nt, Artificial Sequence
  Synthetic
uucacuuuuuuucagucuu

SEQ ID NO: 72368 - RNA, 20 nt, Artificial Sequence
  Synthetic
cuucacuuuuuuucagucuu

SEQ ID NO: 72369 - RNA, 21 nt, Artificial Sequence
  Synthetic
acuucacuuuuuuucagucuu

SEQ ID NO: 72370 - RNA, 24 nt, Artificial Sequence
  Synthetic
uggacuucacuuuuuuucagucuu

SEQ ID NO: 72371 - RNA, 18 nt, Artificial Sequence
  Synthetic
uucccaaccccuagucuu

SEQ ID NO: 72372 - RNA, 19 nt, Artificial Sequence
  Synthetic
cuucccaaccccuagucuu

SEQ ID NO: 72373 - RNA, 20 nt, Artificial Sequence
  Synthetic
acuucccaaccccuagucuu

SEQ ID NO: 72374 - RNA, 21 nt, Artificial Sequence
  Synthetic
uacuucccaaccccuagucuu

SEQ ID NO: 72375 - RNA, 23 nt, Artificial Sequence
  Synthetic
uguacuucccaaccccuagucuu

SEQ ID NO: 72376 - RNA, 24 nt, Artificial Sequence
  Synthetic
auguacuucccaaccccuagucuu

SEQ ID NO: 72377 - RNA, 18 nt, Artificial Sequence
  Synthetic
uuaacaagaaaaugucuu

SEQ ID NO: 72378 - RNA, 19 nt, Artificial Sequence
  Synthetic
cuuaacaagaaaaugucuu

SEQ ID NO: 72379 - RNA, 20 nt, Artificial Sequence
  Synthetic
acuuaacaagaaaaugucuu

SEQ ID NO: 72380 - RNA, 21 nt, Artificial Sequence
  Synthetic
aacuuaacaagaaaaugucuu

SEQ ID NO: 72381 - RNA, 22 nt, Artificial Sequence
  Synthetic
caacuuaacaagaaaaugucuu

SEQ ID NO: 72382 - RNA, 24 nt, Artificial Sequence
  Synthetic
cgcaacuuaacaagaaaaugucuu

SEQ ID NO: 72383 - RNA, 18 nt, Artificial Sequence
  Synthetic
cuuuacugggaaugucuu

SEQ ID NO: 72384 - RNA, 19 nt, Artificial Sequence
  Synthetic
acuuuacugggaaugucuu

SEQ ID NO: 72385 - RNA, 20 nt, Artificial Sequence
  Synthetic
uacuuuacugggaaugucuu

SEQ ID NO: 72386 - RNA, 21 nt, Artificial Sequence
  Synthetic
uuacuuuacugggaaugucuu

SEQ ID NO: 72387 - RNA, 23 nt, Artificial Sequence
  Synthetic
uguuacuuuacugggaaugucuu

SEQ ID NO: 72388 - RNA, 24 nt, Artificial Sequence
  Synthetic
auguuacuuuacugggaaugucuu

SEQ ID NO: 72389 - RNA, 18 nt, Artificial Sequence
  Synthetic
auuguuaguugaugucuu

SEQ ID NO: 72390 - RNA, 21 nt, Artificial Sequence
  Synthetic
uggauuguuaguugaugucuu

SEQ ID NO: 72391 - RNA, 23 nt, Artificial Sequence
  Synthetic
uguggauuguuaguugaugucuu

SEQ ID NO: 72392 - RNA, 24 nt, Artificial Sequence
  Synthetic
auguggauuguuaguugaugucuu

SEQ ID NO: 72393 - RNA, 19 nt, Artificial Sequence
  Synthetic
ugaccaauuuuuaugucuu

SEQ ID NO: 72394 - RNA, 20 nt, Artificial Sequence
  Synthetic
cugaccaauuuuuaugucuu

SEQ ID NO: 72395 - RNA, 21 nt, Artificial Sequence
  Synthetic
acugaccaauuuuuaugucuu

SEQ ID NO: 72396 - RNA, 22 nt, Artificial Sequence
  Synthetic
aacugaccaauuuuuaugucuu

SEQ ID NO: 72397 - RNA, 23 nt, Artificial Sequence
  Synthetic
aaacugaccaauuuuuaugucuu

SEQ ID NO: 72398 - RNA, 24 nt, Artificial Sequence
  Synthetic
uaaacugaccaauuuuuaugucuu

SEQ ID NO: 72399 - RNA, 18 nt, Artificial Sequence
  Synthetic
aagggcuaacccugucuu

SEQ ID NO: 72400 - RNA, 19 nt, Artificial Sequence
  Synthetic
uaagggcuaacccugucuu

SEQ ID NO: 72401 - RNA, 20 nt, Artificial Sequence
  Synthetic
cuaagggcuaacccugucuu

SEQ ID NO: 72402 - RNA, 21 nt, Artificial Sequence
  Synthetic
ccuaagggcuaacccugucuu

SEQ ID NO: 72403 - RNA, 22 nt, Artificial Sequence
  Synthetic
uccuaagggcuaacccugucuu

SEQ ID NO: 72404 - RNA, 23 nt, Artificial Sequence
  Synthetic
uuccuaagggcuaacccugucuu

SEQ ID NO: 72405 - RNA, 24 nt, Artificial Sequence
  Synthetic
uuuccuaagggcuaacccugucuu

SEQ ID NO: 72406 - RNA, 21 nt, Artificial Sequence
  Synthetic
accugccugcuuugcugucuu

SEQ ID NO: 72407 - RNA, 22 nt, Artificial Sequence
  Synthetic
aaccugccugcuuugcugucuu

SEQ ID NO: 72408 - RNA, 24 nt, Artificial Sequence
  Synthetic
ugaaccugccugcuuugcugucuu

SEQ ID NO: 72409 - RNA, 18 nt, Artificial Sequence
  Synthetic
uauuccaauaucugucuu

SEQ ID NO: 72410 - RNA, 20 nt, Artificial Sequence
  Synthetic
uguauuccaauaucugucuu

SEQ ID NO: 72411 - RNA, 22 nt, Artificial Sequence
  Synthetic
aguguauuccaauaucugucuu

SEQ ID NO: 72412 - RNA, 21 nt, Artificial Sequence
  Synthetic
auagguagauuauucugucuu

SEQ ID NO: 72413 - RNA, 22 nt, Artificial Sequence
  Synthetic
uauagguagauuauucugucuu

SEQ ID NO: 72414 - RNA, 23 nt, Artificial Sequence
  Synthetic
auauagguagauuauucugucuu

SEQ ID NO: 72415 - RNA, 24 nt, Artificial Sequence
  Synthetic
uauauagguagauuauucugucuu

SEQ ID NO: 72416 - RNA, 18 nt, Artificial Sequence
  Synthetic
uauauauguuuuugucuu

SEQ ID NO: 72417 - RNA, 19 nt, Artificial Sequence
  Synthetic
cuauauauguuuuugucuu

SEQ ID NO: 72418 - RNA, 20 nt, Artificial Sequence
  Synthetic
ucuauauauguuuuugucuu

SEQ ID NO: 72419 - RNA, 21 nt, Artificial Sequence
  Synthetic
cucuauauauguuuuugucuu

SEQ ID NO: 72420 - RNA, 22 nt, Artificial Sequence
  Synthetic
ucucuauauauguuuuugucuu

SEQ ID NO: 72421 - RNA, 23 nt, Artificial Sequence
  Synthetic
uucucuauauauguuuuugucuu

SEQ ID NO: 72422 - RNA, 24 nt, Artificial Sequence
  Synthetic
auucucuauauauguuuuugucuu

SEQ ID NO: 72423 - RNA, 18 nt, Artificial Sequence
  Synthetic
cuucuuaucuaaauucuu

SEQ ID NO: 72424 - RNA, 19 nt, Artificial Sequence
  Synthetic
ucuucuuaucuaaauucuu

SEQ ID NO: 72425 - RNA, 20 nt, Artificial Sequence
  Synthetic
cucuucuuaucuaaauucuu

SEQ ID NO: 72426 - RNA, 21 nt, Artificial Sequence
  Synthetic
ccucuucuuaucuaaauucuu

SEQ ID NO: 72427 - RNA, 22 nt, Artificial Sequence
  Synthetic
uccucuucuuaucuaaauucuu

SEQ ID NO: 72428 - RNA, 23 nt, Artificial Sequence
  Synthetic
uuccucuucuuaucuaaauucuu

SEQ ID NO: 72429 - RNA, 24 nt, Artificial Sequence
  Synthetic
uuuccucuucuuaucuaaauucuu

SEQ ID NO: 72430 - RNA, 19 nt, Artificial Sequence
  Synthetic
ugcacaagaaacaauucuu

SEQ ID NO: 72431 - RNA, 21 nt, Artificial Sequence
  Synthetic
agugcacaagaaacaauucuu

SEQ ID NO: 72432 - RNA, 22 nt, Artificial Sequence
  Synthetic
aagugcacaagaaacaauucuu

SEQ ID NO: 72433 - RNA, 23 nt, Artificial Sequence
  Synthetic
caagugcacaagaaacaauucuu

SEQ ID NO: 72434 - RNA, 24 nt, Artificial Sequence
  Synthetic
ucaagugcacaagaaacaauucuu

SEQ ID NO: 72435 - RNA, 18 nt, Artificial Sequence
  Synthetic
uaauuuuuagcaauucuu

SEQ ID NO: 72436 - RNA, 19 nt, Artificial Sequence
  Synthetic
auaauuuuuagcaauucuu

SEQ ID NO: 72437 - RNA, 20 nt, Artificial Sequence
  Synthetic
aauaauuuuuagcaauucuu

SEQ ID NO: 72438 - RNA, 21 nt, Artificial Sequence
  Synthetic
aaauaauuuuuagcaauucuu

SEQ ID NO: 72439 - RNA, 22 nt, Artificial Sequence
  Synthetic
aaaauaauuuuuagcaauucuu

SEQ ID NO: 72440 - RNA, 24 nt, Artificial Sequence
  Synthetic
agaaaauaauuuuuagcaauucuu

SEQ ID NO: 72441 - RNA, 19 nt, Artificial Sequence
  Synthetic
ugaaaagguuggaauucuu

SEQ ID NO: 72442 - RNA, 20 nt, Artificial Sequence
  Synthetic
augaaaagguuggaauucuu

SEQ ID NO: 72443 - RNA, 21 nt, Artificial Sequence
  Synthetic
aaugaaaagguuggaauucuu

SEQ ID NO: 72444 - RNA, 22 nt, Artificial Sequence
  Synthetic
aaaugaaaagguuggaauucuu

SEQ ID NO: 72445 - RNA, 23 nt, Artificial Sequence
  Synthetic
caaaugaaaagguuggaauucuu

SEQ ID NO: 72446 - RNA, 18 nt, Artificial Sequence
  Synthetic
aaugaacuucuaauucuu

SEQ ID NO: 72447 - RNA, 20 nt, Artificial Sequence
  Synthetic
agaaugaacuucuaauucuu

SEQ ID NO: 72448 - RNA, 21 nt, Artificial Sequence
  Synthetic
uagaaugaacuucuaauucuu

SEQ ID NO: 72449 - RNA, 22 nt, Artificial Sequence
  Synthetic
auagaaugaacuucuaauucuu

SEQ ID NO: 72450 - RNA, 23 nt, Artificial Sequence
  Synthetic
aauagaaugaacuucuaauucuu

SEQ ID NO: 72451 - RNA, 24 nt, Artificial Sequence
  Synthetic
aaauagaaugaacuucuaauucuu

SEQ ID NO: 72452 - RNA, 18 nt, Artificial Sequence
  Synthetic
ucauuuaacaacauucuu

SEQ ID NO: 72453 - RNA, 19 nt, Artificial Sequence
  Synthetic
cucauuuaacaacauucuu

SEQ ID NO: 72454 - RNA, 20 nt, Artificial Sequence
  Synthetic
acucauuuaacaacauucuu

SEQ ID NO: 72455 - RNA, 21 nt, Artificial Sequence
  Synthetic
uacucauuuaacaacauucuu

SEQ ID NO: 72456 - RNA, 22 nt, Artificial Sequence
  Synthetic
uuacucauuuaacaacauucuu

SEQ ID NO: 72457 - RNA, 23 nt, Artificial Sequence
  Synthetic
auuacucauuuaacaacauucuu

SEQ ID NO: 72458 - RNA, 18 nt, Artificial Sequence
  Synthetic
cucaucuuagccauucuu

SEQ ID NO: 72459 - RNA, 19 nt, Artificial Sequence
  Synthetic
ucucaucuuagccauucuu

SEQ ID NO: 72460 - RNA, 20 nt, Artificial Sequence
  Synthetic
aucucaucuuagccauucuu

SEQ ID NO: 72461 - RNA, 21 nt, Artificial Sequence
  Synthetic
aaucucaucuuagccauucuu

SEQ ID NO: 72462 - RNA, 22 nt, Artificial Sequence
  Synthetic
uaaucucaucuuagccauucuu

SEQ ID NO: 72463 - RNA, 23 nt, Artificial Sequence
  Synthetic
uuaaucucaucuuagccauucuu

SEQ ID NO: 72464 - RNA, 24 nt, Artificial Sequence
  Synthetic
auuaaucucaucuuagccauucuu

SEQ ID NO: 72465 - RNA, 21 nt, Artificial Sequence
  Synthetic
uuuauucuuagugucauucuu

SEQ ID NO: 72466 - RNA, 23 nt, Artificial Sequence
  Synthetic
aguuuauucuuagugucauucuu

SEQ ID NO: 72467 - RNA, 18 nt, Artificial Sequence
  Synthetic
aucagacucaggauucuu

SEQ ID NO: 72468 - RNA, 19 nt, Artificial Sequence
  Synthetic
uaucagacucaggauucuu

SEQ ID NO: 72469 - RNA, 21 nt, Artificial Sequence
  Synthetic
aguaucagacucaggauucuu

SEQ ID NO: 72470 - RNA, 22 nt, Artificial Sequence
  Synthetic
aaguaucagacucaggauucuu

SEQ ID NO: 72471 - RNA, 23 nt, Artificial Sequence
  Synthetic
aaaguaucagacucaggauucuu

SEQ ID NO: 72472 - RNA, 24 nt, Artificial Sequence
  Synthetic
caaaguaucagacucaggauucuu

SEQ ID NO: 72473 - RNA, 18 nt, Artificial Sequence
  Synthetic
uaugcccucuggauucuu

SEQ ID NO: 72474 - RNA, 20 nt, Artificial Sequence
  Synthetic
uguaugcccucuggauucuu

SEQ ID NO: 72475 - RNA, 21 nt, Artificial Sequence
  Synthetic
auguaugcccucuggauucuu

SEQ ID NO: 72476 - RNA, 23 nt, Artificial Sequence
  Synthetic
agauguaugcccucuggauucuu

SEQ ID NO: 72477 - RNA, 24 nt, Artificial Sequence
  Synthetic
aagauguaugcccucuggauucuu

SEQ ID NO: 72478 - RNA, 19 nt, Artificial Sequence
  Synthetic
cgaagggaaaaugauucuu

SEQ ID NO: 72479 - RNA, 20 nt, Artificial Sequence
  Synthetic
ucgaagggaaaaugauucuu

SEQ ID NO: 72480 - RNA, 22 nt, Artificial Sequence
  Synthetic
agucgaagggaaaaugauucuu

SEQ ID NO: 72481 - RNA, 23 nt, Artificial Sequence
  Synthetic
aagucgaagggaaaaugauucuu

SEQ ID NO: 72482 - RNA, 24 nt, Artificial Sequence
  Synthetic
aaagucgaagggaaaaugauucuu

SEQ ID NO: 72483 - RNA, 18 nt, Artificial Sequence
  Synthetic
ugaggcuaguauauucuu

SEQ ID NO: 72484 - RNA, 19 nt, Artificial Sequence
  Synthetic
augaggcuaguauauucuu

SEQ ID NO: 72485 - RNA, 20 nt, Artificial Sequence
  Synthetic
aaugaggcuaguauauucuu

SEQ ID NO: 72486 - RNA, 21 nt, Artificial Sequence
  Synthetic
aaaugaggcuaguauauucuu

SEQ ID NO: 72487 - RNA, 22 nt, Artificial Sequence
  Synthetic
aaaaugaggcuaguauauucuu

SEQ ID NO: 72488 - RNA, 24 nt, Artificial Sequence
  Synthetic
agaaaaugaggcuaguauauucuu

SEQ ID NO: 72489 - RNA, 18 nt, Artificial Sequence
  Synthetic
aauauuuuagguauucuu

SEQ ID NO: 72490 - RNA, 19 nt, Artificial Sequence
  Synthetic
uaauauuuuagguauucuu

SEQ ID NO: 72491 - RNA, 20 nt, Artificial Sequence
  Synthetic
auaauauuuuagguauucuu

SEQ ID NO: 72492 - RNA, 21 nt, Artificial Sequence
  Synthetic
aauaauauuuuagguauucuu

SEQ ID NO: 72493 - RNA, 22 nt, Artificial Sequence
  Synthetic
uaauaauauuuuagguauucuu

SEQ ID NO: 72494 - RNA, 23 nt, Artificial Sequence
  Synthetic
uuaauaauauuuuagguauucuu

SEQ ID NO: 72495 - RNA, 20 nt, Artificial Sequence
  Synthetic
aggugucuccugaacuucuu

SEQ ID NO: 72496 - RNA, 21 nt, Artificial Sequence
  Synthetic
caggugucuccugaacuucuu

SEQ ID NO: 72497 - RNA, 22 nt, Artificial Sequence
  Synthetic
acaggugucuccugaacuucuu

SEQ ID NO: 72498 - RNA, 23 nt, Artificial Sequence
  Synthetic
uacaggugucuccugaacuucuu

SEQ ID NO: 72499 - RNA, 18 nt, Artificial Sequence
  Synthetic
acacacugugaacuucuu

SEQ ID NO: 72500 - RNA, 19 nt, Artificial Sequence
  Synthetic
uacacacugugaacuucuu

SEQ ID NO: 72501 - RNA, 20 nt, Artificial Sequence
  Synthetic
auacacacugugaacuucuu

SEQ ID NO: 72502 - RNA, 21 nt, Artificial Sequence
  Synthetic
cauacacacugugaacuucuu

SEQ ID NO: 72503 - RNA, 22 nt, Artificial Sequence
  Synthetic
acauacacacugugaacuucuu

SEQ ID NO: 72504 - RNA, 23 nt, Artificial Sequence
  Synthetic
aacauacacacugugaacuucuu

SEQ ID NO: 72505 - RNA, 24 nt, Artificial Sequence
  Synthetic
caacauacacacugugaacuucuu

SEQ ID NO: 72506 - RNA, 18 nt, Artificial Sequence
  Synthetic
uaaugcuauugacuucuu

SEQ ID NO: 72507 - RNA, 19 nt, Artificial Sequence
  Synthetic
auaaugcuauugacuucuu

SEQ ID NO: 72508 - RNA, 20 nt, Artificial Sequence
  Synthetic
aauaaugcuauugacuucuu

SEQ ID NO: 72509 - RNA, 21 nt, Artificial Sequence
  Synthetic
aaauaaugcuauugacuucuu

SEQ ID NO: 72510 - RNA, 22 nt, Artificial Sequence
  Synthetic
uaaauaaugcuauugacuucuu

SEQ ID NO: 72511 - RNA, 23 nt, Artificial Sequence
  Synthetic
uuaaauaaugcuauugacuucuu

SEQ ID NO: 72512 - RNA, 24 nt, Artificial Sequence
  Synthetic
uuuaaauaaugcuauugacuucuu

SEQ ID NO: 72513 - RNA, 18 nt, Artificial Sequence
  Synthetic
ccuuauuccauacuucuu

SEQ ID NO: 72514 - RNA, 19 nt, Artificial Sequence
  Synthetic
cccuuauuccauacuucuu

SEQ ID NO: 72515 - RNA, 20 nt, Artificial Sequence
  Synthetic
acccuuauuccauacuucuu

SEQ ID NO: 72516 - RNA, 21 nt, Artificial Sequence
  Synthetic
uacccuuauuccauacuucuu

SEQ ID NO: 72517 - RNA, 22 nt, Artificial Sequence
  Synthetic
auacccuuauuccauacuucuu

SEQ ID NO: 72518 - RNA, 23 nt, Artificial Sequence
  Synthetic
aauacccuuauuccauacuucuu

SEQ ID NO: 72519 - RNA, 24 nt, Artificial Sequence
  Synthetic
aaauacccuuauuccauacuucuu

SEQ ID NO: 72520 - RNA, 21 nt, Artificial Sequence
  Synthetic
cuuucuuguucucuacuucuu

SEQ ID NO: 72521 - RNA, 22 nt, Artificial Sequence
  Synthetic
acuuucuuguucucuacuucuu

SEQ ID NO: 72522 - RNA, 23 nt, Artificial Sequence
  Synthetic
uacuuucuuguucucuacuucuu

SEQ ID NO: 72523 - RNA, 24 nt, Artificial Sequence
  Synthetic
cuacuuucuuguucucuacuucuu

SEQ ID NO: 72524 - RNA, 18 nt, Artificial Sequence
  Synthetic
uaugauccauugcuucuu

SEQ ID NO: 72525 - RNA, 20 nt, Artificial Sequence
  Synthetic
aguaugauccauugcuucuu

SEQ ID NO: 72526 - RNA, 21 nt, Artificial Sequence
  Synthetic
aaguaugauccauugcuucuu

SEQ ID NO: 72527 - RNA, 22 nt, Artificial Sequence
  Synthetic
aaaguaugauccauugcuucuu

SEQ ID NO: 72528 - RNA, 23 nt, Artificial Sequence
  Synthetic
aaaaguaugauccauugcuucuu

SEQ ID NO: 72529 - RNA, 24 nt, Artificial Sequence
  Synthetic
caaaaguaugauccauugcuucuu

SEQ ID NO: 72530 - RNA, 18 nt, Artificial Sequence
  Synthetic
caauguauucuucuucuu

SEQ ID NO: 72531 - RNA, 19 nt, Artificial Sequence
  Synthetic
ccaauguauucuucuucuu

SEQ ID NO: 72532 - RNA, 20 nt, Artificial Sequence
  Synthetic
uccaauguauucuucuucuu

SEQ ID NO: 72533 - RNA, 21 nt, Artificial Sequence
  Synthetic
uuccaauguauucuucuucuu

SEQ ID NO: 72534 - RNA, 22 nt, Artificial Sequence
  Synthetic
uuuccaauguauucuucuucuu

SEQ ID NO: 72535 - RNA, 23 nt, Artificial Sequence
  Synthetic
uuuuccaauguauucuucuucuu

SEQ ID NO: 72536 - RNA, 24 nt, Artificial Sequence
  Synthetic
auuuuccaauguauucuucuucuu

SEQ ID NO: 72537 - RNA, 18 nt, Artificial Sequence
  Synthetic
aaacuugagccaguucuu

SEQ ID NO: 72538 - RNA, 19 nt, Artificial Sequence
  Synthetic
aaaacuugagccaguucuu

SEQ ID NO: 72539 - RNA, 21 nt, Artificial Sequence
  Synthetic
ugaaaacuugagccaguucuu

SEQ ID NO: 72540 - RNA, 22 nt, Artificial Sequence
  Synthetic
cugaaaacuugagccaguucuu

SEQ ID NO: 72541 - RNA, 18 nt, Artificial Sequence
  Synthetic
uuuauucugagaguucuu

SEQ ID NO: 72542 - RNA, 19 nt, Artificial Sequence
  Synthetic
auuuauucugagaguucuu

SEQ ID NO: 72543 - RNA, 21 nt, Artificial Sequence
  Synthetic
ugauuuauucugagaguucuu

SEQ ID NO: 72544 - RNA, 22 nt, Artificial Sequence
  Synthetic
augauuuauucugagaguucuu

SEQ ID NO: 72545 - RNA, 24 nt, Artificial Sequence
  Synthetic
ugaugauuuauucugagaguucuu

SEQ ID NO: 72546 - RNA, 18 nt, Artificial Sequence
  Synthetic
uuaaagagcugauuucuu

SEQ ID NO: 72547 - RNA, 19 nt, Artificial Sequence
  Synthetic
cuuaaagagcugauuucuu

SEQ ID NO: 72548 - RNA, 20 nt, Artificial Sequence
  Synthetic
acuuaaagagcugauuucuu

SEQ ID NO: 72549 - RNA, 21 nt, Artificial Sequence
  Synthetic
cacuuaaagagcugauuucuu

SEQ ID NO: 72550 - RNA, 22 nt, Artificial Sequence
  Synthetic
acacuuaaagagcugauuucuu

SEQ ID NO: 72551 - RNA, 23 nt, Artificial Sequence
  Synthetic
cacacuuaaagagcugauuucuu

SEQ ID NO: 72552 - RNA, 18 nt, Artificial Sequence
  Synthetic
caucucaugugguuucuu

SEQ ID NO: 72553 - RNA, 19 nt, Artificial Sequence
  Synthetic
ccaucucaugugguuucuu

SEQ ID NO: 72554 - RNA, 20 nt, Artificial Sequence
  Synthetic
uccaucucaugugguuucuu

SEQ ID NO: 72555 - RNA, 21 nt, Artificial Sequence
  Synthetic
uuccaucucaugugguuucuu

SEQ ID NO: 72556 - RNA, 22 nt, Artificial Sequence
  Synthetic
uuuccaucucaugugguuucuu

SEQ ID NO: 72557 - RNA, 23 nt, Artificial Sequence
  Synthetic
cuuuccaucucaugugguuucuu

SEQ ID NO: 72558 - RNA, 24 nt, Artificial Sequence
  Synthetic
ucuuuccaucucaugugguuucuu

SEQ ID NO: 72559 - RNA, 21 nt, Artificial Sequence
  Synthetic
uaucuuuuguccaauuuucuu

SEQ ID NO: 72560 - RNA, 22 nt, Artificial Sequence
  Synthetic
uuaucuuuuguccaauuuucuu

SEQ ID NO: 72561 - RNA, 23 nt, Artificial Sequence
  Synthetic
cuuaucuuuuguccaauuuucuu

SEQ ID NO: 72562 - RNA, 24 nt, Artificial Sequence
  Synthetic
ccuuaucuuuuguccaauuuucuu

SEQ ID NO: 72563 - RNA, 18 nt, Artificial Sequence
  Synthetic
aggcagcagaauuuucuu

SEQ ID NO: 72564 - RNA, 19 nt, Artificial Sequence
  Synthetic
caggcagcagaauuuucuu

SEQ ID NO: 72565 - RNA, 21 nt, Artificial Sequence
  Synthetic
ugcaggcagcagaauuuucuu

SEQ ID NO: 72566 - RNA, 22 nt, Artificial Sequence
  Synthetic
augcaggcagcagaauuuucuu

SEQ ID NO: 72567 - RNA, 23 nt, Artificial Sequence
  Synthetic
aaugcaggcagcagaauuuucuu

SEQ ID NO: 72568 - RNA, 24 nt, Artificial Sequence
  Synthetic
caaugcaggcagcagaauuuucuu

SEQ ID NO: 72569 - RNA, 18 nt, Artificial Sequence
  Synthetic
uacgauacacauuuucuu

SEQ ID NO: 72570 - RNA, 19 nt, Artificial Sequence
  Synthetic
auacgauacacauuuucuu

SEQ ID NO: 72571 - RNA, 20 nt, Artificial Sequence
  Synthetic
cauacgauacacauuuucuu

SEQ ID NO: 72572 - RNA, 22 nt, Artificial Sequence
  Synthetic
agcauacgauacacauuuucuu

SEQ ID NO: 72573 - RNA, 23 nt, Artificial Sequence
  Synthetic
uagcauacgauacacauuuucuu

SEQ ID NO: 72574 - RNA, 18 nt, Artificial Sequence
  Synthetic
aaaaaguagcauuuucuu

SEQ ID NO: 72575 - RNA, 20 nt, Artificial Sequence
  Synthetic
ugaaaaaguagcauuuucuu

SEQ ID NO: 72576 - RNA, 21 nt, Artificial Sequence
  Synthetic
augaaaaaguagcauuuucuu

SEQ ID NO: 72577 - RNA, 22 nt, Artificial Sequence
  Synthetic
aaugaaaaaguagcauuuucuu

SEQ ID NO: 72578 - RNA, 23 nt, Artificial Sequence
  Synthetic
uaaugaaaaaguagcauuuucuu

SEQ ID NO: 72579 - RNA, 24 nt, Artificial Sequence
  Synthetic
auaaugaaaaaguagcauuuucuu

SEQ ID NO: 72580 - RNA, 21 nt, Artificial Sequence
  Synthetic
aaaaucagaugugauuuucuu

SEQ ID NO: 72581 - RNA, 22 nt, Artificial Sequence
  Synthetic
aaaaaucagaugugauuuucuu

SEQ ID NO: 72582 - RNA, 23 nt, Artificial Sequence
  Synthetic
uaaaaaucagaugugauuuucuu

SEQ ID NO: 72583 - RNA, 24 nt, Artificial Sequence
  Synthetic
auaaaaaucagaugugauuuucuu

SEQ ID NO: 72584 - RNA, 18 nt, Artificial Sequence
  Synthetic
acacucccuccuuuucuu

SEQ ID NO: 72585 - RNA, 19 nt, Artificial Sequence
  Synthetic
uacacucccuccuuuucuu

SEQ ID NO: 72586 - RNA, 20 nt, Artificial Sequence
  Synthetic
auacacucccuccuuuucuu

SEQ ID NO: 72587 - RNA, 21 nt, Artificial Sequence
  Synthetic
aauacacucccuccuuuucuu

SEQ ID NO: 72588 - RNA, 22 nt, Artificial Sequence
  Synthetic
caauacacucccuccuuuucuu

SEQ ID NO: 72589 - RNA, 23 nt, Artificial Sequence
  Synthetic
ucaauacacucccuccuuuucuu

SEQ ID NO: 72590 - RNA, 24 nt, Artificial Sequence
  Synthetic
uucaauacacucccuccuuuucuu

SEQ ID NO: 72591 - RNA, 21 nt, Artificial Sequence
  Synthetic
auucaaguccaauguuuucuu

SEQ ID NO: 72592 - RNA, 22 nt, Artificial Sequence
  Synthetic
cauucaaguccaauguuuucuu

SEQ ID NO: 72593 - RNA, 23 nt, Artificial Sequence
  Synthetic
ucauucaaguccaauguuuucuu

SEQ ID NO: 72594 - RNA, 18 nt, Artificial Sequence
  Synthetic
uaaauagcacuuuuucuu

SEQ ID NO: 72595 - RNA, 19 nt, Artificial Sequence
  Synthetic
uuaaauagcacuuuuucuu

SEQ ID NO: 72596 - RNA, 20 nt, Artificial Sequence
  Synthetic
cuuaaauagcacuuuuucuu

SEQ ID NO: 72597 - RNA, 23 nt, Artificial Sequence
  Synthetic
cggcuuaaauagcacuuuuucuu

SEQ ID NO: 72598 - RNA, 24 nt, Artificial Sequence
  Synthetic
ccggcuuaaauagcacuuuuucuu

SEQ ID NO: 72599 - RNA, 21 nt, Artificial Sequence
  Synthetic
aauacacucauuuuuuuucuu

SEQ ID NO: 72600 - RNA, 22 nt, Artificial Sequence
  Synthetic
uaauacacucauuuuuuuucuu

SEQ ID NO: 72601 - RNA, 23 nt, Artificial Sequence
  Synthetic
auaauacacucauuuuuuuucuu

SEQ ID NO: 72602 - RNA, 24 nt, Artificial Sequence
  Synthetic
uauaauacacucauuuuuuuucuu

SEQ ID NO: 72603 - RNA, 18 nt, Artificial Sequence
  Synthetic
uaauugcaacuaaaaguu

SEQ ID NO: 72604 - RNA, 20 nt, Artificial Sequence
  Synthetic
uguaauugcaacuaaaaguu

SEQ ID NO: 72605 - RNA, 21 nt, Artificial Sequence
  Synthetic
auguaauugcaacuaaaaguu

SEQ ID NO: 72606 - RNA, 22 nt, Artificial Sequence
  Synthetic
cauguaauugcaacuaaaaguu

SEQ ID NO: 72607 - RNA, 23 nt, Artificial Sequence
  Synthetic
acauguaauugcaacuaaaaguu

SEQ ID NO: 72608 - RNA, 24 nt, Artificial Sequence
  Synthetic
cacauguaauugcaacuaaaaguu

SEQ ID NO: 72609 - RNA, 19 nt, Artificial Sequence
  Synthetic
aguauuuuuaguaaaaguu

SEQ ID NO: 72610 - RNA, 21 nt, Artificial Sequence
  Synthetic
agaguauuuuuaguaaaaguu

SEQ ID NO: 72611 - RNA, 22 nt, Artificial Sequence
  Synthetic
aagaguauuuuuaguaaaaguu

SEQ ID NO: 72612 - RNA, 23 nt, Artificial Sequence
  Synthetic
uaagaguauuuuuaguaaaaguu

SEQ ID NO: 72613 - RNA, 24 nt, Artificial Sequence
  Synthetic
uuaagaguauuuuuaguaaaaguu

SEQ ID NO: 72614 - RNA, 18 nt, Artificial Sequence
  Synthetic
agcucaagauacaaaguu

SEQ ID NO: 72615 - RNA, 19 nt, Artificial Sequence
  Synthetic
uagcucaagauacaaaguu

SEQ ID NO: 72616 - RNA, 21 nt, Artificial Sequence
  Synthetic
aguagcucaagauacaaaguu

SEQ ID NO: 72617 - RNA, 21 nt, Artificial Sequence
  Synthetic
uggguuaauuauuacaaaguu

SEQ ID NO: 72618 - RNA, 22 nt, Artificial Sequence
  Synthetic
cuggguuaauuauuacaaaguu

SEQ ID NO: 72619 - RNA, 23 nt, Artificial Sequence
  Synthetic
acuggguuaauuauuacaaaguu

SEQ ID NO: 72620 - RNA, 24 nt, Artificial Sequence
  Synthetic
uacuggguuaauuauuacaaaguu

SEQ ID NO: 72621 - RNA, 21 nt, Artificial Sequence
  Synthetic
aaauaaauauauuaccaaguu

SEQ ID NO: 72622 - RNA, 22 nt, Artificial Sequence
  Synthetic
aaaauaaauauauuaccaaguu

SEQ ID NO: 72623 - RNA, 23 nt, Artificial Sequence
  Synthetic
uaaaauaaauauauuaccaaguu

SEQ ID NO: 72624 - RNA, 18 nt, Artificial Sequence
  Synthetic
caggcauauggccaaguu

SEQ ID NO: 72625 - RNA, 19 nt, Artificial Sequence
  Synthetic
ccaggcauauggccaaguu

SEQ ID NO: 72626 - RNA, 18 nt, Artificial Sequence
  Synthetic
aguuagacaggucaaguu

SEQ ID NO: 72627 - RNA, 21 nt, Artificial Sequence
  Synthetic
aggaguuagacaggucaaguu

SEQ ID NO: 72628 - RNA, 22 nt, Artificial Sequence
  Synthetic
caggaguuagacaggucaaguu

SEQ ID NO: 72629 - RNA, 24 nt, Artificial Sequence
  Synthetic
agcaggaguuagacaggucaaguu

SEQ ID NO: 72630 - RNA, 18 nt, Artificial Sequence
  Synthetic
uaauuacccauagaaguu

SEQ ID NO: 72631 - RNA, 20 nt, Artificial Sequence
  Synthetic
aguaauuacccauagaaguu

SEQ ID NO: 72632 - RNA, 21 nt, Artificial Sequence
  Synthetic
uaguaauuacccauagaaguu

SEQ ID NO: 72633 - RNA, 22 nt, Artificial Sequence
  Synthetic
auaguaauuacccauagaaguu

SEQ ID NO: 72634 - RNA, 23 nt, Artificial Sequence
  Synthetic
cauaguaauuacccauagaaguu

SEQ ID NO: 72635 - RNA, 18 nt, Artificial Sequence
  Synthetic
uguauuacuugggaaguu

SEQ ID NO: 72636 - RNA, 19 nt, Artificial Sequence
  Synthetic
uuguauuacuugggaaguu

SEQ ID NO: 72637 - RNA, 20 nt, Artificial Sequence
  Synthetic
uuuguauuacuugggaaguu

SEQ ID NO: 72638 - RNA, 21 nt, Artificial Sequence
  Synthetic
auuuguauuacuugggaaguu

SEQ ID NO: 72639 - RNA, 22 nt, Artificial Sequence
  Synthetic
uauuuguauuacuugggaaguu

SEQ ID NO: 72640 - RNA, 23 nt, Artificial Sequence
  Synthetic
auauuuguauuacuugggaaguu

SEQ ID NO: 72641 - RNA, 24 nt, Artificial Sequence
  Synthetic
aauauuuguauuacuugggaaguu

SEQ ID NO: 72642 - RNA, 18 nt, Artificial Sequence
  Synthetic
uugauuauaaaugaaguu

SEQ ID NO: 72643 - RNA, 19 nt, Artificial Sequence
  Synthetic
cuugauuauaaaugaaguu

SEQ ID NO: 72644 - RNA, 20 nt, Artificial Sequence
  Synthetic
ccuugauuauaaaugaaguu

SEQ ID NO: 72645 - RNA, 24 nt, Artificial Sequence
  Synthetic
agggccuugauuauaaaugaaguu

SEQ ID NO: 72646 - RNA, 18 nt, Artificial Sequence
  Synthetic
uuccauauggcugaaguu

SEQ ID NO: 72647 - RNA, 19 nt, Artificial Sequence
  Synthetic
auuccauauggcugaaguu

SEQ ID NO: 72648 - RNA, 21 nt, Artificial Sequence
  Synthetic
ugauuccauauggcugaaguu

SEQ ID NO: 72649 - RNA, 23 nt, Artificial Sequence
  Synthetic
ugugauuccauauggcugaaguu

SEQ ID NO: 72650 - RNA, 24 nt, Artificial Sequence
  Synthetic
uugugauuccauauggcugaaguu

SEQ ID NO: 72651 - RNA, 18 nt, Artificial Sequence
  Synthetic
uuuucuucucuauaaguu

SEQ ID NO: 72652 - RNA, 19 nt, Artificial Sequence
  Synthetic
uuuuucuucucuauaaguu

SEQ ID NO: 72653 - RNA, 20 nt, Artificial Sequence
  Synthetic
cuuuuucuucucuauaaguu

SEQ ID NO: 72654 - RNA, 21 nt, Artificial Sequence
  Synthetic
ucuuuuucuucucuauaaguu

SEQ ID NO: 72655 - RNA, 22 nt, Artificial Sequence
  Synthetic
uucuuuuucuucucuauaaguu

SEQ ID NO: 72656 - RNA, 23 nt, Artificial Sequence
  Synthetic
cuucuuuuucuucucuauaaguu

SEQ ID NO: 72657 - RNA, 24 nt, Artificial Sequence
  Synthetic
acuucuuuuucuucucuauaaguu

SEQ ID NO: 72658 - RNA, 21 nt, Artificial Sequence
  Synthetic
cuuuuguuuuacuucuaaguu

SEQ ID NO: 72659 - RNA, 22 nt, Artificial Sequence
  Synthetic
ucuuuuguuuuacuucuaaguu

SEQ ID NO: 72660 - RNA, 23 nt, Artificial Sequence
  Synthetic
aucuuuuguuuuacuucuaaguu

SEQ ID NO: 72661 - RNA, 24 nt, Artificial Sequence
  Synthetic
caucuuuuguuuuacuucuaaguu

SEQ ID NO: 72662 - RNA, 18 nt, Artificial Sequence
  Synthetic
cuuauaaguaaguaaguu

SEQ ID NO: 72663 - RNA, 19 nt, Artificial Sequence
  Synthetic
ccuuauaaguaaguaaguu

SEQ ID NO: 72664 - RNA, 20 nt, Artificial Sequence
  Synthetic
uccuuauaaguaaguaaguu

SEQ ID NO: 72665 - RNA, 21 nt, Artificial Sequence
  Synthetic
cuccuuauaaguaaguaaguu

SEQ ID NO: 72666 - RNA, 22 nt, Artificial Sequence
  Synthetic
acuccuuauaaguaaguaaguu

SEQ ID NO: 72667 - RNA, 23 nt, Artificial Sequence
  Synthetic
cacuccuuauaaguaaguaaguu

SEQ ID NO: 72668 - RNA, 21 nt, Artificial Sequence
  Synthetic
aagacucugauucaguaaguu

SEQ ID NO: 72669 - RNA, 22 nt, Artificial Sequence
  Synthetic
aaagacucugauucaguaaguu

SEQ ID NO: 72670 - RNA, 23 nt, Artificial Sequence
  Synthetic
aaaagacucugauucaguaaguu

SEQ ID NO: 72671 - RNA, 24 nt, Artificial Sequence
  Synthetic
caaaagacucugauucaguaaguu

SEQ ID NO: 72672 - RNA, 20 nt, Artificial Sequence
  Synthetic
uggacaugaaagcguaaguu

SEQ ID NO: 72673 - RNA, 21 nt, Artificial Sequence
  Synthetic
auggacaugaaagcguaaguu

SEQ ID NO: 72674 - RNA, 22 nt, Artificial Sequence
  Synthetic
uauggacaugaaagcguaaguu

SEQ ID NO: 72675 - RNA, 23 nt, Artificial Sequence
  Synthetic
cuauggacaugaaagcguaaguu

SEQ ID NO: 72676 - RNA, 24 nt, Artificial Sequence
  Synthetic
ccuauggacaugaaagcguaaguu

SEQ ID NO: 72677 - RNA, 19 nt, Artificial Sequence
  Synthetic
agagaacucuuuguaaguu

SEQ ID NO: 72678 - RNA, 20 nt, Artificial Sequence
  Synthetic
uagagaacucuuuguaaguu

SEQ ID NO: 72679 - RNA, 21 nt, Artificial Sequence
  Synthetic
uuagagaacucuuuguaaguu

SEQ ID NO: 72680 - RNA, 24 nt, Artificial Sequence
  Synthetic
ugguuagagaacucuuuguaaguu

SEQ ID NO: 72681 - RNA, 19 nt, Artificial Sequence
  Synthetic
aggguguccccauuaaguu

SEQ ID NO: 72682 - RNA, 20 nt, Artificial Sequence
  Synthetic
uaggguguccccauuaaguu

SEQ ID NO: 72683 - RNA, 21 nt, Artificial Sequence
  Synthetic
cuaggguguccccauuaaguu

SEQ ID NO: 72684 - RNA, 22 nt, Artificial Sequence
  Synthetic
ucuaggguguccccauuaaguu

SEQ ID NO: 72685 - RNA, 23 nt, Artificial Sequence
  Synthetic
uucuaggguguccccauuaaguu

SEQ ID NO: 72686 - RNA, 24 nt, Artificial Sequence
  Synthetic
uuucuaggguguccccauuaaguu

SEQ ID NO: 72687 - RNA, 19 nt, Artificial Sequence
  Synthetic
aguaaaggauuauuaaguu

SEQ ID NO: 72688 - RNA, 20 nt, Artificial Sequence
  Synthetic
uaguaaaggauuauuaaguu

SEQ ID NO: 72689 - RNA, 21 nt, Artificial Sequence
  Synthetic
uuaguaaaggauuauuaaguu

SEQ ID NO: 72690 - RNA, 22 nt, Artificial Sequence
  Synthetic
auuaguaaaggauuauuaaguu

SEQ ID NO: 72691 - RNA, 23 nt, Artificial Sequence
  Synthetic
aauuaguaaaggauuauuaaguu

SEQ ID NO: 72692 - RNA, 21 nt, Artificial Sequence
  Synthetic
cucaaggguaauauuuaaguu

SEQ ID NO: 72693 - RNA, 22 nt, Artificial Sequence
  Synthetic
ucucaaggguaauauuuaaguu

SEQ ID NO: 72694 - RNA, 23 nt, Artificial Sequence
  Synthetic
uucucaaggguaauauuuaaguu

SEQ ID NO: 72695 - RNA, 24 nt, Artificial Sequence
  Synthetic
uuucucaaggguaauauuuaaguu

SEQ ID NO: 72696 - RNA, 18 nt, Artificial Sequence
  Synthetic
aauaaagggaaaacaguu

SEQ ID NO: 72697 - RNA, 19 nt, Artificial Sequence
  Synthetic
uaauaaagggaaaacaguu

SEQ ID NO: 72698 - RNA, 20 nt, Artificial Sequence
  Synthetic
uuaauaaagggaaaacaguu

SEQ ID NO: 72699 - RNA, 21 nt, Artificial Sequence
  Synthetic
uuuaauaaagggaaaacaguu

SEQ ID NO: 72700 - RNA, 22 nt, Artificial Sequence
  Synthetic
uuuuaauaaagggaaaacaguu

SEQ ID NO: 72701 - RNA, 24 nt, Artificial Sequence
  Synthetic
uguuuuaauaaagggaaaacaguu

SEQ ID NO: 72702 - RNA, 18 nt, Artificial Sequence
  Synthetic
ugggugacaucaacaguu

SEQ ID NO: 72703 - RNA, 20 nt, Artificial Sequence
  Synthetic
ugugggugacaucaacaguu

SEQ ID NO: 72704 - RNA, 21 nt, Artificial Sequence
  Synthetic
augugggugacaucaacaguu

SEQ ID NO: 72705 - RNA, 23 nt, Artificial Sequence
  Synthetic
ugaugugggugacaucaacaguu

SEQ ID NO: 72706 - RNA, 18 nt, Artificial Sequence
  Synthetic
auuaaugaucuaacaguu

SEQ ID NO: 72707 - RNA, 21 nt, Artificial Sequence
  Synthetic
aggauuaaugaucuaacaguu

SEQ ID NO: 72708 - RNA, 22 nt, Artificial Sequence
  Synthetic
uaggauuaaugaucuaacaguu

SEQ ID NO: 72709 - RNA, 23 nt, Artificial Sequence
  Synthetic
cuaggauuaaugaucuaacaguu

SEQ ID NO: 72710 - RNA, 21 nt, Artificial Sequence
  Synthetic
aaaaggguuuauaguacaguu

SEQ ID NO: 72711 - RNA, 22 nt, Artificial Sequence
  Synthetic
uaaaaggguuuauaguacaguu

SEQ ID NO: 72712 - RNA, 23 nt, Artificial Sequence
  Synthetic
uuaaaaggguuuauaguacaguu

SEQ ID NO: 72713 - RNA, 24 nt, Artificial Sequence
  Synthetic
uuuaaaaggguuuauaguacaguu

SEQ ID NO: 72714 - RNA, 18 nt, Artificial Sequence
  Synthetic
aagaucccgggaccaguu

SEQ ID NO: 72715 - RNA, 19 nt, Artificial Sequence
  Synthetic
uaagaucccgggaccaguu

SEQ ID NO: 72716 - RNA, 20 nt, Artificial Sequence
  Synthetic
cuaagaucccgggaccaguu

SEQ ID NO: 72717 - RNA, 22 nt, Artificial Sequence
  Synthetic
ugcuaagaucccgggaccaguu

SEQ ID NO: 72718 - RNA, 23 nt, Artificial Sequence
  Synthetic
augcuaagaucccgggaccaguu

SEQ ID NO: 72719 - RNA, 24 nt, Artificial Sequence
  Synthetic
aaugcuaagaucccgggaccaguu

SEQ ID NO: 72720 - RNA, 18 nt, Artificial Sequence
  Synthetic
uauaucgugaccccaguu

SEQ ID NO: 72721 - RNA, 19 nt, Artificial Sequence
  Synthetic
cuauaucgugaccccaguu

SEQ ID NO: 72722 - RNA, 20 nt, Artificial Sequence
  Synthetic
ucuauaucgugaccccaguu

SEQ ID NO: 72723 - RNA, 22 nt, Artificial Sequence
  Synthetic
agucuauaucgugaccccaguu

SEQ ID NO: 72724 - RNA, 24 nt, Artificial Sequence
  Synthetic
agagucuauaucgugaccccaguu

SEQ ID NO: 72725 - RNA, 18 nt, Artificial Sequence
  Synthetic
uugguaccauugccaguu

SEQ ID NO: 72726 - RNA, 19 nt, Artificial Sequence
  Synthetic
cuugguaccauugccaguu

SEQ ID NO: 72727 - RNA, 20 nt, Artificial Sequence
  Synthetic
ucuugguaccauugccaguu

SEQ ID NO: 72728 - RNA, 21 nt, Artificial Sequence
  Synthetic
cucuugguaccauugccaguu

SEQ ID NO: 72729 - RNA, 22 nt, Artificial Sequence
  Synthetic
acucuugguaccauugccaguu

SEQ ID NO: 72730 - RNA, 23 nt, Artificial Sequence
  Synthetic
aacucuugguaccauugccaguu

SEQ ID NO: 72731 - RNA, 24 nt, Artificial Sequence
  Synthetic
uaacucuugguaccauugccaguu

SEQ ID NO: 72732 - RNA, 18 nt, Artificial Sequence
  Synthetic
accucucuugaagcaguu

SEQ ID NO: 72733 - RNA, 19 nt, Artificial Sequence
  Synthetic
uaccucucuugaagcaguu

SEQ ID NO: 72734 - RNA, 20 nt, Artificial Sequence
  Synthetic
uuaccucucuugaagcaguu

SEQ ID NO: 72735 - RNA, 21 nt, Artificial Sequence
  Synthetic
cuuaccucucuugaagcaguu

SEQ ID NO: 72736 - RNA, 22 nt, Artificial Sequence
  Synthetic
ccuuaccucucuugaagcaguu

SEQ ID NO: 72737 - RNA, 23 nt, Artificial Sequence
  Synthetic
accuuaccucucuugaagcaguu

SEQ ID NO: 72738 - RNA, 24 nt, Artificial Sequence
  Synthetic
aaccuuaccucucuugaagcaguu

SEQ ID NO: 72739 - RNA, 18 nt, Artificial Sequence
  Synthetic
uaaauggguuaagcaguu

SEQ ID NO: 72740 - RNA, 19 nt, Artificial Sequence
  Synthetic
auaaauggguuaagcaguu

SEQ ID NO: 72741 - RNA, 20 nt, Artificial Sequence
  Synthetic
cauaaauggguuaagcaguu

SEQ ID NO: 72742 - RNA, 23 nt, Artificial Sequence
  Synthetic
aggcauaaauggguuaagcaguu

SEQ ID NO: 72743 - RNA, 24 nt, Artificial Sequence
  Synthetic
uaggcauaaauggguuaagcaguu

SEQ ID NO: 72744 - RNA, 18 nt, Artificial Sequence
  Synthetic
uuacugucccucgcaguu

SEQ ID NO: 72745 - RNA, 19 nt, Artificial Sequence
  Synthetic
auuacugucccucgcaguu

SEQ ID NO: 72746 - RNA, 20 nt, Artificial Sequence
  Synthetic
cauuacugucccucgcaguu

SEQ ID NO: 72747 - RNA, 21 nt, Artificial Sequence
  Synthetic
ucauuacugucccucgcaguu

SEQ ID NO: 72748 - RNA, 22 nt, Artificial Sequence
  Synthetic
uucauuacugucccucgcaguu

SEQ ID NO: 72749 - RNA, 23 nt, Artificial Sequence
  Synthetic
auucauuacugucccucgcaguu

SEQ ID NO: 72750 - RNA, 18 nt, Artificial Sequence
  Synthetic
uauuuaggcaaggcaguu

SEQ ID NO: 72751 - RNA, 19 nt, Artificial Sequence
  Synthetic
auauuuaggcaaggcaguu

SEQ ID NO: 72752 - RNA, 20 nt, Artificial Sequence
  Synthetic
uauauuuaggcaaggcaguu

SEQ ID NO: 72753 - RNA, 22 nt, Artificial Sequence
  Synthetic
aguauauuuaggcaaggcaguu

SEQ ID NO: 72754 - RNA, 23 nt, Artificial Sequence
  Synthetic
aaguauauuuaggcaaggcaguu

SEQ ID NO: 72755 - RNA, 24 nt, Artificial Sequence
  Synthetic
caaguauauuuaggcaaggcaguu

SEQ ID NO: 72756 - RNA, 21 nt, Artificial Sequence
  Synthetic
ucaguugaugaacaggcaguu

SEQ ID NO: 72757 - RNA, 22 nt, Artificial Sequence
  Synthetic
uucaguugaugaacaggcaguu

SEQ ID NO: 72758 - RNA, 23 nt, Artificial Sequence
  Synthetic
uuucaguugaugaacaggcaguu

SEQ ID NO: 72759 - RNA, 24 nt, Artificial Sequence
  Synthetic
cuuucaguugaugaacaggcaguu

SEQ ID NO: 72760 - RNA, 19 nt, Artificial Sequence
  Synthetic
aggauuaggaaaugcaguu

SEQ ID NO: 72761 - RNA, 20 nt, Artificial Sequence
  Synthetic
aaggauuaggaaaugcaguu

SEQ ID NO: 72762 - RNA, 22 nt, Artificial Sequence
  Synthetic
agaaggauuaggaaaugcaguu

SEQ ID NO: 72763 - RNA, 24 nt, Artificial Sequence
  Synthetic
ugagaaggauuaggaaaugcaguu

SEQ ID NO: 72764 - RNA, 19 nt, Artificial Sequence
  Synthetic
agauacugcaaaaucaguu

SEQ ID NO: 72765 - RNA, 20 nt, Artificial Sequence
  Synthetic
aagauacugcaaaaucaguu

SEQ ID NO: 72766 - RNA, 21 nt, Artificial Sequence
  Synthetic
aaagauacugcaaaaucaguu

SEQ ID NO: 72767 - RNA, 22 nt, Artificial Sequence
  Synthetic
aaaagauacugcaaaaucaguu

SEQ ID NO: 72768 - RNA, 23 nt, Artificial Sequence
  Synthetic
uaaaagauacugcaaaaucaguu

SEQ ID NO: 72769 - RNA, 24 nt, Artificial Sequence
  Synthetic
auaaaagauacugcaaaaucaguu

SEQ ID NO: 72770 - RNA, 18 nt, Artificial Sequence
  Synthetic
uacuauauguacucaguu

SEQ ID NO: 72771 - RNA, 19 nt, Artificial Sequence
  Synthetic
auacuauauguacucaguu

SEQ ID NO: 72772 - RNA, 20 nt, Artificial Sequence
  Synthetic
aauacuauauguacucaguu

SEQ ID NO: 72773 - RNA, 18 nt, Artificial Sequence
  Synthetic
aguaccugaguuucaguu

SEQ ID NO: 72774 - RNA, 20 nt, Artificial Sequence
  Synthetic
ugaguaccugaguuucaguu

SEQ ID NO: 72775 - RNA, 21 nt, Artificial Sequence
  Synthetic
augaguaccugaguuucaguu

SEQ ID NO: 72776 - RNA, 22 nt, Artificial Sequence
  Synthetic
aaugaguaccugaguuucaguu

SEQ ID NO: 72777 - RNA, 23 nt, Artificial Sequence
  Synthetic
uaaugaguaccugaguuucaguu

SEQ ID NO: 72778 - RNA, 24 nt, Artificial Sequence
  Synthetic
uuaaugaguaccugaguuucaguu

SEQ ID NO: 72779 - RNA, 18 nt, Artificial Sequence
  Synthetic
agcagaaagcaaagaguu

SEQ ID NO: 72780 - RNA, 19 nt, Artificial Sequence
  Synthetic
uagcagaaagcaaagaguu

SEQ ID NO: 72781 - RNA, 20 nt, Artificial Sequence
  Synthetic
auagcagaaagcaaagaguu

SEQ ID NO: 72782 - RNA, 21 nt, Artificial Sequence
  Synthetic
cauagcagaaagcaaagaguu

SEQ ID NO: 72783 - RNA, 22 nt, Artificial Sequence
  Synthetic
ccauagcagaaagcaaagaguu

SEQ ID NO: 72784 - RNA, 23 nt, Artificial Sequence
  Synthetic
cccauagcagaaagcaaagaguu

SEQ ID NO: 72785 - RNA, 24 nt, Artificial Sequence
  Synthetic
ucccauagcagaaagcaaagaguu

SEQ ID NO: 72786 - RNA, 18 nt, Artificial Sequence
  Synthetic
ucacguauuaccagaguu

SEQ ID NO: 72787 - RNA, 19 nt, Artificial Sequence
  Synthetic
aucacguauuaccagaguu

SEQ ID NO: 72788 - RNA, 20 nt, Artificial Sequence
  Synthetic
caucacguauuaccagaguu

SEQ ID NO: 72789 - RNA, 22 nt, Artificial Sequence
  Synthetic
agcaucacguauuaccagaguu

SEQ ID NO: 72790 - RNA, 23 nt, Artificial Sequence
  Synthetic
aagcaucacguauuaccagaguu

SEQ ID NO: 72791 - RNA, 24 nt, Artificial Sequence
  Synthetic
aaagcaucacguauuaccagaguu

SEQ ID NO: 72792 - RNA, 19 nt, Artificial Sequence
  Synthetic
agauggugaugcuagaguu

SEQ ID NO: 72793 - RNA, 24 nt, Artificial Sequence
  Synthetic
uggggagauggugaugcuagaguu

SEQ ID NO: 72794 - RNA, 18 nt, Artificial Sequence
  Synthetic
cuagauucuaguagaguu

SEQ ID NO: 72795 - RNA, 19 nt, Artificial Sequence
  Synthetic
ucuagauucuaguagaguu

SEQ ID NO: 72796 - RNA, 20 nt, Artificial Sequence
  Synthetic
uucuagauucuaguagaguu

SEQ ID NO: 72797 - RNA, 21 nt, Artificial Sequence
  Synthetic
auucuagauucuaguagaguu

SEQ ID NO: 72798 - RNA, 22 nt, Artificial Sequence
  Synthetic
uauucuagauucuaguagaguu

SEQ ID NO: 72799 - RNA, 23 nt, Artificial Sequence
  Synthetic
auauucuagauucuaguagaguu

SEQ ID NO: 72800 - RNA, 24 nt, Artificial Sequence
  Synthetic
uauauucuagauucuaguagaguu

SEQ ID NO: 72801 - RNA, 18 nt, Artificial Sequence
  Synthetic
accauuaucauuagaguu

SEQ ID NO: 72802 - RNA, 19 nt, Artificial Sequence
  Synthetic
caccauuaucauuagaguu

SEQ ID NO: 72803 - RNA, 20 nt, Artificial Sequence
  Synthetic
ucaccauuaucauuagaguu

SEQ ID NO: 72804 - RNA, 21 nt, Artificial Sequence
  Synthetic
uucaccauuaucauuagaguu

SEQ ID NO: 72805 - RNA, 22 nt, Artificial Sequence
  Synthetic
auucaccauuaucauuagaguu

SEQ ID NO: 72806 - RNA, 23 nt, Artificial Sequence
  Synthetic
aauucaccauuaucauuagaguu

SEQ ID NO: 72807 - RNA, 24 nt, Artificial Sequence
  Synthetic
caauucaccauuaucauuagaguu

SEQ ID NO: 72808 - RNA, 19 nt, Artificial Sequence
  Synthetic
agguagaaaagagggaguu

SEQ ID NO: 72809 - RNA, 20 nt, Artificial Sequence
  Synthetic
aagguagaaaagagggaguu

SEQ ID NO: 72810 - RNA, 22 nt, Artificial Sequence
  Synthetic
agaagguagaaaagagggaguu

SEQ ID NO: 72811 - RNA, 23 nt, Artificial Sequence
  Synthetic
uagaagguagaaaagagggaguu

SEQ ID NO: 72812 - RNA, 24 nt, Artificial Sequence
  Synthetic
cuagaagguagaaaagagggaguu

SEQ ID NO: 72813 - RNA, 21 nt, Artificial Sequence
  Synthetic
agagaugaggauaugggaguu

SEQ ID NO: 72814 - RNA, 22 nt, Artificial Sequence
  Synthetic
aagagaugaggauaugggaguu

SEQ ID NO: 72815 - RNA, 23 nt, Artificial Sequence
  Synthetic
aaagagaugaggauaugggaguu

SEQ ID NO: 72816 - RNA, 18 nt, Artificial Sequence
  Synthetic
uauauaagaguaugaguu

SEQ ID NO: 72817 - RNA, 19 nt, Artificial Sequence
  Synthetic
uuauauaagaguaugaguu

SEQ ID NO: 72818 - RNA, 20 nt, Artificial Sequence
  Synthetic
auuauauaagaguaugaguu

SEQ ID NO: 72819 - RNA, 21 nt, Artificial Sequence
  Synthetic
aauuauauaagaguaugaguu

SEQ ID NO: 72820 - RNA, 22 nt, Artificial Sequence
  Synthetic
uaauuauauaagaguaugaguu

SEQ ID NO: 72821 - RNA, 23 nt, Artificial Sequence
  Synthetic
auaauuauauaagaguaugaguu

SEQ ID NO: 72822 - RNA, 24 nt, Artificial Sequence
  Synthetic
aauaauuauauaagaguaugaguu

SEQ ID NO: 72823 - RNA, 18 nt, Artificial Sequence
  Synthetic
ugaagucugaauugaguu

SEQ ID NO: 72824 - RNA, 19 nt, Artificial Sequence
  Synthetic
augaagucugaauugaguu

SEQ ID NO: 72825 - RNA, 20 nt, Artificial Sequence
  Synthetic
aaugaagucugaauugaguu

SEQ ID NO: 72826 - RNA, 21 nt, Artificial Sequence
  Synthetic
aaaugaagucugaauugaguu

SEQ ID NO: 72827 - RNA, 23 nt, Artificial Sequence
  Synthetic
agaaaugaagucugaauugaguu

SEQ ID NO: 72828 - RNA, 24 nt, Artificial Sequence
  Synthetic
uagaaaugaagucugaauugaguu

SEQ ID NO: 72829 - RNA, 18 nt, Artificial Sequence
  Synthetic
uccauggaaauuugaguu

SEQ ID NO: 72830 - RNA, 20 nt, Artificial Sequence
  Synthetic
uguccauggaaauuugaguu

SEQ ID NO: 72831 - RNA, 22 nt, Artificial Sequence
  Synthetic
uguguccauggaaauuugaguu

SEQ ID NO: 72832 - RNA, 23 nt, Artificial Sequence
  Synthetic
uuguguccauggaaauuugaguu

SEQ ID NO: 72833 - RNA, 24 nt, Artificial Sequence
  Synthetic
auuguguccauggaaauuugaguu

SEQ ID NO: 72834 - RNA, 18 nt, Artificial Sequence
  Synthetic
acaggcaacucaauaguu

SEQ ID NO: 72835 - RNA, 19 nt, Artificial Sequence
  Synthetic
uacaggcaacucaauaguu

SEQ ID NO: 72836 - RNA, 20 nt, Artificial Sequence
  Synthetic
uuacaggcaacucaauaguu

SEQ ID NO: 72837 - RNA, 21 nt, Artificial Sequence
  Synthetic
uuuacaggcaacucaauaguu

SEQ ID NO: 72838 - RNA, 22 nt, Artificial Sequence
  Synthetic
uuuuacaggcaacucaauaguu

SEQ ID NO: 72839 - RNA, 19 nt, Artificial Sequence
  Synthetic
agcauauaacauaauaguu

SEQ ID NO: 72840 - RNA, 20 nt, Artificial Sequence
  Synthetic
aagcauauaacauaauaguu

SEQ ID NO: 72841 - RNA, 18 nt, Artificial Sequence
  Synthetic
aaagaauggagcauaguu

SEQ ID NO: 72842 - RNA, 19 nt, Artificial Sequence
  Synthetic
uaaagaauggagcauaguu

SEQ ID NO: 72843 - RNA, 20 nt, Artificial Sequence
  Synthetic
auaaagaauggagcauaguu

SEQ ID NO: 72844 - RNA, 22 nt, Artificial Sequence
  Synthetic
ugauaaagaauggagcauaguu

SEQ ID NO: 72845 - RNA, 23 nt, Artificial Sequence
  Synthetic
augauaaagaauggagcauaguu

SEQ ID NO: 72846 - RNA, 24 nt, Artificial Sequence
  Synthetic
uaugauaaagaauggagcauaguu

SEQ ID NO: 72847 - RNA, 21 nt, Artificial Sequence
  Synthetic
auucacauucacaauauaguu

SEQ ID NO: 72848 - RNA, 22 nt, Artificial Sequence
  Synthetic
cauucacauucacaauauaguu

SEQ ID NO: 72849 - RNA, 23 nt, Artificial Sequence
  Synthetic
acauucacauucacaauauaguu

SEQ ID NO: 72850 - RNA, 24 nt, Artificial Sequence
  Synthetic
cacauucacauucacaauauaguu

SEQ ID NO: 72851 - RNA, 18 nt, Artificial Sequence
  Synthetic
acuuaauuaucaguaguu

SEQ ID NO: 72852 - RNA, 19 nt, Artificial Sequence
  Synthetic
uacuuaauuaucaguaguu

SEQ ID NO: 72853 - RNA, 20 nt, Artificial Sequence
  Synthetic
uuacuuaauuaucaguaguu

SEQ ID NO: 72854 - RNA, 21 nt, Artificial Sequence
  Synthetic
auuacuuaauuaucaguaguu

SEQ ID NO: 72855 - RNA, 23 nt, Artificial Sequence
  Synthetic
agauuacuuaauuaucaguaguu

SEQ ID NO: 72856 - RNA, 24 nt, Artificial Sequence
  Synthetic
aagauuacuuaauuaucaguaguu

SEQ ID NO: 72857 - RNA, 18 nt, Artificial Sequence
  Synthetic
ugagugaacaagguaguu

SEQ ID NO: 72858 - RNA, 19 nt, Artificial Sequence
  Synthetic
augagugaacaagguaguu

SEQ ID NO: 72859 - RNA, 20 nt, Artificial Sequence
  Synthetic
uaugagugaacaagguaguu

SEQ ID NO: 72860 - RNA, 21 nt, Artificial Sequence
  Synthetic
auaugagugaacaagguaguu

SEQ ID NO: 72861 - RNA, 21 nt, Artificial Sequence
  Synthetic
aguuagaugaagaagguaguu

SEQ ID NO: 72862 - RNA, 22 nt, Artificial Sequence
  Synthetic
caguuagaugaagaagguaguu

SEQ ID NO: 72863 - RNA, 23 nt, Artificial Sequence
  Synthetic
acaguuagaugaagaagguaguu

SEQ ID NO: 72864 - RNA, 24 nt, Artificial Sequence
  Synthetic
aacaguuagaugaagaagguaguu

SEQ ID NO: 72865 - RNA, 18 nt, Artificial Sequence
  Synthetic
auauuauuguauguaguu

SEQ ID NO: 72866 - RNA, 19 nt, Artificial Sequence
  Synthetic
cauauuauuguauguaguu

SEQ ID NO: 72867 - RNA, 20 nt, Artificial Sequence
  Synthetic
ccauauuauuguauguaguu

SEQ ID NO: 72868 - RNA, 21 nt, Artificial Sequence
  Synthetic
uccauauuauuguauguaguu

SEQ ID NO: 72869 - RNA, 22 nt, Artificial Sequence
  Synthetic
auccauauuauuguauguaguu

SEQ ID NO: 72870 - RNA, 23 nt, Artificial Sequence
  Synthetic
cauccauauuauuguauguaguu

SEQ ID NO: 72871 - RNA, 24 nt, Artificial Sequence
  Synthetic
ucauccauauuauuguauguaguu

SEQ ID NO: 72872 - RNA, 18 nt, Artificial Sequence
  Synthetic
uuucuuaagacuguaguu

SEQ ID NO: 72873 - RNA, 19 nt, Artificial Sequence
  Synthetic
cuuucuuaagacuguaguu

SEQ ID NO: 72874 - RNA, 20 nt, Artificial Sequence
  Synthetic
acuuucuuaagacuguaguu

SEQ ID NO: 72875 - RNA, 21 nt, Artificial Sequence
  Synthetic
aacuuucuuaagacuguaguu

SEQ ID NO: 72876 - RNA, 22 nt, Artificial Sequence
  Synthetic
aaacuuucuuaagacuguaguu

SEQ ID NO: 72877 - RNA, 23 nt, Artificial Sequence
  Synthetic
uaaacuuucuuaagacuguaguu

SEQ ID NO: 72878 - RNA, 24 nt, Artificial Sequence
  Synthetic
uuaaacuuucuuaagacuguaguu

SEQ ID NO: 72879 - RNA, 18 nt, Artificial Sequence
  Synthetic
agcaccacagguguaguu

SEQ ID NO: 72880 - RNA, 19 nt, Artificial Sequence
  Synthetic
cagcaccacagguguaguu

SEQ ID NO: 72881 - RNA, 20 nt, Artificial Sequence
  Synthetic
ucagcaccacagguguaguu

SEQ ID NO: 72882 - RNA, 21 nt, Artificial Sequence
  Synthetic
uucagcaccacagguguaguu

SEQ ID NO: 72883 - RNA, 23 nt, Artificial Sequence
  Synthetic
aguucagcaccacagguguaguu

SEQ ID NO: 72884 - RNA, 18 nt, Artificial Sequence
  Synthetic
aaaucuaggccauuaguu

SEQ ID NO: 72885 - RNA, 19 nt, Artificial Sequence
  Synthetic
uaaaucuaggccauuaguu

SEQ ID NO: 72886 - RNA, 20 nt, Artificial Sequence
  Synthetic
cuaaaucuaggccauuaguu

SEQ ID NO: 72887 - RNA, 22 nt, Artificial Sequence
  Synthetic
ugcuaaaucuaggccauuaguu

SEQ ID NO: 72888 - RNA, 23 nt, Artificial Sequence
  Synthetic
augcuaaaucuaggccauuaguu

SEQ ID NO: 72889 - RNA, 24 nt, Artificial Sequence
  Synthetic
uaugcuaaaucuaggccauuaguu

SEQ ID NO: 72890 - RNA, 19 nt, Artificial Sequence
  Synthetic
ugagggauauccauuaguu

SEQ ID NO: 72891 - RNA, 20 nt, Artificial Sequence
  Synthetic
uugagggauauccauuaguu

SEQ ID NO: 72892 - RNA, 21 nt, Artificial Sequence
  Synthetic
cuugagggauauccauuaguu

SEQ ID NO: 72893 - RNA, 22 nt, Artificial Sequence
  Synthetic
ucuugagggauauccauuaguu

SEQ ID NO: 72894 - RNA, 23 nt, Artificial Sequence
  Synthetic
uucuugagggauauccauuaguu

SEQ ID NO: 72895 - RNA, 24 nt, Artificial Sequence
  Synthetic
cuucuugagggauauccauuaguu

SEQ ID NO: 72896 - RNA, 18 nt, Artificial Sequence
  Synthetic
acaucaaugauauuaguu

SEQ ID NO: 72897 - RNA, 19 nt, Artificial Sequence
  Synthetic
aacaucaaugauauuaguu

SEQ ID NO: 72898 - RNA, 20 nt, Artificial Sequence
  Synthetic
aaacaucaaugauauuaguu

SEQ ID NO: 72899 - RNA, 22 nt, Artificial Sequence
  Synthetic
agaaacaucaaugauauuaguu

SEQ ID NO: 72900 - RNA, 23 nt, Artificial Sequence
  Synthetic
cagaaacaucaaugauauuaguu

SEQ ID NO: 72901 - RNA, 24 nt, Artificial Sequence
  Synthetic
ucagaaacaucaaugauauuaguu

SEQ ID NO: 72902 - RNA, 18 nt, Artificial Sequence
  Synthetic
uucaucugguauuuaguu

SEQ ID NO: 72903 - RNA, 19 nt, Artificial Sequence
  Synthetic
auucaucugguauuuaguu

SEQ ID NO: 72904 - RNA, 20 nt, Artificial Sequence
  Synthetic
cauucaucugguauuuaguu

SEQ ID NO: 72905 - RNA, 21 nt, Artificial Sequence
  Synthetic
ucauucaucugguauuuaguu

SEQ ID NO: 72906 - RNA, 22 nt, Artificial Sequence
  Synthetic
uucauucaucugguauuuaguu

SEQ ID NO: 72907 - RNA, 23 nt, Artificial Sequence
  Synthetic
uuucauucaucugguauuuaguu

SEQ ID NO: 72908 - RNA, 24 nt, Artificial Sequence
  Synthetic
auuucauucaucugguauuuaguu

SEQ ID NO: 72909 - RNA, 18 nt, Artificial Sequence
  Synthetic
uaaaaauguuauuuaguu

SEQ ID NO: 72910 - RNA, 19 nt, Artificial Sequence
  Synthetic
auaaaaauguuauuuaguu

SEQ ID NO: 72911 - RNA, 20 nt, Artificial Sequence
  Synthetic
cauaaaaauguuauuuaguu

SEQ ID NO: 72912 - RNA, 21 nt, Artificial Sequence
  Synthetic
ucauaaaaauguuauuuaguu

SEQ ID NO: 72913 - RNA, 22 nt, Artificial Sequence
  Synthetic
uucauaaaaauguuauuuaguu

SEQ ID NO: 72914 - RNA, 23 nt, Artificial Sequence
  Synthetic
auucauaaaaauguuauuuaguu

SEQ ID NO: 72915 - RNA, 24 nt, Artificial Sequence
  Synthetic
uauucauaaaaauguuauuuaguu

SEQ ID NO: 72916 - RNA, 18 nt, Artificial Sequence
  Synthetic
cacugggacccuaacguu

SEQ ID NO: 72917 - RNA, 19 nt, Artificial Sequence
  Synthetic
ucacugggacccuaacguu

SEQ ID NO: 72918 - RNA, 20 nt, Artificial Sequence
  Synthetic
uucacugggacccuaacguu

SEQ ID NO: 72919 - RNA, 21 nt, Artificial Sequence
  Synthetic
cuucacugggacccuaacguu

SEQ ID NO: 72920 - RNA, 22 nt, Artificial Sequence
  Synthetic
ccuucacugggacccuaacguu

SEQ ID NO: 72921 - RNA, 23 nt, Artificial Sequence
  Synthetic
cccuucacugggacccuaacguu

SEQ ID NO: 72922 - RNA, 18 nt, Artificial Sequence
  Synthetic
ucccggugcugccacguu

SEQ ID NO: 72923 - RNA, 19 nt, Artificial Sequence
  Synthetic
cucccggugcugccacguu

SEQ ID NO: 72924 - RNA, 20 nt, Artificial Sequence
  Synthetic
ucucccggugcugccacguu

SEQ ID NO: 72925 - RNA, 21 nt, Artificial Sequence
  Synthetic
aucucccggugcugccacguu

SEQ ID NO: 72926 - RNA, 22 nt, Artificial Sequence
  Synthetic
aaucucccggugcugccacguu

SEQ ID NO: 72927 - RNA, 23 nt, Artificial Sequence
  Synthetic
caaucucccggugcugccacguu

SEQ ID NO: 72928 - RNA, 24 nt, Artificial Sequence
  Synthetic
acaaucucccggugcugccacguu

SEQ ID NO: 72929 - RNA, 18 nt, Artificial Sequence
  Synthetic
aaaauagaauuucccguu

SEQ ID NO: 72930 - RNA, 20 nt, Artificial Sequence
  Synthetic
agaaaauagaauuucccguu

SEQ ID NO: 72931 - RNA, 22 nt, Artificial Sequence
  Synthetic
agagaaaauagaauuucccguu

SEQ ID NO: 72932 - RNA, 24 nt, Artificial Sequence
  Synthetic
agagagaaaauagaauuucccguu

SEQ ID NO: 72933 - RNA, 19 nt, Artificial Sequence
  Synthetic
cgcgcccagccaaagcguu

SEQ ID NO: 72934 - RNA, 20 nt, Artificial Sequence
  Synthetic
ccgcgcccagccaaagcguu

SEQ ID NO: 72935 - RNA, 21 nt, Artificial Sequence
  Synthetic
accgcgcccagccaaagcguu

SEQ ID NO: 72936 - RNA, 22 nt, Artificial Sequence
  Synthetic
caccgcgcccagccaaagcguu

SEQ ID NO: 72937 - RNA, 23 nt, Artificial Sequence
  Synthetic
ccaccgcgcccagccaaagcguu

SEQ ID NO: 72938 - RNA, 18 nt, Artificial Sequence
  Synthetic
caacuucacuaaagcguu

SEQ ID NO: 72939 - RNA, 19 nt, Artificial Sequence
  Synthetic
ccaacuucacuaaagcguu

SEQ ID NO: 72940 - RNA, 20 nt, Artificial Sequence
  Synthetic
uccaacuucacuaaagcguu

SEQ ID NO: 72941 - RNA, 21 nt, Artificial Sequence
  Synthetic
auccaacuucacuaaagcguu

SEQ ID NO: 72942 - RNA, 24 nt, Artificial Sequence
  Synthetic
uggauccaacuucacuaaagcguu

SEQ ID NO: 72943 - RNA, 18 nt, Artificial Sequence
  Synthetic
acuggucaguggagcguu

SEQ ID NO: 72944 - RNA, 20 nt, Artificial Sequence
  Synthetic
ugacuggucaguggagcguu

SEQ ID NO: 72945 - RNA, 21 nt, Artificial Sequence
  Synthetic
augacuggucaguggagcguu

SEQ ID NO: 72946 - RNA, 18 nt, Artificial Sequence
  Synthetic
cuucuaacaguuggcguu

SEQ ID NO: 72947 - RNA, 20 nt, Artificial Sequence
  Synthetic
cgcuucuaacaguuggcguu

SEQ ID NO: 72948 - RNA, 21 nt, Artificial Sequence
  Synthetic
acgcuucuaacaguuggcguu

SEQ ID NO: 72949 - RNA, 22 nt, Artificial Sequence
  Synthetic
cacgcuucuaacaguuggcguu

SEQ ID NO: 72950 - RNA, 23 nt, Artificial Sequence
  Synthetic
ccacgcuucuaacaguuggcguu

SEQ ID NO: 72951 - RNA, 24 nt, Artificial Sequence
  Synthetic
cccacgcuucuaacaguuggcguu

SEQ ID NO: 72952 - RNA, 18 nt, Artificial Sequence
  Synthetic
uuagauaauucauucguu

SEQ ID NO: 72953 - RNA, 19 nt, Artificial Sequence
  Synthetic
auuagauaauucauucguu

SEQ ID NO: 72954 - RNA, 20 nt, Artificial Sequence
  Synthetic
uauuagauaauucauucguu

SEQ ID NO: 72955 - RNA, 21 nt, Artificial Sequence
  Synthetic
auauuagauaauucauucguu

SEQ ID NO: 72956 - RNA, 22 nt, Artificial Sequence
  Synthetic
aauauuagauaauucauucguu

SEQ ID NO: 72957 - RNA, 23 nt, Artificial Sequence
  Synthetic
aaauauuagauaauucauucguu

SEQ ID NO: 72958 - RNA, 18 nt, Artificial Sequence
  Synthetic
uauagaccauucaagguu

SEQ ID NO: 72959 - RNA, 19 nt, Artificial Sequence
  Synthetic
cuauagaccauucaagguu

SEQ ID NO: 72960 - RNA, 20 nt, Artificial Sequence
  Synthetic
ucuauagaccauucaagguu

SEQ ID NO: 72961 - RNA, 23 nt, Artificial Sequence
  Synthetic
aggucuauagaccauucaagguu

SEQ ID NO: 72962 - RNA, 24 nt, Artificial Sequence
  Synthetic
aaggucuauagaccauucaagguu

SEQ ID NO: 72963 - RNA, 18 nt, Artificial Sequence
  Synthetic
cuuuccucaaauaagguu

SEQ ID NO: 72964 - RNA, 19 nt, Artificial Sequence
  Synthetic
ucuuuccucaaauaagguu

SEQ ID NO: 72965 - RNA, 20 nt, Artificial Sequence
  Synthetic
cucuuuccucaaauaagguu

SEQ ID NO: 72966 - RNA, 21 nt, Artificial Sequence
  Synthetic
ucucuuuccucaaauaagguu

SEQ ID NO: 72967 - RNA, 22 nt, Artificial Sequence
  Synthetic
uucucuuuccucaaauaagguu

SEQ ID NO: 72968 - RNA, 23 nt, Artificial Sequence
  Synthetic
uuucucuuuccucaaauaagguu

SEQ ID NO: 72969 - RNA, 24 nt, Artificial Sequence
  Synthetic
uuuucucuuuccucaaauaagguu

SEQ ID NO: 72970 - RNA, 18 nt, Artificial Sequence
  Synthetic
caaugguaagaacagguu

SEQ ID NO: 72971 - RNA, 19 nt, Artificial Sequence
  Synthetic
ccaaugguaagaacagguu

SEQ ID NO: 72972 - RNA, 20 nt, Artificial Sequence
  Synthetic
cccaaugguaagaacagguu

SEQ ID NO: 72973 - RNA, 22 nt, Artificial Sequence
  Synthetic
agcccaaugguaagaacagguu

SEQ ID NO: 72974 - RNA, 23 nt, Artificial Sequence
  Synthetic
aagcccaaugguaagaacagguu

SEQ ID NO: 72975 - RNA, 24 nt, Artificial Sequence
  Synthetic
aaagcccaaugguaagaacagguu

SEQ ID NO: 72976 - RNA, 19 nt, Artificial Sequence
  Synthetic
agaauaaaaauugcagguu

SEQ ID NO: 72977 - RNA, 22 nt, Artificial Sequence
  Synthetic
aggagaauaaaaauugcagguu

SEQ ID NO: 72978 - RNA, 23 nt, Artificial Sequence
  Synthetic
aaggagaauaaaaauugcagguu

SEQ ID NO: 72979 - RNA, 24 nt, Artificial Sequence
  Synthetic
aaaggagaauaaaaauugcagguu

SEQ ID NO: 72980 - RNA, 19 nt, Artificial Sequence
  Synthetic
ugguagagagggagagguu

SEQ ID NO: 72981 - RNA, 20 nt, Artificial Sequence
  Synthetic
augguagagagggagagguu

SEQ ID NO: 72982 - RNA, 22 nt, Artificial Sequence
  Synthetic
agaugguagagagggagagguu

SEQ ID NO: 72983 - RNA, 23 nt, Artificial Sequence
  Synthetic
aagaugguagagagggagagguu

SEQ ID NO: 72984 - RNA, 18 nt, Artificial Sequence
  Synthetic
aagagcugaugagagguu

SEQ ID NO: 72985 - RNA, 20 nt, Artificial Sequence
  Synthetic
ugaagagcugaugagagguu

SEQ ID NO: 72986 - RNA, 21 nt, Artificial Sequence
  Synthetic
cugaagagcugaugagagguu

SEQ ID NO: 72987 - RNA, 22 nt, Artificial Sequence
  Synthetic
acugaagagcugaugagagguu

SEQ ID NO: 72988 - RNA, 23 nt, Artificial Sequence
  Synthetic
aacugaagagcugaugagagguu

SEQ ID NO: 72989 - RNA, 19 nt, Artificial Sequence
  Synthetic
uggaaauaagaaugagguu

SEQ ID NO: 72990 - RNA, 21 nt, Artificial Sequence
  Synthetic
uguggaaauaagaaugagguu

SEQ ID NO: 72991 - RNA, 22 nt, Artificial Sequence
  Synthetic
auguggaaauaagaaugagguu

SEQ ID NO: 72992 - RNA, 23 nt, Artificial Sequence
  Synthetic
cauguggaaauaagaaugagguu

SEQ ID NO: 72993 - RNA, 18 nt, Artificial Sequence
  Synthetic
cagggaugcuaugagguu

SEQ ID NO: 72994 - RNA, 19 nt, Artificial Sequence
  Synthetic
ucagggaugcuaugagguu

SEQ ID NO: 72995 - RNA, 20 nt, Artificial Sequence
  Synthetic
cucagggaugcuaugagguu

SEQ ID NO: 72996 - RNA, 21 nt, Artificial Sequence
  Synthetic
ucucagggaugcuaugagguu

SEQ ID NO: 72997 - RNA, 22 nt, Artificial Sequence
  Synthetic
cucucagggaugcuaugagguu

SEQ ID NO: 72998 - RNA, 23 nt, Artificial Sequence
  Synthetic
ucucucagggaugcuaugagguu

SEQ ID NO: 72999 - RNA, 24 nt, Artificial Sequence
  Synthetic
aucucucagggaugcuaugagguu

SEQ ID NO: 73000 - RNA, 18 nt, Artificial Sequence
  Synthetic
acuuaccaucgugagguu

SEQ ID NO: 73001 - RNA, 20 nt, Artificial Sequence
  Synthetic
agacuuaccaucgugagguu

SEQ ID NO: 73002 - RNA, 21 nt, Artificial Sequence
  Synthetic
uagacuuaccaucgugagguu

SEQ ID NO: 73003 - RNA, 22 nt, Artificial Sequence
  Synthetic
cuagacuuaccaucgugagguu

SEQ ID NO: 73004 - RNA, 23 nt, Artificial Sequence
  Synthetic
acuagacuuaccaucgugagguu

SEQ ID NO: 73005 - RNA, 24 nt, Artificial Sequence
  Synthetic
uacuagacuuaccaucgugagguu

SEQ ID NO: 73006 - RNA, 19 nt, Artificial Sequence
  Synthetic
ugguuuaaaaaauuagguu

SEQ ID NO: 73007 - RNA, 20 nt, Artificial Sequence
  Synthetic
uugguuuaaaaaauuagguu

SEQ ID NO: 73008 - RNA, 21 nt, Artificial Sequence
  Synthetic
uuugguuuaaaaaauuagguu

SEQ ID NO: 73009 - RNA, 22 nt, Artificial Sequence
  Synthetic
uuuugguuuaaaaaauuagguu

SEQ ID NO: 73010 - RNA, 18 nt, Artificial Sequence
  Synthetic
auaaaacugccuaggguu

SEQ ID NO: 73011 - RNA, 19 nt, Artificial Sequence
  Synthetic
uauaaaacugccuaggguu

SEQ ID NO: 73012 - RNA, 20 nt, Artificial Sequence
  Synthetic
cuauaaaacugccuaggguu

SEQ ID NO: 73013 - RNA, 21 nt, Artificial Sequence
  Synthetic
ccuauaaaacugccuaggguu

SEQ ID NO: 73014 - RNA, 22 nt, Artificial Sequence
  Synthetic
uccuauaaaacugccuaggguu

SEQ ID NO: 73015 - RNA, 23 nt, Artificial Sequence
  Synthetic
cuccuauaaaacugccuaggguu

SEQ ID NO: 73016 - RNA, 24 nt, Artificial Sequence
  Synthetic
ucuccuauaaaacugccuaggguu

SEQ ID NO: 73017 - RNA, 19 nt, Artificial Sequence
  Synthetic
ugaaugagcaugagggguu

SEQ ID NO: 73018 - RNA, 20 nt, Artificial Sequence
  Synthetic
cugaaugagcaugagggguu

SEQ ID NO: 73019 - RNA, 21 nt, Artificial Sequence
  Synthetic
ccugaaugagcaugagggguu

SEQ ID NO: 73020 - RNA, 22 nt, Artificial Sequence
  Synthetic
uccugaaugagcaugagggguu

SEQ ID NO: 73021 - RNA, 23 nt, Artificial Sequence
  Synthetic
auccugaaugagcaugagggguu

SEQ ID NO: 73022 - RNA, 24 nt, Artificial Sequence
  Synthetic
uauccugaaugagcaugagggguu

SEQ ID NO: 73023 - RNA, 21 nt, Artificial Sequence
  Synthetic
uuuuuguuuguuugggggguu

SEQ ID NO: 73024 - RNA, 22 nt, Artificial Sequence
  Synthetic
auuuuuguuuguuugggggguu

SEQ ID NO: 73025 - RNA, 23 nt, Artificial Sequence
  Synthetic
aauuuuuguuuguuugggggguu

SEQ ID NO: 73026 - RNA, 24 nt, Artificial Sequence
  Synthetic
aaauuuuuguuuguuugggggguu

SEQ ID NO: 73027 - RNA, 18 nt, Artificial Sequence
  Synthetic
caugaguuuauugggguu

SEQ ID NO: 73028 - RNA, 19 nt, Artificial Sequence
  Synthetic
ccaugaguuuauugggguu

SEQ ID NO: 73029 - RNA, 20 nt, Artificial Sequence
  Synthetic
uccaugaguuuauugggguu

SEQ ID NO: 73030 - RNA, 21 nt, Artificial Sequence
  Synthetic
auccaugaguuuauugggguu

SEQ ID NO: 73031 - RNA, 22 nt, Artificial Sequence
  Synthetic
uauccaugaguuuauugggguu

SEQ ID NO: 73032 - RNA, 24 nt, Artificial Sequence
  Synthetic
uguauccaugaguuuauugggguu

SEQ ID NO: 73033 - RNA, 18 nt, Artificial Sequence
  Synthetic
aagcacugaguugggguu

SEQ ID NO: 73034 - RNA, 20 nt, Artificial Sequence
  Synthetic
ugaagcacugaguugggguu

SEQ ID NO: 73035 - RNA, 21 nt, Artificial Sequence
  Synthetic
cugaagcacugaguugggguu

SEQ ID NO: 73036 - RNA, 24 nt, Artificial Sequence
  Synthetic
uggcugaagcacugaguugggguu

SEQ ID NO: 73037 - RNA, 19 nt, Artificial Sequence
  Synthetic
ugugaccuauaccuggguu

SEQ ID NO: 73038 - RNA, 20 nt, Artificial Sequence
  Synthetic
cugugaccuauaccuggguu

SEQ ID NO: 73039 - RNA, 21 nt, Artificial Sequence
  Synthetic
ccugugaccuauaccuggguu

SEQ ID NO: 73040 - RNA, 22 nt, Artificial Sequence
  Synthetic
accugugaccuauaccuggguu

SEQ ID NO: 73041 - RNA, 21 nt, Artificial Sequence
  Synthetic
uugcaaggguuugaaaugguu

SEQ ID NO: 73042 - RNA, 22 nt, Artificial Sequence
  Synthetic
cuugcaaggguuugaaaugguu

SEQ ID NO: 73043 - RNA, 23 nt, Artificial Sequence
  Synthetic
ccuugcaaggguuugaaaugguu

SEQ ID NO: 73044 - RNA, 24 nt, Artificial Sequence
  Synthetic
accuugcaaggguuugaaaugguu

SEQ ID NO: 73045 - RNA, 19 nt, Artificial Sequence
  Synthetic
agauguagcaucuaugguu

SEQ ID NO: 73046 - RNA, 20 nt, Artificial Sequence
  Synthetic
cagauguagcaucuaugguu

SEQ ID NO: 73047 - RNA, 21 nt, Artificial Sequence
  Synthetic
ccagauguagcaucuaugguu

SEQ ID NO: 73048 - RNA, 22 nt, Artificial Sequence
  Synthetic
accagauguagcaucuaugguu

SEQ ID NO: 73049 - RNA, 23 nt, Artificial Sequence
  Synthetic
uaccagauguagcaucuaugguu

SEQ ID NO: 73050 - RNA, 24 nt, Artificial Sequence
  Synthetic
uuaccagauguagcaucuaugguu

SEQ ID NO: 73051 - RNA, 18 nt, Artificial Sequence
  Synthetic
cuauacugaaguaugguu

SEQ ID NO: 73052 - RNA, 19 nt, Artificial Sequence
  Synthetic
acuauacugaaguaugguu

SEQ ID NO: 73053 - RNA, 20 nt, Artificial Sequence
  Synthetic
uacuauacugaaguaugguu

SEQ ID NO: 73054 - RNA, 21 nt, Artificial Sequence
  Synthetic
auacuauacugaaguaugguu

SEQ ID NO: 73055 - RNA, 22 nt, Artificial Sequence
  Synthetic
aauacuauacugaaguaugguu

SEQ ID NO: 73056 - RNA, 24 nt, Artificial Sequence
  Synthetic
ugaauacuauacugaaguaugguu

SEQ ID NO: 73057 - RNA, 18 nt, Artificial Sequence
  Synthetic
uacuaugaaauuaugguu

SEQ ID NO: 73058 - RNA, 19 nt, Artificial Sequence
  Synthetic
cuacuaugaaauuaugguu

SEQ ID NO: 73059 - RNA, 20 nt, Artificial Sequence
  Synthetic
acuacuaugaaauuaugguu

SEQ ID NO: 73060 - RNA, 21 nt, Artificial Sequence
  Synthetic
aacuacuaugaaauuaugguu

SEQ ID NO: 73061 - RNA, 22 nt, Artificial Sequence
  Synthetic
uaacuacuaugaaauuaugguu

SEQ ID NO: 73062 - RNA, 23 nt, Artificial Sequence
  Synthetic
uuaacuacuaugaaauuaugguu

SEQ ID NO: 73063 - RNA, 24 nt, Artificial Sequence
  Synthetic
auuaacuacuaugaaauuaugguu

SEQ ID NO: 73064 - RNA, 19 nt, Artificial Sequence
  Synthetic
uggagggucaaaucugguu

SEQ ID NO: 73065 - RNA, 20 nt, Artificial Sequence
  Synthetic
cuggagggucaaaucugguu

SEQ ID NO: 73066 - RNA, 21 nt, Artificial Sequence
  Synthetic
ucuggagggucaaaucugguu

SEQ ID NO: 73067 - RNA, 23 nt, Artificial Sequence
  Synthetic
agucuggagggucaaaucugguu

SEQ ID NO: 73068 - RNA, 24 nt, Artificial Sequence
  Synthetic
aagucuggagggucaaaucugguu

SEQ ID NO: 73069 - RNA, 18 nt, Artificial Sequence
  Synthetic
aaauuuaacuaucugguu

SEQ ID NO: 73070 - RNA, 19 nt, Artificial Sequence
  Synthetic
uaaauuuaacuaucugguu

SEQ ID NO: 73071 - RNA, 20 nt, Artificial Sequence
  Synthetic
uuaaauuuaacuaucugguu

SEQ ID NO: 73072 - RNA, 21 nt, Artificial Sequence
  Synthetic
cuuaaauuuaacuaucugguu

SEQ ID NO: 73073 - RNA, 22 nt, Artificial Sequence
  Synthetic
ucuuaaauuuaacuaucugguu

SEQ ID NO: 73074 - RNA, 23 nt, Artificial Sequence
  Synthetic
uucuuaaauuuaacuaucugguu

SEQ ID NO: 73075 - RNA, 24 nt, Artificial Sequence
  Synthetic
uuucuuaaauuuaacuaucugguu

SEQ ID NO: 73076 - RNA, 18 nt, Artificial Sequence
  Synthetic
aaagagucauuucugguu

SEQ ID NO: 73077 - RNA, 19 nt, Artificial Sequence
  Synthetic
uaaagagucauuucugguu

SEQ ID NO: 73078 - RNA, 20 nt, Artificial Sequence
  Synthetic
uuaaagagucauuucugguu

SEQ ID NO: 73079 - RNA, 21 nt, Artificial Sequence
  Synthetic
auuaaagagucauuucugguu

SEQ ID NO: 73080 - RNA, 22 nt, Artificial Sequence
  Synthetic
aauuaaagagucauuucugguu

SEQ ID NO: 73081 - RNA, 23 nt, Artificial Sequence
  Synthetic
aaauuaaagagucauuucugguu

SEQ ID NO: 73082 - RNA, 24 nt, Artificial Sequence
  Synthetic
uaaauuaaagagucauuucugguu

SEQ ID NO: 73083 - RNA, 19 nt, Artificial Sequence
  Synthetic
uggaguuguugcagugguu

SEQ ID NO: 73084 - RNA, 21 nt, Artificial Sequence
  Synthetic
cguggaguuguugcagugguu

SEQ ID NO: 73085 - RNA, 22 nt, Artificial Sequence
  Synthetic
ucguggaguuguugcagugguu

SEQ ID NO: 73086 - RNA, 23 nt, Artificial Sequence
  Synthetic
uucguggaguuguugcagugguu

SEQ ID NO: 73087 - RNA, 24 nt, Artificial Sequence
  Synthetic
auucguggaguuguugcagugguu

SEQ ID NO: 73088 - RNA, 18 nt, Artificial Sequence
  Synthetic
auauacaacauugugguu

SEQ ID NO: 73089 - RNA, 19 nt, Artificial Sequence
  Synthetic
aauauacaacauugugguu

SEQ ID NO: 73090 - RNA, 20 nt, Artificial Sequence
  Synthetic
uaauauacaacauugugguu

SEQ ID NO: 73091 - RNA, 21 nt, Artificial Sequence
  Synthetic
cuaauauacaacauugugguu

SEQ ID NO: 73092 - RNA, 24 nt, Artificial Sequence
  Synthetic
aggcuaauauacaacauugugguu

SEQ ID NO: 73093 - RNA, 18 nt, Artificial Sequence
  Synthetic
uugaaaaguaacuugguu

SEQ ID NO: 73094 - RNA, 20 nt, Artificial Sequence
  Synthetic
aguugaaaaguaacuugguu

SEQ ID NO: 73095 - RNA, 21 nt, Artificial Sequence
  Synthetic
caguugaaaaguaacuugguu

SEQ ID NO: 73096 - RNA, 22 nt, Artificial Sequence
  Synthetic
ccaguugaaaaguaacuugguu

SEQ ID NO: 73097 - RNA, 23 nt, Artificial Sequence
  Synthetic
accaguugaaaaguaacuugguu

SEQ ID NO: 73098 - RNA, 18 nt, Artificial Sequence
  Synthetic
uuugucugcaccuugguu

SEQ ID NO: 73099 - RNA, 19 nt, Artificial Sequence
  Synthetic
uuuugucugcaccuugguu

SEQ ID NO: 73100 - RNA, 22 nt, Artificial Sequence
  Synthetic
cgguuuugucugcaccuugguu

SEQ ID NO: 73101 - RNA, 23 nt, Artificial Sequence
  Synthetic
acgguuuugucugcaccuugguu

SEQ ID NO: 73102 - RNA, 24 nt, Artificial Sequence
  Synthetic
cacgguuuugucugcaccuugguu

SEQ ID NO: 73103 - RNA, 18 nt, Artificial Sequence
  Synthetic
uaaaugauaaaguugguu

SEQ ID NO: 73104 - RNA, 19 nt, Artificial Sequence
  Synthetic
auaaaugauaaaguugguu

SEQ ID NO: 73105 - RNA, 20 nt, Artificial Sequence
  Synthetic
aauaaaugauaaaguugguu

SEQ ID NO: 73106 - RNA, 21 nt, Artificial Sequence
  Synthetic
aaauaaaugauaaaguugguu

SEQ ID NO: 73107 - RNA, 22 nt, Artificial Sequence
  Synthetic
aaaauaaaugauaaaguugguu

SEQ ID NO: 73108 - RNA, 23 nt, Artificial Sequence
  Synthetic
uaaaauaaaugauaaaguugguu

SEQ ID NO: 73109 - RNA, 24 nt, Artificial Sequence
  Synthetic
auaaaauaaaugauaaaguugguu

SEQ ID NO: 73110 - RNA, 21 nt, Artificial Sequence
  Synthetic
uuuaaaauauauuuguugguu

SEQ ID NO: 73111 - RNA, 22 nt, Artificial Sequence
  Synthetic
cuuuaaaauauauuuguugguu

SEQ ID NO: 73112 - RNA, 23 nt, Artificial Sequence
  Synthetic
ccuuuaaaauauauuuguugguu

SEQ ID NO: 73113 - RNA, 24 nt, Artificial Sequence
  Synthetic
accuuuaaaauauauuuguugguu

SEQ ID NO: 73114 - RNA, 18 nt, Artificial Sequence
  Synthetic
uuuuaaagauauuugguu

SEQ ID NO: 73115 - RNA, 19 nt, Artificial Sequence
  Synthetic
cuuuuaaagauauuugguu

SEQ ID NO: 73116 - RNA, 20 nt, Artificial Sequence
  Synthetic
acuuuuaaagauauuugguu

SEQ ID NO: 73117 - RNA, 22 nt, Artificial Sequence
  Synthetic
cgacuuuuaaagauauuugguu

SEQ ID NO: 73118 - RNA, 23 nt, Artificial Sequence
  Synthetic
acgacuuuuaaagauauuugguu

SEQ ID NO: 73119 - RNA, 24 nt, Artificial Sequence
  Synthetic
uacgacuuuuaaagauauuugguu

SEQ ID NO: 73120 - RNA, 18 nt, Artificial Sequence
  Synthetic
aggaugaccacuuugguu

SEQ ID NO: 73121 - RNA, 19 nt, Artificial Sequence
  Synthetic
caggaugaccacuuugguu

SEQ ID NO: 73122 - RNA, 20 nt, Artificial Sequence
  Synthetic
acaggaugaccacuuugguu

SEQ ID NO: 73123 - RNA, 22 nt, Artificial Sequence
  Synthetic
ugacaggaugaccacuuugguu

SEQ ID NO: 73124 - RNA, 24 nt, Artificial Sequence
  Synthetic
ugugacaggaugaccacuuugguu

SEQ ID NO: 73125 - RNA, 18 nt, Artificial Sequence
  Synthetic
uuuaaauacaguuugguu

SEQ ID NO: 73126 - RNA, 19 nt, Artificial Sequence
  Synthetic
uuuuaaauacaguuugguu

SEQ ID NO: 73127 - RNA, 20 nt, Artificial Sequence
  Synthetic
uuuuuaaauacaguuugguu

SEQ ID NO: 73128 - RNA, 21 nt, Artificial Sequence
  Synthetic
cuuuuuaaauacaguuugguu

SEQ ID NO: 73129 - RNA, 22 nt, Artificial Sequence
  Synthetic
acuuuuuaaauacaguuugguu

SEQ ID NO: 73130 - RNA, 23 nt, Artificial Sequence
  Synthetic
uacuuuuuaaauacaguuugguu

SEQ ID NO: 73131 - RNA, 24 nt, Artificial Sequence
  Synthetic
uuacuuuuuaaauacaguuugguu

SEQ ID NO: 73132 - RNA, 18 nt, Artificial Sequence
  Synthetic
acauccgauauuuugguu

SEQ ID NO: 73133 - RNA, 19 nt, Artificial Sequence
  Synthetic
cacauccgauauuuugguu

SEQ ID NO: 73134 - RNA, 20 nt, Artificial Sequence
  Synthetic
acacauccgauauuuugguu

SEQ ID NO: 73135 - RNA, 21 nt, Artificial Sequence
  Synthetic
uacacauccgauauuuugguu

SEQ ID NO: 73136 - RNA, 22 nt, Artificial Sequence
  Synthetic
cuacacauccgauauuuugguu

SEQ ID NO: 73137 - RNA, 23 nt, Artificial Sequence
  Synthetic
acuacacauccgauauuuugguu

SEQ ID NO: 73138 - RNA, 24 nt, Artificial Sequence
  Synthetic
aacuacacauccgauauuuugguu

SEQ ID NO: 73139 - RNA, 22 nt, Artificial Sequence
  Synthetic
ugcaagacuuuuuuaaaauguu

SEQ ID NO: 73140 - RNA, 23 nt, Artificial Sequence
  Synthetic
uugcaagacuuuuuuaaaauguu

SEQ ID NO: 73141 - RNA, 18 nt, Artificial Sequence
  Synthetic
cuucaccacugaaauguu

SEQ ID NO: 73142 - RNA, 19 nt, Artificial Sequence
  Synthetic
ucuucaccacugaaauguu

SEQ ID NO: 73143 - RNA, 20 nt, Artificial Sequence
  Synthetic
aucuucaccacugaaauguu

SEQ ID NO: 73144 - RNA, 22 nt, Artificial Sequence
  Synthetic
ugaucuucaccacugaaauguu

SEQ ID NO: 73145 - RNA, 23 nt, Artificial Sequence
  Synthetic
cugaucuucaccacugaaauguu

SEQ ID NO: 73146 - RNA, 24 nt, Artificial Sequence
  Synthetic
ucugaucuucaccacugaaauguu

SEQ ID NO: 73147 - RNA, 18 nt, Artificial Sequence
  Synthetic
uacagaagcaagaauguu

SEQ ID NO: 73148 - RNA, 19 nt, Artificial Sequence
  Synthetic
auacagaagcaagaauguu

SEQ ID NO: 73149 - RNA, 24 nt, Artificial Sequence
  Synthetic
aggggauacagaagcaagaauguu

SEQ ID NO: 73150 - RNA, 18 nt, Artificial Sequence
  Synthetic
cucacuucaaugaauguu

SEQ ID NO: 73151 - RNA, 19 nt, Artificial Sequence
  Synthetic
ucucacuucaaugaauguu

SEQ ID NO: 73152 - RNA, 20 nt, Artificial Sequence
  Synthetic
cucucacuucaaugaauguu

SEQ ID NO: 73153 - RNA, 21 nt, Artificial Sequence
  Synthetic
ccucucacuucaaugaauguu

SEQ ID NO: 73154 - RNA, 22 nt, Artificial Sequence
  Synthetic
uccucucacuucaaugaauguu

SEQ ID NO: 73155 - RNA, 23 nt, Artificial Sequence
  Synthetic
auccucucacuucaaugaauguu

SEQ ID NO: 73156 - RNA, 24 nt, Artificial Sequence
  Synthetic
cauccucucacuucaaugaauguu

SEQ ID NO: 73157 - RNA, 18 nt, Artificial Sequence
  Synthetic
cuguuaauauugaauguu

SEQ ID NO: 73158 - RNA, 19 nt, Artificial Sequence
  Synthetic
ccuguuaauauugaauguu

SEQ ID NO: 73159 - RNA, 21 nt, Artificial Sequence
  Synthetic
ugccuguuaauauugaauguu

SEQ ID NO: 73160 - RNA, 22 nt, Artificial Sequence
  Synthetic
augccuguuaauauugaauguu

SEQ ID NO: 73161 - RNA, 23 nt, Artificial Sequence
  Synthetic
aaugccuguuaauauugaauguu

SEQ ID NO: 73162 - RNA, 24 nt, Artificial Sequence
  Synthetic
uaaugccuguuaauauugaauguu

SEQ ID NO: 73163 - RNA, 21 nt, Artificial Sequence
  Synthetic
auucaauuuuauaaacauguu

SEQ ID NO: 73164 - RNA, 22 nt, Artificial Sequence
  Synthetic
aauucaauuuuauaaacauguu

SEQ ID NO: 73165 - RNA, 24 nt, Artificial Sequence
  Synthetic
ugaauucaauuuuauaaacauguu

SEQ ID NO: 73166 - RNA, 18 nt, Artificial Sequence
  Synthetic
ugaugaugugaacauguu

SEQ ID NO: 73167 - RNA, 19 nt, Artificial Sequence
  Synthetic
augaugaugugaacauguu

SEQ ID NO: 73168 - RNA, 20 nt, Artificial Sequence
  Synthetic
uaugaugaugugaacauguu

SEQ ID NO: 73169 - RNA, 21 nt, Artificial Sequence
  Synthetic
uuaugaugaugugaacauguu

SEQ ID NO: 73170 - RNA, 22 nt, Artificial Sequence
  Synthetic
auuaugaugaugugaacauguu

SEQ ID NO: 73171 - RNA, 23 nt, Artificial Sequence
  Synthetic
uauuaugaugaugugaacauguu

SEQ ID NO: 73172 - RNA, 24 nt, Artificial Sequence
  Synthetic
uuauuaugaugaugugaacauguu

SEQ ID NO: 73173 - RNA, 19 nt, Artificial Sequence
  Synthetic
ugcaauuuuauaccauguu

SEQ ID NO: 73174 - RNA, 20 nt, Artificial Sequence
  Synthetic
augcaauuuuauaccauguu

SEQ ID NO: 73175 - RNA, 21 nt, Artificial Sequence
  Synthetic
uaugcaauuuuauaccauguu

SEQ ID NO: 73176 - RNA, 22 nt, Artificial Sequence
  Synthetic
cuaugcaauuuuauaccauguu

SEQ ID NO: 73177 - RNA, 23 nt, Artificial Sequence
  Synthetic
ucuaugcaauuuuauaccauguu

SEQ ID NO: 73178 - RNA, 24 nt, Artificial Sequence
  Synthetic
uucuaugcaauuuuauaccauguu

SEQ ID NO: 73179 - RNA, 18 nt, Artificial Sequence
  Synthetic
agacccggcauccauguu

SEQ ID NO: 73180 - RNA, 19 nt, Artificial Sequence
  Synthetic
cagacccggcauccauguu

SEQ ID NO: 73181 - RNA, 20 nt, Artificial Sequence
  Synthetic
ccagacccggcauccauguu

SEQ ID NO: 73182 - RNA, 21 nt, Artificial Sequence
  Synthetic
cccagacccggcauccauguu

SEQ ID NO: 73183 - RNA, 24 nt, Artificial Sequence
  Synthetic
aggcccagacccggcauccauguu

SEQ ID NO: 73184 - RNA, 18 nt, Artificial Sequence
  Synthetic
auagaauuuuugcauguu

SEQ ID NO: 73185 - RNA, 19 nt, Artificial Sequence
  Synthetic
uauagaauuuuugcauguu

SEQ ID NO: 73186 - RNA, 20 nt, Artificial Sequence
  Synthetic
cuauagaauuuuugcauguu

SEQ ID NO: 73187 - RNA, 21 nt, Artificial Sequence
  Synthetic
ucuauagaauuuuugcauguu

SEQ ID NO: 73188 - RNA, 22 nt, Artificial Sequence
  Synthetic
uucuauagaauuuuugcauguu

SEQ ID NO: 73189 - RNA, 23 nt, Artificial Sequence
  Synthetic
auucuauagaauuuuugcauguu

SEQ ID NO: 73190 - RNA, 24 nt, Artificial Sequence
  Synthetic
aauucuauagaauuuuugcauguu

SEQ ID NO: 73191 - RNA, 19 nt, Artificial Sequence
  Synthetic
agccacuacuguagauguu

SEQ ID NO: 73192 - RNA, 20 nt, Artificial Sequence
  Synthetic
cagccacuacuguagauguu

SEQ ID NO: 73193 - RNA, 21 nt, Artificial Sequence
  Synthetic
ucagccacuacuguagauguu

SEQ ID NO: 73194 - RNA, 23 nt, Artificial Sequence
  Synthetic
ugucagccacuacuguagauguu

SEQ ID NO: 73195 - RNA, 24 nt, Artificial Sequence
  Synthetic
augucagccacuacuguagauguu

SEQ ID NO: 73196 - RNA, 18 nt, Artificial Sequence
  Synthetic
uccuucauauuagauguu

SEQ ID NO: 73197 - RNA, 19 nt, Artificial Sequence
  Synthetic
auccuucauauuagauguu

SEQ ID NO: 73198 - RNA, 20 nt, Artificial Sequence
  Synthetic
uauccuucauauuagauguu

SEQ ID NO: 73199 - RNA, 21 nt, Artificial Sequence
  Synthetic
uuauccuucauauuagauguu

SEQ ID NO: 73200 - RNA, 22 nt, Artificial Sequence
  Synthetic
auuauccuucauauuagauguu

SEQ ID NO: 73201 - RNA, 23 nt, Artificial Sequence
  Synthetic
uauuauccuucauauuagauguu

SEQ ID NO: 73202 - RNA, 24 nt, Artificial Sequence
  Synthetic
cuauuauccuucauauuagauguu

SEQ ID NO: 73203 - RNA, 21 nt, Artificial Sequence
  Synthetic
ucccuaccucacuaggauguu

SEQ ID NO: 73204 - RNA, 22 nt, Artificial Sequence
  Synthetic
uucccuaccucacuaggauguu

SEQ ID NO: 73205 - RNA, 23 nt, Artificial Sequence
  Synthetic
cuucccuaccucacuaggauguu

SEQ ID NO: 73206 - RNA, 24 nt, Artificial Sequence
  Synthetic
ccuucccuaccucacuaggauguu

SEQ ID NO: 73207 - RNA, 18 nt, Artificial Sequence
  Synthetic
uuuucauuuuuggauguu

SEQ ID NO: 73208 - RNA, 19 nt, Artificial Sequence
  Synthetic
auuuucauuuuuggauguu

SEQ ID NO: 73209 - RNA, 20 nt, Artificial Sequence
  Synthetic
cauuuucauuuuuggauguu

SEQ ID NO: 73210 - RNA, 23 nt, Artificial Sequence
  Synthetic
aggcauuuucauuuuuggauguu

SEQ ID NO: 73211 - RNA, 24 nt, Artificial Sequence
  Synthetic
aaggcauuuucauuuuuggauguu

SEQ ID NO: 73212 - RNA, 22 nt, Artificial Sequence
  Synthetic
ugaucaguuuaauaaugauguu

SEQ ID NO: 73213 - RNA, 23 nt, Artificial Sequence
  Synthetic
augaucaguuuaauaaugauguu

SEQ ID NO: 73214 - RNA, 24 nt, Artificial Sequence
  Synthetic
caugaucaguuuaauaaugauguu

SEQ ID NO: 73215 - RNA, 19 nt, Artificial Sequence
  Synthetic
ugaggaaaagaucuauguu

SEQ ID NO: 73216 - RNA, 20 nt, Artificial Sequence
  Synthetic
uugaggaaaagaucuauguu

SEQ ID NO: 73217 - RNA, 21 nt, Artificial Sequence
  Synthetic
uuugaggaaaagaucuauguu

SEQ ID NO: 73218 - RNA, 24 nt, Artificial Sequence
  Synthetic
ugguuugaggaaaagaucuauguu

SEQ ID NO: 73219 - RNA, 18 nt, Artificial Sequence
  Synthetic
uuauauagcaaguauguu

SEQ ID NO: 73220 - RNA, 20 nt, Artificial Sequence
  Synthetic
uguuauauagcaaguauguu

SEQ ID NO: 73221 - RNA, 22 nt, Artificial Sequence
  Synthetic
uguguuauauagcaaguauguu

SEQ ID NO: 73222 - RNA, 23 nt, Artificial Sequence
  Synthetic
cuguguuauauagcaaguauguu

SEQ ID NO: 73223 - RNA, 24 nt, Artificial Sequence
  Synthetic
ccuguguuauauagcaaguauguu

SEQ ID NO: 73224 - RNA, 18 nt, Artificial Sequence
  Synthetic
aaggcuucccauuauguu

SEQ ID NO: 73225 - RNA, 19 nt, Artificial Sequence
  Synthetic
uaaggcuucccauuauguu

SEQ ID NO: 73226 - RNA, 20 nt, Artificial Sequence
  Synthetic
uuaaggcuucccauuauguu

SEQ ID NO: 73227 - RNA, 21 nt, Artificial Sequence
  Synthetic
cuuaaggcuucccauuauguu

SEQ ID NO: 73228 - RNA, 22 nt, Artificial Sequence
  Synthetic
ccuuaaggcuucccauuauguu

SEQ ID NO: 73229 - RNA, 23 nt, Artificial Sequence
  Synthetic
cccuuaaggcuucccauuauguu

SEQ ID NO: 73230 - RNA, 18 nt, Artificial Sequence
  Synthetic
uccuacuacucuacuguu

SEQ ID NO: 73231 - RNA, 19 nt, Artificial Sequence
  Synthetic
uuccuacuacucuacuguu

SEQ ID NO: 73232 - RNA, 20 nt, Artificial Sequence
  Synthetic
uuuccuacuacucuacuguu

SEQ ID NO: 73233 - RNA, 21 nt, Artificial Sequence
  Synthetic
cuuuccuacuacucuacuguu

SEQ ID NO: 73234 - RNA, 22 nt, Artificial Sequence
  Synthetic
acuuuccuacuacucuacuguu

SEQ ID NO: 73235 - RNA, 23 nt, Artificial Sequence
  Synthetic
cacuuuccuacuacucuacuguu

SEQ ID NO: 73236 - RNA, 24 nt, Artificial Sequence
  Synthetic
acacuuuccuacuacucuacuguu

SEQ ID NO: 73237 - RNA, 19 nt, Artificial Sequence
  Synthetic
ugucuagaaaccuccuguu

SEQ ID NO: 73238 - RNA, 20 nt, Artificial Sequence
  Synthetic
augucuagaaaccuccuguu

SEQ ID NO: 73239 - RNA, 21 nt, Artificial Sequence
  Synthetic
uaugucuagaaaccuccuguu

SEQ ID NO: 73240 - RNA, 23 nt, Artificial Sequence
  Synthetic
uguaugucuagaaaccuccuguu

SEQ ID NO: 73241 - RNA, 24 nt, Artificial Sequence
  Synthetic
auguaugucuagaaaccuccuguu

SEQ ID NO: 73242 - RNA, 20 nt, Artificial Sequence
  Synthetic
aggguccuucggguccuguu

SEQ ID NO: 73243 - RNA, 23 nt, Artificial Sequence
  Synthetic
uggaggguccuucggguccuguu

SEQ ID NO: 73244 - RNA, 24 nt, Artificial Sequence
  Synthetic
cuggaggguccuucggguccuguu

SEQ ID NO: 73245 - RNA, 18 nt, Artificial Sequence
  Synthetic
aucaagccagcugcuguu

SEQ ID NO: 73246 - RNA, 19 nt, Artificial Sequence
  Synthetic
uaucaagccagcugcuguu

SEQ ID NO: 73247 - RNA, 20 nt, Artificial Sequence
  Synthetic
uuaucaagccagcugcuguu

SEQ ID NO: 73248 - RNA, 21 nt, Artificial Sequence
  Synthetic
auuaucaagccagcugcuguu

SEQ ID NO: 73249 - RNA, 22 nt, Artificial Sequence
  Synthetic
cauuaucaagccagcugcuguu

SEQ ID NO: 73250 - RNA, 24 nt, Artificial Sequence
  Synthetic
ugcauuaucaagccagcugcuguu

SEQ ID NO: 73251 - RNA, 18 nt, Artificial Sequence
  Synthetic
auugacuugucaucuguu

SEQ ID NO: 73252 - RNA, 19 nt, Artificial Sequence
  Synthetic
aauugacuugucaucuguu

SEQ ID NO: 73253 - RNA, 20 nt, Artificial Sequence
  Synthetic
aaauugacuugucaucuguu

SEQ ID NO: 73254 - RNA, 21 nt, Artificial Sequence
  Synthetic
aaaauugacuugucaucuguu

SEQ ID NO: 73255 - RNA, 22 nt, Artificial Sequence
  Synthetic
caaaauugacuugucaucuguu

SEQ ID NO: 73256 - RNA, 23 nt, Artificial Sequence
  Synthetic
ccaaaauugacuugucaucuguu

SEQ ID NO: 73257 - RNA, 19 nt, Artificial Sequence
  Synthetic
uggggugucauuaucuguu

SEQ ID NO: 73258 - RNA, 20 nt, Artificial Sequence
  Synthetic
uuggggugucauuaucuguu

SEQ ID NO: 73259 - RNA, 21 nt, Artificial Sequence
  Synthetic
cuuggggugucauuaucuguu

SEQ ID NO: 73260 - RNA, 22 nt, Artificial Sequence
  Synthetic
ccuuggggugucauuaucuguu

SEQ ID NO: 73261 - RNA, 23 nt, Artificial Sequence
  Synthetic
cccuuggggugucauuaucuguu

SEQ ID NO: 73262 - RNA, 24 nt, Artificial Sequence
  Synthetic
ucccuuggggugucauuaucuguu

SEQ ID NO: 73263 - RNA, 18 nt, Artificial Sequence
  Synthetic
uagugguuguuaucuguu

SEQ ID NO: 73264 - RNA, 19 nt, Artificial Sequence
  Synthetic
cuagugguuguuaucuguu

SEQ ID NO: 73265 - RNA, 20 nt, Artificial Sequence
  Synthetic
ccuagugguuguuaucuguu

SEQ ID NO: 73266 - RNA, 21 nt, Artificial Sequence
  Synthetic
accuagugguuguuaucuguu

SEQ ID NO: 73267 - RNA, 22 nt, Artificial Sequence
  Synthetic
aaccuagugguuguuaucuguu

SEQ ID NO: 73268 - RNA, 23 nt, Artificial Sequence
  Synthetic
aaaccuagugguuguuaucuguu

SEQ ID NO: 73269 - RNA, 24 nt, Artificial Sequence
  Synthetic
caaaccuagugguuguuaucuguu

SEQ ID NO: 73270 - RNA, 20 nt, Artificial Sequence
  Synthetic
agggaaauuucuucucuguu

SEQ ID NO: 73271 - RNA, 21 nt, Artificial Sequence
  Synthetic
uagggaaauuucuucucuguu

SEQ ID NO: 73272 - RNA, 22 nt, Artificial Sequence
  Synthetic
uuagggaaauuucuucucuguu

SEQ ID NO: 73273 - RNA, 23 nt, Artificial Sequence
  Synthetic
uuuagggaaauuucuucucuguu

SEQ ID NO: 73274 - RNA, 24 nt, Artificial Sequence
  Synthetic
cuuuagggaaauuucuucucuguu

SEQ ID NO: 73275 - RNA, 18 nt, Artificial Sequence
  Synthetic
caaguaauauagucuguu

SEQ ID NO: 73276 - RNA, 19 nt, Artificial Sequence
  Synthetic
acaaguaauauagucuguu

SEQ ID NO: 73277 - RNA, 20 nt, Artificial Sequence
  Synthetic
aacaaguaauauagucuguu

SEQ ID NO: 73278 - RNA, 21 nt, Artificial Sequence
  Synthetic
aaacaaguaauauagucuguu

SEQ ID NO: 73279 - RNA, 22 nt, Artificial Sequence
  Synthetic
aaaacaaguaauauagucuguu

SEQ ID NO: 73280 - RNA, 24 nt, Artificial Sequence
  Synthetic
agaaaacaaguaauauagucuguu

SEQ ID NO: 73281 - RNA, 21 nt, Artificial Sequence
  Synthetic
caagucuuuuuauuuucuguu

SEQ ID NO: 73282 - RNA, 23 nt, Artificial Sequence
  Synthetic
agcaagucuuuuuauuuucuguu

SEQ ID NO: 73283 - RNA, 24 nt, Artificial Sequence
  Synthetic
cagcaagucuuuuuauuuucuguu

SEQ ID NO: 73284 - RNA, 18 nt, Artificial Sequence
  Synthetic
ugauauaugccaaguguu

SEQ ID NO: 73285 - RNA, 19 nt, Artificial Sequence
  Synthetic
augauauaugccaaguguu

SEQ ID NO: 73286 - RNA, 20 nt, Artificial Sequence
  Synthetic
aaugauauaugccaaguguu

SEQ ID NO: 73287 - RNA, 21 nt, Artificial Sequence
  Synthetic
aaaugauauaugccaaguguu

SEQ ID NO: 73288 - RNA, 23 nt, Artificial Sequence
  Synthetic
ugaaaugauauaugccaaguguu

SEQ ID NO: 73289 - RNA, 24 nt, Artificial Sequence
  Synthetic
augaaaugauauaugccaaguguu

SEQ ID NO: 73290 - RNA, 18 nt, Artificial Sequence
  Synthetic
ugggaguuuacgaguguu

SEQ ID NO: 73291 - RNA, 21 nt, Artificial Sequence
  Synthetic
uggugggaguuuacgaguguu

SEQ ID NO: 73292 - RNA, 22 nt, Artificial Sequence
  Synthetic
uuggugggaguuuacgaguguu

SEQ ID NO: 73293 - RNA, 24 nt, Artificial Sequence
  Synthetic
uguuggugggaguuuacgaguguu

SEQ ID NO: 73294 - RNA, 18 nt, Artificial Sequence
  Synthetic
aaauuucuugugcguguu

SEQ ID NO: 73295 - RNA, 19 nt, Artificial Sequence
  Synthetic
aaaauuucuugugcguguu

SEQ ID NO: 73296 - RNA, 20 nt, Artificial Sequence
  Synthetic
caaaauuucuugugcguguu

SEQ ID NO: 73297 - RNA, 22 nt, Artificial Sequence
  Synthetic
ugcaaaauuucuugugcguguu

SEQ ID NO: 73298 - RNA, 23 nt, Artificial Sequence
  Synthetic
uugcaaaauuucuugugcguguu

SEQ ID NO: 73299 - RNA, 24 nt, Artificial Sequence
  Synthetic
cuugcaaaauuucuugugcguguu

SEQ ID NO: 73300 - RNA, 18 nt, Artificial Sequence
  Synthetic
uccguuuggccagguguu

SEQ ID NO: 73301 - RNA, 19 nt, Artificial Sequence
  Synthetic
uuccguuuggccagguguu

SEQ ID NO: 73302 - RNA, 20 nt, Artificial Sequence
  Synthetic
auuccguuuggccagguguu

SEQ ID NO: 73303 - RNA, 21 nt, Artificial Sequence
  Synthetic
aauuccguuuggccagguguu

SEQ ID NO: 73304 - RNA, 22 nt, Artificial Sequence
  Synthetic
caauuccguuuggccagguguu

SEQ ID NO: 73305 - RNA, 23 nt, Artificial Sequence
  Synthetic
ucaauuccguuuggccagguguu

SEQ ID NO: 73306 - RNA, 24 nt, Artificial Sequence
  Synthetic
uucaauuccguuuggccagguguu

SEQ ID NO: 73307 - RNA, 19 nt, Artificial Sequence
  Synthetic
agaaggaaaauaggguguu

SEQ ID NO: 73308 - RNA, 20 nt, Artificial Sequence
  Synthetic
cagaaggaaaauaggguguu

SEQ ID NO: 73309 - RNA, 21 nt, Artificial Sequence
  Synthetic
ucagaaggaaaauaggguguu

SEQ ID NO: 73310 - RNA, 22 nt, Artificial Sequence
  Synthetic
uucagaaggaaaauaggguguu

SEQ ID NO: 73311 - RNA, 18 nt, Artificial Sequence
  Synthetic
uguggcuuacgugguguu

SEQ ID NO: 73312 - RNA, 19 nt, Artificial Sequence
  Synthetic
uuguggcuuacgugguguu

SEQ ID NO: 73313 - RNA, 20 nt, Artificial Sequence
  Synthetic
uuuguggcuuacgugguguu

SEQ ID NO: 73314 - RNA, 21 nt, Artificial Sequence
  Synthetic
auuuguggcuuacgugguguu

SEQ ID NO: 73315 - RNA, 22 nt, Artificial Sequence
  Synthetic
aauuuguggcuuacgugguguu

SEQ ID NO: 73316 - RNA, 23 nt, Artificial Sequence
  Synthetic
aaauuuguggcuuacgugguguu

SEQ ID NO: 73317 - RNA, 24 nt, Artificial Sequence
  Synthetic
aaaauuuguggcuuacgugguguu

SEQ ID NO: 73318 - RNA, 18 nt, Artificial Sequence
  Synthetic
caauaaugguaauguguu

SEQ ID NO: 73319 - RNA, 19 nt, Artificial Sequence
  Synthetic
ucaauaaugguaauguguu

SEQ ID NO: 73320 - RNA, 20 nt, Artificial Sequence
  Synthetic
aucaauaaugguaauguguu

SEQ ID NO: 73321 - RNA, 21 nt, Artificial Sequence
  Synthetic
aaucaauaaugguaauguguu

SEQ ID NO: 73322 - RNA, 22 nt, Artificial Sequence
  Synthetic
aaaucaauaaugguaauguguu

SEQ ID NO: 73323 - RNA, 23 nt, Artificial Sequence
  Synthetic
aaaaucaauaaugguaauguguu

SEQ ID NO: 73324 - RNA, 18 nt, Artificial Sequence
  Synthetic
uaggaucccugauguguu

SEQ ID NO: 73325 - RNA, 19 nt, Artificial Sequence
  Synthetic
cuaggaucccugauguguu

SEQ ID NO: 73326 - RNA, 20 nt, Artificial Sequence
  Synthetic
acuaggaucccugauguguu

SEQ ID NO: 73327 - RNA, 21 nt, Artificial Sequence
  Synthetic
uacuaggaucccugauguguu

SEQ ID NO: 73328 - RNA, 23 nt, Artificial Sequence
  Synthetic
uguacuaggaucccugauguguu

SEQ ID NO: 73329 - RNA, 24 nt, Artificial Sequence
  Synthetic
auguacuaggaucccugauguguu

SEQ ID NO: 73330 - RNA, 19 nt, Artificial Sequence
  Synthetic
ugacaggguagacuguguu

SEQ ID NO: 73331 - RNA, 20 nt, Artificial Sequence
  Synthetic
cugacaggguagacuguguu

SEQ ID NO: 73332 - RNA, 22 nt, Artificial Sequence
  Synthetic
ugcugacaggguagacuguguu

SEQ ID NO: 73333 - RNA, 23 nt, Artificial Sequence
  Synthetic
augcugacaggguagacuguguu

SEQ ID NO: 73334 - RNA, 24 nt, Artificial Sequence
  Synthetic
caugcugacaggguagacuguguu

SEQ ID NO: 73335 - RNA, 18 nt, Artificial Sequence
  Synthetic
aggaaaguugccuguguu

SEQ ID NO: 73336 - RNA, 19 nt, Artificial Sequence
  Synthetic
caggaaaguugccuguguu

SEQ ID NO: 73337 - RNA, 20 nt, Artificial Sequence
  Synthetic
acaggaaaguugccuguguu

SEQ ID NO: 73338 - RNA, 21 nt, Artificial Sequence
  Synthetic
uacaggaaaguugccuguguu

SEQ ID NO: 73339 - RNA, 22 nt, Artificial Sequence
  Synthetic
auacaggaaaguugccuguguu

SEQ ID NO: 73340 - RNA, 24 nt, Artificial Sequence
  Synthetic
agauacaggaaaguugccuguguu

SEQ ID NO: 73341 - RNA, 18 nt, Artificial Sequence
  Synthetic
aacauauauuguuguguu

SEQ ID NO: 73342 - RNA, 19 nt, Artificial Sequence
  Synthetic
aaacauauauuguuguguu

SEQ ID NO: 73343 - RNA, 20 nt, Artificial Sequence
  Synthetic
aaaacauauauuguuguguu

SEQ ID NO: 73344 - RNA, 21 nt, Artificial Sequence
  Synthetic
uaaaacauauauuguuguguu

SEQ ID NO: 73345 - RNA, 22 nt, Artificial Sequence
  Synthetic
auaaaacauauauuguuguguu

SEQ ID NO: 73346 - RNA, 23 nt, Artificial Sequence
  Synthetic
aauaaaacauauauuguuguguu

SEQ ID NO: 73347 - RNA, 24 nt, Artificial Sequence
  Synthetic
aaauaaaacauauauuguuguguu

SEQ ID NO: 73348 - RNA, 18 nt, Artificial Sequence
  Synthetic
caccuuagaagaauuguu

SEQ ID NO: 73349 - RNA, 19 nt, Artificial Sequence
  Synthetic
ucaccuuagaagaauuguu

SEQ ID NO: 73350 - RNA, 21 nt, Artificial Sequence
  Synthetic
agucaccuuagaagaauuguu

SEQ ID NO: 73351 - RNA, 22 nt, Artificial Sequence
  Synthetic
aagucaccuuagaagaauuguu

SEQ ID NO: 73352 - RNA, 23 nt, Artificial Sequence
  Synthetic
aaagucaccuuagaagaauuguu

SEQ ID NO: 73353 - RNA, 18 nt, Artificial Sequence
  Synthetic
aaagaugcuauaauuguu

SEQ ID NO: 73354 - RNA, 20 nt, Artificial Sequence
  Synthetic
agaaagaugcuauaauuguu

SEQ ID NO: 73355 - RNA, 21 nt, Artificial Sequence
  Synthetic
uuguuuuuaugcuuuauuguu

SEQ ID NO: 73356 - RNA, 22 nt, Artificial Sequence
  Synthetic
uuuguuuuuaugcuuuauuguu

SEQ ID NO: 73357 - RNA, 23 nt, Artificial Sequence
  Synthetic
uuuuguuuuuaugcuuuauuguu

SEQ ID NO: 73358 - RNA, 18 nt, Artificial Sequence
  Synthetic
uaguacagaugccuuguu

SEQ ID NO: 73359 - RNA, 19 nt, Artificial Sequence
  Synthetic
auaguacagaugccuuguu

SEQ ID NO: 73360 - RNA, 20 nt, Artificial Sequence
  Synthetic
uauaguacagaugccuuguu

SEQ ID NO: 73361 - RNA, 21 nt, Artificial Sequence
  Synthetic
uuauaguacagaugccuuguu

SEQ ID NO: 73362 - RNA, 22 nt, Artificial Sequence
  Synthetic
auuauaguacagaugccuuguu

SEQ ID NO: 73363 - RNA, 23 nt, Artificial Sequence
  Synthetic
aauuauaguacagaugccuuguu

SEQ ID NO: 73364 - RNA, 24 nt, Artificial Sequence
  Synthetic
caauuauaguacagaugccuuguu

SEQ ID NO: 73365 - RNA, 18 nt, Artificial Sequence
  Synthetic
agaggaaaauggcuuguu

SEQ ID NO: 73366 - RNA, 20 nt, Artificial Sequence
  Synthetic
agagaggaaaauggcuuguu

SEQ ID NO: 73367 - RNA, 21 nt, Artificial Sequence
  Synthetic
uagagaggaaaauggcuuguu

SEQ ID NO: 73368 - RNA, 22 nt, Artificial Sequence
  Synthetic
uuagagaggaaaauggcuuguu

SEQ ID NO: 73369 - RNA, 23 nt, Artificial Sequence
  Synthetic
auuagagaggaaaauggcuuguu

SEQ ID NO: 73370 - RNA, 24 nt, Artificial Sequence
  Synthetic
cauuagagaggaaaauggcuuguu

SEQ ID NO: 73371 - RNA, 18 nt, Artificial Sequence
  Synthetic
acccgaaaccugcuuguu

SEQ ID NO: 73372 - RNA, 19 nt, Artificial Sequence
  Synthetic
aacccgaaaccugcuuguu

SEQ ID NO: 73373 - RNA, 21 nt, Artificial Sequence
  Synthetic
agaacccgaaaccugcuuguu

SEQ ID NO: 73374 - RNA, 23 nt, Artificial Sequence
  Synthetic
ugagaacccgaaaccugcuuguu

SEQ ID NO: 73375 - RNA, 24 nt, Artificial Sequence
  Synthetic
cugagaacccgaaaccugcuuguu

SEQ ID NO: 73376 - RNA, 18 nt, Artificial Sequence
  Synthetic
uaguuuugguugcuuguu

SEQ ID NO: 73377 - RNA, 19 nt, Artificial Sequence
  Synthetic
uuaguuuugguugcuuguu

SEQ ID NO: 73378 - RNA, 20 nt, Artificial Sequence
  Synthetic
auuaguuuugguugcuuguu

SEQ ID NO: 73379 - RNA, 21 nt, Artificial Sequence
  Synthetic
uauuaguuuugguugcuuguu

SEQ ID NO: 73380 - RNA, 22 nt, Artificial Sequence
  Synthetic
uuauuaguuuugguugcuuguu

SEQ ID NO: 73381 - RNA, 19 nt, Artificial Sequence
  Synthetic
uggaaauaaagggguuguu

SEQ ID NO: 73382 - RNA, 20 nt, Artificial Sequence
  Synthetic
cuggaaauaaagggguuguu

SEQ ID NO: 73383 - RNA, 21 nt, Artificial Sequence
  Synthetic
caagagauaagaaauguuguu

SEQ ID NO: 73384 - RNA, 22 nt, Artificial Sequence
  Synthetic
acaagagauaagaaauguuguu

SEQ ID NO: 73385 - RNA, 23 nt, Artificial Sequence
  Synthetic
aacaagagauaagaaauguuguu

SEQ ID NO: 73386 - RNA, 24 nt, Artificial Sequence
  Synthetic
aaacaagagauaagaaauguuguu

SEQ ID NO: 73387 - RNA, 18 nt, Artificial Sequence
  Synthetic
cauuauucuucuguuguu

SEQ ID NO: 73388 - RNA, 19 nt, Artificial Sequence
  Synthetic
ucauuauucuucuguuguu

SEQ ID NO: 73389 - RNA, 20 nt, Artificial Sequence
  Synthetic
aucauuauucuucuguuguu

SEQ ID NO: 73390 - RNA, 21 nt, Artificial Sequence
  Synthetic
uaucauuauucuucuguuguu

SEQ ID NO: 73391 - RNA, 23 nt, Artificial Sequence
  Synthetic
cguaucauuauucuucuguuguu

SEQ ID NO: 73392 - RNA, 24 nt, Artificial Sequence
  Synthetic
ccguaucauuauucuucuguuguu

SEQ ID NO: 73393 - RNA, 21 nt, Artificial Sequence
  Synthetic
ucauaauaaguaacauuuguu

SEQ ID NO: 73394 - RNA, 22 nt, Artificial Sequence
  Synthetic
aucauaauaaguaacauuuguu

SEQ ID NO: 73395 - RNA, 24 nt, Artificial Sequence
  Synthetic
ugaucauaauaaguaacauuuguu

SEQ ID NO: 73396 - RNA, 18 nt, Artificial Sequence
  Synthetic
aaaauuuagucauuuguu

SEQ ID NO: 73397 - RNA, 19 nt, Artificial Sequence
  Synthetic
uaaaauuuagucauuuguu

SEQ ID NO: 73398 - RNA, 20 nt, Artificial Sequence
  Synthetic
uuaaaauuuagucauuuguu

SEQ ID NO: 73399 - RNA, 21 nt, Artificial Sequence
  Synthetic
uuuaaaauuuagucauuuguu

SEQ ID NO: 73400 - RNA, 22 nt, Artificial Sequence
  Synthetic
uuuuaaaauuuagucauuuguu

SEQ ID NO: 73401 - RNA, 23 nt, Artificial Sequence
  Synthetic
auuuuaaaauuuagucauuuguu

SEQ ID NO: 73402 - RNA, 24 nt, Artificial Sequence
  Synthetic
aauuuuaaaauuuagucauuuguu

SEQ ID NO: 73403 - RNA, 18 nt, Artificial Sequence
  Synthetic
cuuuguagagccuuuguu

SEQ ID NO: 73404 - RNA, 19 nt, Artificial Sequence
  Synthetic
acuuuguagagccuuuguu

SEQ ID NO: 73405 - RNA, 20 nt, Artificial Sequence
  Synthetic
uacuuuguagagccuuuguu

SEQ ID NO: 73406 - RNA, 21 nt, Artificial Sequence
  Synthetic
cuacuuuguagagccuuuguu

SEQ ID NO: 73407 - RNA, 23 nt, Artificial Sequence
  Synthetic
ugcuacuuuguagagccuuuguu

SEQ ID NO: 73408 - RNA, 21 nt, Artificial Sequence
  Synthetic
uuuucaagauuuaaguuuguu

SEQ ID NO: 73409 - RNA, 22 nt, Artificial Sequence
  Synthetic
cuuuucaagauuuaaguuuguu

SEQ ID NO: 73410 - RNA, 23 nt, Artificial Sequence
  Synthetic
acuuuucaagauuuaaguuuguu

SEQ ID NO: 73411 - RNA, 24 nt, Artificial Sequence
  Synthetic
cacuuuucaagauuuaaguuuguu

SEQ ID NO: 73412 - RNA, 18 nt, Artificial Sequence
  Synthetic
aguggaggaagguuuguu

SEQ ID NO: 73413 - RNA, 19 nt, Artificial Sequence
  Synthetic
uaguggaggaagguuuguu

SEQ ID NO: 73414 - RNA, 20 nt, Artificial Sequence
  Synthetic
uuaguggaggaagguuuguu

SEQ ID NO: 73415 - RNA, 21 nt, Artificial Sequence
  Synthetic
uuuaguggaggaagguuuguu

SEQ ID NO: 73416 - RNA, 22 nt, Artificial Sequence
  Synthetic
uuuuaguggaggaagguuuguu

SEQ ID NO: 73417 - RNA, 23 nt, Artificial Sequence
  Synthetic
auuuuaguggaggaagguuuguu

SEQ ID NO: 73418 - RNA, 24 nt, Artificial Sequence
  Synthetic
uauuuuaguggaggaagguuuguu

SEQ ID NO: 73419 - RNA, 18 nt, Artificial Sequence
  Synthetic
agcaauccaguguuuguu

SEQ ID NO: 73420 - RNA, 19 nt, Artificial Sequence
  Synthetic
cagcaauccaguguuuguu

SEQ ID NO: 73421 - RNA, 20 nt, Artificial Sequence
  Synthetic
ccagcaauccaguguuuguu

SEQ ID NO: 73422 - RNA, 21 nt, Artificial Sequence
  Synthetic
uccagcaauccaguguuuguu

SEQ ID NO: 73423 - RNA, 22 nt, Artificial Sequence
  Synthetic
uuccagcaauccaguguuuguu

SEQ ID NO: 73424 - RNA, 23 nt, Artificial Sequence
  Synthetic
uuuccagcaauccaguguuuguu

SEQ ID NO: 73425 - RNA, 24 nt, Artificial Sequence
  Synthetic
uuuuccagcaauccaguguuuguu

SEQ ID NO: 73426 - RNA, 21 nt, Artificial Sequence
  Synthetic
aauuaaauguuuaauuuuguu

SEQ ID NO: 73427 - RNA, 22 nt, Artificial Sequence
  Synthetic
caauuaaauguuuaauuuuguu

SEQ ID NO: 73428 - RNA, 23 nt, Artificial Sequence
  Synthetic
ccaauuaaauguuuaauuuuguu

SEQ ID NO: 73429 - RNA, 24 nt, Artificial Sequence
  Synthetic
uccaauuaaauguuuaauuuuguu

SEQ ID NO: 73430 - RNA, 18 nt, Artificial Sequence
  Synthetic
uuuugaauagauuuuguu

SEQ ID NO: 73431 - RNA, 21 nt, Artificial Sequence
  Synthetic
agguuuugaauagauuuuguu

SEQ ID NO: 73432 - RNA, 23 nt, Artificial Sequence
  Synthetic
agagguuuugaauagauuuuguu

SEQ ID NO: 73433 - RNA, 24 nt, Artificial Sequence
  Synthetic
cagagguuuugaauagauuuuguu

SEQ ID NO: 73434 - RNA, 22 nt, Artificial Sequence
  Synthetic
uguauuguacuucauuuuuguu

SEQ ID NO: 73435 - RNA, 23 nt, Artificial Sequence
  Synthetic
uuguauuguacuucauuuuuguu

SEQ ID NO: 73436 - RNA, 24 nt, Artificial Sequence
  Synthetic
uuuguauuguacuucauuuuuguu

SEQ ID NO: 73437 - RNA, 21 nt, Artificial Sequence
  Synthetic
caaagcugaaaaacaaaauuu

SEQ ID NO: 73438 - RNA, 23 nt, Artificial Sequence
  Synthetic
agcaaagcugaaaaacaaaauuu

SEQ ID NO: 73439 - RNA, 24 nt, Artificial Sequence
  Synthetic
aagcaaagcugaaaaacaaaauuu

SEQ ID NO: 73440 - RNA, 21 nt, Artificial Sequence
  Synthetic
caucaaaauauuugaaaauuu

SEQ ID NO: 73441 - RNA, 22 nt, Artificial Sequence
  Synthetic
acaucaaaauauuugaaaauuu

SEQ ID NO: 73442 - RNA, 23 nt, Artificial Sequence
  Synthetic
uacaucaaaauauuugaaaauuu

SEQ ID NO: 73443 - RNA, 24 nt, Artificial Sequence
  Synthetic
auacaucaaaauauuugaaaauuu

SEQ ID NO: 73444 - RNA, 18 nt, Artificial Sequence
  Synthetic
cuggcacaauuaaaauuu

SEQ ID NO: 73445 - RNA, 19 nt, Artificial Sequence
  Synthetic
ccuggcacaauuaaaauuu

SEQ ID NO: 73446 - RNA, 20 nt, Artificial Sequence
  Synthetic
accuggcacaauuaaaauuu

SEQ ID NO: 73447 - RNA, 22 nt, Artificial Sequence
  Synthetic
agaccuggcacaauuaaaauuu

SEQ ID NO: 73448 - RNA, 23 nt, Artificial Sequence
  Synthetic
uagaccuggcacaauuaaaauuu

SEQ ID NO: 73449 - RNA, 24 nt, Artificial Sequence
  Synthetic
cuagaccuggcacaauuaaaauuu

SEQ ID NO: 73450 - RNA, 19 nt, Artificial Sequence
  Synthetic
ugauaaacaacacaaauuu

SEQ ID NO: 73451 - RNA, 20 nt, Artificial Sequence
  Synthetic
augauaaacaacacaaauuu

SEQ ID NO: 73452 - RNA, 21 nt, Artificial Sequence
  Synthetic
caugauaaacaacacaaauuu

SEQ ID NO: 73453 - RNA, 22 nt, Artificial Sequence
  Synthetic
acaugauaaacaacacaaauuu

SEQ ID NO: 73454 - RNA, 23 nt, Artificial Sequence
  Synthetic
aacaugauaaacaacacaaauuu

SEQ ID NO: 73455 - RNA, 24 nt, Artificial Sequence
  Synthetic
caacaugauaaacaacacaaauuu

SEQ ID NO: 73456 - RNA, 19 nt, Artificial Sequence
  Synthetic
ugacaaccugcacaaauuu

SEQ ID NO: 73457 - RNA, 20 nt, Artificial Sequence
  Synthetic
uugacaaccugcacaaauuu

SEQ ID NO: 73458 - RNA, 21 nt, Artificial Sequence
  Synthetic
auugacaaccugcacaaauuu

SEQ ID NO: 73459 - RNA, 22 nt, Artificial Sequence
  Synthetic
uauugacaaccugcacaaauuu

SEQ ID NO: 73460 - RNA, 23 nt, Artificial Sequence
  Synthetic
uuauugacaaccugcacaaauuu

SEQ ID NO: 73461 - RNA, 18 nt, Artificial Sequence
  Synthetic
ccugaaagcagcaaauuu

SEQ ID NO: 73462 - RNA, 19 nt, Artificial Sequence
  Synthetic
uccugaaagcagcaaauuu

SEQ ID NO: 73463 - RNA, 21 nt, Artificial Sequence
  Synthetic
aguccugaaagcagcaaauuu

SEQ ID NO: 73464 - RNA, 22 nt, Artificial Sequence
  Synthetic
aaguccugaaagcagcaaauuu

SEQ ID NO: 73465 - RNA, 23 nt, Artificial Sequence
  Synthetic
aaaguccugaaagcagcaaauuu

SEQ ID NO: 73466 - RNA, 24 nt, Artificial Sequence
  Synthetic
caaaguccugaaagcagcaaauuu

SEQ ID NO: 73467 - RNA, 18 nt, Artificial Sequence
  Synthetic
aaugaguucgagaaauuu

SEQ ID NO: 73468 - RNA, 20 nt, Artificial Sequence
  Synthetic
ugaaugaguucgagaaauuu

SEQ ID NO: 73469 - RNA, 18 nt, Artificial Sequence
  Synthetic
auucccaagcugaaauuu

SEQ ID NO: 73470 - RNA, 19 nt, Artificial Sequence
  Synthetic
uauucccaagcugaaauuu

SEQ ID NO: 73471 - RNA, 21 nt, Artificial Sequence
  Synthetic
aguauucccaagcugaaauuu

SEQ ID NO: 73472 - RNA, 22 nt, Artificial Sequence
  Synthetic
aaguauucccaagcugaaauuu

SEQ ID NO: 73473 - RNA, 23 nt, Artificial Sequence
  Synthetic
caaguauucccaagcugaaauuu

SEQ ID NO: 73474 - RNA, 18 nt, Artificial Sequence
  Synthetic
uaugauagagauaaauuu

SEQ ID NO: 73475 - RNA, 19 nt, Artificial Sequence
  Synthetic
cuaugauagagauaaauuu

SEQ ID NO: 73476 - RNA, 20 nt, Artificial Sequence
  Synthetic
acuaugauagagauaaauuu

SEQ ID NO: 73477 - RNA, 21 nt, Artificial Sequence
  Synthetic
cacuaugauagagauaaauuu

SEQ ID NO: 73478 - RNA, 22 nt, Artificial Sequence
  Synthetic
acacuaugauagagauaaauuu

SEQ ID NO: 73479 - RNA, 23 nt, Artificial Sequence
  Synthetic
aacacuaugauagagauaaauuu

SEQ ID NO: 73480 - RNA, 24 nt, Artificial Sequence
  Synthetic
uaacacuaugauagagauaaauuu

SEQ ID NO: 73481 - RNA, 18 nt, Artificial Sequence
  Synthetic
agccauuagcguaaauuu

SEQ ID NO: 73482 - RNA, 19 nt, Artificial Sequence
  Synthetic
uagccauuagcguaaauuu

SEQ ID NO: 73483 - RNA, 20 nt, Artificial Sequence
  Synthetic
auagccauuagcguaaauuu

SEQ ID NO: 73484 - RNA, 21 nt, Artificial Sequence
  Synthetic
uauagccauuagcguaaauuu

SEQ ID NO: 73485 - RNA, 22 nt, Artificial Sequence
  Synthetic
auauagccauuagcguaaauuu

SEQ ID NO: 73486 - RNA, 23 nt, Artificial Sequence
  Synthetic
aauauagccauuagcguaaauuu

SEQ ID NO: 73487 - RNA, 18 nt, Artificial Sequence
  Synthetic
aaacuaaacucacaauuu

SEQ ID NO: 73488 - RNA, 21 nt, Artificial Sequence
  Synthetic
aggaaacuaaacucacaauuu

SEQ ID NO: 73489 - RNA, 22 nt, Artificial Sequence
  Synthetic
caggaaacuaaacucacaauuu

SEQ ID NO: 73490 - RNA, 23 nt, Artificial Sequence
  Synthetic
ucaggaaacuaaacucacaauuu

SEQ ID NO: 73491 - RNA, 24 nt, Artificial Sequence
  Synthetic
uucaggaaacuaaacucacaauuu

SEQ ID NO: 73492 - RNA, 18 nt, Artificial Sequence
  Synthetic
uccaaauccucacaauuu

SEQ ID NO: 73493 - RNA, 19 nt, Artificial Sequence
  Synthetic
cuccaaauccucacaauuu

SEQ ID NO: 73494 - RNA, 20 nt, Artificial Sequence
  Synthetic
ucuccaaauccucacaauuu

SEQ ID NO: 73495 - RNA, 21 nt, Artificial Sequence
  Synthetic
uucuccaaauccucacaauuu

SEQ ID NO: 73496 - RNA, 22 nt, Artificial Sequence
  Synthetic
uuucuccaaauccucacaauuu

SEQ ID NO: 73497 - RNA, 23 nt, Artificial Sequence
  Synthetic
auuucuccaaauccucacaauuu

SEQ ID NO: 73498 - RNA, 24 nt, Artificial Sequence
  Synthetic
aauuucuccaaauccucacaauuu

SEQ ID NO: 73499 - RNA, 19 nt, Artificial Sequence
  Synthetic
cgauagaaguauacaauuu

SEQ ID NO: 73500 - RNA, 20 nt, Artificial Sequence
  Synthetic
ucgauagaaguauacaauuu

SEQ ID NO: 73501 - RNA, 21 nt, Artificial Sequence
  Synthetic
aucgauagaaguauacaauuu

SEQ ID NO: 73502 - RNA, 22 nt, Artificial Sequence
  Synthetic
aaucgauagaaguauacaauuu

SEQ ID NO: 73503 - RNA, 23 nt, Artificial Sequence
  Synthetic
aaaucgauagaaguauacaauuu

SEQ ID NO: 73504 - RNA, 24 nt, Artificial Sequence
  Synthetic
uaaaucgauagaaguauacaauuu

SEQ ID NO: 73505 - RNA, 18 nt, Artificial Sequence
  Synthetic
augacacugguacaauuu

SEQ ID NO: 73506 - RNA, 19 nt, Artificial Sequence
  Synthetic
aaugacacugguacaauuu

SEQ ID NO: 73507 - RNA, 20 nt, Artificial Sequence
  Synthetic
uaaugacacugguacaauuu

SEQ ID NO: 73508 - RNA, 21 nt, Artificial Sequence
  Synthetic
uuaaugacacugguacaauuu

SEQ ID NO: 73509 - RNA, 22 nt, Artificial Sequence
  Synthetic
uuuaaugacacugguacaauuu

SEQ ID NO: 73510 - RNA, 23 nt, Artificial Sequence
  Synthetic
uuuuaaugacacugguacaauuu

SEQ ID NO: 73511 - RNA, 24 nt, Artificial Sequence
  Synthetic
auuuuaaugacacugguacaauuu

SEQ ID NO: 73512 - RNA, 18 nt, Artificial Sequence
  Synthetic
acguaaaucauccaauuu

SEQ ID NO: 73513 - RNA, 19 nt, Artificial Sequence
  Synthetic
uacguaaaucauccaauuu

SEQ ID NO: 73514 - RNA, 20 nt, Artificial Sequence
  Synthetic
cuacguaaaucauccaauuu

SEQ ID NO: 73515 - RNA, 21 nt, Artificial Sequence
  Synthetic
ucuacguaaaucauccaauuu

SEQ ID NO: 73516 - RNA, 23 nt, Artificial Sequence
  Synthetic
ugucuacguaaaucauccaauuu

SEQ ID NO: 73517 - RNA, 24 nt, Artificial Sequence
  Synthetic
augucuacguaaaucauccaauuu

SEQ ID NO: 73518 - RNA, 18 nt, Artificial Sequence
  Synthetic
agaaugcagaggcaauuu

SEQ ID NO: 73519 - RNA, 20 nt, Artificial Sequence
  Synthetic
ugagaaugcagaggcaauuu

SEQ ID NO: 73520 - RNA, 21 nt, Artificial Sequence
  Synthetic
cugagaaugcagaggcaauuu

SEQ ID NO: 73521 - RNA, 22 nt, Artificial Sequence
  Synthetic
ucugagaaugcagaggcaauuu

SEQ ID NO: 73522 - RNA, 23 nt, Artificial Sequence
  Synthetic
aucugagaaugcagaggcaauuu

SEQ ID NO: 73523 - RNA, 24 nt, Artificial Sequence
  Synthetic
uaucugagaaugcagaggcaauuu

SEQ ID NO: 73524 - RNA, 18 nt, Artificial Sequence
  Synthetic
agccguuuucuucaauuu

SEQ ID NO: 73525 - RNA, 19 nt, Artificial Sequence
  Synthetic
cagccguuuucuucaauuu

SEQ ID NO: 73526 - RNA, 20 nt, Artificial Sequence
  Synthetic
acagccguuuucuucaauuu

SEQ ID NO: 73527 - RNA, 21 nt, Artificial Sequence
  Synthetic
aacagccguuuucuucaauuu

SEQ ID NO: 73528 - RNA, 22 nt, Artificial Sequence
  Synthetic
aaacagccguuuucuucaauuu

SEQ ID NO: 73529 - RNA, 23 nt, Artificial Sequence
  Synthetic
aaaacagccguuuucuucaauuu

SEQ ID NO: 73530 - RNA, 24 nt, Artificial Sequence
  Synthetic
caaaacagccguuuucuucaauuu

SEQ ID NO: 73531 - RNA, 18 nt, Artificial Sequence
  Synthetic
uggaaaacccaagaauuu

SEQ ID NO: 73532 - RNA, 19 nt, Artificial Sequence
  Synthetic
uuggaaaacccaagaauuu

SEQ ID NO: 73533 - RNA, 20 nt, Artificial Sequence
  Synthetic
cuuggaaaacccaagaauuu

SEQ ID NO: 73534 - RNA, 21 nt, Artificial Sequence
  Synthetic
ucuuggaaaacccaagaauuu

SEQ ID NO: 73535 - RNA, 22 nt, Artificial Sequence
  Synthetic
uucuuggaaaacccaagaauuu

SEQ ID NO: 73536 - RNA, 23 nt, Artificial Sequence
  Synthetic
auucuuggaaaacccaagaauuu

SEQ ID NO: 73537 - RNA, 24 nt, Artificial Sequence
  Synthetic
uauucuuggaaaacccaagaauuu

SEQ ID NO: 73538 - RNA, 18 nt, Artificial Sequence
  Synthetic
cuuucguaggaagaauuu

SEQ ID NO: 73539 - RNA, 19 nt, Artificial Sequence
  Synthetic
ucuuucguaggaagaauuu

SEQ ID NO: 73540 - RNA, 21 nt, Artificial Sequence
  Synthetic
ugucuuucguaggaagaauuu

SEQ ID NO: 73541 - RNA, 22 nt, Artificial Sequence
  Synthetic
cugucuuucguaggaagaauuu

SEQ ID NO: 73542 - RNA, 24 nt, Artificial Sequence
  Synthetic
ugcugucuuucguaggaagaauuu

SEQ ID NO: 73543 - RNA, 18 nt, Artificial Sequence
  Synthetic
aauacucgguaagaauuu

SEQ ID NO: 73544 - RNA, 20 nt, Artificial Sequence
  Synthetic
agaauacucgguaagaauuu

SEQ ID NO: 73545 - RNA, 21 nt, Artificial Sequence
  Synthetic
aagaauacucgguaagaauuu

SEQ ID NO: 73546 - RNA, 22 nt, Artificial Sequence
  Synthetic
uaagaauacucgguaagaauuu

SEQ ID NO: 73547 - RNA, 23 nt, Artificial Sequence
  Synthetic
auaagaauacucgguaagaauuu

SEQ ID NO: 73548 - RNA, 24 nt, Artificial Sequence
  Synthetic
aauaagaauacucgguaagaauuu

SEQ ID NO: 73549 - RNA, 18 nt, Artificial Sequence
  Synthetic
uccuagaaagcagaauuu

SEQ ID NO: 73550 - RNA, 19 nt, Artificial Sequence
  Synthetic
cuccuagaaagcagaauuu

SEQ ID NO: 73551 - RNA, 20 nt, Artificial Sequence
  Synthetic
ucuccuagaaagcagaauuu

SEQ ID NO: 73552 - RNA, 21 nt, Artificial Sequence
  Synthetic
uucuccuagaaagcagaauuu

SEQ ID NO: 73553 - RNA, 22 nt, Artificial Sequence
  Synthetic
auucuccuagaaagcagaauuu

SEQ ID NO: 73554 - RNA, 23 nt, Artificial Sequence
  Synthetic
aauucuccuagaaagcagaauuu

SEQ ID NO: 73555 - RNA, 18 nt, Artificial Sequence
  Synthetic
aaguuaaagggagaauuu

SEQ ID NO: 73556 - RNA, 19 nt, Artificial Sequence
  Synthetic
caaguuaaagggagaauuu

SEQ ID NO: 73557 - RNA, 20 nt, Artificial Sequence
  Synthetic
ccaaguuaaagggagaauuu

SEQ ID NO: 73558 - RNA, 21 nt, Artificial Sequence
  Synthetic
uccaaguuaaagggagaauuu

SEQ ID NO: 73559 - RNA, 22 nt, Artificial Sequence
  Synthetic
uuccaaguuaaagggagaauuu

SEQ ID NO: 73560 - RNA, 23 nt, Artificial Sequence
  Synthetic
cuuccaaguuaaagggagaauuu

SEQ ID NO: 73561 - RNA, 24 nt, Artificial Sequence
  Synthetic
ucuuccaaguuaaagggagaauuu

SEQ ID NO: 73562 - RNA, 19 nt, Artificial Sequence
  Synthetic
ugcuuaagugugagaauuu

SEQ ID NO: 73563 - RNA, 21 nt, Artificial Sequence
  Synthetic
agugcuuaagugugagaauuu

SEQ ID NO: 73564 - RNA, 22 nt, Artificial Sequence
  Synthetic
cagugcuuaagugugagaauuu

SEQ ID NO: 73565 - RNA, 24 nt, Artificial Sequence
  Synthetic
ugcagugcuuaagugugagaauuu

SEQ ID NO: 73566 - RNA, 18 nt, Artificial Sequence
  Synthetic
ccugcuuguuuagaauuu

SEQ ID NO: 73567 - RNA, 19 nt, Artificial Sequence
  Synthetic
accugcuuguuuagaauuu

SEQ ID NO: 73568 - RNA, 20 nt, Artificial Sequence
  Synthetic
aaccugcuuguuuagaauuu

SEQ ID NO: 73569 - RNA, 21 nt, Artificial Sequence
  Synthetic
aaaccugcuuguuuagaauuu

SEQ ID NO: 73570 - RNA, 23 nt, Artificial Sequence
  Synthetic
cgaaaccugcuuguuuagaauuu

SEQ ID NO: 73571 - RNA, 24 nt, Artificial Sequence
  Synthetic
ccgaaaccugcuuguuuagaauuu

SEQ ID NO: 73572 - RNA, 18 nt, Artificial Sequence
  Synthetic
uuuguuuugaaggaauuu

SEQ ID NO: 73573 - RNA, 19 nt, Artificial Sequence
  Synthetic
cuuuguuuugaaggaauuu

SEQ ID NO: 73574 - RNA, 20 nt, Artificial Sequence
  Synthetic
ccuuuguuuugaaggaauuu

SEQ ID NO: 73575 - RNA, 21 nt, Artificial Sequence
  Synthetic
uccuuuguuuugaaggaauuu

SEQ ID NO: 73576 - RNA, 23 nt, Artificial Sequence
  Synthetic
uguccuuuguuuugaaggaauuu

SEQ ID NO: 73577 - RNA, 21 nt, Artificial Sequence
  Synthetic
cuuuaauaucuuaaugaauuu

SEQ ID NO: 73578 - RNA, 22 nt, Artificial Sequence
  Synthetic
ucuuuaauaucuuaaugaauuu

SEQ ID NO: 73579 - RNA, 21 nt, Artificial Sequence
  Synthetic
uaauuucauaagcaugaauuu

SEQ ID NO: 73580 - RNA, 22 nt, Artificial Sequence
  Synthetic
auaauuucauaagcaugaauuu

SEQ ID NO: 73581 - RNA, 23 nt, Artificial Sequence
  Synthetic
cauaauuucauaagcaugaauuu

SEQ ID NO: 73582 - RNA, 24 nt, Artificial Sequence
  Synthetic
ucauaauuucauaagcaugaauuu

SEQ ID NO: 73583 - RNA, 21 nt, Artificial Sequence
  Synthetic
uuaaaugaaacuucugaauuu

SEQ ID NO: 73584 - RNA, 22 nt, Artificial Sequence
  Synthetic
cuuaaaugaaacuucugaauuu

SEQ ID NO: 73585 - RNA, 23 nt, Artificial Sequence
  Synthetic
ucuuaaaugaaacuucugaauuu

SEQ ID NO: 73586 - RNA, 24 nt, Artificial Sequence
  Synthetic
uucuuaaaugaaacuucugaauuu

SEQ ID NO: 73587 - RNA, 18 nt, Artificial Sequence
  Synthetic
ccaauauagaaauaauuu

SEQ ID NO: 73588 - RNA, 19 nt, Artificial Sequence
  Synthetic
accaauauagaaauaauuu

SEQ ID NO: 73589 - RNA, 20 nt, Artificial Sequence
  Synthetic
caccaauauagaaauaauuu

SEQ ID NO: 73590 - RNA, 21 nt, Artificial Sequence
  Synthetic
ucaccaauauagaaauaauuu

SEQ ID NO: 73591 - RNA, 22 nt, Artificial Sequence
  Synthetic
aucaccaauauagaaauaauuu

SEQ ID NO: 73592 - RNA, 23 nt, Artificial Sequence
  Synthetic
uaucaccaauauagaaauaauuu

SEQ ID NO: 73593 - RNA, 24 nt, Artificial Sequence
  Synthetic
cuaucaccaauauagaaauaauuu

SEQ ID NO: 73594 - RNA, 18 nt, Artificial Sequence
  Synthetic
cccuuggcaauauaauuu

SEQ ID NO: 73595 - RNA, 19 nt, Artificial Sequence
  Synthetic
ucccuuggcaauauaauuu

SEQ ID NO: 73596 - RNA, 21 nt, Artificial Sequence
  Synthetic
cgucccuuggcaauauaauuu

SEQ ID NO: 73597 - RNA, 22 nt, Artificial Sequence
  Synthetic
ccgucccuuggcaauauaauuu

SEQ ID NO: 73598 - RNA, 23 nt, Artificial Sequence
  Synthetic
accgucccuuggcaauauaauuu

SEQ ID NO: 73599 - RNA, 24 nt, Artificial Sequence
  Synthetic
uaccgucccuuggcaauauaauuu

SEQ ID NO: 73600 - RNA, 18 nt, Artificial Sequence
  Synthetic
uguaaaauugacuaauuu

SEQ ID NO: 73601 - RNA, 19 nt, Artificial Sequence
  Synthetic
auguaaaauugacuaauuu

SEQ ID NO: 73602 - RNA, 20 nt, Artificial Sequence
  Synthetic
aauguaaaauugacuaauuu

SEQ ID NO: 73603 - RNA, 21 nt, Artificial Sequence
  Synthetic
aaauguaaaauugacuaauuu

SEQ ID NO: 73604 - RNA, 22 nt, Artificial Sequence
  Synthetic
uaaauguaaaauugacuaauuu

SEQ ID NO: 73605 - RNA, 24 nt, Artificial Sequence
  Synthetic
uguaaauguaaaauugacuaauuu

SEQ ID NO: 73606 - RNA, 18 nt, Artificial Sequence
  Synthetic
agggauaggcccuaauuu

SEQ ID NO: 73607 - RNA, 19 nt, Artificial Sequence
  Synthetic
aagggauaggcccuaauuu

SEQ ID NO: 73608 - RNA, 20 nt, Artificial Sequence
  Synthetic
aaagggauaggcccuaauuu

SEQ ID NO: 73609 - RNA, 21 nt, Artificial Sequence
  Synthetic
aaaagggauaggcccuaauuu

SEQ ID NO: 73610 - RNA, 22 nt, Artificial Sequence
  Synthetic
aaaaagggauaggcccuaauuu

SEQ ID NO: 73611 - RNA, 23 nt, Artificial Sequence
  Synthetic
uaaaaagggauaggcccuaauuu

SEQ ID NO: 73612 - RNA, 24 nt, Artificial Sequence
  Synthetic
uuaaaaagggauaggcccuaauuu

SEQ ID NO: 73613 - RNA, 18 nt, Artificial Sequence
  Synthetic
agaaggaauuucuaauuu

SEQ ID NO: 73614 - RNA, 19 nt, Artificial Sequence
  Synthetic
aagaaggaauuucuaauuu

SEQ ID NO: 73615 - RNA, 20 nt, Artificial Sequence
  Synthetic
caagaaggaauuucuaauuu

SEQ ID NO: 73616 - RNA, 21 nt, Artificial Sequence
  Synthetic
ucaagaaggaauuucuaauuu

SEQ ID NO: 73617 - RNA, 22 nt, Artificial Sequence
  Synthetic
cucaagaaggaauuucuaauuu

SEQ ID NO: 73618 - RNA, 23 nt, Artificial Sequence
  Synthetic
ucucaagaaggaauuucuaauuu

SEQ ID NO: 73619 - RNA, 24 nt, Artificial Sequence
  Synthetic
uucucaagaaggaauuucuaauuu

SEQ ID NO: 73620 - RNA, 21 nt, Artificial Sequence
  Synthetic
caaaaucaaaaucaguaauuu

SEQ ID NO: 73621 - RNA, 22 nt, Artificial Sequence
  Synthetic
ucaaaaucaaaaucaguaauuu

SEQ ID NO: 73622 - RNA, 23 nt, Artificial Sequence
  Synthetic
uucaaaaucaaaaucaguaauuu

SEQ ID NO: 73623 - RNA, 24 nt, Artificial Sequence
  Synthetic
auucaaaaucaaaaucaguaauuu

SEQ ID NO: 73624 - RNA, 18 nt, Artificial Sequence
  Synthetic
uuuaauagucuguaauuu

SEQ ID NO: 73625 - RNA, 19 nt, Artificial Sequence
  Synthetic
auuuaauagucuguaauuu

SEQ ID NO: 73626 - RNA, 20 nt, Artificial Sequence
  Synthetic
uauuuaauagucuguaauuu

SEQ ID NO: 73627 - RNA, 21 nt, Artificial Sequence
  Synthetic
uuauuuaauagucuguaauuu

SEQ ID NO: 73628 - RNA, 22 nt, Artificial Sequence
  Synthetic
uuuauuuaauagucuguaauuu

SEQ ID NO: 73629 - RNA, 23 nt, Artificial Sequence
  Synthetic
cuuuauuuaauagucuguaauuu

SEQ ID NO: 73630 - RNA, 24 nt, Artificial Sequence
  Synthetic
ucuuuauuuaauagucuguaauuu

SEQ ID NO: 73631 - RNA, 18 nt, Artificial Sequence
  Synthetic
ucccauaucuuuuaauuu

SEQ ID NO: 73632 - RNA, 19 nt, Artificial Sequence
  Synthetic
cucccauaucuuuuaauuu

SEQ ID NO: 73633 - RNA, 20 nt, Artificial Sequence
  Synthetic
ccucccauaucuuuuaauuu

SEQ ID NO: 73634 - RNA, 21 nt, Artificial Sequence
  Synthetic
cccucccauaucuuuuaauuu

SEQ ID NO: 73635 - RNA, 22 nt, Artificial Sequence
  Synthetic
acccucccauaucuuuuaauuu

SEQ ID NO: 73636 - RNA, 24 nt, Artificial Sequence
  Synthetic
ugacccucccauaucuuuuaauuu

SEQ ID NO: 73637 - RNA, 21 nt, Artificial Sequence
  Synthetic
uaguugguuugguuuuaauuu

SEQ ID NO: 73638 - RNA, 22 nt, Artificial Sequence
  Synthetic
auaguugguuugguuuuaauuu

SEQ ID NO: 73639 - RNA, 23 nt, Artificial Sequence
  Synthetic
uauaguugguuugguuuuaauuu

SEQ ID NO: 73640 - RNA, 24 nt, Artificial Sequence
  Synthetic
uuauaguugguuugguuuuaauuu

SEQ ID NO: 73641 - RNA, 18 nt, Artificial Sequence
  Synthetic
uccuugcauuuuuaauuu

SEQ ID NO: 73642 - RNA, 19 nt, Artificial Sequence
  Synthetic
auccuugcauuuuuaauuu

SEQ ID NO: 73643 - RNA, 20 nt, Artificial Sequence
  Synthetic
aauccuugcauuuuuaauuu

SEQ ID NO: 73644 - RNA, 21 nt, Artificial Sequence
  Synthetic
caauccuugcauuuuuaauuu

SEQ ID NO: 73645 - RNA, 22 nt, Artificial Sequence
  Synthetic
acaauccuugcauuuuuaauuu

SEQ ID NO: 73646 - RNA, 23 nt, Artificial Sequence
  Synthetic
cacaauccuugcauuuuuaauuu

SEQ ID NO: 73647 - RNA, 24 nt, Artificial Sequence
  Synthetic
ccacaauccuugcauuuuuaauuu

SEQ ID NO: 73648 - RNA, 18 nt, Artificial Sequence
  Synthetic
uaugucacuugaacauuu

SEQ ID NO: 73649 - RNA, 19 nt, Artificial Sequence
  Synthetic
auaugucacuugaacauuu

SEQ ID NO: 73650 - RNA, 20 nt, Artificial Sequence
  Synthetic
uauaugucacuugaacauuu

SEQ ID NO: 73651 - RNA, 18 nt, Artificial Sequence
  Synthetic
aaaggauaaguaacauuu

SEQ ID NO: 73652 - RNA, 19 nt, Artificial Sequence
  Synthetic
aaaaggauaaguaacauuu

SEQ ID NO: 73653 - RNA, 20 nt, Artificial Sequence
  Synthetic
aaaaaggauaaguaacauuu

SEQ ID NO: 73654 - RNA, 21 nt, Artificial Sequence
  Synthetic
uaaaaaggauaaguaacauuu

SEQ ID NO: 73655 - RNA, 23 nt, Artificial Sequence
  Synthetic
aguaaaaaggauaaguaacauuu

SEQ ID NO: 73656 - RNA, 18 nt, Artificial Sequence
  Synthetic
ucuaguuucaccacauuu

SEQ ID NO: 73657 - RNA, 19 nt, Artificial Sequence
  Synthetic
cucuaguuucaccacauuu

SEQ ID NO: 73658 - RNA, 20 nt, Artificial Sequence
  Synthetic
ccucuaguuucaccacauuu

SEQ ID NO: 73659 - RNA, 21 nt, Artificial Sequence
  Synthetic
accucuaguuucaccacauuu

SEQ ID NO: 73660 - RNA, 22 nt, Artificial Sequence
  Synthetic
uaccucuaguuucaccacauuu

SEQ ID NO: 73661 - RNA, 23 nt, Artificial Sequence
  Synthetic
uuaccucuaguuucaccacauuu

SEQ ID NO: 73662 - RNA, 24 nt, Artificial Sequence
  Synthetic
cuuaccucuaguuucaccacauuu

SEQ ID NO: 73663 - RNA, 21 nt, Artificial Sequence
  Synthetic
aaauuuuaaaaguugacauuu

SEQ ID NO: 73664 - RNA, 22 nt, Artificial Sequence
  Synthetic
uaaauuuuaaaaguugacauuu

SEQ ID NO: 73665 - RNA, 23 nt, Artificial Sequence
  Synthetic
uuaaauuuuaaaaguugacauuu

SEQ ID NO: 73666 - RNA, 24 nt, Artificial Sequence
  Synthetic
auuaaauuuuaaaaguugacauuu

SEQ ID NO: 73667 - RNA, 18 nt, Artificial Sequence
  Synthetic
uauuauucuucuacauuu

SEQ ID NO: 73668 - RNA, 19 nt, Artificial Sequence
  Synthetic
cuauuauucuucuacauuu

SEQ ID NO: 73669 - RNA, 20 nt, Artificial Sequence
  Synthetic
ucuauuauucuucuacauuu

SEQ ID NO: 73670 - RNA, 21 nt, Artificial Sequence
  Synthetic
uucuauuauucuucuacauuu

SEQ ID NO: 73671 - RNA, 22 nt, Artificial Sequence
  Synthetic
auucuauuauucuucuacauuu

SEQ ID NO: 73672 - RNA, 23 nt, Artificial Sequence
  Synthetic
uauucuauuauucuucuacauuu

SEQ ID NO: 73673 - RNA, 18 nt, Artificial Sequence
  Synthetic
ugguauuucuuuacauuu

SEQ ID NO: 73674 - RNA, 19 nt, Artificial Sequence
  Synthetic
uugguauuucuuuacauuu

SEQ ID NO: 73675 - RNA, 20 nt, Artificial Sequence
  Synthetic
auugguauuucuuuacauuu

SEQ ID NO: 73676 - RNA, 21 nt, Artificial Sequence
  Synthetic
aauugguauuucuuuacauuu

SEQ ID NO: 73677 - RNA, 22 nt, Artificial Sequence
  Synthetic
aaauugguauuucuuuacauuu

SEQ ID NO: 73678 - RNA, 24 nt, Artificial Sequence
  Synthetic
ugaaauugguauuucuuuacauuu

SEQ ID NO: 73679 - RNA, 18 nt, Artificial Sequence
  Synthetic
ccuuggcucccaccauuu

SEQ ID NO: 73680 - RNA, 19 nt, Artificial Sequence
  Synthetic
accuuggcucccaccauuu

SEQ ID NO: 73681 - RNA, 20 nt, Artificial Sequence
  Synthetic
uaccuuggcucccaccauuu

SEQ ID NO: 73682 - RNA, 22 nt, Artificial Sequence
  Synthetic
uguaccuuggcucccaccauuu

SEQ ID NO: 73683 - RNA, 23 nt, Artificial Sequence
  Synthetic
auguaccuuggcucccaccauuu

SEQ ID NO: 73684 - RNA, 24 nt, Artificial Sequence
  Synthetic
cauguaccuuggcucccaccauuu

SEQ ID NO: 73685 - RNA, 18 nt, Artificial Sequence
  Synthetic
uuucaaggaaagccauuu

SEQ ID NO: 73686 - RNA, 19 nt, Artificial Sequence
  Synthetic
uuuucaaggaaagccauuu

SEQ ID NO: 73687 - RNA, 20 nt, Artificial Sequence
  Synthetic
cuuuucaaggaaagccauuu

SEQ ID NO: 73688 - RNA, 21 nt, Artificial Sequence
  Synthetic
acuuuucaaggaaagccauuu

SEQ ID NO: 73689 - RNA, 22 nt, Artificial Sequence
  Synthetic
uacuuuucaaggaaagccauuu

SEQ ID NO: 73690 - RNA, 23 nt, Artificial Sequence
  Synthetic
cuacuuuucaaggaaagccauuu

SEQ ID NO: 73691 - RNA, 24 nt, Artificial Sequence
  Synthetic
ccuacuuuucaaggaaagccauuu

SEQ ID NO: 73692 - RNA, 18 nt, Artificial Sequence
  Synthetic
agaaaguagaagccauuu

SEQ ID NO: 73693 - RNA, 19 nt, Artificial Sequence
  Synthetic
cagaaaguagaagccauuu

SEQ ID NO: 73694 - RNA, 20 nt, Artificial Sequence
  Synthetic
ucagaaaguagaagccauuu

SEQ ID NO: 73695 - RNA, 21 nt, Artificial Sequence
  Synthetic
uucagaaaguagaagccauuu

SEQ ID NO: 73696 - RNA, 22 nt, Artificial Sequence
  Synthetic
auucagaaaguagaagccauuu

SEQ ID NO: 73697 - RNA, 23 nt, Artificial Sequence
  Synthetic
aauucagaaaguagaagccauuu

SEQ ID NO: 73698 - RNA, 21 nt, Artificial Sequence
  Synthetic
agagaucacugagugccauuu

SEQ ID NO: 73699 - RNA, 22 nt, Artificial Sequence
  Synthetic
cagagaucacugagugccauuu

SEQ ID NO: 73700 - RNA, 23 nt, Artificial Sequence
  Synthetic
acagagaucacugagugccauuu

SEQ ID NO: 73701 - RNA, 19 nt, Artificial Sequence
  Synthetic
aggaacaaauucuccauuu

SEQ ID NO: 73702 - RNA, 21 nt, Artificial Sequence
  Synthetic
agaggaacaaauucuccauuu

SEQ ID NO: 73703 - RNA, 22 nt, Artificial Sequence
  Synthetic
cagaggaacaaauucuccauuu

SEQ ID NO: 73704 - RNA, 23 nt, Artificial Sequence
  Synthetic
ucagaggaacaaauucuccauuu

SEQ ID NO: 73705 - RNA, 24 nt, Artificial Sequence
  Synthetic
uucagaggaacaaauucuccauuu

SEQ ID NO: 73706 - RNA, 18 nt, Artificial Sequence
  Synthetic
ugaaccaggguuccauuu

SEQ ID NO: 73707 - RNA, 19 nt, Artificial Sequence
  Synthetic
augaaccaggguuccauuu

SEQ ID NO: 73708 - RNA, 20 nt, Artificial Sequence
  Synthetic
aaugaaccaggguuccauuu

SEQ ID NO: 73709 - RNA, 22 nt, Artificial Sequence
  Synthetic
agaaugaaccaggguuccauuu

SEQ ID NO: 73710 - RNA, 23 nt, Artificial Sequence
  Synthetic
uagaaugaaccaggguuccauuu

SEQ ID NO: 73711 - RNA, 24 nt, Artificial Sequence
  Synthetic
uuagaaugaaccaggguuccauuu

SEQ ID NO: 73712 - RNA, 21 nt, Artificial Sequence
  Synthetic
aaauucauagaaguagcauuu

SEQ ID NO: 73713 - RNA, 22 nt, Artificial Sequence
  Synthetic
aaaauucauagaaguagcauuu

SEQ ID NO: 73714 - RNA, 18 nt, Artificial Sequence
  Synthetic
cugaccauagacgcauuu

SEQ ID NO: 73715 - RNA, 19 nt, Artificial Sequence
  Synthetic
acugaccauagacgcauuu

SEQ ID NO: 73716 - RNA, 20 nt, Artificial Sequence
  Synthetic
uacugaccauagacgcauuu

SEQ ID NO: 73717 - RNA, 21 nt, Artificial Sequence
  Synthetic
uuacugaccauagacgcauuu

SEQ ID NO: 73718 - RNA, 22 nt, Artificial Sequence
  Synthetic
cuuacugaccauagacgcauuu

SEQ ID NO: 73719 - RNA, 18 nt, Artificial Sequence
  Synthetic
aaauggauauuugcauuu

SEQ ID NO: 73720 - RNA, 19 nt, Artificial Sequence
  Synthetic
uaaauggauauuugcauuu

SEQ ID NO: 73721 - RNA, 20 nt, Artificial Sequence
  Synthetic
uuaaauggauauuugcauuu

SEQ ID NO: 73722 - RNA, 21 nt, Artificial Sequence
  Synthetic
uuuaaauggauauuugcauuu

SEQ ID NO: 73723 - RNA, 22 nt, Artificial Sequence
  Synthetic
uuuuaaauggauauuugcauuu

SEQ ID NO: 73724 - RNA, 23 nt, Artificial Sequence
  Synthetic
auuuuaaauggauauuugcauuu

SEQ ID NO: 73725 - RNA, 24 nt, Artificial Sequence
  Synthetic
uauuuuaaauggauauuugcauuu

SEQ ID NO: 73726 - RNA, 21 nt, Artificial Sequence
  Synthetic
agauguauguuuuacucauuu

SEQ ID NO: 73727 - RNA, 22 nt, Artificial Sequence
  Synthetic
uagauguauguuuuacucauuu

SEQ ID NO: 73728 - RNA, 23 nt, Artificial Sequence
  Synthetic
cuagauguauguuuuacucauuu

SEQ ID NO: 73729 - RNA, 24 nt, Artificial Sequence
  Synthetic
acuagauguauguuuuacucauuu

SEQ ID NO: 73730 - RNA, 18 nt, Artificial Sequence
  Synthetic
uauuauuuucagucauuu

SEQ ID NO: 73731 - RNA, 19 nt, Artificial Sequence
  Synthetic
auauuauuuucagucauuu

SEQ ID NO: 73732 - RNA, 20 nt, Artificial Sequence
  Synthetic
uauauuauuuucagucauuu

SEQ ID NO: 73733 - RNA, 21 nt, Artificial Sequence
  Synthetic
uuauauuauuuucagucauuu

SEQ ID NO: 73734 - RNA, 22 nt, Artificial Sequence
  Synthetic
auuauauuauuuucagucauuu

SEQ ID NO: 73735 - RNA, 23 nt, Artificial Sequence
  Synthetic
aauuauauuauuuucagucauuu

SEQ ID NO: 73736 - RNA, 24 nt, Artificial Sequence
  Synthetic
aaauuauauuauuuucagucauuu

SEQ ID NO: 73737 - RNA, 18 nt, Artificial Sequence
  Synthetic
uaucuuuggaugucauuu

SEQ ID NO: 73738 - RNA, 19 nt, Artificial Sequence
  Synthetic
auaucuuuggaugucauuu

SEQ ID NO: 73739 - RNA, 20 nt, Artificial Sequence
  Synthetic
aauaucuuuggaugucauuu

SEQ ID NO: 73740 - RNA, 21 nt, Artificial Sequence
  Synthetic
aaauaucuuuggaugucauuu

SEQ ID NO: 73741 - RNA, 22 nt, Artificial Sequence
  Synthetic
aaaauaucuuuggaugucauuu

SEQ ID NO: 73742 - RNA, 24 nt, Artificial Sequence
  Synthetic
agaaaauaucuuuggaugucauuu

SEQ ID NO: 73743 - RNA, 18 nt, Artificial Sequence
  Synthetic
uuguauauaaguucauuu

SEQ ID NO: 73744 - RNA, 19 nt, Artificial Sequence
  Synthetic
auuguauauaaguucauuu

SEQ ID NO: 73745 - RNA, 20 nt, Artificial Sequence
  Synthetic
cauuguauauaaguucauuu

SEQ ID NO: 73746 - RNA, 21 nt, Artificial Sequence
  Synthetic
ucauuguauauaaguucauuu

SEQ ID NO: 73747 - RNA, 22 nt, Artificial Sequence
  Synthetic
uucauuguauauaaguucauuu

SEQ ID NO: 73748 - RNA, 23 nt, Artificial Sequence
  Synthetic
cuucauuguauauaaguucauuu

SEQ ID NO: 73749 - RNA, 24 nt, Artificial Sequence
  Synthetic
ucuucauuguauauaaguucauuu

SEQ ID NO: 73750 - RNA, 19 nt, Artificial Sequence
  Synthetic
agaucuauucauuucauuu

SEQ ID NO: 73751 - RNA, 21 nt, Artificial Sequence
  Synthetic
ugagaucuauucauuucauuu

SEQ ID NO: 73752 - RNA, 22 nt, Artificial Sequence
  Synthetic
augagaucuauucauuucauuu

SEQ ID NO: 73753 - RNA, 23 nt, Artificial Sequence
  Synthetic
uaugagaucuauucauuucauuu

SEQ ID NO: 73754 - RNA, 24 nt, Artificial Sequence
  Synthetic
uuaugagaucuauucauuucauuu

SEQ ID NO: 73755 - RNA, 18 nt, Artificial Sequence
  Synthetic
ugaaaggcauuuucauuu

SEQ ID NO: 73756 - RNA, 20 nt, Artificial Sequence
  Synthetic
agugaaaggcauuuucauuu

SEQ ID NO: 73757 - RNA, 21 nt, Artificial Sequence
  Synthetic
aagugaaaggcauuuucauuu

SEQ ID NO: 73758 - RNA, 22 nt, Artificial Sequence
  Synthetic
aaagugaaaggcauuuucauuu

SEQ ID NO: 73759 - RNA, 24 nt, Artificial Sequence
  Synthetic
ugaaagugaaaggcauuuucauuu

SEQ ID NO: 73760 - RNA, 22 nt, Artificial Sequence
  Synthetic
agauguauuaaaaagaagauuu

SEQ ID NO: 73761 - RNA, 23 nt, Artificial Sequence
  Synthetic
aagauguauuaaaaagaagauuu

SEQ ID NO: 73762 - RNA, 24 nt, Artificial Sequence
  Synthetic
uaagauguauuaaaaagaagauuu

SEQ ID NO: 73763 - RNA, 21 nt, Artificial Sequence
  Synthetic
augugcuagagaugcagauuu

SEQ ID NO: 73764 - RNA, 22 nt, Artificial Sequence
  Synthetic
uaugugcuagagaugcagauuu

SEQ ID NO: 73765 - RNA, 24 nt, Artificial Sequence
  Synthetic
aguaugugcuagagaugcagauuu

SEQ ID NO: 73766 - RNA, 18 nt, Artificial Sequence
  Synthetic
caggagaaggggagauuu

SEQ ID NO: 73767 - RNA, 20 nt, Artificial Sequence
  Synthetic
agcaggagaaggggagauuu

SEQ ID NO: 73768 - RNA, 22 nt, Artificial Sequence
  Synthetic
agagcaggagaaggggagauuu

SEQ ID NO: 73769 - RNA, 18 nt, Artificial Sequence
  Synthetic
caaggugacaugagauuu

SEQ ID NO: 73770 - RNA, 19 nt, Artificial Sequence
  Synthetic
acaaggugacaugagauuu

SEQ ID NO: 73771 - RNA, 20 nt, Artificial Sequence
  Synthetic
cacaaggugacaugagauuu

SEQ ID NO: 73772 - RNA, 22 nt, Artificial Sequence
  Synthetic
agcacaaggugacaugagauuu

SEQ ID NO: 73773 - RNA, 23 nt, Artificial Sequence
  Synthetic
aagcacaaggugacaugagauuu

SEQ ID NO: 73774 - RNA, 24 nt, Artificial Sequence
  Synthetic
uaagcacaaggugacaugagauuu

SEQ ID NO: 73775 - RNA, 19 nt, Artificial Sequence
  Synthetic
uguacuaauugcuagauuu

SEQ ID NO: 73776 - RNA, 20 nt, Artificial Sequence
  Synthetic
auguacuaauugcuagauuu

SEQ ID NO: 73777 - RNA, 21 nt, Artificial Sequence
  Synthetic
aauguacuaauugcuagauuu

SEQ ID NO: 73778 - RNA, 22 nt, Artificial Sequence
  Synthetic
caauguacuaauugcuagauuu

SEQ ID NO: 73779 - RNA, 23 nt, Artificial Sequence
  Synthetic
acaauguacuaauugcuagauuu

SEQ ID NO: 73780 - RNA, 24 nt, Artificial Sequence
  Synthetic
aacaauguacuaauugcuagauuu

SEQ ID NO: 73781 - RNA, 18 nt, Artificial Sequence
  Synthetic
agucacguuuguagauuu

SEQ ID NO: 73782 - RNA, 19 nt, Artificial Sequence
  Synthetic
cagucacguuuguagauuu

SEQ ID NO: 73783 - RNA, 21 nt, Artificial Sequence
  Synthetic
agcagucacguuuguagauuu

SEQ ID NO: 73784 - RNA, 22 nt, Artificial Sequence
  Synthetic
cagcagucacguuuguagauuu

SEQ ID NO: 73785 - RNA, 23 nt, Artificial Sequence
  Synthetic
ucagcagucacguuuguagauuu

SEQ ID NO: 73786 - RNA, 24 nt, Artificial Sequence
  Synthetic
uucagcagucacguuuguagauuu

SEQ ID NO: 73787 - RNA, 18 nt, Artificial Sequence
  Synthetic
cccuguuaguuuagauuu

SEQ ID NO: 73788 - RNA, 19 nt, Artificial Sequence
  Synthetic
ucccuguuaguuuagauuu

SEQ ID NO: 73789 - RNA, 20 nt, Artificial Sequence
  Synthetic
aucccuguuaguuuagauuu

SEQ ID NO: 73790 - RNA, 21 nt, Artificial Sequence
  Synthetic
uaucccuguuaguuuagauuu

SEQ ID NO: 73791 - RNA, 23 nt, Artificial Sequence
  Synthetic
uguaucccuguuaguuuagauuu

SEQ ID NO: 73792 - RNA, 24 nt, Artificial Sequence
  Synthetic
cuguaucccuguuaguuuagauuu

SEQ ID NO: 73793 - RNA, 18 nt, Artificial Sequence
  Synthetic
acaucucucacacgauuu

SEQ ID NO: 73794 - RNA, 19 nt, Artificial Sequence
  Synthetic
aacaucucucacacgauuu

SEQ ID NO: 73795 - RNA, 20 nt, Artificial Sequence
  Synthetic
aaacaucucucacacgauuu

SEQ ID NO: 73796 - RNA, 21 nt, Artificial Sequence
  Synthetic
aaaacaucucucacacgauuu

SEQ ID NO: 73797 - RNA, 22 nt, Artificial Sequence
  Synthetic
aaaaacaucucucacacgauuu

SEQ ID NO: 73798 - RNA, 23 nt, Artificial Sequence
  Synthetic
aaaaaacaucucucacacgauuu

SEQ ID NO: 73799 - RNA, 24 nt, Artificial Sequence
  Synthetic
aaaaaaacaucucucacacgauuu

SEQ ID NO: 73800 - RNA, 18 nt, Artificial Sequence
  Synthetic
auuuuagaauaucgauuu

SEQ ID NO: 73801 - RNA, 19 nt, Artificial Sequence
  Synthetic
uauuuuagaauaucgauuu

SEQ ID NO: 73802 - RNA, 20 nt, Artificial Sequence
  Synthetic
uuauuuuagaauaucgauuu

SEQ ID NO: 73803 - RNA, 21 nt, Artificial Sequence
  Synthetic
cuuauuuuagaauaucgauuu

SEQ ID NO: 73804 - RNA, 22 nt, Artificial Sequence
  Synthetic
acuuauuuuagaauaucgauuu

SEQ ID NO: 73805 - RNA, 23 nt, Artificial Sequence
  Synthetic
uacuuauuuuagaauaucgauuu

SEQ ID NO: 73806 - RNA, 24 nt, Artificial Sequence
  Synthetic
uuacuuauuuuagaauaucgauuu

SEQ ID NO: 73807 - RNA, 18 nt, Artificial Sequence
  Synthetic
uggggccaacaaggauuu

SEQ ID NO: 73808 - RNA, 20 nt, Artificial Sequence
  Synthetic
aguggggccaacaaggauuu

SEQ ID NO: 73809 - RNA, 21 nt, Artificial Sequence
  Synthetic
aaguggggccaacaaggauuu

SEQ ID NO: 73810 - RNA, 24 nt, Artificial Sequence
  Synthetic
uggaaguggggccaacaaggauuu

SEQ ID NO: 73811 - RNA, 18 nt, Artificial Sequence
  Synthetic
aacauuuguuuaggauuu

SEQ ID NO: 73812 - RNA, 19 nt, Artificial Sequence
  Synthetic
uaacauuuguuuaggauuu

SEQ ID NO: 73813 - RNA, 21 nt, Artificial Sequence
  Synthetic
aguaacauuuguuuaggauuu

SEQ ID NO: 73814 - RNA, 22 nt, Artificial Sequence
  Synthetic
aaguaacauuuguuuaggauuu

SEQ ID NO: 73815 - RNA, 23 nt, Artificial Sequence
  Synthetic
uaaguaacauuuguuuaggauuu

SEQ ID NO: 73816 - RNA, 24 nt, Artificial Sequence
  Synthetic
auaaguaacauuuguuuaggauuu

SEQ ID NO: 73817 - RNA, 18 nt, Artificial Sequence
  Synthetic
agcaugguacagggauuu

SEQ ID NO: 73818 - RNA, 19 nt, Artificial Sequence
  Synthetic
aagcaugguacagggauuu

SEQ ID NO: 73819 - RNA, 20 nt, Artificial Sequence
  Synthetic
caagcaugguacagggauuu

SEQ ID NO: 73820 - RNA, 21 nt, Artificial Sequence
  Synthetic
acaagcaugguacagggauuu

SEQ ID NO: 73821 - RNA, 23 nt, Artificial Sequence
  Synthetic
agacaagcaugguacagggauuu

SEQ ID NO: 73822 - RNA, 24 nt, Artificial Sequence
  Synthetic
aagacaagcaugguacagggauuu

SEQ ID NO: 73823 - RNA, 18 nt, Artificial Sequence
  Synthetic
cugccauauuguggauuu

SEQ ID NO: 73824 - RNA, 20 nt, Artificial Sequence
  Synthetic
agcugccauauuguggauuu

SEQ ID NO: 73825 - RNA, 21 nt, Artificial Sequence
  Synthetic
aagcugccauauuguggauuu

SEQ ID NO: 73826 - RNA, 22 nt, Artificial Sequence
  Synthetic
caagcugccauauuguggauuu

SEQ ID NO: 73827 - RNA, 23 nt, Artificial Sequence
  Synthetic
ccaagcugccauauuguggauuu

SEQ ID NO: 73828 - RNA, 24 nt, Artificial Sequence
  Synthetic
accaagcugccauauuguggauuu

SEQ ID NO: 73829 - RNA, 18 nt, Artificial Sequence
  Synthetic
aaaaugcaagaaugauuu

SEQ ID NO: 73830 - RNA, 19 nt, Artificial Sequence
  Synthetic
aaaaaugcaagaaugauuu

SEQ ID NO: 73831 - RNA, 20 nt, Artificial Sequence
  Synthetic
caaaaaugcaagaaugauuu

SEQ ID NO: 73832 - RNA, 18 nt, Artificial Sequence
  Synthetic
acguaucuagcaugauuu

SEQ ID NO: 73833 - RNA, 19 nt, Artificial Sequence
  Synthetic
cacguaucuagcaugauuu

SEQ ID NO: 73834 - RNA, 20 nt, Artificial Sequence
  Synthetic
ucacguaucuagcaugauuu

SEQ ID NO: 73835 - RNA, 21 nt, Artificial Sequence
  Synthetic
cucacguaucuagcaugauuu

SEQ ID NO: 73836 - RNA, 22 nt, Artificial Sequence
  Synthetic
acucacguaucuagcaugauuu

SEQ ID NO: 73837 - RNA, 23 nt, Artificial Sequence
  Synthetic
aacucacguaucuagcaugauuu

SEQ ID NO: 73838 - RNA, 24 nt, Artificial Sequence
  Synthetic
uaacucacguaucuagcaugauuu

SEQ ID NO: 73839 - RNA, 18 nt, Artificial Sequence
  Synthetic
ccagacaaauacugauuu

SEQ ID NO: 73840 - RNA, 19 nt, Artificial Sequence
  Synthetic
uccagacaaauacugauuu

SEQ ID NO: 73841 - RNA, 20 nt, Artificial Sequence
  Synthetic
uuccagacaaauacugauuu

SEQ ID NO: 73842 - RNA, 21 nt, Artificial Sequence
  Synthetic
uuuccagacaaauacugauuu

SEQ ID NO: 73843 - RNA, 22 nt, Artificial Sequence
  Synthetic
cuuuccagacaaauacugauuu

SEQ ID NO: 73844 - RNA, 23 nt, Artificial Sequence
  Synthetic
ucuuuccagacaaauacugauuu

SEQ ID NO: 73845 - RNA, 24 nt, Artificial Sequence
  Synthetic
aucuuuccagacaaauacugauuu

SEQ ID NO: 73846 - RNA, 21 nt, Artificial Sequence
  Synthetic
acuaauuuuuuucagugauuu

SEQ ID NO: 73847 - RNA, 22 nt, Artificial Sequence
  Synthetic
aacuaauuuuuuucagugauuu

SEQ ID NO: 73848 - RNA, 23 nt, Artificial Sequence
  Synthetic
caacuaauuuuuuucagugauuu

SEQ ID NO: 73849 - RNA, 24 nt, Artificial Sequence
  Synthetic
ucaacuaauuuuuuucagugauuu

SEQ ID NO: 73850 - RNA, 21 nt, Artificial Sequence
  Synthetic
aaauucaguuuucauugauuu

SEQ ID NO: 73851 - RNA, 22 nt, Artificial Sequence
  Synthetic
uaaauucaguuuucauugauuu

SEQ ID NO: 73852 - RNA, 23 nt, Artificial Sequence
  Synthetic
cuaaauucaguuuucauugauuu

SEQ ID NO: 73853 - RNA, 21 nt, Artificial Sequence
  Synthetic
cuuaauccccauucuugauuu

SEQ ID NO: 73854 - RNA, 22 nt, Artificial Sequence
  Synthetic
ccuuaauccccauucuugauuu

SEQ ID NO: 73855 - RNA, 23 nt, Artificial Sequence
  Synthetic
uccuuaauccccauucuugauuu

SEQ ID NO: 73856 - RNA, 24 nt, Artificial Sequence
  Synthetic
uuccuuaauccccauucuugauuu

SEQ ID NO: 73857 - RNA, 19 nt, Artificial Sequence
  Synthetic
agaaauuccauuuugauuu

SEQ ID NO: 73858 - RNA, 21 nt, Artificial Sequence
  Synthetic
agagaaauuccauuuugauuu

SEQ ID NO: 73859 - RNA, 22 nt, Artificial Sequence
  Synthetic
aagagaaauuccauuuugauuu

SEQ ID NO: 73860 - RNA, 23 nt, Artificial Sequence
  Synthetic
caagagaaauuccauuuugauuu

SEQ ID NO: 73861 - RNA, 24 nt, Artificial Sequence
  Synthetic
ucaagagaaauuccauuuugauuu

SEQ ID NO: 73862 - RNA, 21 nt, Artificial Sequence
  Synthetic
cuucuuacucucuaaauauuu

SEQ ID NO: 73863 - RNA, 22 nt, Artificial Sequence
  Synthetic
ccuucuuacucucuaaauauuu

SEQ ID NO: 73864 - RNA, 23 nt, Artificial Sequence
  Synthetic
uccuucuuacucucuaaauauuu

SEQ ID NO: 73865 - RNA, 18 nt, Artificial Sequence
  Synthetic
acaagugacauaauauuu

SEQ ID NO: 73866 - RNA, 19 nt, Artificial Sequence
  Synthetic
aacaagugacauaauauuu

SEQ ID NO: 73867 - RNA, 20 nt, Artificial Sequence
  Synthetic
aaacaagugacauaauauuu

SEQ ID NO: 73868 - RNA, 21 nt, Artificial Sequence
  Synthetic
uaaacaagugacauaauauuu

SEQ ID NO: 73869 - RNA, 23 nt, Artificial Sequence
  Synthetic
uguaaacaagugacauaauauuu

SEQ ID NO: 73870 - RNA, 18 nt, Artificial Sequence
  Synthetic
aaauaauccauaauauuu

SEQ ID NO: 73871 - RNA, 19 nt, Artificial Sequence
  Synthetic
uaaauaauccauaauauuu

SEQ ID NO: 73872 - RNA, 20 nt, Artificial Sequence
  Synthetic
uuaaauaauccauaauauuu

SEQ ID NO: 73873 - RNA, 21 nt, Artificial Sequence
  Synthetic
uuuaaauaauccauaauauuu

SEQ ID NO: 73874 - RNA, 22 nt, Artificial Sequence
  Synthetic
uuuuaaauaauccauaauauuu

SEQ ID NO: 73875 - RNA, 23 nt, Artificial Sequence
  Synthetic
cuuuuaaauaauccauaauauuu

SEQ ID NO: 73876 - RNA, 24 nt, Artificial Sequence
  Synthetic
acuuuuaaauaauccauaauauuu

SEQ ID NO: 73877 - RNA, 18 nt, Artificial Sequence
  Synthetic
uagaaggagguaauauuu

SEQ ID NO: 73878 - RNA, 19 nt, Artificial Sequence
  Synthetic
cuagaaggagguaauauuu

SEQ ID NO: 73879 - RNA, 20 nt, Artificial Sequence
  Synthetic
ccuagaaggagguaauauuu

SEQ ID NO: 73880 - RNA, 21 nt, Artificial Sequence
  Synthetic
accuagaaggagguaauauuu

SEQ ID NO: 73881 - RNA, 22 nt, Artificial Sequence
  Synthetic
aaccuagaaggagguaauauuu

SEQ ID NO: 73882 - RNA, 23 nt, Artificial Sequence
  Synthetic
aaaccuagaaggagguaauauuu

SEQ ID NO: 73883 - RNA, 24 nt, Artificial Sequence
  Synthetic
aaaaccuagaaggagguaauauuu

SEQ ID NO: 73884 - RNA, 21 nt, Artificial Sequence
  Synthetic
ugggagugcacuguaauauuu

SEQ ID NO: 73885 - RNA, 22 nt, Artificial Sequence
  Synthetic
uugggagugcacuguaauauuu

SEQ ID NO: 73886 - RNA, 23 nt, Artificial Sequence
  Synthetic
uuugggagugcacuguaauauuu

SEQ ID NO: 73887 - RNA, 24 nt, Artificial Sequence
  Synthetic
cuuugggagugcacuguaauauuu

SEQ ID NO: 73888 - RNA, 21 nt, Artificial Sequence
  Synthetic
auauuugaaaagaacauauuu

SEQ ID NO: 73889 - RNA, 22 nt, Artificial Sequence
  Synthetic
aauauuugaaaagaacauauuu

SEQ ID NO: 73890 - RNA, 23 nt, Artificial Sequence
  Synthetic
uaauauuugaaaagaacauauuu

SEQ ID NO: 73891 - RNA, 24 nt, Artificial Sequence
  Synthetic
uuaauauuugaaaagaacauauuu

SEQ ID NO: 73892 - RNA, 18 nt, Artificial Sequence
  Synthetic
aaacuuccacucauauuu

SEQ ID NO: 73893 - RNA, 19 nt, Artificial Sequence
  Synthetic
uaaacuuccacucauauuu

SEQ ID NO: 73894 - RNA, 20 nt, Artificial Sequence
  Synthetic
uuaaacuuccacucauauuu

SEQ ID NO: 73895 - RNA, 21 nt, Artificial Sequence
  Synthetic
uuuaaacuuccacucauauuu

SEQ ID NO: 73896 - RNA, 22 nt, Artificial Sequence
  Synthetic
auuuaaacuuccacucauauuu

SEQ ID NO: 73897 - RNA, 23 nt, Artificial Sequence
  Synthetic
aauuuaaacuuccacucauauuu

SEQ ID NO: 73898 - RNA, 24 nt, Artificial Sequence
  Synthetic
caauuuaaacuuccacucauauuu

SEQ ID NO: 73899 - RNA, 18 nt, Artificial Sequence
  Synthetic
uccuaugcagucauauuu

SEQ ID NO: 73900 - RNA, 19 nt, Artificial Sequence
  Synthetic
auccuaugcagucauauuu

SEQ ID NO: 73901 - RNA, 20 nt, Artificial Sequence
  Synthetic
uauccuaugcagucauauuu

SEQ ID NO: 73902 - RNA, 21 nt, Artificial Sequence
  Synthetic
auauccuaugcagucauauuu

SEQ ID NO: 73903 - RNA, 23 nt, Artificial Sequence
  Synthetic
ugauauccuaugcagucauauuu

SEQ ID NO: 73904 - RNA, 24 nt, Artificial Sequence
  Synthetic
uugauauccuaugcagucauauuu

SEQ ID NO: 73905 - RNA, 21 nt, Artificial Sequence
  Synthetic
ccuuuuucuacuuucauauuu

SEQ ID NO: 73906 - RNA, 23 nt, Artificial Sequence
  Synthetic
ugccuuuuucuacuuucauauuu

SEQ ID NO: 73907 - RNA, 24 nt, Artificial Sequence
  Synthetic
cugccuuuuucuacuuucauauuu

SEQ ID NO: 73908 - RNA, 18 nt, Artificial Sequence
  Synthetic
ugagcaagaaagauauuu

SEQ ID NO: 73909 - RNA, 19 nt, Artificial Sequence
  Synthetic
cugagcaagaaagauauuu

SEQ ID NO: 73910 - RNA, 20 nt, Artificial Sequence
  Synthetic
ucugagcaagaaagauauuu

SEQ ID NO: 73911 - RNA, 21 nt, Artificial Sequence
  Synthetic
uucugagcaagaaagauauuu

SEQ ID NO: 73912 - RNA, 22 nt, Artificial Sequence
  Synthetic
uuucugagcaagaaagauauuu

SEQ ID NO: 73913 - RNA, 23 nt, Artificial Sequence
  Synthetic
cuuucugagcaagaaagauauuu

SEQ ID NO: 73914 - RNA, 24 nt, Artificial Sequence
  Synthetic
ccuuucugagcaagaaagauauuu

SEQ ID NO: 73915 - RNA, 22 nt, Artificial Sequence
  Synthetic
ugaauaauauugugugauauuu

SEQ ID NO: 73916 - RNA, 23 nt, Artificial Sequence
  Synthetic
augaauaauauugugugauauuu

SEQ ID NO: 73917 - RNA, 24 nt, Artificial Sequence
  Synthetic
aaugaauaauauugugugauauuu

SEQ ID NO: 73918 - RNA, 18 nt, Artificial Sequence
  Synthetic
auuugccuucauauauuu

SEQ ID NO: 73919 - RNA, 19 nt, Artificial Sequence
  Synthetic
cauuugccuucauauauuu

SEQ ID NO: 73920 - RNA, 20 nt, Artificial Sequence
  Synthetic
ccauuugccuucauauauuu

SEQ ID NO: 73921 - RNA, 22 nt, Artificial Sequence
  Synthetic
agccauuugccuucauauauuu

SEQ ID NO: 73922 - RNA, 23 nt, Artificial Sequence
  Synthetic
uagccauuugccuucauauauuu

SEQ ID NO: 73923 - RNA, 24 nt, Artificial Sequence
  Synthetic
uuagccauuugccuucauauauuu

SEQ ID NO: 73924 - RNA, 21 nt, Artificial Sequence
  Synthetic
agaauauuuaaaauuauauuu

SEQ ID NO: 73925 - RNA, 22 nt, Artificial Sequence
  Synthetic
aagaauauuuaaaauuauauuu

SEQ ID NO: 73926 - RNA, 23 nt, Artificial Sequence
  Synthetic
uaagaauauuuaaaauuauauuu

SEQ ID NO: 73927 - RNA, 24 nt, Artificial Sequence
  Synthetic
auaagaauauuuaaaauuauauuu

SEQ ID NO: 73928 - RNA, 18 nt, Artificial Sequence
  Synthetic
ugauuuuuggaacuauuu

SEQ ID NO: 73929 - RNA, 19 nt, Artificial Sequence
  Synthetic
augauuuuuggaacuauuu

SEQ ID NO: 73930 - RNA, 20 nt, Artificial Sequence
  Synthetic
caugauuuuuggaacuauuu

SEQ ID NO: 73931 - RNA, 21 nt, Artificial Sequence
  Synthetic
ucaugauuuuuggaacuauuu

SEQ ID NO: 73932 - RNA, 22 nt, Artificial Sequence
  Synthetic
uucaugauuuuuggaacuauuu

SEQ ID NO: 73933 - RNA, 23 nt, Artificial Sequence
  Synthetic
cuucaugauuuuuggaacuauuu

SEQ ID NO: 73934 - RNA, 24 nt, Artificial Sequence
  Synthetic
ucuucaugauuuuuggaacuauuu

SEQ ID NO: 73935 - RNA, 19 nt, Artificial Sequence
  Synthetic
cggagcaccuaaccuauuu

SEQ ID NO: 73936 - RNA, 20 nt, Artificial Sequence
  Synthetic
ucggagcaccuaaccuauuu

SEQ ID NO: 73937 - RNA, 21 nt, Artificial Sequence
  Synthetic
uucggagcaccuaaccuauuu

SEQ ID NO: 73938 - RNA, 22 nt, Artificial Sequence
  Synthetic
uuucggagcaccuaaccuauuu

SEQ ID NO: 73939 - RNA, 23 nt, Artificial Sequence
  Synthetic
uuuucggagcaccuaaccuauuu

SEQ ID NO: 73940 - RNA, 24 nt, Artificial Sequence
  Synthetic
auuuucggagcaccuaaccuauuu

SEQ ID NO: 73941 - RNA, 18 nt, Artificial Sequence
  Synthetic
uugcuuuugcuccuauuu

SEQ ID NO: 73942 - RNA, 21 nt, Artificial Sequence
  Synthetic
ugguugcuuuugcuccuauuu

SEQ ID NO: 73943 - RNA, 23 nt, Artificial Sequence
  Synthetic
ugugguugcuuuugcuccuauuu

SEQ ID NO: 73944 - RNA, 24 nt, Artificial Sequence
  Synthetic
uugugguugcuuuugcuccuauuu

SEQ ID NO: 73945 - RNA, 18 nt, Artificial Sequence
  Synthetic
uggguaggcaagcuauuu

SEQ ID NO: 73946 - RNA, 19 nt, Artificial Sequence
  Synthetic
cuggguaggcaagcuauuu

SEQ ID NO: 73947 - RNA, 20 nt, Artificial Sequence
  Synthetic
ucuggguaggcaagcuauuu

SEQ ID NO: 73948 - RNA, 21 nt, Artificial Sequence
  Synthetic
aucuggguaggcaagcuauuu

SEQ ID NO: 73949 - RNA, 24 nt, Artificial Sequence
  Synthetic
aggaucuggguaggcaagcuauuu

SEQ ID NO: 73950 - RNA, 18 nt, Artificial Sequence
  Synthetic
ugacuugggccucuauuu

SEQ ID NO: 73951 - RNA, 19 nt, Artificial Sequence
  Synthetic
uugacuugggccucuauuu

SEQ ID NO: 73952 - RNA, 20 nt, Artificial Sequence
  Synthetic
uuugacuugggccucuauuu

SEQ ID NO: 73953 - RNA, 21 nt, Artificial Sequence
  Synthetic
cuuugacuugggccucuauuu

SEQ ID NO: 73954 - RNA, 22 nt, Artificial Sequence
  Synthetic
ccuuugacuugggccucuauuu

SEQ ID NO: 73955 - RNA, 23 nt, Artificial Sequence
  Synthetic
uccuuugacuugggccucuauuu

SEQ ID NO: 73956 - RNA, 24 nt, Artificial Sequence
  Synthetic
uuccuuugacuugggccucuauuu

SEQ ID NO: 73957 - RNA, 18 nt, Artificial Sequence
  Synthetic
caugcaguaugucuauuu

SEQ ID NO: 73958 - RNA, 20 nt, Artificial Sequence
  Synthetic
agcaugcaguaugucuauuu

SEQ ID NO: 73959 - RNA, 22 nt, Artificial Sequence
  Synthetic
ugagcaugcaguaugucuauuu

SEQ ID NO: 73960 - RNA, 22 nt, Artificial Sequence
  Synthetic
agaaauaaaaccuaaaguauuu

SEQ ID NO: 73961 - RNA, 23 nt, Artificial Sequence
  Synthetic
aagaaauaaaaccuaaaguauuu

SEQ ID NO: 73962 - RNA, 24 nt, Artificial Sequence
  Synthetic
uaagaaauaaaaccuaaaguauuu

SEQ ID NO: 73963 - RNA, 21 nt, Artificial Sequence
  Synthetic
uuacuaaacuauggaguauuu

SEQ ID NO: 73964 - RNA, 22 nt, Artificial Sequence
  Synthetic
auuacuaaacuauggaguauuu

SEQ ID NO: 73965 - RNA, 23 nt, Artificial Sequence
  Synthetic
aauuacuaaacuauggaguauuu

SEQ ID NO: 73966 - RNA, 24 nt, Artificial Sequence
  Synthetic
aaauuacuaaacuauggaguauuu

SEQ ID NO: 73967 - RNA, 18 nt, Artificial Sequence
  Synthetic
uggugacugcuaguauuu

SEQ ID NO: 73968 - RNA, 19 nt, Artificial Sequence
  Synthetic
uuggugacugcuaguauuu

SEQ ID NO: 73969 - RNA, 20 nt, Artificial Sequence
  Synthetic
uuuggugacugcuaguauuu

SEQ ID NO: 73970 - RNA, 21 nt, Artificial Sequence
  Synthetic
uuuuggugacugcuaguauuu

SEQ ID NO: 73971 - RNA, 22 nt, Artificial Sequence
  Synthetic
auuuuggugacugcuaguauuu

SEQ ID NO: 73972 - RNA, 23 nt, Artificial Sequence
  Synthetic
uauuuuggugacugcuaguauuu

SEQ ID NO: 73973 - RNA, 24 nt, Artificial Sequence
  Synthetic
uuauuuuggugacugcuaguauuu

SEQ ID NO: 73974 - RNA, 21 nt, Artificial Sequence
  Synthetic
auaauuaauuuuuuaguauuu

SEQ ID NO: 73975 - RNA, 23 nt, Artificial Sequence
  Synthetic
agauaauuaauuuuuuaguauuu

SEQ ID NO: 73976 - RNA, 24 nt, Artificial Sequence
  Synthetic
aagauaauuaauuuuuuaguauuu

SEQ ID NO: 73977 - RNA, 18 nt, Artificial Sequence
  Synthetic
aucauucaagcuguauuu

SEQ ID NO: 73978 - RNA, 21 nt, Artificial Sequence
  Synthetic
uggaucauucaagcuguauuu

SEQ ID NO: 73979 - RNA, 22 nt, Artificial Sequence
  Synthetic
cuggaucauucaagcuguauuu

SEQ ID NO: 73980 - RNA, 23 nt, Artificial Sequence
  Synthetic
ucuggaucauucaagcuguauuu

SEQ ID NO: 73981 - RNA, 24 nt, Artificial Sequence
  Synthetic
uucuggaucauucaagcuguauuu

SEQ ID NO: 73982 - RNA, 21 nt, Artificial Sequence
  Synthetic
uuuugcaaaauaauuguauuu

SEQ ID NO: 73983 - RNA, 22 nt, Artificial Sequence
  Synthetic
cuuuugcaaaauaauuguauuu

SEQ ID NO: 73984 - RNA, 23 nt, Artificial Sequence
  Synthetic
ucuuuugcaaaauaauuguauuu

SEQ ID NO: 73985 - RNA, 19 nt, Artificial Sequence
  Synthetic
ugugaagucuguuguauuu

SEQ ID NO: 73986 - RNA, 21 nt, Artificial Sequence
  Synthetic
ugugugaagucuguuguauuu

SEQ ID NO: 73987 - RNA, 23 nt, Artificial Sequence
  Synthetic
ugugugugaagucuguuguauuu

SEQ ID NO: 73988 - RNA, 18 nt, Artificial Sequence
  Synthetic
cagauuccauuuguauuu

SEQ ID NO: 73989 - RNA, 19 nt, Artificial Sequence
  Synthetic
ucagauuccauuuguauuu

SEQ ID NO: 73990 - RNA, 20 nt, Artificial Sequence
  Synthetic
aucagauuccauuuguauuu

SEQ ID NO: 73991 - RNA, 21 nt, Artificial Sequence
  Synthetic
caucagauuccauuuguauuu

SEQ ID NO: 73992 - RNA, 22 nt, Artificial Sequence
  Synthetic
ccaucagauuccauuuguauuu

SEQ ID NO: 73993 - RNA, 23 nt, Artificial Sequence
  Synthetic
cccaucagauuccauuuguauuu

SEQ ID NO: 73994 - RNA, 24 nt, Artificial Sequence
  Synthetic
ccccaucagauuccauuuguauuu

SEQ ID NO: 73995 - RNA, 18 nt, Artificial Sequence
  Synthetic
cauguaagagaauuauuu

SEQ ID NO: 73996 - RNA, 19 nt, Artificial Sequence
  Synthetic
acauguaagagaauuauuu

SEQ ID NO: 73997 - RNA, 21 nt, Artificial Sequence
  Synthetic
agacauguaagagaauuauuu

SEQ ID NO: 73998 - RNA, 22 nt, Artificial Sequence
  Synthetic
cagacauguaagagaauuauuu

SEQ ID NO: 73999 - RNA, 21 nt, Artificial Sequence
  Synthetic
uuuuuauauuucauauuauuu

SEQ ID NO: 74000 - RNA, 22 nt, Artificial Sequence
  Synthetic
auuuuuauauuucauauuauuu

SEQ ID NO: 74001 - RNA, 23 nt, Artificial Sequence
  Synthetic
aauuuuuauauuucauauuauuu

SEQ ID NO: 74002 - RNA, 19 nt, Artificial Sequence
  Synthetic
ugaguaccaaaacuuauuu

SEQ ID NO: 74003 - RNA, 20 nt, Artificial Sequence
  Synthetic
augaguaccaaaacuuauuu

SEQ ID NO: 74004 - RNA, 21 nt, Artificial Sequence
  Synthetic
uaugaguaccaaaacuuauuu

SEQ ID NO: 74005 - RNA, 22 nt, Artificial Sequence
  Synthetic
uuaugaguaccaaaacuuauuu

SEQ ID NO: 74006 - RNA, 23 nt, Artificial Sequence
  Synthetic
auuaugaguaccaaaacuuauuu

SEQ ID NO: 74007 - RNA, 24 nt, Artificial Sequence
  Synthetic
aauuaugaguaccaaaacuuauuu

SEQ ID NO: 74008 - RNA, 18 nt, Artificial Sequence
  Synthetic
acccaagucugcuuauuu

SEQ ID NO: 74009 - RNA, 19 nt, Artificial Sequence
  Synthetic
uacccaagucugcuuauuu

SEQ ID NO: 74010 - RNA, 21 nt, Artificial Sequence
  Synthetic
uguacccaagucugcuuauuu

SEQ ID NO: 74011 - RNA, 22 nt, Artificial Sequence
  Synthetic
uuguacccaagucugcuuauuu

SEQ ID NO: 74012 - RNA, 23 nt, Artificial Sequence
  Synthetic
cuuguacccaagucugcuuauuu

SEQ ID NO: 74013 - RNA, 24 nt, Artificial Sequence
  Synthetic
acuuguacccaagucugcuuauuu

SEQ ID NO: 74014 - RNA, 21 nt, Artificial Sequence
  Synthetic
cucuugucucugcucuuauuu

SEQ ID NO: 74015 - RNA, 22 nt, Artificial Sequence
  Synthetic
ucucuugucucugcucuuauuu

SEQ ID NO: 74016 - RNA, 23 nt, Artificial Sequence
  Synthetic
aucucuugucucugcucuuauuu

SEQ ID NO: 74017 - RNA, 24 nt, Artificial Sequence
  Synthetic
aaucucuugucucugcucuuauuu

SEQ ID NO: 74018 - RNA, 19 nt, Artificial Sequence
  Synthetic
uggugucaaaaaguuauuu

SEQ ID NO: 74019 - RNA, 21 nt, Artificial Sequence
  Synthetic
aguggugucaaaaaguuauuu

SEQ ID NO: 74020 - RNA, 22 nt, Artificial Sequence
  Synthetic
caguggugucaaaaaguuauuu

SEQ ID NO: 74021 - RNA, 23 nt, Artificial Sequence
  Synthetic
ccaguggugucaaaaaguuauuu

SEQ ID NO: 74022 - RNA, 24 nt, Artificial Sequence
  Synthetic
cccaguggugucaaaaaguuauuu

SEQ ID NO: 74023 - RNA, 21 nt, Artificial Sequence
  Synthetic
ccuauaccaaauuaguuauuu

SEQ ID NO: 74024 - RNA, 23 nt, Artificial Sequence
  Synthetic
ugccuauaccaaauuaguuauuu

SEQ ID NO: 74025 - RNA, 24 nt, Artificial Sequence
  Synthetic
augccuauaccaaauuaguuauuu

SEQ ID NO: 74026 - RNA, 18 nt, Artificial Sequence
  Synthetic
uaugugaggagguuauuu

SEQ ID NO: 74027 - RNA, 19 nt, Artificial Sequence
  Synthetic
cuaugugaggagguuauuu

SEQ ID NO: 74028 - RNA, 20 nt, Artificial Sequence
  Synthetic
ccuaugugaggagguuauuu

SEQ ID NO: 74029 - RNA, 23 nt, Artificial Sequence
  Synthetic
uggccuaugugaggagguuauuu

SEQ ID NO: 74030 - RNA, 24 nt, Artificial Sequence
  Synthetic
cuggccuaugugaggagguuauuu

SEQ ID NO: 74031 - RNA, 21 nt, Artificial Sequence
  Synthetic
ucauuuuguaggaauuuauuu

SEQ ID NO: 74032 - RNA, 22 nt, Artificial Sequence
  Synthetic
uucauuuuguaggaauuuauuu

SEQ ID NO: 74033 - RNA, 23 nt, Artificial Sequence
  Synthetic
uuucauuuuguaggaauuuauuu

SEQ ID NO: 74034 - RNA, 24 nt, Artificial Sequence
  Synthetic
auuucauuuuguaggaauuuauuu

SEQ ID NO: 74035 - RNA, 19 nt, Artificial Sequence
  Synthetic
uguugaucggaauuuauuu

SEQ ID NO: 74036 - RNA, 20 nt, Artificial Sequence
  Synthetic
cuguugaucggaauuuauuu

SEQ ID NO: 74037 - RNA, 21 nt, Artificial Sequence
  Synthetic
ucuguugaucggaauuuauuu

SEQ ID NO: 74038 - RNA, 22 nt, Artificial Sequence
  Synthetic
aucuguugaucggaauuuauuu

SEQ ID NO: 74039 - RNA, 23 nt, Artificial Sequence
  Synthetic
aaucuguugaucggaauuuauuu

SEQ ID NO: 74040 - RNA, 24 nt, Artificial Sequence
  Synthetic
caaucuguugaucggaauuuauuu

SEQ ID NO: 74041 - RNA, 21 nt, Artificial Sequence
  Synthetic
auguauaucucacauuuauuu

SEQ ID NO: 74042 - RNA, 24 nt, Artificial Sequence
  Synthetic
uggauguauaucucacauuuauuu

SEQ ID NO: 74043 - RNA, 18 nt, Artificial Sequence
  Synthetic
cauaagugguauuuauuu

SEQ ID NO: 74044 - RNA, 19 nt, Artificial Sequence
  Synthetic
acauaagugguauuuauuu

SEQ ID NO: 74045 - RNA, 20 nt, Artificial Sequence
  Synthetic
uacauaagugguauuuauuu

SEQ ID NO: 74046 - RNA, 21 nt, Artificial Sequence
  Synthetic
cuacauaagugguauuuauuu

SEQ ID NO: 74047 - RNA, 23 nt, Artificial Sequence
  Synthetic
ugcuacauaagugguauuuauuu

SEQ ID NO: 74048 - RNA, 24 nt, Artificial Sequence
  Synthetic
augcuacauaagugguauuuauuu

SEQ ID NO: 74049 - RNA, 18 nt, Artificial Sequence
  Synthetic
caguauuaaaguuuauuu

SEQ ID NO: 74050 - RNA, 20 nt, Artificial Sequence
  Synthetic
ugcaguauuaaaguuuauuu

SEQ ID NO: 74051 - RNA, 22 nt, Artificial Sequence
  Synthetic
ugugcaguauuaaaguuuauuu

SEQ ID NO: 74052 - RNA, 23 nt, Artificial Sequence
  Synthetic
cugugcaguauuaaaguuuauuu

SEQ ID NO: 74053 - RNA, 18 nt, Artificial Sequence
  Synthetic
agagggagucguuuauuu

SEQ ID NO: 74054 - RNA, 19 nt, Artificial Sequence
  Synthetic
aagagggagucguuuauuu

SEQ ID NO: 74055 - RNA, 20 nt, Artificial Sequence
  Synthetic
uaagagggagucguuuauuu

SEQ ID NO: 74056 - RNA, 21 nt, Artificial Sequence
  Synthetic
uuaagagggagucguuuauuu

SEQ ID NO: 74057 - RNA, 22 nt, Artificial Sequence
  Synthetic
uuuaagagggagucguuuauuu

SEQ ID NO: 74058 - RNA, 23 nt, Artificial Sequence
  Synthetic
uuuuaagagggagucguuuauuu

SEQ ID NO: 74059 - RNA, 19 nt, Artificial Sequence
  Synthetic
ugagcucaaauuuuuauuu

SEQ ID NO: 74060 - RNA, 20 nt, Artificial Sequence
  Synthetic
uugagcucaaauuuuuauuu

SEQ ID NO: 74061 - RNA, 21 nt, Artificial Sequence
  Synthetic
cuugagcucaaauuuuuauuu

SEQ ID NO: 74062 - RNA, 22 nt, Artificial Sequence
  Synthetic
acuugagcucaaauuuuuauuu

SEQ ID NO: 74063 - RNA, 23 nt, Artificial Sequence
  Synthetic
uacuugagcucaaauuuuuauuu

SEQ ID NO: 74064 - RNA, 24 nt, Artificial Sequence
  Synthetic
cuacuugagcucaaauuuuuauuu

SEQ ID NO: 74065 - RNA, 18 nt, Artificial Sequence
  Synthetic
aaauguauucaaaacuuu

SEQ ID NO: 74066 - RNA, 19 nt, Artificial Sequence
  Synthetic
aaaauguauucaaaacuuu

SEQ ID NO: 74067 - RNA, 21 nt, Artificial Sequence
  Synthetic
ugaaaauguauucaaaacuuu

SEQ ID NO: 74068 - RNA, 22 nt, Artificial Sequence
  Synthetic
augaaaauguauucaaaacuuu

SEQ ID NO: 74069 - RNA, 23 nt, Artificial Sequence
  Synthetic
aaugaaaauguauucaaaacuuu

SEQ ID NO: 74070 - RNA, 18 nt, Artificial Sequence
  Synthetic
ccaccccuauaaaacuuu

SEQ ID NO: 74071 - RNA, 19 nt, Artificial Sequence
  Synthetic
uccaccccuauaaaacuuu

SEQ ID NO: 74072 - RNA, 20 nt, Artificial Sequence
  Synthetic
auccaccccuauaaaacuuu

SEQ ID NO: 74073 - RNA, 21 nt, Artificial Sequence
  Synthetic
uauccaccccuauaaaacuuu

SEQ ID NO: 74074 - RNA, 22 nt, Artificial Sequence
  Synthetic
cuauccaccccuauaaaacuuu

SEQ ID NO: 74075 - RNA, 23 nt, Artificial Sequence
  Synthetic
acuauccaccccuauaaaacuuu

SEQ ID NO: 74076 - RNA, 24 nt, Artificial Sequence
  Synthetic
uacuauccaccccuauaaaacuuu

SEQ ID NO: 74077 - RNA, 21 nt, Artificial Sequence
  Synthetic
aagggggcaugagcaaacuuu

SEQ ID NO: 74078 - RNA, 23 nt, Artificial Sequence
  Synthetic
ugaagggggcaugagcaaacuuu

SEQ ID NO: 74079 - RNA, 24 nt, Artificial Sequence
  Synthetic
augaagggggcaugagcaaacuuu

SEQ ID NO: 74080 - RNA, 18 nt, Artificial Sequence
  Synthetic
aacuuccacucaaacuuu

SEQ ID NO: 74081 - RNA, 19 nt, Artificial Sequence
  Synthetic
uaacuuccacucaaacuuu

SEQ ID NO: 74082 - RNA, 20 nt, Artificial Sequence
  Synthetic
cuaacuuccacucaaacuuu

SEQ ID NO: 74083 - RNA, 21 nt, Artificial Sequence
  Synthetic
ucuaacuuccacucaaacuuu

SEQ ID NO: 74084 - RNA, 22 nt, Artificial Sequence
  Synthetic
aucuaacuuccacucaaacuuu

SEQ ID NO: 74085 - RNA, 23 nt, Artificial Sequence
  Synthetic
caucuaacuuccacucaaacuuu

SEQ ID NO: 74086 - RNA, 24 nt, Artificial Sequence
  Synthetic
ucaucuaacuuccacucaaacuuu

SEQ ID NO: 74087 - RNA, 21 nt, Artificial Sequence
  Synthetic
uuuuucaguccuugaaacuuu

SEQ ID NO: 74088 - RNA, 22 nt, Artificial Sequence
  Synthetic
uuuuuucaguccuugaaacuuu

SEQ ID NO: 74089 - RNA, 23 nt, Artificial Sequence
  Synthetic
cuuuuuucaguccuugaaacuuu

SEQ ID NO: 74090 - RNA, 18 nt, Artificial Sequence
  Synthetic
agauuuuaauggaacuuu

SEQ ID NO: 74091 - RNA, 19 nt, Artificial Sequence
  Synthetic
uagauuuuaauggaacuuu

SEQ ID NO: 74092 - RNA, 20 nt, Artificial Sequence
  Synthetic
cuagauuuuaauggaacuuu

SEQ ID NO: 74093 - RNA, 21 nt, Artificial Sequence
  Synthetic
ccuagauuuuaauggaacuuu

SEQ ID NO: 74094 - RNA, 22 nt, Artificial Sequence
  Synthetic
cccuagauuuuaauggaacuuu

SEQ ID NO: 74095 - RNA, 24 nt, Artificial Sequence
  Synthetic
ugcccuagauuuuaauggaacuuu

SEQ ID NO: 74096 - RNA, 20 nt, Artificial Sequence
  Synthetic
uggggaauaggaauaacuuu

SEQ ID NO: 74097 - RNA, 21 nt, Artificial Sequence
  Synthetic
auggggaauaggaauaacuuu

SEQ ID NO: 74098 - RNA, 22 nt, Artificial Sequence
  Synthetic
aauggggaauaggaauaacuuu

SEQ ID NO: 74099 - RNA, 23 nt, Artificial Sequence
  Synthetic
uaauggggaauaggaauaacuuu

SEQ ID NO: 74100 - RNA, 18 nt, Artificial Sequence
  Synthetic
cacuaaaaagaacacuuu

SEQ ID NO: 74101 - RNA, 19 nt, Artificial Sequence
  Synthetic
acacuaaaaagaacacuuu

SEQ ID NO: 74102 - RNA, 20 nt, Artificial Sequence
  Synthetic
aacacuaaaaagaacacuuu

SEQ ID NO: 74103 - RNA, 22 nt, Artificial Sequence
  Synthetic
ugaacacuaaaaagaacacuuu

SEQ ID NO: 74104 - RNA, 23 nt, Artificial Sequence
  Synthetic
uugaacacuaaaaagaacacuuu

SEQ ID NO: 74105 - RNA, 24 nt, Artificial Sequence
  Synthetic
auugaacacuaaaaagaacacuuu

SEQ ID NO: 74106 - RNA, 18 nt, Artificial Sequence
  Synthetic
caacuuguuuaacacuuu

SEQ ID NO: 74107 - RNA, 19 nt, Artificial Sequence
  Synthetic
ccaacuuguuuaacacuuu

SEQ ID NO: 74108 - RNA, 20 nt, Artificial Sequence
  Synthetic
cccaacuuguuuaacacuuu

SEQ ID NO: 74109 - RNA, 21 nt, Artificial Sequence
  Synthetic
ccccaacuuguuuaacacuuu

SEQ ID NO: 74110 - RNA, 22 nt, Artificial Sequence
  Synthetic
cccccaacuuguuuaacacuuu

SEQ ID NO: 74111 - RNA, 23 nt, Artificial Sequence
  Synthetic
ccccccaacuuguuuaacacuuu

SEQ ID NO: 74112 - RNA, 24 nt, Artificial Sequence
  Synthetic
accccccaacuuguuuaacacuuu

SEQ ID NO: 74113 - RNA, 18 nt, Artificial Sequence
  Synthetic
uuccaugcuauacacuuu

SEQ ID NO: 74114 - RNA, 19 nt, Artificial Sequence
  Synthetic
uuuccaugcuauacacuuu

SEQ ID NO: 74115 - RNA, 20 nt, Artificial Sequence
  Synthetic
uuuuccaugcuauacacuuu

SEQ ID NO: 74116 - RNA, 21 nt, Artificial Sequence
  Synthetic
uuuuuccaugcuauacacuuu

SEQ ID NO: 74117 - RNA, 22 nt, Artificial Sequence
  Synthetic
auuuuuccaugcuauacacuuu

SEQ ID NO: 74118 - RNA, 23 nt, Artificial Sequence
  Synthetic
aauuuuuccaugcuauacacuuu

SEQ ID NO: 74119 - RNA, 18 nt, Artificial Sequence
  Synthetic
accacacugauccacuuu

SEQ ID NO: 74120 - RNA, 19 nt, Artificial Sequence
  Synthetic
uaccacacugauccacuuu

SEQ ID NO: 74121 - RNA, 20 nt, Artificial Sequence
  Synthetic
cuaccacacugauccacuuu

SEQ ID NO: 74122 - RNA, 21 nt, Artificial Sequence
  Synthetic
acuaccacacugauccacuuu

SEQ ID NO: 74123 - RNA, 23 nt, Artificial Sequence
  Synthetic
agacuaccacacugauccacuuu

SEQ ID NO: 74124 - RNA, 24 nt, Artificial Sequence
  Synthetic
cagacuaccacacugauccacuuu

SEQ ID NO: 74125 - RNA, 21 nt, Artificial Sequence
  Synthetic
uuccuuuuucucucucacuuu

SEQ ID NO: 74126 - RNA, 22 nt, Artificial Sequence
  Synthetic
cuuccuuuuucucucucacuuu

SEQ ID NO: 74127 - RNA, 23 nt, Artificial Sequence
  Synthetic
ccuuccuuuuucucucucacuuu

SEQ ID NO: 74128 - RNA, 24 nt, Artificial Sequence
  Synthetic
cccuuccuuuuucucucucacuuu

SEQ ID NO: 74129 - RNA, 18 nt, Artificial Sequence
  Synthetic
uauaacacauuucacuuu

SEQ ID NO: 74130 - RNA, 19 nt, Artificial Sequence
  Synthetic
auauaacacauuucacuuu

SEQ ID NO: 74131 - RNA, 20 nt, Artificial Sequence
  Synthetic
aauauaacacauuucacuuu

SEQ ID NO: 74132 - RNA, 21 nt, Artificial Sequence
  Synthetic
caauauaacacauuucacuuu

SEQ ID NO: 74133 - RNA, 22 nt, Artificial Sequence
  Synthetic
ucaauauaacacauuucacuuu

SEQ ID NO: 74134 - RNA, 23 nt, Artificial Sequence
  Synthetic
uucaauauaacacauuucacuuu

SEQ ID NO: 74135 - RNA, 24 nt, Artificial Sequence
  Synthetic
auucaauauaacacauuucacuuu

SEQ ID NO: 74136 - RNA, 18 nt, Artificial Sequence
  Synthetic
uugggaaaaccugacuuu

SEQ ID NO: 74137 - RNA, 19 nt, Artificial Sequence
  Synthetic
cuugggaaaaccugacuuu

SEQ ID NO: 74138 - RNA, 20 nt, Artificial Sequence
  Synthetic
acuugggaaaaccugacuuu

SEQ ID NO: 74139 - RNA, 22 nt, Artificial Sequence
  Synthetic
ugacuugggaaaaccugacuuu

SEQ ID NO: 74140 - RNA, 23 nt, Artificial Sequence
  Synthetic
cugacuugggaaaaccugacuuu

SEQ ID NO: 74141 - RNA, 24 nt, Artificial Sequence
  Synthetic
ucugacuugggaaaaccugacuuu

SEQ ID NO: 74142 - RNA, 21 nt, Artificial Sequence
  Synthetic
aaauaauuuuaaaaauacuuu

SEQ ID NO: 74143 - RNA, 23 nt, Artificial Sequence
  Synthetic
ugaaauaauuuuaaaaauacuuu

SEQ ID NO: 74144 - RNA, 18 nt, Artificial Sequence
  Synthetic
acuaaaagaugauacuuu

SEQ ID NO: 74145 - RNA, 19 nt, Artificial Sequence
  Synthetic
uacuaaaagaugauacuuu

SEQ ID NO: 74146 - RNA, 20 nt, Artificial Sequence
  Synthetic
auacuaaaagaugauacuuu

SEQ ID NO: 74147 - RNA, 21 nt, Artificial Sequence
  Synthetic
cauacuaaaagaugauacuuu

SEQ ID NO: 74148 - RNA, 22 nt, Artificial Sequence
  Synthetic
ucauacuaaaagaugauacuuu

SEQ ID NO: 74149 - RNA, 23 nt, Artificial Sequence
  Synthetic
uucauacuaaaagaugauacuuu

SEQ ID NO: 74150 - RNA, 24 nt, Artificial Sequence
  Synthetic
cuucauacuaaaagaugauacuuu

SEQ ID NO: 74151 - RNA, 19 nt, Artificial Sequence
  Synthetic
aguugucagucuauacuuu

SEQ ID NO: 74152 - RNA, 20 nt, Artificial Sequence
  Synthetic
aaguugucagucuauacuuu

SEQ ID NO: 74153 - RNA, 21 nt, Artificial Sequence
  Synthetic
aaaguugucagucuauacuuu

SEQ ID NO: 74154 - RNA, 23 nt, Artificial Sequence
  Synthetic
ugaaaguugucagucuauacuuu

SEQ ID NO: 74155 - RNA, 18 nt, Artificial Sequence
  Synthetic
cauggaucauucuacuuu

SEQ ID NO: 74156 - RNA, 19 nt, Artificial Sequence
  Synthetic
ccauggaucauucuacuuu

SEQ ID NO: 74157 - RNA, 20 nt, Artificial Sequence
  Synthetic
accauggaucauucuacuuu

SEQ ID NO: 74158 - RNA, 21 nt, Artificial Sequence
  Synthetic
caccauggaucauucuacuuu

SEQ ID NO: 74159 - RNA, 22 nt, Artificial Sequence
  Synthetic
acaccauggaucauucuacuuu

SEQ ID NO: 74160 - RNA, 23 nt, Artificial Sequence
  Synthetic
aacaccauggaucauucuacuuu

SEQ ID NO: 74161 - RNA, 18 nt, Artificial Sequence
  Synthetic
uaguggaaaauguacuuu

SEQ ID NO: 74162 - RNA, 20 nt, Artificial Sequence
  Synthetic
cguaguggaaaauguacuuu

SEQ ID NO: 74163 - RNA, 21 nt, Artificial Sequence
  Synthetic
ccguaguggaaaauguacuuu

SEQ ID NO: 74164 - RNA, 22 nt, Artificial Sequence
  Synthetic
cccguaguggaaaauguacuuu

SEQ ID NO: 74165 - RNA, 23 nt, Artificial Sequence
  Synthetic
acccguaguggaaaauguacuuu

SEQ ID NO: 74166 - RNA, 24 nt, Artificial Sequence
  Synthetic
uacccguaguggaaaauguacuuu

SEQ ID NO: 74167 - RNA, 18 nt, Artificial Sequence
  Synthetic
ugacacaauguguacuuu

SEQ ID NO: 74168 - RNA, 19 nt, Artificial Sequence
  Synthetic
uugacacaauguguacuuu

SEQ ID NO: 74169 - RNA, 20 nt, Artificial Sequence
  Synthetic
uuugacacaauguguacuuu

SEQ ID NO: 74170 - RNA, 22 nt, Artificial Sequence
  Synthetic
aguuugacacaauguguacuuu

SEQ ID NO: 74171 - RNA, 23 nt, Artificial Sequence
  Synthetic
uaguuugacacaauguguacuuu

SEQ ID NO: 74172 - RNA, 24 nt, Artificial Sequence
  Synthetic
cuaguuugacacaauguguacuuu

SEQ ID NO: 74173 - RNA, 18 nt, Artificial Sequence
  Synthetic
auuaauaaaucuuacuuu

SEQ ID NO: 74174 - RNA, 19 nt, Artificial Sequence
  Synthetic
cauuaauaaaucuuacuuu

SEQ ID NO: 74175 - RNA, 20 nt, Artificial Sequence
  Synthetic
ucauuaauaaaucuuacuuu

SEQ ID NO: 74176 - RNA, 21 nt, Artificial Sequence
  Synthetic
aucauuaauaaaucuuacuuu

SEQ ID NO: 74177 - RNA, 22 nt, Artificial Sequence
  Synthetic
aaucauuaauaaaucuuacuuu

SEQ ID NO: 74178 - RNA, 23 nt, Artificial Sequence
  Synthetic
aaaucauuaauaaaucuuacuuu

SEQ ID NO: 74179 - RNA, 24 nt, Artificial Sequence
  Synthetic
uaaaucauuaauaaaucuuacuuu

SEQ ID NO: 74180 - RNA, 23 nt, Artificial Sequence
  Synthetic
aggaacuccagggaaguuacuuu

SEQ ID NO: 74181 - RNA, 24 nt, Artificial Sequence
  Synthetic
caggaacuccagggaaguuacuuu

SEQ ID NO: 74182 - RNA, 18 nt, Artificial Sequence
  Synthetic
aucaauuguuagaccuuu

SEQ ID NO: 74183 - RNA, 20 nt, Artificial Sequence
  Synthetic
ugaucaauuguuagaccuuu

SEQ ID NO: 74184 - RNA, 22 nt, Artificial Sequence
  Synthetic
agugaucaauuguuagaccuuu

SEQ ID NO: 74185 - RNA, 18 nt, Artificial Sequence
  Synthetic
uuaggaaugaauaccuuu

SEQ ID NO: 74186 - RNA, 19 nt, Artificial Sequence
  Synthetic
uuuaggaaugaauaccuuu

SEQ ID NO: 74187 - RNA, 20 nt, Artificial Sequence
  Synthetic
uuuuaggaaugaauaccuuu

SEQ ID NO: 74188 - RNA, 21 nt, Artificial Sequence
  Synthetic
cuuuuaggaaugaauaccuuu

SEQ ID NO: 74189 - RNA, 22 nt, Artificial Sequence
  Synthetic
ucuuuuaggaaugaauaccuuu

SEQ ID NO: 74190 - RNA, 24 nt, Artificial Sequence
  Synthetic
ugucuuuuaggaaugaauaccuuu

SEQ ID NO: 74191 - RNA, 18 nt, Artificial Sequence
  Synthetic
uaaaaacaaauuaccuuu

SEQ ID NO: 74192 - RNA, 19 nt, Artificial Sequence
  Synthetic
cuaaaaacaaauuaccuuu

SEQ ID NO: 74193 - RNA, 20 nt, Artificial Sequence
  Synthetic
ccuaaaaacaaauuaccuuu

SEQ ID NO: 74194 - RNA, 21 nt, Artificial Sequence
  Synthetic
uccuaaaaacaaauuaccuuu

SEQ ID NO: 74195 - RNA, 22 nt, Artificial Sequence
  Synthetic
auccuaaaaacaaauuaccuuu

SEQ ID NO: 74196 - RNA, 23 nt, Artificial Sequence
  Synthetic
uauccuaaaaacaaauuaccuuu

SEQ ID NO: 74197 - RNA, 18 nt, Artificial Sequence
  Synthetic
cagauaggaguuaccuuu

SEQ ID NO: 74198 - RNA, 19 nt, Artificial Sequence
  Synthetic
ucagauaggaguuaccuuu

SEQ ID NO: 74199 - RNA, 22 nt, Artificial Sequence
  Synthetic
aggucagauaggaguuaccuuu

SEQ ID NO: 74200 - RNA, 24 nt, Artificial Sequence
  Synthetic
agaggucagauaggaguuaccuuu

SEQ ID NO: 74201 - RNA, 18 nt, Artificial Sequence
  Synthetic
cacccaggaaugcccuuu

SEQ ID NO: 74202 - RNA, 19 nt, Artificial Sequence
  Synthetic
ucacccaggaaugcccuuu

SEQ ID NO: 74203 - RNA, 20 nt, Artificial Sequence
  Synthetic
uucacccaggaaugcccuuu

SEQ ID NO: 74204 - RNA, 21 nt, Artificial Sequence
  Synthetic
auucacccaggaaugcccuuu

SEQ ID NO: 74205 - RNA, 22 nt, Artificial Sequence
  Synthetic
cauucacccaggaaugcccuuu

SEQ ID NO: 74206 - RNA, 23 nt, Artificial Sequence
  Synthetic
ucauucacccaggaaugcccuuu

SEQ ID NO: 74207 - RNA, 24 nt, Artificial Sequence
  Synthetic
uucauucacccaggaaugcccuuu

SEQ ID NO: 74208 - RNA, 18 nt, Artificial Sequence
  Synthetic
uaguaauugccucccuuu

SEQ ID NO: 74209 - RNA, 19 nt, Artificial Sequence
  Synthetic
uuaguaauugccucccuuu

SEQ ID NO: 74210 - RNA, 20 nt, Artificial Sequence
  Synthetic
uuuaguaauugccucccuuu

SEQ ID NO: 74211 - RNA, 21 nt, Artificial Sequence
  Synthetic
auuuaguaauugccucccuuu

SEQ ID NO: 74212 - RNA, 24 nt, Artificial Sequence
  Synthetic
aggauuuaguaauugccucccuuu

SEQ ID NO: 74213 - RNA, 18 nt, Artificial Sequence
  Synthetic
acgccauacaaagccuuu

SEQ ID NO: 74214 - RNA, 19 nt, Artificial Sequence
  Synthetic
aacgccauacaaagccuuu

SEQ ID NO: 74215 - RNA, 21 nt, Artificial Sequence
  Synthetic
agaacgccauacaaagccuuu

SEQ ID NO: 74216 - RNA, 22 nt, Artificial Sequence
  Synthetic
uagaacgccauacaaagccuuu

SEQ ID NO: 74217 - RNA, 23 nt, Artificial Sequence
  Synthetic
auagaacgccauacaaagccuuu

SEQ ID NO: 74218 - RNA, 24 nt, Artificial Sequence
  Synthetic
uauagaacgccauacaaagccuuu

SEQ ID NO: 74219 - RNA, 18 nt, Artificial Sequence
  Synthetic
uggucacgucaggccuuu

SEQ ID NO: 74220 - RNA, 19 nt, Artificial Sequence
  Synthetic
auggucacgucaggccuuu

SEQ ID NO: 74221 - RNA, 20 nt, Artificial Sequence
  Synthetic
aauggucacgucaggccuuu

SEQ ID NO: 74222 - RNA, 18 nt, Artificial Sequence
  Synthetic
uuaagaaugcaugccuuu

SEQ ID NO: 74223 - RNA, 19 nt, Artificial Sequence
  Synthetic
uuuaagaaugcaugccuuu

SEQ ID NO: 74224 - RNA, 20 nt, Artificial Sequence
  Synthetic
cuuuaagaaugcaugccuuu

SEQ ID NO: 74225 - RNA, 21 nt, Artificial Sequence
  Synthetic
acuuuaagaaugcaugccuuu

SEQ ID NO: 74226 - RNA, 22 nt, Artificial Sequence
  Synthetic
cacuuuaagaaugcaugccuuu

SEQ ID NO: 74227 - RNA, 23 nt, Artificial Sequence
  Synthetic
ucacuuuaagaaugcaugccuuu

SEQ ID NO: 74228 - RNA, 24 nt, Artificial Sequence
  Synthetic
uucacuuuaagaaugcaugccuuu

SEQ ID NO: 74229 - RNA, 18 nt, Artificial Sequence
  Synthetic
cacuuccuaggugccuuu

SEQ ID NO: 74230 - RNA, 19 nt, Artificial Sequence
  Synthetic
ucacuuccuaggugccuuu

SEQ ID NO: 74231 - RNA, 20 nt, Artificial Sequence
  Synthetic
uucacuuccuaggugccuuu

SEQ ID NO: 74232 - RNA, 21 nt, Artificial Sequence
  Synthetic
auucacuuccuaggugccuuu

SEQ ID NO: 74233 - RNA, 22 nt, Artificial Sequence
  Synthetic
cauucacuuccuaggugccuuu

SEQ ID NO: 74234 - RNA, 24 nt, Artificial Sequence
  Synthetic
ugcauucacuuccuaggugccuuu

SEQ ID NO: 74235 - RNA, 18 nt, Artificial Sequence
  Synthetic
uguauucccuaauccuuu

SEQ ID NO: 74236 - RNA, 19 nt, Artificial Sequence
  Synthetic
cuguauucccuaauccuuu

SEQ ID NO: 74237 - RNA, 20 nt, Artificial Sequence
  Synthetic
acuguauucccuaauccuuu

SEQ ID NO: 74238 - RNA, 21 nt, Artificial Sequence
  Synthetic
uacuguauucccuaauccuuu

SEQ ID NO: 74239 - RNA, 22 nt, Artificial Sequence
  Synthetic
cuacuguauucccuaauccuuu

SEQ ID NO: 74240 - RNA, 23 nt, Artificial Sequence
  Synthetic
ucuacuguauucccuaauccuuu

SEQ ID NO: 74241 - RNA, 24 nt, Artificial Sequence
  Synthetic
aucuacuguauucccuaauccuuu

SEQ ID NO: 74242 - RNA, 18 nt, Artificial Sequence
  Synthetic
uacacucuuaacuccuuu

SEQ ID NO: 74243 - RNA, 19 nt, Artificial Sequence
  Synthetic
cuacacucuuaacuccuuu

SEQ ID NO: 74244 - RNA, 20 nt, Artificial Sequence
  Synthetic
ucuacacucuuaacuccuuu

SEQ ID NO: 74245 - RNA, 21 nt, Artificial Sequence
  Synthetic
cucuacacucuuaacuccuuu

SEQ ID NO: 74246 - RNA, 22 nt, Artificial Sequence
  Synthetic
acucuacacucuuaacuccuuu

SEQ ID NO: 74247 - RNA, 24 nt, Artificial Sequence
  Synthetic
ugacucuacacucuuaacuccuuu

SEQ ID NO: 74248 - RNA, 20 nt, Artificial Sequence
  Synthetic
aggagaaggcacaguccuuu

SEQ ID NO: 74249 - RNA, 22 nt, Artificial Sequence
  Synthetic
agaggagaaggcacaguccuuu

SEQ ID NO: 74250 - RNA, 23 nt, Artificial Sequence
  Synthetic
aagaggagaaggcacaguccuuu

SEQ ID NO: 74251 - RNA, 24 nt, Artificial Sequence
  Synthetic
uaagaggagaaggcacaguccuuu

SEQ ID NO: 74252 - RNA, 18 nt, Artificial Sequence
  Synthetic
uccauucguuuguccuuu

SEQ ID NO: 74253 - RNA, 19 nt, Artificial Sequence
  Synthetic
cuccauucguuuguccuuu

SEQ ID NO: 74254 - RNA, 20 nt, Artificial Sequence
  Synthetic
ccuccauucguuuguccuuu

SEQ ID NO: 74255 - RNA, 21 nt, Artificial Sequence
  Synthetic
cccuccauucguuuguccuuu

SEQ ID NO: 74256 - RNA, 22 nt, Artificial Sequence
  Synthetic
ucccuccauucguuuguccuuu

SEQ ID NO: 74257 - RNA, 23 nt, Artificial Sequence
  Synthetic
uucccuccauucguuuguccuuu

SEQ ID NO: 74258 - RNA, 24 nt, Artificial Sequence
  Synthetic
cuucccuccauucguuuguccuuu

SEQ ID NO: 74259 - RNA, 18 nt, Artificial Sequence
  Synthetic
cuuuuucucaauuccuuu

SEQ ID NO: 74260 - RNA, 19 nt, Artificial Sequence
  Synthetic
acuuuuucucaauuccuuu

SEQ ID NO: 74261 - RNA, 21 nt, Artificial Sequence
  Synthetic
agacuuuuucucaauuccuuu

SEQ ID NO: 74262 - RNA, 22 nt, Artificial Sequence
  Synthetic
aagacuuuuucucaauuccuuu

SEQ ID NO: 74263 - RNA, 23 nt, Artificial Sequence
  Synthetic
aaagacuuuuucucaauuccuuu

SEQ ID NO: 74264 - RNA, 24 nt, Artificial Sequence
  Synthetic
uaaagacuuuuucucaauuccuuu

SEQ ID NO: 74265 - RNA, 18 nt, Artificial Sequence
  Synthetic
uugaaacucugaagcuuu

SEQ ID NO: 74266 - RNA, 19 nt, Artificial Sequence
  Synthetic
uuugaaacucugaagcuuu

SEQ ID NO: 74267 - RNA, 23 nt, Artificial Sequence
  Synthetic
uggguuugaaacucugaagcuuu

SEQ ID NO: 74268 - RNA, 24 nt, Artificial Sequence
  Synthetic
cuggguuugaaacucugaagcuuu

SEQ ID NO: 74269 - RNA, 18 nt, Artificial Sequence
  Synthetic
auauacaauagcagcuuu

SEQ ID NO: 74270 - RNA, 19 nt, Artificial Sequence
  Synthetic
aauauacaauagcagcuuu

SEQ ID NO: 74271 - RNA, 20 nt, Artificial Sequence
  Synthetic
aaauauacaauagcagcuuu

SEQ ID NO: 74272 - RNA, 21 nt, Artificial Sequence
  Synthetic
aaaauauacaauagcagcuuu

SEQ ID NO: 74273 - RNA, 22 nt, Artificial Sequence
  Synthetic
uaaaauauacaauagcagcuuu

SEQ ID NO: 74274 - RNA, 23 nt, Artificial Sequence
  Synthetic
cuaaaauauacaauagcagcuuu

SEQ ID NO: 74275 - RNA, 24 nt, Artificial Sequence
  Synthetic
ucuaaaauauacaauagcagcuuu

SEQ ID NO: 74276 - RNA, 23 nt, Artificial Sequence
  Synthetic
aggaagcauuucuagugagcuuu

SEQ ID NO: 74277 - RNA, 24 nt, Artificial Sequence
  Synthetic
uaggaagcauuucuagugagcuuu

SEQ ID NO: 74278 - RNA, 21 nt, Artificial Sequence
  Synthetic
uauuuauugauguugagcuuu

SEQ ID NO: 74279 - RNA, 22 nt, Artificial Sequence
  Synthetic
uuauuuauugauguugagcuuu

SEQ ID NO: 74280 - RNA, 23 nt, Artificial Sequence
  Synthetic
auuauuuauugauguugagcuuu

SEQ ID NO: 74281 - RNA, 24 nt, Artificial Sequence
  Synthetic
cauuauuuauugauguugagcuuu

SEQ ID NO: 74282 - RNA, 18 nt, Artificial Sequence
  Synthetic
aacucauaguuaggcuuu

SEQ ID NO: 74283 - RNA, 20 nt, Artificial Sequence
  Synthetic
ugaacucauaguuaggcuuu

SEQ ID NO: 74284 - RNA, 21 nt, Artificial Sequence
  Synthetic
augaacucauaguuaggcuuu

SEQ ID NO: 74285 - RNA, 22 nt, Artificial Sequence
  Synthetic
uaugaacucauaguuaggcuuu

SEQ ID NO: 74286 - RNA, 23 nt, Artificial Sequence
  Synthetic
uuaugaacucauaguuaggcuuu

SEQ ID NO: 74287 - RNA, 18 nt, Artificial Sequence
  Synthetic
caguuuuucuuuggcuuu

SEQ ID NO: 74288 - RNA, 20 nt, Artificial Sequence
  Synthetic
agcaguuuuucuuuggcuuu

SEQ ID NO: 74289 - RNA, 21 nt, Artificial Sequence
  Synthetic
uagcaguuuuucuuuggcuuu

SEQ ID NO: 74290 - RNA, 22 nt, Artificial Sequence
  Synthetic
auagcaguuuuucuuuggcuuu

SEQ ID NO: 74291 - RNA, 23 nt, Artificial Sequence
  Synthetic
uauagcaguuuuucuuuggcuuu

SEQ ID NO: 74292 - RNA, 24 nt, Artificial Sequence
  Synthetic
uuauagcaguuuuucuuuggcuuu

SEQ ID NO: 74293 - RNA, 21 nt, Artificial Sequence
  Synthetic
aaauuuguuugcaaaugcuuu

SEQ ID NO: 74294 - RNA, 22 nt, Artificial Sequence
  Synthetic
aaaauuuguuugcaaaugcuuu

SEQ ID NO: 74295 - RNA, 23 nt, Artificial Sequence
  Synthetic
caaaauuuguuugcaaaugcuuu

SEQ ID NO: 74296 - RNA, 18 nt, Artificial Sequence
  Synthetic
uuuaaaccacaaugcuuu

SEQ ID NO: 74297 - RNA, 19 nt, Artificial Sequence
  Synthetic
uuuuaaaccacaaugcuuu

SEQ ID NO: 74298 - RNA, 20 nt, Artificial Sequence
  Synthetic
auuuuaaaccacaaugcuuu

SEQ ID NO: 74299 - RNA, 21 nt, Artificial Sequence
  Synthetic
uauuuuaaaccacaaugcuuu

SEQ ID NO: 74300 - RNA, 22 nt, Artificial Sequence
  Synthetic
auauuuuaaaccacaaugcuuu

SEQ ID NO: 74301 - RNA, 23 nt, Artificial Sequence
  Synthetic
aauauuuuaaaccacaaugcuuu

SEQ ID NO: 74302 - RNA, 21 nt, Artificial Sequence
  Synthetic
auuuauuuuuaaauaugcuuu

SEQ ID NO: 74303 - RNA, 22 nt, Artificial Sequence
  Synthetic
aauuuauuuuuaaauaugcuuu

SEQ ID NO: 74304 - RNA, 23 nt, Artificial Sequence
  Synthetic
uaauuuauuuuuaaauaugcuuu

SEQ ID NO: 74305 - RNA, 24 nt, Artificial Sequence
  Synthetic
auaauuuauuuuuaaauaugcuuu

SEQ ID NO: 74306 - RNA, 21 nt, Artificial Sequence
  Synthetic
auacuagauauuuucugcuuu

SEQ ID NO: 74307 - RNA, 23 nt, Artificial Sequence
  Synthetic
cgauacuagauauuuucugcuuu

SEQ ID NO: 74308 - RNA, 24 nt, Artificial Sequence
  Synthetic
ccgauacuagauauuuucugcuuu

SEQ ID NO: 74309 - RNA, 18 nt, Artificial Sequence
  Synthetic
auuauaaguuugugcuuu

SEQ ID NO: 74310 - RNA, 19 nt, Artificial Sequence
  Synthetic
uauuauaaguuugugcuuu

SEQ ID NO: 74311 - RNA, 21 nt, Artificial Sequence
  Synthetic
uguauuauaaguuugugcuuu

SEQ ID NO: 74312 - RNA, 22 nt, Artificial Sequence
  Synthetic
auguauuauaaguuugugcuuu

SEQ ID NO: 74313 - RNA, 23 nt, Artificial Sequence
  Synthetic
uauguauuauaaguuugugcuuu

SEQ ID NO: 74314 - RNA, 19 nt, Artificial Sequence
  Synthetic
agagcggggcuuuugcuuu

SEQ ID NO: 74315 - RNA, 21 nt, Artificial Sequence
  Synthetic
agagagcggggcuuuugcuuu

SEQ ID NO: 74316 - RNA, 22 nt, Artificial Sequence
  Synthetic
cagagagcggggcuuuugcuuu

SEQ ID NO: 74317 - RNA, 23 nt, Artificial Sequence
  Synthetic
ccagagagcggggcuuuugcuuu

SEQ ID NO: 74318 - RNA, 24 nt, Artificial Sequence
  Synthetic
uccagagagcggggcuuuugcuuu

SEQ ID NO: 74319 - RNA, 18 nt, Artificial Sequence
  Synthetic
uguccuggguuuugcuuu

SEQ ID NO: 74320 - RNA, 19 nt, Artificial Sequence
  Synthetic
auguccuggguuuugcuuu

SEQ ID NO: 74321 - RNA, 20 nt, Artificial Sequence
  Synthetic
uauguccuggguuuugcuuu

SEQ ID NO: 74322 - RNA, 21 nt, Artificial Sequence
  Synthetic
auauguccuggguuuugcuuu

SEQ ID NO: 74323 - RNA, 22 nt, Artificial Sequence
  Synthetic
aauauguccuggguuuugcuuu

SEQ ID NO: 74324 - RNA, 23 nt, Artificial Sequence
  Synthetic
aaauauguccuggguuuugcuuu

SEQ ID NO: 74325 - RNA, 24 nt, Artificial Sequence
  Synthetic
aaaauauguccuggguuuugcuuu

SEQ ID NO: 74326 - RNA, 18 nt, Artificial Sequence
  Synthetic
agaccaagccaaaucuuu

SEQ ID NO: 74327 - RNA, 19 nt, Artificial Sequence
  Synthetic
aagaccaagccaaaucuuu

SEQ ID NO: 74328 - RNA, 20 nt, Artificial Sequence
  Synthetic
uaagaccaagccaaaucuuu

SEQ ID NO: 74329 - RNA, 21 nt, Artificial Sequence
  Synthetic
auaagaccaagccaaaucuuu

SEQ ID NO: 74330 - RNA, 22 nt, Artificial Sequence
  Synthetic
uauaagaccaagccaaaucuuu

SEQ ID NO: 74331 - RNA, 23 nt, Artificial Sequence
  Synthetic
auauaagaccaagccaaaucuuu

SEQ ID NO: 74332 - RNA, 24 nt, Artificial Sequence
  Synthetic
aauauaagaccaagccaaaucuuu

SEQ ID NO: 74333 - RNA, 18 nt, Artificial Sequence
  Synthetic
uugaacccuugaaucuuu

SEQ ID NO: 74334 - RNA, 19 nt, Artificial Sequence
  Synthetic
cuugaacccuugaaucuuu

SEQ ID NO: 74335 - RNA, 20 nt, Artificial Sequence
  Synthetic
ucuugaacccuugaaucuuu

SEQ ID NO: 74336 - RNA, 21 nt, Artificial Sequence
  Synthetic
cucuugaacccuugaaucuuu

SEQ ID NO: 74337 - RNA, 22 nt, Artificial Sequence
  Synthetic
acucuugaacccuugaaucuuu

SEQ ID NO: 74338 - RNA, 23 nt, Artificial Sequence
  Synthetic
uacucuugaacccuugaaucuuu

SEQ ID NO: 74339 - RNA, 24 nt, Artificial Sequence
  Synthetic
cuacucuugaacccuugaaucuuu

SEQ ID NO: 74340 - RNA, 18 nt, Artificial Sequence
  Synthetic
aguuucauuaccaucuuu

SEQ ID NO: 74341 - RNA, 19 nt, Artificial Sequence
  Synthetic
caguuucauuaccaucuuu

SEQ ID NO: 74342 - RNA, 20 nt, Artificial Sequence
  Synthetic
ucaguuucauuaccaucuuu

SEQ ID NO: 74343 - RNA, 22 nt, Artificial Sequence
  Synthetic
ugucaguuucauuaccaucuuu

SEQ ID NO: 74344 - RNA, 23 nt, Artificial Sequence
  Synthetic
augucaguuucauuaccaucuuu

SEQ ID NO: 74345 - RNA, 18 nt, Artificial Sequence
  Synthetic
cacaggucauccaucuuu

SEQ ID NO: 74346 - RNA, 20 nt, Artificial Sequence
  Synthetic
agcacaggucauccaucuuu

SEQ ID NO: 74347 - RNA, 22 nt, Artificial Sequence
  Synthetic
agagcacaggucauccaucuuu

SEQ ID NO: 74348 - RNA, 24 nt, Artificial Sequence
  Synthetic
agagagcacaggucauccaucuuu

SEQ ID NO: 74349 - RNA, 18 nt, Artificial Sequence
  Synthetic
aaaaaaugucucaucuuu

SEQ ID NO: 74350 - RNA, 19 nt, Artificial Sequence
  Synthetic
caaaaaaugucucaucuuu

SEQ ID NO: 74351 - RNA, 20 nt, Artificial Sequence
  Synthetic
ucaaaaaaugucucaucuuu

SEQ ID NO: 74352 - RNA, 21 nt, Artificial Sequence
  Synthetic
cucaaaaaaugucucaucuuu

SEQ ID NO: 74353 - RNA, 22 nt, Artificial Sequence
  Synthetic
ccucaaaaaaugucucaucuuu

SEQ ID NO: 74354 - RNA, 24 nt, Artificial Sequence
  Synthetic
agccucaaaaaaugucucaucuuu

SEQ ID NO: 74355 - RNA, 18 nt, Artificial Sequence
  Synthetic
cuuucaacaaagaucuuu

SEQ ID NO: 74356 - RNA, 19 nt, Artificial Sequence
  Synthetic
ccuuucaacaaagaucuuu

SEQ ID NO: 74357 - RNA, 20 nt, Artificial Sequence
  Synthetic
accuuucaacaaagaucuuu

SEQ ID NO: 74358 - RNA, 21 nt, Artificial Sequence
  Synthetic
caccuuucaacaaagaucuuu

SEQ ID NO: 74359 - RNA, 23 nt, Artificial Sequence
  Synthetic
agcaccuuucaacaaagaucuuu

SEQ ID NO: 74360 - RNA, 24 nt, Artificial Sequence
  Synthetic
cagcaccuuucaacaaagaucuuu

SEQ ID NO: 74361 - RNA, 18 nt, Artificial Sequence
  Synthetic
acagcuucacagaucuuu

SEQ ID NO: 74362 - RNA, 19 nt, Artificial Sequence
  Synthetic
uacagcuucacagaucuuu

SEQ ID NO: 74363 - RNA, 20 nt, Artificial Sequence
  Synthetic
auacagcuucacagaucuuu

SEQ ID NO: 74364 - RNA, 21 nt, Artificial Sequence
  Synthetic
aauacagcuucacagaucuuu

SEQ ID NO: 74365 - RNA, 22 nt, Artificial Sequence
  Synthetic
uaauacagcuucacagaucuuu

SEQ ID NO: 74366 - RNA, 23 nt, Artificial Sequence
  Synthetic
auaauacagcuucacagaucuuu

SEQ ID NO: 74367 - RNA, 24 nt, Artificial Sequence
  Synthetic
aauaauacagcuucacagaucuuu

SEQ ID NO: 74368 - RNA, 18 nt, Artificial Sequence
  Synthetic
aaguuauuugcuaucuuu

SEQ ID NO: 74369 - RNA, 19 nt, Artificial Sequence
  Synthetic
caaguuauuugcuaucuuu

SEQ ID NO: 74370 - RNA, 20 nt, Artificial Sequence
  Synthetic
acaaguuauuugcuaucuuu

SEQ ID NO: 74371 - RNA, 21 nt, Artificial Sequence
  Synthetic
uacaaguuauuugcuaucuuu

SEQ ID NO: 74372 - RNA, 22 nt, Artificial Sequence
  Synthetic
uuacaaguuauuugcuaucuuu

SEQ ID NO: 74373 - RNA, 23 nt, Artificial Sequence
  Synthetic
uuuacaaguuauuugcuaucuuu

SEQ ID NO: 74374 - RNA, 22 nt, Artificial Sequence
  Synthetic
ugaaauaauuuuuucuaucuuu

SEQ ID NO: 74375 - RNA, 23 nt, Artificial Sequence
  Synthetic
cugaaauaauuuuuucuaucuuu

SEQ ID NO: 74376 - RNA, 24 nt, Artificial Sequence
  Synthetic
ucugaaauaauuuuuucuaucuuu

SEQ ID NO: 74377 - RNA, 19 nt, Artificial Sequence
  Synthetic
ugcuaaauuauuuaucuuu

SEQ ID NO: 74378 - RNA, 20 nt, Artificial Sequence
  Synthetic
uugcuaaauuauuuaucuuu

SEQ ID NO: 74379 - RNA, 21 nt, Artificial Sequence
  Synthetic
cuugcuaaauuauuuaucuuu

SEQ ID NO: 74380 - RNA, 22 nt, Artificial Sequence
  Synthetic
acuugcuaaauuauuuaucuuu

SEQ ID NO: 74381 - RNA, 23 nt, Artificial Sequence
  Synthetic
aacuugcuaaauuauuuaucuuu

SEQ ID NO: 74382 - RNA, 18 nt, Artificial Sequence
  Synthetic
aauggguuuuuuaucuuu

SEQ ID NO: 74383 - RNA, 19 nt, Artificial Sequence
  Synthetic
caauggguuuuuuaucuuu

SEQ ID NO: 74384 - RNA, 20 nt, Artificial Sequence
  Synthetic
ucaauggguuuuuuaucuuu

SEQ ID NO: 74385 - RNA, 21 nt, Artificial Sequence
  Synthetic
uucaauggguuuuuuaucuuu

SEQ ID NO: 74386 - RNA, 22 nt, Artificial Sequence
  Synthetic
uuucaauggguuuuuuaucuuu

SEQ ID NO: 74387 - RNA, 23 nt, Artificial Sequence
  Synthetic
cuuucaauggguuuuuuaucuuu

SEQ ID NO: 74388 - RNA, 24 nt, Artificial Sequence
  Synthetic
ucuuucaauggguuuuuuaucuuu

SEQ ID NO: 74389 - RNA, 21 nt, Artificial Sequence
  Synthetic
cauauauguuucuuccucuuu

SEQ ID NO: 74390 - RNA, 23 nt, Artificial Sequence
  Synthetic
agcauauauguuucuuccucuuu

SEQ ID NO: 74391 - RNA, 24 nt, Artificial Sequence
  Synthetic
uagcauauauguuucuuccucuuu

SEQ ID NO: 74392 - RNA, 18 nt, Artificial Sequence
  Synthetic
acagaaugguggcucuuu

SEQ ID NO: 74393 - RNA, 19 nt, Artificial Sequence
  Synthetic
cacagaaugguggcucuuu

SEQ ID NO: 74394 - RNA, 20 nt, Artificial Sequence
  Synthetic
acacagaaugguggcucuuu

SEQ ID NO: 74395 - RNA, 21 nt, Artificial Sequence
  Synthetic
cacacagaaugguggcucuuu

SEQ ID NO: 74396 - RNA, 22 nt, Artificial Sequence
  Synthetic
ucacacagaaugguggcucuuu

SEQ ID NO: 74397 - RNA, 24 nt, Artificial Sequence
  Synthetic
agucacacagaaugguggcucuuu

SEQ ID NO: 74398 - RNA, 18 nt, Artificial Sequence
  Synthetic
uacauuguauugcucuuu

SEQ ID NO: 74399 - RNA, 20 nt, Artificial Sequence
  Synthetic
uguacauuguauugcucuuu

SEQ ID NO: 74400 - RNA, 21 nt, Artificial Sequence
  Synthetic
uuguacauuguauugcucuuu

SEQ ID NO: 74401 - RNA, 22 nt, Artificial Sequence
  Synthetic
auuguacauuguauugcucuuu

SEQ ID NO: 74402 - RNA, 23 nt, Artificial Sequence
  Synthetic
aauuguacauuguauugcucuuu

SEQ ID NO: 74403 - RNA, 18 nt, Artificial Sequence
  Synthetic
uucuugacaaaucucuuu

SEQ ID NO: 74404 - RNA, 19 nt, Artificial Sequence
  Synthetic
auucuugacaaaucucuuu

SEQ ID NO: 74405 - RNA, 21 nt, Artificial Sequence
  Synthetic
ugauucuugacaaaucucuuu

SEQ ID NO: 74406 - RNA, 22 nt, Artificial Sequence
  Synthetic
augauucuugacaaaucucuuu

SEQ ID NO: 74407 - RNA, 23 nt, Artificial Sequence
  Synthetic
aaugauucuugacaaaucucuuu

SEQ ID NO: 74408 - RNA, 24 nt, Artificial Sequence
  Synthetic
aaaugauucuugacaaaucucuuu

SEQ ID NO: 74409 - RNA, 21 nt, Artificial Sequence
  Synthetic
ugaccuucuuucucucucuuu

SEQ ID NO: 74410 - RNA, 22 nt, Artificial Sequence
  Synthetic
cugaccuucuuucucucucuuu

SEQ ID NO: 74411 - RNA, 23 nt, Artificial Sequence
  Synthetic
ucugaccuucuuucucucucuuu

SEQ ID NO: 74412 - RNA, 24 nt, Artificial Sequence
  Synthetic
cucugaccuucuuucucucucuuu

SEQ ID NO: 74413 - RNA, 18 nt, Artificial Sequence
  Synthetic
ccccagaugucucucuuu

SEQ ID NO: 74414 - RNA, 19 nt, Artificial Sequence
  Synthetic
uccccagaugucucucuuu

SEQ ID NO: 74415 - RNA, 21 nt, Artificial Sequence
  Synthetic
uguccccagaugucucucuuu

SEQ ID NO: 74416 - RNA, 22 nt, Artificial Sequence
  Synthetic
uuguccccagaugucucucuuu

SEQ ID NO: 74417 - RNA, 23 nt, Artificial Sequence
  Synthetic
uuuguccccagaugucucucuuu

SEQ ID NO: 74418 - RNA, 24 nt, Artificial Sequence
  Synthetic
uuuuguccccagaugucucucuuu

SEQ ID NO: 74419 - RNA, 18 nt, Artificial Sequence
  Synthetic
augaaccauucucucuuu

SEQ ID NO: 74420 - RNA, 19 nt, Artificial Sequence
  Synthetic
caugaaccauucucucuuu

SEQ ID NO: 74421 - RNA, 20 nt, Artificial Sequence
  Synthetic
ucaugaaccauucucucuuu

SEQ ID NO: 74422 - RNA, 21 nt, Artificial Sequence
  Synthetic
aucaugaaccauucucucuuu

SEQ ID NO: 74423 - RNA, 22 nt, Artificial Sequence
  Synthetic
caucaugaaccauucucucuuu

SEQ ID NO: 74424 - RNA, 23 nt, Artificial Sequence
  Synthetic
ucaucaugaaccauucucucuuu

SEQ ID NO: 74425 - RNA, 18 nt, Artificial Sequence
  Synthetic
aaauuguugauucucuuu

SEQ ID NO: 74426 - RNA, 19 nt, Artificial Sequence
  Synthetic
uaaauuguugauucucuuu

SEQ ID NO: 74427 - RNA, 22 nt, Artificial Sequence
  Synthetic
ugguaaauuguugauucucuuu

SEQ ID NO: 74428 - RNA, 23 nt, Artificial Sequence
  Synthetic
augguaaauuguugauucucuuu

SEQ ID NO: 74429 - RNA, 24 nt, Artificial Sequence
  Synthetic
uaugguaaauuguugauucucuuu

SEQ ID NO: 74430 - RNA, 19 nt, Artificial Sequence
  Synthetic
agcaauggguuuucucuuu

SEQ ID NO: 74431 - RNA, 20 nt, Artificial Sequence
  Synthetic
aagcaauggguuuucucuuu

SEQ ID NO: 74432 - RNA, 22 nt, Artificial Sequence
  Synthetic
agaagcaauggguuuucucuuu

SEQ ID NO: 74433 - RNA, 23 nt, Artificial Sequence
  Synthetic
aagaagcaauggguuuucucuuu

SEQ ID NO: 74434 - RNA, 24 nt, Artificial Sequence
  Synthetic
caagaagcaauggguuuucucuuu

SEQ ID NO: 74435 - RNA, 19 nt, Artificial Sequence
  Synthetic
ugauaagaaaguagucuuu

SEQ ID NO: 74436 - RNA, 21 nt, Artificial Sequence
  Synthetic
ugugauaagaaaguagucuuu

SEQ ID NO: 74437 - RNA, 22 nt, Artificial Sequence
  Synthetic
uugugauaagaaaguagucuuu

SEQ ID NO: 74438 - RNA, 23 nt, Artificial Sequence
  Synthetic
uuugugauaagaaaguagucuuu

SEQ ID NO: 74439 - RNA, 24 nt, Artificial Sequence
  Synthetic
cuuugugauaagaaaguagucuuu

SEQ ID NO: 74440 - RNA, 18 nt, Artificial Sequence
  Synthetic
cucaagaaugcugucuuu

SEQ ID NO: 74441 - RNA, 19 nt, Artificial Sequence
  Synthetic
acucaagaaugcugucuuu

SEQ ID NO: 74442 - RNA, 20 nt, Artificial Sequence
  Synthetic
aacucaagaaugcugucuuu

SEQ ID NO: 74443 - RNA, 21 nt, Artificial Sequence
  Synthetic
aaacucaagaaugcugucuuu

SEQ ID NO: 74444 - RNA, 22 nt, Artificial Sequence
  Synthetic
caaacucaagaaugcugucuuu

SEQ ID NO: 74445 - RNA, 23 nt, Artificial Sequence
  Synthetic
ucaaacucaagaaugcugucuuu

SEQ ID NO: 74446 - RNA, 24 nt, Artificial Sequence
  Synthetic
aucaaacucaagaaugcugucuuu

SEQ ID NO: 74447 - RNA, 18 nt, Artificial Sequence
  Synthetic
uggaaagacucugucuuu

SEQ ID NO: 74448 - RNA, 19 nt, Artificial Sequence
  Synthetic
auggaaagacucugucuuu

SEQ ID NO: 74449 - RNA, 20 nt, Artificial Sequence
  Synthetic
aauggaaagacucugucuuu

SEQ ID NO: 74450 - RNA, 21 nt, Artificial Sequence
  Synthetic
aaauggaaagacucugucuuu

SEQ ID NO: 74451 - RNA, 22 nt, Artificial Sequence
  Synthetic
aaaauggaaagacucugucuuu

SEQ ID NO: 74452 - RNA, 24 nt, Artificial Sequence
  Synthetic
ugaaaauggaaagacucugucuuu

SEQ ID NO: 74453 - RNA, 18 nt, Artificial Sequence
  Synthetic
agacagacacuugucuuu

SEQ ID NO: 74454 - RNA, 19 nt, Artificial Sequence
  Synthetic
cagacagacacuugucuuu

SEQ ID NO: 74455 - RNA, 20 nt, Artificial Sequence
  Synthetic
acagacagacacuugucuuu

SEQ ID NO: 74456 - RNA, 21 nt, Artificial Sequence
  Synthetic
aacagacagacacuugucuuu

SEQ ID NO: 74457 - RNA, 23 nt, Artificial Sequence
  Synthetic
ugaacagacagacacuugucuuu

SEQ ID NO: 74458 - RNA, 24 nt, Artificial Sequence
  Synthetic
augaacagacagacacuugucuuu

SEQ ID NO: 74459 - RNA, 18 nt, Artificial Sequence
  Synthetic
uuagaagggcaauucuuu

SEQ ID NO: 74460 - RNA, 19 nt, Artificial Sequence
  Synthetic
auuagaagggcaauucuuu

SEQ ID NO: 74461 - RNA, 20 nt, Artificial Sequence
  Synthetic
aauuagaagggcaauucuuu

SEQ ID NO: 74462 - RNA, 21 nt, Artificial Sequence
  Synthetic
caauuagaagggcaauucuuu

SEQ ID NO: 74463 - RNA, 22 nt, Artificial Sequence
  Synthetic
acaauuagaagggcaauucuuu

SEQ ID NO: 74464 - RNA, 23 nt, Artificial Sequence
  Synthetic
uacaauuagaagggcaauucuuu

SEQ ID NO: 74465 - RNA, 24 nt, Artificial Sequence
  Synthetic
uuacaauuagaagggcaauucuuu

SEQ ID NO: 74466 - RNA, 18 nt, Artificial Sequence
  Synthetic
cauagaggauaauucuuu

SEQ ID NO: 74467 - RNA, 19 nt, Artificial Sequence
  Synthetic
ucauagaggauaauucuuu

SEQ ID NO: 74468 - RNA, 20 nt, Artificial Sequence
  Synthetic
cucauagaggauaauucuuu

SEQ ID NO: 74469 - RNA, 21 nt, Artificial Sequence
  Synthetic
ucucauagaggauaauucuuu

SEQ ID NO: 74470 - RNA, 22 nt, Artificial Sequence
  Synthetic
cucucauagaggauaauucuuu

SEQ ID NO: 74471 - RNA, 23 nt, Artificial Sequence
  Synthetic
acucucauagaggauaauucuuu

SEQ ID NO: 74472 - RNA, 24 nt, Artificial Sequence
  Synthetic
uacucucauagaggauaauucuuu

SEQ ID NO: 74473 - RNA, 18 nt, Artificial Sequence
  Synthetic
aauuuucuuccauucuuu

SEQ ID NO: 74474 - RNA, 20 nt, Artificial Sequence
  Synthetic
ugaauuuucuuccauucuuu

SEQ ID NO: 74475 - RNA, 21 nt, Artificial Sequence
  Synthetic
augaauuuucuuccauucuuu

SEQ ID NO: 74476 - RNA, 22 nt, Artificial Sequence
  Synthetic
aaugaauuuucuuccauucuuu

SEQ ID NO: 74477 - RNA, 23 nt, Artificial Sequence
  Synthetic
uaaugaauuuucuuccauucuuu

SEQ ID NO: 74478 - RNA, 24 nt, Artificial Sequence
  Synthetic
auaaugaauuuucuuccauucuuu

SEQ ID NO: 74479 - RNA, 18 nt, Artificial Sequence
  Synthetic
uaaucauuugcauucuuu

SEQ ID NO: 74480 - RNA, 19 nt, Artificial Sequence
  Synthetic
auaaucauuugcauucuuu

SEQ ID NO: 74481 - RNA, 20 nt, Artificial Sequence
  Synthetic
uauaaucauuugcauucuuu

SEQ ID NO: 74482 - RNA, 21 nt, Artificial Sequence
  Synthetic
uuauaaucauuugcauucuuu

SEQ ID NO: 74483 - RNA, 22 nt, Artificial Sequence
  Synthetic
cuuauaaucauuugcauucuuu

SEQ ID NO: 74484 - RNA, 23 nt, Artificial Sequence
  Synthetic
ucuuauaaucauuugcauucuuu

SEQ ID NO: 74485 - RNA, 18 nt, Artificial Sequence
  Synthetic
aaacauauaauauucuuu

SEQ ID NO: 74486 - RNA, 19 nt, Artificial Sequence
  Synthetic
aaaacauauaauauucuuu

SEQ ID NO: 74487 - RNA, 20 nt, Artificial Sequence
  Synthetic
uaaaacauauaauauucuuu

SEQ ID NO: 74488 - RNA, 21 nt, Artificial Sequence
  Synthetic
auaaaacauauaauauucuuu

SEQ ID NO: 74489 - RNA, 22 nt, Artificial Sequence
  Synthetic
uauaaaacauauaauauucuuu

SEQ ID NO: 74490 - RNA, 23 nt, Artificial Sequence
  Synthetic
auauaaaacauauaauauucuuu

SEQ ID NO: 74491 - RNA, 24 nt, Artificial Sequence
  Synthetic
cauauaaaacauauaauauucuuu

SEQ ID NO: 74492 - RNA, 18 nt, Artificial Sequence
  Synthetic
ugaugacuauuauucuuu

SEQ ID NO: 74493 - RNA, 19 nt, Artificial Sequence
  Synthetic
cugaugacuauuauucuuu

SEQ ID NO: 74494 - RNA, 20 nt, Artificial Sequence
  Synthetic
ucugaugacuauuauucuuu

SEQ ID NO: 74495 - RNA, 24 nt, Artificial Sequence
  Synthetic
ugggucugaugacuauuauucuuu

SEQ ID NO: 74496 - RNA, 18 nt, Artificial Sequence
  Synthetic
uugcuccguaaguucuuu

SEQ ID NO: 74497 - RNA, 19 nt, Artificial Sequence
  Synthetic
cuugcuccguaaguucuuu

SEQ ID NO: 74498 - RNA, 20 nt, Artificial Sequence
  Synthetic
ccuugcuccguaaguucuuu

SEQ ID NO: 74499 - RNA, 21 nt, Artificial Sequence
  Synthetic
cccuugcuccguaaguucuuu

SEQ ID NO: 74500 - RNA, 22 nt, Artificial Sequence
  Synthetic
ccccuugcuccguaaguucuuu

SEQ ID NO: 74501 - RNA, 23 nt, Artificial Sequence
  Synthetic
cccccuugcuccguaaguucuuu

SEQ ID NO: 74502 - RNA, 24 nt, Artificial Sequence
  Synthetic
acccccuugcuccguaaguucuuu

SEQ ID NO: 74503 - RNA, 18 nt, Artificial Sequence
  Synthetic
ccuucacuuauguucuuu

SEQ ID NO: 74504 - RNA, 19 nt, Artificial Sequence
  Synthetic
accuucacuuauguucuuu

SEQ ID NO: 74505 - RNA, 21 nt, Artificial Sequence
  Synthetic
ugaccuucacuuauguucuuu

SEQ ID NO: 74506 - RNA, 22 nt, Artificial Sequence
  Synthetic
cugaccuucacuuauguucuuu

SEQ ID NO: 74507 - RNA, 23 nt, Artificial Sequence
  Synthetic
ucugaccuucacuuauguucuuu

SEQ ID NO: 74508 - RNA, 24 nt, Artificial Sequence
  Synthetic
uucugaccuucacuuauguucuuu

SEQ ID NO: 74509 - RNA, 21 nt, Artificial Sequence
  Synthetic
auuuauaaaaugaaaaaguuu

SEQ ID NO: 74510 - RNA, 22 nt, Artificial Sequence
  Synthetic
uauuuauaaaaugaaaaaguuu

SEQ ID NO: 74511 - RNA, 23 nt, Artificial Sequence
  Synthetic
uuauuuauaaaaugaaaaaguuu

SEQ ID NO: 74512 - RNA, 24 nt, Artificial Sequence
  Synthetic
cuuauuuauaaaaugaaaaaguuu

SEQ ID NO: 74513 - RNA, 18 nt, Artificial Sequence
  Synthetic
cuuuaggggugaaaguuu

SEQ ID NO: 74514 - RNA, 19 nt, Artificial Sequence
  Synthetic
ccuuuaggggugaaaguuu

SEQ ID NO: 74515 - RNA, 21 nt, Artificial Sequence
  Synthetic
agccuuuaggggugaaaguuu

SEQ ID NO: 74516 - RNA, 22 nt, Artificial Sequence
  Synthetic
aagccuuuaggggugaaaguuu

SEQ ID NO: 74517 - RNA, 23 nt, Artificial Sequence
  Synthetic
aaagccuuuaggggugaaaguuu

SEQ ID NO: 74518 - RNA, 24 nt, Artificial Sequence
  Synthetic
caaagccuuuaggggugaaaguuu

SEQ ID NO: 74519 - RNA, 18 nt, Artificial Sequence
  Synthetic
uuugauuuguucaaguuu

SEQ ID NO: 74520 - RNA, 20 nt, Artificial Sequence
  Synthetic
aguuugauuuguucaaguuu

SEQ ID NO: 74521 - RNA, 21 nt, Artificial Sequence
  Synthetic
aaguuugauuuguucaaguuu

SEQ ID NO: 74522 - RNA, 22 nt, Artificial Sequence
  Synthetic
aaaguuugauuuguucaaguuu

SEQ ID NO: 74523 - RNA, 23 nt, Artificial Sequence
  Synthetic
aaaaguuugauuuguucaaguuu

SEQ ID NO: 74524 - RNA, 24 nt, Artificial Sequence
  Synthetic
aaaaaguuugauuuguucaaguuu

SEQ ID NO: 74525 - RNA, 18 nt, Artificial Sequence
  Synthetic
uuuuaaguacagaaguuu

SEQ ID NO: 74526 - RNA, 19 nt, Artificial Sequence
  Synthetic
uuuuuaaguacagaaguuu

SEQ ID NO: 74527 - RNA, 20 nt, Artificial Sequence
  Synthetic
uuuuuuaaguacagaaguuu

SEQ ID NO: 74528 - RNA, 21 nt, Artificial Sequence
  Synthetic
auuuuuuaaguacagaaguuu

SEQ ID NO: 74529 - RNA, 22 nt, Artificial Sequence
  Synthetic
uauuuuuuaaguacagaaguuu

SEQ ID NO: 74530 - RNA, 23 nt, Artificial Sequence
  Synthetic
uuauuuuuuaaguacagaaguuu

SEQ ID NO: 74531 - RNA, 24 nt, Artificial Sequence
  Synthetic
uuuauuuuuuaaguacagaaguuu

SEQ ID NO: 74532 - RNA, 18 nt, Artificial Sequence
  Synthetic
ucucaugguuagaaguuu

SEQ ID NO: 74533 - RNA, 19 nt, Artificial Sequence
  Synthetic
aucucaugguuagaaguuu

SEQ ID NO: 74534 - RNA, 20 nt, Artificial Sequence
  Synthetic
uaucucaugguuagaaguuu

SEQ ID NO: 74535 - RNA, 21 nt, Artificial Sequence
  Synthetic
uuaucucaugguuagaaguuu

SEQ ID NO: 74536 - RNA, 22 nt, Artificial Sequence
  Synthetic
cuuaucucaugguuagaaguuu

SEQ ID NO: 74537 - RNA, 23 nt, Artificial Sequence
  Synthetic
acuuaucucaugguuagaaguuu

SEQ ID NO: 74538 - RNA, 24 nt, Artificial Sequence
  Synthetic
aacuuaucucaugguuagaaguuu

SEQ ID NO: 74539 - RNA, 21 nt, Artificial Sequence
  Synthetic
agcaaagggaaaaggaaguuu

SEQ ID NO: 74540 - RNA, 23 nt, Artificial Sequence
  Synthetic
agagcaaagggaaaaggaaguuu

SEQ ID NO: 74541 - RNA, 23 nt, Artificial Sequence
  Synthetic
aggauuaaaacauaaggaaguuu

SEQ ID NO: 74542 - RNA, 18 nt, Artificial Sequence
  Synthetic
auugguugcuugaaguuu

SEQ ID NO: 74543 - RNA, 19 nt, Artificial Sequence
  Synthetic
uauugguugcuugaaguuu

SEQ ID NO: 74544 - RNA, 20 nt, Artificial Sequence
  Synthetic
auauugguugcuugaaguuu

SEQ ID NO: 74545 - RNA, 21 nt, Artificial Sequence
  Synthetic
uauauugguugcuugaaguuu

SEQ ID NO: 74546 - RNA, 22 nt, Artificial Sequence
  Synthetic
cuauauugguugcuugaaguuu

SEQ ID NO: 74547 - RNA, 23 nt, Artificial Sequence
  Synthetic
ucuauauugguugcuugaaguuu

SEQ ID NO: 74548 - RNA, 24 nt, Artificial Sequence
  Synthetic
uucuauauugguugcuugaaguuu

SEQ ID NO: 74549 - RNA, 19 nt, Artificial Sequence
  Synthetic
agcguguuuguuuaaguuu

SEQ ID NO: 74550 - RNA, 20 nt, Artificial Sequence
  Synthetic
aagcguguuuguuuaaguuu

SEQ ID NO: 74551 - RNA, 22 nt, Artificial Sequence
  Synthetic
ugaagcguguuuguuuaaguuu

SEQ ID NO: 74552 - RNA, 23 nt, Artificial Sequence
  Synthetic
uugaagcguguuuguuuaaguuu

SEQ ID NO: 74553 - RNA, 24 nt, Artificial Sequence
  Synthetic
cuugaagcguguuuguuuaaguuu

SEQ ID NO: 74554 - RNA, 20 nt, Artificial Sequence
  Synthetic
aggacugucuaacacaguuu

SEQ ID NO: 74555 - RNA, 21 nt, Artificial Sequence
  Synthetic
caggacugucuaacacaguuu

SEQ ID NO: 74556 - RNA, 23 nt, Artificial Sequence
  Synthetic
agcaggacugucuaacacaguuu

SEQ ID NO: 74557 - RNA, 24 nt, Artificial Sequence
  Synthetic
aagcaggacugucuaacacaguuu

SEQ ID NO: 74558 - RNA, 21 nt, Artificial Sequence
  Synthetic
aaaauaaauuuaacacaguuu

SEQ ID NO: 74559 - RNA, 23 nt, Artificial Sequence
  Synthetic
agaaaauaaauuuaacacaguuu

SEQ ID NO: 74560 - RNA, 19 nt, Artificial Sequence
  Synthetic
agggaaaaaagaccaguuu

SEQ ID NO: 74561 - RNA, 20 nt, Artificial Sequence
  Synthetic
aagggaaaaaagaccaguuu

SEQ ID NO: 74562 - RNA, 21 nt, Artificial Sequence
  Synthetic
aaagggaaaaaagaccaguuu

SEQ ID NO: 74563 - RNA, 22 nt, Artificial Sequence
  Synthetic
aaaagggaaaaaagaccaguuu

SEQ ID NO: 74564 - RNA, 24 nt, Artificial Sequence
  Synthetic
cgaaaagggaaaaaagaccaguuu

SEQ ID NO: 74565 - RNA, 18 nt, Artificial Sequence
  Synthetic
uggaaaucccugcaguuu

SEQ ID NO: 74566 - RNA, 20 nt, Artificial Sequence
  Synthetic
uguggaaaucccugcaguuu

SEQ ID NO: 74567 - RNA, 21 nt, Artificial Sequence
  Synthetic
cuguggaaaucccugcaguuu

SEQ ID NO: 74568 - RNA, 22 nt, Artificial Sequence
  Synthetic
ccuguggaaaucccugcaguuu

SEQ ID NO: 74569 - RNA, 23 nt, Artificial Sequence
  Synthetic
uccuguggaaaucccugcaguuu

SEQ ID NO: 74570 - RNA, 24 nt, Artificial Sequence
  Synthetic
uuccuguggaaaucccugcaguuu

SEQ ID NO: 74571 - RNA, 21 nt, Artificial Sequence
  Synthetic
agcagacugcaaacucaguuu

SEQ ID NO: 74572 - RNA, 22 nt, Artificial Sequence
  Synthetic
aagcagacugcaaacucaguuu

SEQ ID NO: 74573 - RNA, 24 nt, Artificial Sequence
  Synthetic
ugaagcagacugcaaacucaguuu

SEQ ID NO: 74574 - RNA, 19 nt, Artificial Sequence
  Synthetic
ugaaucauaaacucaguuu

SEQ ID NO: 74575 - RNA, 21 nt, Artificial Sequence
  Synthetic
ugugaaucauaaacucaguuu

SEQ ID NO: 74576 - RNA, 22 nt, Artificial Sequence
  Synthetic
cugugaaucauaaacucaguuu

SEQ ID NO: 74577 - RNA, 23 nt, Artificial Sequence
  Synthetic
acugugaaucauaaacucaguuu

SEQ ID NO: 74578 - RNA, 24 nt, Artificial Sequence
  Synthetic
aacugugaaucauaaacucaguuu

SEQ ID NO: 74579 - RNA, 18 nt, Artificial Sequence
  Synthetic
uugucauuauuucaguuu

SEQ ID NO: 74580 - RNA, 20 nt, Artificial Sequence
  Synthetic
aguugucauuauuucaguuu

SEQ ID NO: 74581 - RNA, 21 nt, Artificial Sequence
  Synthetic
caguugucauuauuucaguuu

SEQ ID NO: 74582 - RNA, 23 nt, Artificial Sequence
  Synthetic
ugcaguugucauuauuucaguuu

SEQ ID NO: 74583 - RNA, 24 nt, Artificial Sequence
  Synthetic
cugcaguugucauuauuucaguuu

SEQ ID NO: 74584 - RNA, 19 nt, Artificial Sequence
  Synthetic
agcagggcucuuucaguuu

SEQ ID NO: 74585 - RNA, 20 nt, Artificial Sequence
  Synthetic
aagcagggcucuuucaguuu

SEQ ID NO: 74586 - RNA, 21 nt, Artificial Sequence
  Synthetic
aaagcagggcucuuucaguuu

SEQ ID NO: 74587 - RNA, 22 nt, Artificial Sequence
  Synthetic
uaaagcagggcucuuucaguuu

SEQ ID NO: 74588 - RNA, 23 nt, Artificial Sequence
  Synthetic
uuaaagcagggcucuuucaguuu

SEQ ID NO: 74589 - RNA, 24 nt, Artificial Sequence
  Synthetic
uuuaaagcagggcucuuucaguuu

SEQ ID NO: 74590 - RNA, 18 nt, Artificial Sequence
  Synthetic
uuauuuagugaagaguuu

SEQ ID NO: 74591 - RNA, 19 nt, Artificial Sequence
  Synthetic
auuauuuagugaagaguuu

SEQ ID NO: 74592 - RNA, 20 nt, Artificial Sequence
  Synthetic
cauuauuuagugaagaguuu

SEQ ID NO: 74593 - RNA, 21 nt, Artificial Sequence
  Synthetic
acauuauuuagugaagaguuu

SEQ ID NO: 74594 - RNA, 22 nt, Artificial Sequence
  Synthetic
cacauuauuuagugaagaguuu

SEQ ID NO: 74595 - RNA, 23 nt, Artificial Sequence
  Synthetic
ucacauuauuuagugaagaguuu

SEQ ID NO: 74596 - RNA, 24 nt, Artificial Sequence
  Synthetic
aucacauuauuuagugaagaguuu

SEQ ID NO: 74597 - RNA, 18 nt, Artificial Sequence
  Synthetic
uaguacuuuauagaguuu

SEQ ID NO: 74598 - RNA, 19 nt, Artificial Sequence
  Synthetic
auaguacuuuauagaguuu

SEQ ID NO: 74599 - RNA, 20 nt, Artificial Sequence
  Synthetic
aauaguacuuuauagaguuu

SEQ ID NO: 74600 - RNA, 21 nt, Artificial Sequence
  Synthetic
aaauaguacuuuauagaguuu

SEQ ID NO: 74601 - RNA, 22 nt, Artificial Sequence
  Synthetic
aaaauaguacuuuauagaguuu

SEQ ID NO: 74602 - RNA, 23 nt, Artificial Sequence
  Synthetic
uaaaauaguacuuuauagaguuu

SEQ ID NO: 74603 - RNA, 24 nt, Artificial Sequence
  Synthetic
auaaaauaguacuuuauagaguuu

SEQ ID NO: 74604 - RNA, 18 nt, Artificial Sequence
  Synthetic
aacuguuggugggaguuu

SEQ ID NO: 74605 - RNA, 19 nt, Artificial Sequence
  Synthetic
uaacuguuggugggaguuu

SEQ ID NO: 74606 - RNA, 21 nt, Artificial Sequence
  Synthetic
uguaacuguuggugggaguuu

SEQ ID NO: 74607 - RNA, 22 nt, Artificial Sequence
  Synthetic
uuguaacuguuggugggaguuu

SEQ ID NO: 74608 - RNA, 23 nt, Artificial Sequence
  Synthetic
uuuguaacuguuggugggaguuu

SEQ ID NO: 74609 - RNA, 24 nt, Artificial Sequence
  Synthetic
uuuuguaacuguuggugggaguuu

SEQ ID NO: 74610 - RNA, 19 nt, Artificial Sequence
  Synthetic
ugugaauagauaugaguuu

SEQ ID NO: 74611 - RNA, 20 nt, Artificial Sequence
  Synthetic
cugugaauagauaugaguuu

SEQ ID NO: 74612 - RNA, 21 nt, Artificial Sequence
  Synthetic
ucugugaauagauaugaguuu

SEQ ID NO: 74613 - RNA, 22 nt, Artificial Sequence
  Synthetic
cucugugaauagauaugaguuu

SEQ ID NO: 74614 - RNA, 23 nt, Artificial Sequence
  Synthetic
ucucugugaauagauaugaguuu

SEQ ID NO: 74615 - RNA, 24 nt, Artificial Sequence
  Synthetic
aucucugugaauagauaugaguuu

SEQ ID NO: 74616 - RNA, 22 nt, Artificial Sequence
  Synthetic
agagacgaauaauuuugaguuu

SEQ ID NO: 74617 - RNA, 23 nt, Artificial Sequence
  Synthetic
uagagacgaauaauuuugaguuu

SEQ ID NO: 74618 - RNA, 24 nt, Artificial Sequence
  Synthetic
uuagagacgaauaauuuugaguuu

SEQ ID NO: 74619 - RNA, 21 nt, Artificial Sequence
  Synthetic
uuuuguuuuauauaauaguuu

SEQ ID NO: 74620 - RNA, 23 nt, Artificial Sequence
  Synthetic
uguuuuguuuuauauaauaguuu

SEQ ID NO: 74621 - RNA, 24 nt, Artificial Sequence
  Synthetic
cuguuuuguuuuauauaauaguuu

SEQ ID NO: 74622 - RNA, 20 nt, Artificial Sequence
  Synthetic
uggggaauucuucauaguuu

SEQ ID NO: 74623 - RNA, 18 nt, Artificial Sequence
  Synthetic
cuggcacccauauaguuu

SEQ ID NO: 74624 - RNA, 19 nt, Artificial Sequence
  Synthetic
acuggcacccauauaguuu

SEQ ID NO: 74625 - RNA, 20 nt, Artificial Sequence
  Synthetic
aacuggcacccauauaguuu

SEQ ID NO: 74626 - RNA, 22 nt, Artificial Sequence
  Synthetic
agaacuggcacccauauaguuu

SEQ ID NO: 74627 - RNA, 23 nt, Artificial Sequence
  Synthetic
uagaacuggcacccauauaguuu

SEQ ID NO: 74628 - RNA, 24 nt, Artificial Sequence
  Synthetic
uuagaacuggcacccauauaguuu

SEQ ID NO: 74629 - RNA, 21 nt, Artificial Sequence
  Synthetic
auucuagaaaucuuauaguuu

SEQ ID NO: 74630 - RNA, 22 nt, Artificial Sequence
  Synthetic
aauucuagaaaucuuauaguuu

SEQ ID NO: 74631 - RNA, 23 nt, Artificial Sequence
  Synthetic
caauucuagaaaucuuauaguuu

SEQ ID NO: 74632 - RNA, 24 nt, Artificial Sequence
  Synthetic
acaauucuagaaaucuuauaguuu

SEQ ID NO: 74633 - RNA, 18 nt, Artificial Sequence
  Synthetic
ugauuccgauacuaguuu

SEQ ID NO: 74634 - RNA, 19 nt, Artificial Sequence
  Synthetic
uugauuccgauacuaguuu

SEQ ID NO: 74635 - RNA, 20 nt, Artificial Sequence
  Synthetic
uuugauuccgauacuaguuu

SEQ ID NO: 74636 - RNA, 21 nt, Artificial Sequence
  Synthetic
auuugauuccgauacuaguuu

SEQ ID NO: 74637 - RNA, 22 nt, Artificial Sequence
  Synthetic
aauuugauuccgauacuaguuu

SEQ ID NO: 74638 - RNA, 23 nt, Artificial Sequence
  Synthetic
uaauuugauuccgauacuaguuu

SEQ ID NO: 74639 - RNA, 18 nt, Artificial Sequence
  Synthetic
auuuggacaugcuaguuu

SEQ ID NO: 74640 - RNA, 19 nt, Artificial Sequence
  Synthetic
uauuuggacaugcuaguuu

SEQ ID NO: 74641 - RNA, 20 nt, Artificial Sequence
  Synthetic
uuauuuggacaugcuaguuu

SEQ ID NO: 74642 - RNA, 21 nt, Artificial Sequence
  Synthetic
uuuauuuggacaugcuaguuu

SEQ ID NO: 74643 - RNA, 22 nt, Artificial Sequence
  Synthetic
cuuuauuuggacaugcuaguuu

SEQ ID NO: 74644 - RNA, 23 nt, Artificial Sequence
  Synthetic
ucuuuauuuggacaugcuaguuu

SEQ ID NO: 74645 - RNA, 24 nt, Artificial Sequence
  Synthetic
aucuuuauuuggacaugcuaguuu

SEQ ID NO: 74646 - RNA, 18 nt, Artificial Sequence
  Synthetic
aagcggcauuucuaguuu

SEQ ID NO: 74647 - RNA, 19 nt, Artificial Sequence
  Synthetic
uaagcggcauuucuaguuu

SEQ ID NO: 74648 - RNA, 23 nt, Artificial Sequence
  Synthetic
aggguaagcggcauuucuaguuu

SEQ ID NO: 74649 - RNA, 18 nt, Artificial Sequence
  Synthetic
ccagccucaucuuaguuu

SEQ ID NO: 74650 - RNA, 21 nt, Artificial Sequence
  Synthetic
aggccagccucaucuuaguuu

SEQ ID NO: 74651 - RNA, 22 nt, Artificial Sequence
  Synthetic
uaggccagccucaucuuaguuu

SEQ ID NO: 74652 - RNA, 23 nt, Artificial Sequence
  Synthetic
auaggccagccucaucuuaguuu

SEQ ID NO: 74653 - RNA, 24 nt, Artificial Sequence
  Synthetic
uauaggccagccucaucuuaguuu

SEQ ID NO: 74654 - RNA, 21 nt, Artificial Sequence
  Synthetic
uaaauguuauuuuuaacguuu

SEQ ID NO: 74655 - RNA, 22 nt, Artificial Sequence
  Synthetic
uuaaauguuauuuuuaacguuu

SEQ ID NO: 74656 - RNA, 23 nt, Artificial Sequence
  Synthetic
uuuaaauguuauuuuuaacguuu

SEQ ID NO: 74657 - RNA, 24 nt, Artificial Sequence
  Synthetic
cuuuaaauguuauuuuuaacguuu

SEQ ID NO: 74658 - RNA, 18 nt, Artificial Sequence
  Synthetic
uagaguuccaacccguuu

SEQ ID NO: 74659 - RNA, 19 nt, Artificial Sequence
  Synthetic
cuagaguuccaacccguuu

SEQ ID NO: 74660 - RNA, 20 nt, Artificial Sequence
  Synthetic
ucuagaguuccaacccguuu

SEQ ID NO: 74661 - RNA, 21 nt, Artificial Sequence
  Synthetic
cucuagaguuccaacccguuu

SEQ ID NO: 74662 - RNA, 24 nt, Artificial Sequence
  Synthetic
aggcucuagaguuccaacccguuu

SEQ ID NO: 74663 - RNA, 18 nt, Artificial Sequence
  Synthetic
cccaaggugaaaagguuu

SEQ ID NO: 74664 - RNA, 19 nt, Artificial Sequence
  Synthetic
ucccaaggugaaaagguuu

SEQ ID NO: 74665 - RNA, 20 nt, Artificial Sequence
  Synthetic
aucccaaggugaaaagguuu

SEQ ID NO: 74666 - RNA, 21 nt, Artificial Sequence
  Synthetic
aaucccaaggugaaaagguuu

SEQ ID NO: 74667 - RNA, 22 nt, Artificial Sequence
  Synthetic
caaucccaaggugaaaagguuu

SEQ ID NO: 74668 - RNA, 23 nt, Artificial Sequence
  Synthetic
acaaucccaaggugaaaagguuu

SEQ ID NO: 74669 - RNA, 18 nt, Artificial Sequence
  Synthetic
uuaaaaccacuaagguuu

SEQ ID NO: 74670 - RNA, 21 nt, Artificial Sequence
  Synthetic
ugguuaaaaccacuaagguuu

SEQ ID NO: 74671 - RNA, 22 nt, Artificial Sequence
  Synthetic
uugguuaaaaccacuaagguuu

SEQ ID NO: 74672 - RNA, 23 nt, Artificial Sequence
  Synthetic
uuugguuaaaaccacuaagguuu

SEQ ID NO: 74673 - RNA, 24 nt, Artificial Sequence
  Synthetic
auuugguuaaaaccacuaagguuu

SEQ ID NO: 74674 - RNA, 21 nt, Artificial Sequence
  Synthetic
uggagagaauaaagcagguuu

SEQ ID NO: 74675 - RNA, 22 nt, Artificial Sequence
  Synthetic
cuggagagaauaaagcagguuu

SEQ ID NO: 74676 - RNA, 24 nt, Artificial Sequence
  Synthetic
ugcuggagagaauaaagcagguuu

SEQ ID NO: 74677 - RNA, 18 nt, Artificial Sequence
  Synthetic
ugacuucaucugagguuu

SEQ ID NO: 74678 - RNA, 19 nt, Artificial Sequence
  Synthetic
uugacuucaucugagguuu

SEQ ID NO: 74679 - RNA, 20 nt, Artificial Sequence
  Synthetic
uuugacuucaucugagguuu

SEQ ID NO: 74680 - RNA, 21 nt, Artificial Sequence
  Synthetic
auuugacuucaucugagguuu

SEQ ID NO: 74681 - RNA, 22 nt, Artificial Sequence
  Synthetic
aauuugacuucaucugagguuu

SEQ ID NO: 74682 - RNA, 23 nt, Artificial Sequence
  Synthetic
aaauuugacuucaucugagguuu

SEQ ID NO: 74683 - RNA, 24 nt, Artificial Sequence
  Synthetic
aaaauuugacuucaucugagguuu

SEQ ID NO: 74684 - RNA, 18 nt, Artificial Sequence
  Synthetic
uaauacaaagcuagguuu

SEQ ID NO: 74685 - RNA, 19 nt, Artificial Sequence
  Synthetic
auaauacaaagcuagguuu

SEQ ID NO: 74686 - RNA, 20 nt, Artificial Sequence
  Synthetic
aauaauacaaagcuagguuu

SEQ ID NO: 74687 - RNA, 21 nt, Artificial Sequence
  Synthetic
aaauaauacaaagcuagguuu

SEQ ID NO: 74688 - RNA, 22 nt, Artificial Sequence
  Synthetic
aaaauaauacaaagcuagguuu

SEQ ID NO: 74689 - RNA, 23 nt, Artificial Sequence
  Synthetic
caaaauaauacaaagcuagguuu

SEQ ID NO: 74690 - RNA, 18 nt, Artificial Sequence
  Synthetic
uuagcagaguguagguuu

SEQ ID NO: 74691 - RNA, 19 nt, Artificial Sequence
  Synthetic
uuuagcagaguguagguuu

SEQ ID NO: 74692 - RNA, 20 nt, Artificial Sequence
  Synthetic
uuuuagcagaguguagguuu

SEQ ID NO: 74693 - RNA, 21 nt, Artificial Sequence
  Synthetic
auuuuagcagaguguagguuu

SEQ ID NO: 74694 - RNA, 22 nt, Artificial Sequence
  Synthetic
cauuuuagcagaguguagguuu

SEQ ID NO: 74695 - RNA, 23 nt, Artificial Sequence
  Synthetic
acauuuuagcagaguguagguuu

SEQ ID NO: 74696 - RNA, 24 nt, Artificial Sequence
  Synthetic
cacauuuuagcagaguguagguuu

SEQ ID NO: 74697 - RNA, 18 nt, Artificial Sequence
  Synthetic
cuuccuugugacggguuu

SEQ ID NO: 74698 - RNA, 19 nt, Artificial Sequence
  Synthetic
acuuccuugugacggguuu

SEQ ID NO: 74699 - RNA, 20 nt, Artificial Sequence
  Synthetic
cacuuccuugugacggguuu

SEQ ID NO: 74700 - RNA, 21 nt, Artificial Sequence
  Synthetic
acacuuccuugugacggguuu

SEQ ID NO: 74701 - RNA, 22 nt, Artificial Sequence
  Synthetic
cacacuuccuugugacggguuu

SEQ ID NO: 74702 - RNA, 23 nt, Artificial Sequence
  Synthetic
ccacacuuccuugugacggguuu

SEQ ID NO: 74703 - RNA, 24 nt, Artificial Sequence
  Synthetic
uccacacuuccuugugacggguuu

SEQ ID NO: 74704 - RNA, 21 nt, Artificial Sequence
  Synthetic
acuuaaaguuacaaaugguuu

SEQ ID NO: 74705 - RNA, 23 nt, Artificial Sequence
  Synthetic
ugacuuaaaguuacaaaugguuu

SEQ ID NO: 74706 - RNA, 18 nt, Artificial Sequence
  Synthetic
uugauauuuuaaugguuu

SEQ ID NO: 74707 - RNA, 21 nt, Artificial Sequence
  Synthetic
ugguugauauuuuaaugguuu

SEQ ID NO: 74708 - RNA, 22 nt, Artificial Sequence
  Synthetic
augguugauauuuuaaugguuu

SEQ ID NO: 74709 - RNA, 23 nt, Artificial Sequence
  Synthetic
caugguugauauuuuaaugguuu

SEQ ID NO: 74710 - RNA, 24 nt, Artificial Sequence
  Synthetic
ucaugguugauauuuuaaugguuu

SEQ ID NO: 74711 - RNA, 18 nt, Artificial Sequence
  Synthetic
aggccccucccaugguuu

SEQ ID NO: 74712 - RNA, 19 nt, Artificial Sequence
  Synthetic
uaggccccucccaugguuu

SEQ ID NO: 74713 - RNA, 20 nt, Artificial Sequence
  Synthetic
cuaggccccucccaugguuu

SEQ ID NO: 74714 - RNA, 21 nt, Artificial Sequence
  Synthetic
ccuaggccccucccaugguuu

SEQ ID NO: 74715 - RNA, 22 nt, Artificial Sequence
  Synthetic
uccuaggccccucccaugguuu

SEQ ID NO: 74716 - RNA, 23 nt, Artificial Sequence
  Synthetic
uuccuaggccccucccaugguuu

SEQ ID NO: 74717 - RNA, 24 nt, Artificial Sequence
  Synthetic
auuccuaggccccucccaugguuu

SEQ ID NO: 74718 - RNA, 23 nt, Artificial Sequence
  Synthetic
uggugaaugguaucagaugguuu

SEQ ID NO: 74719 - RNA, 24 nt, Artificial Sequence
  Synthetic
uuggugaaugguaucagaugguuu

SEQ ID NO: 74720 - RNA, 18 nt, Artificial Sequence
  Synthetic
ucuuguuggcuaugguuu

SEQ ID NO: 74721 - RNA, 19 nt, Artificial Sequence
  Synthetic
cucuuguuggcuaugguuu

SEQ ID NO: 74722 - RNA, 20 nt, Artificial Sequence
  Synthetic
ucucuuguuggcuaugguuu

SEQ ID NO: 74723 - RNA, 21 nt, Artificial Sequence
  Synthetic
aucucuuguuggcuaugguuu

SEQ ID NO: 74724 - RNA, 23 nt, Artificial Sequence
  Synthetic
ugaucucuuguuggcuaugguuu

SEQ ID NO: 74725 - RNA, 24 nt, Artificial Sequence
  Synthetic
uugaucucuuguuggcuaugguuu

SEQ ID NO: 74726 - RNA, 18 nt, Artificial Sequence
  Synthetic
uagguggaagggugguuu

SEQ ID NO: 74727 - RNA, 20 nt, Artificial Sequence
  Synthetic
uguagguggaagggugguuu

SEQ ID NO: 74728 - RNA, 21 nt, Artificial Sequence
  Synthetic
auguagguggaagggugguuu

SEQ ID NO: 74729 - RNA, 22 nt, Artificial Sequence
  Synthetic
uauguagguggaagggugguuu

SEQ ID NO: 74730 - RNA, 24 nt, Artificial Sequence
  Synthetic
uguauguagguggaagggugguuu

SEQ ID NO: 74731 - RNA, 18 nt, Artificial Sequence
  Synthetic
uagcuuugugguugguuu

SEQ ID NO: 74732 - RNA, 19 nt, Artificial Sequence
  Synthetic
uuagcuuugugguugguuu

SEQ ID NO: 74733 - RNA, 22 nt, Artificial Sequence
  Synthetic
agguuagcuuugugguugguuu

SEQ ID NO: 74734 - RNA, 24 nt, Artificial Sequence
  Synthetic
ugagguuagcuuugugguugguuu

SEQ ID NO: 74735 - RNA, 19 nt, Artificial Sequence
  Synthetic
agaguuauauaaaauguuu

SEQ ID NO: 74736 - RNA, 20 nt, Artificial Sequence
  Synthetic
uagaguuauauaaaauguuu

SEQ ID NO: 74737 - RNA, 21 nt, Artificial Sequence
  Synthetic
uuagaguuauauaaaauguuu

SEQ ID NO: 74738 - RNA, 22 nt, Artificial Sequence
  Synthetic
auuagaguuauauaaaauguuu

SEQ ID NO: 74739 - RNA, 23 nt, Artificial Sequence
  Synthetic
uauuagaguuauauaaaauguuu

SEQ ID NO: 74740 - RNA, 24 nt, Artificial Sequence
  Synthetic
auauuagaguuauauaaaauguuu

SEQ ID NO: 74741 - RNA, 18 nt, Artificial Sequence
  Synthetic
uagaaggaacuaauguuu

SEQ ID NO: 74742 - RNA, 22 nt, Artificial Sequence
  Synthetic
uggguagaaggaacuaauguuu

SEQ ID NO: 74743 - RNA, 23 nt, Artificial Sequence
  Synthetic
auggguagaaggaacuaauguuu

SEQ ID NO: 74744 - RNA, 24 nt, Artificial Sequence
  Synthetic
uauggguagaaggaacuaauguuu

SEQ ID NO: 74745 - RNA, 21 nt, Artificial Sequence
  Synthetic
ugggaagaaggcuuaauguuu

SEQ ID NO: 74746 - RNA, 22 nt, Artificial Sequence
  Synthetic
cugggaagaaggcuuaauguuu

SEQ ID NO: 74747 - RNA, 24 nt, Artificial Sequence
  Synthetic
agcugggaagaaggcuuaauguuu

SEQ ID NO: 74748 - RNA, 18 nt, Artificial Sequence
  Synthetic
auuccaggagacauguuu

SEQ ID NO: 74749 - RNA, 19 nt, Artificial Sequence
  Synthetic
uauuccaggagacauguuu

SEQ ID NO: 74750 - RNA, 20 nt, Artificial Sequence
  Synthetic
auauuccaggagacauguuu

SEQ ID NO: 74751 - RNA, 21 nt, Artificial Sequence
  Synthetic
cauauuccaggagacauguuu

SEQ ID NO: 74752 - RNA, 22 nt, Artificial Sequence
  Synthetic
ucauauuccaggagacauguuu

SEQ ID NO: 74753 - RNA, 23 nt, Artificial Sequence
  Synthetic
uucauauuccaggagacauguuu

SEQ ID NO: 74754 - RNA, 21 nt, Artificial Sequence
  Synthetic
uuuuaaaauauuuucauguuu

SEQ ID NO: 74755 - RNA, 22 nt, Artificial Sequence
  Synthetic
cuuuuaaaauauuuucauguuu

SEQ ID NO: 74756 - RNA, 23 nt, Artificial Sequence
  Synthetic
ucuuuuaaaauauuuucauguuu

SEQ ID NO: 74757 - RNA, 24 nt, Artificial Sequence
  Synthetic
aucuuuuaaaauauuuucauguuu

SEQ ID NO: 74758 - RNA, 19 nt, Artificial Sequence
  Synthetic
ugggugaauagggauguuu

SEQ ID NO: 74759 - RNA, 20 nt, Artificial Sequence
  Synthetic
uugggugaauagggauguuu

SEQ ID NO: 74760 - RNA, 21 nt, Artificial Sequence
  Synthetic
uuugggugaauagggauguuu

SEQ ID NO: 74761 - RNA, 22 nt, Artificial Sequence
  Synthetic
cuuugggugaauagggauguuu

SEQ ID NO: 74762 - RNA, 23 nt, Artificial Sequence
  Synthetic
ucuuugggugaauagggauguuu

SEQ ID NO: 74763 - RNA, 24 nt, Artificial Sequence
  Synthetic
aucuuugggugaauagggauguuu

SEQ ID NO: 74764 - RNA, 21 nt, Artificial Sequence
  Synthetic
aaaagaaagcauuugauguuu

SEQ ID NO: 74765 - RNA, 22 nt, Artificial Sequence
  Synthetic
caaaagaaagcauuugauguuu

SEQ ID NO: 74766 - RNA, 23 nt, Artificial Sequence
  Synthetic
ccaaaagaaagcauuugauguuu

SEQ ID NO: 74767 - RNA, 24 nt, Artificial Sequence
  Synthetic
cccaaaagaaagcauuugauguuu

SEQ ID NO: 74768 - RNA, 18 nt, Artificial Sequence
  Synthetic
aaaaaagccgcuauguuu

SEQ ID NO: 74769 - RNA, 19 nt, Artificial Sequence
  Synthetic
caaaaaagccgcuauguuu

SEQ ID NO: 74770 - RNA, 21 nt, Artificial Sequence
  Synthetic
ugcaaaaaagccgcuauguuu

SEQ ID NO: 74771 - RNA, 22 nt, Artificial Sequence
  Synthetic
uugcaaaaaagccgcuauguuu

SEQ ID NO: 74772 - RNA, 23 nt, Artificial Sequence
  Synthetic
uuugcaaaaaagccgcuauguuu

SEQ ID NO: 74773 - RNA, 24 nt, Artificial Sequence
  Synthetic
auuugcaaaaaagccgcuauguuu

SEQ ID NO: 74774 - RNA, 18 nt, Artificial Sequence
  Synthetic
uccuugguuucuauguuu

SEQ ID NO: 74775 - RNA, 20 nt, Artificial Sequence
  Synthetic
aguccuugguuucuauguuu

SEQ ID NO: 74776 - RNA, 22 nt, Artificial Sequence
  Synthetic
ugaguccuugguuucuauguuu

SEQ ID NO: 74777 - RNA, 23 nt, Artificial Sequence
  Synthetic
cugaguccuugguuucuauguuu

SEQ ID NO: 74778 - RNA, 24 nt, Artificial Sequence
  Synthetic
ucugaguccuugguuucuauguuu

SEQ ID NO: 74779 - RNA, 19 nt, Artificial Sequence
  Synthetic
agcauaauccucucuguuu

SEQ ID NO: 74780 - RNA, 21 nt, Artificial Sequence
  Synthetic
agagcauaauccucucuguuu

SEQ ID NO: 74781 - RNA, 22 nt, Artificial Sequence
  Synthetic
cagagcauaauccucucuguuu

SEQ ID NO: 74782 - RNA, 23 nt, Artificial Sequence
  Synthetic
ccagagcauaauccucucuguuu

SEQ ID NO: 74783 - RNA, 19 nt, Artificial Sequence
  Synthetic
ugaucucuauauucuguuu

SEQ ID NO: 74784 - RNA, 20 nt, Artificial Sequence
  Synthetic
uugaucucuauauucuguuu

SEQ ID NO: 74785 - RNA, 21 nt, Artificial Sequence
  Synthetic
auugaucucuauauucuguuu

SEQ ID NO: 74786 - RNA, 22 nt, Artificial Sequence
  Synthetic
aauugaucucuauauucuguuu

SEQ ID NO: 74787 - RNA, 23 nt, Artificial Sequence
  Synthetic
aaauugaucucuauauucuguuu

SEQ ID NO: 74788 - RNA, 24 nt, Artificial Sequence
  Synthetic
caaauugaucucuauauucuguuu

SEQ ID NO: 74789 - RNA, 18 nt, Artificial Sequence
  Synthetic
auuaauuaccuucuguuu

SEQ ID NO: 74790 - RNA, 19 nt, Artificial Sequence
  Synthetic
uauuaauuaccuucuguuu

SEQ ID NO: 74791 - RNA, 20 nt, Artificial Sequence
  Synthetic
auauuaauuaccuucuguuu

SEQ ID NO: 74792 - RNA, 21 nt, Artificial Sequence
  Synthetic
uauauuaauuaccuucuguuu

SEQ ID NO: 74793 - RNA, 22 nt, Artificial Sequence
  Synthetic
auauauuaauuaccuucuguuu

SEQ ID NO: 74794 - RNA, 24 nt, Artificial Sequence
  Synthetic
agauauauuaauuaccuucuguuu

SEQ ID NO: 74795 - RNA, 18 nt, Artificial Sequence
  Synthetic
uucauuacuuuucuguuu

SEQ ID NO: 74796 - RNA, 20 nt, Artificial Sequence
  Synthetic
uguucauuacuuuucuguuu

SEQ ID NO: 74797 - RNA, 18 nt, Artificial Sequence
  Synthetic
cucaacuuagcaguguuu

SEQ ID NO: 74798 - RNA, 19 nt, Artificial Sequence
  Synthetic
ucucaacuuagcaguguuu

SEQ ID NO: 74799 - RNA, 20 nt, Artificial Sequence
  Synthetic
cucucaacuuagcaguguuu

SEQ ID NO: 74800 - RNA, 21 nt, Artificial Sequence
  Synthetic
ucucucaacuuagcaguguuu

SEQ ID NO: 74801 - RNA, 24 nt, Artificial Sequence
  Synthetic
aggucucucaacuuagcaguguuu

SEQ ID NO: 74802 - RNA, 23 nt, Artificial Sequence
  Synthetic
aggauuaaaggauuaauguguuu

SEQ ID NO: 74803 - RNA, 24 nt, Artificial Sequence
  Synthetic
uaggauuaaaggauuaauguguuu

SEQ ID NO: 74804 - RNA, 20 nt, Artificial Sequence
  Synthetic
uggauugaagacauguguuu

SEQ ID NO: 74805 - RNA, 21 nt, Artificial Sequence
  Synthetic
auggauugaagacauguguuu

SEQ ID NO: 74806 - RNA, 22 nt, Artificial Sequence
  Synthetic
aauggauugaagacauguguuu

SEQ ID NO: 74807 - RNA, 23 nt, Artificial Sequence
  Synthetic
aaauggauugaagacauguguuu

SEQ ID NO: 74808 - RNA, 24 nt, Artificial Sequence
  Synthetic
uaaauggauugaagacauguguuu

SEQ ID NO: 74809 - RNA, 18 nt, Artificial Sequence
  Synthetic
ugaagcaagcauguguuu

SEQ ID NO: 74810 - RNA, 19 nt, Artificial Sequence
  Synthetic
uugaagcaagcauguguuu

SEQ ID NO: 74811 - RNA, 21 nt, Artificial Sequence
  Synthetic
uguugaagcaagcauguguuu

SEQ ID NO: 74812 - RNA, 22 nt, Artificial Sequence
  Synthetic
auguugaagcaagcauguguuu

SEQ ID NO: 74813 - RNA, 23 nt, Artificial Sequence
  Synthetic
cauguugaagcaagcauguguuu

SEQ ID NO: 74814 - RNA, 21 nt, Artificial Sequence
  Synthetic
uuuuguuugugcucuguguuu

SEQ ID NO: 74815 - RNA, 22 nt, Artificial Sequence
  Synthetic
uuuuuguuugugcucuguguuu

SEQ ID NO: 74816 - RNA, 23 nt, Artificial Sequence
  Synthetic
uuuuuuguuugugcucuguguuu

SEQ ID NO: 74817 - RNA, 24 nt, Artificial Sequence
  Synthetic
auuuuuuguuugugcucuguguuu

SEQ ID NO: 74818 - RNA, 21 nt, Artificial Sequence
  Synthetic
auuuuuguguugauuguguuu

SEQ ID NO: 74819 - RNA, 22 nt, Artificial Sequence
  Synthetic
uauuuuuguguugauuguguuu

SEQ ID NO: 74820 - RNA, 23 nt, Artificial Sequence
  Synthetic
cuauuuuuguguugauuguguuu

SEQ ID NO: 74821 - RNA, 24 nt, Artificial Sequence
  Synthetic
ccuauuuuuguguugauuguguuu

SEQ ID NO: 74822 - RNA, 18 nt, Artificial Sequence
  Synthetic
ugauaaccugaauuguuu

SEQ ID NO: 74823 - RNA, 20 nt, Artificial Sequence
  Synthetic
agugauaaccugaauuguuu

SEQ ID NO: 74824 - RNA, 21 nt, Artificial Sequence
  Synthetic
uagugauaaccugaauuguuu

SEQ ID NO: 74825 - RNA, 22 nt, Artificial Sequence
  Synthetic
uuagugauaaccugaauuguuu

SEQ ID NO: 74826 - RNA, 23 nt, Artificial Sequence
  Synthetic
cuuagugauaaccugaauuguuu

SEQ ID NO: 74827 - RNA, 24 nt, Artificial Sequence
  Synthetic
ucuuagugauaaccugaauuguuu

SEQ ID NO: 74828 - RNA, 21 nt, Artificial Sequence
  Synthetic
uuacacaaaaaauaauuguuu

SEQ ID NO: 74829 - RNA, 22 nt, Artificial Sequence
  Synthetic
auuacacaaaaaauaauuguuu

SEQ ID NO: 74830 - RNA, 23 nt, Artificial Sequence
  Synthetic
uauuacacaaaaaauaauuguuu

SEQ ID NO: 74831 - RNA, 24 nt, Artificial Sequence
  Synthetic
uuauuacacaaaaaauaauuguuu

SEQ ID NO: 74832 - RNA, 19 nt, Artificial Sequence
  Synthetic
ugacuacguaggauuguuu

SEQ ID NO: 74833 - RNA, 20 nt, Artificial Sequence
  Synthetic
uugacuacguaggauuguuu

SEQ ID NO: 74834 - RNA, 21 nt, Artificial Sequence
  Synthetic
auugacuacguaggauuguuu

SEQ ID NO: 74835 - RNA, 22 nt, Artificial Sequence
  Synthetic
aauugacuacguaggauuguuu

SEQ ID NO: 74836 - RNA, 23 nt, Artificial Sequence
  Synthetic
aaauugacuacguaggauuguuu

SEQ ID NO: 74837 - RNA, 24 nt, Artificial Sequence
  Synthetic
aaaauugacuacguaggauuguuu

SEQ ID NO: 74838 - RNA, 18 nt, Artificial Sequence
  Synthetic
auaaagguaauguuguuu

SEQ ID NO: 74839 - RNA, 19 nt, Artificial Sequence
  Synthetic
aauaaagguaauguuguuu

SEQ ID NO: 74840 - RNA, 20 nt, Artificial Sequence
  Synthetic
aaauaaagguaauguuguuu

SEQ ID NO: 74841 - RNA, 21 nt, Artificial Sequence
  Synthetic
aaaauaaagguaauguuguuu

SEQ ID NO: 74842 - RNA, 24 nt, Artificial Sequence
  Synthetic
aggaaaauaaagguaauguuguuu

SEQ ID NO: 74843 - RNA, 18 nt, Artificial Sequence
  Synthetic
aacauguuuauguuguuu

SEQ ID NO: 74844 - RNA, 19 nt, Artificial Sequence
  Synthetic
aaacauguuuauguuguuu

SEQ ID NO: 74845 - RNA, 20 nt, Artificial Sequence
  Synthetic
aaaacauguuuauguuguuu

SEQ ID NO: 74846 - RNA, 21 nt, Artificial Sequence
  Synthetic
caaaacauguuuauguuguuu

SEQ ID NO: 74847 - RNA, 23 nt, Artificial Sequence
  Synthetic
agcaaaacauguuuauguuguuu

SEQ ID NO: 74848 - RNA, 24 nt, Artificial Sequence
  Synthetic
uagcaaaacauguuuauguuguuu

SEQ ID NO: 74849 - RNA, 18 nt, Artificial Sequence
  Synthetic
auccagacacauuuguuu

SEQ ID NO: 74850 - RNA, 19 nt, Artificial Sequence
  Synthetic
aauccagacacauuuguuu

SEQ ID NO: 74851 - RNA, 21 nt, Artificial Sequence
  Synthetic
ugaauccagacacauuuguuu

SEQ ID NO: 74852 - RNA, 22 nt, Artificial Sequence
  Synthetic
cugaauccagacacauuuguuu

SEQ ID NO: 74853 - RNA, 23 nt, Artificial Sequence
  Synthetic
ucugaauccagacacauuuguuu

SEQ ID NO: 74854 - RNA, 24 nt, Artificial Sequence
  Synthetic
uucugaauccagacacauuuguuu

SEQ ID NO: 74855 - RNA, 18 nt, Artificial Sequence
  Synthetic
uuaugcauuacuuuguuu

SEQ ID NO: 74856 - RNA, 19 nt, Artificial Sequence
  Synthetic
uuuaugcauuacuuuguuu

SEQ ID NO: 74857 - RNA, 21 nt, Artificial Sequence
  Synthetic
uguuuaugcauuacuuuguuu

SEQ ID NO: 74858 - RNA, 22 nt, Artificial Sequence
  Synthetic
uuguuuaugcauuacuuuguuu

SEQ ID NO: 74859 - RNA, 23 nt, Artificial Sequence
  Synthetic
uuuguuuaugcauuacuuuguuu

SEQ ID NO: 74860 - RNA, 24 nt, Artificial Sequence
  Synthetic
uuuuguuuaugcauuacuuuguuu

SEQ ID NO: 74861 - RNA, 18 nt, Artificial Sequence
  Synthetic
uaauauaucaguuuguuu

SEQ ID NO: 74862 - RNA, 19 nt, Artificial Sequence
  Synthetic
auaauauaucaguuuguuu

SEQ ID NO: 74863 - RNA, 20 nt, Artificial Sequence
  Synthetic
aauaauauaucaguuuguuu

SEQ ID NO: 74864 - RNA, 21 nt, Artificial Sequence
  Synthetic
aaauaauauaucaguuuguuu

SEQ ID NO: 74865 - RNA, 22 nt, Artificial Sequence
  Synthetic
aaaauaauauaucaguuuguuu

SEQ ID NO: 74866 - RNA, 24 nt, Artificial Sequence
  Synthetic
agaaaauaauauaucaguuuguuu

SEQ ID NO: 74867 - RNA, 23 nt, Artificial Sequence
  Synthetic
agguggaagcaauaauuuuguuu

SEQ ID NO: 74868 - RNA, 24 nt, Artificial Sequence
  Synthetic
aagguggaagcaauaauuuuguuu

SEQ ID NO: 74869 - RNA, 20 nt, Artificial Sequence
  Synthetic
aggauauugauugaaauuuu

SEQ ID NO: 74870 - RNA, 21 nt, Artificial Sequence
  Synthetic
caggauauugauugaaauuuu

SEQ ID NO: 74871 - RNA, 22 nt, Artificial Sequence
  Synthetic
ccaggauauugauugaaauuuu

SEQ ID NO: 74872 - RNA, 23 nt, Artificial Sequence
  Synthetic
uccaggauauugauugaaauuuu

SEQ ID NO: 74873 - RNA, 24 nt, Artificial Sequence
  Synthetic
uuccaggauauugauugaaauuuu

SEQ ID NO: 74874 - RNA, 18 nt, Artificial Sequence
  Synthetic
uuaacauuacacaauuuu

SEQ ID NO: 74875 - RNA, 19 nt, Artificial Sequence
  Synthetic
auuaacauuacacaauuuu

SEQ ID NO: 74876 - RNA, 20 nt, Artificial Sequence
  Synthetic
cauuaacauuacacaauuuu

SEQ ID NO: 74877 - RNA, 21 nt, Artificial Sequence
  Synthetic
acauuaacauuacacaauuuu

SEQ ID NO: 74878 - RNA, 22 nt, Artificial Sequence
  Synthetic
uacauuaacauuacacaauuuu

SEQ ID NO: 74879 - RNA, 23 nt, Artificial Sequence
  Synthetic
auacauuaacauuacacaauuuu

SEQ ID NO: 74880 - RNA, 24 nt, Artificial Sequence
  Synthetic
aauacauuaacauuacacaauuuu

SEQ ID NO: 74881 - RNA, 18 nt, Artificial Sequence
  Synthetic
uaaaauggccacaauuuu

SEQ ID NO: 74882 - RNA, 21 nt, Artificial Sequence
  Synthetic
ugguaaaauggccacaauuuu

SEQ ID NO: 74883 - RNA, 22 nt, Artificial Sequence
  Synthetic
augguaaaauggccacaauuuu

SEQ ID NO: 74884 - RNA, 23 nt, Artificial Sequence
  Synthetic
aaugguaaaauggccacaauuuu

SEQ ID NO: 74885 - RNA, 24 nt, Artificial Sequence
  Synthetic
caaugguaaaauggccacaauuuu

SEQ ID NO: 74886 - RNA, 18 nt, Artificial Sequence
  Synthetic
ccugauaccuucaauuuu

SEQ ID NO: 74887 - RNA, 20 nt, Artificial Sequence
  Synthetic
agccugauaccuucaauuuu

SEQ ID NO: 74888 - RNA, 21 nt, Artificial Sequence
  Synthetic
aagccugauaccuucaauuuu

SEQ ID NO: 74889 - RNA, 22 nt, Artificial Sequence
  Synthetic
aaagccugauaccuucaauuuu

SEQ ID NO: 74890 - RNA, 23 nt, Artificial Sequence
  Synthetic
uaaagccugauaccuucaauuuu

SEQ ID NO: 74891 - RNA, 24 nt, Artificial Sequence
  Synthetic
cuaaagccugauaccuucaauuuu

SEQ ID NO: 74892 - RNA, 22 nt, Artificial Sequence
  Synthetic
ugaauagggaagaaauaauuuu

SEQ ID NO: 74893 - RNA, 23 nt, Artificial Sequence
  Synthetic
augaauagggaagaaauaauuuu

SEQ ID NO: 74894 - RNA, 24 nt, Artificial Sequence
  Synthetic
caugaauagggaagaaauaauuuu

SEQ ID NO: 74895 - RNA, 21 nt, Artificial Sequence
  Synthetic
aauuaaagaaaacauaauuuu

SEQ ID NO: 74896 - RNA, 22 nt, Artificial Sequence
  Synthetic
uaauuaaagaaaacauaauuuu

SEQ ID NO: 74897 - RNA, 23 nt, Artificial Sequence
  Synthetic
auaauuaaagaaaacauaauuuu

SEQ ID NO: 74898 - RNA, 24 nt, Artificial Sequence
  Synthetic
aauaauuaaagaaaacauaauuuu

SEQ ID NO: 74899 - RNA, 20 nt, Artificial Sequence
  Synthetic
uggaaguaacucauaauuuu

SEQ ID NO: 74900 - RNA, 21 nt, Artificial Sequence
  Synthetic
auggaaguaacucauaauuuu

SEQ ID NO: 74901 - RNA, 22 nt, Artificial Sequence
  Synthetic
aauggaaguaacucauaauuuu

SEQ ID NO: 74902 - RNA, 24 nt, Artificial Sequence
  Synthetic
agaauggaaguaacucauaauuuu

SEQ ID NO: 74903 - RNA, 18 nt, Artificial Sequence
  Synthetic
aagguccuuauuaauuuu

SEQ ID NO: 74904 - RNA, 19 nt, Artificial Sequence
  Synthetic
aaagguccuuauuaauuuu

SEQ ID NO: 74905 - RNA, 21 nt, Artificial Sequence
  Synthetic
ugaaagguccuuauuaauuuu

SEQ ID NO: 74906 - RNA, 23 nt, Artificial Sequence
  Synthetic
agugaaagguccuuauuaauuuu

SEQ ID NO: 74907 - RNA, 24 nt, Artificial Sequence
  Synthetic
aagugaaagguccuuauuaauuuu

SEQ ID NO: 74908 - RNA, 21 nt, Artificial Sequence
  Synthetic
uuucacauauucuuuaauuuu

SEQ ID NO: 74909 - RNA, 22 nt, Artificial Sequence
  Synthetic
auuucacauauucuuuaauuuu

SEQ ID NO: 74910 - RNA, 23 nt, Artificial Sequence
  Synthetic
uauuucacauauucuuuaauuuu

SEQ ID NO: 74911 - RNA, 24 nt, Artificial Sequence
  Synthetic
uuauuucacauauucuuuaauuuu

SEQ ID NO: 74912 - RNA, 18 nt, Artificial Sequence
  Synthetic
cuccugaggaaacauuuu

SEQ ID NO: 74913 - RNA, 19 nt, Artificial Sequence
  Synthetic
ucuccugaggaaacauuuu

SEQ ID NO: 74914 - RNA, 20 nt, Artificial Sequence
  Synthetic
uucuccugaggaaacauuuu

SEQ ID NO: 74915 - RNA, 21 nt, Artificial Sequence
  Synthetic
auucuccugaggaaacauuuu

SEQ ID NO: 74916 - RNA, 22 nt, Artificial Sequence
  Synthetic
aauucuccugaggaaacauuuu

SEQ ID NO: 74917 - RNA, 23 nt, Artificial Sequence
  Synthetic
aaauucuccugaggaaacauuuu

SEQ ID NO: 74918 - RNA, 24 nt, Artificial Sequence
  Synthetic
uaaauucuccugaggaaacauuuu

SEQ ID NO: 74919 - RNA, 18 nt, Artificial Sequence
  Synthetic
augccuaagcaacauuuu

SEQ ID NO: 74920 - RNA, 19 nt, Artificial Sequence
  Synthetic
aaugccuaagcaacauuuu

SEQ ID NO: 74921 - RNA, 21 nt, Artificial Sequence
  Synthetic
ugaaugccuaagcaacauuuu

SEQ ID NO: 74922 - RNA, 22 nt, Artificial Sequence
  Synthetic
augaaugccuaagcaacauuuu

SEQ ID NO: 74923 - RNA, 24 nt, Artificial Sequence
  Synthetic
agaugaaugccuaagcaacauuuu

SEQ ID NO: 74924 - RNA, 21 nt, Artificial Sequence
  Synthetic
ucaaaaauaugaauacauuuu

SEQ ID NO: 74925 - RNA, 22 nt, Artificial Sequence
  Synthetic
aucaaaaauaugaauacauuuu

SEQ ID NO: 74926 - RNA, 24 nt, Artificial Sequence
  Synthetic
ugaucaaaaauaugaauacauuuu

SEQ ID NO: 74927 - RNA, 18 nt, Artificial Sequence
  Synthetic
agguuuaaacuacauuuu

SEQ ID NO: 74928 - RNA, 19 nt, Artificial Sequence
  Synthetic
aagguuuaaacuacauuuu

SEQ ID NO: 74929 - RNA, 20 nt, Artificial Sequence
  Synthetic
caagguuuaaacuacauuuu

SEQ ID NO: 74930 - RNA, 21 nt, Artificial Sequence
  Synthetic
ccaagguuuaaacuacauuuu

SEQ ID NO: 74931 - RNA, 22 nt, Artificial Sequence
  Synthetic
cccaagguuuaaacuacauuuu

SEQ ID NO: 74932 - RNA, 24 nt, Artificial Sequence
  Synthetic
ugcccaagguuuaaacuacauuuu

SEQ ID NO: 74933 - RNA, 18 nt, Artificial Sequence
  Synthetic
auccuagguuugcauuuu

SEQ ID NO: 74934 - RNA, 19 nt, Artificial Sequence
  Synthetic
aauccuagguuugcauuuu

SEQ ID NO: 74935 - RNA, 22 nt, Artificial Sequence
  Synthetic
uggaauccuagguuugcauuuu

SEQ ID NO: 74936 - RNA, 24 nt, Artificial Sequence
  Synthetic
cguggaauccuagguuugcauuuu

SEQ ID NO: 74937 - RNA, 21 nt, Artificial Sequence
  Synthetic
uaaaggggaaaaaaucauuuu

SEQ ID NO: 74938 - RNA, 22 nt, Artificial Sequence
  Synthetic
uuaaaggggaaaaaaucauuuu

SEQ ID NO: 74939 - RNA, 23 nt, Artificial Sequence
  Synthetic
cuuaaaggggaaaaaaucauuuu

SEQ ID NO: 74940 - RNA, 24 nt, Artificial Sequence
  Synthetic
ucuuaaaggggaaaaaaucauuuu

SEQ ID NO: 74941 - RNA, 22 nt, Artificial Sequence
  Synthetic
uguaauaaaagcaacucauuuu

SEQ ID NO: 74942 - RNA, 23 nt, Artificial Sequence
  Synthetic
uuguaauaaaagcaacucauuuu

SEQ ID NO: 74943 - RNA, 24 nt, Artificial Sequence
  Synthetic
cuuguaauaaaagcaacucauuuu

SEQ ID NO: 74944 - RNA, 21 nt, Artificial Sequence
  Synthetic
uuugaauucuuuauucauuuu

SEQ ID NO: 74945 - RNA, 22 nt, Artificial Sequence
  Synthetic
auuugaauucuuuauucauuuu

SEQ ID NO: 74946 - RNA, 23 nt, Artificial Sequence
  Synthetic
aauuugaauucuuuauucauuuu

SEQ ID NO: 74947 - RNA, 24 nt, Artificial Sequence
  Synthetic
uaauuugaauucuuuauucauuuu

SEQ ID NO: 74948 - RNA, 18 nt, Artificial Sequence
  Synthetic
acuacuaacuuucauuuu

SEQ ID NO: 74949 - RNA, 19 nt, Artificial Sequence
  Synthetic
aacuacuaacuuucauuuu

SEQ ID NO: 74950 - RNA, 20 nt, Artificial Sequence
  Synthetic
aaacuacuaacuuucauuuu

SEQ ID NO: 74951 - RNA, 21 nt, Artificial Sequence
  Synthetic
caaacuacuaacuuucauuuu

SEQ ID NO: 74952 - RNA, 22 nt, Artificial Sequence
  Synthetic
acaaacuacuaacuuucauuuu

SEQ ID NO: 74953 - RNA, 23 nt, Artificial Sequence
  Synthetic
cacaaacuacuaacuuucauuuu

SEQ ID NO: 74954 - RNA, 24 nt, Artificial Sequence
  Synthetic
ucacaaacuacuaacuuucauuuu

SEQ ID NO: 74955 - RNA, 18 nt, Artificial Sequence
  Synthetic
auuaucugcaaagauuuu

SEQ ID NO: 74956 - RNA, 19 nt, Artificial Sequence
  Synthetic
aauuaucugcaaagauuuu

SEQ ID NO: 74957 - RNA, 20 nt, Artificial Sequence
  Synthetic
uaauuaucugcaaagauuuu

SEQ ID NO: 74958 - RNA, 21 nt, Artificial Sequence
  Synthetic
cuaauuaucugcaaagauuuu

SEQ ID NO: 74959 - RNA, 22 nt, Artificial Sequence
  Synthetic
ucuaauuaucugcaaagauuuu

SEQ ID NO: 74960 - RNA, 23 nt, Artificial Sequence
  Synthetic
uucuaauuaucugcaaagauuuu

SEQ ID NO: 74961 - RNA, 24 nt, Artificial Sequence
  Synthetic
uuucuaauuaucugcaaagauuuu

SEQ ID NO: 74962 - RNA, 21 nt, Artificial Sequence
  Synthetic
uuuacauauuuuguagauuuu

SEQ ID NO: 74963 - RNA, 22 nt, Artificial Sequence
  Synthetic
auuuacauauuuuguagauuuu

SEQ ID NO: 74964 - RNA, 23 nt, Artificial Sequence
  Synthetic
cauuuacauauuuuguagauuuu

SEQ ID NO: 74965 - RNA, 24 nt, Artificial Sequence
  Synthetic
ucauuuacauauuuuguagauuuu

SEQ ID NO: 74966 - RNA, 18 nt, Artificial Sequence
  Synthetic
aaagguuaaaaugauuuu

SEQ ID NO: 74967 - RNA, 19 nt, Artificial Sequence
  Synthetic
caaagguuaaaaugauuuu

SEQ ID NO: 74968 - RNA, 20 nt, Artificial Sequence
  Synthetic
ucaaagguuaaaaugauuuu

SEQ ID NO: 74969 - RNA, 21 nt, Artificial Sequence
  Synthetic
aucaaagguuaaaaugauuuu

SEQ ID NO: 74970 - RNA, 22 nt, Artificial Sequence
  Synthetic
uaucaaagguuaaaaugauuuu

SEQ ID NO: 74971 - RNA, 23 nt, Artificial Sequence
  Synthetic
uuaucaaagguuaaaaugauuuu

SEQ ID NO: 74972 - RNA, 19 nt, Artificial Sequence
  Synthetic
aggcacuuuuauugauuuu

SEQ ID NO: 74973 - RNA, 20 nt, Artificial Sequence
  Synthetic
uaggcacuuuuauugauuuu

SEQ ID NO: 74974 - RNA, 21 nt, Artificial Sequence
  Synthetic
cuaggcacuuuuauugauuuu

SEQ ID NO: 74975 - RNA, 22 nt, Artificial Sequence
  Synthetic
ccuaggcacuuuuauugauuuu

SEQ ID NO: 74976 - RNA, 23 nt, Artificial Sequence
  Synthetic
uccuaggcacuuuuauugauuuu

SEQ ID NO: 74977 - RNA, 24 nt, Artificial Sequence
  Synthetic
cuccuaggcacuuuuauugauuuu

SEQ ID NO: 74978 - RNA, 21 nt, Artificial Sequence
  Synthetic
uuuaucaauugucaauauuuu

SEQ ID NO: 74979 - RNA, 22 nt, Artificial Sequence
  Synthetic
cuuuaucaauugucaauauuuu

SEQ ID NO: 74980 - RNA, 23 nt, Artificial Sequence
  Synthetic
ucuuuaucaauugucaauauuuu

SEQ ID NO: 74981 - RNA, 24 nt, Artificial Sequence
  Synthetic
uucuuuaucaauugucaauauuuu

SEQ ID NO: 74982 - RNA, 18 nt, Artificial Sequence
  Synthetic
acaugauuaaucuauuuu

SEQ ID NO: 74983 - RNA, 19 nt, Artificial Sequence
  Synthetic
uacaugauuaaucuauuuu

SEQ ID NO: 74984 - RNA, 20 nt, Artificial Sequence
  Synthetic
auacaugauuaaucuauuuu

SEQ ID NO: 74985 - RNA, 21 nt, Artificial Sequence
  Synthetic
uauacaugauuaaucuauuuu

SEQ ID NO: 74986 - RNA, 22 nt, Artificial Sequence
  Synthetic
auauacaugauuaaucuauuuu

SEQ ID NO: 74987 - RNA, 24 nt, Artificial Sequence
  Synthetic
ugauauacaugauuaaucuauuuu

SEQ ID NO: 74988 - RNA, 18 nt, Artificial Sequence
  Synthetic
aucuaggucuauuauuuu

SEQ ID NO: 74989 - RNA, 20 nt, Artificial Sequence
  Synthetic
ugaucuaggucuauuauuuu

SEQ ID NO: 74990 - RNA, 21 nt, Artificial Sequence
  Synthetic
augaucuaggucuauuauuuu

SEQ ID NO: 74991 - RNA, 22 nt, Artificial Sequence
  Synthetic
aaugaucuaggucuauuauuuu

SEQ ID NO: 74992 - RNA, 23 nt, Artificial Sequence
  Synthetic
caaugaucuaggucuauuauuuu

SEQ ID NO: 74993 - RNA, 24 nt, Artificial Sequence
  Synthetic
ccaaugaucuaggucuauuauuuu

SEQ ID NO: 74994 - RNA, 18 nt, Artificial Sequence
  Synthetic
auugcuuuuacuuauuuu

SEQ ID NO: 74995 - RNA, 23 nt, Artificial Sequence
  Synthetic
uggggauugcuuuuacuuauuuu

SEQ ID NO: 74996 - RNA, 24 nt, Artificial Sequence
  Synthetic
uuggggauugcuuuuacuuauuuu

SEQ ID NO: 74997 - RNA, 21 nt, Artificial Sequence
  Synthetic
cuuucucauaguauuuauuuu

SEQ ID NO: 74998 - RNA, 22 nt, Artificial Sequence
  Synthetic
ucuuucucauaguauuuauuuu

SEQ ID NO: 74999 - RNA, 23 nt, Artificial Sequence
  Synthetic
cucuuucucauaguauuuauuuu

SEQ ID NO: 75000 - RNA, 24 nt, Artificial Sequence
  Synthetic
ccucuuucucauaguauuuauuuu

SEQ ID NO: 75001 - RNA, 21 nt, Artificial Sequence
  Synthetic
cauugcuaauguauuuauuuu

SEQ ID NO: 75002 - RNA, 22 nt, Artificial Sequence
  Synthetic
ucauugcuaauguauuuauuuu

SEQ ID NO: 75003 - RNA, 23 nt, Artificial Sequence
  Synthetic
aucauugcuaauguauuuauuuu

SEQ ID NO: 75004 - RNA, 18 nt, Artificial Sequence
  Synthetic
acaugcaucaaaacuuuu

SEQ ID NO: 75005 - RNA, 21 nt, Artificial Sequence
  Synthetic
aggacaugcaucaaaacuuuu

SEQ ID NO: 75006 - RNA, 23 nt, Artificial Sequence
  Synthetic
ugaggacaugcaucaaaacuuuu

SEQ ID NO: 75007 - RNA, 24 nt, Artificial Sequence
  Synthetic
augaggacaugcaucaaaacuuuu

SEQ ID NO: 75008 - RNA, 18 nt, Artificial Sequence
  Synthetic
acacaggugaaaacuuuu

SEQ ID NO: 75009 - RNA, 19 nt, Artificial Sequence
  Synthetic
uacacaggugaaaacuuuu

SEQ ID NO: 75010 - RNA, 20 nt, Artificial Sequence
  Synthetic
uuacacaggugaaaacuuuu

SEQ ID NO: 75011 - RNA, 22 nt, Artificial Sequence
  Synthetic
aguuacacaggugaaaacuuuu

SEQ ID NO: 75012 - RNA, 23 nt, Artificial Sequence
  Synthetic
uaguuacacaggugaaaacuuuu

SEQ ID NO: 75013 - RNA, 24 nt, Artificial Sequence
  Synthetic
auaguuacacaggugaaaacuuuu

SEQ ID NO: 75014 - RNA, 18 nt, Artificial Sequence
  Synthetic
uuguuugaaggaacuuuu

SEQ ID NO: 75015 - RNA, 19 nt, Artificial Sequence
  Synthetic
uuuguuugaaggaacuuuu

SEQ ID NO: 75016 - RNA, 20 nt, Artificial Sequence
  Synthetic
auuuguuugaaggaacuuuu

SEQ ID NO: 75017 - RNA, 22 nt, Artificial Sequence
  Synthetic
agauuuguuugaaggaacuuuu

SEQ ID NO: 75018 - RNA, 23 nt, Artificial Sequence
  Synthetic
aagauuuguuugaaggaacuuuu

SEQ ID NO: 75019 - RNA, 24 nt, Artificial Sequence
  Synthetic
uaagauuuguuugaaggaacuuuu

SEQ ID NO: 75020 - RNA, 18 nt, Artificial Sequence
  Synthetic
ccacuccgucucacuuuu

SEQ ID NO: 75021 - RNA, 19 nt, Artificial Sequence
  Synthetic
accacuccgucucacuuuu

SEQ ID NO: 75022 - RNA, 20 nt, Artificial Sequence
  Synthetic
caccacuccgucucacuuuu

SEQ ID NO: 75023 - RNA, 22 nt, Artificial Sequence
  Synthetic
ugcaccacuccgucucacuuuu

SEQ ID NO: 75024 - RNA, 23 nt, Artificial Sequence
  Synthetic
uugcaccacuccgucucacuuuu

SEQ ID NO: 75025 - RNA, 24 nt, Artificial Sequence
  Synthetic
cuugcaccacuccgucucacuuuu

SEQ ID NO: 75026 - RNA, 18 nt, Artificial Sequence
  Synthetic
uuguggaucuagacuuuu

SEQ ID NO: 75027 - RNA, 19 nt, Artificial Sequence
  Synthetic
uuuguggaucuagacuuuu

SEQ ID NO: 75028 - RNA, 20 nt, Artificial Sequence
  Synthetic
uuuuguggaucuagacuuuu

SEQ ID NO: 75029 - RNA, 21 nt, Artificial Sequence
  Synthetic
auuuuguggaucuagacuuuu

SEQ ID NO: 75030 - RNA, 22 nt, Artificial Sequence
  Synthetic
cauuuuguggaucuagacuuuu

SEQ ID NO: 75031 - RNA, 24 nt, Artificial Sequence
  Synthetic
ugcauuuuguggaucuagacuuuu

SEQ ID NO: 75032 - RNA, 18 nt, Artificial Sequence
  Synthetic
aagaguuuaucaccuuuu

SEQ ID NO: 75033 - RNA, 21 nt, Artificial Sequence
  Synthetic
aggaagaguuuaucaccuuuu

SEQ ID NO: 75034 - RNA, 22 nt, Artificial Sequence
  Synthetic
caggaagaguuuaucaccuuuu

SEQ ID NO: 75035 - RNA, 24 nt, Artificial Sequence
  Synthetic
agcaggaagaguuuaucaccuuuu

SEQ ID NO: 75036 - RNA, 18 nt, Artificial Sequence
  Synthetic
ucugguacaguaccuuuu

SEQ ID NO: 75037 - RNA, 20 nt, Artificial Sequence
  Synthetic
ugucugguacaguaccuuuu

SEQ ID NO: 75038 - RNA, 21 nt, Artificial Sequence
  Synthetic
uugucugguacaguaccuuuu

SEQ ID NO: 75039 - RNA, 23 nt, Artificial Sequence
  Synthetic
aguugucugguacaguaccuuuu

SEQ ID NO: 75040 - RNA, 24 nt, Artificial Sequence
  Synthetic
uaguugucugguacaguaccuuuu

SEQ ID NO: 75041 - RNA, 18 nt, Artificial Sequence
  Synthetic
aaaauccaggccccuuuu

SEQ ID NO: 75042 - RNA, 22 nt, Artificial Sequence
  Synthetic
ugggaaaauccaggccccuuuu

SEQ ID NO: 75043 - RNA, 23 nt, Artificial Sequence
  Synthetic
uugggaaaauccaggccccuuuu

SEQ ID NO: 75044 - RNA, 24 nt, Artificial Sequence
  Synthetic
uuugggaaaauccaggccccuuuu

SEQ ID NO: 75045 - RNA, 18 nt, Artificial Sequence
  Synthetic
cuccugcuguggccuuuu

SEQ ID NO: 75046 - RNA, 19 nt, Artificial Sequence
  Synthetic
acuccugcuguggccuuuu

SEQ ID NO: 75047 - RNA, 20 nt, Artificial Sequence
  Synthetic
uacuccugcuguggccuuuu

SEQ ID NO: 75048 - RNA, 21 nt, Artificial Sequence
  Synthetic
cuacuccugcuguggccuuuu

SEQ ID NO: 75049 - RNA, 23 nt, Artificial Sequence
  Synthetic
agcuacuccugcuguggccuuuu

SEQ ID NO: 75050 - RNA, 24 nt, Artificial Sequence
  Synthetic
cagcuacuccugcuguggccuuuu

SEQ ID NO: 75051 - RNA, 18 nt, Artificial Sequence
  Synthetic
uucugcauucuagcuuuu

SEQ ID NO: 75052 - RNA, 19 nt, Artificial Sequence
  Synthetic
uuucugcauucuagcuuuu

SEQ ID NO: 75053 - RNA, 21 nt, Artificial Sequence
  Synthetic
uguuucugcauucuagcuuuu

SEQ ID NO: 75054 - RNA, 22 nt, Artificial Sequence
  Synthetic
cuguuucugcauucuagcuuuu

SEQ ID NO: 75055 - RNA, 18 nt, Artificial Sequence
  Synthetic
auucaaauguuagcuuuu

SEQ ID NO: 75056 - RNA, 19 nt, Artificial Sequence
  Synthetic
aauucaaauguuagcuuuu

SEQ ID NO: 75057 - RNA, 20 nt, Artificial Sequence
  Synthetic
aaauucaaauguuagcuuuu

SEQ ID NO: 75058 - RNA, 21 nt, Artificial Sequence
  Synthetic
uaaauucaaauguuagcuuuu

SEQ ID NO: 75059 - RNA, 22 nt, Artificial Sequence
  Synthetic
auaaauucaaauguuagcuuuu

SEQ ID NO: 75060 - RNA, 23 nt, Artificial Sequence
  Synthetic
aauaaauucaaauguuagcuuuu

SEQ ID NO: 75061 - RNA, 24 nt, Artificial Sequence
  Synthetic
aaauaaauucaaauguuagcuuuu

SEQ ID NO: 75062 - RNA, 19 nt, Artificial Sequence
  Synthetic
ugccaacucuuuagcuuuu

SEQ ID NO: 75063 - RNA, 20 nt, Artificial Sequence
  Synthetic
augccaacucuuuagcuuuu

SEQ ID NO: 75064 - RNA, 21 nt, Artificial Sequence
  Synthetic
uaugccaacucuuuagcuuuu

SEQ ID NO: 75065 - RNA, 22 nt, Artificial Sequence
  Synthetic
cuaugccaacucuuuagcuuuu

SEQ ID NO: 75066 - RNA, 24 nt, Artificial Sequence
  Synthetic
agcuaugccaacucuuuagcuuuu

SEQ ID NO: 75067 - RNA, 19 nt, Artificial Sequence
  Synthetic
uguuugagcaaaggcuuuu

SEQ ID NO: 75068 - RNA, 21 nt, Artificial Sequence
  Synthetic
uguguuugagcaaaggcuuuu

SEQ ID NO: 75069 - RNA, 22 nt, Artificial Sequence
  Synthetic
auguguuugagcaaaggcuuuu

SEQ ID NO: 75070 - RNA, 23 nt, Artificial Sequence
  Synthetic
aauguguuugagcaaaggcuuuu

SEQ ID NO: 75071 - RNA, 19 nt, Artificial Sequence
  Synthetic
ugaugccucaaaggcuuuu

SEQ ID NO: 75072 - RNA, 20 nt, Artificial Sequence
  Synthetic
uugaugccucaaaggcuuuu

SEQ ID NO: 75073 - RNA, 21 nt, Artificial Sequence
  Synthetic
uuugaugccucaaaggcuuuu

SEQ ID NO: 75074 - RNA, 23 nt, Artificial Sequence
  Synthetic
aguuugaugccucaaaggcuuuu

SEQ ID NO: 75075 - RNA, 24 nt, Artificial Sequence
  Synthetic
caguuugaugccucaaaggcuuuu

SEQ ID NO: 75076 - RNA, 21 nt, Artificial Sequence
  Synthetic
aacagaaaacaaagggcuuuu

SEQ ID NO: 75077 - RNA, 22 nt, Artificial Sequence
  Synthetic
uaacagaaaacaaagggcuuuu

SEQ ID NO: 75078 - RNA, 23 nt, Artificial Sequence
  Synthetic
auaacagaaaacaaagggcuuuu

SEQ ID NO: 75079 - RNA, 24 nt, Artificial Sequence
  Synthetic
aauaacagaaaacaaagggcuuuu

SEQ ID NO: 75080 - RNA, 19 nt, Artificial Sequence
  Synthetic
agugauucuaauugcuuuu

SEQ ID NO: 75081 - RNA, 20 nt, Artificial Sequence
  Synthetic
aagugauucuaauugcuuuu

SEQ ID NO: 75082 - RNA, 22 nt, Artificial Sequence
  Synthetic
agaagugauucuaauugcuuuu

SEQ ID NO: 75083 - RNA, 23 nt, Artificial Sequence
  Synthetic
aagaagugauucuaauugcuuuu

SEQ ID NO: 75084 - RNA, 24 nt, Artificial Sequence
  Synthetic
aaagaagugauucuaauugcuuuu

SEQ ID NO: 75085 - RNA, 18 nt, Artificial Sequence
  Synthetic
uuggggaaacaaucuuuu

SEQ ID NO: 75086 - RNA, 21 nt, Artificial Sequence
  Synthetic
ugguuggggaaacaaucuuuu

SEQ ID NO: 75087 - RNA, 22 nt, Artificial Sequence
  Synthetic
cugguuggggaaacaaucuuuu

SEQ ID NO: 75088 - RNA, 23 nt, Artificial Sequence
  Synthetic
ccugguuggggaaacaaucuuuu

SEQ ID NO: 75089 - RNA, 24 nt, Artificial Sequence
  Synthetic
uccugguuggggaaacaaucuuuu

SEQ ID NO: 75090 - RNA, 18 nt, Artificial Sequence
  Synthetic
ugcuguuugucaucuuuu

SEQ ID NO: 75091 - RNA, 19 nt, Artificial Sequence
  Synthetic
augcuguuugucaucuuuu

SEQ ID NO: 75092 - RNA, 20 nt, Artificial Sequence
  Synthetic
uaugcuguuugucaucuuuu

SEQ ID NO: 75093 - RNA, 21 nt, Artificial Sequence
  Synthetic
auaugcuguuugucaucuuuu

SEQ ID NO: 75094 - RNA, 22 nt, Artificial Sequence
  Synthetic
uauaugcuguuugucaucuuuu

SEQ ID NO: 75095 - RNA, 23 nt, Artificial Sequence
  Synthetic
auauaugcuguuugucaucuuuu

SEQ ID NO: 75096 - RNA, 24 nt, Artificial Sequence
  Synthetic
uauauaugcuguuugucaucuuuu

SEQ ID NO: 75097 - RNA, 18 nt, Artificial Sequence
  Synthetic
cccaaaccuugcucuuuu

SEQ ID NO: 75098 - RNA, 19 nt, Artificial Sequence
  Synthetic
ucccaaaccuugcucuuuu

SEQ ID NO: 75099 - RNA, 20 nt, Artificial Sequence
  Synthetic
uucccaaaccuugcucuuuu

SEQ ID NO: 75100 - RNA, 21 nt, Artificial Sequence
  Synthetic
cuucccaaaccuugcucuuuu

SEQ ID NO: 75101 - RNA, 22 nt, Artificial Sequence
  Synthetic
ccuucccaaaccuugcucuuuu

SEQ ID NO: 75102 - RNA, 24 nt, Artificial Sequence
  Synthetic
agccuucccaaaccuugcucuuuu

SEQ ID NO: 75103 - RNA, 20 nt, Artificial Sequence
  Synthetic
aggucacugaaaagucuuuu

SEQ ID NO: 75104 - RNA, 21 nt, Artificial Sequence
  Synthetic
aaggucacugaaaagucuuuu

SEQ ID NO: 75105 - RNA, 22 nt, Artificial Sequence
  Synthetic
uaaggucacugaaaagucuuuu

SEQ ID NO: 75106 - RNA, 24 nt, Artificial Sequence
  Synthetic
aguaaggucacugaaaagucuuuu

SEQ ID NO: 75107 - RNA, 21 nt, Artificial Sequence
  Synthetic
uuuucuaagcuuuugucuuuu

SEQ ID NO: 75108 - RNA, 22 nt, Artificial Sequence
  Synthetic
cuuuucuaagcuuuugucuuuu

SEQ ID NO: 75109 - RNA, 23 nt, Artificial Sequence
  Synthetic
ucuuuucuaagcuuuugucuuuu

SEQ ID NO: 75110 - RNA, 24 nt, Artificial Sequence
  Synthetic
uucuuuucuaagcuuuugucuuuu

SEQ ID NO: 75111 - RNA, 18 nt, Artificial Sequence
  Synthetic
ugcaaaguguauucuuuu

SEQ ID NO: 75112 - RNA, 20 nt, Artificial Sequence
  Synthetic
ugugcaaaguguauucuuuu

SEQ ID NO: 75113 - RNA, 21 nt, Artificial Sequence
  Synthetic
uugugcaaaguguauucuuuu

SEQ ID NO: 75114 - RNA, 22 nt, Artificial Sequence
  Synthetic
uuugugcaaaguguauucuuuu

SEQ ID NO: 75115 - RNA, 23 nt, Artificial Sequence
  Synthetic
auuugugcaaaguguauucuuuu

SEQ ID NO: 75116 - RNA, 24 nt, Artificial Sequence
  Synthetic
aauuugugcaaaguguauucuuuu

SEQ ID NO: 75117 - RNA, 18 nt, Artificial Sequence
  Synthetic
uuuccuacaucuucuuuu

SEQ ID NO: 75118 - RNA, 20 nt, Artificial Sequence
  Synthetic
aguuuccuacaucuucuuuu

SEQ ID NO: 75119 - RNA, 21 nt, Artificial Sequence
  Synthetic
uaguuuccuacaucuucuuuu

SEQ ID NO: 75120 - RNA, 22 nt, Artificial Sequence
  Synthetic
uuaguuuccuacaucuucuuuu

SEQ ID NO: 75121 - RNA, 23 nt, Artificial Sequence
  Synthetic
cuuaguuuccuacaucuucuuuu

SEQ ID NO: 75122 - RNA, 24 nt, Artificial Sequence
  Synthetic
ccuuaguuuccuacaucuucuuuu

SEQ ID NO: 75123 - RNA, 18 nt, Artificial Sequence
  Synthetic
auggcuaauauuucuuuu

SEQ ID NO: 75124 - RNA, 19 nt, Artificial Sequence
  Synthetic
aauggcuaauauuucuuuu

SEQ ID NO: 75125 - RNA, 20 nt, Artificial Sequence
  Synthetic
caauggcuaauauuucuuuu

SEQ ID NO: 75126 - RNA, 21 nt, Artificial Sequence
  Synthetic
ucaauggcuaauauuucuuuu

SEQ ID NO: 75127 - RNA, 22 nt, Artificial Sequence
  Synthetic
uucaauggcuaauauuucuuuu

SEQ ID NO: 75128 - RNA, 24 nt, Artificial Sequence
  Synthetic
aguucaauggcuaauauuucuuuu

SEQ ID NO: 75129 - RNA, 23 nt, Artificial Sequence
  Synthetic
aggcaaaauuucuauaaaguuuu

SEQ ID NO: 75130 - RNA, 24 nt, Artificial Sequence
  Synthetic
caggcaaaauuucuauaaaguuuu

SEQ ID NO: 75131 - RNA, 21 nt, Artificial Sequence
  Synthetic
acuuuaauuuuuuuaaguuuu

SEQ ID NO: 75132 - RNA, 22 nt, Artificial Sequence
  Synthetic
aacuuuaauuuuuuuaaguuuu

SEQ ID NO: 75133 - RNA, 23 nt, Artificial Sequence
  Synthetic
caacuuuaauuuuuuuaaguuuu

SEQ ID NO: 75134 - RNA, 24 nt, Artificial Sequence
  Synthetic
acaacuuuaauuuuuuuaaguuuu

SEQ ID NO: 75135 - RNA, 18 nt, Artificial Sequence
  Synthetic
auauaagaaaccaguuuu

SEQ ID NO: 75136 - RNA, 19 nt, Artificial Sequence
  Synthetic
aauauaagaaaccaguuuu

SEQ ID NO: 75137 - RNA, 21 nt, Artificial Sequence
  Synthetic
ugaauauaagaaaccaguuuu

SEQ ID NO: 75138 - RNA, 22 nt, Artificial Sequence
  Synthetic
augaauauaagaaaccaguuuu

SEQ ID NO: 75139 - RNA, 23 nt, Artificial Sequence
  Synthetic
aaugaauauaagaaaccaguuuu

SEQ ID NO: 75140 - RNA, 24 nt, Artificial Sequence
  Synthetic
uaaugaauauaagaaaccaguuuu

SEQ ID NO: 75141 - RNA, 18 nt, Artificial Sequence
  Synthetic
ucuugguaaaucaguuuu

SEQ ID NO: 75142 - RNA, 19 nt, Artificial Sequence
  Synthetic
uucuugguaaaucaguuuu

SEQ ID NO: 75143 - RNA, 20 nt, Artificial Sequence
  Synthetic
uuucuugguaaaucaguuuu

SEQ ID NO: 75144 - RNA, 21 nt, Artificial Sequence
  Synthetic
uuuucuugguaaaucaguuuu

SEQ ID NO: 75145 - RNA, 22 nt, Artificial Sequence
  Synthetic
uuuuucuugguaaaucaguuuu

SEQ ID NO: 75146 - RNA, 23 nt, Artificial Sequence
  Synthetic
auuuuucuugguaaaucaguuuu

SEQ ID NO: 75147 - RNA, 24 nt, Artificial Sequence
  Synthetic
aauuuuucuugguaaaucaguuuu

SEQ ID NO: 75148 - RNA, 19 nt, Artificial Sequence
  Synthetic
aguuauuggucucaguuuu

SEQ ID NO: 75149 - RNA, 20 nt, Artificial Sequence
  Synthetic
aaguuauuggucucaguuuu

SEQ ID NO: 75150 - RNA, 21 nt, Artificial Sequence
  Synthetic
caaguuauuggucucaguuuu

SEQ ID NO: 75151 - RNA, 22 nt, Artificial Sequence
  Synthetic
ccaaguuauuggucucaguuuu

SEQ ID NO: 75152 - RNA, 23 nt, Artificial Sequence
  Synthetic
accaaguuauuggucucaguuuu

SEQ ID NO: 75153 - RNA, 24 nt, Artificial Sequence
  Synthetic
aaccaaguuauuggucucaguuuu

SEQ ID NO: 75154 - RNA, 18 nt, Artificial Sequence
  Synthetic
uuuaauaauaagaguuuu

SEQ ID NO: 75155 - RNA, 19 nt, Artificial Sequence
  Synthetic
cuuuaauaauaagaguuuu

SEQ ID NO: 75156 - RNA, 20 nt, Artificial Sequence
  Synthetic
ucuuuaauaauaagaguuuu

SEQ ID NO: 75157 - RNA, 21 nt, Artificial Sequence
  Synthetic
aucuuuaauaauaagaguuuu

SEQ ID NO: 75158 - RNA, 22 nt, Artificial Sequence
  Synthetic
uaucuuuaauaauaagaguuuu

SEQ ID NO: 75159 - RNA, 23 nt, Artificial Sequence
  Synthetic
auaucuuuaauaauaagaguuuu

SEQ ID NO: 75160 - RNA, 24 nt, Artificial Sequence
  Synthetic
uauaucuuuaauaauaagaguuuu

SEQ ID NO: 75161 - RNA, 21 nt, Artificial Sequence
  Synthetic
auuuucagcuuuuagaguuuu

SEQ ID NO: 75162 - RNA, 22 nt, Artificial Sequence
  Synthetic
aauuuucagcuuuuagaguuuu

SEQ ID NO: 75163 - RNA, 23 nt, Artificial Sequence
  Synthetic
aaauuuucagcuuuuagaguuuu

SEQ ID NO: 75164 - RNA, 24 nt, Artificial Sequence
  Synthetic
aaaauuuucagcuuuuagaguuuu

SEQ ID NO: 75165 - RNA, 18 nt, Artificial Sequence
  Synthetic
ugugucaauaugaguuuu

SEQ ID NO: 75166 - RNA, 19 nt, Artificial Sequence
  Synthetic
uugugucaauaugaguuuu

SEQ ID NO: 75167 - RNA, 20 nt, Artificial Sequence
  Synthetic
auugugucaauaugaguuuu

SEQ ID NO: 75168 - RNA, 22 nt, Artificial Sequence
  Synthetic
ugauugugucaauaugaguuuu

SEQ ID NO: 75169 - RNA, 23 nt, Artificial Sequence
  Synthetic
uugauugugucaauaugaguuuu

SEQ ID NO: 75170 - RNA, 24 nt, Artificial Sequence
  Synthetic
auugauugugucaauaugaguuuu

SEQ ID NO: 75171 - RNA, 20 nt, Artificial Sequence
  Synthetic
agguacccaauaauaguuuu

SEQ ID NO: 75172 - RNA, 18 nt, Artificial Sequence
  Synthetic
cuuacaucuuguaguuuu

SEQ ID NO: 75173 - RNA, 19 nt, Artificial Sequence
  Synthetic
acuuacaucuuguaguuuu

SEQ ID NO: 75174 - RNA, 20 nt, Artificial Sequence
  Synthetic
aacuuacaucuuguaguuuu

SEQ ID NO: 75175 - RNA, 22 nt, Artificial Sequence
  Synthetic
agaacuuacaucuuguaguuuu

SEQ ID NO: 75176 - RNA, 24 nt, Artificial Sequence
  Synthetic
agagaacuuacaucuuguaguuuu

SEQ ID NO: 75177 - RNA, 19 nt, Artificial Sequence
  Synthetic
ugacagaaguauuaguuuu

SEQ ID NO: 75178 - RNA, 20 nt, Artificial Sequence
  Synthetic
uugacagaaguauuaguuuu

SEQ ID NO: 75179 - RNA, 21 nt, Artificial Sequence
  Synthetic
auugacagaaguauuaguuuu

SEQ ID NO: 75180 - RNA, 23 nt, Artificial Sequence
  Synthetic
ugauugacagaaguauuaguuuu

SEQ ID NO: 75181 - RNA, 24 nt, Artificial Sequence
  Synthetic
uugauugacagaaguauuaguuuu

SEQ ID NO: 75182 - RNA, 23 nt, Artificial Sequence
  Synthetic
agguuuguuuaaaauuuaguuuu

SEQ ID NO: 75183 - RNA, 24 nt, Artificial Sequence
  Synthetic
aagguuuguuuaaaauuuaguuuu

SEQ ID NO: 75184 - RNA, 19 nt, Artificial Sequence
  Synthetic
agccacuaagcaucguuuu

SEQ ID NO: 75185 - RNA, 20 nt, Artificial Sequence
  Synthetic
aagccacuaagcaucguuuu

SEQ ID NO: 75186 - RNA, 21 nt, Artificial Sequence
  Synthetic
caagccacuaagcaucguuuu

SEQ ID NO: 75187 - RNA, 22 nt, Artificial Sequence
  Synthetic
acaagccacuaagcaucguuuu

SEQ ID NO: 75188 - RNA, 23 nt, Artificial Sequence
  Synthetic
cacaagccacuaagcaucguuuu

SEQ ID NO: 75189 - RNA, 24 nt, Artificial Sequence
  Synthetic
ccacaagccacuaagcaucguuuu

SEQ ID NO: 75190 - RNA, 18 nt, Artificial Sequence
  Synthetic
caugguggcgaugguuuu

SEQ ID NO: 75191 - RNA, 19 nt, Artificial Sequence
  Synthetic
ucaugguggcgaugguuuu

SEQ ID NO: 75192 - RNA, 20 nt, Artificial Sequence
  Synthetic
uucaugguggcgaugguuuu

SEQ ID NO: 75193 - RNA, 20 nt, Artificial Sequence
  Synthetic
agggagcuaguaaauguuuu

SEQ ID NO: 75194 - RNA, 21 nt, Artificial Sequence
  Synthetic
uagggagcuaguaaauguuuu

SEQ ID NO: 75195 - RNA, 22 nt, Artificial Sequence
  Synthetic
auagggagcuaguaaauguuuu

SEQ ID NO: 75196 - RNA, 23 nt, Artificial Sequence
  Synthetic
aauagggagcuaguaaauguuuu

SEQ ID NO: 75197 - RNA, 24 nt, Artificial Sequence
  Synthetic
uaauagggagcuaguaaauguuuu

SEQ ID NO: 75198 - RNA, 18 nt, Artificial Sequence
  Synthetic
agucuuauagacuguuuu

SEQ ID NO: 75199 - RNA, 19 nt, Artificial Sequence
  Synthetic
uagucuuauagacuguuuu

SEQ ID NO: 75200 - RNA, 20 nt, Artificial Sequence
  Synthetic
uuagucuuauagacuguuuu

SEQ ID NO: 75201 - RNA, 21 nt, Artificial Sequence
  Synthetic
cuuagucuuauagacuguuuu

SEQ ID NO: 75202 - RNA, 23 nt, Artificial Sequence
  Synthetic
ugcuuagucuuauagacuguuuu

SEQ ID NO: 75203 - RNA, 24 nt, Artificial Sequence
  Synthetic
augcuuagucuuauagacuguuuu

SEQ ID NO: 75204 - RNA, 18 nt, Artificial Sequence
  Synthetic
ucccccuccuucuguuuu

SEQ ID NO: 75205 - RNA, 21 nt, Artificial Sequence
  Synthetic
uggucccccuccuucuguuuu

SEQ ID NO: 75206 - RNA, 23 nt, Artificial Sequence
  Synthetic
aguggucccccuccuucuguuuu

SEQ ID NO: 75207 - RNA, 24 nt, Artificial Sequence
  Synthetic
aaguggucccccuccuucuguuuu

SEQ ID NO: 75208 - RNA, 18 nt, Artificial Sequence
  Synthetic
acaauugaaaaguguuuu

SEQ ID NO: 75209 - RNA, 19 nt, Artificial Sequence
  Synthetic
uacaauugaaaaguguuuu

SEQ ID NO: 75210 - RNA, 20 nt, Artificial Sequence
  Synthetic
cuacaauugaaaaguguuuu

SEQ ID NO: 75211 - RNA, 21 nt, Artificial Sequence
  Synthetic
ucuacaauugaaaaguguuuu

SEQ ID NO: 75212 - RNA, 22 nt, Artificial Sequence
  Synthetic
cucuacaauugaaaaguguuuu

SEQ ID NO: 75213 - RNA, 23 nt, Artificial Sequence
  Synthetic
ucucuacaauugaaaaguguuuu

SEQ ID NO: 75214 - RNA, 19 nt, Artificial Sequence
  Synthetic
cguccugagacaguguuuu

SEQ ID NO: 75215 - RNA, 20 nt, Artificial Sequence
  Synthetic
acguccugagacaguguuuu

SEQ ID NO: 75216 - RNA, 21 nt, Artificial Sequence
  Synthetic
cacguccugagacaguguuuu

SEQ ID NO: 75217 - RNA, 22 nt, Artificial Sequence
  Synthetic
ucacguccugagacaguguuuu

SEQ ID NO: 75218 - RNA, 23 nt, Artificial Sequence
  Synthetic
aucacguccugagacaguguuuu

SEQ ID NO: 75219 - RNA, 24 nt, Artificial Sequence
  Synthetic
uaucacguccugagacaguguuuu

SEQ ID NO: 75220 - RNA, 18 nt, Artificial Sequence
  Synthetic
cauaggauuuuguguuuu

SEQ ID NO: 75221 - RNA, 19 nt, Artificial Sequence
  Synthetic
acauaggauuuuguguuuu

SEQ ID NO: 75222 - RNA, 20 nt, Artificial Sequence
  Synthetic
aacauaggauuuuguguuuu

SEQ ID NO: 75223 - RNA, 22 nt, Artificial Sequence
  Synthetic
ugaacauaggauuuuguguuuu

SEQ ID NO: 75224 - RNA, 23 nt, Artificial Sequence
  Synthetic
augaacauaggauuuuguguuuu

SEQ ID NO: 75225 - RNA, 24 nt, Artificial Sequence
  Synthetic
uaugaacauaggauuuuguguuuu

SEQ ID NO: 75226 - RNA, 19 nt, Artificial Sequence
  Synthetic
ugcguuuccucuuuguuuu

SEQ ID NO: 75227 - RNA, 20 nt, Artificial Sequence
  Synthetic
cugcguuuccucuuuguuuu

SEQ ID NO: 75228 - RNA, 21 nt, Artificial Sequence
  Synthetic
acugcguuuccucuuuguuuu

SEQ ID NO: 75229 - RNA, 22 nt, Artificial Sequence
  Synthetic
cacugcguuuccucuuuguuuu

SEQ ID NO: 75230 - RNA, 23 nt, Artificial Sequence
  Synthetic
acacugcguuuccucuuuguuuu

SEQ ID NO: 75231 - RNA, 24 nt, Artificial Sequence
  Synthetic
aacacugcguuuccucuuuguuuu

SEQ ID NO: 75232 - RNA, 18 nt, Artificial Sequence
  Synthetic
uaaccuugaauaauuuuu

SEQ ID NO: 75233 - RNA, 19 nt, Artificial Sequence
  Synthetic
cuaaccuugaauaauuuuu

SEQ ID NO: 75234 - RNA, 20 nt, Artificial Sequence
  Synthetic
ucuaaccuugaauaauuuuu

SEQ ID NO: 75235 - RNA, 21 nt, Artificial Sequence
  Synthetic
cucuaaccuugaauaauuuuu

SEQ ID NO: 75236 - RNA, 22 nt, Artificial Sequence
  Synthetic
ccucuaaccuugaauaauuuuu

SEQ ID NO: 75237 - RNA, 23 nt, Artificial Sequence
  Synthetic
uccucuaaccuugaauaauuuuu

SEQ ID NO: 75238 - RNA, 24 nt, Artificial Sequence
  Synthetic
uuccucuaaccuugaauaauuuuu

SEQ ID NO: 75239 - RNA, 19 nt, Artificial Sequence
  Synthetic
ugcuuccuugcacauuuuu

SEQ ID NO: 75240 - RNA, 20 nt, Artificial Sequence
  Synthetic
uugcuuccuugcacauuuuu

SEQ ID NO: 75241 - RNA, 22 nt, Artificial Sequence
  Synthetic
aguugcuuccuugcacauuuuu

SEQ ID NO: 75242 - RNA, 23 nt, Artificial Sequence
  Synthetic
caguugcuuccuugcacauuuuu

SEQ ID NO: 75243 - RNA, 24 nt, Artificial Sequence
  Synthetic
acaguugcuuccuugcacauuuuu

SEQ ID NO: 75244 - RNA, 18 nt, Artificial Sequence
  Synthetic
aucaccuucgacauuuuu

SEQ ID NO: 75245 - RNA, 19 nt, Artificial Sequence
  Synthetic
aaucaccuucgacauuuuu

SEQ ID NO: 75246 - RNA, 20 nt, Artificial Sequence
  Synthetic
aaaucaccuucgacauuuuu

SEQ ID NO: 75247 - RNA, 21 nt, Artificial Sequence
  Synthetic
aaaaucaccuucgacauuuuu

SEQ ID NO: 75248 - RNA, 22 nt, Artificial Sequence
  Synthetic
aaaaaucaccuucgacauuuuu

SEQ ID NO: 75249 - RNA, 23 nt, Artificial Sequence
  Synthetic
caaaaaucaccuucgacauuuuu

SEQ ID NO: 75250 - RNA, 24 nt, Artificial Sequence
  Synthetic
ccaaaaaucaccuucgacauuuuu

SEQ ID NO: 75251 - RNA, 23 nt, Artificial Sequence
  Synthetic
aggaaaaaagaaacaucauuuuu

SEQ ID NO: 75252 - RNA, 24 nt, Artificial Sequence
  Synthetic
uaggaaaaaagaaacaucauuuuu

SEQ ID NO: 75253 - RNA, 19 nt, Artificial Sequence
  Synthetic
aggggagggacucauuuuu

SEQ ID NO: 75254 - RNA, 20 nt, Artificial Sequence
  Synthetic
caggggagggacucauuuuu

SEQ ID NO: 75255 - RNA, 21 nt, Artificial Sequence
  Synthetic
acaggggagggacucauuuuu

SEQ ID NO: 75256 - RNA, 22 nt, Artificial Sequence
  Synthetic
cacaggggagggacucauuuuu

SEQ ID NO: 75257 - RNA, 23 nt, Artificial Sequence
  Synthetic
ucacaggggagggacucauuuuu

SEQ ID NO: 75258 - RNA, 24 nt, Artificial Sequence
  Synthetic
cucacaggggagggacucauuuuu

SEQ ID NO: 75259 - RNA, 18 nt, Artificial Sequence
  Synthetic
aauucaguagugauuuuu

SEQ ID NO: 75260 - RNA, 19 nt, Artificial Sequence
  Synthetic
caauucaguagugauuuuu

SEQ ID NO: 75261 - RNA, 20 nt, Artificial Sequence
  Synthetic
acaauucaguagugauuuuu

SEQ ID NO: 75262 - RNA, 21 nt, Artificial Sequence
  Synthetic
aacaauucaguagugauuuuu

SEQ ID NO: 75263 - RNA, 22 nt, Artificial Sequence
  Synthetic
aaacaauucaguagugauuuuu

SEQ ID NO: 75264 - RNA, 23 nt, Artificial Sequence
  Synthetic
uaaacaauucaguagugauuuuu

SEQ ID NO: 75265 - RNA, 21 nt, Artificial Sequence
  Synthetic
uggaaaauauacuauauuuuu

SEQ ID NO: 75266 - RNA, 22 nt, Artificial Sequence
  Synthetic
auggaaaauauacuauauuuuu

SEQ ID NO: 75267 - RNA, 23 nt, Artificial Sequence
  Synthetic
cauggaaaauauacuauauuuuu

SEQ ID NO: 75268 - RNA, 24 nt, Artificial Sequence
  Synthetic
acauggaaaauauacuauauuuuu

SEQ ID NO: 75269 - RNA, 18 nt, Artificial Sequence
  Synthetic
acuauauucccuauuuuu

SEQ ID NO: 75270 - RNA, 19 nt, Artificial Sequence
  Synthetic
uacuauauucccuauuuuu

SEQ ID NO: 75271 - RNA, 20 nt, Artificial Sequence
  Synthetic
uuacuauauucccuauuuuu

SEQ ID NO: 75272 - RNA, 21 nt, Artificial Sequence
  Synthetic
cuuacuauauucccuauuuuu

SEQ ID NO: 75273 - RNA, 22 nt, Artificial Sequence
  Synthetic
ucuuacuauauucccuauuuuu

SEQ ID NO: 75274 - RNA, 23 nt, Artificial Sequence
  Synthetic
cucuuacuauauucccuauuuuu

SEQ ID NO: 75275 - RNA, 24 nt, Artificial Sequence
  Synthetic
ccucuuacuauauucccuauuuuu

SEQ ID NO: 75276 - RNA, 18 nt, Artificial Sequence
  Synthetic
uuaucuucaucuauuuuu

SEQ ID NO: 75277 - RNA, 19 nt, Artificial Sequence
  Synthetic
cuuaucuucaucuauuuuu

SEQ ID NO: 75278 - RNA, 20 nt, Artificial Sequence
  Synthetic
ucuuaucuucaucuauuuuu

SEQ ID NO: 75279 - RNA, 21 nt, Artificial Sequence
  Synthetic
uucuuaucuucaucuauuuuu

SEQ ID NO: 75280 - RNA, 22 nt, Artificial Sequence
  Synthetic
cuucuuaucuucaucuauuuuu

SEQ ID NO: 75281 - RNA, 23 nt, Artificial Sequence
  Synthetic
ucuucuuaucuucaucuauuuuu

SEQ ID NO: 75282 - RNA, 24 nt, Artificial Sequence
  Synthetic
aucuucuuaucuucaucuauuuuu

SEQ ID NO: 75283 - RNA, 21 nt, Artificial Sequence
  Synthetic
uuauauauuuuguguauuuuu

SEQ ID NO: 75284 - RNA, 22 nt, Artificial Sequence
  Synthetic
uuuauauauuuuguguauuuuu

SEQ ID NO: 75285 - RNA, 23 nt, Artificial Sequence
  Synthetic
uuuuauauauuuuguguauuuuu

SEQ ID NO: 75286 - RNA, 24 nt, Artificial Sequence
  Synthetic
cuuuuauauauuuuguguauuuuu

SEQ ID NO: 75287 - RNA, 21 nt, Artificial Sequence
  Synthetic
caaacaaaaaguuguauuuuu

SEQ ID NO: 75288 - RNA, 23 nt, Artificial Sequence
  Synthetic
ugcaaacaaaaaguuguauuuuu

SEQ ID NO: 75289 - RNA, 24 nt, Artificial Sequence
  Synthetic
augcaaacaaaaaguuguauuuuu

SEQ ID NO: 75290 - RNA, 18 nt, Artificial Sequence
  Synthetic
uagguucuguaacuuuuu

SEQ ID NO: 75291 - RNA, 19 nt, Artificial Sequence
  Synthetic
uuagguucuguaacuuuuu

SEQ ID NO: 75292 - RNA, 21 nt, Artificial Sequence
  Synthetic
uguuagguucuguaacuuuuu

SEQ ID NO: 75293 - RNA, 22 nt, Artificial Sequence
  Synthetic
auguuagguucuguaacuuuuu

SEQ ID NO: 75294 - RNA, 24 nt, Artificial Sequence
  Synthetic
ugauguuagguucuguaacuuuuu

SEQ ID NO: 75295 - RNA, 18 nt, Artificial Sequence
  Synthetic
aggcauuagugacuuuuu

SEQ ID NO: 75296 - RNA, 20 nt, Artificial Sequence
  Synthetic
agaggcauuagugacuuuuu

SEQ ID NO: 75297 - RNA, 21 nt, Artificial Sequence
  Synthetic
cagaggcauuagugacuuuuu

SEQ ID NO: 75298 - RNA, 22 nt, Artificial Sequence
  Synthetic
acagaggcauuagugacuuuuu

SEQ ID NO: 75299 - RNA, 18 nt, Artificial Sequence
  Synthetic
ugccaggaaauccuuuuu

SEQ ID NO: 75300 - RNA, 19 nt, Artificial Sequence
  Synthetic
cugccaggaaauccuuuuu

SEQ ID NO: 75301 - RNA, 20 nt, Artificial Sequence
  Synthetic
ucugccaggaaauccuuuuu

SEQ ID NO: 75302 - RNA, 21 nt, Artificial Sequence
  Synthetic
uucugccaggaaauccuuuuu

SEQ ID NO: 75303 - RNA, 22 nt, Artificial Sequence
  Synthetic
auucugccaggaaauccuuuuu

SEQ ID NO: 75304 - RNA, 23 nt, Artificial Sequence
  Synthetic
cauucugccaggaaauccuuuuu

SEQ ID NO: 75305 - RNA, 24 nt, Artificial Sequence
  Synthetic
ccauucugccaggaaauccuuuuu

SEQ ID NO: 75306 - RNA, 18 nt, Artificial Sequence
  Synthetic
uagauuacccagcuuuuu

SEQ ID NO: 75307 - RNA, 19 nt, Artificial Sequence
  Synthetic
uuagauuacccagcuuuuu

SEQ ID NO: 75308 - RNA, 20 nt, Artificial Sequence
  Synthetic
cuuagauuacccagcuuuuu

SEQ ID NO: 75309 - RNA, 21 nt, Artificial Sequence
  Synthetic
ucuuagauuacccagcuuuuu

SEQ ID NO: 75310 - RNA, 18 nt, Artificial Sequence
  Synthetic
cucacuaaggcucuuuuu

SEQ ID NO: 75311 - RNA, 19 nt, Artificial Sequence
  Synthetic
ccucacuaaggcucuuuuu

SEQ ID NO: 75312 - RNA, 20 nt, Artificial Sequence
  Synthetic
uccucacuaaggcucuuuuu

SEQ ID NO: 75313 - RNA, 21 nt, Artificial Sequence
  Synthetic
uuccucacuaaggcucuuuuu

SEQ ID NO: 75314 - RNA, 23 nt, Artificial Sequence
  Synthetic
aguuccucacuaaggcucuuuuu

SEQ ID NO: 75315 - RNA, 24 nt, Artificial Sequence
  Synthetic
aaguuccucacuaaggcucuuuuu

SEQ ID NO: 75316 - RNA, 18 nt, Artificial Sequence
  Synthetic
uuucaccagucucuuuuu

SEQ ID NO: 75317 - RNA, 19 nt, Artificial Sequence
  Synthetic
auuucaccagucucuuuuu

SEQ ID NO: 75318 - RNA, 21 nt, Artificial Sequence
  Synthetic
ugauuucaccagucucuuuuu

SEQ ID NO: 75319 - RNA, 23 nt, Artificial Sequence
  Synthetic
agugauuucaccagucucuuuuu

SEQ ID NO: 75320 - RNA, 24 nt, Artificial Sequence
  Synthetic
uagugauuucaccagucucuuuuu

SEQ ID NO: 75321 - RNA, 21 nt, Artificial Sequence
  Synthetic
aauuuuuuucugauucuuuuu

SEQ ID NO: 75322 - RNA, 22 nt, Artificial Sequence
  Synthetic
caauuuuuuucugauucuuuuu

SEQ ID NO: 75323 - RNA, 23 nt, Artificial Sequence
  Synthetic
ucaauuuuuuucugauucuuuuu

SEQ ID NO: 75324 - RNA, 24 nt, Artificial Sequence
  Synthetic
aucaauuuuuuucugauucuuuuu

SEQ ID NO: 75325 - RNA, 22 nt, Artificial Sequence
  Synthetic
agccuacuaaaucagaguuuuu

SEQ ID NO: 75326 - RNA, 23 nt, Artificial Sequence
  Synthetic
aagccuacuaaaucagaguuuuu

SEQ ID NO: 75327 - RNA, 24 nt, Artificial Sequence
  Synthetic
caagccuacuaaaucagaguuuuu

SEQ ID NO: 75328 - RNA, 18 nt, Artificial Sequence
  Synthetic
agaaagcagaagguuuuu

SEQ ID NO: 75329 - RNA, 19 nt, Artificial Sequence
  Synthetic
cagaaagcagaagguuuuu

SEQ ID NO: 75330 - RNA, 20 nt, Artificial Sequence
  Synthetic
ucagaaagcagaagguuuuu

SEQ ID NO: 75331 - RNA, 21 nt, Artificial Sequence
  Synthetic
cucagaaagcagaagguuuuu

SEQ ID NO: 75332 - RNA, 22 nt, Artificial Sequence
  Synthetic
acucagaaagcagaagguuuuu

SEQ ID NO: 75333 - RNA, 23 nt, Artificial Sequence
  Synthetic
aacucagaaagcagaagguuuuu

SEQ ID NO: 75334 - RNA, 24 nt, Artificial Sequence
  Synthetic
uaacucagaaagcagaagguuuuu

SEQ ID NO: 75335 - RNA, 18 nt, Artificial Sequence
  Synthetic
uaccuuggcuggguuuuu

SEQ ID NO: 75336 - RNA, 19 nt, Artificial Sequence
  Synthetic
uuaccuuggcuggguuuuu

SEQ ID NO: 75337 - RNA, 20 nt, Artificial Sequence
  Synthetic
cuuaccuuggcuggguuuuu

SEQ ID NO: 75338 - RNA, 21 nt, Artificial Sequence
  Synthetic
ucuuaccuuggcuggguuuuu

SEQ ID NO: 75339 - RNA, 22 nt, Artificial Sequence
  Synthetic
uucuuaccuuggcuggguuuuu

SEQ ID NO: 75340 - RNA, 23 nt, Artificial Sequence
  Synthetic
uuucuuaccuuggcuggguuuuu

SEQ ID NO: 75341 - RNA, 24 nt, Artificial Sequence
  Synthetic
uuuucuuaccuuggcuggguuuuu

SEQ ID NO: 75342 - RNA, 20 nt, Artificial Sequence
  Synthetic
aggcauuguuaacuguuuuu

SEQ ID NO: 75343 - RNA, 23 nt, Artificial Sequence
  Synthetic
uggaggcauuguuaacuguuuuu

SEQ ID NO: 75344 - RNA, 24 nt, Artificial Sequence
  Synthetic
uuggaggcauuguuaacuguuuuu

SEQ ID NO: 75345 - RNA, 18 nt, Artificial Sequence
  Synthetic
uaaauauuagcuguuuuu

SEQ ID NO: 75346 - RNA, 19 nt, Artificial Sequence
  Synthetic
uuaaauauuagcuguuuuu

SEQ ID NO: 75347 - RNA, 20 nt, Artificial Sequence
  Synthetic
auuaaauauuagcuguuuuu

SEQ ID NO: 75348 - RNA, 21 nt, Artificial Sequence
  Synthetic
cauuaaauauuagcuguuuuu

SEQ ID NO: 75349 - RNA, 22 nt, Artificial Sequence
  Synthetic
ucauuaaauauuagcuguuuuu

SEQ ID NO: 75350 - RNA, 23 nt, Artificial Sequence
  Synthetic
cucauuaaauauuagcuguuuuu

SEQ ID NO: 75351 - RNA, 21 nt, Artificial Sequence
  Synthetic
caaguaagccaauuuguuuuu

SEQ ID NO: 75352 - RNA, 22 nt, Artificial Sequence
  Synthetic
acaaguaagccaauuuguuuuu

SEQ ID NO: 75353 - RNA, 18 nt, Artificial Sequence
  Synthetic
ugaggccacuuuguuuuu

SEQ ID NO: 75354 - RNA, 20 nt, Artificial Sequence
  Synthetic
agugaggccacuuuguuuuu

SEQ ID NO: 75355 - RNA, 22 nt, Artificial Sequence
  Synthetic
agagugaggccacuuuguuuuu

SEQ ID NO: 75356 - RNA, 23 nt, Artificial Sequence
  Synthetic
aagagugaggccacuuuguuuuu

SEQ ID NO: 75357 - RNA, 24 nt, Artificial Sequence
  Synthetic
uaagagugaggccacuuuguuuuu

SEQ ID NO: 75358 - RNA, 18 nt, Artificial Sequence
  Synthetic
ucaaucagcuaauuuuuu

SEQ ID NO: 75359 - RNA, 19 nt, Artificial Sequence
  Synthetic
uucaaucagcuaauuuuuu

SEQ ID NO: 75360 - RNA, 22 nt, Artificial Sequence
  Synthetic
ugguucaaucagcuaauuuuuu

SEQ ID NO: 75361 - RNA, 23 nt, Artificial Sequence
  Synthetic
cugguucaaucagcuaauuuuuu

SEQ ID NO: 75362 - RNA, 24 nt, Artificial Sequence
  Synthetic
acugguucaaucagcuaauuuuuu

SEQ ID NO: 75363 - RNA, 21 nt, Artificial Sequence
  Synthetic
uuaauauuauucuaauuuuuu

SEQ ID NO: 75364 - RNA, 22 nt, Artificial Sequence
  Synthetic
cuuaauauuauucuaauuuuuu

SEQ ID NO: 75365 - RNA, 23 nt, Artificial Sequence
  Synthetic
acuuaauauuauucuaauuuuuu

SEQ ID NO: 75366 - RNA, 24 nt, Artificial Sequence
  Synthetic
uacuuaauauuauucuaauuuuuu

SEQ ID NO: 75367 - RNA, 18 nt, Artificial Sequence
  Synthetic
uguucucuaccauuuuuu

SEQ ID NO: 75368 - RNA, 19 nt, Artificial Sequence
  Synthetic
auguucucuaccauuuuuu

SEQ ID NO: 75369 - RNA, 20 nt, Artificial Sequence
  Synthetic
uauguucucuaccauuuuuu

SEQ ID NO: 75370 - RNA, 21 nt, Artificial Sequence
  Synthetic
uuauguucucuaccauuuuuu

SEQ ID NO: 75371 - RNA, 22 nt, Artificial Sequence
  Synthetic
uuuauguucucuaccauuuuuu

SEQ ID NO: 75372 - RNA, 23 nt, Artificial Sequence
  Synthetic
uuuuauguucucuaccauuuuuu

SEQ ID NO: 75373 - RNA, 24 nt, Artificial Sequence
  Synthetic
cuuuuauguucucuaccauuuuuu

SEQ ID NO: 75374 - RNA, 18 nt, Artificial Sequence
  Synthetic
cuuccagccccauuuuuu

SEQ ID NO: 75375 - RNA, 19 nt, Artificial Sequence
  Synthetic
acuuccagccccauuuuuu

SEQ ID NO: 75376 - RNA, 20 nt, Artificial Sequence
  Synthetic
uacuuccagccccauuuuuu

SEQ ID NO: 75377 - RNA, 21 nt, Artificial Sequence
  Synthetic
uuacuuccagccccauuuuuu

SEQ ID NO: 75378 - RNA, 22 nt, Artificial Sequence
  Synthetic
auuacuuccagccccauuuuuu

SEQ ID NO: 75379 - RNA, 23 nt, Artificial Sequence
  Synthetic
aauuacuuccagccccauuuuuu

SEQ ID NO: 75380 - RNA, 21 nt, Artificial Sequence
  Synthetic
acaaguaaauaacacuuuuuu

SEQ ID NO: 75381 - RNA, 22 nt, Artificial Sequence
  Synthetic
aacaaguaaauaacacuuuuuu

SEQ ID NO: 75382 - RNA, 23 nt, Artificial Sequence
  Synthetic
uaacaaguaaauaacacuuuuuu

SEQ ID NO: 75383 - RNA, 24 nt, Artificial Sequence
  Synthetic
cuaacaaguaaauaacacuuuuuu

SEQ ID NO: 75384 - RNA, 21 nt, Artificial Sequence
  Synthetic
auuauucuacuuuccuuuuuu

SEQ ID NO: 75385 - RNA, 22 nt, Artificial Sequence
  Synthetic
aauuauucuacuuuccuuuuuu

SEQ ID NO: 75386 - RNA, 23 nt, Artificial Sequence
  Synthetic
uaauuauucuacuuuccuuuuuu

SEQ ID NO: 75387 - RNA, 18 nt, Artificial Sequence
  Synthetic
aucucuugggaguuuuuu

SEQ ID NO: 75388 - RNA, 19 nt, Artificial Sequence
  Synthetic
caucucuugggaguuuuuu

SEQ ID NO: 75389 - RNA, 20 nt, Artificial Sequence
  Synthetic
acaucucuugggaguuuuuu

SEQ ID NO: 75390 - RNA, 21 nt, Artificial Sequence
  Synthetic
aacaucucuugggaguuuuuu

SEQ ID NO: 75391 - RNA, 22 nt, Artificial Sequence
  Synthetic
caacaucucuugggaguuuuuu

SEQ ID NO: 75392 - RNA, 23 nt, Artificial Sequence
  Synthetic
ucaacaucucuugggaguuuuuu

SEQ ID NO: 75393 - RNA, 24 nt, Artificial Sequence
  Synthetic
cucaacaucucuugggaguuuuuu

SEQ ID NO: 75394 - RNA, 21 nt, Artificial Sequence
  Synthetic
aacaacuuaaauuuguuuuuu

SEQ ID NO: 75395 - RNA, 22 nt, Artificial Sequence
  Synthetic
caacaacuuaaauuuguuuuuu

SEQ ID NO: 75396 - RNA, 23 nt, Artificial Sequence
  Synthetic
ucaacaacuuaaauuuguuuuuu

SEQ ID NO: 75397 - RNA, 24 nt, Artificial Sequence
  Synthetic
uucaacaacuuaaauuuguuuuuu

SEQ ID NO: 75398 - RNA, 21 nt, Artificial Sequence
  Synthetic
cauuuaagaaaagauuuuuuu

SEQ ID NO: 75399 - RNA, 22 nt, Artificial Sequence
  Synthetic
acauuuaagaaaagauuuuuuu

SEQ ID NO: 75400 - RNA, 23 nt, Artificial Sequence
  Synthetic
cacauuuaagaaaagauuuuuuu

SEQ ID NO: 75401 - RNA, 24 nt, Artificial Sequence
  Synthetic
acacauuuaagaaaagauuuuuuu

SEQ ID NO: 75402 - RNA, 21 nt, Artificial Sequence
  Synthetic
aaguaauccauuuuuuuuuuu

SEQ ID NO: 75403 - RNA, 22 nt, Artificial Sequence
  Synthetic
aaaguaauccauuuuuuuuuuu

SEQ ID NO: 75404 - RNA, 23 nt, Artificial Sequence
  Synthetic
uaaaguaauccauuuuuuuuuuu

SEQ ID NO: 75405 - RNA, 24 nt, Artificial Sequence
  Synthetic
cuaaaguaauccauuuuuuuuuuu

SEQ ID NO: 75406 - RNA, 21 nt, Artificial Sequence
  Synthetic
caacuacccugaaaaaaaaaa

SEQ ID NO: 75407 - RNA, 22 nt, Artificial Sequence
  Synthetic
acaacuacccugaaaaaaaaaa

SEQ ID NO: 75408 - RNA, 23 nt, Artificial Sequence
  Synthetic
aacaacuacccugaaaaaaaaaa

SEQ ID NO: 75409 - RNA, 22 nt, Artificial Sequence
  Synthetic
aggcauaguacugaaaaaaaaa

SEQ ID NO: 75410 - RNA, 23 nt, Artificial Sequence
  Synthetic
aaggcauaguacugaaaaaaaaa

SEQ ID NO: 75411 - RNA, 21 nt, Artificial Sequence
  Synthetic
caaaauaguauagaaaaaaaa

SEQ ID NO: 75412 - RNA, 19 nt, Artificial Sequence
  Synthetic
ugcgacagaggaaaaaaaa

SEQ ID NO: 75413 - RNA, 20 nt, Artificial Sequence
  Synthetic
uugcgacagaggaaaaaaaa

SEQ ID NO: 75414 - RNA, 21 nt, Artificial Sequence
  Synthetic
cuugcgacagaggaaaaaaaa

SEQ ID NO: 75415 - RNA, 22 nt, Artificial Sequence
  Synthetic
acuugcgacagaggaaaaaaaa

SEQ ID NO: 75416 - RNA, 23 nt, Artificial Sequence
  Synthetic
uacuugcgacagaggaaaaaaaa

SEQ ID NO: 75417 - RNA, 24 nt, Artificial Sequence
  Synthetic
uuacuugcgacagaggaaaaaaaa

SEQ ID NO: 75418 - RNA, 18 nt, Artificial Sequence
  Synthetic
acacucguaagaaaaaaa

SEQ ID NO: 75419 - RNA, 19 nt, Artificial Sequence
  Synthetic
cacacucguaagaaaaaaa

SEQ ID NO: 75420 - RNA, 20 nt, Artificial Sequence
  Synthetic
ucacacucguaagaaaaaaa

SEQ ID NO: 75421 - RNA, 21 nt, Artificial Sequence
  Synthetic
cucacacucguaagaaaaaaa

SEQ ID NO: 75422 - RNA, 22 nt, Artificial Sequence
  Synthetic
ucucacacucguaagaaaaaaa

SEQ ID NO: 75423 - RNA, 23 nt, Artificial Sequence
  Synthetic
aucucacacucguaagaaaaaaa

SEQ ID NO: 75424 - RNA, 24 nt, Artificial Sequence
  Synthetic
aaucucacacucguaagaaaaaaa

SEQ ID NO: 75425 - RNA, 21 nt, Artificial Sequence
  Synthetic
uauuuuucucagguaaaaaaa

SEQ ID NO: 75426 - RNA, 22 nt, Artificial Sequence
  Synthetic
auauuuuucucagguaaaaaaa

SEQ ID NO: 75427 - RNA, 23 nt, Artificial Sequence
  Synthetic
aauauuuuucucagguaaaaaaa

SEQ ID NO: 75428 - RNA, 24 nt, Artificial Sequence
  Synthetic
caauauuuuucucagguaaaaaaa

SEQ ID NO: 75429 - RNA, 21 nt, Artificial Sequence
  Synthetic
aaaaacuuuuauuuaaaaaaa

SEQ ID NO: 75430 - RNA, 22 nt, Artificial Sequence
  Synthetic
caaaaacuuuuauuuaaaaaaa

SEQ ID NO: 75431 - RNA, 23 nt, Artificial Sequence
  Synthetic
acaaaaacuuuuauuuaaaaaaa

SEQ ID NO: 75432 - RNA, 24 nt, Artificial Sequence
  Synthetic
uacaaaaacuuuuauuuaaaaaaa

SEQ ID NO: 75433 - RNA, 21 nt, Artificial Sequence
  Synthetic
ugaaacugaaaaagcaaaaaa

SEQ ID NO: 75434 - RNA, 22 nt, Artificial Sequence
  Synthetic
cugaaacugaaaaagcaaaaaa

SEQ ID NO: 75435 - RNA, 18 nt, Artificial Sequence
  Synthetic
agccuuugacgcaaaaaa

SEQ ID NO: 75436 - RNA, 19 nt, Artificial Sequence
  Synthetic
cagccuuugacgcaaaaaa

SEQ ID NO: 75437 - RNA, 20 nt, Artificial Sequence
  Synthetic
ccagccuuugacgcaaaaaa

SEQ ID NO: 75438 - RNA, 21 nt, Artificial Sequence
  Synthetic
uccagccuuugacgcaaaaaa

SEQ ID NO: 75439 - RNA, 22 nt, Artificial Sequence
  Synthetic
auccagccuuugacgcaaaaaa

SEQ ID NO: 75440 - RNA, 24 nt, Artificial Sequence
  Synthetic
ugauccagccuuugacgcaaaaaa

SEQ ID NO: 75441 - RNA, 19 nt, Artificial Sequence
  Synthetic
ugccuuguccuucaaaaaa

SEQ ID NO: 75442 - RNA, 20 nt, Artificial Sequence
  Synthetic
cugccuuguccuucaaaaaa

SEQ ID NO: 75443 - RNA, 21 nt, Artificial Sequence
  Synthetic
ucugccuuguccuucaaaaaa

SEQ ID NO: 75444 - RNA, 22 nt, Artificial Sequence
  Synthetic
uucugccuuguccuucaaaaaa

SEQ ID NO: 75445 - RNA, 24 nt, Artificial Sequence
  Synthetic
uguucugccuuguccuucaaaaaa

SEQ ID NO: 75446 - RNA, 18 nt, Artificial Sequence
  Synthetic
ccagacauuaagaaaaaa

SEQ ID NO: 75447 - RNA, 20 nt, Artificial Sequence
  Synthetic
ugccagacauuaagaaaaaa

SEQ ID NO: 75448 - RNA, 21 nt, Artificial Sequence
  Synthetic
cugccagacauuaagaaaaaa

SEQ ID NO: 75449 - RNA, 22 nt, Artificial Sequence
  Synthetic
ccugccagacauuaagaaaaaa

SEQ ID NO: 75450 - RNA, 23 nt, Artificial Sequence
  Synthetic
cccugccagacauuaagaaaaaa

SEQ ID NO: 75451 - RNA, 21 nt, Artificial Sequence
  Synthetic
uaauauuucugguagaaaaaa

SEQ ID NO: 75452 - RNA, 22 nt, Artificial Sequence
  Synthetic
uuaauauuucugguagaaaaaa

SEQ ID NO: 75453 - RNA, 23 nt, Artificial Sequence
  Synthetic
cuuaauauuucugguagaaaaaa

SEQ ID NO: 75454 - RNA, 24 nt, Artificial Sequence
  Synthetic
ucuuaauauuucugguagaaaaaa

SEQ ID NO: 75455 - RNA, 23 nt, Artificial Sequence
  Synthetic
ugguaaaguuuucauggaaaaaa

SEQ ID NO: 75456 - RNA, 24 nt, Artificial Sequence
  Synthetic
cugguaaaguuuucauggaaaaaa

SEQ ID NO: 75457 - RNA, 18 nt, Artificial Sequence
  Synthetic
uaagcuuagaugaaaaaa

SEQ ID NO: 75458 - RNA, 21 nt, Artificial Sequence
  Synthetic
uaacuuucaaguaauaaaaaa

SEQ ID NO: 75459 - RNA, 22 nt, Artificial Sequence
  Synthetic
uuaacuuucaaguaauaaaaaa

SEQ ID NO: 75460 - RNA, 24 nt, Artificial Sequence
  Synthetic
aguuaacuuucaaguaauaaaaaa

SEQ ID NO: 75461 - RNA, 18 nt, Artificial Sequence
  Synthetic
uggaacagagauaaaaaa

SEQ ID NO: 75462 - RNA, 19 nt, Artificial Sequence
  Synthetic
uuggaacagagauaaaaaa

SEQ ID NO: 75463 - RNA, 22 nt, Artificial Sequence
  Synthetic
agguuggaacagagauaaaaaa

SEQ ID NO: 75464 - RNA, 23 nt, Artificial Sequence
  Synthetic
cagguuggaacagagauaaaaaa

SEQ ID NO: 75465 - RNA, 24 nt, Artificial Sequence
  Synthetic
acagguuggaacagagauaaaaaa

SEQ ID NO: 75466 - RNA, 21 nt, Artificial Sequence
  Synthetic
uauaccauuuucuuuaaaaaa

SEQ ID NO: 75467 - RNA, 22 nt, Artificial Sequence
  Synthetic
uuauaccauuuucuuuaaaaaa

SEQ ID NO: 75468 - RNA, 23 nt, Artificial Sequence
  Synthetic
uuuauaccauuuucuuuaaaaaa

SEQ ID NO: 75469 - RNA, 24 nt, Artificial Sequence
  Synthetic
uuuuauaccauuuucuuuaaaaaa

SEQ ID NO: 75470 - RNA, 21 nt, Artificial Sequence
  Synthetic
cauguaauuugaaaacaaaaa

SEQ ID NO: 75471 - RNA, 22 nt, Artificial Sequence
  Synthetic
acauguaauuugaaaacaaaaa

SEQ ID NO: 75472 - RNA, 18 nt, Artificial Sequence
  Synthetic
cgcuucuaucaacaaaaa

SEQ ID NO: 75473 - RNA, 19 nt, Artificial Sequence
  Synthetic
ccgcuucuaucaacaaaaa

SEQ ID NO: 75474 - RNA, 20 nt, Artificial Sequence
  Synthetic
uccgcuucuaucaacaaaaa

SEQ ID NO: 75475 - RNA, 21 nt, Artificial Sequence
  Synthetic
uuccgcuucuaucaacaaaaa

SEQ ID NO: 75476 - RNA, 22 nt, Artificial Sequence
  Synthetic
uuuccgcuucuaucaacaaaaa

SEQ ID NO: 75477 - RNA, 24 nt, Artificial Sequence
  Synthetic
cguuuccgcuucuaucaacaaaaa

SEQ ID NO: 75478 - RNA, 19 nt, Artificial Sequence
  Synthetic
ugagaucgaaagacaaaaa

SEQ ID NO: 75479 - RNA, 20 nt, Artificial Sequence
  Synthetic
uugagaucgaaagacaaaaa

SEQ ID NO: 75480 - RNA, 21 nt, Artificial Sequence
  Synthetic
cuugagaucgaaagacaaaaa

SEQ ID NO: 75481 - RNA, 22 nt, Artificial Sequence
  Synthetic
acuugagaucgaaagacaaaaa

SEQ ID NO: 75482 - RNA, 23 nt, Artificial Sequence
  Synthetic
aacuugagaucgaaagacaaaaa

SEQ ID NO: 75483 - RNA, 24 nt, Artificial Sequence
  Synthetic
uaacuugagaucgaaagacaaaaa

SEQ ID NO: 75484 - RNA, 18 nt, Artificial Sequence
  Synthetic
ucacaaagccgacaaaaa

SEQ ID NO: 75485 - RNA, 19 nt, Artificial Sequence
  Synthetic
aucacaaagccgacaaaaa

SEQ ID NO: 75486 - RNA, 20 nt, Artificial Sequence
  Synthetic
aaucacaaagccgacaaaaa

SEQ ID NO: 75487 - RNA, 21 nt, Artificial Sequence
  Synthetic
caaucacaaagccgacaaaaa

SEQ ID NO: 75488 - RNA, 23 nt, Artificial Sequence
  Synthetic
agcaaucacaaagccgacaaaaa

SEQ ID NO: 75489 - RNA, 24 nt, Artificial Sequence
  Synthetic
aagcaaucacaaagccgacaaaaa

SEQ ID NO: 75490 - RNA, 21 nt, Artificial Sequence
  Synthetic
cugcucucagcaaaccaaaaa

SEQ ID NO: 75491 - RNA, 22 nt, Artificial Sequence
  Synthetic
acugcucucagcaaaccaaaaa

SEQ ID NO: 75492 - RNA, 23 nt, Artificial Sequence
  Synthetic
uacugcucucagcaaaccaaaaa

SEQ ID NO: 75493 - RNA, 24 nt, Artificial Sequence
  Synthetic
cuacugcucucagcaaaccaaaaa

SEQ ID NO: 75494 - RNA, 21 nt, Artificial Sequence
  Synthetic
aaaaaaucugaaauccaaaaa

SEQ ID NO: 75495 - RNA, 23 nt, Artificial Sequence
  Synthetic
ugaaaaaaucugaaauccaaaaa

SEQ ID NO: 75496 - RNA, 24 nt, Artificial Sequence
  Synthetic
cugaaaaaaucugaaauccaaaaa

SEQ ID NO: 75497 - RNA, 18 nt, Artificial Sequence
  Synthetic
agguccaaaguccaaaaa

SEQ ID NO: 75498 - RNA, 21 nt, Artificial Sequence
  Synthetic
uggagguccaaaguccaaaaa

SEQ ID NO: 75499 - RNA, 22 nt, Artificial Sequence
  Synthetic
uuggagguccaaaguccaaaaa

SEQ ID NO: 75500 - RNA, 23 nt, Artificial Sequence
  Synthetic
uuuggagguccaaaguccaaaaa

SEQ ID NO: 75501 - RNA, 24 nt, Artificial Sequence
  Synthetic
uuuuggagguccaaaguccaaaaa

SEQ ID NO: 75502 - RNA, 19 nt, Artificial Sequence
  Synthetic
agccuuuuagaagcaaaaa

SEQ ID NO: 75503 - RNA, 20 nt, Artificial Sequence
  Synthetic
aagccuuuuagaagcaaaaa

SEQ ID NO: 75504 - RNA, 19 nt, Artificial Sequence
  Synthetic
aggugguauacggcaaaaa

SEQ ID NO: 75505 - RNA, 20 nt, Artificial Sequence
  Synthetic
caggugguauacggcaaaaa

SEQ ID NO: 75506 - RNA, 23 nt, Artificial Sequence
  Synthetic
uggcaggugguauacggcaaaaa

SEQ ID NO: 75507 - RNA, 24 nt, Artificial Sequence
  Synthetic
uuggcaggugguauacggcaaaaa

SEQ ID NO: 75508 - RNA, 19 nt, Artificial Sequence
  Synthetic
aguuucauggugucaaaaa

SEQ ID NO: 75509 - RNA, 20 nt, Artificial Sequence
  Synthetic
caguuucauggugucaaaaa

SEQ ID NO: 75510 - RNA, 21 nt, Artificial Sequence
  Synthetic
acaguuucauggugucaaaaa

SEQ ID NO: 75511 - RNA, 22 nt, Artificial Sequence
  Synthetic
uacaguuucauggugucaaaaa

SEQ ID NO: 75512 - RNA, 23 nt, Artificial Sequence
  Synthetic
auacaguuucauggugucaaaaa

SEQ ID NO: 75513 - RNA, 24 nt, Artificial Sequence
  Synthetic
aauacaguuucauggugucaaaaa

SEQ ID NO: 75514 - RNA, 21 nt, Artificial Sequence
  Synthetic
aacuauaauuucuuucaaaaa

SEQ ID NO: 75515 - RNA, 22 nt, Artificial Sequence
  Synthetic
uaacuauaauuucuuucaaaaa

SEQ ID NO: 75516 - RNA, 23 nt, Artificial Sequence
  Synthetic
auaacuauaauuucuuucaaaaa

SEQ ID NO: 75517 - RNA, 24 nt, Artificial Sequence
  Synthetic
aauaacuauaauuucuuucaaaaa

SEQ ID NO: 75518 - RNA, 21 nt, Artificial Sequence
  Synthetic
aauuauacuucuaaagaaaaa

SEQ ID NO: 75519 - RNA, 22 nt, Artificial Sequence
  Synthetic
aaauuauacuucuaaagaaaaa

SEQ ID NO: 75520 - RNA, 23 nt, Artificial Sequence
  Synthetic
caaauuauacuucuaaagaaaaa

SEQ ID NO: 75521 - RNA, 24 nt, Artificial Sequence
  Synthetic
acaaauuauacuucuaaagaaaaa

SEQ ID NO: 75522 - RNA, 19 nt, Artificial Sequence
  Synthetic
ugagugcucuuaagaaaaa

SEQ ID NO: 75523 - RNA, 20 nt, Artificial Sequence
  Synthetic
cugagugcucuuaagaaaaa

SEQ ID NO: 75524 - RNA, 21 nt, Artificial Sequence
  Synthetic
ucugagugcucuuaagaaaaa

SEQ ID NO: 75525 - RNA, 23 nt, Artificial Sequence
  Synthetic
agucugagugcucuuaagaaaaa

SEQ ID NO: 75526 - RNA, 23 nt, Artificial Sequence
  Synthetic
agggcaaaaaagaugcagaaaaa

SEQ ID NO: 75527 - RNA, 18 nt, Artificial Sequence
  Synthetic
aucgaugaaagagaaaaa

SEQ ID NO: 75528 - RNA, 20 nt, Artificial Sequence
  Synthetic
ugaucgaugaaagagaaaaa

SEQ ID NO: 75529 - RNA, 21 nt, Artificial Sequence
  Synthetic
uugaucgaugaaagagaaaaa

SEQ ID NO: 75530 - RNA, 23 nt, Artificial Sequence
  Synthetic
uguugaucgaugaaagagaaaaa

SEQ ID NO: 75531 - RNA, 24 nt, Artificial Sequence
  Synthetic
uuguugaucgaugaaagagaaaaa

SEQ ID NO: 75532 - RNA, 18 nt, Artificial Sequence
  Synthetic
acaauuuccugagaaaaa

SEQ ID NO: 75533 - RNA, 19 nt, Artificial Sequence
  Synthetic
cacaauuuccugagaaaaa

SEQ ID NO: 75534 - RNA, 20 nt, Artificial Sequence
  Synthetic
acacaauuuccugagaaaaa

SEQ ID NO: 75535 - RNA, 23 nt, Artificial Sequence
  Synthetic
aggacacaauuuccugagaaaaa

SEQ ID NO: 75536 - RNA, 24 nt, Artificial Sequence
  Synthetic
aaggacacaauuuccugagaaaaa

SEQ ID NO: 75537 - RNA, 19 nt, Artificial Sequence
  Synthetic
aguggacuguuuggaaaaa

SEQ ID NO: 75538 - RNA, 20 nt, Artificial Sequence
  Synthetic
uaguggacuguuuggaaaaa

SEQ ID NO: 75539 - RNA, 21 nt, Artificial Sequence
  Synthetic
uuaguggacuguuuggaaaaa

SEQ ID NO: 75540 - RNA, 22 nt, Artificial Sequence
  Synthetic
auuaguggacuguuuggaaaaa

SEQ ID NO: 75541 - RNA, 24 nt, Artificial Sequence
  Synthetic
agauuaguggacuguuuggaaaaa

SEQ ID NO: 75542 - RNA, 18 nt, Artificial Sequence
  Synthetic
uuuguucugaaugaaaaa

SEQ ID NO: 75543 - RNA, 19 nt, Artificial Sequence
  Synthetic
auuuguucugaaugaaaaa

SEQ ID NO: 75544 - RNA, 21 nt, Artificial Sequence
  Synthetic
ugauuuguucugaaugaaaaa

SEQ ID NO: 75545 - RNA, 22 nt, Artificial Sequence
  Synthetic
uugauuuguucugaaugaaaaa

SEQ ID NO: 75546 - RNA, 23 nt, Artificial Sequence
  Synthetic
auugauuuguucugaaugaaaaa

SEQ ID NO: 75547 - RNA, 22 nt, Artificial Sequence
  Synthetic
ugaaaacacaauagaugaaaaa

SEQ ID NO: 75548 - RNA, 23 nt, Artificial Sequence
  Synthetic
augaaaacacaauagaugaaaaa

SEQ ID NO: 75549 - RNA, 24 nt, Artificial Sequence
  Synthetic
caugaaaacacaauagaugaaaaa

SEQ ID NO: 75550 - RNA, 19 nt, Artificial Sequence
  Synthetic
aguauaaaaguaugaaaaa

SEQ ID NO: 75551 - RNA, 20 nt, Artificial Sequence
  Synthetic
caguauaaaaguaugaaaaa

SEQ ID NO: 75552 - RNA, 22 nt, Artificial Sequence
  Synthetic
ugcaguauaaaaguaugaaaaa

SEQ ID NO: 75553 - RNA, 24 nt, Artificial Sequence
  Synthetic
agugcaguauaaaaguaugaaaaa

SEQ ID NO: 75554 - RNA, 18 nt, Artificial Sequence
  Synthetic
aguggaaauuaugaaaaa

SEQ ID NO: 75555 - RNA, 19 nt, Artificial Sequence
  Synthetic
uaguggaaauuaugaaaaa

SEQ ID NO: 75556 - RNA, 20 nt, Artificial Sequence
  Synthetic
auaguggaaauuaugaaaaa

SEQ ID NO: 75557 - RNA, 21 nt, Artificial Sequence
  Synthetic
aauaguggaaauuaugaaaaa

SEQ ID NO: 75558 - RNA, 22 nt, Artificial Sequence
  Synthetic
aaauaguggaaauuaugaaaaa

SEQ ID NO: 75559 - RNA, 24 nt, Artificial Sequence
  Synthetic
agaaauaguggaaauuaugaaaaa

SEQ ID NO: 75560 - RNA, 21 nt, Artificial Sequence
  Synthetic
agaaagaaaacuugugaaaaa

SEQ ID NO: 75561 - RNA, 22 nt, Artificial Sequence
  Synthetic
uagaaagaaaacuugugaaaaa

SEQ ID NO: 75562 - RNA, 23 nt, Artificial Sequence
  Synthetic
uuagaaagaaaacuugugaaaaa

SEQ ID NO: 75563 - RNA, 24 nt, Artificial Sequence
  Synthetic
auuagaaagaaaacuugugaaaaa

SEQ ID NO: 75564 - RNA, 21 nt, Artificial Sequence
  Synthetic
cagggauuuuuaaaauaaaaa

SEQ ID NO: 75565 - RNA, 22 nt, Artificial Sequence
  Synthetic
ccagggauuuuuaaaauaaaaa

SEQ ID NO: 75566 - RNA, 23 nt, Artificial Sequence
  Synthetic
accagggauuuuuaaaauaaaaa

SEQ ID NO: 75567 - RNA, 24 nt, Artificial Sequence
  Synthetic
uaccagggauuuuuaaaauaaaaa

SEQ ID NO: 75568 - RNA, 20 nt, Artificial Sequence
  Synthetic
agguaaaaugugcauaaaaa

SEQ ID NO: 75569 - RNA, 21 nt, Artificial Sequence
  Synthetic
uagguaaaaugugcauaaaaa

SEQ ID NO: 75570 - RNA, 22 nt, Artificial Sequence
  Synthetic
uuagguaaaaugugcauaaaaa

SEQ ID NO: 75571 - RNA, 24 nt, Artificial Sequence
  Synthetic
uguuagguaaaaugugcauaaaaa

SEQ ID NO: 75572 - RNA, 21 nt, Artificial Sequence
  Synthetic
ugggucucagcaauauaaaaa

SEQ ID NO: 75573 - RNA, 22 nt, Artificial Sequence
  Synthetic
uugggucucagcaauauaaaaa

SEQ ID NO: 75574 - RNA, 23 nt, Artificial Sequence
  Synthetic
uuugggucucagcaauauaaaaa

SEQ ID NO: 75575 - RNA, 24 nt, Artificial Sequence
  Synthetic
auuugggucucagcaauauaaaaa

SEQ ID NO: 75576 - RNA, 21 nt, Artificial Sequence
  Synthetic
uaugaauuuagaauauaaaaa

SEQ ID NO: 75577 - RNA, 22 nt, Artificial Sequence
  Synthetic
auaugaauuuagaauauaaaaa

SEQ ID NO: 75578 - RNA, 23 nt, Artificial Sequence
  Synthetic
uauaugaauuuagaauauaaaaa

SEQ ID NO: 75579 - RNA, 18 nt, Artificial Sequence
  Synthetic
uaguuuccacaguaaaaa

SEQ ID NO: 75580 - RNA, 19 nt, Artificial Sequence
  Synthetic
cuaguuuccacaguaaaaa

SEQ ID NO: 75581 - RNA, 20 nt, Artificial Sequence
  Synthetic
acuaguuuccacaguaaaaa

SEQ ID NO: 75582 - RNA, 21 nt, Artificial Sequence
  Synthetic
aacuaguuuccacaguaaaaa

SEQ ID NO: 75583 - RNA, 22 nt, Artificial Sequence
  Synthetic
caacuaguuuccacaguaaaaa

SEQ ID NO: 75584 - RNA, 23 nt, Artificial Sequence
  Synthetic
ucaacuaguuuccacaguaaaaa

SEQ ID NO: 75585 - RNA, 24 nt, Artificial Sequence
  Synthetic
aucaacuaguuuccacaguaaaaa

SEQ ID NO: 75586 - RNA, 19 nt, Artificial Sequence
  Synthetic
agcuaugguaaauuaaaaa

SEQ ID NO: 75587 - RNA, 20 nt, Artificial Sequence
  Synthetic
aagcuaugguaaauuaaaaa

SEQ ID NO: 75588 - RNA, 23 nt, Artificial Sequence
  Synthetic
uggaagcuaugguaaauuaaaaa

SEQ ID NO: 75589 - RNA, 24 nt, Artificial Sequence
  Synthetic
uuggaagcuaugguaaauuaaaaa

SEQ ID NO: 75590 - RNA, 21 nt, Artificial Sequence
  Synthetic
uaaggaaugauuucuuaaaaa

SEQ ID NO: 75591 - RNA, 22 nt, Artificial Sequence
  Synthetic
auaaggaaugauuucuuaaaaa

SEQ ID NO: 75592 - RNA, 23 nt, Artificial Sequence
  Synthetic
uauaaggaaugauuucuuaaaaa

SEQ ID NO: 75593 - RNA, 24 nt, Artificial Sequence
  Synthetic
cuauaaggaaugauuucuuaaaaa

SEQ ID NO: 75594 - RNA, 21 nt, Artificial Sequence
  Synthetic
acaggaaauuguuuuuaaaaa

SEQ ID NO: 75595 - RNA, 22 nt, Artificial Sequence
  Synthetic
cacaggaaauuguuuuuaaaaa

SEQ ID NO: 75596 - RNA, 23 nt, Artificial Sequence
  Synthetic
ucacaggaaauuguuuuuaaaaa

SEQ ID NO: 75597 - RNA, 21 nt, Artificial Sequence
  Synthetic
cauauaauuaguaaaacaaaa

SEQ ID NO: 75598 - RNA, 22 nt, Artificial Sequence
  Synthetic
acauauaauuaguaaaacaaaa

SEQ ID NO: 75599 - RNA, 23 nt, Artificial Sequence
  Synthetic
aacauauaauuaguaaaacaaaa

SEQ ID NO: 75600 - RNA, 24 nt, Artificial Sequence
  Synthetic
caacauauaauuaguaaaacaaaa

SEQ ID NO: 75601 - RNA, 18 nt, Artificial Sequence
  Synthetic
cucaaguuuaaaacaaaa

SEQ ID NO: 75602 - RNA, 20 nt, Artificial Sequence
  Synthetic
agcucaaguuuaaaacaaaa

SEQ ID NO: 75603 - RNA, 21 nt, Artificial Sequence
  Synthetic
aagcucaaguuuaaaacaaaa

SEQ ID NO: 75604 - RNA, 22 nt, Artificial Sequence
  Synthetic
uaagcucaaguuuaaaacaaaa

SEQ ID NO: 75605 - RNA, 23 nt, Artificial Sequence
  Synthetic
cuaagcucaaguuuaaaacaaaa

SEQ ID NO: 75606 - RNA, 18 nt, Artificial Sequence
  Synthetic
cuuuaggggagaacaaaa

SEQ ID NO: 75607 - RNA, 20 nt, Artificial Sequence
  Synthetic
agcuuuaggggagaacaaaa

SEQ ID NO: 75608 - RNA, 21 nt, Artificial Sequence
  Synthetic
aagcuuuaggggagaacaaaa

SEQ ID NO: 75609 - RNA, 23 nt, Artificial Sequence
  Synthetic
agaagcuuuaggggagaacaaaa

SEQ ID NO: 75610 - RNA, 24 nt, Artificial Sequence
  Synthetic
uagaagcuuuaggggagaacaaaa

SEQ ID NO: 75611 - RNA, 18 nt, Artificial Sequence
  Synthetic
ucaggucugaacacaaaa

SEQ ID NO: 75612 - RNA, 19 nt, Artificial Sequence
  Synthetic
aucaggucugaacacaaaa

SEQ ID NO: 75613 - RNA, 20 nt, Artificial Sequence
  Synthetic
aaucaggucugaacacaaaa

SEQ ID NO: 75614 - RNA, 22 nt, Artificial Sequence
  Synthetic
agaaucaggucugaacacaaaa

SEQ ID NO: 75615 - RNA, 24 nt, Artificial Sequence
  Synthetic
agagaaucaggucugaacacaaaa

SEQ ID NO: 75616 - RNA, 18 nt, Artificial Sequence
  Synthetic
uaauuugugggcacaaaa

SEQ ID NO: 75617 - RNA, 19 nt, Artificial Sequence
  Synthetic
auaauuugugggcacaaaa

SEQ ID NO: 75618 - RNA, 21 nt, Artificial Sequence
  Synthetic
ugauaauuugugggcacaaaa

SEQ ID NO: 75619 - RNA, 22 nt, Artificial Sequence
  Synthetic
augauaauuugugggcacaaaa

SEQ ID NO: 75620 - RNA, 18 nt, Artificial Sequence
  Synthetic
aggucaaacuucacaaaa

SEQ ID NO: 75621 - RNA, 20 nt, Artificial Sequence
  Synthetic
agaggucaaacuucacaaaa

SEQ ID NO: 75622 - RNA, 21 nt, Artificial Sequence
  Synthetic
uagaggucaaacuucacaaaa

SEQ ID NO: 75623 - RNA, 24 nt, Artificial Sequence
  Synthetic
agguagaggucaaacuucacaaaa

SEQ ID NO: 75624 - RNA, 18 nt, Artificial Sequence
  Synthetic
uaucauauaaagacaaaa

SEQ ID NO: 75625 - RNA, 19 nt, Artificial Sequence
  Synthetic
uuaucauauaaagacaaaa

SEQ ID NO: 75626 - RNA, 20 nt, Artificial Sequence
  Synthetic
cuuaucauauaaagacaaaa

SEQ ID NO: 75627 - RNA, 21 nt, Artificial Sequence
  Synthetic
ccuuaucauauaaagacaaaa

SEQ ID NO: 75628 - RNA, 23 nt, Artificial Sequence
  Synthetic
ugccuuaucauauaaagacaaaa

SEQ ID NO: 75629 - RNA, 18 nt, Artificial Sequence
  Synthetic
uuaagccacuggacaaaa

SEQ ID NO: 75630 - RNA, 21 nt, Artificial Sequence
  Synthetic
ugguuaagccacuggacaaaa

SEQ ID NO: 75631 - RNA, 22 nt, Artificial Sequence
  Synthetic
uugguuaagccacuggacaaaa

SEQ ID NO: 75632 - RNA, 23 nt, Artificial Sequence
  Synthetic
uuugguuaagccacuggacaaaa

SEQ ID NO: 75633 - RNA, 18 nt, Artificial Sequence
  Synthetic
ugcacaaucacuacaaaa

SEQ ID NO: 75634 - RNA, 19 nt, Artificial Sequence
  Synthetic
augcacaaucacuacaaaa

SEQ ID NO: 75635 - RNA, 20 nt, Artificial Sequence
  Synthetic
caugcacaaucacuacaaaa

SEQ ID NO: 75636 - RNA, 21 nt, Artificial Sequence
  Synthetic
ccaugcacaaucacuacaaaa

SEQ ID NO: 75637 - RNA, 23 nt, Artificial Sequence
  Synthetic
ugccaugcacaaucacuacaaaa

SEQ ID NO: 75638 - RNA, 24 nt, Artificial Sequence
  Synthetic
cugccaugcacaaucacuacaaaa

SEQ ID NO: 75639 - RNA, 18 nt, Artificial Sequence
  Synthetic
uagcuagucguuacaaaa

SEQ ID NO: 75640 - RNA, 19 nt, Artificial Sequence
  Synthetic
auagcuagucguuacaaaa

SEQ ID NO: 75641 - RNA, 20 nt, Artificial Sequence
  Synthetic
aauagcuagucguuacaaaa

SEQ ID NO: 75642 - RNA, 21 nt, Artificial Sequence
  Synthetic
aaauagcuagucguuacaaaa

SEQ ID NO: 75643 - RNA, 22 nt, Artificial Sequence
  Synthetic
caaauagcuagucguuacaaaa

SEQ ID NO: 75644 - RNA, 23 nt, Artificial Sequence
  Synthetic
acaaauagcuagucguuacaaaa

SEQ ID NO: 75645 - RNA, 24 nt, Artificial Sequence
  Synthetic
cacaaauagcuagucguuacaaaa

SEQ ID NO: 75646 - RNA, 20 nt, Artificial Sequence
  Synthetic
uggaagguuagaggccaaaa

SEQ ID NO: 75647 - RNA, 21 nt, Artificial Sequence
  Synthetic
uuggaagguuagaggccaaaa

SEQ ID NO: 75648 - RNA, 22 nt, Artificial Sequence
  Synthetic
uuuggaagguuagaggccaaaa

SEQ ID NO: 75649 - RNA, 23 nt, Artificial Sequence
  Synthetic
uuuuggaagguuagaggccaaaa

SEQ ID NO: 75650 - RNA, 24 nt, Artificial Sequence
  Synthetic
auuuuggaagguuagaggccaaaa

SEQ ID NO: 75651 - RNA, 18 nt, Artificial Sequence
  Synthetic
uuguuuuccacuccaaaa

SEQ ID NO: 75652 - RNA, 19 nt, Artificial Sequence
  Synthetic
cuuguuuuccacuccaaaa

SEQ ID NO: 75653 - RNA, 20 nt, Artificial Sequence
  Synthetic
acuuguuuuccacuccaaaa

SEQ ID NO: 75654 - RNA, 21 nt, Artificial Sequence
  Synthetic
cacuuguuuuccacuccaaaa

SEQ ID NO: 75655 - RNA, 22 nt, Artificial Sequence
  Synthetic
acacuuguuuuccacuccaaaa

SEQ ID NO: 75656 - RNA, 23 nt, Artificial Sequence
  Synthetic
aacacuuguuuuccacuccaaaa

SEQ ID NO: 75657 - RNA, 21 nt, Artificial Sequence
  Synthetic
auugguugaauaagagcaaaa

SEQ ID NO: 75658 - RNA, 22 nt, Artificial Sequence
  Synthetic
uauugguugaauaagagcaaaa

SEQ ID NO: 75659 - RNA, 24 nt, Artificial Sequence
  Synthetic
aguauugguugaauaagagcaaaa

SEQ ID NO: 75660 - RNA, 18 nt, Artificial Sequence
  Synthetic
ugcaaaggaggagcaaaa

SEQ ID NO: 75661 - RNA, 19 nt, Artificial Sequence
  Synthetic
cugcaaaggaggagcaaaa

SEQ ID NO: 75662 - RNA, 20 nt, Artificial Sequence
  Synthetic
ccugcaaaggaggagcaaaa

SEQ ID NO: 75663 - RNA, 22 nt, Artificial Sequence
  Synthetic
agccugcaaaggaggagcaaaa

SEQ ID NO: 75664 - RNA, 23 nt, Artificial Sequence
  Synthetic
uagccugcaaaggaggagcaaaa

SEQ ID NO: 75665 - RNA, 18 nt, Artificial Sequence
  Synthetic
aaacacuuguacgcaaaa

SEQ ID NO: 75666 - RNA, 19 nt, Artificial Sequence
  Synthetic
uaaacacuuguacgcaaaa

SEQ ID NO: 75667 - RNA, 20 nt, Artificial Sequence
  Synthetic
uuaaacacuuguacgcaaaa

SEQ ID NO: 75668 - RNA, 22 nt, Artificial Sequence
  Synthetic
uguuaaacacuuguacgcaaaa

SEQ ID NO: 75669 - RNA, 23 nt, Artificial Sequence
  Synthetic
cuguuaaacacuuguacgcaaaa

SEQ ID NO: 75670 - RNA, 24 nt, Artificial Sequence
  Synthetic
ccuguuaaacacuuguacgcaaaa

SEQ ID NO: 75671 - RNA, 18 nt, Artificial Sequence
  Synthetic
cguuacccaagugcaaaa

SEQ ID NO: 75672 - RNA, 19 nt, Artificial Sequence
  Synthetic
acguuacccaagugcaaaa

SEQ ID NO: 75673 - RNA, 20 nt, Artificial Sequence
  Synthetic
aacguuacccaagugcaaaa

SEQ ID NO: 75674 - RNA, 21 nt, Artificial Sequence
  Synthetic
aaacguuacccaagugcaaaa

SEQ ID NO: 75675 - RNA, 22 nt, Artificial Sequence
  Synthetic
aaaacguuacccaagugcaaaa

SEQ ID NO: 75676 - RNA, 23 nt, Artificial Sequence
  Synthetic
uaaaacguuacccaagugcaaaa

SEQ ID NO: 75677 - RNA, 24 nt, Artificial Sequence
  Synthetic
uuaaaacguuacccaagugcaaaa

SEQ ID NO: 75678 - RNA, 18 nt, Artificial Sequence
  Synthetic
augucauauauugcaaaa

SEQ ID NO: 75679 - RNA, 19 nt, Artificial Sequence
  Synthetic
aaugucauauauugcaaaa

SEQ ID NO: 75680 - RNA, 20 nt, Artificial Sequence
  Synthetic
caaugucauauauugcaaaa

SEQ ID NO: 75681 - RNA, 21 nt, Artificial Sequence
  Synthetic
acaaugucauauauugcaaaa

SEQ ID NO: 75682 - RNA, 22 nt, Artificial Sequence
  Synthetic
aacaaugucauauauugcaaaa

SEQ ID NO: 75683 - RNA, 23 nt, Artificial Sequence
  Synthetic
aaacaaugucauauauugcaaaa

SEQ ID NO: 75684 - RNA, 21 nt, Artificial Sequence
  Synthetic
cuucaaggaaaaaaaucaaaa

SEQ ID NO: 75685 - RNA, 22 nt, Artificial Sequence
  Synthetic
ucuucaaggaaaaaaaucaaaa

SEQ ID NO: 75686 - RNA, 23 nt, Artificial Sequence
  Synthetic
cucuucaaggaaaaaaaucaaaa

SEQ ID NO: 75687 - RNA, 18 nt, Artificial Sequence
  Synthetic
cauacucucaaaucaaaa

SEQ ID NO: 75688 - RNA, 19 nt, Artificial Sequence
  Synthetic
ucauacucucaaaucaaaa

SEQ ID NO: 75689 - RNA, 20 nt, Artificial Sequence
  Synthetic
cucauacucucaaaucaaaa

SEQ ID NO: 75690 - RNA, 21 nt, Artificial Sequence
  Synthetic
ccucauacucucaaaucaaaa

SEQ ID NO: 75691 - RNA, 22 nt, Artificial Sequence
  Synthetic
accucauacucucaaaucaaaa

SEQ ID NO: 75692 - RNA, 23 nt, Artificial Sequence
  Synthetic
uaccucauacucucaaaucaaaa

SEQ ID NO: 75693 - RNA, 19 nt, Artificial Sequence
  Synthetic
aggguuuaaacaaucaaaa

SEQ ID NO: 75694 - RNA, 23 nt, Artificial Sequence
  Synthetic
agggaggguuuaaacaaucaaaa

SEQ ID NO: 75695 - RNA, 24 nt, Artificial Sequence
  Synthetic
cagggaggguuuaaacaaucaaaa

SEQ ID NO: 75696 - RNA, 18 nt, Artificial Sequence
  Synthetic
aaacaauguggaucaaaa

SEQ ID NO: 75697 - RNA, 19 nt, Artificial Sequence
  Synthetic
uaaacaauguggaucaaaa

SEQ ID NO: 75698 - RNA, 20 nt, Artificial Sequence
  Synthetic
auaaacaauguggaucaaaa

SEQ ID NO: 75699 - RNA, 21 nt, Artificial Sequence
  Synthetic
aauaaacaauguggaucaaaa

SEQ ID NO: 75700 - RNA, 23 nt, Artificial Sequence
  Synthetic
ugaauaaacaauguggaucaaaa

SEQ ID NO: 75701 - RNA, 18 nt, Artificial Sequence
  Synthetic
acaguguauugaucaaaa

SEQ ID NO: 75702 - RNA, 19 nt, Artificial Sequence
  Synthetic
aacaguguauugaucaaaa

SEQ ID NO: 75703 - RNA, 20 nt, Artificial Sequence
  Synthetic
caacaguguauugaucaaaa

SEQ ID NO: 75704 - RNA, 21 nt, Artificial Sequence
  Synthetic
ucaacaguguauugaucaaaa

SEQ ID NO: 75705 - RNA, 22 nt, Artificial Sequence
  Synthetic
aucaacaguguauugaucaaaa

SEQ ID NO: 75706 - RNA, 23 nt, Artificial Sequence
  Synthetic
uaucaacaguguauugaucaaaa

SEQ ID NO: 75707 - RNA, 21 nt, Artificial Sequence
  Synthetic
cagcaaggcuuuaucucaaaa

SEQ ID NO: 75708 - RNA, 22 nt, Artificial Sequence
  Synthetic
ccagcaaggcuuuaucucaaaa

SEQ ID NO: 75709 - RNA, 23 nt, Artificial Sequence
  Synthetic
uccagcaaggcuuuaucucaaaa

SEQ ID NO: 75710 - RNA, 24 nt, Artificial Sequence
  Synthetic
auccagcaaggcuuuaucucaaaa

SEQ ID NO: 75711 - RNA, 18 nt, Artificial Sequence
  Synthetic
ccacaaauuugaagaaaa

SEQ ID NO: 75712 - RNA, 19 nt, Artificial Sequence
  Synthetic
cccacaaauuugaagaaaa

SEQ ID NO: 75713 - RNA, 20 nt, Artificial Sequence
  Synthetic
ccccacaaauuugaagaaaa

SEQ ID NO: 75714 - RNA, 21 nt, Artificial Sequence
  Synthetic
uccccacaaauuugaagaaaa

SEQ ID NO: 75715 - RNA, 22 nt, Artificial Sequence
  Synthetic
uuccccacaaauuugaagaaaa

SEQ ID NO: 75716 - RNA, 23 nt, Artificial Sequence
  Synthetic
auuccccacaaauuugaagaaaa

SEQ ID NO: 75717 - RNA, 18 nt, Artificial Sequence
  Synthetic
uccacuaugcuaagaaaa

SEQ ID NO: 75718 - RNA, 19 nt, Artificial Sequence
  Synthetic
uuccacuaugcuaagaaaa

SEQ ID NO: 75719 - RNA, 20 nt, Artificial Sequence
  Synthetic
uuuccacuaugcuaagaaaa

SEQ ID NO: 75720 - RNA, 21 nt, Artificial Sequence
  Synthetic
auuuccacuaugcuaagaaaa

SEQ ID NO: 75721 - RNA, 22 nt, Artificial Sequence
  Synthetic
cauuuccacuaugcuaagaaaa

SEQ ID NO: 75722 - RNA, 23 nt, Artificial Sequence
  Synthetic
ucauuuccacuaugcuaagaaaa

SEQ ID NO: 75723 - RNA, 24 nt, Artificial Sequence
  Synthetic
aucauuuccacuaugcuaagaaaa

SEQ ID NO: 75724 - RNA, 21 nt, Artificial Sequence
  Synthetic
uaacuuucauuucuaagaaaa

SEQ ID NO: 75725 - RNA, 22 nt, Artificial Sequence
  Synthetic
auaacuuucauuucuaagaaaa

SEQ ID NO: 75726 - RNA, 23 nt, Artificial Sequence
  Synthetic
cauaacuuucauuucuaagaaaa

SEQ ID NO: 75727 - RNA, 24 nt, Artificial Sequence
  Synthetic
acauaacuuucauuucuaagaaaa

SEQ ID NO: 75728 - RNA, 18 nt, Artificial Sequence
  Synthetic
ugaugauaauuaagaaaa

SEQ ID NO: 75729 - RNA, 19 nt, Artificial Sequence
  Synthetic
uugaugauaauuaagaaaa

SEQ ID NO: 75730 - RNA, 20 nt, Artificial Sequence
  Synthetic
auugaugauaauuaagaaaa

SEQ ID NO: 75731 - RNA, 21 nt, Artificial Sequence
  Synthetic
aauugaugauaauuaagaaaa

SEQ ID NO: 75732 - RNA, 22 nt, Artificial Sequence
  Synthetic
uaauugaugauaauuaagaaaa

SEQ ID NO: 75733 - RNA, 23 nt, Artificial Sequence
  Synthetic
uuaauugaugauaauuaagaaaa

SEQ ID NO: 75734 - RNA, 18 nt, Artificial Sequence
  Synthetic
caauuaauguacagaaaa

SEQ ID NO: 75735 - RNA, 19 nt, Artificial Sequence
  Synthetic
ucaauuaauguacagaaaa

SEQ ID NO: 75736 - RNA, 20 nt, Artificial Sequence
  Synthetic
aucaauuaauguacagaaaa

SEQ ID NO: 75737 - RNA, 21 nt, Artificial Sequence
  Synthetic
aaucaauuaauguacagaaaa

SEQ ID NO: 75738 - RNA, 22 nt, Artificial Sequence
  Synthetic
aaaucaauuaauguacagaaaa

SEQ ID NO: 75739 - RNA, 23 nt, Artificial Sequence
  Synthetic
aaaaucaauuaauguacagaaaa

SEQ ID NO: 75740 - RNA, 24 nt, Artificial Sequence
  Synthetic
aaaaaucaauuaauguacagaaaa

SEQ ID NO: 75741 - RNA, 21 nt, Artificial Sequence
  Synthetic
aaugauggcauuuacagaaaa

SEQ ID NO: 75742 - RNA, 22 nt, Artificial Sequence
  Synthetic
caaugauggcauuuacagaaaa

SEQ ID NO: 75743 - RNA, 23 nt, Artificial Sequence
  Synthetic
acaaugauggcauuuacagaaaa

SEQ ID NO: 75744 - RNA, 24 nt, Artificial Sequence
  Synthetic
uacaaugauggcauuuacagaaaa

SEQ ID NO: 75745 - RNA, 22 nt, Artificial Sequence
  Synthetic
ugaaggcaaaauguucagaaaa

SEQ ID NO: 75746 - RNA, 23 nt, Artificial Sequence
  Synthetic
uugaaggcaaaauguucagaaaa

SEQ ID NO: 75747 - RNA, 24 nt, Artificial Sequence
  Synthetic
uuugaaggcaaaauguucagaaaa

SEQ ID NO: 75748 - RNA, 21 nt, Artificial Sequence
  Synthetic
cuucuucagcaaaagagaaaa

SEQ ID NO: 75749 - RNA, 22 nt, Artificial Sequence
  Synthetic
acuucuucagcaaaagagaaaa

SEQ ID NO: 75750 - RNA, 23 nt, Artificial Sequence
  Synthetic
cacuucuucagcaaaagagaaaa

SEQ ID NO: 75751 - RNA, 18 nt, Artificial Sequence
  Synthetic
cacacaggauggagaaaa

SEQ ID NO: 75752 - RNA, 19 nt, Artificial Sequence
  Synthetic
acacacaggauggagaaaa

SEQ ID NO: 75753 - RNA, 20 nt, Artificial Sequence
  Synthetic
uacacacaggauggagaaaa

SEQ ID NO: 75754 - RNA, 21 nt, Artificial Sequence
  Synthetic
uuacacacaggauggagaaaa

SEQ ID NO: 75755 - RNA, 23 nt, Artificial Sequence
  Synthetic
aguuacacacaggauggagaaaa

SEQ ID NO: 75756 - RNA, 23 nt, Artificial Sequence
  Synthetic
uggacauuucacauuugagaaaa

SEQ ID NO: 75757 - RNA, 24 nt, Artificial Sequence
  Synthetic
cuggacauuucacauuugagaaaa

SEQ ID NO: 75758 - RNA, 18 nt, Artificial Sequence
  Synthetic
ccuguguugaauagaaaa

SEQ ID NO: 75759 - RNA, 19 nt, Artificial Sequence
  Synthetic
cccuguguugaauagaaaa

SEQ ID NO: 75760 - RNA, 20 nt, Artificial Sequence
  Synthetic
ucccuguguugaauagaaaa

SEQ ID NO: 75761 - RNA, 21 nt, Artificial Sequence
  Synthetic
cucccuguguugaauagaaaa

SEQ ID NO: 75762 - RNA, 22 nt, Artificial Sequence
  Synthetic
ucucccuguguugaauagaaaa

SEQ ID NO: 75763 - RNA, 23 nt, Artificial Sequence
  Synthetic
cucucccuguguugaauagaaaa

SEQ ID NO: 75764 - RNA, 24 nt, Artificial Sequence
  Synthetic
acucucccuguguugaauagaaaa

SEQ ID NO: 75765 - RNA, 19 nt, Artificial Sequence
  Synthetic
agucuccauauauagaaaa

SEQ ID NO: 75766 - RNA, 22 nt, Artificial Sequence
  Synthetic
uggagucuccauauauagaaaa

SEQ ID NO: 75767 - RNA, 23 nt, Artificial Sequence
  Synthetic
cuggagucuccauauauagaaaa

SEQ ID NO: 75768 - RNA, 18 nt, Artificial Sequence
  Synthetic
aauagacaacuuagaaaa

SEQ ID NO: 75769 - RNA, 19 nt, Artificial Sequence
  Synthetic
caauagacaacuuagaaaa

SEQ ID NO: 75770 - RNA, 20 nt, Artificial Sequence
  Synthetic
acaauagacaacuuagaaaa

SEQ ID NO: 75771 - RNA, 21 nt, Artificial Sequence
  Synthetic
aacaauagacaacuuagaaaa

SEQ ID NO: 75772 - RNA, 22 nt, Artificial Sequence
  Synthetic
uaacaauagacaacuuagaaaa

SEQ ID NO: 75773 - RNA, 23 nt, Artificial Sequence
  Synthetic
auaacaauagacaacuuagaaaa

SEQ ID NO: 75774 - RNA, 24 nt, Artificial Sequence
  Synthetic
aauaacaauagacaacuuagaaaa

SEQ ID NO: 75775 - RNA, 18 nt, Artificial Sequence
  Synthetic
aggaaugggguuagaaaa

SEQ ID NO: 75776 - RNA, 19 nt, Artificial Sequence
  Synthetic
uaggaaugggguuagaaaa

SEQ ID NO: 75777 - RNA, 21 nt, Artificial Sequence
  Synthetic
aguaggaaugggguuagaaaa

SEQ ID NO: 75778 - RNA, 23 nt, Artificial Sequence
  Synthetic
agaguaggaaugggguuagaaaa

SEQ ID NO: 75779 - RNA, 18 nt, Artificial Sequence
  Synthetic
acagcacaucuaggaaaa

SEQ ID NO: 75780 - RNA, 22 nt, Artificial Sequence
  Synthetic
ugggacagcacaucuaggaaaa

SEQ ID NO: 75781 - RNA, 23 nt, Artificial Sequence
  Synthetic
augggacagcacaucuaggaaaa

SEQ ID NO: 75782 - RNA, 18 nt, Artificial Sequence
  Synthetic
uacaggaauccuggaaaa

SEQ ID NO: 75783 - RNA, 19 nt, Artificial Sequence
  Synthetic
cuacaggaauccuggaaaa

SEQ ID NO: 75784 - RNA, 20 nt, Artificial Sequence
  Synthetic
ucuacaggaauccuggaaaa

SEQ ID NO: 75785 - RNA, 21 nt, Artificial Sequence
  Synthetic
cucuacaggaauccuggaaaa

SEQ ID NO: 75786 - RNA, 22 nt, Artificial Sequence
  Synthetic
ucucuacaggaauccuggaaaa

SEQ ID NO: 75787 - RNA, 23 nt, Artificial Sequence
  Synthetic
aucucuacaggaauccuggaaaa

SEQ ID NO: 75788 - RNA, 24 nt, Artificial Sequence
  Synthetic
aaucucuacaggaauccuggaaaa

SEQ ID NO: 75789 - RNA, 18 nt, Artificial Sequence
  Synthetic
cccgaaaaucaaugaaaa

SEQ ID NO: 75790 - RNA, 19 nt, Artificial Sequence
  Synthetic
acccgaaaaucaaugaaaa

SEQ ID NO: 75791 - RNA, 20 nt, Artificial Sequence
  Synthetic
cacccgaaaaucaaugaaaa

SEQ ID NO: 75792 - RNA, 21 nt, Artificial Sequence
  Synthetic
ccacccgaaaaucaaugaaaa

SEQ ID NO: 75793 - RNA, 22 nt, Artificial Sequence
  Synthetic
cccacccgaaaaucaaugaaaa

SEQ ID NO: 75794 - RNA, 23 nt, Artificial Sequence
  Synthetic
acccacccgaaaaucaaugaaaa

SEQ ID NO: 75795 - RNA, 24 nt, Artificial Sequence
  Synthetic
uacccacccgaaaaucaaugaaaa

SEQ ID NO: 75796 - RNA, 19 nt, Artificial Sequence
  Synthetic
uggggugacuggaugaaaa

SEQ ID NO: 75797 - RNA, 20 nt, Artificial Sequence
  Synthetic
uuggggugacuggaugaaaa

SEQ ID NO: 75798 - RNA, 21 nt, Artificial Sequence
  Synthetic
auuggggugacuggaugaaaa

SEQ ID NO: 75799 - RNA, 22 nt, Artificial Sequence
  Synthetic
aauuggggugacuggaugaaaa

SEQ ID NO: 75800 - RNA, 23 nt, Artificial Sequence
  Synthetic
aaauuggggugacuggaugaaaa

SEQ ID NO: 75801 - RNA, 24 nt, Artificial Sequence
  Synthetic
uaaauuggggugacuggaugaaaa

SEQ ID NO: 75802 - RNA, 18 nt, Artificial Sequence
  Synthetic
caugguuucauaugaaaa

SEQ ID NO: 75803 - RNA, 19 nt, Artificial Sequence
  Synthetic
ucaugguuucauaugaaaa

SEQ ID NO: 75804 - RNA, 20 nt, Artificial Sequence
  Synthetic
cucaugguuucauaugaaaa

SEQ ID NO: 75805 - RNA, 21 nt, Artificial Sequence
  Synthetic
ucucaugguuucauaugaaaa

SEQ ID NO: 75806 - RNA, 22 nt, Artificial Sequence
  Synthetic
aucucaugguuucauaugaaaa

SEQ ID NO: 75807 - RNA, 23 nt, Artificial Sequence
  Synthetic
uaucucaugguuucauaugaaaa

SEQ ID NO: 75808 - RNA, 24 nt, Artificial Sequence
  Synthetic
auaucucaugguuucauaugaaaa

SEQ ID NO: 75809 - RNA, 18 nt, Artificial Sequence
  Synthetic
ucuuuugcaguaugaaaa

SEQ ID NO: 75810 - RNA, 19 nt, Artificial Sequence
  Synthetic
cucuuuugcaguaugaaaa

SEQ ID NO: 75811 - RNA, 20 nt, Artificial Sequence
  Synthetic
ucucuuuugcaguaugaaaa

SEQ ID NO: 75812 - RNA, 21 nt, Artificial Sequence
  Synthetic
aucucuuuugcaguaugaaaa

SEQ ID NO: 75813 - RNA, 22 nt, Artificial Sequence
  Synthetic
aaucucuuuugcaguaugaaaa

SEQ ID NO: 75814 - RNA, 24 nt, Artificial Sequence
  Synthetic
ugaaucucuuuugcaguaugaaaa

SEQ ID NO: 75815 - RNA, 18 nt, Artificial Sequence
  Synthetic
uacugaauauuaugaaaa

SEQ ID NO: 75816 - RNA, 21 nt, Artificial Sequence
  Synthetic
cgguacugaauauuaugaaaa

SEQ ID NO: 75817 - RNA, 22 nt, Artificial Sequence
  Synthetic
ccgguacugaauauuaugaaaa

SEQ ID NO: 75818 - RNA, 24 nt, Artificial Sequence
  Synthetic
ugccgguacugaauauuaugaaaa

SEQ ID NO: 75819 - RNA, 18 nt, Artificial Sequence
  Synthetic
agcgcuaaaugcugaaaa

SEQ ID NO: 75820 - RNA, 21 nt, Artificial Sequence
  Synthetic
aggagcgcuaaaugcugaaaa

SEQ ID NO: 75821 - RNA, 23 nt, Artificial Sequence
  Synthetic
agaggagcgcuaaaugcugaaaa

SEQ ID NO: 75822 - RNA, 18 nt, Artificial Sequence
  Synthetic
aaguccacagagugaaaa

SEQ ID NO: 75823 - RNA, 19 nt, Artificial Sequence
  Synthetic
uaaguccacagagugaaaa

SEQ ID NO: 75824 - RNA, 21 nt, Artificial Sequence
  Synthetic
aguaaguccacagagugaaaa

SEQ ID NO: 75825 - RNA, 22 nt, Artificial Sequence
  Synthetic
aaguaaguccacagagugaaaa

SEQ ID NO: 75826 - RNA, 23 nt, Artificial Sequence
  Synthetic
aaaguaaguccacagagugaaaa

SEQ ID NO: 75827 - RNA, 24 nt, Artificial Sequence
  Synthetic
uaaaguaaguccacagagugaaaa

SEQ ID NO: 75828 - RNA, 18 nt, Artificial Sequence
  Synthetic
uagcccaaacugugaaaa

SEQ ID NO: 75829 - RNA, 19 nt, Artificial Sequence
  Synthetic
auagcccaaacugugaaaa

SEQ ID NO: 75830 - RNA, 20 nt, Artificial Sequence
  Synthetic
cauagcccaaacugugaaaa

SEQ ID NO: 75831 - RNA, 21 nt, Artificial Sequence
  Synthetic
acauagcccaaacugugaaaa

SEQ ID NO: 75832 - RNA, 23 nt, Artificial Sequence
  Synthetic
ugacauagcccaaacugugaaaa

SEQ ID NO: 75833 - RNA, 24 nt, Artificial Sequence
  Synthetic
cugacauagcccaaacugugaaaa

SEQ ID NO: 75834 - RNA, 18 nt, Artificial Sequence
  Synthetic
uaaaaagacucuugaaaa

SEQ ID NO: 75835 - RNA, 19 nt, Artificial Sequence
  Synthetic
cuaaaaagacucuugaaaa

SEQ ID NO: 75836 - RNA, 20 nt, Artificial Sequence
  Synthetic
ccuaaaaagacucuugaaaa

SEQ ID NO: 75837 - RNA, 21 nt, Artificial Sequence
  Synthetic
cccuaaaaagacucuugaaaa

SEQ ID NO: 75838 - RNA, 22 nt, Artificial Sequence
  Synthetic
ccccuaaaaagacucuugaaaa

SEQ ID NO: 75839 - RNA, 23 nt, Artificial Sequence
  Synthetic
uccccuaaaaagacucuugaaaa

SEQ ID NO: 75840 - RNA, 24 nt, Artificial Sequence
  Synthetic
auccccuaaaaagacucuugaaaa

SEQ ID NO: 75841 - RNA, 18 nt, Artificial Sequence
  Synthetic
cacucauucuuuugaaaa

SEQ ID NO: 75842 - RNA, 19 nt, Artificial Sequence
  Synthetic
ucacucauucuuuugaaaa

SEQ ID NO: 75843 - RNA, 20 nt, Artificial Sequence
  Synthetic
uucacucauucuuuugaaaa

SEQ ID NO: 75844 - RNA, 21 nt, Artificial Sequence
  Synthetic
auucacucauucuuuugaaaa

SEQ ID NO: 75845 - RNA, 22 nt, Artificial Sequence
  Synthetic
aauucacucauucuuuugaaaa

SEQ ID NO: 75846 - RNA, 23 nt, Artificial Sequence
  Synthetic
aaauucacucauucuuuugaaaa

SEQ ID NO: 75847 - RNA, 24 nt, Artificial Sequence
  Synthetic
aaaauucacucauucuuuugaaaa

SEQ ID NO: 75848 - RNA, 18 nt, Artificial Sequence
  Synthetic
ugcucuuuugaaauaaaa

SEQ ID NO: 75849 - RNA, 19 nt, Artificial Sequence
  Synthetic
cugcucuuuugaaauaaaa

SEQ ID NO: 75850 - RNA, 20 nt, Artificial Sequence
  Synthetic
ucugcucuuuugaaauaaaa

SEQ ID NO: 75851 - RNA, 23 nt, Artificial Sequence
  Synthetic
uggucugcucuuuugaaauaaaa

SEQ ID NO: 75852 - RNA, 24 nt, Artificial Sequence
  Synthetic
uuggucugcucuuuugaaauaaaa

SEQ ID NO: 75853 - RNA, 18 nt, Artificial Sequence
  Synthetic
ucaaauugauaaauaaaa

SEQ ID NO: 75854 - RNA, 19 nt, Artificial Sequence
  Synthetic
uucaaauugauaaauaaaa

SEQ ID NO: 75855 - RNA, 20 nt, Artificial Sequence
  Synthetic
cuucaaauugauaaauaaaa

SEQ ID NO: 75856 - RNA, 21 nt, Artificial Sequence
  Synthetic
ucuucaaauugauaaauaaaa

SEQ ID NO: 75857 - RNA, 22 nt, Artificial Sequence
  Synthetic
cucuucaaauugauaaauaaaa

SEQ ID NO: 75858 - RNA, 23 nt, Artificial Sequence
  Synthetic
ccucuucaaauugauaaauaaaa

SEQ ID NO: 75859 - RNA, 24 nt, Artificial Sequence
  Synthetic
accucuucaaauugauaaauaaaa

SEQ ID NO: 75860 - RNA, 21 nt, Artificial Sequence
  Synthetic
aaaaauaugauuuaaauaaaa

SEQ ID NO: 75861 - RNA, 23 nt, Artificial Sequence
  Synthetic
ugaaaaauaugauuuaaauaaaa

SEQ ID NO: 75862 - RNA, 24 nt, Artificial Sequence
  Synthetic
uugaaaaauaugauuuaaauaaaa

SEQ ID NO: 75863 - RNA, 21 nt, Artificial Sequence
  Synthetic
aaguugguuaaaauaauaaaa

SEQ ID NO: 75864 - RNA, 23 nt, Artificial Sequence
  Synthetic
agaaguugguuaaaauaauaaaa

SEQ ID NO: 75865 - RNA, 24 nt, Artificial Sequence
  Synthetic
uagaaguugguuaaaauaauaaaa

SEQ ID NO: 75866 - RNA, 18 nt, Artificial Sequence
  Synthetic
acgacagcuuuaauaaaa

SEQ ID NO: 75867 - RNA, 19 nt, Artificial Sequence
  Synthetic
aacgacagcuuuaauaaaa

SEQ ID NO: 75868 - RNA, 20 nt, Artificial Sequence
  Synthetic
uaacgacagcuuuaauaaaa

SEQ ID NO: 75869 - RNA, 21 nt, Artificial Sequence
  Synthetic
auaacgacagcuuuaauaaaa

SEQ ID NO: 75870 - RNA, 22 nt, Artificial Sequence
  Synthetic
aauaacgacagcuuuaauaaaa

SEQ ID NO: 75871 - RNA, 24 nt, Artificial Sequence
  Synthetic
agaauaacgacagcuuuaauaaaa

SEQ ID NO: 75872 - RNA, 18 nt, Artificial Sequence
  Synthetic
uaaaaguaccucauaaaa

SEQ ID NO: 75873 - RNA, 19 nt, Artificial Sequence
  Synthetic
uuaaaaguaccucauaaaa

SEQ ID NO: 75874 - RNA, 20 nt, Artificial Sequence
  Synthetic
auuaaaaguaccucauaaaa

SEQ ID NO: 75875 - RNA, 21 nt, Artificial Sequence
  Synthetic
cauuaaaaguaccucauaaaa

SEQ ID NO: 75876 - RNA, 23 nt, Artificial Sequence
  Synthetic
ugcauuaaaaguaccucauaaaa

SEQ ID NO: 75877 - RNA, 24 nt, Artificial Sequence
  Synthetic
augcauuaaaaguaccucauaaaa

SEQ ID NO: 75878 - RNA, 18 nt, Artificial Sequence
  Synthetic
aaaguuaugaggauaaaa

SEQ ID NO: 75879 - RNA, 21 nt, Artificial Sequence
  Synthetic
uggaaaguuaugaggauaaaa

SEQ ID NO: 75880 - RNA, 23 nt, Artificial Sequence
  Synthetic
cguggaaaguuaugaggauaaaa

SEQ ID NO: 75881 - RNA, 24 nt, Artificial Sequence
  Synthetic
acguggaaaguuaugaggauaaaa

SEQ ID NO: 75882 - RNA, 21 nt, Artificial Sequence
  Synthetic
uaaaauaguggaaugauaaaa

SEQ ID NO: 75883 - RNA, 23 nt, Artificial Sequence
  Synthetic
uguaaaauaguggaaugauaaaa

SEQ ID NO: 75884 - RNA, 24 nt, Artificial Sequence
  Synthetic
auguaaaauaguggaaugauaaaa

SEQ ID NO: 75885 - RNA, 21 nt, Artificial Sequence
  Synthetic
agauuuauuauuaugauaaaa

SEQ ID NO: 75886 - RNA, 22 nt, Artificial Sequence
  Synthetic
cagauuuauuauuaugauaaaa

SEQ ID NO: 75887 - RNA, 23 nt, Artificial Sequence
  Synthetic
ucagauuuauuauuaugauaaaa

SEQ ID NO: 75888 - RNA, 24 nt, Artificial Sequence
  Synthetic
aucagauuuauuauuaugauaaaa

SEQ ID NO: 75889 - RNA, 18 nt, Artificial Sequence
  Synthetic
uauauaaaugugauaaaa

SEQ ID NO: 75890 - RNA, 19 nt, Artificial Sequence
  Synthetic
uuauauaaaugugauaaaa

SEQ ID NO: 75891 - RNA, 21 nt, Artificial Sequence
  Synthetic
aguuauauaaaugugauaaaa

SEQ ID NO: 75892 - RNA, 22 nt, Artificial Sequence
  Synthetic
aaguuauauaaaugugauaaaa

SEQ ID NO: 75893 - RNA, 23 nt, Artificial Sequence
  Synthetic
aaaguuauauaaaugugauaaaa

SEQ ID NO: 75894 - RNA, 18 nt, Artificial Sequence
  Synthetic
cugaguuuuaauauaaaa

SEQ ID NO: 75895 - RNA, 19 nt, Artificial Sequence
  Synthetic
ucugaguuuuaauauaaaa

SEQ ID NO: 75896 - RNA, 21 nt, Artificial Sequence
  Synthetic
agucugaguuuuaauauaaaa

SEQ ID NO: 75897 - RNA, 22 nt, Artificial Sequence
  Synthetic
aagucugaguuuuaauauaaaa

SEQ ID NO: 75898 - RNA, 23 nt, Artificial Sequence
  Synthetic
aaagucugaguuuuaauauaaaa

SEQ ID NO: 75899 - RNA, 18 nt, Artificial Sequence
  Synthetic
aauucuuaucauauaaaa

SEQ ID NO: 75900 - RNA, 19 nt, Artificial Sequence
  Synthetic
uaauucuuaucauauaaaa

SEQ ID NO: 75901 - RNA, 20 nt, Artificial Sequence
  Synthetic
cuaauucuuaucauauaaaa

SEQ ID NO: 75902 - RNA, 21 nt, Artificial Sequence
  Synthetic
acuaauucuuaucauauaaaa

SEQ ID NO: 75903 - RNA, 22 nt, Artificial Sequence
  Synthetic
uacuaauucuuaucauauaaaa

SEQ ID NO: 75904 - RNA, 24 nt, Artificial Sequence
  Synthetic
cguacuaauucuuaucauauaaaa

SEQ ID NO: 75905 - RNA, 21 nt, Artificial Sequence
  Synthetic
ucaauuuuagaagauauaaaa

SEQ ID NO: 75906 - RNA, 22 nt, Artificial Sequence
  Synthetic
uucaauuuuagaagauauaaaa

SEQ ID NO: 75907 - RNA, 23 nt, Artificial Sequence
  Synthetic
cuucaauuuuagaagauauaaaa

SEQ ID NO: 75908 - RNA, 18 nt, Artificial Sequence
  Synthetic
agggguacuuauauaaaa

SEQ ID NO: 75909 - RNA, 19 nt, Artificial Sequence
  Synthetic
uagggguacuuauauaaaa

SEQ ID NO: 75910 - RNA, 20 nt, Artificial Sequence
  Synthetic
auagggguacuuauauaaaa

SEQ ID NO: 75911 - RNA, 22 nt, Artificial Sequence
  Synthetic
ugauagggguacuuauauaaaa

SEQ ID NO: 75912 - RNA, 23 nt, Artificial Sequence
  Synthetic
augauagggguacuuauauaaaa

SEQ ID NO: 75913 - RNA, 18 nt, Artificial Sequence
  Synthetic
uccuuugcaguuauaaaa

SEQ ID NO: 75914 - RNA, 19 nt, Artificial Sequence
  Synthetic
uuccuuugcaguuauaaaa

SEQ ID NO: 75915 - RNA, 20 nt, Artificial Sequence
  Synthetic
cuuccuuugcaguuauaaaa

SEQ ID NO: 75916 - RNA, 22 nt, Artificial Sequence
  Synthetic
cgcuuccuuugcaguuauaaaa

SEQ ID NO: 75917 - RNA, 24 nt, Artificial Sequence
  Synthetic
cgcgcuuccuuugcaguuauaaaa

SEQ ID NO: 75918 - RNA, 21 nt, Artificial Sequence
  Synthetic
auucacaacauguuuauaaaa

SEQ ID NO: 75919 - RNA, 22 nt, Artificial Sequence
  Synthetic
cauucacaacauguuuauaaaa

SEQ ID NO: 75920 - RNA, 23 nt, Artificial Sequence
  Synthetic
acauucacaacauguuuauaaaa

SEQ ID NO: 75921 - RNA, 18 nt, Artificial Sequence
  Synthetic
caauuuagcauacuaaaa

SEQ ID NO: 75922 - RNA, 19 nt, Artificial Sequence
  Synthetic
ccaauuuagcauacuaaaa

SEQ ID NO: 75923 - RNA, 20 nt, Artificial Sequence
  Synthetic
uccaauuuagcauacuaaaa

SEQ ID NO: 75924 - RNA, 22 nt, Artificial Sequence
  Synthetic
uguccaauuuagcauacuaaaa

SEQ ID NO: 75925 - RNA, 23 nt, Artificial Sequence
  Synthetic
cuguccaauuuagcauacuaaaa

SEQ ID NO: 75926 - RNA, 24 nt, Artificial Sequence
  Synthetic
ucuguccaauuuagcauacuaaaa

SEQ ID NO: 75927 - RNA, 19 nt, Artificial Sequence
  Synthetic
cgaagcuguuauccuaaaa

SEQ ID NO: 75928 - RNA, 21 nt, Artificial Sequence
  Synthetic
agcgaagcuguuauccuaaaa

SEQ ID NO: 75929 - RNA, 23 nt, Artificial Sequence
  Synthetic
agagcgaagcuguuauccuaaaa

SEQ ID NO: 75930 - RNA, 24 nt, Artificial Sequence
  Synthetic
cagagcgaagcuguuauccuaaaa

SEQ ID NO: 75931 - RNA, 19 nt, Artificial Sequence
  Synthetic
uguaccacugcuccuaaaa

SEQ ID NO: 75932 - RNA, 20 nt, Artificial Sequence
  Synthetic
auguaccacugcuccuaaaa

SEQ ID NO: 75933 - RNA, 21 nt, Artificial Sequence
  Synthetic
uauguaccacugcuccuaaaa

SEQ ID NO: 75934 - RNA, 22 nt, Artificial Sequence
  Synthetic
uuauguaccacugcuccuaaaa

SEQ ID NO: 75935 - RNA, 23 nt, Artificial Sequence
  Synthetic
cuuauguaccacugcuccuaaaa

SEQ ID NO: 75936 - RNA, 24 nt, Artificial Sequence
  Synthetic
ccuuauguaccacugcuccuaaaa

SEQ ID NO: 75937 - RNA, 18 nt, Artificial Sequence
  Synthetic
auuaaacauaagcuaaaa

SEQ ID NO: 75938 - RNA, 22 nt, Artificial Sequence
  Synthetic
ugggauuaaacauaagcuaaaa

SEQ ID NO: 75939 - RNA, 23 nt, Artificial Sequence
  Synthetic
cugggauuaaacauaagcuaaaa

SEQ ID NO: 75940 - RNA, 24 nt, Artificial Sequence
  Synthetic
ucugggauuaaacauaagcuaaaa

SEQ ID NO: 75941 - RNA, 18 nt, Artificial Sequence
  Synthetic
aaauucauauggcuaaaa

SEQ ID NO: 75942 - RNA, 19 nt, Artificial Sequence
  Synthetic
caaauucauauggcuaaaa

SEQ ID NO: 75943 - RNA, 20 nt, Artificial Sequence
  Synthetic
acaaauucauauggcuaaaa

SEQ ID NO: 75944 - RNA, 21 nt, Artificial Sequence
  Synthetic
uacaaauucauauggcuaaaa

SEQ ID NO: 75945 - RNA, 22 nt, Artificial Sequence
  Synthetic
auacaaauucauauggcuaaaa

SEQ ID NO: 75946 - RNA, 23 nt, Artificial Sequence
  Synthetic
aauacaaauucauauggcuaaaa

SEQ ID NO: 75947 - RNA, 24 nt, Artificial Sequence
  Synthetic
aaauacaaauucauauggcuaaaa

SEQ ID NO: 75948 - RNA, 18 nt, Artificial Sequence
  Synthetic
ugacaaguauggcuaaaa

SEQ ID NO: 75949 - RNA, 20 nt, Artificial Sequence
  Synthetic
ugugacaaguauggcuaaaa

SEQ ID NO: 75950 - RNA, 22 nt, Artificial Sequence
  Synthetic
ugugugacaaguauggcuaaaa

SEQ ID NO: 75951 - RNA, 23 nt, Artificial Sequence
  Synthetic
cugugugacaaguauggcuaaaa

SEQ ID NO: 75952 - RNA, 24 nt, Artificial Sequence
  Synthetic
ccugugugacaaguauggcuaaaa

SEQ ID NO: 75953 - RNA, 18 nt, Artificial Sequence
  Synthetic
agccaaugcuggcuaaaa

SEQ ID NO: 75954 - RNA, 19 nt, Artificial Sequence
  Synthetic
uagccaaugcuggcuaaaa

SEQ ID NO: 75955 - RNA, 20 nt, Artificial Sequence
  Synthetic
auagccaaugcuggcuaaaa

SEQ ID NO: 75956 - RNA, 21 nt, Artificial Sequence
  Synthetic
aauagccaaugcuggcuaaaa

SEQ ID NO: 75957 - RNA, 22 nt, Artificial Sequence
  Synthetic
uaauagccaaugcuggcuaaaa

SEQ ID NO: 75958 - RNA, 23 nt, Artificial Sequence
  Synthetic
uuaauagccaaugcuggcuaaaa

SEQ ID NO: 75959 - RNA, 18 nt, Artificial Sequence
  Synthetic
ccucaucugaugcuaaaa

SEQ ID NO: 75960 - RNA, 19 nt, Artificial Sequence
  Synthetic
uccucaucugaugcuaaaa

SEQ ID NO: 75961 - RNA, 20 nt, Artificial Sequence
  Synthetic
uuccucaucugaugcuaaaa

SEQ ID NO: 75962 - RNA, 21 nt, Artificial Sequence
  Synthetic
uuuccucaucugaugcuaaaa

SEQ ID NO: 75963 - RNA, 23 nt, Artificial Sequence
  Synthetic
aguuuccucaucugaugcuaaaa

SEQ ID NO: 75964 - RNA, 24 nt, Artificial Sequence
  Synthetic
aaguuuccucaucugaugcuaaaa

SEQ ID NO: 75965 - RNA, 19 nt, Artificial Sequence
  Synthetic
ugcaguccuguuucuaaaa

SEQ ID NO: 75966 - RNA, 20 nt, Artificial Sequence
  Synthetic
uugcaguccuguuucuaaaa

SEQ ID NO: 75967 - RNA, 21 nt, Artificial Sequence
  Synthetic
cuugcaguccuguuucuaaaa

SEQ ID NO: 75968 - RNA, 22 nt, Artificial Sequence
  Synthetic
ccuugcaguccuguuucuaaaa

SEQ ID NO: 75969 - RNA, 23 nt, Artificial Sequence
  Synthetic
uccuugcaguccuguuucuaaaa

SEQ ID NO: 75970 - RNA, 24 nt, Artificial Sequence
  Synthetic
uuccuugcaguccuguuucuaaaa

SEQ ID NO: 75971 - RNA, 18 nt, Artificial Sequence
  Synthetic
cuccaaugcccaguaaaa

SEQ ID NO: 75972 - RNA, 20 nt, Artificial Sequence
  Synthetic
agcuccaaugcccaguaaaa

SEQ ID NO: 75973 - RNA, 21 nt, Artificial Sequence
  Synthetic
uagcuccaaugcccaguaaaa

SEQ ID NO: 75974 - RNA, 22 nt, Artificial Sequence
  Synthetic
uuagcuccaaugcccaguaaaa

SEQ ID NO: 75975 - RNA, 23 nt, Artificial Sequence
  Synthetic
cuuagcuccaaugcccaguaaaa

SEQ ID NO: 75976 - RNA, 18 nt, Artificial Sequence
  Synthetic
uuaagauuagcaguaaaa

SEQ ID NO: 75977 - RNA, 19 nt, Artificial Sequence
  Synthetic
uuuaagauuagcaguaaaa

SEQ ID NO: 75978 - RNA, 20 nt, Artificial Sequence
  Synthetic
auuuaagauuagcaguaaaa

SEQ ID NO: 75979 - RNA, 21 nt, Artificial Sequence
  Synthetic
uauuuaagauuagcaguaaaa

SEQ ID NO: 75980 - RNA, 22 nt, Artificial Sequence
  Synthetic
uuauuuaagauuagcaguaaaa

SEQ ID NO: 75981 - RNA, 24 nt, Artificial Sequence
  Synthetic
uguuauuuaagauuagcaguaaaa

SEQ ID NO: 75982 - RNA, 18 nt, Artificial Sequence
  Synthetic
uacuauauagggguaaaa

SEQ ID NO: 75983 - RNA, 19 nt, Artificial Sequence
  Synthetic
uuacuauauagggguaaaa

SEQ ID NO: 75984 - RNA, 20 nt, Artificial Sequence
  Synthetic
uuuacuauauagggguaaaa

SEQ ID NO: 75985 - RNA, 21 nt, Artificial Sequence
  Synthetic
uuuuacuauauagggguaaaa

SEQ ID NO: 75986 - RNA, 22 nt, Artificial Sequence
  Synthetic
auuuuacuauauagggguaaaa

SEQ ID NO: 75987 - RNA, 23 nt, Artificial Sequence
  Synthetic
uauuuuacuauauagggguaaaa

SEQ ID NO: 75988 - RNA, 24 nt, Artificial Sequence
  Synthetic
auauuuuacuauauagggguaaaa

SEQ ID NO: 75989 - RNA, 18 nt, Artificial Sequence
  Synthetic
uucaguugcaugguaaaa

SEQ ID NO: 75990 - RNA, 20 nt, Artificial Sequence
  Synthetic
uguucaguugcaugguaaaa

SEQ ID NO: 75991 - RNA, 22 nt, Artificial Sequence
  Synthetic
uguguucaguugcaugguaaaa

SEQ ID NO: 75992 - RNA, 23 nt, Artificial Sequence
  Synthetic
cuguguucaguugcaugguaaaa

SEQ ID NO: 75993 - RNA, 24 nt, Artificial Sequence
  Synthetic
ucuguguucaguugcaugguaaaa

SEQ ID NO: 75994 - RNA, 19 nt, Artificial Sequence
  Synthetic
uguuuccagagugguaaaa

SEQ ID NO: 75995 - RNA, 20 nt, Artificial Sequence
  Synthetic
auguuuccagagugguaaaa

SEQ ID NO: 75996 - RNA, 21 nt, Artificial Sequence
  Synthetic
uauguuuccagagugguaaaa

SEQ ID NO: 75997 - RNA, 22 nt, Artificial Sequence
  Synthetic
cuauguuuccagagugguaaaa

SEQ ID NO: 75998 - RNA, 23 nt, Artificial Sequence
  Synthetic
ccuauguuuccagagugguaaaa

SEQ ID NO: 75999 - RNA, 24 nt, Artificial Sequence
  Synthetic
accuauguuuccagagugguaaaa

SEQ ID NO: 76000 - RNA, 21 nt, Artificial Sequence
  Synthetic
cauagaaauaaggauguaaaa

SEQ ID NO: 76001 - RNA, 22 nt, Artificial Sequence
  Synthetic
acauagaaauaaggauguaaaa

SEQ ID NO: 76002 - RNA, 23 nt, Artificial Sequence
  Synthetic
aacauagaaauaaggauguaaaa

SEQ ID NO: 76003 - RNA, 24 nt, Artificial Sequence
  Synthetic
aaacauagaaauaaggauguaaaa

SEQ ID NO: 76004 - RNA, 18 nt, Artificial Sequence
  Synthetic
acagaguguucuguaaaa

SEQ ID NO: 76005 - RNA, 19 nt, Artificial Sequence
  Synthetic
uacagaguguucuguaaaa

SEQ ID NO: 76006 - RNA, 20 nt, Artificial Sequence
  Synthetic
uuacagaguguucuguaaaa

SEQ ID NO: 76007 - RNA, 21 nt, Artificial Sequence
  Synthetic
cuuacagaguguucuguaaaa

SEQ ID NO: 76008 - RNA, 22 nt, Artificial Sequence
  Synthetic
ucuuacagaguguucuguaaaa

SEQ ID NO: 76009 - RNA, 23 nt, Artificial Sequence
  Synthetic
cucuuacagaguguucuguaaaa

SEQ ID NO: 76010 - RNA, 19 nt, Artificial Sequence
  Synthetic
ugcucggaaaauuguaaaa

SEQ ID NO: 76011 - RNA, 20 nt, Artificial Sequence
  Synthetic
uugcucggaaaauuguaaaa

SEQ ID NO: 76012 - RNA, 21 nt, Artificial Sequence
  Synthetic
auugcucggaaaauuguaaaa

SEQ ID NO: 76013 - RNA, 22 nt, Artificial Sequence
  Synthetic
aauugcucggaaaauuguaaaa

SEQ ID NO: 76014 - RNA, 23 nt, Artificial Sequence
  Synthetic
caauugcucggaaaauuguaaaa

SEQ ID NO: 76015 - RNA, 21 nt, Artificial Sequence
  Synthetic
cauuucuaugacaaauuaaaa

SEQ ID NO: 76016 - RNA, 22 nt, Artificial Sequence
  Synthetic
ucauuucuaugacaaauuaaaa

SEQ ID NO: 76017 - RNA, 23 nt, Artificial Sequence
  Synthetic
cucauuucuaugacaaauuaaaa

SEQ ID NO: 76018 - RNA, 24 nt, Artificial Sequence
  Synthetic
acucauuucuaugacaaauuaaaa

SEQ ID NO: 76019 - RNA, 18 nt, Artificial Sequence
  Synthetic
uuuucaguagaauuaaaa

SEQ ID NO: 76020 - RNA, 19 nt, Artificial Sequence
  Synthetic
uuuuucaguagaauuaaaa

SEQ ID NO: 76021 - RNA, 20 nt, Artificial Sequence
  Synthetic
auuuuucaguagaauuaaaa

SEQ ID NO: 76022 - RNA, 22 nt, Artificial Sequence
  Synthetic
agauuuuucaguagaauuaaaa

SEQ ID NO: 76023 - RNA, 23 nt, Artificial Sequence
  Synthetic
uagauuuuucaguagaauuaaaa

SEQ ID NO: 76024 - RNA, 24 nt, Artificial Sequence
  Synthetic
uuagauuuuucaguagaauuaaaa

SEQ ID NO: 76025 - RNA, 21 nt, Artificial Sequence
  Synthetic
auuaaaaacagcuaauuaaaa

SEQ ID NO: 76026 - RNA, 22 nt, Artificial Sequence
  Synthetic
uauuaaaaacagcuaauuaaaa

SEQ ID NO: 76027 - RNA, 23 nt, Artificial Sequence
  Synthetic
auauuaaaaacagcuaauuaaaa

SEQ ID NO: 76028 - RNA, 24 nt, Artificial Sequence
  Synthetic
cauauuaaaaacagcuaauuaaaa

SEQ ID NO: 76029 - RNA, 21 nt, Artificial Sequence
  Synthetic
uuuuuauuguauucauuaaaa

SEQ ID NO: 76030 - RNA, 22 nt, Artificial Sequence
  Synthetic
uuuuuuauuguauucauuaaaa

SEQ ID NO: 76031 - RNA, 23 nt, Artificial Sequence
  Synthetic
auuuuuuauuguauucauuaaaa

SEQ ID NO: 76032 - RNA, 24 nt, Artificial Sequence
  Synthetic
aauuuuuuauuguauucauuaaaa

SEQ ID NO: 76033 - RNA, 18 nt, Artificial Sequence
  Synthetic
uuuuaaggauacuuaaaa

SEQ ID NO: 76034 - RNA, 19 nt, Artificial Sequence
  Synthetic
uuuuuaaggauacuuaaaa

SEQ ID NO: 76035 - RNA, 20 nt, Artificial Sequence
  Synthetic
cuuuuuaaggauacuuaaaa

SEQ ID NO: 76036 - RNA, 21 nt, Artificial Sequence
  Synthetic
ccuuuuuaaggauacuuaaaa

SEQ ID NO: 76037 - RNA, 23 nt, Artificial Sequence
  Synthetic
ugccuuuuuaaggauacuuaaaa

SEQ ID NO: 76038 - RNA, 18 nt, Artificial Sequence
  Synthetic
cucucggagaucuuaaaa

SEQ ID NO: 76039 - RNA, 19 nt, Artificial Sequence
  Synthetic
ccucucggagaucuuaaaa

SEQ ID NO: 76040 - RNA, 21 nt, Artificial Sequence
  Synthetic
ugccucucggagaucuuaaaa

SEQ ID NO: 76041 - RNA, 22 nt, Artificial Sequence
  Synthetic
cugccucucggagaucuuaaaa

SEQ ID NO: 76042 - RNA, 23 nt, Artificial Sequence
  Synthetic
ucugccucucggagaucuuaaaa

SEQ ID NO: 76043 - RNA, 24 nt, Artificial Sequence
  Synthetic
uucugccucucggagaucuuaaaa

SEQ ID NO: 76044 - RNA, 21 nt, Artificial Sequence
  Synthetic
uuauucauuauuuucuuaaaa

SEQ ID NO: 76045 - RNA, 22 nt, Artificial Sequence
  Synthetic
cuuauucauuauuuucuuaaaa

SEQ ID NO: 76046 - RNA, 23 nt, Artificial Sequence
  Synthetic
acuuauucauuauuuucuuaaaa

SEQ ID NO: 76047 - RNA, 24 nt, Artificial Sequence
  Synthetic
uacuuauucauuauuuucuuaaaa

SEQ ID NO: 76048 - RNA, 22 nt, Artificial Sequence
  Synthetic
aguuuuccaacuuaaguuaaaa

SEQ ID NO: 76049 - RNA, 23 nt, Artificial Sequence
  Synthetic
uaguuuuccaacuuaaguuaaaa

SEQ ID NO: 76050 - RNA, 18 nt, Artificial Sequence
  Synthetic
cauaagaggaauuuaaaa

SEQ ID NO: 76051 - RNA, 20 nt, Artificial Sequence
  Synthetic
cgcauaagaggaauuuaaaa

SEQ ID NO: 76052 - RNA, 21 nt, Artificial Sequence
  Synthetic
ucgcauaagaggaauuuaaaa

SEQ ID NO: 76053 - RNA, 22 nt, Artificial Sequence
  Synthetic
uucgcauaagaggaauuuaaaa

SEQ ID NO: 76054 - RNA, 23 nt, Artificial Sequence
  Synthetic
uuucgcauaagaggaauuuaaaa

SEQ ID NO: 76055 - RNA, 24 nt, Artificial Sequence
  Synthetic
auuucgcauaagaggaauuuaaaa

SEQ ID NO: 76056 - RNA, 21 nt, Artificial Sequence
  Synthetic
cuuuuauaaaauuauuuaaaa

SEQ ID NO: 76057 - RNA, 22 nt, Artificial Sequence
  Synthetic
acuuuuauaaaauuauuuaaaa

SEQ ID NO: 76058 - RNA, 23 nt, Artificial Sequence
  Synthetic
cacuuuuauaaaauuauuuaaaa

SEQ ID NO: 76059 - RNA, 18 nt, Artificial Sequence
  Synthetic
ugcacauaaacuuuaaaa

SEQ ID NO: 76060 - RNA, 19 nt, Artificial Sequence
  Synthetic
cugcacauaaacuuuaaaa

SEQ ID NO: 76061 - RNA, 20 nt, Artificial Sequence
  Synthetic
ucugcacauaaacuuuaaaa

SEQ ID NO: 76062 - RNA, 21 nt, Artificial Sequence
  Synthetic
cucugcacauaaacuuuaaaa

SEQ ID NO: 76063 - RNA, 24 nt, Artificial Sequence
  Synthetic
uggcucugcacauaaacuuuaaaa

SEQ ID NO: 76064 - RNA, 18 nt, Artificial Sequence
  Synthetic
aguuuauucccuuuaaaa

SEQ ID NO: 76065 - RNA, 19 nt, Artificial Sequence
  Synthetic
aaguuuauucccuuuaaaa

SEQ ID NO: 76066 - RNA, 20 nt, Artificial Sequence
  Synthetic
uaaguuuauucccuuuaaaa

SEQ ID NO: 76067 - RNA, 22 nt, Artificial Sequence
  Synthetic
cguaaguuuauucccuuuaaaa

SEQ ID NO: 76068 - RNA, 23 nt, Artificial Sequence
  Synthetic
ucguaaguuuauucccuuuaaaa

SEQ ID NO: 76069 - RNA, 24 nt, Artificial Sequence
  Synthetic
aucguaaguuuauucccuuuaaaa

SEQ ID NO: 76070 - RNA, 21 nt, Artificial Sequence
  Synthetic
uguauuugaaaaauuuuaaaa

SEQ ID NO: 76071 - RNA, 23 nt, Artificial Sequence
  Synthetic
uguguauuugaaaaauuuuaaaa

SEQ ID NO: 76072 - RNA, 24 nt, Artificial Sequence
  Synthetic
cuguguauuugaaaaauuuuaaaa

SEQ ID NO: 76073 - RNA, 21 nt, Artificial Sequence
  Synthetic
auuauuucacagauuuuaaaa

SEQ ID NO: 76074 - RNA, 22 nt, Artificial Sequence
  Synthetic
aauuauuucacagauuuuaaaa

SEQ ID NO: 76075 - RNA, 23 nt, Artificial Sequence
  Synthetic
aaauuauuucacagauuuuaaaa

SEQ ID NO: 76076 - RNA, 24 nt, Artificial Sequence
  Synthetic
aaaauuauuucacagauuuuaaaa

SEQ ID NO: 76077 - RNA, 19 nt, Artificial Sequence
  Synthetic
aguccuuaauauuuuaaaa

SEQ ID NO: 76078 - RNA, 21 nt, Artificial Sequence
  Synthetic
cgaguccuuaauauuuuaaaa

SEQ ID NO: 76079 - RNA, 22 nt, Artificial Sequence
  Synthetic
ucgaguccuuaauauuuuaaaa

SEQ ID NO: 76080 - RNA, 23 nt, Artificial Sequence
  Synthetic
cucgaguccuuaauauuuuaaaa

SEQ ID NO: 76081 - RNA, 24 nt, Artificial Sequence
  Synthetic
acucgaguccuuaauauuuuaaaa

SEQ ID NO: 76082 - RNA, 21 nt, Artificial Sequence
  Synthetic
aaaccacauuuuauuuuaaaa

SEQ ID NO: 76083 - RNA, 22 nt, Artificial Sequence
  Synthetic
uaaaccacauuuuauuuuaaaa

SEQ ID NO: 76084 - RNA, 23 nt, Artificial Sequence
  Synthetic
uuaaaccacauuuuauuuuaaaa

SEQ ID NO: 76085 - RNA, 24 nt, Artificial Sequence
  Synthetic
auuaaaccacauuuuauuuuaaaa

SEQ ID NO: 76086 - RNA, 21 nt, Artificial Sequence
  Synthetic
uguuuauucaauuuuuuaaaa

SEQ ID NO: 76087 - RNA, 22 nt, Artificial Sequence
  Synthetic
uuguuuauucaauuuuuuaaaa

SEQ ID NO: 76088 - RNA, 23 nt, Artificial Sequence
  Synthetic
uuuguuuauucaauuuuuuaaaa

SEQ ID NO: 76089 - RNA, 22 nt, Artificial Sequence
  Synthetic
aggggaucaagagaaaaacaaa

SEQ ID NO: 76090 - RNA, 23 nt, Artificial Sequence
  Synthetic
caggggaucaagagaaaaacaaa

SEQ ID NO: 76091 - RNA, 24 nt, Artificial Sequence
  Synthetic
ccaggggaucaagagaaaaacaaa

SEQ ID NO: 76092 - RNA, 21 nt, Artificial Sequence
  Synthetic
aggguuccuuagagaaacaaa

SEQ ID NO: 76093 - RNA, 22 nt, Artificial Sequence
  Synthetic
uaggguuccuuagagaaacaaa

SEQ ID NO: 76094 - RNA, 23 nt, Artificial Sequence
  Synthetic
uuaggguuccuuagagaaacaaa

SEQ ID NO: 76095 - RNA, 24 nt, Artificial Sequence
  Synthetic
auuaggguuccuuagagaaacaaa

SEQ ID NO: 76096 - RNA, 18 nt, Artificial Sequence
  Synthetic
acucacuacugaaacaaa

SEQ ID NO: 76097 - RNA, 19 nt, Artificial Sequence
  Synthetic
cacucacuacugaaacaaa

SEQ ID NO: 76098 - RNA, 22 nt, Artificial Sequence
  Synthetic
aggcacucacuacugaaacaaa

SEQ ID NO: 76099 - RNA, 23 nt, Artificial Sequence
  Synthetic
aaggcacucacuacugaaacaaa

SEQ ID NO: 76100 - RNA, 18 nt, Artificial Sequence
  Synthetic
aagcuuucuuuaaacaaa

SEQ ID NO: 76101 - RNA, 20 nt, Artificial Sequence
  Synthetic
ugaagcuuucuuuaaacaaa

SEQ ID NO: 76102 - RNA, 21 nt, Artificial Sequence
  Synthetic
uugaagcuuucuuuaaacaaa

SEQ ID NO: 76103 - RNA, 22 nt, Artificial Sequence
  Synthetic
auugaagcuuucuuuaaacaaa

SEQ ID NO: 76104 - RNA, 23 nt, Artificial Sequence
  Synthetic
aauugaagcuuucuuuaaacaaa

SEQ ID NO: 76105 - RNA, 24 nt, Artificial Sequence
  Synthetic
caauugaagcuuucuuuaaacaaa

SEQ ID NO: 76106 - RNA, 21 nt, Artificial Sequence
  Synthetic
auuuuaacaaauaucaacaaa

SEQ ID NO: 76107 - RNA, 22 nt, Artificial Sequence
  Synthetic
aauuuuaacaaauaucaacaaa

SEQ ID NO: 76108 - RNA, 23 nt, Artificial Sequence
  Synthetic
aaauuuuaacaaauaucaacaaa

SEQ ID NO: 76109 - RNA, 24 nt, Artificial Sequence
  Synthetic
uaaauuuuaacaaauaucaacaaa

SEQ ID NO: 76110 - RNA, 18 nt, Artificial Sequence
  Synthetic
ucacauaguaucaacaaa

SEQ ID NO: 76111 - RNA, 19 nt, Artificial Sequence
  Synthetic
uucacauaguaucaacaaa

SEQ ID NO: 76112 - RNA, 20 nt, Artificial Sequence
  Synthetic
cuucacauaguaucaacaaa

SEQ ID NO: 76113 - RNA, 21 nt, Artificial Sequence
  Synthetic
acuucacauaguaucaacaaa

SEQ ID NO: 76114 - RNA, 22 nt, Artificial Sequence
  Synthetic
cacuucacauaguaucaacaaa

SEQ ID NO: 76115 - RNA, 23 nt, Artificial Sequence
  Synthetic
ccacuucacauaguaucaacaaa

SEQ ID NO: 76116 - RNA, 18 nt, Artificial Sequence
  Synthetic
uguaaccaucagaacaaa

SEQ ID NO: 76117 - RNA, 19 nt, Artificial Sequence
  Synthetic
auguaaccaucagaacaaa

SEQ ID NO: 76118 - RNA, 20 nt, Artificial Sequence
  Synthetic
aauguaaccaucagaacaaa

SEQ ID NO: 76119 - RNA, 22 nt, Artificial Sequence
  Synthetic
agaauguaaccaucagaacaaa

SEQ ID NO: 76120 - RNA, 23 nt, Artificial Sequence
  Synthetic
cagaauguaaccaucagaacaaa

SEQ ID NO: 76121 - RNA, 21 nt, Artificial Sequence
  Synthetic
uaaagccacaaaaaacacaaa

SEQ ID NO: 76122 - RNA, 22 nt, Artificial Sequence
  Synthetic
cuaaagccacaaaaaacacaaa

SEQ ID NO: 76123 - RNA, 23 nt, Artificial Sequence
  Synthetic
ucuaaagccacaaaaaacacaaa

SEQ ID NO: 76124 - RNA, 24 nt, Artificial Sequence
  Synthetic
uucuaaagccacaaaaaacacaaa

SEQ ID NO: 76125 - RNA, 18 nt, Artificial Sequence
  Synthetic
cuguagcauucacacaaa

SEQ ID NO: 76126 - RNA, 19 nt, Artificial Sequence
  Synthetic
ccuguagcauucacacaaa

SEQ ID NO: 76127 - RNA, 20 nt, Artificial Sequence
  Synthetic
accuguagcauucacacaaa

SEQ ID NO: 76128 - RNA, 21 nt, Artificial Sequence
  Synthetic
caccuguagcauucacacaaa

SEQ ID NO: 76129 - RNA, 22 nt, Artificial Sequence
  Synthetic
acaccuguagcauucacacaaa

SEQ ID NO: 76130 - RNA, 23 nt, Artificial Sequence
  Synthetic
aacaccuguagcauucacacaaa

SEQ ID NO: 76131 - RNA, 24 nt, Artificial Sequence
  Synthetic
caacaccuguagcauucacacaaa

SEQ ID NO: 76132 - RNA, 19 nt, Artificial Sequence
  Synthetic
ugggaagugcugacacaaa

SEQ ID NO: 76133 - RNA, 20 nt, Artificial Sequence
  Synthetic
uugggaagugcugacacaaa

SEQ ID NO: 76134 - RNA, 21 nt, Artificial Sequence
  Synthetic
cuugggaagugcugacacaaa

SEQ ID NO: 76135 - RNA, 22 nt, Artificial Sequence
  Synthetic
acuugggaagugcugacacaaa

SEQ ID NO: 76136 - RNA, 23 nt, Artificial Sequence
  Synthetic
aacuugggaagugcugacacaaa

SEQ ID NO: 76137 - RNA, 18 nt, Artificial Sequence
  Synthetic
ccgguguugauccacaaa

SEQ ID NO: 76138 - RNA, 21 nt, Artificial Sequence
  Synthetic
aggccgguguugauccacaaa

SEQ ID NO: 76139 - RNA, 22 nt, Artificial Sequence
  Synthetic
aaggccgguguugauccacaaa

SEQ ID NO: 76140 - RNA, 23 nt, Artificial Sequence
  Synthetic
aaaggccgguguugauccacaaa

SEQ ID NO: 76141 - RNA, 24 nt, Artificial Sequence
  Synthetic
caaaggccgguguugauccacaaa

SEQ ID NO: 76142 - RNA, 18 nt, Artificial Sequence
  Synthetic
agggaacuucaucacaaa

SEQ ID NO: 76143 - RNA, 19 nt, Artificial Sequence
  Synthetic
aagggaacuucaucacaaa

SEQ ID NO: 76144 - RNA, 20 nt, Artificial Sequence
  Synthetic
aaagggaacuucaucacaaa

SEQ ID NO: 76145 - RNA, 22 nt, Artificial Sequence
  Synthetic
agaaagggaacuucaucacaaa

SEQ ID NO: 76146 - RNA, 23 nt, Artificial Sequence
  Synthetic
aagaaagggaacuucaucacaaa

SEQ ID NO: 76147 - RNA, 18 nt, Artificial Sequence
  Synthetic
uucaaauucacucacaaa

SEQ ID NO: 76148 - RNA, 19 nt, Artificial Sequence
  Synthetic
auucaaauucacucacaaa

SEQ ID NO: 76149 - RNA, 20 nt, Artificial Sequence
  Synthetic
aauucaaauucacucacaaa

SEQ ID NO: 76150 - RNA, 21 nt, Artificial Sequence
  Synthetic
aaauucaaauucacucacaaa

SEQ ID NO: 76151 - RNA, 22 nt, Artificial Sequence
  Synthetic
aaaauucaaauucacucacaaa

SEQ ID NO: 76152 - RNA, 23 nt, Artificial Sequence
  Synthetic
aaaaauucaaauucacucacaaa

SEQ ID NO: 76153 - RNA, 24 nt, Artificial Sequence
  Synthetic
aaaaaauucaaauucacucacaaa

SEQ ID NO: 76154 - RNA, 19 nt, Artificial Sequence
  Synthetic
uguguggagcuaagacaaa

SEQ ID NO: 76155 - RNA, 20 nt, Artificial Sequence
  Synthetic
cuguguggagcuaagacaaa

SEQ ID NO: 76156 - RNA, 21 nt, Artificial Sequence
  Synthetic
acuguguggagcuaagacaaa

SEQ ID NO: 76157 - RNA, 18 nt, Artificial Sequence
  Synthetic
agcagauucccugacaaa

SEQ ID NO: 76158 - RNA, 20 nt, Artificial Sequence
  Synthetic
ugagcagauucccugacaaa

SEQ ID NO: 76159 - RNA, 22 nt, Artificial Sequence
  Synthetic
agugagcagauucccugacaaa

SEQ ID NO: 76160 - RNA, 23 nt, Artificial Sequence
  Synthetic
cagugagcagauucccugacaaa

SEQ ID NO: 76161 - RNA, 24 nt, Artificial Sequence
  Synthetic
acagugagcagauucccugacaaa

SEQ ID NO: 76162 - RNA, 18 nt, Artificial Sequence
  Synthetic
cugucacugauugacaaa

SEQ ID NO: 76163 - RNA, 19 nt, Artificial Sequence
  Synthetic
ucugucacugauugacaaa

SEQ ID NO: 76164 - RNA, 20 nt, Artificial Sequence
  Synthetic
cucugucacugauugacaaa

SEQ ID NO: 76165 - RNA, 22 nt, Artificial Sequence
  Synthetic
agcucugucacugauugacaaa

SEQ ID NO: 76166 - RNA, 24 nt, Artificial Sequence
  Synthetic
agagcucugucacugauugacaaa

SEQ ID NO: 76167 - RNA, 18 nt, Artificial Sequence
  Synthetic
aaaauccccaaauacaaa

SEQ ID NO: 76168 - RNA, 19 nt, Artificial Sequence
  Synthetic
caaaauccccaaauacaaa

SEQ ID NO: 76169 - RNA, 20 nt, Artificial Sequence
  Synthetic
acaaaauccccaaauacaaa

SEQ ID NO: 76170 - RNA, 21 nt, Artificial Sequence
  Synthetic
aacaaaauccccaaauacaaa

SEQ ID NO: 76171 - RNA, 23 nt, Artificial Sequence
  Synthetic
cgaacaaaauccccaaauacaaa

SEQ ID NO: 76172 - RNA, 24 nt, Artificial Sequence
  Synthetic
ucgaacaaaauccccaaauacaaa

SEQ ID NO: 76173 - RNA, 21 nt, Artificial Sequence
  Synthetic
aaaaaauucuucaaauacaaa

SEQ ID NO: 76174 - RNA, 22 nt, Artificial Sequence
  Synthetic
aaaaaaauucuucaaauacaaa

SEQ ID NO: 76175 - RNA, 23 nt, Artificial Sequence
  Synthetic
aaaaaaaauucuucaaauacaaa

SEQ ID NO: 76176 - RNA, 18 nt, Artificial Sequence
  Synthetic
ucuaaauauacauacaaa

SEQ ID NO: 76177 - RNA, 19 nt, Artificial Sequence
  Synthetic
uucuaaauauacauacaaa

SEQ ID NO: 76178 - RNA, 20 nt, Artificial Sequence
  Synthetic
auucuaaauauacauacaaa

SEQ ID NO: 76179 - RNA, 21 nt, Artificial Sequence
  Synthetic
aauucuaaauauacauacaaa

SEQ ID NO: 76180 - RNA, 22 nt, Artificial Sequence
  Synthetic
aaauucuaaauauacauacaaa

SEQ ID NO: 76181 - RNA, 20 nt, Artificial Sequence
  Synthetic
uggaugucuauucaaccaaa

SEQ ID NO: 76182 - RNA, 21 nt, Artificial Sequence
  Synthetic
cuggaugucuauucaaccaaa

SEQ ID NO: 76183 - RNA, 23 nt, Artificial Sequence
  Synthetic
agcuggaugucuauucaaccaaa

SEQ ID NO: 76184 - RNA, 24 nt, Artificial Sequence
  Synthetic
aagcuggaugucuauucaaccaaa

SEQ ID NO: 76185 - RNA, 18 nt, Artificial Sequence
  Synthetic
cuuauaaggaagaccaaa

SEQ ID NO: 76186 - RNA, 20 nt, Artificial Sequence
  Synthetic
cgcuuauaaggaagaccaaa

SEQ ID NO: 76187 - RNA, 21 nt, Artificial Sequence
  Synthetic
acgcuuauaaggaagaccaaa

SEQ ID NO: 76188 - RNA, 22 nt, Artificial Sequence
  Synthetic
uacgcuuauaaggaagaccaaa

SEQ ID NO: 76189 - RNA, 23 nt, Artificial Sequence
  Synthetic
auacgcuuauaaggaagaccaaa

SEQ ID NO: 76190 - RNA, 24 nt, Artificial Sequence
  Synthetic
aauacgcuuauaaggaagaccaaa

SEQ ID NO: 76191 - RNA, 18 nt, Artificial Sequence
  Synthetic
aauucguguucuaccaaa

SEQ ID NO: 76192 - RNA, 20 nt, Artificial Sequence
  Synthetic
ugaauucguguucuaccaaa

SEQ ID NO: 76193 - RNA, 22 nt, Artificial Sequence
  Synthetic
agugaauucguguucuaccaaa

SEQ ID NO: 76194 - RNA, 24 nt, Artificial Sequence
  Synthetic
agagugaauucguguucuaccaaa

SEQ ID NO: 76195 - RNA, 18 nt, Artificial Sequence
  Synthetic
cuguuuacugaacccaaa

SEQ ID NO: 76196 - RNA, 19 nt, Artificial Sequence
  Synthetic
acuguuuacugaacccaaa

SEQ ID NO: 76197 - RNA, 21 nt, Artificial Sequence
  Synthetic
ugacuguuuacugaacccaaa

SEQ ID NO: 76198 - RNA, 22 nt, Artificial Sequence
  Synthetic
uugacuguuuacugaacccaaa

SEQ ID NO: 76199 - RNA, 23 nt, Artificial Sequence
  Synthetic
auugacuguuuacugaacccaaa

SEQ ID NO: 76200 - RNA, 24 nt, Artificial Sequence
  Synthetic
cauugacuguuuacugaacccaaa

SEQ ID NO: 76201 - RNA, 18 nt, Artificial Sequence
  Synthetic
aaacgaaaucuccccaaa

SEQ ID NO: 76202 - RNA, 20 nt, Artificial Sequence
  Synthetic
ugaaacgaaaucuccccaaa

SEQ ID NO: 76203 - RNA, 22 nt, Artificial Sequence
  Synthetic
agugaaacgaaaucuccccaaa

SEQ ID NO: 76204 - RNA, 23 nt, Artificial Sequence
  Synthetic
aagugaaacgaaaucuccccaaa

SEQ ID NO: 76205 - RNA, 24 nt, Artificial Sequence
  Synthetic
aaagugaaacgaaaucuccccaaa

SEQ ID NO: 76206 - RNA, 18 nt, Artificial Sequence
  Synthetic
ugugcuagguuucccaaa

SEQ ID NO: 76207 - RNA, 19 nt, Artificial Sequence
  Synthetic
augugcuagguuucccaaa

SEQ ID NO: 76208 - RNA, 20 nt, Artificial Sequence
  Synthetic
uaugugcuagguuucccaaa

SEQ ID NO: 76209 - RNA, 22 nt, Artificial Sequence
  Synthetic
uguaugugcuagguuucccaaa

SEQ ID NO: 76210 - RNA, 24 nt, Artificial Sequence
  Synthetic
uguguaugugcuagguuucccaaa

SEQ ID NO: 76211 - RNA, 18 nt, Artificial Sequence
  Synthetic
caaauagcuagagccaaa

SEQ ID NO: 76212 - RNA, 19 nt, Artificial Sequence
  Synthetic
acaaauagcuagagccaaa

SEQ ID NO: 76213 - RNA, 20 nt, Artificial Sequence
  Synthetic
aacaaauagcuagagccaaa

SEQ ID NO: 76214 - RNA, 22 nt, Artificial Sequence
  Synthetic
ugaacaaauagcuagagccaaa

SEQ ID NO: 76215 - RNA, 23 nt, Artificial Sequence
  Synthetic
uugaacaaauagcuagagccaaa

SEQ ID NO: 76216 - RNA, 24 nt, Artificial Sequence
  Synthetic
uuugaacaaauagcuagagccaaa

SEQ ID NO: 76217 - RNA, 18 nt, Artificial Sequence
  Synthetic
ccugaacaccuggccaaa

SEQ ID NO: 76218 - RNA, 19 nt, Artificial Sequence
  Synthetic
uccugaacaccuggccaaa

SEQ ID NO: 76219 - RNA, 20 nt, Artificial Sequence
  Synthetic
auccugaacaccuggccaaa

SEQ ID NO: 76220 - RNA, 21 nt, Artificial Sequence
  Synthetic
uauccugaacaccuggccaaa

SEQ ID NO: 76221 - RNA, 22 nt, Artificial Sequence
  Synthetic
uuauccugaacaccuggccaaa

SEQ ID NO: 76222 - RNA, 23 nt, Artificial Sequence
  Synthetic
auuauccugaacaccuggccaaa

SEQ ID NO: 76223 - RNA, 24 nt, Artificial Sequence
  Synthetic
aauuauccugaacaccuggccaaa

SEQ ID NO: 76224 - RNA, 18 nt, Artificial Sequence
  Synthetic
auagaugauggugccaaa

SEQ ID NO: 76225 - RNA, 20 nt, Artificial Sequence
  Synthetic
agauagaugauggugccaaa

SEQ ID NO: 76226 - RNA, 21 nt, Artificial Sequence
  Synthetic
uagauagaugauggugccaaa

SEQ ID NO: 76227 - RNA, 22 nt, Artificial Sequence
  Synthetic
auagauagaugauggugccaaa

SEQ ID NO: 76228 - RNA, 23 nt, Artificial Sequence
  Synthetic
uauagauagaugauggugccaaa

SEQ ID NO: 76229 - RNA, 24 nt, Artificial Sequence
  Synthetic
uuauagauagaugauggugccaaa

SEQ ID NO: 76230 - RNA, 18 nt, Artificial Sequence
  Synthetic
uaauauugaucauccaaa

SEQ ID NO: 76231 - RNA, 19 nt, Artificial Sequence
  Synthetic
auaauauugaucauccaaa

SEQ ID NO: 76232 - RNA, 21 nt, Artificial Sequence
  Synthetic
ugauaauauugaucauccaaa

SEQ ID NO: 76233 - RNA, 22 nt, Artificial Sequence
  Synthetic
uugauaauauugaucauccaaa

SEQ ID NO: 76234 - RNA, 23 nt, Artificial Sequence
  Synthetic
cuugauaauauugaucauccaaa

SEQ ID NO: 76235 - RNA, 24 nt, Artificial Sequence
  Synthetic
ccuugauaauauugaucauccaaa

SEQ ID NO: 76236 - RNA, 22 nt, Artificial Sequence
  Synthetic
ugaaauagccaacauauccaaa

SEQ ID NO: 76237 - RNA, 23 nt, Artificial Sequence
  Synthetic
augaaauagccaacauauccaaa

SEQ ID NO: 76238 - RNA, 24 nt, Artificial Sequence
  Synthetic
uaugaaauagccaacauauccaaa

SEQ ID NO: 76239 - RNA, 18 nt, Artificial Sequence
  Synthetic
uuacaacugguauccaaa

SEQ ID NO: 76240 - RNA, 19 nt, Artificial Sequence
  Synthetic
auuacaacugguauccaaa

SEQ ID NO: 76241 - RNA, 20 nt, Artificial Sequence
  Synthetic
cauuacaacugguauccaaa

SEQ ID NO: 76242 - RNA, 21 nt, Artificial Sequence
  Synthetic
acauuacaacugguauccaaa

SEQ ID NO: 76243 - RNA, 23 nt, Artificial Sequence
  Synthetic
agacauuacaacugguauccaaa

SEQ ID NO: 76244 - RNA, 18 nt, Artificial Sequence
  Synthetic
uucggcugccucuccaaa

SEQ ID NO: 76245 - RNA, 19 nt, Artificial Sequence
  Synthetic
auucggcugccucuccaaa

SEQ ID NO: 76246 - RNA, 20 nt, Artificial Sequence
  Synthetic
cauucggcugccucuccaaa

SEQ ID NO: 76247 - RNA, 22 nt, Artificial Sequence
  Synthetic
ugcauucggcugccucuccaaa

SEQ ID NO: 76248 - RNA, 23 nt, Artificial Sequence
  Synthetic
uugcauucggcugccucuccaaa

SEQ ID NO: 76249 - RNA, 24 nt, Artificial Sequence
  Synthetic
cuugcauucggcugccucuccaaa

SEQ ID NO: 76250 - RNA, 18 nt, Artificial Sequence
  Synthetic
uaacucccgcucuccaaa

SEQ ID NO: 76251 - RNA, 19 nt, Artificial Sequence
  Synthetic
auaacucccgcucuccaaa

SEQ ID NO: 76252 - RNA, 20 nt, Artificial Sequence
  Synthetic
cauaacucccgcucuccaaa

SEQ ID NO: 76253 - RNA, 21 nt, Artificial Sequence
  Synthetic
ccauaacucccgcucuccaaa

SEQ ID NO: 76254 - RNA, 22 nt, Artificial Sequence
  Synthetic
cccauaacucccgcucuccaaa

SEQ ID NO: 76255 - RNA, 23 nt, Artificial Sequence
  Synthetic
ccccauaacucccgcucuccaaa

SEQ ID NO: 76256 - RNA, 24 nt, Artificial Sequence
  Synthetic
accccauaacucccgcucuccaaa

SEQ ID NO: 76257 - RNA, 21 nt, Artificial Sequence
  Synthetic
caaaaugauccaaauuccaaa

SEQ ID NO: 76258 - RNA, 24 nt, Artificial Sequence
  Synthetic
uggcaaaaugauccaaauuccaaa

SEQ ID NO: 76259 - RNA, 21 nt, Artificial Sequence
  Synthetic
cagaaaggccagaauuccaaa

SEQ ID NO: 76260 - RNA, 23 nt, Artificial Sequence
  Synthetic
agcagaaaggccagaauuccaaa

SEQ ID NO: 76261 - RNA, 24 nt, Artificial Sequence
  Synthetic
uagcagaaaggccagaauuccaaa

SEQ ID NO: 76262 - RNA, 18 nt, Artificial Sequence
  Synthetic
uuaaagagcuuuuccaaa

SEQ ID NO: 76263 - RNA, 19 nt, Artificial Sequence
  Synthetic
uuuaaagagcuuuuccaaa

SEQ ID NO: 76264 - RNA, 20 nt, Artificial Sequence
  Synthetic
cuuuaaagagcuuuuccaaa

SEQ ID NO: 76265 - RNA, 21 nt, Artificial Sequence
  Synthetic
acuuuaaagagcuuuuccaaa

SEQ ID NO: 76266 - RNA, 23 nt, Artificial Sequence
  Synthetic
agacuuuaaagagcuuuuccaaa

SEQ ID NO: 76267 - RNA, 24 nt, Artificial Sequence
  Synthetic
aagacuuuaaagagcuuuuccaaa

SEQ ID NO: 76268 - RNA, 18 nt, Artificial Sequence
  Synthetic
ugugguuguauaagcaaa

SEQ ID NO: 76269 - RNA, 21 nt, Artificial Sequence
  Synthetic
cggugugguuguauaagcaaa

SEQ ID NO: 76270 - RNA, 22 nt, Artificial Sequence
  Synthetic
acggugugguuguauaagcaaa

SEQ ID NO: 76271 - RNA, 23 nt, Artificial Sequence
  Synthetic
aacggugugguuguauaagcaaa

SEQ ID NO: 76272 - RNA, 24 nt, Artificial Sequence
  Synthetic
uaacggugugguuguauaagcaaa

SEQ ID NO: 76273 - RNA, 21 nt, Artificial Sequence
  Synthetic
cagaggaaucuauacagcaaa

SEQ ID NO: 76274 - RNA, 22 nt, Artificial Sequence
  Synthetic
ucagaggaaucuauacagcaaa

SEQ ID NO: 76275 - RNA, 23 nt, Artificial Sequence
  Synthetic
uucagaggaaucuauacagcaaa

SEQ ID NO: 76276 - RNA, 24 nt, Artificial Sequence
  Synthetic
auucagaggaaucuauacagcaaa

SEQ ID NO: 76277 - RNA, 18 nt, Artificial Sequence
  Synthetic
cuguaugcaggcagcaaa

SEQ ID NO: 76278 - RNA, 20 nt, Artificial Sequence
  Synthetic
agcuguaugcaggcagcaaa

SEQ ID NO: 76279 - RNA, 21 nt, Artificial Sequence
  Synthetic
aagcuguaugcaggcagcaaa

SEQ ID NO: 76280 - RNA, 22 nt, Artificial Sequence
  Synthetic
caagcuguaugcaggcagcaaa

SEQ ID NO: 76281 - RNA, 23 nt, Artificial Sequence
  Synthetic
ucaagcuguaugcaggcagcaaa

SEQ ID NO: 76282 - RNA, 24 nt, Artificial Sequence
  Synthetic
cucaagcuguaugcaggcagcaaa

SEQ ID NO: 76283 - RNA, 21 nt, Artificial Sequence
  Synthetic
cgagauggggaaaagagcaaa

SEQ ID NO: 76284 - RNA, 22 nt, Artificial Sequence
  Synthetic
acgagauggggaaaagagcaaa

SEQ ID NO: 76285 - RNA, 24 nt, Artificial Sequence
  Synthetic
agacgagauggggaaaagagcaaa

SEQ ID NO: 76286 - RNA, 20 nt, Artificial Sequence
  Synthetic
aggccuugcuaaugagcaaa

SEQ ID NO: 76287 - RNA, 22 nt, Artificial Sequence
  Synthetic
agaggccuugcuaaugagcaaa

SEQ ID NO: 76288 - RNA, 23 nt, Artificial Sequence
  Synthetic
uagaggccuugcuaaugagcaaa

SEQ ID NO: 76289 - RNA, 24 nt, Artificial Sequence
  Synthetic
cuagaggccuugcuaaugagcaaa

SEQ ID NO: 76290 - RNA, 18 nt, Artificial Sequence
  Synthetic
ucagaaaauccuagcaaa

SEQ ID NO: 76291 - RNA, 19 nt, Artificial Sequence
  Synthetic
uucagaaaauccuagcaaa

SEQ ID NO: 76292 - RNA, 20 nt, Artificial Sequence
  Synthetic
uuucagaaaauccuagcaaa

SEQ ID NO: 76293 - RNA, 21 nt, Artificial Sequence
  Synthetic
cuuucagaaaauccuagcaaa

SEQ ID NO: 76294 - RNA, 23 nt, Artificial Sequence
  Synthetic
agcuuucagaaaauccuagcaaa

SEQ ID NO: 76295 - RNA, 24 nt, Artificial Sequence
  Synthetic
aagcuuucagaaaauccuagcaaa

SEQ ID NO: 76296 - RNA, 18 nt, Artificial Sequence
  Synthetic
uaaaaggaauaccgcaaa

SEQ ID NO: 76297 - RNA, 19 nt, Artificial Sequence
  Synthetic
cuaaaaggaauaccgcaaa

SEQ ID NO: 76298 - RNA, 20 nt, Artificial Sequence
  Synthetic
acuaaaaggaauaccgcaaa

SEQ ID NO: 76299 - RNA, 21 nt, Artificial Sequence
  Synthetic
aacuaaaaggaauaccgcaaa

SEQ ID NO: 76300 - RNA, 22 nt, Artificial Sequence
  Synthetic
aaacuaaaaggaauaccgcaaa

SEQ ID NO: 76301 - RNA, 18 nt, Artificial Sequence
  Synthetic
acucacaugcauggcaaa

SEQ ID NO: 76302 - RNA, 20 nt, Artificial Sequence
  Synthetic
ugacucacaugcauggcaaa

SEQ ID NO: 76303 - RNA, 21 nt, Artificial Sequence
  Synthetic
uugacucacaugcauggcaaa

SEQ ID NO: 76304 - RNA, 22 nt, Artificial Sequence
  Synthetic
auugacucacaugcauggcaaa

SEQ ID NO: 76305 - RNA, 23 nt, Artificial Sequence
  Synthetic
aauugacucacaugcauggcaaa

SEQ ID NO: 76306 - RNA, 24 nt, Artificial Sequence
  Synthetic
aaauugacucacaugcauggcaaa

SEQ ID NO: 76307 - RNA, 18 nt, Artificial Sequence
  Synthetic
agaagucacuauggcaaa

SEQ ID NO: 76308 - RNA, 19 nt, Artificial Sequence
  Synthetic
cagaagucacuauggcaaa

SEQ ID NO: 76309 - RNA, 20 nt, Artificial Sequence
  Synthetic
acagaagucacuauggcaaa

SEQ ID NO: 76310 - RNA, 22 nt, Artificial Sequence
  Synthetic
ugacagaagucacuauggcaaa

SEQ ID NO: 76311 - RNA, 23 nt, Artificial Sequence
  Synthetic
cugacagaagucacuauggcaaa

SEQ ID NO: 76312 - RNA, 24 nt, Artificial Sequence
  Synthetic
ucugacagaagucacuauggcaaa

SEQ ID NO: 76313 - RNA, 19 nt, Artificial Sequence
  Synthetic
agagauacaaggaugcaaa

SEQ ID NO: 76314 - RNA, 20 nt, Artificial Sequence
  Synthetic
cagagauacaaggaugcaaa

SEQ ID NO: 76315 - RNA, 21 nt, Artificial Sequence
  Synthetic
ccagagauacaaggaugcaaa

SEQ ID NO: 76316 - RNA, 22 nt, Artificial Sequence
  Synthetic
accagagauacaaggaugcaaa

SEQ ID NO: 76317 - RNA, 23 nt, Artificial Sequence
  Synthetic
aaccagagauacaaggaugcaaa

SEQ ID NO: 76318 - RNA, 24 nt, Artificial Sequence
  Synthetic
uaaccagagauacaaggaugcaaa

SEQ ID NO: 76319 - RNA, 19 nt, Artificial Sequence
  Synthetic
agguacuugaaacugcaaa

SEQ ID NO: 76320 - RNA, 20 nt, Artificial Sequence
  Synthetic
aagguacuugaaacugcaaa

SEQ ID NO: 76321 - RNA, 21 nt, Artificial Sequence
  Synthetic
aaagguacuugaaacugcaaa

SEQ ID NO: 76322 - RNA, 23 nt, Artificial Sequence
  Synthetic
ugaaagguacuugaaacugcaaa

SEQ ID NO: 76323 - RNA, 24 nt, Artificial Sequence
  Synthetic
augaaagguacuugaaacugcaaa

SEQ ID NO: 76324 - RNA, 19 nt, Artificial Sequence
  Synthetic
aguggacaggugcugcaaa

SEQ ID NO: 76325 - RNA, 21 nt, Artificial Sequence
  Synthetic
agaguggacaggugcugcaaa

SEQ ID NO: 76326 - RNA, 23 nt, Artificial Sequence
  Synthetic
agagaguggacaggugcugcaaa

SEQ ID NO: 76327 - RNA, 18 nt, Artificial Sequence
  Synthetic
aauuguacauucugcaaa

SEQ ID NO: 76328 - RNA, 19 nt, Artificial Sequence
  Synthetic
uaauuguacauucugcaaa

SEQ ID NO: 76329 - RNA, 22 nt, Artificial Sequence
  Synthetic
agguaauuguacauucugcaaa

SEQ ID NO: 76330 - RNA, 23 nt, Artificial Sequence
  Synthetic
aagguaauuguacauucugcaaa

SEQ ID NO: 76331 - RNA, 24 nt, Artificial Sequence
  Synthetic
caagguaauuguacauucugcaaa

SEQ ID NO: 76332 - RNA, 18 nt, Artificial Sequence
  Synthetic
aaauuccaugggugcaaa

SEQ ID NO: 76333 - RNA, 19 nt, Artificial Sequence
  Synthetic
uaaauuccaugggugcaaa

SEQ ID NO: 76334 - RNA, 20 nt, Artificial Sequence
  Synthetic
auaaauuccaugggugcaaa

SEQ ID NO: 76335 - RNA, 21 nt, Artificial Sequence
  Synthetic
uauaaauuccaugggugcaaa

SEQ ID NO: 76336 - RNA, 22 nt, Artificial Sequence
  Synthetic
auauaaauuccaugggugcaaa

SEQ ID NO: 76337 - RNA, 24 nt, Artificial Sequence
  Synthetic
ugauauaaauuccaugggugcaaa

SEQ ID NO: 76338 - RNA, 18 nt, Artificial Sequence
  Synthetic
aacuaucccacuugcaaa

SEQ ID NO: 76339 - RNA, 19 nt, Artificial Sequence
  Synthetic
caacuaucccacuugcaaa

SEQ ID NO: 76340 - RNA, 20 nt, Artificial Sequence
  Synthetic
ucaacuaucccacuugcaaa

SEQ ID NO: 76341 - RNA, 21 nt, Artificial Sequence
  Synthetic
uucaacuaucccacuugcaaa

SEQ ID NO: 76342 - RNA, 22 nt, Artificial Sequence
  Synthetic
auucaacuaucccacuugcaaa

SEQ ID NO: 76343 - RNA, 23 nt, Artificial Sequence
  Synthetic
aauucaacuaucccacuugcaaa

SEQ ID NO: 76344 - RNA, 24 nt, Artificial Sequence
  Synthetic
aaauucaacuaucccacuugcaaa

SEQ ID NO: 76345 - RNA, 18 nt, Artificial Sequence
  Synthetic
agaacagaacuuugcaaa

SEQ ID NO: 76346 - RNA, 19 nt, Artificial Sequence
  Synthetic
cagaacagaacuuugcaaa

SEQ ID NO: 76347 - RNA, 20 nt, Artificial Sequence
  Synthetic
acagaacagaacuuugcaaa

SEQ ID NO: 76348 - RNA, 21 nt, Artificial Sequence
  Synthetic
uacagaacagaacuuugcaaa

SEQ ID NO: 76349 - RNA, 23 nt, Artificial Sequence
  Synthetic
aguacagaacagaacuuugcaaa

SEQ ID NO: 76350 - RNA, 24 nt, Artificial Sequence
  Synthetic
aaguacagaacagaacuuugcaaa

SEQ ID NO: 76351 - RNA, 19 nt, Artificial Sequence
  Synthetic
uguaauaaugcuuugcaaa

SEQ ID NO: 76352 - RNA, 20 nt, Artificial Sequence
  Synthetic
cuguaauaaugcuuugcaaa

SEQ ID NO: 76353 - RNA, 21 nt, Artificial Sequence
  Synthetic
acuguaauaaugcuuugcaaa

SEQ ID NO: 76354 - RNA, 22 nt, Artificial Sequence
  Synthetic
aacuguaauaaugcuuugcaaa

SEQ ID NO: 76355 - RNA, 23 nt, Artificial Sequence
  Synthetic
aaacuguaauaaugcuuugcaaa

SEQ ID NO: 76356 - RNA, 21 nt, Artificial Sequence
  Synthetic
aucagagaacugcaaaucaaa

SEQ ID NO: 76357 - RNA, 22 nt, Artificial Sequence
  Synthetic
caucagagaacugcaaaucaaa

SEQ ID NO: 76358 - RNA, 23 nt, Artificial Sequence
  Synthetic
ccaucagagaacugcaaaucaaa

SEQ ID NO: 76359 - RNA, 18 nt, Artificial Sequence
  Synthetic
cuugaaaggauaaucaaa

SEQ ID NO: 76360 - RNA, 19 nt, Artificial Sequence
  Synthetic
acuugaaaggauaaucaaa

SEQ ID NO: 76361 - RNA, 20 nt, Artificial Sequence
  Synthetic
cacuugaaaggauaaucaaa

SEQ ID NO: 76362 - RNA, 21 nt, Artificial Sequence
  Synthetic
acacuugaaaggauaaucaaa

SEQ ID NO: 76363 - RNA, 23 nt, Artificial Sequence
  Synthetic
agacacuugaaaggauaaucaaa

SEQ ID NO: 76364 - RNA, 20 nt, Artificial Sequence
  Synthetic
agguuggcauaaccaucaaa

SEQ ID NO: 76365 - RNA, 22 nt, Artificial Sequence
  Synthetic
agagguuggcauaaccaucaaa

SEQ ID NO: 76366 - RNA, 23 nt, Artificial Sequence
  Synthetic
cagagguuggcauaaccaucaaa

SEQ ID NO: 76367 - RNA, 24 nt, Artificial Sequence
  Synthetic
acagagguuggcauaaccaucaaa

SEQ ID NO: 76368 - RNA, 21 nt, Artificial Sequence
  Synthetic
auggcaguuugccuuaucaaa

SEQ ID NO: 76369 - RNA, 22 nt, Artificial Sequence
  Synthetic
cauggcaguuugccuuaucaaa

SEQ ID NO: 76370 - RNA, 23 nt, Artificial Sequence
  Synthetic
acauggcaguuugccuuaucaaa

SEQ ID NO: 76371 - RNA, 24 nt, Artificial Sequence
  Synthetic
uacauggcaguuugccuuaucaaa

SEQ ID NO: 76372 - RNA, 18 nt, Artificial Sequence
  Synthetic
caauggauagaucucaaa

SEQ ID NO: 76373 - RNA, 19 nt, Artificial Sequence
  Synthetic
acaauggauagaucucaaa

SEQ ID NO: 76374 - RNA, 20 nt, Artificial Sequence
  Synthetic
aacaauggauagaucucaaa

SEQ ID NO: 76375 - RNA, 21 nt, Artificial Sequence
  Synthetic
caacaauggauagaucucaaa

SEQ ID NO: 76376 - RNA, 22 nt, Artificial Sequence
  Synthetic
acaacaauggauagaucucaaa

SEQ ID NO: 76377 - RNA, 23 nt, Artificial Sequence
  Synthetic
cacaacaauggauagaucucaaa

SEQ ID NO: 76378 - RNA, 24 nt, Artificial Sequence
  Synthetic
ucacaacaauggauagaucucaaa

SEQ ID NO: 76379 - RNA, 18 nt, Artificial Sequence
  Synthetic
uuucagauguaucucaaa

SEQ ID NO: 76380 - RNA, 20 nt, Artificial Sequence
  Synthetic
uguuucagauguaucucaaa

SEQ ID NO: 76381 - RNA, 21 nt, Artificial Sequence
  Synthetic
auguuucagauguaucucaaa

SEQ ID NO: 76382 - RNA, 23 nt, Artificial Sequence
  Synthetic
agauguuucagauguaucucaaa

SEQ ID NO: 76383 - RNA, 24 nt, Artificial Sequence
  Synthetic
uagauguuucagauguaucucaaa

SEQ ID NO: 76384 - RNA, 18 nt, Artificial Sequence
  Synthetic
ccuaauuuuauucucaaa

SEQ ID NO: 76385 - RNA, 19 nt, Artificial Sequence
  Synthetic
cccuaauuuuauucucaaa

SEQ ID NO: 76386 - RNA, 20 nt, Artificial Sequence
  Synthetic
ccccuaauuuuauucucaaa

SEQ ID NO: 76387 - RNA, 21 nt, Artificial Sequence
  Synthetic
uccccuaauuuuauucucaaa

SEQ ID NO: 76388 - RNA, 22 nt, Artificial Sequence
  Synthetic
uuccccuaauuuuauucucaaa

SEQ ID NO: 76389 - RNA, 23 nt, Artificial Sequence
  Synthetic
uuuccccuaauuuuauucucaaa

SEQ ID NO: 76390 - RNA, 24 nt, Artificial Sequence
  Synthetic
auuuccccuaauuuuauucucaaa

SEQ ID NO: 76391 - RNA, 18 nt, Artificial Sequence
  Synthetic
cuuuuggccuuagucaaa

SEQ ID NO: 76392 - RNA, 19 nt, Artificial Sequence
  Synthetic
ccuuuuggccuuagucaaa

SEQ ID NO: 76393 - RNA, 20 nt, Artificial Sequence
  Synthetic
uccuuuuggccuuagucaaa

SEQ ID NO: 76394 - RNA, 21 nt, Artificial Sequence
  Synthetic
cuccuuuuggccuuagucaaa

SEQ ID NO: 76395 - RNA, 22 nt, Artificial Sequence
  Synthetic
ucuccuuuuggccuuagucaaa

SEQ ID NO: 76396 - RNA, 23 nt, Artificial Sequence
  Synthetic
uucuccuuuuggccuuagucaaa

SEQ ID NO: 76397 - RNA, 24 nt, Artificial Sequence
  Synthetic
auucuccuuuuggccuuagucaaa

SEQ ID NO: 76398 - RNA, 18 nt, Artificial Sequence
  Synthetic
uuuagcggcuaugucaaa

SEQ ID NO: 76399 - RNA, 19 nt, Artificial Sequence
  Synthetic
cuuuagcggcuaugucaaa

SEQ ID NO: 76400 - RNA, 20 nt, Artificial Sequence
  Synthetic
ucuuuagcggcuaugucaaa

SEQ ID NO: 76401 - RNA, 21 nt, Artificial Sequence
  Synthetic
aucuuuagcggcuaugucaaa

SEQ ID NO: 76402 - RNA, 22 nt, Artificial Sequence
  Synthetic
caucuuuagcggcuaugucaaa

SEQ ID NO: 76403 - RNA, 23 nt, Artificial Sequence
  Synthetic
acaucuuuagcggcuaugucaaa

SEQ ID NO: 76404 - RNA, 24 nt, Artificial Sequence
  Synthetic
uacaucuuuagcggcuaugucaaa

SEQ ID NO: 76405 - RNA, 19 nt, Artificial Sequence
  Synthetic
ugguucuaagaaauucaaa

SEQ ID NO: 76406 - RNA, 20 nt, Artificial Sequence
  Synthetic
augguucuaagaaauucaaa

SEQ ID NO: 76407 - RNA, 21 nt, Artificial Sequence
  Synthetic
uaugguucuaagaaauucaaa

SEQ ID NO: 76408 - RNA, 22 nt, Artificial Sequence
  Synthetic
cuaugguucuaagaaauucaaa

SEQ ID NO: 76409 - RNA, 23 nt, Artificial Sequence
  Synthetic
ucuaugguucuaagaaauucaaa

SEQ ID NO: 76410 - RNA, 24 nt, Artificial Sequence
  Synthetic
uucuaugguucuaagaaauucaaa

SEQ ID NO: 76411 - RNA, 19 nt, Artificial Sequence
  Synthetic
ugaaaauuuuacauucaaa

SEQ ID NO: 76412 - RNA, 20 nt, Artificial Sequence
  Synthetic
uugaaaauuuuacauucaaa

SEQ ID NO: 76413 - RNA, 18 nt, Artificial Sequence
  Synthetic
aguaauuuuagauucaaa

SEQ ID NO: 76414 - RNA, 19 nt, Artificial Sequence
  Synthetic
caguaauuuuagauucaaa

SEQ ID NO: 76415 - RNA, 20 nt, Artificial Sequence
  Synthetic
ucaguaauuuuagauucaaa

SEQ ID NO: 76416 - RNA, 21 nt, Artificial Sequence
  Synthetic
uucaguaauuuuagauucaaa

SEQ ID NO: 76417 - RNA, 22 nt, Artificial Sequence
  Synthetic
auucaguaauuuuagauucaaa

SEQ ID NO: 76418 - RNA, 23 nt, Artificial Sequence
  Synthetic
aauucaguaauuuuagauucaaa

SEQ ID NO: 76419 - RNA, 24 nt, Artificial Sequence
  Synthetic
uaauucaguaauuuuagauucaaa

SEQ ID NO: 76420 - RNA, 18 nt, Artificial Sequence
  Synthetic
uuugacuuuuacuucaaa

SEQ ID NO: 76421 - RNA, 19 nt, Artificial Sequence
  Synthetic
auuugacuuuuacuucaaa

SEQ ID NO: 76422 - RNA, 21 nt, Artificial Sequence
  Synthetic
ugauuugacuuuuacuucaaa

SEQ ID NO: 76423 - RNA, 23 nt, Artificial Sequence
  Synthetic
agugauuugacuuuuacuucaaa

SEQ ID NO: 76424 - RNA, 24 nt, Artificial Sequence
  Synthetic
aagugauuugacuuuuacuucaaa

SEQ ID NO: 76425 - RNA, 18 nt, Artificial Sequence
  Synthetic
cuuaaggucgauuucaaa

SEQ ID NO: 76426 - RNA, 19 nt, Artificial Sequence
  Synthetic
ucuuaaggucgauuucaaa

SEQ ID NO: 76427 - RNA, 21 nt, Artificial Sequence
  Synthetic
ugucuuaaggucgauuucaaa

SEQ ID NO: 76428 - RNA, 22 nt, Artificial Sequence
  Synthetic
augucuuaaggucgauuucaaa

SEQ ID NO: 76429 - RNA, 23 nt, Artificial Sequence
  Synthetic
aaugucuuaaggucgauuucaaa

SEQ ID NO: 76430 - RNA, 24 nt, Artificial Sequence
  Synthetic
uaaugucuuaaggucgauuucaaa

SEQ ID NO: 76431 - RNA, 18 nt, Artificial Sequence
  Synthetic
acacuugcuaguuucaaa

SEQ ID NO: 76432 - RNA, 19 nt, Artificial Sequence
  Synthetic
cacacuugcuaguuucaaa

SEQ ID NO: 76433 - RNA, 20 nt, Artificial Sequence
  Synthetic
ucacacuugcuaguuucaaa

SEQ ID NO: 76434 - RNA, 21 nt, Artificial Sequence
  Synthetic
aucacacuugcuaguuucaaa

SEQ ID NO: 76435 - RNA, 22 nt, Artificial Sequence
  Synthetic
caucacacuugcuaguuucaaa

SEQ ID NO: 76436 - RNA, 19 nt, Artificial Sequence
  Synthetic
ugaggccguucaaaagaaa

SEQ ID NO: 76437 - RNA, 20 nt, Artificial Sequence
  Synthetic
augaggccguucaaaagaaa

SEQ ID NO: 76438 - RNA, 21 nt, Artificial Sequence
  Synthetic
uaugaggccguucaaaagaaa

SEQ ID NO: 76439 - RNA, 22 nt, Artificial Sequence
  Synthetic
auaugaggccguucaaaagaaa

SEQ ID NO: 76440 - RNA, 24 nt, Artificial Sequence
  Synthetic
agauaugaggccguucaaaagaaa

SEQ ID NO: 76441 - RNA, 22 nt, Artificial Sequence
  Synthetic
ugccugaaauuaagaaaagaaa

SEQ ID NO: 76442 - RNA, 23 nt, Artificial Sequence
  Synthetic
uugccugaaauuaagaaaagaaa

SEQ ID NO: 76443 - RNA, 21 nt, Artificial Sequence
  Synthetic
acauauaaugaugaaaagaaa

SEQ ID NO: 76444 - RNA, 23 nt, Artificial Sequence
  Synthetic
ugacauauaaugaugaaaagaaa

SEQ ID NO: 76445 - RNA, 24 nt, Artificial Sequence
  Synthetic
augacauauaaugaugaaaagaaa

SEQ ID NO: 76446 - RNA, 18 nt, Artificial Sequence
  Synthetic
cuagauaauugaaagaaa

SEQ ID NO: 76447 - RNA, 19 nt, Artificial Sequence
  Synthetic
ccuagauaauugaaagaaa

SEQ ID NO: 76448 - RNA, 20 nt, Artificial Sequence
  Synthetic
uccuagauaauugaaagaaa

SEQ ID NO: 76449 - RNA, 21 nt, Artificial Sequence
  Synthetic
auccuagauaauugaaagaaa

SEQ ID NO: 76450 - RNA, 22 nt, Artificial Sequence
  Synthetic
aauccuagauaauugaaagaaa

SEQ ID NO: 76451 - RNA, 18 nt, Artificial Sequence
  Synthetic
ugaucauguugaaagaaa

SEQ ID NO: 76452 - RNA, 19 nt, Artificial Sequence
  Synthetic
uugaucauguugaaagaaa

SEQ ID NO: 76453 - RNA, 20 nt, Artificial Sequence
  Synthetic
auugaucauguugaaagaaa

SEQ ID NO: 76454 - RNA, 21 nt, Artificial Sequence
  Synthetic
uauugaucauguugaaagaaa

SEQ ID NO: 76455 - RNA, 22 nt, Artificial Sequence
  Synthetic
cuauugaucauguugaaagaaa

SEQ ID NO: 76456 - RNA, 23 nt, Artificial Sequence
  Synthetic
ucuauugaucauguugaaagaaa

SEQ ID NO: 76457 - RNA, 24 nt, Artificial Sequence
  Synthetic
aucuauugaucauguugaaagaaa

SEQ ID NO: 76458 - RNA, 21 nt, Artificial Sequence
  Synthetic
ccuauuuuacuaguaaagaaa

SEQ ID NO: 76459 - RNA, 22 nt, Artificial Sequence
  Synthetic
cccuauuuuacuaguaaagaaa

SEQ ID NO: 76460 - RNA, 23 nt, Artificial Sequence
  Synthetic
ccccuauuuuacuaguaaagaaa

SEQ ID NO: 76461 - RNA, 21 nt, Artificial Sequence
  Synthetic
uauagaauaucuaccaagaaa

SEQ ID NO: 76462 - RNA, 22 nt, Artificial Sequence
  Synthetic
auauagaauaucuaccaagaaa

SEQ ID NO: 76463 - RNA, 24 nt, Artificial Sequence
  Synthetic
ugauauagaauaucuaccaagaaa

SEQ ID NO: 76464 - RNA, 18 nt, Artificial Sequence
  Synthetic
acaaccccaaucaagaaa

SEQ ID NO: 76465 - RNA, 19 nt, Artificial Sequence
  Synthetic
uacaaccccaaucaagaaa

SEQ ID NO: 76466 - RNA, 20 nt, Artificial Sequence
  Synthetic
auacaaccccaaucaagaaa

SEQ ID NO: 76467 - RNA, 21 nt, Artificial Sequence
  Synthetic
aauacaaccccaaucaagaaa

SEQ ID NO: 76468 - RNA, 22 nt, Artificial Sequence
  Synthetic
aaauacaaccccaaucaagaaa

SEQ ID NO: 76469 - RNA, 23 nt, Artificial Sequence
  Synthetic
uaaauacaaccccaaucaagaaa

SEQ ID NO: 76470 - RNA, 18 nt, Artificial Sequence
  Synthetic
uaagauaacuucaagaaa

SEQ ID NO: 76471 - RNA, 19 nt, Artificial Sequence
  Synthetic
cuaagauaacuucaagaaa

SEQ ID NO: 76472 - RNA, 20 nt, Artificial Sequence
  Synthetic
acuaagauaacuucaagaaa

SEQ ID NO: 76473 - RNA, 21 nt, Artificial Sequence
  Synthetic
aacuaagauaacuucaagaaa

SEQ ID NO: 76474 - RNA, 22 nt, Artificial Sequence
  Synthetic
aaacuaagauaacuucaagaaa

SEQ ID NO: 76475 - RNA, 23 nt, Artificial Sequence
  Synthetic
aaaacuaagauaacuucaagaaa

SEQ ID NO: 76476 - RNA, 24 nt, Artificial Sequence
  Synthetic
uaaaacuaagauaacuucaagaaa

SEQ ID NO: 76477 - RNA, 18 nt, Artificial Sequence
  Synthetic
uauuguuucaagaagaaa

SEQ ID NO: 76478 - RNA, 19 nt, Artificial Sequence
  Synthetic
uuauuguuucaagaagaaa

SEQ ID NO: 76479 - RNA, 21 nt, Artificial Sequence
  Synthetic
aguuauuguuucaagaagaaa

SEQ ID NO: 76480 - RNA, 22 nt, Artificial Sequence
  Synthetic
aaguuauuguuucaagaagaaa

SEQ ID NO: 76481 - RNA, 24 nt, Artificial Sequence
  Synthetic
agaaguuauuguuucaagaagaaa

SEQ ID NO: 76482 - RNA, 18 nt, Artificial Sequence
  Synthetic
agaauacuccagaagaaa

SEQ ID NO: 76483 - RNA, 19 nt, Artificial Sequence
  Synthetic
uagaauacuccagaagaaa

SEQ ID NO: 76484 - RNA, 20 nt, Artificial Sequence
  Synthetic
cuagaauacuccagaagaaa

SEQ ID NO: 76485 - RNA, 21 nt, Artificial Sequence
  Synthetic
ccuagaauacuccagaagaaa

SEQ ID NO: 76486 - RNA, 22 nt, Artificial Sequence
  Synthetic
uccuagaauacuccagaagaaa

SEQ ID NO: 76487 - RNA, 23 nt, Artificial Sequence
  Synthetic
cuccuagaauacuccagaagaaa

SEQ ID NO: 76488 - RNA, 24 nt, Artificial Sequence
  Synthetic
ucuccuagaauacuccagaagaaa

SEQ ID NO: 76489 - RNA, 18 nt, Artificial Sequence
  Synthetic
cagaagguggagaagaaa

SEQ ID NO: 76490 - RNA, 20 nt, Artificial Sequence
  Synthetic
ugcagaagguggagaagaaa

SEQ ID NO: 76491 - RNA, 21 nt, Artificial Sequence
  Synthetic
uugcagaagguggagaagaaa

SEQ ID NO: 76492 - RNA, 22 nt, Artificial Sequence
  Synthetic
auugcagaagguggagaagaaa

SEQ ID NO: 76493 - RNA, 24 nt, Artificial Sequence
  Synthetic
ugauugcagaagguggagaagaaa

SEQ ID NO: 76494 - RNA, 21 nt, Artificial Sequence
  Synthetic
agaaugugacaaaugaagaaa

SEQ ID NO: 76495 - RNA, 22 nt, Artificial Sequence
  Synthetic
uagaaugugacaaaugaagaaa

SEQ ID NO: 76496 - RNA, 23 nt, Artificial Sequence
  Synthetic
auagaaugugacaaaugaagaaa

SEQ ID NO: 76497 - RNA, 24 nt, Artificial Sequence
  Synthetic
aauagaaugugacaaaugaagaaa

SEQ ID NO: 76498 - RNA, 18 nt, Artificial Sequence
  Synthetic
ucucuugaugauaagaaa

SEQ ID NO: 76499 - RNA, 19 nt, Artificial Sequence
  Synthetic
uucucuugaugauaagaaa

SEQ ID NO: 76500 - RNA, 21 nt, Artificial Sequence
  Synthetic
uguucucuugaugauaagaaa

SEQ ID NO: 76501 - RNA, 23 nt, Artificial Sequence
  Synthetic
uguguucucuugaugauaagaaa

SEQ ID NO: 76502 - RNA, 18 nt, Artificial Sequence
  Synthetic
cagaucuucccuaagaaa

SEQ ID NO: 76503 - RNA, 19 nt, Artificial Sequence
  Synthetic
ccagaucuucccuaagaaa

SEQ ID NO: 76504 - RNA, 20 nt, Artificial Sequence
  Synthetic
uccagaucuucccuaagaaa

SEQ ID NO: 76505 - RNA, 21 nt, Artificial Sequence
  Synthetic
auccagaucuucccuaagaaa

SEQ ID NO: 76506 - RNA, 22 nt, Artificial Sequence
  Synthetic
aauccagaucuucccuaagaaa

SEQ ID NO: 76507 - RNA, 23 nt, Artificial Sequence
  Synthetic
caauccagaucuucccuaagaaa

SEQ ID NO: 76508 - RNA, 18 nt, Artificial Sequence
  Synthetic
agucaauuuccuaagaaa

SEQ ID NO: 76509 - RNA, 19 nt, Artificial Sequence
  Synthetic
aagucaauuuccuaagaaa

SEQ ID NO: 76510 - RNA, 20 nt, Artificial Sequence
  Synthetic
caagucaauuuccuaagaaa

SEQ ID NO: 76511 - RNA, 21 nt, Artificial Sequence
  Synthetic
acaagucaauuuccuaagaaa

SEQ ID NO: 76512 - RNA, 23 nt, Artificial Sequence
  Synthetic
agacaagucaauuuccuaagaaa

SEQ ID NO: 76513 - RNA, 24 nt, Artificial Sequence
  Synthetic
uagacaagucaauuuccuaagaaa

SEQ ID NO: 76514 - RNA, 20 nt, Artificial Sequence
  Synthetic
agguuaaggaaauuaagaaa

SEQ ID NO: 76515 - RNA, 21 nt, Artificial Sequence
  Synthetic
aagguuaaggaaauuaagaaa

SEQ ID NO: 76516 - RNA, 22 nt, Artificial Sequence
  Synthetic
aaagguuaaggaaauuaagaaa

SEQ ID NO: 76517 - RNA, 23 nt, Artificial Sequence
  Synthetic
aaaagguuaaggaaauuaagaaa

SEQ ID NO: 76518 - RNA, 24 nt, Artificial Sequence
  Synthetic
uaaaagguuaaggaaauuaagaaa

SEQ ID NO: 76519 - RNA, 18 nt, Artificial Sequence
  Synthetic
ugcuacucaauuaagaaa

SEQ ID NO: 76520 - RNA, 19 nt, Artificial Sequence
  Synthetic
augcuacucaauuaagaaa

SEQ ID NO: 76521 - RNA, 20 nt, Artificial Sequence
  Synthetic
aaugcuacucaauuaagaaa

SEQ ID NO: 76522 - RNA, 21 nt, Artificial Sequence
  Synthetic
aaaugcuacucaauuaagaaa

SEQ ID NO: 76523 - RNA, 24 nt, Artificial Sequence
  Synthetic
uggaaaugcuacucaauuaagaaa

SEQ ID NO: 76524 - RNA, 18 nt, Artificial Sequence
  Synthetic
caaaaucuucuuaagaaa

SEQ ID NO: 76525 - RNA, 22 nt, Artificial Sequence
  Synthetic
ugggcaaaaucuucuuaagaaa

SEQ ID NO: 76526 - RNA, 23 nt, Artificial Sequence
  Synthetic
uugggcaaaaucuucuuaagaaa

SEQ ID NO: 76527 - RNA, 24 nt, Artificial Sequence
  Synthetic
uuugggcaaaaucuucuuaagaaa

SEQ ID NO: 76528 - RNA, 21 nt, Artificial Sequence
  Synthetic
uccaaacaaguaaaacagaaa

SEQ ID NO: 76529 - RNA, 23 nt, Artificial Sequence
  Synthetic
aguccaaacaaguaaaacagaaa

SEQ ID NO: 76530 - RNA, 24 nt, Artificial Sequence
  Synthetic
caguccaaacaaguaaaacagaaa

SEQ ID NO: 76531 - RNA, 21 nt, Artificial Sequence
  Synthetic
uguauuugagaagaacagaaa

SEQ ID NO: 76532 - RNA, 22 nt, Artificial Sequence
  Synthetic
auguauuugagaagaacagaaa

SEQ ID NO: 76533 - RNA, 23 nt, Artificial Sequence
  Synthetic
uauguauuugagaagaacagaaa

SEQ ID NO: 76534 - RNA, 22 nt, Artificial Sequence
  Synthetic
agucaaacgaaaggaacagaaa

SEQ ID NO: 76535 - RNA, 23 nt, Artificial Sequence
  Synthetic
aagucaaacgaaaggaacagaaa

SEQ ID NO: 76536 - RNA, 24 nt, Artificial Sequence
  Synthetic
aaagucaaacgaaaggaacagaaa

SEQ ID NO: 76537 - RNA, 18 nt, Artificial Sequence
  Synthetic
acaagaaacuaccagaaa

SEQ ID NO: 76538 - RNA, 19 nt, Artificial Sequence
  Synthetic
uacaagaaacuaccagaaa

SEQ ID NO: 76539 - RNA, 20 nt, Artificial Sequence
  Synthetic
auacaagaaacuaccagaaa

SEQ ID NO: 76540 - RNA, 21 nt, Artificial Sequence
  Synthetic
uauacaagaaacuaccagaaa

SEQ ID NO: 76541 - RNA, 22 nt, Artificial Sequence
  Synthetic
auauacaagaaacuaccagaaa

SEQ ID NO: 76542 - RNA, 23 nt, Artificial Sequence
  Synthetic
cauauacaagaaacuaccagaaa

SEQ ID NO: 76543 - RNA, 24 nt, Artificial Sequence
  Synthetic
ucauauacaagaaacuaccagaaa

SEQ ID NO: 76544 - RNA, 18 nt, Artificial Sequence
  Synthetic
auagugaggcagcagaaa

SEQ ID NO: 76545 - RNA, 22 nt, Artificial Sequence
  Synthetic
agggauagugaggcagcagaaa

SEQ ID NO: 76546 - RNA, 23 nt, Artificial Sequence
  Synthetic
cagggauagugaggcagcagaaa

SEQ ID NO: 76547 - RNA, 24 nt, Artificial Sequence
  Synthetic
ucagggauagugaggcagcagaaa

SEQ ID NO: 76548 - RNA, 18 nt, Artificial Sequence
  Synthetic
aaacaacuggggcagaaa

SEQ ID NO: 76549 - RNA, 19 nt, Artificial Sequence
  Synthetic
uaaacaacuggggcagaaa

SEQ ID NO: 76550 - RNA, 20 nt, Artificial Sequence
  Synthetic
auaaacaacuggggcagaaa

SEQ ID NO: 76551 - RNA, 21 nt, Artificial Sequence
  Synthetic
cauaaacaacuggggcagaaa

SEQ ID NO: 76552 - RNA, 22 nt, Artificial Sequence
  Synthetic
acauaaacaacuggggcagaaa

SEQ ID NO: 76553 - RNA, 23 nt, Artificial Sequence
  Synthetic
uacauaaacaacuggggcagaaa

SEQ ID NO: 76554 - RNA, 24 nt, Artificial Sequence
  Synthetic
uuacauaaacaacuggggcagaaa

SEQ ID NO: 76555 - RNA, 18 nt, Artificial Sequence
  Synthetic
aguauugauucucagaaa

SEQ ID NO: 76556 - RNA, 19 nt, Artificial Sequence
  Synthetic
uaguauugauucucagaaa

SEQ ID NO: 76557 - RNA, 21 nt, Artificial Sequence
  Synthetic
uguaguauugauucucagaaa

SEQ ID NO: 76558 - RNA, 22 nt, Artificial Sequence
  Synthetic
cuguaguauugauucucagaaa

SEQ ID NO: 76559 - RNA, 23 nt, Artificial Sequence
  Synthetic
ucuguaguauugauucucagaaa

SEQ ID NO: 76560 - RNA, 24 nt, Artificial Sequence
  Synthetic
uucuguaguauugauucucagaaa

SEQ ID NO: 76561 - RNA, 19 nt, Artificial Sequence
  Synthetic
ugaacaagaaguucagaaa

SEQ ID NO: 76562 - RNA, 21 nt, Artificial Sequence
  Synthetic
agugaacaagaaguucagaaa

SEQ ID NO: 76563 - RNA, 22 nt, Artificial Sequence
  Synthetic
aagugaacaagaaguucagaaa

SEQ ID NO: 76564 - RNA, 24 nt, Artificial Sequence
  Synthetic
agaagugaacaagaaguucagaaa

SEQ ID NO: 76565 - RNA, 18 nt, Artificial Sequence
  Synthetic
auagcuaguguucagaaa

SEQ ID NO: 76566 - RNA, 19 nt, Artificial Sequence
  Synthetic
cauagcuaguguucagaaa

SEQ ID NO: 76567 - RNA, 20 nt, Artificial Sequence
  Synthetic
acauagcuaguguucagaaa

SEQ ID NO: 76568 - RNA, 22 nt, Artificial Sequence
  Synthetic
ugacauagcuaguguucagaaa

SEQ ID NO: 76569 - RNA, 24 nt, Artificial Sequence
  Synthetic
agugacauagcuaguguucagaaa

SEQ ID NO: 76570 - RNA, 21 nt, Artificial Sequence
  Synthetic
auucugguguugaaagagaaa

SEQ ID NO: 76571 - RNA, 22 nt, Artificial Sequence
  Synthetic
aauucugguguugaaagagaaa

SEQ ID NO: 76572 - RNA, 23 nt, Artificial Sequence
  Synthetic
uaauucugguguugaaagagaaa

SEQ ID NO: 76573 - RNA, 24 nt, Artificial Sequence
  Synthetic
uuaauucugguguugaaagagaaa

SEQ ID NO: 76574 - RNA, 18 nt, Artificial Sequence
  Synthetic
aguucaacgcaagagaaa

SEQ ID NO: 76575 - RNA, 19 nt, Artificial Sequence
  Synthetic
uaguucaacgcaagagaaa

SEQ ID NO: 76576 - RNA, 20 nt, Artificial Sequence
  Synthetic
uuaguucaacgcaagagaaa

SEQ ID NO: 76577 - RNA, 21 nt, Artificial Sequence
  Synthetic
cuuaguucaacgcaagagaaa

SEQ ID NO: 76578 - RNA, 22 nt, Artificial Sequence
  Synthetic
acuuaguucaacgcaagagaaa

SEQ ID NO: 76579 - RNA, 23 nt, Artificial Sequence
  Synthetic
uacuuaguucaacgcaagagaaa

SEQ ID NO: 76580 - RNA, 24 nt, Artificial Sequence
  Synthetic
uuacuuaguucaacgcaagagaaa

SEQ ID NO: 76581 - RNA, 18 nt, Artificial Sequence
  Synthetic
uggagcuuugaagagaaa

SEQ ID NO: 76582 - RNA, 20 nt, Artificial Sequence
  Synthetic
uguggagcuuugaagagaaa

SEQ ID NO: 76583 - RNA, 21 nt, Artificial Sequence
  Synthetic
uuguggagcuuugaagagaaa

SEQ ID NO: 76584 - RNA, 22 nt, Artificial Sequence
  Synthetic
auuguggagcuuugaagagaaa

SEQ ID NO: 76585 - RNA, 23 nt, Artificial Sequence
  Synthetic
aauuguggagcuuugaagagaaa

SEQ ID NO: 76586 - RNA, 21 nt, Artificial Sequence
  Synthetic
cugcaggguuuuucagagaaa

SEQ ID NO: 76587 - RNA, 22 nt, Artificial Sequence
  Synthetic
acugcaggguuuuucagagaaa

SEQ ID NO: 76588 - RNA, 23 nt, Artificial Sequence
  Synthetic
aacugcaggguuuuucagagaaa

SEQ ID NO: 76589 - RNA, 24 nt, Artificial Sequence
  Synthetic
uaacugcaggguuuuucagagaaa

SEQ ID NO: 76590 - RNA, 21 nt, Artificial Sequence
  Synthetic
cugaauauucuaauagagaaa

SEQ ID NO: 76591 - RNA, 23 nt, Artificial Sequence
  Synthetic
ugcugaauauucuaauagagaaa

SEQ ID NO: 76592 - RNA, 24 nt, Artificial Sequence
  Synthetic
augcugaauauucuaauagagaaa

SEQ ID NO: 76593 - RNA, 18 nt, Artificial Sequence
  Synthetic
uugagagugugggagaaa

SEQ ID NO: 76594 - RNA, 19 nt, Artificial Sequence
  Synthetic
uuugagagugugggagaaa

SEQ ID NO: 76595 - RNA, 20 nt, Artificial Sequence
  Synthetic
uuuugagagugugggagaaa

SEQ ID NO: 76596 - RNA, 21 nt, Artificial Sequence
  Synthetic
cuuuugagagugugggagaaa

SEQ ID NO: 76597 - RNA, 22 nt, Artificial Sequence
  Synthetic
ccuuuugagagugugggagaaa

SEQ ID NO: 76598 - RNA, 23 nt, Artificial Sequence
  Synthetic
cccuuuugagagugugggagaaa

SEQ ID NO: 76599 - RNA, 18 nt, Artificial Sequence
  Synthetic
auagauuuuuaugagaaa

SEQ ID NO: 76600 - RNA, 19 nt, Artificial Sequence
  Synthetic
uauagauuuuuaugagaaa

SEQ ID NO: 76601 - RNA, 20 nt, Artificial Sequence
  Synthetic
cuauagauuuuuaugagaaa

SEQ ID NO: 76602 - RNA, 22 nt, Artificial Sequence
  Synthetic
ugcuauagauuuuuaugagaaa

SEQ ID NO: 76603 - RNA, 23 nt, Artificial Sequence
  Synthetic
cugcuauagauuuuuaugagaaa

SEQ ID NO: 76604 - RNA, 24 nt, Artificial Sequence
  Synthetic
acugcuauagauuuuuaugagaaa

SEQ ID NO: 76605 - RNA, 18 nt, Artificial Sequence
  Synthetic
ugaagaacaagugagaaa

SEQ ID NO: 76606 - RNA, 19 nt, Artificial Sequence
  Synthetic
augaagaacaagugagaaa

SEQ ID NO: 76607 - RNA, 20 nt, Artificial Sequence
  Synthetic
caugaagaacaagugagaaa

SEQ ID NO: 76608 - RNA, 21 nt, Artificial Sequence
  Synthetic
acaugaagaacaagugagaaa

SEQ ID NO: 76609 - RNA, 22 nt, Artificial Sequence
  Synthetic
uacaugaagaacaagugagaaa

SEQ ID NO: 76610 - RNA, 23 nt, Artificial Sequence
  Synthetic
uuacaugaagaacaagugagaaa

SEQ ID NO: 76611 - RNA, 24 nt, Artificial Sequence
  Synthetic
uuuacaugaagaacaagugagaaa

SEQ ID NO: 76612 - RNA, 18 nt, Artificial Sequence
  Synthetic
cacaaaguaauugagaaa

SEQ ID NO: 76613 - RNA, 19 nt, Artificial Sequence
  Synthetic
acacaaaguaauugagaaa

SEQ ID NO: 76614 - RNA, 20 nt, Artificial Sequence
  Synthetic
aacacaaaguaauugagaaa

SEQ ID NO: 76615 - RNA, 21 nt, Artificial Sequence
  Synthetic
aaacacaaaguaauugagaaa

SEQ ID NO: 76616 - RNA, 22 nt, Artificial Sequence
  Synthetic
aaaacacaaaguaauugagaaa

SEQ ID NO: 76617 - RNA, 24 nt, Artificial Sequence
  Synthetic
agaaaacacaaaguaauugagaaa

SEQ ID NO: 76618 - RNA, 18 nt, Artificial Sequence
  Synthetic
cauguugggaaauagaaa

SEQ ID NO: 76619 - RNA, 19 nt, Artificial Sequence
  Synthetic
ucauguugggaaauagaaa

SEQ ID NO: 76620 - RNA, 20 nt, Artificial Sequence
  Synthetic
uucauguugggaaauagaaa

SEQ ID NO: 76621 - RNA, 21 nt, Artificial Sequence
  Synthetic
uuucauguugggaaauagaaa

SEQ ID NO: 76622 - RNA, 22 nt, Artificial Sequence
  Synthetic
cuuucauguugggaaauagaaa

SEQ ID NO: 76623 - RNA, 23 nt, Artificial Sequence
  Synthetic
ccuuucauguugggaaauagaaa

SEQ ID NO: 76624 - RNA, 24 nt, Artificial Sequence
  Synthetic
accuuucauguugggaaauagaaa

SEQ ID NO: 76625 - RNA, 18 nt, Artificial Sequence
  Synthetic
uuaaaacagggauagaaa

SEQ ID NO: 76626 - RNA, 19 nt, Artificial Sequence
  Synthetic
auuaaaacagggauagaaa

SEQ ID NO: 76627 - RNA, 20 nt, Artificial Sequence
  Synthetic
aauuaaaacagggauagaaa

SEQ ID NO: 76628 - RNA, 21 nt, Artificial Sequence
  Synthetic
caauuaaaacagggauagaaa

SEQ ID NO: 76629 - RNA, 22 nt, Artificial Sequence
  Synthetic
acaauuaaaacagggauagaaa

SEQ ID NO: 76630 - RNA, 23 nt, Artificial Sequence
  Synthetic
cacaauuaaaacagggauagaaa

SEQ ID NO: 76631 - RNA, 18 nt, Artificial Sequence
  Synthetic
ugguaacuaugauagaaa

SEQ ID NO: 76632 - RNA, 19 nt, Artificial Sequence
  Synthetic
cugguaacuaugauagaaa

SEQ ID NO: 76633 - RNA, 20 nt, Artificial Sequence
  Synthetic
ccugguaacuaugauagaaa

SEQ ID NO: 76634 - RNA, 21 nt, Artificial Sequence
  Synthetic
uccugguaacuaugauagaaa

SEQ ID NO: 76635 - RNA, 22 nt, Artificial Sequence
  Synthetic
auccugguaacuaugauagaaa

SEQ ID NO: 76636 - RNA, 23 nt, Artificial Sequence
  Synthetic
aauccugguaacuaugauagaaa

SEQ ID NO: 76637 - RNA, 18 nt, Artificial Sequence
  Synthetic
aaacaguauuuauagaaa

SEQ ID NO: 76638 - RNA, 21 nt, Artificial Sequence
  Synthetic
aggaaacaguauuuauagaaa

SEQ ID NO: 76639 - RNA, 22 nt, Artificial Sequence
  Synthetic
uaggaaacaguauuuauagaaa

SEQ ID NO: 76640 - RNA, 23 nt, Artificial Sequence
  Synthetic
uuaggaaacaguauuuauagaaa

SEQ ID NO: 76641 - RNA, 24 nt, Artificial Sequence
  Synthetic
auuaggaaacaguauuuauagaaa

SEQ ID NO: 76642 - RNA, 18 nt, Artificial Sequence
  Synthetic
agacuugggggguagaaa

SEQ ID NO: 76643 - RNA, 18 nt, Artificial Sequence
  Synthetic
uuuccacuuguguagaaa

SEQ ID NO: 76644 - RNA, 19 nt, Artificial Sequence
  Synthetic
uuuuccacuuguguagaaa

SEQ ID NO: 76645 - RNA, 20 nt, Artificial Sequence
  Synthetic
auuuuccacuuguguagaaa

SEQ ID NO: 76646 - RNA, 21 nt, Artificial Sequence
  Synthetic
uauuuuccacuuguguagaaa

SEQ ID NO: 76647 - RNA, 22 nt, Artificial Sequence
  Synthetic
auauuuuccacuuguguagaaa

SEQ ID NO: 76648 - RNA, 23 nt, Artificial Sequence
  Synthetic
aauauuuuccacuuguguagaaa

SEQ ID NO: 76649 - RNA, 24 nt, Artificial Sequence
  Synthetic
aaauauuuuccacuuguguagaaa

SEQ ID NO: 76650 - RNA, 18 nt, Artificial Sequence
  Synthetic
cucuuuacaauaucgaaa

SEQ ID NO: 76651 - RNA, 19 nt, Artificial Sequence
  Synthetic
ucucuuuacaauaucgaaa

SEQ ID NO: 76652 - RNA, 20 nt, Artificial Sequence
  Synthetic
uucucuuuacaauaucgaaa

SEQ ID NO: 76653 - RNA, 21 nt, Artificial Sequence
  Synthetic
uuucucuuuacaauaucgaaa

SEQ ID NO: 76654 - RNA, 23 nt, Artificial Sequence
  Synthetic
aguuucucuuuacaauaucgaaa

SEQ ID NO: 76655 - RNA, 24 nt, Artificial Sequence
  Synthetic
uaguuucucuuuacaauaucgaaa

SEQ ID NO: 76656 - RNA, 18 nt, Artificial Sequence
  Synthetic
uacaaccagagaaggaaa

SEQ ID NO: 76657 - RNA, 20 nt, Artificial Sequence
  Synthetic
uguacaaccagagaaggaaa

SEQ ID NO: 76658 - RNA, 21 nt, Artificial Sequence
  Synthetic
cuguacaaccagagaaggaaa

SEQ ID NO: 76659 - RNA, 22 nt, Artificial Sequence
  Synthetic
acuguacaaccagagaaggaaa

SEQ ID NO: 76660 - RNA, 23 nt, Artificial Sequence
  Synthetic
cacuguacaaccagagaaggaaa

SEQ ID NO: 76661 - RNA, 24 nt, Artificial Sequence
  Synthetic
acacuguacaaccagagaaggaaa

SEQ ID NO: 76662 - RNA, 21 nt, Artificial Sequence
  Synthetic
ugcacagaaagaggaaggaaa

SEQ ID NO: 76663 - RNA, 22 nt, Artificial Sequence
  Synthetic
uugcacagaaagaggaaggaaa

SEQ ID NO: 76664 - RNA, 23 nt, Artificial Sequence
  Synthetic
auugcacagaaagaggaaggaaa

SEQ ID NO: 76665 - RNA, 24 nt, Artificial Sequence
  Synthetic
uauugcacagaaagaggaaggaaa

SEQ ID NO: 76666 - RNA, 18 nt, Artificial Sequence
  Synthetic
uugauuuuaguaaggaaa

SEQ ID NO: 76667 - RNA, 19 nt, Artificial Sequence
  Synthetic
cuugauuuuaguaaggaaa

SEQ ID NO: 76668 - RNA, 20 nt, Artificial Sequence
  Synthetic
ucuugauuuuaguaaggaaa

SEQ ID NO: 76669 - RNA, 21 nt, Artificial Sequence
  Synthetic
uucuugauuuuaguaaggaaa

SEQ ID NO: 76670 - RNA, 23 nt, Artificial Sequence
  Synthetic
aguucuugauuuuaguaaggaaa

SEQ ID NO: 76671 - RNA, 24 nt, Artificial Sequence
  Synthetic
aaguucuugauuuuaguaaggaaa

SEQ ID NO: 76672 - RNA, 18 nt, Artificial Sequence
  Synthetic
uugcacuaacacaggaaa

SEQ ID NO: 76673 - RNA, 19 nt, Artificial Sequence
  Synthetic
uuugcacuaacacaggaaa

SEQ ID NO: 76674 - RNA, 20 nt, Artificial Sequence
  Synthetic
uuuugcacuaacacaggaaa

SEQ ID NO: 76675 - RNA, 21 nt, Artificial Sequence
  Synthetic
auuuugcacuaacacaggaaa

SEQ ID NO: 76676 - RNA, 22 nt, Artificial Sequence
  Synthetic
cauuuugcacuaacacaggaaa

SEQ ID NO: 76677 - RNA, 23 nt, Artificial Sequence
  Synthetic
acauuuugcacuaacacaggaaa

SEQ ID NO: 76678 - RNA, 24 nt, Artificial Sequence
  Synthetic
cacauuuugcacuaacacaggaaa

SEQ ID NO: 76679 - RNA, 19 nt, Artificial Sequence
  Synthetic
ugcuccucucuucaggaaa

SEQ ID NO: 76680 - RNA, 20 nt, Artificial Sequence
  Synthetic
cugcuccucucuucaggaaa

SEQ ID NO: 76681 - RNA, 21 nt, Artificial Sequence
  Synthetic
acugcuccucucuucaggaaa

SEQ ID NO: 76682 - RNA, 23 nt, Artificial Sequence
  Synthetic
agacugcuccucucuucaggaaa

SEQ ID NO: 76683 - RNA, 24 nt, Artificial Sequence
  Synthetic
aagacugcuccucucuucaggaaa

SEQ ID NO: 76684 - RNA, 21 nt, Artificial Sequence
  Synthetic
aauuuggagaauaagaggaaa

SEQ ID NO: 76685 - RNA, 22 nt, Artificial Sequence
  Synthetic
aaauuuggagaauaagaggaaa

SEQ ID NO: 76686 - RNA, 23 nt, Artificial Sequence
  Synthetic
aaaauuuggagaauaagaggaaa

SEQ ID NO: 76687 - RNA, 24 nt, Artificial Sequence
  Synthetic
caaaauuuggagaauaagaggaaa

SEQ ID NO: 76688 - RNA, 18 nt, Artificial Sequence
  Synthetic
ugugacgguaugaggaaa

SEQ ID NO: 76689 - RNA, 20 nt, Artificial Sequence
  Synthetic
ugugugacgguaugaggaaa

SEQ ID NO: 76690 - RNA, 21 nt, Artificial Sequence
  Synthetic
cugugugacgguaugaggaaa

SEQ ID NO: 76691 - RNA, 23 nt, Artificial Sequence
  Synthetic
agcugugugacgguaugaggaaa

SEQ ID NO: 76692 - RNA, 24 nt, Artificial Sequence
  Synthetic
uagcugugugacgguaugaggaaa

SEQ ID NO: 76693 - RNA, 18 nt, Artificial Sequence
  Synthetic
uacaauuucaguaggaaa

SEQ ID NO: 76694 - RNA, 19 nt, Artificial Sequence
  Synthetic
auacaauuucaguaggaaa

SEQ ID NO: 76695 - RNA, 20 nt, Artificial Sequence
  Synthetic
aauacaauuucaguaggaaa

SEQ ID NO: 76696 - RNA, 22 nt, Artificial Sequence
  Synthetic
agaauacaauuucaguaggaaa

SEQ ID NO: 76697 - RNA, 18 nt, Artificial Sequence
  Synthetic
uauguaugcuuuaggaaa

SEQ ID NO: 76698 - RNA, 19 nt, Artificial Sequence
  Synthetic
auauguaugcuuuaggaaa

SEQ ID NO: 76699 - RNA, 20 nt, Artificial Sequence
  Synthetic
uauauguaugcuuuaggaaa

SEQ ID NO: 76700 - RNA, 21 nt, Artificial Sequence
  Synthetic
uuauauguaugcuuuaggaaa

SEQ ID NO: 76701 - RNA, 22 nt, Artificial Sequence
  Synthetic
uuuauauguaugcuuuaggaaa

SEQ ID NO: 76702 - RNA, 23 nt, Artificial Sequence
  Synthetic
auuuauauguaugcuuuaggaaa

SEQ ID NO: 76703 - RNA, 24 nt, Artificial Sequence
  Synthetic
uauuuauauguaugcuuuaggaaa

SEQ ID NO: 76704 - RNA, 21 nt, Artificial Sequence
  Synthetic
agagaaccacaguuuaggaaa

SEQ ID NO: 76705 - RNA, 23 nt, Artificial Sequence
  Synthetic
ugagagaaccacaguuuaggaaa

SEQ ID NO: 76706 - RNA, 24 nt, Artificial Sequence
  Synthetic
augagagaaccacaguuuaggaaa

SEQ ID NO: 76707 - RNA, 18 nt, Artificial Sequence
  Synthetic
acaauugccacucggaaa

SEQ ID NO: 76708 - RNA, 20 nt, Artificial Sequence
  Synthetic
ugacaauugccacucggaaa

SEQ ID NO: 76709 - RNA, 21 nt, Artificial Sequence
  Synthetic
uugacaauugccacucggaaa

SEQ ID NO: 76710 - RNA, 22 nt, Artificial Sequence
  Synthetic
uuugacaauugccacucggaaa

SEQ ID NO: 76711 - RNA, 23 nt, Artificial Sequence
  Synthetic
uuuugacaauugccacucggaaa

SEQ ID NO: 76712 - RNA, 24 nt, Artificial Sequence
  Synthetic
uuuuugacaauugccacucggaaa

SEQ ID NO: 76713 - RNA, 21 nt, Artificial Sequence
  Synthetic
cagaauagaacagaagggaaa

SEQ ID NO: 76714 - RNA, 22 nt, Artificial Sequence
  Synthetic
acagaauagaacagaagggaaa

SEQ ID NO: 76715 - RNA, 24 nt, Artificial Sequence
  Synthetic
ugacagaauagaacagaagggaaa

SEQ ID NO: 76716 - RNA, 18 nt, Artificial Sequence
  Synthetic
aagaaccauacagggaaa

SEQ ID NO: 76717 - RNA, 20 nt, Artificial Sequence
  Synthetic
agaagaaccauacagggaaa

SEQ ID NO: 76718 - RNA, 21 nt, Artificial Sequence
  Synthetic
uagaagaaccauacagggaaa

SEQ ID NO: 76719 - RNA, 22 nt, Artificial Sequence
  Synthetic
cuagaagaaccauacagggaaa

SEQ ID NO: 76720 - RNA, 24 nt, Artificial Sequence
  Synthetic
agcuagaagaaccauacagggaaa

SEQ ID NO: 76721 - RNA, 20 nt, Artificial Sequence
  Synthetic
aggagaaucucugagggaaa

SEQ ID NO: 76722 - RNA, 22 nt, Artificial Sequence
  Synthetic
ugaggagaaucucugagggaaa

SEQ ID NO: 76723 - RNA, 23 nt, Artificial Sequence
  Synthetic
cugaggagaaucucugagggaaa

SEQ ID NO: 76724 - RNA, 24 nt, Artificial Sequence
  Synthetic
ucugaggagaaucucugagggaaa

SEQ ID NO: 76725 - RNA, 22 nt, Artificial Sequence
  Synthetic
ugggaaaaaaaauaaggggaaa

SEQ ID NO: 76726 - RNA, 23 nt, Artificial Sequence
  Synthetic
uugggaaaaaaaauaaggggaaa

SEQ ID NO: 76727 - RNA, 24 nt, Artificial Sequence
  Synthetic
uuugggaaaaaaaauaaggggaaa

SEQ ID NO: 76728 - RNA, 18 nt, Artificial Sequence
  Synthetic
aacaaaacagcugggaaa

SEQ ID NO: 76729 - RNA, 19 nt, Artificial Sequence
  Synthetic
caacaaaacagcugggaaa

SEQ ID NO: 76730 - RNA, 20 nt, Artificial Sequence
  Synthetic
acaacaaaacagcugggaaa

SEQ ID NO: 76731 - RNA, 21 nt, Artificial Sequence
  Synthetic
aacaacaaaacagcugggaaa

SEQ ID NO: 76732 - RNA, 22 nt, Artificial Sequence
  Synthetic
uaacaacaaaacagcugggaaa

SEQ ID NO: 76733 - RNA, 23 nt, Artificial Sequence
  Synthetic
uuaacaacaaaacagcugggaaa

SEQ ID NO: 76734 - RNA, 24 nt, Artificial Sequence
  Synthetic
auuaacaacaaaacagcugggaaa

SEQ ID NO: 76735 - RNA, 18 nt, Artificial Sequence
  Synthetic
uuuaggggaggugggaaa

SEQ ID NO: 76736 - RNA, 19 nt, Artificial Sequence
  Synthetic
auuuaggggaggugggaaa

SEQ ID NO: 76737 - RNA, 20 nt, Artificial Sequence
  Synthetic
uauuuaggggaggugggaaa

SEQ ID NO: 76738 - RNA, 21 nt, Artificial Sequence
  Synthetic
uuauuuaggggaggugggaaa

SEQ ID NO: 76739 - RNA, 22 nt, Artificial Sequence
  Synthetic
uuuauuuaggggaggugggaaa

SEQ ID NO: 76740 - RNA, 23 nt, Artificial Sequence
  Synthetic
uuuuauuuaggggaggugggaaa

SEQ ID NO: 76741 - RNA, 24 nt, Artificial Sequence
  Synthetic
auuuuauuuaggggaggugggaaa

SEQ ID NO: 76742 - RNA, 21 nt, Artificial Sequence
  Synthetic
aaaguauuauugaaauggaaa

SEQ ID NO: 76743 - RNA, 22 nt, Artificial Sequence
  Synthetic
uaaaguauuauugaaauggaaa

SEQ ID NO: 76744 - RNA, 23 nt, Artificial Sequence
  Synthetic
uuaaaguauuauugaaauggaaa

SEQ ID NO: 76745 - RNA, 24 nt, Artificial Sequence
  Synthetic
uuuaaaguauuauugaaauggaaa

SEQ ID NO: 76746 - RNA, 23 nt, Artificial Sequence
  Synthetic
aggaaaaaaaugaagcauggaaa

SEQ ID NO: 76747 - RNA, 18 nt, Artificial Sequence
  Synthetic
aagcaaaaaaccuggaaa

SEQ ID NO: 76748 - RNA, 19 nt, Artificial Sequence
  Synthetic
caagcaaaaaaccuggaaa

SEQ ID NO: 76749 - RNA, 20 nt, Artificial Sequence
  Synthetic
ccaagcaaaaaaccuggaaa

SEQ ID NO: 76750 - RNA, 21 nt, Artificial Sequence
  Synthetic
cccaagcaaaaaaccuggaaa

SEQ ID NO: 76751 - RNA, 22 nt, Artificial Sequence
  Synthetic
ccccaagcaaaaaaccuggaaa

SEQ ID NO: 76752 - RNA, 23 nt, Artificial Sequence
  Synthetic
cccccaagcaaaaaaccuggaaa

SEQ ID NO: 76753 - RNA, 24 nt, Artificial Sequence
  Synthetic
ucccccaagcaaaaaaccuggaaa

SEQ ID NO: 76754 - RNA, 18 nt, Artificial Sequence
  Synthetic
ugccauacuugcuggaaa

SEQ ID NO: 76755 - RNA, 19 nt, Artificial Sequence
  Synthetic
augccauacuugcuggaaa

SEQ ID NO: 76756 - RNA, 20 nt, Artificial Sequence
  Synthetic
aaugccauacuugcuggaaa

SEQ ID NO: 76757 - RNA, 21 nt, Artificial Sequence
  Synthetic
aaaugccauacuugcuggaaa

SEQ ID NO: 76758 - RNA, 22 nt, Artificial Sequence
  Synthetic
caaaugccauacuugcuggaaa

SEQ ID NO: 76759 - RNA, 23 nt, Artificial Sequence
  Synthetic
ccaaaugccauacuugcuggaaa

SEQ ID NO: 76760 - RNA, 24 nt, Artificial Sequence
  Synthetic
uccaaaugccauacuugcuggaaa

SEQ ID NO: 76761 - RNA, 18 nt, Artificial Sequence
  Synthetic
auggagaggaguuggaaa

SEQ ID NO: 76762 - RNA, 19 nt, Artificial Sequence
  Synthetic
uauggagaggaguuggaaa

SEQ ID NO: 76763 - RNA, 21 nt, Artificial Sequence
  Synthetic
uguauggagaggaguuggaaa

SEQ ID NO: 76764 - RNA, 23 nt, Artificial Sequence
  Synthetic
uguguauggagaggaguuggaaa

SEQ ID NO: 76765 - RNA, 24 nt, Artificial Sequence
  Synthetic
auguguauggagaggaguuggaaa

SEQ ID NO: 76766 - RNA, 22 nt, Artificial Sequence
  Synthetic
ugaaugucaccagauuuggaaa

SEQ ID NO: 76767 - RNA, 23 nt, Artificial Sequence
  Synthetic
uugaaugucaccagauuuggaaa

SEQ ID NO: 76768 - RNA, 24 nt, Artificial Sequence
  Synthetic
cuugaaugucaccagauuuggaaa

SEQ ID NO: 76769 - RNA, 18 nt, Artificial Sequence
  Synthetic
ccuacuuucaaaaugaaa

SEQ ID NO: 76770 - RNA, 20 nt, Artificial Sequence
  Synthetic
ugccuacuuucaaaaugaaa

SEQ ID NO: 76771 - RNA, 21 nt, Artificial Sequence
  Synthetic
uugccuacuuucaaaaugaaa

SEQ ID NO: 76772 - RNA, 22 nt, Artificial Sequence
  Synthetic
uuugccuacuuucaaaaugaaa

SEQ ID NO: 76773 - RNA, 23 nt, Artificial Sequence
  Synthetic
uuuugccuacuuucaaaaugaaa

SEQ ID NO: 76774 - RNA, 24 nt, Artificial Sequence
  Synthetic
uuuuugccuacuuucaaaaugaaa

SEQ ID NO: 76775 - RNA, 18 nt, Artificial Sequence
  Synthetic
uaucagcaugaaaugaaa

SEQ ID NO: 76776 - RNA, 19 nt, Artificial Sequence
  Synthetic
uuaucagcaugaaaugaaa

SEQ ID NO: 76777 - RNA, 20 nt, Artificial Sequence
  Synthetic
auuaucagcaugaaaugaaa

SEQ ID NO: 76778 - RNA, 21 nt, Artificial Sequence
  Synthetic
cauuaucagcaugaaaugaaa

SEQ ID NO: 76779 - RNA, 22 nt, Artificial Sequence
  Synthetic
ucauuaucagcaugaaaugaaa

SEQ ID NO: 76780 - RNA, 23 nt, Artificial Sequence
  Synthetic
cucauuaucagcaugaaaugaaa

SEQ ID NO: 76781 - RNA, 24 nt, Artificial Sequence
  Synthetic
ucucauuaucagcaugaaaugaaa

SEQ ID NO: 76782 - RNA, 18 nt, Artificial Sequence
  Synthetic
ugccaauaugaaaugaaa

SEQ ID NO: 76783 - RNA, 19 nt, Artificial Sequence
  Synthetic
uugccaauaugaaaugaaa

SEQ ID NO: 76784 - RNA, 22 nt, Artificial Sequence
  Synthetic
agguugccaauaugaaaugaaa

SEQ ID NO: 76785 - RNA, 23 nt, Artificial Sequence
  Synthetic
uagguugccaauaugaaaugaaa

SEQ ID NO: 76786 - RNA, 24 nt, Artificial Sequence
  Synthetic
cuagguugccaauaugaaaugaaa

SEQ ID NO: 76787 - RNA, 20 nt, Artificial Sequence
  Synthetic
aggugauauaauaaaugaaa

SEQ ID NO: 76788 - RNA, 21 nt, Artificial Sequence
  Synthetic
caggugauauaauaaaugaaa

SEQ ID NO: 76789 - RNA, 23 nt, Artificial Sequence
  Synthetic
ugcaggugauauaauaaaugaaa

SEQ ID NO: 76790 - RNA, 24 nt, Artificial Sequence
  Synthetic
uugcaggugauauaauaaaugaaa

SEQ ID NO: 76791 - RNA, 18 nt, Artificial Sequence
  Synthetic
auguuauguguaaugaaa

SEQ ID NO: 76792 - RNA, 19 nt, Artificial Sequence
  Synthetic
aauguuauguguaaugaaa

SEQ ID NO: 76793 - RNA, 20 nt, Artificial Sequence
  Synthetic
aaauguuauguguaaugaaa

SEQ ID NO: 76794 - RNA, 21 nt, Artificial Sequence
  Synthetic
aaaauguuauguguaaugaaa

SEQ ID NO: 76795 - RNA, 22 nt, Artificial Sequence
  Synthetic
aaaaauguuauguguaaugaaa

SEQ ID NO: 76796 - RNA, 23 nt, Artificial Sequence
  Synthetic
uaaaaauguuauguguaaugaaa

SEQ ID NO: 76797 - RNA, 24 nt, Artificial Sequence
  Synthetic
auaaaaauguuauguguaaugaaa

SEQ ID NO: 76798 - RNA, 18 nt, Artificial Sequence
  Synthetic
aguuucuuuagcaugaaa

SEQ ID NO: 76799 - RNA, 19 nt, Artificial Sequence
  Synthetic
caguuucuuuagcaugaaa

SEQ ID NO: 76800 - RNA, 20 nt, Artificial Sequence
  Synthetic
acaguuucuuuagcaugaaa

SEQ ID NO: 76801 - RNA, 21 nt, Artificial Sequence
  Synthetic
uacaguuucuuuagcaugaaa

SEQ ID NO: 76802 - RNA, 22 nt, Artificial Sequence
  Synthetic
auacaguuucuuuagcaugaaa

SEQ ID NO: 76803 - RNA, 23 nt, Artificial Sequence
  Synthetic
cauacaguuucuuuagcaugaaa

SEQ ID NO: 76804 - RNA, 24 nt, Artificial Sequence
  Synthetic
ccauacaguuucuuuagcaugaaa

SEQ ID NO: 76805 - RNA, 18 nt, Artificial Sequence
  Synthetic
cuucuccauaagaugaaa

SEQ ID NO: 76806 - RNA, 19 nt, Artificial Sequence
  Synthetic
ucuucuccauaagaugaaa

SEQ ID NO: 76807 - RNA, 20 nt, Artificial Sequence
  Synthetic
uucuucuccauaagaugaaa

SEQ ID NO: 76808 - RNA, 21 nt, Artificial Sequence
  Synthetic
uuucuucuccauaagaugaaa

SEQ ID NO: 76809 - RNA, 22 nt, Artificial Sequence
  Synthetic
auuucuucuccauaagaugaaa

SEQ ID NO: 76810 - RNA, 23 nt, Artificial Sequence
  Synthetic
uauuucuucuccauaagaugaaa

SEQ ID NO: 76811 - RNA, 21 nt, Artificial Sequence
  Synthetic
agcaagaaacaaaauaugaaa

SEQ ID NO: 76812 - RNA, 22 nt, Artificial Sequence
  Synthetic
uagcaagaaacaaaauaugaaa

SEQ ID NO: 76813 - RNA, 24 nt, Artificial Sequence
  Synthetic
uguagcaagaaacaaaauaugaaa

SEQ ID NO: 76814 - RNA, 19 nt, Artificial Sequence
  Synthetic
aggagagaauuauaugaaa

SEQ ID NO: 76815 - RNA, 21 nt, Artificial Sequence
  Synthetic
ugaggagagaauuauaugaaa

SEQ ID NO: 76816 - RNA, 23 nt, Artificial Sequence
  Synthetic
agugaggagagaauuauaugaaa

SEQ ID NO: 76817 - RNA, 24 nt, Artificial Sequence
  Synthetic
aagugaggagagaauuauaugaaa

SEQ ID NO: 76818 - RNA, 18 nt, Artificial Sequence
  Synthetic
uaaacugaucuuaugaaa

SEQ ID NO: 76819 - RNA, 19 nt, Artificial Sequence
  Synthetic
auaaacugaucuuaugaaa

SEQ ID NO: 76820 - RNA, 22 nt, Artificial Sequence
  Synthetic
uggauaaacugaucuuaugaaa

SEQ ID NO: 76821 - RNA, 18 nt, Artificial Sequence
  Synthetic
cuguucaaaguuaugaaa

SEQ ID NO: 76822 - RNA, 19 nt, Artificial Sequence
  Synthetic
acuguucaaaguuaugaaa

SEQ ID NO: 76823 - RNA, 20 nt, Artificial Sequence
  Synthetic
aacuguucaaaguuaugaaa

SEQ ID NO: 76824 - RNA, 21 nt, Artificial Sequence
  Synthetic
caacuguucaaaguuaugaaa

SEQ ID NO: 76825 - RNA, 22 nt, Artificial Sequence
  Synthetic
ccaacuguucaaaguuaugaaa

SEQ ID NO: 76826 - RNA, 23 nt, Artificial Sequence
  Synthetic
cccaacuguucaaaguuaugaaa

SEQ ID NO: 76827 - RNA, 24 nt, Artificial Sequence
  Synthetic
ucccaacuguucaaaguuaugaaa

SEQ ID NO: 76828 - RNA, 21 nt, Artificial Sequence
  Synthetic
caauauuuuaaaagacugaaa

SEQ ID NO: 76829 - RNA, 22 nt, Artificial Sequence
  Synthetic
ucaauauuuuaaaagacugaaa

SEQ ID NO: 76830 - RNA, 24 nt, Artificial Sequence
  Synthetic
agucaauauuuuaaaagacugaaa

SEQ ID NO: 76831 - RNA, 18 nt, Artificial Sequence
  Synthetic
agggaaauucuccugaaa

SEQ ID NO: 76832 - RNA, 19 nt, Artificial Sequence
  Synthetic
aagggaaauucuccugaaa

SEQ ID NO: 76833 - RNA, 20 nt, Artificial Sequence
  Synthetic
aaagggaaauucuccugaaa

SEQ ID NO: 76834 - RNA, 21 nt, Artificial Sequence
  Synthetic
uaaagggaaauucuccugaaa

SEQ ID NO: 76835 - RNA, 22 nt, Artificial Sequence
  Synthetic
uuaaagggaaauucuccugaaa

SEQ ID NO: 76836 - RNA, 23 nt, Artificial Sequence
  Synthetic
uuuaaagggaaauucuccugaaa

SEQ ID NO: 76837 - RNA, 24 nt, Artificial Sequence
  Synthetic
uuuuaaagggaaauucuccugaaa

SEQ ID NO: 76838 - RNA, 18 nt, Artificial Sequence
  Synthetic
ucaauguuauuccugaaa

SEQ ID NO: 76839 - RNA, 19 nt, Artificial Sequence
  Synthetic
uucaauguuauuccugaaa

SEQ ID NO: 76840 - RNA, 20 nt, Artificial Sequence
  Synthetic
uuucaauguuauuccugaaa

SEQ ID NO: 76841 - RNA, 21 nt, Artificial Sequence
  Synthetic
auuucaauguuauuccugaaa

SEQ ID NO: 76842 - RNA, 22 nt, Artificial Sequence
  Synthetic
uauuucaauguuauuccugaaa

SEQ ID NO: 76843 - RNA, 23 nt, Artificial Sequence
  Synthetic
uuauuucaauguuauuccugaaa

SEQ ID NO: 76844 - RNA, 24 nt, Artificial Sequence
  Synthetic
uuuauuucaauguuauuccugaaa

SEQ ID NO: 76845 - RNA, 18 nt, Artificial Sequence
  Synthetic
ucuaaagugaagcugaaa

SEQ ID NO: 76846 - RNA, 19 nt, Artificial Sequence
  Synthetic
uucuaaagugaagcugaaa

SEQ ID NO: 76847 - RNA, 20 nt, Artificial Sequence
  Synthetic
auucuaaagugaagcugaaa

SEQ ID NO: 76848 - RNA, 21 nt, Artificial Sequence
  Synthetic
aauucuaaagugaagcugaaa

SEQ ID NO: 76849 - RNA, 22 nt, Artificial Sequence
  Synthetic
caauucuaaagugaagcugaaa

SEQ ID NO: 76850 - RNA, 24 nt, Artificial Sequence
  Synthetic
ugcaauucuaaagugaagcugaaa

SEQ ID NO: 76851 - RNA, 18 nt, Artificial Sequence
  Synthetic
cuacaaacugggcugaaa

SEQ ID NO: 76852 - RNA, 19 nt, Artificial Sequence
  Synthetic
ucuacaaacugggcugaaa

SEQ ID NO: 76853 - RNA, 20 nt, Artificial Sequence
  Synthetic
aucuacaaacugggcugaaa

SEQ ID NO: 76854 - RNA, 21 nt, Artificial Sequence
  Synthetic
aaucuacaaacugggcugaaa

SEQ ID NO: 76855 - RNA, 23 nt, Artificial Sequence
  Synthetic
ugaaucuacaaacugggcugaaa

SEQ ID NO: 76856 - RNA, 24 nt, Artificial Sequence
  Synthetic
uugaaucuacaaacugggcugaaa

SEQ ID NO: 76857 - RNA, 18 nt, Artificial Sequence
  Synthetic
caugaagaggugcugaaa

SEQ ID NO: 76858 - RNA, 19 nt, Artificial Sequence
  Synthetic
acaugaagaggugcugaaa

SEQ ID NO: 76859 - RNA, 20 nt, Artificial Sequence
  Synthetic
cacaugaagaggugcugaaa

SEQ ID NO: 76860 - RNA, 21 nt, Artificial Sequence
  Synthetic
ucacaugaagaggugcugaaa

SEQ ID NO: 76861 - RNA, 22 nt, Artificial Sequence
  Synthetic
cucacaugaagaggugcugaaa

SEQ ID NO: 76862 - RNA, 23 nt, Artificial Sequence
  Synthetic
ucucacaugaagaggugcugaaa

SEQ ID NO: 76863 - RNA, 24 nt, Artificial Sequence
  Synthetic
cucucacaugaagaggugcugaaa

SEQ ID NO: 76864 - RNA, 21 nt, Artificial Sequence
  Synthetic
aaauaaauucagaaucugaaa

SEQ ID NO: 76865 - RNA, 22 nt, Artificial Sequence
  Synthetic
aaaauaaauucagaaucugaaa

SEQ ID NO: 76866 - RNA, 18 nt, Artificial Sequence
  Synthetic
aauugagauccucugaaa

SEQ ID NO: 76867 - RNA, 19 nt, Artificial Sequence
  Synthetic
caauugagauccucugaaa

SEQ ID NO: 76868 - RNA, 21 nt, Artificial Sequence
  Synthetic
agcaauugagauccucugaaa

SEQ ID NO: 76869 - RNA, 23 nt, Artificial Sequence
  Synthetic
agagcaauugagauccucugaaa

SEQ ID NO: 76870 - RNA, 18 nt, Artificial Sequence
  Synthetic
augaggugcugucugaaa

SEQ ID NO: 76871 - RNA, 19 nt, Artificial Sequence
  Synthetic
uaugaggugcugucugaaa

SEQ ID NO: 76872 - RNA, 20 nt, Artificial Sequence
  Synthetic
uuaugaggugcugucugaaa

SEQ ID NO: 76873 - RNA, 21 nt, Artificial Sequence
  Synthetic
uuuaugaggugcugucugaaa

SEQ ID NO: 76874 - RNA, 22 nt, Artificial Sequence
  Synthetic
auuuaugaggugcugucugaaa

SEQ ID NO: 76875 - RNA, 23 nt, Artificial Sequence
  Synthetic
uauuuaugaggugcugucugaaa

SEQ ID NO: 76876 - RNA, 24 nt, Artificial Sequence
  Synthetic
cuauuuaugaggugcugucugaaa

SEQ ID NO: 76877 - RNA, 18 nt, Artificial Sequence
  Synthetic
cagugaaucauucugaaa

SEQ ID NO: 76878 - RNA, 19 nt, Artificial Sequence
  Synthetic
acagugaaucauucugaaa

SEQ ID NO: 76879 - RNA, 20 nt, Artificial Sequence
  Synthetic
uacagugaaucauucugaaa

SEQ ID NO: 76880 - RNA, 21 nt, Artificial Sequence
  Synthetic
auacagugaaucauucugaaa

SEQ ID NO: 76881 - RNA, 22 nt, Artificial Sequence
  Synthetic
aauacagugaaucauucugaaa

SEQ ID NO: 76882 - RNA, 23 nt, Artificial Sequence
  Synthetic
aaauacagugaaucauucugaaa

SEQ ID NO: 76883 - RNA, 24 nt, Artificial Sequence
  Synthetic
aaaauacagugaaucauucugaaa

SEQ ID NO: 76884 - RNA, 18 nt, Artificial Sequence
  Synthetic
uaucauaaacaggugaaa

SEQ ID NO: 76885 - RNA, 19 nt, Artificial Sequence
  Synthetic
uuaucauaaacaggugaaa

SEQ ID NO: 76886 - RNA, 20 nt, Artificial Sequence
  Synthetic
uuuaucauaaacaggugaaa

SEQ ID NO: 76887 - RNA, 21 nt, Artificial Sequence
  Synthetic
cuuuaucauaaacaggugaaa

SEQ ID NO: 76888 - RNA, 22 nt, Artificial Sequence
  Synthetic
ccuuuaucauaaacaggugaaa

SEQ ID NO: 76889 - RNA, 23 nt, Artificial Sequence
  Synthetic
uccuuuaucauaaacaggugaaa

SEQ ID NO: 76890 - RNA, 24 nt, Artificial Sequence
  Synthetic
auccuuuaucauaaacaggugaaa

SEQ ID NO: 76891 - RNA, 18 nt, Artificial Sequence
  Synthetic
aaguaacucacugugaaa

SEQ ID NO: 76892 - RNA, 19 nt, Artificial Sequence
  Synthetic
caaguaacucacugugaaa

SEQ ID NO: 76893 - RNA, 20 nt, Artificial Sequence
  Synthetic
acaaguaacucacugugaaa

SEQ ID NO: 76894 - RNA, 21 nt, Artificial Sequence
  Synthetic
uacaaguaacucacugugaaa

SEQ ID NO: 76895 - RNA, 22 nt, Artificial Sequence
  Synthetic
auacaaguaacucacugugaaa

SEQ ID NO: 76896 - RNA, 23 nt, Artificial Sequence
  Synthetic
uauacaaguaacucacugugaaa

SEQ ID NO: 76897 - RNA, 24 nt, Artificial Sequence
  Synthetic
cuauacaaguaacucacugugaaa

SEQ ID NO: 76898 - RNA, 21 nt, Artificial Sequence
  Synthetic
aaaauaaaacuucuugugaaa

SEQ ID NO: 76899 - RNA, 22 nt, Artificial Sequence
  Synthetic
aaaaauaaaacuucuugugaaa

SEQ ID NO: 76900 - RNA, 23 nt, Artificial Sequence
  Synthetic
aaaaaauaaaacuucuugugaaa

SEQ ID NO: 76901 - RNA, 18 nt, Artificial Sequence
  Synthetic
aacacccacuaauugaaa

SEQ ID NO: 76902 - RNA, 19 nt, Artificial Sequence
  Synthetic
uaacacccacuaauugaaa

SEQ ID NO: 76903 - RNA, 20 nt, Artificial Sequence
  Synthetic
auaacacccacuaauugaaa

SEQ ID NO: 76904 - RNA, 21 nt, Artificial Sequence
  Synthetic
aauaacacccacuaauugaaa

SEQ ID NO: 76905 - RNA, 23 nt, Artificial Sequence
  Synthetic
agaauaacacccacuaauugaaa

SEQ ID NO: 76906 - RNA, 24 nt, Artificial Sequence
  Synthetic
cagaauaacacccacuaauugaaa

SEQ ID NO: 76907 - RNA, 18 nt, Artificial Sequence
  Synthetic
auugacauuaauuugaaa

SEQ ID NO: 76908 - RNA, 19 nt, Artificial Sequence
  Synthetic
uauugacauuaauuugaaa

SEQ ID NO: 76909 - RNA, 22 nt, Artificial Sequence
  Synthetic
agguauugacauuaauuugaaa

SEQ ID NO: 76910 - RNA, 23 nt, Artificial Sequence
  Synthetic
cagguauugacauuaauuugaaa

SEQ ID NO: 76911 - RNA, 24 nt, Artificial Sequence
  Synthetic
acagguauugacauuaauuugaaa

SEQ ID NO: 76912 - RNA, 18 nt, Artificial Sequence
  Synthetic
aacacauaauguuugaaa

SEQ ID NO: 76913 - RNA, 19 nt, Artificial Sequence
  Synthetic
uaacacauaauguuugaaa

SEQ ID NO: 76914 - RNA, 20 nt, Artificial Sequence
  Synthetic
cuaacacauaauguuugaaa

SEQ ID NO: 76915 - RNA, 21 nt, Artificial Sequence
  Synthetic
acuaacacauaauguuugaaa

SEQ ID NO: 76916 - RNA, 24 nt, Artificial Sequence
  Synthetic
uggacuaacacauaauguuugaaa

SEQ ID NO: 76917 - RNA, 22 nt, Artificial Sequence
  Synthetic
ugcaaguaaacauauuuugaaa

SEQ ID NO: 76918 - RNA, 23 nt, Artificial Sequence
  Synthetic
augcaaguaaacauauuuugaaa

SEQ ID NO: 76919 - RNA, 24 nt, Artificial Sequence
  Synthetic
caugcaaguaaacauauuuugaaa

SEQ ID NO: 76920 - RNA, 18 nt, Artificial Sequence
  Synthetic
ccugauagguuuuugaaa

SEQ ID NO: 76921 - RNA, 19 nt, Artificial Sequence
  Synthetic
cccugauagguuuuugaaa

SEQ ID NO: 76922 - RNA, 21 nt, Artificial Sequence
  Synthetic
agcccugauagguuuuugaaa

SEQ ID NO: 76923 - RNA, 22 nt, Artificial Sequence
  Synthetic
cagcccugauagguuuuugaaa

SEQ ID NO: 76924 - RNA, 23 nt, Artificial Sequence
  Synthetic
ccagcccugauagguuuuugaaa

SEQ ID NO: 76925 - RNA, 24 nt, Artificial Sequence
  Synthetic
uccagcccugauagguuuuugaaa

SEQ ID NO: 76926 - RNA, 18 nt, Artificial Sequence
  Synthetic
aggauaacugaaaauaaa

SEQ ID NO: 76927 - RNA, 19 nt, Artificial Sequence
  Synthetic
aaggauaacugaaaauaaa

SEQ ID NO: 76928 - RNA, 21 nt, Artificial Sequence
  Synthetic
ugaaggauaacugaaaauaaa

SEQ ID NO: 76929 - RNA, 22 nt, Artificial Sequence
  Synthetic
cugaaggauaacugaaaauaaa

SEQ ID NO: 76930 - RNA, 23 nt, Artificial Sequence
  Synthetic
ucugaaggauaacugaaaauaaa

SEQ ID NO: 76931 - RNA, 18 nt, Artificial Sequence
  Synthetic
ccugucuagccaaauaaa

SEQ ID NO: 76932 - RNA, 20 nt, Artificial Sequence
  Synthetic
ugccugucuagccaaauaaa

SEQ ID NO: 76933 - RNA, 21 nt, Artificial Sequence
  Synthetic
augccugucuagccaaauaaa

SEQ ID NO: 76934 - RNA, 22 nt, Artificial Sequence
  Synthetic
caugccugucuagccaaauaaa

SEQ ID NO: 76935 - RNA, 23 nt, Artificial Sequence
  Synthetic
acaugccugucuagccaaauaaa

SEQ ID NO: 76936 - RNA, 24 nt, Artificial Sequence
  Synthetic
uacaugccugucuagccaaauaaa

SEQ ID NO: 76937 - RNA, 21 nt, Artificial Sequence
  Synthetic
acaaaaaauguagcaaauaaa

SEQ ID NO: 76938 - RNA, 22 nt, Artificial Sequence
  Synthetic
cacaaaaaauguagcaaauaaa

SEQ ID NO: 76939 - RNA, 21 nt, Artificial Sequence
  Synthetic
caauauuguuugugaaauaaa

SEQ ID NO: 76940 - RNA, 22 nt, Artificial Sequence
  Synthetic
ccaauauuguuugugaaauaaa

SEQ ID NO: 76941 - RNA, 23 nt, Artificial Sequence
  Synthetic
accaauauuguuugugaaauaaa

SEQ ID NO: 76942 - RNA, 24 nt, Artificial Sequence
  Synthetic
caccaauauuguuugugaaauaaa

SEQ ID NO: 76943 - RNA, 18 nt, Artificial Sequence
  Synthetic
uggaaguuaauaaauaaa

SEQ ID NO: 76944 - RNA, 19 nt, Artificial Sequence
  Synthetic
auggaaguuaauaaauaaa

SEQ ID NO: 76945 - RNA, 20 nt, Artificial Sequence
  Synthetic
cauggaaguuaauaaauaaa

SEQ ID NO: 76946 - RNA, 21 nt, Artificial Sequence
  Synthetic
acauggaaguuaauaaauaaa

SEQ ID NO: 76947 - RNA, 22 nt, Artificial Sequence
  Synthetic
cacauggaaguuaauaaauaaa

SEQ ID NO: 76948 - RNA, 23 nt, Artificial Sequence
  Synthetic
acacauggaaguuaauaaauaaa

SEQ ID NO: 76949 - RNA, 24 nt, Artificial Sequence
  Synthetic
aacacauggaaguuaauaaauaaa

SEQ ID NO: 76950 - RNA, 21 nt, Artificial Sequence
  Synthetic
ucaagauaaauauacaauaaa

SEQ ID NO: 76951 - RNA, 22 nt, Artificial Sequence
  Synthetic
cucaagauaaauauacaauaaa

SEQ ID NO: 76952 - RNA, 23 nt, Artificial Sequence
  Synthetic
ccucaagauaaauauacaauaaa

SEQ ID NO: 76953 - RNA, 24 nt, Artificial Sequence
  Synthetic
accucaagauaaauauacaauaaa

SEQ ID NO: 76954 - RNA, 21 nt, Artificial Sequence
  Synthetic
auuuuacuuuccaugaauaaa

SEQ ID NO: 76955 - RNA, 22 nt, Artificial Sequence
  Synthetic
aauuuuacuuuccaugaauaaa

SEQ ID NO: 76956 - RNA, 23 nt, Artificial Sequence
  Synthetic
aaauuuuacuuuccaugaauaaa

SEQ ID NO: 76957 - RNA, 24 nt, Artificial Sequence
  Synthetic
caaauuuuacuuuccaugaauaaa

SEQ ID NO: 76958 - RNA, 19 nt, Artificial Sequence
  Synthetic
uguauugucugugaauaaa

SEQ ID NO: 76959 - RNA, 20 nt, Artificial Sequence
  Synthetic
uuguauugucugugaauaaa

SEQ ID NO: 76960 - RNA, 21 nt, Artificial Sequence
  Synthetic
auuguauugucugugaauaaa

SEQ ID NO: 76961 - RNA, 24 nt, Artificial Sequence
  Synthetic
aggauuguauugucugugaauaaa

SEQ ID NO: 76962 - RNA, 22 nt, Artificial Sequence
  Synthetic
uguaauugagaaaaauaauaaa

SEQ ID NO: 76963 - RNA, 23 nt, Artificial Sequence
  Synthetic
auguaauugagaaaaauaauaaa

SEQ ID NO: 76964 - RNA, 24 nt, Artificial Sequence
  Synthetic
cauguaauugagaaaaauaauaaa

SEQ ID NO: 76965 - RNA, 18 nt, Artificial Sequence
  Synthetic
cuuagauucucuaauaaa

SEQ ID NO: 76966 - RNA, 19 nt, Artificial Sequence
  Synthetic
ucuuagauucucuaauaaa

SEQ ID NO: 76967 - RNA, 20 nt, Artificial Sequence
  Synthetic
aucuuagauucucuaauaaa

SEQ ID NO: 76968 - RNA, 21 nt, Artificial Sequence
  Synthetic
aaucuuagauucucuaauaaa

SEQ ID NO: 76969 - RNA, 22 nt, Artificial Sequence
  Synthetic
uaaucuuagauucucuaauaaa

SEQ ID NO: 76970 - RNA, 23 nt, Artificial Sequence
  Synthetic
uuaaucuuagauucucuaauaaa

SEQ ID NO: 76971 - RNA, 24 nt, Artificial Sequence
  Synthetic
cuuaaucuuagauucucuaauaaa

SEQ ID NO: 76972 - RNA, 18 nt, Artificial Sequence
  Synthetic
ugucuucucaagcauaaa

SEQ ID NO: 76973 - RNA, 19 nt, Artificial Sequence
  Synthetic
uugucuucucaagcauaaa

SEQ ID NO: 76974 - RNA, 20 nt, Artificial Sequence
  Synthetic
uuugucuucucaagcauaaa

SEQ ID NO: 76975 - RNA, 21 nt, Artificial Sequence
  Synthetic
cuuugucuucucaagcauaaa

SEQ ID NO: 76976 - RNA, 22 nt, Artificial Sequence
  Synthetic
ucuuugucuucucaagcauaaa

SEQ ID NO: 76977 - RNA, 23 nt, Artificial Sequence
  Synthetic
uucuuugucuucucaagcauaaa

SEQ ID NO: 76978 - RNA, 24 nt, Artificial Sequence
  Synthetic
uuucuuugucuucucaagcauaaa

SEQ ID NO: 76979 - RNA, 18 nt, Artificial Sequence
  Synthetic
auauagguaugucauaaa

SEQ ID NO: 76980 - RNA, 19 nt, Artificial Sequence
  Synthetic
uauauagguaugucauaaa

SEQ ID NO: 76981 - RNA, 21 nt, Artificial Sequence
  Synthetic
uguauauagguaugucauaaa

SEQ ID NO: 76982 - RNA, 22 nt, Artificial Sequence
  Synthetic
auguauauagguaugucauaaa

SEQ ID NO: 76983 - RNA, 23 nt, Artificial Sequence
  Synthetic
aauguauauagguaugucauaaa

SEQ ID NO: 76984 - RNA, 24 nt, Artificial Sequence
  Synthetic
uaauguauauagguaugucauaaa

SEQ ID NO: 76985 - RNA, 18 nt, Artificial Sequence
  Synthetic
uucacccuuaaggauaaa

SEQ ID NO: 76986 - RNA, 19 nt, Artificial Sequence
  Synthetic
uuucacccuuaaggauaaa

SEQ ID NO: 76987 - RNA, 20 nt, Artificial Sequence
  Synthetic
uuuucacccuuaaggauaaa

SEQ ID NO: 76988 - RNA, 23 nt, Artificial Sequence
  Synthetic
agguuuucacccuuaaggauaaa

SEQ ID NO: 76989 - RNA, 24 nt, Artificial Sequence
  Synthetic
cagguuuucacccuuaaggauaaa

SEQ ID NO: 76990 - RNA, 18 nt, Artificial Sequence
  Synthetic
ucaaauuaagcugauaaa

SEQ ID NO: 76991 - RNA, 19 nt, Artificial Sequence
  Synthetic
aucaaauuaagcugauaaa

SEQ ID NO: 76992 - RNA, 20 nt, Artificial Sequence
  Synthetic
uaucaaauuaagcugauaaa

SEQ ID NO: 76993 - RNA, 21 nt, Artificial Sequence
  Synthetic
cuaucaaauuaagcugauaaa

SEQ ID NO: 76994 - RNA, 22 nt, Artificial Sequence
  Synthetic
acuaucaaauuaagcugauaaa

SEQ ID NO: 76995 - RNA, 23 nt, Artificial Sequence
  Synthetic
uacuaucaaauuaagcugauaaa

SEQ ID NO: 76996 - RNA, 24 nt, Artificial Sequence
  Synthetic
uuacuaucaaauuaagcugauaaa

SEQ ID NO: 76997 - RNA, 18 nt, Artificial Sequence
  Synthetic
ucagacaccucauauaaa

SEQ ID NO: 76998 - RNA, 19 nt, Artificial Sequence
  Synthetic
cucagacaccucauauaaa

SEQ ID NO: 76999 - RNA, 20 nt, Artificial Sequence
  Synthetic
ucucagacaccucauauaaa

SEQ ID NO: 77000 - RNA, 22 nt, Artificial Sequence
  Synthetic
ugucucagacaccucauauaaa

SEQ ID NO: 77001 - RNA, 23 nt, Artificial Sequence
  Synthetic
cugucucagacaccucauauaaa

SEQ ID NO: 77002 - RNA, 24 nt, Artificial Sequence
  Synthetic
acugucucagacaccucauauaaa

SEQ ID NO: 77003 - RNA, 21 nt, Artificial Sequence
  Synthetic
cauuuuugcaaaugauauaaa

SEQ ID NO: 77004 - RNA, 22 nt, Artificial Sequence
  Synthetic
acauuuuugcaaaugauauaaa

SEQ ID NO: 77005 - RNA, 23 nt, Artificial Sequence
  Synthetic
uacauuuuugcaaaugauauaaa

SEQ ID NO: 77006 - RNA, 24 nt, Artificial Sequence
  Synthetic
auacauuuuugcaaaugauauaaa

SEQ ID NO: 77007 - RNA, 21 nt, Artificial Sequence
  Synthetic
cuuaagaucacaauauauaaa

SEQ ID NO: 77008 - RNA, 22 nt, Artificial Sequence
  Synthetic
ccuuaagaucacaauauauaaa

SEQ ID NO: 77009 - RNA, 24 nt, Artificial Sequence
  Synthetic
agccuuaagaucacaauauauaaa

SEQ ID NO: 77010 - RNA, 18 nt, Artificial Sequence
  Synthetic
ucaagacggcuauauaaa

SEQ ID NO: 77011 - RNA, 19 nt, Artificial Sequence
  Synthetic
uucaagacggcuauauaaa

SEQ ID NO: 77012 - RNA, 20 nt, Artificial Sequence
  Synthetic
cuucaagacggcuauauaaa

SEQ ID NO: 77013 - RNA, 21 nt, Artificial Sequence
  Synthetic
acuucaagacggcuauauaaa

SEQ ID NO: 77014 - RNA, 22 nt, Artificial Sequence
  Synthetic
cacuucaagacggcuauauaaa

SEQ ID NO: 77015 - RNA, 23 nt, Artificial Sequence
  Synthetic
ucacuucaagacggcuauauaaa

SEQ ID NO: 77016 - RNA, 21 nt, Artificial Sequence
  Synthetic
aaaugcaugaaaaauuauaaa

SEQ ID NO: 77017 - RNA, 22 nt, Artificial Sequence
  Synthetic
aaaaugcaugaaaaauuauaaa

SEQ ID NO: 77018 - RNA, 23 nt, Artificial Sequence
  Synthetic
caaaaugcaugaaaaauuauaaa

SEQ ID NO: 77019 - RNA, 24 nt, Artificial Sequence
  Synthetic
ucaaaaugcaugaaaaauuauaaa

SEQ ID NO: 77020 - RNA, 21 nt, Artificial Sequence
  Synthetic
auucaaaguuauuuuuauaaa

SEQ ID NO: 77021 - RNA, 22 nt, Artificial Sequence
  Synthetic
uauucaaaguuauuuuuauaaa

SEQ ID NO: 77022 - RNA, 24 nt, Artificial Sequence
  Synthetic
uguauucaaaguuauuuuuauaaa

SEQ ID NO: 77023 - RNA, 19 nt, Artificial Sequence
  Synthetic
agcuacugcaaaaacuaaa

SEQ ID NO: 77024 - RNA, 20 nt, Artificial Sequence
  Synthetic
aagcuacugcaaaaacuaaa

SEQ ID NO: 77025 - RNA, 21 nt, Artificial Sequence
  Synthetic
aaagcuacugcaaaaacuaaa

SEQ ID NO: 77026 - RNA, 22 nt, Artificial Sequence
  Synthetic
uaaagcuacugcaaaaacuaaa

SEQ ID NO: 77027 - RNA, 24 nt, Artificial Sequence
  Synthetic
uguaaagcuacugcaaaaacuaaa

SEQ ID NO: 77028 - RNA, 18 nt, Artificial Sequence
  Synthetic
uaagacagggaaacuaaa

SEQ ID NO: 77029 - RNA, 19 nt, Artificial Sequence
  Synthetic
auaagacagggaaacuaaa

SEQ ID NO: 77030 - RNA, 21 nt, Artificial Sequence
  Synthetic
agauaagacagggaaacuaaa

SEQ ID NO: 77031 - RNA, 22 nt, Artificial Sequence
  Synthetic
cagauaagacagggaaacuaaa

SEQ ID NO: 77032 - RNA, 23 nt, Artificial Sequence
  Synthetic
acagauaagacagggaaacuaaa

SEQ ID NO: 77033 - RNA, 24 nt, Artificial Sequence
  Synthetic
aacagauaagacagggaaacuaaa

SEQ ID NO: 77034 - RNA, 21 nt, Artificial Sequence
  Synthetic
uucaguauaguauucacuaaa

SEQ ID NO: 77035 - RNA, 22 nt, Artificial Sequence
  Synthetic
cuucaguauaguauucacuaaa

SEQ ID NO: 77036 - RNA, 23 nt, Artificial Sequence
  Synthetic
acuucaguauaguauucacuaaa

SEQ ID NO: 77037 - RNA, 24 nt, Artificial Sequence
  Synthetic
uacuucaguauaguauucacuaaa

SEQ ID NO: 77038 - RNA, 19 nt, Artificial Sequence
  Synthetic
ugaugccuuauauacuaaa

SEQ ID NO: 77039 - RNA, 20 nt, Artificial Sequence
  Synthetic
augaugccuuauauacuaaa

SEQ ID NO: 77040 - RNA, 21 nt, Artificial Sequence
  Synthetic
uaugaugccuuauauacuaaa

SEQ ID NO: 77041 - RNA, 22 nt, Artificial Sequence
  Synthetic
uuaugaugccuuauauacuaaa

SEQ ID NO: 77042 - RNA, 23 nt, Artificial Sequence
  Synthetic
auuaugaugccuuauauacuaaa

SEQ ID NO: 77043 - RNA, 24 nt, Artificial Sequence
  Synthetic
cauuaugaugccuuauauacuaaa

SEQ ID NO: 77044 - RNA, 18 nt, Artificial Sequence
  Synthetic
aaagcugucuuuacuaaa

SEQ ID NO: 77045 - RNA, 19 nt, Artificial Sequence
  Synthetic
caaagcugucuuuacuaaa

SEQ ID NO: 77046 - RNA, 20 nt, Artificial Sequence
  Synthetic
ccaaagcugucuuuacuaaa

SEQ ID NO: 77047 - RNA, 18 nt, Artificial Sequence
  Synthetic
uaagugauaaucccuaaa

SEQ ID NO: 77048 - RNA, 19 nt, Artificial Sequence
  Synthetic
uuaagugauaaucccuaaa

SEQ ID NO: 77049 - RNA, 20 nt, Artificial Sequence
  Synthetic
uuuaagugauaaucccuaaa

SEQ ID NO: 77050 - RNA, 21 nt, Artificial Sequence
  Synthetic
uuuuaagugauaaucccuaaa

SEQ ID NO: 77051 - RNA, 22 nt, Artificial Sequence
  Synthetic
auuuuaagugauaaucccuaaa

SEQ ID NO: 77052 - RNA, 23 nt, Artificial Sequence
  Synthetic
cauuuuaagugauaaucccuaaa

SEQ ID NO: 77053 - RNA, 24 nt, Artificial Sequence
  Synthetic
ucauuuuaagugauaaucccuaaa

SEQ ID NO: 77054 - RNA, 19 nt, Artificial Sequence
  Synthetic
aguucaacaccauccuaaa

SEQ ID NO: 77055 - RNA, 20 nt, Artificial Sequence
  Synthetic
aaguucaacaccauccuaaa

SEQ ID NO: 77056 - RNA, 21 nt, Artificial Sequence
  Synthetic
caaguucaacaccauccuaaa

SEQ ID NO: 77057 - RNA, 23 nt, Artificial Sequence
  Synthetic
agcaaguucaacaccauccuaaa

SEQ ID NO: 77058 - RNA, 24 nt, Artificial Sequence
  Synthetic
uagcaaguucaacaccauccuaaa

SEQ ID NO: 77059 - RNA, 18 nt, Artificial Sequence
  Synthetic
uuuacauuggaggcuaaa

SEQ ID NO: 77060 - RNA, 19 nt, Artificial Sequence
  Synthetic
uuuuacauuggaggcuaaa

SEQ ID NO: 77061 - RNA, 21 nt, Artificial Sequence
  Synthetic
uguuuuacauuggaggcuaaa

SEQ ID NO: 77062 - RNA, 22 nt, Artificial Sequence
  Synthetic
uuguuuuacauuggaggcuaaa

SEQ ID NO: 77063 - RNA, 23 nt, Artificial Sequence
  Synthetic
auuguuuuacauuggaggcuaaa

SEQ ID NO: 77064 - RNA, 24 nt, Artificial Sequence
  Synthetic
cauuguuuuacauuggaggcuaaa

SEQ ID NO: 77065 - RNA, 18 nt, Artificial Sequence
  Synthetic
acacagaagagggcuaaa

SEQ ID NO: 77066 - RNA, 19 nt, Artificial Sequence
  Synthetic
uacacagaagagggcuaaa

SEQ ID NO: 77067 - RNA, 20 nt, Artificial Sequence
  Synthetic
auacacagaagagggcuaaa

SEQ ID NO: 77068 - RNA, 21 nt, Artificial Sequence
  Synthetic
aauacacagaagagggcuaaa

SEQ ID NO: 77069 - RNA, 22 nt, Artificial Sequence
  Synthetic
uaauacacagaagagggcuaaa

SEQ ID NO: 77070 - RNA, 23 nt, Artificial Sequence
  Synthetic
auaauacacagaagagggcuaaa

SEQ ID NO: 77071 - RNA, 24 nt, Artificial Sequence
  Synthetic
aauaauacacagaagagggcuaaa

SEQ ID NO: 77072 - RNA, 20 nt, Artificial Sequence
  Synthetic
uggaaauucccguggcuaaa

SEQ ID NO: 77073 - RNA, 21 nt, Artificial Sequence
  Synthetic
auggaaauucccguggcuaaa

SEQ ID NO: 77074 - RNA, 22 nt, Artificial Sequence
  Synthetic
uauggaaauucccguggcuaaa

SEQ ID NO: 77075 - RNA, 23 nt, Artificial Sequence
  Synthetic
uuauggaaauucccguggcuaaa

SEQ ID NO: 77076 - RNA, 24 nt, Artificial Sequence
  Synthetic
cuuauggaaauucccguggcuaaa

SEQ ID NO: 77077 - RNA, 21 nt, Artificial Sequence
  Synthetic
auuucuuucaaaaaugcuaaa

SEQ ID NO: 77078 - RNA, 22 nt, Artificial Sequence
  Synthetic
aauuucuuucaaaaaugcuaaa

SEQ ID NO: 77079 - RNA, 23 nt, Artificial Sequence
  Synthetic
caauuucuuucaaaaaugcuaaa

SEQ ID NO: 77080 - RNA, 18 nt, Artificial Sequence
  Synthetic
ugcuuuuaaacugcuaaa

SEQ ID NO: 77081 - RNA, 19 nt, Artificial Sequence
  Synthetic
cugcuuuuaaacugcuaaa

SEQ ID NO: 77082 - RNA, 21 nt, Artificial Sequence
  Synthetic
ugcugcuuuuaaacugcuaaa

SEQ ID NO: 77083 - RNA, 22 nt, Artificial Sequence
  Synthetic
uugcugcuuuuaaacugcuaaa

SEQ ID NO: 77084 - RNA, 23 nt, Artificial Sequence
  Synthetic
uuugcugcuuuuaaacugcuaaa

SEQ ID NO: 77085 - RNA, 24 nt, Artificial Sequence
  Synthetic
uuuugcugcuuuuaaacugcuaaa

SEQ ID NO: 77086 - RNA, 18 nt, Artificial Sequence
  Synthetic
agagacuguauugcuaaa

SEQ ID NO: 77087 - RNA, 19 nt, Artificial Sequence
  Synthetic
cagagacuguauugcuaaa

SEQ ID NO: 77088 - RNA, 20 nt, Artificial Sequence
  Synthetic
ucagagacuguauugcuaaa

SEQ ID NO: 77089 - RNA, 21 nt, Artificial Sequence
  Synthetic
aucagagacuguauugcuaaa

SEQ ID NO: 77090 - RNA, 22 nt, Artificial Sequence
  Synthetic
uaucagagacuguauugcuaaa

SEQ ID NO: 77091 - RNA, 23 nt, Artificial Sequence
  Synthetic
uuaucagagacuguauugcuaaa

SEQ ID NO: 77092 - RNA, 18 nt, Artificial Sequence
  Synthetic
cuguuucgguuugcuaaa

SEQ ID NO: 77093 - RNA, 19 nt, Artificial Sequence
  Synthetic
ucuguuucgguuugcuaaa

SEQ ID NO: 77094 - RNA, 20 nt, Artificial Sequence
  Synthetic
aucuguuucgguuugcuaaa

SEQ ID NO: 77095 - RNA, 22 nt, Artificial Sequence
  Synthetic
agaucuguuucgguuugcuaaa

SEQ ID NO: 77096 - RNA, 23 nt, Artificial Sequence
  Synthetic
cagaucuguuucgguuugcuaaa

SEQ ID NO: 77097 - RNA, 24 nt, Artificial Sequence
  Synthetic
ucagaucuguuucgguuugcuaaa

SEQ ID NO: 77098 - RNA, 18 nt, Artificial Sequence
  Synthetic
uauacuguggaaucuaaa

SEQ ID NO: 77099 - RNA, 19 nt, Artificial Sequence
  Synthetic
auauacuguggaaucuaaa

SEQ ID NO: 77100 - RNA, 20 nt, Artificial Sequence
  Synthetic
aauauacuguggaaucuaaa

SEQ ID NO: 77101 - RNA, 21 nt, Artificial Sequence
  Synthetic
aaauauacuguggaaucuaaa

SEQ ID NO: 77102 - RNA, 22 nt, Artificial Sequence
  Synthetic
aaaauauacuguggaaucuaaa

SEQ ID NO: 77103 - RNA, 23 nt, Artificial Sequence
  Synthetic
aaaaauauacuguggaaucuaaa

SEQ ID NO: 77104 - RNA, 24 nt, Artificial Sequence
  Synthetic
aaaaaauauacuguggaaucuaaa

SEQ ID NO: 77105 - RNA, 18 nt, Artificial Sequence
  Synthetic
cauuaaugacuaucuaaa

SEQ ID NO: 77106 - RNA, 19 nt, Artificial Sequence
  Synthetic
acauuaaugacuaucuaaa

SEQ ID NO: 77107 - RNA, 20 nt, Artificial Sequence
  Synthetic
uacauuaaugacuaucuaaa

SEQ ID NO: 77108 - RNA, 21 nt, Artificial Sequence
  Synthetic
uuacauuaaugacuaucuaaa

SEQ ID NO: 77109 - RNA, 22 nt, Artificial Sequence
  Synthetic
uuuacauuaaugacuaucuaaa

SEQ ID NO: 77110 - RNA, 23 nt, Artificial Sequence
  Synthetic
auuuacauuaaugacuaucuaaa

SEQ ID NO: 77111 - RNA, 24 nt, Artificial Sequence
  Synthetic
cauuuacauuaaugacuaucuaaa

SEQ ID NO: 77112 - RNA, 18 nt, Artificial Sequence
  Synthetic
ucacugauggacucuaaa

SEQ ID NO: 77113 - RNA, 19 nt, Artificial Sequence
  Synthetic
aucacugauggacucuaaa

SEQ ID NO: 77114 - RNA, 20 nt, Artificial Sequence
  Synthetic
caucacugauggacucuaaa

SEQ ID NO: 77115 - RNA, 22 nt, Artificial Sequence
  Synthetic
agcaucacugauggacucuaaa

SEQ ID NO: 77116 - RNA, 23 nt, Artificial Sequence
  Synthetic
aagcaucacugauggacucuaaa

SEQ ID NO: 77117 - RNA, 24 nt, Artificial Sequence
  Synthetic
aaagcaucacugauggacucuaaa

SEQ ID NO: 77118 - RNA, 18 nt, Artificial Sequence
  Synthetic
ucaugcuuuaccucuaaa

SEQ ID NO: 77119 - RNA, 22 nt, Artificial Sequence
  Synthetic
ugggucaugcuuuaccucuaaa

SEQ ID NO: 77120 - RNA, 24 nt, Artificial Sequence
  Synthetic
ugugggucaugcuuuaccucuaaa

SEQ ID NO: 77121 - RNA, 18 nt, Artificial Sequence
  Synthetic
aucuugacguccucuaaa

SEQ ID NO: 77122 - RNA, 19 nt, Artificial Sequence
  Synthetic
aaucuugacguccucuaaa

SEQ ID NO: 77123 - RNA, 20 nt, Artificial Sequence
  Synthetic
caaucuugacguccucuaaa

SEQ ID NO: 77124 - RNA, 21 nt, Artificial Sequence
  Synthetic
ccaaucuugacguccucuaaa

SEQ ID NO: 77125 - RNA, 22 nt, Artificial Sequence
  Synthetic
accaaucuugacguccucuaaa

SEQ ID NO: 77126 - RNA, 24 nt, Artificial Sequence
  Synthetic
agaccaaucuugacguccucuaaa

SEQ ID NO: 77127 - RNA, 21 nt, Artificial Sequence
  Synthetic
ugagagagagagaauucuaaa

SEQ ID NO: 77128 - RNA, 22 nt, Artificial Sequence
  Synthetic
augagagagagagaauucuaaa

SEQ ID NO: 77129 - RNA, 23 nt, Artificial Sequence
  Synthetic
aaugagagagagagaauucuaaa

SEQ ID NO: 77130 - RNA, 24 nt, Artificial Sequence
  Synthetic
aaaugagagagagagaauucuaaa

SEQ ID NO: 77131 - RNA, 18 nt, Artificial Sequence
  Synthetic
cuguguagcccuucuaaa

SEQ ID NO: 77132 - RNA, 19 nt, Artificial Sequence
  Synthetic
ccuguguagcccuucuaaa

SEQ ID NO: 77133 - RNA, 20 nt, Artificial Sequence
  Synthetic
uccuguguagcccuucuaaa

SEQ ID NO: 77134 - RNA, 21 nt, Artificial Sequence
  Synthetic
auccuguguagcccuucuaaa

SEQ ID NO: 77135 - RNA, 22 nt, Artificial Sequence
  Synthetic
cauccuguguagcccuucuaaa

SEQ ID NO: 77136 - RNA, 23 nt, Artificial Sequence
  Synthetic
ccauccuguguagcccuucuaaa

SEQ ID NO: 77137 - RNA, 24 nt, Artificial Sequence
  Synthetic
uccauccuguguagcccuucuaaa

SEQ ID NO: 77138 - RNA, 18 nt, Artificial Sequence
  Synthetic
uacuuuugcaguucuaaa

SEQ ID NO: 77139 - RNA, 19 nt, Artificial Sequence
  Synthetic
cuacuuuugcaguucuaaa

SEQ ID NO: 77140 - RNA, 20 nt, Artificial Sequence
  Synthetic
ccuacuuuugcaguucuaaa

SEQ ID NO: 77141 - RNA, 21 nt, Artificial Sequence
  Synthetic
uccuacuuuugcaguucuaaa

SEQ ID NO: 77142 - RNA, 22 nt, Artificial Sequence
  Synthetic
uuccuacuuuugcaguucuaaa

SEQ ID NO: 77143 - RNA, 23 nt, Artificial Sequence
  Synthetic
auuccuacuuuugcaguucuaaa

SEQ ID NO: 77144 - RNA, 18 nt, Artificial Sequence
  Synthetic
aaccucaauaguucuaaa

SEQ ID NO: 77145 - RNA, 19 nt, Artificial Sequence
  Synthetic
aaaccucaauaguucuaaa

SEQ ID NO: 77146 - RNA, 20 nt, Artificial Sequence
  Synthetic
caaaccucaauaguucuaaa

SEQ ID NO: 77147 - RNA, 21 nt, Artificial Sequence
  Synthetic
ucaaaccucaauaguucuaaa

SEQ ID NO: 77148 - RNA, 22 nt, Artificial Sequence
  Synthetic
cucaaaccucaauaguucuaaa

SEQ ID NO: 77149 - RNA, 24 nt, Artificial Sequence
  Synthetic
ugcucaaaccucaauaguucuaaa

SEQ ID NO: 77150 - RNA, 18 nt, Artificial Sequence
  Synthetic
uguugcccaugaaguaaa

SEQ ID NO: 77151 - RNA, 19 nt, Artificial Sequence
  Synthetic
cuguugcccaugaaguaaa

SEQ ID NO: 77152 - RNA, 21 nt, Artificial Sequence
  Synthetic
ugcuguugcccaugaaguaaa

SEQ ID NO: 77153 - RNA, 22 nt, Artificial Sequence
  Synthetic
cugcuguugcccaugaaguaaa

SEQ ID NO: 77154 - RNA, 18 nt, Artificial Sequence
  Synthetic
auuagacauugaaguaaa

SEQ ID NO: 77155 - RNA, 21 nt, Artificial Sequence
  Synthetic
uggauuagacauugaaguaaa

SEQ ID NO: 77156 - RNA, 22 nt, Artificial Sequence
  Synthetic
uuggauuagacauugaaguaaa

SEQ ID NO: 77157 - RNA, 23 nt, Artificial Sequence
  Synthetic
uuuggauuagacauugaaguaaa

SEQ ID NO: 77158 - RNA, 24 nt, Artificial Sequence
  Synthetic
uuuuggauuagacauugaaguaaa

SEQ ID NO: 77159 - RNA, 18 nt, Artificial Sequence
  Synthetic
uuaaaaaguauaaguaaa

SEQ ID NO: 77160 - RNA, 19 nt, Artificial Sequence
  Synthetic
cuuaaaaaguauaaguaaa

SEQ ID NO: 77161 - RNA, 20 nt, Artificial Sequence
  Synthetic
ucuuaaaaaguauaaguaaa

SEQ ID NO: 77162 - RNA, 21 nt, Artificial Sequence
  Synthetic
uucuuaaaaaguauaaguaaa

SEQ ID NO: 77163 - RNA, 22 nt, Artificial Sequence
  Synthetic
uuucuuaaaaaguauaaguaaa

SEQ ID NO: 77164 - RNA, 24 nt, Artificial Sequence
  Synthetic
cguuucuuaaaaaguauaaguaaa

SEQ ID NO: 77165 - RNA, 21 nt, Artificial Sequence
  Synthetic
aaccaaaacaauuacaguaaa

SEQ ID NO: 77166 - RNA, 22 nt, Artificial Sequence
  Synthetic
aaaccaaaacaauuacaguaaa

SEQ ID NO: 77167 - RNA, 23 nt, Artificial Sequence
  Synthetic
caaaccaaaacaauuacaguaaa

SEQ ID NO: 77168 - RNA, 18 nt, Artificial Sequence
  Synthetic
ucacuuuugacgaguaaa

SEQ ID NO: 77169 - RNA, 19 nt, Artificial Sequence
  Synthetic
aucacuuuugacgaguaaa

SEQ ID NO: 77170 - RNA, 21 nt, Artificial Sequence
  Synthetic
ugaucacuuuugacgaguaaa

SEQ ID NO: 77171 - RNA, 22 nt, Artificial Sequence
  Synthetic
augaucacuuuugacgaguaaa

SEQ ID NO: 77172 - RNA, 23 nt, Artificial Sequence
  Synthetic
caugaucacuuuugacgaguaaa

SEQ ID NO: 77173 - RNA, 18 nt, Artificial Sequence
  Synthetic
cccacagguuggaguaaa

SEQ ID NO: 77174 - RNA, 19 nt, Artificial Sequence
  Synthetic
ucccacagguuggaguaaa

SEQ ID NO: 77175 - RNA, 20 nt, Artificial Sequence
  Synthetic
cucccacagguuggaguaaa

SEQ ID NO: 77176 - RNA, 21 nt, Artificial Sequence
  Synthetic
acucccacagguuggaguaaa

SEQ ID NO: 77177 - RNA, 22 nt, Artificial Sequence
  Synthetic
uacucccacagguuggaguaaa

SEQ ID NO: 77178 - RNA, 23 nt, Artificial Sequence
  Synthetic
auacucccacagguuggaguaaa

SEQ ID NO: 77179 - RNA, 24 nt, Artificial Sequence
  Synthetic
aauacucccacagguuggaguaaa

SEQ ID NO: 77180 - RNA, 19 nt, Artificial Sequence
  Synthetic
agaauaagcccugaguaaa

SEQ ID NO: 77181 - RNA, 20 nt, Artificial Sequence
  Synthetic
aagaauaagcccugaguaaa

SEQ ID NO: 77182 - RNA, 21 nt, Artificial Sequence
  Synthetic
aaagaauaagcccugaguaaa

SEQ ID NO: 77183 - RNA, 22 nt, Artificial Sequence
  Synthetic
uaaagaauaagcccugaguaaa

SEQ ID NO: 77184 - RNA, 23 nt, Artificial Sequence
  Synthetic
auaaagaauaagcccugaguaaa

SEQ ID NO: 77185 - RNA, 24 nt, Artificial Sequence
  Synthetic
uauaaagaauaagcccugaguaaa

SEQ ID NO: 77186 - RNA, 18 nt, Artificial Sequence
  Synthetic
ucauuuugauugaguaaa

SEQ ID NO: 77187 - RNA, 20 nt, Artificial Sequence
  Synthetic
agucauuuugauugaguaaa

SEQ ID NO: 77188 - RNA, 18 nt, Artificial Sequence
  Synthetic
uggaaaauacaacguaaa

SEQ ID NO: 77189 - RNA, 19 nt, Artificial Sequence
  Synthetic
cuggaaaauacaacguaaa

SEQ ID NO: 77190 - RNA, 20 nt, Artificial Sequence
  Synthetic
ccuggaaaauacaacguaaa

SEQ ID NO: 77191 - RNA, 21 nt, Artificial Sequence
  Synthetic
uccuggaaaauacaacguaaa

SEQ ID NO: 77192 - RNA, 22 nt, Artificial Sequence
  Synthetic
cuccuggaaaauacaacguaaa

SEQ ID NO: 77193 - RNA, 23 nt, Artificial Sequence
  Synthetic
acuccuggaaaauacaacguaaa

SEQ ID NO: 77194 - RNA, 18 nt, Artificial Sequence
  Synthetic
uacagauuucaagguaaa

SEQ ID NO: 77195 - RNA, 19 nt, Artificial Sequence
  Synthetic
auacagauuucaagguaaa

SEQ ID NO: 77196 - RNA, 21 nt, Artificial Sequence
  Synthetic
agauacagauuucaagguaaa

SEQ ID NO: 77197 - RNA, 22 nt, Artificial Sequence
  Synthetic
uagauacagauuucaagguaaa

SEQ ID NO: 77198 - RNA, 23 nt, Artificial Sequence
  Synthetic
auagauacagauuucaagguaaa

SEQ ID NO: 77199 - RNA, 24 nt, Artificial Sequence
  Synthetic
aauagauacagauuucaagguaaa

SEQ ID NO: 77200 - RNA, 21 nt, Artificial Sequence
  Synthetic
aaagaaaauauuccagguaaa

SEQ ID NO: 77201 - RNA, 22 nt, Artificial Sequence
  Synthetic
aaaagaaaauauuccagguaaa

SEQ ID NO: 77202 - RNA, 23 nt, Artificial Sequence
  Synthetic
caaaagaaaauauuccagguaaa

SEQ ID NO: 77203 - RNA, 24 nt, Artificial Sequence
  Synthetic
acaaaagaaaauauuccagguaaa

SEQ ID NO: 77204 - RNA, 18 nt, Artificial Sequence
  Synthetic
agaaagguagcagguaaa

SEQ ID NO: 77205 - RNA, 19 nt, Artificial Sequence
  Synthetic
uagaaagguagcagguaaa

SEQ ID NO: 77206 - RNA, 20 nt, Artificial Sequence
  Synthetic
auagaaagguagcagguaaa

SEQ ID NO: 77207 - RNA, 21 nt, Artificial Sequence
  Synthetic
cauagaaagguagcagguaaa

SEQ ID NO: 77208 - RNA, 22 nt, Artificial Sequence
  Synthetic
acauagaaagguagcagguaaa

SEQ ID NO: 77209 - RNA, 23 nt, Artificial Sequence
  Synthetic
uacauagaaagguagcagguaaa

SEQ ID NO: 77210 - RNA, 24 nt, Artificial Sequence
  Synthetic
auacauagaaagguagcagguaaa

SEQ ID NO: 77211 - RNA, 18 nt, Artificial Sequence
  Synthetic
accuuuuuccucgguaaa

SEQ ID NO: 77212 - RNA, 19 nt, Artificial Sequence
  Synthetic
uaccuuuuuccucgguaaa

SEQ ID NO: 77213 - RNA, 20 nt, Artificial Sequence
  Synthetic
cuaccuuuuuccucgguaaa

SEQ ID NO: 77214 - RNA, 21 nt, Artificial Sequence
  Synthetic
ccuaccuuuuuccucgguaaa

SEQ ID NO: 77215 - RNA, 22 nt, Artificial Sequence
  Synthetic
accuaccuuuuuccucgguaaa

SEQ ID NO: 77216 - RNA, 23 nt, Artificial Sequence
  Synthetic
aaccuaccuuuuuccucgguaaa

SEQ ID NO: 77217 - RNA, 24 nt, Artificial Sequence
  Synthetic
aaaccuaccuuuuuccucgguaaa

SEQ ID NO: 77218 - RNA, 18 nt, Artificial Sequence
  Synthetic
cuucaaacuuaugguaaa

SEQ ID NO: 77219 - RNA, 19 nt, Artificial Sequence
  Synthetic
acuucaaacuuaugguaaa

SEQ ID NO: 77220 - RNA, 20 nt, Artificial Sequence
  Synthetic
cacuucaaacuuaugguaaa

SEQ ID NO: 77221 - RNA, 21 nt, Artificial Sequence
  Synthetic
ucacuucaaacuuaugguaaa

SEQ ID NO: 77222 - RNA, 22 nt, Artificial Sequence
  Synthetic
uucacuucaaacuuaugguaaa

SEQ ID NO: 77223 - RNA, 23 nt, Artificial Sequence
  Synthetic
uuucacuucaaacuuaugguaaa

SEQ ID NO: 77224 - RNA, 24 nt, Artificial Sequence
  Synthetic
uuuucacuucaaacuuaugguaaa

SEQ ID NO: 77225 - RNA, 21 nt, Artificial Sequence
  Synthetic
auauuuccuuuccuauguaaa

SEQ ID NO: 77226 - RNA, 22 nt, Artificial Sequence
  Synthetic
cauauuuccuuuccuauguaaa

SEQ ID NO: 77227 - RNA, 23 nt, Artificial Sequence
  Synthetic
acauauuuccuuuccuauguaaa

SEQ ID NO: 77228 - RNA, 24 nt, Artificial Sequence
  Synthetic
cacauauuuccuuuccuauguaaa

SEQ ID NO: 77229 - RNA, 20 nt, Artificial Sequence
  Synthetic
aggcaggcaaguauuguaaa

SEQ ID NO: 77230 - RNA, 21 nt, Artificial Sequence
  Synthetic
caggcaggcaaguauuguaaa

SEQ ID NO: 77231 - RNA, 22 nt, Artificial Sequence
  Synthetic
ccaggcaggcaaguauuguaaa

SEQ ID NO: 77232 - RNA, 23 nt, Artificial Sequence
  Synthetic
uccaggcaggcaaguauuguaaa

SEQ ID NO: 77233 - RNA, 24 nt, Artificial Sequence
  Synthetic
cuccaggcaggcaaguauuguaaa

SEQ ID NO: 77234 - RNA, 21 nt, Artificial Sequence
  Synthetic
ccaagaaaggaaauuuguaaa

SEQ ID NO: 77235 - RNA, 22 nt, Artificial Sequence
  Synthetic
uccaagaaaggaaauuuguaaa

SEQ ID NO: 77236 - RNA, 23 nt, Artificial Sequence
  Synthetic
auccaagaaaggaaauuuguaaa

SEQ ID NO: 77237 - RNA, 21 nt, Artificial Sequence
  Synthetic
uuuagaguaugcuuuuguaaa

SEQ ID NO: 77238 - RNA, 22 nt, Artificial Sequence
  Synthetic
auuuagaguaugcuuuuguaaa

SEQ ID NO: 77239 - RNA, 23 nt, Artificial Sequence
  Synthetic
aauuuagaguaugcuuuuguaaa

SEQ ID NO: 77240 - RNA, 18 nt, Artificial Sequence
  Synthetic
ccuaaguauaaaauuaaa

SEQ ID NO: 77241 - RNA, 19 nt, Artificial Sequence
  Synthetic
cccuaaguauaaaauuaaa

SEQ ID NO: 77242 - RNA, 20 nt, Artificial Sequence
  Synthetic
acccuaaguauaaaauuaaa

SEQ ID NO: 77243 - RNA, 21 nt, Artificial Sequence
  Synthetic
aacccuaaguauaaaauuaaa

SEQ ID NO: 77244 - RNA, 22 nt, Artificial Sequence
  Synthetic
caacccuaaguauaaaauuaaa

SEQ ID NO: 77245 - RNA, 23 nt, Artificial Sequence
  Synthetic
ucaacccuaaguauaaaauuaaa

SEQ ID NO: 77246 - RNA, 24 nt, Artificial Sequence
  Synthetic
aucaacccuaaguauaaaauuaaa

SEQ ID NO: 77247 - RNA, 18 nt, Artificial Sequence
  Synthetic
auauucugguaaauuaaa

SEQ ID NO: 77248 - RNA, 19 nt, Artificial Sequence
  Synthetic
cauauucugguaaauuaaa

SEQ ID NO: 77249 - RNA, 20 nt, Artificial Sequence
  Synthetic
ccauauucugguaaauuaaa

SEQ ID NO: 77250 - RNA, 21 nt, Artificial Sequence
  Synthetic
uccauauucugguaaauuaaa

SEQ ID NO: 77251 - RNA, 22 nt, Artificial Sequence
  Synthetic
uuccauauucugguaaauuaaa

SEQ ID NO: 77252 - RNA, 19 nt, Artificial Sequence
  Synthetic
agacaaauacucaauuaaa

SEQ ID NO: 77253 - RNA, 20 nt, Artificial Sequence
  Synthetic
aagacaaauacucaauuaaa

SEQ ID NO: 77254 - RNA, 21 nt, Artificial Sequence
  Synthetic
aaagacaaauacucaauuaaa

SEQ ID NO: 77255 - RNA, 22 nt, Artificial Sequence
  Synthetic
aaaagacaaauacucaauuaaa

SEQ ID NO: 77256 - RNA, 23 nt, Artificial Sequence
  Synthetic
aaaaagacaaauacucaauuaaa

SEQ ID NO: 77257 - RNA, 24 nt, Artificial Sequence
  Synthetic
aaaaaagacaaauacucaauuaaa

SEQ ID NO: 77258 - RNA, 18 nt, Artificial Sequence
  Synthetic
uuauuugaucacauuaaa

SEQ ID NO: 77259 - RNA, 19 nt, Artificial Sequence
  Synthetic
auuauuugaucacauuaaa

SEQ ID NO: 77260 - RNA, 20 nt, Artificial Sequence
  Synthetic
uauuauuugaucacauuaaa

SEQ ID NO: 77261 - RNA, 21 nt, Artificial Sequence
  Synthetic
auauuauuugaucacauuaaa

SEQ ID NO: 77262 - RNA, 23 nt, Artificial Sequence
  Synthetic
ugauauuauuugaucacauuaaa

SEQ ID NO: 77263 - RNA, 21 nt, Artificial Sequence
  Synthetic
augcuaugaagaaagauuaaa

SEQ ID NO: 77264 - RNA, 22 nt, Artificial Sequence
  Synthetic
uaugcuaugaagaaagauuaaa

SEQ ID NO: 77265 - RNA, 24 nt, Artificial Sequence
  Synthetic
uguaugcuaugaagaaagauuaaa

SEQ ID NO: 77266 - RNA, 18 nt, Artificial Sequence
  Synthetic
ucaugaugcuuuauuaaa

SEQ ID NO: 77267 - RNA, 19 nt, Artificial Sequence
  Synthetic
cucaugaugcuuuauuaaa

SEQ ID NO: 77268 - RNA, 20 nt, Artificial Sequence
  Synthetic
acucaugaugcuuuauuaaa

SEQ ID NO: 77269 - RNA, 21 nt, Artificial Sequence
  Synthetic
aacucaugaugcuuuauuaaa

SEQ ID NO: 77270 - RNA, 22 nt, Artificial Sequence
  Synthetic
aaacucaugaugcuuuauuaaa

SEQ ID NO: 77271 - RNA, 23 nt, Artificial Sequence
  Synthetic
aaaacucaugaugcuuuauuaaa

SEQ ID NO: 77272 - RNA, 24 nt, Artificial Sequence
  Synthetic
aaaaacucaugaugcuuuauuaaa

SEQ ID NO: 77273 - RNA, 18 nt, Artificial Sequence
  Synthetic
uccaaaaaaagacuuaaa

SEQ ID NO: 77274 - RNA, 19 nt, Artificial Sequence
  Synthetic
cuccaaaaaaagacuuaaa

SEQ ID NO: 77275 - RNA, 20 nt, Artificial Sequence
  Synthetic
ccuccaaaaaaagacuuaaa

SEQ ID NO: 77276 - RNA, 21 nt, Artificial Sequence
  Synthetic
accuccaaaaaaagacuuaaa

SEQ ID NO: 77277 - RNA, 22 nt, Artificial Sequence
  Synthetic
aaccuccaaaaaaagacuuaaa

SEQ ID NO: 77278 - RNA, 23 nt, Artificial Sequence
  Synthetic
caaccuccaaaaaaagacuuaaa

SEQ ID NO: 77279 - RNA, 21 nt, Artificial Sequence
  Synthetic
uugugaauuauaagccuuaaa

SEQ ID NO: 77280 - RNA, 22 nt, Artificial Sequence
  Synthetic
cuugugaauuauaagccuuaaa

SEQ ID NO: 77281 - RNA, 23 nt, Artificial Sequence
  Synthetic
acuugugaauuauaagccuuaaa

SEQ ID NO: 77282 - RNA, 24 nt, Artificial Sequence
  Synthetic
uacuugugaauuauaagccuuaaa

SEQ ID NO: 77283 - RNA, 21 nt, Artificial Sequence
  Synthetic
uuguaacauuuauagcuuaaa

SEQ ID NO: 77284 - RNA, 22 nt, Artificial Sequence
  Synthetic
auuguaacauuuauagcuuaaa

SEQ ID NO: 77285 - RNA, 23 nt, Artificial Sequence
  Synthetic
aauuguaacauuuauagcuuaaa

SEQ ID NO: 77286 - RNA, 24 nt, Artificial Sequence
  Synthetic
aaauuguaacauuuauagcuuaaa

SEQ ID NO: 77287 - RNA, 21 nt, Artificial Sequence
  Synthetic
aaaagaucuagaaaucuuaaa

SEQ ID NO: 77288 - RNA, 22 nt, Artificial Sequence
  Synthetic
aaaaagaucuagaaaucuuaaa

SEQ ID NO: 77289 - RNA, 23 nt, Artificial Sequence
  Synthetic
caaaaagaucuagaaaucuuaaa

SEQ ID NO: 77290 - RNA, 18 nt, Artificial Sequence
  Synthetic
uuguauuuuaaaguuaaa

SEQ ID NO: 77291 - RNA, 19 nt, Artificial Sequence
  Synthetic
cuuguauuuuaaaguuaaa

SEQ ID NO: 77292 - RNA, 20 nt, Artificial Sequence
  Synthetic
ccuuguauuuuaaaguuaaa

SEQ ID NO: 77293 - RNA, 21 nt, Artificial Sequence
  Synthetic
accuuguauuuuaaaguuaaa

SEQ ID NO: 77294 - RNA, 23 nt, Artificial Sequence
  Synthetic
ugaccuuguauuuuaaaguuaaa

SEQ ID NO: 77295 - RNA, 24 nt, Artificial Sequence
  Synthetic
uugaccuuguauuuuaaaguuaaa

SEQ ID NO: 77296 - RNA, 19 nt, Artificial Sequence
  Synthetic
agaagaaggucagguuaaa

SEQ ID NO: 77297 - RNA, 20 nt, Artificial Sequence
  Synthetic
aagaagaaggucagguuaaa

SEQ ID NO: 77298 - RNA, 22 nt, Artificial Sequence
  Synthetic
ugaagaagaaggucagguuaaa

SEQ ID NO: 77299 - RNA, 24 nt, Artificial Sequence
  Synthetic
agugaagaagaaggucagguuaaa

SEQ ID NO: 77300 - RNA, 18 nt, Artificial Sequence
  Synthetic
aacauuuucucuguuaaa

SEQ ID NO: 77301 - RNA, 19 nt, Artificial Sequence
  Synthetic
caacauuuucucuguuaaa

SEQ ID NO: 77302 - RNA, 20 nt, Artificial Sequence
  Synthetic
ucaacauuuucucuguuaaa

SEQ ID NO: 77303 - RNA, 21 nt, Artificial Sequence
  Synthetic
cucaacauuuucucuguuaaa

SEQ ID NO: 77304 - RNA, 22 nt, Artificial Sequence
  Synthetic
acucaacauuuucucuguuaaa

SEQ ID NO: 77305 - RNA, 23 nt, Artificial Sequence
  Synthetic
uacucaacauuuucucuguuaaa

SEQ ID NO: 77306 - RNA, 21 nt, Artificial Sequence
  Synthetic
uauuuguauauauguguuaaa

SEQ ID NO: 77307 - RNA, 23 nt, Artificial Sequence
  Synthetic
uguauuuguauauauguguuaaa

SEQ ID NO: 77308 - RNA, 24 nt, Artificial Sequence
  Synthetic
auguauuuguauauauguguuaaa

SEQ ID NO: 77309 - RNA, 22 nt, Artificial Sequence
  Synthetic
agcuuuccuuuuaaaauuuaaa

SEQ ID NO: 77310 - RNA, 23 nt, Artificial Sequence
  Synthetic
uagcuuuccuuuuaaaauuuaaa

SEQ ID NO: 77311 - RNA, 24 nt, Artificial Sequence
  Synthetic
auagcuuuccuuuuaaaauuuaaa

SEQ ID NO: 77312 - RNA, 18 nt, Artificial Sequence
  Synthetic
uuccacaaggcauuuaaa

SEQ ID NO: 77313 - RNA, 19 nt, Artificial Sequence
  Synthetic
cuuccacaaggcauuuaaa

SEQ ID NO: 77314 - RNA, 20 nt, Artificial Sequence
  Synthetic
acuuccacaaggcauuuaaa

SEQ ID NO: 77315 - RNA, 21 nt, Artificial Sequence
  Synthetic
uacuuccacaaggcauuuaaa

SEQ ID NO: 77316 - RNA, 22 nt, Artificial Sequence
  Synthetic
cuacuuccacaaggcauuuaaa

SEQ ID NO: 77317 - RNA, 23 nt, Artificial Sequence
  Synthetic
ucuacuuccacaaggcauuuaaa

SEQ ID NO: 77318 - RNA, 24 nt, Artificial Sequence
  Synthetic
uucuacuuccacaaggcauuuaaa

SEQ ID NO: 77319 - RNA, 19 nt, Artificial Sequence
  Synthetic
ugcaauuuuucccuuuaaa

SEQ ID NO: 77320 - RNA, 20 nt, Artificial Sequence
  Synthetic
uugcaauuuuucccuuuaaa

SEQ ID NO: 77321 - RNA, 23 nt, Artificial Sequence
  Synthetic
agguugcaauuuuucccuuuaaa

SEQ ID NO: 77322 - RNA, 24 nt, Artificial Sequence
  Synthetic
aagguugcaauuuuucccuuuaaa

SEQ ID NO: 77323 - RNA, 18 nt, Artificial Sequence
  Synthetic
aaugcaacaacguuuaaa

SEQ ID NO: 77324 - RNA, 19 nt, Artificial Sequence
  Synthetic
aaaugcaacaacguuuaaa

SEQ ID NO: 77325 - RNA, 20 nt, Artificial Sequence
  Synthetic
caaaugcaacaacguuuaaa

SEQ ID NO: 77326 - RNA, 21 nt, Artificial Sequence
  Synthetic
acaaaugcaacaacguuuaaa

SEQ ID NO: 77327 - RNA, 23 nt, Artificial Sequence
  Synthetic
agacaaaugcaacaacguuuaaa

SEQ ID NO: 77328 - RNA, 24 nt, Artificial Sequence
  Synthetic
cagacaaaugcaacaacguuuaaa

SEQ ID NO: 77329 - RNA, 18 nt, Artificial Sequence
  Synthetic
cuugggauaggguuuaaa

SEQ ID NO: 77330 - RNA, 19 nt, Artificial Sequence
  Synthetic
ucuugggauaggguuuaaa

SEQ ID NO: 77331 - RNA, 20 nt, Artificial Sequence
  Synthetic
aucuugggauaggguuuaaa

SEQ ID NO: 77332 - RNA, 21 nt, Artificial Sequence
  Synthetic
uaucuugggauaggguuuaaa

SEQ ID NO: 77333 - RNA, 23 nt, Artificial Sequence
  Synthetic
aguaucuugggauaggguuuaaa

SEQ ID NO: 77334 - RNA, 24 nt, Artificial Sequence
  Synthetic
caguaucuugggauaggguuuaaa

SEQ ID NO: 77335 - RNA, 18 nt, Artificial Sequence
  Synthetic
uuacccccuuuguuuaaa

SEQ ID NO: 77336 - RNA, 19 nt, Artificial Sequence
  Synthetic
uuuacccccuuuguuuaaa

SEQ ID NO: 77337 - RNA, 20 nt, Artificial Sequence
  Synthetic
auuuacccccuuuguuuaaa

SEQ ID NO: 77338 - RNA, 21 nt, Artificial Sequence
  Synthetic
aauuuacccccuuuguuuaaa

SEQ ID NO: 77339 - RNA, 22 nt, Artificial Sequence
  Synthetic
caauuuacccccuuuguuuaaa

SEQ ID NO: 77340 - RNA, 23 nt, Artificial Sequence
  Synthetic
acaauuuacccccuuuguuuaaa

SEQ ID NO: 77341 - RNA, 24 nt, Artificial Sequence
  Synthetic
aacaauuuacccccuuuguuuaaa

SEQ ID NO: 77342 - RNA, 18 nt, Artificial Sequence
  Synthetic
ucaacaugcaauuuuaaa

SEQ ID NO: 77343 - RNA, 19 nt, Artificial Sequence
  Synthetic
uucaacaugcaauuuuaaa

SEQ ID NO: 77344 - RNA, 20 nt, Artificial Sequence
  Synthetic
uuucaacaugcaauuuuaaa

SEQ ID NO: 77345 - RNA, 21 nt, Artificial Sequence
  Synthetic
auuucaacaugcaauuuuaaa

SEQ ID NO: 77346 - RNA, 22 nt, Artificial Sequence
  Synthetic
uauuucaacaugcaauuuuaaa

SEQ ID NO: 77347 - RNA, 23 nt, Artificial Sequence
  Synthetic
uuauuucaacaugcaauuuuaaa

SEQ ID NO: 77348 - RNA, 24 nt, Artificial Sequence
  Synthetic
uuuauuucaacaugcaauuuuaaa

SEQ ID NO: 77349 - RNA, 21 nt, Artificial Sequence
  Synthetic
aagguacuggagcauuuuaaa

SEQ ID NO: 77350 - RNA, 22 nt, Artificial Sequence
  Synthetic
uaagguacuggagcauuuuaaa

SEQ ID NO: 77351 - RNA, 21 nt, Artificial Sequence
  Synthetic
aaaaagccauuuuauuuuaaa

SEQ ID NO: 77352 - RNA, 23 nt, Artificial Sequence
  Synthetic
ugaaaaagccauuuuauuuuaaa

SEQ ID NO: 77353 - RNA, 24 nt, Artificial Sequence
  Synthetic
augaaaaagccauuuuauuuuaaa

SEQ ID NO: 77354 - RNA, 18 nt, Artificial Sequence
  Synthetic
ucgcugaaaauuuuuaaa

SEQ ID NO: 77355 - RNA, 19 nt, Artificial Sequence
  Synthetic
cucgcugaaaauuuuuaaa

SEQ ID NO: 77356 - RNA, 20 nt, Artificial Sequence
  Synthetic
ucucgcugaaaauuuuuaaa

SEQ ID NO: 77357 - RNA, 21 nt, Artificial Sequence
  Synthetic
uucucgcugaaaauuuuuaaa

SEQ ID NO: 77358 - RNA, 22 nt, Artificial Sequence
  Synthetic
auucucgcugaaaauuuuuaaa

SEQ ID NO: 77359 - RNA, 23 nt, Artificial Sequence
  Synthetic
aauucucgcugaaaauuuuuaaa

SEQ ID NO: 77360 - RNA, 24 nt, Artificial Sequence
  Synthetic
caauucucgcugaaaauuuuuaaa

SEQ ID NO: 77361 - RNA, 21 nt, Artificial Sequence
  Synthetic
auguuuaaauaucuuuuuaaa

SEQ ID NO: 77362 - RNA, 22 nt, Artificial Sequence
  Synthetic
aauguuuaaauaucuuuuuaaa

SEQ ID NO: 77363 - RNA, 23 nt, Artificial Sequence
  Synthetic
aaauguuuaaauaucuuuuuaaa

SEQ ID NO: 77364 - RNA, 24 nt, Artificial Sequence
  Synthetic
caaauguuuaaauaucuuuuuaaa

SEQ ID NO: 77365 - RNA, 21 nt, Artificial Sequence
  Synthetic
cuguucucaaagagaaaacaa

SEQ ID NO: 77366 - RNA, 22 nt, Artificial Sequence
  Synthetic
ccuguucucaaagagaaaacaa

SEQ ID NO: 77367 - RNA, 23 nt, Artificial Sequence
  Synthetic
uccuguucucaaagagaaaacaa

SEQ ID NO: 77368 - RNA, 24 nt, Artificial Sequence
  Synthetic
uuccuguucucaaagagaaaacaa

SEQ ID NO: 77369 - RNA, 18 nt, Artificial Sequence
  Synthetic
uaagaacuuggaaaacaa

SEQ ID NO: 77370 - RNA, 19 nt, Artificial Sequence
  Synthetic
auaagaacuuggaaaacaa

SEQ ID NO: 77371 - RNA, 21 nt, Artificial Sequence
  Synthetic
ugauaagaacuuggaaaacaa

SEQ ID NO: 77372 - RNA, 22 nt, Artificial Sequence
  Synthetic
augauaagaacuuggaaaacaa

SEQ ID NO: 77373 - RNA, 23 nt, Artificial Sequence
  Synthetic
uaugauaagaacuuggaaaacaa

SEQ ID NO: 77374 - RNA, 24 nt, Artificial Sequence
  Synthetic
uuaugauaagaacuuggaaaacaa

SEQ ID NO: 77375 - RNA, 18 nt, Artificial Sequence
  Synthetic
cuguucaaaugaaaacaa

SEQ ID NO: 77376 - RNA, 19 nt, Artificial Sequence
  Synthetic
acuguucaaaugaaaacaa

SEQ ID NO: 77377 - RNA, 21 nt, Artificial Sequence
  Synthetic
ugacuguucaaaugaaaacaa

SEQ ID NO: 77378 - RNA, 22 nt, Artificial Sequence
  Synthetic
augacuguucaaaugaaaacaa

SEQ ID NO: 77379 - RNA, 23 nt, Artificial Sequence
  Synthetic
aaugacuguucaaaugaaaacaa

SEQ ID NO: 77380 - RNA, 24 nt, Artificial Sequence
  Synthetic
aaaugacuguucaaaugaaaacaa

SEQ ID NO: 77381 - RNA, 18 nt, Artificial Sequence
  Synthetic
uaaauccaaauaaaacaa

SEQ ID NO: 77382 - RNA, 19 nt, Artificial Sequence
  Synthetic
cuaaauccaaauaaaacaa

SEQ ID NO: 77383 - RNA, 20 nt, Artificial Sequence
  Synthetic
ccuaaauccaaauaaaacaa

SEQ ID NO: 77384 - RNA, 21 nt, Artificial Sequence
  Synthetic
uccuaaauccaaauaaaacaa

SEQ ID NO: 77385 - RNA, 22 nt, Artificial Sequence
  Synthetic
uuccuaaauccaaauaaaacaa

SEQ ID NO: 77386 - RNA, 23 nt, Artificial Sequence
  Synthetic
uuuccuaaauccaaauaaaacaa

SEQ ID NO: 77387 - RNA, 24 nt, Artificial Sequence
  Synthetic
cuuuccuaaauccaaauaaaacaa

SEQ ID NO: 77388 - RNA, 18 nt, Artificial Sequence
  Synthetic
acaaggugaguaaaacaa

SEQ ID NO: 77389 - RNA, 19 nt, Artificial Sequence
  Synthetic
aacaaggugaguaaaacaa

SEQ ID NO: 77390 - RNA, 20 nt, Artificial Sequence
  Synthetic
uaacaaggugaguaaaacaa

SEQ ID NO: 77391 - RNA, 21 nt, Artificial Sequence
  Synthetic
auaacaaggugaguaaaacaa

SEQ ID NO: 77392 - RNA, 22 nt, Artificial Sequence
  Synthetic
uauaacaaggugaguaaaacaa

SEQ ID NO: 77393 - RNA, 23 nt, Artificial Sequence
  Synthetic
cuauaacaaggugaguaaaacaa

SEQ ID NO: 77394 - RNA, 24 nt, Artificial Sequence
  Synthetic
acuauaacaaggugaguaaaacaa

SEQ ID NO: 77395 - RNA, 18 nt, Artificial Sequence
  Synthetic
uugcuaugccccaaacaa

SEQ ID NO: 77396 - RNA, 19 nt, Artificial Sequence
  Synthetic
auugcuaugccccaaacaa

SEQ ID NO: 77397 - RNA, 20 nt, Artificial Sequence
  Synthetic
aauugcuaugccccaaacaa

SEQ ID NO: 77398 - RNA, 21 nt, Artificial Sequence
  Synthetic
uaauugcuaugccccaaacaa

SEQ ID NO: 77399 - RNA, 22 nt, Artificial Sequence
  Synthetic
uuaauugcuaugccccaaacaa

SEQ ID NO: 77400 - RNA, 23 nt, Artificial Sequence
  Synthetic
auuaauugcuaugccccaaacaa

SEQ ID NO: 77401 - RNA, 24 nt, Artificial Sequence
  Synthetic
cauuaauugcuaugccccaaacaa

SEQ ID NO: 77402 - RNA, 18 nt, Artificial Sequence
  Synthetic
uucugaagcuccaaacaa

SEQ ID NO: 77403 - RNA, 19 nt, Artificial Sequence
  Synthetic
auucugaagcuccaaacaa

SEQ ID NO: 77404 - RNA, 20 nt, Artificial Sequence
  Synthetic
cauucugaagcuccaaacaa

SEQ ID NO: 77405 - RNA, 21 nt, Artificial Sequence
  Synthetic
ucauucugaagcuccaaacaa

SEQ ID NO: 77406 - RNA, 22 nt, Artificial Sequence
  Synthetic
uucauucugaagcuccaaacaa

SEQ ID NO: 77407 - RNA, 23 nt, Artificial Sequence
  Synthetic
auucauucugaagcuccaaacaa

SEQ ID NO: 77408 - RNA, 24 nt, Artificial Sequence
  Synthetic
aauucauucugaagcuccaaacaa

SEQ ID NO: 77409 - RNA, 18 nt, Artificial Sequence
  Synthetic
ccacgcugucauaaacaa

SEQ ID NO: 77410 - RNA, 19 nt, Artificial Sequence
  Synthetic
uccacgcugucauaaacaa

SEQ ID NO: 77411 - RNA, 20 nt, Artificial Sequence
  Synthetic
auccacgcugucauaaacaa

SEQ ID NO: 77412 - RNA, 18 nt, Artificial Sequence
  Synthetic
aucaaaaacaguaaacaa

SEQ ID NO: 77413 - RNA, 19 nt, Artificial Sequence
  Synthetic
aaucaaaaacaguaaacaa

SEQ ID NO: 77414 - RNA, 20 nt, Artificial Sequence
  Synthetic
uaaucaaaaacaguaaacaa

SEQ ID NO: 77415 - RNA, 21 nt, Artificial Sequence
  Synthetic
uuaaucaaaaacaguaaacaa

SEQ ID NO: 77416 - RNA, 22 nt, Artificial Sequence
  Synthetic
auuaaucaaaaacaguaaacaa

SEQ ID NO: 77417 - RNA, 23 nt, Artificial Sequence
  Synthetic
aauuaaucaaaaacaguaaacaa

SEQ ID NO: 77418 - RNA, 24 nt, Artificial Sequence
  Synthetic
aaauuaaucaaaaacaguaaacaa

SEQ ID NO: 77419 - RNA, 19 nt, Artificial Sequence
  Synthetic
agaaaauauugaacaacaa

SEQ ID NO: 77420 - RNA, 20 nt, Artificial Sequence
  Synthetic
cagaaaauauugaacaacaa

SEQ ID NO: 77421 - RNA, 21 nt, Artificial Sequence
  Synthetic
acagaaaauauugaacaacaa

SEQ ID NO: 77422 - RNA, 22 nt, Artificial Sequence
  Synthetic
uacagaaaauauugaacaacaa

SEQ ID NO: 77423 - RNA, 23 nt, Artificial Sequence
  Synthetic
auacagaaaauauugaacaacaa

SEQ ID NO: 77424 - RNA, 24 nt, Artificial Sequence
  Synthetic
cauacagaaaauauugaacaacaa

SEQ ID NO: 77425 - RNA, 18 nt, Artificial Sequence
  Synthetic
auuguaauauaccaacaa

SEQ ID NO: 77426 - RNA, 19 nt, Artificial Sequence
  Synthetic
aauuguaauauaccaacaa

SEQ ID NO: 77427 - RNA, 20 nt, Artificial Sequence
  Synthetic
aaauuguaauauaccaacaa

SEQ ID NO: 77428 - RNA, 21 nt, Artificial Sequence
  Synthetic
uaaauuguaauauaccaacaa

SEQ ID NO: 77429 - RNA, 22 nt, Artificial Sequence
  Synthetic
cuaaauuguaauauaccaacaa

SEQ ID NO: 77430 - RNA, 23 nt, Artificial Sequence
  Synthetic
acuaaauuguaauauaccaacaa

SEQ ID NO: 77431 - RNA, 24 nt, Artificial Sequence
  Synthetic
aacuaaauuguaauauaccaacaa

SEQ ID NO: 77432 - RNA, 18 nt, Artificial Sequence
  Synthetic
uuguagucuuugcaacaa

SEQ ID NO: 77433 - RNA, 19 nt, Artificial Sequence
  Synthetic
cuuguagucuuugcaacaa

SEQ ID NO: 77434 - RNA, 20 nt, Artificial Sequence
  Synthetic
acuuguagucuuugcaacaa

SEQ ID NO: 77435 - RNA, 21 nt, Artificial Sequence
  Synthetic
aacuuguagucuuugcaacaa

SEQ ID NO: 77436 - RNA, 22 nt, Artificial Sequence
  Synthetic
uaacuuguagucuuugcaacaa

SEQ ID NO: 77437 - RNA, 23 nt, Artificial Sequence
  Synthetic
uuaacuuguagucuuugcaacaa

SEQ ID NO: 77438 - RNA, 24 nt, Artificial Sequence
  Synthetic
auuaacuuguagucuuugcaacaa

SEQ ID NO: 77439 - RNA, 18 nt, Artificial Sequence
  Synthetic
aaauuggcuucucaacaa

SEQ ID NO: 77440 - RNA, 20 nt, Artificial Sequence
  Synthetic
cgaaauuggcuucucaacaa

SEQ ID NO: 77441 - RNA, 21 nt, Artificial Sequence
  Synthetic
acgaaauuggcuucucaacaa

SEQ ID NO: 77442 - RNA, 23 nt, Artificial Sequence
  Synthetic
ugacgaaauuggcuucucaacaa

SEQ ID NO: 77443 - RNA, 24 nt, Artificial Sequence
  Synthetic
augacgaaauuggcuucucaacaa

SEQ ID NO: 77444 - RNA, 19 nt, Artificial Sequence
  Synthetic
ugauaggaauggucaacaa

SEQ ID NO: 77445 - RNA, 20 nt, Artificial Sequence
  Synthetic
cugauaggaauggucaacaa

SEQ ID NO: 77446 - RNA, 21 nt, Artificial Sequence
  Synthetic
acugauaggaauggucaacaa

SEQ ID NO: 77447 - RNA, 22 nt, Artificial Sequence
  Synthetic
cacugauaggaauggucaacaa

SEQ ID NO: 77448 - RNA, 24 nt, Artificial Sequence
  Synthetic
agcacugauaggaauggucaacaa

SEQ ID NO: 77449 - RNA, 21 nt, Artificial Sequence
  Synthetic
uagagcacauucagagaacaa

SEQ ID NO: 77450 - RNA, 22 nt, Artificial Sequence
  Synthetic
cuagagcacauucagagaacaa

SEQ ID NO: 77451 - RNA, 23 nt, Artificial Sequence
  Synthetic
ccuagagcacauucagagaacaa

SEQ ID NO: 77452 - RNA, 19 nt, Artificial Sequence
  Synthetic
aggauauccuuuagaacaa

SEQ ID NO: 77453 - RNA, 20 nt, Artificial Sequence
  Synthetic
uaggauauccuuuagaacaa

SEQ ID NO: 77454 - RNA, 21 nt, Artificial Sequence
  Synthetic
uuaggauauccuuuagaacaa

SEQ ID NO: 77455 - RNA, 22 nt, Artificial Sequence
  Synthetic
uuuaggauauccuuuagaacaa

SEQ ID NO: 77456 - RNA, 23 nt, Artificial Sequence
  Synthetic
auuuaggauauccuuuagaacaa

SEQ ID NO: 77457 - RNA, 24 nt, Artificial Sequence
  Synthetic
cauuuaggauauccuuuagaacaa

SEQ ID NO: 77458 - RNA, 18 nt, Artificial Sequence
  Synthetic
acacuuagcaaugaacaa

SEQ ID NO: 77459 - RNA, 19 nt, Artificial Sequence
  Synthetic
uacacuuagcaaugaacaa

SEQ ID NO: 77460 - RNA, 20 nt, Artificial Sequence
  Synthetic
auacacuuagcaaugaacaa

SEQ ID NO: 77461 - RNA, 21 nt, Artificial Sequence
  Synthetic
aauacacuuagcaaugaacaa

SEQ ID NO: 77462 - RNA, 22 nt, Artificial Sequence
  Synthetic
aaauacacuuagcaaugaacaa

SEQ ID NO: 77463 - RNA, 24 nt, Artificial Sequence
  Synthetic
ugaaauacacuuagcaaugaacaa

SEQ ID NO: 77464 - RNA, 19 nt, Artificial Sequence
  Synthetic
uggcuaggaugaugaacaa

SEQ ID NO: 77465 - RNA, 20 nt, Artificial Sequence
  Synthetic
auggcuaggaugaugaacaa

SEQ ID NO: 77466 - RNA, 21 nt, Artificial Sequence
  Synthetic
uauggcuaggaugaugaacaa

SEQ ID NO: 77467 - RNA, 22 nt, Artificial Sequence
  Synthetic
uuauggcuaggaugaugaacaa

SEQ ID NO: 77468 - RNA, 24 nt, Artificial Sequence
  Synthetic
uguuauggcuaggaugaugaacaa

SEQ ID NO: 77469 - RNA, 18 nt, Artificial Sequence
  Synthetic
aauuuuuaaagugaacaa

SEQ ID NO: 77470 - RNA, 19 nt, Artificial Sequence
  Synthetic
caauuuuuaaagugaacaa

SEQ ID NO: 77471 - RNA, 20 nt, Artificial Sequence
  Synthetic
ccaauuuuuaaagugaacaa

SEQ ID NO: 77472 - RNA, 21 nt, Artificial Sequence
  Synthetic
cccaauuuuuaaagugaacaa

SEQ ID NO: 77473 - RNA, 22 nt, Artificial Sequence
  Synthetic
acccaauuuuuaaagugaacaa

SEQ ID NO: 77474 - RNA, 23 nt, Artificial Sequence
  Synthetic
aacccaauuuuuaaagugaacaa

SEQ ID NO: 77475 - RNA, 24 nt, Artificial Sequence
  Synthetic
caacccaauuuuuaaagugaacaa

SEQ ID NO: 77476 - RNA, 18 nt, Artificial Sequence
  Synthetic
agucaucaaugugaacaa

SEQ ID NO: 77477 - RNA, 19 nt, Artificial Sequence
  Synthetic
aagucaucaaugugaacaa

SEQ ID NO: 77478 - RNA, 20 nt, Artificial Sequence
  Synthetic
caagucaucaaugugaacaa

SEQ ID NO: 77479 - RNA, 22 nt, Artificial Sequence
  Synthetic
ugcaagucaucaaugugaacaa

SEQ ID NO: 77480 - RNA, 23 nt, Artificial Sequence
  Synthetic
augcaagucaucaaugugaacaa

SEQ ID NO: 77481 - RNA, 24 nt, Artificial Sequence
  Synthetic
caugcaagucaucaaugugaacaa

SEQ ID NO: 77482 - RNA, 18 nt, Artificial Sequence
  Synthetic
aagaguacaguugaacaa

SEQ ID NO: 77483 - RNA, 19 nt, Artificial Sequence
  Synthetic
aaagaguacaguugaacaa

SEQ ID NO: 77484 - RNA, 21 nt, Artificial Sequence
  Synthetic
agaaagaguacaguugaacaa

SEQ ID NO: 77485 - RNA, 22 nt, Artificial Sequence
  Synthetic
aagaaagaguacaguugaacaa

SEQ ID NO: 77486 - RNA, 23 nt, Artificial Sequence
  Synthetic
aaagaaagaguacaguugaacaa

SEQ ID NO: 77487 - RNA, 19 nt, Artificial Sequence
  Synthetic
agauugaagcuuugaacaa

SEQ ID NO: 77488 - RNA, 20 nt, Artificial Sequence
  Synthetic
aagauugaagcuuugaacaa

SEQ ID NO: 77489 - RNA, 21 nt, Artificial Sequence
  Synthetic
caagauugaagcuuugaacaa

SEQ ID NO: 77490 - RNA, 22 nt, Artificial Sequence
  Synthetic
acaagauugaagcuuugaacaa

SEQ ID NO: 77491 - RNA, 23 nt, Artificial Sequence
  Synthetic
uacaagauugaagcuuugaacaa

SEQ ID NO: 77492 - RNA, 24 nt, Artificial Sequence
  Synthetic
cuacaagauugaagcuuugaacaa

SEQ ID NO: 77493 - RNA, 18 nt, Artificial Sequence
  Synthetic
acaauuuucugauaacaa

SEQ ID NO: 77494 - RNA, 20 nt, Artificial Sequence
  Synthetic
agacaauuuucugauaacaa

SEQ ID NO: 77495 - RNA, 21 nt, Artificial Sequence
  Synthetic
cagacaauuuucugauaacaa

SEQ ID NO: 77496 - RNA, 22 nt, Artificial Sequence
  Synthetic
acagacaauuuucugauaacaa

SEQ ID NO: 77497 - RNA, 23 nt, Artificial Sequence
  Synthetic
aacagacaauuuucugauaacaa

SEQ ID NO: 77498 - RNA, 18 nt, Artificial Sequence
  Synthetic
aguggagaguuauaacaa

SEQ ID NO: 77499 - RNA, 19 nt, Artificial Sequence
  Synthetic
uaguggagaguuauaacaa

SEQ ID NO: 77500 - RNA, 20 nt, Artificial Sequence
  Synthetic
uuaguggagaguuauaacaa

SEQ ID NO: 77501 - RNA, 21 nt, Artificial Sequence
  Synthetic
auuaguggagaguuauaacaa

SEQ ID NO: 77502 - RNA, 22 nt, Artificial Sequence
  Synthetic
uauuaguggagaguuauaacaa

SEQ ID NO: 77503 - RNA, 23 nt, Artificial Sequence
  Synthetic
auauuaguggagaguuauaacaa

SEQ ID NO: 77504 - RNA, 24 nt, Artificial Sequence
  Synthetic
aauauuaguggagaguuauaacaa

SEQ ID NO: 77505 - RNA, 19 nt, Artificial Sequence
  Synthetic
aggaauugucuauuaacaa

SEQ ID NO: 77506 - RNA, 20 nt, Artificial Sequence
  Synthetic
aaggaauugucuauuaacaa

SEQ ID NO: 77507 - RNA, 21 nt, Artificial Sequence
  Synthetic
aaaggaauugucuauuaacaa

SEQ ID NO: 77508 - RNA, 22 nt, Artificial Sequence
  Synthetic
uaaaggaauugucuauuaacaa

SEQ ID NO: 77509 - RNA, 23 nt, Artificial Sequence
  Synthetic
auaaaggaauugucuauuaacaa

SEQ ID NO: 77510 - RNA, 24 nt, Artificial Sequence
  Synthetic
aauaaaggaauugucuauuaacaa

SEQ ID NO: 77511 - RNA, 18 nt, Artificial Sequence
  Synthetic
uuuaauaacuacacacaa

SEQ ID NO: 77512 - RNA, 20 nt, Artificial Sequence
  Synthetic
uguuuaauaacuacacacaa

SEQ ID NO: 77513 - RNA, 21 nt, Artificial Sequence
  Synthetic
uuguuuaauaacuacacacaa

SEQ ID NO: 77514 - RNA, 22 nt, Artificial Sequence
  Synthetic
auuguuuaauaacuacacacaa

SEQ ID NO: 77515 - RNA, 24 nt, Artificial Sequence
  Synthetic
ugauuguuuaauaacuacacacaa

SEQ ID NO: 77516 - RNA, 18 nt, Artificial Sequence
  Synthetic
ugcuaaugggagacacaa

SEQ ID NO: 77517 - RNA, 19 nt, Artificial Sequence
  Synthetic
cugcuaaugggagacacaa

SEQ ID NO: 77518 - RNA, 22 nt, Artificial Sequence
  Synthetic
uggcugcuaaugggagacacaa

SEQ ID NO: 77519 - RNA, 23 nt, Artificial Sequence
  Synthetic
cuggcugcuaaugggagacacaa

SEQ ID NO: 77520 - RNA, 21 nt, Artificial Sequence
  Synthetic
aaaaugugguauaggacacaa

SEQ ID NO: 77521 - RNA, 22 nt, Artificial Sequence
  Synthetic
aaaaaugugguauaggacacaa

SEQ ID NO: 77522 - RNA, 23 nt, Artificial Sequence
  Synthetic
aaaaaaugugguauaggacacaa

SEQ ID NO: 77523 - RNA, 24 nt, Artificial Sequence
  Synthetic
uaaaaaaugugguauaggacacaa

SEQ ID NO: 77524 - RNA, 18 nt, Artificial Sequence
  Synthetic
aaucaaacuuugacacaa

SEQ ID NO: 77525 - RNA, 19 nt, Artificial Sequence
  Synthetic
aaaucaaacuuugacacaa

SEQ ID NO: 77526 - RNA, 20 nt, Artificial Sequence
  Synthetic
uaaaucaaacuuugacacaa

SEQ ID NO: 77527 - RNA, 21 nt, Artificial Sequence
  Synthetic
uuaaaucaaacuuugacacaa

SEQ ID NO: 77528 - RNA, 22 nt, Artificial Sequence
  Synthetic
cuuaaaucaaacuuugacacaa

SEQ ID NO: 77529 - RNA, 23 nt, Artificial Sequence
  Synthetic
acuuaaaucaaacuuugacacaa

SEQ ID NO: 77530 - RNA, 24 nt, Artificial Sequence
  Synthetic
cacuuaaaucaaacuuugacacaa

SEQ ID NO: 77531 - RNA, 18 nt, Artificial Sequence
  Synthetic
ccauuuaagaauacacaa

SEQ ID NO: 77532 - RNA, 20 nt, Artificial Sequence
  Synthetic
agccauuuaagaauacacaa

SEQ ID NO: 77533 - RNA, 21 nt, Artificial Sequence
  Synthetic
aagccauuuaagaauacacaa

SEQ ID NO: 77534 - RNA, 23 nt, Artificial Sequence
  Synthetic
agaagccauuuaagaauacacaa

SEQ ID NO: 77535 - RNA, 24 nt, Artificial Sequence
  Synthetic
uagaagccauuuaagaauacacaa

SEQ ID NO: 77536 - RNA, 18 nt, Artificial Sequence
  Synthetic
cagacugaaacuacacaa

SEQ ID NO: 77537 - RNA, 19 nt, Artificial Sequence
  Synthetic
acagacugaaacuacacaa

SEQ ID NO: 77538 - RNA, 20 nt, Artificial Sequence
  Synthetic
aacagacugaaacuacacaa

SEQ ID NO: 77539 - RNA, 21 nt, Artificial Sequence
  Synthetic
caacagacugaaacuacacaa

SEQ ID NO: 77540 - RNA, 22 nt, Artificial Sequence
  Synthetic
ucaacagacugaaacuacacaa

SEQ ID NO: 77541 - RNA, 23 nt, Artificial Sequence
  Synthetic
aucaacagacugaaacuacacaa

SEQ ID NO: 77542 - RNA, 24 nt, Artificial Sequence
  Synthetic
caucaacagacugaaacuacacaa

SEQ ID NO: 77543 - RNA, 21 nt, Artificial Sequence
  Synthetic
aauaaauuacuacuuacacaa

SEQ ID NO: 77544 - RNA, 23 nt, Artificial Sequence
  Synthetic
ugaauaaauuacuacuuacacaa

SEQ ID NO: 77545 - RNA, 24 nt, Artificial Sequence
  Synthetic
augaauaaauuacuacuuacacaa

SEQ ID NO: 77546 - RNA, 18 nt, Artificial Sequence
  Synthetic
uaugguuucuuuacacaa

SEQ ID NO: 77547 - RNA, 19 nt, Artificial Sequence
  Synthetic
uuaugguuucuuuacacaa

SEQ ID NO: 77548 - RNA, 20 nt, Artificial Sequence
  Synthetic
uuuaugguuucuuuacacaa

SEQ ID NO: 77549 - RNA, 18 nt, Artificial Sequence
  Synthetic
aaaaaucacaaaccacaa

SEQ ID NO: 77550 - RNA, 21 nt, Artificial Sequence
  Synthetic
cggaaaaaucacaaaccacaa

SEQ ID NO: 77551 - RNA, 22 nt, Artificial Sequence
  Synthetic
acggaaaaaucacaaaccacaa

SEQ ID NO: 77552 - RNA, 23 nt, Artificial Sequence
  Synthetic
aacggaaaaaucacaaaccacaa

SEQ ID NO: 77553 - RNA, 24 nt, Artificial Sequence
  Synthetic
uaacggaaaaaucacaaaccacaa

SEQ ID NO: 77554 - RNA, 19 nt, Artificial Sequence
  Synthetic
ugccaucuuugugccacaa

SEQ ID NO: 77555 - RNA, 20 nt, Artificial Sequence
  Synthetic
uugccaucuuugugccacaa

SEQ ID NO: 77556 - RNA, 21 nt, Artificial Sequence
  Synthetic
uuugccaucuuugugccacaa

SEQ ID NO: 77557 - RNA, 22 nt, Artificial Sequence
  Synthetic
auuugccaucuuugugccacaa

SEQ ID NO: 77558 - RNA, 23 nt, Artificial Sequence
  Synthetic
uauuugccaucuuugugccacaa

SEQ ID NO: 77559 - RNA, 24 nt, Artificial Sequence
  Synthetic
auauuugccaucuuugugccacaa

SEQ ID NO: 77560 - RNA, 18 nt, Artificial Sequence
  Synthetic
cuaggauuccacgcacaa

SEQ ID NO: 77561 - RNA, 19 nt, Artificial Sequence
  Synthetic
ccuaggauuccacgcacaa

SEQ ID NO: 77562 - RNA, 20 nt, Artificial Sequence
  Synthetic
accuaggauuccacgcacaa

SEQ ID NO: 77563 - RNA, 21 nt, Artificial Sequence
  Synthetic
aaccuaggauuccacgcacaa

SEQ ID NO: 77564 - RNA, 22 nt, Artificial Sequence
  Synthetic
aaaccuaggauuccacgcacaa

SEQ ID NO: 77565 - RNA, 23 nt, Artificial Sequence
  Synthetic
caaaccuaggauuccacgcacaa

SEQ ID NO: 77566 - RNA, 18 nt, Artificial Sequence
  Synthetic
aaugacauaucaucacaa

SEQ ID NO: 77567 - RNA, 19 nt, Artificial Sequence
  Synthetic
aaaugacauaucaucacaa

SEQ ID NO: 77568 - RNA, 22 nt, Artificial Sequence
  Synthetic
uggaaaugacauaucaucacaa

SEQ ID NO: 77569 - RNA, 23 nt, Artificial Sequence
  Synthetic
uuggaaaugacauaucaucacaa

SEQ ID NO: 77570 - RNA, 24 nt, Artificial Sequence
  Synthetic
cuuggaaaugacauaucaucacaa

SEQ ID NO: 77571 - RNA, 18 nt, Artificial Sequence
  Synthetic
uuggauacagacucacaa

SEQ ID NO: 77572 - RNA, 20 nt, Artificial Sequence
  Synthetic
aguuggauacagacucacaa

SEQ ID NO: 77573 - RNA, 21 nt, Artificial Sequence
  Synthetic
caguuggauacagacucacaa

SEQ ID NO: 77574 - RNA, 23 nt, Artificial Sequence
  Synthetic
ugcaguuggauacagacucacaa

SEQ ID NO: 77575 - RNA, 24 nt, Artificial Sequence
  Synthetic
augcaguuggauacagacucacaa

SEQ ID NO: 77576 - RNA, 21 nt, Artificial Sequence
  Synthetic
auguccucaagaagcucacaa

SEQ ID NO: 77577 - RNA, 22 nt, Artificial Sequence
  Synthetic
uauguccucaagaagcucacaa

SEQ ID NO: 77578 - RNA, 24 nt, Artificial Sequence
  Synthetic
aguauguccucaagaagcucacaa

SEQ ID NO: 77579 - RNA, 18 nt, Artificial Sequence
  Synthetic
cagaugaggaauucacaa

SEQ ID NO: 77580 - RNA, 22 nt, Artificial Sequence
  Synthetic
agggcagaugaggaauucacaa

SEQ ID NO: 77581 - RNA, 23 nt, Artificial Sequence
  Synthetic
aagggcagaugaggaauucacaa

SEQ ID NO: 77582 - RNA, 18 nt, Artificial Sequence
  Synthetic
aaggaaagaacuucacaa

SEQ ID NO: 77583 - RNA, 19 nt, Artificial Sequence
  Synthetic
uaaggaaagaacuucacaa

SEQ ID NO: 77584 - RNA, 20 nt, Artificial Sequence
  Synthetic
cuaaggaaagaacuucacaa

SEQ ID NO: 77585 - RNA, 22 nt, Artificial Sequence
  Synthetic
agcuaaggaaagaacuucacaa

SEQ ID NO: 77586 - RNA, 23 nt, Artificial Sequence
  Synthetic
aagcuaaggaaagaacuucacaa

SEQ ID NO: 77587 - RNA, 24 nt, Artificial Sequence
  Synthetic
aaagcuaaggaaagaacuucacaa

SEQ ID NO: 77588 - RNA, 18 nt, Artificial Sequence
  Synthetic
cuggucuagacuucacaa

SEQ ID NO: 77589 - RNA, 19 nt, Artificial Sequence
  Synthetic
ucuggucuagacuucacaa

SEQ ID NO: 77590 - RNA, 20 nt, Artificial Sequence
  Synthetic
aucuggucuagacuucacaa

SEQ ID NO: 77591 - RNA, 21 nt, Artificial Sequence
  Synthetic
caucuggucuagacuucacaa

SEQ ID NO: 77592 - RNA, 22 nt, Artificial Sequence
  Synthetic
acaucuggucuagacuucacaa

SEQ ID NO: 77593 - RNA, 23 nt, Artificial Sequence
  Synthetic
cacaucuggucuagacuucacaa

SEQ ID NO: 77594 - RNA, 24 nt, Artificial Sequence
  Synthetic
ccacaucuggucuagacuucacaa

SEQ ID NO: 77595 - RNA, 18 nt, Artificial Sequence
  Synthetic
ucacuuuagucuucacaa

SEQ ID NO: 77596 - RNA, 20 nt, Artificial Sequence
  Synthetic
agucacuuuagucuucacaa

SEQ ID NO: 77597 - RNA, 21 nt, Artificial Sequence
  Synthetic
uagucacuuuagucuucacaa

SEQ ID NO: 77598 - RNA, 22 nt, Artificial Sequence
  Synthetic
auagucacuuuagucuucacaa

SEQ ID NO: 77599 - RNA, 23 nt, Artificial Sequence
  Synthetic
aauagucacuuuagucuucacaa

SEQ ID NO: 77600 - RNA, 24 nt, Artificial Sequence
  Synthetic
uaauagucacuuuagucuucacaa

SEQ ID NO: 77601 - RNA, 18 nt, Artificial Sequence
  Synthetic
caugcuuuugguucacaa

SEQ ID NO: 77602 - RNA, 19 nt, Artificial Sequence
  Synthetic
ccaugcuuuugguucacaa

SEQ ID NO: 77603 - RNA, 20 nt, Artificial Sequence
  Synthetic
uccaugcuuuugguucacaa

SEQ ID NO: 77604 - RNA, 21 nt, Artificial Sequence
  Synthetic
uuccaugcuuuugguucacaa

SEQ ID NO: 77605 - RNA, 22 nt, Artificial Sequence
  Synthetic
auuccaugcuuuugguucacaa

SEQ ID NO: 77606 - RNA, 23 nt, Artificial Sequence
  Synthetic
aauuccaugcuuuugguucacaa

SEQ ID NO: 77607 - RNA, 24 nt, Artificial Sequence
  Synthetic
uaauuccaugcuuuugguucacaa

SEQ ID NO: 77608 - RNA, 18 nt, Artificial Sequence
  Synthetic
uuguauacuauuucacaa

SEQ ID NO: 77609 - RNA, 19 nt, Artificial Sequence
  Synthetic
uuuguauacuauuucacaa

SEQ ID NO: 77610 - RNA, 20 nt, Artificial Sequence
  Synthetic
auuuguauacuauuucacaa

SEQ ID NO: 77611 - RNA, 21 nt, Artificial Sequence
  Synthetic
aauuuguauacuauuucacaa

SEQ ID NO: 77612 - RNA, 22 nt, Artificial Sequence
  Synthetic
aaauuuguauacuauuucacaa

SEQ ID NO: 77613 - RNA, 23 nt, Artificial Sequence
  Synthetic
aaaauuuguauacuauuucacaa

SEQ ID NO: 77614 - RNA, 24 nt, Artificial Sequence
  Synthetic
uaaaauuuguauacuauuucacaa

SEQ ID NO: 77615 - RNA, 18 nt, Artificial Sequence
  Synthetic
agaauaugucaaagacaa

SEQ ID NO: 77616 - RNA, 19 nt, Artificial Sequence
  Synthetic
cagaauaugucaaagacaa

SEQ ID NO: 77617 - RNA, 21 nt, Artificial Sequence
  Synthetic
agcagaauaugucaaagacaa

SEQ ID NO: 77618 - RNA, 22 nt, Artificial Sequence
  Synthetic
aagcagaauaugucaaagacaa

SEQ ID NO: 77619 - RNA, 23 nt, Artificial Sequence
  Synthetic
caagcagaauaugucaaagacaa

SEQ ID NO: 77620 - RNA, 24 nt, Artificial Sequence
  Synthetic
acaagcagaauaugucaaagacaa

SEQ ID NO: 77621 - RNA, 19 nt, Artificial Sequence
  Synthetic
agagaggauaacaagacaa

SEQ ID NO: 77622 - RNA, 20 nt, Artificial Sequence
  Synthetic
cagagaggauaacaagacaa

SEQ ID NO: 77623 - RNA, 21 nt, Artificial Sequence
  Synthetic
acagagaggauaacaagacaa

SEQ ID NO: 77624 - RNA, 24 nt, Artificial Sequence
  Synthetic
aggacagagaggauaacaagacaa

SEQ ID NO: 77625 - RNA, 18 nt, Artificial Sequence
  Synthetic
acagaugguacaagacaa

SEQ ID NO: 77626 - RNA, 19 nt, Artificial Sequence
  Synthetic
uacagaugguacaagacaa

SEQ ID NO: 77627 - RNA, 20 nt, Artificial Sequence
  Synthetic
auacagaugguacaagacaa

SEQ ID NO: 77628 - RNA, 21 nt, Artificial Sequence
  Synthetic
aauacagaugguacaagacaa

SEQ ID NO: 77629 - RNA, 24 nt, Artificial Sequence
  Synthetic
cggaauacagaugguacaagacaa

SEQ ID NO: 77630 - RNA, 18 nt, Artificial Sequence
  Synthetic
caaccaucauuaagacaa

SEQ ID NO: 77631 - RNA, 19 nt, Artificial Sequence
  Synthetic
ucaaccaucauuaagacaa

SEQ ID NO: 77632 - RNA, 21 nt, Artificial Sequence
  Synthetic
agucaaccaucauuaagacaa

SEQ ID NO: 77633 - RNA, 23 nt, Artificial Sequence
  Synthetic
cgagucaaccaucauuaagacaa

SEQ ID NO: 77634 - RNA, 18 nt, Artificial Sequence
  Synthetic
uucuaugaauccagacaa

SEQ ID NO: 77635 - RNA, 20 nt, Artificial Sequence
  Synthetic
aguucuaugaauccagacaa

SEQ ID NO: 77636 - RNA, 22 nt, Artificial Sequence
  Synthetic
agaguucuaugaauccagacaa

SEQ ID NO: 77637 - RNA, 24 nt, Artificial Sequence
  Synthetic
agagaguucuaugaauccagacaa

SEQ ID NO: 77638 - RNA, 19 nt, Artificial Sequence
  Synthetic
agaaagaaacuaacgacaa

SEQ ID NO: 77639 - RNA, 20 nt, Artificial Sequence
  Synthetic
cagaaagaaacuaacgacaa

SEQ ID NO: 77640 - RNA, 21 nt, Artificial Sequence
  Synthetic
ucagaaagaaacuaacgacaa

SEQ ID NO: 77641 - RNA, 22 nt, Artificial Sequence
  Synthetic
aucagaaagaaacuaacgacaa

SEQ ID NO: 77642 - RNA, 23 nt, Artificial Sequence
  Synthetic
uaucagaaagaaacuaacgacaa

SEQ ID NO: 77643 - RNA, 18 nt, Artificial Sequence
  Synthetic
cucuugaugagacgacaa

SEQ ID NO: 77644 - RNA, 19 nt, Artificial Sequence
  Synthetic
ucucuugaugagacgacaa

SEQ ID NO: 77645 - RNA, 20 nt, Artificial Sequence
  Synthetic
cucucuugaugagacgacaa

SEQ ID NO: 77646 - RNA, 22 nt, Artificial Sequence
  Synthetic
agcucucuugaugagacgacaa

SEQ ID NO: 77647 - RNA, 23 nt, Artificial Sequence
  Synthetic
uagcucucuugaugagacgacaa

SEQ ID NO: 77648 - RNA, 24 nt, Artificial Sequence
  Synthetic
cuagcucucuugaugagacgacaa

SEQ ID NO: 77649 - RNA, 19 nt, Artificial Sequence
  Synthetic
ugaaacucugaaaggacaa

SEQ ID NO: 77650 - RNA, 20 nt, Artificial Sequence
  Synthetic
uugaaacucugaaaggacaa

SEQ ID NO: 77651 - RNA, 21 nt, Artificial Sequence
  Synthetic
uuugaaacucugaaaggacaa

SEQ ID NO: 77652 - RNA, 22 nt, Artificial Sequence
  Synthetic
uuuugaaacucugaaaggacaa

SEQ ID NO: 77653 - RNA, 23 nt, Artificial Sequence
  Synthetic
auuuugaaacucugaaaggacaa

SEQ ID NO: 77654 - RNA, 18 nt, Artificial Sequence
  Synthetic
ugagauccagaaggacaa

SEQ ID NO: 77655 - RNA, 19 nt, Artificial Sequence
  Synthetic
uugagauccagaaggacaa

SEQ ID NO: 77656 - RNA, 20 nt, Artificial Sequence
  Synthetic
uuugagauccagaaggacaa

SEQ ID NO: 77657 - RNA, 21 nt, Artificial Sequence
  Synthetic
uuuugagauccagaaggacaa

SEQ ID NO: 77658 - RNA, 22 nt, Artificial Sequence
  Synthetic
auuuugagauccagaaggacaa

SEQ ID NO: 77659 - RNA, 23 nt, Artificial Sequence
  Synthetic
cauuuugagauccagaaggacaa

SEQ ID NO: 77660 - RNA, 24 nt, Artificial Sequence
  Synthetic
ucauuuugagauccagaaggacaa

SEQ ID NO: 77661 - RNA, 18 nt, Artificial Sequence
  Synthetic
ucugcaguccuuggacaa

SEQ ID NO: 77662 - RNA, 19 nt, Artificial Sequence
  Synthetic
uucugcaguccuuggacaa

SEQ ID NO: 77663 - RNA, 20 nt, Artificial Sequence
  Synthetic
auucugcaguccuuggacaa

SEQ ID NO: 77664 - RNA, 18 nt, Artificial Sequence
  Synthetic
uauacuuuugaaugacaa

SEQ ID NO: 77665 - RNA, 20 nt, Artificial Sequence
  Synthetic
cguauacuuuugaaugacaa

SEQ ID NO: 77666 - RNA, 21 nt, Artificial Sequence
  Synthetic
acguauacuuuugaaugacaa

SEQ ID NO: 77667 - RNA, 22 nt, Artificial Sequence
  Synthetic
uacguauacuuuugaaugacaa

SEQ ID NO: 77668 - RNA, 23 nt, Artificial Sequence
  Synthetic
auacguauacuuuugaaugacaa

SEQ ID NO: 77669 - RNA, 24 nt, Artificial Sequence
  Synthetic
uauacguauacuuuugaaugacaa

SEQ ID NO: 77670 - RNA, 18 nt, Artificial Sequence
  Synthetic
uuuuacauacuaugacaa

SEQ ID NO: 77671 - RNA, 19 nt, Artificial Sequence
  Synthetic
uuuuuacauacuaugacaa

SEQ ID NO: 77672 - RNA, 20 nt, Artificial Sequence
  Synthetic
uuuuuuacauacuaugacaa

SEQ ID NO: 77673 - RNA, 22 nt, Artificial Sequence
  Synthetic
uguuuuuuacauacuaugacaa

SEQ ID NO: 77674 - RNA, 23 nt, Artificial Sequence
  Synthetic
uuguuuuuuacauacuaugacaa

SEQ ID NO: 77675 - RNA, 24 nt, Artificial Sequence
  Synthetic
uuuguuuuuuacauacuaugacaa

SEQ ID NO: 77676 - RNA, 18 nt, Artificial Sequence
  Synthetic
aacauauugaccugacaa

SEQ ID NO: 77677 - RNA, 21 nt, Artificial Sequence
  Synthetic
uggaacauauugaccugacaa

SEQ ID NO: 77678 - RNA, 22 nt, Artificial Sequence
  Synthetic
uuggaacauauugaccugacaa

SEQ ID NO: 77679 - RNA, 23 nt, Artificial Sequence
  Synthetic
auuggaacauauugaccugacaa

SEQ ID NO: 77680 - RNA, 24 nt, Artificial Sequence
  Synthetic
aauuggaacauauugaccugacaa

SEQ ID NO: 77681 - RNA, 18 nt, Artificial Sequence
  Synthetic
ucauucuacagcugacaa

SEQ ID NO: 77682 - RNA, 19 nt, Artificial Sequence
  Synthetic
cucauucuacagcugacaa

SEQ ID NO: 77683 - RNA, 20 nt, Artificial Sequence
  Synthetic
ucucauucuacagcugacaa

SEQ ID NO: 77684 - RNA, 23 nt, Artificial Sequence
  Synthetic
aggucucauucuacagcugacaa

SEQ ID NO: 77685 - RNA, 24 nt, Artificial Sequence
  Synthetic
uaggucucauucuacagcugacaa

SEQ ID NO: 77686 - RNA, 18 nt, Artificial Sequence
  Synthetic
aauuuggagagcugacaa

SEQ ID NO: 77687 - RNA, 21 nt, Artificial Sequence
  Synthetic
uggaauuuggagagcugacaa

SEQ ID NO: 77688 - RNA, 22 nt, Artificial Sequence
  Synthetic
uuggaauuuggagagcugacaa

SEQ ID NO: 77689 - RNA, 24 nt, Artificial Sequence
  Synthetic
uguuggaauuuggagagcugacaa

SEQ ID NO: 77690 - RNA, 18 nt, Artificial Sequence
  Synthetic
auauguauucucugacaa

SEQ ID NO: 77691 - RNA, 19 nt, Artificial Sequence
  Synthetic
uauauguauucucugacaa

SEQ ID NO: 77692 - RNA, 20 nt, Artificial Sequence
  Synthetic
uuauauguauucucugacaa

SEQ ID NO: 77693 - RNA, 21 nt, Artificial Sequence
  Synthetic
uuuauauguauucucugacaa

SEQ ID NO: 77694 - RNA, 22 nt, Artificial Sequence
  Synthetic
uuuuauauguauucucugacaa

SEQ ID NO: 77695 - RNA, 23 nt, Artificial Sequence
  Synthetic
auuuuauauguauucucugacaa

SEQ ID NO: 77696 - RNA, 24 nt, Artificial Sequence
  Synthetic
uauuuuauauguauucucugacaa

SEQ ID NO: 77697 - RNA, 18 nt, Artificial Sequence
  Synthetic
uggaaaauccugugacaa

SEQ ID NO: 77698 - RNA, 20 nt, Artificial Sequence
  Synthetic
uguggaaaauccugugacaa

SEQ ID NO: 77699 - RNA, 21 nt, Artificial Sequence
  Synthetic
auguggaaaauccugugacaa

SEQ ID NO: 77700 - RNA, 22 nt, Artificial Sequence
  Synthetic
aauguggaaaauccugugacaa

SEQ ID NO: 77701 - RNA, 23 nt, Artificial Sequence
  Synthetic
aaauguggaaaauccugugacaa

SEQ ID NO: 77702 - RNA, 24 nt, Artificial Sequence
  Synthetic
aaaauguggaaaauccugugacaa

SEQ ID NO: 77703 - RNA, 18 nt, Artificial Sequence
  Synthetic
cugcuggguuugugacaa

SEQ ID NO: 77704 - RNA, 19 nt, Artificial Sequence
  Synthetic
ucugcuggguuugugacaa

SEQ ID NO: 77705 - RNA, 20 nt, Artificial Sequence
  Synthetic
uucugcuggguuugugacaa

SEQ ID NO: 77706 - RNA, 21 nt, Artificial Sequence
  Synthetic
uuucugcuggguuugugacaa

SEQ ID NO: 77707 - RNA, 22 nt, Artificial Sequence
  Synthetic
cuuucugcuggguuugugacaa

SEQ ID NO: 77708 - RNA, 23 nt, Artificial Sequence
  Synthetic
acuuucugcuggguuugugacaa

SEQ ID NO: 77709 - RNA, 24 nt, Artificial Sequence
  Synthetic
cacuuucugcuggguuugugacaa

SEQ ID NO: 77710 - RNA, 18 nt, Artificial Sequence
  Synthetic
auggauguguuuugacaa

SEQ ID NO: 77711 - RNA, 21 nt, Artificial Sequence
  Synthetic
uggauggauguguuuugacaa

SEQ ID NO: 77712 - RNA, 22 nt, Artificial Sequence
  Synthetic
uuggauggauguguuuugacaa

SEQ ID NO: 77713 - RNA, 23 nt, Artificial Sequence
  Synthetic
uuuggauggauguguuuugacaa

SEQ ID NO: 77714 - RNA, 19 nt, Artificial Sequence
  Synthetic
agauucagauuaaauacaa

SEQ ID NO: 77715 - RNA, 20 nt, Artificial Sequence
  Synthetic
aagauucagauuaaauacaa

SEQ ID NO: 77716 - RNA, 21 nt, Artificial Sequence
  Synthetic
aaagauucagauuaaauacaa

SEQ ID NO: 77717 - RNA, 22 nt, Artificial Sequence
  Synthetic
aaaagauucagauuaaauacaa

SEQ ID NO: 77718 - RNA, 23 nt, Artificial Sequence
  Synthetic
caaaagauucagauuaaauacaa

SEQ ID NO: 77719 - RNA, 24 nt, Artificial Sequence
  Synthetic
ucaaaagauucagauuaaauacaa

SEQ ID NO: 77720 - RNA, 18 nt, Artificial Sequence
  Synthetic
uugcguauauacauacaa

SEQ ID NO: 77721 - RNA, 19 nt, Artificial Sequence
  Synthetic
auugcguauauacauacaa

SEQ ID NO: 77722 - RNA, 21 nt, Artificial Sequence
  Synthetic
ugauugcguauauacauacaa

SEQ ID NO: 77723 - RNA, 22 nt, Artificial Sequence
  Synthetic
augauugcguauauacauacaa

SEQ ID NO: 77724 - RNA, 23 nt, Artificial Sequence
  Synthetic
aaugauugcguauauacauacaa

SEQ ID NO: 77725 - RNA, 24 nt, Artificial Sequence
  Synthetic
aaaugauugcguauauacauacaa

SEQ ID NO: 77726 - RNA, 21 nt, Artificial Sequence
  Synthetic
agcuauguuauauacauacaa

SEQ ID NO: 77727 - RNA, 22 nt, Artificial Sequence
  Synthetic
aagcuauguuauauacauacaa

SEQ ID NO: 77728 - RNA, 23 nt, Artificial Sequence
  Synthetic
aaagcuauguuauauacauacaa

SEQ ID NO: 77729 - RNA, 24 nt, Artificial Sequence
  Synthetic
uaaagcuauguuauauacauacaa

SEQ ID NO: 77730 - RNA, 18 nt, Artificial Sequence
  Synthetic
aaaccacuaaucauacaa

SEQ ID NO: 77731 - RNA, 19 nt, Artificial Sequence
  Synthetic
uaaaccacuaaucauacaa

SEQ ID NO: 77732 - RNA, 20 nt, Artificial Sequence
  Synthetic
uuaaaccacuaaucauacaa

SEQ ID NO: 77733 - RNA, 21 nt, Artificial Sequence
  Synthetic
auuaaaccacuaaucauacaa

SEQ ID NO: 77734 - RNA, 22 nt, Artificial Sequence
  Synthetic
cauuaaaccacuaaucauacaa

SEQ ID NO: 77735 - RNA, 23 nt, Artificial Sequence
  Synthetic
acauuaaaccacuaaucauacaa

SEQ ID NO: 77736 - RNA, 24 nt, Artificial Sequence
  Synthetic
aacauuaaaccacuaaucauacaa

SEQ ID NO: 77737 - RNA, 19 nt, Artificial Sequence
  Synthetic
ugauaaauuaaggauacaa

SEQ ID NO: 77738 - RNA, 20 nt, Artificial Sequence
  Synthetic
uugauaaauuaaggauacaa

SEQ ID NO: 77739 - RNA, 21 nt, Artificial Sequence
  Synthetic
auugauaaauuaaggauacaa

SEQ ID NO: 77740 - RNA, 22 nt, Artificial Sequence
  Synthetic
uauugauaaauuaaggauacaa

SEQ ID NO: 77741 - RNA, 23 nt, Artificial Sequence
  Synthetic
auauugauaaauuaaggauacaa

SEQ ID NO: 77742 - RNA, 24 nt, Artificial Sequence
  Synthetic
uauauugauaaauuaaggauacaa

SEQ ID NO: 77743 - RNA, 19 nt, Artificial Sequence
  Synthetic
uguuaucacuuugauacaa

SEQ ID NO: 77744 - RNA, 20 nt, Artificial Sequence
  Synthetic
auguuaucacuuugauacaa

SEQ ID NO: 77745 - RNA, 21 nt, Artificial Sequence
  Synthetic
uauguuaucacuuugauacaa

SEQ ID NO: 77746 - RNA, 22 nt, Artificial Sequence
  Synthetic
auauguuaucacuuugauacaa

SEQ ID NO: 77747 - RNA, 23 nt, Artificial Sequence
  Synthetic
uauauguuaucacuuugauacaa

SEQ ID NO: 77748 - RNA, 19 nt, Artificial Sequence
  Synthetic
agcaaagauaaauauacaa

SEQ ID NO: 77749 - RNA, 20 nt, Artificial Sequence
  Synthetic
uagcaaagauaaauauacaa

SEQ ID NO: 77750 - RNA, 21 nt, Artificial Sequence
  Synthetic
uuagcaaagauaaauauacaa

SEQ ID NO: 77751 - RNA, 22 nt, Artificial Sequence
  Synthetic
auuagcaaagauaaauauacaa

SEQ ID NO: 77752 - RNA, 24 nt, Artificial Sequence
  Synthetic
ugauuagcaaagauaaauauacaa

SEQ ID NO: 77753 - RNA, 20 nt, Artificial Sequence
  Synthetic
uggacaauggauauauacaa

SEQ ID NO: 77754 - RNA, 21 nt, Artificial Sequence
  Synthetic
uuggacaauggauauauacaa

SEQ ID NO: 77755 - RNA, 22 nt, Artificial Sequence
  Synthetic
cuuggacaauggauauauacaa

SEQ ID NO: 77756 - RNA, 23 nt, Artificial Sequence
  Synthetic
ucuuggacaauggauauauacaa

SEQ ID NO: 77757 - RNA, 21 nt, Artificial Sequence
  Synthetic
ugcuuuucuucucuuauacaa

SEQ ID NO: 77758 - RNA, 22 nt, Artificial Sequence
  Synthetic
uugcuuuucuucucuuauacaa

SEQ ID NO: 77759 - RNA, 23 nt, Artificial Sequence
  Synthetic
uuugcuuuucuucucuuauacaa

SEQ ID NO: 77760 - RNA, 24 nt, Artificial Sequence
  Synthetic
uuuugcuuuucuucucuuauacaa

SEQ ID NO: 77761 - RNA, 18 nt, Artificial Sequence
  Synthetic
aauggucagucacuacaa

SEQ ID NO: 77762 - RNA, 19 nt, Artificial Sequence
  Synthetic
uaauggucagucacuacaa

SEQ ID NO: 77763 - RNA, 20 nt, Artificial Sequence
  Synthetic
uuaauggucagucacuacaa

SEQ ID NO: 77764 - RNA, 21 nt, Artificial Sequence
  Synthetic
uuuaauggucagucacuacaa

SEQ ID NO: 77765 - RNA, 22 nt, Artificial Sequence
  Synthetic
cuuuaauggucagucacuacaa

SEQ ID NO: 77766 - RNA, 23 nt, Artificial Sequence
  Synthetic
acuuuaauggucagucacuacaa

SEQ ID NO: 77767 - RNA, 19 nt, Artificial Sequence
  Synthetic
agaauaauaauaucuacaa

SEQ ID NO: 77768 - RNA, 20 nt, Artificial Sequence
  Synthetic
cagaauaauaauaucuacaa

SEQ ID NO: 77769 - RNA, 21 nt, Artificial Sequence
  Synthetic
ccagaauaauaauaucuacaa

SEQ ID NO: 77770 - RNA, 22 nt, Artificial Sequence
  Synthetic
uccagaauaauaauaucuacaa

SEQ ID NO: 77771 - RNA, 23 nt, Artificial Sequence
  Synthetic
cuccagaauaauaauaucuacaa

SEQ ID NO: 77772 - RNA, 24 nt, Artificial Sequence
  Synthetic
acuccagaauaauaauaucuacaa

SEQ ID NO: 77773 - RNA, 21 nt, Artificial Sequence
  Synthetic
ugacaaacaaaaggucuacaa

SEQ ID NO: 77774 - RNA, 22 nt, Artificial Sequence
  Synthetic
augacaaacaaaaggucuacaa

SEQ ID NO: 77775 - RNA, 24 nt, Artificial Sequence
  Synthetic
agaugacaaacaaaaggucuacaa

SEQ ID NO: 77776 - RNA, 18 nt, Artificial Sequence
  Synthetic
uacuuaagacaaguacaa

SEQ ID NO: 77777 - RNA, 19 nt, Artificial Sequence
  Synthetic
uuacuuaagacaaguacaa

SEQ ID NO: 77778 - RNA, 20 nt, Artificial Sequence
  Synthetic
uuuacuuaagacaaguacaa

SEQ ID NO: 77779 - RNA, 21 nt, Artificial Sequence
  Synthetic
uuuuacuuaagacaaguacaa

SEQ ID NO: 77780 - RNA, 23 nt, Artificial Sequence
  Synthetic
uguuuuacuuaagacaaguacaa

SEQ ID NO: 77781 - RNA, 24 nt, Artificial Sequence
  Synthetic
auguuuuacuuaagacaaguacaa

SEQ ID NO: 77782 - RNA, 18 nt, Artificial Sequence
  Synthetic
agaccuagccauguacaa

SEQ ID NO: 77783 - RNA, 19 nt, Artificial Sequence
  Synthetic
cagaccuagccauguacaa

SEQ ID NO: 77784 - RNA, 20 nt, Artificial Sequence
  Synthetic
acagaccuagccauguacaa

SEQ ID NO: 77785 - RNA, 21 nt, Artificial Sequence
  Synthetic
aacagaccuagccauguacaa

SEQ ID NO: 77786 - RNA, 22 nt, Artificial Sequence
  Synthetic
aaacagaccuagccauguacaa

SEQ ID NO: 77787 - RNA, 23 nt, Artificial Sequence
  Synthetic
uaaacagaccuagccauguacaa

SEQ ID NO: 77788 - RNA, 24 nt, Artificial Sequence
  Synthetic
uuaaacagaccuagccauguacaa

SEQ ID NO: 77789 - RNA, 18 nt, Artificial Sequence
  Synthetic
ugcaaacuugcuguacaa

SEQ ID NO: 77790 - RNA, 19 nt, Artificial Sequence
  Synthetic
uugcaaacuugcuguacaa

SEQ ID NO: 77791 - RNA, 20 nt, Artificial Sequence
  Synthetic
uuugcaaacuugcuguacaa

SEQ ID NO: 77792 - RNA, 23 nt, Artificial Sequence
  Synthetic
ugguuugcaaacuugcuguacaa

SEQ ID NO: 77793 - RNA, 18 nt, Artificial Sequence
  Synthetic
agaacguaaaaauuacaa

SEQ ID NO: 77794 - RNA, 21 nt, Artificial Sequence
  Synthetic
uggagaacguaaaaauuacaa

SEQ ID NO: 77795 - RNA, 22 nt, Artificial Sequence
  Synthetic
uuggagaacguaaaaauuacaa

SEQ ID NO: 77796 - RNA, 23 nt, Artificial Sequence
  Synthetic
auuggagaacguaaaaauuacaa

SEQ ID NO: 77797 - RNA, 24 nt, Artificial Sequence
  Synthetic
uauuggagaacguaaaaauuacaa

SEQ ID NO: 77798 - RNA, 18 nt, Artificial Sequence
  Synthetic
uuucuucugcaauuacaa

SEQ ID NO: 77799 - RNA, 19 nt, Artificial Sequence
  Synthetic
uuuucuucugcaauuacaa

SEQ ID NO: 77800 - RNA, 20 nt, Artificial Sequence
  Synthetic
auuuucuucugcaauuacaa

SEQ ID NO: 77801 - RNA, 22 nt, Artificial Sequence
  Synthetic
agauuuucuucugcaauuacaa

SEQ ID NO: 77802 - RNA, 23 nt, Artificial Sequence
  Synthetic
aagauuuucuucugcaauuacaa

SEQ ID NO: 77803 - RNA, 24 nt, Artificial Sequence
  Synthetic
aaagauuuucuucugcaauuacaa

SEQ ID NO: 77804 - RNA, 18 nt, Artificial Sequence
  Synthetic
auagucccuagauuacaa

SEQ ID NO: 77805 - RNA, 20 nt, Artificial Sequence
  Synthetic
agauagucccuagauuacaa

SEQ ID NO: 77806 - RNA, 21 nt, Artificial Sequence
  Synthetic
cagauagucccuagauuacaa

SEQ ID NO: 77807 - RNA, 22 nt, Artificial Sequence
  Synthetic
acagauagucccuagauuacaa

SEQ ID NO: 77808 - RNA, 23 nt, Artificial Sequence
  Synthetic
uacagauagucccuagauuacaa

SEQ ID NO: 77809 - RNA, 24 nt, Artificial Sequence
  Synthetic
auacagauagucccuagauuacaa

SEQ ID NO: 77810 - RNA, 19 nt, Artificial Sequence
  Synthetic
agaauucccaaucuuacaa

SEQ ID NO: 77811 - RNA, 20 nt, Artificial Sequence
  Synthetic
cagaauucccaaucuuacaa

SEQ ID NO: 77812 - RNA, 21 nt, Artificial Sequence
  Synthetic
acagaauucccaaucuuacaa

SEQ ID NO: 77813 - RNA, 22 nt, Artificial Sequence
  Synthetic
uacagaauucccaaucuuacaa

SEQ ID NO: 77814 - RNA, 23 nt, Artificial Sequence
  Synthetic
uuacagaauucccaaucuuacaa

SEQ ID NO: 77815 - RNA, 24 nt, Artificial Sequence
  Synthetic
cuuacagaauucccaaucuuacaa

SEQ ID NO: 77816 - RNA, 23 nt, Artificial Sequence
  Synthetic
aggaagcaagaaugaaaaaccaa

SEQ ID NO: 77817 - RNA, 24 nt, Artificial Sequence
  Synthetic
uaggaagcaagaaugaaaaaccaa

SEQ ID NO: 77818 - RNA, 19 nt, Artificial Sequence
  Synthetic
agaaaacuacaagaaccaa

SEQ ID NO: 77819 - RNA, 20 nt, Artificial Sequence
  Synthetic
aagaaaacuacaagaaccaa

SEQ ID NO: 77820 - RNA, 22 nt, Artificial Sequence
  Synthetic
agaagaaaacuacaagaaccaa

SEQ ID NO: 77821 - RNA, 23 nt, Artificial Sequence
  Synthetic
uagaagaaaacuacaagaaccaa

SEQ ID NO: 77822 - RNA, 24 nt, Artificial Sequence
  Synthetic
auagaagaaaacuacaagaaccaa

SEQ ID NO: 77823 - RNA, 18 nt, Artificial Sequence
  Synthetic
uugaacgguuuuaaccaa

SEQ ID NO: 77824 - RNA, 19 nt, Artificial Sequence
  Synthetic
uuugaacgguuuuaaccaa

SEQ ID NO: 77825 - RNA, 20 nt, Artificial Sequence
  Synthetic
cuuugaacgguuuuaaccaa

SEQ ID NO: 77826 - RNA, 21 nt, Artificial Sequence
  Synthetic
ccuuugaacgguuuuaaccaa

SEQ ID NO: 77827 - RNA, 22 nt, Artificial Sequence
  Synthetic
accuuugaacgguuuuaaccaa

SEQ ID NO: 77828 - RNA, 23 nt, Artificial Sequence
  Synthetic
aaccuuugaacgguuuuaaccaa

SEQ ID NO: 77829 - RNA, 21 nt, Artificial Sequence
  Synthetic
caugaacuaacuugucaccaa

SEQ ID NO: 77830 - RNA, 23 nt, Artificial Sequence
  Synthetic
agcaugaacuaacuugucaccaa

SEQ ID NO: 77831 - RNA, 24 nt, Artificial Sequence
  Synthetic
uagcaugaacuaacuugucaccaa

SEQ ID NO: 77832 - RNA, 18 nt, Artificial Sequence
  Synthetic
aauccacauauucaccaa

SEQ ID NO: 77833 - RNA, 19 nt, Artificial Sequence
  Synthetic
aaauccacauauucaccaa

SEQ ID NO: 77834 - RNA, 20 nt, Artificial Sequence
  Synthetic
aaaauccacauauucaccaa

SEQ ID NO: 77835 - RNA, 21 nt, Artificial Sequence
  Synthetic
aaaaauccacauauucaccaa

SEQ ID NO: 77836 - RNA, 22 nt, Artificial Sequence
  Synthetic
caaaaauccacauauucaccaa

SEQ ID NO: 77837 - RNA, 24 nt, Artificial Sequence
  Synthetic
cgcaaaaauccacauauucaccaa

SEQ ID NO: 77838 - RNA, 18 nt, Artificial Sequence
  Synthetic
uacauaaaaacagaccaa

SEQ ID NO: 77839 - RNA, 20 nt, Artificial Sequence
  Synthetic
aguacauaaaaacagaccaa

SEQ ID NO: 77840 - RNA, 21 nt, Artificial Sequence
  Synthetic
aaguacauaaaaacagaccaa

SEQ ID NO: 77841 - RNA, 22 nt, Artificial Sequence
  Synthetic
caaguacauaaaaacagaccaa

SEQ ID NO: 77842 - RNA, 21 nt, Artificial Sequence
  Synthetic
ugagaggaagagggugaccaa

SEQ ID NO: 77843 - RNA, 22 nt, Artificial Sequence
  Synthetic
uugagaggaagagggugaccaa

SEQ ID NO: 77844 - RNA, 23 nt, Artificial Sequence
  Synthetic
uuugagaggaagagggugaccaa

SEQ ID NO: 77845 - RNA, 24 nt, Artificial Sequence
  Synthetic
uuuugagaggaagagggugaccaa

SEQ ID NO: 77846 - RNA, 19 nt, Artificial Sequence
  Synthetic
agcagagaaaagcuaccaa

SEQ ID NO: 77847 - RNA, 21 nt, Artificial Sequence
  Synthetic
cgagcagagaaaagcuaccaa

SEQ ID NO: 77848 - RNA, 22 nt, Artificial Sequence
  Synthetic
ccgagcagagaaaagcuaccaa

SEQ ID NO: 77849 - RNA, 23 nt, Artificial Sequence
  Synthetic
cccgagcagagaaaagcuaccaa

SEQ ID NO: 77850 - RNA, 24 nt, Artificial Sequence
  Synthetic
acccgagcagagaaaagcuaccaa

SEQ ID NO: 77851 - RNA, 18 nt, Artificial Sequence
  Synthetic
uaucucugucucuaccaa

SEQ ID NO: 77852 - RNA, 19 nt, Artificial Sequence
  Synthetic
auaucucugucucuaccaa

SEQ ID NO: 77853 - RNA, 20 nt, Artificial Sequence
  Synthetic
aauaucucugucucuaccaa

SEQ ID NO: 77854 - RNA, 21 nt, Artificial Sequence
  Synthetic
caauaucucugucucuaccaa

SEQ ID NO: 77855 - RNA, 22 nt, Artificial Sequence
  Synthetic
ccaauaucucugucucuaccaa

SEQ ID NO: 77856 - RNA, 23 nt, Artificial Sequence
  Synthetic
accaauaucucugucucuaccaa

SEQ ID NO: 77857 - RNA, 24 nt, Artificial Sequence
  Synthetic
uaccaauaucucugucucuaccaa

SEQ ID NO: 77858 - RNA, 18 nt, Artificial Sequence
  Synthetic
cuggaggugaauuaccaa

SEQ ID NO: 77859 - RNA, 20 nt, Artificial Sequence
  Synthetic
ugcuggaggugaauuaccaa

SEQ ID NO: 77860 - RNA, 22 nt, Artificial Sequence
  Synthetic
ugugcuggaggugaauuaccaa

SEQ ID NO: 77861 - RNA, 23 nt, Artificial Sequence
  Synthetic
augugcuggaggugaauuaccaa

SEQ ID NO: 77862 - RNA, 18 nt, Artificial Sequence
  Synthetic
augucauaauuuuaccaa

SEQ ID NO: 77863 - RNA, 20 nt, Artificial Sequence
  Synthetic
ugaugucauaauuuuaccaa

SEQ ID NO: 77864 - RNA, 21 nt, Artificial Sequence
  Synthetic
uugaugucauaauuuuaccaa

SEQ ID NO: 77865 - RNA, 23 nt, Artificial Sequence
  Synthetic
aguugaugucauaauuuuaccaa

SEQ ID NO: 77866 - RNA, 24 nt, Artificial Sequence
  Synthetic
uaguugaugucauaauuuuaccaa

SEQ ID NO: 77867 - RNA, 18 nt, Artificial Sequence
  Synthetic
aaccacccaauuacccaa

SEQ ID NO: 77868 - RNA, 20 nt, Artificial Sequence
  Synthetic
agaaccacccaauuacccaa

SEQ ID NO: 77869 - RNA, 21 nt, Artificial Sequence
  Synthetic
uagaaccacccaauuacccaa

SEQ ID NO: 77870 - RNA, 22 nt, Artificial Sequence
  Synthetic
uuagaaccacccaauuacccaa

SEQ ID NO: 77871 - RNA, 24 nt, Artificial Sequence
  Synthetic
uguuagaaccacccaauuacccaa

SEQ ID NO: 77872 - RNA, 18 nt, Artificial Sequence
  Synthetic
cagauaaugacaccccaa

SEQ ID NO: 77873 - RNA, 19 nt, Artificial Sequence
  Synthetic
acagauaaugacaccccaa

SEQ ID NO: 77874 - RNA, 20 nt, Artificial Sequence
  Synthetic
aacagauaaugacaccccaa

SEQ ID NO: 77875 - RNA, 21 nt, Artificial Sequence
  Synthetic
caacagauaaugacaccccaa

SEQ ID NO: 77876 - RNA, 22 nt, Artificial Sequence
  Synthetic
ucaacagauaaugacaccccaa

SEQ ID NO: 77877 - RNA, 23 nt, Artificial Sequence
  Synthetic
cucaacagauaaugacaccccaa

SEQ ID NO: 77878 - RNA, 24 nt, Artificial Sequence
  Synthetic
ucucaacagauaaugacaccccaa

SEQ ID NO: 77879 - RNA, 20 nt, Artificial Sequence
  Synthetic
ugggcccagugucaccccaa

SEQ ID NO: 77880 - RNA, 21 nt, Artificial Sequence
  Synthetic
uugggcccagugucaccccaa

SEQ ID NO: 77881 - RNA, 22 nt, Artificial Sequence
  Synthetic
uuugggcccagugucaccccaa

SEQ ID NO: 77882 - RNA, 23 nt, Artificial Sequence
  Synthetic
cuuugggcccagugucaccccaa

SEQ ID NO: 77883 - RNA, 24 nt, Artificial Sequence
  Synthetic
ccuuugggcccagugucaccccaa

SEQ ID NO: 77884 - RNA, 18 nt, Artificial Sequence
  Synthetic
uuagauucuugaccccaa

SEQ ID NO: 77885 - RNA, 19 nt, Artificial Sequence
  Synthetic
uuuagauucuugaccccaa

SEQ ID NO: 77886 - RNA, 20 nt, Artificial Sequence
  Synthetic
auuuagauucuugaccccaa

SEQ ID NO: 77887 - RNA, 21 nt, Artificial Sequence
  Synthetic
aauuuagauucuugaccccaa

SEQ ID NO: 77888 - RNA, 22 nt, Artificial Sequence
  Synthetic
aaauuuagauucuugaccccaa

SEQ ID NO: 77889 - RNA, 24 nt, Artificial Sequence
  Synthetic
ugaaauuuagauucuugaccccaa

SEQ ID NO: 77890 - RNA, 18 nt, Artificial Sequence
  Synthetic
cuggauuauauaccccaa

SEQ ID NO: 77891 - RNA, 19 nt, Artificial Sequence
  Synthetic
ucuggauuauauaccccaa

SEQ ID NO: 77892 - RNA, 20 nt, Artificial Sequence
  Synthetic
cucuggauuauauaccccaa

SEQ ID NO: 77893 - RNA, 21 nt, Artificial Sequence
  Synthetic
ucucuggauuauauaccccaa

SEQ ID NO: 77894 - RNA, 22 nt, Artificial Sequence
  Synthetic
aucucuggauuauauaccccaa

SEQ ID NO: 77895 - RNA, 23 nt, Artificial Sequence
  Synthetic
uaucucuggauuauauaccccaa

SEQ ID NO: 77896 - RNA, 24 nt, Artificial Sequence
  Synthetic
auaucucuggauuauauaccccaa

SEQ ID NO: 77897 - RNA, 18 nt, Artificial Sequence
  Synthetic
ucuccuuucuuuccccaa

SEQ ID NO: 77898 - RNA, 19 nt, Artificial Sequence
  Synthetic
aucuccuuucuuuccccaa

SEQ ID NO: 77899 - RNA, 20 nt, Artificial Sequence
  Synthetic
caucuccuuucuuuccccaa

SEQ ID NO: 77900 - RNA, 21 nt, Artificial Sequence
  Synthetic
ucaucuccuuucuuuccccaa

SEQ ID NO: 77901 - RNA, 22 nt, Artificial Sequence
  Synthetic
uucaucuccuuucuuuccccaa

SEQ ID NO: 77902 - RNA, 23 nt, Artificial Sequence
  Synthetic
auucaucuccuuucuuuccccaa

SEQ ID NO: 77903 - RNA, 24 nt, Artificial Sequence
  Synthetic
aauucaucuccuuucuuuccccaa

SEQ ID NO: 77904 - RNA, 18 nt, Artificial Sequence
  Synthetic
aggucuucuaaaucccaa

SEQ ID NO: 77905 - RNA, 19 nt, Artificial Sequence
  Synthetic
caggucuucuaaaucccaa

SEQ ID NO: 77906 - RNA, 20 nt, Artificial Sequence
  Synthetic
acaggucuucuaaaucccaa

SEQ ID NO: 77907 - RNA, 21 nt, Artificial Sequence
  Synthetic
cacaggucuucuaaaucccaa

SEQ ID NO: 77908 - RNA, 22 nt, Artificial Sequence
  Synthetic
acacaggucuucuaaaucccaa

SEQ ID NO: 77909 - RNA, 23 nt, Artificial Sequence
  Synthetic
aacacaggucuucuaaaucccaa

SEQ ID NO: 77910 - RNA, 24 nt, Artificial Sequence
  Synthetic
uaacacaggucuucuaaaucccaa

SEQ ID NO: 77911 - RNA, 18 nt, Artificial Sequence
  Synthetic
uuggccauggaaagccaa

SEQ ID NO: 77912 - RNA, 19 nt, Artificial Sequence
  Synthetic
cuuggccauggaaagccaa

SEQ ID NO: 77913 - RNA, 21 nt, Artificial Sequence
  Synthetic
ugcuuggccauggaaagccaa

SEQ ID NO: 77914 - RNA, 23 nt, Artificial Sequence
  Synthetic
ugugcuuggccauggaaagccaa

SEQ ID NO: 77915 - RNA, 24 nt, Artificial Sequence
  Synthetic
augugcuuggccauggaaagccaa

SEQ ID NO: 77916 - RNA, 18 nt, Artificial Sequence
  Synthetic
uguuggaaauaaagccaa

SEQ ID NO: 77917 - RNA, 19 nt, Artificial Sequence
  Synthetic
auguuggaaauaaagccaa

SEQ ID NO: 77918 - RNA, 20 nt, Artificial Sequence
  Synthetic
cauguuggaaauaaagccaa

SEQ ID NO: 77919 - RNA, 21 nt, Artificial Sequence
  Synthetic
ucauguuggaaauaaagccaa

SEQ ID NO: 77920 - RNA, 22 nt, Artificial Sequence
  Synthetic
cucauguuggaaauaaagccaa

SEQ ID NO: 77921 - RNA, 23 nt, Artificial Sequence
  Synthetic
acucauguuggaaauaaagccaa

SEQ ID NO: 77922 - RNA, 24 nt, Artificial Sequence
  Synthetic
cacucauguuggaaauaaagccaa

SEQ ID NO: 77923 - RNA, 18 nt, Artificial Sequence
  Synthetic
auucacagcauaagccaa

SEQ ID NO: 77924 - RNA, 19 nt, Artificial Sequence
  Synthetic
uauucacagcauaagccaa

SEQ ID NO: 77925 - RNA, 20 nt, Artificial Sequence
  Synthetic
uuauucacagcauaagccaa

SEQ ID NO: 77926 - RNA, 21 nt, Artificial Sequence
  Synthetic
uuuauucacagcauaagccaa

SEQ ID NO: 77927 - RNA, 22 nt, Artificial Sequence
  Synthetic
uuuuauucacagcauaagccaa

SEQ ID NO: 77928 - RNA, 23 nt, Artificial Sequence
  Synthetic
auuuuauucacagcauaagccaa

SEQ ID NO: 77929 - RNA, 24 nt, Artificial Sequence
  Synthetic
uauuuuauucacagcauaagccaa

SEQ ID NO: 77930 - RNA, 18 nt, Artificial Sequence
  Synthetic
auaucucuuaugagccaa

SEQ ID NO: 77931 - RNA, 21 nt, Artificial Sequence
  Synthetic
aggauaucucuuaugagccaa

SEQ ID NO: 77932 - RNA, 22 nt, Artificial Sequence
  Synthetic
aaggauaucucuuaugagccaa

SEQ ID NO: 77933 - RNA, 23 nt, Artificial Sequence
  Synthetic
caaggauaucucuuaugagccaa

SEQ ID NO: 77934 - RNA, 24 nt, Artificial Sequence
  Synthetic
acaaggauaucucuuaugagccaa

SEQ ID NO: 77935 - RNA, 21 nt, Artificial Sequence
  Synthetic
aauaaaacuugcuuuagccaa

SEQ ID NO: 77936 - RNA, 22 nt, Artificial Sequence
  Synthetic
aaauaaaacuugcuuuagccaa

SEQ ID NO: 77937 - RNA, 18 nt, Artificial Sequence
  Synthetic
uuugaugauucaggccaa

SEQ ID NO: 77938 - RNA, 19 nt, Artificial Sequence
  Synthetic
uuuugaugauucaggccaa

SEQ ID NO: 77939 - RNA, 20 nt, Artificial Sequence
  Synthetic
uuuuugaugauucaggccaa

SEQ ID NO: 77940 - RNA, 21 nt, Artificial Sequence
  Synthetic
auuuuugaugauucaggccaa

SEQ ID NO: 77941 - RNA, 22 nt, Artificial Sequence
  Synthetic
cauuuuugaugauucaggccaa

SEQ ID NO: 77942 - RNA, 24 nt, Artificial Sequence
  Synthetic
agcauuuuugaugauucaggccaa

SEQ ID NO: 77943 - RNA, 18 nt, Artificial Sequence
  Synthetic
ucauccucauggggccaa

SEQ ID NO: 77944 - RNA, 19 nt, Artificial Sequence
  Synthetic
aucauccucauggggccaa

SEQ ID NO: 77945 - RNA, 20 nt, Artificial Sequence
  Synthetic
uaucauccucauggggccaa

SEQ ID NO: 77946 - RNA, 21 nt, Artificial Sequence
  Synthetic
auaucauccucauggggccaa

SEQ ID NO: 77947 - RNA, 22 nt, Artificial Sequence
  Synthetic
uauaucauccucauggggccaa

SEQ ID NO: 77948 - RNA, 23 nt, Artificial Sequence
  Synthetic
auauaucauccucauggggccaa

SEQ ID NO: 77949 - RNA, 18 nt, Artificial Sequence
  Synthetic
accauagguacuggccaa

SEQ ID NO: 77950 - RNA, 19 nt, Artificial Sequence
  Synthetic
caccauagguacuggccaa

SEQ ID NO: 77951 - RNA, 20 nt, Artificial Sequence
  Synthetic
acaccauagguacuggccaa

SEQ ID NO: 77952 - RNA, 21 nt, Artificial Sequence
  Synthetic
aacaccauagguacuggccaa

SEQ ID NO: 77953 - RNA, 22 nt, Artificial Sequence
  Synthetic
aaacaccauagguacuggccaa

SEQ ID NO: 77954 - RNA, 23 nt, Artificial Sequence
  Synthetic
aaaacaccauagguacuggccaa

SEQ ID NO: 77955 - RNA, 24 nt, Artificial Sequence
  Synthetic
uaaaacaccauagguacuggccaa

SEQ ID NO: 77956 - RNA, 19 nt, Artificial Sequence
  Synthetic
agugcauaccauaugccaa

SEQ ID NO: 77957 - RNA, 21 nt, Artificial Sequence
  Synthetic
ugagugcauaccauaugccaa

SEQ ID NO: 77958 - RNA, 22 nt, Artificial Sequence
  Synthetic
uugagugcauaccauaugccaa

SEQ ID NO: 77959 - RNA, 23 nt, Artificial Sequence
  Synthetic
auugagugcauaccauaugccaa

SEQ ID NO: 77960 - RNA, 24 nt, Artificial Sequence
  Synthetic
uauugagugcauaccauaugccaa

SEQ ID NO: 77961 - RNA, 18 nt, Artificial Sequence
  Synthetic
cacacucaagccugccaa

SEQ ID NO: 77962 - RNA, 19 nt, Artificial Sequence
  Synthetic
acacacucaagccugccaa

SEQ ID NO: 77963 - RNA, 20 nt, Artificial Sequence
  Synthetic
aacacacucaagccugccaa

SEQ ID NO: 77964 - RNA, 21 nt, Artificial Sequence
  Synthetic
caacacacucaagccugccaa

SEQ ID NO: 77965 - RNA, 22 nt, Artificial Sequence
  Synthetic
acaacacacucaagccugccaa

SEQ ID NO: 77966 - RNA, 23 nt, Artificial Sequence
  Synthetic
cacaacacacucaagccugccaa

SEQ ID NO: 77967 - RNA, 24 nt, Artificial Sequence
  Synthetic
ucacaacacacucaagccugccaa

SEQ ID NO: 77968 - RNA, 18 nt, Artificial Sequence
  Synthetic
uuuacuaaauagugccaa

SEQ ID NO: 77969 - RNA, 19 nt, Artificial Sequence
  Synthetic
auuuacuaaauagugccaa

SEQ ID NO: 77970 - RNA, 20 nt, Artificial Sequence
  Synthetic
aauuuacuaaauagugccaa

SEQ ID NO: 77971 - RNA, 22 nt, Artificial Sequence
  Synthetic
ugaauuuacuaaauagugccaa

SEQ ID NO: 77972 - RNA, 23 nt, Artificial Sequence
  Synthetic
uugaauuuacuaaauagugccaa

SEQ ID NO: 77973 - RNA, 24 nt, Artificial Sequence
  Synthetic
uuugaauuuacuaaauagugccaa

SEQ ID NO: 77974 - RNA, 18 nt, Artificial Sequence
  Synthetic
acaacauccuagugccaa

SEQ ID NO: 77975 - RNA, 19 nt, Artificial Sequence
  Synthetic
aacaacauccuagugccaa

SEQ ID NO: 77976 - RNA, 20 nt, Artificial Sequence
  Synthetic
caacaacauccuagugccaa

SEQ ID NO: 77977 - RNA, 21 nt, Artificial Sequence
  Synthetic
ucaacaacauccuagugccaa

SEQ ID NO: 77978 - RNA, 22 nt, Artificial Sequence
  Synthetic
cucaacaacauccuagugccaa

SEQ ID NO: 77979 - RNA, 23 nt, Artificial Sequence
  Synthetic
acucaacaacauccuagugccaa

SEQ ID NO: 77980 - RNA, 24 nt, Artificial Sequence
  Synthetic
uacucaacaacauccuagugccaa

SEQ ID NO: 77981 - RNA, 19 nt, Artificial Sequence
  Synthetic
ugugacaagauccauccaa

SEQ ID NO: 77982 - RNA, 20 nt, Artificial Sequence
  Synthetic
augugacaagauccauccaa

SEQ ID NO: 77983 - RNA, 21 nt, Artificial Sequence
  Synthetic
caugugacaagauccauccaa

SEQ ID NO: 77984 - RNA, 22 nt, Artificial Sequence
  Synthetic
ccaugugacaagauccauccaa

SEQ ID NO: 77985 - RNA, 23 nt, Artificial Sequence
  Synthetic
accaugugacaagauccauccaa

SEQ ID NO: 77986 - RNA, 18 nt, Artificial Sequence
  Synthetic
uucauuucucugauccaa

SEQ ID NO: 77987 - RNA, 20 nt, Artificial Sequence
  Synthetic
aguucauuucucugauccaa

SEQ ID NO: 77988 - RNA, 21 nt, Artificial Sequence
  Synthetic
uaguucauuucucugauccaa

SEQ ID NO: 77989 - RNA, 22 nt, Artificial Sequence
  Synthetic
cuaguucauuucucugauccaa

SEQ ID NO: 77990 - RNA, 23 nt, Artificial Sequence
  Synthetic
ucuaguucauuucucugauccaa

SEQ ID NO: 77991 - RNA, 19 nt, Artificial Sequence
  Synthetic
ugagcaucuguauauccaa

SEQ ID NO: 77992 - RNA, 20 nt, Artificial Sequence
  Synthetic
augagcaucuguauauccaa

SEQ ID NO: 77993 - RNA, 21 nt, Artificial Sequence
  Synthetic
aaugagcaucuguauauccaa

SEQ ID NO: 77994 - RNA, 22 nt, Artificial Sequence
  Synthetic
caaugagcaucuguauauccaa

SEQ ID NO: 77995 - RNA, 23 nt, Artificial Sequence
  Synthetic
ucaaugagcaucuguauauccaa

SEQ ID NO: 77996 - RNA, 24 nt, Artificial Sequence
  Synthetic
aucaaugagcaucuguauauccaa

SEQ ID NO: 77997 - RNA, 18 nt, Artificial Sequence
  Synthetic
aauaaaggaguucuccaa

SEQ ID NO: 77998 - RNA, 19 nt, Artificial Sequence
  Synthetic
aaauaaaggaguucuccaa

SEQ ID NO: 77999 - RNA, 20 nt, Artificial Sequence
  Synthetic
aaaauaaaggaguucuccaa

SEQ ID NO: 78000 - RNA, 18 nt, Artificial Sequence
  Synthetic
agaagaaauguucuccaa

SEQ ID NO: 78001 - RNA, 19 nt, Artificial Sequence
  Synthetic
uagaagaaauguucuccaa

SEQ ID NO: 78002 - RNA, 20 nt, Artificial Sequence
  Synthetic
auagaagaaauguucuccaa

SEQ ID NO: 78003 - RNA, 21 nt, Artificial Sequence
  Synthetic
uauagaagaaauguucuccaa

SEQ ID NO: 78004 - RNA, 24 nt, Artificial Sequence
  Synthetic
agguauagaagaaauguucuccaa

SEQ ID NO: 78005 - RNA, 18 nt, Artificial Sequence
  Synthetic
agcuauagaaucuuccaa

SEQ ID NO: 78006 - RNA, 19 nt, Artificial Sequence
  Synthetic
uagcuauagaaucuuccaa

SEQ ID NO: 78007 - RNA, 21 nt, Artificial Sequence
  Synthetic
uguagcuauagaaucuuccaa

SEQ ID NO: 78008 - RNA, 22 nt, Artificial Sequence
  Synthetic
cuguagcuauagaaucuuccaa

SEQ ID NO: 78009 - RNA, 23 nt, Artificial Sequence
  Synthetic
ucuguagcuauagaaucuuccaa

SEQ ID NO: 78010 - RNA, 24 nt, Artificial Sequence
  Synthetic
cucuguagcuauagaaucuuccaa

SEQ ID NO: 78011 - RNA, 18 nt, Artificial Sequence
  Synthetic
agaucaaauuguuuccaa

SEQ ID NO: 78012 - RNA, 19 nt, Artificial Sequence
  Synthetic
aagaucaaauuguuuccaa

SEQ ID NO: 78013 - RNA, 20 nt, Artificial Sequence
  Synthetic
aaagaucaaauuguuuccaa

SEQ ID NO: 78014 - RNA, 21 nt, Artificial Sequence
  Synthetic
aaaagaucaaauuguuuccaa

SEQ ID NO: 78015 - RNA, 22 nt, Artificial Sequence
  Synthetic
caaaagaucaaauuguuuccaa

SEQ ID NO: 78016 - RNA, 23 nt, Artificial Sequence
  Synthetic
ucaaaagaucaaauuguuuccaa

SEQ ID NO: 78017 - RNA, 24 nt, Artificial Sequence
  Synthetic
cucaaaagaucaaauuguuuccaa

SEQ ID NO: 78018 - RNA, 18 nt, Artificial Sequence
  Synthetic
caaaaaagaauuuuccaa

SEQ ID NO: 78019 - RNA, 19 nt, Artificial Sequence
  Synthetic
acaaaaaagaauuuuccaa

SEQ ID NO: 78020 - RNA, 20 nt, Artificial Sequence
  Synthetic
cacaaaaaagaauuuuccaa

SEQ ID NO: 78021 - RNA, 21 nt, Artificial Sequence
  Synthetic
acacaaaaaagaauuuuccaa

SEQ ID NO: 78022 - RNA, 22 nt, Artificial Sequence
  Synthetic
aacacaaaaaagaauuuuccaa

SEQ ID NO: 78023 - RNA, 24 nt, Artificial Sequence
  Synthetic
ugaacacaaaaaagaauuuuccaa

SEQ ID NO: 78024 - RNA, 21 nt, Artificial Sequence
  Synthetic
ccuuaauuauuucaaaagcaa

SEQ ID NO: 78025 - RNA, 22 nt, Artificial Sequence
  Synthetic
accuuaauuauuucaaaagcaa

SEQ ID NO: 78026 - RNA, 23 nt, Artificial Sequence
  Synthetic
aaccuuaauuauuucaaaagcaa

SEQ ID NO: 78027 - RNA, 24 nt, Artificial Sequence
  Synthetic
aaaccuuaauuauuucaaaagcaa

SEQ ID NO: 78028 - RNA, 19 nt, Artificial Sequence
  Synthetic
agguuuauuucaaaagcaa

SEQ ID NO: 78029 - RNA, 20 nt, Artificial Sequence
  Synthetic
aagguuuauuucaaaagcaa

SEQ ID NO: 78030 - RNA, 21 nt, Artificial Sequence
  Synthetic
uaagguuuauuucaaaagcaa

SEQ ID NO: 78031 - RNA, 22 nt, Artificial Sequence
  Synthetic
uuaagguuuauuucaaaagcaa

SEQ ID NO: 78032 - RNA, 23 nt, Artificial Sequence
  Synthetic
uuuaagguuuauuucaaaagcaa

SEQ ID NO: 78033 - RNA, 24 nt, Artificial Sequence
  Synthetic
uuuuaagguuuauuucaaaagcaa

SEQ ID NO: 78034 - RNA, 18 nt, Artificial Sequence
  Synthetic
uacauggagcauaagcaa

SEQ ID NO: 78035 - RNA, 19 nt, Artificial Sequence
  Synthetic
auacauggagcauaagcaa

SEQ ID NO: 78036 - RNA, 20 nt, Artificial Sequence
  Synthetic
uauacauggagcauaagcaa

SEQ ID NO: 78037 - RNA, 23 nt, Artificial Sequence
  Synthetic
agguauacauggagcauaagcaa

SEQ ID NO: 78038 - RNA, 24 nt, Artificial Sequence
  Synthetic
aagguauacauggagcauaagcaa

SEQ ID NO: 78039 - RNA, 19 nt, Artificial Sequence
  Synthetic
ugagugggucuuuaagcaa

SEQ ID NO: 78040 - RNA, 20 nt, Artificial Sequence
  Synthetic
augagugggucuuuaagcaa

SEQ ID NO: 78041 - RNA, 21 nt, Artificial Sequence
  Synthetic
caugagugggucuuuaagcaa

SEQ ID NO: 78042 - RNA, 22 nt, Artificial Sequence
  Synthetic
acaugagugggucuuuaagcaa

SEQ ID NO: 78043 - RNA, 23 nt, Artificial Sequence
  Synthetic
aacaugagugggucuuuaagcaa

SEQ ID NO: 78044 - RNA, 24 nt, Artificial Sequence
  Synthetic
aaacaugagugggucuuuaagcaa

SEQ ID NO: 78045 - RNA, 22 nt, Artificial Sequence
  Synthetic
agaucugugaaagcagcagcaa

SEQ ID NO: 78046 - RNA, 23 nt, Artificial Sequence
  Synthetic
cagaucugugaaagcagcagcaa

SEQ ID NO: 78047 - RNA, 24 nt, Artificial Sequence
  Synthetic
ucagaucugugaaagcagcagcaa

SEQ ID NO: 78048 - RNA, 18 nt, Artificial Sequence
  Synthetic
uauuuaucagcucagcaa

SEQ ID NO: 78049 - RNA, 19 nt, Artificial Sequence
  Synthetic
uuauuuaucagcucagcaa

SEQ ID NO: 78050 - RNA, 20 nt, Artificial Sequence
  Synthetic
cuuauuuaucagcucagcaa

SEQ ID NO: 78051 - RNA, 21 nt, Artificial Sequence
  Synthetic
ucuuauuuaucagcucagcaa

SEQ ID NO: 78052 - RNA, 23 nt, Artificial Sequence
  Synthetic
ugucuuauuuaucagcucagcaa

SEQ ID NO: 78053 - RNA, 21 nt, Artificial Sequence
  Synthetic
caauaaaagcuuauucagcaa

SEQ ID NO: 78054 - RNA, 22 nt, Artificial Sequence
  Synthetic
acaauaaaagcuuauucagcaa

SEQ ID NO: 78055 - RNA, 23 nt, Artificial Sequence
  Synthetic
aacaauaaaagcuuauucagcaa

SEQ ID NO: 78056 - RNA, 24 nt, Artificial Sequence
  Synthetic
aaacaauaaaagcuuauucagcaa

SEQ ID NO: 78057 - RNA, 18 nt, Artificial Sequence
  Synthetic
cacguucuaucagagcaa

SEQ ID NO: 78058 - RNA, 19 nt, Artificial Sequence
  Synthetic
ucacguucuaucagagcaa

SEQ ID NO: 78059 - RNA, 20 nt, Artificial Sequence
  Synthetic
uucacguucuaucagagcaa

SEQ ID NO: 78060 - RNA, 22 nt, Artificial Sequence
  Synthetic
uguucacguucuaucagagcaa

SEQ ID NO: 78061 - RNA, 23 nt, Artificial Sequence
  Synthetic
uuguucacguucuaucagagcaa

SEQ ID NO: 78062 - RNA, 24 nt, Artificial Sequence
  Synthetic
uuuguucacguucuaucagagcaa

SEQ ID NO: 78063 - RNA, 18 nt, Artificial Sequence
  Synthetic
aaagaacuuacggagcaa

SEQ ID NO: 78064 - RNA, 20 nt, Artificial Sequence
  Synthetic
agaaagaacuuacggagcaa

SEQ ID NO: 78065 - RNA, 21 nt, Artificial Sequence
  Synthetic
cagaaagaacuuacggagcaa

SEQ ID NO: 78066 - RNA, 22 nt, Artificial Sequence
  Synthetic
ucagaaagaacuuacggagcaa

SEQ ID NO: 78067 - RNA, 23 nt, Artificial Sequence
  Synthetic
cucagaaagaacuuacggagcaa

SEQ ID NO: 78068 - RNA, 24 nt, Artificial Sequence
  Synthetic
acucagaaagaacuuacggagcaa

SEQ ID NO: 78069 - RNA, 21 nt, Artificial Sequence
  Synthetic
ucacagcaagauaaugagcaa

SEQ ID NO: 78070 - RNA, 22 nt, Artificial Sequence
  Synthetic
uucacagcaagauaaugagcaa

SEQ ID NO: 78071 - RNA, 23 nt, Artificial Sequence
  Synthetic
cuucacagcaagauaaugagcaa

SEQ ID NO: 78072 - RNA, 24 nt, Artificial Sequence
  Synthetic
ucuucacagcaagauaaugagcaa

SEQ ID NO: 78073 - RNA, 19 nt, Artificial Sequence
  Synthetic
ugccugcaagacugagcaa

SEQ ID NO: 78074 - RNA, 20 nt, Artificial Sequence
  Synthetic
uugccugcaagacugagcaa

SEQ ID NO: 78075 - RNA, 21 nt, Artificial Sequence
  Synthetic
uuugccugcaagacugagcaa

SEQ ID NO: 78076 - RNA, 22 nt, Artificial Sequence
  Synthetic
auuugccugcaagacugagcaa

SEQ ID NO: 78077 - RNA, 23 nt, Artificial Sequence
  Synthetic
cauuugccugcaagacugagcaa

SEQ ID NO: 78078 - RNA, 24 nt, Artificial Sequence
  Synthetic
ccauuugccugcaagacugagcaa

SEQ ID NO: 78079 - RNA, 18 nt, Artificial Sequence
  Synthetic
cacagcugagucuagcaa

SEQ ID NO: 78080 - RNA, 20 nt, Artificial Sequence
  Synthetic
agcacagcugagucuagcaa

SEQ ID NO: 78081 - RNA, 22 nt, Artificial Sequence
  Synthetic
ugagcacagcugagucuagcaa

SEQ ID NO: 78082 - RNA, 23 nt, Artificial Sequence
  Synthetic
augagcacagcugagucuagcaa

SEQ ID NO: 78083 - RNA, 24 nt, Artificial Sequence
  Synthetic
aaugagcacagcugagucuagcaa

SEQ ID NO: 78084 - RNA, 18 nt, Artificial Sequence
  Synthetic
aggaauugaggaaggcaa

SEQ ID NO: 78085 - RNA, 19 nt, Artificial Sequence
  Synthetic
uaggaauugaggaaggcaa

SEQ ID NO: 78086 - RNA, 20 nt, Artificial Sequence
  Synthetic
auaggaauugaggaaggcaa

SEQ ID NO: 78087 - RNA, 23 nt, Artificial Sequence
  Synthetic
aggauaggaauugaggaaggcaa

SEQ ID NO: 78088 - RNA, 24 nt, Artificial Sequence
  Synthetic
aaggauaggaauugaggaaggcaa

SEQ ID NO: 78089 - RNA, 18 nt, Artificial Sequence
  Synthetic
ugcccuauuuccaggcaa

SEQ ID NO: 78090 - RNA, 19 nt, Artificial Sequence
  Synthetic
augcccuauuuccaggcaa

SEQ ID NO: 78091 - RNA, 20 nt, Artificial Sequence
  Synthetic
caugcccuauuuccaggcaa

SEQ ID NO: 78092 - RNA, 21 nt, Artificial Sequence
  Synthetic
ccaugcccuauuuccaggcaa

SEQ ID NO: 78093 - RNA, 22 nt, Artificial Sequence
  Synthetic
uccaugcccuauuuccaggcaa

SEQ ID NO: 78094 - RNA, 23 nt, Artificial Sequence
  Synthetic
uuccaugcccuauuuccaggcaa

SEQ ID NO: 78095 - RNA, 24 nt, Artificial Sequence
  Synthetic
uuuccaugcccuauuuccaggcaa

SEQ ID NO: 78096 - RNA, 18 nt, Artificial Sequence
  Synthetic
auaucuaucuucaggcaa

SEQ ID NO: 78097 - RNA, 19 nt, Artificial Sequence
  Synthetic
aauaucuaucuucaggcaa

SEQ ID NO: 78098 - RNA, 21 nt, Artificial Sequence
  Synthetic
ugaauaucuaucuucaggcaa

SEQ ID NO: 78099 - RNA, 22 nt, Artificial Sequence
  Synthetic
augaauaucuaucuucaggcaa

SEQ ID NO: 78100 - RNA, 23 nt, Artificial Sequence
  Synthetic
caugaauaucuaucuucaggcaa

SEQ ID NO: 78101 - RNA, 24 nt, Artificial Sequence
  Synthetic
acaugaauaucuaucuucaggcaa

SEQ ID NO: 78102 - RNA, 18 nt, Artificial Sequence
  Synthetic
caagaacauuagaggcaa

SEQ ID NO: 78103 - RNA, 21 nt, Artificial Sequence
  Synthetic
aggcaagaacauuagaggcaa

SEQ ID NO: 78104 - RNA, 23 nt, Artificial Sequence
  Synthetic
agaggcaagaacauuagaggcaa

SEQ ID NO: 78105 - RNA, 24 nt, Artificial Sequence
  Synthetic
uagaggcaagaacauuagaggcaa

SEQ ID NO: 78106 - RNA, 19 nt, Artificial Sequence
  Synthetic
aggugccaugaugaggcaa

SEQ ID NO: 78107 - RNA, 20 nt, Artificial Sequence
  Synthetic
caggugccaugaugaggcaa

SEQ ID NO: 78108 - RNA, 22 nt, Artificial Sequence
  Synthetic
agcaggugccaugaugaggcaa

SEQ ID NO: 78109 - RNA, 23 nt, Artificial Sequence
  Synthetic
cagcaggugccaugaugaggcaa

SEQ ID NO: 78110 - RNA, 24 nt, Artificial Sequence
  Synthetic
acagcaggugccaugaugaggcaa

SEQ ID NO: 78111 - RNA, 18 nt, Artificial Sequence
  Synthetic
auuucaugcuguaggcaa

SEQ ID NO: 78112 - RNA, 20 nt, Artificial Sequence
  Synthetic
cgauuucaugcuguaggcaa

SEQ ID NO: 78113 - RNA, 21 nt, Artificial Sequence
  Synthetic
acgauuucaugcuguaggcaa

SEQ ID NO: 78114 - RNA, 22 nt, Artificial Sequence
  Synthetic
uacgauuucaugcuguaggcaa

SEQ ID NO: 78115 - RNA, 23 nt, Artificial Sequence
  Synthetic
cuacgauuucaugcuguaggcaa

SEQ ID NO: 78116 - RNA, 24 nt, Artificial Sequence
  Synthetic
ucuacgauuucaugcuguaggcaa

SEQ ID NO: 78117 - RNA, 18 nt, Artificial Sequence
  Synthetic
agucaauaaaaugggcaa

SEQ ID NO: 78118 - RNA, 19 nt, Artificial Sequence
  Synthetic
cagucaauaaaaugggcaa

SEQ ID NO: 78119 - RNA, 21 nt, Artificial Sequence
  Synthetic
agcagucaauaaaaugggcaa

SEQ ID NO: 78120 - RNA, 22 nt, Artificial Sequence
  Synthetic
uagcagucaauaaaaugggcaa

SEQ ID NO: 78121 - RNA, 23 nt, Artificial Sequence
  Synthetic
auagcagucaauaaaaugggcaa

SEQ ID NO: 78122 - RNA, 24 nt, Artificial Sequence
  Synthetic
uauagcagucaauaaaaugggcaa

SEQ ID NO: 78123 - RNA, 18 nt, Artificial Sequence
  Synthetic
aguuuaaaccuugggcaa

SEQ ID NO: 78124 - RNA, 19 nt, Artificial Sequence
  Synthetic
uaguuuaaaccuugggcaa

SEQ ID NO: 78125 - RNA, 21 nt, Artificial Sequence
  Synthetic
uguaguuuaaaccuugggcaa

SEQ ID NO: 78126 - RNA, 22 nt, Artificial Sequence
  Synthetic
auguaguuuaaaccuugggcaa

SEQ ID NO: 78127 - RNA, 23 nt, Artificial Sequence
  Synthetic
aauguaguuuaaaccuugggcaa

SEQ ID NO: 78128 - RNA, 24 nt, Artificial Sequence
  Synthetic
aaauguaguuuaaaccuugggcaa

SEQ ID NO: 78129 - RNA, 18 nt, Artificial Sequence
  Synthetic
aaacaucuugaauggcaa

SEQ ID NO: 78130 - RNA, 19 nt, Artificial Sequence
  Synthetic
caaacaucuugaauggcaa

SEQ ID NO: 78131 - RNA, 20 nt, Artificial Sequence
  Synthetic
ucaaacaucuugaauggcaa

SEQ ID NO: 78132 - RNA, 21 nt, Artificial Sequence
  Synthetic
aucaaacaucuugaauggcaa

SEQ ID NO: 78133 - RNA, 22 nt, Artificial Sequence
  Synthetic
aaucaaacaucuugaauggcaa

SEQ ID NO: 78134 - RNA, 23 nt, Artificial Sequence
  Synthetic
aaaucaaacaucuugaauggcaa

SEQ ID NO: 78135 - RNA, 24 nt, Artificial Sequence
  Synthetic
caaaucaaacaucuugaauggcaa

SEQ ID NO: 78136 - RNA, 18 nt, Artificial Sequence
  Synthetic
cugguaacaaaaaugcaa

SEQ ID NO: 78137 - RNA, 19 nt, Artificial Sequence
  Synthetic
acugguaacaaaaaugcaa

SEQ ID NO: 78138 - RNA, 21 nt, Artificial Sequence
  Synthetic
ugacugguaacaaaaaugcaa

SEQ ID NO: 78139 - RNA, 23 nt, Artificial Sequence
  Synthetic
agugacugguaacaaaaaugcaa

SEQ ID NO: 78140 - RNA, 24 nt, Artificial Sequence
  Synthetic
aagugacugguaacaaaaaugcaa

SEQ ID NO: 78141 - RNA, 18 nt, Artificial Sequence
  Synthetic
acucguuuaauuaugcaa

SEQ ID NO: 78142 - RNA, 19 nt, Artificial Sequence
  Synthetic
uacucguuuaauuaugcaa

SEQ ID NO: 78143 - RNA, 20 nt, Artificial Sequence
  Synthetic
uuacucguuuaauuaugcaa

SEQ ID NO: 78144 - RNA, 21 nt, Artificial Sequence
  Synthetic
uuuacucguuuaauuaugcaa

SEQ ID NO: 78145 - RNA, 22 nt, Artificial Sequence
  Synthetic
cuuuacucguuuaauuaugcaa

SEQ ID NO: 78146 - RNA, 23 nt, Artificial Sequence
  Synthetic
ucuuuacucguuuaauuaugcaa

SEQ ID NO: 78147 - RNA, 24 nt, Artificial Sequence
  Synthetic
cucuuuacucguuuaauuaugcaa

SEQ ID NO: 78148 - RNA, 21 nt, Artificial Sequence
  Synthetic
aaaaugaaaacucuucugcaa

SEQ ID NO: 78149 - RNA, 22 nt, Artificial Sequence
  Synthetic
aaaaaugaaaacucuucugcaa

SEQ ID NO: 78150 - RNA, 23 nt, Artificial Sequence
  Synthetic
uaaaaaugaaaacucuucugcaa

SEQ ID NO: 78151 - RNA, 24 nt, Artificial Sequence
  Synthetic
uuaaaaaugaaaacucuucugcaa

SEQ ID NO: 78152 - RNA, 18 nt, Artificial Sequence
  Synthetic
ugacuuuucucugugcaa

SEQ ID NO: 78153 - RNA, 19 nt, Artificial Sequence
  Synthetic
augacuuuucucugugcaa

SEQ ID NO: 78154 - RNA, 20 nt, Artificial Sequence
  Synthetic
aaugacuuuucucugugcaa

SEQ ID NO: 78155 - RNA, 22 nt, Artificial Sequence
  Synthetic
ugaaugacuuuucucugugcaa

SEQ ID NO: 78156 - RNA, 24 nt, Artificial Sequence
  Synthetic
ugugaaugacuuuucucugugcaa

SEQ ID NO: 78157 - RNA, 18 nt, Artificial Sequence
  Synthetic
uagucauuuacauugcaa

SEQ ID NO: 78158 - RNA, 19 nt, Artificial Sequence
  Synthetic
auagucauuuacauugcaa

SEQ ID NO: 78159 - RNA, 21 nt, Artificial Sequence
  Synthetic
ugauagucauuuacauugcaa

SEQ ID NO: 78160 - RNA, 22 nt, Artificial Sequence
  Synthetic
augauagucauuuacauugcaa

SEQ ID NO: 78161 - RNA, 23 nt, Artificial Sequence
  Synthetic
caugauagucauuuacauugcaa

SEQ ID NO: 78162 - RNA, 24 nt, Artificial Sequence
  Synthetic
ucaugauagucauuuacauugcaa

SEQ ID NO: 78163 - RNA, 18 nt, Artificial Sequence
  Synthetic
agaaguaguuuauugcaa

SEQ ID NO: 78164 - RNA, 19 nt, Artificial Sequence
  Synthetic
cagaaguaguuuauugcaa

SEQ ID NO: 78165 - RNA, 21 nt, Artificial Sequence
  Synthetic
ugcagaaguaguuuauugcaa

SEQ ID NO: 78166 - RNA, 22 nt, Artificial Sequence
  Synthetic
augcagaaguaguuuauugcaa

SEQ ID NO: 78167 - RNA, 23 nt, Artificial Sequence
  Synthetic
uaugcagaaguaguuuauugcaa

SEQ ID NO: 78168 - RNA, 24 nt, Artificial Sequence
  Synthetic
uuaugcagaaguaguuuauugcaa

SEQ ID NO: 78169 - RNA, 21 nt, Artificial Sequence
  Synthetic
aagagcacagaaaaaaaucaa

SEQ ID NO: 78170 - RNA, 24 nt, Artificial Sequence
  Synthetic
aggaagagcacagaaaaaaaucaa

SEQ ID NO: 78171 - RNA, 18 nt, Artificial Sequence
  Synthetic
auaaacucaagcaaucaa

SEQ ID NO: 78172 - RNA, 19 nt, Artificial Sequence
  Synthetic
aauaaacucaagcaaucaa

SEQ ID NO: 78173 - RNA, 20 nt, Artificial Sequence
  Synthetic
uaauaaacucaagcaaucaa

SEQ ID NO: 78174 - RNA, 21 nt, Artificial Sequence
  Synthetic
cuaauaaacucaagcaaucaa

SEQ ID NO: 78175 - RNA, 22 nt, Artificial Sequence
  Synthetic
acuaauaaacucaagcaaucaa

SEQ ID NO: 78176 - RNA, 23 nt, Artificial Sequence
  Synthetic
aacuaauaaacucaagcaaucaa

SEQ ID NO: 78177 - RNA, 24 nt, Artificial Sequence
  Synthetic
uaacuaauaaacucaagcaaucaa

SEQ ID NO: 78178 - RNA, 18 nt, Artificial Sequence
  Synthetic
agcacacagcagaaucaa

SEQ ID NO: 78179 - RNA, 20 nt, Artificial Sequence
  Synthetic
agagcacacagcagaaucaa

SEQ ID NO: 78180 - RNA, 21 nt, Artificial Sequence
  Synthetic
uagagcacacagcagaaucaa

SEQ ID NO: 78181 - RNA, 22 nt, Artificial Sequence
  Synthetic
cuagagcacacagcagaaucaa

SEQ ID NO: 78182 - RNA, 23 nt, Artificial Sequence
  Synthetic
acuagagcacacagcagaaucaa

SEQ ID NO: 78183 - RNA, 24 nt, Artificial Sequence
  Synthetic
aacuagagcacacagcagaaucaa

SEQ ID NO: 78184 - RNA, 18 nt, Artificial Sequence
  Synthetic
auauccaaaguuaaucaa

SEQ ID NO: 78185 - RNA, 19 nt, Artificial Sequence
  Synthetic
uauauccaaaguuaaucaa

SEQ ID NO: 78186 - RNA, 20 nt, Artificial Sequence
  Synthetic
auauauccaaaguuaaucaa

SEQ ID NO: 78187 - RNA, 21 nt, Artificial Sequence
  Synthetic
uauauauccaaaguuaaucaa

SEQ ID NO: 78188 - RNA, 22 nt, Artificial Sequence
  Synthetic
uuauauauccaaaguuaaucaa

SEQ ID NO: 78189 - RNA, 23 nt, Artificial Sequence
  Synthetic
uuuauauauccaaaguuaaucaa

SEQ ID NO: 78190 - RNA, 24 nt, Artificial Sequence
  Synthetic
uuuuauauauccaaaguuaaucaa

SEQ ID NO: 78191 - RNA, 21 nt, Artificial Sequence
  Synthetic
uuuguuuuguuguuuaaucaa

SEQ ID NO: 78192 - RNA, 22 nt, Artificial Sequence
  Synthetic
auuuguuuuguuguuuaaucaa

SEQ ID NO: 78193 - RNA, 23 nt, Artificial Sequence
  Synthetic
aauuuguuuuguuguuuaaucaa

SEQ ID NO: 78194 - RNA, 24 nt, Artificial Sequence
  Synthetic
uaauuuguuuuguuguuuaaucaa

SEQ ID NO: 78195 - RNA, 18 nt, Artificial Sequence
  Synthetic
uucaacaaaaaacaucaa

SEQ ID NO: 78196 - RNA, 19 nt, Artificial Sequence
  Synthetic
cuucaacaaaaaacaucaa

SEQ ID NO: 78197 - RNA, 20 nt, Artificial Sequence
  Synthetic
ucuucaacaaaaaacaucaa

SEQ ID NO: 78198 - RNA, 19 nt, Artificial Sequence
  Synthetic
ugauuccaggacacaucaa

SEQ ID NO: 78199 - RNA, 21 nt, Artificial Sequence
  Synthetic
ugugauuccaggacacaucaa

SEQ ID NO: 78200 - RNA, 22 nt, Artificial Sequence
  Synthetic
augugauuccaggacacaucaa

SEQ ID NO: 78201 - RNA, 18 nt, Artificial Sequence
  Synthetic
caaagugacaaucaucaa

SEQ ID NO: 78202 - RNA, 19 nt, Artificial Sequence
  Synthetic
acaaagugacaaucaucaa

SEQ ID NO: 78203 - RNA, 21 nt, Artificial Sequence
  Synthetic
ugacaaagugacaaucaucaa

SEQ ID NO: 78204 - RNA, 23 nt, Artificial Sequence
  Synthetic
agugacaaagugacaaucaucaa

SEQ ID NO: 78205 - RNA, 24 nt, Artificial Sequence
  Synthetic
cagugacaaagugacaaucaucaa

SEQ ID NO: 78206 - RNA, 18 nt, Artificial Sequence
  Synthetic
uugauuaacacugaucaa

SEQ ID NO: 78207 - RNA, 19 nt, Artificial Sequence
  Synthetic
uuugauuaacacugaucaa

SEQ ID NO: 78208 - RNA, 20 nt, Artificial Sequence
  Synthetic
cuuugauuaacacugaucaa

SEQ ID NO: 78209 - RNA, 21 nt, Artificial Sequence
  Synthetic
acuuugauuaacacugaucaa

SEQ ID NO: 78210 - RNA, 22 nt, Artificial Sequence
  Synthetic
uacuuugauuaacacugaucaa

SEQ ID NO: 78211 - RNA, 23 nt, Artificial Sequence
  Synthetic
uuacuuugauuaacacugaucaa

SEQ ID NO: 78212 - RNA, 24 nt, Artificial Sequence
  Synthetic
cuuacuuugauuaacacugaucaa

SEQ ID NO: 78213 - RNA, 18 nt, Artificial Sequence
  Synthetic
ugcaaggagaaauaucaa

SEQ ID NO: 78214 - RNA, 19 nt, Artificial Sequence
  Synthetic
augcaaggagaaauaucaa

SEQ ID NO: 78215 - RNA, 20 nt, Artificial Sequence
  Synthetic
aaugcaaggagaaauaucaa

SEQ ID NO: 78216 - RNA, 21 nt, Artificial Sequence
  Synthetic
caaugcaaggagaaauaucaa

SEQ ID NO: 78217 - RNA, 22 nt, Artificial Sequence
  Synthetic
ucaaugcaaggagaaauaucaa

SEQ ID NO: 78218 - RNA, 23 nt, Artificial Sequence
  Synthetic
aucaaugcaaggagaaauaucaa

SEQ ID NO: 78219 - RNA, 24 nt, Artificial Sequence
  Synthetic
uaucaaugcaaggagaaauaucaa

SEQ ID NO: 78220 - RNA, 18 nt, Artificial Sequence
  Synthetic
acauaguugcuauaucaa

SEQ ID NO: 78221 - RNA, 19 nt, Artificial Sequence
  Synthetic
aacauaguugcuauaucaa

SEQ ID NO: 78222 - RNA, 20 nt, Artificial Sequence
  Synthetic
aaacauaguugcuauaucaa

SEQ ID NO: 78223 - RNA, 21 nt, Artificial Sequence
  Synthetic
aaaacauaguugcuauaucaa

SEQ ID NO: 78224 - RNA, 24 nt, Artificial Sequence
  Synthetic
cggaaaacauaguugcuauaucaa

SEQ ID NO: 78225 - RNA, 18 nt, Artificial Sequence
  Synthetic
cugguagauguauaucaa

SEQ ID NO: 78226 - RNA, 20 nt, Artificial Sequence
  Synthetic
ugcugguagauguauaucaa

SEQ ID NO: 78227 - RNA, 22 nt, Artificial Sequence
  Synthetic
ugugcugguagauguauaucaa

SEQ ID NO: 78228 - RNA, 18 nt, Artificial Sequence
  Synthetic
aauacacugugguaucaa

SEQ ID NO: 78229 - RNA, 19 nt, Artificial Sequence
  Synthetic
aaauacacugugguaucaa

SEQ ID NO: 78230 - RNA, 20 nt, Artificial Sequence
  Synthetic
uaaauacacugugguaucaa

SEQ ID NO: 78231 - RNA, 22 nt, Artificial Sequence
  Synthetic
uguaaauacacugugguaucaa

SEQ ID NO: 78232 - RNA, 24 nt, Artificial Sequence
  Synthetic
uguguaaauacacugugguaucaa

SEQ ID NO: 78233 - RNA, 18 nt, Artificial Sequence
  Synthetic
caagagcuccaaacucaa

SEQ ID NO: 78234 - RNA, 19 nt, Artificial Sequence
  Synthetic
acaagagcuccaaacucaa

SEQ ID NO: 78235 - RNA, 20 nt, Artificial Sequence
  Synthetic
cacaagagcuccaaacucaa

SEQ ID NO: 78236 - RNA, 22 nt, Artificial Sequence
  Synthetic
cgcacaagagcuccaaacucaa

SEQ ID NO: 78237 - RNA, 23 nt, Artificial Sequence
  Synthetic
ccgcacaagagcuccaaacucaa

SEQ ID NO: 78238 - RNA, 24 nt, Artificial Sequence
  Synthetic
uccgcacaagagcuccaaacucaa

SEQ ID NO: 78239 - RNA, 19 nt, Artificial Sequence
  Synthetic
ugucuaggagucaccucaa

SEQ ID NO: 78240 - RNA, 20 nt, Artificial Sequence
  Synthetic
uugucuaggagucaccucaa

SEQ ID NO: 78241 - RNA, 21 nt, Artificial Sequence
  Synthetic
auugucuaggagucaccucaa

SEQ ID NO: 78242 - RNA, 22 nt, Artificial Sequence
  Synthetic
cauugucuaggagucaccucaa

SEQ ID NO: 78243 - RNA, 23 nt, Artificial Sequence
  Synthetic
ccauugucuaggagucaccucaa

SEQ ID NO: 78244 - RNA, 24 nt, Artificial Sequence
  Synthetic
cccauugucuaggagucaccucaa

SEQ ID NO: 78245 - RNA, 18 nt, Artificial Sequence
  Synthetic
aggauguguuccccucaa

SEQ ID NO: 78246 - RNA, 19 nt, Artificial Sequence
  Synthetic
uaggauguguuccccucaa

SEQ ID NO: 78247 - RNA, 20 nt, Artificial Sequence
  Synthetic
cuaggauguguuccccucaa

SEQ ID NO: 78248 - RNA, 21 nt, Artificial Sequence
  Synthetic
acuaggauguguuccccucaa

SEQ ID NO: 78249 - RNA, 23 nt, Artificial Sequence
  Synthetic
agacuaggauguguuccccucaa

SEQ ID NO: 78250 - RNA, 18 nt, Artificial Sequence
  Synthetic
ugaaugguaaugccucaa

SEQ ID NO: 78251 - RNA, 19 nt, Artificial Sequence
  Synthetic
cugaaugguaaugccucaa

SEQ ID NO: 78252 - RNA, 20 nt, Artificial Sequence
  Synthetic
ccugaaugguaaugccucaa

SEQ ID NO: 78253 - RNA, 21 nt, Artificial Sequence
  Synthetic
uccugaaugguaaugccucaa

SEQ ID NO: 78254 - RNA, 23 nt, Artificial Sequence
  Synthetic
uguccugaaugguaaugccucaa

SEQ ID NO: 78255 - RNA, 24 nt, Artificial Sequence
  Synthetic
auguccugaaugguaaugccucaa

SEQ ID NO: 78256 - RNA, 18 nt, Artificial Sequence
  Synthetic
ugcaugaagaaagcucaa

SEQ ID NO: 78257 - RNA, 19 nt, Artificial Sequence
  Synthetic
augcaugaagaaagcucaa

SEQ ID NO: 78258 - RNA, 20 nt, Artificial Sequence
  Synthetic
aaugcaugaagaaagcucaa

SEQ ID NO: 78259 - RNA, 21 nt, Artificial Sequence
  Synthetic
caaugcaugaagaaagcucaa

SEQ ID NO: 78260 - RNA, 22 nt, Artificial Sequence
  Synthetic
ucaaugcaugaagaaagcucaa

SEQ ID NO: 78261 - RNA, 23 nt, Artificial Sequence
  Synthetic
uucaaugcaugaagaaagcucaa

SEQ ID NO: 78262 - RNA, 24 nt, Artificial Sequence
  Synthetic
auucaaugcaugaagaaagcucaa

SEQ ID NO: 78263 - RNA, 18 nt, Artificial Sequence
  Synthetic
aaaagguuauacgcucaa

SEQ ID NO: 78264 - RNA, 19 nt, Artificial Sequence
  Synthetic
caaaagguuauacgcucaa

SEQ ID NO: 78265 - RNA, 20 nt, Artificial Sequence
  Synthetic
ucaaaagguuauacgcucaa

SEQ ID NO: 78266 - RNA, 21 nt, Artificial Sequence
  Synthetic
aucaaaagguuauacgcucaa

SEQ ID NO: 78267 - RNA, 23 nt, Artificial Sequence
  Synthetic
ugaucaaaagguuauacgcucaa

SEQ ID NO: 78268 - RNA, 24 nt, Artificial Sequence
  Synthetic
uugaucaaaagguuauacgcucaa

SEQ ID NO: 78269 - RNA, 18 nt, Artificial Sequence
  Synthetic
uguccuaaauuggcucaa

SEQ ID NO: 78270 - RNA, 19 nt, Artificial Sequence
  Synthetic
auguccuaaauuggcucaa

SEQ ID NO: 78271 - RNA, 20 nt, Artificial Sequence
  Synthetic
cauguccuaaauuggcucaa

SEQ ID NO: 78272 - RNA, 21 nt, Artificial Sequence
  Synthetic
ucauguccuaaauuggcucaa

SEQ ID NO: 78273 - RNA, 22 nt, Artificial Sequence
  Synthetic
cucauguccuaaauuggcucaa

SEQ ID NO: 78274 - RNA, 23 nt, Artificial Sequence
  Synthetic
ucucauguccuaaauuggcucaa

SEQ ID NO: 78275 - RNA, 18 nt, Artificial Sequence
  Synthetic
ucaggguuucauucucaa

SEQ ID NO: 78276 - RNA, 20 nt, Artificial Sequence
  Synthetic
agucaggguuucauucucaa

SEQ ID NO: 78277 - RNA, 23 nt, Artificial Sequence
  Synthetic
aggagucaggguuucauucucaa

SEQ ID NO: 78278 - RNA, 24 nt, Artificial Sequence
  Synthetic
aaggagucaggguuucauucucaa

SEQ ID NO: 78279 - RNA, 18 nt, Artificial Sequence
  Synthetic
auuugauuaucuucucaa

SEQ ID NO: 78280 - RNA, 19 nt, Artificial Sequence
  Synthetic
cauuugauuaucuucucaa

SEQ ID NO: 78281 - RNA, 21 nt, Artificial Sequence
  Synthetic
agcauuugauuaucuucucaa

SEQ ID NO: 78282 - RNA, 22 nt, Artificial Sequence
  Synthetic
aagcauuugauuaucuucucaa

SEQ ID NO: 78283 - RNA, 24 nt, Artificial Sequence
  Synthetic
ugaagcauuugauuaucuucucaa

SEQ ID NO: 78284 - RNA, 18 nt, Artificial Sequence
  Synthetic
agaaagcagaaaagucaa

SEQ ID NO: 78285 - RNA, 20 nt, Artificial Sequence
  Synthetic
ugagaaagcagaaaagucaa

SEQ ID NO: 78286 - RNA, 21 nt, Artificial Sequence
  Synthetic
uugagaaagcagaaaagucaa

SEQ ID NO: 78287 - RNA, 22 nt, Artificial Sequence
  Synthetic
cuugagaaagcagaaaagucaa

SEQ ID NO: 78288 - RNA, 23 nt, Artificial Sequence
  Synthetic
ccuugagaaagcagaaaagucaa

SEQ ID NO: 78289 - RNA, 24 nt, Artificial Sequence
  Synthetic
uccuugagaaagcagaaaagucaa

SEQ ID NO: 78290 - RNA, 18 nt, Artificial Sequence
  Synthetic
cuagguguuagaagucaa

SEQ ID NO: 78291 - RNA, 19 nt, Artificial Sequence
  Synthetic
ucuagguguuagaagucaa

SEQ ID NO: 78292 - RNA, 20 nt, Artificial Sequence
  Synthetic
aucuagguguuagaagucaa

SEQ ID NO: 78293 - RNA, 21 nt, Artificial Sequence
  Synthetic
aaucuagguguuagaagucaa

SEQ ID NO: 78294 - RNA, 22 nt, Artificial Sequence
  Synthetic
uaaucuagguguuagaagucaa

SEQ ID NO: 78295 - RNA, 23 nt, Artificial Sequence
  Synthetic
cuaaucuagguguuagaagucaa

SEQ ID NO: 78296 - RNA, 24 nt, Artificial Sequence
  Synthetic
acuaaucuagguguuagaagucaa

SEQ ID NO: 78297 - RNA, 18 nt, Artificial Sequence
  Synthetic
uaaagaacaagcagucaa

SEQ ID NO: 78298 - RNA, 19 nt, Artificial Sequence
  Synthetic
uuaaagaacaagcagucaa

SEQ ID NO: 78299 - RNA, 20 nt, Artificial Sequence
  Synthetic
auuaaagaacaagcagucaa

SEQ ID NO: 78300 - RNA, 21 nt, Artificial Sequence
  Synthetic
uauuaaagaacaagcagucaa

SEQ ID NO: 78301 - RNA, 22 nt, Artificial Sequence
  Synthetic
uuauuaaagaacaagcagucaa

SEQ ID NO: 78302 - RNA, 23 nt, Artificial Sequence
  Synthetic
uuuauuaaagaacaagcagucaa

SEQ ID NO: 78303 - RNA, 24 nt, Artificial Sequence
  Synthetic
uuuuauuaaagaacaagcagucaa

SEQ ID NO: 78304 - RNA, 18 nt, Artificial Sequence
  Synthetic
cauucaacauuacgucaa

SEQ ID NO: 78305 - RNA, 19 nt, Artificial Sequence
  Synthetic
ucauucaacauuacgucaa

SEQ ID NO: 78306 - RNA, 20 nt, Artificial Sequence
  Synthetic
uucauucaacauuacgucaa

SEQ ID NO: 78307 - RNA, 21 nt, Artificial Sequence
  Synthetic
auucauucaacauuacgucaa

SEQ ID NO: 78308 - RNA, 22 nt, Artificial Sequence
  Synthetic
uauucauucaacauuacgucaa

SEQ ID NO: 78309 - RNA, 23 nt, Artificial Sequence
  Synthetic
uuauucauucaacauuacgucaa

SEQ ID NO: 78310 - RNA, 24 nt, Artificial Sequence
  Synthetic
uuuauucauucaacauuacgucaa

SEQ ID NO: 78311 - RNA, 21 nt, Artificial Sequence
  Synthetic
acuguggcccagagaggucaa

SEQ ID NO: 78312 - RNA, 22 nt, Artificial Sequence
  Synthetic
aacuguggcccagagaggucaa

SEQ ID NO: 78313 - RNA, 23 nt, Artificial Sequence
  Synthetic
aaacuguggcccagagaggucaa

SEQ ID NO: 78314 - RNA, 24 nt, Artificial Sequence
  Synthetic
aaaacuguggcccagagaggucaa

SEQ ID NO: 78315 - RNA, 18 nt, Artificial Sequence
  Synthetic
uuugccaccuuuggucaa

SEQ ID NO: 78316 - RNA, 19 nt, Artificial Sequence
  Synthetic
auuugccaccuuuggucaa

SEQ ID NO: 78317 - RNA, 20 nt, Artificial Sequence
  Synthetic
uauuugccaccuuuggucaa

SEQ ID NO: 78318 - RNA, 22 nt, Artificial Sequence
  Synthetic
uguauuugccaccuuuggucaa

SEQ ID NO: 78319 - RNA, 23 nt, Artificial Sequence
  Synthetic
uuguauuugccaccuuuggucaa

SEQ ID NO: 78320 - RNA, 18 nt, Artificial Sequence
  Synthetic
aaagguagaaccugucaa

SEQ ID NO: 78321 - RNA, 19 nt, Artificial Sequence
  Synthetic
uaaagguagaaccugucaa

SEQ ID NO: 78322 - RNA, 20 nt, Artificial Sequence
  Synthetic
auaaagguagaaccugucaa

SEQ ID NO: 78323 - RNA, 23 nt, Artificial Sequence
  Synthetic
aggauaaagguagaaccugucaa

SEQ ID NO: 78324 - RNA, 24 nt, Artificial Sequence
  Synthetic
caggauaaagguagaaccugucaa

SEQ ID NO: 78325 - RNA, 21 nt, Artificial Sequence
  Synthetic
ccuucaauaaaugucugucaa

SEQ ID NO: 78326 - RNA, 22 nt, Artificial Sequence
  Synthetic
accuucaauaaaugucugucaa

SEQ ID NO: 78327 - RNA, 23 nt, Artificial Sequence
  Synthetic
uaccuucaauaaaugucugucaa

SEQ ID NO: 78328 - RNA, 24 nt, Artificial Sequence
  Synthetic
auaccuucaauaaaugucugucaa

SEQ ID NO: 78329 - RNA, 18 nt, Artificial Sequence
  Synthetic
aaauauucauugugucaa

SEQ ID NO: 78330 - RNA, 19 nt, Artificial Sequence
  Synthetic
caaauauucauugugucaa

SEQ ID NO: 78331 - RNA, 20 nt, Artificial Sequence
  Synthetic
ccaaauauucauugugucaa

SEQ ID NO: 78332 - RNA, 22 nt, Artificial Sequence
  Synthetic
ugccaaauauucauugugucaa

SEQ ID NO: 78333 - RNA, 23 nt, Artificial Sequence
  Synthetic
cugccaaauauucauugugucaa

SEQ ID NO: 78334 - RNA, 24 nt, Artificial Sequence
  Synthetic
acugccaaauauucauugugucaa

SEQ ID NO: 78335 - RNA, 18 nt, Artificial Sequence
  Synthetic
cagaaggcauuuugucaa

SEQ ID NO: 78336 - RNA, 19 nt, Artificial Sequence
  Synthetic
ucagaaggcauuuugucaa

SEQ ID NO: 78337 - RNA, 20 nt, Artificial Sequence
  Synthetic
uucagaaggcauuuugucaa

SEQ ID NO: 78338 - RNA, 21 nt, Artificial Sequence
  Synthetic
uuucagaaggcauuuugucaa

SEQ ID NO: 78339 - RNA, 22 nt, Artificial Sequence
  Synthetic
auuucagaaggcauuuugucaa

SEQ ID NO: 78340 - RNA, 23 nt, Artificial Sequence
  Synthetic
uauuucagaaggcauuuugucaa

SEQ ID NO: 78341 - RNA, 24 nt, Artificial Sequence
  Synthetic
cuauuucagaaggcauuuugucaa

SEQ ID NO: 78342 - RNA, 18 nt, Artificial Sequence
  Synthetic
augaggucaaaaauucaa

SEQ ID NO: 78343 - RNA, 19 nt, Artificial Sequence
  Synthetic
uaugaggucaaaaauucaa

SEQ ID NO: 78344 - RNA, 22 nt, Artificial Sequence
  Synthetic
agguaugaggucaaaaauucaa

SEQ ID NO: 78345 - RNA, 23 nt, Artificial Sequence
  Synthetic
uagguaugaggucaaaaauucaa

SEQ ID NO: 78346 - RNA, 18 nt, Artificial Sequence
  Synthetic
uaguuauaucaaauucaa

SEQ ID NO: 78347 - RNA, 19 nt, Artificial Sequence
  Synthetic
auaguuauaucaaauucaa

SEQ ID NO: 78348 - RNA, 21 nt, Artificial Sequence
  Synthetic
agauaguuauaucaaauucaa

SEQ ID NO: 78349 - RNA, 22 nt, Artificial Sequence
  Synthetic
aagauaguuauaucaaauucaa

SEQ ID NO: 78350 - RNA, 23 nt, Artificial Sequence
  Synthetic
uaagauaguuauaucaaauucaa

SEQ ID NO: 78351 - RNA, 24 nt, Artificial Sequence
  Synthetic
uuaagauaguuauaucaaauucaa

SEQ ID NO: 78352 - RNA, 18 nt, Artificial Sequence
  Synthetic
acaaguggauaaauucaa

SEQ ID NO: 78353 - RNA, 19 nt, Artificial Sequence
  Synthetic
aacaaguggauaaauucaa

SEQ ID NO: 78354 - RNA, 20 nt, Artificial Sequence
  Synthetic
aaacaaguggauaaauucaa

SEQ ID NO: 78355 - RNA, 21 nt, Artificial Sequence
  Synthetic
aaaacaaguggauaaauucaa

SEQ ID NO: 78356 - RNA, 23 nt, Artificial Sequence
  Synthetic
ugaaaacaaguggauaaauucaa

SEQ ID NO: 78357 - RNA, 24 nt, Artificial Sequence
  Synthetic
augaaaacaaguggauaaauucaa

SEQ ID NO: 78358 - RNA, 22 nt, Artificial Sequence
  Synthetic
cgaaagaaacugaagaauucaa

SEQ ID NO: 78359 - RNA, 24 nt, Artificial Sequence
  Synthetic
cgcgaaagaaacugaagaauucaa

SEQ ID NO: 78360 - RNA, 18 nt, Artificial Sequence
  Synthetic
acauguuauauaauucaa

SEQ ID NO: 78361 - RNA, 19 nt, Artificial Sequence
  Synthetic
cacauguuauauaauucaa

SEQ ID NO: 78362 - RNA, 20 nt, Artificial Sequence
  Synthetic
ucacauguuauauaauucaa

SEQ ID NO: 78363 - RNA, 21 nt, Artificial Sequence
  Synthetic
aucacauguuauauaauucaa

SEQ ID NO: 78364 - RNA, 22 nt, Artificial Sequence
  Synthetic
uaucacauguuauauaauucaa

SEQ ID NO: 78365 - RNA, 19 nt, Artificial Sequence
  Synthetic
agcgguguucaccauucaa

SEQ ID NO: 78366 - RNA, 20 nt, Artificial Sequence
  Synthetic
uagcgguguucaccauucaa

SEQ ID NO: 78367 - RNA, 21 nt, Artificial Sequence
  Synthetic
uuagcgguguucaccauucaa

SEQ ID NO: 78368 - RNA, 22 nt, Artificial Sequence
  Synthetic
cuuagcgguguucaccauucaa

SEQ ID NO: 78369 - RNA, 23 nt, Artificial Sequence
  Synthetic
ucuuagcgguguucaccauucaa

SEQ ID NO: 78370 - RNA, 24 nt, Artificial Sequence
  Synthetic
aucuuagcgguguucaccauucaa

SEQ ID NO: 78371 - RNA, 18 nt, Artificial Sequence
  Synthetic
ucauguccauccauucaa

SEQ ID NO: 78372 - RNA, 23 nt, Artificial Sequence
  Synthetic
aggggucauguccauccauucaa

SEQ ID NO: 78373 - RNA, 24 nt, Artificial Sequence
  Synthetic
aaggggucauguccauccauucaa

SEQ ID NO: 78374 - RNA, 18 nt, Artificial Sequence
  Synthetic
uuuauguuauauauucaa

SEQ ID NO: 78375 - RNA, 19 nt, Artificial Sequence
  Synthetic
auuuauguuauauauucaa

SEQ ID NO: 78376 - RNA, 20 nt, Artificial Sequence
  Synthetic
cauuuauguuauauauucaa

SEQ ID NO: 78377 - RNA, 23 nt, Artificial Sequence
  Synthetic
aggcauuuauguuauauauucaa

SEQ ID NO: 78378 - RNA, 24 nt, Artificial Sequence
  Synthetic
aaggcauuuauguuauauauucaa

SEQ ID NO: 78379 - RNA, 21 nt, Artificial Sequence
  Synthetic
aaauguauuucuucuauucaa

SEQ ID NO: 78380 - RNA, 22 nt, Artificial Sequence
  Synthetic
aaaauguauuucuucuauucaa

SEQ ID NO: 78381 - RNA, 23 nt, Artificial Sequence
  Synthetic
aaaaauguauuucuucuauucaa

SEQ ID NO: 78382 - RNA, 24 nt, Artificial Sequence
  Synthetic
uaaaaauguauuucuucuauucaa

SEQ ID NO: 78383 - RNA, 18 nt, Artificial Sequence
  Synthetic
aaagaugaaaguauucaa

SEQ ID NO: 78384 - RNA, 19 nt, Artificial Sequence
  Synthetic
aaaagaugaaaguauucaa

SEQ ID NO: 78385 - RNA, 20 nt, Artificial Sequence
  Synthetic
uaaaagaugaaaguauucaa

SEQ ID NO: 78386 - RNA, 21 nt, Artificial Sequence
  Synthetic
auaaaagaugaaaguauucaa

SEQ ID NO: 78387 - RNA, 23 nt, Artificial Sequence
  Synthetic
agauaaaagaugaaaguauucaa

SEQ ID NO: 78388 - RNA, 19 nt, Artificial Sequence
  Synthetic
agcaaauuaaccacuucaa

SEQ ID NO: 78389 - RNA, 20 nt, Artificial Sequence
  Synthetic
aagcaaauuaaccacuucaa

SEQ ID NO: 78390 - RNA, 21 nt, Artificial Sequence
  Synthetic
aaagcaaauuaaccacuucaa

SEQ ID NO: 78391 - RNA, 22 nt, Artificial Sequence
  Synthetic
aaaagcaaauuaaccacuucaa

SEQ ID NO: 78392 - RNA, 23 nt, Artificial Sequence
  Synthetic
uaaaagcaaauuaaccacuucaa

SEQ ID NO: 78393 - RNA, 24 nt, Artificial Sequence
  Synthetic
cuaaaagcaaauuaaccacuucaa

SEQ ID NO: 78394 - RNA, 18 nt, Artificial Sequence
  Synthetic
aauugguauccacuucaa

SEQ ID NO: 78395 - RNA, 19 nt, Artificial Sequence
  Synthetic
uaauugguauccacuucaa

SEQ ID NO: 78396 - RNA, 20 nt, Artificial Sequence
  Synthetic
auaauugguauccacuucaa

SEQ ID NO: 78397 - RNA, 21 nt, Artificial Sequence
  Synthetic
aauaauugguauccacuucaa

SEQ ID NO: 78398 - RNA, 22 nt, Artificial Sequence
  Synthetic
aaauaauugguauccacuucaa

SEQ ID NO: 78399 - RNA, 23 nt, Artificial Sequence
  Synthetic
caaauaauugguauccacuucaa

SEQ ID NO: 78400 - RNA, 24 nt, Artificial Sequence
  Synthetic
acaaauaauugguauccacuucaa

SEQ ID NO: 78401 - RNA, 18 nt, Artificial Sequence
  Synthetic
aaagggauaaaccuucaa

SEQ ID NO: 78402 - RNA, 19 nt, Artificial Sequence
  Synthetic
aaaagggauaaaccuucaa

SEQ ID NO: 78403 - RNA, 20 nt, Artificial Sequence
  Synthetic
aaaaagggauaaaccuucaa

SEQ ID NO: 78404 - RNA, 22 nt, Artificial Sequence
  Synthetic
agaaaaagggauaaaccuucaa

SEQ ID NO: 78405 - RNA, 23 nt, Artificial Sequence
  Synthetic
uagaaaaagggauaaaccuucaa

SEQ ID NO: 78406 - RNA, 24 nt, Artificial Sequence
  Synthetic
auagaaaaagggauaaaccuucaa

SEQ ID NO: 78407 - RNA, 21 nt, Artificial Sequence
  Synthetic
agggaguguauuuuucuucaa

SEQ ID NO: 78408 - RNA, 22 nt, Artificial Sequence
  Synthetic
aagggaguguauuuuucuucaa

SEQ ID NO: 78409 - RNA, 23 nt, Artificial Sequence
  Synthetic
aaagggaguguauuuuucuucaa

SEQ ID NO: 78410 - RNA, 24 nt, Artificial Sequence
  Synthetic
aaaagggaguguauuuuucuucaa

SEQ ID NO: 78411 - RNA, 18 nt, Artificial Sequence
  Synthetic
acaauucauaagguucaa

SEQ ID NO: 78412 - RNA, 20 nt, Artificial Sequence
  Synthetic
ugacaauucauaagguucaa

SEQ ID NO: 78413 - RNA, 21 nt, Artificial Sequence
  Synthetic
uugacaauucauaagguucaa

SEQ ID NO: 78414 - RNA, 22 nt, Artificial Sequence
  Synthetic
cuugacaauucauaagguucaa

SEQ ID NO: 78415 - RNA, 23 nt, Artificial Sequence
  Synthetic
acuugacaauucauaagguucaa

SEQ ID NO: 78416 - RNA, 18 nt, Artificial Sequence
  Synthetic
acauuccuucauguucaa

SEQ ID NO: 78417 - RNA, 19 nt, Artificial Sequence
  Synthetic
cacauuccuucauguucaa

SEQ ID NO: 78418 - RNA, 20 nt, Artificial Sequence
  Synthetic
acacauuccuucauguucaa

SEQ ID NO: 78419 - RNA, 21 nt, Artificial Sequence
  Synthetic
cacacauuccuucauguucaa

SEQ ID NO: 78420 - RNA, 24 nt, Artificial Sequence
  Synthetic
uggcacacauuccuucauguucaa

SEQ ID NO: 78421 - RNA, 21 nt, Artificial Sequence
  Synthetic
aaaauguuugaauauguucaa

SEQ ID NO: 78422 - RNA, 22 nt, Artificial Sequence
  Synthetic
uaaaauguuugaauauguucaa

SEQ ID NO: 78423 - RNA, 23 nt, Artificial Sequence
  Synthetic
cuaaaauguuugaauauguucaa

SEQ ID NO: 78424 - RNA, 24 nt, Artificial Sequence
  Synthetic
ccuaaaauguuugaauauguucaa

SEQ ID NO: 78425 - RNA, 21 nt, Artificial Sequence
  Synthetic
caaaugcugagaauuguucaa

SEQ ID NO: 78426 - RNA, 22 nt, Artificial Sequence
  Synthetic
acaaaugcugagaauuguucaa

SEQ ID NO: 78427 - RNA, 23 nt, Artificial Sequence
  Synthetic
uacaaaugcugagaauuguucaa

SEQ ID NO: 78428 - RNA, 21 nt, Artificial Sequence
  Synthetic
auauuuccagaccaauuucaa

SEQ ID NO: 78429 - RNA, 22 nt, Artificial Sequence
  Synthetic
cauauuuccagaccaauuucaa

SEQ ID NO: 78430 - RNA, 23 nt, Artificial Sequence
  Synthetic
acauauuuccagaccaauuucaa

SEQ ID NO: 78431 - RNA, 24 nt, Artificial Sequence
  Synthetic
aacauauuuccagaccaauuucaa

SEQ ID NO: 78432 - RNA, 19 nt, Artificial Sequence
  Synthetic
uggcaauuacugauuucaa

SEQ ID NO: 78433 - RNA, 20 nt, Artificial Sequence
  Synthetic
auggcaauuacugauuucaa

SEQ ID NO: 78434 - RNA, 21 nt, Artificial Sequence
  Synthetic
aauggcaauuacugauuucaa

SEQ ID NO: 78435 - RNA, 22 nt, Artificial Sequence
  Synthetic
aaauggcaauuacugauuucaa

SEQ ID NO: 78436 - RNA, 23 nt, Artificial Sequence
  Synthetic
uaaauggcaauuacugauuucaa

SEQ ID NO: 78437 - RNA, 21 nt, Artificial Sequence
  Synthetic
aucaugaaauuuauauuucaa

SEQ ID NO: 78438 - RNA, 23 nt, Artificial Sequence
  Synthetic
ugaucaugaaauuuauauuucaa

SEQ ID NO: 78439 - RNA, 24 nt, Artificial Sequence
  Synthetic
cugaucaugaaauuuauauuucaa

SEQ ID NO: 78440 - RNA, 18 nt, Artificial Sequence
  Synthetic
ugaaaaccaaaguuucaa

SEQ ID NO: 78441 - RNA, 20 nt, Artificial Sequence
  Synthetic
ugugaaaaccaaaguuucaa

SEQ ID NO: 78442 - RNA, 21 nt, Artificial Sequence
  Synthetic
uugugaaaaccaaaguuucaa

SEQ ID NO: 78443 - RNA, 22 nt, Artificial Sequence
  Synthetic
cuugugaaaaccaaaguuucaa

SEQ ID NO: 78444 - RNA, 23 nt, Artificial Sequence
  Synthetic
ucuugugaaaaccaaaguuucaa

SEQ ID NO: 78445 - RNA, 24 nt, Artificial Sequence
  Synthetic
aucuugugaaaaccaaaguuucaa

SEQ ID NO: 78446 - RNA, 18 nt, Artificial Sequence
  Synthetic
cccucagaucauuuucaa

SEQ ID NO: 78447 - RNA, 19 nt, Artificial Sequence
  Synthetic
acccucagaucauuuucaa

SEQ ID NO: 78448 - RNA, 21 nt, Artificial Sequence
  Synthetic
agacccucagaucauuuucaa

SEQ ID NO: 78449 - RNA, 22 nt, Artificial Sequence
  Synthetic
uagacccucagaucauuuucaa

SEQ ID NO: 78450 - RNA, 23 nt, Artificial Sequence
  Synthetic
auagacccucagaucauuuucaa

SEQ ID NO: 78451 - RNA, 24 nt, Artificial Sequence
  Synthetic
aauagacccucagaucauuuucaa

SEQ ID NO: 78452 - RNA, 18 nt, Artificial Sequence
  Synthetic
ugguuaccuuuuuuucaa

SEQ ID NO: 78453 - RNA, 19 nt, Artificial Sequence
  Synthetic
uugguuaccuuuuuuucaa

SEQ ID NO: 78454 - RNA, 20 nt, Artificial Sequence
  Synthetic
cuugguuaccuuuuuuucaa

SEQ ID NO: 78455 - RNA, 21 nt, Artificial Sequence
  Synthetic
acuugguuaccuuuuuuucaa

SEQ ID NO: 78456 - RNA, 22 nt, Artificial Sequence
  Synthetic
aacuugguuaccuuuuuuucaa

SEQ ID NO: 78457 - RNA, 23 nt, Artificial Sequence
  Synthetic
uaacuugguuaccuuuuuuucaa

SEQ ID NO: 78458 - RNA, 24 nt, Artificial Sequence
  Synthetic
auaacuugguuaccuuuuuuucaa

SEQ ID NO: 78459 - RNA, 21 nt, Artificial Sequence
  Synthetic
uagaggaaaagacaaaaagaa

SEQ ID NO: 78460 - RNA, 22 nt, Artificial Sequence
  Synthetic
cuagaggaaaagacaaaaagaa

SEQ ID NO: 78461 - RNA, 23 nt, Artificial Sequence
  Synthetic
acuagaggaaaagacaaaaagaa

SEQ ID NO: 78462 - RNA, 18 nt, Artificial Sequence
  Synthetic
uccuuuagaacaaaagaa

SEQ ID NO: 78463 - RNA, 19 nt, Artificial Sequence
  Synthetic
auccuuuagaacaaaagaa

SEQ ID NO: 78464 - RNA, 20 nt, Artificial Sequence
  Synthetic
uauccuuuagaacaaaagaa

SEQ ID NO: 78465 - RNA, 21 nt, Artificial Sequence
  Synthetic
auauccuuuagaacaaaagaa

SEQ ID NO: 78466 - RNA, 24 nt, Artificial Sequence
  Synthetic
aggauauccuuuagaacaaaagaa

SEQ ID NO: 78467 - RNA, 21 nt, Artificial Sequence
  Synthetic
cacagaaagacacacaaagaa

SEQ ID NO: 78468 - RNA, 22 nt, Artificial Sequence
  Synthetic
acacagaaagacacacaaagaa

SEQ ID NO: 78469 - RNA, 18 nt, Artificial Sequence
  Synthetic
uauacacauugcaaagaa

SEQ ID NO: 78470 - RNA, 19 nt, Artificial Sequence
  Synthetic
auauacacauugcaaagaa

SEQ ID NO: 78471 - RNA, 22 nt, Artificial Sequence
  Synthetic
uggauauacacauugcaaagaa

SEQ ID NO: 78472 - RNA, 23 nt, Artificial Sequence
  Synthetic
cuggauauacacauugcaaagaa

SEQ ID NO: 78473 - RNA, 24 nt, Artificial Sequence
  Synthetic
acuggauauacacauugcaaagaa

SEQ ID NO: 78474 - RNA, 21 nt, Artificial Sequence
  Synthetic
uaaugcugauaaaugaaagaa

SEQ ID NO: 78475 - RNA, 22 nt, Artificial Sequence
  Synthetic
auaaugcugauaaaugaaagaa

SEQ ID NO: 78476 - RNA, 23 nt, Artificial Sequence
  Synthetic
aauaaugcugauaaaugaaagaa

SEQ ID NO: 78477 - RNA, 24 nt, Artificial Sequence
  Synthetic
uaauaaugcugauaaaugaaagaa

SEQ ID NO: 78478 - RNA, 21 nt, Artificial Sequence
  Synthetic
caauaaauauucaugaaagaa

SEQ ID NO: 78479 - RNA, 22 nt, Artificial Sequence
  Synthetic
ucaauaaauauucaugaaagaa

SEQ ID NO: 78480 - RNA, 23 nt, Artificial Sequence
  Synthetic
aucaauaaauauucaugaaagaa

SEQ ID NO: 78481 - RNA, 24 nt, Artificial Sequence
  Synthetic
caucaauaaauauucaugaaagaa

SEQ ID NO: 78482 - RNA, 21 nt, Artificial Sequence
  Synthetic
auggguauguaugugaaagaa

SEQ ID NO: 78483 - RNA, 22 nt, Artificial Sequence
  Synthetic
cauggguauguaugugaaagaa

SEQ ID NO: 78484 - RNA, 23 nt, Artificial Sequence
  Synthetic
acauggguauguaugugaaagaa

SEQ ID NO: 78485 - RNA, 24 nt, Artificial Sequence
  Synthetic
aacauggguauguaugugaaagaa

SEQ ID NO: 78486 - RNA, 18 nt, Artificial Sequence
  Synthetic
uggugaugagauaaagaa

SEQ ID NO: 78487 - RNA, 20 nt, Artificial Sequence
  Synthetic
uguggugaugagauaaagaa

SEQ ID NO: 78488 - RNA, 21 nt, Artificial Sequence
  Synthetic
auguggugaugagauaaagaa

SEQ ID NO: 78489 - RNA, 24 nt, Artificial Sequence
  Synthetic
uggauguggugaugagauaaagaa

SEQ ID NO: 78490 - RNA, 21 nt, Artificial Sequence
  Synthetic
aauuuuguaagcuauaaagaa

SEQ ID NO: 78491 - RNA, 22 nt, Artificial Sequence
  Synthetic
uaauuuuguaagcuauaaagaa

SEQ ID NO: 78492 - RNA, 23 nt, Artificial Sequence
  Synthetic
auaauuuuguaagcuauaaagaa

SEQ ID NO: 78493 - RNA, 24 nt, Artificial Sequence
  Synthetic
uauaauuuuguaagcuauaaagaa

SEQ ID NO: 78494 - RNA, 18 nt, Artificial Sequence
  Synthetic
aaauuugugauuaaagaa

SEQ ID NO: 78495 - RNA, 19 nt, Artificial Sequence
  Synthetic
caaauuugugauuaaagaa

SEQ ID NO: 78496 - RNA, 20 nt, Artificial Sequence
  Synthetic
acaaauuugugauuaaagaa

SEQ ID NO: 78497 - RNA, 24 nt, Artificial Sequence
  Synthetic
ugggacaaauuugugauuaaagaa

SEQ ID NO: 78498 - RNA, 18 nt, Artificial Sequence
  Synthetic
auauuuucucuacaagaa

SEQ ID NO: 78499 - RNA, 19 nt, Artificial Sequence
  Synthetic
uauauuuucucuacaagaa

SEQ ID NO: 78500 - RNA, 21 nt, Artificial Sequence
  Synthetic
uguauauuuucucuacaagaa

SEQ ID NO: 78501 - RNA, 22 nt, Artificial Sequence
  Synthetic
cuguauauuuucucuacaagaa

SEQ ID NO: 78502 - RNA, 23 nt, Artificial Sequence
  Synthetic
acuguauauuuucucuacaagaa

SEQ ID NO: 78503 - RNA, 20 nt, Artificial Sequence
  Synthetic
aggguauuauuucccaagaa

SEQ ID NO: 78504 - RNA, 21 nt, Artificial Sequence
  Synthetic
aaggguauuauuucccaagaa

SEQ ID NO: 78505 - RNA, 22 nt, Artificial Sequence
  Synthetic
uaaggguauuauuucccaagaa

SEQ ID NO: 78506 - RNA, 23 nt, Artificial Sequence
  Synthetic
cuaaggguauuauuucccaagaa

SEQ ID NO: 78507 - RNA, 24 nt, Artificial Sequence
  Synthetic
ucuaaggguauuauuucccaagaa

SEQ ID NO: 78508 - RNA, 18 nt, Artificial Sequence
  Synthetic
aucgagucaaaucaagaa

SEQ ID NO: 78509 - RNA, 19 nt, Artificial Sequence
  Synthetic
aaucgagucaaaucaagaa

SEQ ID NO: 78510 - RNA, 20 nt, Artificial Sequence
  Synthetic
caaucgagucaaaucaagaa

SEQ ID NO: 78511 - RNA, 21 nt, Artificial Sequence
  Synthetic
ucaaucgagucaaaucaagaa

SEQ ID NO: 78512 - RNA, 22 nt, Artificial Sequence
  Synthetic
aucaaucgagucaaaucaagaa

SEQ ID NO: 78513 - RNA, 23 nt, Artificial Sequence
  Synthetic
aaucaaucgagucaaaucaagaa

SEQ ID NO: 78514 - RNA, 24 nt, Artificial Sequence
  Synthetic
caaucaaucgagucaaaucaagaa

SEQ ID NO: 78515 - RNA, 18 nt, Artificial Sequence
  Synthetic
augagcucaacucaagaa

SEQ ID NO: 78516 - RNA, 19 nt, Artificial Sequence
  Synthetic
aaugagcucaacucaagaa

SEQ ID NO: 78517 - RNA, 20 nt, Artificial Sequence
  Synthetic
uaaugagcucaacucaagaa

SEQ ID NO: 78518 - RNA, 21 nt, Artificial Sequence
  Synthetic
uuaaugagcucaacucaagaa

SEQ ID NO: 78519 - RNA, 23 nt, Artificial Sequence
  Synthetic
aguuaaugagcucaacucaagaa

SEQ ID NO: 78520 - RNA, 24 nt, Artificial Sequence
  Synthetic
uaguuaaugagcucaacucaagaa

SEQ ID NO: 78521 - RNA, 18 nt, Artificial Sequence
  Synthetic
auuggacaaccucaagaa

SEQ ID NO: 78522 - RNA, 19 nt, Artificial Sequence
  Synthetic
aauuggacaaccucaagaa

SEQ ID NO: 78523 - RNA, 21 nt, Artificial Sequence
  Synthetic
agaauuggacaaccucaagaa

SEQ ID NO: 78524 - RNA, 22 nt, Artificial Sequence
  Synthetic
uagaauuggacaaccucaagaa

SEQ ID NO: 78525 - RNA, 23 nt, Artificial Sequence
  Synthetic
auagaauuggacaaccucaagaa

SEQ ID NO: 78526 - RNA, 19 nt, Artificial Sequence
  Synthetic
agcauacaucauucaagaa

SEQ ID NO: 78527 - RNA, 20 nt, Artificial Sequence
  Synthetic
uagcauacaucauucaagaa

SEQ ID NO: 78528 - RNA, 21 nt, Artificial Sequence
  Synthetic
uuagcauacaucauucaagaa

SEQ ID NO: 78529 - RNA, 22 nt, Artificial Sequence
  Synthetic
uuuagcauacaucauucaagaa

SEQ ID NO: 78530 - RNA, 23 nt, Artificial Sequence
  Synthetic
uuuuagcauacaucauucaagaa

SEQ ID NO: 78531 - RNA, 24 nt, Artificial Sequence
  Synthetic
auuuuagcauacaucauucaagaa

SEQ ID NO: 78532 - RNA, 21 nt, Artificial Sequence
  Synthetic
cgggagaugcacaaagaagaa

SEQ ID NO: 78533 - RNA, 22 nt, Artificial Sequence
  Synthetic
acgggagaugcacaaagaagaa

SEQ ID NO: 78534 - RNA, 23 nt, Artificial Sequence
  Synthetic
aacgggagaugcacaaagaagaa

SEQ ID NO: 78535 - RNA, 24 nt, Artificial Sequence
  Synthetic
aaacgggagaugcacaaagaagaa

SEQ ID NO: 78536 - RNA, 19 nt, Artificial Sequence
  Synthetic
agcuugguguaaagaagaa

SEQ ID NO: 78537 - RNA, 20 nt, Artificial Sequence
  Synthetic
aagcuugguguaaagaagaa

SEQ ID NO: 78538 - RNA, 21 nt, Artificial Sequence
  Synthetic
aaagcuugguguaaagaagaa

SEQ ID NO: 78539 - RNA, 22 nt, Artificial Sequence
  Synthetic
aaaagcuugguguaaagaagaa

SEQ ID NO: 78540 - RNA, 23 nt, Artificial Sequence
  Synthetic
aaaaagcuugguguaaagaagaa

SEQ ID NO: 78541 - RNA, 24 nt, Artificial Sequence
  Synthetic
aaaaaagcuugguguaaagaagaa

SEQ ID NO: 78542 - RNA, 20 nt, Artificial Sequence
  Synthetic
aggaguguaugucagaagaa

SEQ ID NO: 78543 - RNA, 21 nt, Artificial Sequence
  Synthetic
uaggaguguaugucagaagaa

SEQ ID NO: 78544 - RNA, 22 nt, Artificial Sequence
  Synthetic
auaggaguguaugucagaagaa

SEQ ID NO: 78545 - RNA, 18 nt, Artificial Sequence
  Synthetic
augcauaggagagaagaa

SEQ ID NO: 78546 - RNA, 20 nt, Artificial Sequence
  Synthetic
agaugcauaggagagaagaa

SEQ ID NO: 78547 - RNA, 21 nt, Artificial Sequence
  Synthetic
aagaugcauaggagagaagaa

SEQ ID NO: 78548 - RNA, 22 nt, Artificial Sequence
  Synthetic
uaagaugcauaggagagaagaa

SEQ ID NO: 78549 - RNA, 23 nt, Artificial Sequence
  Synthetic
cuaagaugcauaggagagaagaa

SEQ ID NO: 78550 - RNA, 18 nt, Artificial Sequence
  Synthetic
uuaucuaugcgagaagaa

SEQ ID NO: 78551 - RNA, 19 nt, Artificial Sequence
  Synthetic
cuuaucuaugcgagaagaa

SEQ ID NO: 78552 - RNA, 20 nt, Artificial Sequence
  Synthetic
ucuuaucuaugcgagaagaa

SEQ ID NO: 78553 - RNA, 21 nt, Artificial Sequence
  Synthetic
uucuuaucuaugcgagaagaa

SEQ ID NO: 78554 - RNA, 22 nt, Artificial Sequence
  Synthetic
auucuuaucuaugcgagaagaa

SEQ ID NO: 78555 - RNA, 23 nt, Artificial Sequence
  Synthetic
aauucuuaucuaugcgagaagaa

SEQ ID NO: 78556 - RNA, 24 nt, Artificial Sequence
  Synthetic
uaauucuuaucuaugcgagaagaa

SEQ ID NO: 78557 - RNA, 18 nt, Artificial Sequence
  Synthetic
ucuauacuuugcgaagaa

SEQ ID NO: 78558 - RNA, 19 nt, Artificial Sequence
  Synthetic
aucuauacuuugcgaagaa

SEQ ID NO: 78559 - RNA, 20 nt, Artificial Sequence
  Synthetic
aaucuauacuuugcgaagaa

SEQ ID NO: 78560 - RNA, 21 nt, Artificial Sequence
  Synthetic
uaaucuauacuuugcgaagaa

SEQ ID NO: 78561 - RNA, 23 nt, Artificial Sequence
  Synthetic
aguaaucuauacuuugcgaagaa

SEQ ID NO: 78562 - RNA, 24 nt, Artificial Sequence
  Synthetic
caguaaucuauacuuugcgaagaa

SEQ ID NO: 78563 - RNA, 21 nt, Artificial Sequence
  Synthetic
cuggaugagaagaaggaagaa

SEQ ID NO: 78564 - RNA, 23 nt, Artificial Sequence
  Synthetic
agcuggaugagaagaaggaagaa

SEQ ID NO: 78565 - RNA, 24 nt, Artificial Sequence
  Synthetic
uagcuggaugagaagaaggaagaa

SEQ ID NO: 78566 - RNA, 19 nt, Artificial Sequence
  Synthetic
ugcuacaaaaccugaagaa

SEQ ID NO: 78567 - RNA, 22 nt, Artificial Sequence
  Synthetic
uggugcuacaaaaccugaagaa

SEQ ID NO: 78568 - RNA, 24 nt, Artificial Sequence
  Synthetic
aguggugcuacaaaaccugaagaa

SEQ ID NO: 78569 - RNA, 22 nt, Artificial Sequence
  Synthetic
agaugggaagugaagugaagaa

SEQ ID NO: 78570 - RNA, 23 nt, Artificial Sequence
  Synthetic
uagaugggaagugaagugaagaa

SEQ ID NO: 78571 - RNA, 18 nt, Artificial Sequence
  Synthetic
aacuccuguaaauaagaa

SEQ ID NO: 78572 - RNA, 19 nt, Artificial Sequence
  Synthetic
aaacuccuguaaauaagaa

SEQ ID NO: 78573 - RNA, 20 nt, Artificial Sequence
  Synthetic
aaaacuccuguaaauaagaa

SEQ ID NO: 78574 - RNA, 22 nt, Artificial Sequence
  Synthetic
agaaaacuccuguaaauaagaa

SEQ ID NO: 78575 - RNA, 23 nt, Artificial Sequence
  Synthetic
cagaaaacuccuguaaauaagaa

SEQ ID NO: 78576 - RNA, 24 nt, Artificial Sequence
  Synthetic
acagaaaacuccuguaaauaagaa

SEQ ID NO: 78577 - RNA, 22 nt, Artificial Sequence
  Synthetic
cguauggcacacaagcuaagaa

SEQ ID NO: 78578 - RNA, 24 nt, Artificial Sequence
  Synthetic
ugcguauggcacacaagcuaagaa

SEQ ID NO: 78579 - RNA, 18 nt, Artificial Sequence
  Synthetic
acauaaauuggcuaagaa

SEQ ID NO: 78580 - RNA, 19 nt, Artificial Sequence
  Synthetic
uacauaaauuggcuaagaa

SEQ ID NO: 78581 - RNA, 20 nt, Artificial Sequence
  Synthetic
auacauaaauuggcuaagaa

SEQ ID NO: 78582 - RNA, 21 nt, Artificial Sequence
  Synthetic
uauacauaaauuggcuaagaa

SEQ ID NO: 78583 - RNA, 23 nt, Artificial Sequence
  Synthetic
aguauacauaaauuggcuaagaa

SEQ ID NO: 78584 - RNA, 19 nt, Artificial Sequence
  Synthetic
ugagacuaagcucuaagaa

SEQ ID NO: 78585 - RNA, 20 nt, Artificial Sequence
  Synthetic
uugagacuaagcucuaagaa

SEQ ID NO: 78586 - RNA, 21 nt, Artificial Sequence
  Synthetic
uuugagacuaagcucuaagaa

SEQ ID NO: 78587 - RNA, 23 nt, Artificial Sequence
  Synthetic
aguuugagacuaagcucuaagaa

SEQ ID NO: 78588 - RNA, 18 nt, Artificial Sequence
  Synthetic
aucuguuugacuuaagaa

SEQ ID NO: 78589 - RNA, 20 nt, Artificial Sequence
  Synthetic
agaucuguuugacuuaagaa

SEQ ID NO: 78590 - RNA, 23 nt, Artificial Sequence
  Synthetic
aggagaucuguuugacuuaagaa

SEQ ID NO: 78591 - RNA, 24 nt, Artificial Sequence
  Synthetic
aaggagaucuguuugacuuaagaa

SEQ ID NO: 78592 - RNA, 19 nt, Artificial Sequence
  Synthetic
uguucuggcucuuuaagaa

SEQ ID NO: 78593 - RNA, 20 nt, Artificial Sequence
  Synthetic
auguucuggcucuuuaagaa

SEQ ID NO: 78594 - RNA, 22 nt, Artificial Sequence
  Synthetic
ugauguucuggcucuuuaagaa

SEQ ID NO: 78595 - RNA, 23 nt, Artificial Sequence
  Synthetic
augauguucuggcucuuuaagaa

SEQ ID NO: 78596 - RNA, 18 nt, Artificial Sequence
  Synthetic
cucuucacuuuuuaagaa

SEQ ID NO: 78597 - RNA, 20 nt, Artificial Sequence
  Synthetic
ugcucuucacuuuuuaagaa

SEQ ID NO: 78598 - RNA, 21 nt, Artificial Sequence
  Synthetic
cugcucuucacuuuuuaagaa

SEQ ID NO: 78599 - RNA, 22 nt, Artificial Sequence
  Synthetic
ucugcucuucacuuuuuaagaa

SEQ ID NO: 78600 - RNA, 23 nt, Artificial Sequence
  Synthetic
aucugcucuucacuuuuuaagaa

SEQ ID NO: 78601 - RNA, 24 nt, Artificial Sequence
  Synthetic
caucugcucuucacuuuuuaagaa

SEQ ID NO: 78602 - RNA, 18 nt, Artificial Sequence
  Synthetic
uugaaacugcaaacagaa

SEQ ID NO: 78603 - RNA, 19 nt, Artificial Sequence
  Synthetic
cuugaaacugcaaacagaa

SEQ ID NO: 78604 - RNA, 20 nt, Artificial Sequence
  Synthetic
acuugaaacugcaaacagaa

SEQ ID NO: 78605 - RNA, 21 nt, Artificial Sequence
  Synthetic
uacuugaaacugcaaacagaa

SEQ ID NO: 78606 - RNA, 24 nt, Artificial Sequence
  Synthetic
agguacuugaaacugcaaacagaa

SEQ ID NO: 78607 - RNA, 18 nt, Artificial Sequence
  Synthetic
uauguaauuauaacagaa

SEQ ID NO: 78608 - RNA, 20 nt, Artificial Sequence
  Synthetic
aguauguaauuauaacagaa

SEQ ID NO: 78609 - RNA, 21 nt, Artificial Sequence
  Synthetic
aaguauguaauuauaacagaa

SEQ ID NO: 78610 - RNA, 22 nt, Artificial Sequence
  Synthetic
uaaguauguaauuauaacagaa

SEQ ID NO: 78611 - RNA, 23 nt, Artificial Sequence
  Synthetic
auaaguauguaauuauaacagaa

SEQ ID NO: 78612 - RNA, 24 nt, Artificial Sequence
  Synthetic
cauaaguauguaauuauaacagaa

SEQ ID NO: 78613 - RNA, 18 nt, Artificial Sequence
  Synthetic
uuggacauccuaacagaa

SEQ ID NO: 78614 - RNA, 19 nt, Artificial Sequence
  Synthetic
auuggacauccuaacagaa

SEQ ID NO: 78615 - RNA, 20 nt, Artificial Sequence
  Synthetic
aauuggacauccuaacagaa

SEQ ID NO: 78616 - RNA, 21 nt, Artificial Sequence
  Synthetic
aaauuggacauccuaacagaa

SEQ ID NO: 78617 - RNA, 23 nt, Artificial Sequence
  Synthetic
agaaauuggacauccuaacagaa

SEQ ID NO: 78618 - RNA, 24 nt, Artificial Sequence
  Synthetic
aagaaauuggacauccuaacagaa

SEQ ID NO: 78619 - RNA, 18 nt, Artificial Sequence
  Synthetic
cagcacaccaggacagaa

SEQ ID NO: 78620 - RNA, 21 nt, Artificial Sequence
  Synthetic
uggcagcacaccaggacagaa

SEQ ID NO: 78621 - RNA, 22 nt, Artificial Sequence
  Synthetic
auggcagcacaccaggacagaa

SEQ ID NO: 78622 - RNA, 24 nt, Artificial Sequence
  Synthetic
ugauggcagcacaccaggacagaa

SEQ ID NO: 78623 - RNA, 18 nt, Artificial Sequence
  Synthetic
ucucuaauuauuacagaa

SEQ ID NO: 78624 - RNA, 19 nt, Artificial Sequence
  Synthetic
aucucuaauuauuacagaa

SEQ ID NO: 78625 - RNA, 20 nt, Artificial Sequence
  Synthetic
aaucucuaauuauuacagaa

SEQ ID NO: 78626 - RNA, 21 nt, Artificial Sequence
  Synthetic
aaaucucuaauuauuacagaa

SEQ ID NO: 78627 - RNA, 22 nt, Artificial Sequence
  Synthetic
uaaaucucuaauuauuacagaa

SEQ ID NO: 78628 - RNA, 23 nt, Artificial Sequence
  Synthetic
auaaaucucuaauuauuacagaa

SEQ ID NO: 78629 - RNA, 24 nt, Artificial Sequence
  Synthetic
cauaaaucucuaauuauuacagaa

SEQ ID NO: 78630 - RNA, 18 nt, Artificial Sequence
  Synthetic
cucaugucacaaccagaa

SEQ ID NO: 78631 - RNA, 19 nt, Artificial Sequence
  Synthetic
acucaugucacaaccagaa

SEQ ID NO: 78632 - RNA, 20 nt, Artificial Sequence
  Synthetic
uacucaugucacaaccagaa

SEQ ID NO: 78633 - RNA, 21 nt, Artificial Sequence
  Synthetic
cuacucaugucacaaccagaa

SEQ ID NO: 78634 - RNA, 22 nt, Artificial Sequence
  Synthetic
ucuacucaugucacaaccagaa

SEQ ID NO: 78635 - RNA, 23 nt, Artificial Sequence
  Synthetic
uucuacucaugucacaaccagaa

SEQ ID NO: 78636 - RNA, 24 nt, Artificial Sequence
  Synthetic
auucuacucaugucacaaccagaa

SEQ ID NO: 78637 - RNA, 18 nt, Artificial Sequence
  Synthetic
aacuagccccagccagaa

SEQ ID NO: 78638 - RNA, 20 nt, Artificial Sequence
  Synthetic
ugaacuagccccagccagaa

SEQ ID NO: 78639 - RNA, 21 nt, Artificial Sequence
  Synthetic
uugaacuagccccagccagaa

SEQ ID NO: 78640 - RNA, 22 nt, Artificial Sequence
  Synthetic
uuugaacuagccccagccagaa

SEQ ID NO: 78641 - RNA, 23 nt, Artificial Sequence
  Synthetic
auuugaacuagccccagccagaa

SEQ ID NO: 78642 - RNA, 24 nt, Artificial Sequence
  Synthetic
uauuugaacuagccccagccagaa

SEQ ID NO: 78643 - RNA, 19 nt, Artificial Sequence
  Synthetic
ugugaggccacauccagaa

SEQ ID NO: 78644 - RNA, 20 nt, Artificial Sequence
  Synthetic
uugugaggccacauccagaa

SEQ ID NO: 78645 - RNA, 21 nt, Artificial Sequence
  Synthetic
uuugugaggccacauccagaa

SEQ ID NO: 78646 - RNA, 22 nt, Artificial Sequence
  Synthetic
auuugugaggccacauccagaa

SEQ ID NO: 78647 - RNA, 24 nt, Artificial Sequence
  Synthetic
ugauuugugaggccacauccagaa

SEQ ID NO: 78648 - RNA, 18 nt, Artificial Sequence
  Synthetic
agccauaaagauccagaa

SEQ ID NO: 78649 - RNA, 19 nt, Artificial Sequence
  Synthetic
cagccauaaagauccagaa

SEQ ID NO: 78650 - RNA, 20 nt, Artificial Sequence
  Synthetic
ucagccauaaagauccagaa

SEQ ID NO: 78651 - RNA, 22 nt, Artificial Sequence
  Synthetic
agucagccauaaagauccagaa

SEQ ID NO: 78652 - RNA, 23 nt, Artificial Sequence
  Synthetic
aagucagccauaaagauccagaa

SEQ ID NO: 78653 - RNA, 24 nt, Artificial Sequence
  Synthetic
aaagucagccauaaagauccagaa

SEQ ID NO: 78654 - RNA, 18 nt, Artificial Sequence
  Synthetic
acugugaucaaagcagaa

SEQ ID NO: 78655 - RNA, 19 nt, Artificial Sequence
  Synthetic
cacugugaucaaagcagaa

SEQ ID NO: 78656 - RNA, 20 nt, Artificial Sequence
  Synthetic
acacugugaucaaagcagaa

SEQ ID NO: 78657 - RNA, 21 nt, Artificial Sequence
  Synthetic
cacacugugaucaaagcagaa

SEQ ID NO: 78658 - RNA, 22 nt, Artificial Sequence
  Synthetic
ucacacugugaucaaagcagaa

SEQ ID NO: 78659 - RNA, 23 nt, Artificial Sequence
  Synthetic
uucacacugugaucaaagcagaa

SEQ ID NO: 78660 - RNA, 24 nt, Artificial Sequence
  Synthetic
auucacacugugaucaaagcagaa

SEQ ID NO: 78661 - RNA, 18 nt, Artificial Sequence
  Synthetic
agaguguuuuaagcagaa

SEQ ID NO: 78662 - RNA, 19 nt, Artificial Sequence
  Synthetic
cagaguguuuuaagcagaa

SEQ ID NO: 78663 - RNA, 20 nt, Artificial Sequence
  Synthetic
acagaguguuuuaagcagaa

SEQ ID NO: 78664 - RNA, 21 nt, Artificial Sequence
  Synthetic
aacagaguguuuuaagcagaa

SEQ ID NO: 78665 - RNA, 24 nt, Artificial Sequence
  Synthetic
aggaacagaguguuuuaagcagaa

SEQ ID NO: 78666 - RNA, 24 nt, Artificial Sequence
  Synthetic
cggggucagggaaggagagcagaa

SEQ ID NO: 78667 - RNA, 21 nt, Artificial Sequence
  Synthetic
agguaguaugguauagcagaa

SEQ ID NO: 78668 - RNA, 22 nt, Artificial Sequence
  Synthetic
uagguaguaugguauagcagaa

SEQ ID NO: 78669 - RNA, 18 nt, Artificial Sequence
  Synthetic
cagagaggcugggcagaa

SEQ ID NO: 78670 - RNA, 19 nt, Artificial Sequence
  Synthetic
ccagagaggcugggcagaa

SEQ ID NO: 78671 - RNA, 20 nt, Artificial Sequence
  Synthetic
accagagaggcugggcagaa

SEQ ID NO: 78672 - RNA, 21 nt, Artificial Sequence
  Synthetic
aaccagagaggcugggcagaa

SEQ ID NO: 78673 - RNA, 22 nt, Artificial Sequence
  Synthetic
caaccagagaggcugggcagaa

SEQ ID NO: 78674 - RNA, 23 nt, Artificial Sequence
  Synthetic
acaaccagagaggcugggcagaa

SEQ ID NO: 78675 - RNA, 18 nt, Artificial Sequence
  Synthetic
agauuaaugaaaucagaa

SEQ ID NO: 78676 - RNA, 20 nt, Artificial Sequence
  Synthetic
ugagauuaaugaaaucagaa

SEQ ID NO: 78677 - RNA, 21 nt, Artificial Sequence
  Synthetic
augagauuaaugaaaucagaa

SEQ ID NO: 78678 - RNA, 22 nt, Artificial Sequence
  Synthetic
aaugagauuaaugaaaucagaa

SEQ ID NO: 78679 - RNA, 23 nt, Artificial Sequence
  Synthetic
uaaugagauuaaugaaaucagaa

SEQ ID NO: 78680 - RNA, 24 nt, Artificial Sequence
  Synthetic
auaaugagauuaaugaaaucagaa

SEQ ID NO: 78681 - RNA, 18 nt, Artificial Sequence
  Synthetic
acauuugaaaacucagaa

SEQ ID NO: 78682 - RNA, 19 nt, Artificial Sequence
  Synthetic
uacauuugaaaacucagaa

SEQ ID NO: 78683 - RNA, 20 nt, Artificial Sequence
  Synthetic
uuacauuugaaaacucagaa

SEQ ID NO: 78684 - RNA, 21 nt, Artificial Sequence
  Synthetic
cuuacauuugaaaacucagaa

SEQ ID NO: 78685 - RNA, 23 nt, Artificial Sequence
  Synthetic
agcuuacauuugaaaacucagaa

SEQ ID NO: 78686 - RNA, 24 nt, Artificial Sequence
  Synthetic
uagcuuacauuugaaaacucagaa

SEQ ID NO: 78687 - RNA, 18 nt, Artificial Sequence
  Synthetic
augagccaaucuucagaa

SEQ ID NO: 78688 - RNA, 19 nt, Artificial Sequence
  Synthetic
uaugagccaaucuucagaa

SEQ ID NO: 78689 - RNA, 20 nt, Artificial Sequence
  Synthetic
auaugagccaaucuucagaa

SEQ ID NO: 78690 - RNA, 21 nt, Artificial Sequence
  Synthetic
aauaugagccaaucuucagaa

SEQ ID NO: 78691 - RNA, 22 nt, Artificial Sequence
  Synthetic
uaauaugagccaaucuucagaa

SEQ ID NO: 78692 - RNA, 23 nt, Artificial Sequence
  Synthetic
auaauaugagccaaucuucagaa

SEQ ID NO: 78693 - RNA, 24 nt, Artificial Sequence
  Synthetic
aauaauaugagccaaucuucagaa

SEQ ID NO: 78694 - RNA, 18 nt, Artificial Sequence
  Synthetic
aaucuaaacucuucagaa

SEQ ID NO: 78695 - RNA, 20 nt, Artificial Sequence
  Synthetic
ugaaucuaaacucuucagaa

SEQ ID NO: 78696 - RNA, 21 nt, Artificial Sequence
  Synthetic
cugaaucuaaacucuucagaa

SEQ ID NO: 78697 - RNA, 22 nt, Artificial Sequence
  Synthetic
ucugaaucuaaacucuucagaa

SEQ ID NO: 78698 - RNA, 23 nt, Artificial Sequence
  Synthetic
cucugaaucuaaacucuucagaa

SEQ ID NO: 78699 - RNA, 24 nt, Artificial Sequence
  Synthetic
ucucugaaucuaaacucuucagaa

SEQ ID NO: 78700 - RNA, 18 nt, Artificial Sequence
  Synthetic
uuagcaagagguucagaa

SEQ ID NO: 78701 - RNA, 19 nt, Artificial Sequence
  Synthetic
auuagcaagagguucagaa

SEQ ID NO: 78702 - RNA, 20 nt, Artificial Sequence
  Synthetic
cauuagcaagagguucagaa

SEQ ID NO: 78703 - RNA, 23 nt, Artificial Sequence
  Synthetic
aggcauuagcaagagguucagaa

SEQ ID NO: 78704 - RNA, 24 nt, Artificial Sequence
  Synthetic
caggcauuagcaagagguucagaa

SEQ ID NO: 78705 - RNA, 18 nt, Artificial Sequence
  Synthetic
ucguugcauuuuucagaa

SEQ ID NO: 78706 - RNA, 20 nt, Artificial Sequence
  Synthetic
cgucguugcauuuuucagaa

SEQ ID NO: 78707 - RNA, 21 nt, Artificial Sequence
  Synthetic
ucgucguugcauuuuucagaa

SEQ ID NO: 78708 - RNA, 22 nt, Artificial Sequence
  Synthetic
aucgucguugcauuuuucagaa

SEQ ID NO: 78709 - RNA, 23 nt, Artificial Sequence
  Synthetic
caucgucguugcauuuuucagaa

SEQ ID NO: 78710 - RNA, 21 nt, Artificial Sequence
  Synthetic
aauagcuagagccaaagagaa

SEQ ID NO: 78711 - RNA, 22 nt, Artificial Sequence
  Synthetic
aaauagcuagagccaaagagaa

SEQ ID NO: 78712 - RNA, 23 nt, Artificial Sequence
  Synthetic
caaauagcuagagccaaagagaa

SEQ ID NO: 78713 - RNA, 24 nt, Artificial Sequence
  Synthetic
acaaauagcuagagccaaagagaa

SEQ ID NO: 78714 - RNA, 21 nt, Artificial Sequence
  Synthetic
aaauauuuuuaauaaagagaa

SEQ ID NO: 78715 - RNA, 22 nt, Artificial Sequence
  Synthetic
aaaauauuuuuaauaaagagaa

SEQ ID NO: 78716 - RNA, 23 nt, Artificial Sequence
  Synthetic
caaaauauuuuuaauaaagagaa

SEQ ID NO: 78717 - RNA, 24 nt, Artificial Sequence
  Synthetic
acaaaauauuuuuaauaaagagaa

SEQ ID NO: 78718 - RNA, 18 nt, Artificial Sequence
  Synthetic
acuuaauagauaagagaa

SEQ ID NO: 78719 - RNA, 20 nt, Artificial Sequence
  Synthetic
ugacuuaauagauaagagaa

SEQ ID NO: 78720 - RNA, 23 nt, Artificial Sequence
  Synthetic
uggugacuuaauagauaagagaa

SEQ ID NO: 78721 - RNA, 24 nt, Artificial Sequence
  Synthetic
uuggugacuuaauagauaagagaa

SEQ ID NO: 78722 - RNA, 18 nt, Artificial Sequence
  Synthetic
caugguaauguaagagaa

SEQ ID NO: 78723 - RNA, 19 nt, Artificial Sequence
  Synthetic
acaugguaauguaagagaa

SEQ ID NO: 78724 - RNA, 20 nt, Artificial Sequence
  Synthetic
uacaugguaauguaagagaa

SEQ ID NO: 78725 - RNA, 21 nt, Artificial Sequence
  Synthetic
uuacaugguaauguaagagaa

SEQ ID NO: 78726 - RNA, 22 nt, Artificial Sequence
  Synthetic
uuuacaugguaauguaagagaa

SEQ ID NO: 78727 - RNA, 23 nt, Artificial Sequence
  Synthetic
auuuacaugguaauguaagagaa

SEQ ID NO: 78728 - RNA, 24 nt, Artificial Sequence
  Synthetic
aauuuacaugguaauguaagagaa

SEQ ID NO: 78729 - RNA, 18 nt, Artificial Sequence
  Synthetic
uguugugcuuuaagagaa

SEQ ID NO: 78730 - RNA, 20 nt, Artificial Sequence
  Synthetic
aguguugugcuuuaagagaa

SEQ ID NO: 78731 - RNA, 21 nt, Artificial Sequence
  Synthetic
aaguguugugcuuuaagagaa

SEQ ID NO: 78732 - RNA, 22 nt, Artificial Sequence
  Synthetic
aaaguguugugcuuuaagagaa

SEQ ID NO: 78733 - RNA, 24 nt, Artificial Sequence
  Synthetic
agaaaguguugugcuuuaagagaa

SEQ ID NO: 78734 - RNA, 19 nt, Artificial Sequence
  Synthetic
ugauguccugggcagagaa

SEQ ID NO: 78735 - RNA, 20 nt, Artificial Sequence
  Synthetic
cugauguccugggcagagaa

SEQ ID NO: 78736 - RNA, 21 nt, Artificial Sequence
  Synthetic
acugauguccugggcagagaa

SEQ ID NO: 78737 - RNA, 22 nt, Artificial Sequence
  Synthetic
uacugauguccugggcagagaa

SEQ ID NO: 78738 - RNA, 23 nt, Artificial Sequence
  Synthetic
cuacugauguccugggcagagaa

SEQ ID NO: 78739 - RNA, 24 nt, Artificial Sequence
  Synthetic
ccuacugauguccugggcagagaa

SEQ ID NO: 78740 - RNA, 18 nt, Artificial Sequence
  Synthetic
cagagaaauaucagagaa

SEQ ID NO: 78741 - RNA, 19 nt, Artificial Sequence
  Synthetic
ccagagaaauaucagagaa

SEQ ID NO: 78742 - RNA, 20 nt, Artificial Sequence
  Synthetic
accagagaaauaucagagaa

SEQ ID NO: 78743 - RNA, 21 nt, Artificial Sequence
  Synthetic
uaccagagaaauaucagagaa

SEQ ID NO: 78744 - RNA, 22 nt, Artificial Sequence
  Synthetic
cuaccagagaaauaucagagaa

SEQ ID NO: 78745 - RNA, 23 nt, Artificial Sequence
  Synthetic
acuaccagagaaauaucagagaa

SEQ ID NO: 78746 - RNA, 18 nt, Artificial Sequence
  Synthetic
auaaaccaugugagagaa

SEQ ID NO: 78747 - RNA, 20 nt, Artificial Sequence
  Synthetic
agauaaaccaugugagagaa

SEQ ID NO: 78748 - RNA, 21 nt, Artificial Sequence
  Synthetic
aagauaaaccaugugagagaa

SEQ ID NO: 78749 - RNA, 22 nt, Artificial Sequence
  Synthetic
aaagauaaaccaugugagagaa

SEQ ID NO: 78750 - RNA, 23 nt, Artificial Sequence
  Synthetic
uaaagauaaaccaugugagagaa

SEQ ID NO: 78751 - RNA, 24 nt, Artificial Sequence
  Synthetic
uuaaagauaaaccaugugagagaa

SEQ ID NO: 78752 - RNA, 18 nt, Artificial Sequence
  Synthetic
aacauaguauugagagaa

SEQ ID NO: 78753 - RNA, 19 nt, Artificial Sequence
  Synthetic
aaacauaguauugagagaa

SEQ ID NO: 78754 - RNA, 20 nt, Artificial Sequence
  Synthetic
aaaacauaguauugagagaa

SEQ ID NO: 78755 - RNA, 21 nt, Artificial Sequence
  Synthetic
uaaaacauaguauugagagaa

SEQ ID NO: 78756 - RNA, 23 nt, Artificial Sequence
  Synthetic
uguaaaacauaguauugagagaa

SEQ ID NO: 78757 - RNA, 24 nt, Artificial Sequence
  Synthetic
auguaaaacauaguauugagagaa

SEQ ID NO: 78758 - RNA, 22 nt, Artificial Sequence
  Synthetic
uggggaaaauuggaauggagaa

SEQ ID NO: 78759 - RNA, 23 nt, Artificial Sequence
  Synthetic
cuggggaaaauuggaauggagaa

SEQ ID NO: 78760 - RNA, 24 nt, Artificial Sequence
  Synthetic
ccuggggaaaauuggaauggagaa

SEQ ID NO: 78761 - RNA, 21 nt, Artificial Sequence
  Synthetic
uggguggguaaccauggagaa

SEQ ID NO: 78762 - RNA, 24 nt, Artificial Sequence
  Synthetic
agguggguggguaaccauggagaa

SEQ ID NO: 78763 - RNA, 18 nt, Artificial Sequence
  Synthetic
uagacucuaacuggagaa

SEQ ID NO: 78764 - RNA, 19 nt, Artificial Sequence
  Synthetic
uuagacucuaacuggagaa

SEQ ID NO: 78765 - RNA, 20 nt, Artificial Sequence
  Synthetic
uuuagacucuaacuggagaa

SEQ ID NO: 78766 - RNA, 21 nt, Artificial Sequence
  Synthetic
cuuuagacucuaacuggagaa

SEQ ID NO: 78767 - RNA, 22 nt, Artificial Sequence
  Synthetic
ccuuuagacucuaacuggagaa

SEQ ID NO: 78768 - RNA, 23 nt, Artificial Sequence
  Synthetic
uccuuuagacucuaacuggagaa

SEQ ID NO: 78769 - RNA, 24 nt, Artificial Sequence
  Synthetic
uuccuuuagacucuaacuggagaa

SEQ ID NO: 78770 - RNA, 23 nt, Artificial Sequence
  Synthetic
uggccucaugagaaggaugagaa

SEQ ID NO: 78771 - RNA, 24 nt, Artificial Sequence
  Synthetic
auggccucaugagaaggaugagaa

SEQ ID NO: 78772 - RNA, 18 nt, Artificial Sequence
  Synthetic
cucaucaagugaugagaa

SEQ ID NO: 78773 - RNA, 19 nt, Artificial Sequence
  Synthetic
ccucaucaagugaugagaa

SEQ ID NO: 78774 - RNA, 20 nt, Artificial Sequence
  Synthetic
accucaucaagugaugagaa

SEQ ID NO: 78775 - RNA, 21 nt, Artificial Sequence
  Synthetic
uaccucaucaagugaugagaa

SEQ ID NO: 78776 - RNA, 22 nt, Artificial Sequence
  Synthetic
auaccucaucaagugaugagaa

SEQ ID NO: 78777 - RNA, 23 nt, Artificial Sequence
  Synthetic
aauaccucaucaagugaugagaa

SEQ ID NO: 78778 - RNA, 24 nt, Artificial Sequence
  Synthetic
uaauaccucaucaagugaugagaa

SEQ ID NO: 78779 - RNA, 18 nt, Artificial Sequence
  Synthetic
cauaugacccagugagaa

SEQ ID NO: 78780 - RNA, 19 nt, Artificial Sequence
  Synthetic
ccauaugacccagugagaa

SEQ ID NO: 78781 - RNA, 20 nt, Artificial Sequence
  Synthetic
uccauaugacccagugagaa

SEQ ID NO: 78782 - RNA, 22 nt, Artificial Sequence
  Synthetic
uguccauaugacccagugagaa

SEQ ID NO: 78783 - RNA, 23 nt, Artificial Sequence
  Synthetic
auguccauaugacccagugagaa

SEQ ID NO: 78784 - RNA, 24 nt, Artificial Sequence
  Synthetic
aauguccauaugacccagugagaa

SEQ ID NO: 78785 - RNA, 20 nt, Artificial Sequence
  Synthetic
agguaaggggcuagugagaa

SEQ ID NO: 78786 - RNA, 23 nt, Artificial Sequence
  Synthetic
uggagguaaggggcuagugagaa

SEQ ID NO: 78787 - RNA, 18 nt, Artificial Sequence
  Synthetic
cuuuaauauuauugagaa

SEQ ID NO: 78788 - RNA, 19 nt, Artificial Sequence
  Synthetic
ucuuuaauauuauugagaa

SEQ ID NO: 78789 - RNA, 20 nt, Artificial Sequence
  Synthetic
uucuuuaauauuauugagaa

SEQ ID NO: 78790 - RNA, 21 nt, Artificial Sequence
  Synthetic
auucuuuaauauuauugagaa

SEQ ID NO: 78791 - RNA, 22 nt, Artificial Sequence
  Synthetic
cauucuuuaauauuauugagaa

SEQ ID NO: 78792 - RNA, 23 nt, Artificial Sequence
  Synthetic
acauucuuuaauauuauugagaa

SEQ ID NO: 78793 - RNA, 24 nt, Artificial Sequence
  Synthetic
aacauucuuuaauauuauugagaa

SEQ ID NO: 78794 - RNA, 19 nt, Artificial Sequence
  Synthetic
ugugcagacuucuugagaa

SEQ ID NO: 78795 - RNA, 20 nt, Artificial Sequence
  Synthetic
augugcagacuucuugagaa

SEQ ID NO: 78796 - RNA, 21 nt, Artificial Sequence
  Synthetic
uaugugcagacuucuugagaa

SEQ ID NO: 78797 - RNA, 22 nt, Artificial Sequence
  Synthetic
uuaugugcagacuucuugagaa

SEQ ID NO: 78798 - RNA, 23 nt, Artificial Sequence
  Synthetic
cuuaugugcagacuucuugagaa

SEQ ID NO: 78799 - RNA, 24 nt, Artificial Sequence
  Synthetic
ucuuaugugcagacuucuugagaa

SEQ ID NO: 78800 - RNA, 21 nt, Artificial Sequence
  Synthetic
aauuuugaagcaucaauagaa

SEQ ID NO: 78801 - RNA, 22 nt, Artificial Sequence
  Synthetic
uaauuuugaagcaucaauagaa

SEQ ID NO: 78802 - RNA, 23 nt, Artificial Sequence
  Synthetic
auaauuuugaagcaucaauagaa

SEQ ID NO: 78803 - RNA, 24 nt, Artificial Sequence
  Synthetic
aauaauuuugaagcaucaauagaa

SEQ ID NO: 78804 - RNA, 22 nt, Artificial Sequence
  Synthetic
uguuuucugucuucaaguagaa

SEQ ID NO: 78805 - RNA, 23 nt, Artificial Sequence
  Synthetic
auguuuucugucuucaaguagaa

SEQ ID NO: 78806 - RNA, 24 nt, Artificial Sequence
  Synthetic
uauguuuucugucuucaaguagaa

SEQ ID NO: 78807 - RNA, 19 nt, Artificial Sequence
  Synthetic
ugaggaauacagaguagaa

SEQ ID NO: 78808 - RNA, 21 nt, Artificial Sequence
  Synthetic
ugugaggaauacagaguagaa

SEQ ID NO: 78809 - RNA, 22 nt, Artificial Sequence
  Synthetic
augugaggaauacagaguagaa

SEQ ID NO: 78810 - RNA, 24 nt, Artificial Sequence
  Synthetic
ugaugugaggaauacagaguagaa

SEQ ID NO: 78811 - RNA, 18 nt, Artificial Sequence
  Synthetic
ucugaaauguuaguagaa

SEQ ID NO: 78812 - RNA, 19 nt, Artificial Sequence
  Synthetic
uucugaaauguuaguagaa

SEQ ID NO: 78813 - RNA, 20 nt, Artificial Sequence
  Synthetic
cuucugaaauguuaguagaa

SEQ ID NO: 78814 - RNA, 21 nt, Artificial Sequence
  Synthetic
acuucugaaauguuaguagaa

SEQ ID NO: 78815 - RNA, 22 nt, Artificial Sequence
  Synthetic
uacuucugaaauguuaguagaa

SEQ ID NO: 78816 - RNA, 23 nt, Artificial Sequence
  Synthetic
uuacuucugaaauguuaguagaa

SEQ ID NO: 78817 - RNA, 24 nt, Artificial Sequence
  Synthetic
auuacuucugaaauguuaguagaa

SEQ ID NO: 78818 - RNA, 20 nt, Artificial Sequence
  Synthetic
uggcaguuaaguccguagaa

SEQ ID NO: 78819 - RNA, 21 nt, Artificial Sequence
  Synthetic
auggcaguuaaguccguagaa

SEQ ID NO: 78820 - RNA, 23 nt, Artificial Sequence
  Synthetic
agauggcaguuaaguccguagaa

SEQ ID NO: 78821 - RNA, 24 nt, Artificial Sequence
  Synthetic
aagauggcaguuaaguccguagaa

SEQ ID NO: 78822 - RNA, 21 nt, Artificial Sequence
  Synthetic
auauacauaauuaugguagaa

SEQ ID NO: 78823 - RNA, 22 nt, Artificial Sequence
  Synthetic
cauauacauaauuaugguagaa

SEQ ID NO: 78824 - RNA, 23 nt, Artificial Sequence
  Synthetic
ucauauacauaauuaugguagaa

SEQ ID NO: 78825 - RNA, 24 nt, Artificial Sequence
  Synthetic
cucauauacauaauuaugguagaa

SEQ ID NO: 78826 - RNA, 18 nt, Artificial Sequence
  Synthetic
aguugagaggguguagaa

SEQ ID NO: 78827 - RNA, 19 nt, Artificial Sequence
  Synthetic
caguugagaggguguagaa

SEQ ID NO: 78828 - RNA, 20 nt, Artificial Sequence
  Synthetic
ucaguugagaggguguagaa

SEQ ID NO: 78829 - RNA, 22 nt, Artificial Sequence
  Synthetic
agucaguugagaggguguagaa

SEQ ID NO: 78830 - RNA, 23 nt, Artificial Sequence
  Synthetic
aagucaguugagaggguguagaa

SEQ ID NO: 78831 - RNA, 24 nt, Artificial Sequence
  Synthetic
aaagucaguugagaggguguagaa

SEQ ID NO: 78832 - RNA, 18 nt, Artificial Sequence
  Synthetic
uuucuuccucaauuagaa

SEQ ID NO: 78833 - RNA, 19 nt, Artificial Sequence
  Synthetic
auuucuuccucaauuagaa

SEQ ID NO: 78834 - RNA, 21 nt, Artificial Sequence
  Synthetic
ugauuucuuccucaauuagaa

SEQ ID NO: 78835 - RNA, 22 nt, Artificial Sequence
  Synthetic
augauuucuuccucaauuagaa

SEQ ID NO: 78836 - RNA, 23 nt, Artificial Sequence
  Synthetic
uaugauuucuuccucaauuagaa

SEQ ID NO: 78837 - RNA, 24 nt, Artificial Sequence
  Synthetic
auaugauuucuuccucaauuagaa

SEQ ID NO: 78838 - RNA, 19 nt, Artificial Sequence
  Synthetic
agcaaaaugaauauuagaa

SEQ ID NO: 78839 - RNA, 21 nt, Artificial Sequence
  Synthetic
ugagcaaaaugaauauuagaa

SEQ ID NO: 78840 - RNA, 22 nt, Artificial Sequence
  Synthetic
augagcaaaaugaauauuagaa

SEQ ID NO: 78841 - RNA, 23 nt, Artificial Sequence
  Synthetic
aaugagcaaaaugaauauuagaa

SEQ ID NO: 78842 - RNA, 24 nt, Artificial Sequence
  Synthetic
uaaugagcaaaaugaauauuagaa

SEQ ID NO: 78843 - RNA, 18 nt, Artificial Sequence
  Synthetic
auucugucucuauuagaa

SEQ ID NO: 78844 - RNA, 19 nt, Artificial Sequence
  Synthetic
uauucugucucuauuagaa

SEQ ID NO: 78845 - RNA, 20 nt, Artificial Sequence
  Synthetic
cuauucugucucuauuagaa

SEQ ID NO: 78846 - RNA, 21 nt, Artificial Sequence
  Synthetic
ucuauucugucucuauuagaa

SEQ ID NO: 78847 - RNA, 22 nt, Artificial Sequence
  Synthetic
aucuauucugucucuauuagaa

SEQ ID NO: 78848 - RNA, 23 nt, Artificial Sequence
  Synthetic
caucuauucugucucuauuagaa

SEQ ID NO: 78849 - RNA, 24 nt, Artificial Sequence
  Synthetic
ucaucuauucugucucuauuagaa

SEQ ID NO: 78850 - RNA, 21 nt, Artificial Sequence
  Synthetic
aauuaugguauauccuuagaa

SEQ ID NO: 78851 - RNA, 23 nt, Artificial Sequence
  Synthetic
ugaauuaugguauauccuuagaa

SEQ ID NO: 78852 - RNA, 18 nt, Artificial Sequence
  Synthetic
auuaugauaugcuuagaa

SEQ ID NO: 78853 - RNA, 20 nt, Artificial Sequence
  Synthetic
ugauuaugauaugcuuagaa

SEQ ID NO: 78854 - RNA, 22 nt, Artificial Sequence
  Synthetic
agugauuaugauaugcuuagaa

SEQ ID NO: 78855 - RNA, 23 nt, Artificial Sequence
  Synthetic
aagugauuaugauaugcuuagaa

SEQ ID NO: 78856 - RNA, 18 nt, Artificial Sequence
  Synthetic
aggagacggaauuuagaa

SEQ ID NO: 78857 - RNA, 20 nt, Artificial Sequence
  Synthetic
agaggagacggaauuuagaa

SEQ ID NO: 78858 - RNA, 21 nt, Artificial Sequence
  Synthetic
cagaggagacggaauuuagaa

SEQ ID NO: 78859 - RNA, 22 nt, Artificial Sequence
  Synthetic
ucagaggagacggaauuuagaa

SEQ ID NO: 78860 - RNA, 23 nt, Artificial Sequence
  Synthetic
cucagaggagacggaauuuagaa

SEQ ID NO: 78861 - RNA, 18 nt, Artificial Sequence
  Synthetic
agguacagcuauuuagaa

SEQ ID NO: 78862 - RNA, 20 nt, Artificial Sequence
  Synthetic
ugagguacagcuauuuagaa

SEQ ID NO: 78863 - RNA, 21 nt, Artificial Sequence
  Synthetic
cugagguacagcuauuuagaa

SEQ ID NO: 78864 - RNA, 22 nt, Artificial Sequence
  Synthetic
acugagguacagcuauuuagaa

SEQ ID NO: 78865 - RNA, 23 nt, Artificial Sequence
  Synthetic
aacugagguacagcuauuuagaa

SEQ ID NO: 78866 - RNA, 21 nt, Artificial Sequence
  Synthetic
ucauucuaauaauuuuuagaa

SEQ ID NO: 78867 - RNA, 22 nt, Artificial Sequence
  Synthetic
uucauucuaauaauuuuuagaa

SEQ ID NO: 78868 - RNA, 23 nt, Artificial Sequence
  Synthetic
auucauucuaauaauuuuuagaa

SEQ ID NO: 78869 - RNA, 24 nt, Artificial Sequence
  Synthetic
aauucauucuaauaauuuuuagaa

SEQ ID NO: 78870 - RNA, 18 nt, Artificial Sequence
  Synthetic
caccuacugcuuugcgaa

SEQ ID NO: 78871 - RNA, 19 nt, Artificial Sequence
  Synthetic
ucaccuacugcuuugcgaa

SEQ ID NO: 78872 - RNA, 20 nt, Artificial Sequence
  Synthetic
cucaccuacugcuuugcgaa

SEQ ID NO: 78873 - RNA, 22 nt, Artificial Sequence
  Synthetic
ugcucaccuacugcuuugcgaa

SEQ ID NO: 78874 - RNA, 23 nt, Artificial Sequence
  Synthetic
cugcucaccuacugcuuugcgaa

SEQ ID NO: 78875 - RNA, 18 nt, Artificial Sequence
  Synthetic
uuuuuucaauagaucgaa

SEQ ID NO: 78876 - RNA, 19 nt, Artificial Sequence
  Synthetic
auuuuuucaauagaucgaa

SEQ ID NO: 78877 - RNA, 20 nt, Artificial Sequence
  Synthetic
aauuuuuucaauagaucgaa

SEQ ID NO: 78878 - RNA, 21 nt, Artificial Sequence
  Synthetic
uaauuuuuucaauagaucgaa

SEQ ID NO: 78879 - RNA, 22 nt, Artificial Sequence
  Synthetic
auaauuuuuucaauagaucgaa

SEQ ID NO: 78880 - RNA, 23 nt, Artificial Sequence
  Synthetic
uauaauuuuuucaauagaucgaa

SEQ ID NO: 78881 - RNA, 24 nt, Artificial Sequence
  Synthetic
uuauaauuuuuucaauagaucgaa

SEQ ID NO: 78882 - RNA, 21 nt, Artificial Sequence
  Synthetic
acuacagaaaacagaaaggaa

SEQ ID NO: 78883 - RNA, 22 nt, Artificial Sequence
  Synthetic
aacuacagaaaacagaaaggaa

SEQ ID NO: 78884 - RNA, 23 nt, Artificial Sequence
  Synthetic
aaacuacagaaaacagaaaggaa

SEQ ID NO: 78885 - RNA, 24 nt, Artificial Sequence
  Synthetic
caaacuacagaaaacagaaaggaa

SEQ ID NO: 78886 - RNA, 18 nt, Artificial Sequence
  Synthetic
agucauauaagcaaggaa

SEQ ID NO: 78887 - RNA, 20 nt, Artificial Sequence
  Synthetic
agagucauauaagcaaggaa

SEQ ID NO: 78888 - RNA, 21 nt, Artificial Sequence
  Synthetic
uagagucauauaagcaaggaa

SEQ ID NO: 78889 - RNA, 23 nt, Artificial Sequence
  Synthetic
uguagagucauauaagcaaggaa

SEQ ID NO: 78890 - RNA, 19 nt, Artificial Sequence
  Synthetic
aggucuguaaaauaaggaa

SEQ ID NO: 78891 - RNA, 20 nt, Artificial Sequence
  Synthetic
aaggucuguaaaauaaggaa

SEQ ID NO: 78892 - RNA, 21 nt, Artificial Sequence
  Synthetic
caaggucuguaaaauaaggaa

SEQ ID NO: 78893 - RNA, 22 nt, Artificial Sequence
  Synthetic
acaaggucuguaaaauaaggaa

SEQ ID NO: 78894 - RNA, 23 nt, Artificial Sequence
  Synthetic
aacaaggucuguaaaauaaggaa

SEQ ID NO: 78895 - RNA, 19 nt, Artificial Sequence
  Synthetic
uggcuacgaaauacaggaa

SEQ ID NO: 78896 - RNA, 20 nt, Artificial Sequence
  Synthetic
auggcuacgaaauacaggaa

SEQ ID NO: 78897 - RNA, 21 nt, Artificial Sequence
  Synthetic
uauggcuacgaaauacaggaa

SEQ ID NO: 78898 - RNA, 22 nt, Artificial Sequence
  Synthetic
auauggcuacgaaauacaggaa

SEQ ID NO: 78899 - RNA, 23 nt, Artificial Sequence
  Synthetic
cauauggcuacgaaauacaggaa

SEQ ID NO: 78900 - RNA, 24 nt, Artificial Sequence
  Synthetic
acauauggcuacgaaauacaggaa

SEQ ID NO: 78901 - RNA, 18 nt, Artificial Sequence
  Synthetic
aacucuacaucccaggaa

SEQ ID NO: 78902 - RNA, 19 nt, Artificial Sequence
  Synthetic
aaacucuacaucccaggaa

SEQ ID NO: 78903 - RNA, 20 nt, Artificial Sequence
  Synthetic
uaaacucuacaucccaggaa

SEQ ID NO: 78904 - RNA, 21 nt, Artificial Sequence
  Synthetic
uuaaacucuacaucccaggaa

SEQ ID NO: 78905 - RNA, 22 nt, Artificial Sequence
  Synthetic
auuaaacucuacaucccaggaa

SEQ ID NO: 78906 - RNA, 19 nt, Artificial Sequence
  Synthetic
agguuuuuguuaucaggaa

SEQ ID NO: 78907 - RNA, 20 nt, Artificial Sequence
  Synthetic
aagguuuuuguuaucaggaa

SEQ ID NO: 78908 - RNA, 21 nt, Artificial Sequence
  Synthetic
aaagguuuuuguuaucaggaa

SEQ ID NO: 78909 - RNA, 22 nt, Artificial Sequence
  Synthetic
caaagguuuuuguuaucaggaa

SEQ ID NO: 78910 - RNA, 23 nt, Artificial Sequence
  Synthetic
acaaagguuuuuguuaucaggaa

SEQ ID NO: 78911 - RNA, 24 nt, Artificial Sequence
  Synthetic
aacaaagguuuuuguuaucaggaa

SEQ ID NO: 78912 - RNA, 19 nt, Artificial Sequence
  Synthetic
aguauauaguacucaggaa

SEQ ID NO: 78913 - RNA, 20 nt, Artificial Sequence
  Synthetic
caguauauaguacucaggaa

SEQ ID NO: 78914 - RNA, 21 nt, Artificial Sequence
  Synthetic
acaguauauaguacucaggaa

SEQ ID NO: 78915 - RNA, 22 nt, Artificial Sequence
  Synthetic
uacaguauauaguacucaggaa

SEQ ID NO: 78916 - RNA, 18 nt, Artificial Sequence
  Synthetic
uagaagucuagucaggaa

SEQ ID NO: 78917 - RNA, 19 nt, Artificial Sequence
  Synthetic
auagaagucuagucaggaa

SEQ ID NO: 78918 - RNA, 22 nt, Artificial Sequence
  Synthetic
aggauagaagucuagucaggaa

SEQ ID NO: 78919 - RNA, 23 nt, Artificial Sequence
  Synthetic
aaggauagaagucuagucaggaa

SEQ ID NO: 78920 - RNA, 24 nt, Artificial Sequence
  Synthetic
aaaggauagaagucuagucaggaa

SEQ ID NO: 78921 - RNA, 18 nt, Artificial Sequence
  Synthetic
aaugggcaaacagaggaa

SEQ ID NO: 78922 - RNA, 19 nt, Artificial Sequence
  Synthetic
uaaugggcaaacagaggaa

SEQ ID NO: 78923 - RNA, 20 nt, Artificial Sequence
  Synthetic
uuaaugggcaaacagaggaa

SEQ ID NO: 78924 - RNA, 21 nt, Artificial Sequence
  Synthetic
uuuaaugggcaaacagaggaa

SEQ ID NO: 78925 - RNA, 23 nt, Artificial Sequence
  Synthetic
aguuuaaugggcaaacagaggaa

SEQ ID NO: 78926 - RNA, 24 nt, Artificial Sequence
  Synthetic
aaguuuaaugggcaaacagaggaa

SEQ ID NO: 78927 - RNA, 22 nt, Artificial Sequence
  Synthetic
agagugagaauuuugagaggaa

SEQ ID NO: 78928 - RNA, 24 nt, Artificial Sequence
  Synthetic
agagagugagaauuuugagaggaa

SEQ ID NO: 78929 - RNA, 20 nt, Artificial Sequence
  Synthetic
uggauuugggguaggaggaa

SEQ ID NO: 78930 - RNA, 21 nt, Artificial Sequence
  Synthetic
uuggauuugggguaggaggaa

SEQ ID NO: 78931 - RNA, 22 nt, Artificial Sequence
  Synthetic
uuuggauuugggguaggaggaa

SEQ ID NO: 78932 - RNA, 23 nt, Artificial Sequence
  Synthetic
auuuggauuugggguaggaggaa

SEQ ID NO: 78933 - RNA, 24 nt, Artificial Sequence
  Synthetic
cauuuggauuugggguaggaggaa

SEQ ID NO: 78934 - RNA, 18 nt, Artificial Sequence
  Synthetic
aaauaucuccaugaggaa

SEQ ID NO: 78935 - RNA, 19 nt, Artificial Sequence
  Synthetic
aaaauaucuccaugaggaa

SEQ ID NO: 78936 - RNA, 20 nt, Artificial Sequence
  Synthetic
uaaaauaucuccaugaggaa

SEQ ID NO: 78937 - RNA, 21 nt, Artificial Sequence
  Synthetic
cuaaaauaucuccaugaggaa

SEQ ID NO: 78938 - RNA, 22 nt, Artificial Sequence
  Synthetic
acuaaaauaucuccaugaggaa

SEQ ID NO: 78939 - RNA, 23 nt, Artificial Sequence
  Synthetic
aacuaaaauaucuccaugaggaa

SEQ ID NO: 78940 - RNA, 24 nt, Artificial Sequence
  Synthetic
uaacuaaaauaucuccaugaggaa

SEQ ID NO: 78941 - RNA, 18 nt, Artificial Sequence
  Synthetic
uaaggggaagaugaggaa

SEQ ID NO: 78942 - RNA, 19 nt, Artificial Sequence
  Synthetic
uuaaggggaagaugaggaa

SEQ ID NO: 78943 - RNA, 20 nt, Artificial Sequence
  Synthetic
auuaaggggaagaugaggaa

SEQ ID NO: 78944 - RNA, 21 nt, Artificial Sequence
  Synthetic
uauuaaggggaagaugaggaa

SEQ ID NO: 78945 - RNA, 23 nt, Artificial Sequence
  Synthetic
uguauuaaggggaagaugaggaa

SEQ ID NO: 78946 - RNA, 24 nt, Artificial Sequence
  Synthetic
uuguauuaaggggaagaugaggaa

SEQ ID NO: 78947 - RNA, 18 nt, Artificial Sequence
  Synthetic
ugggaguugacugaggaa

SEQ ID NO: 78948 - RNA, 20 nt, Artificial Sequence
  Synthetic
ugugggaguugacugaggaa

SEQ ID NO: 78949 - RNA, 22 nt, Artificial Sequence
  Synthetic
agugugggaguugacugaggaa

SEQ ID NO: 78950 - RNA, 24 nt, Artificial Sequence
  Synthetic
agagugugggaguugacugaggaa

SEQ ID NO: 78951 - RNA, 21 nt, Artificial Sequence
  Synthetic
uacaaacucuuuaaauaggaa

SEQ ID NO: 78952 - RNA, 22 nt, Artificial Sequence
  Synthetic
cuacaaacucuuuaaauaggaa

SEQ ID NO: 78953 - RNA, 23 nt, Artificial Sequence
  Synthetic
acuacaaacucuuuaaauaggaa

SEQ ID NO: 78954 - RNA, 24 nt, Artificial Sequence
  Synthetic
aacuacaaacucuuuaaauaggaa

SEQ ID NO: 78955 - RNA, 18 nt, Artificial Sequence
  Synthetic
uguaggauugaauaggaa

SEQ ID NO: 78956 - RNA, 21 nt, Artificial Sequence
  Synthetic
cgguguaggauugaauaggaa

SEQ ID NO: 78957 - RNA, 23 nt, Artificial Sequence
  Synthetic
ugcgguguaggauugaauaggaa

SEQ ID NO: 78958 - RNA, 24 nt, Artificial Sequence
  Synthetic
cugcgguguaggauugaauaggaa

SEQ ID NO: 78959 - RNA, 18 nt, Artificial Sequence
  Synthetic
caaaaaggcaccuaggaa

SEQ ID NO: 78960 - RNA, 19 nt, Artificial Sequence
  Synthetic
ucaaaaaggcaccuaggaa

SEQ ID NO: 78961 - RNA, 20 nt, Artificial Sequence
  Synthetic
uucaaaaaggcaccuaggaa

SEQ ID NO: 78962 - RNA, 21 nt, Artificial Sequence
  Synthetic
auucaaaaaggcaccuaggaa

SEQ ID NO: 78963 - RNA, 22 nt, Artificial Sequence
  Synthetic
aauucaaaaaggcaccuaggaa

SEQ ID NO: 78964 - RNA, 23 nt, Artificial Sequence
  Synthetic
caauucaaaaaggcaccuaggaa

SEQ ID NO: 78965 - RNA, 24 nt, Artificial Sequence
  Synthetic
ucaauucaaaaaggcaccuaggaa

SEQ ID NO: 78966 - RNA, 18 nt, Artificial Sequence
  Synthetic
cuucuuguuagcuaggaa

SEQ ID NO: 78967 - RNA, 19 nt, Artificial Sequence
  Synthetic
ucuucuuguuagcuaggaa

SEQ ID NO: 78968 - RNA, 20 nt, Artificial Sequence
  Synthetic
uucuucuuguuagcuaggaa

SEQ ID NO: 78969 - RNA, 21 nt, Artificial Sequence
  Synthetic
uuucuucuuguuagcuaggaa

SEQ ID NO: 78970 - RNA, 22 nt, Artificial Sequence
  Synthetic
auuucuucuuguuagcuaggaa

SEQ ID NO: 78971 - RNA, 23 nt, Artificial Sequence
  Synthetic
cauuucuucuuguuagcuaggaa

SEQ ID NO: 78972 - RNA, 24 nt, Artificial Sequence
  Synthetic
acauuucuucuuguuagcuaggaa

SEQ ID NO: 78973 - RNA, 18 nt, Artificial Sequence
  Synthetic
uacuccuauuucuaggaa

SEQ ID NO: 78974 - RNA, 20 nt, Artificial Sequence
  Synthetic
aguacuccuauuucuaggaa

SEQ ID NO: 78975 - RNA, 21 nt, Artificial Sequence
  Synthetic
uaguacuccuauuucuaggaa

SEQ ID NO: 78976 - RNA, 24 nt, Artificial Sequence
  Synthetic
agguaguacuccuauuucuaggaa

SEQ ID NO: 78977 - RNA, 18 nt, Artificial Sequence
  Synthetic
auuguuggagaguaggaa

SEQ ID NO: 78978 - RNA, 19 nt, Artificial Sequence
  Synthetic
aauuguuggagaguaggaa

SEQ ID NO: 78979 - RNA, 20 nt, Artificial Sequence
  Synthetic
aaauuguuggagaguaggaa

SEQ ID NO: 78980 - RNA, 23 nt, Artificial Sequence
  Synthetic
aggaaauuguuggagaguaggaa

SEQ ID NO: 78981 - RNA, 19 nt, Artificial Sequence
  Synthetic
uggcauguaaacguaggaa

SEQ ID NO: 78982 - RNA, 20 nt, Artificial Sequence
  Synthetic
uuggcauguaaacguaggaa

SEQ ID NO: 78983 - RNA, 21 nt, Artificial Sequence
  Synthetic
uuuggcauguaaacguaggaa

SEQ ID NO: 78984 - RNA, 22 nt, Artificial Sequence
  Synthetic
auuuggcauguaaacguaggaa

SEQ ID NO: 78985 - RNA, 23 nt, Artificial Sequence
  Synthetic
uauuuggcauguaaacguaggaa

SEQ ID NO: 78986 - RNA, 19 nt, Artificial Sequence
  Synthetic
agggcaguucauuuaggaa

SEQ ID NO: 78987 - RNA, 20 nt, Artificial Sequence
  Synthetic
cagggcaguucauuuaggaa

SEQ ID NO: 78988 - RNA, 21 nt, Artificial Sequence
  Synthetic
acagggcaguucauuuaggaa

SEQ ID NO: 78989 - RNA, 22 nt, Artificial Sequence
  Synthetic
cacagggcaguucauuuaggaa

SEQ ID NO: 78990 - RNA, 23 nt, Artificial Sequence
  Synthetic
acacagggcaguucauuuaggaa

SEQ ID NO: 78991 - RNA, 18 nt, Artificial Sequence
  Synthetic
aagacaugucuuuaggaa

SEQ ID NO: 78992 - RNA, 20 nt, Artificial Sequence
  Synthetic
agaagacaugucuuuaggaa

SEQ ID NO: 78993 - RNA, 21 nt, Artificial Sequence
  Synthetic
aagaagacaugucuuuaggaa

SEQ ID NO: 78994 - RNA, 22 nt, Artificial Sequence
  Synthetic
aaagaagacaugucuuuaggaa

SEQ ID NO: 78995 - RNA, 24 nt, Artificial Sequence
  Synthetic
ugaaagaagacaugucuuuaggaa

SEQ ID NO: 78996 - RNA, 18 nt, Artificial Sequence
  Synthetic
augcuccaggagagggaa

SEQ ID NO: 78997 - RNA, 19 nt, Artificial Sequence
  Synthetic
aaugcuccaggagagggaa

SEQ ID NO: 78998 - RNA, 20 nt, Artificial Sequence
  Synthetic
aaaugcuccaggagagggaa

SEQ ID NO: 78999 - RNA, 22 nt, Artificial Sequence
  Synthetic
agaaaugcuccaggagagggaa

SEQ ID NO: 79000 - RNA, 23 nt, Artificial Sequence
  Synthetic
aagaaaugcuccaggagagggaa

SEQ ID NO: 79001 - RNA, 24 nt, Artificial Sequence
  Synthetic
aaagaaaugcuccaggagagggaa

SEQ ID NO: 79002 - RNA, 18 nt, Artificial Sequence
  Synthetic
ucgcacauauauagggaa

SEQ ID NO: 79003 - RNA, 19 nt, Artificial Sequence
  Synthetic
aucgcacauauauagggaa

SEQ ID NO: 79004 - RNA, 20 nt, Artificial Sequence
  Synthetic
aaucgcacauauauagggaa

SEQ ID NO: 79005 - RNA, 21 nt, Artificial Sequence
  Synthetic
uaaucgcacauauauagggaa

SEQ ID NO: 79006 - RNA, 22 nt, Artificial Sequence
  Synthetic
uuaaucgcacauauauagggaa

SEQ ID NO: 79007 - RNA, 23 nt, Artificial Sequence
  Synthetic
auuaaucgcacauauauagggaa

SEQ ID NO: 79008 - RNA, 18 nt, Artificial Sequence
  Synthetic
aaacacgagauuagggaa

SEQ ID NO: 79009 - RNA, 19 nt, Artificial Sequence
  Synthetic
aaaacacgagauuagggaa

SEQ ID NO: 79010 - RNA, 20 nt, Artificial Sequence
  Synthetic
uaaaacacgagauuagggaa

SEQ ID NO: 79011 - RNA, 23 nt, Artificial Sequence
  Synthetic
agguaaaacacgagauuagggaa

SEQ ID NO: 79012 - RNA, 24 nt, Artificial Sequence
  Synthetic
uagguaaaacacgagauuagggaa

SEQ ID NO: 79013 - RNA, 18 nt, Artificial Sequence
  Synthetic
aagcuugcuuuuagggaa

SEQ ID NO: 79014 - RNA, 19 nt, Artificial Sequence
  Synthetic
uaagcuugcuuuuagggaa

SEQ ID NO: 79015 - RNA, 20 nt, Artificial Sequence
  Synthetic
uuaagcuugcuuuuagggaa

SEQ ID NO: 79016 - RNA, 22 nt, Artificial Sequence
  Synthetic
uguuaagcuugcuuuuagggaa

SEQ ID NO: 79017 - RNA, 23 nt, Artificial Sequence
  Synthetic
cuguuaagcuugcuuuuagggaa

SEQ ID NO: 79018 - RNA, 24 nt, Artificial Sequence
  Synthetic
ucuguuaagcuugcuuuuagggaa

SEQ ID NO: 79019 - RNA, 21 nt, Artificial Sequence
  Synthetic
uucagucacagccuccgggaa

SEQ ID NO: 79020 - RNA, 22 nt, Artificial Sequence
  Synthetic
auucagucacagccuccgggaa

SEQ ID NO: 79021 - RNA, 23 nt, Artificial Sequence
  Synthetic
aauucagucacagccuccgggaa

SEQ ID NO: 79022 - RNA, 24 nt, Artificial Sequence
  Synthetic
uaauucagucacagccuccgggaa

SEQ ID NO: 79023 - RNA, 20 nt, Artificial Sequence
  Synthetic
aggcugagugcuaaggggaa

SEQ ID NO: 79024 - RNA, 21 nt, Artificial Sequence
  Synthetic
aaggcugagugcuaaggggaa

SEQ ID NO: 79025 - RNA, 24 nt, Artificial Sequence
  Synthetic
aggaaggcugagugcuaaggggaa

SEQ ID NO: 79026 - RNA, 18 nt, Artificial Sequence
  Synthetic
cacugcauuugaggggaa

SEQ ID NO: 79027 - RNA, 19 nt, Artificial Sequence
  Synthetic
ccacugcauuugaggggaa

SEQ ID NO: 79028 - RNA, 20 nt, Artificial Sequence
  Synthetic
uccacugcauuugaggggaa

SEQ ID NO: 79029 - RNA, 21 nt, Artificial Sequence
  Synthetic
uuccacugcauuugaggggaa

SEQ ID NO: 79030 - RNA, 22 nt, Artificial Sequence
  Synthetic
cuuccacugcauuugaggggaa

SEQ ID NO: 79031 - RNA, 24 nt, Artificial Sequence
  Synthetic
ugcuuccacugcauuugaggggaa

SEQ ID NO: 79032 - RNA, 18 nt, Artificial Sequence
  Synthetic
caucagaaacuaggggaa

SEQ ID NO: 79033 - RNA, 19 nt, Artificial Sequence
  Synthetic
ccaucagaaacuaggggaa

SEQ ID NO: 79034 - RNA, 20 nt, Artificial Sequence
  Synthetic
accaucagaaacuaggggaa

SEQ ID NO: 79035 - RNA, 21 nt, Artificial Sequence
  Synthetic
aaccaucagaaacuaggggaa

SEQ ID NO: 79036 - RNA, 22 nt, Artificial Sequence
  Synthetic
aaaccaucagaaacuaggggaa

SEQ ID NO: 79037 - RNA, 23 nt, Artificial Sequence
  Synthetic
caaaccaucagaaacuaggggaa

SEQ ID NO: 79038 - RNA, 24 nt, Artificial Sequence
  Synthetic
acaaaccaucagaaacuaggggaa

SEQ ID NO: 79039 - RNA, 18 nt, Artificial Sequence
  Synthetic
ucuacuccauagggggaa

SEQ ID NO: 79040 - RNA, 19 nt, Artificial Sequence
  Synthetic
cucuacuccauagggggaa

SEQ ID NO: 79041 - RNA, 21 nt, Artificial Sequence
  Synthetic
ugcucuacuccauagggggaa

SEQ ID NO: 79042 - RNA, 22 nt, Artificial Sequence
  Synthetic
cugcucuacuccauagggggaa

SEQ ID NO: 79043 - RNA, 23 nt, Artificial Sequence
  Synthetic
acugcucuacuccauagggggaa

SEQ ID NO: 79044 - RNA, 24 nt, Artificial Sequence
  Synthetic
aacugcucuacuccauagggggaa

SEQ ID NO: 79045 - RNA, 18 nt, Artificial Sequence
  Synthetic
aggugaaaaccuggggaa

SEQ ID NO: 79046 - RNA, 19 nt, Artificial Sequence
  Synthetic
caggugaaaaccuggggaa

SEQ ID NO: 79047 - RNA, 20 nt, Artificial Sequence
  Synthetic
ucaggugaaaaccuggggaa

SEQ ID NO: 79048 - RNA, 23 nt, Artificial Sequence
  Synthetic
aggucaggugaaaaccuggggaa

SEQ ID NO: 79049 - RNA, 24 nt, Artificial Sequence
  Synthetic
caggucaggugaaaaccuggggaa

SEQ ID NO: 79050 - RNA, 21 nt, Artificial Sequence
  Synthetic
caauuucuggcagguggggaa

SEQ ID NO: 79051 - RNA, 18 nt, Artificial Sequence
  Synthetic
aaaagaauagcaugggaa

SEQ ID NO: 79052 - RNA, 19 nt, Artificial Sequence
  Synthetic
aaaaagaauagcaugggaa

SEQ ID NO: 79053 - RNA, 20 nt, Artificial Sequence
  Synthetic
uaaaaagaauagcaugggaa

SEQ ID NO: 79054 - RNA, 23 nt, Artificial Sequence
  Synthetic
agguaaaaagaauagcaugggaa

SEQ ID NO: 79055 - RNA, 24 nt, Artificial Sequence
  Synthetic
cagguaaaaagaauagcaugggaa

SEQ ID NO: 79056 - RNA, 18 nt, Artificial Sequence
  Synthetic
acuuugagccuaugggaa

SEQ ID NO: 79057 - RNA, 19 nt, Artificial Sequence
  Synthetic
aacuuugagccuaugggaa

SEQ ID NO: 79058 - RNA, 20 nt, Artificial Sequence
  Synthetic
caacuuugagccuaugggaa

SEQ ID NO: 79059 - RNA, 22 nt, Artificial Sequence
  Synthetic
ugcaacuuugagccuaugggaa

SEQ ID NO: 79060 - RNA, 23 nt, Artificial Sequence
  Synthetic
uugcaacuuugagccuaugggaa

SEQ ID NO: 79061 - RNA, 18 nt, Artificial Sequence
  Synthetic
aaguguuagaacugggaa

SEQ ID NO: 79062 - RNA, 19 nt, Artificial Sequence
  Synthetic
uaaguguuagaacugggaa

SEQ ID NO: 79063 - RNA, 20 nt, Artificial Sequence
  Synthetic
auaaguguuagaacugggaa

SEQ ID NO: 79064 - RNA, 22 nt, Artificial Sequence
  Synthetic
ugauaaguguuagaacugggaa

SEQ ID NO: 79065 - RNA, 23 nt, Artificial Sequence
  Synthetic
cugauaaguguuagaacugggaa

SEQ ID NO: 79066 - RNA, 18 nt, Artificial Sequence
  Synthetic
acuucaugacacugggaa

SEQ ID NO: 79067 - RNA, 19 nt, Artificial Sequence
  Synthetic
aacuucaugacacugggaa

SEQ ID NO: 79068 - RNA, 20 nt, Artificial Sequence
  Synthetic
uaacuucaugacacugggaa

SEQ ID NO: 79069 - RNA, 21 nt, Artificial Sequence
  Synthetic
uuaacuucaugacacugggaa

SEQ ID NO: 79070 - RNA, 22 nt, Artificial Sequence
  Synthetic
uuuaacuucaugacacugggaa

SEQ ID NO: 79071 - RNA, 23 nt, Artificial Sequence
  Synthetic
auuuaacuucaugacacugggaa

SEQ ID NO: 79072 - RNA, 24 nt, Artificial Sequence
  Synthetic
uauuuaacuucaugacacugggaa

SEQ ID NO: 79073 - RNA, 18 nt, Artificial Sequence
  Synthetic
agauuuaaucaaauggaa

SEQ ID NO: 79074 - RNA, 19 nt, Artificial Sequence
  Synthetic
cagauuuaaucaaauggaa

SEQ ID NO: 79075 - RNA, 20 nt, Artificial Sequence
  Synthetic
acagauuuaaucaaauggaa

SEQ ID NO: 79076 - RNA, 21 nt, Artificial Sequence
  Synthetic
uacagauuuaaucaaauggaa

SEQ ID NO: 79077 - RNA, 23 nt, Artificial Sequence
  Synthetic
aguacagauuuaaucaaauggaa

SEQ ID NO: 79078 - RNA, 24 nt, Artificial Sequence
  Synthetic
aaguacagauuuaaucaaauggaa

SEQ ID NO: 79079 - RNA, 19 nt, Artificial Sequence
  Synthetic
ugucuucucucaaauggaa

SEQ ID NO: 79080 - RNA, 21 nt, Artificial Sequence
  Synthetic
ugugucuucucucaaauggaa

SEQ ID NO: 79081 - RNA, 22 nt, Artificial Sequence
  Synthetic
cugugucuucucucaaauggaa

SEQ ID NO: 79082 - RNA, 23 nt, Artificial Sequence
  Synthetic
acugugucuucucucaaauggaa

SEQ ID NO: 79083 - RNA, 24 nt, Artificial Sequence
  Synthetic
aacugugucuucucucaaauggaa

SEQ ID NO: 79084 - RNA, 21 nt, Artificial Sequence
  Synthetic
cugaacaaacagauaauggaa

SEQ ID NO: 79085 - RNA, 22 nt, Artificial Sequence
  Synthetic
acugaacaaacagauaauggaa

SEQ ID NO: 79086 - RNA, 23 nt, Artificial Sequence
  Synthetic
aacugaacaaacagauaauggaa

SEQ ID NO: 79087 - RNA, 21 nt, Artificial Sequence
  Synthetic
aguaaaacaguggccauggaa

SEQ ID NO: 79088 - RNA, 22 nt, Artificial Sequence
  Synthetic
caguaaaacaguggccauggaa

SEQ ID NO: 79089 - RNA, 23 nt, Artificial Sequence
  Synthetic
ucaguaaaacaguggccauggaa

SEQ ID NO: 79090 - RNA, 18 nt, Artificial Sequence
  Synthetic
cuuagcucaaagauggaa

SEQ ID NO: 79091 - RNA, 19 nt, Artificial Sequence
  Synthetic
ccuuagcucaaagauggaa

SEQ ID NO: 79092 - RNA, 21 nt, Artificial Sequence
  Synthetic
ugccuuagcucaaagauggaa

SEQ ID NO: 79093 - RNA, 23 nt, Artificial Sequence
  Synthetic
ugugccuuagcucaaagauggaa

SEQ ID NO: 79094 - RNA, 24 nt, Artificial Sequence
  Synthetic
augugccuuagcucaaagauggaa

SEQ ID NO: 79095 - RNA, 18 nt, Artificial Sequence
  Synthetic
uagcauauauaacuggaa

SEQ ID NO: 79096 - RNA, 19 nt, Artificial Sequence
  Synthetic
auagcauauauaacuggaa

SEQ ID NO: 79097 - RNA, 20 nt, Artificial Sequence
  Synthetic
cauagcauauauaacuggaa

SEQ ID NO: 79098 - RNA, 22 nt, Artificial Sequence
  Synthetic
ugcauagcauauauaacuggaa

SEQ ID NO: 79099 - RNA, 23 nt, Artificial Sequence
  Synthetic
uugcauagcauauauaacuggaa

SEQ ID NO: 79100 - RNA, 19 nt, Artificial Sequence
  Synthetic
uggggucuuaauccuggaa

SEQ ID NO: 79101 - RNA, 20 nt, Artificial Sequence
  Synthetic
auggggucuuaauccuggaa

SEQ ID NO: 79102 - RNA, 22 nt, Artificial Sequence
  Synthetic
cgauggggucuuaauccuggaa

SEQ ID NO: 79103 - RNA, 24 nt, Artificial Sequence
  Synthetic
ugcgauggggucuuaauccuggaa

SEQ ID NO: 79104 - RNA, 18 nt, Artificial Sequence
  Synthetic
cgaacugagaagcuggaa

SEQ ID NO: 79105 - RNA, 20 nt, Artificial Sequence
  Synthetic
cgcgaacugagaagcuggaa

SEQ ID NO: 79106 - RNA, 21 nt, Artificial Sequence
  Synthetic
acgcgaacugagaagcuggaa

SEQ ID NO: 79107 - RNA, 22 nt, Artificial Sequence
  Synthetic
cacgcgaacugagaagcuggaa

SEQ ID NO: 79108 - RNA, 23 nt, Artificial Sequence
  Synthetic
acacgcgaacugagaagcuggaa

SEQ ID NO: 79109 - RNA, 24 nt, Artificial Sequence
  Synthetic
cacacgcgaacugagaagcuggaa

SEQ ID NO: 79110 - RNA, 23 nt, Artificial Sequence
  Synthetic
uggcugagggagguucucuggaa

SEQ ID NO: 79111 - RNA, 24 nt, Artificial Sequence
  Synthetic
uuggcugagggagguucucuggaa

SEQ ID NO: 79112 - RNA, 18 nt, Artificial Sequence
  Synthetic
augcugcuaauucuggaa

SEQ ID NO: 79113 - RNA, 19 nt, Artificial Sequence
  Synthetic
aaugcugcuaauucuggaa

SEQ ID NO: 79114 - RNA, 22 nt, Artificial Sequence
  Synthetic
uggaaugcugcuaauucuggaa

SEQ ID NO: 79115 - RNA, 23 nt, Artificial Sequence
  Synthetic
auggaaugcugcuaauucuggaa

SEQ ID NO: 79116 - RNA, 24 nt, Artificial Sequence
  Synthetic
aauggaaugcugcuaauucuggaa

SEQ ID NO: 79117 - RNA, 18 nt, Artificial Sequence
  Synthetic
accuaaaauguucuggaa

SEQ ID NO: 79118 - RNA, 19 nt, Artificial Sequence
  Synthetic
aaccuaaaauguucuggaa

SEQ ID NO: 79119 - RNA, 20 nt, Artificial Sequence
  Synthetic
uaaccuaaaauguucuggaa

SEQ ID NO: 79120 - RNA, 21 nt, Artificial Sequence
  Synthetic
uuaaccuaaaauguucuggaa

SEQ ID NO: 79121 - RNA, 22 nt, Artificial Sequence
  Synthetic
cuuaaccuaaaauguucuggaa

SEQ ID NO: 79122 - RNA, 23 nt, Artificial Sequence
  Synthetic
acuuaaccuaaaauguucuggaa

SEQ ID NO: 79123 - RNA, 24 nt, Artificial Sequence
  Synthetic
aacuuaaccuaaaauguucuggaa

SEQ ID NO: 79124 - RNA, 18 nt, Artificial Sequence
  Synthetic
augaggguagaaguggaa

SEQ ID NO: 79125 - RNA, 19 nt, Artificial Sequence
  Synthetic
uaugaggguagaaguggaa

SEQ ID NO: 79126 - RNA, 20 nt, Artificial Sequence
  Synthetic
cuaugaggguagaaguggaa

SEQ ID NO: 79127 - RNA, 22 nt, Artificial Sequence
  Synthetic
ugcuaugaggguagaaguggaa

SEQ ID NO: 79128 - RNA, 23 nt, Artificial Sequence
  Synthetic
augcuaugaggguagaaguggaa

SEQ ID NO: 79129 - RNA, 24 nt, Artificial Sequence
  Synthetic
aaugcuaugaggguagaaguggaa

SEQ ID NO: 79130 - RNA, 20 nt, Artificial Sequence
  Synthetic
aggcaggcuauguaguggaa

SEQ ID NO: 79131 - RNA, 23 nt, Artificial Sequence
  Synthetic
uggaggcaggcuauguaguggaa

SEQ ID NO: 79132 - RNA, 24 nt, Artificial Sequence
  Synthetic
auggaggcaggcuauguaguggaa

SEQ ID NO: 79133 - RNA, 18 nt, Artificial Sequence
  Synthetic
uuaaguuaaaauguggaa

SEQ ID NO: 79134 - RNA, 19 nt, Artificial Sequence
  Synthetic
uuuaaguuaaaauguggaa

SEQ ID NO: 79135 - RNA, 20 nt, Artificial Sequence
  Synthetic
cuuuaaguuaaaauguggaa

SEQ ID NO: 79136 - RNA, 21 nt, Artificial Sequence
  Synthetic
ucuuuaaguuaaaauguggaa

SEQ ID NO: 79137 - RNA, 23 nt, Artificial Sequence
  Synthetic
agucuuuaaguuaaaauguggaa

SEQ ID NO: 79138 - RNA, 18 nt, Artificial Sequence
  Synthetic
uuauauaacaaauuggaa

SEQ ID NO: 79139 - RNA, 19 nt, Artificial Sequence
  Synthetic
auuauauaacaaauuggaa

SEQ ID NO: 79140 - RNA, 20 nt, Artificial Sequence
  Synthetic
uauuauauaacaaauuggaa

SEQ ID NO: 79141 - RNA, 21 nt, Artificial Sequence
  Synthetic
auauuauauaacaaauuggaa

SEQ ID NO: 79142 - RNA, 22 nt, Artificial Sequence
  Synthetic
aauauuauauaacaaauuggaa

SEQ ID NO: 79143 - RNA, 23 nt, Artificial Sequence
  Synthetic
uaauauuauauaacaaauuggaa

SEQ ID NO: 79144 - RNA, 24 nt, Artificial Sequence
  Synthetic
cuaauauuauauaacaaauuggaa

SEQ ID NO: 79145 - RNA, 18 nt, Artificial Sequence
  Synthetic
agcugacauuaauuggaa

SEQ ID NO: 79146 - RNA, 19 nt, Artificial Sequence
  Synthetic
aagcugacauuaauuggaa

SEQ ID NO: 79147 - RNA, 20 nt, Artificial Sequence
  Synthetic
aaagcugacauuaauuggaa

SEQ ID NO: 79148 - RNA, 21 nt, Artificial Sequence
  Synthetic
uaaagcugacauuaauuggaa

SEQ ID NO: 79149 - RNA, 22 nt, Artificial Sequence
  Synthetic
cuaaagcugacauuaauuggaa

SEQ ID NO: 79150 - RNA, 23 nt, Artificial Sequence
  Synthetic
ucuaaagcugacauuaauuggaa

SEQ ID NO: 79151 - RNA, 24 nt, Artificial Sequence
  Synthetic
aucuaaagcugacauuaauuggaa

SEQ ID NO: 79152 - RNA, 18 nt, Artificial Sequence
  Synthetic
uggcaaaguuaauuggaa

SEQ ID NO: 79153 - RNA, 19 nt, Artificial Sequence
  Synthetic
auggcaaaguuaauuggaa

SEQ ID NO: 79154 - RNA, 20 nt, Artificial Sequence
  Synthetic
aauggcaaaguuaauuggaa

SEQ ID NO: 79155 - RNA, 21 nt, Artificial Sequence
  Synthetic
caauggcaaaguuaauuggaa

SEQ ID NO: 79156 - RNA, 22 nt, Artificial Sequence
  Synthetic
ucaauggcaaaguuaauuggaa

SEQ ID NO: 79157 - RNA, 23 nt, Artificial Sequence
  Synthetic
aucaauggcaaaguuaauuggaa

SEQ ID NO: 79158 - RNA, 24 nt, Artificial Sequence
  Synthetic
aaucaauggcaaaguuaauuggaa

SEQ ID NO: 79159 - RNA, 19 nt, Artificial Sequence
  Synthetic
ugugggacagacauuggaa

SEQ ID NO: 79160 - RNA, 20 nt, Artificial Sequence
  Synthetic
augugggacagacauuggaa

SEQ ID NO: 79161 - RNA, 21 nt, Artificial Sequence
  Synthetic
aaugugggacagacauuggaa

SEQ ID NO: 79162 - RNA, 22 nt, Artificial Sequence
  Synthetic
aaaugugggacagacauuggaa

SEQ ID NO: 79163 - RNA, 24 nt, Artificial Sequence
  Synthetic
agaaaugugggacagacauuggaa

SEQ ID NO: 79164 - RNA, 18 nt, Artificial Sequence
  Synthetic
acccuauugcuauuggaa

SEQ ID NO: 79165 - RNA, 19 nt, Artificial Sequence
  Synthetic
aacccuauugcuauuggaa

SEQ ID NO: 79166 - RNA, 20 nt, Artificial Sequence
  Synthetic
aaacccuauugcuauuggaa

SEQ ID NO: 79167 - RNA, 21 nt, Artificial Sequence
  Synthetic
aaaacccuauugcuauuggaa

SEQ ID NO: 79168 - RNA, 22 nt, Artificial Sequence
  Synthetic
aaaaacccuauugcuauuggaa

SEQ ID NO: 79169 - RNA, 23 nt, Artificial Sequence
  Synthetic
aaaaaacccuauugcuauuggaa

SEQ ID NO: 79170 - RNA, 24 nt, Artificial Sequence
  Synthetic
aaaaaaacccuauugcuauuggaa

SEQ ID NO: 79171 - RNA, 18 nt, Artificial Sequence
  Synthetic
ucagugggaguauuggaa

SEQ ID NO: 79172 - RNA, 19 nt, Artificial Sequence
  Synthetic
cucagugggaguauuggaa

SEQ ID NO: 79173 - RNA, 20 nt, Artificial Sequence
  Synthetic
ucucagugggaguauuggaa

SEQ ID NO: 79174 - RNA, 21 nt, Artificial Sequence
  Synthetic
aucucagugggaguauuggaa

SEQ ID NO: 79175 - RNA, 22 nt, Artificial Sequence
  Synthetic
uaucucagugggaguauuggaa

SEQ ID NO: 79176 - RNA, 23 nt, Artificial Sequence
  Synthetic
auaucucagugggaguauuggaa

SEQ ID NO: 79177 - RNA, 24 nt, Artificial Sequence
  Synthetic
uauaucucagugggaguauuggaa

SEQ ID NO: 79178 - RNA, 18 nt, Artificial Sequence
  Synthetic
uucauauucuccuuggaa

SEQ ID NO: 79179 - RNA, 19 nt, Artificial Sequence
  Synthetic
uuucauauucuccuuggaa

SEQ ID NO: 79180 - RNA, 20 nt, Artificial Sequence
  Synthetic
uuuucauauucuccuuggaa

SEQ ID NO: 79181 - RNA, 21 nt, Artificial Sequence
  Synthetic
cuuuucauauucuccuuggaa

SEQ ID NO: 79182 - RNA, 22 nt, Artificial Sequence
  Synthetic
ccuuuucauauucuccuuggaa

SEQ ID NO: 79183 - RNA, 23 nt, Artificial Sequence
  Synthetic
cccuuuucauauucuccuuggaa

SEQ ID NO: 79184 - RNA, 24 nt, Artificial Sequence
  Synthetic
ucccuuuucauauucuccuuggaa

SEQ ID NO: 79185 - RNA, 21 nt, Artificial Sequence
  Synthetic
auggugucacuuaaguuggaa

SEQ ID NO: 79186 - RNA, 23 nt, Artificial Sequence
  Synthetic
cgauggugucacuuaaguuggaa

SEQ ID NO: 79187 - RNA, 24 nt, Artificial Sequence
  Synthetic
acgauggugucacuuaaguuggaa

SEQ ID NO: 79188 - RNA, 18 nt, Artificial Sequence
  Synthetic
agguggaaagaguuggaa

SEQ ID NO: 79189 - RNA, 19 nt, Artificial Sequence
  Synthetic
uagguggaaagaguuggaa

SEQ ID NO: 79190 - RNA, 20 nt, Artificial Sequence
  Synthetic
cuagguggaaagaguuggaa

SEQ ID NO: 79191 - RNA, 23 nt, Artificial Sequence
  Synthetic
aggcuagguggaaagaguuggaa

SEQ ID NO: 79192 - RNA, 20 nt, Artificial Sequence
  Synthetic
uggaaugaaugcauuuggaa

SEQ ID NO: 79193 - RNA, 22 nt, Artificial Sequence
  Synthetic
aguggaaugaaugcauuuggaa

SEQ ID NO: 79194 - RNA, 23 nt, Artificial Sequence
  Synthetic
caguggaaugaaugcauuuggaa

SEQ ID NO: 79195 - RNA, 24 nt, Artificial Sequence
  Synthetic
acaguggaaugaaugcauuuggaa

SEQ ID NO: 79196 - RNA, 21 nt, Artificial Sequence
  Synthetic
uggaggcauuagacaaaugaa

SEQ ID NO: 79197 - RNA, 22 nt, Artificial Sequence
  Synthetic
cuggaggcauuagacaaaugaa

SEQ ID NO: 79198 - RNA, 23 nt, Artificial Sequence
  Synthetic
ccuggaggcauuagacaaaugaa

SEQ ID NO: 79199 - RNA, 24 nt, Artificial Sequence
  Synthetic
uccuggaggcauuagacaaaugaa

SEQ ID NO: 79200 - RNA, 18 nt, Artificial Sequence
  Synthetic
cuuuugaugggaaaugaa

SEQ ID NO: 79201 - RNA, 20 nt, Artificial Sequence
  Synthetic
ugcuuuugaugggaaaugaa

SEQ ID NO: 79202 - RNA, 21 nt, Artificial Sequence
  Synthetic
augcuuuugaugggaaaugaa

SEQ ID NO: 79203 - RNA, 22 nt, Artificial Sequence
  Synthetic
aaugcuuuugaugggaaaugaa

SEQ ID NO: 79204 - RNA, 24 nt, Artificial Sequence
  Synthetic
ugaaugcuuuugaugggaaaugaa

SEQ ID NO: 79205 - RNA, 19 nt, Artificial Sequence
  Synthetic
uggugcaguaugaaaugaa

SEQ ID NO: 79206 - RNA, 20 nt, Artificial Sequence
  Synthetic
uuggugcaguaugaaaugaa

SEQ ID NO: 79207 - RNA, 21 nt, Artificial Sequence
  Synthetic
auuggugcaguaugaaaugaa

SEQ ID NO: 79208 - RNA, 22 nt, Artificial Sequence
  Synthetic
uauuggugcaguaugaaaugaa

SEQ ID NO: 79209 - RNA, 24 nt, Artificial Sequence
  Synthetic
uguauuggugcaguaugaaaugaa

SEQ ID NO: 79210 - RNA, 21 nt, Artificial Sequence
  Synthetic
cauuuaccacccugaaaugaa

SEQ ID NO: 79211 - RNA, 22 nt, Artificial Sequence
  Synthetic
ucauuuaccacccugaaaugaa

SEQ ID NO: 79212 - RNA, 23 nt, Artificial Sequence
  Synthetic
cucauuuaccacccugaaaugaa

SEQ ID NO: 79213 - RNA, 24 nt, Artificial Sequence
  Synthetic
ccucauuuaccacccugaaaugaa

SEQ ID NO: 79214 - RNA, 22 nt, Artificial Sequence
  Synthetic
agcucaaaauaguugaaaugaa

SEQ ID NO: 79215 - RNA, 23 nt, Artificial Sequence
  Synthetic
aagcucaaaauaguugaaaugaa

SEQ ID NO: 79216 - RNA, 24 nt, Artificial Sequence
  Synthetic
caagcucaaaauaguugaaaugaa

SEQ ID NO: 79217 - RNA, 18 nt, Artificial Sequence
  Synthetic
cugaugaucaccaaugaa

SEQ ID NO: 79218 - RNA, 19 nt, Artificial Sequence
  Synthetic
acugaugaucaccaaugaa

SEQ ID NO: 79219 - RNA, 20 nt, Artificial Sequence
  Synthetic
aacugaugaucaccaaugaa

SEQ ID NO: 79220 - RNA, 21 nt, Artificial Sequence
  Synthetic
aaacugaugaucaccaaugaa

SEQ ID NO: 79221 - RNA, 22 nt, Artificial Sequence
  Synthetic
aaaacugaugaucaccaaugaa

SEQ ID NO: 79222 - RNA, 23 nt, Artificial Sequence
  Synthetic
aaaaacugaugaucaccaaugaa

SEQ ID NO: 79223 - RNA, 24 nt, Artificial Sequence
  Synthetic
caaaaacugaugaucaccaaugaa

SEQ ID NO: 79224 - RNA, 18 nt, Artificial Sequence
  Synthetic
uuagaaguacaacaugaa

SEQ ID NO: 79225 - RNA, 19 nt, Artificial Sequence
  Synthetic
auuagaaguacaacaugaa

SEQ ID NO: 79226 - RNA, 20 nt, Artificial Sequence
  Synthetic
aauuagaaguacaacaugaa

SEQ ID NO: 79227 - RNA, 21 nt, Artificial Sequence
  Synthetic
caauuagaaguacaacaugaa

SEQ ID NO: 79228 - RNA, 22 nt, Artificial Sequence
  Synthetic
ucaauuagaaguacaacaugaa

SEQ ID NO: 79229 - RNA, 23 nt, Artificial Sequence
  Synthetic
uucaauuagaaguacaacaugaa

SEQ ID NO: 79230 - RNA, 24 nt, Artificial Sequence
  Synthetic
uuucaauuagaaguacaacaugaa

SEQ ID NO: 79231 - RNA, 18 nt, Artificial Sequence
  Synthetic
cuauauaguccacaugaa

SEQ ID NO: 79232 - RNA, 19 nt, Artificial Sequence
  Synthetic
acuauauaguccacaugaa

SEQ ID NO: 79233 - RNA, 20 nt, Artificial Sequence
  Synthetic
uacuauauaguccacaugaa

SEQ ID NO: 79234 - RNA, 21 nt, Artificial Sequence
  Synthetic
cuacuauauaguccacaugaa

SEQ ID NO: 79235 - RNA, 22 nt, Artificial Sequence
  Synthetic
ucuacuauauaguccacaugaa

SEQ ID NO: 79236 - RNA, 23 nt, Artificial Sequence
  Synthetic
cucuacuauauaguccacaugaa

SEQ ID NO: 79237 - RNA, 24 nt, Artificial Sequence
  Synthetic
ccucuacuauauaguccacaugaa

SEQ ID NO: 79238 - RNA, 21 nt, Artificial Sequence
  Synthetic
aagagaaaucagagacaugaa

SEQ ID NO: 79239 - RNA, 23 nt, Artificial Sequence
  Synthetic
agaagagaaaucagagacaugaa

SEQ ID NO: 79240 - RNA, 18 nt, Artificial Sequence
  Synthetic
agucacuugugacaugaa

SEQ ID NO: 79241 - RNA, 20 nt, Artificial Sequence
  Synthetic
ugagucacuugugacaugaa

SEQ ID NO: 79242 - RNA, 22 nt, Artificial Sequence
  Synthetic
ugugagucacuugugacaugaa

SEQ ID NO: 79243 - RNA, 23 nt, Artificial Sequence
  Synthetic
uugugagucacuugugacaugaa

SEQ ID NO: 79244 - RNA, 24 nt, Artificial Sequence
  Synthetic
cuugugagucacuugugacaugaa

SEQ ID NO: 79245 - RNA, 18 nt, Artificial Sequence
  Synthetic
uaccauaaaugucaugaa

SEQ ID NO: 79246 - RNA, 19 nt, Artificial Sequence
  Synthetic
auaccauaaaugucaugaa

SEQ ID NO: 79247 - RNA, 20 nt, Artificial Sequence
  Synthetic
aauaccauaaaugucaugaa

SEQ ID NO: 79248 - RNA, 21 nt, Artificial Sequence
  Synthetic
aaauaccauaaaugucaugaa

SEQ ID NO: 79249 - RNA, 23 nt, Artificial Sequence
  Synthetic
ugaaauaccauaaaugucaugaa

SEQ ID NO: 79250 - RNA, 18 nt, Artificial Sequence
  Synthetic
ugaagaugcucugaugaa

SEQ ID NO: 79251 - RNA, 20 nt, Artificial Sequence
  Synthetic
ugugaagaugcucugaugaa

SEQ ID NO: 79252 - RNA, 18 nt, Artificial Sequence
  Synthetic
aacacuuuuagcuaugaa

SEQ ID NO: 79253 - RNA, 19 nt, Artificial Sequence
  Synthetic
caacacuuuuagcuaugaa

SEQ ID NO: 79254 - RNA, 20 nt, Artificial Sequence
  Synthetic
ucaacacuuuuagcuaugaa

SEQ ID NO: 79255 - RNA, 21 nt, Artificial Sequence
  Synthetic
cucaacacuuuuagcuaugaa

SEQ ID NO: 79256 - RNA, 22 nt, Artificial Sequence
  Synthetic
acucaacacuuuuagcuaugaa

SEQ ID NO: 79257 - RNA, 23 nt, Artificial Sequence
  Synthetic
uacucaacacuuuuagcuaugaa

SEQ ID NO: 79258 - RNA, 24 nt, Artificial Sequence
  Synthetic
uuacucaacacuuuuagcuaugaa

SEQ ID NO: 79259 - RNA, 18 nt, Artificial Sequence
  Synthetic
cuuguugaaaauuaugaa

SEQ ID NO: 79260 - RNA, 19 nt, Artificial Sequence
  Synthetic
ucuuguugaaaauuaugaa

SEQ ID NO: 79261 - RNA, 20 nt, Artificial Sequence
  Synthetic
aucuuguugaaaauuaugaa

SEQ ID NO: 79262 - RNA, 21 nt, Artificial Sequence
  Synthetic
uaucuuguugaaaauuaugaa

SEQ ID NO: 79263 - RNA, 23 nt, Artificial Sequence
  Synthetic
cguaucuuguugaaaauuaugaa

SEQ ID NO: 79264 - RNA, 24 nt, Artificial Sequence
  Synthetic
acguaucuuguugaaaauuaugaa

SEQ ID NO: 79265 - RNA, 18 nt, Artificial Sequence
  Synthetic
auguuuacgaaaacugaa

SEQ ID NO: 79266 - RNA, 19 nt, Artificial Sequence
  Synthetic
uauguuuacgaaaacugaa

SEQ ID NO: 79267 - RNA, 21 nt, Artificial Sequence
  Synthetic
uguauguuuacgaaaacugaa

SEQ ID NO: 79268 - RNA, 22 nt, Artificial Sequence
  Synthetic
cuguauguuuacgaaaacugaa

SEQ ID NO: 79269 - RNA, 23 nt, Artificial Sequence
  Synthetic
ucuguauguuuacgaaaacugaa

SEQ ID NO: 79270 - RNA, 24 nt, Artificial Sequence
  Synthetic
cucuguauguuuacgaaaacugaa

SEQ ID NO: 79271 - RNA, 19 nt, Artificial Sequence
  Synthetic
ugccuguucaucaacugaa

SEQ ID NO: 79272 - RNA, 20 nt, Artificial Sequence
  Synthetic
cugccuguucaucaacugaa

SEQ ID NO: 79273 - RNA, 21 nt, Artificial Sequence
  Synthetic
acugccuguucaucaacugaa

SEQ ID NO: 79274 - RNA, 22 nt, Artificial Sequence
  Synthetic
aacugccuguucaucaacugaa

SEQ ID NO: 79275 - RNA, 23 nt, Artificial Sequence
  Synthetic
aaacugccuguucaucaacugaa

SEQ ID NO: 79276 - RNA, 24 nt, Artificial Sequence
  Synthetic
aaaacugccuguucaucaacugaa

SEQ ID NO: 79277 - RNA, 18 nt, Artificial Sequence
  Synthetic
aauauggauaucacugaa

SEQ ID NO: 79278 - RNA, 19 nt, Artificial Sequence
  Synthetic
caauauggauaucacugaa

SEQ ID NO: 79279 - RNA, 20 nt, Artificial Sequence
  Synthetic
ucaauauggauaucacugaa

SEQ ID NO: 79280 - RNA, 21 nt, Artificial Sequence
  Synthetic
cucaauauggauaucacugaa

SEQ ID NO: 79281 - RNA, 22 nt, Artificial Sequence
  Synthetic
ccucaauauggauaucacugaa

SEQ ID NO: 79282 - RNA, 23 nt, Artificial Sequence
  Synthetic
accucaauauggauaucacugaa

SEQ ID NO: 79283 - RNA, 24 nt, Artificial Sequence
  Synthetic
uaccucaauauggauaucacugaa

SEQ ID NO: 79284 - RNA, 18 nt, Artificial Sequence
  Synthetic
acuuguagagugacugaa

SEQ ID NO: 79285 - RNA, 19 nt, Artificial Sequence
  Synthetic
uacuuguagagugacugaa

SEQ ID NO: 79286 - RNA, 20 nt, Artificial Sequence
  Synthetic
auacuuguagagugacugaa

SEQ ID NO: 79287 - RNA, 22 nt, Artificial Sequence
  Synthetic
ugauacuuguagagugacugaa

SEQ ID NO: 79288 - RNA, 24 nt, Artificial Sequence
  Synthetic
agugauacuuguagagugacugaa

SEQ ID NO: 79289 - RNA, 18 nt, Artificial Sequence
  Synthetic
agcaacauaaguacugaa

SEQ ID NO: 79290 - RNA, 19 nt, Artificial Sequence
  Synthetic
aagcaacauaaguacugaa

SEQ ID NO: 79291 - RNA, 20 nt, Artificial Sequence
  Synthetic
uaagcaacauaaguacugaa

SEQ ID NO: 79292 - RNA, 18 nt, Artificial Sequence
  Synthetic
auuuuuccugucccugaa

SEQ ID NO: 79293 - RNA, 19 nt, Artificial Sequence
  Synthetic
cauuuuuccugucccugaa

SEQ ID NO: 79294 - RNA, 20 nt, Artificial Sequence
  Synthetic
acauuuuuccugucccugaa

SEQ ID NO: 79295 - RNA, 21 nt, Artificial Sequence
  Synthetic
uacauuuuuccugucccugaa

SEQ ID NO: 79296 - RNA, 22 nt, Artificial Sequence
  Synthetic
cuacauuuuuccugucccugaa

SEQ ID NO: 79297 - RNA, 18 nt, Artificial Sequence
  Synthetic
ugcaaagaggugccugaa

SEQ ID NO: 79298 - RNA, 19 nt, Artificial Sequence
  Synthetic
cugcaaagaggugccugaa

SEQ ID NO: 79299 - RNA, 21 nt, Artificial Sequence
  Synthetic
ugcugcaaagaggugccugaa

SEQ ID NO: 79300 - RNA, 22 nt, Artificial Sequence
  Synthetic
cugcugcaaagaggugccugaa

SEQ ID NO: 79301 - RNA, 24 nt, Artificial Sequence
  Synthetic
ugcugcugcaaagaggugccugaa

SEQ ID NO: 79302 - RNA, 18 nt, Artificial Sequence
  Synthetic
auuauuacuauugcugaa

SEQ ID NO: 79303 - RNA, 19 nt, Artificial Sequence
  Synthetic
cauuauuacuauugcugaa

SEQ ID NO: 79304 - RNA, 20 nt, Artificial Sequence
  Synthetic
ucauuauuacuauugcugaa

SEQ ID NO: 79305 - RNA, 21 nt, Artificial Sequence
  Synthetic
aucauuauuacuauugcugaa

SEQ ID NO: 79306 - RNA, 22 nt, Artificial Sequence
  Synthetic
caucauuauuacuauugcugaa

SEQ ID NO: 79307 - RNA, 23 nt, Artificial Sequence
  Synthetic
ucaucauuauuacuauugcugaa

SEQ ID NO: 79308 - RNA, 24 nt, Artificial Sequence
  Synthetic
aucaucauuauuacuauugcugaa

SEQ ID NO: 79309 - RNA, 18 nt, Artificial Sequence
  Synthetic
ccuuugccuucaucugaa

SEQ ID NO: 79310 - RNA, 19 nt, Artificial Sequence
  Synthetic
uccuuugccuucaucugaa

SEQ ID NO: 79311 - RNA, 20 nt, Artificial Sequence
  Synthetic
uuccuuugccuucaucugaa

SEQ ID NO: 79312 - RNA, 21 nt, Artificial Sequence
  Synthetic
auuccuuugccuucaucugaa

SEQ ID NO: 79313 - RNA, 22 nt, Artificial Sequence
  Synthetic
uauuccuuugccuucaucugaa

SEQ ID NO: 79314 - RNA, 23 nt, Artificial Sequence
  Synthetic
cuauuccuuugccuucaucugaa

SEQ ID NO: 79315 - RNA, 24 nt, Artificial Sequence
  Synthetic
ccuauuccuuugccuucaucugaa

SEQ ID NO: 79316 - RNA, 18 nt, Artificial Sequence
  Synthetic
agaaaauuccccucugaa

SEQ ID NO: 79317 - RNA, 19 nt, Artificial Sequence
  Synthetic
aagaaaauuccccucugaa

SEQ ID NO: 79318 - RNA, 20 nt, Artificial Sequence
  Synthetic
aaagaaaauuccccucugaa

SEQ ID NO: 79319 - RNA, 22 nt, Artificial Sequence
  Synthetic
agaaagaaaauuccccucugaa

SEQ ID NO: 79320 - RNA, 23 nt, Artificial Sequence
  Synthetic
aagaaagaaaauuccccucugaa

SEQ ID NO: 79321 - RNA, 24 nt, Artificial Sequence
  Synthetic
caagaaagaaaauuccccucugaa

SEQ ID NO: 79322 - RNA, 18 nt, Artificial Sequence
  Synthetic
uagaaaaaaaugucugaa

SEQ ID NO: 79323 - RNA, 19 nt, Artificial Sequence
  Synthetic
auagaaaaaaaugucugaa

SEQ ID NO: 79324 - RNA, 20 nt, Artificial Sequence
  Synthetic
cauagaaaaaaaugucugaa

SEQ ID NO: 79325 - RNA, 21 nt, Artificial Sequence
  Synthetic
ucauagaaaaaaaugucugaa

SEQ ID NO: 79326 - RNA, 23 nt, Artificial Sequence
  Synthetic
agucauagaaaaaaaugucugaa

SEQ ID NO: 79327 - RNA, 18 nt, Artificial Sequence
  Synthetic
aggauaaagacuucugaa

SEQ ID NO: 79328 - RNA, 20 nt, Artificial Sequence
  Synthetic
ugaggauaaagacuucugaa

SEQ ID NO: 79329 - RNA, 21 nt, Artificial Sequence
  Synthetic
uugaggauaaagacuucugaa

SEQ ID NO: 79330 - RNA, 22 nt, Artificial Sequence
  Synthetic
cuugaggauaaagacuucugaa

SEQ ID NO: 79331 - RNA, 23 nt, Artificial Sequence
  Synthetic
ccuugaggauaaagacuucugaa

SEQ ID NO: 79332 - RNA, 24 nt, Artificial Sequence
  Synthetic
accuugaggauaaagacuucugaa

SEQ ID NO: 79333 - RNA, 18 nt, Artificial Sequence
  Synthetic
uuugggaaauguucugaa

SEQ ID NO: 79334 - RNA, 19 nt, Artificial Sequence
  Synthetic
cuuugggaaauguucugaa

SEQ ID NO: 79335 - RNA, 21 nt, Artificial Sequence
  Synthetic
agcuuugggaaauguucugaa

SEQ ID NO: 79336 - RNA, 22 nt, Artificial Sequence
  Synthetic
uagcuuugggaaauguucugaa

SEQ ID NO: 79337 - RNA, 23 nt, Artificial Sequence
  Synthetic
auagcuuugggaaauguucugaa

SEQ ID NO: 79338 - RNA, 24 nt, Artificial Sequence
  Synthetic
aauagcuuugggaaauguucugaa

SEQ ID NO: 79339 - RNA, 20 nt, Artificial Sequence
  Synthetic
uggaagauuuugaaagugaa

SEQ ID NO: 79340 - RNA, 21 nt, Artificial Sequence
  Synthetic
cuggaagauuuugaaagugaa

SEQ ID NO: 79341 - RNA, 22 nt, Artificial Sequence
  Synthetic
ucuggaagauuuugaaagugaa

SEQ ID NO: 79342 - RNA, 23 nt, Artificial Sequence
  Synthetic
aucuggaagauuuugaaagugaa

SEQ ID NO: 79343 - RNA, 24 nt, Artificial Sequence
  Synthetic
caucuggaagauuuugaaagugaa

SEQ ID NO: 79344 - RNA, 18 nt, Artificial Sequence
  Synthetic
agaaaaguuuacagugaa

SEQ ID NO: 79345 - RNA, 19 nt, Artificial Sequence
  Synthetic
cagaaaaguuuacagugaa

SEQ ID NO: 79346 - RNA, 20 nt, Artificial Sequence
  Synthetic
acagaaaaguuuacagugaa

SEQ ID NO: 79347 - RNA, 22 nt, Artificial Sequence
  Synthetic
ugacagaaaaguuuacagugaa

SEQ ID NO: 79348 - RNA, 23 nt, Artificial Sequence
  Synthetic
uugacagaaaaguuuacagugaa

SEQ ID NO: 79349 - RNA, 24 nt, Artificial Sequence
  Synthetic
uuugacagaaaaguuuacagugaa

SEQ ID NO: 79350 - RNA, 18 nt, Artificial Sequence
  Synthetic
agggaugaucucagugaa

SEQ ID NO: 79351 - RNA, 20 nt, Artificial Sequence
  Synthetic
agagggaugaucucagugaa

SEQ ID NO: 79352 - RNA, 21 nt, Artificial Sequence
  Synthetic
aagagggaugaucucagugaa

SEQ ID NO: 79353 - RNA, 23 nt, Artificial Sequence
  Synthetic
agaagagggaugaucucagugaa

SEQ ID NO: 79354 - RNA, 24 nt, Artificial Sequence
  Synthetic
cagaagagggaugaucucagugaa

SEQ ID NO: 79355 - RNA, 18 nt, Artificial Sequence
  Synthetic
aaaucauuuauuagugaa

SEQ ID NO: 79356 - RNA, 19 nt, Artificial Sequence
  Synthetic
uaaaucauuuauuagugaa

SEQ ID NO: 79357 - RNA, 20 nt, Artificial Sequence
  Synthetic
auaaaucauuuauuagugaa

SEQ ID NO: 79358 - RNA, 21 nt, Artificial Sequence
  Synthetic
aauaaaucauuuauuagugaa

SEQ ID NO: 79359 - RNA, 22 nt, Artificial Sequence
  Synthetic
uaauaaaucauuuauuagugaa

SEQ ID NO: 79360 - RNA, 23 nt, Artificial Sequence
  Synthetic
uuaauaaaucauuuauuagugaa

SEQ ID NO: 79361 - RNA, 24 nt, Artificial Sequence
  Synthetic
cuuaauaaaucauuuauuagugaa

SEQ ID NO: 79362 - RNA, 21 nt, Artificial Sequence
  Synthetic
ugggaauggaguaaaggugaa

SEQ ID NO: 79363 - RNA, 22 nt, Artificial Sequence
  Synthetic
augggaauggaguaaaggugaa

SEQ ID NO: 79364 - RNA, 23 nt, Artificial Sequence
  Synthetic
caugggaauggaguaaaggugaa

SEQ ID NO: 79365 - RNA, 18 nt, Artificial Sequence
  Synthetic
acacuagauauaggugaa

SEQ ID NO: 79366 - RNA, 19 nt, Artificial Sequence
  Synthetic
cacacuagauauaggugaa

SEQ ID NO: 79367 - RNA, 20 nt, Artificial Sequence
  Synthetic
acacacuagauauaggugaa

SEQ ID NO: 79368 - RNA, 22 nt, Artificial Sequence
  Synthetic
agacacacuagauauaggugaa

SEQ ID NO: 79369 - RNA, 23 nt, Artificial Sequence
  Synthetic
uagacacacuagauauaggugaa

SEQ ID NO: 79370 - RNA, 18 nt, Artificial Sequence
  Synthetic
aaagguguuuagggugaa

SEQ ID NO: 79371 - RNA, 21 nt, Artificial Sequence
  Synthetic
aggaaagguguuuagggugaa

SEQ ID NO: 79372 - RNA, 22 nt, Artificial Sequence
  Synthetic
caggaaagguguuuagggugaa

SEQ ID NO: 79373 - RNA, 23 nt, Artificial Sequence
  Synthetic
ucaggaaagguguuuagggugaa

SEQ ID NO: 79374 - RNA, 24 nt, Artificial Sequence
  Synthetic
cucaggaaagguguuuagggugaa

SEQ ID NO: 79375 - RNA, 19 nt, Artificial Sequence
  Synthetic
aggcacacagaggggugaa

SEQ ID NO: 79376 - RNA, 20 nt, Artificial Sequence
  Synthetic
caggcacacagaggggugaa

SEQ ID NO: 79377 - RNA, 21 nt, Artificial Sequence
  Synthetic
ccaggcacacagaggggugaa

SEQ ID NO: 79378 - RNA, 23 nt, Artificial Sequence
  Synthetic
ugccaggcacacagaggggugaa

SEQ ID NO: 79379 - RNA, 24 nt, Artificial Sequence
  Synthetic
augccaggcacacagaggggugaa

SEQ ID NO: 79380 - RNA, 21 nt, Artificial Sequence
  Synthetic
caacagaaauuguguggugaa

SEQ ID NO: 79381 - RNA, 22 nt, Artificial Sequence
  Synthetic
acaacagaaauuguguggugaa

SEQ ID NO: 79382 - RNA, 23 nt, Artificial Sequence
  Synthetic
uacaacagaaauuguguggugaa

SEQ ID NO: 79383 - RNA, 24 nt, Artificial Sequence
  Synthetic
auacaacagaaauuguguggugaa

SEQ ID NO: 79384 - RNA, 21 nt, Artificial Sequence
  Synthetic
uauuaaaacagauacauugaa

SEQ ID NO: 79385 - RNA, 22 nt, Artificial Sequence
  Synthetic
auauuaaaacagauacauugaa

SEQ ID NO: 79386 - RNA, 23 nt, Artificial Sequence
  Synthetic
uauauuaaaacagauacauugaa

SEQ ID NO: 79387 - RNA, 24 nt, Artificial Sequence
  Synthetic
cuauauuaaaacagauacauugaa

SEQ ID NO: 79388 - RNA, 18 nt, Artificial Sequence
  Synthetic
uacucugacaccauugaa

SEQ ID NO: 79389 - RNA, 19 nt, Artificial Sequence
  Synthetic
auacucugacaccauugaa

SEQ ID NO: 79390 - RNA, 22 nt, Artificial Sequence
  Synthetic
cggauacucugacaccauugaa

SEQ ID NO: 79391 - RNA, 23 nt, Artificial Sequence
  Synthetic
acggauacucugacaccauugaa

SEQ ID NO: 79392 - RNA, 24 nt, Artificial Sequence
  Synthetic
aacggauacucugacaccauugaa

SEQ ID NO: 79393 - RNA, 18 nt, Artificial Sequence
  Synthetic
uguaugcauuccauugaa

SEQ ID NO: 79394 - RNA, 19 nt, Artificial Sequence
  Synthetic
cuguaugcauuccauugaa

SEQ ID NO: 79395 - RNA, 20 nt, Artificial Sequence
  Synthetic
acuguaugcauuccauugaa

SEQ ID NO: 79396 - RNA, 21 nt, Artificial Sequence
  Synthetic
cacuguaugcauuccauugaa

SEQ ID NO: 79397 - RNA, 22 nt, Artificial Sequence
  Synthetic
acacuguaugcauuccauugaa

SEQ ID NO: 79398 - RNA, 23 nt, Artificial Sequence
  Synthetic
cacacuguaugcauuccauugaa

SEQ ID NO: 79399 - RNA, 24 nt, Artificial Sequence
  Synthetic
acacacuguaugcauuccauugaa

SEQ ID NO: 79400 - RNA, 18 nt, Artificial Sequence
  Synthetic
caauauaaauauauugaa

SEQ ID NO: 79401 - RNA, 19 nt, Artificial Sequence
  Synthetic
ucaauauaaauauauugaa

SEQ ID NO: 79402 - RNA, 20 nt, Artificial Sequence
  Synthetic
cucaauauaaauauauugaa

SEQ ID NO: 79403 - RNA, 22 nt, Artificial Sequence
  Synthetic
agcucaauauaaauauauugaa

SEQ ID NO: 79404 - RNA, 21 nt, Artificial Sequence
  Synthetic
auguuuucuuuaauuauugaa

SEQ ID NO: 79405 - RNA, 22 nt, Artificial Sequence
  Synthetic
uauguuuucuuuaauuauugaa

SEQ ID NO: 79406 - RNA, 23 nt, Artificial Sequence
  Synthetic
uuauguuuucuuuaauuauugaa

SEQ ID NO: 79407 - RNA, 24 nt, Artificial Sequence
  Synthetic
auuauguuuucuuuaauuauugaa

SEQ ID NO: 79408 - RNA, 18 nt, Artificial Sequence
  Synthetic
acuaauuaucuuauugaa

SEQ ID NO: 79409 - RNA, 19 nt, Artificial Sequence
  Synthetic
aacuaauuaucuuauugaa

SEQ ID NO: 79410 - RNA, 22 nt, Artificial Sequence
  Synthetic
aggaacuaauuaucuuauugaa

SEQ ID NO: 79411 - RNA, 23 nt, Artificial Sequence
  Synthetic
aaggaacuaauuaucuuauugaa

SEQ ID NO: 79412 - RNA, 24 nt, Artificial Sequence
  Synthetic
aaaggaacuaauuaucuuauugaa

SEQ ID NO: 79413 - RNA, 18 nt, Artificial Sequence
  Synthetic
cacuuuaguaaccuugaa

SEQ ID NO: 79414 - RNA, 19 nt, Artificial Sequence
  Synthetic
acacuuuaguaaccuugaa

SEQ ID NO: 79415 - RNA, 20 nt, Artificial Sequence
  Synthetic
cacacuuuaguaaccuugaa

SEQ ID NO: 79416 - RNA, 22 nt, Artificial Sequence
  Synthetic
ugcacacuuuaguaaccuugaa

SEQ ID NO: 79417 - RNA, 23 nt, Artificial Sequence
  Synthetic
augcacacuuuaguaaccuugaa

SEQ ID NO: 79418 - RNA, 24 nt, Artificial Sequence
  Synthetic
caugcacacuuuaguaaccuugaa

SEQ ID NO: 79419 - RNA, 18 nt, Artificial Sequence
  Synthetic
aucucuguuauccuugaa

SEQ ID NO: 79420 - RNA, 19 nt, Artificial Sequence
  Synthetic
caucucuguuauccuugaa

SEQ ID NO: 79421 - RNA, 20 nt, Artificial Sequence
  Synthetic
acaucucuguuauccuugaa

SEQ ID NO: 79422 - RNA, 21 nt, Artificial Sequence
  Synthetic
aacaucucuguuauccuugaa

SEQ ID NO: 79423 - RNA, 22 nt, Artificial Sequence
  Synthetic
caacaucucuguuauccuugaa

SEQ ID NO: 79424 - RNA, 23 nt, Artificial Sequence
  Synthetic
acaacaucucuguuauccuugaa

SEQ ID NO: 79425 - RNA, 19 nt, Artificial Sequence
  Synthetic
ugauuauacugggcuugaa

SEQ ID NO: 79426 - RNA, 20 nt, Artificial Sequence
  Synthetic
augauuauacugggcuugaa

SEQ ID NO: 79427 - RNA, 21 nt, Artificial Sequence
  Synthetic
aaugauuauacugggcuugaa

SEQ ID NO: 79428 - RNA, 22 nt, Artificial Sequence
  Synthetic
aaaugauuauacugggcuugaa

SEQ ID NO: 79429 - RNA, 23 nt, Artificial Sequence
  Synthetic
aaaaugauuauacugggcuugaa

SEQ ID NO: 79430 - RNA, 24 nt, Artificial Sequence
  Synthetic
aaaaaugauuauacugggcuugaa

SEQ ID NO: 79431 - RNA, 18 nt, Artificial Sequence
  Synthetic
uacacccacacucuugaa

SEQ ID NO: 79432 - RNA, 19 nt, Artificial Sequence
  Synthetic
auacacccacacucuugaa

SEQ ID NO: 79433 - RNA, 20 nt, Artificial Sequence
  Synthetic
uauacacccacacucuugaa

SEQ ID NO: 79434 - RNA, 21 nt, Artificial Sequence
  Synthetic
uuauacacccacacucuugaa

SEQ ID NO: 79435 - RNA, 23 nt, Artificial Sequence
  Synthetic
uguuauacacccacacucuugaa

SEQ ID NO: 79436 - RNA, 21 nt, Artificial Sequence
  Synthetic
uguuuuguuuucuuucuugaa

SEQ ID NO: 79437 - RNA, 22 nt, Artificial Sequence
  Synthetic
cuguuuuguuuucuuucuugaa

SEQ ID NO: 79438 - RNA, 23 nt, Artificial Sequence
  Synthetic
acuguuuuguuuucuuucuugaa

SEQ ID NO: 79439 - RNA, 24 nt, Artificial Sequence
  Synthetic
uacuguuuuguuuucuuucuugaa

SEQ ID NO: 79440 - RNA, 18 nt, Artificial Sequence
  Synthetic
auuucguguacaguugaa

SEQ ID NO: 79441 - RNA, 19 nt, Artificial Sequence
  Synthetic
uauuucguguacaguugaa

SEQ ID NO: 79442 - RNA, 20 nt, Artificial Sequence
  Synthetic
auauuucguguacaguugaa

SEQ ID NO: 79443 - RNA, 20 nt, Artificial Sequence
  Synthetic
ugguguacuguagaguugaa

SEQ ID NO: 79444 - RNA, 21 nt, Artificial Sequence
  Synthetic
uugguguacuguagaguugaa

SEQ ID NO: 79445 - RNA, 22 nt, Artificial Sequence
  Synthetic
uuugguguacuguagaguugaa

SEQ ID NO: 79446 - RNA, 24 nt, Artificial Sequence
  Synthetic
aguuugguguacuguagaguugaa

SEQ ID NO: 79447 - RNA, 18 nt, Artificial Sequence
  Synthetic
aagcucaaaauaguugaa

SEQ ID NO: 79448 - RNA, 19 nt, Artificial Sequence
  Synthetic
caagcucaaaauaguugaa

SEQ ID NO: 79449 - RNA, 20 nt, Artificial Sequence
  Synthetic
ucaagcucaaaauaguugaa

SEQ ID NO: 79450 - RNA, 21 nt, Artificial Sequence
  Synthetic
aucaagcucaaaauaguugaa

SEQ ID NO: 79451 - RNA, 22 nt, Artificial Sequence
  Synthetic
aaucaagcucaaaauaguugaa

SEQ ID NO: 79452 - RNA, 23 nt, Artificial Sequence
  Synthetic
aaaucaagcucaaaauaguugaa

SEQ ID NO: 79453 - RNA, 24 nt, Artificial Sequence
  Synthetic
aaaaucaagcucaaaauaguugaa

SEQ ID NO: 79454 - RNA, 18 nt, Artificial Sequence
  Synthetic
aacguggcagugguugaa

SEQ ID NO: 79455 - RNA, 20 nt, Artificial Sequence
  Synthetic
ugaacguggcagugguugaa

SEQ ID NO: 79456 - RNA, 22 nt, Artificial Sequence
  Synthetic
agugaacguggcagugguugaa

SEQ ID NO: 79457 - RNA, 23 nt, Artificial Sequence
  Synthetic
uagugaacguggcagugguugaa

SEQ ID NO: 79458 - RNA, 21 nt, Artificial Sequence
  Synthetic
uuuaagacuuuaaaauuugaa

SEQ ID NO: 79459 - RNA, 22 nt, Artificial Sequence
  Synthetic
uuuuaagacuuuaaaauuugaa

SEQ ID NO: 79460 - RNA, 23 nt, Artificial Sequence
  Synthetic
cuuuuaagacuuuaaaauuugaa

SEQ ID NO: 79461 - RNA, 24 nt, Artificial Sequence
  Synthetic
ucuuuuaagacuuuaaaauuugaa

SEQ ID NO: 79462 - RNA, 20 nt, Artificial Sequence
  Synthetic
agguuaaugauagauuugaa

SEQ ID NO: 79463 - RNA, 23 nt, Artificial Sequence
  Synthetic
aggagguuaaugauagauuugaa

SEQ ID NO: 79464 - RNA, 24 nt, Artificial Sequence
  Synthetic
aaggagguuaaugauagauuugaa

SEQ ID NO: 79465 - RNA, 18 nt, Artificial Sequence
  Synthetic
ugguuugcaauauuugaa

SEQ ID NO: 79466 - RNA, 19 nt, Artificial Sequence
  Synthetic
cugguuugcaauauuugaa

SEQ ID NO: 79467 - RNA, 20 nt, Artificial Sequence
  Synthetic
ucugguuugcaauauuugaa

SEQ ID NO: 79468 - RNA, 21 nt, Artificial Sequence
  Synthetic
uucugguuugcaauauuugaa

SEQ ID NO: 79469 - RNA, 23 nt, Artificial Sequence
  Synthetic
uguucugguuugcaauauuugaa

SEQ ID NO: 79470 - RNA, 24 nt, Artificial Sequence
  Synthetic
cuguucugguuugcaauauuugaa

SEQ ID NO: 79471 - RNA, 21 nt, Artificial Sequence
  Synthetic
aaacacuauugacacuuugaa

SEQ ID NO: 79472 - RNA, 22 nt, Artificial Sequence
  Synthetic
uaaacacuauugacacuuugaa

SEQ ID NO: 79473 - RNA, 23 nt, Artificial Sequence
  Synthetic
auaaacacuauugacacuuugaa

SEQ ID NO: 79474 - RNA, 24 nt, Artificial Sequence
  Synthetic
cauaaacacuauugacacuuugaa

SEQ ID NO: 79475 - RNA, 18 nt, Artificial Sequence
  Synthetic
uuucuguuucacuuugaa

SEQ ID NO: 79476 - RNA, 19 nt, Artificial Sequence
  Synthetic
uuuucuguuucacuuugaa

SEQ ID NO: 79477 - RNA, 21 nt, Artificial Sequence
  Synthetic
uguuuucuguuucacuuugaa

SEQ ID NO: 79478 - RNA, 22 nt, Artificial Sequence
  Synthetic
auguuuucuguuucacuuugaa

SEQ ID NO: 79479 - RNA, 23 nt, Artificial Sequence
  Synthetic
uauguuuucuguuucacuuugaa

SEQ ID NO: 79480 - RNA, 24 nt, Artificial Sequence
  Synthetic
auauguuuucuguuucacuuugaa

SEQ ID NO: 79481 - RNA, 18 nt, Artificial Sequence
  Synthetic
agucuaagcuacuuugaa

SEQ ID NO: 79482 - RNA, 19 nt, Artificial Sequence
  Synthetic
aagucuaagcuacuuugaa

SEQ ID NO: 79483 - RNA, 20 nt, Artificial Sequence
  Synthetic
uaagucuaagcuacuuugaa

SEQ ID NO: 79484 - RNA, 22 nt, Artificial Sequence
  Synthetic
aguaagucuaagcuacuuugaa

SEQ ID NO: 79485 - RNA, 24 nt, Artificial Sequence
  Synthetic
ugaguaagucuaagcuacuuugaa

SEQ ID NO: 79486 - RNA, 18 nt, Artificial Sequence
  Synthetic
cuuguuuucaccuuugaa

SEQ ID NO: 79487 - RNA, 19 nt, Artificial Sequence
  Synthetic
acuuguuuucaccuuugaa

SEQ ID NO: 79488 - RNA, 20 nt, Artificial Sequence
  Synthetic
cacuuguuuucaccuuugaa

SEQ ID NO: 79489 - RNA, 21 nt, Artificial Sequence
  Synthetic
ucacuuguuuucaccuuugaa

SEQ ID NO: 79490 - RNA, 22 nt, Artificial Sequence
  Synthetic
cucacuuguuuucaccuuugaa

SEQ ID NO: 79491 - RNA, 23 nt, Artificial Sequence
  Synthetic
acucacuuguuuucaccuuugaa

SEQ ID NO: 79492 - RNA, 24 nt, Artificial Sequence
  Synthetic
aacucacuuguuuucaccuuugaa

SEQ ID NO: 79493 - RNA, 19 nt, Artificial Sequence
  Synthetic
agggauaaacacuuuugaa

SEQ ID NO: 79494 - RNA, 20 nt, Artificial Sequence
  Synthetic
cagggauaaacacuuuugaa

SEQ ID NO: 79495 - RNA, 21 nt, Artificial Sequence
  Synthetic
acagggauaaacacuuuugaa

SEQ ID NO: 79496 - RNA, 22 nt, Artificial Sequence
  Synthetic
uacagggauaaacacuuuugaa

SEQ ID NO: 79497 - RNA, 23 nt, Artificial Sequence
  Synthetic
cuacagggauaaacacuuuugaa

SEQ ID NO: 79498 - RNA, 24 nt, Artificial Sequence
  Synthetic
ucuacagggauaaacacuuuugaa

SEQ ID NO: 79499 - RNA, 18 nt, Artificial Sequence
  Synthetic
aaucugcaugaaaaauaa

SEQ ID NO: 79500 - RNA, 19 nt, Artificial Sequence
  Synthetic
uaaucugcaugaaaaauaa

SEQ ID NO: 79501 - RNA, 20 nt, Artificial Sequence
  Synthetic
uuaaucugcaugaaaaauaa

SEQ ID NO: 79502 - RNA, 21 nt, Artificial Sequence
  Synthetic
uuuaaucugcaugaaaaauaa

SEQ ID NO: 79503 - RNA, 22 nt, Artificial Sequence
  Synthetic
uuuuaaucugcaugaaaaauaa

SEQ ID NO: 79504 - RNA, 23 nt, Artificial Sequence
  Synthetic
auuuuaaucugcaugaaaaauaa

SEQ ID NO: 79505 - RNA, 24 nt, Artificial Sequence
  Synthetic
uauuuuaaucugcaugaaaaauaa

SEQ ID NO: 79506 - RNA, 18 nt, Artificial Sequence
  Synthetic
caaaggucugaaaaauaa

SEQ ID NO: 79507 - RNA, 19 nt, Artificial Sequence
  Synthetic
ccaaaggucugaaaaauaa

SEQ ID NO: 79508 - RNA, 20 nt, Artificial Sequence
  Synthetic
accaaaggucugaaaaauaa

SEQ ID NO: 79509 - RNA, 22 nt, Artificial Sequence
  Synthetic
agaccaaaggucugaaaaauaa

SEQ ID NO: 79510 - RNA, 23 nt, Artificial Sequence
  Synthetic
aagaccaaaggucugaaaaauaa

SEQ ID NO: 79511 - RNA, 24 nt, Artificial Sequence
  Synthetic
caagaccaaaggucugaaaaauaa

SEQ ID NO: 79512 - RNA, 18 nt, Artificial Sequence
  Synthetic
acuuuucuaagaaaauaa

SEQ ID NO: 79513 - RNA, 19 nt, Artificial Sequence
  Synthetic
uacuuuucuaagaaaauaa

SEQ ID NO: 79514 - RNA, 20 nt, Artificial Sequence
  Synthetic
cuacuuuucuaagaaaauaa

SEQ ID NO: 79515 - RNA, 21 nt, Artificial Sequence
  Synthetic
acuacuuuucuaagaaaauaa

SEQ ID NO: 79516 - RNA, 22 nt, Artificial Sequence
  Synthetic
uacuacuuuucuaagaaaauaa

SEQ ID NO: 79517 - RNA, 23 nt, Artificial Sequence
  Synthetic
cuacuacuuuucuaagaaaauaa

SEQ ID NO: 79518 - RNA, 24 nt, Artificial Sequence
  Synthetic
ucuacuacuuuucuaagaaaauaa

SEQ ID NO: 79519 - RNA, 18 nt, Artificial Sequence
  Synthetic
ugauggaagagaaaauaa

SEQ ID NO: 79520 - RNA, 19 nt, Artificial Sequence
  Synthetic
uugauggaagagaaaauaa

SEQ ID NO: 79521 - RNA, 20 nt, Artificial Sequence
  Synthetic
cuugauggaagagaaaauaa

SEQ ID NO: 79522 - RNA, 21 nt, Artificial Sequence
  Synthetic
ucuugauggaagagaaaauaa

SEQ ID NO: 79523 - RNA, 22 nt, Artificial Sequence
  Synthetic
cucuugauggaagagaaaauaa

SEQ ID NO: 79524 - RNA, 24 nt, Artificial Sequence
  Synthetic
ugcucuugauggaagagaaaauaa

SEQ ID NO: 79525 - RNA, 18 nt, Artificial Sequence
  Synthetic
uuuuagcauuuaaaauaa

SEQ ID NO: 79526 - RNA, 21 nt, Artificial Sequence
  Synthetic
ugguuuuagcauuuaaaauaa

SEQ ID NO: 79527 - RNA, 22 nt, Artificial Sequence
  Synthetic
uugguuuuagcauuuaaaauaa

SEQ ID NO: 79528 - RNA, 23 nt, Artificial Sequence
  Synthetic
uuugguuuuagcauuuaaaauaa

SEQ ID NO: 79529 - RNA, 24 nt, Artificial Sequence
  Synthetic
auuugguuuuagcauuuaaaauaa

SEQ ID NO: 79530 - RNA, 18 nt, Artificial Sequence
  Synthetic
uguauuaucaacaaauaa

SEQ ID NO: 79531 - RNA, 19 nt, Artificial Sequence
  Synthetic
uuguauuaucaacaaauaa

SEQ ID NO: 79532 - RNA, 21 nt, Artificial Sequence
  Synthetic
uguuguauuaucaacaaauaa

SEQ ID NO: 79533 - RNA, 22 nt, Artificial Sequence
  Synthetic
uuguuguauuaucaacaaauaa

SEQ ID NO: 79534 - RNA, 23 nt, Artificial Sequence
  Synthetic
uuuguuguauuaucaacaaauaa

SEQ ID NO: 79535 - RNA, 24 nt, Artificial Sequence
  Synthetic
cuuuguuguauuaucaacaaauaa

SEQ ID NO: 79536 - RNA, 18 nt, Artificial Sequence
  Synthetic
uacuuuucccucaaauaa

SEQ ID NO: 79537 - RNA, 19 nt, Artificial Sequence
  Synthetic
auacuuuucccucaaauaa

SEQ ID NO: 79538 - RNA, 20 nt, Artificial Sequence
  Synthetic
aauacuuuucccucaaauaa

SEQ ID NO: 79539 - RNA, 21 nt, Artificial Sequence
  Synthetic
aaauacuuuucccucaaauaa

SEQ ID NO: 79540 - RNA, 22 nt, Artificial Sequence
  Synthetic
uaaauacuuuucccucaaauaa

SEQ ID NO: 79541 - RNA, 18 nt, Artificial Sequence
  Synthetic
ugagauaaacagaaauaa

SEQ ID NO: 79542 - RNA, 21 nt, Artificial Sequence
  Synthetic
uggugagauaaacagaaauaa

SEQ ID NO: 79543 - RNA, 23 nt, Artificial Sequence
  Synthetic
aguggugagauaaacagaaauaa

SEQ ID NO: 79544 - RNA, 18 nt, Artificial Sequence
  Synthetic
cuaaucauuaugaaauaa

SEQ ID NO: 79545 - RNA, 20 nt, Artificial Sequence
  Synthetic
ugcuaaucauuaugaaauaa

SEQ ID NO: 79546 - RNA, 21 nt, Artificial Sequence
  Synthetic
augcuaaucauuaugaaauaa

SEQ ID NO: 79547 - RNA, 22 nt, Artificial Sequence
  Synthetic
uaugcuaaucauuaugaaauaa

SEQ ID NO: 79548 - RNA, 23 nt, Artificial Sequence
  Synthetic
auaugcuaaucauuaugaaauaa

SEQ ID NO: 79549 - RNA, 21 nt, Artificial Sequence
  Synthetic
cauaguguguugaauaaauaa

SEQ ID NO: 79550 - RNA, 22 nt, Artificial Sequence
  Synthetic
acauaguguguugaauaaauaa

SEQ ID NO: 79551 - RNA, 23 nt, Artificial Sequence
  Synthetic
cacauaguguguugaauaaauaa

SEQ ID NO: 79552 - RNA, 24 nt, Artificial Sequence
  Synthetic
acacauaguguguugaauaaauaa

SEQ ID NO: 79553 - RNA, 21 nt, Artificial Sequence
  Synthetic
uggagaagcagagauaaauaa

SEQ ID NO: 79554 - RNA, 23 nt, Artificial Sequence
  Synthetic
aguggagaagcagagauaaauaa

SEQ ID NO: 79555 - RNA, 18 nt, Artificial Sequence
  Synthetic
aguuucuagcuuaaauaa

SEQ ID NO: 79556 - RNA, 19 nt, Artificial Sequence
  Synthetic
aaguuucuagcuuaaauaa

SEQ ID NO: 79557 - RNA, 21 nt, Artificial Sequence
  Synthetic
agaaguuucuagcuuaaauaa

SEQ ID NO: 79558 - RNA, 22 nt, Artificial Sequence
  Synthetic
cagaaguuucuagcuuaaauaa

SEQ ID NO: 79559 - RNA, 23 nt, Artificial Sequence
  Synthetic
ucagaaguuucuagcuuaaauaa

SEQ ID NO: 79560 - RNA, 24 nt, Artificial Sequence
  Synthetic
aucagaaguuucuagcuuaaauaa

SEQ ID NO: 79561 - RNA, 22 nt, Artificial Sequence
  Synthetic
uguucuauacaguuuuaaauaa

SEQ ID NO: 79562 - RNA, 23 nt, Artificial Sequence
  Synthetic
uuguucuauacaguuuuaaauaa

SEQ ID NO: 79563 - RNA, 24 nt, Artificial Sequence
  Synthetic
uuuguucuauacaguuuuaaauaa

SEQ ID NO: 79564 - RNA, 18 nt, Artificial Sequence
  Synthetic
uacaagaguuuuaaauaa

SEQ ID NO: 79565 - RNA, 19 nt, Artificial Sequence
  Synthetic
cuacaagaguuuuaaauaa

SEQ ID NO: 79566 - RNA, 21 nt, Artificial Sequence
  Synthetic
agcuacaagaguuuuaaauaa

SEQ ID NO: 79567 - RNA, 22 nt, Artificial Sequence
  Synthetic
aagcuacaagaguuuuaaauaa

SEQ ID NO: 79568 - RNA, 24 nt, Artificial Sequence
  Synthetic
agaagcuacaagaguuuuaaauaa

SEQ ID NO: 79569 - RNA, 22 nt, Artificial Sequence
  Synthetic
agcauauuuugguuuuaaauaa

SEQ ID NO: 79570 - RNA, 23 nt, Artificial Sequence
  Synthetic
aagcauauuuugguuuuaaauaa

SEQ ID NO: 79571 - RNA, 24 nt, Artificial Sequence
  Synthetic
aaagcauauuuugguuuuaaauaa

SEQ ID NO: 79572 - RNA, 18 nt, Artificial Sequence
  Synthetic
uuauagagauaacaauaa

SEQ ID NO: 79573 - RNA, 22 nt, Artificial Sequence
  Synthetic
uggguuauagagauaacaauaa

SEQ ID NO: 79574 - RNA, 24 nt, Artificial Sequence
  Synthetic
uguggguuauagagauaacaauaa

SEQ ID NO: 79575 - RNA, 18 nt, Artificial Sequence
  Synthetic
auuuuucuaaaccaauaa

SEQ ID NO: 79576 - RNA, 19 nt, Artificial Sequence
  Synthetic
cauuuuucuaaaccaauaa

SEQ ID NO: 79577 - RNA, 20 nt, Artificial Sequence
  Synthetic
ucauuuuucuaaaccaauaa

SEQ ID NO: 79578 - RNA, 21 nt, Artificial Sequence
  Synthetic
aucauuuuucuaaaccaauaa

SEQ ID NO: 79579 - RNA, 22 nt, Artificial Sequence
  Synthetic
uaucauuuuucuaaaccaauaa

SEQ ID NO: 79580 - RNA, 23 nt, Artificial Sequence
  Synthetic
auaucauuuuucuaaaccaauaa

SEQ ID NO: 79581 - RNA, 24 nt, Artificial Sequence
  Synthetic
aauaucauuuuucuaaaccaauaa

SEQ ID NO: 79582 - RNA, 18 nt, Artificial Sequence
  Synthetic
uuuuauaucuuccaauaa

SEQ ID NO: 79583 - RNA, 19 nt, Artificial Sequence
  Synthetic
auuuuauaucuuccaauaa

SEQ ID NO: 79584 - RNA, 20 nt, Artificial Sequence
  Synthetic
cauuuuauaucuuccaauaa

SEQ ID NO: 79585 - RNA, 21 nt, Artificial Sequence
  Synthetic
acauuuuauaucuuccaauaa

SEQ ID NO: 79586 - RNA, 22 nt, Artificial Sequence
  Synthetic
cacauuuuauaucuuccaauaa

SEQ ID NO: 79587 - RNA, 23 nt, Artificial Sequence
  Synthetic
acacauuuuauaucuuccaauaa

SEQ ID NO: 79588 - RNA, 24 nt, Artificial Sequence
  Synthetic
aacacauuuuauaucuuccaauaa

SEQ ID NO: 79589 - RNA, 19 nt, Artificial Sequence
  Synthetic
aguuuccaagcagcaauaa

SEQ ID NO: 79590 - RNA, 22 nt, Artificial Sequence
  Synthetic
aggaguuuccaagcagcaauaa

SEQ ID NO: 79591 - RNA, 24 nt, Artificial Sequence
  Synthetic
agaggaguuuccaagcagcaauaa

SEQ ID NO: 79592 - RNA, 18 nt, Artificial Sequence
  Synthetic
aaauggacacaucaauaa

SEQ ID NO: 79593 - RNA, 19 nt, Artificial Sequence
  Synthetic
caaauggacacaucaauaa

SEQ ID NO: 79594 - RNA, 20 nt, Artificial Sequence
  Synthetic
acaaauggacacaucaauaa

SEQ ID NO: 79595 - RNA, 21 nt, Artificial Sequence
  Synthetic
cacaaauggacacaucaauaa

SEQ ID NO: 79596 - RNA, 22 nt, Artificial Sequence
  Synthetic
acacaaauggacacaucaauaa

SEQ ID NO: 79597 - RNA, 23 nt, Artificial Sequence
  Synthetic
aacacaaauggacacaucaauaa

SEQ ID NO: 79598 - RNA, 24 nt, Artificial Sequence
  Synthetic
caacacaaauggacacaucaauaa

SEQ ID NO: 79599 - RNA, 18 nt, Artificial Sequence
  Synthetic
auugugggagcucaauaa

SEQ ID NO: 79600 - RNA, 19 nt, Artificial Sequence
  Synthetic
aauugugggagcucaauaa

SEQ ID NO: 79601 - RNA, 20 nt, Artificial Sequence
  Synthetic
uaauugugggagcucaauaa

SEQ ID NO: 79602 - RNA, 21 nt, Artificial Sequence
  Synthetic
uuaauugugggagcucaauaa

SEQ ID NO: 79603 - RNA, 24 nt, Artificial Sequence
  Synthetic
agguuaauugugggagcucaauaa

SEQ ID NO: 79604 - RNA, 19 nt, Artificial Sequence
  Synthetic
uggaaauugugcucaauaa

SEQ ID NO: 79605 - RNA, 20 nt, Artificial Sequence
  Synthetic
auggaaauugugcucaauaa

SEQ ID NO: 79606 - RNA, 21 nt, Artificial Sequence
  Synthetic
cauggaaauugugcucaauaa

SEQ ID NO: 79607 - RNA, 24 nt, Artificial Sequence
  Synthetic
uggcauggaaauugugcucaauaa

SEQ ID NO: 79608 - RNA, 18 nt, Artificial Sequence
  Synthetic
agcuaaucucuucaauaa

SEQ ID NO: 79609 - RNA, 19 nt, Artificial Sequence
  Synthetic
uagcuaaucucuucaauaa

SEQ ID NO: 79610 - RNA, 20 nt, Artificial Sequence
  Synthetic
uuagcuaaucucuucaauaa

SEQ ID NO: 79611 - RNA, 21 nt, Artificial Sequence
  Synthetic
auuagcuaaucucuucaauaa

SEQ ID NO: 79612 - RNA, 22 nt, Artificial Sequence
  Synthetic
aauuagcuaaucucuucaauaa

SEQ ID NO: 79613 - RNA, 23 nt, Artificial Sequence
  Synthetic
aaauuagcuaaucucuucaauaa

SEQ ID NO: 79614 - RNA, 24 nt, Artificial Sequence
  Synthetic
uaaauuagcuaaucucuucaauaa

SEQ ID NO: 79615 - RNA, 18 nt, Artificial Sequence
  Synthetic
agaaauguagaagaauaa

SEQ ID NO: 79616 - RNA, 19 nt, Artificial Sequence
  Synthetic
cagaaauguagaagaauaa

SEQ ID NO: 79617 - RNA, 20 nt, Artificial Sequence
  Synthetic
ccagaaauguagaagaauaa

SEQ ID NO: 79618 - RNA, 21 nt, Artificial Sequence
  Synthetic
uccagaaauguagaagaauaa

SEQ ID NO: 79619 - RNA, 22 nt, Artificial Sequence
  Synthetic
auccagaaauguagaagaauaa

SEQ ID NO: 79620 - RNA, 23 nt, Artificial Sequence
  Synthetic
aauccagaaauguagaagaauaa

SEQ ID NO: 79621 - RNA, 24 nt, Artificial Sequence
  Synthetic
uaauccagaaauguagaagaauaa

SEQ ID NO: 79622 - RNA, 18 nt, Artificial Sequence
  Synthetic
aaggaacagcgagaauaa

SEQ ID NO: 79623 - RNA, 20 nt, Artificial Sequence
  Synthetic
ugaaggaacagcgagaauaa

SEQ ID NO: 79624 - RNA, 21 nt, Artificial Sequence
  Synthetic
augaaggaacagcgagaauaa

SEQ ID NO: 79625 - RNA, 22 nt, Artificial Sequence
  Synthetic
caugaaggaacagcgagaauaa

SEQ ID NO: 79626 - RNA, 23 nt, Artificial Sequence
  Synthetic
acaugaaggaacagcgagaauaa

SEQ ID NO: 79627 - RNA, 24 nt, Artificial Sequence
  Synthetic
uacaugaaggaacagcgagaauaa

SEQ ID NO: 79628 - RNA, 21 nt, Artificial Sequence
  Synthetic
uuagagaaacaaaaggaauaa

SEQ ID NO: 79629 - RNA, 22 nt, Artificial Sequence
  Synthetic
cuuagagaaacaaaaggaauaa

SEQ ID NO: 79630 - RNA, 23 nt, Artificial Sequence
  Synthetic
ccuuagagaaacaaaaggaauaa

SEQ ID NO: 79631 - RNA, 24 nt, Artificial Sequence
  Synthetic
uccuuagagaaacaaaaggaauaa

SEQ ID NO: 79632 - RNA, 18 nt, Artificial Sequence
  Synthetic
cacagacaaguggaauaa

SEQ ID NO: 79633 - RNA, 21 nt, Artificial Sequence
  Synthetic
uggcacagacaaguggaauaa

SEQ ID NO: 79634 - RNA, 22 nt, Artificial Sequence
  Synthetic
uuggcacagacaaguggaauaa

SEQ ID NO: 79635 - RNA, 23 nt, Artificial Sequence
  Synthetic
uuuggcacagacaaguggaauaa

SEQ ID NO: 79636 - RNA, 24 nt, Artificial Sequence
  Synthetic
uuuuggcacagacaaguggaauaa

SEQ ID NO: 79637 - RNA, 19 nt, Artificial Sequence
  Synthetic
aguaaugaacaaugaauaa

SEQ ID NO: 79638 - RNA, 20 nt, Artificial Sequence
  Synthetic
aaguaaugaacaaugaauaa

SEQ ID NO: 79639 - RNA, 22 nt, Artificial Sequence
  Synthetic
ugaaguaaugaacaaugaauaa

SEQ ID NO: 79640 - RNA, 23 nt, Artificial Sequence
  Synthetic
augaaguaaugaacaaugaauaa

SEQ ID NO: 79641 - RNA, 24 nt, Artificial Sequence
  Synthetic
aaugaaguaaugaacaaugaauaa

SEQ ID NO: 79642 - RNA, 21 nt, Artificial Sequence
  Synthetic
cagaaagauagacaugaauaa

SEQ ID NO: 79643 - RNA, 24 nt, Artificial Sequence
  Synthetic
aggcagaaagauagacaugaauaa

SEQ ID NO: 79644 - RNA, 18 nt, Artificial Sequence
  Synthetic
caagaaguauaugaauaa

SEQ ID NO: 79645 - RNA, 19 nt, Artificial Sequence
  Synthetic
ucaagaaguauaugaauaa

SEQ ID NO: 79646 - RNA, 20 nt, Artificial Sequence
  Synthetic
cucaagaaguauaugaauaa

SEQ ID NO: 79647 - RNA, 21 nt, Artificial Sequence
  Synthetic
ccucaagaaguauaugaauaa

SEQ ID NO: 79648 - RNA, 22 nt, Artificial Sequence
  Synthetic
cccucaagaaguauaugaauaa

SEQ ID NO: 79649 - RNA, 23 nt, Artificial Sequence
  Synthetic
ccccucaagaaguauaugaauaa

SEQ ID NO: 79650 - RNA, 24 nt, Artificial Sequence
  Synthetic
cccccucaagaaguauaugaauaa

SEQ ID NO: 79651 - RNA, 21 nt, Artificial Sequence
  Synthetic
agggaaguacuuucugaauaa

SEQ ID NO: 79652 - RNA, 22 nt, Artificial Sequence
  Synthetic
uagggaaguacuuucugaauaa

SEQ ID NO: 79653 - RNA, 23 nt, Artificial Sequence
  Synthetic
auagggaaguacuuucugaauaa

SEQ ID NO: 79654 - RNA, 22 nt, Artificial Sequence
  Synthetic
agaauuacuauauguugaauaa

SEQ ID NO: 79655 - RNA, 23 nt, Artificial Sequence
  Synthetic
cagaauuacuauauguugaauaa

SEQ ID NO: 79656 - RNA, 24 nt, Artificial Sequence
  Synthetic
ucagaauuacuauauguugaauaa

SEQ ID NO: 79657 - RNA, 18 nt, Artificial Sequence
  Synthetic
agcuuuuuuguugaauaa

SEQ ID NO: 79658 - RNA, 19 nt, Artificial Sequence
  Synthetic
aagcuuuuuuguugaauaa

SEQ ID NO: 79659 - RNA, 20 nt, Artificial Sequence
  Synthetic
aaagcuuuuuuguugaauaa

SEQ ID NO: 79660 - RNA, 21 nt, Artificial Sequence
  Synthetic
aaaagcuuuuuuguugaauaa

SEQ ID NO: 79661 - RNA, 22 nt, Artificial Sequence
  Synthetic
caaaagcuuuuuuguugaauaa

SEQ ID NO: 79662 - RNA, 18 nt, Artificial Sequence
  Synthetic
uuaaaagaggaauaauaa

SEQ ID NO: 79663 - RNA, 19 nt, Artificial Sequence
  Synthetic
cuuaaaagaggaauaauaa

SEQ ID NO: 79664 - RNA, 20 nt, Artificial Sequence
  Synthetic
ccuuaaaagaggaauaauaa

SEQ ID NO: 79665 - RNA, 21 nt, Artificial Sequence
  Synthetic
accuuaaaagaggaauaauaa

SEQ ID NO: 79666 - RNA, 22 nt, Artificial Sequence
  Synthetic
uaccuuaaaagaggaauaauaa

SEQ ID NO: 79667 - RNA, 23 nt, Artificial Sequence
  Synthetic
uuaccuuaaaagaggaauaauaa

SEQ ID NO: 79668 - RNA, 24 nt, Artificial Sequence
  Synthetic
uuuaccuuaaaagaggaauaauaa

SEQ ID NO: 79669 - RNA, 22 nt, Artificial Sequence
  Synthetic
agauaauagugaaauauaauaa

SEQ ID NO: 79670 - RNA, 23 nt, Artificial Sequence
  Synthetic
uagauaauagugaaauauaauaa

SEQ ID NO: 79671 - RNA, 18 nt, Artificial Sequence
  Synthetic
uaauccagcauauaauaa

SEQ ID NO: 79672 - RNA, 19 nt, Artificial Sequence
  Synthetic
auaauccagcauauaauaa

SEQ ID NO: 79673 - RNA, 21 nt, Artificial Sequence
  Synthetic
ugauaauccagcauauaauaa

SEQ ID NO: 79674 - RNA, 22 nt, Artificial Sequence
  Synthetic
uugauaauccagcauauaauaa

SEQ ID NO: 79675 - RNA, 23 nt, Artificial Sequence
  Synthetic
uuugauaauccagcauauaauaa

SEQ ID NO: 79676 - RNA, 24 nt, Artificial Sequence
  Synthetic
auuugauaauccagcauauaauaa

SEQ ID NO: 79677 - RNA, 19 nt, Artificial Sequence
  Synthetic
agggcuuuucuuauaauaa

SEQ ID NO: 79678 - RNA, 20 nt, Artificial Sequence
  Synthetic
cagggcuuuucuuauaauaa

SEQ ID NO: 79679 - RNA, 21 nt, Artificial Sequence
  Synthetic
ccagggcuuuucuuauaauaa

SEQ ID NO: 79680 - RNA, 22 nt, Artificial Sequence
  Synthetic
cccagggcuuuucuuauaauaa

SEQ ID NO: 79681 - RNA, 23 nt, Artificial Sequence
  Synthetic
ucccagggcuuuucuuauaauaa

SEQ ID NO: 79682 - RNA, 24 nt, Artificial Sequence
  Synthetic
aucccagggcuuuucuuauaauaa

SEQ ID NO: 79683 - RNA, 18 nt, Artificial Sequence
  Synthetic
uauaauaccagcuaauaa

SEQ ID NO: 79684 - RNA, 19 nt, Artificial Sequence
  Synthetic
uuauaauaccagcuaauaa

SEQ ID NO: 79685 - RNA, 20 nt, Artificial Sequence
  Synthetic
uuuauaauaccagcuaauaa

SEQ ID NO: 79686 - RNA, 21 nt, Artificial Sequence
  Synthetic
auuuauaauaccagcuaauaa

SEQ ID NO: 79687 - RNA, 22 nt, Artificial Sequence
  Synthetic
aauuuauaauaccagcuaauaa

SEQ ID NO: 79688 - RNA, 23 nt, Artificial Sequence
  Synthetic
aaauuuauaauaccagcuaauaa

SEQ ID NO: 79689 - RNA, 18 nt, Artificial Sequence
  Synthetic
acaccuuugugcuaauaa

SEQ ID NO: 79690 - RNA, 19 nt, Artificial Sequence
  Synthetic
aacaccuuugugcuaauaa

SEQ ID NO: 79691 - RNA, 20 nt, Artificial Sequence
  Synthetic
aaacaccuuugugcuaauaa

SEQ ID NO: 79692 - RNA, 21 nt, Artificial Sequence
  Synthetic
caaacaccuuugugcuaauaa

SEQ ID NO: 79693 - RNA, 24 nt, Artificial Sequence
  Synthetic
aggcaaacaccuuugugcuaauaa

SEQ ID NO: 79694 - RNA, 18 nt, Artificial Sequence
  Synthetic
caagccccaguguaauaa

SEQ ID NO: 79695 - RNA, 20 nt, Artificial Sequence
  Synthetic
ugcaagccccaguguaauaa

SEQ ID NO: 79696 - RNA, 21 nt, Artificial Sequence
  Synthetic
uugcaagccccaguguaauaa

SEQ ID NO: 79697 - RNA, 22 nt, Artificial Sequence
  Synthetic
uuugcaagccccaguguaauaa

SEQ ID NO: 79698 - RNA, 23 nt, Artificial Sequence
  Synthetic
uuuugcaagccccaguguaauaa

SEQ ID NO: 79699 - RNA, 24 nt, Artificial Sequence
  Synthetic
auuuugcaagccccaguguaauaa

SEQ ID NO: 79700 - RNA, 21 nt, Artificial Sequence
  Synthetic
ucuucagaauaaaauuaauaa

SEQ ID NO: 79701 - RNA, 22 nt, Artificial Sequence
  Synthetic
uucuucagaauaaaauuaauaa

SEQ ID NO: 79702 - RNA, 23 nt, Artificial Sequence
  Synthetic
uuucuucagaauaaaauuaauaa

SEQ ID NO: 79703 - RNA, 24 nt, Artificial Sequence
  Synthetic
uuuucuucagaauaaaauuaauaa

SEQ ID NO: 79704 - RNA, 22 nt, Artificial Sequence
  Synthetic
agaaacugaaaauaauuaauaa

SEQ ID NO: 79705 - RNA, 23 nt, Artificial Sequence
  Synthetic
aagaaacugaaaauaauuaauaa

SEQ ID NO: 79706 - RNA, 18 nt, Artificial Sequence
  Synthetic
ccauugucauauuaauaa

SEQ ID NO: 79707 - RNA, 20 nt, Artificial Sequence
  Synthetic
cgccauugucauauuaauaa

SEQ ID NO: 79708 - RNA, 21 nt, Artificial Sequence
  Synthetic
acgccauugucauauuaauaa

SEQ ID NO: 79709 - RNA, 22 nt, Artificial Sequence
  Synthetic
aacgccauugucauauuaauaa

SEQ ID NO: 79710 - RNA, 24 nt, Artificial Sequence
  Synthetic
ugaacgccauugucauauuaauaa

SEQ ID NO: 79711 - RNA, 18 nt, Artificial Sequence
  Synthetic
cauugguaugguuaauaa

SEQ ID NO: 79712 - RNA, 19 nt, Artificial Sequence
  Synthetic
ucauugguaugguuaauaa

SEQ ID NO: 79713 - RNA, 21 nt, Artificial Sequence
  Synthetic
agucauugguaugguuaauaa

SEQ ID NO: 79714 - RNA, 22 nt, Artificial Sequence
  Synthetic
aagucauugguaugguuaauaa

SEQ ID NO: 79715 - RNA, 23 nt, Artificial Sequence
  Synthetic
uaagucauugguaugguuaauaa

SEQ ID NO: 79716 - RNA, 24 nt, Artificial Sequence
  Synthetic
uuaagucauugguaugguuaauaa

SEQ ID NO: 79717 - RNA, 18 nt, Artificial Sequence
  Synthetic
auauauacccaaacauaa

SEQ ID NO: 79718 - RNA, 19 nt, Artificial Sequence
  Synthetic
aauauauacccaaacauaa

SEQ ID NO: 79719 - RNA, 21 nt, Artificial Sequence
  Synthetic
agaauauauacccaaacauaa

SEQ ID NO: 79720 - RNA, 22 nt, Artificial Sequence
  Synthetic
aagaauauauacccaaacauaa

SEQ ID NO: 79721 - RNA, 23 nt, Artificial Sequence
  Synthetic
aaagaauauauacccaaacauaa

SEQ ID NO: 79722 - RNA, 24 nt, Artificial Sequence
  Synthetic
aaaagaauauauacccaaacauaa

SEQ ID NO: 79723 - RNA, 21 nt, Artificial Sequence
  Synthetic
agcaaaaucuuccaaacauaa

SEQ ID NO: 79724 - RNA, 22 nt, Artificial Sequence
  Synthetic
aagcaaaaucuuccaaacauaa

SEQ ID NO: 79725 - RNA, 23 nt, Artificial Sequence
  Synthetic
aaagcaaaaucuuccaaacauaa

SEQ ID NO: 79726 - RNA, 24 nt, Artificial Sequence
  Synthetic
uaaagcaaaaucuuccaaacauaa

SEQ ID NO: 79727 - RNA, 18 nt, Artificial Sequence
  Synthetic
caguaaguucacacauaa

SEQ ID NO: 79728 - RNA, 19 nt, Artificial Sequence
  Synthetic
acaguaaguucacacauaa

SEQ ID NO: 79729 - RNA, 20 nt, Artificial Sequence
  Synthetic
aacaguaaguucacacauaa

SEQ ID NO: 79730 - RNA, 21 nt, Artificial Sequence
  Synthetic
aaacaguaaguucacacauaa

SEQ ID NO: 79731 - RNA, 22 nt, Artificial Sequence
  Synthetic
aaaacaguaaguucacacauaa

SEQ ID NO: 79732 - RNA, 24 nt, Artificial Sequence
  Synthetic
ugaaaacaguaaguucacacauaa

SEQ ID NO: 79733 - RNA, 18 nt, Artificial Sequence
  Synthetic
cauaaugacuucacauaa

SEQ ID NO: 79734 - RNA, 20 nt, Artificial Sequence
  Synthetic
ugcauaaugacuucacauaa

SEQ ID NO: 79735 - RNA, 21 nt, Artificial Sequence
  Synthetic
uugcauaaugacuucacauaa

SEQ ID NO: 79736 - RNA, 22 nt, Artificial Sequence
  Synthetic
uuugcauaaugacuucacauaa

SEQ ID NO: 79737 - RNA, 23 nt, Artificial Sequence
  Synthetic
auuugcauaaugacuucacauaa

SEQ ID NO: 79738 - RNA, 20 nt, Artificial Sequence
  Synthetic
uggcacauucaaagacauaa

SEQ ID NO: 79739 - RNA, 21 nt, Artificial Sequence
  Synthetic
uuggcacauucaaagacauaa

SEQ ID NO: 79740 - RNA, 22 nt, Artificial Sequence
  Synthetic
auuggcacauucaaagacauaa

SEQ ID NO: 79741 - RNA, 23 nt, Artificial Sequence
  Synthetic
uauuggcacauucaaagacauaa

SEQ ID NO: 79742 - RNA, 18 nt, Artificial Sequence
  Synthetic
agaagggaagugacauaa

SEQ ID NO: 79743 - RNA, 19 nt, Artificial Sequence
  Synthetic
aagaagggaagugacauaa

SEQ ID NO: 79744 - RNA, 20 nt, Artificial Sequence
  Synthetic
uaagaagggaagugacauaa

SEQ ID NO: 79745 - RNA, 18 nt, Artificial Sequence
  Synthetic
uguaaguaaauuacauaa

SEQ ID NO: 79746 - RNA, 19 nt, Artificial Sequence
  Synthetic
cuguaaguaaauuacauaa

SEQ ID NO: 79747 - RNA, 20 nt, Artificial Sequence
  Synthetic
ucuguaaguaaauuacauaa

SEQ ID NO: 79748 - RNA, 21 nt, Artificial Sequence
  Synthetic
uucuguaaguaaauuacauaa

SEQ ID NO: 79749 - RNA, 22 nt, Artificial Sequence
  Synthetic
auucuguaaguaaauuacauaa

SEQ ID NO: 79750 - RNA, 23 nt, Artificial Sequence
  Synthetic
cauucuguaaguaaauuacauaa

SEQ ID NO: 79751 - RNA, 24 nt, Artificial Sequence
  Synthetic
acauucuguaaguaaauuacauaa

SEQ ID NO: 79752 - RNA, 18 nt, Artificial Sequence
  Synthetic
aagcacacauuuacauaa

SEQ ID NO: 79753 - RNA, 19 nt, Artificial Sequence
  Synthetic
caagcacacauuuacauaa

SEQ ID NO: 79754 - RNA, 20 nt, Artificial Sequence
  Synthetic
acaagcacacauuuacauaa

SEQ ID NO: 79755 - RNA, 21 nt, Artificial Sequence
  Synthetic
cacaagcacacauuuacauaa

SEQ ID NO: 79756 - RNA, 22 nt, Artificial Sequence
  Synthetic
ccacaagcacacauuuacauaa

SEQ ID NO: 79757 - RNA, 24 nt, Artificial Sequence
  Synthetic
agccacaagcacacauuuacauaa

SEQ ID NO: 79758 - RNA, 18 nt, Artificial Sequence
  Synthetic
agguugaggccuccauaa

SEQ ID NO: 79759 - RNA, 19 nt, Artificial Sequence
  Synthetic
uagguugaggccuccauaa

SEQ ID NO: 79760 - RNA, 20 nt, Artificial Sequence
  Synthetic
auagguugaggccuccauaa

SEQ ID NO: 79761 - RNA, 21 nt, Artificial Sequence
  Synthetic
cauagguugaggccuccauaa

SEQ ID NO: 79762 - RNA, 22 nt, Artificial Sequence
  Synthetic
ucauagguugaggccuccauaa

SEQ ID NO: 79763 - RNA, 18 nt, Artificial Sequence
  Synthetic
auauggcugauugcauaa

SEQ ID NO: 79764 - RNA, 20 nt, Artificial Sequence
  Synthetic
agauauggcugauugcauaa

SEQ ID NO: 79765 - RNA, 23 nt, Artificial Sequence
  Synthetic
aggagauauggcugauugcauaa

SEQ ID NO: 79766 - RNA, 24 nt, Artificial Sequence
  Synthetic
aaggagauauggcugauugcauaa

SEQ ID NO: 79767 - RNA, 18 nt, Artificial Sequence
  Synthetic
aggcaacauguugcauaa

SEQ ID NO: 79768 - RNA, 19 nt, Artificial Sequence
  Synthetic
uaggcaacauguugcauaa

SEQ ID NO: 79769 - RNA, 20 nt, Artificial Sequence
  Synthetic
uuaggcaacauguugcauaa

SEQ ID NO: 79770 - RNA, 21 nt, Artificial Sequence
  Synthetic
auuaggcaacauguugcauaa

SEQ ID NO: 79771 - RNA, 23 nt, Artificial Sequence
  Synthetic
agauuaggcaacauguugcauaa

SEQ ID NO: 79772 - RNA, 24 nt, Artificial Sequence
  Synthetic
uagauuaggcaacauguugcauaa

SEQ ID NO: 79773 - RNA, 21 nt, Artificial Sequence
  Synthetic
uuugauacaaaugaaucauaa

SEQ ID NO: 79774 - RNA, 22 nt, Artificial Sequence
  Synthetic
cuuugauacaaaugaaucauaa

SEQ ID NO: 79775 - RNA, 23 nt, Artificial Sequence
  Synthetic
acuuugauacaaaugaaucauaa

SEQ ID NO: 79776 - RNA, 24 nt, Artificial Sequence
  Synthetic
cacuuugauacaaaugaaucauaa

SEQ ID NO: 79777 - RNA, 18 nt, Artificial Sequence
  Synthetic
cagccucagugcucauaa

SEQ ID NO: 79778 - RNA, 19 nt, Artificial Sequence
  Synthetic
acagccucagugcucauaa

SEQ ID NO: 79779 - RNA, 20 nt, Artificial Sequence
  Synthetic
uacagccucagugcucauaa

SEQ ID NO: 79780 - RNA, 21 nt, Artificial Sequence
  Synthetic
auacagccucagugcucauaa

SEQ ID NO: 79781 - RNA, 22 nt, Artificial Sequence
  Synthetic
uauacagccucagugcucauaa

SEQ ID NO: 79782 - RNA, 23 nt, Artificial Sequence
  Synthetic
cuauacagccucagugcucauaa

SEQ ID NO: 79783 - RNA, 18 nt, Artificial Sequence
  Synthetic
acaaguuugcucucauaa

SEQ ID NO: 79784 - RNA, 19 nt, Artificial Sequence
  Synthetic
aacaaguuugcucucauaa

SEQ ID NO: 79785 - RNA, 20 nt, Artificial Sequence
  Synthetic
aaacaaguuugcucucauaa

SEQ ID NO: 79786 - RNA, 21 nt, Artificial Sequence
  Synthetic
aaaacaaguuugcucucauaa

SEQ ID NO: 79787 - RNA, 22 nt, Artificial Sequence
  Synthetic
caaaacaaguuugcucucauaa

SEQ ID NO: 79788 - RNA, 23 nt, Artificial Sequence
  Synthetic
acaaaacaaguuugcucucauaa

SEQ ID NO: 79789 - RNA, 24 nt, Artificial Sequence
  Synthetic
uacaaaacaaguuugcucucauaa

SEQ ID NO: 79790 - RNA, 18 nt, Artificial Sequence
  Synthetic
cucagagcauuuucauaa

SEQ ID NO: 79791 - RNA, 19 nt, Artificial Sequence
  Synthetic
ucucagagcauuuucauaa

SEQ ID NO: 79792 - RNA, 20 nt, Artificial Sequence
  Synthetic
aucucagagcauuuucauaa

SEQ ID NO: 79793 - RNA, 21 nt, Artificial Sequence
  Synthetic
aaucucagagcauuuucauaa

SEQ ID NO: 79794 - RNA, 22 nt, Artificial Sequence
  Synthetic
aaaucucagagcauuuucauaa

SEQ ID NO: 79795 - RNA, 23 nt, Artificial Sequence
  Synthetic
caaaucucagagcauuuucauaa

SEQ ID NO: 79796 - RNA, 24 nt, Artificial Sequence
  Synthetic
ucaaaucucagagcauuuucauaa

SEQ ID NO: 79797 - RNA, 18 nt, Artificial Sequence
  Synthetic
aagaacuagaacagauaa

SEQ ID NO: 79798 - RNA, 20 nt, Artificial Sequence
  Synthetic
ugaagaacuagaacagauaa

SEQ ID NO: 79799 - RNA, 21 nt, Artificial Sequence
  Synthetic
augaagaacuagaacagauaa

SEQ ID NO: 79800 - RNA, 22 nt, Artificial Sequence
  Synthetic
uaugaagaacuagaacagauaa

SEQ ID NO: 79801 - RNA, 23 nt, Artificial Sequence
  Synthetic
uuaugaagaacuagaacagauaa

SEQ ID NO: 79802 - RNA, 24 nt, Artificial Sequence
  Synthetic
cuuaugaagaacuagaacagauaa

SEQ ID NO: 79803 - RNA, 18 nt, Artificial Sequence
  Synthetic
uaucaccaucacagauaa

SEQ ID NO: 79804 - RNA, 19 nt, Artificial Sequence
  Synthetic
cuaucaccaucacagauaa

SEQ ID NO: 79805 - RNA, 20 nt, Artificial Sequence
  Synthetic
acuaucaccaucacagauaa

SEQ ID NO: 79806 - RNA, 21 nt, Artificial Sequence
  Synthetic
cacuaucaccaucacagauaa

SEQ ID NO: 79807 - RNA, 22 nt, Artificial Sequence
  Synthetic
acacuaucaccaucacagauaa

SEQ ID NO: 79808 - RNA, 23 nt, Artificial Sequence
  Synthetic
cacacuaucaccaucacagauaa

SEQ ID NO: 79809 - RNA, 24 nt, Artificial Sequence
  Synthetic
ucacacuaucaccaucacagauaa

SEQ ID NO: 79810 - RNA, 18 nt, Artificial Sequence
  Synthetic
aggucaauguggagauaa

SEQ ID NO: 79811 - RNA, 22 nt, Artificial Sequence
  Synthetic
agggaggucaauguggagauaa

SEQ ID NO: 79812 - RNA, 18 nt, Artificial Sequence
  Synthetic
uggugacuuaauagauaa

SEQ ID NO: 79813 - RNA, 19 nt, Artificial Sequence
  Synthetic
uuggugacuuaauagauaa

SEQ ID NO: 79814 - RNA, 20 nt, Artificial Sequence
  Synthetic
uuuggugacuuaauagauaa

SEQ ID NO: 79815 - RNA, 21 nt, Artificial Sequence
  Synthetic
auuuggugacuuaauagauaa

SEQ ID NO: 79816 - RNA, 22 nt, Artificial Sequence
  Synthetic
uauuuggugacuuaauagauaa

SEQ ID NO: 79817 - RNA, 23 nt, Artificial Sequence
  Synthetic
uuauuuggugacuuaauagauaa

SEQ ID NO: 79818 - RNA, 24 nt, Artificial Sequence
  Synthetic
uuuauuuggugacuuaauagauaa

SEQ ID NO: 79819 - RNA, 18 nt, Artificial Sequence
  Synthetic
uuugaggugagacgauaa

SEQ ID NO: 79820 - RNA, 21 nt, Artificial Sequence
  Synthetic
agguuugaggugagacgauaa

SEQ ID NO: 79821 - RNA, 22 nt, Artificial Sequence
  Synthetic
aagguuugaggugagacgauaa

SEQ ID NO: 79822 - RNA, 23 nt, Artificial Sequence
  Synthetic
uaagguuugaggugagacgauaa

SEQ ID NO: 79823 - RNA, 19 nt, Artificial Sequence
  Synthetic
uggauguacagagcgauaa

SEQ ID NO: 79824 - RNA, 20 nt, Artificial Sequence
  Synthetic
auggauguacagagcgauaa

SEQ ID NO: 79825 - RNA, 23 nt, Artificial Sequence
  Synthetic
cggauggauguacagagcgauaa

SEQ ID NO: 79826 - RNA, 24 nt, Artificial Sequence
  Synthetic
acggauggauguacagagcgauaa

SEQ ID NO: 79827 - RNA, 18 nt, Artificial Sequence
  Synthetic
caauaugcaucaggauaa

SEQ ID NO: 79828 - RNA, 19 nt, Artificial Sequence
  Synthetic
acaauaugcaucaggauaa

SEQ ID NO: 79829 - RNA, 21 nt, Artificial Sequence
  Synthetic
agacaauaugcaucaggauaa

SEQ ID NO: 79830 - RNA, 22 nt, Artificial Sequence
  Synthetic
aagacaauaugcaucaggauaa

SEQ ID NO: 79831 - RNA, 18 nt, Artificial Sequence
  Synthetic
ucacacauuuagggauaa

SEQ ID NO: 79832 - RNA, 19 nt, Artificial Sequence
  Synthetic
cucacacauuuagggauaa

SEQ ID NO: 79833 - RNA, 22 nt, Artificial Sequence
  Synthetic
uggcucacacauuuagggauaa

SEQ ID NO: 79834 - RNA, 24 nt, Artificial Sequence
  Synthetic
uguggcucacacauuuagggauaa

SEQ ID NO: 79835 - RNA, 19 nt, Artificial Sequence
  Synthetic
agcaggccagcacugauaa

SEQ ID NO: 79836 - RNA, 20 nt, Artificial Sequence
  Synthetic
aagcaggccagcacugauaa

SEQ ID NO: 79837 - RNA, 21 nt, Artificial Sequence
  Synthetic
uaagcaggccagcacugauaa

SEQ ID NO: 79838 - RNA, 23 nt, Artificial Sequence
  Synthetic
cguaagcaggccagcacugauaa

SEQ ID NO: 79839 - RNA, 24 nt, Artificial Sequence
  Synthetic
acguaagcaggccagcacugauaa

SEQ ID NO: 79840 - RNA, 21 nt, Artificial Sequence
  Synthetic
uuuuuuuuucucaucugauaa

SEQ ID NO: 79841 - RNA, 22 nt, Artificial Sequence
  Synthetic
uuuuuuuuuucucaucugauaa

SEQ ID NO: 79842 - RNA, 23 nt, Artificial Sequence
  Synthetic
auuuuuuuuuucucaucugauaa

SEQ ID NO: 79843 - RNA, 24 nt, Artificial Sequence
  Synthetic
uauuuuuuuuuucucaucugauaa

SEQ ID NO: 79844 - RNA, 18 nt, Artificial Sequence
  Synthetic
ugacacagcccuugauaa

SEQ ID NO: 79845 - RNA, 19 nt, Artificial Sequence
  Synthetic
augacacagcccuugauaa

SEQ ID NO: 79846 - RNA, 20 nt, Artificial Sequence
  Synthetic
aaugacacagcccuugauaa

SEQ ID NO: 79847 - RNA, 22 nt, Artificial Sequence
  Synthetic
ugaaugacacagcccuugauaa

SEQ ID NO: 79848 - RNA, 23 nt, Artificial Sequence
  Synthetic
augaaugacacagcccuugauaa

SEQ ID NO: 79849 - RNA, 24 nt, Artificial Sequence
  Synthetic
caugaaugacacagcccuugauaa

SEQ ID NO: 79850 - RNA, 18 nt, Artificial Sequence
  Synthetic
aaagacaucauuugauaa

SEQ ID NO: 79851 - RNA, 19 nt, Artificial Sequence
  Synthetic
aaaagacaucauuugauaa

SEQ ID NO: 79852 - RNA, 20 nt, Artificial Sequence
  Synthetic
aaaaagacaucauuugauaa

SEQ ID NO: 79853 - RNA, 21 nt, Artificial Sequence
  Synthetic
aaaaaagacaucauuugauaa

SEQ ID NO: 79854 - RNA, 22 nt, Artificial Sequence
  Synthetic
aaaaaaagacaucauuugauaa

SEQ ID NO: 79855 - RNA, 23 nt, Artificial Sequence
  Synthetic
aaaaaaaagacaucauuugauaa

SEQ ID NO: 79856 - RNA, 24 nt, Artificial Sequence
  Synthetic
aaaaaaaaagacaucauuugauaa

SEQ ID NO: 79857 - RNA, 21 nt, Artificial Sequence
  Synthetic
aaguuauauaaauuaauauaa

SEQ ID NO: 79858 - RNA, 23 nt, Artificial Sequence
  Synthetic
agaaguuauauaaauuaauauaa

SEQ ID NO: 79859 - RNA, 18 nt, Artificial Sequence
  Synthetic
agauaaggacugauauaa

SEQ ID NO: 79860 - RNA, 19 nt, Artificial Sequence
  Synthetic
aagauaaggacugauauaa

SEQ ID NO: 79861 - RNA, 20 nt, Artificial Sequence
  Synthetic
uaagauaaggacugauauaa

SEQ ID NO: 79862 - RNA, 21 nt, Artificial Sequence
  Synthetic
uuaagauaaggacugauauaa

SEQ ID NO: 79863 - RNA, 23 nt, Artificial Sequence
  Synthetic
uguuaagauaaggacugauauaa

SEQ ID NO: 79864 - RNA, 18 nt, Artificial Sequence
  Synthetic
aaaguccugcugauauaa

SEQ ID NO: 79865 - RNA, 19 nt, Artificial Sequence
  Synthetic
uaaaguccugcugauauaa

SEQ ID NO: 79866 - RNA, 20 nt, Artificial Sequence
  Synthetic
cuaaaguccugcugauauaa

SEQ ID NO: 79867 - RNA, 21 nt, Artificial Sequence
  Synthetic
acuaaaguccugcugauauaa

SEQ ID NO: 79868 - RNA, 22 nt, Artificial Sequence
  Synthetic
aacuaaaguccugcugauauaa

SEQ ID NO: 79869 - RNA, 23 nt, Artificial Sequence
  Synthetic
aaacuaaaguccugcugauauaa

SEQ ID NO: 79870 - RNA, 24 nt, Artificial Sequence
  Synthetic
uaaacuaaaguccugcugauauaa

SEQ ID NO: 79871 - RNA, 18 nt, Artificial Sequence
  Synthetic
ugauaaugguugcuauaa

SEQ ID NO: 79872 - RNA, 19 nt, Artificial Sequence
  Synthetic
cugauaaugguugcuauaa

SEQ ID NO: 79873 - RNA, 20 nt, Artificial Sequence
  Synthetic
ccugauaaugguugcuauaa

SEQ ID NO: 79874 - RNA, 21 nt, Artificial Sequence
  Synthetic
uccugauaaugguugcuauaa

SEQ ID NO: 79875 - RNA, 22 nt, Artificial Sequence
  Synthetic
cuccugauaaugguugcuauaa

SEQ ID NO: 79876 - RNA, 24 nt, Artificial Sequence
  Synthetic
ugcuccugauaaugguugcuauaa

SEQ ID NO: 79877 - RNA, 18 nt, Artificial Sequence
  Synthetic
ucaugcaccucauuauaa

SEQ ID NO: 79878 - RNA, 19 nt, Artificial Sequence
  Synthetic
cucaugcaccucauuauaa

SEQ ID NO: 79879 - RNA, 21 nt, Artificial Sequence
  Synthetic
agcucaugcaccucauuauaa

SEQ ID NO: 79880 - RNA, 22 nt, Artificial Sequence
  Synthetic
cagcucaugcaccucauuauaa

SEQ ID NO: 79881 - RNA, 23 nt, Artificial Sequence
  Synthetic
acagcucaugcaccucauuauaa

SEQ ID NO: 79882 - RNA, 24 nt, Artificial Sequence
  Synthetic
aacagcucaugcaccucauuauaa

SEQ ID NO: 79883 - RNA, 18 nt, Artificial Sequence
  Synthetic
cugaucacaguauuauaa

SEQ ID NO: 79884 - RNA, 21 nt, Artificial Sequence
  Synthetic
uggcugaucacaguauuauaa

SEQ ID NO: 79885 - RNA, 22 nt, Artificial Sequence
  Synthetic
auggcugaucacaguauuauaa

SEQ ID NO: 79886 - RNA, 23 nt, Artificial Sequence
  Synthetic
uauggcugaucacaguauuauaa

SEQ ID NO: 79887 - RNA, 24 nt, Artificial Sequence
  Synthetic
uuauggcugaucacaguauuauaa

SEQ ID NO: 79888 - RNA, 18 nt, Artificial Sequence
  Synthetic
auucagccaguauuauaa

SEQ ID NO: 79889 - RNA, 19 nt, Artificial Sequence
  Synthetic
aauucagccaguauuauaa

SEQ ID NO: 79890 - RNA, 20 nt, Artificial Sequence
  Synthetic
aaauucagccaguauuauaa

SEQ ID NO: 79891 - RNA, 21 nt, Artificial Sequence
  Synthetic
aaaauucagccaguauuauaa

SEQ ID NO: 79892 - RNA, 22 nt, Artificial Sequence
  Synthetic
aaaaauucagccaguauuauaa

SEQ ID NO: 79893 - RNA, 24 nt, Artificial Sequence
  Synthetic
ugaaaaauucagccaguauuauaa

SEQ ID NO: 79894 - RNA, 18 nt, Artificial Sequence
  Synthetic
cgggguuuucuguuauaa

SEQ ID NO: 79895 - RNA, 19 nt, Artificial Sequence
  Synthetic
ccgggguuuucuguuauaa

SEQ ID NO: 79896 - RNA, 20 nt, Artificial Sequence
  Synthetic
uccgggguuuucuguuauaa

SEQ ID NO: 79897 - RNA, 21 nt, Artificial Sequence
  Synthetic
auccgggguuuucuguuauaa

SEQ ID NO: 79898 - RNA, 22 nt, Artificial Sequence
  Synthetic
aauccgggguuuucuguuauaa

SEQ ID NO: 79899 - RNA, 23 nt, Artificial Sequence
  Synthetic
uaauccgggguuuucuguuauaa

SEQ ID NO: 79900 - RNA, 24 nt, Artificial Sequence
  Synthetic
cuaauccgggguuuucuguuauaa

SEQ ID NO: 79901 - RNA, 18 nt, Artificial Sequence
  Synthetic
ucugcuuuauucaacuaa

SEQ ID NO: 79902 - RNA, 19 nt, Artificial Sequence
  Synthetic
uucugcuuuauucaacuaa

SEQ ID NO: 79903 - RNA, 20 nt, Artificial Sequence
  Synthetic
cuucugcuuuauucaacuaa

SEQ ID NO: 79904 - RNA, 23 nt, Artificial Sequence
  Synthetic
aggcuucugcuuuauucaacuaa

SEQ ID NO: 79905 - RNA, 24 nt, Artificial Sequence
  Synthetic
caggcuucugcuuuauucaacuaa

SEQ ID NO: 79906 - RNA, 19 nt, Artificial Sequence
  Synthetic
agugugauugcagaacuaa

SEQ ID NO: 79907 - RNA, 20 nt, Artificial Sequence
  Synthetic
aagugugauugcagaacuaa

SEQ ID NO: 79908 - RNA, 21 nt, Artificial Sequence
  Synthetic
aaagugugauugcagaacuaa

SEQ ID NO: 79909 - RNA, 22 nt, Artificial Sequence
  Synthetic
uaaagugugauugcagaacuaa

SEQ ID NO: 79910 - RNA, 23 nt, Artificial Sequence
  Synthetic
auaaagugugauugcagaacuaa

SEQ ID NO: 79911 - RNA, 24 nt, Artificial Sequence
  Synthetic
cauaaagugugauugcagaacuaa

SEQ ID NO: 79912 - RNA, 18 nt, Artificial Sequence
  Synthetic
uaacccuaucgacacuaa

SEQ ID NO: 79913 - RNA, 19 nt, Artificial Sequence
  Synthetic
uuaacccuaucgacacuaa

SEQ ID NO: 79914 - RNA, 20 nt, Artificial Sequence
  Synthetic
uuuaacccuaucgacacuaa

SEQ ID NO: 79915 - RNA, 21 nt, Artificial Sequence
  Synthetic
cuuuaacccuaucgacacuaa

SEQ ID NO: 79916 - RNA, 22 nt, Artificial Sequence
  Synthetic
ucuuuaacccuaucgacacuaa

SEQ ID NO: 79917 - RNA, 24 nt, Artificial Sequence
  Synthetic
ugucuuuaacccuaucgacacuaa

SEQ ID NO: 79918 - RNA, 18 nt, Artificial Sequence
  Synthetic
aagaccgaaaagcacuaa

SEQ ID NO: 79919 - RNA, 19 nt, Artificial Sequence
  Synthetic
caagaccgaaaagcacuaa

SEQ ID NO: 79920 - RNA, 20 nt, Artificial Sequence
  Synthetic
ucaagaccgaaaagcacuaa

SEQ ID NO: 79921 - RNA, 21 nt, Artificial Sequence
  Synthetic
uucaagaccgaaaagcacuaa

SEQ ID NO: 79922 - RNA, 23 nt, Artificial Sequence
  Synthetic
aguucaagaccgaaaagcacuaa

SEQ ID NO: 79923 - RNA, 24 nt, Artificial Sequence
  Synthetic
uaguucaagaccgaaaagcacuaa

SEQ ID NO: 79924 - RNA, 18 nt, Artificial Sequence
  Synthetic
uuucauucuaagcacuaa

SEQ ID NO: 79925 - RNA, 19 nt, Artificial Sequence
  Synthetic
uuuucauucuaagcacuaa

SEQ ID NO: 79926 - RNA, 21 nt, Artificial Sequence
  Synthetic
aguuuucauucuaagcacuaa

SEQ ID NO: 79927 - RNA, 22 nt, Artificial Sequence
  Synthetic
aaguuuucauucuaagcacuaa

SEQ ID NO: 79928 - RNA, 23 nt, Artificial Sequence
  Synthetic
caaguuuucauucuaagcacuaa

SEQ ID NO: 79929 - RNA, 18 nt, Artificial Sequence
  Synthetic
uucuacccucuucacuaa

SEQ ID NO: 79930 - RNA, 20 nt, Artificial Sequence
  Synthetic
uguucuacccucuucacuaa

SEQ ID NO: 79931 - RNA, 21 nt, Artificial Sequence
  Synthetic
cuguucuacccucuucacuaa

SEQ ID NO: 79932 - RNA, 23 nt, Artificial Sequence
  Synthetic
ugcuguucuacccucuucacuaa

SEQ ID NO: 79933 - RNA, 24 nt, Artificial Sequence
  Synthetic
cugcuguucuacccucuucacuaa

SEQ ID NO: 79934 - RNA, 19 nt, Artificial Sequence
  Synthetic
agacaugccuagggacuaa

SEQ ID NO: 79935 - RNA, 20 nt, Artificial Sequence
  Synthetic
uagacaugccuagggacuaa

SEQ ID NO: 79936 - RNA, 21 nt, Artificial Sequence
  Synthetic
cuagacaugccuagggacuaa

SEQ ID NO: 79937 - RNA, 22 nt, Artificial Sequence
  Synthetic
ucuagacaugccuagggacuaa

SEQ ID NO: 79938 - RNA, 23 nt, Artificial Sequence
  Synthetic
uucuagacaugccuagggacuaa

SEQ ID NO: 79939 - RNA, 24 nt, Artificial Sequence
  Synthetic
uuucuagacaugccuagggacuaa

SEQ ID NO: 79940 - RNA, 18 nt, Artificial Sequence
  Synthetic
accugguuuggauacuaa

SEQ ID NO: 79941 - RNA, 20 nt, Artificial Sequence
  Synthetic
agaccugguuuggauacuaa

SEQ ID NO: 79942 - RNA, 21 nt, Artificial Sequence
  Synthetic
cagaccugguuuggauacuaa

SEQ ID NO: 79943 - RNA, 22 nt, Artificial Sequence
  Synthetic
acagaccugguuuggauacuaa

SEQ ID NO: 79944 - RNA, 23 nt, Artificial Sequence
  Synthetic
uacagaccugguuuggauacuaa

SEQ ID NO: 79945 - RNA, 24 nt, Artificial Sequence
  Synthetic
auacagaccugguuuggauacuaa

SEQ ID NO: 79946 - RNA, 18 nt, Artificial Sequence
  Synthetic
agagcuccaaaguacuaa

SEQ ID NO: 79947 - RNA, 19 nt, Artificial Sequence
  Synthetic
uagagcuccaaaguacuaa

SEQ ID NO: 79948 - RNA, 20 nt, Artificial Sequence
  Synthetic
uuagagcuccaaaguacuaa

SEQ ID NO: 79949 - RNA, 21 nt, Artificial Sequence
  Synthetic
cuuagagcuccaaaguacuaa

SEQ ID NO: 79950 - RNA, 22 nt, Artificial Sequence
  Synthetic
acuuagagcuccaaaguacuaa

SEQ ID NO: 79951 - RNA, 23 nt, Artificial Sequence
  Synthetic
uacuuagagcuccaaaguacuaa

SEQ ID NO: 79952 - RNA, 24 nt, Artificial Sequence
  Synthetic
uuacuuagagcuccaaaguacuaa

SEQ ID NO: 79953 - RNA, 18 nt, Artificial Sequence
  Synthetic
ucucuuggcuguuacuaa

SEQ ID NO: 79954 - RNA, 19 nt, Artificial Sequence
  Synthetic
uucucuuggcuguuacuaa

SEQ ID NO: 79955 - RNA, 21 nt, Artificial Sequence
  Synthetic
aguucucuuggcuguuacuaa

SEQ ID NO: 79956 - RNA, 22 nt, Artificial Sequence
  Synthetic
uaguucucuuggcuguuacuaa

SEQ ID NO: 79957 - RNA, 23 nt, Artificial Sequence
  Synthetic
uuaguucucuuggcuguuacuaa

SEQ ID NO: 79958 - RNA, 24 nt, Artificial Sequence
  Synthetic
uuuaguucucuuggcuguuacuaa

SEQ ID NO: 79959 - RNA, 18 nt, Artificial Sequence
  Synthetic
ugucauugaaagaccuaa

SEQ ID NO: 79960 - RNA, 20 nt, Artificial Sequence
  Synthetic
agugucauugaaagaccuaa

SEQ ID NO: 79961 - RNA, 21 nt, Artificial Sequence
  Synthetic
aagugucauugaaagaccuaa

SEQ ID NO: 79962 - RNA, 22 nt, Artificial Sequence
  Synthetic
aaagugucauugaaagaccuaa

SEQ ID NO: 79963 - RNA, 23 nt, Artificial Sequence
  Synthetic
uaaagugucauugaaagaccuaa

SEQ ID NO: 79964 - RNA, 24 nt, Artificial Sequence
  Synthetic
cuaaagugucauugaaagaccuaa

SEQ ID NO: 79965 - RNA, 18 nt, Artificial Sequence
  Synthetic
acugcuaaguguaccuaa

SEQ ID NO: 79966 - RNA, 19 nt, Artificial Sequence
  Synthetic
uacugcuaaguguaccuaa

SEQ ID NO: 79967 - RNA, 20 nt, Artificial Sequence
  Synthetic
auacugcuaaguguaccuaa

SEQ ID NO: 79968 - RNA, 21 nt, Artificial Sequence
  Synthetic
cauacugcuaaguguaccuaa

SEQ ID NO: 79969 - RNA, 22 nt, Artificial Sequence
  Synthetic
ucauacugcuaaguguaccuaa

SEQ ID NO: 79970 - RNA, 23 nt, Artificial Sequence
  Synthetic
uucauacugcuaaguguaccuaa

SEQ ID NO: 79971 - RNA, 24 nt, Artificial Sequence
  Synthetic
uuucauacugcuaaguguaccuaa

SEQ ID NO: 79972 - RNA, 18 nt, Artificial Sequence
  Synthetic
ccacauauccuacccuaa

SEQ ID NO: 79973 - RNA, 19 nt, Artificial Sequence
  Synthetic
accacauauccuacccuaa

SEQ ID NO: 79974 - RNA, 21 nt, Artificial Sequence
  Synthetic
agaccacauauccuacccuaa

SEQ ID NO: 79975 - RNA, 22 nt, Artificial Sequence
  Synthetic
cagaccacauauccuacccuaa

SEQ ID NO: 79976 - RNA, 23 nt, Artificial Sequence
  Synthetic
acagaccacauauccuacccuaa

SEQ ID NO: 79977 - RNA, 24 nt, Artificial Sequence
  Synthetic
uacagaccacauauccuacccuaa

SEQ ID NO: 79978 - RNA, 19 nt, Artificial Sequence
  Synthetic
agcuuuucuucucuccuaa

SEQ ID NO: 79979 - RNA, 20 nt, Artificial Sequence
  Synthetic
cagcuuuucuucucuccuaa

SEQ ID NO: 79980 - RNA, 22 nt, Artificial Sequence
  Synthetic
agcagcuuuucuucucuccuaa

SEQ ID NO: 79981 - RNA, 23 nt, Artificial Sequence
  Synthetic
aagcagcuuuucuucucuccuaa

SEQ ID NO: 79982 - RNA, 24 nt, Artificial Sequence
  Synthetic
uaagcagcuuuucuucucuccuaa

SEQ ID NO: 79983 - RNA, 21 nt, Artificial Sequence
  Synthetic
aacaccuagaaaaucagcuaa

SEQ ID NO: 79984 - RNA, 22 nt, Artificial Sequence
  Synthetic
uaacaccuagaaaaucagcuaa

SEQ ID NO: 79985 - RNA, 23 nt, Artificial Sequence
  Synthetic
uuaacaccuagaaaaucagcuaa

SEQ ID NO: 79986 - RNA, 24 nt, Artificial Sequence
  Synthetic
uuuaacaccuagaaaaucagcuaa

SEQ ID NO: 79987 - RNA, 19 nt, Artificial Sequence
  Synthetic
cguagaauucaagagcuaa

SEQ ID NO: 79988 - RNA, 20 nt, Artificial Sequence
  Synthetic
acguagaauucaagagcuaa

SEQ ID NO: 79989 - RNA, 21 nt, Artificial Sequence
  Synthetic
aacguagaauucaagagcuaa

SEQ ID NO: 79990 - RNA, 22 nt, Artificial Sequence
  Synthetic
aaacguagaauucaagagcuaa

SEQ ID NO: 79991 - RNA, 23 nt, Artificial Sequence
  Synthetic
aaaacguagaauucaagagcuaa

SEQ ID NO: 79992 - RNA, 24 nt, Artificial Sequence
  Synthetic
aaaaacguagaauucaagagcuaa

SEQ ID NO: 79993 - RNA, 19 nt, Artificial Sequence
  Synthetic
agcagaagaaaaaggcuaa

SEQ ID NO: 79994 - RNA, 20 nt, Artificial Sequence
  Synthetic
aagcagaagaaaaaggcuaa

SEQ ID NO: 79995 - RNA, 21 nt, Artificial Sequence
  Synthetic
caagcagaagaaaaaggcuaa

SEQ ID NO: 79996 - RNA, 22 nt, Artificial Sequence
  Synthetic
acaagcagaagaaaaaggcuaa

SEQ ID NO: 79997 - RNA, 23 nt, Artificial Sequence
  Synthetic
cacaagcagaagaaaaaggcuaa

SEQ ID NO: 79998 - RNA, 24 nt, Artificial Sequence
  Synthetic
ccacaagcagaagaaaaaggcuaa

SEQ ID NO: 79999 - RNA, 19 nt, Artificial Sequence
  Synthetic
cgugacgagccaaggcuaa

SEQ ID NO: 80000 - RNA, 20 nt, Artificial Sequence
  Synthetic
ucgugacgagccaaggcuaa

SEQ ID NO: 80001 - RNA, 21 nt, Artificial Sequence
  Synthetic
cucgugacgagccaaggcuaa

SEQ ID NO: 80002 - RNA, 22 nt, Artificial Sequence
  Synthetic
ucucgugacgagccaaggcuaa

SEQ ID NO: 80003 - RNA, 23 nt, Artificial Sequence
  Synthetic
uucucgugacgagccaaggcuaa

SEQ ID NO: 80004 - RNA, 24 nt, Artificial Sequence
  Synthetic
uuucucgugacgagccaaggcuaa

SEQ ID NO: 80005 - RNA, 18 nt, Artificial Sequence
  Synthetic
uuuuuacuaaauggcuaa

SEQ ID NO: 80006 - RNA, 19 nt, Artificial Sequence
  Synthetic
cuuuuuacuaaauggcuaa

SEQ ID NO: 80007 - RNA, 20 nt, Artificial Sequence
  Synthetic
ucuuuuuacuaaauggcuaa

SEQ ID NO: 80008 - RNA, 21 nt, Artificial Sequence
  Synthetic
uucuuuuuacuaaauggcuaa

SEQ ID NO: 80009 - RNA, 23 nt, Artificial Sequence
  Synthetic
uguucuuuuuacuaaauggcuaa

SEQ ID NO: 80010 - RNA, 24 nt, Artificial Sequence
  Synthetic
uuguucuuuuuacuaaauggcuaa

SEQ ID NO: 80011 - RNA, 18 nt, Artificial Sequence
  Synthetic
aaaaaugguaagugcuaa

SEQ ID NO: 80012 - RNA, 19 nt, Artificial Sequence
  Synthetic
uaaaaaugguaagugcuaa

SEQ ID NO: 80013 - RNA, 20 nt, Artificial Sequence
  Synthetic
auaaaaaugguaagugcuaa

SEQ ID NO: 80014 - RNA, 21 nt, Artificial Sequence
  Synthetic
uauaaaaaugguaagugcuaa

SEQ ID NO: 80015 - RNA, 23 nt, Artificial Sequence
  Synthetic
cguauaaaaaugguaagugcuaa

SEQ ID NO: 80016 - RNA, 24 nt, Artificial Sequence
  Synthetic
acguauaaaaaugguaagugcuaa

SEQ ID NO: 80017 - RNA, 18 nt, Artificial Sequence
  Synthetic
cacauaaucgagugcuaa

SEQ ID NO: 80018 - RNA, 19 nt, Artificial Sequence
  Synthetic
acacauaaucgagugcuaa

SEQ ID NO: 80019 - RNA, 20 nt, Artificial Sequence
  Synthetic
cacacauaaucgagugcuaa

SEQ ID NO: 80020 - RNA, 21 nt, Artificial Sequence
  Synthetic
ucacacauaaucgagugcuaa

SEQ ID NO: 80021 - RNA, 22 nt, Artificial Sequence
  Synthetic
uucacacauaaucgagugcuaa

SEQ ID NO: 80022 - RNA, 24 nt, Artificial Sequence
  Synthetic
aguucacacauaaucgagugcuaa

SEQ ID NO: 80023 - RNA, 18 nt, Artificial Sequence
  Synthetic
ugggucacaaaaaucuaa

SEQ ID NO: 80024 - RNA, 19 nt, Artificial Sequence
  Synthetic
cugggucacaaaaaucuaa

SEQ ID NO: 80025 - RNA, 20 nt, Artificial Sequence
  Synthetic
ccugggucacaaaaaucuaa

SEQ ID NO: 80026 - RNA, 21 nt, Artificial Sequence
  Synthetic
cccugggucacaaaaaucuaa

SEQ ID NO: 80027 - RNA, 22 nt, Artificial Sequence
  Synthetic
acccugggucacaaaaaucuaa

SEQ ID NO: 80028 - RNA, 23 nt, Artificial Sequence
  Synthetic
uacccugggucacaaaaaucuaa

SEQ ID NO: 80029 - RNA, 24 nt, Artificial Sequence
  Synthetic
auacccugggucacaaaaaucuaa

SEQ ID NO: 80030 - RNA, 18 nt, Artificial Sequence
  Synthetic
aaaacaguaccaaucuaa

SEQ ID NO: 80031 - RNA, 20 nt, Artificial Sequence
  Synthetic
ugaaaacaguaccaaucuaa

SEQ ID NO: 80032 - RNA, 21 nt, Artificial Sequence
  Synthetic
augaaaacaguaccaaucuaa

SEQ ID NO: 80033 - RNA, 22 nt, Artificial Sequence
  Synthetic
uaugaaaacaguaccaaucuaa

SEQ ID NO: 80034 - RNA, 23 nt, Artificial Sequence
  Synthetic
cuaugaaaacaguaccaaucuaa

SEQ ID NO: 80035 - RNA, 24 nt, Artificial Sequence
  Synthetic
acuaugaaaacaguaccaaucuaa

SEQ ID NO: 80036 - RNA, 19 nt, Artificial Sequence
  Synthetic
aguaaagucuuuaaucuaa

SEQ ID NO: 80037 - RNA, 20 nt, Artificial Sequence
  Synthetic
caguaaagucuuuaaucuaa

SEQ ID NO: 80038 - RNA, 21 nt, Artificial Sequence
  Synthetic
acaguaaagucuuuaaucuaa

SEQ ID NO: 80039 - RNA, 22 nt, Artificial Sequence
  Synthetic
aacaguaaagucuuuaaucuaa

SEQ ID NO: 80040 - RNA, 23 nt, Artificial Sequence
  Synthetic
uaacaguaaagucuuuaaucuaa

SEQ ID NO: 80041 - RNA, 24 nt, Artificial Sequence
  Synthetic
cuaacaguaaagucuuuaaucuaa

SEQ ID NO: 80042 - RNA, 18 nt, Artificial Sequence
  Synthetic
caugcaaaaaugaucuaa

SEQ ID NO: 80043 - RNA, 19 nt, Artificial Sequence
  Synthetic
ucaugcaaaaaugaucuaa

SEQ ID NO: 80044 - RNA, 20 nt, Artificial Sequence
  Synthetic
uucaugcaaaaaugaucuaa

SEQ ID NO: 80045 - RNA, 21 nt, Artificial Sequence
  Synthetic
cuucaugcaaaaaugaucuaa

SEQ ID NO: 80046 - RNA, 23 nt, Artificial Sequence
  Synthetic
agcuucaugcaaaaaugaucuaa

SEQ ID NO: 80047 - RNA, 24 nt, Artificial Sequence
  Synthetic
aagcuucaugcaaaaaugaucuaa

SEQ ID NO: 80048 - RNA, 18 nt, Artificial Sequence
  Synthetic
uaguacacaucuaucuaa

SEQ ID NO: 80049 - RNA, 19 nt, Artificial Sequence
  Synthetic
cuaguacacaucuaucuaa

SEQ ID NO: 80050 - RNA, 21 nt, Artificial Sequence
  Synthetic
agcuaguacacaucuaucuaa

SEQ ID NO: 80051 - RNA, 23 nt, Artificial Sequence
  Synthetic
ugagcuaguacacaucuaucuaa

SEQ ID NO: 80052 - RNA, 24 nt, Artificial Sequence
  Synthetic
uugagcuaguacacaucuaucuaa

SEQ ID NO: 80053 - RNA, 18 nt, Artificial Sequence
  Synthetic
uaguuuugccuuaucuaa

SEQ ID NO: 80054 - RNA, 19 nt, Artificial Sequence
  Synthetic
uuaguuuugccuuaucuaa

SEQ ID NO: 80055 - RNA, 20 nt, Artificial Sequence
  Synthetic
cuuaguuuugccuuaucuaa

SEQ ID NO: 80056 - RNA, 21 nt, Artificial Sequence
  Synthetic
ucuuaguuuugccuuaucuaa

SEQ ID NO: 80057 - RNA, 22 nt, Artificial Sequence
  Synthetic
aucuuaguuuugccuuaucuaa

SEQ ID NO: 80058 - RNA, 23 nt, Artificial Sequence
  Synthetic
caucuuaguuuugccuuaucuaa

SEQ ID NO: 80059 - RNA, 24 nt, Artificial Sequence
  Synthetic
ccaucuuaguuuugccuuaucuaa

SEQ ID NO: 80060 - RNA, 18 nt, Artificial Sequence
  Synthetic
aucuggauauuuaucuaa

SEQ ID NO: 80061 - RNA, 19 nt, Artificial Sequence
  Synthetic
caucuggauauuuaucuaa

SEQ ID NO: 80062 - RNA, 21 nt, Artificial Sequence
  Synthetic
cgcaucuggauauuuaucuaa

SEQ ID NO: 80063 - RNA, 22 nt, Artificial Sequence
  Synthetic
ccgcaucuggauauuuaucuaa

SEQ ID NO: 80064 - RNA, 23 nt, Artificial Sequence
  Synthetic
cccgcaucuggauauuuaucuaa

SEQ ID NO: 80065 - RNA, 24 nt, Artificial Sequence
  Synthetic
ucccgcaucuggauauuuaucuaa

SEQ ID NO: 80066 - RNA, 18 nt, Artificial Sequence
  Synthetic
cuguaucucuugcucuaa

SEQ ID NO: 80067 - RNA, 19 nt, Artificial Sequence
  Synthetic
ccuguaucucuugcucuaa

SEQ ID NO: 80068 - RNA, 21 nt, Artificial Sequence
  Synthetic
ugccuguaucucuugcucuaa

SEQ ID NO: 80069 - RNA, 22 nt, Artificial Sequence
  Synthetic
augccuguaucucuugcucuaa

SEQ ID NO: 80070 - RNA, 23 nt, Artificial Sequence
  Synthetic
aaugccuguaucucuugcucuaa

SEQ ID NO: 80071 - RNA, 24 nt, Artificial Sequence
  Synthetic
aaaugccuguaucucuugcucuaa

SEQ ID NO: 80072 - RNA, 18 nt, Artificial Sequence
  Synthetic
ucuuaaauuucagucuaa

SEQ ID NO: 80073 - RNA, 19 nt, Artificial Sequence
  Synthetic
uucuuaaauuucagucuaa

SEQ ID NO: 80074 - RNA, 20 nt, Artificial Sequence
  Synthetic
auucuuaaauuucagucuaa

SEQ ID NO: 80075 - RNA, 21 nt, Artificial Sequence
  Synthetic
uauucuuaaauuucagucuaa

SEQ ID NO: 80076 - RNA, 23 nt, Artificial Sequence
  Synthetic
cguauucuuaaauuucagucuaa

SEQ ID NO: 80077 - RNA, 24 nt, Artificial Sequence
  Synthetic
ucguauucuuaaauuucagucuaa

SEQ ID NO: 80078 - RNA, 18 nt, Artificial Sequence
  Synthetic
aaucugaauuuagucuaa

SEQ ID NO: 80079 - RNA, 19 nt, Artificial Sequence
  Synthetic
uaaucugaauuuagucuaa

SEQ ID NO: 80080 - RNA, 20 nt, Artificial Sequence
  Synthetic
auaaucugaauuuagucuaa

SEQ ID NO: 80081 - RNA, 22 nt, Artificial Sequence
  Synthetic
ugauaaucugaauuuagucuaa

SEQ ID NO: 80082 - RNA, 23 nt, Artificial Sequence
  Synthetic
uugauaaucugaauuuagucuaa

SEQ ID NO: 80083 - RNA, 24 nt, Artificial Sequence
  Synthetic
uuugauaaucugaauuuagucuaa

SEQ ID NO: 80084 - RNA, 18 nt, Artificial Sequence
  Synthetic
aaggugcucagauucuaa

SEQ ID NO: 80085 - RNA, 19 nt, Artificial Sequence
  Synthetic
aaaggugcucagauucuaa

SEQ ID NO: 80086 - RNA, 20 nt, Artificial Sequence
  Synthetic
caaaggugcucagauucuaa

SEQ ID NO: 80087 - RNA, 21 nt, Artificial Sequence
  Synthetic
ucaaaggugcucagauucuaa

SEQ ID NO: 80088 - RNA, 22 nt, Artificial Sequence
  Synthetic
cucaaaggugcucagauucuaa

SEQ ID NO: 80089 - RNA, 23 nt, Artificial Sequence
  Synthetic
ccucaaaggugcucagauucuaa

SEQ ID NO: 80090 - RNA, 24 nt, Artificial Sequence
  Synthetic
accucaaaggugcucagauucuaa

SEQ ID NO: 80091 - RNA, 21 nt, Artificial Sequence
  Synthetic
cuuaguuuaaguagauucuaa

SEQ ID NO: 80092 - RNA, 22 nt, Artificial Sequence
  Synthetic
acuuaguuuaaguagauucuaa

SEQ ID NO: 80093 - RNA, 24 nt, Artificial Sequence
  Synthetic
ugacuuaguuuaaguagauucuaa

SEQ ID NO: 80094 - RNA, 18 nt, Artificial Sequence
  Synthetic
uguuuauuauacuucuaa

SEQ ID NO: 80095 - RNA, 19 nt, Artificial Sequence
  Synthetic
auguuuauuauacuucuaa

SEQ ID NO: 80096 - RNA, 21 nt, Artificial Sequence
  Synthetic
agauguuuauuauacuucuaa

SEQ ID NO: 80097 - RNA, 22 nt, Artificial Sequence
  Synthetic
aagauguuuauuauacuucuaa

SEQ ID NO: 80098 - RNA, 23 nt, Artificial Sequence
  Synthetic
uaagauguuuauuauacuucuaa

SEQ ID NO: 80099 - RNA, 24 nt, Artificial Sequence
  Synthetic
uuaagauguuuauuauacuucuaa

SEQ ID NO: 80100 - RNA, 18 nt, Artificial Sequence
  Synthetic
aucuaaauuuccuucuaa

SEQ ID NO: 80101 - RNA, 19 nt, Artificial Sequence
  Synthetic
uaucuaaauuuccuucuaa

SEQ ID NO: 80102 - RNA, 20 nt, Artificial Sequence
  Synthetic
uuaucuaaauuuccuucuaa

SEQ ID NO: 80103 - RNA, 21 nt, Artificial Sequence
  Synthetic
auuaucuaaauuuccuucuaa

SEQ ID NO: 80104 - RNA, 22 nt, Artificial Sequence
  Synthetic
uauuaucuaaauuuccuucuaa

SEQ ID NO: 80105 - RNA, 24 nt, Artificial Sequence
  Synthetic
aguauuaucuaaauuuccuucuaa

SEQ ID NO: 80106 - RNA, 18 nt, Artificial Sequence
  Synthetic
uucuaagauugcuucuaa

SEQ ID NO: 80107 - RNA, 19 nt, Artificial Sequence
  Synthetic
cuucuaagauugcuucuaa

SEQ ID NO: 80108 - RNA, 21 nt, Artificial Sequence
  Synthetic
cgcuucuaagauugcuucuaa

SEQ ID NO: 80109 - RNA, 22 nt, Artificial Sequence
  Synthetic
acgcuucuaagauugcuucuaa

SEQ ID NO: 80110 - RNA, 23 nt, Artificial Sequence
  Synthetic
uacgcuucuaagauugcuucuaa

SEQ ID NO: 80111 - RNA, 24 nt, Artificial Sequence
  Synthetic
uuacgcuucuaagauugcuucuaa

SEQ ID NO: 80112 - RNA, 18 nt, Artificial Sequence
  Synthetic
uuaugcgcugucuucuaa

SEQ ID NO: 80113 - RNA, 19 nt, Artificial Sequence
  Synthetic
cuuaugcgcugucuucuaa

SEQ ID NO: 80114 - RNA, 20 nt, Artificial Sequence
  Synthetic
ccuuaugcgcugucuucuaa

SEQ ID NO: 80115 - RNA, 21 nt, Artificial Sequence
  Synthetic
uccuuaugcgcugucuucuaa

SEQ ID NO: 80116 - RNA, 23 nt, Artificial Sequence
  Synthetic
uguccuuaugcgcugucuucuaa

SEQ ID NO: 80117 - RNA, 19 nt, Artificial Sequence
  Synthetic
ugauagggaaaaguucuaa

SEQ ID NO: 80118 - RNA, 20 nt, Artificial Sequence
  Synthetic
uugauagggaaaaguucuaa

SEQ ID NO: 80119 - RNA, 21 nt, Artificial Sequence
  Synthetic
uuugauagggaaaaguucuaa

SEQ ID NO: 80120 - RNA, 22 nt, Artificial Sequence
  Synthetic
auuugauagggaaaaguucuaa

SEQ ID NO: 80121 - RNA, 23 nt, Artificial Sequence
  Synthetic
uauuugauagggaaaaguucuaa

SEQ ID NO: 80122 - RNA, 24 nt, Artificial Sequence
  Synthetic
auauuugauagggaaaaguucuaa

SEQ ID NO: 80123 - RNA, 18 nt, Artificial Sequence
  Synthetic
ugugccagguauuucuaa

SEQ ID NO: 80124 - RNA, 19 nt, Artificial Sequence
  Synthetic
augugccagguauuucuaa

SEQ ID NO: 80125 - RNA, 20 nt, Artificial Sequence
  Synthetic
aaugugccagguauuucuaa

SEQ ID NO: 80126 - RNA, 21 nt, Artificial Sequence
  Synthetic
aaaugugccagguauuucuaa

SEQ ID NO: 80127 - RNA, 22 nt, Artificial Sequence
  Synthetic
uaaaugugccagguauuucuaa

SEQ ID NO: 80128 - RNA, 23 nt, Artificial Sequence
  Synthetic
auaaaugugccagguauuucuaa

SEQ ID NO: 80129 - RNA, 24 nt, Artificial Sequence
  Synthetic
uauaaaugugccagguauuucuaa

SEQ ID NO: 80130 - RNA, 19 nt, Artificial Sequence
  Synthetic
uguuauuguuccuuucuaa

SEQ ID NO: 80131 - RNA, 20 nt, Artificial Sequence
  Synthetic
cuguuauuguuccuuucuaa

SEQ ID NO: 80132 - RNA, 21 nt, Artificial Sequence
  Synthetic
ccuguuauuguuccuuucuaa

SEQ ID NO: 80133 - RNA, 22 nt, Artificial Sequence
  Synthetic
cccuguuauuguuccuuucuaa

SEQ ID NO: 80134 - RNA, 23 nt, Artificial Sequence
  Synthetic
ucccuguuauuguuccuuucuaa

SEQ ID NO: 80135 - RNA, 24 nt, Artificial Sequence
  Synthetic
cucccuguuauuguuccuuucuaa

SEQ ID NO: 80136 - RNA, 19 nt, Artificial Sequence
  Synthetic
uguaaguugggcuuucuaa

SEQ ID NO: 80137 - RNA, 20 nt, Artificial Sequence
  Synthetic
uuguaaguugggcuuucuaa

SEQ ID NO: 80138 - RNA, 21 nt, Artificial Sequence
  Synthetic
auuguaaguugggcuuucuaa

SEQ ID NO: 80139 - RNA, 22 nt, Artificial Sequence
  Synthetic
aauuguaaguugggcuuucuaa

SEQ ID NO: 80140 - RNA, 23 nt, Artificial Sequence
  Synthetic
aaauuguaaguugggcuuucuaa

SEQ ID NO: 80141 - RNA, 24 nt, Artificial Sequence
  Synthetic
caaauuguaaguugggcuuucuaa

SEQ ID NO: 80142 - RNA, 21 nt, Artificial Sequence
  Synthetic
uaagaaaaggaaaaaaaguaa

SEQ ID NO: 80143 - RNA, 22 nt, Artificial Sequence
  Synthetic
uuaagaaaaggaaaaaaaguaa

SEQ ID NO: 80144 - RNA, 23 nt, Artificial Sequence
  Synthetic
uuuaagaaaaggaaaaaaaguaa

SEQ ID NO: 80145 - RNA, 24 nt, Artificial Sequence
  Synthetic
auuuaagaaaaggaaaaaaaguaa

SEQ ID NO: 80146 - RNA, 19 nt, Artificial Sequence
  Synthetic
agagccaggaaaaaaguaa

SEQ ID NO: 80147 - RNA, 20 nt, Artificial Sequence
  Synthetic
cagagccaggaaaaaaguaa

SEQ ID NO: 80148 - RNA, 21 nt, Artificial Sequence
  Synthetic
acagagccaggaaaaaaguaa

SEQ ID NO: 80149 - RNA, 22 nt, Artificial Sequence
  Synthetic
aacagagccaggaaaaaaguaa

SEQ ID NO: 80150 - RNA, 23 nt, Artificial Sequence
  Synthetic
aaacagagccaggaaaaaaguaa

SEQ ID NO: 80151 - RNA, 24 nt, Artificial Sequence
  Synthetic
aaaacagagccaggaaaaaaguaa

SEQ ID NO: 80152 - RNA, 22 nt, Artificial Sequence
  Synthetic
cggaauauuacuuuaaaaguaa

SEQ ID NO: 80153 - RNA, 23 nt, Artificial Sequence
  Synthetic
ucggaauauuacuuuaaaaguaa

SEQ ID NO: 80154 - RNA, 24 nt, Artificial Sequence
  Synthetic
cucggaauauuacuuuaaaaguaa

SEQ ID NO: 80155 - RNA, 18 nt, Artificial Sequence
  Synthetic
ucuaauuggggaaaguaa

SEQ ID NO: 80156 - RNA, 20 nt, Artificial Sequence
  Synthetic
agucuaauuggggaaaguaa

SEQ ID NO: 80157 - RNA, 21 nt, Artificial Sequence
  Synthetic
aagucuaauuggggaaaguaa

SEQ ID NO: 80158 - RNA, 22 nt, Artificial Sequence
  Synthetic
caagucuaauuggggaaaguaa

SEQ ID NO: 80159 - RNA, 23 nt, Artificial Sequence
  Synthetic
acaagucuaauuggggaaaguaa

SEQ ID NO: 80160 - RNA, 24 nt, Artificial Sequence
  Synthetic
uacaagucuaauuggggaaaguaa

SEQ ID NO: 80161 - RNA, 21 nt, Artificial Sequence
  Synthetic
uggugggagagagagaaguaa

SEQ ID NO: 80162 - RNA, 22 nt, Artificial Sequence
  Synthetic
auggugggagagagagaaguaa

SEQ ID NO: 80163 - RNA, 18 nt, Artificial Sequence
  Synthetic
ugcaucccugagaaguaa

SEQ ID NO: 80164 - RNA, 19 nt, Artificial Sequence
  Synthetic
uugcaucccugagaaguaa

SEQ ID NO: 80165 - RNA, 20 nt, Artificial Sequence
  Synthetic
cuugcaucccugagaaguaa

SEQ ID NO: 80166 - RNA, 22 nt, Artificial Sequence
  Synthetic
agcuugcaucccugagaaguaa

SEQ ID NO: 80167 - RNA, 23 nt, Artificial Sequence
  Synthetic
cagcuugcaucccugagaaguaa

SEQ ID NO: 80168 - RNA, 18 nt, Artificial Sequence
  Synthetic
uaggggaaugggaaguaa

SEQ ID NO: 80169 - RNA, 20 nt, Artificial Sequence
  Synthetic
cguaggggaaugggaaguaa

SEQ ID NO: 80170 - RNA, 21 nt, Artificial Sequence
  Synthetic
acguaggggaaugggaaguaa

SEQ ID NO: 80171 - RNA, 22 nt, Artificial Sequence
  Synthetic
cacguaggggaaugggaaguaa

SEQ ID NO: 80172 - RNA, 23 nt, Artificial Sequence
  Synthetic
ucacguaggggaaugggaaguaa

SEQ ID NO: 80173 - RNA, 24 nt, Artificial Sequence
  Synthetic
aucacguaggggaaugggaaguaa

SEQ ID NO: 80174 - RNA, 18 nt, Artificial Sequence
  Synthetic
caggagggggugaaguaa

SEQ ID NO: 80175 - RNA, 19 nt, Artificial Sequence
  Synthetic
ucaggagggggugaaguaa

SEQ ID NO: 80176 - RNA, 20 nt, Artificial Sequence
  Synthetic
uucaggagggggugaaguaa

SEQ ID NO: 80177 - RNA, 21 nt, Artificial Sequence
  Synthetic
uuucaggagggggugaaguaa

SEQ ID NO: 80178 - RNA, 22 nt, Artificial Sequence
  Synthetic
auuucaggagggggugaaguaa

SEQ ID NO: 80179 - RNA, 23 nt, Artificial Sequence
  Synthetic
uauuucaggagggggugaaguaa

SEQ ID NO: 80180 - RNA, 24 nt, Artificial Sequence
  Synthetic
auauuucaggagggggugaaguaa

SEQ ID NO: 80181 - RNA, 18 nt, Artificial Sequence
  Synthetic
uuuagcuggaugcaguaa

SEQ ID NO: 80182 - RNA, 19 nt, Artificial Sequence
  Synthetic
uuuuagcuggaugcaguaa

SEQ ID NO: 80183 - RNA, 20 nt, Artificial Sequence
  Synthetic
cuuuuagcuggaugcaguaa

SEQ ID NO: 80184 - RNA, 18 nt, Artificial Sequence
  Synthetic
ucagcuauuauucaguaa

SEQ ID NO: 80185 - RNA, 19 nt, Artificial Sequence
  Synthetic
uucagcuauuauucaguaa

SEQ ID NO: 80186 - RNA, 20 nt, Artificial Sequence
  Synthetic
uuucagcuauuauucaguaa

SEQ ID NO: 80187 - RNA, 21 nt, Artificial Sequence
  Synthetic
uuuucagcuauuauucaguaa

SEQ ID NO: 80188 - RNA, 22 nt, Artificial Sequence
  Synthetic
cuuuucagcuauuauucaguaa

SEQ ID NO: 80189 - RNA, 23 nt, Artificial Sequence
  Synthetic
acuuuucagcuauuauucaguaa

SEQ ID NO: 80190 - RNA, 24 nt, Artificial Sequence
  Synthetic
uacuuuucagcuauuauucaguaa

SEQ ID NO: 80191 - RNA, 18 nt, Artificial Sequence
  Synthetic
uguucccauuuucaguaa

SEQ ID NO: 80192 - RNA, 19 nt, Artificial Sequence
  Synthetic
auguucccauuuucaguaa

SEQ ID NO: 80193 - RNA, 20 nt, Artificial Sequence
  Synthetic
aauguucccauuuucaguaa

SEQ ID NO: 80194 - RNA, 21 nt, Artificial Sequence
  Synthetic
aaauguucccauuuucaguaa

SEQ ID NO: 80195 - RNA, 22 nt, Artificial Sequence
  Synthetic
caaauguucccauuuucaguaa

SEQ ID NO: 80196 - RNA, 23 nt, Artificial Sequence
  Synthetic
ucaaauguucccauuuucaguaa

SEQ ID NO: 80197 - RNA, 24 nt, Artificial Sequence
  Synthetic
uucaaauguucccauuuucaguaa

SEQ ID NO: 80198 - RNA, 18 nt, Artificial Sequence
  Synthetic
ugaacgguaggagaguaa

SEQ ID NO: 80199 - RNA, 19 nt, Artificial Sequence
  Synthetic
cugaacgguaggagaguaa

SEQ ID NO: 80200 - RNA, 20 nt, Artificial Sequence
  Synthetic
acugaacgguaggagaguaa

SEQ ID NO: 80201 - RNA, 21 nt, Artificial Sequence
  Synthetic
uacugaacgguaggagaguaa

SEQ ID NO: 80202 - RNA, 22 nt, Artificial Sequence
  Synthetic
uuacugaacgguaggagaguaa

SEQ ID NO: 80203 - RNA, 23 nt, Artificial Sequence
  Synthetic
uuuacugaacgguaggagaguaa

SEQ ID NO: 80204 - RNA, 24 nt, Artificial Sequence
  Synthetic
uuuuacugaacgguaggagaguaa

SEQ ID NO: 80205 - RNA, 18 nt, Artificial Sequence
  Synthetic
aucuauguuggggaguaa

SEQ ID NO: 80206 - RNA, 19 nt, Artificial Sequence
  Synthetic
aaucuauguuggggaguaa

SEQ ID NO: 80207 - RNA, 21 nt, Artificial Sequence
  Synthetic
agaaucuauguuggggaguaa

SEQ ID NO: 80208 - RNA, 23 nt, Artificial Sequence
  Synthetic
agagaaucuauguuggggaguaa

SEQ ID NO: 80209 - RNA, 24 nt, Artificial Sequence
  Synthetic
cagagaaucuauguuggggaguaa

SEQ ID NO: 80210 - RNA, 18 nt, Artificial Sequence
  Synthetic
cuagacuuuagauaguaa

SEQ ID NO: 80211 - RNA, 19 nt, Artificial Sequence
  Synthetic
ccuagacuuuagauaguaa

SEQ ID NO: 80212 - RNA, 20 nt, Artificial Sequence
  Synthetic
accuagacuuuagauaguaa

SEQ ID NO: 80213 - RNA, 21 nt, Artificial Sequence
  Synthetic
caccuagacuuuagauaguaa

SEQ ID NO: 80214 - RNA, 22 nt, Artificial Sequence
  Synthetic
ucaccuagacuuuagauaguaa

SEQ ID NO: 80215 - RNA, 23 nt, Artificial Sequence
  Synthetic
aucaccuagacuuuagauaguaa

SEQ ID NO: 80216 - RNA, 24 nt, Artificial Sequence
  Synthetic
uaucaccuagacuuuagauaguaa

SEQ ID NO: 80217 - RNA, 19 nt, Artificial Sequence
  Synthetic
agaauaacaacaguaguaa

SEQ ID NO: 80218 - RNA, 21 nt, Artificial Sequence
  Synthetic
agagaauaacaacaguaguaa

SEQ ID NO: 80219 - RNA, 22 nt, Artificial Sequence
  Synthetic
aagagaauaacaacaguaguaa

SEQ ID NO: 80220 - RNA, 18 nt, Artificial Sequence
  Synthetic
uuaauucuauuaccguaa

SEQ ID NO: 80221 - RNA, 19 nt, Artificial Sequence
  Synthetic
cuuaauucuauuaccguaa

SEQ ID NO: 80222 - RNA, 20 nt, Artificial Sequence
  Synthetic
ucuuaauucuauuaccguaa

SEQ ID NO: 80223 - RNA, 21 nt, Artificial Sequence
  Synthetic
uucuuaauucuauuaccguaa

SEQ ID NO: 80224 - RNA, 22 nt, Artificial Sequence
  Synthetic
uuucuuaauucuauuaccguaa

SEQ ID NO: 80225 - RNA, 23 nt, Artificial Sequence
  Synthetic
cuuucuuaauucuauuaccguaa

SEQ ID NO: 80226 - RNA, 24 nt, Artificial Sequence
  Synthetic
acuuucuuaauucuauuaccguaa

SEQ ID NO: 80227 - RNA, 21 nt, Artificial Sequence
  Synthetic
uauaaagaauucagaagguaa

SEQ ID NO: 80228 - RNA, 22 nt, Artificial Sequence
  Synthetic
auauaaagaauucagaagguaa

SEQ ID NO: 80229 - RNA, 23 nt, Artificial Sequence
  Synthetic
aauauaaagaauucagaagguaa

SEQ ID NO: 80230 - RNA, 24 nt, Artificial Sequence
  Synthetic
uaauauaaagaauucagaagguaa

SEQ ID NO: 80231 - RNA, 18 nt, Artificial Sequence
  Synthetic
cuuugaguuguaagguaa

SEQ ID NO: 80232 - RNA, 19 nt, Artificial Sequence
  Synthetic
ucuuugaguuguaagguaa

SEQ ID NO: 80233 - RNA, 20 nt, Artificial Sequence
  Synthetic
cucuuugaguuguaagguaa

SEQ ID NO: 80234 - RNA, 21 nt, Artificial Sequence
  Synthetic
ccucuuugaguuguaagguaa

SEQ ID NO: 80235 - RNA, 22 nt, Artificial Sequence
  Synthetic
accucuuugaguuguaagguaa

SEQ ID NO: 80236 - RNA, 23 nt, Artificial Sequence
  Synthetic
uaccucuuugaguuguaagguaa

SEQ ID NO: 80237 - RNA, 24 nt, Artificial Sequence
  Synthetic
auaccucuuugaguuguaagguaa

SEQ ID NO: 80238 - RNA, 18 nt, Artificial Sequence
  Synthetic
ugacauucucccagguaa

SEQ ID NO: 80239 - RNA, 19 nt, Artificial Sequence
  Synthetic
cugacauucucccagguaa

SEQ ID NO: 80240 - RNA, 20 nt, Artificial Sequence
  Synthetic
ucugacauucucccagguaa

SEQ ID NO: 80241 - RNA, 21 nt, Artificial Sequence
  Synthetic
aucugacauucucccagguaa

SEQ ID NO: 80242 - RNA, 22 nt, Artificial Sequence
  Synthetic
aaucugacauucucccagguaa

SEQ ID NO: 80243 - RNA, 23 nt, Artificial Sequence
  Synthetic
uaaucugacauucucccagguaa

SEQ ID NO: 80244 - RNA, 24 nt, Artificial Sequence
  Synthetic
auaaucugacauucucccagguaa

SEQ ID NO: 80245 - RNA, 19 nt, Artificial Sequence
  Synthetic
ugagcugggcuggagguaa

SEQ ID NO: 80246 - RNA, 20 nt, Artificial Sequence
  Synthetic
augagcugggcuggagguaa

SEQ ID NO: 80247 - RNA, 21 nt, Artificial Sequence
  Synthetic
aaugagcugggcuggagguaa

SEQ ID NO: 80248 - RNA, 23 nt, Artificial Sequence
  Synthetic
agaaugagcugggcuggagguaa

SEQ ID NO: 80249 - RNA, 24 nt, Artificial Sequence
  Synthetic
aagaaugagcugggcuggagguaa

SEQ ID NO: 80250 - RNA, 19 nt, Artificial Sequence
  Synthetic
aguggguggguauagguaa

SEQ ID NO: 80251 - RNA, 21 nt, Artificial Sequence
  Synthetic
ugaguggguggguauagguaa

SEQ ID NO: 80252 - RNA, 22 nt, Artificial Sequence
  Synthetic
augaguggguggguauagguaa

SEQ ID NO: 80253 - RNA, 23 nt, Artificial Sequence
  Synthetic
uaugaguggguggguauagguaa

SEQ ID NO: 80254 - RNA, 24 nt, Artificial Sequence
  Synthetic
uuaugaguggguggguauagguaa

SEQ ID NO: 80255 - RNA, 18 nt, Artificial Sequence
  Synthetic
ucagguuaaaaaggguaa

SEQ ID NO: 80256 - RNA, 21 nt, Artificial Sequence
  Synthetic
aggucagguuaaaaaggguaa

SEQ ID NO: 80257 - RNA, 22 nt, Artificial Sequence
  Synthetic
aaggucagguuaaaaaggguaa

SEQ ID NO: 80258 - RNA, 24 nt, Artificial Sequence
  Synthetic
agaaggucagguuaaaaaggguaa

SEQ ID NO: 80259 - RNA, 18 nt, Artificial Sequence
  Synthetic
auauaauuuagaggguaa

SEQ ID NO: 80260 - RNA, 19 nt, Artificial Sequence
  Synthetic
aauauaauuuagaggguaa

SEQ ID NO: 80261 - RNA, 21 nt, Artificial Sequence
  Synthetic
agaauauaauuuagaggguaa

SEQ ID NO: 80262 - RNA, 22 nt, Artificial Sequence
  Synthetic
uagaauauaauuuagaggguaa

SEQ ID NO: 80263 - RNA, 23 nt, Artificial Sequence
  Synthetic
auagaauauaauuuagaggguaa

SEQ ID NO: 80264 - RNA, 24 nt, Artificial Sequence
  Synthetic
cauagaauauaauuuagaggguaa

SEQ ID NO: 80265 - RNA, 18 nt, Artificial Sequence
  Synthetic
caaacuugauuaggguaa

SEQ ID NO: 80266 - RNA, 19 nt, Artificial Sequence
  Synthetic
ucaaacuugauuaggguaa

SEQ ID NO: 80267 - RNA, 20 nt, Artificial Sequence
  Synthetic
aucaaacuugauuaggguaa

SEQ ID NO: 80268 - RNA, 21 nt, Artificial Sequence
  Synthetic
uaucaaacuugauuaggguaa

SEQ ID NO: 80269 - RNA, 22 nt, Artificial Sequence
  Synthetic
uuaucaaacuugauuaggguaa

SEQ ID NO: 80270 - RNA, 23 nt, Artificial Sequence
  Synthetic
cuuaucaaacuugauuaggguaa

SEQ ID NO: 80271 - RNA, 24 nt, Artificial Sequence
  Synthetic
ccuuaucaaacuugauuaggguaa

SEQ ID NO: 80272 - RNA, 18 nt, Artificial Sequence
  Synthetic
aagcaaucaaauggguaa

SEQ ID NO: 80273 - RNA, 19 nt, Artificial Sequence
  Synthetic
caagcaaucaaauggguaa

SEQ ID NO: 80274 - RNA, 20 nt, Artificial Sequence
  Synthetic
ucaagcaaucaaauggguaa

SEQ ID NO: 80275 - RNA, 21 nt, Artificial Sequence
  Synthetic
cucaagcaaucaaauggguaa

SEQ ID NO: 80276 - RNA, 22 nt, Artificial Sequence
  Synthetic
acucaagcaaucaaauggguaa

SEQ ID NO: 80277 - RNA, 23 nt, Artificial Sequence
  Synthetic
aacucaagcaaucaaauggguaa

SEQ ID NO: 80278 - RNA, 24 nt, Artificial Sequence
  Synthetic
aaacucaagcaaucaaauggguaa

SEQ ID NO: 80279 - RNA, 18 nt, Artificial Sequence
  Synthetic
uguggugucauuggguaa

SEQ ID NO: 80280 - RNA, 19 nt, Artificial Sequence
  Synthetic
uuguggugucauuggguaa

SEQ ID NO: 80281 - RNA, 20 nt, Artificial Sequence
  Synthetic
uuuguggugucauuggguaa

SEQ ID NO: 80282 - RNA, 21 nt, Artificial Sequence
  Synthetic
auuuguggugucauuggguaa

SEQ ID NO: 80283 - RNA, 23 nt, Artificial Sequence
  Synthetic
ugauuuguggugucauuggguaa

SEQ ID NO: 80284 - RNA, 24 nt, Artificial Sequence
  Synthetic
augauuuguggugucauuggguaa

SEQ ID NO: 80285 - RNA, 18 nt, Artificial Sequence
  Synthetic
acuuuguacuaaauguaa

SEQ ID NO: 80286 - RNA, 19 nt, Artificial Sequence
  Synthetic
uacuuuguacuaaauguaa

SEQ ID NO: 80287 - RNA, 20 nt, Artificial Sequence
  Synthetic
uuacuuuguacuaaauguaa

SEQ ID NO: 80288 - RNA, 21 nt, Artificial Sequence
  Synthetic
uuuacuuuguacuaaauguaa

SEQ ID NO: 80289 - RNA, 22 nt, Artificial Sequence
  Synthetic
auuuacuuuguacuaaauguaa

SEQ ID NO: 80290 - RNA, 23 nt, Artificial Sequence
  Synthetic
uauuuacuuuguacuaaauguaa

SEQ ID NO: 80291 - RNA, 24 nt, Artificial Sequence
  Synthetic
auauuuacuuuguacuaaauguaa

SEQ ID NO: 80292 - RNA, 21 nt, Artificial Sequence
  Synthetic
aauuaauuauuuuaaauguaa

SEQ ID NO: 80293 - RNA, 22 nt, Artificial Sequence
  Synthetic
aaauuaauuauuuuaaauguaa

SEQ ID NO: 80294 - RNA, 23 nt, Artificial Sequence
  Synthetic
uaaauuaauuauuuuaaauguaa

SEQ ID NO: 80295 - RNA, 24 nt, Artificial Sequence
  Synthetic
cuaaauuaauuauuuuaaauguaa

SEQ ID NO: 80296 - RNA, 19 nt, Artificial Sequence
  Synthetic
agaauuagaaacaauguaa

SEQ ID NO: 80297 - RNA, 20 nt, Artificial Sequence
  Synthetic
uagaauuagaaacaauguaa

SEQ ID NO: 80298 - RNA, 21 nt, Artificial Sequence
  Synthetic
auagaauuagaaacaauguaa

SEQ ID NO: 80299 - RNA, 22 nt, Artificial Sequence
  Synthetic
cauagaauuagaaacaauguaa

SEQ ID NO: 80300 - RNA, 23 nt, Artificial Sequence
  Synthetic
ccauagaauuagaaacaauguaa

SEQ ID NO: 80301 - RNA, 24 nt, Artificial Sequence
  Synthetic
accauagaauuagaaacaauguaa

SEQ ID NO: 80302 - RNA, 18 nt, Artificial Sequence
  Synthetic
ugaagcuaaauaauguaa

SEQ ID NO: 80303 - RNA, 20 nt, Artificial Sequence
  Synthetic
ugugaagcuaaauaauguaa

SEQ ID NO: 80304 - RNA, 21 nt, Artificial Sequence
  Synthetic
augugaagcuaaauaauguaa

SEQ ID NO: 80305 - RNA, 23 nt, Artificial Sequence
  Synthetic
ugaugugaagcuaaauaauguaa

SEQ ID NO: 80306 - RNA, 18 nt, Artificial Sequence
  Synthetic
auaccaaaagacauguaa

SEQ ID NO: 80307 - RNA, 19 nt, Artificial Sequence
  Synthetic
uauaccaaaagacauguaa

SEQ ID NO: 80308 - RNA, 20 nt, Artificial Sequence
  Synthetic
uuauaccaaaagacauguaa

SEQ ID NO: 80309 - RNA, 21 nt, Artificial Sequence
  Synthetic
cuuauaccaaaagacauguaa

SEQ ID NO: 80310 - RNA, 22 nt, Artificial Sequence
  Synthetic
ucuuauaccaaaagacauguaa

SEQ ID NO: 80311 - RNA, 23 nt, Artificial Sequence
  Synthetic
uucuuauaccaaaagacauguaa

SEQ ID NO: 80312 - RNA, 24 nt, Artificial Sequence
  Synthetic
auucuuauaccaaaagacauguaa

SEQ ID NO: 80313 - RNA, 18 nt, Artificial Sequence
  Synthetic
cuuuccccaaauauguaa

SEQ ID NO: 80314 - RNA, 19 nt, Artificial Sequence
  Synthetic
ucuuuccccaaauauguaa

SEQ ID NO: 80315 - RNA, 20 nt, Artificial Sequence
  Synthetic
cucuuuccccaaauauguaa

SEQ ID NO: 80316 - RNA, 22 nt, Artificial Sequence
  Synthetic
ugcucuuuccccaaauauguaa

SEQ ID NO: 80317 - RNA, 23 nt, Artificial Sequence
  Synthetic
augcucuuuccccaaauauguaa

SEQ ID NO: 80318 - RNA, 24 nt, Artificial Sequence
  Synthetic
aaugcucuuuccccaaauauguaa

SEQ ID NO: 80319 - RNA, 18 nt, Artificial Sequence
  Synthetic
caguugaacaaacuguaa

SEQ ID NO: 80320 - RNA, 19 nt, Artificial Sequence
  Synthetic
acaguugaacaaacuguaa

SEQ ID NO: 80321 - RNA, 20 nt, Artificial Sequence
  Synthetic
uacaguugaacaaacuguaa

SEQ ID NO: 80322 - RNA, 21 nt, Artificial Sequence
  Synthetic
uuacaguugaacaaacuguaa

SEQ ID NO: 80323 - RNA, 22 nt, Artificial Sequence
  Synthetic
uuuacaguugaacaaacuguaa

SEQ ID NO: 80324 - RNA, 23 nt, Artificial Sequence
  Synthetic
uuuuacaguugaacaaacuguaa

SEQ ID NO: 80325 - RNA, 20 nt, Artificial Sequence
  Synthetic
uggauuagaguagacuguaa

SEQ ID NO: 80326 - RNA, 21 nt, Artificial Sequence
  Synthetic
uuggauuagaguagacuguaa

SEQ ID NO: 80327 - RNA, 22 nt, Artificial Sequence
  Synthetic
uuuggauuagaguagacuguaa

SEQ ID NO: 80328 - RNA, 23 nt, Artificial Sequence
  Synthetic
auuuggauuagaguagacuguaa

SEQ ID NO: 80329 - RNA, 24 nt, Artificial Sequence
  Synthetic
cauuuggauuagaguagacuguaa

SEQ ID NO: 80330 - RNA, 19 nt, Artificial Sequence
  Synthetic
agagucuuuuuuacuguaa

SEQ ID NO: 80331 - RNA, 20 nt, Artificial Sequence
  Synthetic
cagagucuuuuuuacuguaa

SEQ ID NO: 80332 - RNA, 21 nt, Artificial Sequence
  Synthetic
ucagagucuuuuuuacuguaa

SEQ ID NO: 80333 - RNA, 22 nt, Artificial Sequence
  Synthetic
aucagagucuuuuuuacuguaa

SEQ ID NO: 80334 - RNA, 23 nt, Artificial Sequence
  Synthetic
uaucagagucuuuuuuacuguaa

SEQ ID NO: 80335 - RNA, 24 nt, Artificial Sequence
  Synthetic
cuaucagagucuuuuuuacuguaa

SEQ ID NO: 80336 - RNA, 20 nt, Artificial Sequence
  Synthetic
agguccuacccuaucuguaa

SEQ ID NO: 80337 - RNA, 21 nt, Artificial Sequence
  Synthetic
cagguccuacccuaucuguaa

SEQ ID NO: 80338 - RNA, 22 nt, Artificial Sequence
  Synthetic
ucagguccuacccuaucuguaa

SEQ ID NO: 80339 - RNA, 23 nt, Artificial Sequence
  Synthetic
cucagguccuacccuaucuguaa

SEQ ID NO: 80340 - RNA, 24 nt, Artificial Sequence
  Synthetic
ucucagguccuacccuaucuguaa

SEQ ID NO: 80341 - RNA, 18 nt, Artificial Sequence
  Synthetic
cauuuggcccuucuguaa

SEQ ID NO: 80342 - RNA, 19 nt, Artificial Sequence
  Synthetic
ucauuuggcccuucuguaa

SEQ ID NO: 80343 - RNA, 21 nt, Artificial Sequence
  Synthetic
agucauuuggcccuucuguaa

SEQ ID NO: 80344 - RNA, 22 nt, Artificial Sequence
  Synthetic
uagucauuuggcccuucuguaa

SEQ ID NO: 80345 - RNA, 23 nt, Artificial Sequence
  Synthetic
uuagucauuuggcccuucuguaa

SEQ ID NO: 80346 - RNA, 24 nt, Artificial Sequence
  Synthetic
uuuagucauuuggcccuucuguaa

SEQ ID NO: 80347 - RNA, 18 nt, Artificial Sequence
  Synthetic
aauagagagugaguguaa

SEQ ID NO: 80348 - RNA, 19 nt, Artificial Sequence
  Synthetic
uaauagagagugaguguaa

SEQ ID NO: 80349 - RNA, 21 nt, Artificial Sequence
  Synthetic
aaguggagccugaagguguaa

SEQ ID NO: 80350 - RNA, 22 nt, Artificial Sequence
  Synthetic
aaaguggagccugaagguguaa

SEQ ID NO: 80351 - RNA, 23 nt, Artificial Sequence
  Synthetic
uaaaguggagccugaagguguaa

SEQ ID NO: 80352 - RNA, 24 nt, Artificial Sequence
  Synthetic
auaaaguggagccugaagguguaa

SEQ ID NO: 80353 - RNA, 18 nt, Artificial Sequence
  Synthetic
uggcagagaucauuguaa

SEQ ID NO: 80354 - RNA, 20 nt, Artificial Sequence
  Synthetic
cguggcagagaucauuguaa

SEQ ID NO: 80355 - RNA, 21 nt, Artificial Sequence
  Synthetic
ucguggcagagaucauuguaa

SEQ ID NO: 80356 - RNA, 22 nt, Artificial Sequence
  Synthetic
cucguggcagagaucauuguaa

SEQ ID NO: 80357 - RNA, 23 nt, Artificial Sequence
  Synthetic
acucguggcagagaucauuguaa

SEQ ID NO: 80358 - RNA, 24 nt, Artificial Sequence
  Synthetic
cacucguggcagagaucauuguaa

SEQ ID NO: 80359 - RNA, 18 nt, Artificial Sequence
  Synthetic
agauaaaucuuauuguaa

SEQ ID NO: 80360 - RNA, 20 nt, Artificial Sequence
  Synthetic
ugagauaaaucuuauuguaa

SEQ ID NO: 80361 - RNA, 21 nt, Artificial Sequence
  Synthetic
augagauaaaucuuauuguaa

SEQ ID NO: 80362 - RNA, 22 nt, Artificial Sequence
  Synthetic
caugagauaaaucuuauuguaa

SEQ ID NO: 80363 - RNA, 23 nt, Artificial Sequence
  Synthetic
ccaugagauaaaucuuauuguaa

SEQ ID NO: 80364 - RNA, 24 nt, Artificial Sequence
  Synthetic
uccaugagauaaaucuuauuguaa

SEQ ID NO: 80365 - RNA, 18 nt, Artificial Sequence
  Synthetic
uugaagaauguguuguaa

SEQ ID NO: 80366 - RNA, 19 nt, Artificial Sequence
  Synthetic
auugaagaauguguuguaa

SEQ ID NO: 80367 - RNA, 21 nt, Artificial Sequence
  Synthetic
agauugaagaauguguuguaa

SEQ ID NO: 80368 - RNA, 22 nt, Artificial Sequence
  Synthetic
aagauugaagaauguguuguaa

SEQ ID NO: 80369 - RNA, 23 nt, Artificial Sequence
  Synthetic
aaagauugaagaauguguuguaa

SEQ ID NO: 80370 - RNA, 24 nt, Artificial Sequence
  Synthetic
uaaagauugaagaauguguuguaa

SEQ ID NO: 80371 - RNA, 19 nt, Artificial Sequence
  Synthetic
agguuagggauauuuguaa

SEQ ID NO: 80372 - RNA, 20 nt, Artificial Sequence
  Synthetic
aagguuagggauauuuguaa

SEQ ID NO: 80373 - RNA, 21 nt, Artificial Sequence
  Synthetic
aaagguuagggauauuuguaa

SEQ ID NO: 80374 - RNA, 22 nt, Artificial Sequence
  Synthetic
aaaagguuagggauauuuguaa

SEQ ID NO: 80375 - RNA, 23 nt, Artificial Sequence
  Synthetic
uaaaagguuagggauauuuguaa

SEQ ID NO: 80376 - RNA, 24 nt, Artificial Sequence
  Synthetic
cuaaaagguuagggauauuuguaa

SEQ ID NO: 80377 - RNA, 18 nt, Artificial Sequence
  Synthetic
aauuccauaaguuuguaa

SEQ ID NO: 80378 - RNA, 19 nt, Artificial Sequence
  Synthetic
uaauuccauaaguuuguaa

SEQ ID NO: 80379 - RNA, 20 nt, Artificial Sequence
  Synthetic
cuaauuccauaaguuuguaa

SEQ ID NO: 80380 - RNA, 21 nt, Artificial Sequence
  Synthetic
ucuaauuccauaaguuuguaa

SEQ ID NO: 80381 - RNA, 22 nt, Artificial Sequence
  Synthetic
aucuaauuccauaaguuuguaa

SEQ ID NO: 80382 - RNA, 23 nt, Artificial Sequence
  Synthetic
aaucuaauuccauaaguuuguaa

SEQ ID NO: 80383 - RNA, 21 nt, Artificial Sequence
  Synthetic
uguagauagagaagaaauuaa

SEQ ID NO: 80384 - RNA, 22 nt, Artificial Sequence
  Synthetic
auguagauagagaagaaauuaa

SEQ ID NO: 80385 - RNA, 23 nt, Artificial Sequence
  Synthetic
cauguagauagagaagaaauuaa

SEQ ID NO: 80386 - RNA, 24 nt, Artificial Sequence
  Synthetic
ucauguagauagagaagaaauuaa

SEQ ID NO: 80387 - RNA, 18 nt, Artificial Sequence
  Synthetic
uccuuguugcuaaauuaa

SEQ ID NO: 80388 - RNA, 19 nt, Artificial Sequence
  Synthetic
uuccuuguugcuaaauuaa

SEQ ID NO: 80389 - RNA, 20 nt, Artificial Sequence
  Synthetic
cuuccuuguugcuaaauuaa

SEQ ID NO: 80390 - RNA, 21 nt, Artificial Sequence
  Synthetic
ccuuccuuguugcuaaauuaa

SEQ ID NO: 80391 - RNA, 22 nt, Artificial Sequence
  Synthetic
accuuccuuguugcuaaauuaa

SEQ ID NO: 80392 - RNA, 23 nt, Artificial Sequence
  Synthetic
uaccuuccuuguugcuaaauuaa

SEQ ID NO: 80393 - RNA, 24 nt, Artificial Sequence
  Synthetic
auaccuuccuuguugcuaaauuaa

SEQ ID NO: 80394 - RNA, 19 nt, Artificial Sequence
  Synthetic
cgauagaaaaugcaauuaa

SEQ ID NO: 80395 - RNA, 20 nt, Artificial Sequence
  Synthetic
ccgauagaaaaugcaauuaa

SEQ ID NO: 80396 - RNA, 21 nt, Artificial Sequence
  Synthetic
uccgauagaaaaugcaauuaa

SEQ ID NO: 80397 - RNA, 22 nt, Artificial Sequence
  Synthetic
auccgauagaaaaugcaauuaa

SEQ ID NO: 80398 - RNA, 23 nt, Artificial Sequence
  Synthetic
cauccgauagaaaaugcaauuaa

SEQ ID NO: 80399 - RNA, 24 nt, Artificial Sequence
  Synthetic
ccauccgauagaaaaugcaauuaa

SEQ ID NO: 80400 - RNA, 22 nt, Artificial Sequence
  Synthetic
ugguugagcaugucucaauuaa

SEQ ID NO: 80401 - RNA, 23 nt, Artificial Sequence
  Synthetic
augguugagcaugucucaauuaa

SEQ ID NO: 80402 - RNA, 24 nt, Artificial Sequence
  Synthetic
uaugguugagcaugucucaauuaa

SEQ ID NO: 80403 - RNA, 22 nt, Artificial Sequence
  Synthetic
aguauauggaaugcugaauuaa

SEQ ID NO: 80404 - RNA, 23 nt, Artificial Sequence
  Synthetic
aaguauauggaaugcugaauuaa

SEQ ID NO: 80405 - RNA, 24 nt, Artificial Sequence
  Synthetic
uaaguauauggaaugcugaauuaa

SEQ ID NO: 80406 - RNA, 20 nt, Artificial Sequence
  Synthetic
aggggaucauuuguaauuaa

SEQ ID NO: 80407 - RNA, 21 nt, Artificial Sequence
  Synthetic
aaggggaucauuuguaauuaa

SEQ ID NO: 80408 - RNA, 22 nt, Artificial Sequence
  Synthetic
caaggggaucauuuguaauuaa

SEQ ID NO: 80409 - RNA, 23 nt, Artificial Sequence
  Synthetic
ucaaggggaucauuuguaauuaa

SEQ ID NO: 80410 - RNA, 24 nt, Artificial Sequence
  Synthetic
aucaaggggaucauuuguaauuaa

SEQ ID NO: 80411 - RNA, 18 nt, Artificial Sequence
  Synthetic
ugacaccauaaacauuaa

SEQ ID NO: 80412 - RNA, 19 nt, Artificial Sequence
  Synthetic
cugacaccauaaacauuaa

SEQ ID NO: 80413 - RNA, 20 nt, Artificial Sequence
  Synthetic
acugacaccauaaacauuaa

SEQ ID NO: 80414 - RNA, 21 nt, Artificial Sequence
  Synthetic
uacugacaccauaaacauuaa

SEQ ID NO: 80415 - RNA, 22 nt, Artificial Sequence
  Synthetic
cuacugacaccauaaacauuaa

SEQ ID NO: 80416 - RNA, 23 nt, Artificial Sequence
  Synthetic
ucuacugacaccauaaacauuaa

SEQ ID NO: 80417 - RNA, 24 nt, Artificial Sequence
  Synthetic
aucuacugacaccauaaacauuaa

SEQ ID NO: 80418 - RNA, 21 nt, Artificial Sequence
  Synthetic
cuauuuuauuuuacccauuaa

SEQ ID NO: 80419 - RNA, 22 nt, Artificial Sequence
  Synthetic
ucuauuuuauuuuacccauuaa

SEQ ID NO: 80420 - RNA, 23 nt, Artificial Sequence
  Synthetic
uucuauuuuauuuuacccauuaa

SEQ ID NO: 80421 - RNA, 24 nt, Artificial Sequence
  Synthetic
auucuauuuuauuuuacccauuaa

SEQ ID NO: 80422 - RNA, 18 nt, Artificial Sequence
  Synthetic
aaucacucuccccauuaa

SEQ ID NO: 80423 - RNA, 20 nt, Artificial Sequence
  Synthetic
cgaaucacucuccccauuaa

SEQ ID NO: 80424 - RNA, 22 nt, Artificial Sequence
  Synthetic
ugcgaaucacucuccccauuaa

SEQ ID NO: 80425 - RNA, 23 nt, Artificial Sequence
  Synthetic
cugcgaaucacucuccccauuaa

SEQ ID NO: 80426 - RNA, 24 nt, Artificial Sequence
  Synthetic
acugcgaaucacucuccccauuaa

SEQ ID NO: 80427 - RNA, 18 nt, Artificial Sequence
  Synthetic
aggcauuacaggcauuaa

SEQ ID NO: 80428 - RNA, 19 nt, Artificial Sequence
  Synthetic
aaggcauuacaggcauuaa

SEQ ID NO: 80429 - RNA, 21 nt, Artificial Sequence
  Synthetic
agaaggcauuacaggcauuaa

SEQ ID NO: 80430 - RNA, 22 nt, Artificial Sequence
  Synthetic
aagaaggcauuacaggcauuaa

SEQ ID NO: 80431 - RNA, 23 nt, Artificial Sequence
  Synthetic
aaagaaggcauuacaggcauuaa

SEQ ID NO: 80432 - RNA, 18 nt, Artificial Sequence
  Synthetic
agacagguaaaucauuaa

SEQ ID NO: 80433 - RNA, 20 nt, Artificial Sequence
  Synthetic
ugagacagguaaaucauuaa

SEQ ID NO: 80434 - RNA, 21 nt, Artificial Sequence
  Synthetic
uugagacagguaaaucauuaa

SEQ ID NO: 80435 - RNA, 22 nt, Artificial Sequence
  Synthetic
uuugagacagguaaaucauuaa

SEQ ID NO: 80436 - RNA, 23 nt, Artificial Sequence
  Synthetic
uuuugagacagguaaaucauuaa

SEQ ID NO: 80437 - RNA, 24 nt, Artificial Sequence
  Synthetic
auuuugagacagguaaaucauuaa

SEQ ID NO: 80438 - RNA, 18 nt, Artificial Sequence
  Synthetic
uuaacaaaaguucauuaa

SEQ ID NO: 80439 - RNA, 19 nt, Artificial Sequence
  Synthetic
cuuaacaaaaguucauuaa

SEQ ID NO: 80440 - RNA, 20 nt, Artificial Sequence
  Synthetic
ucuuaacaaaaguucauuaa

SEQ ID NO: 80441 - RNA, 22 nt, Artificial Sequence
  Synthetic
agucuuaacaaaaguucauuaa

SEQ ID NO: 80442 - RNA, 23 nt, Artificial Sequence
  Synthetic
cagucuuaacaaaaguucauuaa

SEQ ID NO: 80443 - RNA, 24 nt, Artificial Sequence
  Synthetic
acagucuuaacaaaaguucauuaa

SEQ ID NO: 80444 - RNA, 18 nt, Artificial Sequence
  Synthetic
agaugaaacugggauuaa

SEQ ID NO: 80445 - RNA, 20 nt, Artificial Sequence
  Synthetic
agagaugaaacugggauuaa

SEQ ID NO: 80446 - RNA, 21 nt, Artificial Sequence
  Synthetic
aagagaugaaacugggauuaa

SEQ ID NO: 80447 - RNA, 22 nt, Artificial Sequence
  Synthetic
aaagagaugaaacugggauuaa

SEQ ID NO: 80448 - RNA, 24 nt, Artificial Sequence
  Synthetic
ugaaagagaugaaacugggauuaa

SEQ ID NO: 80449 - RNA, 22 nt, Artificial Sequence
  Synthetic
agguucguugaacaaauauuaa

SEQ ID NO: 80450 - RNA, 23 nt, Artificial Sequence
  Synthetic
uagguucguugaacaaauauuaa

SEQ ID NO: 80451 - RNA, 24 nt, Artificial Sequence
  Synthetic
auagguucguugaacaaauauuaa

SEQ ID NO: 80452 - RNA, 18 nt, Artificial Sequence
  Synthetic
agcaaaagcugauauuaa

SEQ ID NO: 80453 - RNA, 19 nt, Artificial Sequence
  Synthetic
aagcaaaagcugauauuaa

SEQ ID NO: 80454 - RNA, 21 nt, Artificial Sequence
  Synthetic
agaagcaaaagcugauauuaa

SEQ ID NO: 80455 - RNA, 22 nt, Artificial Sequence
  Synthetic
aagaagcaaaagcugauauuaa

SEQ ID NO: 80456 - RNA, 18 nt, Artificial Sequence
  Synthetic
cagcacaaaacguauuaa

SEQ ID NO: 80457 - RNA, 20 nt, Artificial Sequence
  Synthetic
agcagcacaaaacguauuaa

SEQ ID NO: 80458 - RNA, 21 nt, Artificial Sequence
  Synthetic
cagcagcacaaaacguauuaa

SEQ ID NO: 80459 - RNA, 22 nt, Artificial Sequence
  Synthetic
acagcagcacaaaacguauuaa

SEQ ID NO: 80460 - RNA, 23 nt, Artificial Sequence
  Synthetic
uacagcagcacaaaacguauuaa

SEQ ID NO: 80461 - RNA, 24 nt, Artificial Sequence
  Synthetic
uuacagcagcacaaaacguauuaa

SEQ ID NO: 80462 - RNA, 21 nt, Artificial Sequence
  Synthetic
uaggcaaugaauauuuauuaa

SEQ ID NO: 80463 - RNA, 24 nt, Artificial Sequence
  Synthetic
ugguaggcaaugaauauuuauuaa

SEQ ID NO: 80464 - RNA, 18 nt, Artificial Sequence
  Synthetic
ucacaauuaguuuauuaa

SEQ ID NO: 80465 - RNA, 19 nt, Artificial Sequence
  Synthetic
uucacaauuaguuuauuaa

SEQ ID NO: 80466 - RNA, 20 nt, Artificial Sequence
  Synthetic
uuucacaauuaguuuauuaa

SEQ ID NO: 80467 - RNA, 21 nt, Artificial Sequence
  Synthetic
uuuucacaauuaguuuauuaa

SEQ ID NO: 80468 - RNA, 22 nt, Artificial Sequence
  Synthetic
uuuuucacaauuaguuuauuaa

SEQ ID NO: 80469 - RNA, 23 nt, Artificial Sequence
  Synthetic
cuuuuucacaauuaguuuauuaa

SEQ ID NO: 80470 - RNA, 24 nt, Artificial Sequence
  Synthetic
ccuuuuucacaauuaguuuauuaa

SEQ ID NO: 80471 - RNA, 18 nt, Artificial Sequence
  Synthetic
aaacaaguaucaacuuaa

SEQ ID NO: 80472 - RNA, 19 nt, Artificial Sequence
  Synthetic
aaaacaaguaucaacuuaa

SEQ ID NO: 80473 - RNA, 20 nt, Artificial Sequence
  Synthetic
aaaaacaaguaucaacuuaa

SEQ ID NO: 80474 - RNA, 21 nt, Artificial Sequence
  Synthetic
aaaaaacaaguaucaacuuaa

SEQ ID NO: 80475 - RNA, 23 nt, Artificial Sequence
  Synthetic
ugaaaaaacaaguaucaacuuaa

SEQ ID NO: 80476 - RNA, 24 nt, Artificial Sequence
  Synthetic
augaaaaaacaaguaucaacuuaa

SEQ ID NO: 80477 - RNA, 18 nt, Artificial Sequence
  Synthetic
cgggccaguauaacuuaa

SEQ ID NO: 80478 - RNA, 19 nt, Artificial Sequence
  Synthetic
ucgggccaguauaacuuaa

SEQ ID NO: 80479 - RNA, 20 nt, Artificial Sequence
  Synthetic
uucgggccaguauaacuuaa

SEQ ID NO: 80480 - RNA, 21 nt, Artificial Sequence
  Synthetic
uuucgggccaguauaacuuaa

SEQ ID NO: 80481 - RNA, 22 nt, Artificial Sequence
  Synthetic
uuuucgggccaguauaacuuaa

SEQ ID NO: 80482 - RNA, 23 nt, Artificial Sequence
  Synthetic
cuuuucgggccaguauaacuuaa

SEQ ID NO: 80483 - RNA, 24 nt, Artificial Sequence
  Synthetic
ccuuuucgggccaguauaacuuaa

SEQ ID NO: 80484 - RNA, 19 nt, Artificial Sequence
  Synthetic
aggggcaagaaaaccuuaa

SEQ ID NO: 80485 - RNA, 20 nt, Artificial Sequence
  Synthetic
aaggggcaagaaaaccuuaa

SEQ ID NO: 80486 - RNA, 21 nt, Artificial Sequence
  Synthetic
aaaggggcaagaaaaccuuaa

SEQ ID NO: 80487 - RNA, 22 nt, Artificial Sequence
  Synthetic
aaaaggggcaagaaaaccuuaa

SEQ ID NO: 80488 - RNA, 23 nt, Artificial Sequence
  Synthetic
aaaaaggggcaagaaaaccuuaa

SEQ ID NO: 80489 - RNA, 24 nt, Artificial Sequence
  Synthetic
uaaaaaggggcaagaaaaccuuaa

SEQ ID NO: 80490 - RNA, 19 nt, Artificial Sequence
  Synthetic
agcaaggugauuaccuuaa

SEQ ID NO: 80491 - RNA, 20 nt, Artificial Sequence
  Synthetic
uagcaaggugauuaccuuaa

SEQ ID NO: 80492 - RNA, 22 nt, Artificial Sequence
  Synthetic
aguagcaaggugauuaccuuaa

SEQ ID NO: 80493 - RNA, 23 nt, Artificial Sequence
  Synthetic
uaguagcaaggugauuaccuuaa

SEQ ID NO: 80494 - RNA, 24 nt, Artificial Sequence
  Synthetic
auaguagcaaggugauuaccuuaa

SEQ ID NO: 80495 - RNA, 18 nt, Artificial Sequence
  Synthetic
uuuucucaaagggcuuaa

SEQ ID NO: 80496 - RNA, 19 nt, Artificial Sequence
  Synthetic
auuuucucaaagggcuuaa

SEQ ID NO: 80497 - RNA, 20 nt, Artificial Sequence
  Synthetic
aauuuucucaaagggcuuaa

SEQ ID NO: 80498 - RNA, 21 nt, Artificial Sequence
  Synthetic
uaauuuucucaaagggcuuaa

SEQ ID NO: 80499 - RNA, 22 nt, Artificial Sequence
  Synthetic
auaauuuucucaaagggcuuaa

SEQ ID NO: 80500 - RNA, 23 nt, Artificial Sequence
  Synthetic
uauaauuuucucaaagggcuuaa

SEQ ID NO: 80501 - RNA, 24 nt, Artificial Sequence
  Synthetic
uuauaauuuucucaaagggcuuaa

SEQ ID NO: 80502 - RNA, 18 nt, Artificial Sequence
  Synthetic
aauuggagugcugcuuaa

SEQ ID NO: 80503 - RNA, 19 nt, Artificial Sequence
  Synthetic
uaauuggagugcugcuuaa

SEQ ID NO: 80504 - RNA, 20 nt, Artificial Sequence
  Synthetic
cuaauuggagugcugcuuaa

SEQ ID NO: 80505 - RNA, 21 nt, Artificial Sequence
  Synthetic
acuaauuggagugcugcuuaa

SEQ ID NO: 80506 - RNA, 22 nt, Artificial Sequence
  Synthetic
cacuaauuggagugcugcuuaa

SEQ ID NO: 80507 - RNA, 23 nt, Artificial Sequence
  Synthetic
ucacuaauuggagugcugcuuaa

SEQ ID NO: 80508 - RNA, 24 nt, Artificial Sequence
  Synthetic
cucacuaauuggagugcugcuuaa

SEQ ID NO: 80509 - RNA, 18 nt, Artificial Sequence
  Synthetic
cuguuuucaauugcuuaa

SEQ ID NO: 80510 - RNA, 20 nt, Artificial Sequence
  Synthetic
ugcuguuuucaauugcuuaa

SEQ ID NO: 80511 - RNA, 21 nt, Artificial Sequence
  Synthetic
cugcuguuuucaauugcuuaa

SEQ ID NO: 80512 - RNA, 22 nt, Artificial Sequence
  Synthetic
acugcuguuuucaauugcuuaa

SEQ ID NO: 80513 - RNA, 23 nt, Artificial Sequence
  Synthetic
aacugcuguuuucaauugcuuaa

SEQ ID NO: 80514 - RNA, 24 nt, Artificial Sequence
  Synthetic
aaacugcuguuuucaauugcuuaa

SEQ ID NO: 80515 - RNA, 19 nt, Artificial Sequence
  Synthetic
agacuuuuggcuugcuuaa

SEQ ID NO: 80516 - RNA, 20 nt, Artificial Sequence
  Synthetic
cagacuuuuggcuugcuuaa

SEQ ID NO: 80517 - RNA, 21 nt, Artificial Sequence
  Synthetic
ccagacuuuuggcuugcuuaa

SEQ ID NO: 80518 - RNA, 22 nt, Artificial Sequence
  Synthetic
uccagacuuuuggcuugcuuaa

SEQ ID NO: 80519 - RNA, 23 nt, Artificial Sequence
  Synthetic
auccagacuuuuggcuugcuuaa

SEQ ID NO: 80520 - RNA, 24 nt, Artificial Sequence
  Synthetic
aauccagacuuuuggcuugcuuaa

SEQ ID NO: 80521 - RNA, 18 nt, Artificial Sequence
  Synthetic
agcuaaacacaaucuuaa

SEQ ID NO: 80522 - RNA, 19 nt, Artificial Sequence
  Synthetic
uagcuaaacacaaucuuaa

SEQ ID NO: 80523 - RNA, 20 nt, Artificial Sequence
  Synthetic
auagcuaaacacaaucuuaa

SEQ ID NO: 80524 - RNA, 21 nt, Artificial Sequence
  Synthetic
cauagcuaaacacaaucuuaa

SEQ ID NO: 80525 - RNA, 23 nt, Artificial Sequence
  Synthetic
cgcauagcuaaacacaaucuuaa

SEQ ID NO: 80526 - RNA, 24 nt, Artificial Sequence
  Synthetic
acgcauagcuaaacacaaucuuaa

SEQ ID NO: 80527 - RNA, 21 nt, Artificial Sequence
  Synthetic
auacauaggaaugcaucuuaa

SEQ ID NO: 80528 - RNA, 22 nt, Artificial Sequence
  Synthetic
aauacauaggaaugcaucuuaa

SEQ ID NO: 80529 - RNA, 24 nt, Artificial Sequence
  Synthetic
ugaauacauaggaaugcaucuuaa

SEQ ID NO: 80530 - RNA, 18 nt, Artificial Sequence
  Synthetic
cauguaccuaacucuuaa

SEQ ID NO: 80531 - RNA, 19 nt, Artificial Sequence
  Synthetic
ccauguaccuaacucuuaa

SEQ ID NO: 80532 - RNA, 21 nt, Artificial Sequence
  Synthetic
agccauguaccuaacucuuaa

SEQ ID NO: 80533 - RNA, 23 nt, Artificial Sequence
  Synthetic
agagccauguaccuaacucuuaa

SEQ ID NO: 80534 - RNA, 24 nt, Artificial Sequence
  Synthetic
aagagccauguaccuaacucuuaa

SEQ ID NO: 80535 - RNA, 18 nt, Artificial Sequence
  Synthetic
uauuacagaagcucuuaa

SEQ ID NO: 80536 - RNA, 20 nt, Artificial Sequence
  Synthetic
uguauuacagaagcucuuaa

SEQ ID NO: 80537 - RNA, 21 nt, Artificial Sequence
  Synthetic
cuguauuacagaagcucuuaa

SEQ ID NO: 80538 - RNA, 22 nt, Artificial Sequence
  Synthetic
ucuguauuacagaagcucuuaa

SEQ ID NO: 80539 - RNA, 23 nt, Artificial Sequence
  Synthetic
uucuguauuacagaagcucuuaa

SEQ ID NO: 80540 - RNA, 24 nt, Artificial Sequence
  Synthetic
uuucuguauuacagaagcucuuaa

SEQ ID NO: 80541 - RNA, 18 nt, Artificial Sequence
  Synthetic
ugguucuuuaagucuuaa

SEQ ID NO: 80542 - RNA, 19 nt, Artificial Sequence
  Synthetic
augguucuuuaagucuuaa

SEQ ID NO: 80543 - RNA, 20 nt, Artificial Sequence
  Synthetic
caugguucuuuaagucuuaa

SEQ ID NO: 80544 - RNA, 21 nt, Artificial Sequence
  Synthetic
acaugguucuuuaagucuuaa

SEQ ID NO: 80545 - RNA, 24 nt, Artificial Sequence
  Synthetic
uggacaugguucuuuaagucuuaa

SEQ ID NO: 80546 - RNA, 18 nt, Artificial Sequence
  Synthetic
uuaagaacagauucuuaa

SEQ ID NO: 80547 - RNA, 20 nt, Artificial Sequence
  Synthetic
aguuaagaacagauucuuaa

SEQ ID NO: 80548 - RNA, 21 nt, Artificial Sequence
  Synthetic
caguuaagaacagauucuuaa

SEQ ID NO: 80549 - RNA, 24 nt, Artificial Sequence
  Synthetic
uggcaguuaagaacagauucuuaa

SEQ ID NO: 80550 - RNA, 18 nt, Artificial Sequence
  Synthetic
cugcaggagacuucuuaa

SEQ ID NO: 80551 - RNA, 19 nt, Artificial Sequence
  Synthetic
ccugcaggagacuucuuaa

SEQ ID NO: 80552 - RNA, 23 nt, Artificial Sequence
  Synthetic
cgggccugcaggagacuucuuaa

SEQ ID NO: 80553 - RNA, 24 nt, Artificial Sequence
  Synthetic
ccgggccugcaggagacuucuuaa

SEQ ID NO: 80554 - RNA, 18 nt, Artificial Sequence
  Synthetic
uaaaauuugguuucuuaa

SEQ ID NO: 80555 - RNA, 19 nt, Artificial Sequence
  Synthetic
uuaaaauuugguuucuuaa

SEQ ID NO: 80556 - RNA, 21 nt, Artificial Sequence
  Synthetic
uguuaaaauuugguuucuuaa

SEQ ID NO: 80557 - RNA, 22 nt, Artificial Sequence
  Synthetic
cuguuaaaauuugguuucuuaa

SEQ ID NO: 80558 - RNA, 23 nt, Artificial Sequence
  Synthetic
ucuguuaaaauuugguuucuuaa

SEQ ID NO: 80559 - RNA, 21 nt, Artificial Sequence
  Synthetic
auuauuauuccuuuuucuuaa

SEQ ID NO: 80560 - RNA, 22 nt, Artificial Sequence
  Synthetic
cauuauuauuccuuuuucuuaa

SEQ ID NO: 80561 - RNA, 18 nt, Artificial Sequence
  Synthetic
aaaucacaggucaguuaa

SEQ ID NO: 80562 - RNA, 19 nt, Artificial Sequence
  Synthetic
uaaaucacaggucaguuaa

SEQ ID NO: 80563 - RNA, 20 nt, Artificial Sequence
  Synthetic
uuaaaucacaggucaguuaa

SEQ ID NO: 80564 - RNA, 21 nt, Artificial Sequence
  Synthetic
cuuaaaucacaggucaguuaa

SEQ ID NO: 80565 - RNA, 22 nt, Artificial Sequence
  Synthetic
acuuaaaucacaggucaguuaa

SEQ ID NO: 80566 - RNA, 23 nt, Artificial Sequence
  Synthetic
aacuuaaaucacaggucaguuaa

SEQ ID NO: 80567 - RNA, 24 nt, Artificial Sequence
  Synthetic
aaacuuaaaucacaggucaguuaa

SEQ ID NO: 80568 - RNA, 18 nt, Artificial Sequence
  Synthetic
aaguaauaugggaguuaa

SEQ ID NO: 80569 - RNA, 20 nt, Artificial Sequence
  Synthetic
ugaaguaauaugggaguuaa

SEQ ID NO: 80570 - RNA, 21 nt, Artificial Sequence
  Synthetic
auuuuugaaaaguugaguuaa

SEQ ID NO: 80571 - RNA, 22 nt, Artificial Sequence
  Synthetic
uauuuuugaaaaguugaguuaa

SEQ ID NO: 80572 - RNA, 23 nt, Artificial Sequence
  Synthetic
auauuuuugaaaaguugaguuaa

SEQ ID NO: 80573 - RNA, 24 nt, Artificial Sequence
  Synthetic
aauauuuuugaaaaguugaguuaa

SEQ ID NO: 80574 - RNA, 18 nt, Artificial Sequence
  Synthetic
ucacagcauacuaguuaa

SEQ ID NO: 80575 - RNA, 19 nt, Artificial Sequence
  Synthetic
aucacagcauacuaguuaa

SEQ ID NO: 80576 - RNA, 20 nt, Artificial Sequence
  Synthetic
uaucacagcauacuaguuaa

SEQ ID NO: 80577 - RNA, 21 nt, Artificial Sequence
  Synthetic
cuaucacagcauacuaguuaa

SEQ ID NO: 80578 - RNA, 22 nt, Artificial Sequence
  Synthetic
ucuaucacagcauacuaguuaa

SEQ ID NO: 80579 - RNA, 24 nt, Artificial Sequence
  Synthetic
agucuaucacagcauacuaguuaa

SEQ ID NO: 80580 - RNA, 18 nt, Artificial Sequence
  Synthetic
agguaaguuacacguuaa

SEQ ID NO: 80581 - RNA, 19 nt, Artificial Sequence
  Synthetic
uagguaaguuacacguuaa

SEQ ID NO: 80582 - RNA, 20 nt, Artificial Sequence
  Synthetic
uuagguaaguuacacguuaa

SEQ ID NO: 80583 - RNA, 21 nt, Artificial Sequence
  Synthetic
uuuagguaaguuacacguuaa

SEQ ID NO: 80584 - RNA, 22 nt, Artificial Sequence
  Synthetic
auuuagguaaguuacacguuaa

SEQ ID NO: 80585 - RNA, 23 nt, Artificial Sequence
  Synthetic
cauuuagguaaguuacacguuaa

SEQ ID NO: 80586 - RNA, 24 nt, Artificial Sequence
  Synthetic
acauuuagguaaguuacacguuaa

SEQ ID NO: 80587 - RNA, 18 nt, Artificial Sequence
  Synthetic
auucaccuaaaugguuaa

SEQ ID NO: 80588 - RNA, 19 nt, Artificial Sequence
  Synthetic
cauucaccuaaaugguuaa

SEQ ID NO: 80589 - RNA, 20 nt, Artificial Sequence
  Synthetic
acauucaccuaaaugguuaa

SEQ ID NO: 80590 - RNA, 21 nt, Artificial Sequence
  Synthetic
cacauucaccuaaaugguuaa

SEQ ID NO: 80591 - RNA, 22 nt, Artificial Sequence
  Synthetic
ucacauucaccuaaaugguuaa

SEQ ID NO: 80592 - RNA, 23 nt, Artificial Sequence
  Synthetic
uucacauucaccuaaaugguuaa

SEQ ID NO: 80593 - RNA, 24 nt, Artificial Sequence
  Synthetic
uuucacauucaccuaaaugguuaa

SEQ ID NO: 80594 - RNA, 19 nt, Artificial Sequence
  Synthetic
uguaauguguaaugguuaa

SEQ ID NO: 80595 - RNA, 20 nt, Artificial Sequence
  Synthetic
auguaauguguaaugguuaa

SEQ ID NO: 80596 - RNA, 21 nt, Artificial Sequence
  Synthetic
cauguaauguguaaugguuaa

SEQ ID NO: 80597 - RNA, 23 nt, Artificial Sequence
  Synthetic
agcauguaauguguaaugguuaa

SEQ ID NO: 80598 - RNA, 24 nt, Artificial Sequence
  Synthetic
uagcauguaauguguaaugguuaa

SEQ ID NO: 80599 - RNA, 18 nt, Artificial Sequence
  Synthetic
aaucuaagugcugguuaa

SEQ ID NO: 80600 - RNA, 19 nt, Artificial Sequence
  Synthetic
uaaucuaagugcugguuaa

SEQ ID NO: 80601 - RNA, 20 nt, Artificial Sequence
  Synthetic
uuaaucuaagugcugguuaa

SEQ ID NO: 80602 - RNA, 21 nt, Artificial Sequence
  Synthetic
uuuaaucuaagugcugguuaa

SEQ ID NO: 80603 - RNA, 22 nt, Artificial Sequence
  Synthetic
uuuuaaucuaagugcugguuaa

SEQ ID NO: 80604 - RNA, 23 nt, Artificial Sequence
  Synthetic
uuuuuaaucuaagugcugguuaa

SEQ ID NO: 80605 - RNA, 18 nt, Artificial Sequence
  Synthetic
cagccucauucugguuaa

SEQ ID NO: 80606 - RNA, 19 nt, Artificial Sequence
  Synthetic
ccagccucauucugguuaa

SEQ ID NO: 80607 - RNA, 20 nt, Artificial Sequence
  Synthetic
uccagccucauucugguuaa

SEQ ID NO: 80608 - RNA, 21 nt, Artificial Sequence
  Synthetic
cuccagccucauucugguuaa

SEQ ID NO: 80609 - RNA, 22 nt, Artificial Sequence
  Synthetic
ccuccagccucauucugguuaa

SEQ ID NO: 80610 - RNA, 23 nt, Artificial Sequence
  Synthetic
uccuccagccucauucugguuaa

SEQ ID NO: 80611 - RNA, 24 nt, Artificial Sequence
  Synthetic
auccuccagccucauucugguuaa

SEQ ID NO: 80612 - RNA, 18 nt, Artificial Sequence
  Synthetic
uauaaaaacagugguuaa

SEQ ID NO: 80613 - RNA, 19 nt, Artificial Sequence
  Synthetic
uuauaaaaacagugguuaa

SEQ ID NO: 80614 - RNA, 20 nt, Artificial Sequence
  Synthetic
auuauaaaaacagugguuaa

SEQ ID NO: 80615 - RNA, 18 nt, Artificial Sequence
  Synthetic
cagcagggaaaauguuaa

SEQ ID NO: 80616 - RNA, 19 nt, Artificial Sequence
  Synthetic
acagcagggaaaauguuaa

SEQ ID NO: 80617 - RNA, 20 nt, Artificial Sequence
  Synthetic
cacagcagggaaaauguuaa

SEQ ID NO: 80618 - RNA, 22 nt, Artificial Sequence
  Synthetic
agcacagcagggaaaauguuaa

SEQ ID NO: 80619 - RNA, 23 nt, Artificial Sequence
  Synthetic
aagcacagcagggaaaauguuaa

SEQ ID NO: 80620 - RNA, 24 nt, Artificial Sequence
  Synthetic
aaagcacagcagggaaaauguuaa

SEQ ID NO: 80621 - RNA, 18 nt, Artificial Sequence
  Synthetic
uuaguaggccucuguuaa

SEQ ID NO: 80622 - RNA, 19 nt, Artificial Sequence
  Synthetic
auuaguaggccucuguuaa

SEQ ID NO: 80623 - RNA, 20 nt, Artificial Sequence
  Synthetic
uauuaguaggccucuguuaa

SEQ ID NO: 80624 - RNA, 21 nt, Artificial Sequence
  Synthetic
uuauuaguaggccucuguuaa

SEQ ID NO: 80625 - RNA, 22 nt, Artificial Sequence
  Synthetic
uuuauuaguaggccucuguuaa

SEQ ID NO: 80626 - RNA, 23 nt, Artificial Sequence
  Synthetic
uuuuauuaguaggccucuguuaa

SEQ ID NO: 80627 - RNA, 24 nt, Artificial Sequence
  Synthetic
uuuuuauuaguaggccucuguuaa

SEQ ID NO: 80628 - RNA, 18 nt, Artificial Sequence
  Synthetic
ccucaagaauguuguuaa

SEQ ID NO: 80629 - RNA, 19 nt, Artificial Sequence
  Synthetic
cccucaagaauguuguuaa

SEQ ID NO: 80630 - RNA, 20 nt, Artificial Sequence
  Synthetic
acccucaagaauguuguuaa

SEQ ID NO: 80631 - RNA, 21 nt, Artificial Sequence
  Synthetic
aacccucaagaauguuguuaa

SEQ ID NO: 80632 - RNA, 22 nt, Artificial Sequence
  Synthetic
aaacccucaagaauguuguuaa

SEQ ID NO: 80633 - RNA, 23 nt, Artificial Sequence
  Synthetic
uaaacccucaagaauguuguuaa

SEQ ID NO: 80634 - RNA, 21 nt, Artificial Sequence
  Synthetic
aagcugcugaaacaaauuuaa

SEQ ID NO: 80635 - RNA, 22 nt, Artificial Sequence
  Synthetic
caagcugcugaaacaaauuuaa

SEQ ID NO: 80636 - RNA, 23 nt, Artificial Sequence
  Synthetic
ucaagcugcugaaacaaauuuaa

SEQ ID NO: 80637 - RNA, 24 nt, Artificial Sequence
  Synthetic
cucaagcugcugaaacaaauuuaa

SEQ ID NO: 80638 - RNA, 21 nt, Artificial Sequence
  Synthetic
uagguuuauauugcaauuuaa

SEQ ID NO: 80639 - RNA, 23 nt, Artificial Sequence
  Synthetic
uguagguuuauauugcaauuuaa

SEQ ID NO: 80640 - RNA, 24 nt, Artificial Sequence
  Synthetic
uuguagguuuauauugcaauuuaa

SEQ ID NO: 80641 - RNA, 18 nt, Artificial Sequence
  Synthetic
uuugcagacagaauuuaa

SEQ ID NO: 80642 - RNA, 19 nt, Artificial Sequence
  Synthetic
auuugcagacagaauuuaa

SEQ ID NO: 80643 - RNA, 20 nt, Artificial Sequence
  Synthetic
cauuugcagacagaauuuaa

SEQ ID NO: 80644 - RNA, 21 nt, Artificial Sequence
  Synthetic
ucauuugcagacagaauuuaa

SEQ ID NO: 80645 - RNA, 23 nt, Artificial Sequence
  Synthetic
agucauuugcagacagaauuuaa

SEQ ID NO: 80646 - RNA, 24 nt, Artificial Sequence
  Synthetic
cagucauuugcagacagaauuuaa

SEQ ID NO: 80647 - RNA, 21 nt, Artificial Sequence
  Synthetic
auauuucucauuuacauuuaa

SEQ ID NO: 80648 - RNA, 22 nt, Artificial Sequence
  Synthetic
uauauuucucauuuacauuuaa

SEQ ID NO: 80649 - RNA, 23 nt, Artificial Sequence
  Synthetic
auauauuucucauuuacauuuaa

SEQ ID NO: 80650 - RNA, 24 nt, Artificial Sequence
  Synthetic
uauauauuucucauuuacauuuaa

SEQ ID NO: 80651 - RNA, 18 nt, Artificial Sequence
  Synthetic
uaaaaugugagcauuuaa

SEQ ID NO: 80652 - RNA, 19 nt, Artificial Sequence
  Synthetic
auaaaaugugagcauuuaa

SEQ ID NO: 80653 - RNA, 20 nt, Artificial Sequence
  Synthetic
uauaaaaugugagcauuuaa

SEQ ID NO: 80654 - RNA, 21 nt, Artificial Sequence
  Synthetic
uuauaaaaugugagcauuuaa

SEQ ID NO: 80655 - RNA, 22 nt, Artificial Sequence
  Synthetic
uuuauaaaaugugagcauuuaa

SEQ ID NO: 80656 - RNA, 23 nt, Artificial Sequence
  Synthetic
cuuuauaaaaugugagcauuuaa

SEQ ID NO: 80657 - RNA, 24 nt, Artificial Sequence
  Synthetic
ccuuuauaaaaugugagcauuuaa

SEQ ID NO: 80658 - RNA, 18 nt, Artificial Sequence
  Synthetic
accaaagauugcauuuaa

SEQ ID NO: 80659 - RNA, 19 nt, Artificial Sequence
  Synthetic
aaccaaagauugcauuuaa

SEQ ID NO: 80660 - RNA, 20 nt, Artificial Sequence
  Synthetic
uaaccaaagauugcauuuaa

SEQ ID NO: 80661 - RNA, 21 nt, Artificial Sequence
  Synthetic
uuaaccaaagauugcauuuaa

SEQ ID NO: 80662 - RNA, 22 nt, Artificial Sequence
  Synthetic
uuuaaccaaagauugcauuuaa

SEQ ID NO: 80663 - RNA, 23 nt, Artificial Sequence
  Synthetic
uuuuaaccaaagauugcauuuaa

SEQ ID NO: 80664 - RNA, 24 nt, Artificial Sequence
  Synthetic
auuuuaaccaaagauugcauuuaa

SEQ ID NO: 80665 - RNA, 18 nt, Artificial Sequence
  Synthetic
auguauaauaucauuuaa

SEQ ID NO: 80666 - RNA, 19 nt, Artificial Sequence
  Synthetic
uauguauaauaucauuuaa

SEQ ID NO: 80667 - RNA, 20 nt, Artificial Sequence
  Synthetic
uuauguauaauaucauuuaa

SEQ ID NO: 80668 - RNA, 21 nt, Artificial Sequence
  Synthetic
auuauguauaauaucauuuaa

SEQ ID NO: 80669 - RNA, 22 nt, Artificial Sequence
  Synthetic
uauuauguauaauaucauuuaa

SEQ ID NO: 80670 - RNA, 23 nt, Artificial Sequence
  Synthetic
cuauuauguauaauaucauuuaa

SEQ ID NO: 80671 - RNA, 24 nt, Artificial Sequence
  Synthetic
ucuauuauguauaauaucauuuaa

SEQ ID NO: 80672 - RNA, 18 nt, Artificial Sequence
  Synthetic
acaugauaaaagauuuaa

SEQ ID NO: 80673 - RNA, 19 nt, Artificial Sequence
  Synthetic
uacaugauaaaagauuuaa

SEQ ID NO: 80674 - RNA, 20 nt, Artificial Sequence
  Synthetic
uuacaugauaaaagauuuaa

SEQ ID NO: 80675 - RNA, 22 nt, Artificial Sequence
  Synthetic
aguuacaugauaaaagauuuaa

SEQ ID NO: 80676 - RNA, 24 nt, Artificial Sequence
  Synthetic
ugaguuacaugauaaaagauuuaa

SEQ ID NO: 80677 - RNA, 19 nt, Artificial Sequence
  Synthetic
aguuauucuugauauuuaa

SEQ ID NO: 80678 - RNA, 20 nt, Artificial Sequence
  Synthetic
aaguuauucuugauauuuaa

SEQ ID NO: 80679 - RNA, 21 nt, Artificial Sequence
  Synthetic
uaaguuauucuugauauuuaa

SEQ ID NO: 80680 - RNA, 22 nt, Artificial Sequence
  Synthetic
auaaguuauucuugauauuuaa

SEQ ID NO: 80681 - RNA, 23 nt, Artificial Sequence
  Synthetic
cauaaguuauucuugauauuuaa

SEQ ID NO: 80682 - RNA, 18 nt, Artificial Sequence
  Synthetic
uccaugaagucccuuuaa

SEQ ID NO: 80683 - RNA, 19 nt, Artificial Sequence
  Synthetic
uuccaugaagucccuuuaa

SEQ ID NO: 80684 - RNA, 20 nt, Artificial Sequence
  Synthetic
cuuccaugaagucccuuuaa

SEQ ID NO: 80685 - RNA, 21 nt, Artificial Sequence
  Synthetic
ucuuccaugaagucccuuuaa

SEQ ID NO: 80686 - RNA, 22 nt, Artificial Sequence
  Synthetic
aucuuccaugaagucccuuuaa

SEQ ID NO: 80687 - RNA, 24 nt, Artificial Sequence
  Synthetic
agaucuuccaugaagucccuuuaa

SEQ ID NO: 80688 - RNA, 18 nt, Artificial Sequence
  Synthetic
uggagguagggccuuuaa

SEQ ID NO: 80689 - RNA, 20 nt, Artificial Sequence
  Synthetic
aguggagguagggccuuuaa

SEQ ID NO: 80690 - RNA, 21 nt, Artificial Sequence
  Synthetic
aaguggagguagggccuuuaa

SEQ ID NO: 80691 - RNA, 22 nt, Artificial Sequence
  Synthetic
caaguggagguagggccuuuaa

SEQ ID NO: 80692 - RNA, 24 nt, Artificial Sequence
  Synthetic
ugcaaguggagguagggccuuuaa

SEQ ID NO: 80693 - RNA, 18 nt, Artificial Sequence
  Synthetic
uuugaaucaaaucuuuaa

SEQ ID NO: 80694 - RNA, 19 nt, Artificial Sequence
  Synthetic
auuugaaucaaaucuuuaa

SEQ ID NO: 80695 - RNA, 20 nt, Artificial Sequence
  Synthetic
cauuugaaucaaaucuuuaa

SEQ ID NO: 80696 - RNA, 21 nt, Artificial Sequence
  Synthetic
ucauuugaaucaaaucuuuaa

SEQ ID NO: 80697 - RNA, 22 nt, Artificial Sequence
  Synthetic
cucauuugaaucaaaucuuuaa

SEQ ID NO: 80698 - RNA, 23 nt, Artificial Sequence
  Synthetic
ucucauuugaaucaaaucuuuaa

SEQ ID NO: 80699 - RNA, 24 nt, Artificial Sequence
  Synthetic
aucucauuugaaucaaaucuuuaa

SEQ ID NO: 80700 - RNA, 18 nt, Artificial Sequence
  Synthetic
uggaguaugugucuuuaa

SEQ ID NO: 80701 - RNA, 20 nt, Artificial Sequence
  Synthetic
uguggaguaugugucuuuaa

SEQ ID NO: 80702 - RNA, 21 nt, Artificial Sequence
  Synthetic
uuguggaguaugugucuuuaa

SEQ ID NO: 80703 - RNA, 23 nt, Artificial Sequence
  Synthetic
uguuguggaguaugugucuuuaa

SEQ ID NO: 80704 - RNA, 19 nt, Artificial Sequence
  Synthetic
agagguuacuauucuuuaa

SEQ ID NO: 80705 - RNA, 20 nt, Artificial Sequence
  Synthetic
cagagguuacuauucuuuaa

SEQ ID NO: 80706 - RNA, 21 nt, Artificial Sequence
  Synthetic
acagagguuacuauucuuuaa

SEQ ID NO: 80707 - RNA, 22 nt, Artificial Sequence
  Synthetic
aacagagguuacuauucuuuaa

SEQ ID NO: 80708 - RNA, 23 nt, Artificial Sequence
  Synthetic
aaacagagguuacuauucuuuaa

SEQ ID NO: 80709 - RNA, 18 nt, Artificial Sequence
  Synthetic
agaaguagagagguuuaa

SEQ ID NO: 80710 - RNA, 19 nt, Artificial Sequence
  Synthetic
cagaaguagagagguuuaa

SEQ ID NO: 80711 - RNA, 20 nt, Artificial Sequence
  Synthetic
ucagaaguagagagguuuaa

SEQ ID NO: 80712 - RNA, 21 nt, Artificial Sequence
  Synthetic
uucagaaguagagagguuuaa

SEQ ID NO: 80713 - RNA, 22 nt, Artificial Sequence
  Synthetic
auucagaaguagagagguuuaa

SEQ ID NO: 80714 - RNA, 23 nt, Artificial Sequence
  Synthetic
aauucagaaguagagagguuuaa

SEQ ID NO: 80715 - RNA, 19 nt, Artificial Sequence
  Synthetic
ugaacaguacauuguuuaa

SEQ ID NO: 80716 - RNA, 20 nt, Artificial Sequence
  Synthetic
augaacaguacauuguuuaa

SEQ ID NO: 80717 - RNA, 21 nt, Artificial Sequence
  Synthetic
aaugaacaguacauuguuuaa

SEQ ID NO: 80718 - RNA, 22 nt, Artificial Sequence
  Synthetic
uaaugaacaguacauuguuuaa

SEQ ID NO: 80719 - RNA, 23 nt, Artificial Sequence
  Synthetic
cuaaugaacaguacauuguuuaa

SEQ ID NO: 80720 - RNA, 24 nt, Artificial Sequence
  Synthetic
acuaaugaacaguacauuguuuaa

SEQ ID NO: 80721 - RNA, 18 nt, Artificial Sequence
  Synthetic
caacuauugacauuuuaa

SEQ ID NO: 80722 - RNA, 19 nt, Artificial Sequence
  Synthetic
ucaacuauugacauuuuaa

SEQ ID NO: 80723 - RNA, 20 nt, Artificial Sequence
  Synthetic
uucaacuauugacauuuuaa

SEQ ID NO: 80724 - RNA, 21 nt, Artificial Sequence
  Synthetic
uuucaacuauugacauuuuaa

SEQ ID NO: 80725 - RNA, 23 nt, Artificial Sequence
  Synthetic
aguuucaacuauugacauuuuaa

SEQ ID NO: 80726 - RNA, 24 nt, Artificial Sequence
  Synthetic
uaguuucaacuauugacauuuuaa

SEQ ID NO: 80727 - RNA, 21 nt, Artificial Sequence
  Synthetic
cuuauaaauaauauauuuuaa

SEQ ID NO: 80728 - RNA, 22 nt, Artificial Sequence
  Synthetic
acuuauaaauaauauauuuuaa

SEQ ID NO: 80729 - RNA, 23 nt, Artificial Sequence
  Synthetic
uacuuauaaauaauauauuuuaa

SEQ ID NO: 80730 - RNA, 24 nt, Artificial Sequence
  Synthetic
auacuuauaaauaauauauuuuaa

SEQ ID NO: 80731 - RNA, 20 nt, Artificial Sequence
  Synthetic
aggaaacaagucuauuuuaa

SEQ ID NO: 80732 - RNA, 22 nt, Artificial Sequence
  Synthetic
agaggaaacaagucuauuuuaa

SEQ ID NO: 80733 - RNA, 23 nt, Artificial Sequence
  Synthetic
aagaggaaacaagucuauuuuaa

SEQ ID NO: 80734 - RNA, 24 nt, Artificial Sequence
  Synthetic
caagaggaaacaagucuauuuuaa

SEQ ID NO: 80735 - RNA, 21 nt, Artificial Sequence
  Synthetic
auaaauaauaguuuauuuuaa

SEQ ID NO: 80736 - RNA, 22 nt, Artificial Sequence
  Synthetic
uauaaauaauaguuuauuuuaa

SEQ ID NO: 80737 - RNA, 23 nt, Artificial Sequence
  Synthetic
auauaaauaauaguuuauuuuaa

SEQ ID NO: 80738 - RNA, 18 nt, Artificial Sequence
  Synthetic
aaaggcauuuuauuuuaa

SEQ ID NO: 80739 - RNA, 19 nt, Artificial Sequence
  Synthetic
caaaggcauuuuauuuuaa

SEQ ID NO: 80740 - RNA, 20 nt, Artificial Sequence
  Synthetic
acaaaggcauuuuauuuuaa

SEQ ID NO: 80741 - RNA, 21 nt, Artificial Sequence
  Synthetic
uacaaaggcauuuuauuuuaa

SEQ ID NO: 80742 - RNA, 22 nt, Artificial Sequence
  Synthetic
auacaaaggcauuuuauuuuaa

SEQ ID NO: 80743 - RNA, 23 nt, Artificial Sequence
  Synthetic
aauacaaaggcauuuuauuuuaa

SEQ ID NO: 80744 - RNA, 24 nt, Artificial Sequence
  Synthetic
aaauacaaaggcauuuuauuuuaa

SEQ ID NO: 80745 - RNA, 18 nt, Artificial Sequence
  Synthetic
uaccaaaaaaacuuuuaa

SEQ ID NO: 80746 - RNA, 19 nt, Artificial Sequence
  Synthetic
uuaccaaaaaaacuuuuaa

SEQ ID NO: 80747 - RNA, 20 nt, Artificial Sequence
  Synthetic
auuaccaaaaaaacuuuuaa

SEQ ID NO: 80748 - RNA, 21 nt, Artificial Sequence
  Synthetic
aauuaccaaaaaaacuuuuaa

SEQ ID NO: 80749 - RNA, 22 nt, Artificial Sequence
  Synthetic
aaauuaccaaaaaaacuuuuaa

SEQ ID NO: 80750 - RNA, 23 nt, Artificial Sequence
  Synthetic
caaauuaccaaaaaaacuuuuaa

SEQ ID NO: 80751 - RNA, 24 nt, Artificial Sequence
  Synthetic
acaaauuaccaaaaaaacuuuuaa

SEQ ID NO: 80752 - RNA, 18 nt, Artificial Sequence
  Synthetic
uucaguuaagucuuuuaa

SEQ ID NO: 80753 - RNA, 19 nt, Artificial Sequence
  Synthetic
uuucaguuaagucuuuuaa

SEQ ID NO: 80754 - RNA, 20 nt, Artificial Sequence
  Synthetic
cuuucaguuaagucuuuuaa

SEQ ID NO: 80755 - RNA, 21 nt, Artificial Sequence
  Synthetic
ccuuucaguuaagucuuuuaa

SEQ ID NO: 80756 - RNA, 22 nt, Artificial Sequence
  Synthetic
uccuuucaguuaagucuuuuaa

SEQ ID NO: 80757 - RNA, 23 nt, Artificial Sequence
  Synthetic
auccuuucaguuaagucuuuuaa

SEQ ID NO: 80758 - RNA, 24 nt, Artificial Sequence
  Synthetic
aauccuuucaguuaagucuuuuaa

SEQ ID NO: 80759 - RNA, 18 nt, Artificial Sequence
  Synthetic
uaaucaaacuucuuuuaa

SEQ ID NO: 80760 - RNA, 20 nt, Artificial Sequence
  Synthetic
aguaaucaaacuucuuuuaa

SEQ ID NO: 80761 - RNA, 22 nt, Artificial Sequence
  Synthetic
ugaguaaucaaacuucuuuuaa

SEQ ID NO: 80762 - RNA, 24 nt, Artificial Sequence
  Synthetic
ugugaguaaucaaacuucuuuuaa

SEQ ID NO: 80763 - RNA, 19 nt, Artificial Sequence
  Synthetic
uggguagaauuucuuuuaa

SEQ ID NO: 80764 - RNA, 21 nt, Artificial Sequence
  Synthetic
aguggguagaauuucuuuuaa

SEQ ID NO: 80765 - RNA, 22 nt, Artificial Sequence
  Synthetic
uaguggguagaauuucuuuuaa

SEQ ID NO: 80766 - RNA, 23 nt, Artificial Sequence
  Synthetic
uuaguggguagaauuucuuuuaa

SEQ ID NO: 80767 - RNA, 24 nt, Artificial Sequence
  Synthetic
uuuaguggguagaauuucuuuuaa

SEQ ID NO: 80768 - RNA, 21 nt, Artificial Sequence
  Synthetic
aguaacauuuaauauuuuuaa

SEQ ID NO: 80769 - RNA, 22 nt, Artificial Sequence
  Synthetic
caguaacauuuaauauuuuuaa

SEQ ID NO: 80770 - RNA, 24 nt, Artificial Sequence
  Synthetic
ugcaguaacauuuaauauuuuuaa

SEQ ID NO: 80771 - RNA, 18 nt, Artificial Sequence
  Synthetic
ugauggcuauguuuuuaa

SEQ ID NO: 80772 - RNA, 19 nt, Artificial Sequence
  Synthetic
cugauggcuauguuuuuaa

SEQ ID NO: 80773 - RNA, 20 nt, Artificial Sequence
  Synthetic
acugauggcuauguuuuuaa

SEQ ID NO: 80774 - RNA, 21 nt, Artificial Sequence
  Synthetic
cacugauggcuauguuuuuaa

SEQ ID NO: 80775 - RNA, 22 nt, Artificial Sequence
  Synthetic
acacugauggcuauguuuuuaa

SEQ ID NO: 80776 - RNA, 23 nt, Artificial Sequence
  Synthetic
cacacugauggcuauguuuuuaa

SEQ ID NO: 80777 - RNA, 24 nt, Artificial Sequence
  Synthetic
ccacacugauggcuauguuuuuaa

SEQ ID NO: 80778 - RNA, 18 nt, Artificial Sequence
  Synthetic
uacuucagcuuuuuuuaa

SEQ ID NO: 80779 - RNA, 19 nt, Artificial Sequence
  Synthetic
uuacuucagcuuuuuuuaa

SEQ ID NO: 80780 - RNA, 22 nt, Artificial Sequence
  Synthetic
cgguuacuucagcuuuuuuuaa

SEQ ID NO: 80781 - RNA, 23 nt, Artificial Sequence
  Synthetic
ccgguuacuucagcuuuuuuuaa

SEQ ID NO: 80782 - RNA, 24 nt, Artificial Sequence
  Synthetic
cccgguuacuucagcuuuuuuuaa

SEQ ID NO: 80783 - RNA, 18 nt, Artificial Sequence
  Synthetic
acugaaucuuuaaaaaca

SEQ ID NO: 80784 - RNA, 19 nt, Artificial Sequence
  Synthetic
cacugaaucuuuaaaaaca

SEQ ID NO: 80785 - RNA, 20 nt, Artificial Sequence
  Synthetic
acacugaaucuuuaaaaaca

SEQ ID NO: 80786 - RNA, 21 nt, Artificial Sequence
  Synthetic
cacacugaaucuuuaaaaaca

SEQ ID NO: 80787 - RNA, 22 nt, Artificial Sequence
  Synthetic
ccacacugaaucuuuaaaaaca

SEQ ID NO: 80788 - RNA, 23 nt, Artificial Sequence
  Synthetic
cccacacugaaucuuuaaaaaca

SEQ ID NO: 80789 - RNA, 18 nt, Artificial Sequence
  Synthetic
uuugagagccacaaaaca

SEQ ID NO: 80790 - RNA, 19 nt, Artificial Sequence
  Synthetic
uuuugagagccacaaaaca

SEQ ID NO: 80791 - RNA, 20 nt, Artificial Sequence
  Synthetic
cuuuugagagccacaaaaca

SEQ ID NO: 80792 - RNA, 21 nt, Artificial Sequence
  Synthetic
acuuuugagagccacaaaaca

SEQ ID NO: 80793 - RNA, 22 nt, Artificial Sequence
  Synthetic
uacuuuugagagccacaaaaca

SEQ ID NO: 80794 - RNA, 23 nt, Artificial Sequence
  Synthetic
uuacuuuugagagccacaaaaca

SEQ ID NO: 80795 - RNA, 24 nt, Artificial Sequence
  Synthetic
cuuacuuuugagagccacaaaaca

SEQ ID NO: 80796 - RNA, 18 nt, Artificial Sequence
  Synthetic
acugguuucaagaaaaca

SEQ ID NO: 80797 - RNA, 19 nt, Artificial Sequence
  Synthetic
aacugguuucaagaaaaca

SEQ ID NO: 80798 - RNA, 20 nt, Artificial Sequence
  Synthetic
caacugguuucaagaaaaca

SEQ ID NO: 80799 - RNA, 21 nt, Artificial Sequence
  Synthetic
ccaacugguuucaagaaaaca

SEQ ID NO: 80800 - RNA, 22 nt, Artificial Sequence
  Synthetic
accaacugguuucaagaaaaca

SEQ ID NO: 80801 - RNA, 24 nt, Artificial Sequence
  Synthetic
ugaccaacugguuucaagaaaaca

SEQ ID NO: 80802 - RNA, 18 nt, Artificial Sequence
  Synthetic
ucggguucucagaaaaca

SEQ ID NO: 80803 - RNA, 19 nt, Artificial Sequence
  Synthetic
uucggguucucagaaaaca

SEQ ID NO: 80804 - RNA, 20 nt, Artificial Sequence
  Synthetic
uuucggguucucagaaaaca

SEQ ID NO: 80805 - RNA, 23 nt, Artificial Sequence
  Synthetic
agguuucggguucucagaaaaca

SEQ ID NO: 80806 - RNA, 24 nt, Artificial Sequence
  Synthetic
cagguuucggguucucagaaaaca

SEQ ID NO: 80807 - RNA, 20 nt, Artificial Sequence
  Synthetic
aggaacuaauguauaaaaca

SEQ ID NO: 80808 - RNA, 22 nt, Artificial Sequence
  Synthetic
agaggaacuaauguauaaaaca

SEQ ID NO: 80809 - RNA, 23 nt, Artificial Sequence
  Synthetic
cagaggaacuaauguauaaaaca

SEQ ID NO: 80810 - RNA, 18 nt, Artificial Sequence
  Synthetic
aauuccuuuuauaaaaca

SEQ ID NO: 80811 - RNA, 20 nt, Artificial Sequence
  Synthetic
ugaauuccuuuuauaaaaca

SEQ ID NO: 80812 - RNA, 21 nt, Artificial Sequence
  Synthetic
augaauuccuuuuauaaaaca

SEQ ID NO: 80813 - RNA, 22 nt, Artificial Sequence
  Synthetic
aaugaauuccuuuuauaaaaca

SEQ ID NO: 80814 - RNA, 23 nt, Artificial Sequence
  Synthetic
aaaugaauuccuuuuauaaaaca

SEQ ID NO: 80815 - RNA, 24 nt, Artificial Sequence
  Synthetic
caaaugaauuccuuuuauaaaaca

SEQ ID NO: 80816 - RNA, 18 nt, Artificial Sequence
  Synthetic
caaauaccuaguaaaaca

SEQ ID NO: 80817 - RNA, 19 nt, Artificial Sequence
  Synthetic
ccaaauaccuaguaaaaca

SEQ ID NO: 80818 - RNA, 20 nt, Artificial Sequence
  Synthetic
cccaaauaccuaguaaaaca

SEQ ID NO: 80819 - RNA, 21 nt, Artificial Sequence
  Synthetic
ucccaaauaccuaguaaaaca

SEQ ID NO: 80820 - RNA, 22 nt, Artificial Sequence
  Synthetic
aucccaaauaccuaguaaaaca

SEQ ID NO: 80821 - RNA, 23 nt, Artificial Sequence
  Synthetic
aaucccaaauaccuaguaaaaca

SEQ ID NO: 80822 - RNA, 21 nt, Artificial Sequence
  Synthetic
aauuuuacuguuuguaaaaca

SEQ ID NO: 80823 - RNA, 22 nt, Artificial Sequence
  Synthetic
caauuuuacuguuuguaaaaca

SEQ ID NO: 80824 - RNA, 23 nt, Artificial Sequence
  Synthetic
acaauuuuacuguuuguaaaaca

SEQ ID NO: 80825 - RNA, 24 nt, Artificial Sequence
  Synthetic
uacaauuuuacuguuuguaaaaca

SEQ ID NO: 80826 - RNA, 23 nt, Artificial Sequence
  Synthetic
aggcuggauauccaaaacaaaca

SEQ ID NO: 80827 - RNA, 24 nt, Artificial Sequence
  Synthetic
caggcuggauauccaaaacaaaca

SEQ ID NO: 80828 - RNA, 18 nt, Artificial Sequence
  Synthetic
auauuauuaagacaaaca

SEQ ID NO: 80829 - RNA, 19 nt, Artificial Sequence
  Synthetic
uauauuauuaagacaaaca

SEQ ID NO: 80830 - RNA, 20 nt, Artificial Sequence
  Synthetic
cuauauuauuaagacaaaca

SEQ ID NO: 80831 - RNA, 18 nt, Artificial Sequence
  Synthetic
cucauggugacccaaaca

SEQ ID NO: 80832 - RNA, 19 nt, Artificial Sequence
  Synthetic
ccucauggugacccaaaca

SEQ ID NO: 80833 - RNA, 21 nt, Artificial Sequence
  Synthetic
agccucauggugacccaaaca

SEQ ID NO: 80834 - RNA, 22 nt, Artificial Sequence
  Synthetic
aagccucauggugacccaaaca

SEQ ID NO: 80835 - RNA, 24 nt, Artificial Sequence
  Synthetic
agaagccucauggugacccaaaca

SEQ ID NO: 80836 - RNA, 18 nt, Artificial Sequence
  Synthetic
uaucuacuuggccaaaca

SEQ ID NO: 80837 - RNA, 22 nt, Artificial Sequence
  Synthetic
uggguaucuacuuggccaaaca

SEQ ID NO: 80838 - RNA, 23 nt, Artificial Sequence
  Synthetic
cuggguaucuacuuggccaaaca

SEQ ID NO: 80839 - RNA, 24 nt, Artificial Sequence
  Synthetic
acuggguaucuacuuggccaaaca

SEQ ID NO: 80840 - RNA, 18 nt, Artificial Sequence
  Synthetic
cuuaauuucuuccaaaca

SEQ ID NO: 80841 - RNA, 20 nt, Artificial Sequence
  Synthetic
ugcuuaauuucuuccaaaca

SEQ ID NO: 80842 - RNA, 21 nt, Artificial Sequence
  Synthetic
cugcuuaauuucuuccaaaca

SEQ ID NO: 80843 - RNA, 22 nt, Artificial Sequence
  Synthetic
ucugcuuaauuucuuccaaaca

SEQ ID NO: 80844 - RNA, 24 nt, Artificial Sequence
  Synthetic
ugucugcuuaauuucuuccaaaca

SEQ ID NO: 80845 - RNA, 18 nt, Artificial Sequence
  Synthetic
cauuauuucaggcaaaca

SEQ ID NO: 80846 - RNA, 19 nt, Artificial Sequence
  Synthetic
ccauuauuucaggcaaaca

SEQ ID NO: 80847 - RNA, 20 nt, Artificial Sequence
  Synthetic
accauuauuucaggcaaaca

SEQ ID NO: 80848 - RNA, 21 nt, Artificial Sequence
  Synthetic
aaccauuauuucaggcaaaca

SEQ ID NO: 80849 - RNA, 23 nt, Artificial Sequence
  Synthetic
ugaaccauuauuucaggcaaaca

SEQ ID NO: 80850 - RNA, 24 nt, Artificial Sequence
  Synthetic
cugaaccauuauuucaggcaaaca

SEQ ID NO: 80851 - RNA, 18 nt, Artificial Sequence
  Synthetic
aauaauaacguagaaaca

SEQ ID NO: 80852 - RNA, 19 nt, Artificial Sequence
  Synthetic
aaauaauaacguagaaaca

SEQ ID NO: 80853 - RNA, 20 nt, Artificial Sequence
  Synthetic
aaaauaauaacguagaaaca

SEQ ID NO: 80854 - RNA, 22 nt, Artificial Sequence
  Synthetic
agaaaauaauaacguagaaaca

SEQ ID NO: 80855 - RNA, 23 nt, Artificial Sequence
  Synthetic
aagaaaauaauaacguagaaaca

SEQ ID NO: 80856 - RNA, 18 nt, Artificial Sequence
  Synthetic
uuuaacuguuaauaaaca

SEQ ID NO: 80857 - RNA, 19 nt, Artificial Sequence
  Synthetic
uuuuaacuguuaauaaaca

SEQ ID NO: 80858 - RNA, 20 nt, Artificial Sequence
  Synthetic
cuuuuaacuguuaauaaaca

SEQ ID NO: 80859 - RNA, 22 nt, Artificial Sequence
  Synthetic
ugcuuuuaacuguuaauaaaca

SEQ ID NO: 80860 - RNA, 23 nt, Artificial Sequence
  Synthetic
augcuuuuaacuguuaauaaaca

SEQ ID NO: 80861 - RNA, 24 nt, Artificial Sequence
  Synthetic
aaugcuuuuaacuguuaauaaaca

SEQ ID NO: 80862 - RNA, 18 nt, Artificial Sequence
  Synthetic
cuucugaagagauaaaca

SEQ ID NO: 80863 - RNA, 20 nt, Artificial Sequence
  Synthetic
ugcuucugaagagauaaaca

SEQ ID NO: 80864 - RNA, 21 nt, Artificial Sequence
  Synthetic
uugcuucugaagagauaaaca

SEQ ID NO: 80865 - RNA, 22 nt, Artificial Sequence
  Synthetic
uuugcuucugaagagauaaaca

SEQ ID NO: 80866 - RNA, 23 nt, Artificial Sequence
  Synthetic
uuuugcuucugaagagauaaaca

SEQ ID NO: 80867 - RNA, 24 nt, Artificial Sequence
  Synthetic
auuuugcuucugaagagauaaaca

SEQ ID NO: 80868 - RNA, 18 nt, Artificial Sequence
  Synthetic
uauagacaagacuaaaca

SEQ ID NO: 80869 - RNA, 20 nt, Artificial Sequence
  Synthetic
uguauagacaagacuaaaca

SEQ ID NO: 80870 - RNA, 21 nt, Artificial Sequence
  Synthetic
cuguauagacaagacuaaaca

SEQ ID NO: 80871 - RNA, 22 nt, Artificial Sequence
  Synthetic
ucuguauagacaagacuaaaca

SEQ ID NO: 80872 - RNA, 23 nt, Artificial Sequence
  Synthetic
cucuguauagacaagacuaaaca

SEQ ID NO: 80873 - RNA, 24 nt, Artificial Sequence
  Synthetic
ucucuguauagacaagacuaaaca

SEQ ID NO: 80874 - RNA, 18 nt, Artificial Sequence
  Synthetic
aguauggccgccuaaaca

SEQ ID NO: 80875 - RNA, 19 nt, Artificial Sequence
  Synthetic
aaguauggccgccuaaaca

SEQ ID NO: 80876 - RNA, 21 nt, Artificial Sequence
  Synthetic
agaaguauggccgccuaaaca

SEQ ID NO: 80877 - RNA, 22 nt, Artificial Sequence
  Synthetic
aagaaguauggccgccuaaaca

SEQ ID NO: 80878 - RNA, 23 nt, Artificial Sequence
  Synthetic
caagaaguauggccgccuaaaca

SEQ ID NO: 80879 - RNA, 24 nt, Artificial Sequence
  Synthetic
acaagaaguauggccgccuaaaca

SEQ ID NO: 80880 - RNA, 21 nt, Artificial Sequence
  Synthetic
uaucaggcacugugcuaaaca

SEQ ID NO: 80881 - RNA, 22 nt, Artificial Sequence
  Synthetic
auaucaggcacugugcuaaaca

SEQ ID NO: 80882 - RNA, 23 nt, Artificial Sequence
  Synthetic
cauaucaggcacugugcuaaaca

SEQ ID NO: 80883 - RNA, 19 nt, Artificial Sequence
  Synthetic
ugaugaauauaaguaaaca

SEQ ID NO: 80884 - RNA, 20 nt, Artificial Sequence
  Synthetic
augaugaauauaaguaaaca

SEQ ID NO: 80885 - RNA, 21 nt, Artificial Sequence
  Synthetic
caugaugaauauaaguaaaca

SEQ ID NO: 80886 - RNA, 22 nt, Artificial Sequence
  Synthetic
ucaugaugaauauaaguaaaca

SEQ ID NO: 80887 - RNA, 23 nt, Artificial Sequence
  Synthetic
uucaugaugaauauaaguaaaca

SEQ ID NO: 80888 - RNA, 24 nt, Artificial Sequence
  Synthetic
auucaugaugaauauaaguaaaca

SEQ ID NO: 80889 - RNA, 18 nt, Artificial Sequence
  Synthetic
aagauaaauagguaaaca

SEQ ID NO: 80890 - RNA, 19 nt, Artificial Sequence
  Synthetic
uaagauaaauagguaaaca

SEQ ID NO: 80891 - RNA, 21 nt, Artificial Sequence
  Synthetic
uguaagauaaauagguaaaca

SEQ ID NO: 80892 - RNA, 22 nt, Artificial Sequence
  Synthetic
cuguaagauaaauagguaaaca

SEQ ID NO: 80893 - RNA, 23 nt, Artificial Sequence
  Synthetic
ccuguaagauaaauagguaaaca

SEQ ID NO: 80894 - RNA, 24 nt, Artificial Sequence
  Synthetic
accuguaagauaaauagguaaaca

SEQ ID NO: 80895 - RNA, 22 nt, Artificial Sequence
  Synthetic
agaaaaaaaauguauuuaaaca

SEQ ID NO: 80896 - RNA, 23 nt, Artificial Sequence
  Synthetic
aagaaaaaaaauguauuuaaaca

SEQ ID NO: 80897 - RNA, 18 nt, Artificial Sequence
  Synthetic
agucauaauuuuuaaaca

SEQ ID NO: 80898 - RNA, 20 nt, Artificial Sequence
  Synthetic
agagucauaauuuuuaaaca

SEQ ID NO: 80899 - RNA, 21 nt, Artificial Sequence
  Synthetic
uagagucauaauuuuuaaaca

SEQ ID NO: 80900 - RNA, 22 nt, Artificial Sequence
  Synthetic
auagagucauaauuuuuaaaca

SEQ ID NO: 80901 - RNA, 23 nt, Artificial Sequence
  Synthetic
uauagagucauaauuuuuaaaca

SEQ ID NO: 80902 - RNA, 24 nt, Artificial Sequence
  Synthetic
cuauagagucauaauuuuuaaaca

SEQ ID NO: 80903 - RNA, 21 nt, Artificial Sequence
  Synthetic
uuggagggcauuuuaacaaca

SEQ ID NO: 80904 - RNA, 22 nt, Artificial Sequence
  Synthetic
uuuggagggcauuuuaacaaca

SEQ ID NO: 80905 - RNA, 23 nt, Artificial Sequence
  Synthetic
uuuuggagggcauuuuaacaaca

SEQ ID NO: 80906 - RNA, 24 nt, Artificial Sequence
  Synthetic
cuuuuggagggcauuuuaacaaca

SEQ ID NO: 80907 - RNA, 19 nt, Artificial Sequence
  Synthetic
aggcuuuagguucacaaca

SEQ ID NO: 80908 - RNA, 20 nt, Artificial Sequence
  Synthetic
uaggcuuuagguucacaaca

SEQ ID NO: 80909 - RNA, 21 nt, Artificial Sequence
  Synthetic
auaggcuuuagguucacaaca

SEQ ID NO: 80910 - RNA, 22 nt, Artificial Sequence
  Synthetic
aauaggcuuuagguucacaaca

SEQ ID NO: 80911 - RNA, 23 nt, Artificial Sequence
  Synthetic
uaauaggcuuuagguucacaaca

SEQ ID NO: 80912 - RNA, 24 nt, Artificial Sequence
  Synthetic
cuaauaggcuuuagguucacaaca

SEQ ID NO: 80913 - RNA, 18 nt, Artificial Sequence
  Synthetic
uaaagaguuacaccaaca

SEQ ID NO: 80914 - RNA, 19 nt, Artificial Sequence
  Synthetic
uuaaagaguuacaccaaca

SEQ ID NO: 80915 - RNA, 21 nt, Artificial Sequence
  Synthetic
cguuaaagaguuacaccaaca

SEQ ID NO: 80916 - RNA, 22 nt, Artificial Sequence
  Synthetic
ucguuaaagaguuacaccaaca

SEQ ID NO: 80917 - RNA, 23 nt, Artificial Sequence
  Synthetic
uucguuaaagaguuacaccaaca

SEQ ID NO: 80918 - RNA, 24 nt, Artificial Sequence
  Synthetic
auucguuaaagaguuacaccaaca

SEQ ID NO: 80919 - RNA, 18 nt, Artificial Sequence
  Synthetic
caaauaaaaugaccaaca

SEQ ID NO: 80920 - RNA, 20 nt, Artificial Sequence
  Synthetic
ugcaaauaaaaugaccaaca

SEQ ID NO: 80921 - RNA, 21 nt, Artificial Sequence
  Synthetic
augcaaauaaaaugaccaaca

SEQ ID NO: 80922 - RNA, 22 nt, Artificial Sequence
  Synthetic
aaugcaaauaaaaugaccaaca

SEQ ID NO: 80923 - RNA, 23 nt, Artificial Sequence
  Synthetic
aaaugcaaauaaaaugaccaaca

SEQ ID NO: 80924 - RNA, 24 nt, Artificial Sequence
  Synthetic
uaaaugcaaauaaaaugaccaaca

SEQ ID NO: 80925 - RNA, 20 nt, Artificial Sequence
  Synthetic
uggggauauucaaagcaaca

SEQ ID NO: 80926 - RNA, 21 nt, Artificial Sequence
  Synthetic
auggggauauucaaagcaaca

SEQ ID NO: 80927 - RNA, 22 nt, Artificial Sequence
  Synthetic
aauggggauauucaaagcaaca

SEQ ID NO: 80928 - RNA, 23 nt, Artificial Sequence
  Synthetic
uaauggggauauucaaagcaaca

SEQ ID NO: 80929 - RNA, 24 nt, Artificial Sequence
  Synthetic
cuaauggggauauucaaagcaaca

SEQ ID NO: 80930 - RNA, 18 nt, Artificial Sequence
  Synthetic
uuccucagucuggcaaca

SEQ ID NO: 80931 - RNA, 19 nt, Artificial Sequence
  Synthetic
auuccucagucuggcaaca

SEQ ID NO: 80932 - RNA, 20 nt, Artificial Sequence
  Synthetic
aauuccucagucuggcaaca

SEQ ID NO: 80933 - RNA, 18 nt, Artificial Sequence
  Synthetic
ucuucaauaaaugcaaca

SEQ ID NO: 80934 - RNA, 19 nt, Artificial Sequence
  Synthetic
uucuucaauaaaugcaaca

SEQ ID NO: 80935 - RNA, 20 nt, Artificial Sequence
  Synthetic
cuucuucaauaaaugcaaca

SEQ ID NO: 80936 - RNA, 21 nt, Artificial Sequence
  Synthetic
ucuucuucaauaaaugcaaca

SEQ ID NO: 80937 - RNA, 22 nt, Artificial Sequence
  Synthetic
uucuucuucaauaaaugcaaca

SEQ ID NO: 80938 - RNA, 23 nt, Artificial Sequence
  Synthetic
uuucuucuucaauaaaugcaaca

SEQ ID NO: 80939 - RNA, 24 nt, Artificial Sequence
  Synthetic
uuuucuucuucaauaaaugcaaca

SEQ ID NO: 80940 - RNA, 18 nt, Artificial Sequence
  Synthetic
aaagacaacaaugcaaca

SEQ ID NO: 80941 - RNA, 20 nt, Artificial Sequence
  Synthetic
ugaaagacaacaaugcaaca

SEQ ID NO: 80942 - RNA, 21 nt, Artificial Sequence
  Synthetic
cugaaagacaacaaugcaaca

SEQ ID NO: 80943 - RNA, 24 nt, Artificial Sequence
  Synthetic
uggcugaaagacaacaaugcaaca

SEQ ID NO: 80944 - RNA, 18 nt, Artificial Sequence
  Synthetic
uaguuuacuagaucaaca

SEQ ID NO: 80945 - RNA, 20 nt, Artificial Sequence
  Synthetic
aguaguuuacuagaucaaca

SEQ ID NO: 80946 - RNA, 21 nt, Artificial Sequence
  Synthetic
uaguaguuuacuagaucaaca

SEQ ID NO: 80947 - RNA, 23 nt, Artificial Sequence
  Synthetic
uguaguaguuuacuagaucaaca

SEQ ID NO: 80948 - RNA, 24 nt, Artificial Sequence
  Synthetic
cuguaguaguuuacuagaucaaca

SEQ ID NO: 80949 - RNA, 18 nt, Artificial Sequence
  Synthetic
agucuuugaggaucaaca

SEQ ID NO: 80950 - RNA, 19 nt, Artificial Sequence
  Synthetic
aagucuuugaggaucaaca

SEQ ID NO: 80951 - RNA, 20 nt, Artificial Sequence
  Synthetic
aaagucuuugaggaucaaca

SEQ ID NO: 80952 - RNA, 21 nt, Artificial Sequence
  Synthetic
uaaagucuuugaggaucaaca

SEQ ID NO: 80953 - RNA, 22 nt, Artificial Sequence
  Synthetic
auaaagucuuugaggaucaaca

SEQ ID NO: 80954 - RNA, 23 nt, Artificial Sequence
  Synthetic
cauaaagucuuugaggaucaaca

SEQ ID NO: 80955 - RNA, 19 nt, Artificial Sequence
  Synthetic
agguuugaggaacucaaca

SEQ ID NO: 80956 - RNA, 20 nt, Artificial Sequence
  Synthetic
aagguuugaggaacucaaca

SEQ ID NO: 80957 - RNA, 21 nt, Artificial Sequence
  Synthetic
aaagguuugaggaacucaaca

SEQ ID NO: 80958 - RNA, 22 nt, Artificial Sequence
  Synthetic
uaaagguuugaggaacucaaca

SEQ ID NO: 80959 - RNA, 23 nt, Artificial Sequence
  Synthetic
uuaaagguuugaggaacucaaca

SEQ ID NO: 80960 - RNA, 24 nt, Artificial Sequence
  Synthetic
uuuaaagguuugaggaacucaaca

SEQ ID NO: 80961 - RNA, 21 nt, Artificial Sequence
  Synthetic
ucccucucccuucucucaaca

SEQ ID NO: 80962 - RNA, 22 nt, Artificial Sequence
  Synthetic
cucccucucccuucucucaaca

SEQ ID NO: 80963 - RNA, 23 nt, Artificial Sequence
  Synthetic
ccucccucucccuucucucaaca

SEQ ID NO: 80964 - RNA, 24 nt, Artificial Sequence
  Synthetic
cccucccucucccuucucucaaca

SEQ ID NO: 80965 - RNA, 18 nt, Artificial Sequence
  Synthetic
ugaaaugaccuuucaaca

SEQ ID NO: 80966 - RNA, 19 nt, Artificial Sequence
  Synthetic
augaaaugaccuuucaaca

SEQ ID NO: 80967 - RNA, 20 nt, Artificial Sequence
  Synthetic
aaugaaaugaccuuucaaca

SEQ ID NO: 80968 - RNA, 21 nt, Artificial Sequence
  Synthetic
caaugaaaugaccuuucaaca

SEQ ID NO: 80969 - RNA, 22 nt, Artificial Sequence
  Synthetic
ucaaugaaaugaccuuucaaca

SEQ ID NO: 80970 - RNA, 23 nt, Artificial Sequence
  Synthetic
aucaaugaaaugaccuuucaaca

SEQ ID NO: 80971 - RNA, 24 nt, Artificial Sequence
  Synthetic
uaucaaugaaaugaccuuucaaca

SEQ ID NO: 80972 - RNA, 21 nt, Artificial Sequence
  Synthetic
aaaacaguauuauaaagaaca

SEQ ID NO: 80973 - RNA, 22 nt, Artificial Sequence
  Synthetic
caaaacaguauuauaaagaaca

SEQ ID NO: 80974 - RNA, 23 nt, Artificial Sequence
  Synthetic
acaaaacaguauuauaaagaaca

SEQ ID NO: 80975 - RNA, 24 nt, Artificial Sequence
  Synthetic
uacaaaacaguauuauaaagaaca

SEQ ID NO: 80976 - RNA, 18 nt, Artificial Sequence
  Synthetic
uacaaaggacagagaaca

SEQ ID NO: 80977 - RNA, 19 nt, Artificial Sequence
  Synthetic
uuacaaaggacagagaaca

SEQ ID NO: 80978 - RNA, 20 nt, Artificial Sequence
  Synthetic
cuuacaaaggacagagaaca

SEQ ID NO: 80979 - RNA, 21 nt, Artificial Sequence
  Synthetic
acuuacaaaggacagagaaca

SEQ ID NO: 80980 - RNA, 22 nt, Artificial Sequence
  Synthetic
aacuuacaaaggacagagaaca

SEQ ID NO: 80981 - RNA, 23 nt, Artificial Sequence
  Synthetic
aaacuuacaaaggacagagaaca

SEQ ID NO: 80982 - RNA, 24 nt, Artificial Sequence
  Synthetic
aaaacuuacaaaggacagagaaca

SEQ ID NO: 80983 - RNA, 18 nt, Artificial Sequence
  Synthetic
uucuucuuuuguagaaca

SEQ ID NO: 80984 - RNA, 19 nt, Artificial Sequence
  Synthetic
uuucuucuuuuguagaaca

SEQ ID NO: 80985 - RNA, 20 nt, Artificial Sequence
  Synthetic
auuucuucuuuuguagaaca

SEQ ID NO: 80986 - RNA, 21 nt, Artificial Sequence
  Synthetic
cauuucuucuuuuguagaaca

SEQ ID NO: 80987 - RNA, 22 nt, Artificial Sequence
  Synthetic
ccauuucuucuuuuguagaaca

SEQ ID NO: 80988 - RNA, 23 nt, Artificial Sequence
  Synthetic
cccauuucuucuuuuguagaaca

SEQ ID NO: 80989 - RNA, 19 nt, Artificial Sequence
  Synthetic
ugaacucacaauuagaaca

SEQ ID NO: 80990 - RNA, 20 nt, Artificial Sequence
  Synthetic
cugaacucacaauuagaaca

SEQ ID NO: 80991 - RNA, 21 nt, Artificial Sequence
  Synthetic
ucugaacucacaauuagaaca

SEQ ID NO: 80992 - RNA, 22 nt, Artificial Sequence
  Synthetic
uucugaacucacaauuagaaca

SEQ ID NO: 80993 - RNA, 18 nt, Artificial Sequence
  Synthetic
auaacaaagcaucgaaca

SEQ ID NO: 80994 - RNA, 19 nt, Artificial Sequence
  Synthetic
uauaacaaagcaucgaaca

SEQ ID NO: 80995 - RNA, 20 nt, Artificial Sequence
  Synthetic
uuauaacaaagcaucgaaca

SEQ ID NO: 80996 - RNA, 21 nt, Artificial Sequence
  Synthetic
uuuauaacaaagcaucgaaca

SEQ ID NO: 80997 - RNA, 22 nt, Artificial Sequence
  Synthetic
cuuuauaacaaagcaucgaaca

SEQ ID NO: 80998 - RNA, 23 nt, Artificial Sequence
  Synthetic
ucuuuauaacaaagcaucgaaca

SEQ ID NO: 80999 - RNA, 24 nt, Artificial Sequence
  Synthetic
aucuuuauaacaaagcaucgaaca

SEQ ID NO: 81000 - RNA, 18 nt, Artificial Sequence
  Synthetic
ucuuugcucucaggaaca

SEQ ID NO: 81001 - RNA, 19 nt, Artificial Sequence
  Synthetic
aucuuugcucucaggaaca

SEQ ID NO: 81002 - RNA, 20 nt, Artificial Sequence
  Synthetic
uaucuuugcucucaggaaca

SEQ ID NO: 81003 - RNA, 21 nt, Artificial Sequence
  Synthetic
uuaucuuugcucucaggaaca

SEQ ID NO: 81004 - RNA, 22 nt, Artificial Sequence
  Synthetic
auuaucuuugcucucaggaaca

SEQ ID NO: 81005 - RNA, 23 nt, Artificial Sequence
  Synthetic
cauuaucuuugcucucaggaaca

SEQ ID NO: 81006 - RNA, 24 nt, Artificial Sequence
  Synthetic
acauuaucuuugcucucaggaaca

SEQ ID NO: 81007 - RNA, 18 nt, Artificial Sequence
  Synthetic
cugucaguucuuggaaca

SEQ ID NO: 81008 - RNA, 19 nt, Artificial Sequence
  Synthetic
acugucaguucuuggaaca

SEQ ID NO: 81009 - RNA, 20 nt, Artificial Sequence
  Synthetic
cacugucaguucuuggaaca

SEQ ID NO: 81010 - RNA, 21 nt, Artificial Sequence
  Synthetic
ccacugucaguucuuggaaca

SEQ ID NO: 81011 - RNA, 23 nt, Artificial Sequence
  Synthetic
agccacugucaguucuuggaaca

SEQ ID NO: 81012 - RNA, 24 nt, Artificial Sequence
  Synthetic
aagccacugucaguucuuggaaca

SEQ ID NO: 81013 - RNA, 21 nt, Artificial Sequence
  Synthetic
uauuaaaugaaguaaugaaca

SEQ ID NO: 81014 - RNA, 22 nt, Artificial Sequence
  Synthetic
uuauuaaaugaaguaaugaaca

SEQ ID NO: 81015 - RNA, 23 nt, Artificial Sequence
  Synthetic
auuauuaaaugaaguaaugaaca

SEQ ID NO: 81016 - RNA, 24 nt, Artificial Sequence
  Synthetic
uauuauuaaaugaaguaaugaaca

SEQ ID NO: 81017 - RNA, 18 nt, Artificial Sequence
  Synthetic
uuagugagugagugaaca

SEQ ID NO: 81018 - RNA, 19 nt, Artificial Sequence
  Synthetic
auuagugagugagugaaca

SEQ ID NO: 81019 - RNA, 20 nt, Artificial Sequence
  Synthetic
aauuagugagugagugaaca

SEQ ID NO: 81020 - RNA, 21 nt, Artificial Sequence
  Synthetic
uaauuagugagugagugaaca

SEQ ID NO: 81021 - RNA, 22 nt, Artificial Sequence
  Synthetic
uuaauuagugagugagugaaca

SEQ ID NO: 81022 - RNA, 23 nt, Artificial Sequence
  Synthetic
auuaauuagugagugagugaaca

SEQ ID NO: 81023 - RNA, 24 nt, Artificial Sequence
  Synthetic
aauuaauuagugagugagugaaca

SEQ ID NO: 81024 - RNA, 18 nt, Artificial Sequence
  Synthetic
cuguuuauuaauugaaca

SEQ ID NO: 81025 - RNA, 19 nt, Artificial Sequence
  Synthetic
acuguuuauuaauugaaca

SEQ ID NO: 81026 - RNA, 20 nt, Artificial Sequence
  Synthetic
aacuguuuauuaauugaaca

SEQ ID NO: 81027 - RNA, 21 nt, Artificial Sequence
  Synthetic
uaacuguuuauuaauugaaca

SEQ ID NO: 81028 - RNA, 23 nt, Artificial Sequence
  Synthetic
aguaacuguuuauuaauugaaca

SEQ ID NO: 81029 - RNA, 24 nt, Artificial Sequence
  Synthetic
aaguaacuguuuauuaauugaaca

SEQ ID NO: 81030 - RNA, 19 nt, Artificial Sequence
  Synthetic
uguguucagaacuugaaca

SEQ ID NO: 81031 - RNA, 20 nt, Artificial Sequence
  Synthetic
auguguucagaacuugaaca

SEQ ID NO: 81032 - RNA, 21 nt, Artificial Sequence
  Synthetic
uauguguucagaacuugaaca

SEQ ID NO: 81033 - RNA, 22 nt, Artificial Sequence
  Synthetic
auauguguucagaacuugaaca

SEQ ID NO: 81034 - RNA, 24 nt, Artificial Sequence
  Synthetic
agauauguguucagaacuugaaca

SEQ ID NO: 81035 - RNA, 18 nt, Artificial Sequence
  Synthetic
aauacuuggcacauaaca

SEQ ID NO: 81036 - RNA, 19 nt, Artificial Sequence
  Synthetic
uaauacuuggcacauaaca

SEQ ID NO: 81037 - RNA, 20 nt, Artificial Sequence
  Synthetic
cuaauacuuggcacauaaca

SEQ ID NO: 81038 - RNA, 21 nt, Artificial Sequence
  Synthetic
ucuaauacuuggcacauaaca

SEQ ID NO: 81039 - RNA, 22 nt, Artificial Sequence
  Synthetic
aucuaauacuuggcacauaaca

SEQ ID NO: 81040 - RNA, 23 nt, Artificial Sequence
  Synthetic
uaucuaauacuuggcacauaaca

SEQ ID NO: 81041 - RNA, 18 nt, Artificial Sequence
  Synthetic
auuauugacaucauaaca

SEQ ID NO: 81042 - RNA, 19 nt, Artificial Sequence
  Synthetic
uauuauugacaucauaaca

SEQ ID NO: 81043 - RNA, 20 nt, Artificial Sequence
  Synthetic
cuauuauugacaucauaaca

SEQ ID NO: 81044 - RNA, 21 nt, Artificial Sequence
  Synthetic
ucuauuauugacaucauaaca

SEQ ID NO: 81045 - RNA, 22 nt, Artificial Sequence
  Synthetic
uucuauuauugacaucauaaca

SEQ ID NO: 81046 - RNA, 23 nt, Artificial Sequence
  Synthetic
auucuauuauugacaucauaaca

SEQ ID NO: 81047 - RNA, 24 nt, Artificial Sequence
  Synthetic
cauucuauuauugacaucauaaca

SEQ ID NO: 81048 - RNA, 19 nt, Artificial Sequence
  Synthetic
ugagcuggaaaagauaaca

SEQ ID NO: 81049 - RNA, 20 nt, Artificial Sequence
  Synthetic
cugagcuggaaaagauaaca

SEQ ID NO: 81050 - RNA, 21 nt, Artificial Sequence
  Synthetic
ucugagcuggaaaagauaaca

SEQ ID NO: 81051 - RNA, 22 nt, Artificial Sequence
  Synthetic
uucugagcuggaaaagauaaca

SEQ ID NO: 81052 - RNA, 23 nt, Artificial Sequence
  Synthetic
uuucugagcuggaaaagauaaca

SEQ ID NO: 81053 - RNA, 24 nt, Artificial Sequence
  Synthetic
uuuucugagcuggaaaagauaaca

SEQ ID NO: 81054 - RNA, 18 nt, Artificial Sequence
  Synthetic
uguugaacucauauaaca

SEQ ID NO: 81055 - RNA, 19 nt, Artificial Sequence
  Synthetic
uuguugaacucauauaaca

SEQ ID NO: 81056 - RNA, 20 nt, Artificial Sequence
  Synthetic
uuuguugaacucauauaaca

SEQ ID NO: 81057 - RNA, 21 nt, Artificial Sequence
  Synthetic
cuuuguugaacucauauaaca

SEQ ID NO: 81058 - RNA, 22 nt, Artificial Sequence
  Synthetic
acuuuguugaacucauauaaca

SEQ ID NO: 81059 - RNA, 23 nt, Artificial Sequence
  Synthetic
aacuuuguugaacucauauaaca

SEQ ID NO: 81060 - RNA, 24 nt, Artificial Sequence
  Synthetic
aaacuuuguugaacucauauaaca

SEQ ID NO: 81061 - RNA, 18 nt, Artificial Sequence
  Synthetic
ugugguaguauuauaaca

SEQ ID NO: 81062 - RNA, 19 nt, Artificial Sequence
  Synthetic
uugugguaguauuauaaca

SEQ ID NO: 81063 - RNA, 20 nt, Artificial Sequence
  Synthetic
cuugugguaguauuauaaca

SEQ ID NO: 81064 - RNA, 21 nt, Artificial Sequence
  Synthetic
ucuugugguaguauuauaaca

SEQ ID NO: 81065 - RNA, 22 nt, Artificial Sequence
  Synthetic
cucuugugguaguauuauaaca

SEQ ID NO: 81066 - RNA, 23 nt, Artificial Sequence
  Synthetic
ucucuugugguaguauuauaaca

SEQ ID NO: 81067 - RNA, 18 nt, Artificial Sequence
  Synthetic
acauuuucuugaguaaca

SEQ ID NO: 81068 - RNA, 19 nt, Artificial Sequence
  Synthetic
uacauuuucuugaguaaca

SEQ ID NO: 81069 - RNA, 20 nt, Artificial Sequence
  Synthetic
auacauuuucuugaguaaca

SEQ ID NO: 81070 - RNA, 21 nt, Artificial Sequence
  Synthetic
aauacauuuucuugaguaaca

SEQ ID NO: 81071 - RNA, 22 nt, Artificial Sequence
  Synthetic
aaauacauuuucuugaguaaca

SEQ ID NO: 81072 - RNA, 23 nt, Artificial Sequence
  Synthetic
uaaauacauuuucuugaguaaca

SEQ ID NO: 81073 - RNA, 24 nt, Artificial Sequence
  Synthetic
auaaauacauuuucuugaguaaca

SEQ ID NO: 81074 - RNA, 18 nt, Artificial Sequence
  Synthetic
uagagugaugauguaaca

SEQ ID NO: 81075 - RNA, 19 nt, Artificial Sequence
  Synthetic
uuagagugaugauguaaca

SEQ ID NO: 81076 - RNA, 20 nt, Artificial Sequence
  Synthetic
uuuagagugaugauguaaca

SEQ ID NO: 81077 - RNA, 21 nt, Artificial Sequence
  Synthetic
auuuagagugaugauguaaca

SEQ ID NO: 81078 - RNA, 22 nt, Artificial Sequence
  Synthetic
aauuuagagugaugauguaaca

SEQ ID NO: 81079 - RNA, 23 nt, Artificial Sequence
  Synthetic
uaauuuagagugaugauguaaca

SEQ ID NO: 81080 - RNA, 24 nt, Artificial Sequence
  Synthetic
uuaauuuagagugaugauguaaca

SEQ ID NO: 81081 - RNA, 19 nt, Artificial Sequence
  Synthetic
agguacuagauauguaaca

SEQ ID NO: 81082 - RNA, 21 nt, Artificial Sequence
  Synthetic
ugagguacuagauauguaaca

SEQ ID NO: 81083 - RNA, 22 nt, Artificial Sequence
  Synthetic
uugagguacuagauauguaaca

SEQ ID NO: 81084 - RNA, 23 nt, Artificial Sequence
  Synthetic
uuugagguacuagauauguaaca

SEQ ID NO: 81085 - RNA, 20 nt, Artificial Sequence
  Synthetic
aggcuguggugguuguaaca

SEQ ID NO: 81086 - RNA, 21 nt, Artificial Sequence
  Synthetic
aaggcuguggugguuguaaca

SEQ ID NO: 81087 - RNA, 22 nt, Artificial Sequence
  Synthetic
aaaggcuguggugguuguaaca

SEQ ID NO: 81088 - RNA, 23 nt, Artificial Sequence
  Synthetic
aaaaggcuguggugguuguaaca

SEQ ID NO: 81089 - RNA, 18 nt, Artificial Sequence
  Synthetic
ccuggccaggcauuaaca

SEQ ID NO: 81090 - RNA, 19 nt, Artificial Sequence
  Synthetic
accuggccaggcauuaaca

SEQ ID NO: 81091 - RNA, 20 nt, Artificial Sequence
  Synthetic
aaccuggccaggcauuaaca

SEQ ID NO: 81092 - RNA, 22 nt, Artificial Sequence
  Synthetic
agaaccuggccaggcauuaaca

SEQ ID NO: 81093 - RNA, 18 nt, Artificial Sequence
  Synthetic
aaauuuggcauauuaaca

SEQ ID NO: 81094 - RNA, 19 nt, Artificial Sequence
  Synthetic
uaaauuuggcauauuaaca

SEQ ID NO: 81095 - RNA, 20 nt, Artificial Sequence
  Synthetic
auaaauuuggcauauuaaca

SEQ ID NO: 81096 - RNA, 21 nt, Artificial Sequence
  Synthetic
uauaaauuuggcauauuaaca

SEQ ID NO: 81097 - RNA, 22 nt, Artificial Sequence
  Synthetic
cuauaaauuuggcauauuaaca

SEQ ID NO: 81098 - RNA, 23 nt, Artificial Sequence
  Synthetic
ucuauaaauuuggcauauuaaca

SEQ ID NO: 81099 - RNA, 24 nt, Artificial Sequence
  Synthetic
uucuauaaauuuggcauauuaaca

SEQ ID NO: 81100 - RNA, 18 nt, Artificial Sequence
  Synthetic
ccuaacauaugcuuaaca

SEQ ID NO: 81101 - RNA, 19 nt, Artificial Sequence
  Synthetic
cccuaacauaugcuuaaca

SEQ ID NO: 81102 - RNA, 20 nt, Artificial Sequence
  Synthetic
ucccuaacauaugcuuaaca

SEQ ID NO: 81103 - RNA, 21 nt, Artificial Sequence
  Synthetic
uucccuaacauaugcuuaaca

SEQ ID NO: 81104 - RNA, 23 nt, Artificial Sequence
  Synthetic
uguucccuaacauaugcuuaaca

SEQ ID NO: 81105 - RNA, 24 nt, Artificial Sequence
  Synthetic
uuguucccuaacauaugcuuaaca

SEQ ID NO: 81106 - RNA, 18 nt, Artificial Sequence
  Synthetic
uaaacaaauaaguuaaca

SEQ ID NO: 81107 - RNA, 19 nt, Artificial Sequence
  Synthetic
cuaaacaaauaaguuaaca

SEQ ID NO: 81108 - RNA, 21 nt, Artificial Sequence
  Synthetic
agcuaaacaaauaaguuaaca

SEQ ID NO: 81109 - RNA, 22 nt, Artificial Sequence
  Synthetic
aagcuaaacaaauaaguuaaca

SEQ ID NO: 81110 - RNA, 23 nt, Artificial Sequence
  Synthetic
uaagcuaaacaaauaaguuaaca

SEQ ID NO: 81111 - RNA, 24 nt, Artificial Sequence
  Synthetic
cuaagcuaaacaaauaaguuaaca

SEQ ID NO: 81112 - RNA, 19 nt, Artificial Sequence
  Synthetic
uggaggcaauccuuuaaca

SEQ ID NO: 81113 - RNA, 20 nt, Artificial Sequence
  Synthetic
cuggaggcaauccuuuaaca

SEQ ID NO: 81114 - RNA, 21 nt, Artificial Sequence
  Synthetic
acuggaggcaauccuuuaaca

SEQ ID NO: 81115 - RNA, 22 nt, Artificial Sequence
  Synthetic
uacuggaggcaauccuuuaaca

SEQ ID NO: 81116 - RNA, 23 nt, Artificial Sequence
  Synthetic
uuacuggaggcaauccuuuaaca

SEQ ID NO: 81117 - RNA, 24 nt, Artificial Sequence
  Synthetic
uuuacuggaggcaauccuuuaaca

SEQ ID NO: 81118 - RNA, 18 nt, Artificial Sequence
  Synthetic
acauauucaaguuuaaca

SEQ ID NO: 81119 - RNA, 19 nt, Artificial Sequence
  Synthetic
aacauauucaaguuuaaca

SEQ ID NO: 81120 - RNA, 20 nt, Artificial Sequence
  Synthetic
uaacauauucaaguuuaaca

SEQ ID NO: 81121 - RNA, 21 nt, Artificial Sequence
  Synthetic
uuaacauauucaaguuuaaca

SEQ ID NO: 81122 - RNA, 22 nt, Artificial Sequence
  Synthetic
uuuaacauauucaaguuuaaca

SEQ ID NO: 81123 - RNA, 23 nt, Artificial Sequence
  Synthetic
auuuaacauauucaaguuuaaca

SEQ ID NO: 81124 - RNA, 24 nt, Artificial Sequence
  Synthetic
uauuuaacauauucaaguuuaaca

SEQ ID NO: 81125 - RNA, 18 nt, Artificial Sequence
  Synthetic
caacugucuguuuuaaca

SEQ ID NO: 81126 - RNA, 19 nt, Artificial Sequence
  Synthetic
acaacugucuguuuuaaca

SEQ ID NO: 81127 - RNA, 20 nt, Artificial Sequence
  Synthetic
cacaacugucuguuuuaaca

SEQ ID NO: 81128 - RNA, 22 nt, Artificial Sequence
  Synthetic
ugcacaacugucuguuuuaaca

SEQ ID NO: 81129 - RNA, 23 nt, Artificial Sequence
  Synthetic
augcacaacugucuguuuuaaca

SEQ ID NO: 81130 - RNA, 24 nt, Artificial Sequence
  Synthetic
uaugcacaacugucuguuuuaaca

SEQ ID NO: 81131 - RNA, 22 nt, Artificial Sequence
  Synthetic
aguuaacugaaauaaaaacaca

SEQ ID NO: 81132 - RNA, 23 nt, Artificial Sequence
  Synthetic
aaguuaacugaaauaaaaacaca

SEQ ID NO: 81133 - RNA, 24 nt, Artificial Sequence
  Synthetic
uaaguuaacugaaauaaaaacaca

SEQ ID NO: 81134 - RNA, 18 nt, Artificial Sequence
  Synthetic
uaaaaguaccccaacaca

SEQ ID NO: 81135 - RNA, 19 nt, Artificial Sequence
  Synthetic
auaaaaguaccccaacaca

SEQ ID NO: 81136 - RNA, 20 nt, Artificial Sequence
  Synthetic
aauaaaaguaccccaacaca

SEQ ID NO: 81137 - RNA, 21 nt, Artificial Sequence
  Synthetic
aaauaaaaguaccccaacaca

SEQ ID NO: 81138 - RNA, 22 nt, Artificial Sequence
  Synthetic
aaaauaaaaguaccccaacaca

SEQ ID NO: 81139 - RNA, 23 nt, Artificial Sequence
  Synthetic
uaaaauaaaaguaccccaacaca

SEQ ID NO: 81140 - RNA, 18 nt, Artificial Sequence
  Synthetic
cuucaguuuaucaacaca

SEQ ID NO: 81141 - RNA, 19 nt, Artificial Sequence
  Synthetic
ccuucaguuuaucaacaca

SEQ ID NO: 81142 - RNA, 22 nt, Artificial Sequence
  Synthetic
aggccuucaguuuaucaacaca

SEQ ID NO: 81143 - RNA, 24 nt, Artificial Sequence
  Synthetic
agaggccuucaguuuaucaacaca

SEQ ID NO: 81144 - RNA, 18 nt, Artificial Sequence
  Synthetic
ccuggccuguugaacaca

SEQ ID NO: 81145 - RNA, 19 nt, Artificial Sequence
  Synthetic
cccuggccuguugaacaca

SEQ ID NO: 81146 - RNA, 20 nt, Artificial Sequence
  Synthetic
ucccuggccuguugaacaca

SEQ ID NO: 81147 - RNA, 21 nt, Artificial Sequence
  Synthetic
aucccuggccuguugaacaca

SEQ ID NO: 81148 - RNA, 22 nt, Artificial Sequence
  Synthetic
uaucccuggccuguugaacaca

SEQ ID NO: 81149 - RNA, 24 nt, Artificial Sequence
  Synthetic
aguaucccuggccuguugaacaca

SEQ ID NO: 81150 - RNA, 18 nt, Artificial Sequence
  Synthetic
aaaaagguugauaacaca

SEQ ID NO: 81151 - RNA, 19 nt, Artificial Sequence
  Synthetic
caaaaagguugauaacaca

SEQ ID NO: 81152 - RNA, 20 nt, Artificial Sequence
  Synthetic
ucaaaaagguugauaacaca

SEQ ID NO: 81153 - RNA, 18 nt, Artificial Sequence
  Synthetic
aaacaacaggaacacaca

SEQ ID NO: 81154 - RNA, 19 nt, Artificial Sequence
  Synthetic
aaaacaacaggaacacaca

SEQ ID NO: 81155 - RNA, 20 nt, Artificial Sequence
  Synthetic
caaaacaacaggaacacaca

SEQ ID NO: 81156 - RNA, 21 nt, Artificial Sequence
  Synthetic
acaaaacaacaggaacacaca

SEQ ID NO: 81157 - RNA, 22 nt, Artificial Sequence
  Synthetic
cacaaaacaacaggaacacaca

SEQ ID NO: 81158 - RNA, 23 nt, Artificial Sequence
  Synthetic
acacaaaacaacaggaacacaca

SEQ ID NO: 81159 - RNA, 24 nt, Artificial Sequence
  Synthetic
uacacaaaacaacaggaacacaca

SEQ ID NO: 81160 - RNA, 20 nt, Artificial Sequence
  Synthetic
aggagacaccuguacacaca

SEQ ID NO: 81161 - RNA, 21 nt, Artificial Sequence
  Synthetic
caggagacaccuguacacaca

SEQ ID NO: 81162 - RNA, 22 nt, Artificial Sequence
  Synthetic
ucaggagacaccuguacacaca

SEQ ID NO: 81163 - RNA, 23 nt, Artificial Sequence
  Synthetic
uucaggagacaccuguacacaca

SEQ ID NO: 81164 - RNA, 18 nt, Artificial Sequence
  Synthetic
uuucucccuuagcacaca

SEQ ID NO: 81165 - RNA, 19 nt, Artificial Sequence
  Synthetic
uuuucucccuuagcacaca

SEQ ID NO: 81166 - RNA, 20 nt, Artificial Sequence
  Synthetic
uuuuucucccuuagcacaca

SEQ ID NO: 81167 - RNA, 22 nt, Artificial Sequence
  Synthetic
agagauggagauaacagacaca

SEQ ID NO: 81168 - RNA, 24 nt, Artificial Sequence
  Synthetic
agagagauggagauaacagacaca

SEQ ID NO: 81169 - RNA, 19 nt, Artificial Sequence
  Synthetic
agagcaaacuucagacaca

SEQ ID NO: 81170 - RNA, 20 nt, Artificial Sequence
  Synthetic
cagagcaaacuucagacaca

SEQ ID NO: 81171 - RNA, 21 nt, Artificial Sequence
  Synthetic
acagagcaaacuucagacaca

SEQ ID NO: 81172 - RNA, 22 nt, Artificial Sequence
  Synthetic
cacagagcaaacuucagacaca

SEQ ID NO: 81173 - RNA, 23 nt, Artificial Sequence
  Synthetic
ucacagagcaaacuucagacaca

SEQ ID NO: 81174 - RNA, 24 nt, Artificial Sequence
  Synthetic
aucacagagcaaacuucagacaca

SEQ ID NO: 81175 - RNA, 18 nt, Artificial Sequence
  Synthetic
uuucaugaaggagacaca

SEQ ID NO: 81176 - RNA, 19 nt, Artificial Sequence
  Synthetic
uuuucaugaaggagacaca

SEQ ID NO: 81177 - RNA, 21 nt, Artificial Sequence
  Synthetic
aguuuucaugaaggagacaca

SEQ ID NO: 81178 - RNA, 22 nt, Artificial Sequence
  Synthetic
aaguuuucaugaaggagacaca

SEQ ID NO: 81179 - RNA, 23 nt, Artificial Sequence
  Synthetic
uaaguuuucaugaaggagacaca

SEQ ID NO: 81180 - RNA, 24 nt, Artificial Sequence
  Synthetic
uuaaguuuucaugaaggagacaca

SEQ ID NO: 81181 - RNA, 22 nt, Artificial Sequence
  Synthetic
ugacaaaaccaagaaauacaca

SEQ ID NO: 81182 - RNA, 23 nt, Artificial Sequence
  Synthetic
augacaaaaccaagaaauacaca

SEQ ID NO: 81183 - RNA, 24 nt, Artificial Sequence
  Synthetic
aaugacaaaaccaagaaauacaca

SEQ ID NO: 81184 - RNA, 18 nt, Artificial Sequence
  Synthetic
uuccuuucugccuacaca

SEQ ID NO: 81185 - RNA, 19 nt, Artificial Sequence
  Synthetic
auuccuuucugccuacaca

SEQ ID NO: 81186 - RNA, 20 nt, Artificial Sequence
  Synthetic
cauuccuuucugccuacaca

SEQ ID NO: 81187 - RNA, 22 nt, Artificial Sequence
  Synthetic
agcauuccuuucugccuacaca

SEQ ID NO: 81188 - RNA, 23 nt, Artificial Sequence
  Synthetic
cagcauuccuuucugccuacaca

SEQ ID NO: 81189 - RNA, 24 nt, Artificial Sequence
  Synthetic
ccagcauuccuuucugccuacaca

SEQ ID NO: 81190 - RNA, 18 nt, Artificial Sequence
  Synthetic
agaggauaugucuacaca

SEQ ID NO: 81191 - RNA, 19 nt, Artificial Sequence
  Synthetic
cagaggauaugucuacaca

SEQ ID NO: 81192 - RNA, 23 nt, Artificial Sequence
  Synthetic
agggcagaggauaugucuacaca

SEQ ID NO: 81193 - RNA, 24 nt, Artificial Sequence
  Synthetic
uagggcagaggauaugucuacaca

SEQ ID NO: 81194 - RNA, 18 nt, Artificial Sequence
  Synthetic
uuugaacagaguuacaca

SEQ ID NO: 81195 - RNA, 19 nt, Artificial Sequence
  Synthetic
auuugaacagaguuacaca

SEQ ID NO: 81196 - RNA, 20 nt, Artificial Sequence
  Synthetic
aauuugaacagaguuacaca

SEQ ID NO: 81197 - RNA, 21 nt, Artificial Sequence
  Synthetic
aaauuugaacagaguuacaca

SEQ ID NO: 81198 - RNA, 22 nt, Artificial Sequence
  Synthetic
aaaauuugaacagaguuacaca

SEQ ID NO: 81199 - RNA, 23 nt, Artificial Sequence
  Synthetic
uaaaauuugaacagaguuacaca

SEQ ID NO: 81200 - RNA, 24 nt, Artificial Sequence
  Synthetic
uuaaaauuugaacagaguuacaca

SEQ ID NO: 81201 - RNA, 18 nt, Artificial Sequence
  Synthetic
acaaugguguacaccaca

SEQ ID NO: 81202 - RNA, 20 nt, Artificial Sequence
  Synthetic
ugacaaugguguacaccaca

SEQ ID NO: 81203 - RNA, 21 nt, Artificial Sequence
  Synthetic
uugacaaugguguacaccaca

SEQ ID NO: 81204 - RNA, 22 nt, Artificial Sequence
  Synthetic
auugacaaugguguacaccaca

SEQ ID NO: 81205 - RNA, 23 nt, Artificial Sequence
  Synthetic
cauugacaaugguguacaccaca

SEQ ID NO: 81206 - RNA, 24 nt, Artificial Sequence
  Synthetic
ccauugacaaugguguacaccaca

SEQ ID NO: 81207 - RNA, 18 nt, Artificial Sequence
  Synthetic
uauauucucaccaccaca

SEQ ID NO: 81208 - RNA, 20 nt, Artificial Sequence
  Synthetic
uguauauucucaccaccaca

SEQ ID NO: 81209 - RNA, 18 nt, Artificial Sequence
  Synthetic
uuaaagacauuccccaca

SEQ ID NO: 81210 - RNA, 19 nt, Artificial Sequence
  Synthetic
cuuaaagacauuccccaca

SEQ ID NO: 81211 - RNA, 20 nt, Artificial Sequence
  Synthetic
ucuuaaagacauuccccaca

SEQ ID NO: 81212 - RNA, 21 nt, Artificial Sequence
  Synthetic
uucuuaaagacauuccccaca

SEQ ID NO: 81213 - RNA, 22 nt, Artificial Sequence
  Synthetic
cuucuuaaagacauuccccaca

SEQ ID NO: 81214 - RNA, 23 nt, Artificial Sequence
  Synthetic
ccuucuuaaagacauuccccaca

SEQ ID NO: 81215 - RNA, 24 nt, Artificial Sequence
  Synthetic
cccuucuuaaagacauuccccaca

SEQ ID NO: 81216 - RNA, 18 nt, Artificial Sequence
  Synthetic
aaauuccuucugcccaca

SEQ ID NO: 81217 - RNA, 19 nt, Artificial Sequence
  Synthetic
aaaauuccuucugcccaca

SEQ ID NO: 81218 - RNA, 20 nt, Artificial Sequence
  Synthetic
uaaaauuccuucugcccaca

SEQ ID NO: 81219 - RNA, 21 nt, Artificial Sequence
  Synthetic
auaaaauuccuucugcccaca

SEQ ID NO: 81220 - RNA, 23 nt, Artificial Sequence
  Synthetic
ugauaaaauuccuucugcccaca

SEQ ID NO: 81221 - RNA, 24 nt, Artificial Sequence
  Synthetic
uugauaaaauuccuucugcccaca

SEQ ID NO: 81222 - RNA, 18 nt, Artificial Sequence
  Synthetic
uauaaucccuaucccaca

SEQ ID NO: 81223 - RNA, 19 nt, Artificial Sequence
  Synthetic
uuauaaucccuaucccaca

SEQ ID NO: 81224 - RNA, 20 nt, Artificial Sequence
  Synthetic
uuuauaaucccuaucccaca

SEQ ID NO: 81225 - RNA, 21 nt, Artificial Sequence
  Synthetic
uuuuauaaucccuaucccaca

SEQ ID NO: 81226 - RNA, 22 nt, Artificial Sequence
  Synthetic
cuuuuauaaucccuaucccaca

SEQ ID NO: 81227 - RNA, 18 nt, Artificial Sequence
  Synthetic
uuguuacuuauagccaca

SEQ ID NO: 81228 - RNA, 19 nt, Artificial Sequence
  Synthetic
uuuguuacuuauagccaca

SEQ ID NO: 81229 - RNA, 20 nt, Artificial Sequence
  Synthetic
cuuuguuacuuauagccaca

SEQ ID NO: 81230 - RNA, 21 nt, Artificial Sequence
  Synthetic
acuuuguuacuuauagccaca

SEQ ID NO: 81231 - RNA, 24 nt, Artificial Sequence
  Synthetic
uggacuuuguuacuuauagccaca

SEQ ID NO: 81232 - RNA, 19 nt, Artificial Sequence
  Synthetic
aggacuguagguagccaca

SEQ ID NO: 81233 - RNA, 20 nt, Artificial Sequence
  Synthetic
caggacuguagguagccaca

SEQ ID NO: 81234 - RNA, 22 nt, Artificial Sequence
  Synthetic
agcaggacuguagguagccaca

SEQ ID NO: 81235 - RNA, 23 nt, Artificial Sequence
  Synthetic
cagcaggacuguagguagccaca

SEQ ID NO: 81236 - RNA, 18 nt, Artificial Sequence
  Synthetic
ccauuggcuuuggccaca

SEQ ID NO: 81237 - RNA, 19 nt, Artificial Sequence
  Synthetic
uccauuggcuuuggccaca

SEQ ID NO: 81238 - RNA, 20 nt, Artificial Sequence
  Synthetic
auccauuggcuuuggccaca

SEQ ID NO: 81239 - RNA, 18 nt, Artificial Sequence
  Synthetic
ccauuuuucuccuccaca

SEQ ID NO: 81240 - RNA, 19 nt, Artificial Sequence
  Synthetic
cccauuuuucuccuccaca

SEQ ID NO: 81241 - RNA, 20 nt, Artificial Sequence
  Synthetic
ucccauuuuucuccuccaca

SEQ ID NO: 81242 - RNA, 21 nt, Artificial Sequence
  Synthetic
uucccauuuuucuccuccaca

SEQ ID NO: 81243 - RNA, 23 nt, Artificial Sequence
  Synthetic
uguucccauuuuucuccuccaca

SEQ ID NO: 81244 - RNA, 19 nt, Artificial Sequence
  Synthetic
agguugaaaguucuccaca

SEQ ID NO: 81245 - RNA, 22 nt, Artificial Sequence
  Synthetic
aggagguugaaaguucuccaca

SEQ ID NO: 81246 - RNA, 23 nt, Artificial Sequence
  Synthetic
caggagguugaaaguucuccaca

SEQ ID NO: 81247 - RNA, 18 nt, Artificial Sequence
  Synthetic
uauuagggaccguccaca

SEQ ID NO: 81248 - RNA, 19 nt, Artificial Sequence
  Synthetic
uuauuagggaccguccaca

SEQ ID NO: 81249 - RNA, 20 nt, Artificial Sequence
  Synthetic
uuuauuagggaccguccaca

SEQ ID NO: 81250 - RNA, 21 nt, Artificial Sequence
  Synthetic
auuuauuagggaccguccaca

SEQ ID NO: 81251 - RNA, 22 nt, Artificial Sequence
  Synthetic
uauuuauuagggaccguccaca

SEQ ID NO: 81252 - RNA, 23 nt, Artificial Sequence
  Synthetic
uuauuuauuagggaccguccaca

SEQ ID NO: 81253 - RNA, 24 nt, Artificial Sequence
  Synthetic
auuauuuauuagggaccguccaca

SEQ ID NO: 81254 - RNA, 21 nt, Artificial Sequence
  Synthetic
aauguggaauggaauuccaca

SEQ ID NO: 81255 - RNA, 22 nt, Artificial Sequence
  Synthetic
aaauguggaauggaauuccaca

SEQ ID NO: 81256 - RNA, 23 nt, Artificial Sequence
  Synthetic
aaaauguggaauggaauuccaca

SEQ ID NO: 81257 - RNA, 24 nt, Artificial Sequence
  Synthetic
uaaaauguggaauggaauuccaca

SEQ ID NO: 81258 - RNA, 18 nt, Artificial Sequence
  Synthetic
cuaugcuuuguuuccaca

SEQ ID NO: 81259 - RNA, 19 nt, Artificial Sequence
  Synthetic
acuaugcuuuguuuccaca

SEQ ID NO: 81260 - RNA, 20 nt, Artificial Sequence
  Synthetic
aacuaugcuuuguuuccaca

SEQ ID NO: 81261 - RNA, 21 nt, Artificial Sequence
  Synthetic
aaacuaugcuuuguuuccaca

SEQ ID NO: 81262 - RNA, 22 nt, Artificial Sequence
  Synthetic
uaaacuaugcuuuguuuccaca

SEQ ID NO: 81263 - RNA, 23 nt, Artificial Sequence
  Synthetic
cuaaacuaugcuuuguuuccaca

SEQ ID NO: 81264 - RNA, 24 nt, Artificial Sequence
  Synthetic
ccuaaacuaugcuuuguuuccaca

SEQ ID NO: 81265 - RNA, 18 nt, Artificial Sequence
  Synthetic
caaaaggauuagagcaca

SEQ ID NO: 81266 - RNA, 19 nt, Artificial Sequence
  Synthetic
ccaaaaggauuagagcaca

SEQ ID NO: 81267 - RNA, 21 nt, Artificial Sequence
  Synthetic
agccaaaaggauuagagcaca

SEQ ID NO: 81268 - RNA, 22 nt, Artificial Sequence
  Synthetic
aagccaaaaggauuagagcaca

SEQ ID NO: 81269 - RNA, 23 nt, Artificial Sequence
  Synthetic
aaagccaaaaggauuagagcaca

SEQ ID NO: 81270 - RNA, 24 nt, Artificial Sequence
  Synthetic
aaaagccaaaaggauuagagcaca

SEQ ID NO: 81271 - RNA, 18 nt, Artificial Sequence
  Synthetic
uaaacagaaaaaugcaca

SEQ ID NO: 81272 - RNA, 19 nt, Artificial Sequence
  Synthetic
uuaaacagaaaaaugcaca

SEQ ID NO: 81273 - RNA, 20 nt, Artificial Sequence
  Synthetic
auuaaacagaaaaaugcaca

SEQ ID NO: 81274 - RNA, 22 nt, Artificial Sequence
  Synthetic
agauuaaacagaaaaaugcaca

SEQ ID NO: 81275 - RNA, 23 nt, Artificial Sequence
  Synthetic
aagauuaaacagaaaaaugcaca

SEQ ID NO: 81276 - RNA, 24 nt, Artificial Sequence
  Synthetic
uaagauuaaacagaaaaaugcaca

SEQ ID NO: 81277 - RNA, 21 nt, Artificial Sequence
  Synthetic
cuaugugcuagauauugcaca

SEQ ID NO: 81278 - RNA, 22 nt, Artificial Sequence
  Synthetic
ccuaugugcuagauauugcaca

SEQ ID NO: 81279 - RNA, 23 nt, Artificial Sequence
  Synthetic
uccuaugugcuagauauugcaca

SEQ ID NO: 81280 - RNA, 24 nt, Artificial Sequence
  Synthetic
uuccuaugugcuagauauugcaca

SEQ ID NO: 81281 - RNA, 18 nt, Artificial Sequence
  Synthetic
auguuccugagaaucaca

SEQ ID NO: 81282 - RNA, 19 nt, Artificial Sequence
  Synthetic
uauguuccugagaaucaca

SEQ ID NO: 81283 - RNA, 21 nt, Artificial Sequence
  Synthetic
uguauguuccugagaaucaca

SEQ ID NO: 81284 - RNA, 22 nt, Artificial Sequence
  Synthetic
uuguauguuccugagaaucaca

SEQ ID NO: 81285 - RNA, 23 nt, Artificial Sequence
  Synthetic
uuuguauguuccugagaaucaca

SEQ ID NO: 81286 - RNA, 24 nt, Artificial Sequence
  Synthetic
uuuuguauguuccugagaaucaca

SEQ ID NO: 81287 - RNA, 18 nt, Artificial Sequence
  Synthetic
augcuaauaauaaucaca

SEQ ID NO: 81288 - RNA, 21 nt, Artificial Sequence
  Synthetic
aggaugcuaauaauaaucaca

SEQ ID NO: 81289 - RNA, 22 nt, Artificial Sequence
  Synthetic
caggaugcuaauaauaaucaca

SEQ ID NO: 81290 - RNA, 23 nt, Artificial Sequence
  Synthetic
ccaggaugcuaauaauaaucaca

SEQ ID NO: 81291 - RNA, 24 nt, Artificial Sequence
  Synthetic
uccaggaugcuaauaauaaucaca

SEQ ID NO: 81292 - RNA, 20 nt, Artificial Sequence
  Synthetic
aggagaagcuaguaaucaca

SEQ ID NO: 81293 - RNA, 21 nt, Artificial Sequence
  Synthetic
caggagaagcuaguaaucaca

SEQ ID NO: 81294 - RNA, 22 nt, Artificial Sequence
  Synthetic
ccaggagaagcuaguaaucaca

SEQ ID NO: 81295 - RNA, 23 nt, Artificial Sequence
  Synthetic
uccaggagaagcuaguaaucaca

SEQ ID NO: 81296 - RNA, 24 nt, Artificial Sequence
  Synthetic
uuccaggagaagcuaguaaucaca

SEQ ID NO: 81297 - RNA, 18 nt, Artificial Sequence
  Synthetic
aguuucaugguacucaca

SEQ ID NO: 81298 - RNA, 19 nt, Artificial Sequence
  Synthetic
aaguuucaugguacucaca

SEQ ID NO: 81299 - RNA, 20 nt, Artificial Sequence
  Synthetic
aaaguuucaugguacucaca

SEQ ID NO: 81300 - RNA, 21 nt, Artificial Sequence
  Synthetic
uaaaguuucaugguacucaca

SEQ ID NO: 81301 - RNA, 22 nt, Artificial Sequence
  Synthetic
auaaaguuucaugguacucaca

SEQ ID NO: 81302 - RNA, 24 nt, Artificial Sequence
  Synthetic
ugauaaaguuucaugguacucaca

SEQ ID NO: 81303 - RNA, 20 nt, Artificial Sequence
  Synthetic
cggugacacggugccucaca

SEQ ID NO: 81304 - RNA, 21 nt, Artificial Sequence
  Synthetic
ccggugacacggugccucaca

SEQ ID NO: 81305 - RNA, 22 nt, Artificial Sequence
  Synthetic
accggugacacggugccucaca

SEQ ID NO: 81306 - RNA, 23 nt, Artificial Sequence
  Synthetic
aaccggugacacggugccucaca

SEQ ID NO: 81307 - RNA, 24 nt, Artificial Sequence
  Synthetic
aaaccggugacacggugccucaca

SEQ ID NO: 81308 - RNA, 18 nt, Artificial Sequence
  Synthetic
uccauggccuugcucaca

SEQ ID NO: 81309 - RNA, 19 nt, Artificial Sequence
  Synthetic
auccauggccuugcucaca

SEQ ID NO: 81310 - RNA, 20 nt, Artificial Sequence
  Synthetic
cauccauggccuugcucaca

SEQ ID NO: 81311 - RNA, 22 nt, Artificial Sequence
  Synthetic
ugcauccauggccuugcucaca

SEQ ID NO: 81312 - RNA, 23 nt, Artificial Sequence
  Synthetic
uugcauccauggccuugcucaca

SEQ ID NO: 81313 - RNA, 24 nt, Artificial Sequence
  Synthetic
cuugcauccauggccuugcucaca

SEQ ID NO: 81314 - RNA, 18 nt, Artificial Sequence
  Synthetic
aaggcuugaguggucaca

SEQ ID NO: 81315 - RNA, 19 nt, Artificial Sequence
  Synthetic
uaaggcuugaguggucaca

SEQ ID NO: 81316 - RNA, 20 nt, Artificial Sequence
  Synthetic
auaaggcuugaguggucaca

SEQ ID NO: 81317 - RNA, 24 nt, Artificial Sequence
  Synthetic
agggauaaggcuugaguggucaca

SEQ ID NO: 81318 - RNA, 18 nt, Artificial Sequence
  Synthetic
agaaaagacagauucaca

SEQ ID NO: 81319 - RNA, 19 nt, Artificial Sequence
  Synthetic
uagaaaagacagauucaca

SEQ ID NO: 81320 - RNA, 20 nt, Artificial Sequence
  Synthetic
uuagaaaagacagauucaca

SEQ ID NO: 81321 - RNA, 21 nt, Artificial Sequence
  Synthetic
auuagaaaagacagauucaca

SEQ ID NO: 81322 - RNA, 22 nt, Artificial Sequence
  Synthetic
aauuagaaaagacagauucaca

SEQ ID NO: 81323 - RNA, 23 nt, Artificial Sequence
  Synthetic
caauuagaaaagacagauucaca

SEQ ID NO: 81324 - RNA, 24 nt, Artificial Sequence
  Synthetic
acaauuagaaaagacagauucaca

SEQ ID NO: 81325 - RNA, 18 nt, Artificial Sequence
  Synthetic
augaguaggauauucaca

SEQ ID NO: 81326 - RNA, 19 nt, Artificial Sequence
  Synthetic
uaugaguaggauauucaca

SEQ ID NO: 81327 - RNA, 20 nt, Artificial Sequence
  Synthetic
cuaugaguaggauauucaca

SEQ ID NO: 81328 - RNA, 21 nt, Artificial Sequence
  Synthetic
ucuaugaguaggauauucaca

SEQ ID NO: 81329 - RNA, 23 nt, Artificial Sequence
  Synthetic
ugucuaugaguaggauauucaca

SEQ ID NO: 81330 - RNA, 24 nt, Artificial Sequence
  Synthetic
cugucuaugaguaggauauucaca

SEQ ID NO: 81331 - RNA, 18 nt, Artificial Sequence
  Synthetic
augcacacacuguucaca

SEQ ID NO: 81332 - RNA, 20 nt, Artificial Sequence
  Synthetic
agaugcacacacuguucaca

SEQ ID NO: 81333 - RNA, 21 nt, Artificial Sequence
  Synthetic
cagaugcacacacuguucaca

SEQ ID NO: 81334 - RNA, 22 nt, Artificial Sequence
  Synthetic
acagaugcacacacuguucaca

SEQ ID NO: 81335 - RNA, 23 nt, Artificial Sequence
  Synthetic
aacagaugcacacacuguucaca

SEQ ID NO: 81336 - RNA, 24 nt, Artificial Sequence
  Synthetic
aaacagaugcacacacuguucaca

SEQ ID NO: 81337 - RNA, 18 nt, Artificial Sequence
  Synthetic
cuuacaauuaauuucaca

SEQ ID NO: 81338 - RNA, 19 nt, Artificial Sequence
  Synthetic
acuuacaauuaauuucaca

SEQ ID NO: 81339 - RNA, 20 nt, Artificial Sequence
  Synthetic
aacuuacaauuaauuucaca

SEQ ID NO: 81340 - RNA, 21 nt, Artificial Sequence
  Synthetic
uaacuuacaauuaauuucaca

SEQ ID NO: 81341 - RNA, 22 nt, Artificial Sequence
  Synthetic
cuaacuuacaauuaauuucaca

SEQ ID NO: 81342 - RNA, 23 nt, Artificial Sequence
  Synthetic
acuaacuuacaauuaauuucaca

SEQ ID NO: 81343 - RNA, 24 nt, Artificial Sequence
  Synthetic
cacuaacuuacaauuaauuucaca

SEQ ID NO: 81344 - RNA, 18 nt, Artificial Sequence
  Synthetic
uuccagccccauuucaca

SEQ ID NO: 81345 - RNA, 19 nt, Artificial Sequence
  Synthetic
uuuccagccccauuucaca

SEQ ID NO: 81346 - RNA, 20 nt, Artificial Sequence
  Synthetic
cuuuccagccccauuucaca

SEQ ID NO: 81347 - RNA, 21 nt, Artificial Sequence
  Synthetic
acuuuccagccccauuucaca

SEQ ID NO: 81348 - RNA, 19 nt, Artificial Sequence
  Synthetic
agagaaggaugauuucaca

SEQ ID NO: 81349 - RNA, 22 nt, Artificial Sequence
  Synthetic
aggagagaaggaugauuucaca

SEQ ID NO: 81350 - RNA, 23 nt, Artificial Sequence
  Synthetic
caggagagaaggaugauuucaca

SEQ ID NO: 81351 - RNA, 18 nt, Artificial Sequence
  Synthetic
auaugaccuuauuucaca

SEQ ID NO: 81352 - RNA, 20 nt, Artificial Sequence
  Synthetic
agauaugaccuuauuucaca

SEQ ID NO: 81353 - RNA, 21 nt, Artificial Sequence
  Synthetic
cagauaugaccuuauuucaca

SEQ ID NO: 81354 - RNA, 22 nt, Artificial Sequence
  Synthetic
ucagauaugaccuuauuucaca

SEQ ID NO: 81355 - RNA, 23 nt, Artificial Sequence
  Synthetic
uucagauaugaccuuauuucaca

SEQ ID NO: 81356 - RNA, 24 nt, Artificial Sequence
  Synthetic
auucagauaugaccuuauuucaca

SEQ ID NO: 81357 - RNA, 18 nt, Artificial Sequence
  Synthetic
ucaucuaagacuuucaca

SEQ ID NO: 81358 - RNA, 19 nt, Artificial Sequence
  Synthetic
aucaucuaagacuuucaca

SEQ ID NO: 81359 - RNA, 20 nt, Artificial Sequence
  Synthetic
caucaucuaagacuuucaca

SEQ ID NO: 81360 - RNA, 21 nt, Artificial Sequence
  Synthetic
ucaucaucuaagacuuucaca

SEQ ID NO: 81361 - RNA, 22 nt, Artificial Sequence
  Synthetic
uucaucaucuaagacuuucaca

SEQ ID NO: 81362 - RNA, 23 nt, Artificial Sequence
  Synthetic
auucaucaucuaagacuuucaca

SEQ ID NO: 81363 - RNA, 18 nt, Artificial Sequence
  Synthetic
ucacgggaugcuuucaca

SEQ ID NO: 81364 - RNA, 19 nt, Artificial Sequence
  Synthetic
aucacgggaugcuuucaca

SEQ ID NO: 81365 - RNA, 20 nt, Artificial Sequence
  Synthetic
aaucacgggaugcuuucaca

SEQ ID NO: 81366 - RNA, 21 nt, Artificial Sequence
  Synthetic
aaaucacgggaugcuuucaca

SEQ ID NO: 81367 - RNA, 22 nt, Artificial Sequence
  Synthetic
aaaaucacgggaugcuuucaca

SEQ ID NO: 81368 - RNA, 24 nt, Artificial Sequence
  Synthetic
agaaaaucacgggaugcuuucaca

SEQ ID NO: 81369 - RNA, 21 nt, Artificial Sequence
  Synthetic
auguuaaaaaagaaaaagaca

SEQ ID NO: 81370 - RNA, 23 nt, Artificial Sequence
  Synthetic
agauguuaaaaaagaaaaagaca

SEQ ID NO: 81371 - RNA, 24 nt, Artificial Sequence
  Synthetic
aagauguuaaaaaagaaaaagaca

SEQ ID NO: 81372 - RNA, 18 nt, Artificial Sequence
  Synthetic
uagccuuuaagaaagaca

SEQ ID NO: 81373 - RNA, 19 nt, Artificial Sequence
  Synthetic
uuagccuuuaagaaagaca

SEQ ID NO: 81374 - RNA, 20 nt, Artificial Sequence
  Synthetic
cuuagccuuuaagaaagaca

SEQ ID NO: 81375 - RNA, 21 nt, Artificial Sequence
  Synthetic
acuuagccuuuaagaaagaca

SEQ ID NO: 81376 - RNA, 22 nt, Artificial Sequence
  Synthetic
cacuuagccuuuaagaaagaca

SEQ ID NO: 81377 - RNA, 23 nt, Artificial Sequence
  Synthetic
ucacuuagccuuuaagaaagaca

SEQ ID NO: 81378 - RNA, 24 nt, Artificial Sequence
  Synthetic
uucacuuagccuuuaagaaagaca

SEQ ID NO: 81379 - RNA, 19 nt, Artificial Sequence
  Synthetic
agucuauuaauuaaagaca

SEQ ID NO: 81380 - RNA, 22 nt, Artificial Sequence
  Synthetic
uggagucuauuaauuaaagaca

SEQ ID NO: 81381 - RNA, 23 nt, Artificial Sequence
  Synthetic
auggagucuauuaauuaaagaca

SEQ ID NO: 81382 - RNA, 24 nt, Artificial Sequence
  Synthetic
aauggagucuauuaauuaaagaca

SEQ ID NO: 81383 - RNA, 18 nt, Artificial Sequence
  Synthetic
uuuugaguagagaagaca

SEQ ID NO: 81384 - RNA, 19 nt, Artificial Sequence
  Synthetic
uuuuugaguagagaagaca

SEQ ID NO: 81385 - RNA, 20 nt, Artificial Sequence
  Synthetic
cuuuuugaguagagaagaca

SEQ ID NO: 81386 - RNA, 21 nt, Artificial Sequence
  Synthetic
acuuuuugaguagagaagaca

SEQ ID NO: 81387 - RNA, 22 nt, Artificial Sequence
  Synthetic
cacuuuuugaguagagaagaca

SEQ ID NO: 81388 - RNA, 23 nt, Artificial Sequence
  Synthetic
acacuuuuugaguagagaagaca

SEQ ID NO: 81389 - RNA, 24 nt, Artificial Sequence
  Synthetic
aacacuuuuugaguagagaagaca

SEQ ID NO: 81390 - RNA, 18 nt, Artificial Sequence
  Synthetic
uaagcagauucgaagaca

SEQ ID NO: 81391 - RNA, 19 nt, Artificial Sequence
  Synthetic
auaagcagauucgaagaca

SEQ ID NO: 81392 - RNA, 20 nt, Artificial Sequence
  Synthetic
uauaagcagauucgaagaca

SEQ ID NO: 81393 - RNA, 21 nt, Artificial Sequence
  Synthetic
cuauaagcagauucgaagaca

SEQ ID NO: 81394 - RNA, 22 nt, Artificial Sequence
  Synthetic
ccuauaagcagauucgaagaca

SEQ ID NO: 81395 - RNA, 23 nt, Artificial Sequence
  Synthetic
cccuauaagcagauucgaagaca

SEQ ID NO: 81396 - RNA, 24 nt, Artificial Sequence
  Synthetic
ccccuauaagcagauucgaagaca

SEQ ID NO: 81397 - RNA, 21 nt, Artificial Sequence
  Synthetic
augaggaaaaggaggaagaca

SEQ ID NO: 81398 - RNA, 22 nt, Artificial Sequence
  Synthetic
uaugaggaaaaggaggaagaca

SEQ ID NO: 81399 - RNA, 24 nt, Artificial Sequence
  Synthetic
uguaugaggaaaaggaggaagaca

SEQ ID NO: 81400 - RNA, 18 nt, Artificial Sequence
  Synthetic
ccucaugauuuuaagaca

SEQ ID NO: 81401 - RNA, 19 nt, Artificial Sequence
  Synthetic
uccucaugauuuuaagaca

SEQ ID NO: 81402 - RNA, 20 nt, Artificial Sequence
  Synthetic
uuccucaugauuuuaagaca

SEQ ID NO: 81403 - RNA, 21 nt, Artificial Sequence
  Synthetic
uuuccucaugauuuuaagaca

SEQ ID NO: 81404 - RNA, 22 nt, Artificial Sequence
  Synthetic
uuuuccucaugauuuuaagaca

SEQ ID NO: 81405 - RNA, 23 nt, Artificial Sequence
  Synthetic
auuuuccucaugauuuuaagaca

SEQ ID NO: 81406 - RNA, 24 nt, Artificial Sequence
  Synthetic
uauuuuccucaugauuuuaagaca

SEQ ID NO: 81407 - RNA, 18 nt, Artificial Sequence
  Synthetic
uuaacgcaggaacagaca

SEQ ID NO: 81408 - RNA, 20 nt, Artificial Sequence
  Synthetic
cguuaacgcaggaacagaca

SEQ ID NO: 81409 - RNA, 21 nt, Artificial Sequence
  Synthetic
acguuaacgcaggaacagaca

SEQ ID NO: 81410 - RNA, 22 nt, Artificial Sequence
  Synthetic
cacguuaacgcaggaacagaca

SEQ ID NO: 81411 - RNA, 24 nt, Artificial Sequence
  Synthetic
agcacguuaacgcaggaacagaca

SEQ ID NO: 81412 - RNA, 18 nt, Artificial Sequence
  Synthetic
aaguaagguagacagaca

SEQ ID NO: 81413 - RNA, 19 nt, Artificial Sequence
  Synthetic
caaguaagguagacagaca

SEQ ID NO: 81414 - RNA, 20 nt, Artificial Sequence
  Synthetic
acaaguaagguagacagaca

SEQ ID NO: 81415 - RNA, 21 nt, Artificial Sequence
  Synthetic
aacaaguaagguagacagaca

SEQ ID NO: 81416 - RNA, 23 nt, Artificial Sequence
  Synthetic
ugaacaaguaagguagacagaca

SEQ ID NO: 81417 - RNA, 24 nt, Artificial Sequence
  Synthetic
uugaacaaguaagguagacagaca

SEQ ID NO: 81418 - RNA, 21 nt, Artificial Sequence
  Synthetic
uuguggaaaggagaagagaca

SEQ ID NO: 81419 - RNA, 22 nt, Artificial Sequence
  Synthetic
auuguggaaaggagaagagaca

SEQ ID NO: 81420 - RNA, 23 nt, Artificial Sequence
  Synthetic
cauuguggaaaggagaagagaca

SEQ ID NO: 81421 - RNA, 24 nt, Artificial Sequence
  Synthetic
ucauuguggaaaggagaagagaca

SEQ ID NO: 81422 - RNA, 19 nt, Artificial Sequence
  Synthetic
aggauuaucaucagagaca

SEQ ID NO: 81423 - RNA, 20 nt, Artificial Sequence
  Synthetic
aaggauuaucaucagagaca

SEQ ID NO: 81424 - RNA, 22 nt, Artificial Sequence
  Synthetic
agaaggauuaucaucagagaca

SEQ ID NO: 81425 - RNA, 23 nt, Artificial Sequence
  Synthetic
uagaaggauuaucaucagagaca

SEQ ID NO: 81426 - RNA, 24 nt, Artificial Sequence
  Synthetic
cuagaaggauuaucaucagagaca

SEQ ID NO: 81427 - RNA, 18 nt, Artificial Sequence
  Synthetic
cuucacacuuccgagaca

SEQ ID NO: 81428 - RNA, 19 nt, Artificial Sequence
  Synthetic
ccuucacacuuccgagaca

SEQ ID NO: 81429 - RNA, 20 nt, Artificial Sequence
  Synthetic
accuucacacuuccgagaca

SEQ ID NO: 81430 - RNA, 21 nt, Artificial Sequence
  Synthetic
aaccuucacacuuccgagaca

SEQ ID NO: 81431 - RNA, 22 nt, Artificial Sequence
  Synthetic
caaccuucacacuuccgagaca

SEQ ID NO: 81432 - RNA, 23 nt, Artificial Sequence
  Synthetic
ucaaccuucacacuuccgagaca

SEQ ID NO: 81433 - RNA, 24 nt, Artificial Sequence
  Synthetic
uucaaccuucacacuuccgagaca

SEQ ID NO: 81434 - RNA, 21 nt, Artificial Sequence
  Synthetic
auauuaaaaaaaaaugagaca

SEQ ID NO: 81435 - RNA, 22 nt, Artificial Sequence
  Synthetic
aauauuaaaaaaaaaugagaca

SEQ ID NO: 81436 - RNA, 24 nt, Artificial Sequence
  Synthetic
agaauauuaaaaaaaaaugagaca

SEQ ID NO: 81437 - RNA, 21 nt, Artificial Sequence
  Synthetic
aaaaacaaugauacugagaca

SEQ ID NO: 81438 - RNA, 23 nt, Artificial Sequence
  Synthetic
ugaaaaacaaugauacugagaca

SEQ ID NO: 81439 - RNA, 24 nt, Artificial Sequence
  Synthetic
augaaaaacaaugauacugagaca

SEQ ID NO: 81440 - RNA, 18 nt, Artificial Sequence
  Synthetic
auuaucguugaauagaca

SEQ ID NO: 81441 - RNA, 23 nt, Artificial Sequence
  Synthetic
uggggauuaucguugaauagaca

SEQ ID NO: 81442 - RNA, 18 nt, Artificial Sequence
  Synthetic
aaacugagguaauagaca

SEQ ID NO: 81443 - RNA, 19 nt, Artificial Sequence
  Synthetic
uaaacugagguaauagaca

SEQ ID NO: 81444 - RNA, 20 nt, Artificial Sequence
  Synthetic
cuaaacugagguaauagaca

SEQ ID NO: 81445 - RNA, 21 nt, Artificial Sequence
  Synthetic
ucuaaacugagguaauagaca

SEQ ID NO: 81446 - RNA, 22 nt, Artificial Sequence
  Synthetic
aucuaaacugagguaauagaca

SEQ ID NO: 81447 - RNA, 24 nt, Artificial Sequence
  Synthetic
agaucuaaacugagguaauagaca

SEQ ID NO: 81448 - RNA, 18 nt, Artificial Sequence
  Synthetic
cgugacaagagcuagaca

SEQ ID NO: 81449 - RNA, 19 nt, Artificial Sequence
  Synthetic
acgugacaagagcuagaca

SEQ ID NO: 81450 - RNA, 20 nt, Artificial Sequence
  Synthetic
uacgugacaagagcuagaca

SEQ ID NO: 81451 - RNA, 21 nt, Artificial Sequence
  Synthetic
uuacgugacaagagcuagaca

SEQ ID NO: 81452 - RNA, 22 nt, Artificial Sequence
  Synthetic
auuacgugacaagagcuagaca

SEQ ID NO: 81453 - RNA, 23 nt, Artificial Sequence
  Synthetic
aauuacgugacaagagcuagaca

SEQ ID NO: 81454 - RNA, 24 nt, Artificial Sequence
  Synthetic
uaauuacgugacaagagcuagaca

SEQ ID NO: 81455 - RNA, 18 nt, Artificial Sequence
  Synthetic
auugauaauugguagaca

SEQ ID NO: 81456 - RNA, 19 nt, Artificial Sequence
  Synthetic
cauugauaauugguagaca

SEQ ID NO: 81457 - RNA, 20 nt, Artificial Sequence
  Synthetic
ucauugauaauugguagaca

SEQ ID NO: 81458 - RNA, 21 nt, Artificial Sequence
  Synthetic
aucauugauaauugguagaca

SEQ ID NO: 81459 - RNA, 22 nt, Artificial Sequence
  Synthetic
caucauugauaauugguagaca

SEQ ID NO: 81460 - RNA, 23 nt, Artificial Sequence
  Synthetic
acaucauugauaauugguagaca

SEQ ID NO: 81461 - RNA, 24 nt, Artificial Sequence
  Synthetic
cacaucauugauaauugguagaca

SEQ ID NO: 81462 - RNA, 18 nt, Artificial Sequence
  Synthetic
aacaugaaagguuagaca

SEQ ID NO: 81463 - RNA, 19 nt, Artificial Sequence
  Synthetic
aaacaugaaagguuagaca

SEQ ID NO: 81464 - RNA, 21 nt, Artificial Sequence
  Synthetic
agaaacaugaaagguuagaca

SEQ ID NO: 81465 - RNA, 23 nt, Artificial Sequence
  Synthetic
agagaaacaugaaagguuagaca

SEQ ID NO: 81466 - RNA, 24 nt, Artificial Sequence
  Synthetic
aagagaaacaugaaagguuagaca

SEQ ID NO: 81467 - RNA, 18 nt, Artificial Sequence
  Synthetic
uacuuuaaauguuagaca

SEQ ID NO: 81468 - RNA, 19 nt, Artificial Sequence
  Synthetic
uuacuuuaaauguuagaca

SEQ ID NO: 81469 - RNA, 20 nt, Artificial Sequence
  Synthetic
cuuacuuuaaauguuagaca

SEQ ID NO: 81470 - RNA, 21 nt, Artificial Sequence
  Synthetic
ccuuacuuuaaauguuagaca

SEQ ID NO: 81471 - RNA, 22 nt, Artificial Sequence
  Synthetic
cccuuacuuuaaauguuagaca

SEQ ID NO: 81472 - RNA, 23 nt, Artificial Sequence
  Synthetic
acccuuacuuuaaauguuagaca

SEQ ID NO: 81473 - RNA, 24 nt, Artificial Sequence
  Synthetic
aacccuuacuuuaaauguuagaca

SEQ ID NO: 81474 - RNA, 18 nt, Artificial Sequence
  Synthetic
aaauuuuuaauaccgaca

SEQ ID NO: 81475 - RNA, 19 nt, Artificial Sequence
  Synthetic
uaaauuuuuaauaccgaca

SEQ ID NO: 81476 - RNA, 20 nt, Artificial Sequence
  Synthetic
auaaauuuuuaauaccgaca

SEQ ID NO: 81477 - RNA, 21 nt, Artificial Sequence
  Synthetic
uauaaauuuuuaauaccgaca

SEQ ID NO: 81478 - RNA, 22 nt, Artificial Sequence
  Synthetic
cuauaaauuuuuaauaccgaca

SEQ ID NO: 81479 - RNA, 23 nt, Artificial Sequence
  Synthetic
ucuauaaauuuuuaauaccgaca

SEQ ID NO: 81480 - RNA, 24 nt, Artificial Sequence
  Synthetic
aucuauaaauuuuuaauaccgaca

SEQ ID NO: 81481 - RNA, 18 nt, Artificial Sequence
  Synthetic
cucuuucuuuccucgaca

SEQ ID NO: 81482 - RNA, 19 nt, Artificial Sequence
  Synthetic
ccucuuucuuuccucgaca

SEQ ID NO: 81483 - RNA, 20 nt, Artificial Sequence
  Synthetic
accucuuucuuuccucgaca

SEQ ID NO: 81484 - RNA, 21 nt, Artificial Sequence
  Synthetic
uaccucuuucuuuccucgaca

SEQ ID NO: 81485 - RNA, 23 nt, Artificial Sequence
  Synthetic
aguaccucuuucuuuccucgaca

SEQ ID NO: 81486 - RNA, 24 nt, Artificial Sequence
  Synthetic
caguaccucuuucuuuccucgaca

SEQ ID NO: 81487 - RNA, 18 nt, Artificial Sequence
  Synthetic
auaaccauagaaaggaca

SEQ ID NO: 81488 - RNA, 19 nt, Artificial Sequence
  Synthetic
uauaaccauagaaaggaca

SEQ ID NO: 81489 - RNA, 20 nt, Artificial Sequence
  Synthetic
uuauaaccauagaaaggaca

SEQ ID NO: 81490 - RNA, 21 nt, Artificial Sequence
  Synthetic
auuauaaccauagaaaggaca

SEQ ID NO: 81491 - RNA, 23 nt, Artificial Sequence
  Synthetic
agauuauaaccauagaaaggaca

SEQ ID NO: 81492 - RNA, 18 nt, Artificial Sequence
  Synthetic
agaaggaauuucaggaca

SEQ ID NO: 81493 - RNA, 22 nt, Artificial Sequence
  Synthetic
ugggagaaggaauuucaggaca

SEQ ID NO: 81494 - RNA, 23 nt, Artificial Sequence
  Synthetic
augggagaaggaauuucaggaca

SEQ ID NO: 81495 - RNA, 24 nt, Artificial Sequence
  Synthetic
aaugggagaaggaauuucaggaca

SEQ ID NO: 81496 - RNA, 19 nt, Artificial Sequence
  Synthetic
ugguuuaugagcagggaca

SEQ ID NO: 81497 - RNA, 20 nt, Artificial Sequence
  Synthetic
uugguuuaugagcagggaca

SEQ ID NO: 81498 - RNA, 21 nt, Artificial Sequence
  Synthetic
uuugguuuaugagcagggaca

SEQ ID NO: 81499 - RNA, 22 nt, Artificial Sequence
  Synthetic
auuugguuuaugagcagggaca

SEQ ID NO: 81500 - RNA, 23 nt, Artificial Sequence
  Synthetic
aauuugguuuaugagcagggaca

SEQ ID NO: 81501 - RNA, 18 nt, Artificial Sequence
  Synthetic
ugcuuucuccuggggaca

SEQ ID NO: 81502 - RNA, 19 nt, Artificial Sequence
  Synthetic
uugcuuucuccuggggaca

SEQ ID NO: 81503 - RNA, 20 nt, Artificial Sequence
  Synthetic
cuugcuuucuccuggggaca

SEQ ID NO: 81504 - RNA, 21 nt, Artificial Sequence
  Synthetic
ucuugcuuucuccuggggaca

SEQ ID NO: 81505 - RNA, 22 nt, Artificial Sequence
  Synthetic
aucuugcuuucuccuggggaca

SEQ ID NO: 81506 - RNA, 23 nt, Artificial Sequence
  Synthetic
uaucuugcuuucuccuggggaca

SEQ ID NO: 81507 - RNA, 24 nt, Artificial Sequence
  Synthetic
cuaucuugcuuucuccuggggaca

SEQ ID NO: 81508 - RNA, 18 nt, Artificial Sequence
  Synthetic
uuaaucuugccugggaca

SEQ ID NO: 81509 - RNA, 19 nt, Artificial Sequence
  Synthetic
uuuaaucuugccugggaca

SEQ ID NO: 81510 - RNA, 20 nt, Artificial Sequence
  Synthetic
uuuuaaucuugccugggaca

SEQ ID NO: 81511 - RNA, 21 nt, Artificial Sequence
  Synthetic
uuuuuaaucuugccugggaca

SEQ ID NO: 81512 - RNA, 22 nt, Artificial Sequence
  Synthetic
cuuuuuaaucuugccugggaca

SEQ ID NO: 81513 - RNA, 23 nt, Artificial Sequence
  Synthetic
ucuuuuuaaucuugccugggaca

SEQ ID NO: 81514 - RNA, 18 nt, Artificial Sequence
  Synthetic
uuuucagacacauggaca

SEQ ID NO: 81515 - RNA, 19 nt, Artificial Sequence
  Synthetic
auuuucagacacauggaca

SEQ ID NO: 81516 - RNA, 20 nt, Artificial Sequence
  Synthetic
aauuuucagacacauggaca

SEQ ID NO: 81517 - RNA, 21 nt, Artificial Sequence
  Synthetic
aaauuuucagacacauggaca

SEQ ID NO: 81518 - RNA, 22 nt, Artificial Sequence
  Synthetic
aaaauuuucagacacauggaca

SEQ ID NO: 81519 - RNA, 23 nt, Artificial Sequence
  Synthetic
aaaaauuuucagacacauggaca

SEQ ID NO: 81520 - RNA, 24 nt, Artificial Sequence
  Synthetic
uaaaaauuuucagacacauggaca

SEQ ID NO: 81521 - RNA, 18 nt, Artificial Sequence
  Synthetic
aaacacacugacuggaca

SEQ ID NO: 81522 - RNA, 19 nt, Artificial Sequence
  Synthetic
uaaacacacugacuggaca

SEQ ID NO: 81523 - RNA, 20 nt, Artificial Sequence
  Synthetic
auaaacacacugacuggaca

SEQ ID NO: 81524 - RNA, 21 nt, Artificial Sequence
  Synthetic
cauaaacacacugacuggaca

SEQ ID NO: 81525 - RNA, 24 nt, Artificial Sequence
  Synthetic
uggcauaaacacacugacuggaca

SEQ ID NO: 81526 - RNA, 19 nt, Artificial Sequence
  Synthetic
uggguagccaaucuggaca

SEQ ID NO: 81527 - RNA, 21 nt, Artificial Sequence
  Synthetic
aguggguagccaaucuggaca

SEQ ID NO: 81528 - RNA, 22 nt, Artificial Sequence
  Synthetic
caguggguagccaaucuggaca

SEQ ID NO: 81529 - RNA, 23 nt, Artificial Sequence
  Synthetic
ucaguggguagccaaucuggaca

SEQ ID NO: 81530 - RNA, 24 nt, Artificial Sequence
  Synthetic
cucaguggguagccaaucuggaca

SEQ ID NO: 81531 - RNA, 21 nt, Artificial Sequence
  Synthetic
uacugacaaugcuucuggaca

SEQ ID NO: 81532 - RNA, 22 nt, Artificial Sequence
  Synthetic
uuacugacaaugcuucuggaca

SEQ ID NO: 81533 - RNA, 24 nt, Artificial Sequence
  Synthetic
cguuacugacaaugcuucuggaca

SEQ ID NO: 81534 - RNA, 18 nt, Artificial Sequence
  Synthetic
cacacacagucuuggaca

SEQ ID NO: 81535 - RNA, 19 nt, Artificial Sequence
  Synthetic
acacacacagucuuggaca

SEQ ID NO: 81536 - RNA, 21 nt, Artificial Sequence
  Synthetic
ugacacacacagucuuggaca

SEQ ID NO: 81537 - RNA, 23 nt, Artificial Sequence
  Synthetic
ugugacacacacagucuuggaca

SEQ ID NO: 81538 - RNA, 24 nt, Artificial Sequence
  Synthetic
augugacacacacagucuuggaca

SEQ ID NO: 81539 - RNA, 18 nt, Artificial Sequence
  Synthetic
uuacaguguucuuggaca

SEQ ID NO: 81540 - RNA, 19 nt, Artificial Sequence
  Synthetic
uuuacaguguucuuggaca

SEQ ID NO: 81541 - RNA, 20 nt, Artificial Sequence
  Synthetic
auuuacaguguucuuggaca

SEQ ID NO: 81542 - RNA, 21 nt, Artificial Sequence
  Synthetic
uauuuacaguguucuuggaca

SEQ ID NO: 81543 - RNA, 23 nt, Artificial Sequence
  Synthetic
uguauuuacaguguucuuggaca

SEQ ID NO: 81544 - RNA, 24 nt, Artificial Sequence
  Synthetic
cuguauuuacaguguucuuggaca

SEQ ID NO: 81545 - RNA, 18 nt, Artificial Sequence
  Synthetic
ucuguaugcucaaugaca

SEQ ID NO: 81546 - RNA, 19 nt, Artificial Sequence
  Synthetic
uucuguaugcucaaugaca

SEQ ID NO: 81547 - RNA, 20 nt, Artificial Sequence
  Synthetic
cuucuguaugcucaaugaca

SEQ ID NO: 81548 - RNA, 21 nt, Artificial Sequence
  Synthetic
acuucuguaugcucaaugaca

SEQ ID NO: 81549 - RNA, 22 nt, Artificial Sequence
  Synthetic
uacuucuguaugcucaaugaca

SEQ ID NO: 81550 - RNA, 23 nt, Artificial Sequence
  Synthetic
uuacuucuguaugcucaaugaca

SEQ ID NO: 81551 - RNA, 24 nt, Artificial Sequence
  Synthetic
uuuacuucuguaugcucaaugaca

SEQ ID NO: 81552 - RNA, 19 nt, Artificial Sequence
  Synthetic
aguuuugugugccaugaca

SEQ ID NO: 81553 - RNA, 21 nt, Artificial Sequence
  Synthetic
agaguuuugugugccaugaca

SEQ ID NO: 81554 - RNA, 22 nt, Artificial Sequence
  Synthetic
aagaguuuugugugccaugaca

SEQ ID NO: 81555 - RNA, 24 nt, Artificial Sequence
  Synthetic
ugaagaguuuugugugccaugaca

SEQ ID NO: 81556 - RNA, 18 nt, Artificial Sequence
  Synthetic
auaacucugagcaugaca

SEQ ID NO: 81557 - RNA, 19 nt, Artificial Sequence
  Synthetic
cauaacucugagcaugaca

SEQ ID NO: 81558 - RNA, 20 nt, Artificial Sequence
  Synthetic
ucauaacucugagcaugaca

SEQ ID NO: 81559 - RNA, 22 nt, Artificial Sequence
  Synthetic
ugucauaacucugagcaugaca

SEQ ID NO: 81560 - RNA, 23 nt, Artificial Sequence
  Synthetic
cugucauaacucugagcaugaca

SEQ ID NO: 81561 - RNA, 24 nt, Artificial Sequence
  Synthetic
ucugucauaacucugagcaugaca

SEQ ID NO: 81562 - RNA, 18 nt, Artificial Sequence
  Synthetic
cugacauauaggaugaca

SEQ ID NO: 81563 - RNA, 19 nt, Artificial Sequence
  Synthetic
ucugacauauaggaugaca

SEQ ID NO: 81564 - RNA, 20 nt, Artificial Sequence
  Synthetic
uucugacauauaggaugaca

SEQ ID NO: 81565 - RNA, 21 nt, Artificial Sequence
  Synthetic
uuucugacauauaggaugaca

SEQ ID NO: 81566 - RNA, 22 nt, Artificial Sequence
  Synthetic
cuuucugacauauaggaugaca

SEQ ID NO: 81567 - RNA, 23 nt, Artificial Sequence
  Synthetic
ucuuucugacauauaggaugaca

SEQ ID NO: 81568 - RNA, 24 nt, Artificial Sequence
  Synthetic
uucuuucugacauauaggaugaca

SEQ ID NO: 81569 - RNA, 18 nt, Artificial Sequence
  Synthetic
auguugcugaugaugaca

SEQ ID NO: 81570 - RNA, 19 nt, Artificial Sequence
  Synthetic
aauguugcugaugaugaca

SEQ ID NO: 81571 - RNA, 20 nt, Artificial Sequence
  Synthetic
aaauguugcugaugaugaca

SEQ ID NO: 81572 - RNA, 21 nt, Artificial Sequence
  Synthetic
aaaauguugcugaugaugaca

SEQ ID NO: 81573 - RNA, 22 nt, Artificial Sequence
  Synthetic
uaaaauguugcugaugaugaca

SEQ ID NO: 81574 - RNA, 23 nt, Artificial Sequence
  Synthetic
uuaaaauguugcugaugaugaca

SEQ ID NO: 81575 - RNA, 24 nt, Artificial Sequence
  Synthetic
uuuaaaauguugcugaugaugaca

SEQ ID NO: 81576 - RNA, 19 nt, Artificial Sequence
  Synthetic
ugauaacgaaaauaugaca

SEQ ID NO: 81577 - RNA, 20 nt, Artificial Sequence
  Synthetic
cugauaacgaaaauaugaca

SEQ ID NO: 81578 - RNA, 21 nt, Artificial Sequence
  Synthetic
ucugauaacgaaaauaugaca

SEQ ID NO: 81579 - RNA, 22 nt, Artificial Sequence
  Synthetic
uucugauaacgaaaauaugaca

SEQ ID NO: 81580 - RNA, 23 nt, Artificial Sequence
  Synthetic
auucugauaacgaaaauaugaca

SEQ ID NO: 81581 - RNA, 24 nt, Artificial Sequence
  Synthetic
aauucugauaacgaaaauaugaca

SEQ ID NO: 81582 - RNA, 18 nt, Artificial Sequence
  Synthetic
augaccaucaauaugaca

SEQ ID NO: 81583 - RNA, 19 nt, Artificial Sequence
  Synthetic
aaugaccaucaauaugaca

SEQ ID NO: 81584 - RNA, 20 nt, Artificial Sequence
  Synthetic
uaaugaccaucaauaugaca

SEQ ID NO: 81585 - RNA, 21 nt, Artificial Sequence
  Synthetic
auaaugaccaucaauaugaca

SEQ ID NO: 81586 - RNA, 22 nt, Artificial Sequence
  Synthetic
aauaaugaccaucaauaugaca

SEQ ID NO: 81587 - RNA, 23 nt, Artificial Sequence
  Synthetic
aaauaaugaccaucaauaugaca

SEQ ID NO: 81588 - RNA, 24 nt, Artificial Sequence
  Synthetic
aaaauaaugaccaucaauaugaca

SEQ ID NO: 81589 - RNA, 18 nt, Artificial Sequence
  Synthetic
auuugaaaagcuaugaca

SEQ ID NO: 81590 - RNA, 19 nt, Artificial Sequence
  Synthetic
aauuugaaaagcuaugaca

SEQ ID NO: 81591 - RNA, 20 nt, Artificial Sequence
  Synthetic
aaauuugaaaagcuaugaca

SEQ ID NO: 81592 - RNA, 21 nt, Artificial Sequence
  Synthetic
uaaauuugaaaagcuaugaca

SEQ ID NO: 81593 - RNA, 22 nt, Artificial Sequence
  Synthetic
auaaauuugaaaagcuaugaca

SEQ ID NO: 81594 - RNA, 23 nt, Artificial Sequence
  Synthetic
uauaaauuugaaaagcuaugaca

SEQ ID NO: 81595 - RNA, 24 nt, Artificial Sequence
  Synthetic
auauaaauuugaaaagcuaugaca

SEQ ID NO: 81596 - RNA, 18 nt, Artificial Sequence
  Synthetic
agcccccuaucuaugaca

SEQ ID NO: 81597 - RNA, 19 nt, Artificial Sequence
  Synthetic
uagcccccuaucuaugaca

SEQ ID NO: 81598 - RNA, 20 nt, Artificial Sequence
  Synthetic
auagcccccuaucuaugaca

SEQ ID NO: 81599 - RNA, 21 nt, Artificial Sequence
  Synthetic
aauagcccccuaucuaugaca

SEQ ID NO: 81600 - RNA, 23 nt, Artificial Sequence
  Synthetic
agaauagcccccuaucuaugaca

SEQ ID NO: 81601 - RNA, 24 nt, Artificial Sequence
  Synthetic
cagaauagcccccuaucuaugaca

SEQ ID NO: 81602 - RNA, 22 nt, Artificial Sequence
  Synthetic
aguuucucacagaaaccugaca

SEQ ID NO: 81603 - RNA, 23 nt, Artificial Sequence
  Synthetic
caguuucucacagaaaccugaca

SEQ ID NO: 81604 - RNA, 24 nt, Artificial Sequence
  Synthetic
acaguuucucacagaaaccugaca

SEQ ID NO: 81605 - RNA, 18 nt, Artificial Sequence
  Synthetic
aaaaaucauucagugaca

SEQ ID NO: 81606 - RNA, 19 nt, Artificial Sequence
  Synthetic
aaaaaaucauucagugaca

SEQ ID NO: 81607 - RNA, 21 nt, Artificial Sequence
  Synthetic
agaaaaaaucauucagugaca

SEQ ID NO: 81608 - RNA, 22 nt, Artificial Sequence
  Synthetic
aagaaaaaaucauucagugaca

SEQ ID NO: 81609 - RNA, 23 nt, Artificial Sequence
  Synthetic
aaagaaaaaaucauucagugaca

SEQ ID NO: 81610 - RNA, 24 nt, Artificial Sequence
  Synthetic
aaaagaaaaaaucauucagugaca

SEQ ID NO: 81611 - RNA, 18 nt, Artificial Sequence
  Synthetic
auaguucaaaaggugaca

SEQ ID NO: 81612 - RNA, 19 nt, Artificial Sequence
  Synthetic
cauaguucaaaaggugaca

SEQ ID NO: 81613 - RNA, 20 nt, Artificial Sequence
  Synthetic
ucauaguucaaaaggugaca

SEQ ID NO: 81614 - RNA, 21 nt, Artificial Sequence
  Synthetic
aucauaguucaaaaggugaca

SEQ ID NO: 81615 - RNA, 22 nt, Artificial Sequence
  Synthetic
caucauaguucaaaaggugaca

SEQ ID NO: 81616 - RNA, 23 nt, Artificial Sequence
  Synthetic
ccaucauaguucaaaaggugaca

SEQ ID NO: 81617 - RNA, 24 nt, Artificial Sequence
  Synthetic
uccaucauaguucaaaaggugaca

SEQ ID NO: 81618 - RNA, 18 nt, Artificial Sequence
  Synthetic
uuauuugacauggugaca

SEQ ID NO: 81619 - RNA, 20 nt, Artificial Sequence
  Synthetic
uguuauuugacauggugaca

SEQ ID NO: 81620 - RNA, 22 nt, Artificial Sequence
  Synthetic
uguguuauuugacauggugaca

SEQ ID NO: 81621 - RNA, 23 nt, Artificial Sequence
  Synthetic
uuguguuauuugacauggugaca

SEQ ID NO: 81622 - RNA, 24 nt, Artificial Sequence
  Synthetic
uuuguguuauuugacauggugaca

SEQ ID NO: 81623 - RNA, 18 nt, Artificial Sequence
  Synthetic
cugaaaguuuaauugaca

SEQ ID NO: 81624 - RNA, 19 nt, Artificial Sequence
  Synthetic
ccugaaaguuuaauugaca

SEQ ID NO: 81625 - RNA, 20 nt, Artificial Sequence
  Synthetic
accugaaaguuuaauugaca

SEQ ID NO: 81626 - RNA, 21 nt, Artificial Sequence
  Synthetic
caccugaaaguuuaauugaca

SEQ ID NO: 81627 - RNA, 22 nt, Artificial Sequence
  Synthetic
ucaccugaaaguuuaauugaca

SEQ ID NO: 81628 - RNA, 23 nt, Artificial Sequence
  Synthetic
aucaccugaaaguuuaauugaca

SEQ ID NO: 81629 - RNA, 19 nt, Artificial Sequence
  Synthetic
cgugccaaccugauugaca

SEQ ID NO: 81630 - RNA, 20 nt, Artificial Sequence
  Synthetic
acgugccaaccugauugaca

SEQ ID NO: 81631 - RNA, 21 nt, Artificial Sequence
  Synthetic
uacgugccaaccugauugaca

SEQ ID NO: 81632 - RNA, 23 nt, Artificial Sequence
  Synthetic
aguacgugccaaccugauugaca

SEQ ID NO: 81633 - RNA, 24 nt, Artificial Sequence
  Synthetic
aaguacgugccaaccugauugaca

SEQ ID NO: 81634 - RNA, 21 nt, Artificial Sequence
  Synthetic
uuuuauuauuuucuauugaca

SEQ ID NO: 81635 - RNA, 22 nt, Artificial Sequence
  Synthetic
uuuuuauuauuuucuauugaca

SEQ ID NO: 81636 - RNA, 24 nt, Artificial Sequence
  Synthetic
uguuuuuauuauuuucuauugaca

SEQ ID NO: 81637 - RNA, 18 nt, Artificial Sequence
  Synthetic
ccagugcaugacuugaca

SEQ ID NO: 81638 - RNA, 19 nt, Artificial Sequence
  Synthetic
uccagugcaugacuugaca

SEQ ID NO: 81639 - RNA, 20 nt, Artificial Sequence
  Synthetic
auccagugcaugacuugaca

SEQ ID NO: 81640 - RNA, 21 nt, Artificial Sequence
  Synthetic
cauccagugcaugacuugaca

SEQ ID NO: 81641 - RNA, 22 nt, Artificial Sequence
  Synthetic
acauccagugcaugacuugaca

SEQ ID NO: 81642 - RNA, 23 nt, Artificial Sequence
  Synthetic
cacauccagugcaugacuugaca

SEQ ID NO: 81643 - RNA, 24 nt, Artificial Sequence
  Synthetic
ccacauccagugcaugacuugaca

SEQ ID NO: 81644 - RNA, 20 nt, Artificial Sequence
  Synthetic
ugggagccauucccuugaca

SEQ ID NO: 81645 - RNA, 21 nt, Artificial Sequence
  Synthetic
augggagccauucccuugaca

SEQ ID NO: 81646 - RNA, 22 nt, Artificial Sequence
  Synthetic
aaugggagccauucccuugaca

SEQ ID NO: 81647 - RNA, 23 nt, Artificial Sequence
  Synthetic
aaaugggagccauucccuugaca

SEQ ID NO: 81648 - RNA, 24 nt, Artificial Sequence
  Synthetic
aaaaugggagccauucccuugaca

SEQ ID NO: 81649 - RNA, 18 nt, Artificial Sequence
  Synthetic
aaaaguacuuuguugaca

SEQ ID NO: 81650 - RNA, 19 nt, Artificial Sequence
  Synthetic
caaaaguacuuuguugaca

SEQ ID NO: 81651 - RNA, 20 nt, Artificial Sequence
  Synthetic
ccaaaaguacuuuguugaca

SEQ ID NO: 81652 - RNA, 21 nt, Artificial Sequence
  Synthetic
uccaaaaguacuuuguugaca

SEQ ID NO: 81653 - RNA, 22 nt, Artificial Sequence
  Synthetic
cuccaaaaguacuuuguugaca

SEQ ID NO: 81654 - RNA, 24 nt, Artificial Sequence
  Synthetic
agcuccaaaaguacuuuguugaca

SEQ ID NO: 81655 - RNA, 18 nt, Artificial Sequence
  Synthetic
uaucucaaucauuugaca

SEQ ID NO: 81656 - RNA, 19 nt, Artificial Sequence
  Synthetic
auaucucaaucauuugaca

SEQ ID NO: 81657 - RNA, 21 nt, Artificial Sequence
  Synthetic
ugauaucucaaucauuugaca

SEQ ID NO: 81658 - RNA, 22 nt, Artificial Sequence
  Synthetic
augauaucucaaucauuugaca

SEQ ID NO: 81659 - RNA, 23 nt, Artificial Sequence
  Synthetic
aaugauaucucaaucauuugaca

SEQ ID NO: 81660 - RNA, 24 nt, Artificial Sequence
  Synthetic
caaugauaucucaaucauuugaca

SEQ ID NO: 81661 - RNA, 18 nt, Artificial Sequence
  Synthetic
aauuucaaaaguuugaca

SEQ ID NO: 81662 - RNA, 19 nt, Artificial Sequence
  Synthetic
uaauuucaaaaguuugaca

SEQ ID NO: 81663 - RNA, 20 nt, Artificial Sequence
  Synthetic
uuaauuucaaaaguuugaca

SEQ ID NO: 81664 - RNA, 21 nt, Artificial Sequence
  Synthetic
uuuaauuucaaaaguuugaca

SEQ ID NO: 81665 - RNA, 22 nt, Artificial Sequence
  Synthetic
uuuuaauuucaaaaguuugaca

SEQ ID NO: 81666 - RNA, 23 nt, Artificial Sequence
  Synthetic
uuuuuaauuucaaaaguuugaca

SEQ ID NO: 81667 - RNA, 24 nt, Artificial Sequence
  Synthetic
uuuuuuaauuucaaaaguuugaca

SEQ ID NO: 81668 - RNA, 21 nt, Artificial Sequence
  Synthetic
cuugacagaaaacaaaauaca

SEQ ID NO: 81669 - RNA, 22 nt, Artificial Sequence
  Synthetic
acuugacagaaaacaaaauaca

SEQ ID NO: 81670 - RNA, 23 nt, Artificial Sequence
  Synthetic
uacuugacagaaaacaaaauaca

SEQ ID NO: 81671 - RNA, 24 nt, Artificial Sequence
  Synthetic
uuacuugacagaaaacaaaauaca

SEQ ID NO: 81672 - RNA, 22 nt, Artificial Sequence
  Synthetic
ugauucauuuauucaaaauaca

SEQ ID NO: 81673 - RNA, 23 nt, Artificial Sequence
  Synthetic
augauucauuuauucaaaauaca

SEQ ID NO: 81674 - RNA, 24 nt, Artificial Sequence
  Synthetic
aaugauucauuuauucaaaauaca

SEQ ID NO: 81675 - RNA, 20 nt, Artificial Sequence
  Synthetic
aggguaucuagauaaauaca

SEQ ID NO: 81676 - RNA, 21 nt, Artificial Sequence
  Synthetic
uaggguaucuagauaaauaca

SEQ ID NO: 81677 - RNA, 22 nt, Artificial Sequence
  Synthetic
cuaggguaucuagauaaauaca

SEQ ID NO: 81678 - RNA, 23 nt, Artificial Sequence
  Synthetic
acuaggguaucuagauaaauaca

SEQ ID NO: 81679 - RNA, 24 nt, Artificial Sequence
  Synthetic
aacuaggguaucuagauaaauaca

SEQ ID NO: 81680 - RNA, 18 nt, Artificial Sequence
  Synthetic
agcuaaaccuuaaauaca

SEQ ID NO: 81681 - RNA, 19 nt, Artificial Sequence
  Synthetic
uagcuaaaccuuaaauaca

SEQ ID NO: 81682 - RNA, 21 nt, Artificial Sequence
  Synthetic
aguagcuaaaccuuaaauaca

SEQ ID NO: 81683 - RNA, 22 nt, Artificial Sequence
  Synthetic
aaguagcuaaaccuuaaauaca

SEQ ID NO: 81684 - RNA, 23 nt, Artificial Sequence
  Synthetic
caaguagcuaaaccuuaaauaca

SEQ ID NO: 81685 - RNA, 24 nt, Artificial Sequence
  Synthetic
acaaguagcuaaaccuuaaauaca

SEQ ID NO: 81686 - RNA, 18 nt, Artificial Sequence
  Synthetic
aaggaaagagacaauaca

SEQ ID NO: 81687 - RNA, 19 nt, Artificial Sequence
  Synthetic
caaggaaagagacaauaca

SEQ ID NO: 81688 - RNA, 20 nt, Artificial Sequence
  Synthetic
ucaaggaaagagacaauaca

SEQ ID NO: 81689 - RNA, 22 nt, Artificial Sequence
  Synthetic
agucaaggaaagagacaauaca

SEQ ID NO: 81690 - RNA, 23 nt, Artificial Sequence
  Synthetic
uagucaaggaaagagacaauaca

SEQ ID NO: 81691 - RNA, 24 nt, Artificial Sequence
  Synthetic
uuagucaaggaaagagacaauaca

SEQ ID NO: 81692 - RNA, 21 nt, Artificial Sequence
  Synthetic
uguuauauuuaaaauaauaca

SEQ ID NO: 81693 - RNA, 22 nt, Artificial Sequence
  Synthetic
cuguuauauuuaaaauaauaca

SEQ ID NO: 81694 - RNA, 23 nt, Artificial Sequence
  Synthetic
acuguuauauuuaaaauaauaca

SEQ ID NO: 81695 - RNA, 18 nt, Artificial Sequence
  Synthetic
ccacccccgggacauaca

SEQ ID NO: 81696 - RNA, 19 nt, Artificial Sequence
  Synthetic
uccacccccgggacauaca

SEQ ID NO: 81697 - RNA, 20 nt, Artificial Sequence
  Synthetic
cuccacccccgggacauaca

SEQ ID NO: 81698 - RNA, 21 nt, Artificial Sequence
  Synthetic
ccuccacccccgggacauaca

SEQ ID NO: 81699 - RNA, 22 nt, Artificial Sequence
  Synthetic
accuccacccccgggacauaca

SEQ ID NO: 81700 - RNA, 23 nt, Artificial Sequence
  Synthetic
caccuccacccccgggacauaca

SEQ ID NO: 81701 - RNA, 24 nt, Artificial Sequence
  Synthetic
ccaccuccacccccgggacauaca

SEQ ID NO: 81702 - RNA, 18 nt, Artificial Sequence
  Synthetic
agaggucuucuacauaca

SEQ ID NO: 81703 - RNA, 19 nt, Artificial Sequence
  Synthetic
uagaggucuucuacauaca

SEQ ID NO: 81704 - RNA, 20 nt, Artificial Sequence
  Synthetic
uuagaggucuucuacauaca

SEQ ID NO: 81705 - RNA, 21 nt, Artificial Sequence
  Synthetic
cuuagaggucuucuacauaca

SEQ ID NO: 81706 - RNA, 22 nt, Artificial Sequence
  Synthetic
acuuagaggucuucuacauaca

SEQ ID NO: 81707 - RNA, 23 nt, Artificial Sequence
  Synthetic
aacuuagaggucuucuacauaca

SEQ ID NO: 81708 - RNA, 18 nt, Artificial Sequence
  Synthetic
aacaaagauguacauaca

SEQ ID NO: 81709 - RNA, 19 nt, Artificial Sequence
  Synthetic
aaacaaagauguacauaca

SEQ ID NO: 81710 - RNA, 20 nt, Artificial Sequence
  Synthetic
caaacaaagauguacauaca

SEQ ID NO: 81711 - RNA, 21 nt, Artificial Sequence
  Synthetic
acaaacaaagauguacauaca

SEQ ID NO: 81712 - RNA, 22 nt, Artificial Sequence
  Synthetic
aacaaacaaagauguacauaca

SEQ ID NO: 81713 - RNA, 23 nt, Artificial Sequence
  Synthetic
aaacaaacaaagauguacauaca

SEQ ID NO: 81714 - RNA, 24 nt, Artificial Sequence
  Synthetic
uaaacaaacaaagauguacauaca

SEQ ID NO: 81715 - RNA, 18 nt, Artificial Sequence
  Synthetic
auguugguuaaugauaca

SEQ ID NO: 81716 - RNA, 19 nt, Artificial Sequence
  Synthetic
aauguugguuaaugauaca

SEQ ID NO: 81717 - RNA, 20 nt, Artificial Sequence
  Synthetic
aaauguugguuaaugauaca

SEQ ID NO: 81718 - RNA, 21 nt, Artificial Sequence
  Synthetic
uaaauguugguuaaugauaca

SEQ ID NO: 81719 - RNA, 23 nt, Artificial Sequence
  Synthetic
aguaaauguugguuaaugauaca

SEQ ID NO: 81720 - RNA, 24 nt, Artificial Sequence
  Synthetic
uaguaaauguugguuaaugauaca

SEQ ID NO: 81721 - RNA, 18 nt, Artificial Sequence
  Synthetic
cacaggaugugugauaca

SEQ ID NO: 81722 - RNA, 19 nt, Artificial Sequence
  Synthetic
ccacaggaugugugauaca

SEQ ID NO: 81723 - RNA, 22 nt, Artificial Sequence
  Synthetic
aggccacaggaugugugauaca

SEQ ID NO: 81724 - RNA, 23 nt, Artificial Sequence
  Synthetic
caggccacaggaugugugauaca

SEQ ID NO: 81725 - RNA, 24 nt, Artificial Sequence
  Synthetic
ucaggccacaggaugugugauaca

SEQ ID NO: 81726 - RNA, 18 nt, Artificial Sequence
  Synthetic
ccgacaugacuugauaca

SEQ ID NO: 81727 - RNA, 19 nt, Artificial Sequence
  Synthetic
uccgacaugacuugauaca

SEQ ID NO: 81728 - RNA, 20 nt, Artificial Sequence
  Synthetic
cuccgacaugacuugauaca

SEQ ID NO: 81729 - RNA, 21 nt, Artificial Sequence
  Synthetic
ucuccgacaugacuugauaca

SEQ ID NO: 81730 - RNA, 22 nt, Artificial Sequence
  Synthetic
aucuccgacaugacuugauaca

SEQ ID NO: 81731 - RNA, 18 nt, Artificial Sequence
  Synthetic
ucuauauguccauauaca

SEQ ID NO: 81732 - RNA, 19 nt, Artificial Sequence
  Synthetic
uucuauauguccauauaca

SEQ ID NO: 81733 - RNA, 20 nt, Artificial Sequence
  Synthetic
cuucuauauguccauauaca

SEQ ID NO: 81734 - RNA, 21 nt, Artificial Sequence
  Synthetic
ucuucuauauguccauauaca

SEQ ID NO: 81735 - RNA, 22 nt, Artificial Sequence
  Synthetic
cucuucuauauguccauauaca

SEQ ID NO: 81736 - RNA, 19 nt, Artificial Sequence
  Synthetic
uguauuuguagcauauaca

SEQ ID NO: 81737 - RNA, 20 nt, Artificial Sequence
  Synthetic
uuguauuuguagcauauaca

SEQ ID NO: 81738 - RNA, 21 nt, Artificial Sequence
  Synthetic
uuuguauuuguagcauauaca

SEQ ID NO: 81739 - RNA, 23 nt, Artificial Sequence
  Synthetic
aguuuguauuuguagcauauaca

SEQ ID NO: 81740 - RNA, 24 nt, Artificial Sequence
  Synthetic
aaguuuguauuuguagcauauaca

SEQ ID NO: 81741 - RNA, 18 nt, Artificial Sequence
  Synthetic
acgaaagauuuauauaca

SEQ ID NO: 81742 - RNA, 19 nt, Artificial Sequence
  Synthetic
cacgaaagauuuauauaca

SEQ ID NO: 81743 - RNA, 20 nt, Artificial Sequence
  Synthetic
acacgaaagauuuauauaca

SEQ ID NO: 81744 - RNA, 21 nt, Artificial Sequence
  Synthetic
uacacgaaagauuuauauaca

SEQ ID NO: 81745 - RNA, 23 nt, Artificial Sequence
  Synthetic
uguacacgaaagauuuauauaca

SEQ ID NO: 81746 - RNA, 24 nt, Artificial Sequence
  Synthetic
auguacacgaaagauuuauauaca

SEQ ID NO: 81747 - RNA, 20 nt, Artificial Sequence
  Synthetic
aggcuauauuaaaguauaca

SEQ ID NO: 81748 - RNA, 21 nt, Artificial Sequence
  Synthetic
uaggcuauauuaaaguauaca

SEQ ID NO: 81749 - RNA, 22 nt, Artificial Sequence
  Synthetic
uuaggcuauauuaaaguauaca

SEQ ID NO: 81750 - RNA, 23 nt, Artificial Sequence
  Synthetic
cuuaggcuauauuaaaguauaca

SEQ ID NO: 81751 - RNA, 24 nt, Artificial Sequence
  Synthetic
ccuuaggcuauauuaaaguauaca

SEQ ID NO: 81752 - RNA, 20 nt, Artificial Sequence
  Synthetic
aggcuaggauuuauuauaca

SEQ ID NO: 81753 - RNA, 22 nt, Artificial Sequence
  Synthetic
agaggcuaggauuuauuauaca

SEQ ID NO: 81754 - RNA, 23 nt, Artificial Sequence
  Synthetic
cagaggcuaggauuuauuauaca

SEQ ID NO: 81755 - RNA, 18 nt, Artificial Sequence
  Synthetic
ccauacuaggaaacuaca

SEQ ID NO: 81756 - RNA, 20 nt, Artificial Sequence
  Synthetic
agccauacuaggaaacuaca

SEQ ID NO: 81757 - RNA, 21 nt, Artificial Sequence
  Synthetic
uagccauacuaggaaacuaca

SEQ ID NO: 81758 - RNA, 22 nt, Artificial Sequence
  Synthetic
cuagccauacuaggaaacuaca

SEQ ID NO: 81759 - RNA, 23 nt, Artificial Sequence
  Synthetic
ucuagccauacuaggaaacuaca

SEQ ID NO: 81760 - RNA, 24 nt, Artificial Sequence
  Synthetic
aucuagccauacuaggaaacuaca

SEQ ID NO: 81761 - RNA, 18 nt, Artificial Sequence
  Synthetic
ucugcuuugacaacuaca

SEQ ID NO: 81762 - RNA, 20 nt, Artificial Sequence
  Synthetic
agucugcuuugacaacuaca

SEQ ID NO: 81763 - RNA, 23 nt, Artificial Sequence
  Synthetic
aggagucugcuuugacaacuaca

SEQ ID NO: 81764 - RNA, 24 nt, Artificial Sequence
  Synthetic
caggagucugcuuugacaacuaca

SEQ ID NO: 81765 - RNA, 21 nt, Artificial Sequence
  Synthetic
uuuccuccuuccugcacuaca

SEQ ID NO: 81766 - RNA, 22 nt, Artificial Sequence
  Synthetic
uuuuccuccuuccugcacuaca

SEQ ID NO: 81767 - RNA, 18 nt, Artificial Sequence
  Synthetic
uuaaaaauauauacuaca

SEQ ID NO: 81768 - RNA, 20 nt, Artificial Sequence
  Synthetic
uguuaaaaauauauacuaca

SEQ ID NO: 81769 - RNA, 21 nt, Artificial Sequence
  Synthetic
auguuaaaaauauauacuaca

SEQ ID NO: 81770 - RNA, 23 nt, Artificial Sequence
  Synthetic
ugauguuaaaaauauauacuaca

SEQ ID NO: 81771 - RNA, 24 nt, Artificial Sequence
  Synthetic
cugauguuaaaaauauauacuaca

SEQ ID NO: 81772 - RNA, 18 nt, Artificial Sequence
  Synthetic
uccuuuccuuuuacuaca

SEQ ID NO: 81773 - RNA, 19 nt, Artificial Sequence
  Synthetic
auccuuuccuuuuacuaca

SEQ ID NO: 81774 - RNA, 21 nt, Artificial Sequence
  Synthetic
ugauccuuuccuuuuacuaca

SEQ ID NO: 81775 - RNA, 22 nt, Artificial Sequence
  Synthetic
uugauccuuuccuuuuacuaca

SEQ ID NO: 81776 - RNA, 23 nt, Artificial Sequence
  Synthetic
cuugauccuuuccuuuuacuaca

SEQ ID NO: 81777 - RNA, 24 nt, Artificial Sequence
  Synthetic
ccuugauccuuuccuuuuacuaca

SEQ ID NO: 81778 - RNA, 18 nt, Artificial Sequence
  Synthetic
uaucugaggagaccuaca

SEQ ID NO: 81779 - RNA, 19 nt, Artificial Sequence
  Synthetic
cuaucugaggagaccuaca

SEQ ID NO: 81780 - RNA, 20 nt, Artificial Sequence
  Synthetic
ucuaucugaggagaccuaca

SEQ ID NO: 81781 - RNA, 22 nt, Artificial Sequence
  Synthetic
ugucuaucugaggagaccuaca

SEQ ID NO: 81782 - RNA, 23 nt, Artificial Sequence
  Synthetic
augucuaucugaggagaccuaca

SEQ ID NO: 81783 - RNA, 24 nt, Artificial Sequence
  Synthetic
uaugucuaucugaggagaccuaca

SEQ ID NO: 81784 - RNA, 18 nt, Artificial Sequence
  Synthetic
aucacuggguauccuaca

SEQ ID NO: 81785 - RNA, 19 nt, Artificial Sequence
  Synthetic
aaucacuggguauccuaca

SEQ ID NO: 81786 - RNA, 21 nt, Artificial Sequence
  Synthetic
ugaaucacuggguauccuaca

SEQ ID NO: 81787 - RNA, 22 nt, Artificial Sequence
  Synthetic
uugaaucacuggguauccuaca

SEQ ID NO: 81788 - RNA, 23 nt, Artificial Sequence
  Synthetic
uuugaaucacuggguauccuaca

SEQ ID NO: 81789 - RNA, 24 nt, Artificial Sequence
  Synthetic
cuuugaaucacuggguauccuaca

SEQ ID NO: 81790 - RNA, 18 nt, Artificial Sequence
  Synthetic
cucuuaguggcuccuaca

SEQ ID NO: 81791 - RNA, 19 nt, Artificial Sequence
  Synthetic
ccucuuaguggcuccuaca

SEQ ID NO: 81792 - RNA, 20 nt, Artificial Sequence
  Synthetic
uccucuuaguggcuccuaca

SEQ ID NO: 81793 - RNA, 21 nt, Artificial Sequence
  Synthetic
cuccucuuaguggcuccuaca

SEQ ID NO: 81794 - RNA, 22 nt, Artificial Sequence
  Synthetic
ucuccucuuaguggcuccuaca

SEQ ID NO: 81795 - RNA, 23 nt, Artificial Sequence
  Synthetic
uucuccucuuaguggcuccuaca

SEQ ID NO: 81796 - RNA, 24 nt, Artificial Sequence
  Synthetic
cuucuccucuuaguggcuccuaca

SEQ ID NO: 81797 - RNA, 18 nt, Artificial Sequence
  Synthetic
aaaggaagaacagcuaca

SEQ ID NO: 81798 - RNA, 19 nt, Artificial Sequence
  Synthetic
aaaaggaagaacagcuaca

SEQ ID NO: 81799 - RNA, 20 nt, Artificial Sequence
  Synthetic
uaaaaggaagaacagcuaca

SEQ ID NO: 81800 - RNA, 21 nt, Artificial Sequence
  Synthetic
auaaaaggaagaacagcuaca

SEQ ID NO: 81801 - RNA, 22 nt, Artificial Sequence
  Synthetic
cauaaaaggaagaacagcuaca

SEQ ID NO: 81802 - RNA, 23 nt, Artificial Sequence
  Synthetic
ucauaaaaggaagaacagcuaca

SEQ ID NO: 81803 - RNA, 24 nt, Artificial Sequence
  Synthetic
cucauaaaaggaagaacagcuaca

SEQ ID NO: 81804 - RNA, 18 nt, Artificial Sequence
  Synthetic
uucccuuuauuagcuaca

SEQ ID NO: 81805 - RNA, 19 nt, Artificial Sequence
  Synthetic
auucccuuuauuagcuaca

SEQ ID NO: 81806 - RNA, 20 nt, Artificial Sequence
  Synthetic
uauucccuuuauuagcuaca

SEQ ID NO: 81807 - RNA, 21 nt, Artificial Sequence
  Synthetic
auauucccuuuauuagcuaca

SEQ ID NO: 81808 - RNA, 22 nt, Artificial Sequence
  Synthetic
uauauucccuuuauuagcuaca

SEQ ID NO: 81809 - RNA, 23 nt, Artificial Sequence
  Synthetic
cuauauucccuuuauuagcuaca

SEQ ID NO: 81810 - RNA, 24 nt, Artificial Sequence
  Synthetic
ucuauauucccuuuauuagcuaca

SEQ ID NO: 81811 - RNA, 18 nt, Artificial Sequence
  Synthetic
aaucuauuuuaugcuaca

SEQ ID NO: 81812 - RNA, 19 nt, Artificial Sequence
  Synthetic
uaaucuauuuuaugcuaca

SEQ ID NO: 81813 - RNA, 20 nt, Artificial Sequence
  Synthetic
uuaaucuauuuuaugcuaca

SEQ ID NO: 81814 - RNA, 21 nt, Artificial Sequence
  Synthetic
uuuaaucuauuuuaugcuaca

SEQ ID NO: 81815 - RNA, 22 nt, Artificial Sequence
  Synthetic
auuuaaucuauuuuaugcuaca

SEQ ID NO: 81816 - RNA, 23 nt, Artificial Sequence
  Synthetic
cauuuaaucuauuuuaugcuaca

SEQ ID NO: 81817 - RNA, 24 nt, Artificial Sequence
  Synthetic
ccauuuaaucuauuuuaugcuaca

SEQ ID NO: 81818 - RNA, 18 nt, Artificial Sequence
  Synthetic
aucucccagaaaucuaca

SEQ ID NO: 81819 - RNA, 19 nt, Artificial Sequence
  Synthetic
aaucucccagaaaucuaca

SEQ ID NO: 81820 - RNA, 20 nt, Artificial Sequence
  Synthetic
caaucucccagaaaucuaca

SEQ ID NO: 81821 - RNA, 21 nt, Artificial Sequence
  Synthetic
acaaucucccagaaaucuaca

SEQ ID NO: 81822 - RNA, 22 nt, Artificial Sequence
  Synthetic
uacaaucucccagaaaucuaca

SEQ ID NO: 81823 - RNA, 23 nt, Artificial Sequence
  Synthetic
uuacaaucucccagaaaucuaca

SEQ ID NO: 81824 - RNA, 19 nt, Artificial Sequence
  Synthetic
ugaaguauagugcucuaca

SEQ ID NO: 81825 - RNA, 21 nt, Artificial Sequence
  Synthetic
ugugaaguauagugcucuaca

SEQ ID NO: 81826 - RNA, 22 nt, Artificial Sequence
  Synthetic
uugugaaguauagugcucuaca

SEQ ID NO: 81827 - RNA, 23 nt, Artificial Sequence
  Synthetic
auugugaaguauagugcucuaca

SEQ ID NO: 81828 - RNA, 24 nt, Artificial Sequence
  Synthetic
uauugugaaguauagugcucuaca

SEQ ID NO: 81829 - RNA, 18 nt, Artificial Sequence
  Synthetic
aaacaucacaggucuaca

SEQ ID NO: 81830 - RNA, 19 nt, Artificial Sequence
  Synthetic
aaaacaucacaggucuaca

SEQ ID NO: 81831 - RNA, 20 nt, Artificial Sequence
  Synthetic
aaaaacaucacaggucuaca

SEQ ID NO: 81832 - RNA, 21 nt, Artificial Sequence
  Synthetic
caaaaacaucacaggucuaca

SEQ ID NO: 81833 - RNA, 22 nt, Artificial Sequence
  Synthetic
ucaaaaacaucacaggucuaca

SEQ ID NO: 81834 - RNA, 23 nt, Artificial Sequence
  Synthetic
uucaaaaacaucacaggucuaca

SEQ ID NO: 81835 - RNA, 24 nt, Artificial Sequence
  Synthetic
uuucaaaaacaucacaggucuaca

SEQ ID NO: 81836 - RNA, 18 nt, Artificial Sequence
  Synthetic
aaaagagugcagaguaca

SEQ ID NO: 81837 - RNA, 20 nt, Artificial Sequence
  Synthetic
agaaaagagugcagaguaca

SEQ ID NO: 81838 - RNA, 21 nt, Artificial Sequence
  Synthetic
aagaaaagagugcagaguaca

SEQ ID NO: 81839 - RNA, 22 nt, Artificial Sequence
  Synthetic
caagaaaagagugcagaguaca

SEQ ID NO: 81840 - RNA, 23 nt, Artificial Sequence
  Synthetic
ucaagaaaagagugcagaguaca

SEQ ID NO: 81841 - RNA, 24 nt, Artificial Sequence
  Synthetic
aucaagaaaagagugcagaguaca

SEQ ID NO: 81842 - RNA, 18 nt, Artificial Sequence
  Synthetic
uaguguaguuggaguaca

SEQ ID NO: 81843 - RNA, 19 nt, Artificial Sequence
  Synthetic
uuaguguaguuggaguaca

SEQ ID NO: 81844 - RNA, 21 nt, Artificial Sequence
  Synthetic
aguuaguguaguuggaguaca

SEQ ID NO: 81845 - RNA, 22 nt, Artificial Sequence
  Synthetic
aaguuaguguaguuggaguaca

SEQ ID NO: 81846 - RNA, 23 nt, Artificial Sequence
  Synthetic
aaaguuaguguaguuggaguaca

SEQ ID NO: 81847 - RNA, 24 nt, Artificial Sequence
  Synthetic
caaaguuaguguaguuggaguaca

SEQ ID NO: 81848 - RNA, 18 nt, Artificial Sequence
  Synthetic
uaauucuggucagguaca

SEQ ID NO: 81849 - RNA, 19 nt, Artificial Sequence
  Synthetic
auaauucuggucagguaca

SEQ ID NO: 81850 - RNA, 20 nt, Artificial Sequence
  Synthetic
uauaauucuggucagguaca

SEQ ID NO: 81851 - RNA, 21 nt, Artificial Sequence
  Synthetic
uuauaauucuggucagguaca

SEQ ID NO: 81852 - RNA, 22 nt, Artificial Sequence
  Synthetic
auuauaauucuggucagguaca

SEQ ID NO: 81853 - RNA, 23 nt, Artificial Sequence
  Synthetic
cauuauaauucuggucagguaca

SEQ ID NO: 81854 - RNA, 24 nt, Artificial Sequence
  Synthetic
ccauuauaauucuggucagguaca

SEQ ID NO: 81855 - RNA, 19 nt, Artificial Sequence
  Synthetic
ugguaaaaguuaugguaca

SEQ ID NO: 81856 - RNA, 20 nt, Artificial Sequence
  Synthetic
uugguaaaaguuaugguaca

SEQ ID NO: 81857 - RNA, 21 nt, Artificial Sequence
  Synthetic
cuugguaaaaguuaugguaca

SEQ ID NO: 81858 - RNA, 22 nt, Artificial Sequence
  Synthetic
ucuugguaaaaguuaugguaca

SEQ ID NO: 81859 - RNA, 23 nt, Artificial Sequence
  Synthetic
uucuugguaaaaguuaugguaca

SEQ ID NO: 81860 - RNA, 24 nt, Artificial Sequence
  Synthetic
cuucuugguaaaaguuaugguaca

SEQ ID NO: 81861 - RNA, 18 nt, Artificial Sequence
  Synthetic
cauagaaaaaacuguaca

SEQ ID NO: 81862 - RNA, 19 nt, Artificial Sequence
  Synthetic
ucauagaaaaaacuguaca

SEQ ID NO: 81863 - RNA, 20 nt, Artificial Sequence
  Synthetic
uucauagaaaaaacuguaca

SEQ ID NO: 81864 - RNA, 21 nt, Artificial Sequence
  Synthetic
auucauagaaaaaacuguaca

SEQ ID NO: 81865 - RNA, 22 nt, Artificial Sequence
  Synthetic
cauucauagaaaaaacuguaca

SEQ ID NO: 81866 - RNA, 23 nt, Artificial Sequence
  Synthetic
acauucauagaaaaaacuguaca

SEQ ID NO: 81867 - RNA, 24 nt, Artificial Sequence
  Synthetic
aacauucauagaaaaaacuguaca

SEQ ID NO: 81868 - RNA, 18 nt, Artificial Sequence
  Synthetic
auuuaguaaaacuguaca

SEQ ID NO: 81869 - RNA, 20 nt, Artificial Sequence
  Synthetic
agauuuaguaaaacuguaca

SEQ ID NO: 81870 - RNA, 21 nt, Artificial Sequence
  Synthetic
cagauuuaguaaaacuguaca

SEQ ID NO: 81871 - RNA, 22 nt, Artificial Sequence
  Synthetic
ccagauuuaguaaaacuguaca

SEQ ID NO: 81872 - RNA, 24 nt, Artificial Sequence
  Synthetic
agccagauuuaguaaaacuguaca

SEQ ID NO: 81873 - RNA, 20 nt, Artificial Sequence
  Synthetic
aggcccaauaaaugauuaca

SEQ ID NO: 81874 - RNA, 23 nt, Artificial Sequence
  Synthetic
aggaggcccaauaaaugauuaca

SEQ ID NO: 81875 - RNA, 24 nt, Artificial Sequence
  Synthetic
aaggaggcccaauaaaugauuaca

SEQ ID NO: 81876 - RNA, 21 nt, Artificial Sequence
  Synthetic
cugaauuuuuugaauauuaca

SEQ ID NO: 81877 - RNA, 23 nt, Artificial Sequence
  Synthetic
ugcugaauuuuuugaauauuaca

SEQ ID NO: 81878 - RNA, 24 nt, Artificial Sequence
  Synthetic
cugcugaauuuuuugaauauuaca

SEQ ID NO: 81879 - RNA, 19 nt, Artificial Sequence
  Synthetic
cgaaaggcaaacuauuaca

SEQ ID NO: 81880 - RNA, 20 nt, Artificial Sequence
  Synthetic
ucgaaaggcaaacuauuaca

SEQ ID NO: 81881 - RNA, 21 nt, Artificial Sequence
  Synthetic
uucgaaaggcaaacuauuaca

SEQ ID NO: 81882 - RNA, 22 nt, Artificial Sequence
  Synthetic
auucgaaaggcaaacuauuaca

SEQ ID NO: 81883 - RNA, 23 nt, Artificial Sequence
  Synthetic
uauucgaaaggcaaacuauuaca

SEQ ID NO: 81884 - RNA, 24 nt, Artificial Sequence
  Synthetic
cuauucgaaaggcaaacuauuaca

SEQ ID NO: 81885 - RNA, 20 nt, Artificial Sequence
  Synthetic
aggauauauaaauuauuaca

SEQ ID NO: 81886 - RNA, 21 nt, Artificial Sequence
  Synthetic
uaggauauauaaauuauuaca

SEQ ID NO: 81887 - RNA, 22 nt, Artificial Sequence
  Synthetic
uuaggauauauaaauuauuaca

SEQ ID NO: 81888 - RNA, 24 nt, Artificial Sequence
  Synthetic
aguuaggauauauaaauuauuaca

SEQ ID NO: 81889 - RNA, 18 nt, Artificial Sequence
  Synthetic
agcaauccccaacuuaca

SEQ ID NO: 81890 - RNA, 19 nt, Artificial Sequence
  Synthetic
aagcaauccccaacuuaca

SEQ ID NO: 81891 - RNA, 20 nt, Artificial Sequence
  Synthetic
aaagcaauccccaacuuaca

SEQ ID NO: 81892 - RNA, 21 nt, Artificial Sequence
  Synthetic
aaaagcaauccccaacuuaca

SEQ ID NO: 81893 - RNA, 22 nt, Artificial Sequence
  Synthetic
uaaaagcaauccccaacuuaca

SEQ ID NO: 81894 - RNA, 24 nt, Artificial Sequence
  Synthetic
aguaaaagcaauccccaacuuaca

SEQ ID NO: 81895 - RNA, 21 nt, Artificial Sequence
  Synthetic
auacaaaauucucaacuuaca

SEQ ID NO: 81896 - RNA, 22 nt, Artificial Sequence
  Synthetic
cauacaaaauucucaacuuaca

SEQ ID NO: 81897 - RNA, 24 nt, Artificial Sequence
  Synthetic
cgcauacaaaauucucaacuuaca

SEQ ID NO: 81898 - RNA, 18 nt, Artificial Sequence
  Synthetic
cuguaucgggaacuuaca

SEQ ID NO: 81899 - RNA, 19 nt, Artificial Sequence
  Synthetic
ucuguaucgggaacuuaca

SEQ ID NO: 81900 - RNA, 20 nt, Artificial Sequence
  Synthetic
aucuguaucgggaacuuaca

SEQ ID NO: 81901 - RNA, 21 nt, Artificial Sequence
  Synthetic
uaucuguaucgggaacuuaca

SEQ ID NO: 81902 - RNA, 22 nt, Artificial Sequence
  Synthetic
uuaucuguaucgggaacuuaca

SEQ ID NO: 81903 - RNA, 23 nt, Artificial Sequence
  Synthetic
uuuaucuguaucgggaacuuaca

SEQ ID NO: 81904 - RNA, 24 nt, Artificial Sequence
  Synthetic
cuuuaucuguaucgggaacuuaca

SEQ ID NO: 81905 - RNA, 18 nt, Artificial Sequence
  Synthetic
aagaagugacaccuuaca

SEQ ID NO: 81906 - RNA, 21 nt, Artificial Sequence
  Synthetic
aggaagaagugacaccuuaca

SEQ ID NO: 81907 - RNA, 22 nt, Artificial Sequence
  Synthetic
uaggaagaagugacaccuuaca

SEQ ID NO: 81908 - RNA, 24 nt, Artificial Sequence
  Synthetic
aguaggaagaagugacaccuuaca

SEQ ID NO: 81909 - RNA, 18 nt, Artificial Sequence
  Synthetic
ugcugugcagaccuuaca

SEQ ID NO: 81910 - RNA, 19 nt, Artificial Sequence
  Synthetic
cugcugugcagaccuuaca

SEQ ID NO: 81911 - RNA, 20 nt, Artificial Sequence
  Synthetic
ccugcugugcagaccuuaca

SEQ ID NO: 81912 - RNA, 21 nt, Artificial Sequence
  Synthetic
accugcugugcagaccuuaca

SEQ ID NO: 81913 - RNA, 22 nt, Artificial Sequence
  Synthetic
uaccugcugugcagaccuuaca

SEQ ID NO: 81914 - RNA, 23 nt, Artificial Sequence
  Synthetic
uuaccugcugugcagaccuuaca

SEQ ID NO: 81915 - RNA, 24 nt, Artificial Sequence
  Synthetic
auuaccugcugugcagaccuuaca

SEQ ID NO: 81916 - RNA, 18 nt, Artificial Sequence
  Synthetic
aggcacuugaaauuuaca

SEQ ID NO: 81917 - RNA, 19 nt, Artificial Sequence
  Synthetic
aaggcacuugaaauuuaca

SEQ ID NO: 81918 - RNA, 20 nt, Artificial Sequence
  Synthetic
caaggcacuugaaauuuaca

SEQ ID NO: 81919 - RNA, 21 nt, Artificial Sequence
  Synthetic
ucaaggcacuugaaauuuaca

SEQ ID NO: 81920 - RNA, 22 nt, Artificial Sequence
  Synthetic
uucaaggcacuugaaauuuaca

SEQ ID NO: 81921 - RNA, 23 nt, Artificial Sequence
  Synthetic
cuucaaggcacuugaaauuuaca

SEQ ID NO: 81922 - RNA, 24 nt, Artificial Sequence
  Synthetic
ccuucaaggcacuugaaauuuaca

SEQ ID NO: 81923 - RNA, 21 nt, Artificial Sequence
  Synthetic
uuugauuucucucucuuuaca

SEQ ID NO: 81924 - RNA, 22 nt, Artificial Sequence
  Synthetic
auuugauuucucucucuuuaca

SEQ ID NO: 81925 - RNA, 23 nt, Artificial Sequence
  Synthetic
uauuugauuucucucucuuuaca

SEQ ID NO: 81926 - RNA, 24 nt, Artificial Sequence
  Synthetic
cuauuugauuucucucucuuuaca

SEQ ID NO: 81927 - RNA, 18 nt, Artificial Sequence
  Synthetic
uuggcuacugucuuuaca

SEQ ID NO: 81928 - RNA, 19 nt, Artificial Sequence
  Synthetic
cuuggcuacugucuuuaca

SEQ ID NO: 81929 - RNA, 20 nt, Artificial Sequence
  Synthetic
acuuggcuacugucuuuaca

SEQ ID NO: 81930 - RNA, 21 nt, Artificial Sequence
  Synthetic
cacuuggcuacugucuuuaca

SEQ ID NO: 81931 - RNA, 22 nt, Artificial Sequence
  Synthetic
ucacuuggcuacugucuuuaca

SEQ ID NO: 81932 - RNA, 23 nt, Artificial Sequence
  Synthetic
uucacuuggcuacugucuuuaca

SEQ ID NO: 81933 - RNA, 18 nt, Artificial Sequence
  Synthetic
uugacagaaaaguuuaca

SEQ ID NO: 81934 - RNA, 19 nt, Artificial Sequence
  Synthetic
uuugacagaaaaguuuaca

SEQ ID NO: 81935 - RNA, 20 nt, Artificial Sequence
  Synthetic
uuuugacagaaaaguuuaca

SEQ ID NO: 81936 - RNA, 21 nt, Artificial Sequence
  Synthetic
auuuugacagaaaaguuuaca

SEQ ID NO: 81937 - RNA, 23 nt, Artificial Sequence
  Synthetic
agauuuugacagaaaaguuuaca

SEQ ID NO: 81938 - RNA, 24 nt, Artificial Sequence
  Synthetic
aagauuuugacagaaaaguuuaca

SEQ ID NO: 81939 - RNA, 18 nt, Artificial Sequence
  Synthetic
cuaaaagcuuaguuuaca

SEQ ID NO: 81940 - RNA, 19 nt, Artificial Sequence
  Synthetic
acuaaaagcuuaguuuaca

SEQ ID NO: 81941 - RNA, 20 nt, Artificial Sequence
  Synthetic
aacuaaaagcuuaguuuaca

SEQ ID NO: 81942 - RNA, 21 nt, Artificial Sequence
  Synthetic
caacuaaaagcuuaguuuaca

SEQ ID NO: 81943 - RNA, 22 nt, Artificial Sequence
  Synthetic
acaacuaaaagcuuaguuuaca

SEQ ID NO: 81944 - RNA, 23 nt, Artificial Sequence
  Synthetic
uacaacuaaaagcuuaguuuaca

SEQ ID NO: 81945 - RNA, 24 nt, Artificial Sequence
  Synthetic
cuacaacuaaaagcuuaguuuaca

SEQ ID NO: 81946 - RNA, 18 nt, Artificial Sequence
  Synthetic
uuaugucacuuguuuaca

SEQ ID NO: 81947 - RNA, 19 nt, Artificial Sequence
  Synthetic
auuaugucacuuguuuaca

SEQ ID NO: 81948 - RNA, 20 nt, Artificial Sequence
  Synthetic
uauuaugucacuuguuuaca

SEQ ID NO: 81949 - RNA, 21 nt, Artificial Sequence
  Synthetic
auauuaugucacuuguuuaca

SEQ ID NO: 81950 - RNA, 22 nt, Artificial Sequence
  Synthetic
aauauuaugucacuuguuuaca

SEQ ID NO: 81951 - RNA, 23 nt, Artificial Sequence
  Synthetic
aaauauuaugucacuuguuuaca

SEQ ID NO: 81952 - RNA, 24 nt, Artificial Sequence
  Synthetic
uaaauauuaugucacuuguuuaca

SEQ ID NO: 81953 - RNA, 18 nt, Artificial Sequence
  Synthetic
cauucucuucuaaaacca

SEQ ID NO: 81954 - RNA, 19 nt, Artificial Sequence
  Synthetic
acauucucuucuaaaacca

SEQ ID NO: 81955 - RNA, 20 nt, Artificial Sequence
  Synthetic
uacauucucuucuaaaacca

SEQ ID NO: 81956 - RNA, 21 nt, Artificial Sequence
  Synthetic
uuacauucucuucuaaaacca

SEQ ID NO: 81957 - RNA, 22 nt, Artificial Sequence
  Synthetic
auuacauucucuucuaaaacca

SEQ ID NO: 81958 - RNA, 23 nt, Artificial Sequence
  Synthetic
uauuacauucucuucuaaaacca

SEQ ID NO: 81959 - RNA, 24 nt, Artificial Sequence
  Synthetic
cuauuacauucucuucuaaaacca

SEQ ID NO: 81960 - RNA, 21 nt, Artificial Sequence
  Synthetic
cugaaaaaccaaaccaaacca

SEQ ID NO: 81961 - RNA, 22 nt, Artificial Sequence
  Synthetic
acugaaaaaccaaaccaaacca

SEQ ID NO: 81962 - RNA, 23 nt, Artificial Sequence
  Synthetic
cacugaaaaaccaaaccaaacca

SEQ ID NO: 81963 - RNA, 24 nt, Artificial Sequence
  Synthetic
ucacugaaaaaccaaaccaaacca

SEQ ID NO: 81964 - RNA, 18 nt, Artificial Sequence
  Synthetic
aaaaguagaaggaaacca

SEQ ID NO: 81965 - RNA, 20 nt, Artificial Sequence
  Synthetic
ugaaaaguagaaggaaacca

SEQ ID NO: 81966 - RNA, 21 nt, Artificial Sequence
  Synthetic
cugaaaaguagaaggaaacca

SEQ ID NO: 81967 - RNA, 22 nt, Artificial Sequence
  Synthetic
ucugaaaaguagaaggaaacca

SEQ ID NO: 81968 - RNA, 23 nt, Artificial Sequence
  Synthetic
uucugaaaaguagaaggaaacca

SEQ ID NO: 81969 - RNA, 24 nt, Artificial Sequence
  Synthetic
auucugaaaaguagaaggaaacca

SEQ ID NO: 81970 - RNA, 18 nt, Artificial Sequence
  Synthetic
aggaguuuaucucaacca

SEQ ID NO: 81971 - RNA, 19 nt, Artificial Sequence
  Synthetic
aaggaguuuaucucaacca

SEQ ID NO: 81972 - RNA, 20 nt, Artificial Sequence
  Synthetic
uaaggaguuuaucucaacca

SEQ ID NO: 81973 - RNA, 21 nt, Artificial Sequence
  Synthetic
cuaaggaguuuaucucaacca

SEQ ID NO: 81974 - RNA, 22 nt, Artificial Sequence
  Synthetic
ccuaaggaguuuaucucaacca

SEQ ID NO: 81975 - RNA, 23 nt, Artificial Sequence
  Synthetic
uccuaaggaguuuaucucaacca

SEQ ID NO: 81976 - RNA, 24 nt, Artificial Sequence
  Synthetic
cuccuaaggaguuuaucucaacca

SEQ ID NO: 81977 - RNA, 21 nt, Artificial Sequence
  Synthetic
acaaaaaaaauuaaagaacca

SEQ ID NO: 81978 - RNA, 22 nt, Artificial Sequence
  Synthetic
aacaaaaaaaauuaaagaacca

SEQ ID NO: 81979 - RNA, 23 nt, Artificial Sequence
  Synthetic
aaacaaaaaaaauuaaagaacca

SEQ ID NO: 81980 - RNA, 18 nt, Artificial Sequence
  Synthetic
augacaacugcagaacca

SEQ ID NO: 81981 - RNA, 19 nt, Artificial Sequence
  Synthetic
aaugacaacugcagaacca

SEQ ID NO: 81982 - RNA, 20 nt, Artificial Sequence
  Synthetic
uaaugacaacugcagaacca

SEQ ID NO: 81983 - RNA, 21 nt, Artificial Sequence
  Synthetic
auaaugacaacugcagaacca

SEQ ID NO: 81984 - RNA, 22 nt, Artificial Sequence
  Synthetic
aauaaugacaacugcagaacca

SEQ ID NO: 81985 - RNA, 23 nt, Artificial Sequence
  Synthetic
aaauaaugacaacugcagaacca

SEQ ID NO: 81986 - RNA, 18 nt, Artificial Sequence
  Synthetic
auuuacauucaugaacca

SEQ ID NO: 81987 - RNA, 19 nt, Artificial Sequence
  Synthetic
uauuuacauucaugaacca

SEQ ID NO: 81988 - RNA, 21 nt, Artificial Sequence
  Synthetic
uguauuuacauucaugaacca

SEQ ID NO: 81989 - RNA, 22 nt, Artificial Sequence
  Synthetic
cuguauuuacauucaugaacca

SEQ ID NO: 81990 - RNA, 23 nt, Artificial Sequence
  Synthetic
ccuguauuuacauucaugaacca

SEQ ID NO: 81991 - RNA, 24 nt, Artificial Sequence
  Synthetic
uccuguauuuacauucaugaacca

SEQ ID NO: 81992 - RNA, 18 nt, Artificial Sequence
  Synthetic
caaaaauacagugaacca

SEQ ID NO: 81993 - RNA, 19 nt, Artificial Sequence
  Synthetic
ucaaaaauacagugaacca

SEQ ID NO: 81994 - RNA, 20 nt, Artificial Sequence
  Synthetic
cucaaaaauacagugaacca

SEQ ID NO: 81995 - RNA, 22 nt, Artificial Sequence
  Synthetic
ugcucaaaaauacagugaacca

SEQ ID NO: 81996 - RNA, 24 nt, Artificial Sequence
  Synthetic
agugcucaaaaauacagugaacca

SEQ ID NO: 81997 - RNA, 18 nt, Artificial Sequence
  Synthetic
aauuagcugauugaacca

SEQ ID NO: 81998 - RNA, 19 nt, Artificial Sequence
  Synthetic
aaauuagcugauugaacca

SEQ ID NO: 81999 - RNA, 20 nt, Artificial Sequence
  Synthetic
aaaauuagcugauugaacca

SEQ ID NO: 82000 - RNA, 21 nt, Artificial Sequence
  Synthetic
aaaaauuagcugauugaacca

SEQ ID NO: 82001 - RNA, 22 nt, Artificial Sequence
  Synthetic
aaaaaauuagcugauugaacca

SEQ ID NO: 82002 - RNA, 24 nt, Artificial Sequence
  Synthetic
ugaaaaaauuagcugauugaacca

SEQ ID NO: 82003 - RNA, 18 nt, Artificial Sequence
  Synthetic
uggagauucuguuaacca

SEQ ID NO: 82004 - RNA, 19 nt, Artificial Sequence
  Synthetic
auggagauucuguuaacca

SEQ ID NO: 82005 - RNA, 20 nt, Artificial Sequence
  Synthetic
aauggagauucuguuaacca

SEQ ID NO: 82006 - RNA, 21 nt, Artificial Sequence
  Synthetic
aaauggagauucuguuaacca

SEQ ID NO: 82007 - RNA, 24 nt, Artificial Sequence
  Synthetic
uggaaauggagauucuguuaacca

SEQ ID NO: 82008 - RNA, 18 nt, Artificial Sequence
  Synthetic
ugauuuaguuuuuaacca

SEQ ID NO: 82009 - RNA, 20 nt, Artificial Sequence
  Synthetic
ugugauuuaguuuuuaacca

SEQ ID NO: 82010 - RNA, 21 nt, Artificial Sequence
  Synthetic
augugauuuaguuuuuaacca

SEQ ID NO: 82011 - RNA, 22 nt, Artificial Sequence
  Synthetic
uaugugauuuaguuuuuaacca

SEQ ID NO: 82012 - RNA, 23 nt, Artificial Sequence
  Synthetic
cuaugugauuuaguuuuuaacca

SEQ ID NO: 82013 - RNA, 24 nt, Artificial Sequence
  Synthetic
ccuaugugauuuaguuuuuaacca

SEQ ID NO: 82014 - RNA, 18 nt, Artificial Sequence
  Synthetic
cauaucuaagaaacacca

SEQ ID NO: 82015 - RNA, 19 nt, Artificial Sequence
  Synthetic
ccauaucuaagaaacacca

SEQ ID NO: 82016 - RNA, 20 nt, Artificial Sequence
  Synthetic
uccauaucuaagaaacacca

SEQ ID NO: 82017 - RNA, 21 nt, Artificial Sequence
  Synthetic
auccauaucuaagaaacacca

SEQ ID NO: 82018 - RNA, 22 nt, Artificial Sequence
  Synthetic
aauccauaucuaagaaacacca

SEQ ID NO: 82019 - RNA, 23 nt, Artificial Sequence
  Synthetic
aaauccauaucuaagaaacacca

SEQ ID NO: 82020 - RNA, 24 nt, Artificial Sequence
  Synthetic
aaaauccauaucuaagaaacacca

SEQ ID NO: 82021 - RNA, 18 nt, Artificial Sequence
  Synthetic
uugucaccccagacacca

SEQ ID NO: 82022 - RNA, 19 nt, Artificial Sequence
  Synthetic
uuugucaccccagacacca

SEQ ID NO: 82023 - RNA, 20 nt, Artificial Sequence
  Synthetic
uuuugucaccccagacacca

SEQ ID NO: 82024 - RNA, 21 nt, Artificial Sequence
  Synthetic
cuuuugucaccccagacacca

SEQ ID NO: 82025 - RNA, 22 nt, Artificial Sequence
  Synthetic
ucuuuugucaccccagacacca

SEQ ID NO: 82026 - RNA, 23 nt, Artificial Sequence
  Synthetic
aucuuuugucaccccagacacca

SEQ ID NO: 82027 - RNA, 24 nt, Artificial Sequence
  Synthetic
caucuuuugucaccccagacacca

SEQ ID NO: 82028 - RNA, 18 nt, Artificial Sequence
  Synthetic
ugacaaauucagacacca

SEQ ID NO: 82029 - RNA, 19 nt, Artificial Sequence
  Synthetic
uugacaaauucagacacca

SEQ ID NO: 82030 - RNA, 20 nt, Artificial Sequence
  Synthetic
auugacaaauucagacacca

SEQ ID NO: 82031 - RNA, 22 nt, Artificial Sequence
  Synthetic
ugauugacaaauucagacacca

SEQ ID NO: 82032 - RNA, 23 nt, Artificial Sequence
  Synthetic
augauugacaaauucagacacca

SEQ ID NO: 82033 - RNA, 24 nt, Artificial Sequence
  Synthetic
aaugauugacaaauucagacacca

SEQ ID NO: 82034 - RNA, 18 nt, Artificial Sequence
  Synthetic
aauaucuugacaccacca

SEQ ID NO: 82035 - RNA, 19 nt, Artificial Sequence
  Synthetic
caauaucuugacaccacca

SEQ ID NO: 82036 - RNA, 20 nt, Artificial Sequence
  Synthetic
acaauaucuugacaccacca

SEQ ID NO: 82037 - RNA, 21 nt, Artificial Sequence
  Synthetic
aacaauaucuugacaccacca

SEQ ID NO: 82038 - RNA, 22 nt, Artificial Sequence
  Synthetic
caacaauaucuugacaccacca

SEQ ID NO: 82039 - RNA, 23 nt, Artificial Sequence
  Synthetic
ucaacaauaucuugacaccacca

SEQ ID NO: 82040 - RNA, 24 nt, Artificial Sequence
  Synthetic
uucaacaauaucuugacaccacca

SEQ ID NO: 82041 - RNA, 18 nt, Artificial Sequence
  Synthetic
aaaauguauaaaucacca

SEQ ID NO: 82042 - RNA, 19 nt, Artificial Sequence
  Synthetic
uaaaauguauaaaucacca

SEQ ID NO: 82043 - RNA, 20 nt, Artificial Sequence
  Synthetic
uuaaaauguauaaaucacca

SEQ ID NO: 82044 - RNA, 21 nt, Artificial Sequence
  Synthetic
auuaaaauguauaaaucacca

SEQ ID NO: 82045 - RNA, 22 nt, Artificial Sequence
  Synthetic
aauuaaaauguauaaaucacca

SEQ ID NO: 82046 - RNA, 23 nt, Artificial Sequence
  Synthetic
aaauuaaaauguauaaaucacca

SEQ ID NO: 82047 - RNA, 24 nt, Artificial Sequence
  Synthetic
caaauuaaaauguauaaaucacca

SEQ ID NO: 82048 - RNA, 18 nt, Artificial Sequence
  Synthetic
agucaaacagaaucacca

SEQ ID NO: 82049 - RNA, 19 nt, Artificial Sequence
  Synthetic
uagucaaacagaaucacca

SEQ ID NO: 82050 - RNA, 20 nt, Artificial Sequence
  Synthetic
uuagucaaacagaaucacca

SEQ ID NO: 82051 - RNA, 21 nt, Artificial Sequence
  Synthetic
cuuagucaaacagaaucacca

SEQ ID NO: 82052 - RNA, 22 nt, Artificial Sequence
  Synthetic
ccuuagucaaacagaaucacca

SEQ ID NO: 82053 - RNA, 18 nt, Artificial Sequence
  Synthetic
ucaggcucaucaucacca

SEQ ID NO: 82054 - RNA, 19 nt, Artificial Sequence
  Synthetic
uucaggcucaucaucacca

SEQ ID NO: 82055 - RNA, 21 nt, Artificial Sequence
  Synthetic
aguucaggcucaucaucacca

SEQ ID NO: 82056 - RNA, 22 nt, Artificial Sequence
  Synthetic
aaguucaggcucaucaucacca

SEQ ID NO: 82057 - RNA, 21 nt, Artificial Sequence
  Synthetic
acucuauuuugaagaucacca

SEQ ID NO: 82058 - RNA, 22 nt, Artificial Sequence
  Synthetic
uacucuauuuugaagaucacca

SEQ ID NO: 82059 - RNA, 23 nt, Artificial Sequence
  Synthetic
auacucuauuuugaagaucacca

SEQ ID NO: 82060 - RNA, 21 nt, Artificial Sequence
  Synthetic
cucaaaaacugaugaucacca

SEQ ID NO: 82061 - RNA, 22 nt, Artificial Sequence
  Synthetic
ccucaaaaacugaugaucacca

SEQ ID NO: 82062 - RNA, 23 nt, Artificial Sequence
  Synthetic
accucaaaaacugaugaucacca

SEQ ID NO: 82063 - RNA, 24 nt, Artificial Sequence
  Synthetic
aaccucaaaaacugaugaucacca

SEQ ID NO: 82064 - RNA, 18 nt, Artificial Sequence
  Synthetic
aguguaaggaccucacca

SEQ ID NO: 82065 - RNA, 20 nt, Artificial Sequence
  Synthetic
ugaguguaaggaccucacca

SEQ ID NO: 82066 - RNA, 21 nt, Artificial Sequence
  Synthetic
augaguguaaggaccucacca

SEQ ID NO: 82067 - RNA, 22 nt, Artificial Sequence
  Synthetic
caugaguguaaggaccucacca

SEQ ID NO: 82068 - RNA, 23 nt, Artificial Sequence
  Synthetic
ccaugaguguaaggaccucacca

SEQ ID NO: 82069 - RNA, 24 nt, Artificial Sequence
  Synthetic
uccaugaguguaaggaccucacca

SEQ ID NO: 82070 - RNA, 18 nt, Artificial Sequence
  Synthetic
uggugguuuaaaagacca

SEQ ID NO: 82071 - RNA, 20 nt, Artificial Sequence
  Synthetic
aguggugguuuaaaagacca

SEQ ID NO: 82072 - RNA, 21 nt, Artificial Sequence
  Synthetic
caguggugguuuaaaagacca

SEQ ID NO: 82073 - RNA, 23 nt, Artificial Sequence
  Synthetic
agcaguggugguuuaaaagacca

SEQ ID NO: 82074 - RNA, 24 nt, Artificial Sequence
  Synthetic
aagcaguggugguuuaaaagacca

SEQ ID NO: 82075 - RNA, 18 nt, Artificial Sequence
  Synthetic
uagcuaaaguccagacca

SEQ ID NO: 82076 - RNA, 20 nt, Artificial Sequence
  Synthetic
cguagcuaaaguccagacca

SEQ ID NO: 82077 - RNA, 21 nt, Artificial Sequence
  Synthetic
ccguagcuaaaguccagacca

SEQ ID NO: 82078 - RNA, 22 nt, Artificial Sequence
  Synthetic
accguagcuaaaguccagacca

SEQ ID NO: 82079 - RNA, 23 nt, Artificial Sequence
  Synthetic
aaccguagcuaaaguccagacca

SEQ ID NO: 82080 - RNA, 24 nt, Artificial Sequence
  Synthetic
aaaccguagcuaaaguccagacca

SEQ ID NO: 82081 - RNA, 22 nt, Artificial Sequence
  Synthetic
cgguuuauuuuuguuaugacca

SEQ ID NO: 82082 - RNA, 19 nt, Artificial Sequence
  Synthetic
ugaaaaguggaugugacca

SEQ ID NO: 82083 - RNA, 20 nt, Artificial Sequence
  Synthetic
cugaaaaguggaugugacca

SEQ ID NO: 82084 - RNA, 22 nt, Artificial Sequence
  Synthetic
ugcugaaaaguggaugugacca

SEQ ID NO: 82085 - RNA, 23 nt, Artificial Sequence
  Synthetic
augcugaaaaguggaugugacca

SEQ ID NO: 82086 - RNA, 24 nt, Artificial Sequence
  Synthetic
aaugcugaaaaguggaugugacca

SEQ ID NO: 82087 - RNA, 18 nt, Artificial Sequence
  Synthetic
agaccaacacaaauacca

SEQ ID NO: 82088 - RNA, 20 nt, Artificial Sequence
  Synthetic
ugagaccaacacaaauacca

SEQ ID NO: 82089 - RNA, 21 nt, Artificial Sequence
  Synthetic
uugagaccaacacaaauacca

SEQ ID NO: 82090 - RNA, 22 nt, Artificial Sequence
  Synthetic
uuugagaccaacacaaauacca

SEQ ID NO: 82091 - RNA, 23 nt, Artificial Sequence
  Synthetic
uuuugagaccaacacaaauacca

SEQ ID NO: 82092 - RNA, 24 nt, Artificial Sequence
  Synthetic
uuuuugagaccaacacaaauacca

SEQ ID NO: 82093 - RNA, 18 nt, Artificial Sequence
  Synthetic
uauccaagcuccauacca

SEQ ID NO: 82094 - RNA, 19 nt, Artificial Sequence
  Synthetic
auauccaagcuccauacca

SEQ ID NO: 82095 - RNA, 20 nt, Artificial Sequence
  Synthetic
uauauccaagcuccauacca

SEQ ID NO: 82096 - RNA, 22 nt, Artificial Sequence
  Synthetic
uguauauccaagcuccauacca

SEQ ID NO: 82097 - RNA, 23 nt, Artificial Sequence
  Synthetic
auguauauccaagcuccauacca

SEQ ID NO: 82098 - RNA, 24 nt, Artificial Sequence
  Synthetic
uauguauauccaagcuccauacca

SEQ ID NO: 82099 - RNA, 18 nt, Artificial Sequence
  Synthetic
aauugcaaguguauacca

SEQ ID NO: 82100 - RNA, 19 nt, Artificial Sequence
  Synthetic
aaauugcaaguguauacca

SEQ ID NO: 82101 - RNA, 21 nt, Artificial Sequence
  Synthetic
agaaauugcaaguguauacca

SEQ ID NO: 82102 - RNA, 22 nt, Artificial Sequence
  Synthetic
aagaaauugcaaguguauacca

SEQ ID NO: 82103 - RNA, 21 nt, Artificial Sequence
  Synthetic
auauuuuuucacauuauacca

SEQ ID NO: 82104 - RNA, 22 nt, Artificial Sequence
  Synthetic
uauauuuuuucacauuauacca

SEQ ID NO: 82105 - RNA, 23 nt, Artificial Sequence
  Synthetic
cuauauuuuuucacauuauacca

SEQ ID NO: 82106 - RNA, 24 nt, Artificial Sequence
  Synthetic
acuauauuuuuucacauuauacca

SEQ ID NO: 82107 - RNA, 18 nt, Artificial Sequence
  Synthetic
caggaucuauuuguacca

SEQ ID NO: 82108 - RNA, 19 nt, Artificial Sequence
  Synthetic
acaggaucuauuuguacca

SEQ ID NO: 82109 - RNA, 20 nt, Artificial Sequence
  Synthetic
aacaggaucuauuuguacca

SEQ ID NO: 82110 - RNA, 21 nt, Artificial Sequence
  Synthetic
aaacaggaucuauuuguacca

SEQ ID NO: 82111 - RNA, 22 nt, Artificial Sequence
  Synthetic
uaaacaggaucuauuuguacca

SEQ ID NO: 82112 - RNA, 24 nt, Artificial Sequence
  Synthetic
aguaaacaggaucuauuuguacca

SEQ ID NO: 82113 - RNA, 18 nt, Artificial Sequence
  Synthetic
ccuaggcaaauacaccca

SEQ ID NO: 82114 - RNA, 19 nt, Artificial Sequence
  Synthetic
cccuaggcaaauacaccca

SEQ ID NO: 82115 - RNA, 20 nt, Artificial Sequence
  Synthetic
acccuaggcaaauacaccca

SEQ ID NO: 82116 - RNA, 21 nt, Artificial Sequence
  Synthetic
cacccuaggcaaauacaccca

SEQ ID NO: 82117 - RNA, 23 nt, Artificial Sequence
  Synthetic
agcacccuaggcaaauacaccca

SEQ ID NO: 82118 - RNA, 24 nt, Artificial Sequence
  Synthetic
uagcacccuaggcaaauacaccca

SEQ ID NO: 82119 - RNA, 18 nt, Artificial Sequence
  Synthetic
cucuguggaaaccaccca

SEQ ID NO: 82120 - RNA, 19 nt, Artificial Sequence
  Synthetic
ccucuguggaaaccaccca

SEQ ID NO: 82121 - RNA, 21 nt, Artificial Sequence
  Synthetic
agccucuguggaaaccaccca

SEQ ID NO: 82122 - RNA, 22 nt, Artificial Sequence
  Synthetic
cagccucuguggaaaccaccca

SEQ ID NO: 82123 - RNA, 24 nt, Artificial Sequence
  Synthetic
ugcagccucuguggaaaccaccca

SEQ ID NO: 82124 - RNA, 18 nt, Artificial Sequence
  Synthetic
aaccaguugcaauaccca

SEQ ID NO: 82125 - RNA, 19 nt, Artificial Sequence
  Synthetic
uaaccaguugcaauaccca

SEQ ID NO: 82126 - RNA, 20 nt, Artificial Sequence
  Synthetic
auaaccaguugcaauaccca

SEQ ID NO: 82127 - RNA, 21 nt, Artificial Sequence
  Synthetic
aauaaccaguugcaauaccca

SEQ ID NO: 82128 - RNA, 23 nt, Artificial Sequence
  Synthetic
ugaauaaccaguugcaauaccca

SEQ ID NO: 82129 - RNA, 24 nt, Artificial Sequence
  Synthetic
uugaauaaccaguugcaauaccca

SEQ ID NO: 82130 - RNA, 18 nt, Artificial Sequence
  Synthetic
uauaugaaaucuuaccca

SEQ ID NO: 82131 - RNA, 19 nt, Artificial Sequence
  Synthetic
cuauaugaaaucuuaccca

SEQ ID NO: 82132 - RNA, 20 nt, Artificial Sequence
  Synthetic
acuauaugaaaucuuaccca

SEQ ID NO: 82133 - RNA, 21 nt, Artificial Sequence
  Synthetic
aacuauaugaaaucuuaccca

SEQ ID NO: 82134 - RNA, 22 nt, Artificial Sequence
  Synthetic
aaacuauaugaaaucuuaccca

SEQ ID NO: 82135 - RNA, 23 nt, Artificial Sequence
  Synthetic
caaacuauaugaaaucuuaccca

SEQ ID NO: 82136 - RNA, 24 nt, Artificial Sequence
  Synthetic
ccaaacuauaugaaaucuuaccca

SEQ ID NO: 82137 - RNA, 18 nt, Artificial Sequence
  Synthetic
ugagcauaaauuuaccca

SEQ ID NO: 82138 - RNA, 20 nt, Artificial Sequence
  Synthetic
ugugagcauaaauuuaccca

SEQ ID NO: 82139 - RNA, 21 nt, Artificial Sequence
  Synthetic
uugugagcauaaauuuaccca

SEQ ID NO: 82140 - RNA, 22 nt, Artificial Sequence
  Synthetic
uuugugagcauaaauuuaccca

SEQ ID NO: 82141 - RNA, 23 nt, Artificial Sequence
  Synthetic
uuuugugagcauaaauuuaccca

SEQ ID NO: 82142 - RNA, 24 nt, Artificial Sequence
  Synthetic
uuuuugugagcauaaauuuaccca

SEQ ID NO: 82143 - RNA, 18 nt, Artificial Sequence
  Synthetic
uuaaccauauauacccca

SEQ ID NO: 82144 - RNA, 19 nt, Artificial Sequence
  Synthetic
uuuaaccauauauacccca

SEQ ID NO: 82145 - RNA, 20 nt, Artificial Sequence
  Synthetic
uuuuaaccauauauacccca

SEQ ID NO: 82146 - RNA, 21 nt, Artificial Sequence
  Synthetic
uuuuuaaccauauauacccca

SEQ ID NO: 82147 - RNA, 22 nt, Artificial Sequence
  Synthetic
auuuuuaaccauauauacccca

SEQ ID NO: 82148 - RNA, 23 nt, Artificial Sequence
  Synthetic
cauuuuuaaccauauauacccca

SEQ ID NO: 82149 - RNA, 24 nt, Artificial Sequence
  Synthetic
ucauuuuuaaccauauauacccca

SEQ ID NO: 82150 - RNA, 18 nt, Artificial Sequence
  Synthetic
uuucauagaccuacccca

SEQ ID NO: 82151 - RNA, 19 nt, Artificial Sequence
  Synthetic
uuuucauagaccuacccca

SEQ ID NO: 82152 - RNA, 20 nt, Artificial Sequence
  Synthetic
uuuuucauagaccuacccca

SEQ ID NO: 82153 - RNA, 21 nt, Artificial Sequence
  Synthetic
uuuuuucauagaccuacccca

SEQ ID NO: 82154 - RNA, 22 nt, Artificial Sequence
  Synthetic
uuuuuuucauagaccuacccca

SEQ ID NO: 82155 - RNA, 23 nt, Artificial Sequence
  Synthetic
auuuuuuucauagaccuacccca

SEQ ID NO: 82156 - RNA, 24 nt, Artificial Sequence
  Synthetic
cauuuuuuucauagaccuacccca

SEQ ID NO: 82157 - RNA, 18 nt, Artificial Sequence
  Synthetic
caaagcaauaaagcccca

SEQ ID NO: 82158 - RNA, 20 nt, Artificial Sequence
  Synthetic
agcaaagcaauaaagcccca

SEQ ID NO: 82159 - RNA, 21 nt, Artificial Sequence
  Synthetic
aagcaaagcaauaaagcccca

SEQ ID NO: 82160 - RNA, 22 nt, Artificial Sequence
  Synthetic
caagcaaagcaauaaagcccca

SEQ ID NO: 82161 - RNA, 20 nt, Artificial Sequence
  Synthetic
cggaaacccgaaguucccca

SEQ ID NO: 82162 - RNA, 21 nt, Artificial Sequence
  Synthetic
acggaaacccgaaguucccca

SEQ ID NO: 82163 - RNA, 23 nt, Artificial Sequence
  Synthetic
agacggaaacccgaaguucccca

SEQ ID NO: 82164 - RNA, 18 nt, Artificial Sequence
  Synthetic
uuacuacaucuaggccca

SEQ ID NO: 82165 - RNA, 20 nt, Artificial Sequence
  Synthetic
uguuacuacaucuaggccca

SEQ ID NO: 82166 - RNA, 18 nt, Artificial Sequence
  Synthetic
aauuaagacaauggccca

SEQ ID NO: 82167 - RNA, 20 nt, Artificial Sequence
  Synthetic
agaauuaagacaauggccca

SEQ ID NO: 82168 - RNA, 21 nt, Artificial Sequence
  Synthetic
uagaauuaagacaauggccca

SEQ ID NO: 82169 - RNA, 22 nt, Artificial Sequence
  Synthetic
cuagaauuaagacaauggccca

SEQ ID NO: 82170 - RNA, 23 nt, Artificial Sequence
  Synthetic
ucuagaauuaagacaauggccca

SEQ ID NO: 82171 - RNA, 24 nt, Artificial Sequence
  Synthetic
cucuagaauuaagacaauggccca

SEQ ID NO: 82172 - RNA, 18 nt, Artificial Sequence
  Synthetic
uuuauaaucuacugccca

SEQ ID NO: 82173 - RNA, 19 nt, Artificial Sequence
  Synthetic
auuuauaaucuacugccca

SEQ ID NO: 82174 - RNA, 20 nt, Artificial Sequence
  Synthetic
aauuuauaaucuacugccca

SEQ ID NO: 82175 - RNA, 21 nt, Artificial Sequence
  Synthetic
aaauuuauaaucuacugccca

SEQ ID NO: 82176 - RNA, 22 nt, Artificial Sequence
  Synthetic
uaaauuuauaaucuacugccca

SEQ ID NO: 82177 - RNA, 23 nt, Artificial Sequence
  Synthetic
auaaauuuauaaucuacugccca

SEQ ID NO: 82178 - RNA, 24 nt, Artificial Sequence
  Synthetic
aauaaauuuauaaucuacugccca

SEQ ID NO: 82179 - RNA, 18 nt, Artificial Sequence
  Synthetic
ugaagaccgugcugccca

SEQ ID NO: 82180 - RNA, 19 nt, Artificial Sequence
  Synthetic
cugaagaccgugcugccca

SEQ ID NO: 82181 - RNA, 20 nt, Artificial Sequence
  Synthetic
ucugaagaccgugcugccca

SEQ ID NO: 82182 - RNA, 21 nt, Artificial Sequence
  Synthetic
cucugaagaccgugcugccca

SEQ ID NO: 82183 - RNA, 22 nt, Artificial Sequence
  Synthetic
ucucugaagaccgugcugccca

SEQ ID NO: 82184 - RNA, 23 nt, Artificial Sequence
  Synthetic
aucucugaagaccgugcugccca

SEQ ID NO: 82185 - RNA, 24 nt, Artificial Sequence
  Synthetic
caucucugaagaccgugcugccca

SEQ ID NO: 82186 - RNA, 18 nt, Artificial Sequence
  Synthetic
agaccacguguuugccca

SEQ ID NO: 82187 - RNA, 20 nt, Artificial Sequence
  Synthetic
agagaccacguguuugccca

SEQ ID NO: 82188 - RNA, 22 nt, Artificial Sequence
  Synthetic
ugagagaccacguguuugccca

SEQ ID NO: 82189 - RNA, 24 nt, Artificial Sequence
  Synthetic
ugugagagaccacguguuugccca

SEQ ID NO: 82190 - RNA, 18 nt, Artificial Sequence
  Synthetic
uaauggcaaaucauccca

SEQ ID NO: 82191 - RNA, 19 nt, Artificial Sequence
  Synthetic
auaauggcaaaucauccca

SEQ ID NO: 82192 - RNA, 20 nt, Artificial Sequence
  Synthetic
uauaauggcaaaucauccca

SEQ ID NO: 82193 - RNA, 21 nt, Artificial Sequence
  Synthetic
auauaauggcaaaucauccca

SEQ ID NO: 82194 - RNA, 22 nt, Artificial Sequence
  Synthetic
aauauaauggcaaaucauccca

SEQ ID NO: 82195 - RNA, 23 nt, Artificial Sequence
  Synthetic
caauauaauggcaaaucauccca

SEQ ID NO: 82196 - RNA, 24 nt, Artificial Sequence
  Synthetic
acaauauaauggcaaaucauccca

SEQ ID NO: 82197 - RNA, 18 nt, Artificial Sequence
  Synthetic
uggaucucacugauccca

SEQ ID NO: 82198 - RNA, 19 nt, Artificial Sequence
  Synthetic
auggaucucacugauccca

SEQ ID NO: 82199 - RNA, 20 nt, Artificial Sequence
  Synthetic
uauggaucucacugauccca

SEQ ID NO: 82200 - RNA, 21 nt, Artificial Sequence
  Synthetic
cuauggaucucacugauccca

SEQ ID NO: 82201 - RNA, 22 nt, Artificial Sequence
  Synthetic
acuauggaucucacugauccca

SEQ ID NO: 82202 - RNA, 23 nt, Artificial Sequence
  Synthetic
cacuauggaucucacugauccca

SEQ ID NO: 82203 - RNA, 24 nt, Artificial Sequence
  Synthetic
acacuauggaucucacugauccca

SEQ ID NO: 82204 - RNA, 18 nt, Artificial Sequence
  Synthetic
cuuucuuuguaacuccca

SEQ ID NO: 82205 - RNA, 19 nt, Artificial Sequence
  Synthetic
acuuucuuuguaacuccca

SEQ ID NO: 82206 - RNA, 20 nt, Artificial Sequence
  Synthetic
aacuuucuuuguaacuccca

SEQ ID NO: 82207 - RNA, 21 nt, Artificial Sequence
  Synthetic
uaacuuucuuuguaacuccca

SEQ ID NO: 82208 - RNA, 22 nt, Artificial Sequence
  Synthetic
auaacuuucuuuguaacuccca

SEQ ID NO: 82209 - RNA, 23 nt, Artificial Sequence
  Synthetic
aauaacuuucuuuguaacuccca

SEQ ID NO: 82210 - RNA, 19 nt, Artificial Sequence
  Synthetic
ugaauauacugaucuccca

SEQ ID NO: 82211 - RNA, 20 nt, Artificial Sequence
  Synthetic
augaauauacugaucuccca

SEQ ID NO: 82212 - RNA, 21 nt, Artificial Sequence
  Synthetic
uaugaauauacugaucuccca

SEQ ID NO: 82213 - RNA, 22 nt, Artificial Sequence
  Synthetic
auaugaauauacugaucuccca

SEQ ID NO: 82214 - RNA, 23 nt, Artificial Sequence
  Synthetic
uauaugaauauacugaucuccca

SEQ ID NO: 82215 - RNA, 24 nt, Artificial Sequence
  Synthetic
uuauaugaauauacugaucuccca

SEQ ID NO: 82216 - RNA, 20 nt, Artificial Sequence
  Synthetic
aggaaucuuuaacucuccca

SEQ ID NO: 82217 - RNA, 22 nt, Artificial Sequence
  Synthetic
ugaggaaucuuuaacucuccca

SEQ ID NO: 82218 - RNA, 23 nt, Artificial Sequence
  Synthetic
cugaggaaucuuuaacucuccca

SEQ ID NO: 82219 - RNA, 24 nt, Artificial Sequence
  Synthetic
acugaggaaucuuuaacucuccca

SEQ ID NO: 82220 - RNA, 18 nt, Artificial Sequence
  Synthetic
uggaaaaaaacaguccca

SEQ ID NO: 82221 - RNA, 19 nt, Artificial Sequence
  Synthetic
uuggaaaaaaacaguccca

SEQ ID NO: 82222 - RNA, 20 nt, Artificial Sequence
  Synthetic
cuuggaaaaaaacaguccca

SEQ ID NO: 82223 - RNA, 21 nt, Artificial Sequence
  Synthetic
ucuuggaaaaaaacaguccca

SEQ ID NO: 82224 - RNA, 22 nt, Artificial Sequence
  Synthetic
cucuuggaaaaaaacaguccca

SEQ ID NO: 82225 - RNA, 23 nt, Artificial Sequence
  Synthetic
ucucuuggaaaaaaacaguccca

SEQ ID NO: 82226 - RNA, 18 nt, Artificial Sequence
  Synthetic
cuuguaaaaacuguccca

SEQ ID NO: 82227 - RNA, 20 nt, Artificial Sequence
  Synthetic
ugcuuguaaaaacuguccca

SEQ ID NO: 82228 - RNA, 21 nt, Artificial Sequence
  Synthetic
uugcuuguaaaaacuguccca

SEQ ID NO: 82229 - RNA, 22 nt, Artificial Sequence
  Synthetic
auugcuuguaaaaacuguccca

SEQ ID NO: 82230 - RNA, 23 nt, Artificial Sequence
  Synthetic
cauugcuuguaaaaacuguccca

SEQ ID NO: 82231 - RNA, 24 nt, Artificial Sequence
  Synthetic
ccauugcuuguaaaaacuguccca

SEQ ID NO: 82232 - RNA, 18 nt, Artificial Sequence
  Synthetic
cuaauucuuuuuguccca

SEQ ID NO: 82233 - RNA, 19 nt, Artificial Sequence
  Synthetic
ccuaauucuuuuuguccca

SEQ ID NO: 82234 - RNA, 20 nt, Artificial Sequence
  Synthetic
uccuaauucuuuuuguccca

SEQ ID NO: 82235 - RNA, 21 nt, Artificial Sequence
  Synthetic
uuccuaauucuuuuuguccca

SEQ ID NO: 82236 - RNA, 22 nt, Artificial Sequence
  Synthetic
uuuccuaauucuuuuuguccca

SEQ ID NO: 82237 - RNA, 23 nt, Artificial Sequence
  Synthetic
uuuuccuaauucuuuuuguccca

SEQ ID NO: 82238 - RNA, 24 nt, Artificial Sequence
  Synthetic
uuuuuccuaauucuuuuuguccca

SEQ ID NO: 82239 - RNA, 18 nt, Artificial Sequence
  Synthetic
uuauugagccaguuccca

SEQ ID NO: 82240 - RNA, 19 nt, Artificial Sequence
  Synthetic
uuuauugagccaguuccca

SEQ ID NO: 82241 - RNA, 20 nt, Artificial Sequence
  Synthetic
uuuuauugagccaguuccca

SEQ ID NO: 82242 - RNA, 21 nt, Artificial Sequence
  Synthetic
auuuuauugagccaguuccca

SEQ ID NO: 82243 - RNA, 22 nt, Artificial Sequence
  Synthetic
cauuuuauugagccaguuccca

SEQ ID NO: 82244 - RNA, 23 nt, Artificial Sequence
  Synthetic
acauuuuauugagccaguuccca

SEQ ID NO: 82245 - RNA, 24 nt, Artificial Sequence
  Synthetic
aacauuuuauugagccaguuccca

SEQ ID NO: 82246 - RNA, 18 nt, Artificial Sequence
  Synthetic
ccagucugcucuuuccca

SEQ ID NO: 82247 - RNA, 19 nt, Artificial Sequence
  Synthetic
uccagucugcucuuuccca

SEQ ID NO: 82248 - RNA, 20 nt, Artificial Sequence
  Synthetic
cuccagucugcucuuuccca

SEQ ID NO: 82249 - RNA, 21 nt, Artificial Sequence
  Synthetic
acuccagucugcucuuuccca

SEQ ID NO: 82250 - RNA, 22 nt, Artificial Sequence
  Synthetic
uacuccagucugcucuuuccca

SEQ ID NO: 82251 - RNA, 23 nt, Artificial Sequence
  Synthetic
uuacuccagucugcucuuuccca

SEQ ID NO: 82252 - RNA, 24 nt, Artificial Sequence
  Synthetic
cuuacuccagucugcucuuuccca

SEQ ID NO: 82253 - RNA, 19 nt, Artificial Sequence
  Synthetic
aggguuccagaguuuccca

SEQ ID NO: 82254 - RNA, 20 nt, Artificial Sequence
  Synthetic
aaggguuccagaguuuccca

SEQ ID NO: 82255 - RNA, 21 nt, Artificial Sequence
  Synthetic
caaggguuccagaguuuccca

SEQ ID NO: 82256 - RNA, 22 nt, Artificial Sequence
  Synthetic
acaaggguuccagaguuuccca

SEQ ID NO: 82257 - RNA, 23 nt, Artificial Sequence
  Synthetic
uacaaggguuccagaguuuccca

SEQ ID NO: 82258 - RNA, 24 nt, Artificial Sequence
  Synthetic
uuacaaggguuccagaguuuccca

SEQ ID NO: 82259 - RNA, 18 nt, Artificial Sequence
  Synthetic
ccuccacaaauuuuccca

SEQ ID NO: 82260 - RNA, 19 nt, Artificial Sequence
  Synthetic
cccuccacaaauuuuccca

SEQ ID NO: 82261 - RNA, 21 nt, Artificial Sequence
  Synthetic
ugcccuccacaaauuuuccca

SEQ ID NO: 82262 - RNA, 22 nt, Artificial Sequence
  Synthetic
uugcccuccacaaauuuuccca

SEQ ID NO: 82263 - RNA, 23 nt, Artificial Sequence
  Synthetic
auugcccuccacaaauuuuccca

SEQ ID NO: 82264 - RNA, 24 nt, Artificial Sequence
  Synthetic
uauugcccuccacaaauuuuccca

SEQ ID NO: 82265 - RNA, 18 nt, Artificial Sequence
  Synthetic
acauacugaauaaagcca

SEQ ID NO: 82266 - RNA, 19 nt, Artificial Sequence
  Synthetic
uacauacugaauaaagcca

SEQ ID NO: 82267 - RNA, 20 nt, Artificial Sequence
  Synthetic
uuacauacugaauaaagcca

SEQ ID NO: 82268 - RNA, 22 nt, Artificial Sequence
  Synthetic
uguuacauacugaauaaagcca

SEQ ID NO: 82269 - RNA, 23 nt, Artificial Sequence
  Synthetic
cuguuacauacugaauaaagcca

SEQ ID NO: 82270 - RNA, 24 nt, Artificial Sequence
  Synthetic
ccuguuacauacugaauaaagcca

SEQ ID NO: 82271 - RNA, 18 nt, Artificial Sequence
  Synthetic
aaaauggcagagaagcca

SEQ ID NO: 82272 - RNA, 19 nt, Artificial Sequence
  Synthetic
uaaaauggcagagaagcca

SEQ ID NO: 82273 - RNA, 20 nt, Artificial Sequence
  Synthetic
auaaaauggcagagaagcca

SEQ ID NO: 82274 - RNA, 22 nt, Artificial Sequence
  Synthetic
agauaaaauggcagagaagcca

SEQ ID NO: 82275 - RNA, 23 nt, Artificial Sequence
  Synthetic
aagauaaaauggcagagaagcca

SEQ ID NO: 82276 - RNA, 24 nt, Artificial Sequence
  Synthetic
caagauaaaauggcagagaagcca

SEQ ID NO: 82277 - RNA, 19 nt, Artificial Sequence
  Synthetic
aggauaaaaggagaagcca

SEQ ID NO: 82278 - RNA, 20 nt, Artificial Sequence
  Synthetic
caggauaaaaggagaagcca

SEQ ID NO: 82279 - RNA, 21 nt, Artificial Sequence
  Synthetic
acaggauaaaaggagaagcca

SEQ ID NO: 82280 - RNA, 22 nt, Artificial Sequence
  Synthetic
aacaggauaaaaggagaagcca

SEQ ID NO: 82281 - RNA, 23 nt, Artificial Sequence
  Synthetic
uaacaggauaaaaggagaagcca

SEQ ID NO: 82282 - RNA, 24 nt, Artificial Sequence
  Synthetic
uuaacaggauaaaaggagaagcca

SEQ ID NO: 82283 - RNA, 18 nt, Artificial Sequence
  Synthetic
cucagaggacugaagcca

SEQ ID NO: 82284 - RNA, 20 nt, Artificial Sequence
  Synthetic
ugcucagaggacugaagcca

SEQ ID NO: 82285 - RNA, 22 nt, Artificial Sequence
  Synthetic
ugugcucagaggacugaagcca

SEQ ID NO: 82286 - RNA, 23 nt, Artificial Sequence
  Synthetic
augugcucagaggacugaagcca

SEQ ID NO: 82287 - RNA, 24 nt, Artificial Sequence
  Synthetic
aaugugcucagaggacugaagcca

SEQ ID NO: 82288 - RNA, 18 nt, Artificial Sequence
  Synthetic
cucuauauauugaagcca

SEQ ID NO: 82289 - RNA, 19 nt, Artificial Sequence
  Synthetic
ccucuauauauugaagcca

SEQ ID NO: 82290 - RNA, 20 nt, Artificial Sequence
  Synthetic
cccucuauauauugaagcca

SEQ ID NO: 82291 - RNA, 21 nt, Artificial Sequence
  Synthetic
ucccucuauauauugaagcca

SEQ ID NO: 82292 - RNA, 23 nt, Artificial Sequence
  Synthetic
cgucccucuauauauugaagcca

SEQ ID NO: 82293 - RNA, 24 nt, Artificial Sequence
  Synthetic
acgucccucuauauauugaagcca

SEQ ID NO: 82294 - RNA, 21 nt, Artificial Sequence
  Synthetic
ugaagaggugaaaggcagcca

SEQ ID NO: 82295 - RNA, 22 nt, Artificial Sequence
  Synthetic
cugaagaggugaaaggcagcca

SEQ ID NO: 82296 - RNA, 23 nt, Artificial Sequence
  Synthetic
acugaagaggugaaaggcagcca

SEQ ID NO: 82297 - RNA, 24 nt, Artificial Sequence
  Synthetic
aacugaagaggugaaaggcagcca

SEQ ID NO: 82298 - RNA, 18 nt, Artificial Sequence
  Synthetic
cugcaugugcggcagcca

SEQ ID NO: 82299 - RNA, 20 nt, Artificial Sequence
  Synthetic
agcugcaugugcggcagcca

SEQ ID NO: 82300 - RNA, 21 nt, Artificial Sequence
  Synthetic
aagcugcaugugcggcagcca

SEQ ID NO: 82301 - RNA, 22 nt, Artificial Sequence
  Synthetic
aaagcugcaugugcggcagcca

SEQ ID NO: 82302 - RNA, 23 nt, Artificial Sequence
  Synthetic
caaagcugcaugugcggcagcca

SEQ ID NO: 82303 - RNA, 24 nt, Artificial Sequence
  Synthetic
ucaaagcugcaugugcggcagcca

SEQ ID NO: 82304 - RNA, 19 nt, Artificial Sequence
  Synthetic
agguccuaugcaagagcca

SEQ ID NO: 82305 - RNA, 20 nt, Artificial Sequence
  Synthetic
cagguccuaugcaagagcca

SEQ ID NO: 82306 - RNA, 21 nt, Artificial Sequence
  Synthetic
ucagguccuaugcaagagcca

SEQ ID NO: 82307 - RNA, 22 nt, Artificial Sequence
  Synthetic
cucagguccuaugcaagagcca

SEQ ID NO: 82308 - RNA, 23 nt, Artificial Sequence
  Synthetic
ccucagguccuaugcaagagcca

SEQ ID NO: 82309 - RNA, 24 nt, Artificial Sequence
  Synthetic
accucagguccuaugcaagagcca

SEQ ID NO: 82310 - RNA, 19 nt, Artificial Sequence
  Synthetic
aggcaaagcucuauagcca

SEQ ID NO: 82311 - RNA, 20 nt, Artificial Sequence
  Synthetic
aaggcaaagcucuauagcca

SEQ ID NO: 82312 - RNA, 21 nt, Artificial Sequence
  Synthetic
aaaggcaaagcucuauagcca

SEQ ID NO: 82313 - RNA, 22 nt, Artificial Sequence
  Synthetic
caaaggcaaagcucuauagcca

SEQ ID NO: 82314 - RNA, 23 nt, Artificial Sequence
  Synthetic
acaaaggcaaagcucuauagcca

SEQ ID NO: 82315 - RNA, 24 nt, Artificial Sequence
  Synthetic
uacaaaggcaaagcucuauagcca

SEQ ID NO: 82316 - RNA, 18 nt, Artificial Sequence
  Synthetic
uauuguuguuauuagcca

SEQ ID NO: 82317 - RNA, 19 nt, Artificial Sequence
  Synthetic
auauuguuguuauuagcca

SEQ ID NO: 82318 - RNA, 20 nt, Artificial Sequence
  Synthetic
aauauuguuguuauuagcca

SEQ ID NO: 82319 - RNA, 21 nt, Artificial Sequence
  Synthetic
caauauuguuguuauuagcca

SEQ ID NO: 82320 - RNA, 22 nt, Artificial Sequence
  Synthetic
ucaauauuguuguuauuagcca

SEQ ID NO: 82321 - RNA, 23 nt, Artificial Sequence
  Synthetic
aucaauauuguuguuauuagcca

SEQ ID NO: 82322 - RNA, 24 nt, Artificial Sequence
  Synthetic
aaucaauauuguuguuauuagcca

SEQ ID NO: 82323 - RNA, 18 nt, Artificial Sequence
  Synthetic
cuaaagaaauaaaggcca

SEQ ID NO: 82324 - RNA, 19 nt, Artificial Sequence
  Synthetic
acuaaagaaauaaaggcca

SEQ ID NO: 82325 - RNA, 20 nt, Artificial Sequence
  Synthetic
uacuaaagaaauaaaggcca

SEQ ID NO: 82326 - RNA, 21 nt, Artificial Sequence
  Synthetic
uuacuaaagaaauaaaggcca

SEQ ID NO: 82327 - RNA, 22 nt, Artificial Sequence
  Synthetic
auuacuaaagaaauaaaggcca

SEQ ID NO: 82328 - RNA, 23 nt, Artificial Sequence
  Synthetic
uauuacuaaagaaauaaaggcca

SEQ ID NO: 82329 - RNA, 24 nt, Artificial Sequence
  Synthetic
auauuacuaaagaaauaaaggcca

SEQ ID NO: 82330 - RNA, 18 nt, Artificial Sequence
  Synthetic
ugaauuuugaucaggcca

SEQ ID NO: 82331 - RNA, 19 nt, Artificial Sequence
  Synthetic
augaauuuugaucaggcca

SEQ ID NO: 82332 - RNA, 20 nt, Artificial Sequence
  Synthetic
aaugaauuuugaucaggcca

SEQ ID NO: 82333 - RNA, 21 nt, Artificial Sequence
  Synthetic
aaaugaauuuugaucaggcca

SEQ ID NO: 82334 - RNA, 22 nt, Artificial Sequence
  Synthetic
aaaaugaauuuugaucaggcca

SEQ ID NO: 82335 - RNA, 24 nt, Artificial Sequence
  Synthetic
ugaaaaugaauuuugaucaggcca

SEQ ID NO: 82336 - RNA, 18 nt, Artificial Sequence
  Synthetic
cuucugauuucgaggcca

SEQ ID NO: 82337 - RNA, 21 nt, Artificial Sequence
  Synthetic
uggcuucugauuucgaggcca

SEQ ID NO: 82338 - RNA, 22 nt, Artificial Sequence
  Synthetic
uuggcuucugauuucgaggcca

SEQ ID NO: 82339 - RNA, 23 nt, Artificial Sequence
  Synthetic
cuuggcuucugauuucgaggcca

SEQ ID NO: 82340 - RNA, 24 nt, Artificial Sequence
  Synthetic
ccuuggcuucugauuucgaggcca

SEQ ID NO: 82341 - RNA, 18 nt, Artificial Sequence
  Synthetic
aucuacaaguuugggcca

SEQ ID NO: 82342 - RNA, 19 nt, Artificial Sequence
  Synthetic
uaucuacaaguuugggcca

SEQ ID NO: 82343 - RNA, 20 nt, Artificial Sequence
  Synthetic
auaucuacaaguuugggcca

SEQ ID NO: 82344 - RNA, 21 nt, Artificial Sequence
  Synthetic
aauaucuacaaguuugggcca

SEQ ID NO: 82345 - RNA, 22 nt, Artificial Sequence
  Synthetic
caauaucuacaaguuugggcca

SEQ ID NO: 82346 - RNA, 18 nt, Artificial Sequence
  Synthetic
aaaugcaaugacuggcca

SEQ ID NO: 82347 - RNA, 19 nt, Artificial Sequence
  Synthetic
aaaaugcaaugacuggcca

SEQ ID NO: 82348 - RNA, 20 nt, Artificial Sequence
  Synthetic
caaaaugcaaugacuggcca

SEQ ID NO: 82349 - RNA, 22 nt, Artificial Sequence
  Synthetic
ugcaaaaugcaaugacuggcca

SEQ ID NO: 82350 - RNA, 24 nt, Artificial Sequence
  Synthetic
ugugcaaaaugcaaugacuggcca

SEQ ID NO: 82351 - RNA, 18 nt, Artificial Sequence
  Synthetic
ucaguacaugccuggcca

SEQ ID NO: 82352 - RNA, 20 nt, Artificial Sequence
  Synthetic
ugucaguacaugccuggcca

SEQ ID NO: 82353 - RNA, 21 nt, Artificial Sequence
  Synthetic
cugucaguacaugccuggcca

SEQ ID NO: 82354 - RNA, 22 nt, Artificial Sequence
  Synthetic
acugucaguacaugccuggcca

SEQ ID NO: 82355 - RNA, 23 nt, Artificial Sequence
  Synthetic
uacugucaguacaugccuggcca

SEQ ID NO: 82356 - RNA, 24 nt, Artificial Sequence
  Synthetic
auacugucaguacaugccuggcca

SEQ ID NO: 82357 - RNA, 21 nt, Artificial Sequence
  Synthetic
cagucaguaaaacaguggcca

SEQ ID NO: 82358 - RNA, 22 nt, Artificial Sequence
  Synthetic
ccagucaguaaaacaguggcca

SEQ ID NO: 82359 - RNA, 23 nt, Artificial Sequence
  Synthetic
uccagucaguaaaacaguggcca

SEQ ID NO: 82360 - RNA, 24 nt, Artificial Sequence
  Synthetic
uuccagucaguaaaacaguggcca

SEQ ID NO: 82361 - RNA, 18 nt, Artificial Sequence
  Synthetic
agauuugcaucaaugcca

SEQ ID NO: 82362 - RNA, 19 nt, Artificial Sequence
  Synthetic
aagauuugcaucaaugcca

SEQ ID NO: 82363 - RNA, 22 nt, Artificial Sequence
  Synthetic
uggaagauuugcaucaaugcca

SEQ ID NO: 82364 - RNA, 23 nt, Artificial Sequence
  Synthetic
cuggaagauuugcaucaaugcca

SEQ ID NO: 82365 - RNA, 24 nt, Artificial Sequence
  Synthetic
ccuggaagauuugcaucaaugcca

SEQ ID NO: 82366 - RNA, 18 nt, Artificial Sequence
  Synthetic
cugauaaaccacaugcca

SEQ ID NO: 82367 - RNA, 19 nt, Artificial Sequence
  Synthetic
ucugauaaaccacaugcca

SEQ ID NO: 82368 - RNA, 20 nt, Artificial Sequence
  Synthetic
cucugauaaaccacaugcca

SEQ ID NO: 82369 - RNA, 21 nt, Artificial Sequence
  Synthetic
ucucugauaaaccacaugcca

SEQ ID NO: 82370 - RNA, 23 nt, Artificial Sequence
  Synthetic
ugucucugauaaaccacaugcca

SEQ ID NO: 82371 - RNA, 18 nt, Artificial Sequence
  Synthetic
uuuagcuccaugaugcca

SEQ ID NO: 82372 - RNA, 19 nt, Artificial Sequence
  Synthetic
uuuuagcuccaugaugcca

SEQ ID NO: 82373 - RNA, 21 nt, Artificial Sequence
  Synthetic
uguuuuagcuccaugaugcca

SEQ ID NO: 82374 - RNA, 22 nt, Artificial Sequence
  Synthetic
cuguuuuagcuccaugaugcca

SEQ ID NO: 82375 - RNA, 23 nt, Artificial Sequence
  Synthetic
acuguuuuagcuccaugaugcca

SEQ ID NO: 82376 - RNA, 24 nt, Artificial Sequence
  Synthetic
cacuguuuuagcuccaugaugcca

SEQ ID NO: 82377 - RNA, 18 nt, Artificial Sequence
  Synthetic
caguuuccgaauaugcca

SEQ ID NO: 82378 - RNA, 19 nt, Artificial Sequence
  Synthetic
ucaguuuccgaauaugcca

SEQ ID NO: 82379 - RNA, 20 nt, Artificial Sequence
  Synthetic
aucaguuuccgaauaugcca

SEQ ID NO: 82380 - RNA, 21 nt, Artificial Sequence
  Synthetic
caucaguuuccgaauaugcca

SEQ ID NO: 82381 - RNA, 22 nt, Artificial Sequence
  Synthetic
acaucaguuuccgaauaugcca

SEQ ID NO: 82382 - RNA, 23 nt, Artificial Sequence
  Synthetic
aacaucaguuuccgaauaugcca

SEQ ID NO: 82383 - RNA, 24 nt, Artificial Sequence
  Synthetic
aaacaucaguuuccgaauaugcca

SEQ ID NO: 82384 - RNA, 20 nt, Artificial Sequence
  Synthetic
uggguaccuauuauaugcca

SEQ ID NO: 82385 - RNA, 21 nt, Artificial Sequence
  Synthetic
uuggguaccuauuauaugcca

SEQ ID NO: 82386 - RNA, 22 nt, Artificial Sequence
  Synthetic
auuggguaccuauuauaugcca

SEQ ID NO: 82387 - RNA, 23 nt, Artificial Sequence
  Synthetic
uauuggguaccuauuauaugcca

SEQ ID NO: 82388 - RNA, 24 nt, Artificial Sequence
  Synthetic
uuauuggguaccuauuauaugcca

SEQ ID NO: 82389 - RNA, 18 nt, Artificial Sequence
  Synthetic
aucacuaauacuaugcca

SEQ ID NO: 82390 - RNA, 19 nt, Artificial Sequence
  Synthetic
caucacuaauacuaugcca

SEQ ID NO: 82391 - RNA, 20 nt, Artificial Sequence
  Synthetic
acaucacuaauacuaugcca

SEQ ID NO: 82392 - RNA, 22 nt, Artificial Sequence
  Synthetic
agacaucacuaauacuaugcca

SEQ ID NO: 82393 - RNA, 23 nt, Artificial Sequence
  Synthetic
aagacaucacuaauacuaugcca

SEQ ID NO: 82394 - RNA, 24 nt, Artificial Sequence
  Synthetic
aaagacaucacuaauacuaugcca

SEQ ID NO: 82395 - RNA, 18 nt, Artificial Sequence
  Synthetic
acaaacuuauggcugcca

SEQ ID NO: 82396 - RNA, 19 nt, Artificial Sequence
  Synthetic
cacaaacuuauggcugcca

SEQ ID NO: 82397 - RNA, 20 nt, Artificial Sequence
  Synthetic
ccacaaacuuauggcugcca

SEQ ID NO: 82398 - RNA, 21 nt, Artificial Sequence
  Synthetic
accacaaacuuauggcugcca

SEQ ID NO: 82399 - RNA, 22 nt, Artificial Sequence
  Synthetic
aaccacaaacuuauggcugcca

SEQ ID NO: 82400 - RNA, 23 nt, Artificial Sequence
  Synthetic
aaaccacaaacuuauggcugcca

SEQ ID NO: 82401 - RNA, 24 nt, Artificial Sequence
  Synthetic
uaaaccacaaacuuauggcugcca

SEQ ID NO: 82402 - RNA, 18 nt, Artificial Sequence
  Synthetic
uucaaauaggcucugcca

SEQ ID NO: 82403 - RNA, 19 nt, Artificial Sequence
  Synthetic
auucaaauaggcucugcca

SEQ ID NO: 82404 - RNA, 21 nt, Artificial Sequence
  Synthetic
ugauucaaauaggcucugcca

SEQ ID NO: 82405 - RNA, 22 nt, Artificial Sequence
  Synthetic
augauucaaauaggcucugcca

SEQ ID NO: 82406 - RNA, 23 nt, Artificial Sequence
  Synthetic
uaugauucaaauaggcucugcca

SEQ ID NO: 82407 - RNA, 24 nt, Artificial Sequence
  Synthetic
auaugauucaaauaggcucugcca

SEQ ID NO: 82408 - RNA, 18 nt, Artificial Sequence
  Synthetic
aaaaugcagaaggugcca

SEQ ID NO: 82409 - RNA, 19 nt, Artificial Sequence
  Synthetic
uaaaaugcagaaggugcca

SEQ ID NO: 82410 - RNA, 20 nt, Artificial Sequence
  Synthetic
auaaaaugcagaaggugcca

SEQ ID NO: 82411 - RNA, 21 nt, Artificial Sequence
  Synthetic
cauaaaaugcagaaggugcca

SEQ ID NO: 82412 - RNA, 22 nt, Artificial Sequence
  Synthetic
acauaaaaugcagaaggugcca

SEQ ID NO: 82413 - RNA, 23 nt, Artificial Sequence
  Synthetic
aacauaaaaugcagaaggugcca

SEQ ID NO: 82414 - RNA, 24 nt, Artificial Sequence
  Synthetic
aaacauaaaaugcagaaggugcca

SEQ ID NO: 82415 - RNA, 18 nt, Artificial Sequence
  Synthetic
agauaagcaguggugcca

SEQ ID NO: 82416 - RNA, 21 nt, Artificial Sequence
  Synthetic
aggagauaagcaguggugcca

SEQ ID NO: 82417 - RNA, 22 nt, Artificial Sequence
  Synthetic
aaggagauaagcaguggugcca

SEQ ID NO: 82418 - RNA, 23 nt, Artificial Sequence
  Synthetic
caaggagauaagcaguggugcca

SEQ ID NO: 82419 - RNA, 24 nt, Artificial Sequence
  Synthetic
acaaggagauaagcaguggugcca

SEQ ID NO: 82420 - RNA, 18 nt, Artificial Sequence
  Synthetic
aucaauucuccauugcca

SEQ ID NO: 82421 - RNA, 19 nt, Artificial Sequence
  Synthetic
caucaauucuccauugcca

SEQ ID NO: 82422 - RNA, 20 nt, Artificial Sequence
  Synthetic
ccaucaauucuccauugcca

SEQ ID NO: 82423 - RNA, 22 nt, Artificial Sequence
  Synthetic
ugccaucaauucuccauugcca

SEQ ID NO: 82424 - RNA, 23 nt, Artificial Sequence
  Synthetic
cugccaucaauucuccauugcca

SEQ ID NO: 82425 - RNA, 24 nt, Artificial Sequence
  Synthetic
ucugccaucaauucuccauugcca

SEQ ID NO: 82426 - RNA, 18 nt, Artificial Sequence
  Synthetic
aauggcuaggacuugcca

SEQ ID NO: 82427 - RNA, 19 nt, Artificial Sequence
  Synthetic
caauggcuaggacuugcca

SEQ ID NO: 82428 - RNA, 20 nt, Artificial Sequence
  Synthetic
acaauggcuaggacuugcca

SEQ ID NO: 82429 - RNA, 21 nt, Artificial Sequence
  Synthetic
cacaauggcuaggacuugcca

SEQ ID NO: 82430 - RNA, 22 nt, Artificial Sequence
  Synthetic
ucacaauggcuaggacuugcca

SEQ ID NO: 82431 - RNA, 23 nt, Artificial Sequence
  Synthetic
uucacaauggcuaggacuugcca

SEQ ID NO: 82432 - RNA, 24 nt, Artificial Sequence
  Synthetic
auucacaauggcuaggacuugcca

SEQ ID NO: 82433 - RNA, 18 nt, Artificial Sequence
  Synthetic
uuuccaaauuccuugcca

SEQ ID NO: 82434 - RNA, 19 nt, Artificial Sequence
  Synthetic
uuuuccaaauuccuugcca

SEQ ID NO: 82435 - RNA, 20 nt, Artificial Sequence
  Synthetic
uuuuuccaaauuccuugcca

SEQ ID NO: 82436 - RNA, 21 nt, Artificial Sequence
  Synthetic
uuuuuuccaaauuccuugcca

SEQ ID NO: 82437 - RNA, 23 nt, Artificial Sequence
  Synthetic
aguuuuuuccaaauuccuugcca

SEQ ID NO: 82438 - RNA, 21 nt, Artificial Sequence
  Synthetic
uugucucagagacuguugcca

SEQ ID NO: 82439 - RNA, 22 nt, Artificial Sequence
  Synthetic
uuugucucagagacuguugcca

SEQ ID NO: 82440 - RNA, 23 nt, Artificial Sequence
  Synthetic
uuuugucucagagacuguugcca

SEQ ID NO: 82441 - RNA, 24 nt, Artificial Sequence
  Synthetic
uuuuugucucagagacuguugcca

SEQ ID NO: 82442 - RNA, 18 nt, Artificial Sequence
  Synthetic
agcacauuucuguugcca

SEQ ID NO: 82443 - RNA, 19 nt, Artificial Sequence
  Synthetic
aagcacauuucuguugcca

SEQ ID NO: 82444 - RNA, 20 nt, Artificial Sequence
  Synthetic
caagcacauuucuguugcca

SEQ ID NO: 82445 - RNA, 21 nt, Artificial Sequence
  Synthetic
ucaagcacauuucuguugcca

SEQ ID NO: 82446 - RNA, 22 nt, Artificial Sequence
  Synthetic
cucaagcacauuucuguugcca

SEQ ID NO: 82447 - RNA, 23 nt, Artificial Sequence
  Synthetic
ccucaagcacauuucuguugcca

SEQ ID NO: 82448 - RNA, 24 nt, Artificial Sequence
  Synthetic
cccucaagcacauuucuguugcca

SEQ ID NO: 82449 - RNA, 21 nt, Artificial Sequence
  Synthetic
uuggaguucagaaauuugcca

SEQ ID NO: 82450 - RNA, 23 nt, Artificial Sequence
  Synthetic
aguuggaguucagaaauuugcca

SEQ ID NO: 82451 - RNA, 24 nt, Artificial Sequence
  Synthetic
caguuggaguucagaaauuugcca

SEQ ID NO: 82452 - RNA, 21 nt, Artificial Sequence
  Synthetic
aaauaaaaaugagauuugcca

SEQ ID NO: 82453 - RNA, 22 nt, Artificial Sequence
  Synthetic
uaaauaaaaaugagauuugcca

SEQ ID NO: 82454 - RNA, 23 nt, Artificial Sequence
  Synthetic
uuaaauaaaaaugagauuugcca

SEQ ID NO: 82455 - RNA, 19 nt, Artificial Sequence
  Synthetic
agacagugcaaguuugcca

SEQ ID NO: 82456 - RNA, 20 nt, Artificial Sequence
  Synthetic
aagacagugcaaguuugcca

SEQ ID NO: 82457 - RNA, 21 nt, Artificial Sequence
  Synthetic
aaagacagugcaaguuugcca

SEQ ID NO: 82458 - RNA, 22 nt, Artificial Sequence
  Synthetic
aaaagacagugcaaguuugcca

SEQ ID NO: 82459 - RNA, 24 nt, Artificial Sequence
  Synthetic
agaaaagacagugcaaguuugcca

SEQ ID NO: 82460 - RNA, 18 nt, Artificial Sequence
  Synthetic
caagccacugguuugcca

SEQ ID NO: 82461 - RNA, 19 nt, Artificial Sequence
  Synthetic
ccaagccacugguuugcca

SEQ ID NO: 82462 - RNA, 20 nt, Artificial Sequence
  Synthetic
cccaagccacugguuugcca

SEQ ID NO: 82463 - RNA, 21 nt, Artificial Sequence
  Synthetic
ucccaagccacugguuugcca

SEQ ID NO: 82464 - RNA, 23 nt, Artificial Sequence
  Synthetic
agucccaagccacugguuugcca

SEQ ID NO: 82465 - RNA, 18 nt, Artificial Sequence
  Synthetic
aaaacagauucaaaucca

SEQ ID NO: 82466 - RNA, 19 nt, Artificial Sequence
  Synthetic
aaaaacagauucaaaucca

SEQ ID NO: 82467 - RNA, 20 nt, Artificial Sequence
  Synthetic
caaaaacagauucaaaucca

SEQ ID NO: 82468 - RNA, 21 nt, Artificial Sequence
  Synthetic
acaaaaacagauucaaaucca

SEQ ID NO: 82469 - RNA, 22 nt, Artificial Sequence
  Synthetic
aacaaaaacagauucaaaucca

SEQ ID NO: 82470 - RNA, 23 nt, Artificial Sequence
  Synthetic
aaacaaaaacagauucaaaucca

SEQ ID NO: 82471 - RNA, 24 nt, Artificial Sequence
  Synthetic
caaacaaaaacagauucaaaucca

SEQ ID NO: 82472 - RNA, 18 nt, Artificial Sequence
  Synthetic
caugcuccaagaaaucca

SEQ ID NO: 82473 - RNA, 19 nt, Artificial Sequence
  Synthetic
ccaugcuccaagaaaucca

SEQ ID NO: 82474 - RNA, 21 nt, Artificial Sequence
  Synthetic
ugccaugcuccaagaaaucca

SEQ ID NO: 82475 - RNA, 23 nt, Artificial Sequence
  Synthetic
cgugccaugcuccaagaaaucca

SEQ ID NO: 82476 - RNA, 24 nt, Artificial Sequence
  Synthetic
ccgugccaugcuccaagaaaucca

SEQ ID NO: 82477 - RNA, 18 nt, Artificial Sequence
  Synthetic
uuaaaauacuagaaucca

SEQ ID NO: 82478 - RNA, 19 nt, Artificial Sequence
  Synthetic
uuuaaaauacuagaaucca

SEQ ID NO: 82479 - RNA, 20 nt, Artificial Sequence
  Synthetic
uuuuaaaauacuagaaucca

SEQ ID NO: 82480 - RNA, 22 nt, Artificial Sequence
  Synthetic
cguuuuaaaauacuagaaucca

SEQ ID NO: 82481 - RNA, 23 nt, Artificial Sequence
  Synthetic
ccguuuuaaaauacuagaaucca

SEQ ID NO: 82482 - RNA, 24 nt, Artificial Sequence
  Synthetic
uccguuuuaaaauacuagaaucca

SEQ ID NO: 82483 - RNA, 18 nt, Artificial Sequence
  Synthetic
uccccaugacugaaucca

SEQ ID NO: 82484 - RNA, 20 nt, Artificial Sequence
  Synthetic
uguccccaugacugaaucca

SEQ ID NO: 82485 - RNA, 21 nt, Artificial Sequence
  Synthetic
uuguccccaugacugaaucca

SEQ ID NO: 82486 - RNA, 22 nt, Artificial Sequence
  Synthetic
auuguccccaugacugaaucca

SEQ ID NO: 82487 - RNA, 23 nt, Artificial Sequence
  Synthetic
cauuguccccaugacugaaucca

SEQ ID NO: 82488 - RNA, 18 nt, Artificial Sequence
  Synthetic
auuuuuauugaacaucca

SEQ ID NO: 82489 - RNA, 19 nt, Artificial Sequence
  Synthetic
cauuuuuauugaacaucca

SEQ ID NO: 82490 - RNA, 20 nt, Artificial Sequence
  Synthetic
acauuuuuauugaacaucca

SEQ ID NO: 82491 - RNA, 21 nt, Artificial Sequence
  Synthetic
uacauuuuuauugaacaucca

SEQ ID NO: 82492 - RNA, 22 nt, Artificial Sequence
  Synthetic
auacauuuuuauugaacaucca

SEQ ID NO: 82493 - RNA, 23 nt, Artificial Sequence
  Synthetic
aauacauuuuuauugaacaucca

SEQ ID NO: 82494 - RNA, 24 nt, Artificial Sequence
  Synthetic
caauacauuuuuauugaacaucca

SEQ ID NO: 82495 - RNA, 18 nt, Artificial Sequence
  Synthetic
augagaaaacuacaucca

SEQ ID NO: 82496 - RNA, 19 nt, Artificial Sequence
  Synthetic
aaugagaaaacuacaucca

SEQ ID NO: 82497 - RNA, 20 nt, Artificial Sequence
  Synthetic
uaaugagaaaacuacaucca

SEQ ID NO: 82498 - RNA, 21 nt, Artificial Sequence
  Synthetic
auaaugagaaaacuacaucca

SEQ ID NO: 82499 - RNA, 22 nt, Artificial Sequence
  Synthetic
uauaaugagaaaacuacaucca

SEQ ID NO: 82500 - RNA, 23 nt, Artificial Sequence
  Synthetic
cuauaaugagaaaacuacaucca

SEQ ID NO: 82501 - RNA, 24 nt, Artificial Sequence
  Synthetic
ucuauaaugagaaaacuacaucca

SEQ ID NO: 82502 - RNA, 18 nt, Artificial Sequence
  Synthetic
aaaugcauacuccaucca

SEQ ID NO: 82503 - RNA, 19 nt, Artificial Sequence
  Synthetic
uaaaugcauacuccaucca

SEQ ID NO: 82504 - RNA, 20 nt, Artificial Sequence
  Synthetic
auaaaugcauacuccaucca

SEQ ID NO: 82505 - RNA, 21 nt, Artificial Sequence
  Synthetic
uauaaaugcauacuccaucca

SEQ ID NO: 82506 - RNA, 22 nt, Artificial Sequence
  Synthetic
uuauaaaugcauacuccaucca

SEQ ID NO: 82507 - RNA, 23 nt, Artificial Sequence
  Synthetic
auuauaaaugcauacuccaucca

SEQ ID NO: 82508 - RNA, 24 nt, Artificial Sequence
  Synthetic
aauuauaaaugcauacuccaucca

SEQ ID NO: 82509 - RNA, 18 nt, Artificial Sequence
  Synthetic
uucaacuuuuaagaucca

SEQ ID NO: 82510 - RNA, 19 nt, Artificial Sequence
  Synthetic
uuucaacuuuuaagaucca

SEQ ID NO: 82511 - RNA, 20 nt, Artificial Sequence
  Synthetic
uuuucaacuuuuaagaucca

SEQ ID NO: 82512 - RNA, 18 nt, Artificial Sequence
  Synthetic
cugacaugcccauaucca

SEQ ID NO: 82513 - RNA, 19 nt, Artificial Sequence
  Synthetic
acugacaugcccauaucca

SEQ ID NO: 82514 - RNA, 20 nt, Artificial Sequence
  Synthetic
aacugacaugcccauaucca

SEQ ID NO: 82515 - RNA, 21 nt, Artificial Sequence
  Synthetic
aaacugacaugcccauaucca

SEQ ID NO: 82516 - RNA, 23 nt, Artificial Sequence
  Synthetic
ugaaacugacaugcccauaucca

SEQ ID NO: 82517 - RNA, 24 nt, Artificial Sequence
  Synthetic
augaaacugacaugcccauaucca

SEQ ID NO: 82518 - RNA, 21 nt, Artificial Sequence
  Synthetic
uucauuuucaauaacuaucca

SEQ ID NO: 82519 - RNA, 22 nt, Artificial Sequence
  Synthetic
auucauuuucaauaacuaucca

SEQ ID NO: 82520 - RNA, 24 nt, Artificial Sequence
  Synthetic
agauucauuuucaauaacuaucca

SEQ ID NO: 82521 - RNA, 18 nt, Artificial Sequence
  Synthetic
cuauucacugccuaucca

SEQ ID NO: 82522 - RNA, 20 nt, Artificial Sequence
  Synthetic
ugcuauucacugccuaucca

SEQ ID NO: 82523 - RNA, 23 nt, Artificial Sequence
  Synthetic
uggugcuauucacugccuaucca

SEQ ID NO: 82524 - RNA, 18 nt, Artificial Sequence
  Synthetic
auuggcccuuaguaucca

SEQ ID NO: 82525 - RNA, 19 nt, Artificial Sequence
  Synthetic
aauuggcccuuaguaucca

SEQ ID NO: 82526 - RNA, 20 nt, Artificial Sequence
  Synthetic
uaauuggcccuuaguaucca

SEQ ID NO: 82527 - RNA, 22 nt, Artificial Sequence
  Synthetic
uguaauuggcccuuaguaucca

SEQ ID NO: 82528 - RNA, 23 nt, Artificial Sequence
  Synthetic
auguaauuggcccuuaguaucca

SEQ ID NO: 82529 - RNA, 24 nt, Artificial Sequence
  Synthetic
cauguaauuggcccuuaguaucca

SEQ ID NO: 82530 - RNA, 21 nt, Artificial Sequence
  Synthetic
ucuguaaucuuccuuuaucca

SEQ ID NO: 82531 - RNA, 22 nt, Artificial Sequence
  Synthetic
aucuguaaucuuccuuuaucca

SEQ ID NO: 82532 - RNA, 23 nt, Artificial Sequence
  Synthetic
aaucuguaaucuuccuuuaucca

SEQ ID NO: 82533 - RNA, 24 nt, Artificial Sequence
  Synthetic
uaaucuguaaucuuccuuuaucca

SEQ ID NO: 82534 - RNA, 19 nt, Artificial Sequence
  Synthetic
uguaaacauauaaacucca

SEQ ID NO: 82535 - RNA, 20 nt, Artificial Sequence
  Synthetic
auguaaacauauaaacucca

SEQ ID NO: 82536 - RNA, 21 nt, Artificial Sequence
  Synthetic
aauguaaacauauaaacucca

SEQ ID NO: 82537 - RNA, 23 nt, Artificial Sequence
  Synthetic
agaauguaaacauauaaacucca

SEQ ID NO: 82538 - RNA, 24 nt, Artificial Sequence
  Synthetic
aagaauguaaacauauaaacucca

SEQ ID NO: 82539 - RNA, 18 nt, Artificial Sequence
  Synthetic
uauuuaauuggaacucca

SEQ ID NO: 82540 - RNA, 19 nt, Artificial Sequence
  Synthetic
uuauuuaauuggaacucca

SEQ ID NO: 82541 - RNA, 22 nt, Artificial Sequence
  Synthetic
agguuauuuaauuggaacucca

SEQ ID NO: 82542 - RNA, 23 nt, Artificial Sequence
  Synthetic
uagguuauuuaauuggaacucca

SEQ ID NO: 82543 - RNA, 24 nt, Artificial Sequence
  Synthetic
uuagguuauuuaauuggaacucca

SEQ ID NO: 82544 - RNA, 19 nt, Artificial Sequence
  Synthetic
uguaggaaaaaguacucca

SEQ ID NO: 82545 - RNA, 20 nt, Artificial Sequence
  Synthetic
cuguaggaaaaaguacucca

SEQ ID NO: 82546 - RNA, 21 nt, Artificial Sequence
  Synthetic
ccuguaggaaaaaguacucca

SEQ ID NO: 82547 - RNA, 22 nt, Artificial Sequence
  Synthetic
cccuguaggaaaaaguacucca

SEQ ID NO: 82548 - RNA, 23 nt, Artificial Sequence
  Synthetic
ucccuguaggaaaaaguacucca

SEQ ID NO: 82549 - RNA, 24 nt, Artificial Sequence
  Synthetic
uucccuguaggaaaaaguacucca

SEQ ID NO: 82550 - RNA, 18 nt, Artificial Sequence
  Synthetic
uaauucuccuuuacucca

SEQ ID NO: 82551 - RNA, 19 nt, Artificial Sequence
  Synthetic
auaauucuccuuuacucca

SEQ ID NO: 82552 - RNA, 21 nt, Artificial Sequence
  Synthetic
ugauaauucuccuuuacucca

SEQ ID NO: 82553 - RNA, 23 nt, Artificial Sequence
  Synthetic
ugugauaauucuccuuuacucca

SEQ ID NO: 82554 - RNA, 24 nt, Artificial Sequence
  Synthetic
augugauaauucuccuuuacucca

SEQ ID NO: 82555 - RNA, 18 nt, Artificial Sequence
  Synthetic
caaagucaugacccucca

SEQ ID NO: 82556 - RNA, 20 nt, Artificial Sequence
  Synthetic
ugcaaagucaugacccucca

SEQ ID NO: 82557 - RNA, 21 nt, Artificial Sequence
  Synthetic
augcaaagucaugacccucca

SEQ ID NO: 82558 - RNA, 22 nt, Artificial Sequence
  Synthetic
aaugcaaagucaugacccucca

SEQ ID NO: 82559 - RNA, 18 nt, Artificial Sequence
  Synthetic
auuagguauucgccucca

SEQ ID NO: 82560 - RNA, 19 nt, Artificial Sequence
  Synthetic
aauuagguauucgccucca

SEQ ID NO: 82561 - RNA, 21 nt, Artificial Sequence
  Synthetic
agaauuagguauucgccucca

SEQ ID NO: 82562 - RNA, 22 nt, Artificial Sequence
  Synthetic
cagaauuagguauucgccucca

SEQ ID NO: 82563 - RNA, 23 nt, Artificial Sequence
  Synthetic
ccagaauuagguauucgccucca

SEQ ID NO: 82564 - RNA, 18 nt, Artificial Sequence
  Synthetic
ugccugggugugccucca

SEQ ID NO: 82565 - RNA, 19 nt, Artificial Sequence
  Synthetic
augccugggugugccucca

SEQ ID NO: 82566 - RNA, 20 nt, Artificial Sequence
  Synthetic
uaugccugggugugccucca

SEQ ID NO: 82567 - RNA, 21 nt, Artificial Sequence
  Synthetic
auaugccugggugugccucca

SEQ ID NO: 82568 - RNA, 22 nt, Artificial Sequence
  Synthetic
aauaugccugggugugccucca

SEQ ID NO: 82569 - RNA, 23 nt, Artificial Sequence
  Synthetic
uaauaugccugggugugccucca

SEQ ID NO: 82570 - RNA, 24 nt, Artificial Sequence
  Synthetic
auaauaugccugggugugccucca

SEQ ID NO: 82571 - RNA, 18 nt, Artificial Sequence
  Synthetic
cugaacaacuauccucca

SEQ ID NO: 82572 - RNA, 19 nt, Artificial Sequence
  Synthetic
acugaacaacuauccucca

SEQ ID NO: 82573 - RNA, 20 nt, Artificial Sequence
  Synthetic
uacugaacaacuauccucca

SEQ ID NO: 82574 - RNA, 21 nt, Artificial Sequence
  Synthetic
auacugaacaacuauccucca

SEQ ID NO: 82575 - RNA, 22 nt, Artificial Sequence
  Synthetic
cauacugaacaacuauccucca

SEQ ID NO: 82576 - RNA, 23 nt, Artificial Sequence
  Synthetic
ucauacugaacaacuauccucca

SEQ ID NO: 82577 - RNA, 24 nt, Artificial Sequence
  Synthetic
uucauacugaacaacuauccucca

SEQ ID NO: 82578 - RNA, 19 nt, Artificial Sequence
  Synthetic
agcuauuuuuuguccucca

SEQ ID NO: 82579 - RNA, 20 nt, Artificial Sequence
  Synthetic
aagcuauuuuuuguccucca

SEQ ID NO: 82580 - RNA, 21 nt, Artificial Sequence
  Synthetic
uaagcuauuuuuuguccucca

SEQ ID NO: 82581 - RNA, 22 nt, Artificial Sequence
  Synthetic
cuaagcuauuuuuuguccucca

SEQ ID NO: 82582 - RNA, 23 nt, Artificial Sequence
  Synthetic
acuaagcuauuuuuuguccucca

SEQ ID NO: 82583 - RNA, 24 nt, Artificial Sequence
  Synthetic
cacuaagcuauuuuuuguccucca

SEQ ID NO: 82584 - RNA, 20 nt, Artificial Sequence
  Synthetic
agguuugcugaacagcucca

SEQ ID NO: 82585 - RNA, 21 nt, Artificial Sequence
  Synthetic
aagguuugcugaacagcucca

SEQ ID NO: 82586 - RNA, 22 nt, Artificial Sequence
  Synthetic
caagguuugcugaacagcucca

SEQ ID NO: 82587 - RNA, 24 nt, Artificial Sequence
  Synthetic
ugcaagguuugcugaacagcucca

SEQ ID NO: 82588 - RNA, 18 nt, Artificial Sequence
  Synthetic
uauuuaacauaugcucca

SEQ ID NO: 82589 - RNA, 21 nt, Artificial Sequence
  Synthetic
ugguauuuaacauaugcucca

SEQ ID NO: 82590 - RNA, 22 nt, Artificial Sequence
  Synthetic
cugguauuuaacauaugcucca

SEQ ID NO: 82591 - RNA, 23 nt, Artificial Sequence
  Synthetic
ucugguauuuaacauaugcucca

SEQ ID NO: 82592 - RNA, 24 nt, Artificial Sequence
  Synthetic
uucugguauuuaacauaugcucca

SEQ ID NO: 82593 - RNA, 18 nt, Artificial Sequence
  Synthetic
cuucccagacuuucucca

SEQ ID NO: 82594 - RNA, 19 nt, Artificial Sequence
  Synthetic
ccuucccagacuuucucca

SEQ ID NO: 82595 - RNA, 21 nt, Artificial Sequence
  Synthetic
ugccuucccagacuuucucca

SEQ ID NO: 82596 - RNA, 22 nt, Artificial Sequence
  Synthetic
augccuucccagacuuucucca

SEQ ID NO: 82597 - RNA, 23 nt, Artificial Sequence
  Synthetic
uaugccuucccagacuuucucca

SEQ ID NO: 82598 - RNA, 24 nt, Artificial Sequence
  Synthetic
uuaugccuucccagacuuucucca

SEQ ID NO: 82599 - RNA, 19 nt, Artificial Sequence
  Synthetic
agguaguaaaguaagucca

SEQ ID NO: 82600 - RNA, 21 nt, Artificial Sequence
  Synthetic
agagguaguaaaguaagucca

SEQ ID NO: 82601 - RNA, 22 nt, Artificial Sequence
  Synthetic
aagagguaguaaaguaagucca

SEQ ID NO: 82602 - RNA, 23 nt, Artificial Sequence
  Synthetic
caagagguaguaaaguaagucca

SEQ ID NO: 82603 - RNA, 18 nt, Artificial Sequence
  Synthetic
aggacuaagauaugucca

SEQ ID NO: 82604 - RNA, 19 nt, Artificial Sequence
  Synthetic
uaggacuaagauaugucca

SEQ ID NO: 82605 - RNA, 20 nt, Artificial Sequence
  Synthetic
auaggacuaagauaugucca

SEQ ID NO: 82606 - RNA, 21 nt, Artificial Sequence
  Synthetic
aauaggacuaagauaugucca

SEQ ID NO: 82607 - RNA, 22 nt, Artificial Sequence
  Synthetic
uaauaggacuaagauaugucca

SEQ ID NO: 82608 - RNA, 23 nt, Artificial Sequence
  Synthetic
auaauaggacuaagauaugucca

SEQ ID NO: 82609 - RNA, 18 nt, Artificial Sequence
  Synthetic
ugaagaaauuacugucca

SEQ ID NO: 82610 - RNA, 19 nt, Artificial Sequence
  Synthetic
uugaagaaauuacugucca

SEQ ID NO: 82611 - RNA, 20 nt, Artificial Sequence
  Synthetic
auugaagaaauuacugucca

SEQ ID NO: 82612 - RNA, 21 nt, Artificial Sequence
  Synthetic
aauugaagaaauuacugucca

SEQ ID NO: 82613 - RNA, 22 nt, Artificial Sequence
  Synthetic
uaauugaagaaauuacugucca

SEQ ID NO: 82614 - RNA, 23 nt, Artificial Sequence
  Synthetic
auaauugaagaaauuacugucca

SEQ ID NO: 82615 - RNA, 24 nt, Artificial Sequence
  Synthetic
cauaauugaagaaauuacugucca

SEQ ID NO: 82616 - RNA, 19 nt, Artificial Sequence
  Synthetic
aguuacuuacugaauucca

SEQ ID NO: 82617 - RNA, 20 nt, Artificial Sequence
  Synthetic
aaguuacuuacugaauucca

SEQ ID NO: 82618 - RNA, 22 nt, Artificial Sequence
  Synthetic
agaaguuacuuacugaauucca

SEQ ID NO: 82619 - RNA, 23 nt, Artificial Sequence
  Synthetic
aagaaguuacuuacugaauucca

SEQ ID NO: 82620 - RNA, 24 nt, Artificial Sequence
  Synthetic
uaagaaguuacuuacugaauucca

SEQ ID NO: 82621 - RNA, 18 nt, Artificial Sequence
  Synthetic
cacacuguaugcauucca

SEQ ID NO: 82622 - RNA, 19 nt, Artificial Sequence
  Synthetic
acacacuguaugcauucca

SEQ ID NO: 82623 - RNA, 20 nt, Artificial Sequence
  Synthetic
aacacacuguaugcauucca

SEQ ID NO: 82624 - RNA, 22 nt, Artificial Sequence
  Synthetic
agaacacacuguaugcauucca

SEQ ID NO: 82625 - RNA, 23 nt, Artificial Sequence
  Synthetic
cagaacacacuguaugcauucca

SEQ ID NO: 82626 - RNA, 24 nt, Artificial Sequence
  Synthetic
ucagaacacacuguaugcauucca

SEQ ID NO: 82627 - RNA, 18 nt, Artificial Sequence
  Synthetic
aaugguauuuggauucca

SEQ ID NO: 82628 - RNA, 19 nt, Artificial Sequence
  Synthetic
caaugguauuuggauucca

SEQ ID NO: 82629 - RNA, 21 nt, Artificial Sequence
  Synthetic
ugcaaugguauuuggauucca

SEQ ID NO: 82630 - RNA, 22 nt, Artificial Sequence
  Synthetic
uugcaaugguauuuggauucca

SEQ ID NO: 82631 - RNA, 23 nt, Artificial Sequence
  Synthetic
auugcaaugguauuuggauucca

SEQ ID NO: 82632 - RNA, 24 nt, Artificial Sequence
  Synthetic
uauugcaaugguauuuggauucca

SEQ ID NO: 82633 - RNA, 18 nt, Artificial Sequence
  Synthetic
ccaacuccagauauucca

SEQ ID NO: 82634 - RNA, 19 nt, Artificial Sequence
  Synthetic
uccaacuccagauauucca

SEQ ID NO: 82635 - RNA, 20 nt, Artificial Sequence
  Synthetic
uuccaacuccagauauucca

SEQ ID NO: 82636 - RNA, 21 nt, Artificial Sequence
  Synthetic
uuuccaacuccagauauucca

SEQ ID NO: 82637 - RNA, 22 nt, Artificial Sequence
  Synthetic
cuuuccaacuccagauauucca

SEQ ID NO: 82638 - RNA, 24 nt, Artificial Sequence
  Synthetic
ugcuuuccaacuccagauauucca

SEQ ID NO: 82639 - RNA, 18 nt, Artificial Sequence
  Synthetic
uagcuaaucauuauucca

SEQ ID NO: 82640 - RNA, 19 nt, Artificial Sequence
  Synthetic
auagcuaaucauuauucca

SEQ ID NO: 82641 - RNA, 20 nt, Artificial Sequence
  Synthetic
aauagcuaaucauuauucca

SEQ ID NO: 82642 - RNA, 21 nt, Artificial Sequence
  Synthetic
uaauagcuaaucauuauucca

SEQ ID NO: 82643 - RNA, 22 nt, Artificial Sequence
  Synthetic
uuaauagcuaaucauuauucca

SEQ ID NO: 82644 - RNA, 23 nt, Artificial Sequence
  Synthetic
auuaauagcuaaucauuauucca

SEQ ID NO: 82645 - RNA, 24 nt, Artificial Sequence
  Synthetic
uauuaauagcuaaucauuauucca

SEQ ID NO: 82646 - RNA, 18 nt, Artificial Sequence
  Synthetic
uucaagaauguuauucca

SEQ ID NO: 82647 - RNA, 19 nt, Artificial Sequence
  Synthetic
auucaagaauguuauucca

SEQ ID NO: 82648 - RNA, 20 nt, Artificial Sequence
  Synthetic
aauucaagaauguuauucca

SEQ ID NO: 82649 - RNA, 21 nt, Artificial Sequence
  Synthetic
aaauucaagaauguuauucca

SEQ ID NO: 82650 - RNA, 22 nt, Artificial Sequence
  Synthetic
uaaauucaagaauguuauucca

SEQ ID NO: 82651 - RNA, 23 nt, Artificial Sequence
  Synthetic
auaaauucaagaauguuauucca

SEQ ID NO: 82652 - RNA, 24 nt, Artificial Sequence
  Synthetic
aauaaauucaagaauguuauucca

SEQ ID NO: 82653 - RNA, 18 nt, Artificial Sequence
  Synthetic
uauggucagccacuucca

SEQ ID NO: 82654 - RNA, 19 nt, Artificial Sequence
  Synthetic
auauggucagccacuucca

SEQ ID NO: 82655 - RNA, 20 nt, Artificial Sequence
  Synthetic
cauauggucagccacuucca

SEQ ID NO: 82656 - RNA, 21 nt, Artificial Sequence
  Synthetic
acauauggucagccacuucca

SEQ ID NO: 82657 - RNA, 22 nt, Artificial Sequence
  Synthetic
aacauauggucagccacuucca

SEQ ID NO: 82658 - RNA, 23 nt, Artificial Sequence
  Synthetic
caacauauggucagccacuucca

SEQ ID NO: 82659 - RNA, 24 nt, Artificial Sequence
  Synthetic
ucaacauauggucagccacuucca

SEQ ID NO: 82660 - RNA, 18 nt, Artificial Sequence
  Synthetic
uaugacauuaaucuucca

SEQ ID NO: 82661 - RNA, 19 nt, Artificial Sequence
  Synthetic
uuaugacauuaaucuucca

SEQ ID NO: 82662 - RNA, 22 nt, Artificial Sequence
  Synthetic
ugguuaugacauuaaucuucca

SEQ ID NO: 82663 - RNA, 23 nt, Artificial Sequence
  Synthetic
cugguuaugacauuaaucuucca

SEQ ID NO: 82664 - RNA, 24 nt, Artificial Sequence
  Synthetic
ucugguuaugacauuaaucuucca

SEQ ID NO: 82665 - RNA, 18 nt, Artificial Sequence
  Synthetic
auuuacgggcuucuucca

SEQ ID NO: 82666 - RNA, 19 nt, Artificial Sequence
  Synthetic
cauuuacgggcuucuucca

SEQ ID NO: 82667 - RNA, 20 nt, Artificial Sequence
  Synthetic
ccauuuacgggcuucuucca

SEQ ID NO: 82668 - RNA, 21 nt, Artificial Sequence
  Synthetic
uccauuuacgggcuucuucca

SEQ ID NO: 82669 - RNA, 22 nt, Artificial Sequence
  Synthetic
uuccauuuacgggcuucuucca

SEQ ID NO: 82670 - RNA, 23 nt, Artificial Sequence
  Synthetic
auuccauuuacgggcuucuucca

SEQ ID NO: 82671 - RNA, 24 nt, Artificial Sequence
  Synthetic
cauuccauuuacgggcuucuucca

SEQ ID NO: 82672 - RNA, 21 nt, Artificial Sequence
  Synthetic
aauaauuuuuuuaaaguucca

SEQ ID NO: 82673 - RNA, 22 nt, Artificial Sequence
  Synthetic
aaauaauuuuuuuaaaguucca

SEQ ID NO: 82674 - RNA, 23 nt, Artificial Sequence
  Synthetic
uaaauaauuuuuuuaaaguucca

SEQ ID NO: 82675 - RNA, 24 nt, Artificial Sequence
  Synthetic
auaaauaauuuuuuuaaaguucca

SEQ ID NO: 82676 - RNA, 18 nt, Artificial Sequence
  Synthetic
ucuacuaauacgguucca

SEQ ID NO: 82677 - RNA, 19 nt, Artificial Sequence
  Synthetic
uucuacuaauacgguucca

SEQ ID NO: 82678 - RNA, 20 nt, Artificial Sequence
  Synthetic
auucuacuaauacgguucca

SEQ ID NO: 82679 - RNA, 21 nt, Artificial Sequence
  Synthetic
uauucuacuaauacgguucca

SEQ ID NO: 82680 - RNA, 22 nt, Artificial Sequence
  Synthetic
uuauucuacuaauacgguucca

SEQ ID NO: 82681 - RNA, 23 nt, Artificial Sequence
  Synthetic
uuuauucuacuaauacgguucca

SEQ ID NO: 82682 - RNA, 18 nt, Artificial Sequence
  Synthetic
uaaaauaucguuguucca

SEQ ID NO: 82683 - RNA, 20 nt, Artificial Sequence
  Synthetic
uguaaaauaucguuguucca

SEQ ID NO: 82684 - RNA, 21 nt, Artificial Sequence
  Synthetic
uuguaaaauaucguuguucca

SEQ ID NO: 82685 - RNA, 22 nt, Artificial Sequence
  Synthetic
uuuguaaaauaucguuguucca

SEQ ID NO: 82686 - RNA, 18 nt, Artificial Sequence
  Synthetic
aaucagagucaauuucca

SEQ ID NO: 82687 - RNA, 20 nt, Artificial Sequence
  Synthetic
ugaaucagagucaauuucca

SEQ ID NO: 82688 - RNA, 21 nt, Artificial Sequence
  Synthetic
uugaaucagagucaauuucca

SEQ ID NO: 82689 - RNA, 22 nt, Artificial Sequence
  Synthetic
uuugaaucagagucaauuucca

SEQ ID NO: 82690 - RNA, 23 nt, Artificial Sequence
  Synthetic
cuuugaaucagagucaauuucca

SEQ ID NO: 82691 - RNA, 24 nt, Artificial Sequence
  Synthetic
acuuugaaucagagucaauuucca

SEQ ID NO: 82692 - RNA, 18 nt, Artificial Sequence
  Synthetic
ugaacuaauuuauuucca

SEQ ID NO: 82693 - RNA, 19 nt, Artificial Sequence
  Synthetic
augaacuaauuuauuucca

SEQ ID NO: 82694 - RNA, 20 nt, Artificial Sequence
  Synthetic
caugaacuaauuuauuucca

SEQ ID NO: 82695 - RNA, 21 nt, Artificial Sequence
  Synthetic
ucaugaacuaauuuauuucca

SEQ ID NO: 82696 - RNA, 22 nt, Artificial Sequence
  Synthetic
uucaugaacuaauuuauuucca

SEQ ID NO: 82697 - RNA, 23 nt, Artificial Sequence
  Synthetic
auucaugaacuaauuuauuucca

SEQ ID NO: 82698 - RNA, 24 nt, Artificial Sequence
  Synthetic
uauucaugaacuaauuuauuucca

SEQ ID NO: 82699 - RNA, 18 nt, Artificial Sequence
  Synthetic
uaaucagaaaacuuucca

SEQ ID NO: 82700 - RNA, 20 nt, Artificial Sequence
  Synthetic
uguaaucagaaaacuuucca

SEQ ID NO: 82701 - RNA, 21 nt, Artificial Sequence
  Synthetic
auguaaucagaaaacuuucca

SEQ ID NO: 82702 - RNA, 23 nt, Artificial Sequence
  Synthetic
ugauguaaucagaaaacuuucca

SEQ ID NO: 82703 - RNA, 24 nt, Artificial Sequence
  Synthetic
augauguaaucagaaaacuuucca

SEQ ID NO: 82704 - RNA, 18 nt, Artificial Sequence
  Synthetic
cuaaaacagggcuuucca

SEQ ID NO: 82705 - RNA, 19 nt, Artificial Sequence
  Synthetic
ucuaaaacagggcuuucca

SEQ ID NO: 82706 - RNA, 20 nt, Artificial Sequence
  Synthetic
cucuaaaacagggcuuucca

SEQ ID NO: 82707 - RNA, 23 nt, Artificial Sequence
  Synthetic
aggcucuaaaacagggcuuucca

SEQ ID NO: 82708 - RNA, 24 nt, Artificial Sequence
  Synthetic
aaggcucuaaaacagggcuuucca

SEQ ID NO: 82709 - RNA, 22 nt, Artificial Sequence
  Synthetic
ugucaaaauuauuuucuuucca

SEQ ID NO: 82710 - RNA, 23 nt, Artificial Sequence
  Synthetic
cugucaaaauuauuuucuuucca

SEQ ID NO: 82711 - RNA, 24 nt, Artificial Sequence
  Synthetic
acugucaaaauuauuuucuuucca

SEQ ID NO: 82712 - RNA, 18 nt, Artificial Sequence
  Synthetic
ccuaggcagccuuuucca

SEQ ID NO: 82713 - RNA, 19 nt, Artificial Sequence
  Synthetic
cccuaggcagccuuuucca

SEQ ID NO: 82714 - RNA, 20 nt, Artificial Sequence
  Synthetic
acccuaggcagccuuuucca

SEQ ID NO: 82715 - RNA, 21 nt, Artificial Sequence
  Synthetic
cacccuaggcagccuuuucca

SEQ ID NO: 82716 - RNA, 22 nt, Artificial Sequence
  Synthetic
acacccuaggcagccuuuucca

SEQ ID NO: 82717 - RNA, 23 nt, Artificial Sequence
  Synthetic
uacacccuaggcagccuuuucca

SEQ ID NO: 82718 - RNA, 24 nt, Artificial Sequence
  Synthetic
cuacacccuaggcagccuuuucca

SEQ ID NO: 82719 - RNA, 22 nt, Artificial Sequence
  Synthetic
cgaucaagaaauaauuuuucca

SEQ ID NO: 82720 - RNA, 23 nt, Artificial Sequence
  Synthetic
acgaucaagaaauaauuuuucca

SEQ ID NO: 82721 - RNA, 24 nt, Artificial Sequence
  Synthetic
aacgaucaagaaauaauuuuucca

SEQ ID NO: 82722 - RNA, 18 nt, Artificial Sequence
  Synthetic
uguaucuugcuuuuucca

SEQ ID NO: 82723 - RNA, 19 nt, Artificial Sequence
  Synthetic
cuguaucuugcuuuuucca

SEQ ID NO: 82724 - RNA, 20 nt, Artificial Sequence
  Synthetic
acuguaucuugcuuuuucca

SEQ ID NO: 82725 - RNA, 23 nt, Artificial Sequence
  Synthetic
aggacuguaucuugcuuuuucca

SEQ ID NO: 82726 - RNA, 24 nt, Artificial Sequence
  Synthetic
aaggacuguaucuugcuuuuucca

SEQ ID NO: 82727 - RNA, 21 nt, Artificial Sequence
  Synthetic
agggaaaaguggccaaaagca

SEQ ID NO: 82728 - RNA, 18 nt, Artificial Sequence
  Synthetic
accauguuuuggaaagca

SEQ ID NO: 82729 - RNA, 19 nt, Artificial Sequence
  Synthetic
caccauguuuuggaaagca

SEQ ID NO: 82730 - RNA, 20 nt, Artificial Sequence
  Synthetic
ccaccauguuuuggaaagca

SEQ ID NO: 82731 - RNA, 21 nt, Artificial Sequence
  Synthetic
cccaccauguuuuggaaagca

SEQ ID NO: 82732 - RNA, 22 nt, Artificial Sequence
  Synthetic
ucccaccauguuuuggaaagca

SEQ ID NO: 82733 - RNA, 23 nt, Artificial Sequence
  Synthetic
cucccaccauguuuuggaaagca

SEQ ID NO: 82734 - RNA, 24 nt, Artificial Sequence
  Synthetic
acucccaccauguuuuggaaagca

SEQ ID NO: 82735 - RNA, 18 nt, Artificial Sequence
  Synthetic
cggguucaguugaaagca

SEQ ID NO: 82736 - RNA, 19 nt, Artificial Sequence
  Synthetic
ucggguucaguugaaagca

SEQ ID NO: 82737 - RNA, 20 nt, Artificial Sequence
  Synthetic
uucggguucaguugaaagca

SEQ ID NO: 82738 - RNA, 21 nt, Artificial Sequence
  Synthetic
cuucggguucaguugaaagca

SEQ ID NO: 82739 - RNA, 22 nt, Artificial Sequence
  Synthetic
ucuucggguucaguugaaagca

SEQ ID NO: 82740 - RNA, 23 nt, Artificial Sequence
  Synthetic
cucuucggguucaguugaaagca

SEQ ID NO: 82741 - RNA, 24 nt, Artificial Sequence
  Synthetic
ucucuucggguucaguugaaagca

SEQ ID NO: 82742 - RNA, 18 nt, Artificial Sequence
  Synthetic
uaaggggcagguaaagca

SEQ ID NO: 82743 - RNA, 20 nt, Artificial Sequence
  Synthetic
uguaaggggcagguaaagca

SEQ ID NO: 82744 - RNA, 21 nt, Artificial Sequence
  Synthetic
auguaaggggcagguaaagca

SEQ ID NO: 82745 - RNA, 24 nt, Artificial Sequence
  Synthetic
aggauguaaggggcagguaaagca

SEQ ID NO: 82746 - RNA, 21 nt, Artificial Sequence
  Synthetic
uaaagaacaaaauguaaagca

SEQ ID NO: 82747 - RNA, 22 nt, Artificial Sequence
  Synthetic
cuaaagaacaaaauguaaagca

SEQ ID NO: 82748 - RNA, 24 nt, Artificial Sequence
  Synthetic
ugcuaaagaacaaaauguaaagca

SEQ ID NO: 82749 - RNA, 18 nt, Artificial Sequence
  Synthetic
ucuugugugauuaaagca

SEQ ID NO: 82750 - RNA, 19 nt, Artificial Sequence
  Synthetic
cucuugugugauuaaagca

SEQ ID NO: 82751 - RNA, 20 nt, Artificial Sequence
  Synthetic
acucuugugugauuaaagca

SEQ ID NO: 82752 - RNA, 21 nt, Artificial Sequence
  Synthetic
cacucuugugugauuaaagca

SEQ ID NO: 82753 - RNA, 22 nt, Artificial Sequence
  Synthetic
ccacucuugugugauuaaagca

SEQ ID NO: 82754 - RNA, 23 nt, Artificial Sequence
  Synthetic
accacucuugugugauuaaagca

SEQ ID NO: 82755 - RNA, 24 nt, Artificial Sequence
  Synthetic
aaccacucuugugugauuaaagca

SEQ ID NO: 82756 - RNA, 18 nt, Artificial Sequence
  Synthetic
caaucggauauuaaagca

SEQ ID NO: 82757 - RNA, 20 nt, Artificial Sequence
  Synthetic
ugcaaucggauauuaaagca

SEQ ID NO: 82758 - RNA, 21 nt, Artificial Sequence
  Synthetic
augcaaucggauauuaaagca

SEQ ID NO: 82759 - RNA, 22 nt, Artificial Sequence
  Synthetic
uaugcaaucggauauuaaagca

SEQ ID NO: 82760 - RNA, 23 nt, Artificial Sequence
  Synthetic
uuaugcaaucggauauuaaagca

SEQ ID NO: 82761 - RNA, 24 nt, Artificial Sequence
  Synthetic
auuaugcaaucggauauuaaagca

SEQ ID NO: 82762 - RNA, 22 nt, Artificial Sequence
  Synthetic
ugagagaaaauaaacacaagca

SEQ ID NO: 82763 - RNA, 23 nt, Artificial Sequence
  Synthetic
uugagagaaaauaaacacaagca

SEQ ID NO: 82764 - RNA, 24 nt, Artificial Sequence
  Synthetic
uuugagagaaaauaaacacaagca

SEQ ID NO: 82765 - RNA, 18 nt, Artificial Sequence
  Synthetic
ucccuugccaggcaagca

SEQ ID NO: 82766 - RNA, 19 nt, Artificial Sequence
  Synthetic
cucccuugccaggcaagca

SEQ ID NO: 82767 - RNA, 20 nt, Artificial Sequence
  Synthetic
ucucccuugccaggcaagca

SEQ ID NO: 82768 - RNA, 21 nt, Artificial Sequence
  Synthetic
uucucccuugccaggcaagca

SEQ ID NO: 82769 - RNA, 22 nt, Artificial Sequence
  Synthetic
auucucccuugccaggcaagca

SEQ ID NO: 82770 - RNA, 23 nt, Artificial Sequence
  Synthetic
cauucucccuugccaggcaagca

SEQ ID NO: 82771 - RNA, 24 nt, Artificial Sequence
  Synthetic
acauucucccuugccaggcaagca

SEQ ID NO: 82772 - RNA, 18 nt, Artificial Sequence
  Synthetic
aauaaugagagucaagca

SEQ ID NO: 82773 - RNA, 19 nt, Artificial Sequence
  Synthetic
uaauaaugagagucaagca

SEQ ID NO: 82774 - RNA, 20 nt, Artificial Sequence
  Synthetic
cuaauaaugagagucaagca

SEQ ID NO: 82775 - RNA, 23 nt, Artificial Sequence
  Synthetic
aggcuaauaaugagagucaagca

SEQ ID NO: 82776 - RNA, 24 nt, Artificial Sequence
  Synthetic
aaggcuaauaaugagagucaagca

SEQ ID NO: 82777 - RNA, 18 nt, Artificial Sequence
  Synthetic
acauuauauuuucaagca

SEQ ID NO: 82778 - RNA, 19 nt, Artificial Sequence
  Synthetic
cacauuauauuuucaagca

SEQ ID NO: 82779 - RNA, 20 nt, Artificial Sequence
  Synthetic
ccacauuauauuuucaagca

SEQ ID NO: 82780 - RNA, 21 nt, Artificial Sequence
  Synthetic
accacauuauauuuucaagca

SEQ ID NO: 82781 - RNA, 22 nt, Artificial Sequence
  Synthetic
uaccacauuauauuuucaagca

SEQ ID NO: 82782 - RNA, 23 nt, Artificial Sequence
  Synthetic
uuaccacauuauauuuucaagca

SEQ ID NO: 82783 - RNA, 21 nt, Artificial Sequence
  Synthetic
caacaaaaagauaaagaagca

SEQ ID NO: 82784 - RNA, 23 nt, Artificial Sequence
  Synthetic
agcaacaaaaagauaaagaagca

SEQ ID NO: 82785 - RNA, 24 nt, Artificial Sequence
  Synthetic
cagcaacaaaaagauaaagaagca

SEQ ID NO: 82786 - RNA, 18 nt, Artificial Sequence
  Synthetic
aggguaaaauaagaagca

SEQ ID NO: 82787 - RNA, 19 nt, Artificial Sequence
  Synthetic
aaggguaaaauaagaagca

SEQ ID NO: 82788 - RNA, 20 nt, Artificial Sequence
  Synthetic
aaaggguaaaauaagaagca

SEQ ID NO: 82789 - RNA, 18 nt, Artificial Sequence
  Synthetic
cucuauucuuaagaagca

SEQ ID NO: 82790 - RNA, 19 nt, Artificial Sequence
  Synthetic
acucuauucuuaagaagca

SEQ ID NO: 82791 - RNA, 20 nt, Artificial Sequence
  Synthetic
aacucuauucuuaagaagca

SEQ ID NO: 82792 - RNA, 22 nt, Artificial Sequence
  Synthetic
ugaacucuauucuuaagaagca

SEQ ID NO: 82793 - RNA, 23 nt, Artificial Sequence
  Synthetic
cugaacucuauucuuaagaagca

SEQ ID NO: 82794 - RNA, 24 nt, Artificial Sequence
  Synthetic
ucugaacucuauucuuaagaagca

SEQ ID NO: 82795 - RNA, 18 nt, Artificial Sequence
  Synthetic
acccacuugccagaagca

SEQ ID NO: 82796 - RNA, 19 nt, Artificial Sequence
  Synthetic
aacccacuugccagaagca

SEQ ID NO: 82797 - RNA, 20 nt, Artificial Sequence
  Synthetic
caacccacuugccagaagca

SEQ ID NO: 82798 - RNA, 21 nt, Artificial Sequence
  Synthetic
ccaacccacuugccagaagca

SEQ ID NO: 82799 - RNA, 22 nt, Artificial Sequence
  Synthetic
accaacccacuugccagaagca

SEQ ID NO: 82800 - RNA, 23 nt, Artificial Sequence
  Synthetic
caccaacccacuugccagaagca

SEQ ID NO: 82801 - RNA, 24 nt, Artificial Sequence
  Synthetic
ccaccaacccacuugccagaagca

SEQ ID NO: 82802 - RNA, 18 nt, Artificial Sequence
  Synthetic
ccuaggaauagagaagca

SEQ ID NO: 82803 - RNA, 19 nt, Artificial Sequence
  Synthetic
accuaggaauagagaagca

SEQ ID NO: 82804 - RNA, 22 nt, Artificial Sequence
  Synthetic
aggaccuaggaauagagaagca

SEQ ID NO: 82805 - RNA, 23 nt, Artificial Sequence
  Synthetic
aaggaccuaggaauagagaagca

SEQ ID NO: 82806 - RNA, 24 nt, Artificial Sequence
  Synthetic
aaaggaccuaggaauagagaagca

SEQ ID NO: 82807 - RNA, 18 nt, Artificial Sequence
  Synthetic
auauuuuccacauaagca

SEQ ID NO: 82808 - RNA, 19 nt, Artificial Sequence
  Synthetic
cauauuuuccacauaagca

SEQ ID NO: 82809 - RNA, 20 nt, Artificial Sequence
  Synthetic
acauauuuuccacauaagca

SEQ ID NO: 82810 - RNA, 21 nt, Artificial Sequence
  Synthetic
aacauauuuuccacauaagca

SEQ ID NO: 82811 - RNA, 18 nt, Artificial Sequence
  Synthetic
caugagacuguauaagca

SEQ ID NO: 82812 - RNA, 19 nt, Artificial Sequence
  Synthetic
ucaugagacuguauaagca

SEQ ID NO: 82813 - RNA, 20 nt, Artificial Sequence
  Synthetic
uucaugagacuguauaagca

SEQ ID NO: 82814 - RNA, 21 nt, Artificial Sequence
  Synthetic
auucaugagacuguauaagca

SEQ ID NO: 82815 - RNA, 22 nt, Artificial Sequence
  Synthetic
aauucaugagacuguauaagca

SEQ ID NO: 82816 - RNA, 23 nt, Artificial Sequence
  Synthetic
aaauucaugagacuguauaagca

SEQ ID NO: 82817 - RNA, 24 nt, Artificial Sequence
  Synthetic
aaaauucaugagacuguauaagca

SEQ ID NO: 82818 - RNA, 21 nt, Artificial Sequence
  Synthetic
aaguggagagugagaacagca

SEQ ID NO: 82819 - RNA, 24 nt, Artificial Sequence
  Synthetic
aggaaguggagagugagaacagca

SEQ ID NO: 82820 - RNA, 18 nt, Artificial Sequence
  Synthetic
cagaaacuacacacagca

SEQ ID NO: 82821 - RNA, 19 nt, Artificial Sequence
  Synthetic
ucagaaacuacacacagca

SEQ ID NO: 82822 - RNA, 20 nt, Artificial Sequence
  Synthetic
cucagaaacuacacacagca

SEQ ID NO: 82823 - RNA, 21 nt, Artificial Sequence
  Synthetic
ucucagaaacuacacacagca

SEQ ID NO: 82824 - RNA, 22 nt, Artificial Sequence
  Synthetic
cucucagaaacuacacacagca

SEQ ID NO: 82825 - RNA, 23 nt, Artificial Sequence
  Synthetic
acucucagaaacuacacacagca

SEQ ID NO: 82826 - RNA, 18 nt, Artificial Sequence
  Synthetic
ccuuuagcauucacagca

SEQ ID NO: 82827 - RNA, 19 nt, Artificial Sequence
  Synthetic
cccuuuagcauucacagca

SEQ ID NO: 82828 - RNA, 20 nt, Artificial Sequence
  Synthetic
ucccuuuagcauucacagca

SEQ ID NO: 82829 - RNA, 21 nt, Artificial Sequence
  Synthetic
uucccuuuagcauucacagca

SEQ ID NO: 82830 - RNA, 22 nt, Artificial Sequence
  Synthetic
uuucccuuuagcauucacagca

SEQ ID NO: 82831 - RNA, 23 nt, Artificial Sequence
  Synthetic
auuucccuuuagcauucacagca

SEQ ID NO: 82832 - RNA, 18 nt, Artificial Sequence
  Synthetic
agugguaagcugacagca

SEQ ID NO: 82833 - RNA, 20 nt, Artificial Sequence
  Synthetic
agagugguaagcugacagca

SEQ ID NO: 82834 - RNA, 21 nt, Artificial Sequence
  Synthetic
cagagugguaagcugacagca

SEQ ID NO: 82835 - RNA, 22 nt, Artificial Sequence
  Synthetic
ccagagugguaagcugacagca

SEQ ID NO: 82836 - RNA, 23 nt, Artificial Sequence
  Synthetic
accagagugguaagcugacagca

SEQ ID NO: 82837 - RNA, 24 nt, Artificial Sequence
  Synthetic
uaccagagugguaagcugacagca

SEQ ID NO: 82838 - RNA, 18 nt, Artificial Sequence
  Synthetic
ucuacguuacuuacagca

SEQ ID NO: 82839 - RNA, 20 nt, Artificial Sequence
  Synthetic
ugucuacguuacuuacagca

SEQ ID NO: 82840 - RNA, 21 nt, Artificial Sequence
  Synthetic
augucuacguuacuuacagca

SEQ ID NO: 82841 - RNA, 22 nt, Artificial Sequence
  Synthetic
aaugucuacguuacuuacagca

SEQ ID NO: 82842 - RNA, 23 nt, Artificial Sequence
  Synthetic
uaaugucuacguuacuuacagca

SEQ ID NO: 82843 - RNA, 20 nt, Artificial Sequence
  Synthetic
cgguaaagaagggcccagca

SEQ ID NO: 82844 - RNA, 18 nt, Artificial Sequence
  Synthetic
ucugcggccuugccagca

SEQ ID NO: 82845 - RNA, 19 nt, Artificial Sequence
  Synthetic
cucugcggccuugccagca

SEQ ID NO: 82846 - RNA, 20 nt, Artificial Sequence
  Synthetic
ucucugcggccuugccagca

SEQ ID NO: 82847 - RNA, 22 nt, Artificial Sequence
  Synthetic
ugucucugcggccuugccagca

SEQ ID NO: 82848 - RNA, 23 nt, Artificial Sequence
  Synthetic
uugucucugcggccuugccagca

SEQ ID NO: 82849 - RNA, 24 nt, Artificial Sequence
  Synthetic
cuugucucugcggccuugccagca

SEQ ID NO: 82850 - RNA, 18 nt, Artificial Sequence
  Synthetic
aucuugguuuguccagca

SEQ ID NO: 82851 - RNA, 19 nt, Artificial Sequence
  Synthetic
caucuugguuuguccagca

SEQ ID NO: 82852 - RNA, 20 nt, Artificial Sequence
  Synthetic
ccaucuugguuuguccagca

SEQ ID NO: 82853 - RNA, 18 nt, Artificial Sequence
  Synthetic
auagauuugguugcagca

SEQ ID NO: 82854 - RNA, 19 nt, Artificial Sequence
  Synthetic
cauagauuugguugcagca

SEQ ID NO: 82855 - RNA, 20 nt, Artificial Sequence
  Synthetic
ucauagauuugguugcagca

SEQ ID NO: 82856 - RNA, 21 nt, Artificial Sequence
  Synthetic
uucauagauuugguugcagca

SEQ ID NO: 82857 - RNA, 22 nt, Artificial Sequence
  Synthetic
uuucauagauuugguugcagca

SEQ ID NO: 82858 - RNA, 23 nt, Artificial Sequence
  Synthetic
auuucauagauuugguugcagca

SEQ ID NO: 82859 - RNA, 18 nt, Artificial Sequence
  Synthetic
aagaaaguaaaaucagca

SEQ ID NO: 82860 - RNA, 19 nt, Artificial Sequence
  Synthetic
uaagaaaguaaaaucagca

SEQ ID NO: 82861 - RNA, 20 nt, Artificial Sequence
  Synthetic
uuaagaaaguaaaaucagca

SEQ ID NO: 82862 - RNA, 21 nt, Artificial Sequence
  Synthetic
auuaagaaaguaaaaucagca

SEQ ID NO: 82863 - RNA, 22 nt, Artificial Sequence
  Synthetic
cauuaagaaaguaaaaucagca

SEQ ID NO: 82864 - RNA, 23 nt, Artificial Sequence
  Synthetic
acauuaagaaaguaaaaucagca

SEQ ID NO: 82865 - RNA, 24 nt, Artificial Sequence
  Synthetic
uacauuaagaaaguaaaaucagca

SEQ ID NO: 82866 - RNA, 18 nt, Artificial Sequence
  Synthetic
ccauaaaaagcaucagca

SEQ ID NO: 82867 - RNA, 19 nt, Artificial Sequence
  Synthetic
cccauaaaaagcaucagca

SEQ ID NO: 82868 - RNA, 20 nt, Artificial Sequence
  Synthetic
ccccauaaaaagcaucagca

SEQ ID NO: 82869 - RNA, 21 nt, Artificial Sequence
  Synthetic
uccccauaaaaagcaucagca

SEQ ID NO: 82870 - RNA, 22 nt, Artificial Sequence
  Synthetic
auccccauaaaaagcaucagca

SEQ ID NO: 82871 - RNA, 23 nt, Artificial Sequence
  Synthetic
uauccccauaaaaagcaucagca

SEQ ID NO: 82872 - RNA, 18 nt, Artificial Sequence
  Synthetic
ugaaucauuauuucagca

SEQ ID NO: 82873 - RNA, 19 nt, Artificial Sequence
  Synthetic
cugaaucauuauuucagca

SEQ ID NO: 82874 - RNA, 20 nt, Artificial Sequence
  Synthetic
ucugaaucauuauuucagca

SEQ ID NO: 82875 - RNA, 21 nt, Artificial Sequence
  Synthetic
aucugaaucauuauuucagca

SEQ ID NO: 82876 - RNA, 22 nt, Artificial Sequence
  Synthetic
aaucugaaucauuauuucagca

SEQ ID NO: 82877 - RNA, 23 nt, Artificial Sequence
  Synthetic
aaaucugaaucauuauuucagca

SEQ ID NO: 82878 - RNA, 18 nt, Artificial Sequence
  Synthetic
uguguuuaauuuucagca

SEQ ID NO: 82879 - RNA, 19 nt, Artificial Sequence
  Synthetic
auguguuuaauuuucagca

SEQ ID NO: 82880 - RNA, 20 nt, Artificial Sequence
  Synthetic
cauguguuuaauuuucagca

SEQ ID NO: 82881 - RNA, 21 nt, Artificial Sequence
  Synthetic
ucauguguuuaauuuucagca

SEQ ID NO: 82882 - RNA, 22 nt, Artificial Sequence
  Synthetic
cucauguguuuaauuuucagca

SEQ ID NO: 82883 - RNA, 24 nt, Artificial Sequence
  Synthetic
ugcucauguguuuaauuuucagca

SEQ ID NO: 82884 - RNA, 18 nt, Artificial Sequence
  Synthetic
cuguuucuaagaagagca

SEQ ID NO: 82885 - RNA, 19 nt, Artificial Sequence
  Synthetic
ccuguuucuaagaagagca

SEQ ID NO: 82886 - RNA, 20 nt, Artificial Sequence
  Synthetic
accuguuucuaagaagagca

SEQ ID NO: 82887 - RNA, 21 nt, Artificial Sequence
  Synthetic
aaccuguuucuaagaagagca

SEQ ID NO: 82888 - RNA, 22 nt, Artificial Sequence
  Synthetic
uaaccuguuucuaagaagagca

SEQ ID NO: 82889 - RNA, 23 nt, Artificial Sequence
  Synthetic
auaaccuguuucuaagaagagca

SEQ ID NO: 82890 - RNA, 24 nt, Artificial Sequence
  Synthetic
uauaaccuguuucuaagaagagca

SEQ ID NO: 82891 - RNA, 18 nt, Artificial Sequence
  Synthetic
uucuauagaaacagagca

SEQ ID NO: 82892 - RNA, 20 nt, Artificial Sequence
  Synthetic
aguucuauagaaacagagca

SEQ ID NO: 82893 - RNA, 21 nt, Artificial Sequence
  Synthetic
caguucuauagaaacagagca

SEQ ID NO: 82894 - RNA, 22 nt, Artificial Sequence
  Synthetic
ucaguucuauagaaacagagca

SEQ ID NO: 82895 - RNA, 23 nt, Artificial Sequence
  Synthetic
cucaguucuauagaaacagagca

SEQ ID NO: 82896 - RNA, 24 nt, Artificial Sequence
  Synthetic
ucucaguucuauagaaacagagca

SEQ ID NO: 82897 - RNA, 20 nt, Artificial Sequence
  Synthetic
aggcacuguuccagagagca

SEQ ID NO: 82898 - RNA, 22 nt, Artificial Sequence
  Synthetic
agaggcacuguuccagagagca

SEQ ID NO: 82899 - RNA, 23 nt, Artificial Sequence
  Synthetic
aagaggcacuguuccagagagca

SEQ ID NO: 82900 - RNA, 24 nt, Artificial Sequence
  Synthetic
caagaggcacuguuccagagagca

SEQ ID NO: 82901 - RNA, 18 nt, Artificial Sequence
  Synthetic
auauacuuuuguagagca

SEQ ID NO: 82902 - RNA, 19 nt, Artificial Sequence
  Synthetic
uauauacuuuuguagagca

SEQ ID NO: 82903 - RNA, 20 nt, Artificial Sequence
  Synthetic
auauauacuuuuguagagca

SEQ ID NO: 82904 - RNA, 21 nt, Artificial Sequence
  Synthetic
cauauauacuuuuguagagca

SEQ ID NO: 82905 - RNA, 22 nt, Artificial Sequence
  Synthetic
ucauauauacuuuuguagagca

SEQ ID NO: 82906 - RNA, 24 nt, Artificial Sequence
  Synthetic
agucauauauacuuuuguagagca

SEQ ID NO: 82907 - RNA, 18 nt, Artificial Sequence
  Synthetic
auuguugaauugggagca

SEQ ID NO: 82908 - RNA, 19 nt, Artificial Sequence
  Synthetic
aauuguugaauugggagca

SEQ ID NO: 82909 - RNA, 21 nt, Artificial Sequence
  Synthetic
ugaauuguugaauugggagca

SEQ ID NO: 82910 - RNA, 22 nt, Artificial Sequence
  Synthetic
uugaauuguugaauugggagca

SEQ ID NO: 82911 - RNA, 23 nt, Artificial Sequence
  Synthetic
auugaauuguugaauugggagca

SEQ ID NO: 82912 - RNA, 24 nt, Artificial Sequence
  Synthetic
uauugaauuguugaauugggagca

SEQ ID NO: 82913 - RNA, 19 nt, Artificial Sequence
  Synthetic
ugagaucuuaaaaugagca

SEQ ID NO: 82914 - RNA, 20 nt, Artificial Sequence
  Synthetic
uugagaucuuaaaaugagca

SEQ ID NO: 82915 - RNA, 21 nt, Artificial Sequence
  Synthetic
auugagaucuuaaaaugagca

SEQ ID NO: 82916 - RNA, 22 nt, Artificial Sequence
  Synthetic
aauugagaucuuaaaaugagca

SEQ ID NO: 82917 - RNA, 23 nt, Artificial Sequence
  Synthetic
caauugagaucuuaaaaugagca

SEQ ID NO: 82918 - RNA, 24 nt, Artificial Sequence
  Synthetic
ucaauugagaucuuaaaaugagca

SEQ ID NO: 82919 - RNA, 20 nt, Artificial Sequence
  Synthetic
uggacuaggcuuucugagca

SEQ ID NO: 82920 - RNA, 21 nt, Artificial Sequence
  Synthetic
auggacuaggcuuucugagca

SEQ ID NO: 82921 - RNA, 22 nt, Artificial Sequence
  Synthetic
cauggacuaggcuuucugagca

SEQ ID NO: 82922 - RNA, 23 nt, Artificial Sequence
  Synthetic
acauggacuaggcuuucugagca

SEQ ID NO: 82923 - RNA, 24 nt, Artificial Sequence
  Synthetic
uacauggacuaggcuuucugagca

SEQ ID NO: 82924 - RNA, 18 nt, Artificial Sequence
  Synthetic
aguguccauuuuugagca

SEQ ID NO: 82925 - RNA, 19 nt, Artificial Sequence
  Synthetic
aaguguccauuuuugagca

SEQ ID NO: 82926 - RNA, 20 nt, Artificial Sequence
  Synthetic
aaaguguccauuuuugagca

SEQ ID NO: 82927 - RNA, 21 nt, Artificial Sequence
  Synthetic
caaaguguccauuuuugagca

SEQ ID NO: 82928 - RNA, 22 nt, Artificial Sequence
  Synthetic
acaaaguguccauuuuugagca

SEQ ID NO: 82929 - RNA, 18 nt, Artificial Sequence
  Synthetic
acaaaggaaacaauagca

SEQ ID NO: 82930 - RNA, 19 nt, Artificial Sequence
  Synthetic
aacaaaggaaacaauagca

SEQ ID NO: 82931 - RNA, 21 nt, Artificial Sequence
  Synthetic
agaacaaaggaaacaauagca

SEQ ID NO: 82932 - RNA, 23 nt, Artificial Sequence
  Synthetic
agagaacaaaggaaacaauagca

SEQ ID NO: 82933 - RNA, 24 nt, Artificial Sequence
  Synthetic
aagagaacaaaggaaacaauagca

SEQ ID NO: 82934 - RNA, 18 nt, Artificial Sequence
  Synthetic
auggcacaggcaauagca

SEQ ID NO: 82935 - RNA, 19 nt, Artificial Sequence
  Synthetic
uauggcacaggcaauagca

SEQ ID NO: 82936 - RNA, 20 nt, Artificial Sequence
  Synthetic
cuauggcacaggcaauagca

SEQ ID NO: 82937 - RNA, 21 nt, Artificial Sequence
  Synthetic
acuauggcacaggcaauagca

SEQ ID NO: 82938 - RNA, 22 nt, Artificial Sequence
  Synthetic
aacuauggcacaggcaauagca

SEQ ID NO: 82939 - RNA, 23 nt, Artificial Sequence
  Synthetic
uaacuauggcacaggcaauagca

SEQ ID NO: 82940 - RNA, 24 nt, Artificial Sequence
  Synthetic
cuaacuauggcacaggcaauagca

SEQ ID NO: 82941 - RNA, 18 nt, Artificial Sequence
  Synthetic
auuguguuucagauagca

SEQ ID NO: 82942 - RNA, 19 nt, Artificial Sequence
  Synthetic
cauuguguuucagauagca

SEQ ID NO: 82943 - RNA, 21 nt, Artificial Sequence
  Synthetic
agcauuguguuucagauagca

SEQ ID NO: 82944 - RNA, 22 nt, Artificial Sequence
  Synthetic
aagcauuguguuucagauagca

SEQ ID NO: 82945 - RNA, 24 nt, Artificial Sequence
  Synthetic
agaagcauuguguuucagauagca

SEQ ID NO: 82946 - RNA, 18 nt, Artificial Sequence
  Synthetic
cucugauauuagauagca

SEQ ID NO: 82947 - RNA, 19 nt, Artificial Sequence
  Synthetic
ucucugauauuagauagca

SEQ ID NO: 82948 - RNA, 20 nt, Artificial Sequence
  Synthetic
aucucugauauuagauagca

SEQ ID NO: 82949 - RNA, 21 nt, Artificial Sequence
  Synthetic
caucucugauauuagauagca

SEQ ID NO: 82950 - RNA, 22 nt, Artificial Sequence
  Synthetic
ccaucucugauauuagauagca

SEQ ID NO: 82951 - RNA, 23 nt, Artificial Sequence
  Synthetic
accaucucugauauuagauagca

SEQ ID NO: 82952 - RNA, 24 nt, Artificial Sequence
  Synthetic
uaccaucucugauauuagauagca

SEQ ID NO: 82953 - RNA, 22 nt, Artificial Sequence
  Synthetic
agauuuguuuuuugaccuagca

SEQ ID NO: 82954 - RNA, 24 nt, Artificial Sequence
  Synthetic
ugagauuuguuuuuugaccuagca

SEQ ID NO: 82955 - RNA, 20 nt, Artificial Sequence
  Synthetic
aggaagagagauagcuagca

SEQ ID NO: 82956 - RNA, 21 nt, Artificial Sequence
  Synthetic
caggaagagagauagcuagca

SEQ ID NO: 82957 - RNA, 22 nt, Artificial Sequence
  Synthetic
ccaggaagagagauagcuagca

SEQ ID NO: 82958 - RNA, 23 nt, Artificial Sequence
  Synthetic
uccaggaagagagauagcuagca

SEQ ID NO: 82959 - RNA, 24 nt, Artificial Sequence
  Synthetic
uuccaggaagagagauagcuagca

SEQ ID NO: 82960 - RNA, 21 nt, Artificial Sequence
  Synthetic
uauuauuauucccauguagca

SEQ ID NO: 82961 - RNA, 22 nt, Artificial Sequence
  Synthetic
uuauuauuauucccauguagca

SEQ ID NO: 82962 - RNA, 23 nt, Artificial Sequence
  Synthetic
uuuauuauuauucccauguagca

SEQ ID NO: 82963 - RNA, 24 nt, Artificial Sequence
  Synthetic
auuuauuauuauucccauguagca

SEQ ID NO: 82964 - RNA, 18 nt, Artificial Sequence
  Synthetic
uuaaacagauuuguagca

SEQ ID NO: 82965 - RNA, 19 nt, Artificial Sequence
  Synthetic
auuaaacagauuuguagca

SEQ ID NO: 82966 - RNA, 20 nt, Artificial Sequence
  Synthetic
uauuaaacagauuuguagca

SEQ ID NO: 82967 - RNA, 21 nt, Artificial Sequence
  Synthetic
cuauuaaacagauuuguagca

SEQ ID NO: 82968 - RNA, 22 nt, Artificial Sequence
  Synthetic
acuauuaaacagauuuguagca

SEQ ID NO: 82969 - RNA, 24 nt, Artificial Sequence
  Synthetic
agacuauuaaacagauuuguagca

SEQ ID NO: 82970 - RNA, 24 nt, Artificial Sequence
  Synthetic
uggggggaaggaaggugauuagca

SEQ ID NO: 82971 - RNA, 18 nt, Artificial Sequence
  Synthetic
uauuucagcugcuuagca

SEQ ID NO: 82972 - RNA, 19 nt, Artificial Sequence
  Synthetic
uuauuucagcugcuuagca

SEQ ID NO: 82973 - RNA, 20 nt, Artificial Sequence
  Synthetic
auuauuucagcugcuuagca

SEQ ID NO: 82974 - RNA, 21 nt, Artificial Sequence
  Synthetic
cauuauuucagcugcuuagca

SEQ ID NO: 82975 - RNA, 22 nt, Artificial Sequence
  Synthetic
acauuauuucagcugcuuagca

SEQ ID NO: 82976 - RNA, 23 nt, Artificial Sequence
  Synthetic
cacauuauuucagcugcuuagca

SEQ ID NO: 82977 - RNA, 18 nt, Artificial Sequence
  Synthetic
aaauuacauaauuuagca

SEQ ID NO: 82978 - RNA, 19 nt, Artificial Sequence
  Synthetic
uaaauuacauaauuuagca

SEQ ID NO: 82979 - RNA, 20 nt, Artificial Sequence
  Synthetic
auaaauuacauaauuuagca

SEQ ID NO: 82980 - RNA, 22 nt, Artificial Sequence
  Synthetic
agauaaauuacauaauuuagca

SEQ ID NO: 82981 - RNA, 23 nt, Artificial Sequence
  Synthetic
cagauaaauuacauaauuuagca

SEQ ID NO: 82982 - RNA, 18 nt, Artificial Sequence
  Synthetic
agcuguuacuauuuagca

SEQ ID NO: 82983 - RNA, 19 nt, Artificial Sequence
  Synthetic
cagcuguuacuauuuagca

SEQ ID NO: 82984 - RNA, 20 nt, Artificial Sequence
  Synthetic
ccagcuguuacuauuuagca

SEQ ID NO: 82985 - RNA, 21 nt, Artificial Sequence
  Synthetic
cccagcuguuacuauuuagca

SEQ ID NO: 82986 - RNA, 22 nt, Artificial Sequence
  Synthetic
acccagcuguuacuauuuagca

SEQ ID NO: 82987 - RNA, 23 nt, Artificial Sequence
  Synthetic
aacccagcuguuacuauuuagca

SEQ ID NO: 82988 - RNA, 24 nt, Artificial Sequence
  Synthetic
aaacccagcuguuacuauuuagca

SEQ ID NO: 82989 - RNA, 18 nt, Artificial Sequence
  Synthetic
auccacauuuuuuuagca

SEQ ID NO: 82990 - RNA, 19 nt, Artificial Sequence
  Synthetic
aauccacauuuuuuuagca

SEQ ID NO: 82991 - RNA, 20 nt, Artificial Sequence
  Synthetic
aaauccacauuuuuuuagca

SEQ ID NO: 82992 - RNA, 21 nt, Artificial Sequence
  Synthetic
aaaauccacauuuuuuuagca

SEQ ID NO: 82993 - RNA, 22 nt, Artificial Sequence
  Synthetic
aaaaauccacauuuuuuuagca

SEQ ID NO: 82994 - RNA, 23 nt, Artificial Sequence
  Synthetic
uaaaaauccacauuuuuuuagca

SEQ ID NO: 82995 - RNA, 24 nt, Artificial Sequence
  Synthetic
auaaaaauccacauuuuuuuagca

SEQ ID NO: 82996 - RNA, 18 nt, Artificial Sequence
  Synthetic
auguugcauuuuaacgca

SEQ ID NO: 82997 - RNA, 19 nt, Artificial Sequence
  Synthetic
aauguugcauuuuaacgca

SEQ ID NO: 82998 - RNA, 21 nt, Artificial Sequence
  Synthetic
ugaauguugcauuuuaacgca

SEQ ID NO: 82999 - RNA, 22 nt, Artificial Sequence
  Synthetic
augaauguugcauuuuaacgca

SEQ ID NO: 83000 - RNA, 23 nt, Artificial Sequence
  Synthetic
aaugaauguugcauuuuaacgca

SEQ ID NO: 83001 - RNA, 24 nt, Artificial Sequence
  Synthetic
aaaugaauguugcauuuuaacgca

SEQ ID NO: 83002 - RNA, 18 nt, Artificial Sequence
  Synthetic
ugggguucacugcacgca

SEQ ID NO: 83003 - RNA, 19 nt, Artificial Sequence
  Synthetic
cugggguucacugcacgca

SEQ ID NO: 83004 - RNA, 20 nt, Artificial Sequence
  Synthetic
ccugggguucacugcacgca

SEQ ID NO: 83005 - RNA, 22 nt, Artificial Sequence
  Synthetic
ugccugggguucacugcacgca

SEQ ID NO: 83006 - RNA, 23 nt, Artificial Sequence
  Synthetic
cugccugggguucacugcacgca

SEQ ID NO: 83007 - RNA, 24 nt, Artificial Sequence
  Synthetic
ucugccugggguucacugcacgca

SEQ ID NO: 83008 - RNA, 19 nt, Artificial Sequence
  Synthetic
aggcaaguauucucccgca

SEQ ID NO: 83009 - RNA, 20 nt, Artificial Sequence
  Synthetic
uaggcaaguauucucccgca

SEQ ID NO: 83010 - RNA, 21 nt, Artificial Sequence
  Synthetic
cuaggcaaguauucucccgca

SEQ ID NO: 83011 - RNA, 22 nt, Artificial Sequence
  Synthetic
ucuaggcaaguauucucccgca

SEQ ID NO: 83012 - RNA, 23 nt, Artificial Sequence
  Synthetic
cucuaggcaaguauucucccgca

SEQ ID NO: 83013 - RNA, 24 nt, Artificial Sequence
  Synthetic
ucucuaggcaaguauucucccgca

SEQ ID NO: 83014 - RNA, 18 nt, Artificial Sequence
  Synthetic
aauaucuucaucaucgca

SEQ ID NO: 83015 - RNA, 19 nt, Artificial Sequence
  Synthetic
aaauaucuucaucaucgca

SEQ ID NO: 83016 - RNA, 20 nt, Artificial Sequence
  Synthetic
aaaauaucuucaucaucgca

SEQ ID NO: 83017 - RNA, 21 nt, Artificial Sequence
  Synthetic
uaaaauaucuucaucaucgca

SEQ ID NO: 83018 - RNA, 22 nt, Artificial Sequence
  Synthetic
auaaaauaucuucaucaucgca

SEQ ID NO: 83019 - RNA, 23 nt, Artificial Sequence
  Synthetic
uauaaaauaucuucaucaucgca

SEQ ID NO: 83020 - RNA, 24 nt, Artificial Sequence
  Synthetic
auauaaaauaucuucaucaucgca

SEQ ID NO: 83021 - RNA, 18 nt, Artificial Sequence
  Synthetic
uacucgagcagaaaggca

SEQ ID NO: 83022 - RNA, 19 nt, Artificial Sequence
  Synthetic
auacucgagcagaaaggca

SEQ ID NO: 83023 - RNA, 20 nt, Artificial Sequence
  Synthetic
cauacucgagcagaaaggca

SEQ ID NO: 83024 - RNA, 21 nt, Artificial Sequence
  Synthetic
ucauacucgagcagaaaggca

SEQ ID NO: 83025 - RNA, 22 nt, Artificial Sequence
  Synthetic
uucauacucgagcagaaaggca

SEQ ID NO: 83026 - RNA, 23 nt, Artificial Sequence
  Synthetic
uuucauacucgagcagaaaggca

SEQ ID NO: 83027 - RNA, 24 nt, Artificial Sequence
  Synthetic
cuuucauacucgagcagaaaggca

SEQ ID NO: 83028 - RNA, 18 nt, Artificial Sequence
  Synthetic
aauuuucaguguaaggca

SEQ ID NO: 83029 - RNA, 19 nt, Artificial Sequence
  Synthetic
uaauuuucaguguaaggca

SEQ ID NO: 83030 - RNA, 21 nt, Artificial Sequence
  Synthetic
uguaauuuucaguguaaggca

SEQ ID NO: 83031 - RNA, 22 nt, Artificial Sequence
  Synthetic
auguaauuuucaguguaaggca

SEQ ID NO: 83032 - RNA, 23 nt, Artificial Sequence
  Synthetic
aauguaauuuucaguguaaggca

SEQ ID NO: 83033 - RNA, 24 nt, Artificial Sequence
  Synthetic
caauguaauuuucaguguaaggca

SEQ ID NO: 83034 - RNA, 18 nt, Artificial Sequence
  Synthetic
auuauauuaaaacaggca

SEQ ID NO: 83035 - RNA, 20 nt, Artificial Sequence
  Synthetic
agauuauauuaaaacaggca

SEQ ID NO: 83036 - RNA, 22 nt, Artificial Sequence
  Synthetic
ugagauuauauuaaaacaggca

SEQ ID NO: 83037 - RNA, 23 nt, Artificial Sequence
  Synthetic
uugagauuauauuaaaacaggca

SEQ ID NO: 83038 - RNA, 24 nt, Artificial Sequence
  Synthetic
auugagauuauauuaaaacaggca

SEQ ID NO: 83039 - RNA, 18 nt, Artificial Sequence
  Synthetic
ucgggucccuaacaggca

SEQ ID NO: 83040 - RNA, 19 nt, Artificial Sequence
  Synthetic
aucgggucccuaacaggca

SEQ ID NO: 83041 - RNA, 20 nt, Artificial Sequence
  Synthetic
aaucgggucccuaacaggca

SEQ ID NO: 83042 - RNA, 22 nt, Artificial Sequence
  Synthetic
cgaaucgggucccuaacaggca

SEQ ID NO: 83043 - RNA, 24 nt, Artificial Sequence
  Synthetic
ugcgaaucgggucccuaacaggca

SEQ ID NO: 83044 - RNA, 18 nt, Artificial Sequence
  Synthetic
uucuaaguggaccaggca

SEQ ID NO: 83045 - RNA, 19 nt, Artificial Sequence
  Synthetic
uuucuaaguggaccaggca

SEQ ID NO: 83046 - RNA, 20 nt, Artificial Sequence
  Synthetic
cuuucuaaguggaccaggca

SEQ ID NO: 83047 - RNA, 21 nt, Artificial Sequence
  Synthetic
acuuucuaaguggaccaggca

SEQ ID NO: 83048 - RNA, 23 nt, Artificial Sequence
  Synthetic
agacuuucuaaguggaccaggca

SEQ ID NO: 83049 - RNA, 24 nt, Artificial Sequence
  Synthetic
uagacuuucuaaguggaccaggca

SEQ ID NO: 83050 - RNA, 19 nt, Artificial Sequence
  Synthetic
ugcuuauaguugguaggca

SEQ ID NO: 83051 - RNA, 20 nt, Artificial Sequence
  Synthetic
uugcuuauaguugguaggca

SEQ ID NO: 83052 - RNA, 21 nt, Artificial Sequence
  Synthetic
uuugcuuauaguugguaggca

SEQ ID NO: 83053 - RNA, 22 nt, Artificial Sequence
  Synthetic
cuuugcuuauaguugguaggca

SEQ ID NO: 83054 - RNA, 23 nt, Artificial Sequence
  Synthetic
acuuugcuuauaguugguaggca

SEQ ID NO: 83055 - RNA, 24 nt, Artificial Sequence
  Synthetic
uacuuugcuuauaguugguaggca

SEQ ID NO: 83056 - RNA, 21 nt, Artificial Sequence
  Synthetic
uagaaagaaaacaauagggca

SEQ ID NO: 83057 - RNA, 22 nt, Artificial Sequence
  Synthetic
uuagaaagaaaacaauagggca

SEQ ID NO: 83058 - RNA, 23 nt, Artificial Sequence
  Synthetic
uuuagaaagaaaacaauagggca

SEQ ID NO: 83059 - RNA, 24 nt, Artificial Sequence
  Synthetic
uuuuagaaagaaaacaauagggca

SEQ ID NO: 83060 - RNA, 18 nt, Artificial Sequence
  Synthetic
ucugcaacuuuuagggca

SEQ ID NO: 83061 - RNA, 20 nt, Artificial Sequence
  Synthetic
agucugcaacuuuuagggca

SEQ ID NO: 83062 - RNA, 21 nt, Artificial Sequence
  Synthetic
uagucugcaacuuuuagggca

SEQ ID NO: 83063 - RNA, 23 nt, Artificial Sequence
  Synthetic
aguagucugcaacuuuuagggca

SEQ ID NO: 83064 - RNA, 24 nt, Artificial Sequence
  Synthetic
aaguagucugcaacuuuuagggca

SEQ ID NO: 83065 - RNA, 18 nt, Artificial Sequence
  Synthetic
uuauguggcuagggggca

SEQ ID NO: 83066 - RNA, 19 nt, Artificial Sequence
  Synthetic
cuuauguggcuagggggca

SEQ ID NO: 83067 - RNA, 20 nt, Artificial Sequence
  Synthetic
ucuuauguggcuagggggca

SEQ ID NO: 83068 - RNA, 21 nt, Artificial Sequence
  Synthetic
aucuuauguggcuagggggca

SEQ ID NO: 83069 - RNA, 22 nt, Artificial Sequence
  Synthetic
uaucuuauguggcuagggggca

SEQ ID NO: 83070 - RNA, 24 nt, Artificial Sequence
  Synthetic
aguaucuuauguggcuagggggca

SEQ ID NO: 83071 - RNA, 21 nt, Artificial Sequence
  Synthetic
caaaaagcaaaaacuggggca

SEQ ID NO: 83072 - RNA, 23 nt, Artificial Sequence
  Synthetic
agcaaaaagcaaaaacuggggca

SEQ ID NO: 83073 - RNA, 24 nt, Artificial Sequence
  Synthetic
aagcaaaaagcaaaaacuggggca

SEQ ID NO: 83074 - RNA, 21 nt, Artificial Sequence
  Synthetic
cuggcugugcaaucuugggca

SEQ ID NO: 83075 - RNA, 23 nt, Artificial Sequence
  Synthetic
ugcuggcugugcaaucuugggca

SEQ ID NO: 83076 - RNA, 24 nt, Artificial Sequence
  Synthetic
uugcuggcugugcaaucuugggca

SEQ ID NO: 83077 - RNA, 18 nt, Artificial Sequence
  Synthetic
caucauuugcaaauggca

SEQ ID NO: 83078 - RNA, 19 nt, Artificial Sequence
  Synthetic
ucaucauuugcaaauggca

SEQ ID NO: 83079 - RNA, 20 nt, Artificial Sequence
  Synthetic
aucaucauuugcaaauggca

SEQ ID NO: 83080 - RNA, 21 nt, Artificial Sequence
  Synthetic
aaucaucauuugcaaauggca

SEQ ID NO: 83081 - RNA, 22 nt, Artificial Sequence
  Synthetic
caaucaucauuugcaaauggca

SEQ ID NO: 83082 - RNA, 23 nt, Artificial Sequence
  Synthetic
acaaucaucauuugcaaauggca

SEQ ID NO: 83083 - RNA, 24 nt, Artificial Sequence
  Synthetic
cacaaucaucauuugcaaauggca

SEQ ID NO: 83084 - RNA, 18 nt, Artificial Sequence
  Synthetic
uugaaauaccauauggca

SEQ ID NO: 83085 - RNA, 19 nt, Artificial Sequence
  Synthetic
auugaaauaccauauggca

SEQ ID NO: 83086 - RNA, 20 nt, Artificial Sequence
  Synthetic
aauugaaauaccauauggca

SEQ ID NO: 83087 - RNA, 21 nt, Artificial Sequence
  Synthetic
caauugaaauaccauauggca

SEQ ID NO: 83088 - RNA, 18 nt, Artificial Sequence
  Synthetic
ugugcuguccuuauggca

SEQ ID NO: 83089 - RNA, 19 nt, Artificial Sequence
  Synthetic
uugugcuguccuuauggca

SEQ ID NO: 83090 - RNA, 20 nt, Artificial Sequence
  Synthetic
cuugugcuguccuuauggca

SEQ ID NO: 83091 - RNA, 21 nt, Artificial Sequence
  Synthetic
acuugugcuguccuuauggca

SEQ ID NO: 83092 - RNA, 22 nt, Artificial Sequence
  Synthetic
uacuugugcuguccuuauggca

SEQ ID NO: 83093 - RNA, 23 nt, Artificial Sequence
  Synthetic
auacuugugcuguccuuauggca

SEQ ID NO: 83094 - RNA, 24 nt, Artificial Sequence
  Synthetic
aauacuugugcuguccuuauggca

SEQ ID NO: 83095 - RNA, 18 nt, Artificial Sequence
  Synthetic
cuauugcaguaucuggca

SEQ ID NO: 83096 - RNA, 19 nt, Artificial Sequence
  Synthetic
ucuauugcaguaucuggca

SEQ ID NO: 83097 - RNA, 20 nt, Artificial Sequence
  Synthetic
aucuauugcaguaucuggca

SEQ ID NO: 83098 - RNA, 21 nt, Artificial Sequence
  Synthetic
uaucuauugcaguaucuggca

SEQ ID NO: 83099 - RNA, 22 nt, Artificial Sequence
  Synthetic
auaucuauugcaguaucuggca

SEQ ID NO: 83100 - RNA, 23 nt, Artificial Sequence
  Synthetic
aauaucuauugcaguaucuggca

SEQ ID NO: 83101 - RNA, 24 nt, Artificial Sequence
  Synthetic
caauaucuauugcaguaucuggca

SEQ ID NO: 83102 - RNA, 18 nt, Artificial Sequence
  Synthetic
aacauuuugucucuggca

SEQ ID NO: 83103 - RNA, 19 nt, Artificial Sequence
  Synthetic
aaacauuuugucucuggca

SEQ ID NO: 83104 - RNA, 20 nt, Artificial Sequence
  Synthetic
caaacauuuugucucuggca

SEQ ID NO: 83105 - RNA, 21 nt, Artificial Sequence
  Synthetic
acaaacauuuugucucuggca

SEQ ID NO: 83106 - RNA, 22 nt, Artificial Sequence
  Synthetic
cacaaacauuuugucucuggca

SEQ ID NO: 83107 - RNA, 23 nt, Artificial Sequence
  Synthetic
ccacaaacauuuugucucuggca

SEQ ID NO: 83108 - RNA, 24 nt, Artificial Sequence
  Synthetic
uccacaaacauuuugucucuggca

SEQ ID NO: 83109 - RNA, 21 nt, Artificial Sequence
  Synthetic
aaaaagaaaagagggguggca

SEQ ID NO: 83110 - RNA, 22 nt, Artificial Sequence
  Synthetic
aaaaaagaaaagagggguggca

SEQ ID NO: 83111 - RNA, 23 nt, Artificial Sequence
  Synthetic
uaaaaaagaaaagagggguggca

SEQ ID NO: 83112 - RNA, 24 nt, Artificial Sequence
  Synthetic
uuaaaaaagaaaagagggguggca

SEQ ID NO: 83113 - RNA, 18 nt, Artificial Sequence
  Synthetic
aaauauuuucauguggca

SEQ ID NO: 83114 - RNA, 19 nt, Artificial Sequence
  Synthetic
aaaauauuuucauguggca

SEQ ID NO: 83115 - RNA, 20 nt, Artificial Sequence
  Synthetic
caaaauauuuucauguggca

SEQ ID NO: 83116 - RNA, 21 nt, Artificial Sequence
  Synthetic
ccaaaauauuuucauguggca

SEQ ID NO: 83117 - RNA, 22 nt, Artificial Sequence
  Synthetic
accaaaauauuuucauguggca

SEQ ID NO: 83118 - RNA, 23 nt, Artificial Sequence
  Synthetic
aaccaaaauauuuucauguggca

SEQ ID NO: 83119 - RNA, 24 nt, Artificial Sequence
  Synthetic
uaaccaaaauauuuucauguggca

SEQ ID NO: 83120 - RNA, 18 nt, Artificial Sequence
  Synthetic
aagucuaagcuuguggca

SEQ ID NO: 83121 - RNA, 19 nt, Artificial Sequence
  Synthetic
caagucuaagcuuguggca

SEQ ID NO: 83122 - RNA, 21 nt, Artificial Sequence
  Synthetic
agcaagucuaagcuuguggca

SEQ ID NO: 83123 - RNA, 22 nt, Artificial Sequence
  Synthetic
aagcaagucuaagcuuguggca

SEQ ID NO: 83124 - RNA, 23 nt, Artificial Sequence
  Synthetic
aaagcaagucuaagcuuguggca

SEQ ID NO: 83125 - RNA, 18 nt, Artificial Sequence
  Synthetic
uuagcugauuuauuggca

SEQ ID NO: 83126 - RNA, 19 nt, Artificial Sequence
  Synthetic
auuagcugauuuauuggca

SEQ ID NO: 83127 - RNA, 21 nt, Artificial Sequence
  Synthetic
ugauuagcugauuuauuggca

SEQ ID NO: 83128 - RNA, 22 nt, Artificial Sequence
  Synthetic
uugauuagcugauuuauuggca

SEQ ID NO: 83129 - RNA, 23 nt, Artificial Sequence
  Synthetic
uuugauuagcugauuuauuggca

SEQ ID NO: 83130 - RNA, 24 nt, Artificial Sequence
  Synthetic
auuugauuagcugauuuauuggca

SEQ ID NO: 83131 - RNA, 18 nt, Artificial Sequence
  Synthetic
aagugccucucguuggca

SEQ ID NO: 83132 - RNA, 19 nt, Artificial Sequence
  Synthetic
uaagugccucucguuggca

SEQ ID NO: 83133 - RNA, 21 nt, Artificial Sequence
  Synthetic
cguaagugccucucguuggca

SEQ ID NO: 83134 - RNA, 22 nt, Artificial Sequence
  Synthetic
ucguaagugccucucguuggca

SEQ ID NO: 83135 - RNA, 23 nt, Artificial Sequence
  Synthetic
uucguaagugccucucguuggca

SEQ ID NO: 83136 - RNA, 24 nt, Artificial Sequence
  Synthetic
auucguaagugccucucguuggca

SEQ ID NO: 83137 - RNA, 19 nt, Artificial Sequence
  Synthetic
ugagucaggcaauuuggca

SEQ ID NO: 83138 - RNA, 20 nt, Artificial Sequence
  Synthetic
cugagucaggcaauuuggca

SEQ ID NO: 83139 - RNA, 22 nt, Artificial Sequence
  Synthetic
agcugagucaggcaauuuggca

SEQ ID NO: 83140 - RNA, 23 nt, Artificial Sequence
  Synthetic
aagcugagucaggcaauuuggca

SEQ ID NO: 83141 - RNA, 18 nt, Artificial Sequence
  Synthetic
aauucuuuaacuuuggca

SEQ ID NO: 83142 - RNA, 19 nt, Artificial Sequence
  Synthetic
uaauucuuuaacuuuggca

SEQ ID NO: 83143 - RNA, 20 nt, Artificial Sequence
  Synthetic
auaauucuuuaacuuuggca

SEQ ID NO: 83144 - RNA, 21 nt, Artificial Sequence
  Synthetic
uauaauucuuuaacuuuggca

SEQ ID NO: 83145 - RNA, 22 nt, Artificial Sequence
  Synthetic
cuauaauucuuuaacuuuggca

SEQ ID NO: 83146 - RNA, 22 nt, Artificial Sequence
  Synthetic
ugcaauaugaaaaaaaaaugca

SEQ ID NO: 83147 - RNA, 23 nt, Artificial Sequence
  Synthetic
augcaauaugaaaaaaaaaugca

SEQ ID NO: 83148 - RNA, 24 nt, Artificial Sequence
  Synthetic
aaugcaauaugaaaaaaaaaugca

SEQ ID NO: 83149 - RNA, 18 nt, Artificial Sequence
  Synthetic
ccuacuguuuaaaaugca

SEQ ID NO: 83150 - RNA, 21 nt, Artificial Sequence
  Synthetic
uggccuacuguuuaaaaugca

SEQ ID NO: 83151 - RNA, 22 nt, Artificial Sequence
  Synthetic
cuggccuacuguuuaaaaugca

SEQ ID NO: 83152 - RNA, 23 nt, Artificial Sequence
  Synthetic
ucuggccuacuguuuaaaaugca

SEQ ID NO: 83153 - RNA, 24 nt, Artificial Sequence
  Synthetic
aucuggccuacuguuuaaaaugca

SEQ ID NO: 83154 - RNA, 19 nt, Artificial Sequence
  Synthetic
agagguagcacacaaugca

SEQ ID NO: 83155 - RNA, 20 nt, Artificial Sequence
  Synthetic
cagagguagcacacaaugca

SEQ ID NO: 83156 - RNA, 23 nt, Artificial Sequence
  Synthetic
aggcagagguagcacacaaugca

SEQ ID NO: 83157 - RNA, 24 nt, Artificial Sequence
  Synthetic
uaggcagagguagcacacaaugca

SEQ ID NO: 83158 - RNA, 18 nt, Artificial Sequence
  Synthetic
aauggauacuucaaugca

SEQ ID NO: 83159 - RNA, 19 nt, Artificial Sequence
  Synthetic
uaauggauacuucaaugca

SEQ ID NO: 83160 - RNA, 20 nt, Artificial Sequence
  Synthetic
uuaauggauacuucaaugca

SEQ ID NO: 83161 - RNA, 22 nt, Artificial Sequence
  Synthetic
uguuaauggauacuucaaugca

SEQ ID NO: 83162 - RNA, 23 nt, Artificial Sequence
  Synthetic
uuguuaauggauacuucaaugca

SEQ ID NO: 83163 - RNA, 24 nt, Artificial Sequence
  Synthetic
auuguuaauggauacuucaaugca

SEQ ID NO: 83164 - RNA, 18 nt, Artificial Sequence
  Synthetic
aaaucagaaaagaaugca

SEQ ID NO: 83165 - RNA, 20 nt, Artificial Sequence
  Synthetic
ugaaaucagaaaagaaugca

SEQ ID NO: 83166 - RNA, 21 nt, Artificial Sequence
  Synthetic
augaaaucagaaaagaaugca

SEQ ID NO: 83167 - RNA, 22 nt, Artificial Sequence
  Synthetic
aaugaaaucagaaaagaaugca

SEQ ID NO: 83168 - RNA, 23 nt, Artificial Sequence
  Synthetic
uaaugaaaucagaaaagaaugca

SEQ ID NO: 83169 - RNA, 24 nt, Artificial Sequence
  Synthetic
uuaaugaaaucagaaaagaaugca

SEQ ID NO: 83170 - RNA, 18 nt, Artificial Sequence
  Synthetic
acccuacuguagaaugca

SEQ ID NO: 83171 - RNA, 19 nt, Artificial Sequence
  Synthetic
uacccuacuguagaaugca

SEQ ID NO: 83172 - RNA, 20 nt, Artificial Sequence
  Synthetic
uuacccuacuguagaaugca

SEQ ID NO: 83173 - RNA, 21 nt, Artificial Sequence
  Synthetic
auuacccuacuguagaaugca

SEQ ID NO: 83174 - RNA, 22 nt, Artificial Sequence
  Synthetic
uauuacccuacuguagaaugca

SEQ ID NO: 83175 - RNA, 23 nt, Artificial Sequence
  Synthetic
auauuacccuacuguagaaugca

SEQ ID NO: 83176 - RNA, 24 nt, Artificial Sequence
  Synthetic
uauauuacccuacuguagaaugca

SEQ ID NO: 83177 - RNA, 18 nt, Artificial Sequence
  Synthetic
uuugaaaacauuaaugca

SEQ ID NO: 83178 - RNA, 19 nt, Artificial Sequence
  Synthetic
auuugaaaacauuaaugca

SEQ ID NO: 83179 - RNA, 20 nt, Artificial Sequence
  Synthetic
aauuugaaaacauuaaugca

SEQ ID NO: 83180 - RNA, 22 nt, Artificial Sequence
  Synthetic
agaauuugaaaacauuaaugca

SEQ ID NO: 83181 - RNA, 23 nt, Artificial Sequence
  Synthetic
uagaauuugaaaacauuaaugca

SEQ ID NO: 83182 - RNA, 24 nt, Artificial Sequence
  Synthetic
auagaauuugaaaacauuaaugca

SEQ ID NO: 83183 - RNA, 18 nt, Artificial Sequence
  Synthetic
aacgguuaagaauaugca

SEQ ID NO: 83184 - RNA, 19 nt, Artificial Sequence
  Synthetic
uaacgguuaagaauaugca

SEQ ID NO: 83185 - RNA, 21 nt, Artificial Sequence
  Synthetic
aguaacgguuaagaauaugca

SEQ ID NO: 83186 - RNA, 22 nt, Artificial Sequence
  Synthetic
aaguaacgguuaagaauaugca

SEQ ID NO: 83187 - RNA, 23 nt, Artificial Sequence
  Synthetic
aaaguaacgguuaagaauaugca

SEQ ID NO: 83188 - RNA, 24 nt, Artificial Sequence
  Synthetic
caaaguaacgguuaagaauaugca

SEQ ID NO: 83189 - RNA, 18 nt, Artificial Sequence
  Synthetic
uuuuugcuaaccuaugca

SEQ ID NO: 83190 - RNA, 19 nt, Artificial Sequence
  Synthetic
uuuuuugcuaaccuaugca

SEQ ID NO: 83191 - RNA, 20 nt, Artificial Sequence
  Synthetic
auuuuuugcuaaccuaugca

SEQ ID NO: 83192 - RNA, 21 nt, Artificial Sequence
  Synthetic
cauuuuuugcuaaccuaugca

SEQ ID NO: 83193 - RNA, 22 nt, Artificial Sequence
  Synthetic
ccauuuuuugcuaaccuaugca

SEQ ID NO: 83194 - RNA, 23 nt, Artificial Sequence
  Synthetic
accauuuuuugcuaaccuaugca

SEQ ID NO: 83195 - RNA, 24 nt, Artificial Sequence
  Synthetic
uaccauuuuuugcuaaccuaugca

SEQ ID NO: 83196 - RNA, 21 nt, Artificial Sequence
  Synthetic
aaaaaugacaaaaaguaugca

SEQ ID NO: 83197 - RNA, 22 nt, Artificial Sequence
  Synthetic
aaaaaaugacaaaaaguaugca

SEQ ID NO: 83198 - RNA, 23 nt, Artificial Sequence
  Synthetic
uaaaaaaugacaaaaaguaugca

SEQ ID NO: 83199 - RNA, 24 nt, Artificial Sequence
  Synthetic
cuaaaaaaugacaaaaaguaugca

SEQ ID NO: 83200 - RNA, 19 nt, Artificial Sequence
  Synthetic
aguuaagaauaauuaugca

SEQ ID NO: 83201 - RNA, 23 nt, Artificial Sequence
  Synthetic
ugggaguuaagaauaauuaugca

SEQ ID NO: 83202 - RNA, 24 nt, Artificial Sequence
  Synthetic
augggaguuaagaauaauuaugca

SEQ ID NO: 83203 - RNA, 18 nt, Artificial Sequence
  Synthetic
uacuagucuucuuaugca

SEQ ID NO: 83204 - RNA, 20 nt, Artificial Sequence
  Synthetic
uguacuagucuucuuaugca

SEQ ID NO: 83205 - RNA, 21 nt, Artificial Sequence
  Synthetic
uuguacuagucuucuuaugca

SEQ ID NO: 83206 - RNA, 23 nt, Artificial Sequence
  Synthetic
aguuguacuagucuucuuaugca

SEQ ID NO: 83207 - RNA, 24 nt, Artificial Sequence
  Synthetic
aaguuguacuagucuucuuaugca

SEQ ID NO: 83208 - RNA, 18 nt, Artificial Sequence
  Synthetic
ugaagggccauaacugca

SEQ ID NO: 83209 - RNA, 19 nt, Artificial Sequence
  Synthetic
uugaagggccauaacugca

SEQ ID NO: 83210 - RNA, 20 nt, Artificial Sequence
  Synthetic
cuugaagggccauaacugca

SEQ ID NO: 83211 - RNA, 21 nt, Artificial Sequence
  Synthetic
ucuugaagggccauaacugca

SEQ ID NO: 83212 - RNA, 22 nt, Artificial Sequence
  Synthetic
uucuugaagggccauaacugca

SEQ ID NO: 83213 - RNA, 23 nt, Artificial Sequence
  Synthetic
uuucuugaagggccauaacugca

SEQ ID NO: 83214 - RNA, 18 nt, Artificial Sequence
  Synthetic
aaugguauucuaacugca

SEQ ID NO: 83215 - RNA, 21 nt, Artificial Sequence
  Synthetic
aggaaugguauucuaacugca

SEQ ID NO: 83216 - RNA, 23 nt, Artificial Sequence
  Synthetic
agaggaaugguauucuaacugca

SEQ ID NO: 83217 - RNA, 24 nt, Artificial Sequence
  Synthetic
aagaggaaugguauucuaacugca

SEQ ID NO: 83218 - RNA, 18 nt, Artificial Sequence
  Synthetic
augucugaggacacugca

SEQ ID NO: 83219 - RNA, 19 nt, Artificial Sequence
  Synthetic
aaugucugaggacacugca

SEQ ID NO: 83220 - RNA, 20 nt, Artificial Sequence
  Synthetic
aaaugucugaggacacugca

SEQ ID NO: 83221 - RNA, 21 nt, Artificial Sequence
  Synthetic
caaaugucugaggacacugca

SEQ ID NO: 83222 - RNA, 22 nt, Artificial Sequence
  Synthetic
acaaaugucugaggacacugca

SEQ ID NO: 83223 - RNA, 23 nt, Artificial Sequence
  Synthetic
cacaaaugucugaggacacugca

SEQ ID NO: 83224 - RNA, 24 nt, Artificial Sequence
  Synthetic
ucacaaaugucugaggacacugca

SEQ ID NO: 83225 - RNA, 18 nt, Artificial Sequence
  Synthetic
uaaaucucuaagacugca

SEQ ID NO: 83226 - RNA, 19 nt, Artificial Sequence
  Synthetic
auaaaucucuaagacugca

SEQ ID NO: 83227 - RNA, 20 nt, Artificial Sequence
  Synthetic
aauaaaucucuaagacugca

SEQ ID NO: 83228 - RNA, 22 nt, Artificial Sequence
  Synthetic
ugaauaaaucucuaagacugca

SEQ ID NO: 83229 - RNA, 23 nt, Artificial Sequence
  Synthetic
cugaauaaaucucuaagacugca

SEQ ID NO: 83230 - RNA, 24 nt, Artificial Sequence
  Synthetic
ucugaauaaaucucuaagacugca

SEQ ID NO: 83231 - RNA, 18 nt, Artificial Sequence
  Synthetic
ucccuaaauaugacugca

SEQ ID NO: 83232 - RNA, 19 nt, Artificial Sequence
  Synthetic
aucccuaaauaugacugca

SEQ ID NO: 83233 - RNA, 20 nt, Artificial Sequence
  Synthetic
caucccuaaauaugacugca

SEQ ID NO: 83234 - RNA, 22 nt, Artificial Sequence
  Synthetic
agcaucccuaaauaugacugca

SEQ ID NO: 83235 - RNA, 23 nt, Artificial Sequence
  Synthetic
cagcaucccuaaauaugacugca

SEQ ID NO: 83236 - RNA, 24 nt, Artificial Sequence
  Synthetic
ucagcaucccuaaauaugacugca

SEQ ID NO: 83237 - RNA, 18 nt, Artificial Sequence
  Synthetic
uaauauggcugcccugca

SEQ ID NO: 83238 - RNA, 19 nt, Artificial Sequence
  Synthetic
uuaauauggcugcccugca

SEQ ID NO: 83239 - RNA, 20 nt, Artificial Sequence
  Synthetic
cuuaauauggcugcccugca

SEQ ID NO: 83240 - RNA, 21 nt, Artificial Sequence
  Synthetic
ucuuaauauggcugcccugca

SEQ ID NO: 83241 - RNA, 22 nt, Artificial Sequence
  Synthetic
cucuuaauauggcugcccugca

SEQ ID NO: 83242 - RNA, 23 nt, Artificial Sequence
  Synthetic
ucucuuaauauggcugcccugca

SEQ ID NO: 83243 - RNA, 24 nt, Artificial Sequence
  Synthetic
cucucuuaauauggcugcccugca

SEQ ID NO: 83244 - RNA, 21 nt, Artificial Sequence
  Synthetic
acugaaaugcugcuuccugca

SEQ ID NO: 83245 - RNA, 22 nt, Artificial Sequence
  Synthetic
aacugaaaugcugcuuccugca

SEQ ID NO: 83246 - RNA, 23 nt, Artificial Sequence
  Synthetic
caacugaaaugcugcuuccugca

SEQ ID NO: 83247 - RNA, 18 nt, Artificial Sequence
  Synthetic
aaugcagggcaggcugca

SEQ ID NO: 83248 - RNA, 22 nt, Artificial Sequence
  Synthetic
ugggaaugcagggcaggcugca

SEQ ID NO: 83249 - RNA, 23 nt, Artificial Sequence
  Synthetic
uugggaaugcagggcaggcugca

SEQ ID NO: 83250 - RNA, 24 nt, Artificial Sequence
  Synthetic
auugggaaugcagggcaggcugca

SEQ ID NO: 83251 - RNA, 18 nt, Artificial Sequence
  Synthetic
auugccucaauuucugca

SEQ ID NO: 83252 - RNA, 19 nt, Artificial Sequence
  Synthetic
uauugccucaauuucugca

SEQ ID NO: 83253 - RNA, 20 nt, Artificial Sequence
  Synthetic
uuauugccucaauuucugca

SEQ ID NO: 83254 - RNA, 21 nt, Artificial Sequence
  Synthetic
cuuauugccucaauuucugca

SEQ ID NO: 83255 - RNA, 22 nt, Artificial Sequence
  Synthetic
ucuuauugccucaauuucugca

SEQ ID NO: 83256 - RNA, 23 nt, Artificial Sequence
  Synthetic
aucuuauugccucaauuucugca

SEQ ID NO: 83257 - RNA, 24 nt, Artificial Sequence
  Synthetic
caucuuauugccucaauuucugca

SEQ ID NO: 83258 - RNA, 18 nt, Artificial Sequence
  Synthetic
ucaaaaaaauuuucugca

SEQ ID NO: 83259 - RNA, 19 nt, Artificial Sequence
  Synthetic
uucaaaaaaauuuucugca

SEQ ID NO: 83260 - RNA, 20 nt, Artificial Sequence
  Synthetic
uuucaaaaaaauuuucugca

SEQ ID NO: 83261 - RNA, 21 nt, Artificial Sequence
  Synthetic
auuucaaaaaaauuuucugca

SEQ ID NO: 83262 - RNA, 22 nt, Artificial Sequence
  Synthetic
aauuucaaaaaaauuuucugca

SEQ ID NO: 83263 - RNA, 23 nt, Artificial Sequence
  Synthetic
aaauuucaaaaaaauuuucugca

SEQ ID NO: 83264 - RNA, 24 nt, Artificial Sequence
  Synthetic
aaaauuucaaaaaaauuuucugca

SEQ ID NO: 83265 - RNA, 18 nt, Artificial Sequence
  Synthetic
uugugugauaaaagugca

SEQ ID NO: 83266 - RNA, 19 nt, Artificial Sequence
  Synthetic
auugugugauaaaagugca

SEQ ID NO: 83267 - RNA, 21 nt, Artificial Sequence
  Synthetic
agauugugugauaaaagugca

SEQ ID NO: 83268 - RNA, 22 nt, Artificial Sequence
  Synthetic
cagauugugugauaaaagugca

SEQ ID NO: 83269 - RNA, 23 nt, Artificial Sequence
  Synthetic
ucagauugugugauaaaagugca

SEQ ID NO: 83270 - RNA, 24 nt, Artificial Sequence
  Synthetic
uucagauugugugauaaaagugca

SEQ ID NO: 83271 - RNA, 18 nt, Artificial Sequence
  Synthetic
augcauaaauccagugca

SEQ ID NO: 83272 - RNA, 19 nt, Artificial Sequence
  Synthetic
aaugcauaaauccagugca

SEQ ID NO: 83273 - RNA, 20 nt, Artificial Sequence
  Synthetic
caaugcauaaauccagugca

SEQ ID NO: 83274 - RNA, 21 nt, Artificial Sequence
  Synthetic
acaaugcauaaauccagugca

SEQ ID NO: 83275 - RNA, 22 nt, Artificial Sequence
  Synthetic
aacaaugcauaaauccagugca

SEQ ID NO: 83276 - RNA, 23 nt, Artificial Sequence
  Synthetic
aaacaaugcauaaauccagugca

SEQ ID NO: 83277 - RNA, 24 nt, Artificial Sequence
  Synthetic
aaaacaaugcauaaauccagugca

SEQ ID NO: 83278 - RNA, 18 nt, Artificial Sequence
  Synthetic
caggauaauuccagugca

SEQ ID NO: 83279 - RNA, 20 nt, Artificial Sequence
  Synthetic
ugcaggauaauuccagugca

SEQ ID NO: 83280 - RNA, 21 nt, Artificial Sequence
  Synthetic
cugcaggauaauuccagugca

SEQ ID NO: 83281 - RNA, 22 nt, Artificial Sequence
  Synthetic
acugcaggauaauuccagugca

SEQ ID NO: 83282 - RNA, 23 nt, Artificial Sequence
  Synthetic
cacugcaggauaauuccagugca

SEQ ID NO: 83283 - RNA, 24 nt, Artificial Sequence
  Synthetic
ccacugcaggauaauuccagugca

SEQ ID NO: 83284 - RNA, 18 nt, Artificial Sequence
  Synthetic
uucacaggggugagugca

SEQ ID NO: 83285 - RNA, 21 nt, Artificial Sequence
  Synthetic
ugguucacaggggugagugca

SEQ ID NO: 83286 - RNA, 24 nt, Artificial Sequence
  Synthetic
uggugguucacaggggugagugca

SEQ ID NO: 83287 - RNA, 21 nt, Artificial Sequence
  Synthetic
cacuagggaccuccuagugca

SEQ ID NO: 83288 - RNA, 22 nt, Artificial Sequence
  Synthetic
acacuagggaccuccuagugca

SEQ ID NO: 83289 - RNA, 23 nt, Artificial Sequence
  Synthetic
cacacuagggaccuccuagugca

SEQ ID NO: 83290 - RNA, 24 nt, Artificial Sequence
  Synthetic
ccacacuagggaccuccuagugca

SEQ ID NO: 83291 - RNA, 18 nt, Artificial Sequence
  Synthetic
aaaauaaggucaggugca

SEQ ID NO: 83292 - RNA, 19 nt, Artificial Sequence
  Synthetic
aaaaauaaggucaggugca

SEQ ID NO: 83293 - RNA, 20 nt, Artificial Sequence
  Synthetic
uaaaaauaaggucaggugca

SEQ ID NO: 83294 - RNA, 21 nt, Artificial Sequence
  Synthetic
auaaaaauaaggucaggugca

SEQ ID NO: 83295 - RNA, 22 nt, Artificial Sequence
  Synthetic
aauaaaaauaaggucaggugca

SEQ ID NO: 83296 - RNA, 24 nt, Artificial Sequence
  Synthetic
ugaauaaaaauaaggucaggugca

SEQ ID NO: 83297 - RNA, 20 nt, Artificial Sequence
  Synthetic
ugguggguuuagagggugca

SEQ ID NO: 83298 - RNA, 21 nt, Artificial Sequence
  Synthetic
augguggguuuagagggugca

SEQ ID NO: 83299 - RNA, 22 nt, Artificial Sequence
  Synthetic
uaugguggguuuagagggugca

SEQ ID NO: 83300 - RNA, 23 nt, Artificial Sequence
  Synthetic
auaugguggguuuagagggugca

SEQ ID NO: 83301 - RNA, 24 nt, Artificial Sequence
  Synthetic
cauaugguggguuuagagggugca

SEQ ID NO: 83302 - RNA, 18 nt, Artificial Sequence
  Synthetic
agguuacaaacaugugca

SEQ ID NO: 83303 - RNA, 23 nt, Artificial Sequence
  Synthetic
aggggagguuacaaacaugugca

SEQ ID NO: 83304 - RNA, 24 nt, Artificial Sequence
  Synthetic
aaggggagguuacaaacaugugca

SEQ ID NO: 83305 - RNA, 18 nt, Artificial Sequence
  Synthetic
cgaccagaucuaugugca

SEQ ID NO: 83306 - RNA, 23 nt, Artificial Sequence
  Synthetic
uggggcgaccagaucuaugugca

SEQ ID NO: 83307 - RNA, 24 nt, Artificial Sequence
  Synthetic
auggggcgaccagaucuaugugca

SEQ ID NO: 83308 - RNA, 18 nt, Artificial Sequence
  Synthetic
cuaccagguguaugugca

SEQ ID NO: 83309 - RNA, 19 nt, Artificial Sequence
  Synthetic
ucuaccagguguaugugca

SEQ ID NO: 83310 - RNA, 20 nt, Artificial Sequence
  Synthetic
uucuaccagguguaugugca

SEQ ID NO: 83311 - RNA, 21 nt, Artificial Sequence
  Synthetic
uuucuaccagguguaugugca

SEQ ID NO: 83312 - RNA, 23 nt, Artificial Sequence
  Synthetic
aguuucuaccagguguaugugca

SEQ ID NO: 83313 - RNA, 18 nt, Artificial Sequence
  Synthetic
auggugagaugcugugca

SEQ ID NO: 83314 - RNA, 19 nt, Artificial Sequence
  Synthetic
aauggugagaugcugugca

SEQ ID NO: 83315 - RNA, 20 nt, Artificial Sequence
  Synthetic
aaauggugagaugcugugca

SEQ ID NO: 83316 - RNA, 22 nt, Artificial Sequence
  Synthetic
agaaauggugagaugcugugca

SEQ ID NO: 83317 - RNA, 23 nt, Artificial Sequence
  Synthetic
aagaaauggugagaugcugugca

SEQ ID NO: 83318 - RNA, 21 nt, Artificial Sequence
  Synthetic
uuucucaaaugucagugugca

SEQ ID NO: 83319 - RNA, 23 nt, Artificial Sequence
  Synthetic
uguuucucaaaugucagugugca

SEQ ID NO: 83320 - RNA, 18 nt, Artificial Sequence
  Synthetic
ugcagugccuggugugca

SEQ ID NO: 83321 - RNA, 20 nt, Artificial Sequence
  Synthetic
cgugcagugccuggugugca

SEQ ID NO: 83322 - RNA, 22 nt, Artificial Sequence
  Synthetic
agcgugcagugccuggugugca

SEQ ID NO: 83323 - RNA, 23 nt, Artificial Sequence
  Synthetic
uagcgugcagugccuggugugca

SEQ ID NO: 83324 - RNA, 24 nt, Artificial Sequence
  Synthetic
auagcgugcagugccuggugugca

SEQ ID NO: 83325 - RNA, 21 nt, Artificial Sequence
  Synthetic
uaaacaugguauaaaauugca

SEQ ID NO: 83326 - RNA, 22 nt, Artificial Sequence
  Synthetic
cuaaacaugguauaaaauugca

SEQ ID NO: 83327 - RNA, 23 nt, Artificial Sequence
  Synthetic
ucuaaacaugguauaaaauugca

SEQ ID NO: 83328 - RNA, 24 nt, Artificial Sequence
  Synthetic
cucuaaacaugguauaaaauugca

SEQ ID NO: 83329 - RNA, 18 nt, Artificial Sequence
  Synthetic
aaaucaacagaaauugca

SEQ ID NO: 83330 - RNA, 19 nt, Artificial Sequence
  Synthetic
caaaucaacagaaauugca

SEQ ID NO: 83331 - RNA, 20 nt, Artificial Sequence
  Synthetic
acaaaucaacagaaauugca

SEQ ID NO: 83332 - RNA, 21 nt, Artificial Sequence
  Synthetic
aacaaaucaacagaaauugca

SEQ ID NO: 83333 - RNA, 23 nt, Artificial Sequence
  Synthetic
agaacaaaucaacagaaauugca

SEQ ID NO: 83334 - RNA, 24 nt, Artificial Sequence
  Synthetic
cagaacaaaucaacagaaauugca

SEQ ID NO: 83335 - RNA, 18 nt, Artificial Sequence
  Synthetic
uguuaggaaacaauugca

SEQ ID NO: 83336 - RNA, 20 nt, Artificial Sequence
  Synthetic
uguguuaggaaacaauugca

SEQ ID NO: 83337 - RNA, 21 nt, Artificial Sequence
  Synthetic
cuguguuaggaaacaauugca

SEQ ID NO: 83338 - RNA, 22 nt, Artificial Sequence
  Synthetic
ucuguguuaggaaacaauugca

SEQ ID NO: 83339 - RNA, 23 nt, Artificial Sequence
  Synthetic
aucuguguuaggaaacaauugca

SEQ ID NO: 83340 - RNA, 24 nt, Artificial Sequence
  Synthetic
caucuguguuaggaaacaauugca

SEQ ID NO: 83341 - RNA, 18 nt, Artificial Sequence
  Synthetic
uuucuaagaggaauugca

SEQ ID NO: 83342 - RNA, 19 nt, Artificial Sequence
  Synthetic
uuuucuaagaggaauugca

SEQ ID NO: 83343 - RNA, 21 nt, Artificial Sequence
  Synthetic
uguuuucuaagaggaauugca

SEQ ID NO: 83344 - RNA, 23 nt, Artificial Sequence
  Synthetic
uguguuuucuaagaggaauugca

SEQ ID NO: 83345 - RNA, 24 nt, Artificial Sequence
  Synthetic
cuguguuuucuaagaggaauugca

SEQ ID NO: 83346 - RNA, 18 nt, Artificial Sequence
  Synthetic
caucugauaacacuugca

SEQ ID NO: 83347 - RNA, 19 nt, Artificial Sequence
  Synthetic
ucaucugauaacacuugca

SEQ ID NO: 83348 - RNA, 20 nt, Artificial Sequence
  Synthetic
cucaucugauaacacuugca

SEQ ID NO: 83349 - RNA, 21 nt, Artificial Sequence
  Synthetic
ucucaucugauaacacuugca

SEQ ID NO: 83350 - RNA, 22 nt, Artificial Sequence
  Synthetic
aucucaucugauaacacuugca

SEQ ID NO: 83351 - RNA, 23 nt, Artificial Sequence
  Synthetic
aaucucaucugauaacacuugca

SEQ ID NO: 83352 - RNA, 24 nt, Artificial Sequence
  Synthetic
uaaucucaucugauaacacuugca

SEQ ID NO: 83353 - RNA, 19 nt, Artificial Sequence
  Synthetic
ugggggaaaaccucuugca

SEQ ID NO: 83354 - RNA, 20 nt, Artificial Sequence
  Synthetic
uugggggaaaaccucuugca

SEQ ID NO: 83355 - RNA, 23 nt, Artificial Sequence
  Synthetic
ugguugggggaaaaccucuugca

SEQ ID NO: 83356 - RNA, 18 nt, Artificial Sequence
  Synthetic
aguggaugaauucuugca

SEQ ID NO: 83357 - RNA, 19 nt, Artificial Sequence
  Synthetic
aaguggaugaauucuugca

SEQ ID NO: 83358 - RNA, 20 nt, Artificial Sequence
  Synthetic
caaguggaugaauucuugca

SEQ ID NO: 83359 - RNA, 21 nt, Artificial Sequence
  Synthetic
acaaguggaugaauucuugca

SEQ ID NO: 83360 - RNA, 22 nt, Artificial Sequence
  Synthetic
cacaaguggaugaauucuugca

SEQ ID NO: 83361 - RNA, 23 nt, Artificial Sequence
  Synthetic
acacaaguggaugaauucuugca

SEQ ID NO: 83362 - RNA, 24 nt, Artificial Sequence
  Synthetic
uacacaaguggaugaauucuugca

SEQ ID NO: 83363 - RNA, 21 nt, Artificial Sequence
  Synthetic
uuccaagaggugguauuugca

SEQ ID NO: 83364 - RNA, 22 nt, Artificial Sequence
  Synthetic
auuccaagaggugguauuugca

SEQ ID NO: 83365 - RNA, 18 nt, Artificial Sequence
  Synthetic
acauucuaucacuuugca

SEQ ID NO: 83366 - RNA, 19 nt, Artificial Sequence
  Synthetic
aacauucuaucacuuugca

SEQ ID NO: 83367 - RNA, 20 nt, Artificial Sequence
  Synthetic
aaacauucuaucacuuugca

SEQ ID NO: 83368 - RNA, 21 nt, Artificial Sequence
  Synthetic
aaaacauucuaucacuuugca

SEQ ID NO: 83369 - RNA, 22 nt, Artificial Sequence
  Synthetic
aaaaacauucuaucacuuugca

SEQ ID NO: 83370 - RNA, 24 nt, Artificial Sequence
  Synthetic
agaaaaacauucuaucacuuugca

SEQ ID NO: 83371 - RNA, 21 nt, Artificial Sequence
  Synthetic
caauaccuuuuguucuuugca

SEQ ID NO: 83372 - RNA, 22 nt, Artificial Sequence
  Synthetic
ccaauaccuuuuguucuuugca

SEQ ID NO: 83373 - RNA, 23 nt, Artificial Sequence
  Synthetic
accaauaccuuuuguucuuugca

SEQ ID NO: 83374 - RNA, 24 nt, Artificial Sequence
  Synthetic
uaccaauaccuuuuguucuuugca

SEQ ID NO: 83375 - RNA, 18 nt, Artificial Sequence
  Synthetic
agggacaaaagaaaauca

SEQ ID NO: 83376 - RNA, 19 nt, Artificial Sequence
  Synthetic
uagggacaaaagaaaauca

SEQ ID NO: 83377 - RNA, 20 nt, Artificial Sequence
  Synthetic
auagggacaaaagaaaauca

SEQ ID NO: 83378 - RNA, 21 nt, Artificial Sequence
  Synthetic
aauagggacaaaagaaaauca

SEQ ID NO: 83379 - RNA, 22 nt, Artificial Sequence
  Synthetic
uaauagggacaaaagaaaauca

SEQ ID NO: 83380 - RNA, 21 nt, Artificial Sequence
  Synthetic
aaucuaucucaucacaaauca

SEQ ID NO: 83381 - RNA, 22 nt, Artificial Sequence
  Synthetic
aaaucuaucucaucacaaauca

SEQ ID NO: 83382 - RNA, 23 nt, Artificial Sequence
  Synthetic
uaaaucuaucucaucacaaauca

SEQ ID NO: 83383 - RNA, 24 nt, Artificial Sequence
  Synthetic
cuaaaucuaucucaucacaaauca

SEQ ID NO: 83384 - RNA, 18 nt, Artificial Sequence
  Synthetic
aguaacuuauacaaauca

SEQ ID NO: 83385 - RNA, 19 nt, Artificial Sequence
  Synthetic
aaguaacuuauacaaauca

SEQ ID NO: 83386 - RNA, 20 nt, Artificial Sequence
  Synthetic
aaaguaacuuauacaaauca

SEQ ID NO: 83387 - RNA, 21 nt, Artificial Sequence
  Synthetic
uaaaguaacuuauacaaauca

SEQ ID NO: 83388 - RNA, 24 nt, Artificial Sequence
  Synthetic
agguaaaguaacuuauacaaauca

SEQ ID NO: 83389 - RNA, 19 nt, Artificial Sequence
  Synthetic
ugcggaaauuaccaaauca

SEQ ID NO: 83390 - RNA, 21 nt, Artificial Sequence
  Synthetic
agugcggaaauuaccaaauca

SEQ ID NO: 83391 - RNA, 23 nt, Artificial Sequence
  Synthetic
ugagugcggaaauuaccaaauca

SEQ ID NO: 83392 - RNA, 24 nt, Artificial Sequence
  Synthetic
cugagugcggaaauuaccaaauca

SEQ ID NO: 83393 - RNA, 19 nt, Artificial Sequence
  Synthetic
agaagaacuauucaaauca

SEQ ID NO: 83394 - RNA, 20 nt, Artificial Sequence
  Synthetic
aagaagaacuauucaaauca

SEQ ID NO: 83395 - RNA, 21 nt, Artificial Sequence
  Synthetic
aaagaagaacuauucaaauca

SEQ ID NO: 83396 - RNA, 22 nt, Artificial Sequence
  Synthetic
aaaagaagaacuauucaaauca

SEQ ID NO: 83397 - RNA, 24 nt, Artificial Sequence
  Synthetic
agaaaagaagaacuauucaaauca

SEQ ID NO: 83398 - RNA, 22 nt, Artificial Sequence
  Synthetic
aggaauaaaaauguucaaauca

SEQ ID NO: 83399 - RNA, 23 nt, Artificial Sequence
  Synthetic
aaggaauaaaaauguucaaauca

SEQ ID NO: 83400 - RNA, 24 nt, Artificial Sequence
  Synthetic
aaaggaauaaaaauguucaaauca

SEQ ID NO: 83401 - RNA, 18 nt, Artificial Sequence
  Synthetic
uaugugagcaauaaauca

SEQ ID NO: 83402 - RNA, 19 nt, Artificial Sequence
  Synthetic
auaugugagcaauaaauca

SEQ ID NO: 83403 - RNA, 20 nt, Artificial Sequence
  Synthetic
uauaugugagcaauaaauca

SEQ ID NO: 83404 - RNA, 21 nt, Artificial Sequence
  Synthetic
cuauaugugagcaauaaauca

SEQ ID NO: 83405 - RNA, 22 nt, Artificial Sequence
  Synthetic
acuauaugugagcaauaaauca

SEQ ID NO: 83406 - RNA, 23 nt, Artificial Sequence
  Synthetic
uacuauaugugagcaauaaauca

SEQ ID NO: 83407 - RNA, 24 nt, Artificial Sequence
  Synthetic
uuacuauaugugagcaauaaauca

SEQ ID NO: 83408 - RNA, 18 nt, Artificial Sequence
  Synthetic
cauuacguuaagcaauca

SEQ ID NO: 83409 - RNA, 19 nt, Artificial Sequence
  Synthetic
acauuacguuaagcaauca

SEQ ID NO: 83410 - RNA, 20 nt, Artificial Sequence
  Synthetic
aacauuacguuaagcaauca

SEQ ID NO: 83411 - RNA, 21 nt, Artificial Sequence
  Synthetic
aaacauuacguuaagcaauca

SEQ ID NO: 83412 - RNA, 22 nt, Artificial Sequence
  Synthetic
aaaacauuacguuaagcaauca

SEQ ID NO: 83413 - RNA, 23 nt, Artificial Sequence
  Synthetic
aaaaacauuacguuaagcaauca

SEQ ID NO: 83414 - RNA, 24 nt, Artificial Sequence
  Synthetic
uaaaaacauuacguuaagcaauca

SEQ ID NO: 83415 - RNA, 19 nt, Artificial Sequence
  Synthetic
agucuuuguuaagcaauca

SEQ ID NO: 83416 - RNA, 21 nt, Artificial Sequence
  Synthetic
ugagucuuuguuaagcaauca

SEQ ID NO: 83417 - RNA, 22 nt, Artificial Sequence
  Synthetic
uugagucuuuguuaagcaauca

SEQ ID NO: 83418 - RNA, 23 nt, Artificial Sequence
  Synthetic
uuugagucuuuguuaagcaauca

SEQ ID NO: 83419 - RNA, 24 nt, Artificial Sequence
  Synthetic
uuuugagucuuuguuaagcaauca

SEQ ID NO: 83420 - RNA, 18 nt, Artificial Sequence
  Synthetic
augggaucuagucaauca

SEQ ID NO: 83421 - RNA, 19 nt, Artificial Sequence
  Synthetic
caugggaucuagucaauca

SEQ ID NO: 83422 - RNA, 20 nt, Artificial Sequence
  Synthetic
ccaugggaucuagucaauca

SEQ ID NO: 83423 - RNA, 21 nt, Artificial Sequence
  Synthetic
uccaugggaucuagucaauca

SEQ ID NO: 83424 - RNA, 23 nt, Artificial Sequence
  Synthetic
uguccaugggaucuagucaauca

SEQ ID NO: 83425 - RNA, 24 nt, Artificial Sequence
  Synthetic
cuguccaugggaucuagucaauca

SEQ ID NO: 83426 - RNA, 19 nt, Artificial Sequence
  Synthetic
ugcaagugaaguucaauca

SEQ ID NO: 83427 - RNA, 20 nt, Artificial Sequence
  Synthetic
cugcaagugaaguucaauca

SEQ ID NO: 83428 - RNA, 18 nt, Artificial Sequence
  Synthetic
aaaauguaguuggaauca

SEQ ID NO: 83429 - RNA, 22 nt, Artificial Sequence
  Synthetic
agggaaaauguaguuggaauca

SEQ ID NO: 83430 - RNA, 18 nt, Artificial Sequence
  Synthetic
augugucacuuugaauca

SEQ ID NO: 83431 - RNA, 19 nt, Artificial Sequence
  Synthetic
uaugugucacuuugaauca

SEQ ID NO: 83432 - RNA, 20 nt, Artificial Sequence
  Synthetic
auaugugucacuuugaauca

SEQ ID NO: 83433 - RNA, 21 nt, Artificial Sequence
  Synthetic
uauaugugucacuuugaauca

SEQ ID NO: 83434 - RNA, 23 nt, Artificial Sequence
  Synthetic
aguauaugugucacuuugaauca

SEQ ID NO: 83435 - RNA, 24 nt, Artificial Sequence
  Synthetic
caguauaugugucacuuugaauca

SEQ ID NO: 83436 - RNA, 20 nt, Artificial Sequence
  Synthetic
uggcauauagaagauaauca

SEQ ID NO: 83437 - RNA, 21 nt, Artificial Sequence
  Synthetic
uuggcauauagaagauaauca

SEQ ID NO: 83438 - RNA, 22 nt, Artificial Sequence
  Synthetic
uuuggcauauagaagauaauca

SEQ ID NO: 83439 - RNA, 23 nt, Artificial Sequence
  Synthetic
auuuggcauauagaagauaauca

SEQ ID NO: 83440 - RNA, 24 nt, Artificial Sequence
  Synthetic
cauuuggcauauagaagauaauca

SEQ ID NO: 83441 - RNA, 18 nt, Artificial Sequence
  Synthetic
uaauugcagugauaauca

SEQ ID NO: 83442 - RNA, 19 nt, Artificial Sequence
  Synthetic
auaauugcagugauaauca

SEQ ID NO: 83443 - RNA, 20 nt, Artificial Sequence
  Synthetic
uauaauugcagugauaauca

SEQ ID NO: 83444 - RNA, 21 nt, Artificial Sequence
  Synthetic
uuauaauugcagugauaauca

SEQ ID NO: 83445 - RNA, 22 nt, Artificial Sequence
  Synthetic
auuauaauugcagugauaauca

SEQ ID NO: 83446 - RNA, 24 nt, Artificial Sequence
  Synthetic
agauuauaauugcagugauaauca

SEQ ID NO: 83447 - RNA, 18 nt, Artificial Sequence
  Synthetic
uguuaaugaacuuaauca

SEQ ID NO: 83448 - RNA, 19 nt, Artificial Sequence
  Synthetic
uuguuaaugaacuuaauca

SEQ ID NO: 83449 - RNA, 20 nt, Artificial Sequence
  Synthetic
uuuguuaaugaacuuaauca

SEQ ID NO: 83450 - RNA, 21 nt, Artificial Sequence
  Synthetic
cuuuguuaaugaacuuaauca

SEQ ID NO: 83451 - RNA, 22 nt, Artificial Sequence
  Synthetic
ucuuuguuaaugaacuuaauca

SEQ ID NO: 83452 - RNA, 23 nt, Artificial Sequence
  Synthetic
uucuuuguuaaugaacuuaauca

SEQ ID NO: 83453 - RNA, 24 nt, Artificial Sequence
  Synthetic
auucuuuguuaaugaacuuaauca

SEQ ID NO: 83454 - RNA, 18 nt, Artificial Sequence
  Synthetic
uuuggcuaaucuuaauca

SEQ ID NO: 83455 - RNA, 20 nt, Artificial Sequence
  Synthetic
aguuuggcuaaucuuaauca

SEQ ID NO: 83456 - RNA, 22 nt, Artificial Sequence
  Synthetic
ugaguuuggcuaaucuuaauca

SEQ ID NO: 83457 - RNA, 23 nt, Artificial Sequence
  Synthetic
uugaguuuggcuaaucuuaauca

SEQ ID NO: 83458 - RNA, 24 nt, Artificial Sequence
  Synthetic
uuugaguuuggcuaaucuuaauca

SEQ ID NO: 83459 - RNA, 18 nt, Artificial Sequence
  Synthetic
uucugccugauuuaauca

SEQ ID NO: 83460 - RNA, 19 nt, Artificial Sequence
  Synthetic
uuucugccugauuuaauca

SEQ ID NO: 83461 - RNA, 20 nt, Artificial Sequence
  Synthetic
cuuucugccugauuuaauca

SEQ ID NO: 83462 - RNA, 21 nt, Artificial Sequence
  Synthetic
acuuucugccugauuuaauca

SEQ ID NO: 83463 - RNA, 22 nt, Artificial Sequence
  Synthetic
uacuuucugccugauuuaauca

SEQ ID NO: 83464 - RNA, 23 nt, Artificial Sequence
  Synthetic
uuacuuucugccugauuuaauca

SEQ ID NO: 83465 - RNA, 24 nt, Artificial Sequence
  Synthetic
uuuacuuucugccugauuuaauca

SEQ ID NO: 83466 - RNA, 19 nt, Artificial Sequence
  Synthetic
cgagacagaaauaacauca

SEQ ID NO: 83467 - RNA, 20 nt, Artificial Sequence
  Synthetic
acgagacagaaauaacauca

SEQ ID NO: 83468 - RNA, 21 nt, Artificial Sequence
  Synthetic
cacgagacagaaauaacauca

SEQ ID NO: 83469 - RNA, 22 nt, Artificial Sequence
  Synthetic
acacgagacagaaauaacauca

SEQ ID NO: 83470 - RNA, 24 nt, Artificial Sequence
  Synthetic
ugacacgagacagaaauaacauca

SEQ ID NO: 83471 - RNA, 18 nt, Artificial Sequence
  Synthetic
acaaugaacauaacauca

SEQ ID NO: 83472 - RNA, 20 nt, Artificial Sequence
  Synthetic
agacaaugaacauaacauca

SEQ ID NO: 83473 - RNA, 21 nt, Artificial Sequence
  Synthetic
cagacaaugaacauaacauca

SEQ ID NO: 83474 - RNA, 22 nt, Artificial Sequence
  Synthetic
acagacaaugaacauaacauca

SEQ ID NO: 83475 - RNA, 23 nt, Artificial Sequence
  Synthetic
aacagacaaugaacauaacauca

SEQ ID NO: 83476 - RNA, 24 nt, Artificial Sequence
  Synthetic
aaacagacaaugaacauaacauca

SEQ ID NO: 83477 - RNA, 18 nt, Artificial Sequence
  Synthetic
agagggaugcuaccauca

SEQ ID NO: 83478 - RNA, 19 nt, Artificial Sequence
  Synthetic
aagagggaugcuaccauca

SEQ ID NO: 83479 - RNA, 21 nt, Artificial Sequence
  Synthetic
agaagagggaugcuaccauca

SEQ ID NO: 83480 - RNA, 22 nt, Artificial Sequence
  Synthetic
aagaagagggaugcuaccauca

SEQ ID NO: 83481 - RNA, 23 nt, Artificial Sequence
  Synthetic
aaagaagagggaugcuaccauca

SEQ ID NO: 83482 - RNA, 24 nt, Artificial Sequence
  Synthetic
uaaagaagagggaugcuaccauca

SEQ ID NO: 83483 - RNA, 21 nt, Artificial Sequence
  Synthetic
cuacaacaaaacagcccauca

SEQ ID NO: 83484 - RNA, 22 nt, Artificial Sequence
  Synthetic
acuacaacaaaacagcccauca

SEQ ID NO: 83485 - RNA, 23 nt, Artificial Sequence
  Synthetic
aacuacaacaaaacagcccauca

SEQ ID NO: 83486 - RNA, 24 nt, Artificial Sequence
  Synthetic
aaacuacaacaaaacagcccauca

SEQ ID NO: 83487 - RNA, 18 nt, Artificial Sequence
  Synthetic
aaaugcaugaugccauca

SEQ ID NO: 83488 - RNA, 19 nt, Artificial Sequence
  Synthetic
aaaaugcaugaugccauca

SEQ ID NO: 83489 - RNA, 20 nt, Artificial Sequence
  Synthetic
uaaaaugcaugaugccauca

SEQ ID NO: 83490 - RNA, 21 nt, Artificial Sequence
  Synthetic
cuaaaaugcaugaugccauca

SEQ ID NO: 83491 - RNA, 22 nt, Artificial Sequence
  Synthetic
ucuaaaaugcaugaugccauca

SEQ ID NO: 83492 - RNA, 23 nt, Artificial Sequence
  Synthetic
aucuaaaaugcaugaugccauca

SEQ ID NO: 83493 - RNA, 24 nt, Artificial Sequence
  Synthetic
uaucuaaaaugcaugaugccauca

SEQ ID NO: 83494 - RNA, 18 nt, Artificial Sequence
  Synthetic
agaagaaaauaagcauca

SEQ ID NO: 83495 - RNA, 20 nt, Artificial Sequence
  Synthetic
ugagaagaaaauaagcauca

SEQ ID NO: 83496 - RNA, 21 nt, Artificial Sequence
  Synthetic
cugagaagaaaauaagcauca

SEQ ID NO: 83497 - RNA, 22 nt, Artificial Sequence
  Synthetic
ucugagaagaaaauaagcauca

SEQ ID NO: 83498 - RNA, 24 nt, Artificial Sequence
  Synthetic
ugucugagaagaaaauaagcauca

SEQ ID NO: 83499 - RNA, 18 nt, Artificial Sequence
  Synthetic
uugaauagaagagcauca

SEQ ID NO: 83500 - RNA, 19 nt, Artificial Sequence
  Synthetic
cuugaauagaagagcauca

SEQ ID NO: 83501 - RNA, 20 nt, Artificial Sequence
  Synthetic
ucuugaauagaagagcauca

SEQ ID NO: 83502 - RNA, 21 nt, Artificial Sequence
  Synthetic
cucuugaauagaagagcauca

SEQ ID NO: 83503 - RNA, 22 nt, Artificial Sequence
  Synthetic
acucuugaauagaagagcauca

SEQ ID NO: 83504 - RNA, 23 nt, Artificial Sequence
  Synthetic
aacucuugaauagaagagcauca

SEQ ID NO: 83505 - RNA, 24 nt, Artificial Sequence
  Synthetic
uaacucuugaauagaagagcauca

SEQ ID NO: 83506 - RNA, 18 nt, Artificial Sequence
  Synthetic
cugucaauuucugcauca

SEQ ID NO: 83507 - RNA, 19 nt, Artificial Sequence
  Synthetic
ucugucaauuucugcauca

SEQ ID NO: 83508 - RNA, 20 nt, Artificial Sequence
  Synthetic
uucugucaauuucugcauca

SEQ ID NO: 83509 - RNA, 21 nt, Artificial Sequence
  Synthetic
auucugucaauuucugcauca

SEQ ID NO: 83510 - RNA, 22 nt, Artificial Sequence
  Synthetic
aauucugucaauuucugcauca

SEQ ID NO: 83511 - RNA, 24 nt, Artificial Sequence
  Synthetic
ugaauucugucaauuucugcauca

SEQ ID NO: 83512 - RNA, 19 nt, Artificial Sequence
  Synthetic
aguuagggaaggaucauca

SEQ ID NO: 83513 - RNA, 21 nt, Artificial Sequence
  Synthetic
ugaguuagggaaggaucauca

SEQ ID NO: 83514 - RNA, 22 nt, Artificial Sequence
  Synthetic
cugaguuagggaaggaucauca

SEQ ID NO: 83515 - RNA, 23 nt, Artificial Sequence
  Synthetic
acugaguuagggaaggaucauca

SEQ ID NO: 83516 - RNA, 24 nt, Artificial Sequence
  Synthetic
aacugaguuagggaaggaucauca

SEQ ID NO: 83517 - RNA, 19 nt, Artificial Sequence
  Synthetic
uggauuucauaacucauca

SEQ ID NO: 83518 - RNA, 20 nt, Artificial Sequence
  Synthetic
auggauuucauaacucauca

SEQ ID NO: 83519 - RNA, 21 nt, Artificial Sequence
  Synthetic
aauggauuucauaacucauca

SEQ ID NO: 83520 - RNA, 22 nt, Artificial Sequence
  Synthetic
aaauggauuucauaacucauca

SEQ ID NO: 83521 - RNA, 23 nt, Artificial Sequence
  Synthetic
uaaauggauuucauaacucauca

SEQ ID NO: 83522 - RNA, 24 nt, Artificial Sequence
  Synthetic
uuaaauggauuucauaacucauca

SEQ ID NO: 83523 - RNA, 19 nt, Artificial Sequence
  Synthetic
uggaguccuucccucauca

SEQ ID NO: 83524 - RNA, 20 nt, Artificial Sequence
  Synthetic
auggaguccuucccucauca

SEQ ID NO: 83525 - RNA, 21 nt, Artificial Sequence
  Synthetic
aauggaguccuucccucauca

SEQ ID NO: 83526 - RNA, 22 nt, Artificial Sequence
  Synthetic
uaauggaguccuucccucauca

SEQ ID NO: 83527 - RNA, 23 nt, Artificial Sequence
  Synthetic
uuaauggaguccuucccucauca

SEQ ID NO: 83528 - RNA, 24 nt, Artificial Sequence
  Synthetic
uuuaauggaguccuucccucauca

SEQ ID NO: 83529 - RNA, 18 nt, Artificial Sequence
  Synthetic
aacgaaagauauucauca

SEQ ID NO: 83530 - RNA, 19 nt, Artificial Sequence
  Synthetic
uaacgaaagauauucauca

SEQ ID NO: 83531 - RNA, 20 nt, Artificial Sequence
  Synthetic
uuaacgaaagauauucauca

SEQ ID NO: 83532 - RNA, 21 nt, Artificial Sequence
  Synthetic
cuuaacgaaagauauucauca

SEQ ID NO: 83533 - RNA, 22 nt, Artificial Sequence
  Synthetic
ucuuaacgaaagauauucauca

SEQ ID NO: 83534 - RNA, 23 nt, Artificial Sequence
  Synthetic
aucuuaacgaaagauauucauca

SEQ ID NO: 83535 - RNA, 24 nt, Artificial Sequence
  Synthetic
caucuuaacgaaagauauucauca

SEQ ID NO: 83536 - RNA, 18 nt, Artificial Sequence
  Synthetic
ucugguggcucuucauca

SEQ ID NO: 83537 - RNA, 19 nt, Artificial Sequence
  Synthetic
uucugguggcucuucauca

SEQ ID NO: 83538 - RNA, 20 nt, Artificial Sequence
  Synthetic
cuucugguggcucuucauca

SEQ ID NO: 83539 - RNA, 21 nt, Artificial Sequence
  Synthetic
ucuucugguggcucuucauca

SEQ ID NO: 83540 - RNA, 22 nt, Artificial Sequence
  Synthetic
aucuucugguggcucuucauca

SEQ ID NO: 83541 - RNA, 23 nt, Artificial Sequence
  Synthetic
aaucuucugguggcucuucauca

SEQ ID NO: 83542 - RNA, 24 nt, Artificial Sequence
  Synthetic
aaaucuucugguggcucuucauca

SEQ ID NO: 83543 - RNA, 23 nt, Artificial Sequence
  Synthetic
aggaauaauaaaaaaaaagauca

SEQ ID NO: 83544 - RNA, 21 nt, Artificial Sequence
  Synthetic
cagaagugugggugaagauca

SEQ ID NO: 83545 - RNA, 22 nt, Artificial Sequence
  Synthetic
ucagaagugugggugaagauca

SEQ ID NO: 83546 - RNA, 24 nt, Artificial Sequence
  Synthetic
agucagaagugugggugaagauca

SEQ ID NO: 83547 - RNA, 18 nt, Artificial Sequence
  Synthetic
ugagaacaagauagauca

SEQ ID NO: 83548 - RNA, 19 nt, Artificial Sequence
  Synthetic
uugagaacaagauagauca

SEQ ID NO: 83549 - RNA, 20 nt, Artificial Sequence
  Synthetic
uuugagaacaagauagauca

SEQ ID NO: 83550 - RNA, 21 nt, Artificial Sequence
  Synthetic
cuuugagaacaagauagauca

SEQ ID NO: 83551 - RNA, 23 nt, Artificial Sequence
  Synthetic
ugcuuugagaacaagauagauca

SEQ ID NO: 83552 - RNA, 24 nt, Artificial Sequence
  Synthetic
uugcuuugagaacaagauagauca

SEQ ID NO: 83553 - RNA, 18 nt, Artificial Sequence
  Synthetic
acuaguagaucacgauca

SEQ ID NO: 83554 - RNA, 19 nt, Artificial Sequence
  Synthetic
cacuaguagaucacgauca

SEQ ID NO: 83555 - RNA, 20 nt, Artificial Sequence
  Synthetic
ucacuaguagaucacgauca

SEQ ID NO: 83556 - RNA, 21 nt, Artificial Sequence
  Synthetic
uucacuaguagaucacgauca

SEQ ID NO: 83557 - RNA, 22 nt, Artificial Sequence
  Synthetic
auucacuaguagaucacgauca

SEQ ID NO: 83558 - RNA, 23 nt, Artificial Sequence
  Synthetic
aauucacuaguagaucacgauca

SEQ ID NO: 83559 - RNA, 24 nt, Artificial Sequence
  Synthetic
aaauucacuaguagaucacgauca

SEQ ID NO: 83560 - RNA, 18 nt, Artificial Sequence
  Synthetic
caugcuguggaaggauca

SEQ ID NO: 83561 - RNA, 22 nt, Artificial Sequence
  Synthetic
ugggcaugcuguggaaggauca

SEQ ID NO: 83562 - RNA, 23 nt, Artificial Sequence
  Synthetic
cugggcaugcuguggaaggauca

SEQ ID NO: 83563 - RNA, 24 nt, Artificial Sequence
  Synthetic
acugggcaugcuguggaaggauca

SEQ ID NO: 83564 - RNA, 18 nt, Artificial Sequence
  Synthetic
acaucauauagcggauca

SEQ ID NO: 83565 - RNA, 19 nt, Artificial Sequence
  Synthetic
uacaucauauagcggauca

SEQ ID NO: 83566 - RNA, 20 nt, Artificial Sequence
  Synthetic
cuacaucauauagcggauca

SEQ ID NO: 83567 - RNA, 18 nt, Artificial Sequence
  Synthetic
cacugaaagacaugauca

SEQ ID NO: 83568 - RNA, 19 nt, Artificial Sequence
  Synthetic
acacugaaagacaugauca

SEQ ID NO: 83569 - RNA, 21 nt, Artificial Sequence
  Synthetic
ugacacugaaagacaugauca

SEQ ID NO: 83570 - RNA, 22 nt, Artificial Sequence
  Synthetic
augacacugaaagacaugauca

SEQ ID NO: 83571 - RNA, 23 nt, Artificial Sequence
  Synthetic
uaugacacugaaagacaugauca

SEQ ID NO: 83572 - RNA, 24 nt, Artificial Sequence
  Synthetic
uuaugacacugaaagacaugauca

SEQ ID NO: 83573 - RNA, 18 nt, Artificial Sequence
  Synthetic
acuaccagagaaauauca

SEQ ID NO: 83574 - RNA, 20 nt, Artificial Sequence
  Synthetic
cgacuaccagagaaauauca

SEQ ID NO: 83575 - RNA, 22 nt, Artificial Sequence
  Synthetic
agcgacuaccagagaaauauca

SEQ ID NO: 83576 - RNA, 23 nt, Artificial Sequence
  Synthetic
uagcgacuaccagagaaauauca

SEQ ID NO: 83577 - RNA, 24 nt, Artificial Sequence
  Synthetic
cuagcgacuaccagagaaauauca

SEQ ID NO: 83578 - RNA, 18 nt, Artificial Sequence
  Synthetic
accucaauauggauauca

SEQ ID NO: 83579 - RNA, 19 nt, Artificial Sequence
  Synthetic
uaccucaauauggauauca

SEQ ID NO: 83580 - RNA, 20 nt, Artificial Sequence
  Synthetic
auaccucaauauggauauca

SEQ ID NO: 83581 - RNA, 21 nt, Artificial Sequence
  Synthetic
aauaccucaauauggauauca

SEQ ID NO: 83582 - RNA, 22 nt, Artificial Sequence
  Synthetic
aaauaccucaauauggauauca

SEQ ID NO: 83583 - RNA, 23 nt, Artificial Sequence
  Synthetic
uaaauaccucaauauggauauca

SEQ ID NO: 83584 - RNA, 24 nt, Artificial Sequence
  Synthetic
uuaaauaccucaauauggauauca

SEQ ID NO: 83585 - RNA, 18 nt, Artificial Sequence
  Synthetic
agaauauggcuuauauca

SEQ ID NO: 83586 - RNA, 19 nt, Artificial Sequence
  Synthetic
cagaauauggcuuauauca

SEQ ID NO: 83587 - RNA, 20 nt, Artificial Sequence
  Synthetic
ccagaauauggcuuauauca

SEQ ID NO: 83588 - RNA, 21 nt, Artificial Sequence
  Synthetic
uccagaauauggcuuauauca

SEQ ID NO: 83589 - RNA, 23 nt, Artificial Sequence
  Synthetic
aguccagaauauggcuuauauca

SEQ ID NO: 83590 - RNA, 18 nt, Artificial Sequence
  Synthetic
acuuacguaacacuauca

SEQ ID NO: 83591 - RNA, 19 nt, Artificial Sequence
  Synthetic
uacuuacguaacacuauca

SEQ ID NO: 83592 - RNA, 20 nt, Artificial Sequence
  Synthetic
uuacuuacguaacacuauca

SEQ ID NO: 83593 - RNA, 21 nt, Artificial Sequence
  Synthetic
auuacuuacguaacacuauca

SEQ ID NO: 83594 - RNA, 22 nt, Artificial Sequence
  Synthetic
aauuacuuacguaacacuauca

SEQ ID NO: 83595 - RNA, 23 nt, Artificial Sequence
  Synthetic
uaauuacuuacguaacacuauca

SEQ ID NO: 83596 - RNA, 24 nt, Artificial Sequence
  Synthetic
auaauuacuuacguaacacuauca

SEQ ID NO: 83597 - RNA, 18 nt, Artificial Sequence
  Synthetic
aaaggcuguaggguauca

SEQ ID NO: 83598 - RNA, 19 nt, Artificial Sequence
  Synthetic
caaaggcuguaggguauca

SEQ ID NO: 83599 - RNA, 20 nt, Artificial Sequence
  Synthetic
ccaaaggcuguaggguauca

SEQ ID NO: 83600 - RNA, 21 nt, Artificial Sequence
  Synthetic
cccaaaggcuguaggguauca

SEQ ID NO: 83601 - RNA, 22 nt, Artificial Sequence
  Synthetic
ccccaaaggcuguaggguauca

SEQ ID NO: 83602 - RNA, 23 nt, Artificial Sequence
  Synthetic
accccaaaggcuguaggguauca

SEQ ID NO: 83603 - RNA, 24 nt, Artificial Sequence
  Synthetic
aaccccaaaggcuguaggguauca

SEQ ID NO: 83604 - RNA, 18 nt, Artificial Sequence
  Synthetic
ucaaugccagaauuauca

SEQ ID NO: 83605 - RNA, 19 nt, Artificial Sequence
  Synthetic
aucaaugccagaauuauca

SEQ ID NO: 83606 - RNA, 20 nt, Artificial Sequence
  Synthetic
uaucaaugccagaauuauca

SEQ ID NO: 83607 - RNA, 21 nt, Artificial Sequence
  Synthetic
cuaucaaugccagaauuauca

SEQ ID NO: 83608 - RNA, 22 nt, Artificial Sequence
  Synthetic
acuaucaaugccagaauuauca

SEQ ID NO: 83609 - RNA, 23 nt, Artificial Sequence
  Synthetic
uacuaucaaugccagaauuauca

SEQ ID NO: 83610 - RNA, 24 nt, Artificial Sequence
  Synthetic
cuacuaucaaugccagaauuauca

SEQ ID NO: 83611 - RNA, 18 nt, Artificial Sequence
  Synthetic
augauuuaugacuuauca

SEQ ID NO: 83612 - RNA, 19 nt, Artificial Sequence
  Synthetic
aaugauuuaugacuuauca

SEQ ID NO: 83613 - RNA, 20 nt, Artificial Sequence
  Synthetic
aaaugauuuaugacuuauca

SEQ ID NO: 83614 - RNA, 23 nt, Artificial Sequence
  Synthetic
aggaaaugauuuaugacuuauca

SEQ ID NO: 83615 - RNA, 24 nt, Artificial Sequence
  Synthetic
caggaaaugauuuaugacuuauca

SEQ ID NO: 83616 - RNA, 18 nt, Artificial Sequence
  Synthetic
auuucaaugauguuauca

SEQ ID NO: 83617 - RNA, 19 nt, Artificial Sequence
  Synthetic
aauuucaaugauguuauca

SEQ ID NO: 83618 - RNA, 20 nt, Artificial Sequence
  Synthetic
uaauuucaaugauguuauca

SEQ ID NO: 83619 - RNA, 21 nt, Artificial Sequence
  Synthetic
uuaauuucaaugauguuauca

SEQ ID NO: 83620 - RNA, 22 nt, Artificial Sequence
  Synthetic
uuuaauuucaaugauguuauca

SEQ ID NO: 83621 - RNA, 23 nt, Artificial Sequence
  Synthetic
auuuaauuucaaugauguuauca

SEQ ID NO: 83622 - RNA, 24 nt, Artificial Sequence
  Synthetic
uauuuaauuucaaugauguuauca

SEQ ID NO: 83623 - RNA, 18 nt, Artificial Sequence
  Synthetic
ucagcagcaacuuuauca

SEQ ID NO: 83624 - RNA, 19 nt, Artificial Sequence
  Synthetic
uucagcagcaacuuuauca

SEQ ID NO: 83625 - RNA, 20 nt, Artificial Sequence
  Synthetic
uuucagcagcaacuuuauca

SEQ ID NO: 83626 - RNA, 21 nt, Artificial Sequence
  Synthetic
auuucagcagcaacuuuauca

SEQ ID NO: 83627 - RNA, 22 nt, Artificial Sequence
  Synthetic
uauuucagcagcaacuuuauca

SEQ ID NO: 83628 - RNA, 23 nt, Artificial Sequence
  Synthetic
uuauuucagcagcaacuuuauca

SEQ ID NO: 83629 - RNA, 24 nt, Artificial Sequence
  Synthetic
uuuauuucagcagcaacuuuauca

SEQ ID NO: 83630 - RNA, 18 nt, Artificial Sequence
  Synthetic
aaugagagacguuuauca

SEQ ID NO: 83631 - RNA, 19 nt, Artificial Sequence
  Synthetic
aaaugagagacguuuauca

SEQ ID NO: 83632 - RNA, 20 nt, Artificial Sequence
  Synthetic
aaaaugagagacguuuauca

SEQ ID NO: 83633 - RNA, 21 nt, Artificial Sequence
  Synthetic
aaaaaugagagacguuuauca

SEQ ID NO: 83634 - RNA, 24 nt, Artificial Sequence
  Synthetic
uggaaaaaugagagacguuuauca

SEQ ID NO: 83635 - RNA, 18 nt, Artificial Sequence
  Synthetic
cuuuaaagaaaaaacuca

SEQ ID NO: 83636 - RNA, 19 nt, Artificial Sequence
  Synthetic
acuuuaaagaaaaaacuca

SEQ ID NO: 83637 - RNA, 20 nt, Artificial Sequence
  Synthetic
aacuuuaaagaaaaaacuca

SEQ ID NO: 83638 - RNA, 23 nt, Artificial Sequence
  Synthetic
aggaacuuuaaagaaaaaacuca

SEQ ID NO: 83639 - RNA, 24 nt, Artificial Sequence
  Synthetic
uaggaacuuuaaagaaaaaacuca

SEQ ID NO: 83640 - RNA, 18 nt, Artificial Sequence
  Synthetic
ugucaauguagaaacuca

SEQ ID NO: 83641 - RNA, 19 nt, Artificial Sequence
  Synthetic
augucaauguagaaacuca

SEQ ID NO: 83642 - RNA, 21 nt, Artificial Sequence
  Synthetic
agaugucaauguagaaacuca

SEQ ID NO: 83643 - RNA, 22 nt, Artificial Sequence
  Synthetic
uagaugucaauguagaaacuca

SEQ ID NO: 83644 - RNA, 23 nt, Artificial Sequence
  Synthetic
uuagaugucaauguagaaacuca

SEQ ID NO: 83645 - RNA, 18 nt, Artificial Sequence
  Synthetic
uacuuucucuugaacuca

SEQ ID NO: 83646 - RNA, 19 nt, Artificial Sequence
  Synthetic
auacuuucucuugaacuca

SEQ ID NO: 83647 - RNA, 20 nt, Artificial Sequence
  Synthetic
uauacuuucucuugaacuca

SEQ ID NO: 83648 - RNA, 22 nt, Artificial Sequence
  Synthetic
uguauacuuucucuugaacuca

SEQ ID NO: 83649 - RNA, 24 nt, Artificial Sequence
  Synthetic
aguguauacuuucucuugaacuca

SEQ ID NO: 83650 - RNA, 18 nt, Artificial Sequence
  Synthetic
caagaaaauaguaacuca

SEQ ID NO: 83651 - RNA, 19 nt, Artificial Sequence
  Synthetic
acaagaaaauaguaacuca

SEQ ID NO: 83652 - RNA, 20 nt, Artificial Sequence
  Synthetic
aacaagaaaauaguaacuca

SEQ ID NO: 83653 - RNA, 21 nt, Artificial Sequence
  Synthetic
aaacaagaaaauaguaacuca

SEQ ID NO: 83654 - RNA, 24 nt, Artificial Sequence
  Synthetic
cggaaacaagaaaauaguaacuca

SEQ ID NO: 83655 - RNA, 18 nt, Artificial Sequence
  Synthetic
ucuagaugauuuaacuca

SEQ ID NO: 83656 - RNA, 20 nt, Artificial Sequence
  Synthetic
ugucuagaugauuuaacuca

SEQ ID NO: 83657 - RNA, 21 nt, Artificial Sequence
  Synthetic
augucuagaugauuuaacuca

SEQ ID NO: 83658 - RNA, 22 nt, Artificial Sequence
  Synthetic
caugucuagaugauuuaacuca

SEQ ID NO: 83659 - RNA, 23 nt, Artificial Sequence
  Synthetic
acaugucuagaugauuuaacuca

SEQ ID NO: 83660 - RNA, 24 nt, Artificial Sequence
  Synthetic
cacaugucuagaugauuuaacuca

SEQ ID NO: 83661 - RNA, 19 nt, Artificial Sequence
  Synthetic
agugaugucucuuuacuca

SEQ ID NO: 83662 - RNA, 20 nt, Artificial Sequence
  Synthetic
cagugaugucucuuuacuca

SEQ ID NO: 83663 - RNA, 21 nt, Artificial Sequence
  Synthetic
ccagugaugucucuuuacuca

SEQ ID NO: 83664 - RNA, 22 nt, Artificial Sequence
  Synthetic
uccagugaugucucuuuacuca

SEQ ID NO: 83665 - RNA, 23 nt, Artificial Sequence
  Synthetic
uuccagugaugucucuuuacuca

SEQ ID NO: 83666 - RNA, 24 nt, Artificial Sequence
  Synthetic
cuuccagugaugucucuuuacuca

SEQ ID NO: 83667 - RNA, 19 nt, Artificial Sequence
  Synthetic
aggguggaaauucaccuca

SEQ ID NO: 83668 - RNA, 20 nt, Artificial Sequence
  Synthetic
aaggguggaaauucaccuca

SEQ ID NO: 83669 - RNA, 21 nt, Artificial Sequence
  Synthetic
uaaggguggaaauucaccuca

SEQ ID NO: 83670 - RNA, 22 nt, Artificial Sequence
  Synthetic
cuaaggguggaaauucaccuca

SEQ ID NO: 83671 - RNA, 24 nt, Artificial Sequence
  Synthetic
agcuaaggguggaaauucaccuca

SEQ ID NO: 83672 - RNA, 18 nt, Artificial Sequence
  Synthetic
auuaaauaacagaccuca

SEQ ID NO: 83673 - RNA, 20 nt, Artificial Sequence
  Synthetic
agauuaaauaacagaccuca

SEQ ID NO: 83674 - RNA, 23 nt, Artificial Sequence
  Synthetic
aggagauuaaauaacagaccuca

SEQ ID NO: 83675 - RNA, 24 nt, Artificial Sequence
  Synthetic
aaggagauuaaauaacagaccuca

SEQ ID NO: 83676 - RNA, 18 nt, Artificial Sequence
  Synthetic
uucccauuuacuaccuca

SEQ ID NO: 83677 - RNA, 19 nt, Artificial Sequence
  Synthetic
uuucccauuuacuaccuca

SEQ ID NO: 83678 - RNA, 20 nt, Artificial Sequence
  Synthetic
auuucccauuuacuaccuca

SEQ ID NO: 83679 - RNA, 21 nt, Artificial Sequence
  Synthetic
cauuucccauuuacuaccuca

SEQ ID NO: 83680 - RNA, 22 nt, Artificial Sequence
  Synthetic
acauuucccauuuacuaccuca

SEQ ID NO: 83681 - RNA, 23 nt, Artificial Sequence
  Synthetic
cacauuucccauuuacuaccuca

SEQ ID NO: 83682 - RNA, 24 nt, Artificial Sequence
  Synthetic
acacauuucccauuuacuaccuca

SEQ ID NO: 83683 - RNA, 18 nt, Artificial Sequence
  Synthetic
acugagugcuaacccuca

SEQ ID NO: 83684 - RNA, 20 nt, Artificial Sequence
  Synthetic
ugacugagugcuaacccuca

SEQ ID NO: 83685 - RNA, 21 nt, Artificial Sequence
  Synthetic
uugacugagugcuaacccuca

SEQ ID NO: 83686 - RNA, 22 nt, Artificial Sequence
  Synthetic
cuugacugagugcuaacccuca

SEQ ID NO: 83687 - RNA, 23 nt, Artificial Sequence
  Synthetic
ucuugacugagugcuaacccuca

SEQ ID NO: 83688 - RNA, 24 nt, Artificial Sequence
  Synthetic
aucuugacugagugcuaacccuca

SEQ ID NO: 83689 - RNA, 19 nt, Artificial Sequence
  Synthetic
ugguucagggaagcccuca

SEQ ID NO: 83690 - RNA, 21 nt, Artificial Sequence
  Synthetic
cgugguucagggaagcccuca

SEQ ID NO: 83691 - RNA, 22 nt, Artificial Sequence
  Synthetic
ucgugguucagggaagcccuca

SEQ ID NO: 83692 - RNA, 23 nt, Artificial Sequence
  Synthetic
cucgugguucagggaagcccuca

SEQ ID NO: 83693 - RNA, 24 nt, Artificial Sequence
  Synthetic
ccucgugguucagggaagcccuca

SEQ ID NO: 83694 - RNA, 18 nt, Artificial Sequence
  Synthetic
ccugcagggaaagccuca

SEQ ID NO: 83695 - RNA, 20 nt, Artificial Sequence
  Synthetic
ugccugcagggaaagccuca

SEQ ID NO: 83696 - RNA, 22 nt, Artificial Sequence
  Synthetic
agugccugcagggaaagccuca

SEQ ID NO: 83697 - RNA, 23 nt, Artificial Sequence
  Synthetic
aagugccugcagggaaagccuca

SEQ ID NO: 83698 - RNA, 24 nt, Artificial Sequence
  Synthetic
aaagugccugcagggaaagccuca

SEQ ID NO: 83699 - RNA, 21 nt, Artificial Sequence
  Synthetic
cccccugaacacagagccuca

SEQ ID NO: 83700 - RNA, 22 nt, Artificial Sequence
  Synthetic
ucccccugaacacagagccuca

SEQ ID NO: 83701 - RNA, 23 nt, Artificial Sequence
  Synthetic
cucccccugaacacagagccuca

SEQ ID NO: 83702 - RNA, 24 nt, Artificial Sequence
  Synthetic
ccucccccugaacacagagccuca

SEQ ID NO: 83703 - RNA, 19 nt, Artificial Sequence
  Synthetic
ugguuuucuuauagccuca

SEQ ID NO: 83704 - RNA, 20 nt, Artificial Sequence
  Synthetic
augguuuucuuauagccuca

SEQ ID NO: 83705 - RNA, 21 nt, Artificial Sequence
  Synthetic
aaugguuuucuuauagccuca

SEQ ID NO: 83706 - RNA, 22 nt, Artificial Sequence
  Synthetic
uaaugguuuucuuauagccuca

SEQ ID NO: 83707 - RNA, 23 nt, Artificial Sequence
  Synthetic
uuaaugguuuucuuauagccuca

SEQ ID NO: 83708 - RNA, 24 nt, Artificial Sequence
  Synthetic
cuuaaugguuuucuuauagccuca

SEQ ID NO: 83709 - RNA, 20 nt, Artificial Sequence
  Synthetic
uggcacaggcaauggccuca

SEQ ID NO: 83710 - RNA, 22 nt, Artificial Sequence
  Synthetic
uguggcacaggcaauggccuca

SEQ ID NO: 83711 - RNA, 23 nt, Artificial Sequence
  Synthetic
auguggcacaggcaauggccuca

SEQ ID NO: 83712 - RNA, 24 nt, Artificial Sequence
  Synthetic
aauguggcacaggcaauggccuca

SEQ ID NO: 83713 - RNA, 18 nt, Artificial Sequence
  Synthetic
auaauagcccauuccuca

SEQ ID NO: 83714 - RNA, 19 nt, Artificial Sequence
  Synthetic
uauaauagcccauuccuca

SEQ ID NO: 83715 - RNA, 20 nt, Artificial Sequence
  Synthetic
uuauaauagcccauuccuca

SEQ ID NO: 83716 - RNA, 21 nt, Artificial Sequence
  Synthetic
auuauaauagcccauuccuca

SEQ ID NO: 83717 - RNA, 22 nt, Artificial Sequence
  Synthetic
cauuauaauagcccauuccuca

SEQ ID NO: 83718 - RNA, 23 nt, Artificial Sequence
  Synthetic
ucauuauaauagcccauuccuca

SEQ ID NO: 83719 - RNA, 24 nt, Artificial Sequence
  Synthetic
uucauuauaauagcccauuccuca

SEQ ID NO: 83720 - RNA, 19 nt, Artificial Sequence
  Synthetic
agccccuggacacagcuca

SEQ ID NO: 83721 - RNA, 20 nt, Artificial Sequence
  Synthetic
cagccccuggacacagcuca

SEQ ID NO: 83722 - RNA, 21 nt, Artificial Sequence
  Synthetic
ucagccccuggacacagcuca

SEQ ID NO: 83723 - RNA, 23 nt, Artificial Sequence
  Synthetic
ugucagccccuggacacagcuca

SEQ ID NO: 83724 - RNA, 24 nt, Artificial Sequence
  Synthetic
cugucagccccuggacacagcuca

SEQ ID NO: 83725 - RNA, 18 nt, Artificial Sequence
  Synthetic
auugauucucuuggcuca

SEQ ID NO: 83726 - RNA, 19 nt, Artificial Sequence
  Synthetic
uauugauucucuuggcuca

SEQ ID NO: 83727 - RNA, 20 nt, Artificial Sequence
  Synthetic
uuauugauucucuuggcuca

SEQ ID NO: 83728 - RNA, 21 nt, Artificial Sequence
  Synthetic
uuuauugauucucuuggcuca

SEQ ID NO: 83729 - RNA, 22 nt, Artificial Sequence
  Synthetic
auuuauugauucucuuggcuca

SEQ ID NO: 83730 - RNA, 23 nt, Artificial Sequence
  Synthetic
aauuuauugauucucuuggcuca

SEQ ID NO: 83731 - RNA, 18 nt, Artificial Sequence
  Synthetic
agaauguucaaaugcuca

SEQ ID NO: 83732 - RNA, 20 nt, Artificial Sequence
  Synthetic
agagaauguucaaaugcuca

SEQ ID NO: 83733 - RNA, 21 nt, Artificial Sequence
  Synthetic
uagagaauguucaaaugcuca

SEQ ID NO: 83734 - RNA, 22 nt, Artificial Sequence
  Synthetic
cuagagaauguucaaaugcuca

SEQ ID NO: 83735 - RNA, 23 nt, Artificial Sequence
  Synthetic
acuagagaauguucaaaugcuca

SEQ ID NO: 83736 - RNA, 24 nt, Artificial Sequence
  Synthetic
uacuagagaauguucaaaugcuca

SEQ ID NO: 83737 - RNA, 18 nt, Artificial Sequence
  Synthetic
ugcuuaaaaaccugcuca

SEQ ID NO: 83738 - RNA, 20 nt, Artificial Sequence
  Synthetic
ugugcuuaaaaaccugcuca

SEQ ID NO: 83739 - RNA, 22 nt, Artificial Sequence
  Synthetic
agugugcuuaaaaaccugcuca

SEQ ID NO: 83740 - RNA, 24 nt, Artificial Sequence
  Synthetic
agagugugcuuaaaaaccugcuca

SEQ ID NO: 83741 - RNA, 18 nt, Artificial Sequence
  Synthetic
aagauuuuuguuugcuca

SEQ ID NO: 83742 - RNA, 19 nt, Artificial Sequence
  Synthetic
uaagauuuuuguuugcuca

SEQ ID NO: 83743 - RNA, 20 nt, Artificial Sequence
  Synthetic
uuaagauuuuuguuugcuca

SEQ ID NO: 83744 - RNA, 21 nt, Artificial Sequence
  Synthetic
uuuaagauuuuuguuugcuca

SEQ ID NO: 83745 - RNA, 22 nt, Artificial Sequence
  Synthetic
cuuuaagauuuuuguuugcuca

SEQ ID NO: 83746 - RNA, 23 nt, Artificial Sequence
  Synthetic
ccuuuaagauuuuuguuugcuca

SEQ ID NO: 83747 - RNA, 24 nt, Artificial Sequence
  Synthetic
cccuuuaagauuuuuguuugcuca

SEQ ID NO: 83748 - RNA, 18 nt, Artificial Sequence
  Synthetic
uacggcagugagcucuca

SEQ ID NO: 83749 - RNA, 19 nt, Artificial Sequence
  Synthetic
auacggcagugagcucuca

SEQ ID NO: 83750 - RNA, 21 nt, Artificial Sequence
  Synthetic
agauacggcagugagcucuca

SEQ ID NO: 83751 - RNA, 22 nt, Artificial Sequence
  Synthetic
aagauacggcagugagcucuca

SEQ ID NO: 83752 - RNA, 23 nt, Artificial Sequence
  Synthetic
aaagauacggcagugagcucuca

SEQ ID NO: 83753 - RNA, 24 nt, Artificial Sequence
  Synthetic
uaaagauacggcagugagcucuca

SEQ ID NO: 83754 - RNA, 18 nt, Artificial Sequence
  Synthetic
augaaaucuuugcucuca

SEQ ID NO: 83755 - RNA, 20 nt, Artificial Sequence
  Synthetic
agaugaaaucuuugcucuca

SEQ ID NO: 83756 - RNA, 21 nt, Artificial Sequence
  Synthetic
cagaugaaaucuuugcucuca

SEQ ID NO: 83757 - RNA, 23 nt, Artificial Sequence
  Synthetic
agcagaugaaaucuuugcucuca

SEQ ID NO: 83758 - RNA, 24 nt, Artificial Sequence
  Synthetic
aagcagaugaaaucuuugcucuca

SEQ ID NO: 83759 - RNA, 19 nt, Artificial Sequence
  Synthetic
agaaaucauacaucucuca

SEQ ID NO: 83760 - RNA, 20 nt, Artificial Sequence
  Synthetic
aagaaaucauacaucucuca

SEQ ID NO: 83761 - RNA, 22 nt, Artificial Sequence
  Synthetic
agaagaaaucauacaucucuca

SEQ ID NO: 83762 - RNA, 24 nt, Artificial Sequence
  Synthetic
ugagaagaaaucauacaucucuca

SEQ ID NO: 83763 - RNA, 18 nt, Artificial Sequence
  Synthetic
aaauggcaucaucucuca

SEQ ID NO: 83764 - RNA, 19 nt, Artificial Sequence
  Synthetic
uaaauggcaucaucucuca

SEQ ID NO: 83765 - RNA, 20 nt, Artificial Sequence
  Synthetic
cuaaauggcaucaucucuca

SEQ ID NO: 83766 - RNA, 21 nt, Artificial Sequence
  Synthetic
ucuaaauggcaucaucucuca

SEQ ID NO: 83767 - RNA, 22 nt, Artificial Sequence
  Synthetic
uucuaaauggcaucaucucuca

SEQ ID NO: 83768 - RNA, 24 nt, Artificial Sequence
  Synthetic
aguucuaaauggcaucaucucuca

SEQ ID NO: 83769 - RNA, 18 nt, Artificial Sequence
  Synthetic
acuguuuuccuucucuca

SEQ ID NO: 83770 - RNA, 19 nt, Artificial Sequence
  Synthetic
cacuguuuuccuucucuca

SEQ ID NO: 83771 - RNA, 20 nt, Artificial Sequence
  Synthetic
ccacuguuuuccuucucuca

SEQ ID NO: 83772 - RNA, 21 nt, Artificial Sequence
  Synthetic
accacuguuuuccuucucuca

SEQ ID NO: 83773 - RNA, 24 nt, Artificial Sequence
  Synthetic
aggaccacuguuuuccuucucuca

SEQ ID NO: 83774 - RNA, 18 nt, Artificial Sequence
  Synthetic
acuucacaauaggucuca

SEQ ID NO: 83775 - RNA, 19 nt, Artificial Sequence
  Synthetic
uacuucacaauaggucuca

SEQ ID NO: 83776 - RNA, 20 nt, Artificial Sequence
  Synthetic
uuacuucacaauaggucuca

SEQ ID NO: 83777 - RNA, 21 nt, Artificial Sequence
  Synthetic
cuuacuucacaauaggucuca

SEQ ID NO: 83778 - RNA, 18 nt, Artificial Sequence
  Synthetic
cuccuuggugcauucuca

SEQ ID NO: 83779 - RNA, 20 nt, Artificial Sequence
  Synthetic
agcuccuuggugcauucuca

SEQ ID NO: 83780 - RNA, 21 nt, Artificial Sequence
  Synthetic
uagcuccuuggugcauucuca

SEQ ID NO: 83781 - RNA, 22 nt, Artificial Sequence
  Synthetic
auagcuccuuggugcauucuca

SEQ ID NO: 83782 - RNA, 23 nt, Artificial Sequence
  Synthetic
aauagcuccuuggugcauucuca

SEQ ID NO: 83783 - RNA, 24 nt, Artificial Sequence
  Synthetic
uaauagcuccuuggugcauucuca

SEQ ID NO: 83784 - RNA, 18 nt, Artificial Sequence
  Synthetic
ucauucgauuuauucuca

SEQ ID NO: 83785 - RNA, 19 nt, Artificial Sequence
  Synthetic
cucauucgauuuauucuca

SEQ ID NO: 83786 - RNA, 20 nt, Artificial Sequence
  Synthetic
acucauucgauuuauucuca

SEQ ID NO: 83787 - RNA, 22 nt, Artificial Sequence
  Synthetic
ugacucauucgauuuauucuca

SEQ ID NO: 83788 - RNA, 23 nt, Artificial Sequence
  Synthetic
uugacucauucgauuuauucuca

SEQ ID NO: 83789 - RNA, 24 nt, Artificial Sequence
  Synthetic
uuugacucauucgauuuauucuca

SEQ ID NO: 83790 - RNA, 18 nt, Artificial Sequence
  Synthetic
aaaggcccauccuucuca

SEQ ID NO: 83791 - RNA, 19 nt, Artificial Sequence
  Synthetic
aaaaggcccauccuucuca

SEQ ID NO: 83792 - RNA, 20 nt, Artificial Sequence
  Synthetic
aaaaaggcccauccuucuca

SEQ ID NO: 83793 - RNA, 21 nt, Artificial Sequence
  Synthetic
aaaaaaggcccauccuucuca

SEQ ID NO: 83794 - RNA, 22 nt, Artificial Sequence
  Synthetic
uaaaaaaggcccauccuucuca

SEQ ID NO: 83795 - RNA, 23 nt, Artificial Sequence
  Synthetic
uuaaaaaaggcccauccuucuca

SEQ ID NO: 83796 - RNA, 24 nt, Artificial Sequence
  Synthetic
uuuaaaaaaggcccauccuucuca

SEQ ID NO: 83797 - RNA, 18 nt, Artificial Sequence
  Synthetic
aaucaaguggaguucuca

SEQ ID NO: 83798 - RNA, 20 nt, Artificial Sequence
  Synthetic
agaaucaaguggaguucuca

SEQ ID NO: 83799 - RNA, 23 nt, Artificial Sequence
  Synthetic
uggagaaucaaguggaguucuca

SEQ ID NO: 83800 - RNA, 24 nt, Artificial Sequence
  Synthetic
auggagaaucaaguggaguucuca

SEQ ID NO: 83801 - RNA, 19 nt, Artificial Sequence
  Synthetic
uggccuuuauuuguucuca

SEQ ID NO: 83802 - RNA, 20 nt, Artificial Sequence
  Synthetic
uuggccuuuauuuguucuca

SEQ ID NO: 83803 - RNA, 22 nt, Artificial Sequence
  Synthetic
uguuggccuuuauuuguucuca

SEQ ID NO: 83804 - RNA, 24 nt, Artificial Sequence
  Synthetic
uguguuggccuuuauuuguucuca

SEQ ID NO: 83805 - RNA, 18 nt, Artificial Sequence
  Synthetic
uuaaaguucuauuucuca

SEQ ID NO: 83806 - RNA, 19 nt, Artificial Sequence
  Synthetic
uuuaaaguucuauuucuca

SEQ ID NO: 83807 - RNA, 20 nt, Artificial Sequence
  Synthetic
auuuaaaguucuauuucuca

SEQ ID NO: 83808 - RNA, 21 nt, Artificial Sequence
  Synthetic
uauuuaaaguucuauuucuca

SEQ ID NO: 83809 - RNA, 22 nt, Artificial Sequence
  Synthetic
uuauuuaaaguucuauuucuca

SEQ ID NO: 83810 - RNA, 24 nt, Artificial Sequence
  Synthetic
uguuauuuaaaguucuauuucuca

SEQ ID NO: 83811 - RNA, 21 nt, Artificial Sequence
  Synthetic
aaggaauacauuuauuucuca

SEQ ID NO: 83812 - RNA, 22 nt, Artificial Sequence
  Synthetic
aaaggaauacauuuauuucuca

SEQ ID NO: 83813 - RNA, 23 nt, Artificial Sequence
  Synthetic
aaaaggaauacauuuauuucuca

SEQ ID NO: 83814 - RNA, 18 nt, Artificial Sequence
  Synthetic
agcuacaacauuuucuca

SEQ ID NO: 83815 - RNA, 19 nt, Artificial Sequence
  Synthetic
cagcuacaacauuuucuca

SEQ ID NO: 83816 - RNA, 20 nt, Artificial Sequence
  Synthetic
ccagcuacaacauuuucuca

SEQ ID NO: 83817 - RNA, 21 nt, Artificial Sequence
  Synthetic
uccagcuacaacauuuucuca

SEQ ID NO: 83818 - RNA, 22 nt, Artificial Sequence
  Synthetic
uuccagcuacaacauuuucuca

SEQ ID NO: 83819 - RNA, 23 nt, Artificial Sequence
  Synthetic
cuuccagcuacaacauuuucuca

SEQ ID NO: 83820 - RNA, 24 nt, Artificial Sequence
  Synthetic
acuuccagcuacaacauuuucuca

SEQ ID NO: 83821 - RNA, 18 nt, Artificial Sequence
  Synthetic
caauacacuacaaaguca

SEQ ID NO: 83822 - RNA, 19 nt, Artificial Sequence
  Synthetic
acaauacacuacaaaguca

SEQ ID NO: 83823 - RNA, 20 nt, Artificial Sequence
  Synthetic
cacaauacacuacaaaguca

SEQ ID NO: 83824 - RNA, 21 nt, Artificial Sequence
  Synthetic
acacaauacacuacaaaguca

SEQ ID NO: 83825 - RNA, 23 nt, Artificial Sequence
  Synthetic
agacacaauacacuacaaaguca

SEQ ID NO: 83826 - RNA, 24 nt, Artificial Sequence
  Synthetic
cagacacaauacacuacaaaguca

SEQ ID NO: 83827 - RNA, 18 nt, Artificial Sequence
  Synthetic
uaaugaaguguaaaguca

SEQ ID NO: 83828 - RNA, 19 nt, Artificial Sequence
  Synthetic
uuaaugaaguguaaaguca

SEQ ID NO: 83829 - RNA, 20 nt, Artificial Sequence
  Synthetic
cuuaaugaaguguaaaguca

SEQ ID NO: 83830 - RNA, 21 nt, Artificial Sequence
  Synthetic
acuuaaugaaguguaaaguca

SEQ ID NO: 83831 - RNA, 22 nt, Artificial Sequence
  Synthetic
uacuuaaugaaguguaaaguca

SEQ ID NO: 83832 - RNA, 23 nt, Artificial Sequence
  Synthetic
cuacuuaaugaaguguaaaguca

SEQ ID NO: 83833 - RNA, 24 nt, Artificial Sequence
  Synthetic
ccuacuuaaugaaguguaaaguca

SEQ ID NO: 83834 - RNA, 18 nt, Artificial Sequence
  Synthetic
ucuguuuuagucaaguca

SEQ ID NO: 83835 - RNA, 20 nt, Artificial Sequence
  Synthetic
ugucuguuuuagucaaguca

SEQ ID NO: 83836 - RNA, 21 nt, Artificial Sequence
  Synthetic
uugucuguuuuagucaaguca

SEQ ID NO: 83837 - RNA, 22 nt, Artificial Sequence
  Synthetic
uuugucuguuuuagucaaguca

SEQ ID NO: 83838 - RNA, 23 nt, Artificial Sequence
  Synthetic
uuuugucuguuuuagucaaguca

SEQ ID NO: 83839 - RNA, 18 nt, Artificial Sequence
  Synthetic
uagaaaguuuucaaguca

SEQ ID NO: 83840 - RNA, 20 nt, Artificial Sequence
  Synthetic
aguagaaaguuuucaaguca

SEQ ID NO: 83841 - RNA, 22 nt, Artificial Sequence
  Synthetic
agaguagaaaguuuucaaguca

SEQ ID NO: 83842 - RNA, 23 nt, Artificial Sequence
  Synthetic
cagaguagaaaguuuucaaguca

SEQ ID NO: 83843 - RNA, 24 nt, Artificial Sequence
  Synthetic
acagaguagaaaguuuucaaguca

SEQ ID NO: 83844 - RNA, 18 nt, Artificial Sequence
  Synthetic
ugucaacacaagaaguca

SEQ ID NO: 83845 - RNA, 19 nt, Artificial Sequence
  Synthetic
augucaacacaagaaguca

SEQ ID NO: 83846 - RNA, 20 nt, Artificial Sequence
  Synthetic
uaugucaacacaagaaguca

SEQ ID NO: 83847 - RNA, 21 nt, Artificial Sequence
  Synthetic
auaugucaacacaagaaguca

SEQ ID NO: 83848 - RNA, 22 nt, Artificial Sequence
  Synthetic
aauaugucaacacaagaaguca

SEQ ID NO: 83849 - RNA, 23 nt, Artificial Sequence
  Synthetic
aaauaugucaacacaagaaguca

SEQ ID NO: 83850 - RNA, 24 nt, Artificial Sequence
  Synthetic
caaauaugucaacacaagaaguca

SEQ ID NO: 83851 - RNA, 21 nt, Artificial Sequence
  Synthetic
agacuuuaguaggggaaguca

SEQ ID NO: 83852 - RNA, 22 nt, Artificial Sequence
  Synthetic
aagacuuuaguaggggaaguca

SEQ ID NO: 83853 - RNA, 23 nt, Artificial Sequence
  Synthetic
caagacuuuaguaggggaaguca

SEQ ID NO: 83854 - RNA, 24 nt, Artificial Sequence
  Synthetic
ccaagacuuuaguaggggaaguca

SEQ ID NO: 83855 - RNA, 18 nt, Artificial Sequence
  Synthetic
uaccaagucuguaaguca

SEQ ID NO: 83856 - RNA, 19 nt, Artificial Sequence
  Synthetic
auaccaagucuguaaguca

SEQ ID NO: 83857 - RNA, 20 nt, Artificial Sequence
  Synthetic
aauaccaagucuguaaguca

SEQ ID NO: 83858 - RNA, 22 nt, Artificial Sequence
  Synthetic
ugaauaccaagucuguaaguca

SEQ ID NO: 83859 - RNA, 23 nt, Artificial Sequence
  Synthetic
uugaauaccaagucuguaaguca

SEQ ID NO: 83860 - RNA, 24 nt, Artificial Sequence
  Synthetic
auugaauaccaagucuguaaguca

SEQ ID NO: 83861 - RNA, 18 nt, Artificial Sequence
  Synthetic
aucaucacaaaagaguca

SEQ ID NO: 83862 - RNA, 19 nt, Artificial Sequence
  Synthetic
uaucaucacaaaagaguca

SEQ ID NO: 83863 - RNA, 20 nt, Artificial Sequence
  Synthetic
auaucaucacaaaagaguca

SEQ ID NO: 83864 - RNA, 21 nt, Artificial Sequence
  Synthetic
cauaucaucacaaaagaguca

SEQ ID NO: 83865 - RNA, 22 nt, Artificial Sequence
  Synthetic
acauaucaucacaaaagaguca

SEQ ID NO: 83866 - RNA, 24 nt, Artificial Sequence
  Synthetic
ugacauaucaucacaaaagaguca

SEQ ID NO: 83867 - RNA, 18 nt, Artificial Sequence
  Synthetic
uuugcaucacuggaguca

SEQ ID NO: 83868 - RNA, 19 nt, Artificial Sequence
  Synthetic
auuugcaucacuggaguca

SEQ ID NO: 83869 - RNA, 20 nt, Artificial Sequence
  Synthetic
cauuugcaucacuggaguca

SEQ ID NO: 83870 - RNA, 22 nt, Artificial Sequence
  Synthetic
ugcauuugcaucacuggaguca

SEQ ID NO: 83871 - RNA, 23 nt, Artificial Sequence
  Synthetic
augcauuugcaucacuggaguca

SEQ ID NO: 83872 - RNA, 24 nt, Artificial Sequence
  Synthetic
caugcauuugcaucacuggaguca

SEQ ID NO: 83873 - RNA, 21 nt, Artificial Sequence
  Synthetic
cauuuuuuuuuuagugaguca

SEQ ID NO: 83874 - RNA, 22 nt, Artificial Sequence
  Synthetic
ucauuuuuuuuuuagugaguca

SEQ ID NO: 83875 - RNA, 23 nt, Artificial Sequence
  Synthetic
aucauuuuuuuuuuagugaguca

SEQ ID NO: 83876 - RNA, 24 nt, Artificial Sequence
  Synthetic
uaucauuuuuuuuuuagugaguca

SEQ ID NO: 83877 - RNA, 21 nt, Artificial Sequence
  Synthetic
aaauuaauuuuaaaauaguca

SEQ ID NO: 83878 - RNA, 22 nt, Artificial Sequence
  Synthetic
aaaauuaauuuuaaaauaguca

SEQ ID NO: 83879 - RNA, 23 nt, Artificial Sequence
  Synthetic
caaaauuaauuuuaaaauaguca

SEQ ID NO: 83880 - RNA, 24 nt, Artificial Sequence
  Synthetic
acaaaauuaauuuuaaaauaguca

SEQ ID NO: 83881 - RNA, 20 nt, Artificial Sequence
  Synthetic
uggugugcaaugaauaguca

SEQ ID NO: 83882 - RNA, 21 nt, Artificial Sequence
  Synthetic
cuggugugcaaugaauaguca

SEQ ID NO: 83883 - RNA, 22 nt, Artificial Sequence
  Synthetic
ccuggugugcaaugaauaguca

SEQ ID NO: 83884 - RNA, 24 nt, Artificial Sequence
  Synthetic
ugccuggugugcaaugaauaguca

SEQ ID NO: 83885 - RNA, 18 nt, Artificial Sequence
  Synthetic
uaguaggaaugauaguca

SEQ ID NO: 83886 - RNA, 20 nt, Artificial Sequence
  Synthetic
aguaguaggaaugauaguca

SEQ ID NO: 83887 - RNA, 22 nt, Artificial Sequence
  Synthetic
agaguaguaggaaugauaguca

SEQ ID NO: 83888 - RNA, 18 nt, Artificial Sequence
  Synthetic
ccuaccauaugcuaguca

SEQ ID NO: 83889 - RNA, 19 nt, Artificial Sequence
  Synthetic
accuaccauaugcuaguca

SEQ ID NO: 83890 - RNA, 20 nt, Artificial Sequence
  Synthetic
uaccuaccauaugcuaguca

SEQ ID NO: 83891 - RNA, 21 nt, Artificial Sequence
  Synthetic
auaccuaccauaugcuaguca

SEQ ID NO: 83892 - RNA, 22 nt, Artificial Sequence
  Synthetic
aauaccuaccauaugcuaguca

SEQ ID NO: 83893 - RNA, 23 nt, Artificial Sequence
  Synthetic
caauaccuaccauaugcuaguca

SEQ ID NO: 83894 - RNA, 18 nt, Artificial Sequence
  Synthetic
ucagagcagugcuaguca

SEQ ID NO: 83895 - RNA, 19 nt, Artificial Sequence
  Synthetic
aucagagcagugcuaguca

SEQ ID NO: 83896 - RNA, 21 nt, Artificial Sequence
  Synthetic
agaucagagcagugcuaguca

SEQ ID NO: 83897 - RNA, 22 nt, Artificial Sequence
  Synthetic
uagaucagagcagugcuaguca

SEQ ID NO: 83898 - RNA, 23 nt, Artificial Sequence
  Synthetic
uuagaucagagcagugcuaguca

SEQ ID NO: 83899 - RNA, 18 nt, Artificial Sequence
  Synthetic
uuuuauagugguuaguca

SEQ ID NO: 83900 - RNA, 20 nt, Artificial Sequence
  Synthetic
uguuuuauagugguuaguca

SEQ ID NO: 83901 - RNA, 21 nt, Artificial Sequence
  Synthetic
uuguuuuauagugguuaguca

SEQ ID NO: 83902 - RNA, 22 nt, Artificial Sequence
  Synthetic
cuuguuuuauagugguuaguca

SEQ ID NO: 83903 - RNA, 23 nt, Artificial Sequence
  Synthetic
ccuuguuuuauagugguuaguca

SEQ ID NO: 83904 - RNA, 24 nt, Artificial Sequence
  Synthetic
uccuuguuuuauagugguuaguca

SEQ ID NO: 83905 - RNA, 18 nt, Artificial Sequence
  Synthetic
uuuauuguuauuuaguca

SEQ ID NO: 83906 - RNA, 19 nt, Artificial Sequence
  Synthetic
cuuuauuguuauuuaguca

SEQ ID NO: 83907 - RNA, 20 nt, Artificial Sequence
  Synthetic
acuuuauuguuauuuaguca

SEQ ID NO: 83908 - RNA, 21 nt, Artificial Sequence
  Synthetic
uacuuuauuguuauuuaguca

SEQ ID NO: 83909 - RNA, 23 nt, Artificial Sequence
  Synthetic
aguacuuuauuguuauuuaguca

SEQ ID NO: 83910 - RNA, 21 nt, Artificial Sequence
  Synthetic
cauaaaauaauuuuuuaguca

SEQ ID NO: 83911 - RNA, 22 nt, Artificial Sequence
  Synthetic
acauaaaauaauuuuuuaguca

SEQ ID NO: 83912 - RNA, 24 nt, Artificial Sequence
  Synthetic
ugacauaaaauaauuuuuuaguca

SEQ ID NO: 83913 - RNA, 18 nt, Artificial Sequence
  Synthetic
cagacaagaaagucguca

SEQ ID NO: 83914 - RNA, 19 nt, Artificial Sequence
  Synthetic
ucagacaagaaagucguca

SEQ ID NO: 83915 - RNA, 20 nt, Artificial Sequence
  Synthetic
uucagacaagaaagucguca

SEQ ID NO: 83916 - RNA, 21 nt, Artificial Sequence
  Synthetic
auucagacaagaaagucguca

SEQ ID NO: 83917 - RNA, 22 nt, Artificial Sequence
  Synthetic
cauucagacaagaaagucguca

SEQ ID NO: 83918 - RNA, 23 nt, Artificial Sequence
  Synthetic
acauucagacaagaaagucguca

SEQ ID NO: 83919 - RNA, 24 nt, Artificial Sequence
  Synthetic
aacauucagacaagaaagucguca

SEQ ID NO: 83920 - RNA, 21 nt, Artificial Sequence
  Synthetic
agagcaagggagagaagguca

SEQ ID NO: 83921 - RNA, 22 nt, Artificial Sequence
  Synthetic
aagagcaagggagagaagguca

SEQ ID NO: 83922 - RNA, 23 nt, Artificial Sequence
  Synthetic
aaagagcaagggagagaagguca

SEQ ID NO: 83923 - RNA, 24 nt, Artificial Sequence
  Synthetic
uaaagagcaagggagagaagguca

SEQ ID NO: 83924 - RNA, 18 nt, Artificial Sequence
  Synthetic
cucuaagaggccagguca

SEQ ID NO: 83925 - RNA, 19 nt, Artificial Sequence
  Synthetic
acucuaagaggccagguca

SEQ ID NO: 83926 - RNA, 20 nt, Artificial Sequence
  Synthetic
aacucuaagaggccagguca

SEQ ID NO: 83927 - RNA, 21 nt, Artificial Sequence
  Synthetic
aaacucuaagaggccagguca

SEQ ID NO: 83928 - RNA, 23 nt, Artificial Sequence
  Synthetic
agaaacucuaagaggccagguca

SEQ ID NO: 83929 - RNA, 24 nt, Artificial Sequence
  Synthetic
uagaaacucuaagaggccagguca

SEQ ID NO: 83930 - RNA, 18 nt, Artificial Sequence
  Synthetic
agagcauuaaaccgguca

SEQ ID NO: 83931 - RNA, 20 nt, Artificial Sequence
  Synthetic
ugagagcauuaaaccgguca

SEQ ID NO: 83932 - RNA, 21 nt, Artificial Sequence
  Synthetic
cugagagcauuaaaccgguca

SEQ ID NO: 83933 - RNA, 23 nt, Artificial Sequence
  Synthetic
ugcugagagcauuaaaccgguca

SEQ ID NO: 83934 - RNA, 24 nt, Artificial Sequence
  Synthetic
uugcugagagcauuaaaccgguca

SEQ ID NO: 83935 - RNA, 20 nt, Artificial Sequence
  Synthetic
aggaaggucauucaggguca

SEQ ID NO: 83936 - RNA, 21 nt, Artificial Sequence
  Synthetic
uaggaaggucauucaggguca

SEQ ID NO: 83937 - RNA, 23 nt, Artificial Sequence
  Synthetic
aguaggaaggucauucaggguca

SEQ ID NO: 83938 - RNA, 18 nt, Artificial Sequence
  Synthetic
caucuaacuccaugguca

SEQ ID NO: 83939 - RNA, 20 nt, Artificial Sequence
  Synthetic
agcaucuaacuccaugguca

SEQ ID NO: 83940 - RNA, 21 nt, Artificial Sequence
  Synthetic
aagcaucuaacuccaugguca

SEQ ID NO: 83941 - RNA, 22 nt, Artificial Sequence
  Synthetic
uaagcaucuaacuccaugguca

SEQ ID NO: 83942 - RNA, 23 nt, Artificial Sequence
  Synthetic
auaagcaucuaacuccaugguca

SEQ ID NO: 83943 - RNA, 24 nt, Artificial Sequence
  Synthetic
uauaagcaucuaacuccaugguca

SEQ ID NO: 83944 - RNA, 18 nt, Artificial Sequence
  Synthetic
aaugggacauagugguca

SEQ ID NO: 83945 - RNA, 20 nt, Artificial Sequence
  Synthetic
agaaugggacauagugguca

SEQ ID NO: 83946 - RNA, 21 nt, Artificial Sequence
  Synthetic
uagaaugggacauagugguca

SEQ ID NO: 83947 - RNA, 22 nt, Artificial Sequence
  Synthetic
uuagaaugggacauagugguca

SEQ ID NO: 83948 - RNA, 23 nt, Artificial Sequence
  Synthetic
cuuagaaugggacauagugguca

SEQ ID NO: 83949 - RNA, 24 nt, Artificial Sequence
  Synthetic
ucuuagaaugggacauagugguca

SEQ ID NO: 83950 - RNA, 18 nt, Artificial Sequence
  Synthetic
uagacaugguuaauguca

SEQ ID NO: 83951 - RNA, 19 nt, Artificial Sequence
  Synthetic
auagacaugguuaauguca

SEQ ID NO: 83952 - RNA, 20 nt, Artificial Sequence
  Synthetic
uauagacaugguuaauguca

SEQ ID NO: 83953 - RNA, 21 nt, Artificial Sequence
  Synthetic
cuauagacaugguuaauguca

SEQ ID NO: 83954 - RNA, 22 nt, Artificial Sequence
  Synthetic
ucuauagacaugguuaauguca

SEQ ID NO: 83955 - RNA, 23 nt, Artificial Sequence
  Synthetic
aucuauagacaugguuaauguca

SEQ ID NO: 83956 - RNA, 24 nt, Artificial Sequence
  Synthetic
aaucuauagacaugguuaauguca

SEQ ID NO: 83957 - RNA, 18 nt, Artificial Sequence
  Synthetic
acaaggaagauuauguca

SEQ ID NO: 83958 - RNA, 19 nt, Artificial Sequence
  Synthetic
cacaaggaagauuauguca

SEQ ID NO: 83959 - RNA, 22 nt, Artificial Sequence
  Synthetic
aggcacaaggaagauuauguca

SEQ ID NO: 83960 - RNA, 23 nt, Artificial Sequence
  Synthetic
aaggcacaaggaagauuauguca

SEQ ID NO: 83961 - RNA, 24 nt, Artificial Sequence
  Synthetic
aaaggcacaaggaagauuauguca

SEQ ID NO: 83962 - RNA, 18 nt, Artificial Sequence
  Synthetic
acaugauuugugguguca

SEQ ID NO: 83963 - RNA, 19 nt, Artificial Sequence
  Synthetic
cacaugauuugugguguca

SEQ ID NO: 83964 - RNA, 20 nt, Artificial Sequence
  Synthetic
ccacaugauuugugguguca

SEQ ID NO: 83965 - RNA, 21 nt, Artificial Sequence
  Synthetic
uccacaugauuugugguguca

SEQ ID NO: 83966 - RNA, 22 nt, Artificial Sequence
  Synthetic
auccacaugauuugugguguca

SEQ ID NO: 83967 - RNA, 23 nt, Artificial Sequence
  Synthetic
cauccacaugauuugugguguca

SEQ ID NO: 83968 - RNA, 18 nt, Artificial Sequence
  Synthetic
ugugauauagcaaauuca

SEQ ID NO: 83969 - RNA, 19 nt, Artificial Sequence
  Synthetic
uugugauauagcaaauuca

SEQ ID NO: 83970 - RNA, 20 nt, Artificial Sequence
  Synthetic
cuugugauauagcaaauuca

SEQ ID NO: 83971 - RNA, 21 nt, Artificial Sequence
  Synthetic
acuugugauauagcaaauuca

SEQ ID NO: 83972 - RNA, 22 nt, Artificial Sequence
  Synthetic
uacuugugauauagcaaauuca

SEQ ID NO: 83973 - RNA, 23 nt, Artificial Sequence
  Synthetic
cuacuugugauauagcaaauuca

SEQ ID NO: 83974 - RNA, 24 nt, Artificial Sequence
  Synthetic
ucuacuugugauauagcaaauuca

SEQ ID NO: 83975 - RNA, 18 nt, Artificial Sequence
  Synthetic
cauguguugcuaaauuca

SEQ ID NO: 83976 - RNA, 19 nt, Artificial Sequence
  Synthetic
ucauguguugcuaaauuca

SEQ ID NO: 83977 - RNA, 20 nt, Artificial Sequence
  Synthetic
cucauguguugcuaaauuca

SEQ ID NO: 83978 - RNA, 21 nt, Artificial Sequence
  Synthetic
acucauguguugcuaaauuca

SEQ ID NO: 83979 - RNA, 22 nt, Artificial Sequence
  Synthetic
uacucauguguugcuaaauuca

SEQ ID NO: 83980 - RNA, 23 nt, Artificial Sequence
  Synthetic
cuacucauguguugcuaaauuca

SEQ ID NO: 83981 - RNA, 21 nt, Artificial Sequence
  Synthetic
cuguuucuaaaauagaauuca

SEQ ID NO: 83982 - RNA, 22 nt, Artificial Sequence
  Synthetic
ccuguuucuaaaauagaauuca

SEQ ID NO: 83983 - RNA, 23 nt, Artificial Sequence
  Synthetic
uccuguuucuaaaauagaauuca

SEQ ID NO: 83984 - RNA, 21 nt, Artificial Sequence
  Synthetic
caauuuuugaaguagaauuca

SEQ ID NO: 83985 - RNA, 23 nt, Artificial Sequence
  Synthetic
agcaauuuuugaaguagaauuca

SEQ ID NO: 83986 - RNA, 19 nt, Artificial Sequence
  Synthetic
agccaccugaaguaauuca

SEQ ID NO: 83987 - RNA, 20 nt, Artificial Sequence
  Synthetic
aagccaccugaaguaauuca

SEQ ID NO: 83988 - RNA, 21 nt, Artificial Sequence
  Synthetic
aaagccaccugaaguaauuca

SEQ ID NO: 83989 - RNA, 22 nt, Artificial Sequence
  Synthetic
caaagccaccugaaguaauuca

SEQ ID NO: 83990 - RNA, 23 nt, Artificial Sequence
  Synthetic
ucaaagccaccugaaguaauuca

SEQ ID NO: 83991 - RNA, 24 nt, Artificial Sequence
  Synthetic
aucaaagccaccugaaguaauuca

SEQ ID NO: 83992 - RNA, 18 nt, Artificial Sequence
  Synthetic
uuaaggauauguaauuca

SEQ ID NO: 83993 - RNA, 19 nt, Artificial Sequence
  Synthetic
auuaaggauauguaauuca

SEQ ID NO: 83994 - RNA, 20 nt, Artificial Sequence
  Synthetic
aauuaaggauauguaauuca

SEQ ID NO: 83995 - RNA, 22 nt, Artificial Sequence
  Synthetic
ugaauuaaggauauguaauuca

SEQ ID NO: 83996 - RNA, 23 nt, Artificial Sequence
  Synthetic
augaauuaaggauauguaauuca

SEQ ID NO: 83997 - RNA, 24 nt, Artificial Sequence
  Synthetic
uaugaauuaaggauauguaauuca

SEQ ID NO: 83998 - RNA, 18 nt, Artificial Sequence
  Synthetic
uacaggacauuuaauuca

SEQ ID NO: 83999 - RNA, 19 nt, Artificial Sequence
  Synthetic
uuacaggacauuuaauuca

SEQ ID NO: 84000 - RNA, 20 nt, Artificial Sequence
  Synthetic
uuuacaggacauuuaauuca

SEQ ID NO: 84001 - RNA, 21 nt, Artificial Sequence
  Synthetic
auuuacaggacauuuaauuca

SEQ ID NO: 84002 - RNA, 22 nt, Artificial Sequence
  Synthetic
uauuuacaggacauuuaauuca

SEQ ID NO: 84003 - RNA, 23 nt, Artificial Sequence
  Synthetic
auauuuacaggacauuuaauuca

SEQ ID NO: 84004 - RNA, 24 nt, Artificial Sequence
  Synthetic
aauauuuacaggacauuuaauuca

SEQ ID NO: 84005 - RNA, 18 nt, Artificial Sequence
  Synthetic
uuauugagaauccauuca

SEQ ID NO: 84006 - RNA, 19 nt, Artificial Sequence
  Synthetic
cuuauugagaauccauuca

SEQ ID NO: 84007 - RNA, 20 nt, Artificial Sequence
  Synthetic
acuuauugagaauccauuca

SEQ ID NO: 84008 - RNA, 21 nt, Artificial Sequence
  Synthetic
uacuuauugagaauccauuca

SEQ ID NO: 84009 - RNA, 22 nt, Artificial Sequence
  Synthetic
uuacuuauugagaauccauuca

SEQ ID NO: 84010 - RNA, 18 nt, Artificial Sequence
  Synthetic
agaugcugauaucauuca

SEQ ID NO: 84011 - RNA, 20 nt, Artificial Sequence
  Synthetic
agagaugcugauaucauuca

SEQ ID NO: 84012 - RNA, 21 nt, Artificial Sequence
  Synthetic
aagagaugcugauaucauuca

SEQ ID NO: 84013 - RNA, 22 nt, Artificial Sequence
  Synthetic
uaagagaugcugauaucauuca

SEQ ID NO: 84014 - RNA, 23 nt, Artificial Sequence
  Synthetic
uuaagagaugcugauaucauuca

SEQ ID NO: 84015 - RNA, 24 nt, Artificial Sequence
  Synthetic
auuaagagaugcugauaucauuca

SEQ ID NO: 84016 - RNA, 21 nt, Artificial Sequence
  Synthetic
agcauuucauuuauucauuca

SEQ ID NO: 84017 - RNA, 23 nt, Artificial Sequence
  Synthetic
agagcauuucauuuauucauuca

SEQ ID NO: 84018 - RNA, 24 nt, Artificial Sequence
  Synthetic
cagagcauuucauuuauucauuca

SEQ ID NO: 84019 - RNA, 19 nt, Artificial Sequence
  Synthetic
aguggcggugguucauuca

SEQ ID NO: 84020 - RNA, 20 nt, Artificial Sequence
  Synthetic
caguggcggugguucauuca

SEQ ID NO: 84021 - RNA, 22 nt, Artificial Sequence
  Synthetic
ugcaguggcggugguucauuca

SEQ ID NO: 84022 - RNA, 23 nt, Artificial Sequence
  Synthetic
uugcaguggcggugguucauuca

SEQ ID NO: 84023 - RNA, 24 nt, Artificial Sequence
  Synthetic
uuugcaguggcggugguucauuca

SEQ ID NO: 84024 - RNA, 18 nt, Artificial Sequence
  Synthetic
cugaauuauucagauuca

SEQ ID NO: 84025 - RNA, 19 nt, Artificial Sequence
  Synthetic
acugaauuauucagauuca

SEQ ID NO: 84026 - RNA, 20 nt, Artificial Sequence
  Synthetic
cacugaauuauucagauuca

SEQ ID NO: 84027 - RNA, 21 nt, Artificial Sequence
  Synthetic
ccacugaauuauucagauuca

SEQ ID NO: 84028 - RNA, 22 nt, Artificial Sequence
  Synthetic
accacugaauuauucagauuca

SEQ ID NO: 84029 - RNA, 23 nt, Artificial Sequence
  Synthetic
uaccacugaauuauucagauuca

SEQ ID NO: 84030 - RNA, 24 nt, Artificial Sequence
  Synthetic
auaccacugaauuauucagauuca

SEQ ID NO: 84031 - RNA, 18 nt, Artificial Sequence
  Synthetic
ccacauaguguagauuca

SEQ ID NO: 84032 - RNA, 19 nt, Artificial Sequence
  Synthetic
cccacauaguguagauuca

SEQ ID NO: 84033 - RNA, 20 nt, Artificial Sequence
  Synthetic
ucccacauaguguagauuca

SEQ ID NO: 84034 - RNA, 22 nt, Artificial Sequence
  Synthetic
agucccacauaguguagauuca

SEQ ID NO: 84035 - RNA, 23 nt, Artificial Sequence
  Synthetic
cagucccacauaguguagauuca

SEQ ID NO: 84036 - RNA, 20 nt, Artificial Sequence
  Synthetic
agggcaguuguguagauuca

SEQ ID NO: 84037 - RNA, 21 nt, Artificial Sequence
  Synthetic
aagggcaguuguguagauuca

SEQ ID NO: 84038 - RNA, 22 nt, Artificial Sequence
  Synthetic
uaagggcaguuguguagauuca

SEQ ID NO: 84039 - RNA, 23 nt, Artificial Sequence
  Synthetic
auaagggcaguuguguagauuca

SEQ ID NO: 84040 - RNA, 24 nt, Artificial Sequence
  Synthetic
cauaagggcaguuguguagauuca

SEQ ID NO: 84041 - RNA, 18 nt, Artificial Sequence
  Synthetic
cuuagugcuuuugauuca

SEQ ID NO: 84042 - RNA, 19 nt, Artificial Sequence
  Synthetic
acuuagugcuuuugauuca

SEQ ID NO: 84043 - RNA, 20 nt, Artificial Sequence
  Synthetic
cacuuagugcuuuugauuca

SEQ ID NO: 84044 - RNA, 21 nt, Artificial Sequence
  Synthetic
ccacuuagugcuuuugauuca

SEQ ID NO: 84045 - RNA, 22 nt, Artificial Sequence
  Synthetic
cccacuuagugcuuuugauuca

SEQ ID NO: 84046 - RNA, 23 nt, Artificial Sequence
  Synthetic
ucccacuuagugcuuuugauuca

SEQ ID NO: 84047 - RNA, 18 nt, Artificial Sequence
  Synthetic
uuagcugaagcauauuca

SEQ ID NO: 84048 - RNA, 19 nt, Artificial Sequence
  Synthetic
auuagcugaagcauauuca

SEQ ID NO: 84049 - RNA, 20 nt, Artificial Sequence
  Synthetic
aauuagcugaagcauauuca

SEQ ID NO: 84050 - RNA, 21 nt, Artificial Sequence
  Synthetic
aaauuagcugaagcauauuca

SEQ ID NO: 84051 - RNA, 22 nt, Artificial Sequence
  Synthetic
uaaauuagcugaagcauauuca

SEQ ID NO: 84052 - RNA, 23 nt, Artificial Sequence
  Synthetic
auaaauuagcugaagcauauuca

SEQ ID NO: 84053 - RNA, 18 nt, Artificial Sequence
  Synthetic
acguaaucuccuuauuca

SEQ ID NO: 84054 - RNA, 19 nt, Artificial Sequence
  Synthetic
cacguaaucuccuuauuca

SEQ ID NO: 84055 - RNA, 20 nt, Artificial Sequence
  Synthetic
ccacguaaucuccuuauuca

SEQ ID NO: 84056 - RNA, 24 nt, Artificial Sequence
  Synthetic
agggccacguaaucuccuuauuca

SEQ ID NO: 84057 - RNA, 18 nt, Artificial Sequence
  Synthetic
aggagagagaguuauuca

SEQ ID NO: 84058 - RNA, 21 nt, Artificial Sequence
  Synthetic
aggaggagagagaguuauuca

SEQ ID NO: 84059 - RNA, 22 nt, Artificial Sequence
  Synthetic
caggaggagagagaguuauuca

SEQ ID NO: 84060 - RNA, 23 nt, Artificial Sequence
  Synthetic
acaggaggagagagaguuauuca

SEQ ID NO: 84061 - RNA, 24 nt, Artificial Sequence
  Synthetic
aacaggaggagagagaguuauuca

SEQ ID NO: 84062 - RNA, 22 nt, Artificial Sequence
  Synthetic
agccuuuuuuguucuuuauuca

SEQ ID NO: 84063 - RNA, 23 nt, Artificial Sequence
  Synthetic
uagccuuuuuuguucuuuauuca

SEQ ID NO: 84064 - RNA, 24 nt, Artificial Sequence
  Synthetic
uuagccuuuuuuguucuuuauuca

SEQ ID NO: 84065 - RNA, 21 nt, Artificial Sequence
  Synthetic
ucaucucauaaugaaacuuca

SEQ ID NO: 84066 - RNA, 23 nt, Artificial Sequence
  Synthetic
cgucaucucauaaugaaacuuca

SEQ ID NO: 84067 - RNA, 24 nt, Artificial Sequence
  Synthetic
ccgucaucucauaaugaaacuuca

SEQ ID NO: 84068 - RNA, 19 nt, Artificial Sequence
  Synthetic
agcccagcagugaacuuca

SEQ ID NO: 84069 - RNA, 20 nt, Artificial Sequence
  Synthetic
uagcccagcagugaacuuca

SEQ ID NO: 84070 - RNA, 21 nt, Artificial Sequence
  Synthetic
uuagcccagcagugaacuuca

SEQ ID NO: 84071 - RNA, 22 nt, Artificial Sequence
  Synthetic
cuuagcccagcagugaacuuca

SEQ ID NO: 84072 - RNA, 23 nt, Artificial Sequence
  Synthetic
acuuagcccagcagugaacuuca

SEQ ID NO: 84073 - RNA, 24 nt, Artificial Sequence
  Synthetic
cacuuagcccagcagugaacuuca

SEQ ID NO: 84074 - RNA, 18 nt, Artificial Sequence
  Synthetic
cacaaauucagcacuuca

SEQ ID NO: 84075 - RNA, 19 nt, Artificial Sequence
  Synthetic
acacaaauucagcacuuca

SEQ ID NO: 84076 - RNA, 22 nt, Artificial Sequence
  Synthetic
aggacacaaauucagcacuuca

SEQ ID NO: 84077 - RNA, 23 nt, Artificial Sequence
  Synthetic
caggacacaaauucagcacuuca

SEQ ID NO: 84078 - RNA, 24 nt, Artificial Sequence
  Synthetic
acaggacacaaauucagcacuuca

SEQ ID NO: 84079 - RNA, 18 nt, Artificial Sequence
  Synthetic
uaauacuacucuccuuca

SEQ ID NO: 84080 - RNA, 21 nt, Artificial Sequence
  Synthetic
ugguaauacuacucuccuuca

SEQ ID NO: 84081 - RNA, 22 nt, Artificial Sequence
  Synthetic
augguaauacuacucuccuuca

SEQ ID NO: 84082 - RNA, 23 nt, Artificial Sequence
  Synthetic
uaugguaauacuacucuccuuca

SEQ ID NO: 84083 - RNA, 18 nt, Artificial Sequence
  Synthetic
auucucuggugaucuuca

SEQ ID NO: 84084 - RNA, 20 nt, Artificial Sequence
  Synthetic
ugauucucuggugaucuuca

SEQ ID NO: 84085 - RNA, 21 nt, Artificial Sequence
  Synthetic
cugauucucuggugaucuuca

SEQ ID NO: 84086 - RNA, 22 nt, Artificial Sequence
  Synthetic
ucugauucucuggugaucuuca

SEQ ID NO: 84087 - RNA, 23 nt, Artificial Sequence
  Synthetic
aucugauucucuggugaucuuca

SEQ ID NO: 84088 - RNA, 18 nt, Artificial Sequence
  Synthetic
ugaauauauuccucuuca

SEQ ID NO: 84089 - RNA, 21 nt, Artificial Sequence
  Synthetic
uggugaauauauuccucuuca

SEQ ID NO: 84090 - RNA, 22 nt, Artificial Sequence
  Synthetic
auggugaauauauuccucuuca

SEQ ID NO: 84091 - RNA, 23 nt, Artificial Sequence
  Synthetic
aauggugaauauauuccucuuca

SEQ ID NO: 84092 - RNA, 24 nt, Artificial Sequence
  Synthetic
caauggugaauauauuccucuuca

SEQ ID NO: 84093 - RNA, 18 nt, Artificial Sequence
  Synthetic
agcaaugggagcucuuca

SEQ ID NO: 84094 - RNA, 22 nt, Artificial Sequence
  Synthetic
agggagcaaugggagcucuuca

SEQ ID NO: 84095 - RNA, 23 nt, Artificial Sequence
  Synthetic
cagggagcaaugggagcucuuca

SEQ ID NO: 84096 - RNA, 24 nt, Artificial Sequence
  Synthetic
acagggagcaaugggagcucuuca

SEQ ID NO: 84097 - RNA, 18 nt, Artificial Sequence
  Synthetic
uggaacauaaucucuuca

SEQ ID NO: 84098 - RNA, 19 nt, Artificial Sequence
  Synthetic
uuggaacauaaucucuuca

SEQ ID NO: 84099 - RNA, 20 nt, Artificial Sequence
  Synthetic
auuggaacauaaucucuuca

SEQ ID NO: 84100 - RNA, 21 nt, Artificial Sequence
  Synthetic
cauuggaacauaaucucuuca

SEQ ID NO: 84101 - RNA, 22 nt, Artificial Sequence
  Synthetic
ucauuggaacauaaucucuuca

SEQ ID NO: 84102 - RNA, 23 nt, Artificial Sequence
  Synthetic
aucauuggaacauaaucucuuca

SEQ ID NO: 84103 - RNA, 24 nt, Artificial Sequence
  Synthetic
caucauuggaacauaaucucuuca

SEQ ID NO: 84104 - RNA, 19 nt, Artificial Sequence
  Synthetic
uggaccaaaauauucuuca

SEQ ID NO: 84105 - RNA, 20 nt, Artificial Sequence
  Synthetic
uuggaccaaaauauucuuca

SEQ ID NO: 84106 - RNA, 21 nt, Artificial Sequence
  Synthetic
uuuggaccaaaauauucuuca

SEQ ID NO: 84107 - RNA, 22 nt, Artificial Sequence
  Synthetic
auuuggaccaaaauauucuuca

SEQ ID NO: 84108 - RNA, 23 nt, Artificial Sequence
  Synthetic
uauuuggaccaaaauauucuuca

SEQ ID NO: 84109 - RNA, 18 nt, Artificial Sequence
  Synthetic
ucguacauauuuucuuca

SEQ ID NO: 84110 - RNA, 19 nt, Artificial Sequence
  Synthetic
uucguacauauuuucuuca

SEQ ID NO: 84111 - RNA, 20 nt, Artificial Sequence
  Synthetic
uuucguacauauuuucuuca

SEQ ID NO: 84112 - RNA, 21 nt, Artificial Sequence
  Synthetic
cuuucguacauauuuucuuca

SEQ ID NO: 84113 - RNA, 22 nt, Artificial Sequence
  Synthetic
ucuuucguacauauuuucuuca

SEQ ID NO: 84114 - RNA, 23 nt, Artificial Sequence
  Synthetic
uucuuucguacauauuuucuuca

SEQ ID NO: 84115 - RNA, 24 nt, Artificial Sequence
  Synthetic
auucuuucguacauauuuucuuca

SEQ ID NO: 84116 - RNA, 19 nt, Artificial Sequence
  Synthetic
ugcuccucugucaaguuca

SEQ ID NO: 84117 - RNA, 21 nt, Artificial Sequence
  Synthetic
cgugcuccucugucaaguuca

SEQ ID NO: 84118 - RNA, 22 nt, Artificial Sequence
  Synthetic
acgugcuccucugucaaguuca

SEQ ID NO: 84119 - RNA, 23 nt, Artificial Sequence
  Synthetic
aacgugcuccucugucaaguuca

SEQ ID NO: 84120 - RNA, 24 nt, Artificial Sequence
  Synthetic
aaacgugcuccucugucaaguuca

SEQ ID NO: 84121 - RNA, 18 nt, Artificial Sequence
  Synthetic
cgcuaagauugaaguuca

SEQ ID NO: 84122 - RNA, 20 nt, Artificial Sequence
  Synthetic
agcgcuaagauugaaguuca

SEQ ID NO: 84123 - RNA, 21 nt, Artificial Sequence
  Synthetic
aagcgcuaagauugaaguuca

SEQ ID NO: 84124 - RNA, 22 nt, Artificial Sequence
  Synthetic
caagcgcuaagauugaaguuca

SEQ ID NO: 84125 - RNA, 23 nt, Artificial Sequence
  Synthetic
acaagcgcuaagauugaaguuca

SEQ ID NO: 84126 - RNA, 18 nt, Artificial Sequence
  Synthetic
ucaggaaguucagguuca

SEQ ID NO: 84127 - RNA, 19 nt, Artificial Sequence
  Synthetic
cucaggaaguucagguuca

SEQ ID NO: 84128 - RNA, 20 nt, Artificial Sequence
  Synthetic
ucucaggaaguucagguuca

SEQ ID NO: 84129 - RNA, 21 nt, Artificial Sequence
  Synthetic
uucucaggaaguucagguuca

SEQ ID NO: 84130 - RNA, 23 nt, Artificial Sequence
  Synthetic
aguucucaggaaguucagguuca

SEQ ID NO: 84131 - RNA, 24 nt, Artificial Sequence
  Synthetic
uaguucucaggaaguucagguuca

SEQ ID NO: 84132 - RNA, 18 nt, Artificial Sequence
  Synthetic
aauaauaucuaugguuca

SEQ ID NO: 84133 - RNA, 19 nt, Artificial Sequence
  Synthetic
uaauaauaucuaugguuca

SEQ ID NO: 84134 - RNA, 20 nt, Artificial Sequence
  Synthetic
cuaauaauaucuaugguuca

SEQ ID NO: 84135 - RNA, 21 nt, Artificial Sequence
  Synthetic
acuaauaauaucuaugguuca

SEQ ID NO: 84136 - RNA, 22 nt, Artificial Sequence
  Synthetic
uacuaauaauaucuaugguuca

SEQ ID NO: 84137 - RNA, 23 nt, Artificial Sequence
  Synthetic
cuacuaauaauaucuaugguuca

SEQ ID NO: 84138 - RNA, 24 nt, Artificial Sequence
  Synthetic
acuacuaauaauaucuaugguuca

SEQ ID NO: 84139 - RNA, 18 nt, Artificial Sequence
  Synthetic
uuaucaaaguccuguuca

SEQ ID NO: 84140 - RNA, 19 nt, Artificial Sequence
  Synthetic
cuuaucaaaguccuguuca

SEQ ID NO: 84141 - RNA, 20 nt, Artificial Sequence
  Synthetic
ucuuaucaaaguccuguuca

SEQ ID NO: 84142 - RNA, 21 nt, Artificial Sequence
  Synthetic
cucuuaucaaaguccuguuca

SEQ ID NO: 84143 - RNA, 22 nt, Artificial Sequence
  Synthetic
acucuuaucaaaguccuguuca

SEQ ID NO: 84144 - RNA, 23 nt, Artificial Sequence
  Synthetic
aacucuuaucaaaguccuguuca

SEQ ID NO: 84145 - RNA, 24 nt, Artificial Sequence
  Synthetic
aaacucuuaucaaaguccuguuca

SEQ ID NO: 84146 - RNA, 18 nt, Artificial Sequence
  Synthetic
cucugcucuagguguuca

SEQ ID NO: 84147 - RNA, 19 nt, Artificial Sequence
  Synthetic
ccucugcucuagguguuca

SEQ ID NO: 84148 - RNA, 20 nt, Artificial Sequence
  Synthetic
accucugcucuagguguuca

SEQ ID NO: 84149 - RNA, 22 nt, Artificial Sequence
  Synthetic
ugaccucugcucuagguguuca

SEQ ID NO: 84150 - RNA, 23 nt, Artificial Sequence
  Synthetic
cugaccucugcucuagguguuca

SEQ ID NO: 84151 - RNA, 18 nt, Artificial Sequence
  Synthetic
uugguuugaaaaauuuca

SEQ ID NO: 84152 - RNA, 19 nt, Artificial Sequence
  Synthetic
auugguuugaaaaauuuca

SEQ ID NO: 84153 - RNA, 21 nt, Artificial Sequence
  Synthetic
agauugguuugaaaaauuuca

SEQ ID NO: 84154 - RNA, 22 nt, Artificial Sequence
  Synthetic
cagauugguuugaaaaauuuca

SEQ ID NO: 84155 - RNA, 23 nt, Artificial Sequence
  Synthetic
ucagauugguuugaaaaauuuca

SEQ ID NO: 84156 - RNA, 24 nt, Artificial Sequence
  Synthetic
cucagauugguuugaaaaauuuca

SEQ ID NO: 84157 - RNA, 21 nt, Artificial Sequence
  Synthetic
auaguuggagguggaauuuca

SEQ ID NO: 84158 - RNA, 22 nt, Artificial Sequence
  Synthetic
aauaguuggagguggaauuuca

SEQ ID NO: 84159 - RNA, 23 nt, Artificial Sequence
  Synthetic
caauaguuggagguggaauuuca

SEQ ID NO: 84160 - RNA, 18 nt, Artificial Sequence
  Synthetic
cuacuguucauaauuuca

SEQ ID NO: 84161 - RNA, 20 nt, Artificial Sequence
  Synthetic
agcuacuguucauaauuuca

SEQ ID NO: 84162 - RNA, 22 nt, Artificial Sequence
  Synthetic
agagcuacuguucauaauuuca

SEQ ID NO: 84163 - RNA, 23 nt, Artificial Sequence
  Synthetic
aagagcuacuguucauaauuuca

SEQ ID NO: 84164 - RNA, 24 nt, Artificial Sequence
  Synthetic
caagagcuacuguucauaauuuca

SEQ ID NO: 84165 - RNA, 18 nt, Artificial Sequence
  Synthetic
uuuagugaaaucauuuca

SEQ ID NO: 84166 - RNA, 19 nt, Artificial Sequence
  Synthetic
auuuagugaaaucauuuca

SEQ ID NO: 84167 - RNA, 20 nt, Artificial Sequence
  Synthetic
uauuuagugaaaucauuuca

SEQ ID NO: 84168 - RNA, 21 nt, Artificial Sequence
  Synthetic
cuauuuagugaaaucauuuca

SEQ ID NO: 84169 - RNA, 22 nt, Artificial Sequence
  Synthetic
acuauuuagugaaaucauuuca

SEQ ID NO: 84170 - RNA, 23 nt, Artificial Sequence
  Synthetic
cacuauuuagugaaaucauuuca

SEQ ID NO: 84171 - RNA, 24 nt, Artificial Sequence
  Synthetic
ucacuauuuagugaaaucauuuca

SEQ ID NO: 84172 - RNA, 18 nt, Artificial Sequence
  Synthetic
uuuccaugcgucauuuca

SEQ ID NO: 84173 - RNA, 19 nt, Artificial Sequence
  Synthetic
uuuuccaugcgucauuuca

SEQ ID NO: 84174 - RNA, 20 nt, Artificial Sequence
  Synthetic
cuuuuccaugcgucauuuca

SEQ ID NO: 84175 - RNA, 21 nt, Artificial Sequence
  Synthetic
acuuuuccaugcgucauuuca

SEQ ID NO: 84176 - RNA, 24 nt, Artificial Sequence
  Synthetic
aggacuuuuccaugcgucauuuca

SEQ ID NO: 84177 - RNA, 18 nt, Artificial Sequence
  Synthetic
auguacuuauucauuuca

SEQ ID NO: 84178 - RNA, 19 nt, Artificial Sequence
  Synthetic
uauguacuuauucauuuca

SEQ ID NO: 84179 - RNA, 20 nt, Artificial Sequence
  Synthetic
auauguacuuauucauuuca

SEQ ID NO: 84180 - RNA, 21 nt, Artificial Sequence
  Synthetic
aauauguacuuauucauuuca

SEQ ID NO: 84181 - RNA, 22 nt, Artificial Sequence
  Synthetic
aaauauguacuuauucauuuca

SEQ ID NO: 84182 - RNA, 23 nt, Artificial Sequence
  Synthetic
caaauauguacuuauucauuuca

SEQ ID NO: 84183 - RNA, 24 nt, Artificial Sequence
  Synthetic
ucaaauauguacuuauucauuuca

SEQ ID NO: 84184 - RNA, 18 nt, Artificial Sequence
  Synthetic
agaauagcaacuauuuca

SEQ ID NO: 84185 - RNA, 21 nt, Artificial Sequence
  Synthetic
aggagaauagcaacuauuuca

SEQ ID NO: 84186 - RNA, 22 nt, Artificial Sequence
  Synthetic
aaggagaauagcaacuauuuca

SEQ ID NO: 84187 - RNA, 23 nt, Artificial Sequence
  Synthetic
aaaggagaauagcaacuauuuca

SEQ ID NO: 84188 - RNA, 24 nt, Artificial Sequence
  Synthetic
aaaaggagaauagcaacuauuuca

SEQ ID NO: 84189 - RNA, 18 nt, Artificial Sequence
  Synthetic
cagcgcuauauuauuuca

SEQ ID NO: 84190 - RNA, 19 nt, Artificial Sequence
  Synthetic
ccagcgcuauauuauuuca

SEQ ID NO: 84191 - RNA, 20 nt, Artificial Sequence
  Synthetic
uccagcgcuauauuauuuca

SEQ ID NO: 84192 - RNA, 21 nt, Artificial Sequence
  Synthetic
uuccagcgcuauauuauuuca

SEQ ID NO: 84193 - RNA, 22 nt, Artificial Sequence
  Synthetic
cuuccagcgcuauauuauuuca

SEQ ID NO: 84194 - RNA, 23 nt, Artificial Sequence
  Synthetic
ucuuccagcgcuauauuauuuca

SEQ ID NO: 84195 - RNA, 24 nt, Artificial Sequence
  Synthetic
uucuuccagcgcuauauuauuuca

SEQ ID NO: 84196 - RNA, 18 nt, Artificial Sequence
  Synthetic
aagaauuugcaacuuuca

SEQ ID NO: 84197 - RNA, 19 nt, Artificial Sequence
  Synthetic
caagaauuugcaacuuuca

SEQ ID NO: 84198 - RNA, 22 nt, Artificial Sequence
  Synthetic
aggcaagaauuugcaacuuuca

SEQ ID NO: 84199 - RNA, 23 nt, Artificial Sequence
  Synthetic
caggcaagaauuugcaacuuuca

SEQ ID NO: 84200 - RNA, 24 nt, Artificial Sequence
  Synthetic
acaggcaagaauuugcaacuuuca

SEQ ID NO: 84201 - RNA, 18 nt, Artificial Sequence
  Synthetic
cacuagaaaauacuuuca

SEQ ID NO: 84202 - RNA, 19 nt, Artificial Sequence
  Synthetic
acacuagaaaauacuuuca

SEQ ID NO: 84203 - RNA, 20 nt, Artificial Sequence
  Synthetic
aacacuagaaaauacuuuca

SEQ ID NO: 84204 - RNA, 21 nt, Artificial Sequence
  Synthetic
aaacacuagaaaauacuuuca

SEQ ID NO: 84205 - RNA, 22 nt, Artificial Sequence
  Synthetic
aaaacacuagaaaauacuuuca

SEQ ID NO: 84206 - RNA, 24 nt, Artificial Sequence
  Synthetic
agaaaacacuagaaaauacuuuca

SEQ ID NO: 84207 - RNA, 18 nt, Artificial Sequence
  Synthetic
aaaaacauuauacuuuca

SEQ ID NO: 84208 - RNA, 20 nt, Artificial Sequence
  Synthetic
agaaaaacauuauacuuuca

SEQ ID NO: 84209 - RNA, 21 nt, Artificial Sequence
  Synthetic
cagaaaaacauuauacuuuca

SEQ ID NO: 84210 - RNA, 22 nt, Artificial Sequence
  Synthetic
ucagaaaaacauuauacuuuca

SEQ ID NO: 84211 - RNA, 23 nt, Artificial Sequence
  Synthetic
cucagaaaaacauuauacuuuca

SEQ ID NO: 84212 - RNA, 24 nt, Artificial Sequence
  Synthetic
ucucagaaaaacauuauacuuuca

SEQ ID NO: 84213 - RNA, 18 nt, Artificial Sequence
  Synthetic
acaggggauggccuuuca

SEQ ID NO: 84214 - RNA, 19 nt, Artificial Sequence
  Synthetic
aacaggggauggccuuuca

SEQ ID NO: 84215 - RNA, 20 nt, Artificial Sequence
  Synthetic
uaacaggggauggccuuuca

SEQ ID NO: 84216 - RNA, 21 nt, Artificial Sequence
  Synthetic
uuaacaggggauggccuuuca

SEQ ID NO: 84217 - RNA, 22 nt, Artificial Sequence
  Synthetic
auuaacaggggauggccuuuca

SEQ ID NO: 84218 - RNA, 23 nt, Artificial Sequence
  Synthetic
cauuaacaggggauggccuuuca

SEQ ID NO: 84219 - RNA, 18 nt, Artificial Sequence
  Synthetic
uuguaaacgagucuuuca

SEQ ID NO: 84220 - RNA, 19 nt, Artificial Sequence
  Synthetic
auuguaaacgagucuuuca

SEQ ID NO: 84221 - RNA, 20 nt, Artificial Sequence
  Synthetic
cauuguaaacgagucuuuca

SEQ ID NO: 84222 - RNA, 21 nt, Artificial Sequence
  Synthetic
ucauuguaaacgagucuuuca

SEQ ID NO: 84223 - RNA, 22 nt, Artificial Sequence
  Synthetic
aucauuguaaacgagucuuuca

SEQ ID NO: 84224 - RNA, 24 nt, Artificial Sequence
  Synthetic
agaucauuguaaacgagucuuuca

SEQ ID NO: 84225 - RNA, 19 nt, Artificial Sequence
  Synthetic
ugaaugaguuacuguuuca

SEQ ID NO: 84226 - RNA, 20 nt, Artificial Sequence
  Synthetic
cugaaugaguuacuguuuca

SEQ ID NO: 84227 - RNA, 21 nt, Artificial Sequence
  Synthetic
acugaaugaguuacuguuuca

SEQ ID NO: 84228 - RNA, 22 nt, Artificial Sequence
  Synthetic
aacugaaugaguuacuguuuca

SEQ ID NO: 84229 - RNA, 18 nt, Artificial Sequence
  Synthetic
acaggcuauuuuguuuca

SEQ ID NO: 84230 - RNA, 19 nt, Artificial Sequence
  Synthetic
uacaggcuauuuuguuuca

SEQ ID NO: 84231 - RNA, 20 nt, Artificial Sequence
  Synthetic
auacaggcuauuuuguuuca

SEQ ID NO: 84232 - RNA, 21 nt, Artificial Sequence
  Synthetic
uauacaggcuauuuuguuuca

SEQ ID NO: 84233 - RNA, 22 nt, Artificial Sequence
  Synthetic
uuauacaggcuauuuuguuuca

SEQ ID NO: 84234 - RNA, 24 nt, Artificial Sequence
  Synthetic
aguuauacaggcuauuuuguuuca

SEQ ID NO: 84235 - RNA, 22 nt, Artificial Sequence
  Synthetic
ugcauuuuuauacagauuuuca

SEQ ID NO: 84236 - RNA, 23 nt, Artificial Sequence
  Synthetic
uugcauuuuuauacagauuuuca

SEQ ID NO: 84237 - RNA, 24 nt, Artificial Sequence
  Synthetic
uuugcauuuuuauacagauuuuca

SEQ ID NO: 84238 - RNA, 18 nt, Artificial Sequence
  Synthetic
auguccuuuugauuuuca

SEQ ID NO: 84239 - RNA, 19 nt, Artificial Sequence
  Synthetic
uauguccuuuugauuuuca

SEQ ID NO: 84240 - RNA, 20 nt, Artificial Sequence
  Synthetic
auauguccuuuugauuuuca

SEQ ID NO: 84241 - RNA, 21 nt, Artificial Sequence
  Synthetic
cauauguccuuuugauuuuca

SEQ ID NO: 84242 - RNA, 22 nt, Artificial Sequence
  Synthetic
acauauguccuuuugauuuuca

SEQ ID NO: 84243 - RNA, 23 nt, Artificial Sequence
  Synthetic
uacauauguccuuuugauuuuca

SEQ ID NO: 84244 - RNA, 24 nt, Artificial Sequence
  Synthetic
uuacauauguccuuuugauuuuca

SEQ ID NO: 84245 - RNA, 21 nt, Artificial Sequence
  Synthetic
aaauuuucaugaauauuuuca

SEQ ID NO: 84246 - RNA, 22 nt, Artificial Sequence
  Synthetic
aaaauuuucaugaauauuuuca

SEQ ID NO: 84247 - RNA, 23 nt, Artificial Sequence
  Synthetic
aaaaauuuucaugaauauuuuca

SEQ ID NO: 84248 - RNA, 24 nt, Artificial Sequence
  Synthetic
uaaaaauuuucaugaauauuuuca

SEQ ID NO: 84249 - RNA, 18 nt, Artificial Sequence
  Synthetic
ccuggguaucuauuuuca

SEQ ID NO: 84250 - RNA, 19 nt, Artificial Sequence
  Synthetic
cccuggguaucuauuuuca

SEQ ID NO: 84251 - RNA, 20 nt, Artificial Sequence
  Synthetic
ucccuggguaucuauuuuca

SEQ ID NO: 84252 - RNA, 21 nt, Artificial Sequence
  Synthetic
uucccuggguaucuauuuuca

SEQ ID NO: 84253 - RNA, 22 nt, Artificial Sequence
  Synthetic
cuucccuggguaucuauuuuca

SEQ ID NO: 84254 - RNA, 23 nt, Artificial Sequence
  Synthetic
ucuucccuggguaucuauuuuca

SEQ ID NO: 84255 - RNA, 24 nt, Artificial Sequence
  Synthetic
uucuucccuggguaucuauuuuca

SEQ ID NO: 84256 - RNA, 22 nt, Artificial Sequence
  Synthetic
agaauaauaagaguacuuuuca

SEQ ID NO: 84257 - RNA, 23 nt, Artificial Sequence
  Synthetic
aagaauaauaagaguacuuuuca

SEQ ID NO: 84258 - RNA, 24 nt, Artificial Sequence
  Synthetic
uaagaauaauaagaguacuuuuca

SEQ ID NO: 84259 - RNA, 18 nt, Artificial Sequence
  Synthetic
uagacucauaaguuuuca

SEQ ID NO: 84260 - RNA, 19 nt, Artificial Sequence
  Synthetic
uuagacucauaaguuuuca

SEQ ID NO: 84261 - RNA, 20 nt, Artificial Sequence
  Synthetic
uuuagacucauaaguuuuca

SEQ ID NO: 84262 - RNA, 21 nt, Artificial Sequence
  Synthetic
cuuuagacucauaaguuuuca

SEQ ID NO: 84263 - RNA, 22 nt, Artificial Sequence
  Synthetic
acuuuagacucauaaguuuuca

SEQ ID NO: 84264 - RNA, 23 nt, Artificial Sequence
  Synthetic
uacuuuagacucauaaguuuuca

SEQ ID NO: 84265 - RNA, 24 nt, Artificial Sequence
  Synthetic
uuacuuuagacucauaaguuuuca

SEQ ID NO: 84266 - RNA, 19 nt, Artificial Sequence
  Synthetic
ugaaaugaguuaguuuuca

SEQ ID NO: 84267 - RNA, 20 nt, Artificial Sequence
  Synthetic
uugaaaugaguuaguuuuca

SEQ ID NO: 84268 - RNA, 21 nt, Artificial Sequence
  Synthetic
uuugaaaugaguuaguuuuca

SEQ ID NO: 84269 - RNA, 22 nt, Artificial Sequence
  Synthetic
cuuugaaaugaguuaguuuuca

SEQ ID NO: 84270 - RNA, 23 nt, Artificial Sequence
  Synthetic
ccuuugaaaugaguuaguuuuca

SEQ ID NO: 84271 - RNA, 24 nt, Artificial Sequence
  Synthetic
accuuugaaaugaguuaguuuuca

SEQ ID NO: 84272 - RNA, 18 nt, Artificial Sequence
  Synthetic
uagcuuccauuuuuuuca

SEQ ID NO: 84273 - RNA, 20 nt, Artificial Sequence
  Synthetic
uguagcuuccauuuuuuuca

SEQ ID NO: 84274 - RNA, 21 nt, Artificial Sequence
  Synthetic
uuguagcuuccauuuuuuuca

SEQ ID NO: 84275 - RNA, 22 nt, Artificial Sequence
  Synthetic
auuguagcuuccauuuuuuuca

SEQ ID NO: 84276 - RNA, 23 nt, Artificial Sequence
  Synthetic
aauuguagcuuccauuuuuuuca

SEQ ID NO: 84277 - RNA, 24 nt, Artificial Sequence
  Synthetic
uaauuguagcuuccauuuuuuuca

SEQ ID NO: 84278 - RNA, 21 nt, Artificial Sequence
  Synthetic
uuucucaauaauuaaaaaaga

SEQ ID NO: 84279 - RNA, 22 nt, Artificial Sequence
  Synthetic
auuucucaauaauuaaaaaaga

SEQ ID NO: 84280 - RNA, 23 nt, Artificial Sequence
  Synthetic
uauuucucaauaauuaaaaaaga

SEQ ID NO: 84281 - RNA, 24 nt, Artificial Sequence
  Synthetic
auauuucucaauaauuaaaaaaga

SEQ ID NO: 84282 - RNA, 18 nt, Artificial Sequence
  Synthetic
caaaggcacacaaaaaga

SEQ ID NO: 84283 - RNA, 19 nt, Artificial Sequence
  Synthetic
ucaaaggcacacaaaaaga

SEQ ID NO: 84284 - RNA, 20 nt, Artificial Sequence
  Synthetic
cucaaaggcacacaaaaaga

SEQ ID NO: 84285 - RNA, 21 nt, Artificial Sequence
  Synthetic
ucucaaaggcacacaaaaaga

SEQ ID NO: 84286 - RNA, 22 nt, Artificial Sequence
  Synthetic
cucucaaaggcacacaaaaaga

SEQ ID NO: 84287 - RNA, 23 nt, Artificial Sequence
  Synthetic
ccucucaaaggcacacaaaaaga

SEQ ID NO: 84288 - RNA, 24 nt, Artificial Sequence
  Synthetic
uccucucaaaggcacacaaaaaga

SEQ ID NO: 84289 - RNA, 21 nt, Artificial Sequence
  Synthetic
agggccugagacucaaaaaga

SEQ ID NO: 84290 - RNA, 22 nt, Artificial Sequence
  Synthetic
cagggccugagacucaaaaaga

SEQ ID NO: 84291 - RNA, 23 nt, Artificial Sequence
  Synthetic
ccagggccugagacucaaaaaga

SEQ ID NO: 84292 - RNA, 18 nt, Artificial Sequence
  Synthetic
accauacagggaaaaaga

SEQ ID NO: 84293 - RNA, 19 nt, Artificial Sequence
  Synthetic
aaccauacagggaaaaaga

SEQ ID NO: 84294 - RNA, 21 nt, Artificial Sequence
  Synthetic
agaaccauacagggaaaaaga

SEQ ID NO: 84295 - RNA, 22 nt, Artificial Sequence
  Synthetic
aagaaccauacagggaaaaaga

SEQ ID NO: 84296 - RNA, 24 nt, Artificial Sequence
  Synthetic
agaagaaccauacagggaaaaaga

SEQ ID NO: 84297 - RNA, 18 nt, Artificial Sequence
  Synthetic
uaaauuuccaagaaaaga

SEQ ID NO: 84298 - RNA, 19 nt, Artificial Sequence
  Synthetic
auaaauuuccaagaaaaga

SEQ ID NO: 84299 - RNA, 21 nt, Artificial Sequence
  Synthetic
agauaaauuuccaagaaaaga

SEQ ID NO: 84300 - RNA, 22 nt, Artificial Sequence
  Synthetic
aagauaaauuuccaagaaaaga

SEQ ID NO: 84301 - RNA, 23 nt, Artificial Sequence
  Synthetic
aaagauaaauuuccaagaaaaga

SEQ ID NO: 84302 - RNA, 18 nt, Artificial Sequence
  Synthetic
uaguggcuuaagaaaaga

SEQ ID NO: 84303 - RNA, 19 nt, Artificial Sequence
  Synthetic
uuaguggcuuaagaaaaga

SEQ ID NO: 84304 - RNA, 20 nt, Artificial Sequence
  Synthetic
uuuaguggcuuaagaaaaga

SEQ ID NO: 84305 - RNA, 21 nt, Artificial Sequence
  Synthetic
uuuuaguggcuuaagaaaaga

SEQ ID NO: 84306 - RNA, 22 nt, Artificial Sequence
  Synthetic
auuuuaguggcuuaagaaaaga

SEQ ID NO: 84307 - RNA, 23 nt, Artificial Sequence
  Synthetic
aauuuuaguggcuuaagaaaaga

SEQ ID NO: 84308 - RNA, 24 nt, Artificial Sequence
  Synthetic
caauuuuaguggcuuaagaaaaga

SEQ ID NO: 84309 - RNA, 21 nt, Artificial Sequence
  Synthetic
agagaacacagcuggaaaaga

SEQ ID NO: 84310 - RNA, 23 nt, Artificial Sequence
  Synthetic
agagagaacacagcuggaaaaga

SEQ ID NO: 84311 - RNA, 24 nt, Artificial Sequence
  Synthetic
cagagagaacacagcuggaaaaga

SEQ ID NO: 84312 - RNA, 18 nt, Artificial Sequence
  Synthetic
cugagauaguggaaaaga

SEQ ID NO: 84313 - RNA, 19 nt, Artificial Sequence
  Synthetic
ccugagauaguggaaaaga

SEQ ID NO: 84314 - RNA, 20 nt, Artificial Sequence
  Synthetic
uccugagauaguggaaaaga

SEQ ID NO: 84315 - RNA, 21 nt, Artificial Sequence
  Synthetic
uuccugagauaguggaaaaga

SEQ ID NO: 84316 - RNA, 22 nt, Artificial Sequence
  Synthetic
uuuccugagauaguggaaaaga

SEQ ID NO: 84317 - RNA, 23 nt, Artificial Sequence
  Synthetic
cuuuccugagauaguggaaaaga

SEQ ID NO: 84318 - RNA, 24 nt, Artificial Sequence
  Synthetic
ccuuuccugagauaguggaaaaga

SEQ ID NO: 84319 - RNA, 18 nt, Artificial Sequence
  Synthetic
cguguacaguugaaaaga

SEQ ID NO: 84320 - RNA, 19 nt, Artificial Sequence
  Synthetic
ucguguacaguugaaaaga

SEQ ID NO: 84321 - RNA, 20 nt, Artificial Sequence
  Synthetic
uucguguacaguugaaaaga

SEQ ID NO: 84322 - RNA, 21 nt, Artificial Sequence
  Synthetic
uuucguguacaguugaaaaga

SEQ ID NO: 84323 - RNA, 22 nt, Artificial Sequence
  Synthetic
auuucguguacaguugaaaaga

SEQ ID NO: 84324 - RNA, 23 nt, Artificial Sequence
  Synthetic
uauuucguguacaguugaaaaga

SEQ ID NO: 84325 - RNA, 24 nt, Artificial Sequence
  Synthetic
auauuucguguacaguugaaaaga

SEQ ID NO: 84326 - RNA, 18 nt, Artificial Sequence
  Synthetic
ucuuagagcuauaaaaga

SEQ ID NO: 84327 - RNA, 19 nt, Artificial Sequence
  Synthetic
cucuuagagcuauaaaaga

SEQ ID NO: 84328 - RNA, 20 nt, Artificial Sequence
  Synthetic
acucuuagagcuauaaaaga

SEQ ID NO: 84329 - RNA, 21 nt, Artificial Sequence
  Synthetic
uuaaucuaaaaauguaaaaga

SEQ ID NO: 84330 - RNA, 22 nt, Artificial Sequence
  Synthetic
uuuaaucuaaaaauguaaaaga

SEQ ID NO: 84331 - RNA, 23 nt, Artificial Sequence
  Synthetic
uuuuaaucuaaaaauguaaaaga

SEQ ID NO: 84332 - RNA, 24 nt, Artificial Sequence
  Synthetic
cuuuuaaucuaaaaauguaaaaga

SEQ ID NO: 84333 - RNA, 19 nt, Artificial Sequence
  Synthetic
aggugauuaccuuaaaaga

SEQ ID NO: 84334 - RNA, 20 nt, Artificial Sequence
  Synthetic
aaggugauuaccuuaaaaga

SEQ ID NO: 84335 - RNA, 21 nt, Artificial Sequence
  Synthetic
caaggugauuaccuuaaaaga

SEQ ID NO: 84336 - RNA, 23 nt, Artificial Sequence
  Synthetic
agcaaggugauuaccuuaaaaga

SEQ ID NO: 84337 - RNA, 24 nt, Artificial Sequence
  Synthetic
uagcaaggugauuaccuuaaaaga

SEQ ID NO: 84338 - RNA, 22 nt, Artificial Sequence
  Synthetic
aguuucuguaacccuacaaaga

SEQ ID NO: 84339 - RNA, 23 nt, Artificial Sequence
  Synthetic
aaguuucuguaacccuacaaaga

SEQ ID NO: 84340 - RNA, 19 nt, Artificial Sequence
  Synthetic
ugaguaguugcagcaaaga

SEQ ID NO: 84341 - RNA, 20 nt, Artificial Sequence
  Synthetic
uugaguaguugcagcaaaga

SEQ ID NO: 84342 - RNA, 18 nt, Artificial Sequence
  Synthetic
ugcaguaucuggcaaaga

SEQ ID NO: 84343 - RNA, 19 nt, Artificial Sequence
  Synthetic
uugcaguaucuggcaaaga

SEQ ID NO: 84344 - RNA, 20 nt, Artificial Sequence
  Synthetic
auugcaguaucuggcaaaga

SEQ ID NO: 84345 - RNA, 21 nt, Artificial Sequence
  Synthetic
uauugcaguaucuggcaaaga

SEQ ID NO: 84346 - RNA, 22 nt, Artificial Sequence
  Synthetic
cuauugcaguaucuggcaaaga

SEQ ID NO: 84347 - RNA, 23 nt, Artificial Sequence
  Synthetic
ucuauugcaguaucuggcaaaga

SEQ ID NO: 84348 - RNA, 24 nt, Artificial Sequence
  Synthetic
aucuauugcaguaucuggcaaaga

SEQ ID NO: 84349 - RNA, 18 nt, Artificial Sequence
  Synthetic
agguuauacauucaaaga

SEQ ID NO: 84350 - RNA, 20 nt, Artificial Sequence
  Synthetic
agagguuauacauucaaaga

SEQ ID NO: 84351 - RNA, 21 nt, Artificial Sequence
  Synthetic
uagagguuauacauucaaaga

SEQ ID NO: 84352 - RNA, 22 nt, Artificial Sequence
  Synthetic
cuagagguuauacauucaaaga

SEQ ID NO: 84353 - RNA, 23 nt, Artificial Sequence
  Synthetic
ucuagagguuauacauucaaaga

SEQ ID NO: 84354 - RNA, 24 nt, Artificial Sequence
  Synthetic
uucuagagguuauacauucaaaga

SEQ ID NO: 84355 - RNA, 20 nt, Artificial Sequence
  Synthetic
aggucauacuggaagaaaga

SEQ ID NO: 84356 - RNA, 21 nt, Artificial Sequence
  Synthetic
aaggucauacuggaagaaaga

SEQ ID NO: 84357 - RNA, 22 nt, Artificial Sequence
  Synthetic
aaaggucauacuggaagaaaga

SEQ ID NO: 84358 - RNA, 23 nt, Artificial Sequence
  Synthetic
aaaaggucauacuggaagaaaga

SEQ ID NO: 84359 - RNA, 24 nt, Artificial Sequence
  Synthetic
aaaaaggucauacuggaagaaaga

SEQ ID NO: 84360 - RNA, 18 nt, Artificial Sequence
  Synthetic
aaacuauaguaagaaaga

SEQ ID NO: 84361 - RNA, 19 nt, Artificial Sequence
  Synthetic
caaacuauaguaagaaaga

SEQ ID NO: 84362 - RNA, 21 nt, Artificial Sequence
  Synthetic
agcaaacuauaguaagaaaga

SEQ ID NO: 84363 - RNA, 22 nt, Artificial Sequence
  Synthetic
aagcaaacuauaguaagaaaga

SEQ ID NO: 84364 - RNA, 24 nt, Artificial Sequence
  Synthetic
agaagcaaacuauaguaagaaaga

SEQ ID NO: 84365 - RNA, 19 nt, Artificial Sequence
  Synthetic
ugugaaauauucagaaaga

SEQ ID NO: 84366 - RNA, 20 nt, Artificial Sequence
  Synthetic
uugugaaauauucagaaaga

SEQ ID NO: 84367 - RNA, 21 nt, Artificial Sequence
  Synthetic
cuugugaaauauucagaaaga

SEQ ID NO: 84368 - RNA, 22 nt, Artificial Sequence
  Synthetic
ucuugugaaauauucagaaaga

SEQ ID NO: 84369 - RNA, 23 nt, Artificial Sequence
  Synthetic
cucuugugaaauauucagaaaga

SEQ ID NO: 84370 - RNA, 24 nt, Artificial Sequence
  Synthetic
acucuugugaaauauucagaaaga

SEQ ID NO: 84371 - RNA, 20 nt, Artificial Sequence
  Synthetic
cggggaaaaaaacauaaaga

SEQ ID NO: 84372 - RNA, 21 nt, Artificial Sequence
  Synthetic
acggggaaaaaaacauaaaga

SEQ ID NO: 84373 - RNA, 22 nt, Artificial Sequence
  Synthetic
uacggggaaaaaaacauaaaga

SEQ ID NO: 84374 - RNA, 23 nt, Artificial Sequence
  Synthetic
auacggggaaaaaaacauaaaga

SEQ ID NO: 84375 - RNA, 24 nt, Artificial Sequence
  Synthetic
aauacggggaaaaaaacauaaaga

SEQ ID NO: 84376 - RNA, 18 nt, Artificial Sequence
  Synthetic
aaugguuggggauaaaga

SEQ ID NO: 84377 - RNA, 19 nt, Artificial Sequence
  Synthetic
uaaugguuggggauaaaga

SEQ ID NO: 84378 - RNA, 20 nt, Artificial Sequence
  Synthetic
auaaugguuggggauaaaga

SEQ ID NO: 84379 - RNA, 21 nt, Artificial Sequence
  Synthetic
aauaaugguuggggauaaaga

SEQ ID NO: 84380 - RNA, 22 nt, Artificial Sequence
  Synthetic
aaauaaugguuggggauaaaga

SEQ ID NO: 84381 - RNA, 23 nt, Artificial Sequence
  Synthetic
aaaauaaugguuggggauaaaga

SEQ ID NO: 84382 - RNA, 24 nt, Artificial Sequence
  Synthetic
uaaaauaaugguuggggauaaaga

SEQ ID NO: 84383 - RNA, 18 nt, Artificial Sequence
  Synthetic
cguuuuuaauccuaaaga

SEQ ID NO: 84384 - RNA, 19 nt, Artificial Sequence
  Synthetic
ucguuuuuaauccuaaaga

SEQ ID NO: 84385 - RNA, 22 nt, Artificial Sequence
  Synthetic
aggucguuuuuaauccuaaaga

SEQ ID NO: 84386 - RNA, 23 nt, Artificial Sequence
  Synthetic
caggucguuuuuaauccuaaaga

SEQ ID NO: 84387 - RNA, 24 nt, Artificial Sequence
  Synthetic
acaggucguuuuuaauccuaaaga

SEQ ID NO: 84388 - RNA, 18 nt, Artificial Sequence
  Synthetic
ccuuuuuuugaguaaaga

SEQ ID NO: 84389 - RNA, 21 nt, Artificial Sequence
  Synthetic
uggccuuuuuuugaguaaaga

SEQ ID NO: 84390 - RNA, 22 nt, Artificial Sequence
  Synthetic
auggccuuuuuuugaguaaaga

SEQ ID NO: 84391 - RNA, 23 nt, Artificial Sequence
  Synthetic
aauggccuuuuuuugaguaaaga

SEQ ID NO: 84392 - RNA, 24 nt, Artificial Sequence
  Synthetic
aaauggccuuuuuuugaguaaaga

SEQ ID NO: 84393 - RNA, 22 nt, Artificial Sequence
  Synthetic
aguuugagguuauuuuuaaaga

SEQ ID NO: 84394 - RNA, 23 nt, Artificial Sequence
  Synthetic
aaguuugagguuauuuuuaaaga

SEQ ID NO: 84395 - RNA, 21 nt, Artificial Sequence
  Synthetic
aaaaacaaaggcaaaacaaga

SEQ ID NO: 84396 - RNA, 22 nt, Artificial Sequence
  Synthetic
aaaaaacaaaggcaaaacaaga

SEQ ID NO: 84397 - RNA, 24 nt, Artificial Sequence
  Synthetic
agaaaaaacaaaggcaaaacaaga

SEQ ID NO: 84398 - RNA, 18 nt, Artificial Sequence
  Synthetic
aaccuauuuucaacaaga

SEQ ID NO: 84399 - RNA, 19 nt, Artificial Sequence
  Synthetic
aaaccuauuuucaacaaga

SEQ ID NO: 84400 - RNA, 20 nt, Artificial Sequence
  Synthetic
aaaaccuauuuucaacaaga

SEQ ID NO: 84401 - RNA, 24 nt, Artificial Sequence
  Synthetic
agggaaaaccuauuuucaacaaga

SEQ ID NO: 84402 - RNA, 18 nt, Artificial Sequence
  Synthetic
aaacagugacuaacaaga

SEQ ID NO: 84403 - RNA, 23 nt, Artificial Sequence
  Synthetic
uggggaaacagugacuaacaaga

SEQ ID NO: 84404 - RNA, 24 nt, Artificial Sequence
  Synthetic
uuggggaaacagugacuaacaaga

SEQ ID NO: 84405 - RNA, 18 nt, Artificial Sequence
  Synthetic
aaacuuucagccacaaga

SEQ ID NO: 84406 - RNA, 19 nt, Artificial Sequence
  Synthetic
caaacuuucagccacaaga

SEQ ID NO: 84407 - RNA, 21 nt, Artificial Sequence
  Synthetic
agcaaacuuucagccacaaga

SEQ ID NO: 84408 - RNA, 22 nt, Artificial Sequence
  Synthetic
aagcaaacuuucagccacaaga

SEQ ID NO: 84409 - RNA, 23 nt, Artificial Sequence
  Synthetic
aaagcaaacuuucagccacaaga

SEQ ID NO: 84410 - RNA, 24 nt, Artificial Sequence
  Synthetic
uaaagcaaacuuucagccacaaga

SEQ ID NO: 84411 - RNA, 18 nt, Artificial Sequence
  Synthetic
caaugaaaaucgacaaga

SEQ ID NO: 84412 - RNA, 19 nt, Artificial Sequence
  Synthetic
ucaaugaaaaucgacaaga

SEQ ID NO: 84413 - RNA, 20 nt, Artificial Sequence
  Synthetic
uucaaugaaaaucgacaaga

SEQ ID NO: 84414 - RNA, 21 nt, Artificial Sequence
  Synthetic
auucaaugaaaaucgacaaga

SEQ ID NO: 84415 - RNA, 18 nt, Artificial Sequence
  Synthetic
cuuuuuccagggacaaga

SEQ ID NO: 84416 - RNA, 19 nt, Artificial Sequence
  Synthetic
ccuuuuuccagggacaaga

SEQ ID NO: 84417 - RNA, 20 nt, Artificial Sequence
  Synthetic
cccuuuuuccagggacaaga

SEQ ID NO: 84418 - RNA, 21 nt, Artificial Sequence
  Synthetic
ccccuuuuuccagggacaaga

SEQ ID NO: 84419 - RNA, 22 nt, Artificial Sequence
  Synthetic
uccccuuuuuccagggacaaga

SEQ ID NO: 84420 - RNA, 23 nt, Artificial Sequence
  Synthetic
cuccccuuuuuccagggacaaga

SEQ ID NO: 84421 - RNA, 24 nt, Artificial Sequence
  Synthetic
acuccccuuuuuccagggacaaga

SEQ ID NO: 84422 - RNA, 18 nt, Artificial Sequence
  Synthetic
uugaaauuugcuacaaga

SEQ ID NO: 84423 - RNA, 19 nt, Artificial Sequence
  Synthetic
cuugaaauuugcuacaaga

SEQ ID NO: 84424 - RNA, 20 nt, Artificial Sequence
  Synthetic
acuugaaauuugcuacaaga

SEQ ID NO: 84425 - RNA, 21 nt, Artificial Sequence
  Synthetic
uacuugaaauuugcuacaaga

SEQ ID NO: 84426 - RNA, 22 nt, Artificial Sequence
  Synthetic
uuacuugaaauuugcuacaaga

SEQ ID NO: 84427 - RNA, 23 nt, Artificial Sequence
  Synthetic
uuuacuugaaauuugcuacaaga

SEQ ID NO: 84428 - RNA, 18 nt, Artificial Sequence
  Synthetic
uaaagguagaaaccaaga

SEQ ID NO: 84429 - RNA, 19 nt, Artificial Sequence
  Synthetic
uuaaagguagaaaccaaga

SEQ ID NO: 84430 - RNA, 20 nt, Artificial Sequence
  Synthetic
auuaaagguagaaaccaaga

SEQ ID NO: 84431 - RNA, 21 nt, Artificial Sequence
  Synthetic
cauuaaagguagaaaccaaga

SEQ ID NO: 84432 - RNA, 22 nt, Artificial Sequence
  Synthetic
ucauuaaagguagaaaccaaga

SEQ ID NO: 84433 - RNA, 23 nt, Artificial Sequence
  Synthetic
aucauuaaagguagaaaccaaga

SEQ ID NO: 84434 - RNA, 24 nt, Artificial Sequence
  Synthetic
aaucauuaaagguagaaaccaaga

SEQ ID NO: 84435 - RNA, 18 nt, Artificial Sequence
  Synthetic
cuuauauagggaccaaga

SEQ ID NO: 84436 - RNA, 19 nt, Artificial Sequence
  Synthetic
ucuuauauagggaccaaga

SEQ ID NO: 84437 - RNA, 20 nt, Artificial Sequence
  Synthetic
uucuuauauagggaccaaga

SEQ ID NO: 84438 - RNA, 21 nt, Artificial Sequence
  Synthetic
auucuuauauagggaccaaga

SEQ ID NO: 84439 - RNA, 22 nt, Artificial Sequence
  Synthetic
cauucuuauauagggaccaaga

SEQ ID NO: 84440 - RNA, 23 nt, Artificial Sequence
  Synthetic
ucauucuuauauagggaccaaga

SEQ ID NO: 84441 - RNA, 24 nt, Artificial Sequence
  Synthetic
aucauucuuauauagggaccaaga

SEQ ID NO: 84442 - RNA, 18 nt, Artificial Sequence
  Synthetic
aacaauuuggucccaaga

SEQ ID NO: 84443 - RNA, 19 nt, Artificial Sequence
  Synthetic
aaacaauuuggucccaaga

SEQ ID NO: 84444 - RNA, 20 nt, Artificial Sequence
  Synthetic
uaaacaauuuggucccaaga

SEQ ID NO: 84445 - RNA, 21 nt, Artificial Sequence
  Synthetic
cuaaacaauuuggucccaaga

SEQ ID NO: 84446 - RNA, 22 nt, Artificial Sequence
  Synthetic
acuaaacaauuuggucccaaga

SEQ ID NO: 84447 - RNA, 23 nt, Artificial Sequence
  Synthetic
cacuaaacaauuuggucccaaga

SEQ ID NO: 84448 - RNA, 24 nt, Artificial Sequence
  Synthetic
ucacuaaacaauuuggucccaaga

SEQ ID NO: 84449 - RNA, 21 nt, Artificial Sequence
  Synthetic
auccagacccuggcagcaaga

SEQ ID NO: 84450 - RNA, 22 nt, Artificial Sequence
  Synthetic
uauccagacccuggcagcaaga

SEQ ID NO: 84451 - RNA, 23 nt, Artificial Sequence
  Synthetic
cuauccagacccuggcagcaaga

SEQ ID NO: 84452 - RNA, 18 nt, Artificial Sequence
  Synthetic
aaaugguugcacucaaga

SEQ ID NO: 84453 - RNA, 19 nt, Artificial Sequence
  Synthetic
aaaaugguugcacucaaga

SEQ ID NO: 84454 - RNA, 21 nt, Artificial Sequence
  Synthetic
agaaaaugguugcacucaaga

SEQ ID NO: 84455 - RNA, 23 nt, Artificial Sequence
  Synthetic
cgagaaaaugguugcacucaaga

SEQ ID NO: 84456 - RNA, 24 nt, Artificial Sequence
  Synthetic
ccgagaaaaugguugcacucaaga

SEQ ID NO: 84457 - RNA, 18 nt, Artificial Sequence
  Synthetic
aagggcuugaagucaaga

SEQ ID NO: 84458 - RNA, 19 nt, Artificial Sequence
  Synthetic
uaagggcuugaagucaaga

SEQ ID NO: 84459 - RNA, 20 nt, Artificial Sequence
  Synthetic
uuaagggcuugaagucaaga

SEQ ID NO: 84460 - RNA, 21 nt, Artificial Sequence
  Synthetic
auuaagggcuugaagucaaga

SEQ ID NO: 84461 - RNA, 22 nt, Artificial Sequence
  Synthetic
aauuaagggcuugaagucaaga

SEQ ID NO: 84462 - RNA, 23 nt, Artificial Sequence
  Synthetic
caauuaagggcuugaagucaaga

SEQ ID NO: 84463 - RNA, 24 nt, Artificial Sequence
  Synthetic
ucaauuaagggcuugaagucaaga

SEQ ID NO: 84464 - RNA, 18 nt, Artificial Sequence
  Synthetic
agcuaugcagugucaaga

SEQ ID NO: 84465 - RNA, 19 nt, Artificial Sequence
  Synthetic
cagcuaugcagugucaaga

SEQ ID NO: 84466 - RNA, 20 nt, Artificial Sequence
  Synthetic
acagcuaugcagugucaaga

SEQ ID NO: 84467 - RNA, 21 nt, Artificial Sequence
  Synthetic
aacagcuaugcagugucaaga

SEQ ID NO: 84468 - RNA, 22 nt, Artificial Sequence
  Synthetic
caacagcuaugcagugucaaga

SEQ ID NO: 84469 - RNA, 23 nt, Artificial Sequence
  Synthetic
ccaacagcuaugcagugucaaga

SEQ ID NO: 84470 - RNA, 19 nt, Artificial Sequence
  Synthetic
agacuugucuaaaagaaga

SEQ ID NO: 84471 - RNA, 20 nt, Artificial Sequence
  Synthetic
cagacuugucuaaaagaaga

SEQ ID NO: 84472 - RNA, 21 nt, Artificial Sequence
  Synthetic
ucagacuugucuaaaagaaga

SEQ ID NO: 84473 - RNA, 22 nt, Artificial Sequence
  Synthetic
aucagacuugucuaaaagaaga

SEQ ID NO: 84474 - RNA, 23 nt, Artificial Sequence
  Synthetic
uaucagacuugucuaaaagaaga

SEQ ID NO: 84475 - RNA, 24 nt, Artificial Sequence
  Synthetic
auaucagacuugucuaaaagaaga

SEQ ID NO: 84476 - RNA, 21 nt, Artificial Sequence
  Synthetic
aaugggaguggaagaagaaga

SEQ ID NO: 84477 - RNA, 22 nt, Artificial Sequence
  Synthetic
uaaugggaguggaagaagaaga

SEQ ID NO: 84478 - RNA, 23 nt, Artificial Sequence
  Synthetic
uuaaugggaguggaagaagaaga

SEQ ID NO: 84479 - RNA, 18 nt, Artificial Sequence
  Synthetic
aaugcauaugggagaaga

SEQ ID NO: 84480 - RNA, 20 nt, Artificial Sequence
  Synthetic
ugaaugcauaugggagaaga

SEQ ID NO: 84481 - RNA, 21 nt, Artificial Sequence
  Synthetic
augaaugcauaugggagaaga

SEQ ID NO: 84482 - RNA, 22 nt, Artificial Sequence
  Synthetic
caugaaugcauaugggagaaga

SEQ ID NO: 84483 - RNA, 23 nt, Artificial Sequence
  Synthetic
ucaugaaugcauaugggagaaga

SEQ ID NO: 84484 - RNA, 24 nt, Artificial Sequence
  Synthetic
uucaugaaugcauaugggagaaga

SEQ ID NO: 84485 - RNA, 18 nt, Artificial Sequence
  Synthetic
cuugucuccaauagaaga

SEQ ID NO: 84486 - RNA, 20 nt, Artificial Sequence
  Synthetic
agcuugucuccaauagaaga

SEQ ID NO: 84487 - RNA, 22 nt, Artificial Sequence
  Synthetic
ugagcuugucuccaauagaaga

SEQ ID NO: 84488 - RNA, 23 nt, Artificial Sequence
  Synthetic
uugagcuugucuccaauagaaga

SEQ ID NO: 84489 - RNA, 19 nt, Artificial Sequence
  Synthetic
ugcuaaaauucauagaaga

SEQ ID NO: 84490 - RNA, 20 nt, Artificial Sequence
  Synthetic
uugcuaaaauucauagaaga

SEQ ID NO: 84491 - RNA, 22 nt, Artificial Sequence
  Synthetic
uguugcuaaaauucauagaaga

SEQ ID NO: 84492 - RNA, 24 nt, Artificial Sequence
  Synthetic
aguguugcuaaaauucauagaaga

SEQ ID NO: 84493 - RNA, 18 nt, Artificial Sequence
  Synthetic
cacagacaacuuagaaga

SEQ ID NO: 84494 - RNA, 21 nt, Artificial Sequence
  Synthetic
uggcacagacaacuuagaaga

SEQ ID NO: 84495 - RNA, 22 nt, Artificial Sequence
  Synthetic
uuggcacagacaacuuagaaga

SEQ ID NO: 84496 - RNA, 23 nt, Artificial Sequence
  Synthetic
auuggcacagacaacuuagaaga

SEQ ID NO: 84497 - RNA, 24 nt, Artificial Sequence
  Synthetic
aauuggcacagacaacuuagaaga

SEQ ID NO: 84498 - RNA, 18 nt, Artificial Sequence
  Synthetic
auugacucauuccgaaga

SEQ ID NO: 84499 - RNA, 19 nt, Artificial Sequence
  Synthetic
uauugacucauuccgaaga

SEQ ID NO: 84500 - RNA, 21 nt, Artificial Sequence
  Synthetic
uguauugacucauuccgaaga

SEQ ID NO: 84501 - RNA, 22 nt, Artificial Sequence
  Synthetic
cuguauugacucauuccgaaga

SEQ ID NO: 84502 - RNA, 24 nt, Artificial Sequence
  Synthetic
ugcuguauugacucauuccgaaga

SEQ ID NO: 84503 - RNA, 18 nt, Artificial Sequence
  Synthetic
cuguucucugugggaaga

SEQ ID NO: 84504 - RNA, 19 nt, Artificial Sequence
  Synthetic
ccuguucucugugggaaga

SEQ ID NO: 84505 - RNA, 20 nt, Artificial Sequence
  Synthetic
uccuguucucugugggaaga

SEQ ID NO: 84506 - RNA, 18 nt, Artificial Sequence
  Synthetic
ugaggagugaguggaaga

SEQ ID NO: 84507 - RNA, 19 nt, Artificial Sequence
  Synthetic
cugaggagugaguggaaga

SEQ ID NO: 84508 - RNA, 21 nt, Artificial Sequence
  Synthetic
agcugaggagugaguggaaga

SEQ ID NO: 84509 - RNA, 22 nt, Artificial Sequence
  Synthetic
uagcugaggagugaguggaaga

SEQ ID NO: 84510 - RNA, 23 nt, Artificial Sequence
  Synthetic
auagcugaggagugaguggaaga

SEQ ID NO: 84511 - RNA, 24 nt, Artificial Sequence
  Synthetic
cauagcugaggagugaguggaaga

SEQ ID NO: 84512 - RNA, 18 nt, Artificial Sequence
  Synthetic
ccagugaauaaaugaaga

SEQ ID NO: 84513 - RNA, 19 nt, Artificial Sequence
  Synthetic
cccagugaauaaaugaaga

SEQ ID NO: 84514 - RNA, 20 nt, Artificial Sequence
  Synthetic
ccccagugaauaaaugaaga

SEQ ID NO: 84515 - RNA, 21 nt, Artificial Sequence
  Synthetic
accccagugaauaaaugaaga

SEQ ID NO: 84516 - RNA, 22 nt, Artificial Sequence
  Synthetic
uaccccagugaauaaaugaaga

SEQ ID NO: 84517 - RNA, 23 nt, Artificial Sequence
  Synthetic
cuaccccagugaauaaaugaaga

SEQ ID NO: 84518 - RNA, 24 nt, Artificial Sequence
  Synthetic
ccuaccccagugaauaaaugaaga

SEQ ID NO: 84519 - RNA, 18 nt, Artificial Sequence
  Synthetic
auaccaugugaaugaaga

SEQ ID NO: 84520 - RNA, 19 nt, Artificial Sequence
  Synthetic
aauaccaugugaaugaaga

SEQ ID NO: 84521 - RNA, 20 nt, Artificial Sequence
  Synthetic
aaauaccaugugaaugaaga

SEQ ID NO: 84522 - RNA, 21 nt, Artificial Sequence
  Synthetic
aaaauaccaugugaaugaaga

SEQ ID NO: 84523 - RNA, 23 nt, Artificial Sequence
  Synthetic
agaaaauaccaugugaaugaaga

SEQ ID NO: 84524 - RNA, 18 nt, Artificial Sequence
  Synthetic
uuagaauguugaugaaga

SEQ ID NO: 84525 - RNA, 19 nt, Artificial Sequence
  Synthetic
auuagaauguugaugaaga

SEQ ID NO: 84526 - RNA, 20 nt, Artificial Sequence
  Synthetic
uauuagaauguugaugaaga

SEQ ID NO: 84527 - RNA, 21 nt, Artificial Sequence
  Synthetic
cuauuagaauguugaugaaga

SEQ ID NO: 84528 - RNA, 22 nt, Artificial Sequence
  Synthetic
ucuauuagaauguugaugaaga

SEQ ID NO: 84529 - RNA, 23 nt, Artificial Sequence
  Synthetic
uucuauuagaauguugaugaaga

SEQ ID NO: 84530 - RNA, 24 nt, Artificial Sequence
  Synthetic
auucuauuagaauguugaugaaga

SEQ ID NO: 84531 - RNA, 18 nt, Artificial Sequence
  Synthetic
ccaaguugaauaugaaga

SEQ ID NO: 84532 - RNA, 20 nt, Artificial Sequence
  Synthetic
agccaaguugaauaugaaga

SEQ ID NO: 84533 - RNA, 21 nt, Artificial Sequence
  Synthetic
aagccaaguugaauaugaaga

SEQ ID NO: 84534 - RNA, 22 nt, Artificial Sequence
  Synthetic
aaagccaaguugaauaugaaga

SEQ ID NO: 84535 - RNA, 23 nt, Artificial Sequence
  Synthetic
aaaagccaaguugaauaugaaga

SEQ ID NO: 84536 - RNA, 24 nt, Artificial Sequence
  Synthetic
aaaaagccaaguugaauaugaaga

SEQ ID NO: 84537 - RNA, 18 nt, Artificial Sequence
  Synthetic
cugggucucaacugaaga

SEQ ID NO: 84538 - RNA, 19 nt, Artificial Sequence
  Synthetic
acugggucucaacugaaga

SEQ ID NO: 84539 - RNA, 20 nt, Artificial Sequence
  Synthetic
aacugggucucaacugaaga

SEQ ID NO: 84540 - RNA, 21 nt, Artificial Sequence
  Synthetic
caacugggucucaacugaaga

SEQ ID NO: 84541 - RNA, 22 nt, Artificial Sequence
  Synthetic
ucaacugggucucaacugaaga

SEQ ID NO: 84542 - RNA, 23 nt, Artificial Sequence
  Synthetic
uucaacugggucucaacugaaga

SEQ ID NO: 84543 - RNA, 24 nt, Artificial Sequence
  Synthetic
cuucaacugggucucaacugaaga

SEQ ID NO: 84544 - RNA, 18 nt, Artificial Sequence
  Synthetic
aguuacccuaacugaaga

SEQ ID NO: 84545 - RNA, 20 nt, Artificial Sequence
  Synthetic
agaguuacccuaacugaaga

SEQ ID NO: 84546 - RNA, 21 nt, Artificial Sequence
  Synthetic
cagaguuacccuaacugaaga

SEQ ID NO: 84547 - RNA, 22 nt, Artificial Sequence
  Synthetic
ucagaguuacccuaacugaaga

SEQ ID NO: 84548 - RNA, 23 nt, Artificial Sequence
  Synthetic
uucagaguuacccuaacugaaga

SEQ ID NO: 84549 - RNA, 24 nt, Artificial Sequence
  Synthetic
cuucagaguuacccuaacugaaga

SEQ ID NO: 84550 - RNA, 18 nt, Artificial Sequence
  Synthetic
uaaucauuaaccugaaga

SEQ ID NO: 84551 - RNA, 19 nt, Artificial Sequence
  Synthetic
auaaucauuaaccugaaga

SEQ ID NO: 84552 - RNA, 20 nt, Artificial Sequence
  Synthetic
aauaaucauuaaccugaaga

SEQ ID NO: 84553 - RNA, 21 nt, Artificial Sequence
  Synthetic
aaauaaucauuaaccugaaga

SEQ ID NO: 84554 - RNA, 22 nt, Artificial Sequence
  Synthetic
aaaauaaucauuaaccugaaga

SEQ ID NO: 84555 - RNA, 23 nt, Artificial Sequence
  Synthetic
aaaaauaaucauuaaccugaaga

SEQ ID NO: 84556 - RNA, 24 nt, Artificial Sequence
  Synthetic
uaaaaauaaucauuaaccugaaga

SEQ ID NO: 84557 - RNA, 21 nt, Artificial Sequence
  Synthetic
aaaaaaaauugcaggugaaga

SEQ ID NO: 84558 - RNA, 22 nt, Artificial Sequence
  Synthetic
aaaaaaaaauugcaggugaaga

SEQ ID NO: 84559 - RNA, 22 nt, Artificial Sequence
  Synthetic
ugcuuucuucuuuuauugaaga

SEQ ID NO: 84560 - RNA, 23 nt, Artificial Sequence
  Synthetic
augcuuucuucuuuuauugaaga

SEQ ID NO: 84561 - RNA, 24 nt, Artificial Sequence
  Synthetic
caugcuuucuucuuuuauugaaga

SEQ ID NO: 84562 - RNA, 18 nt, Artificial Sequence
  Synthetic
agcagcuuguggauaaga

SEQ ID NO: 84563 - RNA, 19 nt, Artificial Sequence
  Synthetic
cagcagcuuguggauaaga

SEQ ID NO: 84564 - RNA, 20 nt, Artificial Sequence
  Synthetic
ccagcagcuuguggauaaga

SEQ ID NO: 84565 - RNA, 21 nt, Artificial Sequence
  Synthetic
cccagcagcuuguggauaaga

SEQ ID NO: 84566 - RNA, 24 nt, Artificial Sequence
  Synthetic
aggcccagcagcuuguggauaaga

SEQ ID NO: 84567 - RNA, 19 nt, Artificial Sequence
  Synthetic
ugauaaccugaauauaaga

SEQ ID NO: 84568 - RNA, 20 nt, Artificial Sequence
  Synthetic
augauaaccugaauauaaga

SEQ ID NO: 84569 - RNA, 21 nt, Artificial Sequence
  Synthetic
aaugauaaccugaauauaaga

SEQ ID NO: 84570 - RNA, 22 nt, Artificial Sequence
  Synthetic
aaaugauaaccugaauauaaga

SEQ ID NO: 84571 - RNA, 23 nt, Artificial Sequence
  Synthetic
aaaaugauaaccugaauauaaga

SEQ ID NO: 84572 - RNA, 24 nt, Artificial Sequence
  Synthetic
uaaaaugauaaccugaauauaaga

SEQ ID NO: 84573 - RNA, 18 nt, Artificial Sequence
  Synthetic
cccaauuuauaacuaaga

SEQ ID NO: 84574 - RNA, 19 nt, Artificial Sequence
  Synthetic
ccccaauuuauaacuaaga

SEQ ID NO: 84575 - RNA, 20 nt, Artificial Sequence
  Synthetic
uccccaauuuauaacuaaga

SEQ ID NO: 84576 - RNA, 21 nt, Artificial Sequence
  Synthetic
uuccccaauuuauaacuaaga

SEQ ID NO: 84577 - RNA, 22 nt, Artificial Sequence
  Synthetic
auuccccaauuuauaacuaaga

SEQ ID NO: 84578 - RNA, 23 nt, Artificial Sequence
  Synthetic
aauuccccaauuuauaacuaaga

SEQ ID NO: 84579 - RNA, 24 nt, Artificial Sequence
  Synthetic
aaauuccccaauuuauaacuaaga

SEQ ID NO: 84580 - RNA, 18 nt, Artificial Sequence
  Synthetic
uucuagggaacaguaaga

SEQ ID NO: 84581 - RNA, 19 nt, Artificial Sequence
  Synthetic
auucuagggaacaguaaga

SEQ ID NO: 84582 - RNA, 20 nt, Artificial Sequence
  Synthetic
cauucuagggaacaguaaga

SEQ ID NO: 84583 - RNA, 22 nt, Artificial Sequence
  Synthetic
agcauucuagggaacaguaaga

SEQ ID NO: 84584 - RNA, 23 nt, Artificial Sequence
  Synthetic
aagcauucuagggaacaguaaga

SEQ ID NO: 84585 - RNA, 24 nt, Artificial Sequence
  Synthetic
caagcauucuagggaacaguaaga

SEQ ID NO: 84586 - RNA, 18 nt, Artificial Sequence
  Synthetic
uuuauuguaguaguaaga

SEQ ID NO: 84587 - RNA, 19 nt, Artificial Sequence
  Synthetic
uuuuauuguaguaguaaga

SEQ ID NO: 84588 - RNA, 22 nt, Artificial Sequence
  Synthetic
agguuuuauuguaguaguaaga

SEQ ID NO: 84589 - RNA, 23 nt, Artificial Sequence
  Synthetic
uagguuuuauuguaguaguaaga

SEQ ID NO: 84590 - RNA, 18 nt, Artificial Sequence
  Synthetic
aggaagcucaauguaaga

SEQ ID NO: 84591 - RNA, 19 nt, Artificial Sequence
  Synthetic
aaggaagcucaauguaaga

SEQ ID NO: 84592 - RNA, 21 nt, Artificial Sequence
  Synthetic
ugaaggaagcucaauguaaga

SEQ ID NO: 84593 - RNA, 24 nt, Artificial Sequence
  Synthetic
aggugaaggaagcucaauguaaga

SEQ ID NO: 84594 - RNA, 18 nt, Artificial Sequence
  Synthetic
auuugaaagcauguaaga

SEQ ID NO: 84595 - RNA, 19 nt, Artificial Sequence
  Synthetic
aauuugaaagcauguaaga

SEQ ID NO: 84596 - RNA, 20 nt, Artificial Sequence
  Synthetic
aaauuugaaagcauguaaga

SEQ ID NO: 84597 - RNA, 24 nt, Artificial Sequence
  Synthetic
agggaaauuugaaagcauguaaga

SEQ ID NO: 84598 - RNA, 21 nt, Artificial Sequence
  Synthetic
auaggguauaauaaauuaaga

SEQ ID NO: 84599 - RNA, 22 nt, Artificial Sequence
  Synthetic
aauaggguauaauaaauuaaga

SEQ ID NO: 84600 - RNA, 23 nt, Artificial Sequence
  Synthetic
uaauaggguauaauaaauuaaga

SEQ ID NO: 84601 - RNA, 24 nt, Artificial Sequence
  Synthetic
uuaauaggguauaauaaauuaaga

SEQ ID NO: 84602 - RNA, 19 nt, Artificial Sequence
  Synthetic
ugaaaaccauaccuuaaga

SEQ ID NO: 84603 - RNA, 20 nt, Artificial Sequence
  Synthetic
uugaaaaccauaccuuaaga

SEQ ID NO: 84604 - RNA, 21 nt, Artificial Sequence
  Synthetic
uuugaaaaccauaccuuaaga

SEQ ID NO: 84605 - RNA, 22 nt, Artificial Sequence
  Synthetic
auuugaaaaccauaccuuaaga

SEQ ID NO: 84606 - RNA, 24 nt, Artificial Sequence
  Synthetic
ugauuugaaaaccauaccuuaaga

SEQ ID NO: 84607 - RNA, 18 nt, Artificial Sequence
  Synthetic
uguauaauauuguuaaga

SEQ ID NO: 84608 - RNA, 20 nt, Artificial Sequence
  Synthetic
uguguauaauauuguuaaga

SEQ ID NO: 84609 - RNA, 21 nt, Artificial Sequence
  Synthetic
cuguguauaauauuguuaaga

SEQ ID NO: 84610 - RNA, 24 nt, Artificial Sequence
  Synthetic
uggcuguguauaauauuguuaaga

SEQ ID NO: 84611 - RNA, 18 nt, Artificial Sequence
  Synthetic
caaaucuguuuguuaaga

SEQ ID NO: 84612 - RNA, 20 nt, Artificial Sequence
  Synthetic
ugcaaaucuguuuguuaaga

SEQ ID NO: 84613 - RNA, 21 nt, Artificial Sequence
  Synthetic
uugcaaaucuguuuguuaaga

SEQ ID NO: 84614 - RNA, 22 nt, Artificial Sequence
  Synthetic
uuugcaaaucuguuuguuaaga

SEQ ID NO: 84615 - RNA, 23 nt, Artificial Sequence
  Synthetic
uuuugcaaaucuguuuguuaaga

SEQ ID NO: 84616 - RNA, 24 nt, Artificial Sequence
  Synthetic
auuuugcaaaucuguuuguuaaga

SEQ ID NO: 84617 - RNA, 18 nt, Artificial Sequence
  Synthetic
cuccagauaaauuuaaga

SEQ ID NO: 84618 - RNA, 19 nt, Artificial Sequence
  Synthetic
acuccagauaaauuuaaga

SEQ ID NO: 84619 - RNA, 20 nt, Artificial Sequence
  Synthetic
uacuccagauaaauuuaaga

SEQ ID NO: 84620 - RNA, 21 nt, Artificial Sequence
  Synthetic
uuacuccagauaaauuuaaga

SEQ ID NO: 84621 - RNA, 22 nt, Artificial Sequence
  Synthetic
uuuacuccagauaaauuuaaga

SEQ ID NO: 84622 - RNA, 23 nt, Artificial Sequence
  Synthetic
uuuuacuccagauaaauuuaaga

SEQ ID NO: 84623 - RNA, 24 nt, Artificial Sequence
  Synthetic
cuuuuacuccagauaaauuuaaga

SEQ ID NO: 84624 - RNA, 18 nt, Artificial Sequence
  Synthetic
aagcuaauuggaaacaga

SEQ ID NO: 84625 - RNA, 19 nt, Artificial Sequence
  Synthetic
aaagcuaauuggaaacaga

SEQ ID NO: 84626 - RNA, 20 nt, Artificial Sequence
  Synthetic
aaaagcuaauuggaaacaga

SEQ ID NO: 84627 - RNA, 21 nt, Artificial Sequence
  Synthetic
aaaaagcuaauuggaaacaga

SEQ ID NO: 84628 - RNA, 23 nt, Artificial Sequence
  Synthetic
ugaaaaagcuaauuggaaacaga

SEQ ID NO: 84629 - RNA, 24 nt, Artificial Sequence
  Synthetic
uugaaaaagcuaauuggaaacaga

SEQ ID NO: 84630 - RNA, 18 nt, Artificial Sequence
  Synthetic
agcuccaaacucaacaga

SEQ ID NO: 84631 - RNA, 20 nt, Artificial Sequence
  Synthetic
agagcuccaaacucaacaga

SEQ ID NO: 84632 - RNA, 21 nt, Artificial Sequence
  Synthetic
aagagcuccaaacucaacaga

SEQ ID NO: 84633 - RNA, 22 nt, Artificial Sequence
  Synthetic
caagagcuccaaacucaacaga

SEQ ID NO: 84634 - RNA, 23 nt, Artificial Sequence
  Synthetic
acaagagcuccaaacucaacaga

SEQ ID NO: 84635 - RNA, 24 nt, Artificial Sequence
  Synthetic
cacaagagcuccaaacucaacaga

SEQ ID NO: 84636 - RNA, 19 nt, Artificial Sequence
  Synthetic
ugcaguauguuucaacaga

SEQ ID NO: 84637 - RNA, 20 nt, Artificial Sequence
  Synthetic
augcaguauguuucaacaga

SEQ ID NO: 84638 - RNA, 22 nt, Artificial Sequence
  Synthetic
agaugcaguauguuucaacaga

SEQ ID NO: 84639 - RNA, 23 nt, Artificial Sequence
  Synthetic
cagaugcaguauguuucaacaga

SEQ ID NO: 84640 - RNA, 24 nt, Artificial Sequence
  Synthetic
acagaugcaguauguuucaacaga

SEQ ID NO: 84641 - RNA, 18 nt, Artificial Sequence
  Synthetic
uuacuagaucaacacaga

SEQ ID NO: 84642 - RNA, 19 nt, Artificial Sequence
  Synthetic
uuuacuagaucaacacaga

SEQ ID NO: 84643 - RNA, 21 nt, Artificial Sequence
  Synthetic
aguuuacuagaucaacacaga

SEQ ID NO: 84644 - RNA, 22 nt, Artificial Sequence
  Synthetic
uaguuuacuagaucaacacaga

SEQ ID NO: 84645 - RNA, 24 nt, Artificial Sequence
  Synthetic
aguaguuuacuagaucaacacaga

SEQ ID NO: 84646 - RNA, 18 nt, Artificial Sequence
  Synthetic
ugaacuugaagacacaga

SEQ ID NO: 84647 - RNA, 19 nt, Artificial Sequence
  Synthetic
cugaacuugaagacacaga

SEQ ID NO: 84648 - RNA, 20 nt, Artificial Sequence
  Synthetic
ucugaacuugaagacacaga

SEQ ID NO: 84649 - RNA, 21 nt, Artificial Sequence
  Synthetic
aucugaacuugaagacacaga

SEQ ID NO: 84650 - RNA, 22 nt, Artificial Sequence
  Synthetic
caucugaacuugaagacacaga

SEQ ID NO: 84651 - RNA, 23 nt, Artificial Sequence
  Synthetic
ccaucugaacuugaagacacaga

SEQ ID NO: 84652 - RNA, 24 nt, Artificial Sequence
  Synthetic
accaucugaacuugaagacacaga

SEQ ID NO: 84653 - RNA, 21 nt, Artificial Sequence
  Synthetic
aauggcuuugucuuacacaga

SEQ ID NO: 84654 - RNA, 22 nt, Artificial Sequence
  Synthetic
aaauggcuuugucuuacacaga

SEQ ID NO: 84655 - RNA, 23 nt, Artificial Sequence
  Synthetic
caaauggcuuugucuuacacaga

SEQ ID NO: 84656 - RNA, 24 nt, Artificial Sequence
  Synthetic
acaaauggcuuugucuuacacaga

SEQ ID NO: 84657 - RNA, 18 nt, Artificial Sequence
  Synthetic
cuuuauacgggucacaga

SEQ ID NO: 84658 - RNA, 20 nt, Artificial Sequence
  Synthetic
agcuuuauacgggucacaga

SEQ ID NO: 84659 - RNA, 22 nt, Artificial Sequence
  Synthetic
ugagcuuuauacgggucacaga

SEQ ID NO: 84660 - RNA, 23 nt, Artificial Sequence
  Synthetic
uugagcuuuauacgggucacaga

SEQ ID NO: 84661 - RNA, 24 nt, Artificial Sequence
  Synthetic
uuugagcuuuauacgggucacaga

SEQ ID NO: 84662 - RNA, 22 nt, Artificial Sequence
  Synthetic
uggagauuuguugggagacaga

SEQ ID NO: 84663 - RNA, 23 nt, Artificial Sequence
  Synthetic
cuggagauuuguugggagacaga

SEQ ID NO: 84664 - RNA, 20 nt, Artificial Sequence
  Synthetic
uggcagaucugugagacaga

SEQ ID NO: 84665 - RNA, 21 nt, Artificial Sequence
  Synthetic
auggcagaucugugagacaga

SEQ ID NO: 84666 - RNA, 24 nt, Artificial Sequence
  Synthetic
aggauggcagaucugugagacaga

SEQ ID NO: 84667 - RNA, 18 nt, Artificial Sequence
  Synthetic
acacgacaggaggacaga

SEQ ID NO: 84668 - RNA, 20 nt, Artificial Sequence
  Synthetic
agacacgacaggaggacaga

SEQ ID NO: 84669 - RNA, 21 nt, Artificial Sequence
  Synthetic
aagacacgacaggaggacaga

SEQ ID NO: 84670 - RNA, 24 nt, Artificial Sequence
  Synthetic
aggaagacacgacaggaggacaga

SEQ ID NO: 84671 - RNA, 18 nt, Artificial Sequence
  Synthetic
aaauuguacaaugacaga

SEQ ID NO: 84672 - RNA, 20 nt, Artificial Sequence
  Synthetic
agaaauuguacaaugacaga

SEQ ID NO: 84673 - RNA, 21 nt, Artificial Sequence
  Synthetic
aagaaauuguacaaugacaga

SEQ ID NO: 84674 - RNA, 22 nt, Artificial Sequence
  Synthetic
uaagaaauuguacaaugacaga

SEQ ID NO: 84675 - RNA, 23 nt, Artificial Sequence
  Synthetic
auaagaaauuguacaaugacaga

SEQ ID NO: 84676 - RNA, 24 nt, Artificial Sequence
  Synthetic
uauaagaaauuguacaaugacaga

SEQ ID NO: 84677 - RNA, 18 nt, Artificial Sequence
  Synthetic
augaauacugaugacaga

SEQ ID NO: 84678 - RNA, 19 nt, Artificial Sequence
  Synthetic
uaugaauacugaugacaga

SEQ ID NO: 84679 - RNA, 20 nt, Artificial Sequence
  Synthetic
cuaugaauacugaugacaga

SEQ ID NO: 84680 - RNA, 21 nt, Artificial Sequence
  Synthetic
ucuaugaauacugaugacaga

SEQ ID NO: 84681 - RNA, 22 nt, Artificial Sequence
  Synthetic
uucuaugaauacugaugacaga

SEQ ID NO: 84682 - RNA, 23 nt, Artificial Sequence
  Synthetic
uuucuaugaauacugaugacaga

SEQ ID NO: 84683 - RNA, 24 nt, Artificial Sequence
  Synthetic
cuuucuaugaauacugaugacaga

SEQ ID NO: 84684 - RNA, 18 nt, Artificial Sequence
  Synthetic
uuacauucuguugacaga

SEQ ID NO: 84685 - RNA, 19 nt, Artificial Sequence
  Synthetic
cuuacauucuguugacaga

SEQ ID NO: 84686 - RNA, 21 nt, Artificial Sequence
  Synthetic
ugcuuacauucuguugacaga

SEQ ID NO: 84687 - RNA, 22 nt, Artificial Sequence
  Synthetic
uugcuuacauucuguugacaga

SEQ ID NO: 84688 - RNA, 23 nt, Artificial Sequence
  Synthetic
uuugcuuacauucuguugacaga

SEQ ID NO: 84689 - RNA, 24 nt, Artificial Sequence
  Synthetic
cuuugcuuacauucuguugacaga

SEQ ID NO: 84690 - RNA, 18 nt, Artificial Sequence
  Synthetic
cuuuuaauaaauuacaga

SEQ ID NO: 84691 - RNA, 19 nt, Artificial Sequence
  Synthetic
ucuuuuaauaaauuacaga

SEQ ID NO: 84692 - RNA, 21 nt, Artificial Sequence
  Synthetic
ugucuuuuaauaaauuacaga

SEQ ID NO: 84693 - RNA, 22 nt, Artificial Sequence
  Synthetic
augucuuuuaauaaauuacaga

SEQ ID NO: 84694 - RNA, 23 nt, Artificial Sequence
  Synthetic
uaugucuuuuaauaaauuacaga

SEQ ID NO: 84695 - RNA, 18 nt, Artificial Sequence
  Synthetic
ugaccacgagagaccaga

SEQ ID NO: 84696 - RNA, 19 nt, Artificial Sequence
  Synthetic
augaccacgagagaccaga

SEQ ID NO: 84697 - RNA, 20 nt, Artificial Sequence
  Synthetic
caugaccacgagagaccaga

SEQ ID NO: 84698 - RNA, 21 nt, Artificial Sequence
  Synthetic
ccaugaccacgagagaccaga

SEQ ID NO: 84699 - RNA, 22 nt, Artificial Sequence
  Synthetic
cccaugaccacgagagaccaga

SEQ ID NO: 84700 - RNA, 23 nt, Artificial Sequence
  Synthetic
ucccaugaccacgagagaccaga

SEQ ID NO: 84701 - RNA, 18 nt, Artificial Sequence
  Synthetic
uacauaccagguaccaga

SEQ ID NO: 84702 - RNA, 19 nt, Artificial Sequence
  Synthetic
auacauaccagguaccaga

SEQ ID NO: 84703 - RNA, 20 nt, Artificial Sequence
  Synthetic
uauacauaccagguaccaga

SEQ ID NO: 84704 - RNA, 21 nt, Artificial Sequence
  Synthetic
auauacauaccagguaccaga

SEQ ID NO: 84705 - RNA, 22 nt, Artificial Sequence
  Synthetic
cauauacauaccagguaccaga

SEQ ID NO: 84706 - RNA, 23 nt, Artificial Sequence
  Synthetic
ccauauacauaccagguaccaga

SEQ ID NO: 84707 - RNA, 24 nt, Artificial Sequence
  Synthetic
uccauauacauaccagguaccaga

SEQ ID NO: 84708 - RNA, 18 nt, Artificial Sequence
  Synthetic
aagguacaugguaccaga

SEQ ID NO: 84709 - RNA, 19 nt, Artificial Sequence
  Synthetic
caagguacaugguaccaga

SEQ ID NO: 84710 - RNA, 20 nt, Artificial Sequence
  Synthetic
ccaagguacaugguaccaga

SEQ ID NO: 84711 - RNA, 22 nt, Artificial Sequence
  Synthetic
agccaagguacaugguaccaga

SEQ ID NO: 84712 - RNA, 18 nt, Artificial Sequence
  Synthetic
uuaagcagaucucccaga

SEQ ID NO: 84713 - RNA, 20 nt, Artificial Sequence
  Synthetic
aguuaagcagaucucccaga

SEQ ID NO: 84714 - RNA, 21 nt, Artificial Sequence
  Synthetic
aaguuaagcagaucucccaga

SEQ ID NO: 84715 - RNA, 22 nt, Artificial Sequence
  Synthetic
aaaguuaagcagaucucccaga

SEQ ID NO: 84716 - RNA, 24 nt, Artificial Sequence
  Synthetic
agaaaguuaagcagaucucccaga

SEQ ID NO: 84717 - RNA, 19 nt, Artificial Sequence
  Synthetic
ugggcaauaaagagccaga

SEQ ID NO: 84718 - RNA, 20 nt, Artificial Sequence
  Synthetic
uugggcaauaaagagccaga

SEQ ID NO: 84719 - RNA, 21 nt, Artificial Sequence
  Synthetic
uuugggcaauaaagagccaga

SEQ ID NO: 84720 - RNA, 22 nt, Artificial Sequence
  Synthetic
auuugggcaauaaagagccaga

SEQ ID NO: 84721 - RNA, 24 nt, Artificial Sequence
  Synthetic
agauuugggcaauaaagagccaga

SEQ ID NO: 84722 - RNA, 18 nt, Artificial Sequence
  Synthetic
aggagcuaaauauccaga

SEQ ID NO: 84723 - RNA, 19 nt, Artificial Sequence
  Synthetic
aaggagcuaaauauccaga

SEQ ID NO: 84724 - RNA, 20 nt, Artificial Sequence
  Synthetic
aaaggagcuaaauauccaga

SEQ ID NO: 84725 - RNA, 23 nt, Artificial Sequence
  Synthetic
aggaaaggagcuaaauauccaga

SEQ ID NO: 84726 - RNA, 24 nt, Artificial Sequence
  Synthetic
caggaaaggagcuaaauauccaga

SEQ ID NO: 84727 - RNA, 18 nt, Artificial Sequence
  Synthetic
cuguugcaauacuccaga

SEQ ID NO: 84728 - RNA, 19 nt, Artificial Sequence
  Synthetic
ucuguugcaauacuccaga

SEQ ID NO: 84729 - RNA, 20 nt, Artificial Sequence
  Synthetic
cucuguugcaauacuccaga

SEQ ID NO: 84730 - RNA, 22 nt, Artificial Sequence
  Synthetic
cgcucuguugcaauacuccaga

SEQ ID NO: 84731 - RNA, 23 nt, Artificial Sequence
  Synthetic
ucgcucuguugcaauacuccaga

SEQ ID NO: 84732 - RNA, 24 nt, Artificial Sequence
  Synthetic
aucgcucuguugcaauacuccaga

SEQ ID NO: 84733 - RNA, 18 nt, Artificial Sequence
  Synthetic
aacaacuuaaaaagcaga

SEQ ID NO: 84734 - RNA, 19 nt, Artificial Sequence
  Synthetic
aaacaacuuaaaaagcaga

SEQ ID NO: 84735 - RNA, 20 nt, Artificial Sequence
  Synthetic
caaacaacuuaaaaagcaga

SEQ ID NO: 84736 - RNA, 21 nt, Artificial Sequence
  Synthetic
ccaaacaacuuaaaaagcaga

SEQ ID NO: 84737 - RNA, 23 nt, Artificial Sequence
  Synthetic
agccaaacaacuuaaaaagcaga

SEQ ID NO: 84738 - RNA, 24 nt, Artificial Sequence
  Synthetic
aagccaaacaacuuaaaaagcaga

SEQ ID NO: 84739 - RNA, 18 nt, Artificial Sequence
  Synthetic
auugucaaggaaagcaga

SEQ ID NO: 84740 - RNA, 19 nt, Artificial Sequence
  Synthetic
aauugucaaggaaagcaga

SEQ ID NO: 84741 - RNA, 20 nt, Artificial Sequence
  Synthetic
uaauugucaaggaaagcaga

SEQ ID NO: 84742 - RNA, 21 nt, Artificial Sequence
  Synthetic
auaauugucaaggaaagcaga

SEQ ID NO: 84743 - RNA, 22 nt, Artificial Sequence
  Synthetic
uauaauugucaaggaaagcaga

SEQ ID NO: 84744 - RNA, 24 nt, Artificial Sequence
  Synthetic
uguauaauugucaaggaaagcaga

SEQ ID NO: 84745 - RNA, 18 nt, Artificial Sequence
  Synthetic
ugaaagugguaaagcaga

SEQ ID NO: 84746 - RNA, 20 nt, Artificial Sequence
  Synthetic
agugaaagugguaaagcaga

SEQ ID NO: 84747 - RNA, 21 nt, Artificial Sequence
  Synthetic
uagugaaagugguaaagcaga

SEQ ID NO: 84748 - RNA, 22 nt, Artificial Sequence
  Synthetic
uuagugaaagugguaaagcaga

SEQ ID NO: 84749 - RNA, 18 nt, Artificial Sequence
  Synthetic
cuugcugcacacagcaga

SEQ ID NO: 84750 - RNA, 19 nt, Artificial Sequence
  Synthetic
ccuugcugcacacagcaga

SEQ ID NO: 84751 - RNA, 20 nt, Artificial Sequence
  Synthetic
uccuugcugcacacagcaga

SEQ ID NO: 84752 - RNA, 21 nt, Artificial Sequence
  Synthetic
cuccuugcugcacacagcaga

SEQ ID NO: 84753 - RNA, 22 nt, Artificial Sequence
  Synthetic
acuccuugcugcacacagcaga

SEQ ID NO: 84754 - RNA, 23 nt, Artificial Sequence
  Synthetic
cacuccuugcugcacacagcaga

SEQ ID NO: 84755 - RNA, 24 nt, Artificial Sequence
  Synthetic
ccacuccuugcugcacacagcaga

SEQ ID NO: 84756 - RNA, 18 nt, Artificial Sequence
  Synthetic
uguccauugauuagcaga

SEQ ID NO: 84757 - RNA, 19 nt, Artificial Sequence
  Synthetic
auguccauugauuagcaga

SEQ ID NO: 84758 - RNA, 20 nt, Artificial Sequence
  Synthetic
aauguccauugauuagcaga

SEQ ID NO: 84759 - RNA, 21 nt, Artificial Sequence
  Synthetic
caauguccauugauuagcaga

SEQ ID NO: 84760 - RNA, 22 nt, Artificial Sequence
  Synthetic
ccaauguccauugauuagcaga

SEQ ID NO: 84761 - RNA, 23 nt, Artificial Sequence
  Synthetic
cccaauguccauugauuagcaga

SEQ ID NO: 84762 - RNA, 18 nt, Artificial Sequence
  Synthetic
aaggggauggacggcaga

SEQ ID NO: 84763 - RNA, 19 nt, Artificial Sequence
  Synthetic
uaaggggauggacggcaga

SEQ ID NO: 84764 - RNA, 20 nt, Artificial Sequence
  Synthetic
auaaggggauggacggcaga

SEQ ID NO: 84765 - RNA, 21 nt, Artificial Sequence
  Synthetic
uauaaggggauggacggcaga

SEQ ID NO: 84766 - RNA, 22 nt, Artificial Sequence
  Synthetic
uuauaaggggauggacggcaga

SEQ ID NO: 84767 - RNA, 23 nt, Artificial Sequence
  Synthetic
auuauaaggggauggacggcaga

SEQ ID NO: 84768 - RNA, 24 nt, Artificial Sequence
  Synthetic
cauuauaaggggauggacggcaga

SEQ ID NO: 84769 - RNA, 18 nt, Artificial Sequence
  Synthetic
accucagucauuugcaga

SEQ ID NO: 84770 - RNA, 19 nt, Artificial Sequence
  Synthetic
aaccucagucauuugcaga

SEQ ID NO: 84771 - RNA, 20 nt, Artificial Sequence
  Synthetic
aaaccucagucauuugcaga

SEQ ID NO: 84772 - RNA, 21 nt, Artificial Sequence
  Synthetic
caaaccucagucauuugcaga

SEQ ID NO: 84773 - RNA, 22 nt, Artificial Sequence
  Synthetic
ccaaaccucagucauuugcaga

SEQ ID NO: 84774 - RNA, 24 nt, Artificial Sequence
  Synthetic
ugccaaaccucagucauuugcaga

SEQ ID NO: 84775 - RNA, 21 nt, Artificial Sequence
  Synthetic
uaauuauauuuuauuugcaga

SEQ ID NO: 84776 - RNA, 23 nt, Artificial Sequence
  Synthetic
uguaauuauauuuuauuugcaga

SEQ ID NO: 84777 - RNA, 24 nt, Artificial Sequence
  Synthetic
auguaauuauauuuuauuugcaga

SEQ ID NO: 84778 - RNA, 18 nt, Artificial Sequence
  Synthetic
cauucacaggacaucaga

SEQ ID NO: 84779 - RNA, 19 nt, Artificial Sequence
  Synthetic
ucauucacaggacaucaga

SEQ ID NO: 84780 - RNA, 20 nt, Artificial Sequence
  Synthetic
aucauucacaggacaucaga

SEQ ID NO: 84781 - RNA, 18 nt, Artificial Sequence
  Synthetic
cccugcauugccaucaga

SEQ ID NO: 84782 - RNA, 19 nt, Artificial Sequence
  Synthetic
ccccugcauugccaucaga

SEQ ID NO: 84783 - RNA, 20 nt, Artificial Sequence
  Synthetic
accccugcauugccaucaga

SEQ ID NO: 84784 - RNA, 21 nt, Artificial Sequence
  Synthetic
aaccccugcauugccaucaga

SEQ ID NO: 84785 - RNA, 22 nt, Artificial Sequence
  Synthetic
caaccccugcauugccaucaga

SEQ ID NO: 84786 - RNA, 23 nt, Artificial Sequence
  Synthetic
ucaaccccugcauugccaucaga

SEQ ID NO: 84787 - RNA, 24 nt, Artificial Sequence
  Synthetic
uucaaccccugcauugccaucaga

SEQ ID NO: 84788 - RNA, 18 nt, Artificial Sequence
  Synthetic
ugaauuagaguuaucaga

SEQ ID NO: 84789 - RNA, 21 nt, Artificial Sequence
  Synthetic
aggugaauuagaguuaucaga

SEQ ID NO: 84790 - RNA, 22 nt, Artificial Sequence
  Synthetic
caggugaauuagaguuaucaga

SEQ ID NO: 84791 - RNA, 23 nt, Artificial Sequence
  Synthetic
ucaggugaauuagaguuaucaga

SEQ ID NO: 84792 - RNA, 24 nt, Artificial Sequence
  Synthetic
uucaggugaauuagaguuaucaga

SEQ ID NO: 84793 - RNA, 18 nt, Artificial Sequence
  Synthetic
ucaaaguuaccacucaga

SEQ ID NO: 84794 - RNA, 19 nt, Artificial Sequence
  Synthetic
uucaaaguuaccacucaga

SEQ ID NO: 84795 - RNA, 20 nt, Artificial Sequence
  Synthetic
uuucaaaguuaccacucaga

SEQ ID NO: 84796 - RNA, 21 nt, Artificial Sequence
  Synthetic
uuuucaaaguuaccacucaga

SEQ ID NO: 84797 - RNA, 22 nt, Artificial Sequence
  Synthetic
cuuuucaaaguuaccacucaga

SEQ ID NO: 84798 - RNA, 23 nt, Artificial Sequence
  Synthetic
ccuuuucaaaguuaccacucaga

SEQ ID NO: 84799 - RNA, 24 nt, Artificial Sequence
  Synthetic
cccuuuucaaaguuaccacucaga

SEQ ID NO: 84800 - RNA, 18 nt, Artificial Sequence
  Synthetic
auaacuccagaccucaga

SEQ ID NO: 84801 - RNA, 22 nt, Artificial Sequence
  Synthetic
ugggauaacuccagaccucaga

SEQ ID NO: 84802 - RNA, 23 nt, Artificial Sequence
  Synthetic
cugggauaacuccagaccucaga

SEQ ID NO: 84803 - RNA, 24 nt, Artificial Sequence
  Synthetic
acugggauaacuccagaccucaga

SEQ ID NO: 84804 - RNA, 18 nt, Artificial Sequence
  Synthetic
auaucuuucuugcucaga

SEQ ID NO: 84805 - RNA, 19 nt, Artificial Sequence
  Synthetic
aauaucuuucuugcucaga

SEQ ID NO: 84806 - RNA, 20 nt, Artificial Sequence
  Synthetic
aaauaucuuucuugcucaga

SEQ ID NO: 84807 - RNA, 21 nt, Artificial Sequence
  Synthetic
caaauaucuuucuugcucaga

SEQ ID NO: 84808 - RNA, 22 nt, Artificial Sequence
  Synthetic
ucaaauaucuuucuugcucaga

SEQ ID NO: 84809 - RNA, 23 nt, Artificial Sequence
  Synthetic
cucaaauaucuuucuugcucaga

SEQ ID NO: 84810 - RNA, 24 nt, Artificial Sequence
  Synthetic
ucucaaauaucuuucuugcucaga

SEQ ID NO: 84811 - RNA, 18 nt, Artificial Sequence
  Synthetic
ccaacaugaagagucaga

SEQ ID NO: 84812 - RNA, 20 nt, Artificial Sequence
  Synthetic
agccaacaugaagagucaga

SEQ ID NO: 84813 - RNA, 21 nt, Artificial Sequence
  Synthetic
aagccaacaugaagagucaga

SEQ ID NO: 84814 - RNA, 22 nt, Artificial Sequence
  Synthetic
aaagccaacaugaagagucaga

SEQ ID NO: 84815 - RNA, 23 nt, Artificial Sequence
  Synthetic
aaaagccaacaugaagagucaga

SEQ ID NO: 84816 - RNA, 24 nt, Artificial Sequence
  Synthetic
caaaagccaacaugaagagucaga

SEQ ID NO: 84817 - RNA, 18 nt, Artificial Sequence
  Synthetic
aagaacaggcaggucaga

SEQ ID NO: 84818 - RNA, 20 nt, Artificial Sequence
  Synthetic
ugaagaacaggcaggucaga

SEQ ID NO: 84819 - RNA, 21 nt, Artificial Sequence
  Synthetic
cugaagaacaggcaggucaga

SEQ ID NO: 84820 - RNA, 22 nt, Artificial Sequence
  Synthetic
ccugaagaacaggcaggucaga

SEQ ID NO: 84821 - RNA, 23 nt, Artificial Sequence
  Synthetic
accugaagaacaggcaggucaga

SEQ ID NO: 84822 - RNA, 18 nt, Artificial Sequence
  Synthetic
agagaggggucugucaga

SEQ ID NO: 84823 - RNA, 19 nt, Artificial Sequence
  Synthetic
aagagaggggucugucaga

SEQ ID NO: 84824 - RNA, 21 nt, Artificial Sequence
  Synthetic
ugaagagaggggucugucaga

SEQ ID NO: 84825 - RNA, 22 nt, Artificial Sequence
  Synthetic
augaagagaggggucugucaga

SEQ ID NO: 84826 - RNA, 23 nt, Artificial Sequence
  Synthetic
aaugaagagaggggucugucaga

SEQ ID NO: 84827 - RNA, 18 nt, Artificial Sequence
  Synthetic
aguguuuuaauugucaga

SEQ ID NO: 84828 - RNA, 19 nt, Artificial Sequence
  Synthetic
uaguguuuuaauugucaga

SEQ ID NO: 84829 - RNA, 20 nt, Artificial Sequence
  Synthetic
auaguguuuuaauugucaga

SEQ ID NO: 84830 - RNA, 21 nt, Artificial Sequence
  Synthetic
aauaguguuuuaauugucaga

SEQ ID NO: 84831 - RNA, 22 nt, Artificial Sequence
  Synthetic
aaauaguguuuuaauugucaga

SEQ ID NO: 84832 - RNA, 23 nt, Artificial Sequence
  Synthetic
aaaauaguguuuuaauugucaga

SEQ ID NO: 84833 - RNA, 24 nt, Artificial Sequence
  Synthetic
aaaaauaguguuuuaauugucaga

SEQ ID NO: 84834 - RNA, 18 nt, Artificial Sequence
  Synthetic
uuaccucugacauucaga

SEQ ID NO: 84835 - RNA, 19 nt, Artificial Sequence
  Synthetic
uuuaccucugacauucaga

SEQ ID NO: 84836 - RNA, 20 nt, Artificial Sequence
  Synthetic
uuuuaccucugacauucaga

SEQ ID NO: 84837 - RNA, 22 nt, Artificial Sequence
  Synthetic
uguuuuaccucugacauucaga

SEQ ID NO: 84838 - RNA, 23 nt, Artificial Sequence
  Synthetic
cuguuuuaccucugacauucaga

SEQ ID NO: 84839 - RNA, 24 nt, Artificial Sequence
  Synthetic
acuguuuuaccucugacauucaga

SEQ ID NO: 84840 - RNA, 18 nt, Artificial Sequence
  Synthetic
uuggagagacccuucaga

SEQ ID NO: 84841 - RNA, 19 nt, Artificial Sequence
  Synthetic
cuuggagagacccuucaga

SEQ ID NO: 84842 - RNA, 23 nt, Artificial Sequence
  Synthetic
ugggcuuggagagacccuucaga

SEQ ID NO: 84843 - RNA, 18 nt, Artificial Sequence
  Synthetic
auaccguguacguucaga

SEQ ID NO: 84844 - RNA, 21 nt, Artificial Sequence
  Synthetic
uggauaccguguacguucaga

SEQ ID NO: 84845 - RNA, 22 nt, Artificial Sequence
  Synthetic
cuggauaccguguacguucaga

SEQ ID NO: 84846 - RNA, 23 nt, Artificial Sequence
  Synthetic
acuggauaccguguacguucaga

SEQ ID NO: 84847 - RNA, 18 nt, Artificial Sequence
  Synthetic
uauauacagucuuucaga

SEQ ID NO: 84848 - RNA, 19 nt, Artificial Sequence
  Synthetic
uuauauacagucuuucaga

SEQ ID NO: 84849 - RNA, 20 nt, Artificial Sequence
  Synthetic
cuuauauacagucuuucaga

SEQ ID NO: 84850 - RNA, 21 nt, Artificial Sequence
  Synthetic
ucuuauauacagucuuucaga

SEQ ID NO: 84851 - RNA, 22 nt, Artificial Sequence
  Synthetic
aucuuauauacagucuuucaga

SEQ ID NO: 84852 - RNA, 23 nt, Artificial Sequence
  Synthetic
uaucuuauauacagucuuucaga

SEQ ID NO: 84853 - RNA, 24 nt, Artificial Sequence
  Synthetic
uuaucuuauauacagucuuucaga

SEQ ID NO: 84854 - RNA, 18 nt, Artificial Sequence
  Synthetic
aaucuaaggacaaagaga

SEQ ID NO: 84855 - RNA, 19 nt, Artificial Sequence
  Synthetic
uaaucuaaggacaaagaga

SEQ ID NO: 84856 - RNA, 20 nt, Artificial Sequence
  Synthetic
uuaaucuaaggacaaagaga

SEQ ID NO: 84857 - RNA, 21 nt, Artificial Sequence
  Synthetic
auuaaucuaaggacaaagaga

SEQ ID NO: 84858 - RNA, 22 nt, Artificial Sequence
  Synthetic
aauuaaucuaaggacaaagaga

SEQ ID NO: 84859 - RNA, 23 nt, Artificial Sequence
  Synthetic
caauuaaucuaaggacaaagaga

SEQ ID NO: 84860 - RNA, 21 nt, Artificial Sequence
  Synthetic
uagauuuuuaugagaaagaga

SEQ ID NO: 84861 - RNA, 22 nt, Artificial Sequence
  Synthetic
auagauuuuuaugagaaagaga

SEQ ID NO: 84862 - RNA, 23 nt, Artificial Sequence
  Synthetic
uauagauuuuuaugagaaagaga

SEQ ID NO: 84863 - RNA, 24 nt, Artificial Sequence
  Synthetic
cuauagauuuuuaugagaaagaga

SEQ ID NO: 84864 - RNA, 21 nt, Artificial Sequence
  Synthetic
ugccaaaggaggggaaagaga

SEQ ID NO: 84865 - RNA, 22 nt, Artificial Sequence
  Synthetic
uugccaaaggaggggaaagaga

SEQ ID NO: 84866 - RNA, 18 nt, Artificial Sequence
  Synthetic
acaauagggauaaagaga

SEQ ID NO: 84867 - RNA, 20 nt, Artificial Sequence
  Synthetic
ugacaauagggauaaagaga

SEQ ID NO: 84868 - RNA, 19 nt, Artificial Sequence
  Synthetic
agguaguucaaacaagaga

SEQ ID NO: 84869 - RNA, 20 nt, Artificial Sequence
  Synthetic
cagguaguucaaacaagaga

SEQ ID NO: 84870 - RNA, 21 nt, Artificial Sequence
  Synthetic
acagguaguucaaacaagaga

SEQ ID NO: 84871 - RNA, 22 nt, Artificial Sequence
  Synthetic
aacagguaguucaaacaagaga

SEQ ID NO: 84872 - RNA, 20 nt, Artificial Sequence
  Synthetic
aggacauggcugacaagaga

SEQ ID NO: 84873 - RNA, 21 nt, Artificial Sequence
  Synthetic
uaggacauggcugacaagaga

SEQ ID NO: 84874 - RNA, 22 nt, Artificial Sequence
  Synthetic
uuaggacauggcugacaagaga

SEQ ID NO: 84875 - RNA, 23 nt, Artificial Sequence
  Synthetic
auuaggacauggcugacaagaga

SEQ ID NO: 84876 - RNA, 18 nt, Artificial Sequence
  Synthetic
uugugugcauucaagaga

SEQ ID NO: 84877 - RNA, 19 nt, Artificial Sequence
  Synthetic
uuugugugcauucaagaga

SEQ ID NO: 84878 - RNA, 21 nt, Artificial Sequence
  Synthetic
uguuugugugcauucaagaga

SEQ ID NO: 84879 - RNA, 23 nt, Artificial Sequence
  Synthetic
uguguuugugugcauucaagaga

SEQ ID NO: 84880 - RNA, 24 nt, Artificial Sequence
  Synthetic
uuguguuugugugcauucaagaga

SEQ ID NO: 84881 - RNA, 18 nt, Artificial Sequence
  Synthetic
aaaccauuuaagaagaga

SEQ ID NO: 84882 - RNA, 19 nt, Artificial Sequence
  Synthetic
caaaccauuuaagaagaga

SEQ ID NO: 84883 - RNA, 20 nt, Artificial Sequence
  Synthetic
ccaaaccauuuaagaagaga

SEQ ID NO: 84884 - RNA, 21 nt, Artificial Sequence
  Synthetic
accaaaccauuuaagaagaga

SEQ ID NO: 84885 - RNA, 22 nt, Artificial Sequence
  Synthetic
aaccaaaccauuuaagaagaga

SEQ ID NO: 84886 - RNA, 23 nt, Artificial Sequence
  Synthetic
aaaccaaaccauuuaagaagaga

SEQ ID NO: 84887 - RNA, 24 nt, Artificial Sequence
  Synthetic
aaaaccaaaccauuuaagaagaga

SEQ ID NO: 84888 - RNA, 19 nt, Artificial Sequence
  Synthetic
cgguuucccaaauaagaga

SEQ ID NO: 84889 - RNA, 20 nt, Artificial Sequence
  Synthetic
ucgguuucccaaauaagaga

SEQ ID NO: 84890 - RNA, 21 nt, Artificial Sequence
  Synthetic
uucgguuucccaaauaagaga

SEQ ID NO: 84891 - RNA, 22 nt, Artificial Sequence
  Synthetic
uuucgguuucccaaauaagaga

SEQ ID NO: 84892 - RNA, 23 nt, Artificial Sequence
  Synthetic
auuucgguuucccaaauaagaga

SEQ ID NO: 84893 - RNA, 24 nt, Artificial Sequence
  Synthetic
uauuucgguuucccaaauaagaga

SEQ ID NO: 84894 - RNA, 21 nt, Artificial Sequence
  Synthetic
caaaacugaggcucacagaga

SEQ ID NO: 84895 - RNA, 22 nt, Artificial Sequence
  Synthetic
acaaaacugaggcucacagaga

SEQ ID NO: 84896 - RNA, 24 nt, Artificial Sequence
  Synthetic
agacaaaacugaggcucacagaga

SEQ ID NO: 84897 - RNA, 22 nt, Artificial Sequence
  Synthetic
agaggugaaaggcagccagaga

SEQ ID NO: 84898 - RNA, 23 nt, Artificial Sequence
  Synthetic
aagaggugaaaggcagccagaga

SEQ ID NO: 84899 - RNA, 19 nt, Artificial Sequence
  Synthetic
uggacgugcagugcagaga

SEQ ID NO: 84900 - RNA, 20 nt, Artificial Sequence
  Synthetic
cuggacgugcagugcagaga

SEQ ID NO: 84901 - RNA, 21 nt, Artificial Sequence
  Synthetic
acuggacgugcagugcagaga

SEQ ID NO: 84902 - RNA, 22 nt, Artificial Sequence
  Synthetic
cacuggacgugcagugcagaga

SEQ ID NO: 84903 - RNA, 24 nt, Artificial Sequence
  Synthetic
agcacuggacgugcagugcagaga

SEQ ID NO: 84904 - RNA, 18 nt, Artificial Sequence
  Synthetic
ccauggcgggaagagaga

SEQ ID NO: 84905 - RNA, 19 nt, Artificial Sequence
  Synthetic
cccauggcgggaagagaga

SEQ ID NO: 84906 - RNA, 20 nt, Artificial Sequence
  Synthetic
acccauggcgggaagagaga

SEQ ID NO: 84907 - RNA, 22 nt, Artificial Sequence
  Synthetic
agacccauggcgggaagagaga

SEQ ID NO: 84908 - RNA, 23 nt, Artificial Sequence
  Synthetic
aagacccauggcgggaagagaga

SEQ ID NO: 84909 - RNA, 18 nt, Artificial Sequence
  Synthetic
acugcaacagcagagaga

SEQ ID NO: 84910 - RNA, 19 nt, Artificial Sequence
  Synthetic
cacugcaacagcagagaga

SEQ ID NO: 84911 - RNA, 21 nt, Artificial Sequence
  Synthetic
agcacugcaacagcagagaga

SEQ ID NO: 84912 - RNA, 22 nt, Artificial Sequence
  Synthetic
aagcacugcaacagcagagaga

SEQ ID NO: 84913 - RNA, 23 nt, Artificial Sequence
  Synthetic
uaagcacugcaacagcagagaga

SEQ ID NO: 84914 - RNA, 24 nt, Artificial Sequence
  Synthetic
uuaagcacugcaacagcagagaga

SEQ ID NO: 84915 - RNA, 18 nt, Artificial Sequence
  Synthetic
cagguagacaaggagaga

SEQ ID NO: 84916 - RNA, 19 nt, Artificial Sequence
  Synthetic
ccagguagacaaggagaga

SEQ ID NO: 84917 - RNA, 20 nt, Artificial Sequence
  Synthetic
uccagguagacaaggagaga

SEQ ID NO: 84918 - RNA, 21 nt, Artificial Sequence
  Synthetic
uuccagguagacaaggagaga

SEQ ID NO: 84919 - RNA, 22 nt, Artificial Sequence
  Synthetic
uuuccagguagacaaggagaga

SEQ ID NO: 84920 - RNA, 23 nt, Artificial Sequence
  Synthetic
uuuuccagguagacaaggagaga

SEQ ID NO: 84921 - RNA, 24 nt, Artificial Sequence
  Synthetic
auuuuccagguagacaaggagaga

SEQ ID NO: 84922 - RNA, 21 nt, Artificial Sequence
  Synthetic
aaaaauacugaagaugagaga

SEQ ID NO: 84923 - RNA, 22 nt, Artificial Sequence
  Synthetic
uaaaaauacugaagaugagaga

SEQ ID NO: 84924 - RNA, 23 nt, Artificial Sequence
  Synthetic
auaaaaauacugaagaugagaga

SEQ ID NO: 84925 - RNA, 24 nt, Artificial Sequence
  Synthetic
cauaaaaauacugaagaugagaga

SEQ ID NO: 84926 - RNA, 21 nt, Artificial Sequence
  Synthetic
cacagaccucauccugagaga

SEQ ID NO: 84927 - RNA, 22 nt, Artificial Sequence
  Synthetic
ucacagaccucauccugagaga

SEQ ID NO: 84928 - RNA, 23 nt, Artificial Sequence
  Synthetic
aucacagaccucauccugagaga

SEQ ID NO: 84929 - RNA, 24 nt, Artificial Sequence
  Synthetic
aaucacagaccucauccugagaga

SEQ ID NO: 84930 - RNA, 18 nt, Artificial Sequence
  Synthetic
uaaugggauucugagaga

SEQ ID NO: 84931 - RNA, 19 nt, Artificial Sequence
  Synthetic
cuaaugggauucugagaga

SEQ ID NO: 84932 - RNA, 20 nt, Artificial Sequence
  Synthetic
ccuaaugggauucugagaga

SEQ ID NO: 84933 - RNA, 21 nt, Artificial Sequence
  Synthetic
cccuaaugggauucugagaga

SEQ ID NO: 84934 - RNA, 22 nt, Artificial Sequence
  Synthetic
acccuaaugggauucugagaga

SEQ ID NO: 84935 - RNA, 23 nt, Artificial Sequence
  Synthetic
uacccuaaugggauucugagaga

SEQ ID NO: 84936 - RNA, 24 nt, Artificial Sequence
  Synthetic
cuacccuaaugggauucugagaga

SEQ ID NO: 84937 - RNA, 21 nt, Artificial Sequence
  Synthetic
uacucuuuuuuguaauagaga

SEQ ID NO: 84938 - RNA, 24 nt, Artificial Sequence
  Synthetic
agguacucuuuuuuguaauagaga

SEQ ID NO: 84939 - RNA, 22 nt, Artificial Sequence
  Synthetic
aggacaaagaaagucauagaga

SEQ ID NO: 84940 - RNA, 23 nt, Artificial Sequence
  Synthetic
caggacaaagaaagucauagaga

SEQ ID NO: 84941 - RNA, 24 nt, Artificial Sequence
  Synthetic
ucaggacaaagaaagucauagaga

SEQ ID NO: 84942 - RNA, 21 nt, Artificial Sequence
  Synthetic
ucaaaaccaaaucuauagaga

SEQ ID NO: 84943 - RNA, 22 nt, Artificial Sequence
  Synthetic
aucaaaaccaaaucuauagaga

SEQ ID NO: 84944 - RNA, 23 nt, Artificial Sequence
  Synthetic
aaucaaaaccaaaucuauagaga

SEQ ID NO: 84945 - RNA, 18 nt, Artificial Sequence
  Synthetic
augauagaauacuagaga

SEQ ID NO: 84946 - RNA, 19 nt, Artificial Sequence
  Synthetic
aaugauagaauacuagaga

SEQ ID NO: 84947 - RNA, 21 nt, Artificial Sequence
  Synthetic
agaaugauagaauacuagaga

SEQ ID NO: 84948 - RNA, 22 nt, Artificial Sequence
  Synthetic
uagaaugauagaauacuagaga

SEQ ID NO: 84949 - RNA, 18 nt, Artificial Sequence
  Synthetic
uacaacaaaaucuagaga

SEQ ID NO: 84950 - RNA, 19 nt, Artificial Sequence
  Synthetic
auacaacaaaaucuagaga

SEQ ID NO: 84951 - RNA, 21 nt, Artificial Sequence
  Synthetic
ugauacaacaaaaucuagaga

SEQ ID NO: 84952 - RNA, 23 nt, Artificial Sequence
  Synthetic
agugauacaacaaaaucuagaga

SEQ ID NO: 84953 - RNA, 24 nt, Artificial Sequence
  Synthetic
aagugauacaacaaaaucuagaga

SEQ ID NO: 84954 - RNA, 18 nt, Artificial Sequence
  Synthetic
agacaguugcucuagaga

SEQ ID NO: 84955 - RNA, 19 nt, Artificial Sequence
  Synthetic
cagacaguugcucuagaga

SEQ ID NO: 84956 - RNA, 20 nt, Artificial Sequence
  Synthetic
ucagacaguugcucuagaga

SEQ ID NO: 84957 - RNA, 21 nt, Artificial Sequence
  Synthetic
cucagacaguugcucuagaga

SEQ ID NO: 84958 - RNA, 22 nt, Artificial Sequence
  Synthetic
ccucagacaguugcucuagaga

SEQ ID NO: 84959 - RNA, 23 nt, Artificial Sequence
  Synthetic
cccucagacaguugcucuagaga

SEQ ID NO: 84960 - RNA, 24 nt, Artificial Sequence
  Synthetic
ucccucagacaguugcucuagaga

SEQ ID NO: 84961 - RNA, 18 nt, Artificial Sequence
  Synthetic
aaagggugaugguagaga

SEQ ID NO: 84962 - RNA, 19 nt, Artificial Sequence
  Synthetic
aaaagggugaugguagaga

SEQ ID NO: 84963 - RNA, 20 nt, Artificial Sequence
  Synthetic
caaaagggugaugguagaga

SEQ ID NO: 84964 - RNA, 21 nt, Artificial Sequence
  Synthetic
ucaaaagggugaugguagaga

SEQ ID NO: 84965 - RNA, 22 nt, Artificial Sequence
  Synthetic
aucaaaagggugaugguagaga

SEQ ID NO: 84966 - RNA, 24 nt, Artificial Sequence
  Synthetic
ugaucaaaagggugaugguagaga

SEQ ID NO: 84967 - RNA, 21 nt, Artificial Sequence
  Synthetic
acauacauuuuuauguagaga

SEQ ID NO: 84968 - RNA, 22 nt, Artificial Sequence
  Synthetic
uacauacauuuuuauguagaga

SEQ ID NO: 84969 - RNA, 24 nt, Artificial Sequence
  Synthetic
aguacauacauuuuuauguagaga

SEQ ID NO: 84970 - RNA, 18 nt, Artificial Sequence
  Synthetic
cacagagaagauuagaga

SEQ ID NO: 84971 - RNA, 19 nt, Artificial Sequence
  Synthetic
ucacagagaagauuagaga

SEQ ID NO: 84972 - RNA, 20 nt, Artificial Sequence
  Synthetic
uucacagagaagauuagaga

SEQ ID NO: 84973 - RNA, 21 nt, Artificial Sequence
  Synthetic
auucacagagaagauuagaga

SEQ ID NO: 84974 - RNA, 22 nt, Artificial Sequence
  Synthetic
aauucacagagaagauuagaga

SEQ ID NO: 84975 - RNA, 24 nt, Artificial Sequence
  Synthetic
agaauucacagagaagauuagaga

SEQ ID NO: 84976 - RNA, 18 nt, Artificial Sequence
  Synthetic
aagcagcgaccuuagaga

SEQ ID NO: 84977 - RNA, 19 nt, Artificial Sequence
  Synthetic
uaagcagcgaccuuagaga

SEQ ID NO: 84978 - RNA, 20 nt, Artificial Sequence
  Synthetic
cuaagcagcgaccuuagaga

SEQ ID NO: 84979 - RNA, 21 nt, Artificial Sequence
  Synthetic
acuaagcagcgaccuuagaga

SEQ ID NO: 84980 - RNA, 22 nt, Artificial Sequence
  Synthetic
aacuaagcagcgaccuuagaga

SEQ ID NO: 84981 - RNA, 23 nt, Artificial Sequence
  Synthetic
aaacuaagcagcgaccuuagaga

SEQ ID NO: 84982 - RNA, 18 nt, Artificial Sequence
  Synthetic
agaacaacagguuagaga

SEQ ID NO: 84983 - RNA, 19 nt, Artificial Sequence
  Synthetic
uagaacaacagguuagaga

SEQ ID NO: 84984 - RNA, 23 nt, Artificial Sequence
  Synthetic
aggguagaacaacagguuagaga

SEQ ID NO: 84985 - RNA, 24 nt, Artificial Sequence
  Synthetic
uaggguagaacaacagguuagaga

SEQ ID NO: 84986 - RNA, 19 nt, Artificial Sequence
  Synthetic
agccccaagucggccgaga

SEQ ID NO: 84987 - RNA, 20 nt, Artificial Sequence
  Synthetic
cagccccaagucggccgaga

SEQ ID NO: 84988 - RNA, 21 nt, Artificial Sequence
  Synthetic
ucagccccaagucggccgaga

SEQ ID NO: 84989 - RNA, 22 nt, Artificial Sequence
  Synthetic
cucagccccaagucggccgaga

SEQ ID NO: 84990 - RNA, 23 nt, Artificial Sequence
  Synthetic
acucagccccaagucggccgaga

SEQ ID NO: 84991 - RNA, 24 nt, Artificial Sequence
  Synthetic
aacucagccccaagucggccgaga

SEQ ID NO: 84992 - RNA, 22 nt, Artificial Sequence
  Synthetic
aguaugccuuuuguuuucgaga

SEQ ID NO: 84993 - RNA, 23 nt, Artificial Sequence
  Synthetic
aaguaugccuuuuguuuucgaga

SEQ ID NO: 84994 - RNA, 24 nt, Artificial Sequence
  Synthetic
aaaguaugccuuuuguuuucgaga

SEQ ID NO: 84995 - RNA, 18 nt, Artificial Sequence
  Synthetic
ccgaaacuaguaaggaga

SEQ ID NO: 84996 - RNA, 21 nt, Artificial Sequence
  Synthetic
aggccgaaacuaguaaggaga

SEQ ID NO: 84997 - RNA, 22 nt, Artificial Sequence
  Synthetic
uaggccgaaacuaguaaggaga

SEQ ID NO: 84998 - RNA, 24 nt, Artificial Sequence
  Synthetic
aguaggccgaaacuaguaaggaga

SEQ ID NO: 84999 - RNA, 18 nt, Artificial Sequence
  Synthetic
aauaauuuaggcaggaga

SEQ ID NO: 85000 - RNA, 20 nt, Artificial Sequence
  Synthetic
ugaauaauuuaggcaggaga

SEQ ID NO: 85001 - RNA, 21 nt, Artificial Sequence
  Synthetic
augaauaauuuaggcaggaga

SEQ ID NO: 85002 - RNA, 22 nt, Artificial Sequence
  Synthetic
caugaauaauuuaggcaggaga

SEQ ID NO: 85003 - RNA, 23 nt, Artificial Sequence
  Synthetic
acaugaauaauuuaggcaggaga

SEQ ID NO: 85004 - RNA, 24 nt, Artificial Sequence
  Synthetic
aacaugaauaauuuaggcaggaga

SEQ ID NO: 85005 - RNA, 18 nt, Artificial Sequence
  Synthetic
aacaaggcucagaggaga

SEQ ID NO: 85006 - RNA, 20 nt, Artificial Sequence
  Synthetic
agaacaaggcucagaggaga

SEQ ID NO: 85007 - RNA, 21 nt, Artificial Sequence
  Synthetic
cagaacaaggcucagaggaga

SEQ ID NO: 85008 - RNA, 22 nt, Artificial Sequence
  Synthetic
acagaacaaggcucagaggaga

SEQ ID NO: 85009 - RNA, 24 nt, Artificial Sequence
  Synthetic
ugacagaacaaggcucagaggaga

SEQ ID NO: 85010 - RNA, 18 nt, Artificial Sequence
  Synthetic
acucaucucaggaggaga

SEQ ID NO: 85011 - RNA, 19 nt, Artificial Sequence
  Synthetic
uacucaucucaggaggaga

SEQ ID NO: 85012 - RNA, 20 nt, Artificial Sequence
  Synthetic
cuacucaucucaggaggaga

SEQ ID NO: 85013 - RNA, 21 nt, Artificial Sequence
  Synthetic
ccuacucaucucaggaggaga

SEQ ID NO: 85014 - RNA, 23 nt, Artificial Sequence
  Synthetic
agccuacucaucucaggaggaga

SEQ ID NO: 85015 - RNA, 24 nt, Artificial Sequence
  Synthetic
uagccuacucaucucaggaggaga

SEQ ID NO: 85016 - RNA, 18 nt, Artificial Sequence
  Synthetic
aauaaccuuaaagggaga

SEQ ID NO: 85017 - RNA, 19 nt, Artificial Sequence
  Synthetic
caauaaccuuaaagggaga

SEQ ID NO: 85018 - RNA, 21 nt, Artificial Sequence
  Synthetic
ugcaauaaccuuaaagggaga

SEQ ID NO: 85019 - RNA, 22 nt, Artificial Sequence
  Synthetic
augcaauaaccuuaaagggaga

SEQ ID NO: 85020 - RNA, 23 nt, Artificial Sequence
  Synthetic
aaugcaauaaccuuaaagggaga

SEQ ID NO: 85021 - RNA, 24 nt, Artificial Sequence
  Synthetic
aaaugcaauaaccuuaaagggaga

SEQ ID NO: 85022 - RNA, 19 nt, Artificial Sequence
  Synthetic
ugcucucucagcagggaga

SEQ ID NO: 85023 - RNA, 20 nt, Artificial Sequence
  Synthetic
augcucucucagcagggaga

SEQ ID NO: 85024 - RNA, 21 nt, Artificial Sequence
  Synthetic
uaugcucucucagcagggaga

SEQ ID NO: 85025 - RNA, 22 nt, Artificial Sequence
  Synthetic
auaugcucucucagcagggaga

SEQ ID NO: 85026 - RNA, 18 nt, Artificial Sequence
  Synthetic
aggaaguagaaugggaga

SEQ ID NO: 85027 - RNA, 19 nt, Artificial Sequence
  Synthetic
caggaaguagaaugggaga

SEQ ID NO: 85028 - RNA, 20 nt, Artificial Sequence
  Synthetic
ucaggaaguagaaugggaga

SEQ ID NO: 85029 - RNA, 21 nt, Artificial Sequence
  Synthetic
uucaggaaguagaaugggaga

SEQ ID NO: 85030 - RNA, 22 nt, Artificial Sequence
  Synthetic
auucaggaaguagaaugggaga

SEQ ID NO: 85031 - RNA, 24 nt, Artificial Sequence
  Synthetic
ugauucaggaaguagaaugggaga

SEQ ID NO: 85032 - RNA, 18 nt, Artificial Sequence
  Synthetic
uaaugaccuaaugggaga

SEQ ID NO: 85033 - RNA, 19 nt, Artificial Sequence
  Synthetic
auaaugaccuaaugggaga

SEQ ID NO: 85034 - RNA, 20 nt, Artificial Sequence
  Synthetic
aauaaugaccuaaugggaga

SEQ ID NO: 85035 - RNA, 21 nt, Artificial Sequence
  Synthetic
uaauaaugaccuaaugggaga

SEQ ID NO: 85036 - RNA, 22 nt, Artificial Sequence
  Synthetic
uuaauaaugaccuaaugggaga

SEQ ID NO: 85037 - RNA, 23 nt, Artificial Sequence
  Synthetic
auuaauaaugaccuaaugggaga

SEQ ID NO: 85038 - RNA, 24 nt, Artificial Sequence
  Synthetic
aauuaauaaugaccuaaugggaga

SEQ ID NO: 85039 - RNA, 19 nt, Artificial Sequence
  Synthetic
aggcuaagagguauggaga

SEQ ID NO: 85040 - RNA, 20 nt, Artificial Sequence
  Synthetic
caggcuaagagguauggaga

SEQ ID NO: 85041 - RNA, 21 nt, Artificial Sequence
  Synthetic
ccaggcuaagagguauggaga

SEQ ID NO: 85042 - RNA, 23 nt, Artificial Sequence
  Synthetic
ugccaggcuaagagguauggaga

SEQ ID NO: 85043 - RNA, 24 nt, Artificial Sequence
  Synthetic
augccaggcuaagagguauggaga

SEQ ID NO: 85044 - RNA, 24 nt, Artificial Sequence
  Synthetic
ugggacauggugagaaacuggaga

SEQ ID NO: 85045 - RNA, 21 nt, Artificial Sequence
  Synthetic
agggccucugucuccuggaga

SEQ ID NO: 85046 - RNA, 24 nt, Artificial Sequence
  Synthetic
uggagggccucugucuccuggaga

SEQ ID NO: 85047 - RNA, 18 nt, Artificial Sequence
  Synthetic
aauagcauucuguggaga

SEQ ID NO: 85048 - RNA, 19 nt, Artificial Sequence
  Synthetic
uaauagcauucuguggaga

SEQ ID NO: 85049 - RNA, 20 nt, Artificial Sequence
  Synthetic
auaauagcauucuguggaga

SEQ ID NO: 85050 - RNA, 21 nt, Artificial Sequence
  Synthetic
uauaauagcauucuguggaga

SEQ ID NO: 85051 - RNA, 22 nt, Artificial Sequence
  Synthetic
cuauaauagcauucuguggaga

SEQ ID NO: 85052 - RNA, 23 nt, Artificial Sequence
  Synthetic
acuauaauagcauucuguggaga

SEQ ID NO: 85053 - RNA, 24 nt, Artificial Sequence
  Synthetic
uacuauaauagcauucuguggaga

SEQ ID NO: 85054 - RNA, 21 nt, Artificial Sequence
  Synthetic
aauauuaauuuauaaaugaga

SEQ ID NO: 85055 - RNA, 22 nt, Artificial Sequence
  Synthetic
caauauuaauuuauaaaugaga

SEQ ID NO: 85056 - RNA, 23 nt, Artificial Sequence
  Synthetic
acaauauuaauuuauaaaugaga

SEQ ID NO: 85057 - RNA, 24 nt, Artificial Sequence
  Synthetic
aacaauauuaauuuauaaaugaga

SEQ ID NO: 85058 - RNA, 21 nt, Artificial Sequence
  Synthetic
ugacugcuuuuccccaugaga

SEQ ID NO: 85059 - RNA, 22 nt, Artificial Sequence
  Synthetic
uugacugcuuuuccccaugaga

SEQ ID NO: 85060 - RNA, 24 nt, Artificial Sequence
  Synthetic
uguugacugcuuuuccccaugaga

SEQ ID NO: 85061 - RNA, 22 nt, Artificial Sequence
  Synthetic
ugggagacagaagagcaugaga

SEQ ID NO: 85062 - RNA, 24 nt, Artificial Sequence
  Synthetic
agugggagacagaagagcaugaga

SEQ ID NO: 85063 - RNA, 21 nt, Artificial Sequence
  Synthetic
aaacaaaguguuuucaugaga

SEQ ID NO: 85064 - RNA, 22 nt, Artificial Sequence
  Synthetic
aaaacaaaguguuuucaugaga

SEQ ID NO: 85065 - RNA, 23 nt, Artificial Sequence
  Synthetic
caaaacaaaguguuuucaugaga

SEQ ID NO: 85066 - RNA, 21 nt, Artificial Sequence
  Synthetic
uaaacaaagcaggagaugaga

SEQ ID NO: 85067 - RNA, 22 nt, Artificial Sequence
  Synthetic
auaaacaaagcaggagaugaga

SEQ ID NO: 85068 - RNA, 23 nt, Artificial Sequence
  Synthetic
uauaaacaaagcaggagaugaga

SEQ ID NO: 85069 - RNA, 24 nt, Artificial Sequence
  Synthetic
uuauaaacaaagcaggagaugaga

SEQ ID NO: 85070 - RNA, 18 nt, Artificial Sequence
  Synthetic
uugaauuaaauuaugaga

SEQ ID NO: 85071 - RNA, 19 nt, Artificial Sequence
  Synthetic
cuugaauuaaauuaugaga

SEQ ID NO: 85072 - RNA, 20 nt, Artificial Sequence
  Synthetic
ucuugaauuaaauuaugaga

SEQ ID NO: 85073 - RNA, 21 nt, Artificial Sequence
  Synthetic
uucuugaauuaaauuaugaga

SEQ ID NO: 85074 - RNA, 22 nt, Artificial Sequence
  Synthetic
uuucuugaauuaaauuaugaga

SEQ ID NO: 85075 - RNA, 23 nt, Artificial Sequence
  Synthetic
uuuucuugaauuaaauuaugaga

SEQ ID NO: 85076 - RNA, 24 nt, Artificial Sequence
  Synthetic
cuuuucuugaauuaaauuaugaga

SEQ ID NO: 85077 - RNA, 18 nt, Artificial Sequence
  Synthetic
ucucuuauauaacugaga

SEQ ID NO: 85078 - RNA, 19 nt, Artificial Sequence
  Synthetic
aucucuuauauaacugaga

SEQ ID NO: 85079 - RNA, 20 nt, Artificial Sequence
  Synthetic
aaucucuuauauaacugaga

SEQ ID NO: 85080 - RNA, 21 nt, Artificial Sequence
  Synthetic
uaaucucuuauauaacugaga

SEQ ID NO: 85081 - RNA, 22 nt, Artificial Sequence
  Synthetic
auaaucucuuauauaacugaga

SEQ ID NO: 85082 - RNA, 23 nt, Artificial Sequence
  Synthetic
uauaaucucuuauauaacugaga

SEQ ID NO: 85083 - RNA, 24 nt, Artificial Sequence
  Synthetic
uuauaaucucuuauauaacugaga

SEQ ID NO: 85084 - RNA, 18 nt, Artificial Sequence
  Synthetic
uguacaaaaauucugaga

SEQ ID NO: 85085 - RNA, 20 nt, Artificial Sequence
  Synthetic
aguguacaaaaauucugaga

SEQ ID NO: 85086 - RNA, 21 nt, Artificial Sequence
  Synthetic
aaguguacaaaaauucugaga

SEQ ID NO: 85087 - RNA, 21 nt, Artificial Sequence
  Synthetic
caacaauucaaaaaagugaga

SEQ ID NO: 85088 - RNA, 22 nt, Artificial Sequence
  Synthetic
ucaacaauucaaaaaagugaga

SEQ ID NO: 85089 - RNA, 23 nt, Artificial Sequence
  Synthetic
uucaacaauucaaaaaagugaga

SEQ ID NO: 85090 - RNA, 24 nt, Artificial Sequence
  Synthetic
uuucaacaauucaaaaaagugaga

SEQ ID NO: 85091 - RNA, 19 nt, Artificial Sequence
  Synthetic
agugcuuuucugagugaga

SEQ ID NO: 85092 - RNA, 20 nt, Artificial Sequence
  Synthetic
aagugcuuuucugagugaga

SEQ ID NO: 85093 - RNA, 21 nt, Artificial Sequence
  Synthetic
aaagugcuuuucugagugaga

SEQ ID NO: 85094 - RNA, 22 nt, Artificial Sequence
  Synthetic
caaagugcuuuucugagugaga

SEQ ID NO: 85095 - RNA, 23 nt, Artificial Sequence
  Synthetic
ccaaagugcuuuucugagugaga

SEQ ID NO: 85096 - RNA, 24 nt, Artificial Sequence
  Synthetic
uccaaagugcuuuucugagugaga

SEQ ID NO: 85097 - RNA, 20 nt, Artificial Sequence
  Synthetic
uggaagugagguaggugaga

SEQ ID NO: 85098 - RNA, 21 nt, Artificial Sequence
  Synthetic
auggaagugagguaggugaga

SEQ ID NO: 85099 - RNA, 22 nt, Artificial Sequence
  Synthetic
uauggaagugagguaggugaga

SEQ ID NO: 85100 - RNA, 23 nt, Artificial Sequence
  Synthetic
auauggaagugagguaggugaga

SEQ ID NO: 85101 - RNA, 24 nt, Artificial Sequence
  Synthetic
aauauggaagugagguaggugaga

SEQ ID NO: 85102 - RNA, 19 nt, Artificial Sequence
  Synthetic
cguaauagagacugugaga

SEQ ID NO: 85103 - RNA, 20 nt, Artificial Sequence
  Synthetic
ucguaauagagacugugaga

SEQ ID NO: 85104 - RNA, 21 nt, Artificial Sequence
  Synthetic
aucguaauagagacugugaga

SEQ ID NO: 85105 - RNA, 22 nt, Artificial Sequence
  Synthetic
aaucguaauagagacugugaga

SEQ ID NO: 85106 - RNA, 23 nt, Artificial Sequence
  Synthetic
uaaucguaauagagacugugaga

SEQ ID NO: 85107 - RNA, 24 nt, Artificial Sequence
  Synthetic
uuaaucguaauagagacugugaga

SEQ ID NO: 85108 - RNA, 18 nt, Artificial Sequence
  Synthetic
acgguguccaaauugaga

SEQ ID NO: 85109 - RNA, 19 nt, Artificial Sequence
  Synthetic
uacgguguccaaauugaga

SEQ ID NO: 85110 - RNA, 20 nt, Artificial Sequence
  Synthetic
auacgguguccaaauugaga

SEQ ID NO: 85111 - RNA, 21 nt, Artificial Sequence
  Synthetic
aauacgguguccaaauugaga

SEQ ID NO: 85112 - RNA, 22 nt, Artificial Sequence
  Synthetic
aaauacgguguccaaauugaga

SEQ ID NO: 85113 - RNA, 23 nt, Artificial Sequence
  Synthetic
aaaauacgguguccaaauugaga

SEQ ID NO: 85114 - RNA, 18 nt, Artificial Sequence
  Synthetic
acagcagagugguugaga

SEQ ID NO: 85115 - RNA, 19 nt, Artificial Sequence
  Synthetic
uacagcagagugguugaga

SEQ ID NO: 85116 - RNA, 20 nt, Artificial Sequence
  Synthetic
auacagcagagugguugaga

SEQ ID NO: 85117 - RNA, 21 nt, Artificial Sequence
  Synthetic
aauacagcagagugguugaga

SEQ ID NO: 85118 - RNA, 23 nt, Artificial Sequence
  Synthetic
agaauacagcagagugguugaga

SEQ ID NO: 85119 - RNA, 24 nt, Artificial Sequence
  Synthetic
cagaauacagcagagugguugaga

SEQ ID NO: 85120 - RNA, 21 nt, Artificial Sequence
  Synthetic
cacaaaauagaaauguugaga

SEQ ID NO: 85121 - RNA, 22 nt, Artificial Sequence
  Synthetic
acacaaaauagaaauguugaga

SEQ ID NO: 85122 - RNA, 23 nt, Artificial Sequence
  Synthetic
cacacaaaauagaaauguugaga

SEQ ID NO: 85123 - RNA, 24 nt, Artificial Sequence
  Synthetic
acacacaaaauagaaauguugaga

SEQ ID NO: 85124 - RNA, 18 nt, Artificial Sequence
  Synthetic
ucuguagaguuuuugaga

SEQ ID NO: 85125 - RNA, 19 nt, Artificial Sequence
  Synthetic
uucuguagaguuuuugaga

SEQ ID NO: 85126 - RNA, 20 nt, Artificial Sequence
  Synthetic
uuucuguagaguuuuugaga

SEQ ID NO: 85127 - RNA, 21 nt, Artificial Sequence
  Synthetic
auuucuguagaguuuuugaga

SEQ ID NO: 85128 - RNA, 22 nt, Artificial Sequence
  Synthetic
aauuucuguagaguuuuugaga

SEQ ID NO: 85129 - RNA, 23 nt, Artificial Sequence
  Synthetic
uaauuucuguagaguuuuugaga

SEQ ID NO: 85130 - RNA, 24 nt, Artificial Sequence
  Synthetic
uuaauuucuguagaguuuuugaga

SEQ ID NO: 85131 - RNA, 18 nt, Artificial Sequence
  Synthetic
ccagaucuuguaaauaga

SEQ ID NO: 85132 - RNA, 19 nt, Artificial Sequence
  Synthetic
accagaucuuguaaauaga

SEQ ID NO: 85133 - RNA, 20 nt, Artificial Sequence
  Synthetic
uaccagaucuuguaaauaga

SEQ ID NO: 85134 - RNA, 21 nt, Artificial Sequence
  Synthetic
auaccagaucuuguaaauaga

SEQ ID NO: 85135 - RNA, 22 nt, Artificial Sequence
  Synthetic
uauaccagaucuuguaaauaga

SEQ ID NO: 85136 - RNA, 23 nt, Artificial Sequence
  Synthetic
uuauaccagaucuuguaaauaga

SEQ ID NO: 85137 - RNA, 24 nt, Artificial Sequence
  Synthetic
uuuauaccagaucuuguaaauaga

SEQ ID NO: 85138 - RNA, 19 nt, Artificial Sequence
  Synthetic
agcuaucucuuuaaauaga

SEQ ID NO: 85139 - RNA, 23 nt, Artificial Sequence
  Synthetic
ugggagcuaucucuuuaaauaga

SEQ ID NO: 85140 - RNA, 24 nt, Artificial Sequence
  Synthetic
augggagcuaucucuuuaaauaga

SEQ ID NO: 85141 - RNA, 20 nt, Artificial Sequence
  Synthetic
cggacauacaguugcauaga

SEQ ID NO: 85142 - RNA, 21 nt, Artificial Sequence
  Synthetic
acggacauacaguugcauaga

SEQ ID NO: 85143 - RNA, 22 nt, Artificial Sequence
  Synthetic
uacggacauacaguugcauaga

SEQ ID NO: 85144 - RNA, 18 nt, Artificial Sequence
  Synthetic
aauucuuguaaucauaga

SEQ ID NO: 85145 - RNA, 19 nt, Artificial Sequence
  Synthetic
aaauucuuguaaucauaga

SEQ ID NO: 85146 - RNA, 20 nt, Artificial Sequence
  Synthetic
caaauucuuguaaucauaga

SEQ ID NO: 85147 - RNA, 21 nt, Artificial Sequence
  Synthetic
acaaauucuuguaaucauaga

SEQ ID NO: 85148 - RNA, 22 nt, Artificial Sequence
  Synthetic
uacaaauucuuguaaucauaga

SEQ ID NO: 85149 - RNA, 23 nt, Artificial Sequence
  Synthetic
uuacaaauucuuguaaucauaga

SEQ ID NO: 85150 - RNA, 24 nt, Artificial Sequence
  Synthetic
uuuacaaauucuuguaaucauaga

SEQ ID NO: 85151 - RNA, 18 nt, Artificial Sequence
  Synthetic
cuuauauagacucauaga

SEQ ID NO: 85152 - RNA, 19 nt, Artificial Sequence
  Synthetic
ccuuauauagacucauaga

SEQ ID NO: 85153 - RNA, 20 nt, Artificial Sequence
  Synthetic
uccuuauauagacucauaga

SEQ ID NO: 85154 - RNA, 21 nt, Artificial Sequence
  Synthetic
cuccuuauauagacucauaga

SEQ ID NO: 85155 - RNA, 22 nt, Artificial Sequence
  Synthetic
acuccuuauauagacucauaga

SEQ ID NO: 85156 - RNA, 23 nt, Artificial Sequence
  Synthetic
aacuccuuauauagacucauaga

SEQ ID NO: 85157 - RNA, 24 nt, Artificial Sequence
  Synthetic
aaacuccuuauauagacucauaga

SEQ ID NO: 85158 - RNA, 18 nt, Artificial Sequence
  Synthetic
cuuuaagaaccucauaga

SEQ ID NO: 85159 - RNA, 19 nt, Artificial Sequence
  Synthetic
ucuuuaagaaccucauaga

SEQ ID NO: 85160 - RNA, 22 nt, Artificial Sequence
  Synthetic
aggucuuuaagaaccucauaga

SEQ ID NO: 85161 - RNA, 23 nt, Artificial Sequence
  Synthetic
caggucuuuaagaaccucauaga

SEQ ID NO: 85162 - RNA, 24 nt, Artificial Sequence
  Synthetic
ccaggucuuuaagaaccucauaga

SEQ ID NO: 85163 - RNA, 21 nt, Artificial Sequence
  Synthetic
uuggauggauagaaagauaga

SEQ ID NO: 85164 - RNA, 22 nt, Artificial Sequence
  Synthetic
cuuggauggauagaaagauaga

SEQ ID NO: 85165 - RNA, 24 nt, Artificial Sequence
  Synthetic
agcuuggauggauagaaagauaga

SEQ ID NO: 85166 - RNA, 18 nt, Artificial Sequence
  Synthetic
aaggcacuggcagauaga

SEQ ID NO: 85167 - RNA, 20 nt, Artificial Sequence
  Synthetic
agaaggcacuggcagauaga

SEQ ID NO: 85168 - RNA, 21 nt, Artificial Sequence
  Synthetic
cagaaggcacuggcagauaga

SEQ ID NO: 85169 - RNA, 22 nt, Artificial Sequence
  Synthetic
ucagaaggcacuggcagauaga

SEQ ID NO: 85170 - RNA, 23 nt, Artificial Sequence
  Synthetic
cucagaaggcacuggcagauaga

SEQ ID NO: 85171 - RNA, 24 nt, Artificial Sequence
  Synthetic
acucagaaggcacuggcagauaga

SEQ ID NO: 85172 - RNA, 18 nt, Artificial Sequence
  Synthetic
caugaugguaaggauaga

SEQ ID NO: 85173 - RNA, 20 nt, Artificial Sequence
  Synthetic
agcaugaugguaaggauaga

SEQ ID NO: 85174 - RNA, 22 nt, Artificial Sequence
  Synthetic
agagcaugaugguaaggauaga

SEQ ID NO: 85175 - RNA, 23 nt, Artificial Sequence
  Synthetic
uagagcaugaugguaaggauaga

SEQ ID NO: 85176 - RNA, 24 nt, Artificial Sequence
  Synthetic
cuagagcaugaugguaaggauaga

SEQ ID NO: 85177 - RNA, 21 nt, Artificial Sequence
  Synthetic
cauaaagcaaaggaggauaga

SEQ ID NO: 85178 - RNA, 22 nt, Artificial Sequence
  Synthetic
ucauaaagcaaaggaggauaga

SEQ ID NO: 85179 - RNA, 24 nt, Artificial Sequence
  Synthetic
agucauaaagcaaaggaggauaga

SEQ ID NO: 85180 - RNA, 19 nt, Artificial Sequence
  Synthetic
agucaauuagagggauaga

SEQ ID NO: 85181 - RNA, 20 nt, Artificial Sequence
  Synthetic
aagucaauuagagggauaga

SEQ ID NO: 85182 - RNA, 21 nt, Artificial Sequence
  Synthetic
aaagucaauuagagggauaga

SEQ ID NO: 85183 - RNA, 22 nt, Artificial Sequence
  Synthetic
caaagucaauuagagggauaga

SEQ ID NO: 85184 - RNA, 23 nt, Artificial Sequence
  Synthetic
acaaagucaauuagagggauaga

SEQ ID NO: 85185 - RNA, 18 nt, Artificial Sequence
  Synthetic
uugcaaaaauaugauaga

SEQ ID NO: 85186 - RNA, 19 nt, Artificial Sequence
  Synthetic
uuugcaaaaauaugauaga

SEQ ID NO: 85187 - RNA, 20 nt, Artificial Sequence
  Synthetic
auuugcaaaaauaugauaga

SEQ ID NO: 85188 - RNA, 21 nt, Artificial Sequence
  Synthetic
uauuugcaaaaauaugauaga

SEQ ID NO: 85189 - RNA, 22 nt, Artificial Sequence
  Synthetic
auauuugcaaaaauaugauaga

SEQ ID NO: 85190 - RNA, 23 nt, Artificial Sequence
  Synthetic
uauauuugcaaaaauaugauaga

SEQ ID NO: 85191 - RNA, 24 nt, Artificial Sequence
  Synthetic
auauauuugcaaaaauaugauaga

SEQ ID NO: 85192 - RNA, 18 nt, Artificial Sequence
  Synthetic
cauauaaagaaauauaga

SEQ ID NO: 85193 - RNA, 19 nt, Artificial Sequence
  Synthetic
ucauauaaagaaauauaga

SEQ ID NO: 85194 - RNA, 20 nt, Artificial Sequence
  Synthetic
cucauauaaagaaauauaga

SEQ ID NO: 85195 - RNA, 22 nt, Artificial Sequence
  Synthetic
agcucauauaaagaaauauaga

SEQ ID NO: 85196 - RNA, 23 nt, Artificial Sequence
  Synthetic
uagcucauauaaagaaauauaga

SEQ ID NO: 85197 - RNA, 24 nt, Artificial Sequence
  Synthetic
auagcucauauaaagaaauauaga

SEQ ID NO: 85198 - RNA, 21 nt, Artificial Sequence
  Synthetic
caaaugcuuuuuguguauaga

SEQ ID NO: 85199 - RNA, 22 nt, Artificial Sequence
  Synthetic
ucaaaugcuuuuuguguauaga

SEQ ID NO: 85200 - RNA, 23 nt, Artificial Sequence
  Synthetic
uucaaaugcuuuuuguguauaga

SEQ ID NO: 85201 - RNA, 24 nt, Artificial Sequence
  Synthetic
auucaaaugcuuuuuguguauaga

SEQ ID NO: 85202 - RNA, 18 nt, Artificial Sequence
  Synthetic
auuguuaauuguuauaga

SEQ ID NO: 85203 - RNA, 19 nt, Artificial Sequence
  Synthetic
cauuguuaauuguuauaga

SEQ ID NO: 85204 - RNA, 20 nt, Artificial Sequence
  Synthetic
ucauuguuaauuguuauaga

SEQ ID NO: 85205 - RNA, 21 nt, Artificial Sequence
  Synthetic
uucauuguuaauuguuauaga

SEQ ID NO: 85206 - RNA, 23 nt, Artificial Sequence
  Synthetic
aguucauuguuaauuguuauaga

SEQ ID NO: 85207 - RNA, 24 nt, Artificial Sequence
  Synthetic
aaguucauuguuaauuguuauaga

SEQ ID NO: 85208 - RNA, 18 nt, Artificial Sequence
  Synthetic
ucaguuggaaagacuaga

SEQ ID NO: 85209 - RNA, 21 nt, Artificial Sequence
  Synthetic
aggucaguuggaaagacuaga

SEQ ID NO: 85210 - RNA, 22 nt, Artificial Sequence
  Synthetic
aaggucaguuggaaagacuaga

SEQ ID NO: 85211 - RNA, 24 nt, Artificial Sequence
  Synthetic
agaaggucaguuggaaagacuaga

SEQ ID NO: 85212 - RNA, 18 nt, Artificial Sequence
  Synthetic
cauuuuuuuaagacuaga

SEQ ID NO: 85213 - RNA, 19 nt, Artificial Sequence
  Synthetic
ccauuuuuuuaagacuaga

SEQ ID NO: 85214 - RNA, 20 nt, Artificial Sequence
  Synthetic
uccauuuuuuuaagacuaga

SEQ ID NO: 85215 - RNA, 21 nt, Artificial Sequence
  Synthetic
uuccauuuuuuuaagacuaga

SEQ ID NO: 85216 - RNA, 22 nt, Artificial Sequence
  Synthetic
cuuccauuuuuuuaagacuaga

SEQ ID NO: 85217 - RNA, 23 nt, Artificial Sequence
  Synthetic
ccuuccauuuuuuuaagacuaga

SEQ ID NO: 85218 - RNA, 24 nt, Artificial Sequence
  Synthetic
uccuuccauuuuuuuaagacuaga

SEQ ID NO: 85219 - RNA, 18 nt, Artificial Sequence
  Synthetic
agccuugccuaaccuaga

SEQ ID NO: 85220 - RNA, 19 nt, Artificial Sequence
  Synthetic
aagccuugccuaaccuaga

SEQ ID NO: 85221 - RNA, 20 nt, Artificial Sequence
  Synthetic
aaagccuugccuaaccuaga

SEQ ID NO: 85222 - RNA, 21 nt, Artificial Sequence
  Synthetic
aaaagccuugccuaaccuaga

SEQ ID NO: 85223 - RNA, 22 nt, Artificial Sequence
  Synthetic
aaaaagccuugccuaaccuaga

SEQ ID NO: 85224 - RNA, 23 nt, Artificial Sequence
  Synthetic
uaaaaagccuugccuaaccuaga

SEQ ID NO: 85225 - RNA, 24 nt, Artificial Sequence
  Synthetic
cuaaaaagccuugccuaaccuaga

SEQ ID NO: 85226 - RNA, 18 nt, Artificial Sequence
  Synthetic
uuucaaaaauguccuaga

SEQ ID NO: 85227 - RNA, 19 nt, Artificial Sequence
  Synthetic
auuucaaaaauguccuaga

SEQ ID NO: 85228 - RNA, 20 nt, Artificial Sequence
  Synthetic
uauuucaaaaauguccuaga

SEQ ID NO: 85229 - RNA, 21 nt, Artificial Sequence
  Synthetic
uuauuucaaaaauguccuaga

SEQ ID NO: 85230 - RNA, 22 nt, Artificial Sequence
  Synthetic
uuuauuucaaaaauguccuaga

SEQ ID NO: 85231 - RNA, 23 nt, Artificial Sequence
  Synthetic
auuuauuucaaaaauguccuaga

SEQ ID NO: 85232 - RNA, 24 nt, Artificial Sequence
  Synthetic
uauuuauuucaaaaauguccuaga

SEQ ID NO: 85233 - RNA, 18 nt, Artificial Sequence
  Synthetic
uuucauuuguuggcuaga

SEQ ID NO: 85234 - RNA, 19 nt, Artificial Sequence
  Synthetic
cuuucauuuguuggcuaga

SEQ ID NO: 85235 - RNA, 21 nt, Artificial Sequence
  Synthetic
agcuuucauuuguuggcuaga

SEQ ID NO: 85236 - RNA, 22 nt, Artificial Sequence
  Synthetic
uagcuuucauuuguuggcuaga

SEQ ID NO: 85237 - RNA, 23 nt, Artificial Sequence
  Synthetic
uuagcuuucauuuguuggcuaga

SEQ ID NO: 85238 - RNA, 24 nt, Artificial Sequence
  Synthetic
cuuagcuuucauuuguuggcuaga

SEQ ID NO: 85239 - RNA, 18 nt, Artificial Sequence
  Synthetic
uuuggggaagucucuaga

SEQ ID NO: 85240 - RNA, 19 nt, Artificial Sequence
  Synthetic
cuuuggggaagucucuaga

SEQ ID NO: 85241 - RNA, 20 nt, Artificial Sequence
  Synthetic
acuuuggggaagucucuaga

SEQ ID NO: 85242 - RNA, 21 nt, Artificial Sequence
  Synthetic
cacuuuggggaagucucuaga

SEQ ID NO: 85243 - RNA, 22 nt, Artificial Sequence
  Synthetic
ucacuuuggggaagucucuaga

SEQ ID NO: 85244 - RNA, 23 nt, Artificial Sequence
  Synthetic
uucacuuuggggaagucucuaga

SEQ ID NO: 85245 - RNA, 18 nt, Artificial Sequence
  Synthetic
ugccaggucuagucuaga

SEQ ID NO: 85246 - RNA, 20 nt, Artificial Sequence
  Synthetic
ugugccaggucuagucuaga

SEQ ID NO: 85247 - RNA, 21 nt, Artificial Sequence
  Synthetic
uugugccaggucuagucuaga

SEQ ID NO: 85248 - RNA, 22 nt, Artificial Sequence
  Synthetic
auugugccaggucuagucuaga

SEQ ID NO: 85249 - RNA, 23 nt, Artificial Sequence
  Synthetic
aauugugccaggucuagucuaga

SEQ ID NO: 85250 - RNA, 24 nt, Artificial Sequence
  Synthetic
uaauugugccaggucuagucuaga

SEQ ID NO: 85251 - RNA, 19 nt, Artificial Sequence
  Synthetic
uguugaaccugggucuaga

SEQ ID NO: 85252 - RNA, 21 nt, Artificial Sequence
  Synthetic
aguguugaaccugggucuaga

SEQ ID NO: 85253 - RNA, 23 nt, Artificial Sequence
  Synthetic
ugaguguugaaccugggucuaga

SEQ ID NO: 85254 - RNA, 18 nt, Artificial Sequence
  Synthetic
ucugaggcucuuucuaga

SEQ ID NO: 85255 - RNA, 19 nt, Artificial Sequence
  Synthetic
cucugaggcucuuucuaga

SEQ ID NO: 85256 - RNA, 20 nt, Artificial Sequence
  Synthetic
acucugaggcucuuucuaga

SEQ ID NO: 85257 - RNA, 21 nt, Artificial Sequence
  Synthetic
uacucugaggcucuuucuaga

SEQ ID NO: 85258 - RNA, 22 nt, Artificial Sequence
  Synthetic
cuacucugaggcucuuucuaga

SEQ ID NO: 85259 - RNA, 23 nt, Artificial Sequence
  Synthetic
acuacucugaggcucuuucuaga

SEQ ID NO: 85260 - RNA, 18 nt, Artificial Sequence
  Synthetic
aguuaagagcaaaguaga

SEQ ID NO: 85261 - RNA, 19 nt, Artificial Sequence
  Synthetic
aaguuaagagcaaaguaga

SEQ ID NO: 85262 - RNA, 21 nt, Artificial Sequence
  Synthetic
ugaaguuaagagcaaaguaga

SEQ ID NO: 85263 - RNA, 22 nt, Artificial Sequence
  Synthetic
cugaaguuaagagcaaaguaga

SEQ ID NO: 85264 - RNA, 23 nt, Artificial Sequence
  Synthetic
ucugaaguuaagagcaaaguaga

SEQ ID NO: 85265 - RNA, 24 nt, Artificial Sequence
  Synthetic
uucugaaguuaagagcaaaguaga

SEQ ID NO: 85266 - RNA, 19 nt, Artificial Sequence
  Synthetic
uggaagcaacagcaguaga

SEQ ID NO: 85267 - RNA, 20 nt, Artificial Sequence
  Synthetic
auggaagcaacagcaguaga

SEQ ID NO: 85268 - RNA, 21 nt, Artificial Sequence
  Synthetic
aauggaagcaacagcaguaga

SEQ ID NO: 85269 - RNA, 22 nt, Artificial Sequence
  Synthetic
caauggaagcaacagcaguaga

SEQ ID NO: 85270 - RNA, 23 nt, Artificial Sequence
  Synthetic
acaauggaagcaacagcaguaga

SEQ ID NO: 85271 - RNA, 24 nt, Artificial Sequence
  Synthetic
uacaauggaagcaacagcaguaga

SEQ ID NO: 85272 - RNA, 19 nt, Artificial Sequence
  Synthetic
agaucucuaaggcaguaga

SEQ ID NO: 85273 - RNA, 20 nt, Artificial Sequence
  Synthetic
aagaucucuaaggcaguaga

SEQ ID NO: 85274 - RNA, 22 nt, Artificial Sequence
  Synthetic
ugaagaucucuaaggcaguaga

SEQ ID NO: 85275 - RNA, 23 nt, Artificial Sequence
  Synthetic
uugaagaucucuaaggcaguaga

SEQ ID NO: 85276 - RNA, 24 nt, Artificial Sequence
  Synthetic
cuugaagaucucuaaggcaguaga

SEQ ID NO: 85277 - RNA, 18 nt, Artificial Sequence
  Synthetic
aaauguguuaauaguaga

SEQ ID NO: 85278 - RNA, 19 nt, Artificial Sequence
  Synthetic
aaaauguguuaauaguaga

SEQ ID NO: 85279 - RNA, 20 nt, Artificial Sequence
  Synthetic
uaaaauguguuaauaguaga

SEQ ID NO: 85280 - RNA, 21 nt, Artificial Sequence
  Synthetic
uuaaaauguguuaauaguaga

SEQ ID NO: 85281 - RNA, 22 nt, Artificial Sequence
  Synthetic
auuaaaauguguuaauaguaga

SEQ ID NO: 85282 - RNA, 23 nt, Artificial Sequence
  Synthetic
uauuaaaauguguuaauaguaga

SEQ ID NO: 85283 - RNA, 24 nt, Artificial Sequence
  Synthetic
auauuaaaauguguuaauaguaga

SEQ ID NO: 85284 - RNA, 18 nt, Artificial Sequence
  Synthetic
uuucuguaagauaguaga

SEQ ID NO: 85285 - RNA, 19 nt, Artificial Sequence
  Synthetic
uuuucuguaagauaguaga

SEQ ID NO: 85286 - RNA, 21 nt, Artificial Sequence
  Synthetic
aguuuucuguaagauaguaga

SEQ ID NO: 85287 - RNA, 22 nt, Artificial Sequence
  Synthetic
aaguuuucuguaagauaguaga

SEQ ID NO: 85288 - RNA, 23 nt, Artificial Sequence
  Synthetic
caaguuuucuguaagauaguaga

SEQ ID NO: 85289 - RNA, 24 nt, Artificial Sequence
  Synthetic
acaaguuuucuguaagauaguaga

SEQ ID NO: 85290 - RNA, 18 nt, Artificial Sequence
  Synthetic
auaaaacauugggguaga

SEQ ID NO: 85291 - RNA, 19 nt, Artificial Sequence
  Synthetic
cauaaaacauugggguaga

SEQ ID NO: 85292 - RNA, 20 nt, Artificial Sequence
  Synthetic
ucauaaaacauugggguaga

SEQ ID NO: 85293 - RNA, 18 nt, Artificial Sequence
  Synthetic
uugugaaacaaugguaga

SEQ ID NO: 85294 - RNA, 20 nt, Artificial Sequence
  Synthetic
aguugugaaacaaugguaga

SEQ ID NO: 85295 - RNA, 21 nt, Artificial Sequence
  Synthetic
uaguugugaaacaaugguaga

SEQ ID NO: 85296 - RNA, 22 nt, Artificial Sequence
  Synthetic
cuaguugugaaacaaugguaga

SEQ ID NO: 85297 - RNA, 23 nt, Artificial Sequence
  Synthetic
ucuaguugugaaacaaugguaga

SEQ ID NO: 85298 - RNA, 24 nt, Artificial Sequence
  Synthetic
aucuaguugugaaacaaugguaga

SEQ ID NO: 85299 - RNA, 18 nt, Artificial Sequence
  Synthetic
cuggagaucagugguaga

SEQ ID NO: 85300 - RNA, 20 nt, Artificial Sequence
  Synthetic
agcuggagaucagugguaga

SEQ ID NO: 85301 - RNA, 21 nt, Artificial Sequence
  Synthetic
uagcuggagaucagugguaga

SEQ ID NO: 85302 - RNA, 24 nt, Artificial Sequence
  Synthetic
cgguagcuggagaucagugguaga

SEQ ID NO: 85303 - RNA, 18 nt, Artificial Sequence
  Synthetic
caaacacaaugguguaga

SEQ ID NO: 85304 - RNA, 19 nt, Artificial Sequence
  Synthetic
acaaacacaaugguguaga

SEQ ID NO: 85305 - RNA, 20 nt, Artificial Sequence
  Synthetic
aacaaacacaaugguguaga

SEQ ID NO: 85306 - RNA, 21 nt, Artificial Sequence
  Synthetic
aaacaaacacaaugguguaga

SEQ ID NO: 85307 - RNA, 24 nt, Artificial Sequence
  Synthetic
aggaaacaaacacaaugguguaga

SEQ ID NO: 85308 - RNA, 18 nt, Artificial Sequence
  Synthetic
uauacagcacuuuguaga

SEQ ID NO: 85309 - RNA, 19 nt, Artificial Sequence
  Synthetic
auauacagcacuuuguaga

SEQ ID NO: 85310 - RNA, 22 nt, Artificial Sequence
  Synthetic
uggauauacagcacuuuguaga

SEQ ID NO: 85311 - RNA, 23 nt, Artificial Sequence
  Synthetic
auggauauacagcacuuuguaga

SEQ ID NO: 85312 - RNA, 24 nt, Artificial Sequence
  Synthetic
uauggauauacagcacuuuguaga

SEQ ID NO: 85313 - RNA, 18 nt, Artificial Sequence
  Synthetic
uugcuccugaaaauuaga

SEQ ID NO: 85314 - RNA, 19 nt, Artificial Sequence
  Synthetic
auugcuccugaaaauuaga

SEQ ID NO: 85315 - RNA, 20 nt, Artificial Sequence
  Synthetic
uauugcuccugaaaauuaga

SEQ ID NO: 85316 - RNA, 21 nt, Artificial Sequence
  Synthetic
auauugcuccugaaaauuaga

SEQ ID NO: 85317 - RNA, 22 nt, Artificial Sequence
  Synthetic
uauauugcuccugaaaauuaga

SEQ ID NO: 85318 - RNA, 23 nt, Artificial Sequence
  Synthetic
cuauauugcuccugaaaauuaga

SEQ ID NO: 85319 - RNA, 19 nt, Artificial Sequence
  Synthetic
cgccucugcacaaauuaga

SEQ ID NO: 85320 - RNA, 20 nt, Artificial Sequence
  Synthetic
ucgccucugcacaaauuaga

SEQ ID NO: 85321 - RNA, 22 nt, Artificial Sequence
  Synthetic
agucgccucugcacaaauuaga

SEQ ID NO: 85322 - RNA, 23 nt, Artificial Sequence
  Synthetic
aagucgccucugcacaaauuaga

SEQ ID NO: 85323 - RNA, 24 nt, Artificial Sequence
  Synthetic
caagucgccucugcacaaauuaga

SEQ ID NO: 85324 - RNA, 18 nt, Artificial Sequence
  Synthetic
auacauuugggaauuaga

SEQ ID NO: 85325 - RNA, 19 nt, Artificial Sequence
  Synthetic
cauacauuugggaauuaga

SEQ ID NO: 85326 - RNA, 20 nt, Artificial Sequence
  Synthetic
acauacauuugggaauuaga

SEQ ID NO: 85327 - RNA, 21 nt, Artificial Sequence
  Synthetic
uacauacauuugggaauuaga

SEQ ID NO: 85328 - RNA, 22 nt, Artificial Sequence
  Synthetic
uuacauacauuugggaauuaga

SEQ ID NO: 85329 - RNA, 24 nt, Artificial Sequence
  Synthetic
aguuacauacauuugggaauuaga

SEQ ID NO: 85330 - RNA, 18 nt, Artificial Sequence
  Synthetic
ucuuugcagauaauuaga

SEQ ID NO: 85331 - RNA, 19 nt, Artificial Sequence
  Synthetic
aucuuugcagauaauuaga

SEQ ID NO: 85332 - RNA, 20 nt, Artificial Sequence
  Synthetic
aaucuuugcagauaauuaga

SEQ ID NO: 85333 - RNA, 21 nt, Artificial Sequence
  Synthetic
aaaucuuugcagauaauuaga

SEQ ID NO: 85334 - RNA, 22 nt, Artificial Sequence
  Synthetic
aaaaucuuugcagauaauuaga

SEQ ID NO: 85335 - RNA, 23 nt, Artificial Sequence
  Synthetic
uaaaaucuuugcagauaauuaga

SEQ ID NO: 85336 - RNA, 24 nt, Artificial Sequence
  Synthetic
cuaaaaucuuugcagauaauuaga

SEQ ID NO: 85337 - RNA, 18 nt, Artificial Sequence
  Synthetic
acaaggaucugcauuaga

SEQ ID NO: 85338 - RNA, 19 nt, Artificial Sequence
  Synthetic
cacaaggaucugcauuaga

SEQ ID NO: 85339 - RNA, 20 nt, Artificial Sequence
  Synthetic
acacaaggaucugcauuaga

SEQ ID NO: 85340 - RNA, 18 nt, Artificial Sequence
  Synthetic
aaauaacuauagguuaga

SEQ ID NO: 85341 - RNA, 19 nt, Artificial Sequence
  Synthetic
aaaauaacuauagguuaga

SEQ ID NO: 85342 - RNA, 20 nt, Artificial Sequence
  Synthetic
uaaaauaacuauagguuaga

SEQ ID NO: 85343 - RNA, 21 nt, Artificial Sequence
  Synthetic
uuaaaauaacuauagguuaga

SEQ ID NO: 85344 - RNA, 22 nt, Artificial Sequence
  Synthetic
cuuaaaauaacuauagguuaga

SEQ ID NO: 85345 - RNA, 23 nt, Artificial Sequence
  Synthetic
ucuuaaaauaacuauagguuaga

SEQ ID NO: 85346 - RNA, 24 nt, Artificial Sequence
  Synthetic
uucuuaaaauaacuauagguuaga

SEQ ID NO: 85347 - RNA, 18 nt, Artificial Sequence
  Synthetic
agaaaaaacacgguuaga

SEQ ID NO: 85348 - RNA, 20 nt, Artificial Sequence
  Synthetic
agagaaaaaacacgguuaga

SEQ ID NO: 85349 - RNA, 18 nt, Artificial Sequence
  Synthetic
aggucauugaauguuaga

SEQ ID NO: 85350 - RNA, 19 nt, Artificial Sequence
  Synthetic
caggucauugaauguuaga

SEQ ID NO: 85351 - RNA, 20 nt, Artificial Sequence
  Synthetic
ccaggucauugaauguuaga

SEQ ID NO: 85352 - RNA, 23 nt, Artificial Sequence
  Synthetic
aggccaggucauugaauguuaga

SEQ ID NO: 85353 - RNA, 18 nt, Artificial Sequence
  Synthetic
aauguugcggauguuaga

SEQ ID NO: 85354 - RNA, 19 nt, Artificial Sequence
  Synthetic
caauguugcggauguuaga

SEQ ID NO: 85355 - RNA, 20 nt, Artificial Sequence
  Synthetic
acaauguugcggauguuaga

SEQ ID NO: 85356 - RNA, 21 nt, Artificial Sequence
  Synthetic
aacaauguugcggauguuaga

SEQ ID NO: 85357 - RNA, 22 nt, Artificial Sequence
  Synthetic
aaacaauguugcggauguuaga

SEQ ID NO: 85358 - RNA, 23 nt, Artificial Sequence
  Synthetic
aaaacaauguugcggauguuaga

SEQ ID NO: 85359 - RNA, 24 nt, Artificial Sequence
  Synthetic
aaaaacaauguugcggauguuaga

SEQ ID NO: 85360 - RNA, 18 nt, Artificial Sequence
  Synthetic
aaauuccugaaguuuaga

SEQ ID NO: 85361 - RNA, 19 nt, Artificial Sequence
  Synthetic
aaaauuccugaaguuuaga

SEQ ID NO: 85362 - RNA, 20 nt, Artificial Sequence
  Synthetic
aaaaauuccugaaguuuaga

SEQ ID NO: 85363 - RNA, 21 nt, Artificial Sequence
  Synthetic
aaaaaauuccugaaguuuaga

SEQ ID NO: 85364 - RNA, 22 nt, Artificial Sequence
  Synthetic
uaaaaaauuccugaaguuuaga

SEQ ID NO: 85365 - RNA, 23 nt, Artificial Sequence
  Synthetic
auaaaaaauuccugaaguuuaga

SEQ ID NO: 85366 - RNA, 18 nt, Artificial Sequence
  Synthetic
cauggucaaacuuuuaga

SEQ ID NO: 85367 - RNA, 19 nt, Artificial Sequence
  Synthetic
ucauggucaaacuuuuaga

SEQ ID NO: 85368 - RNA, 20 nt, Artificial Sequence
  Synthetic
uucauggucaaacuuuuaga

SEQ ID NO: 85369 - RNA, 21 nt, Artificial Sequence
  Synthetic
uuucauggucaaacuuuuaga

SEQ ID NO: 85370 - RNA, 22 nt, Artificial Sequence
  Synthetic
uuuucauggucaaacuuuuaga

SEQ ID NO: 85371 - RNA, 24 nt, Artificial Sequence
  Synthetic
uguuuucauggucaaacuuuuaga

SEQ ID NO: 85372 - RNA, 18 nt, Artificial Sequence
  Synthetic
uuucauuagauuuuuaga

SEQ ID NO: 85373 - RNA, 22 nt, Artificial Sequence
  Synthetic
aggguuucauuagauuuuuaga

SEQ ID NO: 85374 - RNA, 23 nt, Artificial Sequence
  Synthetic
aaggguuucauuagauuuuuaga

SEQ ID NO: 85375 - RNA, 24 nt, Artificial Sequence
  Synthetic
caaggguuucauuagauuuuuaga

SEQ ID NO: 85376 - RNA, 18 nt, Artificial Sequence
  Synthetic
cauuuagcuuuuuuuaga

SEQ ID NO: 85377 - RNA, 19 nt, Artificial Sequence
  Synthetic
acauuuagcuuuuuuuaga

SEQ ID NO: 85378 - RNA, 21 nt, Artificial Sequence
  Synthetic
agacauuuagcuuuuuuuaga

SEQ ID NO: 85379 - RNA, 22 nt, Artificial Sequence
  Synthetic
uagacauuuagcuuuuuuuaga

SEQ ID NO: 85380 - RNA, 23 nt, Artificial Sequence
  Synthetic
uuagacauuuagcuuuuuuuaga

SEQ ID NO: 85381 - RNA, 24 nt, Artificial Sequence
  Synthetic
uuuagacauuuagcuuuuuuuaga

SEQ ID NO: 85382 - RNA, 18 nt, Artificial Sequence
  Synthetic
ucgauuuauucucaacga

SEQ ID NO: 85383 - RNA, 19 nt, Artificial Sequence
  Synthetic
uucgauuuauucucaacga

SEQ ID NO: 85384 - RNA, 20 nt, Artificial Sequence
  Synthetic
auucgauuuauucucaacga

SEQ ID NO: 85385 - RNA, 21 nt, Artificial Sequence
  Synthetic
cauucgauuuauucucaacga

SEQ ID NO: 85386 - RNA, 22 nt, Artificial Sequence
  Synthetic
ucauucgauuuauucucaacga

SEQ ID NO: 85387 - RNA, 23 nt, Artificial Sequence
  Synthetic
cucauucgauuuauucucaacga

SEQ ID NO: 85388 - RNA, 24 nt, Artificial Sequence
  Synthetic
acucauucgauuuauucucaacga

SEQ ID NO: 85389 - RNA, 18 nt, Artificial Sequence
  Synthetic
auccauaaucuagaacga

SEQ ID NO: 85390 - RNA, 19 nt, Artificial Sequence
  Synthetic
aauccauaaucuagaacga

SEQ ID NO: 85391 - RNA, 21 nt, Artificial Sequence
  Synthetic
ugaauccauaaucuagaacga

SEQ ID NO: 85392 - RNA, 22 nt, Artificial Sequence
  Synthetic
cugaauccauaaucuagaacga

SEQ ID NO: 85393 - RNA, 23 nt, Artificial Sequence
  Synthetic
ccugaauccauaaucuagaacga

SEQ ID NO: 85394 - RNA, 18 nt, Artificial Sequence
  Synthetic
agacaauuuguugaacga

SEQ ID NO: 85395 - RNA, 19 nt, Artificial Sequence
  Synthetic
aagacaauuuguugaacga

SEQ ID NO: 85396 - RNA, 20 nt, Artificial Sequence
  Synthetic
aaagacaauuuguugaacga

SEQ ID NO: 85397 - RNA, 21 nt, Artificial Sequence
  Synthetic
caaagacaauuuguugaacga

SEQ ID NO: 85398 - RNA, 22 nt, Artificial Sequence
  Synthetic
ucaaagacaauuuguugaacga

SEQ ID NO: 85399 - RNA, 23 nt, Artificial Sequence
  Synthetic
uucaaagacaauuuguugaacga

SEQ ID NO: 85400 - RNA, 24 nt, Artificial Sequence
  Synthetic
uuucaaagacaauuuguugaacga

SEQ ID NO: 85401 - RNA, 18 nt, Artificial Sequence
  Synthetic
uaaaggagaucauaacga

SEQ ID NO: 85402 - RNA, 19 nt, Artificial Sequence
  Synthetic
uuaaaggagaucauaacga

SEQ ID NO: 85403 - RNA, 20 nt, Artificial Sequence
  Synthetic
cuuaaaggagaucauaacga

SEQ ID NO: 85404 - RNA, 21 nt, Artificial Sequence
  Synthetic
acuuaaaggagaucauaacga

SEQ ID NO: 85405 - RNA, 22 nt, Artificial Sequence
  Synthetic
uacuuaaaggagaucauaacga

SEQ ID NO: 85406 - RNA, 23 nt, Artificial Sequence
  Synthetic
cuacuuaaaggagaucauaacga

SEQ ID NO: 85407 - RNA, 24 nt, Artificial Sequence
  Synthetic
ccuacuuaaaggagaucauaacga

SEQ ID NO: 85408 - RNA, 21 nt, Artificial Sequence
  Synthetic
uugagggcuccacccucacga

SEQ ID NO: 85409 - RNA, 22 nt, Artificial Sequence
  Synthetic
auugagggcuccacccucacga

SEQ ID NO: 85410 - RNA, 18 nt, Artificial Sequence
  Synthetic
uuuuaaaauccuucacga

SEQ ID NO: 85411 - RNA, 19 nt, Artificial Sequence
  Synthetic
uuuuuaaaauccuucacga

SEQ ID NO: 85412 - RNA, 20 nt, Artificial Sequence
  Synthetic
auuuuuaaaauccuucacga

SEQ ID NO: 85413 - RNA, 21 nt, Artificial Sequence
  Synthetic
aauuuuuaaaauccuucacga

SEQ ID NO: 85414 - RNA, 22 nt, Artificial Sequence
  Synthetic
uaauuuuuaaaauccuucacga

SEQ ID NO: 85415 - RNA, 23 nt, Artificial Sequence
  Synthetic
auaauuuuuaaaauccuucacga

SEQ ID NO: 85416 - RNA, 24 nt, Artificial Sequence
  Synthetic
aauaauuuuuaaaauccuucacga

SEQ ID NO: 85417 - RNA, 18 nt, Artificial Sequence
  Synthetic
aguaacaccgaaauacga

SEQ ID NO: 85418 - RNA, 19 nt, Artificial Sequence
  Synthetic
aaguaacaccgaaauacga

SEQ ID NO: 85419 - RNA, 20 nt, Artificial Sequence
  Synthetic
aaaguaacaccgaaauacga

SEQ ID NO: 85420 - RNA, 21 nt, Artificial Sequence
  Synthetic
aaaaguaacaccgaaauacga

SEQ ID NO: 85421 - RNA, 22 nt, Artificial Sequence
  Synthetic
aaaaaguaacaccgaaauacga

SEQ ID NO: 85422 - RNA, 23 nt, Artificial Sequence
  Synthetic
aaaaaaguaacaccgaaauacga

SEQ ID NO: 85423 - RNA, 24 nt, Artificial Sequence
  Synthetic
uaaaaaaguaacaccgaaauacga

SEQ ID NO: 85424 - RNA, 18 nt, Artificial Sequence
  Synthetic
uucuagugcucuauacga

SEQ ID NO: 85425 - RNA, 20 nt, Artificial Sequence
  Synthetic
aguucuagugcucuauacga

SEQ ID NO: 85426 - RNA, 18 nt, Artificial Sequence
  Synthetic
agccuuucuaguuaccga

SEQ ID NO: 85427 - RNA, 19 nt, Artificial Sequence
  Synthetic
uagccuuucuaguuaccga

SEQ ID NO: 85428 - RNA, 21 nt, Artificial Sequence
  Synthetic
uguagccuuucuaguuaccga

SEQ ID NO: 85429 - RNA, 22 nt, Artificial Sequence
  Synthetic
uuguagccuuucuaguuaccga

SEQ ID NO: 85430 - RNA, 23 nt, Artificial Sequence
  Synthetic
auuguagccuuucuaguuaccga

SEQ ID NO: 85431 - RNA, 24 nt, Artificial Sequence
  Synthetic
aauuguagccuuucuaguuaccga

SEQ ID NO: 85432 - RNA, 18 nt, Artificial Sequence
  Synthetic
auguugcugguccagcga

SEQ ID NO: 85433 - RNA, 20 nt, Artificial Sequence
  Synthetic
ugauguugcugguccagcga

SEQ ID NO: 85434 - RNA, 21 nt, Artificial Sequence
  Synthetic
cugauguugcugguccagcga

SEQ ID NO: 85435 - RNA, 23 nt, Artificial Sequence
  Synthetic
ugcugauguugcugguccagcga

SEQ ID NO: 85436 - RNA, 18 nt, Artificial Sequence
  Synthetic
ugcucacuaacauggcga

SEQ ID NO: 85437 - RNA, 19 nt, Artificial Sequence
  Synthetic
augcucacuaacauggcga

SEQ ID NO: 85438 - RNA, 20 nt, Artificial Sequence
  Synthetic
uaugcucacuaacauggcga

SEQ ID NO: 85439 - RNA, 21 nt, Artificial Sequence
  Synthetic
cuaugcucacuaacauggcga

SEQ ID NO: 85440 - RNA, 22 nt, Artificial Sequence
  Synthetic
acuaugcucacuaacauggcga

SEQ ID NO: 85441 - RNA, 23 nt, Artificial Sequence
  Synthetic
uacuaugcucacuaacauggcga

SEQ ID NO: 85442 - RNA, 24 nt, Artificial Sequence
  Synthetic
uuacuaugcucacuaacauggcga

SEQ ID NO: 85443 - RNA, 21 nt, Artificial Sequence
  Synthetic
uaacuguccaucaacaugcga

SEQ ID NO: 85444 - RNA, 22 nt, Artificial Sequence
  Synthetic
cuaacuguccaucaacaugcga

SEQ ID NO: 85445 - RNA, 24 nt, Artificial Sequence
  Synthetic
agcuaacuguccaucaacaugcga

SEQ ID NO: 85446 - RNA, 19 nt, Artificial Sequence
  Synthetic
agguuuuuacugugugcga

SEQ ID NO: 85447 - RNA, 20 nt, Artificial Sequence
  Synthetic
cagguuuuuacugugugcga

SEQ ID NO: 85448 - RNA, 23 nt, Artificial Sequence
  Synthetic
aggcagguuuuuacugugugcga

SEQ ID NO: 85449 - RNA, 18 nt, Artificial Sequence
  Synthetic
uugucuuaacaagaucga

SEQ ID NO: 85450 - RNA, 19 nt, Artificial Sequence
  Synthetic
uuugucuuaacaagaucga

SEQ ID NO: 85451 - RNA, 20 nt, Artificial Sequence
  Synthetic
auuugucuuaacaagaucga

SEQ ID NO: 85452 - RNA, 21 nt, Artificial Sequence
  Synthetic
uauuugucuuaacaagaucga

SEQ ID NO: 85453 - RNA, 22 nt, Artificial Sequence
  Synthetic
uuauuugucuuaacaagaucga

SEQ ID NO: 85454 - RNA, 23 nt, Artificial Sequence
  Synthetic
cuuauuugucuuaacaagaucga

SEQ ID NO: 85455 - RNA, 21 nt, Artificial Sequence
  Synthetic
aaaaaaaaaauuucuugucga

SEQ ID NO: 85456 - RNA, 18 nt, Artificial Sequence
  Synthetic
ccacuaaauauguuucga

SEQ ID NO: 85457 - RNA, 20 nt, Artificial Sequence
  Synthetic
ugccacuaaauauguuucga

SEQ ID NO: 85458 - RNA, 21 nt, Artificial Sequence
  Synthetic
augccacuaaauauguuucga

SEQ ID NO: 85459 - RNA, 22 nt, Artificial Sequence
  Synthetic
aaugccacuaaauauguuucga

SEQ ID NO: 85460 - RNA, 23 nt, Artificial Sequence
  Synthetic
aaaugccacuaaauauguuucga

SEQ ID NO: 85461 - RNA, 24 nt, Artificial Sequence
  Synthetic
aaaaugccacuaaauauguuucga

SEQ ID NO: 85462 - RNA, 21 nt, Artificial Sequence
  Synthetic
ugguagaaaaaccaaaaagga

SEQ ID NO: 85463 - RNA, 22 nt, Artificial Sequence
  Synthetic
cugguagaaaaaccaaaaagga

SEQ ID NO: 85464 - RNA, 24 nt, Artificial Sequence
  Synthetic
ugcugguagaaaaaccaaaaagga

SEQ ID NO: 85465 - RNA, 18 nt, Artificial Sequence
  Synthetic
ucuuuuacugcaaaagga

SEQ ID NO: 85466 - RNA, 19 nt, Artificial Sequence
  Synthetic
cucuuuuacugcaaaagga

SEQ ID NO: 85467 - RNA, 20 nt, Artificial Sequence
  Synthetic
ucucuuuuacugcaaaagga

SEQ ID NO: 85468 - RNA, 21 nt, Artificial Sequence
  Synthetic
aucucuuuuacugcaaaagga

SEQ ID NO: 85469 - RNA, 22 nt, Artificial Sequence
  Synthetic
aaucucuuuuacugcaaaagga

SEQ ID NO: 85470 - RNA, 23 nt, Artificial Sequence
  Synthetic
caaucucuuuuacugcaaaagga

SEQ ID NO: 85471 - RNA, 24 nt, Artificial Sequence
  Synthetic
acaaucucuuuuacugcaaaagga

SEQ ID NO: 85472 - RNA, 21 nt, Artificial Sequence
  Synthetic
uacauacucaaaagaaaagga

SEQ ID NO: 85473 - RNA, 19 nt, Artificial Sequence
  Synthetic
ugaaguccccagaaaagga

SEQ ID NO: 85474 - RNA, 20 nt, Artificial Sequence
  Synthetic
cugaaguccccagaaaagga

SEQ ID NO: 85475 - RNA, 21 nt, Artificial Sequence
  Synthetic
acugaaguccccagaaaagga

SEQ ID NO: 85476 - RNA, 23 nt, Artificial Sequence
  Synthetic
agacugaaguccccagaaaagga

SEQ ID NO: 85477 - RNA, 24 nt, Artificial Sequence
  Synthetic
aagacugaaguccccagaaaagga

SEQ ID NO: 85478 - RNA, 21 nt, Artificial Sequence
  Synthetic
ugaaauuuauauuucaaagga

SEQ ID NO: 85479 - RNA, 22 nt, Artificial Sequence
  Synthetic
augaaauuuauauuucaaagga

SEQ ID NO: 85480 - RNA, 23 nt, Artificial Sequence
  Synthetic
caugaaauuuauauuucaaagga

SEQ ID NO: 85481 - RNA, 24 nt, Artificial Sequence
  Synthetic
ucaugaaauuuauauuucaaagga

SEQ ID NO: 85482 - RNA, 18 nt, Artificial Sequence
  Synthetic
aaguacaacaugaaagga

SEQ ID NO: 85483 - RNA, 20 nt, Artificial Sequence
  Synthetic
agaaguacaacaugaaagga

SEQ ID NO: 85484 - RNA, 21 nt, Artificial Sequence
  Synthetic
uagaaguacaacaugaaagga

SEQ ID NO: 85485 - RNA, 22 nt, Artificial Sequence
  Synthetic
uuagaaguacaacaugaaagga

SEQ ID NO: 85486 - RNA, 23 nt, Artificial Sequence
  Synthetic
auuagaaguacaacaugaaagga

SEQ ID NO: 85487 - RNA, 24 nt, Artificial Sequence
  Synthetic
aauuagaaguacaacaugaaagga

SEQ ID NO: 85488 - RNA, 18 nt, Artificial Sequence
  Synthetic
caaccaacaaauaaagga

SEQ ID NO: 85489 - RNA, 19 nt, Artificial Sequence
  Synthetic
ucaaccaacaaauaaagga

SEQ ID NO: 85490 - RNA, 20 nt, Artificial Sequence
  Synthetic
aucaaccaacaaauaaagga

SEQ ID NO: 85491 - RNA, 21 nt, Artificial Sequence
  Synthetic
uaucaaccaacaaauaaagga

SEQ ID NO: 85492 - RNA, 22 nt, Artificial Sequence
  Synthetic
uuaucaaccaacaaauaaagga

SEQ ID NO: 85493 - RNA, 23 nt, Artificial Sequence
  Synthetic
auuaucaaccaacaaauaaagga

SEQ ID NO: 85494 - RNA, 24 nt, Artificial Sequence
  Synthetic
cauuaucaaccaacaaauaaagga

SEQ ID NO: 85495 - RNA, 18 nt, Artificial Sequence
  Synthetic
caaggguuaaguaaagga

SEQ ID NO: 85496 - RNA, 19 nt, Artificial Sequence
  Synthetic
ucaaggguuaaguaaagga

SEQ ID NO: 85497 - RNA, 21 nt, Artificial Sequence
  Synthetic
agucaaggguuaaguaaagga

SEQ ID NO: 85498 - RNA, 23 nt, Artificial Sequence
  Synthetic
ugagucaaggguuaaguaaagga

SEQ ID NO: 85499 - RNA, 24 nt, Artificial Sequence
  Synthetic
augagucaaggguuaaguaaagga

SEQ ID NO: 85500 - RNA, 18 nt, Artificial Sequence
  Synthetic
uugccucaaaggcaagga

SEQ ID NO: 85501 - RNA, 19 nt, Artificial Sequence
  Synthetic
cuugccucaaaggcaagga

SEQ ID NO: 85502 - RNA, 20 nt, Artificial Sequence
  Synthetic
ccuugccucaaaggcaagga

SEQ ID NO: 85503 - RNA, 21 nt, Artificial Sequence
  Synthetic
uccuugccucaaaggcaagga

SEQ ID NO: 85504 - RNA, 23 nt, Artificial Sequence
  Synthetic
uguccuugccucaaaggcaagga

SEQ ID NO: 85505 - RNA, 18 nt, Artificial Sequence
  Synthetic
cugcaaggugggcaagga

SEQ ID NO: 85506 - RNA, 19 nt, Artificial Sequence
  Synthetic
ccugcaaggugggcaagga

SEQ ID NO: 85507 - RNA, 20 nt, Artificial Sequence
  Synthetic
accugcaaggugggcaagga

SEQ ID NO: 85508 - RNA, 21 nt, Artificial Sequence
  Synthetic
caccugcaaggugggcaagga

SEQ ID NO: 85509 - RNA, 22 nt, Artificial Sequence
  Synthetic
ccaccugcaaggugggcaagga

SEQ ID NO: 85510 - RNA, 23 nt, Artificial Sequence
  Synthetic
uccaccugcaaggugggcaagga

SEQ ID NO: 85511 - RNA, 24 nt, Artificial Sequence
  Synthetic
auccaccugcaaggugggcaagga

SEQ ID NO: 85512 - RNA, 22 nt, Artificial Sequence
  Synthetic
aggaguguagaaauuucaagga

SEQ ID NO: 85513 - RNA, 24 nt, Artificial Sequence
  Synthetic
ugaggaguguagaaauuucaagga

SEQ ID NO: 85514 - RNA, 21 nt, Artificial Sequence
  Synthetic
aaacaaaacacaggagaagga

SEQ ID NO: 85515 - RNA, 24 nt, Artificial Sequence
  Synthetic
aggaaacaaaacacaggagaagga

SEQ ID NO: 85516 - RNA, 18 nt, Artificial Sequence
  Synthetic
ccaugaaccugggaagga

SEQ ID NO: 85517 - RNA, 19 nt, Artificial Sequence
  Synthetic
uccaugaaccugggaagga

SEQ ID NO: 85518 - RNA, 21 nt, Artificial Sequence
  Synthetic
uguccaugaaccugggaagga

SEQ ID NO: 85519 - RNA, 22 nt, Artificial Sequence
  Synthetic
auguccaugaaccugggaagga

SEQ ID NO: 85520 - RNA, 23 nt, Artificial Sequence
  Synthetic
aauguccaugaaccugggaagga

SEQ ID NO: 85521 - RNA, 24 nt, Artificial Sequence
  Synthetic
aaauguccaugaaccugggaagga

SEQ ID NO: 85522 - RNA, 21 nt, Artificial Sequence
  Synthetic
auuggagacagaaaugaagga

SEQ ID NO: 85523 - RNA, 22 nt, Artificial Sequence
  Synthetic
cauuggagacagaaaugaagga

SEQ ID NO: 85524 - RNA, 24 nt, Artificial Sequence
  Synthetic
ugcauuggagacagaaaugaagga

SEQ ID NO: 85525 - RNA, 18 nt, Artificial Sequence
  Synthetic
ugcuuccuaaaugaagga

SEQ ID NO: 85526 - RNA, 19 nt, Artificial Sequence
  Synthetic
augcuuccuaaaugaagga

SEQ ID NO: 85527 - RNA, 20 nt, Artificial Sequence
  Synthetic
caugcuuccuaaaugaagga

SEQ ID NO: 85528 - RNA, 21 nt, Artificial Sequence
  Synthetic
acaugcuuccuaaaugaagga

SEQ ID NO: 85529 - RNA, 22 nt, Artificial Sequence
  Synthetic
uacaugcuuccuaaaugaagga

SEQ ID NO: 85530 - RNA, 24 nt, Artificial Sequence
  Synthetic
aguacaugcuuccuaaaugaagga

SEQ ID NO: 85531 - RNA, 20 nt, Artificial Sequence
  Synthetic
aggauauaguagaauaagga

SEQ ID NO: 85532 - RNA, 21 nt, Artificial Sequence
  Synthetic
uaggauauaguagaauaagga

SEQ ID NO: 85533 - RNA, 22 nt, Artificial Sequence
  Synthetic
auaggauauaguagaauaagga

SEQ ID NO: 85534 - RNA, 24 nt, Artificial Sequence
  Synthetic
agauaggauauaguagaauaagga

SEQ ID NO: 85535 - RNA, 18 nt, Artificial Sequence
  Synthetic
ucaaccucuggauaagga

SEQ ID NO: 85536 - RNA, 19 nt, Artificial Sequence
  Synthetic
uucaaccucuggauaagga

SEQ ID NO: 85537 - RNA, 20 nt, Artificial Sequence
  Synthetic
uuucaaccucuggauaagga

SEQ ID NO: 85538 - RNA, 21 nt, Artificial Sequence
  Synthetic
auuucaaccucuggauaagga

SEQ ID NO: 85539 - RNA, 22 nt, Artificial Sequence
  Synthetic
aauuucaaccucuggauaagga

SEQ ID NO: 85540 - RNA, 23 nt, Artificial Sequence
  Synthetic
caauuucaaccucuggauaagga

SEQ ID NO: 85541 - RNA, 24 nt, Artificial Sequence
  Synthetic
acaauuucaaccucuggauaagga

SEQ ID NO: 85542 - RNA, 18 nt, Artificial Sequence
  Synthetic
aauauuuugauauaagga

SEQ ID NO: 85543 - RNA, 19 nt, Artificial Sequence
  Synthetic
caauauuuugauauaagga

SEQ ID NO: 85544 - RNA, 22 nt, Artificial Sequence
  Synthetic
aggcaauauuuugauauaagga

SEQ ID NO: 85545 - RNA, 23 nt, Artificial Sequence
  Synthetic
uaggcaauauuuugauauaagga

SEQ ID NO: 85546 - RNA, 24 nt, Artificial Sequence
  Synthetic
uuaggcaauauuuugauauaagga

SEQ ID NO: 85547 - RNA, 18 nt, Artificial Sequence
  Synthetic
accaguaacagcuaagga

SEQ ID NO: 85548 - RNA, 20 nt, Artificial Sequence
  Synthetic
agaccaguaacagcuaagga

SEQ ID NO: 85549 - RNA, 21 nt, Artificial Sequence
  Synthetic
aagaccaguaacagcuaagga

SEQ ID NO: 85550 - RNA, 22 nt, Artificial Sequence
  Synthetic
aaagaccaguaacagcuaagga

SEQ ID NO: 85551 - RNA, 23 nt, Artificial Sequence
  Synthetic
aaaagaccaguaacagcuaagga

SEQ ID NO: 85552 - RNA, 18 nt, Artificial Sequence
  Synthetic
agagcaugaugguaagga

SEQ ID NO: 85553 - RNA, 19 nt, Artificial Sequence
  Synthetic
uagagcaugaugguaagga

SEQ ID NO: 85554 - RNA, 20 nt, Artificial Sequence
  Synthetic
cuagagcaugaugguaagga

SEQ ID NO: 85555 - RNA, 21 nt, Artificial Sequence
  Synthetic
ucuagagcaugaugguaagga

SEQ ID NO: 85556 - RNA, 22 nt, Artificial Sequence
  Synthetic
uucuagagcaugaugguaagga

SEQ ID NO: 85557 - RNA, 24 nt, Artificial Sequence
  Synthetic
uguucuagagcaugaugguaagga

SEQ ID NO: 85558 - RNA, 18 nt, Artificial Sequence
  Synthetic
ccaucauauuguuaagga

SEQ ID NO: 85559 - RNA, 19 nt, Artificial Sequence
  Synthetic
accaucauauuguuaagga

SEQ ID NO: 85560 - RNA, 20 nt, Artificial Sequence
  Synthetic
uaccaucauauuguuaagga

SEQ ID NO: 85561 - RNA, 21 nt, Artificial Sequence
  Synthetic
uuaccaucauauuguuaagga

SEQ ID NO: 85562 - RNA, 23 nt, Artificial Sequence
  Synthetic
uguuaccaucauauuguuaagga

SEQ ID NO: 85563 - RNA, 24 nt, Artificial Sequence
  Synthetic
cuguuaccaucauauuguuaagga

SEQ ID NO: 85564 - RNA, 18 nt, Artificial Sequence
  Synthetic
aacauaaccacaacagga

SEQ ID NO: 85565 - RNA, 19 nt, Artificial Sequence
  Synthetic
aaacauaaccacaacagga

SEQ ID NO: 85566 - RNA, 22 nt, Artificial Sequence
  Synthetic
uggaaacauaaccacaacagga

SEQ ID NO: 85567 - RNA, 24 nt, Artificial Sequence
  Synthetic
aguggaaacauaaccacaacagga

SEQ ID NO: 85568 - RNA, 21 nt, Artificial Sequence
  Synthetic
auucaaacuaaagcaacagga

SEQ ID NO: 85569 - RNA, 22 nt, Artificial Sequence
  Synthetic
aauucaaacuaaagcaacagga

SEQ ID NO: 85570 - RNA, 23 nt, Artificial Sequence
  Synthetic
caauucaaacuaaagcaacagga

SEQ ID NO: 85571 - RNA, 24 nt, Artificial Sequence
  Synthetic
ucaauucaaacuaaagcaacagga

SEQ ID NO: 85572 - RNA, 18 nt, Artificial Sequence
  Synthetic
uggggaaccuacacagga

SEQ ID NO: 85573 - RNA, 19 nt, Artificial Sequence
  Synthetic
uuggggaaccuacacagga

SEQ ID NO: 85574 - RNA, 21 nt, Artificial Sequence
  Synthetic
aguuggggaaccuacacagga

SEQ ID NO: 85575 - RNA, 22 nt, Artificial Sequence
  Synthetic
uaguuggggaaccuacacagga

SEQ ID NO: 85576 - RNA, 24 nt, Artificial Sequence
  Synthetic
aguaguuggggaaccuacacagga

SEQ ID NO: 85577 - RNA, 19 nt, Artificial Sequence
  Synthetic
ugcccuucgcaaggcagga

SEQ ID NO: 85578 - RNA, 21 nt, Artificial Sequence
  Synthetic
ugugcccuucgcaaggcagga

SEQ ID NO: 85579 - RNA, 22 nt, Artificial Sequence
  Synthetic
augugcccuucgcaaggcagga

SEQ ID NO: 85580 - RNA, 23 nt, Artificial Sequence
  Synthetic
uaugugcccuucgcaaggcagga

SEQ ID NO: 85581 - RNA, 24 nt, Artificial Sequence
  Synthetic
cuaugugcccuucgcaaggcagga

SEQ ID NO: 85582 - RNA, 18 nt, Artificial Sequence
  Synthetic
aucacguuaagggcagga

SEQ ID NO: 85583 - RNA, 19 nt, Artificial Sequence
  Synthetic
caucacguuaagggcagga

SEQ ID NO: 85584 - RNA, 20 nt, Artificial Sequence
  Synthetic
acaucacguuaagggcagga

SEQ ID NO: 85585 - RNA, 21 nt, Artificial Sequence
  Synthetic
aacaucacguuaagggcagga

SEQ ID NO: 85586 - RNA, 22 nt, Artificial Sequence
  Synthetic
aaacaucacguuaagggcagga

SEQ ID NO: 85587 - RNA, 23 nt, Artificial Sequence
  Synthetic
aaaacaucacguuaagggcagga

SEQ ID NO: 85588 - RNA, 24 nt, Artificial Sequence
  Synthetic
aaaaacaucacguuaagggcagga

SEQ ID NO: 85589 - RNA, 18 nt, Artificial Sequence
  Synthetic
aucaagggaggggcagga

SEQ ID NO: 85590 - RNA, 19 nt, Artificial Sequence
  Synthetic
aaucaagggaggggcagga

SEQ ID NO: 85591 - RNA, 23 nt, Artificial Sequence
  Synthetic
ugggaaucaagggaggggcagga

SEQ ID NO: 85592 - RNA, 24 nt, Artificial Sequence
  Synthetic
cugggaaucaagggaggggcagga

SEQ ID NO: 85593 - RNA, 18 nt, Artificial Sequence
  Synthetic
agccacuggugggcagga

SEQ ID NO: 85594 - RNA, 21 nt, Artificial Sequence
  Synthetic
uggagccacuggugggcagga

SEQ ID NO: 85595 - RNA, 22 nt, Artificial Sequence
  Synthetic
uuggagccacuggugggcagga

SEQ ID NO: 85596 - RNA, 23 nt, Artificial Sequence
  Synthetic
auuggagccacuggugggcagga

SEQ ID NO: 85597 - RNA, 19 nt, Artificial Sequence
  Synthetic
aguuccucacagugcagga

SEQ ID NO: 85598 - RNA, 21 nt, Artificial Sequence
  Synthetic
agaguuccucacagugcagga

SEQ ID NO: 85599 - RNA, 22 nt, Artificial Sequence
  Synthetic
cagaguuccucacagugcagga

SEQ ID NO: 85600 - RNA, 23 nt, Artificial Sequence
  Synthetic
acagaguuccucacagugcagga

SEQ ID NO: 85601 - RNA, 24 nt, Artificial Sequence
  Synthetic
cacagaguuccucacagugcagga

SEQ ID NO: 85602 - RNA, 21 nt, Artificial Sequence
  Synthetic
uauuuggucauaggcucagga

SEQ ID NO: 85603 - RNA, 22 nt, Artificial Sequence
  Synthetic
auauuuggucauaggcucagga

SEQ ID NO: 85604 - RNA, 23 nt, Artificial Sequence
  Synthetic
uauauuuggucauaggcucagga

SEQ ID NO: 85605 - RNA, 24 nt, Artificial Sequence
  Synthetic
auauauuuggucauaggcucagga

SEQ ID NO: 85606 - RNA, 18 nt, Artificial Sequence
  Synthetic
acaagcugcucuucagga

SEQ ID NO: 85607 - RNA, 20 nt, Artificial Sequence
  Synthetic
ugacaagcugcucuucagga

SEQ ID NO: 85608 - RNA, 23 nt, Artificial Sequence
  Synthetic
uggugacaagcugcucuucagga

SEQ ID NO: 85609 - RNA, 24 nt, Artificial Sequence
  Synthetic
uuggugacaagcugcucuucagga

SEQ ID NO: 85610 - RNA, 18 nt, Artificial Sequence
  Synthetic
cuucucuauauuucagga

SEQ ID NO: 85611 - RNA, 20 nt, Artificial Sequence
  Synthetic
agcuucucuauauuucagga

SEQ ID NO: 85612 - RNA, 21 nt, Artificial Sequence
  Synthetic
aagcuucucuauauuucagga

SEQ ID NO: 85613 - RNA, 22 nt, Artificial Sequence
  Synthetic
aaagcuucucuauauuucagga

SEQ ID NO: 85614 - RNA, 23 nt, Artificial Sequence
  Synthetic
uaaagcuucucuauauuucagga

SEQ ID NO: 85615 - RNA, 24 nt, Artificial Sequence
  Synthetic
uuaaagcuucucuauauuucagga

SEQ ID NO: 85616 - RNA, 18 nt, Artificial Sequence
  Synthetic
uaauagaauuuuucagga

SEQ ID NO: 85617 - RNA, 19 nt, Artificial Sequence
  Synthetic
uuaauagaauuuuucagga

SEQ ID NO: 85618 - RNA, 20 nt, Artificial Sequence
  Synthetic
auuaauagaauuuuucagga

SEQ ID NO: 85619 - RNA, 21 nt, Artificial Sequence
  Synthetic
aauuaauagaauuuuucagga

SEQ ID NO: 85620 - RNA, 22 nt, Artificial Sequence
  Synthetic
aaauuaauagaauuuuucagga

SEQ ID NO: 85621 - RNA, 23 nt, Artificial Sequence
  Synthetic
aaaauuaauagaauuuuucagga

SEQ ID NO: 85622 - RNA, 18 nt, Artificial Sequence
  Synthetic
uucagguguuauagagga

SEQ ID NO: 85623 - RNA, 19 nt, Artificial Sequence
  Synthetic
auucagguguuauagagga

SEQ ID NO: 85624 - RNA, 20 nt, Artificial Sequence
  Synthetic
cauucagguguuauagagga

SEQ ID NO: 85625 - RNA, 21 nt, Artificial Sequence
  Synthetic
ucauucagguguuauagagga

SEQ ID NO: 85626 - RNA, 22 nt, Artificial Sequence
  Synthetic
aucauucagguguuauagagga

SEQ ID NO: 85627 - RNA, 23 nt, Artificial Sequence
  Synthetic
aaucauucagguguuauagagga

SEQ ID NO: 85628 - RNA, 18 nt, Artificial Sequence
  Synthetic
aggcacccagcaggagga

SEQ ID NO: 85629 - RNA, 19 nt, Artificial Sequence
  Synthetic
aaggcacccagcaggagga

SEQ ID NO: 85630 - RNA, 21 nt, Artificial Sequence
  Synthetic
agaaggcacccagcaggagga

SEQ ID NO: 85631 - RNA, 23 nt, Artificial Sequence
  Synthetic
agagaaggcacccagcaggagga

SEQ ID NO: 85632 - RNA, 24 nt, Artificial Sequence
  Synthetic
cagagaaggcacccagcaggagga

SEQ ID NO: 85633 - RNA, 18 nt, Artificial Sequence
  Synthetic
agcugggugagaggagga

SEQ ID NO: 85634 - RNA, 20 nt, Artificial Sequence
  Synthetic
ugagcugggugagaggagga

SEQ ID NO: 85635 - RNA, 21 nt, Artificial Sequence
  Synthetic
augagcugggugagaggagga

SEQ ID NO: 85636 - RNA, 23 nt, Artificial Sequence
  Synthetic
agaugagcugggugagaggagga

SEQ ID NO: 85637 - RNA, 24 nt, Artificial Sequence
  Synthetic
aagaugagcugggugagaggagga

SEQ ID NO: 85638 - RNA, 19 nt, Artificial Sequence
  Synthetic
uggguccgugaaaugagga

SEQ ID NO: 85639 - RNA, 20 nt, Artificial Sequence
  Synthetic
auggguccgugaaaugagga

SEQ ID NO: 85640 - RNA, 21 nt, Artificial Sequence
  Synthetic
uauggguccgugaaaugagga

SEQ ID NO: 85641 - RNA, 22 nt, Artificial Sequence
  Synthetic
uuauggguccgugaaaugagga

SEQ ID NO: 85642 - RNA, 23 nt, Artificial Sequence
  Synthetic
uuuauggguccgugaaaugagga

SEQ ID NO: 85643 - RNA, 24 nt, Artificial Sequence
  Synthetic
uuuuauggguccgugaaaugagga

SEQ ID NO: 85644 - RNA, 18 nt, Artificial Sequence
  Synthetic
uaguauugugaaugagga

SEQ ID NO: 85645 - RNA, 20 nt, Artificial Sequence
  Synthetic
aguaguauugugaaugagga

SEQ ID NO: 85646 - RNA, 21 nt, Artificial Sequence
  Synthetic
caguaguauugugaaugagga

SEQ ID NO: 85647 - RNA, 22 nt, Artificial Sequence
  Synthetic
acaguaguauugugaaugagga

SEQ ID NO: 85648 - RNA, 24 nt, Artificial Sequence
  Synthetic
agacaguaguauugugaaugagga

SEQ ID NO: 85649 - RNA, 18 nt, Artificial Sequence
  Synthetic
acucagagucacugagga

SEQ ID NO: 85650 - RNA, 19 nt, Artificial Sequence
  Synthetic
uacucagagucacugagga

SEQ ID NO: 85651 - RNA, 20 nt, Artificial Sequence
  Synthetic
auacucagagucacugagga

SEQ ID NO: 85652 - RNA, 21 nt, Artificial Sequence
  Synthetic
aauacucagagucacugagga

SEQ ID NO: 85653 - RNA, 22 nt, Artificial Sequence
  Synthetic
uaauacucagagucacugagga

SEQ ID NO: 85654 - RNA, 23 nt, Artificial Sequence
  Synthetic
cuaauacucagagucacugagga

SEQ ID NO: 85655 - RNA, 18 nt, Artificial Sequence
  Synthetic
auaauccuggacugagga

SEQ ID NO: 85656 - RNA, 19 nt, Artificial Sequence
  Synthetic
uauaauccuggacugagga

SEQ ID NO: 85657 - RNA, 21 nt, Artificial Sequence
  Synthetic
aguauaauccuggacugagga

SEQ ID NO: 85658 - RNA, 22 nt, Artificial Sequence
  Synthetic
uaguauaauccuggacugagga

SEQ ID NO: 85659 - RNA, 23 nt, Artificial Sequence
  Synthetic
uuaguauaauccuggacugagga

SEQ ID NO: 85660 - RNA, 24 nt, Artificial Sequence
  Synthetic
uuuaguauaauccuggacugagga

SEQ ID NO: 85661 - RNA, 18 nt, Artificial Sequence
  Synthetic
uuuacaacuuacugagga

SEQ ID NO: 85662 - RNA, 19 nt, Artificial Sequence
  Synthetic
cuuuacaacuuacugagga

SEQ ID NO: 85663 - RNA, 20 nt, Artificial Sequence
  Synthetic
ucuuuacaacuuacugagga

SEQ ID NO: 85664 - RNA, 21 nt, Artificial Sequence
  Synthetic
aucuuuacaacuuacugagga

SEQ ID NO: 85665 - RNA, 22 nt, Artificial Sequence
  Synthetic
aaucuuuacaacuuacugagga

SEQ ID NO: 85666 - RNA, 23 nt, Artificial Sequence
  Synthetic
aaaucuuuacaacuuacugagga

SEQ ID NO: 85667 - RNA, 24 nt, Artificial Sequence
  Synthetic
caaaucuuuacaacuuacugagga

SEQ ID NO: 85668 - RNA, 18 nt, Artificial Sequence
  Synthetic
aguaggcauagcugagga

SEQ ID NO: 85669 - RNA, 19 nt, Artificial Sequence
  Synthetic
aaguaggcauagcugagga

SEQ ID NO: 85670 - RNA, 21 nt, Artificial Sequence
  Synthetic
agaaguaggcauagcugagga

SEQ ID NO: 85671 - RNA, 22 nt, Artificial Sequence
  Synthetic
cagaaguaggcauagcugagga

SEQ ID NO: 85672 - RNA, 23 nt, Artificial Sequence
  Synthetic
ucagaaguaggcauagcugagga

SEQ ID NO: 85673 - RNA, 24 nt, Artificial Sequence
  Synthetic
cucagaaguaggcauagcugagga

SEQ ID NO: 85674 - RNA, 18 nt, Artificial Sequence
  Synthetic
ccaaaauagaagugagga

SEQ ID NO: 85675 - RNA, 19 nt, Artificial Sequence
  Synthetic
cccaaaauagaagugagga

SEQ ID NO: 85676 - RNA, 20 nt, Artificial Sequence
  Synthetic
acccaaaauagaagugagga

SEQ ID NO: 85677 - RNA, 21 nt, Artificial Sequence
  Synthetic
aacccaaaauagaagugagga

SEQ ID NO: 85678 - RNA, 22 nt, Artificial Sequence
  Synthetic
aaacccaaaauagaagugagga

SEQ ID NO: 85679 - RNA, 23 nt, Artificial Sequence
  Synthetic
aaaacccaaaauagaagugagga

SEQ ID NO: 85680 - RNA, 24 nt, Artificial Sequence
  Synthetic
aaaaacccaaaauagaagugagga

SEQ ID NO: 85681 - RNA, 18 nt, Artificial Sequence
  Synthetic
ugugaauuaaugugagga

SEQ ID NO: 85682 - RNA, 19 nt, Artificial Sequence
  Synthetic
augugaauuaaugugagga

SEQ ID NO: 85683 - RNA, 20 nt, Artificial Sequence
  Synthetic
caugugaauuaaugugagga

SEQ ID NO: 85684 - RNA, 21 nt, Artificial Sequence
  Synthetic
acaugugaauuaaugugagga

SEQ ID NO: 85685 - RNA, 22 nt, Artificial Sequence
  Synthetic
uacaugugaauuaaugugagga

SEQ ID NO: 85686 - RNA, 23 nt, Artificial Sequence
  Synthetic
cuacaugugaauuaaugugagga

SEQ ID NO: 85687 - RNA, 24 nt, Artificial Sequence
  Synthetic
ccuacaugugaauuaaugugagga

SEQ ID NO: 85688 - RNA, 18 nt, Artificial Sequence
  Synthetic
acucucuuguugugagga

SEQ ID NO: 85689 - RNA, 19 nt, Artificial Sequence
  Synthetic
cacucucuuguugugagga

SEQ ID NO: 85690 - RNA, 22 nt, Artificial Sequence
  Synthetic
uggcacucucuuguugugagga

SEQ ID NO: 85691 - RNA, 23 nt, Artificial Sequence
  Synthetic
cuggcacucucuuguugugagga

SEQ ID NO: 85692 - RNA, 24 nt, Artificial Sequence
  Synthetic
acuggcacucucuuguugugagga

SEQ ID NO: 85693 - RNA, 21 nt, Artificial Sequence
  Synthetic
auaaaaguaugaaaaauagga

SEQ ID NO: 85694 - RNA, 22 nt, Artificial Sequence
  Synthetic
uauaaaaguaugaaaaauagga

SEQ ID NO: 85695 - RNA, 24 nt, Artificial Sequence
  Synthetic
aguauaaaaguaugaaaaauagga

SEQ ID NO: 85696 - RNA, 18 nt, Artificial Sequence
  Synthetic
uagaacaaaagaauagga

SEQ ID NO: 85697 - RNA, 19 nt, Artificial Sequence
  Synthetic
uuagaacaaaagaauagga

SEQ ID NO: 85698 - RNA, 20 nt, Artificial Sequence
  Synthetic
uuuagaacaaaagaauagga

SEQ ID NO: 85699 - RNA, 21 nt, Artificial Sequence
  Synthetic
cuuuagaacaaaagaauagga

SEQ ID NO: 85700 - RNA, 22 nt, Artificial Sequence
  Synthetic
ccuuuagaacaaaagaauagga

SEQ ID NO: 85701 - RNA, 23 nt, Artificial Sequence
  Synthetic
uccuuuagaacaaaagaauagga

SEQ ID NO: 85702 - RNA, 24 nt, Artificial Sequence
  Synthetic
auccuuuagaacaaaagaauagga

SEQ ID NO: 85703 - RNA, 20 nt, Artificial Sequence
  Synthetic
uggcacguuuaaacauagga

SEQ ID NO: 85704 - RNA, 21 nt, Artificial Sequence
  Synthetic
cuggcacguuuaaacauagga

SEQ ID NO: 85705 - RNA, 22 nt, Artificial Sequence
  Synthetic
ucuggcacguuuaaacauagga

SEQ ID NO: 85706 - RNA, 23 nt, Artificial Sequence
  Synthetic
cucuggcacguuuaaacauagga

SEQ ID NO: 85707 - RNA, 24 nt, Artificial Sequence
  Synthetic
acucuggcacguuuaaacauagga

SEQ ID NO: 85708 - RNA, 18 nt, Artificial Sequence
  Synthetic
aggucccuuaucauagga

SEQ ID NO: 85709 - RNA, 19 nt, Artificial Sequence
  Synthetic
uaggucccuuaucauagga

SEQ ID NO: 85710 - RNA, 20 nt, Artificial Sequence
  Synthetic
uuaggucccuuaucauagga

SEQ ID NO: 85711 - RNA, 21 nt, Artificial Sequence
  Synthetic
uuuaggucccuuaucauagga

SEQ ID NO: 85712 - RNA, 22 nt, Artificial Sequence
  Synthetic
cuuuaggucccuuaucauagga

SEQ ID NO: 85713 - RNA, 23 nt, Artificial Sequence
  Synthetic
acuuuaggucccuuaucauagga

SEQ ID NO: 85714 - RNA, 24 nt, Artificial Sequence
  Synthetic
cacuuuaggucccuuaucauagga

SEQ ID NO: 85715 - RNA, 19 nt, Artificial Sequence
  Synthetic
aguaugauauaauauagga

SEQ ID NO: 85716 - RNA, 20 nt, Artificial Sequence
  Synthetic
uaguaugauauaauauagga

SEQ ID NO: 85717 - RNA, 21 nt, Artificial Sequence
  Synthetic
auaguaugauauaauauagga

SEQ ID NO: 85718 - RNA, 23 nt, Artificial Sequence
  Synthetic
ugauaguaugauauaauauagga

SEQ ID NO: 85719 - RNA, 24 nt, Artificial Sequence
  Synthetic
augauaguaugauauaauauagga

SEQ ID NO: 85720 - RNA, 18 nt, Artificial Sequence
  Synthetic
acuuguuaaacacuagga

SEQ ID NO: 85721 - RNA, 19 nt, Artificial Sequence
  Synthetic
cacuuguuaaacacuagga

SEQ ID NO: 85722 - RNA, 20 nt, Artificial Sequence
  Synthetic
acacuuguuaaacacuagga

SEQ ID NO: 85723 - RNA, 21 nt, Artificial Sequence
  Synthetic
aacacuuguuaaacacuagga

SEQ ID NO: 85724 - RNA, 24 nt, Artificial Sequence
  Synthetic
uggaacacuuguuaaacacuagga

SEQ ID NO: 85725 - RNA, 19 nt, Artificial Sequence
  Synthetic
agagcaaugcagacuagga

SEQ ID NO: 85726 - RNA, 20 nt, Artificial Sequence
  Synthetic
uagagcaaugcagacuagga

SEQ ID NO: 85727 - RNA, 21 nt, Artificial Sequence
  Synthetic
auagagcaaugcagacuagga

SEQ ID NO: 85728 - RNA, 22 nt, Artificial Sequence
  Synthetic
cauagagcaaugcagacuagga

SEQ ID NO: 85729 - RNA, 23 nt, Artificial Sequence
  Synthetic
ccauagagcaaugcagacuagga

SEQ ID NO: 85730 - RNA, 18 nt, Artificial Sequence
  Synthetic
ccuuucuaaugacuagga

SEQ ID NO: 85731 - RNA, 19 nt, Artificial Sequence
  Synthetic
cccuuucuaaugacuagga

SEQ ID NO: 85732 - RNA, 20 nt, Artificial Sequence
  Synthetic
ucccuuucuaaugacuagga

SEQ ID NO: 85733 - RNA, 21 nt, Artificial Sequence
  Synthetic
cucccuuucuaaugacuagga

SEQ ID NO: 85734 - RNA, 22 nt, Artificial Sequence
  Synthetic
acucccuuucuaaugacuagga

SEQ ID NO: 85735 - RNA, 23 nt, Artificial Sequence
  Synthetic
cacucccuuucuaaugacuagga

SEQ ID NO: 85736 - RNA, 24 nt, Artificial Sequence
  Synthetic
ccacucccuuucuaaugacuagga

SEQ ID NO: 85737 - RNA, 18 nt, Artificial Sequence
  Synthetic
caagagaaugaucuagga

SEQ ID NO: 85738 - RNA, 20 nt, Artificial Sequence
  Synthetic
agcaagagaaugaucuagga

SEQ ID NO: 85739 - RNA, 21 nt, Artificial Sequence
  Synthetic
aagcaagagaaugaucuagga

SEQ ID NO: 85740 - RNA, 22 nt, Artificial Sequence
  Synthetic
aaagcaagagaaugaucuagga

SEQ ID NO: 85741 - RNA, 23 nt, Artificial Sequence
  Synthetic
aaaagcaagagaaugaucuagga

SEQ ID NO: 85742 - RNA, 24 nt, Artificial Sequence
  Synthetic
caaaagcaagagaaugaucuagga

SEQ ID NO: 85743 - RNA, 18 nt, Artificial Sequence
  Synthetic
cuguuacuuuuucuagga

SEQ ID NO: 85744 - RNA, 19 nt, Artificial Sequence
  Synthetic
ccuguuacuuuuucuagga

SEQ ID NO: 85745 - RNA, 20 nt, Artificial Sequence
  Synthetic
accuguuacuuuuucuagga

SEQ ID NO: 85746 - RNA, 22 nt, Artificial Sequence
  Synthetic
agaccuguuacuuuuucuagga

SEQ ID NO: 85747 - RNA, 23 nt, Artificial Sequence
  Synthetic
uagaccuguuacuuuuucuagga

SEQ ID NO: 85748 - RNA, 18 nt, Artificial Sequence
  Synthetic
ugagccuuauggguagga

SEQ ID NO: 85749 - RNA, 20 nt, Artificial Sequence
  Synthetic
ugugagccuuauggguagga

SEQ ID NO: 85750 - RNA, 21 nt, Artificial Sequence
  Synthetic
cugugagccuuauggguagga

SEQ ID NO: 85751 - RNA, 22 nt, Artificial Sequence
  Synthetic
ucugugagccuuauggguagga

SEQ ID NO: 85752 - RNA, 23 nt, Artificial Sequence
  Synthetic
uucugugagccuuauggguagga

SEQ ID NO: 85753 - RNA, 24 nt, Artificial Sequence
  Synthetic
auucugugagccuuauggguagga

SEQ ID NO: 85754 - RNA, 18 nt, Artificial Sequence
  Synthetic
uuuugcugcgguguagga

SEQ ID NO: 85755 - RNA, 19 nt, Artificial Sequence
  Synthetic
auuuugcugcgguguagga

SEQ ID NO: 85756 - RNA, 20 nt, Artificial Sequence
  Synthetic
cauuuugcugcgguguagga

SEQ ID NO: 85757 - RNA, 21 nt, Artificial Sequence
  Synthetic
ccauuuugcugcgguguagga

SEQ ID NO: 85758 - RNA, 22 nt, Artificial Sequence
  Synthetic
uccauuuugcugcgguguagga

SEQ ID NO: 85759 - RNA, 23 nt, Artificial Sequence
  Synthetic
auccauuuugcugcgguguagga

SEQ ID NO: 85760 - RNA, 18 nt, Artificial Sequence
  Synthetic
aaugcuggcuaaaacgga

SEQ ID NO: 85761 - RNA, 19 nt, Artificial Sequence
  Synthetic
caaugcuggcuaaaacgga

SEQ ID NO: 85762 - RNA, 20 nt, Artificial Sequence
  Synthetic
ccaaugcuggcuaaaacgga

SEQ ID NO: 85763 - RNA, 22 nt, Artificial Sequence
  Synthetic
agccaaugcuggcuaaaacgga

SEQ ID NO: 85764 - RNA, 23 nt, Artificial Sequence
  Synthetic
uagccaaugcuggcuaaaacgga

SEQ ID NO: 85765 - RNA, 24 nt, Artificial Sequence
  Synthetic
auagccaaugcuggcuaaaacgga

SEQ ID NO: 85766 - RNA, 18 nt, Artificial Sequence
  Synthetic
ugaguagaaagaaacgga

SEQ ID NO: 85767 - RNA, 21 nt, Artificial Sequence
  Synthetic
aggugaguagaaagaaacgga

SEQ ID NO: 85768 - RNA, 22 nt, Artificial Sequence
  Synthetic
uaggugaguagaaagaaacgga

SEQ ID NO: 85769 - RNA, 23 nt, Artificial Sequence
  Synthetic
auaggugaguagaaagaaacgga

SEQ ID NO: 85770 - RNA, 24 nt, Artificial Sequence
  Synthetic
aauaggugaguagaaagaaacgga

SEQ ID NO: 85771 - RNA, 18 nt, Artificial Sequence
  Synthetic
aauuggcuaagaaacgga

SEQ ID NO: 85772 - RNA, 19 nt, Artificial Sequence
  Synthetic
aaauuggcuaagaaacgga

SEQ ID NO: 85773 - RNA, 20 nt, Artificial Sequence
  Synthetic
uaaauuggcuaagaaacgga

SEQ ID NO: 85774 - RNA, 21 nt, Artificial Sequence
  Synthetic
auaaauuggcuaagaaacgga

SEQ ID NO: 85775 - RNA, 22 nt, Artificial Sequence
  Synthetic
cauaaauuggcuaagaaacgga

SEQ ID NO: 85776 - RNA, 23 nt, Artificial Sequence
  Synthetic
acauaaauuggcuaagaaacgga

SEQ ID NO: 85777 - RNA, 24 nt, Artificial Sequence
  Synthetic
uacauaaauuggcuaagaaacgga

SEQ ID NO: 85778 - RNA, 18 nt, Artificial Sequence
  Synthetic
ucagugccugugcacgga

SEQ ID NO: 85779 - RNA, 20 nt, Artificial Sequence
  Synthetic
agucagugccugugcacgga

SEQ ID NO: 85780 - RNA, 18 nt, Artificial Sequence
  Synthetic
uguaguuggaaucacgga

SEQ ID NO: 85781 - RNA, 19 nt, Artificial Sequence
  Synthetic
auguaguuggaaucacgga

SEQ ID NO: 85782 - RNA, 20 nt, Artificial Sequence
  Synthetic
aauguaguuggaaucacgga

SEQ ID NO: 85783 - RNA, 21 nt, Artificial Sequence
  Synthetic
aaauguaguuggaaucacgga

SEQ ID NO: 85784 - RNA, 22 nt, Artificial Sequence
  Synthetic
aaaauguaguuggaaucacgga

SEQ ID NO: 85785 - RNA, 18 nt, Artificial Sequence
  Synthetic
auuccccuugcccccgga

SEQ ID NO: 85786 - RNA, 19 nt, Artificial Sequence
  Synthetic
aauuccccuugcccccgga

SEQ ID NO: 85787 - RNA, 21 nt, Artificial Sequence
  Synthetic
agaauuccccuugcccccgga

SEQ ID NO: 85788 - RNA, 23 nt, Artificial Sequence
  Synthetic
agagaauuccccuugcccccgga

SEQ ID NO: 85789 - RNA, 24 nt, Artificial Sequence
  Synthetic
cagagaauuccccuugcccccgga

SEQ ID NO: 85790 - RNA, 18 nt, Artificial Sequence
  Synthetic
agaguguaggugggcgga

SEQ ID NO: 85791 - RNA, 19 nt, Artificial Sequence
  Synthetic
aagaguguaggugggcgga

SEQ ID NO: 85792 - RNA, 23 nt, Artificial Sequence
  Synthetic
ugggaagaguguaggugggcgga

SEQ ID NO: 85793 - RNA, 24 nt, Artificial Sequence
  Synthetic
cugggaagaguguaggugggcgga

SEQ ID NO: 85794 - RNA, 19 nt, Artificial Sequence
  Synthetic
uguggcaaccucaaaggga

SEQ ID NO: 85795 - RNA, 20 nt, Artificial Sequence
  Synthetic
cuguggcaaccucaaaggga

SEQ ID NO: 85796 - RNA, 21 nt, Artificial Sequence
  Synthetic
ccuguggcaaccucaaaggga

SEQ ID NO: 85797 - RNA, 23 nt, Artificial Sequence
  Synthetic
agccuguggcaaccucaaaggga

SEQ ID NO: 85798 - RNA, 24 nt, Artificial Sequence
  Synthetic
cagccuguggcaaccucaaaggga

SEQ ID NO: 85799 - RNA, 18 nt, Artificial Sequence
  Synthetic
aauguuaauauuaaggga

SEQ ID NO: 85800 - RNA, 19 nt, Artificial Sequence
  Synthetic
aaauguuaauauuaaggga

SEQ ID NO: 85801 - RNA, 20 nt, Artificial Sequence
  Synthetic
uaaauguuaauauuaaggga

SEQ ID NO: 85802 - RNA, 21 nt, Artificial Sequence
  Synthetic
cuaaauguuaauauuaaggga

SEQ ID NO: 85803 - RNA, 22 nt, Artificial Sequence
  Synthetic
ccuaaauguuaauauuaaggga

SEQ ID NO: 85804 - RNA, 23 nt, Artificial Sequence
  Synthetic
accuaaauguuaauauuaaggga

SEQ ID NO: 85805 - RNA, 24 nt, Artificial Sequence
  Synthetic
caccuaaauguuaauauuaaggga

SEQ ID NO: 85806 - RNA, 21 nt, Artificial Sequence
  Synthetic
uagggcuggaggacacaggga

SEQ ID NO: 85807 - RNA, 21 nt, Artificial Sequence
  Synthetic
ugguggugagggccacaggga

SEQ ID NO: 85808 - RNA, 22 nt, Artificial Sequence
  Synthetic
augguggugagggccacaggga

SEQ ID NO: 85809 - RNA, 23 nt, Artificial Sequence
  Synthetic
caugguggugagggccacaggga

SEQ ID NO: 85810 - RNA, 24 nt, Artificial Sequence
  Synthetic
ucaugguggugagggccacaggga

SEQ ID NO: 85811 - RNA, 18 nt, Artificial Sequence
  Synthetic
caggaaaaaugacaggga

SEQ ID NO: 85812 - RNA, 19 nt, Artificial Sequence
  Synthetic
ccaggaaaaaugacaggga

SEQ ID NO: 85813 - RNA, 20 nt, Artificial Sequence
  Synthetic
accaggaaaaaugacaggga

SEQ ID NO: 85814 - RNA, 21 nt, Artificial Sequence
  Synthetic
uaccaggaaaaaugacaggga

SEQ ID NO: 85815 - RNA, 24 nt, Artificial Sequence
  Synthetic
ugguaccaggaaaaaugacaggga

SEQ ID NO: 85816 - RNA, 18 nt, Artificial Sequence
  Synthetic
agcucuucaaagcaggga

SEQ ID NO: 85817 - RNA, 19 nt, Artificial Sequence
  Synthetic
aagcucuucaaagcaggga

SEQ ID NO: 85818 - RNA, 21 nt, Artificial Sequence
  Synthetic
ugaagcucuucaaagcaggga

SEQ ID NO: 85819 - RNA, 23 nt, Artificial Sequence
  Synthetic
ugugaagcucuucaaagcaggga

SEQ ID NO: 85820 - RNA, 24 nt, Artificial Sequence
  Synthetic
cugugaagcucuucaaagcaggga

SEQ ID NO: 85821 - RNA, 18 nt, Artificial Sequence
  Synthetic
uggccaucagaagaggga

SEQ ID NO: 85822 - RNA, 19 nt, Artificial Sequence
  Synthetic
uuggccaucagaagaggga

SEQ ID NO: 85823 - RNA, 20 nt, Artificial Sequence
  Synthetic
uuuggccaucagaagaggga

SEQ ID NO: 85824 - RNA, 22 nt, Artificial Sequence
  Synthetic
aguuuggccaucagaagaggga

SEQ ID NO: 85825 - RNA, 23 nt, Artificial Sequence
  Synthetic
aaguuuggccaucagaagaggga

SEQ ID NO: 85826 - RNA, 24 nt, Artificial Sequence
  Synthetic
aaaguuuggccaucagaagaggga

SEQ ID NO: 85827 - RNA, 18 nt, Artificial Sequence
  Synthetic
acccauaaggcagaggga

SEQ ID NO: 85828 - RNA, 19 nt, Artificial Sequence
  Synthetic
cacccauaaggcagaggga

SEQ ID NO: 85829 - RNA, 21 nt, Artificial Sequence
  Synthetic
ugcacccauaaggcagaggga

SEQ ID NO: 85830 - RNA, 22 nt, Artificial Sequence
  Synthetic
uugcacccauaaggcagaggga

SEQ ID NO: 85831 - RNA, 24 nt, Artificial Sequence
  Synthetic
aguugcacccauaaggcagaggga

SEQ ID NO: 85832 - RNA, 23 nt, Artificial Sequence
  Synthetic
aggaagagaaccagaaggaggga

SEQ ID NO: 85833 - RNA, 24 nt, Artificial Sequence
  Synthetic
caggaagagaaccagaaggaggga

SEQ ID NO: 85834 - RNA, 18 nt, Artificial Sequence
  Synthetic
auguuucccauauaggga

SEQ ID NO: 85835 - RNA, 19 nt, Artificial Sequence
  Synthetic
cauguuucccauauaggga

SEQ ID NO: 85836 - RNA, 20 nt, Artificial Sequence
  Synthetic
ucauguuucccauauaggga

SEQ ID NO: 85837 - RNA, 21 nt, Artificial Sequence
  Synthetic
uucauguuucccauauaggga

SEQ ID NO: 85838 - RNA, 22 nt, Artificial Sequence
  Synthetic
auucauguuucccauauaggga

SEQ ID NO: 85839 - RNA, 23 nt, Artificial Sequence
  Synthetic
aauucauguuucccauauaggga

SEQ ID NO: 85840 - RNA, 24 nt, Artificial Sequence
  Synthetic
caauucauguuucccauauaggga

SEQ ID NO: 85841 - RNA, 18 nt, Artificial Sequence
  Synthetic
cacuugcggcccuaggga

SEQ ID NO: 85842 - RNA, 19 nt, Artificial Sequence
  Synthetic
ucacuugcggcccuaggga

SEQ ID NO: 85843 - RNA, 20 nt, Artificial Sequence
  Synthetic
cucacuugcggcccuaggga

SEQ ID NO: 85844 - RNA, 21 nt, Artificial Sequence
  Synthetic
acucacuugcggcccuaggga

SEQ ID NO: 85845 - RNA, 22 nt, Artificial Sequence
  Synthetic
aacucacuugcggcccuaggga

SEQ ID NO: 85846 - RNA, 23 nt, Artificial Sequence
  Synthetic
caacucacuugcggcccuaggga

SEQ ID NO: 85847 - RNA, 24 nt, Artificial Sequence
  Synthetic
ucaacucacuugcggcccuaggga

SEQ ID NO: 85848 - RNA, 18 nt, Artificial Sequence
  Synthetic
cuuaaugaucucuaggga

SEQ ID NO: 85849 - RNA, 19 nt, Artificial Sequence
  Synthetic
ccuuaaugaucucuaggga

SEQ ID NO: 85850 - RNA, 20 nt, Artificial Sequence
  Synthetic
uccuuaaugaucucuaggga

SEQ ID NO: 85851 - RNA, 21 nt, Artificial Sequence
  Synthetic
auccuuaaugaucucuaggga

SEQ ID NO: 85852 - RNA, 22 nt, Artificial Sequence
  Synthetic
uauccuuaaugaucucuaggga

SEQ ID NO: 85853 - RNA, 18 nt, Artificial Sequence
  Synthetic
aagaaaguauucuaggga

SEQ ID NO: 85854 - RNA, 19 nt, Artificial Sequence
  Synthetic
aaagaaaguauucuaggga

SEQ ID NO: 85855 - RNA, 20 nt, Artificial Sequence
  Synthetic
aaaagaaaguauucuaggga

SEQ ID NO: 85856 - RNA, 21 nt, Artificial Sequence
  Synthetic
aaaaagaaaguauucuaggga

SEQ ID NO: 85857 - RNA, 22 nt, Artificial Sequence
  Synthetic
uaaaaagaaaguauucuaggga

SEQ ID NO: 85858 - RNA, 23 nt, Artificial Sequence
  Synthetic
uuaaaaagaaaguauucuaggga

SEQ ID NO: 85859 - RNA, 24 nt, Artificial Sequence
  Synthetic
cuuaaaaagaaaguauucuaggga

SEQ ID NO: 85860 - RNA, 21 nt, Artificial Sequence
  Synthetic
uguauuguauuuauuuaggga

SEQ ID NO: 85861 - RNA, 22 nt, Artificial Sequence
  Synthetic
uuguauuguauuuauuuaggga

SEQ ID NO: 85862 - RNA, 23 nt, Artificial Sequence
  Synthetic
auuguauuguauuuauuuaggga

SEQ ID NO: 85863 - RNA, 24 nt, Artificial Sequence
  Synthetic
uauuguauuguauuuauuuaggga

SEQ ID NO: 85864 - RNA, 18 nt, Artificial Sequence
  Synthetic
ucgguaaugcaaacggga

SEQ ID NO: 85865 - RNA, 20 nt, Artificial Sequence
  Synthetic
ugucgguaaugcaaacggga

SEQ ID NO: 85866 - RNA, 21 nt, Artificial Sequence
  Synthetic
cugucgguaaugcaaacggga

SEQ ID NO: 85867 - RNA, 22 nt, Artificial Sequence
  Synthetic
ucugucgguaaugcaaacggga

SEQ ID NO: 85868 - RNA, 23 nt, Artificial Sequence
  Synthetic
aucugucgguaaugcaaacggga

SEQ ID NO: 85869 - RNA, 24 nt, Artificial Sequence
  Synthetic
caucugucgguaaugcaaacggga

SEQ ID NO: 85870 - RNA, 21 nt, Artificial Sequence
  Synthetic
cagaggugaguggugagggga

SEQ ID NO: 85871 - RNA, 22 nt, Artificial Sequence
  Synthetic
ucagaggugaguggugagggga

SEQ ID NO: 85872 - RNA, 23 nt, Artificial Sequence
  Synthetic
aucagaggugaguggugagggga

SEQ ID NO: 85873 - RNA, 24 nt, Artificial Sequence
  Synthetic
uaucagaggugaguggugagggga

SEQ ID NO: 85874 - RNA, 18 nt, Artificial Sequence
  Synthetic
ucugaagggcaaggggga

SEQ ID NO: 85875 - RNA, 19 nt, Artificial Sequence
  Synthetic
aucugaagggcaaggggga

SEQ ID NO: 85876 - RNA, 21 nt, Artificial Sequence
  Synthetic
agaucugaagggcaaggggga

SEQ ID NO: 85877 - RNA, 22 nt, Artificial Sequence
  Synthetic
uagaucugaagggcaaggggga

SEQ ID NO: 85878 - RNA, 23 nt, Artificial Sequence
  Synthetic
uuagaucugaagggcaaggggga

SEQ ID NO: 85879 - RNA, 24 nt, Artificial Sequence
  Synthetic
auuagaucugaagggcaaggggga

SEQ ID NO: 85880 - RNA, 21 nt, Artificial Sequence
  Synthetic
ucaaaaauaaagguaggggga

SEQ ID NO: 85881 - RNA, 23 nt, Artificial Sequence
  Synthetic
ugucaaaaauaaagguaggggga

SEQ ID NO: 85882 - RNA, 24 nt, Artificial Sequence
  Synthetic
augucaaaaauaaagguaggggga

SEQ ID NO: 85883 - RNA, 18 nt, Artificial Sequence
  Synthetic
ccccagccaaugggggga

SEQ ID NO: 85884 - RNA, 19 nt, Artificial Sequence
  Synthetic
accccagccaaugggggga

SEQ ID NO: 85885 - RNA, 20 nt, Artificial Sequence
  Synthetic
aaccccagccaaugggggga

SEQ ID NO: 85886 - RNA, 21 nt, Artificial Sequence
  Synthetic
caaccccagccaaugggggga

SEQ ID NO: 85887 - RNA, 22 nt, Artificial Sequence
  Synthetic
ccaaccccagccaaugggggga

SEQ ID NO: 85888 - RNA, 23 nt, Artificial Sequence
  Synthetic
cccaaccccagccaaugggggga

SEQ ID NO: 85889 - RNA, 24 nt, Artificial Sequence
  Synthetic
acccaaccccagccaaugggggga

SEQ ID NO: 85890 - RNA, 18 nt, Artificial Sequence
  Synthetic
uguucugugcauggggga

SEQ ID NO: 85891 - RNA, 18 nt, Artificial Sequence
  Synthetic
aucaacaaugcuggggga

SEQ ID NO: 85892 - RNA, 19 nt, Artificial Sequence
  Synthetic
aaucaacaaugcuggggga

SEQ ID NO: 85893 - RNA, 20 nt, Artificial Sequence
  Synthetic
uaaucaacaaugcuggggga

SEQ ID NO: 85894 - RNA, 21 nt, Artificial Sequence
  Synthetic
uuaaucaacaaugcuggggga

SEQ ID NO: 85895 - RNA, 22 nt, Artificial Sequence
  Synthetic
uuuaaucaacaaugcuggggga

SEQ ID NO: 85896 - RNA, 23 nt, Artificial Sequence
  Synthetic
uuuuaaucaacaaugcuggggga

SEQ ID NO: 85897 - RNA, 24 nt, Artificial Sequence
  Synthetic
auuuuaaucaacaaugcuggggga

SEQ ID NO: 85898 - RNA, 21 nt, Artificial Sequence
  Synthetic
uugaaucaggaacucugggga

SEQ ID NO: 85899 - RNA, 22 nt, Artificial Sequence
  Synthetic
uuugaaucaggaacucugggga

SEQ ID NO: 85900 - RNA, 23 nt, Artificial Sequence
  Synthetic
uuuugaaucaggaacucugggga

SEQ ID NO: 85901 - RNA, 24 nt, Artificial Sequence
  Synthetic
auuuugaaucaggaacucugggga

SEQ ID NO: 85902 - RNA, 18 nt, Artificial Sequence
  Synthetic
caggaauucacgugggga

SEQ ID NO: 85903 - RNA, 19 nt, Artificial Sequence
  Synthetic
ucaggaauucacgugggga

SEQ ID NO: 85904 - RNA, 21 nt, Artificial Sequence
  Synthetic
agucaggaauucacgugggga

SEQ ID NO: 85905 - RNA, 22 nt, Artificial Sequence
  Synthetic
aagucaggaauucacgugggga

SEQ ID NO: 85906 - RNA, 23 nt, Artificial Sequence
  Synthetic
uaagucaggaauucacgugggga

SEQ ID NO: 85907 - RNA, 24 nt, Artificial Sequence
  Synthetic
uuaagucaggaauucacgugggga

SEQ ID NO: 85908 - RNA, 18 nt, Artificial Sequence
  Synthetic
ucagcauagguuugggga

SEQ ID NO: 85909 - RNA, 19 nt, Artificial Sequence
  Synthetic
uucagcauagguuugggga

SEQ ID NO: 85910 - RNA, 20 nt, Artificial Sequence
  Synthetic
uuucagcauagguuugggga

SEQ ID NO: 85911 - RNA, 21 nt, Artificial Sequence
  Synthetic
cuuucagcauagguuugggga

SEQ ID NO: 85912 - RNA, 22 nt, Artificial Sequence
  Synthetic
ccuuucagcauagguuugggga

SEQ ID NO: 85913 - RNA, 23 nt, Artificial Sequence
  Synthetic
uccuuucagcauagguuugggga

SEQ ID NO: 85914 - RNA, 24 nt, Artificial Sequence
  Synthetic
cuccuuucagcauagguuugggga

SEQ ID NO: 85915 - RNA, 18 nt, Artificial Sequence
  Synthetic
cuacugucuuuaauggga

SEQ ID NO: 85916 - RNA, 19 nt, Artificial Sequence
  Synthetic
ucuacugucuuuaauggga

SEQ ID NO: 85917 - RNA, 20 nt, Artificial Sequence
  Synthetic
aucuacugucuuuaauggga

SEQ ID NO: 85918 - RNA, 21 nt, Artificial Sequence
  Synthetic
aaucuacugucuuuaauggga

SEQ ID NO: 85919 - RNA, 23 nt, Artificial Sequence
  Synthetic
ugaaucuacugucuuuaauggga

SEQ ID NO: 85920 - RNA, 24 nt, Artificial Sequence
  Synthetic
uugaaucuacugucuuuaauggga

SEQ ID NO: 85921 - RNA, 19 nt, Artificial Sequence
  Synthetic
uggaaaucuagauauggga

SEQ ID NO: 85922 - RNA, 20 nt, Artificial Sequence
  Synthetic
cuggaaaucuagauauggga

SEQ ID NO: 85923 - RNA, 21 nt, Artificial Sequence
  Synthetic
ccuggaaaucuagauauggga

SEQ ID NO: 85924 - RNA, 22 nt, Artificial Sequence
  Synthetic
uccuggaaaucuagauauggga

SEQ ID NO: 85925 - RNA, 23 nt, Artificial Sequence
  Synthetic
uuccuggaaaucuagauauggga

SEQ ID NO: 85926 - RNA, 24 nt, Artificial Sequence
  Synthetic
uuuccuggaaaucuagauauggga

SEQ ID NO: 85927 - RNA, 18 nt, Artificial Sequence
  Synthetic
ucacugcccaguauggga

SEQ ID NO: 85928 - RNA, 19 nt, Artificial Sequence
  Synthetic
cucacugcccaguauggga

SEQ ID NO: 85929 - RNA, 20 nt, Artificial Sequence
  Synthetic
ucucacugcccaguauggga

SEQ ID NO: 85930 - RNA, 21 nt, Artificial Sequence
  Synthetic
uucucacugcccaguauggga

SEQ ID NO: 85931 - RNA, 22 nt, Artificial Sequence
  Synthetic
uuucucacugcccaguauggga

SEQ ID NO: 85932 - RNA, 23 nt, Artificial Sequence
  Synthetic
uuuucucacugcccaguauggga

SEQ ID NO: 85933 - RNA, 24 nt, Artificial Sequence
  Synthetic
uuuuucucacugcccaguauggga

SEQ ID NO: 85934 - RNA, 18 nt, Artificial Sequence
  Synthetic
aagcaagcugcacuggga

SEQ ID NO: 85935 - RNA, 19 nt, Artificial Sequence
  Synthetic
caagcaagcugcacuggga

SEQ ID NO: 85936 - RNA, 22 nt, Artificial Sequence
  Synthetic
uggcaagcaagcugcacuggga

SEQ ID NO: 85937 - RNA, 23 nt, Artificial Sequence
  Synthetic
auggcaagcaagcugcacuggga

SEQ ID NO: 85938 - RNA, 18 nt, Artificial Sequence
  Synthetic
auguccaugaaccuggga

SEQ ID NO: 85939 - RNA, 19 nt, Artificial Sequence
  Synthetic
aauguccaugaaccuggga

SEQ ID NO: 85940 - RNA, 20 nt, Artificial Sequence
  Synthetic
aaauguccaugaaccuggga

SEQ ID NO: 85941 - RNA, 21 nt, Artificial Sequence
  Synthetic
caaauguccaugaaccuggga

SEQ ID NO: 85942 - RNA, 22 nt, Artificial Sequence
  Synthetic
ccaaauguccaugaaccuggga

SEQ ID NO: 85943 - RNA, 23 nt, Artificial Sequence
  Synthetic
accaaauguccaugaaccuggga

SEQ ID NO: 85944 - RNA, 24 nt, Artificial Sequence
  Synthetic
aaccaaauguccaugaaccuggga

SEQ ID NO: 85945 - RNA, 19 nt, Artificial Sequence
  Synthetic
ugucuuucagcugguggga

SEQ ID NO: 85946 - RNA, 20 nt, Artificial Sequence
  Synthetic
uugucuuucagcugguggga

SEQ ID NO: 85947 - RNA, 21 nt, Artificial Sequence
  Synthetic
cuugucuuucagcugguggga

SEQ ID NO: 85948 - RNA, 22 nt, Artificial Sequence
  Synthetic
ucuugucuuucagcugguggga

SEQ ID NO: 85949 - RNA, 23 nt, Artificial Sequence
  Synthetic
uucuugucuuucagcugguggga

SEQ ID NO: 85950 - RNA, 24 nt, Artificial Sequence
  Synthetic
uuucuugucuuucagcugguggga

SEQ ID NO: 85951 - RNA, 21 nt, Artificial Sequence
  Synthetic
uaacagaguacuucuguggga

SEQ ID NO: 85952 - RNA, 22 nt, Artificial Sequence
  Synthetic
auaacagaguacuucuguggga

SEQ ID NO: 85953 - RNA, 23 nt, Artificial Sequence
  Synthetic
aauaacagaguacuucuguggga

SEQ ID NO: 85954 - RNA, 24 nt, Artificial Sequence
  Synthetic
caauaacagaguacuucuguggga

SEQ ID NO: 85955 - RNA, 18 nt, Artificial Sequence
  Synthetic
agcaucauuauuguggga

SEQ ID NO: 85956 - RNA, 19 nt, Artificial Sequence
  Synthetic
uagcaucauuauuguggga

SEQ ID NO: 85957 - RNA, 20 nt, Artificial Sequence
  Synthetic
uuagcaucauuauuguggga

SEQ ID NO: 85958 - RNA, 21 nt, Artificial Sequence
  Synthetic
auuagcaucauuauuguggga

SEQ ID NO: 85959 - RNA, 24 nt, Artificial Sequence
  Synthetic
cggauuagcaucauuauuguggga

SEQ ID NO: 85960 - RNA, 18 nt, Artificial Sequence
  Synthetic
ccuugcaguaucuuggga

SEQ ID NO: 85961 - RNA, 21 nt, Artificial Sequence
  Synthetic
aggccuugcaguaucuuggga

SEQ ID NO: 85962 - RNA, 22 nt, Artificial Sequence
  Synthetic
aaggccuugcaguaucuuggga

SEQ ID NO: 85963 - RNA, 23 nt, Artificial Sequence
  Synthetic
caaggccuugcaguaucuuggga

SEQ ID NO: 85964 - RNA, 24 nt, Artificial Sequence
  Synthetic
ccaaggccuugcaguaucuuggga

SEQ ID NO: 85965 - RNA, 19 nt, Artificial Sequence
  Synthetic
ugguaauauuaaguuggga

SEQ ID NO: 85966 - RNA, 20 nt, Artificial Sequence
  Synthetic
cugguaauauuaaguuggga

SEQ ID NO: 85967 - RNA, 21 nt, Artificial Sequence
  Synthetic
ucugguaauauuaaguuggga

SEQ ID NO: 85968 - RNA, 22 nt, Artificial Sequence
  Synthetic
aucugguaauauuaaguuggga

SEQ ID NO: 85969 - RNA, 23 nt, Artificial Sequence
  Synthetic
caucugguaauauuaaguuggga

SEQ ID NO: 85970 - RNA, 24 nt, Artificial Sequence
  Synthetic
acaucugguaauauuaaguuggga

SEQ ID NO: 85971 - RNA, 24 nt, Artificial Sequence
  Synthetic
agggauuuuuaaaauaaaaaugga

SEQ ID NO: 85972 - RNA, 21 nt, Artificial Sequence
  Synthetic
uaaauggaugaugaaaaugga

SEQ ID NO: 85973 - RNA, 22 nt, Artificial Sequence
  Synthetic
cuaaauggaugaugaaaaugga

SEQ ID NO: 85974 - RNA, 23 nt, Artificial Sequence
  Synthetic
ucuaaauggaugaugaaaaugga

SEQ ID NO: 85975 - RNA, 24 nt, Artificial Sequence
  Synthetic
aucuaaauggaugaugaaaaugga

SEQ ID NO: 85976 - RNA, 18 nt, Artificial Sequence
  Synthetic
uaaggaugaugaaaugga

SEQ ID NO: 85977 - RNA, 19 nt, Artificial Sequence
  Synthetic
auaaggaugaugaaaugga

SEQ ID NO: 85978 - RNA, 20 nt, Artificial Sequence
  Synthetic
uauaaggaugaugaaaugga

SEQ ID NO: 85979 - RNA, 23 nt, Artificial Sequence
  Synthetic
ugguauaaggaugaugaaaugga

SEQ ID NO: 85980 - RNA, 24 nt, Artificial Sequence
  Synthetic
cugguauaaggaugaugaaaugga

SEQ ID NO: 85981 - RNA, 18 nt, Artificial Sequence
  Synthetic
cagugucaccccaaugga

SEQ ID NO: 85982 - RNA, 19 nt, Artificial Sequence
  Synthetic
ccagugucaccccaaugga

SEQ ID NO: 85983 - RNA, 20 nt, Artificial Sequence
  Synthetic
cccagugucaccccaaugga

SEQ ID NO: 85984 - RNA, 24 nt, Artificial Sequence
  Synthetic
ugggcccagugucaccccaaugga

SEQ ID NO: 85985 - RNA, 18 nt, Artificial Sequence
  Synthetic
ugcugcugggagaaugga

SEQ ID NO: 85986 - RNA, 20 nt, Artificial Sequence
  Synthetic
agugcugcugggagaaugga

SEQ ID NO: 85987 - RNA, 21 nt, Artificial Sequence
  Synthetic
cagugcugcugggagaaugga

SEQ ID NO: 85988 - RNA, 22 nt, Artificial Sequence
  Synthetic
acagugcugcugggagaaugga

SEQ ID NO: 85989 - RNA, 23 nt, Artificial Sequence
  Synthetic
aacagugcugcugggagaaugga

SEQ ID NO: 85990 - RNA, 24 nt, Artificial Sequence
  Synthetic
aaacagugcugcugggagaaugga

SEQ ID NO: 85991 - RNA, 21 nt, Artificial Sequence
  Synthetic
augcuaagaaaagggaaugga

SEQ ID NO: 85992 - RNA, 22 nt, Artificial Sequence
  Synthetic
uaugcuaagaaaagggaaugga

SEQ ID NO: 85993 - RNA, 23 nt, Artificial Sequence
  Synthetic
cuaugcuaagaaaagggaaugga

SEQ ID NO: 85994 - RNA, 24 nt, Artificial Sequence
  Synthetic
acuaugcuaagaaaagggaaugga

SEQ ID NO: 85995 - RNA, 18 nt, Artificial Sequence
  Synthetic
aaaggaguugauaaugga

SEQ ID NO: 85996 - RNA, 19 nt, Artificial Sequence
  Synthetic
uaaaggaguugauaaugga

SEQ ID NO: 85997 - RNA, 20 nt, Artificial Sequence
  Synthetic
cuaaaggaguugauaaugga

SEQ ID NO: 85998 - RNA, 21 nt, Artificial Sequence
  Synthetic
ccuaaaggaguugauaaugga

SEQ ID NO: 85999 - RNA, 22 nt, Artificial Sequence
  Synthetic
accuaaaggaguugauaaugga

SEQ ID NO: 86000 - RNA, 23 nt, Artificial Sequence
  Synthetic
uaccuaaaggaguugauaaugga

SEQ ID NO: 86001 - RNA, 19 nt, Artificial Sequence
  Synthetic
uguuaauacuacacaugga

SEQ ID NO: 86002 - RNA, 21 nt, Artificial Sequence
  Synthetic
uguguuaauacuacacaugga

SEQ ID NO: 86003 - RNA, 22 nt, Artificial Sequence
  Synthetic
auguguuaauacuacacaugga

SEQ ID NO: 86004 - RNA, 23 nt, Artificial Sequence
  Synthetic
aauguguuaauacuacacaugga

SEQ ID NO: 86005 - RNA, 24 nt, Artificial Sequence
  Synthetic
aaauguguuaauacuacacaugga

SEQ ID NO: 86006 - RNA, 18 nt, Artificial Sequence
  Synthetic
aagcuaagaggacaugga

SEQ ID NO: 86007 - RNA, 19 nt, Artificial Sequence
  Synthetic
aaagcuaagaggacaugga

SEQ ID NO: 86008 - RNA, 20 nt, Artificial Sequence
  Synthetic
caaagcuaagaggacaugga

SEQ ID NO: 86009 - RNA, 21 nt, Artificial Sequence
  Synthetic
ccaaagcuaagaggacaugga

SEQ ID NO: 86010 - RNA, 22 nt, Artificial Sequence
  Synthetic
cccaaagcuaagaggacaugga

SEQ ID NO: 86011 - RNA, 23 nt, Artificial Sequence
  Synthetic
ccccaaagcuaagaggacaugga

SEQ ID NO: 86012 - RNA, 24 nt, Artificial Sequence
  Synthetic
accccaaagcuaagaggacaugga

SEQ ID NO: 86013 - RNA, 19 nt, Artificial Sequence
  Synthetic
agugccacacugacaugga

SEQ ID NO: 86014 - RNA, 20 nt, Artificial Sequence
  Synthetic
cagugccacacugacaugga

SEQ ID NO: 86015 - RNA, 21 nt, Artificial Sequence
  Synthetic
acagugccacacugacaugga

SEQ ID NO: 86016 - RNA, 22 nt, Artificial Sequence
  Synthetic
aacagugccacacugacaugga

SEQ ID NO: 86017 - RNA, 23 nt, Artificial Sequence
  Synthetic
aaacagugccacacugacaugga

SEQ ID NO: 86018 - RNA, 21 nt, Artificial Sequence
  Synthetic
cauauauagcucugacaugga

SEQ ID NO: 86019 - RNA, 22 nt, Artificial Sequence
  Synthetic
ccauauauagcucugacaugga

SEQ ID NO: 86020 - RNA, 23 nt, Artificial Sequence
  Synthetic
accauauauagcucugacaugga

SEQ ID NO: 86021 - RNA, 24 nt, Artificial Sequence
  Synthetic
uaccauauauagcucugacaugga

SEQ ID NO: 86022 - RNA, 18 nt, Artificial Sequence
  Synthetic
uucaaccaguggcaugga

SEQ ID NO: 86023 - RNA, 19 nt, Artificial Sequence
  Synthetic
uuucaaccaguggcaugga

SEQ ID NO: 86024 - RNA, 20 nt, Artificial Sequence
  Synthetic
uuuucaaccaguggcaugga

SEQ ID NO: 86025 - RNA, 21 nt, Artificial Sequence
  Synthetic
uuuuucaaccaguggcaugga

SEQ ID NO: 86026 - RNA, 22 nt, Artificial Sequence
  Synthetic
auuuuucaaccaguggcaugga

SEQ ID NO: 86027 - RNA, 23 nt, Artificial Sequence
  Synthetic
uauuuuucaaccaguggcaugga

SEQ ID NO: 86028 - RNA, 24 nt, Artificial Sequence
  Synthetic
auauuuuucaaccaguggcaugga

SEQ ID NO: 86029 - RNA, 18 nt, Artificial Sequence
  Synthetic
caucuaaauucucaugga

SEQ ID NO: 86030 - RNA, 19 nt, Artificial Sequence
  Synthetic
ucaucuaaauucucaugga

SEQ ID NO: 86031 - RNA, 21 nt, Artificial Sequence
  Synthetic
agucaucuaaauucucaugga

SEQ ID NO: 86032 - RNA, 22 nt, Artificial Sequence
  Synthetic
aagucaucuaaauucucaugga

SEQ ID NO: 86033 - RNA, 23 nt, Artificial Sequence
  Synthetic
aaagucaucuaaauucucaugga

SEQ ID NO: 86034 - RNA, 18 nt, Artificial Sequence
  Synthetic
uucuucccuauucaugga

SEQ ID NO: 86035 - RNA, 19 nt, Artificial Sequence
  Synthetic
uuucuucccuauucaugga

SEQ ID NO: 86036 - RNA, 20 nt, Artificial Sequence
  Synthetic
auuucuucccuauucaugga

SEQ ID NO: 86037 - RNA, 21 nt, Artificial Sequence
  Synthetic
uauuucuucccuauucaugga

SEQ ID NO: 86038 - RNA, 22 nt, Artificial Sequence
  Synthetic
uuauuucuucccuauucaugga

SEQ ID NO: 86039 - RNA, 23 nt, Artificial Sequence
  Synthetic
auuauuucuucccuauucaugga

SEQ ID NO: 86040 - RNA, 24 nt, Artificial Sequence
  Synthetic
aauuauuucuucccuauucaugga

SEQ ID NO: 86041 - RNA, 18 nt, Artificial Sequence
  Synthetic
caggcaggggaauaugga

SEQ ID NO: 86042 - RNA, 19 nt, Artificial Sequence
  Synthetic
acaggcaggggaauaugga

SEQ ID NO: 86043 - RNA, 21 nt, Artificial Sequence
  Synthetic
agacaggcaggggaauaugga

SEQ ID NO: 86044 - RNA, 21 nt, Artificial Sequence
  Synthetic
uuaaggaaauaugaauaugga

SEQ ID NO: 86045 - RNA, 22 nt, Artificial Sequence
  Synthetic
auuaaggaaauaugaauaugga

SEQ ID NO: 86046 - RNA, 23 nt, Artificial Sequence
  Synthetic
uauuaaggaaauaugaauaugga

SEQ ID NO: 86047 - RNA, 24 nt, Artificial Sequence
  Synthetic
cuauuaaggaaauaugaauaugga

SEQ ID NO: 86048 - RNA, 21 nt, Artificial Sequence
  Synthetic
aaauggaaauuugaauaugga

SEQ ID NO: 86049 - RNA, 22 nt, Artificial Sequence
  Synthetic
aaaauggaaauuugaauaugga

SEQ ID NO: 86050 - RNA, 23 nt, Artificial Sequence
  Synthetic
aaaaauggaaauuugaauaugga

SEQ ID NO: 86051 - RNA, 18 nt, Artificial Sequence
  Synthetic
agccugucccuauaugga

SEQ ID NO: 86052 - RNA, 21 nt, Artificial Sequence
  Synthetic
aggagccugucccuauaugga

SEQ ID NO: 86053 - RNA, 23 nt, Artificial Sequence
  Synthetic
agaggagccugucccuauaugga

SEQ ID NO: 86054 - RNA, 24 nt, Artificial Sequence
  Synthetic
cagaggagccugucccuauaugga

SEQ ID NO: 86055 - RNA, 18 nt, Artificial Sequence
  Synthetic
cucagaaccacguaugga

SEQ ID NO: 86056 - RNA, 20 nt, Artificial Sequence
  Synthetic
agcucagaaccacguaugga

SEQ ID NO: 86057 - RNA, 21 nt, Artificial Sequence
  Synthetic
uagcucagaaccacguaugga

SEQ ID NO: 86058 - RNA, 23 nt, Artificial Sequence
  Synthetic
aguagcucagaaccacguaugga

SEQ ID NO: 86059 - RNA, 24 nt, Artificial Sequence
  Synthetic
aaguagcucagaaccacguaugga

SEQ ID NO: 86060 - RNA, 18 nt, Artificial Sequence
  Synthetic
uuauaacuuagguaugga

SEQ ID NO: 86061 - RNA, 20 nt, Artificial Sequence
  Synthetic
uguuauaacuuagguaugga

SEQ ID NO: 86062 - RNA, 21 nt, Artificial Sequence
  Synthetic
auguuauaacuuagguaugga

SEQ ID NO: 86063 - RNA, 24 nt, Artificial Sequence
  Synthetic
uggauguuauaacuuagguaugga

SEQ ID NO: 86064 - RNA, 18 nt, Artificial Sequence
  Synthetic
auaguugauuguuaugga

SEQ ID NO: 86065 - RNA, 21 nt, Artificial Sequence
  Synthetic
aggauaguugauuguuaugga

SEQ ID NO: 86066 - RNA, 23 nt, Artificial Sequence
  Synthetic
ugaggauaguugauuguuaugga

SEQ ID NO: 86067 - RNA, 24 nt, Artificial Sequence
  Synthetic
augaggauaguugauuguuaugga

SEQ ID NO: 86068 - RNA, 19 nt, Artificial Sequence
  Synthetic
uguuguuagaaagacugga

SEQ ID NO: 86069 - RNA, 20 nt, Artificial Sequence
  Synthetic
auguuguuagaaagacugga

SEQ ID NO: 86070 - RNA, 21 nt, Artificial Sequence
  Synthetic
uauguuguuagaaagacugga

SEQ ID NO: 86071 - RNA, 22 nt, Artificial Sequence
  Synthetic
cuauguuguuagaaagacugga

SEQ ID NO: 86072 - RNA, 23 nt, Artificial Sequence
  Synthetic
ucuauguuguuagaaagacugga

SEQ ID NO: 86073 - RNA, 24 nt, Artificial Sequence
  Synthetic
cucuauguuguuagaaagacugga

SEQ ID NO: 86074 - RNA, 18 nt, Artificial Sequence
  Synthetic
uggggaagugagacugga

SEQ ID NO: 86075 - RNA, 19 nt, Artificial Sequence
  Synthetic
cuggggaagugagacugga

SEQ ID NO: 86076 - RNA, 21 nt, Artificial Sequence
  Synthetic
ugcuggggaagugagacugga

SEQ ID NO: 86077 - RNA, 24 nt, Artificial Sequence
  Synthetic
uggugcuggggaagugagacugga

SEQ ID NO: 86078 - RNA, 18 nt, Artificial Sequence
  Synthetic
ccuugcauuaaaccugga

SEQ ID NO: 86079 - RNA, 20 nt, Artificial Sequence
  Synthetic
agccuugcauuaaaccugga

SEQ ID NO: 86080 - RNA, 21 nt, Artificial Sequence
  Synthetic
aagccuugcauuaaaccugga

SEQ ID NO: 86081 - RNA, 22 nt, Artificial Sequence
  Synthetic
caagccuugcauuaaaccugga

SEQ ID NO: 86082 - RNA, 23 nt, Artificial Sequence
  Synthetic
ccaagccuugcauuaaaccugga

SEQ ID NO: 86083 - RNA, 24 nt, Artificial Sequence
  Synthetic
accaagccuugcauuaaaccugga

SEQ ID NO: 86084 - RNA, 18 nt, Artificial Sequence
  Synthetic
cuuugugccugggcugga

SEQ ID NO: 86085 - RNA, 19 nt, Artificial Sequence
  Synthetic
ucuuugugccugggcugga

SEQ ID NO: 86086 - RNA, 21 nt, Artificial Sequence
  Synthetic
ugucuuugugccugggcugga

SEQ ID NO: 86087 - RNA, 22 nt, Artificial Sequence
  Synthetic
cugucuuugugccugggcugga

SEQ ID NO: 86088 - RNA, 24 nt, Artificial Sequence
  Synthetic
ugcugucuuugugccugggcugga

SEQ ID NO: 86089 - RNA, 18 nt, Artificial Sequence
  Synthetic
ucaguuuuugaaucugga

SEQ ID NO: 86090 - RNA, 19 nt, Artificial Sequence
  Synthetic
uucaguuuuugaaucugga

SEQ ID NO: 86091 - RNA, 21 nt, Artificial Sequence
  Synthetic
aguucaguuuuugaaucugga

SEQ ID NO: 86092 - RNA, 22 nt, Artificial Sequence
  Synthetic
aaguucaguuuuugaaucugga

SEQ ID NO: 86093 - RNA, 18 nt, Artificial Sequence
  Synthetic
ccaauggacuucucugga

SEQ ID NO: 86094 - RNA, 20 nt, Artificial Sequence
  Synthetic
ugccaauggacuucucugga

SEQ ID NO: 86095 - RNA, 21 nt, Artificial Sequence
  Synthetic
augccaauggacuucucugga

SEQ ID NO: 86096 - RNA, 22 nt, Artificial Sequence
  Synthetic
uaugccaauggacuucucugga

SEQ ID NO: 86097 - RNA, 23 nt, Artificial Sequence
  Synthetic
auaugccaauggacuucucugga

SEQ ID NO: 86098 - RNA, 24 nt, Artificial Sequence
  Synthetic
cauaugccaauggacuucucugga

SEQ ID NO: 86099 - RNA, 18 nt, Artificial Sequence
  Synthetic
uucucuaagaauucugga

SEQ ID NO: 86100 - RNA, 19 nt, Artificial Sequence
  Synthetic
uuucucuaagaauucugga

SEQ ID NO: 86101 - RNA, 20 nt, Artificial Sequence
  Synthetic
auuucucuaagaauucugga

SEQ ID NO: 86102 - RNA, 21 nt, Artificial Sequence
  Synthetic
aauuucucuaagaauucugga

SEQ ID NO: 86103 - RNA, 22 nt, Artificial Sequence
  Synthetic
aaauuucucuaagaauucugga

SEQ ID NO: 86104 - RNA, 23 nt, Artificial Sequence
  Synthetic
uaaauuucucuaagaauucugga

SEQ ID NO: 86105 - RNA, 24 nt, Artificial Sequence
  Synthetic
cuaaauuucucuaagaauucugga

SEQ ID NO: 86106 - RNA, 18 nt, Artificial Sequence
  Synthetic
uugcuuucucauucugga

SEQ ID NO: 86107 - RNA, 19 nt, Artificial Sequence
  Synthetic
auugcuuucucauucugga

SEQ ID NO: 86108 - RNA, 21 nt, Artificial Sequence
  Synthetic
ugauugcuuucucauucugga

SEQ ID NO: 86109 - RNA, 22 nt, Artificial Sequence
  Synthetic
uugauugcuuucucauucugga

SEQ ID NO: 86110 - RNA, 23 nt, Artificial Sequence
  Synthetic
cuugauugcuuucucauucugga

SEQ ID NO: 86111 - RNA, 24 nt, Artificial Sequence
  Synthetic
ucuugauugcuuucucauucugga

SEQ ID NO: 86112 - RNA, 18 nt, Artificial Sequence
  Synthetic
ucugacaaguacagugga

SEQ ID NO: 86113 - RNA, 19 nt, Artificial Sequence
  Synthetic
cucugacaaguacagugga

SEQ ID NO: 86114 - RNA, 20 nt, Artificial Sequence
  Synthetic
acucugacaaguacagugga

SEQ ID NO: 86115 - RNA, 21 nt, Artificial Sequence
  Synthetic
aacucugacaaguacagugga

SEQ ID NO: 86116 - RNA, 23 nt, Artificial Sequence
  Synthetic
ugaacucugacaaguacagugga

SEQ ID NO: 86117 - RNA, 24 nt, Artificial Sequence
  Synthetic
augaacucugacaaguacagugga

SEQ ID NO: 86118 - RNA, 18 nt, Artificial Sequence
  Synthetic
uagaucacgaucagugga

SEQ ID NO: 86119 - RNA, 20 nt, Artificial Sequence
  Synthetic
aguagaucacgaucagugga

SEQ ID NO: 86120 - RNA, 21 nt, Artificial Sequence
  Synthetic
uaguagaucacgaucagugga

SEQ ID NO: 86121 - RNA, 22 nt, Artificial Sequence
  Synthetic
cuaguagaucacgaucagugga

SEQ ID NO: 86122 - RNA, 23 nt, Artificial Sequence
  Synthetic
acuaguagaucacgaucagugga

SEQ ID NO: 86123 - RNA, 24 nt, Artificial Sequence
  Synthetic
cacuaguagaucacgaucagugga

SEQ ID NO: 86124 - RNA, 19 nt, Artificial Sequence
  Synthetic
ugggaaauuuuuucgugga

SEQ ID NO: 86125 - RNA, 20 nt, Artificial Sequence
  Synthetic
cugggaaauuuuuucgugga

SEQ ID NO: 86126 - RNA, 21 nt, Artificial Sequence
  Synthetic
ucugggaaauuuuuucgugga

SEQ ID NO: 86127 - RNA, 22 nt, Artificial Sequence
  Synthetic
uucugggaaauuuuuucgugga

SEQ ID NO: 86128 - RNA, 23 nt, Artificial Sequence
  Synthetic
uuucugggaaauuuuuucgugga

SEQ ID NO: 86129 - RNA, 24 nt, Artificial Sequence
  Synthetic
uuuucugggaaauuuuuucgugga

SEQ ID NO: 86130 - RNA, 18 nt, Artificial Sequence
  Synthetic
auguugaggcuaggugga

SEQ ID NO: 86131 - RNA, 19 nt, Artificial Sequence
  Synthetic
aauguugaggcuaggugga

SEQ ID NO: 86132 - RNA, 20 nt, Artificial Sequence
  Synthetic
aaauguugaggcuaggugga

SEQ ID NO: 86133 - RNA, 21 nt, Artificial Sequence
  Synthetic
uaaauguugaggcuaggugga

SEQ ID NO: 86134 - RNA, 23 nt, Artificial Sequence
  Synthetic
uguaaauguugaggcuaggugga

SEQ ID NO: 86135 - RNA, 24 nt, Artificial Sequence
  Synthetic
uuguaaauguugaggcuaggugga

SEQ ID NO: 86136 - RNA, 18 nt, Artificial Sequence
  Synthetic
ugcccuguaaauggugga

SEQ ID NO: 86137 - RNA, 19 nt, Artificial Sequence
  Synthetic
uugcccuguaaauggugga

SEQ ID NO: 86138 - RNA, 20 nt, Artificial Sequence
  Synthetic
uuugcccuguaaauggugga

SEQ ID NO: 86139 - RNA, 21 nt, Artificial Sequence
  Synthetic
uuuugcccuguaaauggugga

SEQ ID NO: 86140 - RNA, 22 nt, Artificial Sequence
  Synthetic
uuuuugcccuguaaauggugga

SEQ ID NO: 86141 - RNA, 23 nt, Artificial Sequence
  Synthetic
auuuuugcccuguaaauggugga

SEQ ID NO: 86142 - RNA, 24 nt, Artificial Sequence
  Synthetic
cauuuuugcccuguaaauggugga

SEQ ID NO: 86143 - RNA, 18 nt, Artificial Sequence
  Synthetic
cugacuggcaaaugugga

SEQ ID NO: 86144 - RNA, 21 nt, Artificial Sequence
  Synthetic
aggcugacuggcaaaugugga

SEQ ID NO: 86145 - RNA, 22 nt, Artificial Sequence
  Synthetic
caggcugacuggcaaaugugga

SEQ ID NO: 86146 - RNA, 23 nt, Artificial Sequence
  Synthetic
ccaggcugacuggcaaaugugga

SEQ ID NO: 86147 - RNA, 24 nt, Artificial Sequence
  Synthetic
accaggcugacuggcaaaugugga

SEQ ID NO: 86148 - RNA, 18 nt, Artificial Sequence
  Synthetic
uaaccuggcaucugugga

SEQ ID NO: 86149 - RNA, 19 nt, Artificial Sequence
  Synthetic
uuaaccuggcaucugugga

SEQ ID NO: 86150 - RNA, 20 nt, Artificial Sequence
  Synthetic
uuuaaccuggcaucugugga

SEQ ID NO: 86151 - RNA, 21 nt, Artificial Sequence
  Synthetic
cuuuaaccuggcaucugugga

SEQ ID NO: 86152 - RNA, 22 nt, Artificial Sequence
  Synthetic
ucuuuaaccuggcaucugugga

SEQ ID NO: 86153 - RNA, 18 nt, Artificial Sequence
  Synthetic
aaaacgugagugugugga

SEQ ID NO: 86154 - RNA, 21 nt, Artificial Sequence
  Synthetic
aggaaaacgugagugugugga

SEQ ID NO: 86155 - RNA, 22 nt, Artificial Sequence
  Synthetic
caggaaaacgugagugugugga

SEQ ID NO: 86156 - RNA, 18 nt, Artificial Sequence
  Synthetic
cuuaauucaauuugugga

SEQ ID NO: 86157 - RNA, 19 nt, Artificial Sequence
  Synthetic
acuuaauucaauuugugga

SEQ ID NO: 86158 - RNA, 22 nt, Artificial Sequence
  Synthetic
aggacuuaauucaauuugugga

SEQ ID NO: 86159 - RNA, 24 nt, Artificial Sequence
  Synthetic
agaggacuuaauucaauuugugga

SEQ ID NO: 86160 - RNA, 19 nt, Artificial Sequence
  Synthetic
agagcagaagggcauugga

SEQ ID NO: 86161 - RNA, 22 nt, Artificial Sequence
  Synthetic
cggagagcagaagggcauugga

SEQ ID NO: 86162 - RNA, 24 nt, Artificial Sequence
  Synthetic
ugcggagagcagaagggcauugga

SEQ ID NO: 86163 - RNA, 19 nt, Artificial Sequence
  Synthetic
ugauuacaucuucauugga

SEQ ID NO: 86164 - RNA, 20 nt, Artificial Sequence
  Synthetic
augauuacaucuucauugga

SEQ ID NO: 86165 - RNA, 23 nt, Artificial Sequence
  Synthetic
uggaugauuacaucuucauugga

SEQ ID NO: 86166 - RNA, 24 nt, Artificial Sequence
  Synthetic
uuggaugauuacaucuucauugga

SEQ ID NO: 86167 - RNA, 18 nt, Artificial Sequence
  Synthetic
uauuauaaauggauugga

SEQ ID NO: 86168 - RNA, 20 nt, Artificial Sequence
  Synthetic
aguauuauaaauggauugga

SEQ ID NO: 86169 - RNA, 21 nt, Artificial Sequence
  Synthetic
caguauuauaaauggauugga

SEQ ID NO: 86170 - RNA, 22 nt, Artificial Sequence
  Synthetic
acaguauuauaaauggauugga

SEQ ID NO: 86171 - RNA, 23 nt, Artificial Sequence
  Synthetic
cacaguauuauaaauggauugga

SEQ ID NO: 86172 - RNA, 24 nt, Artificial Sequence
  Synthetic
ucacaguauuauaaauggauugga

SEQ ID NO: 86173 - RNA, 18 nt, Artificial Sequence
  Synthetic
agcugguaaagacuugga

SEQ ID NO: 86174 - RNA, 19 nt, Artificial Sequence
  Synthetic
uagcugguaaagacuugga

SEQ ID NO: 86175 - RNA, 22 nt, Artificial Sequence
  Synthetic
agguagcugguaaagacuugga

SEQ ID NO: 86176 - RNA, 23 nt, Artificial Sequence
  Synthetic
aagguagcugguaaagacuugga

SEQ ID NO: 86177 - RNA, 24 nt, Artificial Sequence
  Synthetic
aaagguagcugguaaagacuugga

SEQ ID NO: 86178 - RNA, 18 nt, Artificial Sequence
  Synthetic
uccaggacucuccuugga

SEQ ID NO: 86179 - RNA, 19 nt, Artificial Sequence
  Synthetic
cuccaggacucuccuugga

SEQ ID NO: 86180 - RNA, 20 nt, Artificial Sequence
  Synthetic
ucuccaggacucuccuugga

SEQ ID NO: 86181 - RNA, 21 nt, Artificial Sequence
  Synthetic
cucuccaggacucuccuugga

SEQ ID NO: 86182 - RNA, 22 nt, Artificial Sequence
  Synthetic
ccucuccaggacucuccuugga

SEQ ID NO: 86183 - RNA, 23 nt, Artificial Sequence
  Synthetic
cccucuccaggacucuccuugga

SEQ ID NO: 86184 - RNA, 19 nt, Artificial Sequence
  Synthetic
aggaaaagcugagcuugga

SEQ ID NO: 86185 - RNA, 21 nt, Artificial Sequence
  Synthetic
ugaggaaaagcugagcuugga

SEQ ID NO: 86186 - RNA, 23 nt, Artificial Sequence
  Synthetic
agugaggaaaagcugagcuugga

SEQ ID NO: 86187 - RNA, 24 nt, Artificial Sequence
  Synthetic
cagugaggaaaagcugagcuugga

SEQ ID NO: 86188 - RNA, 18 nt, Artificial Sequence
  Synthetic
ucucgaggugaucuugga

SEQ ID NO: 86189 - RNA, 19 nt, Artificial Sequence
  Synthetic
uucucgaggugaucuugga

SEQ ID NO: 86190 - RNA, 20 nt, Artificial Sequence
  Synthetic
uuucucgaggugaucuugga

SEQ ID NO: 86191 - RNA, 21 nt, Artificial Sequence
  Synthetic
cuuucucgaggugaucuugga

SEQ ID NO: 86192 - RNA, 22 nt, Artificial Sequence
  Synthetic
acuuucucgaggugaucuugga

SEQ ID NO: 86193 - RNA, 24 nt, Artificial Sequence
  Synthetic
ugacuuucucgaggugaucuugga

SEQ ID NO: 86194 - RNA, 18 nt, Artificial Sequence
  Synthetic
aucuccacaaguguugga

SEQ ID NO: 86195 - RNA, 20 nt, Artificial Sequence
  Synthetic
ugaucuccacaaguguugga

SEQ ID NO: 86196 - RNA, 23 nt, Artificial Sequence
  Synthetic
uggugaucuccacaaguguugga

SEQ ID NO: 86197 - RNA, 24 nt, Artificial Sequence
  Synthetic
cuggugaucuccacaaguguugga

SEQ ID NO: 86198 - RNA, 18 nt, Artificial Sequence
  Synthetic
acaaggcagugauuugga

SEQ ID NO: 86199 - RNA, 20 nt, Artificial Sequence
  Synthetic
ugacaaggcagugauuugga

SEQ ID NO: 86200 - RNA, 21 nt, Artificial Sequence
  Synthetic
augacaaggcagugauuugga

SEQ ID NO: 86201 - RNA, 22 nt, Artificial Sequence
  Synthetic
uaugacaaggcagugauuugga

SEQ ID NO: 86202 - RNA, 23 nt, Artificial Sequence
  Synthetic
uuaugacaaggcagugauuugga

SEQ ID NO: 86203 - RNA, 24 nt, Artificial Sequence
  Synthetic
auuaugacaaggcagugauuugga

SEQ ID NO: 86204 - RNA, 18 nt, Artificial Sequence
  Synthetic
caugaaaaaauauuugga

SEQ ID NO: 86205 - RNA, 20 nt, Artificial Sequence
  Synthetic
agcaugaaaaaauauuugga

SEQ ID NO: 86206 - RNA, 21 nt, Artificial Sequence
  Synthetic
uagcaugaaaaaauauuugga

SEQ ID NO: 86207 - RNA, 22 nt, Artificial Sequence
  Synthetic
auagcaugaaaaaauauuugga

SEQ ID NO: 86208 - RNA, 23 nt, Artificial Sequence
  Synthetic
aauagcaugaaaaaauauuugga

SEQ ID NO: 86209 - RNA, 24 nt, Artificial Sequence
  Synthetic
uaauagcaugaaaaaauauuugga

SEQ ID NO: 86210 - RNA, 19 nt, Artificial Sequence
  Synthetic
agaaagauauuccuuugga

SEQ ID NO: 86211 - RNA, 20 nt, Artificial Sequence
  Synthetic
uagaaagauauuccuuugga

SEQ ID NO: 86212 - RNA, 21 nt, Artificial Sequence
  Synthetic
auagaaagauauuccuuugga

SEQ ID NO: 86213 - RNA, 23 nt, Artificial Sequence
  Synthetic
agauagaaagauauuccuuugga

SEQ ID NO: 86214 - RNA, 18 nt, Artificial Sequence
  Synthetic
acuugugagauguuugga

SEQ ID NO: 86215 - RNA, 19 nt, Artificial Sequence
  Synthetic
aacuugugagauguuugga

SEQ ID NO: 86216 - RNA, 20 nt, Artificial Sequence
  Synthetic
aaacuugugagauguuugga

SEQ ID NO: 86217 - RNA, 21 nt, Artificial Sequence
  Synthetic
uaaacuugugagauguuugga

SEQ ID NO: 86218 - RNA, 22 nt, Artificial Sequence
  Synthetic
uuaaacuugugagauguuugga

SEQ ID NO: 86219 - RNA, 23 nt, Artificial Sequence
  Synthetic
uuuaaacuugugagauguuugga

SEQ ID NO: 86220 - RNA, 24 nt, Artificial Sequence
  Synthetic
uuuuaaacuugugagauguuugga

SEQ ID NO: 86221 - RNA, 21 nt, Artificial Sequence
  Synthetic
aaaggacaaaaugauuuugga

SEQ ID NO: 86222 - RNA, 22 nt, Artificial Sequence
  Synthetic
uaaaggacaaaaugauuuugga

SEQ ID NO: 86223 - RNA, 23 nt, Artificial Sequence
  Synthetic
uuaaaggacaaaaugauuuugga

SEQ ID NO: 86224 - RNA, 18 nt, Artificial Sequence
  Synthetic
aucccacuugcaaaauga

SEQ ID NO: 86225 - RNA, 19 nt, Artificial Sequence
  Synthetic
uaucccacuugcaaaauga

SEQ ID NO: 86226 - RNA, 20 nt, Artificial Sequence
  Synthetic
cuaucccacuugcaaaauga

SEQ ID NO: 86227 - RNA, 21 nt, Artificial Sequence
  Synthetic
acuaucccacuugcaaaauga

SEQ ID NO: 86228 - RNA, 22 nt, Artificial Sequence
  Synthetic
aacuaucccacuugcaaaauga

SEQ ID NO: 86229 - RNA, 23 nt, Artificial Sequence
  Synthetic
caacuaucccacuugcaaaauga

SEQ ID NO: 86230 - RNA, 24 nt, Artificial Sequence
  Synthetic
ucaacuaucccacuugcaaaauga

SEQ ID NO: 86231 - RNA, 18 nt, Artificial Sequence
  Synthetic
uugugggaaggaaaauga

SEQ ID NO: 86232 - RNA, 22 nt, Artificial Sequence
  Synthetic
cggguugugggaaggaaaauga

SEQ ID NO: 86233 - RNA, 23 nt, Artificial Sequence
  Synthetic
ucggguugugggaaggaaaauga

SEQ ID NO: 86234 - RNA, 24 nt, Artificial Sequence
  Synthetic
uucggguugugggaaggaaaauga

SEQ ID NO: 86235 - RNA, 18 nt, Artificial Sequence
  Synthetic
aaauguuaguagaaauga

SEQ ID NO: 86236 - RNA, 20 nt, Artificial Sequence
  Synthetic
ugaaauguuaguagaaauga

SEQ ID NO: 86237 - RNA, 21 nt, Artificial Sequence
  Synthetic
cugaaauguuaguagaaauga

SEQ ID NO: 86238 - RNA, 22 nt, Artificial Sequence
  Synthetic
ucugaaauguuaguagaaauga

SEQ ID NO: 86239 - RNA, 23 nt, Artificial Sequence
  Synthetic
uucugaaauguuaguagaaauga

SEQ ID NO: 86240 - RNA, 24 nt, Artificial Sequence
  Synthetic
cuucugaaauguuaguagaaauga

SEQ ID NO: 86241 - RNA, 18 nt, Artificial Sequence
  Synthetic
augacaaaugugaaauga

SEQ ID NO: 86242 - RNA, 19 nt, Artificial Sequence
  Synthetic
aaugacaaaugugaaauga

SEQ ID NO: 86243 - RNA, 20 nt, Artificial Sequence
  Synthetic
caaugacaaaugugaaauga

SEQ ID NO: 86244 - RNA, 21 nt, Artificial Sequence
  Synthetic
ccaaugacaaaugugaaauga

SEQ ID NO: 86245 - RNA, 23 nt, Artificial Sequence
  Synthetic
agccaaugacaaaugugaaauga

SEQ ID NO: 86246 - RNA, 24 nt, Artificial Sequence
  Synthetic
aagccaaugacaaaugugaaauga

SEQ ID NO: 86247 - RNA, 21 nt, Artificial Sequence
  Synthetic
uauaaaaugggagauaaauga

SEQ ID NO: 86248 - RNA, 22 nt, Artificial Sequence
  Synthetic
auauaaaaugggagauaaauga

SEQ ID NO: 86249 - RNA, 24 nt, Artificial Sequence
  Synthetic
agauauaaaaugggagauaaauga

SEQ ID NO: 86250 - RNA, 18 nt, Artificial Sequence
  Synthetic
aauaaugcugauaaauga

SEQ ID NO: 86251 - RNA, 19 nt, Artificial Sequence
  Synthetic
uaauaaugcugauaaauga

SEQ ID NO: 86252 - RNA, 21 nt, Artificial Sequence
  Synthetic
uguaauaaugcugauaaauga

SEQ ID NO: 86253 - RNA, 22 nt, Artificial Sequence
  Synthetic
cuguaauaaugcugauaaauga

SEQ ID NO: 86254 - RNA, 23 nt, Artificial Sequence
  Synthetic
acuguaauaaugcugauaaauga

SEQ ID NO: 86255 - RNA, 24 nt, Artificial Sequence
  Synthetic
cacuguaauaaugcugauaaauga

SEQ ID NO: 86256 - RNA, 18 nt, Artificial Sequence
  Synthetic
uucucacacuauaaauga

SEQ ID NO: 86257 - RNA, 19 nt, Artificial Sequence
  Synthetic
auucucacacuauaaauga

SEQ ID NO: 86258 - RNA, 20 nt, Artificial Sequence
  Synthetic
cauucucacacuauaaauga

SEQ ID NO: 86259 - RNA, 22 nt, Artificial Sequence
  Synthetic
ugcauucucacacuauaaauga

SEQ ID NO: 86260 - RNA, 23 nt, Artificial Sequence
  Synthetic
cugcauucucacacuauaaauga

SEQ ID NO: 86261 - RNA, 24 nt, Artificial Sequence
  Synthetic
acugcauucucacacuauaaauga

SEQ ID NO: 86262 - RNA, 18 nt, Artificial Sequence
  Synthetic
uucauuguuccuaaauga

SEQ ID NO: 86263 - RNA, 19 nt, Artificial Sequence
  Synthetic
auucauuguuccuaaauga

SEQ ID NO: 86264 - RNA, 20 nt, Artificial Sequence
  Synthetic
uauucauuguuccuaaauga

SEQ ID NO: 86265 - RNA, 21 nt, Artificial Sequence
  Synthetic
auauucauuguuccuaaauga

SEQ ID NO: 86266 - RNA, 22 nt, Artificial Sequence
  Synthetic
aauauucauuguuccuaaauga

SEQ ID NO: 86267 - RNA, 23 nt, Artificial Sequence
  Synthetic
aaauauucauuguuccuaaauga

SEQ ID NO: 86268 - RNA, 24 nt, Artificial Sequence
  Synthetic
uaaauauucauuguuccuaaauga

SEQ ID NO: 86269 - RNA, 18 nt, Artificial Sequence
  Synthetic
aaguuaucgaguaaauga

SEQ ID NO: 86270 - RNA, 19 nt, Artificial Sequence
  Synthetic
aaaguuaucgaguaaauga

SEQ ID NO: 86271 - RNA, 20 nt, Artificial Sequence
  Synthetic
uaaaguuaucgaguaaauga

SEQ ID NO: 86272 - RNA, 21 nt, Artificial Sequence
  Synthetic
auaaaguuaucgaguaaauga

SEQ ID NO: 86273 - RNA, 22 nt, Artificial Sequence
  Synthetic
aauaaaguuaucgaguaaauga

SEQ ID NO: 86274 - RNA, 23 nt, Artificial Sequence
  Synthetic
caauaaaguuaucgaguaaauga

SEQ ID NO: 86275 - RNA, 24 nt, Artificial Sequence
  Synthetic
ucaauaaaguuaucgaguaaauga

SEQ ID NO: 86276 - RNA, 20 nt, Artificial Sequence
  Synthetic
uggcuuuuaguauacaauga

SEQ ID NO: 86277 - RNA, 22 nt, Artificial Sequence
  Synthetic
uguggcuuuuaguauacaauga

SEQ ID NO: 86278 - RNA, 23 nt, Artificial Sequence
  Synthetic
cuguggcuuuuaguauacaauga

SEQ ID NO: 86279 - RNA, 24 nt, Artificial Sequence
  Synthetic
ucuguggcuuuuaguauacaauga

SEQ ID NO: 86280 - RNA, 18 nt, Artificial Sequence
  Synthetic
ugggcagaaaaccaauga

SEQ ID NO: 86281 - RNA, 19 nt, Artificial Sequence
  Synthetic
augggcagaaaaccaauga

SEQ ID NO: 86282 - RNA, 20 nt, Artificial Sequence
  Synthetic
aaugggcagaaaaccaauga

SEQ ID NO: 86283 - RNA, 21 nt, Artificial Sequence
  Synthetic
uaaugggcagaaaaccaauga

SEQ ID NO: 86284 - RNA, 22 nt, Artificial Sequence
  Synthetic
cuaaugggcagaaaaccaauga

SEQ ID NO: 86285 - RNA, 23 nt, Artificial Sequence
  Synthetic
ccuaaugggcagaaaaccaauga

SEQ ID NO: 86286 - RNA, 24 nt, Artificial Sequence
  Synthetic
accuaaugggcagaaaaccaauga

SEQ ID NO: 86287 - RNA, 18 nt, Artificial Sequence
  Synthetic
cuucuccucacccaauga

SEQ ID NO: 86288 - RNA, 19 nt, Artificial Sequence
  Synthetic
acuucuccucacccaauga

SEQ ID NO: 86289 - RNA, 21 nt, Artificial Sequence
  Synthetic
agacuucuccucacccaauga

SEQ ID NO: 86290 - RNA, 22 nt, Artificial Sequence
  Synthetic
cagacuucuccucacccaauga

SEQ ID NO: 86291 - RNA, 23 nt, Artificial Sequence
  Synthetic
acagacuucuccucacccaauga

SEQ ID NO: 86292 - RNA, 24 nt, Artificial Sequence
  Synthetic
cacagacuucuccucacccaauga

SEQ ID NO: 86293 - RNA, 18 nt, Artificial Sequence
  Synthetic
uagaaaaaauagcaauga

SEQ ID NO: 86294 - RNA, 19 nt, Artificial Sequence
  Synthetic
auagaaaaaauagcaauga

SEQ ID NO: 86295 - RNA, 20 nt, Artificial Sequence
  Synthetic
cauagaaaaaauagcaauga

SEQ ID NO: 86296 - RNA, 22 nt, Artificial Sequence
  Synthetic
ugcauagaaaaaauagcaauga

SEQ ID NO: 86297 - RNA, 24 nt, Artificial Sequence
  Synthetic
cgugcauagaaaaaauagcaauga

SEQ ID NO: 86298 - RNA, 19 nt, Artificial Sequence
  Synthetic
agaagggugguggcaauga

SEQ ID NO: 86299 - RNA, 19 nt, Artificial Sequence
  Synthetic
uguauuuagcugucaauga

SEQ ID NO: 86300 - RNA, 20 nt, Artificial Sequence
  Synthetic
uuguauuuagcugucaauga

SEQ ID NO: 86301 - RNA, 21 nt, Artificial Sequence
  Synthetic
auuguauuuagcugucaauga

SEQ ID NO: 86302 - RNA, 22 nt, Artificial Sequence
  Synthetic
cauuguauuuagcugucaauga

SEQ ID NO: 86303 - RNA, 23 nt, Artificial Sequence
  Synthetic
acauuguauuuagcugucaauga

SEQ ID NO: 86304 - RNA, 24 nt, Artificial Sequence
  Synthetic
cacauuguauuuagcugucaauga

SEQ ID NO: 86305 - RNA, 18 nt, Artificial Sequence
  Synthetic
acccuaacugaagaauga

SEQ ID NO: 86306 - RNA, 19 nt, Artificial Sequence
  Synthetic
uacccuaacugaagaauga

SEQ ID NO: 86307 - RNA, 20 nt, Artificial Sequence
  Synthetic
uuacccuaacugaagaauga

SEQ ID NO: 86308 - RNA, 22 nt, Artificial Sequence
  Synthetic
aguuacccuaacugaagaauga

SEQ ID NO: 86309 - RNA, 24 nt, Artificial Sequence
  Synthetic
agaguuacccuaacugaagaauga

SEQ ID NO: 86310 - RNA, 18 nt, Artificial Sequence
  Synthetic
auuguuacgguagaauga

SEQ ID NO: 86311 - RNA, 19 nt, Artificial Sequence
  Synthetic
uauuguuacgguagaauga

SEQ ID NO: 86312 - RNA, 20 nt, Artificial Sequence
  Synthetic
uuauuguuacgguagaauga

SEQ ID NO: 86313 - RNA, 21 nt, Artificial Sequence
  Synthetic
cuuauuguuacgguagaauga

SEQ ID NO: 86314 - RNA, 22 nt, Artificial Sequence
  Synthetic
ucuuauuguuacgguagaauga

SEQ ID NO: 86315 - RNA, 23 nt, Artificial Sequence
  Synthetic
uucuuauuguuacgguagaauga

SEQ ID NO: 86316 - RNA, 24 nt, Artificial Sequence
  Synthetic
cuucuuauuguuacgguagaauga

SEQ ID NO: 86317 - RNA, 21 nt, Artificial Sequence
  Synthetic
ucuuaauacgugaaugaauga

SEQ ID NO: 86318 - RNA, 22 nt, Artificial Sequence
  Synthetic
uucuuaauacgugaaugaauga

SEQ ID NO: 86319 - RNA, 23 nt, Artificial Sequence
  Synthetic
auucuuaauacgugaaugaauga

SEQ ID NO: 86320 - RNA, 24 nt, Artificial Sequence
  Synthetic
uauucuuaauacgugaaugaauga

SEQ ID NO: 86321 - RNA, 21 nt, Artificial Sequence
  Synthetic
uacauuuuaauaacugaauga

SEQ ID NO: 86322 - RNA, 22 nt, Artificial Sequence
  Synthetic
auacauuuuaauaacugaauga

SEQ ID NO: 86323 - RNA, 23 nt, Artificial Sequence
  Synthetic
aauacauuuuaauaacugaauga

SEQ ID NO: 86324 - RNA, 18 nt, Artificial Sequence
  Synthetic
aaauuaacacgugaauga

SEQ ID NO: 86325 - RNA, 19 nt, Artificial Sequence
  Synthetic
uaaauuaacacgugaauga

SEQ ID NO: 86326 - RNA, 20 nt, Artificial Sequence
  Synthetic
uuaaauuaacacgugaauga

SEQ ID NO: 86327 - RNA, 18 nt, Artificial Sequence
  Synthetic
uacaaguaaugugaauga

SEQ ID NO: 86328 - RNA, 20 nt, Artificial Sequence
  Synthetic
aguacaaguaaugugaauga

SEQ ID NO: 86329 - RNA, 21 nt, Artificial Sequence
  Synthetic
uaguacaaguaaugugaauga

SEQ ID NO: 86330 - RNA, 24 nt, Artificial Sequence
  Synthetic
agguaguacaaguaaugugaauga

SEQ ID NO: 86331 - RNA, 18 nt, Artificial Sequence
  Synthetic
uuauuuggaaccuaauga

SEQ ID NO: 86332 - RNA, 20 nt, Artificial Sequence
  Synthetic
cguuauuuggaaccuaauga

SEQ ID NO: 86333 - RNA, 21 nt, Artificial Sequence
  Synthetic
ccguuauuuggaaccuaauga

SEQ ID NO: 86334 - RNA, 22 nt, Artificial Sequence
  Synthetic
accguuauuuggaaccuaauga

SEQ ID NO: 86335 - RNA, 23 nt, Artificial Sequence
  Synthetic
aaccguuauuuggaaccuaauga

SEQ ID NO: 86336 - RNA, 24 nt, Artificial Sequence
  Synthetic
uaaccguuauuuggaaccuaauga

SEQ ID NO: 86337 - RNA, 18 nt, Artificial Sequence
  Synthetic
ugaaauauaguguaauga

SEQ ID NO: 86338 - RNA, 19 nt, Artificial Sequence
  Synthetic
uugaaauauaguguaauga

SEQ ID NO: 86339 - RNA, 21 nt, Artificial Sequence
  Synthetic
uguugaaauauaguguaauga

SEQ ID NO: 86340 - RNA, 23 nt, Artificial Sequence
  Synthetic
aguguugaaauauaguguaauga

SEQ ID NO: 86341 - RNA, 24 nt, Artificial Sequence
  Synthetic
uaguguugaaauauaguguaauga

SEQ ID NO: 86342 - RNA, 18 nt, Artificial Sequence
  Synthetic
cauaucaugaauuaauga

SEQ ID NO: 86343 - RNA, 19 nt, Artificial Sequence
  Synthetic
ucauaucaugaauuaauga

SEQ ID NO: 86344 - RNA, 20 nt, Artificial Sequence
  Synthetic
aucauaucaugaauuaauga

SEQ ID NO: 86345 - RNA, 21 nt, Artificial Sequence
  Synthetic
aaucauaucaugaauuaauga

SEQ ID NO: 86346 - RNA, 22 nt, Artificial Sequence
  Synthetic
caaucauaucaugaauuaauga

SEQ ID NO: 86347 - RNA, 23 nt, Artificial Sequence
  Synthetic
ucaaucauaucaugaauuaauga

SEQ ID NO: 86348 - RNA, 24 nt, Artificial Sequence
  Synthetic
uucaaucauaucaugaauuaauga

SEQ ID NO: 86349 - RNA, 18 nt, Artificial Sequence
  Synthetic
auacaaagacaaacauga

SEQ ID NO: 86350 - RNA, 21 nt, Artificial Sequence
  Synthetic
uggauacaaagacaaacauga

SEQ ID NO: 86351 - RNA, 22 nt, Artificial Sequence
  Synthetic
auggauacaaagacaaacauga

SEQ ID NO: 86352 - RNA, 23 nt, Artificial Sequence
  Synthetic
uauggauacaaagacaaacauga

SEQ ID NO: 86353 - RNA, 24 nt, Artificial Sequence
  Synthetic
uuauggauacaaagacaaacauga

SEQ ID NO: 86354 - RNA, 21 nt, Artificial Sequence
  Synthetic
agcugaucugcagacacauga

SEQ ID NO: 86355 - RNA, 22 nt, Artificial Sequence
  Synthetic
cagcugaucugcagacacauga

SEQ ID NO: 86356 - RNA, 24 nt, Artificial Sequence
  Synthetic
ugcagcugaucugcagacacauga

SEQ ID NO: 86357 - RNA, 18 nt, Artificial Sequence
  Synthetic
uuuauuuuuaggacauga

SEQ ID NO: 86358 - RNA, 19 nt, Artificial Sequence
  Synthetic
uuuuauuuuuaggacauga

SEQ ID NO: 86359 - RNA, 20 nt, Artificial Sequence
  Synthetic
auuuuauuuuuaggacauga

SEQ ID NO: 86360 - RNA, 21 nt, Artificial Sequence
  Synthetic
aauuuuauuuuuaggacauga

SEQ ID NO: 86361 - RNA, 22 nt, Artificial Sequence
  Synthetic
caauuuuauuuuuaggacauga

SEQ ID NO: 86362 - RNA, 23 nt, Artificial Sequence
  Synthetic
ucaauuuuauuuuuaggacauga

SEQ ID NO: 86363 - RNA, 24 nt, Artificial Sequence
  Synthetic
uucaauuuuauuuuuaggacauga

SEQ ID NO: 86364 - RNA, 18 nt, Artificial Sequence
  Synthetic
uaaacagagaugacauga

SEQ ID NO: 86365 - RNA, 19 nt, Artificial Sequence
  Synthetic
auaaacagagaugacauga

SEQ ID NO: 86366 - RNA, 20 nt, Artificial Sequence
  Synthetic
aauaaacagagaugacauga

SEQ ID NO: 86367 - RNA, 21 nt, Artificial Sequence
  Synthetic
uaauaaacagagaugacauga

SEQ ID NO: 86368 - RNA, 22 nt, Artificial Sequence
  Synthetic
uuaauaaacagagaugacauga

SEQ ID NO: 86369 - RNA, 24 nt, Artificial Sequence
  Synthetic
aguuaauaaacagagaugacauga

SEQ ID NO: 86370 - RNA, 18 nt, Artificial Sequence
  Synthetic
uuuuuggugaauacauga

SEQ ID NO: 86371 - RNA, 19 nt, Artificial Sequence
  Synthetic
uuuuuuggugaauacauga

SEQ ID NO: 86372 - RNA, 20 nt, Artificial Sequence
  Synthetic
cuuuuuuggugaauacauga

SEQ ID NO: 86373 - RNA, 21 nt, Artificial Sequence
  Synthetic
ucuuuuuuggugaauacauga

SEQ ID NO: 86374 - RNA, 22 nt, Artificial Sequence
  Synthetic
uucuuuuuuggugaauacauga

SEQ ID NO: 86375 - RNA, 23 nt, Artificial Sequence
  Synthetic
uuucuuuuuuggugaauacauga

SEQ ID NO: 86376 - RNA, 24 nt, Artificial Sequence
  Synthetic
uuuucuuuuuuggugaauacauga

SEQ ID NO: 86377 - RNA, 18 nt, Artificial Sequence
  Synthetic
agugauacagauacauga

SEQ ID NO: 86378 - RNA, 19 nt, Artificial Sequence
  Synthetic
cagugauacagauacauga

SEQ ID NO: 86379 - RNA, 20 nt, Artificial Sequence
  Synthetic
ucagugauacagauacauga

SEQ ID NO: 86380 - RNA, 22 nt, Artificial Sequence
  Synthetic
agucagugauacagauacauga

SEQ ID NO: 86381 - RNA, 23 nt, Artificial Sequence
  Synthetic
uagucagugauacagauacauga

SEQ ID NO: 86382 - RNA, 24 nt, Artificial Sequence
  Synthetic
cuagucagugauacagauacauga

SEQ ID NO: 86383 - RNA, 18 nt, Artificial Sequence
  Synthetic
auuaguuuggcuacauga

SEQ ID NO: 86384 - RNA, 19 nt, Artificial Sequence
  Synthetic
cauuaguuuggcuacauga

SEQ ID NO: 86385 - RNA, 20 nt, Artificial Sequence
  Synthetic
ccauuaguuuggcuacauga

SEQ ID NO: 86386 - RNA, 22 nt, Artificial Sequence
  Synthetic
ugccauuaguuuggcuacauga

SEQ ID NO: 86387 - RNA, 23 nt, Artificial Sequence
  Synthetic
uugccauuaguuuggcuacauga

SEQ ID NO: 86388 - RNA, 24 nt, Artificial Sequence
  Synthetic
cuugccauuaguuuggcuacauga

SEQ ID NO: 86389 - RNA, 18 nt, Artificial Sequence
  Synthetic
ucugcauuguccccauga

SEQ ID NO: 86390 - RNA, 19 nt, Artificial Sequence
  Synthetic
uucugcauuguccccauga

SEQ ID NO: 86391 - RNA, 20 nt, Artificial Sequence
  Synthetic
cuucugcauuguccccauga

SEQ ID NO: 86392 - RNA, 21 nt, Artificial Sequence
  Synthetic
ucuucugcauuguccccauga

SEQ ID NO: 86393 - RNA, 22 nt, Artificial Sequence
  Synthetic
uucuucugcauuguccccauga

SEQ ID NO: 86394 - RNA, 23 nt, Artificial Sequence
  Synthetic
cuucuucugcauuguccccauga

SEQ ID NO: 86395 - RNA, 24 nt, Artificial Sequence
  Synthetic
ucuucuucugcauuguccccauga

SEQ ID NO: 86396 - RNA, 18 nt, Artificial Sequence
  Synthetic
cauaucaagcagccauga

SEQ ID NO: 86397 - RNA, 19 nt, Artificial Sequence
  Synthetic
ccauaucaagcagccauga

SEQ ID NO: 86398 - RNA, 20 nt, Artificial Sequence
  Synthetic
uccauaucaagcagccauga

SEQ ID NO: 86399 - RNA, 21 nt, Artificial Sequence
  Synthetic
auccauaucaagcagccauga

SEQ ID NO: 86400 - RNA, 22 nt, Artificial Sequence
  Synthetic
uauccauaucaagcagccauga

SEQ ID NO: 86401 - RNA, 23 nt, Artificial Sequence
  Synthetic
auauccauaucaagcagccauga

SEQ ID NO: 86402 - RNA, 24 nt, Artificial Sequence
  Synthetic
cauauccauaucaagcagccauga

SEQ ID NO: 86403 - RNA, 18 nt, Artificial Sequence
  Synthetic
uaauaaguucauccauga

SEQ ID NO: 86404 - RNA, 21 nt, Artificial Sequence
  Synthetic
agguaauaaguucauccauga

SEQ ID NO: 86405 - RNA, 22 nt, Artificial Sequence
  Synthetic
uagguaauaaguucauccauga

SEQ ID NO: 86406 - RNA, 24 nt, Artificial Sequence
  Synthetic
aguagguaauaaguucauccauga

SEQ ID NO: 86407 - RNA, 19 nt, Artificial Sequence
  Synthetic
agcugaauauuaagcauga

SEQ ID NO: 86408 - RNA, 20 nt, Artificial Sequence
  Synthetic
cagcugaauauuaagcauga

SEQ ID NO: 86409 - RNA, 21 nt, Artificial Sequence
  Synthetic
acagcugaauauuaagcauga

SEQ ID NO: 86410 - RNA, 22 nt, Artificial Sequence
  Synthetic
uacagcugaauauuaagcauga

SEQ ID NO: 86411 - RNA, 23 nt, Artificial Sequence
  Synthetic
uuacagcugaauauuaagcauga

SEQ ID NO: 86412 - RNA, 24 nt, Artificial Sequence
  Synthetic
uuuacagcugaauauuaagcauga

SEQ ID NO: 86413 - RNA, 18 nt, Artificial Sequence
  Synthetic
uacauuauagaggcauga

SEQ ID NO: 86414 - RNA, 19 nt, Artificial Sequence
  Synthetic
uuacauuauagaggcauga

SEQ ID NO: 86415 - RNA, 20 nt, Artificial Sequence
  Synthetic
auuacauuauagaggcauga

SEQ ID NO: 86416 - RNA, 21 nt, Artificial Sequence
  Synthetic
uauuacauuauagaggcauga

SEQ ID NO: 86417 - RNA, 22 nt, Artificial Sequence
  Synthetic
uuauuacauuauagaggcauga

SEQ ID NO: 86418 - RNA, 23 nt, Artificial Sequence
  Synthetic
auuauuacauuauagaggcauga

SEQ ID NO: 86419 - RNA, 24 nt, Artificial Sequence
  Synthetic
cauuauuacauuauagaggcauga

SEQ ID NO: 86420 - RNA, 18 nt, Artificial Sequence
  Synthetic
aacaugcugagugcauga

SEQ ID NO: 86421 - RNA, 19 nt, Artificial Sequence
  Synthetic
aaacaugcugagugcauga

SEQ ID NO: 86422 - RNA, 20 nt, Artificial Sequence
  Synthetic
caaacaugcugagugcauga

SEQ ID NO: 86423 - RNA, 23 nt, Artificial Sequence
  Synthetic
uggcaaacaugcugagugcauga

SEQ ID NO: 86424 - RNA, 24 nt, Artificial Sequence
  Synthetic
cuggcaaacaugcugagugcauga

SEQ ID NO: 86425 - RNA, 21 nt, Artificial Sequence
  Synthetic
cuuuugcaucuuugugcauga

SEQ ID NO: 86426 - RNA, 22 nt, Artificial Sequence
  Synthetic
ucuuuugcaucuuugugcauga

SEQ ID NO: 86427 - RNA, 23 nt, Artificial Sequence
  Synthetic
uucuuuugcaucuuugugcauga

SEQ ID NO: 86428 - RNA, 24 nt, Artificial Sequence
  Synthetic
uuucuuuugcaucuuugugcauga

SEQ ID NO: 86429 - RNA, 18 nt, Artificial Sequence
  Synthetic
ucuuaucuuccaucauga

SEQ ID NO: 86430 - RNA, 19 nt, Artificial Sequence
  Synthetic
uucuuaucuuccaucauga

SEQ ID NO: 86431 - RNA, 21 nt, Artificial Sequence
  Synthetic
uguucuuaucuuccaucauga

SEQ ID NO: 86432 - RNA, 22 nt, Artificial Sequence
  Synthetic
uuguucuuaucuuccaucauga

SEQ ID NO: 86433 - RNA, 23 nt, Artificial Sequence
  Synthetic
cuuguucuuaucuuccaucauga

SEQ ID NO: 86434 - RNA, 24 nt, Artificial Sequence
  Synthetic
ccuuguucuuaucuuccaucauga

SEQ ID NO: 86435 - RNA, 18 nt, Artificial Sequence
  Synthetic
uugccucuaugaucauga

SEQ ID NO: 86436 - RNA, 19 nt, Artificial Sequence
  Synthetic
cuugccucuaugaucauga

SEQ ID NO: 86437 - RNA, 20 nt, Artificial Sequence
  Synthetic
ccuugccucuaugaucauga

SEQ ID NO: 86438 - RNA, 21 nt, Artificial Sequence
  Synthetic
uccuugccucuaugaucauga

SEQ ID NO: 86439 - RNA, 22 nt, Artificial Sequence
  Synthetic
uuccuugccucuaugaucauga

SEQ ID NO: 86440 - RNA, 24 nt, Artificial Sequence
  Synthetic
uguuccuugccucuaugaucauga

SEQ ID NO: 86441 - RNA, 18 nt, Artificial Sequence
  Synthetic
augaaaaaauuaucauga

SEQ ID NO: 86442 - RNA, 19 nt, Artificial Sequence
  Synthetic
caugaaaaaauuaucauga

SEQ ID NO: 86443 - RNA, 21 nt, Artificial Sequence
  Synthetic
agcaugaaaaaauuaucauga

SEQ ID NO: 86444 - RNA, 23 nt, Artificial Sequence
  Synthetic
cgagcaugaaaaaauuaucauga

SEQ ID NO: 86445 - RNA, 24 nt, Artificial Sequence
  Synthetic
ucgagcaugaaaaaauuaucauga

SEQ ID NO: 86446 - RNA, 21 nt, Artificial Sequence
  Synthetic
cuugaauucugcaacucauga

SEQ ID NO: 86447 - RNA, 22 nt, Artificial Sequence
  Synthetic
ucuugaauucugcaacucauga

SEQ ID NO: 86448 - RNA, 23 nt, Artificial Sequence
  Synthetic
aucuugaauucugcaacucauga

SEQ ID NO: 86449 - RNA, 24 nt, Artificial Sequence
  Synthetic
caucuugaauucugcaacucauga

SEQ ID NO: 86450 - RNA, 18 nt, Artificial Sequence
  Synthetic
auagcauuucacucauga

SEQ ID NO: 86451 - RNA, 19 nt, Artificial Sequence
  Synthetic
aauagcauuucacucauga

SEQ ID NO: 86452 - RNA, 20 nt, Artificial Sequence
  Synthetic
uaauagcauuucacucauga

SEQ ID NO: 86453 - RNA, 21 nt, Artificial Sequence
  Synthetic
auaauagcauuucacucauga

SEQ ID NO: 86454 - RNA, 22 nt, Artificial Sequence
  Synthetic
uauaauagcauuucacucauga

SEQ ID NO: 86455 - RNA, 24 nt, Artificial Sequence
  Synthetic
cguauaauagcauuucacucauga

SEQ ID NO: 86456 - RNA, 19 nt, Artificial Sequence
  Synthetic
ugcaccugagaugucauga

SEQ ID NO: 86457 - RNA, 21 nt, Artificial Sequence
  Synthetic
ugugcaccugagaugucauga

SEQ ID NO: 86458 - RNA, 22 nt, Artificial Sequence
  Synthetic
cugugcaccugagaugucauga

SEQ ID NO: 86459 - RNA, 23 nt, Artificial Sequence
  Synthetic
ccugugcaccugagaugucauga

SEQ ID NO: 86460 - RNA, 24 nt, Artificial Sequence
  Synthetic
uccugugcaccugagaugucauga

SEQ ID NO: 86461 - RNA, 18 nt, Artificial Sequence
  Synthetic
uuauuuaaaaacagauga

SEQ ID NO: 86462 - RNA, 19 nt, Artificial Sequence
  Synthetic
auuauuuaaaaacagauga

SEQ ID NO: 86463 - RNA, 20 nt, Artificial Sequence
  Synthetic
cauuauuuaaaaacagauga

SEQ ID NO: 86464 - RNA, 22 nt, Artificial Sequence
  Synthetic
agcauuauuuaaaaacagauga

SEQ ID NO: 86465 - RNA, 23 nt, Artificial Sequence
  Synthetic
uagcauuauuuaaaaacagauga

SEQ ID NO: 86466 - RNA, 24 nt, Artificial Sequence
  Synthetic
auagcauuauuuaaaaacagauga

SEQ ID NO: 86467 - RNA, 18 nt, Artificial Sequence
  Synthetic
ugcacauaaaucagauga

SEQ ID NO: 86468 - RNA, 19 nt, Artificial Sequence
  Synthetic
augcacauaaaucagauga

SEQ ID NO: 86469 - RNA, 20 nt, Artificial Sequence
  Synthetic
aaugcacauaaaucagauga

SEQ ID NO: 86470 - RNA, 21 nt, Artificial Sequence
  Synthetic
caaugcacauaaaucagauga

SEQ ID NO: 86471 - RNA, 23 nt, Artificial Sequence
  Synthetic
ugcaaugcacauaaaucagauga

SEQ ID NO: 86472 - RNA, 24 nt, Artificial Sequence
  Synthetic
augcaaugcacauaaaucagauga

SEQ ID NO: 86473 - RNA, 18 nt, Artificial Sequence
  Synthetic
aaguauccucagagauga

SEQ ID NO: 86474 - RNA, 19 nt, Artificial Sequence
  Synthetic
aaaguauccucagagauga

SEQ ID NO: 86475 - RNA, 20 nt, Artificial Sequence
  Synthetic
aaaaguauccucagagauga

SEQ ID NO: 86476 - RNA, 21 nt, Artificial Sequence
  Synthetic
aaaaaguauccucagagauga

SEQ ID NO: 86477 - RNA, 23 nt, Artificial Sequence
  Synthetic
ugaaaaaguauccucagagauga

SEQ ID NO: 86478 - RNA, 24 nt, Artificial Sequence
  Synthetic
augaaaaaguauccucagagauga

SEQ ID NO: 86479 - RNA, 18 nt, Artificial Sequence
  Synthetic
aagccugagaggagauga

SEQ ID NO: 86480 - RNA, 19 nt, Artificial Sequence
  Synthetic
uaagccugagaggagauga

SEQ ID NO: 86481 - RNA, 20 nt, Artificial Sequence
  Synthetic
cuaagccugagaggagauga

SEQ ID NO: 86482 - RNA, 21 nt, Artificial Sequence
  Synthetic
ucuaagccugagaggagauga

SEQ ID NO: 86483 - RNA, 22 nt, Artificial Sequence
  Synthetic
cucuaagccugagaggagauga

SEQ ID NO: 86484 - RNA, 24 nt, Artificial Sequence
  Synthetic
ugcucuaagccugagaggagauga

SEQ ID NO: 86485 - RNA, 18 nt, Artificial Sequence
  Synthetic
uacuccagucauagauga

SEQ ID NO: 86486 - RNA, 19 nt, Artificial Sequence
  Synthetic
auacuccagucauagauga

SEQ ID NO: 86487 - RNA, 21 nt, Artificial Sequence
  Synthetic
agauacuccagucauagauga

SEQ ID NO: 86488 - RNA, 22 nt, Artificial Sequence
  Synthetic
cagauacuccagucauagauga

SEQ ID NO: 86489 - RNA, 18 nt, Artificial Sequence
  Synthetic
uuauuaaaauuuagauga

SEQ ID NO: 86490 - RNA, 20 nt, Artificial Sequence
  Synthetic
aguuauuaaaauuuagauga

SEQ ID NO: 86491 - RNA, 21 nt, Artificial Sequence
  Synthetic
aaguuauuaaaauuuagauga

SEQ ID NO: 86492 - RNA, 22 nt, Artificial Sequence
  Synthetic
caaguuauuaaaauuuagauga

SEQ ID NO: 86493 - RNA, 23 nt, Artificial Sequence
  Synthetic
acaaguuauuaaaauuuagauga

SEQ ID NO: 86494 - RNA, 24 nt, Artificial Sequence
  Synthetic
aacaaguuauuaaaauuuagauga

SEQ ID NO: 86495 - RNA, 21 nt, Artificial Sequence
  Synthetic
ucauucucugcuggaggauga

SEQ ID NO: 86496 - RNA, 22 nt, Artificial Sequence
  Synthetic
aucauucucugcuggaggauga

SEQ ID NO: 86497 - RNA, 23 nt, Artificial Sequence
  Synthetic
caucauucucugcuggaggauga

SEQ ID NO: 86498 - RNA, 24 nt, Artificial Sequence
  Synthetic
ucaucauucucugcuggaggauga

SEQ ID NO: 86499 - RNA, 18 nt, Artificial Sequence
  Synthetic
uuaaaauuuauaggauga

SEQ ID NO: 86500 - RNA, 19 nt, Artificial Sequence
  Synthetic
uuuaaaauuuauaggauga

SEQ ID NO: 86501 - RNA, 20 nt, Artificial Sequence
  Synthetic
auuuaaaauuuauaggauga

SEQ ID NO: 86502 - RNA, 21 nt, Artificial Sequence
  Synthetic
cauuuaaaauuuauaggauga

SEQ ID NO: 86503 - RNA, 22 nt, Artificial Sequence
  Synthetic
ccauuuaaaauuuauaggauga

SEQ ID NO: 86504 - RNA, 23 nt, Artificial Sequence
  Synthetic
accauuuaaaauuuauaggauga

SEQ ID NO: 86505 - RNA, 24 nt, Artificial Sequence
  Synthetic
caccauuuaaaauuuauaggauga

SEQ ID NO: 86506 - RNA, 18 nt, Artificial Sequence
  Synthetic
acuuuugaauugggauga

SEQ ID NO: 86507 - RNA, 19 nt, Artificial Sequence
  Synthetic
cacuuuugaauugggauga

SEQ ID NO: 86508 - RNA, 21 nt, Artificial Sequence
  Synthetic
ugcacuuuugaauugggauga

SEQ ID NO: 86509 - RNA, 22 nt, Artificial Sequence
  Synthetic
cugcacuuuugaauugggauga

SEQ ID NO: 86510 - RNA, 23 nt, Artificial Sequence
  Synthetic
ucugcacuuuugaauugggauga

SEQ ID NO: 86511 - RNA, 24 nt, Artificial Sequence
  Synthetic
cucugcacuuuugaauugggauga

SEQ ID NO: 86512 - RNA, 20 nt, Artificial Sequence
  Synthetic
agggcacuucaccuggauga

SEQ ID NO: 86513 - RNA, 21 nt, Artificial Sequence
  Synthetic
cagggcacuucaccuggauga

SEQ ID NO: 86514 - RNA, 22 nt, Artificial Sequence
  Synthetic
ccagggcacuucaccuggauga

SEQ ID NO: 86515 - RNA, 23 nt, Artificial Sequence
  Synthetic
cccagggcacuucaccuggauga

SEQ ID NO: 86516 - RNA, 24 nt, Artificial Sequence
  Synthetic
ucccagggcacuucaccuggauga

SEQ ID NO: 86517 - RNA, 19 nt, Artificial Sequence
  Synthetic
agggaaauuuaaaugauga

SEQ ID NO: 86518 - RNA, 20 nt, Artificial Sequence
  Synthetic
aagggaaauuuaaaugauga

SEQ ID NO: 86519 - RNA, 21 nt, Artificial Sequence
  Synthetic
caagggaaauuuaaaugauga

SEQ ID NO: 86520 - RNA, 22 nt, Artificial Sequence
  Synthetic
ccaagggaaauuuaaaugauga

SEQ ID NO: 86521 - RNA, 23 nt, Artificial Sequence
  Synthetic
uccaagggaaauuuaaaugauga

SEQ ID NO: 86522 - RNA, 24 nt, Artificial Sequence
  Synthetic
uuccaagggaaauuuaaaugauga

SEQ ID NO: 86523 - RNA, 19 nt, Artificial Sequence
  Synthetic
cguguuaagaucaugauga

SEQ ID NO: 86524 - RNA, 20 nt, Artificial Sequence
  Synthetic
ccguguuaagaucaugauga

SEQ ID NO: 86525 - RNA, 22 nt, Artificial Sequence
  Synthetic
ugccguguuaagaucaugauga

SEQ ID NO: 86526 - RNA, 23 nt, Artificial Sequence
  Synthetic
augccguguuaagaucaugauga

SEQ ID NO: 86527 - RNA, 24 nt, Artificial Sequence
  Synthetic
uaugccguguuaagaucaugauga

SEQ ID NO: 86528 - RNA, 19 nt, Artificial Sequence
  Synthetic
aguugauaacuuuugauga

SEQ ID NO: 86529 - RNA, 20 nt, Artificial Sequence
  Synthetic
uaguugauaacuuuugauga

SEQ ID NO: 86530 - RNA, 21 nt, Artificial Sequence
  Synthetic
auaguugauaacuuuugauga

SEQ ID NO: 86531 - RNA, 23 nt, Artificial Sequence
  Synthetic
ugauaguugauaacuuuugauga

SEQ ID NO: 86532 - RNA, 24 nt, Artificial Sequence
  Synthetic
uugauaguugauaacuuuugauga

SEQ ID NO: 86533 - RNA, 21 nt, Artificial Sequence
  Synthetic
uugucuuaauccuuuugauga

SEQ ID NO: 86534 - RNA, 22 nt, Artificial Sequence
  Synthetic
auugucuuaauccuuuugauga

SEQ ID NO: 86535 - RNA, 23 nt, Artificial Sequence
  Synthetic
cauugucuuaauccuuuugauga

SEQ ID NO: 86536 - RNA, 24 nt, Artificial Sequence
  Synthetic
ucauugucuuaauccuuuugauga

SEQ ID NO: 86537 - RNA, 19 nt, Artificial Sequence
  Synthetic
uguacuuuuugaaauauga

SEQ ID NO: 86538 - RNA, 20 nt, Artificial Sequence
  Synthetic
auguacuuuuugaaauauga

SEQ ID NO: 86539 - RNA, 21 nt, Artificial Sequence
  Synthetic
cauguacuuuuugaaauauga

SEQ ID NO: 86540 - RNA, 22 nt, Artificial Sequence
  Synthetic
ccauguacuuuuugaaauauga

SEQ ID NO: 86541 - RNA, 23 nt, Artificial Sequence
  Synthetic
cccauguacuuuuugaaauauga

SEQ ID NO: 86542 - RNA, 24 nt, Artificial Sequence
  Synthetic
ccccauguacuuuuugaaauauga

SEQ ID NO: 86543 - RNA, 21 nt, Artificial Sequence
  Synthetic
caacuuaaauauucaauauga

SEQ ID NO: 86544 - RNA, 22 nt, Artificial Sequence
  Synthetic
acaacuuaaauauucaauauga

SEQ ID NO: 86545 - RNA, 23 nt, Artificial Sequence
  Synthetic
aacaacuuaaauauucaauauga

SEQ ID NO: 86546 - RNA, 24 nt, Artificial Sequence
  Synthetic
aaacaacuuaaauauucaauauga

SEQ ID NO: 86547 - RNA, 20 nt, Artificial Sequence
  Synthetic
aggaguaaacgugaauauga

SEQ ID NO: 86548 - RNA, 21 nt, Artificial Sequence
  Synthetic
aaggaguaaacgugaauauga

SEQ ID NO: 86549 - RNA, 22 nt, Artificial Sequence
  Synthetic
uaaggaguaaacgugaauauga

SEQ ID NO: 86550 - RNA, 24 nt, Artificial Sequence
  Synthetic
aguaaggaguaaacgugaauauga

SEQ ID NO: 86551 - RNA, 18 nt, Artificial Sequence
  Synthetic
cuuucaagauuaauauga

SEQ ID NO: 86552 - RNA, 19 nt, Artificial Sequence
  Synthetic
ucuuucaagauuaauauga

SEQ ID NO: 86553 - RNA, 20 nt, Artificial Sequence
  Synthetic
cucuuucaagauuaauauga

SEQ ID NO: 86554 - RNA, 21 nt, Artificial Sequence
  Synthetic
ucucuuucaagauuaauauga

SEQ ID NO: 86555 - RNA, 23 nt, Artificial Sequence
  Synthetic
ugucucuuucaagauuaauauga

SEQ ID NO: 86556 - RNA, 24 nt, Artificial Sequence
  Synthetic
cugucucuuucaagauuaauauga

SEQ ID NO: 86557 - RNA, 18 nt, Artificial Sequence
  Synthetic
ccuccaaauaagauauga

SEQ ID NO: 86558 - RNA, 22 nt, Artificial Sequence
  Synthetic
agggccuccaaauaagauauga

SEQ ID NO: 86559 - RNA, 23 nt, Artificial Sequence
  Synthetic
cagggccuccaaauaagauauga

SEQ ID NO: 86560 - RNA, 24 nt, Artificial Sequence
  Synthetic
ccagggccuccaaauaagauauga

SEQ ID NO: 86561 - RNA, 19 nt, Artificial Sequence
  Synthetic
cggaugugaaaggauauga

SEQ ID NO: 86562 - RNA, 20 nt, Artificial Sequence
  Synthetic
acggaugugaaaggauauga

SEQ ID NO: 86563 - RNA, 21 nt, Artificial Sequence
  Synthetic
aacggaugugaaaggauauga

SEQ ID NO: 86564 - RNA, 22 nt, Artificial Sequence
  Synthetic
aaacggaugugaaaggauauga

SEQ ID NO: 86565 - RNA, 23 nt, Artificial Sequence
  Synthetic
uaaacggaugugaaaggauauga

SEQ ID NO: 86566 - RNA, 24 nt, Artificial Sequence
  Synthetic
uuaaacggaugugaaaggauauga

SEQ ID NO: 86567 - RNA, 18 nt, Artificial Sequence
  Synthetic
aauaagggaaggauauga

SEQ ID NO: 86568 - RNA, 19 nt, Artificial Sequence
  Synthetic
aaauaagggaaggauauga

SEQ ID NO: 86569 - RNA, 20 nt, Artificial Sequence
  Synthetic
uaaauaagggaaggauauga

SEQ ID NO: 86570 - RNA, 21 nt, Artificial Sequence
  Synthetic
uuaaauaagggaaggauauga

SEQ ID NO: 86571 - RNA, 22 nt, Artificial Sequence
  Synthetic
uuuaaauaagggaaggauauga

SEQ ID NO: 86572 - RNA, 23 nt, Artificial Sequence
  Synthetic
uuuuaaauaagggaaggauauga

SEQ ID NO: 86573 - RNA, 24 nt, Artificial Sequence
  Synthetic
uuuuuaaauaagggaaggauauga

SEQ ID NO: 86574 - RNA, 18 nt, Artificial Sequence
  Synthetic
uccaaaauagugauauga

SEQ ID NO: 86575 - RNA, 22 nt, Artificial Sequence
  Synthetic
aggguccaaaauagugauauga

SEQ ID NO: 86576 - RNA, 23 nt, Artificial Sequence
  Synthetic
aaggguccaaaauagugauauga

SEQ ID NO: 86577 - RNA, 24 nt, Artificial Sequence
  Synthetic
caaggguccaaaauagugauauga

SEQ ID NO: 86578 - RNA, 18 nt, Artificial Sequence
  Synthetic
caaaagaaagaacuauga

SEQ ID NO: 86579 - RNA, 19 nt, Artificial Sequence
  Synthetic
acaaaagaaagaacuauga

SEQ ID NO: 86580 - RNA, 20 nt, Artificial Sequence
  Synthetic
cacaaaagaaagaacuauga

SEQ ID NO: 86581 - RNA, 22 nt, Artificial Sequence
  Synthetic
ugcacaaaagaaagaacuauga

SEQ ID NO: 86582 - RNA, 24 nt, Artificial Sequence
  Synthetic
ugugcacaaaagaaagaacuauga

SEQ ID NO: 86583 - RNA, 19 nt, Artificial Sequence
  Synthetic
uggaggggggguacuauga

SEQ ID NO: 86584 - RNA, 20 nt, Artificial Sequence
  Synthetic
auggaggggggguacuauga

SEQ ID NO: 86585 - RNA, 21 nt, Artificial Sequence
  Synthetic
aauggaggggggguacuauga

SEQ ID NO: 86586 - RNA, 23 nt, Artificial Sequence
  Synthetic
agaauggaggggggguacuauga

SEQ ID NO: 86587 - RNA, 24 nt, Artificial Sequence
  Synthetic
cagaauggaggggggguacuauga

SEQ ID NO: 86588 - RNA, 18 nt, Artificial Sequence
  Synthetic
acuaaucuuaagcuauga

SEQ ID NO: 86589 - RNA, 19 nt, Artificial Sequence
  Synthetic
cacuaaucuuaagcuauga

SEQ ID NO: 86590 - RNA, 20 nt, Artificial Sequence
  Synthetic
ucacuaaucuuaagcuauga

SEQ ID NO: 86591 - RNA, 22 nt, Artificial Sequence
  Synthetic
agucacuaaucuuaagcuauga

SEQ ID NO: 86592 - RNA, 23 nt, Artificial Sequence
  Synthetic
uagucacuaaucuuaagcuauga

SEQ ID NO: 86593 - RNA, 24 nt, Artificial Sequence
  Synthetic
uuagucacuaaucuuaagcuauga

SEQ ID NO: 86594 - RNA, 18 nt, Artificial Sequence
  Synthetic
agaaaaaggcagcuauga

SEQ ID NO: 86595 - RNA, 19 nt, Artificial Sequence
  Synthetic
uagaaaaaggcagcuauga

SEQ ID NO: 86596 - RNA, 21 nt, Artificial Sequence
  Synthetic
aguagaaaaaggcagcuauga

SEQ ID NO: 86597 - RNA, 22 nt, Artificial Sequence
  Synthetic
aaguagaaaaaggcagcuauga

SEQ ID NO: 86598 - RNA, 23 nt, Artificial Sequence
  Synthetic
aaaguagaaaaaggcagcuauga

SEQ ID NO: 86599 - RNA, 18 nt, Artificial Sequence
  Synthetic
ccagugucagcgcuauga

SEQ ID NO: 86600 - RNA, 19 nt, Artificial Sequence
  Synthetic
cccagugucagcgcuauga

SEQ ID NO: 86601 - RNA, 20 nt, Artificial Sequence
  Synthetic
ucccagugucagcgcuauga

SEQ ID NO: 86602 - RNA, 21 nt, Artificial Sequence
  Synthetic
cucccagugucagcgcuauga

SEQ ID NO: 86603 - RNA, 24 nt, Artificial Sequence
  Synthetic
uggcucccagugucagcgcuauga

SEQ ID NO: 86604 - RNA, 18 nt, Artificial Sequence
  Synthetic
uuccagcugaaucuauga

SEQ ID NO: 86605 - RNA, 19 nt, Artificial Sequence
  Synthetic
cuuccagcugaaucuauga

SEQ ID NO: 86606 - RNA, 20 nt, Artificial Sequence
  Synthetic
ccuuccagcugaaucuauga

SEQ ID NO: 86607 - RNA, 21 nt, Artificial Sequence
  Synthetic
accuuccagcugaaucuauga

SEQ ID NO: 86608 - RNA, 22 nt, Artificial Sequence
  Synthetic
uaccuuccagcugaaucuauga

SEQ ID NO: 86609 - RNA, 23 nt, Artificial Sequence
  Synthetic
uuaccuuccagcugaaucuauga

SEQ ID NO: 86610 - RNA, 24 nt, Artificial Sequence
  Synthetic
auuaccuuccagcugaaucuauga

SEQ ID NO: 86611 - RNA, 18 nt, Artificial Sequence
  Synthetic
acauuaacaauucuauga

SEQ ID NO: 86612 - RNA, 19 nt, Artificial Sequence
  Synthetic
cacauuaacaauucuauga

SEQ ID NO: 86613 - RNA, 20 nt, Artificial Sequence
  Synthetic
ucacauuaacaauucuauga

SEQ ID NO: 86614 - RNA, 21 nt, Artificial Sequence
  Synthetic
cucacauuaacaauucuauga

SEQ ID NO: 86615 - RNA, 19 nt, Artificial Sequence
  Synthetic
uguggguuugcuuguauga

SEQ ID NO: 86616 - RNA, 20 nt, Artificial Sequence
  Synthetic
uuguggguuugcuuguauga

SEQ ID NO: 86617 - RNA, 22 nt, Artificial Sequence
  Synthetic
agggagcuauuaaaaauuauga

SEQ ID NO: 86618 - RNA, 24 nt, Artificial Sequence
  Synthetic
agagggagcuauuaaaaauuauga

SEQ ID NO: 86619 - RNA, 19 nt, Artificial Sequence
  Synthetic
uguccugucaaaauuauga

SEQ ID NO: 86620 - RNA, 20 nt, Artificial Sequence
  Synthetic
auguccugucaaaauuauga

SEQ ID NO: 86621 - RNA, 22 nt, Artificial Sequence
  Synthetic
ugauguccugucaaaauuauga

SEQ ID NO: 86622 - RNA, 23 nt, Artificial Sequence
  Synthetic
augauguccugucaaaauuauga

SEQ ID NO: 86623 - RNA, 24 nt, Artificial Sequence
  Synthetic
aaugauguccugucaaaauuauga

SEQ ID NO: 86624 - RNA, 21 nt, Artificial Sequence
  Synthetic
uaauuuuauaaagaauuauga

SEQ ID NO: 86625 - RNA, 22 nt, Artificial Sequence
  Synthetic
auaauuuuauaaagaauuauga

SEQ ID NO: 86626 - RNA, 23 nt, Artificial Sequence
  Synthetic
uauaauuuuauaaagaauuauga

SEQ ID NO: 86627 - RNA, 24 nt, Artificial Sequence
  Synthetic
auauaauuuuauaaagaauuauga

SEQ ID NO: 86628 - RNA, 18 nt, Artificial Sequence
  Synthetic
auaaccaggauauuauga

SEQ ID NO: 86629 - RNA, 20 nt, Artificial Sequence
  Synthetic
ugauaaccaggauauuauga

SEQ ID NO: 86630 - RNA, 21 nt, Artificial Sequence
  Synthetic
augauaaccaggauauuauga

SEQ ID NO: 86631 - RNA, 23 nt, Artificial Sequence
  Synthetic
agaugauaaccaggauauuauga

SEQ ID NO: 86632 - RNA, 24 nt, Artificial Sequence
  Synthetic
uagaugauaaccaggauauuauga

SEQ ID NO: 86633 - RNA, 20 nt, Artificial Sequence
  Synthetic
uggugugacuuuuauuauga

SEQ ID NO: 86634 - RNA, 21 nt, Artificial Sequence
  Synthetic
uuggugugacuuuuauuauga

SEQ ID NO: 86635 - RNA, 22 nt, Artificial Sequence
  Synthetic
cuuggugugacuuuuauuauga

SEQ ID NO: 86636 - RNA, 23 nt, Artificial Sequence
  Synthetic
acuuggugugacuuuuauuauga

SEQ ID NO: 86637 - RNA, 24 nt, Artificial Sequence
  Synthetic
aacuuggugugacuuuuauuauga

SEQ ID NO: 86638 - RNA, 18 nt, Artificial Sequence
  Synthetic
uucuuggggcccuuauga

SEQ ID NO: 86639 - RNA, 19 nt, Artificial Sequence
  Synthetic
uuucuuggggcccuuauga

SEQ ID NO: 86640 - RNA, 20 nt, Artificial Sequence
  Synthetic
cuuucuuggggcccuuauga

SEQ ID NO: 86641 - RNA, 21 nt, Artificial Sequence
  Synthetic
ccuuucuuggggcccuuauga

SEQ ID NO: 86642 - RNA, 22 nt, Artificial Sequence
  Synthetic
accuuucuuggggcccuuauga

SEQ ID NO: 86643 - RNA, 23 nt, Artificial Sequence
  Synthetic
caccuuucuuggggcccuuauga

SEQ ID NO: 86644 - RNA, 19 nt, Artificial Sequence
  Synthetic
uggcaguuacagcuuauga

SEQ ID NO: 86645 - RNA, 20 nt, Artificial Sequence
  Synthetic
uuggcaguuacagcuuauga

SEQ ID NO: 86646 - RNA, 22 nt, Artificial Sequence
  Synthetic
uguuggcaguuacagcuuauga

SEQ ID NO: 86647 - RNA, 24 nt, Artificial Sequence
  Synthetic
aguguuggcaguuacagcuuauga

SEQ ID NO: 86648 - RNA, 21 nt, Artificial Sequence
  Synthetic
aacaauuuuuuaaaaaacuga

SEQ ID NO: 86649 - RNA, 22 nt, Artificial Sequence
  Synthetic
aaacaauuuuuuaaaaaacuga

SEQ ID NO: 86650 - RNA, 23 nt, Artificial Sequence
  Synthetic
aaaacaauuuuuuaaaaaacuga

SEQ ID NO: 86651 - RNA, 24 nt, Artificial Sequence
  Synthetic
uaaaacaauuuuuuaaaaaacuga

SEQ ID NO: 86652 - RNA, 18 nt, Artificial Sequence
  Synthetic
uauucuccuuggaacuga

SEQ ID NO: 86653 - RNA, 19 nt, Artificial Sequence
  Synthetic
auauucuccuuggaacuga

SEQ ID NO: 86654 - RNA, 20 nt, Artificial Sequence
  Synthetic
cauauucuccuuggaacuga

SEQ ID NO: 86655 - RNA, 21 nt, Artificial Sequence
  Synthetic
ucauauucuccuuggaacuga

SEQ ID NO: 86656 - RNA, 22 nt, Artificial Sequence
  Synthetic
uucauauucuccuuggaacuga

SEQ ID NO: 86657 - RNA, 23 nt, Artificial Sequence
  Synthetic
uuucauauucuccuuggaacuga

SEQ ID NO: 86658 - RNA, 24 nt, Artificial Sequence
  Synthetic
uuuucauauucuccuuggaacuga

SEQ ID NO: 86659 - RNA, 22 nt, Artificial Sequence
  Synthetic
ugggagagagagaaguaacuga

SEQ ID NO: 86660 - RNA, 18 nt, Artificial Sequence
  Synthetic
cuucuuaauauccacuga

SEQ ID NO: 86661 - RNA, 19 nt, Artificial Sequence
  Synthetic
acuucuuaauauccacuga

SEQ ID NO: 86662 - RNA, 20 nt, Artificial Sequence
  Synthetic
cacuucuuaauauccacuga

SEQ ID NO: 86663 - RNA, 21 nt, Artificial Sequence
  Synthetic
ccacuucuuaauauccacuga

SEQ ID NO: 86664 - RNA, 22 nt, Artificial Sequence
  Synthetic
uccacuucuuaauauccacuga

SEQ ID NO: 86665 - RNA, 23 nt, Artificial Sequence
  Synthetic
cuccacuucuuaauauccacuga

SEQ ID NO: 86666 - RNA, 24 nt, Artificial Sequence
  Synthetic
acuccacuucuuaauauccacuga

SEQ ID NO: 86667 - RNA, 18 nt, Artificial Sequence
  Synthetic
aaauccuuaugucacuga

SEQ ID NO: 86668 - RNA, 19 nt, Artificial Sequence
  Synthetic
caaauccuuaugucacuga

SEQ ID NO: 86669 - RNA, 20 nt, Artificial Sequence
  Synthetic
ucaaauccuuaugucacuga

SEQ ID NO: 86670 - RNA, 21 nt, Artificial Sequence
  Synthetic
cucaaauccuuaugucacuga

SEQ ID NO: 86671 - RNA, 22 nt, Artificial Sequence
  Synthetic
acucaaauccuuaugucacuga

SEQ ID NO: 86672 - RNA, 24 nt, Artificial Sequence
  Synthetic
ugacucaaauccuuaugucacuga

SEQ ID NO: 86673 - RNA, 21 nt, Artificial Sequence
  Synthetic
aggggauacuuugcagacuga

SEQ ID NO: 86674 - RNA, 22 nt, Artificial Sequence
  Synthetic
aaggggauacuuugcagacuga

SEQ ID NO: 86675 - RNA, 23 nt, Artificial Sequence
  Synthetic
aaaggggauacuuugcagacuga

SEQ ID NO: 86676 - RNA, 24 nt, Artificial Sequence
  Synthetic
caaaggggauacuuugcagacuga

SEQ ID NO: 86677 - RNA, 18 nt, Artificial Sequence
  Synthetic
auacaacuuagagacuga

SEQ ID NO: 86678 - RNA, 19 nt, Artificial Sequence
  Synthetic
aauacaacuuagagacuga

SEQ ID NO: 86679 - RNA, 21 nt, Artificial Sequence
  Synthetic
ugaauacaacuuagagacuga

SEQ ID NO: 86680 - RNA, 22 nt, Artificial Sequence
  Synthetic
augaauacaacuuagagacuga

SEQ ID NO: 86681 - RNA, 23 nt, Artificial Sequence
  Synthetic
caugaauacaacuuagagacuga

SEQ ID NO: 86682 - RNA, 24 nt, Artificial Sequence
  Synthetic
ucaugaauacaacuuagagacuga

SEQ ID NO: 86683 - RNA, 18 nt, Artificial Sequence
  Synthetic
aagagcaaaguagacuga

SEQ ID NO: 86684 - RNA, 19 nt, Artificial Sequence
  Synthetic
uaagagcaaaguagacuga

SEQ ID NO: 86685 - RNA, 20 nt, Artificial Sequence
  Synthetic
uuaagagcaaaguagacuga

SEQ ID NO: 86686 - RNA, 22 nt, Artificial Sequence
  Synthetic
aguuaagagcaaaguagacuga

SEQ ID NO: 86687 - RNA, 23 nt, Artificial Sequence
  Synthetic
aaguuaagagcaaaguagacuga

SEQ ID NO: 86688 - RNA, 18 nt, Artificial Sequence
  Synthetic
ucuuucucaaaauacuga

SEQ ID NO: 86689 - RNA, 19 nt, Artificial Sequence
  Synthetic
cucuuucucaaaauacuga

SEQ ID NO: 86690 - RNA, 20 nt, Artificial Sequence
  Synthetic
ucucuuucucaaaauacuga

SEQ ID NO: 86691 - RNA, 21 nt, Artificial Sequence
  Synthetic
aucucuuucucaaaauacuga

SEQ ID NO: 86692 - RNA, 22 nt, Artificial Sequence
  Synthetic
aaucucuuucucaaaauacuga

SEQ ID NO: 86693 - RNA, 23 nt, Artificial Sequence
  Synthetic
caaucucuuucucaaaauacuga

SEQ ID NO: 86694 - RNA, 24 nt, Artificial Sequence
  Synthetic
ucaaucucuuucucaaaauacuga

SEQ ID NO: 86695 - RNA, 18 nt, Artificial Sequence
  Synthetic
uacucaguacccaccuga

SEQ ID NO: 86696 - RNA, 19 nt, Artificial Sequence
  Synthetic
uuacucaguacccaccuga

SEQ ID NO: 86697 - RNA, 20 nt, Artificial Sequence
  Synthetic
uuuacucaguacccaccuga

SEQ ID NO: 86698 - RNA, 22 nt, Artificial Sequence
  Synthetic
aguuuacucaguacccaccuga

SEQ ID NO: 86699 - RNA, 23 nt, Artificial Sequence
  Synthetic
caguuuacucaguacccaccuga

SEQ ID NO: 86700 - RNA, 24 nt, Artificial Sequence
  Synthetic
ucaguuuacucaguacccaccuga

SEQ ID NO: 86701 - RNA, 21 nt, Artificial Sequence
  Synthetic
uaauuuguaaaauauaccuga

SEQ ID NO: 86702 - RNA, 22 nt, Artificial Sequence
  Synthetic
uuaauuuguaaaauauaccuga

SEQ ID NO: 86703 - RNA, 23 nt, Artificial Sequence
  Synthetic
auuaauuuguaaaauauaccuga

SEQ ID NO: 86704 - RNA, 24 nt, Artificial Sequence
  Synthetic
aauuaauuuguaaaauauaccuga

SEQ ID NO: 86705 - RNA, 18 nt, Artificial Sequence
  Synthetic
cuaaggcacaugcccuga

SEQ ID NO: 86706 - RNA, 20 nt, Artificial Sequence
  Synthetic
ugcuaaggcacaugcccuga

SEQ ID NO: 86707 - RNA, 21 nt, Artificial Sequence
  Synthetic
augcuaaggcacaugcccuga

SEQ ID NO: 86708 - RNA, 22 nt, Artificial Sequence
  Synthetic
uaugcuaaggcacaugcccuga

SEQ ID NO: 86709 - RNA, 18 nt, Artificial Sequence
  Synthetic
cagguuacaauucccuga

SEQ ID NO: 86710 - RNA, 19 nt, Artificial Sequence
  Synthetic
acagguuacaauucccuga

SEQ ID NO: 86711 - RNA, 20 nt, Artificial Sequence
  Synthetic
uacagguuacaauucccuga

SEQ ID NO: 86712 - RNA, 21 nt, Artificial Sequence
  Synthetic
cuacagguuacaauucccuga

SEQ ID NO: 86713 - RNA, 22 nt, Artificial Sequence
  Synthetic
acuacagguuacaauucccuga

SEQ ID NO: 86714 - RNA, 23 nt, Artificial Sequence
  Synthetic
aacuacagguuacaauucccuga

SEQ ID NO: 86715 - RNA, 24 nt, Artificial Sequence
  Synthetic
aaacuacagguuacaauucccuga

SEQ ID NO: 86716 - RNA, 18 nt, Artificial Sequence
  Synthetic
aacucuauuguucccuga

SEQ ID NO: 86717 - RNA, 19 nt, Artificial Sequence
  Synthetic
aaacucuauuguucccuga

SEQ ID NO: 86718 - RNA, 20 nt, Artificial Sequence
  Synthetic
uaaacucuauuguucccuga

SEQ ID NO: 86719 - RNA, 21 nt, Artificial Sequence
  Synthetic
uuaaacucuauuguucccuga

SEQ ID NO: 86720 - RNA, 23 nt, Artificial Sequence
  Synthetic
uguuaaacucuauuguucccuga

SEQ ID NO: 86721 - RNA, 24 nt, Artificial Sequence
  Synthetic
cuguuaaacucuauuguucccuga

SEQ ID NO: 86722 - RNA, 18 nt, Artificial Sequence
  Synthetic
uuaagucuaugggccuga

SEQ ID NO: 86723 - RNA, 19 nt, Artificial Sequence
  Synthetic
cuuaagucuaugggccuga

SEQ ID NO: 86724 - RNA, 20 nt, Artificial Sequence
  Synthetic
acuuaagucuaugggccuga

SEQ ID NO: 86725 - RNA, 21 nt, Artificial Sequence
  Synthetic
cacuuaagucuaugggccuga

SEQ ID NO: 86726 - RNA, 22 nt, Artificial Sequence
  Synthetic
acacuuaagucuaugggccuga

SEQ ID NO: 86727 - RNA, 23 nt, Artificial Sequence
  Synthetic
aacacuuaagucuaugggccuga

SEQ ID NO: 86728 - RNA, 24 nt, Artificial Sequence
  Synthetic
aaacacuuaagucuaugggccuga

SEQ ID NO: 86729 - RNA, 18 nt, Artificial Sequence
  Synthetic
ucacagaccucauccuga

SEQ ID NO: 86730 - RNA, 19 nt, Artificial Sequence
  Synthetic
aucacagaccucauccuga

SEQ ID NO: 86731 - RNA, 20 nt, Artificial Sequence
  Synthetic
aaucacagaccucauccuga

SEQ ID NO: 86732 - RNA, 21 nt, Artificial Sequence
  Synthetic
aaaucacagaccucauccuga

SEQ ID NO: 86733 - RNA, 22 nt, Artificial Sequence
  Synthetic
uaaaucacagaccucauccuga

SEQ ID NO: 86734 - RNA, 18 nt, Artificial Sequence
  Synthetic
cggacaggugaaagcuga

SEQ ID NO: 86735 - RNA, 19 nt, Artificial Sequence
  Synthetic
acggacaggugaaagcuga

SEQ ID NO: 86736 - RNA, 20 nt, Artificial Sequence
  Synthetic
aacggacaggugaaagcuga

SEQ ID NO: 86737 - RNA, 21 nt, Artificial Sequence
  Synthetic
aaacggacaggugaaagcuga

SEQ ID NO: 86738 - RNA, 22 nt, Artificial Sequence
  Synthetic
caaacggacaggugaaagcuga

SEQ ID NO: 86739 - RNA, 23 nt, Artificial Sequence
  Synthetic
acaaacggacaggugaaagcuga

SEQ ID NO: 86740 - RNA, 24 nt, Artificial Sequence
  Synthetic
aacaaacggacaggugaaagcuga

SEQ ID NO: 86741 - RNA, 20 nt, Artificial Sequence
  Synthetic
agggcaagagagcaagcuga

SEQ ID NO: 86742 - RNA, 21 nt, Artificial Sequence
  Synthetic
aagggcaagagagcaagcuga

SEQ ID NO: 86743 - RNA, 23 nt, Artificial Sequence
  Synthetic
agaagggcaagagagcaagcuga

SEQ ID NO: 86744 - RNA, 24 nt, Artificial Sequence
  Synthetic
uagaagggcaagagagcaagcuga

SEQ ID NO: 86745 - RNA, 18 nt, Artificial Sequence
  Synthetic
uguguggacagaggcuga

SEQ ID NO: 86746 - RNA, 19 nt, Artificial Sequence
  Synthetic
cuguguggacagaggcuga

SEQ ID NO: 86747 - RNA, 20 nt, Artificial Sequence
  Synthetic
acuguguggacagaggcuga

SEQ ID NO: 86748 - RNA, 21 nt, Artificial Sequence
  Synthetic
aacuguguggacagaggcuga

SEQ ID NO: 86749 - RNA, 22 nt, Artificial Sequence
  Synthetic
aaacuguguggacagaggcuga

SEQ ID NO: 86750 - RNA, 23 nt, Artificial Sequence
  Synthetic
caaacuguguggacagaggcuga

SEQ ID NO: 86751 - RNA, 24 nt, Artificial Sequence
  Synthetic
ccaaacuguguggacagaggcuga

SEQ ID NO: 86752 - RNA, 18 nt, Artificial Sequence
  Synthetic
acagcuaacgggggcuga

SEQ ID NO: 86753 - RNA, 19 nt, Artificial Sequence
  Synthetic
cacagcuaacgggggcuga

SEQ ID NO: 86754 - RNA, 20 nt, Artificial Sequence
  Synthetic
ucacagcuaacgggggcuga

SEQ ID NO: 86755 - RNA, 21 nt, Artificial Sequence
  Synthetic
aucacagcuaacgggggcuga

SEQ ID NO: 86756 - RNA, 22 nt, Artificial Sequence
  Synthetic
uaucacagcuaacgggggcuga

SEQ ID NO: 86757 - RNA, 23 nt, Artificial Sequence
  Synthetic
auaucacagcuaacgggggcuga

SEQ ID NO: 86758 - RNA, 24 nt, Artificial Sequence
  Synthetic
uauaucacagcuaacgggggcuga

SEQ ID NO: 86759 - RNA, 18 nt, Artificial Sequence
  Synthetic
uguuuacauacuggcuga

SEQ ID NO: 86760 - RNA, 20 nt, Artificial Sequence
  Synthetic
aguguuuacauacuggcuga

SEQ ID NO: 86761 - RNA, 21 nt, Artificial Sequence
  Synthetic
aaguguuuacauacuggcuga

SEQ ID NO: 86762 - RNA, 22 nt, Artificial Sequence
  Synthetic
aaaguguuuacauacuggcuga

SEQ ID NO: 86763 - RNA, 23 nt, Artificial Sequence
  Synthetic
aaaaguguuuacauacuggcuga

SEQ ID NO: 86764 - RNA, 24 nt, Artificial Sequence
  Synthetic
caaaaguguuuacauacuggcuga

SEQ ID NO: 86765 - RNA, 19 nt, Artificial Sequence
  Synthetic
uguuucaguuucuggcuga

SEQ ID NO: 86766 - RNA, 20 nt, Artificial Sequence
  Synthetic
auguuucaguuucuggcuga

SEQ ID NO: 86767 - RNA, 21 nt, Artificial Sequence
  Synthetic
cauguuucaguuucuggcuga

SEQ ID NO: 86768 - RNA, 24 nt, Artificial Sequence
  Synthetic
uggcauguuucaguuucuggcuga

SEQ ID NO: 86769 - RNA, 18 nt, Artificial Sequence
  Synthetic
cuagaaaaaaacugcuga

SEQ ID NO: 86770 - RNA, 19 nt, Artificial Sequence
  Synthetic
ccuagaaaaaaacugcuga

SEQ ID NO: 86771 - RNA, 20 nt, Artificial Sequence
  Synthetic
accuagaaaaaaacugcuga

SEQ ID NO: 86772 - RNA, 22 nt, Artificial Sequence
  Synthetic
agaccuagaaaaaaacugcuga

SEQ ID NO: 86773 - RNA, 24 nt, Artificial Sequence
  Synthetic
agagaccuagaaaaaaacugcuga

SEQ ID NO: 86774 - RNA, 18 nt, Artificial Sequence
  Synthetic
aucccugaaaacugcuga

SEQ ID NO: 86775 - RNA, 19 nt, Artificial Sequence
  Synthetic
aaucccugaaaacugcuga

SEQ ID NO: 86776 - RNA, 20 nt, Artificial Sequence
  Synthetic
aaaucccugaaaacugcuga

SEQ ID NO: 86777 - RNA, 21 nt, Artificial Sequence
  Synthetic
caaaucccugaaaacugcuga

SEQ ID NO: 86778 - RNA, 22 nt, Artificial Sequence
  Synthetic
acaaaucccugaaaacugcuga

SEQ ID NO: 86779 - RNA, 23 nt, Artificial Sequence
  Synthetic
uacaaaucccugaaaacugcuga

SEQ ID NO: 86780 - RNA, 21 nt, Artificial Sequence
  Synthetic
uuuaauauauauaugugcuga

SEQ ID NO: 86781 - RNA, 22 nt, Artificial Sequence
  Synthetic
auuuaauauauauaugugcuga

SEQ ID NO: 86782 - RNA, 23 nt, Artificial Sequence
  Synthetic
cauuuaauauauauaugugcuga

SEQ ID NO: 86783 - RNA, 24 nt, Artificial Sequence
  Synthetic
acauuuaauauauauaugugcuga

SEQ ID NO: 86784 - RNA, 18 nt, Artificial Sequence
  Synthetic
uuucagaggcugugcuga

SEQ ID NO: 86785 - RNA, 19 nt, Artificial Sequence
  Synthetic
auuucagaggcugugcuga

SEQ ID NO: 86786 - RNA, 20 nt, Artificial Sequence
  Synthetic
uauuucagaggcugugcuga

SEQ ID NO: 86787 - RNA, 21 nt, Artificial Sequence
  Synthetic
auauuucagaggcugugcuga

SEQ ID NO: 86788 - RNA, 22 nt, Artificial Sequence
  Synthetic
aauauuucagaggcugugcuga

SEQ ID NO: 86789 - RNA, 23 nt, Artificial Sequence
  Synthetic
aaauauuucagaggcugugcuga

SEQ ID NO: 86790 - RNA, 21 nt, Artificial Sequence
  Synthetic
augaauuaugauuauugcuga

SEQ ID NO: 86791 - RNA, 22 nt, Artificial Sequence
  Synthetic
uaugaauuaugauuauugcuga

SEQ ID NO: 86792 - RNA, 23 nt, Artificial Sequence
  Synthetic
cuaugaauuaugauuauugcuga

SEQ ID NO: 86793 - RNA, 24 nt, Artificial Sequence
  Synthetic
ucuaugaauuaugauuauugcuga

SEQ ID NO: 86794 - RNA, 18 nt, Artificial Sequence
  Synthetic
uucgauuacguuugcuga

SEQ ID NO: 86795 - RNA, 19 nt, Artificial Sequence
  Synthetic
cuucgauuacguuugcuga

SEQ ID NO: 86796 - RNA, 20 nt, Artificial Sequence
  Synthetic
acuucgauuacguuugcuga

SEQ ID NO: 86797 - RNA, 21 nt, Artificial Sequence
  Synthetic
cacuucgauuacguuugcuga

SEQ ID NO: 86798 - RNA, 22 nt, Artificial Sequence
  Synthetic
ucacuucgauuacguuugcuga

SEQ ID NO: 86799 - RNA, 23 nt, Artificial Sequence
  Synthetic
aucacuucgauuacguuugcuga

SEQ ID NO: 86800 - RNA, 24 nt, Artificial Sequence
  Synthetic
aaucacuucgauuacguuugcuga

SEQ ID NO: 86801 - RNA, 22 nt, Artificial Sequence
  Synthetic
uguuuuucagaauaaaaucuga

SEQ ID NO: 86802 - RNA, 24 nt, Artificial Sequence
  Synthetic
uguguuuuucagaauaaaaucuga

SEQ ID NO: 86803 - RNA, 18 nt, Artificial Sequence
  Synthetic
aaauuacuuaaaaucuga

SEQ ID NO: 86804 - RNA, 19 nt, Artificial Sequence
  Synthetic
aaaauuacuuaaaaucuga

SEQ ID NO: 86805 - RNA, 20 nt, Artificial Sequence
  Synthetic
uaaaauuacuuaaaaucuga

SEQ ID NO: 86806 - RNA, 23 nt, Artificial Sequence
  Synthetic
ugguaaaauuacuuaaaaucuga

SEQ ID NO: 86807 - RNA, 24 nt, Artificial Sequence
  Synthetic
uugguaaaauuacuuaaaaucuga

SEQ ID NO: 86808 - RNA, 18 nt, Artificial Sequence
  Synthetic
cagcugucagauaucuga

SEQ ID NO: 86809 - RNA, 19 nt, Artificial Sequence
  Synthetic
ccagcugucagauaucuga

SEQ ID NO: 86810 - RNA, 21 nt, Artificial Sequence
  Synthetic
agccagcugucagauaucuga

SEQ ID NO: 86811 - RNA, 22 nt, Artificial Sequence
  Synthetic
cagccagcugucagauaucuga

SEQ ID NO: 86812 - RNA, 23 nt, Artificial Sequence
  Synthetic
acagccagcugucagauaucuga

SEQ ID NO: 86813 - RNA, 24 nt, Artificial Sequence
  Synthetic
aacagccagcugucagauaucuga

SEQ ID NO: 86814 - RNA, 19 nt, Artificial Sequence
  Synthetic
uguagaagaugcuaucuga

SEQ ID NO: 86815 - RNA, 20 nt, Artificial Sequence
  Synthetic
uuguagaagaugcuaucuga

SEQ ID NO: 86816 - RNA, 21 nt, Artificial Sequence
  Synthetic
uuuguagaagaugcuaucuga

SEQ ID NO: 86817 - RNA, 22 nt, Artificial Sequence
  Synthetic
uuuuguagaagaugcuaucuga

SEQ ID NO: 86818 - RNA, 18 nt, Artificial Sequence
  Synthetic
ugaugaacaaguaucuga

SEQ ID NO: 86819 - RNA, 19 nt, Artificial Sequence
  Synthetic
augaugaacaaguaucuga

SEQ ID NO: 86820 - RNA, 20 nt, Artificial Sequence
  Synthetic
caugaugaacaaguaucuga

SEQ ID NO: 86821 - RNA, 21 nt, Artificial Sequence
  Synthetic
acaugaugaacaaguaucuga

SEQ ID NO: 86822 - RNA, 22 nt, Artificial Sequence
  Synthetic
uacaugaugaacaaguaucuga

SEQ ID NO: 86823 - RNA, 24 nt, Artificial Sequence
  Synthetic
aguacaugaugaacaaguaucuga

SEQ ID NO: 86824 - RNA, 18 nt, Artificial Sequence
  Synthetic
ugauuccaucagcucuga

SEQ ID NO: 86825 - RNA, 20 nt, Artificial Sequence
  Synthetic
ugugauuccaucagcucuga

SEQ ID NO: 86826 - RNA, 21 nt, Artificial Sequence
  Synthetic
cugugauuccaucagcucuga

SEQ ID NO: 86827 - RNA, 22 nt, Artificial Sequence
  Synthetic
ccugugauuccaucagcucuga

SEQ ID NO: 86828 - RNA, 23 nt, Artificial Sequence
  Synthetic
cccugugauuccaucagcucuga

SEQ ID NO: 86829 - RNA, 24 nt, Artificial Sequence
  Synthetic
ucccugugauuccaucagcucuga

SEQ ID NO: 86830 - RNA, 18 nt, Artificial Sequence
  Synthetic
aauagauacagugucuga

SEQ ID NO: 86831 - RNA, 19 nt, Artificial Sequence
  Synthetic
aaauagauacagugucuga

SEQ ID NO: 86832 - RNA, 20 nt, Artificial Sequence
  Synthetic
aaaauagauacagugucuga

SEQ ID NO: 86833 - RNA, 21 nt, Artificial Sequence
  Synthetic
aaaaauagauacagugucuga

SEQ ID NO: 86834 - RNA, 23 nt, Artificial Sequence
  Synthetic
agaaaaauagauacagugucuga

SEQ ID NO: 86835 - RNA, 24 nt, Artificial Sequence
  Synthetic
aagaaaaauagauacagugucuga

SEQ ID NO: 86836 - RNA, 18 nt, Artificial Sequence
  Synthetic
uggagagauugauucuga

SEQ ID NO: 86837 - RNA, 19 nt, Artificial Sequence
  Synthetic
cuggagagauugauucuga

SEQ ID NO: 86838 - RNA, 23 nt, Artificial Sequence
  Synthetic
agggcuggagagauugauucuga

SEQ ID NO: 86839 - RNA, 24 nt, Artificial Sequence
  Synthetic
uagggcuggagagauugauucuga

SEQ ID NO: 86840 - RNA, 18 nt, Artificial Sequence
  Synthetic
cuuccauggauauucuga

SEQ ID NO: 86841 - RNA, 20 nt, Artificial Sequence
  Synthetic
agcuuccauggauauucuga

SEQ ID NO: 86842 - RNA, 22 nt, Artificial Sequence
  Synthetic
agagcuuccauggauauucuga

SEQ ID NO: 86843 - RNA, 23 nt, Artificial Sequence
  Synthetic
cagagcuuccauggauauucuga

SEQ ID NO: 86844 - RNA, 18 nt, Artificial Sequence
  Synthetic
cuuacauaaguauucuga

SEQ ID NO: 86845 - RNA, 20 nt, Artificial Sequence
  Synthetic
ugcuuacauaaguauucuga

SEQ ID NO: 86846 - RNA, 21 nt, Artificial Sequence
  Synthetic
augcuuacauaaguauucuga

SEQ ID NO: 86847 - RNA, 23 nt, Artificial Sequence
  Synthetic
ugaugcuuacauaaguauucuga

SEQ ID NO: 86848 - RNA, 18 nt, Artificial Sequence
  Synthetic
ccaaagacugucuucuga

SEQ ID NO: 86849 - RNA, 21 nt, Artificial Sequence
  Synthetic
aggccaaagacugucuucuga

SEQ ID NO: 86850 - RNA, 22 nt, Artificial Sequence
  Synthetic
aaggccaaagacugucuucuga

SEQ ID NO: 86851 - RNA, 23 nt, Artificial Sequence
  Synthetic
aaaggccaaagacugucuucuga

SEQ ID NO: 86852 - RNA, 24 nt, Artificial Sequence
  Synthetic
uaaaggccaaagacugucuucuga

SEQ ID NO: 86853 - RNA, 19 nt, Artificial Sequence
  Synthetic
ugcucucuaaauuuucuga

SEQ ID NO: 86854 - RNA, 20 nt, Artificial Sequence
  Synthetic
augcucucuaaauuuucuga

SEQ ID NO: 86855 - RNA, 22 nt, Artificial Sequence
  Synthetic
cgaugcucucuaaauuuucuga

SEQ ID NO: 86856 - RNA, 23 nt, Artificial Sequence
  Synthetic
ucgaugcucucuaaauuuucuga

SEQ ID NO: 86857 - RNA, 24 nt, Artificial Sequence
  Synthetic
cucgaugcucucuaaauuuucuga

SEQ ID NO: 86858 - RNA, 18 nt, Artificial Sequence
  Synthetic
uucacagcucuuuucuga

SEQ ID NO: 86859 - RNA, 19 nt, Artificial Sequence
  Synthetic
auucacagcucuuuucuga

SEQ ID NO: 86860 - RNA, 20 nt, Artificial Sequence
  Synthetic
cauucacagcucuuuucuga

SEQ ID NO: 86861 - RNA, 21 nt, Artificial Sequence
  Synthetic
ucauucacagcucuuuucuga

SEQ ID NO: 86862 - RNA, 22 nt, Artificial Sequence
  Synthetic
aucauucacagcucuuuucuga

SEQ ID NO: 86863 - RNA, 23 nt, Artificial Sequence
  Synthetic
uaucauucacagcucuuuucuga

SEQ ID NO: 86864 - RNA, 24 nt, Artificial Sequence
  Synthetic
auaucauucacagcucuuuucuga

SEQ ID NO: 86865 - RNA, 18 nt, Artificial Sequence
  Synthetic
aaaauuauuggaaaguga

SEQ ID NO: 86866 - RNA, 19 nt, Artificial Sequence
  Synthetic
caaaauuauuggaaaguga

SEQ ID NO: 86867 - RNA, 20 nt, Artificial Sequence
  Synthetic
ucaaaauuauuggaaaguga

SEQ ID NO: 86868 - RNA, 21 nt, Artificial Sequence
  Synthetic
uucaaaauuauuggaaaguga

SEQ ID NO: 86869 - RNA, 22 nt, Artificial Sequence
  Synthetic
cuucaaaauuauuggaaaguga

SEQ ID NO: 86870 - RNA, 23 nt, Artificial Sequence
  Synthetic
ccuucaaaauuauuggaaaguga

SEQ ID NO: 86871 - RNA, 24 nt, Artificial Sequence
  Synthetic
uccuucaaaauuauuggaaaguga

SEQ ID NO: 86872 - RNA, 21 nt, Artificial Sequence
  Synthetic
uuauauuagccaugaaaguga

SEQ ID NO: 86873 - RNA, 22 nt, Artificial Sequence
  Synthetic
uuuauauuagccaugaaaguga

SEQ ID NO: 86874 - RNA, 23 nt, Artificial Sequence
  Synthetic
uuuuauauuagccaugaaaguga

SEQ ID NO: 86875 - RNA, 24 nt, Artificial Sequence
  Synthetic
auuuuauauuagccaugaaaguga

SEQ ID NO: 86876 - RNA, 18 nt, Artificial Sequence
  Synthetic
cauucagagaacaaguga

SEQ ID NO: 86877 - RNA, 19 nt, Artificial Sequence
  Synthetic
acauucagagaacaaguga

SEQ ID NO: 86878 - RNA, 20 nt, Artificial Sequence
  Synthetic
cacauucagagaacaaguga

SEQ ID NO: 86879 - RNA, 22 nt, Artificial Sequence
  Synthetic
agcacauucagagaacaaguga

SEQ ID NO: 86880 - RNA, 24 nt, Artificial Sequence
  Synthetic
agagcacauucagagaacaaguga

SEQ ID NO: 86881 - RNA, 19 nt, Artificial Sequence
  Synthetic
agggggaguagacaaguga

SEQ ID NO: 86882 - RNA, 20 nt, Artificial Sequence
  Synthetic
uagggggaguagacaaguga

SEQ ID NO: 86883 - RNA, 21 nt, Artificial Sequence
  Synthetic
uuagggggaguagacaaguga

SEQ ID NO: 86884 - RNA, 23 nt, Artificial Sequence
  Synthetic
uguuagggggaguagacaaguga

SEQ ID NO: 86885 - RNA, 18 nt, Artificial Sequence
  Synthetic
uacaguuucagcaaguga

SEQ ID NO: 86886 - RNA, 19 nt, Artificial Sequence
  Synthetic
cuacaguuucagcaaguga

SEQ ID NO: 86887 - RNA, 20 nt, Artificial Sequence
  Synthetic
acuacaguuucagcaaguga

SEQ ID NO: 86888 - RNA, 21 nt, Artificial Sequence
  Synthetic
uacuacaguuucagcaaguga

SEQ ID NO: 86889 - RNA, 22 nt, Artificial Sequence
  Synthetic
auacuacaguuucagcaaguga

SEQ ID NO: 86890 - RNA, 23 nt, Artificial Sequence
  Synthetic
cauacuacaguuucagcaaguga

SEQ ID NO: 86891 - RNA, 24 nt, Artificial Sequence
  Synthetic
acauacuacaguuucagcaaguga

SEQ ID NO: 86892 - RNA, 18 nt, Artificial Sequence
  Synthetic
cuaucuucaggcaaguga

SEQ ID NO: 86893 - RNA, 19 nt, Artificial Sequence
  Synthetic
ucuaucuucaggcaaguga

SEQ ID NO: 86894 - RNA, 20 nt, Artificial Sequence
  Synthetic
aucuaucuucaggcaaguga

SEQ ID NO: 86895 - RNA, 21 nt, Artificial Sequence
  Synthetic
uaucuaucuucaggcaaguga

SEQ ID NO: 86896 - RNA, 22 nt, Artificial Sequence
  Synthetic
auaucuaucuucaggcaaguga

SEQ ID NO: 86897 - RNA, 23 nt, Artificial Sequence
  Synthetic
aauaucuaucuucaggcaaguga

SEQ ID NO: 86898 - RNA, 18 nt, Artificial Sequence
  Synthetic
cuuguguuaggcaaguga

SEQ ID NO: 86899 - RNA, 19 nt, Artificial Sequence
  Synthetic
acuuguguuaggcaaguga

SEQ ID NO: 86900 - RNA, 20 nt, Artificial Sequence
  Synthetic
aacuuguguuaggcaaguga

SEQ ID NO: 86901 - RNA, 21 nt, Artificial Sequence
  Synthetic
uaacuuguguuaggcaaguga

SEQ ID NO: 86902 - RNA, 22 nt, Artificial Sequence
  Synthetic
uuaacuuguguuaggcaaguga

SEQ ID NO: 86903 - RNA, 23 nt, Artificial Sequence
  Synthetic
uuuaacuuguguuaggcaaguga

SEQ ID NO: 86904 - RNA, 24 nt, Artificial Sequence
  Synthetic
uuuuaacuuguguuaggcaaguga

SEQ ID NO: 86905 - RNA, 18 nt, Artificial Sequence
  Synthetic
ugagagauucugaaguga

SEQ ID NO: 86906 - RNA, 19 nt, Artificial Sequence
  Synthetic
uugagagauucugaaguga

SEQ ID NO: 86907 - RNA, 20 nt, Artificial Sequence
  Synthetic
auugagagauucugaaguga

SEQ ID NO: 86908 - RNA, 23 nt, Artificial Sequence
  Synthetic
aggauugagagauucugaaguga

SEQ ID NO: 86909 - RNA, 24 nt, Artificial Sequence
  Synthetic
aaggauugagagauucugaaguga

SEQ ID NO: 86910 - RNA, 18 nt, Artificial Sequence
  Synthetic
uagauauaggugaaguga

SEQ ID NO: 86911 - RNA, 19 nt, Artificial Sequence
  Synthetic
cuagauauaggugaaguga

SEQ ID NO: 86912 - RNA, 20 nt, Artificial Sequence
  Synthetic
acuagauauaggugaaguga

SEQ ID NO: 86913 - RNA, 21 nt, Artificial Sequence
  Synthetic
cacuagauauaggugaaguga

SEQ ID NO: 86914 - RNA, 22 nt, Artificial Sequence
  Synthetic
acacuagauauaggugaaguga

SEQ ID NO: 86915 - RNA, 23 nt, Artificial Sequence
  Synthetic
cacacuagauauaggugaaguga

SEQ ID NO: 86916 - RNA, 24 nt, Artificial Sequence
  Synthetic
acacacuagauauaggugaaguga

SEQ ID NO: 86917 - RNA, 18 nt, Artificial Sequence
  Synthetic
aaacauucauugaaguga

SEQ ID NO: 86918 - RNA, 19 nt, Artificial Sequence
  Synthetic
caaacauucauugaaguga

SEQ ID NO: 86919 - RNA, 20 nt, Artificial Sequence
  Synthetic
ccaaacauucauugaaguga

SEQ ID NO: 86920 - RNA, 21 nt, Artificial Sequence
  Synthetic
uccaaacauucauugaaguga

SEQ ID NO: 86921 - RNA, 22 nt, Artificial Sequence
  Synthetic
uuccaaacauucauugaaguga

SEQ ID NO: 86922 - RNA, 23 nt, Artificial Sequence
  Synthetic
auuccaaacauucauugaaguga

SEQ ID NO: 86923 - RNA, 18 nt, Artificial Sequence
  Synthetic
uccacgcauuugaaguga

SEQ ID NO: 86924 - RNA, 19 nt, Artificial Sequence
  Synthetic
uuccacgcauuugaaguga

SEQ ID NO: 86925 - RNA, 20 nt, Artificial Sequence
  Synthetic
uuuccacgcauuugaaguga

SEQ ID NO: 86926 - RNA, 21 nt, Artificial Sequence
  Synthetic
auuuccacgcauuugaaguga

SEQ ID NO: 86927 - RNA, 22 nt, Artificial Sequence
  Synthetic
aauuuccacgcauuugaaguga

SEQ ID NO: 86928 - RNA, 24 nt, Artificial Sequence
  Synthetic
agaauuuccacgcauuugaaguga

SEQ ID NO: 86929 - RNA, 18 nt, Artificial Sequence
  Synthetic
cgauuacuugcacaguga

SEQ ID NO: 86930 - RNA, 19 nt, Artificial Sequence
  Synthetic
ccgauuacuugcacaguga

SEQ ID NO: 86931 - RNA, 20 nt, Artificial Sequence
  Synthetic
accgauuacuugcacaguga

SEQ ID NO: 86932 - RNA, 21 nt, Artificial Sequence
  Synthetic
caccgauuacuugcacaguga

SEQ ID NO: 86933 - RNA, 22 nt, Artificial Sequence
  Synthetic
ccaccgauuacuugcacaguga

SEQ ID NO: 86934 - RNA, 23 nt, Artificial Sequence
  Synthetic
cccaccgauuacuugcacaguga

SEQ ID NO: 86935 - RNA, 24 nt, Artificial Sequence
  Synthetic
acccaccgauuacuugcacaguga

SEQ ID NO: 86936 - RNA, 18 nt, Artificial Sequence
  Synthetic
aaagagacaauacaguga

SEQ ID NO: 86937 - RNA, 21 nt, Artificial Sequence
  Synthetic
aggaaagagacaauacaguga

SEQ ID NO: 86938 - RNA, 22 nt, Artificial Sequence
  Synthetic
aaggaaagagacaauacaguga

SEQ ID NO: 86939 - RNA, 23 nt, Artificial Sequence
  Synthetic
caaggaaagagacaauacaguga

SEQ ID NO: 86940 - RNA, 24 nt, Artificial Sequence
  Synthetic
ucaaggaaagagacaauacaguga

SEQ ID NO: 86941 - RNA, 20 nt, Artificial Sequence
  Synthetic
ugggugcaccaacccaguga

SEQ ID NO: 86942 - RNA, 21 nt, Artificial Sequence
  Synthetic
augggugcaccaacccaguga

SEQ ID NO: 86943 - RNA, 22 nt, Artificial Sequence
  Synthetic
aaugggugcaccaacccaguga

SEQ ID NO: 86944 - RNA, 18 nt, Artificial Sequence
  Synthetic
aauguucaaggccaguga

SEQ ID NO: 86945 - RNA, 19 nt, Artificial Sequence
  Synthetic
aaauguucaaggccaguga

SEQ ID NO: 86946 - RNA, 21 nt, Artificial Sequence
  Synthetic
ugaaauguucaaggccaguga

SEQ ID NO: 86947 - RNA, 22 nt, Artificial Sequence
  Synthetic
uugaaauguucaaggccaguga

SEQ ID NO: 86948 - RNA, 23 nt, Artificial Sequence
  Synthetic
cuugaaauguucaaggccaguga

SEQ ID NO: 86949 - RNA, 24 nt, Artificial Sequence
  Synthetic
acuugaaauguucaaggccaguga

SEQ ID NO: 86950 - RNA, 18 nt, Artificial Sequence
  Synthetic
agaucuuaaaggcaguga

SEQ ID NO: 86951 - RNA, 19 nt, Artificial Sequence
  Synthetic
uagaucuuaaaggcaguga

SEQ ID NO: 86952 - RNA, 20 nt, Artificial Sequence
  Synthetic
auagaucuuaaaggcaguga

SEQ ID NO: 86953 - RNA, 21 nt, Artificial Sequence
  Synthetic
cauagaucuuaaaggcaguga

SEQ ID NO: 86954 - RNA, 22 nt, Artificial Sequence
  Synthetic
ucauagaucuuaaaggcaguga

SEQ ID NO: 86955 - RNA, 23 nt, Artificial Sequence
  Synthetic
uucauagaucuuaaaggcaguga

SEQ ID NO: 86956 - RNA, 24 nt, Artificial Sequence
  Synthetic
auucauagaucuuaaaggcaguga

SEQ ID NO: 86957 - RNA, 18 nt, Artificial Sequence
  Synthetic
uagcccauuccucaguga

SEQ ID NO: 86958 - RNA, 19 nt, Artificial Sequence
  Synthetic
auagcccauuccucaguga

SEQ ID NO: 86959 - RNA, 20 nt, Artificial Sequence
  Synthetic
aauagcccauuccucaguga

SEQ ID NO: 86960 - RNA, 21 nt, Artificial Sequence
  Synthetic
uaauagcccauuccucaguga

SEQ ID NO: 86961 - RNA, 22 nt, Artificial Sequence
  Synthetic
auaauagcccauuccucaguga

SEQ ID NO: 86962 - RNA, 23 nt, Artificial Sequence
  Synthetic
uauaauagcccauuccucaguga

SEQ ID NO: 86963 - RNA, 24 nt, Artificial Sequence
  Synthetic
uuauaauagcccauuccucaguga

SEQ ID NO: 86964 - RNA, 18 nt, Artificial Sequence
  Synthetic
cacaauaggucucaguga

SEQ ID NO: 86965 - RNA, 19 nt, Artificial Sequence
  Synthetic
ucacaauaggucucaguga

SEQ ID NO: 86966 - RNA, 20 nt, Artificial Sequence
  Synthetic
uucacaauaggucucaguga

SEQ ID NO: 86967 - RNA, 21 nt, Artificial Sequence
  Synthetic
cuucacaauaggucucaguga

SEQ ID NO: 86968 - RNA, 22 nt, Artificial Sequence
  Synthetic
acuucacaauaggucucaguga

SEQ ID NO: 86969 - RNA, 23 nt, Artificial Sequence
  Synthetic
uacuucacaauaggucucaguga

SEQ ID NO: 86970 - RNA, 24 nt, Artificial Sequence
  Synthetic
uuacuucacaauaggucucaguga

SEQ ID NO: 86971 - RNA, 18 nt, Artificial Sequence
  Synthetic
uuuuuuauucaagaguga

SEQ ID NO: 86972 - RNA, 19 nt, Artificial Sequence
  Synthetic
uuuuuuuauucaagaguga

SEQ ID NO: 86973 - RNA, 20 nt, Artificial Sequence
  Synthetic
auuuuuuuauucaagaguga

SEQ ID NO: 86974 - RNA, 23 nt, Artificial Sequence
  Synthetic
uggauuuuuuuauucaagaguga

SEQ ID NO: 86975 - RNA, 24 nt, Artificial Sequence
  Synthetic
cuggauuuuuuuauucaagaguga

SEQ ID NO: 86976 - RNA, 19 nt, Artificial Sequence
  Synthetic
aguugaauaugaagaguga

SEQ ID NO: 86977 - RNA, 20 nt, Artificial Sequence
  Synthetic
aaguugaauaugaagaguga

SEQ ID NO: 86978 - RNA, 21 nt, Artificial Sequence
  Synthetic
caaguugaauaugaagaguga

SEQ ID NO: 86979 - RNA, 22 nt, Artificial Sequence
  Synthetic
ccaaguugaauaugaagaguga

SEQ ID NO: 86980 - RNA, 24 nt, Artificial Sequence
  Synthetic
agccaaguugaauaugaagaguga

SEQ ID NO: 86981 - RNA, 21 nt, Artificial Sequence
  Synthetic
aggaaaaaaguaagagaguga

SEQ ID NO: 86982 - RNA, 22 nt, Artificial Sequence
  Synthetic
caggaaaaaaguaagagaguga

SEQ ID NO: 86983 - RNA, 23 nt, Artificial Sequence
  Synthetic
ccaggaaaaaaguaagagaguga

SEQ ID NO: 86984 - RNA, 21 nt, Artificial Sequence
  Synthetic
acuaaauggcuaaaugaguga

SEQ ID NO: 86985 - RNA, 22 nt, Artificial Sequence
  Synthetic
uacuaaauggcuaaaugaguga

SEQ ID NO: 86986 - RNA, 23 nt, Artificial Sequence
  Synthetic
uuacuaaauggcuaaaugaguga

SEQ ID NO: 86987 - RNA, 24 nt, Artificial Sequence
  Synthetic
uuuacuaaauggcuaaaugaguga

SEQ ID NO: 86988 - RNA, 18 nt, Artificial Sequence
  Synthetic
ugaaucuggaaugaguga

SEQ ID NO: 86989 - RNA, 19 nt, Artificial Sequence
  Synthetic
uugaaucuggaaugaguga

SEQ ID NO: 86990 - RNA, 20 nt, Artificial Sequence
  Synthetic
uuugaaucuggaaugaguga

SEQ ID NO: 86991 - RNA, 21 nt, Artificial Sequence
  Synthetic
uuuugaaucuggaaugaguga

SEQ ID NO: 86992 - RNA, 22 nt, Artificial Sequence
  Synthetic
uuuuugaaucuggaaugaguga

SEQ ID NO: 86993 - RNA, 24 nt, Artificial Sequence
  Synthetic
aguuuuugaaucuggaaugaguga

SEQ ID NO: 86994 - RNA, 18 nt, Artificial Sequence
  Synthetic
ccuuaucaaagugaguga

SEQ ID NO: 86995 - RNA, 20 nt, Artificial Sequence
  Synthetic
ugccuuaucaaagugaguga

SEQ ID NO: 86996 - RNA, 21 nt, Artificial Sequence
  Synthetic
uugccuuaucaaagugaguga

SEQ ID NO: 86997 - RNA, 22 nt, Artificial Sequence
  Synthetic
uuugccuuaucaaagugaguga

SEQ ID NO: 86998 - RNA, 24 nt, Artificial Sequence
  Synthetic
aguuugccuuaucaaagugaguga

SEQ ID NO: 86999 - RNA, 18 nt, Artificial Sequence
  Synthetic
agacaauacagugaguga

SEQ ID NO: 87000 - RNA, 20 nt, Artificial Sequence
  Synthetic
agagacaauacagugaguga

SEQ ID NO: 87001 - RNA, 21 nt, Artificial Sequence
  Synthetic
aagagacaauacagugaguga

SEQ ID NO: 87002 - RNA, 22 nt, Artificial Sequence
  Synthetic
aaagagacaauacagugaguga

SEQ ID NO: 87003 - RNA, 18 nt, Artificial Sequence
  Synthetic
uuucccaugugauaguga

SEQ ID NO: 87004 - RNA, 19 nt, Artificial Sequence
  Synthetic
uuuucccaugugauaguga

SEQ ID NO: 87005 - RNA, 21 nt, Artificial Sequence
  Synthetic
uguuuucccaugugauaguga

SEQ ID NO: 87006 - RNA, 22 nt, Artificial Sequence
  Synthetic
cuguuuucccaugugauaguga

SEQ ID NO: 87007 - RNA, 24 nt, Artificial Sequence
  Synthetic
ugcuguuuucccaugugauaguga

SEQ ID NO: 87008 - RNA, 18 nt, Artificial Sequence
  Synthetic
cuuaccgaauacuaguga

SEQ ID NO: 87009 - RNA, 19 nt, Artificial Sequence
  Synthetic
ccuuaccgaauacuaguga

SEQ ID NO: 87010 - RNA, 20 nt, Artificial Sequence
  Synthetic
uccuuaccgaauacuaguga

SEQ ID NO: 87011 - RNA, 22 nt, Artificial Sequence
  Synthetic
uguccuuaccgaauacuaguga

SEQ ID NO: 87012 - RNA, 23 nt, Artificial Sequence
  Synthetic
uuguccuuaccgaauacuaguga

SEQ ID NO: 87013 - RNA, 24 nt, Artificial Sequence
  Synthetic
uuuguccuuaccgaauacuaguga

SEQ ID NO: 87014 - RNA, 18 nt, Artificial Sequence
  Synthetic
uuguccucaguguaguga

SEQ ID NO: 87015 - RNA, 19 nt, Artificial Sequence
  Synthetic
auuguccucaguguaguga

SEQ ID NO: 87016 - RNA, 20 nt, Artificial Sequence
  Synthetic
uauuguccucaguguaguga

SEQ ID NO: 87017 - RNA, 22 nt, Artificial Sequence
  Synthetic
uguauuguccucaguguaguga

SEQ ID NO: 87018 - RNA, 23 nt, Artificial Sequence
  Synthetic
uuguauuguccucaguguaguga

SEQ ID NO: 87019 - RNA, 24 nt, Artificial Sequence
  Synthetic
uuuguauuguccucaguguaguga

SEQ ID NO: 87020 - RNA, 18 nt, Artificial Sequence
  Synthetic
uguugaauuaauuaguga

SEQ ID NO: 87021 - RNA, 19 nt, Artificial Sequence
  Synthetic
auguugaauuaauuaguga

SEQ ID NO: 87022 - RNA, 20 nt, Artificial Sequence
  Synthetic
cauguugaauuaauuaguga

SEQ ID NO: 87023 - RNA, 21 nt, Artificial Sequence
  Synthetic
ccauguugaauuaauuaguga

SEQ ID NO: 87024 - RNA, 22 nt, Artificial Sequence
  Synthetic
accauguugaauuaauuaguga

SEQ ID NO: 87025 - RNA, 23 nt, Artificial Sequence
  Synthetic
aaccauguugaauuaauuaguga

SEQ ID NO: 87026 - RNA, 24 nt, Artificial Sequence
  Synthetic
aaaccauguugaauuaauuaguga

SEQ ID NO: 87027 - RNA, 18 nt, Artificial Sequence
  Synthetic
uagccugucacuuaguga

SEQ ID NO: 87028 - RNA, 19 nt, Artificial Sequence
  Synthetic
uuagccugucacuuaguga

SEQ ID NO: 87029 - RNA, 20 nt, Artificial Sequence
  Synthetic
cuuagccugucacuuaguga

SEQ ID NO: 87030 - RNA, 23 nt, Artificial Sequence
  Synthetic
aggcuuagccugucacuuaguga

SEQ ID NO: 87031 - RNA, 24 nt, Artificial Sequence
  Synthetic
uaggcuuagccugucacuuaguga

SEQ ID NO: 87032 - RNA, 18 nt, Artificial Sequence
  Synthetic
uaaguauaagcuuaguga

SEQ ID NO: 87033 - RNA, 19 nt, Artificial Sequence
  Synthetic
uuaaguauaagcuuaguga

SEQ ID NO: 87034 - RNA, 20 nt, Artificial Sequence
  Synthetic
auuaaguauaagcuuaguga

SEQ ID NO: 87035 - RNA, 21 nt, Artificial Sequence
  Synthetic
cauuaaguauaagcuuaguga

SEQ ID NO: 87036 - RNA, 22 nt, Artificial Sequence
  Synthetic
ucauuaaguauaagcuuaguga

SEQ ID NO: 87037 - RNA, 23 nt, Artificial Sequence
  Synthetic
cucauuaaguauaagcuuaguga

SEQ ID NO: 87038 - RNA, 24 nt, Artificial Sequence
  Synthetic
acucauuaaguauaagcuuaguga

SEQ ID NO: 87039 - RNA, 18 nt, Artificial Sequence
  Synthetic
ugcuaagacaguuaguga

SEQ ID NO: 87040 - RNA, 19 nt, Artificial Sequence
  Synthetic
augcuaagacaguuaguga

SEQ ID NO: 87041 - RNA, 20 nt, Artificial Sequence
  Synthetic
uaugcuaagacaguuaguga

SEQ ID NO: 87042 - RNA, 21 nt, Artificial Sequence
  Synthetic
auaugcuaagacaguuaguga

SEQ ID NO: 87043 - RNA, 22 nt, Artificial Sequence
  Synthetic
uauaugcuaagacaguuaguga

SEQ ID NO: 87044 - RNA, 23 nt, Artificial Sequence
  Synthetic
uuauaugcuaagacaguuaguga

SEQ ID NO: 87045 - RNA, 24 nt, Artificial Sequence
  Synthetic
auuauaugcuaagacaguuaguga

SEQ ID NO: 87046 - RNA, 18 nt, Artificial Sequence
  Synthetic
uguuaaauuaacacguga

SEQ ID NO: 87047 - RNA, 19 nt, Artificial Sequence
  Synthetic
uuguuaaauuaacacguga

SEQ ID NO: 87048 - RNA, 20 nt, Artificial Sequence
  Synthetic
uuuguuaaauuaacacguga

SEQ ID NO: 87049 - RNA, 22 nt, Artificial Sequence
  Synthetic
uguuuguuaaauuaacacguga

SEQ ID NO: 87050 - RNA, 23 nt, Artificial Sequence
  Synthetic
auguuuguuaaauuaacacguga

SEQ ID NO: 87051 - RNA, 24 nt, Artificial Sequence
  Synthetic
aauguuuguuaaauuaacacguga

SEQ ID NO: 87052 - RNA, 18 nt, Artificial Sequence
  Synthetic
acuauucuuaauacguga

SEQ ID NO: 87053 - RNA, 20 nt, Artificial Sequence
  Synthetic
agacuauucuuaauacguga

SEQ ID NO: 87054 - RNA, 21 nt, Artificial Sequence
  Synthetic
uagacuauucuuaauacguga

SEQ ID NO: 87055 - RNA, 22 nt, Artificial Sequence
  Synthetic
auagacuauucuuaauacguga

SEQ ID NO: 87056 - RNA, 23 nt, Artificial Sequence
  Synthetic
cauagacuauucuuaauacguga

SEQ ID NO: 87057 - RNA, 24 nt, Artificial Sequence
  Synthetic
acauagacuauucuuaauacguga

SEQ ID NO: 87058 - RNA, 18 nt, Artificial Sequence
  Synthetic
uauuaucuacaaagguga

SEQ ID NO: 87059 - RNA, 19 nt, Artificial Sequence
  Synthetic
uuauuaucuacaaagguga

SEQ ID NO: 87060 - RNA, 22 nt, Artificial Sequence
  Synthetic
agguuauuaucuacaaagguga

SEQ ID NO: 87061 - RNA, 23 nt, Artificial Sequence
  Synthetic
uagguuauuaucuacaaagguga

SEQ ID NO: 87062 - RNA, 18 nt, Artificial Sequence
  Synthetic
uuguggagagccagguga

SEQ ID NO: 87063 - RNA, 19 nt, Artificial Sequence
  Synthetic
auuguggagagccagguga

SEQ ID NO: 87064 - RNA, 20 nt, Artificial Sequence
  Synthetic
aauuguggagagccagguga

SEQ ID NO: 87065 - RNA, 21 nt, Artificial Sequence
  Synthetic
caauuguggagagccagguga

SEQ ID NO: 87066 - RNA, 21 nt, Artificial Sequence
  Synthetic
aaugcuaaauaugugagguga

SEQ ID NO: 87067 - RNA, 22 nt, Artificial Sequence
  Synthetic
uaaugcuaaauaugugagguga

SEQ ID NO: 87068 - RNA, 23 nt, Artificial Sequence
  Synthetic
uuaaugcuaaauaugugagguga

SEQ ID NO: 87069 - RNA, 18 nt, Artificial Sequence
  Synthetic
agauaguauuugagguga

SEQ ID NO: 87070 - RNA, 19 nt, Artificial Sequence
  Synthetic
aagauaguauuugagguga

SEQ ID NO: 87071 - RNA, 20 nt, Artificial Sequence
  Synthetic
uaagauaguauuugagguga

SEQ ID NO: 87072 - RNA, 21 nt, Artificial Sequence
  Synthetic
auaagauaguauuugagguga

SEQ ID NO: 87073 - RNA, 22 nt, Artificial Sequence
  Synthetic
aauaagauaguauuugagguga

SEQ ID NO: 87074 - RNA, 23 nt, Artificial Sequence
  Synthetic
uaauaagauaguauuugagguga

SEQ ID NO: 87075 - RNA, 24 nt, Artificial Sequence
  Synthetic
cuaauaagauaguauuugagguga

SEQ ID NO: 87076 - RNA, 19 nt, Artificial Sequence
  Synthetic
ugaagcccaaaauagguga

SEQ ID NO: 87077 - RNA, 20 nt, Artificial Sequence
  Synthetic
augaagcccaaaauagguga

SEQ ID NO: 87078 - RNA, 21 nt, Artificial Sequence
  Synthetic
aaugaagcccaaaauagguga

SEQ ID NO: 87079 - RNA, 22 nt, Artificial Sequence
  Synthetic
aaaugaagcccaaaauagguga

SEQ ID NO: 87080 - RNA, 18 nt, Artificial Sequence
  Synthetic
aacugucuuaaaggguga

SEQ ID NO: 87081 - RNA, 19 nt, Artificial Sequence
  Synthetic
uaacugucuuaaaggguga

SEQ ID NO: 87082 - RNA, 21 nt, Artificial Sequence
  Synthetic
aguaacugucuuaaaggguga

SEQ ID NO: 87083 - RNA, 22 nt, Artificial Sequence
  Synthetic
uaguaacugucuuaaaggguga

SEQ ID NO: 87084 - RNA, 24 nt, Artificial Sequence
  Synthetic
uguaguaacugucuuaaaggguga

SEQ ID NO: 87085 - RNA, 22 nt, Artificial Sequence
  Synthetic
ugcugggaaggguaggggguga

SEQ ID NO: 87086 - RNA, 23 nt, Artificial Sequence
  Synthetic
augcugggaaggguaggggguga

SEQ ID NO: 87087 - RNA, 18 nt, Artificial Sequence
  Synthetic
ugcauuaaauugggguga

SEQ ID NO: 87088 - RNA, 19 nt, Artificial Sequence
  Synthetic
uugcauuaaauugggguga

SEQ ID NO: 87089 - RNA, 20 nt, Artificial Sequence
  Synthetic
auugcauuaaauugggguga

SEQ ID NO: 87090 - RNA, 21 nt, Artificial Sequence
  Synthetic
uauugcauuaaauugggguga

SEQ ID NO: 87091 - RNA, 22 nt, Artificial Sequence
  Synthetic
auauugcauuaaauugggguga

SEQ ID NO: 87092 - RNA, 23 nt, Artificial Sequence
  Synthetic
cauauugcauuaaauugggguga

SEQ ID NO: 87093 - RNA, 24 nt, Artificial Sequence
  Synthetic
ucauauugcauuaaauugggguga

SEQ ID NO: 87094 - RNA, 18 nt, Artificial Sequence
  Synthetic
aaacagagcaauggguga

SEQ ID NO: 87095 - RNA, 20 nt, Artificial Sequence
  Synthetic
agaaacagagcaauggguga

SEQ ID NO: 87096 - RNA, 21 nt, Artificial Sequence
  Synthetic
uagaaacagagcaauggguga

SEQ ID NO: 87097 - RNA, 22 nt, Artificial Sequence
  Synthetic
auagaaacagagcaauggguga

SEQ ID NO: 87098 - RNA, 23 nt, Artificial Sequence
  Synthetic
uauagaaacagagcaauggguga

SEQ ID NO: 87099 - RNA, 24 nt, Artificial Sequence
  Synthetic
cuauagaaacagagcaauggguga

SEQ ID NO: 87100 - RNA, 18 nt, Artificial Sequence
  Synthetic
agugugaaaauuugguga

SEQ ID NO: 87101 - RNA, 19 nt, Artificial Sequence
  Synthetic
aagugugaaaauuugguga

SEQ ID NO: 87102 - RNA, 21 nt, Artificial Sequence
  Synthetic
ugaagugugaaaauuugguga

SEQ ID NO: 87103 - RNA, 22 nt, Artificial Sequence
  Synthetic
cugaagugugaaaauuugguga

SEQ ID NO: 87104 - RNA, 23 nt, Artificial Sequence
  Synthetic
ucugaagugugaaaauuugguga

SEQ ID NO: 87105 - RNA, 24 nt, Artificial Sequence
  Synthetic
aucugaagugugaaaauuugguga

SEQ ID NO: 87106 - RNA, 18 nt, Artificial Sequence
  Synthetic
auggcaugauuuugguga

SEQ ID NO: 87107 - RNA, 19 nt, Artificial Sequence
  Synthetic
cauggcaugauuuugguga

SEQ ID NO: 87108 - RNA, 20 nt, Artificial Sequence
  Synthetic
acauggcaugauuuugguga

SEQ ID NO: 87109 - RNA, 21 nt, Artificial Sequence
  Synthetic
cacauggcaugauuuugguga

SEQ ID NO: 87110 - RNA, 22 nt, Artificial Sequence
  Synthetic
ucacauggcaugauuuugguga

SEQ ID NO: 87111 - RNA, 23 nt, Artificial Sequence
  Synthetic
aucacauggcaugauuuugguga

SEQ ID NO: 87112 - RNA, 24 nt, Artificial Sequence
  Synthetic
aaucacauggcaugauuuugguga

SEQ ID NO: 87113 - RNA, 19 nt, Artificial Sequence
  Synthetic
aggucauuuaaaaauguga

SEQ ID NO: 87114 - RNA, 20 nt, Artificial Sequence
  Synthetic
caggucauuuaaaaauguga

SEQ ID NO: 87115 - RNA, 21 nt, Artificial Sequence
  Synthetic
ucaggucauuuaaaaauguga

SEQ ID NO: 87116 - RNA, 22 nt, Artificial Sequence
  Synthetic
aucaggucauuuaaaaauguga

SEQ ID NO: 87117 - RNA, 23 nt, Artificial Sequence
  Synthetic
uaucaggucauuuaaaaauguga

SEQ ID NO: 87118 - RNA, 24 nt, Artificial Sequence
  Synthetic
cuaucaggucauuuaaaaauguga

SEQ ID NO: 87119 - RNA, 18 nt, Artificial Sequence
  Synthetic
uaaagauaaaccauguga

SEQ ID NO: 87120 - RNA, 19 nt, Artificial Sequence
  Synthetic
uuaaagauaaaccauguga

SEQ ID NO: 87121 - RNA, 20 nt, Artificial Sequence
  Synthetic
auuaaagauaaaccauguga

SEQ ID NO: 87122 - RNA, 21 nt, Artificial Sequence
  Synthetic
uauuaaagauaaaccauguga

SEQ ID NO: 87123 - RNA, 22 nt, Artificial Sequence
  Synthetic
auauuaaagauaaaccauguga

SEQ ID NO: 87124 - RNA, 23 nt, Artificial Sequence
  Synthetic
cauauuaaagauaaaccauguga

SEQ ID NO: 87125 - RNA, 24 nt, Artificial Sequence
  Synthetic
acauauuaaagauaaaccauguga

SEQ ID NO: 87126 - RNA, 18 nt, Artificial Sequence
  Synthetic
cccuauuuuaggauguga

SEQ ID NO: 87127 - RNA, 19 nt, Artificial Sequence
  Synthetic
ucccuauuuuaggauguga

SEQ ID NO: 87128 - RNA, 20 nt, Artificial Sequence
  Synthetic
aucccuauuuuaggauguga

SEQ ID NO: 87129 - RNA, 18 nt, Artificial Sequence
  Synthetic
aauguuaaacggauguga

SEQ ID NO: 87130 - RNA, 19 nt, Artificial Sequence
  Synthetic
aaauguuaaacggauguga

SEQ ID NO: 87131 - RNA, 20 nt, Artificial Sequence
  Synthetic
aaaauguuaaacggauguga

SEQ ID NO: 87132 - RNA, 24 nt, Artificial Sequence
  Synthetic
agggaaaauguuaaacggauguga

SEQ ID NO: 87133 - RNA, 18 nt, Artificial Sequence
  Synthetic
uucagcccagggauguga

SEQ ID NO: 87134 - RNA, 19 nt, Artificial Sequence
  Synthetic
auucagcccagggauguga

SEQ ID NO: 87135 - RNA, 20 nt, Artificial Sequence
  Synthetic
aauucagcccagggauguga

SEQ ID NO: 87136 - RNA, 21 nt, Artificial Sequence
  Synthetic
aaauucagcccagggauguga

SEQ ID NO: 87137 - RNA, 22 nt, Artificial Sequence
  Synthetic
caaauucagcccagggauguga

SEQ ID NO: 87138 - RNA, 18 nt, Artificial Sequence
  Synthetic
auagacuuuaugauguga

SEQ ID NO: 87139 - RNA, 19 nt, Artificial Sequence
  Synthetic
uauagacuuuaugauguga

SEQ ID NO: 87140 - RNA, 20 nt, Artificial Sequence
  Synthetic
auauagacuuuaugauguga

SEQ ID NO: 87141 - RNA, 21 nt, Artificial Sequence
  Synthetic
uauauagacuuuaugauguga

SEQ ID NO: 87142 - RNA, 22 nt, Artificial Sequence
  Synthetic
auauauagacuuuaugauguga

SEQ ID NO: 87143 - RNA, 23 nt, Artificial Sequence
  Synthetic
uauauauagacuuuaugauguga

SEQ ID NO: 87144 - RNA, 18 nt, Artificial Sequence
  Synthetic
ugguuaugggugauguga

SEQ ID NO: 87145 - RNA, 19 nt, Artificial Sequence
  Synthetic
augguuaugggugauguga

SEQ ID NO: 87146 - RNA, 20 nt, Artificial Sequence
  Synthetic
aaugguuaugggugauguga

SEQ ID NO: 87147 - RNA, 21 nt, Artificial Sequence
  Synthetic
caaugguuaugggugauguga

SEQ ID NO: 87148 - RNA, 22 nt, Artificial Sequence
  Synthetic
acaaugguuaugggugauguga

SEQ ID NO: 87149 - RNA, 23 nt, Artificial Sequence
  Synthetic
uacaaugguuaugggugauguga

SEQ ID NO: 87150 - RNA, 24 nt, Artificial Sequence
  Synthetic
auacaaugguuaugggugauguga

SEQ ID NO: 87151 - RNA, 18 nt, Artificial Sequence
  Synthetic
auaaaugucuugauguga

SEQ ID NO: 87152 - RNA, 20 nt, Artificial Sequence
  Synthetic
agauaaaugucuugauguga

SEQ ID NO: 87153 - RNA, 21 nt, Artificial Sequence
  Synthetic
cagauaaaugucuugauguga

SEQ ID NO: 87154 - RNA, 22 nt, Artificial Sequence
  Synthetic
acagauaaaugucuugauguga

SEQ ID NO: 87155 - RNA, 23 nt, Artificial Sequence
  Synthetic
uacagauaaaugucuugauguga

SEQ ID NO: 87156 - RNA, 24 nt, Artificial Sequence
  Synthetic
auacagauaaaugucuugauguga

SEQ ID NO: 87157 - RNA, 18 nt, Artificial Sequence
  Synthetic
uguuuagagccacuguga

SEQ ID NO: 87158 - RNA, 19 nt, Artificial Sequence
  Synthetic
auguuuagagccacuguga

SEQ ID NO: 87159 - RNA, 21 nt, Artificial Sequence
  Synthetic
ugauguuuagagccacuguga

SEQ ID NO: 87160 - RNA, 24 nt, Artificial Sequence
  Synthetic
uggugauguuuagagccacuguga

SEQ ID NO: 87161 - RNA, 20 nt, Artificial Sequence
  Synthetic
aggucccugagucacuguga

SEQ ID NO: 87162 - RNA, 21 nt, Artificial Sequence
  Synthetic
uaggucccugagucacuguga

SEQ ID NO: 87163 - RNA, 22 nt, Artificial Sequence
  Synthetic
uuaggucccugagucacuguga

SEQ ID NO: 87164 - RNA, 23 nt, Artificial Sequence
  Synthetic
uuuaggucccugagucacuguga

SEQ ID NO: 87165 - RNA, 24 nt, Artificial Sequence
  Synthetic
auuuaggucccugagucacuguga

SEQ ID NO: 87166 - RNA, 18 nt, Artificial Sequence
  Synthetic
uugccaauaaaccuguga

SEQ ID NO: 87167 - RNA, 20 nt, Artificial Sequence
  Synthetic
uguugccaauaaaccuguga

SEQ ID NO: 87168 - RNA, 21 nt, Artificial Sequence
  Synthetic
uuguugccaauaaaccuguga

SEQ ID NO: 87169 - RNA, 22 nt, Artificial Sequence
  Synthetic
uuuguugccaauaaaccuguga

SEQ ID NO: 87170 - RNA, 21 nt, Artificial Sequence
  Synthetic
aaaugagucccuccccuguga

SEQ ID NO: 87171 - RNA, 22 nt, Artificial Sequence
  Synthetic
aaaaugagucccuccccuguga

SEQ ID NO: 87172 - RNA, 23 nt, Artificial Sequence
  Synthetic
aaaaaugagucccuccccuguga

SEQ ID NO: 87173 - RNA, 24 nt, Artificial Sequence
  Synthetic
uaaaaaugagucccuccccuguga

SEQ ID NO: 87174 - RNA, 18 nt, Artificial Sequence
  Synthetic
uuauccuucaagcuguga

SEQ ID NO: 87175 - RNA, 19 nt, Artificial Sequence
  Synthetic
uuuauccuucaagcuguga

SEQ ID NO: 87176 - RNA, 20 nt, Artificial Sequence
  Synthetic
uuuuauccuucaagcuguga

SEQ ID NO: 87177 - RNA, 21 nt, Artificial Sequence
  Synthetic
cuuuuauccuucaagcuguga

SEQ ID NO: 87178 - RNA, 22 nt, Artificial Sequence
  Synthetic
ccuuuuauccuucaagcuguga

SEQ ID NO: 87179 - RNA, 23 nt, Artificial Sequence
  Synthetic
accuuuuauccuucaagcuguga

SEQ ID NO: 87180 - RNA, 18 nt, Artificial Sequence
  Synthetic
acuuguucuagucuguga

SEQ ID NO: 87181 - RNA, 19 nt, Artificial Sequence
  Synthetic
aacuuguucuagucuguga

SEQ ID NO: 87182 - RNA, 20 nt, Artificial Sequence
  Synthetic
caacuuguucuagucuguga

SEQ ID NO: 87183 - RNA, 21 nt, Artificial Sequence
  Synthetic
ccaacuuguucuagucuguga

SEQ ID NO: 87184 - RNA, 22 nt, Artificial Sequence
  Synthetic
cccaacuuguucuagucuguga

SEQ ID NO: 87185 - RNA, 23 nt, Artificial Sequence
  Synthetic
ucccaacuuguucuagucuguga

SEQ ID NO: 87186 - RNA, 24 nt, Artificial Sequence
  Synthetic
aucccaacuuguucuagucuguga

SEQ ID NO: 87187 - RNA, 21 nt, Artificial Sequence
  Synthetic
uacacauacacauauguguga

SEQ ID NO: 87188 - RNA, 22 nt, Artificial Sequence
  Synthetic
auacacauacacauauguguga

SEQ ID NO: 87189 - RNA, 23 nt, Artificial Sequence
  Synthetic
aauacacauacacauauguguga

SEQ ID NO: 87190 - RNA, 24 nt, Artificial Sequence
  Synthetic
uaauacacauacacauauguguga

SEQ ID NO: 87191 - RNA, 18 nt, Artificial Sequence
  Synthetic
agaacaaguucuguguga

SEQ ID NO: 87192 - RNA, 20 nt, Artificial Sequence
  Synthetic
cgagaacaaguucuguguga

SEQ ID NO: 87193 - RNA, 21 nt, Artificial Sequence
  Synthetic
ucgagaacaaguucuguguga

SEQ ID NO: 87194 - RNA, 22 nt, Artificial Sequence
  Synthetic
aucgagaacaaguucuguguga

SEQ ID NO: 87195 - RNA, 23 nt, Artificial Sequence
  Synthetic
aaucgagaacaaguucuguguga

SEQ ID NO: 87196 - RNA, 24 nt, Artificial Sequence
  Synthetic
caaucgagaacaaguucuguguga

SEQ ID NO: 87197 - RNA, 21 nt, Artificial Sequence
  Synthetic
cuuuuauuuauauguguguga

SEQ ID NO: 87198 - RNA, 22 nt, Artificial Sequence
  Synthetic
ucuuuuauuuauauguguguga

SEQ ID NO: 87199 - RNA, 23 nt, Artificial Sequence
  Synthetic
uucuuuuauuuauauguguguga

SEQ ID NO: 87200 - RNA, 24 nt, Artificial Sequence
  Synthetic
auucuuuuauuuauauguguguga

SEQ ID NO: 87201 - RNA, 18 nt, Artificial Sequence
  Synthetic
ucgugagugcaauuguga

SEQ ID NO: 87202 - RNA, 19 nt, Artificial Sequence
  Synthetic
uucgugagugcaauuguga

SEQ ID NO: 87203 - RNA, 20 nt, Artificial Sequence
  Synthetic
uuucgugagugcaauuguga

SEQ ID NO: 87204 - RNA, 23 nt, Artificial Sequence
  Synthetic
agguuucgugagugcaauuguga

SEQ ID NO: 87205 - RNA, 18 nt, Artificial Sequence
  Synthetic
ugaauaccuuacuuguga

SEQ ID NO: 87206 - RNA, 19 nt, Artificial Sequence
  Synthetic
cugaauaccuuacuuguga

SEQ ID NO: 87207 - RNA, 20 nt, Artificial Sequence
  Synthetic
acugaauaccuuacuuguga

SEQ ID NO: 87208 - RNA, 21 nt, Artificial Sequence
  Synthetic
aacugaauaccuuacuuguga

SEQ ID NO: 87209 - RNA, 22 nt, Artificial Sequence
  Synthetic
uaacugaauaccuuacuuguga

SEQ ID NO: 87210 - RNA, 23 nt, Artificial Sequence
  Synthetic
uuaacugaauaccuuacuuguga

SEQ ID NO: 87211 - RNA, 24 nt, Artificial Sequence
  Synthetic
cuuaacugaauaccuuacuuguga

SEQ ID NO: 87212 - RNA, 19 nt, Artificial Sequence
  Synthetic
uggaaaguaaaccuuguga

SEQ ID NO: 87213 - RNA, 20 nt, Artificial Sequence
  Synthetic
cuggaaaguaaaccuuguga

SEQ ID NO: 87214 - RNA, 21 nt, Artificial Sequence
  Synthetic
ccuggaaaguaaaccuuguga

SEQ ID NO: 87215 - RNA, 22 nt, Artificial Sequence
  Synthetic
cccuggaaaguaaaccuuguga

SEQ ID NO: 87216 - RNA, 23 nt, Artificial Sequence
  Synthetic
ucccuggaaaguaaaccuuguga

SEQ ID NO: 87217 - RNA, 24 nt, Artificial Sequence
  Synthetic
uucccuggaaaguaaaccuuguga

SEQ ID NO: 87218 - RNA, 18 nt, Artificial Sequence
  Synthetic
uagcuuccagauuuguga

SEQ ID NO: 87219 - RNA, 19 nt, Artificial Sequence
  Synthetic
cuagcuuccagauuuguga

SEQ ID NO: 87220 - RNA, 20 nt, Artificial Sequence
  Synthetic
ccuagcuuccagauuuguga

SEQ ID NO: 87221 - RNA, 21 nt, Artificial Sequence
  Synthetic
accuagcuuccagauuuguga

SEQ ID NO: 87222 - RNA, 22 nt, Artificial Sequence
  Synthetic
caccuagcuuccagauuuguga

SEQ ID NO: 87223 - RNA, 23 nt, Artificial Sequence
  Synthetic
acaccuagcuuccagauuuguga

SEQ ID NO: 87224 - RNA, 21 nt, Artificial Sequence
  Synthetic
aguuuuccuaauauuuuguga

SEQ ID NO: 87225 - RNA, 22 nt, Artificial Sequence
  Synthetic
caguuuuccuaauauuuuguga

SEQ ID NO: 87226 - RNA, 23 nt, Artificial Sequence
  Synthetic
acaguuuuccuaauauuuuguga

SEQ ID NO: 87227 - RNA, 24 nt, Artificial Sequence
  Synthetic
aacaguuuuccuaauauuuuguga

SEQ ID NO: 87228 - RNA, 18 nt, Artificial Sequence
  Synthetic
auuuggggucuuuuguga

SEQ ID NO: 87229 - RNA, 19 nt, Artificial Sequence
  Synthetic
aauuuggggucuuuuguga

SEQ ID NO: 87230 - RNA, 20 nt, Artificial Sequence
  Synthetic
caauuuggggucuuuuguga

SEQ ID NO: 87231 - RNA, 21 nt, Artificial Sequence
  Synthetic
acaauuuggggucuuuuguga

SEQ ID NO: 87232 - RNA, 22 nt, Artificial Sequence
  Synthetic
uacaauuuggggucuuuuguga

SEQ ID NO: 87233 - RNA, 23 nt, Artificial Sequence
  Synthetic
auacaauuuggggucuuuuguga

SEQ ID NO: 87234 - RNA, 18 nt, Artificial Sequence
  Synthetic
uaggguauucaaaauuga

SEQ ID NO: 87235 - RNA, 19 nt, Artificial Sequence
  Synthetic
auaggguauucaaaauuga

SEQ ID NO: 87236 - RNA, 20 nt, Artificial Sequence
  Synthetic
aauaggguauucaaaauuga

SEQ ID NO: 87237 - RNA, 21 nt, Artificial Sequence
  Synthetic
aaauaggguauucaaaauuga

SEQ ID NO: 87238 - RNA, 22 nt, Artificial Sequence
  Synthetic
aaaauaggguauucaaaauuga

SEQ ID NO: 87239 - RNA, 23 nt, Artificial Sequence
  Synthetic
uaaaauaggguauucaaaauuga

SEQ ID NO: 87240 - RNA, 24 nt, Artificial Sequence
  Synthetic
uuaaaauaggguauucaaaauuga

SEQ ID NO: 87241 - RNA, 21 nt, Artificial Sequence
  Synthetic
cagaaagaggaaggaaauuga

SEQ ID NO: 87242 - RNA, 22 nt, Artificial Sequence
  Synthetic
acagaaagaggaaggaaauuga

SEQ ID NO: 87243 - RNA, 23 nt, Artificial Sequence
  Synthetic
cacagaaagaggaaggaaauuga

SEQ ID NO: 87244 - RNA, 18 nt, Artificial Sequence
  Synthetic
cuagaaagaguaaauuga

SEQ ID NO: 87245 - RNA, 19 nt, Artificial Sequence
  Synthetic
acuagaaagaguaaauuga

SEQ ID NO: 87246 - RNA, 21 nt, Artificial Sequence
  Synthetic
agacuagaaagaguaaauuga

SEQ ID NO: 87247 - RNA, 22 nt, Artificial Sequence
  Synthetic
aagacuagaaagaguaaauuga

SEQ ID NO: 87248 - RNA, 23 nt, Artificial Sequence
  Synthetic
aaagacuagaaagaguaaauuga

SEQ ID NO: 87249 - RNA, 19 nt, Artificial Sequence
  Synthetic
uguaacugcugacaauuga

SEQ ID NO: 87250 - RNA, 21 nt, Artificial Sequence
  Synthetic
uguguaacugcugacaauuga

SEQ ID NO: 87251 - RNA, 22 nt, Artificial Sequence
  Synthetic
auguguaacugcugacaauuga

SEQ ID NO: 87252 - RNA, 23 nt, Artificial Sequence
  Synthetic
cauguguaacugcugacaauuga

SEQ ID NO: 87253 - RNA, 24 nt, Artificial Sequence
  Synthetic
ccauguguaacugcugacaauuga

SEQ ID NO: 87254 - RNA, 18 nt, Artificial Sequence
  Synthetic
acuuagguccucaauuga

SEQ ID NO: 87255 - RNA, 21 nt, Artificial Sequence
  Synthetic
uggacuuagguccucaauuga

SEQ ID NO: 87256 - RNA, 22 nt, Artificial Sequence
  Synthetic
uuggacuuagguccucaauuga

SEQ ID NO: 87257 - RNA, 23 nt, Artificial Sequence
  Synthetic
auuggacuuagguccucaauuga

SEQ ID NO: 87258 - RNA, 21 nt, Artificial Sequence
  Synthetic
cugguuuucaucuuuaauuga

SEQ ID NO: 87259 - RNA, 22 nt, Artificial Sequence
  Synthetic
ccugguuuucaucuuuaauuga

SEQ ID NO: 87260 - RNA, 23 nt, Artificial Sequence
  Synthetic
accugguuuucaucuuuaauuga

SEQ ID NO: 87261 - RNA, 24 nt, Artificial Sequence
  Synthetic
aaccugguuuucaucuuuaauuga

SEQ ID NO: 87262 - RNA, 18 nt, Artificial Sequence
  Synthetic
aucugaaucacagauuga

SEQ ID NO: 87263 - RNA, 19 nt, Artificial Sequence
  Synthetic
aaucugaaucacagauuga

SEQ ID NO: 87264 - RNA, 20 nt, Artificial Sequence
  Synthetic
caaucugaaucacagauuga

SEQ ID NO: 87265 - RNA, 21 nt, Artificial Sequence
  Synthetic
ccaaucugaaucacagauuga

SEQ ID NO: 87266 - RNA, 22 nt, Artificial Sequence
  Synthetic
accaaucugaaucacagauuga

SEQ ID NO: 87267 - RNA, 23 nt, Artificial Sequence
  Synthetic
aaccaaucugaaucacagauuga

SEQ ID NO: 87268 - RNA, 24 nt, Artificial Sequence
  Synthetic
aaaccaaucugaaucacagauuga

SEQ ID NO: 87269 - RNA, 18 nt, Artificial Sequence
  Synthetic
ugcaauguggaauauuga

SEQ ID NO: 87270 - RNA, 20 nt, Artificial Sequence
  Synthetic
agugcaauguggaauauuga

SEQ ID NO: 87271 - RNA, 21 nt, Artificial Sequence
  Synthetic
cagugcaauguggaauauuga

SEQ ID NO: 87272 - RNA, 22 nt, Artificial Sequence
  Synthetic
ccagugcaauguggaauauuga

SEQ ID NO: 87273 - RNA, 23 nt, Artificial Sequence
  Synthetic
uccagugcaauguggaauauuga

SEQ ID NO: 87274 - RNA, 24 nt, Artificial Sequence
  Synthetic
cuccagugcaauguggaauauuga

SEQ ID NO: 87275 - RNA, 21 nt, Artificial Sequence
  Synthetic
ucaauuccagaaacauauuga

SEQ ID NO: 87276 - RNA, 22 nt, Artificial Sequence
  Synthetic
uucaauuccagaaacauauuga

SEQ ID NO: 87277 - RNA, 23 nt, Artificial Sequence
  Synthetic
uuucaauuccagaaacauauuga

SEQ ID NO: 87278 - RNA, 24 nt, Artificial Sequence
  Synthetic
uuuucaauuccagaaacauauuga

SEQ ID NO: 87279 - RNA, 18 nt, Artificial Sequence
  Synthetic
aacggggcagcauauuga

SEQ ID NO: 87280 - RNA, 19 nt, Artificial Sequence
  Synthetic
aaacggggcagcauauuga

SEQ ID NO: 87281 - RNA, 20 nt, Artificial Sequence
  Synthetic
aaaacggggcagcauauuga

SEQ ID NO: 87282 - RNA, 21 nt, Artificial Sequence
  Synthetic
caaaacggggcagcauauuga

SEQ ID NO: 87283 - RNA, 23 nt, Artificial Sequence
  Synthetic
cgcaaaacggggcagcauauuga

SEQ ID NO: 87284 - RNA, 24 nt, Artificial Sequence
  Synthetic
acgcaaaacggggcagcauauuga

SEQ ID NO: 87285 - RNA, 19 nt, Artificial Sequence
  Synthetic
ugguuaauuuauguauuga

SEQ ID NO: 87286 - RNA, 20 nt, Artificial Sequence
  Synthetic
uugguuaauuuauguauuga

SEQ ID NO: 87287 - RNA, 21 nt, Artificial Sequence
  Synthetic
uuugguuaauuuauguauuga

SEQ ID NO: 87288 - RNA, 22 nt, Artificial Sequence
  Synthetic
auuugguuaauuuauguauuga

SEQ ID NO: 87289 - RNA, 23 nt, Artificial Sequence
  Synthetic
uauuugguuaauuuauguauuga

SEQ ID NO: 87290 - RNA, 24 nt, Artificial Sequence
  Synthetic
auauuugguuaauuuauguauuga

SEQ ID NO: 87291 - RNA, 18 nt, Artificial Sequence
  Synthetic
cuguaagucaauuauuga

SEQ ID NO: 87292 - RNA, 19 nt, Artificial Sequence
  Synthetic
ucuguaagucaauuauuga

SEQ ID NO: 87293 - RNA, 20 nt, Artificial Sequence
  Synthetic
cucuguaagucaauuauuga

SEQ ID NO: 87294 - RNA, 21 nt, Artificial Sequence
  Synthetic
acucuguaagucaauuauuga

SEQ ID NO: 87295 - RNA, 22 nt, Artificial Sequence
  Synthetic
cacucuguaagucaauuauuga

SEQ ID NO: 87296 - RNA, 23 nt, Artificial Sequence
  Synthetic
ucacucuguaagucaauuauuga

SEQ ID NO: 87297 - RNA, 24 nt, Artificial Sequence
  Synthetic
uucacucuguaagucaauuauuga

SEQ ID NO: 87298 - RNA, 21 nt, Artificial Sequence
  Synthetic
ugaagaagaggaagaacuuga

SEQ ID NO: 87299 - RNA, 19 nt, Artificial Sequence
  Synthetic
ugccagcagagacacuuga

SEQ ID NO: 87300 - RNA, 20 nt, Artificial Sequence
  Synthetic
uugccagcagagacacuuga

SEQ ID NO: 87301 - RNA, 21 nt, Artificial Sequence
  Synthetic
uuugccagcagagacacuuga

SEQ ID NO: 87302 - RNA, 22 nt, Artificial Sequence
  Synthetic
cuuugccagcagagacacuuga

SEQ ID NO: 87303 - RNA, 24 nt, Artificial Sequence
  Synthetic
ugcuuugccagcagagacacuuga

SEQ ID NO: 87304 - RNA, 21 nt, Artificial Sequence
  Synthetic
acuuaaaaaauaaagacuuga

SEQ ID NO: 87305 - RNA, 22 nt, Artificial Sequence
  Synthetic
uacuuaaaaaauaaagacuuga

SEQ ID NO: 87306 - RNA, 24 nt, Artificial Sequence
  Synthetic
uguacuuaaaaaauaaagacuuga

SEQ ID NO: 87307 - RNA, 18 nt, Artificial Sequence
  Synthetic
uuauuaaaauagacuuga

SEQ ID NO: 87308 - RNA, 21 nt, Artificial Sequence
  Synthetic
agguuauuaaaauagacuuga

SEQ ID NO: 87309 - RNA, 22 nt, Artificial Sequence
  Synthetic
cagguuauuaaaauagacuuga

SEQ ID NO: 87310 - RNA, 23 nt, Artificial Sequence
  Synthetic
acagguuauuaaaauagacuuga

SEQ ID NO: 87311 - RNA, 24 nt, Artificial Sequence
  Synthetic
aacagguuauuaaaauagacuuga

SEQ ID NO: 87312 - RNA, 22 nt, Artificial Sequence
  Synthetic
ugacaaagaaaaugauacuuga

SEQ ID NO: 87313 - RNA, 23 nt, Artificial Sequence
  Synthetic
augacaaagaaaaugauacuuga

SEQ ID NO: 87314 - RNA, 24 nt, Artificial Sequence
  Synthetic
aaugacaaagaaaaugauacuuga

SEQ ID NO: 87315 - RNA, 18 nt, Artificial Sequence
  Synthetic
auaaaaaucugcccuuga

SEQ ID NO: 87316 - RNA, 20 nt, Artificial Sequence
  Synthetic
agauaaaaaucugcccuuga

SEQ ID NO: 87317 - RNA, 21 nt, Artificial Sequence
  Synthetic
aagauaaaaaucugcccuuga

SEQ ID NO: 87318 - RNA, 22 nt, Artificial Sequence
  Synthetic
aaagauaaaaaucugcccuuga

SEQ ID NO: 87319 - RNA, 23 nt, Artificial Sequence
  Synthetic
aaaagauaaaaaucugcccuuga

SEQ ID NO: 87320 - RNA, 24 nt, Artificial Sequence
  Synthetic
aaaaagauaaaaaucugcccuuga

SEQ ID NO: 87321 - RNA, 18 nt, Artificial Sequence
  Synthetic
ucccauuccaugccuuga

SEQ ID NO: 87322 - RNA, 19 nt, Artificial Sequence
  Synthetic
cucccauuccaugccuuga

SEQ ID NO: 87323 - RNA, 21 nt, Artificial Sequence
  Synthetic
agcucccauuccaugccuuga

SEQ ID NO: 87324 - RNA, 23 nt, Artificial Sequence
  Synthetic
ugagcucccauuccaugccuuga

SEQ ID NO: 87325 - RNA, 18 nt, Artificial Sequence
  Synthetic
aucuccagaucuccuuga

SEQ ID NO: 87326 - RNA, 19 nt, Artificial Sequence
  Synthetic
caucuccagaucuccuuga

SEQ ID NO: 87327 - RNA, 21 nt, Artificial Sequence
  Synthetic
ugcaucuccagaucuccuuga

SEQ ID NO: 87328 - RNA, 22 nt, Artificial Sequence
  Synthetic
uugcaucuccagaucuccuuga

SEQ ID NO: 87329 - RNA, 23 nt, Artificial Sequence
  Synthetic
auugcaucuccagaucuccuuga

SEQ ID NO: 87330 - RNA, 24 nt, Artificial Sequence
  Synthetic
aauugcaucuccagaucuccuuga

SEQ ID NO: 87331 - RNA, 18 nt, Artificial Sequence
  Synthetic
uuuauuuuucaagcuuga

SEQ ID NO: 87332 - RNA, 19 nt, Artificial Sequence
  Synthetic
cuuuauuuuucaagcuuga

SEQ ID NO: 87333 - RNA, 20 nt, Artificial Sequence
  Synthetic
ucuuuauuuuucaagcuuga

SEQ ID NO: 87334 - RNA, 21 nt, Artificial Sequence
  Synthetic
uucuuuauuuuucaagcuuga

SEQ ID NO: 87335 - RNA, 23 nt, Artificial Sequence
  Synthetic
uguucuuuauuuuucaagcuuga

SEQ ID NO: 87336 - RNA, 18 nt, Artificial Sequence
  Synthetic
uaccuaaggaaaucuuga

SEQ ID NO: 87337 - RNA, 19 nt, Artificial Sequence
  Synthetic
auaccuaaggaaaucuuga

SEQ ID NO: 87338 - RNA, 20 nt, Artificial Sequence
  Synthetic
uauaccuaaggaaaucuuga

SEQ ID NO: 87339 - RNA, 21 nt, Artificial Sequence
  Synthetic
uuauaccuaaggaaaucuuga

SEQ ID NO: 87340 - RNA, 23 nt, Artificial Sequence
  Synthetic
uguuauaccuaaggaaaucuuga

SEQ ID NO: 87341 - RNA, 24 nt, Artificial Sequence
  Synthetic
cuguuauaccuaaggaaaucuuga

SEQ ID NO: 87342 - RNA, 20 nt, Artificial Sequence
  Synthetic
aggggauuaacacaucuuga

SEQ ID NO: 87343 - RNA, 21 nt, Artificial Sequence
  Synthetic
aaggggauuaacacaucuuga

SEQ ID NO: 87344 - RNA, 22 nt, Artificial Sequence
  Synthetic
aaaggggauuaacacaucuuga

SEQ ID NO: 87345 - RNA, 23 nt, Artificial Sequence
  Synthetic
caaaggggauuaacacaucuuga

SEQ ID NO: 87346 - RNA, 18 nt, Artificial Sequence
  Synthetic
ucaacuauuagaucuuga

SEQ ID NO: 87347 - RNA, 20 nt, Artificial Sequence
  Synthetic
ugucaacuauuagaucuuga

SEQ ID NO: 87348 - RNA, 21 nt, Artificial Sequence
  Synthetic
cugucaacuauuagaucuuga

SEQ ID NO: 87349 - RNA, 22 nt, Artificial Sequence
  Synthetic
ucugucaacuauuagaucuuga

SEQ ID NO: 87350 - RNA, 23 nt, Artificial Sequence
  Synthetic
aucugucaacuauuagaucuuga

SEQ ID NO: 87351 - RNA, 19 nt, Artificial Sequence
  Synthetic
agccacagucaucucuuga

SEQ ID NO: 87352 - RNA, 20 nt, Artificial Sequence
  Synthetic
cagccacagucaucucuuga

SEQ ID NO: 87353 - RNA, 21 nt, Artificial Sequence
  Synthetic
ccagccacagucaucucuuga

SEQ ID NO: 87354 - RNA, 22 nt, Artificial Sequence
  Synthetic
cccagccacagucaucucuuga

SEQ ID NO: 87355 - RNA, 23 nt, Artificial Sequence
  Synthetic
ucccagccacagucaucucuuga

SEQ ID NO: 87356 - RNA, 24 nt, Artificial Sequence
  Synthetic
aucccagccacagucaucucuuga

SEQ ID NO: 87357 - RNA, 20 nt, Artificial Sequence
  Synthetic
ugguaacaugugucucuuga

SEQ ID NO: 87358 - RNA, 22 nt, Artificial Sequence
  Synthetic
agugguaacaugugucucuuga

SEQ ID NO: 87359 - RNA, 23 nt, Artificial Sequence
  Synthetic
uagugguaacaugugucucuuga

SEQ ID NO: 87360 - RNA, 24 nt, Artificial Sequence
  Synthetic
uuagugguaacaugugucucuuga

SEQ ID NO: 87361 - RNA, 18 nt, Artificial Sequence
  Synthetic
uauucuacauguucuuga

SEQ ID NO: 87362 - RNA, 19 nt, Artificial Sequence
  Synthetic
uuauucuacauguucuuga

SEQ ID NO: 87363 - RNA, 20 nt, Artificial Sequence
  Synthetic
cuuauucuacauguucuuga

SEQ ID NO: 87364 - RNA, 21 nt, Artificial Sequence
  Synthetic
acuuauucuacauguucuuga

SEQ ID NO: 87365 - RNA, 22 nt, Artificial Sequence
  Synthetic
aacuuauucuacauguucuuga

SEQ ID NO: 87366 - RNA, 23 nt, Artificial Sequence
  Synthetic
caacuuauucuacauguucuuga

SEQ ID NO: 87367 - RNA, 24 nt, Artificial Sequence
  Synthetic
ccaacuuauucuacauguucuuga

SEQ ID NO: 87368 - RNA, 18 nt, Artificial Sequence
  Synthetic
cuaugaacuaucaguuga

SEQ ID NO: 87369 - RNA, 19 nt, Artificial Sequence
  Synthetic
ccuaugaacuaucaguuga

SEQ ID NO: 87370 - RNA, 20 nt, Artificial Sequence
  Synthetic
uccuaugaacuaucaguuga

SEQ ID NO: 87371 - RNA, 21 nt, Artificial Sequence
  Synthetic
uuccuaugaacuaucaguuga

SEQ ID NO: 87372 - RNA, 23 nt, Artificial Sequence
  Synthetic
aguuccuaugaacuaucaguuga

SEQ ID NO: 87373 - RNA, 24 nt, Artificial Sequence
  Synthetic
aaguuccuaugaacuaucaguuga

SEQ ID NO: 87374 - RNA, 18 nt, Artificial Sequence
  Synthetic
cugagaaaagucaguuga

SEQ ID NO: 87375 - RNA, 19 nt, Artificial Sequence
  Synthetic
ucugagaaaagucaguuga

SEQ ID NO: 87376 - RNA, 20 nt, Artificial Sequence
  Synthetic
aucugagaaaagucaguuga

SEQ ID NO: 87377 - RNA, 21 nt, Artificial Sequence
  Synthetic
caucugagaaaagucaguuga

SEQ ID NO: 87378 - RNA, 24 nt, Artificial Sequence
  Synthetic
aggcaucugagaaaagucaguuga

SEQ ID NO: 87379 - RNA, 18 nt, Artificial Sequence
  Synthetic
aagaaacaguucaguuga

SEQ ID NO: 87380 - RNA, 19 nt, Artificial Sequence
  Synthetic
aaagaaacaguucaguuga

SEQ ID NO: 87381 - RNA, 21 nt, Artificial Sequence
  Synthetic
agaaagaaacaguucaguuga

SEQ ID NO: 87382 - RNA, 23 nt, Artificial Sequence
  Synthetic
agagaaagaaacaguucaguuga

SEQ ID NO: 87383 - RNA, 24 nt, Artificial Sequence
  Synthetic
cagagaaagaaacaguucaguuga

SEQ ID NO: 87384 - RNA, 18 nt, Artificial Sequence
  Synthetic
aauuuuuaugcacguuga

SEQ ID NO: 87385 - RNA, 20 nt, Artificial Sequence
  Synthetic
agaauuuuuaugcacguuga

SEQ ID NO: 87386 - RNA, 21 nt, Artificial Sequence
  Synthetic
cagaauuuuuaugcacguuga

SEQ ID NO: 87387 - RNA, 23 nt, Artificial Sequence
  Synthetic
ugcagaauuuuuaugcacguuga

SEQ ID NO: 87388 - RNA, 24 nt, Artificial Sequence
  Synthetic
cugcagaauuuuuaugcacguuga

SEQ ID NO: 87389 - RNA, 18 nt, Artificial Sequence
  Synthetic
uucacauuuucagguuga

SEQ ID NO: 87390 - RNA, 20 nt, Artificial Sequence
  Synthetic
uguucacauuuucagguuga

SEQ ID NO: 87391 - RNA, 21 nt, Artificial Sequence
  Synthetic
auguucacauuuucagguuga

SEQ ID NO: 87392 - RNA, 23 nt, Artificial Sequence
  Synthetic
ugauguucacauuuucagguuga

SEQ ID NO: 87393 - RNA, 24 nt, Artificial Sequence
  Synthetic
uugauguucacauuuucagguuga

SEQ ID NO: 87394 - RNA, 18 nt, Artificial Sequence
  Synthetic
uugcuuacauucuguuga

SEQ ID NO: 87395 - RNA, 19 nt, Artificial Sequence
  Synthetic
uuugcuuacauucuguuga

SEQ ID NO: 87396 - RNA, 20 nt, Artificial Sequence
  Synthetic
cuuugcuuacauucuguuga

SEQ ID NO: 87397 - RNA, 21 nt, Artificial Sequence
  Synthetic
acuuugcuuacauucuguuga

SEQ ID NO: 87398 - RNA, 22 nt, Artificial Sequence
  Synthetic
aacuuugcuuacauucuguuga

SEQ ID NO: 87399 - RNA, 23 nt, Artificial Sequence
  Synthetic
caacuuugcuuacauucuguuga

SEQ ID NO: 87400 - RNA, 24 nt, Artificial Sequence
  Synthetic
ccaacuuugcuuacauucuguuga

SEQ ID NO: 87401 - RNA, 18 nt, Artificial Sequence
  Synthetic
cucauaaacaguuguuga

SEQ ID NO: 87402 - RNA, 19 nt, Artificial Sequence
  Synthetic
acucauaaacaguuguuga

SEQ ID NO: 87403 - RNA, 21 nt, Artificial Sequence
  Synthetic
ugacucauaaacaguuguuga

SEQ ID NO: 87404 - RNA, 22 nt, Artificial Sequence
  Synthetic
augacucauaaacaguuguuga

SEQ ID NO: 87405 - RNA, 23 nt, Artificial Sequence
  Synthetic
aaugacucauaaacaguuguuga

SEQ ID NO: 87406 - RNA, 24 nt, Artificial Sequence
  Synthetic
uaaugacucauaaacaguuguuga

SEQ ID NO: 87407 - RNA, 18 nt, Artificial Sequence
  Synthetic
uauuucuagcuuuguuga

SEQ ID NO: 87408 - RNA, 19 nt, Artificial Sequence
  Synthetic
cuauuucuagcuuuguuga

SEQ ID NO: 87409 - RNA, 20 nt, Artificial Sequence
  Synthetic
ucuauuucuagcuuuguuga

SEQ ID NO: 87410 - RNA, 21 nt, Artificial Sequence
  Synthetic
cucuauuucuagcuuuguuga

SEQ ID NO: 87411 - RNA, 22 nt, Artificial Sequence
  Synthetic
acucuauuucuagcuuuguuga

SEQ ID NO: 87412 - RNA, 23 nt, Artificial Sequence
  Synthetic
uacucuauuucuagcuuuguuga

SEQ ID NO: 87413 - RNA, 24 nt, Artificial Sequence
  Synthetic
auacucuauuucuagcuuuguuga

SEQ ID NO: 87414 - RNA, 18 nt, Artificial Sequence
  Synthetic
cacacuaaucuuuguuga

SEQ ID NO: 87415 - RNA, 19 nt, Artificial Sequence
  Synthetic
ucacacuaaucuuuguuga

SEQ ID NO: 87416 - RNA, 23 nt, Artificial Sequence
  Synthetic
agggucacacuaaucuuuguuga

SEQ ID NO: 87417 - RNA, 24 nt, Artificial Sequence
  Synthetic
uagggucacacuaaucuuuguuga

SEQ ID NO: 87418 - RNA, 21 nt, Artificial Sequence
  Synthetic
caaaaauagcugagaauuuga

SEQ ID NO: 87419 - RNA, 22 nt, Artificial Sequence
  Synthetic
acaaaaauagcugagaauuuga

SEQ ID NO: 87420 - RNA, 23 nt, Artificial Sequence
  Synthetic
cacaaaaauagcugagaauuuga

SEQ ID NO: 87421 - RNA, 19 nt, Artificial Sequence
  Synthetic
agaacaguagguaauuuga

SEQ ID NO: 87422 - RNA, 20 nt, Artificial Sequence
  Synthetic
aagaacaguagguaauuuga

SEQ ID NO: 87423 - RNA, 21 nt, Artificial Sequence
  Synthetic
aaagaacaguagguaauuuga

SEQ ID NO: 87424 - RNA, 22 nt, Artificial Sequence
  Synthetic
aaaagaacaguagguaauuuga

SEQ ID NO: 87425 - RNA, 18 nt, Artificial Sequence
  Synthetic
caggcagccagcauuuga

SEQ ID NO: 87426 - RNA, 19 nt, Artificial Sequence
  Synthetic
ucaggcagccagcauuuga

SEQ ID NO: 87427 - RNA, 20 nt, Artificial Sequence
  Synthetic
aucaggcagccagcauuuga

SEQ ID NO: 87428 - RNA, 21 nt, Artificial Sequence
  Synthetic
aaucaggcagccagcauuuga

SEQ ID NO: 87429 - RNA, 22 nt, Artificial Sequence
  Synthetic
aaaucaggcagccagcauuuga

SEQ ID NO: 87430 - RNA, 23 nt, Artificial Sequence
  Synthetic
uaaaucaggcagccagcauuuga

SEQ ID NO: 87431 - RNA, 24 nt, Artificial Sequence
  Synthetic
auaaaucaggcagccagcauuuga

SEQ ID NO: 87432 - RNA, 18 nt, Artificial Sequence
  Synthetic
aauaaaaggugcauuuga

SEQ ID NO: 87433 - RNA, 19 nt, Artificial Sequence
  Synthetic
caauaaaaggugcauuuga

SEQ ID NO: 87434 - RNA, 20 nt, Artificial Sequence
  Synthetic
ucaauaaaaggugcauuuga

SEQ ID NO: 87435 - RNA, 21 nt, Artificial Sequence
  Synthetic
aucaauaaaaggugcauuuga

SEQ ID NO: 87436 - RNA, 22 nt, Artificial Sequence
  Synthetic
caucaauaaaaggugcauuuga

SEQ ID NO: 87437 - RNA, 23 nt, Artificial Sequence
  Synthetic
ucaucaauaaaaggugcauuuga

SEQ ID NO: 87438 - RNA, 24 nt, Artificial Sequence
  Synthetic
uucaucaauaaaaggugcauuuga

SEQ ID NO: 87439 - RNA, 18 nt, Artificial Sequence
  Synthetic
ucuuuugaggucauuuga

SEQ ID NO: 87440 - RNA, 19 nt, Artificial Sequence
  Synthetic
aucuuuugaggucauuuga

SEQ ID NO: 87441 - RNA, 20 nt, Artificial Sequence
  Synthetic
aaucuuuugaggucauuuga

SEQ ID NO: 87442 - RNA, 21 nt, Artificial Sequence
  Synthetic
aaaucuuuugaggucauuuga

SEQ ID NO: 87443 - RNA, 22 nt, Artificial Sequence
  Synthetic
uaaaucuuuugaggucauuuga

SEQ ID NO: 87444 - RNA, 18 nt, Artificial Sequence
  Synthetic
augguaauuaagauuuga

SEQ ID NO: 87445 - RNA, 20 nt, Artificial Sequence
  Synthetic
agaugguaauuaagauuuga

SEQ ID NO: 87446 - RNA, 21 nt, Artificial Sequence
  Synthetic
cacuguucacaaaggauuuga

SEQ ID NO: 87447 - RNA, 22 nt, Artificial Sequence
  Synthetic
acacuguucacaaaggauuuga

SEQ ID NO: 87448 - RNA, 23 nt, Artificial Sequence
  Synthetic
cacacuguucacaaaggauuuga

SEQ ID NO: 87449 - RNA, 24 nt, Artificial Sequence
  Synthetic
acacacuguucacaaaggauuuga

SEQ ID NO: 87450 - RNA, 18 nt, Artificial Sequence
  Synthetic
aauguacacuugauuuga

SEQ ID NO: 87451 - RNA, 19 nt, Artificial Sequence
  Synthetic
uaauguacacuugauuuga

SEQ ID NO: 87452 - RNA, 20 nt, Artificial Sequence
  Synthetic
uuaauguacacuugauuuga

SEQ ID NO: 87453 - RNA, 21 nt, Artificial Sequence
  Synthetic
uuuaauguacacuugauuuga

SEQ ID NO: 87454 - RNA, 22 nt, Artificial Sequence
  Synthetic
auuuaauguacacuugauuuga

SEQ ID NO: 87455 - RNA, 23 nt, Artificial Sequence
  Synthetic
uauuuaauguacacuugauuuga

SEQ ID NO: 87456 - RNA, 24 nt, Artificial Sequence
  Synthetic
uuauuuaauguacacuugauuuga

SEQ ID NO: 87457 - RNA, 19 nt, Artificial Sequence
  Synthetic
agcucccuugccccuuuga

SEQ ID NO: 87458 - RNA, 20 nt, Artificial Sequence
  Synthetic
cagcucccuugccccuuuga

SEQ ID NO: 87459 - RNA, 19 nt, Artificial Sequence
  Synthetic
aguuuucaagcuccuuuga

SEQ ID NO: 87460 - RNA, 20 nt, Artificial Sequence
  Synthetic
caguuuucaagcuccuuuga

SEQ ID NO: 87461 - RNA, 22 nt, Artificial Sequence
  Synthetic
ugcaguuuucaagcuccuuuga

SEQ ID NO: 87462 - RNA, 23 nt, Artificial Sequence
  Synthetic
cugcaguuuucaagcuccuuuga

SEQ ID NO: 87463 - RNA, 24 nt, Artificial Sequence
  Synthetic
ucugcaguuuucaagcuccuuuga

SEQ ID NO: 87464 - RNA, 18 nt, Artificial Sequence
  Synthetic
aauagucaggagcuuuga

SEQ ID NO: 87465 - RNA, 19 nt, Artificial Sequence
  Synthetic
uaauagucaggagcuuuga

SEQ ID NO: 87466 - RNA, 20 nt, Artificial Sequence
  Synthetic
cuaauagucaggagcuuuga

SEQ ID NO: 87467 - RNA, 21 nt, Artificial Sequence
  Synthetic
acuaauagucaggagcuuuga

SEQ ID NO: 87468 - RNA, 22 nt, Artificial Sequence
  Synthetic
aacuaauagucaggagcuuuga

SEQ ID NO: 87469 - RNA, 23 nt, Artificial Sequence
  Synthetic
aaacuaauagucaggagcuuuga

SEQ ID NO: 87470 - RNA, 24 nt, Artificial Sequence
  Synthetic
uaaacuaauagucaggagcuuuga

SEQ ID NO: 87471 - RNA, 18 nt, Artificial Sequence
  Synthetic
acuuacuuauaucuuuga

SEQ ID NO: 87472 - RNA, 19 nt, Artificial Sequence
  Synthetic
uacuuacuuauaucuuuga

SEQ ID NO: 87473 - RNA, 21 nt, Artificial Sequence
  Synthetic
uguacuuacuuauaucuuuga

SEQ ID NO: 87474 - RNA, 23 nt, Artificial Sequence
  Synthetic
uguguacuuacuuauaucuuuga

SEQ ID NO: 87475 - RNA, 24 nt, Artificial Sequence
  Synthetic
auguguacuuacuuauaucuuuga

SEQ ID NO: 87476 - RNA, 21 nt, Artificial Sequence
  Synthetic
uggggaaaugauugucuuuga

SEQ ID NO: 87477 - RNA, 23 nt, Artificial Sequence
  Synthetic
aguggggaaaugauugucuuuga

SEQ ID NO: 87478 - RNA, 24 nt, Artificial Sequence
  Synthetic
caguggggaaaugauugucuuuga

SEQ ID NO: 87479 - RNA, 18 nt, Artificial Sequence
  Synthetic
aguaaauacuaaguuuga

SEQ ID NO: 87480 - RNA, 19 nt, Artificial Sequence
  Synthetic
uaguaaauacuaaguuuga

SEQ ID NO: 87481 - RNA, 20 nt, Artificial Sequence
  Synthetic
cuaguaaauacuaaguuuga

SEQ ID NO: 87482 - RNA, 21 nt, Artificial Sequence
  Synthetic
acuaguaaauacuaaguuuga

SEQ ID NO: 87483 - RNA, 23 nt, Artificial Sequence
  Synthetic
ugacuaguaaauacuaaguuuga

SEQ ID NO: 87484 - RNA, 24 nt, Artificial Sequence
  Synthetic
cugacuaguaaauacuaaguuuga

SEQ ID NO: 87485 - RNA, 18 nt, Artificial Sequence
  Synthetic
uaugaaugaccaguuuga

SEQ ID NO: 87486 - RNA, 19 nt, Artificial Sequence
  Synthetic
cuaugaaugaccaguuuga

SEQ ID NO: 87487 - RNA, 20 nt, Artificial Sequence
  Synthetic
ucuaugaaugaccaguuuga

SEQ ID NO: 87488 - RNA, 22 nt, Artificial Sequence
  Synthetic
agucuaugaaugaccaguuuga

SEQ ID NO: 87489 - RNA, 24 nt, Artificial Sequence
  Synthetic
ugagucuaugaaugaccaguuuga

SEQ ID NO: 87490 - RNA, 21 nt, Artificial Sequence
  Synthetic
uaauacaaaaauauaguuuga

SEQ ID NO: 87491 - RNA, 22 nt, Artificial Sequence
  Synthetic
auaauacaaaaauauaguuuga

SEQ ID NO: 87492 - RNA, 23 nt, Artificial Sequence
  Synthetic
uauaauacaaaaauauaguuuga

SEQ ID NO: 87493 - RNA, 24 nt, Artificial Sequence
  Synthetic
uuauaauacaaaaauauaguuuga

SEQ ID NO: 87494 - RNA, 18 nt, Artificial Sequence
  Synthetic
aagugacagaauguuuga

SEQ ID NO: 87495 - RNA, 19 nt, Artificial Sequence
  Synthetic
aaagugacagaauguuuga

SEQ ID NO: 87496 - RNA, 22 nt, Artificial Sequence
  Synthetic
uggaaagugacagaauguuuga

SEQ ID NO: 87497 - RNA, 23 nt, Artificial Sequence
  Synthetic
uuggaaagugacagaauguuuga

SEQ ID NO: 87498 - RNA, 24 nt, Artificial Sequence
  Synthetic
auuggaaagugacagaauguuuga

SEQ ID NO: 87499 - RNA, 18 nt, Artificial Sequence
  Synthetic
ccaaucacgacauuuuga

SEQ ID NO: 87500 - RNA, 19 nt, Artificial Sequence
  Synthetic
uccaaucacgacauuuuga

SEQ ID NO: 87501 - RNA, 23 nt, Artificial Sequence
  Synthetic
uggguccaaucacgacauuuuga

SEQ ID NO: 87502 - RNA, 21 nt, Artificial Sequence
  Synthetic
cugggacaaaagucauuuuga

SEQ ID NO: 87503 - RNA, 22 nt, Artificial Sequence
  Synthetic
acugggacaaaagucauuuuga

SEQ ID NO: 87504 - RNA, 24 nt, Artificial Sequence
  Synthetic
agacugggacaaaagucauuuuga

SEQ ID NO: 87505 - RNA, 18 nt, Artificial Sequence
  Synthetic
uuaguaaucagauuuuga

SEQ ID NO: 87506 - RNA, 19 nt, Artificial Sequence
  Synthetic
uuuaguaaucagauuuuga

SEQ ID NO: 87507 - RNA, 21 nt, Artificial Sequence
  Synthetic
uguuuaguaaucagauuuuga

SEQ ID NO: 87508 - RNA, 22 nt, Artificial Sequence
  Synthetic
uuguuuaguaaucagauuuuga

SEQ ID NO: 87509 - RNA, 24 nt, Artificial Sequence
  Synthetic
aguuguuuaguaaucagauuuuga

SEQ ID NO: 87510 - RNA, 18 nt, Artificial Sequence
  Synthetic
uacugauuuugauuuuga

SEQ ID NO: 87511 - RNA, 19 nt, Artificial Sequence
  Synthetic
uuacugauuuugauuuuga

SEQ ID NO: 87512 - RNA, 20 nt, Artificial Sequence
  Synthetic
auuacugauuuugauuuuga

SEQ ID NO: 87513 - RNA, 21 nt, Artificial Sequence
  Synthetic
aauuacugauuuugauuuuga

SEQ ID NO: 87514 - RNA, 22 nt, Artificial Sequence
  Synthetic
aaauuacugauuuugauuuuga

SEQ ID NO: 87515 - RNA, 23 nt, Artificial Sequence
  Synthetic
aaaauuacugauuuugauuuuga

SEQ ID NO: 87516 - RNA, 24 nt, Artificial Sequence
  Synthetic
uaaaauuacugauuuugauuuuga

SEQ ID NO: 87517 - RNA, 18 nt, Artificial Sequence
  Synthetic
aauucagcacuauuuuga

SEQ ID NO: 87518 - RNA, 19 nt, Artificial Sequence
  Synthetic
aaauucagcacuauuuuga

SEQ ID NO: 87519 - RNA, 22 nt, Artificial Sequence
  Synthetic
uggaaauucagcacuauuuuga

SEQ ID NO: 87520 - RNA, 23 nt, Artificial Sequence
  Synthetic
cuggaaauucagcacuauuuuga

SEQ ID NO: 87521 - RNA, 18 nt, Artificial Sequence
  Synthetic
uuagguaauguauuuuga

SEQ ID NO: 87522 - RNA, 19 nt, Artificial Sequence
  Synthetic
uuuagguaauguauuuuga

SEQ ID NO: 87523 - RNA, 20 nt, Artificial Sequence
  Synthetic
cuuuagguaauguauuuuga

SEQ ID NO: 87524 - RNA, 21 nt, Artificial Sequence
  Synthetic
ucuuuagguaauguauuuuga

SEQ ID NO: 87525 - RNA, 22 nt, Artificial Sequence
  Synthetic
uucuuuagguaauguauuuuga

SEQ ID NO: 87526 - RNA, 23 nt, Artificial Sequence
  Synthetic
cuucuuuagguaauguauuuuga

SEQ ID NO: 87527 - RNA, 24 nt, Artificial Sequence
  Synthetic
ccuucuuuagguaauguauuuuga

SEQ ID NO: 87528 - RNA, 18 nt, Artificial Sequence
  Synthetic
agcuuguaccacuuuuga

SEQ ID NO: 87529 - RNA, 19 nt, Artificial Sequence
  Synthetic
uagcuuguaccacuuuuga

SEQ ID NO: 87530 - RNA, 20 nt, Artificial Sequence
  Synthetic
uuagcuuguaccacuuuuga

SEQ ID NO: 87531 - RNA, 22 nt, Artificial Sequence
  Synthetic
aguuagcuuguaccacuuuuga

SEQ ID NO: 87532 - RNA, 23 nt, Artificial Sequence
  Synthetic
caguuagcuuguaccacuuuuga

SEQ ID NO: 87533 - RNA, 24 nt, Artificial Sequence
  Synthetic
ccaguuagcuuguaccacuuuuga

SEQ ID NO: 87534 - RNA, 18 nt, Artificial Sequence
  Synthetic
ugggaaaugucguuuuga

SEQ ID NO: 87535 - RNA, 20 nt, Artificial Sequence
  Synthetic
ugugggaaaugucguuuuga

SEQ ID NO: 87536 - RNA, 21 nt, Artificial Sequence
  Synthetic
uugugggaaaugucguuuuga

SEQ ID NO: 87537 - RNA, 22 nt, Artificial Sequence
  Synthetic
uuugugggaaaugucguuuuga

SEQ ID NO: 87538 - RNA, 23 nt, Artificial Sequence
  Synthetic
cuuugugggaaaugucguuuuga

SEQ ID NO: 87539 - RNA, 24 nt, Artificial Sequence
  Synthetic
ucuuugugggaaaugucguuuuga

SEQ ID NO: 87540 - RNA, 19 nt, Artificial Sequence
  Synthetic
aggaaaugaugguuuuuga

SEQ ID NO: 87541 - RNA, 20 nt, Artificial Sequence
  Synthetic
caggaaaugaugguuuuuga

SEQ ID NO: 87542 - RNA, 21 nt, Artificial Sequence
  Synthetic
ucaggaaaugaugguuuuuga

SEQ ID NO: 87543 - RNA, 22 nt, Artificial Sequence
  Synthetic
uucaggaaaugaugguuuuuga

SEQ ID NO: 87544 - RNA, 23 nt, Artificial Sequence
  Synthetic
uuucaggaaaugaugguuuuuga

SEQ ID NO: 87545 - RNA, 24 nt, Artificial Sequence
  Synthetic
cuuucaggaaaugaugguuuuuga

SEQ ID NO: 87546 - RNA, 21 nt, Artificial Sequence
  Synthetic
cuuuucaaagaguguuuuuga

SEQ ID NO: 87547 - RNA, 22 nt, Artificial Sequence
  Synthetic
acuuuucaaagaguguuuuuga

SEQ ID NO: 87548 - RNA, 23 nt, Artificial Sequence
  Synthetic
uacuuuucaaagaguguuuuuga

SEQ ID NO: 87549 - RNA, 21 nt, Artificial Sequence
  Synthetic
uaugagguuguuuuuuuuuga

SEQ ID NO: 87550 - RNA, 22 nt, Artificial Sequence
  Synthetic
auaugagguuguuuuuuuuuga

SEQ ID NO: 87551 - RNA, 23 nt, Artificial Sequence
  Synthetic
uauaugagguuguuuuuuuuuga

SEQ ID NO: 87552 - RNA, 24 nt, Artificial Sequence
  Synthetic
auauaugagguuguuuuuuuuuga

SEQ ID NO: 87553 - RNA, 18 nt, Artificial Sequence
  Synthetic
auaaagauacaaaaaaua

SEQ ID NO: 87554 - RNA, 19 nt, Artificial Sequence
  Synthetic
uauaaagauacaaaaaaua

SEQ ID NO: 87555 - RNA, 24 nt, Artificial Sequence
  Synthetic
ugggguauaaagauacaaaaaaua

SEQ ID NO: 87556 - RNA, 18 nt, Artificial Sequence
  Synthetic
acauuuagggaaaaaaua

SEQ ID NO: 87557 - RNA, 19 nt, Artificial Sequence
  Synthetic
cacauuuagggaaaaaaua

SEQ ID NO: 87558 - RNA, 20 nt, Artificial Sequence
  Synthetic
ucacauuuagggaaaaaaua

SEQ ID NO: 87559 - RNA, 21 nt, Artificial Sequence
  Synthetic
uucacauuuagggaaaaaaua

SEQ ID NO: 87560 - RNA, 22 nt, Artificial Sequence
  Synthetic
uuucacauuuagggaaaaaaua

SEQ ID NO: 87561 - RNA, 23 nt, Artificial Sequence
  Synthetic
cuuucacauuuagggaaaaaaua

SEQ ID NO: 87562 - RNA, 24 nt, Artificial Sequence
  Synthetic
ucuuucacauuuagggaaaaaaua

SEQ ID NO: 87563 - RNA, 19 nt, Artificial Sequence
  Synthetic
ugugucauucacaaaaaua

SEQ ID NO: 87564 - RNA, 20 nt, Artificial Sequence
  Synthetic
uugugucauucacaaaaaua

SEQ ID NO: 87565 - RNA, 21 nt, Artificial Sequence
  Synthetic
auugugucauucacaaaaaua

SEQ ID NO: 87566 - RNA, 23 nt, Artificial Sequence
  Synthetic
agauugugucauucacaaaaaua

SEQ ID NO: 87567 - RNA, 24 nt, Artificial Sequence
  Synthetic
uagauugugucauucacaaaaaua

SEQ ID NO: 87568 - RNA, 18 nt, Artificial Sequence
  Synthetic
acucgguguucaaaaaua

SEQ ID NO: 87569 - RNA, 21 nt, Artificial Sequence
  Synthetic
aggacucgguguucaaaaaua

SEQ ID NO: 87570 - RNA, 22 nt, Artificial Sequence
  Synthetic
uaggacucgguguucaaaaaua

SEQ ID NO: 87571 - RNA, 23 nt, Artificial Sequence
  Synthetic
cuaggacucgguguucaaaaaua

SEQ ID NO: 87572 - RNA, 24 nt, Artificial Sequence
  Synthetic
ucuaggacucgguguucaaaaaua

SEQ ID NO: 87573 - RNA, 18 nt, Artificial Sequence
  Synthetic
agauuucagggaaaaaua

SEQ ID NO: 87574 - RNA, 19 nt, Artificial Sequence
  Synthetic
uagauuucagggaaaaaua

SEQ ID NO: 87575 - RNA, 20 nt, Artificial Sequence
  Synthetic
cuagauuucagggaaaaaua

SEQ ID NO: 87576 - RNA, 22 nt, Artificial Sequence
  Synthetic
ugcuagauuucagggaaaaaua

SEQ ID NO: 87577 - RNA, 23 nt, Artificial Sequence
  Synthetic
cugcuagauuucagggaaaaaua

SEQ ID NO: 87578 - RNA, 24 nt, Artificial Sequence
  Synthetic
acugcuagauuucagggaaaaaua

SEQ ID NO: 87579 - RNA, 21 nt, Artificial Sequence
  Synthetic
aauaaauccaaaaccaaaaua

SEQ ID NO: 87580 - RNA, 22 nt, Artificial Sequence
  Synthetic
uaauaaauccaaaaccaaaaua

SEQ ID NO: 87581 - RNA, 23 nt, Artificial Sequence
  Synthetic
auaauaaauccaaaaccaaaaua

SEQ ID NO: 87582 - RNA, 24 nt, Artificial Sequence
  Synthetic
aauaauaaauccaaaaccaaaaua

SEQ ID NO: 87583 - RNA, 18 nt, Artificial Sequence
  Synthetic
cacugccauuagaaaaua

SEQ ID NO: 87584 - RNA, 20 nt, Artificial Sequence
  Synthetic
agcacugccauuagaaaaua

SEQ ID NO: 87585 - RNA, 21 nt, Artificial Sequence
  Synthetic
uagcacugccauuagaaaaua

SEQ ID NO: 87586 - RNA, 22 nt, Artificial Sequence
  Synthetic
cuagcacugccauuagaaaaua

SEQ ID NO: 87587 - RNA, 23 nt, Artificial Sequence
  Synthetic
ucuagcacugccauuagaaaaua

SEQ ID NO: 87588 - RNA, 24 nt, Artificial Sequence
  Synthetic
aucuagcacugccauuagaaaaua

SEQ ID NO: 87589 - RNA, 18 nt, Artificial Sequence
  Synthetic
uaaauggcagggaaaaua

SEQ ID NO: 87590 - RNA, 19 nt, Artificial Sequence
  Synthetic
cuaaauggcagggaaaaua

SEQ ID NO: 87591 - RNA, 20 nt, Artificial Sequence
  Synthetic
acuaaauggcagggaaaaua

SEQ ID NO: 87592 - RNA, 21 nt, Artificial Sequence
  Synthetic
aacuaaauggcagggaaaaua

SEQ ID NO: 87593 - RNA, 21 nt, Artificial Sequence
  Synthetic
uuuguuuucucuuugaaaaua

SEQ ID NO: 87594 - RNA, 22 nt, Artificial Sequence
  Synthetic
uuuuguuuucucuuugaaaaua

SEQ ID NO: 87595 - RNA, 23 nt, Artificial Sequence
  Synthetic
auuuuguuuucucuuugaaaaua

SEQ ID NO: 87596 - RNA, 24 nt, Artificial Sequence
  Synthetic
aauuuuguuuucucuuugaaaaua

SEQ ID NO: 87597 - RNA, 21 nt, Artificial Sequence
  Synthetic
cuaggguugccuuauaaaaua

SEQ ID NO: 87598 - RNA, 22 nt, Artificial Sequence
  Synthetic
acuaggguugccuuauaaaaua

SEQ ID NO: 87599 - RNA, 24 nt, Artificial Sequence
  Synthetic
ugacuaggguugccuuauaaaaua

SEQ ID NO: 87600 - RNA, 19 nt, Artificial Sequence
  Synthetic
ugugguuguuuuacaaaua

SEQ ID NO: 87601 - RNA, 20 nt, Artificial Sequence
  Synthetic
augugguuguuuuacaaaua

SEQ ID NO: 87602 - RNA, 21 nt, Artificial Sequence
  Synthetic
aaugugguuguuuuacaaaua

SEQ ID NO: 87603 - RNA, 24 nt, Artificial Sequence
  Synthetic
aggaaugugguuguuuuacaaaua

SEQ ID NO: 87604 - RNA, 18 nt, Artificial Sequence
  Synthetic
uuaaacauaccccaaaua

SEQ ID NO: 87605 - RNA, 19 nt, Artificial Sequence
  Synthetic
cuuaaacauaccccaaaua

SEQ ID NO: 87606 - RNA, 20 nt, Artificial Sequence
  Synthetic
acuuaaacauaccccaaaua

SEQ ID NO: 87607 - RNA, 23 nt, Artificial Sequence
  Synthetic
aggacuuaaacauaccccaaaua

SEQ ID NO: 87608 - RNA, 21 nt, Artificial Sequence
  Synthetic
cauaaagaaaacauccaaaua

SEQ ID NO: 87609 - RNA, 22 nt, Artificial Sequence
  Synthetic
acauaaagaaaacauccaaaua

SEQ ID NO: 87610 - RNA, 23 nt, Artificial Sequence
  Synthetic
uacauaaagaaaacauccaaaua

SEQ ID NO: 87611 - RNA, 24 nt, Artificial Sequence
  Synthetic
cuacauaaagaaaacauccaaaua

SEQ ID NO: 87612 - RNA, 18 nt, Artificial Sequence
  Synthetic
augcagugaaagcaaaua

SEQ ID NO: 87613 - RNA, 19 nt, Artificial Sequence
  Synthetic
aaugcagugaaagcaaaua

SEQ ID NO: 87614 - RNA, 20 nt, Artificial Sequence
  Synthetic
caaugcagugaaagcaaaua

SEQ ID NO: 87615 - RNA, 21 nt, Artificial Sequence
  Synthetic
ucaaugcagugaaagcaaaua

SEQ ID NO: 87616 - RNA, 22 nt, Artificial Sequence
  Synthetic
aucaaugcagugaaagcaaaua

SEQ ID NO: 87617 - RNA, 23 nt, Artificial Sequence
  Synthetic
caucaaugcagugaaagcaaaua

SEQ ID NO: 87618 - RNA, 24 nt, Artificial Sequence
  Synthetic
ucaucaaugcagugaaagcaaaua

SEQ ID NO: 87619 - RNA, 18 nt, Artificial Sequence
  Synthetic
ugcuaaauuuaagaaaua

SEQ ID NO: 87620 - RNA, 19 nt, Artificial Sequence
  Synthetic
cugcuaaauuuaagaaaua

SEQ ID NO: 87621 - RNA, 21 nt, Artificial Sequence
  Synthetic
ugcugcuaaauuuaagaaaua

SEQ ID NO: 87622 - RNA, 22 nt, Artificial Sequence
  Synthetic
cugcugcuaaauuuaagaaaua

SEQ ID NO: 87623 - RNA, 23 nt, Artificial Sequence
  Synthetic
ccugcugcuaaauuuaagaaaua

SEQ ID NO: 87624 - RNA, 24 nt, Artificial Sequence
  Synthetic
accugcugcuaaauuuaagaaaua

SEQ ID NO: 87625 - RNA, 18 nt, Artificial Sequence
  Synthetic
uuggaaucaagagaaaua

SEQ ID NO: 87626 - RNA, 19 nt, Artificial Sequence
  Synthetic
uuuggaaucaagagaaaua

SEQ ID NO: 87627 - RNA, 22 nt, Artificial Sequence
  Synthetic
agguuuggaaucaagagaaaua

SEQ ID NO: 87628 - RNA, 23 nt, Artificial Sequence
  Synthetic
cagguuuggaaucaagagaaaua

SEQ ID NO: 87629 - RNA, 21 nt, Artificial Sequence
  Synthetic
ucuuuauaucacauagaaaua

SEQ ID NO: 87630 - RNA, 22 nt, Artificial Sequence
  Synthetic
uucuuuauaucacauagaaaua

SEQ ID NO: 87631 - RNA, 24 nt, Artificial Sequence
  Synthetic
aguucuuuauaucacauagaaaua

SEQ ID NO: 87632 - RNA, 21 nt, Artificial Sequence
  Synthetic
cuuuugagaggauuagaaaua

SEQ ID NO: 87633 - RNA, 22 nt, Artificial Sequence
  Synthetic
acuuuugagaggauuagaaaua

SEQ ID NO: 87634 - RNA, 23 nt, Artificial Sequence
  Synthetic
cacuuuugagaggauuagaaaua

SEQ ID NO: 87635 - RNA, 24 nt, Artificial Sequence
  Synthetic
ccacuuuugagaggauuagaaaua

SEQ ID NO: 87636 - RNA, 18 nt, Artificial Sequence
  Synthetic
ccauuuucuuaggaaaua

SEQ ID NO: 87637 - RNA, 19 nt, Artificial Sequence
  Synthetic
uccauuuucuuaggaaaua

SEQ ID NO: 87638 - RNA, 20 nt, Artificial Sequence
  Synthetic
uuccauuuucuuaggaaaua

SEQ ID NO: 87639 - RNA, 21 nt, Artificial Sequence
  Synthetic
auuccauuuucuuaggaaaua

SEQ ID NO: 87640 - RNA, 23 nt, Artificial Sequence
  Synthetic
ugauuccauuuucuuaggaaaua

SEQ ID NO: 87641 - RNA, 18 nt, Artificial Sequence
  Synthetic
uaugaucacugggaaaua

SEQ ID NO: 87642 - RNA, 19 nt, Artificial Sequence
  Synthetic
uuaugaucacugggaaaua

SEQ ID NO: 87643 - RNA, 20 nt, Artificial Sequence
  Synthetic
auuaugaucacugggaaaua

SEQ ID NO: 87644 - RNA, 21 nt, Artificial Sequence
  Synthetic
cauuaugaucacugggaaaua

SEQ ID NO: 87645 - RNA, 22 nt, Artificial Sequence
  Synthetic
ucauuaugaucacugggaaaua

SEQ ID NO: 87646 - RNA, 24 nt, Artificial Sequence
  Synthetic
agucauuaugaucacugggaaaua

SEQ ID NO: 87647 - RNA, 18 nt, Artificial Sequence
  Synthetic
uggauuagcgaugaaaua

SEQ ID NO: 87648 - RNA, 19 nt, Artificial Sequence
  Synthetic
cuggauuagcgaugaaaua

SEQ ID NO: 87649 - RNA, 20 nt, Artificial Sequence
  Synthetic
ccuggauuagcgaugaaaua

SEQ ID NO: 87650 - RNA, 21 nt, Artificial Sequence
  Synthetic
cccuggauuagcgaugaaaua

SEQ ID NO: 87651 - RNA, 22 nt, Artificial Sequence
  Synthetic
acccuggauuagcgaugaaaua

SEQ ID NO: 87652 - RNA, 23 nt, Artificial Sequence
  Synthetic
aacccuggauuagcgaugaaaua

SEQ ID NO: 87653 - RNA, 24 nt, Artificial Sequence
  Synthetic
uaacccuggauuagcgaugaaaua

SEQ ID NO: 87654 - RNA, 19 nt, Artificial Sequence
  Synthetic
aguuaugucauuugaaaua

SEQ ID NO: 87655 - RNA, 20 nt, Artificial Sequence
  Synthetic
aaguuaugucauuugaaaua

SEQ ID NO: 87656 - RNA, 21 nt, Artificial Sequence
  Synthetic
aaaguuaugucauuugaaaua

SEQ ID NO: 87657 - RNA, 22 nt, Artificial Sequence
  Synthetic
aaaaguuaugucauuugaaaua

SEQ ID NO: 87658 - RNA, 23 nt, Artificial Sequence
  Synthetic
caaaaguuaugucauuugaaaua

SEQ ID NO: 87659 - RNA, 24 nt, Artificial Sequence
  Synthetic
acaaaaguuaugucauuugaaaua

SEQ ID NO: 87660 - RNA, 18 nt, Artificial Sequence
  Synthetic
uuuccucuguuugaaaua

SEQ ID NO: 87661 - RNA, 19 nt, Artificial Sequence
  Synthetic
auuuccucuguuugaaaua

SEQ ID NO: 87662 - RNA, 20 nt, Artificial Sequence
  Synthetic
aauuuccucuguuugaaaua

SEQ ID NO: 87663 - RNA, 22 nt, Artificial Sequence
  Synthetic
ugaauuuccucuguuugaaaua

SEQ ID NO: 87664 - RNA, 23 nt, Artificial Sequence
  Synthetic
uugaauuuccucuguuugaaaua

SEQ ID NO: 87665 - RNA, 24 nt, Artificial Sequence
  Synthetic
auugaauuuccucuguuugaaaua

SEQ ID NO: 87666 - RNA, 19 nt, Artificial Sequence
  Synthetic
uggaaacacuuaauaaaua

SEQ ID NO: 87667 - RNA, 20 nt, Artificial Sequence
  Synthetic
uuggaaacacuuaauaaaua

SEQ ID NO: 87668 - RNA, 21 nt, Artificial Sequence
  Synthetic
auuggaaacacuuaauaaaua

SEQ ID NO: 87669 - RNA, 22 nt, Artificial Sequence
  Synthetic
uauuggaaacacuuaauaaaua

SEQ ID NO: 87670 - RNA, 23 nt, Artificial Sequence
  Synthetic
auauuggaaacacuuaauaaaua

SEQ ID NO: 87671 - RNA, 24 nt, Artificial Sequence
  Synthetic
cauauuggaaacacuuaauaaaua

SEQ ID NO: 87672 - RNA, 18 nt, Artificial Sequence
  Synthetic
auugucuuugcauaaaua

SEQ ID NO: 87673 - RNA, 19 nt, Artificial Sequence
  Synthetic
cauugucuuugcauaaaua

SEQ ID NO: 87674 - RNA, 21 nt, Artificial Sequence
  Synthetic
ugcauugucuuugcauaaaua

SEQ ID NO: 87675 - RNA, 22 nt, Artificial Sequence
  Synthetic
augcauugucuuugcauaaaua

SEQ ID NO: 87676 - RNA, 24 nt, Artificial Sequence
  Synthetic
ugaugcauugucuuugcauaaaua

SEQ ID NO: 87677 - RNA, 21 nt, Artificial Sequence
  Synthetic
aaugaaauaaccauauaaaua

SEQ ID NO: 87678 - RNA, 22 nt, Artificial Sequence
  Synthetic
aaaugaaauaaccauauaaaua

SEQ ID NO: 87679 - RNA, 23 nt, Artificial Sequence
  Synthetic
aaaaugaaauaaccauauaaaua

SEQ ID NO: 87680 - RNA, 24 nt, Artificial Sequence
  Synthetic
uaaaaugaaauaaccauauaaaua

SEQ ID NO: 87681 - RNA, 18 nt, Artificial Sequence
  Synthetic
aucuuccugauauaaaua

SEQ ID NO: 87682 - RNA, 20 nt, Artificial Sequence
  Synthetic
agaucuuccugauauaaaua

SEQ ID NO: 87683 - RNA, 21 nt, Artificial Sequence
  Synthetic
uagaucuuccugauauaaaua

SEQ ID NO: 87684 - RNA, 22 nt, Artificial Sequence
  Synthetic
auagaucuuccugauauaaaua

SEQ ID NO: 87685 - RNA, 23 nt, Artificial Sequence
  Synthetic
aauagaucuuccugauauaaaua

SEQ ID NO: 87686 - RNA, 24 nt, Artificial Sequence
  Synthetic
aaauagaucuuccugauauaaaua

SEQ ID NO: 87687 - RNA, 18 nt, Artificial Sequence
  Synthetic
auuucuucucacuaaaua

SEQ ID NO: 87688 - RNA, 19 nt, Artificial Sequence
  Synthetic
uauuucuucucacuaaaua

SEQ ID NO: 87689 - RNA, 20 nt, Artificial Sequence
  Synthetic
auauuucuucucacuaaaua

SEQ ID NO: 87690 - RNA, 21 nt, Artificial Sequence
  Synthetic
aauauuucuucucacuaaaua

SEQ ID NO: 87691 - RNA, 22 nt, Artificial Sequence
  Synthetic
uaauauuucuucucacuaaaua

SEQ ID NO: 87692 - RNA, 23 nt, Artificial Sequence
  Synthetic
cuaauauuucuucucacuaaaua

SEQ ID NO: 87693 - RNA, 24 nt, Artificial Sequence
  Synthetic
ucuaauauuucuucucacuaaaua

SEQ ID NO: 87694 - RNA, 19 nt, Artificial Sequence
  Synthetic
agcuaguaagugcuaaaua

SEQ ID NO: 87695 - RNA, 20 nt, Artificial Sequence
  Synthetic
aagcuaguaagugcuaaaua

SEQ ID NO: 87696 - RNA, 21 nt, Artificial Sequence
  Synthetic
uaagcuaguaagugcuaaaua

SEQ ID NO: 87697 - RNA, 22 nt, Artificial Sequence
  Synthetic
auaagcuaguaagugcuaaaua

SEQ ID NO: 87698 - RNA, 23 nt, Artificial Sequence
  Synthetic
aauaagcuaguaagugcuaaaua

SEQ ID NO: 87699 - RNA, 24 nt, Artificial Sequence
  Synthetic
caauaagcuaguaagugcuaaaua

SEQ ID NO: 87700 - RNA, 18 nt, Artificial Sequence
  Synthetic
uuauugccuugguaaaua

SEQ ID NO: 87701 - RNA, 19 nt, Artificial Sequence
  Synthetic
uuuauugccuugguaaaua

SEQ ID NO: 87702 - RNA, 20 nt, Artificial Sequence
  Synthetic
cuuuauugccuugguaaaua

SEQ ID NO: 87703 - RNA, 21 nt, Artificial Sequence
  Synthetic
acuuuauugccuugguaaaua

SEQ ID NO: 87704 - RNA, 22 nt, Artificial Sequence
  Synthetic
uacuuuauugccuugguaaaua

SEQ ID NO: 87705 - RNA, 23 nt, Artificial Sequence
  Synthetic
cuacuuuauugccuugguaaaua

SEQ ID NO: 87706 - RNA, 24 nt, Artificial Sequence
  Synthetic
ucuacuuuauugccuugguaaaua

SEQ ID NO: 87707 - RNA, 21 nt, Artificial Sequence
  Synthetic
cuauacucaaaagauuaaaua

SEQ ID NO: 87708 - RNA, 22 nt, Artificial Sequence
  Synthetic
acuauacucaaaagauuaaaua

SEQ ID NO: 87709 - RNA, 23 nt, Artificial Sequence
  Synthetic
aacuauacucaaaagauuaaaua

SEQ ID NO: 87710 - RNA, 24 nt, Artificial Sequence
  Synthetic
aaacuauacucaaaagauuaaaua

SEQ ID NO: 87711 - RNA, 18 nt, Artificial Sequence
  Synthetic
aucugcuagaguuaaaua

SEQ ID NO: 87712 - RNA, 19 nt, Artificial Sequence
  Synthetic
aaucugcuagaguuaaaua

SEQ ID NO: 87713 - RNA, 20 nt, Artificial Sequence
  Synthetic
uaaucugcuagaguuaaaua

SEQ ID NO: 87714 - RNA, 21 nt, Artificial Sequence
  Synthetic
auaaucugcuagaguuaaaua

SEQ ID NO: 87715 - RNA, 22 nt, Artificial Sequence
  Synthetic
aauaaucugcuagaguuaaaua

SEQ ID NO: 87716 - RNA, 23 nt, Artificial Sequence
  Synthetic
aaauaaucugcuagaguuaaaua

SEQ ID NO: 87717 - RNA, 24 nt, Artificial Sequence
  Synthetic
uaaauaaucugcuagaguuaaaua

SEQ ID NO: 87718 - RNA, 19 nt, Artificial Sequence
  Synthetic
uggaauuugaauuuaaaua

SEQ ID NO: 87719 - RNA, 20 nt, Artificial Sequence
  Synthetic
cuggaauuugaauuuaaaua

SEQ ID NO: 87720 - RNA, 21 nt, Artificial Sequence
  Synthetic
ucuggaauuugaauuuaaaua

SEQ ID NO: 87721 - RNA, 22 nt, Artificial Sequence
  Synthetic
cucuggaauuugaauuuaaaua

SEQ ID NO: 87722 - RNA, 23 nt, Artificial Sequence
  Synthetic
ucucuggaauuugaauuuaaaua

SEQ ID NO: 87723 - RNA, 24 nt, Artificial Sequence
  Synthetic
cucucuggaauuugaauuuaaaua

SEQ ID NO: 87724 - RNA, 19 nt, Artificial Sequence
  Synthetic
ugucaguugcauuuaaaua

SEQ ID NO: 87725 - RNA, 20 nt, Artificial Sequence
  Synthetic
augucaguugcauuuaaaua

SEQ ID NO: 87726 - RNA, 23 nt, Artificial Sequence
  Synthetic
uggaugucaguugcauuuaaaua

SEQ ID NO: 87727 - RNA, 24 nt, Artificial Sequence
  Synthetic
uuggaugucaguugcauuuaaaua

SEQ ID NO: 87728 - RNA, 19 nt, Artificial Sequence
  Synthetic
ugcuggggaaaaaacaaua

SEQ ID NO: 87729 - RNA, 20 nt, Artificial Sequence
  Synthetic
uugcuggggaaaaaacaaua

SEQ ID NO: 87730 - RNA, 21 nt, Artificial Sequence
  Synthetic
uuugcuggggaaaaaacaaua

SEQ ID NO: 87731 - RNA, 22 nt, Artificial Sequence
  Synthetic
uuuugcuggggaaaaaacaaua

SEQ ID NO: 87732 - RNA, 23 nt, Artificial Sequence
  Synthetic
auuuugcuggggaaaaaacaaua

SEQ ID NO: 87733 - RNA, 24 nt, Artificial Sequence
  Synthetic
aauuuugcuggggaaaaaacaaua

SEQ ID NO: 87734 - RNA, 18 nt, Artificial Sequence
  Synthetic
auuguuuaagcaacaaua

SEQ ID NO: 87735 - RNA, 19 nt, Artificial Sequence
  Synthetic
cauuguuuaagcaacaaua

SEQ ID NO: 87736 - RNA, 20 nt, Artificial Sequence
  Synthetic
ucauuguuuaagcaacaaua

SEQ ID NO: 87737 - RNA, 21 nt, Artificial Sequence
  Synthetic
uucauuguuuaagcaacaaua

SEQ ID NO: 87738 - RNA, 22 nt, Artificial Sequence
  Synthetic
auucauuguuuaagcaacaaua

SEQ ID NO: 87739 - RNA, 23 nt, Artificial Sequence
  Synthetic
cauucauuguuuaagcaacaaua

SEQ ID NO: 87740 - RNA, 24 nt, Artificial Sequence
  Synthetic
acauucauuguuuaagcaacaaua

SEQ ID NO: 87741 - RNA, 18 nt, Artificial Sequence
  Synthetic
ucagaaacuaacacaaua

SEQ ID NO: 87742 - RNA, 19 nt, Artificial Sequence
  Synthetic
cucagaaacuaacacaaua

SEQ ID NO: 87743 - RNA, 20 nt, Artificial Sequence
  Synthetic
ucucagaaacuaacacaaua

SEQ ID NO: 87744 - RNA, 21 nt, Artificial Sequence
  Synthetic
aucucagaaacuaacacaaua

SEQ ID NO: 87745 - RNA, 22 nt, Artificial Sequence
  Synthetic
aaucucagaaacuaacacaaua

SEQ ID NO: 87746 - RNA, 23 nt, Artificial Sequence
  Synthetic
caaucucagaaacuaacacaaua

SEQ ID NO: 87747 - RNA, 18 nt, Artificial Sequence
  Synthetic
uagggaagauagccaaua

SEQ ID NO: 87748 - RNA, 19 nt, Artificial Sequence
  Synthetic
auagggaagauagccaaua

SEQ ID NO: 87749 - RNA, 20 nt, Artificial Sequence
  Synthetic
aauagggaagauagccaaua

SEQ ID NO: 87750 - RNA, 21 nt, Artificial Sequence
  Synthetic
aaauagggaagauagccaaua

SEQ ID NO: 87751 - RNA, 23 nt, Artificial Sequence
  Synthetic
ugaaauagggaagauagccaaua

SEQ ID NO: 87752 - RNA, 18 nt, Artificial Sequence
  Synthetic
cuugaauuuaauccaaua

SEQ ID NO: 87753 - RNA, 19 nt, Artificial Sequence
  Synthetic
ccuugaauuuaauccaaua

SEQ ID NO: 87754 - RNA, 21 nt, Artificial Sequence
  Synthetic
agccuugaauuuaauccaaua

SEQ ID NO: 87755 - RNA, 22 nt, Artificial Sequence
  Synthetic
cagccuugaauuuaauccaaua

SEQ ID NO: 87756 - RNA, 23 nt, Artificial Sequence
  Synthetic
acagccuugaauuuaauccaaua

SEQ ID NO: 87757 - RNA, 24 nt, Artificial Sequence
  Synthetic
cacagccuugaauuuaauccaaua

SEQ ID NO: 87758 - RNA, 18 nt, Artificial Sequence
  Synthetic
ucuuuaggaaaagcaaua

SEQ ID NO: 87759 - RNA, 20 nt, Artificial Sequence
  Synthetic
agucuuuaggaaaagcaaua

SEQ ID NO: 87760 - RNA, 21 nt, Artificial Sequence
  Synthetic
uagucuuuaggaaaagcaaua

SEQ ID NO: 87761 - RNA, 23 nt, Artificial Sequence
  Synthetic
uguagucuuuaggaaaagcaaua

SEQ ID NO: 87762 - RNA, 24 nt, Artificial Sequence
  Synthetic
uuguagucuuuaggaaaagcaaua

SEQ ID NO: 87763 - RNA, 19 nt, Artificial Sequence
  Synthetic
ugggaagacuugggcaaua

SEQ ID NO: 87764 - RNA, 20 nt, Artificial Sequence
  Synthetic
uugggaagacuugggcaaua

SEQ ID NO: 87765 - RNA, 21 nt, Artificial Sequence
  Synthetic
uuugggaagacuugggcaaua

SEQ ID NO: 87766 - RNA, 22 nt, Artificial Sequence
  Synthetic
cuuugggaagacuugggcaaua

SEQ ID NO: 87767 - RNA, 23 nt, Artificial Sequence
  Synthetic
acuuugggaagacuugggcaaua

SEQ ID NO: 87768 - RNA, 21 nt, Artificial Sequence
  Synthetic
uugugaagauaaaauucaaua

SEQ ID NO: 87769 - RNA, 22 nt, Artificial Sequence
  Synthetic
auugugaagauaaaauucaaua

SEQ ID NO: 87770 - RNA, 23 nt, Artificial Sequence
  Synthetic
uauugugaagauaaaauucaaua

SEQ ID NO: 87771 - RNA, 24 nt, Artificial Sequence
  Synthetic
uuauugugaagauaaaauucaaua

SEQ ID NO: 87772 - RNA, 18 nt, Artificial Sequence
  Synthetic
agcccuuccuauucaaua

SEQ ID NO: 87773 - RNA, 19 nt, Artificial Sequence
  Synthetic
aagcccuuccuauucaaua

SEQ ID NO: 87774 - RNA, 20 nt, Artificial Sequence
  Synthetic
uaagcccuuccuauucaaua

SEQ ID NO: 87775 - RNA, 21 nt, Artificial Sequence
  Synthetic
uuaagcccuuccuauucaaua

SEQ ID NO: 87776 - RNA, 22 nt, Artificial Sequence
  Synthetic
cuuaagcccuuccuauucaaua

SEQ ID NO: 87777 - RNA, 23 nt, Artificial Sequence
  Synthetic
acuuaagcccuuccuauucaaua

SEQ ID NO: 87778 - RNA, 24 nt, Artificial Sequence
  Synthetic
aacuuaagcccuuccuauucaaua

SEQ ID NO: 87779 - RNA, 18 nt, Artificial Sequence
  Synthetic
aagaacauuacuucaaua

SEQ ID NO: 87780 - RNA, 19 nt, Artificial Sequence
  Synthetic
aaagaacauuacuucaaua

SEQ ID NO: 87781 - RNA, 21 nt, Artificial Sequence
  Synthetic
agaaagaacauuacuucaaua

SEQ ID NO: 87782 - RNA, 22 nt, Artificial Sequence
  Synthetic
aagaaagaacauuacuucaaua

SEQ ID NO: 87783 - RNA, 23 nt, Artificial Sequence
  Synthetic
uaagaaagaacauuacuucaaua

SEQ ID NO: 87784 - RNA, 24 nt, Artificial Sequence
  Synthetic
auaagaaagaacauuacuucaaua

SEQ ID NO: 87785 - RNA, 21 nt, Artificial Sequence
  Synthetic
agaggcugauacagaagaaua

SEQ ID NO: 87786 - RNA, 22 nt, Artificial Sequence
  Synthetic
uagaggcugauacagaagaaua

SEQ ID NO: 87787 - RNA, 23 nt, Artificial Sequence
  Synthetic
uuagaggcugauacagaagaaua

SEQ ID NO: 87788 - RNA, 24 nt, Artificial Sequence
  Synthetic
uuuagaggcugauacagaagaaua

SEQ ID NO: 87789 - RNA, 18 nt, Artificial Sequence
  Synthetic
aacuggcaucccagaaua

SEQ ID NO: 87790 - RNA, 19 nt, Artificial Sequence
  Synthetic
aaacuggcaucccagaaua

SEQ ID NO: 87791 - RNA, 20 nt, Artificial Sequence
  Synthetic
aaaacuggcaucccagaaua

SEQ ID NO: 87792 - RNA, 21 nt, Artificial Sequence
  Synthetic
uaaaacuggcaucccagaaua

SEQ ID NO: 87793 - RNA, 22 nt, Artificial Sequence
  Synthetic
uuaaaacuggcaucccagaaua

SEQ ID NO: 87794 - RNA, 24 nt, Artificial Sequence
  Synthetic
aguuaaaacuggcaucccagaaua

SEQ ID NO: 87795 - RNA, 19 nt, Artificial Sequence
  Synthetic
ugaguuucucaggagaaua

SEQ ID NO: 87796 - RNA, 20 nt, Artificial Sequence
  Synthetic
augaguuucucaggagaaua

SEQ ID NO: 87797 - RNA, 21 nt, Artificial Sequence
  Synthetic
aaugaguuucucaggagaaua

SEQ ID NO: 87798 - RNA, 22 nt, Artificial Sequence
  Synthetic
uaaugaguuucucaggagaaua

SEQ ID NO: 87799 - RNA, 23 nt, Artificial Sequence
  Synthetic
auaaugaguuucucaggagaaua

SEQ ID NO: 87800 - RNA, 24 nt, Artificial Sequence
  Synthetic
uauaaugaguuucucaggagaaua

SEQ ID NO: 87801 - RNA, 18 nt, Artificial Sequence
  Synthetic
ucaaaugcucauagaaua

SEQ ID NO: 87802 - RNA, 19 nt, Artificial Sequence
  Synthetic
uucaaaugcucauagaaua

SEQ ID NO: 87803 - RNA, 21 nt, Artificial Sequence
  Synthetic
uguucaaaugcucauagaaua

SEQ ID NO: 87804 - RNA, 22 nt, Artificial Sequence
  Synthetic
auguucaaaugcucauagaaua

SEQ ID NO: 87805 - RNA, 23 nt, Artificial Sequence
  Synthetic
aauguucaaaugcucauagaaua

SEQ ID NO: 87806 - RNA, 18 nt, Artificial Sequence
  Synthetic
auaggauauaguagaaua

SEQ ID NO: 87807 - RNA, 20 nt, Artificial Sequence
  Synthetic
agauaggauauaguagaaua

SEQ ID NO: 87808 - RNA, 21 nt, Artificial Sequence
  Synthetic
uagauaggauauaguagaaua

SEQ ID NO: 87809 - RNA, 22 nt, Artificial Sequence
  Synthetic
cuagauaggauauaguagaaua

SEQ ID NO: 87810 - RNA, 23 nt, Artificial Sequence
  Synthetic
ucuagauaggauauaguagaaua

SEQ ID NO: 87811 - RNA, 24 nt, Artificial Sequence
  Synthetic
cucuagauaggauauaguagaaua

SEQ ID NO: 87812 - RNA, 18 nt, Artificial Sequence
  Synthetic
uauuaauaauuuagaaua

SEQ ID NO: 87813 - RNA, 19 nt, Artificial Sequence
  Synthetic
auauuaauaauuuagaaua

SEQ ID NO: 87814 - RNA, 22 nt, Artificial Sequence
  Synthetic
aggauauuaauaauuuagaaua

SEQ ID NO: 87815 - RNA, 23 nt, Artificial Sequence
  Synthetic
aaggauauuaauaauuuagaaua

SEQ ID NO: 87816 - RNA, 24 nt, Artificial Sequence
  Synthetic
aaaggauauuaauaauuuagaaua

SEQ ID NO: 87817 - RNA, 18 nt, Artificial Sequence
  Synthetic
aaaauuaggagaggaaua

SEQ ID NO: 87818 - RNA, 19 nt, Artificial Sequence
  Synthetic
aaaaauuaggagaggaaua

SEQ ID NO: 87819 - RNA, 20 nt, Artificial Sequence
  Synthetic
aaaaaauuaggagaggaaua

SEQ ID NO: 87820 - RNA, 21 nt, Artificial Sequence
  Synthetic
aaaaaaauuaggagaggaaua

SEQ ID NO: 87821 - RNA, 22 nt, Artificial Sequence
  Synthetic
aaaaaaaauuaggagaggaaua

SEQ ID NO: 87822 - RNA, 24 nt, Artificial Sequence
  Synthetic
agaaaaaaaauuaggagaggaaua

SEQ ID NO: 87823 - RNA, 18 nt, Artificial Sequence
  Synthetic
aauuugaugugaggaaua

SEQ ID NO: 87824 - RNA, 19 nt, Artificial Sequence
  Synthetic
aaauuugaugugaggaaua

SEQ ID NO: 87825 - RNA, 21 nt, Artificial Sequence
  Synthetic
ugaaauuugaugugaggaaua

SEQ ID NO: 87826 - RNA, 23 nt, Artificial Sequence
  Synthetic
agugaaauuugaugugaggaaua

SEQ ID NO: 87827 - RNA, 24 nt, Artificial Sequence
  Synthetic
uagugaaauuugaugugaggaaua

SEQ ID NO: 87828 - RNA, 20 nt, Artificial Sequence
  Synthetic
uggguauccuacagggaaua

SEQ ID NO: 87829 - RNA, 21 nt, Artificial Sequence
  Synthetic
cuggguauccuacagggaaua

SEQ ID NO: 87830 - RNA, 22 nt, Artificial Sequence
  Synthetic
acuggguauccuacagggaaua

SEQ ID NO: 87831 - RNA, 23 nt, Artificial Sequence
  Synthetic
cacuggguauccuacagggaaua

SEQ ID NO: 87832 - RNA, 24 nt, Artificial Sequence
  Synthetic
ucacuggguauccuacagggaaua

SEQ ID NO: 87833 - RNA, 18 nt, Artificial Sequence
  Synthetic
cagaucuacaguggaaua

SEQ ID NO: 87834 - RNA, 21 nt, Artificial Sequence
  Synthetic
aggcagaucuacaguggaaua

SEQ ID NO: 87835 - RNA, 24 nt, Artificial Sequence
  Synthetic
cggaggcagaucuacaguggaaua

SEQ ID NO: 87836 - RNA, 18 nt, Artificial Sequence
  Synthetic
ucacucacaaaaugaaua

SEQ ID NO: 87837 - RNA, 19 nt, Artificial Sequence
  Synthetic
uucacucacaaaaugaaua

SEQ ID NO: 87838 - RNA, 20 nt, Artificial Sequence
  Synthetic
auucacucacaaaaugaaua

SEQ ID NO: 87839 - RNA, 21 nt, Artificial Sequence
  Synthetic
aauucacucacaaaaugaaua

SEQ ID NO: 87840 - RNA, 22 nt, Artificial Sequence
  Synthetic
aaauucacucacaaaaugaaua

SEQ ID NO: 87841 - RNA, 23 nt, Artificial Sequence
  Synthetic
caaauucacucacaaaaugaaua

SEQ ID NO: 87842 - RNA, 24 nt, Artificial Sequence
  Synthetic
ucaaauucacucacaaaaugaaua

SEQ ID NO: 87843 - RNA, 21 nt, Artificial Sequence
  Synthetic
cuaaucuuuguugaaugaaua

SEQ ID NO: 87844 - RNA, 22 nt, Artificial Sequence
  Synthetic
acuaaucuuuguugaaugaaua

SEQ ID NO: 87845 - RNA, 23 nt, Artificial Sequence
  Synthetic
cacuaaucuuuguugaaugaaua

SEQ ID NO: 87846 - RNA, 24 nt, Artificial Sequence
  Synthetic
acacuaaucuuuguugaaugaaua

SEQ ID NO: 87847 - RNA, 18 nt, Artificial Sequence
  Synthetic
auuaaggaaauaugaaua

SEQ ID NO: 87848 - RNA, 19 nt, Artificial Sequence
  Synthetic
uauuaaggaaauaugaaua

SEQ ID NO: 87849 - RNA, 20 nt, Artificial Sequence
  Synthetic
cuauuaaggaaauaugaaua

SEQ ID NO: 87850 - RNA, 21 nt, Artificial Sequence
  Synthetic
acuauuaaggaaauaugaaua

SEQ ID NO: 87851 - RNA, 22 nt, Artificial Sequence
  Synthetic
aacuauuaaggaaauaugaaua

SEQ ID NO: 87852 - RNA, 24 nt, Artificial Sequence
  Synthetic
ugaacuauuaaggaaauaugaaua

SEQ ID NO: 87853 - RNA, 18 nt, Artificial Sequence
  Synthetic
aagagggugauaugaaua

SEQ ID NO: 87854 - RNA, 19 nt, Artificial Sequence
  Synthetic
aaagagggugauaugaaua

SEQ ID NO: 87855 - RNA, 20 nt, Artificial Sequence
  Synthetic
uaaagagggugauaugaaua

SEQ ID NO: 87856 - RNA, 21 nt, Artificial Sequence
  Synthetic
auaaagagggugauaugaaua

SEQ ID NO: 87857 - RNA, 22 nt, Artificial Sequence
  Synthetic
uauaaagagggugauaugaaua

SEQ ID NO: 87858 - RNA, 23 nt, Artificial Sequence
  Synthetic
auauaaagagggugauaugaaua

SEQ ID NO: 87859 - RNA, 18 nt, Artificial Sequence
  Synthetic
aagcuuagugagugaaua

SEQ ID NO: 87860 - RNA, 19 nt, Artificial Sequence
  Synthetic
uaagcuuagugagugaaua

SEQ ID NO: 87861 - RNA, 20 nt, Artificial Sequence
  Synthetic
auaagcuuagugagugaaua

SEQ ID NO: 87862 - RNA, 21 nt, Artificial Sequence
  Synthetic
uauaagcuuagugagugaaua

SEQ ID NO: 87863 - RNA, 23 nt, Artificial Sequence
  Synthetic
aguauaagcuuagugagugaaua

SEQ ID NO: 87864 - RNA, 24 nt, Artificial Sequence
  Synthetic
aaguauaagcuuagugagugaaua

SEQ ID NO: 87865 - RNA, 19 nt, Artificial Sequence
  Synthetic
ugccugugauuagugaaua

SEQ ID NO: 87866 - RNA, 20 nt, Artificial Sequence
  Synthetic
uugccugugauuagugaaua

SEQ ID NO: 87867 - RNA, 21 nt, Artificial Sequence
  Synthetic
cuugccugugauuagugaaua

SEQ ID NO: 87868 - RNA, 22 nt, Artificial Sequence
  Synthetic
ccuugccugugauuagugaaua

SEQ ID NO: 87869 - RNA, 23 nt, Artificial Sequence
  Synthetic
cccuugccugugauuagugaaua

SEQ ID NO: 87870 - RNA, 24 nt, Artificial Sequence
  Synthetic
ucccuugccugugauuagugaaua

SEQ ID NO: 87871 - RNA, 18 nt, Artificial Sequence
  Synthetic
uacuuuucuuggugaaua

SEQ ID NO: 87872 - RNA, 19 nt, Artificial Sequence
  Synthetic
cuacuuuucuuggugaaua

SEQ ID NO: 87873 - RNA, 20 nt, Artificial Sequence
  Synthetic
ucuacuuuucuuggugaaua

SEQ ID NO: 87874 - RNA, 21 nt, Artificial Sequence
  Synthetic
aucuacuuuucuuggugaaua

SEQ ID NO: 87875 - RNA, 22 nt, Artificial Sequence
  Synthetic
caucuacuuuucuuggugaaua

SEQ ID NO: 87876 - RNA, 23 nt, Artificial Sequence
  Synthetic
ccaucuacuuuucuuggugaaua

SEQ ID NO: 87877 - RNA, 24 nt, Artificial Sequence
  Synthetic
cccaucuacuuuucuuggugaaua

SEQ ID NO: 87878 - RNA, 18 nt, Artificial Sequence
  Synthetic
agccucugguuuugaaua

SEQ ID NO: 87879 - RNA, 19 nt, Artificial Sequence
  Synthetic
cagccucugguuuugaaua

SEQ ID NO: 87880 - RNA, 20 nt, Artificial Sequence
  Synthetic
ccagccucugguuuugaaua

SEQ ID NO: 87881 - RNA, 21 nt, Artificial Sequence
  Synthetic
cccagccucugguuuugaaua

SEQ ID NO: 87882 - RNA, 23 nt, Artificial Sequence
  Synthetic
agcccagccucugguuuugaaua

SEQ ID NO: 87883 - RNA, 24 nt, Artificial Sequence
  Synthetic
cagcccagccucugguuuugaaua

SEQ ID NO: 87884 - RNA, 22 nt, Artificial Sequence
  Synthetic
agaaauaauacaaauaauaaua

SEQ ID NO: 87885 - RNA, 23 nt, Artificial Sequence
  Synthetic
aagaaauaauacaaauaauaaua

SEQ ID NO: 87886 - RNA, 24 nt, Artificial Sequence
  Synthetic
caagaaauaauacaaauaauaaua

SEQ ID NO: 87887 - RNA, 18 nt, Artificial Sequence
  Synthetic
caagugguaguaauaaua

SEQ ID NO: 87888 - RNA, 19 nt, Artificial Sequence
  Synthetic
acaagugguaguaauaaua

SEQ ID NO: 87889 - RNA, 21 nt, Artificial Sequence
  Synthetic
agacaagugguaguaauaaua

SEQ ID NO: 87890 - RNA, 22 nt, Artificial Sequence
  Synthetic
cagacaagugguaguaauaaua

SEQ ID NO: 87891 - RNA, 23 nt, Artificial Sequence
  Synthetic
ucagacaagugguaguaauaaua

SEQ ID NO: 87892 - RNA, 24 nt, Artificial Sequence
  Synthetic
uucagacaagugguaguaauaaua

SEQ ID NO: 87893 - RNA, 19 nt, Artificial Sequence
  Synthetic
uguauucuaagccauaaua

SEQ ID NO: 87894 - RNA, 20 nt, Artificial Sequence
  Synthetic
uuguauucuaagccauaaua

SEQ ID NO: 87895 - RNA, 21 nt, Artificial Sequence
  Synthetic
auuguauucuaagccauaaua

SEQ ID NO: 87896 - RNA, 22 nt, Artificial Sequence
  Synthetic
cauuguauucuaagccauaaua

SEQ ID NO: 87897 - RNA, 23 nt, Artificial Sequence
  Synthetic
ucauuguauucuaagccauaaua

SEQ ID NO: 87898 - RNA, 24 nt, Artificial Sequence
  Synthetic
uucauuguauucuaagccauaaua

SEQ ID NO: 87899 - RNA, 18 nt, Artificial Sequence
  Synthetic
auauuguuagccauaaua

SEQ ID NO: 87900 - RNA, 19 nt, Artificial Sequence
  Synthetic
uauauuguuagccauaaua

SEQ ID NO: 87901 - RNA, 20 nt, Artificial Sequence
  Synthetic
cuauauuguuagccauaaua

SEQ ID NO: 87902 - RNA, 21 nt, Artificial Sequence
  Synthetic
acuauauuguuagccauaaua

SEQ ID NO: 87903 - RNA, 22 nt, Artificial Sequence
  Synthetic
uacuauauuguuagccauaaua

SEQ ID NO: 87904 - RNA, 23 nt, Artificial Sequence
  Synthetic
uuacuauauuguuagccauaaua

SEQ ID NO: 87905 - RNA, 24 nt, Artificial Sequence
  Synthetic
cuuacuauauuguuagccauaaua

SEQ ID NO: 87906 - RNA, 18 nt, Artificial Sequence
  Synthetic
ccuucguugaagauaaua

SEQ ID NO: 87907 - RNA, 19 nt, Artificial Sequence
  Synthetic
uccuucguugaagauaaua

SEQ ID NO: 87908 - RNA, 20 nt, Artificial Sequence
  Synthetic
auccuucguugaagauaaua

SEQ ID NO: 87909 - RNA, 21 nt, Artificial Sequence
  Synthetic
cauccuucguugaagauaaua

SEQ ID NO: 87910 - RNA, 22 nt, Artificial Sequence
  Synthetic
acauccuucguugaagauaaua

SEQ ID NO: 87911 - RNA, 23 nt, Artificial Sequence
  Synthetic
uacauccuucguugaagauaaua

SEQ ID NO: 87912 - RNA, 24 nt, Artificial Sequence
  Synthetic
uuacauccuucguugaagauaaua

SEQ ID NO: 87913 - RNA, 18 nt, Artificial Sequence
  Synthetic
ccuaccucucugauaaua

SEQ ID NO: 87914 - RNA, 19 nt, Artificial Sequence
  Synthetic
cccuaccucucugauaaua

SEQ ID NO: 87915 - RNA, 21 nt, Artificial Sequence
  Synthetic
ugcccuaccucucugauaaua

SEQ ID NO: 87916 - RNA, 22 nt, Artificial Sequence
  Synthetic
augcccuaccucucugauaaua

SEQ ID NO: 87917 - RNA, 23 nt, Artificial Sequence
  Synthetic
caugcccuaccucucugauaaua

SEQ ID NO: 87918 - RNA, 24 nt, Artificial Sequence
  Synthetic
acaugcccuaccucucugauaaua

SEQ ID NO: 87919 - RNA, 22 nt, Artificial Sequence
  Synthetic
aggggaagggugggugauaaua

SEQ ID NO: 87920 - RNA, 23 nt, Artificial Sequence
  Synthetic
caggggaagggugggugauaaua

SEQ ID NO: 87921 - RNA, 24 nt, Artificial Sequence
  Synthetic
ucaggggaagggugggugauaaua

SEQ ID NO: 87922 - RNA, 19 nt, Artificial Sequence
  Synthetic
agagggaaaugugauaaua

SEQ ID NO: 87923 - RNA, 22 nt, Artificial Sequence
  Synthetic
aggagagggaaaugugauaaua

SEQ ID NO: 87924 - RNA, 24 nt, Artificial Sequence
  Synthetic
agaggagagggaaaugugauaaua

SEQ ID NO: 87925 - RNA, 18 nt, Artificial Sequence
  Synthetic
ccagaauucaauauaaua

SEQ ID NO: 87926 - RNA, 19 nt, Artificial Sequence
  Synthetic
uccagaauucaauauaaua

SEQ ID NO: 87927 - RNA, 20 nt, Artificial Sequence
  Synthetic
auccagaauucaauauaaua

SEQ ID NO: 87928 - RNA, 21 nt, Artificial Sequence
  Synthetic
aauccagaauucaauauaaua

SEQ ID NO: 87929 - RNA, 22 nt, Artificial Sequence
  Synthetic
aaauccagaauucaauauaaua

SEQ ID NO: 87930 - RNA, 23 nt, Artificial Sequence
  Synthetic
aaaauccagaauucaauauaaua

SEQ ID NO: 87931 - RNA, 24 nt, Artificial Sequence
  Synthetic
aaaaauccagaauucaauauaaua

SEQ ID NO: 87932 - RNA, 19 nt, Artificial Sequence
  Synthetic
uguaaguucuuuuauaaua

SEQ ID NO: 87933 - RNA, 20 nt, Artificial Sequence
  Synthetic
uuguaaguucuuuuauaaua

SEQ ID NO: 87934 - RNA, 21 nt, Artificial Sequence
  Synthetic
uuuguaaguucuuuuauaaua

SEQ ID NO: 87935 - RNA, 22 nt, Artificial Sequence
  Synthetic
cuuuguaaguucuuuuauaaua

SEQ ID NO: 87936 - RNA, 23 nt, Artificial Sequence
  Synthetic
acuuuguaaguucuuuuauaaua

SEQ ID NO: 87937 - RNA, 24 nt, Artificial Sequence
  Synthetic
uacuuuguaaguucuuuuauaaua

SEQ ID NO: 87938 - RNA, 19 nt, Artificial Sequence
  Synthetic
aguuauuauaaugcuaaua

SEQ ID NO: 87939 - RNA, 20 nt, Artificial Sequence
  Synthetic
aaguuauuauaaugcuaaua

SEQ ID NO: 87940 - RNA, 21 nt, Artificial Sequence
  Synthetic
uaaguuauuauaaugcuaaua

SEQ ID NO: 87941 - RNA, 23 nt, Artificial Sequence
  Synthetic
uguaaguuauuauaaugcuaaua

SEQ ID NO: 87942 - RNA, 24 nt, Artificial Sequence
  Synthetic
uuguaaguuauuauaaugcuaaua

SEQ ID NO: 87943 - RNA, 18 nt, Artificial Sequence
  Synthetic
cuuauaauuugucuaaua

SEQ ID NO: 87944 - RNA, 20 nt, Artificial Sequence
  Synthetic
agcuuauaauuugucuaaua

SEQ ID NO: 87945 - RNA, 21 nt, Artificial Sequence
  Synthetic
aagcuuauaauuugucuaaua

SEQ ID NO: 87946 - RNA, 22 nt, Artificial Sequence
  Synthetic
aaagcuuauaauuugucuaaua

SEQ ID NO: 87947 - RNA, 23 nt, Artificial Sequence
  Synthetic
aaaagcuuauaauuugucuaaua

SEQ ID NO: 87948 - RNA, 24 nt, Artificial Sequence
  Synthetic
uaaaagcuuauaauuugucuaaua

SEQ ID NO: 87949 - RNA, 20 nt, Artificial Sequence
  Synthetic
aggcaguagaaagaguaaua

SEQ ID NO: 87950 - RNA, 21 nt, Artificial Sequence
  Synthetic
aaggcaguagaaagaguaaua

SEQ ID NO: 87951 - RNA, 22 nt, Artificial Sequence
  Synthetic
uaaggcaguagaaagaguaaua

SEQ ID NO: 87952 - RNA, 23 nt, Artificial Sequence
  Synthetic
cuaaggcaguagaaagaguaaua

SEQ ID NO: 87953 - RNA, 24 nt, Artificial Sequence
  Synthetic
ucuaaggcaguagaaagaguaaua

SEQ ID NO: 87954 - RNA, 18 nt, Artificial Sequence
  Synthetic
uguauuaauuagguaaua

SEQ ID NO: 87955 - RNA, 19 nt, Artificial Sequence
  Synthetic
uuguauuaauuagguaaua

SEQ ID NO: 87956 - RNA, 20 nt, Artificial Sequence
  Synthetic
cuuguauuaauuagguaaua

SEQ ID NO: 87957 - RNA, 21 nt, Artificial Sequence
  Synthetic
acuuguauuaauuagguaaua

SEQ ID NO: 87958 - RNA, 22 nt, Artificial Sequence
  Synthetic
aacuuguauuaauuagguaaua

SEQ ID NO: 87959 - RNA, 23 nt, Artificial Sequence
  Synthetic
uaacuuguauuaauuagguaaua

SEQ ID NO: 87960 - RNA, 24 nt, Artificial Sequence
  Synthetic
auaacuuguauuaauuagguaaua

SEQ ID NO: 87961 - RNA, 19 nt, Artificial Sequence
  Synthetic
aguguacuaacauguaaua

SEQ ID NO: 87962 - RNA, 20 nt, Artificial Sequence
  Synthetic
uaguguacuaacauguaaua

SEQ ID NO: 87963 - RNA, 22 nt, Artificial Sequence
  Synthetic
uguaguguacuaacauguaaua

SEQ ID NO: 87964 - RNA, 23 nt, Artificial Sequence
  Synthetic
auguaguguacuaacauguaaua

SEQ ID NO: 87965 - RNA, 20 nt, Artificial Sequence
  Synthetic
agguacucuuuuuuguaaua

SEQ ID NO: 87966 - RNA, 21 nt, Artificial Sequence
  Synthetic
aagguacucuuuuuuguaaua

SEQ ID NO: 87967 - RNA, 22 nt, Artificial Sequence
  Synthetic
uaagguacucuuuuuuguaaua

SEQ ID NO: 87968 - RNA, 23 nt, Artificial Sequence
  Synthetic
auaagguacucuuuuuuguaaua

SEQ ID NO: 87969 - RNA, 24 nt, Artificial Sequence
  Synthetic
aauaagguacucuuuuuuguaaua

SEQ ID NO: 87970 - RNA, 18 nt, Artificial Sequence
  Synthetic
ugaggugaguaauuaaua

SEQ ID NO: 87971 - RNA, 19 nt, Artificial Sequence
  Synthetic
cugaggugaguaauuaaua

SEQ ID NO: 87972 - RNA, 20 nt, Artificial Sequence
  Synthetic
ucugaggugaguaauuaaua

SEQ ID NO: 87973 - RNA, 21 nt, Artificial Sequence
  Synthetic
cucugaggugaguaauuaaua

SEQ ID NO: 87974 - RNA, 24 nt, Artificial Sequence
  Synthetic
aggcucugaggugaguaauuaaua

SEQ ID NO: 87975 - RNA, 18 nt, Artificial Sequence
  Synthetic
cuaauuaccaucuuaaua

SEQ ID NO: 87976 - RNA, 19 nt, Artificial Sequence
  Synthetic
acuaauuaccaucuuaaua

SEQ ID NO: 87977 - RNA, 21 nt, Artificial Sequence
  Synthetic
ugacuaauuaccaucuuaaua

SEQ ID NO: 87978 - RNA, 22 nt, Artificial Sequence
  Synthetic
uugacuaauuaccaucuuaaua

SEQ ID NO: 87979 - RNA, 23 nt, Artificial Sequence
  Synthetic
uuugacuaauuaccaucuuaaua

SEQ ID NO: 87980 - RNA, 24 nt, Artificial Sequence
  Synthetic
cuuugacuaauuaccaucuuaaua

SEQ ID NO: 87981 - RNA, 18 nt, Artificial Sequence
  Synthetic
auaacgcuaaauuuaaua

SEQ ID NO: 87982 - RNA, 19 nt, Artificial Sequence
  Synthetic
cauaacgcuaaauuuaaua

SEQ ID NO: 87983 - RNA, 20 nt, Artificial Sequence
  Synthetic
acauaacgcuaaauuuaaua

SEQ ID NO: 87984 - RNA, 21 nt, Artificial Sequence
  Synthetic
aacauaacgcuaaauuuaaua

SEQ ID NO: 87985 - RNA, 22 nt, Artificial Sequence
  Synthetic
caacauaacgcuaaauuuaaua

SEQ ID NO: 87986 - RNA, 23 nt, Artificial Sequence
  Synthetic
ucaacauaacgcuaaauuuaaua

SEQ ID NO: 87987 - RNA, 24 nt, Artificial Sequence
  Synthetic
uucaacauaacgcuaaauuuaaua

SEQ ID NO: 87988 - RNA, 18 nt, Artificial Sequence
  Synthetic
uuuacagcaaguuuaaua

SEQ ID NO: 87989 - RNA, 19 nt, Artificial Sequence
  Synthetic
cuuuacagcaaguuuaaua

SEQ ID NO: 87990 - RNA, 21 nt, Artificial Sequence
  Synthetic
agcuuuacagcaaguuuaaua

SEQ ID NO: 87991 - RNA, 22 nt, Artificial Sequence
  Synthetic
uagcuuuacagcaaguuuaaua

SEQ ID NO: 87992 - RNA, 24 nt, Artificial Sequence
  Synthetic
aguagcuuuacagcaaguuuaaua

SEQ ID NO: 87993 - RNA, 18 nt, Artificial Sequence
  Synthetic
caacuuaaguguuuaaua

SEQ ID NO: 87994 - RNA, 19 nt, Artificial Sequence
  Synthetic
ucaacuuaaguguuuaaua

SEQ ID NO: 87995 - RNA, 20 nt, Artificial Sequence
  Synthetic
aucaacuuaaguguuuaaua

SEQ ID NO: 87996 - RNA, 21 nt, Artificial Sequence
  Synthetic
uacacuuugcauauuuuaaua

SEQ ID NO: 87997 - RNA, 22 nt, Artificial Sequence
  Synthetic
uuacacuuugcauauuuuaaua

SEQ ID NO: 87998 - RNA, 23 nt, Artificial Sequence
  Synthetic
auuacacuuugcauauuuuaaua

SEQ ID NO: 87999 - RNA, 24 nt, Artificial Sequence
  Synthetic
aauuacacuuugcauauuuuaaua

SEQ ID NO: 88000 - RNA, 18 nt, Artificial Sequence
  Synthetic
ugagauaauguuuuaaua

SEQ ID NO: 88001 - RNA, 19 nt, Artificial Sequence
  Synthetic
uugagauaauguuuuaaua

SEQ ID NO: 88002 - RNA, 20 nt, Artificial Sequence
  Synthetic
cuugagauaauguuuuaaua

SEQ ID NO: 88003 - RNA, 22 nt, Artificial Sequence
  Synthetic
agcuugagauaauguuuuaaua

SEQ ID NO: 88004 - RNA, 23 nt, Artificial Sequence
  Synthetic
aagcuugagauaauguuuuaaua

SEQ ID NO: 88005 - RNA, 24 nt, Artificial Sequence
  Synthetic
aaagcuugagauaauguuuuaaua

SEQ ID NO: 88006 - RNA, 18 nt, Artificial Sequence
  Synthetic
uauaauuacagaaacaua

SEQ ID NO: 88007 - RNA, 21 nt, Artificial Sequence
  Synthetic
agguauaauuacagaaacaua

SEQ ID NO: 88008 - RNA, 22 nt, Artificial Sequence
  Synthetic
uagguauaauuacagaaacaua

SEQ ID NO: 88009 - RNA, 24 nt, Artificial Sequence
  Synthetic
uguagguauaauuacagaaacaua

SEQ ID NO: 88010 - RNA, 18 nt, Artificial Sequence
  Synthetic
ucccaggacauucacaua

SEQ ID NO: 88011 - RNA, 19 nt, Artificial Sequence
  Synthetic
aucccaggacauucacaua

SEQ ID NO: 88012 - RNA, 20 nt, Artificial Sequence
  Synthetic
uaucccaggacauucacaua

SEQ ID NO: 88013 - RNA, 21 nt, Artificial Sequence
  Synthetic
uuaucccaggacauucacaua

SEQ ID NO: 88014 - RNA, 22 nt, Artificial Sequence
  Synthetic
auuaucccaggacauucacaua

SEQ ID NO: 88015 - RNA, 23 nt, Artificial Sequence
  Synthetic
aauuaucccaggacauucacaua

SEQ ID NO: 88016 - RNA, 24 nt, Artificial Sequence
  Synthetic
aaauuaucccaggacauucacaua

SEQ ID NO: 88017 - RNA, 18 nt, Artificial Sequence
  Synthetic
uuuuagcaauuucacaua

SEQ ID NO: 88018 - RNA, 19 nt, Artificial Sequence
  Synthetic
cuuuuagcaauuucacaua

SEQ ID NO: 88019 - RNA, 20 nt, Artificial Sequence
  Synthetic
ucuuuuagcaauuucacaua

SEQ ID NO: 88020 - RNA, 22 nt, Artificial Sequence
  Synthetic
ugucuuuuagcaauuucacaua

SEQ ID NO: 88021 - RNA, 23 nt, Artificial Sequence
  Synthetic
cugucuuuuagcaauuucacaua

SEQ ID NO: 88022 - RNA, 24 nt, Artificial Sequence
  Synthetic
acugucuuuuagcaauuucacaua

SEQ ID NO: 88023 - RNA, 18 nt, Artificial Sequence
  Synthetic
uauauacauuuagacaua

SEQ ID NO: 88024 - RNA, 19 nt, Artificial Sequence
  Synthetic
uuauauacauuuagacaua

SEQ ID NO: 88025 - RNA, 20 nt, Artificial Sequence
  Synthetic
auuauauacauuuagacaua

SEQ ID NO: 88026 - RNA, 21 nt, Artificial Sequence
  Synthetic
aauuauauacauuuagacaua

SEQ ID NO: 88027 - RNA, 23 nt, Artificial Sequence
  Synthetic
ugaauuauauacauuuagacaua

SEQ ID NO: 88028 - RNA, 18 nt, Artificial Sequence
  Synthetic
cacuacauuaaugacaua

SEQ ID NO: 88029 - RNA, 21 nt, Artificial Sequence
  Synthetic
aggcacuacauuaaugacaua

SEQ ID NO: 88030 - RNA, 22 nt, Artificial Sequence
  Synthetic
caggcacuacauuaaugacaua

SEQ ID NO: 88031 - RNA, 23 nt, Artificial Sequence
  Synthetic
ccaggcacuacauuaaugacaua

SEQ ID NO: 88032 - RNA, 24 nt, Artificial Sequence
  Synthetic
accaggcacuacauuaaugacaua

SEQ ID NO: 88033 - RNA, 18 nt, Artificial Sequence
  Synthetic
agguuuauuccugacaua

SEQ ID NO: 88034 - RNA, 19 nt, Artificial Sequence
  Synthetic
cagguuuauuccugacaua

SEQ ID NO: 88035 - RNA, 20 nt, Artificial Sequence
  Synthetic
ccagguuuauuccugacaua

SEQ ID NO: 88036 - RNA, 21 nt, Artificial Sequence
  Synthetic
cccagguuuauuccugacaua

SEQ ID NO: 88037 - RNA, 22 nt, Artificial Sequence
  Synthetic
ccccagguuuauuccugacaua

SEQ ID NO: 88038 - RNA, 23 nt, Artificial Sequence
  Synthetic
accccagguuuauuccugacaua

SEQ ID NO: 88039 - RNA, 24 nt, Artificial Sequence
  Synthetic
caccccagguuuauuccugacaua

SEQ ID NO: 88040 - RNA, 18 nt, Artificial Sequence
  Synthetic
auacucucuucugacaua

SEQ ID NO: 88041 - RNA, 20 nt, Artificial Sequence
  Synthetic
ugauacucucuucugacaua

SEQ ID NO: 88042 - RNA, 21 nt, Artificial Sequence
  Synthetic
augauacucucuucugacaua

SEQ ID NO: 88043 - RNA, 22 nt, Artificial Sequence
  Synthetic
uaugauacucucuucugacaua

SEQ ID NO: 88044 - RNA, 24 nt, Artificial Sequence
  Synthetic
aguaugauacucucuucugacaua

SEQ ID NO: 88045 - RNA, 18 nt, Artificial Sequence
  Synthetic
cagauucuuucugacaua

SEQ ID NO: 88046 - RNA, 21 nt, Artificial Sequence
  Synthetic
uggcagauucuuucugacaua

SEQ ID NO: 88047 - RNA, 23 nt, Artificial Sequence
  Synthetic
aguggcagauucuuucugacaua

SEQ ID NO: 88048 - RNA, 18 nt, Artificial Sequence
  Synthetic
uaugcuguaaaauacaua

SEQ ID NO: 88049 - RNA, 19 nt, Artificial Sequence
  Synthetic
auaugcuguaaaauacaua

SEQ ID NO: 88050 - RNA, 20 nt, Artificial Sequence
  Synthetic
cauaugcuguaaaauacaua

SEQ ID NO: 88051 - RNA, 21 nt, Artificial Sequence
  Synthetic
acauaugcuguaaaauacaua

SEQ ID NO: 88052 - RNA, 23 nt, Artificial Sequence
  Synthetic
agacauaugcuguaaaauacaua

SEQ ID NO: 88053 - RNA, 24 nt, Artificial Sequence
  Synthetic
uagacauaugcuguaaaauacaua

SEQ ID NO: 88054 - RNA, 18 nt, Artificial Sequence
  Synthetic
aaggcauccuuauacaua

SEQ ID NO: 88055 - RNA, 21 nt, Artificial Sequence
  Synthetic
uggaaggcauccuuauacaua

SEQ ID NO: 88056 - RNA, 22 nt, Artificial Sequence
  Synthetic
uuggaaggcauccuuauacaua

SEQ ID NO: 88057 - RNA, 23 nt, Artificial Sequence
  Synthetic
uuuggaaggcauccuuauacaua

SEQ ID NO: 88058 - RNA, 24 nt, Artificial Sequence
  Synthetic
uuuuggaaggcauccuuauacaua

SEQ ID NO: 88059 - RNA, 18 nt, Artificial Sequence
  Synthetic
aucagauuuuucuacaua

SEQ ID NO: 88060 - RNA, 19 nt, Artificial Sequence
  Synthetic
uaucagauuuuucuacaua

SEQ ID NO: 88061 - RNA, 20 nt, Artificial Sequence
  Synthetic
auaucagauuuuucuacaua

SEQ ID NO: 88062 - RNA, 23 nt, Artificial Sequence
  Synthetic
uggauaucagauuuuucuacaua

SEQ ID NO: 88063 - RNA, 18 nt, Artificial Sequence
  Synthetic
uuuucucccauguacaua

SEQ ID NO: 88064 - RNA, 19 nt, Artificial Sequence
  Synthetic
auuuucucccauguacaua

SEQ ID NO: 88065 - RNA, 20 nt, Artificial Sequence
  Synthetic
uauuuucucccauguacaua

SEQ ID NO: 88066 - RNA, 21 nt, Artificial Sequence
  Synthetic
auauuuucucccauguacaua

SEQ ID NO: 88067 - RNA, 23 nt, Artificial Sequence
  Synthetic
agauauuuucucccauguacaua

SEQ ID NO: 88068 - RNA, 24 nt, Artificial Sequence
  Synthetic
uagauauuuucucccauguacaua

SEQ ID NO: 88069 - RNA, 18 nt, Artificial Sequence
  Synthetic
auuugucuauauuacaua

SEQ ID NO: 88070 - RNA, 19 nt, Artificial Sequence
  Synthetic
aauuugucuauauuacaua

SEQ ID NO: 88071 - RNA, 20 nt, Artificial Sequence
  Synthetic
caauuugucuauauuacaua

SEQ ID NO: 88072 - RNA, 22 nt, Artificial Sequence
  Synthetic
ugcaauuugucuauauuacaua

SEQ ID NO: 88073 - RNA, 24 nt, Artificial Sequence
  Synthetic
ugugcaauuugucuauauuacaua

SEQ ID NO: 88074 - RNA, 18 nt, Artificial Sequence
  Synthetic
acagaucccuguuacaua

SEQ ID NO: 88075 - RNA, 19 nt, Artificial Sequence
  Synthetic
aacagaucccuguuacaua

SEQ ID NO: 88076 - RNA, 20 nt, Artificial Sequence
  Synthetic
aaacagaucccuguuacaua

SEQ ID NO: 88077 - RNA, 23 nt, Artificial Sequence
  Synthetic
aggaaacagaucccuguuacaua

SEQ ID NO: 88078 - RNA, 24 nt, Artificial Sequence
  Synthetic
aaggaaacagaucccuguuacaua

SEQ ID NO: 88079 - RNA, 18 nt, Artificial Sequence
  Synthetic
uaagggccugaaaccaua

SEQ ID NO: 88080 - RNA, 19 nt, Artificial Sequence
  Synthetic
auaagggccugaaaccaua

SEQ ID NO: 88081 - RNA, 21 nt, Artificial Sequence
  Synthetic
ugauaagggccugaaaccaua

SEQ ID NO: 88082 - RNA, 23 nt, Artificial Sequence
  Synthetic
agugauaagggccugaaaccaua

SEQ ID NO: 88083 - RNA, 24 nt, Artificial Sequence
  Synthetic
cagugauaagggccugaaaccaua

SEQ ID NO: 88084 - RNA, 18 nt, Artificial Sequence
  Synthetic
uguuuaaacuucaccaua

SEQ ID NO: 88085 - RNA, 19 nt, Artificial Sequence
  Synthetic
auguuuaaacuucaccaua

SEQ ID NO: 88086 - RNA, 20 nt, Artificial Sequence
  Synthetic
uauguuuaaacuucaccaua

SEQ ID NO: 88087 - RNA, 21 nt, Artificial Sequence
  Synthetic
uuauguuuaaacuucaccaua

SEQ ID NO: 88088 - RNA, 22 nt, Artificial Sequence
  Synthetic
auuauguuuaaacuucaccaua

SEQ ID NO: 88089 - RNA, 23 nt, Artificial Sequence
  Synthetic
uauuauguuuaaacuucaccaua

SEQ ID NO: 88090 - RNA, 24 nt, Artificial Sequence
  Synthetic
cuauuauguuuaaacuucaccaua

SEQ ID NO: 88091 - RNA, 18 nt, Artificial Sequence
  Synthetic
acauucugcucuaccaua

SEQ ID NO: 88092 - RNA, 20 nt, Artificial Sequence
  Synthetic
agacauucugcucuaccaua

SEQ ID NO: 88093 - RNA, 21 nt, Artificial Sequence
  Synthetic
aagacauucugcucuaccaua

SEQ ID NO: 88094 - RNA, 23 nt, Artificial Sequence
  Synthetic
ugaagacauucugcucuaccaua

SEQ ID NO: 88095 - RNA, 18 nt, Artificial Sequence
  Synthetic
ccacaaacagugcccaua

SEQ ID NO: 88096 - RNA, 20 nt, Artificial Sequence
  Synthetic
ugccacaaacagugcccaua

SEQ ID NO: 88097 - RNA, 24 nt, Artificial Sequence
  Synthetic
agggugccacaaacagugcccaua

SEQ ID NO: 88098 - RNA, 18 nt, Artificial Sequence
  Synthetic
cccuuaacuucagccaua

SEQ ID NO: 88099 - RNA, 19 nt, Artificial Sequence
  Synthetic
acccuuaacuucagccaua

SEQ ID NO: 88100 - RNA, 20 nt, Artificial Sequence
  Synthetic
uacccuuaacuucagccaua

SEQ ID NO: 88101 - RNA, 21 nt, Artificial Sequence
  Synthetic
auacccuuaacuucagccaua

SEQ ID NO: 88102 - RNA, 22 nt, Artificial Sequence
  Synthetic
uauacccuuaacuucagccaua

SEQ ID NO: 88103 - RNA, 23 nt, Artificial Sequence
  Synthetic
auauacccuuaacuucagccaua

SEQ ID NO: 88104 - RNA, 24 nt, Artificial Sequence
  Synthetic
cauauacccuuaacuucagccaua

SEQ ID NO: 88105 - RNA, 18 nt, Artificial Sequence
  Synthetic
uuauacacgagagccaua

SEQ ID NO: 88106 - RNA, 19 nt, Artificial Sequence
  Synthetic
auuauacacgagagccaua

SEQ ID NO: 88107 - RNA, 22 nt, Artificial Sequence
  Synthetic
aggauuauacacgagagccaua

SEQ ID NO: 88108 - RNA, 23 nt, Artificial Sequence
  Synthetic
aaggauuauacacgagagccaua

SEQ ID NO: 88109 - RNA, 24 nt, Artificial Sequence
  Synthetic
aaaggauuauacacgagagccaua

SEQ ID NO: 88110 - RNA, 19 nt, Artificial Sequence
  Synthetic
agaguucgcuagagccaua

SEQ ID NO: 88111 - RNA, 20 nt, Artificial Sequence
  Synthetic
aagaguucgcuagagccaua

SEQ ID NO: 88112 - RNA, 21 nt, Artificial Sequence
  Synthetic
aaagaguucgcuagagccaua

SEQ ID NO: 88113 - RNA, 22 nt, Artificial Sequence
  Synthetic
caaagaguucgcuagagccaua

SEQ ID NO: 88114 - RNA, 24 nt, Artificial Sequence
  Synthetic
ugcaaagaguucgcuagagccaua

SEQ ID NO: 88115 - RNA, 18 nt, Artificial Sequence
  Synthetic
uauagacaguuugccaua

SEQ ID NO: 88116 - RNA, 19 nt, Artificial Sequence
  Synthetic
auauagacaguuugccaua

SEQ ID NO: 88117 - RNA, 20 nt, Artificial Sequence
  Synthetic
aauauagacaguuugccaua

SEQ ID NO: 88118 - RNA, 21 nt, Artificial Sequence
  Synthetic
uaauauagacaguuugccaua

SEQ ID NO: 88119 - RNA, 23 nt, Artificial Sequence
  Synthetic
uguaauauagacaguuugccaua

SEQ ID NO: 88120 - RNA, 24 nt, Artificial Sequence
  Synthetic
auguaauauagacaguuugccaua

SEQ ID NO: 88121 - RNA, 19 nt, Artificial Sequence
  Synthetic
ugaucccuagagcuccaua

SEQ ID NO: 88122 - RNA, 20 nt, Artificial Sequence
  Synthetic
cugaucccuagagcuccaua

SEQ ID NO: 88123 - RNA, 21 nt, Artificial Sequence
  Synthetic
ucugaucccuagagcuccaua

SEQ ID NO: 88124 - RNA, 22 nt, Artificial Sequence
  Synthetic
cucugaucccuagagcuccaua

SEQ ID NO: 88125 - RNA, 23 nt, Artificial Sequence
  Synthetic
ucucugaucccuagagcuccaua

SEQ ID NO: 88126 - RNA, 24 nt, Artificial Sequence
  Synthetic
aucucugaucccuagagcuccaua

SEQ ID NO: 88127 - RNA, 20 nt, Artificial Sequence
  Synthetic
aggauuaaaaaauuuccaua

SEQ ID NO: 88128 - RNA, 21 nt, Artificial Sequence
  Synthetic
aaggauuaaaaaauuuccaua

SEQ ID NO: 88129 - RNA, 22 nt, Artificial Sequence
  Synthetic
uaaggauuaaaaaauuuccaua

SEQ ID NO: 88130 - RNA, 23 nt, Artificial Sequence
  Synthetic
uuaaggauuaaaaaauuuccaua

SEQ ID NO: 88131 - RNA, 24 nt, Artificial Sequence
  Synthetic
uuuaaggauuaaaaaauuuccaua

SEQ ID NO: 88132 - RNA, 18 nt, Artificial Sequence
  Synthetic
ugcucuguguuuuccaua

SEQ ID NO: 88133 - RNA, 19 nt, Artificial Sequence
  Synthetic
cugcucuguguuuuccaua

SEQ ID NO: 88134 - RNA, 20 nt, Artificial Sequence
  Synthetic
acugcucuguguuuuccaua

SEQ ID NO: 88135 - RNA, 21 nt, Artificial Sequence
  Synthetic
aacugcucuguguuuuccaua

SEQ ID NO: 88136 - RNA, 22 nt, Artificial Sequence
  Synthetic
uaacugcucuguguuuuccaua

SEQ ID NO: 88137 - RNA, 23 nt, Artificial Sequence
  Synthetic
uuaacugcucuguguuuuccaua

SEQ ID NO: 88138 - RNA, 24 nt, Artificial Sequence
  Synthetic
auuaacugcucuguguuuuccaua

SEQ ID NO: 88139 - RNA, 18 nt, Artificial Sequence
  Synthetic
auaaugaauaaaagcaua

SEQ ID NO: 88140 - RNA, 19 nt, Artificial Sequence
  Synthetic
aauaaugaauaaaagcaua

SEQ ID NO: 88141 - RNA, 20 nt, Artificial Sequence
  Synthetic
caauaaugaauaaaagcaua

SEQ ID NO: 88142 - RNA, 21 nt, Artificial Sequence
  Synthetic
ucaauaaugaauaaaagcaua

SEQ ID NO: 88143 - RNA, 22 nt, Artificial Sequence
  Synthetic
uucaauaaugaauaaaagcaua

SEQ ID NO: 88144 - RNA, 23 nt, Artificial Sequence
  Synthetic
auucaauaaugaauaaaagcaua

SEQ ID NO: 88145 - RNA, 24 nt, Artificial Sequence
  Synthetic
aauucaauaaugaauaaaagcaua

SEQ ID NO: 88146 - RNA, 18 nt, Artificial Sequence
  Synthetic
uaggaauucacgagcaua

SEQ ID NO: 88147 - RNA, 19 nt, Artificial Sequence
  Synthetic
uuaggaauucacgagcaua

SEQ ID NO: 88148 - RNA, 20 nt, Artificial Sequence
  Synthetic
cuuaggaauucacgagcaua

SEQ ID NO: 88149 - RNA, 21 nt, Artificial Sequence
  Synthetic
acuuaggaauucacgagcaua

SEQ ID NO: 88150 - RNA, 22 nt, Artificial Sequence
  Synthetic
aacuuaggaauucacgagcaua

SEQ ID NO: 88151 - RNA, 23 nt, Artificial Sequence
  Synthetic
aaacuuaggaauucacgagcaua

SEQ ID NO: 88152 - RNA, 24 nt, Artificial Sequence
  Synthetic
aaaacuuaggaauucacgagcaua

SEQ ID NO: 88153 - RNA, 19 nt, Artificial Sequence
  Synthetic
agggcagggguugagcaua

SEQ ID NO: 88154 - RNA, 22 nt, Artificial Sequence
  Synthetic
aggagggcagggguugagcaua

SEQ ID NO: 88155 - RNA, 24 nt, Artificial Sequence
  Synthetic
ugaggagggcagggguugagcaua

SEQ ID NO: 88156 - RNA, 19 nt, Artificial Sequence
  Synthetic
cgaauuuuaaaccugcaua

SEQ ID NO: 88157 - RNA, 20 nt, Artificial Sequence
  Synthetic
acgaauuuuaaaccugcaua

SEQ ID NO: 88158 - RNA, 21 nt, Artificial Sequence
  Synthetic
aacgaauuuuaaaccugcaua

SEQ ID NO: 88159 - RNA, 22 nt, Artificial Sequence
  Synthetic
uaacgaauuuuaaaccugcaua

SEQ ID NO: 88160 - RNA, 24 nt, Artificial Sequence
  Synthetic
uguaacgaauuuuaaaccugcaua

SEQ ID NO: 88161 - RNA, 18 nt, Artificial Sequence
  Synthetic
aucuacuuagaaaucaua

SEQ ID NO: 88162 - RNA, 19 nt, Artificial Sequence
  Synthetic
aaucuacuuagaaaucaua

SEQ ID NO: 88163 - RNA, 20 nt, Artificial Sequence
  Synthetic
aaaucuacuuagaaaucaua

SEQ ID NO: 88164 - RNA, 21 nt, Artificial Sequence
  Synthetic
uaaaucuacuuagaaaucaua

SEQ ID NO: 88165 - RNA, 22 nt, Artificial Sequence
  Synthetic
uuaaaucuacuuagaaaucaua

SEQ ID NO: 88166 - RNA, 23 nt, Artificial Sequence
  Synthetic
uuuaaaucuacuuagaaaucaua

SEQ ID NO: 88167 - RNA, 24 nt, Artificial Sequence
  Synthetic
cuuuaaaucuacuuagaaaucaua

SEQ ID NO: 88168 - RNA, 18 nt, Artificial Sequence
  Synthetic
cuucucaggguaaucaua

SEQ ID NO: 88169 - RNA, 19 nt, Artificial Sequence
  Synthetic
ucuucucaggguaaucaua

SEQ ID NO: 88170 - RNA, 20 nt, Artificial Sequence
  Synthetic
uucuucucaggguaaucaua

SEQ ID NO: 88171 - RNA, 21 nt, Artificial Sequence
  Synthetic
uuucuucucaggguaaucaua

SEQ ID NO: 88172 - RNA, 22 nt, Artificial Sequence
  Synthetic
cuuucuucucaggguaaucaua

SEQ ID NO: 88173 - RNA, 23 nt, Artificial Sequence
  Synthetic
ucuuucuucucaggguaaucaua

SEQ ID NO: 88174 - RNA, 24 nt, Artificial Sequence
  Synthetic
aucuuucuucucaggguaaucaua

SEQ ID NO: 88175 - RNA, 21 nt, Artificial Sequence
  Synthetic
aaguaaaauaauaauaucaua

SEQ ID NO: 88176 - RNA, 22 nt, Artificial Sequence
  Synthetic
caaguaaaauaauaauaucaua

SEQ ID NO: 88177 - RNA, 23 nt, Artificial Sequence
  Synthetic
acaaguaaaauaauaauaucaua

SEQ ID NO: 88178 - RNA, 24 nt, Artificial Sequence
  Synthetic
aacaaguaaaauaauaauaucaua

SEQ ID NO: 88179 - RNA, 18 nt, Artificial Sequence
  Synthetic
aaaagaugcauuaucaua

SEQ ID NO: 88180 - RNA, 20 nt, Artificial Sequence
  Synthetic
ugaaaagaugcauuaucaua

SEQ ID NO: 88181 - RNA, 21 nt, Artificial Sequence
  Synthetic
uugaaaagaugcauuaucaua

SEQ ID NO: 88182 - RNA, 24 nt, Artificial Sequence
  Synthetic
ugguugaaaagaugcauuaucaua

SEQ ID NO: 88183 - RNA, 19 nt, Artificial Sequence
  Synthetic
ugcuccauucuuuaucaua

SEQ ID NO: 88184 - RNA, 20 nt, Artificial Sequence
  Synthetic
augcuccauucuuuaucaua

SEQ ID NO: 88185 - RNA, 21 nt, Artificial Sequence
  Synthetic
uaugcuccauucuuuaucaua

SEQ ID NO: 88186 - RNA, 22 nt, Artificial Sequence
  Synthetic
cuaugcuccauucuuuaucaua

SEQ ID NO: 88187 - RNA, 23 nt, Artificial Sequence
  Synthetic
acuaugcuccauucuuuaucaua

SEQ ID NO: 88188 - RNA, 24 nt, Artificial Sequence
  Synthetic
aacuaugcuccauucuuuaucaua

SEQ ID NO: 88189 - RNA, 18 nt, Artificial Sequence
  Synthetic
ucucugaucuuacucaua

SEQ ID NO: 88190 - RNA, 19 nt, Artificial Sequence
  Synthetic
uucucugaucuuacucaua

SEQ ID NO: 88191 - RNA, 20 nt, Artificial Sequence
  Synthetic
cuucucugaucuuacucaua

SEQ ID NO: 88192 - RNA, 21 nt, Artificial Sequence
  Synthetic
ccuucucugaucuuacucaua

SEQ ID NO: 88193 - RNA, 22 nt, Artificial Sequence
  Synthetic
accuucucugaucuuacucaua

SEQ ID NO: 88194 - RNA, 23 nt, Artificial Sequence
  Synthetic
uaccuucucugaucuuacucaua

SEQ ID NO: 88195 - RNA, 24 nt, Artificial Sequence
  Synthetic
auaccuucucugaucuuacucaua

SEQ ID NO: 88196 - RNA, 18 nt, Artificial Sequence
  Synthetic
aaacuuuuagcccucaua

SEQ ID NO: 88197 - RNA, 19 nt, Artificial Sequence
  Synthetic
uaaacuuuuagcccucaua

SEQ ID NO: 88198 - RNA, 21 nt, Artificial Sequence
  Synthetic
uguaaacuuuuagcccucaua

SEQ ID NO: 88199 - RNA, 22 nt, Artificial Sequence
  Synthetic
auguaaacuuuuagcccucaua

SEQ ID NO: 88200 - RNA, 24 nt, Artificial Sequence
  Synthetic
ugauguaaacuuuuagcccucaua

SEQ ID NO: 88201 - RNA, 19 nt, Artificial Sequence
  Synthetic
uggaguuucagugcucaua

SEQ ID NO: 88202 - RNA, 21 nt, Artificial Sequence
  Synthetic
aguggaguuucagugcucaua

SEQ ID NO: 88203 - RNA, 22 nt, Artificial Sequence
  Synthetic
caguggaguuucagugcucaua

SEQ ID NO: 88204 - RNA, 23 nt, Artificial Sequence
  Synthetic
acaguggaguuucagugcucaua

SEQ ID NO: 88205 - RNA, 24 nt, Artificial Sequence
  Synthetic
cacaguggaguuucagugcucaua

SEQ ID NO: 88206 - RNA, 21 nt, Artificial Sequence
  Synthetic
uaaugggaauucagucucaua

SEQ ID NO: 88207 - RNA, 23 nt, Artificial Sequence
  Synthetic
uguaaugggaauucagucucaua

SEQ ID NO: 88208 - RNA, 18 nt, Artificial Sequence
  Synthetic
uggccuauuugggucaua

SEQ ID NO: 88209 - RNA, 19 nt, Artificial Sequence
  Synthetic
auggccuauuugggucaua

SEQ ID NO: 88210 - RNA, 20 nt, Artificial Sequence
  Synthetic
aauggccuauuugggucaua

SEQ ID NO: 88211 - RNA, 21 nt, Artificial Sequence
  Synthetic
aaauggccuauuugggucaua

SEQ ID NO: 88212 - RNA, 22 nt, Artificial Sequence
  Synthetic
aaaauggccuauuugggucaua

SEQ ID NO: 88213 - RNA, 23 nt, Artificial Sequence
  Synthetic
aaaaauggccuauuugggucaua

SEQ ID NO: 88214 - RNA, 24 nt, Artificial Sequence
  Synthetic
aaaaaauggccuauuugggucaua

SEQ ID NO: 88215 - RNA, 19 nt, Artificial Sequence
  Synthetic
ugagaaaggaauggucaua

SEQ ID NO: 88216 - RNA, 21 nt, Artificial Sequence
  Synthetic
agugagaaaggaauggucaua

SEQ ID NO: 88217 - RNA, 22 nt, Artificial Sequence
  Synthetic
uagugagaaaggaauggucaua

SEQ ID NO: 88218 - RNA, 23 nt, Artificial Sequence
  Synthetic
cuagugagaaaggaauggucaua

SEQ ID NO: 88219 - RNA, 18 nt, Artificial Sequence
  Synthetic
uaccagauguuauucaua

SEQ ID NO: 88220 - RNA, 19 nt, Artificial Sequence
  Synthetic
uuaccagauguuauucaua

SEQ ID NO: 88221 - RNA, 20 nt, Artificial Sequence
  Synthetic
uuuaccagauguuauucaua

SEQ ID NO: 88222 - RNA, 21 nt, Artificial Sequence
  Synthetic
uuuuaccagauguuauucaua

SEQ ID NO: 88223 - RNA, 22 nt, Artificial Sequence
  Synthetic
cuuuuaccagauguuauucaua

SEQ ID NO: 88224 - RNA, 23 nt, Artificial Sequence
  Synthetic
acuuuuaccagauguuauucaua

SEQ ID NO: 88225 - RNA, 24 nt, Artificial Sequence
  Synthetic
aacuuuuaccagauguuauucaua

SEQ ID NO: 88226 - RNA, 18 nt, Artificial Sequence
  Synthetic
ugugaacauaauuucaua

SEQ ID NO: 88227 - RNA, 19 nt, Artificial Sequence
  Synthetic
uugugaacauaauuucaua

SEQ ID NO: 88228 - RNA, 20 nt, Artificial Sequence
  Synthetic
uuugugaacauaauuucaua

SEQ ID NO: 88229 - RNA, 21 nt, Artificial Sequence
  Synthetic
auuugugaacauaauuucaua

SEQ ID NO: 88230 - RNA, 22 nt, Artificial Sequence
  Synthetic
aauuugugaacauaauuucaua

SEQ ID NO: 88231 - RNA, 24 nt, Artificial Sequence
  Synthetic
agaauuugugaacauaauuucaua

SEQ ID NO: 88232 - RNA, 18 nt, Artificial Sequence
  Synthetic
cacucacacacaaagaua

SEQ ID NO: 88233 - RNA, 19 nt, Artificial Sequence
  Synthetic
ucacucacacacaaagaua

SEQ ID NO: 88234 - RNA, 21 nt, Artificial Sequence
  Synthetic
agucacucacacacaaagaua

SEQ ID NO: 88235 - RNA, 22 nt, Artificial Sequence
  Synthetic
uagucacucacacacaaagaua

SEQ ID NO: 88236 - RNA, 23 nt, Artificial Sequence
  Synthetic
uuagucacucacacacaaagaua

SEQ ID NO: 88237 - RNA, 24 nt, Artificial Sequence
  Synthetic
uuuagucacucacacacaaagaua

SEQ ID NO: 88238 - RNA, 19 nt, Artificial Sequence
  Synthetic
ugccauccaggucaagaua

SEQ ID NO: 88239 - RNA, 20 nt, Artificial Sequence
  Synthetic
augccauccaggucaagaua

SEQ ID NO: 88240 - RNA, 21 nt, Artificial Sequence
  Synthetic
aaugccauccaggucaagaua

SEQ ID NO: 88241 - RNA, 22 nt, Artificial Sequence
  Synthetic
aaaugccauccaggucaagaua

SEQ ID NO: 88242 - RNA, 23 nt, Artificial Sequence
  Synthetic
aaaaugccauccaggucaagaua

SEQ ID NO: 88243 - RNA, 24 nt, Artificial Sequence
  Synthetic
aaaaaugccauccaggucaagaua

SEQ ID NO: 88244 - RNA, 18 nt, Artificial Sequence
  Synthetic
aagaaaacauucaagaua

SEQ ID NO: 88245 - RNA, 19 nt, Artificial Sequence
  Synthetic
aaagaaaacauucaagaua

SEQ ID NO: 88246 - RNA, 20 nt, Artificial Sequence
  Synthetic
uaaagaaaacauucaagaua

SEQ ID NO: 88247 - RNA, 21 nt, Artificial Sequence
  Synthetic
auaaagaaaacauucaagaua

SEQ ID NO: 88248 - RNA, 22 nt, Artificial Sequence
  Synthetic
cauaaagaaaacauucaagaua

SEQ ID NO: 88249 - RNA, 23 nt, Artificial Sequence
  Synthetic
acauaaagaaaacauucaagaua

SEQ ID NO: 88250 - RNA, 24 nt, Artificial Sequence
  Synthetic
uacauaaagaaaacauucaagaua

SEQ ID NO: 88251 - RNA, 19 nt, Artificial Sequence
  Synthetic
agugagcauggagaagaua

SEQ ID NO: 88252 - RNA, 21 nt, Artificial Sequence
  Synthetic
agagugagcauggagaagaua

SEQ ID NO: 88253 - RNA, 22 nt, Artificial Sequence
  Synthetic
cagagugagcauggagaagaua

SEQ ID NO: 88254 - RNA, 24 nt, Artificial Sequence
  Synthetic
ugcagagugagcauggagaagaua

SEQ ID NO: 88255 - RNA, 18 nt, Artificial Sequence
  Synthetic
ugaauaaaagugaagaua

SEQ ID NO: 88256 - RNA, 19 nt, Artificial Sequence
  Synthetic
cugaauaaaagugaagaua

SEQ ID NO: 88257 - RNA, 20 nt, Artificial Sequence
  Synthetic
ucugaauaaaagugaagaua

SEQ ID NO: 88258 - RNA, 21 nt, Artificial Sequence
  Synthetic
uucugaauaaaagugaagaua

SEQ ID NO: 88259 - RNA, 22 nt, Artificial Sequence
  Synthetic
cuucugaauaaaagugaagaua

SEQ ID NO: 88260 - RNA, 23 nt, Artificial Sequence
  Synthetic
acuucugaauaaaagugaagaua

SEQ ID NO: 88261 - RNA, 24 nt, Artificial Sequence
  Synthetic
cacuucugaauaaaagugaagaua

SEQ ID NO: 88262 - RNA, 21 nt, Artificial Sequence
  Synthetic
uauuuucuuuaaaauaagaua

SEQ ID NO: 88263 - RNA, 22 nt, Artificial Sequence
  Synthetic
uuauuuucuuuaaaauaagaua

SEQ ID NO: 88264 - RNA, 24 nt, Artificial Sequence
  Synthetic
uguuauuuucuuuaaaauaagaua

SEQ ID NO: 88265 - RNA, 18 nt, Artificial Sequence
  Synthetic
cacuacuguccacagaua

SEQ ID NO: 88266 - RNA, 19 nt, Artificial Sequence
  Synthetic
acacuacuguccacagaua

SEQ ID NO: 88267 - RNA, 20 nt, Artificial Sequence
  Synthetic
cacacuacuguccacagaua

SEQ ID NO: 88268 - RNA, 21 nt, Artificial Sequence
  Synthetic
ucacacuacuguccacagaua

SEQ ID NO: 88269 - RNA, 22 nt, Artificial Sequence
  Synthetic
aucacacuacuguccacagaua

SEQ ID NO: 88270 - RNA, 23 nt, Artificial Sequence
  Synthetic
caucacacuacuguccacagaua

SEQ ID NO: 88271 - RNA, 24 nt, Artificial Sequence
  Synthetic
acaucacacuacuguccacagaua

SEQ ID NO: 88272 - RNA, 18 nt, Artificial Sequence
  Synthetic
cauuuauucacccagaua

SEQ ID NO: 88273 - RNA, 20 nt, Artificial Sequence
  Synthetic
agcauuuauucacccagaua

SEQ ID NO: 88274 - RNA, 21 nt, Artificial Sequence
  Synthetic
aagcauuuauucacccagaua

SEQ ID NO: 88275 - RNA, 23 nt, Artificial Sequence
  Synthetic
ugaagcauuuauucacccagaua

SEQ ID NO: 88276 - RNA, 24 nt, Artificial Sequence
  Synthetic
augaagcauuuauucacccagaua

SEQ ID NO: 88277 - RNA, 18 nt, Artificial Sequence
  Synthetic
cauucaagggaagagaua

SEQ ID NO: 88278 - RNA, 19 nt, Artificial Sequence
  Synthetic
acauucaagggaagagaua

SEQ ID NO: 88279 - RNA, 20 nt, Artificial Sequence
  Synthetic
aacauucaagggaagagaua

SEQ ID NO: 88280 - RNA, 21 nt, Artificial Sequence
  Synthetic
aaacauucaagggaagagaua

SEQ ID NO: 88281 - RNA, 22 nt, Artificial Sequence
  Synthetic
aaaacauucaagggaagagaua

SEQ ID NO: 88282 - RNA, 23 nt, Artificial Sequence
  Synthetic
aaaaacauucaagggaagagaua

SEQ ID NO: 88283 - RNA, 18 nt, Artificial Sequence
  Synthetic
cacugugaaauggagaua

SEQ ID NO: 88284 - RNA, 20 nt, Artificial Sequence
  Synthetic
agcacugugaaauggagaua

SEQ ID NO: 88285 - RNA, 21 nt, Artificial Sequence
  Synthetic
cagcacugugaaauggagaua

SEQ ID NO: 88286 - RNA, 22 nt, Artificial Sequence
  Synthetic
ccagcacugugaaauggagaua

SEQ ID NO: 88287 - RNA, 23 nt, Artificial Sequence
  Synthetic
uccagcacugugaaauggagaua

SEQ ID NO: 88288 - RNA, 24 nt, Artificial Sequence
  Synthetic
uuccagcacugugaaauggagaua

SEQ ID NO: 88289 - RNA, 18 nt, Artificial Sequence
  Synthetic
uuccuggaaaucuagaua

SEQ ID NO: 88290 - RNA, 19 nt, Artificial Sequence
  Synthetic
uuuccuggaaaucuagaua

SEQ ID NO: 88291 - RNA, 20 nt, Artificial Sequence
  Synthetic
uuuuccuggaaaucuagaua

SEQ ID NO: 88292 - RNA, 21 nt, Artificial Sequence
  Synthetic
auuuuccuggaaaucuagaua

SEQ ID NO: 88293 - RNA, 22 nt, Artificial Sequence
  Synthetic
aauuuuccuggaaaucuagaua

SEQ ID NO: 88294 - RNA, 23 nt, Artificial Sequence
  Synthetic
uaauuuuccuggaaaucuagaua

SEQ ID NO: 88295 - RNA, 24 nt, Artificial Sequence
  Synthetic
cuaauuuuccuggaaaucuagaua

SEQ ID NO: 88296 - RNA, 18 nt, Artificial Sequence
  Synthetic
uucuggauuuaguagaua

SEQ ID NO: 88297 - RNA, 20 nt, Artificial Sequence
  Synthetic
aguucuggauuuaguagaua

SEQ ID NO: 88298 - RNA, 23 nt, Artificial Sequence
  Synthetic
cggaguucuggauuuaguagaua

SEQ ID NO: 88299 - RNA, 24 nt, Artificial Sequence
  Synthetic
ccggaguucuggauuuaguagaua

SEQ ID NO: 88300 - RNA, 19 nt, Artificial Sequence
  Synthetic
ugguugcucuagguagaua

SEQ ID NO: 88301 - RNA, 20 nt, Artificial Sequence
  Synthetic
cugguugcucuagguagaua

SEQ ID NO: 88302 - RNA, 21 nt, Artificial Sequence
  Synthetic
ccugguugcucuagguagaua

SEQ ID NO: 88303 - RNA, 23 nt, Artificial Sequence
  Synthetic
agccugguugcucuagguagaua

SEQ ID NO: 88304 - RNA, 18 nt, Artificial Sequence
  Synthetic
aagcagguauguuagaua

SEQ ID NO: 88305 - RNA, 21 nt, Artificial Sequence
  Synthetic
uggaagcagguauguuagaua

SEQ ID NO: 88306 - RNA, 22 nt, Artificial Sequence
  Synthetic
auggaagcagguauguuagaua

SEQ ID NO: 88307 - RNA, 23 nt, Artificial Sequence
  Synthetic
uauggaagcagguauguuagaua

SEQ ID NO: 88308 - RNA, 18 nt, Artificial Sequence
  Synthetic
uggagacuguguuagaua

SEQ ID NO: 88309 - RNA, 19 nt, Artificial Sequence
  Synthetic
uuggagacuguguuagaua

SEQ ID NO: 88310 - RNA, 21 nt, Artificial Sequence
  Synthetic
aguuggagacuguguuagaua

SEQ ID NO: 88311 - RNA, 22 nt, Artificial Sequence
  Synthetic
aaguuggagacuguguuagaua

SEQ ID NO: 88312 - RNA, 23 nt, Artificial Sequence
  Synthetic
uaaguuggagacuguguuagaua

SEQ ID NO: 88313 - RNA, 18 nt, Artificial Sequence
  Synthetic
aacaaugagagaaggaua

SEQ ID NO: 88314 - RNA, 19 nt, Artificial Sequence
  Synthetic
caacaaugagagaaggaua

SEQ ID NO: 88315 - RNA, 20 nt, Artificial Sequence
  Synthetic
ccaacaaugagagaaggaua

SEQ ID NO: 88316 - RNA, 21 nt, Artificial Sequence
  Synthetic
accaacaaugagagaaggaua

SEQ ID NO: 88317 - RNA, 22 nt, Artificial Sequence
  Synthetic
aaccaacaaugagagaaggaua

SEQ ID NO: 88318 - RNA, 18 nt, Artificial Sequence
  Synthetic
aucaaauggaagaggaua

SEQ ID NO: 88319 - RNA, 19 nt, Artificial Sequence
  Synthetic
aaucaaauggaagaggaua

SEQ ID NO: 88320 - RNA, 20 nt, Artificial Sequence
  Synthetic
uaaucaaauggaagaggaua

SEQ ID NO: 88321 - RNA, 21 nt, Artificial Sequence
  Synthetic
uuaaucaaauggaagaggaua

SEQ ID NO: 88322 - RNA, 22 nt, Artificial Sequence
  Synthetic
uuuaaucaaauggaagaggaua

SEQ ID NO: 88323 - RNA, 23 nt, Artificial Sequence
  Synthetic
auuuaaucaaauggaagaggaua

SEQ ID NO: 88324 - RNA, 18 nt, Artificial Sequence
  Synthetic
aacagacuugugaggaua

SEQ ID NO: 88325 - RNA, 19 nt, Artificial Sequence
  Synthetic
aaacagacuugugaggaua

SEQ ID NO: 88326 - RNA, 20 nt, Artificial Sequence
  Synthetic
aaaacagacuugugaggaua

SEQ ID NO: 88327 - RNA, 22 nt, Artificial Sequence
  Synthetic
cgaaaacagacuugugaggaua

SEQ ID NO: 88328 - RNA, 23 nt, Artificial Sequence
  Synthetic
ccgaaaacagacuugugaggaua

SEQ ID NO: 88329 - RNA, 24 nt, Artificial Sequence
  Synthetic
accgaaaacagacuugugaggaua

SEQ ID NO: 88330 - RNA, 18 nt, Artificial Sequence
  Synthetic
aaauaaugguuggggaua

SEQ ID NO: 88331 - RNA, 19 nt, Artificial Sequence
  Synthetic
aaaauaaugguuggggaua

SEQ ID NO: 88332 - RNA, 20 nt, Artificial Sequence
  Synthetic
uaaaauaaugguuggggaua

SEQ ID NO: 88333 - RNA, 21 nt, Artificial Sequence
  Synthetic
auaaaauaaugguuggggaua

SEQ ID NO: 88334 - RNA, 23 nt, Artificial Sequence
  Synthetic
ugauaaaauaaugguuggggaua

SEQ ID NO: 88335 - RNA, 24 nt, Artificial Sequence
  Synthetic
uugauaaaauaaugguuggggaua

SEQ ID NO: 88336 - RNA, 18 nt, Artificial Sequence
  Synthetic
cacgugaaugaauggaua

SEQ ID NO: 88337 - RNA, 19 nt, Artificial Sequence
  Synthetic
acacgugaaugaauggaua

SEQ ID NO: 88338 - RNA, 20 nt, Artificial Sequence
  Synthetic
aacacgugaaugaauggaua

SEQ ID NO: 88339 - RNA, 21 nt, Artificial Sequence
  Synthetic
uaacacgugaaugaauggaua

SEQ ID NO: 88340 - RNA, 22 nt, Artificial Sequence
  Synthetic
uuaacacgugaaugaauggaua

SEQ ID NO: 88341 - RNA, 23 nt, Artificial Sequence
  Synthetic
auuaacacgugaaugaauggaua

SEQ ID NO: 88342 - RNA, 24 nt, Artificial Sequence
  Synthetic
aauuaacacgugaaugaauggaua

SEQ ID NO: 88343 - RNA, 18 nt, Artificial Sequence
  Synthetic
auacaucaaugauggaua

SEQ ID NO: 88344 - RNA, 19 nt, Artificial Sequence
  Synthetic
cauacaucaaugauggaua

SEQ ID NO: 88345 - RNA, 20 nt, Artificial Sequence
  Synthetic
ucauacaucaaugauggaua

SEQ ID NO: 88346 - RNA, 21 nt, Artificial Sequence
  Synthetic
aucauacaucaaugauggaua

SEQ ID NO: 88347 - RNA, 22 nt, Artificial Sequence
  Synthetic
uaucauacaucaaugauggaua

SEQ ID NO: 88348 - RNA, 23 nt, Artificial Sequence
  Synthetic
cuaucauacaucaaugauggaua

SEQ ID NO: 88349 - RNA, 24 nt, Artificial Sequence
  Synthetic
acuaucauacaucaaugauggaua

SEQ ID NO: 88350 - RNA, 18 nt, Artificial Sequence
  Synthetic
augcaaggauuguggaua

SEQ ID NO: 88351 - RNA, 19 nt, Artificial Sequence
  Synthetic
aaugcaaggauuguggaua

SEQ ID NO: 88352 - RNA, 20 nt, Artificial Sequence
  Synthetic
aaaugcaaggauuguggaua

SEQ ID NO: 88353 - RNA, 21 nt, Artificial Sequence
  Synthetic
aaaaugcaaggauuguggaua

SEQ ID NO: 88354 - RNA, 22 nt, Artificial Sequence
  Synthetic
aaaaaugcaaggauuguggaua

SEQ ID NO: 88355 - RNA, 23 nt, Artificial Sequence
  Synthetic
uaaaaaugcaaggauuguggaua

SEQ ID NO: 88356 - RNA, 24 nt, Artificial Sequence
  Synthetic
uuaaaaaugcaaggauuguggaua

SEQ ID NO: 88357 - RNA, 21 nt, Artificial Sequence
  Synthetic
uuaaaaacagaugauuggaua

SEQ ID NO: 88358 - RNA, 22 nt, Artificial Sequence
  Synthetic
uuuaaaaacagaugauuggaua

SEQ ID NO: 88359 - RNA, 23 nt, Artificial Sequence
  Synthetic
auuuaaaaacagaugauuggaua

SEQ ID NO: 88360 - RNA, 24 nt, Artificial Sequence
  Synthetic
uauuuaaaaacagaugauuggaua

SEQ ID NO: 88361 - RNA, 18 nt, Artificial Sequence
  Synthetic
caacuucaauuuuggaua

SEQ ID NO: 88362 - RNA, 19 nt, Artificial Sequence
  Synthetic
acaacuucaauuuuggaua

SEQ ID NO: 88363 - RNA, 20 nt, Artificial Sequence
  Synthetic
aacaacuucaauuuuggaua

SEQ ID NO: 88364 - RNA, 21 nt, Artificial Sequence
  Synthetic
aaacaacuucaauuuuggaua

SEQ ID NO: 88365 - RNA, 22 nt, Artificial Sequence
  Synthetic
uaaacaacuucaauuuuggaua

SEQ ID NO: 88366 - RNA, 23 nt, Artificial Sequence
  Synthetic
auaaacaacuucaauuuuggaua

SEQ ID NO: 88367 - RNA, 24 nt, Artificial Sequence
  Synthetic
cauaaacaacuucaauuuuggaua

SEQ ID NO: 88368 - RNA, 18 nt, Artificial Sequence
  Synthetic
acgauaagauuuuggaua

SEQ ID NO: 88369 - RNA, 19 nt, Artificial Sequence
  Synthetic
aacgauaagauuuuggaua

SEQ ID NO: 88370 - RNA, 20 nt, Artificial Sequence
  Synthetic
caacgauaagauuuuggaua

SEQ ID NO: 88371 - RNA, 21 nt, Artificial Sequence
  Synthetic
ucaacgauaagauuuuggaua

SEQ ID NO: 88372 - RNA, 23 nt, Artificial Sequence
  Synthetic
agucaacgauaagauuuuggaua

SEQ ID NO: 88373 - RNA, 24 nt, Artificial Sequence
  Synthetic
aagucaacgauaagauuuuggaua

SEQ ID NO: 88374 - RNA, 18 nt, Artificial Sequence
  Synthetic
uuauucuuccaaaugaua

SEQ ID NO: 88375 - RNA, 20 nt, Artificial Sequence
  Synthetic
uguuauucuuccaaaugaua

SEQ ID NO: 88376 - RNA, 21 nt, Artificial Sequence
  Synthetic
cuguuauucuuccaaaugaua

SEQ ID NO: 88377 - RNA, 22 nt, Artificial Sequence
  Synthetic
acuguuauucuuccaaaugaua

SEQ ID NO: 88378 - RNA, 23 nt, Artificial Sequence
  Synthetic
cacuguuauucuuccaaaugaua

SEQ ID NO: 88379 - RNA, 24 nt, Artificial Sequence
  Synthetic
acacuguuauucuuccaaaugaua

SEQ ID NO: 88380 - RNA, 18 nt, Artificial Sequence
  Synthetic
accuuucugguaaugaua

SEQ ID NO: 88381 - RNA, 19 nt, Artificial Sequence
  Synthetic
uaccuuucugguaaugaua

SEQ ID NO: 88382 - RNA, 20 nt, Artificial Sequence
  Synthetic
auaccuuucugguaaugaua

SEQ ID NO: 88383 - RNA, 21 nt, Artificial Sequence
  Synthetic
uauaccuuucugguaaugaua

SEQ ID NO: 88384 - RNA, 22 nt, Artificial Sequence
  Synthetic
auauaccuuucugguaaugaua

SEQ ID NO: 88385 - RNA, 23 nt, Artificial Sequence
  Synthetic
aauauaccuuucugguaaugaua

SEQ ID NO: 88386 - RNA, 24 nt, Artificial Sequence
  Synthetic
uaauauaccuuucugguaaugaua

SEQ ID NO: 88387 - RNA, 18 nt, Artificial Sequence
  Synthetic
caguaccuaagcaugaua

SEQ ID NO: 88388 - RNA, 19 nt, Artificial Sequence
  Synthetic
ccaguaccuaagcaugaua

SEQ ID NO: 88389 - RNA, 20 nt, Artificial Sequence
  Synthetic
accaguaccuaagcaugaua

SEQ ID NO: 88390 - RNA, 21 nt, Artificial Sequence
  Synthetic
uaccaguaccuaagcaugaua

SEQ ID NO: 88391 - RNA, 22 nt, Artificial Sequence
  Synthetic
uuaccaguaccuaagcaugaua

SEQ ID NO: 88392 - RNA, 23 nt, Artificial Sequence
  Synthetic
cuuaccaguaccuaagcaugaua

SEQ ID NO: 88393 - RNA, 19 nt, Artificial Sequence
  Synthetic
agcaauacucugcaugaua

SEQ ID NO: 88394 - RNA, 21 nt, Artificial Sequence
  Synthetic
agagcaauacucugcaugaua

SEQ ID NO: 88395 - RNA, 22 nt, Artificial Sequence
  Synthetic
uagagcaauacucugcaugaua

SEQ ID NO: 88396 - RNA, 23 nt, Artificial Sequence
  Synthetic
uuagagcaauacucugcaugaua

SEQ ID NO: 88397 - RNA, 24 nt, Artificial Sequence
  Synthetic
cuuagagcaauacucugcaugaua

SEQ ID NO: 88398 - RNA, 18 nt, Artificial Sequence
  Synthetic
agaauuaauaauaugaua

SEQ ID NO: 88399 - RNA, 19 nt, Artificial Sequence
  Synthetic
cagaauuaauaauaugaua

SEQ ID NO: 88400 - RNA, 20 nt, Artificial Sequence
  Synthetic
acagaauuaauaauaugaua

SEQ ID NO: 88401 - RNA, 21 nt, Artificial Sequence
  Synthetic
cacagaauuaauaauaugaua

SEQ ID NO: 88402 - RNA, 22 nt, Artificial Sequence
  Synthetic
ccacagaauuaauaauaugaua

SEQ ID NO: 88403 - RNA, 23 nt, Artificial Sequence
  Synthetic
cccacagaauuaauaauaugaua

SEQ ID NO: 88404 - RNA, 19 nt, Artificial Sequence
  Synthetic
agauagguuguuuaugaua

SEQ ID NO: 88405 - RNA, 20 nt, Artificial Sequence
  Synthetic
uagauagguuguuuaugaua

SEQ ID NO: 88406 - RNA, 21 nt, Artificial Sequence
  Synthetic
auagauagguuguuuaugaua

SEQ ID NO: 88407 - RNA, 22 nt, Artificial Sequence
  Synthetic
uauagauagguuguuuaugaua

SEQ ID NO: 88408 - RNA, 23 nt, Artificial Sequence
  Synthetic
auauagauagguuguuuaugaua

SEQ ID NO: 88409 - RNA, 24 nt, Artificial Sequence
  Synthetic
aauauagauagguuguuuaugaua

SEQ ID NO: 88410 - RNA, 18 nt, Artificial Sequence
  Synthetic
ugcacucuaagacugaua

SEQ ID NO: 88411 - RNA, 19 nt, Artificial Sequence
  Synthetic
cugcacucuaagacugaua

SEQ ID NO: 88412 - RNA, 20 nt, Artificial Sequence
  Synthetic
acugcacucuaagacugaua

SEQ ID NO: 88413 - RNA, 21 nt, Artificial Sequence
  Synthetic
aacugcacucuaagacugaua

SEQ ID NO: 88414 - RNA, 22 nt, Artificial Sequence
  Synthetic
aaacugcacucuaagacugaua

SEQ ID NO: 88415 - RNA, 23 nt, Artificial Sequence
  Synthetic
caaacugcacucuaagacugaua

SEQ ID NO: 88416 - RNA, 18 nt, Artificial Sequence
  Synthetic
uccucacagcaccugaua

SEQ ID NO: 88417 - RNA, 19 nt, Artificial Sequence
  Synthetic
uuccucacagcaccugaua

SEQ ID NO: 88418 - RNA, 20 nt, Artificial Sequence
  Synthetic
uuuccucacagcaccugaua

SEQ ID NO: 88419 - RNA, 21 nt, Artificial Sequence
  Synthetic
uuuuccucacagcaccugaua

SEQ ID NO: 88420 - RNA, 22 nt, Artificial Sequence
  Synthetic
uuuuuccucacagcaccugaua

SEQ ID NO: 88421 - RNA, 24 nt, Artificial Sequence
  Synthetic
uguuuuuccucacagcaccugaua

SEQ ID NO: 88422 - RNA, 18 nt, Artificial Sequence
  Synthetic
acaaaagucacccugaua

SEQ ID NO: 88423 - RNA, 19 nt, Artificial Sequence
  Synthetic
cacaaaagucacccugaua

SEQ ID NO: 88424 - RNA, 21 nt, Artificial Sequence
  Synthetic
ugcacaaaagucacccugaua

SEQ ID NO: 88425 - RNA, 22 nt, Artificial Sequence
  Synthetic
augcacaaaagucacccugaua

SEQ ID NO: 88426 - RNA, 18 nt, Artificial Sequence
  Synthetic
augaucugaguucugaua

SEQ ID NO: 88427 - RNA, 19 nt, Artificial Sequence
  Synthetic
aaugaucugaguucugaua

SEQ ID NO: 88428 - RNA, 20 nt, Artificial Sequence
  Synthetic
uaaugaucugaguucugaua

SEQ ID NO: 88429 - RNA, 21 nt, Artificial Sequence
  Synthetic
auaaugaucugaguucugaua

SEQ ID NO: 88430 - RNA, 22 nt, Artificial Sequence
  Synthetic
cauaaugaucugaguucugaua

SEQ ID NO: 88431 - RNA, 23 nt, Artificial Sequence
  Synthetic
acauaaugaucugaguucugaua

SEQ ID NO: 88432 - RNA, 24 nt, Artificial Sequence
  Synthetic
aacauaaugaucugaguucugaua

SEQ ID NO: 88433 - RNA, 18 nt, Artificial Sequence
  Synthetic
cuaugucuuagagugaua

SEQ ID NO: 88434 - RNA, 19 nt, Artificial Sequence
  Synthetic
ccuaugucuuagagugaua

SEQ ID NO: 88435 - RNA, 20 nt, Artificial Sequence
  Synthetic
accuaugucuuagagugaua

SEQ ID NO: 88436 - RNA, 21 nt, Artificial Sequence
  Synthetic
aaccuaugucuuagagugaua

SEQ ID NO: 88437 - RNA, 22 nt, Artificial Sequence
  Synthetic
uaaccuaugucuuagagugaua

SEQ ID NO: 88438 - RNA, 24 nt, Artificial Sequence
  Synthetic
aguaaccuaugucuuagagugaua

SEQ ID NO: 88439 - RNA, 19 nt, Artificial Sequence
  Synthetic
ugcaugauacaaggugaua

SEQ ID NO: 88440 - RNA, 20 nt, Artificial Sequence
  Synthetic
augcaugauacaaggugaua

SEQ ID NO: 88441 - RNA, 22 nt, Artificial Sequence
  Synthetic
cgaugcaugauacaaggugaua

SEQ ID NO: 88442 - RNA, 23 nt, Artificial Sequence
  Synthetic
ccgaugcaugauacaaggugaua

SEQ ID NO: 88443 - RNA, 24 nt, Artificial Sequence
  Synthetic
accgaugcaugauacaaggugaua

SEQ ID NO: 88444 - RNA, 18 nt, Artificial Sequence
  Synthetic
cuguuuucccaugugaua

SEQ ID NO: 88445 - RNA, 20 nt, Artificial Sequence
  Synthetic
ugcuguuuucccaugugaua

SEQ ID NO: 88446 - RNA, 21 nt, Artificial Sequence
  Synthetic
augcuguuuucccaugugaua

SEQ ID NO: 88447 - RNA, 22 nt, Artificial Sequence
  Synthetic
caugcuguuuucccaugugaua

SEQ ID NO: 88448 - RNA, 23 nt, Artificial Sequence
  Synthetic
ccaugcuguuuucccaugugaua

SEQ ID NO: 88449 - RNA, 24 nt, Artificial Sequence
  Synthetic
cccaugcuguuuucccaugugaua

SEQ ID NO: 88450 - RNA, 18 nt, Artificial Sequence
  Synthetic
auugccuuaucugugaua

SEQ ID NO: 88451 - RNA, 19 nt, Artificial Sequence
  Synthetic
aauugccuuaucugugaua

SEQ ID NO: 88452 - RNA, 20 nt, Artificial Sequence
  Synthetic
uaauugccuuaucugugaua

SEQ ID NO: 88453 - RNA, 21 nt, Artificial Sequence
  Synthetic
auaauugccuuaucugugaua

SEQ ID NO: 88454 - RNA, 22 nt, Artificial Sequence
  Synthetic
aauaauugccuuaucugugaua

SEQ ID NO: 88455 - RNA, 24 nt, Artificial Sequence
  Synthetic
agaauaauugccuuaucugugaua

SEQ ID NO: 88456 - RNA, 21 nt, Artificial Sequence
  Synthetic
cauacaggcaaaugugugaua

SEQ ID NO: 88457 - RNA, 22 nt, Artificial Sequence
  Synthetic
ucauacaggcaaaugugugaua

SEQ ID NO: 88458 - RNA, 23 nt, Artificial Sequence
  Synthetic
uucauacaggcaaaugugugaua

SEQ ID NO: 88459 - RNA, 24 nt, Artificial Sequence
  Synthetic
auucauacaggcaaaugugugaua

SEQ ID NO: 88460 - RNA, 18 nt, Artificial Sequence
  Synthetic
acauggucuaacuugaua

SEQ ID NO: 88461 - RNA, 20 nt, Artificial Sequence
  Synthetic
ugacauggucuaacuugaua

SEQ ID NO: 88462 - RNA, 21 nt, Artificial Sequence
  Synthetic
uugacauggucuaacuugaua

SEQ ID NO: 88463 - RNA, 23 nt, Artificial Sequence
  Synthetic
aguugacauggucuaacuugaua

SEQ ID NO: 88464 - RNA, 24 nt, Artificial Sequence
  Synthetic
caguugacauggucuaacuugaua

SEQ ID NO: 88465 - RNA, 18 nt, Artificial Sequence
  Synthetic
uggcuuauccucuugaua

SEQ ID NO: 88466 - RNA, 19 nt, Artificial Sequence
  Synthetic
cuggcuuauccucuugaua

SEQ ID NO: 88467 - RNA, 20 nt, Artificial Sequence
  Synthetic
acuggcuuauccucuugaua

SEQ ID NO: 88468 - RNA, 21 nt, Artificial Sequence
  Synthetic
aacuggcuuauccucuugaua

SEQ ID NO: 88469 - RNA, 22 nt, Artificial Sequence
  Synthetic
aaacuggcuuauccucuugaua

SEQ ID NO: 88470 - RNA, 23 nt, Artificial Sequence
  Synthetic
uaaacuggcuuauccucuugaua

SEQ ID NO: 88471 - RNA, 24 nt, Artificial Sequence
  Synthetic
auaaacuggcuuauccucuugaua

SEQ ID NO: 88472 - RNA, 18 nt, Artificial Sequence
  Synthetic
uaccuaaaggaguugaua

SEQ ID NO: 88473 - RNA, 20 nt, Artificial Sequence
  Synthetic
uguaccuaaaggaguugaua

SEQ ID NO: 88474 - RNA, 22 nt, Artificial Sequence
  Synthetic
aguguaccuaaaggaguugaua

SEQ ID NO: 88475 - RNA, 23 nt, Artificial Sequence
  Synthetic
aaguguaccuaaaggaguugaua

SEQ ID NO: 88476 - RNA, 24 nt, Artificial Sequence
  Synthetic
uaaguguaccuaaaggaguugaua

SEQ ID NO: 88477 - RNA, 20 nt, Artificial Sequence
  Synthetic
ugggagcuagcacuuugaua

SEQ ID NO: 88478 - RNA, 21 nt, Artificial Sequence
  Synthetic
uugggagcuagcacuuugaua

SEQ ID NO: 88479 - RNA, 22 nt, Artificial Sequence
  Synthetic
cuugggagcuagcacuuugaua

SEQ ID NO: 88480 - RNA, 23 nt, Artificial Sequence
  Synthetic
acuugggagcuagcacuuugaua

SEQ ID NO: 88481 - RNA, 21 nt, Artificial Sequence
  Synthetic
uuuauauuuuucuuuuugaua

SEQ ID NO: 88482 - RNA, 22 nt, Artificial Sequence
  Synthetic
auuuauauuuuucuuuuugaua

SEQ ID NO: 88483 - RNA, 18 nt, Artificial Sequence
  Synthetic
uucaaauuguaaaauaua

SEQ ID NO: 88484 - RNA, 19 nt, Artificial Sequence
  Synthetic
auucaaauuguaaaauaua

SEQ ID NO: 88485 - RNA, 20 nt, Artificial Sequence
  Synthetic
cauucaaauuguaaaauaua

SEQ ID NO: 88486 - RNA, 21 nt, Artificial Sequence
  Synthetic
acauucaaauuguaaaauaua

SEQ ID NO: 88487 - RNA, 23 nt, Artificial Sequence
  Synthetic
ugacauucaaauuguaaaauaua

SEQ ID NO: 88488 - RNA, 24 nt, Artificial Sequence
  Synthetic
cugacauucaaauuguaaaauaua

SEQ ID NO: 88489 - RNA, 20 nt, Artificial Sequence
  Synthetic
aggagcucaauauaaauaua

SEQ ID NO: 88490 - RNA, 21 nt, Artificial Sequence
  Synthetic
aaggagcucaauauaaauaua

SEQ ID NO: 88491 - RNA, 22 nt, Artificial Sequence
  Synthetic
aaaggagcucaauauaaauaua

SEQ ID NO: 88492 - RNA, 23 nt, Artificial Sequence
  Synthetic
uaaaggagcucaauauaaauaua

SEQ ID NO: 88493 - RNA, 24 nt, Artificial Sequence
  Synthetic
uuaaaggagcucaauauaaauaua

SEQ ID NO: 88494 - RNA, 18 nt, Artificial Sequence
  Synthetic
cccugugaaguaaauaua

SEQ ID NO: 88495 - RNA, 19 nt, Artificial Sequence
  Synthetic
ucccugugaaguaaauaua

SEQ ID NO: 88496 - RNA, 20 nt, Artificial Sequence
  Synthetic
cucccugugaaguaaauaua

SEQ ID NO: 88497 - RNA, 21 nt, Artificial Sequence
  Synthetic
ucucccugugaaguaaauaua

SEQ ID NO: 88498 - RNA, 23 nt, Artificial Sequence
  Synthetic
agucucccugugaaguaaauaua

SEQ ID NO: 88499 - RNA, 24 nt, Artificial Sequence
  Synthetic
cagucucccugugaaguaaauaua

SEQ ID NO: 88500 - RNA, 18 nt, Artificial Sequence
  Synthetic
uuacuuuuuaagaauaua

SEQ ID NO: 88501 - RNA, 20 nt, Artificial Sequence
  Synthetic
aguuacuuuuuaagaauaua

SEQ ID NO: 88502 - RNA, 21 nt, Artificial Sequence
  Synthetic
caguuacuuuuuaagaauaua

SEQ ID NO: 88503 - RNA, 22 nt, Artificial Sequence
  Synthetic
ccaguuacuuuuuaagaauaua

SEQ ID NO: 88504 - RNA, 24 nt, Artificial Sequence
  Synthetic
cgccaguuacuuuuuaagaauaua

SEQ ID NO: 88505 - RNA, 19 nt, Artificial Sequence
  Synthetic
uguaauucauaauaauaua

SEQ ID NO: 88506 - RNA, 20 nt, Artificial Sequence
  Synthetic
cuguaauucauaauaauaua

SEQ ID NO: 88507 - RNA, 21 nt, Artificial Sequence
  Synthetic
acuguaauucauaauaauaua

SEQ ID NO: 88508 - RNA, 22 nt, Artificial Sequence
  Synthetic
aacuguaauucauaauaauaua

SEQ ID NO: 88509 - RNA, 23 nt, Artificial Sequence
  Synthetic
uaacuguaauucauaauaauaua

SEQ ID NO: 88510 - RNA, 24 nt, Artificial Sequence
  Synthetic
auaacuguaauucauaauaauaua

SEQ ID NO: 88511 - RNA, 21 nt, Artificial Sequence
  Synthetic
caacuucaaaaaauuaauaua

SEQ ID NO: 88512 - RNA, 22 nt, Artificial Sequence
  Synthetic
acaacuucaaaaaauuaauaua

SEQ ID NO: 88513 - RNA, 23 nt, Artificial Sequence
  Synthetic
uacaacuucaaaaaauuaauaua

SEQ ID NO: 88514 - RNA, 24 nt, Artificial Sequence
  Synthetic
uuacaacuucaaaaaauuaauaua

SEQ ID NO: 88515 - RNA, 18 nt, Artificial Sequence
  Synthetic
uguaaaucucuuaauaua

SEQ ID NO: 88516 - RNA, 19 nt, Artificial Sequence
  Synthetic
auguaaaucucuuaauaua

SEQ ID NO: 88517 - RNA, 20 nt, Artificial Sequence
  Synthetic
aauguaaaucucuuaauaua

SEQ ID NO: 88518 - RNA, 21 nt, Artificial Sequence
  Synthetic
aaauguaaaucucuuaauaua

SEQ ID NO: 88519 - RNA, 23 nt, Artificial Sequence
  Synthetic
ugaaauguaaaucucuuaauaua

SEQ ID NO: 88520 - RNA, 24 nt, Artificial Sequence
  Synthetic
augaaauguaaaucucuuaauaua

SEQ ID NO: 88521 - RNA, 18 nt, Artificial Sequence
  Synthetic
ugauacagguaacauaua

SEQ ID NO: 88522 - RNA, 19 nt, Artificial Sequence
  Synthetic
augauacagguaacauaua

SEQ ID NO: 88523 - RNA, 20 nt, Artificial Sequence
  Synthetic
aaugauacagguaacauaua

SEQ ID NO: 88524 - RNA, 21 nt, Artificial Sequence
  Synthetic
aaaugauacagguaacauaua

SEQ ID NO: 88525 - RNA, 22 nt, Artificial Sequence
  Synthetic
uaaaugauacagguaacauaua

SEQ ID NO: 88526 - RNA, 23 nt, Artificial Sequence
  Synthetic
uuaaaugauacagguaacauaua

SEQ ID NO: 88527 - RNA, 24 nt, Artificial Sequence
  Synthetic
auuaaaugauacagguaacauaua

SEQ ID NO: 88528 - RNA, 18 nt, Artificial Sequence
  Synthetic
uuaauuucaacacauaua

SEQ ID NO: 88529 - RNA, 21 nt, Artificial Sequence
  Synthetic
ugguuaauuucaacacauaua

SEQ ID NO: 88530 - RNA, 23 nt, Artificial Sequence
  Synthetic
ugugguuaauuucaacacauaua

SEQ ID NO: 88531 - RNA, 24 nt, Artificial Sequence
  Synthetic
augugguuaauuucaacacauaua

SEQ ID NO: 88532 - RNA, 18 nt, Artificial Sequence
  Synthetic
aaaacagcaagacauaua

SEQ ID NO: 88533 - RNA, 20 nt, Artificial Sequence
  Synthetic
ugaaaacagcaagacauaua

SEQ ID NO: 88534 - RNA, 21 nt, Artificial Sequence
  Synthetic
augaaaacagcaagacauaua

SEQ ID NO: 88535 - RNA, 24 nt, Artificial Sequence
  Synthetic
uggaugaaaacagcaagacauaua

SEQ ID NO: 88536 - RNA, 18 nt, Artificial Sequence
  Synthetic
uaauugcuuugacauaua

SEQ ID NO: 88537 - RNA, 19 nt, Artificial Sequence
  Synthetic
auaauugcuuugacauaua

SEQ ID NO: 88538 - RNA, 20 nt, Artificial Sequence
  Synthetic
aauaauugcuuugacauaua

SEQ ID NO: 88539 - RNA, 21 nt, Artificial Sequence
  Synthetic
aaauaauugcuuugacauaua

SEQ ID NO: 88540 - RNA, 22 nt, Artificial Sequence
  Synthetic
aaaauaauugcuuugacauaua

SEQ ID NO: 88541 - RNA, 23 nt, Artificial Sequence
  Synthetic
aaaaauaauugcuuugacauaua

SEQ ID NO: 88542 - RNA, 24 nt, Artificial Sequence
  Synthetic
uaaaaauaauugcuuugacauaua

SEQ ID NO: 88543 - RNA, 21 nt, Artificial Sequence
  Synthetic
uacuacauuaacauacauaua

SEQ ID NO: 88544 - RNA, 22 nt, Artificial Sequence
  Synthetic
uuacuacauuaacauacauaua

SEQ ID NO: 88545 - RNA, 23 nt, Artificial Sequence
  Synthetic
uuuacuacauuaacauacauaua

SEQ ID NO: 88546 - RNA, 18 nt, Artificial Sequence
  Synthetic
cuguagaaauaccauaua

SEQ ID NO: 88547 - RNA, 20 nt, Artificial Sequence
  Synthetic
ugcuguagaaauaccauaua

SEQ ID NO: 88548 - RNA, 21 nt, Artificial Sequence
  Synthetic
augcuguagaaauaccauaua

SEQ ID NO: 88549 - RNA, 22 nt, Artificial Sequence
  Synthetic
aaugcuguagaaauaccauaua

SEQ ID NO: 88550 - RNA, 23 nt, Artificial Sequence
  Synthetic
uaaugcuguagaaauaccauaua

SEQ ID NO: 88551 - RNA, 24 nt, Artificial Sequence
  Synthetic
auaaugcuguagaaauaccauaua

SEQ ID NO: 88552 - RNA, 18 nt, Artificial Sequence
  Synthetic
caaauacaagggcauaua

SEQ ID NO: 88553 - RNA, 19 nt, Artificial Sequence
  Synthetic
ucaaauacaagggcauaua

SEQ ID NO: 88554 - RNA, 21 nt, Artificial Sequence
  Synthetic
ugucaaauacaagggcauaua

SEQ ID NO: 88555 - RNA, 22 nt, Artificial Sequence
  Synthetic
augucaaauacaagggcauaua

SEQ ID NO: 88556 - RNA, 23 nt, Artificial Sequence
  Synthetic
caugucaaauacaagggcauaua

SEQ ID NO: 88557 - RNA, 24 nt, Artificial Sequence
  Synthetic
acaugucaaauacaagggcauaua

SEQ ID NO: 88558 - RNA, 18 nt, Artificial Sequence
  Synthetic
ugugagcagcugcauaua

SEQ ID NO: 88559 - RNA, 23 nt, Artificial Sequence
  Synthetic
aggggugugagcagcugcauaua

SEQ ID NO: 88560 - RNA, 18 nt, Artificial Sequence
  Synthetic
aaggggcuacaucauaua

SEQ ID NO: 88561 - RNA, 21 nt, Artificial Sequence
  Synthetic
aggaaggggcuacaucauaua

SEQ ID NO: 88562 - RNA, 22 nt, Artificial Sequence
  Synthetic
uaggaaggggcuacaucauaua

SEQ ID NO: 88563 - RNA, 23 nt, Artificial Sequence
  Synthetic
auaggaaggggcuacaucauaua

SEQ ID NO: 88564 - RNA, 18 nt, Artificial Sequence
  Synthetic
ccaguguauauucauaua

SEQ ID NO: 88565 - RNA, 19 nt, Artificial Sequence
  Synthetic
uccaguguauauucauaua

SEQ ID NO: 88566 - RNA, 20 nt, Artificial Sequence
  Synthetic
uuccaguguauauucauaua

SEQ ID NO: 88567 - RNA, 21 nt, Artificial Sequence
  Synthetic
uuuccaguguauauucauaua

SEQ ID NO: 88568 - RNA, 23 nt, Artificial Sequence
  Synthetic
uguuuccaguguauauucauaua

SEQ ID NO: 88569 - RNA, 24 nt, Artificial Sequence
  Synthetic
uuguuuccaguguauauucauaua

SEQ ID NO: 88570 - RNA, 18 nt, Artificial Sequence
  Synthetic
cugguucacacggauaua

SEQ ID NO: 88571 - RNA, 19 nt, Artificial Sequence
  Synthetic
acugguucacacggauaua

SEQ ID NO: 88572 - RNA, 20 nt, Artificial Sequence
  Synthetic
cacugguucacacggauaua

SEQ ID NO: 88573 - RNA, 22 nt, Artificial Sequence
  Synthetic
agcacugguucacacggauaua

SEQ ID NO: 88574 - RNA, 23 nt, Artificial Sequence
  Synthetic
uagcacugguucacacggauaua

SEQ ID NO: 88575 - RNA, 19 nt, Artificial Sequence
  Synthetic
ugaguggugaguugauaua

SEQ ID NO: 88576 - RNA, 20 nt, Artificial Sequence
  Synthetic
cugaguggugaguugauaua

SEQ ID NO: 88577 - RNA, 21 nt, Artificial Sequence
  Synthetic
ucugaguggugaguugauaua

SEQ ID NO: 88578 - RNA, 22 nt, Artificial Sequence
  Synthetic
aucugaguggugaguugauaua

SEQ ID NO: 88579 - RNA, 23 nt, Artificial Sequence
  Synthetic
aaucugaguggugaguugauaua

SEQ ID NO: 88580 - RNA, 24 nt, Artificial Sequence
  Synthetic
aaaucugaguggugaguugauaua

SEQ ID NO: 88581 - RNA, 18 nt, Artificial Sequence
  Synthetic
aggcaauauuuugauaua

SEQ ID NO: 88582 - RNA, 19 nt, Artificial Sequence
  Synthetic
uaggcaauauuuugauaua

SEQ ID NO: 88583 - RNA, 20 nt, Artificial Sequence
  Synthetic
uuaggcaauauuuugauaua

SEQ ID NO: 88584 - RNA, 21 nt, Artificial Sequence
  Synthetic
auuaggcaauauuuugauaua

SEQ ID NO: 88585 - RNA, 22 nt, Artificial Sequence
  Synthetic
uauuaggcaauauuuugauaua

SEQ ID NO: 88586 - RNA, 23 nt, Artificial Sequence
  Synthetic
uuauuaggcaauauuuugauaua

SEQ ID NO: 88587 - RNA, 24 nt, Artificial Sequence
  Synthetic
auuauuaggcaauauuuugauaua

SEQ ID NO: 88588 - RNA, 18 nt, Artificial Sequence
  Synthetic
cucauguugaaauauaua

SEQ ID NO: 88589 - RNA, 19 nt, Artificial Sequence
  Synthetic
acucauguugaaauauaua

SEQ ID NO: 88590 - RNA, 20 nt, Artificial Sequence
  Synthetic
uacucauguugaaauauaua

SEQ ID NO: 88591 - RNA, 21 nt, Artificial Sequence
  Synthetic
uuacucauguugaaauauaua

SEQ ID NO: 88592 - RNA, 24 nt, Artificial Sequence
  Synthetic
ugguuacucauguugaaauauaua

SEQ ID NO: 88593 - RNA, 21 nt, Artificial Sequence
  Synthetic
cugaagacaaaaacauauaua

SEQ ID NO: 88594 - RNA, 22 nt, Artificial Sequence
  Synthetic
ccugaagacaaaaacauauaua

SEQ ID NO: 88595 - RNA, 23 nt, Artificial Sequence
  Synthetic
cccugaagacaaaaacauauaua

SEQ ID NO: 88596 - RNA, 24 nt, Artificial Sequence
  Synthetic
acccugaagacaaaaacauauaua

SEQ ID NO: 88597 - RNA, 19 nt, Artificial Sequence
  Synthetic
agagauauggccauauaua

SEQ ID NO: 88598 - RNA, 20 nt, Artificial Sequence
  Synthetic
cagagauauggccauauaua

SEQ ID NO: 88599 - RNA, 21 nt, Artificial Sequence
  Synthetic
ucagagauauggccauauaua

SEQ ID NO: 88600 - RNA, 22 nt, Artificial Sequence
  Synthetic
uucagagauauggccauauaua

SEQ ID NO: 88601 - RNA, 23 nt, Artificial Sequence
  Synthetic
uuucagagauauggccauauaua

SEQ ID NO: 88602 - RNA, 24 nt, Artificial Sequence
  Synthetic
uuuucagagauauggccauauaua

SEQ ID NO: 88603 - RNA, 18 nt, Artificial Sequence
  Synthetic
cugcucuucauauauaua

SEQ ID NO: 88604 - RNA, 19 nt, Artificial Sequence
  Synthetic
acugcucuucauauauaua

SEQ ID NO: 88605 - RNA, 20 nt, Artificial Sequence
  Synthetic
uacugcucuucauauauaua

SEQ ID NO: 88606 - RNA, 21 nt, Artificial Sequence
  Synthetic
cuacugcucuucauauauaua

SEQ ID NO: 88607 - RNA, 22 nt, Artificial Sequence
  Synthetic
ucuacugcucuucauauauaua

SEQ ID NO: 88608 - RNA, 23 nt, Artificial Sequence
  Synthetic
cucuacugcucuucauauauaua

SEQ ID NO: 88609 - RNA, 24 nt, Artificial Sequence
  Synthetic
ucucuacugcucuucauauauaua

SEQ ID NO: 88610 - RNA, 18 nt, Artificial Sequence
  Synthetic
aaaacguuugucuauaua

SEQ ID NO: 88611 - RNA, 19 nt, Artificial Sequence
  Synthetic
uaaaacguuugucuauaua

SEQ ID NO: 88612 - RNA, 20 nt, Artificial Sequence
  Synthetic
auaaaacguuugucuauaua

SEQ ID NO: 88613 - RNA, 21 nt, Artificial Sequence
  Synthetic
aauaaaacguuugucuauaua

SEQ ID NO: 88614 - RNA, 22 nt, Artificial Sequence
  Synthetic
aaauaaaacguuugucuauaua

SEQ ID NO: 88615 - RNA, 23 nt, Artificial Sequence
  Synthetic
aaaauaaaacguuugucuauaua

SEQ ID NO: 88616 - RNA, 24 nt, Artificial Sequence
  Synthetic
aaaaauaaaacguuugucuauaua

SEQ ID NO: 88617 - RNA, 18 nt, Artificial Sequence
  Synthetic
uuugaaaguuguuauaua

SEQ ID NO: 88618 - RNA, 19 nt, Artificial Sequence
  Synthetic
uuuugaaaguuguuauaua

SEQ ID NO: 88619 - RNA, 21 nt, Artificial Sequence
  Synthetic
uguuuugaaaguuguuauaua

SEQ ID NO: 88620 - RNA, 23 nt, Artificial Sequence
  Synthetic
uguguuuugaaaguuguuauaua

SEQ ID NO: 88621 - RNA, 24 nt, Artificial Sequence
  Synthetic
auguguuuugaaaguuguuauaua

SEQ ID NO: 88622 - RNA, 18 nt, Artificial Sequence
  Synthetic
cuaaggguagaaacuaua

SEQ ID NO: 88623 - RNA, 19 nt, Artificial Sequence
  Synthetic
ccuaaggguagaaacuaua

SEQ ID NO: 88624 - RNA, 20 nt, Artificial Sequence
  Synthetic
cccuaaggguagaaacuaua

SEQ ID NO: 88625 - RNA, 21 nt, Artificial Sequence
  Synthetic
ucccuaaggguagaaacuaua

SEQ ID NO: 88626 - RNA, 22 nt, Artificial Sequence
  Synthetic
cucccuaaggguagaaacuaua

SEQ ID NO: 88627 - RNA, 24 nt, Artificial Sequence
  Synthetic
ugcucccuaaggguagaaacuaua

SEQ ID NO: 88628 - RNA, 18 nt, Artificial Sequence
  Synthetic
agcgccauguaaacuaua

SEQ ID NO: 88629 - RNA, 19 nt, Artificial Sequence
  Synthetic
cagcgccauguaaacuaua

SEQ ID NO: 88630 - RNA, 20 nt, Artificial Sequence
  Synthetic
acagcgccauguaaacuaua

SEQ ID NO: 88631 - RNA, 21 nt, Artificial Sequence
  Synthetic
aacagcgccauguaaacuaua

SEQ ID NO: 88632 - RNA, 22 nt, Artificial Sequence
  Synthetic
aaacagcgccauguaaacuaua

SEQ ID NO: 88633 - RNA, 23 nt, Artificial Sequence
  Synthetic
aaaacagcgccauguaaacuaua

SEQ ID NO: 88634 - RNA, 24 nt, Artificial Sequence
  Synthetic
uaaaacagcgccauguaaacuaua

SEQ ID NO: 88635 - RNA, 18 nt, Artificial Sequence
  Synthetic
cucaugacaccaacuaua

SEQ ID NO: 88636 - RNA, 19 nt, Artificial Sequence
  Synthetic
ccucaugacaccaacuaua

SEQ ID NO: 88637 - RNA, 20 nt, Artificial Sequence
  Synthetic
accucaugacaccaacuaua

SEQ ID NO: 88638 - RNA, 21 nt, Artificial Sequence
  Synthetic
uaccucaugacaccaacuaua

SEQ ID NO: 88639 - RNA, 22 nt, Artificial Sequence
  Synthetic
auaccucaugacaccaacuaua

SEQ ID NO: 88640 - RNA, 23 nt, Artificial Sequence
  Synthetic
aauaccucaugacaccaacuaua

SEQ ID NO: 88641 - RNA, 24 nt, Artificial Sequence
  Synthetic
aaauaccucaugacaccaacuaua

SEQ ID NO: 88642 - RNA, 18 nt, Artificial Sequence
  Synthetic
caugucgaacuaacuaua

SEQ ID NO: 88643 - RNA, 19 nt, Artificial Sequence
  Synthetic
acaugucgaacuaacuaua

SEQ ID NO: 88644 - RNA, 20 nt, Artificial Sequence
  Synthetic
aacaugucgaacuaacuaua

SEQ ID NO: 88645 - RNA, 21 nt, Artificial Sequence
  Synthetic
uaacaugucgaacuaacuaua

SEQ ID NO: 88646 - RNA, 23 nt, Artificial Sequence
  Synthetic
aguaacaugucgaacuaacuaua

SEQ ID NO: 88647 - RNA, 24 nt, Artificial Sequence
  Synthetic
uaguaacaugucgaacuaacuaua

SEQ ID NO: 88648 - RNA, 18 nt, Artificial Sequence
  Synthetic
agagauuuauaggcuaua

SEQ ID NO: 88649 - RNA, 19 nt, Artificial Sequence
  Synthetic
cagagauuuauaggcuaua

SEQ ID NO: 88650 - RNA, 20 nt, Artificial Sequence
  Synthetic
ucagagauuuauaggcuaua

SEQ ID NO: 88651 - RNA, 21 nt, Artificial Sequence
  Synthetic
aucagagauuuauaggcuaua

SEQ ID NO: 88652 - RNA, 22 nt, Artificial Sequence
  Synthetic
caucagagauuuauaggcuaua

SEQ ID NO: 88653 - RNA, 18 nt, Artificial Sequence
  Synthetic
auuuaggaggcugcuaua

SEQ ID NO: 88654 - RNA, 19 nt, Artificial Sequence
  Synthetic
aauuuaggaggcugcuaua

SEQ ID NO: 88655 - RNA, 22 nt, Artificial Sequence
  Synthetic
uggaauuuaggaggcugcuaua

SEQ ID NO: 88656 - RNA, 23 nt, Artificial Sequence
  Synthetic
uuggaauuuaggaggcugcuaua

SEQ ID NO: 88657 - RNA, 24 nt, Artificial Sequence
  Synthetic
uuuggaauuuaggaggcugcuaua

SEQ ID NO: 88658 - RNA, 18 nt, Artificial Sequence
  Synthetic
uggaaacaaucugcuaua

SEQ ID NO: 88659 - RNA, 19 nt, Artificial Sequence
  Synthetic
auggaaacaaucugcuaua

SEQ ID NO: 88660 - RNA, 20 nt, Artificial Sequence
  Synthetic
aauggaaacaaucugcuaua

SEQ ID NO: 88661 - RNA, 21 nt, Artificial Sequence
  Synthetic
caauggaaacaaucugcuaua

SEQ ID NO: 88662 - RNA, 23 nt, Artificial Sequence
  Synthetic
ugcaauggaaacaaucugcuaua

SEQ ID NO: 88663 - RNA, 24 nt, Artificial Sequence
  Synthetic
augcaauggaaacaaucugcuaua

SEQ ID NO: 88664 - RNA, 18 nt, Artificial Sequence
  Synthetic
uaugcaaauaaaucuaua

SEQ ID NO: 88665 - RNA, 19 nt, Artificial Sequence
  Synthetic
auaugcaaauaaaucuaua

SEQ ID NO: 88666 - RNA, 20 nt, Artificial Sequence
  Synthetic
aauaugcaaauaaaucuaua

SEQ ID NO: 88667 - RNA, 21 nt, Artificial Sequence
  Synthetic
caauaugcaaauaaaucuaua

SEQ ID NO: 88668 - RNA, 22 nt, Artificial Sequence
  Synthetic
acaauaugcaaauaaaucuaua

SEQ ID NO: 88669 - RNA, 24 nt, Artificial Sequence
  Synthetic
agacaauaugcaaauaaaucuaua

SEQ ID NO: 88670 - RNA, 21 nt, Artificial Sequence
  Synthetic
cugucagauaaaauaucuaua

SEQ ID NO: 88671 - RNA, 22 nt, Artificial Sequence
  Synthetic
ucugucagauaaaauaucuaua

SEQ ID NO: 88672 - RNA, 23 nt, Artificial Sequence
  Synthetic
uucugucagauaaaauaucuaua

SEQ ID NO: 88673 - RNA, 24 nt, Artificial Sequence
  Synthetic
uuucugucagauaaaauaucuaua

SEQ ID NO: 88674 - RNA, 18 nt, Artificial Sequence
  Synthetic
ucugacaugaauucuaua

SEQ ID NO: 88675 - RNA, 19 nt, Artificial Sequence
  Synthetic
aucugacaugaauucuaua

SEQ ID NO: 88676 - RNA, 20 nt, Artificial Sequence
  Synthetic
aaucugacaugaauucuaua

SEQ ID NO: 88677 - RNA, 22 nt, Artificial Sequence
  Synthetic
ugaaucugacaugaauucuaua

SEQ ID NO: 88678 - RNA, 23 nt, Artificial Sequence
  Synthetic
augaaucugacaugaauucuaua

SEQ ID NO: 88679 - RNA, 18 nt, Artificial Sequence
  Synthetic
aauucuugguauucuaua

SEQ ID NO: 88680 - RNA, 19 nt, Artificial Sequence
  Synthetic
uaauucuugguauucuaua

SEQ ID NO: 88681 - RNA, 20 nt, Artificial Sequence
  Synthetic
cuaauucuugguauucuaua

SEQ ID NO: 88682 - RNA, 21 nt, Artificial Sequence
  Synthetic
ccuaauucuugguauucuaua

SEQ ID NO: 88683 - RNA, 22 nt, Artificial Sequence
  Synthetic
uccuaauucuugguauucuaua

SEQ ID NO: 88684 - RNA, 23 nt, Artificial Sequence
  Synthetic
cuccuaauucuugguauucuaua

SEQ ID NO: 88685 - RNA, 24 nt, Artificial Sequence
  Synthetic
ccuccuaauucuugguauucuaua

SEQ ID NO: 88686 - RNA, 18 nt, Artificial Sequence
  Synthetic
uaaaccuuauguucuaua

SEQ ID NO: 88687 - RNA, 20 nt, Artificial Sequence
  Synthetic
uguaaaccuuauguucuaua

SEQ ID NO: 88688 - RNA, 21 nt, Artificial Sequence
  Synthetic
auguaaaccuuauguucuaua

SEQ ID NO: 88689 - RNA, 22 nt, Artificial Sequence
  Synthetic
aauguaaaccuuauguucuaua

SEQ ID NO: 88690 - RNA, 23 nt, Artificial Sequence
  Synthetic
aaauguaaaccuuauguucuaua

SEQ ID NO: 88691 - RNA, 24 nt, Artificial Sequence
  Synthetic
uaaauguaaaccuuauguucuaua

SEQ ID NO: 88692 - RNA, 18 nt, Artificial Sequence
  Synthetic
uuugcauacauaaguaua

SEQ ID NO: 88693 - RNA, 19 nt, Artificial Sequence
  Synthetic
auuugcauacauaaguaua

SEQ ID NO: 88694 - RNA, 20 nt, Artificial Sequence
  Synthetic
aauuugcauacauaaguaua

SEQ ID NO: 88695 - RNA, 22 nt, Artificial Sequence
  Synthetic
cgaauuugcauacauaaguaua

SEQ ID NO: 88696 - RNA, 23 nt, Artificial Sequence
  Synthetic
ccgaauuugcauacauaaguaua

SEQ ID NO: 88697 - RNA, 24 nt, Artificial Sequence
  Synthetic
uccgaauuugcauacauaaguaua

SEQ ID NO: 88698 - RNA, 18 nt, Artificial Sequence
  Synthetic
uuuaugauguuaaguaua

SEQ ID NO: 88699 - RNA, 19 nt, Artificial Sequence
  Synthetic
uuuuaugauguuaaguaua

SEQ ID NO: 88700 - RNA, 20 nt, Artificial Sequence
  Synthetic
uuuuuaugauguuaaguaua

SEQ ID NO: 88701 - RNA, 21 nt, Artificial Sequence
  Synthetic
cuuuuuaugauguuaaguaua

SEQ ID NO: 88702 - RNA, 22 nt, Artificial Sequence
  Synthetic
acuuuuuaugauguuaaguaua

SEQ ID NO: 88703 - RNA, 23 nt, Artificial Sequence
  Synthetic
uacuuuuuaugauguuaaguaua

SEQ ID NO: 88704 - RNA, 24 nt, Artificial Sequence
  Synthetic
cuacuuuuuaugauguuaaguaua

SEQ ID NO: 88705 - RNA, 18 nt, Artificial Sequence
  Synthetic
ugcccacaaaacaguaua

SEQ ID NO: 88706 - RNA, 20 nt, Artificial Sequence
  Synthetic
ugugcccacaaaacaguaua

SEQ ID NO: 88707 - RNA, 21 nt, Artificial Sequence
  Synthetic
augugcccacaaaacaguaua

SEQ ID NO: 88708 - RNA, 22 nt, Artificial Sequence
  Synthetic
uaugugcccacaaaacaguaua

SEQ ID NO: 88709 - RNA, 23 nt, Artificial Sequence
  Synthetic
auaugugcccacaaaacaguaua

SEQ ID NO: 88710 - RNA, 24 nt, Artificial Sequence
  Synthetic
aauaugugcccacaaaacaguaua

SEQ ID NO: 88711 - RNA, 20 nt, Artificial Sequence
  Synthetic
ugguaagaaugaacaguaua

SEQ ID NO: 88712 - RNA, 21 nt, Artificial Sequence
  Synthetic
uugguaagaaugaacaguaua

SEQ ID NO: 88713 - RNA, 22 nt, Artificial Sequence
  Synthetic
auugguaagaaugaacaguaua

SEQ ID NO: 88714 - RNA, 23 nt, Artificial Sequence
  Synthetic
cauugguaagaaugaacaguaua

SEQ ID NO: 88715 - RNA, 24 nt, Artificial Sequence
  Synthetic
ucauugguaagaaugaacaguaua

SEQ ID NO: 88716 - RNA, 18 nt, Artificial Sequence
  Synthetic
aagugaaaucucaguaua

SEQ ID NO: 88717 - RNA, 19 nt, Artificial Sequence
  Synthetic
uaagugaaaucucaguaua

SEQ ID NO: 88718 - RNA, 20 nt, Artificial Sequence
  Synthetic
cuaagugaaaucucaguaua

SEQ ID NO: 88719 - RNA, 21 nt, Artificial Sequence
  Synthetic
acuaagugaaaucucaguaua

SEQ ID NO: 88720 - RNA, 22 nt, Artificial Sequence
  Synthetic
uacuaagugaaaucucaguaua

SEQ ID NO: 88721 - RNA, 23 nt, Artificial Sequence
  Synthetic
auacuaagugaaaucucaguaua

SEQ ID NO: 88722 - RNA, 24 nt, Artificial Sequence
  Synthetic
uauacuaagugaaaucucaguaua

SEQ ID NO: 88723 - RNA, 18 nt, Artificial Sequence
  Synthetic
aauugguccuagaguaua

SEQ ID NO: 88724 - RNA, 20 nt, Artificial Sequence
  Synthetic
agaauugguccuagaguaua

SEQ ID NO: 88725 - RNA, 21 nt, Artificial Sequence
  Synthetic
uagaauugguccuagaguaua

SEQ ID NO: 88726 - RNA, 24 nt, Artificial Sequence
  Synthetic
ugguagaauugguccuagaguaua

SEQ ID NO: 88727 - RNA, 18 nt, Artificial Sequence
  Synthetic
uguggagauucuaguaua

SEQ ID NO: 88728 - RNA, 19 nt, Artificial Sequence
  Synthetic
uuguggagauucuaguaua

SEQ ID NO: 88729 - RNA, 20 nt, Artificial Sequence
  Synthetic
uuuguggagauucuaguaua

SEQ ID NO: 88730 - RNA, 21 nt, Artificial Sequence
  Synthetic
cuuuguggagauucuaguaua

SEQ ID NO: 88731 - RNA, 22 nt, Artificial Sequence
  Synthetic
ccuuuguggagauucuaguaua

SEQ ID NO: 88732 - RNA, 23 nt, Artificial Sequence
  Synthetic
accuuuguggagauucuaguaua

SEQ ID NO: 88733 - RNA, 24 nt, Artificial Sequence
  Synthetic
aaccuuuguggagauucuaguaua

SEQ ID NO: 88734 - RNA, 18 nt, Artificial Sequence
  Synthetic
uucgguaugaaagguaua

SEQ ID NO: 88735 - RNA, 20 nt, Artificial Sequence
  Synthetic
uguucgguaugaaagguaua

SEQ ID NO: 88736 - RNA, 21 nt, Artificial Sequence
  Synthetic
uuguucgguaugaaagguaua

SEQ ID NO: 88737 - RNA, 22 nt, Artificial Sequence
  Synthetic
cuuguucgguaugaaagguaua

SEQ ID NO: 88738 - RNA, 24 nt, Artificial Sequence
  Synthetic
ugcuuguucgguaugaaagguaua

SEQ ID NO: 88739 - RNA, 19 nt, Artificial Sequence
  Synthetic
ugacaacucccaagguaua

SEQ ID NO: 88740 - RNA, 20 nt, Artificial Sequence
  Synthetic
cugacaacucccaagguaua

SEQ ID NO: 88741 - RNA, 21 nt, Artificial Sequence
  Synthetic
acugacaacucccaagguaua

SEQ ID NO: 88742 - RNA, 23 nt, Artificial Sequence
  Synthetic
agacugacaacucccaagguaua

SEQ ID NO: 88743 - RNA, 21 nt, Artificial Sequence
  Synthetic
aggguuacuugcaauuguaua

SEQ ID NO: 88744 - RNA, 22 nt, Artificial Sequence
  Synthetic
caggguuacuugcaauuguaua

SEQ ID NO: 88745 - RNA, 23 nt, Artificial Sequence
  Synthetic
ccaggguuacuugcaauuguaua

SEQ ID NO: 88746 - RNA, 24 nt, Artificial Sequence
  Synthetic
uccaggguuacuugcaauuguaua

SEQ ID NO: 88747 - RNA, 18 nt, Artificial Sequence
  Synthetic
uuuccagauucuuguaua

SEQ ID NO: 88748 - RNA, 19 nt, Artificial Sequence
  Synthetic
uuuuccagauucuuguaua

SEQ ID NO: 88749 - RNA, 20 nt, Artificial Sequence
  Synthetic
uuuuuccagauucuuguaua

SEQ ID NO: 88750 - RNA, 21 nt, Artificial Sequence
  Synthetic
uuuuuuccagauucuuguaua

SEQ ID NO: 88751 - RNA, 22 nt, Artificial Sequence
  Synthetic
uuuuuuuccagauucuuguaua

SEQ ID NO: 88752 - RNA, 23 nt, Artificial Sequence
  Synthetic
uuuuuuuuccagauucuuguaua

SEQ ID NO: 88753 - RNA, 24 nt, Artificial Sequence
  Synthetic
uuuuuuuuuccagauucuuguaua

SEQ ID NO: 88754 - RNA, 18 nt, Artificial Sequence
  Synthetic
auaauaacacagauuaua

SEQ ID NO: 88755 - RNA, 19 nt, Artificial Sequence
  Synthetic
aauaauaacacagauuaua

SEQ ID NO: 88756 - RNA, 20 nt, Artificial Sequence
  Synthetic
aaauaauaacacagauuaua

SEQ ID NO: 88757 - RNA, 21 nt, Artificial Sequence
  Synthetic
caaauaauaacacagauuaua

SEQ ID NO: 88758 - RNA, 22 nt, Artificial Sequence
  Synthetic
ccaaauaauaacacagauuaua

SEQ ID NO: 88759 - RNA, 23 nt, Artificial Sequence
  Synthetic
uccaaauaauaacacagauuaua

SEQ ID NO: 88760 - RNA, 18 nt, Artificial Sequence
  Synthetic
augaacuaaucacuuaua

SEQ ID NO: 88761 - RNA, 19 nt, Artificial Sequence
  Synthetic
uaugaacuaaucacuuaua

SEQ ID NO: 88762 - RNA, 20 nt, Artificial Sequence
  Synthetic
auaugaacuaaucacuuaua

SEQ ID NO: 88763 - RNA, 22 nt, Artificial Sequence
  Synthetic
ugauaugaacuaaucacuuaua

SEQ ID NO: 88764 - RNA, 23 nt, Artificial Sequence
  Synthetic
uugauaugaacuaaucacuuaua

SEQ ID NO: 88765 - RNA, 24 nt, Artificial Sequence
  Synthetic
auugauaugaacuaaucacuuaua

SEQ ID NO: 88766 - RNA, 18 nt, Artificial Sequence
  Synthetic
auaacuuacuuacuuaua

SEQ ID NO: 88767 - RNA, 19 nt, Artificial Sequence
  Synthetic
cauaacuuacuuacuuaua

SEQ ID NO: 88768 - RNA, 20 nt, Artificial Sequence
  Synthetic
ucauaacuuacuuacuuaua

SEQ ID NO: 88769 - RNA, 21 nt, Artificial Sequence
  Synthetic
cucauaacuuacuuacuuaua

SEQ ID NO: 88770 - RNA, 22 nt, Artificial Sequence
  Synthetic
acucauaacuuacuuacuuaua

SEQ ID NO: 88771 - RNA, 23 nt, Artificial Sequence
  Synthetic
cacucauaacuuacuuacuuaua

SEQ ID NO: 88772 - RNA, 24 nt, Artificial Sequence
  Synthetic
ccacucauaacuuacuuacuuaua

SEQ ID NO: 88773 - RNA, 21 nt, Artificial Sequence
  Synthetic
aucuuuuauguuuuucuuaua

SEQ ID NO: 88774 - RNA, 22 nt, Artificial Sequence
  Synthetic
uaucuuuuauguuuuucuuaua

SEQ ID NO: 88775 - RNA, 23 nt, Artificial Sequence
  Synthetic
cuaucuuuuauguuuuucuuaua

SEQ ID NO: 88776 - RNA, 24 nt, Artificial Sequence
  Synthetic
ccuaucuuuuauguuuuucuuaua

SEQ ID NO: 88777 - RNA, 18 nt, Artificial Sequence
  Synthetic
aggguugaagaaguuaua

SEQ ID NO: 88778 - RNA, 19 nt, Artificial Sequence
  Synthetic
aaggguugaagaaguuaua

SEQ ID NO: 88779 - RNA, 20 nt, Artificial Sequence
  Synthetic
aaaggguugaagaaguuaua

SEQ ID NO: 88780 - RNA, 21 nt, Artificial Sequence
  Synthetic
uaaaggguugaagaaguuaua

SEQ ID NO: 88781 - RNA, 22 nt, Artificial Sequence
  Synthetic
auaaaggguugaagaaguuaua

SEQ ID NO: 88782 - RNA, 23 nt, Artificial Sequence
  Synthetic
uauaaaggguugaagaaguuaua

SEQ ID NO: 88783 - RNA, 24 nt, Artificial Sequence
  Synthetic
auauaaaggguugaagaaguuaua

SEQ ID NO: 88784 - RNA, 18 nt, Artificial Sequence
  Synthetic
auuaagacauauguuaua

SEQ ID NO: 88785 - RNA, 19 nt, Artificial Sequence
  Synthetic
aauuaagacauauguuaua

SEQ ID NO: 88786 - RNA, 20 nt, Artificial Sequence
  Synthetic
caauuaagacauauguuaua

SEQ ID NO: 88787 - RNA, 22 nt, Artificial Sequence
  Synthetic
agcaauuaagacauauguuaua

SEQ ID NO: 88788 - RNA, 23 nt, Artificial Sequence
  Synthetic
cagcaauuaagacauauguuaua

SEQ ID NO: 88789 - RNA, 24 nt, Artificial Sequence
  Synthetic
acagcaauuaagacauauguuaua

SEQ ID NO: 88790 - RNA, 18 nt, Artificial Sequence
  Synthetic
auuaggaagccuguuaua

SEQ ID NO: 88791 - RNA, 19 nt, Artificial Sequence
  Synthetic
aauuaggaagccuguuaua

SEQ ID NO: 88792 - RNA, 21 nt, Artificial Sequence
  Synthetic
ugaauuaggaagccuguuaua

SEQ ID NO: 88793 - RNA, 22 nt, Artificial Sequence
  Synthetic
uugaauuaggaagccuguuaua

SEQ ID NO: 88794 - RNA, 23 nt, Artificial Sequence
  Synthetic
auugaauuaggaagccuguuaua

SEQ ID NO: 88795 - RNA, 24 nt, Artificial Sequence
  Synthetic
aauugaauuaggaagccuguuaua

SEQ ID NO: 88796 - RNA, 18 nt, Artificial Sequence
  Synthetic
aaagugaaauguguuaua

SEQ ID NO: 88797 - RNA, 19 nt, Artificial Sequence
  Synthetic
uaaagugaaauguguuaua

SEQ ID NO: 88798 - RNA, 20 nt, Artificial Sequence
  Synthetic
uuaaagugaaauguguuaua

SEQ ID NO: 88799 - RNA, 21 nt, Artificial Sequence
  Synthetic
cuuaaagugaaauguguuaua

SEQ ID NO: 88800 - RNA, 22 nt, Artificial Sequence
  Synthetic
ucuuaaagugaaauguguuaua

SEQ ID NO: 88801 - RNA, 23 nt, Artificial Sequence
  Synthetic
uucuuaaagugaaauguguuaua

SEQ ID NO: 88802 - RNA, 24 nt, Artificial Sequence
  Synthetic
auucuuaaagugaaauguguuaua

SEQ ID NO: 88803 - RNA, 18 nt, Artificial Sequence
  Synthetic
uaauuguaauguguuaua

SEQ ID NO: 88804 - RNA, 19 nt, Artificial Sequence
  Synthetic
auaauuguaauguguuaua

SEQ ID NO: 88805 - RNA, 20 nt, Artificial Sequence
  Synthetic
uauaauuguaauguguuaua

SEQ ID NO: 88806 - RNA, 21 nt, Artificial Sequence
  Synthetic
auauaauuguaauguguuaua

SEQ ID NO: 88807 - RNA, 22 nt, Artificial Sequence
  Synthetic
uauauaauuguaauguguuaua

SEQ ID NO: 88808 - RNA, 23 nt, Artificial Sequence
  Synthetic
uuauauaauuguaauguguuaua

SEQ ID NO: 88809 - RNA, 24 nt, Artificial Sequence
  Synthetic
auuauauaauuguaauguguuaua

SEQ ID NO: 88810 - RNA, 18 nt, Artificial Sequence
  Synthetic
ccugcucaaaaauuuaua

SEQ ID NO: 88811 - RNA, 19 nt, Artificial Sequence
  Synthetic
cccugcucaaaaauuuaua

SEQ ID NO: 88812 - RNA, 20 nt, Artificial Sequence
  Synthetic
ucccugcucaaaaauuuaua

SEQ ID NO: 88813 - RNA, 21 nt, Artificial Sequence
  Synthetic
uucccugcucaaaaauuuaua

SEQ ID NO: 88814 - RNA, 22 nt, Artificial Sequence
  Synthetic
auucccugcucaaaaauuuaua

SEQ ID NO: 88815 - RNA, 18 nt, Artificial Sequence
  Synthetic
cuagugauaggauuuaua

SEQ ID NO: 88816 - RNA, 19 nt, Artificial Sequence
  Synthetic
acuagugauaggauuuaua

SEQ ID NO: 88817 - RNA, 20 nt, Artificial Sequence
  Synthetic
uacuagugauaggauuuaua

SEQ ID NO: 88818 - RNA, 21 nt, Artificial Sequence
  Synthetic
auacuagugauaggauuuaua

SEQ ID NO: 88819 - RNA, 22 nt, Artificial Sequence
  Synthetic
aauacuagugauaggauuuaua

SEQ ID NO: 88820 - RNA, 24 nt, Artificial Sequence
  Synthetic
cgaauacuagugauaggauuuaua

SEQ ID NO: 88821 - RNA, 19 nt, Artificial Sequence
  Synthetic
ugacaauucuauauuuaua

SEQ ID NO: 88822 - RNA, 20 nt, Artificial Sequence
  Synthetic
augacaauucuauauuuaua

SEQ ID NO: 88823 - RNA, 22 nt, Artificial Sequence
  Synthetic
ugaauaauaauuuauauuuaua

SEQ ID NO: 88824 - RNA, 23 nt, Artificial Sequence
  Synthetic
uugaauaauaauuuauauuuaua

SEQ ID NO: 88825 - RNA, 24 nt, Artificial Sequence
  Synthetic
auugaauaauaauuuauauuuaua

SEQ ID NO: 88826 - RNA, 18 nt, Artificial Sequence
  Synthetic
aaauucucauuauuuaua

SEQ ID NO: 88827 - RNA, 19 nt, Artificial Sequence
  Synthetic
aaaauucucauuauuuaua

SEQ ID NO: 88828 - RNA, 20 nt, Artificial Sequence
  Synthetic
caaaauucucauuauuuaua

SEQ ID NO: 88829 - RNA, 21 nt, Artificial Sequence
  Synthetic
acaaaauucucauuauuuaua

SEQ ID NO: 88830 - RNA, 22 nt, Artificial Sequence
  Synthetic
aacaaaauucucauuauuuaua

SEQ ID NO: 88831 - RNA, 23 nt, Artificial Sequence
  Synthetic
aaacaaaauucucauuauuuaua

SEQ ID NO: 88832 - RNA, 18 nt, Artificial Sequence
  Synthetic
auuguuuucaccuuuaua

SEQ ID NO: 88833 - RNA, 19 nt, Artificial Sequence
  Synthetic
uauuguuuucaccuuuaua

SEQ ID NO: 88834 - RNA, 20 nt, Artificial Sequence
  Synthetic
cuauuguuuucaccuuuaua

SEQ ID NO: 88835 - RNA, 21 nt, Artificial Sequence
  Synthetic
ucuauuguuuucaccuuuaua

SEQ ID NO: 88836 - RNA, 23 nt, Artificial Sequence
  Synthetic
ugucuauuguuuucaccuuuaua

SEQ ID NO: 88837 - RNA, 24 nt, Artificial Sequence
  Synthetic
augucuauuguuuucaccuuuaua

SEQ ID NO: 88838 - RNA, 18 nt, Artificial Sequence
  Synthetic
cauaaauauaauuuuaua

SEQ ID NO: 88839 - RNA, 19 nt, Artificial Sequence
  Synthetic
acauaaauauaauuuuaua

SEQ ID NO: 88840 - RNA, 20 nt, Artificial Sequence
  Synthetic
cacauaaauauaauuuuaua

SEQ ID NO: 88841 - RNA, 21 nt, Artificial Sequence
  Synthetic
ccacauaaauauaauuuuaua

SEQ ID NO: 88842 - RNA, 22 nt, Artificial Sequence
  Synthetic
uccacauaaauauaauuuuaua

SEQ ID NO: 88843 - RNA, 24 nt, Artificial Sequence
  Synthetic
aguccacauaaauauaauuuuaua

SEQ ID NO: 88844 - RNA, 18 nt, Artificial Sequence
  Synthetic
agcaguugugauuuuaua

SEQ ID NO: 88845 - RNA, 23 nt, Artificial Sequence
  Synthetic
uggggagcaguugugauuuuaua

SEQ ID NO: 88846 - RNA, 24 nt, Artificial Sequence
  Synthetic
auggggagcaguugugauuuuaua

SEQ ID NO: 88847 - RNA, 18 nt, Artificial Sequence
  Synthetic
auguauuaauauuuuaua

SEQ ID NO: 88848 - RNA, 19 nt, Artificial Sequence
  Synthetic
cauguauuaauauuuuaua

SEQ ID NO: 88849 - RNA, 20 nt, Artificial Sequence
  Synthetic
ccauguauuaauauuuuaua

SEQ ID NO: 88850 - RNA, 21 nt, Artificial Sequence
  Synthetic
uccauguauuaauauuuuaua

SEQ ID NO: 88851 - RNA, 22 nt, Artificial Sequence
  Synthetic
uuccauguauuaauauuuuaua

SEQ ID NO: 88852 - RNA, 24 nt, Artificial Sequence
  Synthetic
uguuccauguauuaauauuuuaua

SEQ ID NO: 88853 - RNA, 18 nt, Artificial Sequence
  Synthetic
uugauugaaccuuuuaua

SEQ ID NO: 88854 - RNA, 19 nt, Artificial Sequence
  Synthetic
cuugauugaaccuuuuaua

SEQ ID NO: 88855 - RNA, 20 nt, Artificial Sequence
  Synthetic
ccuugauugaaccuuuuaua

SEQ ID NO: 88856 - RNA, 21 nt, Artificial Sequence
  Synthetic
cccuugauugaaccuuuuaua

SEQ ID NO: 88857 - RNA, 22 nt, Artificial Sequence
  Synthetic
ucccuugauugaaccuuuuaua

SEQ ID NO: 88858 - RNA, 23 nt, Artificial Sequence
  Synthetic
cucccuugauugaaccuuuuaua

SEQ ID NO: 88859 - RNA, 24 nt, Artificial Sequence
  Synthetic
ucucccuugauugaaccuuuuaua

SEQ ID NO: 88860 - RNA, 18 nt, Artificial Sequence
  Synthetic
cuacaucauucaaaacua

SEQ ID NO: 88861 - RNA, 19 nt, Artificial Sequence
  Synthetic
acuacaucauucaaaacua

SEQ ID NO: 88862 - RNA, 20 nt, Artificial Sequence
  Synthetic
aacuacaucauucaaaacua

SEQ ID NO: 88863 - RNA, 21 nt, Artificial Sequence
  Synthetic
uaacuacaucauucaaaacua

SEQ ID NO: 88864 - RNA, 22 nt, Artificial Sequence
  Synthetic
auaacuacaucauucaaaacua

SEQ ID NO: 88865 - RNA, 23 nt, Artificial Sequence
  Synthetic
aauaacuacaucauucaaaacua

SEQ ID NO: 88866 - RNA, 24 nt, Artificial Sequence
  Synthetic
aaauaacuacaucauucaaaacua

SEQ ID NO: 88867 - RNA, 18 nt, Artificial Sequence
  Synthetic
aaaguauuuaauaaacua

SEQ ID NO: 88868 - RNA, 19 nt, Artificial Sequence
  Synthetic
uaaaguauuuaauaaacua

SEQ ID NO: 88869 - RNA, 20 nt, Artificial Sequence
  Synthetic
cuaaaguauuuaauaaacua

SEQ ID NO: 88870 - RNA, 21 nt, Artificial Sequence
  Synthetic
ucuaaaguauuuaauaaacua

SEQ ID NO: 88871 - RNA, 22 nt, Artificial Sequence
  Synthetic
aucuaaaguauuuaauaaacua

SEQ ID NO: 88872 - RNA, 23 nt, Artificial Sequence
  Synthetic
uaucuaaaguauuuaauaaacua

SEQ ID NO: 88873 - RNA, 24 nt, Artificial Sequence
  Synthetic
auaucuaaaguauuuaauaaacua

SEQ ID NO: 88874 - RNA, 19 nt, Artificial Sequence
  Synthetic
uggucuuauuuaacaacua

SEQ ID NO: 88875 - RNA, 20 nt, Artificial Sequence
  Synthetic
auggucuuauuuaacaacua

SEQ ID NO: 88876 - RNA, 21 nt, Artificial Sequence
  Synthetic
aauggucuuauuuaacaacua

SEQ ID NO: 88877 - RNA, 22 nt, Artificial Sequence
  Synthetic
uaauggucuuauuuaacaacua

SEQ ID NO: 88878 - RNA, 23 nt, Artificial Sequence
  Synthetic
uuaauggucuuauuuaacaacua

SEQ ID NO: 88879 - RNA, 24 nt, Artificial Sequence
  Synthetic
uuuaauggucuuauuuaacaacua

SEQ ID NO: 88880 - RNA, 18 nt, Artificial Sequence
  Synthetic
auagaacaaauucaacua

SEQ ID NO: 88881 - RNA, 19 nt, Artificial Sequence
  Synthetic
uauagaacaaauucaacua

SEQ ID NO: 88882 - RNA, 20 nt, Artificial Sequence
  Synthetic
auauagaacaaauucaacua

SEQ ID NO: 88883 - RNA, 21 nt, Artificial Sequence
  Synthetic
aauauagaacaaauucaacua

SEQ ID NO: 88884 - RNA, 23 nt, Artificial Sequence
  Synthetic
agaauauagaacaaauucaacua

SEQ ID NO: 88885 - RNA, 24 nt, Artificial Sequence
  Synthetic
aagaauauagaacaaauucaacua

SEQ ID NO: 88886 - RNA, 18 nt, Artificial Sequence
  Synthetic
ugccucccuccagaacua

SEQ ID NO: 88887 - RNA, 19 nt, Artificial Sequence
  Synthetic
uugccucccuccagaacua

SEQ ID NO: 88888 - RNA, 20 nt, Artificial Sequence
  Synthetic
uuugccucccuccagaacua

SEQ ID NO: 88889 - RNA, 21 nt, Artificial Sequence
  Synthetic
uuuugccucccuccagaacua

SEQ ID NO: 88890 - RNA, 22 nt, Artificial Sequence
  Synthetic
uuuuugccucccuccagaacua

SEQ ID NO: 88891 - RNA, 23 nt, Artificial Sequence
  Synthetic
cuuuuugccucccuccagaacua

SEQ ID NO: 88892 - RNA, 24 nt, Artificial Sequence
  Synthetic
ccuuuuugccucccuccagaacua

SEQ ID NO: 88893 - RNA, 19 nt, Artificial Sequence
  Synthetic
agugaaggaugaggaacua

SEQ ID NO: 88894 - RNA, 20 nt, Artificial Sequence
  Synthetic
aagugaaggaugaggaacua

SEQ ID NO: 88895 - RNA, 21 nt, Artificial Sequence
  Synthetic
aaagugaaggaugaggaacua

SEQ ID NO: 88896 - RNA, 22 nt, Artificial Sequence
  Synthetic
uaaagugaaggaugaggaacua

SEQ ID NO: 88897 - RNA, 23 nt, Artificial Sequence
  Synthetic
auaaagugaaggaugaggaacua

SEQ ID NO: 88898 - RNA, 24 nt, Artificial Sequence
  Synthetic
aauaaagugaaggaugaggaacua

SEQ ID NO: 88899 - RNA, 18 nt, Artificial Sequence
  Synthetic
auaguaggggaauaacua

SEQ ID NO: 88900 - RNA, 19 nt, Artificial Sequence
  Synthetic
cauaguaggggaauaacua

SEQ ID NO: 88901 - RNA, 20 nt, Artificial Sequence
  Synthetic
ucauaguaggggaauaacua

SEQ ID NO: 88902 - RNA, 21 nt, Artificial Sequence
  Synthetic
uucauaguaggggaauaacua

SEQ ID NO: 88903 - RNA, 22 nt, Artificial Sequence
  Synthetic
uuucauaguaggggaauaacua

SEQ ID NO: 88904 - RNA, 23 nt, Artificial Sequence
  Synthetic
cuuucauaguaggggaauaacua

SEQ ID NO: 88905 - RNA, 24 nt, Artificial Sequence
  Synthetic
acuuucauaguaggggaauaacua

SEQ ID NO: 88906 - RNA, 18 nt, Artificial Sequence
  Synthetic
uaugaauauccuuaacua

SEQ ID NO: 88907 - RNA, 19 nt, Artificial Sequence
  Synthetic
uuaugaauauccuuaacua

SEQ ID NO: 88908 - RNA, 21 nt, Artificial Sequence
  Synthetic
uguuaugaauauccuuaacua

SEQ ID NO: 88909 - RNA, 22 nt, Artificial Sequence
  Synthetic
auguuaugaauauccuuaacua

SEQ ID NO: 88910 - RNA, 23 nt, Artificial Sequence
  Synthetic
cauguuaugaauauccuuaacua

SEQ ID NO: 88911 - RNA, 24 nt, Artificial Sequence
  Synthetic
ccauguuaugaauauccuuaacua

SEQ ID NO: 88912 - RNA, 18 nt, Artificial Sequence
  Synthetic
auaaauaaaucaacacua

SEQ ID NO: 88913 - RNA, 19 nt, Artificial Sequence
  Synthetic
cauaaauaaaucaacacua

SEQ ID NO: 88914 - RNA, 20 nt, Artificial Sequence
  Synthetic
ucauaaauaaaucaacacua

SEQ ID NO: 88915 - RNA, 21 nt, Artificial Sequence
  Synthetic
aucauaaauaaaucaacacua

SEQ ID NO: 88916 - RNA, 22 nt, Artificial Sequence
  Synthetic
aaucauaaauaaaucaacacua

SEQ ID NO: 88917 - RNA, 23 nt, Artificial Sequence
  Synthetic
uaaucauaaauaaaucaacacua

SEQ ID NO: 88918 - RNA, 24 nt, Artificial Sequence
  Synthetic
auaaucauaaauaaaucaacacua

SEQ ID NO: 88919 - RNA, 18 nt, Artificial Sequence
  Synthetic
aaacaauucaauacacua

SEQ ID NO: 88920 - RNA, 19 nt, Artificial Sequence
  Synthetic
aaaacaauucaauacacua

SEQ ID NO: 88921 - RNA, 20 nt, Artificial Sequence
  Synthetic
caaaacaauucaauacacua

SEQ ID NO: 88922 - RNA, 21 nt, Artificial Sequence
  Synthetic
acaaaacaauucaauacacua

SEQ ID NO: 88923 - RNA, 22 nt, Artificial Sequence
  Synthetic
cacaaaacaauucaauacacua

SEQ ID NO: 88924 - RNA, 23 nt, Artificial Sequence
  Synthetic
ccacaaaacaauucaauacacua

SEQ ID NO: 88925 - RNA, 18 nt, Artificial Sequence
  Synthetic
agcucugaacuagcacua

SEQ ID NO: 88926 - RNA, 20 nt, Artificial Sequence
  Synthetic
agagcucugaacuagcacua

SEQ ID NO: 88927 - RNA, 21 nt, Artificial Sequence
  Synthetic
cagagcucugaacuagcacua

SEQ ID NO: 88928 - RNA, 22 nt, Artificial Sequence
  Synthetic
acagagcucugaacuagcacua

SEQ ID NO: 88929 - RNA, 23 nt, Artificial Sequence
  Synthetic
cacagagcucugaacuagcacua

SEQ ID NO: 88930 - RNA, 18 nt, Artificial Sequence
  Synthetic
auugagcuaauggcacua

SEQ ID NO: 88931 - RNA, 19 nt, Artificial Sequence
  Synthetic
aauugagcuaauggcacua

SEQ ID NO: 88932 - RNA, 21 nt, Artificial Sequence
  Synthetic
agaauugagcuaauggcacua

SEQ ID NO: 88933 - RNA, 22 nt, Artificial Sequence
  Synthetic
aagaauugagcuaauggcacua

SEQ ID NO: 88934 - RNA, 24 nt, Artificial Sequence
  Synthetic
ugaagaauugagcuaauggcacua

SEQ ID NO: 88935 - RNA, 18 nt, Artificial Sequence
  Synthetic
uauucucaaaaaucacua

SEQ ID NO: 88936 - RNA, 19 nt, Artificial Sequence
  Synthetic
cuauucucaaaaaucacua

SEQ ID NO: 88937 - RNA, 20 nt, Artificial Sequence
  Synthetic
ccuauucucaaaaaucacua

SEQ ID NO: 88938 - RNA, 21 nt, Artificial Sequence
  Synthetic
accuauucucaaaaaucacua

SEQ ID NO: 88939 - RNA, 23 nt, Artificial Sequence
  Synthetic
ugaccuauucucaaaaaucacua

SEQ ID NO: 88940 - RNA, 24 nt, Artificial Sequence
  Synthetic
uugaccuauucucaaaaaucacua

SEQ ID NO: 88941 - RNA, 18 nt, Artificial Sequence
  Synthetic
acaucccuagaaucacua

SEQ ID NO: 88942 - RNA, 19 nt, Artificial Sequence
  Synthetic
aacaucccuagaaucacua

SEQ ID NO: 88943 - RNA, 20 nt, Artificial Sequence
  Synthetic
aaacaucccuagaaucacua

SEQ ID NO: 88944 - RNA, 21 nt, Artificial Sequence
  Synthetic
uaaacaucccuagaaucacua

SEQ ID NO: 88945 - RNA, 22 nt, Artificial Sequence
  Synthetic
auaaacaucccuagaaucacua

SEQ ID NO: 88946 - RNA, 23 nt, Artificial Sequence
  Synthetic
uauaaacaucccuagaaucacua

SEQ ID NO: 88947 - RNA, 24 nt, Artificial Sequence
  Synthetic
auauaaacaucccuagaaucacua

SEQ ID NO: 88948 - RNA, 18 nt, Artificial Sequence
  Synthetic
auuggaaguaugucacua

SEQ ID NO: 88949 - RNA, 19 nt, Artificial Sequence
  Synthetic
aauuggaaguaugucacua

SEQ ID NO: 88950 - RNA, 20 nt, Artificial Sequence
  Synthetic
aaauuggaaguaugucacua

SEQ ID NO: 88951 - RNA, 21 nt, Artificial Sequence
  Synthetic
aaaauuggaaguaugucacua

SEQ ID NO: 88952 - RNA, 22 nt, Artificial Sequence
  Synthetic
uaaaauuggaaguaugucacua

SEQ ID NO: 88953 - RNA, 23 nt, Artificial Sequence
  Synthetic
auaaaauuggaaguaugucacua

SEQ ID NO: 88954 - RNA, 24 nt, Artificial Sequence
  Synthetic
aauaaaauuggaaguaugucacua

SEQ ID NO: 88955 - RNA, 21 nt, Artificial Sequence
  Synthetic
uuagcuagaaaauuaagacua

SEQ ID NO: 88956 - RNA, 23 nt, Artificial Sequence
  Synthetic
uguuagcuagaaaauuaagacua

SEQ ID NO: 88957 - RNA, 24 nt, Artificial Sequence
  Synthetic
auguuagcuagaaaauuaagacua

SEQ ID NO: 88958 - RNA, 18 nt, Artificial Sequence
  Synthetic
aaauauucuaagagacua

SEQ ID NO: 88959 - RNA, 19 nt, Artificial Sequence
  Synthetic
uaaauauucuaagagacua

SEQ ID NO: 88960 - RNA, 20 nt, Artificial Sequence
  Synthetic
uuaaauauucuaagagacua

SEQ ID NO: 88961 - RNA, 21 nt, Artificial Sequence
  Synthetic
auuaaauauucuaagagacua

SEQ ID NO: 88962 - RNA, 22 nt, Artificial Sequence
  Synthetic
aauuaaauauucuaagagacua

SEQ ID NO: 88963 - RNA, 23 nt, Artificial Sequence
  Synthetic
aaauuaaauauucuaagagacua

SEQ ID NO: 88964 - RNA, 24 nt, Artificial Sequence
  Synthetic
aaaauuaaauauucuaagagacua

SEQ ID NO: 88965 - RNA, 20 nt, Artificial Sequence
  Synthetic
agggucagucaagaggacua

SEQ ID NO: 88966 - RNA, 22 nt, Artificial Sequence
  Synthetic
ugagggucagucaagaggacua

SEQ ID NO: 88967 - RNA, 23 nt, Artificial Sequence
  Synthetic
uugagggucagucaagaggacua

SEQ ID NO: 88968 - RNA, 24 nt, Artificial Sequence
  Synthetic
cuugagggucagucaagaggacua

SEQ ID NO: 88969 - RNA, 19 nt, Artificial Sequence
  Synthetic
agaguuuauugcuggacua

SEQ ID NO: 88970 - RNA, 20 nt, Artificial Sequence
  Synthetic
aagaguuuauugcuggacua

SEQ ID NO: 88971 - RNA, 21 nt, Artificial Sequence
  Synthetic
uaagaguuuauugcuggacua

SEQ ID NO: 88972 - RNA, 22 nt, Artificial Sequence
  Synthetic
auaagaguuuauugcuggacua

SEQ ID NO: 88973 - RNA, 23 nt, Artificial Sequence
  Synthetic
uauaagaguuuauugcuggacua

SEQ ID NO: 88974 - RNA, 24 nt, Artificial Sequence
  Synthetic
auauaagaguuuauugcuggacua

SEQ ID NO: 88975 - RNA, 20 nt, Artificial Sequence
  Synthetic
aggcucacaucuaaugacua

SEQ ID NO: 88976 - RNA, 24 nt, Artificial Sequence
  Synthetic
ugggaggcucacaucuaaugacua

SEQ ID NO: 88977 - RNA, 18 nt, Artificial Sequence
  Synthetic
auaauuuuaauaugacua

SEQ ID NO: 88978 - RNA, 19 nt, Artificial Sequence
  Synthetic
aauaauuuuaauaugacua

SEQ ID NO: 88979 - RNA, 20 nt, Artificial Sequence
  Synthetic
aaauaauuuuaauaugacua

SEQ ID NO: 88980 - RNA, 21 nt, Artificial Sequence
  Synthetic
uaaauaauuuuaauaugacua

SEQ ID NO: 88981 - RNA, 22 nt, Artificial Sequence
  Synthetic
uuaaauaauuuuaauaugacua

SEQ ID NO: 88982 - RNA, 23 nt, Artificial Sequence
  Synthetic
auuaaauaauuuuaauaugacua

SEQ ID NO: 88983 - RNA, 18 nt, Artificial Sequence
  Synthetic
uacugacuuuagugacua

SEQ ID NO: 88984 - RNA, 19 nt, Artificial Sequence
  Synthetic
auacugacuuuagugacua

SEQ ID NO: 88985 - RNA, 20 nt, Artificial Sequence
  Synthetic
uauacugacuuuagugacua

SEQ ID NO: 88986 - RNA, 21 nt, Artificial Sequence
  Synthetic
uuauacugacuuuagugacua

SEQ ID NO: 88987 - RNA, 23 nt, Artificial Sequence
  Synthetic
uguuauacugacuuuagugacua

SEQ ID NO: 88988 - RNA, 24 nt, Artificial Sequence
  Synthetic
auguuauacugacuuuagugacua

SEQ ID NO: 88989 - RNA, 18 nt, Artificial Sequence
  Synthetic
uaaacauaaacuugacua

SEQ ID NO: 88990 - RNA, 19 nt, Artificial Sequence
  Synthetic
auaaacauaaacuugacua

SEQ ID NO: 88991 - RNA, 20 nt, Artificial Sequence
  Synthetic
uauaaacauaaacuugacua

SEQ ID NO: 88992 - RNA, 21 nt, Artificial Sequence
  Synthetic
cuauaaacauaaacuugacua

SEQ ID NO: 88993 - RNA, 22 nt, Artificial Sequence
  Synthetic
ccuauaaacauaaacuugacua

SEQ ID NO: 88994 - RNA, 23 nt, Artificial Sequence
  Synthetic
uccuauaaacauaaacuugacua

SEQ ID NO: 88995 - RNA, 18 nt, Artificial Sequence
  Synthetic
uguguucuuucuugacua

SEQ ID NO: 88996 - RNA, 19 nt, Artificial Sequence
  Synthetic
uuguguucuuucuugacua

SEQ ID NO: 88997 - RNA, 20 nt, Artificial Sequence
  Synthetic
auuguguucuuucuugacua

SEQ ID NO: 88998 - RNA, 21 nt, Artificial Sequence
  Synthetic
cauuguguucuuucuugacua

SEQ ID NO: 88999 - RNA, 22 nt, Artificial Sequence
  Synthetic
ucauuguguucuuucuugacua

SEQ ID NO: 89000 - RNA, 24 nt, Artificial Sequence
  Synthetic
agucauuguguucuuucuugacua

SEQ ID NO: 89001 - RNA, 19 nt, Artificial Sequence
  Synthetic
ugauuaaacaaaaauacua

SEQ ID NO: 89002 - RNA, 20 nt, Artificial Sequence
  Synthetic
augauuaaacaaaaauacua

SEQ ID NO: 89003 - RNA, 21 nt, Artificial Sequence
  Synthetic
aaugauuaaacaaaaauacua

SEQ ID NO: 89004 - RNA, 22 nt, Artificial Sequence
  Synthetic
uaaugauuaaacaaaaauacua

SEQ ID NO: 89005 - RNA, 23 nt, Artificial Sequence
  Synthetic
uuaaugauuaaacaaaaauacua

SEQ ID NO: 89006 - RNA, 24 nt, Artificial Sequence
  Synthetic
uuuaaugauuaaacaaaaauacua

SEQ ID NO: 89007 - RNA, 18 nt, Artificial Sequence
  Synthetic
cauuacuauuuaauacua

SEQ ID NO: 89008 - RNA, 20 nt, Artificial Sequence
  Synthetic
ugcauuacuauuuaauacua

SEQ ID NO: 89009 - RNA, 21 nt, Artificial Sequence
  Synthetic
uugcauuacuauuuaauacua

SEQ ID NO: 89010 - RNA, 22 nt, Artificial Sequence
  Synthetic
auugcauuacuauuuaauacua

SEQ ID NO: 89011 - RNA, 23 nt, Artificial Sequence
  Synthetic
aauugcauuacuauuuaauacua

SEQ ID NO: 89012 - RNA, 24 nt, Artificial Sequence
  Synthetic
aaauugcauuacuauuuaauacua

SEQ ID NO: 89013 - RNA, 19 nt, Artificial Sequence
  Synthetic
ugagcaucaauuuauacua

SEQ ID NO: 89014 - RNA, 20 nt, Artificial Sequence
  Synthetic
cugagcaucaauuuauacua

SEQ ID NO: 89015 - RNA, 21 nt, Artificial Sequence
  Synthetic
acugagcaucaauuuauacua

SEQ ID NO: 89016 - RNA, 22 nt, Artificial Sequence
  Synthetic
aacugagcaucaauuuauacua

SEQ ID NO: 89017 - RNA, 23 nt, Artificial Sequence
  Synthetic
uaacugagcaucaauuuauacua

SEQ ID NO: 89018 - RNA, 24 nt, Artificial Sequence
  Synthetic
auaacugagcaucaauuuauacua

SEQ ID NO: 89019 - RNA, 19 nt, Artificial Sequence
  Synthetic
ugaccugacaauacuacua

SEQ ID NO: 89020 - RNA, 20 nt, Artificial Sequence
  Synthetic
augaccugacaauacuacua

SEQ ID NO: 89021 - RNA, 21 nt, Artificial Sequence
  Synthetic
uaugaccugacaauacuacua

SEQ ID NO: 89022 - RNA, 22 nt, Artificial Sequence
  Synthetic
cuaugaccugacaauacuacua

SEQ ID NO: 89023 - RNA, 23 nt, Artificial Sequence
  Synthetic
ccuaugaccugacaauacuacua

SEQ ID NO: 89024 - RNA, 24 nt, Artificial Sequence
  Synthetic
cccuaugaccugacaauacuacua

SEQ ID NO: 89025 - RNA, 18 nt, Artificial Sequence
  Synthetic
agcuacucaguacuacua

SEQ ID NO: 89026 - RNA, 19 nt, Artificial Sequence
  Synthetic
uagcuacucaguacuacua

SEQ ID NO: 89027 - RNA, 21 nt, Artificial Sequence
  Synthetic
aguagcuacucaguacuacua

SEQ ID NO: 89028 - RNA, 23 nt, Artificial Sequence
  Synthetic
ugaguagcuacucaguacuacua

SEQ ID NO: 89029 - RNA, 24 nt, Artificial Sequence
  Synthetic
cugaguagcuacucaguacuacua

SEQ ID NO: 89030 - RNA, 18 nt, Artificial Sequence
  Synthetic
ucuuuuuucauccuacua

SEQ ID NO: 89031 - RNA, 19 nt, Artificial Sequence
  Synthetic
aucuuuuuucauccuacua

SEQ ID NO: 89032 - RNA, 20 nt, Artificial Sequence
  Synthetic
caucuuuuuucauccuacua

SEQ ID NO: 89033 - RNA, 21 nt, Artificial Sequence
  Synthetic
acaucuuuuuucauccuacua

SEQ ID NO: 89034 - RNA, 22 nt, Artificial Sequence
  Synthetic
aacaucuuuuuucauccuacua

SEQ ID NO: 89035 - RNA, 23 nt, Artificial Sequence
  Synthetic
caacaucuuuuuucauccuacua

SEQ ID NO: 89036 - RNA, 24 nt, Artificial Sequence
  Synthetic
acaacaucuuuuuucauccuacua

SEQ ID NO: 89037 - RNA, 19 nt, Artificial Sequence
  Synthetic
aguaguccagaggcuacua

SEQ ID NO: 89038 - RNA, 20 nt, Artificial Sequence
  Synthetic
aaguaguccagaggcuacua

SEQ ID NO: 89039 - RNA, 21 nt, Artificial Sequence
  Synthetic
aaaguaguccagaggcuacua

SEQ ID NO: 89040 - RNA, 23 nt, Artificial Sequence
  Synthetic
agaaaguaguccagaggcuacua

SEQ ID NO: 89041 - RNA, 24 nt, Artificial Sequence
  Synthetic
cagaaaguaguccagaggcuacua

SEQ ID NO: 89042 - RNA, 18 nt, Artificial Sequence
  Synthetic
cuucuuagacaucuacua

SEQ ID NO: 89043 - RNA, 19 nt, Artificial Sequence
  Synthetic
ccuucuuagacaucuacua

SEQ ID NO: 89044 - RNA, 20 nt, Artificial Sequence
  Synthetic
uccuucuuagacaucuacua

SEQ ID NO: 89045 - RNA, 21 nt, Artificial Sequence
  Synthetic
cuccuucuuagacaucuacua

SEQ ID NO: 89046 - RNA, 22 nt, Artificial Sequence
  Synthetic
ucuccuucuuagacaucuacua

SEQ ID NO: 89047 - RNA, 23 nt, Artificial Sequence
  Synthetic
aucuccuucuuagacaucuacua

SEQ ID NO: 89048 - RNA, 24 nt, Artificial Sequence
  Synthetic
aaucuccuucuuagacaucuacua

SEQ ID NO: 89049 - RNA, 18 nt, Artificial Sequence
  Synthetic
uuagaaggaaaaguacua

SEQ ID NO: 89050 - RNA, 19 nt, Artificial Sequence
  Synthetic
uuuagaaggaaaaguacua

SEQ ID NO: 89051 - RNA, 20 nt, Artificial Sequence
  Synthetic
cuuuagaaggaaaaguacua

SEQ ID NO: 89052 - RNA, 21 nt, Artificial Sequence
  Synthetic
acuuuagaaggaaaaguacua

SEQ ID NO: 89053 - RNA, 22 nt, Artificial Sequence
  Synthetic
uacuuuagaaggaaaaguacua

SEQ ID NO: 89054 - RNA, 23 nt, Artificial Sequence
  Synthetic
auacuuuagaaggaaaaguacua

SEQ ID NO: 89055 - RNA, 24 nt, Artificial Sequence
  Synthetic
cauacuuuagaaggaaaaguacua

SEQ ID NO: 89056 - RNA, 18 nt, Artificial Sequence
  Synthetic
uacuacugaguaguacua

SEQ ID NO: 89057 - RNA, 19 nt, Artificial Sequence
  Synthetic
cuacuacugaguaguacua

SEQ ID NO: 89058 - RNA, 20 nt, Artificial Sequence
  Synthetic
acuacuacugaguaguacua

SEQ ID NO: 89059 - RNA, 21 nt, Artificial Sequence
  Synthetic
uacuacuacugaguaguacua

SEQ ID NO: 89060 - RNA, 23 nt, Artificial Sequence
  Synthetic
aguacuacuacugaguaguacua

SEQ ID NO: 89061 - RNA, 24 nt, Artificial Sequence
  Synthetic
caguacuacuacugaguaguacua

SEQ ID NO: 89062 - RNA, 18 nt, Artificial Sequence
  Synthetic
uggagauacuauguacua

SEQ ID NO: 89063 - RNA, 19 nt, Artificial Sequence
  Synthetic
uuggagauacuauguacua

SEQ ID NO: 89064 - RNA, 20 nt, Artificial Sequence
  Synthetic
uuuggagauacuauguacua

SEQ ID NO: 89065 - RNA, 22 nt, Artificial Sequence
  Synthetic
uguuuggagauacuauguacua

SEQ ID NO: 89066 - RNA, 23 nt, Artificial Sequence
  Synthetic
auguuuggagauacuauguacua

SEQ ID NO: 89067 - RNA, 24 nt, Artificial Sequence
  Synthetic
uauguuuggagauacuauguacua

SEQ ID NO: 89068 - RNA, 18 nt, Artificial Sequence
  Synthetic
aagagccuccuuguacua

SEQ ID NO: 89069 - RNA, 19 nt, Artificial Sequence
  Synthetic
uaagagccuccuuguacua

SEQ ID NO: 89070 - RNA, 20 nt, Artificial Sequence
  Synthetic
uuaagagccuccuuguacua

SEQ ID NO: 89071 - RNA, 21 nt, Artificial Sequence
  Synthetic
uuuaagagccuccuuguacua

SEQ ID NO: 89072 - RNA, 22 nt, Artificial Sequence
  Synthetic
cuuuaagagccuccuuguacua

SEQ ID NO: 89073 - RNA, 23 nt, Artificial Sequence
  Synthetic
acuuuaagagccuccuuguacua

SEQ ID NO: 89074 - RNA, 24 nt, Artificial Sequence
  Synthetic
aacuuuaagagccuccuuguacua

SEQ ID NO: 89075 - RNA, 18 nt, Artificial Sequence
  Synthetic
uacacaguagcuuuacua

SEQ ID NO: 89076 - RNA, 19 nt, Artificial Sequence
  Synthetic
auacacaguagcuuuacua

SEQ ID NO: 89077 - RNA, 20 nt, Artificial Sequence
  Synthetic
cauacacaguagcuuuacua

SEQ ID NO: 89078 - RNA, 21 nt, Artificial Sequence
  Synthetic
acauacacaguagcuuuacua

SEQ ID NO: 89079 - RNA, 22 nt, Artificial Sequence
  Synthetic
uacauacacaguagcuuuacua

SEQ ID NO: 89080 - RNA, 19 nt, Artificial Sequence
  Synthetic
ugcuuuuccauuuuuacua

SEQ ID NO: 89081 - RNA, 20 nt, Artificial Sequence
  Synthetic
cugcuuuuccauuuuuacua

SEQ ID NO: 89082 - RNA, 21 nt, Artificial Sequence
  Synthetic
acugcuuuuccauuuuuacua

SEQ ID NO: 89083 - RNA, 22 nt, Artificial Sequence
  Synthetic
cacugcuuuuccauuuuuacua

SEQ ID NO: 89084 - RNA, 24 nt, Artificial Sequence
  Synthetic
ugcacugcuuuuccauuuuuacua

SEQ ID NO: 89085 - RNA, 18 nt, Artificial Sequence
  Synthetic
aggcaggauugaaaccua

SEQ ID NO: 89086 - RNA, 19 nt, Artificial Sequence
  Synthetic
aaggcaggauugaaaccua

SEQ ID NO: 89087 - RNA, 20 nt, Artificial Sequence
  Synthetic
caaggcaggauugaaaccua

SEQ ID NO: 89088 - RNA, 22 nt, Artificial Sequence
  Synthetic
agcaaggcaggauugaaaccua

SEQ ID NO: 89089 - RNA, 23 nt, Artificial Sequence
  Synthetic
uagcaaggcaggauugaaaccua

SEQ ID NO: 89090 - RNA, 24 nt, Artificial Sequence
  Synthetic
cuagcaaggcaggauugaaaccua

SEQ ID NO: 89091 - RNA, 18 nt, Artificial Sequence
  Synthetic
uccacuaguuugaaccua

SEQ ID NO: 89092 - RNA, 19 nt, Artificial Sequence
  Synthetic
auccacuaguuugaaccua

SEQ ID NO: 89093 - RNA, 20 nt, Artificial Sequence
  Synthetic
uauccacuaguuugaaccua

SEQ ID NO: 89094 - RNA, 21 nt, Artificial Sequence
  Synthetic
uuauccacuaguuugaaccua

SEQ ID NO: 89095 - RNA, 22 nt, Artificial Sequence
  Synthetic
auuauccacuaguuugaaccua

SEQ ID NO: 89096 - RNA, 23 nt, Artificial Sequence
  Synthetic
cauuauccacuaguuugaaccua

SEQ ID NO: 89097 - RNA, 24 nt, Artificial Sequence
  Synthetic
ucauuauccacuaguuugaaccua

SEQ ID NO: 89098 - RNA, 18 nt, Artificial Sequence
  Synthetic
ugagccuagaauaaccua

SEQ ID NO: 89099 - RNA, 20 nt, Artificial Sequence
  Synthetic
cgugagccuagaauaaccua

SEQ ID NO: 89100 - RNA, 21 nt, Artificial Sequence
  Synthetic
ccgugagccuagaauaaccua

SEQ ID NO: 89101 - RNA, 22 nt, Artificial Sequence
  Synthetic
accgugagccuagaauaaccua

SEQ ID NO: 89102 - RNA, 23 nt, Artificial Sequence
  Synthetic
uaccgugagccuagaauaaccua

SEQ ID NO: 89103 - RNA, 24 nt, Artificial Sequence
  Synthetic
auaccgugagccuagaauaaccua

SEQ ID NO: 89104 - RNA, 18 nt, Artificial Sequence
  Synthetic
caggacucucaucaccua

SEQ ID NO: 89105 - RNA, 19 nt, Artificial Sequence
  Synthetic
ucaggacucucaucaccua

SEQ ID NO: 89106 - RNA, 20 nt, Artificial Sequence
  Synthetic
cucaggacucucaucaccua

SEQ ID NO: 89107 - RNA, 21 nt, Artificial Sequence
  Synthetic
ucucaggacucucaucaccua

SEQ ID NO: 89108 - RNA, 22 nt, Artificial Sequence
  Synthetic
uucucaggacucucaucaccua

SEQ ID NO: 89109 - RNA, 23 nt, Artificial Sequence
  Synthetic
cuucucaggacucucaucaccua

SEQ ID NO: 89110 - RNA, 18 nt, Artificial Sequence
  Synthetic
uuuuaugcuuuucaccua

SEQ ID NO: 89111 - RNA, 19 nt, Artificial Sequence
  Synthetic
uuuuuaugcuuuucaccua

SEQ ID NO: 89112 - RNA, 20 nt, Artificial Sequence
  Synthetic
auuuuuaugcuuuucaccua

SEQ ID NO: 89113 - RNA, 21 nt, Artificial Sequence
  Synthetic
uauuuuuaugcuuuucaccua

SEQ ID NO: 89114 - RNA, 22 nt, Artificial Sequence
  Synthetic
auauuuuuaugcuuuucaccua

SEQ ID NO: 89115 - RNA, 23 nt, Artificial Sequence
  Synthetic
uauauuuuuaugcuuuucaccua

SEQ ID NO: 89116 - RNA, 18 nt, Artificial Sequence
  Synthetic
auguaaauugaagaccua

SEQ ID NO: 89117 - RNA, 19 nt, Artificial Sequence
  Synthetic
uauguaaauugaagaccua

SEQ ID NO: 89118 - RNA, 20 nt, Artificial Sequence
  Synthetic
cuauguaaauugaagaccua

SEQ ID NO: 89119 - RNA, 21 nt, Artificial Sequence
  Synthetic
ccuauguaaauugaagaccua

SEQ ID NO: 89120 - RNA, 22 nt, Artificial Sequence
  Synthetic
uccuauguaaauugaagaccua

SEQ ID NO: 89121 - RNA, 24 nt, Artificial Sequence
  Synthetic
aguccuauguaaauugaagaccua

SEQ ID NO: 89122 - RNA, 19 nt, Artificial Sequence
  Synthetic
agacaauaccccagaccua

SEQ ID NO: 89123 - RNA, 20 nt, Artificial Sequence
  Synthetic
cagacaauaccccagaccua

SEQ ID NO: 89124 - RNA, 21 nt, Artificial Sequence
  Synthetic
ucagacaauaccccagaccua

SEQ ID NO: 89125 - RNA, 22 nt, Artificial Sequence
  Synthetic
cucagacaauaccccagaccua

SEQ ID NO: 89126 - RNA, 23 nt, Artificial Sequence
  Synthetic
ucucagacaauaccccagaccua

SEQ ID NO: 89127 - RNA, 24 nt, Artificial Sequence
  Synthetic
aucucagacaauaccccagaccua

SEQ ID NO: 89128 - RNA, 18 nt, Artificial Sequence
  Synthetic
uagguuaacucagaccua

SEQ ID NO: 89129 - RNA, 19 nt, Artificial Sequence
  Synthetic
auagguuaacucagaccua

SEQ ID NO: 89130 - RNA, 20 nt, Artificial Sequence
  Synthetic
cauagguuaacucagaccua

SEQ ID NO: 89131 - RNA, 21 nt, Artificial Sequence
  Synthetic
ucauagguuaacucagaccua

SEQ ID NO: 89132 - RNA, 22 nt, Artificial Sequence
  Synthetic
uucauagguuaacucagaccua

SEQ ID NO: 89133 - RNA, 23 nt, Artificial Sequence
  Synthetic
cuucauagguuaacucagaccua

SEQ ID NO: 89134 - RNA, 24 nt, Artificial Sequence
  Synthetic
acuucauagguuaacucagaccua

SEQ ID NO: 89135 - RNA, 22 nt, Artificial Sequence
  Synthetic
agagcaaaauaacugagaccua

SEQ ID NO: 89136 - RNA, 24 nt, Artificial Sequence
  Synthetic
agagagcaaaauaacugagaccua

SEQ ID NO: 89137 - RNA, 18 nt, Artificial Sequence
  Synthetic
uuuggauuucauuaccua

SEQ ID NO: 89138 - RNA, 19 nt, Artificial Sequence
  Synthetic
auuuggauuucauuaccua

SEQ ID NO: 89139 - RNA, 20 nt, Artificial Sequence
  Synthetic
cauuuggauuucauuaccua

SEQ ID NO: 89140 - RNA, 22 nt, Artificial Sequence
  Synthetic
agcauuuggauuucauuaccua

SEQ ID NO: 89141 - RNA, 23 nt, Artificial Sequence
  Synthetic
cagcauuuggauuucauuaccua

SEQ ID NO: 89142 - RNA, 24 nt, Artificial Sequence
  Synthetic
ccagcauuuggauuucauuaccua

SEQ ID NO: 89143 - RNA, 21 nt, Artificial Sequence
  Synthetic
ccuagcauauggccuacccua

SEQ ID NO: 89144 - RNA, 22 nt, Artificial Sequence
  Synthetic
accuagcauauggccuacccua

SEQ ID NO: 89145 - RNA, 24 nt, Artificial Sequence
  Synthetic
ugaccuagcauauggccuacccua

SEQ ID NO: 89146 - RNA, 18 nt, Artificial Sequence
  Synthetic
acuguuauauuuacccua

SEQ ID NO: 89147 - RNA, 19 nt, Artificial Sequence
  Synthetic
aacuguuauauuuacccua

SEQ ID NO: 89148 - RNA, 20 nt, Artificial Sequence
  Synthetic
aaacuguuauauuuacccua

SEQ ID NO: 89149 - RNA, 21 nt, Artificial Sequence
  Synthetic
aaaacuguuauauuuacccua

SEQ ID NO: 89150 - RNA, 22 nt, Artificial Sequence
  Synthetic
uaaaacuguuauauuuacccua

SEQ ID NO: 89151 - RNA, 23 nt, Artificial Sequence
  Synthetic
auaaaacuguuauauuuacccua

SEQ ID NO: 89152 - RNA, 24 nt, Artificial Sequence
  Synthetic
aauaaaacuguuauauuuacccua

SEQ ID NO: 89153 - RNA, 18 nt, Artificial Sequence
  Synthetic
uccgcucuuuccccccua

SEQ ID NO: 89154 - RNA, 19 nt, Artificial Sequence
  Synthetic
uuccgcucuuuccccccua

SEQ ID NO: 89155 - RNA, 20 nt, Artificial Sequence
  Synthetic
cuuccgcucuuuccccccua

SEQ ID NO: 89156 - RNA, 22 nt, Artificial Sequence
  Synthetic
ugcuuccgcucuuuccccccua

SEQ ID NO: 89157 - RNA, 23 nt, Artificial Sequence
  Synthetic
uugcuuccgcucuuuccccccua

SEQ ID NO: 89158 - RNA, 24 nt, Artificial Sequence
  Synthetic
cuugcuuccgcucuuuccccccua

SEQ ID NO: 89159 - RNA, 18 nt, Artificial Sequence
  Synthetic
aagacaacacugccccua

SEQ ID NO: 89160 - RNA, 19 nt, Artificial Sequence
  Synthetic
uaagacaacacugccccua

SEQ ID NO: 89161 - RNA, 20 nt, Artificial Sequence
  Synthetic
auaagacaacacugccccua

SEQ ID NO: 89162 - RNA, 21 nt, Artificial Sequence
  Synthetic
uauaagacaacacugccccua

SEQ ID NO: 89163 - RNA, 22 nt, Artificial Sequence
  Synthetic
uuauaagacaacacugccccua

SEQ ID NO: 89164 - RNA, 23 nt, Artificial Sequence
  Synthetic
auuauaagacaacacugccccua

SEQ ID NO: 89165 - RNA, 24 nt, Artificial Sequence
  Synthetic
aauuauaagacaacacugccccua

SEQ ID NO: 89166 - RNA, 18 nt, Artificial Sequence
  Synthetic
aggagaugaguaucccua

SEQ ID NO: 89167 - RNA, 19 nt, Artificial Sequence
  Synthetic
aaggagaugaguaucccua

SEQ ID NO: 89168 - RNA, 22 nt, Artificial Sequence
  Synthetic
aggaaggagaugaguaucccua

SEQ ID NO: 89169 - RNA, 24 nt, Artificial Sequence
  Synthetic
agaggaaggagaugaguaucccua

SEQ ID NO: 89170 - RNA, 18 nt, Artificial Sequence
  Synthetic
ugauaucagguuucccua

SEQ ID NO: 89171 - RNA, 19 nt, Artificial Sequence
  Synthetic
augauaucagguuucccua

SEQ ID NO: 89172 - RNA, 22 nt, Artificial Sequence
  Synthetic
aggaugauaucagguuucccua

SEQ ID NO: 89173 - RNA, 23 nt, Artificial Sequence
  Synthetic
aaggaugauaucagguuucccua

SEQ ID NO: 89174 - RNA, 24 nt, Artificial Sequence
  Synthetic
caaggaugauaucagguuucccua

SEQ ID NO: 89175 - RNA, 18 nt, Artificial Sequence
  Synthetic
agaaagcacccaagccua

SEQ ID NO: 89176 - RNA, 21 nt, Artificial Sequence
  Synthetic
uggagaaagcacccaagccua

SEQ ID NO: 89177 - RNA, 22 nt, Artificial Sequence
  Synthetic
uuggagaaagcacccaagccua

SEQ ID NO: 89178 - RNA, 24 nt, Artificial Sequence
  Synthetic
aguuggagaaagcacccaagccua

SEQ ID NO: 89179 - RNA, 18 nt, Artificial Sequence
  Synthetic
ucucacucagccagccua

SEQ ID NO: 89180 - RNA, 19 nt, Artificial Sequence
  Synthetic
cucucacucagccagccua

SEQ ID NO: 89181 - RNA, 21 nt, Artificial Sequence
  Synthetic
agcucucacucagccagccua

SEQ ID NO: 89182 - RNA, 24 nt, Artificial Sequence
  Synthetic
uggagcucucacucagccagccua

SEQ ID NO: 89183 - RNA, 18 nt, Artificial Sequence
  Synthetic
uaaaagcagagcagccua

SEQ ID NO: 89184 - RNA, 19 nt, Artificial Sequence
  Synthetic
uuaaaagcagagcagccua

SEQ ID NO: 89185 - RNA, 20 nt, Artificial Sequence
  Synthetic
auuaaaagcagagcagccua

SEQ ID NO: 89186 - RNA, 21 nt, Artificial Sequence
  Synthetic
uauuaaaagcagagcagccua

SEQ ID NO: 89187 - RNA, 22 nt, Artificial Sequence
  Synthetic
cuauuaaaagcagagcagccua

SEQ ID NO: 89188 - RNA, 23 nt, Artificial Sequence
  Synthetic
ucuauuaaaagcagagcagccua

SEQ ID NO: 89189 - RNA, 24 nt, Artificial Sequence
  Synthetic
cucuauuaaaagcagagcagccua

SEQ ID NO: 89190 - RNA, 18 nt, Artificial Sequence
  Synthetic
acagggaauagcagccua

SEQ ID NO: 89191 - RNA, 20 nt, Artificial Sequence
  Synthetic
ugacagggaauagcagccua

SEQ ID NO: 89192 - RNA, 23 nt, Artificial Sequence
  Synthetic
aggugacagggaauagcagccua

SEQ ID NO: 89193 - RNA, 24 nt, Artificial Sequence
  Synthetic
aaggugacagggaauagcagccua

SEQ ID NO: 89194 - RNA, 19 nt, Artificial Sequence
  Synthetic
ugaagccuaaucuagccua

SEQ ID NO: 89195 - RNA, 20 nt, Artificial Sequence
  Synthetic
augaagccuaaucuagccua

SEQ ID NO: 89196 - RNA, 21 nt, Artificial Sequence
  Synthetic
aaugaagccuaaucuagccua

SEQ ID NO: 89197 - RNA, 22 nt, Artificial Sequence
  Synthetic
uaaugaagccuaaucuagccua

SEQ ID NO: 89198 - RNA, 24 nt, Artificial Sequence
  Synthetic
uguaaugaagccuaaucuagccua

SEQ ID NO: 89199 - RNA, 21 nt, Artificial Sequence
  Synthetic
ccaaguuuuuuuuuuugccua

SEQ ID NO: 89200 - RNA, 23 nt, Artificial Sequence
  Synthetic
ugccaaguuuuuuuuuuugccua

SEQ ID NO: 89201 - RNA, 24 nt, Artificial Sequence
  Synthetic
uugccaaguuuuuuuuuuugccua

SEQ ID NO: 89202 - RNA, 20 nt, Artificial Sequence
  Synthetic
ugguugccagcggcauccua

SEQ ID NO: 89203 - RNA, 21 nt, Artificial Sequence
  Synthetic
uugguugccagcggcauccua

SEQ ID NO: 89204 - RNA, 22 nt, Artificial Sequence
  Synthetic
uuugguugccagcggcauccua

SEQ ID NO: 89205 - RNA, 23 nt, Artificial Sequence
  Synthetic
cuuugguugccagcggcauccua

SEQ ID NO: 89206 - RNA, 24 nt, Artificial Sequence
  Synthetic
ucuuugguugccagcggcauccua

SEQ ID NO: 89207 - RNA, 21 nt, Artificial Sequence
  Synthetic
uucacaaccaagacuauccua

SEQ ID NO: 89208 - RNA, 22 nt, Artificial Sequence
  Synthetic
cuucacaaccaagacuauccua

SEQ ID NO: 89209 - RNA, 23 nt, Artificial Sequence
  Synthetic
acuucacaaccaagacuauccua

SEQ ID NO: 89210 - RNA, 24 nt, Artificial Sequence
  Synthetic
aacuucacaaccaagacuauccua

SEQ ID NO: 89211 - RNA, 18 nt, Artificial Sequence
  Synthetic
aaauucacuuaccuccua

SEQ ID NO: 89212 - RNA, 19 nt, Artificial Sequence
  Synthetic
uaaauucacuuaccuccua

SEQ ID NO: 89213 - RNA, 20 nt, Artificial Sequence
  Synthetic
auaaauucacuuaccuccua

SEQ ID NO: 89214 - RNA, 21 nt, Artificial Sequence
  Synthetic
uauaaauucacuuaccuccua

SEQ ID NO: 89215 - RNA, 22 nt, Artificial Sequence
  Synthetic
auauaaauucacuuaccuccua

SEQ ID NO: 89216 - RNA, 23 nt, Artificial Sequence
  Synthetic
aauauaaauucacuuaccuccua

SEQ ID NO: 89217 - RNA, 24 nt, Artificial Sequence
  Synthetic
uaauauaaauucacuuaccuccua

SEQ ID NO: 89218 - RNA, 18 nt, Artificial Sequence
  Synthetic
uuaaaguaguuccuccua

SEQ ID NO: 89219 - RNA, 19 nt, Artificial Sequence
  Synthetic
auuaaaguaguuccuccua

SEQ ID NO: 89220 - RNA, 20 nt, Artificial Sequence
  Synthetic
uauuaaaguaguuccuccua

SEQ ID NO: 89221 - RNA, 21 nt, Artificial Sequence
  Synthetic
cuauuaaaguaguuccuccua

SEQ ID NO: 89222 - RNA, 22 nt, Artificial Sequence
  Synthetic
ucuauuaaaguaguuccuccua

SEQ ID NO: 89223 - RNA, 23 nt, Artificial Sequence
  Synthetic
uucuauuaaaguaguuccuccua

SEQ ID NO: 89224 - RNA, 18 nt, Artificial Sequence
  Synthetic
agcccagcucaucuccua

SEQ ID NO: 89225 - RNA, 19 nt, Artificial Sequence
  Synthetic
cagcccagcucaucuccua

SEQ ID NO: 89226 - RNA, 21 nt, Artificial Sequence
  Synthetic
ugcagcccagcucaucuccua

SEQ ID NO: 89227 - RNA, 22 nt, Artificial Sequence
  Synthetic
uugcagcccagcucaucuccua

SEQ ID NO: 89228 - RNA, 23 nt, Artificial Sequence
  Synthetic
auugcagcccagcucaucuccua

SEQ ID NO: 89229 - RNA, 24 nt, Artificial Sequence
  Synthetic
aauugcagcccagcucaucuccua

SEQ ID NO: 89230 - RNA, 19 nt, Artificial Sequence
  Synthetic
agcuccugaccaauuccua

SEQ ID NO: 89231 - RNA, 20 nt, Artificial Sequence
  Synthetic
cagcuccugaccaauuccua

SEQ ID NO: 89232 - RNA, 21 nt, Artificial Sequence
  Synthetic
acagcuccugaccaauuccua

SEQ ID NO: 89233 - RNA, 22 nt, Artificial Sequence
  Synthetic
aacagcuccugaccaauuccua

SEQ ID NO: 89234 - RNA, 23 nt, Artificial Sequence
  Synthetic
uaacagcuccugaccaauuccua

SEQ ID NO: 89235 - RNA, 24 nt, Artificial Sequence
  Synthetic
uuaacagcuccugaccaauuccua

SEQ ID NO: 89236 - RNA, 18 nt, Artificial Sequence
  Synthetic
uaguuuugaccauuccua

SEQ ID NO: 89237 - RNA, 19 nt, Artificial Sequence
  Synthetic
auaguuuugaccauuccua

SEQ ID NO: 89238 - RNA, 20 nt, Artificial Sequence
  Synthetic
uauaguuuugaccauuccua

SEQ ID NO: 89239 - RNA, 22 nt, Artificial Sequence
  Synthetic
uguauaguuuugaccauuccua

SEQ ID NO: 89240 - RNA, 23 nt, Artificial Sequence
  Synthetic
auguauaguuuugaccauuccua

SEQ ID NO: 89241 - RNA, 24 nt, Artificial Sequence
  Synthetic
uauguauaguuuugaccauuccua

SEQ ID NO: 89242 - RNA, 18 nt, Artificial Sequence
  Synthetic
aacagguggggauuccua

SEQ ID NO: 89243 - RNA, 20 nt, Artificial Sequence
  Synthetic
ugaacagguggggauuccua

SEQ ID NO: 89244 - RNA, 18 nt, Artificial Sequence
  Synthetic
aaauuacuuuuauuccua

SEQ ID NO: 89245 - RNA, 19 nt, Artificial Sequence
  Synthetic
caaauuacuuuuauuccua

SEQ ID NO: 89246 - RNA, 20 nt, Artificial Sequence
  Synthetic
ucaaauuacuuuuauuccua

SEQ ID NO: 89247 - RNA, 21 nt, Artificial Sequence
  Synthetic
aucaaauuacuuuuauuccua

SEQ ID NO: 89248 - RNA, 22 nt, Artificial Sequence
  Synthetic
uaucaaauuacuuuuauuccua

SEQ ID NO: 89249 - RNA, 23 nt, Artificial Sequence
  Synthetic
cuaucaaauuacuuuuauuccua

SEQ ID NO: 89250 - RNA, 24 nt, Artificial Sequence
  Synthetic
acuaucaaauuacuuuuauuccua

SEQ ID NO: 89251 - RNA, 18 nt, Artificial Sequence
  Synthetic
uguguuucaaguuuccua

SEQ ID NO: 89252 - RNA, 19 nt, Artificial Sequence
  Synthetic
cuguguuucaaguuuccua

SEQ ID NO: 89253 - RNA, 20 nt, Artificial Sequence
  Synthetic
ucuguguuucaaguuuccua

SEQ ID NO: 89254 - RNA, 22 nt, Artificial Sequence
  Synthetic
ugucuguguuucaaguuuccua

SEQ ID NO: 89255 - RNA, 23 nt, Artificial Sequence
  Synthetic
augucuguguuucaaguuuccua

SEQ ID NO: 89256 - RNA, 24 nt, Artificial Sequence
  Synthetic
aaugucuguguuucaaguuuccua

SEQ ID NO: 89257 - RNA, 21 nt, Artificial Sequence
  Synthetic
cauauacaaaauaaaaagcua

SEQ ID NO: 89258 - RNA, 22 nt, Artificial Sequence
  Synthetic
acauauacaaaauaaaaagcua

SEQ ID NO: 89259 - RNA, 24 nt, Artificial Sequence
  Synthetic
agacauauacaaaauaaaaagcua

SEQ ID NO: 89260 - RNA, 18 nt, Artificial Sequence
  Synthetic
agucacucacaaaagcua

SEQ ID NO: 89261 - RNA, 19 nt, Artificial Sequence
  Synthetic
aagucacucacaaaagcua

SEQ ID NO: 89262 - RNA, 21 nt, Artificial Sequence
  Synthetic
agaagucacucacaaaagcua

SEQ ID NO: 89263 - RNA, 22 nt, Artificial Sequence
  Synthetic
uagaagucacucacaaaagcua

SEQ ID NO: 89264 - RNA, 23 nt, Artificial Sequence
  Synthetic
cuagaagucacucacaaaagcua

SEQ ID NO: 89265 - RNA, 19 nt, Artificial Sequence
  Synthetic
aggaauauuacagaagcua

SEQ ID NO: 89266 - RNA, 20 nt, Artificial Sequence
  Synthetic
uaggaauauuacagaagcua

SEQ ID NO: 89267 - RNA, 21 nt, Artificial Sequence
  Synthetic
cuaggaauauuacagaagcua

SEQ ID NO: 89268 - RNA, 22 nt, Artificial Sequence
  Synthetic
acuaggaauauuacagaagcua

SEQ ID NO: 89269 - RNA, 23 nt, Artificial Sequence
  Synthetic
aacuaggaauauuacagaagcua

SEQ ID NO: 89270 - RNA, 24 nt, Artificial Sequence
  Synthetic
aaacuaggaauauuacagaagcua

SEQ ID NO: 89271 - RNA, 18 nt, Artificial Sequence
  Synthetic
caauaauuagggaagcua

SEQ ID NO: 89272 - RNA, 19 nt, Artificial Sequence
  Synthetic
ucaauaauuagggaagcua

SEQ ID NO: 89273 - RNA, 20 nt, Artificial Sequence
  Synthetic
uucaauaauuagggaagcua

SEQ ID NO: 89274 - RNA, 21 nt, Artificial Sequence
  Synthetic
auucaauaauuagggaagcua

SEQ ID NO: 89275 - RNA, 22 nt, Artificial Sequence
  Synthetic
aauucaauaauuagggaagcua

SEQ ID NO: 89276 - RNA, 23 nt, Artificial Sequence
  Synthetic
uaauucaauaauuagggaagcua

SEQ ID NO: 89277 - RNA, 24 nt, Artificial Sequence
  Synthetic
cuaauucaauaauuagggaagcua

SEQ ID NO: 89278 - RNA, 18 nt, Artificial Sequence
  Synthetic
auuaagaauuugaagcua

SEQ ID NO: 89279 - RNA, 19 nt, Artificial Sequence
  Synthetic
uauuaagaauuugaagcua

SEQ ID NO: 89280 - RNA, 20 nt, Artificial Sequence
  Synthetic
auauuaagaauuugaagcua

SEQ ID NO: 89281 - RNA, 21 nt, Artificial Sequence
  Synthetic
aauauuaagaauuugaagcua

SEQ ID NO: 89282 - RNA, 22 nt, Artificial Sequence
  Synthetic
aaauauuaagaauuugaagcua

SEQ ID NO: 89283 - RNA, 23 nt, Artificial Sequence
  Synthetic
aaaauauuaagaauuugaagcua

SEQ ID NO: 89284 - RNA, 18 nt, Artificial Sequence
  Synthetic
accuacuguuuuaagcua

SEQ ID NO: 89285 - RNA, 19 nt, Artificial Sequence
  Synthetic
uaccuacuguuuuaagcua

SEQ ID NO: 89286 - RNA, 21 nt, Artificial Sequence
  Synthetic
aguaccuacuguuuuaagcua

SEQ ID NO: 89287 - RNA, 22 nt, Artificial Sequence
  Synthetic
aaguaccuacuguuuuaagcua

SEQ ID NO: 89288 - RNA, 24 nt, Artificial Sequence
  Synthetic
agaaguaccuacuguuuuaagcua

SEQ ID NO: 89289 - RNA, 18 nt, Artificial Sequence
  Synthetic
agaguccugguacagcua

SEQ ID NO: 89290 - RNA, 20 nt, Artificial Sequence
  Synthetic
ugagaguccugguacagcua

SEQ ID NO: 89291 - RNA, 21 nt, Artificial Sequence
  Synthetic
augagaguccugguacagcua

SEQ ID NO: 89292 - RNA, 22 nt, Artificial Sequence
  Synthetic
aaugagaguccugguacagcua

SEQ ID NO: 89293 - RNA, 23 nt, Artificial Sequence
  Synthetic
uaaugagaguccugguacagcua

SEQ ID NO: 89294 - RNA, 24 nt, Artificial Sequence
  Synthetic
auaaugagaguccugguacagcua

SEQ ID NO: 89295 - RNA, 22 nt, Artificial Sequence
  Synthetic
agcaaggaaaaaugaucagcua

SEQ ID NO: 89296 - RNA, 23 nt, Artificial Sequence
  Synthetic
uagcaaggaaaaaugaucagcua

SEQ ID NO: 89297 - RNA, 24 nt, Artificial Sequence
  Synthetic
auagcaaggaaaaaugaucagcua

SEQ ID NO: 89298 - RNA, 18 nt, Artificial Sequence
  Synthetic
aucuuuaauccucagcua

SEQ ID NO: 89299 - RNA, 19 nt, Artificial Sequence
  Synthetic
aaucuuuaauccucagcua

SEQ ID NO: 89300 - RNA, 20 nt, Artificial Sequence
  Synthetic
caaucuuuaauccucagcua

SEQ ID NO: 89301 - RNA, 21 nt, Artificial Sequence
  Synthetic
acaaucuuuaauccucagcua

SEQ ID NO: 89302 - RNA, 22 nt, Artificial Sequence
  Synthetic
aacaaucuuuaauccucagcua

SEQ ID NO: 89303 - RNA, 23 nt, Artificial Sequence
  Synthetic
caacaaucuuuaauccucagcua

SEQ ID NO: 89304 - RNA, 24 nt, Artificial Sequence
  Synthetic
acaacaaucuuuaauccucagcua

SEQ ID NO: 89305 - RNA, 18 nt, Artificial Sequence
  Synthetic
uuguaagcuugucagcua

SEQ ID NO: 89306 - RNA, 19 nt, Artificial Sequence
  Synthetic
uuuguaagcuugucagcua

SEQ ID NO: 89307 - RNA, 20 nt, Artificial Sequence
  Synthetic
uuuuguaagcuugucagcua

SEQ ID NO: 89308 - RNA, 21 nt, Artificial Sequence
  Synthetic
uuuuuguaagcuugucagcua

SEQ ID NO: 89309 - RNA, 22 nt, Artificial Sequence
  Synthetic
auuuuuguaagcuugucagcua

SEQ ID NO: 89310 - RNA, 23 nt, Artificial Sequence
  Synthetic
uauuuuuguaagcuugucagcua

SEQ ID NO: 89311 - RNA, 24 nt, Artificial Sequence
  Synthetic
uuauuuuuguaagcuugucagcua

SEQ ID NO: 89312 - RNA, 18 nt, Artificial Sequence
  Synthetic
acaaucugggaagagcua

SEQ ID NO: 89313 - RNA, 19 nt, Artificial Sequence
  Synthetic
aacaaucugggaagagcua

SEQ ID NO: 89314 - RNA, 20 nt, Artificial Sequence
  Synthetic
aaacaaucugggaagagcua

SEQ ID NO: 89315 - RNA, 21 nt, Artificial Sequence
  Synthetic
aaaacaaucugggaagagcua

SEQ ID NO: 89316 - RNA, 22 nt, Artificial Sequence
  Synthetic
uaaaacaaucugggaagagcua

SEQ ID NO: 89317 - RNA, 23 nt, Artificial Sequence
  Synthetic
uuaaaacaaucugggaagagcua

SEQ ID NO: 89318 - RNA, 24 nt, Artificial Sequence
  Synthetic
uuuaaaacaaucugggaagagcua

SEQ ID NO: 89319 - RNA, 18 nt, Artificial Sequence
  Synthetic
uaauuucagcaugagcua

SEQ ID NO: 89320 - RNA, 19 nt, Artificial Sequence
  Synthetic
cuaauuucagcaugagcua

SEQ ID NO: 89321 - RNA, 20 nt, Artificial Sequence
  Synthetic
ccuaauuucagcaugagcua

SEQ ID NO: 89322 - RNA, 21 nt, Artificial Sequence
  Synthetic
cccuaauuucagcaugagcua

SEQ ID NO: 89323 - RNA, 22 nt, Artificial Sequence
  Synthetic
ucccuaauuucagcaugagcua

SEQ ID NO: 89324 - RNA, 23 nt, Artificial Sequence
  Synthetic
uucccuaauuucagcaugagcua

SEQ ID NO: 89325 - RNA, 24 nt, Artificial Sequence
  Synthetic
cuucccuaauuucagcaugagcua

SEQ ID NO: 89326 - RNA, 18 nt, Artificial Sequence
  Synthetic
aaacaaggagcugagcua

SEQ ID NO: 89327 - RNA, 20 nt, Artificial Sequence
  Synthetic
agaaacaaggagcugagcua

SEQ ID NO: 89328 - RNA, 21 nt, Artificial Sequence
  Synthetic
cagaaacaaggagcugagcua

SEQ ID NO: 89329 - RNA, 22 nt, Artificial Sequence
  Synthetic
acagaaacaaggagcugagcua

SEQ ID NO: 89330 - RNA, 23 nt, Artificial Sequence
  Synthetic
aacagaaacaaggagcugagcua

SEQ ID NO: 89331 - RNA, 24 nt, Artificial Sequence
  Synthetic
aaacagaaacaaggagcugagcua

SEQ ID NO: 89332 - RNA, 18 nt, Artificial Sequence
  Synthetic
acccaagcucuguagcua

SEQ ID NO: 89333 - RNA, 19 nt, Artificial Sequence
  Synthetic
aacccaagcucuguagcua

SEQ ID NO: 89334 - RNA, 20 nt, Artificial Sequence
  Synthetic
aaacccaagcucuguagcua

SEQ ID NO: 89335 - RNA, 21 nt, Artificial Sequence
  Synthetic
uaaacccaagcucuguagcua

SEQ ID NO: 89336 - RNA, 22 nt, Artificial Sequence
  Synthetic
uuaaacccaagcucuguagcua

SEQ ID NO: 89337 - RNA, 23 nt, Artificial Sequence
  Synthetic
uuuaaacccaagcucuguagcua

SEQ ID NO: 89338 - RNA, 18 nt, Artificial Sequence
  Synthetic
ugcucagggaagacgcua

SEQ ID NO: 89339 - RNA, 19 nt, Artificial Sequence
  Synthetic
cugcucagggaagacgcua

SEQ ID NO: 89340 - RNA, 20 nt, Artificial Sequence
  Synthetic
acugcucagggaagacgcua

SEQ ID NO: 89341 - RNA, 21 nt, Artificial Sequence
  Synthetic
uacugcucagggaagacgcua

SEQ ID NO: 89342 - RNA, 22 nt, Artificial Sequence
  Synthetic
auacugcucagggaagacgcua

SEQ ID NO: 89343 - RNA, 23 nt, Artificial Sequence
  Synthetic
cauacugcucagggaagacgcua

SEQ ID NO: 89344 - RNA, 24 nt, Artificial Sequence
  Synthetic
acauacugcucagggaagacgcua

SEQ ID NO: 89345 - RNA, 21 nt, Artificial Sequence
  Synthetic
uaaucaugcagcuuaaggcua

SEQ ID NO: 89346 - RNA, 23 nt, Artificial Sequence
  Synthetic
uguaaucaugcagcuuaaggcua

SEQ ID NO: 89347 - RNA, 24 nt, Artificial Sequence
  Synthetic
cuguaaucaugcagcuuaaggcua

SEQ ID NO: 89348 - RNA, 19 nt, Artificial Sequence
  Synthetic
aguggcaggaucucggcua

SEQ ID NO: 89349 - RNA, 22 nt, Artificial Sequence
  Synthetic
uggaguggcaggaucucggcua

SEQ ID NO: 89350 - RNA, 24 nt, Artificial Sequence
  Synthetic
aguggaguggcaggaucucggcua

SEQ ID NO: 89351 - RNA, 23 nt, Artificial Sequence
  Synthetic
agggggaaagggggggauggcua

SEQ ID NO: 89352 - RNA, 24 nt, Artificial Sequence
  Synthetic
uagggggaaagggggggauggcua

SEQ ID NO: 89353 - RNA, 18 nt, Artificial Sequence
  Synthetic
aguuacuggguauggcua

SEQ ID NO: 89354 - RNA, 19 nt, Artificial Sequence
  Synthetic
caguuacuggguauggcua

SEQ ID NO: 89355 - RNA, 20 nt, Artificial Sequence
  Synthetic
ucaguuacuggguauggcua

SEQ ID NO: 89356 - RNA, 22 nt, Artificial Sequence
  Synthetic
agucaguuacuggguauggcua

SEQ ID NO: 89357 - RNA, 23 nt, Artificial Sequence
  Synthetic
aagucaguuacuggguauggcua

SEQ ID NO: 89358 - RNA, 24 nt, Artificial Sequence
  Synthetic
aaagucaguuacuggguauggcua

SEQ ID NO: 89359 - RNA, 18 nt, Artificial Sequence
  Synthetic
acuggcaacaucuggcua

SEQ ID NO: 89360 - RNA, 19 nt, Artificial Sequence
  Synthetic
uacuggcaacaucuggcua

SEQ ID NO: 89361 - RNA, 20 nt, Artificial Sequence
  Synthetic
cuacuggcaacaucuggcua

SEQ ID NO: 89362 - RNA, 18 nt, Artificial Sequence
  Synthetic
cuuuggcagauuuggcua

SEQ ID NO: 89363 - RNA, 19 nt, Artificial Sequence
  Synthetic
acuuuggcagauuuggcua

SEQ ID NO: 89364 - RNA, 20 nt, Artificial Sequence
  Synthetic
aacuuuggcagauuuggcua

SEQ ID NO: 89365 - RNA, 22 nt, Artificial Sequence
  Synthetic
ugaacuuuggcagauuuggcua

SEQ ID NO: 89366 - RNA, 23 nt, Artificial Sequence
  Synthetic
cugaacuuuggcagauuuggcua

SEQ ID NO: 89367 - RNA, 18 nt, Artificial Sequence
  Synthetic
aucuucuuuacaaugcua

SEQ ID NO: 89368 - RNA, 19 nt, Artificial Sequence
  Synthetic
caucuucuuuacaaugcua

SEQ ID NO: 89369 - RNA, 20 nt, Artificial Sequence
  Synthetic
acaucuucuuuacaaugcua

SEQ ID NO: 89370 - RNA, 21 nt, Artificial Sequence
  Synthetic
cacaucuucuuuacaaugcua

SEQ ID NO: 89371 - RNA, 23 nt, Artificial Sequence
  Synthetic
ugcacaucuucuuuacaaugcua

SEQ ID NO: 89372 - RNA, 24 nt, Artificial Sequence
  Synthetic
uugcacaucuucuuuacaaugcua

SEQ ID NO: 89373 - RNA, 18 nt, Artificial Sequence
  Synthetic
uacauaauuacuaugcua

SEQ ID NO: 89374 - RNA, 19 nt, Artificial Sequence
  Synthetic
auacauaauuacuaugcua

SEQ ID NO: 89375 - RNA, 20 nt, Artificial Sequence
  Synthetic
cauacauaauuacuaugcua

SEQ ID NO: 89376 - RNA, 22 nt, Artificial Sequence
  Synthetic
ugcauacauaauuacuaugcua

SEQ ID NO: 89377 - RNA, 23 nt, Artificial Sequence
  Synthetic
cugcauacauaauuacuaugcua

SEQ ID NO: 89378 - RNA, 24 nt, Artificial Sequence
  Synthetic
ccugcauacauaauuacuaugcua

SEQ ID NO: 89379 - RNA, 18 nt, Artificial Sequence
  Synthetic
aacauucacgaucugcua

SEQ ID NO: 89380 - RNA, 19 nt, Artificial Sequence
  Synthetic
aaacauucacgaucugcua

SEQ ID NO: 89381 - RNA, 20 nt, Artificial Sequence
  Synthetic
caaacauucacgaucugcua

SEQ ID NO: 89382 - RNA, 21 nt, Artificial Sequence
  Synthetic
acaaacauucacgaucugcua

SEQ ID NO: 89383 - RNA, 22 nt, Artificial Sequence
  Synthetic
aacaaacauucacgaucugcua

SEQ ID NO: 89384 - RNA, 23 nt, Artificial Sequence
  Synthetic
caacaaacauucacgaucugcua

SEQ ID NO: 89385 - RNA, 24 nt, Artificial Sequence
  Synthetic
ucaacaaacauucacgaucugcua

SEQ ID NO: 89386 - RNA, 18 nt, Artificial Sequence
  Synthetic
aaggaaggaauucugcua

SEQ ID NO: 89387 - RNA, 19 nt, Artificial Sequence
  Synthetic
aaaggaaggaauucugcua

SEQ ID NO: 89388 - RNA, 20 nt, Artificial Sequence
  Synthetic
aaaaggaaggaauucugcua

SEQ ID NO: 89389 - RNA, 22 nt, Artificial Sequence
  Synthetic
agaaaaggaaggaauucugcua

SEQ ID NO: 89390 - RNA, 23 nt, Artificial Sequence
  Synthetic
cagaaaaggaaggaauucugcua

SEQ ID NO: 89391 - RNA, 24 nt, Artificial Sequence
  Synthetic
ccagaaaaggaaggaauucugcua

SEQ ID NO: 89392 - RNA, 18 nt, Artificial Sequence
  Synthetic
caaguacggacugugcua

SEQ ID NO: 89393 - RNA, 19 nt, Artificial Sequence
  Synthetic
acaaguacggacugugcua

SEQ ID NO: 89394 - RNA, 21 nt, Artificial Sequence
  Synthetic
ugacaaguacggacugugcua

SEQ ID NO: 89395 - RNA, 22 nt, Artificial Sequence
  Synthetic
cugacaaguacggacugugcua

SEQ ID NO: 89396 - RNA, 24 nt, Artificial Sequence
  Synthetic
ugcugacaaguacggacugugcua

SEQ ID NO: 89397 - RNA, 18 nt, Artificial Sequence
  Synthetic
ugauaauguauauugcua

SEQ ID NO: 89398 - RNA, 19 nt, Artificial Sequence
  Synthetic
augauaauguauauugcua

SEQ ID NO: 89399 - RNA, 20 nt, Artificial Sequence
  Synthetic
aaugauaauguauauugcua

SEQ ID NO: 89400 - RNA, 21 nt, Artificial Sequence
  Synthetic
aaaugauaauguauauugcua

SEQ ID NO: 89401 - RNA, 22 nt, Artificial Sequence
  Synthetic
aaaaugauaauguauauugcua

SEQ ID NO: 89402 - RNA, 23 nt, Artificial Sequence
  Synthetic
uaaaaugauaauguauauugcua

SEQ ID NO: 89403 - RNA, 18 nt, Artificial Sequence
  Synthetic
cuucaaaagagguugcua

SEQ ID NO: 89404 - RNA, 19 nt, Artificial Sequence
  Synthetic
ucuucaaaagagguugcua

SEQ ID NO: 89405 - RNA, 20 nt, Artificial Sequence
  Synthetic
uucuucaaaagagguugcua

SEQ ID NO: 89406 - RNA, 22 nt, Artificial Sequence
  Synthetic
aguucuucaaaagagguugcua

SEQ ID NO: 89407 - RNA, 18 nt, Artificial Sequence
  Synthetic
uuuuuacuugauuugcua

SEQ ID NO: 89408 - RNA, 19 nt, Artificial Sequence
  Synthetic
auuuuuacuugauuugcua

SEQ ID NO: 89409 - RNA, 20 nt, Artificial Sequence
  Synthetic
aauuuuuacuugauuugcua

SEQ ID NO: 89410 - RNA, 21 nt, Artificial Sequence
  Synthetic
uaauuuuuacuugauuugcua

SEQ ID NO: 89411 - RNA, 22 nt, Artificial Sequence
  Synthetic
uuaauuuuuacuugauuugcua

SEQ ID NO: 89412 - RNA, 23 nt, Artificial Sequence
  Synthetic
auuaauuuuuacuugauuugcua

SEQ ID NO: 89413 - RNA, 24 nt, Artificial Sequence
  Synthetic
uauuaauuuuuacuugauuugcua

SEQ ID NO: 89414 - RNA, 18 nt, Artificial Sequence
  Synthetic
uucuaagugccuuugcua

SEQ ID NO: 89415 - RNA, 19 nt, Artificial Sequence
  Synthetic
cuucuaagugccuuugcua

SEQ ID NO: 89416 - RNA, 20 nt, Artificial Sequence
  Synthetic
ccuucuaagugccuuugcua

SEQ ID NO: 89417 - RNA, 21 nt, Artificial Sequence
  Synthetic
uccuucuaagugccuuugcua

SEQ ID NO: 89418 - RNA, 22 nt, Artificial Sequence
  Synthetic
auccuucuaagugccuuugcua

SEQ ID NO: 89419 - RNA, 23 nt, Artificial Sequence
  Synthetic
uauccuucuaagugccuuugcua

SEQ ID NO: 89420 - RNA, 24 nt, Artificial Sequence
  Synthetic
auauccuucuaagugccuuugcua

SEQ ID NO: 89421 - RNA, 18 nt, Artificial Sequence
  Synthetic
acccacagcauuuugcua

SEQ ID NO: 89422 - RNA, 19 nt, Artificial Sequence
  Synthetic
cacccacagcauuuugcua

SEQ ID NO: 89423 - RNA, 20 nt, Artificial Sequence
  Synthetic
ucacccacagcauuuugcua

SEQ ID NO: 89424 - RNA, 21 nt, Artificial Sequence
  Synthetic
uucacccacagcauuuugcua

SEQ ID NO: 89425 - RNA, 22 nt, Artificial Sequence
  Synthetic
uuucacccacagcauuuugcua

SEQ ID NO: 89426 - RNA, 23 nt, Artificial Sequence
  Synthetic
uuuucacccacagcauuuugcua

SEQ ID NO: 89427 - RNA, 24 nt, Artificial Sequence
  Synthetic
auuuucacccacagcauuuugcua

SEQ ID NO: 89428 - RNA, 18 nt, Artificial Sequence
  Synthetic
aacaauccuguuuugcua

SEQ ID NO: 89429 - RNA, 19 nt, Artificial Sequence
  Synthetic
uaacaauccuguuuugcua

SEQ ID NO: 89430 - RNA, 20 nt, Artificial Sequence
  Synthetic
uuaacaauccuguuuugcua

SEQ ID NO: 89431 - RNA, 21 nt, Artificial Sequence
  Synthetic
uuuaacaauccuguuuugcua

SEQ ID NO: 89432 - RNA, 22 nt, Artificial Sequence
  Synthetic
uuuuaacaauccuguuuugcua

SEQ ID NO: 89433 - RNA, 23 nt, Artificial Sequence
  Synthetic
auuuuaacaauccuguuuugcua

SEQ ID NO: 89434 - RNA, 24 nt, Artificial Sequence
  Synthetic
aauuuuaacaauccuguuuugcua

SEQ ID NO: 89435 - RNA, 19 nt, Artificial Sequence
  Synthetic
agugauacaacaaaaucua

SEQ ID NO: 89436 - RNA, 20 nt, Artificial Sequence
  Synthetic
aagugauacaacaaaaucua

SEQ ID NO: 89437 - RNA, 21 nt, Artificial Sequence
  Synthetic
aaagugauacaacaaaaucua

SEQ ID NO: 89438 - RNA, 22 nt, Artificial Sequence
  Synthetic
uaaagugauacaacaaaaucua

SEQ ID NO: 89439 - RNA, 24 nt, Artificial Sequence
  Synthetic
aguaaagugauacaacaaaaucua

SEQ ID NO: 89440 - RNA, 18 nt, Artificial Sequence
  Synthetic
uguugaauaaucaaucua

SEQ ID NO: 89441 - RNA, 19 nt, Artificial Sequence
  Synthetic
auguugaauaaucaaucua

SEQ ID NO: 89442 - RNA, 21 nt, Artificial Sequence
  Synthetic
agauguugaauaaucaaucua

SEQ ID NO: 89443 - RNA, 22 nt, Artificial Sequence
  Synthetic
aagauguugaauaaucaaucua

SEQ ID NO: 89444 - RNA, 23 nt, Artificial Sequence
  Synthetic
aaagauguugaauaaucaaucua

SEQ ID NO: 89445 - RNA, 18 nt, Artificial Sequence
  Synthetic
uaaauacuacucaaucua

SEQ ID NO: 89446 - RNA, 19 nt, Artificial Sequence
  Synthetic
uuaaauacuacucaaucua

SEQ ID NO: 89447 - RNA, 20 nt, Artificial Sequence
  Synthetic
uuuaaauacuacucaaucua

SEQ ID NO: 89448 - RNA, 21 nt, Artificial Sequence
  Synthetic
cuuuaaauacuacucaaucua

SEQ ID NO: 89449 - RNA, 22 nt, Artificial Sequence
  Synthetic
acuuuaaauacuacucaaucua

SEQ ID NO: 89450 - RNA, 23 nt, Artificial Sequence
  Synthetic
uacuuuaaauacuacucaaucua

SEQ ID NO: 89451 - RNA, 24 nt, Artificial Sequence
  Synthetic
auacuuuaaauacuacucaaucua

SEQ ID NO: 89452 - RNA, 21 nt, Artificial Sequence
  Synthetic
cgguacugagcccucaaucua

SEQ ID NO: 89453 - RNA, 22 nt, Artificial Sequence
  Synthetic
ucgguacugagcccucaaucua

SEQ ID NO: 89454 - RNA, 23 nt, Artificial Sequence
  Synthetic
cucgguacugagcccucaaucua

SEQ ID NO: 89455 - RNA, 24 nt, Artificial Sequence
  Synthetic
ccucgguacugagcccucaaucua

SEQ ID NO: 89456 - RNA, 18 nt, Artificial Sequence
  Synthetic
uaggacagugcuaaucua

SEQ ID NO: 89457 - RNA, 19 nt, Artificial Sequence
  Synthetic
auaggacagugcuaaucua

SEQ ID NO: 89458 - RNA, 20 nt, Artificial Sequence
  Synthetic
uauaggacagugcuaaucua

SEQ ID NO: 89459 - RNA, 21 nt, Artificial Sequence
  Synthetic
cuauaggacagugcuaaucua

SEQ ID NO: 89460 - RNA, 22 nt, Artificial Sequence
  Synthetic
ucuauaggacagugcuaaucua

SEQ ID NO: 89461 - RNA, 23 nt, Artificial Sequence
  Synthetic
uucuauaggacagugcuaaucua

SEQ ID NO: 89462 - RNA, 18 nt, Artificial Sequence
  Synthetic
auuuauucacuuaaucua

SEQ ID NO: 89463 - RNA, 19 nt, Artificial Sequence
  Synthetic
aauuuauucacuuaaucua

SEQ ID NO: 89464 - RNA, 20 nt, Artificial Sequence
  Synthetic
uaauuuauucacuuaaucua

SEQ ID NO: 89465 - RNA, 21 nt, Artificial Sequence
  Synthetic
uuaauuuauucacuuaaucua

SEQ ID NO: 89466 - RNA, 22 nt, Artificial Sequence
  Synthetic
uuuaauuuauucacuuaaucua

SEQ ID NO: 89467 - RNA, 23 nt, Artificial Sequence
  Synthetic
uuuuaauuuauucacuuaaucua

SEQ ID NO: 89468 - RNA, 24 nt, Artificial Sequence
  Synthetic
uuuuuaauuuauucacuuaaucua

SEQ ID NO: 89469 - RNA, 18 nt, Artificial Sequence
  Synthetic
aagaaugcccaauaucua

SEQ ID NO: 89470 - RNA, 19 nt, Artificial Sequence
  Synthetic
aaagaaugcccaauaucua

SEQ ID NO: 89471 - RNA, 20 nt, Artificial Sequence
  Synthetic
uaaagaaugcccaauaucua

SEQ ID NO: 89472 - RNA, 22 nt, Artificial Sequence
  Synthetic
aguaaagaaugcccaauaucua

SEQ ID NO: 89473 - RNA, 23 nt, Artificial Sequence
  Synthetic
aaguaaagaaugcccaauaucua

SEQ ID NO: 89474 - RNA, 24 nt, Artificial Sequence
  Synthetic
uaaguaaagaaugcccaauaucua

SEQ ID NO: 89475 - RNA, 20 nt, Artificial Sequence
  Synthetic
uggcaugcaauuaauaucua

SEQ ID NO: 89476 - RNA, 21 nt, Artificial Sequence
  Synthetic
uuggcaugcaauuaauaucua

SEQ ID NO: 89477 - RNA, 24 nt, Artificial Sequence
  Synthetic
ugguuggcaugcaauuaauaucua

SEQ ID NO: 89478 - RNA, 18 nt, Artificial Sequence
  Synthetic
uuccaguacaaaacucua

SEQ ID NO: 89479 - RNA, 19 nt, Artificial Sequence
  Synthetic
auuccaguacaaaacucua

SEQ ID NO: 89480 - RNA, 20 nt, Artificial Sequence
  Synthetic
cauuccaguacaaaacucua

SEQ ID NO: 89481 - RNA, 21 nt, Artificial Sequence
  Synthetic
ucauuccaguacaaaacucua

SEQ ID NO: 89482 - RNA, 22 nt, Artificial Sequence
  Synthetic
cucauuccaguacaaaacucua

SEQ ID NO: 89483 - RNA, 23 nt, Artificial Sequence
  Synthetic
ccucauuccaguacaaaacucua

SEQ ID NO: 89484 - RNA, 22 nt, Artificial Sequence
  Synthetic
ugcuuucuuuucugucacucua

SEQ ID NO: 89485 - RNA, 23 nt, Artificial Sequence
  Synthetic
cugcuuucuuuucugucacucua

SEQ ID NO: 89486 - RNA, 24 nt, Artificial Sequence
  Synthetic
ucugcuuucuuuucugucacucua

SEQ ID NO: 89487 - RNA, 18 nt, Artificial Sequence
  Synthetic
ucuuacauuccuacucua

SEQ ID NO: 89488 - RNA, 19 nt, Artificial Sequence
  Synthetic
uucuuacauuccuacucua

SEQ ID NO: 89489 - RNA, 20 nt, Artificial Sequence
  Synthetic
auucuuacauuccuacucua

SEQ ID NO: 89490 - RNA, 21 nt, Artificial Sequence
  Synthetic
aauucuuacauuccuacucua

SEQ ID NO: 89491 - RNA, 22 nt, Artificial Sequence
  Synthetic
aaauucuuacauuccuacucua

SEQ ID NO: 89492 - RNA, 23 nt, Artificial Sequence
  Synthetic
uaaauucuuacauuccuacucua

SEQ ID NO: 89493 - RNA, 24 nt, Artificial Sequence
  Synthetic
uuaaauucuuacauuccuacucua

SEQ ID NO: 89494 - RNA, 19 nt, Artificial Sequence
  Synthetic
agagcuugcauucccucua

SEQ ID NO: 89495 - RNA, 20 nt, Artificial Sequence
  Synthetic
cagagcuugcauucccucua

SEQ ID NO: 89496 - RNA, 23 nt, Artificial Sequence
  Synthetic
uggcagagcuugcauucccucua

SEQ ID NO: 89497 - RNA, 24 nt, Artificial Sequence
  Synthetic
uuggcagagcuugcauucccucua

SEQ ID NO: 89498 - RNA, 19 nt, Artificial Sequence
  Synthetic
aggccucagccuagcucua

SEQ ID NO: 89499 - RNA, 20 nt, Artificial Sequence
  Synthetic
caggccucagccuagcucua

SEQ ID NO: 89500 - RNA, 21 nt, Artificial Sequence
  Synthetic
ccaggccucagccuagcucua

SEQ ID NO: 89501 - RNA, 22 nt, Artificial Sequence
  Synthetic
cccaggccucagccuagcucua

SEQ ID NO: 89502 - RNA, 23 nt, Artificial Sequence
  Synthetic
ucccaggccucagccuagcucua

SEQ ID NO: 89503 - RNA, 24 nt, Artificial Sequence
  Synthetic
uucccaggccucagccuagcucua

SEQ ID NO: 89504 - RNA, 18 nt, Artificial Sequence
  Synthetic
augcucagauuagcucua

SEQ ID NO: 89505 - RNA, 22 nt, Artificial Sequence
  Synthetic
ugggaugcucagauuagcucua

SEQ ID NO: 89506 - RNA, 23 nt, Artificial Sequence
  Synthetic
cugggaugcucagauuagcucua

SEQ ID NO: 89507 - RNA, 24 nt, Artificial Sequence
  Synthetic
ucugggaugcucagauuagcucua

SEQ ID NO: 89508 - RNA, 18 nt, Artificial Sequence
  Synthetic
augacaaggcaggcucua

SEQ ID NO: 89509 - RNA, 20 nt, Artificial Sequence
  Synthetic
agaugacaaggcaggcucua

SEQ ID NO: 89510 - RNA, 23 nt, Artificial Sequence
  Synthetic
uggagaugacaaggcaggcucua

SEQ ID NO: 89511 - RNA, 24 nt, Artificial Sequence
  Synthetic
uuggagaugacaaggcaggcucua

SEQ ID NO: 89512 - RNA, 18 nt, Artificial Sequence
  Synthetic
caagauuucacuucucua

SEQ ID NO: 89513 - RNA, 19 nt, Artificial Sequence
  Synthetic
acaagauuucacuucucua

SEQ ID NO: 89514 - RNA, 20 nt, Artificial Sequence
  Synthetic
aacaagauuucacuucucua

SEQ ID NO: 89515 - RNA, 21 nt, Artificial Sequence
  Synthetic
aaacaagauuucacuucucua

SEQ ID NO: 89516 - RNA, 22 nt, Artificial Sequence
  Synthetic
caaacaagauuucacuucucua

SEQ ID NO: 89517 - RNA, 23 nt, Artificial Sequence
  Synthetic
ucaaacaagauuucacuucucua

SEQ ID NO: 89518 - RNA, 24 nt, Artificial Sequence
  Synthetic
cucaaacaagauuucacuucucua

SEQ ID NO: 89519 - RNA, 18 nt, Artificial Sequence
  Synthetic
aaaggugagcuuucucua

SEQ ID NO: 89520 - RNA, 19 nt, Artificial Sequence
  Synthetic
aaaaggugagcuuucucua

SEQ ID NO: 89521 - RNA, 21 nt, Artificial Sequence
  Synthetic
ugaaaaggugagcuuucucua

SEQ ID NO: 89522 - RNA, 22 nt, Artificial Sequence
  Synthetic
uugaaaaggugagcuuucucua

SEQ ID NO: 89523 - RNA, 24 nt, Artificial Sequence
  Synthetic
uguugaaaaggugagcuuucucua

SEQ ID NO: 89524 - RNA, 18 nt, Artificial Sequence
  Synthetic
ucuagaugugaaagucua

SEQ ID NO: 89525 - RNA, 20 nt, Artificial Sequence
  Synthetic
ugucuagaugugaaagucua

SEQ ID NO: 89526 - RNA, 21 nt, Artificial Sequence
  Synthetic
cugucuagaugugaaagucua

SEQ ID NO: 89527 - RNA, 22 nt, Artificial Sequence
  Synthetic
acugucuagaugugaaagucua

SEQ ID NO: 89528 - RNA, 23 nt, Artificial Sequence
  Synthetic
aacugucuagaugugaaagucua

SEQ ID NO: 89529 - RNA, 24 nt, Artificial Sequence
  Synthetic
caacugucuagaugugaaagucua

SEQ ID NO: 89530 - RNA, 18 nt, Artificial Sequence
  Synthetic
aauuccauucuaagucua

SEQ ID NO: 89531 - RNA, 20 nt, Artificial Sequence
  Synthetic
agaauuccauucuaagucua

SEQ ID NO: 89532 - RNA, 21 nt, Artificial Sequence
  Synthetic
cagaauuccauucuaagucua

SEQ ID NO: 89533 - RNA, 22 nt, Artificial Sequence
  Synthetic
ccagaauuccauucuaagucua

SEQ ID NO: 89534 - RNA, 23 nt, Artificial Sequence
  Synthetic
cccagaauuccauucuaagucua

SEQ ID NO: 89535 - RNA, 19 nt, Artificial Sequence
  Synthetic
aggauuuugaaagugucua

SEQ ID NO: 89536 - RNA, 22 nt, Artificial Sequence
  Synthetic
uggaggauuuugaaagugucua

SEQ ID NO: 89537 - RNA, 23 nt, Artificial Sequence
  Synthetic
uuggaggauuuugaaagugucua

SEQ ID NO: 89538 - RNA, 24 nt, Artificial Sequence
  Synthetic
uuuggaggauuuugaaagugucua

SEQ ID NO: 89539 - RNA, 18 nt, Artificial Sequence
  Synthetic
caacaugcaaaaauucua

SEQ ID NO: 89540 - RNA, 19 nt, Artificial Sequence
  Synthetic
ccaacaugcaaaaauucua

SEQ ID NO: 89541 - RNA, 20 nt, Artificial Sequence
  Synthetic
cccaacaugcaaaaauucua

SEQ ID NO: 89542 - RNA, 21 nt, Artificial Sequence
  Synthetic
ucccaacaugcaaaaauucua

SEQ ID NO: 89543 - RNA, 22 nt, Artificial Sequence
  Synthetic
uucccaacaugcaaaaauucua

SEQ ID NO: 89544 - RNA, 23 nt, Artificial Sequence
  Synthetic
auucccaacaugcaaaaauucua

SEQ ID NO: 89545 - RNA, 24 nt, Artificial Sequence
  Synthetic
uauucccaacaugcaaaaauucua

SEQ ID NO: 89546 - RNA, 18 nt, Artificial Sequence
  Synthetic
uggccaagacuuauucua

SEQ ID NO: 89547 - RNA, 21 nt, Artificial Sequence
  Synthetic
agguggccaagacuuauucua

SEQ ID NO: 89548 - RNA, 22 nt, Artificial Sequence
  Synthetic
uagguggccaagacuuauucua

SEQ ID NO: 89549 - RNA, 23 nt, Artificial Sequence
  Synthetic
uuagguggccaagacuuauucua

SEQ ID NO: 89550 - RNA, 24 nt, Artificial Sequence
  Synthetic
uuuagguggccaagacuuauucua

SEQ ID NO: 89551 - RNA, 18 nt, Artificial Sequence
  Synthetic
aguuucuuucaacuucua

SEQ ID NO: 89552 - RNA, 19 nt, Artificial Sequence
  Synthetic
aaguuucuuucaacuucua

SEQ ID NO: 89553 - RNA, 20 nt, Artificial Sequence
  Synthetic
caaguuucuuucaacuucua

SEQ ID NO: 89554 - RNA, 22 nt, Artificial Sequence
  Synthetic
agcaaguuucuuucaacuucua

SEQ ID NO: 89555 - RNA, 23 nt, Artificial Sequence
  Synthetic
cagcaaguuucuuucaacuucua

SEQ ID NO: 89556 - RNA, 24 nt, Artificial Sequence
  Synthetic
ucagcaaguuucuuucaacuucua

SEQ ID NO: 89557 - RNA, 21 nt, Artificial Sequence
  Synthetic
cacccagccauuccacuucua

SEQ ID NO: 89558 - RNA, 22 nt, Artificial Sequence
  Synthetic
ucacccagccauuccacuucua

SEQ ID NO: 89559 - RNA, 23 nt, Artificial Sequence
  Synthetic
uucacccagccauuccacuucua

SEQ ID NO: 89560 - RNA, 24 nt, Artificial Sequence
  Synthetic
uuucacccagccauuccacuucua

SEQ ID NO: 89561 - RNA, 18 nt, Artificial Sequence
  Synthetic
aaaugccugcuacuucua

SEQ ID NO: 89562 - RNA, 20 nt, Artificial Sequence
  Synthetic
agaaaugccugcuacuucua

SEQ ID NO: 89563 - RNA, 21 nt, Artificial Sequence
  Synthetic
cagaaaugccugcuacuucua

SEQ ID NO: 89564 - RNA, 22 nt, Artificial Sequence
  Synthetic
acagaaaugccugcuacuucua

SEQ ID NO: 89565 - RNA, 23 nt, Artificial Sequence
  Synthetic
cacagaaaugccugcuacuucua

SEQ ID NO: 89566 - RNA, 24 nt, Artificial Sequence
  Synthetic
ucacagaaaugccugcuacuucua

SEQ ID NO: 89567 - RNA, 18 nt, Artificial Sequence
  Synthetic
cacuauuuaugccuucua

SEQ ID NO: 89568 - RNA, 20 nt, Artificial Sequence
  Synthetic
agcacuauuuaugccuucua

SEQ ID NO: 89569 - RNA, 21 nt, Artificial Sequence
  Synthetic
aagcacuauuuaugccuucua

SEQ ID NO: 89570 - RNA, 22 nt, Artificial Sequence
  Synthetic
caagcacuauuuaugccuucua

SEQ ID NO: 89571 - RNA, 23 nt, Artificial Sequence
  Synthetic
ccaagcacuauuuaugccuucua

SEQ ID NO: 89572 - RNA, 24 nt, Artificial Sequence
  Synthetic
uccaagcacuauuuaugccuucua

SEQ ID NO: 89573 - RNA, 18 nt, Artificial Sequence
  Synthetic
uaauaagcuuuucuucua

SEQ ID NO: 89574 - RNA, 19 nt, Artificial Sequence
  Synthetic
auaauaagcuuuucuucua

SEQ ID NO: 89575 - RNA, 20 nt, Artificial Sequence
  Synthetic
aauaauaagcuuuucuucua

SEQ ID NO: 89576 - RNA, 21 nt, Artificial Sequence
  Synthetic
caauaauaagcuuuucuucua

SEQ ID NO: 89577 - RNA, 22 nt, Artificial Sequence
  Synthetic
ccaauaauaagcuuuucuucua

SEQ ID NO: 89578 - RNA, 23 nt, Artificial Sequence
  Synthetic
cccaauaauaagcuuuucuucua

SEQ ID NO: 89579 - RNA, 24 nt, Artificial Sequence
  Synthetic
acccaauaauaagcuuuucuucua

SEQ ID NO: 89580 - RNA, 18 nt, Artificial Sequence
  Synthetic
ugucauguacaaguucua

SEQ ID NO: 89581 - RNA, 19 nt, Artificial Sequence
  Synthetic
augucauguacaaguucua

SEQ ID NO: 89582 - RNA, 20 nt, Artificial Sequence
  Synthetic
aaugucauguacaaguucua

SEQ ID NO: 89583 - RNA, 22 nt, Artificial Sequence
  Synthetic
agaaugucauguacaaguucua

SEQ ID NO: 89584 - RNA, 23 nt, Artificial Sequence
  Synthetic
cagaaugucauguacaaguucua

SEQ ID NO: 89585 - RNA, 24 nt, Artificial Sequence
  Synthetic
ucagaaugucauguacaaguucua

SEQ ID NO: 89586 - RNA, 19 nt, Artificial Sequence
  Synthetic
agccgggaauucaguucua

SEQ ID NO: 89587 - RNA, 20 nt, Artificial Sequence
  Synthetic
cagccgggaauucaguucua

SEQ ID NO: 89588 - RNA, 21 nt, Artificial Sequence
  Synthetic
ccagccgggaauucaguucua

SEQ ID NO: 89589 - RNA, 22 nt, Artificial Sequence
  Synthetic
cccagccgggaauucaguucua

SEQ ID NO: 89590 - RNA, 23 nt, Artificial Sequence
  Synthetic
acccagccgggaauucaguucua

SEQ ID NO: 89591 - RNA, 24 nt, Artificial Sequence
  Synthetic
cacccagccgggaauucaguucua

SEQ ID NO: 89592 - RNA, 18 nt, Artificial Sequence
  Synthetic
auguauuuauucguucua

SEQ ID NO: 89593 - RNA, 19 nt, Artificial Sequence
  Synthetic
uauguauuuauucguucua

SEQ ID NO: 89594 - RNA, 20 nt, Artificial Sequence
  Synthetic
uuauguauuuauucguucua

SEQ ID NO: 89595 - RNA, 21 nt, Artificial Sequence
  Synthetic
uuuauguauuuauucguucua

SEQ ID NO: 89596 - RNA, 22 nt, Artificial Sequence
  Synthetic
auuuauguauuuauucguucua

SEQ ID NO: 89597 - RNA, 23 nt, Artificial Sequence
  Synthetic
uauuuauguauuuauucguucua

SEQ ID NO: 89598 - RNA, 24 nt, Artificial Sequence
  Synthetic
uuauuuauguauuuauucguucua

SEQ ID NO: 89599 - RNA, 18 nt, Artificial Sequence
  Synthetic
auuucaguaaauguucua

SEQ ID NO: 89600 - RNA, 19 nt, Artificial Sequence
  Synthetic
uauuucaguaaauguucua

SEQ ID NO: 89601 - RNA, 21 nt, Artificial Sequence
  Synthetic
uguauuucaguaaauguucua

SEQ ID NO: 89602 - RNA, 22 nt, Artificial Sequence
  Synthetic
auguauuucaguaaauguucua

SEQ ID NO: 89603 - RNA, 23 nt, Artificial Sequence
  Synthetic
aauguauuucaguaaauguucua

SEQ ID NO: 89604 - RNA, 24 nt, Artificial Sequence
  Synthetic
aaauguauuucaguaaauguucua

SEQ ID NO: 89605 - RNA, 18 nt, Artificial Sequence
  Synthetic
ccuguuucauuuguucua

SEQ ID NO: 89606 - RNA, 19 nt, Artificial Sequence
  Synthetic
uccuguuucauuuguucua

SEQ ID NO: 89607 - RNA, 20 nt, Artificial Sequence
  Synthetic
auccuguuucauuuguucua

SEQ ID NO: 89608 - RNA, 21 nt, Artificial Sequence
  Synthetic
cauccuguuucauuuguucua

SEQ ID NO: 89609 - RNA, 22 nt, Artificial Sequence
  Synthetic
ccauccuguuucauuuguucua

SEQ ID NO: 89610 - RNA, 23 nt, Artificial Sequence
  Synthetic
uccauccuguuucauuuguucua

SEQ ID NO: 89611 - RNA, 24 nt, Artificial Sequence
  Synthetic
cuccauccuguuucauuuguucua

SEQ ID NO: 89612 - RNA, 21 nt, Artificial Sequence
  Synthetic
auuggaaccuuuuaauuucua

SEQ ID NO: 89613 - RNA, 22 nt, Artificial Sequence
  Synthetic
aauuggaaccuuuuaauuucua

SEQ ID NO: 89614 - RNA, 23 nt, Artificial Sequence
  Synthetic
aaauuggaaccuuuuaauuucua

SEQ ID NO: 89615 - RNA, 18 nt, Artificial Sequence
  Synthetic
acagucaauauauuucua

SEQ ID NO: 89616 - RNA, 20 nt, Artificial Sequence
  Synthetic
agacagucaauauauuucua

SEQ ID NO: 89617 - RNA, 21 nt, Artificial Sequence
  Synthetic
aagacagucaauauauuucua

SEQ ID NO: 89618 - RNA, 22 nt, Artificial Sequence
  Synthetic
aaagacagucaauauauuucua

SEQ ID NO: 89619 - RNA, 23 nt, Artificial Sequence
  Synthetic
aaaagacagucaauauauuucua

SEQ ID NO: 89620 - RNA, 24 nt, Artificial Sequence
  Synthetic
uaaaagacagucaauauauuucua

SEQ ID NO: 89621 - RNA, 18 nt, Artificial Sequence
  Synthetic
ugaggaucuauauuucua

SEQ ID NO: 89622 - RNA, 19 nt, Artificial Sequence
  Synthetic
cugaggaucuauauuucua

SEQ ID NO: 89623 - RNA, 20 nt, Artificial Sequence
  Synthetic
ccugaggaucuauauuucua

SEQ ID NO: 89624 - RNA, 23 nt, Artificial Sequence
  Synthetic
aggccugaggaucuauauuucua

SEQ ID NO: 89625 - RNA, 20 nt, Artificial Sequence
  Synthetic
aggaaucaaugcuauuucua

SEQ ID NO: 89626 - RNA, 21 nt, Artificial Sequence
  Synthetic
aaggaaucaaugcuauuucua

SEQ ID NO: 89627 - RNA, 24 nt, Artificial Sequence
  Synthetic
aggaaggaaucaaugcuauuucua

SEQ ID NO: 89628 - RNA, 18 nt, Artificial Sequence
  Synthetic
auugucuucaaguuucua

SEQ ID NO: 89629 - RNA, 19 nt, Artificial Sequence
  Synthetic
aauugucuucaaguuucua

SEQ ID NO: 89630 - RNA, 20 nt, Artificial Sequence
  Synthetic
caauugucuucaaguuucua

SEQ ID NO: 89631 - RNA, 21 nt, Artificial Sequence
  Synthetic
ccaauugucuucaaguuucua

SEQ ID NO: 89632 - RNA, 22 nt, Artificial Sequence
  Synthetic
uccaauugucuucaaguuucua

SEQ ID NO: 89633 - RNA, 23 nt, Artificial Sequence
  Synthetic
uuccaauugucuucaaguuucua

SEQ ID NO: 89634 - RNA, 24 nt, Artificial Sequence
  Synthetic
auuccaauugucuucaaguuucua

SEQ ID NO: 89635 - RNA, 18 nt, Artificial Sequence
  Synthetic
acuccugcugauuuucua

SEQ ID NO: 89636 - RNA, 20 nt, Artificial Sequence
  Synthetic
ugacuccugcugauuuucua

SEQ ID NO: 89637 - RNA, 21 nt, Artificial Sequence
  Synthetic
uugacuccugcugauuuucua

SEQ ID NO: 89638 - RNA, 22 nt, Artificial Sequence
  Synthetic
uuugacuccugcugauuuucua

SEQ ID NO: 89639 - RNA, 23 nt, Artificial Sequence
  Synthetic
cuuugacuccugcugauuuucua

SEQ ID NO: 89640 - RNA, 24 nt, Artificial Sequence
  Synthetic
acuuugacuccugcugauuuucua

SEQ ID NO: 89641 - RNA, 19 nt, Artificial Sequence
  Synthetic
agguaagcaguguuuucua

SEQ ID NO: 89642 - RNA, 21 nt, Artificial Sequence
  Synthetic
ugagguaagcaguguuuucua

SEQ ID NO: 89643 - RNA, 22 nt, Artificial Sequence
  Synthetic
augagguaagcaguguuuucua

SEQ ID NO: 89644 - RNA, 23 nt, Artificial Sequence
  Synthetic
aaugagguaagcaguguuuucua

SEQ ID NO: 89645 - RNA, 24 nt, Artificial Sequence
  Synthetic
aaaugagguaagcaguguuuucua

SEQ ID NO: 89646 - RNA, 21 nt, Artificial Sequence
  Synthetic
agaacuuuucccauuuuucua

SEQ ID NO: 89647 - RNA, 22 nt, Artificial Sequence
  Synthetic
aagaacuuuucccauuuuucua

SEQ ID NO: 89648 - RNA, 23 nt, Artificial Sequence
  Synthetic
caagaacuuuucccauuuuucua

SEQ ID NO: 89649 - RNA, 24 nt, Artificial Sequence
  Synthetic
ucaagaacuuuucccauuuuucua

SEQ ID NO: 89650 - RNA, 21 nt, Artificial Sequence
  Synthetic
uguucuucccauuuuuuucua

SEQ ID NO: 89651 - RNA, 22 nt, Artificial Sequence
  Synthetic
auguucuucccauuuuuuucua

SEQ ID NO: 89652 - RNA, 24 nt, Artificial Sequence
  Synthetic
ugauguucuucccauuuuuuucua

SEQ ID NO: 89653 - RNA, 21 nt, Artificial Sequence
  Synthetic
cuaaauauguauuuuuuucua

SEQ ID NO: 89654 - RNA, 22 nt, Artificial Sequence
  Synthetic
ccuaaauauguauuuuuuucua

SEQ ID NO: 89655 - RNA, 23 nt, Artificial Sequence
  Synthetic
uccuaaauauguauuuuuuucua

SEQ ID NO: 89656 - RNA, 24 nt, Artificial Sequence
  Synthetic
cuccuaaauauguauuuuuuucua

SEQ ID NO: 89657 - RNA, 18 nt, Artificial Sequence
  Synthetic
ucaauaauuugaaaagua

SEQ ID NO: 89658 - RNA, 19 nt, Artificial Sequence
  Synthetic
uucaauaauuugaaaagua

SEQ ID NO: 89659 - RNA, 20 nt, Artificial Sequence
  Synthetic
auucaauaauuugaaaagua

SEQ ID NO: 89660 - RNA, 21 nt, Artificial Sequence
  Synthetic
uauucaauaauuugaaaagua

SEQ ID NO: 89661 - RNA, 22 nt, Artificial Sequence
  Synthetic
uuauucaauaauuugaaaagua

SEQ ID NO: 89662 - RNA, 23 nt, Artificial Sequence
  Synthetic
uuuauucaauaauuugaaaagua

SEQ ID NO: 89663 - RNA, 18 nt, Artificial Sequence
  Synthetic
uccaaccacuacaaagua

SEQ ID NO: 89664 - RNA, 20 nt, Artificial Sequence
  Synthetic
uguccaaccacuacaaagua

SEQ ID NO: 89665 - RNA, 21 nt, Artificial Sequence
  Synthetic
uuguccaaccacuacaaagua

SEQ ID NO: 89666 - RNA, 22 nt, Artificial Sequence
  Synthetic
uuuguccaaccacuacaaagua

SEQ ID NO: 89667 - RNA, 23 nt, Artificial Sequence
  Synthetic
uuuuguccaaccacuacaaagua

SEQ ID NO: 89668 - RNA, 24 nt, Artificial Sequence
  Synthetic
uuuuuguccaaccacuacaaagua

SEQ ID NO: 89669 - RNA, 18 nt, Artificial Sequence
  Synthetic
uaccguacuuauaaagua

SEQ ID NO: 89670 - RNA, 19 nt, Artificial Sequence
  Synthetic
auaccguacuuauaaagua

SEQ ID NO: 89671 - RNA, 20 nt, Artificial Sequence
  Synthetic
uauaccguacuuauaaagua

SEQ ID NO: 89672 - RNA, 21 nt, Artificial Sequence
  Synthetic
auauaccguacuuauaaagua

SEQ ID NO: 89673 - RNA, 22 nt, Artificial Sequence
  Synthetic
aauauaccguacuuauaaagua

SEQ ID NO: 89674 - RNA, 23 nt, Artificial Sequence
  Synthetic
aaauauaccguacuuauaaagua

SEQ ID NO: 89675 - RNA, 24 nt, Artificial Sequence
  Synthetic
aaaauauaccguacuuauaaagua

SEQ ID NO: 89676 - RNA, 18 nt, Artificial Sequence
  Synthetic
uuuacagcaacccaagua

SEQ ID NO: 89677 - RNA, 19 nt, Artificial Sequence
  Synthetic
auuuacagcaacccaagua

SEQ ID NO: 89678 - RNA, 20 nt, Artificial Sequence
  Synthetic
aauuuacagcaacccaagua

SEQ ID NO: 89679 - RNA, 22 nt, Artificial Sequence
  Synthetic
agaauuuacagcaacccaagua

SEQ ID NO: 89680 - RNA, 24 nt, Artificial Sequence
  Synthetic
agagaauuuacagcaacccaagua

SEQ ID NO: 89681 - RNA, 18 nt, Artificial Sequence
  Synthetic
uuacacuccaaagaagua

SEQ ID NO: 89682 - RNA, 19 nt, Artificial Sequence
  Synthetic
auuacacuccaaagaagua

SEQ ID NO: 89683 - RNA, 20 nt, Artificial Sequence
  Synthetic
aauuacacuccaaagaagua

SEQ ID NO: 89684 - RNA, 21 nt, Artificial Sequence
  Synthetic
aaauuacacuccaaagaagua

SEQ ID NO: 89685 - RNA, 22 nt, Artificial Sequence
  Synthetic
aaaauuacacuccaaagaagua

SEQ ID NO: 89686 - RNA, 23 nt, Artificial Sequence
  Synthetic
uaaaauuacacuccaaagaagua

SEQ ID NO: 89687 - RNA, 24 nt, Artificial Sequence
  Synthetic
auaaaauuacacuccaaagaagua

SEQ ID NO: 89688 - RNA, 18 nt, Artificial Sequence
  Synthetic
aggcaagcaccugaagua

SEQ ID NO: 89689 - RNA, 19 nt, Artificial Sequence
  Synthetic
uaggcaagcaccugaagua

SEQ ID NO: 89690 - RNA, 20 nt, Artificial Sequence
  Synthetic
cuaggcaagcaccugaagua

SEQ ID NO: 89691 - RNA, 21 nt, Artificial Sequence
  Synthetic
ucuaggcaagcaccugaagua

SEQ ID NO: 89692 - RNA, 22 nt, Artificial Sequence
  Synthetic
cucuaggcaagcaccugaagua

SEQ ID NO: 89693 - RNA, 21 nt, Artificial Sequence
  Synthetic
uaaaaaaauugacaauaagua

SEQ ID NO: 89694 - RNA, 22 nt, Artificial Sequence
  Synthetic
uuaaaaaaauugacaauaagua

SEQ ID NO: 89695 - RNA, 23 nt, Artificial Sequence
  Synthetic
uuuaaaaaaauugacaauaagua

SEQ ID NO: 89696 - RNA, 24 nt, Artificial Sequence
  Synthetic
auuuaaaaaaauugacaauaagua

SEQ ID NO: 89697 - RNA, 19 nt, Artificial Sequence
  Synthetic
agauuaaaaagaguaagua

SEQ ID NO: 89698 - RNA, 20 nt, Artificial Sequence
  Synthetic
aagauuaaaaagaguaagua

SEQ ID NO: 89699 - RNA, 21 nt, Artificial Sequence
  Synthetic
aaagauuaaaaagaguaagua

SEQ ID NO: 89700 - RNA, 23 nt, Artificial Sequence
  Synthetic
agaaagauuaaaaagaguaagua

SEQ ID NO: 89701 - RNA, 24 nt, Artificial Sequence
  Synthetic
aagaaagauuaaaaagaguaagua

SEQ ID NO: 89702 - RNA, 18 nt, Artificial Sequence
  Synthetic
uucaguggugaguaagua

SEQ ID NO: 89703 - RNA, 19 nt, Artificial Sequence
  Synthetic
auucaguggugaguaagua

SEQ ID NO: 89704 - RNA, 20 nt, Artificial Sequence
  Synthetic
aauucaguggugaguaagua

SEQ ID NO: 89705 - RNA, 22 nt, Artificial Sequence
  Synthetic
ugaauucaguggugaguaagua

SEQ ID NO: 89706 - RNA, 23 nt, Artificial Sequence
  Synthetic
augaauucaguggugaguaagua

SEQ ID NO: 89707 - RNA, 24 nt, Artificial Sequence
  Synthetic
uaugaauucaguggugaguaagua

SEQ ID NO: 89708 - RNA, 18 nt, Artificial Sequence
  Synthetic
ucuccacuuucuuaagua

SEQ ID NO: 89709 - RNA, 19 nt, Artificial Sequence
  Synthetic
cucuccacuuucuuaagua

SEQ ID NO: 89710 - RNA, 20 nt, Artificial Sequence
  Synthetic
ccucuccacuuucuuaagua

SEQ ID NO: 89711 - RNA, 21 nt, Artificial Sequence
  Synthetic
uccucuccacuuucuuaagua

SEQ ID NO: 89712 - RNA, 22 nt, Artificial Sequence
  Synthetic
cuccucuccacuuucuuaagua

SEQ ID NO: 89713 - RNA, 23 nt, Artificial Sequence
  Synthetic
ucuccucuccacuuucuuaagua

SEQ ID NO: 89714 - RNA, 24 nt, Artificial Sequence
  Synthetic
cucuccucuccacuuucuuaagua

SEQ ID NO: 89715 - RNA, 21 nt, Artificial Sequence
  Synthetic
agcuucuaaauauuuuaagua

SEQ ID NO: 89716 - RNA, 22 nt, Artificial Sequence
  Synthetic
uagcuucuaaauauuuuaagua

SEQ ID NO: 89717 - RNA, 23 nt, Artificial Sequence
  Synthetic
auagcuucuaaauauuuuaagua

SEQ ID NO: 89718 - RNA, 24 nt, Artificial Sequence
  Synthetic
uauagcuucuaaauauuuuaagua

SEQ ID NO: 89719 - RNA, 19 nt, Artificial Sequence
  Synthetic
ugauugacaaccaacagua

SEQ ID NO: 89720 - RNA, 20 nt, Artificial Sequence
  Synthetic
uugauugacaaccaacagua

SEQ ID NO: 89721 - RNA, 21 nt, Artificial Sequence
  Synthetic
uuugauugacaaccaacagua

SEQ ID NO: 89722 - RNA, 22 nt, Artificial Sequence
  Synthetic
uuuugauugacaaccaacagua

SEQ ID NO: 89723 - RNA, 23 nt, Artificial Sequence
  Synthetic
auuuugauugacaaccaacagua

SEQ ID NO: 89724 - RNA, 24 nt, Artificial Sequence
  Synthetic
aauuuugauugacaaccaacagua

SEQ ID NO: 89725 - RNA, 19 nt, Artificial Sequence
  Synthetic
ugcauaacacaucacagua

SEQ ID NO: 89726 - RNA, 20 nt, Artificial Sequence
  Synthetic
augcauaacacaucacagua

SEQ ID NO: 89727 - RNA, 21 nt, Artificial Sequence
  Synthetic
uaugcauaacacaucacagua

SEQ ID NO: 89728 - RNA, 23 nt, Artificial Sequence
  Synthetic
uguaugcauaacacaucacagua

SEQ ID NO: 89729 - RNA, 24 nt, Artificial Sequence
  Synthetic
uuguaugcauaacacaucacagua

SEQ ID NO: 89730 - RNA, 18 nt, Artificial Sequence
  Synthetic
aaacugcgagggacagua

SEQ ID NO: 89731 - RNA, 19 nt, Artificial Sequence
  Synthetic
caaacugcgagggacagua

SEQ ID NO: 89732 - RNA, 20 nt, Artificial Sequence
  Synthetic
ccaaacugcgagggacagua

SEQ ID NO: 89733 - RNA, 21 nt, Artificial Sequence
  Synthetic
uccaaacugcgagggacagua

SEQ ID NO: 89734 - RNA, 22 nt, Artificial Sequence
  Synthetic
uuccaaacugcgagggacagua

SEQ ID NO: 89735 - RNA, 23 nt, Artificial Sequence
  Synthetic
auuccaaacugcgagggacagua

SEQ ID NO: 89736 - RNA, 24 nt, Artificial Sequence
  Synthetic
uauuccaaacugcgagggacagua

SEQ ID NO: 89737 - RNA, 18 nt, Artificial Sequence
  Synthetic
augacuuuuuacccagua

SEQ ID NO: 89738 - RNA, 19 nt, Artificial Sequence
  Synthetic
aaugacuuuuuacccagua

SEQ ID NO: 89739 - RNA, 20 nt, Artificial Sequence
  Synthetic
aaaugacuuuuuacccagua

SEQ ID NO: 89740 - RNA, 21 nt, Artificial Sequence
  Synthetic
uaaaugacuuuuuacccagua

SEQ ID NO: 89741 - RNA, 23 nt, Artificial Sequence
  Synthetic
uguaaaugacuuuuuacccagua

SEQ ID NO: 89742 - RNA, 24 nt, Artificial Sequence
  Synthetic
auguaaaugacuuuuuacccagua

SEQ ID NO: 89743 - RNA, 18 nt, Artificial Sequence
  Synthetic
uagagaauagaggcagua

SEQ ID NO: 89744 - RNA, 19 nt, Artificial Sequence
  Synthetic
auagagaauagaggcagua

SEQ ID NO: 89745 - RNA, 20 nt, Artificial Sequence
  Synthetic
aauagagaauagaggcagua

SEQ ID NO: 89746 - RNA, 21 nt, Artificial Sequence
  Synthetic
aaauagagaauagaggcagua

SEQ ID NO: 89747 - RNA, 23 nt, Artificial Sequence
  Synthetic
ugaaauagagaauagaggcagua

SEQ ID NO: 89748 - RNA, 24 nt, Artificial Sequence
  Synthetic
cugaaauagagaauagaggcagua

SEQ ID NO: 89749 - RNA, 20 nt, Artificial Sequence
  Synthetic
aggcaguuaaauaugcagua

SEQ ID NO: 89750 - RNA, 21 nt, Artificial Sequence
  Synthetic
uaggcaguuaaauaugcagua

SEQ ID NO: 89751 - RNA, 23 nt, Artificial Sequence
  Synthetic
aguaggcaguuaaauaugcagua

SEQ ID NO: 89752 - RNA, 18 nt, Artificial Sequence
  Synthetic
uaaguauuuguugcagua

SEQ ID NO: 89753 - RNA, 19 nt, Artificial Sequence
  Synthetic
cuaaguauuuguugcagua

SEQ ID NO: 89754 - RNA, 22 nt, Artificial Sequence
  Synthetic
uggcuaaguauuuguugcagua

SEQ ID NO: 89755 - RNA, 23 nt, Artificial Sequence
  Synthetic
cuggcuaaguauuuguugcagua

SEQ ID NO: 89756 - RNA, 24 nt, Artificial Sequence
  Synthetic
ucuggcuaaguauuuguugcagua

SEQ ID NO: 89757 - RNA, 18 nt, Artificial Sequence
  Synthetic
aucacuaccuuaucagua

SEQ ID NO: 89758 - RNA, 19 nt, Artificial Sequence
  Synthetic
aaucacuaccuuaucagua

SEQ ID NO: 89759 - RNA, 21 nt, Artificial Sequence
  Synthetic
agaaucacuaccuuaucagua

SEQ ID NO: 89760 - RNA, 18 nt, Artificial Sequence
  Synthetic
aauaaagguacaagagua

SEQ ID NO: 89761 - RNA, 19 nt, Artificial Sequence
  Synthetic
aaauaaagguacaagagua

SEQ ID NO: 89762 - RNA, 20 nt, Artificial Sequence
  Synthetic
aaaauaaagguacaagagua

SEQ ID NO: 89763 - RNA, 21 nt, Artificial Sequence
  Synthetic
uaaaauaaagguacaagagua

SEQ ID NO: 89764 - RNA, 22 nt, Artificial Sequence
  Synthetic
auaaaauaaagguacaagagua

SEQ ID NO: 89765 - RNA, 23 nt, Artificial Sequence
  Synthetic
aauaaaauaaagguacaagagua

SEQ ID NO: 89766 - RNA, 24 nt, Artificial Sequence
  Synthetic
aaauaaaauaaagguacaagagua

SEQ ID NO: 89767 - RNA, 18 nt, Artificial Sequence
  Synthetic
aagucacuaugaagagua

SEQ ID NO: 89768 - RNA, 19 nt, Artificial Sequence
  Synthetic
aaagucacuaugaagagua

SEQ ID NO: 89769 - RNA, 20 nt, Artificial Sequence
  Synthetic
aaaagucacuaugaagagua

SEQ ID NO: 89770 - RNA, 21 nt, Artificial Sequence
  Synthetic
uaaaagucacuaugaagagua

SEQ ID NO: 89771 - RNA, 22 nt, Artificial Sequence
  Synthetic
auaaaagucacuaugaagagua

SEQ ID NO: 89772 - RNA, 23 nt, Artificial Sequence
  Synthetic
aauaaaagucacuaugaagagua

SEQ ID NO: 89773 - RNA, 24 nt, Artificial Sequence
  Synthetic
uaauaaaagucacuaugaagagua

SEQ ID NO: 89774 - RNA, 18 nt, Artificial Sequence
  Synthetic
cugagucaauguagagua

SEQ ID NO: 89775 - RNA, 20 nt, Artificial Sequence
  Synthetic
ugcugagucaauguagagua

SEQ ID NO: 89776 - RNA, 21 nt, Artificial Sequence
  Synthetic
augcugagucaauguagagua

SEQ ID NO: 89777 - RNA, 22 nt, Artificial Sequence
  Synthetic
aaugcugagucaauguagagua

SEQ ID NO: 89778 - RNA, 23 nt, Artificial Sequence
  Synthetic
uaaugcugagucaauguagagua

SEQ ID NO: 89779 - RNA, 18 nt, Artificial Sequence
  Synthetic
aauauaauguugggagua

SEQ ID NO: 89780 - RNA, 19 nt, Artificial Sequence
  Synthetic
aaauauaauguugggagua

SEQ ID NO: 89781 - RNA, 21 nt, Artificial Sequence
  Synthetic
ugaaauauaauguugggagua

SEQ ID NO: 89782 - RNA, 22 nt, Artificial Sequence
  Synthetic
uugaaauauaauguugggagua

SEQ ID NO: 89783 - RNA, 18 nt, Artificial Sequence
  Synthetic
ugagaauuugauggagua

SEQ ID NO: 89784 - RNA, 19 nt, Artificial Sequence
  Synthetic
cugagaauuugauggagua

SEQ ID NO: 89785 - RNA, 21 nt, Artificial Sequence
  Synthetic
agcugagaauuugauggagua

SEQ ID NO: 89786 - RNA, 22 nt, Artificial Sequence
  Synthetic
uagcugagaauuugauggagua

SEQ ID NO: 89787 - RNA, 23 nt, Artificial Sequence
  Synthetic
auagcugagaauuugauggagua

SEQ ID NO: 89788 - RNA, 24 nt, Artificial Sequence
  Synthetic
aauagcugagaauuugauggagua

SEQ ID NO: 89789 - RNA, 18 nt, Artificial Sequence
  Synthetic
ucgaaaaguuuaugagua

SEQ ID NO: 89790 - RNA, 19 nt, Artificial Sequence
  Synthetic
aucgaaaaguuuaugagua

SEQ ID NO: 89791 - RNA, 21 nt, Artificial Sequence
  Synthetic
cgaucgaaaaguuuaugagua

SEQ ID NO: 89792 - RNA, 22 nt, Artificial Sequence
  Synthetic
acgaucgaaaaguuuaugagua

SEQ ID NO: 89793 - RNA, 23 nt, Artificial Sequence
  Synthetic
cacgaucgaaaaguuuaugagua

SEQ ID NO: 89794 - RNA, 24 nt, Artificial Sequence
  Synthetic
acacgaucgaaaaguuuaugagua

SEQ ID NO: 89795 - RNA, 18 nt, Artificial Sequence
  Synthetic
cagauauuacugugagua

SEQ ID NO: 89796 - RNA, 19 nt, Artificial Sequence
  Synthetic
acagauauuacugugagua

SEQ ID NO: 89797 - RNA, 20 nt, Artificial Sequence
  Synthetic
aacagauauuacugugagua

SEQ ID NO: 89798 - RNA, 21 nt, Artificial Sequence
  Synthetic
uaacagauauuacugugagua

SEQ ID NO: 89799 - RNA, 22 nt, Artificial Sequence
  Synthetic
cuaacagauauuacugugagua

SEQ ID NO: 89800 - RNA, 23 nt, Artificial Sequence
  Synthetic
acuaacagauauuacugugagua

SEQ ID NO: 89801 - RNA, 24 nt, Artificial Sequence
  Synthetic
aacuaacagauauuacugugagua

SEQ ID NO: 89802 - RNA, 21 nt, Artificial Sequence
  Synthetic
aaauacuacaaagccauagua

SEQ ID NO: 89803 - RNA, 22 nt, Artificial Sequence
  Synthetic
aaaauacuacaaagccauagua

SEQ ID NO: 89804 - RNA, 23 nt, Artificial Sequence
  Synthetic
aaaaauacuacaaagccauagua

SEQ ID NO: 89805 - RNA, 18 nt, Artificial Sequence
  Synthetic
ccaagagaaaauauagua

SEQ ID NO: 89806 - RNA, 20 nt, Artificial Sequence
  Synthetic
ugccaagagaaaauauagua

SEQ ID NO: 89807 - RNA, 23 nt, Artificial Sequence
  Synthetic
uggugccaagagaaaauauagua

SEQ ID NO: 89808 - RNA, 24 nt, Artificial Sequence
  Synthetic
auggugccaagagaaaauauagua

SEQ ID NO: 89809 - RNA, 18 nt, Artificial Sequence
  Synthetic
agugucaucaauauagua

SEQ ID NO: 89810 - RNA, 21 nt, Artificial Sequence
  Synthetic
aggagugucaucaauauagua

SEQ ID NO: 89811 - RNA, 22 nt, Artificial Sequence
  Synthetic
aaggagugucaucaauauagua

SEQ ID NO: 89812 - RNA, 23 nt, Artificial Sequence
  Synthetic
caaggagugucaucaauauagua

SEQ ID NO: 89813 - RNA, 18 nt, Artificial Sequence
  Synthetic
uugggagaaucacuagua

SEQ ID NO: 89814 - RNA, 21 nt, Artificial Sequence
  Synthetic
ugguugggagaaucacuagua

SEQ ID NO: 89815 - RNA, 22 nt, Artificial Sequence
  Synthetic
cugguugggagaaucacuagua

SEQ ID NO: 89816 - RNA, 23 nt, Artificial Sequence
  Synthetic
ucugguugggagaaucacuagua

SEQ ID NO: 89817 - RNA, 24 nt, Artificial Sequence
  Synthetic
aucugguugggagaaucacuagua

SEQ ID NO: 89818 - RNA, 19 nt, Artificial Sequence
  Synthetic
agagaugacacagcuagua

SEQ ID NO: 89819 - RNA, 21 nt, Artificial Sequence
  Synthetic
agagagaugacacagcuagua

SEQ ID NO: 89820 - RNA, 22 nt, Artificial Sequence
  Synthetic
cagagagaugacacagcuagua

SEQ ID NO: 89821 - RNA, 23 nt, Artificial Sequence
  Synthetic
acagagagaugacacagcuagua

SEQ ID NO: 89822 - RNA, 24 nt, Artificial Sequence
  Synthetic
cacagagagaugacacagcuagua

SEQ ID NO: 89823 - RNA, 18 nt, Artificial Sequence
  Synthetic
accauuaacucucuagua

SEQ ID NO: 89824 - RNA, 21 nt, Artificial Sequence
  Synthetic
aggaccauuaacucucuagua

SEQ ID NO: 89825 - RNA, 22 nt, Artificial Sequence
  Synthetic
caggaccauuaacucucuagua

SEQ ID NO: 89826 - RNA, 23 nt, Artificial Sequence
  Synthetic
ccaggaccauuaacucucuagua

SEQ ID NO: 89827 - RNA, 24 nt, Artificial Sequence
  Synthetic
cccaggaccauuaacucucuagua

SEQ ID NO: 89828 - RNA, 18 nt, Artificial Sequence
  Synthetic
cuacuaaacaagguagua

SEQ ID NO: 89829 - RNA, 19 nt, Artificial Sequence
  Synthetic
ccuacuaaacaagguagua

SEQ ID NO: 89830 - RNA, 20 nt, Artificial Sequence
  Synthetic
uccuacuaaacaagguagua

SEQ ID NO: 89831 - RNA, 21 nt, Artificial Sequence
  Synthetic
uuccuacuaaacaagguagua

SEQ ID NO: 89832 - RNA, 22 nt, Artificial Sequence
  Synthetic
uuuccuacuaaacaagguagua

SEQ ID NO: 89833 - RNA, 23 nt, Artificial Sequence
  Synthetic
auuuccuacuaaacaagguagua

SEQ ID NO: 89834 - RNA, 18 nt, Artificial Sequence
  Synthetic
auaauuacuaacuuagua

SEQ ID NO: 89835 - RNA, 19 nt, Artificial Sequence
  Synthetic
aauaauuacuaacuuagua

SEQ ID NO: 89836 - RNA, 21 nt, Artificial Sequence
  Synthetic
ugaauaauuacuaacuuagua

SEQ ID NO: 89837 - RNA, 22 nt, Artificial Sequence
  Synthetic
cugaauaauuacuaacuuagua

SEQ ID NO: 89838 - RNA, 23 nt, Artificial Sequence
  Synthetic
acugaauaauuacuaacuuagua

SEQ ID NO: 89839 - RNA, 24 nt, Artificial Sequence
  Synthetic
uacugaauaauuacuaacuuagua

SEQ ID NO: 89840 - RNA, 18 nt, Artificial Sequence
  Synthetic
aaaauucuguguuuagua

SEQ ID NO: 89841 - RNA, 19 nt, Artificial Sequence
  Synthetic
caaaauucuguguuuagua

SEQ ID NO: 89842 - RNA, 20 nt, Artificial Sequence
  Synthetic
acaaaauucuguguuuagua

SEQ ID NO: 89843 - RNA, 21 nt, Artificial Sequence
  Synthetic
uacaaaauucuguguuuagua

SEQ ID NO: 89844 - RNA, 22 nt, Artificial Sequence
  Synthetic
uuacaaaauucuguguuuagua

SEQ ID NO: 89845 - RNA, 23 nt, Artificial Sequence
  Synthetic
uuuacaaaauucuguguuuagua

SEQ ID NO: 89846 - RNA, 24 nt, Artificial Sequence
  Synthetic
uuuuacaaaauucuguguuuagua

SEQ ID NO: 89847 - RNA, 18 nt, Artificial Sequence
  Synthetic
caacuuacagucaacgua

SEQ ID NO: 89848 - RNA, 20 nt, Artificial Sequence
  Synthetic
ugcaacuuacagucaacgua

SEQ ID NO: 89849 - RNA, 21 nt, Artificial Sequence
  Synthetic
cugcaacuuacagucaacgua

SEQ ID NO: 89850 - RNA, 22 nt, Artificial Sequence
  Synthetic
acugcaacuuacagucaacgua

SEQ ID NO: 89851 - RNA, 23 nt, Artificial Sequence
  Synthetic
aacugcaacuuacagucaacgua

SEQ ID NO: 89852 - RNA, 24 nt, Artificial Sequence
  Synthetic
aaacugcaacuuacagucaacgua

SEQ ID NO: 89853 - RNA, 19 nt, Artificial Sequence
  Synthetic
aggcauuaucaaucacgua

SEQ ID NO: 89854 - RNA, 20 nt, Artificial Sequence
  Synthetic
uaggcauuaucaaucacgua

SEQ ID NO: 89855 - RNA, 21 nt, Artificial Sequence
  Synthetic
auaggcauuaucaaucacgua

SEQ ID NO: 89856 - RNA, 22 nt, Artificial Sequence
  Synthetic
uauaggcauuaucaaucacgua

SEQ ID NO: 89857 - RNA, 24 nt, Artificial Sequence
  Synthetic
aguauaggcauuaucaaucacgua

SEQ ID NO: 89858 - RNA, 18 nt, Artificial Sequence
  Synthetic
acaaucagggaaaccgua

SEQ ID NO: 89859 - RNA, 19 nt, Artificial Sequence
  Synthetic
aacaaucagggaaaccgua

SEQ ID NO: 89860 - RNA, 20 nt, Artificial Sequence
  Synthetic
uaacaaucagggaaaccgua

SEQ ID NO: 89861 - RNA, 21 nt, Artificial Sequence
  Synthetic
auaacaaucagggaaaccgua

SEQ ID NO: 89862 - RNA, 24 nt, Artificial Sequence
  Synthetic
uggauaacaaucagggaaaccgua

SEQ ID NO: 89863 - RNA, 21 nt, Artificial Sequence
  Synthetic
uacacacacacaaauugcgua

SEQ ID NO: 89864 - RNA, 23 nt, Artificial Sequence
  Synthetic
uguacacacacacaaauugcgua

SEQ ID NO: 89865 - RNA, 24 nt, Artificial Sequence
  Synthetic
auguacacacacacaaauugcgua

SEQ ID NO: 89866 - RNA, 18 nt, Artificial Sequence
  Synthetic
ucauguucuacauucgua

SEQ ID NO: 89867 - RNA, 19 nt, Artificial Sequence
  Synthetic
cucauguucuacauucgua

SEQ ID NO: 89868 - RNA, 20 nt, Artificial Sequence
  Synthetic
ccucauguucuacauucgua

SEQ ID NO: 89869 - RNA, 21 nt, Artificial Sequence
  Synthetic
uccucauguucuacauucgua

SEQ ID NO: 89870 - RNA, 22 nt, Artificial Sequence
  Synthetic
cuccucauguucuacauucgua

SEQ ID NO: 89871 - RNA, 18 nt, Artificial Sequence
  Synthetic
uucccaggaauuuucgua

SEQ ID NO: 89872 - RNA, 20 nt, Artificial Sequence
  Synthetic
uguucccaggaauuuucgua

SEQ ID NO: 89873 - RNA, 21 nt, Artificial Sequence
  Synthetic
auguucccaggaauuuucgua

SEQ ID NO: 89874 - RNA, 22 nt, Artificial Sequence
  Synthetic
uauguucccaggaauuuucgua

SEQ ID NO: 89875 - RNA, 23 nt, Artificial Sequence
  Synthetic
auauguucccaggaauuuucgua

SEQ ID NO: 89876 - RNA, 24 nt, Artificial Sequence
  Synthetic
aauauguucccaggaauuuucgua

SEQ ID NO: 89877 - RNA, 18 nt, Artificial Sequence
  Synthetic
cuauauuaaaccaaggua

SEQ ID NO: 89878 - RNA, 19 nt, Artificial Sequence
  Synthetic
acuauauuaaaccaaggua

SEQ ID NO: 89879 - RNA, 20 nt, Artificial Sequence
  Synthetic
aacuauauuaaaccaaggua

SEQ ID NO: 89880 - RNA, 21 nt, Artificial Sequence
  Synthetic
uaacuauauuaaaccaaggua

SEQ ID NO: 89881 - RNA, 22 nt, Artificial Sequence
  Synthetic
uuaacuauauuaaaccaaggua

SEQ ID NO: 89882 - RNA, 23 nt, Artificial Sequence
  Synthetic
auuaacuauauuaaaccaaggua

SEQ ID NO: 89883 - RNA, 24 nt, Artificial Sequence
  Synthetic
cauuaacuauauuaaaccaaggua

SEQ ID NO: 89884 - RNA, 18 nt, Artificial Sequence
  Synthetic
caacugcacaugaaggua

SEQ ID NO: 89885 - RNA, 19 nt, Artificial Sequence
  Synthetic
acaacugcacaugaaggua

SEQ ID NO: 89886 - RNA, 21 nt, Artificial Sequence
  Synthetic
agacaacugcacaugaaggua

SEQ ID NO: 89887 - RNA, 23 nt, Artificial Sequence
  Synthetic
agagacaacugcacaugaaggua

SEQ ID NO: 89888 - RNA, 24 nt, Artificial Sequence
  Synthetic
cagagacaacugcacaugaaggua

SEQ ID NO: 89889 - RNA, 21 nt, Artificial Sequence
  Synthetic
aaguacuugggaauuaaggua

SEQ ID NO: 89890 - RNA, 22 nt, Artificial Sequence
  Synthetic
caaguacuugggaauuaaggua

SEQ ID NO: 89891 - RNA, 23 nt, Artificial Sequence
  Synthetic
ucaaguacuugggaauuaaggua

SEQ ID NO: 89892 - RNA, 24 nt, Artificial Sequence
  Synthetic
aucaaguacuugggaauuaaggua

SEQ ID NO: 89893 - RNA, 18 nt, Artificial Sequence
  Synthetic
agaaccaaaaaccaggua

SEQ ID NO: 89894 - RNA, 19 nt, Artificial Sequence
  Synthetic
cagaaccaaaaaccaggua

SEQ ID NO: 89895 - RNA, 20 nt, Artificial Sequence
  Synthetic
ccagaaccaaaaaccaggua

SEQ ID NO: 89896 - RNA, 21 nt, Artificial Sequence
  Synthetic
accagaaccaaaaaccaggua

SEQ ID NO: 89897 - RNA, 22 nt, Artificial Sequence
  Synthetic
caccagaaccaaaaaccaggua

SEQ ID NO: 89898 - RNA, 23 nt, Artificial Sequence
  Synthetic
ucaccagaaccaaaaaccaggua

SEQ ID NO: 89899 - RNA, 18 nt, Artificial Sequence
  Synthetic
cccuaauuucacgaggua

SEQ ID NO: 89900 - RNA, 19 nt, Artificial Sequence
  Synthetic
ccccuaauuucacgaggua

SEQ ID NO: 89901 - RNA, 20 nt, Artificial Sequence
  Synthetic
uccccuaauuucacgaggua

SEQ ID NO: 89902 - RNA, 21 nt, Artificial Sequence
  Synthetic
cuccccuaauuucacgaggua

SEQ ID NO: 89903 - RNA, 22 nt, Artificial Sequence
  Synthetic
ucuccccuaauuucacgaggua

SEQ ID NO: 89904 - RNA, 23 nt, Artificial Sequence
  Synthetic
cucuccccuaauuucacgaggua

SEQ ID NO: 89905 - RNA, 18 nt, Artificial Sequence
  Synthetic
aaggguaguguggaggua

SEQ ID NO: 89906 - RNA, 19 nt, Artificial Sequence
  Synthetic
aaaggguaguguggaggua

SEQ ID NO: 89907 - RNA, 20 nt, Artificial Sequence
  Synthetic
caaaggguaguguggaggua

SEQ ID NO: 89908 - RNA, 21 nt, Artificial Sequence
  Synthetic
acaaaggguaguguggaggua

SEQ ID NO: 89909 - RNA, 22 nt, Artificial Sequence
  Synthetic
uacaaaggguaguguggaggua

SEQ ID NO: 89910 - RNA, 23 nt, Artificial Sequence
  Synthetic
cuacaaaggguaguguggaggua

SEQ ID NO: 89911 - RNA, 18 nt, Artificial Sequence
  Synthetic
auaacccauuaugaggua

SEQ ID NO: 89912 - RNA, 19 nt, Artificial Sequence
  Synthetic
cauaacccauuaugaggua

SEQ ID NO: 89913 - RNA, 21 nt, Artificial Sequence
  Synthetic
agcauaacccauuaugaggua

SEQ ID NO: 89914 - RNA, 22 nt, Artificial Sequence
  Synthetic
aagcauaacccauuaugaggua

SEQ ID NO: 89915 - RNA, 18 nt, Artificial Sequence
  Synthetic
ucuaaugcuuaugaggua

SEQ ID NO: 89916 - RNA, 19 nt, Artificial Sequence
  Synthetic
aucuaaugcuuaugaggua

SEQ ID NO: 89917 - RNA, 20 nt, Artificial Sequence
  Synthetic
caucuaaugcuuaugaggua

SEQ ID NO: 89918 - RNA, 21 nt, Artificial Sequence
  Synthetic
ccaucuaaugcuuaugaggua

SEQ ID NO: 89919 - RNA, 22 nt, Artificial Sequence
  Synthetic
accaucuaaugcuuaugaggua

SEQ ID NO: 89920 - RNA, 23 nt, Artificial Sequence
  Synthetic
caccaucuaaugcuuaugaggua

SEQ ID NO: 89921 - RNA, 24 nt, Artificial Sequence
  Synthetic
acaccaucuaaugcuuaugaggua

SEQ ID NO: 89922 - RNA, 22 nt, Artificial Sequence
  Synthetic
uggggagcuugggagugaggua

SEQ ID NO: 89923 - RNA, 24 nt, Artificial Sequence
  Synthetic
aguggggagcuugggagugaggua

SEQ ID NO: 89924 - RNA, 18 nt, Artificial Sequence
  Synthetic
uggaggcaucuugaggua

SEQ ID NO: 89925 - RNA, 19 nt, Artificial Sequence
  Synthetic
uuggaggcaucuugaggua

SEQ ID NO: 89926 - RNA, 20 nt, Artificial Sequence
  Synthetic
auuggaggcaucuugaggua

SEQ ID NO: 89927 - RNA, 21 nt, Artificial Sequence
  Synthetic
cauuggaggcaucuugaggua

SEQ ID NO: 89928 - RNA, 22 nt, Artificial Sequence
  Synthetic
acauuggaggcaucuugaggua

SEQ ID NO: 89929 - RNA, 24 nt, Artificial Sequence
  Synthetic
ugacauuggaggcaucuugaggua

SEQ ID NO: 89930 - RNA, 21 nt, Artificial Sequence
  Synthetic
uugcaaaccauacacccggua

SEQ ID NO: 89931 - RNA, 22 nt, Artificial Sequence
  Synthetic
uuugcaaaccauacacccggua

SEQ ID NO: 89932 - RNA, 23 nt, Artificial Sequence
  Synthetic
uuuugcaaaccauacacccggua

SEQ ID NO: 89933 - RNA, 24 nt, Artificial Sequence
  Synthetic
auuuugcaaaccauacacccggua

SEQ ID NO: 89934 - RNA, 18 nt, Artificial Sequence
  Synthetic
uugauuauuuugccggua

SEQ ID NO: 89935 - RNA, 19 nt, Artificial Sequence
  Synthetic
uuugauuauuuugccggua

SEQ ID NO: 89936 - RNA, 20 nt, Artificial Sequence
  Synthetic
cuuugauuauuuugccggua

SEQ ID NO: 89937 - RNA, 21 nt, Artificial Sequence
  Synthetic
acuuugauuauuuugccggua

SEQ ID NO: 89938 - RNA, 22 nt, Artificial Sequence
  Synthetic
aacuuugauuauuuugccggua

SEQ ID NO: 89939 - RNA, 23 nt, Artificial Sequence
  Synthetic
caacuuugauuauuuugccggua

SEQ ID NO: 89940 - RNA, 24 nt, Artificial Sequence
  Synthetic
ucaacuuugauuauuuugccggua

SEQ ID NO: 89941 - RNA, 18 nt, Artificial Sequence
  Synthetic
aucuagaacgaacgggua

SEQ ID NO: 89942 - RNA, 19 nt, Artificial Sequence
  Synthetic
aaucuagaacgaacgggua

SEQ ID NO: 89943 - RNA, 20 nt, Artificial Sequence
  Synthetic
uaaucuagaacgaacgggua

SEQ ID NO: 89944 - RNA, 21 nt, Artificial Sequence
  Synthetic
auaaucuagaacgaacgggua

SEQ ID NO: 89945 - RNA, 22 nt, Artificial Sequence
  Synthetic
cauaaucuagaacgaacgggua

SEQ ID NO: 89946 - RNA, 23 nt, Artificial Sequence
  Synthetic
ccauaaucuagaacgaacgggua

SEQ ID NO: 89947 - RNA, 24 nt, Artificial Sequence
  Synthetic
uccauaaucuagaacgaacgggua

SEQ ID NO: 89948 - RNA, 18 nt, Artificial Sequence
  Synthetic
aaagccauuuggcgggua

SEQ ID NO: 89949 - RNA, 19 nt, Artificial Sequence
  Synthetic
aaaagccauuuggcgggua

SEQ ID NO: 89950 - RNA, 20 nt, Artificial Sequence
  Synthetic
caaaagccauuuggcgggua

SEQ ID NO: 89951 - RNA, 21 nt, Artificial Sequence
  Synthetic
ucaaaagccauuuggcgggua

SEQ ID NO: 89952 - RNA, 22 nt, Artificial Sequence
  Synthetic
uucaaaagccauuuggcgggua

SEQ ID NO: 89953 - RNA, 23 nt, Artificial Sequence
  Synthetic
cuucaaaagccauuuggcgggua

SEQ ID NO: 89954 - RNA, 24 nt, Artificial Sequence
  Synthetic
ucuucaaaagccauuuggcgggua

SEQ ID NO: 89955 - RNA, 18 nt, Artificial Sequence
  Synthetic
uuucuugcaccaggggua

SEQ ID NO: 89956 - RNA, 20 nt, Artificial Sequence
  Synthetic
aguuucuugcaccaggggua

SEQ ID NO: 89957 - RNA, 21 nt, Artificial Sequence
  Synthetic
aaguuucuugcaccaggggua

SEQ ID NO: 89958 - RNA, 22 nt, Artificial Sequence
  Synthetic
aaaguuucuugcaccaggggua

SEQ ID NO: 89959 - RNA, 20 nt, Artificial Sequence
  Synthetic
uggacaucaugguaauggua

SEQ ID NO: 89960 - RNA, 21 nt, Artificial Sequence
  Synthetic
uuggacaucaugguaauggua

SEQ ID NO: 89961 - RNA, 22 nt, Artificial Sequence
  Synthetic
uuuggacaucaugguaauggua

SEQ ID NO: 89962 - RNA, 23 nt, Artificial Sequence
  Synthetic
uuuuggacaucaugguaauggua

SEQ ID NO: 89963 - RNA, 18 nt, Artificial Sequence
  Synthetic
auuuuccuuaccauggua

SEQ ID NO: 89964 - RNA, 19 nt, Artificial Sequence
  Synthetic
aauuuuccuuaccauggua

SEQ ID NO: 89965 - RNA, 21 nt, Artificial Sequence
  Synthetic
cgaauuuuccuuaccauggua

SEQ ID NO: 89966 - RNA, 23 nt, Artificial Sequence
  Synthetic
ugcgaauuuuccuuaccauggua

SEQ ID NO: 89967 - RNA, 24 nt, Artificial Sequence
  Synthetic
cugcgaauuuuccuuaccauggua

SEQ ID NO: 89968 - RNA, 18 nt, Artificial Sequence
  Synthetic
aaaauguuggaauuggua

SEQ ID NO: 89969 - RNA, 20 nt, Artificial Sequence
  Synthetic
ugaaaauguuggaauuggua

SEQ ID NO: 89970 - RNA, 21 nt, Artificial Sequence
  Synthetic
uugaaaauguuggaauuggua

SEQ ID NO: 89971 - RNA, 22 nt, Artificial Sequence
  Synthetic
uuugaaaauguuggaauuggua

SEQ ID NO: 89972 - RNA, 23 nt, Artificial Sequence
  Synthetic
cuuugaaaauguuggaauuggua

SEQ ID NO: 89973 - RNA, 24 nt, Artificial Sequence
  Synthetic
acuuugaaaauguuggaauuggua

SEQ ID NO: 89974 - RNA, 18 nt, Artificial Sequence
  Synthetic
aucgauuaaguauuggua

SEQ ID NO: 89975 - RNA, 20 nt, Artificial Sequence
  Synthetic
cgaucgauuaaguauuggua

SEQ ID NO: 89976 - RNA, 21 nt, Artificial Sequence
  Synthetic
ccgaucgauuaaguauuggua

SEQ ID NO: 89977 - RNA, 22 nt, Artificial Sequence
  Synthetic
cccgaucgauuaaguauuggua

SEQ ID NO: 89978 - RNA, 23 nt, Artificial Sequence
  Synthetic
ucccgaucgauuaaguauuggua

SEQ ID NO: 89979 - RNA, 24 nt, Artificial Sequence
  Synthetic
uucccgaucgauuaaguauuggua

SEQ ID NO: 89980 - RNA, 18 nt, Artificial Sequence
  Synthetic
uaucuaacuauguuggua

SEQ ID NO: 89981 - RNA, 19 nt, Artificial Sequence
  Synthetic
cuaucuaacuauguuggua

SEQ ID NO: 89982 - RNA, 23 nt, Artificial Sequence
  Synthetic
ugggcuaucuaacuauguuggua

SEQ ID NO: 89983 - RNA, 24 nt, Artificial Sequence
  Synthetic
augggcuaucuaacuauguuggua

SEQ ID NO: 89984 - RNA, 21 nt, Artificial Sequence
  Synthetic
aguuuuauuccauuguuggua

SEQ ID NO: 89985 - RNA, 22 nt, Artificial Sequence
  Synthetic
aaguuuuauuccauuguuggua

SEQ ID NO: 89986 - RNA, 18 nt, Artificial Sequence
  Synthetic
uuuacuucucauuuggua

SEQ ID NO: 89987 - RNA, 19 nt, Artificial Sequence
  Synthetic
auuuacuucucauuuggua

SEQ ID NO: 89988 - RNA, 20 nt, Artificial Sequence
  Synthetic
cauuuacuucucauuuggua

SEQ ID NO: 89989 - RNA, 21 nt, Artificial Sequence
  Synthetic
ucauuuacuucucauuuggua

SEQ ID NO: 89990 - RNA, 22 nt, Artificial Sequence
  Synthetic
cucauuuacuucucauuuggua

SEQ ID NO: 89991 - RNA, 23 nt, Artificial Sequence
  Synthetic
acucauuuacuucucauuuggua

SEQ ID NO: 89992 - RNA, 24 nt, Artificial Sequence
  Synthetic
cacucauuuacuucucauuuggua

SEQ ID NO: 89993 - RNA, 22 nt, Artificial Sequence
  Synthetic
aguuauuugggaaagaaaugua

SEQ ID NO: 89994 - RNA, 23 nt, Artificial Sequence
  Synthetic
uaguuauuugggaaagaaaugua

SEQ ID NO: 89995 - RNA, 24 nt, Artificial Sequence
  Synthetic
uuaguuauuugggaaagaaaugua

SEQ ID NO: 89996 - RNA, 18 nt, Artificial Sequence
  Synthetic
auuaguccaagaaaugua

SEQ ID NO: 89997 - RNA, 19 nt, Artificial Sequence
  Synthetic
uauuaguccaagaaaugua

SEQ ID NO: 89998 - RNA, 20 nt, Artificial Sequence
  Synthetic
uuauuaguccaagaaaugua

SEQ ID NO: 89999 - RNA, 22 nt, Artificial Sequence
  Synthetic
uguuauuaguccaagaaaugua

SEQ ID NO: 90000 - RNA, 24 nt, Artificial Sequence
  Synthetic
uguguuauuaguccaagaaaugua

SEQ ID NO: 90001 - RNA, 21 nt, Artificial Sequence
  Synthetic
uuuaaaauaucauuaaaugua

SEQ ID NO: 90002 - RNA, 22 nt, Artificial Sequence
  Synthetic
uuuuaaaauaucauuaaaugua

SEQ ID NO: 90003 - RNA, 24 nt, Artificial Sequence
  Synthetic
uguuuuaaaauaucauuaaaugua

SEQ ID NO: 90004 - RNA, 18 nt, Artificial Sequence
  Synthetic
cugggggaaaauaaugua

SEQ ID NO: 90005 - RNA, 19 nt, Artificial Sequence
  Synthetic
acugggggaaaauaaugua

SEQ ID NO: 90006 - RNA, 20 nt, Artificial Sequence
  Synthetic
uacugggggaaaauaaugua

SEQ ID NO: 90007 - RNA, 21 nt, Artificial Sequence
  Synthetic
uuacugggggaaaauaaugua

SEQ ID NO: 90008 - RNA, 22 nt, Artificial Sequence
  Synthetic
uuuacugggggaaaauaaugua

SEQ ID NO: 90009 - RNA, 23 nt, Artificial Sequence
  Synthetic
auuuacugggggaaaauaaugua

SEQ ID NO: 90010 - RNA, 24 nt, Artificial Sequence
  Synthetic
cauuuacugggggaaaauaaugua

SEQ ID NO: 90011 - RNA, 18 nt, Artificial Sequence
  Synthetic
uagaacuaauauaaugua

SEQ ID NO: 90012 - RNA, 19 nt, Artificial Sequence
  Synthetic
auagaacuaauauaaugua

SEQ ID NO: 90013 - RNA, 20 nt, Artificial Sequence
  Synthetic
cauagaacuaauauaaugua

SEQ ID NO: 90014 - RNA, 21 nt, Artificial Sequence
  Synthetic
acauagaacuaauauaaugua

SEQ ID NO: 90015 - RNA, 22 nt, Artificial Sequence
  Synthetic
cacauagaacuaauauaaugua

SEQ ID NO: 90016 - RNA, 23 nt, Artificial Sequence
  Synthetic
ccacauagaacuaauauaaugua

SEQ ID NO: 90017 - RNA, 24 nt, Artificial Sequence
  Synthetic
uccacauagaacuaauauaaugua

SEQ ID NO: 90018 - RNA, 18 nt, Artificial Sequence
  Synthetic
cuuacauggcuucaugua

SEQ ID NO: 90019 - RNA, 19 nt, Artificial Sequence
  Synthetic
ucuuacauggcuucaugua

SEQ ID NO: 90020 - RNA, 21 nt, Artificial Sequence
  Synthetic
ugucuuacauggcuucaugua

SEQ ID NO: 90021 - RNA, 22 nt, Artificial Sequence
  Synthetic
cugucuuacauggcuucaugua

SEQ ID NO: 90022 - RNA, 23 nt, Artificial Sequence
  Synthetic
ucugucuuacauggcuucaugua

SEQ ID NO: 90023 - RNA, 24 nt, Artificial Sequence
  Synthetic
uucugucuuacauggcuucaugua

SEQ ID NO: 90024 - RNA, 18 nt, Artificial Sequence
  Synthetic
acuuauaugaaagaugua

SEQ ID NO: 90025 - RNA, 19 nt, Artificial Sequence
  Synthetic
uacuuauaugaaagaugua

SEQ ID NO: 90026 - RNA, 20 nt, Artificial Sequence
  Synthetic
auacuuauaugaaagaugua

SEQ ID NO: 90027 - RNA, 21 nt, Artificial Sequence
  Synthetic
uauacuuauaugaaagaugua

SEQ ID NO: 90028 - RNA, 22 nt, Artificial Sequence
  Synthetic
auauacuuauaugaaagaugua

SEQ ID NO: 90029 - RNA, 23 nt, Artificial Sequence
  Synthetic
uauauacuuauaugaaagaugua

SEQ ID NO: 90030 - RNA, 24 nt, Artificial Sequence
  Synthetic
auauauacuuauaugaaagaugua

SEQ ID NO: 90031 - RNA, 18 nt, Artificial Sequence
  Synthetic
uguccgagccaagaugua

SEQ ID NO: 90032 - RNA, 19 nt, Artificial Sequence
  Synthetic
auguccgagccaagaugua

SEQ ID NO: 90033 - RNA, 20 nt, Artificial Sequence
  Synthetic
aauguccgagccaagaugua

SEQ ID NO: 90034 - RNA, 21 nt, Artificial Sequence
  Synthetic
caauguccgagccaagaugua

SEQ ID NO: 90035 - RNA, 22 nt, Artificial Sequence
  Synthetic
acaauguccgagccaagaugua

SEQ ID NO: 90036 - RNA, 23 nt, Artificial Sequence
  Synthetic
cacaauguccgagccaagaugua

SEQ ID NO: 90037 - RNA, 18 nt, Artificial Sequence
  Synthetic
uggacacagagugaugua

SEQ ID NO: 90038 - RNA, 19 nt, Artificial Sequence
  Synthetic
cuggacacagagugaugua

SEQ ID NO: 90039 - RNA, 20 nt, Artificial Sequence
  Synthetic
acuggacacagagugaugua

SEQ ID NO: 90040 - RNA, 22 nt, Artificial Sequence
  Synthetic
ugacuggacacagagugaugua

SEQ ID NO: 90041 - RNA, 23 nt, Artificial Sequence
  Synthetic
cugacuggacacagagugaugua

SEQ ID NO: 90042 - RNA, 24 nt, Artificial Sequence
  Synthetic
acugacuggacacagagugaugua

SEQ ID NO: 90043 - RNA, 18 nt, Artificial Sequence
  Synthetic
uguuaacauaaauaugua

SEQ ID NO: 90044 - RNA, 19 nt, Artificial Sequence
  Synthetic
cuguuaacauaaauaugua

SEQ ID NO: 90045 - RNA, 20 nt, Artificial Sequence
  Synthetic
ucuguuaacauaaauaugua

SEQ ID NO: 90046 - RNA, 21 nt, Artificial Sequence
  Synthetic
cucuguuaacauaaauaugua

SEQ ID NO: 90047 - RNA, 23 nt, Artificial Sequence
  Synthetic
ugcucuguuaacauaaauaugua

SEQ ID NO: 90048 - RNA, 24 nt, Artificial Sequence
  Synthetic
augcucuguuaacauaaauaugua

SEQ ID NO: 90049 - RNA, 20 nt, Artificial Sequence
  Synthetic
ugggcauuuauacaacugua

SEQ ID NO: 90050 - RNA, 21 nt, Artificial Sequence
  Synthetic
uugggcauuuauacaacugua

SEQ ID NO: 90051 - RNA, 22 nt, Artificial Sequence
  Synthetic
uuugggcauuuauacaacugua

SEQ ID NO: 90052 - RNA, 23 nt, Artificial Sequence
  Synthetic
uuuugggcauuuauacaacugua

SEQ ID NO: 90053 - RNA, 24 nt, Artificial Sequence
  Synthetic
cuuuugggcauuuauacaacugua

SEQ ID NO: 90054 - RNA, 18 nt, Artificial Sequence
  Synthetic
cugaaagagugaacugua

SEQ ID NO: 90055 - RNA, 21 nt, Artificial Sequence
  Synthetic
uggcugaaagagugaacugua

SEQ ID NO: 90056 - RNA, 22 nt, Artificial Sequence
  Synthetic
cuggcugaaagagugaacugua

SEQ ID NO: 90057 - RNA, 23 nt, Artificial Sequence
  Synthetic
acuggcugaaagagugaacugua

SEQ ID NO: 90058 - RNA, 24 nt, Artificial Sequence
  Synthetic
uacuggcugaaagagugaacugua

SEQ ID NO: 90059 - RNA, 18 nt, Artificial Sequence
  Synthetic
caagaccuucacccugua

SEQ ID NO: 90060 - RNA, 19 nt, Artificial Sequence
  Synthetic
acaagaccuucacccugua

SEQ ID NO: 90061 - RNA, 20 nt, Artificial Sequence
  Synthetic
cacaagaccuucacccugua

SEQ ID NO: 90062 - RNA, 21 nt, Artificial Sequence
  Synthetic
ucacaagaccuucacccugua

SEQ ID NO: 90063 - RNA, 23 nt, Artificial Sequence
  Synthetic
agucacaagaccuucacccugua

SEQ ID NO: 90064 - RNA, 18 nt, Artificial Sequence
  Synthetic
uacauaauugaagcugua

SEQ ID NO: 90065 - RNA, 19 nt, Artificial Sequence
  Synthetic
uuacauaauugaagcugua

SEQ ID NO: 90066 - RNA, 18 nt, Artificial Sequence
  Synthetic
accaaccuaacagcugua

SEQ ID NO: 90067 - RNA, 19 nt, Artificial Sequence
  Synthetic
caccaaccuaacagcugua

SEQ ID NO: 90068 - RNA, 20 nt, Artificial Sequence
  Synthetic
ugguuuaccccuuaucugua

SEQ ID NO: 90069 - RNA, 22 nt, Artificial Sequence
  Synthetic
agugguuuaccccuuaucugua

SEQ ID NO: 90070 - RNA, 23 nt, Artificial Sequence
  Synthetic
cagugguuuaccccuuaucugua

SEQ ID NO: 90071 - RNA, 24 nt, Artificial Sequence
  Synthetic
acagugguuuaccccuuaucugua

SEQ ID NO: 90072 - RNA, 18 nt, Artificial Sequence
  Synthetic
aggagccaguccucugua

SEQ ID NO: 90073 - RNA, 21 nt, Artificial Sequence
  Synthetic
uggaggagccaguccucugua

SEQ ID NO: 90074 - RNA, 22 nt, Artificial Sequence
  Synthetic
auggaggagccaguccucugua

SEQ ID NO: 90075 - RNA, 23 nt, Artificial Sequence
  Synthetic
uauggaggagccaguccucugua

SEQ ID NO: 90076 - RNA, 24 nt, Artificial Sequence
  Synthetic
cuauggaggagccaguccucugua

SEQ ID NO: 90077 - RNA, 18 nt, Artificial Sequence
  Synthetic
ugccagugccucucugua

SEQ ID NO: 90078 - RNA, 19 nt, Artificial Sequence
  Synthetic
augccagugccucucugua

SEQ ID NO: 90079 - RNA, 20 nt, Artificial Sequence
  Synthetic
uaugccagugccucucugua

SEQ ID NO: 90080 - RNA, 21 nt, Artificial Sequence
  Synthetic
auaugccagugccucucugua

SEQ ID NO: 90081 - RNA, 22 nt, Artificial Sequence
  Synthetic
aauaugccagugccucucugua

SEQ ID NO: 90082 - RNA, 24 nt, Artificial Sequence
  Synthetic
agaauaugccagugccucucugua

SEQ ID NO: 90083 - RNA, 18 nt, Artificial Sequence
  Synthetic
aaggguuccuucucugua

SEQ ID NO: 90084 - RNA, 19 nt, Artificial Sequence
  Synthetic
caaggguuccuucucugua

SEQ ID NO: 90085 - RNA, 20 nt, Artificial Sequence
  Synthetic
ucaaggguuccuucucugua

SEQ ID NO: 90086 - RNA, 21 nt, Artificial Sequence
  Synthetic
cucaaggguuccuucucugua

SEQ ID NO: 90087 - RNA, 23 nt, Artificial Sequence
  Synthetic
agcucaaggguuccuucucugua

SEQ ID NO: 90088 - RNA, 24 nt, Artificial Sequence
  Synthetic
cagcucaaggguuccuucucugua

SEQ ID NO: 90089 - RNA, 19 nt, Artificial Sequence
  Synthetic
ugaaaacauaaaaagugua

SEQ ID NO: 90090 - RNA, 20 nt, Artificial Sequence
  Synthetic
augaaaacauaaaaagugua

SEQ ID NO: 90091 - RNA, 21 nt, Artificial Sequence
  Synthetic
caugaaaacauaaaaagugua

SEQ ID NO: 90092 - RNA, 19 nt, Artificial Sequence
  Synthetic
agcaguuauguaaagugua

SEQ ID NO: 90093 - RNA, 20 nt, Artificial Sequence
  Synthetic
aagcaguuauguaaagugua

SEQ ID NO: 90094 - RNA, 21 nt, Artificial Sequence
  Synthetic
caagcaguuauguaaagugua

SEQ ID NO: 90095 - RNA, 22 nt, Artificial Sequence
  Synthetic
ucaagcaguuauguaaagugua

SEQ ID NO: 90096 - RNA, 23 nt, Artificial Sequence
  Synthetic
aucaagcaguuauguaaagugua

SEQ ID NO: 90097 - RNA, 24 nt, Artificial Sequence
  Synthetic
uaucaagcaguuauguaaagugua

SEQ ID NO: 90098 - RNA, 18 nt, Artificial Sequence
  Synthetic
agacucacacuaagugua

SEQ ID NO: 90099 - RNA, 19 nt, Artificial Sequence
  Synthetic
uagacucacacuaagugua

SEQ ID NO: 90100 - RNA, 20 nt, Artificial Sequence
  Synthetic
cuagacucacacuaagugua

SEQ ID NO: 90101 - RNA, 21 nt, Artificial Sequence
  Synthetic
ucuagacucacacuaagugua

SEQ ID NO: 90102 - RNA, 22 nt, Artificial Sequence
  Synthetic
uucuagacucacacuaagugua

SEQ ID NO: 90103 - RNA, 23 nt, Artificial Sequence
  Synthetic
uuucuagacucacacuaagugua

SEQ ID NO: 90104 - RNA, 24 nt, Artificial Sequence
  Synthetic
auuucuagacucacacuaagugua

SEQ ID NO: 90105 - RNA, 18 nt, Artificial Sequence
  Synthetic
uuugguggguuaagugua

SEQ ID NO: 90106 - RNA, 19 nt, Artificial Sequence
  Synthetic
auuugguggguuaagugua

SEQ ID NO: 90107 - RNA, 20 nt, Artificial Sequence
  Synthetic
uauuugguggguuaagugua

SEQ ID NO: 90108 - RNA, 21 nt, Artificial Sequence
  Synthetic
auauuugguggguuaagugua

SEQ ID NO: 90109 - RNA, 23 nt, Artificial Sequence
  Synthetic
ugauauuugguggguuaagugua

SEQ ID NO: 90110 - RNA, 24 nt, Artificial Sequence
  Synthetic
augauauuugguggguuaagugua

SEQ ID NO: 90111 - RNA, 18 nt, Artificial Sequence
  Synthetic
cugacagaaaacagugua

SEQ ID NO: 90112 - RNA, 19 nt, Artificial Sequence
  Synthetic
ccugacagaaaacagugua

SEQ ID NO: 90113 - RNA, 20 nt, Artificial Sequence
  Synthetic
uccugacagaaaacagugua

SEQ ID NO: 90114 - RNA, 21 nt, Artificial Sequence
  Synthetic
uuccugacagaaaacagugua

SEQ ID NO: 90115 - RNA, 22 nt, Artificial Sequence
  Synthetic
auuccugacagaaaacagugua

SEQ ID NO: 90116 - RNA, 23 nt, Artificial Sequence
  Synthetic
aauuccugacagaaaacagugua

SEQ ID NO: 90117 - RNA, 24 nt, Artificial Sequence
  Synthetic
caauuccugacagaaaacagugua

SEQ ID NO: 90118 - RNA, 18 nt, Artificial Sequence
  Synthetic
uguauuguccucagugua

SEQ ID NO: 90119 - RNA, 19 nt, Artificial Sequence
  Synthetic
uuguauuguccucagugua

SEQ ID NO: 90120 - RNA, 20 nt, Artificial Sequence
  Synthetic
uuuguauuguccucagugua

SEQ ID NO: 90121 - RNA, 21 nt, Artificial Sequence
  Synthetic
uuuuguauuguccucagugua

SEQ ID NO: 90122 - RNA, 24 nt, Artificial Sequence
  Synthetic
ugguuuuguauuguccucagugua

SEQ ID NO: 90123 - RNA, 18 nt, Artificial Sequence
  Synthetic
uuuaaaauuaagagugua

SEQ ID NO: 90124 - RNA, 22 nt, Artificial Sequence
  Synthetic
uggguuuaaaauuaagagugua

SEQ ID NO: 90125 - RNA, 23 nt, Artificial Sequence
  Synthetic
auggguuuaaaauuaagagugua

SEQ ID NO: 90126 - RNA, 24 nt, Artificial Sequence
  Synthetic
aauggguuuaaaauuaagagugua

SEQ ID NO: 90127 - RNA, 18 nt, Artificial Sequence
  Synthetic
aaacaauucacaugugua

SEQ ID NO: 90128 - RNA, 19 nt, Artificial Sequence
  Synthetic
aaaacaauucacaugugua

SEQ ID NO: 90129 - RNA, 20 nt, Artificial Sequence
  Synthetic
uaaaacaauucacaugugua

SEQ ID NO: 90130 - RNA, 21 nt, Artificial Sequence
  Synthetic
cuaaaacaauucacaugugua

SEQ ID NO: 90131 - RNA, 22 nt, Artificial Sequence
  Synthetic
ucuaaaacaauucacaugugua

SEQ ID NO: 90132 - RNA, 23 nt, Artificial Sequence
  Synthetic
aucuaaaacaauucacaugugua

SEQ ID NO: 90133 - RNA, 24 nt, Artificial Sequence
  Synthetic
uaucuaaaacaauucacaugugua

SEQ ID NO: 90134 - RNA, 21 nt, Artificial Sequence
  Synthetic
auggaggaaccuggaugugua

SEQ ID NO: 90135 - RNA, 18 nt, Artificial Sequence
  Synthetic
ucuuuggaaccuugugua

SEQ ID NO: 90136 - RNA, 19 nt, Artificial Sequence
  Synthetic
uucuuuggaaccuugugua

SEQ ID NO: 90137 - RNA, 20 nt, Artificial Sequence
  Synthetic
cuucuuuggaaccuugugua

SEQ ID NO: 90138 - RNA, 21 nt, Artificial Sequence
  Synthetic
ccuucuuuggaaccuugugua

SEQ ID NO: 90139 - RNA, 22 nt, Artificial Sequence
  Synthetic
uccuucuuuggaaccuugugua

SEQ ID NO: 90140 - RNA, 23 nt, Artificial Sequence
  Synthetic
uuccuucuuuggaaccuugugua

SEQ ID NO: 90141 - RNA, 24 nt, Artificial Sequence
  Synthetic
auuccuucuuuggaaccuugugua

SEQ ID NO: 90142 - RNA, 18 nt, Artificial Sequence
  Synthetic
uuaguuuauuuuugugua

SEQ ID NO: 90143 - RNA, 19 nt, Artificial Sequence
  Synthetic
cuuaguuuauuuuugugua

SEQ ID NO: 90144 - RNA, 21 nt, Artificial Sequence
  Synthetic
agcuuaguuuauuuuugugua

SEQ ID NO: 90145 - RNA, 22 nt, Artificial Sequence
  Synthetic
aagcuuaguuuauuuuugugua

SEQ ID NO: 90146 - RNA, 23 nt, Artificial Sequence
  Synthetic
uaagcuuaguuuauuuuugugua

SEQ ID NO: 90147 - RNA, 24 nt, Artificial Sequence
  Synthetic
auaagcuuaguuuauuuuugugua

SEQ ID NO: 90148 - RNA, 18 nt, Artificial Sequence
  Synthetic
uuugcuaagcaucuugua

SEQ ID NO: 90149 - RNA, 19 nt, Artificial Sequence
  Synthetic
cuuugcuaagcaucuugua

SEQ ID NO: 90150 - RNA, 22 nt, Artificial Sequence
  Synthetic
uggcuuugcuaagcaucuugua

SEQ ID NO: 90151 - RNA, 23 nt, Artificial Sequence
  Synthetic
uuggcuuugcuaagcaucuugua

SEQ ID NO: 90152 - RNA, 24 nt, Artificial Sequence
  Synthetic
cuuggcuuugcuaagcaucuugua

SEQ ID NO: 90153 - RNA, 18 nt, Artificial Sequence
  Synthetic
uucuagacaauucuugua

SEQ ID NO: 90154 - RNA, 19 nt, Artificial Sequence
  Synthetic
auucuagacaauucuugua

SEQ ID NO: 90155 - RNA, 20 nt, Artificial Sequence
  Synthetic
uauucuagacaauucuugua

SEQ ID NO: 90156 - RNA, 21 nt, Artificial Sequence
  Synthetic
uuauucuagacaauucuugua

SEQ ID NO: 90157 - RNA, 22 nt, Artificial Sequence
  Synthetic
cuuauucuagacaauucuugua

SEQ ID NO: 90158 - RNA, 23 nt, Artificial Sequence
  Synthetic
ucuuauucuagacaauucuugua

SEQ ID NO: 90159 - RNA, 24 nt, Artificial Sequence
  Synthetic
cucuuauucuagacaauucuugua

SEQ ID NO: 90160 - RNA, 18 nt, Artificial Sequence
  Synthetic
caucuggggacauuugua

SEQ ID NO: 90161 - RNA, 19 nt, Artificial Sequence
  Synthetic
ccaucuggggacauuugua

SEQ ID NO: 90162 - RNA, 20 nt, Artificial Sequence
  Synthetic
uccaucuggggacauuugua

SEQ ID NO: 90163 - RNA, 21 nt, Artificial Sequence
  Synthetic
uuccaucuggggacauuugua

SEQ ID NO: 90164 - RNA, 23 nt, Artificial Sequence
  Synthetic
aguuccaucuggggacauuugua

SEQ ID NO: 90165 - RNA, 18 nt, Artificial Sequence
  Synthetic
aucuaaaucucauuugua

SEQ ID NO: 90166 - RNA, 20 nt, Artificial Sequence
  Synthetic
agaucuaaaucucauuugua

SEQ ID NO: 90167 - RNA, 21 nt, Artificial Sequence
  Synthetic
uagaucuaaaucucauuugua

SEQ ID NO: 90168 - RNA, 22 nt, Artificial Sequence
  Synthetic
uuagaucuaaaucucauuugua

SEQ ID NO: 90169 - RNA, 24 nt, Artificial Sequence
  Synthetic
uguuagaucuaaaucucauuugua

SEQ ID NO: 90170 - RNA, 18 nt, Artificial Sequence
  Synthetic
caacuugauuaguuugua

SEQ ID NO: 90171 - RNA, 20 nt, Artificial Sequence
  Synthetic
agcaacuugauuaguuugua

SEQ ID NO: 90172 - RNA, 21 nt, Artificial Sequence
  Synthetic
uagcaacuugauuaguuugua

SEQ ID NO: 90173 - RNA, 22 nt, Artificial Sequence
  Synthetic
uuagcaacuugauuaguuugua

SEQ ID NO: 90174 - RNA, 23 nt, Artificial Sequence
  Synthetic
auuagcaacuugauuaguuugua

SEQ ID NO: 90175 - RNA, 24 nt, Artificial Sequence
  Synthetic
cauuagcaacuugauuaguuugua

SEQ ID NO: 90176 - RNA, 18 nt, Artificial Sequence
  Synthetic
acuucggccaguuuugua

SEQ ID NO: 90177 - RNA, 19 nt, Artificial Sequence
  Synthetic
uacuucggccaguuuugua

SEQ ID NO: 90178 - RNA, 20 nt, Artificial Sequence
  Synthetic
auacuucggccaguuuugua

SEQ ID NO: 90179 - RNA, 21 nt, Artificial Sequence
  Synthetic
uauacuucggccaguuuugua

SEQ ID NO: 90180 - RNA, 22 nt, Artificial Sequence
  Synthetic
cuauacuucggccaguuuugua

SEQ ID NO: 90181 - RNA, 23 nt, Artificial Sequence
  Synthetic
ccuauacuucggccaguuuugua

SEQ ID NO: 90182 - RNA, 24 nt, Artificial Sequence
  Synthetic
uccuauacuucggccaguuuugua

SEQ ID NO: 90183 - RNA, 21 nt, Artificial Sequence
  Synthetic
ugacaauuauccuaaaaauua

SEQ ID NO: 90184 - RNA, 22 nt, Artificial Sequence
  Synthetic
cugacaauuauccuaaaaauua

SEQ ID NO: 90185 - RNA, 23 nt, Artificial Sequence
  Synthetic
acugacaauuauccuaaaaauua

SEQ ID NO: 90186 - RNA, 24 nt, Artificial Sequence
  Synthetic
aacugacaauuauccuaaaaauua

SEQ ID NO: 90187 - RNA, 21 nt, Artificial Sequence
  Synthetic
cugaagacauuuuaaaaauua

SEQ ID NO: 90188 - RNA, 23 nt, Artificial Sequence
  Synthetic
ugcugaagacauuuuaaaaauua

SEQ ID NO: 90189 - RNA, 24 nt, Artificial Sequence
  Synthetic
augcugaagacauuuuaaaaauua

SEQ ID NO: 90190 - RNA, 22 nt, Artificial Sequence
  Synthetic
agaauggggauuaaggaaauua

SEQ ID NO: 90191 - RNA, 23 nt, Artificial Sequence
  Synthetic
aagaauggggauuaaggaaauua

SEQ ID NO: 90192 - RNA, 24 nt, Artificial Sequence
  Synthetic
caagaauggggauuaaggaaauua

SEQ ID NO: 90193 - RNA, 21 nt, Artificial Sequence
  Synthetic
acucuuuauucuaauaaauua

SEQ ID NO: 90194 - RNA, 22 nt, Artificial Sequence
  Synthetic
aacucuuuauucuaauaaauua

SEQ ID NO: 90195 - RNA, 24 nt, Artificial Sequence
  Synthetic
ugaacucuuuauucuaauaaauua

SEQ ID NO: 90196 - RNA, 18 nt, Artificial Sequence
  Synthetic
augucuuuuaauaaauua

SEQ ID NO: 90197 - RNA, 19 nt, Artificial Sequence
  Synthetic
uaugucuuuuaauaaauua

SEQ ID NO: 90198 - RNA, 21 nt, Artificial Sequence
  Synthetic
aguaugucuuuuaauaaauua

SEQ ID NO: 90199 - RNA, 22 nt, Artificial Sequence
  Synthetic
caguaugucuuuuaauaaauua

SEQ ID NO: 90200 - RNA, 23 nt, Artificial Sequence
  Synthetic
acaguaugucuuuuaauaaauua

SEQ ID NO: 90201 - RNA, 24 nt, Artificial Sequence
  Synthetic
aacaguaugucuuuuaauaaauua

SEQ ID NO: 90202 - RNA, 18 nt, Artificial Sequence
  Synthetic
uucaauuacaaacaauua

SEQ ID NO: 90203 - RNA, 19 nt, Artificial Sequence
  Synthetic
auucaauuacaaacaauua

SEQ ID NO: 90204 - RNA, 20 nt, Artificial Sequence
  Synthetic
cauucaauuacaaacaauua

SEQ ID NO: 90205 - RNA, 21 nt, Artificial Sequence
  Synthetic
ucauucaauuacaaacaauua

SEQ ID NO: 90206 - RNA, 22 nt, Artificial Sequence
  Synthetic
uucauucaauuacaaacaauua

SEQ ID NO: 90207 - RNA, 23 nt, Artificial Sequence
  Synthetic
uuucauucaauuacaaacaauua

SEQ ID NO: 90208 - RNA, 19 nt, Artificial Sequence
  Synthetic
agauaauuuugcacaauua

SEQ ID NO: 90209 - RNA, 20 nt, Artificial Sequence
  Synthetic
cagauaauuuugcacaauua

SEQ ID NO: 90210 - RNA, 21 nt, Artificial Sequence
  Synthetic
ccagauaauuuugcacaauua

SEQ ID NO: 90211 - RNA, 22 nt, Artificial Sequence
  Synthetic
accagauaauuuugcacaauua

SEQ ID NO: 90212 - RNA, 24 nt, Artificial Sequence
  Synthetic
ugaccagauaauuuugcacaauua

SEQ ID NO: 90213 - RNA, 19 nt, Artificial Sequence
  Synthetic
uggaugggugugacaauua

SEQ ID NO: 90214 - RNA, 20 nt, Artificial Sequence
  Synthetic
uuggaugggugugacaauua

SEQ ID NO: 90215 - RNA, 21 nt, Artificial Sequence
  Synthetic
auuggaugggugugacaauua

SEQ ID NO: 90216 - RNA, 23 nt, Artificial Sequence
  Synthetic
agauuggaugggugugacaauua

SEQ ID NO: 90217 - RNA, 18 nt, Artificial Sequence
  Synthetic
cauuugcuaauacaauua

SEQ ID NO: 90218 - RNA, 19 nt, Artificial Sequence
  Synthetic
acauuugcuaauacaauua

SEQ ID NO: 90219 - RNA, 20 nt, Artificial Sequence
  Synthetic
cacauuugcuaauacaauua

SEQ ID NO: 90220 - RNA, 21 nt, Artificial Sequence
  Synthetic
ccacauuugcuaauacaauua

SEQ ID NO: 90221 - RNA, 23 nt, Artificial Sequence
  Synthetic
agccacauuugcuaauacaauua

SEQ ID NO: 90222 - RNA, 24 nt, Artificial Sequence
  Synthetic
aagccacauuugcuaauacaauua

SEQ ID NO: 90223 - RNA, 18 nt, Artificial Sequence
  Synthetic
auguguaacugucaauua

SEQ ID NO: 90224 - RNA, 19 nt, Artificial Sequence
  Synthetic
aauguguaacugucaauua

SEQ ID NO: 90225 - RNA, 21 nt, Artificial Sequence
  Synthetic
ugaauguguaacugucaauua

SEQ ID NO: 90226 - RNA, 22 nt, Artificial Sequence
  Synthetic
cugaauguguaacugucaauua

SEQ ID NO: 90227 - RNA, 23 nt, Artificial Sequence
  Synthetic
ccugaauguguaacugucaauua

SEQ ID NO: 90228 - RNA, 24 nt, Artificial Sequence
  Synthetic
accugaauguguaacugucaauua

SEQ ID NO: 90229 - RNA, 18 nt, Artificial Sequence
  Synthetic
cuuuuggccuuggaauua

SEQ ID NO: 90230 - RNA, 19 nt, Artificial Sequence
  Synthetic
ucuuuuggccuuggaauua

SEQ ID NO: 90231 - RNA, 20 nt, Artificial Sequence
  Synthetic
uucuuuuggccuuggaauua

SEQ ID NO: 90232 - RNA, 21 nt, Artificial Sequence
  Synthetic
cuucuuuuggccuuggaauua

SEQ ID NO: 90233 - RNA, 22 nt, Artificial Sequence
  Synthetic
acuucuuuuggccuuggaauua

SEQ ID NO: 90234 - RNA, 23 nt, Artificial Sequence
  Synthetic
cacuucuuuuggccuuggaauua

SEQ ID NO: 90235 - RNA, 24 nt, Artificial Sequence
  Synthetic
ucacuucuuuuggccuuggaauua

SEQ ID NO: 90236 - RNA, 18 nt, Artificial Sequence
  Synthetic
caaucauaucaugaauua

SEQ ID NO: 90237 - RNA, 19 nt, Artificial Sequence
  Synthetic
ucaaucauaucaugaauua

SEQ ID NO: 90238 - RNA, 20 nt, Artificial Sequence
  Synthetic
uucaaucauaucaugaauua

SEQ ID NO: 90239 - RNA, 21 nt, Artificial Sequence
  Synthetic
uuucaaucauaucaugaauua

SEQ ID NO: 90240 - RNA, 24 nt, Artificial Sequence
  Synthetic
agguuucaaucauaucaugaauua

SEQ ID NO: 90241 - RNA, 18 nt, Artificial Sequence
  Synthetic
uuuaguucugccuaauua

SEQ ID NO: 90242 - RNA, 19 nt, Artificial Sequence
  Synthetic
uuuuaguucugccuaauua

SEQ ID NO: 90243 - RNA, 20 nt, Artificial Sequence
  Synthetic
uuuuuaguucugccuaauua

SEQ ID NO: 90244 - RNA, 22 nt, Artificial Sequence
  Synthetic
uguuuuuaguucugccuaauua

SEQ ID NO: 90245 - RNA, 23 nt, Artificial Sequence
  Synthetic
auguuuuuaguucugccuaauua

SEQ ID NO: 90246 - RNA, 19 nt, Artificial Sequence
  Synthetic
aguuaccaccaaguaauua

SEQ ID NO: 90247 - RNA, 20 nt, Artificial Sequence
  Synthetic
uaguuaccaccaaguaauua

SEQ ID NO: 90248 - RNA, 21 nt, Artificial Sequence
  Synthetic
uuaguuaccaccaaguaauua

SEQ ID NO: 90249 - RNA, 22 nt, Artificial Sequence
  Synthetic
uuuaguuaccaccaaguaauua

SEQ ID NO: 90250 - RNA, 23 nt, Artificial Sequence
  Synthetic
cuuuaguuaccaccaaguaauua

SEQ ID NO: 90251 - RNA, 24 nt, Artificial Sequence
  Synthetic
ucuuuaguuaccaccaaguaauua

SEQ ID NO: 90252 - RNA, 18 nt, Artificial Sequence
  Synthetic
accauguugaauuaauua

SEQ ID NO: 90253 - RNA, 19 nt, Artificial Sequence
  Synthetic
aaccauguugaauuaauua

SEQ ID NO: 90254 - RNA, 20 nt, Artificial Sequence
  Synthetic
aaaccauguugaauuaauua

SEQ ID NO: 90255 - RNA, 21 nt, Artificial Sequence
  Synthetic
aaaaccauguugaauuaauua

SEQ ID NO: 90256 - RNA, 22 nt, Artificial Sequence
  Synthetic
aaaaaccauguugaauuaauua

SEQ ID NO: 90257 - RNA, 23 nt, Artificial Sequence
  Synthetic
uaaaaaccauguugaauuaauua

SEQ ID NO: 90258 - RNA, 24 nt, Artificial Sequence
  Synthetic
auaaaaaccauguugaauuaauua

SEQ ID NO: 90259 - RNA, 18 nt, Artificial Sequence
  Synthetic
ugaauuuucuguuaauua

SEQ ID NO: 90260 - RNA, 19 nt, Artificial Sequence
  Synthetic
uugaauuuucuguuaauua

SEQ ID NO: 90261 - RNA, 20 nt, Artificial Sequence
  Synthetic
uuugaauuuucuguuaauua

SEQ ID NO: 90262 - RNA, 21 nt, Artificial Sequence
  Synthetic
auuugaauuuucuguuaauua

SEQ ID NO: 90263 - RNA, 22 nt, Artificial Sequence
  Synthetic
cauuugaauuuucuguuaauua

SEQ ID NO: 90264 - RNA, 23 nt, Artificial Sequence
  Synthetic
ucauuugaauuuucuguuaauua

SEQ ID NO: 90265 - RNA, 24 nt, Artificial Sequence
  Synthetic
cucauuugaauuuucuguuaauua

SEQ ID NO: 90266 - RNA, 18 nt, Artificial Sequence
  Synthetic
uuauguuuucuuuaauua

SEQ ID NO: 90267 - RNA, 19 nt, Artificial Sequence
  Synthetic
auuauguuuucuuuaauua

SEQ ID NO: 90268 - RNA, 20 nt, Artificial Sequence
  Synthetic
aauuauguuuucuuuaauua

SEQ ID NO: 90269 - RNA, 21 nt, Artificial Sequence
  Synthetic
aaauuauguuuucuuuaauua

SEQ ID NO: 90270 - RNA, 22 nt, Artificial Sequence
  Synthetic
aaaauuauguuuucuuuaauua

SEQ ID NO: 90271 - RNA, 23 nt, Artificial Sequence
  Synthetic
caaaauuauguuuucuuuaauua

SEQ ID NO: 90272 - RNA, 24 nt, Artificial Sequence
  Synthetic
ucaaaauuauguuuucuuuaauua

SEQ ID NO: 90273 - RNA, 18 nt, Artificial Sequence
  Synthetic
uauucaaguuaaacauua

SEQ ID NO: 90274 - RNA, 19 nt, Artificial Sequence
  Synthetic
uuauucaaguuaaacauua

SEQ ID NO: 90275 - RNA, 20 nt, Artificial Sequence
  Synthetic
auuauucaaguuaaacauua

SEQ ID NO: 90276 - RNA, 21 nt, Artificial Sequence
  Synthetic
aauuauucaaguuaaacauua

SEQ ID NO: 90277 - RNA, 22 nt, Artificial Sequence
  Synthetic
uaauuauucaaguuaaacauua

SEQ ID NO: 90278 - RNA, 23 nt, Artificial Sequence
  Synthetic
auaauuauucaaguuaaacauua

SEQ ID NO: 90279 - RNA, 24 nt, Artificial Sequence
  Synthetic
cauaauuauucaaguuaaacauua

SEQ ID NO: 90280 - RNA, 19 nt, Artificial Sequence
  Synthetic
aguguuauuccaaccauua

SEQ ID NO: 90281 - RNA, 20 nt, Artificial Sequence
  Synthetic
aaguguuauuccaaccauua

SEQ ID NO: 90282 - RNA, 21 nt, Artificial Sequence
  Synthetic
caaguguuauuccaaccauua

SEQ ID NO: 90283 - RNA, 22 nt, Artificial Sequence
  Synthetic
ucaaguguuauuccaaccauua

SEQ ID NO: 90284 - RNA, 23 nt, Artificial Sequence
  Synthetic
aucaaguguuauuccaaccauua

SEQ ID NO: 90285 - RNA, 24 nt, Artificial Sequence
  Synthetic
uaucaaguguuauuccaaccauua

SEQ ID NO: 90286 - RNA, 19 nt, Artificial Sequence
  Synthetic
aguaauguuguaagcauua

SEQ ID NO: 90287 - RNA, 20 nt, Artificial Sequence
  Synthetic
caguaauguuguaagcauua

SEQ ID NO: 90288 - RNA, 18 nt, Artificial Sequence
  Synthetic
uauauacgcauagcauua

SEQ ID NO: 90289 - RNA, 19 nt, Artificial Sequence
  Synthetic
cuauauacgcauagcauua

SEQ ID NO: 90290 - RNA, 20 nt, Artificial Sequence
  Synthetic
acuauauacgcauagcauua

SEQ ID NO: 90291 - RNA, 22 nt, Artificial Sequence
  Synthetic
agacuauauacgcauagcauua

SEQ ID NO: 90292 - RNA, 23 nt, Artificial Sequence
  Synthetic
aagacuauauacgcauagcauua

SEQ ID NO: 90293 - RNA, 24 nt, Artificial Sequence
  Synthetic
uaagacuauauacgcauagcauua

SEQ ID NO: 90294 - RNA, 18 nt, Artificial Sequence
  Synthetic
augugcuaacucucauua

SEQ ID NO: 90295 - RNA, 19 nt, Artificial Sequence
  Synthetic
uaugugcuaacucucauua

SEQ ID NO: 90296 - RNA, 20 nt, Artificial Sequence
  Synthetic
cuaugugcuaacucucauua

SEQ ID NO: 90297 - RNA, 21 nt, Artificial Sequence
  Synthetic
ccuaugugcuaacucucauua

SEQ ID NO: 90298 - RNA, 22 nt, Artificial Sequence
  Synthetic
accuaugugcuaacucucauua

SEQ ID NO: 90299 - RNA, 23 nt, Artificial Sequence
  Synthetic
uaccuaugugcuaacucucauua

SEQ ID NO: 90300 - RNA, 24 nt, Artificial Sequence
  Synthetic
uuaccuaugugcuaacucucauua

SEQ ID NO: 90301 - RNA, 18 nt, Artificial Sequence
  Synthetic
uauauacuauugucauua

SEQ ID NO: 90302 - RNA, 19 nt, Artificial Sequence
  Synthetic
uuauauacuauugucauua

SEQ ID NO: 90303 - RNA, 20 nt, Artificial Sequence
  Synthetic
cuuauauacuauugucauua

SEQ ID NO: 90304 - RNA, 21 nt, Artificial Sequence
  Synthetic
ucuuauauacuauugucauua

SEQ ID NO: 90305 - RNA, 22 nt, Artificial Sequence
  Synthetic
uucuuauauacuauugucauua

SEQ ID NO: 90306 - RNA, 23 nt, Artificial Sequence
  Synthetic
auucuuauauacuauugucauua

SEQ ID NO: 90307 - RNA, 24 nt, Artificial Sequence
  Synthetic
uauucuuauauacuauugucauua

SEQ ID NO: 90308 - RNA, 18 nt, Artificial Sequence
  Synthetic
uaaaugcaauguucauua

SEQ ID NO: 90309 - RNA, 19 nt, Artificial Sequence
  Synthetic
uuaaaugcaauguucauua

SEQ ID NO: 90310 - RNA, 20 nt, Artificial Sequence
  Synthetic
cuuaaaugcaauguucauua

SEQ ID NO: 90311 - RNA, 21 nt, Artificial Sequence
  Synthetic
ccuuaaaugcaauguucauua

SEQ ID NO: 90312 - RNA, 23 nt, Artificial Sequence
  Synthetic
ugccuuaaaugcaauguucauua

SEQ ID NO: 90313 - RNA, 24 nt, Artificial Sequence
  Synthetic
augccuuaaaugcaauguucauua

SEQ ID NO: 90314 - RNA, 22 nt, Artificial Sequence
  Synthetic
ugauauuuuaggagaaagauua

SEQ ID NO: 90315 - RNA, 23 nt, Artificial Sequence
  Synthetic
augauauuuuaggagaaagauua

SEQ ID NO: 90316 - RNA, 24 nt, Artificial Sequence
  Synthetic
uaugauauuuuaggagaaagauua

SEQ ID NO: 90317 - RNA, 21 nt, Artificial Sequence
  Synthetic
aaaaguacaaagacaagauua

SEQ ID NO: 90318 - RNA, 23 nt, Artificial Sequence
  Synthetic
agaaaaguacaaagacaagauua

SEQ ID NO: 90319 - RNA, 24 nt, Artificial Sequence
  Synthetic
aagaaaaguacaaagacaagauua

SEQ ID NO: 90320 - RNA, 18 nt, Artificial Sequence
  Synthetic
cuuuaauauuagagauua

SEQ ID NO: 90321 - RNA, 19 nt, Artificial Sequence
  Synthetic
acuuuaauauuagagauua

SEQ ID NO: 90322 - RNA, 20 nt, Artificial Sequence
  Synthetic
aacuuuaauauuagagauua

SEQ ID NO: 90323 - RNA, 21 nt, Artificial Sequence
  Synthetic
aaacuuuaauauuagagauua

SEQ ID NO: 90324 - RNA, 22 nt, Artificial Sequence
  Synthetic
uaaacuuuaauauuagagauua

SEQ ID NO: 90325 - RNA, 23 nt, Artificial Sequence
  Synthetic
cuaaacuuuaauauuagagauua

SEQ ID NO: 90326 - RNA, 24 nt, Artificial Sequence
  Synthetic
ucuaaacuuuaauauuagagauua

SEQ ID NO: 90327 - RNA, 18 nt, Artificial Sequence
  Synthetic
uauaccccaaaaggauua

SEQ ID NO: 90328 - RNA, 19 nt, Artificial Sequence
  Synthetic
auauaccccaaaaggauua

SEQ ID NO: 90329 - RNA, 20 nt, Artificial Sequence
  Synthetic
uauauaccccaaaaggauua

SEQ ID NO: 90330 - RNA, 21 nt, Artificial Sequence
  Synthetic
uuauauaccccaaaaggauua

SEQ ID NO: 90331 - RNA, 22 nt, Artificial Sequence
  Synthetic
auuauauaccccaaaaggauua

SEQ ID NO: 90332 - RNA, 21 nt, Artificial Sequence
  Synthetic
uuauuauaugaauuaggauua

SEQ ID NO: 90333 - RNA, 22 nt, Artificial Sequence
  Synthetic
auuauuauaugaauuaggauua

SEQ ID NO: 90334 - RNA, 23 nt, Artificial Sequence
  Synthetic
uauuauuauaugaauuaggauua

SEQ ID NO: 90335 - RNA, 24 nt, Artificial Sequence
  Synthetic
uuauuauuauaugaauuaggauua

SEQ ID NO: 90336 - RNA, 19 nt, Artificial Sequence
  Synthetic
agaccugcuauugggauua

SEQ ID NO: 90337 - RNA, 20 nt, Artificial Sequence
  Synthetic
cagaccugcuauugggauua

SEQ ID NO: 90338 - RNA, 21 nt, Artificial Sequence
  Synthetic
acagaccugcuauugggauua

SEQ ID NO: 90339 - RNA, 22 nt, Artificial Sequence
  Synthetic
aacagaccugcuauugggauua

SEQ ID NO: 90340 - RNA, 23 nt, Artificial Sequence
  Synthetic
caacagaccugcuauugggauua

SEQ ID NO: 90341 - RNA, 24 nt, Artificial Sequence
  Synthetic
acaacagaccugcuauugggauua

SEQ ID NO: 90342 - RNA, 18 nt, Artificial Sequence
  Synthetic
aggauggcauuuggauua

SEQ ID NO: 90343 - RNA, 19 nt, Artificial Sequence
  Synthetic
aaggauggcauuuggauua

SEQ ID NO: 90344 - RNA, 20 nt, Artificial Sequence
  Synthetic
aaaggauggcauuuggauua

SEQ ID NO: 90345 - RNA, 22 nt, Artificial Sequence
  Synthetic
ugaaaggauggcauuuggauua

SEQ ID NO: 90346 - RNA, 23 nt, Artificial Sequence
  Synthetic
uugaaaggauggcauuuggauua

SEQ ID NO: 90347 - RNA, 24 nt, Artificial Sequence
  Synthetic
uuugaaaggauggcauuuggauua

SEQ ID NO: 90348 - RNA, 18 nt, Artificial Sequence
  Synthetic
aauaaacagccaugauua

SEQ ID NO: 90349 - RNA, 19 nt, Artificial Sequence
  Synthetic
caauaaacagccaugauua

SEQ ID NO: 90350 - RNA, 20 nt, Artificial Sequence
  Synthetic
ucaauaaacagccaugauua

SEQ ID NO: 90351 - RNA, 21 nt, Artificial Sequence
  Synthetic
aucaauaaacagccaugauua

SEQ ID NO: 90352 - RNA, 23 nt, Artificial Sequence
  Synthetic
ugaucaauaaacagccaugauua

SEQ ID NO: 90353 - RNA, 24 nt, Artificial Sequence
  Synthetic
cugaucaauaaacagccaugauua

SEQ ID NO: 90354 - RNA, 18 nt, Artificial Sequence
  Synthetic
cacgcaucuuuaugauua

SEQ ID NO: 90355 - RNA, 19 nt, Artificial Sequence
  Synthetic
ucacgcaucuuuaugauua

SEQ ID NO: 90356 - RNA, 21 nt, Artificial Sequence
  Synthetic
ugucacgcaucuuuaugauua

SEQ ID NO: 90357 - RNA, 22 nt, Artificial Sequence
  Synthetic
uugucacgcaucuuuaugauua

SEQ ID NO: 90358 - RNA, 23 nt, Artificial Sequence
  Synthetic
auugucacgcaucuuuaugauua

SEQ ID NO: 90359 - RNA, 24 nt, Artificial Sequence
  Synthetic
uauugucacgcaucuuuaugauua

SEQ ID NO: 90360 - RNA, 19 nt, Artificial Sequence
  Synthetic
aggcagcaauuggugauua

SEQ ID NO: 90361 - RNA, 20 nt, Artificial Sequence
  Synthetic
aaggcagcaauuggugauua

SEQ ID NO: 90362 - RNA, 21 nt, Artificial Sequence
  Synthetic
aaaggcagcaauuggugauua

SEQ ID NO: 90363 - RNA, 22 nt, Artificial Sequence
  Synthetic
uaaaggcagcaauuggugauua

SEQ ID NO: 90364 - RNA, 23 nt, Artificial Sequence
  Synthetic
auaaaggcagcaauuggugauua

SEQ ID NO: 90365 - RNA, 24 nt, Artificial Sequence
  Synthetic
uauaaaggcagcaauuggugauua

SEQ ID NO: 90366 - RNA, 21 nt, Artificial Sequence
  Synthetic
aaaaugauauuuuggugauua

SEQ ID NO: 90367 - RNA, 22 nt, Artificial Sequence
  Synthetic
aaaaaugauauuuuggugauua

SEQ ID NO: 90368 - RNA, 23 nt, Artificial Sequence
  Synthetic
caaaaaugauauuuuggugauua

SEQ ID NO: 90369 - RNA, 24 nt, Artificial Sequence
  Synthetic
ucaaaaaugauauuuuggugauua

SEQ ID NO: 90370 - RNA, 21 nt, Artificial Sequence
  Synthetic
uuaaaauuaauuaugugauua

SEQ ID NO: 90371 - RNA, 22 nt, Artificial Sequence
  Synthetic
uuuaaaauuaauuaugugauua

SEQ ID NO: 90372 - RNA, 23 nt, Artificial Sequence
  Synthetic
uuuuaaaauuaauuaugugauua

SEQ ID NO: 90373 - RNA, 24 nt, Artificial Sequence
  Synthetic
cuuuuaaaauuaauuaugugauua

SEQ ID NO: 90374 - RNA, 19 nt, Artificial Sequence
  Synthetic
ugucccuugccugugauua

SEQ ID NO: 90375 - RNA, 20 nt, Artificial Sequence
  Synthetic
uugucccuugccugugauua

SEQ ID NO: 90376 - RNA, 21 nt, Artificial Sequence
  Synthetic
cuugucccuugccugugauua

SEQ ID NO: 90377 - RNA, 22 nt, Artificial Sequence
  Synthetic
ccuugucccuugccugugauua

SEQ ID NO: 90378 - RNA, 23 nt, Artificial Sequence
  Synthetic
uccuugucccuugccugugauua

SEQ ID NO: 90379 - RNA, 24 nt, Artificial Sequence
  Synthetic
uuccuugucccuugccugugauua

SEQ ID NO: 90380 - RNA, 19 nt, Artificial Sequence
  Synthetic
cguacaauguuauugauua

SEQ ID NO: 90381 - RNA, 20 nt, Artificial Sequence
  Synthetic
acguacaauguuauugauua

SEQ ID NO: 90382 - RNA, 21 nt, Artificial Sequence
  Synthetic
aacguacaauguuauugauua

SEQ ID NO: 90383 - RNA, 22 nt, Artificial Sequence
  Synthetic
caacguacaauguuauugauua

SEQ ID NO: 90384 - RNA, 23 nt, Artificial Sequence
  Synthetic
acaacguacaauguuauugauua

SEQ ID NO: 90385 - RNA, 24 nt, Artificial Sequence
  Synthetic
cacaacguacaauguuauugauua

SEQ ID NO: 90386 - RNA, 18 nt, Artificial Sequence
  Synthetic
ccucaugcaaaaauauua

SEQ ID NO: 90387 - RNA, 19 nt, Artificial Sequence
  Synthetic
accucaugcaaaaauauua

SEQ ID NO: 90388 - RNA, 21 nt, Artificial Sequence
  Synthetic
cgaccucaugcaaaaauauua

SEQ ID NO: 90389 - RNA, 22 nt, Artificial Sequence
  Synthetic
ccgaccucaugcaaaaauauua

SEQ ID NO: 90390 - RNA, 23 nt, Artificial Sequence
  Synthetic
accgaccucaugcaaaaauauua

SEQ ID NO: 90391 - RNA, 18 nt, Artificial Sequence
  Synthetic
uauucaaacaaaauauua

SEQ ID NO: 90392 - RNA, 19 nt, Artificial Sequence
  Synthetic
cuauucaaacaaaauauua

SEQ ID NO: 90393 - RNA, 20 nt, Artificial Sequence
  Synthetic
acuauucaaacaaaauauua

SEQ ID NO: 90394 - RNA, 21 nt, Artificial Sequence
  Synthetic
aacuauucaaacaaaauauua

SEQ ID NO: 90395 - RNA, 22 nt, Artificial Sequence
  Synthetic
uaacuauucaaacaaaauauua

SEQ ID NO: 90396 - RNA, 24 nt, Artificial Sequence
  Synthetic
aguaacuauucaaacaaaauauua

SEQ ID NO: 90397 - RNA, 22 nt, Artificial Sequence
  Synthetic
aguuauuuaucaugaaauauua

SEQ ID NO: 90398 - RNA, 23 nt, Artificial Sequence
  Synthetic
aaguuauuuaucaugaaauauua

SEQ ID NO: 90399 - RNA, 24 nt, Artificial Sequence
  Synthetic
aaaguuauuuaucaugaaauauua

SEQ ID NO: 90400 - RNA, 19 nt, Artificial Sequence
  Synthetic
ugaacaacccagaauauua

SEQ ID NO: 90401 - RNA, 20 nt, Artificial Sequence
  Synthetic
augaacaacccagaauauua

SEQ ID NO: 90402 - RNA, 21 nt, Artificial Sequence
  Synthetic
uaugaacaacccagaauauua

SEQ ID NO: 90403 - RNA, 22 nt, Artificial Sequence
  Synthetic
uuaugaacaacccagaauauua

SEQ ID NO: 90404 - RNA, 23 nt, Artificial Sequence
  Synthetic
uuuaugaacaacccagaauauua

SEQ ID NO: 90405 - RNA, 24 nt, Artificial Sequence
  Synthetic
uuuuaugaacaacccagaauauua

SEQ ID NO: 90406 - RNA, 18 nt, Artificial Sequence
  Synthetic
ucguggggcuuaauauua

SEQ ID NO: 90407 - RNA, 19 nt, Artificial Sequence
  Synthetic
aucguggggcuuaauauua

SEQ ID NO: 90408 - RNA, 20 nt, Artificial Sequence
  Synthetic
uaucguggggcuuaauauua

SEQ ID NO: 90409 - RNA, 21 nt, Artificial Sequence
  Synthetic
uuaucguggggcuuaauauua

SEQ ID NO: 90410 - RNA, 22 nt, Artificial Sequence
  Synthetic
uuuaucguggggcuuaauauua

SEQ ID NO: 90411 - RNA, 23 nt, Artificial Sequence
  Synthetic
auuuaucguggggcuuaauauua

SEQ ID NO: 90412 - RNA, 24 nt, Artificial Sequence
  Synthetic
aauuuaucguggggcuuaauauua

SEQ ID NO: 90413 - RNA, 18 nt, Artificial Sequence
  Synthetic
aacaggauuggcauauua

SEQ ID NO: 90414 - RNA, 19 nt, Artificial Sequence
  Synthetic
aaacaggauuggcauauua

SEQ ID NO: 90415 - RNA, 20 nt, Artificial Sequence
  Synthetic
caaacaggauuggcauauua

SEQ ID NO: 90416 - RNA, 22 nt, Artificial Sequence
  Synthetic
agcaaacaggauuggcauauua

SEQ ID NO: 90417 - RNA, 23 nt, Artificial Sequence
  Synthetic
uagcaaacaggauuggcauauua

SEQ ID NO: 90418 - RNA, 24 nt, Artificial Sequence
  Synthetic
cuagcaaacaggauuggcauauua

SEQ ID NO: 90419 - RNA, 18 nt, Artificial Sequence
  Synthetic
aaaagaggagagauauua

SEQ ID NO: 90420 - RNA, 19 nt, Artificial Sequence
  Synthetic
aaaaagaggagagauauua

SEQ ID NO: 90421 - RNA, 20 nt, Artificial Sequence
  Synthetic
aaaaaagaggagagauauua

SEQ ID NO: 90422 - RNA, 21 nt, Artificial Sequence
  Synthetic
aaaaaaagaggagagauauua

SEQ ID NO: 90423 - RNA, 22 nt, Artificial Sequence
  Synthetic
uaaaaaaagaggagagauauua

SEQ ID NO: 90424 - RNA, 23 nt, Artificial Sequence
  Synthetic
cuaaaaaaagaggagagauauua

SEQ ID NO: 90425 - RNA, 24 nt, Artificial Sequence
  Synthetic
acuaaaaaaagaggagagauauua

SEQ ID NO: 90426 - RNA, 21 nt, Artificial Sequence
  Synthetic
uauauaugcaaugggauauua

SEQ ID NO: 90427 - RNA, 22 nt, Artificial Sequence
  Synthetic
auauauaugcaaugggauauua

SEQ ID NO: 90428 - RNA, 23 nt, Artificial Sequence
  Synthetic
cauauauaugcaaugggauauua

SEQ ID NO: 90429 - RNA, 18 nt, Artificial Sequence
  Synthetic
ugguagauaaauauauua

SEQ ID NO: 90430 - RNA, 19 nt, Artificial Sequence
  Synthetic
cugguagauaaauauauua

SEQ ID NO: 90431 - RNA, 20 nt, Artificial Sequence
  Synthetic
acugguagauaaauauauua

SEQ ID NO: 90432 - RNA, 21 nt, Artificial Sequence
  Synthetic
cacugguagauaaauauauua

SEQ ID NO: 90433 - RNA, 22 nt, Artificial Sequence
  Synthetic
acacugguagauaaauauauua

SEQ ID NO: 90434 - RNA, 23 nt, Artificial Sequence
  Synthetic
aacacugguagauaaauauauua

SEQ ID NO: 90435 - RNA, 24 nt, Artificial Sequence
  Synthetic
aaacacugguagauaaauauauua

SEQ ID NO: 90436 - RNA, 18 nt, Artificial Sequence
  Synthetic
ugggcacccaauauauua

SEQ ID NO: 90437 - RNA, 20 nt, Artificial Sequence
  Synthetic
agugggcacccaauauauua

SEQ ID NO: 90438 - RNA, 21 nt, Artificial Sequence
  Synthetic
uagugggcacccaauauauua

SEQ ID NO: 90439 - RNA, 22 nt, Artificial Sequence
  Synthetic
auagugggcacccaauauauua

SEQ ID NO: 90440 - RNA, 23 nt, Artificial Sequence
  Synthetic
uauagugggcacccaauauauua

SEQ ID NO: 90441 - RNA, 24 nt, Artificial Sequence
  Synthetic
auauagugggcacccaauauauua

SEQ ID NO: 90442 - RNA, 18 nt, Artificial Sequence
  Synthetic
cauuuggugaauauauua

SEQ ID NO: 90443 - RNA, 19 nt, Artificial Sequence
  Synthetic
ccauuuggugaauauauua

SEQ ID NO: 90444 - RNA, 20 nt, Artificial Sequence
  Synthetic
uccauuuggugaauauauua

SEQ ID NO: 90445 - RNA, 21 nt, Artificial Sequence
  Synthetic
auccauuuggugaauauauua

SEQ ID NO: 90446 - RNA, 22 nt, Artificial Sequence
  Synthetic
aauccauuuggugaauauauua

SEQ ID NO: 90447 - RNA, 23 nt, Artificial Sequence
  Synthetic
uaauccauuuggugaauauauua

SEQ ID NO: 90448 - RNA, 24 nt, Artificial Sequence
  Synthetic
uuaauccauuuggugaauauauua

SEQ ID NO: 90449 - RNA, 19 nt, Artificial Sequence
  Synthetic
aguaucugcuuauauauua

SEQ ID NO: 90450 - RNA, 20 nt, Artificial Sequence
  Synthetic
aaguaucugcuuauauauua

SEQ ID NO: 90451 - RNA, 21 nt, Artificial Sequence
  Synthetic
aaaguaucugcuuauauauua

SEQ ID NO: 90452 - RNA, 22 nt, Artificial Sequence
  Synthetic
aaaaguaucugcuuauauauua

SEQ ID NO: 90453 - RNA, 24 nt, Artificial Sequence
  Synthetic
agaaaaguaucugcuuauauauua

SEQ ID NO: 90454 - RNA, 21 nt, Artificial Sequence
  Synthetic
cauuuauuccaaaaacuauua

SEQ ID NO: 90455 - RNA, 22 nt, Artificial Sequence
  Synthetic
ucauuuauuccaaaaacuauua

SEQ ID NO: 90456 - RNA, 23 nt, Artificial Sequence
  Synthetic
uucauuuauuccaaaaacuauua

SEQ ID NO: 90457 - RNA, 24 nt, Artificial Sequence
  Synthetic
auucauuuauuccaaaaacuauua

SEQ ID NO: 90458 - RNA, 20 nt, Artificial Sequence
  Synthetic
uggaaaaaaagaaccuauua

SEQ ID NO: 90459 - RNA, 21 nt, Artificial Sequence
  Synthetic
auggaaaaaaagaaccuauua

SEQ ID NO: 90460 - RNA, 22 nt, Artificial Sequence
  Synthetic
cauggaaaaaaagaaccuauua

SEQ ID NO: 90461 - RNA, 23 nt, Artificial Sequence
  Synthetic
ccauggaaaaaaagaaccuauua

SEQ ID NO: 90462 - RNA, 24 nt, Artificial Sequence
  Synthetic
accauggaaaaaaagaaccuauua

SEQ ID NO: 90463 - RNA, 21 nt, Artificial Sequence
  Synthetic
cuaaauaaaugguagcuauua

SEQ ID NO: 90464 - RNA, 22 nt, Artificial Sequence
  Synthetic
acuaaauaaaugguagcuauua

SEQ ID NO: 90465 - RNA, 23 nt, Artificial Sequence
  Synthetic
cacuaaauaaaugguagcuauua

SEQ ID NO: 90466 - RNA, 18 nt, Artificial Sequence
  Synthetic
ugaguggaauugcuauua

SEQ ID NO: 90467 - RNA, 21 nt, Artificial Sequence
  Synthetic
aggugaguggaauugcuauua

SEQ ID NO: 90468 - RNA, 22 nt, Artificial Sequence
  Synthetic
uaggugaguggaauugcuauua

SEQ ID NO: 90469 - RNA, 18 nt, Artificial Sequence
  Synthetic
uagagaagcauucuauua

SEQ ID NO: 90470 - RNA, 21 nt, Artificial Sequence
  Synthetic
ugguagagaagcauucuauua

SEQ ID NO: 90471 - RNA, 23 nt, Artificial Sequence
  Synthetic
ugugguagagaagcauucuauua

SEQ ID NO: 90472 - RNA, 24 nt, Artificial Sequence
  Synthetic
cugugguagagaagcauucuauua

SEQ ID NO: 90473 - RNA, 18 nt, Artificial Sequence
  Synthetic
uaugcaggccuucuauua

SEQ ID NO: 90474 - RNA, 19 nt, Artificial Sequence
  Synthetic
auaugcaggccuucuauua

SEQ ID NO: 90475 - RNA, 20 nt, Artificial Sequence
  Synthetic
aauaugcaggccuucuauua

SEQ ID NO: 90476 - RNA, 22 nt, Artificial Sequence
  Synthetic
agaauaugcaggccuucuauua

SEQ ID NO: 90477 - RNA, 24 nt, Artificial Sequence
  Synthetic
ugagaauaugcaggccuucuauua

SEQ ID NO: 90478 - RNA, 18 nt, Artificial Sequence
  Synthetic
aaaguugcuacaguauua

SEQ ID NO: 90479 - RNA, 19 nt, Artificial Sequence
  Synthetic
uaaaguugcuacaguauua

SEQ ID NO: 90480 - RNA, 20 nt, Artificial Sequence
  Synthetic
uuaaaguugcuacaguauua

SEQ ID NO: 90481 - RNA, 21 nt, Artificial Sequence
  Synthetic
cuuaaaguugcuacaguauua

SEQ ID NO: 90482 - RNA, 22 nt, Artificial Sequence
  Synthetic
ccuuaaaguugcuacaguauua

SEQ ID NO: 90483 - RNA, 23 nt, Artificial Sequence
  Synthetic
accuuaaaguugcuacaguauua

SEQ ID NO: 90484 - RNA, 19 nt, Artificial Sequence
  Synthetic
agggagacgguagguauua

SEQ ID NO: 90485 - RNA, 22 nt, Artificial Sequence
  Synthetic
aggagggagacgguagguauua

SEQ ID NO: 90486 - RNA, 23 nt, Artificial Sequence
  Synthetic
aaggagggagacgguagguauua

SEQ ID NO: 90487 - RNA, 24 nt, Artificial Sequence
  Synthetic
aaaggagggagacgguagguauua

SEQ ID NO: 90488 - RNA, 18 nt, Artificial Sequence
  Synthetic
ugagauuuauauguauua

SEQ ID NO: 90489 - RNA, 19 nt, Artificial Sequence
  Synthetic
uugagauuuauauguauua

SEQ ID NO: 90490 - RNA, 21 nt, Artificial Sequence
  Synthetic
aguugagauuuauauguauua

SEQ ID NO: 90491 - RNA, 22 nt, Artificial Sequence
  Synthetic
uaguugagauuuauauguauua

SEQ ID NO: 90492 - RNA, 23 nt, Artificial Sequence
  Synthetic
auaguugagauuuauauguauua

SEQ ID NO: 90493 - RNA, 24 nt, Artificial Sequence
  Synthetic
cauaguugagauuuauauguauua

SEQ ID NO: 90494 - RNA, 19 nt, Artificial Sequence
  Synthetic
uggugcugacucauuauua

SEQ ID NO: 90495 - RNA, 20 nt, Artificial Sequence
  Synthetic
auggugcugacucauuauua

SEQ ID NO: 90496 - RNA, 21 nt, Artificial Sequence
  Synthetic
aauggugcugacucauuauua

SEQ ID NO: 90497 - RNA, 22 nt, Artificial Sequence
  Synthetic
aaauggugcugacucauuauua

SEQ ID NO: 90498 - RNA, 23 nt, Artificial Sequence
  Synthetic
uaaauggugcugacucauuauua

SEQ ID NO: 90499 - RNA, 24 nt, Artificial Sequence
  Synthetic
uuaaauggugcugacucauuauua

SEQ ID NO: 90500 - RNA, 18 nt, Artificial Sequence
  Synthetic
uucauuuaaguauuauua

SEQ ID NO: 90501 - RNA, 19 nt, Artificial Sequence
  Synthetic
uuucauuuaaguauuauua

SEQ ID NO: 90502 - RNA, 20 nt, Artificial Sequence
  Synthetic
cuuucauuuaaguauuauua

SEQ ID NO: 90503 - RNA, 22 nt, Artificial Sequence
  Synthetic
agcuuucauuuaaguauuauua

SEQ ID NO: 90504 - RNA, 23 nt, Artificial Sequence
  Synthetic
uagcuuucauuuaaguauuauua

SEQ ID NO: 90505 - RNA, 24 nt, Artificial Sequence
  Synthetic
auagcuuucauuuaaguauuauua

SEQ ID NO: 90506 - RNA, 18 nt, Artificial Sequence
  Synthetic
aaagcuuauuauuuauua

SEQ ID NO: 90507 - RNA, 19 nt, Artificial Sequence
  Synthetic
caaagcuuauuauuuauua

SEQ ID NO: 90508 - RNA, 20 nt, Artificial Sequence
  Synthetic
ucaaagcuuauuauuuauua

SEQ ID NO: 90509 - RNA, 21 nt, Artificial Sequence
  Synthetic
aucaaagcuuauuauuuauua

SEQ ID NO: 90510 - RNA, 22 nt, Artificial Sequence
  Synthetic
uaucaaagcuuauuauuuauua

SEQ ID NO: 90511 - RNA, 24 nt, Artificial Sequence
  Synthetic
aguaucaaagcuuauuauuuauua

SEQ ID NO: 90512 - RNA, 18 nt, Artificial Sequence
  Synthetic
uguccccuucuuuuauua

SEQ ID NO: 90513 - RNA, 19 nt, Artificial Sequence
  Synthetic
uuguccccuucuuuuauua

SEQ ID NO: 90514 - RNA, 20 nt, Artificial Sequence
  Synthetic
auuguccccuucuuuuauua

SEQ ID NO: 90515 - RNA, 21 nt, Artificial Sequence
  Synthetic
cauuguccccuucuuuuauua

SEQ ID NO: 90516 - RNA, 22 nt, Artificial Sequence
  Synthetic
ucauuguccccuucuuuuauua

SEQ ID NO: 90517 - RNA, 24 nt, Artificial Sequence
  Synthetic
agucauuguccccuucuuuuauua

SEQ ID NO: 90518 - RNA, 18 nt, Artificial Sequence
  Synthetic
cuggaauuauuuuuauua

SEQ ID NO: 90519 - RNA, 19 nt, Artificial Sequence
  Synthetic
ucuggaauuauuuuuauua

SEQ ID NO: 90520 - RNA, 20 nt, Artificial Sequence
  Synthetic
cucuggaauuauuuuuauua

SEQ ID NO: 90521 - RNA, 21 nt, Artificial Sequence
  Synthetic
ucucuggaauuauuuuuauua

SEQ ID NO: 90522 - RNA, 22 nt, Artificial Sequence
  Synthetic
aucucuggaauuauuuuuauua

SEQ ID NO: 90523 - RNA, 23 nt, Artificial Sequence
  Synthetic
uaucucuggaauuauuuuuauua

SEQ ID NO: 90524 - RNA, 24 nt, Artificial Sequence
  Synthetic
auaucucuggaauuauuuuuauua

SEQ ID NO: 90525 - RNA, 18 nt, Artificial Sequence
  Synthetic
augaugaauaaaaacuua

SEQ ID NO: 90526 - RNA, 19 nt, Artificial Sequence
  Synthetic
caugaugaauaaaaacuua

SEQ ID NO: 90527 - RNA, 20 nt, Artificial Sequence
  Synthetic
acaugaugaauaaaaacuua

SEQ ID NO: 90528 - RNA, 22 nt, Artificial Sequence
  Synthetic
ugacaugaugaauaaaaacuua

SEQ ID NO: 90529 - RNA, 23 nt, Artificial Sequence
  Synthetic
cugacaugaugaauaaaaacuua

SEQ ID NO: 90530 - RNA, 24 nt, Artificial Sequence
  Synthetic
ccugacaugaugaauaaaaacuua

SEQ ID NO: 90531 - RNA, 18 nt, Artificial Sequence
  Synthetic
aguuaacaauaaaacuua

SEQ ID NO: 90532 - RNA, 19 nt, Artificial Sequence
  Synthetic
aaguuaacaauaaaacuua

SEQ ID NO: 90533 - RNA, 21 nt, Artificial Sequence
  Synthetic
agaaguuaacaauaaaacuua

SEQ ID NO: 90534 - RNA, 22 nt, Artificial Sequence
  Synthetic
aagaaguuaacaauaaaacuua

SEQ ID NO: 90535 - RNA, 23 nt, Artificial Sequence
  Synthetic
aaagaaguuaacaauaaaacuua

SEQ ID NO: 90536 - RNA, 18 nt, Artificial Sequence
  Synthetic
aaccagacaggaaacuua

SEQ ID NO: 90537 - RNA, 19 nt, Artificial Sequence
  Synthetic
aaaccagacaggaaacuua

SEQ ID NO: 90538 - RNA, 20 nt, Artificial Sequence
  Synthetic
aaaaccagacaggaaacuua

SEQ ID NO: 90539 - RNA, 21 nt, Artificial Sequence
  Synthetic
caaaaccagacaggaaacuua

SEQ ID NO: 90540 - RNA, 23 nt, Artificial Sequence
  Synthetic
agcaaaaccagacaggaaacuua

SEQ ID NO: 90541 - RNA, 24 nt, Artificial Sequence
  Synthetic
aagcaaaaccagacaggaaacuua

SEQ ID NO: 90542 - RNA, 18 nt, Artificial Sequence
  Synthetic
auggcagagugaaacuua

SEQ ID NO: 90543 - RNA, 19 nt, Artificial Sequence
  Synthetic
cauggcagagugaaacuua

SEQ ID NO: 90544 - RNA, 20 nt, Artificial Sequence
  Synthetic
ccauggcagagugaaacuua

SEQ ID NO: 90545 - RNA, 21 nt, Artificial Sequence
  Synthetic
cccauggcagagugaaacuua

SEQ ID NO: 90546 - RNA, 22 nt, Artificial Sequence
  Synthetic
ucccauggcagagugaaacuua

SEQ ID NO: 90547 - RNA, 23 nt, Artificial Sequence
  Synthetic
cucccauggcagagugaaacuua

SEQ ID NO: 90548 - RNA, 24 nt, Artificial Sequence
  Synthetic
ucucccauggcagagugaaacuua

SEQ ID NO: 90549 - RNA, 18 nt, Artificial Sequence
  Synthetic
uuuucuacccuaaacuua

SEQ ID NO: 90550 - RNA, 19 nt, Artificial Sequence
  Synthetic
uuuuucuacccuaaacuua

SEQ ID NO: 90551 - RNA, 20 nt, Artificial Sequence
  Synthetic
uuuuuucuacccuaaacuua

SEQ ID NO: 90552 - RNA, 21 nt, Artificial Sequence
  Synthetic
uuuuuuucuacccuaaacuua

SEQ ID NO: 90553 - RNA, 22 nt, Artificial Sequence
  Synthetic
auuuuuuucuacccuaaacuua

SEQ ID NO: 90554 - RNA, 23 nt, Artificial Sequence
  Synthetic
aauuuuuuucuacccuaaacuua

SEQ ID NO: 90555 - RNA, 24 nt, Artificial Sequence
  Synthetic
uaauuuuuuucuacccuaaacuua

SEQ ID NO: 90556 - RNA, 18 nt, Artificial Sequence
  Synthetic
uauaccacacggaacuua

SEQ ID NO: 90557 - RNA, 19 nt, Artificial Sequence
  Synthetic
uuauaccacacggaacuua

SEQ ID NO: 90558 - RNA, 20 nt, Artificial Sequence
  Synthetic
auuauaccacacggaacuua

SEQ ID NO: 90559 - RNA, 21 nt, Artificial Sequence
  Synthetic
uauuauaccacacggaacuua

SEQ ID NO: 90560 - RNA, 22 nt, Artificial Sequence
  Synthetic
cuauuauaccacacggaacuua

SEQ ID NO: 90561 - RNA, 24 nt, Artificial Sequence
  Synthetic
agcuauuauaccacacggaacuua

SEQ ID NO: 90562 - RNA, 18 nt, Artificial Sequence
  Synthetic
aagguacagaugaacuua

SEQ ID NO: 90563 - RNA, 19 nt, Artificial Sequence
  Synthetic
caagguacagaugaacuua

SEQ ID NO: 90564 - RNA, 20 nt, Artificial Sequence
  Synthetic
acaagguacagaugaacuua

SEQ ID NO: 90565 - RNA, 21 nt, Artificial Sequence
  Synthetic
uacaagguacagaugaacuua

SEQ ID NO: 90566 - RNA, 24 nt, Artificial Sequence
  Synthetic
ugguacaagguacagaugaacuua

SEQ ID NO: 90567 - RNA, 18 nt, Artificial Sequence
  Synthetic
aacaugaacuguaacuua

SEQ ID NO: 90568 - RNA, 19 nt, Artificial Sequence
  Synthetic
caacaugaacuguaacuua

SEQ ID NO: 90569 - RNA, 21 nt, Artificial Sequence
  Synthetic
agcaacaugaacuguaacuua

SEQ ID NO: 90570 - RNA, 22 nt, Artificial Sequence
  Synthetic
cagcaacaugaacuguaacuua

SEQ ID NO: 90571 - RNA, 23 nt, Artificial Sequence
  Synthetic
acagcaacaugaacuguaacuua

SEQ ID NO: 90572 - RNA, 24 nt, Artificial Sequence
  Synthetic
aacagcaacaugaacuguaacuua

SEQ ID NO: 90573 - RNA, 18 nt, Artificial Sequence
  Synthetic
auuagguggguuaacuua

SEQ ID NO: 90574 - RNA, 20 nt, Artificial Sequence
  Synthetic
ugauuagguggguuaacuua

SEQ ID NO: 90575 - RNA, 21 nt, Artificial Sequence
  Synthetic
augauuagguggguuaacuua

SEQ ID NO: 90576 - RNA, 22 nt, Artificial Sequence
  Synthetic
uaugauuagguggguuaacuua

SEQ ID NO: 90577 - RNA, 23 nt, Artificial Sequence
  Synthetic
auaugauuagguggguuaacuua

SEQ ID NO: 90578 - RNA, 24 nt, Artificial Sequence
  Synthetic
aauaugauuagguggguuaacuua

SEQ ID NO: 90579 - RNA, 18 nt, Artificial Sequence
  Synthetic
cuaucuuacaaacacuua

SEQ ID NO: 90580 - RNA, 19 nt, Artificial Sequence
  Synthetic
ucuaucuuacaaacacuua

SEQ ID NO: 90581 - RNA, 20 nt, Artificial Sequence
  Synthetic
aucuaucuuacaaacacuua

SEQ ID NO: 90582 - RNA, 21 nt, Artificial Sequence
  Synthetic
uaucuaucuuacaaacacuua

SEQ ID NO: 90583 - RNA, 22 nt, Artificial Sequence
  Synthetic
cuaucuaucuuacaaacacuua

SEQ ID NO: 90584 - RNA, 24 nt, Artificial Sequence
  Synthetic
ugcuaucuaucuuacaaacacuua

SEQ ID NO: 90585 - RNA, 19 nt, Artificial Sequence
  Synthetic
ugacuuuugcuaacacuua

SEQ ID NO: 90586 - RNA, 21 nt, Artificial Sequence
  Synthetic
agugacuuuugcuaacacuua

SEQ ID NO: 90587 - RNA, 22 nt, Artificial Sequence
  Synthetic
uagugacuuuugcuaacacuua

SEQ ID NO: 90588 - RNA, 23 nt, Artificial Sequence
  Synthetic
auagugacuuuugcuaacacuua

SEQ ID NO: 90589 - RNA, 18 nt, Artificial Sequence
  Synthetic
acaccauguaaccacuua

SEQ ID NO: 90590 - RNA, 19 nt, Artificial Sequence
  Synthetic
uacaccauguaaccacuua

SEQ ID NO: 90591 - RNA, 20 nt, Artificial Sequence
  Synthetic
cuacaccauguaaccacuua

SEQ ID NO: 90592 - RNA, 22 nt, Artificial Sequence
  Synthetic
agcuacaccauguaaccacuua

SEQ ID NO: 90593 - RNA, 24 nt, Artificial Sequence
  Synthetic
ugagcuacaccauguaaccacuua

SEQ ID NO: 90594 - RNA, 18 nt, Artificial Sequence
  Synthetic
uuccuagucucccacuua

SEQ ID NO: 90595 - RNA, 19 nt, Artificial Sequence
  Synthetic
uuuccuagucucccacuua

SEQ ID NO: 90596 - RNA, 20 nt, Artificial Sequence
  Synthetic
uuuuccuagucucccacuua

SEQ ID NO: 90597 - RNA, 21 nt, Artificial Sequence
  Synthetic
uuuuuccuagucucccacuua

SEQ ID NO: 90598 - RNA, 22 nt, Artificial Sequence
  Synthetic
auuuuuccuagucucccacuua

SEQ ID NO: 90599 - RNA, 24 nt, Artificial Sequence
  Synthetic
ugauuuuuccuagucucccacuua

SEQ ID NO: 90600 - RNA, 18 nt, Artificial Sequence
  Synthetic
cacgauagacuccacuua

SEQ ID NO: 90601 - RNA, 19 nt, Artificial Sequence
  Synthetic
ucacgauagacuccacuua

SEQ ID NO: 90602 - RNA, 20 nt, Artificial Sequence
  Synthetic
uucacgauagacuccacuua

SEQ ID NO: 90603 - RNA, 21 nt, Artificial Sequence
  Synthetic
uuucacgauagacuccacuua

SEQ ID NO: 90604 - RNA, 22 nt, Artificial Sequence
  Synthetic
cuuucacgauagacuccacuua

SEQ ID NO: 90605 - RNA, 24 nt, Artificial Sequence
  Synthetic
ugcuuucacgauagacuccacuua

SEQ ID NO: 90606 - RNA, 18 nt, Artificial Sequence
  Synthetic
cuuuuguguaugcacuua

SEQ ID NO: 90607 - RNA, 19 nt, Artificial Sequence
  Synthetic
ccuuuuguguaugcacuua

SEQ ID NO: 90608 - RNA, 20 nt, Artificial Sequence
  Synthetic
uccuuuuguguaugcacuua

SEQ ID NO: 90609 - RNA, 21 nt, Artificial Sequence
  Synthetic
uuccuuuuguguaugcacuua

SEQ ID NO: 90610 - RNA, 22 nt, Artificial Sequence
  Synthetic
uuuccuuuuguguaugcacuua

SEQ ID NO: 90611 - RNA, 23 nt, Artificial Sequence
  Synthetic
cuuuccuuuuguguaugcacuua

SEQ ID NO: 90612 - RNA, 24 nt, Artificial Sequence
  Synthetic
acuuuccuuuuguguaugcacuua

SEQ ID NO: 90613 - RNA, 18 nt, Artificial Sequence
  Synthetic
agguagaagaaauacuua

SEQ ID NO: 90614 - RNA, 19 nt, Artificial Sequence
  Synthetic
aagguagaagaaauacuua

SEQ ID NO: 90615 - RNA, 20 nt, Artificial Sequence
  Synthetic
caagguagaagaaauacuua

SEQ ID NO: 90616 - RNA, 21 nt, Artificial Sequence
  Synthetic
ucaagguagaagaaauacuua

SEQ ID NO: 90617 - RNA, 22 nt, Artificial Sequence
  Synthetic
aucaagguagaagaaauacuua

SEQ ID NO: 90618 - RNA, 23 nt, Artificial Sequence
  Synthetic
uaucaagguagaagaaauacuua

SEQ ID NO: 90619 - RNA, 24 nt, Artificial Sequence
  Synthetic
uuaucaagguagaagaaauacuua

SEQ ID NO: 90620 - RNA, 21 nt, Artificial Sequence
  Synthetic
aaaaauauuaaagaauacuua

SEQ ID NO: 90621 - RNA, 22 nt, Artificial Sequence
  Synthetic
caaaaauauuaaagaauacuua

SEQ ID NO: 90622 - RNA, 24 nt, Artificial Sequence
  Synthetic
ugcaaaaauauuaaagaauacuua

SEQ ID NO: 90623 - RNA, 18 nt, Artificial Sequence
  Synthetic
caccucuaccgcuacuua

SEQ ID NO: 90624 - RNA, 19 nt, Artificial Sequence
  Synthetic
ccaccucuaccgcuacuua

SEQ ID NO: 90625 - RNA, 20 nt, Artificial Sequence
  Synthetic
accaccucuaccgcuacuua

SEQ ID NO: 90626 - RNA, 21 nt, Artificial Sequence
  Synthetic
uaccaccucuaccgcuacuua

SEQ ID NO: 90627 - RNA, 22 nt, Artificial Sequence
  Synthetic
auaccaccucuaccgcuacuua

SEQ ID NO: 90628 - RNA, 23 nt, Artificial Sequence
  Synthetic
aauaccaccucuaccgcuacuua

SEQ ID NO: 90629 - RNA, 24 nt, Artificial Sequence
  Synthetic
uaauaccaccucuaccgcuacuua

SEQ ID NO: 90630 - RNA, 18 nt, Artificial Sequence
  Synthetic
uuacaccagugcuacuua

SEQ ID NO: 90631 - RNA, 19 nt, Artificial Sequence
  Synthetic
cuuacaccagugcuacuua

SEQ ID NO: 90632 - RNA, 22 nt, Artificial Sequence
  Synthetic
uggcuuacaccagugcuacuua

SEQ ID NO: 90633 - RNA, 24 nt, Artificial Sequence
  Synthetic
aguggcuuacaccagugcuacuua

SEQ ID NO: 90634 - RNA, 18 nt, Artificial Sequence
  Synthetic
uugcuuuaauuguacuua

SEQ ID NO: 90635 - RNA, 19 nt, Artificial Sequence
  Synthetic
cuugcuuuaauuguacuua

SEQ ID NO: 90636 - RNA, 20 nt, Artificial Sequence
  Synthetic
ccuugcuuuaauuguacuua

SEQ ID NO: 90637 - RNA, 21 nt, Artificial Sequence
  Synthetic
uccuugcuuuaauuguacuua

SEQ ID NO: 90638 - RNA, 22 nt, Artificial Sequence
  Synthetic
auccuugcuuuaauuguacuua

SEQ ID NO: 90639 - RNA, 24 nt, Artificial Sequence
  Synthetic
ugauccuugcuuuaauuguacuua

SEQ ID NO: 90640 - RNA, 21 nt, Artificial Sequence
  Synthetic
augagagugagaaauuacuua

SEQ ID NO: 90641 - RNA, 22 nt, Artificial Sequence
  Synthetic
uaugagagugagaaauuacuua

SEQ ID NO: 90642 - RNA, 23 nt, Artificial Sequence
  Synthetic
uuaugagagugagaaauuacuua

SEQ ID NO: 90643 - RNA, 24 nt, Artificial Sequence
  Synthetic
uuuaugagagugagaaauuacuua

SEQ ID NO: 90644 - RNA, 19 nt, Artificial Sequence
  Synthetic
ugaguuaagaaguuacuua

SEQ ID NO: 90645 - RNA, 20 nt, Artificial Sequence
  Synthetic
augaguuaagaaguuacuua

SEQ ID NO: 90646 - RNA, 21 nt, Artificial Sequence
  Synthetic
aaugaguuaagaaguuacuua

SEQ ID NO: 90647 - RNA, 22 nt, Artificial Sequence
  Synthetic
caaugaguuaagaaguuacuua

SEQ ID NO: 90648 - RNA, 23 nt, Artificial Sequence
  Synthetic
ccaaugaguuaagaaguuacuua

SEQ ID NO: 90649 - RNA, 18 nt, Artificial Sequence
  Synthetic
uuggcaauaauuuacuua

SEQ ID NO: 90650 - RNA, 19 nt, Artificial Sequence
  Synthetic
auuggcaauaauuuacuua

SEQ ID NO: 90651 - RNA, 20 nt, Artificial Sequence
  Synthetic
cauuggcaauaauuuacuua

SEQ ID NO: 90652 - RNA, 21 nt, Artificial Sequence
  Synthetic
ucauuggcaauaauuuacuua

SEQ ID NO: 90653 - RNA, 22 nt, Artificial Sequence
  Synthetic
cucauuggcaauaauuuacuua

SEQ ID NO: 90654 - RNA, 24 nt, Artificial Sequence
  Synthetic
agcucauuggcaauaauuuacuua

SEQ ID NO: 90655 - RNA, 18 nt, Artificial Sequence
  Synthetic
aaaaucuaguuuuacuua

SEQ ID NO: 90656 - RNA, 18 nt, Artificial Sequence
  Synthetic
aaaccucaacgguccuua

SEQ ID NO: 90657 - RNA, 20 nt, Artificial Sequence
  Synthetic
agaaaccucaacgguccuua

SEQ ID NO: 90658 - RNA, 21 nt, Artificial Sequence
  Synthetic
aagaaaccucaacgguccuua

SEQ ID NO: 90659 - RNA, 22 nt, Artificial Sequence
  Synthetic
caagaaaccucaacgguccuua

SEQ ID NO: 90660 - RNA, 23 nt, Artificial Sequence
  Synthetic
ccaagaaaccucaacgguccuua

SEQ ID NO: 90661 - RNA, 24 nt, Artificial Sequence
  Synthetic
uccaagaaaccucaacgguccuua

SEQ ID NO: 90662 - RNA, 18 nt, Artificial Sequence
  Synthetic
uaauugacuuuguccuua

SEQ ID NO: 90663 - RNA, 19 nt, Artificial Sequence
  Synthetic
uuaauugacuuuguccuua

SEQ ID NO: 90664 - RNA, 20 nt, Artificial Sequence
  Synthetic
uuuaauugacuuuguccuua

SEQ ID NO: 90665 - RNA, 21 nt, Artificial Sequence
  Synthetic
uuuuaauugacuuuguccuua

SEQ ID NO: 90666 - RNA, 22 nt, Artificial Sequence
  Synthetic
uuuuuaauugacuuuguccuua

SEQ ID NO: 90667 - RNA, 23 nt, Artificial Sequence
  Synthetic
uuuuuuaauugacuuuguccuua

SEQ ID NO: 90668 - RNA, 24 nt, Artificial Sequence
  Synthetic
auuuuuuaauugacuuuguccuua

SEQ ID NO: 90669 - RNA, 18 nt, Artificial Sequence
  Synthetic
accaugaagccuuccuua

SEQ ID NO: 90670 - RNA, 19 nt, Artificial Sequence
  Synthetic
aaccaugaagccuuccuua

SEQ ID NO: 90671 - RNA, 21 nt, Artificial Sequence
  Synthetic
agaaccaugaagccuuccuua

SEQ ID NO: 90672 - RNA, 23 nt, Artificial Sequence
  Synthetic
ugagaaccaugaagccuuccuua

SEQ ID NO: 90673 - RNA, 24 nt, Artificial Sequence
  Synthetic
augagaaccaugaagccuuccuua

SEQ ID NO: 90674 - RNA, 18 nt, Artificial Sequence
  Synthetic
ucauuaaguauaagcuua

SEQ ID NO: 90675 - RNA, 19 nt, Artificial Sequence
  Synthetic
cucauuaaguauaagcuua

SEQ ID NO: 90676 - RNA, 20 nt, Artificial Sequence
  Synthetic
acucauuaaguauaagcuua

SEQ ID NO: 90677 - RNA, 21 nt, Artificial Sequence
  Synthetic
cacucauuaaguauaagcuua

SEQ ID NO: 90678 - RNA, 22 nt, Artificial Sequence
  Synthetic
acacucauuaaguauaagcuua

SEQ ID NO: 90679 - RNA, 24 nt, Artificial Sequence
  Synthetic
agacacucauuaaguauaagcuua

SEQ ID NO: 90680 - RNA, 19 nt, Artificial Sequence
  Synthetic
aguccuaaaccagggcuua

SEQ ID NO: 90681 - RNA, 20 nt, Artificial Sequence
  Synthetic
uaguccuaaaccagggcuua

SEQ ID NO: 90682 - RNA, 21 nt, Artificial Sequence
  Synthetic
auaguccuaaaccagggcuua

SEQ ID NO: 90683 - RNA, 22 nt, Artificial Sequence
  Synthetic
cauaguccuaaaccagggcuua

SEQ ID NO: 90684 - RNA, 23 nt, Artificial Sequence
  Synthetic
ucauaguccuaaaccagggcuua

SEQ ID NO: 90685 - RNA, 24 nt, Artificial Sequence
  Synthetic
aucauaguccuaaaccagggcuua

SEQ ID NO: 90686 - RNA, 18 nt, Artificial Sequence
  Synthetic
acacucacuaauggcuua

SEQ ID NO: 90687 - RNA, 19 nt, Artificial Sequence
  Synthetic
aacacucacuaauggcuua

SEQ ID NO: 90688 - RNA, 20 nt, Artificial Sequence
  Synthetic
aaacacucacuaauggcuua

SEQ ID NO: 90689 - RNA, 24 nt, Artificial Sequence
  Synthetic
ugggaaacacucacuaauggcuua

SEQ ID NO: 90690 - RNA, 18 nt, Artificial Sequence
  Synthetic
aguauguugccuggcuua

SEQ ID NO: 90691 - RNA, 19 nt, Artificial Sequence
  Synthetic
caguauguugccuggcuua

SEQ ID NO: 90692 - RNA, 20 nt, Artificial Sequence
  Synthetic
acaguauguugccuggcuua

SEQ ID NO: 90693 - RNA, 21 nt, Artificial Sequence
  Synthetic
cacaguauguugccuggcuua

SEQ ID NO: 90694 - RNA, 23 nt, Artificial Sequence
  Synthetic
ugcacaguauguugccuggcuua

SEQ ID NO: 90695 - RNA, 18 nt, Artificial Sequence
  Synthetic
acuugcuaguuaugcuua

SEQ ID NO: 90696 - RNA, 19 nt, Artificial Sequence
  Synthetic
cacuugcuaguuaugcuua

SEQ ID NO: 90697 - RNA, 20 nt, Artificial Sequence
  Synthetic
ucacuugcuaguuaugcuua

SEQ ID NO: 90698 - RNA, 21 nt, Artificial Sequence
  Synthetic
uucacuugcuaguuaugcuua

SEQ ID NO: 90699 - RNA, 22 nt, Artificial Sequence
  Synthetic
auucacuugcuaguuaugcuua

SEQ ID NO: 90700 - RNA, 23 nt, Artificial Sequence
  Synthetic
uauucacuugcuaguuaugcuua

SEQ ID NO: 90701 - RNA, 24 nt, Artificial Sequence
  Synthetic
uuauucacuugcuaguuaugcuua

SEQ ID NO: 90702 - RNA, 18 nt, Artificial Sequence
  Synthetic
agagacacgucaaucuua

SEQ ID NO: 90703 - RNA, 19 nt, Artificial Sequence
  Synthetic
cagagacacgucaaucuua

SEQ ID NO: 90704 - RNA, 20 nt, Artificial Sequence
  Synthetic
ccagagacacgucaaucuua

SEQ ID NO: 90705 - RNA, 21 nt, Artificial Sequence
  Synthetic
cccagagacacgucaaucuua

SEQ ID NO: 90706 - RNA, 22 nt, Artificial Sequence
  Synthetic
ucccagagacacgucaaucuua

SEQ ID NO: 90707 - RNA, 23 nt, Artificial Sequence
  Synthetic
cucccagagacacgucaaucuua

SEQ ID NO: 90708 - RNA, 24 nt, Artificial Sequence
  Synthetic
ucucccagagacacgucaaucuua

SEQ ID NO: 90709 - RNA, 18 nt, Artificial Sequence
  Synthetic
auaguccaacccaucuua

SEQ ID NO: 90710 - RNA, 19 nt, Artificial Sequence
  Synthetic
cauaguccaacccaucuua

SEQ ID NO: 90711 - RNA, 20 nt, Artificial Sequence
  Synthetic
ccauaguccaacccaucuua

SEQ ID NO: 90712 - RNA, 21 nt, Artificial Sequence
  Synthetic
uccauaguccaacccaucuua

SEQ ID NO: 90713 - RNA, 22 nt, Artificial Sequence
  Synthetic
auccauaguccaacccaucuua

SEQ ID NO: 90714 - RNA, 23 nt, Artificial Sequence
  Synthetic
uauccauaguccaacccaucuua

SEQ ID NO: 90715 - RNA, 24 nt, Artificial Sequence
  Synthetic
auauccauaguccaacccaucuua

SEQ ID NO: 90716 - RNA, 18 nt, Artificial Sequence
  Synthetic
uuguuucucagcaucuua

SEQ ID NO: 90717 - RNA, 19 nt, Artificial Sequence
  Synthetic
auuguuucucagcaucuua

SEQ ID NO: 90718 - RNA, 20 nt, Artificial Sequence
  Synthetic
cauuguuucucagcaucuua

SEQ ID NO: 90719 - RNA, 21 nt, Artificial Sequence
  Synthetic
ccauuguuucucagcaucuua

SEQ ID NO: 90720 - RNA, 22 nt, Artificial Sequence
  Synthetic
uccauuguuucucagcaucuua

SEQ ID NO: 90721 - RNA, 23 nt, Artificial Sequence
  Synthetic
uuccauuguuucucagcaucuua

SEQ ID NO: 90722 - RNA, 24 nt, Artificial Sequence
  Synthetic
cuuccauuguuucucagcaucuua

SEQ ID NO: 90723 - RNA, 18 nt, Artificial Sequence
  Synthetic
aucgaugaagguaucuua

SEQ ID NO: 90724 - RNA, 19 nt, Artificial Sequence
  Synthetic
uaucgaugaagguaucuua

SEQ ID NO: 90725 - RNA, 20 nt, Artificial Sequence
  Synthetic
uuaucgaugaagguaucuua

SEQ ID NO: 90726 - RNA, 21 nt, Artificial Sequence
  Synthetic
cuuaucgaugaagguaucuua

SEQ ID NO: 90727 - RNA, 22 nt, Artificial Sequence
  Synthetic
ccuuaucgaugaagguaucuua

SEQ ID NO: 90728 - RNA, 24 nt, Artificial Sequence
  Synthetic
ugccuuaucgaugaagguaucuua

SEQ ID NO: 90729 - RNA, 21 nt, Artificial Sequence
  Synthetic
uaaauuuaccacuuuaucuua

SEQ ID NO: 90730 - RNA, 22 nt, Artificial Sequence
  Synthetic
cuaaauuuaccacuuuaucuua

SEQ ID NO: 90731 - RNA, 23 nt, Artificial Sequence
  Synthetic
ccuaaauuuaccacuuuaucuua

SEQ ID NO: 90732 - RNA, 19 nt, Artificial Sequence
  Synthetic
aguugguauuuggcucuua

SEQ ID NO: 90733 - RNA, 20 nt, Artificial Sequence
  Synthetic
uaguugguauuuggcucuua

SEQ ID NO: 90734 - RNA, 22 nt, Artificial Sequence
  Synthetic
uguaguugguauuuggcucuua

SEQ ID NO: 90735 - RNA, 23 nt, Artificial Sequence
  Synthetic
cuguaguugguauuuggcucuua

SEQ ID NO: 90736 - RNA, 24 nt, Artificial Sequence
  Synthetic
acuguaguugguauuuggcucuua

SEQ ID NO: 90737 - RNA, 18 nt, Artificial Sequence
  Synthetic
aacuucuaauugcucuua

SEQ ID NO: 90738 - RNA, 19 nt, Artificial Sequence
  Synthetic
aaacuucuaauugcucuua

SEQ ID NO: 90739 - RNA, 20 nt, Artificial Sequence
  Synthetic
uaaacuucuaauugcucuua

SEQ ID NO: 90740 - RNA, 21 nt, Artificial Sequence
  Synthetic
auaaacuucuaauugcucuua

SEQ ID NO: 90741 - RNA, 22 nt, Artificial Sequence
  Synthetic
cauaaacuucuaauugcucuua

SEQ ID NO: 90742 - RNA, 23 nt, Artificial Sequence
  Synthetic
ucauaaacuucuaauugcucuua

SEQ ID NO: 90743 - RNA, 24 nt, Artificial Sequence
  Synthetic
aucauaaacuucuaauugcucuua

SEQ ID NO: 90744 - RNA, 18 nt, Artificial Sequence
  Synthetic
ccccaaccucuucucuua

SEQ ID NO: 90745 - RNA, 19 nt, Artificial Sequence
  Synthetic
accccaaccucuucucuua

SEQ ID NO: 90746 - RNA, 20 nt, Artificial Sequence
  Synthetic
uaccccaaccucuucucuua

SEQ ID NO: 90747 - RNA, 21 nt, Artificial Sequence
  Synthetic
cuaccccaaccucuucucuua

SEQ ID NO: 90748 - RNA, 22 nt, Artificial Sequence
  Synthetic
ucuaccccaaccucuucucuua

SEQ ID NO: 90749 - RNA, 23 nt, Artificial Sequence
  Synthetic
cucuaccccaaccucuucucuua

SEQ ID NO: 90750 - RNA, 24 nt, Artificial Sequence
  Synthetic
ucucuaccccaaccucuucucuua

SEQ ID NO: 90751 - RNA, 18 nt, Artificial Sequence
  Synthetic
uuauauauauuucucuua

SEQ ID NO: 90752 - RNA, 19 nt, Artificial Sequence
  Synthetic
cuuauauauauuucucuua

SEQ ID NO: 90753 - RNA, 20 nt, Artificial Sequence
  Synthetic
ccuuauauauauuucucuua

SEQ ID NO: 90754 - RNA, 18 nt, Artificial Sequence
  Synthetic
cucugaggguuucucuua

SEQ ID NO: 90755 - RNA, 20 nt, Artificial Sequence
  Synthetic
agcucugaggguuucucuua

SEQ ID NO: 90756 - RNA, 21 nt, Artificial Sequence
  Synthetic
uagcucugaggguuucucuua

SEQ ID NO: 90757 - RNA, 22 nt, Artificial Sequence
  Synthetic
auagcucugaggguuucucuua

SEQ ID NO: 90758 - RNA, 23 nt, Artificial Sequence
  Synthetic
aauagcucugaggguuucucuua

SEQ ID NO: 90759 - RNA, 24 nt, Artificial Sequence
  Synthetic
uaauagcucugaggguuucucuua

SEQ ID NO: 90760 - RNA, 18 nt, Artificial Sequence
  Synthetic
caguuaagaugagucuua

SEQ ID NO: 90761 - RNA, 20 nt, Artificial Sequence
  Synthetic
agcaguuaagaugagucuua

SEQ ID NO: 90762 - RNA, 21 nt, Artificial Sequence
  Synthetic
uagcaguuaagaugagucuua

SEQ ID NO: 90763 - RNA, 22 nt, Artificial Sequence
  Synthetic
auagcaguuaagaugagucuua

SEQ ID NO: 90764 - RNA, 23 nt, Artificial Sequence
  Synthetic
aauagcaguuaagaugagucuua

SEQ ID NO: 90765 - RNA, 24 nt, Artificial Sequence
  Synthetic
uaauagcaguuaagaugagucuua

SEQ ID NO: 90766 - RNA, 19 nt, Artificial Sequence
  Synthetic
aguuguaguaacugucuua

SEQ ID NO: 90767 - RNA, 21 nt, Artificial Sequence
  Synthetic
agaguuguaguaacugucuua

SEQ ID NO: 90768 - RNA, 22 nt, Artificial Sequence
  Synthetic
aagaguuguaguaacugucuua

SEQ ID NO: 90769 - RNA, 23 nt, Artificial Sequence
  Synthetic
aaagaguuguaguaacugucuua

SEQ ID NO: 90770 - RNA, 24 nt, Artificial Sequence
  Synthetic
caaagaguuguaguaacugucuua

SEQ ID NO: 90771 - RNA, 18 nt, Artificial Sequence
  Synthetic
aaaauucagaaauucuua

SEQ ID NO: 90772 - RNA, 19 nt, Artificial Sequence
  Synthetic
uaaaauucagaaauucuua

SEQ ID NO: 90773 - RNA, 21 nt, Artificial Sequence
  Synthetic
uguaaaauucagaaauucuua

SEQ ID NO: 90774 - RNA, 22 nt, Artificial Sequence
  Synthetic
cuguaaaauucagaaauucuua

SEQ ID NO: 90775 - RNA, 23 nt, Artificial Sequence
  Synthetic
ccuguaaaauucagaaauucuua

SEQ ID NO: 90776 - RNA, 24 nt, Artificial Sequence
  Synthetic
cccuguaaaauucagaaauucuua

SEQ ID NO: 90777 - RNA, 18 nt, Artificial Sequence
  Synthetic
acuuugaauucauucuua

SEQ ID NO: 90778 - RNA, 20 nt, Artificial Sequence
  Synthetic
ugacuuugaauucauucuua

SEQ ID NO: 90779 - RNA, 21 nt, Artificial Sequence
  Synthetic
augacuuugaauucauucuua

SEQ ID NO: 90780 - RNA, 22 nt, Artificial Sequence
  Synthetic
aaugacuuugaauucauucuua

SEQ ID NO: 90781 - RNA, 23 nt, Artificial Sequence
  Synthetic
caaugacuuugaauucauucuua

SEQ ID NO: 90782 - RNA, 19 nt, Artificial Sequence
  Synthetic
agucuuuuucagauucuua

SEQ ID NO: 90783 - RNA, 21 nt, Artificial Sequence
  Synthetic
ugagucuuuuucagauucuua

SEQ ID NO: 90784 - RNA, 22 nt, Artificial Sequence
  Synthetic
augagucuuuuucagauucuua

SEQ ID NO: 90785 - RNA, 23 nt, Artificial Sequence
  Synthetic
caugagucuuuuucagauucuua

SEQ ID NO: 90786 - RNA, 24 nt, Artificial Sequence
  Synthetic
acaugagucuuuuucagauucuua

SEQ ID NO: 90787 - RNA, 19 nt, Artificial Sequence
  Synthetic
ugguugaaguggguucuua

SEQ ID NO: 90788 - RNA, 21 nt, Artificial Sequence
  Synthetic
agugguugaaguggguucuua

SEQ ID NO: 90789 - RNA, 22 nt, Artificial Sequence
  Synthetic
cagugguugaaguggguucuua

SEQ ID NO: 90790 - RNA, 18 nt, Artificial Sequence
  Synthetic
aucaaagggaauuucuua

SEQ ID NO: 90791 - RNA, 19 nt, Artificial Sequence
  Synthetic
caucaaagggaauuucuua

SEQ ID NO: 90792 - RNA, 20 nt, Artificial Sequence
  Synthetic
ccaucaaagggaauuucuua

SEQ ID NO: 90793 - RNA, 21 nt, Artificial Sequence
  Synthetic
accaucaaagggaauuucuua

SEQ ID NO: 90794 - RNA, 22 nt, Artificial Sequence
  Synthetic
aaccaucaaagggaauuucuua

SEQ ID NO: 90795 - RNA, 23 nt, Artificial Sequence
  Synthetic
uaaccaucaaagggaauuucuua

SEQ ID NO: 90796 - RNA, 24 nt, Artificial Sequence
  Synthetic
auaaccaucaaagggaauuucuua

SEQ ID NO: 90797 - RNA, 19 nt, Artificial Sequence
  Synthetic
agagauggacgauuucuua

SEQ ID NO: 90798 - RNA, 20 nt, Artificial Sequence
  Synthetic
aagagauggacgauuucuua

SEQ ID NO: 90799 - RNA, 21 nt, Artificial Sequence
  Synthetic
aaagagauggacgauuucuua

SEQ ID NO: 90800 - RNA, 22 nt, Artificial Sequence
  Synthetic
aaaagagauggacgauuucuua

SEQ ID NO: 90801 - RNA, 23 nt, Artificial Sequence
  Synthetic
caaaagagauggacgauuucuua

SEQ ID NO: 90802 - RNA, 24 nt, Artificial Sequence
  Synthetic
ccaaaagagauggacgauuucuua

SEQ ID NO: 90803 - RNA, 19 nt, Artificial Sequence
  Synthetic
cggagaugguaguuucuua

SEQ ID NO: 90804 - RNA, 20 nt, Artificial Sequence
  Synthetic
ccggagaugguaguuucuua

SEQ ID NO: 90805 - RNA, 21 nt, Artificial Sequence
  Synthetic
cccggagaugguaguuucuua

SEQ ID NO: 90806 - RNA, 22 nt, Artificial Sequence
  Synthetic
ccccggagaugguaguuucuua

SEQ ID NO: 90807 - RNA, 23 nt, Artificial Sequence
  Synthetic
accccggagaugguaguuucuua

SEQ ID NO: 90808 - RNA, 24 nt, Artificial Sequence
  Synthetic
uaccccggagaugguaguuucuua

SEQ ID NO: 90809 - RNA, 18 nt, Artificial Sequence
  Synthetic
uuacaauuucuuuucuua

SEQ ID NO: 90810 - RNA, 19 nt, Artificial Sequence
  Synthetic
auuacaauuucuuuucuua

SEQ ID NO: 90811 - RNA, 20 nt, Artificial Sequence
  Synthetic
cauuacaauuucuuuucuua

SEQ ID NO: 90812 - RNA, 23 nt, Artificial Sequence
  Synthetic
aggcauuacaauuucuuuucuua

SEQ ID NO: 90813 - RNA, 24 nt, Artificial Sequence
  Synthetic
uaggcauuacaauuucuuuucuua

SEQ ID NO: 90814 - RNA, 18 nt, Artificial Sequence
  Synthetic
uguagcuaguuuuucuua

SEQ ID NO: 90815 - RNA, 20 nt, Artificial Sequence
  Synthetic
uguguagcuaguuuuucuua

SEQ ID NO: 90816 - RNA, 21 nt, Artificial Sequence
  Synthetic
uuguguagcuaguuuuucuua

SEQ ID NO: 90817 - RNA, 22 nt, Artificial Sequence
  Synthetic
uuuguguagcuaguuuuucuua

SEQ ID NO: 90818 - RNA, 23 nt, Artificial Sequence
  Synthetic
uuuuguguagcuaguuuuucuua

SEQ ID NO: 90819 - RNA, 18 nt, Artificial Sequence
  Synthetic
aaacgcacuagaaaguua

SEQ ID NO: 90820 - RNA, 19 nt, Artificial Sequence
  Synthetic
caaacgcacuagaaaguua

SEQ ID NO: 90821 - RNA, 20 nt, Artificial Sequence
  Synthetic
ucaaacgcacuagaaaguua

SEQ ID NO: 90822 - RNA, 21 nt, Artificial Sequence
  Synthetic
aucaaacgcacuagaaaguua

SEQ ID NO: 90823 - RNA, 22 nt, Artificial Sequence
  Synthetic
uaucaaacgcacuagaaaguua

SEQ ID NO: 90824 - RNA, 23 nt, Artificial Sequence
  Synthetic
auaucaaacgcacuagaaaguua

SEQ ID NO: 90825 - RNA, 24 nt, Artificial Sequence
  Synthetic
cauaucaaacgcacuagaaaguua

SEQ ID NO: 90826 - RNA, 18 nt, Artificial Sequence
  Synthetic
uugcuuucaauaaaguua

SEQ ID NO: 90827 - RNA, 19 nt, Artificial Sequence
  Synthetic
uuugcuuucaauaaaguua

SEQ ID NO: 90828 - RNA, 20 nt, Artificial Sequence
  Synthetic
uuuugcuuucaauaaaguua

SEQ ID NO: 90829 - RNA, 21 nt, Artificial Sequence
  Synthetic
cuuuugcuuucaauaaaguua

SEQ ID NO: 90830 - RNA, 23 nt, Artificial Sequence
  Synthetic
ugcuuuugcuuucaauaaaguua

SEQ ID NO: 90831 - RNA, 24 nt, Artificial Sequence
  Synthetic
cugcuuuugcuuucaauaaaguua

SEQ ID NO: 90832 - RNA, 19 nt, Artificial Sequence
  Synthetic
ugcuuggaauaccaaguua

SEQ ID NO: 90833 - RNA, 20 nt, Artificial Sequence
  Synthetic
cugcuuggaauaccaaguua

SEQ ID NO: 90834 - RNA, 22 nt, Artificial Sequence
  Synthetic
ugcugcuuggaauaccaaguua

SEQ ID NO: 90835 - RNA, 23 nt, Artificial Sequence
  Synthetic
uugcugcuuggaauaccaaguua

SEQ ID NO: 90836 - RNA, 24 nt, Artificial Sequence
  Synthetic
uuugcugcuuggaauaccaaguua

SEQ ID NO: 90837 - RNA, 18 nt, Artificial Sequence
  Synthetic
acuuucacucccaaguua

SEQ ID NO: 90838 - RNA, 19 nt, Artificial Sequence
  Synthetic
aacuuucacucccaaguua

SEQ ID NO: 90839 - RNA, 20 nt, Artificial Sequence
  Synthetic
caacuuucacucccaaguua

SEQ ID NO: 90840 - RNA, 21 nt, Artificial Sequence
  Synthetic
ucaacuuucacucccaaguua

SEQ ID NO: 90841 - RNA, 22 nt, Artificial Sequence
  Synthetic
aucaacuuucacucccaaguua

SEQ ID NO: 90842 - RNA, 23 nt, Artificial Sequence
  Synthetic
aaucaacuuucacucccaaguua

SEQ ID NO: 90843 - RNA, 24 nt, Artificial Sequence
  Synthetic
aaaucaacuuucacucccaaguua

SEQ ID NO: 90844 - RNA, 18 nt, Artificial Sequence
  Synthetic
cugaucuuuaagaaguua

SEQ ID NO: 90845 - RNA, 19 nt, Artificial Sequence
  Synthetic
ccugaucuuuaagaaguua

SEQ ID NO: 90846 - RNA, 20 nt, Artificial Sequence
  Synthetic
accugaucuuuaagaaguua

SEQ ID NO: 90847 - RNA, 21 nt, Artificial Sequence
  Synthetic
aaccugaucuuuaagaaguua

SEQ ID NO: 90848 - RNA, 23 nt, Artificial Sequence
  Synthetic
agaaccugaucuuuaagaaguua

SEQ ID NO: 90849 - RNA, 24 nt, Artificial Sequence
  Synthetic
cagaaccugaucuuuaagaaguua

SEQ ID NO: 90850 - RNA, 18 nt, Artificial Sequence
  Synthetic
cacuccugagggaaguua

SEQ ID NO: 90851 - RNA, 19 nt, Artificial Sequence
  Synthetic
acacuccugagggaaguua

SEQ ID NO: 90852 - RNA, 21 nt, Artificial Sequence
  Synthetic
agacacuccugagggaaguua

SEQ ID NO: 90853 - RNA, 22 nt, Artificial Sequence
  Synthetic
uagacacuccugagggaaguua

SEQ ID NO: 90854 - RNA, 23 nt, Artificial Sequence
  Synthetic
auagacacuccugagggaaguua

SEQ ID NO: 90855 - RNA, 24 nt, Artificial Sequence
  Synthetic
aauagacacuccugagggaaguua

SEQ ID NO: 90856 - RNA, 18 nt, Artificial Sequence
  Synthetic
uauaauuggauuaaguua

SEQ ID NO: 90857 - RNA, 19 nt, Artificial Sequence
  Synthetic
uuauaauuggauuaaguua

SEQ ID NO: 90858 - RNA, 20 nt, Artificial Sequence
  Synthetic
auuauaauuggauuaaguua

SEQ ID NO: 90859 - RNA, 21 nt, Artificial Sequence
  Synthetic
uauuauaauuggauuaaguua

SEQ ID NO: 90860 - RNA, 23 nt, Artificial Sequence
  Synthetic
aguauuauaauuggauuaaguua

SEQ ID NO: 90861 - RNA, 24 nt, Artificial Sequence
  Synthetic
caguauuauaauuggauuaaguua

SEQ ID NO: 90862 - RNA, 18 nt, Artificial Sequence
  Synthetic
auguuucaaagucaguua

SEQ ID NO: 90863 - RNA, 19 nt, Artificial Sequence
  Synthetic
aauguuucaaagucaguua

SEQ ID NO: 90864 - RNA, 20 nt, Artificial Sequence
  Synthetic
aaauguuucaaagucaguua

SEQ ID NO: 90865 - RNA, 21 nt, Artificial Sequence
  Synthetic
caaauguuucaaagucaguua

SEQ ID NO: 90866 - RNA, 19 nt, Artificial Sequence
  Synthetic
agguaugcugcuucaguua

SEQ ID NO: 90867 - RNA, 21 nt, Artificial Sequence
  Synthetic
agagguaugcugcuucaguua

SEQ ID NO: 90868 - RNA, 23 nt, Artificial Sequence
  Synthetic
ugagagguaugcugcuucaguua

SEQ ID NO: 90869 - RNA, 24 nt, Artificial Sequence
  Synthetic
uugagagguaugcugcuucaguua

SEQ ID NO: 90870 - RNA, 18 nt, Artificial Sequence
  Synthetic
ucaauuuuauuucaguua

SEQ ID NO: 90871 - RNA, 19 nt, Artificial Sequence
  Synthetic
aucaauuuuauuucaguua

SEQ ID NO: 90872 - RNA, 20 nt, Artificial Sequence
  Synthetic
caucaauuuuauuucaguua

SEQ ID NO: 90873 - RNA, 18 nt, Artificial Sequence
  Synthetic
aauuaaugucaagaguua

SEQ ID NO: 90874 - RNA, 19 nt, Artificial Sequence
  Synthetic
uaauuaaugucaagaguua

SEQ ID NO: 90875 - RNA, 20 nt, Artificial Sequence
  Synthetic
uuaauuaaugucaagaguua

SEQ ID NO: 90876 - RNA, 21 nt, Artificial Sequence
  Synthetic
auuaauuaaugucaagaguua

SEQ ID NO: 90877 - RNA, 22 nt, Artificial Sequence
  Synthetic
aauuaauuaaugucaagaguua

SEQ ID NO: 90878 - RNA, 23 nt, Artificial Sequence
  Synthetic
uaauuaauuaaugucaagaguua

SEQ ID NO: 90879 - RNA, 24 nt, Artificial Sequence
  Synthetic
uuaauuaauuaaugucaagaguua

SEQ ID NO: 90880 - RNA, 18 nt, Artificial Sequence
  Synthetic
ucauuuggguucgaguua

SEQ ID NO: 90881 - RNA, 19 nt, Artificial Sequence
  Synthetic
uucauuuggguucgaguua

SEQ ID NO: 90882 - RNA, 20 nt, Artificial Sequence
  Synthetic
cuucauuuggguucgaguua

SEQ ID NO: 90883 - RNA, 21 nt, Artificial Sequence
  Synthetic
ucuucauuuggguucgaguua

SEQ ID NO: 90884 - RNA, 22 nt, Artificial Sequence
  Synthetic
cucuucauuuggguucgaguua

SEQ ID NO: 90885 - RNA, 23 nt, Artificial Sequence
  Synthetic
ucucuucauuuggguucgaguua

SEQ ID NO: 90886 - RNA, 24 nt, Artificial Sequence
  Synthetic
aucucuucauuuggguucgaguua

SEQ ID NO: 90887 - RNA, 18 nt, Artificial Sequence
  Synthetic
caaguagaugaggaguua

SEQ ID NO: 90888 - RNA, 19 nt, Artificial Sequence
  Synthetic
acaaguagaugaggaguua

SEQ ID NO: 90889 - RNA, 20 nt, Artificial Sequence
  Synthetic
aacaaguagaugaggaguua

SEQ ID NO: 90890 - RNA, 21 nt, Artificial Sequence
  Synthetic
aaacaaguagaugaggaguua

SEQ ID NO: 90891 - RNA, 22 nt, Artificial Sequence
  Synthetic
aaaacaaguagaugaggaguua

SEQ ID NO: 90892 - RNA, 24 nt, Artificial Sequence
  Synthetic
agaaaacaaguagaugaggaguua

SEQ ID NO: 90893 - RNA, 18 nt, Artificial Sequence
  Synthetic
agucuuacuuaggaguua

SEQ ID NO: 90894 - RNA, 19 nt, Artificial Sequence
  Synthetic
uagucuuacuuaggaguua

SEQ ID NO: 90895 - RNA, 20 nt, Artificial Sequence
  Synthetic
auagucuuacuuaggaguua

SEQ ID NO: 90896 - RNA, 22 nt, Artificial Sequence
  Synthetic
ugauagucuuacuuaggaguua

SEQ ID NO: 90897 - RNA, 23 nt, Artificial Sequence
  Synthetic
cugauagucuuacuuaggaguua

SEQ ID NO: 90898 - RNA, 24 nt, Artificial Sequence
  Synthetic
ucugauagucuuacuuaggaguua

SEQ ID NO: 90899 - RNA, 18 nt, Artificial Sequence
  Synthetic
aaucucuucauggaguua

SEQ ID NO: 90900 - RNA, 19 nt, Artificial Sequence
  Synthetic
uaaucucuucauggaguua

SEQ ID NO: 90901 - RNA, 20 nt, Artificial Sequence
  Synthetic
auaaucucuucauggaguua

SEQ ID NO: 90902 - RNA, 21 nt, Artificial Sequence
  Synthetic
cauaaucucuucauggaguua

SEQ ID NO: 90903 - RNA, 22 nt, Artificial Sequence
  Synthetic
acauaaucucuucauggaguua

SEQ ID NO: 90904 - RNA, 23 nt, Artificial Sequence
  Synthetic
aacauaaucucuucauggaguua

SEQ ID NO: 90905 - RNA, 20 nt, Artificial Sequence
  Synthetic
uggcccacaguuaugaguua

SEQ ID NO: 90906 - RNA, 22 nt, Artificial Sequence
  Synthetic
aguggcccacaguuaugaguua

SEQ ID NO: 90907 - RNA, 23 nt, Artificial Sequence
  Synthetic
aaguggcccacaguuaugaguua

SEQ ID NO: 90908 - RNA, 24 nt, Artificial Sequence
  Synthetic
uaaguggcccacaguuaugaguua

SEQ ID NO: 90909 - RNA, 18 nt, Artificial Sequence
  Synthetic
agugucacugcugaguua

SEQ ID NO: 90910 - RNA, 20 nt, Artificial Sequence
  Synthetic
ugagugucacugcugaguua

SEQ ID NO: 90911 - RNA, 21 nt, Artificial Sequence
  Synthetic
cugagugucacugcugaguua

SEQ ID NO: 90912 - RNA, 23 nt, Artificial Sequence
  Synthetic
agcugagugucacugcugaguua

SEQ ID NO: 90913 - RNA, 24 nt, Artificial Sequence
  Synthetic
aagcugagugucacugcugaguua

SEQ ID NO: 90914 - RNA, 23 nt, Artificial Sequence
  Synthetic
ugggggugguguagguauaguua

SEQ ID NO: 90915 - RNA, 18 nt, Artificial Sequence
  Synthetic
cgugacccauauucguua

SEQ ID NO: 90916 - RNA, 19 nt, Artificial Sequence
  Synthetic
acgugacccauauucguua

SEQ ID NO: 90917 - RNA, 20 nt, Artificial Sequence
  Synthetic
cacgugacccauauucguua

SEQ ID NO: 90918 - RNA, 21 nt, Artificial Sequence
  Synthetic
ccacgugacccauauucguua

SEQ ID NO: 90919 - RNA, 22 nt, Artificial Sequence
  Synthetic
cccacgugacccauauucguua

SEQ ID NO: 90920 - RNA, 23 nt, Artificial Sequence
  Synthetic
ucccacgugacccauauucguua

SEQ ID NO: 90921 - RNA, 20 nt, Artificial Sequence
  Synthetic
agggggcagcgggaugguua

SEQ ID NO: 90922 - RNA, 18 nt, Artificial Sequence
  Synthetic
uuucugagaaugugguua

SEQ ID NO: 90923 - RNA, 19 nt, Artificial Sequence
  Synthetic
uuuucugagaaugugguua

SEQ ID NO: 90924 - RNA, 20 nt, Artificial Sequence
  Synthetic
uuuuucugagaaugugguua

SEQ ID NO: 90925 - RNA, 21 nt, Artificial Sequence
  Synthetic
uuuuuucugagaaugugguua

SEQ ID NO: 90926 - RNA, 22 nt, Artificial Sequence
  Synthetic
uuuuuuucugagaaugugguua

SEQ ID NO: 90927 - RNA, 23 nt, Artificial Sequence
  Synthetic
uuuuuuuucugagaaugugguua

SEQ ID NO: 90928 - RNA, 18 nt, Artificial Sequence
  Synthetic
ucugcuggccugugguua

SEQ ID NO: 90929 - RNA, 19 nt, Artificial Sequence
  Synthetic
uucugcuggccugugguua

SEQ ID NO: 90930 - RNA, 20 nt, Artificial Sequence
  Synthetic
cuucugcuggccugugguua

SEQ ID NO: 90931 - RNA, 21 nt, Artificial Sequence
  Synthetic
ucuucugcuggccugugguua

SEQ ID NO: 90932 - RNA, 22 nt, Artificial Sequence
  Synthetic
uucuucugcuggccugugguua

SEQ ID NO: 90933 - RNA, 24 nt, Artificial Sequence
  Synthetic
aguucuucugcuggccugugguua

SEQ ID NO: 90934 - RNA, 18 nt, Artificial Sequence
  Synthetic
agcuauagaauaauguua

SEQ ID NO: 90935 - RNA, 20 nt, Artificial Sequence
  Synthetic
ugagcuauagaauaauguua

SEQ ID NO: 90936 - RNA, 21 nt, Artificial Sequence
  Synthetic
cugagcuauagaauaauguua

SEQ ID NO: 90937 - RNA, 23 nt, Artificial Sequence
  Synthetic
agcugagcuauagaauaauguua

SEQ ID NO: 90938 - RNA, 18 nt, Artificial Sequence
  Synthetic
ucacuguugcauauguua

SEQ ID NO: 90939 - RNA, 19 nt, Artificial Sequence
  Synthetic
aucacuguugcauauguua

SEQ ID NO: 90940 - RNA, 21 nt, Artificial Sequence
  Synthetic
ugaucacuguugcauauguua

SEQ ID NO: 90941 - RNA, 23 nt, Artificial Sequence
  Synthetic
ugugaucacuguugcauauguua

SEQ ID NO: 90942 - RNA, 18 nt, Artificial Sequence
  Synthetic
cuuaaucuagguauguua

SEQ ID NO: 90943 - RNA, 19 nt, Artificial Sequence
  Synthetic
ucuuaaucuagguauguua

SEQ ID NO: 90944 - RNA, 20 nt, Artificial Sequence
  Synthetic
uucuuaaucuagguauguua

SEQ ID NO: 90945 - RNA, 22 nt, Artificial Sequence
  Synthetic
uguucuuaaucuagguauguua

SEQ ID NO: 90946 - RNA, 23 nt, Artificial Sequence
  Synthetic
cuguucuuaaucuagguauguua

SEQ ID NO: 90947 - RNA, 24 nt, Artificial Sequence
  Synthetic
acuguucuuaaucuagguauguua

SEQ ID NO: 90948 - RNA, 18 nt, Artificial Sequence
  Synthetic
uaggaaccuguuauguua

SEQ ID NO: 90949 - RNA, 19 nt, Artificial Sequence
  Synthetic
uuaggaaccuguuauguua

SEQ ID NO: 90950 - RNA, 20 nt, Artificial Sequence
  Synthetic
cuuaggaaccuguuauguua

SEQ ID NO: 90951 - RNA, 21 nt, Artificial Sequence
  Synthetic
ccuuaggaaccuguuauguua

SEQ ID NO: 90952 - RNA, 23 nt, Artificial Sequence
  Synthetic
agccuuaggaaccuguuauguua

SEQ ID NO: 90953 - RNA, 24 nt, Artificial Sequence
  Synthetic
cagccuuaggaaccuguuauguua

SEQ ID NO: 90954 - RNA, 18 nt, Artificial Sequence
  Synthetic
cugacauaugcacuguua

SEQ ID NO: 90955 - RNA, 20 nt, Artificial Sequence
  Synthetic
ugcugacauaugcacuguua

SEQ ID NO: 90956 - RNA, 21 nt, Artificial Sequence
  Synthetic
uugcugacauaugcacuguua

SEQ ID NO: 90957 - RNA, 22 nt, Artificial Sequence
  Synthetic
uuugcugacauaugcacuguua

SEQ ID NO: 90958 - RNA, 23 nt, Artificial Sequence
  Synthetic
cuuugcugacauaugcacuguua

SEQ ID NO: 90959 - RNA, 18 nt, Artificial Sequence
  Synthetic
cuuaaaaaccuccuguua

SEQ ID NO: 90960 - RNA, 19 nt, Artificial Sequence
  Synthetic
ucuuaaaaaccuccuguua

SEQ ID NO: 90961 - RNA, 22 nt, Artificial Sequence
  Synthetic
aggucuuaaaaaccuccuguua

SEQ ID NO: 90962 - RNA, 23 nt, Artificial Sequence
  Synthetic
uaggucuuaaaaaccuccuguua

SEQ ID NO: 90963 - RNA, 24 nt, Artificial Sequence
  Synthetic
auaggucuuaaaaaccuccuguua

SEQ ID NO: 90964 - RNA, 19 nt, Artificial Sequence
  Synthetic
agguucuuuauauguguua

SEQ ID NO: 90965 - RNA, 20 nt, Artificial Sequence
  Synthetic
aagguucuuuauauguguua

SEQ ID NO: 90966 - RNA, 21 nt, Artificial Sequence
  Synthetic
aaagguucuuuauauguguua

SEQ ID NO: 90967 - RNA, 22 nt, Artificial Sequence
  Synthetic
uaaagguucuuuauauguguua

SEQ ID NO: 90968 - RNA, 23 nt, Artificial Sequence
  Synthetic
cuaaagguucuuuauauguguua

SEQ ID NO: 90969 - RNA, 18 nt, Artificial Sequence
  Synthetic
auaagaaaaacauuguua

SEQ ID NO: 90970 - RNA, 19 nt, Artificial Sequence
  Synthetic
aauaagaaaaacauuguua

SEQ ID NO: 90971 - RNA, 20 nt, Artificial Sequence
  Synthetic
uaauaagaaaaacauuguua

SEQ ID NO: 90972 - RNA, 22 nt, Artificial Sequence
  Synthetic
aguaauaagaaaaacauuguua

SEQ ID NO: 90973 - RNA, 23 nt, Artificial Sequence
  Synthetic
uaguaauaagaaaaacauuguua

SEQ ID NO: 90974 - RNA, 24 nt, Artificial Sequence
  Synthetic
uuaguaauaagaaaaacauuguua

SEQ ID NO: 90975 - RNA, 18 nt, Artificial Sequence
  Synthetic
uauggccuggcauuguua

SEQ ID NO: 90976 - RNA, 19 nt, Artificial Sequence
  Synthetic
cuauggccuggcauuguua

SEQ ID NO: 90977 - RNA, 20 nt, Artificial Sequence
  Synthetic
acuauggccuggcauuguua

SEQ ID NO: 90978 - RNA, 21 nt, Artificial Sequence
  Synthetic
cacuauggccuggcauuguua

SEQ ID NO: 90979 - RNA, 22 nt, Artificial Sequence
  Synthetic
ucacuauggccuggcauuguua

SEQ ID NO: 90980 - RNA, 23 nt, Artificial Sequence
  Synthetic
uucacuauggccuggcauuguua

SEQ ID NO: 90981 - RNA, 24 nt, Artificial Sequence
  Synthetic
uuucacuauggccuggcauuguua

SEQ ID NO: 90982 - RNA, 18 nt, Artificial Sequence
  Synthetic
ucucugguuauauuguua

SEQ ID NO: 90983 - RNA, 19 nt, Artificial Sequence
  Synthetic
uucucugguuauauuguua

SEQ ID NO: 90984 - RNA, 20 nt, Artificial Sequence
  Synthetic
auucucugguuauauuguua

SEQ ID NO: 90985 - RNA, 21 nt, Artificial Sequence
  Synthetic
uauucucugguuauauuguua

SEQ ID NO: 90986 - RNA, 22 nt, Artificial Sequence
  Synthetic
auauucucugguuauauuguua

SEQ ID NO: 90987 - RNA, 23 nt, Artificial Sequence
  Synthetic
uauauucucugguuauauuguua

SEQ ID NO: 90988 - RNA, 24 nt, Artificial Sequence
  Synthetic
uuauauucucugguuauauuguua

SEQ ID NO: 90989 - RNA, 21 nt, Artificial Sequence
  Synthetic
ugaaaaaaaucugucuuguua

SEQ ID NO: 90990 - RNA, 22 nt, Artificial Sequence
  Synthetic
augaaaaaaaucugucuuguua

SEQ ID NO: 90991 - RNA, 23 nt, Artificial Sequence
  Synthetic
aaugaaaaaaaucugucuuguua

SEQ ID NO: 90992 - RNA, 24 nt, Artificial Sequence
  Synthetic
uaaugaaaaaaaucugucuuguua

SEQ ID NO: 90993 - RNA, 19 nt, Artificial Sequence
  Synthetic
uguuauacagcuguuguua

SEQ ID NO: 90994 - RNA, 20 nt, Artificial Sequence
  Synthetic
cuguuauacagcuguuguua

SEQ ID NO: 90995 - RNA, 21 nt, Artificial Sequence
  Synthetic
acuguuauacagcuguuguua

SEQ ID NO: 90996 - RNA, 22 nt, Artificial Sequence
  Synthetic
aacuguuauacagcuguuguua

SEQ ID NO: 90997 - RNA, 23 nt, Artificial Sequence
  Synthetic
caacuguuauacagcuguuguua

SEQ ID NO: 90998 - RNA, 24 nt, Artificial Sequence
  Synthetic
acaacuguuauacagcuguuguua

SEQ ID NO: 90999 - RNA, 18 nt, Artificial Sequence
  Synthetic
agcuaacuaaauuuguua

SEQ ID NO: 91000 - RNA, 19 nt, Artificial Sequence
  Synthetic
aagcuaacuaaauuuguua

SEQ ID NO: 91001 - RNA, 20 nt, Artificial Sequence
  Synthetic
aaagcuaacuaaauuuguua

SEQ ID NO: 91002 - RNA, 21 nt, Artificial Sequence
  Synthetic
uaaagcuaacuaaauuuguua

SEQ ID NO: 91003 - RNA, 22 nt, Artificial Sequence
  Synthetic
uuaaagcuaacuaaauuuguua

SEQ ID NO: 91004 - RNA, 23 nt, Artificial Sequence
  Synthetic
cuuaaagcuaacuaaauuuguua

SEQ ID NO: 91005 - RNA, 24 nt, Artificial Sequence
  Synthetic
ucuuaaagcuaacuaaauuuguua

SEQ ID NO: 91006 - RNA, 21 nt, Artificial Sequence
  Synthetic
cagaaaagaaaagauuuguua

SEQ ID NO: 91007 - RNA, 22 nt, Artificial Sequence
  Synthetic
ccagaaaagaaaagauuuguua

SEQ ID NO: 91008 - RNA, 24 nt, Artificial Sequence
  Synthetic
agccagaaaagaaaagauuuguua

SEQ ID NO: 91009 - RNA, 18 nt, Artificial Sequence
  Synthetic
acccccaagauuuuguua

SEQ ID NO: 91010 - RNA, 20 nt, Artificial Sequence
  Synthetic
ugacccccaagauuuuguua

SEQ ID NO: 91011 - RNA, 21 nt, Artificial Sequence
  Synthetic
augacccccaagauuuuguua

SEQ ID NO: 91012 - RNA, 22 nt, Artificial Sequence
  Synthetic
aaugacccccaagauuuuguua

SEQ ID NO: 91013 - RNA, 24 nt, Artificial Sequence
  Synthetic
agaaugacccccaagauuuuguua

SEQ ID NO: 91014 - RNA, 18 nt, Artificial Sequence
  Synthetic
uccacugagcaaaauuua

SEQ ID NO: 91015 - RNA, 21 nt, Artificial Sequence
  Synthetic
agguccacugagcaaaauuua

SEQ ID NO: 91016 - RNA, 22 nt, Artificial Sequence
  Synthetic
aagguccacugagcaaaauuua

SEQ ID NO: 91017 - RNA, 23 nt, Artificial Sequence
  Synthetic
uaagguccacugagcaaaauuua

SEQ ID NO: 91018 - RNA, 24 nt, Artificial Sequence
  Synthetic
auaagguccacugagcaaaauuua

SEQ ID NO: 91019 - RNA, 18 nt, Artificial Sequence
  Synthetic
cacaccauuuaaaauuua

SEQ ID NO: 91020 - RNA, 19 nt, Artificial Sequence
  Synthetic
ccacaccauuuaaaauuua

SEQ ID NO: 91021 - RNA, 20 nt, Artificial Sequence
  Synthetic
uccacaccauuuaaaauuua

SEQ ID NO: 91022 - RNA, 21 nt, Artificial Sequence
  Synthetic
uuccacaccauuuaaaauuua

SEQ ID NO: 91023 - RNA, 22 nt, Artificial Sequence
  Synthetic
auuccacaccauuuaaaauuua

SEQ ID NO: 91024 - RNA, 23 nt, Artificial Sequence
  Synthetic
aauuccacaccauuuaaaauuua

SEQ ID NO: 91025 - RNA, 24 nt, Artificial Sequence
  Synthetic
aaauuccacaccauuuaaaauuua

SEQ ID NO: 91026 - RNA, 19 nt, Artificial Sequence
  Synthetic
agcagagguacacaauuua

SEQ ID NO: 91027 - RNA, 20 nt, Artificial Sequence
  Synthetic
uagcagagguacacaauuua

SEQ ID NO: 91028 - RNA, 21 nt, Artificial Sequence
  Synthetic
uuagcagagguacacaauuua

SEQ ID NO: 91029 - RNA, 22 nt, Artificial Sequence
  Synthetic
auuagcagagguacacaauuua

SEQ ID NO: 91030 - RNA, 23 nt, Artificial Sequence
  Synthetic
cauuagcagagguacacaauuua

SEQ ID NO: 91031 - RNA, 24 nt, Artificial Sequence
  Synthetic
ucauuagcagagguacacaauuua

SEQ ID NO: 91032 - RNA, 18 nt, Artificial Sequence
  Synthetic
cauccauuugacaauuua

SEQ ID NO: 91033 - RNA, 20 nt, Artificial Sequence
  Synthetic
ugcauccauuugacaauuua

SEQ ID NO: 91034 - RNA, 21 nt, Artificial Sequence
  Synthetic
augcauccauuugacaauuua

SEQ ID NO: 91035 - RNA, 22 nt, Artificial Sequence
  Synthetic
caugcauccauuugacaauuua

SEQ ID NO: 91036 - RNA, 23 nt, Artificial Sequence
  Synthetic
ccaugcauccauuugacaauuua

SEQ ID NO: 91037 - RNA, 24 nt, Artificial Sequence
  Synthetic
uccaugcauccauuugacaauuua

SEQ ID NO: 91038 - RNA, 19 nt, Artificial Sequence
  Synthetic
ugggucaauuuggaauuua

SEQ ID NO: 91039 - RNA, 20 nt, Artificial Sequence
  Synthetic
cugggucaauuuggaauuua

SEQ ID NO: 91040 - RNA, 21 nt, Artificial Sequence
  Synthetic
ucugggucaauuuggaauuua

SEQ ID NO: 91041 - RNA, 22 nt, Artificial Sequence
  Synthetic
uucugggucaauuuggaauuua

SEQ ID NO: 91042 - RNA, 23 nt, Artificial Sequence
  Synthetic
cuucugggucaauuuggaauuua

SEQ ID NO: 91043 - RNA, 24 nt, Artificial Sequence
  Synthetic
acuucugggucaauuuggaauuua

SEQ ID NO: 91044 - RNA, 18 nt, Artificial Sequence
  Synthetic
uuucuugaugugaauuua

SEQ ID NO: 91045 - RNA, 19 nt, Artificial Sequence
  Synthetic
uuuucuugaugugaauuua

SEQ ID NO: 91046 - RNA, 20 nt, Artificial Sequence
  Synthetic
auuuucuugaugugaauuua

SEQ ID NO: 91047 - RNA, 21 nt, Artificial Sequence
  Synthetic
aauuuucuugaugugaauuua

SEQ ID NO: 91048 - RNA, 22 nt, Artificial Sequence
  Synthetic
aaauuuucuugaugugaauuua

SEQ ID NO: 91049 - RNA, 23 nt, Artificial Sequence
  Synthetic
aaaauuuucuugaugugaauuua

SEQ ID NO: 91050 - RNA, 24 nt, Artificial Sequence
  Synthetic
uaaaauuuucuugaugugaauuua

SEQ ID NO: 91051 - RNA, 18 nt, Artificial Sequence
  Synthetic
cccugcauuaauaauuua

SEQ ID NO: 91052 - RNA, 19 nt, Artificial Sequence
  Synthetic
acccugcauuaauaauuua

SEQ ID NO: 91053 - RNA, 20 nt, Artificial Sequence
  Synthetic
uacccugcauuaauaauuua

SEQ ID NO: 91054 - RNA, 21 nt, Artificial Sequence
  Synthetic
uuacccugcauuaauaauuua

SEQ ID NO: 91055 - RNA, 22 nt, Artificial Sequence
  Synthetic
uuuacccugcauuaauaauuua

SEQ ID NO: 91056 - RNA, 23 nt, Artificial Sequence
  Synthetic
auuuacccugcauuaauaauuua

SEQ ID NO: 91057 - RNA, 24 nt, Artificial Sequence
  Synthetic
aauuuacccugcauuaauaauuua

SEQ ID NO: 91058 - RNA, 18 nt, Artificial Sequence
  Synthetic
cacauagaauauaauuua

SEQ ID NO: 91059 - RNA, 19 nt, Artificial Sequence
  Synthetic
ccacauagaauauaauuua

SEQ ID NO: 91060 - RNA, 20 nt, Artificial Sequence
  Synthetic
uccacauagaauauaauuua

SEQ ID NO: 91061 - RNA, 22 nt, Artificial Sequence
  Synthetic
cguccacauagaauauaauuua

SEQ ID NO: 91062 - RNA, 23 nt, Artificial Sequence
  Synthetic
ccguccacauagaauauaauuua

SEQ ID NO: 91063 - RNA, 24 nt, Artificial Sequence
  Synthetic
accguccacauagaauauaauuua

SEQ ID NO: 91064 - RNA, 21 nt, Artificial Sequence
  Synthetic
cucaagcauaaauuacauuua

SEQ ID NO: 91065 - RNA, 22 nt, Artificial Sequence
  Synthetic
ucucaagcauaaauuacauuua

SEQ ID NO: 91066 - RNA, 23 nt, Artificial Sequence
  Synthetic
uucucaagcauaaauuacauuua

SEQ ID NO: 91067 - RNA, 24 nt, Artificial Sequence
  Synthetic
auucucaagcauaaauuacauuua

SEQ ID NO: 91068 - RNA, 21 nt, Artificial Sequence
  Synthetic
uauaauaggggcuuacauuua

SEQ ID NO: 91069 - RNA, 22 nt, Artificial Sequence
  Synthetic
uuauaauaggggcuuacauuua

SEQ ID NO: 91070 - RNA, 24 nt, Artificial Sequence
  Synthetic
aguuauaauaggggcuuacauuua

SEQ ID NO: 91071 - RNA, 19 nt, Artificial Sequence
  Synthetic
agagugcuggcaccauuua

SEQ ID NO: 91072 - RNA, 20 nt, Artificial Sequence
  Synthetic
aagagugcuggcaccauuua

SEQ ID NO: 91073 - RNA, 21 nt, Artificial Sequence
  Synthetic
aaagagugcuggcaccauuua

SEQ ID NO: 91074 - RNA, 22 nt, Artificial Sequence
  Synthetic
caaagagugcuggcaccauuua

SEQ ID NO: 91075 - RNA, 24 nt, Artificial Sequence
  Synthetic
ugcaaagagugcuggcaccauuua

SEQ ID NO: 91076 - RNA, 18 nt, Artificial Sequence
  Synthetic
aguucccguggccauuua

SEQ ID NO: 91077 - RNA, 19 nt, Artificial Sequence
  Synthetic
uaguucccguggccauuua

SEQ ID NO: 91078 - RNA, 20 nt, Artificial Sequence
  Synthetic
cuaguucccguggccauuua

SEQ ID NO: 91079 - RNA, 21 nt, Artificial Sequence
  Synthetic
ucuaguucccguggccauuua

SEQ ID NO: 91080 - RNA, 22 nt, Artificial Sequence
  Synthetic
aucuaguucccguggccauuua

SEQ ID NO: 91081 - RNA, 23 nt, Artificial Sequence
  Synthetic
aaucuaguucccguggccauuua

SEQ ID NO: 91082 - RNA, 24 nt, Artificial Sequence
  Synthetic
caaucuaguucccguggccauuua

SEQ ID NO: 91083 - RNA, 18 nt, Artificial Sequence
  Synthetic
cuauuccauuuccauuua

SEQ ID NO: 91084 - RNA, 19 nt, Artificial Sequence
  Synthetic
ucuauuccauuuccauuua

SEQ ID NO: 91085 - RNA, 20 nt, Artificial Sequence
  Synthetic
uucuauuccauuuccauuua

SEQ ID NO: 91086 - RNA, 22 nt, Artificial Sequence
  Synthetic
aguucuauuccauuuccauuua

SEQ ID NO: 91087 - RNA, 23 nt, Artificial Sequence
  Synthetic
uaguucuauuccauuuccauuua

SEQ ID NO: 91088 - RNA, 24 nt, Artificial Sequence
  Synthetic
auaguucuauuccauuuccauuua

SEQ ID NO: 91089 - RNA, 18 nt, Artificial Sequence
  Synthetic
cccagguaauagcauuua

SEQ ID NO: 91090 - RNA, 19 nt, Artificial Sequence
  Synthetic
ucccagguaauagcauuua

SEQ ID NO: 91091 - RNA, 20 nt, Artificial Sequence
  Synthetic
uucccagguaauagcauuua

SEQ ID NO: 91092 - RNA, 21 nt, Artificial Sequence
  Synthetic
uuucccagguaauagcauuua

SEQ ID NO: 91093 - RNA, 22 nt, Artificial Sequence
  Synthetic
uuuucccagguaauagcauuua

SEQ ID NO: 91094 - RNA, 23 nt, Artificial Sequence
  Synthetic
cuuuucccagguaauagcauuua

SEQ ID NO: 91095 - RNA, 24 nt, Artificial Sequence
  Synthetic
ucuuuucccagguaauagcauuua

SEQ ID NO: 91096 - RNA, 18 nt, Artificial Sequence
  Synthetic
aauaaugauuagcauuua

SEQ ID NO: 91097 - RNA, 22 nt, Artificial Sequence
  Synthetic
agggaauaaugauuagcauuua

SEQ ID NO: 91098 - RNA, 23 nt, Artificial Sequence
  Synthetic
aagggaauaaugauuagcauuua

SEQ ID NO: 91099 - RNA, 24 nt, Artificial Sequence
  Synthetic
aaagggaauaaugauuagcauuua

SEQ ID NO: 91100 - RNA, 21 nt, Artificial Sequence
  Synthetic
aaauguuaugaaaaucauuua

SEQ ID NO: 91101 - RNA, 23 nt, Artificial Sequence
  Synthetic
agaaauguuaugaaaaucauuua

SEQ ID NO: 91102 - RNA, 24 nt, Artificial Sequence
  Synthetic
cagaaauguuaugaaaaucauuua

SEQ ID NO: 91103 - RNA, 18 nt, Artificial Sequence
  Synthetic
acaaguaagcaucauuua

SEQ ID NO: 91104 - RNA, 19 nt, Artificial Sequence
  Synthetic
cacaaguaagcaucauuua

SEQ ID NO: 91105 - RNA, 20 nt, Artificial Sequence
  Synthetic
ucacaaguaagcaucauuua

SEQ ID NO: 91106 - RNA, 21 nt, Artificial Sequence
  Synthetic
cucacaaguaagcaucauuua

SEQ ID NO: 91107 - RNA, 22 nt, Artificial Sequence
  Synthetic
acucacaaguaagcaucauuua

SEQ ID NO: 91108 - RNA, 23 nt, Artificial Sequence
  Synthetic
cacucacaaguaagcaucauuua

SEQ ID NO: 91109 - RNA, 24 nt, Artificial Sequence
  Synthetic
acacucacaaguaagcaucauuua

SEQ ID NO: 91110 - RNA, 21 nt, Artificial Sequence
  Synthetic
agggcauggaaggaucauuua

SEQ ID NO: 91111 - RNA, 22 nt, Artificial Sequence
  Synthetic
cagggcauggaaggaucauuua

SEQ ID NO: 91112 - RNA, 24 nt, Artificial Sequence
  Synthetic
agcagggcauggaaggaucauuua

SEQ ID NO: 91113 - RNA, 21 nt, Artificial Sequence
  Synthetic
auaaucaauaacuaucauuua

SEQ ID NO: 91114 - RNA, 22 nt, Artificial Sequence
  Synthetic
aauaaucaauaacuaucauuua

SEQ ID NO: 91115 - RNA, 23 nt, Artificial Sequence
  Synthetic
uaauaaucaauaacuaucauuua

SEQ ID NO: 91116 - RNA, 24 nt, Artificial Sequence
  Synthetic
auaauaaucaauaacuaucauuua

SEQ ID NO: 91117 - RNA, 18 nt, Artificial Sequence
  Synthetic
aucacaggauuucauuua

SEQ ID NO: 91118 - RNA, 21 nt, Artificial Sequence
  Synthetic
cggaucacaggauuucauuua

SEQ ID NO: 91119 - RNA, 23 nt, Artificial Sequence
  Synthetic
agcggaucacaggauuucauuua

SEQ ID NO: 91120 - RNA, 24 nt, Artificial Sequence
  Synthetic
uagcggaucacaggauuucauuua

SEQ ID NO: 91121 - RNA, 18 nt, Artificial Sequence
  Synthetic
ucauaacaguuucauuua

SEQ ID NO: 91122 - RNA, 19 nt, Artificial Sequence
  Synthetic
aucauaacaguuucauuua

SEQ ID NO: 91123 - RNA, 20 nt, Artificial Sequence
  Synthetic
caucauaacaguuucauuua

SEQ ID NO: 91124 - RNA, 21 nt, Artificial Sequence
  Synthetic
acaucauaacaguuucauuua

SEQ ID NO: 91125 - RNA, 22 nt, Artificial Sequence
  Synthetic
cacaucauaacaguuucauuua

SEQ ID NO: 91126 - RNA, 23 nt, Artificial Sequence
  Synthetic
ccacaucauaacaguuucauuua

SEQ ID NO: 91127 - RNA, 24 nt, Artificial Sequence
  Synthetic
accacaucauaacaguuucauuua

SEQ ID NO: 91128 - RNA, 22 nt, Artificial Sequence
  Synthetic
ugcaaaaacuaaaaaggauuua

SEQ ID NO: 91129 - RNA, 23 nt, Artificial Sequence
  Synthetic
cugcaaaaacuaaaaaggauuua

SEQ ID NO: 91130 - RNA, 24 nt, Artificial Sequence
  Synthetic
acugcaaaaacuaaaaaggauuua

SEQ ID NO: 91131 - RNA, 19 nt, Artificial Sequence
  Synthetic
agacacugacucugauuua

SEQ ID NO: 91132 - RNA, 21 nt, Artificial Sequence
  Synthetic
agagacacugacucugauuua

SEQ ID NO: 91133 - RNA, 23 nt, Artificial Sequence
  Synthetic
agagagacacugacucugauuua

SEQ ID NO: 91134 - RNA, 18 nt, Artificial Sequence
  Synthetic
cagcgaaagagugauuua

SEQ ID NO: 91135 - RNA, 19 nt, Artificial Sequence
  Synthetic
ccagcgaaagagugauuua

SEQ ID NO: 91136 - RNA, 20 nt, Artificial Sequence
  Synthetic
uccagcgaaagagugauuua

SEQ ID NO: 91137 - RNA, 23 nt, Artificial Sequence
  Synthetic
ugguccagcgaaagagugauuua

SEQ ID NO: 91138 - RNA, 24 nt, Artificial Sequence
  Synthetic
cugguccagcgaaagagugauuua

SEQ ID NO: 91139 - RNA, 18 nt, Artificial Sequence
  Synthetic
uaaauuccgaaauauuua

SEQ ID NO: 91140 - RNA, 19 nt, Artificial Sequence
  Synthetic
uuaaauuccgaaauauuua

SEQ ID NO: 91141 - RNA, 20 nt, Artificial Sequence
  Synthetic
uuuaaauuccgaaauauuua

SEQ ID NO: 91142 - RNA, 21 nt, Artificial Sequence
  Synthetic
cuuuaaauuccgaaauauuua

SEQ ID NO: 91143 - RNA, 24 nt, Artificial Sequence
  Synthetic
aggcuuuaaauuccgaaauauuua

SEQ ID NO: 91144 - RNA, 19 nt, Artificial Sequence
  Synthetic
aguuugaacuuaauauuua

SEQ ID NO: 91145 - RNA, 20 nt, Artificial Sequence
  Synthetic
caguuugaacuuaauauuua

SEQ ID NO: 91146 - RNA, 21 nt, Artificial Sequence
  Synthetic
ccaguuugaacuuaauauuua

SEQ ID NO: 91147 - RNA, 22 nt, Artificial Sequence
  Synthetic
uccaguuugaacuuaauauuua

SEQ ID NO: 91148 - RNA, 23 nt, Artificial Sequence
  Synthetic
auccaguuugaacuuaauauuua

SEQ ID NO: 91149 - RNA, 24 nt, Artificial Sequence
  Synthetic
aauccaguuugaacuuaauauuua

SEQ ID NO: 91150 - RNA, 18 nt, Artificial Sequence
  Synthetic
aaagagccaccauauuua

SEQ ID NO: 91151 - RNA, 19 nt, Artificial Sequence
  Synthetic
uaaagagccaccauauuua

SEQ ID NO: 91152 - RNA, 20 nt, Artificial Sequence
  Synthetic
uuaaagagccaccauauuua

SEQ ID NO: 91153 - RNA, 21 nt, Artificial Sequence
  Synthetic
uuuaaagagccaccauauuua

SEQ ID NO: 91154 - RNA, 22 nt, Artificial Sequence
  Synthetic
auuuaaagagccaccauauuua

SEQ ID NO: 91155 - RNA, 23 nt, Artificial Sequence
  Synthetic
uauuuaaagagccaccauauuua

SEQ ID NO: 91156 - RNA, 24 nt, Artificial Sequence
  Synthetic
uuauuuaaagagccaccauauuua

SEQ ID NO: 91157 - RNA, 19 nt, Artificial Sequence
  Synthetic
ugcguuaguaugauauuua

SEQ ID NO: 91158 - RNA, 20 nt, Artificial Sequence
  Synthetic
uugcguuaguaugauauuua

SEQ ID NO: 91159 - RNA, 21 nt, Artificial Sequence
  Synthetic
uuugcguuaguaugauauuua

SEQ ID NO: 91160 - RNA, 22 nt, Artificial Sequence
  Synthetic
uuuugcguuaguaugauauuua

SEQ ID NO: 91161 - RNA, 23 nt, Artificial Sequence
  Synthetic
cuuuugcguuaguaugauauuua

SEQ ID NO: 91162 - RNA, 24 nt, Artificial Sequence
  Synthetic
ucuuuugcguuaguaugauauuua

SEQ ID NO: 91163 - RNA, 18 nt, Artificial Sequence
  Synthetic
ucucagucaauauauuua

SEQ ID NO: 91164 - RNA, 19 nt, Artificial Sequence
  Synthetic
aucucagucaauauauuua

SEQ ID NO: 91165 - RNA, 20 nt, Artificial Sequence
  Synthetic
aaucucagucaauauauuua

SEQ ID NO: 91166 - RNA, 21 nt, Artificial Sequence
  Synthetic
caaucucagucaauauauuua

SEQ ID NO: 91167 - RNA, 22 nt, Artificial Sequence
  Synthetic
acaaucucagucaauauauuua

SEQ ID NO: 91168 - RNA, 23 nt, Artificial Sequence
  Synthetic
uacaaucucagucaauauauuua

SEQ ID NO: 91169 - RNA, 24 nt, Artificial Sequence
  Synthetic
uuacaaucucagucaauauauuua

SEQ ID NO: 91170 - RNA, 21 nt, Artificial Sequence
  Synthetic
uuuguuacauuuauauauuua

SEQ ID NO: 91171 - RNA, 24 nt, Artificial Sequence
  Synthetic
agguuuguuacauuuauauauuua

SEQ ID NO: 91172 - RNA, 19 nt, Artificial Sequence
  Synthetic
cgauuuaauccacuauuua

SEQ ID NO: 91173 - RNA, 20 nt, Artificial Sequence
  Synthetic
ucgauuuaauccacuauuua

SEQ ID NO: 91174 - RNA, 23 nt, Artificial Sequence
  Synthetic
cggucgauuuaauccacuauuua

SEQ ID NO: 91175 - RNA, 24 nt, Artificial Sequence
  Synthetic
ucggucgauuuaauccacuauuua

SEQ ID NO: 91176 - RNA, 18 nt, Artificial Sequence
  Synthetic
caggucugugacuauuua

SEQ ID NO: 91177 - RNA, 19 nt, Artificial Sequence
  Synthetic
ucaggucugugacuauuua

SEQ ID NO: 91178 - RNA, 20 nt, Artificial Sequence
  Synthetic
cucaggucugugacuauuua

SEQ ID NO: 91179 - RNA, 21 nt, Artificial Sequence
  Synthetic
ucucaggucugugacuauuua

SEQ ID NO: 91180 - RNA, 22 nt, Artificial Sequence
  Synthetic
uucucaggucugugacuauuua

SEQ ID NO: 91181 - RNA, 23 nt, Artificial Sequence
  Synthetic
uuucucaggucugugacuauuua

SEQ ID NO: 91182 - RNA, 24 nt, Artificial Sequence
  Synthetic
cuuucucaggucugugacuauuua

SEQ ID NO: 91183 - RNA, 21 nt, Artificial Sequence
  Synthetic
aguuuauucuacagcuauuua

SEQ ID NO: 91184 - RNA, 22 nt, Artificial Sequence
  Synthetic
aaguuuauucuacagcuauuua

SEQ ID NO: 91185 - RNA, 23 nt, Artificial Sequence
  Synthetic
aaaguuuauucuacagcuauuua

SEQ ID NO: 91186 - RNA, 18 nt, Artificial Sequence
  Synthetic
accuaaggcuucuauuua

SEQ ID NO: 91187 - RNA, 19 nt, Artificial Sequence
  Synthetic
aaccuaaggcuucuauuua

SEQ ID NO: 91188 - RNA, 20 nt, Artificial Sequence
  Synthetic
uaaccuaaggcuucuauuua

SEQ ID NO: 91189 - RNA, 21 nt, Artificial Sequence
  Synthetic
uuaaccuaaggcuucuauuua

SEQ ID NO: 91190 - RNA, 22 nt, Artificial Sequence
  Synthetic
cuuaaccuaaggcuucuauuua

SEQ ID NO: 91191 - RNA, 23 nt, Artificial Sequence
  Synthetic
acuuaaccuaaggcuucuauuua

SEQ ID NO: 91192 - RNA, 24 nt, Artificial Sequence
  Synthetic
aacuuaaccuaaggcuucuauuua

SEQ ID NO: 91193 - RNA, 18 nt, Artificial Sequence
  Synthetic
augucagggagguauuua

SEQ ID NO: 91194 - RNA, 20 nt, Artificial Sequence
  Synthetic
agaugucagggagguauuua

SEQ ID NO: 91195 - RNA, 21 nt, Artificial Sequence
  Synthetic
uagaugucagggagguauuua

SEQ ID NO: 91196 - RNA, 22 nt, Artificial Sequence
  Synthetic
auagaugucagggagguauuua

SEQ ID NO: 91197 - RNA, 23 nt, Artificial Sequence
  Synthetic
cauagaugucagggagguauuua

SEQ ID NO: 91198 - RNA, 24 nt, Artificial Sequence
  Synthetic
acauagaugucagggagguauuua

SEQ ID NO: 91199 - RNA, 18 nt, Artificial Sequence
  Synthetic
uucuugauaauguauuua

SEQ ID NO: 91200 - RNA, 19 nt, Artificial Sequence
  Synthetic
auucuugauaauguauuua

SEQ ID NO: 91201 - RNA, 21 nt, Artificial Sequence
  Synthetic
ugauucuugauaauguauuua

SEQ ID NO: 91202 - RNA, 22 nt, Artificial Sequence
  Synthetic
augauucuugauaauguauuua

SEQ ID NO: 91203 - RNA, 23 nt, Artificial Sequence
  Synthetic
caugauucuugauaauguauuua

SEQ ID NO: 91204 - RNA, 24 nt, Artificial Sequence
  Synthetic
acaugauucuugauaauguauuua

SEQ ID NO: 91205 - RNA, 18 nt, Artificial Sequence
  Synthetic
uugcacucauuguauuua

SEQ ID NO: 91206 - RNA, 19 nt, Artificial Sequence
  Synthetic
auugcacucauuguauuua

SEQ ID NO: 91207 - RNA, 20 nt, Artificial Sequence
  Synthetic
cauugcacucauuguauuua

SEQ ID NO: 91208 - RNA, 21 nt, Artificial Sequence
  Synthetic
acauugcacucauuguauuua

SEQ ID NO: 91209 - RNA, 22 nt, Artificial Sequence
  Synthetic
uacauugcacucauuguauuua

SEQ ID NO: 91210 - RNA, 24 nt, Artificial Sequence
  Synthetic
uguacauugcacucauuguauuua

SEQ ID NO: 91211 - RNA, 22 nt, Artificial Sequence
  Synthetic
ugacaugaaagaaaauuauuua

SEQ ID NO: 91212 - RNA, 23 nt, Artificial Sequence
  Synthetic
uugacaugaaagaaaauuauuua

SEQ ID NO: 91213 - RNA, 24 nt, Artificial Sequence
  Synthetic
cuugacaugaaagaaaauuauuua

SEQ ID NO: 91214 - RNA, 21 nt, Artificial Sequence
  Synthetic
uaauaaauguucaauuauuua

SEQ ID NO: 91215 - RNA, 22 nt, Artificial Sequence
  Synthetic
auaauaaauguucaauuauuua

SEQ ID NO: 91216 - RNA, 23 nt, Artificial Sequence
  Synthetic
cauaauaaauguucaauuauuua

SEQ ID NO: 91217 - RNA, 24 nt, Artificial Sequence
  Synthetic
acauaauaaauguucaauuauuua

SEQ ID NO: 91218 - RNA, 21 nt, Artificial Sequence
  Synthetic
uuuuuaaauuguuguuauuua

SEQ ID NO: 91219 - RNA, 23 nt, Artificial Sequence
  Synthetic
aguuuuuaaauuguuguuauuua

SEQ ID NO: 91220 - RNA, 24 nt, Artificial Sequence
  Synthetic
uaguuuuuaaauuguuguuauuua

SEQ ID NO: 91221 - RNA, 19 nt, Artificial Sequence
  Synthetic
uguuccagccauuuauuua

SEQ ID NO: 91222 - RNA, 22 nt, Artificial Sequence
  Synthetic
ugguguuccagccauuuauuua

SEQ ID NO: 91223 - RNA, 23 nt, Artificial Sequence
  Synthetic
augguguuccagccauuuauuua

SEQ ID NO: 91224 - RNA, 24 nt, Artificial Sequence
  Synthetic
caugguguuccagccauuuauuua

SEQ ID NO: 91225 - RNA, 18 nt, Artificial Sequence
  Synthetic
auauaguuuuuuuauuua

SEQ ID NO: 91226 - RNA, 19 nt, Artificial Sequence
  Synthetic
aauauaguuuuuuuauuua

SEQ ID NO: 91227 - RNA, 21 nt, Artificial Sequence
  Synthetic
cgaauauaguuuuuuuauuua

SEQ ID NO: 91228 - RNA, 22 nt, Artificial Sequence
  Synthetic
acgaauauaguuuuuuuauuua

SEQ ID NO: 91229 - RNA, 23 nt, Artificial Sequence
  Synthetic
uacgaauauaguuuuuuuauuua

SEQ ID NO: 91230 - RNA, 24 nt, Artificial Sequence
  Synthetic
uuacgaauauaguuuuuuuauuua

SEQ ID NO: 91231 - RNA, 18 nt, Artificial Sequence
  Synthetic
uuauauuaaucaacuuua

SEQ ID NO: 91232 - RNA, 19 nt, Artificial Sequence
  Synthetic
auuauauuaaucaacuuua

SEQ ID NO: 91233 - RNA, 20 nt, Artificial Sequence
  Synthetic
cauuauauuaaucaacuuua

SEQ ID NO: 91234 - RNA, 21 nt, Artificial Sequence
  Synthetic
ucauuauauuaaucaacuuua

SEQ ID NO: 91235 - RNA, 22 nt, Artificial Sequence
  Synthetic
aucauuauauuaaucaacuuua

SEQ ID NO: 91236 - RNA, 23 nt, Artificial Sequence
  Synthetic
aaucauuauauuaaucaacuuua

SEQ ID NO: 91237 - RNA, 24 nt, Artificial Sequence
  Synthetic
uaaucauuauauuaaucaacuuua

SEQ ID NO: 91238 - RNA, 18 nt, Artificial Sequence
  Synthetic
acuucuaaauuaacuuua

SEQ ID NO: 91239 - RNA, 19 nt, Artificial Sequence
  Synthetic
uacuucuaaauuaacuuua

SEQ ID NO: 91240 - RNA, 20 nt, Artificial Sequence
  Synthetic
uuacuucuaaauuaacuuua

SEQ ID NO: 91241 - RNA, 21 nt, Artificial Sequence
  Synthetic
uuuacuucuaaauuaacuuua

SEQ ID NO: 91242 - RNA, 22 nt, Artificial Sequence
  Synthetic
uuuuacuucuaaauuaacuuua

SEQ ID NO: 91243 - RNA, 23 nt, Artificial Sequence
  Synthetic
auuuuacuucuaaauuaacuuua

SEQ ID NO: 91244 - RNA, 24 nt, Artificial Sequence
  Synthetic
uauuuuacuucuaaauuaacuuua

SEQ ID NO: 91245 - RNA, 18 nt, Artificial Sequence
  Synthetic
agagcuuaaagcacuuua

SEQ ID NO: 91246 - RNA, 19 nt, Artificial Sequence
  Synthetic
aagagcuuaaagcacuuua

SEQ ID NO: 91247 - RNA, 20 nt, Artificial Sequence
  Synthetic
aaagagcuuaaagcacuuua

SEQ ID NO: 91248 - RNA, 21 nt, Artificial Sequence
  Synthetic
caaagagcuuaaagcacuuua

SEQ ID NO: 91249 - RNA, 22 nt, Artificial Sequence
  Synthetic
ccaaagagcuuaaagcacuuua

SEQ ID NO: 91250 - RNA, 23 nt, Artificial Sequence
  Synthetic
uccaaagagcuuaaagcacuuua

SEQ ID NO: 91251 - RNA, 24 nt, Artificial Sequence
  Synthetic
cuccaaagagcuuaaagcacuuua

SEQ ID NO: 91252 - RNA, 18 nt, Artificial Sequence
  Synthetic
caauaagauuugacuuua

SEQ ID NO: 91253 - RNA, 20 nt, Artificial Sequence
  Synthetic
ugcaauaagauuugacuuua

SEQ ID NO: 91254 - RNA, 21 nt, Artificial Sequence
  Synthetic
cugcaauaagauuugacuuua

SEQ ID NO: 91255 - RNA, 22 nt, Artificial Sequence
  Synthetic
acugcaauaagauuugacuuua

SEQ ID NO: 91256 - RNA, 23 nt, Artificial Sequence
  Synthetic
uacugcaauaagauuugacuuua

SEQ ID NO: 91257 - RNA, 24 nt, Artificial Sequence
  Synthetic
cuacugcaauaagauuugacuuua

SEQ ID NO: 91258 - RNA, 18 nt, Artificial Sequence
  Synthetic
ccaaccaggccuacuuua

SEQ ID NO: 91259 - RNA, 19 nt, Artificial Sequence
  Synthetic
accaaccaggccuacuuua

SEQ ID NO: 91260 - RNA, 22 nt, Artificial Sequence
  Synthetic
aggaccaaccaggccuacuuua

SEQ ID NO: 91261 - RNA, 24 nt, Artificial Sequence
  Synthetic
agaggaccaaccaggccuacuuua

SEQ ID NO: 91262 - RNA, 18 nt, Artificial Sequence
  Synthetic
cacguugguugaccuuua

SEQ ID NO: 91263 - RNA, 19 nt, Artificial Sequence
  Synthetic
ccacguugguugaccuuua

SEQ ID NO: 91264 - RNA, 20 nt, Artificial Sequence
  Synthetic
uccacguugguugaccuuua

SEQ ID NO: 91265 - RNA, 21 nt, Artificial Sequence
  Synthetic
uuccacguugguugaccuuua

SEQ ID NO: 91266 - RNA, 22 nt, Artificial Sequence
  Synthetic
uuuccacguugguugaccuuua

SEQ ID NO: 91267 - RNA, 23 nt, Artificial Sequence
  Synthetic
uuuuccacguugguugaccuuua

SEQ ID NO: 91268 - RNA, 24 nt, Artificial Sequence
  Synthetic
uuuuuccacguugguugaccuuua

SEQ ID NO: 91269 - RNA, 18 nt, Artificial Sequence
  Synthetic
cuuauucuuuuaccuuua

SEQ ID NO: 91270 - RNA, 20 nt, Artificial Sequence
  Synthetic
ugcuuauucuuuuaccuuua

SEQ ID NO: 91271 - RNA, 21 nt, Artificial Sequence
  Synthetic
cugcuuauucuuuuaccuuua

SEQ ID NO: 91272 - RNA, 22 nt, Artificial Sequence
  Synthetic
ucugcuuauucuuuuaccuuua

SEQ ID NO: 91273 - RNA, 23 nt, Artificial Sequence
  Synthetic
cucugcuuauucuuuuaccuuua

SEQ ID NO: 91274 - RNA, 24 nt, Artificial Sequence
  Synthetic
ccucugcuuauucuuuuaccuuua

SEQ ID NO: 91275 - RNA, 18 nt, Artificial Sequence
  Synthetic
ugacuucaaaaagcuuua

SEQ ID NO: 91276 - RNA, 19 nt, Artificial Sequence
  Synthetic
uugacuucaaaaagcuuua

SEQ ID NO: 91277 - RNA, 20 nt, Artificial Sequence
  Synthetic
cuugacuucaaaaagcuuua

SEQ ID NO: 91278 - RNA, 21 nt, Artificial Sequence
  Synthetic
ccuugacuucaaaaagcuuua

SEQ ID NO: 91279 - RNA, 22 nt, Artificial Sequence
  Synthetic
uccuugacuucaaaaagcuuua

SEQ ID NO: 91280 - RNA, 23 nt, Artificial Sequence
  Synthetic
auccuugacuucaaaaagcuuua

SEQ ID NO: 91281 - RNA, 24 nt, Artificial Sequence
  Synthetic
cauccuugacuucaaaaagcuuua

SEQ ID NO: 91282 - RNA, 18 nt, Artificial Sequence
  Synthetic
uauuucagagccgcuuua

SEQ ID NO: 91283 - RNA, 20 nt, Artificial Sequence
  Synthetic
uguauuucagagccgcuuua

SEQ ID NO: 91284 - RNA, 21 nt, Artificial Sequence
  Synthetic
cuguauuucagagccgcuuua

SEQ ID NO: 91285 - RNA, 22 nt, Artificial Sequence
  Synthetic
ccuguauuucagagccgcuuua

SEQ ID NO: 91286 - RNA, 24 nt, Artificial Sequence
  Synthetic
ugccuguauuucagagccgcuuua

SEQ ID NO: 91287 - RNA, 18 nt, Artificial Sequence
  Synthetic
uuuuaaccuuaugcuuua

SEQ ID NO: 91288 - RNA, 19 nt, Artificial Sequence
  Synthetic
cuuuuaaccuuaugcuuua

SEQ ID NO: 91289 - RNA, 20 nt, Artificial Sequence
  Synthetic
ucuuuuaaccuuaugcuuua

SEQ ID NO: 91290 - RNA, 21 nt, Artificial Sequence
  Synthetic
uucuuuuaaccuuaugcuuua

SEQ ID NO: 91291 - RNA, 22 nt, Artificial Sequence
  Synthetic
uuucuuuuaaccuuaugcuuua

SEQ ID NO: 91292 - RNA, 23 nt, Artificial Sequence
  Synthetic
auuucuuuuaaccuuaugcuuua

SEQ ID NO: 91293 - RNA, 24 nt, Artificial Sequence
  Synthetic
uauuucuuuuaaccuuaugcuuua

SEQ ID NO: 91294 - RNA, 21 nt, Artificial Sequence
  Synthetic
cacuccuuuuguccugcuuua

SEQ ID NO: 91295 - RNA, 22 nt, Artificial Sequence
  Synthetic
acacuccuuuuguccugcuuua

SEQ ID NO: 91296 - RNA, 23 nt, Artificial Sequence
  Synthetic
aacacuccuuuuguccugcuuua

SEQ ID NO: 91297 - RNA, 24 nt, Artificial Sequence
  Synthetic
uaacacuccuuuuguccugcuuua

SEQ ID NO: 91298 - RNA, 18 nt, Artificial Sequence
  Synthetic
uaacaaagauuaucuuua

SEQ ID NO: 91299 - RNA, 19 nt, Artificial Sequence
  Synthetic
auaacaaagauuaucuuua

SEQ ID NO: 91300 - RNA, 20 nt, Artificial Sequence
  Synthetic
uauaacaaagauuaucuuua

SEQ ID NO: 91301 - RNA, 21 nt, Artificial Sequence
  Synthetic
auauaacaaagauuaucuuua

SEQ ID NO: 91302 - RNA, 22 nt, Artificial Sequence
  Synthetic
uauauaacaaagauuaucuuua

SEQ ID NO: 91303 - RNA, 23 nt, Artificial Sequence
  Synthetic
uuauauaacaaagauuaucuuua

SEQ ID NO: 91304 - RNA, 24 nt, Artificial Sequence
  Synthetic
uuuauauaacaaagauuaucuuua

SEQ ID NO: 91305 - RNA, 18 nt, Artificial Sequence
  Synthetic
auucucuuguuaucuuua

SEQ ID NO: 91306 - RNA, 20 nt, Artificial Sequence
  Synthetic
agauucucuuguuaucuuua

SEQ ID NO: 91307 - RNA, 21 nt, Artificial Sequence
  Synthetic
cagauucucuuguuaucuuua

SEQ ID NO: 91308 - RNA, 22 nt, Artificial Sequence
  Synthetic
acagauucucuuguuaucuuua

SEQ ID NO: 91309 - RNA, 23 nt, Artificial Sequence
  Synthetic
cacagauucucuuguuaucuuua

SEQ ID NO: 91310 - RNA, 24 nt, Artificial Sequence
  Synthetic
ucacagauucucuuguuaucuuua

SEQ ID NO: 91311 - RNA, 19 nt, Artificial Sequence
  Synthetic
ugacucccuacacucuuua

SEQ ID NO: 91312 - RNA, 21 nt, Artificial Sequence
  Synthetic
ugugacucccuacacucuuua

SEQ ID NO: 91313 - RNA, 22 nt, Artificial Sequence
  Synthetic
augugacucccuacacucuuua

SEQ ID NO: 91314 - RNA, 23 nt, Artificial Sequence
  Synthetic
caugugacucccuacacucuuua

SEQ ID NO: 91315 - RNA, 24 nt, Artificial Sequence
  Synthetic
ucaugugacucccuacacucuuua

SEQ ID NO: 91316 - RNA, 18 nt, Artificial Sequence
  Synthetic
cuccuccuucagucuuua

SEQ ID NO: 91317 - RNA, 19 nt, Artificial Sequence
  Synthetic
ccuccuccuucagucuuua

SEQ ID NO: 91318 - RNA, 20 nt, Artificial Sequence
  Synthetic
uccuccuccuucagucuuua

SEQ ID NO: 91319 - RNA, 21 nt, Artificial Sequence
  Synthetic
cuccuccuccuucagucuuua

SEQ ID NO: 91320 - RNA, 22 nt, Artificial Sequence
  Synthetic
ucuccuccuccuucagucuuua

SEQ ID NO: 91321 - RNA, 23 nt, Artificial Sequence
  Synthetic
uucuccuccuccuucagucuuua

SEQ ID NO: 91322 - RNA, 24 nt, Artificial Sequence
  Synthetic
auucuccuccuccuucagucuuua

SEQ ID NO: 91323 - RNA, 18 nt, Artificial Sequence
  Synthetic
agguugacacugucuuua

SEQ ID NO: 91324 - RNA, 19 nt, Artificial Sequence
  Synthetic
aagguugacacugucuuua

SEQ ID NO: 91325 - RNA, 20 nt, Artificial Sequence
  Synthetic
caagguugacacugucuuua

SEQ ID NO: 91326 - RNA, 22 nt, Artificial Sequence
  Synthetic
agcaagguugacacugucuuua

SEQ ID NO: 91327 - RNA, 23 nt, Artificial Sequence
  Synthetic
uagcaagguugacacugucuuua

SEQ ID NO: 91328 - RNA, 24 nt, Artificial Sequence
  Synthetic
auagcaagguugacacugucuuua

SEQ ID NO: 91329 - RNA, 18 nt, Artificial Sequence
  Synthetic
ucugcauauuguucuuua

SEQ ID NO: 91330 - RNA, 19 nt, Artificial Sequence
  Synthetic
aucugcauauuguucuuua

SEQ ID NO: 91331 - RNA, 20 nt, Artificial Sequence
  Synthetic
aaucugcauauuguucuuua

SEQ ID NO: 91332 - RNA, 21 nt, Artificial Sequence
  Synthetic
aaaucugcauauuguucuuua

SEQ ID NO: 91333 - RNA, 22 nt, Artificial Sequence
  Synthetic
aaaaucugcauauuguucuuua

SEQ ID NO: 91334 - RNA, 23 nt, Artificial Sequence
  Synthetic
caaaaucugcauauuguucuuua

SEQ ID NO: 91335 - RNA, 24 nt, Artificial Sequence
  Synthetic
acaaaaucugcauauuguucuuua

SEQ ID NO: 91336 - RNA, 18 nt, Artificial Sequence
  Synthetic
caauguuuuauuucuuua

SEQ ID NO: 91337 - RNA, 19 nt, Artificial Sequence
  Synthetic
ccaauguuuuauuucuuua

SEQ ID NO: 91338 - RNA, 20 nt, Artificial Sequence
  Synthetic
cccaauguuuuauuucuuua

SEQ ID NO: 91339 - RNA, 21 nt, Artificial Sequence
  Synthetic
acccaauguuuuauuucuuua

SEQ ID NO: 91340 - RNA, 22 nt, Artificial Sequence
  Synthetic
aacccaauguuuuauuucuuua

SEQ ID NO: 91341 - RNA, 23 nt, Artificial Sequence
  Synthetic
aaacccaauguuuuauuucuuua

SEQ ID NO: 91342 - RNA, 24 nt, Artificial Sequence
  Synthetic
caaacccaauguuuuauuucuuua

SEQ ID NO: 91343 - RNA, 19 nt, Artificial Sequence
  Synthetic
uggggaagaggccaguuua

SEQ ID NO: 91344 - RNA, 20 nt, Artificial Sequence
  Synthetic
cuggggaagaggccaguuua

SEQ ID NO: 91345 - RNA, 22 nt, Artificial Sequence
  Synthetic
ugcuggggaagaggccaguuua

SEQ ID NO: 91346 - RNA, 24 nt, Artificial Sequence
  Synthetic
agugcuggggaagaggccaguuua

SEQ ID NO: 91347 - RNA, 18 nt, Artificial Sequence
  Synthetic
uuauuuaaccucaguuua

SEQ ID NO: 91348 - RNA, 19 nt, Artificial Sequence
  Synthetic
cuuauuuaaccucaguuua

SEQ ID NO: 91349 - RNA, 20 nt, Artificial Sequence
  Synthetic
ccuuauuuaaccucaguuua

SEQ ID NO: 91350 - RNA, 21 nt, Artificial Sequence
  Synthetic
uccuuauuuaaccucaguuua

SEQ ID NO: 91351 - RNA, 22 nt, Artificial Sequence
  Synthetic
uuccuuauuuaaccucaguuua

SEQ ID NO: 91352 - RNA, 24 nt, Artificial Sequence
  Synthetic
uguuccuuauuuaaccucaguuua

SEQ ID NO: 91353 - RNA, 18 nt, Artificial Sequence
  Synthetic
ugugccaaugucaguuua

SEQ ID NO: 91354 - RNA, 19 nt, Artificial Sequence
  Synthetic
cugugccaaugucaguuua

SEQ ID NO: 91355 - RNA, 20 nt, Artificial Sequence
  Synthetic
acugugccaaugucaguuua

SEQ ID NO: 91356 - RNA, 21 nt, Artificial Sequence
  Synthetic
cacugugccaaugucaguuua

SEQ ID NO: 91357 - RNA, 23 nt, Artificial Sequence
  Synthetic
ugcacugugccaaugucaguuua

SEQ ID NO: 91358 - RNA, 24 nt, Artificial Sequence
  Synthetic
uugcacugugccaaugucaguuua

SEQ ID NO: 91359 - RNA, 21 nt, Artificial Sequence
  Synthetic
caucuuuuugaccuuaguuua

SEQ ID NO: 91360 - RNA, 23 nt, Artificial Sequence
  Synthetic
ugcaucuuuuugaccuuaguuua

SEQ ID NO: 91361 - RNA, 24 nt, Artificial Sequence
  Synthetic
cugcaucuuuuugaccuuaguuua

SEQ ID NO: 91362 - RNA, 19 nt, Artificial Sequence
  Synthetic
aggucauaugguggguuua

SEQ ID NO: 91363 - RNA, 20 nt, Artificial Sequence
  Synthetic
aaggucauaugguggguuua

SEQ ID NO: 91364 - RNA, 24 nt, Artificial Sequence
  Synthetic
cgggaaggucauaugguggguuua

SEQ ID NO: 91365 - RNA, 22 nt, Artificial Sequence
  Synthetic
aguugaagggaaaaaauguuua

SEQ ID NO: 91366 - RNA, 23 nt, Artificial Sequence
  Synthetic
aaguugaagggaaaaaauguuua

SEQ ID NO: 91367 - RNA, 24 nt, Artificial Sequence
  Synthetic
aaaguugaagggaaaaaauguuua

SEQ ID NO: 91368 - RNA, 18 nt, Artificial Sequence
  Synthetic
uaauauuagcuauguuua

SEQ ID NO: 91369 - RNA, 19 nt, Artificial Sequence
  Synthetic
auaauauuagcuauguuua

SEQ ID NO: 91370 - RNA, 20 nt, Artificial Sequence
  Synthetic
cauaauauuagcuauguuua

SEQ ID NO: 91371 - RNA, 21 nt, Artificial Sequence
  Synthetic
acauaauauuagcuauguuua

SEQ ID NO: 91372 - RNA, 22 nt, Artificial Sequence
  Synthetic
aacauaauauuagcuauguuua

SEQ ID NO: 91373 - RNA, 23 nt, Artificial Sequence
  Synthetic
uaacauaauauuagcuauguuua

SEQ ID NO: 91374 - RNA, 24 nt, Artificial Sequence
  Synthetic
auaacauaauauuagcuauguuua

SEQ ID NO: 91375 - RNA, 18 nt, Artificial Sequence
  Synthetic
auauuacauguauguuua

SEQ ID NO: 91376 - RNA, 19 nt, Artificial Sequence
  Synthetic
uauauuacauguauguuua

SEQ ID NO: 91377 - RNA, 20 nt, Artificial Sequence
  Synthetic
uuauauuacauguauguuua

SEQ ID NO: 91378 - RNA, 21 nt, Artificial Sequence
  Synthetic
uuuauauuacauguauguuua

SEQ ID NO: 91379 - RNA, 22 nt, Artificial Sequence
  Synthetic
cuuuauauuacauguauguuua

SEQ ID NO: 91380 - RNA, 24 nt, Artificial Sequence
  Synthetic
ugcuuuauauuacauguauguuua

SEQ ID NO: 91381 - RNA, 18 nt, Artificial Sequence
  Synthetic
cuacuuacauuauguuua

SEQ ID NO: 91382 - RNA, 19 nt, Artificial Sequence
  Synthetic
ucuacuuacauuauguuua

SEQ ID NO: 91383 - RNA, 20 nt, Artificial Sequence
  Synthetic
uucuacuuacauuauguuua

SEQ ID NO: 91384 - RNA, 21 nt, Artificial Sequence
  Synthetic
uuucuacuuacauuauguuua

SEQ ID NO: 91385 - RNA, 22 nt, Artificial Sequence
  Synthetic
uuuucuacuuacauuauguuua

SEQ ID NO: 91386 - RNA, 23 nt, Artificial Sequence
  Synthetic
auuuucuacuuacauuauguuua

SEQ ID NO: 91387 - RNA, 24 nt, Artificial Sequence
  Synthetic
aauuuucuacuuacauuauguuua

SEQ ID NO: 91388 - RNA, 21 nt, Artificial Sequence
  Synthetic
cuuauuacauuguacuguuua

SEQ ID NO: 91389 - RNA, 22 nt, Artificial Sequence
  Synthetic
acuuauuacauuguacuguuua

SEQ ID NO: 91390 - RNA, 23 nt, Artificial Sequence
  Synthetic
uacuuauuacauuguacuguuua

SEQ ID NO: 91391 - RNA, 24 nt, Artificial Sequence
  Synthetic
auacuuauuacauuguacuguuua

SEQ ID NO: 91392 - RNA, 18 nt, Artificial Sequence
  Synthetic
ucaauuacugcuuguuua

SEQ ID NO: 91393 - RNA, 19 nt, Artificial Sequence
  Synthetic
cucaauuacugcuuguuua

SEQ ID NO: 91394 - RNA, 20 nt, Artificial Sequence
  Synthetic
acucaauuacugcuuguuua

SEQ ID NO: 91395 - RNA, 21 nt, Artificial Sequence
  Synthetic
cacucaauuacugcuuguuua

SEQ ID NO: 91396 - RNA, 23 nt, Artificial Sequence
  Synthetic
ugcacucaauuacugcuuguuua

SEQ ID NO: 91397 - RNA, 24 nt, Artificial Sequence
  Synthetic
augcacucaauuacugcuuguuua

SEQ ID NO: 91398 - RNA, 18 nt, Artificial Sequence
  Synthetic
augcuuauuucuuguuua

SEQ ID NO: 91399 - RNA, 19 nt, Artificial Sequence
  Synthetic
aaugcuuauuucuuguuua

SEQ ID NO: 91400 - RNA, 20 nt, Artificial Sequence
  Synthetic
uaaugcuuauuucuuguuua

SEQ ID NO: 91401 - RNA, 21 nt, Artificial Sequence
  Synthetic
uuaaugcuuauuucuuguuua

SEQ ID NO: 91402 - RNA, 23 nt, Artificial Sequence
  Synthetic
aguuaaugcuuauuucuuguuua

SEQ ID NO: 91403 - RNA, 18 nt, Artificial Sequence
  Synthetic
aacaacaauaguuguuua

SEQ ID NO: 91404 - RNA, 19 nt, Artificial Sequence
  Synthetic
caacaacaauaguuguuua

SEQ ID NO: 91405 - RNA, 20 nt, Artificial Sequence
  Synthetic
acaacaacaauaguuguuua

SEQ ID NO: 91406 - RNA, 22 nt, Artificial Sequence
  Synthetic
cgacaacaacaauaguuguuua

SEQ ID NO: 91407 - RNA, 23 nt, Artificial Sequence
  Synthetic
acgacaacaacaauaguuguuua

SEQ ID NO: 91408 - RNA, 24 nt, Artificial Sequence
  Synthetic
aacgacaacaacaauaguuguuua

SEQ ID NO: 91409 - RNA, 21 nt, Artificial Sequence
  Synthetic
ucagugcuccauauuuguuua

SEQ ID NO: 91410 - RNA, 23 nt, Artificial Sequence
  Synthetic
agucagugcuccauauuuguuua

SEQ ID NO: 91411 - RNA, 24 nt, Artificial Sequence
  Synthetic
uagucagugcuccauauuuguuua

SEQ ID NO: 91412 - RNA, 19 nt, Artificial Sequence
  Synthetic
ugauuucaggauaauuuua

SEQ ID NO: 91413 - RNA, 20 nt, Artificial Sequence
  Synthetic
augauuucaggauaauuuua

SEQ ID NO: 91414 - RNA, 21 nt, Artificial Sequence
  Synthetic
caugauuucaggauaauuuua

SEQ ID NO: 91415 - RNA, 22 nt, Artificial Sequence
  Synthetic
acaugauuucaggauaauuuua

SEQ ID NO: 91416 - RNA, 23 nt, Artificial Sequence
  Synthetic
aacaugauuucaggauaauuuua

SEQ ID NO: 91417 - RNA, 24 nt, Artificial Sequence
  Synthetic
caacaugauuucaggauaauuuua

SEQ ID NO: 91418 - RNA, 18 nt, Artificial Sequence
  Synthetic
caucuacuacuaauuuua

SEQ ID NO: 91419 - RNA, 19 nt, Artificial Sequence
  Synthetic
acaucuacuacuaauuuua

SEQ ID NO: 91420 - RNA, 20 nt, Artificial Sequence
  Synthetic
cacaucuacuacuaauuuua

SEQ ID NO: 91421 - RNA, 22 nt, Artificial Sequence
  Synthetic
agcacaucuacuacuaauuuua

SEQ ID NO: 91422 - RNA, 23 nt, Artificial Sequence
  Synthetic
uagcacaucuacuacuaauuuua

SEQ ID NO: 91423 - RNA, 24 nt, Artificial Sequence
  Synthetic
cuagcacaucuacuacuaauuuua

SEQ ID NO: 91424 - RNA, 18 nt, Artificial Sequence
  Synthetic
cccuguccccuaauuuua

SEQ ID NO: 91425 - RNA, 19 nt, Artificial Sequence
  Synthetic
acccuguccccuaauuuua

SEQ ID NO: 91426 - RNA, 20 nt, Artificial Sequence
  Synthetic
aacccuguccccuaauuuua

SEQ ID NO: 91427 - RNA, 23 nt, Artificial Sequence
  Synthetic
uggaacccuguccccuaauuuua

SEQ ID NO: 91428 - RNA, 24 nt, Artificial Sequence
  Synthetic
cuggaacccuguccccuaauuuua

SEQ ID NO: 91429 - RNA, 21 nt, Artificial Sequence
  Synthetic
aaguuauaacauaacauuuua

SEQ ID NO: 91430 - RNA, 22 nt, Artificial Sequence
  Synthetic
uaaguuauaacauaacauuuua

SEQ ID NO: 91431 - RNA, 23 nt, Artificial Sequence
  Synthetic
uuaaguuauaacauaacauuuua

SEQ ID NO: 91432 - RNA, 24 nt, Artificial Sequence
  Synthetic
cuuaaguuauaacauaacauuuua

SEQ ID NO: 91433 - RNA, 18 nt, Artificial Sequence
  Synthetic
aucauuugcuacauuuua

SEQ ID NO: 91434 - RNA, 19 nt, Artificial Sequence
  Synthetic
aaucauuugcuacauuuua

SEQ ID NO: 91435 - RNA, 20 nt, Artificial Sequence
  Synthetic
uaaucauuugcuacauuuua

SEQ ID NO: 91436 - RNA, 21 nt, Artificial Sequence
  Synthetic
uuaaucauuugcuacauuuua

SEQ ID NO: 91437 - RNA, 22 nt, Artificial Sequence
  Synthetic
cuuaaucauuugcuacauuuua

SEQ ID NO: 91438 - RNA, 24 nt, Artificial Sequence
  Synthetic
ugcuuaaucauuugcuacauuuua

SEQ ID NO: 91439 - RNA, 22 nt, Artificial Sequence
  Synthetic
uguacagguauaccucauuuua

SEQ ID NO: 91440 - RNA, 23 nt, Artificial Sequence
  Synthetic
auguacagguauaccucauuuua

SEQ ID NO: 91441 - RNA, 24 nt, Artificial Sequence
  Synthetic
uauguacagguauaccucauuuua

SEQ ID NO: 91442 - RNA, 18 nt, Artificial Sequence
  Synthetic
auuuaacaccagauuuua

SEQ ID NO: 91443 - RNA, 19 nt, Artificial Sequence
  Synthetic
uauuuaacaccagauuuua

SEQ ID NO: 91444 - RNA, 20 nt, Artificial Sequence
  Synthetic
uuauuuaacaccagauuuua

SEQ ID NO: 91445 - RNA, 21 nt, Artificial Sequence
  Synthetic
cuuauuuaacaccagauuuua

SEQ ID NO: 91446 - RNA, 22 nt, Artificial Sequence
  Synthetic
ccuuauuuaacaccagauuuua

SEQ ID NO: 91447 - RNA, 23 nt, Artificial Sequence
  Synthetic
uccuuauuuaacaccagauuuua

SEQ ID NO: 91448 - RNA, 18 nt, Artificial Sequence
  Synthetic
auucccuuaaggauuuua

SEQ ID NO: 91449 - RNA, 19 nt, Artificial Sequence
  Synthetic
cauucccuuaaggauuuua

SEQ ID NO: 91450 - RNA, 20 nt, Artificial Sequence
  Synthetic
acauucccuuaaggauuuua

SEQ ID NO: 91451 - RNA, 21 nt, Artificial Sequence
  Synthetic
aacauucccuuaaggauuuua

SEQ ID NO: 91452 - RNA, 22 nt, Artificial Sequence
  Synthetic
aaacauucccuuaaggauuuua

SEQ ID NO: 91453 - RNA, 23 nt, Artificial Sequence
  Synthetic
uaaacauucccuuaaggauuuua

SEQ ID NO: 91454 - RNA, 24 nt, Artificial Sequence
  Synthetic
cuaaacauucccuuaaggauuuua

SEQ ID NO: 91455 - RNA, 18 nt, Artificial Sequence
  Synthetic
uauauccaauugauuuua

SEQ ID NO: 91456 - RNA, 19 nt, Artificial Sequence
  Synthetic
cuauauccaauugauuuua

SEQ ID NO: 91457 - RNA, 20 nt, Artificial Sequence
  Synthetic
ucuauauccaauugauuuua

SEQ ID NO: 91458 - RNA, 21 nt, Artificial Sequence
  Synthetic
uucuauauccaauugauuuua

SEQ ID NO: 91459 - RNA, 22 nt, Artificial Sequence
  Synthetic
auucuauauccaauugauuuua

SEQ ID NO: 91460 - RNA, 23 nt, Artificial Sequence
  Synthetic
uauucuauauccaauugauuuua

SEQ ID NO: 91461 - RNA, 24 nt, Artificial Sequence
  Synthetic
uuauucuauauccaauugauuuua

SEQ ID NO: 91462 - RNA, 18 nt, Artificial Sequence
  Synthetic
ugcuuccuaaauauuuua

SEQ ID NO: 91463 - RNA, 19 nt, Artificial Sequence
  Synthetic
cugcuuccuaaauauuuua

SEQ ID NO: 91464 - RNA, 20 nt, Artificial Sequence
  Synthetic
ucugcuuccuaaauauuuua

SEQ ID NO: 91465 - RNA, 21 nt, Artificial Sequence
  Synthetic
aucugcuuccuaaauauuuua

SEQ ID NO: 91466 - RNA, 22 nt, Artificial Sequence
  Synthetic
uaucugcuuccuaaauauuuua

SEQ ID NO: 91467 - RNA, 23 nt, Artificial Sequence
  Synthetic
auaucugcuuccuaaauauuuua

SEQ ID NO: 91468 - RNA, 24 nt, Artificial Sequence
  Synthetic
aauaucugcuuccuaaauauuuua

SEQ ID NO: 91469 - RNA, 18 nt, Artificial Sequence
  Synthetic
agaacggaccauauuuua

SEQ ID NO: 91470 - RNA, 19 nt, Artificial Sequence
  Synthetic
aagaacggaccauauuuua

SEQ ID NO: 91471 - RNA, 20 nt, Artificial Sequence
  Synthetic
uaagaacggaccauauuuua

SEQ ID NO: 91472 - RNA, 21 nt, Artificial Sequence
  Synthetic
auaagaacggaccauauuuua

SEQ ID NO: 91473 - RNA, 22 nt, Artificial Sequence
  Synthetic
uauaagaacggaccauauuuua

SEQ ID NO: 91474 - RNA, 23 nt, Artificial Sequence
  Synthetic
auauaagaacggaccauauuuua

SEQ ID NO: 91475 - RNA, 24 nt, Artificial Sequence
  Synthetic
aauauaagaacggaccauauuuua

SEQ ID NO: 91476 - RNA, 18 nt, Artificial Sequence
  Synthetic
auggcagaugauauuuua

SEQ ID NO: 91477 - RNA, 20 nt, Artificial Sequence
  Synthetic
cgauggcagaugauauuuua

SEQ ID NO: 91478 - RNA, 21 nt, Artificial Sequence
  Synthetic
ucgauggcagaugauauuuua

SEQ ID NO: 91479 - RNA, 23 nt, Artificial Sequence
  Synthetic
ugucgauggcagaugauauuuua

SEQ ID NO: 91480 - RNA, 18 nt, Artificial Sequence
  Synthetic
cauaugccaaguauuuua

SEQ ID NO: 91481 - RNA, 19 nt, Artificial Sequence
  Synthetic
acauaugccaaguauuuua

SEQ ID NO: 91482 - RNA, 20 nt, Artificial Sequence
  Synthetic
uacauaugccaaguauuuua

SEQ ID NO: 91483 - RNA, 21 nt, Artificial Sequence
  Synthetic
auacauaugccaaguauuuua

SEQ ID NO: 91484 - RNA, 22 nt, Artificial Sequence
  Synthetic
uauacauaugccaaguauuuua

SEQ ID NO: 91485 - RNA, 24 nt, Artificial Sequence
  Synthetic
uguauacauaugccaaguauuuua

SEQ ID NO: 91486 - RNA, 18 nt, Artificial Sequence
  Synthetic
acagcaaucaguauuuua

SEQ ID NO: 91487 - RNA, 19 nt, Artificial Sequence
  Synthetic
cacagcaaucaguauuuua

SEQ ID NO: 91488 - RNA, 24 nt, Artificial Sequence
  Synthetic
uggggcacagcaaucaguauuuua

SEQ ID NO: 91489 - RNA, 18 nt, Artificial Sequence
  Synthetic
cuucucagcaaacuuuua

SEQ ID NO: 91490 - RNA, 19 nt, Artificial Sequence
  Synthetic
ucuucucagcaaacuuuua

SEQ ID NO: 91491 - RNA, 20 nt, Artificial Sequence
  Synthetic
uucuucucagcaaacuuuua

SEQ ID NO: 91492 - RNA, 21 nt, Artificial Sequence
  Synthetic
auucuucucagcaaacuuuua

SEQ ID NO: 91493 - RNA, 22 nt, Artificial Sequence
  Synthetic
aauucuucucagcaaacuuuua

SEQ ID NO: 91494 - RNA, 23 nt, Artificial Sequence
  Synthetic
caauucuucucagcaaacuuuua

SEQ ID NO: 91495 - RNA, 24 nt, Artificial Sequence
  Synthetic
ucaauucuucucagcaaacuuuua

SEQ ID NO: 91496 - RNA, 18 nt, Artificial Sequence
  Synthetic
uuucuucuaucacuuuua

SEQ ID NO: 91497 - RNA, 19 nt, Artificial Sequence
  Synthetic
uuuucuucuaucacuuuua

SEQ ID NO: 91498 - RNA, 22 nt, Artificial Sequence
  Synthetic
ugguuuucuucuaucacuuuua

SEQ ID NO: 91499 - RNA, 23 nt, Artificial Sequence
  Synthetic
uugguuuucuucuaucacuuuua

SEQ ID NO: 91500 - RNA, 24 nt, Artificial Sequence
  Synthetic
uuugguuuucuucuaucacuuuua

SEQ ID NO: 91501 - RNA, 18 nt, Artificial Sequence
  Synthetic
auguaauugccccuuuua

SEQ ID NO: 91502 - RNA, 19 nt, Artificial Sequence
  Synthetic
aauguaauugccccuuuua

SEQ ID NO: 91503 - RNA, 20 nt, Artificial Sequence
  Synthetic
aaauguaauugccccuuuua

SEQ ID NO: 91504 - RNA, 22 nt, Artificial Sequence
  Synthetic
ugaaauguaauugccccuuuua

SEQ ID NO: 91505 - RNA, 23 nt, Artificial Sequence
  Synthetic
augaaauguaauugccccuuuua

SEQ ID NO: 91506 - RNA, 24 nt, Artificial Sequence
  Synthetic
caugaaauguaauugccccuuuua

SEQ ID NO: 91507 - RNA, 18 nt, Artificial Sequence
  Synthetic
aaggaguugugccuuuua

SEQ ID NO: 91508 - RNA, 20 nt, Artificial Sequence
  Synthetic
ugaaggaguugugccuuuua

SEQ ID NO: 91509 - RNA, 21 nt, Artificial Sequence
  Synthetic
cugaaggaguugugccuuuua

SEQ ID NO: 91510 - RNA, 22 nt, Artificial Sequence
  Synthetic
ccugaaggaguugugccuuuua

SEQ ID NO: 91511 - RNA, 23 nt, Artificial Sequence
  Synthetic
accugaaggaguugugccuuuua

SEQ ID NO: 91512 - RNA, 24 nt, Artificial Sequence
  Synthetic
uaccugaaggaguugugccuuuua

SEQ ID NO: 91513 - RNA, 18 nt, Artificial Sequence
  Synthetic
caauuccacaagcuuuua

SEQ ID NO: 91514 - RNA, 20 nt, Artificial Sequence
  Synthetic
ugcaauuccacaagcuuuua

SEQ ID NO: 91515 - RNA, 21 nt, Artificial Sequence
  Synthetic
augcaauuccacaagcuuuua

SEQ ID NO: 91516 - RNA, 22 nt, Artificial Sequence
  Synthetic
aaugcaauuccacaagcuuuua

SEQ ID NO: 91517 - RNA, 23 nt, Artificial Sequence
  Synthetic
uaaugcaauuccacaagcuuuua

SEQ ID NO: 91518 - RNA, 24 nt, Artificial Sequence
  Synthetic
uuaaugcaauuccacaagcuuuua

SEQ ID NO: 91519 - RNA, 18 nt, Artificial Sequence
  Synthetic
auauaaaaaaaucuuuua

SEQ ID NO: 91520 - RNA, 19 nt, Artificial Sequence
  Synthetic
cauauaaaaaaaucuuuua

SEQ ID NO: 91521 - RNA, 21 nt, Artificial Sequence
  Synthetic
agcauauaaaaaaaucuuuua

SEQ ID NO: 91522 - RNA, 22 nt, Artificial Sequence
  Synthetic
uagcauauaaaaaaaucuuuua

SEQ ID NO: 91523 - RNA, 23 nt, Artificial Sequence
  Synthetic
uuagcauauaaaaaaaucuuuua

SEQ ID NO: 91524 - RNA, 24 nt, Artificial Sequence
  Synthetic
uuuagcauauaaaaaaaucuuuua

SEQ ID NO: 91525 - RNA, 18 nt, Artificial Sequence
  Synthetic
uaauacuuuauaguuuua

SEQ ID NO: 91526 - RNA, 19 nt, Artificial Sequence
  Synthetic
auaauacuuuauaguuuua

SEQ ID NO: 91527 - RNA, 20 nt, Artificial Sequence
  Synthetic
aauaauacuuuauaguuuua

SEQ ID NO: 91528 - RNA, 21 nt, Artificial Sequence
  Synthetic
uaauaauacuuuauaguuuua

SEQ ID NO: 91529 - RNA, 22 nt, Artificial Sequence
  Synthetic
auaauaauacuuuauaguuuua

SEQ ID NO: 91530 - RNA, 23 nt, Artificial Sequence
  Synthetic
aauaauaauacuuuauaguuuua

SEQ ID NO: 91531 - RNA, 24 nt, Artificial Sequence
  Synthetic
aaauaauaauacuuuauaguuuua

SEQ ID NO: 91532 - RNA, 18 nt, Artificial Sequence
  Synthetic
uuaaaaaguguaguuuua

SEQ ID NO: 91533 - RNA, 20 nt, Artificial Sequence
  Synthetic
uguuaaaaaguguaguuuua

SEQ ID NO: 91534 - RNA, 21 nt, Artificial Sequence
  Synthetic
auguuaaaaaguguaguuuua

SEQ ID NO: 91535 - RNA, 22 nt, Artificial Sequence
  Synthetic
cauguuaaaaaguguaguuuua

SEQ ID NO: 91536 - RNA, 18 nt, Artificial Sequence
  Synthetic
aacggugacaugguuuua

SEQ ID NO: 91537 - RNA, 19 nt, Artificial Sequence
  Synthetic
uaacggugacaugguuuua

SEQ ID NO: 91538 - RNA, 20 nt, Artificial Sequence
  Synthetic
uuaacggugacaugguuuua

SEQ ID NO: 91539 - RNA, 21 nt, Artificial Sequence
  Synthetic
uuuaacggugacaugguuuua

SEQ ID NO: 91540 - RNA, 23 nt, Artificial Sequence
  Synthetic
uguuuaacggugacaugguuuua

SEQ ID NO: 91541 - RNA, 18 nt, Artificial Sequence
  Synthetic
uaugcagauacuguuuua

SEQ ID NO: 91542 - RNA, 19 nt, Artificial Sequence
  Synthetic
cuaugcagauacuguuuua

SEQ ID NO: 91543 - RNA, 20 nt, Artificial Sequence
  Synthetic
acuaugcagauacuguuuua

SEQ ID NO: 91544 - RNA, 21 nt, Artificial Sequence
  Synthetic
cacuaugcagauacuguuuua

SEQ ID NO: 91545 - RNA, 22 nt, Artificial Sequence
  Synthetic
acacuaugcagauacuguuuua

SEQ ID NO: 91546 - RNA, 23 nt, Artificial Sequence
  Synthetic
aacacuaugcagauacuguuuua

SEQ ID NO: 91547 - RNA, 24 nt, Artificial Sequence
  Synthetic
aaacacuaugcagauacuguuuua

SEQ ID NO: 91548 - RNA, 18 nt, Artificial Sequence
  Synthetic
uucagcugaaaauuuuua

SEQ ID NO: 91549 - RNA, 19 nt, Artificial Sequence
  Synthetic
auucagcugaaaauuuuua

SEQ ID NO: 91550 - RNA, 20 nt, Artificial Sequence
  Synthetic
aauucagcugaaaauuuuua

SEQ ID NO: 91551 - RNA, 22 nt, Artificial Sequence
  Synthetic
ugaauucagcugaaaauuuuua

SEQ ID NO: 91552 - RNA, 23 nt, Artificial Sequence
  Synthetic
uugaauucagcugaaaauuuuua

SEQ ID NO: 91553 - RNA, 24 nt, Artificial Sequence
  Synthetic
auugaauucagcugaaaauuuuua

SEQ ID NO: 91554 - RNA, 20 nt, Artificial Sequence
  Synthetic
cggggaaagcuggauuuuua

SEQ ID NO: 91555 - RNA, 21 nt, Artificial Sequence
  Synthetic
ucggggaaagcuggauuuuua

SEQ ID NO: 91556 - RNA, 22 nt, Artificial Sequence
  Synthetic
uucggggaaagcuggauuuuua

SEQ ID NO: 91557 - RNA, 23 nt, Artificial Sequence
  Synthetic
cuucggggaaagcuggauuuuua

SEQ ID NO: 91558 - RNA, 24 nt, Artificial Sequence
  Synthetic
ucuucggggaaagcuggauuuuua

SEQ ID NO: 91559 - RNA, 18 nt, Artificial Sequence
  Synthetic
accuaaauucuauuuuua

SEQ ID NO: 91560 - RNA, 19 nt, Artificial Sequence
  Synthetic
uaccuaaauucuauuuuua

SEQ ID NO: 91561 - RNA, 20 nt, Artificial Sequence
  Synthetic
cuaccuaaauucuauuuuua

SEQ ID NO: 91562 - RNA, 21 nt, Artificial Sequence
  Synthetic
ucuaccuaaauucuauuuuua

SEQ ID NO: 91563 - RNA, 22 nt, Artificial Sequence
  Synthetic
aucuaccuaaauucuauuuuua

SEQ ID NO: 91564 - RNA, 23 nt, Artificial Sequence
  Synthetic
aaucuaccuaaauucuauuuuua

SEQ ID NO: 91565 - RNA, 24 nt, Artificial Sequence
  Synthetic
aaaucuaccuaaauucuauuuuua

SEQ ID NO: 91566 - RNA, 18 nt, Artificial Sequence
  Synthetic
ucuuuguucguauuuuua

SEQ ID NO: 91567 - RNA, 19 nt, Artificial Sequence
  Synthetic
aucuuuguucguauuuuua

SEQ ID NO: 91568 - RNA, 20 nt, Artificial Sequence
  Synthetic
aaucuuuguucguauuuuua

SEQ ID NO: 91569 - RNA, 21 nt, Artificial Sequence
  Synthetic
aaaucuuuguucguauuuuua

SEQ ID NO: 91570 - RNA, 22 nt, Artificial Sequence
  Synthetic
aaaaucuuuguucguauuuuua

SEQ ID NO: 91571 - RNA, 23 nt, Artificial Sequence
  Synthetic
aaaaaucuuuguucguauuuuua

SEQ ID NO: 91572 - RNA, 24 nt, Artificial Sequence
  Synthetic
uaaaaaucuuuguucguauuuuua

SEQ ID NO: 91573 - RNA, 18 nt, Artificial Sequence
  Synthetic
accguggcauuauuuuua

SEQ ID NO: 91574 - RNA, 19 nt, Artificial Sequence
  Synthetic
aaccguggcauuauuuuua

SEQ ID NO: 91575 - RNA, 20 nt, Artificial Sequence
  Synthetic
aaaccguggcauuauuuuua

SEQ ID NO: 91576 - RNA, 22 nt, Artificial Sequence
  Synthetic
agaaaccguggcauuauuuuua

SEQ ID NO: 91577 - RNA, 23 nt, Artificial Sequence
  Synthetic
uagaaaccguggcauuauuuuua

SEQ ID NO: 91578 - RNA, 24 nt, Artificial Sequence
  Synthetic
uuagaaaccguggcauuauuuuua

SEQ ID NO: 91579 - RNA, 21 nt, Artificial Sequence
  Synthetic
uaacuaaacauuuuauuuuua

SEQ ID NO: 91580 - RNA, 24 nt, Artificial Sequence
  Synthetic
agguaacuaaacauuuuauuuuua

SEQ ID NO: 91581 - RNA, 21 nt, Artificial Sequence
  Synthetic
auuauaaauuauuucuuuuua

SEQ ID NO: 91582 - RNA, 22 nt, Artificial Sequence
  Synthetic
aauuauaaauuauuucuuuuua

SEQ ID NO: 91583 - RNA, 23 nt, Artificial Sequence
  Synthetic
aaauuauaaauuauuucuuuuua

SEQ ID NO: 91584 - RNA, 24 nt, Artificial Sequence
  Synthetic
aaaauuauaaauuauuucuuuuua

SEQ ID NO: 91585 - RNA, 22 nt, Artificial Sequence
  Synthetic
agagauuuucauuuucuuuuua

SEQ ID NO: 91586 - RNA, 24 nt, Artificial Sequence
  Synthetic
ugagagauuuucauuuucuuuuua

SEQ ID NO: 91587 - RNA, 22 nt, Artificial Sequence
  Synthetic
agggguccaaaacagguuuuua

SEQ ID NO: 91588 - RNA, 23 nt, Artificial Sequence
  Synthetic
uagggguccaaaacagguuuuua

SEQ ID NO: 91589 - RNA, 24 nt, Artificial Sequence
  Synthetic
auagggguccaaaacagguuuuua

SEQ ID NO: 91590 - RNA, 21 nt, Artificial Sequence
  Synthetic
uaaaaaccucacaauuuuuua

SEQ ID NO: 91591 - RNA, 22 nt, Artificial Sequence
  Synthetic
auaaaaaccucacaauuuuuua

SEQ ID NO: 91592 - RNA, 23 nt, Artificial Sequence
  Synthetic
uauaaaaaccucacaauuuuuua

SEQ ID NO: 91593 - RNA, 24 nt, Artificial Sequence
  Synthetic
uuauaaaaaccucacaauuuuuua

SEQ ID NO: 91594 - RNA, 18 nt, Artificial Sequence
  Synthetic
cucuaaccuaauuuuuua

SEQ ID NO: 91595 - RNA, 19 nt, Artificial Sequence
  Synthetic
ucucuaaccuaauuuuuua

SEQ ID NO: 91596 - RNA, 20 nt, Artificial Sequence
  Synthetic
uucucuaaccuaauuuuuua

SEQ ID NO: 91597 - RNA, 22 nt, Artificial Sequence
  Synthetic
aguucucuaaccuaauuuuuua

SEQ ID NO: 91598 - RNA, 23 nt, Artificial Sequence
  Synthetic
uaguucucuaaccuaauuuuuua

SEQ ID NO: 91599 - RNA, 24 nt, Artificial Sequence
  Synthetic
uuaguucucuaaccuaauuuuuua

SEQ ID NO: 91600 - RNA, 18 nt, Artificial Sequence
  Synthetic
uugauaaugcauuuuuua

SEQ ID NO: 91601 - RNA, 19 nt, Artificial Sequence
  Synthetic
cuugauaaugcauuuuuua

SEQ ID NO: 91602 - RNA, 22 nt, Artificial Sequence
  Synthetic
uggcuugauaaugcauuuuuua

SEQ ID NO: 91603 - RNA, 23 nt, Artificial Sequence
  Synthetic
uuggcuugauaaugcauuuuuua

SEQ ID NO: 91604 - RNA, 21 nt, Artificial Sequence
  Synthetic
aucugauguuuuaguuuuuua

SEQ ID NO: 91605 - RNA, 22 nt, Artificial Sequence
  Synthetic
aaucugauguuuuaguuuuuua

SEQ ID NO: 91606 - RNA, 24 nt, Artificial Sequence
  Synthetic
ugaaucugauguuuuaguuuuuua

SEQ ID NO: 91607 - RNA, 18 nt, Artificial Sequence
  Synthetic
aaugguucauguuuuuua

SEQ ID NO: 91608 - RNA, 20 nt, Artificial Sequence
  Synthetic
ugaaugguucauguuuuuua

SEQ ID NO: 91609 - RNA, 21 nt, Artificial Sequence
  Synthetic
cugaaugguucauguuuuuua

SEQ ID NO: 91610 - RNA, 23 nt, Artificial Sequence
  Synthetic
ugcugaaugguucauguuuuuua

SEQ ID NO: 91611 - RNA, 21 nt, Artificial Sequence
  Synthetic
auaguuaucauuuuuuuuuua

SEQ ID NO: 91612 - RNA, 22 nt, Artificial Sequence
  Synthetic
cauaguuaucauuuuuuuuuua

SEQ ID NO: 91613 - RNA, 24 nt, Artificial Sequence
  Synthetic
agcauaguuaucauuuuuuuuuua

SEQ ID NO: 91614 - RNA, 19 nt, Artificial Sequence
  Synthetic
agagaggauuacaaaaaac

SEQ ID NO: 91615 - RNA, 20 nt, Artificial Sequence
  Synthetic
aagagaggauuacaaaaaac

SEQ ID NO: 91616 - RNA, 22 nt, Artificial Sequence
  Synthetic
agaagagaggauuacaaaaaac

SEQ ID NO: 91617 - RNA, 23 nt, Artificial Sequence
  Synthetic
uagaagagaggauuacaaaaaac

SEQ ID NO: 91618 - RNA, 24 nt, Artificial Sequence
  Synthetic
auagaagagaggauuacaaaaaac

SEQ ID NO: 91619 - RNA, 21 nt, Artificial Sequence
  Synthetic
auuaaugauuuaaacaaaaac

SEQ ID NO: 91620 - RNA, 22 nt, Artificial Sequence
  Synthetic
uauuaaugauuuaaacaaaaac

SEQ ID NO: 91621 - RNA, 23 nt, Artificial Sequence
  Synthetic
auauuaaugauuuaaacaaaaac

SEQ ID NO: 91622 - RNA, 24 nt, Artificial Sequence
  Synthetic
cauauuaaugauuuaaacaaaaac

SEQ ID NO: 91623 - RNA, 18 nt, Artificial Sequence
  Synthetic
ugaagcagugggaaaaac

SEQ ID NO: 91624 - RNA, 19 nt, Artificial Sequence
  Synthetic
uugaagcagugggaaaaac

SEQ ID NO: 91625 - RNA, 20 nt, Artificial Sequence
  Synthetic
uuugaagcagugggaaaaac

SEQ ID NO: 91626 - RNA, 21 nt, Artificial Sequence
  Synthetic
auuugaagcagugggaaaaac

SEQ ID NO: 91627 - RNA, 22 nt, Artificial Sequence
  Synthetic
aauuugaagcagugggaaaaac

SEQ ID NO: 91628 - RNA, 23 nt, Artificial Sequence
  Synthetic
aaauuugaagcagugggaaaaac

SEQ ID NO: 91629 - RNA, 18 nt, Artificial Sequence
  Synthetic
auagcucuccaacaaaac

SEQ ID NO: 91630 - RNA, 19 nt, Artificial Sequence
  Synthetic
cauagcucuccaacaaaac

SEQ ID NO: 91631 - RNA, 20 nt, Artificial Sequence
  Synthetic
ucauagcucuccaacaaaac

SEQ ID NO: 91632 - RNA, 21 nt, Artificial Sequence
  Synthetic
uucauagcucuccaacaaaac

SEQ ID NO: 91633 - RNA, 22 nt, Artificial Sequence
  Synthetic
uuucauagcucuccaacaaaac

SEQ ID NO: 91634 - RNA, 23 nt, Artificial Sequence
  Synthetic
auuucauagcucuccaacaaaac

SEQ ID NO: 91635 - RNA, 24 nt, Artificial Sequence
  Synthetic
uauuucauagcucuccaacaaaac

SEQ ID NO: 91636 - RNA, 18 nt, Artificial Sequence
  Synthetic
ugaagauguccacaaaac

SEQ ID NO: 91637 - RNA, 19 nt, Artificial Sequence
  Synthetic
augaagauguccacaaaac

SEQ ID NO: 91638 - RNA, 20 nt, Artificial Sequence
  Synthetic
aaugaagauguccacaaaac

SEQ ID NO: 91639 - RNA, 22 nt, Artificial Sequence
  Synthetic
agaaugaagauguccacaaaac

SEQ ID NO: 91640 - RNA, 23 nt, Artificial Sequence
  Synthetic
uagaaugaagauguccacaaaac

SEQ ID NO: 91641 - RNA, 18 nt, Artificial Sequence
  Synthetic
aauccugauggacaaaac

SEQ ID NO: 91642 - RNA, 20 nt, Artificial Sequence
  Synthetic
agaauccugauggacaaaac

SEQ ID NO: 91643 - RNA, 22 nt, Artificial Sequence
  Synthetic
agagaauccugauggacaaaac

SEQ ID NO: 91644 - RNA, 23 nt, Artificial Sequence
  Synthetic
cagagaauccugauggacaaaac

SEQ ID NO: 91645 - RNA, 24 nt, Artificial Sequence
  Synthetic
ccagagaauccugauggacaaaac

SEQ ID NO: 91646 - RNA, 18 nt, Artificial Sequence
  Synthetic
aauuuuuuaaaccaaaac

SEQ ID NO: 91647 - RNA, 19 nt, Artificial Sequence
  Synthetic
uaauuuuuuaaaccaaaac

SEQ ID NO: 91648 - RNA, 20 nt, Artificial Sequence
  Synthetic
cuaauuuuuuaaaccaaaac

SEQ ID NO: 91649 - RNA, 21 nt, Artificial Sequence
  Synthetic
ccuaauuuuuuaaaccaaaac

SEQ ID NO: 91650 - RNA, 22 nt, Artificial Sequence
  Synthetic
accuaauuuuuuaaaccaaaac

SEQ ID NO: 91651 - RNA, 23 nt, Artificial Sequence
  Synthetic
aaccuaauuuuuuaaaccaaaac

SEQ ID NO: 91652 - RNA, 24 nt, Artificial Sequence
  Synthetic
uaaccuaauuuuuuaaaccaaaac

SEQ ID NO: 91653 - RNA, 18 nt, Artificial Sequence
  Synthetic
uggggaggacuucaaaac

SEQ ID NO: 91654 - RNA, 20 nt, Artificial Sequence
  Synthetic
aguggggaggacuucaaaac

SEQ ID NO: 91655 - RNA, 23 nt, Artificial Sequence
  Synthetic
aggaguggggaggacuucaaaac

SEQ ID NO: 91656 - RNA, 24 nt, Artificial Sequence
  Synthetic
aaggaguggggaggacuucaaaac

SEQ ID NO: 91657 - RNA, 21 nt, Artificial Sequence
  Synthetic
auaaagaagcugaaagaaaac

SEQ ID NO: 91658 - RNA, 22 nt, Artificial Sequence
  Synthetic
uauaaagaagcugaaagaaaac

SEQ ID NO: 91659 - RNA, 23 nt, Artificial Sequence
  Synthetic
auauaaagaagcugaaagaaaac

SEQ ID NO: 91660 - RNA, 18 nt, Artificial Sequence
  Synthetic
ugcucugaggcagaaaac

SEQ ID NO: 91661 - RNA, 19 nt, Artificial Sequence
  Synthetic
cugcucugaggcagaaaac

SEQ ID NO: 91662 - RNA, 21 nt, Artificial Sequence
  Synthetic
ugcugcucugaggcagaaaac

SEQ ID NO: 91663 - RNA, 22 nt, Artificial Sequence
  Synthetic
augcugcucugaggcagaaaac

SEQ ID NO: 91664 - RNA, 24 nt, Artificial Sequence
  Synthetic
ugaugcugcucugaggcagaaaac

SEQ ID NO: 91665 - RNA, 18 nt, Artificial Sequence
  Synthetic
cgagaagaaugagaaaac

SEQ ID NO: 91666 - RNA, 21 nt, Artificial Sequence
  Synthetic
aggcgagaagaaugagaaaac

SEQ ID NO: 91667 - RNA, 22 nt, Artificial Sequence
  Synthetic
aaggcgagaagaaugagaaaac

SEQ ID NO: 91668 - RNA, 23 nt, Artificial Sequence
  Synthetic
caaggcgagaagaaugagaaaac

SEQ ID NO: 91669 - RNA, 19 nt, Artificial Sequence
  Synthetic
ugcaauggagaaggaaaac

SEQ ID NO: 91670 - RNA, 20 nt, Artificial Sequence
  Synthetic
augcaauggagaaggaaaac

SEQ ID NO: 91671 - RNA, 21 nt, Artificial Sequence
  Synthetic
caugcaauggagaaggaaaac

SEQ ID NO: 91672 - RNA, 22 nt, Artificial Sequence
  Synthetic
ccaugcaauggagaaggaaaac

SEQ ID NO: 91673 - RNA, 24 nt, Artificial Sequence
  Synthetic
agccaugcaauggagaaggaaaac

SEQ ID NO: 91674 - RNA, 18 nt, Artificial Sequence
  Synthetic
uaagacgggcaggaaaac

SEQ ID NO: 91675 - RNA, 21 nt, Artificial Sequence
  Synthetic
cgguaagacgggcaggaaaac

SEQ ID NO: 91676 - RNA, 22 nt, Artificial Sequence
  Synthetic
ccgguaagacgggcaggaaaac

SEQ ID NO: 91677 - RNA, 23 nt, Artificial Sequence
  Synthetic
accgguaagacgggcaggaaaac

SEQ ID NO: 91678 - RNA, 18 nt, Artificial Sequence
  Synthetic
aaaguccaucaggaaaac

SEQ ID NO: 91679 - RNA, 19 nt, Artificial Sequence
  Synthetic
aaaaguccaucaggaaaac

SEQ ID NO: 91680 - RNA, 20 nt, Artificial Sequence
  Synthetic
caaaaguccaucaggaaaac

SEQ ID NO: 91681 - RNA, 21 nt, Artificial Sequence
  Synthetic
acaaaaguccaucaggaaaac

SEQ ID NO: 91682 - RNA, 22 nt, Artificial Sequence
  Synthetic
aacaaaaguccaucaggaaaac

SEQ ID NO: 91683 - RNA, 23 nt, Artificial Sequence
  Synthetic
aaacaaaaguccaucaggaaaac

SEQ ID NO: 91684 - RNA, 18 nt, Artificial Sequence
  Synthetic
auaugcagaugggaaaac

SEQ ID NO: 91685 - RNA, 19 nt, Artificial Sequence
  Synthetic
aauaugcagaugggaaaac

SEQ ID NO: 91686 - RNA, 20 nt, Artificial Sequence
  Synthetic
aaauaugcagaugggaaaac

SEQ ID NO: 91687 - RNA, 22 nt, Artificial Sequence
  Synthetic
agaaauaugcagaugggaaaac

SEQ ID NO: 91688 - RNA, 24 nt, Artificial Sequence
  Synthetic
agagaaauaugcagaugggaaaac

SEQ ID NO: 91689 - RNA, 18 nt, Artificial Sequence
  Synthetic
uucccaaauauggaaaac

SEQ ID NO: 91690 - RNA, 19 nt, Artificial Sequence
  Synthetic
uuucccaaauauggaaaac

SEQ ID NO: 91691 - RNA, 20 nt, Artificial Sequence
  Synthetic
uuuucccaaauauggaaaac

SEQ ID NO: 91692 - RNA, 21 nt, Artificial Sequence
  Synthetic
uuuuucccaaauauggaaaac

SEQ ID NO: 91693 - RNA, 22 nt, Artificial Sequence
  Synthetic
uuuuuucccaaauauggaaaac

SEQ ID NO: 91694 - RNA, 24 nt, Artificial Sequence
  Synthetic
aguuuuuucccaaauauggaaaac

SEQ ID NO: 91695 - RNA, 21 nt, Artificial Sequence
  Synthetic
ucaguguauucaaaauaaaac

SEQ ID NO: 91696 - RNA, 22 nt, Artificial Sequence
  Synthetic
uucaguguauucaaaauaaaac

SEQ ID NO: 91697 - RNA, 23 nt, Artificial Sequence
  Synthetic
auucaguguauucaaaauaaaac

SEQ ID NO: 91698 - RNA, 24 nt, Artificial Sequence
  Synthetic
aauucaguguauucaaaauaaaac

SEQ ID NO: 91699 - RNA, 21 nt, Artificial Sequence
  Synthetic
cauuuaauguuaaaauaaaac

SEQ ID NO: 91700 - RNA, 24 nt, Artificial Sequence
  Synthetic
aggcauuuaauguuaaaauaaaac

SEQ ID NO: 91701 - RNA, 18 nt, Artificial Sequence
  Synthetic
acugguuuagacuaaaac

SEQ ID NO: 91702 - RNA, 21 nt, Artificial Sequence
  Synthetic
uggacugguuuagacuaaaac

SEQ ID NO: 91703 - RNA, 22 nt, Artificial Sequence
  Synthetic
uuggacugguuuagacuaaaac

SEQ ID NO: 91704 - RNA, 24 nt, Artificial Sequence
  Synthetic
aguuggacugguuuagacuaaaac

SEQ ID NO: 91705 - RNA, 21 nt, Artificial Sequence
  Synthetic
ugacuaguauuuaucuaaaac

SEQ ID NO: 91706 - RNA, 22 nt, Artificial Sequence
  Synthetic
uugacuaguauuuaucuaaaac

SEQ ID NO: 91707 - RNA, 23 nt, Artificial Sequence
  Synthetic
auugacuaguauuuaucuaaaac

SEQ ID NO: 91708 - RNA, 24 nt, Artificial Sequence
  Synthetic
uauugacuaguauuuaucuaaaac

SEQ ID NO: 91709 - RNA, 18 nt, Artificial Sequence
  Synthetic
auuaagcacaauuaaaac

SEQ ID NO: 91710 - RNA, 19 nt, Artificial Sequence
  Synthetic
uauuaagcacaauuaaaac

SEQ ID NO: 91711 - RNA, 21 nt, Artificial Sequence
  Synthetic
uguauuaagcacaauuaaaac

SEQ ID NO: 91712 - RNA, 22 nt, Artificial Sequence
  Synthetic
auguauuaagcacaauuaaaac

SEQ ID NO: 91713 - RNA, 23 nt, Artificial Sequence
  Synthetic
uauguauuaagcacaauuaaaac

SEQ ID NO: 91714 - RNA, 24 nt, Artificial Sequence
  Synthetic
auauguauuaagcacaauuaaaac

SEQ ID NO: 91715 - RNA, 18 nt, Artificial Sequence
  Synthetic
ugucugugguauuaaaac

SEQ ID NO: 91716 - RNA, 19 nt, Artificial Sequence
  Synthetic
augucugugguauuaaaac

SEQ ID NO: 91717 - RNA, 20 nt, Artificial Sequence
  Synthetic
caugucugugguauuaaaac

SEQ ID NO: 91718 - RNA, 22 nt, Artificial Sequence
  Synthetic
agcaugucugugguauuaaaac

SEQ ID NO: 91719 - RNA, 23 nt, Artificial Sequence
  Synthetic
aagcaugucugugguauuaaaac

SEQ ID NO: 91720 - RNA, 24 nt, Artificial Sequence
  Synthetic
aaagcaugucugugguauuaaaac

SEQ ID NO: 91721 - RNA, 21 nt, Artificial Sequence
  Synthetic
agagacuuucgauguuaaaac

SEQ ID NO: 91722 - RNA, 23 nt, Artificial Sequence
  Synthetic
ugagagacuuucgauguuaaaac

SEQ ID NO: 91723 - RNA, 24 nt, Artificial Sequence
  Synthetic
augagagacuuucgauguuaaaac

SEQ ID NO: 91724 - RNA, 19 nt, Artificial Sequence
  Synthetic
ugauagcagaagcacaaac

SEQ ID NO: 91725 - RNA, 20 nt, Artificial Sequence
  Synthetic
augauagcagaagcacaaac

SEQ ID NO: 91726 - RNA, 21 nt, Artificial Sequence
  Synthetic
aaugauagcagaagcacaaac

SEQ ID NO: 91727 - RNA, 23 nt, Artificial Sequence
  Synthetic
agaaugauagcagaagcacaaac

SEQ ID NO: 91728 - RNA, 24 nt, Artificial Sequence
  Synthetic
cagaaugauagcagaagcacaaac

SEQ ID NO: 91729 - RNA, 18 nt, Artificial Sequence
  Synthetic
auggauacaaagacaaac

SEQ ID NO: 91730 - RNA, 19 nt, Artificial Sequence
  Synthetic
uauggauacaaagacaaac

SEQ ID NO: 91731 - RNA, 20 nt, Artificial Sequence
  Synthetic
uuauggauacaaagacaaac

SEQ ID NO: 91732 - RNA, 22 nt, Artificial Sequence
  Synthetic
aguuauggauacaaagacaaac

SEQ ID NO: 91733 - RNA, 23 nt, Artificial Sequence
  Synthetic
aaguuauggauacaaagacaaac

SEQ ID NO: 91734 - RNA, 18 nt, Artificial Sequence
  Synthetic
cuccucgcugucccaaac

SEQ ID NO: 91735 - RNA, 19 nt, Artificial Sequence
  Synthetic
ucuccucgcugucccaaac

SEQ ID NO: 91736 - RNA, 20 nt, Artificial Sequence
  Synthetic
uucuccucgcugucccaaac

SEQ ID NO: 91737 - RNA, 21 nt, Artificial Sequence
  Synthetic
uuucuccucgcugucccaaac

SEQ ID NO: 91738 - RNA, 22 nt, Artificial Sequence
  Synthetic
auuucuccucgcugucccaaac

SEQ ID NO: 91739 - RNA, 23 nt, Artificial Sequence
  Synthetic
aauuucuccucgcugucccaaac

SEQ ID NO: 91740 - RNA, 18 nt, Artificial Sequence
  Synthetic
auaaucuauuauccaaac

SEQ ID NO: 91741 - RNA, 20 nt, Artificial Sequence
  Synthetic
ugauaaucuauuauccaaac

SEQ ID NO: 91742 - RNA, 22 nt, Artificial Sequence
  Synthetic
agugauaaucuauuauccaaac

SEQ ID NO: 91743 - RNA, 24 nt, Artificial Sequence
  Synthetic
agagugauaaucuauuauccaaac

SEQ ID NO: 91744 - RNA, 18 nt, Artificial Sequence
  Synthetic
auuugaagacaagcaaac

SEQ ID NO: 91745 - RNA, 19 nt, Artificial Sequence
  Synthetic
aauuugaagacaagcaaac

SEQ ID NO: 91746 - RNA, 20 nt, Artificial Sequence
  Synthetic
aaauuugaagacaagcaaac

SEQ ID NO: 91747 - RNA, 21 nt, Artificial Sequence
  Synthetic
aaaauuugaagacaagcaaac

SEQ ID NO: 91748 - RNA, 22 nt, Artificial Sequence
  Synthetic
caaaauuugaagacaagcaaac

SEQ ID NO: 91749 - RNA, 23 nt, Artificial Sequence
  Synthetic
acaaaauuugaagacaagcaaac

SEQ ID NO: 91750 - RNA, 24 nt, Artificial Sequence
  Synthetic
uacaaaauuugaagacaagcaaac

SEQ ID NO: 91751 - RNA, 18 nt, Artificial Sequence
  Synthetic
cugaaugguaaugcaaac

SEQ ID NO: 91752 - RNA, 19 nt, Artificial Sequence
  Synthetic
acugaaugguaaugcaaac

SEQ ID NO: 91753 - RNA, 21 nt, Artificial Sequence
  Synthetic
agacugaaugguaaugcaaac

SEQ ID NO: 91754 - RNA, 22 nt, Artificial Sequence
  Synthetic
aagacugaaugguaaugcaaac

SEQ ID NO: 91755 - RNA, 23 nt, Artificial Sequence
  Synthetic
uaagacugaaugguaaugcaaac

SEQ ID NO: 91756 - RNA, 24 nt, Artificial Sequence
  Synthetic
uuaagacugaaugguaaugcaaac

SEQ ID NO: 91757 - RNA, 21 nt, Artificial Sequence
  Synthetic
cauaacuuaaaaaaaucaaac

SEQ ID NO: 91758 - RNA, 22 nt, Artificial Sequence
  Synthetic
acauaacuuaaaaaaaucaaac

SEQ ID NO: 91759 - RNA, 23 nt, Artificial Sequence
  Synthetic
uacauaacuuaaaaaaaucaaac

SEQ ID NO: 91760 - RNA, 24 nt, Artificial Sequence
  Synthetic
uuacauaacuuaaaaaaaucaaac

SEQ ID NO: 91761 - RNA, 18 nt, Artificial Sequence
  Synthetic
uuuuucccugcaucaaac

SEQ ID NO: 91762 - RNA, 19 nt, Artificial Sequence
  Synthetic
auuuuucccugcaucaaac

SEQ ID NO: 91763 - RNA, 20 nt, Artificial Sequence
  Synthetic
uauuuuucccugcaucaaac

SEQ ID NO: 91764 - RNA, 21 nt, Artificial Sequence
  Synthetic
uuauuuuucccugcaucaaac

SEQ ID NO: 91765 - RNA, 22 nt, Artificial Sequence
  Synthetic
uuuauuuuucccugcaucaaac

SEQ ID NO: 91766 - RNA, 23 nt, Artificial Sequence
  Synthetic
uuuuauuuuucccugcaucaaac

SEQ ID NO: 91767 - RNA, 24 nt, Artificial Sequence
  Synthetic
uuuuuauuuuucccugcaucaaac

SEQ ID NO: 91768 - RNA, 18 nt, Artificial Sequence
  Synthetic
aauauucagaauucaaac

SEQ ID NO: 91769 - RNA, 21 nt, Artificial Sequence
  Synthetic
aggaauauucagaauucaaac

SEQ ID NO: 91770 - RNA, 22 nt, Artificial Sequence
  Synthetic
uaggaauauucagaauucaaac

SEQ ID NO: 91771 - RNA, 23 nt, Artificial Sequence
  Synthetic
uuaggaauauucagaauucaaac

SEQ ID NO: 91772 - RNA, 24 nt, Artificial Sequence
  Synthetic
uuuaggaauauucagaauucaaac

SEQ ID NO: 91773 - RNA, 18 nt, Artificial Sequence
  Synthetic
uucuggaauuauucaaac

SEQ ID NO: 91774 - RNA, 19 nt, Artificial Sequence
  Synthetic
auucuggaauuauucaaac

SEQ ID NO: 91775 - RNA, 21 nt, Artificial Sequence
  Synthetic
ugauucuggaauuauucaaac

SEQ ID NO: 91776 - RNA, 22 nt, Artificial Sequence
  Synthetic
uugauucuggaauuauucaaac

SEQ ID NO: 91777 - RNA, 23 nt, Artificial Sequence
  Synthetic
uuugauucuggaauuauucaaac

SEQ ID NO: 91778 - RNA, 24 nt, Artificial Sequence
  Synthetic
auuugauucuggaauuauucaaac

SEQ ID NO: 91779 - RNA, 18 nt, Artificial Sequence
  Synthetic
ucucuagagacuucaaac

SEQ ID NO: 91780 - RNA, 19 nt, Artificial Sequence
  Synthetic
uucucuagagacuucaaac

SEQ ID NO: 91781 - RNA, 20 nt, Artificial Sequence
  Synthetic
cuucucuagagacuucaaac

SEQ ID NO: 91782 - RNA, 21 nt, Artificial Sequence
  Synthetic
ccuucucuagagacuucaaac

SEQ ID NO: 91783 - RNA, 22 nt, Artificial Sequence
  Synthetic
accuucucuagagacuucaaac

SEQ ID NO: 91784 - RNA, 18 nt, Artificial Sequence
  Synthetic
uauugaagaauuucaaac

SEQ ID NO: 91785 - RNA, 21 nt, Artificial Sequence
  Synthetic
agguauugaagaauuucaaac

SEQ ID NO: 91786 - RNA, 22 nt, Artificial Sequence
  Synthetic
aagguauugaagaauuucaaac

SEQ ID NO: 91787 - RNA, 23 nt, Artificial Sequence
  Synthetic
aaagguauugaagaauuucaaac

SEQ ID NO: 91788 - RNA, 24 nt, Artificial Sequence
  Synthetic
uaaagguauugaagaauuucaaac

SEQ ID NO: 91789 - RNA, 21 nt, Artificial Sequence
  Synthetic
agagaagagagaaaaagaaac

SEQ ID NO: 91790 - RNA, 24 nt, Artificial Sequence
  Synthetic
uggagagaagagagaaaaagaaac

SEQ ID NO: 91791 - RNA, 21 nt, Artificial Sequence
  Synthetic
aggauaaagcaggaaagaaac

SEQ ID NO: 91792 - RNA, 22 nt, Artificial Sequence
  Synthetic
aaggauaaagcaggaaagaaac

SEQ ID NO: 91793 - RNA, 23 nt, Artificial Sequence
  Synthetic
aaaggauaaagcaggaaagaaac

SEQ ID NO: 91794 - RNA, 24 nt, Artificial Sequence
  Synthetic
aaaaggauaaagcaggaaagaaac

SEQ ID NO: 91795 - RNA, 18 nt, Artificial Sequence
  Synthetic
ucuucuaguuacagaaac

SEQ ID NO: 91796 - RNA, 20 nt, Artificial Sequence
  Synthetic
ugucuucuaguuacagaaac

SEQ ID NO: 91797 - RNA, 21 nt, Artificial Sequence
  Synthetic
augucuucuaguuacagaaac

SEQ ID NO: 91798 - RNA, 22 nt, Artificial Sequence
  Synthetic
uaugucuucuaguuacagaaac

SEQ ID NO: 91799 - RNA, 24 nt, Artificial Sequence
  Synthetic
uguaugucuucuaguuacagaaac

SEQ ID NO: 91800 - RNA, 18 nt, Artificial Sequence
  Synthetic
ugucgucccaagagaaac

SEQ ID NO: 91801 - RNA, 19 nt, Artificial Sequence
  Synthetic
uugucgucccaagagaaac

SEQ ID NO: 91802 - RNA, 21 nt, Artificial Sequence
  Synthetic
aguugucgucccaagagaaac

SEQ ID NO: 91803 - RNA, 23 nt, Artificial Sequence
  Synthetic
agaguugucgucccaagagaaac

SEQ ID NO: 91804 - RNA, 24 nt, Artificial Sequence
  Synthetic
cagaguugucgucccaagagaaac

SEQ ID NO: 91805 - RNA, 18 nt, Artificial Sequence
  Synthetic
ugacacuggaagagaaac

SEQ ID NO: 91806 - RNA, 19 nt, Artificial Sequence
  Synthetic
uugacacuggaagagaaac

SEQ ID NO: 91807 - RNA, 21 nt, Artificial Sequence
  Synthetic
aguugacacuggaagagaaac

SEQ ID NO: 91808 - RNA, 22 nt, Artificial Sequence
  Synthetic
caguugacacuggaagagaaac

SEQ ID NO: 91809 - RNA, 23 nt, Artificial Sequence
  Synthetic
ucaguugacacuggaagagaaac

SEQ ID NO: 91810 - RNA, 24 nt, Artificial Sequence
  Synthetic
aucaguugacacuggaagagaaac

SEQ ID NO: 91811 - RNA, 21 nt, Artificial Sequence
  Synthetic
auuucagguuuuuggagaaac

SEQ ID NO: 91812 - RNA, 23 nt, Artificial Sequence
  Synthetic
ugauuucagguuuuuggagaaac

SEQ ID NO: 91813 - RNA, 24 nt, Artificial Sequence
  Synthetic
uugauuucagguuuuuggagaaac

SEQ ID NO: 91814 - RNA, 18 nt, Artificial Sequence
  Synthetic
uuuaaaccugagcgaaac

SEQ ID NO: 91815 - RNA, 20 nt, Artificial Sequence
  Synthetic
uguuuaaaccugagcgaaac

SEQ ID NO: 91816 - RNA, 21 nt, Artificial Sequence
  Synthetic
cuguuuaaaccugagcgaaac

SEQ ID NO: 91817 - RNA, 22 nt, Artificial Sequence
  Synthetic
acuguuuaaaccugagcgaaac

SEQ ID NO: 91818 - RNA, 23 nt, Artificial Sequence
  Synthetic
uacuguuuaaaccugagcgaaac

SEQ ID NO: 91819 - RNA, 24 nt, Artificial Sequence
  Synthetic
cuacuguuuaaaccugagcgaaac

SEQ ID NO: 91820 - RNA, 18 nt, Artificial Sequence
  Synthetic
uugaauugagguggaaac

SEQ ID NO: 91821 - RNA, 19 nt, Artificial Sequence
  Synthetic
uuugaauugagguggaaac

SEQ ID NO: 91822 - RNA, 20 nt, Artificial Sequence
  Synthetic
auuugaauugagguggaaac

SEQ ID NO: 91823 - RNA, 21 nt, Artificial Sequence
  Synthetic
cauuugaauugagguggaaac

SEQ ID NO: 91824 - RNA, 22 nt, Artificial Sequence
  Synthetic
ccauuugaauugagguggaaac

SEQ ID NO: 91825 - RNA, 23 nt, Artificial Sequence
  Synthetic
accauuugaauugagguggaaac

SEQ ID NO: 91826 - RNA, 18 nt, Artificial Sequence
  Synthetic
acaugaaagagaugaaac

SEQ ID NO: 91827 - RNA, 20 nt, Artificial Sequence
  Synthetic
agacaugaaagagaugaaac

SEQ ID NO: 91828 - RNA, 19 nt, Artificial Sequence
  Synthetic
agggacagggauaugaaac

SEQ ID NO: 91829 - RNA, 20 nt, Artificial Sequence
  Synthetic
aagggacagggauaugaaac

SEQ ID NO: 91830 - RNA, 21 nt, Artificial Sequence
  Synthetic
aaagggacagggauaugaaac

SEQ ID NO: 91831 - RNA, 22 nt, Artificial Sequence
  Synthetic
uaaagggacagggauaugaaac

SEQ ID NO: 91832 - RNA, 23 nt, Artificial Sequence
  Synthetic
auaaagggacagggauaugaaac

SEQ ID NO: 91833 - RNA, 19 nt, Artificial Sequence
  Synthetic
agagagaaauuuaugaaac

SEQ ID NO: 91834 - RNA, 20 nt, Artificial Sequence
  Synthetic
aagagagaaauuuaugaaac

SEQ ID NO: 91835 - RNA, 21 nt, Artificial Sequence
  Synthetic
caagagagaaauuuaugaaac

SEQ ID NO: 91836 - RNA, 22 nt, Artificial Sequence
  Synthetic
ccaagagagaaauuuaugaaac

SEQ ID NO: 91837 - RNA, 24 nt, Artificial Sequence
  Synthetic
ugccaagagagaaauuuaugaaac

SEQ ID NO: 91838 - RNA, 18 nt, Artificial Sequence
  Synthetic
acugauaucaacugaaac

SEQ ID NO: 91839 - RNA, 19 nt, Artificial Sequence
  Synthetic
aacugauaucaacugaaac

SEQ ID NO: 91840 - RNA, 20 nt, Artificial Sequence
  Synthetic
caacugauaucaacugaaac

SEQ ID NO: 91841 - RNA, 21 nt, Artificial Sequence
  Synthetic
ccaacugauaucaacugaaac

SEQ ID NO: 91842 - RNA, 22 nt, Artificial Sequence
  Synthetic
cccaacugauaucaacugaaac

SEQ ID NO: 91843 - RNA, 23 nt, Artificial Sequence
  Synthetic
ccccaacugauaucaacugaaac

SEQ ID NO: 91844 - RNA, 24 nt, Artificial Sequence
  Synthetic
accccaacugauaucaacugaaac

SEQ ID NO: 91845 - RNA, 18 nt, Artificial Sequence
  Synthetic
uacaaauaagugugaaac

SEQ ID NO: 91846 - RNA, 19 nt, Artificial Sequence
  Synthetic
uuacaaauaagugugaaac

SEQ ID NO: 91847 - RNA, 20 nt, Artificial Sequence
  Synthetic
uuuacaaauaagugugaaac

SEQ ID NO: 91848 - RNA, 21 nt, Artificial Sequence
  Synthetic
uuuuacaaauaagugugaaac

SEQ ID NO: 91849 - RNA, 23 nt, Artificial Sequence
  Synthetic
aguuuuacaaauaagugugaaac

SEQ ID NO: 91850 - RNA, 19 nt, Artificial Sequence
  Synthetic
ugauguuaagaauugaaac

SEQ ID NO: 91851 - RNA, 20 nt, Artificial Sequence
  Synthetic
uugauguuaagaauugaaac

SEQ ID NO: 91852 - RNA, 21 nt, Artificial Sequence
  Synthetic
uuugauguuaagaauugaaac

SEQ ID NO: 91853 - RNA, 22 nt, Artificial Sequence
  Synthetic
uuuugauguuaagaauugaaac

SEQ ID NO: 91854 - RNA, 23 nt, Artificial Sequence
  Synthetic
uuuuugauguuaagaauugaaac

SEQ ID NO: 91855 - RNA, 18 nt, Artificial Sequence
  Synthetic
auuuaucauccuugaaac

SEQ ID NO: 91856 - RNA, 20 nt, Artificial Sequence
  Synthetic
agauuuaucauccuugaaac

SEQ ID NO: 91857 - RNA, 21 nt, Artificial Sequence
  Synthetic
aagauuuaucauccuugaaac

SEQ ID NO: 91858 - RNA, 22 nt, Artificial Sequence
  Synthetic
uaagauuuaucauccuugaaac

SEQ ID NO: 91859 - RNA, 23 nt, Artificial Sequence
  Synthetic
cuaagauuuaucauccuugaaac

SEQ ID NO: 91860 - RNA, 24 nt, Artificial Sequence
  Synthetic
acuaagauuuaucauccuugaaac

SEQ ID NO: 91861 - RNA, 18 nt, Artificial Sequence
  Synthetic
uuagcugaaauuugaaac

SEQ ID NO: 91862 - RNA, 20 nt, Artificial Sequence
  Synthetic
aguuagcugaaauuugaaac

SEQ ID NO: 91863 - RNA, 21 nt, Artificial Sequence
  Synthetic
caguuagcugaaauuugaaac

SEQ ID NO: 91864 - RNA, 23 nt, Artificial Sequence
  Synthetic
cgcaguuagcugaaauuugaaac

SEQ ID NO: 91865 - RNA, 24 nt, Artificial Sequence
  Synthetic
ucgcaguuagcugaaauuugaaac

SEQ ID NO: 91866 - RNA, 18 nt, Artificial Sequence
  Synthetic
uugaguuagaaaauaaac

SEQ ID NO: 91867 - RNA, 19 nt, Artificial Sequence
  Synthetic
uuugaguuagaaaauaaac

SEQ ID NO: 91868 - RNA, 20 nt, Artificial Sequence
  Synthetic
auuugaguuagaaaauaaac

SEQ ID NO: 91869 - RNA, 21 nt, Artificial Sequence
  Synthetic
uauuugaguuagaaaauaaac

SEQ ID NO: 91870 - RNA, 22 nt, Artificial Sequence
  Synthetic
auauuugaguuagaaaauaaac

SEQ ID NO: 91871 - RNA, 23 nt, Artificial Sequence
  Synthetic
cauauuugaguuagaaaauaaac

SEQ ID NO: 91872 - RNA, 18 nt, Artificial Sequence
  Synthetic
aacagagccagaauaaac

SEQ ID NO: 91873 - RNA, 19 nt, Artificial Sequence
  Synthetic
aaacagagccagaauaaac

SEQ ID NO: 91874 - RNA, 20 nt, Artificial Sequence
  Synthetic
aaaacagagccagaauaaac

SEQ ID NO: 91875 - RNA, 21 nt, Artificial Sequence
  Synthetic
aaaaacagagccagaauaaac

SEQ ID NO: 91876 - RNA, 22 nt, Artificial Sequence
  Synthetic
aaaaaacagagccagaauaaac

SEQ ID NO: 91877 - RNA, 23 nt, Artificial Sequence
  Synthetic
aaaaaaacagagccagaauaaac

SEQ ID NO: 91878 - RNA, 24 nt, Artificial Sequence
  Synthetic
caaaaaaacagagccagaauaaac

SEQ ID NO: 91879 - RNA, 19 nt, Artificial Sequence
  Synthetic
ugacuguauugaacuaaac

SEQ ID NO: 91880 - RNA, 21 nt, Artificial Sequence
  Synthetic
agugacuguauugaacuaaac

SEQ ID NO: 91881 - RNA, 22 nt, Artificial Sequence
  Synthetic
aagugacuguauugaacuaaac

SEQ ID NO: 91882 - RNA, 24 nt, Artificial Sequence
  Synthetic
ugaagugacuguauugaacuaaac

SEQ ID NO: 91883 - RNA, 18 nt, Artificial Sequence
  Synthetic
aaagcuuaagaucuaaac

SEQ ID NO: 91884 - RNA, 19 nt, Artificial Sequence
  Synthetic
caaagcuuaagaucuaaac

SEQ ID NO: 91885 - RNA, 20 nt, Artificial Sequence
  Synthetic
acaaagcuuaagaucuaaac

SEQ ID NO: 91886 - RNA, 21 nt, Artificial Sequence
  Synthetic
cacaaagcuuaagaucuaaac

SEQ ID NO: 91887 - RNA, 22 nt, Artificial Sequence
  Synthetic
ucacaaagcuuaagaucuaaac

SEQ ID NO: 91888 - RNA, 23 nt, Artificial Sequence
  Synthetic
cucacaaagcuuaagaucuaaac

SEQ ID NO: 91889 - RNA, 24 nt, Artificial Sequence
  Synthetic
ccucacaaagcuuaagaucuaaac

SEQ ID NO: 91890 - RNA, 21 nt, Artificial Sequence
  Synthetic
cauuuguuuaaaaaaguaaac

SEQ ID NO: 91891 - RNA, 22 nt, Artificial Sequence
  Synthetic
ucauuuguuuaaaaaaguaaac

SEQ ID NO: 91892 - RNA, 23 nt, Artificial Sequence
  Synthetic
aucauuuguuuaaaaaaguaaac

SEQ ID NO: 91893 - RNA, 24 nt, Artificial Sequence
  Synthetic
aaucauuuguuuaaaaaaguaaac

SEQ ID NO: 91894 - RNA, 18 nt, Artificial Sequence
  Synthetic
acaaaguaaggaguaaac

SEQ ID NO: 91895 - RNA, 19 nt, Artificial Sequence
  Synthetic
uacaaaguaaggaguaaac

SEQ ID NO: 91896 - RNA, 20 nt, Artificial Sequence
  Synthetic
cuacaaaguaaggaguaaac

SEQ ID NO: 91897 - RNA, 21 nt, Artificial Sequence
  Synthetic
acuacaaaguaaggaguaaac

SEQ ID NO: 91898 - RNA, 22 nt, Artificial Sequence
  Synthetic
cacuacaaaguaaggaguaaac

SEQ ID NO: 91899 - RNA, 23 nt, Artificial Sequence
  Synthetic
ccacuacaaaguaaggaguaaac

SEQ ID NO: 91900 - RNA, 24 nt, Artificial Sequence
  Synthetic
accacuacaaaguaaggaguaaac

SEQ ID NO: 91901 - RNA, 18 nt, Artificial Sequence
  Synthetic
ccaagccuugcauuaaac

SEQ ID NO: 91902 - RNA, 19 nt, Artificial Sequence
  Synthetic
accaagccuugcauuaaac

SEQ ID NO: 91903 - RNA, 20 nt, Artificial Sequence
  Synthetic
caccaagccuugcauuaaac

SEQ ID NO: 91904 - RNA, 21 nt, Artificial Sequence
  Synthetic
ucaccaagccuugcauuaaac

SEQ ID NO: 91905 - RNA, 22 nt, Artificial Sequence
  Synthetic
uucaccaagccuugcauuaaac

SEQ ID NO: 91906 - RNA, 24 nt, Artificial Sequence
  Synthetic
uguucaccaagccuugcauuaaac

SEQ ID NO: 91907 - RNA, 21 nt, Artificial Sequence
  Synthetic
cuuuuauuuuucugauuaaac

SEQ ID NO: 91908 - RNA, 22 nt, Artificial Sequence
  Synthetic
acuuuuauuuuucugauuaaac

SEQ ID NO: 91909 - RNA, 23 nt, Artificial Sequence
  Synthetic
aacuuuuauuuuucugauuaaac

SEQ ID NO: 91910 - RNA, 24 nt, Artificial Sequence
  Synthetic
uaacuuuuauuuuucugauuaaac

SEQ ID NO: 91911 - RNA, 18 nt, Artificial Sequence
  Synthetic
auuuugcagcacuuaaac

SEQ ID NO: 91912 - RNA, 20 nt, Artificial Sequence
  Synthetic
agauuuugcagcacuuaaac

SEQ ID NO: 91913 - RNA, 24 nt, Artificial Sequence
  Synthetic
ugggagauuuugcagcacuuaaac

SEQ ID NO: 91914 - RNA, 18 nt, Artificial Sequence
  Synthetic
ucaguuaaagucuuaaac

SEQ ID NO: 91915 - RNA, 19 nt, Artificial Sequence
  Synthetic
uucaguuaaagucuuaaac

SEQ ID NO: 91916 - RNA, 20 nt, Artificial Sequence
  Synthetic
auucaguuaaagucuuaaac

SEQ ID NO: 91917 - RNA, 21 nt, Artificial Sequence
  Synthetic
aauucaguuaaagucuuaaac

SEQ ID NO: 91918 - RNA, 22 nt, Artificial Sequence
  Synthetic
aaauucaguuaaagucuuaaac

SEQ ID NO: 91919 - RNA, 23 nt, Artificial Sequence
  Synthetic
uaaauucaguuaaagucuuaaac

SEQ ID NO: 91920 - RNA, 24 nt, Artificial Sequence
  Synthetic
uuaaauucaguuaaagucuuaaac

SEQ ID NO: 91921 - RNA, 18 nt, Artificial Sequence
  Synthetic
uacauuagauuuuuaaac

SEQ ID NO: 91922 - RNA, 19 nt, Artificial Sequence
  Synthetic
auacauuagauuuuuaaac

SEQ ID NO: 91923 - RNA, 20 nt, Artificial Sequence
  Synthetic
aauacauuagauuuuuaaac

SEQ ID NO: 91924 - RNA, 21 nt, Artificial Sequence
  Synthetic
aaauacauuagauuuuuaaac

SEQ ID NO: 91925 - RNA, 24 nt, Artificial Sequence
  Synthetic
uggaaauacauuagauuuuuaaac

SEQ ID NO: 91926 - RNA, 18 nt, Artificial Sequence
  Synthetic
uugaguagggggaacaac

SEQ ID NO: 91927 - RNA, 19 nt, Artificial Sequence
  Synthetic
auugaguagggggaacaac

SEQ ID NO: 91928 - RNA, 20 nt, Artificial Sequence
  Synthetic
aauugaguagggggaacaac

SEQ ID NO: 91929 - RNA, 21 nt, Artificial Sequence
  Synthetic
caauugaguagggggaacaac

SEQ ID NO: 91930 - RNA, 22 nt, Artificial Sequence
  Synthetic
acaauugaguagggggaacaac

SEQ ID NO: 91931 - RNA, 23 nt, Artificial Sequence
  Synthetic
cacaauugaguagggggaacaac

SEQ ID NO: 91932 - RNA, 24 nt, Artificial Sequence
  Synthetic
ucacaauugaguagggggaacaac

SEQ ID NO: 91933 - RNA, 19 nt, Artificial Sequence
  Synthetic
agugugaagagguaacaac

SEQ ID NO: 91934 - RNA, 20 nt, Artificial Sequence
  Synthetic
cagugugaagagguaacaac

SEQ ID NO: 91935 - RNA, 21 nt, Artificial Sequence
  Synthetic
ccagugugaagagguaacaac

SEQ ID NO: 91936 - RNA, 22 nt, Artificial Sequence
  Synthetic
cccagugugaagagguaacaac

SEQ ID NO: 91937 - RNA, 23 nt, Artificial Sequence
  Synthetic
ucccagugugaagagguaacaac

SEQ ID NO: 91938 - RNA, 18 nt, Artificial Sequence
  Synthetic
uuucucaagucccacaac

SEQ ID NO: 91939 - RNA, 19 nt, Artificial Sequence
  Synthetic
cuuucucaagucccacaac

SEQ ID NO: 91940 - RNA, 20 nt, Artificial Sequence
  Synthetic
ccuuucucaagucccacaac

SEQ ID NO: 91941 - RNA, 22 nt, Artificial Sequence
  Synthetic
agccuuucucaagucccacaac

SEQ ID NO: 91942 - RNA, 23 nt, Artificial Sequence
  Synthetic
aagccuuucucaagucccacaac

SEQ ID NO: 91943 - RNA, 18 nt, Artificial Sequence
  Synthetic
uguggacuaugagacaac

SEQ ID NO: 91944 - RNA, 19 nt, Artificial Sequence
  Synthetic
uuguggacuaugagacaac

SEQ ID NO: 91945 - RNA, 20 nt, Artificial Sequence
  Synthetic
auuguggacuaugagacaac

SEQ ID NO: 91946 - RNA, 22 nt, Artificial Sequence
  Synthetic
ugauuguggacuaugagacaac

SEQ ID NO: 91947 - RNA, 24 nt, Artificial Sequence
  Synthetic
agugauuguggacuaugagacaac

SEQ ID NO: 91948 - RNA, 18 nt, Artificial Sequence
  Synthetic
uaauaggcuuaugacaac

SEQ ID NO: 91949 - RNA, 19 nt, Artificial Sequence
  Synthetic
auaauaggcuuaugacaac

SEQ ID NO: 91950 - RNA, 20 nt, Artificial Sequence
  Synthetic
aauaauaggcuuaugacaac

SEQ ID NO: 91951 - RNA, 21 nt, Artificial Sequence
  Synthetic
aaauaauaggcuuaugacaac

SEQ ID NO: 91952 - RNA, 23 nt, Artificial Sequence
  Synthetic
agaaauaauaggcuuaugacaac

SEQ ID NO: 91953 - RNA, 24 nt, Artificial Sequence
  Synthetic
aagaaauaauaggcuuaugacaac

SEQ ID NO: 91954 - RNA, 18 nt, Artificial Sequence
  Synthetic
uacacgaauuuauacaac

SEQ ID NO: 91955 - RNA, 20 nt, Artificial Sequence
  Synthetic
uguacacgaauuuauacaac

SEQ ID NO: 91956 - RNA, 21 nt, Artificial Sequence
  Synthetic
cuguacacgaauuuauacaac

SEQ ID NO: 91957 - RNA, 22 nt, Artificial Sequence
  Synthetic
ucuguacacgaauuuauacaac

SEQ ID NO: 91958 - RNA, 23 nt, Artificial Sequence
  Synthetic
aucuguacacgaauuuauacaac

SEQ ID NO: 91959 - RNA, 24 nt, Artificial Sequence
  Synthetic
caucuguacacgaauuuauacaac

SEQ ID NO: 91960 - RNA, 18 nt, Artificial Sequence
  Synthetic
cguagcaauuacuacaac

SEQ ID NO: 91961 - RNA, 20 nt, Artificial Sequence
  Synthetic
agcguagcaauuacuacaac

SEQ ID NO: 91962 - RNA, 21 nt, Artificial Sequence
  Synthetic
cagcguagcaauuacuacaac

SEQ ID NO: 91963 - RNA, 22 nt, Artificial Sequence
  Synthetic
acagcguagcaauuacuacaac

SEQ ID NO: 91964 - RNA, 23 nt, Artificial Sequence
  Synthetic
uacagcguagcaauuacuacaac

SEQ ID NO: 91965 - RNA, 24 nt, Artificial Sequence
  Synthetic
cuacagcguagcaauuacuacaac

SEQ ID NO: 91966 - RNA, 18 nt, Artificial Sequence
  Synthetic
augagccuucgguacaac

SEQ ID NO: 91967 - RNA, 19 nt, Artificial Sequence
  Synthetic
uaugagccuucgguacaac

SEQ ID NO: 91968 - RNA, 20 nt, Artificial Sequence
  Synthetic
auaugagccuucgguacaac

SEQ ID NO: 91969 - RNA, 21 nt, Artificial Sequence
  Synthetic
aauaugagccuucgguacaac

SEQ ID NO: 91970 - RNA, 22 nt, Artificial Sequence
  Synthetic
aaauaugagccuucgguacaac

SEQ ID NO: 91971 - RNA, 23 nt, Artificial Sequence
  Synthetic
caaauaugagccuucgguacaac

SEQ ID NO: 91972 - RNA, 24 nt, Artificial Sequence
  Synthetic
acaaauaugagccuucgguacaac

SEQ ID NO: 91973 - RNA, 19 nt, Artificial Sequence
  Synthetic
aggagaaugagaaaccaac

SEQ ID NO: 91974 - RNA, 20 nt, Artificial Sequence
  Synthetic
caggagaaugagaaaccaac

SEQ ID NO: 91975 - RNA, 21 nt, Artificial Sequence
  Synthetic
acaggagaaugagaaaccaac

SEQ ID NO: 91976 - RNA, 22 nt, Artificial Sequence
  Synthetic
aacaggagaaugagaaaccaac

SEQ ID NO: 91977 - RNA, 23 nt, Artificial Sequence
  Synthetic
caacaggagaaugagaaaccaac

SEQ ID NO: 91978 - RNA, 24 nt, Artificial Sequence
  Synthetic
ccaacaggagaaugagaaaccaac

SEQ ID NO: 91979 - RNA, 21 nt, Artificial Sequence
  Synthetic
ucaacuaaccaaucaaccaac

SEQ ID NO: 91980 - RNA, 22 nt, Artificial Sequence
  Synthetic
uucaacuaaccaaucaaccaac

SEQ ID NO: 91981 - RNA, 24 nt, Artificial Sequence
  Synthetic
aguucaacuaaccaaucaaccaac

SEQ ID NO: 91982 - RNA, 20 nt, Artificial Sequence
  Synthetic
uggggaagggguucaccaac

SEQ ID NO: 91983 - RNA, 21 nt, Artificial Sequence
  Synthetic
cuggggaagggguucaccaac

SEQ ID NO: 91984 - RNA, 22 nt, Artificial Sequence
  Synthetic
ucuggggaagggguucaccaac

SEQ ID NO: 91985 - RNA, 23 nt, Artificial Sequence
  Synthetic
cucuggggaagggguucaccaac

SEQ ID NO: 91986 - RNA, 24 nt, Artificial Sequence
  Synthetic
acucuggggaagggguucaccaac

SEQ ID NO: 91987 - RNA, 18 nt, Artificial Sequence
  Synthetic
auuggcuauuuucccaac

SEQ ID NO: 91988 - RNA, 19 nt, Artificial Sequence
  Synthetic
uauuggcuauuuucccaac

SEQ ID NO: 91989 - RNA, 20 nt, Artificial Sequence
  Synthetic
uuauuggcuauuuucccaac

SEQ ID NO: 91990 - RNA, 21 nt, Artificial Sequence
  Synthetic
uuuauuggcuauuuucccaac

SEQ ID NO: 91991 - RNA, 22 nt, Artificial Sequence
  Synthetic
auuuauuggcuauuuucccaac

SEQ ID NO: 91992 - RNA, 23 nt, Artificial Sequence
  Synthetic
aauuuauuggcuauuuucccaac

SEQ ID NO: 91993 - RNA, 24 nt, Artificial Sequence
  Synthetic
aaauuuauuggcuauuuucccaac

SEQ ID NO: 91994 - RNA, 18 nt, Artificial Sequence
  Synthetic
uggggaauugaggccaac

SEQ ID NO: 91995 - RNA, 20 nt, Artificial Sequence
  Synthetic
uguggggaauugaggccaac

SEQ ID NO: 91996 - RNA, 21 nt, Artificial Sequence
  Synthetic
uuguggggaauugaggccaac

SEQ ID NO: 91997 - RNA, 22 nt, Artificial Sequence
  Synthetic
auuguggggaauugaggccaac

SEQ ID NO: 91998 - RNA, 23 nt, Artificial Sequence
  Synthetic
cauuguggggaauugaggccaac

SEQ ID NO: 91999 - RNA, 18 nt, Artificial Sequence
  Synthetic
uuugcagguauauccaac

SEQ ID NO: 92000 - RNA, 19 nt, Artificial Sequence
  Synthetic
uuuugcagguauauccaac

SEQ ID NO: 92001 - RNA, 20 nt, Artificial Sequence
  Synthetic
auuuugcagguauauccaac

SEQ ID NO: 92002 - RNA, 21 nt, Artificial Sequence
  Synthetic
cauuuugcagguauauccaac

SEQ ID NO: 92003 - RNA, 23 nt, Artificial Sequence
  Synthetic
ugcauuuugcagguauauccaac

SEQ ID NO: 92004 - RNA, 24 nt, Artificial Sequence
  Synthetic
augcauuuugcagguauauccaac

SEQ ID NO: 92005 - RNA, 18 nt, Artificial Sequence
  Synthetic
cauuuauuuaauuccaac

SEQ ID NO: 92006 - RNA, 19 nt, Artificial Sequence
  Synthetic
ucauuuauuuaauuccaac

SEQ ID NO: 92007 - RNA, 20 nt, Artificial Sequence
  Synthetic
cucauuuauuuaauuccaac

SEQ ID NO: 92008 - RNA, 21 nt, Artificial Sequence
  Synthetic
acucauuuauuuaauuccaac

SEQ ID NO: 92009 - RNA, 22 nt, Artificial Sequence
  Synthetic
cacucauuuauuuaauuccaac

SEQ ID NO: 92010 - RNA, 23 nt, Artificial Sequence
  Synthetic
acacucauuuauuuaauuccaac

SEQ ID NO: 92011 - RNA, 24 nt, Artificial Sequence
  Synthetic
uacacucauuuauuuaauuccaac

SEQ ID NO: 92012 - RNA, 18 nt, Artificial Sequence
  Synthetic
uuggccauagaaagcaac

SEQ ID NO: 92013 - RNA, 19 nt, Artificial Sequence
  Synthetic
uuuggccauagaaagcaac

SEQ ID NO: 92014 - RNA, 20 nt, Artificial Sequence
  Synthetic
cuuuggccauagaaagcaac

SEQ ID NO: 92015 - RNA, 21 nt, Artificial Sequence
  Synthetic
ucuuuggccauagaaagcaac

SEQ ID NO: 92016 - RNA, 22 nt, Artificial Sequence
  Synthetic
aucuuuggccauagaaagcaac

SEQ ID NO: 92017 - RNA, 23 nt, Artificial Sequence
  Synthetic
caucuuuggccauagaaagcaac

SEQ ID NO: 92018 - RNA, 24 nt, Artificial Sequence
  Synthetic
acaucuuuggccauagaaagcaac

SEQ ID NO: 92019 - RNA, 23 nt, Artificial Sequence
  Synthetic
uggggcaggagacugacugcaac

SEQ ID NO: 92020 - RNA, 18 nt, Artificial Sequence
  Synthetic
uuauccucucaaaucaac

SEQ ID NO: 92021 - RNA, 19 nt, Artificial Sequence
  Synthetic
auuauccucucaaaucaac

SEQ ID NO: 92022 - RNA, 20 nt, Artificial Sequence
  Synthetic
cauuauccucucaaaucaac

SEQ ID NO: 92023 - RNA, 21 nt, Artificial Sequence
  Synthetic
acauuauccucucaaaucaac

SEQ ID NO: 92024 - RNA, 23 nt, Artificial Sequence
  Synthetic
cgacauuauccucucaaaucaac

SEQ ID NO: 92025 - RNA, 24 nt, Artificial Sequence
  Synthetic
acgacauuauccucucaaaucaac

SEQ ID NO: 92026 - RNA, 18 nt, Artificial Sequence
  Synthetic
aacauggcugaagucaac

SEQ ID NO: 92027 - RNA, 19 nt, Artificial Sequence
  Synthetic
caacauggcugaagucaac

SEQ ID NO: 92028 - RNA, 20 nt, Artificial Sequence
  Synthetic
acaacauggcugaagucaac

SEQ ID NO: 92029 - RNA, 22 nt, Artificial Sequence
  Synthetic
ugacaacauggcugaagucaac

SEQ ID NO: 92030 - RNA, 23 nt, Artificial Sequence
  Synthetic
cugacaacauggcugaagucaac

SEQ ID NO: 92031 - RNA, 24 nt, Artificial Sequence
  Synthetic
ccugacaacauggcugaagucaac

SEQ ID NO: 92032 - RNA, 18 nt, Artificial Sequence
  Synthetic
ccuuguggaucugucaac

SEQ ID NO: 92033 - RNA, 20 nt, Artificial Sequence
  Synthetic
ugccuuguggaucugucaac

SEQ ID NO: 92034 - RNA, 21 nt, Artificial Sequence
  Synthetic
uugccuuguggaucugucaac

SEQ ID NO: 92035 - RNA, 23 nt, Artificial Sequence
  Synthetic
uguugccuuguggaucugucaac

SEQ ID NO: 92036 - RNA, 24 nt, Artificial Sequence
  Synthetic
cuguugccuuguggaucugucaac

SEQ ID NO: 92037 - RNA, 21 nt, Artificial Sequence
  Synthetic
uaaacuauuagaaaauucaac

SEQ ID NO: 92038 - RNA, 22 nt, Artificial Sequence
  Synthetic
uuaaacuauuagaaaauucaac

SEQ ID NO: 92039 - RNA, 23 nt, Artificial Sequence
  Synthetic
auuaaacuauuagaaaauucaac

SEQ ID NO: 92040 - RNA, 24 nt, Artificial Sequence
  Synthetic
uauuaaacuauuagaaaauucaac

SEQ ID NO: 92041 - RNA, 18 nt, Artificial Sequence
  Synthetic
ugugaccuagacuucaac

SEQ ID NO: 92042 - RNA, 19 nt, Artificial Sequence
  Synthetic
augugaccuagacuucaac

SEQ ID NO: 92043 - RNA, 20 nt, Artificial Sequence
  Synthetic
aaugugaccuagacuucaac

SEQ ID NO: 92044 - RNA, 21 nt, Artificial Sequence
  Synthetic
aaaugugaccuagacuucaac

SEQ ID NO: 92045 - RNA, 22 nt, Artificial Sequence
  Synthetic
uaaaugugaccuagacuucaac

SEQ ID NO: 92046 - RNA, 23 nt, Artificial Sequence
  Synthetic
auaaaugugaccuagacuucaac

SEQ ID NO: 92047 - RNA, 24 nt, Artificial Sequence
  Synthetic
aauaaaugugaccuagacuucaac

SEQ ID NO: 92048 - RNA, 18 nt, Artificial Sequence
  Synthetic
auucugaauucuuucaac

SEQ ID NO: 92049 - RNA, 20 nt, Artificial Sequence
  Synthetic
ugauucugaauucuuucaac

SEQ ID NO: 92050 - RNA, 21 nt, Artificial Sequence
  Synthetic
cugauucugaauucuuucaac

SEQ ID NO: 92051 - RNA, 22 nt, Artificial Sequence
  Synthetic
acugauucugaauucuuucaac

SEQ ID NO: 92052 - RNA, 23 nt, Artificial Sequence
  Synthetic
cacugauucugaauucuuucaac

SEQ ID NO: 92053 - RNA, 24 nt, Artificial Sequence
  Synthetic
ccacugauucugaauucuuucaac

SEQ ID NO: 92054 - RNA, 22 nt, Artificial Sequence
  Synthetic
agaaaaauauaggaagaagaac

SEQ ID NO: 92055 - RNA, 23 nt, Artificial Sequence
  Synthetic
uagaaaaauauaggaagaagaac

SEQ ID NO: 92056 - RNA, 24 nt, Artificial Sequence
  Synthetic
cuagaaaaauauaggaagaagaac

SEQ ID NO: 92057 - RNA, 21 nt, Artificial Sequence
  Synthetic
cauaaaaauaguaagaagaac

SEQ ID NO: 92058 - RNA, 23 nt, Artificial Sequence
  Synthetic
agcauaaaaauaguaagaagaac

SEQ ID NO: 92059 - RNA, 24 nt, Artificial Sequence
  Synthetic
aagcauaaaaauaguaagaagaac

SEQ ID NO: 92060 - RNA, 21 nt, Artificial Sequence
  Synthetic
ugggugaagaagaggaagaac

SEQ ID NO: 92061 - RNA, 22 nt, Artificial Sequence
  Synthetic
uugggugaagaagaggaagaac

SEQ ID NO: 92062 - RNA, 24 nt, Artificial Sequence
  Synthetic
uguugggugaagaagaggaagaac

SEQ ID NO: 92063 - RNA, 18 nt, Artificial Sequence
  Synthetic
ugucaucacuggaagaac

SEQ ID NO: 92064 - RNA, 19 nt, Artificial Sequence
  Synthetic
uugucaucacuggaagaac

SEQ ID NO: 92065 - RNA, 20 nt, Artificial Sequence
  Synthetic
cuugucaucacuggaagaac

SEQ ID NO: 92066 - RNA, 21 nt, Artificial Sequence
  Synthetic
ccuugucaucacuggaagaac

SEQ ID NO: 92067 - RNA, 22 nt, Artificial Sequence
  Synthetic
cccuugucaucacuggaagaac

SEQ ID NO: 92068 - RNA, 23 nt, Artificial Sequence
  Synthetic
acccuugucaucacuggaagaac

SEQ ID NO: 92069 - RNA, 18 nt, Artificial Sequence
  Synthetic
uucugcuuuaugaagaac

SEQ ID NO: 92070 - RNA, 19 nt, Artificial Sequence
  Synthetic
uuucugcuuuaugaagaac

SEQ ID NO: 92071 - RNA, 20 nt, Artificial Sequence
  Synthetic
auuucugcuuuaugaagaac

SEQ ID NO: 92072 - RNA, 21 nt, Artificial Sequence
  Synthetic
aauuucugcuuuaugaagaac

SEQ ID NO: 92073 - RNA, 22 nt, Artificial Sequence
  Synthetic
aaauuucugcuuuaugaagaac

SEQ ID NO: 92074 - RNA, 24 nt, Artificial Sequence
  Synthetic
ugaaauuucugcuuuaugaagaac

SEQ ID NO: 92075 - RNA, 18 nt, Artificial Sequence
  Synthetic
ccucauauacugaagaac

SEQ ID NO: 92076 - RNA, 19 nt, Artificial Sequence
  Synthetic
cccucauauacugaagaac

SEQ ID NO: 92077 - RNA, 20 nt, Artificial Sequence
  Synthetic
ccccucauauacugaagaac

SEQ ID NO: 92078 - RNA, 21 nt, Artificial Sequence
  Synthetic
uccccucauauacugaagaac

SEQ ID NO: 92079 - RNA, 23 nt, Artificial Sequence
  Synthetic
aguccccucauauacugaagaac

SEQ ID NO: 92080 - RNA, 24 nt, Artificial Sequence
  Synthetic
caguccccucauauacugaagaac

SEQ ID NO: 92081 - RNA, 18 nt, Artificial Sequence
  Synthetic
caugguaucauuaagaac

SEQ ID NO: 92082 - RNA, 19 nt, Artificial Sequence
  Synthetic
ucaugguaucauuaagaac

SEQ ID NO: 92083 - RNA, 20 nt, Artificial Sequence
  Synthetic
uucaugguaucauuaagaac

SEQ ID NO: 92084 - RNA, 21 nt, Artificial Sequence
  Synthetic
auucaugguaucauuaagaac

SEQ ID NO: 92085 - RNA, 22 nt, Artificial Sequence
  Synthetic
uauucaugguaucauuaagaac

SEQ ID NO: 92086 - RNA, 23 nt, Artificial Sequence
  Synthetic
uuauucaugguaucauuaagaac

SEQ ID NO: 92087 - RNA, 24 nt, Artificial Sequence
  Synthetic
uuuauucaugguaucauuaagaac

SEQ ID NO: 92088 - RNA, 18 nt, Artificial Sequence
  Synthetic
uaguaaaaugaagagaac

SEQ ID NO: 92089 - RNA, 20 nt, Artificial Sequence
  Synthetic
uguaguaaaaugaagagaac

SEQ ID NO: 92090 - RNA, 21 nt, Artificial Sequence
  Synthetic
cuguaguaaaaugaagagaac

SEQ ID NO: 92091 - RNA, 23 nt, Artificial Sequence
  Synthetic
ugcuguaguaaaaugaagagaac

SEQ ID NO: 92092 - RNA, 24 nt, Artificial Sequence
  Synthetic
cugcuguaguaaaaugaagagaac

SEQ ID NO: 92093 - RNA, 19 nt, Artificial Sequence
  Synthetic
ugcagaaccugaagagaac

SEQ ID NO: 92094 - RNA, 20 nt, Artificial Sequence
  Synthetic
uugcagaaccugaagagaac

SEQ ID NO: 92095 - RNA, 21 nt, Artificial Sequence
  Synthetic
auugcagaaccugaagagaac

SEQ ID NO: 92096 - RNA, 22 nt, Artificial Sequence
  Synthetic
uauugcagaaccugaagagaac

SEQ ID NO: 92097 - RNA, 23 nt, Artificial Sequence
  Synthetic
auauugcagaaccugaagagaac

SEQ ID NO: 92098 - RNA, 18 nt, Artificial Sequence
  Synthetic
auuacacugcaugagaac

SEQ ID NO: 92099 - RNA, 19 nt, Artificial Sequence
  Synthetic
cauuacacugcaugagaac

SEQ ID NO: 92100 - RNA, 20 nt, Artificial Sequence
  Synthetic
ucauuacacugcaugagaac

SEQ ID NO: 92101 - RNA, 21 nt, Artificial Sequence
  Synthetic
cucauuacacugcaugagaac

SEQ ID NO: 92102 - RNA, 22 nt, Artificial Sequence
  Synthetic
acucauuacacugcaugagaac

SEQ ID NO: 92103 - RNA, 23 nt, Artificial Sequence
  Synthetic
uacucauuacacugcaugagaac

SEQ ID NO: 92104 - RNA, 18 nt, Artificial Sequence
  Synthetic
agguaauuaacugagaac

SEQ ID NO: 92105 - RNA, 19 nt, Artificial Sequence
  Synthetic
aagguaauuaacugagaac

SEQ ID NO: 92106 - RNA, 20 nt, Artificial Sequence
  Synthetic
aaagguaauuaacugagaac

SEQ ID NO: 92107 - RNA, 21 nt, Artificial Sequence
  Synthetic
aaaagguaauuaacugagaac

SEQ ID NO: 92108 - RNA, 23 nt, Artificial Sequence
  Synthetic
ugaaaagguaauuaacugagaac

SEQ ID NO: 92109 - RNA, 24 nt, Artificial Sequence
  Synthetic
uugaaaagguaauuaacugagaac

SEQ ID NO: 92110 - RNA, 18 nt, Artificial Sequence
  Synthetic
accaucuaggcauagaac

SEQ ID NO: 92111 - RNA, 20 nt, Artificial Sequence
  Synthetic
agaccaucuaggcauagaac

SEQ ID NO: 92112 - RNA, 21 nt, Artificial Sequence
  Synthetic
cagaccaucuaggcauagaac

SEQ ID NO: 92113 - RNA, 18 nt, Artificial Sequence
  Synthetic
aaccgcuacucauagaac

SEQ ID NO: 92114 - RNA, 19 nt, Artificial Sequence
  Synthetic
caaccgcuacucauagaac

SEQ ID NO: 92115 - RNA, 20 nt, Artificial Sequence
  Synthetic
ucaaccgcuacucauagaac

SEQ ID NO: 92116 - RNA, 21 nt, Artificial Sequence
  Synthetic
aucaaccgcuacucauagaac

SEQ ID NO: 92117 - RNA, 22 nt, Artificial Sequence
  Synthetic
uaucaaccgcuacucauagaac

SEQ ID NO: 92118 - RNA, 23 nt, Artificial Sequence
  Synthetic
auaucaaccgcuacucauagaac

SEQ ID NO: 92119 - RNA, 24 nt, Artificial Sequence
  Synthetic
cauaucaaccgcuacucauagaac

SEQ ID NO: 92120 - RNA, 19 nt, Artificial Sequence
  Synthetic
aguauuaacagacacgaac

SEQ ID NO: 92121 - RNA, 20 nt, Artificial Sequence
  Synthetic
caguauuaacagacacgaac

SEQ ID NO: 92122 - RNA, 22 nt, Artificial Sequence
  Synthetic
ugcaguauuaacagacacgaac

SEQ ID NO: 92123 - RNA, 23 nt, Artificial Sequence
  Synthetic
uugcaguauuaacagacacgaac

SEQ ID NO: 92124 - RNA, 24 nt, Artificial Sequence
  Synthetic
cuugcaguauuaacagacacgaac

SEQ ID NO: 92125 - RNA, 18 nt, Artificial Sequence
  Synthetic
ucuacuucauauacgaac

SEQ ID NO: 92126 - RNA, 21 nt, Artificial Sequence
  Synthetic
aggucuacuucauauacgaac

SEQ ID NO: 92127 - RNA, 24 nt, Artificial Sequence
  Synthetic
cggaggucuacuucauauacgaac

SEQ ID NO: 92128 - RNA, 18 nt, Artificial Sequence
  Synthetic
ugaaagcuucccccgaac

SEQ ID NO: 92129 - RNA, 19 nt, Artificial Sequence
  Synthetic
cugaaagcuucccccgaac

SEQ ID NO: 92130 - RNA, 20 nt, Artificial Sequence
  Synthetic
ucugaaagcuucccccgaac

SEQ ID NO: 92131 - RNA, 21 nt, Artificial Sequence
  Synthetic
aucugaaagcuucccccgaac

SEQ ID NO: 92132 - RNA, 22 nt, Artificial Sequence
  Synthetic
uaucugaaagcuucccccgaac

SEQ ID NO: 92133 - RNA, 23 nt, Artificial Sequence
  Synthetic
uuaucugaaagcuucccccgaac

SEQ ID NO: 92134 - RNA, 24 nt, Artificial Sequence
  Synthetic
uuuaucugaaagcuucccccgaac

SEQ ID NO: 92135 - RNA, 18 nt, Artificial Sequence
  Synthetic
agaaguauauaaaggaac

SEQ ID NO: 92136 - RNA, 19 nt, Artificial Sequence
  Synthetic
aagaaguauauaaaggaac

SEQ ID NO: 92137 - RNA, 20 nt, Artificial Sequence
  Synthetic
aaagaaguauauaaaggaac

SEQ ID NO: 92138 - RNA, 21 nt, Artificial Sequence
  Synthetic
uaaagaaguauauaaaggaac

SEQ ID NO: 92139 - RNA, 22 nt, Artificial Sequence
  Synthetic
cuaaagaaguauauaaaggaac

SEQ ID NO: 92140 - RNA, 23 nt, Artificial Sequence
  Synthetic
acuaaagaaguauauaaaggaac

SEQ ID NO: 92141 - RNA, 24 nt, Artificial Sequence
  Synthetic
cacuaaagaaguauauaaaggaac

SEQ ID NO: 92142 - RNA, 18 nt, Artificial Sequence
  Synthetic
aguugagagggaaggaac

SEQ ID NO: 92143 - RNA, 19 nt, Artificial Sequence
  Synthetic
caguugagagggaaggaac

SEQ ID NO: 92144 - RNA, 20 nt, Artificial Sequence
  Synthetic
ucaguugagagggaaggaac

SEQ ID NO: 92145 - RNA, 21 nt, Artificial Sequence
  Synthetic
aucaguugagagggaaggaac

SEQ ID NO: 92146 - RNA, 22 nt, Artificial Sequence
  Synthetic
aaucaguugagagggaaggaac

SEQ ID NO: 92147 - RNA, 23 nt, Artificial Sequence
  Synthetic
aaaucaguugagagggaaggaac

SEQ ID NO: 92148 - RNA, 24 nt, Artificial Sequence
  Synthetic
uaaaucaguugagagggaaggaac

SEQ ID NO: 92149 - RNA, 18 nt, Artificial Sequence
  Synthetic
uucauuuguuacaggaac

SEQ ID NO: 92150 - RNA, 20 nt, Artificial Sequence
  Synthetic
uguucauuuguuacaggaac

SEQ ID NO: 92151 - RNA, 22 nt, Artificial Sequence
  Synthetic
uguguucauuuguuacaggaac

SEQ ID NO: 92152 - RNA, 24 nt, Artificial Sequence
  Synthetic
uguguguucauuuguuacaggaac

SEQ ID NO: 92153 - RNA, 18 nt, Artificial Sequence
  Synthetic
ucacugggauggaggaac

SEQ ID NO: 92154 - RNA, 19 nt, Artificial Sequence
  Synthetic
uucacugggauggaggaac

SEQ ID NO: 92155 - RNA, 20 nt, Artificial Sequence
  Synthetic
auucacugggauggaggaac

SEQ ID NO: 92156 - RNA, 21 nt, Artificial Sequence
  Synthetic
cauucacugggauggaggaac

SEQ ID NO: 92157 - RNA, 22 nt, Artificial Sequence
  Synthetic
ucauucacugggauggaggaac

SEQ ID NO: 92158 - RNA, 24 nt, Artificial Sequence
  Synthetic
ugucauucacugggauggaggaac

SEQ ID NO: 92159 - RNA, 18 nt, Artificial Sequence
  Synthetic
agcaaacgaggugggaac

SEQ ID NO: 92160 - RNA, 19 nt, Artificial Sequence
  Synthetic
aagcaaacgaggugggaac

SEQ ID NO: 92161 - RNA, 20 nt, Artificial Sequence
  Synthetic
caagcaaacgaggugggaac

SEQ ID NO: 92162 - RNA, 22 nt, Artificial Sequence
  Synthetic
ugcaagcaaacgaggugggaac

SEQ ID NO: 92163 - RNA, 24 nt, Artificial Sequence
  Synthetic
ugugcaagcaaacgaggugggaac

SEQ ID NO: 92164 - RNA, 18 nt, Artificial Sequence
  Synthetic
ucaugaacacuugggaac

SEQ ID NO: 92165 - RNA, 19 nt, Artificial Sequence
  Synthetic
uucaugaacacuugggaac

SEQ ID NO: 92166 - RNA, 20 nt, Artificial Sequence
  Synthetic
cuucaugaacacuugggaac

SEQ ID NO: 92167 - RNA, 22 nt, Artificial Sequence
  Synthetic
ugcuucaugaacacuugggaac

SEQ ID NO: 92168 - RNA, 24 nt, Artificial Sequence
  Synthetic
cgugcuucaugaacacuugggaac

SEQ ID NO: 92169 - RNA, 21 nt, Artificial Sequence
  Synthetic
acuuuugaugaaugaaugaac

SEQ ID NO: 92170 - RNA, 22 nt, Artificial Sequence
  Synthetic
aacuuuugaugaaugaaugaac

SEQ ID NO: 92171 - RNA, 23 nt, Artificial Sequence
  Synthetic
uaacuuuugaugaaugaaugaac

SEQ ID NO: 92172 - RNA, 24 nt, Artificial Sequence
  Synthetic
auaacuuuugaugaaugaaugaac

SEQ ID NO: 92173 - RNA, 18 nt, Artificial Sequence
  Synthetic
caaacuaaaugcaugaac

SEQ ID NO: 92174 - RNA, 20 nt, Artificial Sequence
  Synthetic
agcaaacuaaaugcaugaac

SEQ ID NO: 92175 - RNA, 21 nt, Artificial Sequence
  Synthetic
aagcaaacuaaaugcaugaac

SEQ ID NO: 92176 - RNA, 22 nt, Artificial Sequence
  Synthetic
aaagcaaacuaaaugcaugaac

SEQ ID NO: 92177 - RNA, 23 nt, Artificial Sequence
  Synthetic
caaagcaaacuaaaugcaugaac

SEQ ID NO: 92178 - RNA, 18 nt, Artificial Sequence
  Synthetic
uuccuagaaaugaugaac

SEQ ID NO: 92179 - RNA, 19 nt, Artificial Sequence
  Synthetic
uuuccuagaaaugaugaac

SEQ ID NO: 92180 - RNA, 20 nt, Artificial Sequence
  Synthetic
uuuuccuagaaaugaugaac

SEQ ID NO: 92181 - RNA, 21 nt, Artificial Sequence
  Synthetic
uuuuuccuagaaaugaugaac

SEQ ID NO: 92182 - RNA, 22 nt, Artificial Sequence
  Synthetic
cuuuuuccuagaaaugaugaac

SEQ ID NO: 92183 - RNA, 23 nt, Artificial Sequence
  Synthetic
ucuuuuuccuagaaaugaugaac

SEQ ID NO: 92184 - RNA, 24 nt, Artificial Sequence
  Synthetic
cucuuuuuccuagaaaugaugaac

SEQ ID NO: 92185 - RNA, 22 nt, Artificial Sequence
  Synthetic
aguaaaauaugcugcuaugaac

SEQ ID NO: 92186 - RNA, 23 nt, Artificial Sequence
  Synthetic
caguaaaauaugcugcuaugaac

SEQ ID NO: 92187 - RNA, 24 nt, Artificial Sequence
  Synthetic
acaguaaaauaugcugcuaugaac

SEQ ID NO: 92188 - RNA, 18 nt, Artificial Sequence
  Synthetic
auuacagaaguuaugaac

SEQ ID NO: 92189 - RNA, 19 nt, Artificial Sequence
  Synthetic
uauuacagaaguuaugaac

SEQ ID NO: 92190 - RNA, 21 nt, Artificial Sequence
  Synthetic
aguauuacagaaguuaugaac

SEQ ID NO: 92191 - RNA, 22 nt, Artificial Sequence
  Synthetic
uaguauuacagaaguuaugaac

SEQ ID NO: 92192 - RNA, 23 nt, Artificial Sequence
  Synthetic
cuaguauuacagaaguuaugaac

SEQ ID NO: 92193 - RNA, 19 nt, Artificial Sequence
  Synthetic
agauaaauacucccugaac

SEQ ID NO: 92194 - RNA, 20 nt, Artificial Sequence
  Synthetic
uagauaaauacucccugaac

SEQ ID NO: 92195 - RNA, 21 nt, Artificial Sequence
  Synthetic
uuagauaaauacucccugaac

SEQ ID NO: 92196 - RNA, 22 nt, Artificial Sequence
  Synthetic
cuuagauaaauacucccugaac

SEQ ID NO: 92197 - RNA, 23 nt, Artificial Sequence
  Synthetic
acuuagauaaauacucccugaac

SEQ ID NO: 92198 - RNA, 19 nt, Artificial Sequence
  Synthetic
uguagggcagcagcugaac

SEQ ID NO: 92199 - RNA, 20 nt, Artificial Sequence
  Synthetic
uuguagggcagcagcugaac

SEQ ID NO: 92200 - RNA, 21 nt, Artificial Sequence
  Synthetic
auuguagggcagcagcugaac

SEQ ID NO: 92201 - RNA, 22 nt, Artificial Sequence
  Synthetic
cauuguagggcagcagcugaac

SEQ ID NO: 92202 - RNA, 23 nt, Artificial Sequence
  Synthetic
ccauuguagggcagcagcugaac

SEQ ID NO: 92203 - RNA, 24 nt, Artificial Sequence
  Synthetic
uccauuguagggcagcagcugaac

SEQ ID NO: 92204 - RNA, 18 nt, Artificial Sequence
  Synthetic
caguuaaccucgcugaac

SEQ ID NO: 92205 - RNA, 19 nt, Artificial Sequence
  Synthetic
ccaguuaaccucgcugaac

SEQ ID NO: 92206 - RNA, 22 nt, Artificial Sequence
  Synthetic
aggccaguuaaccucgcugaac

SEQ ID NO: 92207 - RNA, 23 nt, Artificial Sequence
  Synthetic
aaggccaguuaaccucgcugaac

SEQ ID NO: 92208 - RNA, 24 nt, Artificial Sequence
  Synthetic
caaggccaguuaaccucgcugaac

SEQ ID NO: 92209 - RNA, 18 nt, Artificial Sequence
  Synthetic
ugaauugucaugcugaac

SEQ ID NO: 92210 - RNA, 19 nt, Artificial Sequence
  Synthetic
cugaauugucaugcugaac

SEQ ID NO: 92211 - RNA, 20 nt, Artificial Sequence
  Synthetic
ccugaauugucaugcugaac

SEQ ID NO: 92212 - RNA, 21 nt, Artificial Sequence
  Synthetic
uccugaauugucaugcugaac

SEQ ID NO: 92213 - RNA, 22 nt, Artificial Sequence
  Synthetic
cuccugaauugucaugcugaac

SEQ ID NO: 92214 - RNA, 23 nt, Artificial Sequence
  Synthetic
ccuccugaauugucaugcugaac

SEQ ID NO: 92215 - RNA, 24 nt, Artificial Sequence
  Synthetic
accuccugaauugucaugcugaac

SEQ ID NO: 92216 - RNA, 18 nt, Artificial Sequence
  Synthetic
auaaaagaaguagugaac

SEQ ID NO: 92217 - RNA, 19 nt, Artificial Sequence
  Synthetic
cauaaaagaaguagugaac

SEQ ID NO: 92218 - RNA, 20 nt, Artificial Sequence
  Synthetic
acauaaaagaaguagugaac

SEQ ID NO: 92219 - RNA, 21 nt, Artificial Sequence
  Synthetic
aacauaaaagaaguagugaac

SEQ ID NO: 92220 - RNA, 22 nt, Artificial Sequence
  Synthetic
uaacauaaaagaaguagugaac

SEQ ID NO: 92221 - RNA, 23 nt, Artificial Sequence
  Synthetic
uuaacauaaaagaaguagugaac

SEQ ID NO: 92222 - RNA, 20 nt, Artificial Sequence
  Synthetic
ugguccauaauaaggugaac

SEQ ID NO: 92223 - RNA, 22 nt, Artificial Sequence
  Synthetic
agugguccauaauaaggugaac

SEQ ID NO: 92224 - RNA, 23 nt, Artificial Sequence
  Synthetic
cagugguccauaauaaggugaac

SEQ ID NO: 92225 - RNA, 24 nt, Artificial Sequence
  Synthetic
acagugguccauaauaaggugaac

SEQ ID NO: 92226 - RNA, 18 nt, Artificial Sequence
  Synthetic
aggaugagguaugugaac

SEQ ID NO: 92227 - RNA, 19 nt, Artificial Sequence
  Synthetic
aaggaugagguaugugaac

SEQ ID NO: 92228 - RNA, 20 nt, Artificial Sequence
  Synthetic
caaggaugagguaugugaac

SEQ ID NO: 92229 - RNA, 22 nt, Artificial Sequence
  Synthetic
ugcaaggaugagguaugugaac

SEQ ID NO: 92230 - RNA, 23 nt, Artificial Sequence
  Synthetic
cugcaaggaugagguaugugaac

SEQ ID NO: 92231 - RNA, 24 nt, Artificial Sequence
  Synthetic
ucugcaaggaugagguaugugaac

SEQ ID NO: 92232 - RNA, 18 nt, Artificial Sequence
  Synthetic
ugugagaucauugugaac

SEQ ID NO: 92233 - RNA, 20 nt, Artificial Sequence
  Synthetic
agugugagaucauugugaac

SEQ ID NO: 92234 - RNA, 21 nt, Artificial Sequence
  Synthetic
cagugugagaucauugugaac

SEQ ID NO: 92235 - RNA, 24 nt, Artificial Sequence
  Synthetic
cggcagugugagaucauugugaac

SEQ ID NO: 92236 - RNA, 19 nt, Artificial Sequence
  Synthetic
uguggucucgaacuugaac

SEQ ID NO: 92237 - RNA, 20 nt, Artificial Sequence
  Synthetic
uuguggucucgaacuugaac

SEQ ID NO: 92238 - RNA, 21 nt, Artificial Sequence
  Synthetic
cuuguggucucgaacuugaac

SEQ ID NO: 92239 - RNA, 22 nt, Artificial Sequence
  Synthetic
ccuuguggucucgaacuugaac

SEQ ID NO: 92240 - RNA, 23 nt, Artificial Sequence
  Synthetic
cccuuguggucucgaacuugaac

SEQ ID NO: 92241 - RNA, 24 nt, Artificial Sequence
  Synthetic
ucccuuguggucucgaacuugaac

SEQ ID NO: 92242 - RNA, 18 nt, Artificial Sequence
  Synthetic
aguuagugaguguugaac

SEQ ID NO: 92243 - RNA, 20 nt, Artificial Sequence
  Synthetic
ugaguuagugaguguugaac

SEQ ID NO: 92244 - RNA, 21 nt, Artificial Sequence
  Synthetic
augaguuagugaguguugaac

SEQ ID NO: 92245 - RNA, 22 nt, Artificial Sequence
  Synthetic
uaugaguuagugaguguugaac

SEQ ID NO: 92246 - RNA, 23 nt, Artificial Sequence
  Synthetic
uuaugaguuagugaguguugaac

SEQ ID NO: 92247 - RNA, 21 nt, Artificial Sequence
  Synthetic
auuggaaaaaaagaaaauaac

SEQ ID NO: 92248 - RNA, 22 nt, Artificial Sequence
  Synthetic
aauuggaaaaaaagaaaauaac

SEQ ID NO: 92249 - RNA, 23 nt, Artificial Sequence
  Synthetic
aaauuggaaaaaaagaaaauaac

SEQ ID NO: 92250 - RNA, 18 nt, Artificial Sequence
  Synthetic
caccccagaccaaauaac

SEQ ID NO: 92251 - RNA, 19 nt, Artificial Sequence
  Synthetic
ccaccccagaccaaauaac

SEQ ID NO: 92252 - RNA, 20 nt, Artificial Sequence
  Synthetic
cccaccccagaccaaauaac

SEQ ID NO: 92253 - RNA, 21 nt, Artificial Sequence
  Synthetic
acccaccccagaccaaauaac

SEQ ID NO: 92254 - RNA, 24 nt, Artificial Sequence
  Synthetic
aggacccaccccagaccaaauaac

SEQ ID NO: 92255 - RNA, 18 nt, Artificial Sequence
  Synthetic
cugguuacuccaaauaac

SEQ ID NO: 92256 - RNA, 19 nt, Artificial Sequence
  Synthetic
ccugguuacuccaaauaac

SEQ ID NO: 92257 - RNA, 20 nt, Artificial Sequence
  Synthetic
cccugguuacuccaaauaac

SEQ ID NO: 92258 - RNA, 21 nt, Artificial Sequence
  Synthetic
acccugguuacuccaaauaac

SEQ ID NO: 92259 - RNA, 22 nt, Artificial Sequence
  Synthetic
aacccugguuacuccaaauaac

SEQ ID NO: 92260 - RNA, 23 nt, Artificial Sequence
  Synthetic
aaacccugguuacuccaaauaac

SEQ ID NO: 92261 - RNA, 24 nt, Artificial Sequence
  Synthetic
aaaacccugguuacuccaaauaac

SEQ ID NO: 92262 - RNA, 18 nt, Artificial Sequence
  Synthetic
cauacuacauucaauaac

SEQ ID NO: 92263 - RNA, 19 nt, Artificial Sequence
  Synthetic
acauacuacauucaauaac

SEQ ID NO: 92264 - RNA, 20 nt, Artificial Sequence
  Synthetic
aacauacuacauucaauaac

SEQ ID NO: 92265 - RNA, 21 nt, Artificial Sequence
  Synthetic
aaacauacuacauucaauaac

SEQ ID NO: 92266 - RNA, 23 nt, Artificial Sequence
  Synthetic
agaaacauacuacauucaauaac

SEQ ID NO: 92267 - RNA, 24 nt, Artificial Sequence
  Synthetic
uagaaacauacuacauucaauaac

SEQ ID NO: 92268 - RNA, 18 nt, Artificial Sequence
  Synthetic
aaguaacacaagaauaac

SEQ ID NO: 92269 - RNA, 19 nt, Artificial Sequence
  Synthetic
aaaguaacacaagaauaac

SEQ ID NO: 92270 - RNA, 20 nt, Artificial Sequence
  Synthetic
uaaaguaacacaagaauaac

SEQ ID NO: 92271 - RNA, 22 nt, Artificial Sequence
  Synthetic
aguaaaguaacacaagaauaac

SEQ ID NO: 92272 - RNA, 23 nt, Artificial Sequence
  Synthetic
aaguaaaguaacacaagaauaac

SEQ ID NO: 92273 - RNA, 24 nt, Artificial Sequence
  Synthetic
aaaguaaaguaacacaagaauaac

SEQ ID NO: 92274 - RNA, 18 nt, Artificial Sequence
  Synthetic
agaagaauagcgaauaac

SEQ ID NO: 92275 - RNA, 19 nt, Artificial Sequence
  Synthetic
cagaagaauagcgaauaac

SEQ ID NO: 92276 - RNA, 20 nt, Artificial Sequence
  Synthetic
acagaagaauagcgaauaac

SEQ ID NO: 92277 - RNA, 21 nt, Artificial Sequence
  Synthetic
uacagaagaauagcgaauaac

SEQ ID NO: 92278 - RNA, 22 nt, Artificial Sequence
  Synthetic
auacagaagaauagcgaauaac

SEQ ID NO: 92279 - RNA, 24 nt, Artificial Sequence
  Synthetic
ugauacagaagaauagcgaauaac

SEQ ID NO: 92280 - RNA, 18 nt, Artificial Sequence
  Synthetic
caucuuuauaugaauaac

SEQ ID NO: 92281 - RNA, 19 nt, Artificial Sequence
  Synthetic
acaucuuuauaugaauaac

SEQ ID NO: 92282 - RNA, 20 nt, Artificial Sequence
  Synthetic
cacaucuuuauaugaauaac

SEQ ID NO: 92283 - RNA, 23 nt, Artificial Sequence
  Synthetic
uggcacaucuuuauaugaauaac

SEQ ID NO: 92284 - RNA, 24 nt, Artificial Sequence
  Synthetic
cuggcacaucuuuauaugaauaac

SEQ ID NO: 92285 - RNA, 19 nt, Artificial Sequence
  Synthetic
ugauguuuguucucauaac

SEQ ID NO: 92286 - RNA, 20 nt, Artificial Sequence
  Synthetic
cugauguuuguucucauaac

SEQ ID NO: 92287 - RNA, 21 nt, Artificial Sequence
  Synthetic
ccugauguuuguucucauaac

SEQ ID NO: 92288 - RNA, 23 nt, Artificial Sequence
  Synthetic
agccugauguuuguucucauaac

SEQ ID NO: 92289 - RNA, 24 nt, Artificial Sequence
  Synthetic
aagccugauguuuguucucauaac

SEQ ID NO: 92290 - RNA, 18 nt, Artificial Sequence
  Synthetic
uggaaaagaauucauaac

SEQ ID NO: 92291 - RNA, 20 nt, Artificial Sequence
  Synthetic
aguggaaaagaauucauaac

SEQ ID NO: 92292 - RNA, 21 nt, Artificial Sequence
  Synthetic
uaguggaaaagaauucauaac

SEQ ID NO: 92293 - RNA, 23 nt, Artificial Sequence
  Synthetic
uguaguggaaaagaauucauaac

SEQ ID NO: 92294 - RNA, 24 nt, Artificial Sequence
  Synthetic
auguaguggaaaagaauucauaac

SEQ ID NO: 92295 - RNA, 19 nt, Artificial Sequence
  Synthetic
aguuauuguacaagauaac

SEQ ID NO: 92296 - RNA, 20 nt, Artificial Sequence
  Synthetic
uaguuauuguacaagauaac

SEQ ID NO: 92297 - RNA, 21 nt, Artificial Sequence
  Synthetic
uuaguuauuguacaagauaac

SEQ ID NO: 92298 - RNA, 22 nt, Artificial Sequence
  Synthetic
auuaguuauuguacaagauaac

SEQ ID NO: 92299 - RNA, 23 nt, Artificial Sequence
  Synthetic
uauuaguuauuguacaagauaac

SEQ ID NO: 92300 - RNA, 18 nt, Artificial Sequence
  Synthetic
cgcaaaguuuaagauaac

SEQ ID NO: 92301 - RNA, 20 nt, Artificial Sequence
  Synthetic
ugcgcaaaguuuaagauaac

SEQ ID NO: 92302 - RNA, 21 nt, Artificial Sequence
  Synthetic
cugcgcaaaguuuaagauaac

SEQ ID NO: 92303 - RNA, 22 nt, Artificial Sequence
  Synthetic
acugcgcaaaguuuaagauaac

SEQ ID NO: 92304 - RNA, 23 nt, Artificial Sequence
  Synthetic
aacugcgcaaaguuuaagauaac

SEQ ID NO: 92305 - RNA, 24 nt, Artificial Sequence
  Synthetic
uaacugcgcaaaguuuaagauaac

SEQ ID NO: 92306 - RNA, 18 nt, Artificial Sequence
  Synthetic
aaaauccuccaggauaac

SEQ ID NO: 92307 - RNA, 21 nt, Artificial Sequence
  Synthetic
uggaaaauccuccaggauaac

SEQ ID NO: 92308 - RNA, 22 nt, Artificial Sequence
  Synthetic
auggaaaauccuccaggauaac

SEQ ID NO: 92309 - RNA, 23 nt, Artificial Sequence
  Synthetic
cauggaaaauccuccaggauaac

SEQ ID NO: 92310 - RNA, 24 nt, Artificial Sequence
  Synthetic
ccauggaaaauccuccaggauaac

SEQ ID NO: 92311 - RNA, 19 nt, Artificial Sequence
  Synthetic
agauauaaaauaggauaac

SEQ ID NO: 92312 - RNA, 20 nt, Artificial Sequence
  Synthetic
aagauauaaaauaggauaac

SEQ ID NO: 92313 - RNA, 22 nt, Artificial Sequence
  Synthetic
agaagauauaaaauaggauaac

SEQ ID NO: 92314 - RNA, 23 nt, Artificial Sequence
  Synthetic
uagaagauauaaaauaggauaac

SEQ ID NO: 92315 - RNA, 24 nt, Artificial Sequence
  Synthetic
uuagaagauauaaaauaggauaac

SEQ ID NO: 92316 - RNA, 18 nt, Artificial Sequence
  Synthetic
auguaguaaaaugauaac

SEQ ID NO: 92317 - RNA, 19 nt, Artificial Sequence
  Synthetic
uauguaguaaaaugauaac

SEQ ID NO: 92318 - RNA, 20 nt, Artificial Sequence
  Synthetic
uuauguaguaaaaugauaac

SEQ ID NO: 92319 - RNA, 21 nt, Artificial Sequence
  Synthetic
uuuauguaguaaaaugauaac

SEQ ID NO: 92320 - RNA, 22 nt, Artificial Sequence
  Synthetic
cuuuauguaguaaaaugauaac

SEQ ID NO: 92321 - RNA, 24 nt, Artificial Sequence
  Synthetic
ugcuuuauguaguaaaaugauaac

SEQ ID NO: 92322 - RNA, 19 nt, Artificial Sequence
  Synthetic
aguuagauguaaugauaac

SEQ ID NO: 92323 - RNA, 20 nt, Artificial Sequence
  Synthetic
aaguuagauguaaugauaac

SEQ ID NO: 92324 - RNA, 21 nt, Artificial Sequence
  Synthetic
aaaguuagauguaaugauaac

SEQ ID NO: 92325 - RNA, 23 nt, Artificial Sequence
  Synthetic
agaaaguuagauguaaugauaac

SEQ ID NO: 92326 - RNA, 24 nt, Artificial Sequence
  Synthetic
aagaaaguuagauguaaugauaac

SEQ ID NO: 92327 - RNA, 19 nt, Artificial Sequence
  Synthetic
aggauuauuagaugauaac

SEQ ID NO: 92328 - RNA, 20 nt, Artificial Sequence
  Synthetic
aaggauuauuagaugauaac

SEQ ID NO: 92329 - RNA, 21 nt, Artificial Sequence
  Synthetic
aaaggauuauuagaugauaac

SEQ ID NO: 92330 - RNA, 22 nt, Artificial Sequence
  Synthetic
uaaaggauuauuagaugauaac

SEQ ID NO: 92331 - RNA, 24 nt, Artificial Sequence
  Synthetic
uguaaaggauuauuagaugauaac

SEQ ID NO: 92332 - RNA, 18 nt, Artificial Sequence
  Synthetic
acaaugcccauauauaac

SEQ ID NO: 92333 - RNA, 19 nt, Artificial Sequence
  Synthetic
cacaaugcccauauauaac

SEQ ID NO: 92334 - RNA, 20 nt, Artificial Sequence
  Synthetic
acacaaugcccauauauaac

SEQ ID NO: 92335 - RNA, 21 nt, Artificial Sequence
  Synthetic
aacacaaugcccauauauaac

SEQ ID NO: 92336 - RNA, 23 nt, Artificial Sequence
  Synthetic
ugaacacaaugcccauauauaac

SEQ ID NO: 92337 - RNA, 24 nt, Artificial Sequence
  Synthetic
augaacacaaugcccauauauaac

SEQ ID NO: 92338 - RNA, 18 nt, Artificial Sequence
  Synthetic
cccuaaaucuaaacuaac

SEQ ID NO: 92339 - RNA, 19 nt, Artificial Sequence
  Synthetic
ucccuaaaucuaaacuaac

SEQ ID NO: 92340 - RNA, 20 nt, Artificial Sequence
  Synthetic
aucccuaaaucuaaacuaac

SEQ ID NO: 92341 - RNA, 21 nt, Artificial Sequence
  Synthetic
uaucccuaaaucuaaacuaac

SEQ ID NO: 92342 - RNA, 22 nt, Artificial Sequence
  Synthetic
cuaucccuaaaucuaaacuaac

SEQ ID NO: 92343 - RNA, 23 nt, Artificial Sequence
  Synthetic
ucuaucccuaaaucuaaacuaac

SEQ ID NO: 92344 - RNA, 24 nt, Artificial Sequence
  Synthetic
uucuaucccuaaaucuaaacuaac

SEQ ID NO: 92345 - RNA, 18 nt, Artificial Sequence
  Synthetic
cauccaacaccaacuaac

SEQ ID NO: 92346 - RNA, 19 nt, Artificial Sequence
  Synthetic
acauccaacaccaacuaac

SEQ ID NO: 92347 - RNA, 20 nt, Artificial Sequence
  Synthetic
cacauccaacaccaacuaac

SEQ ID NO: 92348 - RNA, 21 nt, Artificial Sequence
  Synthetic
acacauccaacaccaacuaac

SEQ ID NO: 92349 - RNA, 22 nt, Artificial Sequence
  Synthetic
cacacauccaacaccaacuaac

SEQ ID NO: 92350 - RNA, 23 nt, Artificial Sequence
  Synthetic
acacacauccaacaccaacuaac

SEQ ID NO: 92351 - RNA, 24 nt, Artificial Sequence
  Synthetic
cacacacauccaacaccaacuaac

SEQ ID NO: 92352 - RNA, 18 nt, Artificial Sequence
  Synthetic
uuauuaccuucaacuaac

SEQ ID NO: 92353 - RNA, 19 nt, Artificial Sequence
  Synthetic
uuuauuaccuucaacuaac

SEQ ID NO: 92354 - RNA, 21 nt, Artificial Sequence
  Synthetic
aguuuauuaccuucaacuaac

SEQ ID NO: 92355 - RNA, 22 nt, Artificial Sequence
  Synthetic
uaguuuauuaccuucaacuaac

SEQ ID NO: 92356 - RNA, 23 nt, Artificial Sequence
  Synthetic
auaguuuauuaccuucaacuaac

SEQ ID NO: 92357 - RNA, 24 nt, Artificial Sequence
  Synthetic
uauaguuuauuaccuucaacuaac

SEQ ID NO: 92358 - RNA, 18 nt, Artificial Sequence
  Synthetic
agcugcugaaacacuaac

SEQ ID NO: 92359 - RNA, 19 nt, Artificial Sequence
  Synthetic
cagcugcugaaacacuaac

SEQ ID NO: 92360 - RNA, 20 nt, Artificial Sequence
  Synthetic
ucagcugcugaaacacuaac

SEQ ID NO: 92361 - RNA, 21 nt, Artificial Sequence
  Synthetic
uucagcugcugaaacacuaac

SEQ ID NO: 92362 - RNA, 22 nt, Artificial Sequence
  Synthetic
auucagcugcugaaacacuaac

SEQ ID NO: 92363 - RNA, 23 nt, Artificial Sequence
  Synthetic
uauucagcugcugaaacacuaac

SEQ ID NO: 92364 - RNA, 18 nt, Artificial Sequence
  Synthetic
uauccuuccuucacuaac

SEQ ID NO: 92365 - RNA, 19 nt, Artificial Sequence
  Synthetic
auauccuuccuucacuaac

SEQ ID NO: 92366 - RNA, 20 nt, Artificial Sequence
  Synthetic
cauauccuuccuucacuaac

SEQ ID NO: 92367 - RNA, 21 nt, Artificial Sequence
  Synthetic
acauauccuuccuucacuaac

SEQ ID NO: 92368 - RNA, 22 nt, Artificial Sequence
  Synthetic
aacauauccuuccuucacuaac

SEQ ID NO: 92369 - RNA, 23 nt, Artificial Sequence
  Synthetic
aaacauauccuuccuucacuaac

SEQ ID NO: 92370 - RNA, 24 nt, Artificial Sequence
  Synthetic
uaaacauauccuuccuucacuaac

SEQ ID NO: 92371 - RNA, 18 nt, Artificial Sequence
  Synthetic
ccuuuaaaagugacuaac

SEQ ID NO: 92372 - RNA, 19 nt, Artificial Sequence
  Synthetic
cccuuuaaaagugacuaac

SEQ ID NO: 92373 - RNA, 22 nt, Artificial Sequence
  Synthetic
cggcccuuuaaaagugacuaac

SEQ ID NO: 92374 - RNA, 24 nt, Artificial Sequence
  Synthetic
agcggcccuuuaaaagugacuaac

SEQ ID NO: 92375 - RNA, 20 nt, Artificial Sequence
  Synthetic
uggaaugaacccaaccuaac

SEQ ID NO: 92376 - RNA, 21 nt, Artificial Sequence
  Synthetic
auggaaugaacccaaccuaac

SEQ ID NO: 92377 - RNA, 22 nt, Artificial Sequence
  Synthetic
aauggaaugaacccaaccuaac

SEQ ID NO: 92378 - RNA, 19 nt, Artificial Sequence
  Synthetic
ugcuauuucucacccuaac

SEQ ID NO: 92379 - RNA, 20 nt, Artificial Sequence
  Synthetic
cugcuauuucucacccuaac

SEQ ID NO: 92380 - RNA, 22 nt, Artificial Sequence
  Synthetic
agcugcuauuucucacccuaac

SEQ ID NO: 92381 - RNA, 23 nt, Artificial Sequence
  Synthetic
cagcugcuauuucucacccuaac

SEQ ID NO: 92382 - RNA, 24 nt, Artificial Sequence
  Synthetic
ccagcugcuauuucucacccuaac

SEQ ID NO: 92383 - RNA, 18 nt, Artificial Sequence
  Synthetic
uuuauaagaaauccuaac

SEQ ID NO: 92384 - RNA, 21 nt, Artificial Sequence
  Synthetic
agguuuauaagaaauccuaac

SEQ ID NO: 92385 - RNA, 22 nt, Artificial Sequence
  Synthetic
aagguuuauaagaaauccuaac

SEQ ID NO: 92386 - RNA, 23 nt, Artificial Sequence
  Synthetic
aaagguuuauaagaaauccuaac

SEQ ID NO: 92387 - RNA, 24 nt, Artificial Sequence
  Synthetic
aaaagguuuauaagaaauccuaac

SEQ ID NO: 92388 - RNA, 18 nt, Artificial Sequence
  Synthetic
ugaaaugaaugggcuaac

SEQ ID NO: 92389 - RNA, 19 nt, Artificial Sequence
  Synthetic
augaaaugaaugggcuaac

SEQ ID NO: 92390 - RNA, 21 nt, Artificial Sequence
  Synthetic
ugaugaaaugaaugggcuaac

SEQ ID NO: 92391 - RNA, 22 nt, Artificial Sequence
  Synthetic
cugaugaaaugaaugggcuaac

SEQ ID NO: 92392 - RNA, 23 nt, Artificial Sequence
  Synthetic
ucugaugaaaugaaugggcuaac

SEQ ID NO: 92393 - RNA, 24 nt, Artificial Sequence
  Synthetic
cucugaugaaaugaaugggcuaac

SEQ ID NO: 92394 - RNA, 18 nt, Artificial Sequence
  Synthetic
uuacucauugucucuaac

SEQ ID NO: 92395 - RNA, 19 nt, Artificial Sequence
  Synthetic
cuuacucauugucucuaac

SEQ ID NO: 92396 - RNA, 21 nt, Artificial Sequence
  Synthetic
ugcuuacucauugucucuaac

SEQ ID NO: 92397 - RNA, 22 nt, Artificial Sequence
  Synthetic
cugcuuacucauugucucuaac

SEQ ID NO: 92398 - RNA, 23 nt, Artificial Sequence
  Synthetic
ucugcuuacucauugucucuaac

SEQ ID NO: 92399 - RNA, 24 nt, Artificial Sequence
  Synthetic
uucugcuuacucauugucucuaac

SEQ ID NO: 92400 - RNA, 18 nt, Artificial Sequence
  Synthetic
cuuuuuuacuucucuaac

SEQ ID NO: 92401 - RNA, 19 nt, Artificial Sequence
  Synthetic
acuuuuuuacuucucuaac

SEQ ID NO: 92402 - RNA, 20 nt, Artificial Sequence
  Synthetic
uacuuuuuuacuucucuaac

SEQ ID NO: 92403 - RNA, 22 nt, Artificial Sequence
  Synthetic
uguacuuuuuuacuucucuaac

SEQ ID NO: 92404 - RNA, 23 nt, Artificial Sequence
  Synthetic
uuguacuuuuuuacuucucuaac

SEQ ID NO: 92405 - RNA, 24 nt, Artificial Sequence
  Synthetic
uuuguacuuuuuuacuucucuaac

SEQ ID NO: 92406 - RNA, 21 nt, Artificial Sequence
  Synthetic
ugggcauuugugauuucuaac

SEQ ID NO: 92407 - RNA, 22 nt, Artificial Sequence
  Synthetic
augggcauuugugauuucuaac

SEQ ID NO: 92408 - RNA, 23 nt, Artificial Sequence
  Synthetic
aaugggcauuugugauuucuaac

SEQ ID NO: 92409 - RNA, 18 nt, Artificial Sequence
  Synthetic
uucaccucuaaaaguaac

SEQ ID NO: 92410 - RNA, 19 nt, Artificial Sequence
  Synthetic
auucaccucuaaaaguaac

SEQ ID NO: 92411 - RNA, 20 nt, Artificial Sequence
  Synthetic
uauucaccucuaaaaguaac

SEQ ID NO: 92412 - RNA, 21 nt, Artificial Sequence
  Synthetic
cuauucaccucuaaaaguaac

SEQ ID NO: 92413 - RNA, 22 nt, Artificial Sequence
  Synthetic
acuauucaccucuaaaaguaac

SEQ ID NO: 92414 - RNA, 23 nt, Artificial Sequence
  Synthetic
uacuauucaccucuaaaaguaac

SEQ ID NO: 92415 - RNA, 18 nt, Artificial Sequence
  Synthetic
aauucuaccuaaaguaac

SEQ ID NO: 92416 - RNA, 19 nt, Artificial Sequence
  Synthetic
uaauucuaccuaaaguaac

SEQ ID NO: 92417 - RNA, 20 nt, Artificial Sequence
  Synthetic
auaauucuaccuaaaguaac

SEQ ID NO: 92418 - RNA, 21 nt, Artificial Sequence
  Synthetic
uauaauucuaccuaaaguaac

SEQ ID NO: 92419 - RNA, 22 nt, Artificial Sequence
  Synthetic
auauaauucuaccuaaaguaac

SEQ ID NO: 92420 - RNA, 23 nt, Artificial Sequence
  Synthetic
uauauaauucuaccuaaaguaac

SEQ ID NO: 92421 - RNA, 24 nt, Artificial Sequence
  Synthetic
uuauauaauucuaccuaaaguaac

SEQ ID NO: 92422 - RNA, 18 nt, Artificial Sequence
  Synthetic
aauuuuccaucacguaac

SEQ ID NO: 92423 - RNA, 19 nt, Artificial Sequence
  Synthetic
aaauuuuccaucacguaac

SEQ ID NO: 92424 - RNA, 20 nt, Artificial Sequence
  Synthetic
aaaauuuuccaucacguaac

SEQ ID NO: 92425 - RNA, 21 nt, Artificial Sequence
  Synthetic
uaaaauuuuccaucacguaac

SEQ ID NO: 92426 - RNA, 22 nt, Artificial Sequence
  Synthetic
cuaaaauuuuccaucacguaac

SEQ ID NO: 92427 - RNA, 23 nt, Artificial Sequence
  Synthetic
acuaaaauuuuccaucacguaac

SEQ ID NO: 92428 - RNA, 24 nt, Artificial Sequence
  Synthetic
cacuaaaauuuuccaucacguaac

SEQ ID NO: 92429 - RNA, 18 nt, Artificial Sequence
  Synthetic
ccaggggcuccagguaac

SEQ ID NO: 92430 - RNA, 19 nt, Artificial Sequence
  Synthetic
cccaggggcuccagguaac

SEQ ID NO: 92431 - RNA, 20 nt, Artificial Sequence
  Synthetic
acccaggggcuccagguaac

SEQ ID NO: 92432 - RNA, 22 nt, Artificial Sequence
  Synthetic
agacccaggggcuccagguaac

SEQ ID NO: 92433 - RNA, 23 nt, Artificial Sequence
  Synthetic
aagacccaggggcuccagguaac

SEQ ID NO: 92434 - RNA, 24 nt, Artificial Sequence
  Synthetic
uaagacccaggggcuccagguaac

SEQ ID NO: 92435 - RNA, 18 nt, Artificial Sequence
  Synthetic
cuuuucaggugagguaac

SEQ ID NO: 92436 - RNA, 19 nt, Artificial Sequence
  Synthetic
acuuuucaggugagguaac

SEQ ID NO: 92437 - RNA, 20 nt, Artificial Sequence
  Synthetic
uacuuuucaggugagguaac

SEQ ID NO: 92438 - RNA, 21 nt, Artificial Sequence
  Synthetic
auacuuuucaggugagguaac

SEQ ID NO: 92439 - RNA, 22 nt, Artificial Sequence
  Synthetic
cauacuuuucaggugagguaac

SEQ ID NO: 92440 - RNA, 23 nt, Artificial Sequence
  Synthetic
ucauacuuuucaggugagguaac

SEQ ID NO: 92441 - RNA, 24 nt, Artificial Sequence
  Synthetic
cucauacuuuucaggugagguaac

SEQ ID NO: 92442 - RNA, 20 nt, Artificial Sequence
  Synthetic
ugggaggcuaacaugguaac

SEQ ID NO: 92443 - RNA, 21 nt, Artificial Sequence
  Synthetic
uugggaggcuaacaugguaac

SEQ ID NO: 92444 - RNA, 23 nt, Artificial Sequence
  Synthetic
aguugggaggcuaacaugguaac

SEQ ID NO: 92445 - RNA, 24 nt, Artificial Sequence
  Synthetic
aaguugggaggcuaacaugguaac

SEQ ID NO: 92446 - RNA, 18 nt, Artificial Sequence
  Synthetic
cuuucugaauaauguaac

SEQ ID NO: 92447 - RNA, 19 nt, Artificial Sequence
  Synthetic
acuuucugaauaauguaac

SEQ ID NO: 92448 - RNA, 20 nt, Artificial Sequence
  Synthetic
uacuuucugaauaauguaac

SEQ ID NO: 92449 - RNA, 21 nt, Artificial Sequence
  Synthetic
cuacuuucugaauaauguaac

SEQ ID NO: 92450 - RNA, 22 nt, Artificial Sequence
  Synthetic
ucuacuuucugaauaauguaac

SEQ ID NO: 92451 - RNA, 23 nt, Artificial Sequence
  Synthetic
aucuacuuucugaauaauguaac

SEQ ID NO: 92452 - RNA, 24 nt, Artificial Sequence
  Synthetic
uaucuacuuucugaauaauguaac

SEQ ID NO: 92453 - RNA, 18 nt, Artificial Sequence
  Synthetic
cuacaacgaacauguaac

SEQ ID NO: 92454 - RNA, 19 nt, Artificial Sequence
  Synthetic
ucuacaacgaacauguaac

SEQ ID NO: 92455 - RNA, 21 nt, Artificial Sequence
  Synthetic
agucuacaacgaacauguaac

SEQ ID NO: 92456 - RNA, 22 nt, Artificial Sequence
  Synthetic
cagucuacaacgaacauguaac

SEQ ID NO: 92457 - RNA, 23 nt, Artificial Sequence
  Synthetic
ucagucuacaacgaacauguaac

SEQ ID NO: 92458 - RNA, 24 nt, Artificial Sequence
  Synthetic
aucagucuacaacgaacauguaac

SEQ ID NO: 92459 - RNA, 18 nt, Artificial Sequence
  Synthetic
uuuguuaguguauguaac

SEQ ID NO: 92460 - RNA, 19 nt, Artificial Sequence
  Synthetic
auuuguuaguguauguaac

SEQ ID NO: 92461 - RNA, 20 nt, Artificial Sequence
  Synthetic
uauuuguuaguguauguaac

SEQ ID NO: 92462 - RNA, 21 nt, Artificial Sequence
  Synthetic
auauuuguuaguguauguaac

SEQ ID NO: 92463 - RNA, 22 nt, Artificial Sequence
  Synthetic
uauauuuguuaguguauguaac

SEQ ID NO: 92464 - RNA, 23 nt, Artificial Sequence
  Synthetic
cuauauuuguuaguguauguaac

SEQ ID NO: 92465 - RNA, 24 nt, Artificial Sequence
  Synthetic
ucuauauuuguuaguguauguaac

SEQ ID NO: 92466 - RNA, 18 nt, Artificial Sequence
  Synthetic
ucuagagugcuuuguaac

SEQ ID NO: 92467 - RNA, 19 nt, Artificial Sequence
  Synthetic
cucuagagugcuuuguaac

SEQ ID NO: 92468 - RNA, 20 nt, Artificial Sequence
  Synthetic
acucuagagugcuuuguaac

SEQ ID NO: 92469 - RNA, 22 nt, Artificial Sequence
  Synthetic
ugacucuagagugcuuuguaac

SEQ ID NO: 92470 - RNA, 23 nt, Artificial Sequence
  Synthetic
cugacucuagagugcuuuguaac

SEQ ID NO: 92471 - RNA, 24 nt, Artificial Sequence
  Synthetic
ccugacucuagagugcuuuguaac

SEQ ID NO: 92472 - RNA, 18 nt, Artificial Sequence
  Synthetic
cuaaaucugaaaauuaac

SEQ ID NO: 92473 - RNA, 19 nt, Artificial Sequence
  Synthetic
ucuaaaucugaaaauuaac

SEQ ID NO: 92474 - RNA, 21 nt, Artificial Sequence
  Synthetic
ugucuaaaucugaaaauuaac

SEQ ID NO: 92475 - RNA, 22 nt, Artificial Sequence
  Synthetic
cugucuaaaucugaaaauuaac

SEQ ID NO: 92476 - RNA, 23 nt, Artificial Sequence
  Synthetic
acugucuaaaucugaaaauuaac

SEQ ID NO: 92477 - RNA, 18 nt, Artificial Sequence
  Synthetic
aucuucaaugugauuaac

SEQ ID NO: 92478 - RNA, 19 nt, Artificial Sequence
  Synthetic
uaucuucaaugugauuaac

SEQ ID NO: 92479 - RNA, 20 nt, Artificial Sequence
  Synthetic
cuaucuucaaugugauuaac

SEQ ID NO: 92480 - RNA, 22 nt, Artificial Sequence
  Synthetic
ugcuaucuucaaugugauuaac

SEQ ID NO: 92481 - RNA, 23 nt, Artificial Sequence
  Synthetic
augcuaucuucaaugugauuaac

SEQ ID NO: 92482 - RNA, 24 nt, Artificial Sequence
  Synthetic
caugcuaucuucaaugugauuaac

SEQ ID NO: 92483 - RNA, 18 nt, Artificial Sequence
  Synthetic
aucuuauaaugccuuaac

SEQ ID NO: 92484 - RNA, 19 nt, Artificial Sequence
  Synthetic
caucuuauaaugccuuaac

SEQ ID NO: 92485 - RNA, 20 nt, Artificial Sequence
  Synthetic
ucaucuuauaaugccuuaac

SEQ ID NO: 92486 - RNA, 21 nt, Artificial Sequence
  Synthetic
uucaucuuauaaugccuuaac

SEQ ID NO: 92487 - RNA, 22 nt, Artificial Sequence
  Synthetic
auucaucuuauaaugccuuaac

SEQ ID NO: 92488 - RNA, 23 nt, Artificial Sequence
  Synthetic
uauucaucuuauaaugccuuaac

SEQ ID NO: 92489 - RNA, 24 nt, Artificial Sequence
  Synthetic
uuauucaucuuauaaugccuuaac

SEQ ID NO: 92490 - RNA, 18 nt, Artificial Sequence
  Synthetic
ugcacagguauucuuaac

SEQ ID NO: 92491 - RNA, 19 nt, Artificial Sequence
  Synthetic
uugcacagguauucuuaac

SEQ ID NO: 92492 - RNA, 20 nt, Artificial Sequence
  Synthetic
auugcacagguauucuuaac

SEQ ID NO: 92493 - RNA, 21 nt, Artificial Sequence
  Synthetic
aauugcacagguauucuuaac

SEQ ID NO: 92494 - RNA, 22 nt, Artificial Sequence
  Synthetic
aaauugcacagguauucuuaac

SEQ ID NO: 92495 - RNA, 23 nt, Artificial Sequence
  Synthetic
aaaauugcacagguauucuuaac

SEQ ID NO: 92496 - RNA, 24 nt, Artificial Sequence
  Synthetic
caaaauugcacagguauucuuaac

SEQ ID NO: 92497 - RNA, 18 nt, Artificial Sequence
  Synthetic
aaauaaauccauguuaac

SEQ ID NO: 92498 - RNA, 19 nt, Artificial Sequence
  Synthetic
caaauaaauccauguuaac

SEQ ID NO: 92499 - RNA, 20 nt, Artificial Sequence
  Synthetic
ucaaauaaauccauguuaac

SEQ ID NO: 92500 - RNA, 21 nt, Artificial Sequence
  Synthetic
uucaaauaaauccauguuaac

SEQ ID NO: 92501 - RNA, 22 nt, Artificial Sequence
  Synthetic
uuucaaauaaauccauguuaac

SEQ ID NO: 92502 - RNA, 23 nt, Artificial Sequence
  Synthetic
uuuucaaauaaauccauguuaac

SEQ ID NO: 92503 - RNA, 24 nt, Artificial Sequence
  Synthetic
auuuucaaauaaauccauguuaac

SEQ ID NO: 92504 - RNA, 19 nt, Artificial Sequence
  Synthetic
agauagguaaacauuuaac

SEQ ID NO: 92505 - RNA, 20 nt, Artificial Sequence
  Synthetic
cagauagguaaacauuuaac

SEQ ID NO: 92506 - RNA, 21 nt, Artificial Sequence
  Synthetic
acagauagguaaacauuuaac

SEQ ID NO: 92507 - RNA, 22 nt, Artificial Sequence
  Synthetic
uacagauagguaaacauuuaac

SEQ ID NO: 92508 - RNA, 19 nt, Artificial Sequence
  Synthetic
ugcuuaaaguagcuuuaac

SEQ ID NO: 92509 - RNA, 20 nt, Artificial Sequence
  Synthetic
cugcuuaaaguagcuuuaac

SEQ ID NO: 92510 - RNA, 21 nt, Artificial Sequence
  Synthetic
ccugcuuaaaguagcuuuaac

SEQ ID NO: 92511 - RNA, 22 nt, Artificial Sequence
  Synthetic
uccugcuuaaaguagcuuuaac

SEQ ID NO: 92512 - RNA, 23 nt, Artificial Sequence
  Synthetic
auccugcuuaaaguagcuuuaac

SEQ ID NO: 92513 - RNA, 18 nt, Artificial Sequence
  Synthetic
uucccgugguucuuuaac

SEQ ID NO: 92514 - RNA, 19 nt, Artificial Sequence
  Synthetic
cuucccgugguucuuuaac

SEQ ID NO: 92515 - RNA, 20 nt, Artificial Sequence
  Synthetic
ucuucccgugguucuuuaac

SEQ ID NO: 92516 - RNA, 21 nt, Artificial Sequence
  Synthetic
uucuucccgugguucuuuaac

SEQ ID NO: 92517 - RNA, 22 nt, Artificial Sequence
  Synthetic
uuucuucccgugguucuuuaac

SEQ ID NO: 92518 - RNA, 23 nt, Artificial Sequence
  Synthetic
cuuucuucccgugguucuuuaac

SEQ ID NO: 92519 - RNA, 24 nt, Artificial Sequence
  Synthetic
ccuuucuucccgugguucuuuaac

SEQ ID NO: 92520 - RNA, 18 nt, Artificial Sequence
  Synthetic
aauuacuugaaguuuaac

SEQ ID NO: 92521 - RNA, 19 nt, Artificial Sequence
  Synthetic
caauuacuugaaguuuaac

SEQ ID NO: 92522 - RNA, 20 nt, Artificial Sequence
  Synthetic
ccaauuacuugaaguuuaac

SEQ ID NO: 92523 - RNA, 21 nt, Artificial Sequence
  Synthetic
cccaauuacuugaaguuuaac

SEQ ID NO: 92524 - RNA, 22 nt, Artificial Sequence
  Synthetic
acccaauuacuugaaguuuaac

SEQ ID NO: 92525 - RNA, 23 nt, Artificial Sequence
  Synthetic
cacccaauuacuugaaguuuaac

SEQ ID NO: 92526 - RNA, 24 nt, Artificial Sequence
  Synthetic
acacccaauuacuugaaguuuaac

SEQ ID NO: 92527 - RNA, 18 nt, Artificial Sequence
  Synthetic
agagaucuaguguuuaac

SEQ ID NO: 92528 - RNA, 19 nt, Artificial Sequence
  Synthetic
aagagaucuaguguuuaac

SEQ ID NO: 92529 - RNA, 20 nt, Artificial Sequence
  Synthetic
aaagagaucuaguguuuaac

SEQ ID NO: 92530 - RNA, 21 nt, Artificial Sequence
  Synthetic
aaaagagaucuaguguuuaac

SEQ ID NO: 92531 - RNA, 22 nt, Artificial Sequence
  Synthetic
uaaaagagaucuaguguuuaac

SEQ ID NO: 92532 - RNA, 24 nt, Artificial Sequence
  Synthetic
uguaaaagagaucuaguguuuaac

SEQ ID NO: 92533 - RNA, 18 nt, Artificial Sequence
  Synthetic
auaauuauacauuuuaac

SEQ ID NO: 92534 - RNA, 19 nt, Artificial Sequence
  Synthetic
uauaauuauacauuuuaac

SEQ ID NO: 92535 - RNA, 20 nt, Artificial Sequence
  Synthetic
auauaauuauacauuuuaac

SEQ ID NO: 92536 - RNA, 21 nt, Artificial Sequence
  Synthetic
uauauaauuauacauuuuaac

SEQ ID NO: 92537 - RNA, 22 nt, Artificial Sequence
  Synthetic
uuauauaauuauacauuuuaac

SEQ ID NO: 92538 - RNA, 23 nt, Artificial Sequence
  Synthetic
uuuauauaauuauacauuuuaac

SEQ ID NO: 92539 - RNA, 24 nt, Artificial Sequence
  Synthetic
auuuauauaauuauacauuuuaac

SEQ ID NO: 92540 - RNA, 18 nt, Artificial Sequence
  Synthetic
cagugucagcuuuuuaac

SEQ ID NO: 92541 - RNA, 23 nt, Artificial Sequence
  Synthetic
aggggcagugucagcuuuuuaac

SEQ ID NO: 92542 - RNA, 24 nt, Artificial Sequence
  Synthetic
aaggggcagugucagcuuuuuaac

SEQ ID NO: 92543 - RNA, 18 nt, Artificial Sequence
  Synthetic
aaagauuuucaaaaacac

SEQ ID NO: 92544 - RNA, 20 nt, Artificial Sequence
  Synthetic
agaaagauuuucaaaaacac

SEQ ID NO: 92545 - RNA, 21 nt, Artificial Sequence
  Synthetic
aagaaagauuuucaaaaacac

SEQ ID NO: 92546 - RNA, 22 nt, Artificial Sequence
  Synthetic
aaagaaagauuuucaaaaacac

SEQ ID NO: 92547 - RNA, 23 nt, Artificial Sequence
  Synthetic
aaaagaaagauuuucaaaaacac

SEQ ID NO: 92548 - RNA, 21 nt, Artificial Sequence
  Synthetic
agggauaaauauuaaaaacac

SEQ ID NO: 92549 - RNA, 23 nt, Artificial Sequence
  Synthetic
agagggauaaauauuaaaaacac

SEQ ID NO: 92550 - RNA, 24 nt, Artificial Sequence
  Synthetic
aagagggauaaauauuaaaaacac

SEQ ID NO: 92551 - RNA, 18 nt, Artificial Sequence
  Synthetic
uuuuucaauaugaaacac

SEQ ID NO: 92552 - RNA, 22 nt, Artificial Sequence
  Synthetic
uggguuuuucaauaugaaacac

SEQ ID NO: 92553 - RNA, 23 nt, Artificial Sequence
  Synthetic
auggguuuuucaauaugaaacac

SEQ ID NO: 92554 - RNA, 24 nt, Artificial Sequence
  Synthetic
aauggguuuuucaauaugaaacac

SEQ ID NO: 92555 - RNA, 19 nt, Artificial Sequence
  Synthetic
uggaacacuuguuaaacac

SEQ ID NO: 92556 - RNA, 20 nt, Artificial Sequence
  Synthetic
auggaacacuuguuaaacac

SEQ ID NO: 92557 - RNA, 23 nt, Artificial Sequence
  Synthetic
uggauggaacacuuguuaaacac

SEQ ID NO: 92558 - RNA, 24 nt, Artificial Sequence
  Synthetic
uuggauggaacacuuguuaaacac

SEQ ID NO: 92559 - RNA, 18 nt, Artificial Sequence
  Synthetic
caaauauauauacaacac

SEQ ID NO: 92560 - RNA, 20 nt, Artificial Sequence
  Synthetic
agcaaauauauauacaacac

SEQ ID NO: 92561 - RNA, 21 nt, Artificial Sequence
  Synthetic
aagcaaauauauauacaacac

SEQ ID NO: 92562 - RNA, 22 nt, Artificial Sequence
  Synthetic
aaagcaaauauauauacaacac

SEQ ID NO: 92563 - RNA, 23 nt, Artificial Sequence
  Synthetic
uaaagcaaauauauauacaacac

SEQ ID NO: 92564 - RNA, 24 nt, Artificial Sequence
  Synthetic
auaaagcaaauauauauacaacac

SEQ ID NO: 92565 - RNA, 18 nt, Artificial Sequence
  Synthetic
uacaaaaaucgucaacac

SEQ ID NO: 92566 - RNA, 19 nt, Artificial Sequence
  Synthetic
auacaaaaaucgucaacac

SEQ ID NO: 92567 - RNA, 20 nt, Artificial Sequence
  Synthetic
cauacaaaaaucgucaacac

SEQ ID NO: 92568 - RNA, 22 nt, Artificial Sequence
  Synthetic
agcauacaaaaaucgucaacac

SEQ ID NO: 92569 - RNA, 23 nt, Artificial Sequence
  Synthetic
uagcauacaaaaaucgucaacac

SEQ ID NO: 92570 - RNA, 18 nt, Artificial Sequence
  Synthetic
aacacccaguuagaacac

SEQ ID NO: 92571 - RNA, 20 nt, Artificial Sequence
  Synthetic
agaacacccaguuagaacac

SEQ ID NO: 92572 - RNA, 21 nt, Artificial Sequence
  Synthetic
cagaacacccaguuagaacac

SEQ ID NO: 92573 - RNA, 22 nt, Artificial Sequence
  Synthetic
acagaacacccaguuagaacac

SEQ ID NO: 92574 - RNA, 23 nt, Artificial Sequence
  Synthetic
uacagaacacccaguuagaacac

SEQ ID NO: 92575 - RNA, 24 nt, Artificial Sequence
  Synthetic
auacagaacacccaguuagaacac

SEQ ID NO: 92576 - RNA, 18 nt, Artificial Sequence
  Synthetic
agcagaugaggauaacac

SEQ ID NO: 92577 - RNA, 22 nt, Artificial Sequence
  Synthetic
ugggagcagaugaggauaacac

SEQ ID NO: 92578 - RNA, 23 nt, Artificial Sequence
  Synthetic
uugggagcagaugaggauaacac

SEQ ID NO: 92579 - RNA, 24 nt, Artificial Sequence
  Synthetic
uuugggagcagaugaggauaacac

SEQ ID NO: 92580 - RNA, 18 nt, Artificial Sequence
  Synthetic
auacuugcuauauaacac

SEQ ID NO: 92581 - RNA, 19 nt, Artificial Sequence
  Synthetic
cauacuugcuauauaacac

SEQ ID NO: 92582 - RNA, 20 nt, Artificial Sequence
  Synthetic
acauacuugcuauauaacac

SEQ ID NO: 92583 - RNA, 21 nt, Artificial Sequence
  Synthetic
aacauacuugcuauauaacac

SEQ ID NO: 92584 - RNA, 22 nt, Artificial Sequence
  Synthetic
aaacauacuugcuauauaacac

SEQ ID NO: 92585 - RNA, 23 nt, Artificial Sequence
  Synthetic
aaaacauacuugcuauauaacac

SEQ ID NO: 92586 - RNA, 24 nt, Artificial Sequence
  Synthetic
caaaacauacuugcuauauaacac

SEQ ID NO: 92587 - RNA, 18 nt, Artificial Sequence
  Synthetic
aguaaaguaaaguaacac

SEQ ID NO: 92588 - RNA, 19 nt, Artificial Sequence
  Synthetic
uaguaaaguaaaguaacac

SEQ ID NO: 92589 - RNA, 20 nt, Artificial Sequence
  Synthetic
auaguaaaguaaaguaacac

SEQ ID NO: 92590 - RNA, 21 nt, Artificial Sequence
  Synthetic
uauaguaaaguaaaguaacac

SEQ ID NO: 92591 - RNA, 22 nt, Artificial Sequence
  Synthetic
auauaguaaaguaaaguaacac

SEQ ID NO: 92592 - RNA, 23 nt, Artificial Sequence
  Synthetic
aauauaguaaaguaaaguaacac

SEQ ID NO: 92593 - RNA, 24 nt, Artificial Sequence
  Synthetic
aaauauaguaaaguaaaguaacac

SEQ ID NO: 92594 - RNA, 21 nt, Artificial Sequence
  Synthetic
aaauguuuguuaaauuaacac

SEQ ID NO: 92595 - RNA, 23 nt, Artificial Sequence
  Synthetic
agaaauguuuguuaaauuaacac

SEQ ID NO: 92596 - RNA, 24 nt, Artificial Sequence
  Synthetic
cagaaauguuuguuaaauuaacac

SEQ ID NO: 92597 - RNA, 18 nt, Artificial Sequence
  Synthetic
ccaaaugaaucuuaacac

SEQ ID NO: 92598 - RNA, 19 nt, Artificial Sequence
  Synthetic
cccaaaugaaucuuaacac

SEQ ID NO: 92599 - RNA, 20 nt, Artificial Sequence
  Synthetic
ccccaaaugaaucuuaacac

SEQ ID NO: 92600 - RNA, 21 nt, Artificial Sequence
  Synthetic
accccaaaugaaucuuaacac

SEQ ID NO: 92601 - RNA, 23 nt, Artificial Sequence
  Synthetic
ugaccccaaaugaaucuuaacac

SEQ ID NO: 92602 - RNA, 24 nt, Artificial Sequence
  Synthetic
uugaccccaaaugaaucuuaacac

SEQ ID NO: 92603 - RNA, 18 nt, Artificial Sequence
  Synthetic
uuggcaugaaauacacac

SEQ ID NO: 92604 - RNA, 19 nt, Artificial Sequence
  Synthetic
uuuggcaugaaauacacac

SEQ ID NO: 92605 - RNA, 20 nt, Artificial Sequence
  Synthetic
uuuuggcaugaaauacacac

SEQ ID NO: 92606 - RNA, 21 nt, Artificial Sequence
  Synthetic
cuuuuggcaugaaauacacac

SEQ ID NO: 92607 - RNA, 22 nt, Artificial Sequence
  Synthetic
acuuuuggcaugaaauacacac

SEQ ID NO: 92608 - RNA, 24 nt, Artificial Sequence
  Synthetic
agacuuuuggcaugaaauacacac

SEQ ID NO: 92609 - RNA, 18 nt, Artificial Sequence
  Synthetic
acugguuuugauacacac

SEQ ID NO: 92610 - RNA, 19 nt, Artificial Sequence
  Synthetic
aacugguuuugauacacac

SEQ ID NO: 92611 - RNA, 20 nt, Artificial Sequence
  Synthetic
aaacugguuuugauacacac

SEQ ID NO: 92612 - RNA, 21 nt, Artificial Sequence
  Synthetic
aaaacugguuuugauacacac

SEQ ID NO: 92613 - RNA, 23 nt, Artificial Sequence
  Synthetic
cgaaaacugguuuugauacacac

SEQ ID NO: 92614 - RNA, 24 nt, Artificial Sequence
  Synthetic
acgaaaacugguuuugauacacac

SEQ ID NO: 92615 - RNA, 18 nt, Artificial Sequence
  Synthetic
accacuucauuaccacac

SEQ ID NO: 92616 - RNA, 19 nt, Artificial Sequence
  Synthetic
aaccacuucauuaccacac

SEQ ID NO: 92617 - RNA, 20 nt, Artificial Sequence
  Synthetic
uaaccacuucauuaccacac

SEQ ID NO: 92618 - RNA, 21 nt, Artificial Sequence
  Synthetic
auaaccacuucauuaccacac

SEQ ID NO: 92619 - RNA, 22 nt, Artificial Sequence
  Synthetic
cauaaccacuucauuaccacac

SEQ ID NO: 92620 - RNA, 24 nt, Artificial Sequence
  Synthetic
ugcauaaccacuucauuaccacac

SEQ ID NO: 92621 - RNA, 18 nt, Artificial Sequence
  Synthetic
uuccacuagaccgcacac

SEQ ID NO: 92622 - RNA, 19 nt, Artificial Sequence
  Synthetic
cuuccacuagaccgcacac

SEQ ID NO: 92623 - RNA, 20 nt, Artificial Sequence
  Synthetic
ccuuccacuagaccgcacac

SEQ ID NO: 92624 - RNA, 21 nt, Artificial Sequence
  Synthetic
uccuuccacuagaccgcacac

SEQ ID NO: 92625 - RNA, 22 nt, Artificial Sequence
  Synthetic
uuccuuccacuagaccgcacac

SEQ ID NO: 92626 - RNA, 23 nt, Artificial Sequence
  Synthetic
uuuccuuccacuagaccgcacac

SEQ ID NO: 92627 - RNA, 24 nt, Artificial Sequence
  Synthetic
auuuccuuccacuagaccgcacac

SEQ ID NO: 92628 - RNA, 20 nt, Artificial Sequence
  Synthetic
aggcaaccuagguggcacac

SEQ ID NO: 92629 - RNA, 21 nt, Artificial Sequence
  Synthetic
aaggcaaccuagguggcacac

SEQ ID NO: 92630 - RNA, 22 nt, Artificial Sequence
  Synthetic
uaaggcaaccuagguggcacac

SEQ ID NO: 92631 - RNA, 23 nt, Artificial Sequence
  Synthetic
uuaaggcaaccuagguggcacac

SEQ ID NO: 92632 - RNA, 24 nt, Artificial Sequence
  Synthetic
cuuaaggcaaccuagguggcacac

SEQ ID NO: 92633 - RNA, 19 nt, Artificial Sequence
  Synthetic
ugaauugaguuuggcacac

SEQ ID NO: 92634 - RNA, 20 nt, Artificial Sequence
  Synthetic
augaauugaguuuggcacac

SEQ ID NO: 92635 - RNA, 21 nt, Artificial Sequence
  Synthetic
aaugaauugaguuuggcacac

SEQ ID NO: 92636 - RNA, 22 nt, Artificial Sequence
  Synthetic
aaaugaauugaguuuggcacac

SEQ ID NO: 92637 - RNA, 24 nt, Artificial Sequence
  Synthetic
ugaaaugaauugaguuuggcacac

SEQ ID NO: 92638 - RNA, 18 nt, Artificial Sequence
  Synthetic
augaucccacuaucacac

SEQ ID NO: 92639 - RNA, 19 nt, Artificial Sequence
  Synthetic
uaugaucccacuaucacac

SEQ ID NO: 92640 - RNA, 20 nt, Artificial Sequence
  Synthetic
uuaugaucccacuaucacac

SEQ ID NO: 92641 - RNA, 21 nt, Artificial Sequence
  Synthetic
auuaugaucccacuaucacac

SEQ ID NO: 92642 - RNA, 22 nt, Artificial Sequence
  Synthetic
uauuaugaucccacuaucacac

SEQ ID NO: 92643 - RNA, 23 nt, Artificial Sequence
  Synthetic
uuauuaugaucccacuaucacac

SEQ ID NO: 92644 - RNA, 24 nt, Artificial Sequence
  Synthetic
auuauuaugaucccacuaucacac

SEQ ID NO: 92645 - RNA, 18 nt, Artificial Sequence
  Synthetic
aacacaacacacagacac

SEQ ID NO: 92646 - RNA, 19 nt, Artificial Sequence
  Synthetic
uaacacaacacacagacac

SEQ ID NO: 92647 - RNA, 20 nt, Artificial Sequence
  Synthetic
auaacacaacacacagacac

SEQ ID NO: 92648 - RNA, 21 nt, Artificial Sequence
  Synthetic
uauaacacaacacacagacac

SEQ ID NO: 92649 - RNA, 22 nt, Artificial Sequence
  Synthetic
auauaacacaacacacagacac

SEQ ID NO: 92650 - RNA, 23 nt, Artificial Sequence
  Synthetic
aauauaacacaacacacagacac

SEQ ID NO: 92651 - RNA, 24 nt, Artificial Sequence
  Synthetic
uaauauaacacaacacacagacac

SEQ ID NO: 92652 - RNA, 18 nt, Artificial Sequence
  Synthetic
cagcugaucugcagacac

SEQ ID NO: 92653 - RNA, 20 nt, Artificial Sequence
  Synthetic
ugcagcugaucugcagacac

SEQ ID NO: 92654 - RNA, 20 nt, Artificial Sequence
  Synthetic
aggcaaacagucagagacac

SEQ ID NO: 92655 - RNA, 21 nt, Artificial Sequence
  Synthetic
aaggcaaacagucagagacac

SEQ ID NO: 92656 - RNA, 22 nt, Artificial Sequence
  Synthetic
uaaggcaaacagucagagacac

SEQ ID NO: 92657 - RNA, 23 nt, Artificial Sequence
  Synthetic
cuaaggcaaacagucagagacac

SEQ ID NO: 92658 - RNA, 24 nt, Artificial Sequence
  Synthetic
ccuaaggcaaacagucagagacac

SEQ ID NO: 92659 - RNA, 18 nt, Artificial Sequence
  Synthetic
agccauguuuugagacac

SEQ ID NO: 92660 - RNA, 19 nt, Artificial Sequence
  Synthetic
cagccauguuuugagacac

SEQ ID NO: 92661 - RNA, 21 nt, Artificial Sequence
  Synthetic
ugcagccauguuuugagacac

SEQ ID NO: 92662 - RNA, 22 nt, Artificial Sequence
  Synthetic
uugcagccauguuuugagacac

SEQ ID NO: 92663 - RNA, 19 nt, Artificial Sequence
  Synthetic
ugauuguuagagccgacac

SEQ ID NO: 92664 - RNA, 21 nt, Artificial Sequence
  Synthetic
agugauuguuagagccgacac

SEQ ID NO: 92665 - RNA, 22 nt, Artificial Sequence
  Synthetic
uagugauuguuagagccgacac

SEQ ID NO: 92666 - RNA, 23 nt, Artificial Sequence
  Synthetic
auagugauuguuagagccgacac

SEQ ID NO: 92667 - RNA, 18 nt, Artificial Sequence
  Synthetic
cuagcacauuaucgacac

SEQ ID NO: 92668 - RNA, 19 nt, Artificial Sequence
  Synthetic
acuagcacauuaucgacac

SEQ ID NO: 92669 - RNA, 20 nt, Artificial Sequence
  Synthetic
uacuagcacauuaucgacac

SEQ ID NO: 92670 - RNA, 22 nt, Artificial Sequence
  Synthetic
aguacuagcacauuaucgacac

SEQ ID NO: 92671 - RNA, 23 nt, Artificial Sequence
  Synthetic
uaguacuagcacauuaucgacac

SEQ ID NO: 92672 - RNA, 24 nt, Artificial Sequence
  Synthetic
uuaguacuagcacauuaucgacac

SEQ ID NO: 92673 - RNA, 21 nt, Artificial Sequence
  Synthetic
caauuaaaaaaaaaaggacac

SEQ ID NO: 92674 - RNA, 22 nt, Artificial Sequence
  Synthetic
ucaauuaaaaaaaaaaggacac

SEQ ID NO: 92675 - RNA, 23 nt, Artificial Sequence
  Synthetic
uucaauuaaaaaaaaaaggacac

SEQ ID NO: 92676 - RNA, 18 nt, Artificial Sequence
  Synthetic
agacucuaguaaggacac

SEQ ID NO: 92677 - RNA, 19 nt, Artificial Sequence
  Synthetic
uagacucuaguaaggacac

SEQ ID NO: 92678 - RNA, 20 nt, Artificial Sequence
  Synthetic
uuagacucuaguaaggacac

SEQ ID NO: 92679 - RNA, 21 nt, Artificial Sequence
  Synthetic
uuuagacucuaguaaggacac

SEQ ID NO: 92680 - RNA, 22 nt, Artificial Sequence
  Synthetic
auuuagacucuaguaaggacac

SEQ ID NO: 92681 - RNA, 23 nt, Artificial Sequence
  Synthetic
aauuuagacucuaguaaggacac

SEQ ID NO: 92682 - RNA, 24 nt, Artificial Sequence
  Synthetic
caauuuagacucuaguaaggacac

SEQ ID NO: 92683 - RNA, 18 nt, Artificial Sequence
  Synthetic
ucauugauaaauggacac

SEQ ID NO: 92684 - RNA, 20 nt, Artificial Sequence
  Synthetic
agucauugauaaauggacac

SEQ ID NO: 92685 - RNA, 21 nt, Artificial Sequence
  Synthetic
aagucauugauaaauggacac

SEQ ID NO: 92686 - RNA, 22 nt, Artificial Sequence
  Synthetic
uaagucauugauaaauggacac

SEQ ID NO: 92687 - RNA, 23 nt, Artificial Sequence
  Synthetic
uuaagucauugauaaauggacac

SEQ ID NO: 92688 - RNA, 18 nt, Artificial Sequence
  Synthetic
aggggcugcaguggacac

SEQ ID NO: 92689 - RNA, 22 nt, Artificial Sequence
  Synthetic
agggaggggcugcaguggacac

SEQ ID NO: 92690 - RNA, 23 nt, Artificial Sequence
  Synthetic
aagggaggggcugcaguggacac

SEQ ID NO: 92691 - RNA, 24 nt, Artificial Sequence
  Synthetic
aaagggaggggcugcaguggacac

SEQ ID NO: 92692 - RNA, 18 nt, Artificial Sequence
  Synthetic
ucuauagcugaaugacac

SEQ ID NO: 92693 - RNA, 19 nt, Artificial Sequence
  Synthetic
uucuauagcugaaugacac

SEQ ID NO: 92694 - RNA, 20 nt, Artificial Sequence
  Synthetic
uuucuauagcugaaugacac

SEQ ID NO: 92695 - RNA, 21 nt, Artificial Sequence
  Synthetic
auuucuauagcugaaugacac

SEQ ID NO: 92696 - RNA, 23 nt, Artificial Sequence
  Synthetic
agauuucuauagcugaaugacac

SEQ ID NO: 92697 - RNA, 24 nt, Artificial Sequence
  Synthetic
aagauuucuauagcugaaugacac

SEQ ID NO: 92698 - RNA, 19 nt, Artificial Sequence
  Synthetic
aguauaagggcccugacac

SEQ ID NO: 92699 - RNA, 20 nt, Artificial Sequence
  Synthetic
aaguauaagggcccugacac

SEQ ID NO: 92700 - RNA, 21 nt, Artificial Sequence
  Synthetic
caaguauaagggcccugacac

SEQ ID NO: 92701 - RNA, 23 nt, Artificial Sequence
  Synthetic
agcaaguauaagggcccugacac

SEQ ID NO: 92702 - RNA, 24 nt, Artificial Sequence
  Synthetic
aagcaaguauaagggcccugacac

SEQ ID NO: 92703 - RNA, 18 nt, Artificial Sequence
  Synthetic
acugugucugccugacac

SEQ ID NO: 92704 - RNA, 20 nt, Artificial Sequence
  Synthetic
agacugugucugccugacac

SEQ ID NO: 92705 - RNA, 21 nt, Artificial Sequence
  Synthetic
aagacugugucugccugacac

SEQ ID NO: 92706 - RNA, 22 nt, Artificial Sequence
  Synthetic
aaagacugugucugccugacac

SEQ ID NO: 92707 - RNA, 23 nt, Artificial Sequence
  Synthetic
caaagacugugucugccugacac

SEQ ID NO: 92708 - RNA, 24 nt, Artificial Sequence
  Synthetic
acaaagacugugucugccugacac

SEQ ID NO: 92709 - RNA, 18 nt, Artificial Sequence
  Synthetic
uauauacaagacauacac

SEQ ID NO: 92710 - RNA, 19 nt, Artificial Sequence
  Synthetic
auauauacaagacauacac

SEQ ID NO: 92711 - RNA, 20 nt, Artificial Sequence
  Synthetic
aauauauacaagacauacac

SEQ ID NO: 92712 - RNA, 21 nt, Artificial Sequence
  Synthetic
aaauauauacaagacauacac

SEQ ID NO: 92713 - RNA, 22 nt, Artificial Sequence
  Synthetic
aaaauauauacaagacauacac

SEQ ID NO: 92714 - RNA, 23 nt, Artificial Sequence
  Synthetic
uaaaauauauacaagacauacac

SEQ ID NO: 92715 - RNA, 24 nt, Artificial Sequence
  Synthetic
uuaaaauauauacaagacauacac

SEQ ID NO: 92716 - RNA, 19 nt, Artificial Sequence
  Synthetic
aguggaaaacaauauacac

SEQ ID NO: 92717 - RNA, 20 nt, Artificial Sequence
  Synthetic
aaguggaaaacaauauacac

SEQ ID NO: 92718 - RNA, 21 nt, Artificial Sequence
  Synthetic
aaaguggaaaacaauauacac

SEQ ID NO: 92719 - RNA, 22 nt, Artificial Sequence
  Synthetic
caaaguggaaaacaauauacac

SEQ ID NO: 92720 - RNA, 23 nt, Artificial Sequence
  Synthetic
ucaaaguggaaaacaauauacac

SEQ ID NO: 92721 - RNA, 24 nt, Artificial Sequence
  Synthetic
aucaaaguggaaaacaauauacac

SEQ ID NO: 92722 - RNA, 19 nt, Artificial Sequence
  Synthetic
uguaugcuaacuucuacac

SEQ ID NO: 92723 - RNA, 21 nt, Artificial Sequence
  Synthetic
uguguaugcuaacuucuacac

SEQ ID NO: 92724 - RNA, 22 nt, Artificial Sequence
  Synthetic
cuguguaugcuaacuucuacac

SEQ ID NO: 92725 - RNA, 23 nt, Artificial Sequence
  Synthetic
acuguguaugcuaacuucuacac

SEQ ID NO: 92726 - RNA, 24 nt, Artificial Sequence
  Synthetic
uacuguguaugcuaacuucuacac

SEQ ID NO: 92727 - RNA, 18 nt, Artificial Sequence
  Synthetic
uuuuuauugcuaguacac

SEQ ID NO: 92728 - RNA, 19 nt, Artificial Sequence
  Synthetic
uuuuuuauugcuaguacac

SEQ ID NO: 92729 - RNA, 20 nt, Artificial Sequence
  Synthetic
auuuuuuauugcuaguacac

SEQ ID NO: 92730 - RNA, 21 nt, Artificial Sequence
  Synthetic
aauuuuuuauugcuaguacac

SEQ ID NO: 92731 - RNA, 22 nt, Artificial Sequence
  Synthetic
caauuuuuuauugcuaguacac

SEQ ID NO: 92732 - RNA, 23 nt, Artificial Sequence
  Synthetic
ucaauuuuuuauugcuaguacac

SEQ ID NO: 92733 - RNA, 24 nt, Artificial Sequence
  Synthetic
uucaauuuuuuauugcuaguacac

SEQ ID NO: 92734 - RNA, 19 nt, Artificial Sequence
  Synthetic
ugcuuuucuauauguacac

SEQ ID NO: 92735 - RNA, 21 nt, Artificial Sequence
  Synthetic
agugcuuuucuauauguacac

SEQ ID NO: 92736 - RNA, 23 nt, Artificial Sequence
  Synthetic
ugagugcuuuucuauauguacac

SEQ ID NO: 92737 - RNA, 24 nt, Artificial Sequence
  Synthetic
augagugcuuuucuauauguacac

SEQ ID NO: 92738 - RNA, 18 nt, Artificial Sequence
  Synthetic
auauaugcccuuguacac

SEQ ID NO: 92739 - RNA, 19 nt, Artificial Sequence
  Synthetic
uauauaugcccuuguacac

SEQ ID NO: 92740 - RNA, 21 nt, Artificial Sequence
  Synthetic
aguauauaugcccuuguacac

SEQ ID NO: 92741 - RNA, 23 nt, Artificial Sequence
  Synthetic
ugaguauauaugcccuuguacac

SEQ ID NO: 92742 - RNA, 21 nt, Artificial Sequence
  Synthetic
cuuccccaccuucucuuacac

SEQ ID NO: 92743 - RNA, 22 nt, Artificial Sequence
  Synthetic
ccuuccccaccuucucuuacac

SEQ ID NO: 92744 - RNA, 23 nt, Artificial Sequence
  Synthetic
uccuuccccaccuucucuuacac

SEQ ID NO: 92745 - RNA, 24 nt, Artificial Sequence
  Synthetic
uuccuuccccaccuucucuuacac

SEQ ID NO: 92746 - RNA, 18 nt, Artificial Sequence
  Synthetic
uugugcaguuaguuacac

SEQ ID NO: 92747 - RNA, 19 nt, Artificial Sequence
  Synthetic
cuugugcaguuaguuacac

SEQ ID NO: 92748 - RNA, 20 nt, Artificial Sequence
  Synthetic
acuugugcaguuaguuacac

SEQ ID NO: 92749 - RNA, 21 nt, Artificial Sequence
  Synthetic
aacuugugcaguuaguuacac

SEQ ID NO: 92750 - RNA, 22 nt, Artificial Sequence
  Synthetic
uaacuugugcaguuaguuacac

SEQ ID NO: 92751 - RNA, 23 nt, Artificial Sequence
  Synthetic
auaacuugugcaguuaguuacac

SEQ ID NO: 92752 - RNA, 24 nt, Artificial Sequence
  Synthetic
uauaacuugugcaguuaguuacac

SEQ ID NO: 92753 - RNA, 18 nt, Artificial Sequence
  Synthetic
ucuaggaagacaaaccac

SEQ ID NO: 92754 - RNA, 19 nt, Artificial Sequence
  Synthetic
cucuaggaagacaaaccac

SEQ ID NO: 92755 - RNA, 20 nt, Artificial Sequence
  Synthetic
ucucuaggaagacaaaccac

SEQ ID NO: 92756 - RNA, 21 nt, Artificial Sequence
  Synthetic
aucucuaggaagacaaaccac

SEQ ID NO: 92757 - RNA, 22 nt, Artificial Sequence
  Synthetic
uaucucuaggaagacaaaccac

SEQ ID NO: 92758 - RNA, 23 nt, Artificial Sequence
  Synthetic
uuaucucuaggaagacaaaccac

SEQ ID NO: 92759 - RNA, 24 nt, Artificial Sequence
  Synthetic
auuaucucuaggaagacaaaccac

SEQ ID NO: 92760 - RNA, 18 nt, Artificial Sequence
  Synthetic
aucuaucaccugaaccac

SEQ ID NO: 92761 - RNA, 19 nt, Artificial Sequence
  Synthetic
uaucuaucaccugaaccac

SEQ ID NO: 92762 - RNA, 20 nt, Artificial Sequence
  Synthetic
uuaucuaucaccugaaccac

SEQ ID NO: 92763 - RNA, 21 nt, Artificial Sequence
  Synthetic
auuaucuaucaccugaaccac

SEQ ID NO: 92764 - RNA, 22 nt, Artificial Sequence
  Synthetic
uauuaucuaucaccugaaccac

SEQ ID NO: 92765 - RNA, 23 nt, Artificial Sequence
  Synthetic
uuauuaucuaucaccugaaccac

SEQ ID NO: 92766 - RNA, 24 nt, Artificial Sequence
  Synthetic
auuauuaucuaucaccugaaccac

SEQ ID NO: 92767 - RNA, 18 nt, Artificial Sequence
  Synthetic
agugaucauagugaccac

SEQ ID NO: 92768 - RNA, 19 nt, Artificial Sequence
  Synthetic
uagugaucauagugaccac

SEQ ID NO: 92769 - RNA, 20 nt, Artificial Sequence
  Synthetic
auagugaucauagugaccac

SEQ ID NO: 92770 - RNA, 21 nt, Artificial Sequence
  Synthetic
cauagugaucauagugaccac

SEQ ID NO: 92771 - RNA, 22 nt, Artificial Sequence
  Synthetic
ccauagugaucauagugaccac

SEQ ID NO: 92772 - RNA, 23 nt, Artificial Sequence
  Synthetic
uccauagugaucauagugaccac

SEQ ID NO: 92773 - RNA, 24 nt, Artificial Sequence
  Synthetic
cuccauagugaucauagugaccac

SEQ ID NO: 92774 - RNA, 18 nt, Artificial Sequence
  Synthetic
uguauacauacauaccac

SEQ ID NO: 92775 - RNA, 19 nt, Artificial Sequence
  Synthetic
uuguauacauacauaccac

SEQ ID NO: 92776 - RNA, 20 nt, Artificial Sequence
  Synthetic
cuuguauacauacauaccac

SEQ ID NO: 92777 - RNA, 21 nt, Artificial Sequence
  Synthetic
ucuuguauacauacauaccac

SEQ ID NO: 92778 - RNA, 22 nt, Artificial Sequence
  Synthetic
aucuuguauacauacauaccac

SEQ ID NO: 92779 - RNA, 23 nt, Artificial Sequence
  Synthetic
caucuuguauacauacauaccac

SEQ ID NO: 92780 - RNA, 24 nt, Artificial Sequence
  Synthetic
ucaucuuguauacauacauaccac

SEQ ID NO: 92781 - RNA, 18 nt, Artificial Sequence
  Synthetic
agacuaagauaguaccac

SEQ ID NO: 92782 - RNA, 19 nt, Artificial Sequence
  Synthetic
cagacuaagauaguaccac

SEQ ID NO: 92783 - RNA, 20 nt, Artificial Sequence
  Synthetic
ccagacuaagauaguaccac

SEQ ID NO: 92784 - RNA, 21 nt, Artificial Sequence
  Synthetic
cccagacuaagauaguaccac

SEQ ID NO: 92785 - RNA, 22 nt, Artificial Sequence
  Synthetic
acccagacuaagauaguaccac

SEQ ID NO: 92786 - RNA, 23 nt, Artificial Sequence
  Synthetic
cacccagacuaagauaguaccac

SEQ ID NO: 92787 - RNA, 18 nt, Artificial Sequence
  Synthetic
aucauugagacuacccac

SEQ ID NO: 92788 - RNA, 20 nt, Artificial Sequence
  Synthetic
ugaucauugagacuacccac

SEQ ID NO: 92789 - RNA, 21 nt, Artificial Sequence
  Synthetic
augaucauugagacuacccac

SEQ ID NO: 92790 - RNA, 23 nt, Artificial Sequence
  Synthetic
agaugaucauugagacuacccac

SEQ ID NO: 92791 - RNA, 18 nt, Artificial Sequence
  Synthetic
aguuuacucaguacccac

SEQ ID NO: 92792 - RNA, 19 nt, Artificial Sequence
  Synthetic
caguuuacucaguacccac

SEQ ID NO: 92793 - RNA, 20 nt, Artificial Sequence
  Synthetic
ucaguuuacucaguacccac

SEQ ID NO: 92794 - RNA, 21 nt, Artificial Sequence
  Synthetic
uucaguuuacucaguacccac

SEQ ID NO: 92795 - RNA, 22 nt, Artificial Sequence
  Synthetic
uuucaguuuacucaguacccac

SEQ ID NO: 92796 - RNA, 23 nt, Artificial Sequence
  Synthetic
auuucaguuuacucaguacccac

SEQ ID NO: 92797 - RNA, 24 nt, Artificial Sequence
  Synthetic
uauuucaguuuacucaguacccac

SEQ ID NO: 92798 - RNA, 19 nt, Artificial Sequence
  Synthetic
ugauaaaauguuuacccac

SEQ ID NO: 92799 - RNA, 20 nt, Artificial Sequence
  Synthetic
uugauaaaauguuuacccac

SEQ ID NO: 92800 - RNA, 21 nt, Artificial Sequence
  Synthetic
uuugauaaaauguuuacccac

SEQ ID NO: 92801 - RNA, 23 nt, Artificial Sequence
  Synthetic
aguuugauaaaauguuuacccac

SEQ ID NO: 92802 - RNA, 18 nt, Artificial Sequence
  Synthetic
ucgauuucuuguccccac

SEQ ID NO: 92803 - RNA, 19 nt, Artificial Sequence
  Synthetic
uucgauuucuuguccccac

SEQ ID NO: 92804 - RNA, 20 nt, Artificial Sequence
  Synthetic
auucgauuucuuguccccac

SEQ ID NO: 92805 - RNA, 21 nt, Artificial Sequence
  Synthetic
aauucgauuucuuguccccac

SEQ ID NO: 92806 - RNA, 22 nt, Artificial Sequence
  Synthetic
aaauucgauuucuuguccccac

SEQ ID NO: 92807 - RNA, 23 nt, Artificial Sequence
  Synthetic
caaauucgauuucuuguccccac

SEQ ID NO: 92808 - RNA, 20 nt, Artificial Sequence
  Synthetic
aggacgguaugaaaagccac

SEQ ID NO: 92809 - RNA, 21 nt, Artificial Sequence
  Synthetic
uaggacgguaugaaaagccac

SEQ ID NO: 92810 - RNA, 23 nt, Artificial Sequence
  Synthetic
aguaggacgguaugaaaagccac

SEQ ID NO: 92811 - RNA, 24 nt, Artificial Sequence
  Synthetic
caguaggacgguaugaaaagccac

SEQ ID NO: 92812 - RNA, 18 nt, Artificial Sequence
  Synthetic
aaugagucugauagccac

SEQ ID NO: 92813 - RNA, 19 nt, Artificial Sequence
  Synthetic
uaaugagucugauagccac

SEQ ID NO: 92814 - RNA, 20 nt, Artificial Sequence
  Synthetic
uuaaugagucugauagccac

SEQ ID NO: 92815 - RNA, 21 nt, Artificial Sequence
  Synthetic
uuuaaugagucugauagccac

SEQ ID NO: 92816 - RNA, 22 nt, Artificial Sequence
  Synthetic
auuuaaugagucugauagccac

SEQ ID NO: 92817 - RNA, 23 nt, Artificial Sequence
  Synthetic
uauuuaaugagucugauagccac

SEQ ID NO: 92818 - RNA, 24 nt, Artificial Sequence
  Synthetic
cuauuuaaugagucugauagccac

SEQ ID NO: 92819 - RNA, 20 nt, Artificial Sequence
  Synthetic
aggcagcagaauuuagccac

SEQ ID NO: 92820 - RNA, 21 nt, Artificial Sequence
  Synthetic
aaggcagcagaauuuagccac

SEQ ID NO: 92821 - RNA, 22 nt, Artificial Sequence
  Synthetic
aaaggcagcagaauuuagccac

SEQ ID NO: 92822 - RNA, 23 nt, Artificial Sequence
  Synthetic
caaaggcagcagaauuuagccac

SEQ ID NO: 92823 - RNA, 19 nt, Artificial Sequence
  Synthetic
aggucuagaguuaggccac

SEQ ID NO: 92824 - RNA, 21 nt, Artificial Sequence
  Synthetic
ugaggucuagaguuaggccac

SEQ ID NO: 92825 - RNA, 23 nt, Artificial Sequence
  Synthetic
ugugaggucuagaguuaggccac

SEQ ID NO: 92826 - RNA, 24 nt, Artificial Sequence
  Synthetic
uugugaggucuagaguuaggccac

SEQ ID NO: 92827 - RNA, 18 nt, Artificial Sequence
  Synthetic
uugugaucguaaugccac

SEQ ID NO: 92828 - RNA, 19 nt, Artificial Sequence
  Synthetic
uuugugaucguaaugccac

SEQ ID NO: 92829 - RNA, 20 nt, Artificial Sequence
  Synthetic
auuugugaucguaaugccac

SEQ ID NO: 92830 - RNA, 21 nt, Artificial Sequence
  Synthetic
cauuugugaucguaaugccac

SEQ ID NO: 92831 - RNA, 23 nt, Artificial Sequence
  Synthetic
ugcauuugugaucguaaugccac

SEQ ID NO: 92832 - RNA, 24 nt, Artificial Sequence
  Synthetic
uugcauuugugaucguaaugccac

SEQ ID NO: 92833 - RNA, 18 nt, Artificial Sequence
  Synthetic
aaggcuuucuguugccac

SEQ ID NO: 92834 - RNA, 20 nt, Artificial Sequence
  Synthetic
ugaaggcuuucuguugccac

SEQ ID NO: 92835 - RNA, 21 nt, Artificial Sequence
  Synthetic
cugaaggcuuucuguugccac

SEQ ID NO: 92836 - RNA, 22 nt, Artificial Sequence
  Synthetic
ccugaaggcuuucuguugccac

SEQ ID NO: 92837 - RNA, 24 nt, Artificial Sequence
  Synthetic
ugccugaaggcuuucuguugccac

SEQ ID NO: 92838 - RNA, 18 nt, Artificial Sequence
  Synthetic
uucucucaagggauccac

SEQ ID NO: 92839 - RNA, 19 nt, Artificial Sequence
  Synthetic
cuucucucaagggauccac

SEQ ID NO: 92840 - RNA, 20 nt, Artificial Sequence
  Synthetic
ccuucucucaagggauccac

SEQ ID NO: 92841 - RNA, 21 nt, Artificial Sequence
  Synthetic
uccuucucucaagggauccac

SEQ ID NO: 92842 - RNA, 22 nt, Artificial Sequence
  Synthetic
uuccuucucucaagggauccac

SEQ ID NO: 92843 - RNA, 23 nt, Artificial Sequence
  Synthetic
uuuccuucucucaagggauccac

SEQ ID NO: 92844 - RNA, 24 nt, Artificial Sequence
  Synthetic
uuuuccuucucucaagggauccac

SEQ ID NO: 92845 - RNA, 18 nt, Artificial Sequence
  Synthetic
uuguucaauuggauccac

SEQ ID NO: 92846 - RNA, 19 nt, Artificial Sequence
  Synthetic
auuguucaauuggauccac

SEQ ID NO: 92847 - RNA, 20 nt, Artificial Sequence
  Synthetic
aauuguucaauuggauccac

SEQ ID NO: 92848 - RNA, 22 nt, Artificial Sequence
  Synthetic
agaauuguucaauuggauccac

SEQ ID NO: 92849 - RNA, 24 nt, Artificial Sequence
  Synthetic
ugagaauuguucaauuggauccac

SEQ ID NO: 92850 - RNA, 18 nt, Artificial Sequence
  Synthetic
uugaaaacuauccuccac

SEQ ID NO: 92851 - RNA, 19 nt, Artificial Sequence
  Synthetic
auugaaaacuauccuccac

SEQ ID NO: 92852 - RNA, 20 nt, Artificial Sequence
  Synthetic
aauugaaaacuauccuccac

SEQ ID NO: 92853 - RNA, 21 nt, Artificial Sequence
  Synthetic
uaauugaaaacuauccuccac

SEQ ID NO: 92854 - RNA, 22 nt, Artificial Sequence
  Synthetic
auaauugaaaacuauccuccac

SEQ ID NO: 92855 - RNA, 24 nt, Artificial Sequence
  Synthetic
agauaauugaaaacuauccuccac

SEQ ID NO: 92856 - RNA, 18 nt, Artificial Sequence
  Synthetic
ucacuucauggucuccac

SEQ ID NO: 92857 - RNA, 19 nt, Artificial Sequence
  Synthetic
uucacuucauggucuccac

SEQ ID NO: 92858 - RNA, 20 nt, Artificial Sequence
  Synthetic
cuucacuucauggucuccac

SEQ ID NO: 92859 - RNA, 21 nt, Artificial Sequence
  Synthetic
acuucacuucauggucuccac

SEQ ID NO: 92860 - RNA, 22 nt, Artificial Sequence
  Synthetic
cacuucacuucauggucuccac

SEQ ID NO: 92861 - RNA, 23 nt, Artificial Sequence
  Synthetic
ccacuucacuucauggucuccac

SEQ ID NO: 92862 - RNA, 24 nt, Artificial Sequence
  Synthetic
accacuucacuucauggucuccac

SEQ ID NO: 92863 - RNA, 18 nt, Artificial Sequence
  Synthetic
aguuugcccuuucuccac

SEQ ID NO: 92864 - RNA, 19 nt, Artificial Sequence
  Synthetic
aaguuugcccuuucuccac

SEQ ID NO: 92865 - RNA, 20 nt, Artificial Sequence
  Synthetic
caaguuugcccuuucuccac

SEQ ID NO: 92866 - RNA, 21 nt, Artificial Sequence
  Synthetic
ucaaguuugcccuuucuccac

SEQ ID NO: 92867 - RNA, 22 nt, Artificial Sequence
  Synthetic
uucaaguuugcccuuucuccac

SEQ ID NO: 92868 - RNA, 23 nt, Artificial Sequence
  Synthetic
auucaaguuugcccuuucuccac

SEQ ID NO: 92869 - RNA, 24 nt, Artificial Sequence
  Synthetic
uauucaaguuugcccuuucuccac

SEQ ID NO: 92870 - RNA, 19 nt, Artificial Sequence
  Synthetic
uguaaagagaagauuccac

SEQ ID NO: 92871 - RNA, 20 nt, Artificial Sequence
  Synthetic
cuguaaagagaagauuccac

SEQ ID NO: 92872 - RNA, 21 nt, Artificial Sequence
  Synthetic
ucuguaaagagaagauuccac

SEQ ID NO: 92873 - RNA, 22 nt, Artificial Sequence
  Synthetic
uucuguaaagagaagauuccac

SEQ ID NO: 92874 - RNA, 23 nt, Artificial Sequence
  Synthetic
auucuguaaagagaagauuccac

SEQ ID NO: 92875 - RNA, 24 nt, Artificial Sequence
  Synthetic
cauucuguaaagagaagauuccac

SEQ ID NO: 92876 - RNA, 18 nt, Artificial Sequence
  Synthetic
uauaauuaccucuuccac

SEQ ID NO: 92877 - RNA, 19 nt, Artificial Sequence
  Synthetic
cuauaauuaccucuuccac

SEQ ID NO: 92878 - RNA, 20 nt, Artificial Sequence
  Synthetic
ccuauaauuaccucuuccac

SEQ ID NO: 92879 - RNA, 21 nt, Artificial Sequence
  Synthetic
uccuauaauuaccucuuccac

SEQ ID NO: 92880 - RNA, 22 nt, Artificial Sequence
  Synthetic
uuccuauaauuaccucuuccac

SEQ ID NO: 92881 - RNA, 23 nt, Artificial Sequence
  Synthetic
uuuccuauaauuaccucuuccac

SEQ ID NO: 92882 - RNA, 24 nt, Artificial Sequence
  Synthetic
cuuuccuauaauuaccucuuccac

SEQ ID NO: 92883 - RNA, 21 nt, Artificial Sequence
  Synthetic
cuuucuuuccagcauuuccac

SEQ ID NO: 92884 - RNA, 22 nt, Artificial Sequence
  Synthetic
acuuucuuuccagcauuuccac

SEQ ID NO: 92885 - RNA, 23 nt, Artificial Sequence
  Synthetic
aacuuucuuuccagcauuuccac

SEQ ID NO: 92886 - RNA, 24 nt, Artificial Sequence
  Synthetic
caacuuucuuuccagcauuuccac

SEQ ID NO: 92887 - RNA, 18 nt, Artificial Sequence
  Synthetic
acaguucagcuuuuccac

SEQ ID NO: 92888 - RNA, 19 nt, Artificial Sequence
  Synthetic
cacaguucagcuuuuccac

SEQ ID NO: 92889 - RNA, 20 nt, Artificial Sequence
  Synthetic
ccacaguucagcuuuuccac

SEQ ID NO: 92890 - RNA, 21 nt, Artificial Sequence
  Synthetic
uccacaguucagcuuuuccac

SEQ ID NO: 92891 - RNA, 23 nt, Artificial Sequence
  Synthetic
aguccacaguucagcuuuuccac

SEQ ID NO: 92892 - RNA, 24 nt, Artificial Sequence
  Synthetic
caguccacaguucagcuuuuccac

SEQ ID NO: 92893 - RNA, 18 nt, Artificial Sequence
  Synthetic
aggguaaaaaaaaagcac

SEQ ID NO: 92894 - RNA, 21 nt, Artificial Sequence
  Synthetic
aggaggguaaaaaaaaagcac

SEQ ID NO: 92895 - RNA, 22 nt, Artificial Sequence
  Synthetic
caggaggguaaaaaaaaagcac

SEQ ID NO: 92896 - RNA, 23 nt, Artificial Sequence
  Synthetic
ucaggaggguaaaaaaaaagcac

SEQ ID NO: 92897 - RNA, 24 nt, Artificial Sequence
  Synthetic
cucaggaggguaaaaaaaaagcac

SEQ ID NO: 92898 - RNA, 18 nt, Artificial Sequence
  Synthetic
uuuacauguguaaagcac

SEQ ID NO: 92899 - RNA, 19 nt, Artificial Sequence
  Synthetic
auuuacauguguaaagcac

SEQ ID NO: 92900 - RNA, 20 nt, Artificial Sequence
  Synthetic
aauuuacauguguaaagcac

SEQ ID NO: 92901 - RNA, 21 nt, Artificial Sequence
  Synthetic
uaauuuacauguguaaagcac

SEQ ID NO: 92902 - RNA, 22 nt, Artificial Sequence
  Synthetic
cuaauuuacauguguaaagcac

SEQ ID NO: 92903 - RNA, 23 nt, Artificial Sequence
  Synthetic
ucuaauuuacauguguaaagcac

SEQ ID NO: 92904 - RNA, 24 nt, Artificial Sequence
  Synthetic
cucuaauuuacauguguaaagcac

SEQ ID NO: 92905 - RNA, 18 nt, Artificial Sequence
  Synthetic
acuuguauuuggaagcac

SEQ ID NO: 92906 - RNA, 21 nt, Artificial Sequence
  Synthetic
uggacuuguauuuggaagcac

SEQ ID NO: 92907 - RNA, 22 nt, Artificial Sequence
  Synthetic
auggacuuguauuuggaagcac

SEQ ID NO: 92908 - RNA, 23 nt, Artificial Sequence
  Synthetic
uauggacuuguauuuggaagcac

SEQ ID NO: 92909 - RNA, 24 nt, Artificial Sequence
  Synthetic
auauggacuuguauuuggaagcac

SEQ ID NO: 92910 - RNA, 18 nt, Artificial Sequence
  Synthetic
uucaguaacaugaagcac

SEQ ID NO: 92911 - RNA, 19 nt, Artificial Sequence
  Synthetic
auucaguaacaugaagcac

SEQ ID NO: 92912 - RNA, 20 nt, Artificial Sequence
  Synthetic
cauucaguaacaugaagcac

SEQ ID NO: 92913 - RNA, 22 nt, Artificial Sequence
  Synthetic
cgcauucaguaacaugaagcac

SEQ ID NO: 92914 - RNA, 24 nt, Artificial Sequence
  Synthetic
ugcgcauucaguaacaugaagcac

SEQ ID NO: 92915 - RNA, 19 nt, Artificial Sequence
  Synthetic
ugcacugacuguacagcac

SEQ ID NO: 92916 - RNA, 20 nt, Artificial Sequence
  Synthetic
cugcacugacuguacagcac

SEQ ID NO: 92917 - RNA, 21 nt, Artificial Sequence
  Synthetic
ucugcacugacuguacagcac

SEQ ID NO: 92918 - RNA, 22 nt, Artificial Sequence
  Synthetic
uucugcacugacuguacagcac

SEQ ID NO: 92919 - RNA, 23 nt, Artificial Sequence
  Synthetic
uuucugcacugacuguacagcac

SEQ ID NO: 92920 - RNA, 24 nt, Artificial Sequence
  Synthetic
auuucugcacugacuguacagcac

SEQ ID NO: 92921 - RNA, 19 nt, Artificial Sequence
  Synthetic
agccaguaagugucagcac

SEQ ID NO: 92922 - RNA, 20 nt, Artificial Sequence
  Synthetic
aagccaguaagugucagcac

SEQ ID NO: 92923 - RNA, 21 nt, Artificial Sequence
  Synthetic
aaagccaguaagugucagcac

SEQ ID NO: 92924 - RNA, 22 nt, Artificial Sequence
  Synthetic
uaaagccaguaagugucagcac

SEQ ID NO: 92925 - RNA, 24 nt, Artificial Sequence
  Synthetic
cguaaagccaguaagugucagcac

SEQ ID NO: 92926 - RNA, 18 nt, Artificial Sequence
  Synthetic
uaagggccuauauagcac

SEQ ID NO: 92927 - RNA, 19 nt, Artificial Sequence
  Synthetic
auaagggccuauauagcac

SEQ ID NO: 92928 - RNA, 20 nt, Artificial Sequence
  Synthetic
aauaagggccuauauagcac

SEQ ID NO: 92929 - RNA, 22 nt, Artificial Sequence
  Synthetic
ugaauaagggccuauauagcac

SEQ ID NO: 92930 - RNA, 23 nt, Artificial Sequence
  Synthetic
augaauaagggccuauauagcac

SEQ ID NO: 92931 - RNA, 24 nt, Artificial Sequence
  Synthetic
aaugaauaagggccuauauagcac

SEQ ID NO: 92932 - RNA, 19 nt, Artificial Sequence
  Synthetic
agagagaccuuaguagcac

SEQ ID NO: 92933 - RNA, 20 nt, Artificial Sequence
  Synthetic
cagagagaccuuaguagcac

SEQ ID NO: 92934 - RNA, 21 nt, Artificial Sequence
  Synthetic
ucagagagaccuuaguagcac

SEQ ID NO: 92935 - RNA, 24 nt, Artificial Sequence
  Synthetic
aggucagagagaccuuaguagcac

SEQ ID NO: 92936 - RNA, 18 nt, Artificial Sequence
  Synthetic
ccccacacgcguuagcac

SEQ ID NO: 92937 - RNA, 20 nt, Artificial Sequence
  Synthetic
ugccccacacgcguuagcac

SEQ ID NO: 92938 - RNA, 21 nt, Artificial Sequence
  Synthetic
cugccccacacgcguuagcac

SEQ ID NO: 92939 - RNA, 23 nt, Artificial Sequence
  Synthetic
ugcugccccacacgcguuagcac

SEQ ID NO: 92940 - RNA, 24 nt, Artificial Sequence
  Synthetic
uugcugccccacacgcguuagcac

SEQ ID NO: 92941 - RNA, 18 nt, Artificial Sequence
  Synthetic
ccaauauucaugaggcac

SEQ ID NO: 92942 - RNA, 19 nt, Artificial Sequence
  Synthetic
cccaauauucaugaggcac

SEQ ID NO: 92943 - RNA, 20 nt, Artificial Sequence
  Synthetic
acccaauauucaugaggcac

SEQ ID NO: 92944 - RNA, 18 nt, Artificial Sequence
  Synthetic
auucuggcuggagggcac

SEQ ID NO: 92945 - RNA, 19 nt, Artificial Sequence
  Synthetic
cauucuggcuggagggcac

SEQ ID NO: 92946 - RNA, 20 nt, Artificial Sequence
  Synthetic
ucauucuggcuggagggcac

SEQ ID NO: 92947 - RNA, 18 nt, Artificial Sequence
  Synthetic
uuguacagauaugggcac

SEQ ID NO: 92948 - RNA, 19 nt, Artificial Sequence
  Synthetic
uuuguacagauaugggcac

SEQ ID NO: 92949 - RNA, 21 nt, Artificial Sequence
  Synthetic
aguuuguacagauaugggcac

SEQ ID NO: 92950 - RNA, 22 nt, Artificial Sequence
  Synthetic
aaguuuguacagauaugggcac

SEQ ID NO: 92951 - RNA, 23 nt, Artificial Sequence
  Synthetic
uaaguuuguacagauaugggcac

SEQ ID NO: 92952 - RNA, 24 nt, Artificial Sequence
  Synthetic
uuaaguuuguacagauaugggcac

SEQ ID NO: 92953 - RNA, 18 nt, Artificial Sequence
  Synthetic
ugcucuacgugauggcac

SEQ ID NO: 92954 - RNA, 19 nt, Artificial Sequence
  Synthetic
cugcucuacgugauggcac

SEQ ID NO: 92955 - RNA, 20 nt, Artificial Sequence
  Synthetic
ucugcucuacgugauggcac

SEQ ID NO: 92956 - RNA, 21 nt, Artificial Sequence
  Synthetic
uucugcucuacgugauggcac

SEQ ID NO: 92957 - RNA, 23 nt, Artificial Sequence
  Synthetic
aguucugcucuacgugauggcac

SEQ ID NO: 92958 - RNA, 24 nt, Artificial Sequence
  Synthetic
aaguucugcucuacgugauggcac

SEQ ID NO: 92959 - RNA, 18 nt, Artificial Sequence
  Synthetic
acaaaauguauauggcac

SEQ ID NO: 92960 - RNA, 19 nt, Artificial Sequence
  Synthetic
aacaaaauguauauggcac

SEQ ID NO: 92961 - RNA, 20 nt, Artificial Sequence
  Synthetic
aaacaaaauguauauggcac

SEQ ID NO: 92962 - RNA, 21 nt, Artificial Sequence
  Synthetic
caaacaaaauguauauggcac

SEQ ID NO: 92963 - RNA, 22 nt, Artificial Sequence
  Synthetic
acaaacaaaauguauauggcac

SEQ ID NO: 92964 - RNA, 18 nt, Artificial Sequence
  Synthetic
uaaccaagggaguggcac

SEQ ID NO: 92965 - RNA, 19 nt, Artificial Sequence
  Synthetic
uuaaccaagggaguggcac

SEQ ID NO: 92966 - RNA, 20 nt, Artificial Sequence
  Synthetic
uuuaaccaagggaguggcac

SEQ ID NO: 92967 - RNA, 21 nt, Artificial Sequence
  Synthetic
uuuuaaccaagggaguggcac

SEQ ID NO: 92968 - RNA, 24 nt, Artificial Sequence
  Synthetic
cgguuuuaaccaagggaguggcac

SEQ ID NO: 92969 - RNA, 18 nt, Artificial Sequence
  Synthetic
aaagagcucagcaugcac

SEQ ID NO: 92970 - RNA, 20 nt, Artificial Sequence
  Synthetic
agaaagagcucagcaugcac

SEQ ID NO: 92971 - RNA, 21 nt, Artificial Sequence
  Synthetic
cagaaagagcucagcaugcac

SEQ ID NO: 92972 - RNA, 22 nt, Artificial Sequence
  Synthetic
ccagaaagagcucagcaugcac

SEQ ID NO: 92973 - RNA, 18 nt, Artificial Sequence
  Synthetic
auggcaagcaagcugcac

SEQ ID NO: 92974 - RNA, 21 nt, Artificial Sequence
  Synthetic
uggauggcaagcaagcugcac

SEQ ID NO: 92975 - RNA, 22 nt, Artificial Sequence
  Synthetic
cuggauggcaagcaagcugcac

SEQ ID NO: 92976 - RNA, 23 nt, Artificial Sequence
  Synthetic
ccuggauggcaagcaagcugcac

SEQ ID NO: 92977 - RNA, 24 nt, Artificial Sequence
  Synthetic
uccuggauggcaagcaagcugcac

SEQ ID NO: 92978 - RNA, 19 nt, Artificial Sequence
  Synthetic
uggucauuuuuuucugcac

SEQ ID NO: 92979 - RNA, 20 nt, Artificial Sequence
  Synthetic
auggucauuuuuuucugcac

SEQ ID NO: 92980 - RNA, 21 nt, Artificial Sequence
  Synthetic
uauggucauuuuuuucugcac

SEQ ID NO: 92981 - RNA, 22 nt, Artificial Sequence
  Synthetic
cuauggucauuuuuuucugcac

SEQ ID NO: 92982 - RNA, 23 nt, Artificial Sequence
  Synthetic
acuauggucauuuuuuucugcac

SEQ ID NO: 92983 - RNA, 24 nt, Artificial Sequence
  Synthetic
aacuauggucauuuuuuucugcac

SEQ ID NO: 92984 - RNA, 21 nt, Artificial Sequence
  Synthetic
aaaacucuuccaaaaaaucac

SEQ ID NO: 92985 - RNA, 22 nt, Artificial Sequence
  Synthetic
caaaacucuuccaaaaaaucac

SEQ ID NO: 92986 - RNA, 23 nt, Artificial Sequence
  Synthetic
ccaaaacucuuccaaaaaaucac

SEQ ID NO: 92987 - RNA, 24 nt, Artificial Sequence
  Synthetic
accaaaacucuuccaaaaaaucac

SEQ ID NO: 92988 - RNA, 18 nt, Artificial Sequence
  Synthetic
caacagaacuuaaaucac

SEQ ID NO: 92989 - RNA, 19 nt, Artificial Sequence
  Synthetic
ucaacagaacuuaaaucac

SEQ ID NO: 92990 - RNA, 20 nt, Artificial Sequence
  Synthetic
uucaacagaacuuaaaucac

SEQ ID NO: 92991 - RNA, 21 nt, Artificial Sequence
  Synthetic
uuucaacagaacuuaaaucac

SEQ ID NO: 92992 - RNA, 22 nt, Artificial Sequence
  Synthetic
auuucaacagaacuuaaaucac

SEQ ID NO: 92993 - RNA, 23 nt, Artificial Sequence
  Synthetic
cauuucaacagaacuuaaaucac

SEQ ID NO: 92994 - RNA, 18 nt, Artificial Sequence
  Synthetic
uacaugcauuugcaucac

SEQ ID NO: 92995 - RNA, 19 nt, Artificial Sequence
  Synthetic
uuacaugcauuugcaucac

SEQ ID NO: 92996 - RNA, 21 nt, Artificial Sequence
  Synthetic
uguuacaugcauuugcaucac

SEQ ID NO: 92997 - RNA, 22 nt, Artificial Sequence
  Synthetic
auguuacaugcauuugcaucac

SEQ ID NO: 92998 - RNA, 23 nt, Artificial Sequence
  Synthetic
uauguuacaugcauuugcaucac

SEQ ID NO: 92999 - RNA, 24 nt, Artificial Sequence
  Synthetic
auauguuacaugcauuugcaucac

SEQ ID NO: 93000 - RNA, 18 nt, Artificial Sequence
  Synthetic
ugauuccauuaucaucac

SEQ ID NO: 93001 - RNA, 19 nt, Artificial Sequence
  Synthetic
augauuccauuaucaucac

SEQ ID NO: 93002 - RNA, 20 nt, Artificial Sequence
  Synthetic
uaugauuccauuaucaucac

SEQ ID NO: 93003 - RNA, 21 nt, Artificial Sequence
  Synthetic
cuaugauuccauuaucaucac

SEQ ID NO: 93004 - RNA, 23 nt, Artificial Sequence
  Synthetic
agcuaugauuccauuaucaucac

SEQ ID NO: 93005 - RNA, 18 nt, Artificial Sequence
  Synthetic
ccacgugccaaguaucac

SEQ ID NO: 93006 - RNA, 19 nt, Artificial Sequence
  Synthetic
uccacgugccaaguaucac

SEQ ID NO: 93007 - RNA, 20 nt, Artificial Sequence
  Synthetic
uuccacgugccaaguaucac

SEQ ID NO: 93008 - RNA, 21 nt, Artificial Sequence
  Synthetic
uuuccacgugccaaguaucac

SEQ ID NO: 93009 - RNA, 23 nt, Artificial Sequence
  Synthetic
uguuuccacgugccaaguaucac

SEQ ID NO: 93010 - RNA, 24 nt, Artificial Sequence
  Synthetic
uuguuuccacgugccaaguaucac

SEQ ID NO: 93011 - RNA, 19 nt, Artificial Sequence
  Synthetic
ugacuacccaaccccucac

SEQ ID NO: 93012 - RNA, 20 nt, Artificial Sequence
  Synthetic
cugacuacccaaccccucac

SEQ ID NO: 93013 - RNA, 21 nt, Artificial Sequence
  Synthetic
ucugacuacccaaccccucac

SEQ ID NO: 93014 - RNA, 22 nt, Artificial Sequence
  Synthetic
cucugacuacccaaccccucac

SEQ ID NO: 93015 - RNA, 23 nt, Artificial Sequence
  Synthetic
ucucugacuacccaaccccucac

SEQ ID NO: 93016 - RNA, 24 nt, Artificial Sequence
  Synthetic
uucucugacuacccaaccccucac

SEQ ID NO: 93017 - RNA, 18 nt, Artificial Sequence
  Synthetic
auucaaggaucaucucac

SEQ ID NO: 93018 - RNA, 19 nt, Artificial Sequence
  Synthetic
aauucaaggaucaucucac

SEQ ID NO: 93019 - RNA, 20 nt, Artificial Sequence
  Synthetic
caauucaaggaucaucucac

SEQ ID NO: 93020 - RNA, 21 nt, Artificial Sequence
  Synthetic
ucaauucaaggaucaucucac

SEQ ID NO: 93021 - RNA, 22 nt, Artificial Sequence
  Synthetic
cucaauucaaggaucaucucac

SEQ ID NO: 93022 - RNA, 23 nt, Artificial Sequence
  Synthetic
acucaauucaaggaucaucucac

SEQ ID NO: 93023 - RNA, 24 nt, Artificial Sequence
  Synthetic
aacucaauucaaggaucaucucac

SEQ ID NO: 93024 - RNA, 18 nt, Artificial Sequence
  Synthetic
aaaagagagaagucucac

SEQ ID NO: 93025 - RNA, 19 nt, Artificial Sequence
  Synthetic
uaaaagagagaagucucac

SEQ ID NO: 93026 - RNA, 20 nt, Artificial Sequence
  Synthetic
auaaaagagagaagucucac

SEQ ID NO: 93027 - RNA, 21 nt, Artificial Sequence
  Synthetic
cauaaaagagagaagucucac

SEQ ID NO: 93028 - RNA, 23 nt, Artificial Sequence
  Synthetic
ugcauaaaagagagaagucucac

SEQ ID NO: 93029 - RNA, 24 nt, Artificial Sequence
  Synthetic
augcauaaaagagagaagucucac

SEQ ID NO: 93030 - RNA, 21 nt, Artificial Sequence
  Synthetic
uccacucauauggauucucac

SEQ ID NO: 93031 - RNA, 22 nt, Artificial Sequence
  Synthetic
uuccacucauauggauucucac

SEQ ID NO: 93032 - RNA, 23 nt, Artificial Sequence
  Synthetic
auuccacucauauggauucucac

SEQ ID NO: 93033 - RNA, 24 nt, Artificial Sequence
  Synthetic
cauuccacucauauggauucucac

SEQ ID NO: 93034 - RNA, 18 nt, Artificial Sequence
  Synthetic
uacagcacucaaagucac

SEQ ID NO: 93035 - RNA, 19 nt, Artificial Sequence
  Synthetic
auacagcacucaaagucac

SEQ ID NO: 93036 - RNA, 20 nt, Artificial Sequence
  Synthetic
cauacagcacucaaagucac

SEQ ID NO: 93037 - RNA, 21 nt, Artificial Sequence
  Synthetic
ucauacagcacucaaagucac

SEQ ID NO: 93038 - RNA, 22 nt, Artificial Sequence
  Synthetic
aucauacagcacucaaagucac

SEQ ID NO: 93039 - RNA, 24 nt, Artificial Sequence
  Synthetic
ugaucauacagcacucaaagucac

SEQ ID NO: 93040 - RNA, 18 nt, Artificial Sequence
  Synthetic
ucaccugccaaaggucac

SEQ ID NO: 93041 - RNA, 20 nt, Artificial Sequence
  Synthetic
agucaccugccaaaggucac

SEQ ID NO: 93042 - RNA, 21 nt, Artificial Sequence
  Synthetic
aagucaccugccaaaggucac

SEQ ID NO: 93043 - RNA, 22 nt, Artificial Sequence
  Synthetic
uaagucaccugccaaaggucac

SEQ ID NO: 93044 - RNA, 23 nt, Artificial Sequence
  Synthetic
cuaagucaccugccaaaggucac

SEQ ID NO: 93045 - RNA, 18 nt, Artificial Sequence
  Synthetic
uauuguaauaaaggucac

SEQ ID NO: 93046 - RNA, 20 nt, Artificial Sequence
  Synthetic
cguauuguaauaaaggucac

SEQ ID NO: 93047 - RNA, 21 nt, Artificial Sequence
  Synthetic
acguauuguaauaaaggucac

SEQ ID NO: 93048 - RNA, 23 nt, Artificial Sequence
  Synthetic
agacguauuguaauaaaggucac

SEQ ID NO: 93049 - RNA, 24 nt, Artificial Sequence
  Synthetic
aagacguauuguaauaaaggucac

SEQ ID NO: 93050 - RNA, 19 nt, Artificial Sequence
  Synthetic
cguguuaguggaaugucac

SEQ ID NO: 93051 - RNA, 20 nt, Artificial Sequence
  Synthetic
ucguguuaguggaaugucac

SEQ ID NO: 93052 - RNA, 21 nt, Artificial Sequence
  Synthetic
uucguguuaguggaaugucac

SEQ ID NO: 93053 - RNA, 22 nt, Artificial Sequence
  Synthetic
cuucguguuaguggaaugucac

SEQ ID NO: 93054 - RNA, 23 nt, Artificial Sequence
  Synthetic
acuucguguuaguggaaugucac

SEQ ID NO: 93055 - RNA, 24 nt, Artificial Sequence
  Synthetic
aacuucguguuaguggaaugucac

SEQ ID NO: 93056 - RNA, 18 nt, Artificial Sequence
  Synthetic
aacuauuaaauaugucac

SEQ ID NO: 93057 - RNA, 19 nt, Artificial Sequence
  Synthetic
uaacuauuaaauaugucac

SEQ ID NO: 93058 - RNA, 20 nt, Artificial Sequence
  Synthetic
uuaacuauuaaauaugucac

SEQ ID NO: 93059 - RNA, 21 nt, Artificial Sequence
  Synthetic
cuuaacuauuaaauaugucac

SEQ ID NO: 93060 - RNA, 22 nt, Artificial Sequence
  Synthetic
ucuuaacuauuaaauaugucac

SEQ ID NO: 93061 - RNA, 23 nt, Artificial Sequence
  Synthetic
aucuuaacuauuaaauaugucac

SEQ ID NO: 93062 - RNA, 24 nt, Artificial Sequence
  Synthetic
caucuuaacuauuaaauaugucac

SEQ ID NO: 93063 - RNA, 18 nt, Artificial Sequence
  Synthetic
uuuguuguuauaugucac

SEQ ID NO: 93064 - RNA, 20 nt, Artificial Sequence
  Synthetic
uguuuguuguuauaugucac

SEQ ID NO: 93065 - RNA, 21 nt, Artificial Sequence
  Synthetic
auguuuguuguuauaugucac

SEQ ID NO: 93066 - RNA, 22 nt, Artificial Sequence
  Synthetic
aauguuuguuguuauaugucac

SEQ ID NO: 93067 - RNA, 23 nt, Artificial Sequence
  Synthetic
aaauguuuguuguuauaugucac

SEQ ID NO: 93068 - RNA, 24 nt, Artificial Sequence
  Synthetic
uaaauguuuguuguuauaugucac

SEQ ID NO: 93069 - RNA, 18 nt, Artificial Sequence
  Synthetic
uuuggcacaaacugucac

SEQ ID NO: 93070 - RNA, 19 nt, Artificial Sequence
  Synthetic
uuuuggcacaaacugucac

SEQ ID NO: 93071 - RNA, 21 nt, Artificial Sequence
  Synthetic
uguuuuggcacaaacugucac

SEQ ID NO: 93072 - RNA, 23 nt, Artificial Sequence
  Synthetic
uguguuuuggcacaaacugucac

SEQ ID NO: 93073 - RNA, 18 nt, Artificial Sequence
  Synthetic
ucccuguaaucgugucac

SEQ ID NO: 93074 - RNA, 19 nt, Artificial Sequence
  Synthetic
uucccuguaaucgugucac

SEQ ID NO: 93075 - RNA, 20 nt, Artificial Sequence
  Synthetic
uuucccuguaaucgugucac

SEQ ID NO: 93076 - RNA, 21 nt, Artificial Sequence
  Synthetic
auuucccuguaaucgugucac

SEQ ID NO: 93077 - RNA, 22 nt, Artificial Sequence
  Synthetic
aauuucccuguaaucgugucac

SEQ ID NO: 93078 - RNA, 23 nt, Artificial Sequence
  Synthetic
caauuucccuguaaucgugucac

SEQ ID NO: 93079 - RNA, 24 nt, Artificial Sequence
  Synthetic
acaauuucccuguaaucgugucac

SEQ ID NO: 93080 - RNA, 18 nt, Artificial Sequence
  Synthetic
aaccacagguugugucac

SEQ ID NO: 93081 - RNA, 19 nt, Artificial Sequence
  Synthetic
uaaccacagguugugucac

SEQ ID NO: 93082 - RNA, 21 nt, Artificial Sequence
  Synthetic
aguaaccacagguugugucac

SEQ ID NO: 93083 - RNA, 22 nt, Artificial Sequence
  Synthetic
uaguaaccacagguugugucac

SEQ ID NO: 93084 - RNA, 23 nt, Artificial Sequence
  Synthetic
uuaguaaccacagguugugucac

SEQ ID NO: 93085 - RNA, 24 nt, Artificial Sequence
  Synthetic
cuuaguaaccacagguugugucac

SEQ ID NO: 93086 - RNA, 18 nt, Artificial Sequence
  Synthetic
aacacuaauuguugucac

SEQ ID NO: 93087 - RNA, 19 nt, Artificial Sequence
  Synthetic
aaacacuaauuguugucac

SEQ ID NO: 93088 - RNA, 20 nt, Artificial Sequence
  Synthetic
uaaacacuaauuguugucac

SEQ ID NO: 93089 - RNA, 21 nt, Artificial Sequence
  Synthetic
uuaaacacuaauuguugucac

SEQ ID NO: 93090 - RNA, 22 nt, Artificial Sequence
  Synthetic
uuuaaacacuaauuguugucac

SEQ ID NO: 93091 - RNA, 23 nt, Artificial Sequence
  Synthetic
cuuuaaacacuaauuguugucac

SEQ ID NO: 93092 - RNA, 24 nt, Artificial Sequence
  Synthetic
ucuuuaaacacuaauuguugucac

SEQ ID NO: 93093 - RNA, 20 nt, Artificial Sequence
  Synthetic
aggguuuuguacuuugucac

SEQ ID NO: 93094 - RNA, 21 nt, Artificial Sequence
  Synthetic
aaggguuuuguacuuugucac

SEQ ID NO: 93095 - RNA, 22 nt, Artificial Sequence
  Synthetic
aaaggguuuuguacuuugucac

SEQ ID NO: 93096 - RNA, 24 nt, Artificial Sequence
  Synthetic
ugaaaggguuuuguacuuugucac

SEQ ID NO: 93097 - RNA, 19 nt, Artificial Sequence
  Synthetic
uggcauuagauacauucac

SEQ ID NO: 93098 - RNA, 18 nt, Artificial Sequence
  Synthetic
cuggauagugucauucac

SEQ ID NO: 93099 - RNA, 19 nt, Artificial Sequence
  Synthetic
acuggauagugucauucac

SEQ ID NO: 93100 - RNA, 20 nt, Artificial Sequence
  Synthetic
aacuggauagugucauucac

SEQ ID NO: 93101 - RNA, 21 nt, Artificial Sequence
  Synthetic
uaacuggauagugucauucac

SEQ ID NO: 93102 - RNA, 22 nt, Artificial Sequence
  Synthetic
uuaacuggauagugucauucac

SEQ ID NO: 93103 - RNA, 23 nt, Artificial Sequence
  Synthetic
cuuaacuggauagugucauucac

SEQ ID NO: 93104 - RNA, 18 nt, Artificial Sequence
  Synthetic
uuucuccaacuuauucac

SEQ ID NO: 93105 - RNA, 19 nt, Artificial Sequence
  Synthetic
auuucuccaacuuauucac

SEQ ID NO: 93106 - RNA, 20 nt, Artificial Sequence
  Synthetic
uauuucuccaacuuauucac

SEQ ID NO: 93107 - RNA, 22 nt, Artificial Sequence
  Synthetic
aguauuucuccaacuuauucac

SEQ ID NO: 93108 - RNA, 23 nt, Artificial Sequence
  Synthetic
caguauuucuccaacuuauucac

SEQ ID NO: 93109 - RNA, 24 nt, Artificial Sequence
  Synthetic
ccaguauuucuccaacuuauucac

SEQ ID NO: 93110 - RNA, 18 nt, Artificial Sequence
  Synthetic
caucccagggcacuucac

SEQ ID NO: 93111 - RNA, 19 nt, Artificial Sequence
  Synthetic
ucaucccagggcacuucac

SEQ ID NO: 93112 - RNA, 20 nt, Artificial Sequence
  Synthetic
aucaucccagggcacuucac

SEQ ID NO: 93113 - RNA, 22 nt, Artificial Sequence
  Synthetic
agaucaucccagggcacuucac

SEQ ID NO: 93114 - RNA, 23 nt, Artificial Sequence
  Synthetic
uagaucaucccagggcacuucac

SEQ ID NO: 93115 - RNA, 24 nt, Artificial Sequence
  Synthetic
uuagaucaucccagggcacuucac

SEQ ID NO: 93116 - RNA, 19 nt, Artificial Sequence
  Synthetic
agcuuaaauucagcuucac

SEQ ID NO: 93117 - RNA, 20 nt, Artificial Sequence
  Synthetic
cagcuuaaauucagcuucac

SEQ ID NO: 93118 - RNA, 21 nt, Artificial Sequence
  Synthetic
ccagcuuaaauucagcuucac

SEQ ID NO: 93119 - RNA, 22 nt, Artificial Sequence
  Synthetic
accagcuuaaauucagcuucac

SEQ ID NO: 93120 - RNA, 24 nt, Artificial Sequence
  Synthetic
ugaccagcuuaaauucagcuucac

SEQ ID NO: 93121 - RNA, 18 nt, Artificial Sequence
  Synthetic
auuucacuguaucuucac

SEQ ID NO: 93122 - RNA, 20 nt, Artificial Sequence
  Synthetic
ugauuucacuguaucuucac

SEQ ID NO: 93123 - RNA, 21 nt, Artificial Sequence
  Synthetic
augauuucacuguaucuucac

SEQ ID NO: 93124 - RNA, 22 nt, Artificial Sequence
  Synthetic
caugauuucacuguaucuucac

SEQ ID NO: 93125 - RNA, 23 nt, Artificial Sequence
  Synthetic
acaugauuucacuguaucuucac

SEQ ID NO: 93126 - RNA, 24 nt, Artificial Sequence
  Synthetic
uacaugauuucacuguaucuucac

SEQ ID NO: 93127 - RNA, 18 nt, Artificial Sequence
  Synthetic
cuuuuacuuccucuucac

SEQ ID NO: 93128 - RNA, 19 nt, Artificial Sequence
  Synthetic
acuuuuacuuccucuucac

SEQ ID NO: 93129 - RNA, 20 nt, Artificial Sequence
  Synthetic
aacuuuuacuuccucuucac

SEQ ID NO: 93130 - RNA, 21 nt, Artificial Sequence
  Synthetic
aaacuuuuacuuccucuucac

SEQ ID NO: 93131 - RNA, 23 nt, Artificial Sequence
  Synthetic
cgaaacuuuuacuuccucuucac

SEQ ID NO: 93132 - RNA, 24 nt, Artificial Sequence
  Synthetic
ccgaaacuuuuacuuccucuucac

SEQ ID NO: 93133 - RNA, 18 nt, Artificial Sequence
  Synthetic
cuuaugcuguuucuucac

SEQ ID NO: 93134 - RNA, 19 nt, Artificial Sequence
  Synthetic
ccuuaugcuguuucuucac

SEQ ID NO: 93135 - RNA, 20 nt, Artificial Sequence
  Synthetic
uccuuaugcuguuucuucac

SEQ ID NO: 93136 - RNA, 21 nt, Artificial Sequence
  Synthetic
uuccuuaugcuguuucuucac

SEQ ID NO: 93137 - RNA, 22 nt, Artificial Sequence
  Synthetic
uuuccuuaugcuguuucuucac

SEQ ID NO: 93138 - RNA, 23 nt, Artificial Sequence
  Synthetic
uuuuccuuaugcuguuucuucac

SEQ ID NO: 93139 - RNA, 24 nt, Artificial Sequence
  Synthetic
auuuuccuuaugcuguuucuucac

SEQ ID NO: 93140 - RNA, 18 nt, Artificial Sequence
  Synthetic
cuuguagcacugguucac

SEQ ID NO: 93141 - RNA, 21 nt, Artificial Sequence
  Synthetic
aggcuuguagcacugguucac

SEQ ID NO: 93142 - RNA, 22 nt, Artificial Sequence
  Synthetic
caggcuuguagcacugguucac

SEQ ID NO: 93143 - RNA, 24 nt, Artificial Sequence
  Synthetic
agcaggcuuguagcacugguucac

SEQ ID NO: 93144 - RNA, 18 nt, Artificial Sequence
  Synthetic
uauuuaauggugguucac

SEQ ID NO: 93145 - RNA, 19 nt, Artificial Sequence
  Synthetic
cuauuuaauggugguucac

SEQ ID NO: 93146 - RNA, 21 nt, Artificial Sequence
  Synthetic
agcuauuuaauggugguucac

SEQ ID NO: 93147 - RNA, 22 nt, Artificial Sequence
  Synthetic
uagcuauuuaauggugguucac

SEQ ID NO: 93148 - RNA, 23 nt, Artificial Sequence
  Synthetic
uuagcuauuuaauggugguucac

SEQ ID NO: 93149 - RNA, 24 nt, Artificial Sequence
  Synthetic
auuagcuauuuaauggugguucac

SEQ ID NO: 93150 - RNA, 18 nt, Artificial Sequence
  Synthetic
cuucuauucuguguucac

SEQ ID NO: 93151 - RNA, 19 nt, Artificial Sequence
  Synthetic
acuucuauucuguguucac

SEQ ID NO: 93152 - RNA, 20 nt, Artificial Sequence
  Synthetic
cacuucuauucuguguucac

SEQ ID NO: 93153 - RNA, 21 nt, Artificial Sequence
  Synthetic
acacuucuauucuguguucac

SEQ ID NO: 93154 - RNA, 22 nt, Artificial Sequence
  Synthetic
uacacuucuauucuguguucac

SEQ ID NO: 93155 - RNA, 23 nt, Artificial Sequence
  Synthetic
auacacuucuauucuguguucac

SEQ ID NO: 93156 - RNA, 24 nt, Artificial Sequence
  Synthetic
aauacacuucuauucuguguucac

SEQ ID NO: 93157 - RNA, 21 nt, Artificial Sequence
  Synthetic
cauuuccauuaaauauuucac

SEQ ID NO: 93158 - RNA, 22 nt, Artificial Sequence
  Synthetic
acauuuccauuaaauauuucac

SEQ ID NO: 93159 - RNA, 23 nt, Artificial Sequence
  Synthetic
uacauuuccauuaaauauuucac

SEQ ID NO: 93160 - RNA, 24 nt, Artificial Sequence
  Synthetic
auacauuuccauuaaauauuucac

SEQ ID NO: 93161 - RNA, 18 nt, Artificial Sequence
  Synthetic
agcaagcaaaccuuucac

SEQ ID NO: 93162 - RNA, 19 nt, Artificial Sequence
  Synthetic
aagcaagcaaaccuuucac

SEQ ID NO: 93163 - RNA, 20 nt, Artificial Sequence
  Synthetic
caagcaagcaaaccuuucac

SEQ ID NO: 93164 - RNA, 22 nt, Artificial Sequence
  Synthetic
agcaagcaagcaaaccuuucac

SEQ ID NO: 93165 - RNA, 23 nt, Artificial Sequence
  Synthetic
aagcaagcaagcaaaccuuucac

SEQ ID NO: 93166 - RNA, 24 nt, Artificial Sequence
  Synthetic
caagcaagcaagcaaaccuuucac

SEQ ID NO: 93167 - RNA, 19 nt, Artificial Sequence
  Synthetic
agugcuuacuauguuucac

SEQ ID NO: 93168 - RNA, 20 nt, Artificial Sequence
  Synthetic
cagugcuuacuauguuucac

SEQ ID NO: 93169 - RNA, 21 nt, Artificial Sequence
  Synthetic
ucagugcuuacuauguuucac

SEQ ID NO: 93170 - RNA, 22 nt, Artificial Sequence
  Synthetic
uucagugcuuacuauguuucac

SEQ ID NO: 93171 - RNA, 23 nt, Artificial Sequence
  Synthetic
auucagugcuuacuauguuucac

SEQ ID NO: 93172 - RNA, 24 nt, Artificial Sequence
  Synthetic
uauucagugcuuacuauguuucac

SEQ ID NO: 93173 - RNA, 18 nt, Artificial Sequence
  Synthetic
cuauguuguuagaaagac

SEQ ID NO: 93174 - RNA, 19 nt, Artificial Sequence
  Synthetic
ucuauguuguuagaaagac

SEQ ID NO: 93175 - RNA, 20 nt, Artificial Sequence
  Synthetic
cucuauguuguuagaaagac

SEQ ID NO: 93176 - RNA, 21 nt, Artificial Sequence
  Synthetic
acucuauguuguuagaaagac

SEQ ID NO: 93177 - RNA, 22 nt, Artificial Sequence
  Synthetic
aacucuauguuguuagaaagac

SEQ ID NO: 93178 - RNA, 24 nt, Artificial Sequence
  Synthetic
ugaacucuauguuguuagaaagac

SEQ ID NO: 93179 - RNA, 18 nt, Artificial Sequence
  Synthetic
cauugaccaaaacaagac

SEQ ID NO: 93180 - RNA, 19 nt, Artificial Sequence
  Synthetic
ucauugaccaaaacaagac

SEQ ID NO: 93181 - RNA, 20 nt, Artificial Sequence
  Synthetic
aucauugaccaaaacaagac

SEQ ID NO: 93182 - RNA, 21 nt, Artificial Sequence
  Synthetic
caucauugaccaaaacaagac

SEQ ID NO: 93183 - RNA, 22 nt, Artificial Sequence
  Synthetic
ucaucauugaccaaaacaagac

SEQ ID NO: 93184 - RNA, 23 nt, Artificial Sequence
  Synthetic
uucaucauugaccaaaacaagac

SEQ ID NO: 93185 - RNA, 24 nt, Artificial Sequence
  Synthetic
auucaucauugaccaaaacaagac

SEQ ID NO: 93186 - RNA, 19 nt, Artificial Sequence
  Synthetic
agaagauaaauuacaagac

SEQ ID NO: 93187 - RNA, 20 nt, Artificial Sequence
  Synthetic
cagaagauaaauuacaagac

SEQ ID NO: 93188 - RNA, 22 nt, Artificial Sequence
  Synthetic
agcagaagauaaauuacaagac

SEQ ID NO: 93189 - RNA, 23 nt, Artificial Sequence
  Synthetic
aagcagaagauaaauuacaagac

SEQ ID NO: 93190 - RNA, 24 nt, Artificial Sequence
  Synthetic
aaagcagaagauaaauuacaagac

SEQ ID NO: 93191 - RNA, 18 nt, Artificial Sequence
  Synthetic
cucaagaucaagcaagac

SEQ ID NO: 93192 - RNA, 19 nt, Artificial Sequence
  Synthetic
acucaagaucaagcaagac

SEQ ID NO: 93193 - RNA, 20 nt, Artificial Sequence
  Synthetic
aacucaagaucaagcaagac

SEQ ID NO: 93194 - RNA, 22 nt, Artificial Sequence
  Synthetic
uguggaggacauaggagaagac

SEQ ID NO: 93195 - RNA, 23 nt, Artificial Sequence
  Synthetic
auguggaggacauaggagaagac

SEQ ID NO: 93196 - RNA, 24 nt, Artificial Sequence
  Synthetic
aauguggaggacauaggagaagac

SEQ ID NO: 93197 - RNA, 18 nt, Artificial Sequence
  Synthetic
agggagaaaugggaagac

SEQ ID NO: 93198 - RNA, 19 nt, Artificial Sequence
  Synthetic
aagggagaaaugggaagac

SEQ ID NO: 93199 - RNA, 20 nt, Artificial Sequence
  Synthetic
caagggagaaaugggaagac

SEQ ID NO: 93200 - RNA, 21 nt, Artificial Sequence
  Synthetic
ccaagggagaaaugggaagac

SEQ ID NO: 93201 - RNA, 22 nt, Artificial Sequence
  Synthetic
uccaagggagaaaugggaagac

SEQ ID NO: 93202 - RNA, 23 nt, Artificial Sequence
  Synthetic
auccaagggagaaaugggaagac

SEQ ID NO: 93203 - RNA, 24 nt, Artificial Sequence
  Synthetic
aauccaagggagaaaugggaagac

SEQ ID NO: 93204 - RNA, 21 nt, Artificial Sequence
  Synthetic
uuugacaucugaugggaagac

SEQ ID NO: 93205 - RNA, 22 nt, Artificial Sequence
  Synthetic
auuugacaucugaugggaagac

SEQ ID NO: 93206 - RNA, 23 nt, Artificial Sequence
  Synthetic
uauuugacaucugaugggaagac

SEQ ID NO: 93207 - RNA, 24 nt, Artificial Sequence
  Synthetic
auauuugacaucugaugggaagac

SEQ ID NO: 93208 - RNA, 20 nt, Artificial Sequence
  Synthetic
ugguuuccuuucuugaagac

SEQ ID NO: 93209 - RNA, 21 nt, Artificial Sequence
  Synthetic
cugguuuccuuucuugaagac

SEQ ID NO: 93210 - RNA, 23 nt, Artificial Sequence
  Synthetic
agcugguuuccuuucuugaagac

SEQ ID NO: 93211 - RNA, 24 nt, Artificial Sequence
  Synthetic
uagcugguuuccuuucuugaagac

SEQ ID NO: 93212 - RNA, 18 nt, Artificial Sequence
  Synthetic
auguacuuuuucuaagac

SEQ ID NO: 93213 - RNA, 19 nt, Artificial Sequence
  Synthetic
cauguacuuuuucuaagac

SEQ ID NO: 93214 - RNA, 21 nt, Artificial Sequence
  Synthetic
agcauguacuuuuucuaagac

SEQ ID NO: 93215 - RNA, 23 nt, Artificial Sequence
  Synthetic
agagcauguacuuuuucuaagac

SEQ ID NO: 93216 - RNA, 24 nt, Artificial Sequence
  Synthetic
cagagcauguacuuuuucuaagac

SEQ ID NO: 93217 - RNA, 18 nt, Artificial Sequence
  Synthetic
agguuauaaccuuaagac

SEQ ID NO: 93218 - RNA, 19 nt, Artificial Sequence
  Synthetic
cagguuauaaccuuaagac

SEQ ID NO: 93219 - RNA, 20 nt, Artificial Sequence
  Synthetic
ucagguuauaaccuuaagac

SEQ ID NO: 93220 - RNA, 21 nt, Artificial Sequence
  Synthetic
uucagguuauaaccuuaagac

SEQ ID NO: 93221 - RNA, 22 nt, Artificial Sequence
  Synthetic
uuucagguuauaaccuuaagac

SEQ ID NO: 93222 - RNA, 23 nt, Artificial Sequence
  Synthetic
uuuucagguuauaaccuuaagac

SEQ ID NO: 93223 - RNA, 18 nt, Artificial Sequence
  Synthetic
aagugaagccuuuaagac

SEQ ID NO: 93224 - RNA, 19 nt, Artificial Sequence
  Synthetic
caagugaagccuuuaagac

SEQ ID NO: 93225 - RNA, 20 nt, Artificial Sequence
  Synthetic
acaagugaagccuuuaagac

SEQ ID NO: 93226 - RNA, 21 nt, Artificial Sequence
  Synthetic
aacaagugaagccuuuaagac

SEQ ID NO: 93227 - RNA, 23 nt, Artificial Sequence
  Synthetic
ugaacaagugaagccuuuaagac

SEQ ID NO: 93228 - RNA, 18 nt, Artificial Sequence
  Synthetic
uacuuccuauuuuaagac

SEQ ID NO: 93229 - RNA, 19 nt, Artificial Sequence
  Synthetic
auacuuccuauuuuaagac

SEQ ID NO: 93230 - RNA, 20 nt, Artificial Sequence
  Synthetic
aauacuuccuauuuuaagac

SEQ ID NO: 93231 - RNA, 21 nt, Artificial Sequence
  Synthetic
aaauacuuccuauuuuaagac

SEQ ID NO: 93232 - RNA, 23 nt, Artificial Sequence
  Synthetic
agaaauacuuccuauuuuaagac

SEQ ID NO: 93233 - RNA, 24 nt, Artificial Sequence
  Synthetic
aagaaauacuuccuauuuuaagac

SEQ ID NO: 93234 - RNA, 18 nt, Artificial Sequence
  Synthetic
agaguaucacaaacagac

SEQ ID NO: 93235 - RNA, 20 nt, Artificial Sequence
  Synthetic
agagaguaucacaaacagac

SEQ ID NO: 93236 - RNA, 21 nt, Artificial Sequence
  Synthetic
aagagaguaucacaaacagac

SEQ ID NO: 93237 - RNA, 22 nt, Artificial Sequence
  Synthetic
aaagagaguaucacaaacagac

SEQ ID NO: 93238 - RNA, 23 nt, Artificial Sequence
  Synthetic
aaaagagaguaucacaaacagac

SEQ ID NO: 93239 - RNA, 22 nt, Artificial Sequence
  Synthetic
cgggcuuuaaagucaaacagac

SEQ ID NO: 93240 - RNA, 23 nt, Artificial Sequence
  Synthetic
ccgggcuuuaaagucaaacagac

SEQ ID NO: 93241 - RNA, 24 nt, Artificial Sequence
  Synthetic
uccgggcuuuaaagucaaacagac

SEQ ID NO: 93242 - RNA, 19 nt, Artificial Sequence
  Synthetic
agaauguuugccaccagac

SEQ ID NO: 93243 - RNA, 20 nt, Artificial Sequence
  Synthetic
aagaauguuugccaccagac

SEQ ID NO: 93244 - RNA, 21 nt, Artificial Sequence
  Synthetic
uaagaauguuugccaccagac

SEQ ID NO: 93245 - RNA, 22 nt, Artificial Sequence
  Synthetic
uuaagaauguuugccaccagac

SEQ ID NO: 93246 - RNA, 23 nt, Artificial Sequence
  Synthetic
uuuaagaauguuugccaccagac

SEQ ID NO: 93247 - RNA, 18 nt, Artificial Sequence
  Synthetic
uuuuuuaaauucccagac

SEQ ID NO: 93248 - RNA, 19 nt, Artificial Sequence
  Synthetic
auuuuuuaaauucccagac

SEQ ID NO: 93249 - RNA, 20 nt, Artificial Sequence
  Synthetic
aauuuuuuaaauucccagac

SEQ ID NO: 93250 - RNA, 21 nt, Artificial Sequence
  Synthetic
caauuuuuuaaauucccagac

SEQ ID NO: 93251 - RNA, 22 nt, Artificial Sequence
  Synthetic
acaauuuuuuaaauucccagac

SEQ ID NO: 93252 - RNA, 24 nt, Artificial Sequence
  Synthetic
ugacaauuuuuuaaauucccagac

SEQ ID NO: 93253 - RNA, 18 nt, Artificial Sequence
  Synthetic
auucagaaauaagcagac

SEQ ID NO: 93254 - RNA, 19 nt, Artificial Sequence
  Synthetic
uauucagaaauaagcagac

SEQ ID NO: 93255 - RNA, 20 nt, Artificial Sequence
  Synthetic
auauucagaaauaagcagac

SEQ ID NO: 93256 - RNA, 21 nt, Artificial Sequence
  Synthetic
aauauucagaaauaagcagac

SEQ ID NO: 93257 - RNA, 22 nt, Artificial Sequence
  Synthetic
uaauauucagaaauaagcagac

SEQ ID NO: 93258 - RNA, 23 nt, Artificial Sequence
  Synthetic
uuaauauucagaaauaagcagac

SEQ ID NO: 93259 - RNA, 24 nt, Artificial Sequence
  Synthetic
auuaauauucagaaauaagcagac

SEQ ID NO: 93260 - RNA, 18 nt, Artificial Sequence
  Synthetic
uaauucgugcucucagac

SEQ ID NO: 93261 - RNA, 19 nt, Artificial Sequence
  Synthetic
auaauucgugcucucagac

SEQ ID NO: 93262 - RNA, 20 nt, Artificial Sequence
  Synthetic
aauaauucgugcucucagac

SEQ ID NO: 93263 - RNA, 21 nt, Artificial Sequence
  Synthetic
uaauaauucgugcucucagac

SEQ ID NO: 93264 - RNA, 22 nt, Artificial Sequence
  Synthetic
auaauaauucgugcucucagac

SEQ ID NO: 93265 - RNA, 23 nt, Artificial Sequence
  Synthetic
aauaauaauucgugcucucagac

SEQ ID NO: 93266 - RNA, 24 nt, Artificial Sequence
  Synthetic
aaauaauaauucgugcucucagac

SEQ ID NO: 93267 - RNA, 18 nt, Artificial Sequence
  Synthetic
agugcuugaggaagagac

SEQ ID NO: 93268 - RNA, 19 nt, Artificial Sequence
  Synthetic
aagugcuugaggaagagac

SEQ ID NO: 93269 - RNA, 20 nt, Artificial Sequence
  Synthetic
aaagugcuugaggaagagac

SEQ ID NO: 93270 - RNA, 21 nt, Artificial Sequence
  Synthetic
aaaagugcuugaggaagagac

SEQ ID NO: 93271 - RNA, 24 nt, Artificial Sequence
  Synthetic
uggaaaagugcuugaggaagagac

SEQ ID NO: 93272 - RNA, 21 nt, Artificial Sequence
  Synthetic
aagaagagcaagaagagagac

SEQ ID NO: 93273 - RNA, 22 nt, Artificial Sequence
  Synthetic
uaagaagagcaagaagagagac

SEQ ID NO: 93274 - RNA, 23 nt, Artificial Sequence
  Synthetic
uuaagaagagcaagaagagagac

SEQ ID NO: 93275 - RNA, 24 nt, Artificial Sequence
  Synthetic
uuuaagaagagcaagaagagagac

SEQ ID NO: 93276 - RNA, 19 nt, Artificial Sequence
  Synthetic
agcugagauuaugagagac

SEQ ID NO: 93277 - RNA, 20 nt, Artificial Sequence
  Synthetic
cagcugagauuaugagagac

SEQ ID NO: 93278 - RNA, 21 nt, Artificial Sequence
  Synthetic
acagcugagauuaugagagac

SEQ ID NO: 93279 - RNA, 22 nt, Artificial Sequence
  Synthetic
aacagcugagauuaugagagac

SEQ ID NO: 93280 - RNA, 23 nt, Artificial Sequence
  Synthetic
aaacagcugagauuaugagagac

SEQ ID NO: 93281 - RNA, 24 nt, Artificial Sequence
  Synthetic
aaaacagcugagauuaugagagac

SEQ ID NO: 93282 - RNA, 18 nt, Artificial Sequence
  Synthetic
cugcaucaagugagagac

SEQ ID NO: 93283 - RNA, 19 nt, Artificial Sequence
  Synthetic
acugcaucaagugagagac

SEQ ID NO: 93284 - RNA, 20 nt, Artificial Sequence
  Synthetic
uacugcaucaagugagagac

SEQ ID NO: 93285 - RNA, 21 nt, Artificial Sequence
  Synthetic
auacugcaucaagugagagac

SEQ ID NO: 93286 - RNA, 22 nt, Artificial Sequence
  Synthetic
aauacugcaucaagugagagac

SEQ ID NO: 93287 - RNA, 18 nt, Artificial Sequence
  Synthetic
ucuuaggaugagggagac

SEQ ID NO: 93288 - RNA, 19 nt, Artificial Sequence
  Synthetic
cucuuaggaugagggagac

SEQ ID NO: 93289 - RNA, 20 nt, Artificial Sequence
  Synthetic
ucucuuaggaugagggagac

SEQ ID NO: 93290 - RNA, 21 nt, Artificial Sequence
  Synthetic
uucucuuaggaugagggagac

SEQ ID NO: 93291 - RNA, 23 nt, Artificial Sequence
  Synthetic
aguucucuuaggaugagggagac

SEQ ID NO: 93292 - RNA, 24 nt, Artificial Sequence
  Synthetic
aaguucucuuaggaugagggagac

SEQ ID NO: 93293 - RNA, 18 nt, Artificial Sequence
  Synthetic
acugugcuuaauggagac

SEQ ID NO: 93294 - RNA, 19 nt, Artificial Sequence
  Synthetic
uacugugcuuaauggagac

SEQ ID NO: 93295 - RNA, 20 nt, Artificial Sequence
  Synthetic
cuacugugcuuaauggagac

SEQ ID NO: 93296 - RNA, 21 nt, Artificial Sequence
  Synthetic
ucuacugugcuuaauggagac

SEQ ID NO: 93297 - RNA, 22 nt, Artificial Sequence
  Synthetic
uucuacugugcuuaauggagac

SEQ ID NO: 93298 - RNA, 23 nt, Artificial Sequence
  Synthetic
cuucuacugugcuuaauggagac

SEQ ID NO: 93299 - RNA, 24 nt, Artificial Sequence
  Synthetic
ucuucuacugugcuuaauggagac

SEQ ID NO: 93300 - RNA, 18 nt, Artificial Sequence
  Synthetic
uguuuucagguuggagac

SEQ ID NO: 93301 - RNA, 19 nt, Artificial Sequence
  Synthetic
auguuuucagguuggagac

SEQ ID NO: 93302 - RNA, 20 nt, Artificial Sequence
  Synthetic
aauguuuucagguuggagac

SEQ ID NO: 93303 - RNA, 21 nt, Artificial Sequence
  Synthetic
uaauguuuucagguuggagac

SEQ ID NO: 93304 - RNA, 22 nt, Artificial Sequence
  Synthetic
auaauguuuucagguuggagac

SEQ ID NO: 93305 - RNA, 23 nt, Artificial Sequence
  Synthetic
aauaauguuuucagguuggagac

SEQ ID NO: 93306 - RNA, 20 nt, Artificial Sequence
  Synthetic
uggugcuggggaagugagac

SEQ ID NO: 93307 - RNA, 23 nt, Artificial Sequence
  Synthetic
ugguggugcuggggaagugagac

SEQ ID NO: 93308 - RNA, 18 nt, Artificial Sequence
  Synthetic
uuaauaaaugggugagac

SEQ ID NO: 93309 - RNA, 19 nt, Artificial Sequence
  Synthetic
auuaauaaaugggugagac

SEQ ID NO: 93310 - RNA, 20 nt, Artificial Sequence
  Synthetic
aauuaauaaaugggugagac

SEQ ID NO: 93311 - RNA, 21 nt, Artificial Sequence
  Synthetic
uaauuaauaaaugggugagac

SEQ ID NO: 93312 - RNA, 22 nt, Artificial Sequence
  Synthetic
auaauuaauaaaugggugagac

SEQ ID NO: 93313 - RNA, 23 nt, Artificial Sequence
  Synthetic
aauaauuaauaaaugggugagac

SEQ ID NO: 93314 - RNA, 24 nt, Artificial Sequence
  Synthetic
aaauaauuaauaaaugggugagac

SEQ ID NO: 93315 - RNA, 18 nt, Artificial Sequence
  Synthetic
cagguuauuaaaauagac

SEQ ID NO: 93316 - RNA, 19 nt, Artificial Sequence
  Synthetic
acagguuauuaaaauagac

SEQ ID NO: 93317 - RNA, 20 nt, Artificial Sequence
  Synthetic
aacagguuauuaaaauagac

SEQ ID NO: 93318 - RNA, 21 nt, Artificial Sequence
  Synthetic
uaacagguuauuaaaauagac

SEQ ID NO: 93319 - RNA, 24 nt, Artificial Sequence
  Synthetic
ugguaacagguuauuaaaauagac

SEQ ID NO: 93320 - RNA, 18 nt, Artificial Sequence
  Synthetic
aaaaguaaucucauagac

SEQ ID NO: 93321 - RNA, 19 nt, Artificial Sequence
  Synthetic
aaaaaguaaucucauagac

SEQ ID NO: 93322 - RNA, 20 nt, Artificial Sequence
  Synthetic
uaaaaaguaaucucauagac

SEQ ID NO: 93323 - RNA, 21 nt, Artificial Sequence
  Synthetic
uuaaaaaguaaucucauagac

SEQ ID NO: 93324 - RNA, 22 nt, Artificial Sequence
  Synthetic
uuuaaaaaguaaucucauagac

SEQ ID NO: 93325 - RNA, 23 nt, Artificial Sequence
  Synthetic
auuuaaaaaguaaucucauagac

SEQ ID NO: 93326 - RNA, 24 nt, Artificial Sequence
  Synthetic
uauuuaaaaaguaaucucauagac

SEQ ID NO: 93327 - RNA, 18 nt, Artificial Sequence
  Synthetic
agaggcagaaagauagac

SEQ ID NO: 93328 - RNA, 19 nt, Artificial Sequence
  Synthetic
cagaggcagaaagauagac

SEQ ID NO: 93329 - RNA, 20 nt, Artificial Sequence
  Synthetic
ucagaggcagaaagauagac

SEQ ID NO: 93330 - RNA, 21 nt, Artificial Sequence
  Synthetic
uucagaggcagaaagauagac

SEQ ID NO: 93331 - RNA, 22 nt, Artificial Sequence
  Synthetic
auucagaggcagaaagauagac

SEQ ID NO: 93332 - RNA, 23 nt, Artificial Sequence
  Synthetic
uauucagaggcagaaagauagac

SEQ ID NO: 93333 - RNA, 24 nt, Artificial Sequence
  Synthetic
auauucagaggcagaaagauagac

SEQ ID NO: 93334 - RNA, 18 nt, Artificial Sequence
  Synthetic
uuuuaaaugaauauagac

SEQ ID NO: 93335 - RNA, 19 nt, Artificial Sequence
  Synthetic
auuuuaaaugaauauagac

SEQ ID NO: 93336 - RNA, 20 nt, Artificial Sequence
  Synthetic
uauuuuaaaugaauauagac

SEQ ID NO: 93337 - RNA, 21 nt, Artificial Sequence
  Synthetic
uuauuuuaaaugaauauagac

SEQ ID NO: 93338 - RNA, 22 nt, Artificial Sequence
  Synthetic
uuuauuuuaaaugaauauagac

SEQ ID NO: 93339 - RNA, 24 nt, Artificial Sequence
  Synthetic
aguuuauuuuaaaugaauauagac

SEQ ID NO: 93340 - RNA, 19 nt, Artificial Sequence
  Synthetic
agggaagaacuuuauagac

SEQ ID NO: 93341 - RNA, 20 nt, Artificial Sequence
  Synthetic
cagggaagaacuuuauagac

SEQ ID NO: 93342 - RNA, 21 nt, Artificial Sequence
  Synthetic
acagggaagaacuuuauagac

SEQ ID NO: 93343 - RNA, 22 nt, Artificial Sequence
  Synthetic
aacagggaagaacuuuauagac

SEQ ID NO: 93344 - RNA, 24 nt, Artificial Sequence
  Synthetic
agaacagggaagaacuuuauagac

SEQ ID NO: 93345 - RNA, 18 nt, Artificial Sequence
  Synthetic
ucaaguuauguauuagac

SEQ ID NO: 93346 - RNA, 21 nt, Artificial Sequence
  Synthetic
aggucaaguuauguauuagac

SEQ ID NO: 93347 - RNA, 22 nt, Artificial Sequence
  Synthetic
aaggucaaguuauguauuagac

SEQ ID NO: 93348 - RNA, 23 nt, Artificial Sequence
  Synthetic
aaaggucaaguuauguauuagac

SEQ ID NO: 93349 - RNA, 24 nt, Artificial Sequence
  Synthetic
aaaaggucaaguuauguauuagac

SEQ ID NO: 93350 - RNA, 19 nt, Artificial Sequence
  Synthetic
ugacuaccccaaguuagac

SEQ ID NO: 93351 - RNA, 20 nt, Artificial Sequence
  Synthetic
cugacuaccccaaguuagac

SEQ ID NO: 93352 - RNA, 21 nt, Artificial Sequence
  Synthetic
ucugacuaccccaaguuagac

SEQ ID NO: 93353 - RNA, 22 nt, Artificial Sequence
  Synthetic
cucugacuaccccaaguuagac

SEQ ID NO: 93354 - RNA, 23 nt, Artificial Sequence
  Synthetic
ucucugacuaccccaaguuagac

SEQ ID NO: 93355 - RNA, 20 nt, Artificial Sequence
  Synthetic
cgguacuaugugucaucgac

SEQ ID NO: 93356 - RNA, 21 nt, Artificial Sequence
  Synthetic
ucgguacuaugugucaucgac

SEQ ID NO: 93357 - RNA, 22 nt, Artificial Sequence
  Synthetic
uucgguacuaugugucaucgac

SEQ ID NO: 93358 - RNA, 18 nt, Artificial Sequence
  Synthetic
uuuuucaaggcccucgac

SEQ ID NO: 93359 - RNA, 19 nt, Artificial Sequence
  Synthetic
uuuuuucaaggcccucgac

SEQ ID NO: 93360 - RNA, 20 nt, Artificial Sequence
  Synthetic
uuuuuuucaaggcccucgac

SEQ ID NO: 93361 - RNA, 21 nt, Artificial Sequence
  Synthetic
auuuuuuucaaggcccucgac

SEQ ID NO: 93362 - RNA, 22 nt, Artificial Sequence
  Synthetic
uauuuuuuucaaggcccucgac

SEQ ID NO: 93363 - RNA, 23 nt, Artificial Sequence
  Synthetic
cuauuuuuuucaaggcccucgac

SEQ ID NO: 93364 - RNA, 24 nt, Artificial Sequence
  Synthetic
ccuauuuuuuucaaggcccucgac

SEQ ID NO: 93365 - RNA, 18 nt, Artificial Sequence
  Synthetic
cgacacacagcaaaggac

SEQ ID NO: 93366 - RNA, 19 nt, Artificial Sequence
  Synthetic
ucgacacacagcaaaggac

SEQ ID NO: 93367 - RNA, 20 nt, Artificial Sequence
  Synthetic
aucgacacacagcaaaggac

SEQ ID NO: 93368 - RNA, 21 nt, Artificial Sequence
  Synthetic
uaucgacacacagcaaaggac

SEQ ID NO: 93369 - RNA, 23 nt, Artificial Sequence
  Synthetic
aguaucgacacacagcaaaggac

SEQ ID NO: 93370 - RNA, 24 nt, Artificial Sequence
  Synthetic
caguaucgacacacagcaaaggac

SEQ ID NO: 93371 - RNA, 21 nt, Artificial Sequence
  Synthetic
agagcucagaaugagaaggac

SEQ ID NO: 93372 - RNA, 24 nt, Artificial Sequence
  Synthetic
aggagagcucagaaugagaaggac

SEQ ID NO: 93373 - RNA, 20 nt, Artificial Sequence
  Synthetic
uggcuuuauuuuaagaggac

SEQ ID NO: 93374 - RNA, 21 nt, Artificial Sequence
  Synthetic
cuggcuuuauuuuaagaggac

SEQ ID NO: 93375 - RNA, 23 nt, Artificial Sequence
  Synthetic
agcuggcuuuauuuuaagaggac

SEQ ID NO: 93376 - RNA, 24 nt, Artificial Sequence
  Synthetic
cagcuggcuuuauuuuaagaggac

SEQ ID NO: 93377 - RNA, 21 nt, Artificial Sequence
  Synthetic
cugggcuaagagcuagaggac

SEQ ID NO: 93378 - RNA, 22 nt, Artificial Sequence
  Synthetic
ccugggcuaagagcuagaggac

SEQ ID NO: 93379 - RNA, 24 nt, Artificial Sequence
  Synthetic
agccugggcuaagagcuagaggac

SEQ ID NO: 93380 - RNA, 21 nt, Artificial Sequence
  Synthetic
uuucuguguuuuggggaggac

SEQ ID NO: 93381 - RNA, 22 nt, Artificial Sequence
  Synthetic
auuucuguguuuuggggaggac

SEQ ID NO: 93382 - RNA, 24 nt, Artificial Sequence
  Synthetic
agauuucuguguuuuggggaggac

SEQ ID NO: 93383 - RNA, 18 nt, Artificial Sequence
  Synthetic
cagggccuggaugaggac

SEQ ID NO: 93384 - RNA, 19 nt, Artificial Sequence
  Synthetic
acagggccuggaugaggac

SEQ ID NO: 93385 - RNA, 20 nt, Artificial Sequence
  Synthetic
aacagggccuggaugaggac

SEQ ID NO: 93386 - RNA, 21 nt, Artificial Sequence
  Synthetic
aaacagggccuggaugaggac

SEQ ID NO: 93387 - RNA, 22 nt, Artificial Sequence
  Synthetic
aaaacagggccuggaugaggac

SEQ ID NO: 93388 - RNA, 24 nt, Artificial Sequence
  Synthetic
ugaaaacagggccuggaugaggac

SEQ ID NO: 93389 - RNA, 18 nt, Artificial Sequence
  Synthetic
uaggggaugucuuaggac

SEQ ID NO: 93390 - RNA, 19 nt, Artificial Sequence
  Synthetic
auaggggaugucuuaggac

SEQ ID NO: 93391 - RNA, 20 nt, Artificial Sequence
  Synthetic
aauaggggaugucuuaggac

SEQ ID NO: 93392 - RNA, 21 nt, Artificial Sequence
  Synthetic
caauaggggaugucuuaggac

SEQ ID NO: 93393 - RNA, 22 nt, Artificial Sequence
  Synthetic
ucaauaggggaugucuuaggac

SEQ ID NO: 93394 - RNA, 23 nt, Artificial Sequence
  Synthetic
uucaauaggggaugucuuaggac

SEQ ID NO: 93395 - RNA, 24 nt, Artificial Sequence
  Synthetic
auucaauaggggaugucuuaggac

SEQ ID NO: 93396 - RNA, 21 nt, Artificial Sequence
  Synthetic
auucaauuuuauuuuuaggac

SEQ ID NO: 93397 - RNA, 22 nt, Artificial Sequence
  Synthetic
aauucaauuuuauuuuuaggac

SEQ ID NO: 93398 - RNA, 23 nt, Artificial Sequence
  Synthetic
aaauucaauuuuauuuuuaggac

SEQ ID NO: 93399 - RNA, 24 nt, Artificial Sequence
  Synthetic
uaaauucaauuuuauuuuuaggac

SEQ ID NO: 93400 - RNA, 18 nt, Artificial Sequence
  Synthetic
aggaauggauaaagggac

SEQ ID NO: 93401 - RNA, 19 nt, Artificial Sequence
  Synthetic
uaggaauggauaaagggac

SEQ ID NO: 93402 - RNA, 20 nt, Artificial Sequence
  Synthetic
auaggaauggauaaagggac

SEQ ID NO: 93403 - RNA, 21 nt, Artificial Sequence
  Synthetic
uauaggaauggauaaagggac

SEQ ID NO: 93404 - RNA, 22 nt, Artificial Sequence
  Synthetic
auauaggaauggauaaagggac

SEQ ID NO: 93405 - RNA, 23 nt, Artificial Sequence
  Synthetic
aauauaggaauggauaaagggac

SEQ ID NO: 93406 - RNA, 24 nt, Artificial Sequence
  Synthetic
uaauauaggaauggauaaagggac

SEQ ID NO: 93407 - RNA, 18 nt, Artificial Sequence
  Synthetic
ugggaaaaaugaagggac

SEQ ID NO: 93408 - RNA, 20 nt, Artificial Sequence
  Synthetic
ugugggaaaaaugaagggac

SEQ ID NO: 93409 - RNA, 21 nt, Artificial Sequence
  Synthetic
uugugggaaaaaugaagggac

SEQ ID NO: 93410 - RNA, 22 nt, Artificial Sequence
  Synthetic
cuugugggaaaaaugaagggac

SEQ ID NO: 93411 - RNA, 23 nt, Artificial Sequence
  Synthetic
acuugugggaaaaaugaagggac

SEQ ID NO: 93412 - RNA, 24 nt, Artificial Sequence
  Synthetic
uacuugugggaaaaaugaagggac

SEQ ID NO: 93413 - RNA, 18 nt, Artificial Sequence
  Synthetic
uccccuuuuuccagggac

SEQ ID NO: 93414 - RNA, 19 nt, Artificial Sequence
  Synthetic
cuccccuuuuuccagggac

SEQ ID NO: 93415 - RNA, 20 nt, Artificial Sequence
  Synthetic
acuccccuuuuuccagggac

SEQ ID NO: 93416 - RNA, 22 nt, Artificial Sequence
  Synthetic
ugacuccccuuuuuccagggac

SEQ ID NO: 93417 - RNA, 23 nt, Artificial Sequence
  Synthetic
augacuccccuuuuuccagggac

SEQ ID NO: 93418 - RNA, 18 nt, Artificial Sequence
  Synthetic
cauucauuccaaggggac

SEQ ID NO: 93419 - RNA, 19 nt, Artificial Sequence
  Synthetic
ccauucauuccaaggggac

SEQ ID NO: 93420 - RNA, 21 nt, Artificial Sequence
  Synthetic
agccauucauuccaaggggac

SEQ ID NO: 93421 - RNA, 22 nt, Artificial Sequence
  Synthetic
uagccauucauuccaaggggac

SEQ ID NO: 93422 - RNA, 23 nt, Artificial Sequence
  Synthetic
auagccauucauuccaaggggac

SEQ ID NO: 93423 - RNA, 24 nt, Artificial Sequence
  Synthetic
aauagccauucauuccaaggggac

SEQ ID NO: 93424 - RNA, 18 nt, Artificial Sequence
  Synthetic
cuuaggaaucaaauggac

SEQ ID NO: 93425 - RNA, 20 nt, Artificial Sequence
  Synthetic
agcuuaggaaucaaauggac

SEQ ID NO: 93426 - RNA, 21 nt, Artificial Sequence
  Synthetic
aagcuuaggaaucaaauggac

SEQ ID NO: 93427 - RNA, 22 nt, Artificial Sequence
  Synthetic
caagcuuaggaaucaaauggac

SEQ ID NO: 93428 - RNA, 23 nt, Artificial Sequence
  Synthetic
acaagcuuaggaaucaaauggac

SEQ ID NO: 93429 - RNA, 24 nt, Artificial Sequence
  Synthetic
cacaagcuuaggaaucaaauggac

SEQ ID NO: 93430 - RNA, 18 nt, Artificial Sequence
  Synthetic
ugauggacgaugauggac

SEQ ID NO: 93431 - RNA, 19 nt, Artificial Sequence
  Synthetic
cugauggacgaugauggac

SEQ ID NO: 93432 - RNA, 20 nt, Artificial Sequence
  Synthetic
ccugauggacgaugauggac

SEQ ID NO: 93433 - RNA, 21 nt, Artificial Sequence
  Synthetic
accugauggacgaugauggac

SEQ ID NO: 93434 - RNA, 22 nt, Artificial Sequence
  Synthetic
caccugauggacgaugauggac

SEQ ID NO: 93435 - RNA, 23 nt, Artificial Sequence
  Synthetic
ccaccugauggacgaugauggac

SEQ ID NO: 93436 - RNA, 18 nt, Artificial Sequence
  Synthetic
ccuaucuuucuccuggac

SEQ ID NO: 93437 - RNA, 19 nt, Artificial Sequence
  Synthetic
uccuaucuuucuccuggac

SEQ ID NO: 93438 - RNA, 20 nt, Artificial Sequence
  Synthetic
uuccuaucuuucuccuggac

SEQ ID NO: 93439 - RNA, 21 nt, Artificial Sequence
  Synthetic
auuccuaucuuucuccuggac

SEQ ID NO: 93440 - RNA, 24 nt, Artificial Sequence
  Synthetic
cggauuccuaucuuucuccuggac

SEQ ID NO: 93441 - RNA, 22 nt, Artificial Sequence
  Synthetic
aguuuuuaaaauauaucuggac

SEQ ID NO: 93442 - RNA, 23 nt, Artificial Sequence
  Synthetic
caguuuuuaaaauauaucuggac

SEQ ID NO: 93443 - RNA, 24 nt, Artificial Sequence
  Synthetic
ucaguuuuuaaaauauaucuggac

SEQ ID NO: 93444 - RNA, 18 nt, Artificial Sequence
  Synthetic
aauaaaugauacuuggac

SEQ ID NO: 93445 - RNA, 19 nt, Artificial Sequence
  Synthetic
aaauaaaugauacuuggac

SEQ ID NO: 93446 - RNA, 20 nt, Artificial Sequence
  Synthetic
caaauaaaugauacuuggac

SEQ ID NO: 93447 - RNA, 21 nt, Artificial Sequence
  Synthetic
acaaauaaaugauacuuggac

SEQ ID NO: 93448 - RNA, 22 nt, Artificial Sequence
  Synthetic
uacaaauaaaugauacuuggac

SEQ ID NO: 93449 - RNA, 23 nt, Artificial Sequence
  Synthetic
auacaaauaaaugauacuuggac

SEQ ID NO: 93450 - RNA, 24 nt, Artificial Sequence
  Synthetic
aauacaaauaaaugauacuuggac

SEQ ID NO: 93451 - RNA, 18 nt, Artificial Sequence
  Synthetic
cuuccuauugucuuggac

SEQ ID NO: 93452 - RNA, 19 nt, Artificial Sequence
  Synthetic
acuuccuauugucuuggac

SEQ ID NO: 93453 - RNA, 20 nt, Artificial Sequence
  Synthetic
uacuuccuauugucuuggac

SEQ ID NO: 93454 - RNA, 21 nt, Artificial Sequence
  Synthetic
auacuuccuauugucuuggac

SEQ ID NO: 93455 - RNA, 22 nt, Artificial Sequence
  Synthetic
cauacuuccuauugucuuggac

SEQ ID NO: 93456 - RNA, 23 nt, Artificial Sequence
  Synthetic
acauacuuccuauugucuuggac

SEQ ID NO: 93457 - RNA, 24 nt, Artificial Sequence
  Synthetic
cacauacuuccuauugucuuggac

SEQ ID NO: 93458 - RNA, 19 nt, Artificial Sequence
  Synthetic
ugguaccaggaaaaaugac

SEQ ID NO: 93459 - RNA, 20 nt, Artificial Sequence
  Synthetic
augguaccaggaaaaaugac

SEQ ID NO: 93460 - RNA, 21 nt, Artificial Sequence
  Synthetic
aaugguaccaggaaaaaugac

SEQ ID NO: 93461 - RNA, 22 nt, Artificial Sequence
  Synthetic
caaugguaccaggaaaaaugac

SEQ ID NO: 93462 - RNA, 18 nt, Artificial Sequence
  Synthetic
ucacuuugugaaaaugac

SEQ ID NO: 93463 - RNA, 19 nt, Artificial Sequence
  Synthetic
uucacuuugugaaaaugac

SEQ ID NO: 93464 - RNA, 20 nt, Artificial Sequence
  Synthetic
uuucacuuugugaaaaugac

SEQ ID NO: 93465 - RNA, 21 nt, Artificial Sequence
  Synthetic
uuuucacuuugugaaaaugac

SEQ ID NO: 93466 - RNA, 22 nt, Artificial Sequence
  Synthetic
cuuuucacuuugugaaaaugac

SEQ ID NO: 93467 - RNA, 23 nt, Artificial Sequence
  Synthetic
ccuuuucacuuugugaaaaugac

SEQ ID NO: 93468 - RNA, 24 nt, Artificial Sequence
  Synthetic
accuuuucacuuugugaaaaugac

SEQ ID NO: 93469 - RNA, 18 nt, Artificial Sequence
  Synthetic
cuccaccucuaaaaugac

SEQ ID NO: 93470 - RNA, 20 nt, Artificial Sequence
  Synthetic
ugcuccaccucuaaaaugac

SEQ ID NO: 93471 - RNA, 21 nt, Artificial Sequence
  Synthetic
uugcuccaccucuaaaaugac

SEQ ID NO: 93472 - RNA, 22 nt, Artificial Sequence
  Synthetic
uuugcuccaccucuaaaaugac

SEQ ID NO: 93473 - RNA, 23 nt, Artificial Sequence
  Synthetic
auuugcuccaccucuaaaaugac

SEQ ID NO: 93474 - RNA, 24 nt, Artificial Sequence
  Synthetic
aauuugcuccaccucuaaaaugac

SEQ ID NO: 93475 - RNA, 18 nt, Artificial Sequence
  Synthetic
agaacuuucuagaaugac

SEQ ID NO: 93476 - RNA, 19 nt, Artificial Sequence
  Synthetic
cagaacuuucuagaaugac

SEQ ID NO: 93477 - RNA, 21 nt, Artificial Sequence
  Synthetic
ugcagaacuuucuagaaugac

SEQ ID NO: 93478 - RNA, 22 nt, Artificial Sequence
  Synthetic
uugcagaacuuucuagaaugac

SEQ ID NO: 93479 - RNA, 23 nt, Artificial Sequence
  Synthetic
cuugcagaacuuucuagaaugac

SEQ ID NO: 93480 - RNA, 24 nt, Artificial Sequence
  Synthetic
ccuugcagaacuuucuagaaugac

SEQ ID NO: 93481 - RNA, 19 nt, Artificial Sequence
  Synthetic
aguuaauagaaauaaugac

SEQ ID NO: 93482 - RNA, 20 nt, Artificial Sequence
  Synthetic
uaguuaauagaaauaaugac

SEQ ID NO: 93483 - RNA, 21 nt, Artificial Sequence
  Synthetic
uuaguuaauagaaauaaugac

SEQ ID NO: 93484 - RNA, 22 nt, Artificial Sequence
  Synthetic
cuuaguuaauagaaauaaugac

SEQ ID NO: 93485 - RNA, 23 nt, Artificial Sequence
  Synthetic
acuuaguuaauagaaauaaugac

SEQ ID NO: 93486 - RNA, 24 nt, Artificial Sequence
  Synthetic
aacuuaguuaauagaaauaaugac

SEQ ID NO: 93487 - RNA, 18 nt, Artificial Sequence
  Synthetic
uguguccuaaaagaugac

SEQ ID NO: 93488 - RNA, 19 nt, Artificial Sequence
  Synthetic
auguguccuaaaagaugac

SEQ ID NO: 93489 - RNA, 20 nt, Artificial Sequence
  Synthetic
cauguguccuaaaagaugac

SEQ ID NO: 93490 - RNA, 21 nt, Artificial Sequence
  Synthetic
acauguguccuaaaagaugac

SEQ ID NO: 93491 - RNA, 22 nt, Artificial Sequence
  Synthetic
aacauguguccuaaaagaugac

SEQ ID NO: 93492 - RNA, 23 nt, Artificial Sequence
  Synthetic
caacauguguccuaaaagaugac

SEQ ID NO: 93493 - RNA, 24 nt, Artificial Sequence
  Synthetic
ucaacauguguccuaaaagaugac

SEQ ID NO: 93494 - RNA, 18 nt, Artificial Sequence
  Synthetic
ucucauguuggagaugac

SEQ ID NO: 93495 - RNA, 20 nt, Artificial Sequence
  Synthetic
agucucauguuggagaugac

SEQ ID NO: 93496 - RNA, 21 nt, Artificial Sequence
  Synthetic
aagucucauguuggagaugac

SEQ ID NO: 93497 - RNA, 22 nt, Artificial Sequence
  Synthetic
aaagucucauguuggagaugac

SEQ ID NO: 93498 - RNA, 24 nt, Artificial Sequence
  Synthetic
agaaagucucauguuggagaugac

SEQ ID NO: 93499 - RNA, 18 nt, Artificial Sequence
  Synthetic
cuuaugaagaaauaugac

SEQ ID NO: 93500 - RNA, 19 nt, Artificial Sequence
  Synthetic
ucuuaugaagaaauaugac

SEQ ID NO: 93501 - RNA, 20 nt, Artificial Sequence
  Synthetic
aucuuaugaagaaauaugac

SEQ ID NO: 93502 - RNA, 21 nt, Artificial Sequence
  Synthetic
caucuuaugaagaaauaugac

SEQ ID NO: 93503 - RNA, 22 nt, Artificial Sequence
  Synthetic
ccaucuuaugaagaaauaugac

SEQ ID NO: 93504 - RNA, 23 nt, Artificial Sequence
  Synthetic
uccaucuuaugaagaaauaugac

SEQ ID NO: 93505 - RNA, 24 nt, Artificial Sequence
  Synthetic
auccaucuuaugaagaaauaugac

SEQ ID NO: 93506 - RNA, 18 nt, Artificial Sequence
  Synthetic
cuauuuaugaaauaugac

SEQ ID NO: 93507 - RNA, 21 nt, Artificial Sequence
  Synthetic
aggcuauuuaugaaauaugac

SEQ ID NO: 93508 - RNA, 22 nt, Artificial Sequence
  Synthetic
uaggcuauuuaugaaauaugac

SEQ ID NO: 93509 - RNA, 23 nt, Artificial Sequence
  Synthetic
auaggcuauuuaugaaauaugac

SEQ ID NO: 93510 - RNA, 24 nt, Artificial Sequence
  Synthetic
cauaggcuauuuaugaaauaugac

SEQ ID NO: 93511 - RNA, 18 nt, Artificial Sequence
  Synthetic
aacacagagaccuaugac

SEQ ID NO: 93512 - RNA, 19 nt, Artificial Sequence
  Synthetic
aaacacagagaccuaugac

SEQ ID NO: 93513 - RNA, 20 nt, Artificial Sequence
  Synthetic
uaaacacagagaccuaugac

SEQ ID NO: 93514 - RNA, 21 nt, Artificial Sequence
  Synthetic
auaaacacagagaccuaugac

SEQ ID NO: 93515 - RNA, 23 nt, Artificial Sequence
  Synthetic
agauaaacacagagaccuaugac

SEQ ID NO: 93516 - RNA, 18 nt, Artificial Sequence
  Synthetic
caacaaaaguaguaugac

SEQ ID NO: 93517 - RNA, 19 nt, Artificial Sequence
  Synthetic
ccaacaaaaguaguaugac

SEQ ID NO: 93518 - RNA, 21 nt, Artificial Sequence
  Synthetic
agccaacaaaaguaguaugac

SEQ ID NO: 93519 - RNA, 22 nt, Artificial Sequence
  Synthetic
aagccaacaaaaguaguaugac

SEQ ID NO: 93520 - RNA, 23 nt, Artificial Sequence
  Synthetic
uaagccaacaaaaguaguaugac

SEQ ID NO: 93521 - RNA, 24 nt, Artificial Sequence
  Synthetic
uuaagccaacaaaaguaguaugac

SEQ ID NO: 93522 - RNA, 18 nt, Artificial Sequence
  Synthetic
agaaagagaucuuaugac

SEQ ID NO: 93523 - RNA, 19 nt, Artificial Sequence
  Synthetic
aagaaagagaucuuaugac

SEQ ID NO: 93524 - RNA, 21 nt, Artificial Sequence
  Synthetic
agaagaaagagaucuuaugac

SEQ ID NO: 93525 - RNA, 22 nt, Artificial Sequence
  Synthetic
aagaagaaagagaucuuaugac

SEQ ID NO: 93526 - RNA, 18 nt, Artificial Sequence
  Synthetic
ugggauccuaguuaugac

SEQ ID NO: 93527 - RNA, 19 nt, Artificial Sequence
  Synthetic
uugggauccuaguuaugac

SEQ ID NO: 93528 - RNA, 20 nt, Artificial Sequence
  Synthetic
cuugggauccuaguuaugac

SEQ ID NO: 93529 - RNA, 21 nt, Artificial Sequence
  Synthetic
ucuugggauccuaguuaugac

SEQ ID NO: 93530 - RNA, 22 nt, Artificial Sequence
  Synthetic
uucuugggauccuaguuaugac

SEQ ID NO: 93531 - RNA, 23 nt, Artificial Sequence
  Synthetic
auucuugggauccuaguuaugac

SEQ ID NO: 93532 - RNA, 24 nt, Artificial Sequence
  Synthetic
aauucuugggauccuaguuaugac

SEQ ID NO: 93533 - RNA, 18 nt, Artificial Sequence
  Synthetic
aaacagugccacacugac

SEQ ID NO: 93534 - RNA, 20 nt, Artificial Sequence
  Synthetic
agaaacagugccacacugac

SEQ ID NO: 93535 - RNA, 21 nt, Artificial Sequence
  Synthetic
aagaaacagugccacacugac

SEQ ID NO: 93536 - RNA, 22 nt, Artificial Sequence
  Synthetic
uaagaaacagugccacacugac

SEQ ID NO: 93537 - RNA, 23 nt, Artificial Sequence
  Synthetic
auaagaaacagugccacacugac

SEQ ID NO: 93538 - RNA, 24 nt, Artificial Sequence
  Synthetic
aauaagaaacagugccacacugac

SEQ ID NO: 93539 - RNA, 18 nt, Artificial Sequence
  Synthetic
auaauuuuacagacugac

SEQ ID NO: 93540 - RNA, 20 nt, Artificial Sequence
  Synthetic
agauaauuuuacagacugac

SEQ ID NO: 93541 - RNA, 21 nt, Artificial Sequence
  Synthetic
cagauaauuuuacagacugac

SEQ ID NO: 93542 - RNA, 22 nt, Artificial Sequence
  Synthetic
ccagauaauuuuacagacugac

SEQ ID NO: 93543 - RNA, 23 nt, Artificial Sequence
  Synthetic
cccagauaauuuuacagacugac

SEQ ID NO: 93544 - RNA, 24 nt, Artificial Sequence
  Synthetic
ucccagauaauuuuacagacugac

SEQ ID NO: 93545 - RNA, 18 nt, Artificial Sequence
  Synthetic
auaucuguagccccugac

SEQ ID NO: 93546 - RNA, 19 nt, Artificial Sequence
  Synthetic
cauaucuguagccccugac

SEQ ID NO: 93547 - RNA, 20 nt, Artificial Sequence
  Synthetic
acauaucuguagccccugac

SEQ ID NO: 93548 - RNA, 21 nt, Artificial Sequence
  Synthetic
uacauaucuguagccccugac

SEQ ID NO: 93549 - RNA, 22 nt, Artificial Sequence
  Synthetic
uuacauaucuguagccccugac

SEQ ID NO: 93550 - RNA, 23 nt, Artificial Sequence
  Synthetic
uuuacauaucuguagccccugac

SEQ ID NO: 93551 - RNA, 24 nt, Artificial Sequence
  Synthetic
cuuuacauaucuguagccccugac

SEQ ID NO: 93552 - RNA, 20 nt, Artificial Sequence
  Synthetic
uggguugaugauagccugac

SEQ ID NO: 93553 - RNA, 21 nt, Artificial Sequence
  Synthetic
uuggguugaugauagccugac

SEQ ID NO: 93554 - RNA, 22 nt, Artificial Sequence
  Synthetic
cuuggguugaugauagccugac

SEQ ID NO: 93555 - RNA, 24 nt, Artificial Sequence
  Synthetic
ugcuuggguugaugauagccugac

SEQ ID NO: 93556 - RNA, 18 nt, Artificial Sequence
  Synthetic
cacuaggggucagcugac

SEQ ID NO: 93557 - RNA, 20 nt, Artificial Sequence
  Synthetic
agcacuaggggucagcugac

SEQ ID NO: 93558 - RNA, 21 nt, Artificial Sequence
  Synthetic
aagcacuaggggucagcugac

SEQ ID NO: 93559 - RNA, 23 nt, Artificial Sequence
  Synthetic
ugaagcacuaggggucagcugac

SEQ ID NO: 93560 - RNA, 24 nt, Artificial Sequence
  Synthetic
uugaagcacuaggggucagcugac

SEQ ID NO: 93561 - RNA, 18 nt, Artificial Sequence
  Synthetic
accuuccagggggcugac

SEQ ID NO: 93562 - RNA, 19 nt, Artificial Sequence
  Synthetic
caccuuccagggggcugac

SEQ ID NO: 93563 - RNA, 20 nt, Artificial Sequence
  Synthetic
ccaccuuccagggggcugac

SEQ ID NO: 93564 - RNA, 21 nt, Artificial Sequence
  Synthetic
uccaccuuccagggggcugac

SEQ ID NO: 93565 - RNA, 22 nt, Artificial Sequence
  Synthetic
uuccaccuuccagggggcugac

SEQ ID NO: 93566 - RNA, 23 nt, Artificial Sequence
  Synthetic
uuuccaccuuccagggggcugac

SEQ ID NO: 93567 - RNA, 24 nt, Artificial Sequence
  Synthetic
uuuuccaccuuccagggggcugac

SEQ ID NO: 93568 - RNA, 18 nt, Artificial Sequence
  Synthetic
cacacagaugaaucugac

SEQ ID NO: 93569 - RNA, 19 nt, Artificial Sequence
  Synthetic
acacacagaugaaucugac

SEQ ID NO: 93570 - RNA, 20 nt, Artificial Sequence
  Synthetic
aacacacagaugaaucugac

SEQ ID NO: 93571 - RNA, 24 nt, Artificial Sequence
  Synthetic
ugggaacacacagaugaaucugac

SEQ ID NO: 93572 - RNA, 18 nt, Artificial Sequence
  Synthetic
caccuacacuuuucugac

SEQ ID NO: 93573 - RNA, 20 nt, Artificial Sequence
  Synthetic
ugcaccuacacuuuucugac

SEQ ID NO: 93574 - RNA, 21 nt, Artificial Sequence
  Synthetic
uugcaccuacacuuuucugac

SEQ ID NO: 93575 - RNA, 22 nt, Artificial Sequence
  Synthetic
cuugcaccuacacuuuucugac

SEQ ID NO: 93576 - RNA, 23 nt, Artificial Sequence
  Synthetic
ucuugcaccuacacuuuucugac

SEQ ID NO: 93577 - RNA, 24 nt, Artificial Sequence
  Synthetic
cucuugcaccuacacuuuucugac

SEQ ID NO: 93578 - RNA, 21 nt, Artificial Sequence
  Synthetic
cccaccuugcaucagcgugac

SEQ ID NO: 93579 - RNA, 23 nt, Artificial Sequence
  Synthetic
agcccaccuugcaucagcgugac

SEQ ID NO: 93580 - RNA, 22 nt, Artificial Sequence
  Synthetic
uggccaaguccuugaaggugac

SEQ ID NO: 93581 - RNA, 23 nt, Artificial Sequence
  Synthetic
auggccaaguccuugaaggugac

SEQ ID NO: 93582 - RNA, 18 nt, Artificial Sequence
  Synthetic
agcucaucauauggugac

SEQ ID NO: 93583 - RNA, 19 nt, Artificial Sequence
  Synthetic
cagcucaucauauggugac

SEQ ID NO: 93584 - RNA, 20 nt, Artificial Sequence
  Synthetic
ucagcucaucauauggugac

SEQ ID NO: 93585 - RNA, 21 nt, Artificial Sequence
  Synthetic
aucagcucaucauauggugac

SEQ ID NO: 93586 - RNA, 22 nt, Artificial Sequence
  Synthetic
aaucagcucaucauauggugac

SEQ ID NO: 93587 - RNA, 23 nt, Artificial Sequence
  Synthetic
aaaucagcucaucauauggugac

SEQ ID NO: 93588 - RNA, 24 nt, Artificial Sequence
  Synthetic
uaaaucagcucaucauauggugac

SEQ ID NO: 93589 - RNA, 18 nt, Artificial Sequence
  Synthetic
ugggcaugcauaauugac

SEQ ID NO: 93590 - RNA, 19 nt, Artificial Sequence
  Synthetic
augggcaugcauaauugac

SEQ ID NO: 93591 - RNA, 20 nt, Artificial Sequence
  Synthetic
caugggcaugcauaauugac

SEQ ID NO: 93592 - RNA, 21 nt, Artificial Sequence
  Synthetic
ccaugggcaugcauaauugac

SEQ ID NO: 93593 - RNA, 23 nt, Artificial Sequence
  Synthetic
agccaugggcaugcauaauugac

SEQ ID NO: 93594 - RNA, 18 nt, Artificial Sequence
  Synthetic
aagauaacuucucuugac

SEQ ID NO: 93595 - RNA, 19 nt, Artificial Sequence
  Synthetic
aaagauaacuucucuugac

SEQ ID NO: 93596 - RNA, 20 nt, Artificial Sequence
  Synthetic
caaagauaacuucucuugac

SEQ ID NO: 93597 - RNA, 22 nt, Artificial Sequence
  Synthetic
agcaaagauaacuucucuugac

SEQ ID NO: 93598 - RNA, 24 nt, Artificial Sequence
  Synthetic
ugagcaaagauaacuucucuugac

SEQ ID NO: 93599 - RNA, 18 nt, Artificial Sequence
  Synthetic
agaaaacaggggguugac

SEQ ID NO: 93600 - RNA, 19 nt, Artificial Sequence
  Synthetic
cagaaaacaggggguugac

SEQ ID NO: 93601 - RNA, 20 nt, Artificial Sequence
  Synthetic
ucagaaaacaggggguugac

SEQ ID NO: 93602 - RNA, 21 nt, Artificial Sequence
  Synthetic
cucagaaaacaggggguugac

SEQ ID NO: 93603 - RNA, 22 nt, Artificial Sequence
  Synthetic
ucucagaaaacaggggguugac

SEQ ID NO: 93604 - RNA, 23 nt, Artificial Sequence
  Synthetic
uucucagaaaacaggggguugac

SEQ ID NO: 93605 - RNA, 18 nt, Artificial Sequence
  Synthetic
uugcauauuuccuuugac

SEQ ID NO: 93606 - RNA, 19 nt, Artificial Sequence
  Synthetic
cuugcauauuuccuuugac

SEQ ID NO: 93607 - RNA, 20 nt, Artificial Sequence
  Synthetic
acuugcauauuuccuuugac

SEQ ID NO: 93608 - RNA, 21 nt, Artificial Sequence
  Synthetic
uacuugcauauuuccuuugac

SEQ ID NO: 93609 - RNA, 22 nt, Artificial Sequence
  Synthetic
auacuugcauauuuccuuugac

SEQ ID NO: 93610 - RNA, 23 nt, Artificial Sequence
  Synthetic
aauacuugcauauuuccuuugac

SEQ ID NO: 93611 - RNA, 24 nt, Artificial Sequence
  Synthetic
caauacuugcauauuuccuuugac

SEQ ID NO: 93612 - RNA, 21 nt, Artificial Sequence
  Synthetic
auauauaaccaaggcuuugac

SEQ ID NO: 93613 - RNA, 22 nt, Artificial Sequence
  Synthetic
aauauauaaccaaggcuuugac

SEQ ID NO: 93614 - RNA, 23 nt, Artificial Sequence
  Synthetic
aaauauauaaccaaggcuuugac

SEQ ID NO: 93615 - RNA, 24 nt, Artificial Sequence
  Synthetic
aaaauauauaaccaaggcuuugac

SEQ ID NO: 93616 - RNA, 18 nt, Artificial Sequence
  Synthetic
cgcuuuucaaauuuugac

SEQ ID NO: 93617 - RNA, 19 nt, Artificial Sequence
  Synthetic
acgcuuuucaaauuuugac

SEQ ID NO: 93618 - RNA, 21 nt, Artificial Sequence
  Synthetic
cgacgcuuuucaaauuuugac

SEQ ID NO: 93619 - RNA, 22 nt, Artificial Sequence
  Synthetic
ucgacgcuuuucaaauuuugac

SEQ ID NO: 93620 - RNA, 23 nt, Artificial Sequence
  Synthetic
aucgacgcuuuucaaauuuugac

SEQ ID NO: 93621 - RNA, 18 nt, Artificial Sequence
  Synthetic
ugguaaaccuguuuugac

SEQ ID NO: 93622 - RNA, 19 nt, Artificial Sequence
  Synthetic
cugguaaaccuguuuugac

SEQ ID NO: 93623 - RNA, 20 nt, Artificial Sequence
  Synthetic
ucugguaaaccuguuuugac

SEQ ID NO: 93624 - RNA, 22 nt, Artificial Sequence
  Synthetic
agucugguaaaccuguuuugac

SEQ ID NO: 93625 - RNA, 23 nt, Artificial Sequence
  Synthetic
aagucugguaaaccuguuuugac

SEQ ID NO: 93626 - RNA, 24 nt, Artificial Sequence
  Synthetic
uaagucugguaaaccuguuuugac

SEQ ID NO: 93627 - RNA, 18 nt, Artificial Sequence
  Synthetic
acacauuugcaaaaauac

SEQ ID NO: 93628 - RNA, 19 nt, Artificial Sequence
  Synthetic
aacacauuugcaaaaauac

SEQ ID NO: 93629 - RNA, 21 nt, Artificial Sequence
  Synthetic
cgaacacauuugcaaaaauac

SEQ ID NO: 93630 - RNA, 22 nt, Artificial Sequence
  Synthetic
ucgaacacauuugcaaaaauac

SEQ ID NO: 93631 - RNA, 23 nt, Artificial Sequence
  Synthetic
aucgaacacauuugcaaaaauac

SEQ ID NO: 93632 - RNA, 20 nt, Artificial Sequence
  Synthetic
aggcguuugaaccaaaauac

SEQ ID NO: 93633 - RNA, 21 nt, Artificial Sequence
  Synthetic
aaggcguuugaaccaaaauac

SEQ ID NO: 93634 - RNA, 19 nt, Artificial Sequence
  Synthetic
agcauccguuuuaaaauac

SEQ ID NO: 93635 - RNA, 20 nt, Artificial Sequence
  Synthetic
aagcauccguuuuaaaauac

SEQ ID NO: 93636 - RNA, 21 nt, Artificial Sequence
  Synthetic
uaagcauccguuuuaaaauac

SEQ ID NO: 93637 - RNA, 22 nt, Artificial Sequence
  Synthetic
cuaagcauccguuuuaaaauac

SEQ ID NO: 93638 - RNA, 24 nt, Artificial Sequence
  Synthetic
agcuaagcauccguuuuaaaauac

SEQ ID NO: 93639 - RNA, 20 nt, Artificial Sequence
  Synthetic
aggagacugauagcaaauac

SEQ ID NO: 93640 - RNA, 21 nt, Artificial Sequence
  Synthetic
aaggagacugauagcaaauac

SEQ ID NO: 93641 - RNA, 22 nt, Artificial Sequence
  Synthetic
aaaggagacugauagcaaauac

SEQ ID NO: 93642 - RNA, 23 nt, Artificial Sequence
  Synthetic
aaaaggagacugauagcaaauac

SEQ ID NO: 93643 - RNA, 24 nt, Artificial Sequence
  Synthetic
aaaaaggagacugauagcaaauac

SEQ ID NO: 93644 - RNA, 18 nt, Artificial Sequence
  Synthetic
uuuccacauaugaaauac

SEQ ID NO: 93645 - RNA, 19 nt, Artificial Sequence
  Synthetic
uuuuccacauaugaaauac

SEQ ID NO: 93646 - RNA, 20 nt, Artificial Sequence
  Synthetic
auuuuccacauaugaaauac

SEQ ID NO: 93647 - RNA, 21 nt, Artificial Sequence
  Synthetic
aauuuuccacauaugaaauac

SEQ ID NO: 93648 - RNA, 22 nt, Artificial Sequence
  Synthetic
uaauuuuccacauaugaaauac

SEQ ID NO: 93649 - RNA, 23 nt, Artificial Sequence
  Synthetic
uuaauuuuccacauaugaaauac

SEQ ID NO: 93650 - RNA, 24 nt, Artificial Sequence
  Synthetic
cuuaauuuuccacauaugaaauac

SEQ ID NO: 93651 - RNA, 18 nt, Artificial Sequence
  Synthetic
uuccuuaugaauaaauac

SEQ ID NO: 93652 - RNA, 19 nt, Artificial Sequence
  Synthetic
uuuccuuaugaauaaauac

SEQ ID NO: 93653 - RNA, 20 nt, Artificial Sequence
  Synthetic
auuuccuuaugaauaaauac

SEQ ID NO: 93654 - RNA, 21 nt, Artificial Sequence
  Synthetic
cauuuccuuaugaauaaauac

SEQ ID NO: 93655 - RNA, 22 nt, Artificial Sequence
  Synthetic
ccauuuccuuaugaauaaauac

SEQ ID NO: 93656 - RNA, 23 nt, Artificial Sequence
  Synthetic
uccauuuccuuaugaauaaauac

SEQ ID NO: 93657 - RNA, 24 nt, Artificial Sequence
  Synthetic
uuccauuuccuuaugaauaaauac

SEQ ID NO: 93658 - RNA, 18 nt, Artificial Sequence
  Synthetic
uaugaccauauccaauac

SEQ ID NO: 93659 - RNA, 19 nt, Artificial Sequence
  Synthetic
auaugaccauauccaauac

SEQ ID NO: 93660 - RNA, 20 nt, Artificial Sequence
  Synthetic
uauaugaccauauccaauac

SEQ ID NO: 93661 - RNA, 21 nt, Artificial Sequence
  Synthetic
cuauaugaccauauccaauac

SEQ ID NO: 93662 - RNA, 22 nt, Artificial Sequence
  Synthetic
ccuauaugaccauauccaauac

SEQ ID NO: 93663 - RNA, 23 nt, Artificial Sequence
  Synthetic
uccuauaugaccauauccaauac

SEQ ID NO: 93664 - RNA, 24 nt, Artificial Sequence
  Synthetic
auccuauaugaccauauccaauac

SEQ ID NO: 93665 - RNA, 22 nt, Artificial Sequence
  Synthetic
ugacccagugagaagggaauac

SEQ ID NO: 93666 - RNA, 23 nt, Artificial Sequence
  Synthetic
augacccagugagaagggaauac

SEQ ID NO: 93667 - RNA, 24 nt, Artificial Sequence
  Synthetic
uaugacccagugagaagggaauac

SEQ ID NO: 93668 - RNA, 18 nt, Artificial Sequence
  Synthetic
agaguucuuaaauaauac

SEQ ID NO: 93669 - RNA, 19 nt, Artificial Sequence
  Synthetic
aagaguucuuaaauaauac

SEQ ID NO: 93670 - RNA, 20 nt, Artificial Sequence
  Synthetic
uaagaguucuuaaauaauac

SEQ ID NO: 93671 - RNA, 21 nt, Artificial Sequence
  Synthetic
uuaagaguucuuaaauaauac

SEQ ID NO: 93672 - RNA, 23 nt, Artificial Sequence
  Synthetic
aguuaagaguucuuaaauaauac

SEQ ID NO: 93673 - RNA, 24 nt, Artificial Sequence
  Synthetic
caguuaagaguucuuaaauaauac

SEQ ID NO: 93674 - RNA, 21 nt, Artificial Sequence
  Synthetic
auuaucuaauucuccuaauac

SEQ ID NO: 93675 - RNA, 22 nt, Artificial Sequence
  Synthetic
uauuaucuaauucuccuaauac

SEQ ID NO: 93676 - RNA, 23 nt, Artificial Sequence
  Synthetic
cuauuaucuaauucuccuaauac

SEQ ID NO: 93677 - RNA, 18 nt, Artificial Sequence
  Synthetic
aauuuauauuauuaauac

SEQ ID NO: 93678 - RNA, 20 nt, Artificial Sequence
  Synthetic
agaauuuauauuauuaauac

SEQ ID NO: 93679 - RNA, 21 nt, Artificial Sequence
  Synthetic
aagaauuuauauuauuaauac

SEQ ID NO: 93680 - RNA, 22 nt, Artificial Sequence
  Synthetic
caagaauuuauauuauuaauac

SEQ ID NO: 93681 - RNA, 24 nt, Artificial Sequence
  Synthetic
ugcaagaauuuauauuauuaauac

SEQ ID NO: 93682 - RNA, 18 nt, Artificial Sequence
  Synthetic
auagacuauucuuaauac

SEQ ID NO: 93683 - RNA, 19 nt, Artificial Sequence
  Synthetic
cauagacuauucuuaauac

SEQ ID NO: 93684 - RNA, 20 nt, Artificial Sequence
  Synthetic
acauagacuauucuuaauac

SEQ ID NO: 93685 - RNA, 21 nt, Artificial Sequence
  Synthetic
cacauagacuauucuuaauac

SEQ ID NO: 93686 - RNA, 23 nt, Artificial Sequence
  Synthetic
agcacauagacuauucuuaauac

SEQ ID NO: 93687 - RNA, 24 nt, Artificial Sequence
  Synthetic
uagcacauagacuauucuuaauac

SEQ ID NO: 93688 - RNA, 18 nt, Artificial Sequence
  Synthetic
ccucucuccccaacauac

SEQ ID NO: 93689 - RNA, 19 nt, Artificial Sequence
  Synthetic
accucucuccccaacauac

SEQ ID NO: 93690 - RNA, 20 nt, Artificial Sequence
  Synthetic
caccucucuccccaacauac

SEQ ID NO: 93691 - RNA, 21 nt, Artificial Sequence
  Synthetic
ccaccucucuccccaacauac

SEQ ID NO: 93692 - RNA, 22 nt, Artificial Sequence
  Synthetic
accaccucucuccccaacauac

SEQ ID NO: 93693 - RNA, 23 nt, Artificial Sequence
  Synthetic
caccaccucucuccccaacauac

SEQ ID NO: 93694 - RNA, 19 nt, Artificial Sequence
  Synthetic
aguaguugcaaacacauac

SEQ ID NO: 93695 - RNA, 20 nt, Artificial Sequence
  Synthetic
uaguaguugcaaacacauac

SEQ ID NO: 93696 - RNA, 22 nt, Artificial Sequence
  Synthetic
aguaguaguugcaaacacauac

SEQ ID NO: 93697 - RNA, 24 nt, Artificial Sequence
  Synthetic
agaguaguaguugcaaacacauac

SEQ ID NO: 93698 - RNA, 18 nt, Artificial Sequence
  Synthetic
uguaaaaugcagacauac

SEQ ID NO: 93699 - RNA, 20 nt, Artificial Sequence
  Synthetic
aguguaaaaugcagacauac

SEQ ID NO: 93700 - RNA, 21 nt, Artificial Sequence
  Synthetic
aaguguaaaaugcagacauac

SEQ ID NO: 93701 - RNA, 22 nt, Artificial Sequence
  Synthetic
uaaguguaaaaugcagacauac

SEQ ID NO: 93702 - RNA, 23 nt, Artificial Sequence
  Synthetic
cuaaguguaaaaugcagacauac

SEQ ID NO: 93703 - RNA, 24 nt, Artificial Sequence
  Synthetic
ucuaaguguaaaaugcagacauac

SEQ ID NO: 93704 - RNA, 18 nt, Artificial Sequence
  Synthetic
caaacuuauaauacauac

SEQ ID NO: 93705 - RNA, 19 nt, Artificial Sequence
  Synthetic
acaaacuuauaauacauac

SEQ ID NO: 93706 - RNA, 20 nt, Artificial Sequence
  Synthetic
cacaaacuuauaauacauac

SEQ ID NO: 93707 - RNA, 22 nt, Artificial Sequence
  Synthetic
agcacaaacuuauaauacauac

SEQ ID NO: 93708 - RNA, 23 nt, Artificial Sequence
  Synthetic
aagcacaaacuuauaauacauac

SEQ ID NO: 93709 - RNA, 24 nt, Artificial Sequence
  Synthetic
aaagcacaaacuuauaauacauac

SEQ ID NO: 93710 - RNA, 18 nt, Artificial Sequence
  Synthetic
aaaacgaccaguacauac

SEQ ID NO: 93711 - RNA, 19 nt, Artificial Sequence
  Synthetic
aaaaacgaccaguacauac

SEQ ID NO: 93712 - RNA, 20 nt, Artificial Sequence
  Synthetic
caaaaacgaccaguacauac

SEQ ID NO: 93713 - RNA, 21 nt, Artificial Sequence
  Synthetic
acaaaaacgaccaguacauac

SEQ ID NO: 93714 - RNA, 22 nt, Artificial Sequence
  Synthetic
aacaaaaacgaccaguacauac

SEQ ID NO: 93715 - RNA, 23 nt, Artificial Sequence
  Synthetic
aaacaaaaacgaccaguacauac

SEQ ID NO: 93716 - RNA, 24 nt, Artificial Sequence
  Synthetic
aaaacaaaaacgaccaguacauac

SEQ ID NO: 93717 - RNA, 18 nt, Artificial Sequence
  Synthetic
cuagggaauuaaagauac

SEQ ID NO: 93718 - RNA, 19 nt, Artificial Sequence
  Synthetic
acuagggaauuaaagauac

SEQ ID NO: 93719 - RNA, 20 nt, Artificial Sequence
  Synthetic
uacuagggaauuaaagauac

SEQ ID NO: 93720 - RNA, 21 nt, Artificial Sequence
  Synthetic
cuacuagggaauuaaagauac

SEQ ID NO: 93721 - RNA, 22 nt, Artificial Sequence
  Synthetic
ucuacuagggaauuaaagauac

SEQ ID NO: 93722 - RNA, 23 nt, Artificial Sequence
  Synthetic
aucuacuagggaauuaaagauac

SEQ ID NO: 93723 - RNA, 24 nt, Artificial Sequence
  Synthetic
caucuacuagggaauuaaagauac

SEQ ID NO: 93724 - RNA, 18 nt, Artificial Sequence
  Synthetic
agucagugauacagauac

SEQ ID NO: 93725 - RNA, 19 nt, Artificial Sequence
  Synthetic
uagucagugauacagauac

SEQ ID NO: 93726 - RNA, 20 nt, Artificial Sequence
  Synthetic
cuagucagugauacagauac

SEQ ID NO: 93727 - RNA, 23 nt, Artificial Sequence
  Synthetic
aggcuagucagugauacagauac

SEQ ID NO: 93728 - RNA, 24 nt, Artificial Sequence
  Synthetic
caggcuagucagugauacagauac

SEQ ID NO: 93729 - RNA, 19 nt, Artificial Sequence
  Synthetic
agaaaauaaccagagauac

SEQ ID NO: 93730 - RNA, 20 nt, Artificial Sequence
  Synthetic
aagaaaauaaccagagauac

SEQ ID NO: 93731 - RNA, 21 nt, Artificial Sequence
  Synthetic
aaagaaaauaaccagagauac

SEQ ID NO: 93732 - RNA, 22 nt, Artificial Sequence
  Synthetic
caaagaaaauaaccagagauac

SEQ ID NO: 93733 - RNA, 23 nt, Artificial Sequence
  Synthetic
acaaagaaaauaaccagagauac

SEQ ID NO: 93734 - RNA, 21 nt, Artificial Sequence
  Synthetic
uggguguguggagugagauac

SEQ ID NO: 93735 - RNA, 22 nt, Artificial Sequence
  Synthetic
uuggguguguggagugagauac

SEQ ID NO: 93736 - RNA, 23 nt, Artificial Sequence
  Synthetic
auuggguguguggagugagauac

SEQ ID NO: 93737 - RNA, 24 nt, Artificial Sequence
  Synthetic
cauuggguguguggagugagauac

SEQ ID NO: 93738 - RNA, 18 nt, Artificial Sequence
  Synthetic
acauaggugcauagauac

SEQ ID NO: 93739 - RNA, 19 nt, Artificial Sequence
  Synthetic
uacauaggugcauagauac

SEQ ID NO: 93740 - RNA, 20 nt, Artificial Sequence
  Synthetic
cuacauaggugcauagauac

SEQ ID NO: 93741 - RNA, 21 nt, Artificial Sequence
  Synthetic
ucuacauaggugcauagauac

SEQ ID NO: 93742 - RNA, 23 nt, Artificial Sequence
  Synthetic
agucuacauaggugcauagauac

SEQ ID NO: 93743 - RNA, 24 nt, Artificial Sequence
  Synthetic
uagucuacauaggugcauagauac

SEQ ID NO: 93744 - RNA, 18 nt, Artificial Sequence
  Synthetic
ccaagucuucauagauac

SEQ ID NO: 93745 - RNA, 20 nt, Artificial Sequence
  Synthetic
ugccaagucuucauagauac

SEQ ID NO: 93746 - RNA, 21 nt, Artificial Sequence
  Synthetic
cugccaagucuucauagauac

SEQ ID NO: 93747 - RNA, 22 nt, Artificial Sequence
  Synthetic
ccugccaagucuucauagauac

SEQ ID NO: 93748 - RNA, 23 nt, Artificial Sequence
  Synthetic
uccugccaagucuucauagauac

SEQ ID NO: 93749 - RNA, 24 nt, Artificial Sequence
  Synthetic
uuccugccaagucuucauagauac

SEQ ID NO: 93750 - RNA, 18 nt, Artificial Sequence
  Synthetic
uaaaaucaugcuagauac

SEQ ID NO: 93751 - RNA, 19 nt, Artificial Sequence
  Synthetic
cuaaaaucaugcuagauac

SEQ ID NO: 93752 - RNA, 20 nt, Artificial Sequence
  Synthetic
ccuaaaaucaugcuagauac

SEQ ID NO: 93753 - RNA, 21 nt, Artificial Sequence
  Synthetic
cccuaaaaucaugcuagauac

SEQ ID NO: 93754 - RNA, 22 nt, Artificial Sequence
  Synthetic
acccuaaaaucaugcuagauac

SEQ ID NO: 93755 - RNA, 23 nt, Artificial Sequence
  Synthetic
uacccuaaaaucaugcuagauac

SEQ ID NO: 93756 - RNA, 21 nt, Artificial Sequence
  Synthetic
aaauauccauuuaaaauauac

SEQ ID NO: 93757 - RNA, 22 nt, Artificial Sequence
  Synthetic
caaauauccauuuaaaauauac

SEQ ID NO: 93758 - RNA, 24 nt, Artificial Sequence
  Synthetic
ugcaaauauccauuuaaaauauac

SEQ ID NO: 93759 - RNA, 21 nt, Artificial Sequence
  Synthetic
aaagaauacuuaauaauauac

SEQ ID NO: 93760 - RNA, 22 nt, Artificial Sequence
  Synthetic
caaagaauacuuaauaauauac

SEQ ID NO: 93761 - RNA, 23 nt, Artificial Sequence
  Synthetic
ucaaagaauacuuaauaauauac

SEQ ID NO: 93762 - RNA, 21 nt, Artificial Sequence
  Synthetic
ccaguacugcagauaauauac

SEQ ID NO: 93763 - RNA, 22 nt, Artificial Sequence
  Synthetic
uccaguacugcagauaauauac

SEQ ID NO: 93764 - RNA, 23 nt, Artificial Sequence
  Synthetic
uuccaguacugcagauaauauac

SEQ ID NO: 93765 - RNA, 24 nt, Artificial Sequence
  Synthetic
auuccaguacugcagauaauauac

SEQ ID NO: 93766 - RNA, 18 nt, Artificial Sequence
  Synthetic
uggcacauauaccuauac

SEQ ID NO: 93767 - RNA, 19 nt, Artificial Sequence
  Synthetic
uuggcacauauaccuauac

SEQ ID NO: 93768 - RNA, 20 nt, Artificial Sequence
  Synthetic
auuggcacauauaccuauac

SEQ ID NO: 93769 - RNA, 21 nt, Artificial Sequence
  Synthetic
uauuggcacauauaccuauac

SEQ ID NO: 93770 - RNA, 23 nt, Artificial Sequence
  Synthetic
uguauuggcacauauaccuauac

SEQ ID NO: 93771 - RNA, 24 nt, Artificial Sequence
  Synthetic
uuguauuggcacauauaccuauac

SEQ ID NO: 93772 - RNA, 18 nt, Artificial Sequence
  Synthetic
uaaucugacucauuauac

SEQ ID NO: 93773 - RNA, 19 nt, Artificial Sequence
  Synthetic
cuaaucugacucauuauac

SEQ ID NO: 93774 - RNA, 20 nt, Artificial Sequence
  Synthetic
acuaaucugacucauuauac

SEQ ID NO: 93775 - RNA, 21 nt, Artificial Sequence
  Synthetic
uacuaaucugacucauuauac

SEQ ID NO: 93776 - RNA, 22 nt, Artificial Sequence
  Synthetic
uuacuaaucugacucauuauac

SEQ ID NO: 93777 - RNA, 24 nt, Artificial Sequence
  Synthetic
aguuacuaaucugacucauuauac

SEQ ID NO: 93778 - RNA, 18 nt, Artificial Sequence
  Synthetic
ucugugggaaaguuauac

SEQ ID NO: 93779 - RNA, 19 nt, Artificial Sequence
  Synthetic
aucugugggaaaguuauac

SEQ ID NO: 93780 - RNA, 20 nt, Artificial Sequence
  Synthetic
aaucugugggaaaguuauac

SEQ ID NO: 93781 - RNA, 22 nt, Artificial Sequence
  Synthetic
ugaaucugugggaaaguuauac

SEQ ID NO: 93782 - RNA, 24 nt, Artificial Sequence
  Synthetic
agugaaucugugggaaaguuauac

SEQ ID NO: 93783 - RNA, 18 nt, Artificial Sequence
  Synthetic
uuuuauuccaaguuauac

SEQ ID NO: 93784 - RNA, 21 nt, Artificial Sequence
  Synthetic
ugguuuuauuccaaguuauac

SEQ ID NO: 93785 - RNA, 22 nt, Artificial Sequence
  Synthetic
augguuuuauuccaaguuauac

SEQ ID NO: 93786 - RNA, 23 nt, Artificial Sequence
  Synthetic
aaugguuuuauuccaaguuauac

SEQ ID NO: 93787 - RNA, 24 nt, Artificial Sequence
  Synthetic
aaaugguuuuauuccaaguuauac

SEQ ID NO: 93788 - RNA, 18 nt, Artificial Sequence
  Synthetic
cuuuaaagucuguuauac

SEQ ID NO: 93789 - RNA, 19 nt, Artificial Sequence
  Synthetic
ucuuuaaagucuguuauac

SEQ ID NO: 93790 - RNA, 20 nt, Artificial Sequence
  Synthetic
aucuuuaaagucuguuauac

SEQ ID NO: 93791 - RNA, 21 nt, Artificial Sequence
  Synthetic
uaucuuuaaagucuguuauac

SEQ ID NO: 93792 - RNA, 22 nt, Artificial Sequence
  Synthetic
uuaucuuuaaagucuguuauac

SEQ ID NO: 93793 - RNA, 23 nt, Artificial Sequence
  Synthetic
auuaucuuuaaagucuguuauac

SEQ ID NO: 93794 - RNA, 24 nt, Artificial Sequence
  Synthetic
uauuaucuuuaaagucuguuauac

SEQ ID NO: 93795 - RNA, 18 nt, Artificial Sequence
  Synthetic
aacugauuccauuuauac

SEQ ID NO: 93796 - RNA, 19 nt, Artificial Sequence
  Synthetic
aaacugauuccauuuauac

SEQ ID NO: 93797 - RNA, 20 nt, Artificial Sequence
  Synthetic
aaaacugauuccauuuauac

SEQ ID NO: 93798 - RNA, 21 nt, Artificial Sequence
  Synthetic
aaaaacugauuccauuuauac

SEQ ID NO: 93799 - RNA, 23 nt, Artificial Sequence
  Synthetic
agaaaaacugauuccauuuauac

SEQ ID NO: 93800 - RNA, 24 nt, Artificial Sequence
  Synthetic
aagaaaaacugauuccauuuauac

SEQ ID NO: 93801 - RNA, 18 nt, Artificial Sequence
  Synthetic
cuagagaaaacaaacuac

SEQ ID NO: 93802 - RNA, 19 nt, Artificial Sequence
  Synthetic
acuagagaaaacaaacuac

SEQ ID NO: 93803 - RNA, 21 nt, Artificial Sequence
  Synthetic
ugacuagagaaaacaaacuac

SEQ ID NO: 93804 - RNA, 22 nt, Artificial Sequence
  Synthetic
uugacuagagaaaacaaacuac

SEQ ID NO: 93805 - RNA, 23 nt, Artificial Sequence
  Synthetic
uuugacuagagaaaacaaacuac

SEQ ID NO: 93806 - RNA, 18 nt, Artificial Sequence
  Synthetic
aaugaauuuucaaacuac

SEQ ID NO: 93807 - RNA, 19 nt, Artificial Sequence
  Synthetic
caaugaauuuucaaacuac

SEQ ID NO: 93808 - RNA, 20 nt, Artificial Sequence
  Synthetic
ccaaugaauuuucaaacuac

SEQ ID NO: 93809 - RNA, 22 nt, Artificial Sequence
  Synthetic
ugccaaugaauuuucaaacuac

SEQ ID NO: 93810 - RNA, 23 nt, Artificial Sequence
  Synthetic
augccaaugaauuuucaaacuac

SEQ ID NO: 93811 - RNA, 18 nt, Artificial Sequence
  Synthetic
cgcuuagauguaaacuac

SEQ ID NO: 93812 - RNA, 20 nt, Artificial Sequence
  Synthetic
agcgcuuagauguaaacuac

SEQ ID NO: 93813 - RNA, 21 nt, Artificial Sequence
  Synthetic
aagcgcuuagauguaaacuac

SEQ ID NO: 93814 - RNA, 22 nt, Artificial Sequence
  Synthetic
aaagcgcuuagauguaaacuac

SEQ ID NO: 93815 - RNA, 18 nt, Artificial Sequence
  Synthetic
aauaauguuaucaacuac

SEQ ID NO: 93816 - RNA, 19 nt, Artificial Sequence
  Synthetic
caauaauguuaucaacuac

SEQ ID NO: 93817 - RNA, 20 nt, Artificial Sequence
  Synthetic
ucaauaauguuaucaacuac

SEQ ID NO: 93818 - RNA, 21 nt, Artificial Sequence
  Synthetic
uucaauaauguuaucaacuac

SEQ ID NO: 93819 - RNA, 22 nt, Artificial Sequence
  Synthetic
auucaauaauguuaucaacuac

SEQ ID NO: 93820 - RNA, 23 nt, Artificial Sequence
  Synthetic
uauucaauaauguuaucaacuac

SEQ ID NO: 93821 - RNA, 24 nt, Artificial Sequence
  Synthetic
auauucaauaauguuaucaacuac

SEQ ID NO: 93822 - RNA, 18 nt, Artificial Sequence
  Synthetic
uucucauuugcuaacuac

SEQ ID NO: 93823 - RNA, 19 nt, Artificial Sequence
  Synthetic
uuucucauuugcuaacuac

SEQ ID NO: 93824 - RNA, 20 nt, Artificial Sequence
  Synthetic
auuucucauuugcuaacuac

SEQ ID NO: 93825 - RNA, 21 nt, Artificial Sequence
  Synthetic
uauuucucauuugcuaacuac

SEQ ID NO: 93826 - RNA, 22 nt, Artificial Sequence
  Synthetic
uuauuucucauuugcuaacuac

SEQ ID NO: 93827 - RNA, 23 nt, Artificial Sequence
  Synthetic
uuuauuucucauuugcuaacuac

SEQ ID NO: 93828 - RNA, 24 nt, Artificial Sequence
  Synthetic
auuuauuucucauuugcuaacuac

SEQ ID NO: 93829 - RNA, 19 nt, Artificial Sequence
  Synthetic
agaacaguuccaacacuac

SEQ ID NO: 93830 - RNA, 20 nt, Artificial Sequence
  Synthetic
aagaacaguuccaacacuac

SEQ ID NO: 93831 - RNA, 18 nt, Artificial Sequence
  Synthetic
cauucuccuaaccacuac

SEQ ID NO: 93832 - RNA, 19 nt, Artificial Sequence
  Synthetic
ucauucuccuaaccacuac

SEQ ID NO: 93833 - RNA, 20 nt, Artificial Sequence
  Synthetic
uucauucuccuaaccacuac

SEQ ID NO: 93834 - RNA, 21 nt, Artificial Sequence
  Synthetic
auucauucuccuaaccacuac

SEQ ID NO: 93835 - RNA, 22 nt, Artificial Sequence
  Synthetic
aauucauucuccuaaccacuac

SEQ ID NO: 93836 - RNA, 23 nt, Artificial Sequence
  Synthetic
caauucauucuccuaaccacuac

SEQ ID NO: 93837 - RNA, 24 nt, Artificial Sequence
  Synthetic
ccaauucauucuccuaaccacuac

SEQ ID NO: 93838 - RNA, 18 nt, Artificial Sequence
  Synthetic
uauucucuagcucacuac

SEQ ID NO: 93839 - RNA, 19 nt, Artificial Sequence
  Synthetic
uuauucucuagcucacuac

SEQ ID NO: 93840 - RNA, 20 nt, Artificial Sequence
  Synthetic
uuuauucucuagcucacuac

SEQ ID NO: 93841 - RNA, 21 nt, Artificial Sequence
  Synthetic
auuuauucucuagcucacuac

SEQ ID NO: 93842 - RNA, 22 nt, Artificial Sequence
  Synthetic
cauuuauucucuagcucacuac

SEQ ID NO: 93843 - RNA, 23 nt, Artificial Sequence
  Synthetic
ucauuuauucucuagcucacuac

SEQ ID NO: 93844 - RNA, 24 nt, Artificial Sequence
  Synthetic
aucauuuauucucuagcucacuac

SEQ ID NO: 93845 - RNA, 18 nt, Artificial Sequence
  Synthetic
uuugaaaucuaugacuac

SEQ ID NO: 93846 - RNA, 19 nt, Artificial Sequence
  Synthetic
auuugaaaucuaugacuac

SEQ ID NO: 93847 - RNA, 20 nt, Artificial Sequence
  Synthetic
aauuugaaaucuaugacuac

SEQ ID NO: 93848 - RNA, 21 nt, Artificial Sequence
  Synthetic
uaauuugaaaucuaugacuac

SEQ ID NO: 93849 - RNA, 22 nt, Artificial Sequence
  Synthetic
cuaauuugaaaucuaugacuac

SEQ ID NO: 93850 - RNA, 23 nt, Artificial Sequence
  Synthetic
acuaauuugaaaucuaugacuac

SEQ ID NO: 93851 - RNA, 24 nt, Artificial Sequence
  Synthetic
cacuaauuugaaaucuaugacuac

SEQ ID NO: 93852 - RNA, 19 nt, Artificial Sequence
  Synthetic
agcaauagcaaaauacuac

SEQ ID NO: 93853 - RNA, 20 nt, Artificial Sequence
  Synthetic
aagcaauagcaaaauacuac

SEQ ID NO: 93854 - RNA, 21 nt, Artificial Sequence
  Synthetic
uaagcaauagcaaaauacuac

SEQ ID NO: 93855 - RNA, 22 nt, Artificial Sequence
  Synthetic
auaagcaauagcaaaauacuac

SEQ ID NO: 93856 - RNA, 23 nt, Artificial Sequence
  Synthetic
cauaagcaauagcaaaauacuac

SEQ ID NO: 93857 - RNA, 24 nt, Artificial Sequence
  Synthetic
ccauaagcaauagcaaaauacuac

SEQ ID NO: 93858 - RNA, 20 nt, Artificial Sequence
  Synthetic
ugguuccaugacacuacuac

SEQ ID NO: 93859 - RNA, 21 nt, Artificial Sequence
  Synthetic
augguuccaugacacuacuac

SEQ ID NO: 93860 - RNA, 23 nt, Artificial Sequence
  Synthetic
ugaugguuccaugacacuacuac

SEQ ID NO: 93861 - RNA, 18 nt, Artificial Sequence
  Synthetic
ugcugugaaauuuacuac

SEQ ID NO: 93862 - RNA, 19 nt, Artificial Sequence
  Synthetic
cugcugugaaauuuacuac

SEQ ID NO: 93863 - RNA, 20 nt, Artificial Sequence
  Synthetic
acugcugugaaauuuacuac

SEQ ID NO: 93864 - RNA, 21 nt, Artificial Sequence
  Synthetic
uacugcugugaaauuuacuac

SEQ ID NO: 93865 - RNA, 22 nt, Artificial Sequence
  Synthetic
cuacugcugugaaauuuacuac

SEQ ID NO: 93866 - RNA, 23 nt, Artificial Sequence
  Synthetic
ccuacugcugugaaauuuacuac

SEQ ID NO: 93867 - RNA, 18 nt, Artificial Sequence
  Synthetic
acagacguggaagccuac

SEQ ID NO: 93868 - RNA, 19 nt, Artificial Sequence
  Synthetic
aacagacguggaagccuac

SEQ ID NO: 93869 - RNA, 20 nt, Artificial Sequence
  Synthetic
caacagacguggaagccuac

SEQ ID NO: 93870 - RNA, 18 nt, Artificial Sequence
  Synthetic
agaggaucagaggccuac

SEQ ID NO: 93871 - RNA, 19 nt, Artificial Sequence
  Synthetic
cagaggaucagaggccuac

SEQ ID NO: 93872 - RNA, 20 nt, Artificial Sequence
  Synthetic
ccagaggaucagaggccuac

SEQ ID NO: 93873 - RNA, 21 nt, Artificial Sequence
  Synthetic
uccagaggaucagaggccuac

SEQ ID NO: 93874 - RNA, 22 nt, Artificial Sequence
  Synthetic
uuccagaggaucagaggccuac

SEQ ID NO: 93875 - RNA, 23 nt, Artificial Sequence
  Synthetic
uuuccagaggaucagaggccuac

SEQ ID NO: 93876 - RNA, 24 nt, Artificial Sequence
  Synthetic
uuuuccagaggaucagaggccuac

SEQ ID NO: 93877 - RNA, 18 nt, Artificial Sequence
  Synthetic
aaauagaguuccuccuac

SEQ ID NO: 93878 - RNA, 19 nt, Artificial Sequence
  Synthetic
aaaauagaguuccuccuac

SEQ ID NO: 93879 - RNA, 20 nt, Artificial Sequence
  Synthetic
uaaaauagaguuccuccuac

SEQ ID NO: 93880 - RNA, 21 nt, Artificial Sequence
  Synthetic
uuaaaauagaguuccuccuac

SEQ ID NO: 93881 - RNA, 22 nt, Artificial Sequence
  Synthetic
uuuaaaauagaguuccuccuac

SEQ ID NO: 93882 - RNA, 23 nt, Artificial Sequence
  Synthetic
uuuuaaaauagaguuccuccuac

SEQ ID NO: 93883 - RNA, 24 nt, Artificial Sequence
  Synthetic
uuuuuaaaauagaguuccuccuac

SEQ ID NO: 93884 - RNA, 18 nt, Artificial Sequence
  Synthetic
cuuacuaccccuuccuac

SEQ ID NO: 93885 - RNA, 20 nt, Artificial Sequence
  Synthetic
agcuuacuaccccuuccuac

SEQ ID NO: 93886 - RNA, 21 nt, Artificial Sequence
  Synthetic
aagcuuacuaccccuuccuac

SEQ ID NO: 93887 - RNA, 22 nt, Artificial Sequence
  Synthetic
aaagcuuacuaccccuuccuac

SEQ ID NO: 93888 - RNA, 23 nt, Artificial Sequence
  Synthetic
caaagcuuacuaccccuuccuac

SEQ ID NO: 93889 - RNA, 24 nt, Artificial Sequence
  Synthetic
acaaagcuuacuaccccuuccuac

SEQ ID NO: 93890 - RNA, 18 nt, Artificial Sequence
  Synthetic
acaauucuagguuccuac

SEQ ID NO: 93891 - RNA, 19 nt, Artificial Sequence
  Synthetic
cacaauucuagguuccuac

SEQ ID NO: 93892 - RNA, 20 nt, Artificial Sequence
  Synthetic
acacaauucuagguuccuac

SEQ ID NO: 93893 - RNA, 21 nt, Artificial Sequence
  Synthetic
uacacaauucuagguuccuac

SEQ ID NO: 93894 - RNA, 23 nt, Artificial Sequence
  Synthetic
aguacacaauucuagguuccuac

SEQ ID NO: 93895 - RNA, 24 nt, Artificial Sequence
  Synthetic
caguacacaauucuagguuccuac

SEQ ID NO: 93896 - RNA, 18 nt, Artificial Sequence
  Synthetic
uucucccacuuuuccuac

SEQ ID NO: 93897 - RNA, 20 nt, Artificial Sequence
  Synthetic
aguucucccacuuuuccuac

SEQ ID NO: 93898 - RNA, 21 nt, Artificial Sequence
  Synthetic
caguucucccacuuuuccuac

SEQ ID NO: 93899 - RNA, 22 nt, Artificial Sequence
  Synthetic
ccaguucucccacuuuuccuac

SEQ ID NO: 93900 - RNA, 23 nt, Artificial Sequence
  Synthetic
accaguucucccacuuuuccuac

SEQ ID NO: 93901 - RNA, 24 nt, Artificial Sequence
  Synthetic
caccaguucucccacuuuuccuac

SEQ ID NO: 93902 - RNA, 18 nt, Artificial Sequence
  Synthetic
cuguaguggagaagcuac

SEQ ID NO: 93903 - RNA, 19 nt, Artificial Sequence
  Synthetic
acuguaguggagaagcuac

SEQ ID NO: 93904 - RNA, 20 nt, Artificial Sequence
  Synthetic
aacuguaguggagaagcuac

SEQ ID NO: 93905 - RNA, 22 nt, Artificial Sequence
  Synthetic
agaacuguaguggagaagcuac

SEQ ID NO: 93906 - RNA, 23 nt, Artificial Sequence
  Synthetic
cagaacuguaguggagaagcuac

SEQ ID NO: 93907 - RNA, 24 nt, Artificial Sequence
  Synthetic
ucagaacuguaguggagaagcuac

SEQ ID NO: 93908 - RNA, 18 nt, Artificial Sequence
  Synthetic
cucccaccuuacagcuac

SEQ ID NO: 93909 - RNA, 19 nt, Artificial Sequence
  Synthetic
ccucccaccuuacagcuac

SEQ ID NO: 93910 - RNA, 20 nt, Artificial Sequence
  Synthetic
cccucccaccuuacagcuac

SEQ ID NO: 93911 - RNA, 21 nt, Artificial Sequence
  Synthetic
acccucccaccuuacagcuac

SEQ ID NO: 93912 - RNA, 22 nt, Artificial Sequence
  Synthetic
aacccucccaccuuacagcuac

SEQ ID NO: 93913 - RNA, 24 nt, Artificial Sequence
  Synthetic
agaacccucccaccuuacagcuac

SEQ ID NO: 93914 - RNA, 18 nt, Artificial Sequence
  Synthetic
uuuaaagaacguggcuac

SEQ ID NO: 93915 - RNA, 19 nt, Artificial Sequence
  Synthetic
uuuuaaagaacguggcuac

SEQ ID NO: 93916 - RNA, 20 nt, Artificial Sequence
  Synthetic
cuuuuaaagaacguggcuac

SEQ ID NO: 93917 - RNA, 21 nt, Artificial Sequence
  Synthetic
acuuuuaaagaacguggcuac

SEQ ID NO: 93918 - RNA, 22 nt, Artificial Sequence
  Synthetic
uacuuuuaaagaacguggcuac

SEQ ID NO: 93919 - RNA, 23 nt, Artificial Sequence
  Synthetic
cuacuuuuaaagaacguggcuac

SEQ ID NO: 93920 - RNA, 24 nt, Artificial Sequence
  Synthetic
ucuacuuuuaaagaacguggcuac

SEQ ID NO: 93921 - RNA, 18 nt, Artificial Sequence
  Synthetic
agaaaaauugaaugcuac

SEQ ID NO: 93922 - RNA, 19 nt, Artificial Sequence
  Synthetic
aagaaaaauugaaugcuac

SEQ ID NO: 93923 - RNA, 20 nt, Artificial Sequence
  Synthetic
aaagaaaaauugaaugcuac

SEQ ID NO: 93924 - RNA, 21 nt, Artificial Sequence
  Synthetic
uaaagaaaaauugaaugcuac

SEQ ID NO: 93925 - RNA, 22 nt, Artificial Sequence
  Synthetic
cuaaagaaaaauugaaugcuac

SEQ ID NO: 93926 - RNA, 23 nt, Artificial Sequence
  Synthetic
ucuaaagaaaaauugaaugcuac

SEQ ID NO: 93927 - RNA, 24 nt, Artificial Sequence
  Synthetic
uucuaaagaaaaauugaaugcuac

SEQ ID NO: 93928 - RNA, 18 nt, Artificial Sequence
  Synthetic
uuaaaugaaaauugcuac

SEQ ID NO: 93929 - RNA, 19 nt, Artificial Sequence
  Synthetic
auuaaaugaaaauugcuac

SEQ ID NO: 93930 - RNA, 20 nt, Artificial Sequence
  Synthetic
aauuaaaugaaaauugcuac

SEQ ID NO: 93931 - RNA, 21 nt, Artificial Sequence
  Synthetic
aaauuaaaugaaaauugcuac

SEQ ID NO: 93932 - RNA, 22 nt, Artificial Sequence
  Synthetic
aaaauuaaaugaaaauugcuac

SEQ ID NO: 93933 - RNA, 23 nt, Artificial Sequence
  Synthetic
uaaaauuaaaugaaaauugcuac

SEQ ID NO: 93934 - RNA, 24 nt, Artificial Sequence
  Synthetic
auaaaauuaaaugaaaauugcuac

SEQ ID NO: 93935 - RNA, 18 nt, Artificial Sequence
  Synthetic
uuuuacaggaguugcuac

SEQ ID NO: 93936 - RNA, 19 nt, Artificial Sequence
  Synthetic
auuuuacaggaguugcuac

SEQ ID NO: 93937 - RNA, 20 nt, Artificial Sequence
  Synthetic
aauuuuacaggaguugcuac

SEQ ID NO: 93938 - RNA, 21 nt, Artificial Sequence
  Synthetic
uaauuuuacaggaguugcuac

SEQ ID NO: 93939 - RNA, 22 nt, Artificial Sequence
  Synthetic
auaauuuuacaggaguugcuac

SEQ ID NO: 93940 - RNA, 23 nt, Artificial Sequence
  Synthetic
uauaauuuuacaggaguugcuac

SEQ ID NO: 93941 - RNA, 24 nt, Artificial Sequence
  Synthetic
auauaauuuuacaggaguugcuac

SEQ ID NO: 93942 - RNA, 18 nt, Artificial Sequence
  Synthetic
uuacuguuuaaaaucuac

SEQ ID NO: 93943 - RNA, 19 nt, Artificial Sequence
  Synthetic
auuacuguuuaaaaucuac

SEQ ID NO: 93944 - RNA, 20 nt, Artificial Sequence
  Synthetic
uauuacuguuuaaaaucuac

SEQ ID NO: 93945 - RNA, 23 nt, Artificial Sequence
  Synthetic
agguauuacuguuuaaaaucuac

SEQ ID NO: 93946 - RNA, 24 nt, Artificial Sequence
  Synthetic
cagguauuacuguuuaaaaucuac

SEQ ID NO: 93947 - RNA, 18 nt, Artificial Sequence
  Synthetic
auuaacauugcaaucuac

SEQ ID NO: 93948 - RNA, 19 nt, Artificial Sequence
  Synthetic
cauuaacauugcaaucuac

SEQ ID NO: 93949 - RNA, 21 nt, Artificial Sequence
  Synthetic
cgcauuaacauugcaaucuac

SEQ ID NO: 93950 - RNA, 22 nt, Artificial Sequence
  Synthetic
acgcauuaacauugcaaucuac

SEQ ID NO: 93951 - RNA, 23 nt, Artificial Sequence
  Synthetic
uacgcauuaacauugcaaucuac

SEQ ID NO: 93952 - RNA, 24 nt, Artificial Sequence
  Synthetic
auacgcauuaacauugcaaucuac

SEQ ID NO: 93953 - RNA, 19 nt, Artificial Sequence
  Synthetic
agccugugaggucaucuac

SEQ ID NO: 93954 - RNA, 20 nt, Artificial Sequence
  Synthetic
aagccugugaggucaucuac

SEQ ID NO: 93955 - RNA, 23 nt, Artificial Sequence
  Synthetic
aggaagccugugaggucaucuac

SEQ ID NO: 93956 - RNA, 18 nt, Artificial Sequence
  Synthetic
auuuucucugagaucuac

SEQ ID NO: 93957 - RNA, 21 nt, Artificial Sequence
  Synthetic
cggauuuucucugagaucuac

SEQ ID NO: 93958 - RNA, 22 nt, Artificial Sequence
  Synthetic
ucggauuuucucugagaucuac

SEQ ID NO: 93959 - RNA, 23 nt, Artificial Sequence
  Synthetic
uucggauuuucucugagaucuac

SEQ ID NO: 93960 - RNA, 24 nt, Artificial Sequence
  Synthetic
uuucggauuuucucugagaucuac

SEQ ID NO: 93961 - RNA, 18 nt, Artificial Sequence
  Synthetic
uauaauccagaacucuac

SEQ ID NO: 93962 - RNA, 19 nt, Artificial Sequence
  Synthetic
auauaauccagaacucuac

SEQ ID NO: 93963 - RNA, 20 nt, Artificial Sequence
  Synthetic
cauauaauccagaacucuac

SEQ ID NO: 93964 - RNA, 22 nt, Artificial Sequence
  Synthetic
ugcauauaauccagaacucuac

SEQ ID NO: 93965 - RNA, 18 nt, Artificial Sequence
  Synthetic
auacaccuucuccucuac

SEQ ID NO: 93966 - RNA, 19 nt, Artificial Sequence
  Synthetic
aauacaccuucuccucuac

SEQ ID NO: 93967 - RNA, 20 nt, Artificial Sequence
  Synthetic
aaauacaccuucuccucuac

SEQ ID NO: 93968 - RNA, 22 nt, Artificial Sequence
  Synthetic
agaaauacaccuucuccucuac

SEQ ID NO: 93969 - RNA, 23 nt, Artificial Sequence
  Synthetic
aagaaauacaccuucuccucuac

SEQ ID NO: 93970 - RNA, 24 nt, Artificial Sequence
  Synthetic
aaagaaauacaccuucuccucuac

SEQ ID NO: 93971 - RNA, 18 nt, Artificial Sequence
  Synthetic
auaucuuugaaucucuac

SEQ ID NO: 93972 - RNA, 19 nt, Artificial Sequence
  Synthetic
cauaucuuugaaucucuac

SEQ ID NO: 93973 - RNA, 20 nt, Artificial Sequence
  Synthetic
acauaucuuugaaucucuac

SEQ ID NO: 93974 - RNA, 21 nt, Artificial Sequence
  Synthetic
cacauaucuuugaaucucuac

SEQ ID NO: 93975 - RNA, 22 nt, Artificial Sequence
  Synthetic
ucacauaucuuugaaucucuac

SEQ ID NO: 93976 - RNA, 23 nt, Artificial Sequence
  Synthetic
uucacauaucuuugaaucucuac

SEQ ID NO: 93977 - RNA, 24 nt, Artificial Sequence
  Synthetic
auucacauaucuuugaaucucuac

SEQ ID NO: 93978 - RNA, 18 nt, Artificial Sequence
  Synthetic
uauauucucccugucuac

SEQ ID NO: 93979 - RNA, 19 nt, Artificial Sequence
  Synthetic
auauauucucccugucuac

SEQ ID NO: 93980 - RNA, 20 nt, Artificial Sequence
  Synthetic
uauauauucucccugucuac

SEQ ID NO: 93981 - RNA, 21 nt, Artificial Sequence
  Synthetic
auauauauucucccugucuac

SEQ ID NO: 93982 - RNA, 22 nt, Artificial Sequence
  Synthetic
cauauauauucucccugucuac

SEQ ID NO: 93983 - RNA, 23 nt, Artificial Sequence
  Synthetic
acauauauauucucccugucuac

SEQ ID NO: 93984 - RNA, 18 nt, Artificial Sequence
  Synthetic
auaauggaucgugucuac

SEQ ID NO: 93985 - RNA, 20 nt, Artificial Sequence
  Synthetic
ugauaauggaucgugucuac

SEQ ID NO: 93986 - RNA, 21 nt, Artificial Sequence
  Synthetic
augauaauggaucgugucuac

SEQ ID NO: 93987 - RNA, 22 nt, Artificial Sequence
  Synthetic
caugauaauggaucgugucuac

SEQ ID NO: 93988 - RNA, 24 nt, Artificial Sequence
  Synthetic
agcaugauaauggaucgugucuac

SEQ ID NO: 93989 - RNA, 18 nt, Artificial Sequence
  Synthetic
acuguaauaaaauucuac

SEQ ID NO: 93990 - RNA, 19 nt, Artificial Sequence
  Synthetic
uacuguaauaaaauucuac

SEQ ID NO: 93991 - RNA, 20 nt, Artificial Sequence
  Synthetic
auacuguaauaaaauucuac

SEQ ID NO: 93992 - RNA, 21 nt, Artificial Sequence
  Synthetic
aauacuguaauaaaauucuac

SEQ ID NO: 93993 - RNA, 22 nt, Artificial Sequence
  Synthetic
uaauacuguaauaaaauucuac

SEQ ID NO: 93994 - RNA, 23 nt, Artificial Sequence
  Synthetic
uuaauacuguaauaaaauucuac

SEQ ID NO: 93995 - RNA, 24 nt, Artificial Sequence
  Synthetic
auuaauacuguaauaaaauucuac

SEQ ID NO: 93996 - RNA, 18 nt, Artificial Sequence
  Synthetic
agaaaauggcaauucuac

SEQ ID NO: 93997 - RNA, 19 nt, Artificial Sequence
  Synthetic
uagaaaauggcaauucuac

SEQ ID NO: 93998 - RNA, 21 nt, Artificial Sequence
  Synthetic
aguagaaaauggcaauucuac

SEQ ID NO: 93999 - RNA, 22 nt, Artificial Sequence
  Synthetic
uaguagaaaauggcaauucuac

SEQ ID NO: 94000 - RNA, 23 nt, Artificial Sequence
  Synthetic
uuaguagaaaauggcaauucuac

SEQ ID NO: 94001 - RNA, 24 nt, Artificial Sequence
  Synthetic
auuaguagaaaauggcaauucuac

SEQ ID NO: 94002 - RNA, 19 nt, Artificial Sequence
  Synthetic
aguuuugaacuuauucuac

SEQ ID NO: 94003 - RNA, 22 nt, Artificial Sequence
  Synthetic
uggaguuuugaacuuauucuac

SEQ ID NO: 94004 - RNA, 23 nt, Artificial Sequence
  Synthetic
auggaguuuugaacuuauucuac

SEQ ID NO: 94005 - RNA, 24 nt, Artificial Sequence
  Synthetic
cauggaguuuugaacuuauucuac

SEQ ID NO: 94006 - RNA, 18 nt, Artificial Sequence
  Synthetic
aaguccuuaaacuucuac

SEQ ID NO: 94007 - RNA, 19 nt, Artificial Sequence
  Synthetic
aaaguccuuaaacuucuac

SEQ ID NO: 94008 - RNA, 20 nt, Artificial Sequence
  Synthetic
aaaaguccuuaaacuucuac

SEQ ID NO: 94009 - RNA, 21 nt, Artificial Sequence
  Synthetic
aaaaaguccuuaaacuucuac

SEQ ID NO: 94010 - RNA, 22 nt, Artificial Sequence
  Synthetic
aaaaaaguccuuaaacuucuac

SEQ ID NO: 94011 - RNA, 24 nt, Artificial Sequence
  Synthetic
agaaaaaaguccuuaaacuucuac

SEQ ID NO: 94012 - RNA, 18 nt, Artificial Sequence
  Synthetic
accaacuuaaauuucuac

SEQ ID NO: 94013 - RNA, 19 nt, Artificial Sequence
  Synthetic
uaccaacuuaaauuucuac

SEQ ID NO: 94014 - RNA, 21 nt, Artificial Sequence
  Synthetic
uguaccaacuuaaauuucuac

SEQ ID NO: 94015 - RNA, 22 nt, Artificial Sequence
  Synthetic
uuguaccaacuuaaauuucuac

SEQ ID NO: 94016 - RNA, 18 nt, Artificial Sequence
  Synthetic
uuaagcaaugauaaguac

SEQ ID NO: 94017 - RNA, 19 nt, Artificial Sequence
  Synthetic
auuaagcaaugauaaguac

SEQ ID NO: 94018 - RNA, 20 nt, Artificial Sequence
  Synthetic
uauuaagcaaugauaaguac

SEQ ID NO: 94019 - RNA, 21 nt, Artificial Sequence
  Synthetic
cuauuaagcaaugauaaguac

SEQ ID NO: 94020 - RNA, 22 nt, Artificial Sequence
  Synthetic
ccuauuaagcaaugauaaguac

SEQ ID NO: 94021 - RNA, 23 nt, Artificial Sequence
  Synthetic
accuauuaagcaaugauaaguac

SEQ ID NO: 94022 - RNA, 24 nt, Artificial Sequence
  Synthetic
uaccuauuaagcaaugauaaguac

SEQ ID NO: 94023 - RNA, 18 nt, Artificial Sequence
  Synthetic
ugaucuccuuguaaguac

SEQ ID NO: 94024 - RNA, 19 nt, Artificial Sequence
  Synthetic
augaucuccuuguaaguac

SEQ ID NO: 94025 - RNA, 20 nt, Artificial Sequence
  Synthetic
caugaucuccuuguaaguac

SEQ ID NO: 94026 - RNA, 21 nt, Artificial Sequence
  Synthetic
ccaugaucuccuuguaaguac

SEQ ID NO: 94027 - RNA, 22 nt, Artificial Sequence
  Synthetic
uccaugaucuccuuguaaguac

SEQ ID NO: 94028 - RNA, 23 nt, Artificial Sequence
  Synthetic
auccaugaucuccuuguaaguac

SEQ ID NO: 94029 - RNA, 24 nt, Artificial Sequence
  Synthetic
uauccaugaucuccuuguaaguac

SEQ ID NO: 94030 - RNA, 20 nt, Artificial Sequence
  Synthetic
agguaaaaucaaagcaguac

SEQ ID NO: 94031 - RNA, 21 nt, Artificial Sequence
  Synthetic
aagguaaaaucaaagcaguac

SEQ ID NO: 94032 - RNA, 23 nt, Artificial Sequence
  Synthetic
ugaagguaaaaucaaagcaguac

SEQ ID NO: 94033 - RNA, 24 nt, Artificial Sequence
  Synthetic
cugaagguaaaaucaaagcaguac

SEQ ID NO: 94034 - RNA, 18 nt, Artificial Sequence
  Synthetic
uccugccgcuaucaguac

SEQ ID NO: 94035 - RNA, 19 nt, Artificial Sequence
  Synthetic
cuccugccgcuaucaguac

SEQ ID NO: 94036 - RNA, 20 nt, Artificial Sequence
  Synthetic
ccuccugccgcuaucaguac

SEQ ID NO: 94037 - RNA, 22 nt, Artificial Sequence
  Synthetic
ugccuccugccgcuaucaguac

SEQ ID NO: 94038 - RNA, 23 nt, Artificial Sequence
  Synthetic
cugccuccugccgcuaucaguac

SEQ ID NO: 94039 - RNA, 24 nt, Artificial Sequence
  Synthetic
ucugccuccugccgcuaucaguac

SEQ ID NO: 94040 - RNA, 18 nt, Artificial Sequence
  Synthetic
uaucaacuaccagaguac

SEQ ID NO: 94041 - RNA, 19 nt, Artificial Sequence
  Synthetic
uuaucaacuaccagaguac

SEQ ID NO: 94042 - RNA, 21 nt, Artificial Sequence
  Synthetic
uguuaucaacuaccagaguac

SEQ ID NO: 94043 - RNA, 22 nt, Artificial Sequence
  Synthetic
auguuaucaacuaccagaguac

SEQ ID NO: 94044 - RNA, 23 nt, Artificial Sequence
  Synthetic
aauguuaucaacuaccagaguac

SEQ ID NO: 94045 - RNA, 24 nt, Artificial Sequence
  Synthetic
uaauguuaucaacuaccagaguac

SEQ ID NO: 94046 - RNA, 19 nt, Artificial Sequence
  Synthetic
uggugcugccucagaguac

SEQ ID NO: 94047 - RNA, 20 nt, Artificial Sequence
  Synthetic
auggugcugccucagaguac

SEQ ID NO: 94048 - RNA, 21 nt, Artificial Sequence
  Synthetic
uauggugcugccucagaguac

SEQ ID NO: 94049 - RNA, 22 nt, Artificial Sequence
  Synthetic
cuauggugcugccucagaguac

SEQ ID NO: 94050 - RNA, 18 nt, Artificial Sequence
  Synthetic
uuucuaggaaaggaguac

SEQ ID NO: 94051 - RNA, 19 nt, Artificial Sequence
  Synthetic
auuucuaggaaaggaguac

SEQ ID NO: 94052 - RNA, 20 nt, Artificial Sequence
  Synthetic
uauuucuaggaaaggaguac

SEQ ID NO: 94053 - RNA, 21 nt, Artificial Sequence
  Synthetic
cuauuucuaggaaaggaguac

SEQ ID NO: 94054 - RNA, 22 nt, Artificial Sequence
  Synthetic
ccuauuucuaggaaaggaguac

SEQ ID NO: 94055 - RNA, 23 nt, Artificial Sequence
  Synthetic
uccuauuucuaggaaaggaguac

SEQ ID NO: 94056 - RNA, 24 nt, Artificial Sequence
  Synthetic
cuccuauuucuaggaaaggaguac

SEQ ID NO: 94057 - RNA, 18 nt, Artificial Sequence
  Synthetic
aauaauauacgugaguac

SEQ ID NO: 94058 - RNA, 19 nt, Artificial Sequence
  Synthetic
uaauaauauacgugaguac

SEQ ID NO: 94059 - RNA, 20 nt, Artificial Sequence
  Synthetic
uuaauaauauacgugaguac

SEQ ID NO: 94060 - RNA, 21 nt, Artificial Sequence
  Synthetic
cuuaauaauauacgugaguac

SEQ ID NO: 94061 - RNA, 22 nt, Artificial Sequence
  Synthetic
acuuaauaauauacgugaguac

SEQ ID NO: 94062 - RNA, 23 nt, Artificial Sequence
  Synthetic
uacuuaauaauauacgugaguac

SEQ ID NO: 94063 - RNA, 24 nt, Artificial Sequence
  Synthetic
auacuuaauaauauacgugaguac

SEQ ID NO: 94064 - RNA, 19 nt, Artificial Sequence
  Synthetic
ugguuaagaugcauaguac

SEQ ID NO: 94065 - RNA, 20 nt, Artificial Sequence
  Synthetic
augguuaagaugcauaguac

SEQ ID NO: 94066 - RNA, 21 nt, Artificial Sequence
  Synthetic
aaugguuaagaugcauaguac

SEQ ID NO: 94067 - RNA, 22 nt, Artificial Sequence
  Synthetic
uaaugguuaagaugcauaguac

SEQ ID NO: 94068 - RNA, 18 nt, Artificial Sequence
  Synthetic
ugugacucaugcuaguac

SEQ ID NO: 94069 - RNA, 19 nt, Artificial Sequence
  Synthetic
augugacucaugcuaguac

SEQ ID NO: 94070 - RNA, 20 nt, Artificial Sequence
  Synthetic
caugugacucaugcuaguac

SEQ ID NO: 94071 - RNA, 21 nt, Artificial Sequence
  Synthetic
ucaugugacucaugcuaguac

SEQ ID NO: 94072 - RNA, 22 nt, Artificial Sequence
  Synthetic
uucaugugacucaugcuaguac

SEQ ID NO: 94073 - RNA, 23 nt, Artificial Sequence
  Synthetic
uuucaugugacucaugcuaguac

SEQ ID NO: 94074 - RNA, 24 nt, Artificial Sequence
  Synthetic
uuuucaugugacucaugcuaguac

SEQ ID NO: 94075 - RNA, 20 nt, Artificial Sequence
  Synthetic
agguucgaccugguuaguac

SEQ ID NO: 94076 - RNA, 22 nt, Artificial Sequence
  Synthetic
ugagguucgaccugguuaguac

SEQ ID NO: 94077 - RNA, 24 nt, Artificial Sequence
  Synthetic
agugagguucgaccugguuaguac

SEQ ID NO: 94078 - RNA, 18 nt, Artificial Sequence
  Synthetic
ugaggugugauuuaguac

SEQ ID NO: 94079 - RNA, 20 nt, Artificial Sequence
  Synthetic
agugaggugugauuuaguac

SEQ ID NO: 94080 - RNA, 21 nt, Artificial Sequence
  Synthetic
aagugaggugugauuuaguac

SEQ ID NO: 94081 - RNA, 23 nt, Artificial Sequence
  Synthetic
agaagugaggugugauuuaguac

SEQ ID NO: 94082 - RNA, 24 nt, Artificial Sequence
  Synthetic
uagaagugaggugugauuuaguac

SEQ ID NO: 94083 - RNA, 18 nt, Artificial Sequence
  Synthetic
cauauacauaccagguac

SEQ ID NO: 94084 - RNA, 19 nt, Artificial Sequence
  Synthetic
ccauauacauaccagguac

SEQ ID NO: 94085 - RNA, 20 nt, Artificial Sequence
  Synthetic
uccauauacauaccagguac

SEQ ID NO: 94086 - RNA, 22 nt, Artificial Sequence
  Synthetic
aguccauauacauaccagguac

SEQ ID NO: 94087 - RNA, 23 nt, Artificial Sequence
  Synthetic
aaguccauauacauaccagguac

SEQ ID NO: 94088 - RNA, 24 nt, Artificial Sequence
  Synthetic
aaaguccauauacauaccagguac

SEQ ID NO: 94089 - RNA, 18 nt, Artificial Sequence
  Synthetic
aguuaaacuuauagguac

SEQ ID NO: 94090 - RNA, 19 nt, Artificial Sequence
  Synthetic
uaguuaaacuuauagguac

SEQ ID NO: 94091 - RNA, 20 nt, Artificial Sequence
  Synthetic
auaguuaaacuuauagguac

SEQ ID NO: 94092 - RNA, 21 nt, Artificial Sequence
  Synthetic
uauaguuaaacuuauagguac

SEQ ID NO: 94093 - RNA, 22 nt, Artificial Sequence
  Synthetic
cuauaguuaaacuuauagguac

SEQ ID NO: 94094 - RNA, 23 nt, Artificial Sequence
  Synthetic
ucuauaguuaaacuuauagguac

SEQ ID NO: 94095 - RNA, 18 nt, Artificial Sequence
  Synthetic
uguuaaaaugaaggguac

SEQ ID NO: 94096 - RNA, 19 nt, Artificial Sequence
  Synthetic
uuguuaaaaugaaggguac

SEQ ID NO: 94097 - RNA, 20 nt, Artificial Sequence
  Synthetic
uuuguuaaaaugaaggguac

SEQ ID NO: 94098 - RNA, 22 nt, Artificial Sequence
  Synthetic
uguuuguuaaaaugaaggguac

SEQ ID NO: 94099 - RNA, 23 nt, Artificial Sequence
  Synthetic
uuguuuguuaaaaugaaggguac

SEQ ID NO: 94100 - RNA, 24 nt, Artificial Sequence
  Synthetic
uuuguuuguuaaaaugaaggguac

SEQ ID NO: 94101 - RNA, 18 nt, Artificial Sequence
  Synthetic
aagucaacuaacggguac

SEQ ID NO: 94102 - RNA, 19 nt, Artificial Sequence
  Synthetic
aaagucaacuaacggguac

SEQ ID NO: 94103 - RNA, 22 nt, Artificial Sequence
  Synthetic
aggaaagucaacuaacggguac

SEQ ID NO: 94104 - RNA, 23 nt, Artificial Sequence
  Synthetic
caggaaagucaacuaacggguac

SEQ ID NO: 94105 - RNA, 24 nt, Artificial Sequence
  Synthetic
ucaggaaagucaacuaacggguac

SEQ ID NO: 94106 - RNA, 18 nt, Artificial Sequence
  Synthetic
aauuuauaguuuggguac

SEQ ID NO: 94107 - RNA, 19 nt, Artificial Sequence
  Synthetic
aaauuuauaguuuggguac

SEQ ID NO: 94108 - RNA, 20 nt, Artificial Sequence
  Synthetic
caaauuuauaguuuggguac

SEQ ID NO: 94109 - RNA, 21 nt, Artificial Sequence
  Synthetic
ccaaauuuauaguuuggguac

SEQ ID NO: 94110 - RNA, 22 nt, Artificial Sequence
  Synthetic
uccaaauuuauaguuuggguac

SEQ ID NO: 94111 - RNA, 23 nt, Artificial Sequence
  Synthetic
uuccaaauuuauaguuuggguac

SEQ ID NO: 94112 - RNA, 24 nt, Artificial Sequence
  Synthetic
cuuccaaauuuauaguuuggguac

SEQ ID NO: 94113 - RNA, 18 nt, Artificial Sequence
  Synthetic
ugacugaaaagaugguac

SEQ ID NO: 94114 - RNA, 19 nt, Artificial Sequence
  Synthetic
cugacugaaaagaugguac

SEQ ID NO: 94115 - RNA, 20 nt, Artificial Sequence
  Synthetic
ucugacugaaaagaugguac

SEQ ID NO: 94116 - RNA, 21 nt, Artificial Sequence
  Synthetic
cucugacugaaaagaugguac

SEQ ID NO: 94117 - RNA, 22 nt, Artificial Sequence
  Synthetic
ucucugacugaaaagaugguac

SEQ ID NO: 94118 - RNA, 23 nt, Artificial Sequence
  Synthetic
cucucugacugaaaagaugguac

SEQ ID NO: 94119 - RNA, 24 nt, Artificial Sequence
  Synthetic
acucucugacugaaaagaugguac

SEQ ID NO: 94120 - RNA, 18 nt, Artificial Sequence
  Synthetic
acauacagauucauguac

SEQ ID NO: 94121 - RNA, 19 nt, Artificial Sequence
  Synthetic
aacauacagauucauguac

SEQ ID NO: 94122 - RNA, 20 nt, Artificial Sequence
  Synthetic
caacauacagauucauguac

SEQ ID NO: 94123 - RNA, 21 nt, Artificial Sequence
  Synthetic
ucaacauacagauucauguac

SEQ ID NO: 94124 - RNA, 22 nt, Artificial Sequence
  Synthetic
uucaacauacagauucauguac

SEQ ID NO: 94125 - RNA, 23 nt, Artificial Sequence
  Synthetic
cuucaacauacagauucauguac

SEQ ID NO: 94126 - RNA, 24 nt, Artificial Sequence
  Synthetic
acuucaacauacagauucauguac

SEQ ID NO: 94127 - RNA, 21 nt, Artificial Sequence
  Synthetic
ugaaaaaaggaagagcuguac

SEQ ID NO: 94128 - RNA, 22 nt, Artificial Sequence
  Synthetic
cugaaaaaaggaagagcuguac

SEQ ID NO: 94129 - RNA, 23 nt, Artificial Sequence
  Synthetic
acugaaaaaaggaagagcuguac

SEQ ID NO: 94130 - RNA, 24 nt, Artificial Sequence
  Synthetic
uacugaaaaaaggaagagcuguac

SEQ ID NO: 94131 - RNA, 18 nt, Artificial Sequence
  Synthetic
ucugaaaggcaucuguac

SEQ ID NO: 94132 - RNA, 19 nt, Artificial Sequence
  Synthetic
uucugaaaggcaucuguac

SEQ ID NO: 94133 - RNA, 20 nt, Artificial Sequence
  Synthetic
uuucugaaaggcaucuguac

SEQ ID NO: 94134 - RNA, 21 nt, Artificial Sequence
  Synthetic
auuucugaaaggcaucuguac

SEQ ID NO: 94135 - RNA, 22 nt, Artificial Sequence
  Synthetic
aauuucugaaaggcaucuguac

SEQ ID NO: 94136 - RNA, 23 nt, Artificial Sequence
  Synthetic
uaauuucugaaaggcaucuguac

SEQ ID NO: 94137 - RNA, 24 nt, Artificial Sequence
  Synthetic
uuaauuucugaaaggcaucuguac

SEQ ID NO: 94138 - RNA, 18 nt, Artificial Sequence
  Synthetic
ucuguauuuucaguguac

SEQ ID NO: 94139 - RNA, 21 nt, Artificial Sequence
  Synthetic
cggucuguauuuucaguguac

SEQ ID NO: 94140 - RNA, 22 nt, Artificial Sequence
  Synthetic
acggucuguauuuucaguguac

SEQ ID NO: 94141 - RNA, 23 nt, Artificial Sequence
  Synthetic
cacggucuguauuuucaguguac

SEQ ID NO: 94142 - RNA, 24 nt, Artificial Sequence
  Synthetic
ucacggucuguauuuucaguguac

SEQ ID NO: 94143 - RNA, 18 nt, Artificial Sequence
  Synthetic
uccguaccuauuguguac

SEQ ID NO: 94144 - RNA, 19 nt, Artificial Sequence
  Synthetic
uuccguaccuauuguguac

SEQ ID NO: 94145 - RNA, 20 nt, Artificial Sequence
  Synthetic
auuccguaccuauuguguac

SEQ ID NO: 94146 - RNA, 21 nt, Artificial Sequence
  Synthetic
cauuccguaccuauuguguac

SEQ ID NO: 94147 - RNA, 22 nt, Artificial Sequence
  Synthetic
ccauuccguaccuauuguguac

SEQ ID NO: 94148 - RNA, 23 nt, Artificial Sequence
  Synthetic
uccauuccguaccuauuguguac

SEQ ID NO: 94149 - RNA, 24 nt, Artificial Sequence
  Synthetic
auccauuccguaccuauuguguac

SEQ ID NO: 94150 - RNA, 20 nt, Artificial Sequence
  Synthetic
aggucuccuaggaauuguac

SEQ ID NO: 94151 - RNA, 21 nt, Artificial Sequence
  Synthetic
aaggucuccuaggaauuguac

SEQ ID NO: 94152 - RNA, 22 nt, Artificial Sequence
  Synthetic
aaaggucuccuaggaauuguac

SEQ ID NO: 94153 - RNA, 23 nt, Artificial Sequence
  Synthetic
caaaggucuccuaggaauuguac

SEQ ID NO: 94154 - RNA, 24 nt, Artificial Sequence
  Synthetic
acaaaggucuccuaggaauuguac

SEQ ID NO: 94155 - RNA, 19 nt, Artificial Sequence
  Synthetic
agagaugaugagauuguac

SEQ ID NO: 94156 - RNA, 20 nt, Artificial Sequence
  Synthetic
aagagaugaugagauuguac

SEQ ID NO: 94157 - RNA, 21 nt, Artificial Sequence
  Synthetic
aaagagaugaugagauuguac

SEQ ID NO: 94158 - RNA, 24 nt, Artificial Sequence
  Synthetic
aggaaagagaugaugagauuguac

SEQ ID NO: 94159 - RNA, 18 nt, Artificial Sequence
  Synthetic
aggauuaaaaaaaauuac

SEQ ID NO: 94160 - RNA, 19 nt, Artificial Sequence
  Synthetic
uaggauuaaaaaaaauuac

SEQ ID NO: 94161 - RNA, 20 nt, Artificial Sequence
  Synthetic
auaggauuaaaaaaaauuac

SEQ ID NO: 94162 - RNA, 21 nt, Artificial Sequence
  Synthetic
cauaggauuaaaaaaaauuac

SEQ ID NO: 94163 - RNA, 22 nt, Artificial Sequence
  Synthetic
ucauaggauuaaaaaaaauuac

SEQ ID NO: 94164 - RNA, 23 nt, Artificial Sequence
  Synthetic
aucauaggauuaaaaaaaauuac

SEQ ID NO: 94165 - RNA, 19 nt, Artificial Sequence
  Synthetic
agguaugacaugaaauuac

SEQ ID NO: 94166 - RNA, 20 nt, Artificial Sequence
  Synthetic
cagguaugacaugaaauuac

SEQ ID NO: 94167 - RNA, 21 nt, Artificial Sequence
  Synthetic
acagguaugacaugaaauuac

SEQ ID NO: 94168 - RNA, 22 nt, Artificial Sequence
  Synthetic
cacagguaugacaugaaauuac

SEQ ID NO: 94169 - RNA, 23 nt, Artificial Sequence
  Synthetic
ucacagguaugacaugaaauuac

SEQ ID NO: 94170 - RNA, 24 nt, Artificial Sequence
  Synthetic
aucacagguaugacaugaaauuac

SEQ ID NO: 94171 - RNA, 18 nt, Artificial Sequence
  Synthetic
uugucaauuaauaauuac

SEQ ID NO: 94172 - RNA, 19 nt, Artificial Sequence
  Synthetic
uuugucaauuaauaauuac

SEQ ID NO: 94173 - RNA, 20 nt, Artificial Sequence
  Synthetic
auuugucaauuaauaauuac

SEQ ID NO: 94174 - RNA, 21 nt, Artificial Sequence
  Synthetic
uauuugucaauuaauaauuac

SEQ ID NO: 94175 - RNA, 22 nt, Artificial Sequence
  Synthetic
uuauuugucaauuaauaauuac

SEQ ID NO: 94176 - RNA, 23 nt, Artificial Sequence
  Synthetic
cuuauuugucaauuaauaauuac

SEQ ID NO: 94177 - RNA, 24 nt, Artificial Sequence
  Synthetic
ucuuauuugucaauuaauaauuac

SEQ ID NO: 94178 - RNA, 18 nt, Artificial Sequence
  Synthetic
uuccaucaauauaauuac

SEQ ID NO: 94179 - RNA, 19 nt, Artificial Sequence
  Synthetic
uuuccaucaauauaauuac

SEQ ID NO: 94180 - RNA, 20 nt, Artificial Sequence
  Synthetic
auuuccaucaauauaauuac

SEQ ID NO: 94181 - RNA, 22 nt, Artificial Sequence
  Synthetic
ugauuuccaucaauauaauuac

SEQ ID NO: 94182 - RNA, 23 nt, Artificial Sequence
  Synthetic
augauuuccaucaauauaauuac

SEQ ID NO: 94183 - RNA, 24 nt, Artificial Sequence
  Synthetic
caugauuuccaucaauauaauuac

SEQ ID NO: 94184 - RNA, 18 nt, Artificial Sequence
  Synthetic
uuucguacuuuuaauuac

SEQ ID NO: 94185 - RNA, 19 nt, Artificial Sequence
  Synthetic
cuuucguacuuuuaauuac

SEQ ID NO: 94186 - RNA, 21 nt, Artificial Sequence
  Synthetic
ugcuuucguacuuuuaauuac

SEQ ID NO: 94187 - RNA, 22 nt, Artificial Sequence
  Synthetic
uugcuuucguacuuuuaauuac

SEQ ID NO: 94188 - RNA, 23 nt, Artificial Sequence
  Synthetic
cuugcuuucguacuuuuaauuac

SEQ ID NO: 94189 - RNA, 24 nt, Artificial Sequence
  Synthetic
ucuugcuuucguacuuuuaauuac

SEQ ID NO: 94190 - RNA, 18 nt, Artificial Sequence
  Synthetic
uuagguuuauugcauuac

SEQ ID NO: 94191 - RNA, 19 nt, Artificial Sequence
  Synthetic
auuagguuuauugcauuac

SEQ ID NO: 94192 - RNA, 20 nt, Artificial Sequence
  Synthetic
cauuagguuuauugcauuac

SEQ ID NO: 94193 - RNA, 21 nt, Artificial Sequence
  Synthetic
ucauuagguuuauugcauuac

SEQ ID NO: 94194 - RNA, 22 nt, Artificial Sequence
  Synthetic
cucauuagguuuauugcauuac

SEQ ID NO: 94195 - RNA, 23 nt, Artificial Sequence
  Synthetic
ccucauuagguuuauugcauuac

SEQ ID NO: 94196 - RNA, 24 nt, Artificial Sequence
  Synthetic
cccucauuagguuuauugcauuac

SEQ ID NO: 94197 - RNA, 18 nt, Artificial Sequence
  Synthetic
uuugcuucaucagauuac

SEQ ID NO: 94198 - RNA, 19 nt, Artificial Sequence
  Synthetic
cuuugcuucaucagauuac

SEQ ID NO: 94199 - RNA, 21 nt, Artificial Sequence
  Synthetic
agcuuugcuucaucagauuac

SEQ ID NO: 94200 - RNA, 22 nt, Artificial Sequence
  Synthetic
cagcuuugcuucaucagauuac

SEQ ID NO: 94201 - RNA, 23 nt, Artificial Sequence
  Synthetic
ucagcuuugcuucaucagauuac

SEQ ID NO: 94202 - RNA, 24 nt, Artificial Sequence
  Synthetic
uucagcuuugcuucaucagauuac

SEQ ID NO: 94203 - RNA, 22 nt, Artificial Sequence
  Synthetic
ugauauauacauacaauauuac

SEQ ID NO: 94204 - RNA, 23 nt, Artificial Sequence
  Synthetic
augauauauacauacaauauuac

SEQ ID NO: 94205 - RNA, 24 nt, Artificial Sequence
  Synthetic
caugauauauacauacaauauuac

SEQ ID NO: 94206 - RNA, 19 nt, Artificial Sequence
  Synthetic
ugauaggccuauauauuac

SEQ ID NO: 94207 - RNA, 20 nt, Artificial Sequence
  Synthetic
augauaggccuauauauuac

SEQ ID NO: 94208 - RNA, 21 nt, Artificial Sequence
  Synthetic
uaugauaggccuauauauuac

SEQ ID NO: 94209 - RNA, 22 nt, Artificial Sequence
  Synthetic
cuaugauaggccuauauauuac

SEQ ID NO: 94210 - RNA, 19 nt, Artificial Sequence
  Synthetic
aguggaaagacauuauuac

SEQ ID NO: 94211 - RNA, 20 nt, Artificial Sequence
  Synthetic
aaguggaaagacauuauuac

SEQ ID NO: 94212 - RNA, 21 nt, Artificial Sequence
  Synthetic
uaaguggaaagacauuauuac

SEQ ID NO: 94213 - RNA, 22 nt, Artificial Sequence
  Synthetic
uuaaguggaaagacauuauuac

SEQ ID NO: 94214 - RNA, 23 nt, Artificial Sequence
  Synthetic
cuuaaguggaaagacauuauuac

SEQ ID NO: 94215 - RNA, 18 nt, Artificial Sequence
  Synthetic
cacaaauuauauuauuac

SEQ ID NO: 94216 - RNA, 19 nt, Artificial Sequence
  Synthetic
acacaaauuauauuauuac

SEQ ID NO: 94217 - RNA, 21 nt, Artificial Sequence
  Synthetic
agacacaaauuauauuauuac

SEQ ID NO: 94218 - RNA, 22 nt, Artificial Sequence
  Synthetic
cagacacaaauuauauuauuac

SEQ ID NO: 94219 - RNA, 23 nt, Artificial Sequence
  Synthetic
ucagacacaaauuauauuauuac

SEQ ID NO: 94220 - RNA, 24 nt, Artificial Sequence
  Synthetic
cucagacacaaauuauauuauuac

SEQ ID NO: 94221 - RNA, 18 nt, Artificial Sequence
  Synthetic
aaauuugcuuaaacuuac

SEQ ID NO: 94222 - RNA, 19 nt, Artificial Sequence
  Synthetic
uaaauuugcuuaaacuuac

SEQ ID NO: 94223 - RNA, 22 nt, Artificial Sequence
  Synthetic
ugguaaauuugcuuaaacuuac

SEQ ID NO: 94224 - RNA, 23 nt, Artificial Sequence
  Synthetic
augguaaauuugcuuaaacuuac

SEQ ID NO: 94225 - RNA, 24 nt, Artificial Sequence
  Synthetic
aaugguaaauuugcuuaaacuuac

SEQ ID NO: 94226 - RNA, 19 nt, Artificial Sequence
  Synthetic
ugucuuagcuaacacuuac

SEQ ID NO: 94227 - RNA, 20 nt, Artificial Sequence
  Synthetic
augucuuagcuaacacuuac

SEQ ID NO: 94228 - RNA, 21 nt, Artificial Sequence
  Synthetic
caugucuuagcuaacacuuac

SEQ ID NO: 94229 - RNA, 22 nt, Artificial Sequence
  Synthetic
ucaugucuuagcuaacacuuac

SEQ ID NO: 94230 - RNA, 23 nt, Artificial Sequence
  Synthetic
aucaugucuuagcuaacacuuac

SEQ ID NO: 94231 - RNA, 24 nt, Artificial Sequence
  Synthetic
uaucaugucuuagcuaacacuuac

SEQ ID NO: 94232 - RNA, 18 nt, Artificial Sequence
  Synthetic
aacagcugauacacuuac

SEQ ID NO: 94233 - RNA, 20 nt, Artificial Sequence
  Synthetic
ugaacagcugauacacuuac

SEQ ID NO: 94234 - RNA, 21 nt, Artificial Sequence
  Synthetic
augaacagcugauacacuuac

SEQ ID NO: 94235 - RNA, 22 nt, Artificial Sequence
  Synthetic
aaugaacagcugauacacuuac

SEQ ID NO: 94236 - RNA, 18 nt, Artificial Sequence
  Synthetic
uaaaugaacgugccuuac

SEQ ID NO: 94237 - RNA, 19 nt, Artificial Sequence
  Synthetic
auaaaugaacgugccuuac

SEQ ID NO: 94238 - RNA, 21 nt, Artificial Sequence
  Synthetic
ugauaaaugaacgugccuuac

SEQ ID NO: 94239 - RNA, 22 nt, Artificial Sequence
  Synthetic
cugauaaaugaacgugccuuac

SEQ ID NO: 94240 - RNA, 23 nt, Artificial Sequence
  Synthetic
ccugauaaaugaacgugccuuac

SEQ ID NO: 94241 - RNA, 24 nt, Artificial Sequence
  Synthetic
accugauaaaugaacgugccuuac

SEQ ID NO: 94242 - RNA, 18 nt, Artificial Sequence
  Synthetic
agugaaagguuagcuuac

SEQ ID NO: 94243 - RNA, 19 nt, Artificial Sequence
  Synthetic
uagugaaagguuagcuuac

SEQ ID NO: 94244 - RNA, 20 nt, Artificial Sequence
  Synthetic
cuagugaaagguuagcuuac

SEQ ID NO: 94245 - RNA, 22 nt, Artificial Sequence
  Synthetic
agcuagugaaagguuagcuuac

SEQ ID NO: 94246 - RNA, 23 nt, Artificial Sequence
  Synthetic
aagcuagugaaagguuagcuuac

SEQ ID NO: 94247 - RNA, 24 nt, Artificial Sequence
  Synthetic
aaagcuagugaaagguuagcuuac

SEQ ID NO: 94248 - RNA, 21 nt, Artificial Sequence
  Synthetic
caguaauuuuuguauucuuac

SEQ ID NO: 94249 - RNA, 22 nt, Artificial Sequence
  Synthetic
ucaguaauuuuuguauucuuac

SEQ ID NO: 94250 - RNA, 23 nt, Artificial Sequence
  Synthetic
uucaguaauuuuuguauucuuac

SEQ ID NO: 94251 - RNA, 24 nt, Artificial Sequence
  Synthetic
uuucaguaauuuuuguauucuuac

SEQ ID NO: 94252 - RNA, 19 nt, Artificial Sequence
  Synthetic
agaccagugaacaaguuac

SEQ ID NO: 94253 - RNA, 20 nt, Artificial Sequence
  Synthetic
aagaccagugaacaaguuac

SEQ ID NO: 94254 - RNA, 21 nt, Artificial Sequence
  Synthetic
aaagaccagugaacaaguuac

SEQ ID NO: 94255 - RNA, 23 nt, Artificial Sequence
  Synthetic
agaaagaccagugaacaaguuac

SEQ ID NO: 94256 - RNA, 24 nt, Artificial Sequence
  Synthetic
cagaaagaccagugaacaaguuac

SEQ ID NO: 94257 - RNA, 18 nt, Artificial Sequence
  Synthetic
auguagcacugcaguuac

SEQ ID NO: 94258 - RNA, 19 nt, Artificial Sequence
  Synthetic
aauguagcacugcaguuac

SEQ ID NO: 94259 - RNA, 20 nt, Artificial Sequence
  Synthetic
aaauguagcacugcaguuac

SEQ ID NO: 94260 - RNA, 21 nt, Artificial Sequence
  Synthetic
aaaauguagcacugcaguuac

SEQ ID NO: 94261 - RNA, 22 nt, Artificial Sequence
  Synthetic
aaaaauguagcacugcaguuac

SEQ ID NO: 94262 - RNA, 24 nt, Artificial Sequence
  Synthetic
ugaaaaauguagcacugcaguuac

SEQ ID NO: 94263 - RNA, 18 nt, Artificial Sequence
  Synthetic
acacuuucccuuaguuac

SEQ ID NO: 94264 - RNA, 19 nt, Artificial Sequence
  Synthetic
uacacuuucccuuaguuac

SEQ ID NO: 94265 - RNA, 20 nt, Artificial Sequence
  Synthetic
auacacuuucccuuaguuac

SEQ ID NO: 94266 - RNA, 21 nt, Artificial Sequence
  Synthetic
aauacacuuucccuuaguuac

SEQ ID NO: 94267 - RNA, 22 nt, Artificial Sequence
  Synthetic
uaauacacuuucccuuaguuac

SEQ ID NO: 94268 - RNA, 23 nt, Artificial Sequence
  Synthetic
auaauacacuuucccuuaguuac

SEQ ID NO: 94269 - RNA, 24 nt, Artificial Sequence
  Synthetic
aauaauacacuuucccuuaguuac

SEQ ID NO: 94270 - RNA, 18 nt, Artificial Sequence
  Synthetic
caaacagacauggguuac

SEQ ID NO: 94271 - RNA, 19 nt, Artificial Sequence
  Synthetic
ucaaacagacauggguuac

SEQ ID NO: 94272 - RNA, 21 nt, Artificial Sequence
  Synthetic
agucaaacagacauggguuac

SEQ ID NO: 94273 - RNA, 22 nt, Artificial Sequence
  Synthetic
aagucaaacagacauggguuac

SEQ ID NO: 94274 - RNA, 23 nt, Artificial Sequence
  Synthetic
aaagucaaacagacauggguuac

SEQ ID NO: 94275 - RNA, 24 nt, Artificial Sequence
  Synthetic
uaaagucaaacagacauggguuac

SEQ ID NO: 94276 - RNA, 18 nt, Artificial Sequence
  Synthetic
auaagugugcuugguuac

SEQ ID NO: 94277 - RNA, 19 nt, Artificial Sequence
  Synthetic
aauaagugugcuugguuac

SEQ ID NO: 94278 - RNA, 20 nt, Artificial Sequence
  Synthetic
caauaagugugcuugguuac

SEQ ID NO: 94279 - RNA, 21 nt, Artificial Sequence
  Synthetic
ccaauaagugugcuugguuac

SEQ ID NO: 94280 - RNA, 22 nt, Artificial Sequence
  Synthetic
uccaauaagugugcuugguuac

SEQ ID NO: 94281 - RNA, 23 nt, Artificial Sequence
  Synthetic
cuccaauaagugugcuugguuac

SEQ ID NO: 94282 - RNA, 24 nt, Artificial Sequence
  Synthetic
acuccaauaagugugcuugguuac

SEQ ID NO: 94283 - RNA, 20 nt, Artificial Sequence
  Synthetic
aggucugaugcugauguuac

SEQ ID NO: 94284 - RNA, 22 nt, Artificial Sequence
  Synthetic
agaggucugaugcugauguuac

SEQ ID NO: 94285 - RNA, 23 nt, Artificial Sequence
  Synthetic
cagaggucugaugcugauguuac

SEQ ID NO: 94286 - RNA, 19 nt, Artificial Sequence
  Synthetic
aggaugaaacuuauguuac

SEQ ID NO: 94287 - RNA, 20 nt, Artificial Sequence
  Synthetic
caggaugaaacuuauguuac

SEQ ID NO: 94288 - RNA, 21 nt, Artificial Sequence
  Synthetic
ccaggaugaaacuuauguuac

SEQ ID NO: 94289 - RNA, 22 nt, Artificial Sequence
  Synthetic
accaggaugaaacuuauguuac

SEQ ID NO: 94290 - RNA, 23 nt, Artificial Sequence
  Synthetic
aaccaggaugaaacuuauguuac

SEQ ID NO: 94291 - RNA, 18 nt, Artificial Sequence
  Synthetic
acaauauauguuuguuac

SEQ ID NO: 94292 - RNA, 19 nt, Artificial Sequence
  Synthetic
cacaauauauguuuguuac

SEQ ID NO: 94293 - RNA, 20 nt, Artificial Sequence
  Synthetic
ucacaauauauguuuguuac

SEQ ID NO: 94294 - RNA, 21 nt, Artificial Sequence
  Synthetic
aucacaauauauguuuguuac

SEQ ID NO: 94295 - RNA, 24 nt, Artificial Sequence
  Synthetic
aggaucacaauauauguuuguuac

SEQ ID NO: 94296 - RNA, 18 nt, Artificial Sequence
  Synthetic
cacucuuugugacuuuac

SEQ ID NO: 94297 - RNA, 20 nt, Artificial Sequence
  Synthetic
ugcacucuuugugacuuuac

SEQ ID NO: 94298 - RNA, 21 nt, Artificial Sequence
  Synthetic
cugcacucuuugugacuuuac

SEQ ID NO: 94299 - RNA, 22 nt, Artificial Sequence
  Synthetic
acugcacucuuugugacuuuac

SEQ ID NO: 94300 - RNA, 23 nt, Artificial Sequence
  Synthetic
aacugcacucuuugugacuuuac

SEQ ID NO: 94301 - RNA, 24 nt, Artificial Sequence
  Synthetic
caacugcacucuuugugacuuuac

SEQ ID NO: 94302 - RNA, 18 nt, Artificial Sequence
  Synthetic
acaauggugcuucuuuac

SEQ ID NO: 94303 - RNA, 20 nt, Artificial Sequence
  Synthetic
ugacaauggugcuucuuuac

SEQ ID NO: 94304 - RNA, 21 nt, Artificial Sequence
  Synthetic
uugacaauggugcuucuuuac

SEQ ID NO: 94305 - RNA, 23 nt, Artificial Sequence
  Synthetic
cguugacaauggugcuucuuuac

SEQ ID NO: 94306 - RNA, 24 nt, Artificial Sequence
  Synthetic
acguugacaauggugcuucuuuac

SEQ ID NO: 94307 - RNA, 18 nt, Artificial Sequence
  Synthetic
caguaaggagaauuuuac

SEQ ID NO: 94308 - RNA, 19 nt, Artificial Sequence
  Synthetic
ucaguaaggagaauuuuac

SEQ ID NO: 94309 - RNA, 20 nt, Artificial Sequence
  Synthetic
uucaguaaggagaauuuuac

SEQ ID NO: 94310 - RNA, 21 nt, Artificial Sequence
  Synthetic
uuucaguaaggagaauuuuac

SEQ ID NO: 94311 - RNA, 23 nt, Artificial Sequence
  Synthetic
uguuucaguaaggagaauuuuac

SEQ ID NO: 94312 - RNA, 24 nt, Artificial Sequence
  Synthetic
auguuucaguaaggagaauuuuac

SEQ ID NO: 94313 - RNA, 18 nt, Artificial Sequence
  Synthetic
augggcauauaauuuuac

SEQ ID NO: 94314 - RNA, 19 nt, Artificial Sequence
  Synthetic
uaugggcauauaauuuuac

SEQ ID NO: 94315 - RNA, 20 nt, Artificial Sequence
  Synthetic
cuaugggcauauaauuuuac

SEQ ID NO: 94316 - RNA, 21 nt, Artificial Sequence
  Synthetic
ccuaugggcauauaauuuuac

SEQ ID NO: 94317 - RNA, 22 nt, Artificial Sequence
  Synthetic
uccuaugggcauauaauuuuac

SEQ ID NO: 94318 - RNA, 23 nt, Artificial Sequence
  Synthetic
cuccuaugggcauauaauuuuac

SEQ ID NO: 94319 - RNA, 18 nt, Artificial Sequence
  Synthetic
uucauucuaucauuuuac

SEQ ID NO: 94320 - RNA, 19 nt, Artificial Sequence
  Synthetic
auucauucuaucauuuuac

SEQ ID NO: 94321 - RNA, 20 nt, Artificial Sequence
  Synthetic
aauucauucuaucauuuuac

SEQ ID NO: 94322 - RNA, 18 nt, Artificial Sequence
  Synthetic
cugaggcauguauuuuac

SEQ ID NO: 94323 - RNA, 19 nt, Artificial Sequence
  Synthetic
ucugaggcauguauuuuac

SEQ ID NO: 94324 - RNA, 20 nt, Artificial Sequence
  Synthetic
cucugaggcauguauuuuac

SEQ ID NO: 94325 - RNA, 21 nt, Artificial Sequence
  Synthetic
acucugaggcauguauuuuac

SEQ ID NO: 94326 - RNA, 22 nt, Artificial Sequence
  Synthetic
aacucugaggcauguauuuuac

SEQ ID NO: 94327 - RNA, 23 nt, Artificial Sequence
  Synthetic
uaacucugaggcauguauuuuac

SEQ ID NO: 94328 - RNA, 24 nt, Artificial Sequence
  Synthetic
auaacucugaggcauguauuuuac

SEQ ID NO: 94329 - RNA, 18 nt, Artificial Sequence
  Synthetic
cuuuacagauuauuuuac

SEQ ID NO: 94330 - RNA, 19 nt, Artificial Sequence
  Synthetic
acuuuacagauuauuuuac

SEQ ID NO: 94331 - RNA, 21 nt, Artificial Sequence
  Synthetic
ugacuuuacagauuauuuuac

SEQ ID NO: 94332 - RNA, 22 nt, Artificial Sequence
  Synthetic
augacuuuacagauuauuuuac

SEQ ID NO: 94333 - RNA, 18 nt, Artificial Sequence
  Synthetic
ccgaaugcacccuuuuac

SEQ ID NO: 94334 - RNA, 19 nt, Artificial Sequence
  Synthetic
cccgaaugcacccuuuuac

SEQ ID NO: 94335 - RNA, 23 nt, Artificial Sequence
  Synthetic
agggcccgaaugcacccuuuuac

SEQ ID NO: 94336 - RNA, 24 nt, Artificial Sequence
  Synthetic
aagggcccgaaugcacccuuuuac

SEQ ID NO: 94337 - RNA, 21 nt, Artificial Sequence
  Synthetic
cuuuauggagaugcaaaaacc

SEQ ID NO: 94338 - RNA, 22 nt, Artificial Sequence
  Synthetic
acuuuauggagaugcaaaaacc

SEQ ID NO: 94339 - RNA, 23 nt, Artificial Sequence
  Synthetic
uacuuuauggagaugcaaaaacc

SEQ ID NO: 94340 - RNA, 24 nt, Artificial Sequence
  Synthetic
uuacuuuauggagaugcaaaaacc

SEQ ID NO: 94341 - RNA, 19 nt, Artificial Sequence
  Synthetic
agccaugagauuuaaaacc

SEQ ID NO: 94342 - RNA, 20 nt, Artificial Sequence
  Synthetic
cagccaugagauuuaaaacc

SEQ ID NO: 94343 - RNA, 21 nt, Artificial Sequence
  Synthetic
ccagccaugagauuuaaaacc

SEQ ID NO: 94344 - RNA, 22 nt, Artificial Sequence
  Synthetic
uccagccaugagauuuaaaacc

SEQ ID NO: 94345 - RNA, 23 nt, Artificial Sequence
  Synthetic
cuccagccaugagauuuaaaacc

SEQ ID NO: 94346 - RNA, 24 nt, Artificial Sequence
  Synthetic
ccuccagccaugagauuuaaaacc

SEQ ID NO: 94347 - RNA, 19 nt, Artificial Sequence
  Synthetic
agucaagaaaauacaaacc

SEQ ID NO: 94348 - RNA, 20 nt, Artificial Sequence
  Synthetic
aagucaagaaaauacaaacc

SEQ ID NO: 94349 - RNA, 18 nt, Artificial Sequence
  Synthetic
caucaauuucagcaaacc

SEQ ID NO: 94350 - RNA, 19 nt, Artificial Sequence
  Synthetic
ccaucaauuucagcaaacc

SEQ ID NO: 94351 - RNA, 20 nt, Artificial Sequence
  Synthetic
uccaucaauuucagcaaacc

SEQ ID NO: 94352 - RNA, 22 nt, Artificial Sequence
  Synthetic
uguccaucaauuucagcaaacc

SEQ ID NO: 94353 - RNA, 23 nt, Artificial Sequence
  Synthetic
auguccaucaauuucagcaaacc

SEQ ID NO: 94354 - RNA, 24 nt, Artificial Sequence
  Synthetic
aauguccaucaauuucagcaaacc

SEQ ID NO: 94355 - RNA, 18 nt, Artificial Sequence
  Synthetic
auccacaaaaugcaaacc

SEQ ID NO: 94356 - RNA, 20 nt, Artificial Sequence
  Synthetic
agauccacaaaaugcaaacc

SEQ ID NO: 94357 - RNA, 21 nt, Artificial Sequence
  Synthetic
uagauccacaaaaugcaaacc

SEQ ID NO: 94358 - RNA, 22 nt, Artificial Sequence
  Synthetic
cuagauccacaaaaugcaaacc

SEQ ID NO: 94359 - RNA, 23 nt, Artificial Sequence
  Synthetic
ucuagauccacaaaaugcaaacc

SEQ ID NO: 94360 - RNA, 18 nt, Artificial Sequence
  Synthetic
aacucuuucuugcaaacc

SEQ ID NO: 94361 - RNA, 19 nt, Artificial Sequence
  Synthetic
aaacucuuucuugcaaacc

SEQ ID NO: 94362 - RNA, 20 nt, Artificial Sequence
  Synthetic
uaaacucuuucuugcaaacc

SEQ ID NO: 94363 - RNA, 21 nt, Artificial Sequence
  Synthetic
auaaacucuuucuugcaaacc

SEQ ID NO: 94364 - RNA, 23 nt, Artificial Sequence
  Synthetic
ugauaaacucuuucuugcaaacc

SEQ ID NO: 94365 - RNA, 18 nt, Artificial Sequence
  Synthetic
aguccucaucaagaaacc

SEQ ID NO: 94366 - RNA, 20 nt, Artificial Sequence
  Synthetic
ugaguccucaucaagaaacc

SEQ ID NO: 94367 - RNA, 21 nt, Artificial Sequence
  Synthetic
augaguccucaucaagaaacc

SEQ ID NO: 94368 - RNA, 22 nt, Artificial Sequence
  Synthetic
aaugaguccucaucaagaaacc

SEQ ID NO: 94369 - RNA, 23 nt, Artificial Sequence
  Synthetic
uaaugaguccucaucaagaaacc

SEQ ID NO: 94370 - RNA, 24 nt, Artificial Sequence
  Synthetic
uuaaugaguccucaucaagaaacc

SEQ ID NO: 94371 - RNA, 18 nt, Artificial Sequence
  Synthetic
auuaggucugcagaaacc

SEQ ID NO: 94372 - RNA, 19 nt, Artificial Sequence
  Synthetic
uauuaggucugcagaaacc

SEQ ID NO: 94373 - RNA, 20 nt, Artificial Sequence
  Synthetic
uuauuaggucugcagaaacc

SEQ ID NO: 94374 - RNA, 21 nt, Artificial Sequence
  Synthetic
uuuauuaggucugcagaaacc

SEQ ID NO: 94375 - RNA, 22 nt, Artificial Sequence
  Synthetic
uuuuauuaggucugcagaaacc

SEQ ID NO: 94376 - RNA, 23 nt, Artificial Sequence
  Synthetic
uuuuuauuaggucugcagaaacc

SEQ ID NO: 94377 - RNA, 24 nt, Artificial Sequence
  Synthetic
cuuuuuauuaggucugcagaaacc

SEQ ID NO: 94378 - RNA, 18 nt, Artificial Sequence
  Synthetic
uugcuuugaauagaaacc

SEQ ID NO: 94379 - RNA, 19 nt, Artificial Sequence
  Synthetic
uuugcuuugaauagaaacc

SEQ ID NO: 94380 - RNA, 20 nt, Artificial Sequence
  Synthetic
uuuugcuuugaauagaaacc

SEQ ID NO: 94381 - RNA, 21 nt, Artificial Sequence
  Synthetic
uuuuugcuuugaauagaaacc

SEQ ID NO: 94382 - RNA, 22 nt, Artificial Sequence
  Synthetic
auuuuugcuuugaauagaaacc

SEQ ID NO: 94383 - RNA, 23 nt, Artificial Sequence
  Synthetic
uauuuuugcuuugaauagaaacc

SEQ ID NO: 94384 - RNA, 24 nt, Artificial Sequence
  Synthetic
uuauuuuugcuuugaauagaaacc

SEQ ID NO: 94385 - RNA, 18 nt, Artificial Sequence
  Synthetic
uaggagacccaggaaacc

SEQ ID NO: 94386 - RNA, 19 nt, Artificial Sequence
  Synthetic
uuaggagacccaggaaacc

SEQ ID NO: 94387 - RNA, 20 nt, Artificial Sequence
  Synthetic
cuuaggagacccaggaaacc

SEQ ID NO: 94388 - RNA, 21 nt, Artificial Sequence
  Synthetic
ucuuaggagacccaggaaacc

SEQ ID NO: 94389 - RNA, 22 nt, Artificial Sequence
  Synthetic
uucuuaggagacccaggaaacc

SEQ ID NO: 94390 - RNA, 23 nt, Artificial Sequence
  Synthetic
auucuuaggagacccaggaaacc

SEQ ID NO: 94391 - RNA, 24 nt, Artificial Sequence
  Synthetic
uauucuuaggagacccaggaaacc

SEQ ID NO: 94392 - RNA, 18 nt, Artificial Sequence
  Synthetic
uccccuaucgaggaaacc

SEQ ID NO: 94393 - RNA, 19 nt, Artificial Sequence
  Synthetic
auccccuaucgaggaaacc

SEQ ID NO: 94394 - RNA, 20 nt, Artificial Sequence
  Synthetic
uauccccuaucgaggaaacc

SEQ ID NO: 94395 - RNA, 21 nt, Artificial Sequence
  Synthetic
uuauccccuaucgaggaaacc

SEQ ID NO: 94396 - RNA, 22 nt, Artificial Sequence
  Synthetic
uuuauccccuaucgaggaaacc

SEQ ID NO: 94397 - RNA, 23 nt, Artificial Sequence
  Synthetic
cuuuauccccuaucgaggaaacc

SEQ ID NO: 94398 - RNA, 24 nt, Artificial Sequence
  Synthetic
ucuuuauccccuaucgaggaaacc

SEQ ID NO: 94399 - RNA, 18 nt, Artificial Sequence
  Synthetic
ucacaugucccugaaacc

SEQ ID NO: 94400 - RNA, 20 nt, Artificial Sequence
  Synthetic
agucacaugucccugaaacc

SEQ ID NO: 94401 - RNA, 21 nt, Artificial Sequence
  Synthetic
uagucacaugucccugaaacc

SEQ ID NO: 94402 - RNA, 22 nt, Artificial Sequence
  Synthetic
auagucacaugucccugaaacc

SEQ ID NO: 94403 - RNA, 23 nt, Artificial Sequence
  Synthetic
aauagucacaugucccugaaacc

SEQ ID NO: 94404 - RNA, 21 nt, Artificial Sequence
  Synthetic
cuaauagugaugcaauaaacc

SEQ ID NO: 94405 - RNA, 22 nt, Artificial Sequence
  Synthetic
acuaauagugaugcaauaaacc

SEQ ID NO: 94406 - RNA, 23 nt, Artificial Sequence
  Synthetic
uacuaauagugaugcaauaaacc

SEQ ID NO: 94407 - RNA, 24 nt, Artificial Sequence
  Synthetic
auacuaauagugaugcaauaaacc

SEQ ID NO: 94408 - RNA, 18 nt, Artificial Sequence
  Synthetic
uuaucucacacauaaacc

SEQ ID NO: 94409 - RNA, 20 nt, Artificial Sequence
  Synthetic
aguuaucucacacauaaacc

SEQ ID NO: 94410 - RNA, 21 nt, Artificial Sequence
  Synthetic
caguuaucucacacauaaacc

SEQ ID NO: 94411 - RNA, 22 nt, Artificial Sequence
  Synthetic
ucaguuaucucacacauaaacc

SEQ ID NO: 94412 - RNA, 23 nt, Artificial Sequence
  Synthetic
cucaguuaucucacacauaaacc

SEQ ID NO: 94413 - RNA, 24 nt, Artificial Sequence
  Synthetic
ucucaguuaucucacacauaaacc

SEQ ID NO: 94414 - RNA, 18 nt, Artificial Sequence
  Synthetic
aauaaccuuccuuaaacc

SEQ ID NO: 94415 - RNA, 19 nt, Artificial Sequence
  Synthetic
aaauaaccuuccuuaaacc

SEQ ID NO: 94416 - RNA, 20 nt, Artificial Sequence
  Synthetic
caaauaaccuuccuuaaacc

SEQ ID NO: 94417 - RNA, 21 nt, Artificial Sequence
  Synthetic
ccaaauaaccuuccuuaaacc

SEQ ID NO: 94418 - RNA, 22 nt, Artificial Sequence
  Synthetic
accaaauaaccuuccuuaaacc

SEQ ID NO: 94419 - RNA, 23 nt, Artificial Sequence
  Synthetic
aaccaaauaaccuuccuuaaacc

SEQ ID NO: 94420 - RNA, 24 nt, Artificial Sequence
  Synthetic
uaaccaaauaaccuuccuuaaacc

SEQ ID NO: 94421 - RNA, 19 nt, Artificial Sequence
  Synthetic
aguuuuuuuaugaacaacc

SEQ ID NO: 94422 - RNA, 20 nt, Artificial Sequence
  Synthetic
uaguuuuuuuaugaacaacc

SEQ ID NO: 94423 - RNA, 21 nt, Artificial Sequence
  Synthetic
auaguuuuuuuaugaacaacc

SEQ ID NO: 94424 - RNA, 22 nt, Artificial Sequence
  Synthetic
uauaguuuuuuuaugaacaacc

SEQ ID NO: 94425 - RNA, 23 nt, Artificial Sequence
  Synthetic
auauaguuuuuuuaugaacaacc

SEQ ID NO: 94426 - RNA, 24 nt, Artificial Sequence
  Synthetic
aauauaguuuuuuuaugaacaacc

SEQ ID NO: 94427 - RNA, 19 nt, Artificial Sequence
  Synthetic
cgcccccaaugugacaacc

SEQ ID NO: 94428 - RNA, 20 nt, Artificial Sequence
  Synthetic
ccgcccccaaugugacaacc

SEQ ID NO: 94429 - RNA, 21 nt, Artificial Sequence
  Synthetic
cccgcccccaaugugacaacc

SEQ ID NO: 94430 - RNA, 22 nt, Artificial Sequence
  Synthetic
ccccgcccccaaugugacaacc

SEQ ID NO: 94431 - RNA, 23 nt, Artificial Sequence
  Synthetic
uccccgcccccaaugugacaacc

SEQ ID NO: 94432 - RNA, 24 nt, Artificial Sequence
  Synthetic
auccccgcccccaaugugacaacc

SEQ ID NO: 94433 - RNA, 19 nt, Artificial Sequence
  Synthetic
agaaugagaaauaucaacc

SEQ ID NO: 94434 - RNA, 20 nt, Artificial Sequence
  Synthetic
aagaaugagaaauaucaacc

SEQ ID NO: 94435 - RNA, 21 nt, Artificial Sequence
  Synthetic
aaagaaugagaaauaucaacc

SEQ ID NO: 94436 - RNA, 22 nt, Artificial Sequence
  Synthetic
aaaagaaugagaaauaucaacc

SEQ ID NO: 94437 - RNA, 23 nt, Artificial Sequence
  Synthetic
aaaaagaaugagaaauaucaacc

SEQ ID NO: 94438 - RNA, 24 nt, Artificial Sequence
  Synthetic
aaaaaagaaugagaaauaucaacc

SEQ ID NO: 94439 - RNA, 18 nt, Artificial Sequence
  Synthetic
cagguuaugaacucaacc

SEQ ID NO: 94440 - RNA, 19 nt, Artificial Sequence
  Synthetic
acagguuaugaacucaacc

SEQ ID NO: 94441 - RNA, 20 nt, Artificial Sequence
  Synthetic
aacagguuaugaacucaacc

SEQ ID NO: 94442 - RNA, 24 nt, Artificial Sequence
  Synthetic
agggaacagguuaugaacucaacc

SEQ ID NO: 94443 - RNA, 21 nt, Artificial Sequence
  Synthetic
aacuugaaaacuuguucaacc

SEQ ID NO: 94444 - RNA, 22 nt, Artificial Sequence
  Synthetic
aaacuugaaaacuuguucaacc

SEQ ID NO: 94445 - RNA, 23 nt, Artificial Sequence
  Synthetic
caaacuugaaaacuuguucaacc

SEQ ID NO: 94446 - RNA, 24 nt, Artificial Sequence
  Synthetic
acaaacuugaaaacuuguucaacc

SEQ ID NO: 94447 - RNA, 18 nt, Artificial Sequence
  Synthetic
uaguuguaacucagaacc

SEQ ID NO: 94448 - RNA, 19 nt, Artificial Sequence
  Synthetic
uuaguuguaacucagaacc

SEQ ID NO: 94449 - RNA, 21 nt, Artificial Sequence
  Synthetic
uguuaguuguaacucagaacc

SEQ ID NO: 94450 - RNA, 22 nt, Artificial Sequence
  Synthetic
cuguuaguuguaacucagaacc

SEQ ID NO: 94451 - RNA, 23 nt, Artificial Sequence
  Synthetic
ucuguuaguuguaacucagaacc

SEQ ID NO: 94452 - RNA, 24 nt, Artificial Sequence
  Synthetic
uucuguuaguuguaacucagaacc

SEQ ID NO: 94453 - RNA, 18 nt, Artificial Sequence
  Synthetic
ugauugcaaagaggaacc

SEQ ID NO: 94454 - RNA, 19 nt, Artificial Sequence
  Synthetic
augauugcaaagaggaacc

SEQ ID NO: 94455 - RNA, 20 nt, Artificial Sequence
  Synthetic
aaugauugcaaagaggaacc

SEQ ID NO: 94456 - RNA, 21 nt, Artificial Sequence
  Synthetic
uaaugauugcaaagaggaacc

SEQ ID NO: 94457 - RNA, 22 nt, Artificial Sequence
  Synthetic
cuaaugauugcaaagaggaacc

SEQ ID NO: 94458 - RNA, 23 nt, Artificial Sequence
  Synthetic
acuaaugauugcaaagaggaacc

SEQ ID NO: 94459 - RNA, 20 nt, Artificial Sequence
  Synthetic
uggguaaaaauugaggaacc

SEQ ID NO: 94460 - RNA, 21 nt, Artificial Sequence
  Synthetic
auggguaaaaauugaggaacc

SEQ ID NO: 94461 - RNA, 22 nt, Artificial Sequence
  Synthetic
cauggguaaaaauugaggaacc

SEQ ID NO: 94462 - RNA, 23 nt, Artificial Sequence
  Synthetic
ucauggguaaaaauugaggaacc

SEQ ID NO: 94463 - RNA, 24 nt, Artificial Sequence
  Synthetic
cucauggguaaaaauugaggaacc

SEQ ID NO: 94464 - RNA, 19 nt, Artificial Sequence
  Synthetic
ugaaaaguuugcaugaacc

SEQ ID NO: 94465 - RNA, 20 nt, Artificial Sequence
  Synthetic
uugaaaaguuugcaugaacc

SEQ ID NO: 94466 - RNA, 22 nt, Artificial Sequence
  Synthetic
aguugaaaaguuugcaugaacc

SEQ ID NO: 94467 - RNA, 23 nt, Artificial Sequence
  Synthetic
aaguugaaaaguuugcaugaacc

SEQ ID NO: 94468 - RNA, 24 nt, Artificial Sequence
  Synthetic
aaaguugaaaaguuugcaugaacc

SEQ ID NO: 94469 - RNA, 21 nt, Artificial Sequence
  Synthetic
agcauaggaaugauuugaacc

SEQ ID NO: 94470 - RNA, 22 nt, Artificial Sequence
  Synthetic
uagcauaggaaugauuugaacc

SEQ ID NO: 94471 - RNA, 23 nt, Artificial Sequence
  Synthetic
uuagcauaggaaugauuugaacc

SEQ ID NO: 94472 - RNA, 24 nt, Artificial Sequence
  Synthetic
uuuagcauaggaaugauuugaacc

SEQ ID NO: 94473 - RNA, 18 nt, Artificial Sequence
  Synthetic
uagucuuggguuauaacc

SEQ ID NO: 94474 - RNA, 19 nt, Artificial Sequence
  Synthetic
uuagucuuggguuauaacc

SEQ ID NO: 94475 - RNA, 21 nt, Artificial Sequence
  Synthetic
aguuagucuuggguuauaacc

SEQ ID NO: 94476 - RNA, 22 nt, Artificial Sequence
  Synthetic
caguuagucuuggguuauaacc

SEQ ID NO: 94477 - RNA, 24 nt, Artificial Sequence
  Synthetic
agcaguuagucuuggguuauaacc

SEQ ID NO: 94478 - RNA, 18 nt, Artificial Sequence
  Synthetic
uuuuaguaauuuauaacc

SEQ ID NO: 94479 - RNA, 19 nt, Artificial Sequence
  Synthetic
uuuuuaguaauuuauaacc

SEQ ID NO: 94480 - RNA, 20 nt, Artificial Sequence
  Synthetic
cuuuuuaguaauuuauaacc

SEQ ID NO: 94481 - RNA, 21 nt, Artificial Sequence
  Synthetic
acuuuuuaguaauuuauaacc

SEQ ID NO: 94482 - RNA, 23 nt, Artificial Sequence
  Synthetic
agacuuuuuaguaauuuauaacc

SEQ ID NO: 94483 - RNA, 18 nt, Artificial Sequence
  Synthetic
aaaaagccuugccuaacc

SEQ ID NO: 94484 - RNA, 19 nt, Artificial Sequence
  Synthetic
uaaaaagccuugccuaacc

SEQ ID NO: 94485 - RNA, 20 nt, Artificial Sequence
  Synthetic
cuaaaaagccuugccuaacc

SEQ ID NO: 94486 - RNA, 21 nt, Artificial Sequence
  Synthetic
ucuaaaaagccuugccuaacc

SEQ ID NO: 94487 - RNA, 22 nt, Artificial Sequence
  Synthetic
cucuaaaaagccuugccuaacc

SEQ ID NO: 94488 - RNA, 23 nt, Artificial Sequence
  Synthetic
ccucuaaaaagccuugccuaacc

SEQ ID NO: 94489 - RNA, 24 nt, Artificial Sequence
  Synthetic
uccucuaaaaagccuugccuaacc

SEQ ID NO: 94490 - RNA, 18 nt, Artificial Sequence
  Synthetic
ugucuaauagaucuaacc

SEQ ID NO: 94491 - RNA, 19 nt, Artificial Sequence
  Synthetic
cugucuaauagaucuaacc

SEQ ID NO: 94492 - RNA, 21 nt, Artificial Sequence
  Synthetic
ugcugucuaauagaucuaacc

SEQ ID NO: 94493 - RNA, 22 nt, Artificial Sequence
  Synthetic
augcugucuaauagaucuaacc

SEQ ID NO: 94494 - RNA, 23 nt, Artificial Sequence
  Synthetic
uaugcugucuaauagaucuaacc

SEQ ID NO: 94495 - RNA, 24 nt, Artificial Sequence
  Synthetic
uuaugcugucuaauagaucuaacc

SEQ ID NO: 94496 - RNA, 18 nt, Artificial Sequence
  Synthetic
aaucaauuuaaauuaacc

SEQ ID NO: 94497 - RNA, 19 nt, Artificial Sequence
  Synthetic
aaaucaauuuaaauuaacc

SEQ ID NO: 94498 - RNA, 20 nt, Artificial Sequence
  Synthetic
uaaaucaauuuaaauuaacc

SEQ ID NO: 94499 - RNA, 21 nt, Artificial Sequence
  Synthetic
auaaaucaauuuaaauuaacc

SEQ ID NO: 94500 - RNA, 22 nt, Artificial Sequence
  Synthetic
aauaaaucaauuuaaauuaacc

SEQ ID NO: 94501 - RNA, 23 nt, Artificial Sequence
  Synthetic
aaauaaaucaauuuaaauuaacc

SEQ ID NO: 94502 - RNA, 24 nt, Artificial Sequence
  Synthetic
aaaauaaaucaauuuaaauuaacc

SEQ ID NO: 94503 - RNA, 20 nt, Artificial Sequence
  Synthetic
aggccuggccauaaaacacc

SEQ ID NO: 94504 - RNA, 21 nt, Artificial Sequence
  Synthetic
caggccuggccauaaaacacc

SEQ ID NO: 94505 - RNA, 22 nt, Artificial Sequence
  Synthetic
ccaggccuggccauaaaacacc

SEQ ID NO: 94506 - RNA, 23 nt, Artificial Sequence
  Synthetic
uccaggccuggccauaaaacacc

SEQ ID NO: 94507 - RNA, 24 nt, Artificial Sequence
  Synthetic
uuccaggccuggccauaaaacacc

SEQ ID NO: 94508 - RNA, 18 nt, Artificial Sequence
  Synthetic
aaucugcuucauaacacc

SEQ ID NO: 94509 - RNA, 19 nt, Artificial Sequence
  Synthetic
aaaucugcuucauaacacc

SEQ ID NO: 94510 - RNA, 22 nt, Artificial Sequence
  Synthetic
uggaaaucugcuucauaacacc

SEQ ID NO: 94511 - RNA, 24 nt, Artificial Sequence
  Synthetic
aguggaaaucugcuucauaacacc

SEQ ID NO: 94512 - RNA, 18 nt, Artificial Sequence
  Synthetic
auuguccuagcuaacacc

SEQ ID NO: 94513 - RNA, 19 nt, Artificial Sequence
  Synthetic
uauuguccuagcuaacacc

SEQ ID NO: 94514 - RNA, 20 nt, Artificial Sequence
  Synthetic
uuauuguccuagcuaacacc

SEQ ID NO: 94515 - RNA, 21 nt, Artificial Sequence
  Synthetic
cuuauuguccuagcuaacacc

SEQ ID NO: 94516 - RNA, 22 nt, Artificial Sequence
  Synthetic
ucuuauuguccuagcuaacacc

SEQ ID NO: 94517 - RNA, 23 nt, Artificial Sequence
  Synthetic
cucuuauuguccuagcuaacacc

SEQ ID NO: 94518 - RNA, 24 nt, Artificial Sequence
  Synthetic
ccucuuauuguccuagcuaacacc

SEQ ID NO: 94519 - RNA, 18 nt, Artificial Sequence
  Synthetic
ucucuuaaccaacacacc

SEQ ID NO: 94520 - RNA, 19 nt, Artificial Sequence
  Synthetic
uucucuuaaccaacacacc

SEQ ID NO: 94521 - RNA, 20 nt, Artificial Sequence
  Synthetic
uuucucuuaaccaacacacc

SEQ ID NO: 94522 - RNA, 21 nt, Artificial Sequence
  Synthetic
auuucucuuaaccaacacacc

SEQ ID NO: 94523 - RNA, 22 nt, Artificial Sequence
  Synthetic
cauuucucuuaaccaacacacc

SEQ ID NO: 94524 - RNA, 23 nt, Artificial Sequence
  Synthetic
ccauuucucuuaaccaacacacc

SEQ ID NO: 94525 - RNA, 24 nt, Artificial Sequence
  Synthetic
cccauuucucuuaaccaacacacc

SEQ ID NO: 94526 - RNA, 18 nt, Artificial Sequence
  Synthetic
uuggucagaacucacacc

SEQ ID NO: 94527 - RNA, 19 nt, Artificial Sequence
  Synthetic
uuuggucagaacucacacc

SEQ ID NO: 94528 - RNA, 20 nt, Artificial Sequence
  Synthetic
auuuggucagaacucacacc

SEQ ID NO: 94529 - RNA, 23 nt, Artificial Sequence
  Synthetic
uggauuuggucagaacucacacc

SEQ ID NO: 94530 - RNA, 24 nt, Artificial Sequence
  Synthetic
uuggauuuggucagaacucacacc

SEQ ID NO: 94531 - RNA, 18 nt, Artificial Sequence
  Synthetic
aagcuucucagggacacc

SEQ ID NO: 94532 - RNA, 19 nt, Artificial Sequence
  Synthetic
caagcuucucagggacacc

SEQ ID NO: 94533 - RNA, 20 nt, Artificial Sequence
  Synthetic
ucaagcuucucagggacacc

SEQ ID NO: 94534 - RNA, 21 nt, Artificial Sequence
  Synthetic
cucaagcuucucagggacacc

SEQ ID NO: 94535 - RNA, 22 nt, Artificial Sequence
  Synthetic
ucucaagcuucucagggacacc

SEQ ID NO: 94536 - RNA, 23 nt, Artificial Sequence
  Synthetic
cucucaagcuucucagggacacc

SEQ ID NO: 94537 - RNA, 24 nt, Artificial Sequence
  Synthetic
ucucucaagcuucucagggacacc

SEQ ID NO: 94538 - RNA, 18 nt, Artificial Sequence
  Synthetic
auauucugcccgcccacc

SEQ ID NO: 94539 - RNA, 19 nt, Artificial Sequence
  Synthetic
aauauucugcccgcccacc

SEQ ID NO: 94540 - RNA, 20 nt, Artificial Sequence
  Synthetic
uaauauucugcccgcccacc

SEQ ID NO: 94541 - RNA, 23 nt, Artificial Sequence
  Synthetic
cgguaauauucugcccgcccacc

SEQ ID NO: 94542 - RNA, 24 nt, Artificial Sequence
  Synthetic
acgguaauauucugcccgcccacc

SEQ ID NO: 94543 - RNA, 18 nt, Artificial Sequence
  Synthetic
aagcuuucccuucccacc

SEQ ID NO: 94544 - RNA, 19 nt, Artificial Sequence
  Synthetic
aaagcuuucccuucccacc

SEQ ID NO: 94545 - RNA, 20 nt, Artificial Sequence
  Synthetic
aaaagcuuucccuucccacc

SEQ ID NO: 94546 - RNA, 21 nt, Artificial Sequence
  Synthetic
caaaagcuuucccuucccacc

SEQ ID NO: 94547 - RNA, 22 nt, Artificial Sequence
  Synthetic
ucaaaagcuuucccuucccacc

SEQ ID NO: 94548 - RNA, 23 nt, Artificial Sequence
  Synthetic
cucaaaagcuuucccuucccacc

SEQ ID NO: 94549 - RNA, 24 nt, Artificial Sequence
  Synthetic
ccucaaaagcuuucccuucccacc

SEQ ID NO: 94550 - RNA, 18 nt, Artificial Sequence
  Synthetic
aaacuaaagcaagccacc

SEQ ID NO: 94551 - RNA, 21 nt, Artificial Sequence
  Synthetic
aggaaacuaaagcaagccacc

SEQ ID NO: 94552 - RNA, 22 nt, Artificial Sequence
  Synthetic
uaggaaacuaaagcaagccacc

SEQ ID NO: 94553 - RNA, 24 nt, Artificial Sequence
  Synthetic
uguaggaaacuaaagcaagccacc

SEQ ID NO: 94554 - RNA, 18 nt, Artificial Sequence
  Synthetic
uuccuuuaggaagccacc

SEQ ID NO: 94555 - RNA, 19 nt, Artificial Sequence
  Synthetic
cuuccuuuaggaagccacc

SEQ ID NO: 94556 - RNA, 20 nt, Artificial Sequence
  Synthetic
ucuuccuuuaggaagccacc

SEQ ID NO: 94557 - RNA, 22 nt, Artificial Sequence
  Synthetic
agucuuccuuuaggaagccacc

SEQ ID NO: 94558 - RNA, 23 nt, Artificial Sequence
  Synthetic
aagucuuccuuuaggaagccacc

SEQ ID NO: 94559 - RNA, 24 nt, Artificial Sequence
  Synthetic
aaagucuuccuuuaggaagccacc

SEQ ID NO: 94560 - RNA, 19 nt, Artificial Sequence
  Synthetic
agccaccuacagggccacc

SEQ ID NO: 94561 - RNA, 20 nt, Artificial Sequence
  Synthetic
cagccaccuacagggccacc

SEQ ID NO: 94562 - RNA, 21 nt, Artificial Sequence
  Synthetic
acagccaccuacagggccacc

SEQ ID NO: 94563 - RNA, 24 nt, Artificial Sequence
  Synthetic
aggacagccaccuacagggccacc

SEQ ID NO: 94564 - RNA, 18 nt, Artificial Sequence
  Synthetic
agaccagguccguccacc

SEQ ID NO: 94565 - RNA, 19 nt, Artificial Sequence
  Synthetic
uagaccagguccguccacc

SEQ ID NO: 94566 - RNA, 21 nt, Artificial Sequence
  Synthetic
aguagaccagguccguccacc

SEQ ID NO: 94567 - RNA, 23 nt, Artificial Sequence
  Synthetic
agaguagaccagguccguccacc

SEQ ID NO: 94568 - RNA, 24 nt, Artificial Sequence
  Synthetic
uagaguagaccagguccguccacc

SEQ ID NO: 94569 - RNA, 18 nt, Artificial Sequence
  Synthetic
uuuguauguuuaagcacc

SEQ ID NO: 94570 - RNA, 19 nt, Artificial Sequence
  Synthetic
auuuguauguuuaagcacc

SEQ ID NO: 94571 - RNA, 24 nt, Artificial Sequence
  Synthetic
uggggauuuguauguuuaagcacc

SEQ ID NO: 94572 - RNA, 18 nt, Artificial Sequence
  Synthetic
cccugaaaaugcagcacc

SEQ ID NO: 94573 - RNA, 19 nt, Artificial Sequence
  Synthetic
ucccugaaaaugcagcacc

SEQ ID NO: 94574 - RNA, 20 nt, Artificial Sequence
  Synthetic
uucccugaaaaugcagcacc

SEQ ID NO: 94575 - RNA, 22 nt, Artificial Sequence
  Synthetic
uguucccugaaaaugcagcacc

SEQ ID NO: 94576 - RNA, 23 nt, Artificial Sequence
  Synthetic
uuguucccugaaaaugcagcacc

SEQ ID NO: 94577 - RNA, 24 nt, Artificial Sequence
  Synthetic
auuguucccugaaaaugcagcacc

SEQ ID NO: 94578 - RNA, 18 nt, Artificial Sequence
  Synthetic
ucuuuauuugugugcacc

SEQ ID NO: 94579 - RNA, 19 nt, Artificial Sequence
  Synthetic
uucuuuauuugugugcacc

SEQ ID NO: 94580 - RNA, 20 nt, Artificial Sequence
  Synthetic
cuucuuuauuugugugcacc

SEQ ID NO: 94581 - RNA, 21 nt, Artificial Sequence
  Synthetic
ccuucuuuauuugugugcacc

SEQ ID NO: 94582 - RNA, 22 nt, Artificial Sequence
  Synthetic
cccuucuuuauuugugugcacc

SEQ ID NO: 94583 - RNA, 23 nt, Artificial Sequence
  Synthetic
acccuucuuuauuugugugcacc

SEQ ID NO: 94584 - RNA, 24 nt, Artificial Sequence
  Synthetic
uacccuucuuuauuugugugcacc

SEQ ID NO: 94585 - RNA, 18 nt, Artificial Sequence
  Synthetic
aggaaaguuucuugcacc

SEQ ID NO: 94586 - RNA, 19 nt, Artificial Sequence
  Synthetic
aaggaaaguuucuugcacc

SEQ ID NO: 94587 - RNA, 20 nt, Artificial Sequence
  Synthetic
uaaggaaaguuucuugcacc

SEQ ID NO: 94588 - RNA, 21 nt, Artificial Sequence
  Synthetic
uuaaggaaaguuucuugcacc

SEQ ID NO: 94589 - RNA, 22 nt, Artificial Sequence
  Synthetic
uuuaaggaaaguuucuugcacc

SEQ ID NO: 94590 - RNA, 23 nt, Artificial Sequence
  Synthetic
cuuuaaggaaaguuucuugcacc

SEQ ID NO: 94591 - RNA, 24 nt, Artificial Sequence
  Synthetic
ccuuuaaggaaaguuucuugcacc

SEQ ID NO: 94592 - RNA, 21 nt, Artificial Sequence
  Synthetic
uaacacuugcacagaaucacc

SEQ ID NO: 94593 - RNA, 22 nt, Artificial Sequence
  Synthetic
auaacacuugcacagaaucacc

SEQ ID NO: 94594 - RNA, 24 nt, Artificial Sequence
  Synthetic
ugauaacacuugcacagaaucacc

SEQ ID NO: 94595 - RNA, 18 nt, Artificial Sequence
  Synthetic
uuucaaaaugacaucacc

SEQ ID NO: 94596 - RNA, 19 nt, Artificial Sequence
  Synthetic
auuucaaaaugacaucacc

SEQ ID NO: 94597 - RNA, 20 nt, Artificial Sequence
  Synthetic
aauuucaaaaugacaucacc

SEQ ID NO: 94598 - RNA, 22 nt, Artificial Sequence
  Synthetic
agaauuucaaaaugacaucacc

SEQ ID NO: 94599 - RNA, 23 nt, Artificial Sequence
  Synthetic
aagaauuucaaaaugacaucacc

SEQ ID NO: 94600 - RNA, 24 nt, Artificial Sequence
  Synthetic
uaagaauuucaaaaugacaucacc

SEQ ID NO: 94601 - RNA, 18 nt, Artificial Sequence
  Synthetic
acaaaucccccucucacc

SEQ ID NO: 94602 - RNA, 19 nt, Artificial Sequence
  Synthetic
aacaaaucccccucucacc

SEQ ID NO: 94603 - RNA, 20 nt, Artificial Sequence
  Synthetic
caacaaaucccccucucacc

SEQ ID NO: 94604 - RNA, 21 nt, Artificial Sequence
  Synthetic
ucaacaaaucccccucucacc

SEQ ID NO: 94605 - RNA, 22 nt, Artificial Sequence
  Synthetic
uucaacaaaucccccucucacc

SEQ ID NO: 94606 - RNA, 23 nt, Artificial Sequence
  Synthetic
auucaacaaaucccccucucacc

SEQ ID NO: 94607 - RNA, 24 nt, Artificial Sequence
  Synthetic
aauucaacaaaucccccucucacc

SEQ ID NO: 94608 - RNA, 18 nt, Artificial Sequence
  Synthetic
ugucaguuuuuagucacc

SEQ ID NO: 94609 - RNA, 19 nt, Artificial Sequence
  Synthetic
augucaguuuuuagucacc

SEQ ID NO: 94610 - RNA, 20 nt, Artificial Sequence
  Synthetic
caugucaguuuuuagucacc

SEQ ID NO: 94611 - RNA, 21 nt, Artificial Sequence
  Synthetic
ucaugucaguuuuuagucacc

SEQ ID NO: 94612 - RNA, 22 nt, Artificial Sequence
  Synthetic
cucaugucaguuuuuagucacc

SEQ ID NO: 94613 - RNA, 23 nt, Artificial Sequence
  Synthetic
ucucaugucaguuuuuagucacc

SEQ ID NO: 94614 - RNA, 24 nt, Artificial Sequence
  Synthetic
uucucaugucaguuuuuagucacc

SEQ ID NO: 94615 - RNA, 18 nt, Artificial Sequence
  Synthetic
ugucuaucauuuuucacc

SEQ ID NO: 94616 - RNA, 20 nt, Artificial Sequence
  Synthetic
agugucuaucauuuuucacc

SEQ ID NO: 94617 - RNA, 21 nt, Artificial Sequence
  Synthetic
aagugucuaucauuuuucacc

SEQ ID NO: 94618 - RNA, 22 nt, Artificial Sequence
  Synthetic
caagugucuaucauuuuucacc

SEQ ID NO: 94619 - RNA, 23 nt, Artificial Sequence
  Synthetic
ucaagugucuaucauuuuucacc

SEQ ID NO: 94620 - RNA, 24 nt, Artificial Sequence
  Synthetic
uucaagugucuaucauuuuucacc

SEQ ID NO: 94621 - RNA, 18 nt, Artificial Sequence
  Synthetic
uuaagagguaacaagacc

SEQ ID NO: 94622 - RNA, 19 nt, Artificial Sequence
  Synthetic
auuaagagguaacaagacc

SEQ ID NO: 94623 - RNA, 20 nt, Artificial Sequence
  Synthetic
uauuaagagguaacaagacc

SEQ ID NO: 94624 - RNA, 21 nt, Artificial Sequence
  Synthetic
cuauuaagagguaacaagacc

SEQ ID NO: 94625 - RNA, 22 nt, Artificial Sequence
  Synthetic
ucuauuaagagguaacaagacc

SEQ ID NO: 94626 - RNA, 23 nt, Artificial Sequence
  Synthetic
uucuauuaagagguaacaagacc

SEQ ID NO: 94627 - RNA, 24 nt, Artificial Sequence
  Synthetic
cuucuauuaagagguaacaagacc

SEQ ID NO: 94628 - RNA, 20 nt, Artificial Sequence
  Synthetic
aggggagcuuauacaagacc

SEQ ID NO: 94629 - RNA, 21 nt, Artificial Sequence
  Synthetic
uaggggagcuuauacaagacc

SEQ ID NO: 94630 - RNA, 22 nt, Artificial Sequence
  Synthetic
cuaggggagcuuauacaagacc

SEQ ID NO: 94631 - RNA, 23 nt, Artificial Sequence
  Synthetic
acuaggggagcuuauacaagacc

SEQ ID NO: 94632 - RNA, 24 nt, Artificial Sequence
  Synthetic
aacuaggggagcuuauacaagacc

SEQ ID NO: 94633 - RNA, 21 nt, Artificial Sequence
  Synthetic
cguagagguagaaagaagacc

SEQ ID NO: 94634 - RNA, 22 nt, Artificial Sequence
  Synthetic
ucguagagguagaaagaagacc

SEQ ID NO: 94635 - RNA, 24 nt, Artificial Sequence
  Synthetic
ugucguagagguagaaagaagacc

SEQ ID NO: 94636 - RNA, 18 nt, Artificial Sequence
  Synthetic
cuauuuagaaaccagacc

SEQ ID NO: 94637 - RNA, 19 nt, Artificial Sequence
  Synthetic
ucuauuuagaaaccagacc

SEQ ID NO: 94638 - RNA, 20 nt, Artificial Sequence
  Synthetic
cucuauuuagaaaccagacc

SEQ ID NO: 94639 - RNA, 21 nt, Artificial Sequence
  Synthetic
ccucuauuuagaaaccagacc

SEQ ID NO: 94640 - RNA, 22 nt, Artificial Sequence
  Synthetic
uccucuauuuagaaaccagacc

SEQ ID NO: 94641 - RNA, 23 nt, Artificial Sequence
  Synthetic
uuccucuauuuagaaaccagacc

SEQ ID NO: 94642 - RNA, 24 nt, Artificial Sequence
  Synthetic
auuccucuauuuagaaaccagacc

SEQ ID NO: 94643 - RNA, 19 nt, Artificial Sequence
  Synthetic
aguccgagucaaucagacc

SEQ ID NO: 94644 - RNA, 20 nt, Artificial Sequence
  Synthetic
uaguccgagucaaucagacc

SEQ ID NO: 94645 - RNA, 21 nt, Artificial Sequence
  Synthetic
cuaguccgagucaaucagacc

SEQ ID NO: 94646 - RNA, 23 nt, Artificial Sequence
  Synthetic
cgcuaguccgagucaaucagacc

SEQ ID NO: 94647 - RNA, 24 nt, Artificial Sequence
  Synthetic
ccgcuaguccgagucaaucagacc

SEQ ID NO: 94648 - RNA, 18 nt, Artificial Sequence
  Synthetic
auauuacauagucagacc

SEQ ID NO: 94649 - RNA, 19 nt, Artificial Sequence
  Synthetic
uauauuacauagucagacc

SEQ ID NO: 94650 - RNA, 20 nt, Artificial Sequence
  Synthetic
auauauuacauagucagacc

SEQ ID NO: 94651 - RNA, 21 nt, Artificial Sequence
  Synthetic
uauauauuacauagucagacc

SEQ ID NO: 94652 - RNA, 22 nt, Artificial Sequence
  Synthetic
cuauauauuacauagucagacc

SEQ ID NO: 94653 - RNA, 23 nt, Artificial Sequence
  Synthetic
ucuauauauuacauagucagacc

SEQ ID NO: 94654 - RNA, 24 nt, Artificial Sequence
  Synthetic
uucuauauauuacauagucagacc

SEQ ID NO: 94655 - RNA, 18 nt, Artificial Sequence
  Synthetic
cuauuaagcuaaaggacc

SEQ ID NO: 94656 - RNA, 19 nt, Artificial Sequence
  Synthetic
acuauuaagcuaaaggacc

SEQ ID NO: 94657 - RNA, 20 nt, Artificial Sequence
  Synthetic
aacuauuaagcuaaaggacc

SEQ ID NO: 94658 - RNA, 21 nt, Artificial Sequence
  Synthetic
caacuauuaagcuaaaggacc

SEQ ID NO: 94659 - RNA, 22 nt, Artificial Sequence
  Synthetic
acaacuauuaagcuaaaggacc

SEQ ID NO: 94660 - RNA, 23 nt, Artificial Sequence
  Synthetic
uacaacuauuaagcuaaaggacc

SEQ ID NO: 94661 - RNA, 24 nt, Artificial Sequence
  Synthetic
cuacaacuauuaagcuaaaggacc

SEQ ID NO: 94662 - RNA, 18 nt, Artificial Sequence
  Synthetic
uaggcuuggcauaggacc

SEQ ID NO: 94663 - RNA, 19 nt, Artificial Sequence
  Synthetic
uuaggcuuggcauaggacc

SEQ ID NO: 94664 - RNA, 22 nt, Artificial Sequence
  Synthetic
ugguuaggcuuggcauaggacc

SEQ ID NO: 94665 - RNA, 23 nt, Artificial Sequence
  Synthetic
uugguuaggcuuggcauaggacc

SEQ ID NO: 94666 - RNA, 24 nt, Artificial Sequence
  Synthetic
auugguuaggcuuggcauaggacc

SEQ ID NO: 94667 - RNA, 18 nt, Artificial Sequence
  Synthetic
uacuaugaaagagggacc

SEQ ID NO: 94668 - RNA, 19 nt, Artificial Sequence
  Synthetic
auacuaugaaagagggacc

SEQ ID NO: 94669 - RNA, 20 nt, Artificial Sequence
  Synthetic
uauacuaugaaagagggacc

SEQ ID NO: 94670 - RNA, 21 nt, Artificial Sequence
  Synthetic
cuauacuaugaaagagggacc

SEQ ID NO: 94671 - RNA, 22 nt, Artificial Sequence
  Synthetic
ucuauacuaugaaagagggacc

SEQ ID NO: 94672 - RNA, 23 nt, Artificial Sequence
  Synthetic
cucuauacuaugaaagagggacc

SEQ ID NO: 94673 - RNA, 24 nt, Artificial Sequence
  Synthetic
acucuauacuaugaaagagggacc

SEQ ID NO: 94674 - RNA, 18 nt, Artificial Sequence
  Synthetic
aguuucaauaauaugacc

SEQ ID NO: 94675 - RNA, 19 nt, Artificial Sequence
  Synthetic
uaguuucaauaauaugacc

SEQ ID NO: 94676 - RNA, 20 nt, Artificial Sequence
  Synthetic
auaguuucaauaauaugacc

SEQ ID NO: 94677 - RNA, 22 nt, Artificial Sequence
  Synthetic
ugauaguuucaauaauaugacc

SEQ ID NO: 94678 - RNA, 23 nt, Artificial Sequence
  Synthetic
uugauaguuucaauaauaugacc

SEQ ID NO: 94679 - RNA, 24 nt, Artificial Sequence
  Synthetic
uuugauaguuucaauaauaugacc

SEQ ID NO: 94680 - RNA, 19 nt, Artificial Sequence
  Synthetic
uggcuuuacuccuaugacc

SEQ ID NO: 94681 - RNA, 20 nt, Artificial Sequence
  Synthetic
auggcuuuacuccuaugacc

SEQ ID NO: 94682 - RNA, 21 nt, Artificial Sequence
  Synthetic
aauggcuuuacuccuaugacc

SEQ ID NO: 94683 - RNA, 22 nt, Artificial Sequence
  Synthetic
caauggcuuuacuccuaugacc

SEQ ID NO: 94684 - RNA, 23 nt, Artificial Sequence
  Synthetic
ccaauggcuuuacuccuaugacc

SEQ ID NO: 94685 - RNA, 24 nt, Artificial Sequence
  Synthetic
cccaauggcuuuacuccuaugacc

SEQ ID NO: 94686 - RNA, 18 nt, Artificial Sequence
  Synthetic
aucaacuaccagcugacc

SEQ ID NO: 94687 - RNA, 19 nt, Artificial Sequence
  Synthetic
caucaacuaccagcugacc

SEQ ID NO: 94688 - RNA, 20 nt, Artificial Sequence
  Synthetic
ucaucaacuaccagcugacc

SEQ ID NO: 94689 - RNA, 23 nt, Artificial Sequence
  Synthetic
uggucaucaacuaccagcugacc

SEQ ID NO: 94690 - RNA, 18 nt, Artificial Sequence
  Synthetic
ucagcauugucgcugacc

SEQ ID NO: 94691 - RNA, 19 nt, Artificial Sequence
  Synthetic
aucagcauugucgcugacc

SEQ ID NO: 94692 - RNA, 20 nt, Artificial Sequence
  Synthetic
uaucagcauugucgcugacc

SEQ ID NO: 94693 - RNA, 21 nt, Artificial Sequence
  Synthetic
auaucagcauugucgcugacc

SEQ ID NO: 94694 - RNA, 22 nt, Artificial Sequence
  Synthetic
cauaucagcauugucgcugacc

SEQ ID NO: 94695 - RNA, 24 nt, Artificial Sequence
  Synthetic
ugcauaucagcauugucgcugacc

SEQ ID NO: 94696 - RNA, 18 nt, Artificial Sequence
  Synthetic
uuuuuaauuucucugacc

SEQ ID NO: 94697 - RNA, 20 nt, Artificial Sequence
  Synthetic
uguuuuuaauuucucugacc

SEQ ID NO: 94698 - RNA, 21 nt, Artificial Sequence
  Synthetic
uuguuuuuaauuucucugacc

SEQ ID NO: 94699 - RNA, 22 nt, Artificial Sequence
  Synthetic
uuuguuuuuaauuucucugacc

SEQ ID NO: 94700 - RNA, 23 nt, Artificial Sequence
  Synthetic
uuuuguuuuuaauuucucugacc

SEQ ID NO: 94701 - RNA, 18 nt, Artificial Sequence
  Synthetic
uagauacuuuuagugacc

SEQ ID NO: 94702 - RNA, 19 nt, Artificial Sequence
  Synthetic
uuagauacuuuuagugacc

SEQ ID NO: 94703 - RNA, 20 nt, Artificial Sequence
  Synthetic
auuagauacuuuuagugacc

SEQ ID NO: 94704 - RNA, 21 nt, Artificial Sequence
  Synthetic
cauuagauacuuuuagugacc

SEQ ID NO: 94705 - RNA, 22 nt, Artificial Sequence
  Synthetic
acauuagauacuuuuagugacc

SEQ ID NO: 94706 - RNA, 23 nt, Artificial Sequence
  Synthetic
uacauuagauacuuuuagugacc

SEQ ID NO: 94707 - RNA, 24 nt, Artificial Sequence
  Synthetic
auacauuagauacuuuuagugacc

SEQ ID NO: 94708 - RNA, 18 nt, Artificial Sequence
  Synthetic
agugaagacgcuuugacc

SEQ ID NO: 94709 - RNA, 19 nt, Artificial Sequence
  Synthetic
cagugaagacgcuuugacc

SEQ ID NO: 94710 - RNA, 21 nt, Artificial Sequence
  Synthetic
agcagugaagacgcuuugacc

SEQ ID NO: 94711 - RNA, 22 nt, Artificial Sequence
  Synthetic
aagcagugaagacgcuuugacc

SEQ ID NO: 94712 - RNA, 23 nt, Artificial Sequence
  Synthetic
aaagcagugaagacgcuuugacc

SEQ ID NO: 94713 - RNA, 18 nt, Artificial Sequence
  Synthetic
uguacuggcuuuuugacc

SEQ ID NO: 94714 - RNA, 19 nt, Artificial Sequence
  Synthetic
cuguacuggcuuuuugacc

SEQ ID NO: 94715 - RNA, 21 nt, Artificial Sequence
  Synthetic
ugcuguacuggcuuuuugacc

SEQ ID NO: 94716 - RNA, 22 nt, Artificial Sequence
  Synthetic
cugcuguacuggcuuuuugacc

SEQ ID NO: 94717 - RNA, 24 nt, Artificial Sequence
  Synthetic
ugcugcuguacuggcuuuuugacc

SEQ ID NO: 94718 - RNA, 22 nt, Artificial Sequence
  Synthetic
agugcuaccuuccaaaaauacc

SEQ ID NO: 94719 - RNA, 23 nt, Artificial Sequence
  Synthetic
uagugcuaccuuccaaaaauacc

SEQ ID NO: 94720 - RNA, 19 nt, Artificial Sequence
  Synthetic
agaaagcuuuaaaaauacc

SEQ ID NO: 94721 - RNA, 20 nt, Artificial Sequence
  Synthetic
aagaaagcuuuaaaaauacc

SEQ ID NO: 94722 - RNA, 21 nt, Artificial Sequence
  Synthetic
aaagaaagcuuuaaaaauacc

SEQ ID NO: 94723 - RNA, 22 nt, Artificial Sequence
  Synthetic
caaagaaagcuuuaaaaauacc

SEQ ID NO: 94724 - RNA, 23 nt, Artificial Sequence
  Synthetic
acaaagaaagcuuuaaaaauacc

SEQ ID NO: 94725 - RNA, 18 nt, Artificial Sequence
  Synthetic
uaaucuuugacuaauacc

SEQ ID NO: 94726 - RNA, 19 nt, Artificial Sequence
  Synthetic
uuaaucuuugacuaauacc

SEQ ID NO: 94727 - RNA, 20 nt, Artificial Sequence
  Synthetic
auuaaucuuugacuaauacc

SEQ ID NO: 94728 - RNA, 21 nt, Artificial Sequence
  Synthetic
cauuaaucuuugacuaauacc

SEQ ID NO: 94729 - RNA, 22 nt, Artificial Sequence
  Synthetic
ccauuaaucuuugacuaauacc

SEQ ID NO: 94730 - RNA, 23 nt, Artificial Sequence
  Synthetic
accauuaaucuuugacuaauacc

SEQ ID NO: 94731 - RNA, 24 nt, Artificial Sequence
  Synthetic
uaccauuaaucuuugacuaauacc

SEQ ID NO: 94732 - RNA, 18 nt, Artificial Sequence
  Synthetic
caaugugaacuacauacc

SEQ ID NO: 94733 - RNA, 19 nt, Artificial Sequence
  Synthetic
ucaaugugaacuacauacc

SEQ ID NO: 94734 - RNA, 20 nt, Artificial Sequence
  Synthetic
uucaaugugaacuacauacc

SEQ ID NO: 94735 - RNA, 21 nt, Artificial Sequence
  Synthetic
cuucaaugugaacuacauacc

SEQ ID NO: 94736 - RNA, 22 nt, Artificial Sequence
  Synthetic
acuucaaugugaacuacauacc

SEQ ID NO: 94737 - RNA, 24 nt, Artificial Sequence
  Synthetic
ugacuucaaugugaacuacauacc

SEQ ID NO: 94738 - RNA, 19 nt, Artificial Sequence
  Synthetic
ugugcuacucugucauacc

SEQ ID NO: 94739 - RNA, 20 nt, Artificial Sequence
  Synthetic
uugugcuacucugucauacc

SEQ ID NO: 94740 - RNA, 21 nt, Artificial Sequence
  Synthetic
cuugugcuacucugucauacc

SEQ ID NO: 94741 - RNA, 22 nt, Artificial Sequence
  Synthetic
ccuugugcuacucugucauacc

SEQ ID NO: 94742 - RNA, 24 nt, Artificial Sequence
  Synthetic
ugccuugugcuacucugucauacc

SEQ ID NO: 94743 - RNA, 19 nt, Artificial Sequence
  Synthetic
agugacccaucuugauacc

SEQ ID NO: 94744 - RNA, 20 nt, Artificial Sequence
  Synthetic
cagugacccaucuugauacc

SEQ ID NO: 94745 - RNA, 21 nt, Artificial Sequence
  Synthetic
acagugacccaucuugauacc

SEQ ID NO: 94746 - RNA, 22 nt, Artificial Sequence
  Synthetic
uacagugacccaucuugauacc

SEQ ID NO: 94747 - RNA, 23 nt, Artificial Sequence
  Synthetic
uuacagugacccaucuugauacc

SEQ ID NO: 94748 - RNA, 24 nt, Artificial Sequence
  Synthetic
auuacagugacccaucuugauacc

SEQ ID NO: 94749 - RNA, 18 nt, Artificial Sequence
  Synthetic
cuaggacacaacuauacc

SEQ ID NO: 94750 - RNA, 20 nt, Artificial Sequence
  Synthetic
agcuaggacacaacuauacc

SEQ ID NO: 94751 - RNA, 21 nt, Artificial Sequence
  Synthetic
aagcuaggacacaacuauacc

SEQ ID NO: 94752 - RNA, 22 nt, Artificial Sequence
  Synthetic
aaagcuaggacacaacuauacc

SEQ ID NO: 94753 - RNA, 23 nt, Artificial Sequence
  Synthetic
caaagcuaggacacaacuauacc

SEQ ID NO: 94754 - RNA, 24 nt, Artificial Sequence
  Synthetic
acaaagcuaggacacaacuauacc

SEQ ID NO: 94755 - RNA, 18 nt, Artificial Sequence
  Synthetic
agcuauuuaaccuauacc

SEQ ID NO: 94756 - RNA, 19 nt, Artificial Sequence
  Synthetic
uagcuauuuaaccuauacc

SEQ ID NO: 94757 - RNA, 20 nt, Artificial Sequence
  Synthetic
auagcuauuuaaccuauacc

SEQ ID NO: 94758 - RNA, 21 nt, Artificial Sequence
  Synthetic
uauagcuauuuaaccuauacc

SEQ ID NO: 94759 - RNA, 22 nt, Artificial Sequence
  Synthetic
auauagcuauuuaaccuauacc

SEQ ID NO: 94760 - RNA, 23 nt, Artificial Sequence
  Synthetic
uauauagcuauuuaaccuauacc

SEQ ID NO: 94761 - RNA, 24 nt, Artificial Sequence
  Synthetic
auauauagcuauuuaaccuauacc

SEQ ID NO: 94762 - RNA, 18 nt, Artificial Sequence
  Synthetic
cauuugaccugcuauacc

SEQ ID NO: 94763 - RNA, 19 nt, Artificial Sequence
  Synthetic
ccauuugaccugcuauacc

SEQ ID NO: 94764 - RNA, 20 nt, Artificial Sequence
  Synthetic
accauuugaccugcuauacc

SEQ ID NO: 94765 - RNA, 21 nt, Artificial Sequence
  Synthetic
uaccauuugaccugcuauacc

SEQ ID NO: 94766 - RNA, 22 nt, Artificial Sequence
  Synthetic
auaccauuugaccugcuauacc

SEQ ID NO: 94767 - RNA, 23 nt, Artificial Sequence
  Synthetic
aauaccauuugaccugcuauacc

SEQ ID NO: 94768 - RNA, 24 nt, Artificial Sequence
  Synthetic
aaauaccauuugaccugcuauacc

SEQ ID NO: 94769 - RNA, 18 nt, Artificial Sequence
  Synthetic
uaaccagauguuuauacc

SEQ ID NO: 94770 - RNA, 19 nt, Artificial Sequence
  Synthetic
uuaaccagauguuuauacc

SEQ ID NO: 94771 - RNA, 20 nt, Artificial Sequence
  Synthetic
cuuaaccagauguuuauacc

SEQ ID NO: 94772 - RNA, 21 nt, Artificial Sequence
  Synthetic
ccuuaaccagauguuuauacc

SEQ ID NO: 94773 - RNA, 22 nt, Artificial Sequence
  Synthetic
accuuaaccagauguuuauacc

SEQ ID NO: 94774 - RNA, 23 nt, Artificial Sequence
  Synthetic
aaccuuaaccagauguuuauacc

SEQ ID NO: 94775 - RNA, 24 nt, Artificial Sequence
  Synthetic
uaaccuuaaccagauguuuauacc

SEQ ID NO: 94776 - RNA, 18 nt, Artificial Sequence
  Synthetic
uugaaauauauaacuacc

SEQ ID NO: 94777 - RNA, 19 nt, Artificial Sequence
  Synthetic
auugaaauauauaacuacc

SEQ ID NO: 94778 - RNA, 20 nt, Artificial Sequence
  Synthetic
aauugaaauauauaacuacc

SEQ ID NO: 94779 - RNA, 21 nt, Artificial Sequence
  Synthetic
aaauugaaauauauaacuacc

SEQ ID NO: 94780 - RNA, 22 nt, Artificial Sequence
  Synthetic
uaaauugaaauauauaacuacc

SEQ ID NO: 94781 - RNA, 23 nt, Artificial Sequence
  Synthetic
auaaauugaaauauauaacuacc

SEQ ID NO: 94782 - RNA, 24 nt, Artificial Sequence
  Synthetic
uauaaauugaaauauauaacuacc

SEQ ID NO: 94783 - RNA, 20 nt, Artificial Sequence
  Synthetic
uggacagguccuuuacuacc

SEQ ID NO: 94784 - RNA, 22 nt, Artificial Sequence
  Synthetic
aguggacagguccuuuacuacc

SEQ ID NO: 94785 - RNA, 23 nt, Artificial Sequence
  Synthetic
aaguggacagguccuuuacuacc

SEQ ID NO: 94786 - RNA, 18 nt, Artificial Sequence
  Synthetic
uauuaaauaaaaccuacc

SEQ ID NO: 94787 - RNA, 20 nt, Artificial Sequence
  Synthetic
uguauuaaauaaaaccuacc

SEQ ID NO: 94788 - RNA, 21 nt, Artificial Sequence
  Synthetic
cuguauuaaauaaaaccuacc

SEQ ID NO: 94789 - RNA, 22 nt, Artificial Sequence
  Synthetic
acuguauuaaauaaaaccuacc

SEQ ID NO: 94790 - RNA, 23 nt, Artificial Sequence
  Synthetic
uacuguauuaaauaaaaccuacc

SEQ ID NO: 94791 - RNA, 24 nt, Artificial Sequence
  Synthetic
uuacuguauuaaauaaaaccuacc

SEQ ID NO: 94792 - RNA, 19 nt, Artificial Sequence
  Synthetic
ugcuuucucugacccuacc

SEQ ID NO: 94793 - RNA, 20 nt, Artificial Sequence
  Synthetic
uugcuuucucugacccuacc

SEQ ID NO: 94794 - RNA, 21 nt, Artificial Sequence
  Synthetic
cuugcuuucucugacccuacc

SEQ ID NO: 94795 - RNA, 22 nt, Artificial Sequence
  Synthetic
ucuugcuuucucugacccuacc

SEQ ID NO: 94796 - RNA, 23 nt, Artificial Sequence
  Synthetic
aucuugcuuucucugacccuacc

SEQ ID NO: 94797 - RNA, 24 nt, Artificial Sequence
  Synthetic
caucuugcuuucucugacccuacc

SEQ ID NO: 94798 - RNA, 19 nt, Artificial Sequence
  Synthetic
aguaaaaguuuguccuacc

SEQ ID NO: 94799 - RNA, 20 nt, Artificial Sequence
  Synthetic
aaguaaaaguuuguccuacc

SEQ ID NO: 94800 - RNA, 21 nt, Artificial Sequence
  Synthetic
aaaguaaaaguuuguccuacc

SEQ ID NO: 94801 - RNA, 22 nt, Artificial Sequence
  Synthetic
aaaaguaaaaguuuguccuacc

SEQ ID NO: 94802 - RNA, 23 nt, Artificial Sequence
  Synthetic
aaaaaguaaaaguuuguccuacc

SEQ ID NO: 94803 - RNA, 21 nt, Artificial Sequence
  Synthetic
agggcccaauaaacagcuacc

SEQ ID NO: 94804 - RNA, 23 nt, Artificial Sequence
  Synthetic
ugagggcccaauaaacagcuacc

SEQ ID NO: 94805 - RNA, 18 nt, Artificial Sequence
  Synthetic
caguuuuuggucucuacc

SEQ ID NO: 94806 - RNA, 19 nt, Artificial Sequence
  Synthetic
ucaguuuuuggucucuacc

SEQ ID NO: 94807 - RNA, 20 nt, Artificial Sequence
  Synthetic
uucaguuuuuggucucuacc

SEQ ID NO: 94808 - RNA, 21 nt, Artificial Sequence
  Synthetic
uuucaguuuuuggucucuacc

SEQ ID NO: 94809 - RNA, 22 nt, Artificial Sequence
  Synthetic
auuucaguuuuuggucucuacc

SEQ ID NO: 94810 - RNA, 23 nt, Artificial Sequence
  Synthetic
cauuucaguuuuuggucucuacc

SEQ ID NO: 94811 - RNA, 24 nt, Artificial Sequence
  Synthetic
acauuucaguuuuuggucucuacc

SEQ ID NO: 94812 - RNA, 18 nt, Artificial Sequence
  Synthetic
auggcauugcugucuacc

SEQ ID NO: 94813 - RNA, 19 nt, Artificial Sequence
  Synthetic
aauggcauugcugucuacc

SEQ ID NO: 94814 - RNA, 20 nt, Artificial Sequence
  Synthetic
uaauggcauugcugucuacc

SEQ ID NO: 94815 - RNA, 21 nt, Artificial Sequence
  Synthetic
cuaauggcauugcugucuacc

SEQ ID NO: 94816 - RNA, 22 nt, Artificial Sequence
  Synthetic
acuaauggcauugcugucuacc

SEQ ID NO: 94817 - RNA, 18 nt, Artificial Sequence
  Synthetic
uaaacaauuaauucuacc

SEQ ID NO: 94818 - RNA, 19 nt, Artificial Sequence
  Synthetic
auaaacaauuaauucuacc

SEQ ID NO: 94819 - RNA, 21 nt, Artificial Sequence
  Synthetic
ugauaaacaauuaauucuacc

SEQ ID NO: 94820 - RNA, 22 nt, Artificial Sequence
  Synthetic
augauaaacaauuaauucuacc

SEQ ID NO: 94821 - RNA, 23 nt, Artificial Sequence
  Synthetic
aaugauaaacaauuaauucuacc

SEQ ID NO: 94822 - RNA, 19 nt, Artificial Sequence
  Synthetic
ugcuguccaacauucuacc

SEQ ID NO: 94823 - RNA, 20 nt, Artificial Sequence
  Synthetic
cugcuguccaacauucuacc

SEQ ID NO: 94824 - RNA, 18 nt, Artificial Sequence
  Synthetic
uuuucuguuucuucuacc

SEQ ID NO: 94825 - RNA, 19 nt, Artificial Sequence
  Synthetic
auuuucuguuucuucuacc

SEQ ID NO: 94826 - RNA, 22 nt, Artificial Sequence
  Synthetic
cggauuuucuguuucuucuacc

SEQ ID NO: 94827 - RNA, 23 nt, Artificial Sequence
  Synthetic
acggauuuucuguuucuucuacc

SEQ ID NO: 94828 - RNA, 24 nt, Artificial Sequence
  Synthetic
uacggauuuucuguuucuucuacc

SEQ ID NO: 94829 - RNA, 18 nt, Artificial Sequence
  Synthetic
uuaauuucuuguucuacc

SEQ ID NO: 94830 - RNA, 19 nt, Artificial Sequence
  Synthetic
auuaauuucuuguucuacc

SEQ ID NO: 94831 - RNA, 20 nt, Artificial Sequence
  Synthetic
uauuaauuucuuguucuacc

SEQ ID NO: 94832 - RNA, 22 nt, Artificial Sequence
  Synthetic
aguauuaauuucuuguucuacc

SEQ ID NO: 94833 - RNA, 23 nt, Artificial Sequence
  Synthetic
caguauuaauuucuuguucuacc

SEQ ID NO: 94834 - RNA, 24 nt, Artificial Sequence
  Synthetic
ucaguauuaauuucuuguucuacc

SEQ ID NO: 94835 - RNA, 19 nt, Artificial Sequence
  Synthetic
agcucucucuuuuucuacc

SEQ ID NO: 94836 - RNA, 20 nt, Artificial Sequence
  Synthetic
aagcucucucuuuuucuacc

SEQ ID NO: 94837 - RNA, 21 nt, Artificial Sequence
  Synthetic
caagcucucucuuuuucuacc

SEQ ID NO: 94838 - RNA, 22 nt, Artificial Sequence
  Synthetic
ccaagcucucucuuuuucuacc

SEQ ID NO: 94839 - RNA, 23 nt, Artificial Sequence
  Synthetic
cccaagcucucucuuuuucuacc

SEQ ID NO: 94840 - RNA, 24 nt, Artificial Sequence
  Synthetic
ucccaagcucucucuuuuucuacc

SEQ ID NO: 94841 - RNA, 18 nt, Artificial Sequence
  Synthetic
auggaacacucaaguacc

SEQ ID NO: 94842 - RNA, 19 nt, Artificial Sequence
  Synthetic
uauggaacacucaaguacc

SEQ ID NO: 94843 - RNA, 21 nt, Artificial Sequence
  Synthetic
uguauggaacacucaaguacc

SEQ ID NO: 94844 - RNA, 22 nt, Artificial Sequence
  Synthetic
uuguauggaacacucaaguacc

SEQ ID NO: 94845 - RNA, 24 nt, Artificial Sequence
  Synthetic
aguuguauggaacacucaaguacc

SEQ ID NO: 94846 - RNA, 20 nt, Artificial Sequence
  Synthetic
uggagacauuccggaguacc

SEQ ID NO: 94847 - RNA, 21 nt, Artificial Sequence
  Synthetic
auggagacauuccggaguacc

SEQ ID NO: 94848 - RNA, 22 nt, Artificial Sequence
  Synthetic
aauggagacauuccggaguacc

SEQ ID NO: 94849 - RNA, 23 nt, Artificial Sequence
  Synthetic
aaauggagacauuccggaguacc

SEQ ID NO: 94850 - RNA, 24 nt, Artificial Sequence
  Synthetic
caaauggagacauuccggaguacc

SEQ ID NO: 94851 - RNA, 18 nt, Artificial Sequence
  Synthetic
auaugugucuaacguacc

SEQ ID NO: 94852 - RNA, 20 nt, Artificial Sequence
  Synthetic
ugauaugugucuaacguacc

SEQ ID NO: 94853 - RNA, 21 nt, Artificial Sequence
  Synthetic
uugauaugugucuaacguacc

SEQ ID NO: 94854 - RNA, 22 nt, Artificial Sequence
  Synthetic
uuugauaugugucuaacguacc

SEQ ID NO: 94855 - RNA, 23 nt, Artificial Sequence
  Synthetic
cuuugauaugugucuaacguacc

SEQ ID NO: 94856 - RNA, 24 nt, Artificial Sequence
  Synthetic
acuuugauaugugucuaacguacc

SEQ ID NO: 94857 - RNA, 18 nt, Artificial Sequence
  Synthetic
auaacuggcaaugguacc

SEQ ID NO: 94858 - RNA, 19 nt, Artificial Sequence
  Synthetic
cauaacuggcaaugguacc

SEQ ID NO: 94859 - RNA, 20 nt, Artificial Sequence
  Synthetic
ucauaacuggcaaugguacc

SEQ ID NO: 94860 - RNA, 21 nt, Artificial Sequence
  Synthetic
uucauaacuggcaaugguacc

SEQ ID NO: 94861 - RNA, 22 nt, Artificial Sequence
  Synthetic
auucauaacuggcaaugguacc

SEQ ID NO: 94862 - RNA, 23 nt, Artificial Sequence
  Synthetic
aauucauaacuggcaaugguacc

SEQ ID NO: 94863 - RNA, 24 nt, Artificial Sequence
  Synthetic
aaauucauaacuggcaaugguacc

SEQ ID NO: 94864 - RNA, 18 nt, Artificial Sequence
  Synthetic
auacaguuccuauguacc

SEQ ID NO: 94865 - RNA, 19 nt, Artificial Sequence
  Synthetic
cauacaguuccuauguacc

SEQ ID NO: 94866 - RNA, 20 nt, Artificial Sequence
  Synthetic
ccauacaguuccuauguacc

SEQ ID NO: 94867 - RNA, 21 nt, Artificial Sequence
  Synthetic
accauacaguuccuauguacc

SEQ ID NO: 94868 - RNA, 22 nt, Artificial Sequence
  Synthetic
caccauacaguuccuauguacc

SEQ ID NO: 94869 - RNA, 23 nt, Artificial Sequence
  Synthetic
ucaccauacaguuccuauguacc

SEQ ID NO: 94870 - RNA, 18 nt, Artificial Sequence
  Synthetic
agcugagauuagauuacc

SEQ ID NO: 94871 - RNA, 20 nt, Artificial Sequence
  Synthetic
agagcugagauuagauuacc

SEQ ID NO: 94872 - RNA, 21 nt, Artificial Sequence
  Synthetic
cagagcugagauuagauuacc

SEQ ID NO: 94873 - RNA, 22 nt, Artificial Sequence
  Synthetic
acagagcugagauuagauuacc

SEQ ID NO: 94874 - RNA, 18 nt, Artificial Sequence
  Synthetic
auuugugaaacacuuacc

SEQ ID NO: 94875 - RNA, 19 nt, Artificial Sequence
  Synthetic
uauuugugaaacacuuacc

SEQ ID NO: 94876 - RNA, 20 nt, Artificial Sequence
  Synthetic
cuauuugugaaacacuuacc

SEQ ID NO: 94877 - RNA, 21 nt, Artificial Sequence
  Synthetic
ucuauuugugaaacacuuacc

SEQ ID NO: 94878 - RNA, 22 nt, Artificial Sequence
  Synthetic
cucuauuugugaaacacuuacc

SEQ ID NO: 94879 - RNA, 23 nt, Artificial Sequence
  Synthetic
ccucuauuugugaaacacuuacc

SEQ ID NO: 94880 - RNA, 24 nt, Artificial Sequence
  Synthetic
accucuauuugugaaacacuuacc

SEQ ID NO: 94881 - RNA, 19 nt, Artificial Sequence
  Synthetic
ugcauccaacacgcuuacc

SEQ ID NO: 94882 - RNA, 20 nt, Artificial Sequence
  Synthetic
augcauccaacacgcuuacc

SEQ ID NO: 94883 - RNA, 21 nt, Artificial Sequence
  Synthetic
caugcauccaacacgcuuacc

SEQ ID NO: 94884 - RNA, 22 nt, Artificial Sequence
  Synthetic
ccaugcauccaacacgcuuacc

SEQ ID NO: 94885 - RNA, 23 nt, Artificial Sequence
  Synthetic
uccaugcauccaacacgcuuacc

SEQ ID NO: 94886 - RNA, 24 nt, Artificial Sequence
  Synthetic
uuccaugcauccaacacgcuuacc

SEQ ID NO: 94887 - RNA, 18 nt, Artificial Sequence
  Synthetic
cauuuucaguuaguuacc

SEQ ID NO: 94888 - RNA, 19 nt, Artificial Sequence
  Synthetic
ccauuuucaguuaguuacc

SEQ ID NO: 94889 - RNA, 20 nt, Artificial Sequence
  Synthetic
uccauuuucaguuaguuacc

SEQ ID NO: 94890 - RNA, 21 nt, Artificial Sequence
  Synthetic
uaaaaaacaauuauauuuacc

SEQ ID NO: 94891 - RNA, 22 nt, Artificial Sequence
  Synthetic
uuaaaaaacaauuauauuuacc

SEQ ID NO: 94892 - RNA, 23 nt, Artificial Sequence
  Synthetic
uuuaaaaaacaauuauauuuacc

SEQ ID NO: 94893 - RNA, 24 nt, Artificial Sequence
  Synthetic
auuuaaaaaacaauuauauuuacc

SEQ ID NO: 94894 - RNA, 18 nt, Artificial Sequence
  Synthetic
uuugucaaaacaaaaccc

SEQ ID NO: 94895 - RNA, 20 nt, Artificial Sequence
  Synthetic
aguuugucaaaacaaaaccc

SEQ ID NO: 94896 - RNA, 21 nt, Artificial Sequence
  Synthetic
aaguuugucaaaacaaaaccc

SEQ ID NO: 94897 - RNA, 24 nt, Artificial Sequence
  Synthetic
uggaaguuugucaaaacaaaaccc

SEQ ID NO: 94898 - RNA, 19 nt, Artificial Sequence
  Synthetic
agagcgaaaccagaaaccc

SEQ ID NO: 94899 - RNA, 22 nt, Artificial Sequence
  Synthetic
aggagagcgaaaccagaaaccc

SEQ ID NO: 94900 - RNA, 18 nt, Artificial Sequence
  Synthetic
caauucaauauauaaccc

SEQ ID NO: 94901 - RNA, 20 nt, Artificial Sequence
  Synthetic
agcaauucaauauauaaccc

SEQ ID NO: 94902 - RNA, 21 nt, Artificial Sequence
  Synthetic
aagcaauucaauauauaaccc

SEQ ID NO: 94903 - RNA, 22 nt, Artificial Sequence
  Synthetic
aaagcaauucaauauauaaccc

SEQ ID NO: 94904 - RNA, 23 nt, Artificial Sequence
  Synthetic
aaaagcaauucaauauauaaccc

SEQ ID NO: 94905 - RNA, 24 nt, Artificial Sequence
  Synthetic
uaaaagcaauucaauauauaaccc

SEQ ID NO: 94906 - RNA, 18 nt, Artificial Sequence
  Synthetic
uagcagcuuuuaccaccc

SEQ ID NO: 94907 - RNA, 21 nt, Artificial Sequence
  Synthetic
ugguagcagcuuuuaccaccc

SEQ ID NO: 94908 - RNA, 22 nt, Artificial Sequence
  Synthetic
uugguagcagcuuuuaccaccc

SEQ ID NO: 94909 - RNA, 23 nt, Artificial Sequence
  Synthetic
uuugguagcagcuuuuaccaccc

SEQ ID NO: 94910 - RNA, 24 nt, Artificial Sequence
  Synthetic
uuuugguagcagcuuuuaccaccc

SEQ ID NO: 94911 - RNA, 19 nt, Artificial Sequence
  Synthetic
cgccuuaacaaaagcaccc

SEQ ID NO: 94912 - RNA, 20 nt, Artificial Sequence
  Synthetic
acgccuuaacaaaagcaccc

SEQ ID NO: 94913 - RNA, 21 nt, Artificial Sequence
  Synthetic
aacgccuuaacaaaagcaccc

SEQ ID NO: 94914 - RNA, 23 nt, Artificial Sequence
  Synthetic
ugaacgccuuaacaaaagcaccc

SEQ ID NO: 94915 - RNA, 24 nt, Artificial Sequence
  Synthetic
cugaacgccuuaacaaaagcaccc

SEQ ID NO: 94916 - RNA, 19 nt, Artificial Sequence
  Synthetic
agccacuauaaauucaccc

SEQ ID NO: 94917 - RNA, 20 nt, Artificial Sequence
  Synthetic
cagccacuauaaauucaccc

SEQ ID NO: 94918 - RNA, 21 nt, Artificial Sequence
  Synthetic
ccagccacuauaaauucaccc

SEQ ID NO: 94919 - RNA, 22 nt, Artificial Sequence
  Synthetic
cccagccacuauaaauucaccc

SEQ ID NO: 94920 - RNA, 23 nt, Artificial Sequence
  Synthetic
ccccagccacuauaaauucaccc

SEQ ID NO: 94921 - RNA, 24 nt, Artificial Sequence
  Synthetic
uccccagccacuauaaauucaccc

SEQ ID NO: 94922 - RNA, 18 nt, Artificial Sequence
  Synthetic
uccaagacagccagaccc

SEQ ID NO: 94923 - RNA, 19 nt, Artificial Sequence
  Synthetic
uuccaagacagccagaccc

SEQ ID NO: 94924 - RNA, 20 nt, Artificial Sequence
  Synthetic
uuuccaagacagccagaccc

SEQ ID NO: 94925 - RNA, 21 nt, Artificial Sequence
  Synthetic
cuuuccaagacagccagaccc

SEQ ID NO: 94926 - RNA, 22 nt, Artificial Sequence
  Synthetic
ccuuuccaagacagccagaccc

SEQ ID NO: 94927 - RNA, 23 nt, Artificial Sequence
  Synthetic
accuuuccaagacagccagaccc

SEQ ID NO: 94928 - RNA, 24 nt, Artificial Sequence
  Synthetic
caccuuuccaagacagccagaccc

SEQ ID NO: 94929 - RNA, 18 nt, Artificial Sequence
  Synthetic
auuauuuauaauugaccc

SEQ ID NO: 94930 - RNA, 20 nt, Artificial Sequence
  Synthetic
agauuauuuauaauugaccc

SEQ ID NO: 94931 - RNA, 21 nt, Artificial Sequence
  Synthetic
uagauuauuuauaauugaccc

SEQ ID NO: 94932 - RNA, 22 nt, Artificial Sequence
  Synthetic
uuagauuauuuauaauugaccc

SEQ ID NO: 94933 - RNA, 23 nt, Artificial Sequence
  Synthetic
cuuagauuauuuauaauugaccc

SEQ ID NO: 94934 - RNA, 18 nt, Artificial Sequence
  Synthetic
cacagaaugcaauuaccc

SEQ ID NO: 94935 - RNA, 19 nt, Artificial Sequence
  Synthetic
ucacagaaugcaauuaccc

SEQ ID NO: 94936 - RNA, 20 nt, Artificial Sequence
  Synthetic
cucacagaaugcaauuaccc

SEQ ID NO: 94937 - RNA, 21 nt, Artificial Sequence
  Synthetic
ccucacagaaugcaauuaccc

SEQ ID NO: 94938 - RNA, 22 nt, Artificial Sequence
  Synthetic
cccucacagaaugcaauuaccc

SEQ ID NO: 94939 - RNA, 24 nt, Artificial Sequence
  Synthetic
agcccucacagaaugcaauuaccc

SEQ ID NO: 94940 - RNA, 18 nt, Artificial Sequence
  Synthetic
cugccgggcuacaccccc

SEQ ID NO: 94941 - RNA, 19 nt, Artificial Sequence
  Synthetic
acugccgggcuacaccccc

SEQ ID NO: 94942 - RNA, 21 nt, Artificial Sequence
  Synthetic
agacugccgggcuacaccccc

SEQ ID NO: 94943 - RNA, 22 nt, Artificial Sequence
  Synthetic
aagacugccgggcuacaccccc

SEQ ID NO: 94944 - RNA, 23 nt, Artificial Sequence
  Synthetic
aaagacugccgggcuacaccccc

SEQ ID NO: 94945 - RNA, 24 nt, Artificial Sequence
  Synthetic
caaagacugccgggcuacaccccc

SEQ ID NO: 94946 - RNA, 18 nt, Artificial Sequence
  Synthetic
ucacuauuugagaccccc

SEQ ID NO: 94947 - RNA, 19 nt, Artificial Sequence
  Synthetic
uucacuauuugagaccccc

SEQ ID NO: 94948 - RNA, 20 nt, Artificial Sequence
  Synthetic
uuucacuauuugagaccccc

SEQ ID NO: 94949 - RNA, 21 nt, Artificial Sequence
  Synthetic
cuuucacuauuugagaccccc

SEQ ID NO: 94950 - RNA, 22 nt, Artificial Sequence
  Synthetic
ucuuucacuauuugagaccccc

SEQ ID NO: 94951 - RNA, 24 nt, Artificial Sequence
  Synthetic
ugucuuucacuauuugagaccccc

SEQ ID NO: 94952 - RNA, 18 nt, Artificial Sequence
  Synthetic
uguccaagcaucgccccc

SEQ ID NO: 94953 - RNA, 19 nt, Artificial Sequence
  Synthetic
uuguccaagcaucgccccc

SEQ ID NO: 94954 - RNA, 21 nt, Artificial Sequence
  Synthetic
uguuguccaagcaucgccccc

SEQ ID NO: 94955 - RNA, 22 nt, Artificial Sequence
  Synthetic
cuguuguccaagcaucgccccc

SEQ ID NO: 94956 - RNA, 23 nt, Artificial Sequence
  Synthetic
acuguuguccaagcaucgccccc

SEQ ID NO: 94957 - RNA, 24 nt, Artificial Sequence
  Synthetic
uacuguuguccaagcaucgccccc

SEQ ID NO: 94958 - RNA, 18 nt, Artificial Sequence
  Synthetic
aaagcaaaggacuccccc

SEQ ID NO: 94959 - RNA, 19 nt, Artificial Sequence
  Synthetic
caaagcaaaggacuccccc

SEQ ID NO: 94960 - RNA, 20 nt, Artificial Sequence
  Synthetic
ucaaagcaaaggacuccccc

SEQ ID NO: 94961 - RNA, 21 nt, Artificial Sequence
  Synthetic
uucaaagcaaaggacuccccc

SEQ ID NO: 94962 - RNA, 22 nt, Artificial Sequence
  Synthetic
auucaaagcaaaggacuccccc

SEQ ID NO: 94963 - RNA, 23 nt, Artificial Sequence
  Synthetic
aauucaaagcaaaggacuccccc

SEQ ID NO: 94964 - RNA, 24 nt, Artificial Sequence
  Synthetic
uaauucaaagcaaaggacuccccc

SEQ ID NO: 94965 - RNA, 18 nt, Artificial Sequence
  Synthetic
aaucucacuaaguccccc

SEQ ID NO: 94966 - RNA, 19 nt, Artificial Sequence
  Synthetic
uaaucucacuaaguccccc

SEQ ID NO: 94967 - RNA, 20 nt, Artificial Sequence
  Synthetic
uuaaucucacuaaguccccc

SEQ ID NO: 94968 - RNA, 21 nt, Artificial Sequence
  Synthetic
uuuaaucucacuaaguccccc

SEQ ID NO: 94969 - RNA, 22 nt, Artificial Sequence
  Synthetic
cuuuaaucucacuaaguccccc

SEQ ID NO: 94970 - RNA, 23 nt, Artificial Sequence
  Synthetic
ucuuuaaucucacuaaguccccc

SEQ ID NO: 94971 - RNA, 19 nt, Artificial Sequence
  Synthetic
cgagaaugguuggagcccc

SEQ ID NO: 94972 - RNA, 20 nt, Artificial Sequence
  Synthetic
acgagaaugguuggagcccc

SEQ ID NO: 94973 - RNA, 21 nt, Artificial Sequence
  Synthetic
aacgagaaugguuggagcccc

SEQ ID NO: 94974 - RNA, 22 nt, Artificial Sequence
  Synthetic
aaacgagaaugguuggagcccc

SEQ ID NO: 94975 - RNA, 23 nt, Artificial Sequence
  Synthetic
aaaacgagaaugguuggagcccc

SEQ ID NO: 94976 - RNA, 18 nt, Artificial Sequence
  Synthetic
uauuguuguuguugcccc

SEQ ID NO: 94977 - RNA, 19 nt, Artificial Sequence
  Synthetic
uuauuguuguuguugcccc

SEQ ID NO: 94978 - RNA, 20 nt, Artificial Sequence
  Synthetic
cuuauuguuguuguugcccc

SEQ ID NO: 94979 - RNA, 23 nt, Artificial Sequence
  Synthetic
uggcuuauuguuguuguugcccc

SEQ ID NO: 94980 - RNA, 24 nt, Artificial Sequence
  Synthetic
uuggcuuauuguuguuguugcccc

SEQ ID NO: 94981 - RNA, 19 nt, Artificial Sequence
  Synthetic
aguuuauguucucaucccc

SEQ ID NO: 94982 - RNA, 22 nt, Artificial Sequence
  Synthetic
uggaguuuauguucucaucccc

SEQ ID NO: 94983 - RNA, 18 nt, Artificial Sequence
  Synthetic
aaaccucuuucggucccc

SEQ ID NO: 94984 - RNA, 19 nt, Artificial Sequence
  Synthetic
aaaaccucuuucggucccc

SEQ ID NO: 94985 - RNA, 20 nt, Artificial Sequence
  Synthetic
aaaaaccucuuucggucccc

SEQ ID NO: 94986 - RNA, 21 nt, Artificial Sequence
  Synthetic
caaaaaccucuuucggucccc

SEQ ID NO: 94987 - RNA, 23 nt, Artificial Sequence
  Synthetic
ugcaaaaaccucuuucggucccc

SEQ ID NO: 94988 - RNA, 19 nt, Artificial Sequence
  Synthetic
agcaauugccaaauucccc

SEQ ID NO: 94989 - RNA, 20 nt, Artificial Sequence
  Synthetic
cagcaauugccaaauucccc

SEQ ID NO: 94990 - RNA, 18 nt, Artificial Sequence
  Synthetic
uauucuccaccauucccc

SEQ ID NO: 94991 - RNA, 20 nt, Artificial Sequence
  Synthetic
aguauucuccaccauucccc

SEQ ID NO: 94992 - RNA, 21 nt, Artificial Sequence
  Synthetic
caguauucuccaccauucccc

SEQ ID NO: 94993 - RNA, 22 nt, Artificial Sequence
  Synthetic
ucaguauucuccaccauucccc

SEQ ID NO: 94994 - RNA, 23 nt, Artificial Sequence
  Synthetic
cucaguauucuccaccauucccc

SEQ ID NO: 94995 - RNA, 24 nt, Artificial Sequence
  Synthetic
ccucaguauucuccaccauucccc

SEQ ID NO: 94996 - RNA, 18 nt, Artificial Sequence
  Synthetic
agcuucauuccauucccc

SEQ ID NO: 94997 - RNA, 19 nt, Artificial Sequence
  Synthetic
uagcuucauuccauucccc

SEQ ID NO: 94998 - RNA, 20 nt, Artificial Sequence
  Synthetic
auagcuucauuccauucccc

SEQ ID NO: 94999 - RNA, 22 nt, Artificial Sequence
  Synthetic
agauagcuucauuccauucccc

SEQ ID NO: 95000 - RNA, 23 nt, Artificial Sequence
  Synthetic
aagauagcuucauuccauucccc

SEQ ID NO: 95001 - RNA, 24 nt, Artificial Sequence
  Synthetic
uaagauagcuucauuccauucccc

SEQ ID NO: 95002 - RNA, 19 nt, Artificial Sequence
  Synthetic
agauuacuacauuuucccc

SEQ ID NO: 95003 - RNA, 20 nt, Artificial Sequence
  Synthetic
uagauuacuacauuuucccc

SEQ ID NO: 95004 - RNA, 21 nt, Artificial Sequence
  Synthetic
uuagauuacuacauuuucccc

SEQ ID NO: 95005 - RNA, 22 nt, Artificial Sequence
  Synthetic
auuagauuacuacauuuucccc

SEQ ID NO: 95006 - RNA, 23 nt, Artificial Sequence
  Synthetic
aauuagauuacuacauuuucccc

SEQ ID NO: 95007 - RNA, 24 nt, Artificial Sequence
  Synthetic
uaauuagauuacuacauuuucccc

SEQ ID NO: 95008 - RNA, 18 nt, Artificial Sequence
  Synthetic
uugaacauacugaagccc

SEQ ID NO: 95009 - RNA, 19 nt, Artificial Sequence
  Synthetic
uuugaacauacugaagccc

SEQ ID NO: 95010 - RNA, 20 nt, Artificial Sequence
  Synthetic
uuuugaacauacugaagccc

SEQ ID NO: 95011 - RNA, 22 nt, Artificial Sequence
  Synthetic
uguuuugaacauacugaagccc

SEQ ID NO: 95012 - RNA, 23 nt, Artificial Sequence
  Synthetic
cuguuuugaacauacugaagccc

SEQ ID NO: 95013 - RNA, 24 nt, Artificial Sequence
  Synthetic
ucuguuuugaacauacugaagccc

SEQ ID NO: 95014 - RNA, 18 nt, Artificial Sequence
  Synthetic
ucuauggucaguaagccc

SEQ ID NO: 95015 - RNA, 20 nt, Artificial Sequence
  Synthetic
cgucuauggucaguaagccc

SEQ ID NO: 95016 - RNA, 22 nt, Artificial Sequence
  Synthetic
ugcgucuauggucaguaagccc

SEQ ID NO: 95017 - RNA, 23 nt, Artificial Sequence
  Synthetic
augcgucuauggucaguaagccc

SEQ ID NO: 95018 - RNA, 24 nt, Artificial Sequence
  Synthetic
aaugcgucuauggucaguaagccc

SEQ ID NO: 95019 - RNA, 18 nt, Artificial Sequence
  Synthetic
auuaaaaacagccagccc

SEQ ID NO: 95020 - RNA, 19 nt, Artificial Sequence
  Synthetic
aauuaaaaacagccagccc

SEQ ID NO: 95021 - RNA, 21 nt, Artificial Sequence
  Synthetic
ugaauuaaaaacagccagccc

SEQ ID NO: 95022 - RNA, 22 nt, Artificial Sequence
  Synthetic
cugaauuaaaaacagccagccc

SEQ ID NO: 95023 - RNA, 23 nt, Artificial Sequence
  Synthetic
ccugaauuaaaaacagccagccc

SEQ ID NO: 95024 - RNA, 24 nt, Artificial Sequence
  Synthetic
accugaauuaaaaacagccagccc

SEQ ID NO: 95025 - RNA, 18 nt, Artificial Sequence
  Synthetic
aucgaucccucucagccc

SEQ ID NO: 95026 - RNA, 19 nt, Artificial Sequence
  Synthetic
uaucgaucccucucagccc

SEQ ID NO: 95027 - RNA, 20 nt, Artificial Sequence
  Synthetic
auaucgaucccucucagccc

SEQ ID NO: 95028 - RNA, 22 nt, Artificial Sequence
  Synthetic
agauaucgaucccucucagccc

SEQ ID NO: 95029 - RNA, 23 nt, Artificial Sequence
  Synthetic
cagauaucgaucccucucagccc

SEQ ID NO: 95030 - RNA, 24 nt, Artificial Sequence
  Synthetic
ucagauaucgaucccucucagccc

SEQ ID NO: 95031 - RNA, 19 nt, Artificial Sequence
  Synthetic
uggguggcaaauucagccc

SEQ ID NO: 95032 - RNA, 21 nt, Artificial Sequence
  Synthetic
aguggguggcaaauucagccc

SEQ ID NO: 95033 - RNA, 22 nt, Artificial Sequence
  Synthetic
caguggguggcaaauucagccc

SEQ ID NO: 95034 - RNA, 23 nt, Artificial Sequence
  Synthetic
acaguggguggcaaauucagccc

SEQ ID NO: 95035 - RNA, 24 nt, Artificial Sequence
  Synthetic
cacaguggguggcaaauucagccc

SEQ ID NO: 95036 - RNA, 18 nt, Artificial Sequence
  Synthetic
aauggauuggaggagccc

SEQ ID NO: 95037 - RNA, 20 nt, Artificial Sequence
  Synthetic
ugaauggauuggaggagccc

SEQ ID NO: 95038 - RNA, 21 nt, Artificial Sequence
  Synthetic
augaauggauuggaggagccc

SEQ ID NO: 95039 - RNA, 24 nt, Artificial Sequence
  Synthetic
aggaugaauggauuggaggagccc

SEQ ID NO: 95040 - RNA, 18 nt, Artificial Sequence
  Synthetic
ccauuccagcuugagccc

SEQ ID NO: 95041 - RNA, 20 nt, Artificial Sequence
  Synthetic
ugccauuccagcuugagccc

SEQ ID NO: 95042 - RNA, 21 nt, Artificial Sequence
  Synthetic
cugccauuccagcuugagccc

SEQ ID NO: 95043 - RNA, 22 nt, Artificial Sequence
  Synthetic
acugccauuccagcuugagccc

SEQ ID NO: 95044 - RNA, 23 nt, Artificial Sequence
  Synthetic
uacugccauuccagcuugagccc

SEQ ID NO: 95045 - RNA, 24 nt, Artificial Sequence
  Synthetic
cuacugccauuccagcuugagccc

SEQ ID NO: 95046 - RNA, 18 nt, Artificial Sequence
  Synthetic
auugcugcaugguagccc

SEQ ID NO: 95047 - RNA, 19 nt, Artificial Sequence
  Synthetic
aauugcugcaugguagccc

SEQ ID NO: 95048 - RNA, 20 nt, Artificial Sequence
  Synthetic
uaauugcugcaugguagccc

SEQ ID NO: 95049 - RNA, 21 nt, Artificial Sequence
  Synthetic
cuaauugcugcaugguagccc

SEQ ID NO: 95050 - RNA, 23 nt, Artificial Sequence
  Synthetic
ugcuaauugcugcaugguagccc

SEQ ID NO: 95051 - RNA, 24 nt, Artificial Sequence
  Synthetic
uugcuaauugcugcaugguagccc

SEQ ID NO: 95052 - RNA, 18 nt, Artificial Sequence
  Synthetic
uucuaggcuuauuagccc

SEQ ID NO: 95053 - RNA, 22 nt, Artificial Sequence
  Synthetic
uggguucuaggcuuauuagccc

SEQ ID NO: 95054 - RNA, 23 nt, Artificial Sequence
  Synthetic
cuggguucuaggcuuauuagccc

SEQ ID NO: 95055 - RNA, 24 nt, Artificial Sequence
  Synthetic
ucuggguucuaggcuuauuagccc

SEQ ID NO: 95056 - RNA, 18 nt, Artificial Sequence
  Synthetic
cuuuggauuacaaggccc

SEQ ID NO: 95057 - RNA, 19 nt, Artificial Sequence
  Synthetic
ucuuuggauuacaaggccc

SEQ ID NO: 95058 - RNA, 20 nt, Artificial Sequence
  Synthetic
cucuuuggauuacaaggccc

SEQ ID NO: 95059 - RNA, 21 nt, Artificial Sequence
  Synthetic
ucucuuuggauuacaaggccc

SEQ ID NO: 95060 - RNA, 22 nt, Artificial Sequence
  Synthetic
cucucuuuggauuacaaggccc

SEQ ID NO: 95061 - RNA, 23 nt, Artificial Sequence
  Synthetic
ucucucuuuggauuacaaggccc

SEQ ID NO: 95062 - RNA, 24 nt, Artificial Sequence
  Synthetic
cucucucuuuggauuacaaggccc

SEQ ID NO: 95063 - RNA, 20 nt, Artificial Sequence
  Synthetic
uggcagaucucggugggccc

SEQ ID NO: 95064 - RNA, 21 nt, Artificial Sequence
  Synthetic
uuggcagaucucggugggccc

SEQ ID NO: 95065 - RNA, 22 nt, Artificial Sequence
  Synthetic
uuuggcagaucucggugggccc

SEQ ID NO: 95066 - RNA, 23 nt, Artificial Sequence
  Synthetic
auuuggcagaucucggugggccc

SEQ ID NO: 95067 - RNA, 24 nt, Artificial Sequence
  Synthetic
aauuuggcagaucucggugggccc

SEQ ID NO: 95068 - RNA, 18 nt, Artificial Sequence
  Synthetic
ucacacagccaacugccc

SEQ ID NO: 95069 - RNA, 19 nt, Artificial Sequence
  Synthetic
cucacacagccaacugccc

SEQ ID NO: 95070 - RNA, 20 nt, Artificial Sequence
  Synthetic
acucacacagccaacugccc

SEQ ID NO: 95071 - RNA, 22 nt, Artificial Sequence
  Synthetic
agacucacacagccaacugccc

SEQ ID NO: 95072 - RNA, 23 nt, Artificial Sequence
  Synthetic
cagacucacacagccaacugccc

SEQ ID NO: 95073 - RNA, 24 nt, Artificial Sequence
  Synthetic
ucagacucacacagccaacugccc

SEQ ID NO: 95074 - RNA, 18 nt, Artificial Sequence
  Synthetic
ccauuaauugggcugccc

SEQ ID NO: 95075 - RNA, 19 nt, Artificial Sequence
  Synthetic
uccauuaauugggcugccc

SEQ ID NO: 95076 - RNA, 20 nt, Artificial Sequence
  Synthetic
cuccauuaauugggcugccc

SEQ ID NO: 95077 - RNA, 22 nt, Artificial Sequence
  Synthetic
cgcuccauuaauugggcugccc

SEQ ID NO: 95078 - RNA, 23 nt, Artificial Sequence
  Synthetic
ucgcuccauuaauugggcugccc

SEQ ID NO: 95079 - RNA, 24 nt, Artificial Sequence
  Synthetic
cucgcuccauuaauugggcugccc

SEQ ID NO: 95080 - RNA, 18 nt, Artificial Sequence
  Synthetic
aucuuauguuacuugccc

SEQ ID NO: 95081 - RNA, 19 nt, Artificial Sequence
  Synthetic
uaucuuauguuacuugccc

SEQ ID NO: 95082 - RNA, 20 nt, Artificial Sequence
  Synthetic
auaucuuauguuacuugccc

SEQ ID NO: 95083 - RNA, 21 nt, Artificial Sequence
  Synthetic
aauaucuuauguuacuugccc

SEQ ID NO: 95084 - RNA, 22 nt, Artificial Sequence
  Synthetic
aaauaucuuauguuacuugccc

SEQ ID NO: 95085 - RNA, 23 nt, Artificial Sequence
  Synthetic
uaaauaucuuauguuacuugccc

SEQ ID NO: 95086 - RNA, 24 nt, Artificial Sequence
  Synthetic
cuaaauaucuuauguuacuugccc

SEQ ID NO: 95087 - RNA, 19 nt, Artificial Sequence
  Synthetic
agaucaagauggaaauccc

SEQ ID NO: 95088 - RNA, 21 nt, Artificial Sequence
  Synthetic
agagaucaagauggaaauccc

SEQ ID NO: 95089 - RNA, 22 nt, Artificial Sequence
  Synthetic
cagagaucaagauggaaauccc

SEQ ID NO: 95090 - RNA, 23 nt, Artificial Sequence
  Synthetic
ucagagaucaagauggaaauccc

SEQ ID NO: 95091 - RNA, 18 nt, Artificial Sequence
  Synthetic
cuaauggagaacaauccc

SEQ ID NO: 95092 - RNA, 19 nt, Artificial Sequence
  Synthetic
ccuaauggagaacaauccc

SEQ ID NO: 95093 - RNA, 21 nt, Artificial Sequence
  Synthetic
agccuaauggagaacaauccc

SEQ ID NO: 95094 - RNA, 22 nt, Artificial Sequence
  Synthetic
uagccuaauggagaacaauccc

SEQ ID NO: 95095 - RNA, 23 nt, Artificial Sequence
  Synthetic
uuagccuaauggagaacaauccc

SEQ ID NO: 95096 - RNA, 24 nt, Artificial Sequence
  Synthetic
uuuagccuaauggagaacaauccc

SEQ ID NO: 95097 - RNA, 18 nt, Artificial Sequence
  Synthetic
uggcgauauaaacauccc

SEQ ID NO: 95098 - RNA, 19 nt, Artificial Sequence
  Synthetic
auggcgauauaaacauccc

SEQ ID NO: 95099 - RNA, 20 nt, Artificial Sequence
  Synthetic
uauggcgauauaaacauccc

SEQ ID NO: 95100 - RNA, 21 nt, Artificial Sequence
  Synthetic
cuauggcgauauaaacauccc

SEQ ID NO: 95101 - RNA, 23 nt, Artificial Sequence
  Synthetic
ugcuauggcgauauaaacauccc

SEQ ID NO: 95102 - RNA, 24 nt, Artificial Sequence
  Synthetic
uugcuauggcgauauaaacauccc

SEQ ID NO: 95103 - RNA, 18 nt, Artificial Sequence
  Synthetic
ugauaugggugacauccc

SEQ ID NO: 95104 - RNA, 19 nt, Artificial Sequence
  Synthetic
augauaugggugacauccc

SEQ ID NO: 95105 - RNA, 20 nt, Artificial Sequence
  Synthetic
aaugauaugggugacauccc

SEQ ID NO: 95106 - RNA, 21 nt, Artificial Sequence
  Synthetic
aaaugauaugggugacauccc

SEQ ID NO: 95107 - RNA, 24 nt, Artificial Sequence
  Synthetic
aggaaaugauaugggugacauccc

SEQ ID NO: 95108 - RNA, 19 nt, Artificial Sequence
  Synthetic
aggaaguaacccauauccc

SEQ ID NO: 95109 - RNA, 20 nt, Artificial Sequence
  Synthetic
caggaaguaacccauauccc

SEQ ID NO: 95110 - RNA, 21 nt, Artificial Sequence
  Synthetic
ccaggaaguaacccauauccc

SEQ ID NO: 95111 - RNA, 22 nt, Artificial Sequence
  Synthetic
cccaggaaguaacccauauccc

SEQ ID NO: 95112 - RNA, 24 nt, Artificial Sequence
  Synthetic
agcccaggaaguaacccauauccc

SEQ ID NO: 95113 - RNA, 18 nt, Artificial Sequence
  Synthetic
ugauccauauuguauccc

SEQ ID NO: 95114 - RNA, 19 nt, Artificial Sequence
  Synthetic
uugauccauauuguauccc

SEQ ID NO: 95115 - RNA, 20 nt, Artificial Sequence
  Synthetic
cuugauccauauuguauccc

SEQ ID NO: 95116 - RNA, 18 nt, Artificial Sequence
  Synthetic
uacuuaguuuccacuccc

SEQ ID NO: 95117 - RNA, 19 nt, Artificial Sequence
  Synthetic
uuacuuaguuuccacuccc

SEQ ID NO: 95118 - RNA, 20 nt, Artificial Sequence
  Synthetic
uuuacuuaguuuccacuccc

SEQ ID NO: 95119 - RNA, 21 nt, Artificial Sequence
  Synthetic
uuuuacuuaguuuccacuccc

SEQ ID NO: 95120 - RNA, 22 nt, Artificial Sequence
  Synthetic
uuuuuacuuaguuuccacuccc

SEQ ID NO: 95121 - RNA, 23 nt, Artificial Sequence
  Synthetic
uuuuuuacuuaguuuccacuccc

SEQ ID NO: 95122 - RNA, 24 nt, Artificial Sequence
  Synthetic
uuuuuuuacuuaguuuccacuccc

SEQ ID NO: 95123 - RNA, 18 nt, Artificial Sequence
  Synthetic
cucaauuuaaugacuccc

SEQ ID NO: 95124 - RNA, 19 nt, Artificial Sequence
  Synthetic
ccucaauuuaaugacuccc

SEQ ID NO: 95125 - RNA, 20 nt, Artificial Sequence
  Synthetic
accucaauuuaaugacuccc

SEQ ID NO: 95126 - RNA, 21 nt, Artificial Sequence
  Synthetic
uaccucaauuuaaugacuccc

SEQ ID NO: 95127 - RNA, 24 nt, Artificial Sequence
  Synthetic
agguaccucaauuuaaugacuccc

SEQ ID NO: 95128 - RNA, 22 nt, Artificial Sequence
  Synthetic
uggggagcacagaucuacuccc

SEQ ID NO: 95129 - RNA, 23 nt, Artificial Sequence
  Synthetic
uuggggagcacagaucuacuccc

SEQ ID NO: 95130 - RNA, 24 nt, Artificial Sequence
  Synthetic
uuuggggagcacagaucuacuccc

SEQ ID NO: 95131 - RNA, 18 nt, Artificial Sequence
  Synthetic
agaguaguccucucuccc

SEQ ID NO: 95132 - RNA, 19 nt, Artificial Sequence
  Synthetic
cagaguaguccucucuccc

SEQ ID NO: 95133 - RNA, 20 nt, Artificial Sequence
  Synthetic
ccagaguaguccucucuccc

SEQ ID NO: 95134 - RNA, 23 nt, Artificial Sequence
  Synthetic
aggccagaguaguccucucuccc

SEQ ID NO: 95135 - RNA, 24 nt, Artificial Sequence
  Synthetic
uaggccagaguaguccucucuccc

SEQ ID NO: 95136 - RNA, 18 nt, Artificial Sequence
  Synthetic
acauuucugcucucuccc

SEQ ID NO: 95137 - RNA, 19 nt, Artificial Sequence
  Synthetic
uacauuucugcucucuccc

SEQ ID NO: 95138 - RNA, 20 nt, Artificial Sequence
  Synthetic
cuacauuucugcucucuccc

SEQ ID NO: 95139 - RNA, 22 nt, Artificial Sequence
  Synthetic
ugcuacauuucugcucucuccc

SEQ ID NO: 95140 - RNA, 23 nt, Artificial Sequence
  Synthetic
cugcuacauuucugcucucuccc

SEQ ID NO: 95141 - RNA, 24 nt, Artificial Sequence
  Synthetic
acugcuacauuucugcucucuccc

SEQ ID NO: 95142 - RNA, 18 nt, Artificial Sequence
  Synthetic
uuucaacuggucucuccc

SEQ ID NO: 95143 - RNA, 19 nt, Artificial Sequence
  Synthetic
uuuucaacuggucucuccc

SEQ ID NO: 95144 - RNA, 20 nt, Artificial Sequence
  Synthetic
cuuuucaacuggucucuccc

SEQ ID NO: 95145 - RNA, 21 nt, Artificial Sequence
  Synthetic
acuuuucaacuggucucuccc

SEQ ID NO: 95146 - RNA, 22 nt, Artificial Sequence
  Synthetic
uacuuuucaacuggucucuccc

SEQ ID NO: 95147 - RNA, 23 nt, Artificial Sequence
  Synthetic
uuacuuuucaacuggucucuccc

SEQ ID NO: 95148 - RNA, 18 nt, Artificial Sequence
  Synthetic
ugagaaauuuuaaguccc

SEQ ID NO: 95149 - RNA, 19 nt, Artificial Sequence
  Synthetic
cugagaaauuuuaaguccc

SEQ ID NO: 95150 - RNA, 20 nt, Artificial Sequence
  Synthetic
ucugagaaauuuuaaguccc

SEQ ID NO: 95151 - RNA, 21 nt, Artificial Sequence
  Synthetic
cucugagaaauuuuaaguccc

SEQ ID NO: 95152 - RNA, 22 nt, Artificial Sequence
  Synthetic
ccucugagaaauuuuaaguccc

SEQ ID NO: 95153 - RNA, 24 nt, Artificial Sequence
  Synthetic
ugccucugagaaauuuuaaguccc

SEQ ID NO: 95154 - RNA, 18 nt, Artificial Sequence
  Synthetic
aaucaaaaauauaguccc

SEQ ID NO: 95155 - RNA, 19 nt, Artificial Sequence
  Synthetic
aaaucaaaaauauaguccc

SEQ ID NO: 95156 - RNA, 21 nt, Artificial Sequence
  Synthetic
ugaaaucaaaaauauaguccc

SEQ ID NO: 95157 - RNA, 22 nt, Artificial Sequence
  Synthetic
augaaaucaaaaauauaguccc

SEQ ID NO: 95158 - RNA, 23 nt, Artificial Sequence
  Synthetic
caugaaaucaaaaauauaguccc

SEQ ID NO: 95159 - RNA, 24 nt, Artificial Sequence
  Synthetic
acaugaaaucaaaaauauaguccc

SEQ ID NO: 95160 - RNA, 19 nt, Artificial Sequence
  Synthetic
ugauuguuauaguaguccc

SEQ ID NO: 95161 - RNA, 20 nt, Artificial Sequence
  Synthetic
uugauuguuauaguaguccc

SEQ ID NO: 95162 - RNA, 21 nt, Artificial Sequence
  Synthetic
auugauuguuauaguaguccc

SEQ ID NO: 95163 - RNA, 22 nt, Artificial Sequence
  Synthetic
aauugauuguuauaguaguccc

SEQ ID NO: 95164 - RNA, 23 nt, Artificial Sequence
  Synthetic
caauugauuguuauaguaguccc

SEQ ID NO: 95165 - RNA, 24 nt, Artificial Sequence
  Synthetic
acaauugauuguuauaguaguccc

SEQ ID NO: 95166 - RNA, 18 nt, Artificial Sequence
  Synthetic
ucaaggagaucccguccc

SEQ ID NO: 95167 - RNA, 19 nt, Artificial Sequence
  Synthetic
uucaaggagaucccguccc

SEQ ID NO: 95168 - RNA, 20 nt, Artificial Sequence
  Synthetic
uuucaaggagaucccguccc

SEQ ID NO: 95169 - RNA, 21 nt, Artificial Sequence
  Synthetic
cuuucaaggagaucccguccc

SEQ ID NO: 95170 - RNA, 24 nt, Artificial Sequence
  Synthetic
uggcuuucaaggagaucccguccc

SEQ ID NO: 95171 - RNA, 18 nt, Artificial Sequence
  Synthetic
acuaaacaauuugguccc

SEQ ID NO: 95172 - RNA, 19 nt, Artificial Sequence
  Synthetic
cacuaaacaauuugguccc

SEQ ID NO: 95173 - RNA, 20 nt, Artificial Sequence
  Synthetic
ucacuaaacaauuugguccc

SEQ ID NO: 95174 - RNA, 21 nt, Artificial Sequence
  Synthetic
aucacuaaacaauuugguccc

SEQ ID NO: 95175 - RNA, 22 nt, Artificial Sequence
  Synthetic
aaucacuaaacaauuugguccc

SEQ ID NO: 95176 - RNA, 23 nt, Artificial Sequence
  Synthetic
aaaucacuaaacaauuugguccc

SEQ ID NO: 95177 - RNA, 24 nt, Artificial Sequence
  Synthetic
aaaaucacuaaacaauuugguccc

SEQ ID NO: 95178 - RNA, 19 nt, Artificial Sequence
  Synthetic
ugauacagaaaaauguccc

SEQ ID NO: 95179 - RNA, 20 nt, Artificial Sequence
  Synthetic
cugauacagaaaaauguccc

SEQ ID NO: 95180 - RNA, 23 nt, Artificial Sequence
  Synthetic
uggcugauacagaaaaauguccc

SEQ ID NO: 95181 - RNA, 24 nt, Artificial Sequence
  Synthetic
cuggcugauacagaaaaauguccc

SEQ ID NO: 95182 - RNA, 19 nt, Artificial Sequence
  Synthetic
agaauuuuucaaauguccc

SEQ ID NO: 95183 - RNA, 20 nt, Artificial Sequence
  Synthetic
uagaauuuuucaaauguccc

SEQ ID NO: 95184 - RNA, 22 nt, Artificial Sequence
  Synthetic
uguagaauuuuucaaauguccc

SEQ ID NO: 95185 - RNA, 23 nt, Artificial Sequence
  Synthetic
auguagaauuuuucaaauguccc

SEQ ID NO: 95186 - RNA, 24 nt, Artificial Sequence
  Synthetic
aauguagaauuuuucaaauguccc

SEQ ID NO: 95187 - RNA, 21 nt, Artificial Sequence
  Synthetic
agccccagaaggccauguccc

SEQ ID NO: 95188 - RNA, 22 nt, Artificial Sequence
  Synthetic
uagccccagaaggccauguccc

SEQ ID NO: 95189 - RNA, 23 nt, Artificial Sequence
  Synthetic
cuagccccagaaggccauguccc

SEQ ID NO: 95190 - RNA, 24 nt, Artificial Sequence
  Synthetic
ucuagccccagaaggccauguccc

SEQ ID NO: 95191 - RNA, 18 nt, Artificial Sequence
  Synthetic
uucugauuuaaaauuccc

SEQ ID NO: 95192 - RNA, 19 nt, Artificial Sequence
  Synthetic
uuucugauuuaaaauuccc

SEQ ID NO: 95193 - RNA, 20 nt, Artificial Sequence
  Synthetic
cuuucugauuuaaaauuccc

SEQ ID NO: 95194 - RNA, 21 nt, Artificial Sequence
  Synthetic
ucuuucugauuuaaaauuccc

SEQ ID NO: 95195 - RNA, 22 nt, Artificial Sequence
  Synthetic
uucuuucugauuuaaaauuccc

SEQ ID NO: 95196 - RNA, 23 nt, Artificial Sequence
  Synthetic
cuucuuucugauuuaaaauuccc

SEQ ID NO: 95197 - RNA, 24 nt, Artificial Sequence
  Synthetic
ucuucuuucugauuuaaaauuccc

SEQ ID NO: 95198 - RNA, 18 nt, Artificial Sequence
  Synthetic
cuacauagaaacauuccc

SEQ ID NO: 95199 - RNA, 19 nt, Artificial Sequence
  Synthetic
acuacauagaaacauuccc

SEQ ID NO: 95200 - RNA, 20 nt, Artificial Sequence
  Synthetic
aacuacauagaaacauuccc

SEQ ID NO: 95201 - RNA, 21 nt, Artificial Sequence
  Synthetic
aaacuacauagaaacauuccc

SEQ ID NO: 95202 - RNA, 22 nt, Artificial Sequence
  Synthetic
aaaacuacauagaaacauuccc

SEQ ID NO: 95203 - RNA, 24 nt, Artificial Sequence
  Synthetic
agaaaacuacauagaaacauuccc

SEQ ID NO: 95204 - RNA, 21 nt, Artificial Sequence
  Synthetic
aauuuauaaaugugcauuccc

SEQ ID NO: 95205 - RNA, 22 nt, Artificial Sequence
  Synthetic
uaauuuauaaaugugcauuccc

SEQ ID NO: 95206 - RNA, 23 nt, Artificial Sequence
  Synthetic
auaauuuauaaaugugcauuccc

SEQ ID NO: 95207 - RNA, 24 nt, Artificial Sequence
  Synthetic
cauaauuuauaaaugugcauuccc

SEQ ID NO: 95208 - RNA, 18 nt, Artificial Sequence
  Synthetic
cagucauacucuauuccc

SEQ ID NO: 95209 - RNA, 19 nt, Artificial Sequence
  Synthetic
ucagucauacucuauuccc

SEQ ID NO: 95210 - RNA, 20 nt, Artificial Sequence
  Synthetic
uucagucauacucuauuccc

SEQ ID NO: 95211 - RNA, 21 nt, Artificial Sequence
  Synthetic
auucagucauacucuauuccc

SEQ ID NO: 95212 - RNA, 22 nt, Artificial Sequence
  Synthetic
cauucagucauacucuauuccc

SEQ ID NO: 95213 - RNA, 24 nt, Artificial Sequence
  Synthetic
ugcauucagucauacucuauuccc

SEQ ID NO: 95214 - RNA, 18 nt, Artificial Sequence
  Synthetic
uagaguugcucuauuccc

SEQ ID NO: 95215 - RNA, 19 nt, Artificial Sequence
  Synthetic
uuagaguugcucuauuccc

SEQ ID NO: 95216 - RNA, 20 nt, Artificial Sequence
  Synthetic
auuagaguugcucuauuccc

SEQ ID NO: 95217 - RNA, 23 nt, Artificial Sequence
  Synthetic
aggauuagaguugcucuauuccc

SEQ ID NO: 95218 - RNA, 24 nt, Artificial Sequence
  Synthetic
caggauuagaguugcucuauuccc

SEQ ID NO: 95219 - RNA, 18 nt, Artificial Sequence
  Synthetic
ccuggaaauuuuauuccc

SEQ ID NO: 95220 - RNA, 19 nt, Artificial Sequence
  Synthetic
accuggaaauuuuauuccc

SEQ ID NO: 95221 - RNA, 21 nt, Artificial Sequence
  Synthetic
ugaccuggaaauuuuauuccc

SEQ ID NO: 95222 - RNA, 22 nt, Artificial Sequence
  Synthetic
uugaccuggaaauuuuauuccc

SEQ ID NO: 95223 - RNA, 23 nt, Artificial Sequence
  Synthetic
uuugaccuggaaauuuuauuccc

SEQ ID NO: 95224 - RNA, 24 nt, Artificial Sequence
  Synthetic
cuuugaccuggaaauuuuauuccc

SEQ ID NO: 95225 - RNA, 19 nt, Artificial Sequence
  Synthetic
agagggggaagaacuuccc

SEQ ID NO: 95226 - RNA, 20 nt, Artificial Sequence
  Synthetic
cagagggggaagaacuuccc

SEQ ID NO: 95227 - RNA, 21 nt, Artificial Sequence
  Synthetic
ccagagggggaagaacuuccc

SEQ ID NO: 95228 - RNA, 22 nt, Artificial Sequence
  Synthetic
accagagggggaagaacuuccc

SEQ ID NO: 95229 - RNA, 23 nt, Artificial Sequence
  Synthetic
aaccagagggggaagaacuuccc

SEQ ID NO: 95230 - RNA, 24 nt, Artificial Sequence
  Synthetic
aaaccagagggggaagaacuuccc

SEQ ID NO: 95231 - RNA, 18 nt, Artificial Sequence
  Synthetic
uccaaaaaguaacuuccc

SEQ ID NO: 95232 - RNA, 19 nt, Artificial Sequence
  Synthetic
auccaaaaaguaacuuccc

SEQ ID NO: 95233 - RNA, 20 nt, Artificial Sequence
  Synthetic
cauccaaaaaguaacuuccc

SEQ ID NO: 95234 - RNA, 22 nt, Artificial Sequence
  Synthetic
agcauccaaaaaguaacuuccc

SEQ ID NO: 95235 - RNA, 23 nt, Artificial Sequence
  Synthetic
cagcauccaaaaaguaacuuccc

SEQ ID NO: 95236 - RNA, 24 nt, Artificial Sequence
  Synthetic
acagcauccaaaaaguaacuuccc

SEQ ID NO: 95237 - RNA, 18 nt, Artificial Sequence
  Synthetic
caacagcacugacuuccc

SEQ ID NO: 95238 - RNA, 19 nt, Artificial Sequence
  Synthetic
ccaacagcacugacuuccc

SEQ ID NO: 95239 - RNA, 20 nt, Artificial Sequence
  Synthetic
uccaacagcacugacuuccc

SEQ ID NO: 95240 - RNA, 21 nt, Artificial Sequence
  Synthetic
cuccaacagcacugacuuccc

SEQ ID NO: 95241 - RNA, 22 nt, Artificial Sequence
  Synthetic
ucuccaacagcacugacuuccc

SEQ ID NO: 95242 - RNA, 23 nt, Artificial Sequence
  Synthetic
aucuccaacagcacugacuuccc

SEQ ID NO: 95243 - RNA, 18 nt, Artificial Sequence
  Synthetic
uugaaaaccucucuuccc

SEQ ID NO: 95244 - RNA, 19 nt, Artificial Sequence
  Synthetic
cuugaaaaccucucuuccc

SEQ ID NO: 95245 - RNA, 20 nt, Artificial Sequence
  Synthetic
ucuugaaaaccucucuuccc

SEQ ID NO: 95246 - RNA, 21 nt, Artificial Sequence
  Synthetic
uucuugaaaaccucucuuccc

SEQ ID NO: 95247 - RNA, 22 nt, Artificial Sequence
  Synthetic
uuucuugaaaaccucucuuccc

SEQ ID NO: 95248 - RNA, 23 nt, Artificial Sequence
  Synthetic
uuuucuugaaaaccucucuuccc

SEQ ID NO: 95249 - RNA, 24 nt, Artificial Sequence
  Synthetic
uuuuucuugaaaaccucucuuccc

SEQ ID NO: 95250 - RNA, 21 nt, Artificial Sequence
  Synthetic
aauguagaaaaauauguuccc

SEQ ID NO: 95251 - RNA, 22 nt, Artificial Sequence
  Synthetic
aaauguagaaaaauauguuccc

SEQ ID NO: 95252 - RNA, 18 nt, Artificial Sequence
  Synthetic
aauagccauacuguuccc

SEQ ID NO: 95253 - RNA, 19 nt, Artificial Sequence
  Synthetic
caauagccauacuguuccc

SEQ ID NO: 95254 - RNA, 20 nt, Artificial Sequence
  Synthetic
ucaauagccauacuguuccc

SEQ ID NO: 95255 - RNA, 21 nt, Artificial Sequence
  Synthetic
aucaauagccauacuguuccc

SEQ ID NO: 95256 - RNA, 22 nt, Artificial Sequence
  Synthetic
uaucaauagccauacuguuccc

SEQ ID NO: 95257 - RNA, 24 nt, Artificial Sequence
  Synthetic
cguaucaauagccauacuguuccc

SEQ ID NO: 95258 - RNA, 19 nt, Artificial Sequence
  Synthetic
uggaggugccauuguuccc

SEQ ID NO: 95259 - RNA, 21 nt, Artificial Sequence
  Synthetic
uguggaggugccauuguuccc

SEQ ID NO: 95260 - RNA, 22 nt, Artificial Sequence
  Synthetic
auguggaggugccauuguuccc

SEQ ID NO: 95261 - RNA, 23 nt, Artificial Sequence
  Synthetic
aauguggaggugccauuguuccc

SEQ ID NO: 95262 - RNA, 24 nt, Artificial Sequence
  Synthetic
aaauguggaggugccauuguuccc

SEQ ID NO: 95263 - RNA, 19 nt, Artificial Sequence
  Synthetic
ugggcaucuacucuuuccc

SEQ ID NO: 95264 - RNA, 20 nt, Artificial Sequence
  Synthetic
augggcaucuacucuuuccc

SEQ ID NO: 95265 - RNA, 21 nt, Artificial Sequence
  Synthetic
uaugggcaucuacucuuuccc

SEQ ID NO: 95266 - RNA, 22 nt, Artificial Sequence
  Synthetic
auaugggcaucuacucuuuccc

SEQ ID NO: 95267 - RNA, 23 nt, Artificial Sequence
  Synthetic
cauaugggcaucuacucuuuccc

SEQ ID NO: 95268 - RNA, 24 nt, Artificial Sequence
  Synthetic
acauaugggcaucuacucuuuccc

SEQ ID NO: 95269 - RNA, 18 nt, Artificial Sequence
  Synthetic
ugggaugaauaguuuccc

SEQ ID NO: 95270 - RNA, 21 nt, Artificial Sequence
  Synthetic
uggugggaugaauaguuuccc

SEQ ID NO: 95271 - RNA, 23 nt, Artificial Sequence
  Synthetic
uguggugggaugaauaguuuccc

SEQ ID NO: 95272 - RNA, 24 nt, Artificial Sequence
  Synthetic
auguggugggaugaauaguuuccc

SEQ ID NO: 95273 - RNA, 18 nt, Artificial Sequence
  Synthetic
auauauggcauaaaagcc

SEQ ID NO: 95274 - RNA, 19 nt, Artificial Sequence
  Synthetic
cauauauggcauaaaagcc

SEQ ID NO: 95275 - RNA, 20 nt, Artificial Sequence
  Synthetic
acauauauggcauaaaagcc

SEQ ID NO: 95276 - RNA, 21 nt, Artificial Sequence
  Synthetic
cacauauauggcauaaaagcc

SEQ ID NO: 95277 - RNA, 22 nt, Artificial Sequence
  Synthetic
acacauauauggcauaaaagcc

SEQ ID NO: 95278 - RNA, 23 nt, Artificial Sequence
  Synthetic
aacacauauauggcauaaaagcc

SEQ ID NO: 95279 - RNA, 24 nt, Artificial Sequence
  Synthetic
aaacacauauauggcauaaaagcc

SEQ ID NO: 95280 - RNA, 18 nt, Artificial Sequence
  Synthetic
uuucaaaauauaaaagcc

SEQ ID NO: 95281 - RNA, 19 nt, Artificial Sequence
  Synthetic
uuuucaaaauauaaaagcc

SEQ ID NO: 95282 - RNA, 20 nt, Artificial Sequence
  Synthetic
cuuuucaaaauauaaaagcc

SEQ ID NO: 95283 - RNA, 22 nt, Artificial Sequence
  Synthetic
agcuuuucaaaauauaaaagcc

SEQ ID NO: 95284 - RNA, 18 nt, Artificial Sequence
  Synthetic
uucugauggcuccaagcc

SEQ ID NO: 95285 - RNA, 19 nt, Artificial Sequence
  Synthetic
cuucugauggcuccaagcc

SEQ ID NO: 95286 - RNA, 20 nt, Artificial Sequence
  Synthetic
ucuucugauggcuccaagcc

SEQ ID NO: 95287 - RNA, 21 nt, Artificial Sequence
  Synthetic
aucuucugauggcuccaagcc

SEQ ID NO: 95288 - RNA, 22 nt, Artificial Sequence
  Synthetic
caucuucugauggcuccaagcc

SEQ ID NO: 95289 - RNA, 23 nt, Artificial Sequence
  Synthetic
ccaucuucugauggcuccaagcc

SEQ ID NO: 95290 - RNA, 24 nt, Artificial Sequence
  Synthetic
accaucuucugauggcuccaagcc

SEQ ID NO: 95291 - RNA, 18 nt, Artificial Sequence
  Synthetic
uguuauaaagaauaagcc

SEQ ID NO: 95292 - RNA, 19 nt, Artificial Sequence
  Synthetic
cuguuauaaagaauaagcc

SEQ ID NO: 95293 - RNA, 20 nt, Artificial Sequence
  Synthetic
ccuguuauaaagaauaagcc

SEQ ID NO: 95294 - RNA, 22 nt, Artificial Sequence
  Synthetic
agccuguuauaaagaauaagcc

SEQ ID NO: 95295 - RNA, 23 nt, Artificial Sequence
  Synthetic
aagccuguuauaaagaauaagcc

SEQ ID NO: 95296 - RNA, 18 nt, Artificial Sequence
  Synthetic
uuugcaacuauauaagcc

SEQ ID NO: 95297 - RNA, 19 nt, Artificial Sequence
  Synthetic
cuuugcaacuauauaagcc

SEQ ID NO: 95298 - RNA, 21 nt, Artificial Sequence
  Synthetic
ugcuuugcaacuauauaagcc

SEQ ID NO: 95299 - RNA, 22 nt, Artificial Sequence
  Synthetic
augcuuugcaacuauauaagcc

SEQ ID NO: 95300 - RNA, 23 nt, Artificial Sequence
  Synthetic
caugcuuugcaacuauauaagcc

SEQ ID NO: 95301 - RNA, 18 nt, Artificial Sequence
  Synthetic
aguaaaagcaccuaagcc

SEQ ID NO: 95302 - RNA, 19 nt, Artificial Sequence
  Synthetic
caguaaaagcaccuaagcc

SEQ ID NO: 95303 - RNA, 20 nt, Artificial Sequence
  Synthetic
ucaguaaaagcaccuaagcc

SEQ ID NO: 95304 - RNA, 22 nt, Artificial Sequence
  Synthetic
ugucaguaaaagcaccuaagcc

SEQ ID NO: 95305 - RNA, 23 nt, Artificial Sequence
  Synthetic
uugucaguaaaagcaccuaagcc

SEQ ID NO: 95306 - RNA, 24 nt, Artificial Sequence
  Synthetic
auugucaguaaaagcaccuaagcc

SEQ ID NO: 95307 - RNA, 19 nt, Artificial Sequence
  Synthetic
agaaacaagcauguaagcc

SEQ ID NO: 95308 - RNA, 20 nt, Artificial Sequence
  Synthetic
aagaaacaagcauguaagcc

SEQ ID NO: 95309 - RNA, 22 nt, Artificial Sequence
  Synthetic
agaagaaacaagcauguaagcc

SEQ ID NO: 95310 - RNA, 24 nt, Artificial Sequence
  Synthetic
ugagaagaaacaagcauguaagcc

SEQ ID NO: 95311 - RNA, 19 nt, Artificial Sequence
  Synthetic
ugaaauacauacaacagcc

SEQ ID NO: 95312 - RNA, 20 nt, Artificial Sequence
  Synthetic
uugaaauacauacaacagcc

SEQ ID NO: 95313 - RNA, 21 nt, Artificial Sequence
  Synthetic
uuugaaauacauacaacagcc

SEQ ID NO: 95314 - RNA, 22 nt, Artificial Sequence
  Synthetic
uuuugaaauacauacaacagcc

SEQ ID NO: 95315 - RNA, 23 nt, Artificial Sequence
  Synthetic
uuuuugaaauacauacaacagcc

SEQ ID NO: 95316 - RNA, 24 nt, Artificial Sequence
  Synthetic
cuuuuugaaauacauacaacagcc

SEQ ID NO: 95317 - RNA, 18 nt, Artificial Sequence
  Synthetic
cugcuuggaccaacagcc

SEQ ID NO: 95318 - RNA, 19 nt, Artificial Sequence
  Synthetic
ccugcuuggaccaacagcc

SEQ ID NO: 95319 - RNA, 21 nt, Artificial Sequence
  Synthetic
ugccugcuuggaccaacagcc

SEQ ID NO: 95320 - RNA, 22 nt, Artificial Sequence
  Synthetic
cugccugcuuggaccaacagcc

SEQ ID NO: 95321 - RNA, 23 nt, Artificial Sequence
  Synthetic
acugccugcuuggaccaacagcc

SEQ ID NO: 95322 - RNA, 24 nt, Artificial Sequence
  Synthetic
cacugccugcuuggaccaacagcc

SEQ ID NO: 95323 - RNA, 19 nt, Artificial Sequence
  Synthetic
ugggacugauuccacagcc

SEQ ID NO: 95324 - RNA, 20 nt, Artificial Sequence
  Synthetic
uugggacugauuccacagcc

SEQ ID NO: 95325 - RNA, 21 nt, Artificial Sequence
  Synthetic
uuugggacugauuccacagcc

SEQ ID NO: 95326 - RNA, 22 nt, Artificial Sequence
  Synthetic
uuuugggacugauuccacagcc

SEQ ID NO: 95327 - RNA, 23 nt, Artificial Sequence
  Synthetic
auuuugggacugauuccacagcc

SEQ ID NO: 95328 - RNA, 24 nt, Artificial Sequence
  Synthetic
cauuuugggacugauuccacagcc

SEQ ID NO: 95329 - RNA, 18 nt, Artificial Sequence
  Synthetic
cuauuuggggucacagcc

SEQ ID NO: 95330 - RNA, 19 nt, Artificial Sequence
  Synthetic
ucuauuuggggucacagcc

SEQ ID NO: 95331 - RNA, 20 nt, Artificial Sequence
  Synthetic
uucuauuuggggucacagcc

SEQ ID NO: 95332 - RNA, 21 nt, Artificial Sequence
  Synthetic
auucuauuuggggucacagcc

SEQ ID NO: 95333 - RNA, 22 nt, Artificial Sequence
  Synthetic
cauucuauuuggggucacagcc

SEQ ID NO: 95334 - RNA, 23 nt, Artificial Sequence
  Synthetic
ucauucuauuuggggucacagcc

SEQ ID NO: 95335 - RNA, 24 nt, Artificial Sequence
  Synthetic
cucauucuauuuggggucacagcc

SEQ ID NO: 95336 - RNA, 19 nt, Artificial Sequence
  Synthetic
agcuauugagcacccagcc

SEQ ID NO: 95337 - RNA, 20 nt, Artificial Sequence
  Synthetic
uagcuauugagcacccagcc

SEQ ID NO: 95338 - RNA, 22 nt, Artificial Sequence
  Synthetic
uguagcuauugagcacccagcc

SEQ ID NO: 95339 - RNA, 23 nt, Artificial Sequence
  Synthetic
auguagcuauugagcacccagcc

SEQ ID NO: 95340 - RNA, 24 nt, Artificial Sequence
  Synthetic
cauguagcuauugagcacccagcc

SEQ ID NO: 95341 - RNA, 18 nt, Artificial Sequence
  Synthetic
agucccaacugugcagcc

SEQ ID NO: 95342 - RNA, 19 nt, Artificial Sequence
  Synthetic
aagucccaacugugcagcc

SEQ ID NO: 95343 - RNA, 20 nt, Artificial Sequence
  Synthetic
caagucccaacugugcagcc

SEQ ID NO: 95344 - RNA, 21 nt, Artificial Sequence
  Synthetic
ucaagucccaacugugcagcc

SEQ ID NO: 95345 - RNA, 22 nt, Artificial Sequence
  Synthetic
aucaagucccaacugugcagcc

SEQ ID NO: 95346 - RNA, 23 nt, Artificial Sequence
  Synthetic
uaucaagucccaacugugcagcc

SEQ ID NO: 95347 - RNA, 24 nt, Artificial Sequence
  Synthetic
auaucaagucccaacugugcagcc

SEQ ID NO: 95348 - RNA, 18 nt, Artificial Sequence
  Synthetic
aucuuccauuuaagagcc

SEQ ID NO: 95349 - RNA, 19 nt, Artificial Sequence
  Synthetic
uaucuuccauuuaagagcc

SEQ ID NO: 95350 - RNA, 20 nt, Artificial Sequence
  Synthetic
auaucuuccauuuaagagcc

SEQ ID NO: 95351 - RNA, 21 nt, Artificial Sequence
  Synthetic
uauaucuuccauuuaagagcc

SEQ ID NO: 95352 - RNA, 22 nt, Artificial Sequence
  Synthetic
uuauaucuuccauuuaagagcc

SEQ ID NO: 95353 - RNA, 23 nt, Artificial Sequence
  Synthetic
cuuauaucuuccauuuaagagcc

SEQ ID NO: 95354 - RNA, 24 nt, Artificial Sequence
  Synthetic
ccuuauaucuuccauuuaagagcc

SEQ ID NO: 95355 - RNA, 18 nt, Artificial Sequence
  Synthetic
aauugcauauguagagcc

SEQ ID NO: 95356 - RNA, 21 nt, Artificial Sequence
  Synthetic
uggaauugcauauguagagcc

SEQ ID NO: 95357 - RNA, 22 nt, Artificial Sequence
  Synthetic
uuggaauugcauauguagagcc

SEQ ID NO: 95358 - RNA, 23 nt, Artificial Sequence
  Synthetic
auuggaauugcauauguagagcc

SEQ ID NO: 95359 - RNA, 24 nt, Artificial Sequence
  Synthetic
cauuggaauugcauauguagagcc

SEQ ID NO: 95360 - RNA, 18 nt, Artificial Sequence
  Synthetic
uagauacuaauuagagcc

SEQ ID NO: 95361 - RNA, 19 nt, Artificial Sequence
  Synthetic
auagauacuaauuagagcc

SEQ ID NO: 95362 - RNA, 20 nt, Artificial Sequence
  Synthetic
uauagauacuaauuagagcc

SEQ ID NO: 95363 - RNA, 21 nt, Artificial Sequence
  Synthetic
uuauagauacuaauuagagcc

SEQ ID NO: 95364 - RNA, 22 nt, Artificial Sequence
  Synthetic
cuuauagauacuaauuagagcc

SEQ ID NO: 95365 - RNA, 24 nt, Artificial Sequence
  Synthetic
ugcuuauagauacuaauuagagcc

SEQ ID NO: 95366 - RNA, 18 nt, Artificial Sequence
  Synthetic
aaugggcugguuagagcc

SEQ ID NO: 95367 - RNA, 19 nt, Artificial Sequence
  Synthetic
aaaugggcugguuagagcc

SEQ ID NO: 95368 - RNA, 20 nt, Artificial Sequence
  Synthetic
caaaugggcugguuagagcc

SEQ ID NO: 95369 - RNA, 21 nt, Artificial Sequence
  Synthetic
ucaaaugggcugguuagagcc

SEQ ID NO: 95370 - RNA, 22 nt, Artificial Sequence
  Synthetic
cucaaaugggcugguuagagcc

SEQ ID NO: 95371 - RNA, 23 nt, Artificial Sequence
  Synthetic
ccucaaaugggcugguuagagcc

SEQ ID NO: 95372 - RNA, 18 nt, Artificial Sequence
  Synthetic
uacucuaucugaggagcc

SEQ ID NO: 95373 - RNA, 19 nt, Artificial Sequence
  Synthetic
uuacucuaucugaggagcc

SEQ ID NO: 95374 - RNA, 20 nt, Artificial Sequence
  Synthetic
auuacucuaucugaggagcc

SEQ ID NO: 95375 - RNA, 21 nt, Artificial Sequence
  Synthetic
uauuacucuaucugaggagcc

SEQ ID NO: 95376 - RNA, 22 nt, Artificial Sequence
  Synthetic
uuauuacucuaucugaggagcc

SEQ ID NO: 95377 - RNA, 23 nt, Artificial Sequence
  Synthetic
uuuauuacucuaucugaggagcc

SEQ ID NO: 95378 - RNA, 18 nt, Artificial Sequence
  Synthetic
ugguugaggcagugagcc

SEQ ID NO: 95379 - RNA, 19 nt, Artificial Sequence
  Synthetic
augguugaggcagugagcc

SEQ ID NO: 95380 - RNA, 22 nt, Artificial Sequence
  Synthetic
uggaugguugaggcagugagcc

SEQ ID NO: 95381 - RNA, 23 nt, Artificial Sequence
  Synthetic
cuggaugguugaggcagugagcc

SEQ ID NO: 95382 - RNA, 24 nt, Artificial Sequence
  Synthetic
ccuggaugguugaggcagugagcc

SEQ ID NO: 95383 - RNA, 18 nt, Artificial Sequence
  Synthetic
ugagguauaccgugagcc

SEQ ID NO: 95384 - RNA, 20 nt, Artificial Sequence
  Synthetic
cgugagguauaccgugagcc

SEQ ID NO: 95385 - RNA, 21 nt, Artificial Sequence
  Synthetic
ucgugagguauaccgugagcc

SEQ ID NO: 95386 - RNA, 22 nt, Artificial Sequence
  Synthetic
aucgugagguauaccgugagcc

SEQ ID NO: 95387 - RNA, 18 nt, Artificial Sequence
  Synthetic
aaguagguagcaguagcc

SEQ ID NO: 95388 - RNA, 22 nt, Artificial Sequence
  Synthetic
ugggaaguagguagcaguagcc

SEQ ID NO: 95389 - RNA, 23 nt, Artificial Sequence
  Synthetic
cugggaaguagguagcaguagcc

SEQ ID NO: 95390 - RNA, 18 nt, Artificial Sequence
  Synthetic
uucacugugaguguagcc

SEQ ID NO: 95391 - RNA, 19 nt, Artificial Sequence
  Synthetic
auucacugugaguguagcc

SEQ ID NO: 95392 - RNA, 21 nt, Artificial Sequence
  Synthetic
ugauucacugugaguguagcc

SEQ ID NO: 95393 - RNA, 22 nt, Artificial Sequence
  Synthetic
augauucacugugaguguagcc

SEQ ID NO: 95394 - RNA, 23 nt, Artificial Sequence
  Synthetic
aaugauucacugugaguguagcc

SEQ ID NO: 95395 - RNA, 24 nt, Artificial Sequence
  Synthetic
aaaugauucacugugaguguagcc

SEQ ID NO: 95396 - RNA, 18 nt, Artificial Sequence
  Synthetic
uuagagacucuaugcgcc

SEQ ID NO: 95397 - RNA, 19 nt, Artificial Sequence
  Synthetic
uuuagagacucuaugcgcc

SEQ ID NO: 95398 - RNA, 20 nt, Artificial Sequence
  Synthetic
auuuagagacucuaugcgcc

SEQ ID NO: 95399 - RNA, 21 nt, Artificial Sequence
  Synthetic
cauuuagagacucuaugcgcc

SEQ ID NO: 95400 - RNA, 23 nt, Artificial Sequence
  Synthetic
ugcauuuagagacucuaugcgcc

SEQ ID NO: 95401 - RNA, 24 nt, Artificial Sequence
  Synthetic
uugcauuuagagacucuaugcgcc

SEQ ID NO: 95402 - RNA, 21 nt, Artificial Sequence
  Synthetic
ccagaggugaagaaacaggcc

SEQ ID NO: 95403 - RNA, 22 nt, Artificial Sequence
  Synthetic
uccagaggugaagaaacaggcc

SEQ ID NO: 95404 - RNA, 23 nt, Artificial Sequence
  Synthetic
uuccagaggugaagaaacaggcc

SEQ ID NO: 95405 - RNA, 24 nt, Artificial Sequence
  Synthetic
cuuccagaggugaagaaacaggcc

SEQ ID NO: 95406 - RNA, 18 nt, Artificial Sequence
  Synthetic
uucacaggagcagaggcc

SEQ ID NO: 95407 - RNA, 19 nt, Artificial Sequence
  Synthetic
cuucacaggagcagaggcc

SEQ ID NO: 95408 - RNA, 20 nt, Artificial Sequence
  Synthetic
acuucacaggagcagaggcc

SEQ ID NO: 95409 - RNA, 21 nt, Artificial Sequence
  Synthetic
aacuucacaggagcagaggcc

SEQ ID NO: 95410 - RNA, 23 nt, Artificial Sequence
  Synthetic
ugaacuucacaggagcagaggcc

SEQ ID NO: 95411 - RNA, 18 nt, Artificial Sequence
  Synthetic
cucuaggcucuagaggcc

SEQ ID NO: 95412 - RNA, 19 nt, Artificial Sequence
  Synthetic
acucuaggcucuagaggcc

SEQ ID NO: 95413 - RNA, 20 nt, Artificial Sequence
  Synthetic
cacucuaggcucuagaggcc

SEQ ID NO: 95414 - RNA, 21 nt, Artificial Sequence
  Synthetic
acacucuaggcucuagaggcc

SEQ ID NO: 95415 - RNA, 22 nt, Artificial Sequence
  Synthetic
uacacucuaggcucuagaggcc

SEQ ID NO: 95416 - RNA, 23 nt, Artificial Sequence
  Synthetic
cuacacucuaggcucuagaggcc

SEQ ID NO: 95417 - RNA, 24 nt, Artificial Sequence
  Synthetic
acuacacucuaggcucuagaggcc

SEQ ID NO: 95418 - RNA, 18 nt, Artificial Sequence
  Synthetic
ccucaaagagaggaggcc

SEQ ID NO: 95419 - RNA, 19 nt, Artificial Sequence
  Synthetic
accucaaagagaggaggcc

SEQ ID NO: 95420 - RNA, 20 nt, Artificial Sequence
  Synthetic
aaccucaaagagaggaggcc

SEQ ID NO: 95421 - RNA, 23 nt, Artificial Sequence
  Synthetic
aggaaccucaaagagaggaggcc

SEQ ID NO: 95422 - RNA, 18 nt, Artificial Sequence
  Synthetic
uaaaacuacauggaggcc

SEQ ID NO: 95423 - RNA, 19 nt, Artificial Sequence
  Synthetic
cuaaaacuacauggaggcc

SEQ ID NO: 95424 - RNA, 20 nt, Artificial Sequence
  Synthetic
ccuaaaacuacauggaggcc

SEQ ID NO: 95425 - RNA, 21 nt, Artificial Sequence
  Synthetic
accuaaaacuacauggaggcc

SEQ ID NO: 95426 - RNA, 22 nt, Artificial Sequence
  Synthetic
aaccuaaaacuacauggaggcc

SEQ ID NO: 95427 - RNA, 23 nt, Artificial Sequence
  Synthetic
aaaccuaaaacuacauggaggcc

SEQ ID NO: 95428 - RNA, 24 nt, Artificial Sequence
  Synthetic
caaaccuaaaacuacauggaggcc

SEQ ID NO: 95429 - RNA, 18 nt, Artificial Sequence
  Synthetic
acccuccaucuggaggcc

SEQ ID NO: 95430 - RNA, 19 nt, Artificial Sequence
  Synthetic
cacccuccaucuggaggcc

SEQ ID NO: 95431 - RNA, 20 nt, Artificial Sequence
  Synthetic
ucacccuccaucuggaggcc

SEQ ID NO: 95432 - RNA, 21 nt, Artificial Sequence
  Synthetic
aucacccuccaucuggaggcc

SEQ ID NO: 95433 - RNA, 22 nt, Artificial Sequence
  Synthetic
uaucacccuccaucuggaggcc

SEQ ID NO: 95434 - RNA, 23 nt, Artificial Sequence
  Synthetic
cuaucacccuccaucuggaggcc

SEQ ID NO: 95435 - RNA, 19 nt, Artificial Sequence
  Synthetic
ugaaaaaauugaggcggcc

SEQ ID NO: 95436 - RNA, 20 nt, Artificial Sequence
  Synthetic
augaaaaaauugaggcggcc

SEQ ID NO: 95437 - RNA, 21 nt, Artificial Sequence
  Synthetic
aaugaaaaaauugaggcggcc

SEQ ID NO: 95438 - RNA, 22 nt, Artificial Sequence
  Synthetic
aaaugaaaaaauugaggcggcc

SEQ ID NO: 95439 - RNA, 23 nt, Artificial Sequence
  Synthetic
uaaaugaaaaaauugaggcggcc

SEQ ID NO: 95440 - RNA, 24 nt, Artificial Sequence
  Synthetic
uuaaaugaaaaaauugaggcggcc

SEQ ID NO: 95441 - RNA, 21 nt, Artificial Sequence
  Synthetic
aaccucaucgaaaagucggcc

SEQ ID NO: 95442 - RNA, 22 nt, Artificial Sequence
  Synthetic
caaccucaucgaaaagucggcc

SEQ ID NO: 95443 - RNA, 23 nt, Artificial Sequence
  Synthetic
ccaaccucaucgaaaagucggcc

SEQ ID NO: 95444 - RNA, 24 nt, Artificial Sequence
  Synthetic
accaaccucaucgaaaagucggcc

SEQ ID NO: 95445 - RNA, 18 nt, Artificial Sequence
  Synthetic
cucagccccaagucggcc

SEQ ID NO: 95446 - RNA, 19 nt, Artificial Sequence
  Synthetic
acucagccccaagucggcc

SEQ ID NO: 95447 - RNA, 20 nt, Artificial Sequence
  Synthetic
aacucagccccaagucggcc

SEQ ID NO: 95448 - RNA, 21 nt, Artificial Sequence
  Synthetic
uaacucagccccaagucggcc

SEQ ID NO: 95449 - RNA, 22 nt, Artificial Sequence
  Synthetic
cuaacucagccccaagucggcc

SEQ ID NO: 95450 - RNA, 23 nt, Artificial Sequence
  Synthetic
ucuaacucagccccaagucggcc

SEQ ID NO: 95451 - RNA, 24 nt, Artificial Sequence
  Synthetic
uucuaacucagccccaagucggcc

SEQ ID NO: 95452 - RNA, 18 nt, Artificial Sequence
  Synthetic
cuagaugugaucugggcc

SEQ ID NO: 95453 - RNA, 19 nt, Artificial Sequence
  Synthetic
ucuagaugugaucugggcc

SEQ ID NO: 95454 - RNA, 22 nt, Artificial Sequence
  Synthetic
uggucuagaugugaucugggcc

SEQ ID NO: 95455 - RNA, 23 nt, Artificial Sequence
  Synthetic
uuggucuagaugugaucugggcc

SEQ ID NO: 95456 - RNA, 24 nt, Artificial Sequence
  Synthetic
auuggucuagaugugaucugggcc

SEQ ID NO: 95457 - RNA, 18 nt, Artificial Sequence
  Synthetic
uugcagaagaaaauggcc

SEQ ID NO: 95458 - RNA, 19 nt, Artificial Sequence
  Synthetic
uuugcagaagaaaauggcc

SEQ ID NO: 95459 - RNA, 20 nt, Artificial Sequence
  Synthetic
uuuugcagaagaaaauggcc

SEQ ID NO: 95460 - RNA, 21 nt, Artificial Sequence
  Synthetic
cuuuugcagaagaaaauggcc

SEQ ID NO: 95461 - RNA, 22 nt, Artificial Sequence
  Synthetic
ccuuuugcagaagaaaauggcc

SEQ ID NO: 95462 - RNA, 23 nt, Artificial Sequence
  Synthetic
cccuuuugcagaagaaaauggcc

SEQ ID NO: 95463 - RNA, 19 nt, Artificial Sequence
  Synthetic
aguguccauugauauggcc

SEQ ID NO: 95464 - RNA, 20 nt, Artificial Sequence
  Synthetic
uaguguccauugauauggcc

SEQ ID NO: 95465 - RNA, 21 nt, Artificial Sequence
  Synthetic
cuaguguccauugauauggcc

SEQ ID NO: 95466 - RNA, 22 nt, Artificial Sequence
  Synthetic
acuaguguccauugauauggcc

SEQ ID NO: 95467 - RNA, 23 nt, Artificial Sequence
  Synthetic
uacuaguguccauugauauggcc

SEQ ID NO: 95468 - RNA, 24 nt, Artificial Sequence
  Synthetic
cuacuaguguccauugauauggcc

SEQ ID NO: 95469 - RNA, 18 nt, Artificial Sequence
  Synthetic
acgugaguacuacuggcc

SEQ ID NO: 95470 - RNA, 20 nt, Artificial Sequence
  Synthetic
ugacgugaguacuacuggcc

SEQ ID NO: 95471 - RNA, 18 nt, Artificial Sequence
  Synthetic
augugaguauuacuggcc

SEQ ID NO: 95472 - RNA, 20 nt, Artificial Sequence
  Synthetic
ugaugugaguauuacuggcc

SEQ ID NO: 95473 - RNA, 18 nt, Artificial Sequence
  Synthetic
cuuuaaaaaugccuggcc

SEQ ID NO: 95474 - RNA, 19 nt, Artificial Sequence
  Synthetic
ucuuuaaaaaugccuggcc

SEQ ID NO: 95475 - RNA, 20 nt, Artificial Sequence
  Synthetic
aucuuuaaaaaugccuggcc

SEQ ID NO: 95476 - RNA, 21 nt, Artificial Sequence
  Synthetic
aaucuuuaaaaaugccuggcc

SEQ ID NO: 95477 - RNA, 22 nt, Artificial Sequence
  Synthetic
uaaucuuuaaaaaugccuggcc

SEQ ID NO: 95478 - RNA, 23 nt, Artificial Sequence
  Synthetic
cuaaucuuuaaaaaugccuggcc

SEQ ID NO: 95479 - RNA, 24 nt, Artificial Sequence
  Synthetic
ucuaaucuuuaaaaaugccuggcc

SEQ ID NO: 95480 - RNA, 19 nt, Artificial Sequence
  Synthetic
ugugaugucuguccuggcc

SEQ ID NO: 95481 - RNA, 21 nt, Artificial Sequence
  Synthetic
agugugaugucuguccuggcc

SEQ ID NO: 95482 - RNA, 22 nt, Artificial Sequence
  Synthetic
cagugugaugucuguccuggcc

SEQ ID NO: 95483 - RNA, 23 nt, Artificial Sequence
  Synthetic
acagugugaugucuguccuggcc

SEQ ID NO: 95484 - RNA, 24 nt, Artificial Sequence
  Synthetic
aacagugugaugucuguccuggcc

SEQ ID NO: 95485 - RNA, 18 nt, Artificial Sequence
  Synthetic
caagguugcuuaguggcc

SEQ ID NO: 95486 - RNA, 20 nt, Artificial Sequence
  Synthetic
ugcaagguugcuuaguggcc

SEQ ID NO: 95487 - RNA, 21 nt, Artificial Sequence
  Synthetic
augcaagguugcuuaguggcc

SEQ ID NO: 95488 - RNA, 22 nt, Artificial Sequence
  Synthetic
uaugcaagguugcuuaguggcc

SEQ ID NO: 95489 - RNA, 23 nt, Artificial Sequence
  Synthetic
uuaugcaagguugcuuaguggcc

SEQ ID NO: 95490 - RNA, 24 nt, Artificial Sequence
  Synthetic
uuuaugcaagguugcuuaguggcc

SEQ ID NO: 95491 - RNA, 21 nt, Artificial Sequence
  Synthetic
uaggggaugguguggguggcc

SEQ ID NO: 95492 - RNA, 22 nt, Artificial Sequence
  Synthetic
uuaggggaugguguggguggcc

SEQ ID NO: 95493 - RNA, 23 nt, Artificial Sequence
  Synthetic
cuuaggggaugguguggguggcc

SEQ ID NO: 95494 - RNA, 24 nt, Artificial Sequence
  Synthetic
ccuuaggggaugguguggguggcc

SEQ ID NO: 95495 - RNA, 19 nt, Artificial Sequence
  Synthetic
uguuaaaaugucuguggcc

SEQ ID NO: 95496 - RNA, 20 nt, Artificial Sequence
  Synthetic
auguuaaaaugucuguggcc

SEQ ID NO: 95497 - RNA, 21 nt, Artificial Sequence
  Synthetic
aauguuaaaaugucuguggcc

SEQ ID NO: 95498 - RNA, 22 nt, Artificial Sequence
  Synthetic
uaauguuaaaaugucuguggcc

SEQ ID NO: 95499 - RNA, 23 nt, Artificial Sequence
  Synthetic
cuaauguuaaaaugucuguggcc

SEQ ID NO: 95500 - RNA, 18 nt, Artificial Sequence
  Synthetic
agagguagggcuuuggcc

SEQ ID NO: 95501 - RNA, 19 nt, Artificial Sequence
  Synthetic
aagagguagggcuuuggcc

SEQ ID NO: 95502 - RNA, 21 nt, Artificial Sequence
  Synthetic
agaagagguagggcuuuggcc

SEQ ID NO: 95503 - RNA, 23 nt, Artificial Sequence
  Synthetic
cgagaagagguagggcuuuggcc

SEQ ID NO: 95504 - RNA, 24 nt, Artificial Sequence
  Synthetic
ucgagaagagguagggcuuuggcc

SEQ ID NO: 95505 - RNA, 18 nt, Artificial Sequence
  Synthetic
uuuuauguaacaaaugcc

SEQ ID NO: 95506 - RNA, 19 nt, Artificial Sequence
  Synthetic
auuuuauguaacaaaugcc

SEQ ID NO: 95507 - RNA, 20 nt, Artificial Sequence
  Synthetic
uauuuuauguaacaaaugcc

SEQ ID NO: 95508 - RNA, 18 nt, Artificial Sequence
  Synthetic
aaccacugucugaaugcc

SEQ ID NO: 95509 - RNA, 19 nt, Artificial Sequence
  Synthetic
aaaccacugucugaaugcc

SEQ ID NO: 95510 - RNA, 20 nt, Artificial Sequence
  Synthetic
uaaaccacugucugaaugcc

SEQ ID NO: 95511 - RNA, 21 nt, Artificial Sequence
  Synthetic
uuaaaccacugucugaaugcc

SEQ ID NO: 95512 - RNA, 22 nt, Artificial Sequence
  Synthetic
cuuaaaccacugucugaaugcc

SEQ ID NO: 95513 - RNA, 23 nt, Artificial Sequence
  Synthetic
acuuaaaccacugucugaaugcc

SEQ ID NO: 95514 - RNA, 24 nt, Artificial Sequence
  Synthetic
uacuuaaaccacugucugaaugcc

SEQ ID NO: 95515 - RNA, 18 nt, Artificial Sequence
  Synthetic
agguuccuucaacaugcc

SEQ ID NO: 95516 - RNA, 19 nt, Artificial Sequence
  Synthetic
aagguuccuucaacaugcc

SEQ ID NO: 95517 - RNA, 20 nt, Artificial Sequence
  Synthetic
uaagguuccuucaacaugcc

SEQ ID NO: 95518 - RNA, 21 nt, Artificial Sequence
  Synthetic
uuaagguuccuucaacaugcc

SEQ ID NO: 95519 - RNA, 22 nt, Artificial Sequence
  Synthetic
uuuaagguuccuucaacaugcc

SEQ ID NO: 95520 - RNA, 23 nt, Artificial Sequence
  Synthetic
uuuuaagguuccuucaacaugcc

SEQ ID NO: 95521 - RNA, 24 nt, Artificial Sequence
  Synthetic
cuuuuaagguuccuucaacaugcc

SEQ ID NO: 95522 - RNA, 18 nt, Artificial Sequence
  Synthetic
caaauuacuucagaugcc

SEQ ID NO: 95523 - RNA, 19 nt, Artificial Sequence
  Synthetic
ucaaauuacuucagaugcc

SEQ ID NO: 95524 - RNA, 22 nt, Artificial Sequence
  Synthetic
uggucaaauuacuucagaugcc

SEQ ID NO: 95525 - RNA, 23 nt, Artificial Sequence
  Synthetic
auggucaaauuacuucagaugcc

SEQ ID NO: 95526 - RNA, 24 nt, Artificial Sequence
  Synthetic
cauggucaaauuacuucagaugcc

SEQ ID NO: 95527 - RNA, 18 nt, Artificial Sequence
  Synthetic
uucuauacuguggaugcc

SEQ ID NO: 95528 - RNA, 19 nt, Artificial Sequence
  Synthetic
cuucuauacuguggaugcc

SEQ ID NO: 95529 - RNA, 20 nt, Artificial Sequence
  Synthetic
ucuucuauacuguggaugcc

SEQ ID NO: 95530 - RNA, 21 nt, Artificial Sequence
  Synthetic
uucuucuauacuguggaugcc

SEQ ID NO: 95531 - RNA, 22 nt, Artificial Sequence
  Synthetic
cuucuucuauacuguggaugcc

SEQ ID NO: 95532 - RNA, 23 nt, Artificial Sequence
  Synthetic
ucuucuucuauacuguggaugcc

SEQ ID NO: 95533 - RNA, 24 nt, Artificial Sequence
  Synthetic
uucuucuucuauacuguggaugcc

SEQ ID NO: 95534 - RNA, 21 nt, Artificial Sequence
  Synthetic
uucccugacugcucugaugcc

SEQ ID NO: 95535 - RNA, 24 nt, Artificial Sequence
  Synthetic
ugguucccugacugcucugaugcc

SEQ ID NO: 95536 - RNA, 19 nt, Artificial Sequence
  Synthetic
agucuuuucucucccugcc

SEQ ID NO: 95537 - RNA, 20 nt, Artificial Sequence
  Synthetic
cagucuuuucucucccugcc

SEQ ID NO: 95538 - RNA, 21 nt, Artificial Sequence
  Synthetic
ucagucuuuucucucccugcc

SEQ ID NO: 95539 - RNA, 22 nt, Artificial Sequence
  Synthetic
cucagucuuuucucucccugcc

SEQ ID NO: 95540 - RNA, 24 nt, Artificial Sequence
  Synthetic
ugcucagucuuuucucucccugcc

SEQ ID NO: 95541 - RNA, 18 nt, Artificial Sequence
  Synthetic
auuagugguacuccugcc

SEQ ID NO: 95542 - RNA, 19 nt, Artificial Sequence
  Synthetic
cauuagugguacuccugcc

SEQ ID NO: 95543 - RNA, 21 nt, Artificial Sequence
  Synthetic
ugcauuagugguacuccugcc

SEQ ID NO: 95544 - RNA, 22 nt, Artificial Sequence
  Synthetic
augcauuagugguacuccugcc

SEQ ID NO: 95545 - RNA, 23 nt, Artificial Sequence
  Synthetic
uaugcauuagugguacuccugcc

SEQ ID NO: 95546 - RNA, 24 nt, Artificial Sequence
  Synthetic
cuaugcauuagugguacuccugcc

SEQ ID NO: 95547 - RNA, 23 nt, Artificial Sequence
  Synthetic
uggaggaauugucuuuuccugcc

SEQ ID NO: 95548 - RNA, 24 nt, Artificial Sequence
  Synthetic
uuggaggaauugucuuuuccugcc

SEQ ID NO: 95549 - RNA, 18 nt, Artificial Sequence
  Synthetic
aauuucauuaacucugcc

SEQ ID NO: 95550 - RNA, 20 nt, Artificial Sequence
  Synthetic
ugaauuucauuaacucugcc

SEQ ID NO: 95551 - RNA, 21 nt, Artificial Sequence
  Synthetic
uugaauuucauuaacucugcc

SEQ ID NO: 95552 - RNA, 22 nt, Artificial Sequence
  Synthetic
uuugaauuucauuaacucugcc

SEQ ID NO: 95553 - RNA, 23 nt, Artificial Sequence
  Synthetic
auuugaauuucauuaacucugcc

SEQ ID NO: 95554 - RNA, 24 nt, Artificial Sequence
  Synthetic
cauuugaauuucauuaacucugcc

SEQ ID NO: 95555 - RNA, 21 nt, Artificial Sequence
  Synthetic
ucauacaauguucccucugcc

SEQ ID NO: 95556 - RNA, 22 nt, Artificial Sequence
  Synthetic
aucauacaauguucccucugcc

SEQ ID NO: 95557 - RNA, 23 nt, Artificial Sequence
  Synthetic
caucauacaauguucccucugcc

SEQ ID NO: 95558 - RNA, 24 nt, Artificial Sequence
  Synthetic
ucaucauacaauguucccucugcc

SEQ ID NO: 95559 - RNA, 18 nt, Artificial Sequence
  Synthetic
accucauagaggucugcc

SEQ ID NO: 95560 - RNA, 19 nt, Artificial Sequence
  Synthetic
caccucauagaggucugcc

SEQ ID NO: 95561 - RNA, 20 nt, Artificial Sequence
  Synthetic
ucaccucauagaggucugcc

SEQ ID NO: 95562 - RNA, 22 nt, Artificial Sequence
  Synthetic
ugucaccucauagaggucugcc

SEQ ID NO: 95563 - RNA, 23 nt, Artificial Sequence
  Synthetic
augucaccucauagaggucugcc

SEQ ID NO: 95564 - RNA, 24 nt, Artificial Sequence
  Synthetic
aaugucaccucauagaggucugcc

SEQ ID NO: 95565 - RNA, 19 nt, Artificial Sequence
  Synthetic
agacaugaccuauucugcc

SEQ ID NO: 95566 - RNA, 22 nt, Artificial Sequence
  Synthetic
aggagacaugaccuauucugcc

SEQ ID NO: 95567 - RNA, 23 nt, Artificial Sequence
  Synthetic
caggagacaugaccuauucugcc

SEQ ID NO: 95568 - RNA, 24 nt, Artificial Sequence
  Synthetic
ucaggagacaugaccuauucugcc

SEQ ID NO: 95569 - RNA, 18 nt, Artificial Sequence
  Synthetic
uuuggugcuucuucugcc

SEQ ID NO: 95570 - RNA, 19 nt, Artificial Sequence
  Synthetic
auuuggugcuucuucugcc

SEQ ID NO: 95571 - RNA, 20 nt, Artificial Sequence
  Synthetic
aauuuggugcuucuucugcc

SEQ ID NO: 95572 - RNA, 22 nt, Artificial Sequence
  Synthetic
ugaauuuggugcuucuucugcc

SEQ ID NO: 95573 - RNA, 23 nt, Artificial Sequence
  Synthetic
uugaauuuggugcuucuucugcc

SEQ ID NO: 95574 - RNA, 24 nt, Artificial Sequence
  Synthetic
uuugaauuuggugcuucuucugcc

SEQ ID NO: 95575 - RNA, 18 nt, Artificial Sequence
  Synthetic
cgacguucucuuucugcc

SEQ ID NO: 95576 - RNA, 19 nt, Artificial Sequence
  Synthetic
acgacguucucuuucugcc

SEQ ID NO: 95577 - RNA, 20 nt, Artificial Sequence
  Synthetic
cacgacguucucuuucugcc

SEQ ID NO: 95578 - RNA, 21 nt, Artificial Sequence
  Synthetic
acacgacguucucuuucugcc

SEQ ID NO: 95579 - RNA, 23 nt, Artificial Sequence
  Synthetic
ugacacgacguucucuuucugcc

SEQ ID NO: 95580 - RNA, 18 nt, Artificial Sequence
  Synthetic
ugucucuucgucagugcc

SEQ ID NO: 95581 - RNA, 20 nt, Artificial Sequence
  Synthetic
ugugucucuucgucagugcc

SEQ ID NO: 95582 - RNA, 21 nt, Artificial Sequence
  Synthetic
uugugucucuucgucagugcc

SEQ ID NO: 95583 - RNA, 22 nt, Artificial Sequence
  Synthetic
auugugucucuucgucagugcc

SEQ ID NO: 95584 - RNA, 23 nt, Artificial Sequence
  Synthetic
cauugugucucuucgucagugcc

SEQ ID NO: 95585 - RNA, 24 nt, Artificial Sequence
  Synthetic
ucauugugucucuucgucagugcc

SEQ ID NO: 95586 - RNA, 18 nt, Artificial Sequence
  Synthetic
accuucaauaggggugcc

SEQ ID NO: 95587 - RNA, 19 nt, Artificial Sequence
  Synthetic
caccuucaauaggggugcc

SEQ ID NO: 95588 - RNA, 20 nt, Artificial Sequence
  Synthetic
ucaccuucaauaggggugcc

SEQ ID NO: 95589 - RNA, 21 nt, Artificial Sequence
  Synthetic
aucaccuucaauaggggugcc

SEQ ID NO: 95590 - RNA, 22 nt, Artificial Sequence
  Synthetic
caucaccuucaauaggggugcc

SEQ ID NO: 95591 - RNA, 24 nt, Artificial Sequence
  Synthetic
agcaucaccuucaauaggggugcc

SEQ ID NO: 95592 - RNA, 19 nt, Artificial Sequence
  Synthetic
ugccugggaguugggugcc

SEQ ID NO: 95593 - RNA, 20 nt, Artificial Sequence
  Synthetic
uugccugggaguugggugcc

SEQ ID NO: 95594 - RNA, 21 nt, Artificial Sequence
  Synthetic
uuugccugggaguugggugcc

SEQ ID NO: 95595 - RNA, 22 nt, Artificial Sequence
  Synthetic
auuugccugggaguugggugcc

SEQ ID NO: 95596 - RNA, 23 nt, Artificial Sequence
  Synthetic
cauuugccugggaguugggugcc

SEQ ID NO: 95597 - RNA, 18 nt, Artificial Sequence
  Synthetic
uuaaucucauuaugugcc

SEQ ID NO: 95598 - RNA, 19 nt, Artificial Sequence
  Synthetic
auuaaucucauuaugugcc

SEQ ID NO: 95599 - RNA, 20 nt, Artificial Sequence
  Synthetic
uauuaaucucauuaugugcc

SEQ ID NO: 95600 - RNA, 21 nt, Artificial Sequence
  Synthetic
uuauuaaucucauuaugugcc

SEQ ID NO: 95601 - RNA, 22 nt, Artificial Sequence
  Synthetic
auuauuaaucucauuaugugcc

SEQ ID NO: 95602 - RNA, 23 nt, Artificial Sequence
  Synthetic
cauuauuaaucucauuaugugcc

SEQ ID NO: 95603 - RNA, 24 nt, Artificial Sequence
  Synthetic
acauuauuaaucucauuaugugcc

SEQ ID NO: 95604 - RNA, 18 nt, Artificial Sequence
  Synthetic
uaagcugucccuugugcc

SEQ ID NO: 95605 - RNA, 19 nt, Artificial Sequence
  Synthetic
auaagcugucccuugugcc

SEQ ID NO: 95606 - RNA, 20 nt, Artificial Sequence
  Synthetic
cauaagcugucccuugugcc

SEQ ID NO: 95607 - RNA, 22 nt, Artificial Sequence
  Synthetic
ugcauaagcugucccuugugcc

SEQ ID NO: 95608 - RNA, 23 nt, Artificial Sequence
  Synthetic
uugcauaagcugucccuugugcc

SEQ ID NO: 95609 - RNA, 24 nt, Artificial Sequence
  Synthetic
uuugcauaagcugucccuugugcc

SEQ ID NO: 95610 - RNA, 19 nt, Artificial Sequence
  Synthetic
agggucguauuguugugcc

SEQ ID NO: 95611 - RNA, 20 nt, Artificial Sequence
  Synthetic
cagggucguauuguugugcc

SEQ ID NO: 95612 - RNA, 23 nt, Artificial Sequence
  Synthetic
aggcagggucguauuguugugcc

SEQ ID NO: 95613 - RNA, 24 nt, Artificial Sequence
  Synthetic
caggcagggucguauuguugugcc

SEQ ID NO: 95614 - RNA, 19 nt, Artificial Sequence
  Synthetic
agauguaagaaaaauugcc

SEQ ID NO: 95615 - RNA, 20 nt, Artificial Sequence
  Synthetic
cagauguaagaaaaauugcc

SEQ ID NO: 95616 - RNA, 21 nt, Artificial Sequence
  Synthetic
acagauguaagaaaaauugcc

SEQ ID NO: 95617 - RNA, 22 nt, Artificial Sequence
  Synthetic
aacagauguaagaaaaauugcc

SEQ ID NO: 95618 - RNA, 24 nt, Artificial Sequence
  Synthetic
agaacagauguaagaaaaauugcc

SEQ ID NO: 95619 - RNA, 19 nt, Artificial Sequence
  Synthetic
agaauuaucuuauauugcc

SEQ ID NO: 95620 - RNA, 20 nt, Artificial Sequence
  Synthetic
aagaauuaucuuauauugcc

SEQ ID NO: 95621 - RNA, 21 nt, Artificial Sequence
  Synthetic
aaagaauuaucuuauauugcc

SEQ ID NO: 95622 - RNA, 22 nt, Artificial Sequence
  Synthetic
aaaagaauuaucuuauauugcc

SEQ ID NO: 95623 - RNA, 24 nt, Artificial Sequence
  Synthetic
ugaaaagaauuaucuuauauugcc

SEQ ID NO: 95624 - RNA, 18 nt, Artificial Sequence
  Synthetic
acugaaaacauacuugcc

SEQ ID NO: 95625 - RNA, 20 nt, Artificial Sequence
  Synthetic
ugacugaaaacauacuugcc

SEQ ID NO: 95626 - RNA, 21 nt, Artificial Sequence
  Synthetic
augacugaaaacauacuugcc

SEQ ID NO: 95627 - RNA, 22 nt, Artificial Sequence
  Synthetic
uaugacugaaaacauacuugcc

SEQ ID NO: 95628 - RNA, 24 nt, Artificial Sequence
  Synthetic
uguaugacugaaaacauacuugcc

SEQ ID NO: 95629 - RNA, 18 nt, Artificial Sequence
  Synthetic
uuguuaacuuugguugcc

SEQ ID NO: 95630 - RNA, 19 nt, Artificial Sequence
  Synthetic
uuuguuaacuuugguugcc

SEQ ID NO: 95631 - RNA, 20 nt, Artificial Sequence
  Synthetic
auuuguuaacuuugguugcc

SEQ ID NO: 95632 - RNA, 21 nt, Artificial Sequence
  Synthetic
cauuuguuaacuuugguugcc

SEQ ID NO: 95633 - RNA, 22 nt, Artificial Sequence
  Synthetic
acauuuguuaacuuugguugcc

SEQ ID NO: 95634 - RNA, 24 nt, Artificial Sequence
  Synthetic
agacauuuguuaacuuugguugcc

SEQ ID NO: 95635 - RNA, 18 nt, Artificial Sequence
  Synthetic
auguuuaaugaauuugcc

SEQ ID NO: 95636 - RNA, 19 nt, Artificial Sequence
  Synthetic
aauguuuaaugaauuugcc

SEQ ID NO: 95637 - RNA, 20 nt, Artificial Sequence
  Synthetic
aaauguuuaaugaauuugcc

SEQ ID NO: 95638 - RNA, 21 nt, Artificial Sequence
  Synthetic
aaaauguuuaaugaauuugcc

SEQ ID NO: 95639 - RNA, 22 nt, Artificial Sequence
  Synthetic
aaaaauguuuaaugaauuugcc

SEQ ID NO: 95640 - RNA, 23 nt, Artificial Sequence
  Synthetic
aaaaaauguuuaaugaauuugcc

SEQ ID NO: 95641 - RNA, 22 nt, Artificial Sequence
  Synthetic
uggagagauuaaauaauuugcc

SEQ ID NO: 95642 - RNA, 23 nt, Artificial Sequence
  Synthetic
uuggagagauuaaauaauuugcc

SEQ ID NO: 95643 - RNA, 18 nt, Artificial Sequence
  Synthetic
cucauaacuaacuuugcc

SEQ ID NO: 95644 - RNA, 19 nt, Artificial Sequence
  Synthetic
ucucauaacuaacuuugcc

SEQ ID NO: 95645 - RNA, 20 nt, Artificial Sequence
  Synthetic
aucucauaacuaacuuugcc

SEQ ID NO: 95646 - RNA, 21 nt, Artificial Sequence
  Synthetic
aaucucauaacuaacuuugcc

SEQ ID NO: 95647 - RNA, 23 nt, Artificial Sequence
  Synthetic
ugaaucucauaacuaacuuugcc

SEQ ID NO: 95648 - RNA, 24 nt, Artificial Sequence
  Synthetic
cugaaucucauaacuaacuuugcc

SEQ ID NO: 95649 - RNA, 19 nt, Artificial Sequence
  Synthetic
ugguguuaggaauuuugcc

SEQ ID NO: 95650 - RNA, 20 nt, Artificial Sequence
  Synthetic
augguguuaggaauuuugcc

SEQ ID NO: 95651 - RNA, 21 nt, Artificial Sequence
  Synthetic
caugguguuaggaauuuugcc

SEQ ID NO: 95652 - RNA, 22 nt, Artificial Sequence
  Synthetic
ucaugguguuaggaauuuugcc

SEQ ID NO: 95653 - RNA, 23 nt, Artificial Sequence
  Synthetic
uucaugguguuaggaauuuugcc

SEQ ID NO: 95654 - RNA, 24 nt, Artificial Sequence
  Synthetic
uuucaugguguuaggaauuuugcc

SEQ ID NO: 95655 - RNA, 18 nt, Artificial Sequence
  Synthetic
ucaaacugucaaaaaucc

SEQ ID NO: 95656 - RNA, 19 nt, Artificial Sequence
  Synthetic
uucaaacugucaaaaaucc

SEQ ID NO: 95657 - RNA, 20 nt, Artificial Sequence
  Synthetic
uuucaaacugucaaaaaucc

SEQ ID NO: 95658 - RNA, 21 nt, Artificial Sequence
  Synthetic
auuucaaacugucaaaaaucc

SEQ ID NO: 95659 - RNA, 22 nt, Artificial Sequence
  Synthetic
uauuucaaacugucaaaaaucc

SEQ ID NO: 95660 - RNA, 23 nt, Artificial Sequence
  Synthetic
auauuucaaacugucaaaaaucc

SEQ ID NO: 95661 - RNA, 24 nt, Artificial Sequence
  Synthetic
uauauuucaaacugucaaaaaucc

SEQ ID NO: 95662 - RNA, 21 nt, Artificial Sequence
  Synthetic
auuuuuaaaguagaaaaaucc

SEQ ID NO: 95663 - RNA, 22 nt, Artificial Sequence
  Synthetic
uauuuuuaaaguagaaaaaucc

SEQ ID NO: 95664 - RNA, 23 nt, Artificial Sequence
  Synthetic
uuauuuuuaaaguagaaaaaucc

SEQ ID NO: 95665 - RNA, 21 nt, Artificial Sequence
  Synthetic
cuaaguuuuuuuuaaaaaucc

SEQ ID NO: 95666 - RNA, 22 nt, Artificial Sequence
  Synthetic
acuaaguuuuuuuuaaaaaucc

SEQ ID NO: 95667 - RNA, 23 nt, Artificial Sequence
  Synthetic
cacuaaguuuuuuuuaaaaaucc

SEQ ID NO: 95668 - RNA, 24 nt, Artificial Sequence
  Synthetic
acacuaaguuuuuuuuaaaaaucc

SEQ ID NO: 95669 - RNA, 18 nt, Artificial Sequence
  Synthetic
auaggauccaucaaaucc

SEQ ID NO: 95670 - RNA, 19 nt, Artificial Sequence
  Synthetic
cauaggauccaucaaaucc

SEQ ID NO: 95671 - RNA, 20 nt, Artificial Sequence
  Synthetic
ccauaggauccaucaaaucc

SEQ ID NO: 95672 - RNA, 21 nt, Artificial Sequence
  Synthetic
accauaggauccaucaaaucc

SEQ ID NO: 95673 - RNA, 22 nt, Artificial Sequence
  Synthetic
aaccauaggauccaucaaaucc

SEQ ID NO: 95674 - RNA, 23 nt, Artificial Sequence
  Synthetic
aaaccauaggauccaucaaaucc

SEQ ID NO: 95675 - RNA, 24 nt, Artificial Sequence
  Synthetic
caaaccauaggauccaucaaaucc

SEQ ID NO: 95676 - RNA, 18 nt, Artificial Sequence
  Synthetic
uaagaccaaaagaaaucc

SEQ ID NO: 95677 - RNA, 19 nt, Artificial Sequence
  Synthetic
auaagaccaaaagaaaucc

SEQ ID NO: 95678 - RNA, 20 nt, Artificial Sequence
  Synthetic
uauaagaccaaaagaaaucc

SEQ ID NO: 95679 - RNA, 21 nt, Artificial Sequence
  Synthetic
uuauaagaccaaaagaaaucc

SEQ ID NO: 95680 - RNA, 22 nt, Artificial Sequence
  Synthetic
auuauaagaccaaaagaaaucc

SEQ ID NO: 95681 - RNA, 23 nt, Artificial Sequence
  Synthetic
cauuauaagaccaaaagaaaucc

SEQ ID NO: 95682 - RNA, 18 nt, Artificial Sequence
  Synthetic
uccugcgacugccaaucc

SEQ ID NO: 95683 - RNA, 19 nt, Artificial Sequence
  Synthetic
uuccugcgacugccaaucc

SEQ ID NO: 95684 - RNA, 20 nt, Artificial Sequence
  Synthetic
cuuccugcgacugccaaucc

SEQ ID NO: 95685 - RNA, 22 nt, Artificial Sequence
  Synthetic
agcuuccugcgacugccaaucc

SEQ ID NO: 95686 - RNA, 23 nt, Artificial Sequence
  Synthetic
cagcuuccugcgacugccaaucc

SEQ ID NO: 95687 - RNA, 24 nt, Artificial Sequence
  Synthetic
acagcuuccugcgacugccaaucc

SEQ ID NO: 95688 - RNA, 18 nt, Artificial Sequence
  Synthetic
auuagguuuggagaaucc

SEQ ID NO: 95689 - RNA, 19 nt, Artificial Sequence
  Synthetic
aauuagguuuggagaaucc

SEQ ID NO: 95690 - RNA, 20 nt, Artificial Sequence
  Synthetic
aaauuagguuuggagaaucc

SEQ ID NO: 95691 - RNA, 21 nt, Artificial Sequence
  Synthetic
aaaauuagguuuggagaaucc

SEQ ID NO: 95692 - RNA, 22 nt, Artificial Sequence
  Synthetic
aaaaauuagguuuggagaaucc

SEQ ID NO: 95693 - RNA, 23 nt, Artificial Sequence
  Synthetic
aaaaaauuagguuuggagaaucc

SEQ ID NO: 95694 - RNA, 24 nt, Artificial Sequence
  Synthetic
aaaaaaauuagguuuggagaaucc

SEQ ID NO: 95695 - RNA, 18 nt, Artificial Sequence
  Synthetic
aacauauuuugggaaucc

SEQ ID NO: 95696 - RNA, 19 nt, Artificial Sequence
  Synthetic
aaacauauuuugggaaucc

SEQ ID NO: 95697 - RNA, 20 nt, Artificial Sequence
  Synthetic
caaacauauuuugggaaucc

SEQ ID NO: 95698 - RNA, 21 nt, Artificial Sequence
  Synthetic
ccaaacauauuuugggaaucc

SEQ ID NO: 95699 - RNA, 22 nt, Artificial Sequence
  Synthetic
uccaaacauauuuugggaaucc

SEQ ID NO: 95700 - RNA, 23 nt, Artificial Sequence
  Synthetic
auccaaacauauuuugggaaucc

SEQ ID NO: 95701 - RNA, 24 nt, Artificial Sequence
  Synthetic
aauccaaacauauuuugggaaucc

SEQ ID NO: 95702 - RNA, 18 nt, Artificial Sequence
  Synthetic
aaccuauuucccuaaucc

SEQ ID NO: 95703 - RNA, 19 nt, Artificial Sequence
  Synthetic
uaaccuauuucccuaaucc

SEQ ID NO: 95704 - RNA, 21 nt, Artificial Sequence
  Synthetic
uguaaccuauuucccuaaucc

SEQ ID NO: 95705 - RNA, 22 nt, Artificial Sequence
  Synthetic
uuguaaccuauuucccuaaucc

SEQ ID NO: 95706 - RNA, 24 nt, Artificial Sequence
  Synthetic
aguuguaaccuauuucccuaaucc

SEQ ID NO: 95707 - RNA, 18 nt, Artificial Sequence
  Synthetic
uucacagauuuguaaucc

SEQ ID NO: 95708 - RNA, 19 nt, Artificial Sequence
  Synthetic
auucacagauuuguaaucc

SEQ ID NO: 95709 - RNA, 20 nt, Artificial Sequence
  Synthetic
cauucacagauuuguaaucc

SEQ ID NO: 95710 - RNA, 22 nt, Artificial Sequence
  Synthetic
ugcauucacagauuuguaaucc

SEQ ID NO: 95711 - RNA, 23 nt, Artificial Sequence
  Synthetic
uugcauucacagauuuguaaucc

SEQ ID NO: 95712 - RNA, 18 nt, Artificial Sequence
  Synthetic
agcuuucuguuuuaaucc

SEQ ID NO: 95713 - RNA, 20 nt, Artificial Sequence
  Synthetic
agagcuuucuguuuuaaucc

SEQ ID NO: 95714 - RNA, 21 nt, Artificial Sequence
  Synthetic
cagagcuuucuguuuuaaucc

SEQ ID NO: 95715 - RNA, 22 nt, Artificial Sequence
  Synthetic
acagagcuuucuguuuuaaucc

SEQ ID NO: 95716 - RNA, 23 nt, Artificial Sequence
  Synthetic
uacagagcuuucuguuuuaaucc

SEQ ID NO: 95717 - RNA, 24 nt, Artificial Sequence
  Synthetic
auacagagcuuucuguuuuaaucc

SEQ ID NO: 95718 - RNA, 18 nt, Artificial Sequence
  Synthetic
caguuaacuaaaacaucc

SEQ ID NO: 95719 - RNA, 19 nt, Artificial Sequence
  Synthetic
ucaguuaacuaaaacaucc

SEQ ID NO: 95720 - RNA, 20 nt, Artificial Sequence
  Synthetic
cucaguuaacuaaaacaucc

SEQ ID NO: 95721 - RNA, 21 nt, Artificial Sequence
  Synthetic
ucucaguuaacuaaaacaucc

SEQ ID NO: 95722 - RNA, 22 nt, Artificial Sequence
  Synthetic
uucucaguuaacuaaaacaucc

SEQ ID NO: 95723 - RNA, 23 nt, Artificial Sequence
  Synthetic
uuucucaguuaacuaaaacaucc

SEQ ID NO: 95724 - RNA, 24 nt, Artificial Sequence
  Synthetic
auuucucaguuaacuaaaacaucc

SEQ ID NO: 95725 - RNA, 19 nt, Artificial Sequence
  Synthetic
aggaacaaugcacacaucc

SEQ ID NO: 95726 - RNA, 20 nt, Artificial Sequence
  Synthetic
caggaacaaugcacacaucc

SEQ ID NO: 95727 - RNA, 21 nt, Artificial Sequence
  Synthetic
ucaggaacaaugcacacaucc

SEQ ID NO: 95728 - RNA, 22 nt, Artificial Sequence
  Synthetic
uucaggaacaaugcacacaucc

SEQ ID NO: 95729 - RNA, 23 nt, Artificial Sequence
  Synthetic
cuucaggaacaaugcacacaucc

SEQ ID NO: 95730 - RNA, 24 nt, Artificial Sequence
  Synthetic
ucuucaggaacaaugcacacaucc

SEQ ID NO: 95731 - RNA, 18 nt, Artificial Sequence
  Synthetic
auucuaaaguuaccaucc

SEQ ID NO: 95732 - RNA, 19 nt, Artificial Sequence
  Synthetic
uauucuaaaguuaccaucc

SEQ ID NO: 95733 - RNA, 20 nt, Artificial Sequence
  Synthetic
uuauucuaaaguuaccaucc

SEQ ID NO: 95734 - RNA, 21 nt, Artificial Sequence
  Synthetic
cuuauucuaaaguuaccaucc

SEQ ID NO: 95735 - RNA, 22 nt, Artificial Sequence
  Synthetic
ucuuauucuaaaguuaccaucc

SEQ ID NO: 95736 - RNA, 23 nt, Artificial Sequence
  Synthetic
uucuuauucuaaaguuaccaucc

SEQ ID NO: 95737 - RNA, 24 nt, Artificial Sequence
  Synthetic
uuucuuauucuaaaguuaccaucc

SEQ ID NO: 95738 - RNA, 18 nt, Artificial Sequence
  Synthetic
cauuuuauguuaccaucc

SEQ ID NO: 95739 - RNA, 19 nt, Artificial Sequence
  Synthetic
acauuuuauguuaccaucc

SEQ ID NO: 95740 - RNA, 20 nt, Artificial Sequence
  Synthetic
uacauuuuauguuaccaucc

SEQ ID NO: 95741 - RNA, 22 nt, Artificial Sequence
  Synthetic
uguacauuuuauguuaccaucc

SEQ ID NO: 95742 - RNA, 23 nt, Artificial Sequence
  Synthetic
auguacauuuuauguuaccaucc

SEQ ID NO: 95743 - RNA, 24 nt, Artificial Sequence
  Synthetic
aauguacauuuuauguuaccaucc

SEQ ID NO: 95744 - RNA, 18 nt, Artificial Sequence
  Synthetic
cgcugcccaaugccaucc

SEQ ID NO: 95745 - RNA, 19 nt, Artificial Sequence
  Synthetic
ccgcugcccaaugccaucc

SEQ ID NO: 95746 - RNA, 21 nt, Artificial Sequence
  Synthetic
ugccgcugcccaaugccaucc

SEQ ID NO: 95747 - RNA, 22 nt, Artificial Sequence
  Synthetic
uugccgcugcccaaugccaucc

SEQ ID NO: 95748 - RNA, 23 nt, Artificial Sequence
  Synthetic
uuugccgcugcccaaugccaucc

SEQ ID NO: 95749 - RNA, 18 nt, Artificial Sequence
  Synthetic
uacuagugagaggcaucc

SEQ ID NO: 95750 - RNA, 19 nt, Artificial Sequence
  Synthetic
uuacuagugagaggcaucc

SEQ ID NO: 95751 - RNA, 20 nt, Artificial Sequence
  Synthetic
uuuacuagugagaggcaucc

SEQ ID NO: 95752 - RNA, 21 nt, Artificial Sequence
  Synthetic
auuuacuagugagaggcaucc

SEQ ID NO: 95753 - RNA, 22 nt, Artificial Sequence
  Synthetic
aauuuacuagugagaggcaucc

SEQ ID NO: 95754 - RNA, 23 nt, Artificial Sequence
  Synthetic
aaauuuacuagugagaggcaucc

SEQ ID NO: 95755 - RNA, 24 nt, Artificial Sequence
  Synthetic
caaauuuacuagugagaggcaucc

SEQ ID NO: 95756 - RNA, 19 nt, Artificial Sequence
  Synthetic
agaguuaaaacuggcaucc

SEQ ID NO: 95757 - RNA, 20 nt, Artificial Sequence
  Synthetic
aagaguuaaaacuggcaucc

SEQ ID NO: 95758 - RNA, 21 nt, Artificial Sequence
  Synthetic
caagaguuaaaacuggcaucc

SEQ ID NO: 95759 - RNA, 22 nt, Artificial Sequence
  Synthetic
ucaagaguuaaaacuggcaucc

SEQ ID NO: 95760 - RNA, 23 nt, Artificial Sequence
  Synthetic
aucaagaguuaaaacuggcaucc

SEQ ID NO: 95761 - RNA, 24 nt, Artificial Sequence
  Synthetic
uaucaagaguuaaaacuggcaucc

SEQ ID NO: 95762 - RNA, 18 nt, Artificial Sequence
  Synthetic
cuggaaaagggaucaucc

SEQ ID NO: 95763 - RNA, 19 nt, Artificial Sequence
  Synthetic
ccuggaaaagggaucaucc

SEQ ID NO: 95764 - RNA, 20 nt, Artificial Sequence
  Synthetic
accuggaaaagggaucaucc

SEQ ID NO: 95765 - RNA, 21 nt, Artificial Sequence
  Synthetic
aaccuggaaaagggaucaucc

SEQ ID NO: 95766 - RNA, 22 nt, Artificial Sequence
  Synthetic
aaaccuggaaaagggaucaucc

SEQ ID NO: 95767 - RNA, 23 nt, Artificial Sequence
  Synthetic
aaaaccuggaaaagggaucaucc

SEQ ID NO: 95768 - RNA, 24 nt, Artificial Sequence
  Synthetic
aaaaaccuggaaaagggaucaucc

SEQ ID NO: 95769 - RNA, 18 nt, Artificial Sequence
  Synthetic
uguacaauggagucaucc

SEQ ID NO: 95770 - RNA, 19 nt, Artificial Sequence
  Synthetic
cuguacaauggagucaucc

SEQ ID NO: 95771 - RNA, 21 nt, Artificial Sequence
  Synthetic
ugcuguacaauggagucaucc

SEQ ID NO: 95772 - RNA, 22 nt, Artificial Sequence
  Synthetic
uugcuguacaauggagucaucc

SEQ ID NO: 95773 - RNA, 23 nt, Artificial Sequence
  Synthetic
cuugcuguacaauggagucaucc

SEQ ID NO: 95774 - RNA, 24 nt, Artificial Sequence
  Synthetic
acuugcuguacaauggagucaucc

SEQ ID NO: 95775 - RNA, 18 nt, Artificial Sequence
  Synthetic
uccaugcaucuuucaucc

SEQ ID NO: 95776 - RNA, 19 nt, Artificial Sequence
  Synthetic
auccaugcaucuuucaucc

SEQ ID NO: 95777 - RNA, 20 nt, Artificial Sequence
  Synthetic
aauccaugcaucuuucaucc

SEQ ID NO: 95778 - RNA, 21 nt, Artificial Sequence
  Synthetic
uaauccaugcaucuuucaucc

SEQ ID NO: 95779 - RNA, 22 nt, Artificial Sequence
  Synthetic
uuaauccaugcaucuuucaucc

SEQ ID NO: 95780 - RNA, 23 nt, Artificial Sequence
  Synthetic
uuuaauccaugcaucuuucaucc

SEQ ID NO: 95781 - RNA, 24 nt, Artificial Sequence
  Synthetic
auuuaauccaugcaucuuucaucc

SEQ ID NO: 95782 - RNA, 18 nt, Artificial Sequence
  Synthetic
cugucaugagaaagaucc

SEQ ID NO: 95783 - RNA, 19 nt, Artificial Sequence
  Synthetic
acugucaugagaaagaucc

SEQ ID NO: 95784 - RNA, 20 nt, Artificial Sequence
  Synthetic
cacugucaugagaaagaucc

SEQ ID NO: 95785 - RNA, 21 nt, Artificial Sequence
  Synthetic
acacugucaugagaaagaucc

SEQ ID NO: 95786 - RNA, 24 nt, Artificial Sequence
  Synthetic
aggacacugucaugagaaagaucc

SEQ ID NO: 95787 - RNA, 18 nt, Artificial Sequence
  Synthetic
uggagcuaaggcugaucc

SEQ ID NO: 95788 - RNA, 19 nt, Artificial Sequence
  Synthetic
uuggagcuaaggcugaucc

SEQ ID NO: 95789 - RNA, 21 nt, Artificial Sequence
  Synthetic
aguuggagcuaaggcugaucc

SEQ ID NO: 95790 - RNA, 22 nt, Artificial Sequence
  Synthetic
aaguuggagcuaaggcugaucc

SEQ ID NO: 95791 - RNA, 23 nt, Artificial Sequence
  Synthetic
caaguuggagcuaaggcugaucc

SEQ ID NO: 95792 - RNA, 18 nt, Artificial Sequence
  Synthetic
aagagggauaggugaucc

SEQ ID NO: 95793 - RNA, 20 nt, Artificial Sequence
  Synthetic
ugaagagggauaggugaucc

SEQ ID NO: 95794 - RNA, 21 nt, Artificial Sequence
  Synthetic
uugaagagggauaggugaucc

SEQ ID NO: 95795 - RNA, 22 nt, Artificial Sequence
  Synthetic
auugaagagggauaggugaucc

SEQ ID NO: 95796 - RNA, 23 nt, Artificial Sequence
  Synthetic
aauugaagagggauaggugaucc

SEQ ID NO: 95797 - RNA, 24 nt, Artificial Sequence
  Synthetic
aaauugaagagggauaggugaucc

SEQ ID NO: 95798 - RNA, 18 nt, Artificial Sequence
  Synthetic
ugauagucaucuugaucc

SEQ ID NO: 95799 - RNA, 19 nt, Artificial Sequence
  Synthetic
cugauagucaucuugaucc

SEQ ID NO: 95800 - RNA, 21 nt, Artificial Sequence
  Synthetic
agcugauagucaucuugaucc

SEQ ID NO: 95801 - RNA, 23 nt, Artificial Sequence
  Synthetic
agagcugauagucaucuugaucc

SEQ ID NO: 95802 - RNA, 18 nt, Artificial Sequence
  Synthetic
ccuuuucuagaaauaucc

SEQ ID NO: 95803 - RNA, 20 nt, Artificial Sequence
  Synthetic
ugccuuuucuagaaauaucc

SEQ ID NO: 95804 - RNA, 21 nt, Artificial Sequence
  Synthetic
uugccuuuucuagaaauaucc

SEQ ID NO: 95805 - RNA, 22 nt, Artificial Sequence
  Synthetic
cuugccuuuucuagaaauaucc

SEQ ID NO: 95806 - RNA, 18 nt, Artificial Sequence
  Synthetic
auaaauuauaacauaucc

SEQ ID NO: 95807 - RNA, 19 nt, Artificial Sequence
  Synthetic
uauaaauuauaacauaucc

SEQ ID NO: 95808 - RNA, 20 nt, Artificial Sequence
  Synthetic
uuauaaauuauaacauaucc

SEQ ID NO: 95809 - RNA, 21 nt, Artificial Sequence
  Synthetic
auuauaaauuauaacauaucc

SEQ ID NO: 95810 - RNA, 22 nt, Artificial Sequence
  Synthetic
aauuauaaauuauaacauaucc

SEQ ID NO: 95811 - RNA, 23 nt, Artificial Sequence
  Synthetic
aaauuauaaauuauaacauaucc

SEQ ID NO: 95812 - RNA, 24 nt, Artificial Sequence
  Synthetic
aaaauuauaaauuauaacauaucc

SEQ ID NO: 95813 - RNA, 18 nt, Artificial Sequence
  Synthetic
auacaacucuacauaucc

SEQ ID NO: 95814 - RNA, 19 nt, Artificial Sequence
  Synthetic
aauacaacucuacauaucc

SEQ ID NO: 95815 - RNA, 20 nt, Artificial Sequence
  Synthetic
uaauacaacucuacauaucc

SEQ ID NO: 95816 - RNA, 21 nt, Artificial Sequence
  Synthetic
uuaauacaacucuacauaucc

SEQ ID NO: 95817 - RNA, 22 nt, Artificial Sequence
  Synthetic
uuuaauacaacucuacauaucc

SEQ ID NO: 95818 - RNA, 23 nt, Artificial Sequence
  Synthetic
uuuuaauacaacucuacauaucc

SEQ ID NO: 95819 - RNA, 24 nt, Artificial Sequence
  Synthetic
uuuuuaauacaacucuacauaucc

SEQ ID NO: 95820 - RNA, 18 nt, Artificial Sequence
  Synthetic
uaugaggaaaauauaucc

SEQ ID NO: 95821 - RNA, 19 nt, Artificial Sequence
  Synthetic
uuaugaggaaaauauaucc

SEQ ID NO: 95822 - RNA, 20 nt, Artificial Sequence
  Synthetic
uuuaugaggaaaauauaucc

SEQ ID NO: 95823 - RNA, 22 nt, Artificial Sequence
  Synthetic
cguuuaugaggaaaauauaucc

SEQ ID NO: 95824 - RNA, 23 nt, Artificial Sequence
  Synthetic
ucguuuaugaggaaaauauaucc

SEQ ID NO: 95825 - RNA, 24 nt, Artificial Sequence
  Synthetic
aucguuuaugaggaaaauauaucc

SEQ ID NO: 95826 - RNA, 18 nt, Artificial Sequence
  Synthetic
aggaauuugagacuaucc

SEQ ID NO: 95827 - RNA, 20 nt, Artificial Sequence
  Synthetic
agaggaauuugagacuaucc

SEQ ID NO: 95828 - RNA, 21 nt, Artificial Sequence
  Synthetic
aagaggaauuugagacuaucc

SEQ ID NO: 95829 - RNA, 22 nt, Artificial Sequence
  Synthetic
caagaggaauuugagacuaucc

SEQ ID NO: 95830 - RNA, 23 nt, Artificial Sequence
  Synthetic
ucaagaggaauuugagacuaucc

SEQ ID NO: 95831 - RNA, 24 nt, Artificial Sequence
  Synthetic
uucaagaggaauuugagacuaucc

SEQ ID NO: 95832 - RNA, 19 nt, Artificial Sequence
  Synthetic
ugguuggccaugccuaucc

SEQ ID NO: 95833 - RNA, 20 nt, Artificial Sequence
  Synthetic
augguuggccaugccuaucc

SEQ ID NO: 95834 - RNA, 21 nt, Artificial Sequence
  Synthetic
caugguuggccaugccuaucc

SEQ ID NO: 95835 - RNA, 22 nt, Artificial Sequence
  Synthetic
ccaugguuggccaugccuaucc

SEQ ID NO: 95836 - RNA, 23 nt, Artificial Sequence
  Synthetic
uccaugguuggccaugccuaucc

SEQ ID NO: 95837 - RNA, 24 nt, Artificial Sequence
  Synthetic
auccaugguuggccaugccuaucc

SEQ ID NO: 95838 - RNA, 18 nt, Artificial Sequence
  Synthetic
cugauaagaaagguaucc

SEQ ID NO: 95839 - RNA, 19 nt, Artificial Sequence
  Synthetic
acugauaagaaagguaucc

SEQ ID NO: 95840 - RNA, 20 nt, Artificial Sequence
  Synthetic
uacugauaagaaagguaucc

SEQ ID NO: 95841 - RNA, 21 nt, Artificial Sequence
  Synthetic
auacugauaagaaagguaucc

SEQ ID NO: 95842 - RNA, 22 nt, Artificial Sequence
  Synthetic
cauacugauaagaaagguaucc

SEQ ID NO: 95843 - RNA, 24 nt, Artificial Sequence
  Synthetic
agcauacugauaagaaagguaucc

SEQ ID NO: 95844 - RNA, 18 nt, Artificial Sequence
  Synthetic
acaacaucucuguuaucc

SEQ ID NO: 95845 - RNA, 21 nt, Artificial Sequence
  Synthetic
aggacaacaucucuguuaucc

SEQ ID NO: 95846 - RNA, 22 nt, Artificial Sequence
  Synthetic
caggacaacaucucuguuaucc

SEQ ID NO: 95847 - RNA, 23 nt, Artificial Sequence
  Synthetic
ucaggacaacaucucuguuaucc

SEQ ID NO: 95848 - RNA, 24 nt, Artificial Sequence
  Synthetic
uucaggacaacaucucuguuaucc

SEQ ID NO: 95849 - RNA, 18 nt, Artificial Sequence
  Synthetic
auucaaggcuguuuaucc

SEQ ID NO: 95850 - RNA, 19 nt, Artificial Sequence
  Synthetic
uauucaaggcuguuuaucc

SEQ ID NO: 95851 - RNA, 20 nt, Artificial Sequence
  Synthetic
auauucaaggcuguuuaucc

SEQ ID NO: 95852 - RNA, 21 nt, Artificial Sequence
  Synthetic
cauauucaaggcuguuuaucc

SEQ ID NO: 95853 - RNA, 22 nt, Artificial Sequence
  Synthetic
ucauauucaaggcuguuuaucc

SEQ ID NO: 95854 - RNA, 23 nt, Artificial Sequence
  Synthetic
uucauauucaaggcuguuuaucc

SEQ ID NO: 95855 - RNA, 24 nt, Artificial Sequence
  Synthetic
auucauauucaaggcuguuuaucc

SEQ ID NO: 95856 - RNA, 18 nt, Artificial Sequence
  Synthetic
aaccacugcaacaacucc

SEQ ID NO: 95857 - RNA, 20 nt, Artificial Sequence
  Synthetic
agaaccacugcaacaacucc

SEQ ID NO: 95858 - RNA, 21 nt, Artificial Sequence
  Synthetic
cagaaccacugcaacaacucc

SEQ ID NO: 95859 - RNA, 22 nt, Artificial Sequence
  Synthetic
ucagaaccacugcaacaacucc

SEQ ID NO: 95860 - RNA, 23 nt, Artificial Sequence
  Synthetic
uucagaaccacugcaacaacucc

SEQ ID NO: 95861 - RNA, 24 nt, Artificial Sequence
  Synthetic
auucagaaccacugcaacaacucc

SEQ ID NO: 95862 - RNA, 18 nt, Artificial Sequence
  Synthetic
caggaagaagcgaacucc

SEQ ID NO: 95863 - RNA, 19 nt, Artificial Sequence
  Synthetic
acaggaagaagcgaacucc

SEQ ID NO: 95864 - RNA, 21 nt, Artificial Sequence
  Synthetic
ugacaggaagaagcgaacucc

SEQ ID NO: 95865 - RNA, 22 nt, Artificial Sequence
  Synthetic
augacaggaagaagcgaacucc

SEQ ID NO: 95866 - RNA, 23 nt, Artificial Sequence
  Synthetic
caugacaggaagaagcgaacucc

SEQ ID NO: 95867 - RNA, 18 nt, Artificial Sequence
  Synthetic
caggggaugucacacucc

SEQ ID NO: 95868 - RNA, 23 nt, Artificial Sequence
  Synthetic
uggggcaggggaugucacacucc

SEQ ID NO: 95869 - RNA, 24 nt, Artificial Sequence
  Synthetic
cuggggcaggggaugucacacucc

SEQ ID NO: 95870 - RNA, 18 nt, Artificial Sequence
  Synthetic
aaaguaguuuuacacucc

SEQ ID NO: 95871 - RNA, 19 nt, Artificial Sequence
  Synthetic
uaaaguaguuuuacacucc

SEQ ID NO: 95872 - RNA, 20 nt, Artificial Sequence
  Synthetic
auaaaguaguuuuacacucc

SEQ ID NO: 95873 - RNA, 21 nt, Artificial Sequence
  Synthetic
uauaaaguaguuuuacacucc

SEQ ID NO: 95874 - RNA, 22 nt, Artificial Sequence
  Synthetic
uuauaaaguaguuuuacacucc

SEQ ID NO: 95875 - RNA, 23 nt, Artificial Sequence
  Synthetic
cuuauaaaguaguuuuacacucc

SEQ ID NO: 95876 - RNA, 18 nt, Artificial Sequence
  Synthetic
agucuguuucuccacucc

SEQ ID NO: 95877 - RNA, 19 nt, Artificial Sequence
  Synthetic
uagucuguuucuccacucc

SEQ ID NO: 95878 - RNA, 20 nt, Artificial Sequence
  Synthetic
auagucuguuucuccacucc

SEQ ID NO: 95879 - RNA, 21 nt, Artificial Sequence
  Synthetic
cauagucuguuucuccacucc

SEQ ID NO: 95880 - RNA, 22 nt, Artificial Sequence
  Synthetic
ccauagucuguuucuccacucc

SEQ ID NO: 95881 - RNA, 24 nt, Artificial Sequence
  Synthetic
agccauagucuguuucuccacucc

SEQ ID NO: 95882 - RNA, 18 nt, Artificial Sequence
  Synthetic
aaagcaaggaaauacucc

SEQ ID NO: 95883 - RNA, 20 nt, Artificial Sequence
  Synthetic
agaaagcaaggaaauacucc

SEQ ID NO: 95884 - RNA, 22 nt, Artificial Sequence
  Synthetic
ugagaaagcaaggaaauacucc

SEQ ID NO: 95885 - RNA, 23 nt, Artificial Sequence
  Synthetic
cugagaaagcaaggaaauacucc

SEQ ID NO: 95886 - RNA, 24 nt, Artificial Sequence
  Synthetic
ccugagaaagcaaggaaauacucc

SEQ ID NO: 95887 - RNA, 18 nt, Artificial Sequence
  Synthetic
aggcagggaacauacucc

SEQ ID NO: 95888 - RNA, 21 nt, Artificial Sequence
  Synthetic
aggaggcagggaacauacucc

SEQ ID NO: 95889 - RNA, 22 nt, Artificial Sequence
  Synthetic
caggaggcagggaacauacucc

SEQ ID NO: 95890 - RNA, 24 nt, Artificial Sequence
  Synthetic
agcaggaggcagggaacauacucc

SEQ ID NO: 95891 - RNA, 20 nt, Artificial Sequence
  Synthetic
agguacuguuucuauacucc

SEQ ID NO: 95892 - RNA, 21 nt, Artificial Sequence
  Synthetic
aagguacuguuucuauacucc

SEQ ID NO: 95893 - RNA, 22 nt, Artificial Sequence
  Synthetic
caagguacuguuucuauacucc

SEQ ID NO: 95894 - RNA, 23 nt, Artificial Sequence
  Synthetic
ccaagguacuguuucuauacucc

SEQ ID NO: 95895 - RNA, 24 nt, Artificial Sequence
  Synthetic
accaagguacuguuucuauacucc

SEQ ID NO: 95896 - RNA, 18 nt, Artificial Sequence
  Synthetic
ccauauuggucaaccucc

SEQ ID NO: 95897 - RNA, 20 nt, Artificial Sequence
  Synthetic
ugccauauuggucaaccucc

SEQ ID NO: 95898 - RNA, 21 nt, Artificial Sequence
  Synthetic
cugccauauuggucaaccucc

SEQ ID NO: 95899 - RNA, 22 nt, Artificial Sequence
  Synthetic
acugccauauuggucaaccucc

SEQ ID NO: 95900 - RNA, 23 nt, Artificial Sequence
  Synthetic
uacugccauauuggucaaccucc

SEQ ID NO: 95901 - RNA, 24 nt, Artificial Sequence
  Synthetic
cuacugccauauuggucaaccucc

SEQ ID NO: 95902 - RNA, 18 nt, Artificial Sequence
  Synthetic
uacauguaagucaccucc

SEQ ID NO: 95903 - RNA, 19 nt, Artificial Sequence
  Synthetic
auacauguaagucaccucc

SEQ ID NO: 95904 - RNA, 20 nt, Artificial Sequence
  Synthetic
cauacauguaagucaccucc

SEQ ID NO: 95905 - RNA, 21 nt, Artificial Sequence
  Synthetic
ucauacauguaagucaccucc

SEQ ID NO: 95906 - RNA, 22 nt, Artificial Sequence
  Synthetic
aucauacauguaagucaccucc

SEQ ID NO: 95907 - RNA, 23 nt, Artificial Sequence
  Synthetic
caucauacauguaagucaccucc

SEQ ID NO: 95908 - RNA, 24 nt, Artificial Sequence
  Synthetic
acaucauacauguaagucaccucc

SEQ ID NO: 95909 - RNA, 18 nt, Artificial Sequence
  Synthetic
ugacagaggucagccucc

SEQ ID NO: 95910 - RNA, 19 nt, Artificial Sequence
  Synthetic
augacagaggucagccucc

SEQ ID NO: 95911 - RNA, 21 nt, Artificial Sequence
  Synthetic
ugaugacagaggucagccucc

SEQ ID NO: 95912 - RNA, 22 nt, Artificial Sequence
  Synthetic
augaugacagaggucagccucc

SEQ ID NO: 95913 - RNA, 23 nt, Artificial Sequence
  Synthetic
aaugaugacagaggucagccucc

SEQ ID NO: 95914 - RNA, 24 nt, Artificial Sequence
  Synthetic
caaugaugacagaggucagccucc

SEQ ID NO: 95915 - RNA, 18 nt, Artificial Sequence
  Synthetic
uugugacaaacauccucc

SEQ ID NO: 95916 - RNA, 19 nt, Artificial Sequence
  Synthetic
auugugacaaacauccucc

SEQ ID NO: 95917 - RNA, 20 nt, Artificial Sequence
  Synthetic
aauugugacaaacauccucc

SEQ ID NO: 95918 - RNA, 21 nt, Artificial Sequence
  Synthetic
uaauugugacaaacauccucc

SEQ ID NO: 95919 - RNA, 22 nt, Artificial Sequence
  Synthetic
auaauugugacaaacauccucc

SEQ ID NO: 95920 - RNA, 23 nt, Artificial Sequence
  Synthetic
cauaauugugacaaacauccucc

SEQ ID NO: 95921 - RNA, 24 nt, Artificial Sequence
  Synthetic
ucauaauugugacaaacauccucc

SEQ ID NO: 95922 - RNA, 18 nt, Artificial Sequence
  Synthetic
cuaccaaacugcagcucc

SEQ ID NO: 95923 - RNA, 19 nt, Artificial Sequence
  Synthetic
ccuaccaaacugcagcucc

SEQ ID NO: 95924 - RNA, 20 nt, Artificial Sequence
  Synthetic
cccuaccaaacugcagcucc

SEQ ID NO: 95925 - RNA, 21 nt, Artificial Sequence
  Synthetic
acccuaccaaacugcagcucc

SEQ ID NO: 95926 - RNA, 22 nt, Artificial Sequence
  Synthetic
aacccuaccaaacugcagcucc

SEQ ID NO: 95927 - RNA, 23 nt, Artificial Sequence
  Synthetic
aaacccuaccaaacugcagcucc

SEQ ID NO: 95928 - RNA, 24 nt, Artificial Sequence
  Synthetic
caaacccuaccaaacugcagcucc

SEQ ID NO: 95929 - RNA, 18 nt, Artificial Sequence
  Synthetic
acaaaaucugugggcucc

SEQ ID NO: 95930 - RNA, 19 nt, Artificial Sequence
  Synthetic
cacaaaaucugugggcucc

SEQ ID NO: 95931 - RNA, 20 nt, Artificial Sequence
  Synthetic
ucacaaaaucugugggcucc

SEQ ID NO: 95932 - RNA, 18 nt, Artificial Sequence
  Synthetic
uagcucuuggauggcucc

SEQ ID NO: 95933 - RNA, 19 nt, Artificial Sequence
  Synthetic
auagcucuuggauggcucc

SEQ ID NO: 95934 - RNA, 20 nt, Artificial Sequence
  Synthetic
aauagcucuuggauggcucc

SEQ ID NO: 95935 - RNA, 22 nt, Artificial Sequence
  Synthetic
ugaauagcucuuggauggcucc

SEQ ID NO: 95936 - RNA, 24 nt, Artificial Sequence
  Synthetic
agugaauagcucuuggauggcucc

SEQ ID NO: 95937 - RNA, 18 nt, Artificial Sequence
  Synthetic
ugcagagagccaaucucc

SEQ ID NO: 95938 - RNA, 19 nt, Artificial Sequence
  Synthetic
uugcagagagccaaucucc

SEQ ID NO: 95939 - RNA, 20 nt, Artificial Sequence
  Synthetic
cuugcagagagccaaucucc

SEQ ID NO: 95940 - RNA, 21 nt, Artificial Sequence
  Synthetic
ccuugcagagagccaaucucc

SEQ ID NO: 95941 - RNA, 23 nt, Artificial Sequence
  Synthetic
agccuugcagagagccaaucucc

SEQ ID NO: 95942 - RNA, 24 nt, Artificial Sequence
  Synthetic
aagccuugcagagagccaaucucc

SEQ ID NO: 95943 - RNA, 18 nt, Artificial Sequence
  Synthetic
aagaaagugagcaucucc

SEQ ID NO: 95944 - RNA, 19 nt, Artificial Sequence
  Synthetic
aaagaaagugagcaucucc

SEQ ID NO: 95945 - RNA, 20 nt, Artificial Sequence
  Synthetic
aaaagaaagugagcaucucc

SEQ ID NO: 95946 - RNA, 21 nt, Artificial Sequence
  Synthetic
aaaaagaaagugagcaucucc

SEQ ID NO: 95947 - RNA, 23 nt, Artificial Sequence
  Synthetic
ugaaaaagaaagugagcaucucc

SEQ ID NO: 95948 - RNA, 24 nt, Artificial Sequence
  Synthetic
cugaaaaagaaagugagcaucucc

SEQ ID NO: 95949 - RNA, 20 nt, Artificial Sequence
  Synthetic
agggagagacuggcaucucc

SEQ ID NO: 95950 - RNA, 22 nt, Artificial Sequence
  Synthetic
ugagggagagacuggcaucucc

SEQ ID NO: 95951 - RNA, 23 nt, Artificial Sequence
  Synthetic
augagggagagacuggcaucucc

SEQ ID NO: 95952 - RNA, 24 nt, Artificial Sequence
  Synthetic
uaugagggagagacuggcaucucc

SEQ ID NO: 95953 - RNA, 18 nt, Artificial Sequence
  Synthetic
cugcgggcuccacucucc

SEQ ID NO: 95954 - RNA, 19 nt, Artificial Sequence
  Synthetic
ucugcgggcuccacucucc

SEQ ID NO: 95955 - RNA, 20 nt, Artificial Sequence
  Synthetic
aucugcgggcuccacucucc

SEQ ID NO: 95956 - RNA, 22 nt, Artificial Sequence
  Synthetic
agaucugcgggcuccacucucc

SEQ ID NO: 95957 - RNA, 23 nt, Artificial Sequence
  Synthetic
cagaucugcgggcuccacucucc

SEQ ID NO: 95958 - RNA, 24 nt, Artificial Sequence
  Synthetic
acagaucugcgggcuccacucucc

SEQ ID NO: 95959 - RNA, 18 nt, Artificial Sequence
  Synthetic
uagcuucuaaaucucucc

SEQ ID NO: 95960 - RNA, 19 nt, Artificial Sequence
  Synthetic
auagcuucuaaaucucucc

SEQ ID NO: 95961 - RNA, 20 nt, Artificial Sequence
  Synthetic
cauagcuucuaaaucucucc

SEQ ID NO: 95962 - RNA, 22 nt, Artificial Sequence
  Synthetic
ugcauagcuucuaaaucucucc

SEQ ID NO: 95963 - RNA, 23 nt, Artificial Sequence
  Synthetic
augcauagcuucuaaaucucucc

SEQ ID NO: 95964 - RNA, 24 nt, Artificial Sequence
  Synthetic
aaugcauagcuucuaaaucucucc

SEQ ID NO: 95965 - RNA, 19 nt, Artificial Sequence
  Synthetic
agcauuucuauuucucucc

SEQ ID NO: 95966 - RNA, 20 nt, Artificial Sequence
  Synthetic
uagcauuucuauuucucucc

SEQ ID NO: 95967 - RNA, 21 nt, Artificial Sequence
  Synthetic
auagcauuucuauuucucucc

SEQ ID NO: 95968 - RNA, 22 nt, Artificial Sequence
  Synthetic
uauagcauuucuauuucucucc

SEQ ID NO: 95969 - RNA, 23 nt, Artificial Sequence
  Synthetic
auauagcauuucuauuucucucc

SEQ ID NO: 95970 - RNA, 24 nt, Artificial Sequence
  Synthetic
aauauagcauuucuauuucucucc

SEQ ID NO: 95971 - RNA, 18 nt, Artificial Sequence
  Synthetic
ucagaaaggccagucucc

SEQ ID NO: 95972 - RNA, 19 nt, Artificial Sequence
  Synthetic
aucagaaaggccagucucc

SEQ ID NO: 95973 - RNA, 20 nt, Artificial Sequence
  Synthetic
aaucagaaaggccagucucc

SEQ ID NO: 95974 - RNA, 21 nt, Artificial Sequence
  Synthetic
uaaucagaaaggccagucucc

SEQ ID NO: 95975 - RNA, 22 nt, Artificial Sequence
  Synthetic
uuaaucagaaaggccagucucc

SEQ ID NO: 95976 - RNA, 23 nt, Artificial Sequence
  Synthetic
uuuaaucagaaaggccagucucc

SEQ ID NO: 95977 - RNA, 24 nt, Artificial Sequence
  Synthetic
auuuaaucagaaaggccagucucc

SEQ ID NO: 95978 - RNA, 18 nt, Artificial Sequence
  Synthetic
auucccaaacaugucucc

SEQ ID NO: 95979 - RNA, 19 nt, Artificial Sequence
  Synthetic
cauucccaaacaugucucc

SEQ ID NO: 95980 - RNA, 20 nt, Artificial Sequence
  Synthetic
acauucccaaacaugucucc

SEQ ID NO: 95981 - RNA, 22 nt, Artificial Sequence
  Synthetic
ugacauucccaaacaugucucc

SEQ ID NO: 95982 - RNA, 23 nt, Artificial Sequence
  Synthetic
augacauucccaaacaugucucc

SEQ ID NO: 95983 - RNA, 24 nt, Artificial Sequence
  Synthetic
uaugacauucccaaacaugucucc

SEQ ID NO: 95984 - RNA, 18 nt, Artificial Sequence
  Synthetic
uaucuucccaaauucucc

SEQ ID NO: 95985 - RNA, 19 nt, Artificial Sequence
  Synthetic
uuaucuucccaaauucucc

SEQ ID NO: 95986 - RNA, 20 nt, Artificial Sequence
  Synthetic
uuuaucuucccaaauucucc

SEQ ID NO: 95987 - RNA, 21 nt, Artificial Sequence
  Synthetic
auuuaucuucccaaauucucc

SEQ ID NO: 95988 - RNA, 22 nt, Artificial Sequence
  Synthetic
cauuuaucuucccaaauucucc

SEQ ID NO: 95989 - RNA, 23 nt, Artificial Sequence
  Synthetic
ucauuuaucuucccaaauucucc

SEQ ID NO: 95990 - RNA, 24 nt, Artificial Sequence
  Synthetic
aucauuuaucuucccaaauucucc

SEQ ID NO: 95991 - RNA, 19 nt, Artificial Sequence
  Synthetic
cgacugguaugucuucucc

SEQ ID NO: 95992 - RNA, 20 nt, Artificial Sequence
  Synthetic
ucgacugguaugucuucucc

SEQ ID NO: 95993 - RNA, 21 nt, Artificial Sequence
  Synthetic
cucgacugguaugucuucucc

SEQ ID NO: 95994 - RNA, 22 nt, Artificial Sequence
  Synthetic
ccucgacugguaugucuucucc

SEQ ID NO: 95995 - RNA, 23 nt, Artificial Sequence
  Synthetic
cccucgacugguaugucuucucc

SEQ ID NO: 95996 - RNA, 24 nt, Artificial Sequence
  Synthetic
ccccucgacugguaugucuucucc

SEQ ID NO: 95997 - RNA, 19 nt, Artificial Sequence
  Synthetic
agaagucugagccaagucc

SEQ ID NO: 95998 - RNA, 20 nt, Artificial Sequence
  Synthetic
uagaagucugagccaagucc

SEQ ID NO: 95999 - RNA, 21 nt, Artificial Sequence
  Synthetic
auagaagucugagccaagucc

SEQ ID NO: 96000 - RNA, 22 nt, Artificial Sequence
  Synthetic
aauagaagucugagccaagucc

SEQ ID NO: 96001 - RNA, 23 nt, Artificial Sequence
  Synthetic
aaauagaagucugagccaagucc

SEQ ID NO: 96002 - RNA, 24 nt, Artificial Sequence
  Synthetic
aaaauagaagucugagccaagucc

SEQ ID NO: 96003 - RNA, 18 nt, Artificial Sequence
  Synthetic
agcauuuuauaacagucc

SEQ ID NO: 96004 - RNA, 19 nt, Artificial Sequence
  Synthetic
cagcauuuuauaacagucc

SEQ ID NO: 96005 - RNA, 21 nt, Artificial Sequence
  Synthetic
ugcagcauuuuauaacagucc

SEQ ID NO: 96006 - RNA, 22 nt, Artificial Sequence
  Synthetic
augcagcauuuuauaacagucc

SEQ ID NO: 96007 - RNA, 23 nt, Artificial Sequence
  Synthetic
caugcagcauuuuauaacagucc

SEQ ID NO: 96008 - RNA, 18 nt, Artificial Sequence
  Synthetic
ucaguuggaauacagucc

SEQ ID NO: 96009 - RNA, 20 nt, Artificial Sequence
  Synthetic
ugucaguuggaauacagucc

SEQ ID NO: 96010 - RNA, 21 nt, Artificial Sequence
  Synthetic
cugucaguuggaauacagucc

SEQ ID NO: 96011 - RNA, 23 nt, Artificial Sequence
  Synthetic
agcugucaguuggaauacagucc

SEQ ID NO: 96012 - RNA, 18 nt, Artificial Sequence
  Synthetic
uauagcagaaacgagucc

SEQ ID NO: 96013 - RNA, 21 nt, Artificial Sequence
  Synthetic
ugguauagcagaaacgagucc

SEQ ID NO: 96014 - RNA, 22 nt, Artificial Sequence
  Synthetic
augguauagcagaaacgagucc

SEQ ID NO: 96015 - RNA, 23 nt, Artificial Sequence
  Synthetic
uaugguauagcagaaacgagucc

SEQ ID NO: 96016 - RNA, 18 nt, Artificial Sequence
  Synthetic
cucugcugcugcuagucc

SEQ ID NO: 96017 - RNA, 20 nt, Artificial Sequence
  Synthetic
agcucugcugcugcuagucc

SEQ ID NO: 96018 - RNA, 18 nt, Artificial Sequence
  Synthetic
uucgaacucuugacgucc

SEQ ID NO: 96019 - RNA, 19 nt, Artificial Sequence
  Synthetic
uuucgaacucuugacgucc

SEQ ID NO: 96020 - RNA, 22 nt, Artificial Sequence
  Synthetic
ugguuucgaacucuugacgucc

SEQ ID NO: 96021 - RNA, 23 nt, Artificial Sequence
  Synthetic
cugguuucgaacucuugacgucc

SEQ ID NO: 96022 - RNA, 18 nt, Artificial Sequence
  Synthetic
ugggauuaagggaggucc

SEQ ID NO: 96023 - RNA, 19 nt, Artificial Sequence
  Synthetic
augggauuaagggaggucc

SEQ ID NO: 96024 - RNA, 22 nt, Artificial Sequence
  Synthetic
uggaugggauuaagggaggucc

SEQ ID NO: 96025 - RNA, 24 nt, Artificial Sequence
  Synthetic
uguggaugggauuaagggaggucc

SEQ ID NO: 96026 - RNA, 18 nt, Artificial Sequence
  Synthetic
ugaaagcaauuuaggucc

SEQ ID NO: 96027 - RNA, 19 nt, Artificial Sequence
  Synthetic
augaaagcaauuuaggucc

SEQ ID NO: 96028 - RNA, 18 nt, Artificial Sequence
  Synthetic
cucuuuccgcuagggucc

SEQ ID NO: 96029 - RNA, 20 nt, Artificial Sequence
  Synthetic
ugcucuuuccgcuagggucc

SEQ ID NO: 96030 - RNA, 21 nt, Artificial Sequence
  Synthetic
cugcucuuuccgcuagggucc

SEQ ID NO: 96031 - RNA, 23 nt, Artificial Sequence
  Synthetic
agcugcucuuuccgcuagggucc

SEQ ID NO: 96032 - RNA, 24 nt, Artificial Sequence
  Synthetic
aagcugcucuuuccgcuagggucc

SEQ ID NO: 96033 - RNA, 18 nt, Artificial Sequence
  Synthetic
uaccaucagccauggucc

SEQ ID NO: 96034 - RNA, 19 nt, Artificial Sequence
  Synthetic
auaccaucagccauggucc

SEQ ID NO: 96035 - RNA, 19 nt, Artificial Sequence
  Synthetic
agaaauucuaaacuggucc

SEQ ID NO: 96036 - RNA, 20 nt, Artificial Sequence
  Synthetic
uagaaauucuaaacuggucc

SEQ ID NO: 96037 - RNA, 21 nt, Artificial Sequence
  Synthetic
auagaaauucuaaacuggucc

SEQ ID NO: 96038 - RNA, 22 nt, Artificial Sequence
  Synthetic
uauagaaauucuaaacuggucc

SEQ ID NO: 96039 - RNA, 23 nt, Artificial Sequence
  Synthetic
uuauagaaauucuaaacuggucc

SEQ ID NO: 96040 - RNA, 24 nt, Artificial Sequence
  Synthetic
uuuauagaaauucuaaacuggucc

SEQ ID NO: 96041 - RNA, 21 nt, Artificial Sequence
  Synthetic
aaaugccaauacugcuggucc

SEQ ID NO: 96042 - RNA, 22 nt, Artificial Sequence
  Synthetic
aaaaugccaauacugcuggucc

SEQ ID NO: 96043 - RNA, 23 nt, Artificial Sequence
  Synthetic
aaaaaugccaauacugcuggucc

SEQ ID NO: 96044 - RNA, 24 nt, Artificial Sequence
  Synthetic
aaaaaaugccaauacugcuggucc

SEQ ID NO: 96045 - RNA, 18 nt, Artificial Sequence
  Synthetic
auaugguagaauuggucc

SEQ ID NO: 96046 - RNA, 19 nt, Artificial Sequence
  Synthetic
aauaugguagaauuggucc

SEQ ID NO: 96047 - RNA, 20 nt, Artificial Sequence
  Synthetic
caauaugguagaauuggucc

SEQ ID NO: 96048 - RNA, 21 nt, Artificial Sequence
  Synthetic
acaauaugguagaauuggucc

SEQ ID NO: 96049 - RNA, 22 nt, Artificial Sequence
  Synthetic
cacaauaugguagaauuggucc

SEQ ID NO: 96050 - RNA, 24 nt, Artificial Sequence
  Synthetic
ugcacaauaugguagaauuggucc

SEQ ID NO: 96051 - RNA, 18 nt, Artificial Sequence
  Synthetic
uccuacugcauuuggucc

SEQ ID NO: 96052 - RNA, 19 nt, Artificial Sequence
  Synthetic
cuccuacugcauuuggucc

SEQ ID NO: 96053 - RNA, 20 nt, Artificial Sequence
  Synthetic
ucuccuacugcauuuggucc

SEQ ID NO: 96054 - RNA, 21 nt, Artificial Sequence
  Synthetic
aucuccuacugcauuuggucc

SEQ ID NO: 96055 - RNA, 22 nt, Artificial Sequence
  Synthetic
aaucuccuacugcauuuggucc

SEQ ID NO: 96056 - RNA, 24 nt, Artificial Sequence
  Synthetic
agaaucuccuacugcauuuggucc

SEQ ID NO: 96057 - RNA, 20 nt, Artificial Sequence
  Synthetic
agguuguaagauaaaugucc

SEQ ID NO: 96058 - RNA, 21 nt, Artificial Sequence
  Synthetic
cagguuguaagauaaaugucc

SEQ ID NO: 96059 - RNA, 22 nt, Artificial Sequence
  Synthetic
acagguuguaagauaaaugucc

SEQ ID NO: 96060 - RNA, 23 nt, Artificial Sequence
  Synthetic
uacagguuguaagauaaaugucc

SEQ ID NO: 96061 - RNA, 18 nt, Artificial Sequence
  Synthetic
agauagcacagaaugucc

SEQ ID NO: 96062 - RNA, 19 nt, Artificial Sequence
  Synthetic
cagauagcacagaaugucc

SEQ ID NO: 96063 - RNA, 20 nt, Artificial Sequence
  Synthetic
ucagauagcacagaaugucc

SEQ ID NO: 96064 - RNA, 21 nt, Artificial Sequence
  Synthetic
uucagauagcacagaaugucc

SEQ ID NO: 96065 - RNA, 22 nt, Artificial Sequence
  Synthetic
uuucagauagcacagaaugucc

SEQ ID NO: 96066 - RNA, 24 nt, Artificial Sequence
  Synthetic
uguuucagauagcacagaaugucc

SEQ ID NO: 96067 - RNA, 18 nt, Artificial Sequence
  Synthetic
ugcaucuugcacaugucc

SEQ ID NO: 96068 - RNA, 19 nt, Artificial Sequence
  Synthetic
uugcaucuugcacaugucc

SEQ ID NO: 96069 - RNA, 20 nt, Artificial Sequence
  Synthetic
cuugcaucuugcacaugucc

SEQ ID NO: 96070 - RNA, 21 nt, Artificial Sequence
  Synthetic
ucuugcaucuugcacaugucc

SEQ ID NO: 96071 - RNA, 22 nt, Artificial Sequence
  Synthetic
cucuugcaucuugcacaugucc

SEQ ID NO: 96072 - RNA, 23 nt, Artificial Sequence
  Synthetic
ucucuugcaucuugcacaugucc

SEQ ID NO: 96073 - RNA, 24 nt, Artificial Sequence
  Synthetic
aucucuugcaucuugcacaugucc

SEQ ID NO: 96074 - RNA, 19 nt, Artificial Sequence
  Synthetic
uguuggaagcaagaugucc

SEQ ID NO: 96075 - RNA, 20 nt, Artificial Sequence
  Synthetic
auguuggaagcaagaugucc

SEQ ID NO: 96076 - RNA, 21 nt, Artificial Sequence
  Synthetic
uauguuggaagcaagaugucc

SEQ ID NO: 96077 - RNA, 22 nt, Artificial Sequence
  Synthetic
uuauguuggaagcaagaugucc

SEQ ID NO: 96078 - RNA, 23 nt, Artificial Sequence
  Synthetic
cuuauguuggaagcaagaugucc

SEQ ID NO: 96079 - RNA, 24 nt, Artificial Sequence
  Synthetic
ucuuauguuggaagcaagaugucc

SEQ ID NO: 96080 - RNA, 18 nt, Artificial Sequence
  Synthetic
uguugauuuuguaugucc

SEQ ID NO: 96081 - RNA, 20 nt, Artificial Sequence
  Synthetic
uguguugauuuuguaugucc

SEQ ID NO: 96082 - RNA, 21 nt, Artificial Sequence
  Synthetic
cuguguugauuuuguaugucc

SEQ ID NO: 96083 - RNA, 22 nt, Artificial Sequence
  Synthetic
ccuguguugauuuuguaugucc

SEQ ID NO: 96084 - RNA, 23 nt, Artificial Sequence
  Synthetic
accuguguugauuuuguaugucc

SEQ ID NO: 96085 - RNA, 24 nt, Artificial Sequence
  Synthetic
uaccuguguugauuuuguaugucc

SEQ ID NO: 96086 - RNA, 18 nt, Artificial Sequence
  Synthetic
uguuaaccaccauugucc

SEQ ID NO: 96087 - RNA, 20 nt, Artificial Sequence
  Synthetic
uguguuaaccaccauugucc

SEQ ID NO: 96088 - RNA, 21 nt, Artificial Sequence
  Synthetic
auguguuaaccaccauugucc

SEQ ID NO: 96089 - RNA, 22 nt, Artificial Sequence
  Synthetic
cauguguuaaccaccauugucc

SEQ ID NO: 96090 - RNA, 23 nt, Artificial Sequence
  Synthetic
acauguguuaaccaccauugucc

SEQ ID NO: 96091 - RNA, 24 nt, Artificial Sequence
  Synthetic
cacauguguuaaccaccauugucc

SEQ ID NO: 96092 - RNA, 18 nt, Artificial Sequence
  Synthetic
cucauagguugcuugucc

SEQ ID NO: 96093 - RNA, 19 nt, Artificial Sequence
  Synthetic
acucauagguugcuugucc

SEQ ID NO: 96094 - RNA, 20 nt, Artificial Sequence
  Synthetic
aacucauagguugcuugucc

SEQ ID NO: 96095 - RNA, 21 nt, Artificial Sequence
  Synthetic
aaacucauagguugcuugucc

SEQ ID NO: 96096 - RNA, 22 nt, Artificial Sequence
  Synthetic
aaaacucauagguugcuugucc

SEQ ID NO: 96097 - RNA, 23 nt, Artificial Sequence
  Synthetic
caaaacucauagguugcuugucc

SEQ ID NO: 96098 - RNA, 21 nt, Artificial Sequence
  Synthetic
caaagaaauaaacuuuugucc

SEQ ID NO: 96099 - RNA, 22 nt, Artificial Sequence
  Synthetic
acaaagaaauaaacuuuugucc

SEQ ID NO: 96100 - RNA, 23 nt, Artificial Sequence
  Synthetic
uacaaagaaauaaacuuuugucc

SEQ ID NO: 96101 - RNA, 24 nt, Artificial Sequence
  Synthetic
uuacaaagaaauaaacuuuugucc

SEQ ID NO: 96102 - RNA, 18 nt, Artificial Sequence
  Synthetic
aaaacugauauaaauucc

SEQ ID NO: 96103 - RNA, 19 nt, Artificial Sequence
  Synthetic
aaaaacugauauaaauucc

SEQ ID NO: 96104 - RNA, 20 nt, Artificial Sequence
  Synthetic
caaaaacugauauaaauucc

SEQ ID NO: 96105 - RNA, 21 nt, Artificial Sequence
  Synthetic
ccaaaaacugauauaaauucc

SEQ ID NO: 96106 - RNA, 23 nt, Artificial Sequence
  Synthetic
ugccaaaaacugauauaaauucc

SEQ ID NO: 96107 - RNA, 24 nt, Artificial Sequence
  Synthetic
uugccaaaaacugauauaaauucc

SEQ ID NO: 96108 - RNA, 18 nt, Artificial Sequence
  Synthetic
acuacagguuacaauucc

SEQ ID NO: 96109 - RNA, 19 nt, Artificial Sequence
  Synthetic
aacuacagguuacaauucc

SEQ ID NO: 96110 - RNA, 20 nt, Artificial Sequence
  Synthetic
aaacuacagguuacaauucc

SEQ ID NO: 96111 - RNA, 23 nt, Artificial Sequence
  Synthetic
uggaaacuacagguuacaauucc

SEQ ID NO: 96112 - RNA, 18 nt, Artificial Sequence
  Synthetic
ucuugacuaacgaauucc

SEQ ID NO: 96113 - RNA, 19 nt, Artificial Sequence
  Synthetic
uucuugacuaacgaauucc

SEQ ID NO: 96114 - RNA, 20 nt, Artificial Sequence
  Synthetic
uuucuugacuaacgaauucc

SEQ ID NO: 96115 - RNA, 21 nt, Artificial Sequence
  Synthetic
cuuucuugacuaacgaauucc

SEQ ID NO: 96116 - RNA, 22 nt, Artificial Sequence
  Synthetic
ucuuucuugacuaacgaauucc

SEQ ID NO: 96117 - RNA, 23 nt, Artificial Sequence
  Synthetic
uucuuucuugacuaacgaauucc

SEQ ID NO: 96118 - RNA, 18 nt, Artificial Sequence
  Synthetic
ccaagcagauuuaauucc

SEQ ID NO: 96119 - RNA, 19 nt, Artificial Sequence
  Synthetic
uccaagcagauuuaauucc

SEQ ID NO: 96120 - RNA, 20 nt, Artificial Sequence
  Synthetic
uuccaagcagauuuaauucc

SEQ ID NO: 96121 - RNA, 22 nt, Artificial Sequence
  Synthetic
uguuccaagcagauuuaauucc

SEQ ID NO: 96122 - RNA, 23 nt, Artificial Sequence
  Synthetic
auguuccaagcagauuuaauucc

SEQ ID NO: 96123 - RNA, 24 nt, Artificial Sequence
  Synthetic
aauguuccaagcagauuuaauucc

SEQ ID NO: 96124 - RNA, 18 nt, Artificial Sequence
  Synthetic
aaacgucuuccucauucc

SEQ ID NO: 96125 - RNA, 19 nt, Artificial Sequence
  Synthetic
aaaacgucuuccucauucc

SEQ ID NO: 96126 - RNA, 21 nt, Artificial Sequence
  Synthetic
agaaaacgucuuccucauucc

SEQ ID NO: 96127 - RNA, 22 nt, Artificial Sequence
  Synthetic
uagaaaacgucuuccucauucc

SEQ ID NO: 96128 - RNA, 23 nt, Artificial Sequence
  Synthetic
uuagaaaacgucuuccucauucc

SEQ ID NO: 96129 - RNA, 24 nt, Artificial Sequence
  Synthetic
uuuagaaaacgucuuccucauucc

SEQ ID NO: 96130 - RNA, 18 nt, Artificial Sequence
  Synthetic
ugaacagcuaaggauucc

SEQ ID NO: 96131 - RNA, 19 nt, Artificial Sequence
  Synthetic
uugaacagcuaaggauucc

SEQ ID NO: 96132 - RNA, 20 nt, Artificial Sequence
  Synthetic
auugaacagcuaaggauucc

SEQ ID NO: 96133 - RNA, 21 nt, Artificial Sequence
  Synthetic
aauugaacagcuaaggauucc

SEQ ID NO: 96134 - RNA, 22 nt, Artificial Sequence
  Synthetic
uaauugaacagcuaaggauucc

SEQ ID NO: 96135 - RNA, 23 nt, Artificial Sequence
  Synthetic
cuaauugaacagcuaaggauucc

SEQ ID NO: 96136 - RNA, 24 nt, Artificial Sequence
  Synthetic
ccuaauugaacagcuaaggauucc

SEQ ID NO: 96137 - RNA, 21 nt, Artificial Sequence
  Synthetic
auuuaaauuucaaaugauucc

SEQ ID NO: 96138 - RNA, 22 nt, Artificial Sequence
  Synthetic
aauuuaaauuucaaaugauucc

SEQ ID NO: 96139 - RNA, 23 nt, Artificial Sequence
  Synthetic
aaauuuaaauuucaaaugauucc

SEQ ID NO: 96140 - RNA, 24 nt, Artificial Sequence
  Synthetic
aaaauuuaaauuucaaaugauucc

SEQ ID NO: 96141 - RNA, 19 nt, Artificial Sequence
  Synthetic
cguuaggaucgcugauucc

SEQ ID NO: 96142 - RNA, 20 nt, Artificial Sequence
  Synthetic
acguuaggaucgcugauucc

SEQ ID NO: 96143 - RNA, 21 nt, Artificial Sequence
  Synthetic
aacguuaggaucgcugauucc

SEQ ID NO: 96144 - RNA, 18 nt, Artificial Sequence
  Synthetic
aaaauguguuauuauucc

SEQ ID NO: 96145 - RNA, 19 nt, Artificial Sequence
  Synthetic
aaaaauguguuauuauucc

SEQ ID NO: 96146 - RNA, 21 nt, Artificial Sequence
  Synthetic
agaaaaauguguuauuauucc

SEQ ID NO: 96147 - RNA, 22 nt, Artificial Sequence
  Synthetic
cagaaaaauguguuauuauucc

SEQ ID NO: 96148 - RNA, 23 nt, Artificial Sequence
  Synthetic
ucagaaaaauguguuauuauucc

SEQ ID NO: 96149 - RNA, 18 nt, Artificial Sequence
  Synthetic
cuaccuccaauuuauucc

SEQ ID NO: 96150 - RNA, 20 nt, Artificial Sequence
  Synthetic
ugcuaccuccaauuuauucc

SEQ ID NO: 96151 - RNA, 21 nt, Artificial Sequence
  Synthetic
cugcuaccuccaauuuauucc

SEQ ID NO: 96152 - RNA, 22 nt, Artificial Sequence
  Synthetic
ucugcuaccuccaauuuauucc

SEQ ID NO: 96153 - RNA, 23 nt, Artificial Sequence
  Synthetic
uucugcuaccuccaauuuauucc

SEQ ID NO: 96154 - RNA, 24 nt, Artificial Sequence
  Synthetic
auucugcuaccuccaauuuauucc

SEQ ID NO: 96155 - RNA, 18 nt, Artificial Sequence
  Synthetic
auaaaacaccuuuauucc

SEQ ID NO: 96156 - RNA, 19 nt, Artificial Sequence
  Synthetic
aauaaaacaccuuuauucc

SEQ ID NO: 96157 - RNA, 21 nt, Artificial Sequence
  Synthetic
ugaauaaaacaccuuuauucc

SEQ ID NO: 96158 - RNA, 22 nt, Artificial Sequence
  Synthetic
uugaauaaaacaccuuuauucc

SEQ ID NO: 96159 - RNA, 23 nt, Artificial Sequence
  Synthetic
auugaauaaaacaccuuuauucc

SEQ ID NO: 96160 - RNA, 24 nt, Artificial Sequence
  Synthetic
uauugaauaaaacaccuuuauucc

SEQ ID NO: 96161 - RNA, 18 nt, Artificial Sequence
  Synthetic
uuuguaagcagaacuucc

SEQ ID NO: 96162 - RNA, 19 nt, Artificial Sequence
  Synthetic
auuuguaagcagaacuucc

SEQ ID NO: 96163 - RNA, 20 nt, Artificial Sequence
  Synthetic
uauuuguaagcagaacuucc

SEQ ID NO: 96164 - RNA, 21 nt, Artificial Sequence
  Synthetic
auauuuguaagcagaacuucc

SEQ ID NO: 96165 - RNA, 22 nt, Artificial Sequence
  Synthetic
cauauuuguaagcagaacuucc

SEQ ID NO: 96166 - RNA, 23 nt, Artificial Sequence
  Synthetic
ccauauuuguaagcagaacuucc

SEQ ID NO: 96167 - RNA, 24 nt, Artificial Sequence
  Synthetic
cccauauuuguaagcagaacuucc

SEQ ID NO: 96168 - RNA, 19 nt, Artificial Sequence
  Synthetic
aguuuucuucaugacuucc

SEQ ID NO: 96169 - RNA, 21 nt, Artificial Sequence
  Synthetic
agaguuuucuucaugacuucc

SEQ ID NO: 96170 - RNA, 22 nt, Artificial Sequence
  Synthetic
aagaguuuucuucaugacuucc

SEQ ID NO: 96171 - RNA, 23 nt, Artificial Sequence
  Synthetic
aaagaguuuucuucaugacuucc

SEQ ID NO: 96172 - RNA, 24 nt, Artificial Sequence
  Synthetic
caaagaguuuucuucaugacuucc

SEQ ID NO: 96173 - RNA, 18 nt, Artificial Sequence
  Synthetic
agaauccgagggccuucc

SEQ ID NO: 96174 - RNA, 19 nt, Artificial Sequence
  Synthetic
uagaauccgagggccuucc

SEQ ID NO: 96175 - RNA, 20 nt, Artificial Sequence
  Synthetic
auagaauccgagggccuucc

SEQ ID NO: 96176 - RNA, 21 nt, Artificial Sequence
  Synthetic
uauagaauccgagggccuucc

SEQ ID NO: 96177 - RNA, 22 nt, Artificial Sequence
  Synthetic
uuauagaauccgagggccuucc

SEQ ID NO: 96178 - RNA, 23 nt, Artificial Sequence
  Synthetic
cuuauagaauccgagggccuucc

SEQ ID NO: 96179 - RNA, 24 nt, Artificial Sequence
  Synthetic
acuuauagaauccgagggccuucc

SEQ ID NO: 96180 - RNA, 18 nt, Artificial Sequence
  Synthetic
uaaaguucguugccuucc

SEQ ID NO: 96181 - RNA, 19 nt, Artificial Sequence
  Synthetic
cuaaaguucguugccuucc

SEQ ID NO: 96182 - RNA, 21 nt, Artificial Sequence
  Synthetic
ugcuaaaguucguugccuucc

SEQ ID NO: 96183 - RNA, 22 nt, Artificial Sequence
  Synthetic
uugcuaaaguucguugccuucc

SEQ ID NO: 96184 - RNA, 23 nt, Artificial Sequence
  Synthetic
cuugcuaaaguucguugccuucc

SEQ ID NO: 96185 - RNA, 24 nt, Artificial Sequence
  Synthetic
ucuugcuaaaguucguugccuucc

SEQ ID NO: 96186 - RNA, 18 nt, Artificial Sequence
  Synthetic
cauccuaccacagcuucc

SEQ ID NO: 96187 - RNA, 19 nt, Artificial Sequence
  Synthetic
acauccuaccacagcuucc

SEQ ID NO: 96188 - RNA, 20 nt, Artificial Sequence
  Synthetic
aacauccuaccacagcuucc

SEQ ID NO: 96189 - RNA, 21 nt, Artificial Sequence
  Synthetic
caacauccuaccacagcuucc

SEQ ID NO: 96190 - RNA, 22 nt, Artificial Sequence
  Synthetic
ccaacauccuaccacagcuucc

SEQ ID NO: 96191 - RNA, 23 nt, Artificial Sequence
  Synthetic
uccaacauccuaccacagcuucc

SEQ ID NO: 96192 - RNA, 24 nt, Artificial Sequence
  Synthetic
cuccaacauccuaccacagcuucc

SEQ ID NO: 96193 - RNA, 18 nt, Artificial Sequence
  Synthetic
cuuaucauagcagcuucc

SEQ ID NO: 96194 - RNA, 19 nt, Artificial Sequence
  Synthetic
ccuuaucauagcagcuucc

SEQ ID NO: 96195 - RNA, 20 nt, Artificial Sequence
  Synthetic
accuuaucauagcagcuucc

SEQ ID NO: 96196 - RNA, 21 nt, Artificial Sequence
  Synthetic
caccuuaucauagcagcuucc

SEQ ID NO: 96197 - RNA, 22 nt, Artificial Sequence
  Synthetic
acaccuuaucauagcagcuucc

SEQ ID NO: 96198 - RNA, 23 nt, Artificial Sequence
  Synthetic
aacaccuuaucauagcagcuucc

SEQ ID NO: 96199 - RNA, 24 nt, Artificial Sequence
  Synthetic
aaacaccuuaucauagcagcuucc

SEQ ID NO: 96200 - RNA, 18 nt, Artificial Sequence
  Synthetic
aacuguagcagagcuucc

SEQ ID NO: 96201 - RNA, 19 nt, Artificial Sequence
  Synthetic
aaacuguagcagagcuucc

SEQ ID NO: 96202 - RNA, 21 nt, Artificial Sequence
  Synthetic
ugaaacuguagcagagcuucc

SEQ ID NO: 96203 - RNA, 22 nt, Artificial Sequence
  Synthetic
uugaaacuguagcagagcuucc

SEQ ID NO: 96204 - RNA, 23 nt, Artificial Sequence
  Synthetic
uuugaaacuguagcagagcuucc

SEQ ID NO: 96205 - RNA, 24 nt, Artificial Sequence
  Synthetic
uuuugaaacuguagcagagcuucc

SEQ ID NO: 96206 - RNA, 20 nt, Artificial Sequence
  Synthetic
ugguuuaugcugaugcuucc

SEQ ID NO: 96207 - RNA, 21 nt, Artificial Sequence
  Synthetic
uugguuuaugcugaugcuucc

SEQ ID NO: 96208 - RNA, 22 nt, Artificial Sequence
  Synthetic
uuugguuuaugcugaugcuucc

SEQ ID NO: 96209 - RNA, 23 nt, Artificial Sequence
  Synthetic
uuuugguuuaugcugaugcuucc

SEQ ID NO: 96210 - RNA, 24 nt, Artificial Sequence
  Synthetic
uuuuugguuuaugcugaugcuucc

SEQ ID NO: 96211 - RNA, 18 nt, Artificial Sequence
  Synthetic
cuuccaacuucugcuucc

SEQ ID NO: 96212 - RNA, 19 nt, Artificial Sequence
  Synthetic
ucuuccaacuucugcuucc

SEQ ID NO: 96213 - RNA, 21 nt, Artificial Sequence
  Synthetic
ugucuuccaacuucugcuucc

SEQ ID NO: 96214 - RNA, 22 nt, Artificial Sequence
  Synthetic
cugucuuccaacuucugcuucc

SEQ ID NO: 96215 - RNA, 23 nt, Artificial Sequence
  Synthetic
ucugucuuccaacuucugcuucc

SEQ ID NO: 96216 - RNA, 18 nt, Artificial Sequence
  Synthetic
caaguaguuucaucuucc

SEQ ID NO: 96217 - RNA, 20 nt, Artificial Sequence
  Synthetic
ugcaaguaguuucaucuucc

SEQ ID NO: 96218 - RNA, 21 nt, Artificial Sequence
  Synthetic
uugcaaguaguuucaucuucc

SEQ ID NO: 96219 - RNA, 22 nt, Artificial Sequence
  Synthetic
uuugcaaguaguuucaucuucc

SEQ ID NO: 96220 - RNA, 23 nt, Artificial Sequence
  Synthetic
cuuugcaaguaguuucaucuucc

SEQ ID NO: 96221 - RNA, 24 nt, Artificial Sequence
  Synthetic
ucuuugcaaguaguuucaucuucc

SEQ ID NO: 96222 - RNA, 19 nt, Artificial Sequence
  Synthetic
agauccugcuuucucuucc

SEQ ID NO: 96223 - RNA, 21 nt, Artificial Sequence
  Synthetic
agagauccugcuuucucuucc

SEQ ID NO: 96224 - RNA, 23 nt, Artificial Sequence
  Synthetic
agagagauccugcuuucucuucc

SEQ ID NO: 96225 - RNA, 24 nt, Artificial Sequence
  Synthetic
cagagagauccugcuuucucuucc

SEQ ID NO: 96226 - RNA, 18 nt, Artificial Sequence
  Synthetic
aauuagcaguauucuucc

SEQ ID NO: 96227 - RNA, 19 nt, Artificial Sequence
  Synthetic
aaauuagcaguauucuucc

SEQ ID NO: 96228 - RNA, 20 nt, Artificial Sequence
  Synthetic
caaauuagcaguauucuucc

SEQ ID NO: 96229 - RNA, 21 nt, Artificial Sequence
  Synthetic
acaaauuagcaguauucuucc

SEQ ID NO: 96230 - RNA, 22 nt, Artificial Sequence
  Synthetic
aacaaauuagcaguauucuucc

SEQ ID NO: 96231 - RNA, 23 nt, Artificial Sequence
  Synthetic
aaacaaauuagcaguauucuucc

SEQ ID NO: 96232 - RNA, 24 nt, Artificial Sequence
  Synthetic
aaaacaaauuagcaguauucuucc

SEQ ID NO: 96233 - RNA, 18 nt, Artificial Sequence
  Synthetic
cuagcacauacuucuucc

SEQ ID NO: 96234 - RNA, 19 nt, Artificial Sequence
  Synthetic
ucuagcacauacuucuucc

SEQ ID NO: 96235 - RNA, 20 nt, Artificial Sequence
  Synthetic
cucuagcacauacuucuucc

SEQ ID NO: 96236 - RNA, 21 nt, Artificial Sequence
  Synthetic
ucucuagcacauacuucuucc

SEQ ID NO: 96237 - RNA, 22 nt, Artificial Sequence
  Synthetic
aucucuagcacauacuucuucc

SEQ ID NO: 96238 - RNA, 23 nt, Artificial Sequence
  Synthetic
caucucuagcacauacuucuucc

SEQ ID NO: 96239 - RNA, 21 nt, Artificial Sequence
  Synthetic
auauucucuauuauuucuucc

SEQ ID NO: 96240 - RNA, 22 nt, Artificial Sequence
  Synthetic
cauauucucuauuauuucuucc

SEQ ID NO: 96241 - RNA, 23 nt, Artificial Sequence
  Synthetic
ucauauucucuauuauuucuucc

SEQ ID NO: 96242 - RNA, 24 nt, Artificial Sequence
  Synthetic
uucauauucucuauuauuucuucc

SEQ ID NO: 96243 - RNA, 21 nt, Artificial Sequence
  Synthetic
uucaugucuuuauaaaguucc

SEQ ID NO: 96244 - RNA, 22 nt, Artificial Sequence
  Synthetic
uuucaugucuuuauaaaguucc

SEQ ID NO: 96245 - RNA, 23 nt, Artificial Sequence
  Synthetic
uuuucaugucuuuauaaaguucc

SEQ ID NO: 96246 - RNA, 24 nt, Artificial Sequence
  Synthetic
cuuuucaugucuuuauaaaguucc

SEQ ID NO: 96247 - RNA, 19 nt, Artificial Sequence
  Synthetic
ugguuggaauuuagguucc

SEQ ID NO: 96248 - RNA, 20 nt, Artificial Sequence
  Synthetic
augguuggaauuuagguucc

SEQ ID NO: 96249 - RNA, 21 nt, Artificial Sequence
  Synthetic
caugguuggaauuuagguucc

SEQ ID NO: 96250 - RNA, 22 nt, Artificial Sequence
  Synthetic
ccaugguuggaauuuagguucc

SEQ ID NO: 96251 - RNA, 23 nt, Artificial Sequence
  Synthetic
accaugguuggaauuuagguucc

SEQ ID NO: 96252 - RNA, 24 nt, Artificial Sequence
  Synthetic
aaccaugguuggaauuuagguucc

SEQ ID NO: 96253 - RNA, 18 nt, Artificial Sequence
  Synthetic
ccccuugcaauugguucc

SEQ ID NO: 96254 - RNA, 19 nt, Artificial Sequence
  Synthetic
uccccuugcaauugguucc

SEQ ID NO: 96255 - RNA, 20 nt, Artificial Sequence
  Synthetic
cuccccuugcaauugguucc

SEQ ID NO: 96256 - RNA, 21 nt, Artificial Sequence
  Synthetic
ucuccccuugcaauugguucc

SEQ ID NO: 96257 - RNA, 22 nt, Artificial Sequence
  Synthetic
uucuccccuugcaauugguucc

SEQ ID NO: 96258 - RNA, 23 nt, Artificial Sequence
  Synthetic
uuucuccccuugcaauugguucc

SEQ ID NO: 96259 - RNA, 24 nt, Artificial Sequence
  Synthetic
uuuucuccccuugcaauugguucc

SEQ ID NO: 96260 - RNA, 18 nt, Artificial Sequence
  Synthetic
auuugaaugaucuguucc

SEQ ID NO: 96261 - RNA, 19 nt, Artificial Sequence
  Synthetic
uauuugaaugaucuguucc

SEQ ID NO: 96262 - RNA, 20 nt, Artificial Sequence
  Synthetic
cuauuugaaugaucuguucc

SEQ ID NO: 96263 - RNA, 21 nt, Artificial Sequence
  Synthetic
ccuauuugaaugaucuguucc

SEQ ID NO: 96264 - RNA, 22 nt, Artificial Sequence
  Synthetic
uccuauuugaaugaucuguucc

SEQ ID NO: 96265 - RNA, 24 nt, Artificial Sequence
  Synthetic
aguccuauuugaaugaucuguucc

SEQ ID NO: 96266 - RNA, 18 nt, Artificial Sequence
  Synthetic
uaggaggucagaauuucc

SEQ ID NO: 96267 - RNA, 19 nt, Artificial Sequence
  Synthetic
auaggaggucagaauuucc

SEQ ID NO: 96268 - RNA, 20 nt, Artificial Sequence
  Synthetic
cauaggaggucagaauuucc

SEQ ID NO: 96269 - RNA, 21 nt, Artificial Sequence
  Synthetic
ccauaggaggucagaauuucc

SEQ ID NO: 96270 - RNA, 22 nt, Artificial Sequence
  Synthetic
cccauaggaggucagaauuucc

SEQ ID NO: 96271 - RNA, 23 nt, Artificial Sequence
  Synthetic
ucccauaggaggucagaauuucc

SEQ ID NO: 96272 - RNA, 24 nt, Artificial Sequence
  Synthetic
cucccauaggaggucagaauuucc

SEQ ID NO: 96273 - RNA, 18 nt, Artificial Sequence
  Synthetic
cagauugauaggauuucc

SEQ ID NO: 96274 - RNA, 19 nt, Artificial Sequence
  Synthetic
acagauugauaggauuucc

SEQ ID NO: 96275 - RNA, 20 nt, Artificial Sequence
  Synthetic
cacagauugauaggauuucc

SEQ ID NO: 96276 - RNA, 21 nt, Artificial Sequence
  Synthetic
ucacagauugauaggauuucc

SEQ ID NO: 96277 - RNA, 22 nt, Artificial Sequence
  Synthetic
aucacagauugauaggauuucc

SEQ ID NO: 96278 - RNA, 23 nt, Artificial Sequence
  Synthetic
aaucacagauugauaggauuucc

SEQ ID NO: 96279 - RNA, 19 nt, Artificial Sequence
  Synthetic
ugcuggaucucuuauuucc

SEQ ID NO: 96280 - RNA, 20 nt, Artificial Sequence
  Synthetic
uugcuggaucucuuauuucc

SEQ ID NO: 96281 - RNA, 21 nt, Artificial Sequence
  Synthetic
auugcuggaucucuuauuucc

SEQ ID NO: 96282 - RNA, 22 nt, Artificial Sequence
  Synthetic
cauugcuggaucucuuauuucc

SEQ ID NO: 96283 - RNA, 23 nt, Artificial Sequence
  Synthetic
ucauugcuggaucucuuauuucc

SEQ ID NO: 96284 - RNA, 24 nt, Artificial Sequence
  Synthetic
uucauugcuggaucucuuauuucc

SEQ ID NO: 96285 - RNA, 18 nt, Artificial Sequence
  Synthetic
cccgauacuuuuauuucc

SEQ ID NO: 96286 - RNA, 19 nt, Artificial Sequence
  Synthetic
acccgauacuuuuauuucc

SEQ ID NO: 96287 - RNA, 20 nt, Artificial Sequence
  Synthetic
cacccgauacuuuuauuucc

SEQ ID NO: 96288 - RNA, 21 nt, Artificial Sequence
  Synthetic
ucacccgauacuuuuauuucc

SEQ ID NO: 96289 - RNA, 22 nt, Artificial Sequence
  Synthetic
uucacccgauacuuuuauuucc

SEQ ID NO: 96290 - RNA, 23 nt, Artificial Sequence
  Synthetic
auucacccgauacuuuuauuucc

SEQ ID NO: 96291 - RNA, 24 nt, Artificial Sequence
  Synthetic
aauucacccgauacuuuuauuucc

SEQ ID NO: 96292 - RNA, 18 nt, Artificial Sequence
  Synthetic
acuaguaaauaacuuucc

SEQ ID NO: 96293 - RNA, 19 nt, Artificial Sequence
  Synthetic
aacuaguaaauaacuuucc

SEQ ID NO: 96294 - RNA, 20 nt, Artificial Sequence
  Synthetic
uaacuaguaaauaacuuucc

SEQ ID NO: 96295 - RNA, 22 nt, Artificial Sequence
  Synthetic
aguaacuaguaaauaacuuucc

SEQ ID NO: 96296 - RNA, 23 nt, Artificial Sequence
  Synthetic
aaguaacuaguaaauaacuuucc

SEQ ID NO: 96297 - RNA, 24 nt, Artificial Sequence
  Synthetic
aaaguaacuaguaaauaacuuucc

SEQ ID NO: 96298 - RNA, 18 nt, Artificial Sequence
  Synthetic
caucaaauuuuacuuucc

SEQ ID NO: 96299 - RNA, 20 nt, Artificial Sequence
  Synthetic
ugcaucaaauuuuacuuucc

SEQ ID NO: 96300 - RNA, 21 nt, Artificial Sequence
  Synthetic
augcaucaaauuuuacuuucc

SEQ ID NO: 96301 - RNA, 22 nt, Artificial Sequence
  Synthetic
uaugcaucaaauuuuacuuucc

SEQ ID NO: 96302 - RNA, 23 nt, Artificial Sequence
  Synthetic
auaugcaucaaauuuuacuuucc

SEQ ID NO: 96303 - RNA, 24 nt, Artificial Sequence
  Synthetic
aauaugcaucaaauuuuacuuucc

SEQ ID NO: 96304 - RNA, 18 nt, Artificial Sequence
  Synthetic
caucucuuuauucuuucc

SEQ ID NO: 96305 - RNA, 19 nt, Artificial Sequence
  Synthetic
acaucucuuuauucuuucc

SEQ ID NO: 96306 - RNA, 20 nt, Artificial Sequence
  Synthetic
cacaucucuuuauucuuucc

SEQ ID NO: 96307 - RNA, 21 nt, Artificial Sequence
  Synthetic
ucacaucucuuuauucuuucc

SEQ ID NO: 96308 - RNA, 22 nt, Artificial Sequence
  Synthetic
uucacaucucuuuauucuuucc

SEQ ID NO: 96309 - RNA, 23 nt, Artificial Sequence
  Synthetic
uuucacaucucuuuauucuuucc

SEQ ID NO: 96310 - RNA, 24 nt, Artificial Sequence
  Synthetic
auuucacaucucuuuauucuuucc

SEQ ID NO: 96311 - RNA, 18 nt, Artificial Sequence
  Synthetic
cacuuuaaaacaguuucc

SEQ ID NO: 96312 - RNA, 20 nt, Artificial Sequence
  Synthetic
ugcacuuuaaaacaguuucc

SEQ ID NO: 96313 - RNA, 21 nt, Artificial Sequence
  Synthetic
cugcacuuuaaaacaguuucc

SEQ ID NO: 96314 - RNA, 22 nt, Artificial Sequence
  Synthetic
ucugcacuuuaaaacaguuucc

SEQ ID NO: 96315 - RNA, 23 nt, Artificial Sequence
  Synthetic
uucugcacuuuaaaacaguuucc

SEQ ID NO: 96316 - RNA, 24 nt, Artificial Sequence
  Synthetic
cuucugcacuuuaaaacaguuucc

SEQ ID NO: 96317 - RNA, 18 nt, Artificial Sequence
  Synthetic
cauuuauauucaguuucc

SEQ ID NO: 96318 - RNA, 19 nt, Artificial Sequence
  Synthetic
acauuuauauucaguuucc

SEQ ID NO: 96319 - RNA, 20 nt, Artificial Sequence
  Synthetic
cacauuuauauucaguuucc

SEQ ID NO: 96320 - RNA, 21 nt, Artificial Sequence
  Synthetic
ccacauuuauauucaguuucc

SEQ ID NO: 96321 - RNA, 22 nt, Artificial Sequence
  Synthetic
uccacauuuauauucaguuucc

SEQ ID NO: 96322 - RNA, 23 nt, Artificial Sequence
  Synthetic
auccacauuuauauucaguuucc

SEQ ID NO: 96323 - RNA, 24 nt, Artificial Sequence
  Synthetic
aauccacauuuauauucaguuucc

SEQ ID NO: 96324 - RNA, 18 nt, Artificial Sequence
  Synthetic
acagcucucuauguuucc

SEQ ID NO: 96325 - RNA, 19 nt, Artificial Sequence
  Synthetic
aacagcucucuauguuucc

SEQ ID NO: 96326 - RNA, 20 nt, Artificial Sequence
  Synthetic
uaacagcucucuauguuucc

SEQ ID NO: 96327 - RNA, 21 nt, Artificial Sequence
  Synthetic
auaacagcucucuauguuucc

SEQ ID NO: 96328 - RNA, 22 nt, Artificial Sequence
  Synthetic
uauaacagcucucuauguuucc

SEQ ID NO: 96329 - RNA, 23 nt, Artificial Sequence
  Synthetic
uuauaacagcucucuauguuucc

SEQ ID NO: 96330 - RNA, 24 nt, Artificial Sequence
  Synthetic
auuauaacagcucucuauguuucc

SEQ ID NO: 96331 - RNA, 18 nt, Artificial Sequence
  Synthetic
auauucaugaaauuuucc

SEQ ID NO: 96332 - RNA, 20 nt, Artificial Sequence
  Synthetic
ugauauucaugaaauuuucc

SEQ ID NO: 96333 - RNA, 21 nt, Artificial Sequence
  Synthetic
cugauauucaugaaauuuucc

SEQ ID NO: 96334 - RNA, 22 nt, Artificial Sequence
  Synthetic
ccugauauucaugaaauuuucc

SEQ ID NO: 96335 - RNA, 24 nt, Artificial Sequence
  Synthetic
agccugauauucaugaaauuuucc

SEQ ID NO: 96336 - RNA, 18 nt, Artificial Sequence
  Synthetic
acucugaaggcauuuucc

SEQ ID NO: 96337 - RNA, 19 nt, Artificial Sequence
  Synthetic
aacucugaaggcauuuucc

SEQ ID NO: 96338 - RNA, 20 nt, Artificial Sequence
  Synthetic
aaacucugaaggcauuuucc

SEQ ID NO: 96339 - RNA, 22 nt, Artificial Sequence
  Synthetic
ugaaacucugaaggcauuuucc

SEQ ID NO: 96340 - RNA, 23 nt, Artificial Sequence
  Synthetic
uugaaacucugaaggcauuuucc

SEQ ID NO: 96341 - RNA, 19 nt, Artificial Sequence
  Synthetic
ugggguccgagacuuuucc

SEQ ID NO: 96342 - RNA, 20 nt, Artificial Sequence
  Synthetic
augggguccgagacuuuucc

SEQ ID NO: 96343 - RNA, 21 nt, Artificial Sequence
  Synthetic
uaugggguccgagacuuuucc

SEQ ID NO: 96344 - RNA, 24 nt, Artificial Sequence
  Synthetic
ugguaugggguccgagacuuuucc

SEQ ID NO: 96345 - RNA, 19 nt, Artificial Sequence
  Synthetic
ugcucuuaaaaccuuuucc

SEQ ID NO: 96346 - RNA, 20 nt, Artificial Sequence
  Synthetic
uugcucuuaaaaccuuuucc

SEQ ID NO: 96347 - RNA, 21 nt, Artificial Sequence
  Synthetic
cuugcucuuaaaaccuuuucc

SEQ ID NO: 96348 - RNA, 22 nt, Artificial Sequence
  Synthetic
acuugcucuuaaaaccuuuucc

SEQ ID NO: 96349 - RNA, 23 nt, Artificial Sequence
  Synthetic
cacuugcucuuaaaaccuuuucc

SEQ ID NO: 96350 - RNA, 24 nt, Artificial Sequence
  Synthetic
ucacuugcucuuaaaaccuuuucc

SEQ ID NO: 96351 - RNA, 18 nt, Artificial Sequence
  Synthetic
uauguaaaugccuuuucc

SEQ ID NO: 96352 - RNA, 19 nt, Artificial Sequence
  Synthetic
uuauguaaaugccuuuucc

SEQ ID NO: 96353 - RNA, 20 nt, Artificial Sequence
  Synthetic
uuuauguaaaugccuuuucc

SEQ ID NO: 96354 - RNA, 22 nt, Artificial Sequence
  Synthetic
aguuuauguaaaugccuuuucc

SEQ ID NO: 96355 - RNA, 23 nt, Artificial Sequence
  Synthetic
uaguuuauguaaaugccuuuucc

SEQ ID NO: 96356 - RNA, 24 nt, Artificial Sequence
  Synthetic
auaguuuauguaaaugccuuuucc

SEQ ID NO: 96357 - RNA, 18 nt, Artificial Sequence
  Synthetic
augguacccugcuuuucc

SEQ ID NO: 96358 - RNA, 19 nt, Artificial Sequence
  Synthetic
aaugguacccugcuuuucc

SEQ ID NO: 96359 - RNA, 21 nt, Artificial Sequence
  Synthetic
ugaaugguacccugcuuuucc

SEQ ID NO: 96360 - RNA, 24 nt, Artificial Sequence
  Synthetic
uggugaaugguacccugcuuuucc

SEQ ID NO: 96361 - RNA, 19 nt, Artificial Sequence
  Synthetic
ugaaauucuuggguuuucc

SEQ ID NO: 96362 - RNA, 20 nt, Artificial Sequence
  Synthetic
cugaaauucuuggguuuucc

SEQ ID NO: 96363 - RNA, 21 nt, Artificial Sequence
  Synthetic
ucugaaauucuuggguuuucc

SEQ ID NO: 96364 - RNA, 22 nt, Artificial Sequence
  Synthetic
uucugaaauucuuggguuuucc

SEQ ID NO: 96365 - RNA, 23 nt, Artificial Sequence
  Synthetic
auucugaaauucuuggguuuucc

SEQ ID NO: 96366 - RNA, 24 nt, Artificial Sequence
  Synthetic
uauucugaaauucuuggguuuucc

SEQ ID NO: 96367 - RNA, 18 nt, Artificial Sequence
  Synthetic
uggauuuguuauuuuucc

SEQ ID NO: 96368 - RNA, 19 nt, Artificial Sequence
  Synthetic
uuggauuuguuauuuuucc

SEQ ID NO: 96369 - RNA, 21 nt, Artificial Sequence
  Synthetic
uguuggauuuguuauuuuucc

SEQ ID NO: 96370 - RNA, 22 nt, Artificial Sequence
  Synthetic
auguuggauuuguuauuuuucc

SEQ ID NO: 96371 - RNA, 23 nt, Artificial Sequence
  Synthetic
cauguuggauuuguuauuuuucc

SEQ ID NO: 96372 - RNA, 24 nt, Artificial Sequence
  Synthetic
acauguuggauuuguuauuuuucc

SEQ ID NO: 96373 - RNA, 21 nt, Artificial Sequence
  Synthetic
auucccuucaucucuuuuucc

SEQ ID NO: 96374 - RNA, 23 nt, Artificial Sequence
  Synthetic
ugauucccuucaucucuuuuucc

SEQ ID NO: 96375 - RNA, 24 nt, Artificial Sequence
  Synthetic
uugauucccuucaucucuuuuucc

SEQ ID NO: 96376 - RNA, 18 nt, Artificial Sequence
  Synthetic
cucuaaaucccaaaaagc

SEQ ID NO: 96377 - RNA, 19 nt, Artificial Sequence
  Synthetic
ucucuaaaucccaaaaagc

SEQ ID NO: 96378 - RNA, 20 nt, Artificial Sequence
  Synthetic
uucucuaaaucccaaaaagc

SEQ ID NO: 96379 - RNA, 21 nt, Artificial Sequence
  Synthetic
uuucucuaaaucccaaaaagc

SEQ ID NO: 96380 - RNA, 22 nt, Artificial Sequence
  Synthetic
uuuucucuaaaucccaaaaagc

SEQ ID NO: 96381 - RNA, 23 nt, Artificial Sequence
  Synthetic
uuuuucucuaaaucccaaaaagc

SEQ ID NO: 96382 - RNA, 24 nt, Artificial Sequence
  Synthetic
cuuuuucucuaaaucccaaaaagc

SEQ ID NO: 96383 - RNA, 18 nt, Artificial Sequence
  Synthetic
uugucucuccccaaaagc

SEQ ID NO: 96384 - RNA, 19 nt, Artificial Sequence
  Synthetic
cuugucucuccccaaaagc

SEQ ID NO: 96385 - RNA, 20 nt, Artificial Sequence
  Synthetic
ucuugucucuccccaaaagc

SEQ ID NO: 96386 - RNA, 21 nt, Artificial Sequence
  Synthetic
cucuugucucuccccaaaagc

SEQ ID NO: 96387 - RNA, 22 nt, Artificial Sequence
  Synthetic
ucucuugucucuccccaaaagc

SEQ ID NO: 96388 - RNA, 23 nt, Artificial Sequence
  Synthetic
uucucuugucucuccccaaaagc

SEQ ID NO: 96389 - RNA, 24 nt, Artificial Sequence
  Synthetic
cuucucuugucucuccccaaaagc

SEQ ID NO: 96390 - RNA, 18 nt, Artificial Sequence
  Synthetic
cauuuguccuccaaaagc

SEQ ID NO: 96391 - RNA, 19 nt, Artificial Sequence
  Synthetic
ucauuuguccuccaaaagc

SEQ ID NO: 96392 - RNA, 20 nt, Artificial Sequence
  Synthetic
aucauuuguccuccaaaagc

SEQ ID NO: 96393 - RNA, 21 nt, Artificial Sequence
  Synthetic
aaucauuuguccuccaaaagc

SEQ ID NO: 96394 - RNA, 22 nt, Artificial Sequence
  Synthetic
aaaucauuuguccuccaaaagc

SEQ ID NO: 96395 - RNA, 24 nt, Artificial Sequence
  Synthetic
ugaaaucauuuguccuccaaaagc

SEQ ID NO: 96396 - RNA, 18 nt, Artificial Sequence
  Synthetic
augaggaacuguaaaagc

SEQ ID NO: 96397 - RNA, 19 nt, Artificial Sequence
  Synthetic
aaugaggaacuguaaaagc

SEQ ID NO: 96398 - RNA, 20 nt, Artificial Sequence
  Synthetic
uaaugaggaacuguaaaagc

SEQ ID NO: 96399 - RNA, 22 nt, Artificial Sequence
  Synthetic
aguaaugaggaacuguaaaagc

SEQ ID NO: 96400 - RNA, 23 nt, Artificial Sequence
  Synthetic
aaguaaugaggaacuguaaaagc

SEQ ID NO: 96401 - RNA, 24 nt, Artificial Sequence
  Synthetic
caaguaaugaggaacuguaaaagc

SEQ ID NO: 96402 - RNA, 18 nt, Artificial Sequence
  Synthetic
acaaguguuugccaaagc

SEQ ID NO: 96403 - RNA, 19 nt, Artificial Sequence
  Synthetic
aacaaguguuugccaaagc

SEQ ID NO: 96404 - RNA, 20 nt, Artificial Sequence
  Synthetic
uaacaaguguuugccaaagc

SEQ ID NO: 96405 - RNA, 21 nt, Artificial Sequence
  Synthetic
auaacaaguguuugccaaagc

SEQ ID NO: 96406 - RNA, 22 nt, Artificial Sequence
  Synthetic
cauaacaaguguuugccaaagc

SEQ ID NO: 96407 - RNA, 23 nt, Artificial Sequence
  Synthetic
ccauaacaaguguuugccaaagc

SEQ ID NO: 96408 - RNA, 18 nt, Artificial Sequence
  Synthetic
caauauuagauccaaagc

SEQ ID NO: 96409 - RNA, 19 nt, Artificial Sequence
  Synthetic
ucaauauuagauccaaagc

SEQ ID NO: 96410 - RNA, 21 nt, Artificial Sequence
  Synthetic
agucaauauuagauccaaagc

SEQ ID NO: 96411 - RNA, 18 nt, Artificial Sequence
  Synthetic
uuccuucaagcucaaagc

SEQ ID NO: 96412 - RNA, 19 nt, Artificial Sequence
  Synthetic
uuuccuucaagcucaaagc

SEQ ID NO: 96413 - RNA, 20 nt, Artificial Sequence
  Synthetic
auuuccuucaagcucaaagc

SEQ ID NO: 96414 - RNA, 21 nt, Artificial Sequence
  Synthetic
cauuuccuucaagcucaaagc

SEQ ID NO: 96415 - RNA, 22 nt, Artificial Sequence
  Synthetic
ucauuuccuucaagcucaaagc

SEQ ID NO: 96416 - RNA, 23 nt, Artificial Sequence
  Synthetic
cucauuuccuucaagcucaaagc

SEQ ID NO: 96417 - RNA, 24 nt, Artificial Sequence
  Synthetic
ucucauuuccuucaagcucaaagc

SEQ ID NO: 96418 - RNA, 19 nt, Artificial Sequence
  Synthetic
aguuucuuauggcgaaagc

SEQ ID NO: 96419 - RNA, 20 nt, Artificial Sequence
  Synthetic
uaguuucuuauggcgaaagc

SEQ ID NO: 96420 - RNA, 21 nt, Artificial Sequence
  Synthetic
cuaguuucuuauggcgaaagc

SEQ ID NO: 96421 - RNA, 22 nt, Artificial Sequence
  Synthetic
ucuaguuucuuauggcgaaagc

SEQ ID NO: 96422 - RNA, 23 nt, Artificial Sequence
  Synthetic
uucuaguuucuuauggcgaaagc

SEQ ID NO: 96423 - RNA, 24 nt, Artificial Sequence
  Synthetic
uuucuaguuucuuauggcgaaagc

SEQ ID NO: 96424 - RNA, 21 nt, Artificial Sequence
  Synthetic
agaaaaauaaaugaggaaagc

SEQ ID NO: 96425 - RNA, 23 nt, Artificial Sequence
  Synthetic
ugagaaaaauaaaugaggaaagc

SEQ ID NO: 96426 - RNA, 24 nt, Artificial Sequence
  Synthetic
uugagaaaaauaaaugaggaaagc

SEQ ID NO: 96427 - RNA, 18 nt, Artificial Sequence
  Synthetic
uacucucuuagauaaagc

SEQ ID NO: 96428 - RNA, 19 nt, Artificial Sequence
  Synthetic
uuacucucuuagauaaagc

SEQ ID NO: 96429 - RNA, 20 nt, Artificial Sequence
  Synthetic
uuuacucucuuagauaaagc

SEQ ID NO: 96430 - RNA, 21 nt, Artificial Sequence
  Synthetic
auuuacucucuuagauaaagc

SEQ ID NO: 96431 - RNA, 23 nt, Artificial Sequence
  Synthetic
ugauuuacucucuuagauaaagc

SEQ ID NO: 96432 - RNA, 24 nt, Artificial Sequence
  Synthetic
uugauuuacucucuuagauaaagc

SEQ ID NO: 96433 - RNA, 18 nt, Artificial Sequence
  Synthetic
uacuaugaguuguaaagc

SEQ ID NO: 96434 - RNA, 20 nt, Artificial Sequence
  Synthetic
uguacuaugaguuguaaagc

SEQ ID NO: 96435 - RNA, 21 nt, Artificial Sequence
  Synthetic
cuguacuaugaguuguaaagc

SEQ ID NO: 96436 - RNA, 22 nt, Artificial Sequence
  Synthetic
ccuguacuaugaguuguaaagc

SEQ ID NO: 96437 - RNA, 24 nt, Artificial Sequence
  Synthetic
agccuguacuaugaguuguaaagc

SEQ ID NO: 96438 - RNA, 18 nt, Artificial Sequence
  Synthetic
uuaucaucaguuacaagc

SEQ ID NO: 96439 - RNA, 19 nt, Artificial Sequence
  Synthetic
auuaucaucaguuacaagc

SEQ ID NO: 96440 - RNA, 20 nt, Artificial Sequence
  Synthetic
cauuaucaucaguuacaagc

SEQ ID NO: 96441 - RNA, 22 nt, Artificial Sequence
  Synthetic
ugcauuaucaucaguuacaagc

SEQ ID NO: 96442 - RNA, 23 nt, Artificial Sequence
  Synthetic
uugcauuaucaucaguuacaagc

SEQ ID NO: 96443 - RNA, 24 nt, Artificial Sequence
  Synthetic
uuugcauuaucaucaguuacaagc

SEQ ID NO: 96444 - RNA, 19 nt, Artificial Sequence
  Synthetic
ugugaaaugguaaccaagc

SEQ ID NO: 96445 - RNA, 20 nt, Artificial Sequence
  Synthetic
cugugaaaugguaaccaagc

SEQ ID NO: 96446 - RNA, 22 nt, Artificial Sequence
  Synthetic
agcugugaaaugguaaccaagc

SEQ ID NO: 96447 - RNA, 23 nt, Artificial Sequence
  Synthetic
uagcugugaaaugguaaccaagc

SEQ ID NO: 96448 - RNA, 24 nt, Artificial Sequence
  Synthetic
auagcugugaaaugguaaccaagc

SEQ ID NO: 96449 - RNA, 19 nt, Artificial Sequence
  Synthetic
ugccucuaaucuaccaagc

SEQ ID NO: 96450 - RNA, 20 nt, Artificial Sequence
  Synthetic
cugccucuaaucuaccaagc

SEQ ID NO: 96451 - RNA, 24 nt, Artificial Sequence
  Synthetic
cgggcugccucuaaucuaccaagc

SEQ ID NO: 96452 - RNA, 18 nt, Artificial Sequence
  Synthetic
auuccuaggcucccaagc

SEQ ID NO: 96453 - RNA, 20 nt, Artificial Sequence
  Synthetic
ugauuccuaggcucccaagc

SEQ ID NO: 96454 - RNA, 21 nt, Artificial Sequence
  Synthetic
cugauuccuaggcucccaagc

SEQ ID NO: 96455 - RNA, 22 nt, Artificial Sequence
  Synthetic
ccugauuccuaggcucccaagc

SEQ ID NO: 96456 - RNA, 23 nt, Artificial Sequence
  Synthetic
accugauuccuaggcucccaagc

SEQ ID NO: 96457 - RNA, 24 nt, Artificial Sequence
  Synthetic
aaccugauuccuaggcucccaagc

SEQ ID NO: 96458 - RNA, 18 nt, Artificial Sequence
  Synthetic
uucugcauccugccaagc

SEQ ID NO: 96459 - RNA, 19 nt, Artificial Sequence
  Synthetic
cuucugcauccugccaagc

SEQ ID NO: 96460 - RNA, 20 nt, Artificial Sequence
  Synthetic
ccuucugcauccugccaagc

SEQ ID NO: 96461 - RNA, 22 nt, Artificial Sequence
  Synthetic
agccuucugcauccugccaagc

SEQ ID NO: 96462 - RNA, 23 nt, Artificial Sequence
  Synthetic
aagccuucugcauccugccaagc

SEQ ID NO: 96463 - RNA, 24 nt, Artificial Sequence
  Synthetic
aaagccuucugcauccugccaagc

SEQ ID NO: 96464 - RNA, 18 nt, Artificial Sequence
  Synthetic
uucaagguguuaucaagc

SEQ ID NO: 96465 - RNA, 19 nt, Artificial Sequence
  Synthetic
cuucaagguguuaucaagc

SEQ ID NO: 96466 - RNA, 21 nt, Artificial Sequence
  Synthetic
cgcuucaagguguuaucaagc

SEQ ID NO: 96467 - RNA, 22 nt, Artificial Sequence
  Synthetic
acgcuucaagguguuaucaagc

SEQ ID NO: 96468 - RNA, 23 nt, Artificial Sequence
  Synthetic
cacgcuucaagguguuaucaagc

SEQ ID NO: 96469 - RNA, 24 nt, Artificial Sequence
  Synthetic
acacgcuucaagguguuaucaagc

SEQ ID NO: 96470 - RNA, 18 nt, Artificial Sequence
  Synthetic
caggcaaggcacagaagc

SEQ ID NO: 96471 - RNA, 20 nt, Artificial Sequence
  Synthetic
ugcaggcaaggcacagaagc

SEQ ID NO: 96472 - RNA, 21 nt, Artificial Sequence
  Synthetic
cugcaggcaaggcacagaagc

SEQ ID NO: 96473 - RNA, 22 nt, Artificial Sequence
  Synthetic
acugcaggcaaggcacagaagc

SEQ ID NO: 96474 - RNA, 23 nt, Artificial Sequence
  Synthetic
uacugcaggcaaggcacagaagc

SEQ ID NO: 96475 - RNA, 24 nt, Artificial Sequence
  Synthetic
cuacugcaggcaaggcacagaagc

SEQ ID NO: 96476 - RNA, 19 nt, Artificial Sequence
  Synthetic
agcugguuucugcagaagc

SEQ ID NO: 96477 - RNA, 20 nt, Artificial Sequence
  Synthetic
uagcugguuucugcagaagc

SEQ ID NO: 96478 - RNA, 21 nt, Artificial Sequence
  Synthetic
cuagcugguuucugcagaagc

SEQ ID NO: 96479 - RNA, 18 nt, Artificial Sequence
  Synthetic
accaacguuguccgaagc

SEQ ID NO: 96480 - RNA, 21 nt, Artificial Sequence
  Synthetic
cggaccaacguuguccgaagc

SEQ ID NO: 96481 - RNA, 22 nt, Artificial Sequence
  Synthetic
ucggaccaacguuguccgaagc

SEQ ID NO: 96482 - RNA, 23 nt, Artificial Sequence
  Synthetic
uucggaccaacguuguccgaagc

SEQ ID NO: 96483 - RNA, 24 nt, Artificial Sequence
  Synthetic
auucggaccaacguuguccgaagc

SEQ ID NO: 96484 - RNA, 18 nt, Artificial Sequence
  Synthetic
agcugaucccuaggaagc

SEQ ID NO: 96485 - RNA, 19 nt, Artificial Sequence
  Synthetic
aagcugaucccuaggaagc

SEQ ID NO: 96486 - RNA, 22 nt, Artificial Sequence
  Synthetic
uggaagcugaucccuaggaagc

SEQ ID NO: 96487 - RNA, 23 nt, Artificial Sequence
  Synthetic
uuggaagcugaucccuaggaagc

SEQ ID NO: 96488 - RNA, 24 nt, Artificial Sequence
  Synthetic
uuuggaagcugaucccuaggaagc

SEQ ID NO: 96489 - RNA, 19 nt, Artificial Sequence
  Synthetic
uguacuugugaggggaagc

SEQ ID NO: 96490 - RNA, 20 nt, Artificial Sequence
  Synthetic
uuguacuugugaggggaagc

SEQ ID NO: 96491 - RNA, 21 nt, Artificial Sequence
  Synthetic
auuguacuugugaggggaagc

SEQ ID NO: 96492 - RNA, 22 nt, Artificial Sequence
  Synthetic
uauuguacuugugaggggaagc

SEQ ID NO: 96493 - RNA, 23 nt, Artificial Sequence
  Synthetic
auauuguacuugugaggggaagc

SEQ ID NO: 96494 - RNA, 24 nt, Artificial Sequence
  Synthetic
uauauuguacuugugaggggaagc

SEQ ID NO: 96495 - RNA, 20 nt, Artificial Sequence
  Synthetic
aggaacaaugucugggaagc

SEQ ID NO: 96496 - RNA, 21 nt, Artificial Sequence
  Synthetic
aaggaacaaugucugggaagc

SEQ ID NO: 96497 - RNA, 22 nt, Artificial Sequence
  Synthetic
uaaggaacaaugucugggaagc

SEQ ID NO: 96498 - RNA, 23 nt, Artificial Sequence
  Synthetic
auaaggaacaaugucugggaagc

SEQ ID NO: 96499 - RNA, 21 nt, Artificial Sequence
  Synthetic
uccaagauggcaagaugaagc

SEQ ID NO: 96500 - RNA, 22 nt, Artificial Sequence
  Synthetic
auccaagauggcaagaugaagc

SEQ ID NO: 96501 - RNA, 23 nt, Artificial Sequence
  Synthetic
uauccaagauggcaagaugaagc

SEQ ID NO: 96502 - RNA, 24 nt, Artificial Sequence
  Synthetic
auauccaagauggcaagaugaagc

SEQ ID NO: 96503 - RNA, 19 nt, Artificial Sequence
  Synthetic
uguuuguaugaacugaagc

SEQ ID NO: 96504 - RNA, 20 nt, Artificial Sequence
  Synthetic
auguuuguaugaacugaagc

SEQ ID NO: 96505 - RNA, 21 nt, Artificial Sequence
  Synthetic
aauguuuguaugaacugaagc

SEQ ID NO: 96506 - RNA, 22 nt, Artificial Sequence
  Synthetic
uaauguuuguaugaacugaagc

SEQ ID NO: 96507 - RNA, 24 nt, Artificial Sequence
  Synthetic
uguaauguuuguaugaacugaagc

SEQ ID NO: 96508 - RNA, 18 nt, Artificial Sequence
  Synthetic
uauuuuuacaggugaagc

SEQ ID NO: 96509 - RNA, 19 nt, Artificial Sequence
  Synthetic
auauuuuuacaggugaagc

SEQ ID NO: 96510 - RNA, 20 nt, Artificial Sequence
  Synthetic
uauauuuuuacaggugaagc

SEQ ID NO: 96511 - RNA, 21 nt, Artificial Sequence
  Synthetic
auauauuuuuacaggugaagc

SEQ ID NO: 96512 - RNA, 22 nt, Artificial Sequence
  Synthetic
uauauauuuuuacaggugaagc

SEQ ID NO: 96513 - RNA, 23 nt, Artificial Sequence
  Synthetic
cuauauauuuuuacaggugaagc

SEQ ID NO: 96514 - RNA, 24 nt, Artificial Sequence
  Synthetic
ucuauauauuuuuacaggugaagc

SEQ ID NO: 96515 - RNA, 18 nt, Artificial Sequence
  Synthetic
ugcugggaaaugugaagc

SEQ ID NO: 96516 - RNA, 20 nt, Artificial Sequence
  Synthetic
ugugcugggaaaugugaagc

SEQ ID NO: 96517 - RNA, 21 nt, Artificial Sequence
  Synthetic
cugugcugggaaaugugaagc

SEQ ID NO: 96518 - RNA, 22 nt, Artificial Sequence
  Synthetic
ccugugcugggaaaugugaagc

SEQ ID NO: 96519 - RNA, 23 nt, Artificial Sequence
  Synthetic
uccugugcugggaaaugugaagc

SEQ ID NO: 96520 - RNA, 24 nt, Artificial Sequence
  Synthetic
uuccugugcugggaaaugugaagc

SEQ ID NO: 96521 - RNA, 18 nt, Artificial Sequence
  Synthetic
uagaaguagauaauaagc

SEQ ID NO: 96522 - RNA, 20 nt, Artificial Sequence
  Synthetic
uguagaaguagauaauaagc

SEQ ID NO: 96523 - RNA, 21 nt, Artificial Sequence
  Synthetic
auguagaaguagauaauaagc

SEQ ID NO: 96524 - RNA, 22 nt, Artificial Sequence
  Synthetic
aauguagaaguagauaauaagc

SEQ ID NO: 96525 - RNA, 24 nt, Artificial Sequence
  Synthetic
ugaauguagaaguagauaauaagc

SEQ ID NO: 96526 - RNA, 19 nt, Artificial Sequence
  Synthetic
ugaauuaaggacacuaagc

SEQ ID NO: 96527 - RNA, 20 nt, Artificial Sequence
  Synthetic
augaauuaaggacacuaagc

SEQ ID NO: 96528 - RNA, 21 nt, Artificial Sequence
  Synthetic
uaugaauuaaggacacuaagc

SEQ ID NO: 96529 - RNA, 22 nt, Artificial Sequence
  Synthetic
cuaugaauuaaggacacuaagc

SEQ ID NO: 96530 - RNA, 23 nt, Artificial Sequence
  Synthetic
acuaugaauuaaggacacuaagc

SEQ ID NO: 96531 - RNA, 24 nt, Artificial Sequence
  Synthetic
aacuaugaauuaaggacacuaagc

SEQ ID NO: 96532 - RNA, 18 nt, Artificial Sequence
  Synthetic
cugaaagaaauaguaagc

SEQ ID NO: 96533 - RNA, 19 nt, Artificial Sequence
  Synthetic
ucugaaagaaauaguaagc

SEQ ID NO: 96534 - RNA, 20 nt, Artificial Sequence
  Synthetic
cucugaaagaaauaguaagc

SEQ ID NO: 96535 - RNA, 21 nt, Artificial Sequence
  Synthetic
ucucugaaagaaauaguaagc

SEQ ID NO: 96536 - RNA, 22 nt, Artificial Sequence
  Synthetic
aucucugaaagaaauaguaagc

SEQ ID NO: 96537 - RNA, 23 nt, Artificial Sequence
  Synthetic
aaucucugaaagaaauaguaagc

SEQ ID NO: 96538 - RNA, 24 nt, Artificial Sequence
  Synthetic
aaaucucugaaagaaauaguaagc

SEQ ID NO: 96539 - RNA, 18 nt, Artificial Sequence
  Synthetic
uggcagaauuuaguaagc

SEQ ID NO: 96540 - RNA, 19 nt, Artificial Sequence
  Synthetic
uuggcagaauuuaguaagc

SEQ ID NO: 96541 - RNA, 20 nt, Artificial Sequence
  Synthetic
auuggcagaauuuaguaagc

SEQ ID NO: 96542 - RNA, 21 nt, Artificial Sequence
  Synthetic
uauuggcagaauuuaguaagc

SEQ ID NO: 96543 - RNA, 22 nt, Artificial Sequence
  Synthetic
auauuggcagaauuuaguaagc

SEQ ID NO: 96544 - RNA, 23 nt, Artificial Sequence
  Synthetic
uauauuggcagaauuuaguaagc

SEQ ID NO: 96545 - RNA, 24 nt, Artificial Sequence
  Synthetic
uuauauuggcagaauuuaguaagc

SEQ ID NO: 96546 - RNA, 21 nt, Artificial Sequence
  Synthetic
aagacuccucucucuguaagc

SEQ ID NO: 96547 - RNA, 22 nt, Artificial Sequence
  Synthetic
aaagacuccucucucuguaagc

SEQ ID NO: 96548 - RNA, 23 nt, Artificial Sequence
  Synthetic
caaagacuccucucucuguaagc

SEQ ID NO: 96549 - RNA, 24 nt, Artificial Sequence
  Synthetic
acaaagacuccucucucuguaagc

SEQ ID NO: 96550 - RNA, 18 nt, Artificial Sequence
  Synthetic
ucuaggaaggaauuaagc

SEQ ID NO: 96551 - RNA, 19 nt, Artificial Sequence
  Synthetic
uucuaggaaggaauuaagc

SEQ ID NO: 96552 - RNA, 20 nt, Artificial Sequence
  Synthetic
uuucuaggaaggaauuaagc

SEQ ID NO: 96553 - RNA, 21 nt, Artificial Sequence
  Synthetic
uuuucuaggaaggaauuaagc

SEQ ID NO: 96554 - RNA, 22 nt, Artificial Sequence
  Synthetic
uuuuucuaggaaggaauuaagc

SEQ ID NO: 96555 - RNA, 23 nt, Artificial Sequence
  Synthetic
cuuuuucuaggaaggaauuaagc

SEQ ID NO: 96556 - RNA, 24 nt, Artificial Sequence
  Synthetic
acuuuuucuaggaaggaauuaagc

SEQ ID NO: 96557 - RNA, 18 nt, Artificial Sequence
  Synthetic
accaauucccccaacagc

SEQ ID NO: 96558 - RNA, 19 nt, Artificial Sequence
  Synthetic
aaccaauucccccaacagc

SEQ ID NO: 96559 - RNA, 21 nt, Artificial Sequence
  Synthetic
agaaccaauucccccaacagc

SEQ ID NO: 96560 - RNA, 22 nt, Artificial Sequence
  Synthetic
uagaaccaauucccccaacagc

SEQ ID NO: 96561 - RNA, 23 nt, Artificial Sequence
  Synthetic
auagaaccaauucccccaacagc

SEQ ID NO: 96562 - RNA, 18 nt, Artificial Sequence
  Synthetic
ucucuugggugcaacagc

SEQ ID NO: 96563 - RNA, 19 nt, Artificial Sequence
  Synthetic
aucucuugggugcaacagc

SEQ ID NO: 96564 - RNA, 20 nt, Artificial Sequence
  Synthetic
caucucuugggugcaacagc

SEQ ID NO: 96565 - RNA, 21 nt, Artificial Sequence
  Synthetic
ucaucucuugggugcaacagc

SEQ ID NO: 96566 - RNA, 22 nt, Artificial Sequence
  Synthetic
uucaucucuugggugcaacagc

SEQ ID NO: 96567 - RNA, 23 nt, Artificial Sequence
  Synthetic
auucaucucuugggugcaacagc

SEQ ID NO: 96568 - RNA, 18 nt, Artificial Sequence
  Synthetic
ugggucucuugcaacagc

SEQ ID NO: 96569 - RNA, 19 nt, Artificial Sequence
  Synthetic
augggucucuugcaacagc

SEQ ID NO: 96570 - RNA, 20 nt, Artificial Sequence
  Synthetic
aaugggucucuugcaacagc

SEQ ID NO: 96571 - RNA, 22 nt, Artificial Sequence
  Synthetic
ugaaugggucucuugcaacagc

SEQ ID NO: 96572 - RNA, 23 nt, Artificial Sequence
  Synthetic
augaaugggucucuugcaacagc

SEQ ID NO: 96573 - RNA, 24 nt, Artificial Sequence
  Synthetic
uaugaaugggucucuugcaacagc

SEQ ID NO: 96574 - RNA, 18 nt, Artificial Sequence
  Synthetic
auuacaugaaggaacagc

SEQ ID NO: 96575 - RNA, 19 nt, Artificial Sequence
  Synthetic
cauuacaugaaggaacagc

SEQ ID NO: 96576 - RNA, 20 nt, Artificial Sequence
  Synthetic
ucauuacaugaaggaacagc

SEQ ID NO: 96577 - RNA, 21 nt, Artificial Sequence
  Synthetic
uucauuacaugaaggaacagc

SEQ ID NO: 96578 - RNA, 22 nt, Artificial Sequence
  Synthetic
auucauuacaugaaggaacagc

SEQ ID NO: 96579 - RNA, 23 nt, Artificial Sequence
  Synthetic
uauucauuacaugaaggaacagc

SEQ ID NO: 96580 - RNA, 24 nt, Artificial Sequence
  Synthetic
uuauucauuacaugaaggaacagc

SEQ ID NO: 96581 - RNA, 19 nt, Artificial Sequence
  Synthetic
agaaugagcgacacacagc

SEQ ID NO: 96582 - RNA, 20 nt, Artificial Sequence
  Synthetic
uagaaugagcgacacacagc

SEQ ID NO: 96583 - RNA, 22 nt, Artificial Sequence
  Synthetic
uguagaaugagcgacacacagc

SEQ ID NO: 96584 - RNA, 23 nt, Artificial Sequence
  Synthetic
uuguagaaugagcgacacacagc

SEQ ID NO: 96585 - RNA, 18 nt, Artificial Sequence
  Synthetic
aacaggagcugacacagc

SEQ ID NO: 96586 - RNA, 19 nt, Artificial Sequence
  Synthetic
aaacaggagcugacacagc

SEQ ID NO: 96587 - RNA, 20 nt, Artificial Sequence
  Synthetic
caaacaggagcugacacagc

SEQ ID NO: 96588 - RNA, 21 nt, Artificial Sequence
  Synthetic
acaaacaggagcugacacagc

SEQ ID NO: 96589 - RNA, 22 nt, Artificial Sequence
  Synthetic
uacaaacaggagcugacacagc

SEQ ID NO: 96590 - RNA, 23 nt, Artificial Sequence
  Synthetic
uuacaaacaggagcugacacagc

SEQ ID NO: 96591 - RNA, 24 nt, Artificial Sequence
  Synthetic
cuuacaaacaggagcugacacagc

SEQ ID NO: 96592 - RNA, 18 nt, Artificial Sequence
  Synthetic
uccauaaaaggccacagc

SEQ ID NO: 96593 - RNA, 19 nt, Artificial Sequence
  Synthetic
auccauaaaaggccacagc

SEQ ID NO: 96594 - RNA, 20 nt, Artificial Sequence
  Synthetic
aauccauaaaaggccacagc

SEQ ID NO: 96595 - RNA, 21 nt, Artificial Sequence
  Synthetic
uaauccauaaaaggccacagc

SEQ ID NO: 96596 - RNA, 22 nt, Artificial Sequence
  Synthetic
auaauccauaaaaggccacagc

SEQ ID NO: 96597 - RNA, 19 nt, Artificial Sequence
  Synthetic
agacuucggugaagacagc

SEQ ID NO: 96598 - RNA, 20 nt, Artificial Sequence
  Synthetic
uagacuucggugaagacagc

SEQ ID NO: 96599 - RNA, 21 nt, Artificial Sequence
  Synthetic
auagacuucggugaagacagc

SEQ ID NO: 96600 - RNA, 22 nt, Artificial Sequence
  Synthetic
uauagacuucggugaagacagc

SEQ ID NO: 96601 - RNA, 23 nt, Artificial Sequence
  Synthetic
uuauagacuucggugaagacagc

SEQ ID NO: 96602 - RNA, 24 nt, Artificial Sequence
  Synthetic
auuauagacuucggugaagacagc

SEQ ID NO: 96603 - RNA, 18 nt, Artificial Sequence
  Synthetic
uaccugauuaaugacagc

SEQ ID NO: 96604 - RNA, 19 nt, Artificial Sequence
  Synthetic
cuaccugauuaaugacagc

SEQ ID NO: 96605 - RNA, 20 nt, Artificial Sequence
  Synthetic
ucuaccugauuaaugacagc

SEQ ID NO: 96606 - RNA, 21 nt, Artificial Sequence
  Synthetic
uucuaccugauuaaugacagc

SEQ ID NO: 96607 - RNA, 22 nt, Artificial Sequence
  Synthetic
uuucuaccugauuaaugacagc

SEQ ID NO: 96608 - RNA, 23 nt, Artificial Sequence
  Synthetic
uuuucuaccugauuaaugacagc

SEQ ID NO: 96609 - RNA, 18 nt, Artificial Sequence
  Synthetic
aggacucaaaaauacagc

SEQ ID NO: 96610 - RNA, 19 nt, Artificial Sequence
  Synthetic
aaggacucaaaaauacagc

SEQ ID NO: 96611 - RNA, 20 nt, Artificial Sequence
  Synthetic
uaaggacucaaaaauacagc

SEQ ID NO: 96612 - RNA, 21 nt, Artificial Sequence
  Synthetic
auaaggacucaaaaauacagc

SEQ ID NO: 96613 - RNA, 22 nt, Artificial Sequence
  Synthetic
uauaaggacucaaaaauacagc

SEQ ID NO: 96614 - RNA, 24 nt, Artificial Sequence
  Synthetic
aguauaaggacucaaaaauacagc

SEQ ID NO: 96615 - RNA, 18 nt, Artificial Sequence
  Synthetic
cuaugauugcuauacagc

SEQ ID NO: 96616 - RNA, 19 nt, Artificial Sequence
  Synthetic
acuaugauugcuauacagc

SEQ ID NO: 96617 - RNA, 20 nt, Artificial Sequence
  Synthetic
aacuaugauugcuauacagc

SEQ ID NO: 96618 - RNA, 22 nt, Artificial Sequence
  Synthetic
agaacuaugauugcuauacagc

SEQ ID NO: 96619 - RNA, 24 nt, Artificial Sequence
  Synthetic
ugagaacuaugauugcuauacagc

SEQ ID NO: 96620 - RNA, 18 nt, Artificial Sequence
  Synthetic
agaaaaguucccuacagc

SEQ ID NO: 96621 - RNA, 19 nt, Artificial Sequence
  Synthetic
uagaaaaguucccuacagc

SEQ ID NO: 96622 - RNA, 20 nt, Artificial Sequence
  Synthetic
uuagaaaaguucccuacagc

SEQ ID NO: 96623 - RNA, 21 nt, Artificial Sequence
  Synthetic
auuagaaaaguucccuacagc

SEQ ID NO: 96624 - RNA, 22 nt, Artificial Sequence
  Synthetic
uauuagaaaaguucccuacagc

SEQ ID NO: 96625 - RNA, 23 nt, Artificial Sequence
  Synthetic
uuauuagaaaaguucccuacagc

SEQ ID NO: 96626 - RNA, 24 nt, Artificial Sequence
  Synthetic
uuuauuagaaaaguucccuacagc

SEQ ID NO: 96627 - RNA, 18 nt, Artificial Sequence
  Synthetic
uugucccaaagguacagc

SEQ ID NO: 96628 - RNA, 19 nt, Artificial Sequence
  Synthetic
cuugucccaaagguacagc

SEQ ID NO: 96629 - RNA, 20 nt, Artificial Sequence
  Synthetic
ccuugucccaaagguacagc

SEQ ID NO: 96630 - RNA, 21 nt, Artificial Sequence
  Synthetic
accuugucccaaagguacagc

SEQ ID NO: 96631 - RNA, 22 nt, Artificial Sequence
  Synthetic
caccuugucccaaagguacagc

SEQ ID NO: 96632 - RNA, 23 nt, Artificial Sequence
  Synthetic
acaccuugucccaaagguacagc

SEQ ID NO: 96633 - RNA, 24 nt, Artificial Sequence
  Synthetic
aacaccuugucccaaagguacagc

SEQ ID NO: 96634 - RNA, 18 nt, Artificial Sequence
  Synthetic
augcauagcucuuacagc

SEQ ID NO: 96635 - RNA, 19 nt, Artificial Sequence
  Synthetic
aaugcauagcucuuacagc

SEQ ID NO: 96636 - RNA, 20 nt, Artificial Sequence
  Synthetic
caaugcauagcucuuacagc

SEQ ID NO: 96637 - RNA, 21 nt, Artificial Sequence
  Synthetic
ccaaugcauagcucuuacagc

SEQ ID NO: 96638 - RNA, 22 nt, Artificial Sequence
  Synthetic
accaaugcauagcucuuacagc

SEQ ID NO: 96639 - RNA, 23 nt, Artificial Sequence
  Synthetic
caccaaugcauagcucuuacagc

SEQ ID NO: 96640 - RNA, 24 nt, Artificial Sequence
  Synthetic
acaccaaugcauagcucuuacagc

SEQ ID NO: 96641 - RNA, 19 nt, Artificial Sequence
  Synthetic
ugcaagugugagaaccagc

SEQ ID NO: 96642 - RNA, 20 nt, Artificial Sequence
  Synthetic
uugcaagugugagaaccagc

SEQ ID NO: 96643 - RNA, 22 nt, Artificial Sequence
  Synthetic
uguugcaagugugagaaccagc

SEQ ID NO: 96644 - RNA, 23 nt, Artificial Sequence
  Synthetic
auguugcaagugugagaaccagc

SEQ ID NO: 96645 - RNA, 24 nt, Artificial Sequence
  Synthetic
aauguugcaagugugagaaccagc

SEQ ID NO: 96646 - RNA, 18 nt, Artificial Sequence
  Synthetic
ucuuagacacggcccagc

SEQ ID NO: 96647 - RNA, 19 nt, Artificial Sequence
  Synthetic
uucuuagacacggcccagc

SEQ ID NO: 96648 - RNA, 21 nt, Artificial Sequence
  Synthetic
uguucuuagacacggcccagc

SEQ ID NO: 96649 - RNA, 22 nt, Artificial Sequence
  Synthetic
cuguucuuagacacggcccagc

SEQ ID NO: 96650 - RNA, 23 nt, Artificial Sequence
  Synthetic
ccuguucuuagacacggcccagc

SEQ ID NO: 96651 - RNA, 24 nt, Artificial Sequence
  Synthetic
cccuguucuuagacacggcccagc

SEQ ID NO: 96652 - RNA, 19 nt, Artificial Sequence
  Synthetic
agacuuuacuuaagccagc

SEQ ID NO: 96653 - RNA, 20 nt, Artificial Sequence
  Synthetic
uagacuuuacuuaagccagc

SEQ ID NO: 96654 - RNA, 21 nt, Artificial Sequence
  Synthetic
auagacuuuacuuaagccagc

SEQ ID NO: 96655 - RNA, 22 nt, Artificial Sequence
  Synthetic
cauagacuuuacuuaagccagc

SEQ ID NO: 96656 - RNA, 23 nt, Artificial Sequence
  Synthetic
ucauagacuuuacuuaagccagc

SEQ ID NO: 96657 - RNA, 24 nt, Artificial Sequence
  Synthetic
aucauagacuuuacuuaagccagc

SEQ ID NO: 96658 - RNA, 19 nt, Artificial Sequence
  Synthetic
ugguucauagguugccagc

SEQ ID NO: 96659 - RNA, 20 nt, Artificial Sequence
  Synthetic
augguucauagguugccagc

SEQ ID NO: 96660 - RNA, 21 nt, Artificial Sequence
  Synthetic
aaugguucauagguugccagc

SEQ ID NO: 96661 - RNA, 22 nt, Artificial Sequence
  Synthetic
caaugguucauagguugccagc

SEQ ID NO: 96662 - RNA, 23 nt, Artificial Sequence
  Synthetic
ucaaugguucauagguugccagc

SEQ ID NO: 96663 - RNA, 24 nt, Artificial Sequence
  Synthetic
cucaaugguucauagguugccagc

SEQ ID NO: 96664 - RNA, 18 nt, Artificial Sequence
  Synthetic
uagugguggauguccagc

SEQ ID NO: 96665 - RNA, 19 nt, Artificial Sequence
  Synthetic
uuagugguggauguccagc

SEQ ID NO: 96666 - RNA, 20 nt, Artificial Sequence
  Synthetic
cuuagugguggauguccagc

SEQ ID NO: 96667 - RNA, 21 nt, Artificial Sequence
  Synthetic
acuuagugguggauguccagc

SEQ ID NO: 96668 - RNA, 22 nt, Artificial Sequence
  Synthetic
aacuuagugguggauguccagc

SEQ ID NO: 96669 - RNA, 24 nt, Artificial Sequence
  Synthetic
ugaacuuagugguggauguccagc

SEQ ID NO: 96670 - RNA, 18 nt, Artificial Sequence
  Synthetic
ugaacaaacaggagcagc

SEQ ID NO: 96671 - RNA, 19 nt, Artificial Sequence
  Synthetic
uugaacaaacaggagcagc

SEQ ID NO: 96672 - RNA, 20 nt, Artificial Sequence
  Synthetic
auugaacaaacaggagcagc

SEQ ID NO: 96673 - RNA, 21 nt, Artificial Sequence
  Synthetic
uauugaacaaacaggagcagc

SEQ ID NO: 96674 - RNA, 22 nt, Artificial Sequence
  Synthetic
uuauugaacaaacaggagcagc

SEQ ID NO: 96675 - RNA, 23 nt, Artificial Sequence
  Synthetic
cuuauugaacaaacaggagcagc

SEQ ID NO: 96676 - RNA, 24 nt, Artificial Sequence
  Synthetic
acuuauugaacaaacaggagcagc

SEQ ID NO: 96677 - RNA, 18 nt, Artificial Sequence
  Synthetic
ucaauucuccauagcagc

SEQ ID NO: 96678 - RNA, 20 nt, Artificial Sequence
  Synthetic
agucaauucuccauagcagc

SEQ ID NO: 96679 - RNA, 21 nt, Artificial Sequence
  Synthetic
uagucaauucuccauagcagc

SEQ ID NO: 96680 - RNA, 22 nt, Artificial Sequence
  Synthetic
auagucaauucuccauagcagc

SEQ ID NO: 96681 - RNA, 23 nt, Artificial Sequence
  Synthetic
uauagucaauucuccauagcagc

SEQ ID NO: 96682 - RNA, 24 nt, Artificial Sequence
  Synthetic
uuauagucaauucuccauagcagc

SEQ ID NO: 96683 - RNA, 18 nt, Artificial Sequence
  Synthetic
caguaucaauaaggcagc

SEQ ID NO: 96684 - RNA, 19 nt, Artificial Sequence
  Synthetic
ucaguaucaauaaggcagc

SEQ ID NO: 96685 - RNA, 20 nt, Artificial Sequence
  Synthetic
uucaguaucaauaaggcagc

SEQ ID NO: 96686 - RNA, 21 nt, Artificial Sequence
  Synthetic
uuucaguaucaauaaggcagc

SEQ ID NO: 96687 - RNA, 22 nt, Artificial Sequence
  Synthetic
uuuucaguaucaauaaggcagc

SEQ ID NO: 96688 - RNA, 23 nt, Artificial Sequence
  Synthetic
uuuuucaguaucaauaaggcagc

SEQ ID NO: 96689 - RNA, 24 nt, Artificial Sequence
  Synthetic
auuuuucaguaucaauaaggcagc

SEQ ID NO: 96690 - RNA, 18 nt, Artificial Sequence
  Synthetic
ucucauuuugauggcagc

SEQ ID NO: 96691 - RNA, 20 nt, Artificial Sequence
  Synthetic
agucucauuuugauggcagc

SEQ ID NO: 96692 - RNA, 21 nt, Artificial Sequence
  Synthetic
uagucucauuuugauggcagc

SEQ ID NO: 96693 - RNA, 18 nt, Artificial Sequence
  Synthetic
uauccagacccuggcagc

SEQ ID NO: 96694 - RNA, 19 nt, Artificial Sequence
  Synthetic
cuauccagacccuggcagc

SEQ ID NO: 96695 - RNA, 21 nt, Artificial Sequence
  Synthetic
agcuauccagacccuggcagc

SEQ ID NO: 96696 - RNA, 23 nt, Artificial Sequence
  Synthetic
agagcuauccagacccuggcagc

SEQ ID NO: 96697 - RNA, 18 nt, Artificial Sequence
  Synthetic
aaacgucuucuaaucagc

SEQ ID NO: 96698 - RNA, 19 nt, Artificial Sequence
  Synthetic
caaacgucuucuaaucagc

SEQ ID NO: 96699 - RNA, 20 nt, Artificial Sequence
  Synthetic
acaaacgucuucuaaucagc

SEQ ID NO: 96700 - RNA, 21 nt, Artificial Sequence
  Synthetic
aacaaacgucuucuaaucagc

SEQ ID NO: 96701 - RNA, 22 nt, Artificial Sequence
  Synthetic
caacaaacgucuucuaaucagc

SEQ ID NO: 96702 - RNA, 23 nt, Artificial Sequence
  Synthetic
ucaacaaacgucuucuaaucagc

SEQ ID NO: 96703 - RNA, 24 nt, Artificial Sequence
  Synthetic
uucaacaaacgucuucuaaucagc

SEQ ID NO: 96704 - RNA, 18 nt, Artificial Sequence
  Synthetic
aacuaugucaauaucagc

SEQ ID NO: 96705 - RNA, 19 nt, Artificial Sequence
  Synthetic
aaacuaugucaauaucagc

SEQ ID NO: 96706 - RNA, 20 nt, Artificial Sequence
  Synthetic
aaaacuaugucaauaucagc

SEQ ID NO: 96707 - RNA, 22 nt, Artificial Sequence
  Synthetic
ugaaaacuaugucaauaucagc

SEQ ID NO: 96708 - RNA, 23 nt, Artificial Sequence
  Synthetic
cugaaaacuaugucaauaucagc

SEQ ID NO: 96709 - RNA, 24 nt, Artificial Sequence
  Synthetic
ccugaaaacuaugucaauaucagc

SEQ ID NO: 96710 - RNA, 18 nt, Artificial Sequence
  Synthetic
auauagaggugacucagc

SEQ ID NO: 96711 - RNA, 19 nt, Artificial Sequence
  Synthetic
uauauagaggugacucagc

SEQ ID NO: 96712 - RNA, 22 nt, Artificial Sequence
  Synthetic
agguauauagaggugacucagc

SEQ ID NO: 96713 - RNA, 24 nt, Artificial Sequence
  Synthetic
ugagguauauagaggugacucagc

SEQ ID NO: 96714 - RNA, 18 nt, Artificial Sequence
  Synthetic
caaaagaucauucucagc

SEQ ID NO: 96715 - RNA, 19 nt, Artificial Sequence
  Synthetic
ucaaaagaucauucucagc

SEQ ID NO: 96716 - RNA, 20 nt, Artificial Sequence
  Synthetic
cucaaaagaucauucucagc

SEQ ID NO: 96717 - RNA, 21 nt, Artificial Sequence
  Synthetic
acucaaaagaucauucucagc

SEQ ID NO: 96718 - RNA, 22 nt, Artificial Sequence
  Synthetic
aacucaaaagaucauucucagc

SEQ ID NO: 96719 - RNA, 23 nt, Artificial Sequence
  Synthetic
aaacucaaaagaucauucucagc

SEQ ID NO: 96720 - RNA, 24 nt, Artificial Sequence
  Synthetic
aaaacucaaaagaucauucucagc

SEQ ID NO: 96721 - RNA, 18 nt, Artificial Sequence
  Synthetic
agcugaugucccuucagc

SEQ ID NO: 96722 - RNA, 19 nt, Artificial Sequence
  Synthetic
uagcugaugucccuucagc

SEQ ID NO: 96723 - RNA, 21 nt, Artificial Sequence
  Synthetic
aguagcugaugucccuucagc

SEQ ID NO: 96724 - RNA, 23 nt, Artificial Sequence
  Synthetic
cgaguagcugaugucccuucagc

SEQ ID NO: 96725 - RNA, 24 nt, Artificial Sequence
  Synthetic
ccgaguagcugaugucccuucagc

SEQ ID NO: 96726 - RNA, 18 nt, Artificial Sequence
  Synthetic
aguuaccuauucuucagc

SEQ ID NO: 96727 - RNA, 19 nt, Artificial Sequence
  Synthetic
caguuaccuauucuucagc

SEQ ID NO: 96728 - RNA, 20 nt, Artificial Sequence
  Synthetic
ucaguuaccuauucuucagc

SEQ ID NO: 96729 - RNA, 21 nt, Artificial Sequence
  Synthetic
aucaguuaccuauucuucagc

SEQ ID NO: 96730 - RNA, 22 nt, Artificial Sequence
  Synthetic
aaucaguuaccuauucuucagc

SEQ ID NO: 96731 - RNA, 23 nt, Artificial Sequence
  Synthetic
caaucaguuaccuauucuucagc

SEQ ID NO: 96732 - RNA, 24 nt, Artificial Sequence
  Synthetic
ccaaucaguuaccuauucuucagc

SEQ ID NO: 96733 - RNA, 18 nt, Artificial Sequence
  Synthetic
aacucaaaaguguucagc

SEQ ID NO: 96734 - RNA, 19 nt, Artificial Sequence
  Synthetic
caacucaaaaguguucagc

SEQ ID NO: 96735 - RNA, 20 nt, Artificial Sequence
  Synthetic
acaacucaaaaguguucagc

SEQ ID NO: 96736 - RNA, 21 nt, Artificial Sequence
  Synthetic
aacaacucaaaaguguucagc

SEQ ID NO: 96737 - RNA, 22 nt, Artificial Sequence
  Synthetic
uaacaacucaaaaguguucagc

SEQ ID NO: 96738 - RNA, 23 nt, Artificial Sequence
  Synthetic
cuaacaacucaaaaguguucagc

SEQ ID NO: 96739 - RNA, 24 nt, Artificial Sequence
  Synthetic
acuaacaacucaaaaguguucagc

SEQ ID NO: 96740 - RNA, 18 nt, Artificial Sequence
  Synthetic
auaucacuucuuuucagc

SEQ ID NO: 96741 - RNA, 19 nt, Artificial Sequence
  Synthetic
aauaucacuucuuuucagc

SEQ ID NO: 96742 - RNA, 21 nt, Artificial Sequence
  Synthetic
ugaauaucacuucuuuucagc

SEQ ID NO: 96743 - RNA, 22 nt, Artificial Sequence
  Synthetic
cugaauaucacuucuuuucagc

SEQ ID NO: 96744 - RNA, 23 nt, Artificial Sequence
  Synthetic
acugaauaucacuucuuuucagc

SEQ ID NO: 96745 - RNA, 24 nt, Artificial Sequence
  Synthetic
uacugaauaucacuucuuuucagc

SEQ ID NO: 96746 - RNA, 18 nt, Artificial Sequence
  Synthetic
augauuaggaaaaagagc

SEQ ID NO: 96747 - RNA, 19 nt, Artificial Sequence
  Synthetic
aaugauuaggaaaaagagc

SEQ ID NO: 96748 - RNA, 20 nt, Artificial Sequence
  Synthetic
uaaugauuaggaaaaagagc

SEQ ID NO: 96749 - RNA, 21 nt, Artificial Sequence
  Synthetic
uuaaugauuaggaaaaagagc

SEQ ID NO: 96750 - RNA, 22 nt, Artificial Sequence
  Synthetic
auuaaugauuaggaaaaagagc

SEQ ID NO: 96751 - RNA, 23 nt, Artificial Sequence
  Synthetic
cauuaaugauuaggaaaaagagc

SEQ ID NO: 96752 - RNA, 24 nt, Artificial Sequence
  Synthetic
ucauuaaugauuaggaaaaagagc

SEQ ID NO: 96753 - RNA, 22 nt, Artificial Sequence
  Synthetic
ugggggagauuggugaaagagc

SEQ ID NO: 96754 - RNA, 23 nt, Artificial Sequence
  Synthetic
augggggagauuggugaaagagc

SEQ ID NO: 96755 - RNA, 18 nt, Artificial Sequence
  Synthetic
uacauguaaauaaagagc

SEQ ID NO: 96756 - RNA, 19 nt, Artificial Sequence
  Synthetic
uuacauguaaauaaagagc

SEQ ID NO: 96757 - RNA, 20 nt, Artificial Sequence
  Synthetic
cuuacauguaaauaaagagc

SEQ ID NO: 96758 - RNA, 22 nt, Artificial Sequence
  Synthetic
agcuuacauguaaauaaagagc

SEQ ID NO: 96759 - RNA, 23 nt, Artificial Sequence
  Synthetic
aagcuuacauguaaauaaagagc

SEQ ID NO: 96760 - RNA, 24 nt, Artificial Sequence
  Synthetic
caagcuuacauguaaauaaagagc

SEQ ID NO: 96761 - RNA, 18 nt, Artificial Sequence
  Synthetic
auuugggcaauaaagagc

SEQ ID NO: 96762 - RNA, 20 nt, Artificial Sequence
  Synthetic
agauuugggcaauaaagagc

SEQ ID NO: 96763 - RNA, 22 nt, Artificial Sequence
  Synthetic
agagauuugggcaauaaagagc

SEQ ID NO: 96764 - RNA, 23 nt, Artificial Sequence
  Synthetic
uagagauuugggcaauaaagagc

SEQ ID NO: 96765 - RNA, 18 nt, Artificial Sequence
  Synthetic
agguagucuagcaagagc

SEQ ID NO: 96766 - RNA, 19 nt, Artificial Sequence
  Synthetic
uagguagucuagcaagagc

SEQ ID NO: 96767 - RNA, 20 nt, Artificial Sequence
  Synthetic
auagguagucuagcaagagc

SEQ ID NO: 96768 - RNA, 22 nt, Artificial Sequence
  Synthetic
ugauagguagucuagcaagagc

SEQ ID NO: 96769 - RNA, 24 nt, Artificial Sequence
  Synthetic
agugauagguagucuagcaagagc

SEQ ID NO: 96770 - RNA, 19 nt, Artificial Sequence
  Synthetic
aguuagcuaguggaagagc

SEQ ID NO: 96771 - RNA, 20 nt, Artificial Sequence
  Synthetic
aaguuagcuaguggaagagc

SEQ ID NO: 96772 - RNA, 21 nt, Artificial Sequence
  Synthetic
caaguuagcuaguggaagagc

SEQ ID NO: 96773 - RNA, 22 nt, Artificial Sequence
  Synthetic
acaaguuagcuaguggaagagc

SEQ ID NO: 96774 - RNA, 23 nt, Artificial Sequence
  Synthetic
cacaaguuagcuaguggaagagc

SEQ ID NO: 96775 - RNA, 24 nt, Artificial Sequence
  Synthetic
ucacaaguuagcuaguggaagagc

SEQ ID NO: 96776 - RNA, 19 nt, Artificial Sequence
  Synthetic
ugacuuuggaggggagagc

SEQ ID NO: 96777 - RNA, 20 nt, Artificial Sequence
  Synthetic
augacuuuggaggggagagc

SEQ ID NO: 96778 - RNA, 19 nt, Artificial Sequence
  Synthetic
ugacugaagaggauagagc

SEQ ID NO: 96779 - RNA, 21 nt, Artificial Sequence
  Synthetic
agugacugaagaggauagagc

SEQ ID NO: 96780 - RNA, 23 nt, Artificial Sequence
  Synthetic
agagugacugaagaggauagagc

SEQ ID NO: 96781 - RNA, 24 nt, Artificial Sequence
  Synthetic
uagagugacugaagaggauagagc

SEQ ID NO: 96782 - RNA, 18 nt, Artificial Sequence
  Synthetic
ucuuugaagcacuagagc

SEQ ID NO: 96783 - RNA, 20 nt, Artificial Sequence
  Synthetic
ugucuuugaagcacuagagc

SEQ ID NO: 96784 - RNA, 21 nt, Artificial Sequence
  Synthetic
cugucuuugaagcacuagagc

SEQ ID NO: 96785 - RNA, 23 nt, Artificial Sequence
  Synthetic
agcugucuuugaagcacuagagc

SEQ ID NO: 96786 - RNA, 24 nt, Artificial Sequence
  Synthetic
cagcugucuuugaagcacuagagc

SEQ ID NO: 96787 - RNA, 21 nt, Artificial Sequence
  Synthetic
uaaguaaaaaagcuuuagagc

SEQ ID NO: 96788 - RNA, 24 nt, Artificial Sequence
  Synthetic
agguaaguaaaaaagcuuuagagc

SEQ ID NO: 96789 - RNA, 18 nt, Artificial Sequence
  Synthetic
acaaaagauggaaggagc

SEQ ID NO: 96790 - RNA, 19 nt, Artificial Sequence
  Synthetic
cacaaaagauggaaggagc

SEQ ID NO: 96791 - RNA, 20 nt, Artificial Sequence
  Synthetic
acacaaaagauggaaggagc

SEQ ID NO: 96792 - RNA, 23 nt, Artificial Sequence
  Synthetic
uggacacaaaagauggaaggagc

SEQ ID NO: 96793 - RNA, 24 nt, Artificial Sequence
  Synthetic
cuggacacaaaagauggaaggagc

SEQ ID NO: 96794 - RNA, 18 nt, Artificial Sequence
  Synthetic
auauuuuggaauaggagc

SEQ ID NO: 96795 - RNA, 19 nt, Artificial Sequence
  Synthetic
aauauuuuggaauaggagc

SEQ ID NO: 96796 - RNA, 20 nt, Artificial Sequence
  Synthetic
aaauauuuuggaauaggagc

SEQ ID NO: 96797 - RNA, 21 nt, Artificial Sequence
  Synthetic
uaaauauuuuggaauaggagc

SEQ ID NO: 96798 - RNA, 22 nt, Artificial Sequence
  Synthetic
cuaaauauuuuggaauaggagc

SEQ ID NO: 96799 - RNA, 23 nt, Artificial Sequence
  Synthetic
ccuaaauauuuuggaauaggagc

SEQ ID NO: 96800 - RNA, 24 nt, Artificial Sequence
  Synthetic
accuaaauauuuuggaauaggagc

SEQ ID NO: 96801 - RNA, 18 nt, Artificial Sequence
  Synthetic
acuuggaauguaaugagc

SEQ ID NO: 96802 - RNA, 19 nt, Artificial Sequence
  Synthetic
uacuuggaauguaaugagc

SEQ ID NO: 96803 - RNA, 21 nt, Artificial Sequence
  Synthetic
aguacuuggaauguaaugagc

SEQ ID NO: 96804 - RNA, 23 nt, Artificial Sequence
  Synthetic
ugaguacuuggaauguaaugagc

SEQ ID NO: 96805 - RNA, 24 nt, Artificial Sequence
  Synthetic
cugaguacuuggaauguaaugagc

SEQ ID NO: 96806 - RNA, 21 nt, Artificial Sequence
  Synthetic
aacagcuaauauuuaaugagc

SEQ ID NO: 96807 - RNA, 22 nt, Artificial Sequence
  Synthetic
aaacagcuaauauuuaaugagc

SEQ ID NO: 96808 - RNA, 23 nt, Artificial Sequence
  Synthetic
aaaacagcuaauauuuaaugagc

SEQ ID NO: 96809 - RNA, 24 nt, Artificial Sequence
  Synthetic
aaaaacagcuaauauuuaaugagc

SEQ ID NO: 96810 - RNA, 18 nt, Artificial Sequence
  Synthetic
cucuauggcucuaugagc

SEQ ID NO: 96811 - RNA, 19 nt, Artificial Sequence
  Synthetic
acucuauggcucuaugagc

SEQ ID NO: 96812 - RNA, 20 nt, Artificial Sequence
  Synthetic
uacucuauggcucuaugagc

SEQ ID NO: 96813 - RNA, 21 nt, Artificial Sequence
  Synthetic
cuacucuauggcucuaugagc

SEQ ID NO: 96814 - RNA, 22 nt, Artificial Sequence
  Synthetic
acuacucuauggcucuaugagc

SEQ ID NO: 96815 - RNA, 23 nt, Artificial Sequence
  Synthetic
uacuacucuauggcucuaugagc

SEQ ID NO: 96816 - RNA, 24 nt, Artificial Sequence
  Synthetic
uuacuacucuauggcucuaugagc

SEQ ID NO: 96817 - RNA, 22 nt, Artificial Sequence
  Synthetic
agaaagaggaaagaaacugagc

SEQ ID NO: 96818 - RNA, 23 nt, Artificial Sequence
  Synthetic
aagaaagaggaaagaaacugagc

SEQ ID NO: 96819 - RNA, 20 nt, Artificial Sequence
  Synthetic
aggauauuagaaacuugagc

SEQ ID NO: 96820 - RNA, 21 nt, Artificial Sequence
  Synthetic
aaggauauuagaaacuugagc

SEQ ID NO: 96821 - RNA, 22 nt, Artificial Sequence
  Synthetic
aaaggauauuagaaacuugagc

SEQ ID NO: 96822 - RNA, 23 nt, Artificial Sequence
  Synthetic
aaaaggauauuagaaacuugagc

SEQ ID NO: 96823 - RNA, 24 nt, Artificial Sequence
  Synthetic
uaaaaggauauuagaaacuugagc

SEQ ID NO: 96824 - RNA, 18 nt, Artificial Sequence
  Synthetic
cauuuuucaaauuugagc

SEQ ID NO: 96825 - RNA, 19 nt, Artificial Sequence
  Synthetic
ucauuuuucaaauuugagc

SEQ ID NO: 96826 - RNA, 21 nt, Artificial Sequence
  Synthetic
agucauuuuucaaauuugagc

SEQ ID NO: 96827 - RNA, 22 nt, Artificial Sequence
  Synthetic
cagucauuuuucaaauuugagc

SEQ ID NO: 96828 - RNA, 23 nt, Artificial Sequence
  Synthetic
ccagucauuuuucaaauuugagc

SEQ ID NO: 96829 - RNA, 24 nt, Artificial Sequence
  Synthetic
accagucauuuuucaaauuugagc

SEQ ID NO: 96830 - RNA, 22 nt, Artificial Sequence
  Synthetic
cgcuugucucaaacuuuugagc

SEQ ID NO: 96831 - RNA, 23 nt, Artificial Sequence
  Synthetic
ucgcuugucucaaacuuuugagc

SEQ ID NO: 96832 - RNA, 24 nt, Artificial Sequence
  Synthetic
cucgcuugucucaaacuuuugagc

SEQ ID NO: 96833 - RNA, 21 nt, Artificial Sequence
  Synthetic
aaaagauaaauuugaaauagc

SEQ ID NO: 96834 - RNA, 22 nt, Artificial Sequence
  Synthetic
caaaagauaaauuugaaauagc

SEQ ID NO: 96835 - RNA, 24 nt, Artificial Sequence
  Synthetic
ugcaaaagauaaauuugaaauagc

SEQ ID NO: 96836 - RNA, 18 nt, Artificial Sequence
  Synthetic
cuauagucacacaauagc

SEQ ID NO: 96837 - RNA, 19 nt, Artificial Sequence
  Synthetic
ccuauagucacacaauagc

SEQ ID NO: 96838 - RNA, 20 nt, Artificial Sequence
  Synthetic
uccuauagucacacaauagc

SEQ ID NO: 96839 - RNA, 21 nt, Artificial Sequence
  Synthetic
auccuauagucacacaauagc

SEQ ID NO: 96840 - RNA, 22 nt, Artificial Sequence
  Synthetic
uauccuauagucacacaauagc

SEQ ID NO: 96841 - RNA, 23 nt, Artificial Sequence
  Synthetic
auauccuauagucacacaauagc

SEQ ID NO: 96842 - RNA, 24 nt, Artificial Sequence
  Synthetic
cauauccuauagucacacaauagc

SEQ ID NO: 96843 - RNA, 18 nt, Artificial Sequence
  Synthetic
acaugguaggucgauagc

SEQ ID NO: 96844 - RNA, 19 nt, Artificial Sequence
  Synthetic
cacaugguaggucgauagc

SEQ ID NO: 96845 - RNA, 20 nt, Artificial Sequence
  Synthetic
ucacaugguaggucgauagc

SEQ ID NO: 96846 - RNA, 21 nt, Artificial Sequence
  Synthetic
cucacaugguaggucgauagc

SEQ ID NO: 96847 - RNA, 22 nt, Artificial Sequence
  Synthetic
ucucacaugguaggucgauagc

SEQ ID NO: 96848 - RNA, 23 nt, Artificial Sequence
  Synthetic
cucucacaugguaggucgauagc

SEQ ID NO: 96849 - RNA, 24 nt, Artificial Sequence
  Synthetic
acucucacaugguaggucgauagc

SEQ ID NO: 96850 - RNA, 18 nt, Artificial Sequence
  Synthetic
caucaauaaauggauagc

SEQ ID NO: 96851 - RNA, 19 nt, Artificial Sequence
  Synthetic
acaucaauaaauggauagc

SEQ ID NO: 96852 - RNA, 20 nt, Artificial Sequence
  Synthetic
cacaucaauaaauggauagc

SEQ ID NO: 96853 - RNA, 21 nt, Artificial Sequence
  Synthetic
acacaucaauaaauggauagc

SEQ ID NO: 96854 - RNA, 24 nt, Artificial Sequence
  Synthetic
uggacacaucaauaaauggauagc

SEQ ID NO: 96855 - RNA, 18 nt, Artificial Sequence
  Synthetic
cuagcaacacaguauagc

SEQ ID NO: 96856 - RNA, 19 nt, Artificial Sequence
  Synthetic
ucuagcaacacaguauagc

SEQ ID NO: 96857 - RNA, 20 nt, Artificial Sequence
  Synthetic
cucuagcaacacaguauagc

SEQ ID NO: 96858 - RNA, 21 nt, Artificial Sequence
  Synthetic
acucuagcaacacaguauagc

SEQ ID NO: 96859 - RNA, 22 nt, Artificial Sequence
  Synthetic
aacucuagcaacacaguauagc

SEQ ID NO: 96860 - RNA, 23 nt, Artificial Sequence
  Synthetic
aaacucuagcaacacaguauagc

SEQ ID NO: 96861 - RNA, 18 nt, Artificial Sequence
  Synthetic
cgccaagauuccccuagc

SEQ ID NO: 96862 - RNA, 21 nt, Artificial Sequence
  Synthetic
aggcgccaagauuccccuagc

SEQ ID NO: 96863 - RNA, 22 nt, Artificial Sequence
  Synthetic
caggcgccaagauuccccuagc

SEQ ID NO: 96864 - RNA, 23 nt, Artificial Sequence
  Synthetic
acaggcgccaagauuccccuagc

SEQ ID NO: 96865 - RNA, 24 nt, Artificial Sequence
  Synthetic
cacaggcgccaagauuccccuagc

SEQ ID NO: 96866 - RNA, 18 nt, Artificial Sequence
  Synthetic
cuagguuccaauccuagc

SEQ ID NO: 96867 - RNA, 19 nt, Artificial Sequence
  Synthetic
ucuagguuccaauccuagc

SEQ ID NO: 96868 - RNA, 20 nt, Artificial Sequence
  Synthetic
aucuagguuccaauccuagc

SEQ ID NO: 96869 - RNA, 21 nt, Artificial Sequence
  Synthetic
uaucuagguuccaauccuagc

SEQ ID NO: 96870 - RNA, 22 nt, Artificial Sequence
  Synthetic
uuaucuagguuccaauccuagc

SEQ ID NO: 96871 - RNA, 18 nt, Artificial Sequence
  Synthetic
uccauauagacaucuagc

SEQ ID NO: 96872 - RNA, 19 nt, Artificial Sequence
  Synthetic
cuccauauagacaucuagc

SEQ ID NO: 96873 - RNA, 23 nt, Artificial Sequence
  Synthetic
agggcuccauauagacaucuagc

SEQ ID NO: 96874 - RNA, 24 nt, Artificial Sequence
  Synthetic
cagggcuccauauagacaucuagc

SEQ ID NO: 96875 - RNA, 19 nt, Artificial Sequence
  Synthetic
ugaacuuggugguaguagc

SEQ ID NO: 96876 - RNA, 20 nt, Artificial Sequence
  Synthetic
uugaacuuggugguaguagc

SEQ ID NO: 96877 - RNA, 21 nt, Artificial Sequence
  Synthetic
cuugaacuuggugguaguagc

SEQ ID NO: 96878 - RNA, 22 nt, Artificial Sequence
  Synthetic
ucuugaacuuggugguaguagc

SEQ ID NO: 96879 - RNA, 23 nt, Artificial Sequence
  Synthetic
uucuugaacuuggugguaguagc

SEQ ID NO: 96880 - RNA, 24 nt, Artificial Sequence
  Synthetic
auucuugaacuuggugguaguagc

SEQ ID NO: 96881 - RNA, 20 nt, Artificial Sequence
  Synthetic
uggcacaccagaaugguagc

SEQ ID NO: 96882 - RNA, 21 nt, Artificial Sequence
  Synthetic
uuggcacaccagaaugguagc

SEQ ID NO: 96883 - RNA, 22 nt, Artificial Sequence
  Synthetic
uuuggcacaccagaaugguagc

SEQ ID NO: 96884 - RNA, 24 nt, Artificial Sequence
  Synthetic
aguuuggcacaccagaaugguagc

SEQ ID NO: 96885 - RNA, 18 nt, Artificial Sequence
  Synthetic
cuugugaguuuguguagc

SEQ ID NO: 96886 - RNA, 19 nt, Artificial Sequence
  Synthetic
ccuugugaguuuguguagc

SEQ ID NO: 96887 - RNA, 21 nt, Artificial Sequence
  Synthetic
ugccuugugaguuuguguagc

SEQ ID NO: 96888 - RNA, 23 nt, Artificial Sequence
  Synthetic
agugccuugugaguuuguguagc

SEQ ID NO: 96889 - RNA, 24 nt, Artificial Sequence
  Synthetic
cagugccuugugaguuuguguagc

SEQ ID NO: 96890 - RNA, 18 nt, Artificial Sequence
  Synthetic
agccugacaaggauuagc

SEQ ID NO: 96891 - RNA, 19 nt, Artificial Sequence
  Synthetic
uagccugacaaggauuagc

SEQ ID NO: 96892 - RNA, 20 nt, Artificial Sequence
  Synthetic
auagccugacaaggauuagc

SEQ ID NO: 96893 - RNA, 22 nt, Artificial Sequence
  Synthetic
ugauagccugacaaggauuagc

SEQ ID NO: 96894 - RNA, 23 nt, Artificial Sequence
  Synthetic
augauagccugacaaggauuagc

SEQ ID NO: 96895 - RNA, 19 nt, Artificial Sequence
  Synthetic
agggaguuucgauauuagc

SEQ ID NO: 96896 - RNA, 20 nt, Artificial Sequence
  Synthetic
aagggaguuucgauauuagc

SEQ ID NO: 96897 - RNA, 21 nt, Artificial Sequence
  Synthetic
uaagggaguuucgauauuagc

SEQ ID NO: 96898 - RNA, 22 nt, Artificial Sequence
  Synthetic
auaagggaguuucgauauuagc

SEQ ID NO: 96899 - RNA, 18 nt, Artificial Sequence
  Synthetic
ucgguuuaggauauuagc

SEQ ID NO: 96900 - RNA, 19 nt, Artificial Sequence
  Synthetic
cucgguuuaggauauuagc

SEQ ID NO: 96901 - RNA, 20 nt, Artificial Sequence
  Synthetic
ccucgguuuaggauauuagc

SEQ ID NO: 96902 - RNA, 21 nt, Artificial Sequence
  Synthetic
uccucgguuuaggauauuagc

SEQ ID NO: 96903 - RNA, 23 nt, Artificial Sequence
  Synthetic
uguccucgguuuaggauauuagc

SEQ ID NO: 96904 - RNA, 24 nt, Artificial Sequence
  Synthetic
auguccucgguuuaggauauuagc

SEQ ID NO: 96905 - RNA, 18 nt, Artificial Sequence
  Synthetic
ccaauauagaaacuuagc

SEQ ID NO: 96906 - RNA, 19 nt, Artificial Sequence
  Synthetic
accaauauagaaacuuagc

SEQ ID NO: 96907 - RNA, 20 nt, Artificial Sequence
  Synthetic
aaccaauauagaaacuuagc

SEQ ID NO: 96908 - RNA, 21 nt, Artificial Sequence
  Synthetic
caaccaauauagaaacuuagc

SEQ ID NO: 96909 - RNA, 23 nt, Artificial Sequence
  Synthetic
agcaaccaauauagaaacuuagc

SEQ ID NO: 96910 - RNA, 24 nt, Artificial Sequence
  Synthetic
aagcaaccaauauagaaacuuagc

SEQ ID NO: 96911 - RNA, 19 nt, Artificial Sequence
  Synthetic
agcauuuauaugauuuagc

SEQ ID NO: 96912 - RNA, 20 nt, Artificial Sequence
  Synthetic
uagcauuuauaugauuuagc

SEQ ID NO: 96913 - RNA, 21 nt, Artificial Sequence
  Synthetic
uuagcauuuauaugauuuagc

SEQ ID NO: 96914 - RNA, 22 nt, Artificial Sequence
  Synthetic
uuuagcauuuauaugauuuagc

SEQ ID NO: 96915 - RNA, 23 nt, Artificial Sequence
  Synthetic
uuuuagcauuuauaugauuuagc

SEQ ID NO: 96916 - RNA, 18 nt, Artificial Sequence
  Synthetic
agucucggaauauuuagc

SEQ ID NO: 96917 - RNA, 20 nt, Artificial Sequence
  Synthetic
agagucucggaauauuuagc

SEQ ID NO: 96918 - RNA, 21 nt, Artificial Sequence
  Synthetic
uagagucucggaauauuuagc

SEQ ID NO: 96919 - RNA, 22 nt, Artificial Sequence
  Synthetic
uuagagucucggaauauuuagc

SEQ ID NO: 96920 - RNA, 24 nt, Artificial Sequence
  Synthetic
aguuagagucucggaauauuuagc

SEQ ID NO: 96921 - RNA, 18 nt, Artificial Sequence
  Synthetic
uuuuucggagacuuuagc

SEQ ID NO: 96922 - RNA, 19 nt, Artificial Sequence
  Synthetic
auuuuucggagacuuuagc

SEQ ID NO: 96923 - RNA, 22 nt, Artificial Sequence
  Synthetic
cggauuuuucggagacuuuagc

SEQ ID NO: 96924 - RNA, 24 nt, Artificial Sequence
  Synthetic
agcggauuuuucggagacuuuagc

SEQ ID NO: 96925 - RNA, 18 nt, Artificial Sequence
  Synthetic
ugaaggacaugguuuagc

SEQ ID NO: 96926 - RNA, 19 nt, Artificial Sequence
  Synthetic
uugaaggacaugguuuagc

SEQ ID NO: 96927 - RNA, 20 nt, Artificial Sequence
  Synthetic
cuugaaggacaugguuuagc

SEQ ID NO: 96928 - RNA, 21 nt, Artificial Sequence
  Synthetic
ucuugaaggacaugguuuagc

SEQ ID NO: 96929 - RNA, 22 nt, Artificial Sequence
  Synthetic
uucuugaaggacaugguuuagc

SEQ ID NO: 96930 - RNA, 23 nt, Artificial Sequence
  Synthetic
cuucuugaaggacaugguuuagc

SEQ ID NO: 96931 - RNA, 24 nt, Artificial Sequence
  Synthetic
ucuucuugaaggacaugguuuagc

SEQ ID NO: 96932 - RNA, 18 nt, Artificial Sequence
  Synthetic
cauuugcugagugaacgc

SEQ ID NO: 96933 - RNA, 20 nt, Artificial Sequence
  Synthetic
agcauuugcugagugaacgc

SEQ ID NO: 96934 - RNA, 21 nt, Artificial Sequence
  Synthetic
aagcauuugcugagugaacgc

SEQ ID NO: 96935 - RNA, 22 nt, Artificial Sequence
  Synthetic
uaagcauuugcugagugaacgc

SEQ ID NO: 96936 - RNA, 24 nt, Artificial Sequence
  Synthetic
aguaagcauuugcugagugaacgc

SEQ ID NO: 96937 - RNA, 18 nt, Artificial Sequence
  Synthetic
ugaucccacagaguacgc

SEQ ID NO: 96938 - RNA, 19 nt, Artificial Sequence
  Synthetic
cugaucccacagaguacgc

SEQ ID NO: 96939 - RNA, 20 nt, Artificial Sequence
  Synthetic
acugaucccacagaguacgc

SEQ ID NO: 96940 - RNA, 21 nt, Artificial Sequence
  Synthetic
cacugaucccacagaguacgc

SEQ ID NO: 96941 - RNA, 22 nt, Artificial Sequence
  Synthetic
ucacugaucccacagaguacgc

SEQ ID NO: 96942 - RNA, 23 nt, Artificial Sequence
  Synthetic
cucacugaucccacagaguacgc

SEQ ID NO: 96943 - RNA, 24 nt, Artificial Sequence
  Synthetic
ucucacugaucccacagaguacgc

SEQ ID NO: 96944 - RNA, 19 nt, Artificial Sequence
  Synthetic
aggguaacaauauuuacgc

SEQ ID NO: 96945 - RNA, 20 nt, Artificial Sequence
  Synthetic
aaggguaacaauauuuacgc

SEQ ID NO: 96946 - RNA, 21 nt, Artificial Sequence
  Synthetic
aaaggguaacaauauuuacgc

SEQ ID NO: 96947 - RNA, 22 nt, Artificial Sequence
  Synthetic
aaaaggguaacaauauuuacgc

SEQ ID NO: 96948 - RNA, 23 nt, Artificial Sequence
  Synthetic
uaaaaggguaacaauauuuacgc

SEQ ID NO: 96949 - RNA, 24 nt, Artificial Sequence
  Synthetic
auaaaaggguaacaauauuuacgc

SEQ ID NO: 96950 - RNA, 18 nt, Artificial Sequence
  Synthetic
aaaagcugcucuuuccgc

SEQ ID NO: 96951 - RNA, 19 nt, Artificial Sequence
  Synthetic
uaaaagcugcucuuuccgc

SEQ ID NO: 96952 - RNA, 20 nt, Artificial Sequence
  Synthetic
auaaaagcugcucuuuccgc

SEQ ID NO: 96953 - RNA, 21 nt, Artificial Sequence
  Synthetic
uauaaaagcugcucuuuccgc

SEQ ID NO: 96954 - RNA, 22 nt, Artificial Sequence
  Synthetic
auauaaaagcugcucuuuccgc

SEQ ID NO: 96955 - RNA, 23 nt, Artificial Sequence
  Synthetic
cauauaaaagcugcucuuuccgc

SEQ ID NO: 96956 - RNA, 24 nt, Artificial Sequence
  Synthetic
ccauauaaaagcugcucuuuccgc

SEQ ID NO: 96957 - RNA, 19 nt, Artificial Sequence
  Synthetic
agggaggucccaggaucgc

SEQ ID NO: 96958 - RNA, 20 nt, Artificial Sequence
  Synthetic
aagggaggucccaggaucgc

SEQ ID NO: 96959 - RNA, 21 nt, Artificial Sequence
  Synthetic
uaagggaggucccaggaucgc

SEQ ID NO: 96960 - RNA, 22 nt, Artificial Sequence
  Synthetic
uuaagggaggucccaggaucgc

SEQ ID NO: 96961 - RNA, 23 nt, Artificial Sequence
  Synthetic
auuaagggaggucccaggaucgc

SEQ ID NO: 96962 - RNA, 19 nt, Artificial Sequence
  Synthetic
agugaggaaagauggucgc

SEQ ID NO: 96963 - RNA, 20 nt, Artificial Sequence
  Synthetic
aagugaggaaagauggucgc

SEQ ID NO: 96964 - RNA, 21 nt, Artificial Sequence
  Synthetic
aaagugaggaaagauggucgc

SEQ ID NO: 96965 - RNA, 22 nt, Artificial Sequence
  Synthetic
uaaagugaggaaagauggucgc

SEQ ID NO: 96966 - RNA, 23 nt, Artificial Sequence
  Synthetic
uuaaagugaggaaagauggucgc

SEQ ID NO: 96967 - RNA, 18 nt, Artificial Sequence
  Synthetic
aaccuuuacagaaaaggc

SEQ ID NO: 96968 - RNA, 19 nt, Artificial Sequence
  Synthetic
caaccuuuacagaaaaggc

SEQ ID NO: 96969 - RNA, 20 nt, Artificial Sequence
  Synthetic
acaaccuuuacagaaaaggc

SEQ ID NO: 96970 - RNA, 21 nt, Artificial Sequence
  Synthetic
aacaaccuuuacagaaaaggc

SEQ ID NO: 96971 - RNA, 22 nt, Artificial Sequence
  Synthetic
aaacaaccuuuacagaaaaggc

SEQ ID NO: 96972 - RNA, 23 nt, Artificial Sequence
  Synthetic
aaaacaaccuuuacagaaaaggc

SEQ ID NO: 96973 - RNA, 24 nt, Artificial Sequence
  Synthetic
caaaacaaccuuuacagaaaaggc

SEQ ID NO: 96974 - RNA, 18 nt, Artificial Sequence
  Synthetic
cauagauagcagaaaggc

SEQ ID NO: 96975 - RNA, 19 nt, Artificial Sequence
  Synthetic
acauagauagcagaaaggc

SEQ ID NO: 96976 - RNA, 20 nt, Artificial Sequence
  Synthetic
cacauagauagcagaaaggc

SEQ ID NO: 96977 - RNA, 24 nt, Artificial Sequence
  Synthetic
agggcacauagauagcagaaaggc

SEQ ID NO: 96978 - RNA, 19 nt, Artificial Sequence
  Synthetic
ugaaggcugcaggaaaggc

SEQ ID NO: 96979 - RNA, 21 nt, Artificial Sequence
  Synthetic
agugaaggcugcaggaaaggc

SEQ ID NO: 96980 - RNA, 19 nt, Artificial Sequence
  Synthetic
uguuagcuguuuccaaggc

SEQ ID NO: 96981 - RNA, 21 nt, Artificial Sequence
  Synthetic
aguguuagcuguuuccaaggc

SEQ ID NO: 96982 - RNA, 22 nt, Artificial Sequence
  Synthetic
aaguguuagcuguuuccaaggc

SEQ ID NO: 96983 - RNA, 23 nt, Artificial Sequence
  Synthetic
uaaguguuagcuguuuccaaggc

SEQ ID NO: 96984 - RNA, 24 nt, Artificial Sequence
  Synthetic
cuaaguguuagcuguuuccaaggc

SEQ ID NO: 96985 - RNA, 18 nt, Artificial Sequence
  Synthetic
acucuacauaggcaaggc

SEQ ID NO: 96986 - RNA, 19 nt, Artificial Sequence
  Synthetic
uacucuacauaggcaaggc

SEQ ID NO: 96987 - RNA, 21 nt, Artificial Sequence
  Synthetic
uguacucuacauaggcaaggc

SEQ ID NO: 96988 - RNA, 22 nt, Artificial Sequence
  Synthetic
uuguacucuacauaggcaaggc

SEQ ID NO: 96989 - RNA, 23 nt, Artificial Sequence
  Synthetic
cuuguacucuacauaggcaaggc

SEQ ID NO: 96990 - RNA, 18 nt, Artificial Sequence
  Synthetic
agcuagucaugagaaggc

SEQ ID NO: 96991 - RNA, 20 nt, Artificial Sequence
  Synthetic
ugagcuagucaugagaaggc

SEQ ID NO: 96992 - RNA, 21 nt, Artificial Sequence
  Synthetic
cugagcuagucaugagaaggc

SEQ ID NO: 96993 - RNA, 23 nt, Artificial Sequence
  Synthetic
ugcugagcuagucaugagaaggc

SEQ ID NO: 96994 - RNA, 24 nt, Artificial Sequence
  Synthetic
augcugagcuagucaugagaaggc

SEQ ID NO: 96995 - RNA, 21 nt, Artificial Sequence
  Synthetic
aagagaggaaaucaggaaggc

SEQ ID NO: 96996 - RNA, 23 nt, Artificial Sequence
  Synthetic
agaagagaggaaaucaggaaggc

SEQ ID NO: 96997 - RNA, 18 nt, Artificial Sequence
  Synthetic
aguauuaagagauaaggc

SEQ ID NO: 96998 - RNA, 19 nt, Artificial Sequence
  Synthetic
aaguauuaagagauaaggc

SEQ ID NO: 96999 - RNA, 20 nt, Artificial Sequence
  Synthetic
aaaguauuaagagauaaggc

SEQ ID NO: 97000 - RNA, 18 nt, Artificial Sequence
  Synthetic
aguaaagagggauaaggc

SEQ ID NO: 97001 - RNA, 19 nt, Artificial Sequence
  Synthetic
caguaaagagggauaaggc

SEQ ID NO: 97002 - RNA, 20 nt, Artificial Sequence
  Synthetic
ucaguaaagagggauaaggc

SEQ ID NO: 97003 - RNA, 21 nt, Artificial Sequence
  Synthetic
uucaguaaagagggauaaggc

SEQ ID NO: 97004 - RNA, 23 nt, Artificial Sequence
  Synthetic
aguucaguaaagagggauaaggc

SEQ ID NO: 97005 - RNA, 19 nt, Artificial Sequence
  Synthetic
ugauccacccuucuaaggc

SEQ ID NO: 97006 - RNA, 20 nt, Artificial Sequence
  Synthetic
uugauccacccuucuaaggc

SEQ ID NO: 97007 - RNA, 21 nt, Artificial Sequence
  Synthetic
uuugauccacccuucuaaggc

SEQ ID NO: 97008 - RNA, 22 nt, Artificial Sequence
  Synthetic
uuuugauccacccuucuaaggc

SEQ ID NO: 97009 - RNA, 23 nt, Artificial Sequence
  Synthetic
uuuuugauccacccuucuaaggc

SEQ ID NO: 97010 - RNA, 19 nt, Artificial Sequence
  Synthetic
uggaauuccuaauuaaggc

SEQ ID NO: 97011 - RNA, 20 nt, Artificial Sequence
  Synthetic
uuggaauuccuaauuaaggc

SEQ ID NO: 97012 - RNA, 21 nt, Artificial Sequence
  Synthetic
auuggaauuccuaauuaaggc

SEQ ID NO: 97013 - RNA, 23 nt, Artificial Sequence
  Synthetic
ugauuggaauuccuaauuaaggc

SEQ ID NO: 97014 - RNA, 24 nt, Artificial Sequence
  Synthetic
augauuggaauuccuaauuaaggc

SEQ ID NO: 97015 - RNA, 18 nt, Artificial Sequence
  Synthetic
augcuuucuaccacaggc

SEQ ID NO: 97016 - RNA, 19 nt, Artificial Sequence
  Synthetic
caugcuuucuaccacaggc

SEQ ID NO: 97017 - RNA, 20 nt, Artificial Sequence
  Synthetic
ccaugcuuucuaccacaggc

SEQ ID NO: 97018 - RNA, 21 nt, Artificial Sequence
  Synthetic
accaugcuuucuaccacaggc

SEQ ID NO: 97019 - RNA, 22 nt, Artificial Sequence
  Synthetic
caccaugcuuucuaccacaggc

SEQ ID NO: 97020 - RNA, 23 nt, Artificial Sequence
  Synthetic
acaccaugcuuucuaccacaggc

SEQ ID NO: 97021 - RNA, 19 nt, Artificial Sequence
  Synthetic
agaaugaugucagacaggc

SEQ ID NO: 97022 - RNA, 20 nt, Artificial Sequence
  Synthetic
cagaaugaugucagacaggc

SEQ ID NO: 97023 - RNA, 21 nt, Artificial Sequence
  Synthetic
acagaaugaugucagacaggc

SEQ ID NO: 97024 - RNA, 22 nt, Artificial Sequence
  Synthetic
cacagaaugaugucagacaggc

SEQ ID NO: 97025 - RNA, 23 nt, Artificial Sequence
  Synthetic
ccacagaaugaugucagacaggc

SEQ ID NO: 97026 - RNA, 24 nt, Artificial Sequence
  Synthetic
accacagaaugaugucagacaggc

SEQ ID NO: 97027 - RNA, 21 nt, Artificial Sequence
  Synthetic
agaagugauagugcuacaggc

SEQ ID NO: 97028 - RNA, 22 nt, Artificial Sequence
  Synthetic
aagaagugauagugcuacaggc

SEQ ID NO: 97029 - RNA, 23 nt, Artificial Sequence
  Synthetic
aaagaagugauagugcuacaggc

SEQ ID NO: 97030 - RNA, 24 nt, Artificial Sequence
  Synthetic
caaagaagugauagugcuacaggc

SEQ ID NO: 97031 - RNA, 19 nt, Artificial Sequence
  Synthetic
ugaaaauugccuuacaggc

SEQ ID NO: 97032 - RNA, 21 nt, Artificial Sequence
  Synthetic
ugugaaaauugccuuacaggc

SEQ ID NO: 97033 - RNA, 22 nt, Artificial Sequence
  Synthetic
uugugaaaauugccuuacaggc

SEQ ID NO: 97034 - RNA, 23 nt, Artificial Sequence
  Synthetic
cuugugaaaauugccuuacaggc

SEQ ID NO: 97035 - RNA, 24 nt, Artificial Sequence
  Synthetic
ucuugugaaaauugccuuacaggc

SEQ ID NO: 97036 - RNA, 18 nt, Artificial Sequence
  Synthetic
uaggaaaugccugcaggc

SEQ ID NO: 97037 - RNA, 19 nt, Artificial Sequence
  Synthetic
auaggaaaugccugcaggc

SEQ ID NO: 97038 - RNA, 20 nt, Artificial Sequence
  Synthetic
aauaggaaaugccugcaggc

SEQ ID NO: 97039 - RNA, 22 nt, Artificial Sequence
  Synthetic
agaauaggaaaugccugcaggc

SEQ ID NO: 97040 - RNA, 23 nt, Artificial Sequence
  Synthetic
uagaauaggaaaugccugcaggc

SEQ ID NO: 97041 - RNA, 24 nt, Artificial Sequence
  Synthetic
auagaauaggaaaugccugcaggc

SEQ ID NO: 97042 - RNA, 18 nt, Artificial Sequence
  Synthetic
cagcuuuagcuaucaggc

SEQ ID NO: 97043 - RNA, 19 nt, Artificial Sequence
  Synthetic
ccagcuuuagcuaucaggc

SEQ ID NO: 97044 - RNA, 20 nt, Artificial Sequence
  Synthetic
uccagcuuuagcuaucaggc

SEQ ID NO: 97045 - RNA, 21 nt, Artificial Sequence
  Synthetic
uuccagcuuuagcuaucaggc

SEQ ID NO: 97046 - RNA, 23 nt, Artificial Sequence
  Synthetic
uguuccagcuuuagcuaucaggc

SEQ ID NO: 97047 - RNA, 18 nt, Artificial Sequence
  Synthetic
uacucaguauuuucaggc

SEQ ID NO: 97048 - RNA, 19 nt, Artificial Sequence
  Synthetic
uuacucaguauuuucaggc

SEQ ID NO: 97049 - RNA, 20 nt, Artificial Sequence
  Synthetic
auuacucaguauuuucaggc

SEQ ID NO: 97050 - RNA, 21 nt, Artificial Sequence
  Synthetic
uauuacucaguauuuucaggc

SEQ ID NO: 97051 - RNA, 22 nt, Artificial Sequence
  Synthetic
uuauuacucaguauuuucaggc

SEQ ID NO: 97052 - RNA, 23 nt, Artificial Sequence
  Synthetic
auuauuacucaguauuuucaggc

SEQ ID NO: 97053 - RNA, 24 nt, Artificial Sequence
  Synthetic
cauuauuacucaguauuuucaggc

SEQ ID NO: 97054 - RNA, 18 nt, Artificial Sequence
  Synthetic
auuccagauacaagaggc

SEQ ID NO: 97055 - RNA, 19 nt, Artificial Sequence
  Synthetic
aauuccagauacaagaggc

SEQ ID NO: 97056 - RNA, 20 nt, Artificial Sequence
  Synthetic
aaauuccagauacaagaggc

SEQ ID NO: 97057 - RNA, 22 nt, Artificial Sequence
  Synthetic
agaaauuccagauacaagaggc

SEQ ID NO: 97058 - RNA, 23 nt, Artificial Sequence
  Synthetic
uagaaauuccagauacaagaggc

SEQ ID NO: 97059 - RNA, 18 nt, Artificial Sequence
  Synthetic
ugcccauugagcagaggc

SEQ ID NO: 97060 - RNA, 19 nt, Artificial Sequence
  Synthetic
uugcccauugagcagaggc

SEQ ID NO: 97061 - RNA, 20 nt, Artificial Sequence
  Synthetic
uuugcccauugagcagaggc

SEQ ID NO: 97062 - RNA, 21 nt, Artificial Sequence
  Synthetic
uuuugcccauugagcagaggc

SEQ ID NO: 97063 - RNA, 22 nt, Artificial Sequence
  Synthetic
uuuuugcccauugagcagaggc

SEQ ID NO: 97064 - RNA, 24 nt, Artificial Sequence
  Synthetic
cguuuuugcccauugagcagaggc

SEQ ID NO: 97065 - RNA, 18 nt, Artificial Sequence
  Synthetic
agguuucggagaggaggc

SEQ ID NO: 97066 - RNA, 19 nt, Artificial Sequence
  Synthetic
cagguuucggagaggaggc

SEQ ID NO: 97067 - RNA, 20 nt, Artificial Sequence
  Synthetic
ucagguuucggagaggaggc

SEQ ID NO: 97068 - RNA, 21 nt, Artificial Sequence
  Synthetic
cucagguuucggagaggaggc

SEQ ID NO: 97069 - RNA, 22 nt, Artificial Sequence
  Synthetic
ucucagguuucggagaggaggc

SEQ ID NO: 97070 - RNA, 23 nt, Artificial Sequence
  Synthetic
uucucagguuucggagaggaggc

SEQ ID NO: 97071 - RNA, 24 nt, Artificial Sequence
  Synthetic
auucucagguuucggagaggaggc

SEQ ID NO: 97072 - RNA, 18 nt, Artificial Sequence
  Synthetic
cuuuucugacauggaggc

SEQ ID NO: 97073 - RNA, 19 nt, Artificial Sequence
  Synthetic
ccuuuucugacauggaggc

SEQ ID NO: 97074 - RNA, 20 nt, Artificial Sequence
  Synthetic
uccuuuucugacauggaggc

SEQ ID NO: 97075 - RNA, 21 nt, Artificial Sequence
  Synthetic
uuccuuuucugacauggaggc

SEQ ID NO: 97076 - RNA, 22 nt, Artificial Sequence
  Synthetic
cuuccuuuucugacauggaggc

SEQ ID NO: 97077 - RNA, 23 nt, Artificial Sequence
  Synthetic
acuuccuuuucugacauggaggc

SEQ ID NO: 97078 - RNA, 18 nt, Artificial Sequence
  Synthetic
auuggauaaaacugaggc

SEQ ID NO: 97079 - RNA, 19 nt, Artificial Sequence
  Synthetic
cauuggauaaaacugaggc

SEQ ID NO: 97080 - RNA, 20 nt, Artificial Sequence
  Synthetic
acauuggauaaaacugaggc

SEQ ID NO: 97081 - RNA, 18 nt, Artificial Sequence
  Synthetic
cagaaaaaaaacauaggc

SEQ ID NO: 97082 - RNA, 20 nt, Artificial Sequence
  Synthetic
ugcagaaaaaaaacauaggc

SEQ ID NO: 97083 - RNA, 21 nt, Artificial Sequence
  Synthetic
uugcagaaaaaaaacauaggc

SEQ ID NO: 97084 - RNA, 22 nt, Artificial Sequence
  Synthetic
uuugcagaaaaaaaacauaggc

SEQ ID NO: 97085 - RNA, 23 nt, Artificial Sequence
  Synthetic
uuuugcagaaaaaaaacauaggc

SEQ ID NO: 97086 - RNA, 24 nt, Artificial Sequence
  Synthetic
auuuugcagaaaaaaaacauaggc

SEQ ID NO: 97087 - RNA, 18 nt, Artificial Sequence
  Synthetic
uccuuuguuucacuaggc

SEQ ID NO: 97088 - RNA, 19 nt, Artificial Sequence
  Synthetic
uuccuuuguuucacuaggc

SEQ ID NO: 97089 - RNA, 20 nt, Artificial Sequence
  Synthetic
uuuccuuuguuucacuaggc

SEQ ID NO: 97090 - RNA, 21 nt, Artificial Sequence
  Synthetic
cuuuccuuuguuucacuaggc

SEQ ID NO: 97091 - RNA, 22 nt, Artificial Sequence
  Synthetic
ucuuuccuuuguuucacuaggc

SEQ ID NO: 97092 - RNA, 23 nt, Artificial Sequence
  Synthetic
cucuuuccuuuguuucacuaggc

SEQ ID NO: 97093 - RNA, 24 nt, Artificial Sequence
  Synthetic
ucucuuuccuuuguuucacuaggc

SEQ ID NO: 97094 - RNA, 18 nt, Artificial Sequence
  Synthetic
ugcauaaggcuucuaggc

SEQ ID NO: 97095 - RNA, 19 nt, Artificial Sequence
  Synthetic
augcauaaggcuucuaggc

SEQ ID NO: 97096 - RNA, 23 nt, Artificial Sequence
  Synthetic
ugggaugcauaaggcuucuaggc

SEQ ID NO: 97097 - RNA, 24 nt, Artificial Sequence
  Synthetic
cugggaugcauaaggcuucuaggc

SEQ ID NO: 97098 - RNA, 18 nt, Artificial Sequence
  Synthetic
agaacaaauguuuuaggc

SEQ ID NO: 97099 - RNA, 20 nt, Artificial Sequence
  Synthetic
ugagaacaaauguuuuaggc

SEQ ID NO: 97100 - RNA, 22 nt, Artificial Sequence
  Synthetic
agugagaacaaauguuuuaggc

SEQ ID NO: 97101 - RNA, 23 nt, Artificial Sequence
  Synthetic
aagugagaacaaauguuuuaggc

SEQ ID NO: 97102 - RNA, 24 nt, Artificial Sequence
  Synthetic
aaagugagaacaaauguuuuaggc

SEQ ID NO: 97103 - RNA, 18 nt, Artificial Sequence
  Synthetic
uucagauaccucaagggc

SEQ ID NO: 97104 - RNA, 19 nt, Artificial Sequence
  Synthetic
uuucagauaccucaagggc

SEQ ID NO: 97105 - RNA, 20 nt, Artificial Sequence
  Synthetic
auuucagauaccucaagggc

SEQ ID NO: 97106 - RNA, 21 nt, Artificial Sequence
  Synthetic
aauuucagauaccucaagggc

SEQ ID NO: 97107 - RNA, 22 nt, Artificial Sequence
  Synthetic
aaauuucagauaccucaagggc

SEQ ID NO: 97108 - RNA, 23 nt, Artificial Sequence
  Synthetic
caaauuucagauaccucaagggc

SEQ ID NO: 97109 - RNA, 24 nt, Artificial Sequence
  Synthetic
acaaauuucagauaccucaagggc

SEQ ID NO: 97110 - RNA, 20 nt, Artificial Sequence
  Synthetic
uggaggcaguuacgaagggc

SEQ ID NO: 97111 - RNA, 22 nt, Artificial Sequence
  Synthetic
aguggaggcaguuacgaagggc

SEQ ID NO: 97112 - RNA, 23 nt, Artificial Sequence
  Synthetic
uaguggaggcaguuacgaagggc

SEQ ID NO: 97113 - RNA, 21 nt, Artificial Sequence
  Synthetic
uggguccccugaaaacagggc

SEQ ID NO: 97114 - RNA, 22 nt, Artificial Sequence
  Synthetic
uuggguccccugaaaacagggc

SEQ ID NO: 97115 - RNA, 23 nt, Artificial Sequence
  Synthetic
uuuggguccccugaaaacagggc

SEQ ID NO: 97116 - RNA, 24 nt, Artificial Sequence
  Synthetic
cuuuggguccccugaaaacagggc

SEQ ID NO: 97117 - RNA, 18 nt, Artificial Sequence
  Synthetic
cuggaccaggaccagggc

SEQ ID NO: 97118 - RNA, 19 nt, Artificial Sequence
  Synthetic
ccuggaccaggaccagggc

SEQ ID NO: 97119 - RNA, 20 nt, Artificial Sequence
  Synthetic
uccuggaccaggaccagggc

SEQ ID NO: 97120 - RNA, 22 nt, Artificial Sequence
  Synthetic
aguccuggaccaggaccagggc

SEQ ID NO: 97121 - RNA, 23 nt, Artificial Sequence
  Synthetic
caguccuggaccaggaccagggc

SEQ ID NO: 97122 - RNA, 24 nt, Artificial Sequence
  Synthetic
acaguccuggaccaggaccagggc

SEQ ID NO: 97123 - RNA, 19 nt, Artificial Sequence
  Synthetic
ugcgaauagagggcagggc

SEQ ID NO: 97124 - RNA, 20 nt, Artificial Sequence
  Synthetic
cugcgaauagagggcagggc

SEQ ID NO: 97125 - RNA, 18 nt, Artificial Sequence
  Synthetic
cugcacaggaaggagggc

SEQ ID NO: 97126 - RNA, 20 nt, Artificial Sequence
  Synthetic
agcugcacaggaaggagggc

SEQ ID NO: 97127 - RNA, 21 nt, Artificial Sequence
  Synthetic
uagcugcacaggaaggagggc

SEQ ID NO: 97128 - RNA, 22 nt, Artificial Sequence
  Synthetic
auagcugcacaggaaggagggc

SEQ ID NO: 97129 - RNA, 23 nt, Artificial Sequence
  Synthetic
uauagcugcacaggaaggagggc

SEQ ID NO: 97130 - RNA, 24 nt, Artificial Sequence
  Synthetic
auauagcugcacaggaaggagggc

SEQ ID NO: 97131 - RNA, 18 nt, Artificial Sequence
  Synthetic
aucccuggugaggagggc

SEQ ID NO: 97132 - RNA, 19 nt, Artificial Sequence
  Synthetic
uaucccuggugaggagggc

SEQ ID NO: 97133 - RNA, 20 nt, Artificial Sequence
  Synthetic
uuaucccuggugaggagggc

SEQ ID NO: 97134 - RNA, 21 nt, Artificial Sequence
  Synthetic
uuuaucccuggugaggagggc

SEQ ID NO: 97135 - RNA, 23 nt, Artificial Sequence
  Synthetic
aguuuaucccuggugaggagggc

SEQ ID NO: 97136 - RNA, 24 nt, Artificial Sequence
  Synthetic
uaguuuaucccuggugaggagggc

SEQ ID NO: 97137 - RNA, 18 nt, Artificial Sequence
  Synthetic
auuauaugauccuagggc

SEQ ID NO: 97138 - RNA, 19 nt, Artificial Sequence
  Synthetic
aauuauaugauccuagggc

SEQ ID NO: 97139 - RNA, 20 nt, Artificial Sequence
  Synthetic
aaauuauaugauccuagggc

SEQ ID NO: 97140 - RNA, 22 nt, Artificial Sequence
  Synthetic
ugaaauuauaugauccuagggc

SEQ ID NO: 97141 - RNA, 23 nt, Artificial Sequence
  Synthetic
augaaauuauaugauccuagggc

SEQ ID NO: 97142 - RNA, 19 nt, Artificial Sequence
  Synthetic
ugagaucaagggcacgggc

SEQ ID NO: 97143 - RNA, 20 nt, Artificial Sequence
  Synthetic
cugagaucaagggcacgggc

SEQ ID NO: 97144 - RNA, 21 nt, Artificial Sequence
  Synthetic
ucugagaucaagggcacgggc

SEQ ID NO: 97145 - RNA, 22 nt, Artificial Sequence
  Synthetic
cucugagaucaagggcacgggc

SEQ ID NO: 97146 - RNA, 23 nt, Artificial Sequence
  Synthetic
ucucugagaucaagggcacgggc

SEQ ID NO: 97147 - RNA, 24 nt, Artificial Sequence
  Synthetic
uucucugagaucaagggcacgggc

SEQ ID NO: 97148 - RNA, 18 nt, Artificial Sequence
  Synthetic
aaaauccagaaaaggggc

SEQ ID NO: 97149 - RNA, 19 nt, Artificial Sequence
  Synthetic
aaaaauccagaaaaggggc

SEQ ID NO: 97150 - RNA, 20 nt, Artificial Sequence
  Synthetic
uaaaaauccagaaaaggggc

SEQ ID NO: 97151 - RNA, 21 nt, Artificial Sequence
  Synthetic
cuaaaaauccagaaaaggggc

SEQ ID NO: 97152 - RNA, 22 nt, Artificial Sequence
  Synthetic
ucuaaaaauccagaaaaggggc

SEQ ID NO: 97153 - RNA, 23 nt, Artificial Sequence
  Synthetic
cucuaaaaauccagaaaaggggc

SEQ ID NO: 97154 - RNA, 19 nt, Artificial Sequence
  Synthetic
ugagaagggaagcuggggc

SEQ ID NO: 97155 - RNA, 20 nt, Artificial Sequence
  Synthetic
uugagaagggaagcuggggc

SEQ ID NO: 97156 - RNA, 22 nt, Artificial Sequence
  Synthetic
aguugagaagggaagcuggggc

SEQ ID NO: 97157 - RNA, 23 nt, Artificial Sequence
  Synthetic
aaguugagaagggaagcuggggc

SEQ ID NO: 97158 - RNA, 24 nt, Artificial Sequence
  Synthetic
caaguugagaagggaagcuggggc

SEQ ID NO: 97159 - RNA, 19 nt, Artificial Sequence
  Synthetic
ugagaguugaacaaugggc

SEQ ID NO: 97160 - RNA, 20 nt, Artificial Sequence
  Synthetic
uugagaguugaacaaugggc

SEQ ID NO: 97161 - RNA, 21 nt, Artificial Sequence
  Synthetic
cuugagaguugaacaaugggc

SEQ ID NO: 97162 - RNA, 24 nt, Artificial Sequence
  Synthetic
aggcuugagaguugaacaaugggc

SEQ ID NO: 97163 - RNA, 18 nt, Artificial Sequence
  Synthetic
aagauacacuugaugggc

SEQ ID NO: 97164 - RNA, 19 nt, Artificial Sequence
  Synthetic
aaagauacacuugaugggc

SEQ ID NO: 97165 - RNA, 21 nt, Artificial Sequence
  Synthetic
ugaaagauacacuugaugggc

SEQ ID NO: 97166 - RNA, 22 nt, Artificial Sequence
  Synthetic
cugaaagauacacuugaugggc

SEQ ID NO: 97167 - RNA, 23 nt, Artificial Sequence
  Synthetic
ucugaaagauacacuugaugggc

SEQ ID NO: 97168 - RNA, 24 nt, Artificial Sequence
  Synthetic
uucugaaagauacacuugaugggc

SEQ ID NO: 97169 - RNA, 21 nt, Artificial Sequence
  Synthetic
auugagcaggaagcucugggc

SEQ ID NO: 97170 - RNA, 22 nt, Artificial Sequence
  Synthetic
aauugagcaggaagcucugggc

SEQ ID NO: 97171 - RNA, 23 nt, Artificial Sequence
  Synthetic
caauugagcaggaagcucugggc

SEQ ID NO: 97172 - RNA, 24 nt, Artificial Sequence
  Synthetic
acaauugagcaggaagcucugggc

SEQ ID NO: 97173 - RNA, 18 nt, Artificial Sequence
  Synthetic
auaacacacugagugggc

SEQ ID NO: 97174 - RNA, 20 nt, Artificial Sequence
  Synthetic
ugauaacacacugagugggc

SEQ ID NO: 97175 - RNA, 21 nt, Artificial Sequence
  Synthetic
uugauaacacacugagugggc

SEQ ID NO: 97176 - RNA, 24 nt, Artificial Sequence
  Synthetic
agguugauaacacacugagugggc

SEQ ID NO: 97177 - RNA, 21 nt, Artificial Sequence
  Synthetic
uaaaaucauauagacgugggc

SEQ ID NO: 97178 - RNA, 22 nt, Artificial Sequence
  Synthetic
uuaaaaucauauagacgugggc

SEQ ID NO: 97179 - RNA, 23 nt, Artificial Sequence
  Synthetic
uuuaaaaucauauagacgugggc

SEQ ID NO: 97180 - RNA, 24 nt, Artificial Sequence
  Synthetic
cuuuaaaaucauauagacgugggc

SEQ ID NO: 97181 - RNA, 18 nt, Artificial Sequence
  Synthetic
uuggagccacuggugggc

SEQ ID NO: 97182 - RNA, 19 nt, Artificial Sequence
  Synthetic
auuggagccacuggugggc

SEQ ID NO: 97183 - RNA, 22 nt, Artificial Sequence
  Synthetic
uggauuggagccacuggugggc

SEQ ID NO: 97184 - RNA, 23 nt, Artificial Sequence
  Synthetic
uuggauuggagccacuggugggc

SEQ ID NO: 97185 - RNA, 19 nt, Artificial Sequence
  Synthetic
agaggguugcaaguugggc

SEQ ID NO: 97186 - RNA, 21 nt, Artificial Sequence
  Synthetic
ugagaggguugcaaguugggc

SEQ ID NO: 97187 - RNA, 23 nt, Artificial Sequence
  Synthetic
agugagaggguugcaaguugggc

SEQ ID NO: 97188 - RNA, 18 nt, Artificial Sequence
  Synthetic
cagaaaaaugauuugggc

SEQ ID NO: 97189 - RNA, 19 nt, Artificial Sequence
  Synthetic
ucagaaaaaugauuugggc

SEQ ID NO: 97190 - RNA, 20 nt, Artificial Sequence
  Synthetic
cucagaaaaaugauuugggc

SEQ ID NO: 97191 - RNA, 21 nt, Artificial Sequence
  Synthetic
ccucagaaaaaugauuugggc

SEQ ID NO: 97192 - RNA, 22 nt, Artificial Sequence
  Synthetic
uccucagaaaaaugauuugggc

SEQ ID NO: 97193 - RNA, 23 nt, Artificial Sequence
  Synthetic
uuccucagaaaaaugauuugggc

SEQ ID NO: 97194 - RNA, 24 nt, Artificial Sequence
  Synthetic
cuuccucagaaaaaugauuugggc

SEQ ID NO: 97195 - RNA, 18 nt, Artificial Sequence
  Synthetic
aucucucauucuuugggc

SEQ ID NO: 97196 - RNA, 19 nt, Artificial Sequence
  Synthetic
caucucucauucuuugggc

SEQ ID NO: 97197 - RNA, 21 nt, Artificial Sequence
  Synthetic
agcaucucucauucuuugggc

SEQ ID NO: 97198 - RNA, 22 nt, Artificial Sequence
  Synthetic
aagcaucucucauucuuugggc

SEQ ID NO: 97199 - RNA, 24 nt, Artificial Sequence
  Synthetic
ugaagcaucucucauucuuugggc

SEQ ID NO: 97200 - RNA, 19 nt, Artificial Sequence
  Synthetic
agcucagagugcuaauggc

SEQ ID NO: 97201 - RNA, 20 nt, Artificial Sequence
  Synthetic
uagcucagagugcuaauggc

SEQ ID NO: 97202 - RNA, 22 nt, Artificial Sequence
  Synthetic
aguagcucagagugcuaauggc

SEQ ID NO: 97203 - RNA, 23 nt, Artificial Sequence
  Synthetic
aaguagcucagagugcuaauggc

SEQ ID NO: 97204 - RNA, 24 nt, Artificial Sequence
  Synthetic
caaguagcucagagugcuaauggc

SEQ ID NO: 97205 - RNA, 19 nt, Artificial Sequence
  Synthetic
agaagaggaguaagauggc

SEQ ID NO: 97206 - RNA, 21 nt, Artificial Sequence
  Synthetic
ugagaagaggaguaagauggc

SEQ ID NO: 97207 - RNA, 22 nt, Artificial Sequence
  Synthetic
uugagaagaggaguaagauggc

SEQ ID NO: 97208 - RNA, 23 nt, Artificial Sequence
  Synthetic
uuugagaagaggaguaagauggc

SEQ ID NO: 97209 - RNA, 24 nt, Artificial Sequence
  Synthetic
uuuugagaagaggaguaagauggc

SEQ ID NO: 97210 - RNA, 18 nt, Artificial Sequence
  Synthetic
uaagcaaauggauauggc

SEQ ID NO: 97211 - RNA, 19 nt, Artificial Sequence
  Synthetic
auaagcaaauggauauggc

SEQ ID NO: 97212 - RNA, 20 nt, Artificial Sequence
  Synthetic
cauaagcaaauggauauggc

SEQ ID NO: 97213 - RNA, 22 nt, Artificial Sequence
  Synthetic
agcauaagcaaauggauauggc

SEQ ID NO: 97214 - RNA, 18 nt, Artificial Sequence
  Synthetic
auuguauuauccuauggc

SEQ ID NO: 97215 - RNA, 19 nt, Artificial Sequence
  Synthetic
cauuguauuauccuauggc

SEQ ID NO: 97216 - RNA, 20 nt, Artificial Sequence
  Synthetic
ucauuguauuauccuauggc

SEQ ID NO: 97217 - RNA, 22 nt, Artificial Sequence
  Synthetic
agucauuguauuauccuauggc

SEQ ID NO: 97218 - RNA, 23 nt, Artificial Sequence
  Synthetic
uagucauuguauuauccuauggc

SEQ ID NO: 97219 - RNA, 24 nt, Artificial Sequence
  Synthetic
auagucauuguauuauccuauggc

SEQ ID NO: 97220 - RNA, 21 nt, Artificial Sequence
  Synthetic
cauggaggaagugauuauggc

SEQ ID NO: 97221 - RNA, 22 nt, Artificial Sequence
  Synthetic
acauggaggaagugauuauggc

SEQ ID NO: 97222 - RNA, 23 nt, Artificial Sequence
  Synthetic
aacauggaggaagugauuauggc

SEQ ID NO: 97223 - RNA, 18 nt, Artificial Sequence
  Synthetic
uauucauuguguuauggc

SEQ ID NO: 97224 - RNA, 19 nt, Artificial Sequence
  Synthetic
uuauucauuguguuauggc

SEQ ID NO: 97225 - RNA, 20 nt, Artificial Sequence
  Synthetic
auuauucauuguguuauggc

SEQ ID NO: 97226 - RNA, 21 nt, Artificial Sequence
  Synthetic
aauuauucauuguguuauggc

SEQ ID NO: 97227 - RNA, 22 nt, Artificial Sequence
  Synthetic
aaauuauucauuguguuauggc

SEQ ID NO: 97228 - RNA, 23 nt, Artificial Sequence
  Synthetic
aaaauuauucauuguguuauggc

SEQ ID NO: 97229 - RNA, 24 nt, Artificial Sequence
  Synthetic
aaaaauuauucauuguguuauggc

SEQ ID NO: 97230 - RNA, 18 nt, Artificial Sequence
  Synthetic
acaggagccaacacuggc

SEQ ID NO: 97231 - RNA, 20 nt, Artificial Sequence
  Synthetic
agacaggagccaacacuggc

SEQ ID NO: 97232 - RNA, 21 nt, Artificial Sequence
  Synthetic
cagacaggagccaacacuggc

SEQ ID NO: 97233 - RNA, 22 nt, Artificial Sequence
  Synthetic
ccagacaggagccaacacuggc

SEQ ID NO: 97234 - RNA, 23 nt, Artificial Sequence
  Synthetic
accagacaggagccaacacuggc

SEQ ID NO: 97235 - RNA, 24 nt, Artificial Sequence
  Synthetic
caccagacaggagccaacacuggc

SEQ ID NO: 97236 - RNA, 18 nt, Artificial Sequence
  Synthetic
uuuccauuuuauacuggc

SEQ ID NO: 97237 - RNA, 19 nt, Artificial Sequence
  Synthetic
auuuccauuuuauacuggc

SEQ ID NO: 97238 - RNA, 20 nt, Artificial Sequence
  Synthetic
cauuuccauuuuauacuggc

SEQ ID NO: 97239 - RNA, 21 nt, Artificial Sequence
  Synthetic
ucauuuccauuuuauacuggc

SEQ ID NO: 97240 - RNA, 22 nt, Artificial Sequence
  Synthetic
cucauuuccauuuuauacuggc

SEQ ID NO: 97241 - RNA, 23 nt, Artificial Sequence
  Synthetic
ucucauuuccauuuuauacuggc

SEQ ID NO: 97242 - RNA, 24 nt, Artificial Sequence
  Synthetic
uucucauuuccauuuuauacuggc

SEQ ID NO: 97243 - RNA, 20 nt, Artificial Sequence
  Synthetic
agguccuaaggaaaccuggc

SEQ ID NO: 97244 - RNA, 22 nt, Artificial Sequence
  Synthetic
agagguccuaaggaaaccuggc

SEQ ID NO: 97245 - RNA, 19 nt, Artificial Sequence
  Synthetic
agauaaacagacagcuggc

SEQ ID NO: 97246 - RNA, 20 nt, Artificial Sequence
  Synthetic
cagauaaacagacagcuggc

SEQ ID NO: 97247 - RNA, 24 nt, Artificial Sequence
  Synthetic
ugggcagauaaacagacagcuggc

SEQ ID NO: 97248 - RNA, 18 nt, Artificial Sequence
  Synthetic
caguagauacuuaguggc

SEQ ID NO: 97249 - RNA, 20 nt, Artificial Sequence
  Synthetic
ugcaguagauacuuaguggc

SEQ ID NO: 97250 - RNA, 21 nt, Artificial Sequence
  Synthetic
cugcaguagauacuuaguggc

SEQ ID NO: 97251 - RNA, 22 nt, Artificial Sequence
  Synthetic
ucugcaguagauacuuaguggc

SEQ ID NO: 97252 - RNA, 23 nt, Artificial Sequence
  Synthetic
aucugcaguagauacuuaguggc

SEQ ID NO: 97253 - RNA, 24 nt, Artificial Sequence
  Synthetic
aaucugcaguagauacuuaguggc

SEQ ID NO: 97254 - RNA, 18 nt, Artificial Sequence
  Synthetic
aggcauuguguuaguggc

SEQ ID NO: 97255 - RNA, 19 nt, Artificial Sequence
  Synthetic
uaggcauuguguuaguggc

SEQ ID NO: 97256 - RNA, 20 nt, Artificial Sequence
  Synthetic
uuaggcauuguguuaguggc

SEQ ID NO: 97257 - RNA, 22 nt, Artificial Sequence
  Synthetic
uguuaggcauuguguuaguggc

SEQ ID NO: 97258 - RNA, 23 nt, Artificial Sequence
  Synthetic
uuguuaggcauuguguuaguggc

SEQ ID NO: 97259 - RNA, 24 nt, Artificial Sequence
  Synthetic
uuuguuaggcauuguguuaguggc

SEQ ID NO: 97260 - RNA, 18 nt, Artificial Sequence
  Synthetic
acuauaugaaaacguggc

SEQ ID NO: 97261 - RNA, 19 nt, Artificial Sequence
  Synthetic
uacuauaugaaaacguggc

SEQ ID NO: 97262 - RNA, 22 nt, Artificial Sequence
  Synthetic
ugguacuauaugaaaacguggc

SEQ ID NO: 97263 - RNA, 23 nt, Artificial Sequence
  Synthetic
augguacuauaugaaaacguggc

SEQ ID NO: 97264 - RNA, 24 nt, Artificial Sequence
  Synthetic
uaugguacuauaugaaaacguggc

SEQ ID NO: 97265 - RNA, 18 nt, Artificial Sequence
  Synthetic
uguacauggcaggguggc

SEQ ID NO: 97266 - RNA, 19 nt, Artificial Sequence
  Synthetic
auguacauggcaggguggc

SEQ ID NO: 97267 - RNA, 22 nt, Artificial Sequence
  Synthetic
aggauguacauggcaggguggc

SEQ ID NO: 97268 - RNA, 23 nt, Artificial Sequence
  Synthetic
caggauguacauggcaggguggc

SEQ ID NO: 97269 - RNA, 24 nt, Artificial Sequence
  Synthetic
ccaggauguacauggcaggguggc

SEQ ID NO: 97270 - RNA, 18 nt, Artificial Sequence
  Synthetic
auugcauuguaggguggc

SEQ ID NO: 97271 - RNA, 20 nt, Artificial Sequence
  Synthetic
agauugcauuguaggguggc

SEQ ID NO: 97272 - RNA, 22 nt, Artificial Sequence
  Synthetic
agagauugcauuguaggguggc

SEQ ID NO: 97273 - RNA, 23 nt, Artificial Sequence
  Synthetic
uagagauugcauuguaggguggc

SEQ ID NO: 97274 - RNA, 20 nt, Artificial Sequence
  Synthetic
cggggguuucaccuuguggc

SEQ ID NO: 97275 - RNA, 18 nt, Artificial Sequence
  Synthetic
aaugcugucaaaauuggc

SEQ ID NO: 97276 - RNA, 20 nt, Artificial Sequence
  Synthetic
agaaugcugucaaaauuggc

SEQ ID NO: 97277 - RNA, 22 nt, Artificial Sequence
  Synthetic
agagaaugcugucaaaauuggc

SEQ ID NO: 97278 - RNA, 23 nt, Artificial Sequence
  Synthetic
cagagaaugcugucaaaauuggc

SEQ ID NO: 97279 - RNA, 24 nt, Artificial Sequence
  Synthetic
ucagagaaugcugucaaaauuggc

SEQ ID NO: 97280 - RNA, 18 nt, Artificial Sequence
  Synthetic
ucugcugccugcauuggc

SEQ ID NO: 97281 - RNA, 19 nt, Artificial Sequence
  Synthetic
uucugcugccugcauuggc

SEQ ID NO: 97282 - RNA, 20 nt, Artificial Sequence
  Synthetic
auucugcugccugcauuggc

SEQ ID NO: 97283 - RNA, 21 nt, Artificial Sequence
  Synthetic
aauucugcugccugcauuggc

SEQ ID NO: 97284 - RNA, 22 nt, Artificial Sequence
  Synthetic
aaauucugcugccugcauuggc

SEQ ID NO: 97285 - RNA, 23 nt, Artificial Sequence
  Synthetic
aaaauucugcugccugcauuggc

SEQ ID NO: 97286 - RNA, 18 nt, Artificial Sequence
  Synthetic
acauaucagaaacuuggc

SEQ ID NO: 97287 - RNA, 19 nt, Artificial Sequence
  Synthetic
cacauaucagaaacuuggc

SEQ ID NO: 97288 - RNA, 20 nt, Artificial Sequence
  Synthetic
acacauaucagaaacuuggc

SEQ ID NO: 97289 - RNA, 21 nt, Artificial Sequence
  Synthetic
cacacauaucagaaacuuggc

SEQ ID NO: 97290 - RNA, 22 nt, Artificial Sequence
  Synthetic
acacacauaucagaaacuuggc

SEQ ID NO: 97291 - RNA, 23 nt, Artificial Sequence
  Synthetic
uacacacauaucagaaacuuggc

SEQ ID NO: 97292 - RNA, 24 nt, Artificial Sequence
  Synthetic
auacacacauaucagaaacuuggc

SEQ ID NO: 97293 - RNA, 18 nt, Artificial Sequence
  Synthetic
uaagaguuauggguuggc

SEQ ID NO: 97294 - RNA, 19 nt, Artificial Sequence
  Synthetic
cuaagaguuauggguuggc

SEQ ID NO: 97295 - RNA, 21 nt, Artificial Sequence
  Synthetic
ugcuaagaguuauggguuggc

SEQ ID NO: 97296 - RNA, 22 nt, Artificial Sequence
  Synthetic
uugcuaagaguuauggguuggc

SEQ ID NO: 97297 - RNA, 24 nt, Artificial Sequence
  Synthetic
aguugcuaagaguuauggguuggc

SEQ ID NO: 97298 - RNA, 18 nt, Artificial Sequence
  Synthetic
ccuuuugaagauguuggc

SEQ ID NO: 97299 - RNA, 19 nt, Artificial Sequence
  Synthetic
uccuuuugaagauguuggc

SEQ ID NO: 97300 - RNA, 20 nt, Artificial Sequence
  Synthetic
uuccuuuugaagauguuggc

SEQ ID NO: 97301 - RNA, 21 nt, Artificial Sequence
  Synthetic
uuuccuuuugaagauguuggc

SEQ ID NO: 97302 - RNA, 22 nt, Artificial Sequence
  Synthetic
cuuuccuuuugaagauguuggc

SEQ ID NO: 97303 - RNA, 24 nt, Artificial Sequence
  Synthetic
ugcuuuccuuuugaagauguuggc

SEQ ID NO: 97304 - RNA, 18 nt, Artificial Sequence
  Synthetic
uuuugagacauauuuggc

SEQ ID NO: 97305 - RNA, 20 nt, Artificial Sequence
  Synthetic
cguuuugagacauauuuggc

SEQ ID NO: 97306 - RNA, 21 nt, Artificial Sequence
  Synthetic
ucguuuugagacauauuuggc

SEQ ID NO: 97307 - RNA, 22 nt, Artificial Sequence
  Synthetic
aucguuuugagacauauuuggc

SEQ ID NO: 97308 - RNA, 23 nt, Artificial Sequence
  Synthetic
uaucguuuugagacauauuuggc

SEQ ID NO: 97309 - RNA, 24 nt, Artificial Sequence
  Synthetic
auaucguuuugagacauauuuggc

SEQ ID NO: 97310 - RNA, 18 nt, Artificial Sequence
  Synthetic
uucuaaaauuaaaaaugc

SEQ ID NO: 97311 - RNA, 19 nt, Artificial Sequence
  Synthetic
auucuaaaauuaaaaaugc

SEQ ID NO: 97312 - RNA, 20 nt, Artificial Sequence
  Synthetic
uauucuaaaauuaaaaaugc

SEQ ID NO: 97313 - RNA, 21 nt, Artificial Sequence
  Synthetic
auauucuaaaauuaaaaaugc

SEQ ID NO: 97314 - RNA, 22 nt, Artificial Sequence
  Synthetic
aauauucuaaaauuaaaaaugc

SEQ ID NO: 97315 - RNA, 23 nt, Artificial Sequence
  Synthetic
uaauauucuaaaauuaaaaaugc

SEQ ID NO: 97316 - RNA, 24 nt, Artificial Sequence
  Synthetic
uuaauauucuaaaauuaaaaaugc

SEQ ID NO: 97317 - RNA, 18 nt, Artificial Sequence
  Synthetic
ccaaagucuguaaaaugc

SEQ ID NO: 97318 - RNA, 19 nt, Artificial Sequence
  Synthetic
uccaaagucuguaaaaugc

SEQ ID NO: 97319 - RNA, 20 nt, Artificial Sequence
  Synthetic
cuccaaagucuguaaaaugc

SEQ ID NO: 97320 - RNA, 21 nt, Artificial Sequence
  Synthetic
acuccaaagucuguaaaaugc

SEQ ID NO: 97321 - RNA, 22 nt, Artificial Sequence
  Synthetic
aacuccaaagucuguaaaaugc

SEQ ID NO: 97322 - RNA, 23 nt, Artificial Sequence
  Synthetic
uaacuccaaagucuguaaaaugc

SEQ ID NO: 97323 - RNA, 24 nt, Artificial Sequence
  Synthetic
uuaacuccaaagucuguaaaaugc

SEQ ID NO: 97324 - RNA, 20 nt, Artificial Sequence
  Synthetic
cgguuuaucaagccaaaugc

SEQ ID NO: 97325 - RNA, 21 nt, Artificial Sequence
  Synthetic
ucgguuuaucaagccaaaugc

SEQ ID NO: 97326 - RNA, 22 nt, Artificial Sequence
  Synthetic
cucgguuuaucaagccaaaugc

SEQ ID NO: 97327 - RNA, 23 nt, Artificial Sequence
  Synthetic
acucgguuuaucaagccaaaugc

SEQ ID NO: 97328 - RNA, 24 nt, Artificial Sequence
  Synthetic
uacucgguuuaucaagccaaaugc

SEQ ID NO: 97329 - RNA, 18 nt, Artificial Sequence
  Synthetic
aguuaucguaagaaaugc

SEQ ID NO: 97330 - RNA, 19 nt, Artificial Sequence
  Synthetic
aaguuaucguaagaaaugc

SEQ ID NO: 97331 - RNA, 20 nt, Artificial Sequence
  Synthetic
aaaguuaucguaagaaaugc

SEQ ID NO: 97332 - RNA, 21 nt, Artificial Sequence
  Synthetic
uaaaguuaucguaagaaaugc

SEQ ID NO: 97333 - RNA, 22 nt, Artificial Sequence
  Synthetic
auaaaguuaucguaagaaaugc

SEQ ID NO: 97334 - RNA, 23 nt, Artificial Sequence
  Synthetic
uauaaaguuaucguaagaaaugc

SEQ ID NO: 97335 - RNA, 24 nt, Artificial Sequence
  Synthetic
uuauaaaguuaucguaagaaaugc

SEQ ID NO: 97336 - RNA, 19 nt, Artificial Sequence
  Synthetic
agcagaggcuuaacaaugc

SEQ ID NO: 97337 - RNA, 20 nt, Artificial Sequence
  Synthetic
aagcagaggcuuaacaaugc

SEQ ID NO: 97338 - RNA, 21 nt, Artificial Sequence
  Synthetic
uaagcagaggcuuaacaaugc

SEQ ID NO: 97339 - RNA, 22 nt, Artificial Sequence
  Synthetic
auaagcagaggcuuaacaaugc

SEQ ID NO: 97340 - RNA, 23 nt, Artificial Sequence
  Synthetic
cauaagcagaggcuuaacaaugc

SEQ ID NO: 97341 - RNA, 24 nt, Artificial Sequence
  Synthetic
acauaagcagaggcuuaacaaugc

SEQ ID NO: 97342 - RNA, 18 nt, Artificial Sequence
  Synthetic
cccucaaccaagcaaugc

SEQ ID NO: 97343 - RNA, 19 nt, Artificial Sequence
  Synthetic
ccccucaaccaagcaaugc

SEQ ID NO: 97344 - RNA, 20 nt, Artificial Sequence
  Synthetic
accccucaaccaagcaaugc

SEQ ID NO: 97345 - RNA, 21 nt, Artificial Sequence
  Synthetic
aaccccucaaccaagcaaugc

SEQ ID NO: 97346 - RNA, 23 nt, Artificial Sequence
  Synthetic
agaaccccucaaccaagcaaugc

SEQ ID NO: 97347 - RNA, 24 nt, Artificial Sequence
  Synthetic
cagaaccccucaaccaagcaaugc

SEQ ID NO: 97348 - RNA, 19 nt, Artificial Sequence
  Synthetic
agcuccuuaaaugcaaugc

SEQ ID NO: 97349 - RNA, 20 nt, Artificial Sequence
  Synthetic
cagcuccuuaaaugcaaugc

SEQ ID NO: 97350 - RNA, 22 nt, Artificial Sequence
  Synthetic
agcagcuccuuaaaugcaaugc

SEQ ID NO: 97351 - RNA, 23 nt, Artificial Sequence
  Synthetic
cagcagcuccuuaaaugcaaugc

SEQ ID NO: 97352 - RNA, 24 nt, Artificial Sequence
  Synthetic
acagcagcuccuuaaaugcaaugc

SEQ ID NO: 97353 - RNA, 18 nt, Artificial Sequence
  Synthetic
acccacuacuaucaaugc

SEQ ID NO: 97354 - RNA, 19 nt, Artificial Sequence
  Synthetic
uacccacuacuaucaaugc

SEQ ID NO: 97355 - RNA, 20 nt, Artificial Sequence
  Synthetic
auacccacuacuaucaaugc

SEQ ID NO: 97356 - RNA, 21 nt, Artificial Sequence
  Synthetic
cauacccacuacuaucaaugc

SEQ ID NO: 97357 - RNA, 22 nt, Artificial Sequence
  Synthetic
ccauacccacuacuaucaaugc

SEQ ID NO: 97358 - RNA, 23 nt, Artificial Sequence
  Synthetic
accauacccacuacuaucaaugc

SEQ ID NO: 97359 - RNA, 24 nt, Artificial Sequence
  Synthetic
caccauacccacuacuaucaaugc

SEQ ID NO: 97360 - RNA, 18 nt, Artificial Sequence
  Synthetic
cauuuugcuacagaaugc

SEQ ID NO: 97361 - RNA, 20 nt, Artificial Sequence
  Synthetic
agcauuuugcuacagaaugc

SEQ ID NO: 97362 - RNA, 21 nt, Artificial Sequence
  Synthetic
cagcauuuugcuacagaaugc

SEQ ID NO: 97363 - RNA, 22 nt, Artificial Sequence
  Synthetic
acagcauuuugcuacagaaugc

SEQ ID NO: 97364 - RNA, 23 nt, Artificial Sequence
  Synthetic
cacagcauuuugcuacagaaugc

SEQ ID NO: 97365 - RNA, 24 nt, Artificial Sequence
  Synthetic
ccacagcauuuugcuacagaaugc

SEQ ID NO: 97366 - RNA, 21 nt, Artificial Sequence
  Synthetic
aaucaggauccagaggaaugc

SEQ ID NO: 97367 - RNA, 23 nt, Artificial Sequence
  Synthetic
ugaaucaggauccagaggaaugc

SEQ ID NO: 97368 - RNA, 18 nt, Artificial Sequence
  Synthetic
uuuaagagccaugaaugc

SEQ ID NO: 97369 - RNA, 19 nt, Artificial Sequence
  Synthetic
auuuaagagccaugaaugc

SEQ ID NO: 97370 - RNA, 20 nt, Artificial Sequence
  Synthetic
cauuuaagagccaugaaugc

SEQ ID NO: 97371 - RNA, 21 nt, Artificial Sequence
  Synthetic
ccauuuaagagccaugaaugc

SEQ ID NO: 97372 - RNA, 22 nt, Artificial Sequence
  Synthetic
uccauuuaagagccaugaaugc

SEQ ID NO: 97373 - RNA, 23 nt, Artificial Sequence
  Synthetic
uuccauuuaagagccaugaaugc

SEQ ID NO: 97374 - RNA, 24 nt, Artificial Sequence
  Synthetic
cuuccauuuaagagccaugaaugc

SEQ ID NO: 97375 - RNA, 18 nt, Artificial Sequence
  Synthetic
uagagacugacugaaugc

SEQ ID NO: 97376 - RNA, 19 nt, Artificial Sequence
  Synthetic
uuagagacugacugaaugc

SEQ ID NO: 97377 - RNA, 20 nt, Artificial Sequence
  Synthetic
cuuagagacugacugaaugc

SEQ ID NO: 97378 - RNA, 21 nt, Artificial Sequence
  Synthetic
acuuagagacugacugaaugc

SEQ ID NO: 97379 - RNA, 22 nt, Artificial Sequence
  Synthetic
aacuuagagacugacugaaugc

SEQ ID NO: 97380 - RNA, 23 nt, Artificial Sequence
  Synthetic
caacuuagagacugacugaaugc

SEQ ID NO: 97381 - RNA, 24 nt, Artificial Sequence
  Synthetic
acaacuuagagacugacugaaugc

SEQ ID NO: 97382 - RNA, 18 nt, Artificial Sequence
  Synthetic
cauucaguaugugaaugc

SEQ ID NO: 97383 - RNA, 19 nt, Artificial Sequence
  Synthetic
ucauucaguaugugaaugc

SEQ ID NO: 97384 - RNA, 20 nt, Artificial Sequence
  Synthetic
uucauucaguaugugaaugc

SEQ ID NO: 97385 - RNA, 21 nt, Artificial Sequence
  Synthetic
auucauucaguaugugaaugc

SEQ ID NO: 97386 - RNA, 22 nt, Artificial Sequence
  Synthetic
cauucauucaguaugugaaugc

SEQ ID NO: 97387 - RNA, 23 nt, Artificial Sequence
  Synthetic
ucauucauucaguaugugaaugc

SEQ ID NO: 97388 - RNA, 24 nt, Artificial Sequence
  Synthetic
uucauucauucaguaugugaaugc

SEQ ID NO: 97389 - RNA, 18 nt, Artificial Sequence
  Synthetic
cugagacacucauaaugc

SEQ ID NO: 97390 - RNA, 19 nt, Artificial Sequence
  Synthetic
acugagacacucauaaugc

SEQ ID NO: 97391 - RNA, 20 nt, Artificial Sequence
  Synthetic
aacugagacacucauaaugc

SEQ ID NO: 97392 - RNA, 21 nt, Artificial Sequence
  Synthetic
aaacugagacacucauaaugc

SEQ ID NO: 97393 - RNA, 22 nt, Artificial Sequence
  Synthetic
caaacugagacacucauaaugc

SEQ ID NO: 97394 - RNA, 23 nt, Artificial Sequence
  Synthetic
ccaaacugagacacucauaaugc

SEQ ID NO: 97395 - RNA, 24 nt, Artificial Sequence
  Synthetic
cccaaacugagacacucauaaugc

SEQ ID NO: 97396 - RNA, 21 nt, Artificial Sequence
  Synthetic
cauccaaugacugauuaaugc

SEQ ID NO: 97397 - RNA, 22 nt, Artificial Sequence
  Synthetic
ucauccaaugacugauuaaugc

SEQ ID NO: 97398 - RNA, 23 nt, Artificial Sequence
  Synthetic
aucauccaaugacugauuaaugc

SEQ ID NO: 97399 - RNA, 24 nt, Artificial Sequence
  Synthetic
uaucauccaaugacugauuaaugc

SEQ ID NO: 97400 - RNA, 18 nt, Artificial Sequence
  Synthetic
cugcagacauuuuaaugc

SEQ ID NO: 97401 - RNA, 19 nt, Artificial Sequence
  Synthetic
ccugcagacauuuuaaugc

SEQ ID NO: 97402 - RNA, 21 nt, Artificial Sequence
  Synthetic
agccugcagacauuuuaaugc

SEQ ID NO: 97403 - RNA, 22 nt, Artificial Sequence
  Synthetic
cagccugcagacauuuuaaugc

SEQ ID NO: 97404 - RNA, 23 nt, Artificial Sequence
  Synthetic
acagccugcagacauuuuaaugc

SEQ ID NO: 97405 - RNA, 24 nt, Artificial Sequence
  Synthetic
cacagccugcagacauuuuaaugc

SEQ ID NO: 97406 - RNA, 18 nt, Artificial Sequence
  Synthetic
uuauaacuaucuacaugc

SEQ ID NO: 97407 - RNA, 19 nt, Artificial Sequence
  Synthetic
uuuauaacuaucuacaugc

SEQ ID NO: 97408 - RNA, 20 nt, Artificial Sequence
  Synthetic
cuuuauaacuaucuacaugc

SEQ ID NO: 97409 - RNA, 21 nt, Artificial Sequence
  Synthetic
acuuuauaacuaucuacaugc

SEQ ID NO: 97410 - RNA, 22 nt, Artificial Sequence
  Synthetic
uacuuuauaacuaucuacaugc

SEQ ID NO: 97411 - RNA, 24 nt, Artificial Sequence
  Synthetic
uguacuuuauaacuaucuacaugc

SEQ ID NO: 97412 - RNA, 18 nt, Artificial Sequence
  Synthetic
uugggaucuugaccaugc

SEQ ID NO: 97413 - RNA, 19 nt, Artificial Sequence
  Synthetic
uuugggaucuugaccaugc

SEQ ID NO: 97414 - RNA, 20 nt, Artificial Sequence
  Synthetic
auuugggaucuugaccaugc

SEQ ID NO: 97415 - RNA, 22 nt, Artificial Sequence
  Synthetic
ugauuugggaucuugaccaugc

SEQ ID NO: 97416 - RNA, 23 nt, Artificial Sequence
  Synthetic
uugauuugggaucuugaccaugc

SEQ ID NO: 97417 - RNA, 24 nt, Artificial Sequence
  Synthetic
uuugauuugggaucuugaccaugc

SEQ ID NO: 97418 - RNA, 19 nt, Artificial Sequence
  Synthetic
uguaugggggaaggcaugc

SEQ ID NO: 97419 - RNA, 20 nt, Artificial Sequence
  Synthetic
uuguaugggggaaggcaugc

SEQ ID NO: 97420 - RNA, 21 nt, Artificial Sequence
  Synthetic
uuuguaugggggaaggcaugc

SEQ ID NO: 97421 - RNA, 23 nt, Artificial Sequence
  Synthetic
cguuuguaugggggaaggcaugc

SEQ ID NO: 97422 - RNA, 18 nt, Artificial Sequence
  Synthetic
cuugauguuuucucaugc

SEQ ID NO: 97423 - RNA, 19 nt, Artificial Sequence
  Synthetic
ccuugauguuuucucaugc

SEQ ID NO: 97424 - RNA, 20 nt, Artificial Sequence
  Synthetic
cccuugauguuuucucaugc

SEQ ID NO: 97425 - RNA, 21 nt, Artificial Sequence
  Synthetic
ucccuugauguuuucucaugc

SEQ ID NO: 97426 - RNA, 22 nt, Artificial Sequence
  Synthetic
uucccuugauguuuucucaugc

SEQ ID NO: 97427 - RNA, 23 nt, Artificial Sequence
  Synthetic
uuucccuugauguuuucucaugc

SEQ ID NO: 97428 - RNA, 24 nt, Artificial Sequence
  Synthetic
uuuucccuugauguuuucucaugc

SEQ ID NO: 97429 - RNA, 21 nt, Artificial Sequence
  Synthetic
agucuggaagaaagaagaugc

SEQ ID NO: 97430 - RNA, 22 nt, Artificial Sequence
  Synthetic
aagucuggaagaaagaagaugc

SEQ ID NO: 97431 - RNA, 23 nt, Artificial Sequence
  Synthetic
caagucuggaagaaagaagaugc

SEQ ID NO: 97432 - RNA, 24 nt, Artificial Sequence
  Synthetic
acaagucuggaagaaagaagaugc

SEQ ID NO: 97433 - RNA, 18 nt, Artificial Sequence
  Synthetic
cauuguuuaauuggaugc

SEQ ID NO: 97434 - RNA, 19 nt, Artificial Sequence
  Synthetic
acauuguuuaauuggaugc

SEQ ID NO: 97435 - RNA, 20 nt, Artificial Sequence
  Synthetic
uacauuguuuaauuggaugc

SEQ ID NO: 97436 - RNA, 22 nt, Artificial Sequence
  Synthetic
aguacauuguuuaauuggaugc

SEQ ID NO: 97437 - RNA, 23 nt, Artificial Sequence
  Synthetic
caguacauuguuuaauuggaugc

SEQ ID NO: 97438 - RNA, 24 nt, Artificial Sequence
  Synthetic
acaguacauuguuuaauuggaugc

SEQ ID NO: 97439 - RNA, 19 nt, Artificial Sequence
  Synthetic
uguauuuaagacaugaugc

SEQ ID NO: 97440 - RNA, 20 nt, Artificial Sequence
  Synthetic
cuguauuuaagacaugaugc

SEQ ID NO: 97441 - RNA, 18 nt, Artificial Sequence
  Synthetic
augucucauucaauaugc

SEQ ID NO: 97442 - RNA, 19 nt, Artificial Sequence
  Synthetic
caugucucauucaauaugc

SEQ ID NO: 97443 - RNA, 20 nt, Artificial Sequence
  Synthetic
acaugucucauucaauaugc

SEQ ID NO: 97444 - RNA, 21 nt, Artificial Sequence
  Synthetic
uacaugucucauucaauaugc

SEQ ID NO: 97445 - RNA, 22 nt, Artificial Sequence
  Synthetic
uuacaugucucauucaauaugc

SEQ ID NO: 97446 - RNA, 23 nt, Artificial Sequence
  Synthetic
cuuacaugucucauucaauaugc

SEQ ID NO: 97447 - RNA, 24 nt, Artificial Sequence
  Synthetic
ucuuacaugucucauucaauaugc

SEQ ID NO: 97448 - RNA, 22 nt, Artificial Sequence
  Synthetic
uggggcuuucacuauaauaugc

SEQ ID NO: 97449 - RNA, 23 nt, Artificial Sequence
  Synthetic
uuggggcuuucacuauaauaugc

SEQ ID NO: 97450 - RNA, 24 nt, Artificial Sequence
  Synthetic
auuggggcuuucacuauaauaugc

SEQ ID NO: 97451 - RNA, 18 nt, Artificial Sequence
  Synthetic
acuuaucaaaggauaugc

SEQ ID NO: 97452 - RNA, 20 nt, Artificial Sequence
  Synthetic
ugacuuaucaaaggauaugc

SEQ ID NO: 97453 - RNA, 21 nt, Artificial Sequence
  Synthetic
augacuuaucaaaggauaugc

SEQ ID NO: 97454 - RNA, 22 nt, Artificial Sequence
  Synthetic
uaugacuuaucaaaggauaugc

SEQ ID NO: 97455 - RNA, 23 nt, Artificial Sequence
  Synthetic
uuaugacuuaucaaaggauaugc

SEQ ID NO: 97456 - RNA, 24 nt, Artificial Sequence
  Synthetic
uuuaugacuuaucaaaggauaugc

SEQ ID NO: 97457 - RNA, 19 nt, Artificial Sequence
  Synthetic
aggaaggaacuuuauaugc

SEQ ID NO: 97458 - RNA, 20 nt, Artificial Sequence
  Synthetic
caggaaggaacuuuauaugc

SEQ ID NO: 97459 - RNA, 21 nt, Artificial Sequence
  Synthetic
ucaggaaggaacuuuauaugc

SEQ ID NO: 97460 - RNA, 23 nt, Artificial Sequence
  Synthetic
agucaggaaggaacuuuauaugc

SEQ ID NO: 97461 - RNA, 18 nt, Artificial Sequence
  Synthetic
aaccaacucugaaacugc

SEQ ID NO: 97462 - RNA, 19 nt, Artificial Sequence
  Synthetic
caaccaacucugaaacugc

SEQ ID NO: 97463 - RNA, 20 nt, Artificial Sequence
  Synthetic
acaaccaacucugaaacugc

SEQ ID NO: 97464 - RNA, 21 nt, Artificial Sequence
  Synthetic
aacaaccaacucugaaacugc

SEQ ID NO: 97465 - RNA, 23 nt, Artificial Sequence
  Synthetic
agaacaaccaacucugaaacugc

SEQ ID NO: 97466 - RNA, 24 nt, Artificial Sequence
  Synthetic
cagaacaaccaacucugaaacugc

SEQ ID NO: 97467 - RNA, 18 nt, Artificial Sequence
  Synthetic
uugcaaagcauaaacugc

SEQ ID NO: 97468 - RNA, 19 nt, Artificial Sequence
  Synthetic
uuugcaaagcauaaacugc

SEQ ID NO: 97469 - RNA, 18 nt, Artificial Sequence
  Synthetic
uucaguuuccucaacugc

SEQ ID NO: 97470 - RNA, 19 nt, Artificial Sequence
  Synthetic
auucaguuuccucaacugc

SEQ ID NO: 97471 - RNA, 20 nt, Artificial Sequence
  Synthetic
uauucaguuuccucaacugc

SEQ ID NO: 97472 - RNA, 21 nt, Artificial Sequence
  Synthetic
uuauucaguuuccucaacugc

SEQ ID NO: 97473 - RNA, 22 nt, Artificial Sequence
  Synthetic
cuuauucaguuuccucaacugc

SEQ ID NO: 97474 - RNA, 23 nt, Artificial Sequence
  Synthetic
ucuuauucaguuuccucaacugc

SEQ ID NO: 97475 - RNA, 24 nt, Artificial Sequence
  Synthetic
cucuuauucaguuuccucaacugc

SEQ ID NO: 97476 - RNA, 18 nt, Artificial Sequence
  Synthetic
uuuuuaugaagacccugc

SEQ ID NO: 97477 - RNA, 19 nt, Artificial Sequence
  Synthetic
auuuuuaugaagacccugc

SEQ ID NO: 97478 - RNA, 20 nt, Artificial Sequence
  Synthetic
cauuuuuaugaagacccugc

SEQ ID NO: 97479 - RNA, 22 nt, Artificial Sequence
  Synthetic
agcauuuuuaugaagacccugc

SEQ ID NO: 97480 - RNA, 23 nt, Artificial Sequence
  Synthetic
aagcauuuuuaugaagacccugc

SEQ ID NO: 97481 - RNA, 24 nt, Artificial Sequence
  Synthetic
caagcauuuuuaugaagacccugc

SEQ ID NO: 97482 - RNA, 18 nt, Artificial Sequence
  Synthetic
aaagucugacaucccugc

SEQ ID NO: 97483 - RNA, 19 nt, Artificial Sequence
  Synthetic
uaaagucugacaucccugc

SEQ ID NO: 97484 - RNA, 20 nt, Artificial Sequence
  Synthetic
auaaagucugacaucccugc

SEQ ID NO: 97485 - RNA, 21 nt, Artificial Sequence
  Synthetic
cauaaagucugacaucccugc

SEQ ID NO: 97486 - RNA, 23 nt, Artificial Sequence
  Synthetic
ugcauaaagucugacaucccugc

SEQ ID NO: 97487 - RNA, 24 nt, Artificial Sequence
  Synthetic
uugcauaaagucugacaucccugc

SEQ ID NO: 97488 - RNA, 18 nt, Artificial Sequence
  Synthetic
ccuaacuguugucccugc

SEQ ID NO: 97489 - RNA, 19 nt, Artificial Sequence
  Synthetic
uccuaacuguugucccugc

SEQ ID NO: 97490 - RNA, 21 nt, Artificial Sequence
  Synthetic
uguccuaacuguugucccugc

SEQ ID NO: 97491 - RNA, 22 nt, Artificial Sequence
  Synthetic
auguccuaacuguugucccugc

SEQ ID NO: 97492 - RNA, 23 nt, Artificial Sequence
  Synthetic
aauguccuaacuguugucccugc

SEQ ID NO: 97493 - RNA, 24 nt, Artificial Sequence
  Synthetic
uaauguccuaacuguugucccugc

SEQ ID NO: 97494 - RNA, 19 nt, Artificial Sequence
  Synthetic
uguuccagugugauccugc

SEQ ID NO: 97495 - RNA, 21 nt, Artificial Sequence
  Synthetic
uguguuccagugugauccugc

SEQ ID NO: 97496 - RNA, 22 nt, Artificial Sequence
  Synthetic
uuguguuccagugugauccugc

SEQ ID NO: 97497 - RNA, 23 nt, Artificial Sequence
  Synthetic
cuuguguuccagugugauccugc

SEQ ID NO: 97498 - RNA, 24 nt, Artificial Sequence
  Synthetic
acuuguguuccagugugauccugc

SEQ ID NO: 97499 - RNA, 21 nt, Artificial Sequence
  Synthetic
agugugaagagaaagagcugc

SEQ ID NO: 97500 - RNA, 22 nt, Artificial Sequence
  Synthetic
uagugugaagagaaagagcugc

SEQ ID NO: 97501 - RNA, 23 nt, Artificial Sequence
  Synthetic
cuagugugaagagaaagagcugc

SEQ ID NO: 97502 - RNA, 19 nt, Artificial Sequence
  Synthetic
aguaaugauacagagcugc

SEQ ID NO: 97503 - RNA, 20 nt, Artificial Sequence
  Synthetic
aaguaaugauacagagcugc

SEQ ID NO: 97504 - RNA, 21 nt, Artificial Sequence
  Synthetic
caaguaaugauacagagcugc

SEQ ID NO: 97505 - RNA, 22 nt, Artificial Sequence
  Synthetic
acaaguaaugauacagagcugc

SEQ ID NO: 97506 - RNA, 23 nt, Artificial Sequence
  Synthetic
uacaaguaaugauacagagcugc

SEQ ID NO: 97507 - RNA, 24 nt, Artificial Sequence
  Synthetic
uuacaaguaaugauacagagcugc

SEQ ID NO: 97508 - RNA, 18 nt, Artificial Sequence
  Synthetic
uuguaugcuguaggcugc

SEQ ID NO: 97509 - RNA, 19 nt, Artificial Sequence
  Synthetic
auuguaugcuguaggcugc

SEQ ID NO: 97510 - RNA, 20 nt, Artificial Sequence
  Synthetic
aauuguaugcuguaggcugc

SEQ ID NO: 97511 - RNA, 21 nt, Artificial Sequence
  Synthetic
uaauuguaugcuguaggcugc

SEQ ID NO: 97512 - RNA, 22 nt, Artificial Sequence
  Synthetic
cuaauuguaugcuguaggcugc

SEQ ID NO: 97513 - RNA, 23 nt, Artificial Sequence
  Synthetic
acuaauuguaugcuguaggcugc

SEQ ID NO: 97514 - RNA, 24 nt, Artificial Sequence
  Synthetic
cacuaauuguaugcuguaggcugc

SEQ ID NO: 97515 - RNA, 18 nt, Artificial Sequence
  Synthetic
cuguuuucuaaaaucugc

SEQ ID NO: 97516 - RNA, 19 nt, Artificial Sequence
  Synthetic
ucuguuuucuaaaaucugc

SEQ ID NO: 97517 - RNA, 20 nt, Artificial Sequence
  Synthetic
cucuguuuucuaaaaucugc

SEQ ID NO: 97518 - RNA, 21 nt, Artificial Sequence
  Synthetic
ucucuguuuucuaaaaucugc

SEQ ID NO: 97519 - RNA, 22 nt, Artificial Sequence
  Synthetic
cucucuguuuucuaaaaucugc

SEQ ID NO: 97520 - RNA, 23 nt, Artificial Sequence
  Synthetic
ccucucuguuuucuaaaaucugc

SEQ ID NO: 97521 - RNA, 18 nt, Artificial Sequence
  Synthetic
ucuuucuaaauaaucugc

SEQ ID NO: 97522 - RNA, 19 nt, Artificial Sequence
  Synthetic
uucuuucuaaauaaucugc

SEQ ID NO: 97523 - RNA, 20 nt, Artificial Sequence
  Synthetic
uuucuuucuaaauaaucugc

SEQ ID NO: 97524 - RNA, 21 nt, Artificial Sequence
  Synthetic
uuuucuuucuaaauaaucugc

SEQ ID NO: 97525 - RNA, 22 nt, Artificial Sequence
  Synthetic
auuuucuuucuaaauaaucugc

SEQ ID NO: 97526 - RNA, 23 nt, Artificial Sequence
  Synthetic
uauuuucuuucuaaauaaucugc

SEQ ID NO: 97527 - RNA, 24 nt, Artificial Sequence
  Synthetic
cuauuuucuuucuaaauaaucugc

SEQ ID NO: 97528 - RNA, 18 nt, Artificial Sequence
  Synthetic
aagaaauuugcuaucugc

SEQ ID NO: 97529 - RNA, 19 nt, Artificial Sequence
  Synthetic
uaagaaauuugcuaucugc

SEQ ID NO: 97530 - RNA, 20 nt, Artificial Sequence
  Synthetic
uuaagaaauuugcuaucugc

SEQ ID NO: 97531 - RNA, 21 nt, Artificial Sequence
  Synthetic
uuuaagaaauuugcuaucugc

SEQ ID NO: 97532 - RNA, 22 nt, Artificial Sequence
  Synthetic
uuuuaagaaauuugcuaucugc

SEQ ID NO: 97533 - RNA, 24 nt, Artificial Sequence
  Synthetic
uguuuuaagaaauuugcuaucugc

SEQ ID NO: 97534 - RNA, 21 nt, Artificial Sequence
  Synthetic
cauuuugaaucauguaucugc

SEQ ID NO: 97535 - RNA, 22 nt, Artificial Sequence
  Synthetic
acauuuugaaucauguaucugc

SEQ ID NO: 97536 - RNA, 23 nt, Artificial Sequence
  Synthetic
uacauuuugaaucauguaucugc

SEQ ID NO: 97537 - RNA, 24 nt, Artificial Sequence
  Synthetic
auacauuuugaaucauguaucugc

SEQ ID NO: 97538 - RNA, 21 nt, Artificial Sequence
  Synthetic
agcacagucuguucccucugc

SEQ ID NO: 97539 - RNA, 22 nt, Artificial Sequence
  Synthetic
aagcacagucuguucccucugc

SEQ ID NO: 97540 - RNA, 23 nt, Artificial Sequence
  Synthetic
aaagcacagucuguucccucugc

SEQ ID NO: 97541 - RNA, 24 nt, Artificial Sequence
  Synthetic
aaaagcacagucuguucccucugc

SEQ ID NO: 97542 - RNA, 18 nt, Artificial Sequence
  Synthetic
aauguuguaaaucucugc

SEQ ID NO: 97543 - RNA, 19 nt, Artificial Sequence
  Synthetic
aaauguuguaaaucucugc

SEQ ID NO: 97544 - RNA, 21 nt, Artificial Sequence
  Synthetic
ugaaauguuguaaaucucugc

SEQ ID NO: 97545 - RNA, 22 nt, Artificial Sequence
  Synthetic
uugaaauguuguaaaucucugc

SEQ ID NO: 97546 - RNA, 24 nt, Artificial Sequence
  Synthetic
uguugaaauguuguaaaucucugc

SEQ ID NO: 97547 - RNA, 18 nt, Artificial Sequence
  Synthetic
ucaaaauuauuucucugc

SEQ ID NO: 97548 - RNA, 19 nt, Artificial Sequence
  Synthetic
uucaaaauuauuucucugc

SEQ ID NO: 97549 - RNA, 20 nt, Artificial Sequence
  Synthetic
uuucaaaauuauuucucugc

SEQ ID NO: 97550 - RNA, 21 nt, Artificial Sequence
  Synthetic
auuucaaaauuauuucucugc

SEQ ID NO: 97551 - RNA, 22 nt, Artificial Sequence
  Synthetic
aauuucaaaauuauuucucugc

SEQ ID NO: 97552 - RNA, 23 nt, Artificial Sequence
  Synthetic
aaauuucaaaauuauuucucugc

SEQ ID NO: 97553 - RNA, 24 nt, Artificial Sequence
  Synthetic
caaauuucaaaauuauuucucugc

SEQ ID NO: 97554 - RNA, 18 nt, Artificial Sequence
  Synthetic
ccacucacucacgucugc

SEQ ID NO: 97555 - RNA, 19 nt, Artificial Sequence
  Synthetic
accacucacucacgucugc

SEQ ID NO: 97556 - RNA, 20 nt, Artificial Sequence
  Synthetic
aaccacucacucacgucugc

SEQ ID NO: 97557 - RNA, 21 nt, Artificial Sequence
  Synthetic
aaaccacucacucacgucugc

SEQ ID NO: 97558 - RNA, 22 nt, Artificial Sequence
  Synthetic
caaaccacucacucacgucugc

SEQ ID NO: 97559 - RNA, 24 nt, Artificial Sequence
  Synthetic
agcaaaccacucacucacgucugc

SEQ ID NO: 97560 - RNA, 18 nt, Artificial Sequence
  Synthetic
aauaguuuuauauucugc

SEQ ID NO: 97561 - RNA, 19 nt, Artificial Sequence
  Synthetic
aaauaguuuuauauucugc

SEQ ID NO: 97562 - RNA, 20 nt, Artificial Sequence
  Synthetic
aaaauaguuuuauauucugc

SEQ ID NO: 97563 - RNA, 21 nt, Artificial Sequence
  Synthetic
caaaauaguuuuauauucugc

SEQ ID NO: 97564 - RNA, 22 nt, Artificial Sequence
  Synthetic
ccaaaauaguuuuauauucugc

SEQ ID NO: 97565 - RNA, 24 nt, Artificial Sequence
  Synthetic
ugccaaaauaguuuuauauucugc

SEQ ID NO: 97566 - RNA, 18 nt, Artificial Sequence
  Synthetic
uaguauguuguauucugc

SEQ ID NO: 97567 - RNA, 19 nt, Artificial Sequence
  Synthetic
cuaguauguuguauucugc

SEQ ID NO: 97568 - RNA, 20 nt, Artificial Sequence
  Synthetic
ccuaguauguuguauucugc

SEQ ID NO: 97569 - RNA, 23 nt, Artificial Sequence
  Synthetic
uggccuaguauguuguauucugc

SEQ ID NO: 97570 - RNA, 24 nt, Artificial Sequence
  Synthetic
auggccuaguauguuguauucugc

SEQ ID NO: 97571 - RNA, 18 nt, Artificial Sequence
  Synthetic
ugugauuaacacuucugc

SEQ ID NO: 97572 - RNA, 19 nt, Artificial Sequence
  Synthetic
augugauuaacacuucugc

SEQ ID NO: 97573 - RNA, 20 nt, Artificial Sequence
  Synthetic
aaugugauuaacacuucugc

SEQ ID NO: 97574 - RNA, 21 nt, Artificial Sequence
  Synthetic
caaugugauuaacacuucugc

SEQ ID NO: 97575 - RNA, 22 nt, Artificial Sequence
  Synthetic
acaaugugauuaacacuucugc

SEQ ID NO: 97576 - RNA, 24 nt, Artificial Sequence
  Synthetic
agacaaugugauuaacacuucugc

SEQ ID NO: 97577 - RNA, 18 nt, Artificial Sequence
  Synthetic
aguuuacuugcuuucugc

SEQ ID NO: 97578 - RNA, 19 nt, Artificial Sequence
  Synthetic
aaguuuacuugcuuucugc

SEQ ID NO: 97579 - RNA, 20 nt, Artificial Sequence
  Synthetic
aaaguuuacuugcuuucugc

SEQ ID NO: 97580 - RNA, 22 nt, Artificial Sequence
  Synthetic
ugaaaguuuacuugcuuucugc

SEQ ID NO: 97581 - RNA, 24 nt, Artificial Sequence
  Synthetic
ugugaaaguuuacuugcuuucugc

SEQ ID NO: 97582 - RNA, 18 nt, Artificial Sequence
  Synthetic
aaauaacuucaaaagugc

SEQ ID NO: 97583 - RNA, 19 nt, Artificial Sequence
  Synthetic
aaaauaacuucaaaagugc

SEQ ID NO: 97584 - RNA, 20 nt, Artificial Sequence
  Synthetic
aaaaauaacuucaaaagugc

SEQ ID NO: 97585 - RNA, 21 nt, Artificial Sequence
  Synthetic
uaaaaauaacuucaaaagugc

SEQ ID NO: 97586 - RNA, 22 nt, Artificial Sequence
  Synthetic
auaaaaauaacuucaaaagugc

SEQ ID NO: 97587 - RNA, 23 nt, Artificial Sequence
  Synthetic
aauaaaaauaacuucaaaagugc

SEQ ID NO: 97588 - RNA, 24 nt, Artificial Sequence
  Synthetic
uaauaaaaauaacuucaaaagugc

SEQ ID NO: 97589 - RNA, 18 nt, Artificial Sequence
  Synthetic
ccucucauacagaagugc

SEQ ID NO: 97590 - RNA, 20 nt, Artificial Sequence
  Synthetic
agccucucauacagaagugc

SEQ ID NO: 97591 - RNA, 21 nt, Artificial Sequence
  Synthetic
cagccucucauacagaagugc

SEQ ID NO: 97592 - RNA, 22 nt, Artificial Sequence
  Synthetic
ucagccucucauacagaagugc

SEQ ID NO: 97593 - RNA, 23 nt, Artificial Sequence
  Synthetic
cucagccucucauacagaagugc

SEQ ID NO: 97594 - RNA, 24 nt, Artificial Sequence
  Synthetic
ccucagccucucauacagaagugc

SEQ ID NO: 97595 - RNA, 18 nt, Artificial Sequence
  Synthetic
uggucauauugccagugc

SEQ ID NO: 97596 - RNA, 20 nt, Artificial Sequence
  Synthetic
aguggucauauugccagugc

SEQ ID NO: 97597 - RNA, 22 nt, Artificial Sequence
  Synthetic
agaguggucauauugccagugc

SEQ ID NO: 97598 - RNA, 23 nt, Artificial Sequence
  Synthetic
uagaguggucauauugccagugc

SEQ ID NO: 97599 - RNA, 18 nt, Artificial Sequence
  Synthetic
uuguuuugcuaagagugc

SEQ ID NO: 97600 - RNA, 19 nt, Artificial Sequence
  Synthetic
uuuguuuugcuaagagugc

SEQ ID NO: 97601 - RNA, 20 nt, Artificial Sequence
  Synthetic
auuuguuuugcuaagagugc

SEQ ID NO: 97602 - RNA, 23 nt, Artificial Sequence
  Synthetic
aggauuuguuuugcuaagagugc

SEQ ID NO: 97603 - RNA, 18 nt, Artificial Sequence
  Synthetic
ugauaagaaagagagugc

SEQ ID NO: 97604 - RNA, 19 nt, Artificial Sequence
  Synthetic
augauaagaaagagagugc

SEQ ID NO: 97605 - RNA, 21 nt, Artificial Sequence
  Synthetic
ugaugauaagaaagagagugc

SEQ ID NO: 97606 - RNA, 22 nt, Artificial Sequence
  Synthetic
uugaugauaagaaagagagugc

SEQ ID NO: 97607 - RNA, 23 nt, Artificial Sequence
  Synthetic
cuugaugauaagaaagagagugc

SEQ ID NO: 97608 - RNA, 24 nt, Artificial Sequence
  Synthetic
ucuugaugauaagaaagagagugc

SEQ ID NO: 97609 - RNA, 18 nt, Artificial Sequence
  Synthetic
ccagcugaccacgagugc

SEQ ID NO: 97610 - RNA, 19 nt, Artificial Sequence
  Synthetic
accagcugaccacgagugc

SEQ ID NO: 97611 - RNA, 20 nt, Artificial Sequence
  Synthetic
uaccagcugaccacgagugc

SEQ ID NO: 97612 - RNA, 21 nt, Artificial Sequence
  Synthetic
cuaccagcugaccacgagugc

SEQ ID NO: 97613 - RNA, 22 nt, Artificial Sequence
  Synthetic
acuaccagcugaccacgagugc

SEQ ID NO: 97614 - RNA, 23 nt, Artificial Sequence
  Synthetic
aacuaccagcugaccacgagugc

SEQ ID NO: 97615 - RNA, 24 nt, Artificial Sequence
  Synthetic
caacuaccagcugaccacgagugc

SEQ ID NO: 97616 - RNA, 19 nt, Artificial Sequence
  Synthetic
ugaaggcuuacacaggugc

SEQ ID NO: 97617 - RNA, 20 nt, Artificial Sequence
  Synthetic
cugaaggcuuacacaggugc

SEQ ID NO: 97618 - RNA, 21 nt, Artificial Sequence
  Synthetic
acugaaggcuuacacaggugc

SEQ ID NO: 97619 - RNA, 22 nt, Artificial Sequence
  Synthetic
cacugaaggcuuacacaggugc

SEQ ID NO: 97620 - RNA, 23 nt, Artificial Sequence
  Synthetic
acacugaaggcuuacacaggugc

SEQ ID NO: 97621 - RNA, 18 nt, Artificial Sequence
  Synthetic
accauaccugguuggugc

SEQ ID NO: 97622 - RNA, 19 nt, Artificial Sequence
  Synthetic
uaccauaccugguuggugc

SEQ ID NO: 97623 - RNA, 20 nt, Artificial Sequence
  Synthetic
cuaccauaccugguuggugc

SEQ ID NO: 97624 - RNA, 21 nt, Artificial Sequence
  Synthetic
ucuaccauaccugguuggugc

SEQ ID NO: 97625 - RNA, 23 nt, Artificial Sequence
  Synthetic
ugucuaccauaccugguuggugc

SEQ ID NO: 97626 - RNA, 24 nt, Artificial Sequence
  Synthetic
augucuaccauaccugguuggugc

SEQ ID NO: 97627 - RNA, 18 nt, Artificial Sequence
  Synthetic
uccucuauuugaaugugc

SEQ ID NO: 97628 - RNA, 19 nt, Artificial Sequence
  Synthetic
uuccucuauuugaaugugc

SEQ ID NO: 97629 - RNA, 20 nt, Artificial Sequence
  Synthetic
uuuccucuauuugaaugugc

SEQ ID NO: 97630 - RNA, 21 nt, Artificial Sequence
  Synthetic
uuuuccucuauuugaaugugc

SEQ ID NO: 97631 - RNA, 24 nt, Artificial Sequence
  Synthetic
agguuuuccucuauuugaaugugc

SEQ ID NO: 97632 - RNA, 18 nt, Artificial Sequence
  Synthetic
cagagccuuuagaugugc

SEQ ID NO: 97633 - RNA, 20 nt, Artificial Sequence
  Synthetic
cgcagagccuuuagaugugc

SEQ ID NO: 97634 - RNA, 21 nt, Artificial Sequence
  Synthetic
acgcagagccuuuagaugugc

SEQ ID NO: 97635 - RNA, 22 nt, Artificial Sequence
  Synthetic
aacgcagagccuuuagaugugc

SEQ ID NO: 97636 - RNA, 23 nt, Artificial Sequence
  Synthetic
aaacgcagagccuuuagaugugc

SEQ ID NO: 97637 - RNA, 24 nt, Artificial Sequence
  Synthetic
aaaacgcagagccuuuagaugugc

SEQ ID NO: 97638 - RNA, 18 nt, Artificial Sequence
  Synthetic
uuuuuaaacugagugugc

SEQ ID NO: 97639 - RNA, 19 nt, Artificial Sequence
  Synthetic
cuuuuuaaacugagugugc

SEQ ID NO: 97640 - RNA, 20 nt, Artificial Sequence
  Synthetic
ucuuuuuaaacugagugugc

SEQ ID NO: 97641 - RNA, 18 nt, Artificial Sequence
  Synthetic
cagucagaacuagugugc

SEQ ID NO: 97642 - RNA, 19 nt, Artificial Sequence
  Synthetic
acagucagaacuagugugc

SEQ ID NO: 97643 - RNA, 20 nt, Artificial Sequence
  Synthetic
cacagucagaacuagugugc

SEQ ID NO: 97644 - RNA, 22 nt, Artificial Sequence
  Synthetic
ugcacagucagaacuagugugc

SEQ ID NO: 97645 - RNA, 18 nt, Artificial Sequence
  Synthetic
cacaugcaguaauugugc

SEQ ID NO: 97646 - RNA, 19 nt, Artificial Sequence
  Synthetic
ucacaugcaguaauugugc

SEQ ID NO: 97647 - RNA, 20 nt, Artificial Sequence
  Synthetic
cucacaugcaguaauugugc

SEQ ID NO: 97648 - RNA, 21 nt, Artificial Sequence
  Synthetic
ucucacaugcaguaauugugc

SEQ ID NO: 97649 - RNA, 22 nt, Artificial Sequence
  Synthetic
uucucacaugcaguaauugugc

SEQ ID NO: 97650 - RNA, 23 nt, Artificial Sequence
  Synthetic
auucucacaugcaguaauugugc

SEQ ID NO: 97651 - RNA, 18 nt, Artificial Sequence
  Synthetic
ccacagcaaaaguugugc

SEQ ID NO: 97652 - RNA, 19 nt, Artificial Sequence
  Synthetic
uccacagcaaaaguugugc

SEQ ID NO: 97653 - RNA, 22 nt, Artificial Sequence
  Synthetic
ugguccacagcaaaaguugugc

SEQ ID NO: 97654 - RNA, 23 nt, Artificial Sequence
  Synthetic
augguccacagcaaaaguugugc

SEQ ID NO: 97655 - RNA, 24 nt, Artificial Sequence
  Synthetic
caugguccacagcaaaaguugugc

SEQ ID NO: 97656 - RNA, 18 nt, Artificial Sequence
  Synthetic
ccuuauugguauuugugc

SEQ ID NO: 97657 - RNA, 20 nt, Artificial Sequence
  Synthetic
agccuuauugguauuugugc

SEQ ID NO: 97658 - RNA, 21 nt, Artificial Sequence
  Synthetic
uagccuuauugguauuugugc

SEQ ID NO: 97659 - RNA, 22 nt, Artificial Sequence
  Synthetic
auagccuuauugguauuugugc

SEQ ID NO: 97660 - RNA, 23 nt, Artificial Sequence
  Synthetic
aauagccuuauugguauuugugc

SEQ ID NO: 97661 - RNA, 24 nt, Artificial Sequence
  Synthetic
caauagccuuauugguauuugugc

SEQ ID NO: 97662 - RNA, 18 nt, Artificial Sequence
  Synthetic
auaugugguuacaauugc

SEQ ID NO: 97663 - RNA, 20 nt, Artificial Sequence
  Synthetic
agauaugugguuacaauugc

SEQ ID NO: 97664 - RNA, 21 nt, Artificial Sequence
  Synthetic
uagauaugugguuacaauugc

SEQ ID NO: 97665 - RNA, 22 nt, Artificial Sequence
  Synthetic
auagauaugugguuacaauugc

SEQ ID NO: 97666 - RNA, 24 nt, Artificial Sequence
  Synthetic
agauagauaugugguuacaauugc

SEQ ID NO: 97667 - RNA, 18 nt, Artificial Sequence
  Synthetic
aaaagcugucaacauugc

SEQ ID NO: 97668 - RNA, 19 nt, Artificial Sequence
  Synthetic
caaaagcugucaacauugc

SEQ ID NO: 97669 - RNA, 21 nt, Artificial Sequence
  Synthetic
agcaaaagcugucaacauugc

SEQ ID NO: 97670 - RNA, 22 nt, Artificial Sequence
  Synthetic
aagcaaaagcugucaacauugc

SEQ ID NO: 97671 - RNA, 24 nt, Artificial Sequence
  Synthetic
agaagcaaaagcugucaacauugc

SEQ ID NO: 97672 - RNA, 18 nt, Artificial Sequence
  Synthetic
auguacaucauagauugc

SEQ ID NO: 97673 - RNA, 20 nt, Artificial Sequence
  Synthetic
agauguacaucauagauugc

SEQ ID NO: 97674 - RNA, 23 nt, Artificial Sequence
  Synthetic
uggagauguacaucauagauugc

SEQ ID NO: 97675 - RNA, 24 nt, Artificial Sequence
  Synthetic
auggagauguacaucauagauugc

SEQ ID NO: 97676 - RNA, 18 nt, Artificial Sequence
  Synthetic
acuacggguauauauugc

SEQ ID NO: 97677 - RNA, 19 nt, Artificial Sequence
  Synthetic
cacuacggguauauauugc

SEQ ID NO: 97678 - RNA, 20 nt, Artificial Sequence
  Synthetic
ccacuacggguauauauugc

SEQ ID NO: 97679 - RNA, 21 nt, Artificial Sequence
  Synthetic
uccacuacggguauauauugc

SEQ ID NO: 97680 - RNA, 22 nt, Artificial Sequence
  Synthetic
uuccacuacggguauauauugc

SEQ ID NO: 97681 - RNA, 23 nt, Artificial Sequence
  Synthetic
uuuccacuacggguauauauugc

SEQ ID NO: 97682 - RNA, 24 nt, Artificial Sequence
  Synthetic
uuuuccacuacggguauauauugc

SEQ ID NO: 97683 - RNA, 18 nt, Artificial Sequence
  Synthetic
agagguguucuuuauugc

SEQ ID NO: 97684 - RNA, 19 nt, Artificial Sequence
  Synthetic
cagagguguucuuuauugc

SEQ ID NO: 97685 - RNA, 21 nt, Artificial Sequence
  Synthetic
agcagagguguucuuuauugc

SEQ ID NO: 97686 - RNA, 22 nt, Artificial Sequence
  Synthetic
aagcagagguguucuuuauugc

SEQ ID NO: 97687 - RNA, 18 nt, Artificial Sequence
  Synthetic
cucccagguaacccuugc

SEQ ID NO: 97688 - RNA, 19 nt, Artificial Sequence
  Synthetic
acucccagguaacccuugc

SEQ ID NO: 97689 - RNA, 20 nt, Artificial Sequence
  Synthetic
aacucccagguaacccuugc

SEQ ID NO: 97690 - RNA, 22 nt, Artificial Sequence
  Synthetic
agaacucccagguaacccuugc

SEQ ID NO: 97691 - RNA, 23 nt, Artificial Sequence
  Synthetic
aagaacucccagguaacccuugc

SEQ ID NO: 97692 - RNA, 24 nt, Artificial Sequence
  Synthetic
aaagaacucccagguaacccuugc

SEQ ID NO: 97693 - RNA, 19 nt, Artificial Sequence
  Synthetic
ugcccaaagaggcccuugc

SEQ ID NO: 97694 - RNA, 20 nt, Artificial Sequence
  Synthetic
uugcccaaagaggcccuugc

SEQ ID NO: 97695 - RNA, 21 nt, Artificial Sequence
  Synthetic
uuugcccaaagaggcccuugc

SEQ ID NO: 97696 - RNA, 22 nt, Artificial Sequence
  Synthetic
cuuugcccaaagaggcccuugc

SEQ ID NO: 97697 - RNA, 23 nt, Artificial Sequence
  Synthetic
ucuuugcccaaagaggcccuugc

SEQ ID NO: 97698 - RNA, 24 nt, Artificial Sequence
  Synthetic
uucuuugcccaaagaggcccuugc

SEQ ID NO: 97699 - RNA, 18 nt, Artificial Sequence
  Synthetic
aagugcaguggcccuugc

SEQ ID NO: 97700 - RNA, 22 nt, Artificial Sequence
  Synthetic
agggaagugcaguggcccuugc

SEQ ID NO: 97701 - RNA, 23 nt, Artificial Sequence
  Synthetic
uagggaagugcaguggcccuugc

SEQ ID NO: 97702 - RNA, 24 nt, Artificial Sequence
  Synthetic
auagggaagugcaguggcccuugc

SEQ ID NO: 97703 - RNA, 18 nt, Artificial Sequence
  Synthetic
agacauuugacuaguugc

SEQ ID NO: 97704 - RNA, 19 nt, Artificial Sequence
  Synthetic
aagacauuugacuaguugc

SEQ ID NO: 97705 - RNA, 20 nt, Artificial Sequence
  Synthetic
aaagacauuugacuaguugc

SEQ ID NO: 97706 - RNA, 21 nt, Artificial Sequence
  Synthetic
aaaagacauuugacuaguugc

SEQ ID NO: 97707 - RNA, 22 nt, Artificial Sequence
  Synthetic
aaaaagacauuugacuaguugc

SEQ ID NO: 97708 - RNA, 24 nt, Artificial Sequence
  Synthetic
agaaaaagacauuugacuaguugc

SEQ ID NO: 97709 - RNA, 19 nt, Artificial Sequence
  Synthetic
cgaguugaugucugguugc

SEQ ID NO: 97710 - RNA, 20 nt, Artificial Sequence
  Synthetic
acgaguugaugucugguugc

SEQ ID NO: 97711 - RNA, 21 nt, Artificial Sequence
  Synthetic
uacgaguugaugucugguugc

SEQ ID NO: 97712 - RNA, 22 nt, Artificial Sequence
  Synthetic
cuacgaguugaugucugguugc

SEQ ID NO: 97713 - RNA, 23 nt, Artificial Sequence
  Synthetic
ccuacgaguugaugucugguugc

SEQ ID NO: 97714 - RNA, 19 nt, Artificial Sequence
  Synthetic
agauagaucagcauguugc

SEQ ID NO: 97715 - RNA, 20 nt, Artificial Sequence
  Synthetic
aagauagaucagcauguugc

SEQ ID NO: 97716 - RNA, 22 nt, Artificial Sequence
  Synthetic
ugaagauagaucagcauguugc

SEQ ID NO: 97717 - RNA, 23 nt, Artificial Sequence
  Synthetic
augaagauagaucagcauguugc

SEQ ID NO: 97718 - RNA, 24 nt, Artificial Sequence
  Synthetic
caugaagauagaucagcauguugc

SEQ ID NO: 97719 - RNA, 18 nt, Artificial Sequence
  Synthetic
caaaacggucaaauuugc

SEQ ID NO: 97720 - RNA, 19 nt, Artificial Sequence
  Synthetic
acaaaacggucaaauuugc

SEQ ID NO: 97721 - RNA, 20 nt, Artificial Sequence
  Synthetic
aacaaaacggucaaauuugc

SEQ ID NO: 97722 - RNA, 21 nt, Artificial Sequence
  Synthetic
caacaaaacggucaaauuugc

SEQ ID NO: 97723 - RNA, 22 nt, Artificial Sequence
  Synthetic
acaacaaaacggucaaauuugc

SEQ ID NO: 97724 - RNA, 24 nt, Artificial Sequence
  Synthetic
cgacaacaaaacggucaaauuugc

SEQ ID NO: 97725 - RNA, 18 nt, Artificial Sequence
  Synthetic
acaguuuaaguaauuugc

SEQ ID NO: 97726 - RNA, 19 nt, Artificial Sequence
  Synthetic
cacaguuuaaguaauuugc

SEQ ID NO: 97727 - RNA, 20 nt, Artificial Sequence
  Synthetic
acacaguuuaaguaauuugc

SEQ ID NO: 97728 - RNA, 21 nt, Artificial Sequence
  Synthetic
cacacaguuuaaguaauuugc

SEQ ID NO: 97729 - RNA, 24 nt, Artificial Sequence
  Synthetic
uggcacacaguuuaaguaauuugc

SEQ ID NO: 97730 - RNA, 19 nt, Artificial Sequence
  Synthetic
aguuaccucacugauuugc

SEQ ID NO: 97731 - RNA, 20 nt, Artificial Sequence
  Synthetic
aaguuaccucacugauuugc

SEQ ID NO: 97732 - RNA, 21 nt, Artificial Sequence
  Synthetic
aaaguuaccucacugauuugc

SEQ ID NO: 97733 - RNA, 22 nt, Artificial Sequence
  Synthetic
aaaaguuaccucacugauuugc

SEQ ID NO: 97734 - RNA, 23 nt, Artificial Sequence
  Synthetic
uaaaaguuaccucacugauuugc

SEQ ID NO: 97735 - RNA, 21 nt, Artificial Sequence
  Synthetic
cauuuuauauaacuucuuugc

SEQ ID NO: 97736 - RNA, 22 nt, Artificial Sequence
  Synthetic
acauuuuauauaacuucuuugc

SEQ ID NO: 97737 - RNA, 24 nt, Artificial Sequence
  Synthetic
ugacauuuuauauaacuucuuugc

SEQ ID NO: 97738 - RNA, 18 nt, Artificial Sequence
  Synthetic
aggugaacugcauuuugc

SEQ ID NO: 97739 - RNA, 19 nt, Artificial Sequence
  Synthetic
caggugaacugcauuuugc

SEQ ID NO: 97740 - RNA, 20 nt, Artificial Sequence
  Synthetic
acaggugaacugcauuuugc

SEQ ID NO: 97741 - RNA, 21 nt, Artificial Sequence
  Synthetic
uacaggugaacugcauuuugc

SEQ ID NO: 97742 - RNA, 22 nt, Artificial Sequence
  Synthetic
auacaggugaacugcauuuugc

SEQ ID NO: 97743 - RNA, 23 nt, Artificial Sequence
  Synthetic
uauacaggugaacugcauuuugc

SEQ ID NO: 97744 - RNA, 24 nt, Artificial Sequence
  Synthetic
cuauacaggugaacugcauuuugc

SEQ ID NO: 97745 - RNA, 18 nt, Artificial Sequence
  Synthetic
ugucagagugcauuuugc

SEQ ID NO: 97746 - RNA, 19 nt, Artificial Sequence
  Synthetic
uugucagagugcauuuugc

SEQ ID NO: 97747 - RNA, 20 nt, Artificial Sequence
  Synthetic
cuugucagagugcauuuugc

SEQ ID NO: 97748 - RNA, 21 nt, Artificial Sequence
  Synthetic
acuugucagagugcauuuugc

SEQ ID NO: 97749 - RNA, 23 nt, Artificial Sequence
  Synthetic
ugacuugucagagugcauuuugc

SEQ ID NO: 97750 - RNA, 24 nt, Artificial Sequence
  Synthetic
uugacuugucagagugcauuuugc

SEQ ID NO: 97751 - RNA, 18 nt, Artificial Sequence
  Synthetic
ugucuuauauauuuuugc

SEQ ID NO: 97752 - RNA, 19 nt, Artificial Sequence
  Synthetic
augucuuauauauuuuugc

SEQ ID NO: 97753 - RNA, 20 nt, Artificial Sequence
  Synthetic
caugucuuauauauuuuugc

SEQ ID NO: 97754 - RNA, 21 nt, Artificial Sequence
  Synthetic
ucaugucuuauauauuuuugc

SEQ ID NO: 97755 - RNA, 22 nt, Artificial Sequence
  Synthetic
cucaugucuuauauauuuuugc

SEQ ID NO: 97756 - RNA, 23 nt, Artificial Sequence
  Synthetic
acucaugucuuauauauuuuugc

SEQ ID NO: 97757 - RNA, 24 nt, Artificial Sequence
  Synthetic
cacucaugucuuauauauuuuugc

SEQ ID NO: 97758 - RNA, 21 nt, Artificial Sequence
  Synthetic
uuuuauuuauaagaaaaaauc

SEQ ID NO: 97759 - RNA, 22 nt, Artificial Sequence
  Synthetic
auuuuauuuauaagaaaaaauc

SEQ ID NO: 97760 - RNA, 23 nt, Artificial Sequence
  Synthetic
aauuuuauuuauaagaaaaaauc

SEQ ID NO: 97761 - RNA, 24 nt, Artificial Sequence
  Synthetic
aaauuuuauuuauaagaaaaaauc

SEQ ID NO: 97762 - RNA, 18 nt, Artificial Sequence
  Synthetic
accaucuaacuaaaaauc

SEQ ID NO: 97763 - RNA, 19 nt, Artificial Sequence
  Synthetic
aaccaucuaacuaaaaauc

SEQ ID NO: 97764 - RNA, 20 nt, Artificial Sequence
  Synthetic
caaccaucuaacuaaaaauc

SEQ ID NO: 97765 - RNA, 21 nt, Artificial Sequence
  Synthetic
ccaaccaucuaacuaaaaauc

SEQ ID NO: 97766 - RNA, 22 nt, Artificial Sequence
  Synthetic
uccaaccaucuaacuaaaaauc

SEQ ID NO: 97767 - RNA, 23 nt, Artificial Sequence
  Synthetic
auccaaccaucuaacuaaaaauc

SEQ ID NO: 97768 - RNA, 24 nt, Artificial Sequence
  Synthetic
uauccaaccaucuaacuaaaaauc

SEQ ID NO: 97769 - RNA, 19 nt, Artificial Sequence
  Synthetic
aguuaagagauuaaaaauc

SEQ ID NO: 97770 - RNA, 20 nt, Artificial Sequence
  Synthetic
caguuaagagauuaaaaauc

SEQ ID NO: 97771 - RNA, 22 nt, Artificial Sequence
  Synthetic
cgcaguuaagagauuaaaaauc

SEQ ID NO: 97772 - RNA, 18 nt, Artificial Sequence
  Synthetic
aguuuguaguacaaaauc

SEQ ID NO: 97773 - RNA, 19 nt, Artificial Sequence
  Synthetic
uaguuuguaguacaaaauc

SEQ ID NO: 97774 - RNA, 20 nt, Artificial Sequence
  Synthetic
uuaguuuguaguacaaaauc

SEQ ID NO: 97775 - RNA, 21 nt, Artificial Sequence
  Synthetic
uuuaguuuguaguacaaaauc

SEQ ID NO: 97776 - RNA, 22 nt, Artificial Sequence
  Synthetic
auuuaguuuguaguacaaaauc

SEQ ID NO: 97777 - RNA, 24 nt, Artificial Sequence
  Synthetic
agauuuaguuuguaguacaaaauc

SEQ ID NO: 97778 - RNA, 18 nt, Artificial Sequence
  Synthetic
caacaacacagcaaaauc

SEQ ID NO: 97779 - RNA, 19 nt, Artificial Sequence
  Synthetic
acaacaacacagcaaaauc

SEQ ID NO: 97780 - RNA, 20 nt, Artificial Sequence
  Synthetic
cacaacaacacagcaaaauc

SEQ ID NO: 97781 - RNA, 21 nt, Artificial Sequence
  Synthetic
acacaacaacacagcaaaauc

SEQ ID NO: 97782 - RNA, 22 nt, Artificial Sequence
  Synthetic
aacacaacaacacagcaaaauc

SEQ ID NO: 97783 - RNA, 24 nt, Artificial Sequence
  Synthetic
agaacacaacaacacagcaaaauc

SEQ ID NO: 97784 - RNA, 21 nt, Artificial Sequence
  Synthetic
acauguaauucuaauaaaauc

SEQ ID NO: 97785 - RNA, 22 nt, Artificial Sequence
  Synthetic
cacauguaauucuaauaaaauc

SEQ ID NO: 97786 - RNA, 24 nt, Artificial Sequence
  Synthetic
cgcacauguaauucuaauaaaauc

SEQ ID NO: 97787 - RNA, 19 nt, Artificial Sequence
  Synthetic
aguugugggguauaaaauc

SEQ ID NO: 97788 - RNA, 21 nt, Artificial Sequence
  Synthetic
agaguugugggguauaaaauc

SEQ ID NO: 97789 - RNA, 18 nt, Artificial Sequence
  Synthetic
uugguuucuauuaaaauc

SEQ ID NO: 97790 - RNA, 19 nt, Artificial Sequence
  Synthetic
uuugguuucuauuaaaauc

SEQ ID NO: 97791 - RNA, 21 nt, Artificial Sequence
  Synthetic
uguuugguuucuauuaaaauc

SEQ ID NO: 97792 - RNA, 22 nt, Artificial Sequence
  Synthetic
uuguuugguuucuauuaaaauc

SEQ ID NO: 97793 - RNA, 23 nt, Artificial Sequence
  Synthetic
auuguuugguuucuauuaaaauc

SEQ ID NO: 97794 - RNA, 19 nt, Artificial Sequence
  Synthetic
ugucuggguaaaacaaauc

SEQ ID NO: 97795 - RNA, 20 nt, Artificial Sequence
  Synthetic
cugucuggguaaaacaaauc

SEQ ID NO: 97796 - RNA, 21 nt, Artificial Sequence
  Synthetic
ucugucuggguaaaacaaauc

SEQ ID NO: 97797 - RNA, 22 nt, Artificial Sequence
  Synthetic
aucugucuggguaaaacaaauc

SEQ ID NO: 97798 - RNA, 23 nt, Artificial Sequence
  Synthetic
uaucugucuggguaaaacaaauc

SEQ ID NO: 97799 - RNA, 24 nt, Artificial Sequence
  Synthetic
auaucugucuggguaaaacaaauc

SEQ ID NO: 97800 - RNA, 18 nt, Artificial Sequence
  Synthetic
cacucucacuaccaaauc

SEQ ID NO: 97801 - RNA, 19 nt, Artificial Sequence
  Synthetic
ucacucucacuaccaaauc

SEQ ID NO: 97802 - RNA, 20 nt, Artificial Sequence
  Synthetic
aucacucucacuaccaaauc

SEQ ID NO: 97803 - RNA, 21 nt, Artificial Sequence
  Synthetic
caucacucucacuaccaaauc

SEQ ID NO: 97804 - RNA, 22 nt, Artificial Sequence
  Synthetic
acaucacucucacuaccaaauc

SEQ ID NO: 97805 - RNA, 23 nt, Artificial Sequence
  Synthetic
uacaucacucucacuaccaaauc

SEQ ID NO: 97806 - RNA, 24 nt, Artificial Sequence
  Synthetic
auacaucacucucacuaccaaauc

SEQ ID NO: 97807 - RNA, 18 nt, Artificial Sequence
  Synthetic
uugggagagacagaaauc

SEQ ID NO: 97808 - RNA, 19 nt, Artificial Sequence
  Synthetic
uuugggagagacagaaauc

SEQ ID NO: 97809 - RNA, 20 nt, Artificial Sequence
  Synthetic
uuuugggagagacagaaauc

SEQ ID NO: 97810 - RNA, 21 nt, Artificial Sequence
  Synthetic
auuuugggagagacagaaauc

SEQ ID NO: 97811 - RNA, 22 nt, Artificial Sequence
  Synthetic
uauuuugggagagacagaaauc

SEQ ID NO: 97812 - RNA, 24 nt, Artificial Sequence
  Synthetic
uguauuuugggagagacagaaauc

SEQ ID NO: 97813 - RNA, 18 nt, Artificial Sequence
  Synthetic
uccucuaauccagaaauc

SEQ ID NO: 97814 - RNA, 19 nt, Artificial Sequence
  Synthetic
uuccucuaauccagaaauc

SEQ ID NO: 97815 - RNA, 20 nt, Artificial Sequence
  Synthetic
uuuccucuaauccagaaauc

SEQ ID NO: 97816 - RNA, 21 nt, Artificial Sequence
  Synthetic
cuuuccucuaauccagaaauc

SEQ ID NO: 97817 - RNA, 23 nt, Artificial Sequence
  Synthetic
agcuuuccucuaauccagaaauc

SEQ ID NO: 97818 - RNA, 24 nt, Artificial Sequence
  Synthetic
uagcuuuccucuaauccagaaauc

SEQ ID NO: 97819 - RNA, 18 nt, Artificial Sequence
  Synthetic
cuacuagaucaugaaauc

SEQ ID NO: 97820 - RNA, 19 nt, Artificial Sequence
  Synthetic
ucuacuagaucaugaaauc

SEQ ID NO: 97821 - RNA, 22 nt, Artificial Sequence
  Synthetic
aggucuacuagaucaugaaauc

SEQ ID NO: 97822 - RNA, 23 nt, Artificial Sequence
  Synthetic
uaggucuacuagaucaugaaauc

SEQ ID NO: 97823 - RNA, 24 nt, Artificial Sequence
  Synthetic
auaggucuacuagaucaugaaauc

SEQ ID NO: 97824 - RNA, 18 nt, Artificial Sequence
  Synthetic
ugauaagcaguauaaauc

SEQ ID NO: 97825 - RNA, 19 nt, Artificial Sequence
  Synthetic
uugauaagcaguauaaauc

SEQ ID NO: 97826 - RNA, 20 nt, Artificial Sequence
  Synthetic
uuugauaagcaguauaaauc

SEQ ID NO: 97827 - RNA, 21 nt, Artificial Sequence
  Synthetic
auuugauaagcaguauaaauc

SEQ ID NO: 97828 - RNA, 22 nt, Artificial Sequence
  Synthetic
uauuugauaagcaguauaaauc

SEQ ID NO: 97829 - RNA, 23 nt, Artificial Sequence
  Synthetic
auauuugauaagcaguauaaauc

SEQ ID NO: 97830 - RNA, 24 nt, Artificial Sequence
  Synthetic
aauauuugauaagcaguauaaauc

SEQ ID NO: 97831 - RNA, 18 nt, Artificial Sequence
  Synthetic
aauggguaauucuaaauc

SEQ ID NO: 97832 - RNA, 19 nt, Artificial Sequence
  Synthetic
aaauggguaauucuaaauc

SEQ ID NO: 97833 - RNA, 20 nt, Artificial Sequence
  Synthetic
aaaauggguaauucuaaauc

SEQ ID NO: 97834 - RNA, 21 nt, Artificial Sequence
  Synthetic
aaaaauggguaauucuaaauc

SEQ ID NO: 97835 - RNA, 22 nt, Artificial Sequence
  Synthetic
aaaaaauggguaauucuaaauc

SEQ ID NO: 97836 - RNA, 23 nt, Artificial Sequence
  Synthetic
aaaaaaauggguaauucuaaauc

SEQ ID NO: 97837 - RNA, 18 nt, Artificial Sequence
  Synthetic
ucuggggcuucuuaaauc

SEQ ID NO: 97838 - RNA, 19 nt, Artificial Sequence
  Synthetic
uucuggggcuucuuaaauc

SEQ ID NO: 97839 - RNA, 20 nt, Artificial Sequence
  Synthetic
uuucuggggcuucuuaaauc

SEQ ID NO: 97840 - RNA, 21 nt, Artificial Sequence
  Synthetic
uuuucuggggcuucuuaaauc

SEQ ID NO: 97841 - RNA, 22 nt, Artificial Sequence
  Synthetic
cuuuucuggggcuucuuaaauc

SEQ ID NO: 97842 - RNA, 23 nt, Artificial Sequence
  Synthetic
acuuuucuggggcuucuuaaauc

SEQ ID NO: 97843 - RNA, 22 nt, Artificial Sequence
  Synthetic
agaggaaaaggaagaaacaauc

SEQ ID NO: 97844 - RNA, 18 nt, Artificial Sequence
  Synthetic
ccuacacccugcccaauc

SEQ ID NO: 97845 - RNA, 19 nt, Artificial Sequence
  Synthetic
cccuacacccugcccaauc

SEQ ID NO: 97846 - RNA, 20 nt, Artificial Sequence
  Synthetic
ucccuacacccugcccaauc

SEQ ID NO: 97847 - RNA, 21 nt, Artificial Sequence
  Synthetic
uucccuacacccugcccaauc

SEQ ID NO: 97848 - RNA, 22 nt, Artificial Sequence
  Synthetic
uuucccuacacccugcccaauc

SEQ ID NO: 97849 - RNA, 23 nt, Artificial Sequence
  Synthetic
auuucccuacacccugcccaauc

SEQ ID NO: 97850 - RNA, 18 nt, Artificial Sequence
  Synthetic
agaguucgagauccaauc

SEQ ID NO: 97851 - RNA, 19 nt, Artificial Sequence
  Synthetic
aagaguucgagauccaauc

SEQ ID NO: 97852 - RNA, 20 nt, Artificial Sequence
  Synthetic
caagaguucgagauccaauc

SEQ ID NO: 97853 - RNA, 21 nt, Artificial Sequence
  Synthetic
ccaagaguucgagauccaauc

SEQ ID NO: 97854 - RNA, 22 nt, Artificial Sequence
  Synthetic
uccaagaguucgagauccaauc

SEQ ID NO: 97855 - RNA, 24 nt, Artificial Sequence
  Synthetic
aguccaagaguucgagauccaauc

SEQ ID NO: 97856 - RNA, 19 nt, Artificial Sequence
  Synthetic
uggaaaagggcaagcaauc

SEQ ID NO: 97857 - RNA, 20 nt, Artificial Sequence
  Synthetic
uuggaaaagggcaagcaauc

SEQ ID NO: 97858 - RNA, 21 nt, Artificial Sequence
  Synthetic
cuuggaaaagggcaagcaauc

SEQ ID NO: 97859 - RNA, 22 nt, Artificial Sequence
  Synthetic
ucuuggaaaagggcaagcaauc

SEQ ID NO: 97860 - RNA, 18 nt, Artificial Sequence
  Synthetic
auucaccuuuaagcaauc

SEQ ID NO: 97861 - RNA, 19 nt, Artificial Sequence
  Synthetic
uauucaccuuuaagcaauc

SEQ ID NO: 97862 - RNA, 20 nt, Artificial Sequence
  Synthetic
auauucaccuuuaagcaauc

SEQ ID NO: 97863 - RNA, 22 nt, Artificial Sequence
  Synthetic
agauauucaccuuuaagcaauc

SEQ ID NO: 97864 - RNA, 23 nt, Artificial Sequence
  Synthetic
aagauauucaccuuuaagcaauc

SEQ ID NO: 97865 - RNA, 18 nt, Artificial Sequence
  Synthetic
cuucccuaauuagcaauc

SEQ ID NO: 97866 - RNA, 19 nt, Artificial Sequence
  Synthetic
ccuucccuaauuagcaauc

SEQ ID NO: 97867 - RNA, 20 nt, Artificial Sequence
  Synthetic
uccuucccuaauuagcaauc

SEQ ID NO: 97868 - RNA, 21 nt, Artificial Sequence
  Synthetic
auccuucccuaauuagcaauc

SEQ ID NO: 97869 - RNA, 22 nt, Artificial Sequence
  Synthetic
cauccuucccuaauuagcaauc

SEQ ID NO: 97870 - RNA, 19 nt, Artificial Sequence
  Synthetic
cgaaguguacaauucaauc

SEQ ID NO: 97871 - RNA, 20 nt, Artificial Sequence
  Synthetic
ucgaaguguacaauucaauc

SEQ ID NO: 97872 - RNA, 21 nt, Artificial Sequence
  Synthetic
aucgaaguguacaauucaauc

SEQ ID NO: 97873 - RNA, 22 nt, Artificial Sequence
  Synthetic
aaucgaaguguacaauucaauc

SEQ ID NO: 97874 - RNA, 23 nt, Artificial Sequence
  Synthetic
aaaucgaaguguacaauucaauc

SEQ ID NO: 97875 - RNA, 24 nt, Artificial Sequence
  Synthetic
caaaucgaaguguacaauucaauc

SEQ ID NO: 97876 - RNA, 18 nt, Artificial Sequence
  Synthetic
ucauuuguauauucaauc

SEQ ID NO: 97877 - RNA, 19 nt, Artificial Sequence
  Synthetic
aucauuuguauauucaauc

SEQ ID NO: 97878 - RNA, 20 nt, Artificial Sequence
  Synthetic
uaucauuuguauauucaauc

SEQ ID NO: 97879 - RNA, 21 nt, Artificial Sequence
  Synthetic
cuaucauuuguauauucaauc

SEQ ID NO: 97880 - RNA, 22 nt, Artificial Sequence
  Synthetic
ucuaucauuuguauauucaauc

SEQ ID NO: 97881 - RNA, 23 nt, Artificial Sequence
  Synthetic
uucuaucauuuguauauucaauc

SEQ ID NO: 97882 - RNA, 24 nt, Artificial Sequence
  Synthetic
cuucuaucauuuguauauucaauc

SEQ ID NO: 97883 - RNA, 18 nt, Artificial Sequence
  Synthetic
ucccucguaaguucaauc

SEQ ID NO: 97884 - RNA, 19 nt, Artificial Sequence
  Synthetic
aucccucguaaguucaauc

SEQ ID NO: 97885 - RNA, 20 nt, Artificial Sequence
  Synthetic
caucccucguaaguucaauc

SEQ ID NO: 97886 - RNA, 21 nt, Artificial Sequence
  Synthetic
acaucccucguaaguucaauc

SEQ ID NO: 97887 - RNA, 22 nt, Artificial Sequence
  Synthetic
cacaucccucguaaguucaauc

SEQ ID NO: 97888 - RNA, 23 nt, Artificial Sequence
  Synthetic
ccacaucccucguaaguucaauc

SEQ ID NO: 97889 - RNA, 24 nt, Artificial Sequence
  Synthetic
uccacaucccucguaaguucaauc

SEQ ID NO: 97890 - RNA, 20 nt, Artificial Sequence
  Synthetic
aggauuccugaauuucaauc

SEQ ID NO: 97891 - RNA, 23 nt, Artificial Sequence
  Synthetic
uggaggauuccugaauuucaauc

SEQ ID NO: 97892 - RNA, 24 nt, Artificial Sequence
  Synthetic
cuggaggauuccugaauuucaauc

SEQ ID NO: 97893 - RNA, 18 nt, Artificial Sequence
  Synthetic
ucaccauucaaaagaauc

SEQ ID NO: 97894 - RNA, 19 nt, Artificial Sequence
  Synthetic
uucaccauucaaaagaauc

SEQ ID NO: 97895 - RNA, 21 nt, Artificial Sequence
  Synthetic
uguucaccauucaaaagaauc

SEQ ID NO: 97896 - RNA, 24 nt, Artificial Sequence
  Synthetic
cgguguucaccauucaaaagaauc

SEQ ID NO: 97897 - RNA, 18 nt, Artificial Sequence
  Synthetic
caagccccaagcagaauc

SEQ ID NO: 97898 - RNA, 19 nt, Artificial Sequence
  Synthetic
ccaagccccaagcagaauc

SEQ ID NO: 97899 - RNA, 20 nt, Artificial Sequence
  Synthetic
accaagccccaagcagaauc

SEQ ID NO: 97900 - RNA, 18 nt, Artificial Sequence
  Synthetic
cagaacucuacuagaauc

SEQ ID NO: 97901 - RNA, 19 nt, Artificial Sequence
  Synthetic
ccagaacucuacuagaauc

SEQ ID NO: 97902 - RNA, 20 nt, Artificial Sequence
  Synthetic
uccagaacucuacuagaauc

SEQ ID NO: 97903 - RNA, 21 nt, Artificial Sequence
  Synthetic
auccagaacucuacuagaauc

SEQ ID NO: 97904 - RNA, 22 nt, Artificial Sequence
  Synthetic
aauccagaacucuacuagaauc

SEQ ID NO: 97905 - RNA, 23 nt, Artificial Sequence
  Synthetic
uaauccagaacucuacuagaauc

SEQ ID NO: 97906 - RNA, 24 nt, Artificial Sequence
  Synthetic
auaauccagaacucuacuagaauc

SEQ ID NO: 97907 - RNA, 21 nt, Artificial Sequence
  Synthetic
uuaaaacaguuuccaggaauc

SEQ ID NO: 97908 - RNA, 22 nt, Artificial Sequence
  Synthetic
uuuaaaacaguuuccaggaauc

SEQ ID NO: 97909 - RNA, 23 nt, Artificial Sequence
  Synthetic
cuuuaaaacaguuuccaggaauc

SEQ ID NO: 97910 - RNA, 24 nt, Artificial Sequence
  Synthetic
acuuuaaaacaguuuccaggaauc

SEQ ID NO: 97911 - RNA, 18 nt, Artificial Sequence
  Synthetic
augauuaauagaggaauc

SEQ ID NO: 97912 - RNA, 19 nt, Artificial Sequence
  Synthetic
aaugauuaauagaggaauc

SEQ ID NO: 97913 - RNA, 20 nt, Artificial Sequence
  Synthetic
uaaugauuaauagaggaauc

SEQ ID NO: 97914 - RNA, 21 nt, Artificial Sequence
  Synthetic
auaaugauuaauagaggaauc

SEQ ID NO: 97915 - RNA, 22 nt, Artificial Sequence
  Synthetic
aauaaugauuaauagaggaauc

SEQ ID NO: 97916 - RNA, 24 nt, Artificial Sequence
  Synthetic
ugaauaaugauuaauagaggaauc

SEQ ID NO: 97917 - RNA, 18 nt, Artificial Sequence
  Synthetic
acagaauguccaugaauc

SEQ ID NO: 97918 - RNA, 19 nt, Artificial Sequence
  Synthetic
cacagaauguccaugaauc

SEQ ID NO: 97919 - RNA, 21 nt, Artificial Sequence
  Synthetic
agcacagaauguccaugaauc

SEQ ID NO: 97920 - RNA, 22 nt, Artificial Sequence
  Synthetic
uagcacagaauguccaugaauc

SEQ ID NO: 97921 - RNA, 23 nt, Artificial Sequence
  Synthetic
auagcacagaauguccaugaauc

SEQ ID NO: 97922 - RNA, 18 nt, Artificial Sequence
  Synthetic
agcuguaaaagaugaauc

SEQ ID NO: 97923 - RNA, 19 nt, Artificial Sequence
  Synthetic
cagcuguaaaagaugaauc

SEQ ID NO: 97924 - RNA, 23 nt, Artificial Sequence
  Synthetic
agggcagcuguaaaagaugaauc

SEQ ID NO: 97925 - RNA, 24 nt, Artificial Sequence
  Synthetic
cagggcagcuguaaaagaugaauc

SEQ ID NO: 97926 - RNA, 18 nt, Artificial Sequence
  Synthetic
ugguacagcuacugaauc

SEQ ID NO: 97927 - RNA, 19 nt, Artificial Sequence
  Synthetic
cugguacagcuacugaauc

SEQ ID NO: 97928 - RNA, 20 nt, Artificial Sequence
  Synthetic
ccugguacagcuacugaauc

SEQ ID NO: 97929 - RNA, 21 nt, Artificial Sequence
  Synthetic
uccugguacagcuacugaauc

SEQ ID NO: 97930 - RNA, 23 nt, Artificial Sequence
  Synthetic
aguccugguacagcuacugaauc

SEQ ID NO: 97931 - RNA, 18 nt, Artificial Sequence
  Synthetic
cauuuagaaauuugaauc

SEQ ID NO: 97932 - RNA, 19 nt, Artificial Sequence
  Synthetic
acauuuagaaauuugaauc

SEQ ID NO: 97933 - RNA, 20 nt, Artificial Sequence
  Synthetic
uacauuuagaaauuugaauc

SEQ ID NO: 97934 - RNA, 21 nt, Artificial Sequence
  Synthetic
uuacauuuagaaauuugaauc

SEQ ID NO: 97935 - RNA, 22 nt, Artificial Sequence
  Synthetic
auuacauuuagaaauuugaauc

SEQ ID NO: 97936 - RNA, 23 nt, Artificial Sequence
  Synthetic
aauuacauuuagaaauuugaauc

SEQ ID NO: 97937 - RNA, 24 nt, Artificial Sequence
  Synthetic
caauuacauuuagaaauuugaauc

SEQ ID NO: 97938 - RNA, 18 nt, Artificial Sequence
  Synthetic
aaguucaguuuuugaauc

SEQ ID NO: 97939 - RNA, 24 nt, Artificial Sequence
  Synthetic
ugggggaaguucaguuuuugaauc

SEQ ID NO: 97940 - RNA, 18 nt, Artificial Sequence
  Synthetic
aauuccuguaaaauaauc

SEQ ID NO: 97941 - RNA, 19 nt, Artificial Sequence
  Synthetic
uaauuccuguaaaauaauc

SEQ ID NO: 97942 - RNA, 20 nt, Artificial Sequence
  Synthetic
uuaauuccuguaaaauaauc

SEQ ID NO: 97943 - RNA, 21 nt, Artificial Sequence
  Synthetic
aacuuuuuaaaaaagauaauc

SEQ ID NO: 97944 - RNA, 22 nt, Artificial Sequence
  Synthetic
uaacuuuuuaaaaaagauaauc

SEQ ID NO: 97945 - RNA, 23 nt, Artificial Sequence
  Synthetic
uuaacuuuuuaaaaaagauaauc

SEQ ID NO: 97946 - RNA, 24 nt, Artificial Sequence
  Synthetic
uuuaacuuuuuaaaaaagauaauc

SEQ ID NO: 97947 - RNA, 18 nt, Artificial Sequence
  Synthetic
cacugucccagucuaauc

SEQ ID NO: 97948 - RNA, 19 nt, Artificial Sequence
  Synthetic
acacugucccagucuaauc

SEQ ID NO: 97949 - RNA, 21 nt, Artificial Sequence
  Synthetic
agacacugucccagucuaauc

SEQ ID NO: 97950 - RNA, 22 nt, Artificial Sequence
  Synthetic
cagacacugucccagucuaauc

SEQ ID NO: 97951 - RNA, 23 nt, Artificial Sequence
  Synthetic
acagacacugucccagucuaauc

SEQ ID NO: 97952 - RNA, 18 nt, Artificial Sequence
  Synthetic
acuuguauguuucuaauc

SEQ ID NO: 97953 - RNA, 19 nt, Artificial Sequence
  Synthetic
aacuuguauguuucuaauc

SEQ ID NO: 97954 - RNA, 20 nt, Artificial Sequence
  Synthetic
uaacuuguauguuucuaauc

SEQ ID NO: 97955 - RNA, 21 nt, Artificial Sequence
  Synthetic
cuaacuuguauguuucuaauc

SEQ ID NO: 97956 - RNA, 22 nt, Artificial Sequence
  Synthetic
ucuaacuuguauguuucuaauc

SEQ ID NO: 97957 - RNA, 24 nt, Artificial Sequence
  Synthetic
agucuaacuuguauguuucuaauc

SEQ ID NO: 97958 - RNA, 18 nt, Artificial Sequence
  Synthetic
uaaacauacaugguaauc

SEQ ID NO: 97959 - RNA, 19 nt, Artificial Sequence
  Synthetic
uuaaacauacaugguaauc

SEQ ID NO: 97960 - RNA, 20 nt, Artificial Sequence
  Synthetic
uuuaaacauacaugguaauc

SEQ ID NO: 97961 - RNA, 22 nt, Artificial Sequence
  Synthetic
aguuuaaacauacaugguaauc

SEQ ID NO: 97962 - RNA, 23 nt, Artificial Sequence
  Synthetic
caguuuaaacauacaugguaauc

SEQ ID NO: 97963 - RNA, 24 nt, Artificial Sequence
  Synthetic
ucaguuuaaacauacaugguaauc

SEQ ID NO: 97964 - RNA, 18 nt, Artificial Sequence
  Synthetic
uucuucucaaaauuaauc

SEQ ID NO: 97965 - RNA, 19 nt, Artificial Sequence
  Synthetic
auucuucucaaaauuaauc

SEQ ID NO: 97966 - RNA, 20 nt, Artificial Sequence
  Synthetic
cauucuucucaaaauuaauc

SEQ ID NO: 97967 - RNA, 23 nt, Artificial Sequence
  Synthetic
uggcauucuucucaaaauuaauc

SEQ ID NO: 97968 - RNA, 18 nt, Artificial Sequence
  Synthetic
acguuaaauauuuuaauc

SEQ ID NO: 97969 - RNA, 21 nt, Artificial Sequence
  Synthetic
uggacguuaaauauuuuaauc

SEQ ID NO: 97970 - RNA, 23 nt, Artificial Sequence
  Synthetic
uguggacguuaaauauuuuaauc

SEQ ID NO: 97971 - RNA, 24 nt, Artificial Sequence
  Synthetic
cuguggacguuaaauauuuuaauc

SEQ ID NO: 97972 - RNA, 19 nt, Artificial Sequence
  Synthetic
agaaugcaaaucaaacauc

SEQ ID NO: 97973 - RNA, 20 nt, Artificial Sequence
  Synthetic
cagaaugcaaaucaaacauc

SEQ ID NO: 97974 - RNA, 23 nt, Artificial Sequence
  Synthetic
uggcagaaugcaaaucaaacauc

SEQ ID NO: 97975 - RNA, 24 nt, Artificial Sequence
  Synthetic
uuggcagaaugcaaaucaaacauc

SEQ ID NO: 97976 - RNA, 18 nt, Artificial Sequence
  Synthetic
uugaaucacuuaaacauc

SEQ ID NO: 97977 - RNA, 19 nt, Artificial Sequence
  Synthetic
uuugaaucacuuaaacauc

SEQ ID NO: 97978 - RNA, 20 nt, Artificial Sequence
  Synthetic
cuuugaaucacuuaaacauc

SEQ ID NO: 97979 - RNA, 21 nt, Artificial Sequence
  Synthetic
ucuuugaaucacuuaaacauc

SEQ ID NO: 97980 - RNA, 22 nt, Artificial Sequence
  Synthetic
uucuuugaaucacuuaaacauc

SEQ ID NO: 97981 - RNA, 23 nt, Artificial Sequence
  Synthetic
uuucuuugaaucacuuaaacauc

SEQ ID NO: 97982 - RNA, 24 nt, Artificial Sequence
  Synthetic
uuuucuuugaaucacuuaaacauc

SEQ ID NO: 97983 - RNA, 21 nt, Artificial Sequence
  Synthetic
uugacaucugagugcaacauc

SEQ ID NO: 97984 - RNA, 22 nt, Artificial Sequence
  Synthetic
auugacaucugagugcaacauc

SEQ ID NO: 97985 - RNA, 23 nt, Artificial Sequence
  Synthetic
aauugacaucugagugcaacauc

SEQ ID NO: 97986 - RNA, 24 nt, Artificial Sequence
  Synthetic
uaauugacaucugagugcaacauc

SEQ ID NO: 97987 - RNA, 18 nt, Artificial Sequence
  Synthetic
auacuauucuagaacauc

SEQ ID NO: 97988 - RNA, 20 nt, Artificial Sequence
  Synthetic
ugauacuauucuagaacauc

SEQ ID NO: 97989 - RNA, 22 nt, Artificial Sequence
  Synthetic
ugugauacuauucuagaacauc

SEQ ID NO: 97990 - RNA, 23 nt, Artificial Sequence
  Synthetic
uugugauacuauucuagaacauc

SEQ ID NO: 97991 - RNA, 18 nt, Artificial Sequence
  Synthetic
cucuggagcuugaacauc

SEQ ID NO: 97992 - RNA, 19 nt, Artificial Sequence
  Synthetic
acucuggagcuugaacauc

SEQ ID NO: 97993 - RNA, 20 nt, Artificial Sequence
  Synthetic
aacucuggagcuugaacauc

SEQ ID NO: 97994 - RNA, 21 nt, Artificial Sequence
  Synthetic
aaacucuggagcuugaacauc

SEQ ID NO: 97995 - RNA, 23 nt, Artificial Sequence
  Synthetic
agaaacucuggagcuugaacauc

SEQ ID NO: 97996 - RNA, 24 nt, Artificial Sequence
  Synthetic
cagaaacucuggagcuugaacauc

SEQ ID NO: 97997 - RNA, 20 nt, Artificial Sequence
  Synthetic
uggacaacucugaacacauc

SEQ ID NO: 97998 - RNA, 21 nt, Artificial Sequence
  Synthetic
uuggacaacucugaacacauc

SEQ ID NO: 97999 - RNA, 23 nt, Artificial Sequence
  Synthetic
aguuggacaacucugaacacauc

SEQ ID NO: 98000 - RNA, 24 nt, Artificial Sequence
  Synthetic
aaguuggacaacucugaacacauc

SEQ ID NO: 98001 - RNA, 18 nt, Artificial Sequence
  Synthetic
acugcuaugaaccacauc

SEQ ID NO: 98002 - RNA, 19 nt, Artificial Sequence
  Synthetic
uacugcuaugaaccacauc

SEQ ID NO: 98003 - RNA, 20 nt, Artificial Sequence
  Synthetic
cuacugcuaugaaccacauc

SEQ ID NO: 98004 - RNA, 22 nt, Artificial Sequence
  Synthetic
ugcuacugcuaugaaccacauc

SEQ ID NO: 98005 - RNA, 23 nt, Artificial Sequence
  Synthetic
uugcuacugcuaugaaccacauc

SEQ ID NO: 98006 - RNA, 24 nt, Artificial Sequence
  Synthetic
uuugcuacugcuaugaaccacauc

SEQ ID NO: 98007 - RNA, 19 nt, Artificial Sequence
  Synthetic
ugcuacaguacugcacauc

SEQ ID NO: 98008 - RNA, 20 nt, Artificial Sequence
  Synthetic
augcuacaguacugcacauc

SEQ ID NO: 98009 - RNA, 21 nt, Artificial Sequence
  Synthetic
uaugcuacaguacugcacauc

SEQ ID NO: 98010 - RNA, 22 nt, Artificial Sequence
  Synthetic
auaugcuacaguacugcacauc

SEQ ID NO: 98011 - RNA, 23 nt, Artificial Sequence
  Synthetic
cauaugcuacaguacugcacauc

SEQ ID NO: 98012 - RNA, 24 nt, Artificial Sequence
  Synthetic
ccauaugcuacaguacugcacauc

SEQ ID NO: 98013 - RNA, 18 nt, Artificial Sequence
  Synthetic
agaaguaccauucacauc

SEQ ID NO: 98014 - RNA, 19 nt, Artificial Sequence
  Synthetic
aagaaguaccauucacauc

SEQ ID NO: 98015 - RNA, 20 nt, Artificial Sequence
  Synthetic
aaagaaguaccauucacauc

SEQ ID NO: 98016 - RNA, 21 nt, Artificial Sequence
  Synthetic
caaagaaguaccauucacauc

SEQ ID NO: 98017 - RNA, 22 nt, Artificial Sequence
  Synthetic
acaaagaaguaccauucacauc

SEQ ID NO: 98018 - RNA, 23 nt, Artificial Sequence
  Synthetic
aacaaagaaguaccauucacauc

SEQ ID NO: 98019 - RNA, 24 nt, Artificial Sequence
  Synthetic
aaacaaagaaguaccauucacauc

SEQ ID NO: 98020 - RNA, 18 nt, Artificial Sequence
  Synthetic
aauuuuuccuuggacauc

SEQ ID NO: 98021 - RNA, 20 nt, Artificial Sequence
  Synthetic
agaauuuuuccuuggacauc

SEQ ID NO: 98022 - RNA, 21 nt, Artificial Sequence
  Synthetic
aagaauuuuuccuuggacauc

SEQ ID NO: 98023 - RNA, 22 nt, Artificial Sequence
  Synthetic
aaagaauuuuuccuuggacauc

SEQ ID NO: 98024 - RNA, 24 nt, Artificial Sequence
  Synthetic
ugaaagaauuuuuccuuggacauc

SEQ ID NO: 98025 - RNA, 18 nt, Artificial Sequence
  Synthetic
uuaaggcuauaaaccauc

SEQ ID NO: 98026 - RNA, 19 nt, Artificial Sequence
  Synthetic
auuaaggcuauaaaccauc

SEQ ID NO: 98027 - RNA, 20 nt, Artificial Sequence
  Synthetic
aauuaaggcuauaaaccauc

SEQ ID NO: 98028 - RNA, 21 nt, Artificial Sequence
  Synthetic
uaauuaaggcuauaaaccauc

SEQ ID NO: 98029 - RNA, 23 nt, Artificial Sequence
  Synthetic
uguaauuaaggcuauaaaccauc

SEQ ID NO: 98030 - RNA, 24 nt, Artificial Sequence
  Synthetic
auguaauuaaggcuauaaaccauc

SEQ ID NO: 98031 - RNA, 18 nt, Artificial Sequence
  Synthetic
cuaaagcucagaaccauc

SEQ ID NO: 98032 - RNA, 19 nt, Artificial Sequence
  Synthetic
ucuaaagcucagaaccauc

SEQ ID NO: 98033 - RNA, 20 nt, Artificial Sequence
  Synthetic
aucuaaagcucagaaccauc

SEQ ID NO: 98034 - RNA, 21 nt, Artificial Sequence
  Synthetic
uaucuaaagcucagaaccauc

SEQ ID NO: 98035 - RNA, 22 nt, Artificial Sequence
  Synthetic
auaucuaaagcucagaaccauc

SEQ ID NO: 98036 - RNA, 23 nt, Artificial Sequence
  Synthetic
cauaucuaaagcucagaaccauc

SEQ ID NO: 98037 - RNA, 24 nt, Artificial Sequence
  Synthetic
ucauaucuaaagcucagaaccauc

SEQ ID NO: 98038 - RNA, 18 nt, Artificial Sequence
  Synthetic
cagacuucgugaaccauc

SEQ ID NO: 98039 - RNA, 19 nt, Artificial Sequence
  Synthetic
acagacuucgugaaccauc

SEQ ID NO: 98040 - RNA, 20 nt, Artificial Sequence
  Synthetic
aacagacuucgugaaccauc

SEQ ID NO: 98041 - RNA, 23 nt, Artificial Sequence
  Synthetic
aggaacagacuucgugaaccauc

SEQ ID NO: 98042 - RNA, 24 nt, Artificial Sequence
  Synthetic
caggaacagacuucgugaaccauc

SEQ ID NO: 98043 - RNA, 18 nt, Artificial Sequence
  Synthetic
uuuaaaguugcuaccauc

SEQ ID NO: 98044 - RNA, 19 nt, Artificial Sequence
  Synthetic
uuuuaaaguugcuaccauc

SEQ ID NO: 98045 - RNA, 20 nt, Artificial Sequence
  Synthetic
cuuuuaaaguugcuaccauc

SEQ ID NO: 98046 - RNA, 21 nt, Artificial Sequence
  Synthetic
acuuuuaaaguugcuaccauc

SEQ ID NO: 98047 - RNA, 23 nt, Artificial Sequence
  Synthetic
ugacuuuuaaaguugcuaccauc

SEQ ID NO: 98048 - RNA, 18 nt, Artificial Sequence
  Synthetic
cauaaggccaaagccauc

SEQ ID NO: 98049 - RNA, 19 nt, Artificial Sequence
  Synthetic
ucauaaggccaaagccauc

SEQ ID NO: 98050 - RNA, 18 nt, Artificial Sequence
  Synthetic
cucuauaggaaggccauc

SEQ ID NO: 98051 - RNA, 19 nt, Artificial Sequence
  Synthetic
ccucuauaggaaggccauc

SEQ ID NO: 98052 - RNA, 20 nt, Artificial Sequence
  Synthetic
uccucuauaggaaggccauc

SEQ ID NO: 98053 - RNA, 22 nt, Artificial Sequence
  Synthetic
uguccucuauaggaaggccauc

SEQ ID NO: 98054 - RNA, 23 nt, Artificial Sequence
  Synthetic
auguccucuauaggaaggccauc

SEQ ID NO: 98055 - RNA, 24 nt, Artificial Sequence
  Synthetic
aauguccucuauaggaaggccauc

SEQ ID NO: 98056 - RNA, 18 nt, Artificial Sequence
  Synthetic
ucacaacuguuugccauc

SEQ ID NO: 98057 - RNA, 19 nt, Artificial Sequence
  Synthetic
cucacaacuguuugccauc

SEQ ID NO: 98058 - RNA, 20 nt, Artificial Sequence
  Synthetic
ccucacaacuguuugccauc

SEQ ID NO: 98059 - RNA, 21 nt, Artificial Sequence
  Synthetic
uccucacaacuguuugccauc

SEQ ID NO: 98060 - RNA, 22 nt, Artificial Sequence
  Synthetic
cuccucacaacuguuugccauc

SEQ ID NO: 98061 - RNA, 24 nt, Artificial Sequence
  Synthetic
ugcuccucacaacuguuugccauc

SEQ ID NO: 98062 - RNA, 18 nt, Artificial Sequence
  Synthetic
uaaugcaugguaagcauc

SEQ ID NO: 98063 - RNA, 19 nt, Artificial Sequence
  Synthetic
uuaaugcaugguaagcauc

SEQ ID NO: 98064 - RNA, 20 nt, Artificial Sequence
  Synthetic
auuaaugcaugguaagcauc

SEQ ID NO: 98065 - RNA, 21 nt, Artificial Sequence
  Synthetic
aauuaaugcaugguaagcauc

SEQ ID NO: 98066 - RNA, 22 nt, Artificial Sequence
  Synthetic
aaauuaaugcaugguaagcauc

SEQ ID NO: 98067 - RNA, 24 nt, Artificial Sequence
  Synthetic
agaaauuaaugcaugguaagcauc

SEQ ID NO: 98068 - RNA, 19 nt, Artificial Sequence
  Synthetic
ugugagaugagcuagcauc

SEQ ID NO: 98069 - RNA, 22 nt, Artificial Sequence
  Synthetic
uggugugagaugagcuagcauc

SEQ ID NO: 98070 - RNA, 23 nt, Artificial Sequence
  Synthetic
uuggugugagaugagcuagcauc

SEQ ID NO: 98071 - RNA, 24 nt, Artificial Sequence
  Synthetic
cuuggugugagaugagcuagcauc

SEQ ID NO: 98072 - RNA, 19 nt, Artificial Sequence
  Synthetic
aggccucacauacaucauc

SEQ ID NO: 98073 - RNA, 20 nt, Artificial Sequence
  Synthetic
uaggccucacauacaucauc

SEQ ID NO: 98074 - RNA, 21 nt, Artificial Sequence
  Synthetic
uuaggccucacauacaucauc

SEQ ID NO: 98075 - RNA, 22 nt, Artificial Sequence
  Synthetic
auuaggccucacauacaucauc

SEQ ID NO: 98076 - RNA, 24 nt, Artificial Sequence
  Synthetic
ugauuaggccucacauacaucauc

SEQ ID NO: 98077 - RNA, 18 nt, Artificial Sequence
  Synthetic
ugcauuuccagcaucauc

SEQ ID NO: 98078 - RNA, 19 nt, Artificial Sequence
  Synthetic
augcauuuccagcaucauc

SEQ ID NO: 98079 - RNA, 20 nt, Artificial Sequence
  Synthetic
caugcauuuccagcaucauc

SEQ ID NO: 98080 - RNA, 22 nt, Artificial Sequence
  Synthetic
ugcaugcauuuccagcaucauc

SEQ ID NO: 98081 - RNA, 23 nt, Artificial Sequence
  Synthetic
augcaugcauuuccagcaucauc

SEQ ID NO: 98082 - RNA, 24 nt, Artificial Sequence
  Synthetic
caugcaugcauuuccagcaucauc

SEQ ID NO: 98083 - RNA, 18 nt, Artificial Sequence
  Synthetic
aauauuuuuaaggucauc

SEQ ID NO: 98084 - RNA, 19 nt, Artificial Sequence
  Synthetic
uaauauuuuuaaggucauc

SEQ ID NO: 98085 - RNA, 20 nt, Artificial Sequence
  Synthetic
uuaauauuuuuaaggucauc

SEQ ID NO: 98086 - RNA, 21 nt, Artificial Sequence
  Synthetic
auuaauauuuuuaaggucauc

SEQ ID NO: 98087 - RNA, 22 nt, Artificial Sequence
  Synthetic
uauuaauauuuuuaaggucauc

SEQ ID NO: 98088 - RNA, 23 nt, Artificial Sequence
  Synthetic
cuauuaauauuuuuaaggucauc

SEQ ID NO: 98089 - RNA, 24 nt, Artificial Sequence
  Synthetic
ucuauuaauauuuuuaaggucauc

SEQ ID NO: 98090 - RNA, 18 nt, Artificial Sequence
  Synthetic
uuaugaguuuuugucauc

SEQ ID NO: 98091 - RNA, 19 nt, Artificial Sequence
  Synthetic
uuuaugaguuuuugucauc

SEQ ID NO: 98092 - RNA, 21 nt, Artificial Sequence
  Synthetic
cguuuaugaguuuuugucauc

SEQ ID NO: 98093 - RNA, 22 nt, Artificial Sequence
  Synthetic
ucguuuaugaguuuuugucauc

SEQ ID NO: 98094 - RNA, 23 nt, Artificial Sequence
  Synthetic
aucguuuaugaguuuuugucauc

SEQ ID NO: 98095 - RNA, 24 nt, Artificial Sequence
  Synthetic
aaucguuuaugaguuuuugucauc

SEQ ID NO: 98096 - RNA, 18 nt, Artificial Sequence
  Synthetic
uggagaugagaauucauc

SEQ ID NO: 98097 - RNA, 19 nt, Artificial Sequence
  Synthetic
uuggagaugagaauucauc

SEQ ID NO: 98098 - RNA, 20 nt, Artificial Sequence
  Synthetic
cuuggagaugagaauucauc

SEQ ID NO: 98099 - RNA, 21 nt, Artificial Sequence
  Synthetic
ccuuggagaugagaauucauc

SEQ ID NO: 98100 - RNA, 22 nt, Artificial Sequence
  Synthetic
cccuuggagaugagaauucauc

SEQ ID NO: 98101 - RNA, 23 nt, Artificial Sequence
  Synthetic
ccccuuggagaugagaauucauc

SEQ ID NO: 98102 - RNA, 24 nt, Artificial Sequence
  Synthetic
accccuuggagaugagaauucauc

SEQ ID NO: 98103 - RNA, 18 nt, Artificial Sequence
  Synthetic
aagagcuguuuauucauc

SEQ ID NO: 98104 - RNA, 21 nt, Artificial Sequence
  Synthetic
cggaagagcuguuuauucauc

SEQ ID NO: 98105 - RNA, 22 nt, Artificial Sequence
  Synthetic
ccggaagagcuguuuauucauc

SEQ ID NO: 98106 - RNA, 23 nt, Artificial Sequence
  Synthetic
cccggaagagcuguuuauucauc

SEQ ID NO: 98107 - RNA, 24 nt, Artificial Sequence
  Synthetic
ccccggaagagcuguuuauucauc

SEQ ID NO: 98108 - RNA, 18 nt, Artificial Sequence
  Synthetic
aacgaguauacaaagauc

SEQ ID NO: 98109 - RNA, 19 nt, Artificial Sequence
  Synthetic
caacgaguauacaaagauc

SEQ ID NO: 98110 - RNA, 20 nt, Artificial Sequence
  Synthetic
ucaacgaguauacaaagauc

SEQ ID NO: 98111 - RNA, 21 nt, Artificial Sequence
  Synthetic
uucaacgaguauacaaagauc

SEQ ID NO: 98112 - RNA, 22 nt, Artificial Sequence
  Synthetic
auucaacgaguauacaaagauc

SEQ ID NO: 98113 - RNA, 23 nt, Artificial Sequence
  Synthetic
cauucaacgaguauacaaagauc

SEQ ID NO: 98114 - RNA, 24 nt, Artificial Sequence
  Synthetic
ccauucaacgaguauacaaagauc

SEQ ID NO: 98115 - RNA, 18 nt, Artificial Sequence
  Synthetic
aaugccaacuuuaagauc

SEQ ID NO: 98116 - RNA, 19 nt, Artificial Sequence
  Synthetic
aaaugccaacuuuaagauc

SEQ ID NO: 98117 - RNA, 20 nt, Artificial Sequence
  Synthetic
uaaaugccaacuuuaagauc

SEQ ID NO: 98118 - RNA, 21 nt, Artificial Sequence
  Synthetic
auaaaugccaacuuuaagauc

SEQ ID NO: 98119 - RNA, 22 nt, Artificial Sequence
  Synthetic
cauaaaugccaacuuuaagauc

SEQ ID NO: 98120 - RNA, 24 nt, Artificial Sequence
  Synthetic
ugcauaaaugccaacuuuaagauc

SEQ ID NO: 98121 - RNA, 18 nt, Artificial Sequence
  Synthetic
ucuauaaaugaacagauc

SEQ ID NO: 98122 - RNA, 19 nt, Artificial Sequence
  Synthetic
uucuauaaaugaacagauc

SEQ ID NO: 98123 - RNA, 20 nt, Artificial Sequence
  Synthetic
uuucuauaaaugaacagauc

SEQ ID NO: 98124 - RNA, 22 nt, Artificial Sequence
  Synthetic
aguuucuauaaaugaacagauc

SEQ ID NO: 98125 - RNA, 23 nt, Artificial Sequence
  Synthetic
uaguuucuauaaaugaacagauc

SEQ ID NO: 98126 - RNA, 24 nt, Artificial Sequence
  Synthetic
cuaguuucuauaaaugaacagauc

SEQ ID NO: 98127 - RNA, 18 nt, Artificial Sequence
  Synthetic
agagacuuguggcagauc

SEQ ID NO: 98128 - RNA, 19 nt, Artificial Sequence
  Synthetic
uagagacuuguggcagauc

SEQ ID NO: 98129 - RNA, 20 nt, Artificial Sequence
  Synthetic
uuagagacuuguggcagauc

SEQ ID NO: 98130 - RNA, 21 nt, Artificial Sequence
  Synthetic
auuagagacuuguggcagauc

SEQ ID NO: 98131 - RNA, 22 nt, Artificial Sequence
  Synthetic
aauuagagacuuguggcagauc

SEQ ID NO: 98132 - RNA, 23 nt, Artificial Sequence
  Synthetic
uaauuagagacuuguggcagauc

SEQ ID NO: 98133 - RNA, 18 nt, Artificial Sequence
  Synthetic
agauauuuuugagagauc

SEQ ID NO: 98134 - RNA, 22 nt, Artificial Sequence
  Synthetic
agggagauauuuuugagagauc

SEQ ID NO: 98135 - RNA, 23 nt, Artificial Sequence
  Synthetic
aagggagauauuuuugagagauc

SEQ ID NO: 98136 - RNA, 24 nt, Artificial Sequence
  Synthetic
aaagggagauauuuuugagagauc

SEQ ID NO: 98137 - RNA, 19 nt, Artificial Sequence
  Synthetic
agaguuuucaagugagauc

SEQ ID NO: 98138 - RNA, 20 nt, Artificial Sequence
  Synthetic
uagaguuuucaagugagauc

SEQ ID NO: 98139 - RNA, 21 nt, Artificial Sequence
  Synthetic
cuagaguuuucaagugagauc

SEQ ID NO: 98140 - RNA, 22 nt, Artificial Sequence
  Synthetic
ccuagaguuuucaagugagauc

SEQ ID NO: 98141 - RNA, 23 nt, Artificial Sequence
  Synthetic
cccuagaguuuucaagugagauc

SEQ ID NO: 98142 - RNA, 24 nt, Artificial Sequence
  Synthetic
ccccuagaguuuucaagugagauc

SEQ ID NO: 98143 - RNA, 18 nt, Artificial Sequence
  Synthetic
cguagagauucaacgauc

SEQ ID NO: 98144 - RNA, 20 nt, Artificial Sequence
  Synthetic
agcguagagauucaacgauc

SEQ ID NO: 98145 - RNA, 21 nt, Artificial Sequence
  Synthetic
aagcguagagauucaacgauc

SEQ ID NO: 98146 - RNA, 22 nt, Artificial Sequence
  Synthetic
aaagcguagagauucaacgauc

SEQ ID NO: 98147 - RNA, 23 nt, Artificial Sequence
  Synthetic
aaaagcguagagauucaacgauc

SEQ ID NO: 98148 - RNA, 24 nt, Artificial Sequence
  Synthetic
aaaaagcguagagauucaacgauc

SEQ ID NO: 98149 - RNA, 18 nt, Artificial Sequence
  Synthetic
acaauuuguaucaggauc

SEQ ID NO: 98150 - RNA, 19 nt, Artificial Sequence
  Synthetic
uacaauuuguaucaggauc

SEQ ID NO: 98151 - RNA, 21 nt, Artificial Sequence
  Synthetic
aguacaauuuguaucaggauc

SEQ ID NO: 98152 - RNA, 22 nt, Artificial Sequence
  Synthetic
aaguacaauuuguaucaggauc

SEQ ID NO: 98153 - RNA, 18 nt, Artificial Sequence
  Synthetic
uggcagauagauaggauc

SEQ ID NO: 98154 - RNA, 19 nt, Artificial Sequence
  Synthetic
cuggcagauagauaggauc

SEQ ID NO: 98155 - RNA, 20 nt, Artificial Sequence
  Synthetic
acuggcagauagauaggauc

SEQ ID NO: 98156 - RNA, 21 nt, Artificial Sequence
  Synthetic
cacuggcagauagauaggauc

SEQ ID NO: 98157 - RNA, 24 nt, Artificial Sequence
  Synthetic
aggcacuggcagauagauaggauc

SEQ ID NO: 98158 - RNA, 18 nt, Artificial Sequence
  Synthetic
ccaauggcuggcuggauc

SEQ ID NO: 98159 - RNA, 21 nt, Artificial Sequence
  Synthetic
uggccaauggcuggcuggauc

SEQ ID NO: 98160 - RNA, 22 nt, Artificial Sequence
  Synthetic
cuggccaauggcuggcuggauc

SEQ ID NO: 98161 - RNA, 23 nt, Artificial Sequence
  Synthetic
ccuggccaauggcuggcuggauc

SEQ ID NO: 98162 - RNA, 24 nt, Artificial Sequence
  Synthetic
cccuggccaauggcuggcuggauc

SEQ ID NO: 98163 - RNA, 18 nt, Artificial Sequence
  Synthetic
cugaaacucugcuggauc

SEQ ID NO: 98164 - RNA, 22 nt, Artificial Sequence
  Synthetic
ugggcugaaacucugcuggauc

SEQ ID NO: 98165 - RNA, 23 nt, Artificial Sequence
  Synthetic
cugggcugaaacucugcuggauc

SEQ ID NO: 98166 - RNA, 24 nt, Artificial Sequence
  Synthetic
ccugggcugaaacucugcuggauc

SEQ ID NO: 98167 - RNA, 19 nt, Artificial Sequence
  Synthetic
agauauaaggcaaaugauc

SEQ ID NO: 98168 - RNA, 20 nt, Artificial Sequence
  Synthetic
aagauauaaggcaaaugauc

SEQ ID NO: 98169 - RNA, 22 nt, Artificial Sequence
  Synthetic
ugaagauauaaggcaaaugauc

SEQ ID NO: 98170 - RNA, 23 nt, Artificial Sequence
  Synthetic
uugaagauauaaggcaaaugauc

SEQ ID NO: 98171 - RNA, 18 nt, Artificial Sequence
  Synthetic
aaaauguuaggcaugauc

SEQ ID NO: 98172 - RNA, 19 nt, Artificial Sequence
  Synthetic
aaaaauguuaggcaugauc

SEQ ID NO: 98173 - RNA, 20 nt, Artificial Sequence
  Synthetic
aaaaaauguuaggcaugauc

SEQ ID NO: 98174 - RNA, 21 nt, Artificial Sequence
  Synthetic
caaaaaauguuaggcaugauc

SEQ ID NO: 98175 - RNA, 22 nt, Artificial Sequence
  Synthetic
ucaaaaaauguuaggcaugauc

SEQ ID NO: 98176 - RNA, 23 nt, Artificial Sequence
  Synthetic
aucaaaaaauguuaggcaugauc

SEQ ID NO: 98177 - RNA, 24 nt, Artificial Sequence
  Synthetic
caucaaaaaauguuaggcaugauc

SEQ ID NO: 98178 - RNA, 18 nt, Artificial Sequence
  Synthetic
aaagaguuuuucaugauc

SEQ ID NO: 98179 - RNA, 19 nt, Artificial Sequence
  Synthetic
aaaagaguuuuucaugauc

SEQ ID NO: 98180 - RNA, 21 nt, Artificial Sequence
  Synthetic
ugaaaagaguuuuucaugauc

SEQ ID NO: 98181 - RNA, 22 nt, Artificial Sequence
  Synthetic
uugaaaagaguuuuucaugauc

SEQ ID NO: 98182 - RNA, 23 nt, Artificial Sequence
  Synthetic
auugaaaagaguuuuucaugauc

SEQ ID NO: 98183 - RNA, 24 nt, Artificial Sequence
  Synthetic
uauugaaaagaguuuuucaugauc

SEQ ID NO: 98184 - RNA, 18 nt, Artificial Sequence
  Synthetic
aaaaacauucaccugauc

SEQ ID NO: 98185 - RNA, 19 nt, Artificial Sequence
  Synthetic
uaaaaacauucaccugauc

SEQ ID NO: 98186 - RNA, 20 nt, Artificial Sequence
  Synthetic
cuaaaaacauucaccugauc

SEQ ID NO: 98187 - RNA, 22 nt, Artificial Sequence
  Synthetic
agcuaaaaacauucaccugauc

SEQ ID NO: 98188 - RNA, 18 nt, Artificial Sequence
  Synthetic
auaaugcaaaaucugauc

SEQ ID NO: 98189 - RNA, 19 nt, Artificial Sequence
  Synthetic
aauaaugcaaaaucugauc

SEQ ID NO: 98190 - RNA, 20 nt, Artificial Sequence
  Synthetic
aaauaaugcaaaaucugauc

SEQ ID NO: 98191 - RNA, 21 nt, Artificial Sequence
  Synthetic
uaaauaaugcaaaaucugauc

SEQ ID NO: 98192 - RNA, 22 nt, Artificial Sequence
  Synthetic
auaaauaaugcaaaaucugauc

SEQ ID NO: 98193 - RNA, 18 nt, Artificial Sequence
  Synthetic
uuggguuucuuagugauc

SEQ ID NO: 98194 - RNA, 19 nt, Artificial Sequence
  Synthetic
uuuggguuucuuagugauc

SEQ ID NO: 98195 - RNA, 20 nt, Artificial Sequence
  Synthetic
auuuggguuucuuagugauc

SEQ ID NO: 98196 - RNA, 21 nt, Artificial Sequence
  Synthetic
uauuuggguuucuuagugauc

SEQ ID NO: 98197 - RNA, 23 nt, Artificial Sequence
  Synthetic
aguauuuggguuucuuagugauc

SEQ ID NO: 98198 - RNA, 24 nt, Artificial Sequence
  Synthetic
aaguauuuggguuucuuagugauc

SEQ ID NO: 98199 - RNA, 18 nt, Artificial Sequence
  Synthetic
acaggaaaaugggugauc

SEQ ID NO: 98200 - RNA, 19 nt, Artificial Sequence
  Synthetic
cacaggaaaaugggugauc

SEQ ID NO: 98201 - RNA, 20 nt, Artificial Sequence
  Synthetic
acacaggaaaaugggugauc

SEQ ID NO: 98202 - RNA, 21 nt, Artificial Sequence
  Synthetic
aacacaggaaaaugggugauc

SEQ ID NO: 98203 - RNA, 22 nt, Artificial Sequence
  Synthetic
uaacacaggaaaaugggugauc

SEQ ID NO: 98204 - RNA, 23 nt, Artificial Sequence
  Synthetic
cuaacacaggaaaaugggugauc

SEQ ID NO: 98205 - RNA, 24 nt, Artificial Sequence
  Synthetic
acuaacacaggaaaaugggugauc

SEQ ID NO: 98206 - RNA, 18 nt, Artificial Sequence
  Synthetic
agcuugcuuuuggugauc

SEQ ID NO: 98207 - RNA, 19 nt, Artificial Sequence
  Synthetic
aagcuugcuuuuggugauc

SEQ ID NO: 98208 - RNA, 21 nt, Artificial Sequence
  Synthetic
ugaagcuugcuuuuggugauc

SEQ ID NO: 98209 - RNA, 22 nt, Artificial Sequence
  Synthetic
uugaagcuugcuuuuggugauc

SEQ ID NO: 98210 - RNA, 23 nt, Artificial Sequence
  Synthetic
uuugaagcuugcuuuuggugauc

SEQ ID NO: 98211 - RNA, 24 nt, Artificial Sequence
  Synthetic
auuugaagcuugcuuuuggugauc

SEQ ID NO: 98212 - RNA, 18 nt, Artificial Sequence
  Synthetic
agaauucauguaaauauc

SEQ ID NO: 98213 - RNA, 19 nt, Artificial Sequence
  Synthetic
cagaauucauguaaauauc

SEQ ID NO: 98214 - RNA, 20 nt, Artificial Sequence
  Synthetic
ucagaauucauguaaauauc

SEQ ID NO: 98215 - RNA, 21 nt, Artificial Sequence
  Synthetic
aucagaauucauguaaauauc

SEQ ID NO: 98216 - RNA, 22 nt, Artificial Sequence
  Synthetic
caucagaauucauguaaauauc

SEQ ID NO: 98217 - RNA, 23 nt, Artificial Sequence
  Synthetic
ccaucagaauucauguaaauauc

SEQ ID NO: 98218 - RNA, 24 nt, Artificial Sequence
  Synthetic
uccaucagaauucauguaaauauc

SEQ ID NO: 98219 - RNA, 18 nt, Artificial Sequence
  Synthetic
uauuuucuucagaauauc

SEQ ID NO: 98220 - RNA, 19 nt, Artificial Sequence
  Synthetic
cuauuuucuucagaauauc

SEQ ID NO: 98221 - RNA, 21 nt, Artificial Sequence
  Synthetic
agcuauuuucuucagaauauc

SEQ ID NO: 98222 - RNA, 22 nt, Artificial Sequence
  Synthetic
aagcuauuuucuucagaauauc

SEQ ID NO: 98223 - RNA, 23 nt, Artificial Sequence
  Synthetic
aaagcuauuuucuucagaauauc

SEQ ID NO: 98224 - RNA, 24 nt, Artificial Sequence
  Synthetic
uaaagcuauuuucuucagaauauc

SEQ ID NO: 98225 - RNA, 18 nt, Artificial Sequence
  Synthetic
ucagauuugacuaauauc

SEQ ID NO: 98226 - RNA, 22 nt, Artificial Sequence
  Synthetic
ugggucagauuugacuaauauc

SEQ ID NO: 98227 - RNA, 23 nt, Artificial Sequence
  Synthetic
augggucagauuugacuaauauc

SEQ ID NO: 98228 - RNA, 24 nt, Artificial Sequence
  Synthetic
aaugggucagauuugacuaauauc

SEQ ID NO: 98229 - RNA, 18 nt, Artificial Sequence
  Synthetic
acaucaauuuuacauauc

SEQ ID NO: 98230 - RNA, 19 nt, Artificial Sequence
  Synthetic
aacaucaauuuuacauauc

SEQ ID NO: 98231 - RNA, 20 nt, Artificial Sequence
  Synthetic
uaacaucaauuuuacauauc

SEQ ID NO: 98232 - RNA, 21 nt, Artificial Sequence
  Synthetic
auaacaucaauuuuacauauc

SEQ ID NO: 98233 - RNA, 23 nt, Artificial Sequence
  Synthetic
ugauaacaucaauuuuacauauc

SEQ ID NO: 98234 - RNA, 24 nt, Artificial Sequence
  Synthetic
augauaacaucaauuuuacauauc

SEQ ID NO: 98235 - RNA, 18 nt, Artificial Sequence
  Synthetic
auagguuucaaucauauc

SEQ ID NO: 98236 - RNA, 19 nt, Artificial Sequence
  Synthetic
uauagguuucaaucauauc

SEQ ID NO: 98237 - RNA, 23 nt, Artificial Sequence
  Synthetic
uggguauagguuucaaucauauc

SEQ ID NO: 98238 - RNA, 24 nt, Artificial Sequence
  Synthetic
cuggguauagguuucaaucauauc

SEQ ID NO: 98239 - RNA, 18 nt, Artificial Sequence
  Synthetic
uaauggcaaguagauauc

SEQ ID NO: 98240 - RNA, 19 nt, Artificial Sequence
  Synthetic
auaauggcaaguagauauc

SEQ ID NO: 98241 - RNA, 20 nt, Artificial Sequence
  Synthetic
cauaauggcaaguagauauc

SEQ ID NO: 98242 - RNA, 21 nt, Artificial Sequence
  Synthetic
ccauaauggcaaguagauauc

SEQ ID NO: 98243 - RNA, 22 nt, Artificial Sequence
  Synthetic
cccauaauggcaaguagauauc

SEQ ID NO: 98244 - RNA, 23 nt, Artificial Sequence
  Synthetic
ucccauaauggcaaguagauauc

SEQ ID NO: 98245 - RNA, 24 nt, Artificial Sequence
  Synthetic
cucccauaauggcaaguagauauc

SEQ ID NO: 98246 - RNA, 18 nt, Artificial Sequence
  Synthetic
augccguugguugauauc

SEQ ID NO: 98247 - RNA, 19 nt, Artificial Sequence
  Synthetic
uaugccguugguugauauc

SEQ ID NO: 98248 - RNA, 20 nt, Artificial Sequence
  Synthetic
auaugccguugguugauauc

SEQ ID NO: 98249 - RNA, 21 nt, Artificial Sequence
  Synthetic
cauaugccguugguugauauc

SEQ ID NO: 98250 - RNA, 23 nt, Artificial Sequence
  Synthetic
agcauaugccguugguugauauc

SEQ ID NO: 98251 - RNA, 24 nt, Artificial Sequence
  Synthetic
uagcauaugccguugguugauauc

SEQ ID NO: 98252 - RNA, 18 nt, Artificial Sequence
  Synthetic
uuccaacagcuauauauc

SEQ ID NO: 98253 - RNA, 19 nt, Artificial Sequence
  Synthetic
cuuccaacagcuauauauc

SEQ ID NO: 98254 - RNA, 20 nt, Artificial Sequence
  Synthetic
ucuuccaacagcuauauauc

SEQ ID NO: 98255 - RNA, 21 nt, Artificial Sequence
  Synthetic
uucuuccaacagcuauauauc

SEQ ID NO: 98256 - RNA, 22 nt, Artificial Sequence
  Synthetic
auucuuccaacagcuauauauc

SEQ ID NO: 98257 - RNA, 23 nt, Artificial Sequence
  Synthetic
cauucuuccaacagcuauauauc

SEQ ID NO: 98258 - RNA, 24 nt, Artificial Sequence
  Synthetic
ccauucuuccaacagcuauauauc

SEQ ID NO: 98259 - RNA, 18 nt, Artificial Sequence
  Synthetic
auuuaaauuuucuauauc

SEQ ID NO: 98260 - RNA, 19 nt, Artificial Sequence
  Synthetic
aauuuaaauuuucuauauc

SEQ ID NO: 98261 - RNA, 22 nt, Artificial Sequence
  Synthetic
aggaauuuaaauuuucuauauc

SEQ ID NO: 98262 - RNA, 23 nt, Artificial Sequence
  Synthetic
aaggaauuuaaauuuucuauauc

SEQ ID NO: 98263 - RNA, 24 nt, Artificial Sequence
  Synthetic
uaaggaauuuaaauuuucuauauc

SEQ ID NO: 98264 - RNA, 19 nt, Artificial Sequence
  Synthetic
uguguuacuuuuguauauc

SEQ ID NO: 98265 - RNA, 20 nt, Artificial Sequence
  Synthetic
auguguuacuuuuguauauc

SEQ ID NO: 98266 - RNA, 21 nt, Artificial Sequence
  Synthetic
cauguguuacuuuuguauauc

SEQ ID NO: 98267 - RNA, 23 nt, Artificial Sequence
  Synthetic
agcauguguuacuuuuguauauc

SEQ ID NO: 98268 - RNA, 18 nt, Artificial Sequence
  Synthetic
acagucauauauuauauc

SEQ ID NO: 98269 - RNA, 20 nt, Artificial Sequence
  Synthetic
agacagucauauauuauauc

SEQ ID NO: 98270 - RNA, 22 nt, Artificial Sequence
  Synthetic
ugagacagucauauauuauauc

SEQ ID NO: 98271 - RNA, 23 nt, Artificial Sequence
  Synthetic
cugagacagucauauauuauauc

SEQ ID NO: 98272 - RNA, 24 nt, Artificial Sequence
  Synthetic
ccugagacagucauauauuauauc

SEQ ID NO: 98273 - RNA, 19 nt, Artificial Sequence
  Synthetic
agaauuauaaggcacuauc

SEQ ID NO: 98274 - RNA, 20 nt, Artificial Sequence
  Synthetic
cagaauuauaaggcacuauc

SEQ ID NO: 98275 - RNA, 21 nt, Artificial Sequence
  Synthetic
acagaauuauaaggcacuauc

SEQ ID NO: 98276 - RNA, 23 nt, Artificial Sequence
  Synthetic
ugacagaauuauaaggcacuauc

SEQ ID NO: 98277 - RNA, 21 nt, Artificial Sequence
  Synthetic
agggucuguuuuuaaccuauc

SEQ ID NO: 98278 - RNA, 22 nt, Artificial Sequence
  Synthetic
cagggucuguuuuuaaccuauc

SEQ ID NO: 98279 - RNA, 24 nt, Artificial Sequence
  Synthetic
agcagggucuguuuuuaaccuauc

SEQ ID NO: 98280 - RNA, 19 nt, Artificial Sequence
  Synthetic
cguuucuuaugccccuauc

SEQ ID NO: 98281 - RNA, 20 nt, Artificial Sequence
  Synthetic
ccguuucuuaugccccuauc

SEQ ID NO: 98282 - RNA, 21 nt, Artificial Sequence
  Synthetic
cccguuucuuaugccccuauc

SEQ ID NO: 98283 - RNA, 22 nt, Artificial Sequence
  Synthetic
ccccguuucuuaugccccuauc

SEQ ID NO: 98284 - RNA, 23 nt, Artificial Sequence
  Synthetic
accccguuucuuaugccccuauc

SEQ ID NO: 98285 - RNA, 24 nt, Artificial Sequence
  Synthetic
caccccguuucuuaugccccuauc

SEQ ID NO: 98286 - RNA, 18 nt, Artificial Sequence
  Synthetic
acaacauuaacuccuauc

SEQ ID NO: 98287 - RNA, 19 nt, Artificial Sequence
  Synthetic
aacaacauuaacuccuauc

SEQ ID NO: 98288 - RNA, 20 nt, Artificial Sequence
  Synthetic
aaacaacauuaacuccuauc

SEQ ID NO: 98289 - RNA, 22 nt, Artificial Sequence
  Synthetic
ugaaacaacauuaacuccuauc

SEQ ID NO: 98290 - RNA, 23 nt, Artificial Sequence
  Synthetic
cugaaacaacauuaacuccuauc

SEQ ID NO: 98291 - RNA, 24 nt, Artificial Sequence
  Synthetic
acugaaacaacauuaacuccuauc

SEQ ID NO: 98292 - RNA, 18 nt, Artificial Sequence
  Synthetic
auugaacugguaucuauc

SEQ ID NO: 98293 - RNA, 19 nt, Artificial Sequence
  Synthetic
aauugaacugguaucuauc

SEQ ID NO: 98294 - RNA, 20 nt, Artificial Sequence
  Synthetic
caauugaacugguaucuauc

SEQ ID NO: 98295 - RNA, 21 nt, Artificial Sequence
  Synthetic
ucaauugaacugguaucuauc

SEQ ID NO: 98296 - RNA, 22 nt, Artificial Sequence
  Synthetic
uucaauugaacugguaucuauc

SEQ ID NO: 98297 - RNA, 24 nt, Artificial Sequence
  Synthetic
cguucaauugaacugguaucuauc

SEQ ID NO: 98298 - RNA, 18 nt, Artificial Sequence
  Synthetic
uacagcuauaacucuauc

SEQ ID NO: 98299 - RNA, 20 nt, Artificial Sequence
  Synthetic
uguacagcuauaacucuauc

SEQ ID NO: 98300 - RNA, 21 nt, Artificial Sequence
  Synthetic
auguacagcuauaacucuauc

SEQ ID NO: 98301 - RNA, 22 nt, Artificial Sequence
  Synthetic
cauguacagcuauaacucuauc

SEQ ID NO: 98302 - RNA, 23 nt, Artificial Sequence
  Synthetic
ccauguacagcuauaacucuauc

SEQ ID NO: 98303 - RNA, 24 nt, Artificial Sequence
  Synthetic
accauguacagcuauaacucuauc

SEQ ID NO: 98304 - RNA, 18 nt, Artificial Sequence
  Synthetic
uaugguguuuccucuauc

SEQ ID NO: 98305 - RNA, 19 nt, Artificial Sequence
  Synthetic
auaugguguuuccucuauc

SEQ ID NO: 98306 - RNA, 22 nt, Artificial Sequence
  Synthetic
uggauaugguguuuccucuauc

SEQ ID NO: 98307 - RNA, 23 nt, Artificial Sequence
  Synthetic
uuggauaugguguuuccucuauc

SEQ ID NO: 98308 - RNA, 24 nt, Artificial Sequence
  Synthetic
uuuggauaugguguuuccucuauc

SEQ ID NO: 98309 - RNA, 18 nt, Artificial Sequence
  Synthetic
cuauucagagauucuauc

SEQ ID NO: 98310 - RNA, 19 nt, Artificial Sequence
  Synthetic
ucuauucagagauucuauc

SEQ ID NO: 98311 - RNA, 20 nt, Artificial Sequence
  Synthetic
uucuauucagagauucuauc

SEQ ID NO: 98312 - RNA, 21 nt, Artificial Sequence
  Synthetic
cuucuauucagagauucuauc

SEQ ID NO: 98313 - RNA, 22 nt, Artificial Sequence
  Synthetic
ccuucuauucagagauucuauc

SEQ ID NO: 98314 - RNA, 24 nt, Artificial Sequence
  Synthetic
agccuucuauucagagauucuauc

SEQ ID NO: 98315 - RNA, 18 nt, Artificial Sequence
  Synthetic
ucagcuuaauauucuauc

SEQ ID NO: 98316 - RNA, 19 nt, Artificial Sequence
  Synthetic
uucagcuuaauauucuauc

SEQ ID NO: 98317 - RNA, 20 nt, Artificial Sequence
  Synthetic
uuucagcuuaauauucuauc

SEQ ID NO: 98318 - RNA, 21 nt, Artificial Sequence
  Synthetic
auuucagcuuaauauucuauc

SEQ ID NO: 98319 - RNA, 22 nt, Artificial Sequence
  Synthetic
uauuucagcuuaauauucuauc

SEQ ID NO: 98320 - RNA, 23 nt, Artificial Sequence
  Synthetic
uuauuucagcuuaauauucuauc

SEQ ID NO: 98321 - RNA, 24 nt, Artificial Sequence
  Synthetic
uuuauuucagcuuaauauucuauc

SEQ ID NO: 98322 - RNA, 21 nt, Artificial Sequence
  Synthetic
acuagcauauuuuuuucuauc

SEQ ID NO: 98323 - RNA, 22 nt, Artificial Sequence
  Synthetic
uacuagcauauuuuuuucuauc

SEQ ID NO: 98324 - RNA, 23 nt, Artificial Sequence
  Synthetic
uuacuagcauauuuuuuucuauc

SEQ ID NO: 98325 - RNA, 24 nt, Artificial Sequence
  Synthetic
uuuacuagcauauuuuuuucuauc

SEQ ID NO: 98326 - RNA, 19 nt, Artificial Sequence
  Synthetic
agaaauaacuacaaguauc

SEQ ID NO: 98327 - RNA, 20 nt, Artificial Sequence
  Synthetic
aagaaauaacuacaaguauc

SEQ ID NO: 98328 - RNA, 18 nt, Artificial Sequence
  Synthetic
auguuuuguaaggguauc

SEQ ID NO: 98329 - RNA, 19 nt, Artificial Sequence
  Synthetic
cauguuuuguaaggguauc

SEQ ID NO: 98330 - RNA, 20 nt, Artificial Sequence
  Synthetic
acauguuuuguaaggguauc

SEQ ID NO: 98331 - RNA, 21 nt, Artificial Sequence
  Synthetic
uacauguuuuguaaggguauc

SEQ ID NO: 98332 - RNA, 22 nt, Artificial Sequence
  Synthetic
cuacauguuuuguaaggguauc

SEQ ID NO: 98333 - RNA, 23 nt, Artificial Sequence
  Synthetic
acuacauguuuuguaaggguauc

SEQ ID NO: 98334 - RNA, 24 nt, Artificial Sequence
  Synthetic
uacuacauguuuuguaaggguauc

SEQ ID NO: 98335 - RNA, 22 nt, Artificial Sequence
  Synthetic
ugaaaauacuuuggcauguauc

SEQ ID NO: 98336 - RNA, 23 nt, Artificial Sequence
  Synthetic
cugaaaauacuuuggcauguauc

SEQ ID NO: 98337 - RNA, 24 nt, Artificial Sequence
  Synthetic
ccugaaaauacuuuggcauguauc

SEQ ID NO: 98338 - RNA, 18 nt, Artificial Sequence
  Synthetic
caaguauaaagauguauc

SEQ ID NO: 98339 - RNA, 19 nt, Artificial Sequence
  Synthetic
ucaaguauaaagauguauc

SEQ ID NO: 98340 - RNA, 22 nt, Artificial Sequence
  Synthetic
uggucaaguauaaagauguauc

SEQ ID NO: 98341 - RNA, 23 nt, Artificial Sequence
  Synthetic
uuggucaaguauaaagauguauc

SEQ ID NO: 98342 - RNA, 24 nt, Artificial Sequence
  Synthetic
auuggucaaguauaaagauguauc

SEQ ID NO: 98343 - RNA, 21 nt, Artificial Sequence
  Synthetic
uuuacagacuguacuuguauc

SEQ ID NO: 98344 - RNA, 22 nt, Artificial Sequence
  Synthetic
auuuacagacuguacuuguauc

SEQ ID NO: 98345 - RNA, 23 nt, Artificial Sequence
  Synthetic
cauuuacagacuguacuuguauc

SEQ ID NO: 98346 - RNA, 24 nt, Artificial Sequence
  Synthetic
ucauuuacagacuguacuuguauc

SEQ ID NO: 98347 - RNA, 18 nt, Artificial Sequence
  Synthetic
uaugccaaguuaauuauc

SEQ ID NO: 98348 - RNA, 19 nt, Artificial Sequence
  Synthetic
cuaugccaaguuaauuauc

SEQ ID NO: 98349 - RNA, 20 nt, Artificial Sequence
  Synthetic
acuaugccaaguuaauuauc

SEQ ID NO: 98350 - RNA, 21 nt, Artificial Sequence
  Synthetic
cacuaugccaaguuaauuauc

SEQ ID NO: 98351 - RNA, 22 nt, Artificial Sequence
  Synthetic
ccacuaugccaaguuaauuauc

SEQ ID NO: 98352 - RNA, 23 nt, Artificial Sequence
  Synthetic
uccacuaugccaaguuaauuauc

SEQ ID NO: 98353 - RNA, 24 nt, Artificial Sequence
  Synthetic
cuccacuaugccaaguuaauuauc

SEQ ID NO: 98354 - RNA, 18 nt, Artificial Sequence
  Synthetic
auauuuguugccauuauc

SEQ ID NO: 98355 - RNA, 19 nt, Artificial Sequence
  Synthetic
uauauuuguugccauuauc

SEQ ID NO: 98356 - RNA, 20 nt, Artificial Sequence
  Synthetic
uuauauuuguugccauuauc

SEQ ID NO: 98357 - RNA, 21 nt, Artificial Sequence
  Synthetic
cuuauauuuguugccauuauc

SEQ ID NO: 98358 - RNA, 22 nt, Artificial Sequence
  Synthetic
ccuuauauuuguugccauuauc

SEQ ID NO: 98359 - RNA, 24 nt, Artificial Sequence
  Synthetic
agccuuauauuuguugccauuauc

SEQ ID NO: 98360 - RNA, 18 nt, Artificial Sequence
  Synthetic
ugugauuacuuuauuauc

SEQ ID NO: 98361 - RNA, 19 nt, Artificial Sequence
  Synthetic
uugugauuacuuuauuauc

SEQ ID NO: 98362 - RNA, 20 nt, Artificial Sequence
  Synthetic
auugugauuacuuuauuauc

SEQ ID NO: 98363 - RNA, 22 nt, Artificial Sequence
  Synthetic
agauugugauuacuuuauuauc

SEQ ID NO: 98364 - RNA, 23 nt, Artificial Sequence
  Synthetic
cagauugugauuacuuuauuauc

SEQ ID NO: 98365 - RNA, 24 nt, Artificial Sequence
  Synthetic
acagauugugauuacuuuauuauc

SEQ ID NO: 98366 - RNA, 19 nt, Artificial Sequence
  Synthetic
uguuguaauuuuacuuauc

SEQ ID NO: 98367 - RNA, 20 nt, Artificial Sequence
  Synthetic
auguuguaauuuuacuuauc

SEQ ID NO: 98368 - RNA, 21 nt, Artificial Sequence
  Synthetic
cauguuguaauuuuacuuauc

SEQ ID NO: 98369 - RNA, 22 nt, Artificial Sequence
  Synthetic
ucauguuguaauuuuacuuauc

SEQ ID NO: 98370 - RNA, 23 nt, Artificial Sequence
  Synthetic
cucauguuguaauuuuacuuauc

SEQ ID NO: 98371 - RNA, 24 nt, Artificial Sequence
  Synthetic
acucauguuguaauuuuacuuauc

SEQ ID NO: 98372 - RNA, 18 nt, Artificial Sequence
  Synthetic
cauaaucaacuccuuauc

SEQ ID NO: 98373 - RNA, 19 nt, Artificial Sequence
  Synthetic
ccauaaucaacuccuuauc

SEQ ID NO: 98374 - RNA, 20 nt, Artificial Sequence
  Synthetic
cccauaaucaacuccuuauc

SEQ ID NO: 98375 - RNA, 21 nt, Artificial Sequence
  Synthetic
ucccauaaucaacuccuuauc

SEQ ID NO: 98376 - RNA, 22 nt, Artificial Sequence
  Synthetic
cucccauaaucaacuccuuauc

SEQ ID NO: 98377 - RNA, 23 nt, Artificial Sequence
  Synthetic
ucucccauaaucaacuccuuauc

SEQ ID NO: 98378 - RNA, 19 nt, Artificial Sequence
  Synthetic
ugugccuauugugguuauc

SEQ ID NO: 98379 - RNA, 20 nt, Artificial Sequence
  Synthetic
cugugccuauugugguuauc

SEQ ID NO: 98380 - RNA, 21 nt, Artificial Sequence
  Synthetic
ccugugccuauugugguuauc

SEQ ID NO: 98381 - RNA, 22 nt, Artificial Sequence
  Synthetic
cccugugccuauugugguuauc

SEQ ID NO: 98382 - RNA, 23 nt, Artificial Sequence
  Synthetic
ucccugugccuauugugguuauc

SEQ ID NO: 98383 - RNA, 18 nt, Artificial Sequence
  Synthetic
aggaucuuggcuguuauc

SEQ ID NO: 98384 - RNA, 19 nt, Artificial Sequence
  Synthetic
aaggaucuuggcuguuauc

SEQ ID NO: 98385 - RNA, 22 nt, Artificial Sequence
  Synthetic
uggaaggaucuuggcuguuauc

SEQ ID NO: 98386 - RNA, 23 nt, Artificial Sequence
  Synthetic
uuggaaggaucuuggcuguuauc

SEQ ID NO: 98387 - RNA, 24 nt, Artificial Sequence
  Synthetic
uuuggaaggaucuuggcuguuauc

SEQ ID NO: 98388 - RNA, 18 nt, Artificial Sequence
  Synthetic
agggccucaaguguuauc

SEQ ID NO: 98389 - RNA, 19 nt, Artificial Sequence
  Synthetic
cagggccucaaguguuauc

SEQ ID NO: 98390 - RNA, 21 nt, Artificial Sequence
  Synthetic
agcagggccucaaguguuauc

SEQ ID NO: 98391 - RNA, 22 nt, Artificial Sequence
  Synthetic
uagcagggccucaaguguuauc

SEQ ID NO: 98392 - RNA, 24 nt, Artificial Sequence
  Synthetic
aguagcagggccucaaguguuauc

SEQ ID NO: 98393 - RNA, 18 nt, Artificial Sequence
  Synthetic
uauaauauguuuguuauc

SEQ ID NO: 98394 - RNA, 20 nt, Artificial Sequence
  Synthetic
aguauaauauguuuguuauc

SEQ ID NO: 98395 - RNA, 21 nt, Artificial Sequence
  Synthetic
caguauaauauguuuguuauc

SEQ ID NO: 98396 - RNA, 22 nt, Artificial Sequence
  Synthetic
ucaguauaauauguuuguuauc

SEQ ID NO: 98397 - RNA, 23 nt, Artificial Sequence
  Synthetic
uucaguauaauauguuuguuauc

SEQ ID NO: 98398 - RNA, 24 nt, Artificial Sequence
  Synthetic
uuucaguauaauauguuuguuauc

SEQ ID NO: 98399 - RNA, 20 nt, Artificial Sequence
  Synthetic
aggcuuucaauguuuuuauc

SEQ ID NO: 98400 - RNA, 21 nt, Artificial Sequence
  Synthetic
aaggcuuucaauguuuuuauc

SEQ ID NO: 98401 - RNA, 22 nt, Artificial Sequence
  Synthetic
caaggcuuucaauguuuuuauc

SEQ ID NO: 98402 - RNA, 23 nt, Artificial Sequence
  Synthetic
ucaaggcuuucaauguuuuuauc

SEQ ID NO: 98403 - RNA, 24 nt, Artificial Sequence
  Synthetic
aucaaggcuuucaauguuuuuauc

SEQ ID NO: 98404 - RNA, 19 nt, Artificial Sequence
  Synthetic
ugagcaccuuaaaaaacuc

SEQ ID NO: 98405 - RNA, 20 nt, Artificial Sequence
  Synthetic
cugagcaccuuaaaaaacuc

SEQ ID NO: 98406 - RNA, 21 nt, Artificial Sequence
  Synthetic
ucugagcaccuuaaaaaacuc

SEQ ID NO: 98407 - RNA, 22 nt, Artificial Sequence
  Synthetic
uucugagcaccuuaaaaaacuc

SEQ ID NO: 98408 - RNA, 23 nt, Artificial Sequence
  Synthetic
auucugagcaccuuaaaaaacuc

SEQ ID NO: 98409 - RNA, 24 nt, Artificial Sequence
  Synthetic
aauucugagcaccuuaaaaaacuc

SEQ ID NO: 98410 - RNA, 21 nt, Artificial Sequence
  Synthetic
acuccuuuucccagaaaacuc

SEQ ID NO: 98411 - RNA, 23 nt, Artificial Sequence
  Synthetic
ugacuccuuuucccagaaaacuc

SEQ ID NO: 98412 - RNA, 24 nt, Artificial Sequence
  Synthetic
cugacuccuuuucccagaaaacuc

SEQ ID NO: 98413 - RNA, 18 nt, Artificial Sequence
  Synthetic
accaggcagcacaaacuc

SEQ ID NO: 98414 - RNA, 19 nt, Artificial Sequence
  Synthetic
aaccaggcagcacaaacuc

SEQ ID NO: 98415 - RNA, 20 nt, Artificial Sequence
  Synthetic
caaccaggcagcacaaacuc

SEQ ID NO: 98416 - RNA, 21 nt, Artificial Sequence
  Synthetic
acaaccaggcagcacaaacuc

SEQ ID NO: 98417 - RNA, 23 nt, Artificial Sequence
  Synthetic
agacaaccaggcagcacaaacuc

SEQ ID NO: 98418 - RNA, 24 nt, Artificial Sequence
  Synthetic
cagacaaccaggcagcacaaacuc

SEQ ID NO: 98419 - RNA, 18 nt, Artificial Sequence
  Synthetic
cugaaccccaauaaacuc

SEQ ID NO: 98420 - RNA, 19 nt, Artificial Sequence
  Synthetic
ucugaaccccaauaaacuc

SEQ ID NO: 98421 - RNA, 20 nt, Artificial Sequence
  Synthetic
uucugaaccccaauaaacuc

SEQ ID NO: 98422 - RNA, 21 nt, Artificial Sequence
  Synthetic
auucugaaccccaauaaacuc

SEQ ID NO: 98423 - RNA, 22 nt, Artificial Sequence
  Synthetic
aauucugaaccccaauaaacuc

SEQ ID NO: 98424 - RNA, 23 nt, Artificial Sequence
  Synthetic
aaauucugaaccccaauaaacuc

SEQ ID NO: 98425 - RNA, 24 nt, Artificial Sequence
  Synthetic
uaaauucugaaccccaauaaacuc

SEQ ID NO: 98426 - RNA, 18 nt, Artificial Sequence
  Synthetic
uauaugggacauaaacuc

SEQ ID NO: 98427 - RNA, 19 nt, Artificial Sequence
  Synthetic
uuauaugggacauaaacuc

SEQ ID NO: 98428 - RNA, 20 nt, Artificial Sequence
  Synthetic
cuuauaugggacauaaacuc

SEQ ID NO: 98429 - RNA, 23 nt, Artificial Sequence
  Synthetic
uggcuuauaugggacauaaacuc

SEQ ID NO: 98430 - RNA, 19 nt, Artificial Sequence
  Synthetic
agaaccaaugaaacaacuc

SEQ ID NO: 98431 - RNA, 20 nt, Artificial Sequence
  Synthetic
cagaaccaaugaaacaacuc

SEQ ID NO: 98432 - RNA, 21 nt, Artificial Sequence
  Synthetic
ucagaaccaaugaaacaacuc

SEQ ID NO: 98433 - RNA, 22 nt, Artificial Sequence
  Synthetic
aucagaaccaaugaaacaacuc

SEQ ID NO: 98434 - RNA, 23 nt, Artificial Sequence
  Synthetic
aaucagaaccaaugaaacaacuc

SEQ ID NO: 98435 - RNA, 24 nt, Artificial Sequence
  Synthetic
caaucagaaccaaugaaacaacuc

SEQ ID NO: 98436 - RNA, 18 nt, Artificial Sequence
  Synthetic
ucuugucuuacucaacuc

SEQ ID NO: 98437 - RNA, 20 nt, Artificial Sequence
  Synthetic
agucuugucuuacucaacuc

SEQ ID NO: 98438 - RNA, 22 nt, Artificial Sequence
  Synthetic
cgagucuugucuuacucaacuc

SEQ ID NO: 98439 - RNA, 23 nt, Artificial Sequence
  Synthetic
acgagucuugucuuacucaacuc

SEQ ID NO: 98440 - RNA, 24 nt, Artificial Sequence
  Synthetic
cacgagucuugucuuacucaacuc

SEQ ID NO: 98441 - RNA, 18 nt, Artificial Sequence
  Synthetic
caguaacugccucaacuc

SEQ ID NO: 98442 - RNA, 19 nt, Artificial Sequence
  Synthetic
acaguaacugccucaacuc

SEQ ID NO: 98443 - RNA, 20 nt, Artificial Sequence
  Synthetic
aacaguaacugccucaacuc

SEQ ID NO: 98444 - RNA, 21 nt, Artificial Sequence
  Synthetic
aaacaguaacugccucaacuc

SEQ ID NO: 98445 - RNA, 22 nt, Artificial Sequence
  Synthetic
aaaacaguaacugccucaacuc

SEQ ID NO: 98446 - RNA, 23 nt, Artificial Sequence
  Synthetic
uaaaacaguaacugccucaacuc

SEQ ID NO: 98447 - RNA, 24 nt, Artificial Sequence
  Synthetic
auaaaacaguaacugccucaacuc

SEQ ID NO: 98448 - RNA, 21 nt, Artificial Sequence
  Synthetic
uuuauauuuuaaaaagaacuc

SEQ ID NO: 98449 - RNA, 22 nt, Artificial Sequence
  Synthetic
auuuauauuuuaaaaagaacuc

SEQ ID NO: 98450 - RNA, 23 nt, Artificial Sequence
  Synthetic
aauuuauauuuuaaaaagaacuc

SEQ ID NO: 98451 - RNA, 18 nt, Artificial Sequence
  Synthetic
augucugggguagaacuc

SEQ ID NO: 98452 - RNA, 19 nt, Artificial Sequence
  Synthetic
uaugucugggguagaacuc

SEQ ID NO: 98453 - RNA, 21 nt, Artificial Sequence
  Synthetic
uguaugucugggguagaacuc

SEQ ID NO: 98454 - RNA, 22 nt, Artificial Sequence
  Synthetic
cuguaugucugggguagaacuc

SEQ ID NO: 98455 - RNA, 23 nt, Artificial Sequence
  Synthetic
ucuguaugucugggguagaacuc

SEQ ID NO: 98456 - RNA, 24 nt, Artificial Sequence
  Synthetic
uucuguaugucugggguagaacuc

SEQ ID NO: 98457 - RNA, 20 nt, Artificial Sequence
  Synthetic
aggccggaguacuggaacuc

SEQ ID NO: 98458 - RNA, 21 nt, Artificial Sequence
  Synthetic
aaggccggaguacuggaacuc

SEQ ID NO: 98459 - RNA, 22 nt, Artificial Sequence
  Synthetic
caaggccggaguacuggaacuc

SEQ ID NO: 98460 - RNA, 18 nt, Artificial Sequence
  Synthetic
aguuaaaagaaugaacuc

SEQ ID NO: 98461 - RNA, 19 nt, Artificial Sequence
  Synthetic
uaguuaaaagaaugaacuc

SEQ ID NO: 98462 - RNA, 20 nt, Artificial Sequence
  Synthetic
cuaguuaaaagaaugaacuc

SEQ ID NO: 98463 - RNA, 19 nt, Artificial Sequence
  Synthetic
cggcauucccauugaacuc

SEQ ID NO: 98464 - RNA, 20 nt, Artificial Sequence
  Synthetic
ucggcauucccauugaacuc

SEQ ID NO: 98465 - RNA, 21 nt, Artificial Sequence
  Synthetic
aucggcauucccauugaacuc

SEQ ID NO: 98466 - RNA, 22 nt, Artificial Sequence
  Synthetic
caucggcauucccauugaacuc

SEQ ID NO: 98467 - RNA, 23 nt, Artificial Sequence
  Synthetic
acaucggcauucccauugaacuc

SEQ ID NO: 98468 - RNA, 24 nt, Artificial Sequence
  Synthetic
uacaucggcauucccauugaacuc

SEQ ID NO: 98469 - RNA, 21 nt, Artificial Sequence
  Synthetic
cagagacagcagagauaacuc

SEQ ID NO: 98470 - RNA, 23 nt, Artificial Sequence
  Synthetic
agcagagacagcagagauaacuc

SEQ ID NO: 98471 - RNA, 24 nt, Artificial Sequence
  Synthetic
aagcagagacagcagagauaacuc

SEQ ID NO: 98472 - RNA, 18 nt, Artificial Sequence
  Synthetic
cuucuucucaucuaacuc

SEQ ID NO: 98473 - RNA, 19 nt, Artificial Sequence
  Synthetic
ccuucuucucaucuaacuc

SEQ ID NO: 98474 - RNA, 20 nt, Artificial Sequence
  Synthetic
uccuucuucucaucuaacuc

SEQ ID NO: 98475 - RNA, 21 nt, Artificial Sequence
  Synthetic
cuccuucuucucaucuaacuc

SEQ ID NO: 98476 - RNA, 22 nt, Artificial Sequence
  Synthetic
ucuccuucuucucaucuaacuc

SEQ ID NO: 98477 - RNA, 23 nt, Artificial Sequence
  Synthetic
cucuccuucuucucaucuaacuc

SEQ ID NO: 98478 - RNA, 24 nt, Artificial Sequence
  Synthetic
ucucuccuucuucucaucuaacuc

SEQ ID NO: 98479 - RNA, 21 nt, Artificial Sequence
  Synthetic
agggacauuuagcuguaacuc

SEQ ID NO: 98480 - RNA, 22 nt, Artificial Sequence
  Synthetic
cagggacauuuagcuguaacuc

SEQ ID NO: 98481 - RNA, 23 nt, Artificial Sequence
  Synthetic
acagggacauuuagcuguaacuc

SEQ ID NO: 98482 - RNA, 18 nt, Artificial Sequence
  Synthetic
ucuugggccuggacacuc

SEQ ID NO: 98483 - RNA, 19 nt, Artificial Sequence
  Synthetic
aucuugggccuggacacuc

SEQ ID NO: 98484 - RNA, 20 nt, Artificial Sequence
  Synthetic
uaucuugggccuggacacuc

SEQ ID NO: 98485 - RNA, 21 nt, Artificial Sequence
  Synthetic
uuaucuugggccuggacacuc

SEQ ID NO: 98486 - RNA, 22 nt, Artificial Sequence
  Synthetic
auuaucuugggccuggacacuc

SEQ ID NO: 98487 - RNA, 23 nt, Artificial Sequence
  Synthetic
cauuaucuugggccuggacacuc

SEQ ID NO: 98488 - RNA, 24 nt, Artificial Sequence
  Synthetic
ccauuaucuugggccuggacacuc

SEQ ID NO: 98489 - RNA, 18 nt, Artificial Sequence
  Synthetic
ucaaccuuagcuacacuc

SEQ ID NO: 98490 - RNA, 19 nt, Artificial Sequence
  Synthetic
cucaaccuuagcuacacuc

SEQ ID NO: 98491 - RNA, 20 nt, Artificial Sequence
  Synthetic
ucucaaccuuagcuacacuc

SEQ ID NO: 98492 - RNA, 18 nt, Artificial Sequence
  Synthetic
auuuuguuuucuucacuc

SEQ ID NO: 98493 - RNA, 19 nt, Artificial Sequence
  Synthetic
uauuuuguuuucuucacuc

SEQ ID NO: 98494 - RNA, 20 nt, Artificial Sequence
  Synthetic
auauuuuguuuucuucacuc

SEQ ID NO: 98495 - RNA, 21 nt, Artificial Sequence
  Synthetic
aauauuuuguuuucuucacuc

SEQ ID NO: 98496 - RNA, 22 nt, Artificial Sequence
  Synthetic
caauauuuuguuuucuucacuc

SEQ ID NO: 98497 - RNA, 23 nt, Artificial Sequence
  Synthetic
ucaauauuuuguuuucuucacuc

SEQ ID NO: 98498 - RNA, 24 nt, Artificial Sequence
  Synthetic
uucaauauuuuguuuucuucacuc

SEQ ID NO: 98499 - RNA, 18 nt, Artificial Sequence
  Synthetic
ucuuuuaaaauaagacuc

SEQ ID NO: 98500 - RNA, 20 nt, Artificial Sequence
  Synthetic
ugucuuuuaaaauaagacuc

SEQ ID NO: 98501 - RNA, 21 nt, Artificial Sequence
  Synthetic
cugucuuuuaaaauaagacuc

SEQ ID NO: 98502 - RNA, 23 nt, Artificial Sequence
  Synthetic
ugcugucuuuuaaaauaagacuc

SEQ ID NO: 98503 - RNA, 24 nt, Artificial Sequence
  Synthetic
augcugucuuuuaaaauaagacuc

SEQ ID NO: 98504 - RNA, 19 nt, Artificial Sequence
  Synthetic
cgacagagaggggagacuc

SEQ ID NO: 98505 - RNA, 21 nt, Artificial Sequence
  Synthetic
agcgacagagaggggagacuc

SEQ ID NO: 98506 - RNA, 22 nt, Artificial Sequence
  Synthetic
aagcgacagagaggggagacuc

SEQ ID NO: 98507 - RNA, 23 nt, Artificial Sequence
  Synthetic
caagcgacagagaggggagacuc

SEQ ID NO: 98508 - RNA, 24 nt, Artificial Sequence
  Synthetic
acaagcgacagagaggggagacuc

SEQ ID NO: 98509 - RNA, 21 nt, Artificial Sequence
  Synthetic
accagacacuuuacuagacuc

SEQ ID NO: 98510 - RNA, 22 nt, Artificial Sequence
  Synthetic
caccagacacuuuacuagacuc

SEQ ID NO: 98511 - RNA, 23 nt, Artificial Sequence
  Synthetic
acaccagacacuuuacuagacuc

SEQ ID NO: 98512 - RNA, 24 nt, Artificial Sequence
  Synthetic
uacaccagacacuuuacuagacuc

SEQ ID NO: 98513 - RNA, 18 nt, Artificial Sequence
  Synthetic
uauuuuuaauguagacuc

SEQ ID NO: 98514 - RNA, 19 nt, Artificial Sequence
  Synthetic
cuauuuuuaauguagacuc

SEQ ID NO: 98515 - RNA, 20 nt, Artificial Sequence
  Synthetic
ucuauuuuuaauguagacuc

SEQ ID NO: 98516 - RNA, 21 nt, Artificial Sequence
  Synthetic
cucuauuuuuaauguagacuc

SEQ ID NO: 98517 - RNA, 22 nt, Artificial Sequence
  Synthetic
ucucuauuuuuaauguagacuc

SEQ ID NO: 98518 - RNA, 23 nt, Artificial Sequence
  Synthetic
aucucuauuuuuaauguagacuc

SEQ ID NO: 98519 - RNA, 24 nt, Artificial Sequence
  Synthetic
aaucucuauuuuuaauguagacuc

SEQ ID NO: 98520 - RNA, 18 nt, Artificial Sequence
  Synthetic
uggaaacaaauucgacuc

SEQ ID NO: 98521 - RNA, 19 nt, Artificial Sequence
  Synthetic
auggaaacaaauucgacuc

SEQ ID NO: 98522 - RNA, 21 nt, Artificial Sequence
  Synthetic
agauggaaacaaauucgacuc

SEQ ID NO: 98523 - RNA, 22 nt, Artificial Sequence
  Synthetic
cagauggaaacaaauucgacuc

SEQ ID NO: 98524 - RNA, 23 nt, Artificial Sequence
  Synthetic
ucagauggaaacaaauucgacuc

SEQ ID NO: 98525 - RNA, 18 nt, Artificial Sequence
  Synthetic
aggggaaagccuggacuc

SEQ ID NO: 98526 - RNA, 19 nt, Artificial Sequence
  Synthetic
caggggaaagccuggacuc

SEQ ID NO: 98527 - RNA, 21 nt, Artificial Sequence
  Synthetic
ugcaggggaaagccuggacuc

SEQ ID NO: 98528 - RNA, 22 nt, Artificial Sequence
  Synthetic
uugcaggggaaagccuggacuc

SEQ ID NO: 98529 - RNA, 23 nt, Artificial Sequence
  Synthetic
cuugcaggggaaagccuggacuc

SEQ ID NO: 98530 - RNA, 18 nt, Artificial Sequence
  Synthetic
uagucuucaaccugacuc

SEQ ID NO: 98531 - RNA, 19 nt, Artificial Sequence
  Synthetic
auagucuucaaccugacuc

SEQ ID NO: 98532 - RNA, 20 nt, Artificial Sequence
  Synthetic
aauagucuucaaccugacuc

SEQ ID NO: 98533 - RNA, 21 nt, Artificial Sequence
  Synthetic
uaauagucuucaaccugacuc

SEQ ID NO: 98534 - RNA, 22 nt, Artificial Sequence
  Synthetic
uuaauagucuucaaccugacuc

SEQ ID NO: 98535 - RNA, 23 nt, Artificial Sequence
  Synthetic
cuuaauagucuucaaccugacuc

SEQ ID NO: 98536 - RNA, 24 nt, Artificial Sequence
  Synthetic
ucuuaauagucuucaaccugacuc

SEQ ID NO: 98537 - RNA, 20 nt, Artificial Sequence
  Synthetic
uggugugguugcauugacuc

SEQ ID NO: 98538 - RNA, 22 nt, Artificial Sequence
  Synthetic
uguggugugguugcauugacuc

SEQ ID NO: 98539 - RNA, 23 nt, Artificial Sequence
  Synthetic
uuguggugugguugcauugacuc

SEQ ID NO: 98540 - RNA, 24 nt, Artificial Sequence
  Synthetic
uuuguggugugguugcauugacuc

SEQ ID NO: 98541 - RNA, 18 nt, Artificial Sequence
  Synthetic
agaaaccaggaucuacuc

SEQ ID NO: 98542 - RNA, 19 nt, Artificial Sequence
  Synthetic
cagaaaccaggaucuacuc

SEQ ID NO: 98543 - RNA, 20 nt, Artificial Sequence
  Synthetic
acagaaaccaggaucuacuc

SEQ ID NO: 98544 - RNA, 18 nt, Artificial Sequence
  Synthetic
aaaauucucuaaguacuc

SEQ ID NO: 98545 - RNA, 20 nt, Artificial Sequence
  Synthetic
agaaaauucucuaaguacuc

SEQ ID NO: 98546 - RNA, 21 nt, Artificial Sequence
  Synthetic
cagaaaauucucuaaguacuc

SEQ ID NO: 98547 - RNA, 22 nt, Artificial Sequence
  Synthetic
ucagaaaauucucuaaguacuc

SEQ ID NO: 98548 - RNA, 23 nt, Artificial Sequence
  Synthetic
uucagaaaauucucuaaguacuc

SEQ ID NO: 98549 - RNA, 24 nt, Artificial Sequence
  Synthetic
uuucagaaaauucucuaaguacuc

SEQ ID NO: 98550 - RNA, 18 nt, Artificial Sequence
  Synthetic
agaauaaaaaaauuacuc

SEQ ID NO: 98551 - RNA, 19 nt, Artificial Sequence
  Synthetic
aagaauaaaaaaauuacuc

SEQ ID NO: 98552 - RNA, 21 nt, Artificial Sequence
  Synthetic
agaagaauaaaaaaauuacuc

SEQ ID NO: 98553 - RNA, 22 nt, Artificial Sequence
  Synthetic
uagaagaauaaaaaaauuacuc

SEQ ID NO: 98554 - RNA, 23 nt, Artificial Sequence
  Synthetic
auagaagaauaaaaaaauuacuc

SEQ ID NO: 98555 - RNA, 24 nt, Artificial Sequence
  Synthetic
aauagaagaauaaaaaaauuacuc

SEQ ID NO: 98556 - RNA, 18 nt, Artificial Sequence
  Synthetic
auuugccaaaaauuacuc

SEQ ID NO: 98557 - RNA, 19 nt, Artificial Sequence
  Synthetic
cauuugccaaaaauuacuc

SEQ ID NO: 98558 - RNA, 20 nt, Artificial Sequence
  Synthetic
ucauuugccaaaaauuacuc

SEQ ID NO: 98559 - RNA, 21 nt, Artificial Sequence
  Synthetic
aucauuugccaaaaauuacuc

SEQ ID NO: 98560 - RNA, 24 nt, Artificial Sequence
  Synthetic
uggaucauuugccaaaaauuacuc

SEQ ID NO: 98561 - RNA, 18 nt, Artificial Sequence
  Synthetic
aaaucuauucaaaaccuc

SEQ ID NO: 98562 - RNA, 19 nt, Artificial Sequence
  Synthetic
aaaaucuauucaaaaccuc

SEQ ID NO: 98563 - RNA, 20 nt, Artificial Sequence
  Synthetic
caaaaucuauucaaaaccuc

SEQ ID NO: 98564 - RNA, 18 nt, Artificial Sequence
  Synthetic
cgaagcaaagugaaccuc

SEQ ID NO: 98565 - RNA, 19 nt, Artificial Sequence
  Synthetic
acgaagcaaagugaaccuc

SEQ ID NO: 98566 - RNA, 21 nt, Artificial Sequence
  Synthetic
ugacgaagcaaagugaaccuc

SEQ ID NO: 98567 - RNA, 22 nt, Artificial Sequence
  Synthetic
uugacgaagcaaagugaaccuc

SEQ ID NO: 98568 - RNA, 23 nt, Artificial Sequence
  Synthetic
uuugacgaagcaaagugaaccuc

SEQ ID NO: 98569 - RNA, 24 nt, Artificial Sequence
  Synthetic
cuuugacgaagcaaagugaaccuc

SEQ ID NO: 98570 - RNA, 18 nt, Artificial Sequence
  Synthetic
cugguaagggaacaccuc

SEQ ID NO: 98571 - RNA, 19 nt, Artificial Sequence
  Synthetic
acugguaagggaacaccuc

SEQ ID NO: 98572 - RNA, 21 nt, Artificial Sequence
  Synthetic
ugacugguaagggaacaccuc

SEQ ID NO: 98573 - RNA, 22 nt, Artificial Sequence
  Synthetic
uugacugguaagggaacaccuc

SEQ ID NO: 98574 - RNA, 23 nt, Artificial Sequence
  Synthetic
cuugacugguaagggaacaccuc

SEQ ID NO: 98575 - RNA, 24 nt, Artificial Sequence
  Synthetic
acuugacugguaagggaacaccuc

SEQ ID NO: 98576 - RNA, 20 nt, Artificial Sequence
  Synthetic
aggauguaugucuucaccuc

SEQ ID NO: 98577 - RNA, 21 nt, Artificial Sequence
  Synthetic
uaggauguaugucuucaccuc

SEQ ID NO: 98578 - RNA, 22 nt, Artificial Sequence
  Synthetic
uuaggauguaugucuucaccuc

SEQ ID NO: 98579 - RNA, 23 nt, Artificial Sequence
  Synthetic
cuuaggauguaugucuucaccuc

SEQ ID NO: 98580 - RNA, 24 nt, Artificial Sequence
  Synthetic
ucuuaggauguaugucuucaccuc

SEQ ID NO: 98581 - RNA, 20 nt, Artificial Sequence
  Synthetic
uggaggggaagagagaccuc

SEQ ID NO: 98582 - RNA, 21 nt, Artificial Sequence
  Synthetic
auggaggggaagagagaccuc

SEQ ID NO: 98583 - RNA, 23 nt, Artificial Sequence
  Synthetic
ugauggaggggaagagagaccuc

SEQ ID NO: 98584 - RNA, 24 nt, Artificial Sequence
  Synthetic
cugauggaggggaagagagaccuc

SEQ ID NO: 98585 - RNA, 18 nt, Artificial Sequence
  Synthetic
cugggagaacuugaccuc

SEQ ID NO: 98586 - RNA, 19 nt, Artificial Sequence
  Synthetic
ucugggagaacuugaccuc

SEQ ID NO: 98587 - RNA, 20 nt, Artificial Sequence
  Synthetic
uucugggagaacuugaccuc

SEQ ID NO: 98588 - RNA, 21 nt, Artificial Sequence
  Synthetic
uuucugggagaacuugaccuc

SEQ ID NO: 98589 - RNA, 22 nt, Artificial Sequence
  Synthetic
cuuucugggagaacuugaccuc

SEQ ID NO: 98590 - RNA, 24 nt, Artificial Sequence
  Synthetic
ugcuuucugggagaacuugaccuc

SEQ ID NO: 98591 - RNA, 18 nt, Artificial Sequence
  Synthetic
ugaugguaccuauaccuc

SEQ ID NO: 98592 - RNA, 19 nt, Artificial Sequence
  Synthetic
augaugguaccuauaccuc

SEQ ID NO: 98593 - RNA, 20 nt, Artificial Sequence
  Synthetic
caugaugguaccuauaccuc

SEQ ID NO: 98594 - RNA, 21 nt, Artificial Sequence
  Synthetic
ucaugaugguaccuauaccuc

SEQ ID NO: 98595 - RNA, 22 nt, Artificial Sequence
  Synthetic
uucaugaugguaccuauaccuc

SEQ ID NO: 98596 - RNA, 23 nt, Artificial Sequence
  Synthetic
cuucaugaugguaccuauaccuc

SEQ ID NO: 98597 - RNA, 24 nt, Artificial Sequence
  Synthetic
ccuucaugaugguaccuauaccuc

SEQ ID NO: 98598 - RNA, 18 nt, Artificial Sequence
  Synthetic
uaacaugcugacuaccuc

SEQ ID NO: 98599 - RNA, 19 nt, Artificial Sequence
  Synthetic
auaacaugcugacuaccuc

SEQ ID NO: 98600 - RNA, 20 nt, Artificial Sequence
  Synthetic
cauaacaugcugacuaccuc

SEQ ID NO: 98601 - RNA, 22 nt, Artificial Sequence
  Synthetic
agcauaacaugcugacuaccuc

SEQ ID NO: 98602 - RNA, 23 nt, Artificial Sequence
  Synthetic
uagcauaacaugcugacuaccuc

SEQ ID NO: 98603 - RNA, 18 nt, Artificial Sequence
  Synthetic
acaaugauauacuaccuc

SEQ ID NO: 98604 - RNA, 19 nt, Artificial Sequence
  Synthetic
cacaaugauauacuaccuc

SEQ ID NO: 98605 - RNA, 20 nt, Artificial Sequence
  Synthetic
ccacaaugauauacuaccuc

SEQ ID NO: 98606 - RNA, 21 nt, Artificial Sequence
  Synthetic
uccacaaugauauacuaccuc

SEQ ID NO: 98607 - RNA, 22 nt, Artificial Sequence
  Synthetic
auccacaaugauauacuaccuc

SEQ ID NO: 98608 - RNA, 23 nt, Artificial Sequence
  Synthetic
aauccacaaugauauacuaccuc

SEQ ID NO: 98609 - RNA, 24 nt, Artificial Sequence
  Synthetic
aaauccacaaugauauacuaccuc

SEQ ID NO: 98610 - RNA, 18 nt, Artificial Sequence
  Synthetic
ugcacauuguaaacccuc

SEQ ID NO: 98611 - RNA, 19 nt, Artificial Sequence
  Synthetic
uugcacauuguaaacccuc

SEQ ID NO: 98612 - RNA, 20 nt, Artificial Sequence
  Synthetic
uuugcacauuguaaacccuc

SEQ ID NO: 98613 - RNA, 21 nt, Artificial Sequence
  Synthetic
cuuugcacauuguaaacccuc

SEQ ID NO: 98614 - RNA, 23 nt, Artificial Sequence
  Synthetic
ugcuuugcacauuguaaacccuc

SEQ ID NO: 98615 - RNA, 24 nt, Artificial Sequence
  Synthetic
augcuuugcacauuguaaacccuc

SEQ ID NO: 98616 - RNA, 18 nt, Artificial Sequence
  Synthetic
cuccucucaacaacccuc

SEQ ID NO: 98617 - RNA, 19 nt, Artificial Sequence
  Synthetic
ucuccucucaacaacccuc

SEQ ID NO: 98618 - RNA, 20 nt, Artificial Sequence
  Synthetic
uucuccucucaacaacccuc

SEQ ID NO: 98619 - RNA, 18 nt, Artificial Sequence
  Synthetic
agagcauuugccacccuc

SEQ ID NO: 98620 - RNA, 20 nt, Artificial Sequence
  Synthetic
agagagcauuugccacccuc

SEQ ID NO: 98621 - RNA, 22 nt, Artificial Sequence
  Synthetic
agagagagcauuugccacccuc

SEQ ID NO: 98622 - RNA, 24 nt, Artificial Sequence
  Synthetic
ugagagagagcauuugccacccuc

SEQ ID NO: 98623 - RNA, 21 nt, Artificial Sequence
  Synthetic
ugggaagugugggugacccuc

SEQ ID NO: 98624 - RNA, 22 nt, Artificial Sequence
  Synthetic
uugggaagugugggugacccuc

SEQ ID NO: 98625 - RNA, 23 nt, Artificial Sequence
  Synthetic
auugggaagugugggugacccuc

SEQ ID NO: 98626 - RNA, 24 nt, Artificial Sequence
  Synthetic
cauugggaagugugggugacccuc

SEQ ID NO: 98627 - RNA, 18 nt, Artificial Sequence
  Synthetic
aauuagaauguugcccuc

SEQ ID NO: 98628 - RNA, 19 nt, Artificial Sequence
  Synthetic
uaauuagaauguugcccuc

SEQ ID NO: 98629 - RNA, 20 nt, Artificial Sequence
  Synthetic
auaauuagaauguugcccuc

SEQ ID NO: 98630 - RNA, 22 nt, Artificial Sequence
  Synthetic
agauaauuagaauguugcccuc

SEQ ID NO: 98631 - RNA, 23 nt, Artificial Sequence
  Synthetic
aagauaauuagaauguugcccuc

SEQ ID NO: 98632 - RNA, 24 nt, Artificial Sequence
  Synthetic
aaagauaauuagaauguugcccuc

SEQ ID NO: 98633 - RNA, 18 nt, Artificial Sequence
  Synthetic
auaaaucaauuugcccuc

SEQ ID NO: 98634 - RNA, 19 nt, Artificial Sequence
  Synthetic
aauaaaucaauuugcccuc

SEQ ID NO: 98635 - RNA, 21 nt, Artificial Sequence
  Synthetic
ugaauaaaucaauuugcccuc

SEQ ID NO: 98636 - RNA, 22 nt, Artificial Sequence
  Synthetic
uugaauaaaucaauuugcccuc

SEQ ID NO: 98637 - RNA, 23 nt, Artificial Sequence
  Synthetic
cuugaauaaaucaauuugcccuc

SEQ ID NO: 98638 - RNA, 24 nt, Artificial Sequence
  Synthetic
ucuugaauaaaucaauuugcccuc

SEQ ID NO: 98639 - RNA, 18 nt, Artificial Sequence
  Synthetic
uuagcauauuugucccuc

SEQ ID NO: 98640 - RNA, 19 nt, Artificial Sequence
  Synthetic
uuuagcauauuugucccuc

SEQ ID NO: 98641 - RNA, 20 nt, Artificial Sequence
  Synthetic
uuuuagcauauuugucccuc

SEQ ID NO: 98642 - RNA, 21 nt, Artificial Sequence
  Synthetic
uuuuuagcauauuugucccuc

SEQ ID NO: 98643 - RNA, 22 nt, Artificial Sequence
  Synthetic
auuuuuagcauauuugucccuc

SEQ ID NO: 98644 - RNA, 24 nt, Artificial Sequence
  Synthetic
agauuuuuagcauauuugucccuc

SEQ ID NO: 98645 - RNA, 19 nt, Artificial Sequence
  Synthetic
agcaaauuaacuuucccuc

SEQ ID NO: 98646 - RNA, 21 nt, Artificial Sequence
  Synthetic
agagcaaauuaacuuucccuc

SEQ ID NO: 98647 - RNA, 22 nt, Artificial Sequence
  Synthetic
aagagcaaauuaacuuucccuc

SEQ ID NO: 98648 - RNA, 23 nt, Artificial Sequence
  Synthetic
caagagcaaauuaacuuucccuc

SEQ ID NO: 98649 - RNA, 24 nt, Artificial Sequence
  Synthetic
ucaagagcaaauuaacuuucccuc

SEQ ID NO: 98650 - RNA, 18 nt, Artificial Sequence
  Synthetic
aacaaauucaucagccuc

SEQ ID NO: 98651 - RNA, 20 nt, Artificial Sequence
  Synthetic
ugaacaaauucaucagccuc

SEQ ID NO: 98652 - RNA, 22 nt, Artificial Sequence
  Synthetic
ugugaacaaauucaucagccuc

SEQ ID NO: 98653 - RNA, 23 nt, Artificial Sequence
  Synthetic
augugaacaaauucaucagccuc

SEQ ID NO: 98654 - RNA, 24 nt, Artificial Sequence
  Synthetic
aaugugaacaaauucaucagccuc

SEQ ID NO: 98655 - RNA, 18 nt, Artificial Sequence
  Synthetic
cacaauuaaucacgccuc

SEQ ID NO: 98656 - RNA, 19 nt, Artificial Sequence
  Synthetic
ccacaauuaaucacgccuc

SEQ ID NO: 98657 - RNA, 20 nt, Artificial Sequence
  Synthetic
cccacaauuaaucacgccuc

SEQ ID NO: 98658 - RNA, 21 nt, Artificial Sequence
  Synthetic
ccccacaauuaaucacgccuc

SEQ ID NO: 98659 - RNA, 23 nt, Artificial Sequence
  Synthetic
agccccacaauuaaucacgccuc

SEQ ID NO: 98660 - RNA, 24 nt, Artificial Sequence
  Synthetic
cagccccacaauuaaucacgccuc

SEQ ID NO: 98661 - RNA, 18 nt, Artificial Sequence
  Synthetic
uuacaaggcauuggccuc

SEQ ID NO: 98662 - RNA, 20 nt, Artificial Sequence
  Synthetic
uguuacaaggcauuggccuc

SEQ ID NO: 98663 - RNA, 21 nt, Artificial Sequence
  Synthetic
auguuacaaggcauuggccuc

SEQ ID NO: 98664 - RNA, 22 nt, Artificial Sequence
  Synthetic
uauguuacaaggcauuggccuc

SEQ ID NO: 98665 - RNA, 23 nt, Artificial Sequence
  Synthetic
cuauguuacaaggcauuggccuc

SEQ ID NO: 98666 - RNA, 24 nt, Artificial Sequence
  Synthetic
acuauguuacaaggcauuggccuc

SEQ ID NO: 98667 - RNA, 18 nt, Artificial Sequence
  Synthetic
ugcagguuugccugccuc

SEQ ID NO: 98668 - RNA, 19 nt, Artificial Sequence
  Synthetic
augcagguuugccugccuc

SEQ ID NO: 98669 - RNA, 20 nt, Artificial Sequence
  Synthetic
uaugcagguuugccugccuc

SEQ ID NO: 98670 - RNA, 21 nt, Artificial Sequence
  Synthetic
auaugcagguuugccugccuc

SEQ ID NO: 98671 - RNA, 22 nt, Artificial Sequence
  Synthetic
uauaugcagguuugccugccuc

SEQ ID NO: 98672 - RNA, 23 nt, Artificial Sequence
  Synthetic
cuauaugcagguuugccugccuc

SEQ ID NO: 98673 - RNA, 24 nt, Artificial Sequence
  Synthetic
ccuauaugcagguuugccugccuc

SEQ ID NO: 98674 - RNA, 18 nt, Artificial Sequence
  Synthetic
agcuccuuuacgugccuc

SEQ ID NO: 98675 - RNA, 20 nt, Artificial Sequence
  Synthetic
ugagcuccuuuacgugccuc

SEQ ID NO: 98676 - RNA, 21 nt, Artificial Sequence
  Synthetic
augagcuccuuuacgugccuc

SEQ ID NO: 98677 - RNA, 22 nt, Artificial Sequence
  Synthetic
aaugagcuccuuuacgugccuc

SEQ ID NO: 98678 - RNA, 23 nt, Artificial Sequence
  Synthetic
aaaugagcuccuuuacgugccuc

SEQ ID NO: 98679 - RNA, 24 nt, Artificial Sequence
  Synthetic
caaaugagcuccuuuacgugccuc

SEQ ID NO: 98680 - RNA, 18 nt, Artificial Sequence
  Synthetic
caguagggaaugugccuc

SEQ ID NO: 98681 - RNA, 19 nt, Artificial Sequence
  Synthetic
acaguagggaaugugccuc

SEQ ID NO: 98682 - RNA, 20 nt, Artificial Sequence
  Synthetic
cacaguagggaaugugccuc

SEQ ID NO: 98683 - RNA, 21 nt, Artificial Sequence
  Synthetic
ucacaguagggaaugugccuc

SEQ ID NO: 98684 - RNA, 22 nt, Artificial Sequence
  Synthetic
aucacaguagggaaugugccuc

SEQ ID NO: 98685 - RNA, 23 nt, Artificial Sequence
  Synthetic
caucacaguagggaaugugccuc

SEQ ID NO: 98686 - RNA, 24 nt, Artificial Sequence
  Synthetic
acaucacaguagggaaugugccuc

SEQ ID NO: 98687 - RNA, 19 nt, Artificial Sequence
  Synthetic
ugaaaacagcuugugccuc

SEQ ID NO: 98688 - RNA, 20 nt, Artificial Sequence
  Synthetic
augaaaacagcuugugccuc

SEQ ID NO: 98689 - RNA, 24 nt, Artificial Sequence
  Synthetic
ugggaugaaaacagcuugugccuc

SEQ ID NO: 98690 - RNA, 21 nt, Artificial Sequence
  Synthetic
ucauugccauggaaaauccuc

SEQ ID NO: 98691 - RNA, 22 nt, Artificial Sequence
  Synthetic
uucauugccauggaaaauccuc

SEQ ID NO: 98692 - RNA, 23 nt, Artificial Sequence
  Synthetic
uuucauugccauggaaaauccuc

SEQ ID NO: 98693 - RNA, 24 nt, Artificial Sequence
  Synthetic
auuucauugccauggaaaauccuc

SEQ ID NO: 98694 - RNA, 18 nt, Artificial Sequence
  Synthetic
auugaaauuugcauccuc

SEQ ID NO: 98695 - RNA, 19 nt, Artificial Sequence
  Synthetic
cauugaaauuugcauccuc

SEQ ID NO: 98696 - RNA, 20 nt, Artificial Sequence
  Synthetic
acauugaaauuugcauccuc

SEQ ID NO: 98697 - RNA, 21 nt, Artificial Sequence
  Synthetic
aacauugaaauuugcauccuc

SEQ ID NO: 98698 - RNA, 22 nt, Artificial Sequence
  Synthetic
caacauugaaauuugcauccuc

SEQ ID NO: 98699 - RNA, 23 nt, Artificial Sequence
  Synthetic
ucaacauugaaauuugcauccuc

SEQ ID NO: 98700 - RNA, 24 nt, Artificial Sequence
  Synthetic
uucaacauugaaauuugcauccuc

SEQ ID NO: 98701 - RNA, 18 nt, Artificial Sequence
  Synthetic
agaaaaaaaucacuccuc

SEQ ID NO: 98702 - RNA, 21 nt, Artificial Sequence
  Synthetic
uggagaaaaaaaucacuccuc

SEQ ID NO: 98703 - RNA, 22 nt, Artificial Sequence
  Synthetic
uuggagaaaaaaaucacuccuc

SEQ ID NO: 98704 - RNA, 24 nt, Artificial Sequence
  Synthetic
cguuggagaaaaaaaucacuccuc

SEQ ID NO: 98705 - RNA, 18 nt, Artificial Sequence
  Synthetic
uuuagaagagaaaagcuc

SEQ ID NO: 98706 - RNA, 19 nt, Artificial Sequence
  Synthetic
uuuuagaagagaaaagcuc

SEQ ID NO: 98707 - RNA, 20 nt, Artificial Sequence
  Synthetic
auuuuagaagagaaaagcuc

SEQ ID NO: 98708 - RNA, 21 nt, Artificial Sequence
  Synthetic
uauuuuagaagagaaaagcuc

SEQ ID NO: 98709 - RNA, 22 nt, Artificial Sequence
  Synthetic
cuauuuuagaagagaaaagcuc

SEQ ID NO: 98710 - RNA, 23 nt, Artificial Sequence
  Synthetic
acuauuuuagaagagaaaagcuc

SEQ ID NO: 98711 - RNA, 24 nt, Artificial Sequence
  Synthetic
uacuauuuuagaagagaaaagcuc

SEQ ID NO: 98712 - RNA, 19 nt, Artificial Sequence
  Synthetic
agcauauauguaaaagcuc

SEQ ID NO: 98713 - RNA, 21 nt, Artificial Sequence
  Synthetic
agagcauauauguaaaagcuc

SEQ ID NO: 98714 - RNA, 22 nt, Artificial Sequence
  Synthetic
cagagcauauauguaaaagcuc

SEQ ID NO: 98715 - RNA, 23 nt, Artificial Sequence
  Synthetic
ucagagcauauauguaaaagcuc

SEQ ID NO: 98716 - RNA, 24 nt, Artificial Sequence
  Synthetic
aucagagcauauauguaaaagcuc

SEQ ID NO: 98717 - RNA, 21 nt, Artificial Sequence
  Synthetic
uuuuuuccucuccuaaagcuc

SEQ ID NO: 98718 - RNA, 22 nt, Artificial Sequence
  Synthetic
uuuuuuuccucuccuaaagcuc

SEQ ID NO: 98719 - RNA, 23 nt, Artificial Sequence
  Synthetic
auuuuuuuccucuccuaaagcuc

SEQ ID NO: 98720 - RNA, 24 nt, Artificial Sequence
  Synthetic
cauuuuuuuccucuccuaaagcuc

SEQ ID NO: 98721 - RNA, 19 nt, Artificial Sequence
  Synthetic
ugauuaauagcauaagcuc

SEQ ID NO: 98722 - RNA, 20 nt, Artificial Sequence
  Synthetic
cugauuaauagcauaagcuc

SEQ ID NO: 98723 - RNA, 21 nt, Artificial Sequence
  Synthetic
acugauuaauagcauaagcuc

SEQ ID NO: 98724 - RNA, 22 nt, Artificial Sequence
  Synthetic
cacugauuaauagcauaagcuc

SEQ ID NO: 98725 - RNA, 24 nt, Artificial Sequence
  Synthetic
ugcacugauuaauagcauaagcuc

SEQ ID NO: 98726 - RNA, 19 nt, Artificial Sequence
  Synthetic
agacucugauccccagcuc

SEQ ID NO: 98727 - RNA, 20 nt, Artificial Sequence
  Synthetic
aagacucugauccccagcuc

SEQ ID NO: 98728 - RNA, 22 nt, Artificial Sequence
  Synthetic
agaagacucugauccccagcuc

SEQ ID NO: 98729 - RNA, 23 nt, Artificial Sequence
  Synthetic
cagaagacucugauccccagcuc

SEQ ID NO: 98730 - RNA, 24 nt, Artificial Sequence
  Synthetic
ccagaagacucugauccccagcuc

SEQ ID NO: 98731 - RNA, 21 nt, Artificial Sequence
  Synthetic
caugaugagaauuuccagcuc

SEQ ID NO: 98732 - RNA, 22 nt, Artificial Sequence
  Synthetic
acaugaugagaauuuccagcuc

SEQ ID NO: 98733 - RNA, 24 nt, Artificial Sequence
  Synthetic
agacaugaugagaauuuccagcuc

SEQ ID NO: 98734 - RNA, 18 nt, Artificial Sequence
  Synthetic
cugcaaagugaauagcuc

SEQ ID NO: 98735 - RNA, 20 nt, Artificial Sequence
  Synthetic
ugcugcaaagugaauagcuc

SEQ ID NO: 98736 - RNA, 23 nt, Artificial Sequence
  Synthetic
aggugcugcaaagugaauagcuc

SEQ ID NO: 98737 - RNA, 24 nt, Artificial Sequence
  Synthetic
caggugcugcaaagugaauagcuc

SEQ ID NO: 98738 - RNA, 18 nt, Artificial Sequence
  Synthetic
uccuuuaauagauagcuc

SEQ ID NO: 98739 - RNA, 20 nt, Artificial Sequence
  Synthetic
aguccuuuaauagauagcuc

SEQ ID NO: 98740 - RNA, 21 nt, Artificial Sequence
  Synthetic
uaguccuuuaauagauagcuc

SEQ ID NO: 98741 - RNA, 23 nt, Artificial Sequence
  Synthetic
aguaguccuuuaauagauagcuc

SEQ ID NO: 98742 - RNA, 24 nt, Artificial Sequence
  Synthetic
uaguaguccuuuaauagauagcuc

SEQ ID NO: 98743 - RNA, 18 nt, Artificial Sequence
  Synthetic
acagcauguaugacgcuc

SEQ ID NO: 98744 - RNA, 19 nt, Artificial Sequence
  Synthetic
aacagcauguaugacgcuc

SEQ ID NO: 98745 - RNA, 20 nt, Artificial Sequence
  Synthetic
aaacagcauguaugacgcuc

SEQ ID NO: 98746 - RNA, 21 nt, Artificial Sequence
  Synthetic
aaaacagcauguaugacgcuc

SEQ ID NO: 98747 - RNA, 23 nt, Artificial Sequence
  Synthetic
agaaaacagcauguaugacgcuc

SEQ ID NO: 98748 - RNA, 18 nt, Artificial Sequence
  Synthetic
aggucuguugugaggcuc

SEQ ID NO: 98749 - RNA, 19 nt, Artificial Sequence
  Synthetic
uaggucuguugugaggcuc

SEQ ID NO: 98750 - RNA, 18 nt, Artificial Sequence
  Synthetic
acauauuccucagggcuc

SEQ ID NO: 98751 - RNA, 21 nt, Artificial Sequence
  Synthetic
uggacauauuccucagggcuc

SEQ ID NO: 98752 - RNA, 22 nt, Artificial Sequence
  Synthetic
uuggacauauuccucagggcuc

SEQ ID NO: 98753 - RNA, 23 nt, Artificial Sequence
  Synthetic
uuuggacauauuccucagggcuc

SEQ ID NO: 98754 - RNA, 24 nt, Artificial Sequence
  Synthetic
cuuuggacauauuccucagggcuc

SEQ ID NO: 98755 - RNA, 18 nt, Artificial Sequence
  Synthetic
aauuuccuucuagggcuc

SEQ ID NO: 98756 - RNA, 19 nt, Artificial Sequence
  Synthetic
caauuuccuucuagggcuc

SEQ ID NO: 98757 - RNA, 20 nt, Artificial Sequence
  Synthetic
ucaauuuccuucuagggcuc

SEQ ID NO: 98758 - RNA, 21 nt, Artificial Sequence
  Synthetic
uucaauuuccuucuagggcuc

SEQ ID NO: 98759 - RNA, 22 nt, Artificial Sequence
  Synthetic
cuucaauuuccuucuagggcuc

SEQ ID NO: 98760 - RNA, 23 nt, Artificial Sequence
  Synthetic
ucuucaauuuccuucuagggcuc

SEQ ID NO: 98761 - RNA, 21 nt, Artificial Sequence
  Synthetic
acuggugaagaguaugggcuc

SEQ ID NO: 98762 - RNA, 22 nt, Artificial Sequence
  Synthetic
uacuggugaagaguaugggcuc

SEQ ID NO: 98763 - RNA, 23 nt, Artificial Sequence
  Synthetic
uuacuggugaagaguaugggcuc

SEQ ID NO: 98764 - RNA, 24 nt, Artificial Sequence
  Synthetic
cuuacuggugaagaguaugggcuc

SEQ ID NO: 98765 - RNA, 21 nt, Artificial Sequence
  Synthetic
aguucagauucugcugggcuc

SEQ ID NO: 98766 - RNA, 24 nt, Artificial Sequence
  Synthetic
aggaguucagauucugcugggcuc

SEQ ID NO: 98767 - RNA, 19 nt, Artificial Sequence
  Synthetic
ugguacgggucuguggcuc

SEQ ID NO: 98768 - RNA, 20 nt, Artificial Sequence
  Synthetic
uugguacgggucuguggcuc

SEQ ID NO: 98769 - RNA, 21 nt, Artificial Sequence
  Synthetic
auugguacgggucuguggcuc

SEQ ID NO: 98770 - RNA, 24 nt, Artificial Sequence
  Synthetic
cggauugguacgggucuguggcuc

SEQ ID NO: 98771 - RNA, 18 nt, Artificial Sequence
  Synthetic
acccaugggcagaugcuc

SEQ ID NO: 98772 - RNA, 23 nt, Artificial Sequence
  Synthetic
aggggacccaugggcagaugcuc

SEQ ID NO: 98773 - RNA, 24 nt, Artificial Sequence
  Synthetic
aaggggacccaugggcagaugcuc

SEQ ID NO: 98774 - RNA, 18 nt, Artificial Sequence
  Synthetic
uugagauaagagaugcuc

SEQ ID NO: 98775 - RNA, 19 nt, Artificial Sequence
  Synthetic
cuugagauaagagaugcuc

SEQ ID NO: 98776 - RNA, 20 nt, Artificial Sequence
  Synthetic
ccuugagauaagagaugcuc

SEQ ID NO: 98777 - RNA, 21 nt, Artificial Sequence
  Synthetic
accuugagauaagagaugcuc

SEQ ID NO: 98778 - RNA, 22 nt, Artificial Sequence
  Synthetic
uaccuugagauaagagaugcuc

SEQ ID NO: 98779 - RNA, 24 nt, Artificial Sequence
  Synthetic
uguaccuugagauaagagaugcuc

SEQ ID NO: 98780 - RNA, 18 nt, Artificial Sequence
  Synthetic
ugagcaaaagugaugcuc

SEQ ID NO: 98781 - RNA, 20 nt, Artificial Sequence
  Synthetic
ugugagcaaaagugaugcuc

SEQ ID NO: 98782 - RNA, 22 nt, Artificial Sequence
  Synthetic
agugugagcaaaagugaugcuc

SEQ ID NO: 98783 - RNA, 21 nt, Artificial Sequence
  Synthetic
ucaauauuaucuaauaugcuc

SEQ ID NO: 98784 - RNA, 22 nt, Artificial Sequence
  Synthetic
cucaauauuaucuaauaugcuc

SEQ ID NO: 98785 - RNA, 24 nt, Artificial Sequence
  Synthetic
agcucaauauuaucuaauaugcuc

SEQ ID NO: 98786 - RNA, 18 nt, Artificial Sequence
  Synthetic
accaaaacaucacugcuc

SEQ ID NO: 98787 - RNA, 19 nt, Artificial Sequence
  Synthetic
caccaaaacaucacugcuc

SEQ ID NO: 98788 - RNA, 20 nt, Artificial Sequence
  Synthetic
ccaccaaaacaucacugcuc

SEQ ID NO: 98789 - RNA, 21 nt, Artificial Sequence
  Synthetic
uccaccaaaacaucacugcuc

SEQ ID NO: 98790 - RNA, 22 nt, Artificial Sequence
  Synthetic
cuccaccaaaacaucacugcuc

SEQ ID NO: 98791 - RNA, 23 nt, Artificial Sequence
  Synthetic
acuccaccaaaacaucacugcuc

SEQ ID NO: 98792 - RNA, 24 nt, Artificial Sequence
  Synthetic
aacuccaccaaaacaucacugcuc

SEQ ID NO: 98793 - RNA, 18 nt, Artificial Sequence
  Synthetic
ugggacagaguugugcuc

SEQ ID NO: 98794 - RNA, 19 nt, Artificial Sequence
  Synthetic
augggacagaguugugcuc

SEQ ID NO: 98795 - RNA, 20 nt, Artificial Sequence
  Synthetic
aaugggacagaguugugcuc

SEQ ID NO: 98796 - RNA, 21 nt, Artificial Sequence
  Synthetic
uaaugggacagaguugugcuc

SEQ ID NO: 98797 - RNA, 22 nt, Artificial Sequence
  Synthetic
uuaaugggacagaguugugcuc

SEQ ID NO: 98798 - RNA, 23 nt, Artificial Sequence
  Synthetic
uuuaaugggacagaguugugcuc

SEQ ID NO: 98799 - RNA, 24 nt, Artificial Sequence
  Synthetic
cuuuaaugggacagaguugugcuc

SEQ ID NO: 98800 - RNA, 18 nt, Artificial Sequence
  Synthetic
acguguuaguaauugcuc

SEQ ID NO: 98801 - RNA, 19 nt, Artificial Sequence
  Synthetic
aacguguuaguaauugcuc

SEQ ID NO: 98802 - RNA, 20 nt, Artificial Sequence
  Synthetic
caacguguuaguaauugcuc

SEQ ID NO: 98803 - RNA, 22 nt, Artificial Sequence
  Synthetic
ugcaacguguuaguaauugcuc

SEQ ID NO: 98804 - RNA, 23 nt, Artificial Sequence
  Synthetic
augcaacguguuaguaauugcuc

SEQ ID NO: 98805 - RNA, 24 nt, Artificial Sequence
  Synthetic
aaugcaacguguuaguaauugcuc

SEQ ID NO: 98806 - RNA, 18 nt, Artificial Sequence
  Synthetic
uuugcaauugcauugcuc

SEQ ID NO: 98807 - RNA, 19 nt, Artificial Sequence
  Synthetic
auuugcaauugcauugcuc

SEQ ID NO: 98808 - RNA, 20 nt, Artificial Sequence
  Synthetic
uauuugcaauugcauugcuc

SEQ ID NO: 98809 - RNA, 22 nt, Artificial Sequence
  Synthetic
uguauuugcaauugcauugcuc

SEQ ID NO: 98810 - RNA, 23 nt, Artificial Sequence
  Synthetic
auguauuugcaauugcauugcuc

SEQ ID NO: 98811 - RNA, 24 nt, Artificial Sequence
  Synthetic
cauguauuugcaauugcauugcuc

SEQ ID NO: 98812 - RNA, 18 nt, Artificial Sequence
  Synthetic
uggcaugguauauugcuc

SEQ ID NO: 98813 - RNA, 20 nt, Artificial Sequence
  Synthetic
aguggcaugguauauugcuc

SEQ ID NO: 98814 - RNA, 21 nt, Artificial Sequence
  Synthetic
uaguggcaugguauauugcuc

SEQ ID NO: 98815 - RNA, 22 nt, Artificial Sequence
  Synthetic
auaguggcaugguauauugcuc

SEQ ID NO: 98816 - RNA, 23 nt, Artificial Sequence
  Synthetic
cauaguggcaugguauauugcuc

SEQ ID NO: 98817 - RNA, 24 nt, Artificial Sequence
  Synthetic
ccauaguggcaugguauauugcuc

SEQ ID NO: 98818 - RNA, 18 nt, Artificial Sequence
  Synthetic
uaaaggccaaagaaucuc

SEQ ID NO: 98819 - RNA, 19 nt, Artificial Sequence
  Synthetic
auaaaggccaaagaaucuc

SEQ ID NO: 98820 - RNA, 20 nt, Artificial Sequence
  Synthetic
aauaaaggccaaagaaucuc

SEQ ID NO: 98821 - RNA, 21 nt, Artificial Sequence
  Synthetic
aaauaaaggccaaagaaucuc

SEQ ID NO: 98822 - RNA, 23 nt, Artificial Sequence
  Synthetic
agaaauaaaggccaaagaaucuc

SEQ ID NO: 98823 - RNA, 24 nt, Artificial Sequence
  Synthetic
aagaaauaaaggccaaagaaucuc

SEQ ID NO: 98824 - RNA, 18 nt, Artificial Sequence
  Synthetic
uaggauguugggcaucuc

SEQ ID NO: 98825 - RNA, 19 nt, Artificial Sequence
  Synthetic
cuaggauguugggcaucuc

SEQ ID NO: 98826 - RNA, 20 nt, Artificial Sequence
  Synthetic
ucuaggauguugggcaucuc

SEQ ID NO: 98827 - RNA, 21 nt, Artificial Sequence
  Synthetic
aucuaggauguugggcaucuc

SEQ ID NO: 98828 - RNA, 23 nt, Artificial Sequence
  Synthetic
ugaucuaggauguugggcaucuc

SEQ ID NO: 98829 - RNA, 18 nt, Artificial Sequence
  Synthetic
aaguaauuuccucaucuc

SEQ ID NO: 98830 - RNA, 20 nt, Artificial Sequence
  Synthetic
ugaaguaauuuccucaucuc

SEQ ID NO: 98831 - RNA, 21 nt, Artificial Sequence
  Synthetic
augaaguaauuuccucaucuc

SEQ ID NO: 98832 - RNA, 23 nt, Artificial Sequence
  Synthetic
agaugaaguaauuuccucaucuc

SEQ ID NO: 98833 - RNA, 18 nt, Artificial Sequence
  Synthetic
cauuagaagauucaucuc

SEQ ID NO: 98834 - RNA, 19 nt, Artificial Sequence
  Synthetic
acauuagaagauucaucuc

SEQ ID NO: 98835 - RNA, 20 nt, Artificial Sequence
  Synthetic
cacauuagaagauucaucuc

SEQ ID NO: 98836 - RNA, 21 nt, Artificial Sequence
  Synthetic
ucacauuagaagauucaucuc

SEQ ID NO: 98837 - RNA, 22 nt, Artificial Sequence
  Synthetic
aucacauuagaagauucaucuc

SEQ ID NO: 98838 - RNA, 23 nt, Artificial Sequence
  Synthetic
aaucacauuagaagauucaucuc

SEQ ID NO: 98839 - RNA, 24 nt, Artificial Sequence
  Synthetic
uaaucacauuagaagauucaucuc

SEQ ID NO: 98840 - RNA, 18 nt, Artificial Sequence
  Synthetic
acauugaaggcagaucuc

SEQ ID NO: 98841 - RNA, 19 nt, Artificial Sequence
  Synthetic
aacauugaaggcagaucuc

SEQ ID NO: 98842 - RNA, 20 nt, Artificial Sequence
  Synthetic
caacauugaaggcagaucuc

SEQ ID NO: 98843 - RNA, 21 nt, Artificial Sequence
  Synthetic
ccaacauugaaggcagaucuc

SEQ ID NO: 98844 - RNA, 22 nt, Artificial Sequence
  Synthetic
uccaacauugaaggcagaucuc

SEQ ID NO: 98845 - RNA, 23 nt, Artificial Sequence
  Synthetic
auccaacauugaaggcagaucuc

SEQ ID NO: 98846 - RNA, 24 nt, Artificial Sequence
  Synthetic
uauccaacauugaaggcagaucuc

SEQ ID NO: 98847 - RNA, 18 nt, Artificial Sequence
  Synthetic
acauacaauuuugaucuc

SEQ ID NO: 98848 - RNA, 19 nt, Artificial Sequence
  Synthetic
aacauacaauuuugaucuc

SEQ ID NO: 98849 - RNA, 20 nt, Artificial Sequence
  Synthetic
uaacauacaauuuugaucuc

SEQ ID NO: 98850 - RNA, 21 nt, Artificial Sequence
  Synthetic
cuaacauacaauuuugaucuc

SEQ ID NO: 98851 - RNA, 22 nt, Artificial Sequence
  Synthetic
acuaacauacaauuuugaucuc

SEQ ID NO: 98852 - RNA, 24 nt, Artificial Sequence
  Synthetic
agacuaacauacaauuuugaucuc

SEQ ID NO: 98853 - RNA, 19 nt, Artificial Sequence
  Synthetic
uguacacagacaauaucuc

SEQ ID NO: 98854 - RNA, 20 nt, Artificial Sequence
  Synthetic
uuguacacagacaauaucuc

SEQ ID NO: 98855 - RNA, 21 nt, Artificial Sequence
  Synthetic
uuuguacacagacaauaucuc

SEQ ID NO: 98856 - RNA, 23 nt, Artificial Sequence
  Synthetic
aguuuguacacagacaauaucuc

SEQ ID NO: 98857 - RNA, 24 nt, Artificial Sequence
  Synthetic
aaguuuguacacagacaauaucuc

SEQ ID NO: 98858 - RNA, 18 nt, Artificial Sequence
  Synthetic
uaaauuacucaaacucuc

SEQ ID NO: 98859 - RNA, 19 nt, Artificial Sequence
  Synthetic
cuaaauuacucaaacucuc

SEQ ID NO: 98860 - RNA, 20 nt, Artificial Sequence
  Synthetic
acuaaauuacucaaacucuc

SEQ ID NO: 98861 - RNA, 21 nt, Artificial Sequence
  Synthetic
uacuaaauuacucaaacucuc

SEQ ID NO: 98862 - RNA, 24 nt, Artificial Sequence
  Synthetic
ugguacuaaauuacucaaacucuc

SEQ ID NO: 98863 - RNA, 20 nt, Artificial Sequence
  Synthetic
uggaaaguuacuuaacucuc

SEQ ID NO: 98864 - RNA, 21 nt, Artificial Sequence
  Synthetic
cuggaaaguuacuuaacucuc

SEQ ID NO: 98865 - RNA, 22 nt, Artificial Sequence
  Synthetic
ccuggaaaguuacuuaacucuc

SEQ ID NO: 98866 - RNA, 23 nt, Artificial Sequence
  Synthetic
uccuggaaaguuacuuaacucuc

SEQ ID NO: 98867 - RNA, 24 nt, Artificial Sequence
  Synthetic
cuccuggaaaguuacuuaacucuc

SEQ ID NO: 98868 - RNA, 18 nt, Artificial Sequence
  Synthetic
aacauaugccccacucuc

SEQ ID NO: 98869 - RNA, 19 nt, Artificial Sequence
  Synthetic
aaacauaugccccacucuc

SEQ ID NO: 98870 - RNA, 21 nt, Artificial Sequence
  Synthetic
agaaacauaugccccacucuc

SEQ ID NO: 98871 - RNA, 22 nt, Artificial Sequence
  Synthetic
aagaaacauaugccccacucuc

SEQ ID NO: 98872 - RNA, 23 nt, Artificial Sequence
  Synthetic
uaagaaacauaugccccacucuc

SEQ ID NO: 98873 - RNA, 24 nt, Artificial Sequence
  Synthetic
uuaagaaacauaugccccacucuc

SEQ ID NO: 98874 - RNA, 18 nt, Artificial Sequence
  Synthetic
caguucauuuucacucuc

SEQ ID NO: 98875 - RNA, 19 nt, Artificial Sequence
  Synthetic
ccaguucauuuucacucuc

SEQ ID NO: 98876 - RNA, 20 nt, Artificial Sequence
  Synthetic
uccaguucauuuucacucuc

SEQ ID NO: 98877 - RNA, 21 nt, Artificial Sequence
  Synthetic
cuccaguucauuuucacucuc

SEQ ID NO: 98878 - RNA, 22 nt, Artificial Sequence
  Synthetic
acuccaguucauuuucacucuc

SEQ ID NO: 98879 - RNA, 23 nt, Artificial Sequence
  Synthetic
aacuccaguucauuuucacucuc

SEQ ID NO: 98880 - RNA, 24 nt, Artificial Sequence
  Synthetic
aaacuccaguucauuuucacucuc

SEQ ID NO: 98881 - RNA, 18 nt, Artificial Sequence
  Synthetic
uguccuggccauacucuc

SEQ ID NO: 98882 - RNA, 19 nt, Artificial Sequence
  Synthetic
cuguccuggccauacucuc

SEQ ID NO: 98883 - RNA, 21 nt, Artificial Sequence
  Synthetic
agcuguccuggccauacucuc

SEQ ID NO: 98884 - RNA, 22 nt, Artificial Sequence
  Synthetic
aagcuguccuggccauacucuc

SEQ ID NO: 98885 - RNA, 23 nt, Artificial Sequence
  Synthetic
caagcuguccuggccauacucuc

SEQ ID NO: 98886 - RNA, 24 nt, Artificial Sequence
  Synthetic
acaagcuguccuggccauacucuc

SEQ ID NO: 98887 - RNA, 18 nt, Artificial Sequence
  Synthetic
uuauuuccagccccucuc

SEQ ID NO: 98888 - RNA, 19 nt, Artificial Sequence
  Synthetic
uuuauuuccagccccucuc

SEQ ID NO: 98889 - RNA, 20 nt, Artificial Sequence
  Synthetic
cuuuauuuccagccccucuc

SEQ ID NO: 98890 - RNA, 21 nt, Artificial Sequence
  Synthetic
ccuuuauuuccagccccucuc

SEQ ID NO: 98891 - RNA, 22 nt, Artificial Sequence
  Synthetic
cccuuuauuuccagccccucuc

SEQ ID NO: 98892 - RNA, 23 nt, Artificial Sequence
  Synthetic
ccccuuuauuuccagccccucuc

SEQ ID NO: 98893 - RNA, 24 nt, Artificial Sequence
  Synthetic
accccuuuauuuccagccccucuc

SEQ ID NO: 98894 - RNA, 18 nt, Artificial Sequence
  Synthetic
cugcuucuaagcccucuc

SEQ ID NO: 98895 - RNA, 19 nt, Artificial Sequence
  Synthetic
ccugcuucuaagcccucuc

SEQ ID NO: 98896 - RNA, 20 nt, Artificial Sequence
  Synthetic
uccugcuucuaagcccucuc

SEQ ID NO: 98897 - RNA, 21 nt, Artificial Sequence
  Synthetic
auccugcuucuaagcccucuc

SEQ ID NO: 98898 - RNA, 22 nt, Artificial Sequence
  Synthetic
aauccugcuucuaagcccucuc

SEQ ID NO: 98899 - RNA, 23 nt, Artificial Sequence
  Synthetic
caauccugcuucuaagcccucuc

SEQ ID NO: 98900 - RNA, 24 nt, Artificial Sequence
  Synthetic
ccaauccugcuucuaagcccucuc

SEQ ID NO: 98901 - RNA, 18 nt, Artificial Sequence
  Synthetic
aaaccuugccaagcucuc

SEQ ID NO: 98902 - RNA, 19 nt, Artificial Sequence
  Synthetic
caaaccuugccaagcucuc

SEQ ID NO: 98903 - RNA, 20 nt, Artificial Sequence
  Synthetic
acaaaccuugccaagcucuc

SEQ ID NO: 98904 - RNA, 21 nt, Artificial Sequence
  Synthetic
aacaaaccuugccaagcucuc

SEQ ID NO: 98905 - RNA, 22 nt, Artificial Sequence
  Synthetic
aaacaaaccuugccaagcucuc

SEQ ID NO: 98906 - RNA, 23 nt, Artificial Sequence
  Synthetic
caaacaaaccuugccaagcucuc

SEQ ID NO: 98907 - RNA, 24 nt, Artificial Sequence
  Synthetic
acaaacaaaccuugccaagcucuc

SEQ ID NO: 98908 - RNA, 18 nt, Artificial Sequence
  Synthetic
agcaaaagccccgcucuc

SEQ ID NO: 98909 - RNA, 19 nt, Artificial Sequence
  Synthetic
aagcaaaagccccgcucuc

SEQ ID NO: 98910 - RNA, 20 nt, Artificial Sequence
  Synthetic
aaagcaaaagccccgcucuc

SEQ ID NO: 98911 - RNA, 22 nt, Artificial Sequence
  Synthetic
agaaagcaaaagccccgcucuc

SEQ ID NO: 98912 - RNA, 23 nt, Artificial Sequence
  Synthetic
cagaaagcaaaagccccgcucuc

SEQ ID NO: 98913 - RNA, 24 nt, Artificial Sequence
  Synthetic
ccagaaagcaaaagccccgcucuc

SEQ ID NO: 98914 - RNA, 18 nt, Artificial Sequence
  Synthetic
ccacuugagaaaucucuc

SEQ ID NO: 98915 - RNA, 19 nt, Artificial Sequence
  Synthetic
uccacuugagaaaucucuc

SEQ ID NO: 98916 - RNA, 21 nt, Artificial Sequence
  Synthetic
aguccacuugagaaaucucuc

SEQ ID NO: 98917 - RNA, 22 nt, Artificial Sequence
  Synthetic
aaguccacuugagaaaucucuc

SEQ ID NO: 98918 - RNA, 23 nt, Artificial Sequence
  Synthetic
uaaguccacuugagaaaucucuc

SEQ ID NO: 98919 - RNA, 24 nt, Artificial Sequence
  Synthetic
auaaguccacuugagaaaucucuc

SEQ ID NO: 98920 - RNA, 18 nt, Artificial Sequence
  Synthetic
auauuacaaugaucucuc

SEQ ID NO: 98921 - RNA, 19 nt, Artificial Sequence
  Synthetic
aauauuacaaugaucucuc

SEQ ID NO: 98922 - RNA, 20 nt, Artificial Sequence
  Synthetic
uaauauuacaaugaucucuc

SEQ ID NO: 98923 - RNA, 21 nt, Artificial Sequence
  Synthetic
cuaauauuacaaugaucucuc

SEQ ID NO: 98924 - RNA, 23 nt, Artificial Sequence
  Synthetic
agcuaauauuacaaugaucucuc

SEQ ID NO: 98925 - RNA, 24 nt, Artificial Sequence
  Synthetic
aagcuaauauuacaaugaucucuc

SEQ ID NO: 98926 - RNA, 18 nt, Artificial Sequence
  Synthetic
acuuccugcauaucucuc

SEQ ID NO: 98927 - RNA, 20 nt, Artificial Sequence
  Synthetic
agacuuccugcauaucucuc

SEQ ID NO: 98928 - RNA, 21 nt, Artificial Sequence
  Synthetic
uagacuuccugcauaucucuc

SEQ ID NO: 98929 - RNA, 18 nt, Artificial Sequence
  Synthetic
uucuucaaguguucucuc

SEQ ID NO: 98930 - RNA, 21 nt, Artificial Sequence
  Synthetic
ugguucuucaaguguucucuc

SEQ ID NO: 98931 - RNA, 22 nt, Artificial Sequence
  Synthetic
uugguucuucaaguguucucuc

SEQ ID NO: 98932 - RNA, 23 nt, Artificial Sequence
  Synthetic
uuugguucuucaaguguucucuc

SEQ ID NO: 98933 - RNA, 18 nt, Artificial Sequence
  Synthetic
ugacugccccuaagucuc

SEQ ID NO: 98934 - RNA, 19 nt, Artificial Sequence
  Synthetic
uugacugccccuaagucuc

SEQ ID NO: 98935 - RNA, 20 nt, Artificial Sequence
  Synthetic
auugacugccccuaagucuc

SEQ ID NO: 98936 - RNA, 21 nt, Artificial Sequence
  Synthetic
uauugacugccccuaagucuc

SEQ ID NO: 98937 - RNA, 22 nt, Artificial Sequence
  Synthetic
uuauugacugccccuaagucuc

SEQ ID NO: 98938 - RNA, 23 nt, Artificial Sequence
  Synthetic
uuuauugacugccccuaagucuc

SEQ ID NO: 98939 - RNA, 24 nt, Artificial Sequence
  Synthetic
auuuauugacugccccuaagucuc

SEQ ID NO: 98940 - RNA, 18 nt, Artificial Sequence
  Synthetic
augccuugagaaauucuc

SEQ ID NO: 98941 - RNA, 20 nt, Artificial Sequence
  Synthetic
agaugccuugagaaauucuc

SEQ ID NO: 98942 - RNA, 21 nt, Artificial Sequence
  Synthetic
aagaugccuugagaaauucuc

SEQ ID NO: 98943 - RNA, 23 nt, Artificial Sequence
  Synthetic
cgaagaugccuugagaaauucuc

SEQ ID NO: 98944 - RNA, 24 nt, Artificial Sequence
  Synthetic
ucgaagaugccuugagaaauucuc

SEQ ID NO: 98945 - RNA, 18 nt, Artificial Sequence
  Synthetic
aaagucaucuaaauucuc

SEQ ID NO: 98946 - RNA, 20 nt, Artificial Sequence
  Synthetic
agaaagucaucuaaauucuc

SEQ ID NO: 98947 - RNA, 21 nt, Artificial Sequence
  Synthetic
aagaaagucaucuaaauucuc

SEQ ID NO: 98948 - RNA, 22 nt, Artificial Sequence
  Synthetic
aaagaaagucaucuaaauucuc

SEQ ID NO: 98949 - RNA, 23 nt, Artificial Sequence
  Synthetic
caaagaaagucaucuaaauucuc

SEQ ID NO: 98950 - RNA, 24 nt, Artificial Sequence
  Synthetic
acaaagaaagucaucuaaauucuc

SEQ ID NO: 98951 - RNA, 18 nt, Artificial Sequence
  Synthetic
agcauguucccaauucuc

SEQ ID NO: 98952 - RNA, 19 nt, Artificial Sequence
  Synthetic
uagcauguucccaauucuc

SEQ ID NO: 98953 - RNA, 20 nt, Artificial Sequence
  Synthetic
uuagcauguucccaauucuc

SEQ ID NO: 98954 - RNA, 21 nt, Artificial Sequence
  Synthetic
uuuagcauguucccaauucuc

SEQ ID NO: 98955 - RNA, 22 nt, Artificial Sequence
  Synthetic
auuuagcauguucccaauucuc

SEQ ID NO: 98956 - RNA, 23 nt, Artificial Sequence
  Synthetic
uauuuagcauguucccaauucuc

SEQ ID NO: 98957 - RNA, 22 nt, Artificial Sequence
  Synthetic
agacauuuaagacaacauucuc

SEQ ID NO: 98958 - RNA, 23 nt, Artificial Sequence
  Synthetic
aagacauuuaagacaacauucuc

SEQ ID NO: 98959 - RNA, 24 nt, Artificial Sequence
  Synthetic
caagacauuuaagacaacauucuc

SEQ ID NO: 98960 - RNA, 18 nt, Artificial Sequence
  Synthetic
cuggaaguaaccauucuc

SEQ ID NO: 98961 - RNA, 19 nt, Artificial Sequence
  Synthetic
ccuggaaguaaccauucuc

SEQ ID NO: 98962 - RNA, 20 nt, Artificial Sequence
  Synthetic
cccuggaaguaaccauucuc

SEQ ID NO: 98963 - RNA, 21 nt, Artificial Sequence
  Synthetic
ucccuggaaguaaccauucuc

SEQ ID NO: 98964 - RNA, 22 nt, Artificial Sequence
  Synthetic
cucccuggaaguaaccauucuc

SEQ ID NO: 98965 - RNA, 23 nt, Artificial Sequence
  Synthetic
ucucccuggaaguaaccauucuc

SEQ ID NO: 98966 - RNA, 24 nt, Artificial Sequence
  Synthetic
aucucccuggaaguaaccauucuc

SEQ ID NO: 98967 - RNA, 18 nt, Artificial Sequence
  Synthetic
aauucuguucccauucuc

SEQ ID NO: 98968 - RNA, 20 nt, Artificial Sequence
  Synthetic
agaauucuguucccauucuc

SEQ ID NO: 98969 - RNA, 22 nt, Artificial Sequence
  Synthetic
agagaauucuguucccauucuc

SEQ ID NO: 98970 - RNA, 24 nt, Artificial Sequence
  Synthetic
ugagagaauucuguucccauucuc

SEQ ID NO: 98971 - RNA, 18 nt, Artificial Sequence
  Synthetic
ugccaucuaccccuucuc

SEQ ID NO: 98972 - RNA, 19 nt, Artificial Sequence
  Synthetic
augccaucuaccccuucuc

SEQ ID NO: 98973 - RNA, 20 nt, Artificial Sequence
  Synthetic
caugccaucuaccccuucuc

SEQ ID NO: 98974 - RNA, 21 nt, Artificial Sequence
  Synthetic
ccaugccaucuaccccuucuc

SEQ ID NO: 98975 - RNA, 22 nt, Artificial Sequence
  Synthetic
cccaugccaucuaccccuucuc

SEQ ID NO: 98976 - RNA, 23 nt, Artificial Sequence
  Synthetic
ucccaugccaucuaccccuucuc

SEQ ID NO: 98977 - RNA, 24 nt, Artificial Sequence
  Synthetic
aucccaugccaucuaccccuucuc

SEQ ID NO: 98978 - RNA, 18 nt, Artificial Sequence
  Synthetic
cagaaggugccccuucuc

SEQ ID NO: 98979 - RNA, 20 nt, Artificial Sequence
  Synthetic
ugcagaaggugccccuucuc

SEQ ID NO: 98980 - RNA, 21 nt, Artificial Sequence
  Synthetic
augcagaaggugccccuucuc

SEQ ID NO: 98981 - RNA, 21 nt, Artificial Sequence
  Synthetic
aauuuccuauauccucuucuc

SEQ ID NO: 98982 - RNA, 22 nt, Artificial Sequence
  Synthetic
uaauuuccuauauccucuucuc

SEQ ID NO: 98983 - RNA, 23 nt, Artificial Sequence
  Synthetic
auaauuuccuauauccucuucuc

SEQ ID NO: 98984 - RNA, 24 nt, Artificial Sequence
  Synthetic
uauaauuuccuauauccucuucuc

SEQ ID NO: 98985 - RNA, 18 nt, Artificial Sequence
  Synthetic
auaaucuuuccucuucuc

SEQ ID NO: 98986 - RNA, 19 nt, Artificial Sequence
  Synthetic
aauaaucuuuccucuucuc

SEQ ID NO: 98987 - RNA, 20 nt, Artificial Sequence
  Synthetic
uaauaaucuuuccucuucuc

SEQ ID NO: 98988 - RNA, 21 nt, Artificial Sequence
  Synthetic
auaauaaucuuuccucuucuc

SEQ ID NO: 98989 - RNA, 22 nt, Artificial Sequence
  Synthetic
uauaauaaucuuuccucuucuc

SEQ ID NO: 98990 - RNA, 23 nt, Artificial Sequence
  Synthetic
cuauaauaaucuuuccucuucuc

SEQ ID NO: 98991 - RNA, 24 nt, Artificial Sequence
  Synthetic
ccuauaauaaucuuuccucuucuc

SEQ ID NO: 98992 - RNA, 19 nt, Artificial Sequence
  Synthetic
agaaaugaccguaguucuc

SEQ ID NO: 98993 - RNA, 20 nt, Artificial Sequence
  Synthetic
aagaaaugaccguaguucuc

SEQ ID NO: 98994 - RNA, 21 nt, Artificial Sequence
  Synthetic
aaagaaaugaccguaguucuc

SEQ ID NO: 98995 - RNA, 22 nt, Artificial Sequence
  Synthetic
uaaagaaaugaccguaguucuc

SEQ ID NO: 98996 - RNA, 23 nt, Artificial Sequence
  Synthetic
auaaagaaaugaccguaguucuc

SEQ ID NO: 98997 - RNA, 24 nt, Artificial Sequence
  Synthetic
uauaaagaaaugaccguaguucuc

SEQ ID NO: 98998 - RNA, 18 nt, Artificial Sequence
  Synthetic
caauucaauaaauuucuc

SEQ ID NO: 98999 - RNA, 19 nt, Artificial Sequence
  Synthetic
ucaauucaauaaauuucuc

SEQ ID NO: 99000 - RNA, 20 nt, Artificial Sequence
  Synthetic
aucaauucaauaaauuucuc

SEQ ID NO: 99001 - RNA, 21 nt, Artificial Sequence
  Synthetic
caucaauucaauaaauuucuc

SEQ ID NO: 99002 - RNA, 22 nt, Artificial Sequence
  Synthetic
ucaucaauucaauaaauuucuc

SEQ ID NO: 99003 - RNA, 23 nt, Artificial Sequence
  Synthetic
uucaucaauucaauaaauuucuc

SEQ ID NO: 99004 - RNA, 24 nt, Artificial Sequence
  Synthetic
auucaucaauucaauaaauuucuc

SEQ ID NO: 99005 - RNA, 18 nt, Artificial Sequence
  Synthetic
ucuugaagcauauuucuc

SEQ ID NO: 99006 - RNA, 21 nt, Artificial Sequence
  Synthetic
uggucuugaagcauauuucuc

SEQ ID NO: 99007 - RNA, 22 nt, Artificial Sequence
  Synthetic
auggucuugaagcauauuucuc

SEQ ID NO: 99008 - RNA, 23 nt, Artificial Sequence
  Synthetic
cauggucuugaagcauauuucuc

SEQ ID NO: 99009 - RNA, 24 nt, Artificial Sequence
  Synthetic
acauggucuugaagcauauuucuc

SEQ ID NO: 99010 - RNA, 18 nt, Artificial Sequence
  Synthetic
cuuaaagugauaaaaguc

SEQ ID NO: 99011 - RNA, 19 nt, Artificial Sequence
  Synthetic
acuuaaagugauaaaaguc

SEQ ID NO: 99012 - RNA, 21 nt, Artificial Sequence
  Synthetic
ugacuuaaagugauaaaaguc

SEQ ID NO: 99013 - RNA, 22 nt, Artificial Sequence
  Synthetic
augacuuaaagugauaaaaguc

SEQ ID NO: 99014 - RNA, 23 nt, Artificial Sequence
  Synthetic
uaugacuuaaagugauaaaaguc

SEQ ID NO: 99015 - RNA, 24 nt, Artificial Sequence
  Synthetic
cuaugacuuaaagugauaaaaguc

SEQ ID NO: 99016 - RNA, 18 nt, Artificial Sequence
  Synthetic
aaaguuaauuacaaaguc

SEQ ID NO: 99017 - RNA, 19 nt, Artificial Sequence
  Synthetic
uaaaguuaauuacaaaguc

SEQ ID NO: 99018 - RNA, 22 nt, Artificial Sequence
  Synthetic
agguaaaguuaauuacaaaguc

SEQ ID NO: 99019 - RNA, 23 nt, Artificial Sequence
  Synthetic
aagguaaaguuaauuacaaaguc

SEQ ID NO: 99020 - RNA, 24 nt, Artificial Sequence
  Synthetic
caagguaaaguuaauuacaaaguc

SEQ ID NO: 99021 - RNA, 18 nt, Artificial Sequence
  Synthetic
auuauaggaggcaaaguc

SEQ ID NO: 99022 - RNA, 19 nt, Artificial Sequence
  Synthetic
aauuauaggaggcaaaguc

SEQ ID NO: 99023 - RNA, 20 nt, Artificial Sequence
  Synthetic
aaauuauaggaggcaaaguc

SEQ ID NO: 99024 - RNA, 22 nt, Artificial Sequence
  Synthetic
ugaaauuauaggaggcaaaguc

SEQ ID NO: 99025 - RNA, 24 nt, Artificial Sequence
  Synthetic
ugugaaauuauaggaggcaaaguc

SEQ ID NO: 99026 - RNA, 18 nt, Artificial Sequence
  Synthetic
uuuucaauuuauaaaguc

SEQ ID NO: 99027 - RNA, 19 nt, Artificial Sequence
  Synthetic
auuuucaauuuauaaaguc

SEQ ID NO: 99028 - RNA, 22 nt, Artificial Sequence
  Synthetic
uggauuuucaauuuauaaaguc

SEQ ID NO: 99029 - RNA, 23 nt, Artificial Sequence
  Synthetic
cuggauuuucaauuuauaaaguc

SEQ ID NO: 99030 - RNA, 24 nt, Artificial Sequence
  Synthetic
ccuggauuuucaauuuauaaaguc

SEQ ID NO: 99031 - RNA, 20 nt, Artificial Sequence
  Synthetic
aggggucaguuguagaaguc

SEQ ID NO: 99032 - RNA, 22 nt, Artificial Sequence
  Synthetic
agaggggucaguuguagaaguc

SEQ ID NO: 99033 - RNA, 23 nt, Artificial Sequence
  Synthetic
uagaggggucaguuguagaaguc

SEQ ID NO: 99034 - RNA, 18 nt, Artificial Sequence
  Synthetic
ccugcaagucaggaaguc

SEQ ID NO: 99035 - RNA, 19 nt, Artificial Sequence
  Synthetic
uccugcaagucaggaaguc

SEQ ID NO: 99036 - RNA, 20 nt, Artificial Sequence
  Synthetic
uuccugcaagucaggaaguc

SEQ ID NO: 99037 - RNA, 21 nt, Artificial Sequence
  Synthetic
cuuccugcaagucaggaaguc

SEQ ID NO: 99038 - RNA, 22 nt, Artificial Sequence
  Synthetic
acuuccugcaagucaggaaguc

SEQ ID NO: 99039 - RNA, 23 nt, Artificial Sequence
  Synthetic
aacuuccugcaagucaggaaguc

SEQ ID NO: 99040 - RNA, 24 nt, Artificial Sequence
  Synthetic
uaacuuccugcaagucaggaaguc

SEQ ID NO: 99041 - RNA, 18 nt, Artificial Sequence
  Synthetic
aauuaagggcuugaaguc

SEQ ID NO: 99042 - RNA, 19 nt, Artificial Sequence
  Synthetic
caauuaagggcuugaaguc

SEQ ID NO: 99043 - RNA, 20 nt, Artificial Sequence
  Synthetic
ucaauuaagggcuugaaguc

SEQ ID NO: 99044 - RNA, 21 nt, Artificial Sequence
  Synthetic
aucaauuaagggcuugaaguc

SEQ ID NO: 99045 - RNA, 22 nt, Artificial Sequence
  Synthetic
uaucaauuaagggcuugaaguc

SEQ ID NO: 99046 - RNA, 23 nt, Artificial Sequence
  Synthetic
uuaucaauuaagggcuugaaguc

SEQ ID NO: 99047 - RNA, 24 nt, Artificial Sequence
  Synthetic
auuaucaauuaagggcuugaaguc

SEQ ID NO: 99048 - RNA, 18 nt, Artificial Sequence
  Synthetic
cccaacauaaucuaaguc

SEQ ID NO: 99049 - RNA, 19 nt, Artificial Sequence
  Synthetic
ucccaacauaaucuaaguc

SEQ ID NO: 99050 - RNA, 20 nt, Artificial Sequence
  Synthetic
cucccaacauaaucuaaguc

SEQ ID NO: 99051 - RNA, 21 nt, Artificial Sequence
  Synthetic
ccucccaacauaaucuaaguc

SEQ ID NO: 99052 - RNA, 22 nt, Artificial Sequence
  Synthetic
cccucccaacauaaucuaaguc

SEQ ID NO: 99053 - RNA, 23 nt, Artificial Sequence
  Synthetic
ccccucccaacauaaucuaaguc

SEQ ID NO: 99054 - RNA, 18 nt, Artificial Sequence
  Synthetic
aacucaguuacuuaaguc

SEQ ID NO: 99055 - RNA, 21 nt, Artificial Sequence
  Synthetic
aggaacucaguuacuuaaguc

SEQ ID NO: 99056 - RNA, 22 nt, Artificial Sequence
  Synthetic
caggaacucaguuacuuaaguc

SEQ ID NO: 99057 - RNA, 24 nt, Artificial Sequence
  Synthetic
ugcaggaacucaguuacuuaaguc

SEQ ID NO: 99058 - RNA, 19 nt, Artificial Sequence
  Synthetic
uguuuaccuugcuuaaguc

SEQ ID NO: 99059 - RNA, 23 nt, Artificial Sequence
  Synthetic
uggguguuuaccuugcuuaaguc

SEQ ID NO: 99060 - RNA, 18 nt, Artificial Sequence
  Synthetic
ugauuucaagacacaguc

SEQ ID NO: 99061 - RNA, 19 nt, Artificial Sequence
  Synthetic
uugauuucaagacacaguc

SEQ ID NO: 99062 - RNA, 20 nt, Artificial Sequence
  Synthetic
uuugauuucaagacacaguc

SEQ ID NO: 99063 - RNA, 21 nt, Artificial Sequence
  Synthetic
auuugauuucaagacacaguc

SEQ ID NO: 99064 - RNA, 22 nt, Artificial Sequence
  Synthetic
aauuugauuucaagacacaguc

SEQ ID NO: 99065 - RNA, 23 nt, Artificial Sequence
  Synthetic
aaauuugauuucaagacacaguc

SEQ ID NO: 99066 - RNA, 24 nt, Artificial Sequence
  Synthetic
caaauuugauuucaagacacaguc

SEQ ID NO: 99067 - RNA, 22 nt, Artificial Sequence
  Synthetic
aggaaaggcaggagacacaguc

SEQ ID NO: 99068 - RNA, 24 nt, Artificial Sequence
  Synthetic
ugaggaaaggcaggagacacaguc

SEQ ID NO: 99069 - RNA, 19 nt, Artificial Sequence
  Synthetic
ugugaacuacaaagcaguc

SEQ ID NO: 99070 - RNA, 20 nt, Artificial Sequence
  Synthetic
uugugaacuacaaagcaguc

SEQ ID NO: 99071 - RNA, 21 nt, Artificial Sequence
  Synthetic
auugugaacuacaaagcaguc

SEQ ID NO: 99072 - RNA, 22 nt, Artificial Sequence
  Synthetic
uauugugaacuacaaagcaguc

SEQ ID NO: 99073 - RNA, 23 nt, Artificial Sequence
  Synthetic
cuauugugaacuacaaagcaguc

SEQ ID NO: 99074 - RNA, 24 nt, Artificial Sequence
  Synthetic
ccuauugugaacuacaaagcaguc

SEQ ID NO: 99075 - RNA, 18 nt, Artificial Sequence
  Synthetic
cggcucuucauggcaguc

SEQ ID NO: 99076 - RNA, 19 nt, Artificial Sequence
  Synthetic
acggcucuucauggcaguc

SEQ ID NO: 99077 - RNA, 22 nt, Artificial Sequence
  Synthetic
uggacggcucuucauggcaguc

SEQ ID NO: 99078 - RNA, 23 nt, Artificial Sequence
  Synthetic
cuggacggcucuucauggcaguc

SEQ ID NO: 99079 - RNA, 24 nt, Artificial Sequence
  Synthetic
ucuggacggcucuucauggcaguc

SEQ ID NO: 99080 - RNA, 18 nt, Artificial Sequence
  Synthetic
cuuauauaccaugcaguc

SEQ ID NO: 99081 - RNA, 19 nt, Artificial Sequence
  Synthetic
acuuauauaccaugcaguc

SEQ ID NO: 99082 - RNA, 20 nt, Artificial Sequence
  Synthetic
uacuuauauaccaugcaguc

SEQ ID NO: 99083 - RNA, 21 nt, Artificial Sequence
  Synthetic
uuacuuauauaccaugcaguc

SEQ ID NO: 99084 - RNA, 22 nt, Artificial Sequence
  Synthetic
cuuacuuauauaccaugcaguc

SEQ ID NO: 99085 - RNA, 23 nt, Artificial Sequence
  Synthetic
ucuuacuuauauaccaugcaguc

SEQ ID NO: 99086 - RNA, 24 nt, Artificial Sequence
  Synthetic
uucuuacuuauauaccaugcaguc

SEQ ID NO: 99087 - RNA, 18 nt, Artificial Sequence
  Synthetic
aucuauucaccaucaguc

SEQ ID NO: 99088 - RNA, 19 nt, Artificial Sequence
  Synthetic
aaucuauucaccaucaguc

SEQ ID NO: 99089 - RNA, 20 nt, Artificial Sequence
  Synthetic
uaaucuauucaccaucaguc

SEQ ID NO: 99090 - RNA, 21 nt, Artificial Sequence
  Synthetic
auaaucuauucaccaucaguc

SEQ ID NO: 99091 - RNA, 23 nt, Artificial Sequence
  Synthetic
agauaaucuauucaccaucaguc

SEQ ID NO: 99092 - RNA, 24 nt, Artificial Sequence
  Synthetic
uagauaaucuauucaccaucaguc

SEQ ID NO: 99093 - RNA, 19 nt, Artificial Sequence
  Synthetic
agacugaaauuccagaguc

SEQ ID NO: 99094 - RNA, 20 nt, Artificial Sequence
  Synthetic
aagacugaaauuccagaguc

SEQ ID NO: 99095 - RNA, 21 nt, Artificial Sequence
  Synthetic
caagacugaaauuccagaguc

SEQ ID NO: 99096 - RNA, 23 nt, Artificial Sequence
  Synthetic
agcaagacugaaauuccagaguc

SEQ ID NO: 99097 - RNA, 18 nt, Artificial Sequence
  Synthetic
ugcagagaagggagaguc

SEQ ID NO: 99098 - RNA, 19 nt, Artificial Sequence
  Synthetic
cugcagagaagggagaguc

SEQ ID NO: 99099 - RNA, 20 nt, Artificial Sequence
  Synthetic
acugcagagaagggagaguc

SEQ ID NO: 99100 - RNA, 21 nt, Artificial Sequence
  Synthetic
cacugcagagaagggagaguc

SEQ ID NO: 99101 - RNA, 22 nt, Artificial Sequence
  Synthetic
ccacugcagagaagggagaguc

SEQ ID NO: 99102 - RNA, 23 nt, Artificial Sequence
  Synthetic
accacugcagagaagggagaguc

SEQ ID NO: 99103 - RNA, 24 nt, Artificial Sequence
  Synthetic
aaccacugcagagaagggagaguc

SEQ ID NO: 99104 - RNA, 22 nt, Artificial Sequence
  Synthetic
ugauggcuccaagccuggaguc

SEQ ID NO: 99105 - RNA, 23 nt, Artificial Sequence
  Synthetic
cugauggcuccaagccuggaguc

SEQ ID NO: 99106 - RNA, 24 nt, Artificial Sequence
  Synthetic
ucugauggcuccaagccuggaguc

SEQ ID NO: 99107 - RNA, 18 nt, Artificial Sequence
  Synthetic
cugaaguugcuuggaguc

SEQ ID NO: 99108 - RNA, 20 nt, Artificial Sequence
  Synthetic
ugcugaaguugcuuggaguc

SEQ ID NO: 99109 - RNA, 21 nt, Artificial Sequence
  Synthetic
uugcugaaguugcuuggaguc

SEQ ID NO: 99110 - RNA, 22 nt, Artificial Sequence
  Synthetic
uuugcugaaguugcuuggaguc

SEQ ID NO: 99111 - RNA, 23 nt, Artificial Sequence
  Synthetic
auuugcugaaguugcuuggaguc

SEQ ID NO: 99112 - RNA, 24 nt, Artificial Sequence
  Synthetic
aauuugcugaaguugcuuggaguc

SEQ ID NO: 99113 - RNA, 18 nt, Artificial Sequence
  Synthetic
ucuagucuagaaugaguc

SEQ ID NO: 99114 - RNA, 21 nt, Artificial Sequence
  Synthetic
aggucuagucuagaaugaguc

SEQ ID NO: 99115 - RNA, 22 nt, Artificial Sequence
  Synthetic
caggucuagucuagaaugaguc

SEQ ID NO: 99116 - RNA, 23 nt, Artificial Sequence
  Synthetic
ccaggucuagucuagaaugaguc

SEQ ID NO: 99117 - RNA, 18 nt, Artificial Sequence
  Synthetic
ugacuaguugcaugaguc

SEQ ID NO: 99118 - RNA, 19 nt, Artificial Sequence
  Synthetic
uugacuaguugcaugaguc

SEQ ID NO: 99119 - RNA, 20 nt, Artificial Sequence
  Synthetic
uuugacuaguugcaugaguc

SEQ ID NO: 99120 - RNA, 21 nt, Artificial Sequence
  Synthetic
auuugacuaguugcaugaguc

SEQ ID NO: 99121 - RNA, 22 nt, Artificial Sequence
  Synthetic
cauuugacuaguugcaugaguc

SEQ ID NO: 99122 - RNA, 23 nt, Artificial Sequence
  Synthetic
acauuugacuaguugcaugaguc

SEQ ID NO: 99123 - RNA, 19 nt, Artificial Sequence
  Synthetic
agagcaugccaucugaguc

SEQ ID NO: 99124 - RNA, 20 nt, Artificial Sequence
  Synthetic
cagagcaugccaucugaguc

SEQ ID NO: 99125 - RNA, 22 nt, Artificial Sequence
  Synthetic
agcagagcaugccaucugaguc

SEQ ID NO: 99126 - RNA, 18 nt, Artificial Sequence
  Synthetic
aagacaaucaugugaguc

SEQ ID NO: 99127 - RNA, 20 nt, Artificial Sequence
  Synthetic
agaagacaaucaugugaguc

SEQ ID NO: 99128 - RNA, 21 nt, Artificial Sequence
  Synthetic
aagaagacaaucaugugaguc

SEQ ID NO: 99129 - RNA, 22 nt, Artificial Sequence
  Synthetic
caagaagacaaucaugugaguc

SEQ ID NO: 99130 - RNA, 24 nt, Artificial Sequence
  Synthetic
agcaagaagacaaucaugugaguc

SEQ ID NO: 99131 - RNA, 18 nt, Artificial Sequence
  Synthetic
ugaguauauucuugaguc

SEQ ID NO: 99132 - RNA, 19 nt, Artificial Sequence
  Synthetic
cugaguauauucuugaguc

SEQ ID NO: 99133 - RNA, 20 nt, Artificial Sequence
  Synthetic
ucugaguauauucuugaguc

SEQ ID NO: 99134 - RNA, 21 nt, Artificial Sequence
  Synthetic
aucugaguauauucuugaguc

SEQ ID NO: 99135 - RNA, 22 nt, Artificial Sequence
  Synthetic
aaucugaguauauucuugaguc

SEQ ID NO: 99136 - RNA, 23 nt, Artificial Sequence
  Synthetic
uaaucugaguauauucuugaguc

SEQ ID NO: 99137 - RNA, 18 nt, Artificial Sequence
  Synthetic
agucuagcuucuugaguc

SEQ ID NO: 99138 - RNA, 19 nt, Artificial Sequence
  Synthetic
aagucuagcuucuugaguc

SEQ ID NO: 99139 - RNA, 20 nt, Artificial Sequence
  Synthetic
aaagucuagcuucuugaguc

SEQ ID NO: 99140 - RNA, 21 nt, Artificial Sequence
  Synthetic
aaaagucuagcuucuugaguc

SEQ ID NO: 99141 - RNA, 23 nt, Artificial Sequence
  Synthetic
ugaaaagucuagcuucuugaguc

SEQ ID NO: 99142 - RNA, 18 nt, Artificial Sequence
  Synthetic
auugugccaggucuaguc

SEQ ID NO: 99143 - RNA, 19 nt, Artificial Sequence
  Synthetic
aauugugccaggucuaguc

SEQ ID NO: 99144 - RNA, 20 nt, Artificial Sequence
  Synthetic
uaauugugccaggucuaguc

SEQ ID NO: 99145 - RNA, 21 nt, Artificial Sequence
  Synthetic
uuaauugugccaggucuaguc

SEQ ID NO: 99146 - RNA, 22 nt, Artificial Sequence
  Synthetic
uuuaauugugccaggucuaguc

SEQ ID NO: 99147 - RNA, 23 nt, Artificial Sequence
  Synthetic
uuuuaauugugccaggucuaguc

SEQ ID NO: 99148 - RNA, 24 nt, Artificial Sequence
  Synthetic
auuuuaauugugccaggucuaguc

SEQ ID NO: 99149 - RNA, 18 nt, Artificial Sequence
  Synthetic
aguacuguuauucuaguc

SEQ ID NO: 99150 - RNA, 19 nt, Artificial Sequence
  Synthetic
uaguacuguuauucuaguc

SEQ ID NO: 99151 - RNA, 20 nt, Artificial Sequence
  Synthetic
auaguacuguuauucuaguc

SEQ ID NO: 99152 - RNA, 21 nt, Artificial Sequence
  Synthetic
aauaguacuguuauucuaguc

SEQ ID NO: 99153 - RNA, 23 nt, Artificial Sequence
  Synthetic
agaauaguacuguuauucuaguc

SEQ ID NO: 99154 - RNA, 24 nt, Artificial Sequence
  Synthetic
aagaauaguacuguuauucuaguc

SEQ ID NO: 99155 - RNA, 18 nt, Artificial Sequence
  Synthetic
ucuuugcugcaauuaguc

SEQ ID NO: 99156 - RNA, 19 nt, Artificial Sequence
  Synthetic
cucuuugcugcaauuaguc

SEQ ID NO: 99157 - RNA, 22 nt, Artificial Sequence
  Synthetic
aggcucuuugcugcaauuaguc

SEQ ID NO: 99158 - RNA, 23 nt, Artificial Sequence
  Synthetic
caggcucuuugcugcaauuaguc

SEQ ID NO: 99159 - RNA, 24 nt, Artificial Sequence
  Synthetic
ccaggcucuuugcugcaauuaguc

SEQ ID NO: 99160 - RNA, 18 nt, Artificial Sequence
  Synthetic
uaauaaauuuacuuaguc

SEQ ID NO: 99161 - RNA, 19 nt, Artificial Sequence
  Synthetic
uuaauaaauuuacuuaguc

SEQ ID NO: 99162 - RNA, 20 nt, Artificial Sequence
  Synthetic
auuaauaaauuuacuuaguc

SEQ ID NO: 99163 - RNA, 21 nt, Artificial Sequence
  Synthetic
cauuaauaaauuuacuuaguc

SEQ ID NO: 99164 - RNA, 22 nt, Artificial Sequence
  Synthetic
acauuaauaaauuuacuuaguc

SEQ ID NO: 99165 - RNA, 23 nt, Artificial Sequence
  Synthetic
uacauuaauaaauuuacuuaguc

SEQ ID NO: 99166 - RNA, 24 nt, Artificial Sequence
  Synthetic
uuacauuaauaaauuuacuuaguc

SEQ ID NO: 99167 - RNA, 19 nt, Artificial Sequence
  Synthetic
ugagaauaauuucuuaguc

SEQ ID NO: 99168 - RNA, 20 nt, Artificial Sequence
  Synthetic
augagaauaauuucuuaguc

SEQ ID NO: 99169 - RNA, 21 nt, Artificial Sequence
  Synthetic
uaugagaauaauuucuuaguc

SEQ ID NO: 99170 - RNA, 22 nt, Artificial Sequence
  Synthetic
uuaugagaauaauuucuuaguc

SEQ ID NO: 99171 - RNA, 23 nt, Artificial Sequence
  Synthetic
auuaugagaauaauuucuuaguc

SEQ ID NO: 99172 - RNA, 24 nt, Artificial Sequence
  Synthetic
uauuaugagaauaauuucuuaguc

SEQ ID NO: 99173 - RNA, 18 nt, Artificial Sequence
  Synthetic
uuugacuagcaguuaguc

SEQ ID NO: 99174 - RNA, 19 nt, Artificial Sequence
  Synthetic
cuuugacuagcaguuaguc

SEQ ID NO: 99175 - RNA, 20 nt, Artificial Sequence
  Synthetic
acuuugacuagcaguuaguc

SEQ ID NO: 99176 - RNA, 21 nt, Artificial Sequence
  Synthetic
aacuuugacuagcaguuaguc

SEQ ID NO: 99177 - RNA, 22 nt, Artificial Sequence
  Synthetic
caacuuugacuagcaguuaguc

SEQ ID NO: 99178 - RNA, 24 nt, Artificial Sequence
  Synthetic
agcaacuuugacuagcaguuaguc

SEQ ID NO: 99179 - RNA, 19 nt, Artificial Sequence
  Synthetic
agaaaaaaaaccaaagguc

SEQ ID NO: 99180 - RNA, 20 nt, Artificial Sequence
  Synthetic
cagaaaaaaaaccaaagguc

SEQ ID NO: 99181 - RNA, 21 nt, Artificial Sequence
  Synthetic
ucagaaaaaaaaccaaagguc

SEQ ID NO: 99182 - RNA, 22 nt, Artificial Sequence
  Synthetic
uucagaaaaaaaaccaaagguc

SEQ ID NO: 99183 - RNA, 24 nt, Artificial Sequence
  Synthetic
uguucagaaaaaaaaccaaagguc

SEQ ID NO: 99184 - RNA, 18 nt, Artificial Sequence
  Synthetic
uggcaguuucugaagguc

SEQ ID NO: 99185 - RNA, 19 nt, Artificial Sequence
  Synthetic
uuggcaguuucugaagguc

SEQ ID NO: 99186 - RNA, 20 nt, Artificial Sequence
  Synthetic
uuuggcaguuucugaagguc

SEQ ID NO: 99187 - RNA, 21 nt, Artificial Sequence
  Synthetic
auuuggcaguuucugaagguc

SEQ ID NO: 99188 - RNA, 22 nt, Artificial Sequence
  Synthetic
uauuuggcaguuucugaagguc

SEQ ID NO: 99189 - RNA, 23 nt, Artificial Sequence
  Synthetic
uuauuuggcaguuucugaagguc

SEQ ID NO: 99190 - RNA, 24 nt, Artificial Sequence
  Synthetic
auuauuuggcaguuucugaagguc

SEQ ID NO: 99191 - RNA, 18 nt, Artificial Sequence
  Synthetic
aucucacugaagcagguc

SEQ ID NO: 99192 - RNA, 19 nt, Artificial Sequence
  Synthetic
caucucacugaagcagguc

SEQ ID NO: 99193 - RNA, 20 nt, Artificial Sequence
  Synthetic
ccaucucacugaagcagguc

SEQ ID NO: 99194 - RNA, 21 nt, Artificial Sequence
  Synthetic
accaucucacugaagcagguc

SEQ ID NO: 99195 - RNA, 23 nt, Artificial Sequence
  Synthetic
agaccaucucacugaagcagguc

SEQ ID NO: 99196 - RNA, 24 nt, Artificial Sequence
  Synthetic
uagaccaucucacugaagcagguc

SEQ ID NO: 99197 - RNA, 21 nt, Artificial Sequence
  Synthetic
uuucaaaauuucuuucagguc

SEQ ID NO: 99198 - RNA, 22 nt, Artificial Sequence
  Synthetic
auuucaaaauuucuuucagguc

SEQ ID NO: 99199 - RNA, 23 nt, Artificial Sequence
  Synthetic
aauuucaaaauuucuuucagguc

SEQ ID NO: 99200 - RNA, 18 nt, Artificial Sequence
  Synthetic
cuuaaucuucuggagguc

SEQ ID NO: 99201 - RNA, 19 nt, Artificial Sequence
  Synthetic
ccuuaaucuucuggagguc

SEQ ID NO: 99202 - RNA, 20 nt, Artificial Sequence
  Synthetic
cccuuaaucuucuggagguc

SEQ ID NO: 99203 - RNA, 22 nt, Artificial Sequence
  Synthetic
agcccuuaaucuucuggagguc

SEQ ID NO: 99204 - RNA, 23 nt, Artificial Sequence
  Synthetic
cagcccuuaaucuucuggagguc

SEQ ID NO: 99205 - RNA, 24 nt, Artificial Sequence
  Synthetic
acagcccuuaaucuucuggagguc

SEQ ID NO: 99206 - RNA, 18 nt, Artificial Sequence
  Synthetic
auuaagcauugugagguc

SEQ ID NO: 99207 - RNA, 19 nt, Artificial Sequence
  Synthetic
uauuaagcauugugagguc

SEQ ID NO: 99208 - RNA, 22 nt, Artificial Sequence
  Synthetic
ugguauuaagcauugugagguc

SEQ ID NO: 99209 - RNA, 23 nt, Artificial Sequence
  Synthetic
augguauuaagcauugugagguc

SEQ ID NO: 99210 - RNA, 24 nt, Artificial Sequence
  Synthetic
caugguauuaagcauugugagguc

SEQ ID NO: 99211 - RNA, 18 nt, Artificial Sequence
  Synthetic
uuggguaacacugcgguc

SEQ ID NO: 99212 - RNA, 19 nt, Artificial Sequence
  Synthetic
uuuggguaacacugcgguc

SEQ ID NO: 99213 - RNA, 20 nt, Artificial Sequence
  Synthetic
cuuuggguaacacugcgguc

SEQ ID NO: 99214 - RNA, 21 nt, Artificial Sequence
  Synthetic
acuuuggguaacacugcgguc

SEQ ID NO: 99215 - RNA, 22 nt, Artificial Sequence
  Synthetic
uacuuuggguaacacugcgguc

SEQ ID NO: 99216 - RNA, 23 nt, Artificial Sequence
  Synthetic
auacuuuggguaacacugcgguc

SEQ ID NO: 99217 - RNA, 24 nt, Artificial Sequence
  Synthetic
cauacuuuggguaacacugcgguc

SEQ ID NO: 99218 - RNA, 19 nt, Artificial Sequence
  Synthetic
ugaagaauucaaagggguc

SEQ ID NO: 99219 - RNA, 20 nt, Artificial Sequence
  Synthetic
cugaagaauucaaagggguc

SEQ ID NO: 99220 - RNA, 21 nt, Artificial Sequence
  Synthetic
acugaagaauucaaagggguc

SEQ ID NO: 99221 - RNA, 22 nt, Artificial Sequence
  Synthetic
aacugaagaauucaaagggguc

SEQ ID NO: 99222 - RNA, 23 nt, Artificial Sequence
  Synthetic
aaacugaagaauucaaagggguc

SEQ ID NO: 99223 - RNA, 18 nt, Artificial Sequence
  Synthetic
uuuuucuuuaucuggguc

SEQ ID NO: 99224 - RNA, 19 nt, Artificial Sequence
  Synthetic
uuuuuucuuuaucuggguc

SEQ ID NO: 99225 - RNA, 20 nt, Artificial Sequence
  Synthetic
auuuuuucuuuaucuggguc

SEQ ID NO: 99226 - RNA, 21 nt, Artificial Sequence
  Synthetic
aauuuuuucuuuaucuggguc

SEQ ID NO: 99227 - RNA, 22 nt, Artificial Sequence
  Synthetic
aaauuuuuucuuuaucuggguc

SEQ ID NO: 99228 - RNA, 23 nt, Artificial Sequence
  Synthetic
aaaauuuuuucuuuaucuggguc

SEQ ID NO: 99229 - RNA, 24 nt, Artificial Sequence
  Synthetic
aaaaauuuuuucuuuaucuggguc

SEQ ID NO: 99230 - RNA, 18 nt, Artificial Sequence
  Synthetic
ucaagauugugguggguc

SEQ ID NO: 99231 - RNA, 19 nt, Artificial Sequence
  Synthetic
aucaagauugugguggguc

SEQ ID NO: 99232 - RNA, 23 nt, Artificial Sequence
  Synthetic
ugggaucaagauugugguggguc

SEQ ID NO: 99233 - RNA, 24 nt, Artificial Sequence
  Synthetic
cugggaucaagauugugguggguc

SEQ ID NO: 99234 - RNA, 18 nt, Artificial Sequence
  Synthetic
cuucuuauucuguggguc

SEQ ID NO: 99235 - RNA, 20 nt, Artificial Sequence
  Synthetic
ugcuucuuauucuguggguc

SEQ ID NO: 99236 - RNA, 21 nt, Artificial Sequence
  Synthetic
cugcuucuuauucuguggguc

SEQ ID NO: 99237 - RNA, 22 nt, Artificial Sequence
  Synthetic
ucugcuucuuauucuguggguc

SEQ ID NO: 99238 - RNA, 23 nt, Artificial Sequence
  Synthetic
aucugcuucuuauucuguggguc

SEQ ID NO: 99239 - RNA, 24 nt, Artificial Sequence
  Synthetic
uaucugcuucuuauucuguggguc

SEQ ID NO: 99240 - RNA, 18 nt, Artificial Sequence
  Synthetic
ucaauggaaccucugguc

SEQ ID NO: 99241 - RNA, 19 nt, Artificial Sequence
  Synthetic
cucaauggaaccucugguc

SEQ ID NO: 99242 - RNA, 21 nt, Artificial Sequence
  Synthetic
agcucaauggaaccucugguc

SEQ ID NO: 99243 - RNA, 22 nt, Artificial Sequence
  Synthetic
cagcucaauggaaccucugguc

SEQ ID NO: 99244 - RNA, 23 nt, Artificial Sequence
  Synthetic
ucagcucaauggaaccucugguc

SEQ ID NO: 99245 - RNA, 24 nt, Artificial Sequence
  Synthetic
cucagcucaauggaaccucugguc

SEQ ID NO: 99246 - RNA, 18 nt, Artificial Sequence
  Synthetic
augaacauauaggugguc

SEQ ID NO: 99247 - RNA, 19 nt, Artificial Sequence
  Synthetic
aaugaacauauaggugguc

SEQ ID NO: 99248 - RNA, 21 nt, Artificial Sequence
  Synthetic
agaaugaacauauaggugguc

SEQ ID NO: 99249 - RNA, 22 nt, Artificial Sequence
  Synthetic
aagaaugaacauauaggugguc

SEQ ID NO: 99250 - RNA, 23 nt, Artificial Sequence
  Synthetic
aaagaaugaacauauaggugguc

SEQ ID NO: 99251 - RNA, 24 nt, Artificial Sequence
  Synthetic
caaagaaugaacauauaggugguc

SEQ ID NO: 99252 - RNA, 18 nt, Artificial Sequence
  Synthetic
aaaaauauuguauugguc

SEQ ID NO: 99253 - RNA, 19 nt, Artificial Sequence
  Synthetic
caaaaauauuguauugguc

SEQ ID NO: 99254 - RNA, 22 nt, Artificial Sequence
  Synthetic
aggcaaaaauauuguauugguc

SEQ ID NO: 99255 - RNA, 23 nt, Artificial Sequence
  Synthetic
uaggcaaaaauauuguauugguc

SEQ ID NO: 99256 - RNA, 24 nt, Artificial Sequence
  Synthetic
uuaggcaaaaauauuguauugguc

SEQ ID NO: 99257 - RNA, 18 nt, Artificial Sequence
  Synthetic
ugaaauaccauaaauguc

SEQ ID NO: 99258 - RNA, 20 nt, Artificial Sequence
  Synthetic
cgugaaauaccauaaauguc

SEQ ID NO: 99259 - RNA, 21 nt, Artificial Sequence
  Synthetic
ucgugaaauaccauaaauguc

SEQ ID NO: 99260 - RNA, 22 nt, Artificial Sequence
  Synthetic
aucgugaaauaccauaaauguc

SEQ ID NO: 99261 - RNA, 23 nt, Artificial Sequence
  Synthetic
aaucgugaaauaccauaaauguc

SEQ ID NO: 99262 - RNA, 18 nt, Artificial Sequence
  Synthetic
accaaaauuauuaauguc

SEQ ID NO: 99263 - RNA, 19 nt, Artificial Sequence
  Synthetic
uaccaaaauuauuaauguc

SEQ ID NO: 99264 - RNA, 20 nt, Artificial Sequence
  Synthetic
uuaccaaaauuauuaauguc

SEQ ID NO: 99265 - RNA, 21 nt, Artificial Sequence
  Synthetic
cuuaccaaaauuauuaauguc

SEQ ID NO: 99266 - RNA, 23 nt, Artificial Sequence
  Synthetic
ugcuuaccaaaauuauuaauguc

SEQ ID NO: 99267 - RNA, 24 nt, Artificial Sequence
  Synthetic
augcuuaccaaaauuauuaauguc

SEQ ID NO: 99268 - RNA, 18 nt, Artificial Sequence
  Synthetic
aagauauaauuuaauguc

SEQ ID NO: 99269 - RNA, 19 nt, Artificial Sequence
  Synthetic
uaagauauaauuuaauguc

SEQ ID NO: 99270 - RNA, 20 nt, Artificial Sequence
  Synthetic
cuaagauauaauuuaauguc

SEQ ID NO: 99271 - RNA, 23 nt, Artificial Sequence
  Synthetic
aggcuaagauauaauuuaauguc

SEQ ID NO: 99272 - RNA, 24 nt, Artificial Sequence
  Synthetic
uaggcuaagauauaauuuaauguc

SEQ ID NO: 99273 - RNA, 18 nt, Artificial Sequence
  Synthetic
ccccugugaaaucauguc

SEQ ID NO: 99274 - RNA, 19 nt, Artificial Sequence
  Synthetic
accccugugaaaucauguc

SEQ ID NO: 99275 - RNA, 20 nt, Artificial Sequence
  Synthetic
uaccccugugaaaucauguc

SEQ ID NO: 99276 - RNA, 21 nt, Artificial Sequence
  Synthetic
auaccccugugaaaucauguc

SEQ ID NO: 99277 - RNA, 22 nt, Artificial Sequence
  Synthetic
uauaccccugugaaaucauguc

SEQ ID NO: 99278 - RNA, 24 nt, Artificial Sequence
  Synthetic
uguauaccccugugaaaucauguc

SEQ ID NO: 99279 - RNA, 18 nt, Artificial Sequence
  Synthetic
auaaagaagggagauguc

SEQ ID NO: 99280 - RNA, 19 nt, Artificial Sequence
  Synthetic
aauaaagaagggagauguc

SEQ ID NO: 99281 - RNA, 20 nt, Artificial Sequence
  Synthetic
aaauaaagaagggagauguc

SEQ ID NO: 99282 - RNA, 18 nt, Artificial Sequence
  Synthetic
aguuuaaguguggauguc

SEQ ID NO: 99283 - RNA, 20 nt, Artificial Sequence
  Synthetic
agaguuuaaguguggauguc

SEQ ID NO: 99284 - RNA, 21 nt, Artificial Sequence
  Synthetic
cagaguuuaaguguggauguc

SEQ ID NO: 99285 - RNA, 22 nt, Artificial Sequence
  Synthetic
acagaguuuaaguguggauguc

SEQ ID NO: 99286 - RNA, 24 nt, Artificial Sequence
  Synthetic
ugacagaguuuaaguguggauguc

SEQ ID NO: 99287 - RNA, 19 nt, Artificial Sequence
  Synthetic
uguuaguuagcuugauguc

SEQ ID NO: 99288 - RNA, 20 nt, Artificial Sequence
  Synthetic
cuguuaguuagcuugauguc

SEQ ID NO: 99289 - RNA, 21 nt, Artificial Sequence
  Synthetic
ucuguuaguuagcuugauguc

SEQ ID NO: 99290 - RNA, 22 nt, Artificial Sequence
  Synthetic
uucuguuaguuagcuugauguc

SEQ ID NO: 99291 - RNA, 23 nt, Artificial Sequence
  Synthetic
uuucuguuaguuagcuugauguc

SEQ ID NO: 99292 - RNA, 24 nt, Artificial Sequence
  Synthetic
uuuucuguuaguuagcuugauguc

SEQ ID NO: 99293 - RNA, 18 nt, Artificial Sequence
  Synthetic
uuucuucucagauauguc

SEQ ID NO: 99294 - RNA, 19 nt, Artificial Sequence
  Synthetic
auuucuucucagauauguc

SEQ ID NO: 99295 - RNA, 20 nt, Artificial Sequence
  Synthetic
aauuucuucucagauauguc

SEQ ID NO: 99296 - RNA, 22 nt, Artificial Sequence
  Synthetic
agaauuucuucucagauauguc

SEQ ID NO: 99297 - RNA, 23 nt, Artificial Sequence
  Synthetic
aagaauuucuucucagauauguc

SEQ ID NO: 99298 - RNA, 24 nt, Artificial Sequence
  Synthetic
aaagaauuucuucucagauauguc

SEQ ID NO: 99299 - RNA, 18 nt, Artificial Sequence
  Synthetic
aaguagcacagcuauguc

SEQ ID NO: 99300 - RNA, 19 nt, Artificial Sequence
  Synthetic
uaaguagcacagcuauguc

SEQ ID NO: 99301 - RNA, 20 nt, Artificial Sequence
  Synthetic
auaaguagcacagcuauguc

SEQ ID NO: 99302 - RNA, 21 nt, Artificial Sequence
  Synthetic
uauaaguagcacagcuauguc

SEQ ID NO: 99303 - RNA, 22 nt, Artificial Sequence
  Synthetic
cuauaaguagcacagcuauguc

SEQ ID NO: 99304 - RNA, 23 nt, Artificial Sequence
  Synthetic
ucuauaaguagcacagcuauguc

SEQ ID NO: 99305 - RNA, 18 nt, Artificial Sequence
  Synthetic
aucaugauucuguauguc

SEQ ID NO: 99306 - RNA, 20 nt, Artificial Sequence
  Synthetic
agaucaugauucuguauguc

SEQ ID NO: 99307 - RNA, 22 nt, Artificial Sequence
  Synthetic
agagaucaugauucuguauguc

SEQ ID NO: 99308 - RNA, 24 nt, Artificial Sequence
  Synthetic
ugagagaucaugauucuguauguc

SEQ ID NO: 99309 - RNA, 18 nt, Artificial Sequence
  Synthetic
ucacauucuaucacuguc

SEQ ID NO: 99310 - RNA, 19 nt, Artificial Sequence
  Synthetic
uucacauucuaucacuguc

SEQ ID NO: 99311 - RNA, 20 nt, Artificial Sequence
  Synthetic
uuucacauucuaucacuguc

SEQ ID NO: 99312 - RNA, 22 nt, Artificial Sequence
  Synthetic
aguuucacauucuaucacuguc

SEQ ID NO: 99313 - RNA, 23 nt, Artificial Sequence
  Synthetic
aaguuucacauucuaucacuguc

SEQ ID NO: 99314 - RNA, 18 nt, Artificial Sequence
  Synthetic
aucuauacaccuacuguc

SEQ ID NO: 99315 - RNA, 19 nt, Artificial Sequence
  Synthetic
caucuauacaccuacuguc

SEQ ID NO: 99316 - RNA, 20 nt, Artificial Sequence
  Synthetic
ccaucuauacaccuacuguc

SEQ ID NO: 99317 - RNA, 21 nt, Artificial Sequence
  Synthetic
uccaucuauacaccuacuguc

SEQ ID NO: 99318 - RNA, 22 nt, Artificial Sequence
  Synthetic
uuccaucuauacaccuacuguc

SEQ ID NO: 99319 - RNA, 23 nt, Artificial Sequence
  Synthetic
uuuccaucuauacaccuacuguc

SEQ ID NO: 99320 - RNA, 24 nt, Artificial Sequence
  Synthetic
uuuuccaucuauacaccuacuguc

SEQ ID NO: 99321 - RNA, 18 nt, Artificial Sequence
  Synthetic
ucuuuuuauuuggcuguc

SEQ ID NO: 99322 - RNA, 19 nt, Artificial Sequence
  Synthetic
cucuuuuuauuuggcuguc

SEQ ID NO: 99323 - RNA, 20 nt, Artificial Sequence
  Synthetic
ucucuuuuuauuuggcuguc

SEQ ID NO: 99324 - RNA, 21 nt, Artificial Sequence
  Synthetic
uucucuuuuuauuuggcuguc

SEQ ID NO: 99325 - RNA, 22 nt, Artificial Sequence
  Synthetic
uuucucuuuuuauuuggcuguc

SEQ ID NO: 99326 - RNA, 23 nt, Artificial Sequence
  Synthetic
auuucucuuuuuauuuggcuguc

SEQ ID NO: 99327 - RNA, 24 nt, Artificial Sequence
  Synthetic
uauuucucuuuuuauuuggcuguc

SEQ ID NO: 99328 - RNA, 19 nt, Artificial Sequence
  Synthetic
ugauucaugcauaucuguc

SEQ ID NO: 99329 - RNA, 20 nt, Artificial Sequence
  Synthetic
uugauucaugcauaucuguc

SEQ ID NO: 99330 - RNA, 21 nt, Artificial Sequence
  Synthetic
uuugauucaugcauaucuguc

SEQ ID NO: 99331 - RNA, 22 nt, Artificial Sequence
  Synthetic
auuugauucaugcauaucuguc

SEQ ID NO: 99332 - RNA, 23 nt, Artificial Sequence
  Synthetic
aauuugauucaugcauaucuguc

SEQ ID NO: 99333 - RNA, 24 nt, Artificial Sequence
  Synthetic
uaauuugauucaugcauaucuguc

SEQ ID NO: 99334 - RNA, 18 nt, Artificial Sequence
  Synthetic
ucauguugaacuucuguc

SEQ ID NO: 99335 - RNA, 19 nt, Artificial Sequence
  Synthetic
aucauguugaacuucuguc

SEQ ID NO: 99336 - RNA, 20 nt, Artificial Sequence
  Synthetic
caucauguugaacuucuguc

SEQ ID NO: 99337 - RNA, 21 nt, Artificial Sequence
  Synthetic
ucaucauguugaacuucuguc

SEQ ID NO: 99338 - RNA, 23 nt, Artificial Sequence
  Synthetic
ugucaucauguugaacuucuguc

SEQ ID NO: 99339 - RNA, 24 nt, Artificial Sequence
  Synthetic
uugucaucauguugaacuucuguc

SEQ ID NO: 99340 - RNA, 18 nt, Artificial Sequence
  Synthetic
aacacuuuugagaguguc

SEQ ID NO: 99341 - RNA, 20 nt, Artificial Sequence
  Synthetic
ugaacacuuuugagaguguc

SEQ ID NO: 99342 - RNA, 21 nt, Artificial Sequence
  Synthetic
cugaacacuuuugagaguguc

SEQ ID NO: 99343 - RNA, 22 nt, Artificial Sequence
  Synthetic
ccugaacacuuuugagaguguc

SEQ ID NO: 99344 - RNA, 23 nt, Artificial Sequence
  Synthetic
accugaacacuuuugagaguguc

SEQ ID NO: 99345 - RNA, 24 nt, Artificial Sequence
  Synthetic
aaccugaacacuuuugagaguguc

SEQ ID NO: 99346 - RNA, 18 nt, Artificial Sequence
  Synthetic
cgaauuccuugggguguc

SEQ ID NO: 99347 - RNA, 19 nt, Artificial Sequence
  Synthetic
acgaauuccuugggguguc

SEQ ID NO: 99348 - RNA, 20 nt, Artificial Sequence
  Synthetic
aacgaauuccuugggguguc

SEQ ID NO: 99349 - RNA, 21 nt, Artificial Sequence
  Synthetic
aaacgaauuccuugggguguc

SEQ ID NO: 99350 - RNA, 22 nt, Artificial Sequence
  Synthetic
uaaacgaauuccuugggguguc

SEQ ID NO: 99351 - RNA, 23 nt, Artificial Sequence
  Synthetic
uuaaacgaauuccuugggguguc

SEQ ID NO: 99352 - RNA, 18 nt, Artificial Sequence
  Synthetic
cacguagcuuaugguguc

SEQ ID NO: 99353 - RNA, 19 nt, Artificial Sequence
  Synthetic
acacguagcuuaugguguc

SEQ ID NO: 99354 - RNA, 20 nt, Artificial Sequence
  Synthetic
uacacguagcuuaugguguc

SEQ ID NO: 99355 - RNA, 21 nt, Artificial Sequence
  Synthetic
auacacguagcuuaugguguc

SEQ ID NO: 99356 - RNA, 22 nt, Artificial Sequence
  Synthetic
cauacacguagcuuaugguguc

SEQ ID NO: 99357 - RNA, 23 nt, Artificial Sequence
  Synthetic
ccauacacguagcuuaugguguc

SEQ ID NO: 99358 - RNA, 24 nt, Artificial Sequence
  Synthetic
uccauacacguagcuuaugguguc

SEQ ID NO: 99359 - RNA, 18 nt, Artificial Sequence
  Synthetic
aggagaguguuuuguguc

SEQ ID NO: 99360 - RNA, 19 nt, Artificial Sequence
  Synthetic
aaggagaguguuuuguguc

SEQ ID NO: 99361 - RNA, 22 nt, Artificial Sequence
  Synthetic
aggaaggagaguguuuuguguc

SEQ ID NO: 99362 - RNA, 24 nt, Artificial Sequence
  Synthetic
ugaggaaggagaguguuuuguguc

SEQ ID NO: 99363 - RNA, 18 nt, Artificial Sequence
  Synthetic
cagauuucuaaaauuguc

SEQ ID NO: 99364 - RNA, 19 nt, Artificial Sequence
  Synthetic
acagauuucuaaaauuguc

SEQ ID NO: 99365 - RNA, 20 nt, Artificial Sequence
  Synthetic
cacagauuucuaaaauuguc

SEQ ID NO: 99366 - RNA, 19 nt, Artificial Sequence
  Synthetic
uguauacaugggacuuguc

SEQ ID NO: 99367 - RNA, 21 nt, Artificial Sequence
  Synthetic
aguguauacaugggacuuguc

SEQ ID NO: 99368 - RNA, 22 nt, Artificial Sequence
  Synthetic
uaguguauacaugggacuuguc

SEQ ID NO: 99369 - RNA, 23 nt, Artificial Sequence
  Synthetic
auaguguauacaugggacuuguc

SEQ ID NO: 99370 - RNA, 24 nt, Artificial Sequence
  Synthetic
uauaguguauacaugggacuuguc

SEQ ID NO: 99371 - RNA, 18 nt, Artificial Sequence
  Synthetic
ugauacccaauucuuguc

SEQ ID NO: 99372 - RNA, 19 nt, Artificial Sequence
  Synthetic
augauacccaauucuuguc

SEQ ID NO: 99373 - RNA, 20 nt, Artificial Sequence
  Synthetic
caugauacccaauucuuguc

SEQ ID NO: 99374 - RNA, 21 nt, Artificial Sequence
  Synthetic
ccaugauacccaauucuuguc

SEQ ID NO: 99375 - RNA, 22 nt, Artificial Sequence
  Synthetic
accaugauacccaauucuuguc

SEQ ID NO: 99376 - RNA, 23 nt, Artificial Sequence
  Synthetic
uaccaugauacccaauucuuguc

SEQ ID NO: 99377 - RNA, 24 nt, Artificial Sequence
  Synthetic
uuaccaugauacccaauucuuguc

SEQ ID NO: 99378 - RNA, 21 nt, Artificial Sequence
  Synthetic
aaagaaguuaaacaauuuguc

SEQ ID NO: 99379 - RNA, 22 nt, Artificial Sequence
  Synthetic
aaaagaaguuaaacaauuuguc

SEQ ID NO: 99380 - RNA, 23 nt, Artificial Sequence
  Synthetic
aaaaagaaguuaaacaauuuguc

SEQ ID NO: 99381 - RNA, 18 nt, Artificial Sequence
  Synthetic
uucugaaagagauuuguc

SEQ ID NO: 99382 - RNA, 19 nt, Artificial Sequence
  Synthetic
auucugaaagagauuuguc

SEQ ID NO: 99383 - RNA, 20 nt, Artificial Sequence
  Synthetic
uauucugaaagagauuuguc

SEQ ID NO: 99384 - RNA, 22 nt, Artificial Sequence
  Synthetic
uguauucugaaagagauuuguc

SEQ ID NO: 99385 - RNA, 23 nt, Artificial Sequence
  Synthetic
auguauucugaaagagauuuguc

SEQ ID NO: 99386 - RNA, 24 nt, Artificial Sequence
  Synthetic
cauguauucugaaagagauuuguc

SEQ ID NO: 99387 - RNA, 18 nt, Artificial Sequence
  Synthetic
ucucccaauaacuuuguc

SEQ ID NO: 99388 - RNA, 19 nt, Artificial Sequence
  Synthetic
uucucccaauaacuuuguc

SEQ ID NO: 99389 - RNA, 20 nt, Artificial Sequence
  Synthetic
auucucccaauaacuuuguc

SEQ ID NO: 99390 - RNA, 21 nt, Artificial Sequence
  Synthetic
uauucucccaauaacuuuguc

SEQ ID NO: 99391 - RNA, 22 nt, Artificial Sequence
  Synthetic
uuauucucccaauaacuuuguc

SEQ ID NO: 99392 - RNA, 23 nt, Artificial Sequence
  Synthetic
auuauucucccaauaacuuuguc

SEQ ID NO: 99393 - RNA, 24 nt, Artificial Sequence
  Synthetic
aauuauucucccaauaacuuuguc

SEQ ID NO: 99394 - RNA, 19 nt, Artificial Sequence
  Synthetic
cgggcuggaagaguuuguc

SEQ ID NO: 99395 - RNA, 20 nt, Artificial Sequence
  Synthetic
acgggcuggaagaguuuguc

SEQ ID NO: 99396 - RNA, 21 nt, Artificial Sequence
  Synthetic
cacgggcuggaagaguuuguc

SEQ ID NO: 99397 - RNA, 22 nt, Artificial Sequence
  Synthetic
ccacgggcuggaagaguuuguc

SEQ ID NO: 99398 - RNA, 23 nt, Artificial Sequence
  Synthetic
accacgggcuggaagaguuuguc

SEQ ID NO: 99399 - RNA, 18 nt, Artificial Sequence
  Synthetic
augacugcuugguuuguc

SEQ ID NO: 99400 - RNA, 19 nt, Artificial Sequence
  Synthetic
caugacugcuugguuuguc

SEQ ID NO: 99401 - RNA, 22 nt, Artificial Sequence
  Synthetic
uggcaugacugcuugguuuguc

SEQ ID NO: 99402 - RNA, 23 nt, Artificial Sequence
  Synthetic
uuggcaugacugcuugguuuguc

SEQ ID NO: 99403 - RNA, 24 nt, Artificial Sequence
  Synthetic
auuggcaugacugcuugguuuguc

SEQ ID NO: 99404 - RNA, 19 nt, Artificial Sequence
  Synthetic
agguacagacuuguuuguc

SEQ ID NO: 99405 - RNA, 20 nt, Artificial Sequence
  Synthetic
uagguacagacuuguuuguc

SEQ ID NO: 99406 - RNA, 21 nt, Artificial Sequence
  Synthetic
auagguacagacuuguuuguc

SEQ ID NO: 99407 - RNA, 22 nt, Artificial Sequence
  Synthetic
cauagguacagacuuguuuguc

SEQ ID NO: 99408 - RNA, 23 nt, Artificial Sequence
  Synthetic
acauagguacagacuuguuuguc

SEQ ID NO: 99409 - RNA, 24 nt, Artificial Sequence
  Synthetic
cacauagguacagacuuguuuguc

SEQ ID NO: 99410 - RNA, 18 nt, Artificial Sequence
  Synthetic
acagaaaauccuuuuguc

SEQ ID NO: 99411 - RNA, 19 nt, Artificial Sequence
  Synthetic
aacagaaaauccuuuuguc

SEQ ID NO: 99412 - RNA, 20 nt, Artificial Sequence
  Synthetic
aaacagaaaauccuuuuguc

SEQ ID NO: 99413 - RNA, 21 nt, Artificial Sequence
  Synthetic
aaaacagaaaauccuuuuguc

SEQ ID NO: 99414 - RNA, 23 nt, Artificial Sequence
  Synthetic
ugaaaacagaaaauccuuuuguc

SEQ ID NO: 99415 - RNA, 24 nt, Artificial Sequence
  Synthetic
uugaaaacagaaaauccuuuuguc

SEQ ID NO: 99416 - RNA, 18 nt, Artificial Sequence
  Synthetic
aaacaagcuguuuuuguc

SEQ ID NO: 99417 - RNA, 20 nt, Artificial Sequence
  Synthetic
agaaacaagcuguuuuuguc

SEQ ID NO: 99418 - RNA, 23 nt, Artificial Sequence
  Synthetic
aggagaaacaagcuguuuuuguc

SEQ ID NO: 99419 - RNA, 24 nt, Artificial Sequence
  Synthetic
uaggagaaacaagcuguuuuuguc

SEQ ID NO: 99420 - RNA, 18 nt, Artificial Sequence
  Synthetic
cccagauaauuuuuuguc

SEQ ID NO: 99421 - RNA, 19 nt, Artificial Sequence
  Synthetic
ucccagauaauuuuuuguc

SEQ ID NO: 99422 - RNA, 19 nt, Artificial Sequence
  Synthetic
agucacaaugcaaaaauuc

SEQ ID NO: 99423 - RNA, 20 nt, Artificial Sequence
  Synthetic
cagucacaaugcaaaaauuc

SEQ ID NO: 99424 - RNA, 21 nt, Artificial Sequence
  Synthetic
ccagucacaaugcaaaaauuc

SEQ ID NO: 99425 - RNA, 22 nt, Artificial Sequence
  Synthetic
uccagucacaaugcaaaaauuc

SEQ ID NO: 99426 - RNA, 23 nt, Artificial Sequence
  Synthetic
auccagucacaaugcaaaaauuc

SEQ ID NO: 99427 - RNA, 24 nt, Artificial Sequence
  Synthetic
cauccagucacaaugcaaaaauuc

SEQ ID NO: 99428 - RNA, 21 nt, Artificial Sequence
  Synthetic
cguugcucaggcuaaaaauuc

SEQ ID NO: 99429 - RNA, 22 nt, Artificial Sequence
  Synthetic
ccguugcucaggcuaaaaauuc

SEQ ID NO: 99430 - RNA, 23 nt, Artificial Sequence
  Synthetic
uccguugcucaggcuaaaaauuc

SEQ ID NO: 99431 - RNA, 24 nt, Artificial Sequence
  Synthetic
uuccguugcucaggcuaaaaauuc

SEQ ID NO: 99432 - RNA, 18 nt, Artificial Sequence
  Synthetic
uuacucuaagcaaaauuc

SEQ ID NO: 99433 - RNA, 20 nt, Artificial Sequence
  Synthetic
uguuacucuaagcaaaauuc

SEQ ID NO: 99434 - RNA, 21 nt, Artificial Sequence
  Synthetic
cuguuacucuaagcaaaauuc

SEQ ID NO: 99435 - RNA, 22 nt, Artificial Sequence
  Synthetic
ucuguuacucuaagcaaaauuc

SEQ ID NO: 99436 - RNA, 23 nt, Artificial Sequence
  Synthetic
aucuguuacucuaagcaaaauuc

SEQ ID NO: 99437 - RNA, 24 nt, Artificial Sequence
  Synthetic
aaucuguuacucuaagcaaaauuc

SEQ ID NO: 99438 - RNA, 18 nt, Artificial Sequence
  Synthetic
acauaucuauuaaaauuc

SEQ ID NO: 99439 - RNA, 19 nt, Artificial Sequence
  Synthetic
cacauaucuauuaaaauuc

SEQ ID NO: 99440 - RNA, 20 nt, Artificial Sequence
  Synthetic
ccacauaucuauuaaaauuc

SEQ ID NO: 99441 - RNA, 21 nt, Artificial Sequence
  Synthetic
cccacauaucuauuaaaauuc

SEQ ID NO: 99442 - RNA, 22 nt, Artificial Sequence
  Synthetic
acccacauaucuauuaaaauuc

SEQ ID NO: 99443 - RNA, 23 nt, Artificial Sequence
  Synthetic
aacccacauaucuauuaaaauuc

SEQ ID NO: 99444 - RNA, 24 nt, Artificial Sequence
  Synthetic
aaacccacauaucuauuaaaauuc

SEQ ID NO: 99445 - RNA, 18 nt, Artificial Sequence
  Synthetic
agguacccaaagaaauuc

SEQ ID NO: 99446 - RNA, 19 nt, Artificial Sequence
  Synthetic
aagguacccaaagaaauuc

SEQ ID NO: 99447 - RNA, 22 nt, Artificial Sequence
  Synthetic
uggaagguacccaaagaaauuc

SEQ ID NO: 99448 - RNA, 23 nt, Artificial Sequence
  Synthetic
auggaagguacccaaagaaauuc

SEQ ID NO: 99449 - RNA, 24 nt, Artificial Sequence
  Synthetic
uauggaagguacccaaagaaauuc

SEQ ID NO: 99450 - RNA, 21 nt, Artificial Sequence
  Synthetic
auuauaaaaaaauagaaauuc

SEQ ID NO: 99451 - RNA, 22 nt, Artificial Sequence
  Synthetic
aauuauaaaaaaauagaaauuc

SEQ ID NO: 99452 - RNA, 23 nt, Artificial Sequence
  Synthetic
aaauuauaaaaaaauagaaauuc

SEQ ID NO: 99453 - RNA, 24 nt, Artificial Sequence
  Synthetic
uaaauuauaaaaaaauagaaauuc

SEQ ID NO: 99454 - RNA, 19 nt, Artificial Sequence
  Synthetic
uguaucuauucugaaauuc

SEQ ID NO: 99455 - RNA, 20 nt, Artificial Sequence
  Synthetic
cuguaucuauucugaaauuc

SEQ ID NO: 99456 - RNA, 21 nt, Artificial Sequence
  Synthetic
ucuguaucuauucugaaauuc

SEQ ID NO: 99457 - RNA, 22 nt, Artificial Sequence
  Synthetic
uucuguaucuauucugaaauuc

SEQ ID NO: 99458 - RNA, 23 nt, Artificial Sequence
  Synthetic
cuucuguaucuauucugaaauuc

SEQ ID NO: 99459 - RNA, 18 nt, Artificial Sequence
  Synthetic
augugacaaaauaaauuc

SEQ ID NO: 99460 - RNA, 19 nt, Artificial Sequence
  Synthetic
caugugacaaaauaaauuc

SEQ ID NO: 99461 - RNA, 20 nt, Artificial Sequence
  Synthetic
acaugugacaaaauaaauuc

SEQ ID NO: 99462 - RNA, 21 nt, Artificial Sequence
  Synthetic
cacaugugacaaaauaaauuc

SEQ ID NO: 99463 - RNA, 22 nt, Artificial Sequence
  Synthetic
ucacaugugacaaaauaaauuc

SEQ ID NO: 99464 - RNA, 23 nt, Artificial Sequence
  Synthetic
cucacaugugacaaaauaaauuc

SEQ ID NO: 99465 - RNA, 24 nt, Artificial Sequence
  Synthetic
ccucacaugugacaaaauaaauuc

SEQ ID NO: 99466 - RNA, 18 nt, Artificial Sequence
  Synthetic
acacagggacauaaauuc

SEQ ID NO: 99467 - RNA, 19 nt, Artificial Sequence
  Synthetic
cacacagggacauaaauuc

SEQ ID NO: 99468 - RNA, 20 nt, Artificial Sequence
  Synthetic
acacacagggacauaaauuc

SEQ ID NO: 99469 - RNA, 21 nt, Artificial Sequence
  Synthetic
cacacacagggacauaaauuc

SEQ ID NO: 99470 - RNA, 22 nt, Artificial Sequence
  Synthetic
ccacacacagggacauaaauuc

SEQ ID NO: 99471 - RNA, 23 nt, Artificial Sequence
  Synthetic
cccacacacagggacauaaauuc

SEQ ID NO: 99472 - RNA, 24 nt, Artificial Sequence
  Synthetic
ucccacacacagggacauaaauuc

SEQ ID NO: 99473 - RNA, 21 nt, Artificial Sequence
  Synthetic
uugaucugaauauuuaaauuc

SEQ ID NO: 99474 - RNA, 22 nt, Artificial Sequence
  Synthetic
auugaucugaauauuuaaauuc

SEQ ID NO: 99475 - RNA, 23 nt, Artificial Sequence
  Synthetic
cauugaucugaauauuuaaauuc

SEQ ID NO: 99476 - RNA, 24 nt, Artificial Sequence
  Synthetic
ccauugaucugaauauuuaaauuc

SEQ ID NO: 99477 - RNA, 18 nt, Artificial Sequence
  Synthetic
cuccaagauccacaauuc

SEQ ID NO: 99478 - RNA, 19 nt, Artificial Sequence
  Synthetic
ucuccaagauccacaauuc

SEQ ID NO: 99479 - RNA, 20 nt, Artificial Sequence
  Synthetic
aucuccaagauccacaauuc

SEQ ID NO: 99480 - RNA, 21 nt, Artificial Sequence
  Synthetic
aaucuccaagauccacaauuc

SEQ ID NO: 99481 - RNA, 22 nt, Artificial Sequence
  Synthetic
uaaucuccaagauccacaauuc

SEQ ID NO: 99482 - RNA, 23 nt, Artificial Sequence
  Synthetic
auaaucuccaagauccacaauuc

SEQ ID NO: 99483 - RNA, 24 nt, Artificial Sequence
  Synthetic
uauaaucuccaagauccacaauuc

SEQ ID NO: 99484 - RNA, 19 nt, Artificial Sequence
  Synthetic
uggaaaaguaagacaauuc

SEQ ID NO: 99485 - RNA, 20 nt, Artificial Sequence
  Synthetic
cuggaaaaguaagacaauuc

SEQ ID NO: 99486 - RNA, 21 nt, Artificial Sequence
  Synthetic
ccuggaaaaguaagacaauuc

SEQ ID NO: 99487 - RNA, 22 nt, Artificial Sequence
  Synthetic
accuggaaaaguaagacaauuc

SEQ ID NO: 99488 - RNA, 24 nt, Artificial Sequence
  Synthetic
agaccuggaaaaguaagacaauuc

SEQ ID NO: 99489 - RNA, 18 nt, Artificial Sequence
  Synthetic
ugaugagcucuacaauuc

SEQ ID NO: 99490 - RNA, 21 nt, Artificial Sequence
  Synthetic
aggugaugagcucuacaauuc

SEQ ID NO: 99491 - RNA, 22 nt, Artificial Sequence
  Synthetic
aaggugaugagcucuacaauuc

SEQ ID NO: 99492 - RNA, 23 nt, Artificial Sequence
  Synthetic
caaggugaugagcucuacaauuc

SEQ ID NO: 99493 - RNA, 22 nt, Artificial Sequence
  Synthetic
ugguuauucuacuuuccaauuc

SEQ ID NO: 99494 - RNA, 23 nt, Artificial Sequence
  Synthetic
uugguuauucuacuuuccaauuc

SEQ ID NO: 99495 - RNA, 24 nt, Artificial Sequence
  Synthetic
uuugguuauucuacuuuccaauuc

SEQ ID NO: 99496 - RNA, 18 nt, Artificial Sequence
  Synthetic
uuuaaacuucagcaauuc

SEQ ID NO: 99497 - RNA, 20 nt, Artificial Sequence
  Synthetic
uguuuaaacuucagcaauuc

SEQ ID NO: 99498 - RNA, 21 nt, Artificial Sequence
  Synthetic
uuguuuaaacuucagcaauuc

SEQ ID NO: 99499 - RNA, 22 nt, Artificial Sequence
  Synthetic
auuguuuaaacuucagcaauuc

SEQ ID NO: 99500 - RNA, 24 nt, Artificial Sequence
  Synthetic
ugauuguuuaaacuucagcaauuc

SEQ ID NO: 99501 - RNA, 18 nt, Artificial Sequence
  Synthetic
uuuuuuagaacucaauuc

SEQ ID NO: 99502 - RNA, 19 nt, Artificial Sequence
  Synthetic
auuuuuuagaacucaauuc

SEQ ID NO: 99503 - RNA, 20 nt, Artificial Sequence
  Synthetic
cauuuuuuagaacucaauuc

SEQ ID NO: 99504 - RNA, 21 nt, Artificial Sequence
  Synthetic
ucauuuuuuagaacucaauuc

SEQ ID NO: 99505 - RNA, 22 nt, Artificial Sequence
  Synthetic
cucauuuuuuagaacucaauuc

SEQ ID NO: 99506 - RNA, 23 nt, Artificial Sequence
  Synthetic
ccucauuuuuuagaacucaauuc

SEQ ID NO: 99507 - RNA, 24 nt, Artificial Sequence
  Synthetic
uccucauuuuuuagaacucaauuc

SEQ ID NO: 99508 - RNA, 18 nt, Artificial Sequence
  Synthetic
cgucagugccaagaauuc

SEQ ID NO: 99509 - RNA, 19 nt, Artificial Sequence
  Synthetic
ucgucagugccaagaauuc

SEQ ID NO: 99510 - RNA, 20 nt, Artificial Sequence
  Synthetic
uucgucagugccaagaauuc

SEQ ID NO: 99511 - RNA, 21 nt, Artificial Sequence
  Synthetic
cuucgucagugccaagaauuc

SEQ ID NO: 99512 - RNA, 22 nt, Artificial Sequence
  Synthetic
ucuucgucagugccaagaauuc

SEQ ID NO: 99513 - RNA, 23 nt, Artificial Sequence
  Synthetic
cucuucgucagugccaagaauuc

SEQ ID NO: 99514 - RNA, 24 nt, Artificial Sequence
  Synthetic
ucucuucgucagugccaagaauuc

SEQ ID NO: 99515 - RNA, 18 nt, Artificial Sequence
  Synthetic
uucagaugccuugaauuc

SEQ ID NO: 99516 - RNA, 19 nt, Artificial Sequence
  Synthetic
cuucagaugccuugaauuc

SEQ ID NO: 99517 - RNA, 20 nt, Artificial Sequence
  Synthetic
acuucagaugccuugaauuc

SEQ ID NO: 99518 - RNA, 21 nt, Artificial Sequence
  Synthetic
uacuucagaugccuugaauuc

SEQ ID NO: 99519 - RNA, 22 nt, Artificial Sequence
  Synthetic
uuacuucagaugccuugaauuc

SEQ ID NO: 99520 - RNA, 23 nt, Artificial Sequence
  Synthetic
auuacuucagaugccuugaauuc

SEQ ID NO: 99521 - RNA, 24 nt, Artificial Sequence
  Synthetic
aauuacuucagaugccuugaauuc

SEQ ID NO: 99522 - RNA, 18 nt, Artificial Sequence
  Synthetic
aguguucaaaaauaauuc

SEQ ID NO: 99523 - RNA, 20 nt, Artificial Sequence
  Synthetic
ugaguguucaaaaauaauuc

SEQ ID NO: 99524 - RNA, 21 nt, Artificial Sequence
  Synthetic
uugaguguucaaaaauaauuc
